United States Patent Application Publication US 2007/0042381 A1 - sequence listing, part 19

SEQ ID NO: 815928 - RNA, 22 nt, Human
ugaugaaaauaugauucugagg

SEQ ID NO: 815929 - RNA, 22 nt, Human
gcaucuaaacuugcaucauugu

SEQ ID NO: 815930 - RNA, 22 nt, Human
gagguagccacagauagagacu

SEQ ID NO: 815931 - RNA, 22 nt, Human
aaaaacuguaauuacuuuugca

SEQ ID NO: 815932 - RNA, 22 nt, Human
cagcugccccgcuggcugacca

SEQ ID NO: 815933 - RNA, 22 nt, Human
uagcccagcaugagcagagcug

SEQ ID NO: 815934 - RNA, 22 nt, Human
cccaggagaauauaauguucuu

SEQ ID NO: 815935 - RNA, 22 nt, Human
guugaaugaaucauucuaugua

SEQ ID NO: 815936 - RNA, 21 nt, Human
uuugaaagcuacaucuauagc

SEQ ID NO: 815937 - RNA, 22 nt, Human
uggaaggaaagguagcagagaa

SEQ ID NO: 815938 - RNA, 22 nt, Human
uucaacuauuaugaauaaaauu

SEQ ID NO: 815939 - RNA, 19 nt, Human
ggcagucucaagcagcaca

SEQ ID NO: 815940 - RNA, 22 nt, Human
cuggccagaguuggagggugug

SEQ ID NO: 815941 - RNA, 22 nt, Human
ucaggagacuuaugucacagug

SEQ ID NO: 815942 - RNA, 22 nt, Human
ugaaggaaugaguauacuguuu

SEQ ID NO: 815943 - RNA, 22 nt, Human
cauuuccugucuggaggucaaa

SEQ ID NO: 815944 - RNA, 22 nt, Human
augcuguguggucaaguuaauu

SEQ ID NO: 815945 - RNA, 22 nt, Human
aucauucuauuguugagcugcc

SEQ ID NO: 815946 - RNA, 22 nt, Human
auguuauaguuauaaaaugagg

SEQ ID NO: 815947 - RNA, 22 nt, Human
gggcagcugccccucucugggc

SEQ ID NO: 815948 - RNA, 22 nt, Human
aaggcagucugguuucaaagca

SEQ ID NO: 815949 - RNA, 22 nt, Human
aggcagacaaggacacaguggg

SEQ ID NO: 815950 - RNA, 22 nt, Human
ugcauauuguccuugauauuau

SEQ ID NO: 815951 - RNA, 22 nt, Human
ccaggcugugguuuagauagag

SEQ ID NO: 815952 - RNA, 22 nt, Human
auaguuugugaaacacagcagu

SEQ ID NO: 815953 - RNA, 22 nt, Human
aguuggagugaacaugagauug

SEQ ID NO: 815954 - RNA, 22 nt, Human
cauuuguaucugggcugcugug

SEQ ID NO: 815955 - RNA, 22 nt, Human
uggagaggaaagugcaguuuug

SEQ ID NO: 815956 - RNA, 22 nt, Human
aggcagcguagcaaggcuagua

SEQ ID NO: 815957 - RNA, 22 nt, Human
ugaacucucucaagugacagaa

SEQ ID NO: 815958 - RNA, 22 nt, Human
uuuauucaucaucuguucauau

SEQ ID NO: 815959 - RNA, 22 nt, Human
uucaacuagauuuauacaauuc

SEQ ID NO: 815960 - RNA, 20 nt, Human
aggaggcauagucuggaaag

SEQ ID NO: 815961 - RNA, 22 nt, Human
gauggcaggugauagccgaguc

SEQ ID NO: 815962 - RNA, 22 nt, Human
caagauggacauaaggagagaa

SEQ ID NO: 815963 - RNA, 22 nt, Human
uuuucaguuccaucucugcucu

SEQ ID NO: 815964 - RNA, 22 nt, Human
uccaggaggcucugguugacgu

SEQ ID NO: 815965 - RNA, 22 nt, Human
cuucucagcauuuugucagucu

SEQ ID NO: 815966 - RNA, 22 nt, Human
agaccaagugcaggugccacua

SEQ ID NO: 815967 - RNA, 22 nt, Human
augaaacacacacgcgcauacu

SEQ ID NO: 815968 - RNA, 22 nt, Human
acccaggacucucuuccaguag

SEQ ID NO: 815969 - RNA, 22 nt, Human
caguuucuuggaugccaauuuc

SEQ ID NO: 815970 - RNA, 22 nt, Human
ccaggagacuguacugauauuu

SEQ ID NO: 815971 - RNA, 20 nt, Human
cuucuucagccuaugcuuca

SEQ ID NO: 815972 - RNA, 22 nt, Human
gcccaggauucuuucuuccuua

SEQ ID NO: 815973 - RNA, 22 nt, Human
agcuggcagucauccuagugag

SEQ ID NO: 815974 - RNA, 22 nt, Human
uaagcugugggagauuggcaua

SEQ ID NO: 815975 - RNA, 22 nt, Human
aguggacucuucccagugcuug

SEQ ID NO: 815976 - RNA, 22 nt, Human
augaaggcaguuaaacgucauc

SEQ ID NO: 815977 - RNA, 19 nt, Human
aaggcagcaguagcaucca

SEQ ID NO: 815978 - RNA, 22 nt, Human
gcaggagacuggcugugguagu

SEQ ID NO: 815979 - RNA, 22 nt, Human
aauagcucacugauuucucuuu

SEQ ID NO: 815980 - RNA, 22 nt, Human
ucuuagcacagcuauauaaguu

SEQ ID NO: 815981 - RNA, 22 nt, Human
cauaauauacuacauugaugaa

SEQ ID NO: 815982 - RNA, 22 nt, Human
gaggcaguguuuacugcccugu

SEQ ID NO: 815983 - RNA, 22 nt, Human
ggauggcagucugcaugagaaa

SEQ ID NO: 815984 - RNA, 22 nt, Human
caaggccauaagagauacaaaa

SEQ ID NO: 815985 - RNA, 17 nt, Human
gccaggagguuugagcu

SEQ ID NO: 815986 - RNA, 22 nt, Human
gaaauauuguacuggagauguu

SEQ ID NO: 815987 - RNA, 22 nt, Human
uugauuucuauucagauguaga

SEQ ID NO: 815988 - RNA, 22 nt, Human
ccauggcaauggucagucuauu

SEQ ID NO: 815989 - RNA, 22 nt, Human
uggcagcuauggucuaagggcc

SEQ ID NO: 815990 - RNA, 22 nt, Human
aaucuuucccuauuaaaugugg

SEQ ID NO: 815991 - RNA, 22 nt, Human
aggaugagaagauuggaaucuu

SEQ ID NO: 815992 - RNA, 22 nt, Human
agacaguguguguauauauggu

SEQ ID NO: 815993 - RNA, 22 nt, Human
auucugaguccaugggggcagg

SEQ ID NO: 815994 - RNA, 22 nt, Human
gcugaaugaauguauuuuaaaa

SEQ ID NO: 815995 - RNA, 22 nt, Human
uccaugucuucaugugucuaac

SEQ ID NO: 815996 - RNA, 22 nt, Human
guuauauauaguauuucucuga

SEQ ID NO: 815997 - RNA, 19 nt, Human
gcagcugcuugaaaagaaa

SEQ ID NO: 815998 - RNA, 22 nt, Human
aggagaggguggcauuaaguuu

SEQ ID NO: 815999 - RNA, 22 nt, Human
ggcagcacugcagcuuguuggg

SEQ ID NO: 816000 - RNA, 22 nt, Human
aggcagacugugcgggaagagu

SEQ ID NO: 816001 - RNA, 22 nt, Human
gugcagcugugguggagccagg

SEQ ID NO: 816002 - RNA, 22 nt, Human
guugaaagcuuuucauuuaguu

SEQ ID NO: 816003 - RNA, 23 nt, Human
uucauuugucuacuucacuuguu

SEQ ID NO: 816004 - RNA, 22 nt, Human
aggcagauuacuugaggccagg

SEQ ID NO: 816005 - RNA, 22 nt, Human
ucugagaggcaucugcacuucu

SEQ ID NO: 816006 - RNA, 22 nt, Human
ucagucucuggggcuucuguuu

SEQ ID NO: 816007 - RNA, 22 nt, Human
guuuucaaggggauuuaacuga

SEQ ID NO: 816008 - RNA, 22 nt, Human
caggcagcuagauuuauaacaa

SEQ ID NO: 816009 - RNA, 20 nt, Human
ucacaucuggcagcugauga

SEQ ID NO: 816010 - RNA, 22 nt, Human
agcaccauugcaaauauggcag

SEQ ID NO: 816011 - RNA, 22 nt, Human
uucuacagacuauaacugugau

SEQ ID NO: 816012 - RNA, 22 nt, Human
gaggucaggcuugcagcagggu

SEQ ID NO: 816013 - RNA, 22 nt, Human
uuuuaucuaccuaugcucauuu

SEQ ID NO: 816014 - RNA, 22 nt, Human
cugcugugaguuuggaggucua

SEQ ID NO: 816015 - RNA, 22 nt, Human
caaggccaugagcagcgagugu

SEQ ID NO: 816016 - RNA, 23 nt, Human
uugaaagguagcuggcagcuaga

SEQ ID NO: 816017 - RNA, 22 nt, Human
uucacagacauugcagacugaa

SEQ ID NO: 816018 - RNA, 22 nt, Human
ugcuucugggcaaaugugugug

SEQ ID NO: 816019 - RNA, 22 nt, Human
uuugaaagacagaauauuuuug

SEQ ID NO: 816020 - RNA, 19 nt, Human
ggcaggcuggauagagagg

SEQ ID NO: 816021 - RNA, 22 nt, Human
agggggugcccagaugaaggau

SEQ ID NO: 816022 - RNA, 22 nt, Human
ucucuucuaauuaggguccaug

SEQ ID NO: 816023 - RNA, 18 nt, Human
ucauuuguuuugcaugaa

SEQ ID NO: 816024 - RNA, 23 nt, Human
gugcugugagccccuuggccucc

SEQ ID NO: 816025 - RNA, 22 nt, Human
ggaggugggcuaaggacucucu

SEQ ID NO: 816026 - RNA, 19 nt, Human
uuacuuggcaaagucaguc

SEQ ID NO: 816027 - RNA, 22 nt, Human
uugcagcuucuaccacuguuuc

SEQ ID NO: 816028 - RNA, 22 nt, Human
aggcagccaucugcaggaagga

SEQ ID NO: 816029 - RNA, 23 nt, Human
uggagcugacagucagagggagg

SEQ ID NO: 816030 - RNA, 22 nt, Human
gccaggagcaugucauuguuga

SEQ ID NO: 816031 - RNA, 22 nt, Human
ucucucuuuuuaaucauguaau

SEQ ID NO: 816032 - RNA, 22 nt, Human
gccaggagggaaaggacaauuu

SEQ ID NO: 816033 - RNA, 22 nt, Human
uacuuuuuagcacagugugugc

SEQ ID NO: 816034 - RNA, 22 nt, Human
gacagcugugcaggagaagggg

SEQ ID NO: 816035 - RNA, 22 nt, Human
auucuucauuguugauucaugu

SEQ ID NO: 816036 - RNA, 22 nt, Human
cauuuguagcuauuuacuguau

SEQ ID NO: 816037 - RNA, 22 nt, Human
ucauuuguugaacuuuagugcg

SEQ ID NO: 816038 - RNA, 22 nt, Human
ggaggcaggaaagacagguuca

SEQ ID NO: 816039 - RNA, 22 nt, Human
uucugaaagccaauucauugaa

SEQ ID NO: 816040 - RNA, 22 nt, Human
aucaggaucacugggagucuug

SEQ ID NO: 816041 - RNA, 22 nt, Human
ggcagcucugcuccacaugagu

SEQ ID NO: 816042 - RNA, 22 nt, Human
cauuguuaauugguaucuuaca

SEQ ID NO: 816043 - RNA, 22 nt, Human
uucagggagagcgggacgggug

SEQ ID NO: 816044 - RNA, 22 nt, Human
ugcuugaaagggguuucccagu

SEQ ID NO: 816045 - RNA, 22 nt, Human
caggauggucuucauuuggcuc

SEQ ID NO: 816046 - RNA, 22 nt, Human
aaggaaccauuugugugcaugg

SEQ ID NO: 816047 - RNA, 22 nt, Human
ugcaggaaucagaggggaagcg

SEQ ID NO: 816048 - RNA, 22 nt, Human
gcauugaguccacucugucuuu

SEQ ID NO: 816049 - RNA, 22 nt, Human
uucagugucaauuuuuaaauau

SEQ ID NO: 816050 - RNA, 22 nt, Human
ugcucccagggacucuggcugg

SEQ ID NO: 816051 - RNA, 22 nt, Human
aagggaggccagagguuuugca

SEQ ID NO: 816052 - RNA, 20 nt, Human
cugcccagccacugagggau

SEQ ID NO: 816053 - RNA, 22 nt, Human
uuccaugaaggagacugagaag

SEQ ID NO: 816054 - RNA, 22 nt, Human
uccaggagagguagaggguucc

SEQ ID NO: 816055 - RNA, 22 nt, Human
uuucccagagguaugaauaagu

SEQ ID NO: 816056 - RNA, 22 nt, Human
uugcaaaggggaauaaagcaau

SEQ ID NO: 816057 - RNA, 22 nt, Human
caaguaaacaauaugugauuca

SEQ ID NO: 816058 - RNA, 22 nt, Human
cccaggaaugaggggcggaggc

SEQ ID NO: 816059 - RNA, 22 nt, Human
ccaggauggggagcagauagaa

SEQ ID NO: 816060 - RNA, 22 nt, Human
ucugggaacacacgucacuuca

SEQ ID NO: 816061 - RNA, 22 nt, Human
augaggcaaucaugguccaguu

SEQ ID NO: 816062 - RNA, 22 nt, Human
gauuuuauauggcauacugugg

SEQ ID NO: 816063 - RNA, 22 nt, Human
uguucauuuggcccuuuuguau

SEQ ID NO: 816064 - RNA, 22 nt, Human
agauggagaccuuggaugaacu

SEQ ID NO: 816065 - RNA, 22 nt, Human
acagcauugcuccaucucaaga

SEQ ID NO: 816066 - RNA, 22 nt, Human
ccaggcugccgaggaaagaaag

SEQ ID NO: 816067 - RNA, 18 nt, Human
agggaguuuuagggaagg

SEQ ID NO: 816068 - RNA, 22 nt, Human
acuguagcugccacuggaugca

SEQ ID NO: 816069 - RNA, 22 nt, Human
cuuaaagaaauugaggagagga

SEQ ID NO: 816070 - RNA, 22 nt, Human
auugaaagagaauguagcucuu

SEQ ID NO: 816071 - RNA, 22 nt, Human
aggcuagcaaugggagaugagu

SEQ ID NO: 816072 - RNA, 17 nt, Human
agcugaccagauggacu

SEQ ID NO: 816073 - RNA, 22 nt, Human
cccaggagaauauuuuuggguc

SEQ ID NO: 816074 - RNA, 22 nt, Human
guugacagcuggugagcugcua

SEQ ID NO: 816075 - RNA, 19 nt, Human
cucucacucgccacauccu

SEQ ID NO: 816076 - RNA, 22 nt, Human
agucucuuauucccuauugcug

SEQ ID NO: 816077 - RNA, 22 nt, Human
ggcagaggaggggugaauuugc

SEQ ID NO: 816078 - RNA, 22 nt, Human
cccaggaaaucaggcuuucuag

SEQ ID NO: 816079 - RNA, 22 nt, Human
uuucacagguacaaacacuccu

SEQ ID NO: 816080 - RNA, 22 nt, Human
cagaggaugaucuggccucucu

SEQ ID NO: 816081 - RNA, 22 nt, Human
gagggagggacuagcauucucu

SEQ ID NO: 816082 - RNA, 23 nt, Human
auguuauuauuagcagucuugcc

SEQ ID NO: 816083 - RNA, 22 nt, Human
cacaugaguccugccagguaug

SEQ ID NO: 816084 - RNA, 20 nt, Human
gggcaguucaaugccacucu

SEQ ID NO: 816085 - RNA, 19 nt, Human
uaucuguuuccugcuuguc

SEQ ID NO: 816086 - RNA, 22 nt, Human
cagacaggcaggugcugcuuug

SEQ ID NO: 816087 - RNA, 22 nt, Human
aggcaggcccucuggaaaggua

SEQ ID NO: 816088 - RNA, 22 nt, Human
ggugagaggcagaggacagcuu

SEQ ID NO: 816089 - RNA, 22 nt, Human
gagaggaguuacuauuuccgag

SEQ ID NO: 816090 - RNA, 22 nt, Human
aggggaugauccucccgcagcg

SEQ ID NO: 816091 - RNA, 22 nt, Human
auguuucaccaguuuuauaaga

SEQ ID NO: 816092 - RNA, 22 nt, Human
aauauccacacugugucccugc

SEQ ID NO: 816093 - RNA, 23 nt, Human
uccaggagaauuccagggcccgg

SEQ ID NO: 816094 - RNA, 22 nt, Human
gucaggauuggggucaugaguc

SEQ ID NO: 816095 - RNA, 22 nt, Human
uucaggaugcagagguuguagu

SEQ ID NO: 816096 - RNA, 22 nt, Human
accaggaguagaauaucuguga

SEQ ID NO: 816097 - RNA, 22 nt, Human
aaacaugaauagauauuaaaca

SEQ ID NO: 816098 - RNA, 21 nt, Human
ucacagacuggucagugaggc

SEQ ID NO: 816099 - RNA, 22 nt, Human
acccaggagagagcuauaaaau

SEQ ID NO: 816100 - RNA, 22 nt, Human
uuccucagcuggccugauuggg

SEQ ID NO: 816101 - RNA, 22 nt, Human
agugcuuuagcauccaacuguc

SEQ ID NO: 816102 - RNA, 22 nt, Human
gggcagcucuggcugugggaag

SEQ ID NO: 816103 - RNA, 22 nt, Human
gaggcagcaggcugaggaggau

SEQ ID NO: 816104 - RNA, 22 nt, Human
ucuucagacuccaaauguuuua

SEQ ID NO: 816105 - RNA, 22 nt, Human
acagucuugagcaucagccaga

SEQ ID NO: 816106 - RNA, 19 nt, Human
aguggcagaucuggaagua

SEQ ID NO: 816107 - RNA, 22 nt, Human
auuggcagaaacagcagggcca

SEQ ID NO: 816108 - RNA, 22 nt, Human
auguuuccgugagcauccuuga

SEQ ID NO: 816109 - RNA, 22 nt, Human
ugaggcaguucuuacuuguauu

SEQ ID NO: 816110 - RNA, 22 nt, Human
acagugcuaaacacuucuugaa

SEQ ID NO: 816111 - RNA, 22 nt, Human
cucagaauuuagggcucugagg

SEQ ID NO: 816112 - RNA, 22 nt, Human
cucagagaggcaguggaaguca

SEQ ID NO: 816113 - RNA, 22 nt, Human
caggcagcugcuggguucagcc

SEQ ID NO: 816114 - RNA, 22 nt, Human
acacaaguucuaaagauugcgc

SEQ ID NO: 816115 - RNA, 22 nt, Human
uguccucuuccagugcuccuuc

SEQ ID NO: 816116 - RNA, 16 nt, Human
ccccaggacuuggcac

SEQ ID NO: 816117 - RNA, 22 nt, Human
aggaaaacacaguauugaugga

SEQ ID NO: 816118 - RNA, 20 nt, Human
aagggcagagggaacagacu

SEQ ID NO: 816119 - RNA, 22 nt, Human
agaggccaggcugcagagggau

SEQ ID NO: 816120 - RNA, 22 nt, Human
uccauuuucuaaguaucacuua

SEQ ID NO: 816121 - RNA, 22 nt, Human
aucacugucgucaucugagauu

SEQ ID NO: 816122 - RNA, 22 nt, Human
ccucaggaaaugaauaaauggc

SEQ ID NO: 816123 - RNA, 22 nt, Human
cuugaaagauuuggccucugug

SEQ ID NO: 816124 - RNA, 20 nt, Human
augcuuucuugugugcugcu

SEQ ID NO: 816125 - RNA, 22 nt, Human
ccaugagccaggcugaggaagc

SEQ ID NO: 816126 - RNA, 22 nt, Human
agagugcaaccgaaacaagcag

SEQ ID NO: 816127 - RNA, 21 nt, Human
agcagaggggacauguuugau

SEQ ID NO: 816128 - RNA, 22 nt, Human
cuucucagaggccagaagcuau

SEQ ID NO: 816129 - RNA, 22 nt, Human
cagcugccugucuggaggcaau

SEQ ID NO: 816130 - RNA, 22 nt, Human
ucaggaauccagacagggcaca

SEQ ID NO: 816131 - RNA, 22 nt, Human
ggcagcuaguuuaagaaagagg

SEQ ID NO: 816132 - RNA, 22 nt, Human
ucccaggacaggccacauggaa

SEQ ID NO: 816133 - RNA, 22 nt, Human
cuucuucauaggcaguccuguu

SEQ ID NO: 816134 - RNA, 22 nt, Human
cugcugugccuuaaaaugcaag

SEQ ID NO: 816135 - RNA, 22 nt, Human
agucaauucuuuucaacucaag

SEQ ID NO: 816136 - RNA, 22 nt, Human
uauuuccaggccccacucuaga

SEQ ID NO: 816137 - RNA, 22 nt, Human
cugcuucuccaaaguaggacuu

SEQ ID NO: 816138 - RNA, 22 nt, Human
cugucccuucauuauucacuac

SEQ ID NO: 816139 - RNA, 18 nt, Human
gucacuguguuucugagc

SEQ ID NO: 816140 - RNA, 22 nt, Human
caacugcugacaccaucacucc

SEQ ID NO: 816141 - RNA, 22 nt, Human
guuguuuugcaggauccuuaca

SEQ ID NO: 816142 - RNA, 22 nt, Human
gaccauuucuaggaaucagacu

SEQ ID NO: 816143 - RNA, 22 nt, Human
gucuucuuuucagucugcuugu

SEQ ID NO: 816144 - RNA, 22 nt, Human
agagugcagauaagagaauguu

SEQ ID NO: 816145 - RNA, 22 nt, Human
gggacgggcaguccaagggguc

SEQ ID NO: 816146 - RNA, 22 nt, Human
gcagcucccagcuugaaagguc

SEQ ID NO: 816147 - RNA, 22 nt, Human
gucuccugagccuugacugcaa

SEQ ID NO: 816148 - RNA, 22 nt, Human
agcccagguucuaaagccaaac

SEQ ID NO: 816149 - RNA, 22 nt, Human
gucacuguauccagguuccagc

SEQ ID NO: 816150 - RNA, 22 nt, Human
ggcaagaaggcuucagguagcu

SEQ ID NO: 816151 - RNA, 22 nt, Human
ucugucccugagagcucaggag

SEQ ID NO: 816152 - RNA, 22 nt, Human
auguuuccagguucuuccuaug

SEQ ID NO: 816153 - RNA, 22 nt, Human
auuauauaggacuugcccuucc

SEQ ID NO: 816154 - RNA, 22 nt, Human
gaagcagcagcuggggacaguu

SEQ ID NO: 816155 - RNA, 22 nt, Human
cagaccucaguccucaguagga

SEQ ID NO: 816156 - RNA, 21 nt, Human
ucucugguuggaguugugcca

SEQ ID NO: 816157 - RNA, 22 nt, Human
auucuuauuuaaauagagucug

SEQ ID NO: 816158 - RNA, 22 nt, Human
guucuucaucuuaaccaucugu

SEQ ID NO: 816159 - RNA, 22 nt, Human
gcugucccgcugacuuccagcu

SEQ ID NO: 816160 - RNA, 22 nt, Human
ucaggagggugacaggcccugg

SEQ ID NO: 816161 - RNA, 22 nt, Human
cuuuguagcugcuucugauuua

SEQ ID NO: 816162 - RNA, 22 nt, Human
aucauucuaguccuuauggucu

SEQ ID NO: 816163 - RNA, 22 nt, Human
aggagaggcaucaagaaaaucg

SEQ ID NO: 816164 - RNA, 22 nt, Human
ugcugugagguugagaaggaag

SEQ ID NO: 816165 - RNA, 22 nt, Human
agaggcaggaagagcugauuuu

SEQ ID NO: 816166 - RNA, 22 nt, Human
uauuuucuggacagucuugcuu

SEQ ID NO: 816167 - RNA, 22 nt, Human
aggucagcaggccaggggcgaa

SEQ ID NO: 816168 - RNA, 22 nt, Human
ggcagccuugagggaggccugg

SEQ ID NO: 816169 - RNA, 22 nt, Human
auacaacuuuacaugcaauucc

SEQ ID NO: 816170 - RNA, 22 nt, Human
accaggaguugggggugggacc

SEQ ID NO: 816171 - RNA, 22 nt, Human
gaggagagggcugcgggcccac

SEQ ID NO: 816172 - RNA, 22 nt, Human
ccucugcucugguccaugugcu

SEQ ID NO: 816173 - RNA, 21 nt, Human
gacaaagugaagcaggcagga

SEQ ID NO: 816174 - RNA, 22 nt, Human
uggagagguugaauaacuuguc

SEQ ID NO: 816175 - RNA, 22 nt, Human
cccaggaagaaauucugauuug

SEQ ID NO: 816176 - RNA, 22 nt, Human
cuugggaaugcuaacagaugac

SEQ ID NO: 816177 - RNA, 19 nt, Human
agcauuuggaauucuacac

SEQ ID NO: 816178 - RNA, 22 nt, Human
uucaggauaugugauaucugaa

SEQ ID NO: 816179 - RNA, 22 nt, Human
cucaggauucucgacacucaca

SEQ ID NO: 816180 - RNA, 22 nt, Human
agggagcugagcugugagcagc

SEQ ID NO: 816181 - RNA, 20 nt, Human
ucucagcauaagaacccuuc

SEQ ID NO: 816182 - RNA, 20 nt, Human
cagaggcaaggagacuugga

SEQ ID NO: 816183 - RNA, 22 nt, Human
uugauacaggcucuauuucauc

SEQ ID NO: 816184 - RNA, 22 nt, Human
cuggcugggagcgagcugcuca

SEQ ID NO: 816185 - RNA, 22 nt, Human
uuugaaagucaaccuuccaguu

SEQ ID NO: 816186 - RNA, 22 nt, Human
cuuaagauuugcgauaccuaau

SEQ ID NO: 816187 - RNA, 22 nt, Human
uuugaagugggcauuagaaccu

SEQ ID NO: 816188 - RNA, 22 nt, Human
caggagaggaggcuacuucuua

SEQ ID NO: 816189 - RNA, 22 nt, Human
ggaagagggaaccacgacugua

SEQ ID NO: 816190 - RNA, 20 nt, Human
ucauuucuugggguuccaag

SEQ ID NO: 816191 - RNA, 22 nt, Human
ugcuguguucuccugacucacc

SEQ ID NO: 816192 - RNA, 22 nt, Human
auuguauaacagcauguauuuu

SEQ ID NO: 816193 - RNA, 22 nt, Human
gcauguguggaggagaugugcu

SEQ ID NO: 816194 - RNA, 22 nt, Human
cccaggagaucuggaucucguc

SEQ ID NO: 816195 - RNA, 22 nt, Human
agucuucucauuucacaugcuu

SEQ ID NO: 816196 - RNA, 22 nt, Human
cuucuucaauagcaagcgcaua

SEQ ID NO: 816197 - RNA, 22 nt, Human
aaaggccaugguuggaguguuu

SEQ ID NO: 816198 - RNA, 22 nt, Human
agcugaaagugcuuugaggacu

SEQ ID NO: 816199 - RNA, 22 nt, Human
uugaaagucacaauggcauuaa

SEQ ID NO: 816200 - RNA, 22 nt, Human
aggaguggugcaggaccugcca

SEQ ID NO: 816201 - RNA, 22 nt, Human
ugucugugaccucuuaggcaag

SEQ ID NO: 816202 - RNA, 22 nt, Human
aagggaggaggauuuauuguac

SEQ ID NO: 816203 - RNA, 22 nt, Human
uuuguuuagaugguaaaucagu

SEQ ID NO: 816204 - RNA, 22 nt, Human
uaucuguuggcuccuaguugua

SEQ ID NO: 816205 - RNA, 22 nt, Human
accaggaggccuggagcacaaa

SEQ ID NO: 816206 - RNA, 22 nt, Human
ggagaggggcaaguuuaucuag

SEQ ID NO: 816207 - RNA, 19 nt, Human
gacagugcaguuguaguac

SEQ ID NO: 816208 - RNA, 22 nt, Human
augcagcugucagggagaacau

SEQ ID NO: 816209 - RNA, 22 nt, Human
uuccaugaagggcagccucuca

SEQ ID NO: 816210 - RNA, 22 nt, Human
ccaggaaauggcuugcuucuuu

SEQ ID NO: 816211 - RNA, 22 nt, Human
uuggcaggaauauugcagaggu

SEQ ID NO: 816212 - RNA, 22 nt, Human
aggcagacaaggucccuggucu

SEQ ID NO: 816213 - RNA, 22 nt, Human
cccaggagacauauagaaggac

SEQ ID NO: 816214 - RNA, 21 nt, Human
ucacaucuauguuaagcaaac

SEQ ID NO: 816215 - RNA, 22 nt, Human
aagcaccucuaugauugcuuuu

SEQ ID NO: 816216 - RNA, 22 nt, Human
cugccaggcgauggauuggcug

SEQ ID NO: 816217 - RNA, 22 nt, Human
acccaggaugauaauguucaca

SEQ ID NO: 816218 - RNA, 22 nt, Human
gguuauauaauucagugcuuuc

SEQ ID NO: 816219 - RNA, 22 nt, Human
cucaugauguagcgaaugagaa

SEQ ID NO: 816220 - RNA, 22 nt, Human
cagcucccgccaucgggaggca

SEQ ID NO: 816221 - RNA, 22 nt, Human
uacugccuggagcauuggugcu

SEQ ID NO: 816222 - RNA, 23 nt, Human
aggcagcagguuguccaggguga

SEQ ID NO: 816223 - RNA, 22 nt, Human
uauuuccaccuauuauuuucug

SEQ ID NO: 816224 - RNA, 22 nt, Human
gagaggggcccaagccacauag

SEQ ID NO: 816225 - RNA, 22 nt, Human
gaaauauugggacucagagcuu

SEQ ID NO: 816226 - RNA, 22 nt, Human
gcugcugugccuggcguccugu

SEQ ID NO: 816227 - RNA, 22 nt, Human
ggcagcuggguuggccagaaac

SEQ ID NO: 816228 - RNA, 22 nt, Human
uggcagcuguuaauguuuuguu

SEQ ID NO: 816229 - RNA, 23 nt, Human
uagggcagcugggagggacaugc

SEQ ID NO: 816230 - RNA, 22 nt, Human
ugucuuuggaauauuuagcuga

SEQ ID NO: 816231 - RNA, 22 nt, Human
ccuccuuuccuguuuuccugag

SEQ ID NO: 816232 - RNA, 22 nt, Human
aaucauaauuguauacauucau

SEQ ID NO: 816233 - RNA, 22 nt, Human
uggaggggcaauggagcgcgga

SEQ ID NO: 816234 - RNA, 22 nt, Human
gagggaauggugugcaagaggu

SEQ ID NO: 816235 - RNA, 22 nt, Human
auuuucaucauggguuuaacau

SEQ ID NO: 816236 - RNA, 22 nt, Human
caagauggaguccgggaaugug

SEQ ID NO: 816237 - RNA, 22 nt, Human
ggugagggaguggaacgaggug

SEQ ID NO: 816238 - RNA, 23 nt, Human
ugaguucucaucuuggcuucuau

SEQ ID NO: 816239 - RNA, 22 nt, Human
ucuuaaagagcgcaauuugagg

SEQ ID NO: 816240 - RNA, 22 nt, Human
uaugauuuguagacauuugauu

SEQ ID NO: 816241 - RNA, 22 nt, Human
cccaggagguggaguucacagu

SEQ ID NO: 816242 - RNA, 20 nt, Human
uggcaucucucaauuguagg

SEQ ID NO: 816243 - RNA, 22 nt, Human
agcccagggaaccaggaagugg

SEQ ID NO: 816244 - RNA, 23 nt, Human
uugcauagacauccucauagauu

SEQ ID NO: 816245 - RNA, 22 nt, Human
uggcagcuagcuguuuucaugc

SEQ ID NO: 816246 - RNA, 19 nt, Human
cuuugucagaacaugcuuc

SEQ ID NO: 816247 - RNA, 22 nt, Human
aggaaacuccccuacaucucaa

SEQ ID NO: 816248 - RNA, 22 nt, Human
uagggaugagccaguggguagu

SEQ ID NO: 816249 - RNA, 22 nt, Human
ucaauucaacacaugcacauug

SEQ ID NO: 816250 - RNA, 22 nt, Human
agugcuuugaacgaaaggcuga

SEQ ID NO: 816251 - RNA, 22 nt, Human
uuuccaagacuccaguucuccc

SEQ ID NO: 816252 - RNA, 22 nt, Human
acuucuucuucagcugggggau

SEQ ID NO: 816253 - RNA, 22 nt, Human
uagggauguggugagaacugag

SEQ ID NO: 816254 - RNA, 22 nt, Human
aggagacaucuaacuguagguu

SEQ ID NO: 816255 - RNA, 22 nt, Human
ucaggagacuggcagugcccac

SEQ ID NO: 816256 - RNA, 22 nt, Human
agcuucccaagguuggaagguu

SEQ ID NO: 816257 - RNA, 22 nt, Human
gaggcagcugaagcuucaaaga

SEQ ID NO: 816258 - RNA, 22 nt, Human
ccugcuguaaugugucuuuauu

SEQ ID NO: 816259 - RNA, 21 nt, Human
cgcagagcgaacuugcggcgc

SEQ ID NO: 816260 - RNA, 22 nt, Human
uccagccuaggggaacagcugc

SEQ ID NO: 816261 - RNA, 21 nt, Human
cccaggagaagaaaagaugca

SEQ ID NO: 816262 - RNA, 22 nt, Human
uucucagagugaccaagucuuu

SEQ ID NO: 816263 - RNA, 22 nt, Human
auauuucaugggguuccauacu

SEQ ID NO: 816264 - RNA, 22 nt, Human
gauuucuugauaaguaguguga

SEQ ID NO: 816265 - RNA, 22 nt, Human
uggcagcagccauggaaggccc

SEQ ID NO: 816266 - RNA, 22 nt, Human
uuucuucauagaccuugucuug

SEQ ID NO: 816267 - RNA, 22 nt, Human
agguccagcuguugcagccucc

SEQ ID NO: 816268 - RNA, 18 nt, Human
cauuguacaaugcuuuau

SEQ ID NO: 816269 - RNA, 22 nt, Human
auuuuacuuugugaauauugac

SEQ ID NO: 816270 - RNA, 22 nt, Human
aucauucuagcuguuguguuga

SEQ ID NO: 816271 - RNA, 22 nt, Human
gucaggaugcuauuguuauuaa

SEQ ID NO: 816272 - RNA, 22 nt, Human
cauucauuuaugaaauaucuau

SEQ ID NO: 816273 - RNA, 22 nt, Human
aguucuuuugugaacauaugcu

SEQ ID NO: 816274 - RNA, 22 nt, Human
cagucucucugaaguauuaaga

SEQ ID NO: 816275 - RNA, 22 nt, Human
agugcuuugguauagaacuauu

SEQ ID NO: 816276 - RNA, 22 nt, Human
uaucuguuguaguacagaugau

SEQ ID NO: 816277 - RNA, 20 nt, Human
uuucugugagaaacacuguu

SEQ ID NO: 816278 - RNA, 18 nt, Human
ggcagcuugacuagcaac

SEQ ID NO: 816279 - RNA, 22 nt, Human
gcccaggaguugguggcugcag

SEQ ID NO: 816280 - RNA, 22 nt, Human
gggcagcuggcuuauagguuug

SEQ ID NO: 816281 - RNA, 22 nt, Human
uugaagagugccuuccagacau

SEQ ID NO: 816282 - RNA, 20 nt, Human
caucaucacaugagccaauu

SEQ ID NO: 816283 - RNA, 22 nt, Human
augcugugguagacagcauucc

SEQ ID NO: 816284 - RNA, 22 nt, Human
cucaggaucgcuugcccuaggg

SEQ ID NO: 816285 - RNA, 22 nt, Human
uccccagggcugcagagggugu

SEQ ID NO: 816286 - RNA, 19 nt, Human
ucauuguugguuugucggg

SEQ ID NO: 816287 - RNA, 22 nt, Human
uauuuccagcaguaagaagaca

SEQ ID NO: 816288 - RNA, 22 nt, Human
caggcagcgcucguggccuggc

SEQ ID NO: 816289 - RNA, 22 nt, Human
gaaggucaccuccccucucugg

SEQ ID NO: 816290 - RNA, 22 nt, Human
gcuccuucaggugguagcuguu

SEQ ID NO: 816291 - RNA, 22 nt, Human
ucuacccagagcuaugaccuga

SEQ ID NO: 816292 - RNA, 19 nt, Human
uugaaagauuagcuuucua

SEQ ID NO: 816293 - RNA, 22 nt, Human
auuuggcaacauuaauugaauc

SEQ ID NO: 816294 - RNA, 22 nt, Human
aauguauuccucaugcaagagu

SEQ ID NO: 816295 - RNA, 22 nt, Human
uguccucagauaugucuacucu

SEQ ID NO: 816296 - RNA, 22 nt, Human
aggcagcauccagaggagaaug

SEQ ID NO: 816297 - RNA, 22 nt, Human
uuugaaaguccuaggagagucc

SEQ ID NO: 816298 - RNA, 22 nt, Human
uuuauuguuaucaugggugagu

SEQ ID NO: 816299 - RNA, 22 nt, Human
aggcagguccccuggaaggcac

SEQ ID NO: 816300 - RNA, 22 nt, Human
acacauauauacauauuugugc

SEQ ID NO: 816301 - RNA, 21 nt, Human
aaucauacaaaacaugucagg

SEQ ID NO: 816302 - RNA, 22 nt, Human
uuugacaucaauacccuagaau

SEQ ID NO: 816303 - RNA, 21 nt, Human
ggcagcucagcagauggggac

SEQ ID NO: 816304 - RNA, 22 nt, Human
ccaggagagcgcccucccggcc

SEQ ID NO: 816305 - RNA, 22 nt, Human
aagcagaguccccuucccaugg

SEQ ID NO: 816306 - RNA, 22 nt, Human
uuuuuguagucauuagaagagg

SEQ ID NO: 816307 - RNA, 22 nt, Human
agaggccagguccagaguuugu

SEQ ID NO: 816308 - RNA, 22 nt, Human
uccaggagguugagacugcagu

SEQ ID NO: 816309 - RNA, 22 nt, Human
uuugacaucuaagaauucuuac

SEQ ID NO: 816310 - RNA, 22 nt, Human
cucacugugccuuuucccaaac

SEQ ID NO: 816311 - RNA, 22 nt, Human
uggcagcuccuggggccagcac

SEQ ID NO: 816312 - RNA, 22 nt, Human
aaagauuauggcauugaaauac

SEQ ID NO: 816313 - RNA, 22 nt, Human
ucaaauaaugccauucaucauc

SEQ ID NO: 816314 - RNA, 22 nt, Human
auuacaguaacagcuacaaugc

SEQ ID NO: 816315 - RNA, 22 nt, Human
cagcuggcgggcagagccgcca

SEQ ID NO: 816316 - RNA, 22 nt, Human
ucaggaugaccacgagccucua

SEQ ID NO: 816317 - RNA, 22 nt, Human
auucugagacaauugccgucag

SEQ ID NO: 816318 - RNA, 22 nt, Human
uccaggagggauugggcugugg

SEQ ID NO: 816319 - RNA, 22 nt, Human
aauggccagcaacaggagugaa

SEQ ID NO: 816320 - RNA, 22 nt, Human
uagcuguguaagcuugguaaga

SEQ ID NO: 816321 - RNA, 22 nt, Human
acacaaugcauauuuuuccaga

SEQ ID NO: 816322 - RNA, 22 nt, Human
uuccaagaguaaauucaaauug

SEQ ID NO: 816323 - RNA, 22 nt, Human
gagugcagaugaacagaagauu

SEQ ID NO: 816324 - RNA, 22 nt, Human
ccaggagaugggaaaguagcag

SEQ ID NO: 816325 - RNA, 22 nt, Human
ugaaaugagcauuuauucuuua

SEQ ID NO: 816326 - RNA, 22 nt, Human
uagggaggcuacuucuuguagg

SEQ ID NO: 816327 - RNA, 22 nt, Human
ucaggaugagcucauaacuaug

SEQ ID NO: 816328 - RNA, 22 nt, Human
aagaggaggacgguucccagaa

SEQ ID NO: 816329 - RNA, 22 nt, Human
cuagggaguggcagagcuggga

SEQ ID NO: 816330 - RNA, 19 nt, Human
aaaaacuuaguccagaaag

SEQ ID NO: 816331 - RNA, 21 nt, Human
ggagggcagcccagacuggcu

SEQ ID NO: 816332 - RNA, 20 nt, Human
uccaggagaacugggagccg

SEQ ID NO: 816333 - RNA, 22 nt, Human
aaggagaguacaggaguuggua

SEQ ID NO: 816334 - RNA, 22 nt, Human
caucaucaaaacaaauggaguc

SEQ ID NO: 816335 - RNA, 22 nt, Human
gcuucccacagcuggacugggg

SEQ ID NO: 816336 - RNA, 22 nt, Human
ugccuggaaggcccaugggaag

SEQ ID NO: 816337 - RNA, 22 nt, Human
guagccauuggcaaugaagccu

SEQ ID NO: 816338 - RNA, 22 nt, Human
ucacugcucuccaauguggagu

SEQ ID NO: 816339 - RNA, 22 nt, Human
agagggcaaguguaguccagua

SEQ ID NO: 816340 - RNA, 22 nt, Human
ccauccugcauugcuauucaga

SEQ ID NO: 816341 - RNA, 22 nt, Human
uaaauuauguuccauguccuuu

SEQ ID NO: 816342 - RNA, 22 nt, Human
cugcuguguuggcauuggauag

SEQ ID NO: 816343 - RNA, 22 nt, Human
agaaaugacacacaugagacau

SEQ ID NO: 816344 - RNA, 22 nt, Human
aggcagaugggagcuggaaguu

SEQ ID NO: 816345 - RNA, 22 nt, Human
ugugugucagagucuccauggu

SEQ ID NO: 816346 - RNA, 22 nt, Human
gcuuggcauugaccauuaucau

SEQ ID NO: 816347 - RNA, 22 nt, Human
ccagugcuucuuugcuagcugg

SEQ ID NO: 816348 - RNA, 19 nt, Human
ugaaauggcaguugcuaaa

SEQ ID NO: 816349 - RNA, 22 nt, Human
gagcaccucaauuugcuauuug

SEQ ID NO: 816350 - RNA, 22 nt, Human
uggcagcugaggggaggcuuug

SEQ ID NO: 816351 - RNA, 20 nt, Human
uuucuugucggcuguugcug

SEQ ID NO: 816352 - RNA, 22 nt, Human
uuugcaaauaccaugaaacuug

SEQ ID NO: 816353 - RNA, 22 nt, Human
aucugccucuucuucauugcga

SEQ ID NO: 816354 - RNA, 22 nt, Human
cccaggaggacauuccauaccc

SEQ ID NO: 816355 - RNA, 22 nt, Human
ucacaucucccuggaggacaca

SEQ ID NO: 816356 - RNA, 20 nt, Human
aggcaguuagaaggagauga

SEQ ID NO: 816357 - RNA, 22 nt, Human
ucauuuguacuugugugcuugu

SEQ ID NO: 816358 - RNA, 22 nt, Human
ucuucauuccguagauauuuau

SEQ ID NO: 816359 - RNA, 22 nt, Human
uugauguacagaauuguucaca

SEQ ID NO: 816360 - RNA, 22 nt, Human
aaaaacugcaauuacuuuuguc

SEQ ID NO: 816361 - RNA, 22 nt, Human
uuucugcugugcuuucuugcgu

SEQ ID NO: 816362 - RNA, 22 nt, Human
uccaggagugugugcuaauggg

SEQ ID NO: 816363 - RNA, 22 nt, Human
gaaaggccauuucugaggguuu

SEQ ID NO: 816364 - RNA, 20 nt, Human
gaugggaaucggagcuggua

SEQ ID NO: 816365 - RNA, 22 nt, Human
auuucagguaccugugggaucc

SEQ ID NO: 816366 - RNA, 22 nt, Human
augauguuauuuucagaaacau

SEQ ID NO: 816367 - RNA, 19 nt, Human
uggcaggcccaggauggac

SEQ ID NO: 816368 - RNA, 22 nt, Human
aucugccugagucuagguuuuc

SEQ ID NO: 816369 - RNA, 22 nt, Human
gcuggcagggacagcugcgugu

SEQ ID NO: 816370 - RNA, 22 nt, Human
agaccuggauuccaauccuacc

SEQ ID NO: 816371 - RNA, 22 nt, Human
ucuacugcacuggugucucauc

SEQ ID NO: 816372 - RNA, 17 nt, Human
cccaugagcccacuccc

SEQ ID NO: 816373 - RNA, 22 nt, Human
cuuguccccagcagguugguuu

SEQ ID NO: 816374 - RNA, 17 nt, Human
ucccaggaacagggaau

SEQ ID NO: 816375 - RNA, 22 nt, Human
agcccaggugagggguucgaaa

SEQ ID NO: 816376 - RNA, 23 nt, Human
ugaaggccuggaggacgcguugu

SEQ ID NO: 816377 - RNA, 22 nt, Human
gagagggagccagccaggaacc

SEQ ID NO: 816378 - RNA, 22 nt, Human
uuagagucaagcugcauguucu

SEQ ID NO: 816379 - RNA, 22 nt, Human
ggauggcauguugggcucuguu

SEQ ID NO: 816380 - RNA, 22 nt, Human
uaggcagcugcaaacuucgguc

SEQ ID NO: 816381 - RNA, 22 nt, Human
aaggcagcucagcucauggcag

SEQ ID NO: 816382 - RNA, 20 nt, Human
aucuucuuggccagcuugcu

SEQ ID NO: 816383 - RNA, 22 nt, Human
agucauaugacccuucacaaac

SEQ ID NO: 816384 - RNA, 22 nt, Human
cccaggaguucgaggcuguagu

SEQ ID NO: 816385 - RNA, 22 nt, Human
gucaggauuugaacucaggucu

SEQ ID NO: 816386 - RNA, 22 nt, Human
gaaggccaguuuugagauaggu

SEQ ID NO: 816387 - RNA, 22 nt, Human
ugaggggauacgguacacauug

SEQ ID NO: 816388 - RNA, 22 nt, Human
guccaugauucuguguaguaga

SEQ ID NO: 816389 - RNA, 19 nt, Human
ugaguucugugguucucaa

SEQ ID NO: 816390 - RNA, 19 nt, Human
uucuccagccugaccugag

SEQ ID NO: 816391 - RNA, 21 nt, Human
aggcaucuaaagagaguagac

SEQ ID NO: 816392 - RNA, 22 nt, Human
agucucagaaaagaagcaugga

SEQ ID NO: 816393 - RNA, 22 nt, Human
gaggccagcuaguccaggaagu

SEQ ID NO: 816394 - RNA, 22 nt, Human
gaggaaccaaaucagcuugcac

SEQ ID NO: 816395 - RNA, 19 nt, Human
agcagcuggagguggagug

SEQ ID NO: 816396 - RNA, 22 nt, Human
uuuaaauuauaguuaaugucug

SEQ ID NO: 816397 - RNA, 22 nt, Human
agaaggggagaagcuaccagga

SEQ ID NO: 816398 - RNA, 22 nt, Human
ugaggggagcuagcaugccuug

SEQ ID NO: 816399 - RNA, 22 nt, Human
uucuuaacuggaaaaugucaga

SEQ ID NO: 816400 - RNA, 22 nt, Human
ugagggagagggcgaaaaugaa

SEQ ID NO: 816401 - RNA, 22 nt, Human
cagagggaaaaggggaguaaua

SEQ ID NO: 816402 - RNA, 22 nt, Human
agcagagguuuguuggaaaccu

SEQ ID NO: 816403 - RNA, 22 nt, Human
aguucucagcuuaguaugcugu

SEQ ID NO: 816404 - RNA, 22 nt, Human
ggcaggcugcuugggucauguc

SEQ ID NO: 816405 - RNA, 22 nt, Human
agccagcugugggcucaggcgg

SEQ ID NO: 816406 - RNA, 22 nt, Human
aagcagagcaagcguauuuauu

SEQ ID NO: 816407 - RNA, 19 nt, Human
ugaggggcucacagucuca

SEQ ID NO: 816408 - RNA, 22 nt, Human
cccuugcacauuugucuuuaau

SEQ ID NO: 816409 - RNA, 22 nt, Human
cuguggaaggccuguccugaaa

SEQ ID NO: 816410 - RNA, 22 nt, Human
ccaggagagcaaaggucacucu

SEQ ID NO: 816411 - RNA, 22 nt, Human
gugcauuugacgaauacucacu

SEQ ID NO: 816412 - RNA, 22 nt, Human
cccuggaggcaaagguugcagu

SEQ ID NO: 816413 - RNA, 22 nt, Human
uucucagaggagucgggagcug

SEQ ID NO: 816414 - RNA, 22 nt, Human
caggaugguggcaugaucagaa

SEQ ID NO: 816415 - RNA, 22 nt, Human
uuugaaagggaaauaaacuccu

SEQ ID NO: 816416 - RNA, 22 nt, Human
uucagcaagaccaccauguacc

SEQ ID NO: 816417 - RNA, 22 nt, Human
uucuucaaccaucuacauaaac

SEQ ID NO: 816418 - RNA, 22 nt, Human
uggcagcuccggguaggggcug

SEQ ID NO: 816419 - RNA, 22 nt, Human
ucucccaggcugcccuguggac

SEQ ID NO: 816420 - RNA, 22 nt, Human
uugaauaguguuuucaguauac

SEQ ID NO: 816421 - RNA, 23 nt, Human
cuuugccacccagagccugacag

SEQ ID NO: 816422 - RNA, 22 nt, Human
aaugcauauguaggcaagcagu

SEQ ID NO: 816423 - RNA, 22 nt, Human
ucaucuugcugccauugcuuua

SEQ ID NO: 816424 - RNA, 22 nt, Human
ucuccucuauuucuguauguau

SEQ ID NO: 816425 - RNA, 22 nt, Human
auuucccaugugaaucaauugg

SEQ ID NO: 816426 - RNA, 22 nt, Human
aaggccagcuuguagggcuggu

SEQ ID NO: 816427 - RNA, 22 nt, Human
auacaacuuuaucuguaaugag

SEQ ID NO: 816428 - RNA, 22 nt, Human
uccaggaggccucauuuccugu

SEQ ID NO: 816429 - RNA, 22 nt, Human
ucagguggcuuggagggggacg

SEQ ID NO: 816430 - RNA, 17 nt, Human
aagacagaagccaugag

SEQ ID NO: 816431 - RNA, 22 nt, Human
gcugcccagacauugaaucagg

SEQ ID NO: 816432 - RNA, 23 nt, Human
ccacagagcugccaauuccugug

SEQ ID NO: 816433 - RNA, 22 nt, Human
gaggcaucugggcacagaagug

SEQ ID NO: 816434 - RNA, 22 nt, Human
gcuccucuucucccacugaaug

SEQ ID NO: 816435 - RNA, 22 nt, Human
uagggaugacgaaaggacagag

SEQ ID NO: 816436 - RNA, 22 nt, Human
ucugcugugggucuauauuuua

SEQ ID NO: 816437 - RNA, 22 nt, Human
cccuuagcucaauuucuugccc

SEQ ID NO: 816438 - RNA, 17 nt, Human
uuugaaaggaugucagu

SEQ ID NO: 816439 - RNA, 22 nt, Human
cuguggaaaauuuguauguaau

SEQ ID NO: 816440 - RNA, 22 nt, Human
ugcuuuggccacuagaauucag

SEQ ID NO: 816441 - RNA, 22 nt, Human
uguguuauugccacugaagacc

SEQ ID NO: 816442 - RNA, 22 nt, Human
cuuagaaaugcagauucucagg

SEQ ID NO: 816443 - RNA, 22 nt, Human
gcugccagcuuuccuuggcuga

SEQ ID NO: 816444 - RNA, 18 nt, Human
uuugcaaaggaaguaugg

SEQ ID NO: 816445 - RNA, 22 nt, Human
cucaggauuuacuaauuucaag

SEQ ID NO: 816446 - RNA, 22 nt, Human
gcccaggauggagaauaguggu

SEQ ID NO: 816447 - RNA, 22 nt, Human
agccuuguuggucugaguuugg

SEQ ID NO: 816448 - RNA, 22 nt, Human
gaggagagccugcacuuugacc

SEQ ID NO: 816449 - RNA, 22 nt, Human
uugauuaaacaggcauauucaa

SEQ ID NO: 816450 - RNA, 22 nt, Human
uucucugaaggccaugcucacu

SEQ ID NO: 816451 - RNA, 22 nt, Human
ucacaguuauagucuguagaau

SEQ ID NO: 816452 - RNA, 21 nt, Human
ucaggagagcccaucuacaaa

SEQ ID NO: 816453 - RNA, 22 nt, Human
cucacuguccaacaggcuuuac

SEQ ID NO: 816454 - RNA, 22 nt, Human
agcgagggaggucugaggacag

SEQ ID NO: 816455 - RNA, 22 nt, Human
uuugaaugcaggacauacagaa

SEQ ID NO: 816456 - RNA, 22 nt, Human
aggagcagcuucugaaccaugu

SEQ ID NO: 816457 - RNA, 22 nt, Human
agcagcauuaugauauaucuua

SEQ ID NO: 816458 - RNA, 22 nt, Human
gacccaggguggucaccugaaa

SEQ ID NO: 816459 - RNA, 22 nt, Human
auaucacaguaguuguuuaguu

SEQ ID NO: 816460 - RNA, 18 nt, Human
ucuuuggacaacuacugg

SEQ ID NO: 816461 - RNA, 22 nt, Human
ugcugcuguuuccuacaucuca

SEQ ID NO: 816462 - RNA, 22 nt, Human
ccagguaggagagagggauccu

SEQ ID NO: 816463 - RNA, 22 nt, Human
uggcagagcaaaaagauagaau

SEQ ID NO: 816464 - RNA, 22 nt, Human
gaugagcauuguuucauguguu

SEQ ID NO: 816465 - RNA, 22 nt, Human
cuuaacagagagaaguguugcu

SEQ ID NO: 816466 - RNA, 22 nt, Human
ucacugcugcugccaugaugga

SEQ ID NO: 816467 - RNA, 22 nt, Human
ugcuugugagaguuuuuucaga

SEQ ID NO: 816468 - RNA, 20 nt, Human
caguccaaucagaggccacc

SEQ ID NO: 816469 - RNA, 22 nt, Human
uagggcagagcuuguacacgau

SEQ ID NO: 816470 - RNA, 22 nt, Human
ucucaggacuuugggaagcuca

SEQ ID NO: 816471 - RNA, 22 nt, Human
ccacagcugaccgcaggugagc

SEQ ID NO: 816472 - RNA, 22 nt, Human
ucucugaguaagugacaguuca

SEQ ID NO: 816473 - RNA, 22 nt, Human
cccaggagguuggggcuacagu

SEQ ID NO: 816474 - RNA, 20 nt, Human
gggugggagagucugagggu

SEQ ID NO: 816475 - RNA, 22 nt, Human
uaucaauacauguuaucagugu

SEQ ID NO: 816476 - RNA, 22 nt, Human
uugacacagaucaauauucaac

SEQ ID NO: 816477 - RNA, 22 nt, Human
uguuugaacugaauaacauagu

SEQ ID NO: 816478 - RNA, 22 nt, Human
gagagaaaugugcaguuugggc

SEQ ID NO: 816479 - RNA, 22 nt, Human
uuugcacuagcauuuguccaug

SEQ ID NO: 816480 - RNA, 20 nt, Human
ccagaagagaugaucaucca

SEQ ID NO: 816481 - RNA, 22 nt, Human
uugaaagugccaaguccuagug

SEQ ID NO: 816482 - RNA, 22 nt, Human
ucuucucuccugcuuggcagaa

SEQ ID NO: 816483 - RNA, 22 nt, Human
gcucacugccauucucuagaug

SEQ ID NO: 816484 - RNA, 22 nt, Human
gaccauuugcuaguaaauugca

SEQ ID NO: 816485 - RNA, 22 nt, Human
gucuuuaugguaugaaaacuga

SEQ ID NO: 816486 - RNA, 21 nt, Human
auacacauacacauaaaugug

SEQ ID NO: 816487 - RNA, 22 nt, Human
uaauaucuacuucauagaguuu

SEQ ID NO: 816488 - RNA, 22 nt, Human
uuuuucaagacaaccugcaugu

SEQ ID NO: 816489 - RNA, 22 nt, Human
uucuucuccgaggagggcuggu

SEQ ID NO: 816490 - RNA, 22 nt, Human
cagaguucaaagccugcuggga

SEQ ID NO: 816491 - RNA, 22 nt, Human
gauguuucaugcuagcaugugu

SEQ ID NO: 816492 - RNA, 22 nt, Human
ggcaggcugggugucauggagu

SEQ ID NO: 816493 - RNA, 22 nt, Human
aggcagcuuuguaguaaagcua

SEQ ID NO: 816494 - RNA, 21 nt, Human
auugaaagucaacaaucaguu

SEQ ID NO: 816495 - RNA, 22 nt, Human
agggcagcacaaggcauggacu

SEQ ID NO: 816496 - RNA, 22 nt, Human
acaaauaugguacucggagaaa

SEQ ID NO: 816497 - RNA, 22 nt, Human
uucucagagcucacuguaguaa

SEQ ID NO: 816498 - RNA, 22 nt, Human
acucaggaagaaagcagcuggu

SEQ ID NO: 816499 - RNA, 22 nt, Human
aggcaccuugcgguccagugaa

SEQ ID NO: 816500 - RNA, 22 nt, Human
cccaaggacacgggcagggaca

SEQ ID NO: 816501 - RNA, 22 nt, Human
aguuauuacucuuuaacauauu

SEQ ID NO: 816502 - RNA, 22 nt, Human
aggacagggauucaaacuccca

SEQ ID NO: 816503 - RNA, 19 nt, Human
ugugaaagcuaguguucuu

SEQ ID NO: 816504 - RNA, 22 nt, Human
ucauuuguucucauucucuacu

SEQ ID NO: 816505 - RNA, 22 nt, Human
uuugcagugauucuugcaguga

SEQ ID NO: 816506 - RNA, 22 nt, Human
acccaggaggcaagguugcagu

SEQ ID NO: 816507 - RNA, 22 nt, Human
caggguggcacaucacagcauu

SEQ ID NO: 816508 - RNA, 22 nt, Human
guccaugacugugacucacaug

SEQ ID NO: 816509 - RNA, 22 nt, Human
uccaggaggguuuucugccuuc

SEQ ID NO: 816510 - RNA, 22 nt, Human
ugaaggccagggauuugcagcc

SEQ ID NO: 816511 - RNA, 23 nt, Human
agaggggagcaucugcuggcuga

SEQ ID NO: 816512 - RNA, 22 nt, Human
uuuuagcacuaagugauaugcu

SEQ ID NO: 816513 - RNA, 22 nt, Human
uaugaacuuuugaugugacaug

SEQ ID NO: 816514 - RNA, 22 nt, Human
ccucacugcuauguguuugcuc

SEQ ID NO: 816515 - RNA, 21 nt, Human
aaugcauuaacauaaagcuga

SEQ ID NO: 816516 - RNA, 20 nt, Human
uuucaguuaucuugaccuuc

SEQ ID NO: 816517 - RNA, 22 nt, Human
cccuggaguccuggcaguugau

SEQ ID NO: 816518 - RNA, 21 nt, Human
uacagaaugcgcuucagucug

SEQ ID NO: 816519 - RNA, 18 nt, Human
uggcagcaggaagccauu

SEQ ID NO: 816520 - RNA, 22 nt, Human
gugauuuugagaccuauauagu

SEQ ID NO: 816521 - RNA, 22 nt, Human
uuucuucagagagagcuuuccc

SEQ ID NO: 816522 - RNA, 22 nt, Human
cucaggauuaaggaaucuaaau

SEQ ID NO: 816523 - RNA, 22 nt, Human
agcuacccgaggacaggcuaag

SEQ ID NO: 816524 - RNA, 22 nt, Human
agaggauguucuaggcacucau

SEQ ID NO: 816525 - RNA, 22 nt, Human
cucuucuugcuagacugagugc

SEQ ID NO: 816526 - RNA, 22 nt, Human
uuauucuucuucucuugccagg

SEQ ID NO: 816527 - RNA, 23 nt, Human
uccaugagaugugggcuucuagu

SEQ ID NO: 816528 - RNA, 22 nt, Human
ggaggcgauccugggaaacacc

SEQ ID NO: 816529 - RNA, 22 nt, Human
uucugaaccauugagcacugcc

SEQ ID NO: 816530 - RNA, 22 nt, Human
uaaaugagggcugacaugauug

SEQ ID NO: 816531 - RNA, 22 nt, Human
aggguaggaacugaguggaagg

SEQ ID NO: 816532 - RNA, 22 nt, Human
uuugcagucuggccugcuuugg

SEQ ID NO: 816533 - RNA, 22 nt, Human
gacagcuggcaguggaaaggug

SEQ ID NO: 816534 - RNA, 22 nt, Human
uucauucugcaguucucagcuc

SEQ ID NO: 816535 - RNA, 22 nt, Human
gggcaguugauggaggucugga

SEQ ID NO: 816536 - RNA, 22 nt, Human
uucuuaaaacuuauggacaggu

SEQ ID NO: 816537 - RNA, 22 nt, Human
ucaggaugguccuuuaugagaa

SEQ ID NO: 816538 - RNA, 22 nt, Human
uugcccagaguccacagcguac

SEQ ID NO: 816539 - RNA, 19 nt, Human
agucuuucccacucgucuu

SEQ ID NO: 816540 - RNA, 22 nt, Human
accaggaggccuugguucugag

SEQ ID NO: 816541 - RNA, 22 nt, Human
gucagagagggcacgugcacac

SEQ ID NO: 816542 - RNA, 22 nt, Human
cagcuggcuggucagugcacaa

SEQ ID NO: 816543 - RNA, 22 nt, Human
gggcagcugccagaggccaugg

SEQ ID NO: 816544 - RNA, 22 nt, Human
gucaggaugggcagccaaacua

SEQ ID NO: 816545 - RNA, 19 nt, Human
accaggaguaucagagcug

SEQ ID NO: 816546 - RNA, 22 nt, Human
uucuucuuuccuauaauuaauu

SEQ ID NO: 816547 - RNA, 22 nt, Human
aacaugauggggaagaacaaga

SEQ ID NO: 816548 - RNA, 22 nt, Human
uggcagcugucagaaugcaaau

SEQ ID NO: 816549 - RNA, 22 nt, Human
aagacaauuugauacuaguugc

SEQ ID NO: 816550 - RNA, 19 nt, Human
ccaggagagcuuggagaag

SEQ ID NO: 816551 - RNA, 22 nt, Human
cccaggagacugagcuguaacc

SEQ ID NO: 816552 - RNA, 22 nt, Human
uacccaggggcugagcagaggu

SEQ ID NO: 816553 - RNA, 22 nt, Human
cagcuucugcuaucgaacaucu

SEQ ID NO: 816554 - RNA, 22 nt, Human
aggcaggcacuccggaaguguc

SEQ ID NO: 816555 - RNA, 22 nt, Human
ucagagaguuagugucuuagcu

SEQ ID NO: 816556 - RNA, 22 nt, Human
agugcuuugugcucucacugca

SEQ ID NO: 816557 - RNA, 22 nt, Human
auucauaacggcaaaugucacc

SEQ ID NO: 816558 - RNA, 22 nt, Human
cccaggaaagagacugcugggu

SEQ ID NO: 816559 - RNA, 22 nt, Human
caaggccaaagggccacuguca

SEQ ID NO: 816560 - RNA, 19 nt, Human
ugcaagcuuuuucuuguua

SEQ ID NO: 816561 - RNA, 22 nt, Human
cccaucacagacacuggguuau

SEQ ID NO: 816562 - RNA, 16 nt, Human
auuuccagauuaugca

SEQ ID NO: 816563 - RNA, 22 nt, Human
uccaggagaccagauguaggcc

SEQ ID NO: 816564 - RNA, 23 nt, Human
uugcuuucaucaugagaugcucc

SEQ ID NO: 816565 - RNA, 22 nt, Human
aaaacaguuuaggcaucacagu

SEQ ID NO: 816566 - RNA, 22 nt, Human
caggcagccuucucgucucaca

SEQ ID NO: 816567 - RNA, 21 nt, Human
uccaggagcacgggacuagga

SEQ ID NO: 816568 - RNA, 22 nt, Human
agggauggaagacuugaagacc

SEQ ID NO: 816569 - RNA, 22 nt, Human
aggcagcuuuaacugguaguag

SEQ ID NO: 816570 - RNA, 22 nt, Human
agacaggcagaggcugcagagg

SEQ ID NO: 816571 - RNA, 22 nt, Human
auucacaaaaugauauagauac

SEQ ID NO: 816572 - RNA, 21 nt, Human
aggucagcccagcucuggaag

SEQ ID NO: 816573 - RNA, 22 nt, Human
cugccagucuaugcugcucggc

SEQ ID NO: 816574 - RNA, 22 nt, Human
uuauacauguguuuugagauga

SEQ ID NO: 816575 - RNA, 22 nt, Human
cagcuccucacgagucuugaaa

SEQ ID NO: 816576 - RNA, 22 nt, Human
cggcagcucgagggccacccgu

SEQ ID NO: 816577 - RNA, 22 nt, Human
uccaggaguccuggguggcccc

SEQ ID NO: 816578 - RNA, 22 nt, Human
ucuuuguaacugucuauugaga

SEQ ID NO: 816579 - RNA, 22 nt, Human
ugauuuuuagcuauucugaaga

SEQ ID NO: 816580 - RNA, 22 nt, Human
gagagcuguuuaucuucuucaa

SEQ ID NO: 816581 - RNA, 22 nt, Human
caaugugguggcagaugucagu

SEQ ID NO: 816582 - RNA, 22 nt, Human
gauaaugaugacaaugacaacc

SEQ ID NO: 816583 - RNA, 22 nt, Human
ucuuuccauggccacacagucu

SEQ ID NO: 816584 - RNA, 20 nt, Human
aguuauaguaucuagccaug

SEQ ID NO: 816585 - RNA, 19 nt, Human
uguguguuuauauauguau

SEQ ID NO: 816586 - RNA, 22 nt, Human
uuuguagaggguaauugacaga

SEQ ID NO: 816587 - RNA, 22 nt, Human
uugaaaguuaucuagauucuga

SEQ ID NO: 816588 - RNA, 22 nt, Human
uauuuguauguguguacauaua

SEQ ID NO: 816589 - RNA, 22 nt, Human
acugccauuggucaaaugagug

SEQ ID NO: 816590 - RNA, 22 nt, Human
aucuacccacugaacacaauau

SEQ ID NO: 816591 - RNA, 22 nt, Human
uuagccauggacugaauugacu

SEQ ID NO: 816592 - RNA, 22 nt, Human
uaacauuagguagacauaagcc

SEQ ID NO: 816593 - RNA, 22 nt, Human
aguggcaguagaugagcugguu

SEQ ID NO: 816594 - RNA, 22 nt, Human
caggauagaaaggccauggagu

SEQ ID NO: 816595 - RNA, 22 nt, Human
uacccagggcuuuucugaugca

SEQ ID NO: 816596 - RNA, 22 nt, Human
gaaggccauuagagccugugcc

SEQ ID NO: 816597 - RNA, 23 nt, Human
gggcaguuauguuguccuuggcu

SEQ ID NO: 816598 - RNA, 22 nt, Human
uagcuaucuguguccagaucca

SEQ ID NO: 816599 - RNA, 22 nt, Human
uaaugucagcauaguuuauuuu

SEQ ID NO: 816600 - RNA, 22 nt, Human
aauaugcauuaacuguguacau

SEQ ID NO: 816601 - RNA, 20 nt, Human
cagaggcauuuucagacucu

SEQ ID NO: 816602 - RNA, 22 nt, Human
cagacagggaccucgcuccaga

SEQ ID NO: 816603 - RNA, 22 nt, Human
auugcuguaaauuaucuuauua

SEQ ID NO: 816604 - RNA, 19 nt, Human
ggcagcuggacgcuguuca

SEQ ID NO: 816605 - RNA, 22 nt, Human
cuaaucaucuuucucuuaaagc

SEQ ID NO: 816606 - RNA, 22 nt, Human
uacuuccuguuuccaugucugu

SEQ ID NO: 816607 - RNA, 20 nt, Human
ggggcugcaugcagagaaga

SEQ ID NO: 816608 - RNA, 22 nt, Human
acucaggaaaaauguagugaua

SEQ ID NO: 816609 - RNA, 22 nt, Human
caggaaagggaugggcugccac

SEQ ID NO: 816610 - RNA, 22 nt, Human
aggguggcugaguagauggaag

SEQ ID NO: 816611 - RNA, 22 nt, Human
uucuccaacacaagcaugaugu

SEQ ID NO: 816612 - RNA, 22 nt, Human
aauaucagcacuuuugugguau

SEQ ID NO: 816613 - RNA, 22 nt, Human
gccaggagugucccacucauuu

SEQ ID NO: 816614 - RNA, 21 nt, Human
cucaaagaccaaaaguguaga

SEQ ID NO: 816615 - RNA, 22 nt, Human
uucucagguagugcugaugcug

SEQ ID NO: 816616 - RNA, 22 nt, Human
cugcugugcagacagacucucu

SEQ ID NO: 816617 - RNA, 22 nt, Human
uaaauuaugucacaugacucug

SEQ ID NO: 816618 - RNA, 20 nt, Human
cccagguaggugccaugagu

SEQ ID NO: 816619 - RNA, 21 nt, Human
uuagaaagcucacuacaguua

SEQ ID NO: 816620 - RNA, 17 nt, Human
gcgcagcuccuggcgcg

SEQ ID NO: 816621 - RNA, 22 nt, Human
cugcuguggccagccaggucaa

SEQ ID NO: 816622 - RNA, 22 nt, Human
aaagccaugggucuuuggcaua

SEQ ID NO: 816623 - RNA, 22 nt, Human
ugcugaaauuagaacauugagg

SEQ ID NO: 816624 - RNA, 22 nt, Human
uucaugugaauauauuugucuu

SEQ ID NO: 816625 - RNA, 22 nt, Human
cccaggaggugugcccaacucg

SEQ ID NO: 816626 - RNA, 22 nt, Human
uuugaaaguucuucugacacua

SEQ ID NO: 816627 - RNA, 22 nt, Human
agaggagugggaagcagugcaa

SEQ ID NO: 816628 - RNA, 22 nt, Human
caggaugagaagggcucuuacg

SEQ ID NO: 816629 - RNA, 23 nt, Human
cuugcagggcuggaggcuuagaa

SEQ ID NO: 816630 - RNA, 22 nt, Human
aacaugcucuguuucuuggaug

SEQ ID NO: 816631 - RNA, 22 nt, Human
uguacauagaucuugaaaauua

SEQ ID NO: 816632 - RNA, 22 nt, Human
uauguguuugacacccugcaag

SEQ ID NO: 816633 - RNA, 22 nt, Human
ggcucagacucccaggcccucu

SEQ ID NO: 816634 - RNA, 22 nt, Human
uugcaauagccuuauuuccaaa

SEQ ID NO: 816635 - RNA, 21 nt, Human
ugaggcaggggugcuuuuguc

SEQ ID NO: 816636 - RNA, 22 nt, Human
guucuucagauuccauuucagu

SEQ ID NO: 816637 - RNA, 22 nt, Human
augugaggcagcacggagauua

SEQ ID NO: 816638 - RNA, 22 nt, Human
agaggaggaagagcuuuaaaau

SEQ ID NO: 816639 - RNA, 22 nt, Human
aucugcuugaaugagcaacagg

SEQ ID NO: 816640 - RNA, 22 nt, Human
aggguggcuggaggaaucagaa

SEQ ID NO: 816641 - RNA, 22 nt, Human
cuucucagucaccugugagucu

SEQ ID NO: 816642 - RNA, 22 nt, Human
auugaaagguuuugagcagaua

SEQ ID NO: 816643 - RNA, 22 nt, Human
auucuucacauggauaggaucu

SEQ ID NO: 816644 - RNA, 22 nt, Human
ugcuggguuaccuaagccuaaa

SEQ ID NO: 816645 - RNA, 22 nt, Human
ugcugcuguauccuuaguguca

SEQ ID NO: 816646 - RNA, 23 nt, Human
acuuuauugaccccaggucaguu

SEQ ID NO: 816647 - RNA, 22 nt, Human
acaaauauuuacugaauccacu

SEQ ID NO: 816648 - RNA, 22 nt, Human
agacccagaaagcagcugcauu

SEQ ID NO: 816649 - RNA, 22 nt, Human
uuuucauuguuccucgagcauu

SEQ ID NO: 816650 - RNA, 22 nt, Human
uaaggccagcaugaaugcagca

SEQ ID NO: 816651 - RNA, 22 nt, Human
auaaaugauucagcaggaaaua

SEQ ID NO: 816652 - RNA, 22 nt, Human
auggcagccugagcagaggaau

SEQ ID NO: 816653 - RNA, 22 nt, Human
cuggcuguauuaguuugauccu

SEQ ID NO: 816654 - RNA, 20 nt, Human
agcuucuucugucuaauuuu

SEQ ID NO: 816655 - RNA, 22 nt, Human
guuuuucuuugugugaagacaa

SEQ ID NO: 816656 - RNA, 22 nt, Human
uucauucuuauuugugaucugg

SEQ ID NO: 816657 - RNA, 20 nt, Human
aggaggggauagaaucaaag

SEQ ID NO: 816658 - RNA, 22 nt, Human
auucuucagcaggggacacuau

SEQ ID NO: 816659 - RNA, 22 nt, Human
aaggcaguacuuuauguccaua

SEQ ID NO: 816660 - RNA, 22 nt, Human
ccaggacaaguguggccauggc

SEQ ID NO: 816661 - RNA, 22 nt, Human
accaggagacaugaccaaugag

SEQ ID NO: 816662 - RNA, 22 nt, Human
ucuucauuuuauagcaucugug

SEQ ID NO: 816663 - RNA, 22 nt, Human
ucuuugaacuuggcugaucucu

SEQ ID NO: 816664 - RNA, 22 nt, Human
aggcaagcugcagagaguccuu

SEQ ID NO: 816665 - RNA, 22 nt, Human
gagaggucaucucccaucagca

SEQ ID NO: 816666 - RNA, 19 nt, Human
cuggccaggccaggggccc

SEQ ID NO: 816667 - RNA, 22 nt, Human
aaggcagccgugugacugcaug

SEQ ID NO: 816668 - RNA, 22 nt, Human
ucccaggauguuggcggcaggu

SEQ ID NO: 816669 - RNA, 22 nt, Human
uucacauuggugauauguuucu

SEQ ID NO: 816670 - RNA, 22 nt, Human
uuguaaaugaccuuuucuaauu

SEQ ID NO: 816671 - RNA, 22 nt, Human
uugagaagaggcuuuguaggaa

SEQ ID NO: 816672 - RNA, 22 nt, Human
gggcagcucuuugguauccuuc

SEQ ID NO: 816673 - RNA, 22 nt, Human
aaggcaguaggaucuuccacag

SEQ ID NO: 816674 - RNA, 22 nt, Human
aaguugagaugucauaggagac

SEQ ID NO: 816675 - RNA, 22 nt, Human
agggacuuguguccuauguaug

SEQ ID NO: 816676 - RNA, 22 nt, Human
aggagaggcucuaacucugugu

SEQ ID NO: 816677 - RNA, 22 nt, Human
cagagggcacaugguuuccuca

SEQ ID NO: 816678 - RNA, 17 nt, Human
cagacaggcugucaccc

SEQ ID NO: 816679 - RNA, 22 nt, Human
cagcuggcaaguggagcagggu

SEQ ID NO: 816680 - RNA, 22 nt, Human
ggcaugcugcguacagaugaac

SEQ ID NO: 816681 - RNA, 22 nt, Human
cugcuuuguaaaauagacauaa

SEQ ID NO: 816682 - RNA, 22 nt, Human
acaacauucuuaaauacacuga

SEQ ID NO: 816683 - RNA, 22 nt, Human
uaucuaaauggaauauuccaga

SEQ ID NO: 816684 - RNA, 22 nt, Human
aaggcagccuuuugaguugauu

SEQ ID NO: 816685 - RNA, 22 nt, Human
uuucaguuuuugcucgauguau

SEQ ID NO: 816686 - RNA, 21 nt, Human
auacauucuauuaagcauuua

SEQ ID NO: 816687 - RNA, 22 nt, Human
uucuugcaggucacucacugag

SEQ ID NO: 816688 - RNA, 22 nt, Human
acaauguguuuuuauacauuug

SEQ ID NO: 816689 - RNA, 22 nt, Human
cggcagcugauugcagagcacc

SEQ ID NO: 816690 - RNA, 22 nt, Human
uuuacuuuugguaaggucauuu

SEQ ID NO: 816691 - RNA, 22 nt, Human
uucccaugccuggccccuaucc

SEQ ID NO: 816692 - RNA, 22 nt, Human
cagugauguuucugcaucagag

SEQ ID NO: 816693 - RNA, 22 nt, Human
agcuggcagcucucagggguac

SEQ ID NO: 816694 - RNA, 22 nt, Human
uucaggauucugugucugacaa

SEQ ID NO: 816695 - RNA, 22 nt, Human
gaccauuuguugaaaagauuau

SEQ ID NO: 816696 - RNA, 22 nt, Human
aaguccaugaucaagauguggc

SEQ ID NO: 816697 - RNA, 22 nt, Human
ccagugcuuccaggaauacggu

SEQ ID NO: 816698 - RNA, 22 nt, Human
cacucaggguacaauggagggc

SEQ ID NO: 816699 - RNA, 22 nt, Human
aggcaggcucaaugcccagucu

SEQ ID NO: 816700 - RNA, 22 nt, Human
uuucaguuuaugucuugaauua

SEQ ID NO: 816701 - RNA, 22 nt, Human
gcucccagcaauugaggcagcc

SEQ ID NO: 816702 - RNA, 22 nt, Human
ucacugucugaaagaaauggcc

SEQ ID NO: 816703 - RNA, 22 nt, Human
uaucuguuugcucacagguguu

SEQ ID NO: 816704 - RNA, 22 nt, Human
gcccaggaggucaaguagcuau

SEQ ID NO: 816705 - RNA, 22 nt, Human
gcccaguaguucaagguugcag

SEQ ID NO: 816706 - RNA, 22 nt, Human
acacagaguauuuagaaggggu

SEQ ID NO: 816707 - RNA, 22 nt, Human
ucaucucaaaacccaaggggca

SEQ ID NO: 816708 - RNA, 19 nt, Human
gcuuuggagggagguucua

SEQ ID NO: 816709 - RNA, 22 nt, Human
guugaaaguagaugcuauuugg

SEQ ID NO: 816710 - RNA, 22 nt, Human
caggcagcugggucaccguccc

SEQ ID NO: 816711 - RNA, 22 nt, Human
gaagcagcuuucuggugaggag

SEQ ID NO: 816712 - RNA, 22 nt, Human
aggcagauuuaggagaaaagaa

SEQ ID NO: 816713 - RNA, 22 nt, Human
gcucaggaaaacagucuaguaa

SEQ ID NO: 816714 - RNA, 22 nt, Human
uucuucaaauagcagggaguca

SEQ ID NO: 816715 - RNA, 22 nt, Human
agaggggaaggaugugauguga

SEQ ID NO: 816716 - RNA, 22 nt, Human
acagagagaaacaaucagcagc

SEQ ID NO: 816717 - RNA, 22 nt, Human
ucugcagguguuggaaggguca

SEQ ID NO: 816718 - RNA, 22 nt, Human
gagagaggccuccauguacuga

SEQ ID NO: 816719 - RNA, 22 nt, Human
acccaggaggugacacagggcu

SEQ ID NO: 816720 - RNA, 22 nt, Human
cuggaggcacccuuagagaggc

SEQ ID NO: 816721 - RNA, 22 nt, Human
uuuguaaaggccugaauuucag

SEQ ID NO: 816722 - RNA, 22 nt, Human
caaauagugucacauugugagg

SEQ ID NO: 816723 - RNA, 22 nt, Human
ucuucagagugaaagucuguga

SEQ ID NO: 816724 - RNA, 17 nt, Human
uucaaagcuuaucaagg

SEQ ID NO: 816725 - RNA, 22 nt, Human
acccaggacaugggcacccgug

SEQ ID NO: 816726 - RNA, 22 nt, Human
acccaggacuuggcaaccucau

SEQ ID NO: 816727 - RNA, 22 nt, Human
uggcagcugcaggccuccugag

SEQ ID NO: 816728 - RNA, 22 nt, Human
cuuuggcacagucucauuugau

SEQ ID NO: 816729 - RNA, 22 nt, Human
augacaguucuacacuuaaucu

SEQ ID NO: 816730 - RNA, 22 nt, Human
uagcccagaagagggaagcaac

SEQ ID NO: 816731 - RNA, 22 nt, Human
uuucaguuuccagcuuugucau

SEQ ID NO: 816732 - RNA, 22 nt, Human
cugcugugcaacauugcaccua

SEQ ID NO: 816733 - RNA, 22 nt, Human
uucaggauucucucccauuuac

SEQ ID NO: 816734 - RNA, 22 nt, Human
accgaaggaaacuggaaccguu

SEQ ID NO: 816735 - RNA, 22 nt, Human
ucugggaacagccuggcugugu

SEQ ID NO: 816736 - RNA, 22 nt, Human
cauuguuaccaucuuuuaccua

SEQ ID NO: 816737 - RNA, 22 nt, Human
auuuccauagagcgucucacag

SEQ ID NO: 816738 - RNA, 22 nt, Human
aauauaugugguauugaccagc

SEQ ID NO: 816739 - RNA, 22 nt, Human
guucuucaucauuaacacucug

SEQ ID NO: 816740 - RNA, 22 nt, Human
ugcccaggaucuggcgaugcuc

SEQ ID NO: 816741 - RNA, 22 nt, Human
ucauuucccuccuacaaagagg

SEQ ID NO: 816742 - RNA, 17 nt, Human
gccucugcuugugucau

SEQ ID NO: 816743 - RNA, 22 nt, Human
auuuguagugaagugaaaauaa

SEQ ID NO: 816744 - RNA, 22 nt, Human
ucugcaggaggcuggcugcagg

SEQ ID NO: 816745 - RNA, 22 nt, Human
cuggaaauuggagaugauguuu

SEQ ID NO: 816746 - RNA, 22 nt, Human
guuaucaugcuucaucaucacu

SEQ ID NO: 816747 - RNA, 21 nt, Human
ucuugaaaauuguagcaguuu

SEQ ID NO: 816748 - RNA, 21 nt, Human
acagcauguuuguguguuugc

SEQ ID NO: 816749 - RNA, 22 nt, Human
uggcaggcagugugggagcugg

SEQ ID NO: 816750 - RNA, 22 nt, Human
caggcagcauuuacucugauga

SEQ ID NO: 816751 - RNA, 22 nt, Human
acucagaaccauuuacucugag

SEQ ID NO: 816752 - RNA, 22 nt, Human
caguucuuuguggggaguucuc

SEQ ID NO: 816753 - RNA, 22 nt, Human
uucuuuuacauuaagauuucag

SEQ ID NO: 816754 - RNA, 22 nt, Human
acacauuucuaaauuuuuaccg

SEQ ID NO: 816755 - RNA, 22 nt, Human
aaaggaagauugagcuuuucca

SEQ ID NO: 816756 - RNA, 22 nt, Human
uugcauuuccuguacuguuuga

SEQ ID NO: 816757 - RNA, 22 nt, Human
cucaggauggaagccuacagga

SEQ ID NO: 816758 - RNA, 22 nt, Human
cacucaggcugugucaggagga

SEQ ID NO: 816759 - RNA, 22 nt, Human
caacauuucaaggucuuuagga

SEQ ID NO: 816760 - RNA, 22 nt, Human
gcuucccagcagaggaaagacu

SEQ ID NO: 816761 - RNA, 22 nt, Human
gaggcaccucgcgggaggaggc

SEQ ID NO: 816762 - RNA, 22 nt, Human
uagagcugggcagugcucugag

SEQ ID NO: 816763 - RNA, 22 nt, Human
uugcugugaaaccaugggaagu

SEQ ID NO: 816764 - RNA, 22 nt, Human
cccaggagguggagguugcagc

SEQ ID NO: 816765 - RNA, 22 nt, Human
augcuuuuccaggagaaauaua

SEQ ID NO: 816766 - RNA, 22 nt, Human
uaagaacuucggacauguuauc

SEQ ID NO: 816767 - RNA, 22 nt, Human
auuucucuuagcaagacauuac

SEQ ID NO: 816768 - RNA, 22 nt, Human
ugaaaugaaacagaacauauca

SEQ ID NO: 816769 - RNA, 22 nt, Human
accauccugaaaccuucaugcu

SEQ ID NO: 816770 - RNA, 22 nt, Human
uccaugaggaccaaauucguag

SEQ ID NO: 816771 - RNA, 22 nt, Human
ggcuuugccuggaauuuccuug

SEQ ID NO: 816772 - RNA, 22 nt, Human
uacuuucuguccuucuguuaaa

SEQ ID NO: 816773 - RNA, 19 nt, Human
gugcuuuuuaagagcucag

SEQ ID NO: 816774 - RNA, 22 nt, Human
aaaccgcaauuacuuuugcguc

SEQ ID NO: 816775 - RNA, 22 nt, Human
uugcugaaaucuaugacauccu

SEQ ID NO: 816776 - RNA, 22 nt, Human
uaggaggguuagagggaaauau

SEQ ID NO: 816777 - RNA, 22 nt, Human
uuuuuaguagagguggguuuca

SEQ ID NO: 816778 - RNA, 22 nt, Human
uccaggagguaugaguggcccc

SEQ ID NO: 816779 - RNA, 22 nt, Human
ucuucacaggagccugccugcc

SEQ ID NO: 816780 - RNA, 22 nt, Human
aggcacaguuucauccccgggc

SEQ ID NO: 816781 - RNA, 22 nt, Human
cccaggauggggcugcaguuau

SEQ ID NO: 816782 - RNA, 22 nt, Human
agacaaauggaguaugagcaac

SEQ ID NO: 816783 - RNA, 22 nt, Human
uccauucauucauugaugaaca

SEQ ID NO: 816784 - RNA, 22 nt, Human
caggauggccccggggcugugc

SEQ ID NO: 816785 - RNA, 22 nt, Human
cuguauuuguccucuauuuauu

SEQ ID NO: 816786 - RNA, 22 nt, Human
uuccaagagcuuuaauuguuga

SEQ ID NO: 816787 - RNA, 22 nt, Human
aguaaaaauugaggugcaaaau

SEQ ID NO: 816788 - RNA, 22 nt, Human
gaggcagccucaguggaccucg

SEQ ID NO: 816789 - RNA, 22 nt, Human
cagaggaguucaguacacagcc

SEQ ID NO: 816790 - RNA, 22 nt, Human
uuagaaagaacuuuagauauca

SEQ ID NO: 816791 - RNA, 22 nt, Human
aaauuaguacauugcaaagucc

SEQ ID NO: 816792 - RNA, 22 nt, Human
aaacugcuuuccacaguggcua

SEQ ID NO: 816793 - RNA, 22 nt, Human
ugaaagguagcuggccucauag

SEQ ID NO: 816794 - RNA, 22 nt, Human
caagaugggcaccccagcaccu

SEQ ID NO: 816795 - RNA, 22 nt, Human
aguuugaaaguauugacagaag

SEQ ID NO: 816796 - RNA, 22 nt, Human
uuugaaagcaggugugggaggg

SEQ ID NO: 816797 - RNA, 22 nt, Human
aggaaaggccuuugcauuuggu

SEQ ID NO: 816798 - RNA, 22 nt, Human
aaguuugcauagauuaagcauu

SEQ ID NO: 816799 - RNA, 22 nt, Human
uggagacucugcaucugugaca

SEQ ID NO: 816800 - RNA, 22 nt, Human
uacuuuuagccuauuugauucu

SEQ ID NO: 816801 - RNA, 22 nt, Human
uggcagcuagauaguguguuua

SEQ ID NO: 816802 - RNA, 22 nt, Human
uucucuuuucaccaguugcuaa

SEQ ID NO: 816803 - RNA, 20 nt, Human
ccacaggaguccagucgacc

SEQ ID NO: 816804 - RNA, 22 nt, Human
augaguucaauuguuucaguca

SEQ ID NO: 816805 - RNA, 17 nt, Human
ucauuuguugugacuag

SEQ ID NO: 816806 - RNA, 22 nt, Human
cauugcuuccuaugucccuucu

SEQ ID NO: 816807 - RNA, 21 nt, Human
uuugaaagcccuauguuuuca

SEQ ID NO: 816808 - RNA, 17 nt, Human
uccaggagaggcaaugg

SEQ ID NO: 816809 - RNA, 22 nt, Human
uucugugauugacauguggcuu

SEQ ID NO: 816810 - RNA, 22 nt, Human
ugcccaggcuggaaugcagugg

SEQ ID NO: 816811 - RNA, 22 nt, Human
uuuaacagguaaaguaaaugug

SEQ ID NO: 816812 - RNA, 22 nt, Human
cuucugcaauaaguuuuggucc

SEQ ID NO: 816813 - RNA, 22 nt, Human
aaauugcauuuuaaagguagau

SEQ ID NO: 816814 - RNA, 22 nt, Human
aaagccagagcaagcugucaca

SEQ ID NO: 816815 - RNA, 22 nt, Human
aucugccugcaguggagguggg

SEQ ID NO: 816816 - RNA, 22 nt, Human
acucagaagauauaaugacuca

SEQ ID NO: 816817 - RNA, 19 nt, Human
uucccaggaaaggggugca

SEQ ID NO: 816818 - RNA, 22 nt, Human
agcugaugccauguggaacagu

SEQ ID NO: 816819 - RNA, 22 nt, Human
auuucaaggcuauuaauauaaa

SEQ ID NO: 816820 - RNA, 22 nt, Human
aguucuucauaaccuuacugug

SEQ ID NO: 816821 - RNA, 22 nt, Human
aggccagcagcaugacggcauc

SEQ ID NO: 816822 - RNA, 22 nt, Human
uguggaaaagaauaagggagau

SEQ ID NO: 816823 - RNA, 22 nt, Human
cacaaaugguuguagacauuaa

SEQ ID NO: 816824 - RNA, 22 nt, Human
auuguuaugaaaauaagauguu

SEQ ID NO: 816825 - RNA, 22 nt, Human
cucccagagagcaggugggccg

SEQ ID NO: 816826 - RNA, 22 nt, Human
uccaggagacacaagguacaua

SEQ ID NO: 816827 - RNA, 22 nt, Human
aggagaaggaagugcaucacua

SEQ ID NO: 816828 - RNA, 22 nt, Human
gacagugcauuuccuggcaugg

SEQ ID NO: 816829 - RNA, 22 nt, Human
ugagccuguccugugcauguga

SEQ ID NO: 816830 - RNA, 22 nt, Human
ucaaucacguguuccauguucu

SEQ ID NO: 816831 - RNA, 22 nt, Human
uuuccagguauuaauacuguau

SEQ ID NO: 816832 - RNA, 23 nt, Human
aggcagcuggguagcaucuuucu

SEQ ID NO: 816833 - RNA, 22 nt, Human
augaaggcuguguggagccccc

SEQ ID NO: 816834 - RNA, 22 nt, Human
aaaggccacacagagcagggag

SEQ ID NO: 816835 - RNA, 17 nt, Human
cccacggaggugugaaa

SEQ ID NO: 816836 - RNA, 22 nt, Human
ggcagcugucucugaguuagca

SEQ ID NO: 816837 - RNA, 22 nt, Human
uuauucuuuucuccagaauccc

SEQ ID NO: 816838 - RNA, 22 nt, Human
uucuucucagggucccacaugg

SEQ ID NO: 816839 - RNA, 22 nt, Human
cuucuucaagagaaugggagac

SEQ ID NO: 816840 - RNA, 22 nt, Human
uucuucuucuggcugcaccugg

SEQ ID NO: 816841 - RNA, 22 nt, Human
gauggcagguaguggucucauc

SEQ ID NO: 816842 - RNA, 22 nt, Human
uauuuccaaaagccuauuauga

SEQ ID NO: 816843 - RNA, 22 nt, Human
caggaugagaggcccagggaag

SEQ ID NO: 816844 - RNA, 22 nt, Human
agucuugcucuugcaucugcuu

SEQ ID NO: 816845 - RNA, 22 nt, Human
cucucuguuaugcuuucaugaa

SEQ ID NO: 816846 - RNA, 22 nt, Human
cccaugagauucugaauuuggc

SEQ ID NO: 816847 - RNA, 22 nt, Human
ucugcuguucauucuuuuagcu

SEQ ID NO: 816848 - RNA, 22 nt, Human
uuugaaaggguuaugagacuga

SEQ ID NO: 816849 - RNA, 22 nt, Human
gaaggaggcguuagcccuagga

SEQ ID NO: 816850 - RNA, 22 nt, Human
ccaggagauuuuuccauagcac

SEQ ID NO: 816851 - RNA, 22 nt, Human
uuugcagucaaauuugcuaaau

SEQ ID NO: 816852 - RNA, 22 nt, Human
gaggacaggagacucacuguuu

SEQ ID NO: 816853 - RNA, 22 nt, Human
cuacccaggcuggagugcagua

SEQ ID NO: 816854 - RNA, 23 nt, Human
gagugcagaauagacaugcagug

SEQ ID NO: 816855 - RNA, 22 nt, Human
cauuuguaucauauguaucuua

SEQ ID NO: 816856 - RNA, 22 nt, Human
gccucugcaauuacauugugcc

SEQ ID NO: 816857 - RNA, 22 nt, Human
aggcggcuccgggagugugggc

SEQ ID NO: 816858 - RNA, 22 nt, Human
cuauuucaaggcccagauauga

SEQ ID NO: 816859 - RNA, 22 nt, Human
agucucuuccuucaaggcuggu

SEQ ID NO: 816860 - RNA, 22 nt, Human
ugguaauuaauuugauagguuc

SEQ ID NO: 816861 - RNA, 22 nt, Human
ugagccugguugcagugucugg

SEQ ID NO: 816862 - RNA, 22 nt, Human
cagagaaaaaauccugcucuca

SEQ ID NO: 816863 - RNA, 22 nt, Human
ucugcugugauuugcuaccugu

SEQ ID NO: 816864 - RNA, 17 nt, Human
cagcucugcaucuuccu

SEQ ID NO: 816865 - RNA, 22 nt, Human
gauguagagggaagauuuuaaa

SEQ ID NO: 816866 - RNA, 23 nt, Human
uggaggaaacacaucagaagacc

SEQ ID NO: 816867 - RNA, 23 nt, Human
uucuucucaauuaguugauucag

SEQ ID NO: 816868 - RNA, 22 nt, Human
ucauuucuauugcuacugucug

SEQ ID NO: 816869 - RNA, 22 nt, Human
caggcagggagcuggaaaggau

SEQ ID NO: 816870 - RNA, 22 nt, Human
uaaugucaaggugauagauuug

SEQ ID NO: 816871 - RNA, 22 nt, Human
aaugaaauguagcuuauccaua

SEQ ID NO: 816872 - RNA, 22 nt, Human
augcuguguggccaccuccaug

SEQ ID NO: 816873 - RNA, 22 nt, Human
gagguggugguggaggcauagc

SEQ ID NO: 816874 - RNA, 22 nt, Human
cucuccucugaaguggugaccc

SEQ ID NO: 816875 - RNA, 22 nt, Human
ccaggaaauagugcugugaucu

SEQ ID NO: 816876 - RNA, 22 nt, Human
cucacuguuuaauagcuggauc

SEQ ID NO: 816877 - RNA, 19 nt, Human
uggagggguuugaaugugg

SEQ ID NO: 816878 - RNA, 22 nt, Human
uagcacauuguugaccagaagg

SEQ ID NO: 816879 - RNA, 22 nt, Human
gaaauauucuugucuuguuuuc

SEQ ID NO: 816880 - RNA, 22 nt, Human
ggaggcagaacuucccgucagu

SEQ ID NO: 816881 - RNA, 22 nt, Human
aaguguagauuauggagugucu

SEQ ID NO: 816882 - RNA, 22 nt, Human
caggagagauaugaguccccac

SEQ ID NO: 816883 - RNA, 22 nt, Human
gaggcacugcaguacagugacu

SEQ ID NO: 816884 - RNA, 22 nt, Human
uuucaggguacauggagcaaau

SEQ ID NO: 816885 - RNA, 22 nt, Human
agaggcggagcuugcagugagc

SEQ ID NO: 816886 - RNA, 22 nt, Human
ucugcaggcuguacaggaagca

SEQ ID NO: 816887 - RNA, 22 nt, Human
gcagcuccuccugggcuggaga

SEQ ID NO: 816888 - RNA, 22 nt, Human
uucuucaaaacaacacuggccu

SEQ ID NO: 816889 - RNA, 22 nt, Human
uacugcauaacuggcauguggg

SEQ ID NO: 816890 - RNA, 22 nt, Human
aauaucaacaguguccuucuaa

SEQ ID NO: 816891 - RNA, 22 nt, Human
acccaggagcucugggguccuc

SEQ ID NO: 816892 - RNA, 22 nt, Human
uauguuauuuucauacaacaga

SEQ ID NO: 816893 - RNA, 22 nt, Human
ucuucaucucagauuaacagga

SEQ ID NO: 816894 - RNA, 20 nt, Human
ucaggaugugcugagugaag

SEQ ID NO: 816895 - RNA, 22 nt, Human
gcugauguuuaguugauguuac

SEQ ID NO: 816896 - RNA, 22 nt, Human
uaaggccaaacuauuauaguuc

SEQ ID NO: 816897 - RNA, 22 nt, Human
cagucucuugcuucauuaguug

SEQ ID NO: 816898 - RNA, 22 nt, Human
acuaagugauucuaagcaucuu

SEQ ID NO: 816899 - RNA, 23 nt, Human
cccuggaguaaauucuuggaagg

SEQ ID NO: 816900 - RNA, 22 nt, Human
cauuuguacagaacagcuuuau

SEQ ID NO: 816901 - RNA, 22 nt, Human
gaggaggccaguggaaggaagc

SEQ ID NO: 816902 - RNA, 18 nt, Human
ucaggagacacagacgca

SEQ ID NO: 816903 - RNA, 22 nt, Human
gcaccugauugauuucacugcu

SEQ ID NO: 816904 - RNA, 22 nt, Human
uuucaucuaacacuacauaggg

SEQ ID NO: 816905 - RNA, 22 nt, Human
uuucucuguucucuaacuguaa

SEQ ID NO: 816906 - RNA, 22 nt, Human
cagggaggaugggcuguuuugc

SEQ ID NO: 816907 - RNA, 22 nt, Human
uuuuuauaugaaggauagugcg

SEQ ID NO: 816908 - RNA, 22 nt, Human
caaauauuccagguacaucccu

SEQ ID NO: 816909 - RNA, 22 nt, Human
uguuguuuucucauggagaaua

SEQ ID NO: 816910 - RNA, 22 nt, Human
cuacccagauccaggauggcua

SEQ ID NO: 816911 - RNA, 22 nt, Human
aagcuggcaugucaccugagaa

SEQ ID NO: 816912 - RNA, 22 nt, Human
auagucuuagaucagauaaagu

SEQ ID NO: 816913 - RNA, 22 nt, Human
uaaggccaaggggccauagucu

SEQ ID NO: 816914 - RNA, 18 nt, Human
ugaggcagucagugaugg

SEQ ID NO: 816915 - RNA, 19 nt, Human
gaggucagcaagaaguauu

SEQ ID NO: 816916 - RNA, 22 nt, Human
cuuaaauuuucaucuacaagaa

SEQ ID NO: 816917 - RNA, 22 nt, Human
acagcagcuugcgugucugguc

SEQ ID NO: 816918 - RNA, 22 nt, Human
ccagagagaaauggauuugagu

SEQ ID NO: 816919 - RNA, 22 nt, Human
auugaaaguccuaucuaaggga

SEQ ID NO: 816920 - RNA, 22 nt, Human
ccucaggauccgcaggugcagu

SEQ ID NO: 816921 - RNA, 22 nt, Human
uuccucagaaaauacuguccaa

SEQ ID NO: 816922 - RNA, 22 nt, Human
uugcugaaaacaguggguauug

SEQ ID NO: 816923 - RNA, 22 nt, Human
aaauuauuacaagcuaguuggc

SEQ ID NO: 816924 - RNA, 22 nt, Human
ggagugucagaaacaguguccu

SEQ ID NO: 816925 - RNA, 22 nt, Human
uccauuuuagagaugaagaaac

SEQ ID NO: 816926 - RNA, 22 nt, Human
cagagggcucuuggcugccugc

SEQ ID NO: 816927 - RNA, 22 nt, Human
acaacauuauacauagaaagcu

SEQ ID NO: 816928 - RNA, 22 nt, Human
aagcagaggguauggccagguu

SEQ ID NO: 816929 - RNA, 22 nt, Human
ugaggcaggacuugcauaaagu

SEQ ID NO: 816930 - RNA, 22 nt, Human
cugcuguggaugcaggaccuca

SEQ ID NO: 816931 - RNA, 21 nt, Human
aaugaaguggcuauuuugagg

SEQ ID NO: 816932 - RNA, 20 nt, Human
gggcagcuccccucauucug

SEQ ID NO: 816933 - RNA, 22 nt, Human
aucccaugagaccacguuggcu

SEQ ID NO: 816934 - RNA, 22 nt, Human
cagugauggauauggagaaguc

SEQ ID NO: 816935 - RNA, 22 nt, Human
uuuccagagcaugucugcucag

SEQ ID NO: 816936 - RNA, 22 nt, Human
gcagagcuucuguccuucagga

SEQ ID NO: 816937 - RNA, 22 nt, Human
uuauuuaaaagugguaagauuc

SEQ ID NO: 816938 - RNA, 22 nt, Human
gaucauuuugaugcccuuuuag

SEQ ID NO: 816939 - RNA, 22 nt, Human
ucuguggauuuuaguguucaug

SEQ ID NO: 816940 - RNA, 22 nt, Human
cggagccugcuuguugcagcug

SEQ ID NO: 816941 - RNA, 22 nt, Human
auugcuguacacuucuagaucu

SEQ ID NO: 816942 - RNA, 22 nt, Human
acccaggagacagguugcagug

SEQ ID NO: 816943 - RNA, 23 nt, Human
uaugaacugcauugcuggugugu

SEQ ID NO: 816944 - RNA, 22 nt, Human
agucucugucguagaucagcgu

SEQ ID NO: 816945 - RNA, 22 nt, Human
uggcaaggcugugggggcagag

SEQ ID NO: 816946 - RNA, 23 nt, Human
uccugaggguuucccagccuugg

SEQ ID NO: 816947 - RNA, 22 nt, Human
ucuugcuaaagaccaacacauu

SEQ ID NO: 816948 - RNA, 22 nt, Human
aggcuagcuuuggcucaguaaa

SEQ ID NO: 816949 - RNA, 21 nt, Human
ucucugugucuuuaagcugga

SEQ ID NO: 816950 - RNA, 22 nt, Human
cugcuuugcauagcugccagag

SEQ ID NO: 816951 - RNA, 22 nt, Human
uauuuuaucugccagaguggag

SEQ ID NO: 816952 - RNA, 23 nt, Human
uguugaaguaacuguuacauaga

SEQ ID NO: 816953 - RNA, 22 nt, Human
accaggagaggcacuugcaaug

SEQ ID NO: 816954 - RNA, 23 nt, Human
gugagucuugccuuugcugugga

SEQ ID NO: 816955 - RNA, 22 nt, Human
cccaggaggcagaaguugcagu

SEQ ID NO: 816956 - RNA, 22 nt, Human
ugcuuggcuuucugagcuucug

SEQ ID NO: 816957 - RNA, 22 nt, Human
cagaagaggacuggguagcuca

SEQ ID NO: 816958 - RNA, 18 nt, Human
acugugugaauuagcucc

SEQ ID NO: 816959 - RNA, 21 nt, Human
auggagggaccagggaagcag

SEQ ID NO: 816960 - RNA, 22 nt, Human
cccaaggaagacgcuugugaua

SEQ ID NO: 816961 - RNA, 22 nt, Human
ucuaaccuuugaaacugcuuuc

SEQ ID NO: 816962 - RNA, 21 nt, Human
uucuucaguuuaauauaaaau

SEQ ID NO: 816963 - RNA, 22 nt, Human
cuucagaggggacucaaaguca

SEQ ID NO: 816964 - RNA, 22 nt, Human
aaagccauugaacuguacuuua

SEQ ID NO: 816965 - RNA, 22 nt, Human
uguucuuuggcuucacagcucu

SEQ ID NO: 816966 - RNA, 22 nt, Human
gggcagcuccuguggaauccac

SEQ ID NO: 816967 - RNA, 22 nt, Human
ugccuugcgggcguuucuguug

SEQ ID NO: 816968 - RNA, 22 nt, Human
agucucugcugguugugccuau

SEQ ID NO: 816969 - RNA, 22 nt, Human
aagcuggagaguuaggugaaua

SEQ ID NO: 816970 - RNA, 22 nt, Human
gggugggacugaagucugaggg

SEQ ID NO: 816971 - RNA, 22 nt, Human
aaaacuaaauacgcuuugccuc

SEQ ID NO: 816972 - RNA, 22 nt, Human
gagugcaguuggggugagggga

SEQ ID NO: 816973 - RNA, 22 nt, Human
auguuucagauacagaucaaau

SEQ ID NO: 816974 - RNA, 22 nt, Human
agugcuuuccuucuugugacau

SEQ ID NO: 816975 - RNA, 23 nt, Human
ucucaagaggaagcagggcucau

SEQ ID NO: 816976 - RNA, 22 nt, Human
gaggcagaaguugcagugagca

SEQ ID NO: 816977 - RNA, 22 nt, Human
gcugggaagugcaagaucaagg

SEQ ID NO: 816978 - RNA, 22 nt, Human
agggagcucuaaguagagggac

SEQ ID NO: 816979 - RNA, 22 nt, Human
gagguagcgaguggacagugca

SEQ ID NO: 816980 - RNA, 22 nt, Human
gaaauauuacaguggaggggau

SEQ ID NO: 816981 - RNA, 22 nt, Human
agucaauuaucucuaggucauc

SEQ ID NO: 816982 - RNA, 22 nt, Human
aggaagcuuagugaaaggacca

SEQ ID NO: 816983 - RNA, 22 nt, Human
cucaagacugaucgcaguggaa

SEQ ID NO: 816984 - RNA, 20 nt, Human
ugaaggccagcagcauaggg

SEQ ID NO: 816985 - RNA, 22 nt, Human
auuauuauauagggaaaguccc

SEQ ID NO: 816986 - RNA, 22 nt, Human
uugauacauuuuuaggauaaac

SEQ ID NO: 816987 - RNA, 22 nt, Human
auguauuucuauguagugaaga

SEQ ID NO: 816988 - RNA, 22 nt, Human
agugcagccgagaucaggugcu

SEQ ID NO: 816989 - RNA, 22 nt, Human
auuuuacuacuccaauuaauga

SEQ ID NO: 816990 - RNA, 22 nt, Human
ugcuguguggaugugaagaauc

SEQ ID NO: 816991 - RNA, 22 nt, Human
uggaaauguauuugggcaugcc

SEQ ID NO: 816992 - RNA, 22 nt, Human
gaaccucagugaaacuggaggu

SEQ ID NO: 816993 - RNA, 20 nt, Human
acaggagaucugaggaaagg

SEQ ID NO: 816994 - RNA, 22 nt, Human
uaggcagcuuagguuagaagug

SEQ ID NO: 816995 - RNA, 22 nt, Human
auucuucaccugagucagucua

SEQ ID NO: 816996 - RNA, 22 nt, Human
aagccgaggccacacagcagga

SEQ ID NO: 816997 - RNA, 22 nt, Human
aaaauauuuuagggccaggaga

SEQ ID NO: 816998 - RNA, 21 nt, Human
agggagcuuuagguagaaguu

SEQ ID NO: 816999 - RNA, 22 nt, Human
uuacaagcagcuacauaucaca

SEQ ID NO: 817000 - RNA, 22 nt, Human
aaucuucuacuugacaguucuc

SEQ ID NO: 817001 - RNA, 22 nt, Human
uuuccauguuggugaaaugagg

SEQ ID NO: 817002 - RNA, 22 nt, Human
cuuagaaaucgaacucagguua

SEQ ID NO: 817003 - RNA, 22 nt, Human
aggcuggagggcaauggcaaga

SEQ ID NO: 817004 - RNA, 22 nt, Human
agaggcagaaguguucaaaccc

SEQ ID NO: 817005 - RNA, 22 nt, Human
uaccauuucauucuuuccucau

SEQ ID NO: 817006 - RNA, 22 nt, Human
caagaugugccuaaucagaccu

SEQ ID NO: 817007 - RNA, 22 nt, Human
uccaggagcucauccacgucaa

SEQ ID NO: 817008 - RNA, 22 nt, Human
cagcugacagugaggugggggc

SEQ ID NO: 817009 - RNA, 22 nt, Human
uucacagaugccugaugugugg

SEQ ID NO: 817010 - RNA, 22 nt, Human
aaugucugcucuacucaggagg

SEQ ID NO: 817011 - RNA, 22 nt, Human
ugcccaggguuucuaagagcag

SEQ ID NO: 817012 - RNA, 22 nt, Human
gaaauuauugcuagagacugca

SEQ ID NO: 817013 - RNA, 22 nt, Human
ucacugcucagucuguacuaca

SEQ ID NO: 817014 - RNA, 22 nt, Human
cugcuucugggaugauggagua

SEQ ID NO: 817015 - RNA, 22 nt, Human
agggaagcuuguuacugagaag

SEQ ID NO: 817016 - RNA, 20 nt, Human
acaggggcagcacaauaaug

SEQ ID NO: 817017 - RNA, 22 nt, Human
aggagcagaauuuaaugugcag

SEQ ID NO: 817018 - RNA, 22 nt, Human
cccaggagagggaaccaaaugu

SEQ ID NO: 817019 - RNA, 22 nt, Human
agacagguaaauagagaugcug

SEQ ID NO: 817020 - RNA, 22 nt, Human
uccugagagcagcugcuuugga

SEQ ID NO: 817021 - RNA, 22 nt, Human
cggagaggaccugcaacucgcu

SEQ ID NO: 817022 - RNA, 22 nt, Human
aaggcagcuucaccacagcauu

SEQ ID NO: 817023 - RNA, 22 nt, Human
auaaagauuucuuuuucucuac

SEQ ID NO: 817024 - RNA, 22 nt, Human
agagcagcacguuguccccaca

SEQ ID NO: 817025 - RNA, 22 nt, Human
gcuccucugucaaaugagagug

SEQ ID NO: 817026 - RNA, 22 nt, Human
aaggcagccauagcaccaucca

SEQ ID NO: 817027 - RNA, 22 nt, Human
ccaggagagcaggcgugcagcu

SEQ ID NO: 817028 - RNA, 22 nt, Human
uaucuguuaugggcugaauugc

SEQ ID NO: 817029 - RNA, 22 nt, Human
uuuaaauucugucugccgcuua

SEQ ID NO: 817030 - RNA, 22 nt, Human
ccugcugugaccggggagcagg

SEQ ID NO: 817031 - RNA, 22 nt, Human
aucaggauagugguuaccuggg

SEQ ID NO: 817032 - RNA, 22 nt, Human
aaagauuugaguucugcuuaua

SEQ ID NO: 817033 - RNA, 22 nt, Human
guuuuaguggguggccacugau

SEQ ID NO: 817034 - RNA, 22 nt, Human
cuuugcaaacugucacacuuuc

SEQ ID NO: 817035 - RNA, 21 nt, Human
gggugggaggacacagcaggc

SEQ ID NO: 817036 - RNA, 22 nt, Human
aagcaaaggcaggagcuuguga

SEQ ID NO: 817037 - RNA, 22 nt, Human
uucuucuccuaaggagaguccu

SEQ ID NO: 817038 - RNA, 22 nt, Human
uuuuaucugcuucauuaguuga

SEQ ID NO: 817039 - RNA, 22 nt, Human
auacaaagacaaaucucaaucu

SEQ ID NO: 817040 - RNA, 22 nt, Human
ucauuuguucaucugcucuucu

SEQ ID NO: 817041 - RNA, 22 nt, Human
ugucucugaggugagggucagc

SEQ ID NO: 817042 - RNA, 22 nt, Human
ucagagaguuggaaagaauuaa

SEQ ID NO: 817043 - RNA, 22 nt, Human
ugucucugggugauucaguccu

SEQ ID NO: 817044 - RNA, 22 nt, Human
ugaaggccagcucuuuaucagc

SEQ ID NO: 817045 - RNA, 22 nt, Human
uuugaaagggacaaagucacug

SEQ ID NO: 817046 - RNA, 22 nt, Human
uuucaucuucccagagaccuug

SEQ ID NO: 817047 - RNA, 22 nt, Human
cuccaugaauuugagcuuugug

SEQ ID NO: 817048 - RNA, 22 nt, Human
ggugguggagccagcugggagu

SEQ ID NO: 817049 - RNA, 21 nt, Human
auuucagagcacacaaguaaa

SEQ ID NO: 817050 - RNA, 22 nt, Human
uagcacaucuggcgcuuauagg

SEQ ID NO: 817051 - RNA, 22 nt, Human
uccaggagucuagccucaggcc

SEQ ID NO: 817052 - RNA, 22 nt, Human
cccauucauccucgcuuccuuc

SEQ ID NO: 817053 - RNA, 17 nt, Human
gucauucucagaaaaug

SEQ ID NO: 817054 - RNA, 22 nt, Human
ucacaaauauuuuaacaguagg

SEQ ID NO: 817055 - RNA, 22 nt, Human
ugaaaugagagcacagaauaaa

SEQ ID NO: 817056 - RNA, 22 nt, Human
cagacaggguccuguccgucac

SEQ ID NO: 817057 - RNA, 22 nt, Human
gaagaggaugacaggagccggu

SEQ ID NO: 817058 - RNA, 22 nt, Human
ugaaaugaaugugauucgauag

SEQ ID NO: 817059 - RNA, 22 nt, Human
cugcugugcauauuuaucuagg

SEQ ID NO: 817060 - RNA, 22 nt, Human
acauuuaaauaccuauguuucu

SEQ ID NO: 817061 - RNA, 22 nt, Human
cuucucagaucucagcuuugag

SEQ ID NO: 817062 - RNA, 20 nt, Human
guaaaauauggucuuugggu

SEQ ID NO: 817063 - RNA, 22 nt, Human
ucucuguaguugggcagcugcu

SEQ ID NO: 817064 - RNA, 22 nt, Human
gcagaggggaagcugaggaauu

SEQ ID NO: 817065 - RNA, 19 nt, Human
augucuggguaacagcugc

SEQ ID NO: 817066 - RNA, 22 nt, Human
agacaggagagggaacugccgg

SEQ ID NO: 817067 - RNA, 22 nt, Human
acauuguuugagaauacagaug

SEQ ID NO: 817068 - RNA, 22 nt, Human
aggugagggugccagugcaugg

SEQ ID NO: 817069 - RNA, 22 nt, Human
uuucacauaugguuguugauug

SEQ ID NO: 817070 - RNA, 22 nt, Human
aauuuccaaauuucugucacac

SEQ ID NO: 817071 - RNA, 22 nt, Human
ucucaggaaauaggauuugagu

SEQ ID NO: 817072 - RNA, 22 nt, Human
aggagggagaugcccauccugg

SEQ ID NO: 817073 - RNA, 22 nt, Human
ggagcggagggagggccacugu

SEQ ID NO: 817074 - RNA, 22 nt, Human
caggaaugaggucguaaguguc

SEQ ID NO: 817075 - RNA, 22 nt, Human
uucaggauccccuugaugggcu

SEQ ID NO: 817076 - RNA, 22 nt, Human
uggcagcugguacagugggucu

SEQ ID NO: 817077 - RNA, 22 nt, Human
cccaggaggcagagguuggagc

SEQ ID NO: 817078 - RNA, 22 nt, Human
accaggagccacaggaggagcc

SEQ ID NO: 817079 - RNA, 22 nt, Human
uuucagcugguaaaggaguagc

SEQ ID NO: 817080 - RNA, 22 nt, Human
cuggcuuucucugugguguuca

SEQ ID NO: 817081 - RNA, 22 nt, Human
ccagcagagcauggggaggaag

SEQ ID NO: 817082 - RNA, 22 nt, Human
gcagcuaccacccaggaaggac

SEQ ID NO: 817083 - RNA, 22 nt, Human
agugagggaugaagaacugcgg

SEQ ID NO: 817084 - RNA, 22 nt, Human
ccacugaggcaggcaguaucua

SEQ ID NO: 817085 - RNA, 22 nt, Human
ugauugaacugagcuucaagau

SEQ ID NO: 817086 - RNA, 22 nt, Human
agaggggaaguaaugaaugaua

SEQ ID NO: 817087 - RNA, 22 nt, Human
cuucaugcugauauccucgaug

SEQ ID NO: 817088 - RNA, 22 nt, Human
cagcugcuuuaguuuuccaucc

SEQ ID NO: 817089 - RNA, 22 nt, Human
ugaggcaggaguuaaugugcuc

SEQ ID NO: 817090 - RNA, 22 nt, Human
ggaggaugccaagcugugcaca

SEQ ID NO: 817091 - RNA, 22 nt, Human
ucuacagacagagcagguggga

SEQ ID NO: 817092 - RNA, 22 nt, Human
guucuucaucauuuuagauagg

SEQ ID NO: 817093 - RNA, 22 nt, Human
cucccaggacucagaggagaag

SEQ ID NO: 817094 - RNA, 22 nt, Human
uuaagauagaacccaguagucu

SEQ ID NO: 817095 - RNA, 20 nt, Human
gaguuccccauuucuccugg

SEQ ID NO: 817096 - RNA, 22 nt, Human
gaggggaaagugugaggcugcg

SEQ ID NO: 817097 - RNA, 22 nt, Human
ccaggaguggcuggugaccuuc

SEQ ID NO: 817098 - RNA, 22 nt, Human
cagggaggcugucuuaugccug

SEQ ID NO: 817099 - RNA, 22 nt, Human
ucuucaauuagauuuaccaauu

SEQ ID NO: 817100 - RNA, 22 nt, Human
cccaggaacagggcucagaccc

SEQ ID NO: 817101 - RNA, 22 nt, Human
gcugcugucacggugcuaaggg

SEQ ID NO: 817102 - RNA, 22 nt, Human
aaacauuugcaacucgguuugg

SEQ ID NO: 817103 - RNA, 22 nt, Human
uuugacaaaggaaaaaugcaca

SEQ ID NO: 817104 - RNA, 22 nt, Human
aggcaagcccccagugaggcuc

SEQ ID NO: 817105 - RNA, 22 nt, Human
cauuuguaguuaaaaaugucuc

SEQ ID NO: 817106 - RNA, 22 nt, Human
ucuuuccaaggacucuguagca

SEQ ID NO: 817107 - RNA, 22 nt, Human
agagggagcccagucauagcug

SEQ ID NO: 817108 - RNA, 22 nt, Human
acaguuaucuuugaaauagaga

SEQ ID NO: 817109 - RNA, 20 nt, Human
aagcacauuucuacaauaau

SEQ ID NO: 817110 - RNA, 22 nt, Human
caaggccaagguuuugugaacu

SEQ ID NO: 817111 - RNA, 22 nt, Human
uucuucuucaagugcugcauuc

SEQ ID NO: 817112 - RNA, 22 nt, Human
ugaggcagccugcauuaaagag

SEQ ID NO: 817113 - RNA, 22 nt, Human
cagcugccccuccagggcuggg

SEQ ID NO: 817114 - RNA, 23 nt, Human
uuugaaaguaucaacucgccuga

SEQ ID NO: 817115 - RNA, 22 nt, Human
gaaggccauuuuuagguagaau

SEQ ID NO: 817116 - RNA, 22 nt, Human
ucugaaagaagggcagucuuuu

SEQ ID NO: 817117 - RNA, 22 nt, Human
uucaggaucauuuguuuuaucu

SEQ ID NO: 817118 - RNA, 22 nt, Human
gccaggagcccugggcaaguuc

SEQ ID NO: 817119 - RNA, 19 nt, Human
caggaaggggcgaaucugg

SEQ ID NO: 817120 - RNA, 22 nt, Human
gagggagugccagagggccagc

SEQ ID NO: 817121 - RNA, 22 nt, Human
cauuuuaaaugauuuaagccaa

SEQ ID NO: 817122 - RNA, 22 nt, Human
gggagucugggcuagacuccuu

SEQ ID NO: 817123 - RNA, 22 nt, Human
gaggcagcagggcugguuccuu

SEQ ID NO: 817124 - RNA, 22 nt, Human
ucauuauuuuggacuggagugu

SEQ ID NO: 817125 - RNA, 22 nt, Human
ucccaggaagaucccagggacc

SEQ ID NO: 817126 - RNA, 22 nt, Human
ucucaggaauagaguggcagca

SEQ ID NO: 817127 - RNA, 21 nt, Human
cccacggaaugaugaggcacu

SEQ ID NO: 817128 - RNA, 20 nt, Human
cugcugugguccuuuauuuu

SEQ ID NO: 817129 - RNA, 22 nt, Human
uugaaauacugcauuguucagu

SEQ ID NO: 817130 - RNA, 22 nt, Human
uaucuguuccaggcacucagcu

SEQ ID NO: 817131 - RNA, 22 nt, Human
caggaaaggugugucaugaugg

SEQ ID NO: 817132 - RNA, 22 nt, Human
aggaagcuagagccaccggacu

SEQ ID NO: 817133 - RNA, 22 nt, Human
aggguagguguaagauagcccu

SEQ ID NO: 817134 - RNA, 22 nt, Human
uguacauacauagauauacaca

SEQ ID NO: 817135 - RNA, 22 nt, Human
ucugggaaugaauaagaccugu

SEQ ID NO: 817136 - RNA, 22 nt, Human
cuacuucuaaguacauggugau

SEQ ID NO: 817137 - RNA, 22 nt, Human
uuucuagggcucuugucuucug

SEQ ID NO: 817138 - RNA, 22 nt, Human
caaauacuggguaaguuaauuu

SEQ ID NO: 817139 - RNA, 22 nt, Human
ugaguuuuuucaacauaugaag

SEQ ID NO: 817140 - RNA, 22 nt, Human
uacacacagaggccaugggauu

SEQ ID NO: 817141 - RNA, 22 nt, Human
cccaggaggcggagguuguggu

SEQ ID NO: 817142 - RNA, 22 nt, Human
ggguggaguagaaagaugaauu

SEQ ID NO: 817143 - RNA, 21 nt, Human
uucaaaaugguguguuugucu

SEQ ID NO: 817144 - RNA, 22 nt, Human
acauuuuuuagagucccacauu

SEQ ID NO: 817145 - RNA, 22 nt, Human
ugaaaugauaucugauaacaaa

SEQ ID NO: 817146 - RNA, 22 nt, Human
uucuucuugucugcccucacau

SEQ ID NO: 817147 - RNA, 22 nt, Human
auucugauaucuuauucuagcu

SEQ ID NO: 817148 - RNA, 22 nt, Human
gggcagcuguaucugagcuuau

SEQ ID NO: 817149 - RNA, 18 nt, Human
ccucagggagagagacgc

SEQ ID NO: 817150 - RNA, 22 nt, Human
ugaaugaguuuggcugcuguuc

SEQ ID NO: 817151 - RNA, 21 nt, Human
gugcuuuuccuuaauguucuu

SEQ ID NO: 817152 - RNA, 23 nt, Human
cuuuuaacuagaguaucagcugc

SEQ ID NO: 817153 - RNA, 22 nt, Human
uaugccugauaacugugucucu

SEQ ID NO: 817154 - RNA, 18 nt, Human
gagucuuuguuacugcug

SEQ ID NO: 817155 - RNA, 22 nt, Human
caguucuuaauaccaugugguu

SEQ ID NO: 817156 - RNA, 22 nt, Human
ccagaccacccuggccaugcac

SEQ ID NO: 817157 - RNA, 22 nt, Human
ugauuuccuaggucuggagaag

SEQ ID NO: 817158 - RNA, 19 nt, Human
cuugcugggugguuucugc

SEQ ID NO: 817159 - RNA, 23 nt, Human
ggcagcucucaucugaugacuga

SEQ ID NO: 817160 - RNA, 22 nt, Human
uugaagaggacuuugcagcugu

SEQ ID NO: 817161 - RNA, 22 nt, Human
aaauuagucgguuuaggaauuu

SEQ ID NO: 817162 - RNA, 22 nt, Human
aggcagagcuggguuuugaaau

SEQ ID NO: 817163 - RNA, 22 nt, Human
ugaguucuaguggcugcagauu

SEQ ID NO: 817164 - RNA, 22 nt, Human
ucaauucugguccucaggaacu

SEQ ID NO: 817165 - RNA, 22 nt, Human
aggccagcucuacccuuggacu

SEQ ID NO: 817166 - RNA, 22 nt, Human
ggcagcuggggcagugcccugu

SEQ ID NO: 817167 - RNA, 22 nt, Human
uacugcaugguggaguggagcu

SEQ ID NO: 817168 - RNA, 22 nt, Human
ggaggacacuggcucugccuuc

SEQ ID NO: 817169 - RNA, 22 nt, Human
aaaggugacugcagcagcuauu

SEQ ID NO: 817170 - RNA, 22 nt, Human
aaggcaguagguguuucaaacu

SEQ ID NO: 817171 - RNA, 22 nt, Human
aaauuauucucauguguuucuu

SEQ ID NO: 817172 - RNA, 22 nt, Human
ggcaucuccaaaacaugaacuc

SEQ ID NO: 817173 - RNA, 22 nt, Human
gagggaugguaguugacacuga

SEQ ID NO: 817174 - RNA, 22 nt, Human
gaugccuccaaaugagggcaga

SEQ ID NO: 817175 - RNA, 22 nt, Human
ggccaggagcugcacagggcuc

SEQ ID NO: 817176 - RNA, 22 nt, Human
agaaaacuugucacagcucuca

SEQ ID NO: 817177 - RNA, 22 nt, Human
cucccaggggaacuaucaagua

SEQ ID NO: 817178 - RNA, 22 nt, Human
gcaggagaacaaagcaagcugc

SEQ ID NO: 817179 - RNA, 22 nt, Human
aagacuguacauuuuccagucu

SEQ ID NO: 817180 - RNA, 22 nt, Human
aggagagaauguuccaggcuug

SEQ ID NO: 817181 - RNA, 22 nt, Human
cuggccagcugacagcagggcu

SEQ ID NO: 817182 - RNA, 22 nt, Human
ucaggagacauucuuaaaguag

SEQ ID NO: 817183 - RNA, 22 nt, Human
ccagcagagucuaggaaggagg

SEQ ID NO: 817184 - RNA, 22 nt, Human
aaggcagcagugcacgacugau

SEQ ID NO: 817185 - RNA, 22 nt, Human
ucaggagagaaagaauacaauu

SEQ ID NO: 817186 - RNA, 22 nt, Human
gauggcagcauauugacagcau

SEQ ID NO: 817187 - RNA, 22 nt, Human
gugggagcuuuggcaucaggcu

SEQ ID NO: 817188 - RNA, 22 nt, Human
uggcuguguuaccacuucaugu

SEQ ID NO: 817189 - RNA, 22 nt, Human
auuugcuucugugaaaucaagu

SEQ ID NO: 817190 - RNA, 22 nt, Human
auuauucuuaugucaucauggc

SEQ ID NO: 817191 - RNA, 22 nt, Human
uuugacauuauccuguuacugg

SEQ ID NO: 817192 - RNA, 23 nt, Human
uuucuucagaagccuugcgaggc

SEQ ID NO: 817193 - RNA, 22 nt, Human
cuagccugggauuugaacuuau

SEQ ID NO: 817194 - RNA, 22 nt, Human
uuugaacuucuaccugucauau

SEQ ID NO: 817195 - RNA, 22 nt, Human
cagcucugaggaacacuccuuu

SEQ ID NO: 817196 - RNA, 22 nt, Human
gaggggaagacuucuggacagu

SEQ ID NO: 817197 - RNA, 22 nt, Human
uccuucuuucccccuagucauu

SEQ ID NO: 817198 - RNA, 22 nt, Human
agaaaugaagcaggaguuauua

SEQ ID NO: 817199 - RNA, 22 nt, Human
gcacagcucgagcucaggaggg

SEQ ID NO: 817200 - RNA, 22 nt, Human
cggagggguuugaacagaggag

SEQ ID NO: 817201 - RNA, 22 nt, Human
cagcuccugaggacugcuggga

SEQ ID NO: 817202 - RNA, 22 nt, Human
cagaaccaggaacugauggaga

SEQ ID NO: 817203 - RNA, 22 nt, Human
uggaaugacagagagucugaau

SEQ ID NO: 817204 - RNA, 22 nt, Human
uuugaauagcauaggauuacau

SEQ ID NO: 817205 - RNA, 22 nt, Human
caacugugaauuuuaugauacc

SEQ ID NO: 817206 - RNA, 22 nt, Human
auaucaguaucuauguauuugu

SEQ ID NO: 817207 - RNA, 22 nt, Human
uccaggagugcugguuagagua

SEQ ID NO: 817208 - RNA, 22 nt, Human
agucucuuuaaucacagugucu

SEQ ID NO: 817209 - RNA, 22 nt, Human
caggcagcucugcuuuuccuaa

SEQ ID NO: 817210 - RNA, 22 nt, Human
uucuaugccauguucagcuacu

SEQ ID NO: 817211 - RNA, 23 nt, Human
ucagagagcuguugagagcugcc

SEQ ID NO: 817212 - RNA, 22 nt, Human
aggcagugcugugcccugaacc

SEQ ID NO: 817213 - RNA, 18 nt, Human
uugagggaggggcagagu

SEQ ID NO: 817214 - RNA, 22 nt, Human
cugcugugcuuguggccacccg

SEQ ID NO: 817215 - RNA, 22 nt, Human
gcacaauuauuuaugcaguaug

SEQ ID NO: 817216 - RNA, 22 nt, Human
uuucaguuguccuguuaauagc

SEQ ID NO: 817217 - RNA, 22 nt, Human
aggcagcuuaagcccuggccca

SEQ ID NO: 817218 - RNA, 22 nt, Human
agcccaggaaucugcaucuuga

SEQ ID NO: 817219 - RNA, 22 nt, Human
aguggcagagguugacugcagu

SEQ ID NO: 817220 - RNA, 23 nt, Human
aggcccaacucugugagggcugc

SEQ ID NO: 817221 - RNA, 22 nt, Human
caggagaggcuguacguuucuc

SEQ ID NO: 817222 - RNA, 22 nt, Human
uuuggacuuagccugcagaauu

SEQ ID NO: 817223 - RNA, 22 nt, Human
aggcagcugugaggacuggauu

SEQ ID NO: 817224 - RNA, 23 nt, Human
agaugaggcuucuccauguuggu

SEQ ID NO: 817225 - RNA, 22 nt, Human
cuucuucauguauugauagucu

SEQ ID NO: 817226 - RNA, 22 nt, Human
aagauggaguaguguaaugguu

SEQ ID NO: 817227 - RNA, 22 nt, Human
uugaaaguuuauggagucugca

SEQ ID NO: 817228 - RNA, 22 nt, Human
ucagugcacagagauuuuuguu

SEQ ID NO: 817229 - RNA, 22 nt, Human
aagggcaggaaaagauggaugu

SEQ ID NO: 817230 - RNA, 22 nt, Human
gcucucuuuuuccagugguggu

SEQ ID NO: 817231 - RNA, 22 nt, Human
ccucagggaaugggaggcuggg

SEQ ID NO: 817232 - RNA, 22 nt, Human
caguugcuggaugugcagcucu

SEQ ID NO: 817233 - RNA, 22 nt, Human
uuccaugacaccgagggaaguc

SEQ ID NO: 817234 - RNA, 22 nt, Human
aaaguauucuugacuguuuuuc

SEQ ID NO: 817235 - RNA, 22 nt, Human
aauuuguuaaaagugagugaca

SEQ ID NO: 817236 - RNA, 22 nt, Human
ucucaggaagugauauugagac

SEQ ID NO: 817237 - RNA, 16 nt, Human
aggaggggaauuagga

SEQ ID NO: 817238 - RNA, 21 nt, Human
agacaguaacucuucuacucc

SEQ ID NO: 817239 - RNA, 22 nt, Human
cucaggauauugggcuggagca

SEQ ID NO: 817240 - RNA, 22 nt, Human
uuugaaagccuggcuuuucucu

SEQ ID NO: 817241 - RNA, 22 nt, Human
ugaggcagcuuuuucugugugu

SEQ ID NO: 817242 - RNA, 18 nt, Human
ugagaggcagguagagga

SEQ ID NO: 817243 - RNA, 23 nt, Human
cagaaaacccagagcucaguccc

SEQ ID NO: 817244 - RNA, 23 nt, Human
acuauaaaguuguucugauuuac

SEQ ID NO: 817245 - RNA, 22 nt, Human
uucaaauacauucuuugccacu

SEQ ID NO: 817246 - RNA, 22 nt, Human
cucaacagcucugccauacucc

SEQ ID NO: 817247 - RNA, 22 nt, Human
augcugugagugugccgcagag

SEQ ID NO: 817248 - RNA, 19 nt, Human
uaaggccaaaaguaagugu

SEQ ID NO: 817249 - RNA, 22 nt, Human
cccuugcaucccauguguggcc

SEQ ID NO: 817250 - RNA, 23 nt, Human
aggauguaggauguauggcagag

SEQ ID NO: 817251 - RNA, 22 nt, Human
auggaaagggaagcaaggaaca

SEQ ID NO: 817252 - RNA, 22 nt, Human
uuaaauauuuucagcaggguca

SEQ ID NO: 817253 - RNA, 22 nt, Human
caaaugauaccuauuacuaggc

SEQ ID NO: 817254 - RNA, 22 nt, Human
cccaugagguggagguugcagu

SEQ ID NO: 817255 - RNA, 22 nt, Human
caaggccagagccagcgauaag

SEQ ID NO: 817256 - RNA, 22 nt, Human
agucugucugucacuucugcag

SEQ ID NO: 817257 - RNA, 22 nt, Human
aguccuuugggaaaaaugacua

SEQ ID NO: 817258 - RNA, 22 nt, Human
gcucaggagcucuugguggcgc

SEQ ID NO: 817259 - RNA, 22 nt, Human
cuugcugucuugcauuuagagc

SEQ ID NO: 817260 - RNA, 22 nt, Human
uuaaaauagccagugccccucu

SEQ ID NO: 817261 - RNA, 22 nt, Human
caaggccagggaauuuuucugg

SEQ ID NO: 817262 - RNA, 22 nt, Human
aucacaaaggcugcuucaugau

SEQ ID NO: 817263 - RNA, 20 nt, Human
ugaggcaggagaauggcaug

SEQ ID NO: 817264 - RNA, 22 nt, Human
cugagacuuucaugugcuuuua

SEQ ID NO: 817265 - RNA, 22 nt, Human
aggaugaggcuggcaggucuug

SEQ ID NO: 817266 - RNA, 22 nt, Human
ugcacagugaccccuggugacu

SEQ ID NO: 817267 - RNA, 22 nt, Human
ucagcugcucaaauuuauguca

SEQ ID NO: 817268 - RNA, 22 nt, Human
augcuuuuaugucacaugguca

SEQ ID NO: 817269 - RNA, 22 nt, Human
ucauucuugaucacuaguuagu

SEQ ID NO: 817270 - RNA, 22 nt, Human
gcagagaagaugcccaggcuuc

SEQ ID NO: 817271 - RNA, 23 nt, Human
agggugagcaagcuauggagacc

SEQ ID NO: 817272 - RNA, 22 nt, Human
cacaugugugcugaggacugug

SEQ ID NO: 817273 - RNA, 22 nt, Human
gauuucuuuagguguaauagug

SEQ ID NO: 817274 - RNA, 22 nt, Human
uccaggagacacccuugugugu

SEQ ID NO: 817275 - RNA, 22 nt, Human
cccaggagguggagcuugcagu

SEQ ID NO: 817276 - RNA, 22 nt, Human
ucuucagauggccaguuguccc

SEQ ID NO: 817277 - RNA, 22 nt, Human
gaggcagugcauugucuagggg

SEQ ID NO: 817278 - RNA, 22 nt, Human
uugcuucaguagcucuuuaaag

SEQ ID NO: 817279 - RNA, 22 nt, Human
ggagagugggagcaacuguugc

SEQ ID NO: 817280 - RNA, 22 nt, Human
uucuucaguuugguaaauguaa

SEQ ID NO: 817281 - RNA, 22 nt, Human
cugagccagcuggcaugugcua

SEQ ID NO: 817282 - RNA, 22 nt, Human
ucugaaaugcaaauuugacuga

SEQ ID NO: 817283 - RNA, 22 nt, Human
uuuaacagaugcuaugucuacc

SEQ ID NO: 817284 - RNA, 22 nt, Human
aaaggccaagcaugagguggac

SEQ ID NO: 817285 - RNA, 22 nt, Human
cauuuuaagaugaccugguuuc

SEQ ID NO: 817286 - RNA, 22 nt, Human
auuuagaacuuuguuugccaau

SEQ ID NO: 817287 - RNA, 22 nt, Human
auuaaaauuccaagguaugcca

SEQ ID NO: 817288 - RNA, 22 nt, Human
uuugaaaggaauuaggaugaca

SEQ ID NO: 817289 - RNA, 22 nt, Human
auuggcaggaaccgaggagggg

SEQ ID NO: 817290 - RNA, 19 nt, Human
guugaaaguaggugagggu

SEQ ID NO: 817291 - RNA, 22 nt, Human
ugccugugguuccaguuuuuuc

SEQ ID NO: 817292 - RNA, 22 nt, Human
cuucagaauccagaaucagaau

SEQ ID NO: 817293 - RNA, 22 nt, Human
aucaggaugacaacugcugggu

SEQ ID NO: 817294 - RNA, 22 nt, Human
caaggccacguucugcaugcgg

SEQ ID NO: 817295 - RNA, 22 nt, Human
uucaucaauguguuuaauaaug

SEQ ID NO: 817296 - RNA, 22 nt, Human
uacaacauuguguugcuucaua

SEQ ID NO: 817297 - RNA, 22 nt, Human
aggaagcugcuggaguagugug

SEQ ID NO: 817298 - RNA, 22 nt, Human
gcccaggaguuggaggcugcag

SEQ ID NO: 817299 - RNA, 22 nt, Human
cugcugugggcaggguagcugg

SEQ ID NO: 817300 - RNA, 22 nt, Human
gagagcuggguucaaguagcug

SEQ ID NO: 817301 - RNA, 22 nt, Human
cauugcuguuaauugucucuag

SEQ ID NO: 817302 - RNA, 22 nt, Human
uuauuucauguaaaauuuaugu

SEQ ID NO: 817303 - RNA, 22 nt, Human
aagggcagagggaaucccacau

SEQ ID NO: 817304 - RNA, 22 nt, Human
gagugcagaugccagccccagu

SEQ ID NO: 817305 - RNA, 22 nt, Human
uuugaauaucacaaacuuucaa

SEQ ID NO: 817306 - RNA, 22 nt, Human
aaaggugacacucugccagcug

SEQ ID NO: 817307 - RNA, 22 nt, Human
ugaaucaguauaaauucucaaa

SEQ ID NO: 817308 - RNA, 22 nt, Human
cagagagggcggcccuggcuuc

SEQ ID NO: 817309 - RNA, 22 nt, Human
ggaggaugagcuacgaggagcu

SEQ ID NO: 817310 - RNA, 22 nt, Human
ucacaguaucacacaaggauua

SEQ ID NO: 817311 - RNA, 22 nt, Human
gugguuuucuccaacccagaac

SEQ ID NO: 817312 - RNA, 22 nt, Human
uuuccuaggagauugaucacau

SEQ ID NO: 817313 - RNA, 22 nt, Human
cuugcuucauuagugucuuagu

SEQ ID NO: 817314 - RNA, 19 nt, Human
cccaggagcaguauugaug

SEQ ID NO: 817315 - RNA, 22 nt, Human
gucccaggugggcuccaccucu

SEQ ID NO: 817316 - RNA, 22 nt, Human
uuuuaguguagucaccgugggu

SEQ ID NO: 817317 - RNA, 22 nt, Human
aaggcagcaccgccuccugaaa

SEQ ID NO: 817318 - RNA, 22 nt, Human
ucugcuguauuagguugaacug

SEQ ID NO: 817319 - RNA, 22 nt, Human
ucagucuuugcuuaugacaaua

SEQ ID NO: 817320 - RNA, 22 nt, Human
auugaaagaguuuucugcugca

SEQ ID NO: 817321 - RNA, 22 nt, Human
uuugcaauuugugcugcaaaug

SEQ ID NO: 817322 - RNA, 22 nt, Human
ugcuuugggucucucuaguuuc

SEQ ID NO: 817323 - RNA, 22 nt, Human
agugcagcaugcuggggaggcu

SEQ ID NO: 817324 - RNA, 22 nt, Human
gcagaggccaggccaccagcaa

SEQ ID NO: 817325 - RNA, 22 nt, Human
uuucucaguuacuagcuguggu

SEQ ID NO: 817326 - RNA, 22 nt, Human
auuuaaauuuucugauggagag

SEQ ID NO: 817327 - RNA, 22 nt, Human
ucuuuucaucauuuaauaggua

SEQ ID NO: 817328 - RNA, 22 nt, Human
cagucucagaggugggaguggg

SEQ ID NO: 817329 - RNA, 22 nt, Human
cuucucagcaugguuacuguga

SEQ ID NO: 817330 - RNA, 22 nt, Human
uggcagcuggaucccaaggcag

SEQ ID NO: 817331 - RNA, 22 nt, Human
aguguuugagacacauuucacu

SEQ ID NO: 817332 - RNA, 22 nt, Human
gugucccaggccucuggaauua

SEQ ID NO: 817333 - RNA, 22 nt, Human
aggcagcauuugaauccagguc

SEQ ID NO: 817334 - RNA, 23 nt, Human
aaauuauugcucuucaauugccu

SEQ ID NO: 817335 - RNA, 22 nt, Human
gaaaggugccccauaggcagga

SEQ ID NO: 817336 - RNA, 22 nt, Human
uucuagaugauaaaccagcagc

SEQ ID NO: 817337 - RNA, 22 nt, Human
ggaggagggguuuacauuggaa

SEQ ID NO: 817338 - RNA, 22 nt, Human
gagaggcaggcgcugcaauggu

SEQ ID NO: 817339 - RNA, 22 nt, Human
cuucucaaaguugugaaucagg

SEQ ID NO: 817340 - RNA, 22 nt, Human
aguaaagcagaguugcaguaca

SEQ ID NO: 817341 - RNA, 22 nt, Human
gaggagaggccaucguuguuau

SEQ ID NO: 817342 - RNA, 22 nt, Human
caguuuuugccauuaagaguaa

SEQ ID NO: 817343 - RNA, 22 nt, Human
ugucccucugaggcuucccugg

SEQ ID NO: 817344 - RNA, 22 nt, Human
acccaggaaaacauggugcaga

SEQ ID NO: 817345 - RNA, 22 nt, Human
uucuccagaccuugugacuaug

SEQ ID NO: 817346 - RNA, 22 nt, Human
auccaugaucaauuuauuacua

SEQ ID NO: 817347 - RNA, 22 nt, Human
cauagagugauguaagguaugu

SEQ ID NO: 817348 - RNA, 22 nt, Human
ggaggggaugguuugacccugg

SEQ ID NO: 817349 - RNA, 22 nt, Human
aucuuucuccauauacaucuuu

SEQ ID NO: 817350 - RNA, 22 nt, Human
ucugcagggaugugagggguga

SEQ ID NO: 817351 - RNA, 22 nt, Human
uucaggauaguggugaguggca

SEQ ID NO: 817352 - RNA, 22 nt, Human
ucacaugaguauuauuuuccaa

SEQ ID NO: 817353 - RNA, 22 nt, Human
ucuucagacccuuagcugugau

SEQ ID NO: 817354 - RNA, 22 nt, Human
ucugguaaccuuuaucccuccu

SEQ ID NO: 817355 - RNA, 22 nt, Human
aucacauugccagugauuaccc

SEQ ID NO: 817356 - RNA, 22 nt, Human
ucagucuucccuccagugcaac

SEQ ID NO: 817357 - RNA, 22 nt, Human
cacauuuaauccuuuauaagua

SEQ ID NO: 817358 - RNA, 22 nt, Human
ccaggaugacccccacuuuccu

SEQ ID NO: 817359 - RNA, 20 nt, Human
gcagcuacucugucucgcuc

SEQ ID NO: 817360 - RNA, 22 nt, Human
cacccugggcugggccuguuaa

SEQ ID NO: 817361 - RNA, 22 nt, Human
uccaggagcauccaggugaagc

SEQ ID NO: 817362 - RNA, 22 nt, Human
gaggggaaaguucugcacaagg

SEQ ID NO: 817363 - RNA, 22 nt, Human
ucccaggaauugaagccagugu

SEQ ID NO: 817364 - RNA, 22 nt, Human
cucuucuuauggccguggcuga

SEQ ID NO: 817365 - RNA, 23 nt, Human
gaggcacucaggaaaugugagug

SEQ ID NO: 817366 - RNA, 22 nt, Human
gcucccagacugaccagaggug

SEQ ID NO: 817367 - RNA, 22 nt, Human
uuauacuaaaacgcauugaauu

SEQ ID NO: 817368 - RNA, 21 nt, Human
uucuucaaagaagaaggcaca

SEQ ID NO: 817369 - RNA, 19 nt, Human
caaggccaccauuucuccg

SEQ ID NO: 817370 - RNA, 22 nt, Human
ugugauauuugaguauugucaa

SEQ ID NO: 817371 - RNA, 22 nt, Human
aggccagccucaggcagggacc

SEQ ID NO: 817372 - RNA, 22 nt, Human
ucacaaaugaggaaaucgagca

SEQ ID NO: 817373 - RNA, 22 nt, Human
uaaaaugaucucucauguucuu

SEQ ID NO: 817374 - RNA, 22 nt, Human
caggauggugugagugugagga

SEQ ID NO: 817375 - RNA, 22 nt, Human
uauuucuucgggauucaagcua

SEQ ID NO: 817376 - RNA, 22 nt, Human
caguggagagacuuuuacucuu

SEQ ID NO: 817377 - RNA, 22 nt, Human
ggccagaggugguacauagcuu

SEQ ID NO: 817378 - RNA, 22 nt, Human
aaggagagguuguccguguugu

SEQ ID NO: 817379 - RNA, 22 nt, Human
aaggccagaguacuagaggcug

SEQ ID NO: 817380 - RNA, 22 nt, Human
uccaggaguggggcagaggucu

SEQ ID NO: 817381 - RNA, 22 nt, Human
augcuguggaugccuugcccca

SEQ ID NO: 817382 - RNA, 22 nt, Human
ucucagucuuugcaaggaugcu

SEQ ID NO: 817383 - RNA, 21 nt, Human
agccuguugguuuacugcuca

SEQ ID NO: 817384 - RNA, 22 nt, Human
ggccagagaauaugccuuacgu

SEQ ID NO: 817385 - RNA, 22 nt, Human
uuugaaguguuauuucuaucac

SEQ ID NO: 817386 - RNA, 22 nt, Human
ccaggagacaaagaugacugcu

SEQ ID NO: 817387 - RNA, 22 nt, Human
ggcacagagcccagcuuccuag

SEQ ID NO: 817388 - RNA, 22 nt, Human
ugaaggcccagccacagaaugg

SEQ ID NO: 817389 - RNA, 22 nt, Human
gaaggccacggaauggagcugg

SEQ ID NO: 817390 - RNA, 22 nt, Human
gugcuuuuaaaggcaauuagua

SEQ ID NO: 817391 - RNA, 22 nt, Human
ccucaggaaccacauugcugcu

SEQ ID NO: 817392 - RNA, 18 nt, Human
aauuuccauaugaauugc

SEQ ID NO: 817393 - RNA, 22 nt, Human
cccuggagguggagguugcagg

SEQ ID NO: 817394 - RNA, 22 nt, Human
uuuugcuugagugcacaaaaug

SEQ ID NO: 817395 - RNA, 22 nt, Human
ucugggaaguccucugucaugc

SEQ ID NO: 817396 - RNA, 21 nt, Human
uuucuuaggcucuaaaaugac

SEQ ID NO: 817397 - RNA, 21 nt, Human
ugcuggaaaaagugguucuag

SEQ ID NO: 817398 - RNA, 22 nt, Human
ugaggcagaaauuccuguuuuc

SEQ ID NO: 817399 - RNA, 22 nt, Human
uggcagcucccagagcuuccaa

SEQ ID NO: 817400 - RNA, 22 nt, Human
ugcuuucaaaggcuuucuagau

SEQ ID NO: 817401 - RNA, 22 nt, Human
aagaagagaaaugugcugcugg

SEQ ID NO: 817402 - RNA, 22 nt, Human
ucaugcuuauugcauauuugga

SEQ ID NO: 817403 - RNA, 22 nt, Human
auuugcaaagucguaucuguga

SEQ ID NO: 817404 - RNA, 22 nt, Human
aggcagcugcccucuccuuccu

SEQ ID NO: 817405 - RNA, 22 nt, Human
uucuucucggcugucagauagu

SEQ ID NO: 817406 - RNA, 22 nt, Human
cuuagcaugugguguccuugua

SEQ ID NO: 817407 - RNA, 22 nt, Human
aaguaaaauguuuccuuuauua

SEQ ID NO: 817408 - RNA, 22 nt, Human
uuccuuaguguuagauucugug

SEQ ID NO: 817409 - RNA, 22 nt, Human
ugcccacauggugccauggcca

SEQ ID NO: 817410 - RNA, 22 nt, Human
caggcagcugacugucagauau

SEQ ID NO: 817411 - RNA, 22 nt, Human
ugacauaauaauccaaacauac

SEQ ID NO: 817412 - RNA, 21 nt, Human
cucaggauggcggccuggugg

SEQ ID NO: 817413 - RNA, 22 nt, Human
gaggcugcuuugaugacaggag

SEQ ID NO: 817414 - RNA, 22 nt, Human
agaccaugggcucugaagagca

SEQ ID NO: 817415 - RNA, 22 nt, Human
gagguggaaggcaggaacaaau

SEQ ID NO: 817416 - RNA, 22 nt, Human
agaggccggccgagcccauggg

SEQ ID NO: 817417 - RNA, 22 nt, Human
aacugcuguggccuaguacuua

SEQ ID NO: 817418 - RNA, 21 nt, Human
ugaaaugagaaugcugagcac

SEQ ID NO: 817419 - RNA, 18 nt, Human
aaacuggcuuggccugug

SEQ ID NO: 817420 - RNA, 22 nt, Human
ugaggcagaaaauagcaguuca

SEQ ID NO: 817421 - RNA, 22 nt, Human
aggguggcaccuggaagggaug

SEQ ID NO: 817422 - RNA, 22 nt, Human
gaggccagaguuccccgaguca

SEQ ID NO: 817423 - RNA, 22 nt, Human
agaaaugaauauguagugguua

SEQ ID NO: 817424 - RNA, 22 nt, Human
uugaaggacauccuauuucuag

SEQ ID NO: 817425 - RNA, 22 nt, Human
acaggccacaguggagucucug

SEQ ID NO: 817426 - RNA, 22 nt, Human
gagaggcagaggccugaaaccg

SEQ ID NO: 817427 - RNA, 22 nt, Human
agcaccuguugcacuucauaau

SEQ ID NO: 817428 - RNA, 22 nt, Human
gccaggaguucagaugcauguu

SEQ ID NO: 817429 - RNA, 22 nt, Human
aucuccaggcauuucaagagac

SEQ ID NO: 817430 - RNA, 22 nt, Human
agccagcucccuccccugcagg

SEQ ID NO: 817431 - RNA, 22 nt, Human
aucaggauucaguaucuccagc

SEQ ID NO: 817432 - RNA, 22 nt, Human
uguaggccuauguccagcaauu

SEQ ID NO: 817433 - RNA, 22 nt, Human
cuauuacauuucuggacauuca

SEQ ID NO: 817434 - RNA, 20 nt, Human
agagcagcaguuggugaggu

SEQ ID NO: 817435 - RNA, 22 nt, Human
gcugcccauuccacuggauggu

SEQ ID NO: 817436 - RNA, 22 nt, Human
gagagucuagugcaccuaguuu

SEQ ID NO: 817437 - RNA, 22 nt, Human
cuguaguugaugauuucugaua

SEQ ID NO: 817438 - RNA, 22 nt, Human
uuugaaaucuaaucaaggaaca

SEQ ID NO: 817439 - RNA, 22 nt, Human
auugaaagcauggauuuggauu

SEQ ID NO: 817440 - RNA, 22 nt, Human
auuuccuuugcaaagacugugc

SEQ ID NO: 817441 - RNA, 22 nt, Human
cauggcugcgagaagagugggu

SEQ ID NO: 817442 - RNA, 22 nt, Human
auggaguucuuuaaauucacag

SEQ ID NO: 817443 - RNA, 22 nt, Human
cucaggauugugccuagggaga

SEQ ID NO: 817444 - RNA, 22 nt, Human
uuucuagucucgaucucuuaau

SEQ ID NO: 817445 - RNA, 22 nt, Human
ucauuuguugcuguuaccugag

SEQ ID NO: 817446 - RNA, 22 nt, Human
uuaaauuagucaagcuucucug

SEQ ID NO: 817447 - RNA, 22 nt, Human
aggcagcuuucuguaggggugu

SEQ ID NO: 817448 - RNA, 19 nt, Human
auacagauguauccaugau

SEQ ID NO: 817449 - RNA, 23 nt, Human
acagaaaguucugcuggacagag

SEQ ID NO: 817450 - RNA, 22 nt, Human
aaguggacuaauacaaggacua

SEQ ID NO: 817451 - RNA, 22 nt, Human
auacuguuucucuucuacauga

SEQ ID NO: 817452 - RNA, 22 nt, Human
gagggaggugauacugaacgua

SEQ ID NO: 817453 - RNA, 22 nt, Human
uuucaaaccuacuuguauguuu

SEQ ID NO: 817454 - RNA, 22 nt, Human
cuuuggcaaugucauuuucaau

SEQ ID NO: 817455 - RNA, 22 nt, Human
ccaugagacagcaacugaaagu

SEQ ID NO: 817456 - RNA, 22 nt, Human
ccuuaaauucuccauuugaaag

SEQ ID NO: 817457 - RNA, 22 nt, Human
caguaaagcauguaugucuuca

SEQ ID NO: 817458 - RNA, 22 nt, Human
uuccaugaaauguguuaugcuu

SEQ ID NO: 817459 - RNA, 22 nt, Human
cggaggggauacauuuucugaa

SEQ ID NO: 817460 - RNA, 21 nt, Human
aggcagcaggauccagggaca

SEQ ID NO: 817461 - RNA, 22 nt, Human
uuguugguggaauugaugcuag

SEQ ID NO: 817462 - RNA, 22 nt, Human
aggaagcugccugggaugggaa

SEQ ID NO: 817463 - RNA, 22 nt, Human
ucuaaagaagaggguucugcgg

SEQ ID NO: 817464 - RNA, 22 nt, Human
auuuguugcuagcagcacugau

SEQ ID NO: 817465 - RNA, 22 nt, Human
cugcugugucagaguccagggg

SEQ ID NO: 817466 - RNA, 22 nt, Human
uggcaucucaaacaggcagauu

SEQ ID NO: 817467 - RNA, 22 nt, Human
aaacugcugguugcuggccagc

SEQ ID NO: 817468 - RNA, 22 nt, Human
guuauaaaaugcacaguuguuu

SEQ ID NO: 817469 - RNA, 21 nt, Human
aucacauuggcuguuauuauu

SEQ ID NO: 817470 - RNA, 23 nt, Human
aggcgagcucuucuccagcacgu

SEQ ID NO: 817471 - RNA, 22 nt, Human
cagcaggauaugguggagagag

SEQ ID NO: 817472 - RNA, 22 nt, Human
cgaggcagggaagcugcaaaag

SEQ ID NO: 817473 - RNA, 22 nt, Human
aagacauugucauuuuauaauu

SEQ ID NO: 817474 - RNA, 22 nt, Human
uuuacaaccucauauucugaug

SEQ ID NO: 817475 - RNA, 22 nt, Human
augcaucuauucccaagggcag

SEQ ID NO: 817476 - RNA, 22 nt, Human
ccaggaaaauaccaagcuuuaa

SEQ ID NO: 817477 - RNA, 22 nt, Human
ucccaggacuuccaguuggagg

SEQ ID NO: 817478 - RNA, 22 nt, Human
ugcugaugaguccuucuaucgc

SEQ ID NO: 817479 - RNA, 22 nt, Human
gaaucucaguggaagcaggaag

SEQ ID NO: 817480 - RNA, 22 nt, Human
uauuugaaaguguacaaaaacu

SEQ ID NO: 817481 - RNA, 22 nt, Human
cuucagaagaaaagcagugugu

SEQ ID NO: 817482 - RNA, 22 nt, Human
ccugcuguucuguuuagugaac

SEQ ID NO: 817483 - RNA, 22 nt, Human
uccaugaggcagggaggcuggc

SEQ ID NO: 817484 - RNA, 22 nt, Human
gaggcagccagagguucucauu

SEQ ID NO: 817485 - RNA, 22 nt, Human
gcagaagucagaccaucugaau

SEQ ID NO: 817486 - RNA, 22 nt, Human
cuggcugugcugcaggcuuugg

SEQ ID NO: 817487 - RNA, 20 nt, Human
ccucaguguccuggacuggg

SEQ ID NO: 817488 - RNA, 22 nt, Human
uuugaaagcaccauuugaguag

SEQ ID NO: 817489 - RNA, 22 nt, Human
agucucuuuguggacucugccu

SEQ ID NO: 817490 - RNA, 22 nt, Human
uucacagacuuuccauagauug

SEQ ID NO: 817491 - RNA, 22 nt, Human
cccaggagaccugugaaaggac

SEQ ID NO: 817492 - RNA, 21 nt, Human
uuucacaaaaguaugugacaa

SEQ ID NO: 817493 - RNA, 22 nt, Human
cugcuguguaucauuuuagaug

SEQ ID NO: 817494 - RNA, 22 nt, Human
uaucuguugucuuuuacaugua

SEQ ID NO: 817495 - RNA, 22 nt, Human
uuuuucagccaugaauuacacu

SEQ ID NO: 817496 - RNA, 22 nt, Human
uugcucaggcuggugugcagug

SEQ ID NO: 817497 - RNA, 22 nt, Human
ucauuuguggaagugauugugg

SEQ ID NO: 817498 - RNA, 22 nt, Human
ggaugggagcagaggacgacca

SEQ ID NO: 817499 - RNA, 22 nt, Human
cagaccagcucuaugaacccaa

SEQ ID NO: 817500 - RNA, 22 nt, Human
cuguggaauugaugcuuagugu

SEQ ID NO: 817501 - RNA, 22 nt, Human
auguucuuguucaaaugucagu

SEQ ID NO: 817502 - RNA, 22 nt, Human
aggccagcacgacagccgcagg

SEQ ID NO: 817503 - RNA, 22 nt, Human
uucuucaacaaggacacuguua

SEQ ID NO: 817504 - RNA, 22 nt, Human
aucaggauagucuguaaauugu

SEQ ID NO: 817505 - RNA, 22 nt, Human
accaggagggacccugguggcc

SEQ ID NO: 817506 - RNA, 21 nt, Human
uucugggaaaugagcuggggc

SEQ ID NO: 817507 - RNA, 22 nt, Human
cccaggaguuagagguuguggu

SEQ ID NO: 817508 - RNA, 22 nt, Human
uagaaacaucagcuaaccaaaa

SEQ ID NO: 817509 - RNA, 22 nt, Human
gcuuugaagacuuuuccagggu

SEQ ID NO: 817510 - RNA, 22 nt, Human
agugcuuuaccuagauaauguu

SEQ ID NO: 817511 - RNA, 22 nt, Human
uucugggagagaaagggccuug

SEQ ID NO: 817512 - RNA, 22 nt, Human
agagggauggccccguaacuca

SEQ ID NO: 817513 - RNA, 22 nt, Human
aggacuuagaacauuauguacu

SEQ ID NO: 817514 - RNA, 22 nt, Human
accaggagucuagccuagucaa

SEQ ID NO: 817515 - RNA, 22 nt, Human
cauuguuauagcauuacacacc

SEQ ID NO: 817516 - RNA, 22 nt, Human
cccaggagauggugcguggucu

SEQ ID NO: 817517 - RNA, 22 nt, Human
gcugcccaggagagguggggcu

SEQ ID NO: 817518 - RNA, 22 nt, Human
cucuucuuuaguccagaccauc

SEQ ID NO: 817519 - RNA, 22 nt, Human
ugaagggggagauauaugugug

SEQ ID NO: 817520 - RNA, 22 nt, Human
cauauaaauacaacauguguua

SEQ ID NO: 817521 - RNA, 22 nt, Human
cagcuuucaucagugacacuca

SEQ ID NO: 817522 - RNA, 22 nt, Human
ggguggagaggcuaaguccagu

SEQ ID NO: 817523 - RNA, 22 nt, Human
aagcaccuggguuauaucuuag

SEQ ID NO: 817524 - RNA, 22 nt, Human
ugcugagguuucgucugcuugc

SEQ ID NO: 817525 - RNA, 22 nt, Human
ggaggggagauguuugggcuca

SEQ ID NO: 817526 - RNA, 22 nt, Human
uuaauuuuaaccuguuuguguc

SEQ ID NO: 817527 - RNA, 22 nt, Human
aucaggaucaugcuggguggga

SEQ ID NO: 817528 - RNA, 22 nt, Human
ugaggggaaggcaugauaaaua

SEQ ID NO: 817529 - RNA, 22 nt, Human
uuugacauuggcuuauucuguu

SEQ ID NO: 817530 - RNA, 22 nt, Human
cuugaacucaaugugaggaaga

SEQ ID NO: 817531 - RNA, 22 nt, Human
auguuucaccagcaaauuaccu

SEQ ID NO: 817532 - RNA, 22 nt, Human
gcccaggagguugggcugugca

SEQ ID NO: 817533 - RNA, 22 nt, Human
uucucagauccaucagaagucc

SEQ ID NO: 817534 - RNA, 22 nt, Human
acuuucugcaguguuggaaaug

SEQ ID NO: 817535 - RNA, 22 nt, Human
cuagcaucagaugagaagcugu

SEQ ID NO: 817536 - RNA, 19 nt, Human
ucaucucacagggccuggc

SEQ ID NO: 817537 - RNA, 22 nt, Human
uuucaacaccagagaccaugcg

SEQ ID NO: 817538 - RNA, 23 nt, Human
aggucagcaggcaaggaaauggc

SEQ ID NO: 817539 - RNA, 22 nt, Human
cagagccacuuggagaugagaa

SEQ ID NO: 817540 - RNA, 22 nt, Human
uugcucagcacuggagccagcu

SEQ ID NO: 817541 - RNA, 22 nt, Human
gcgcaggagccgcggagggccg

SEQ ID NO: 817542 - RNA, 22 nt, Human
cagaggcaggauaagaacugcg

SEQ ID NO: 817543 - RNA, 22 nt, Human
uacccaggagaaacagcagggc

SEQ ID NO: 817544 - RNA, 22 nt, Human
cuuugcaauagaggcacacaug

SEQ ID NO: 817545 - RNA, 22 nt, Human
agauggcagggguaccuggaag

SEQ ID NO: 817546 - RNA, 22 nt, Human
auuuaaaugcuuaagaggguuu

SEQ ID NO: 817547 - RNA, 22 nt, Human
auguggaggaaaugaguguaca

SEQ ID NO: 817548 - RNA, 21 nt, Human
uucucagaucgaguagugaga

SEQ ID NO: 817549 - RNA, 22 nt, Human
caggcagccugcggucugcaca

SEQ ID NO: 817550 - RNA, 22 nt, Human
auuuccagugcacugaauagaa

SEQ ID NO: 817551 - RNA, 22 nt, Human
aagaagagaacuggcauccuaa

SEQ ID NO: 817552 - RNA, 22 nt, Human
uggugguuaugcgcuuuguggg

SEQ ID NO: 817553 - RNA, 22 nt, Human
acucaggaaaugagaggcucuc

SEQ ID NO: 817554 - RNA, 22 nt, Human
cugcuguggugucaagcaucuc

SEQ ID NO: 817555 - RNA, 22 nt, Human
gugauuuucuccuccuagaagu

SEQ ID NO: 817556 - RNA, 20 nt, Human
aaacauucauguacaaguga

SEQ ID NO: 817557 - RNA, 22 nt, Human
guguguuuagcauuagcagggg

SEQ ID NO: 817558 - RNA, 20 nt, Human
accaggagauggaggcaggg

SEQ ID NO: 817559 - RNA, 22 nt, Human
ucgagcucuggagccaaggaug

SEQ ID NO: 817560 - RNA, 17 nt, Human
caggcagacauguaagc

SEQ ID NO: 817561 - RNA, 22 nt, Human
uucacagucacccuucuccaug

SEQ ID NO: 817562 - RNA, 22 nt, Human
agaaguuguagguuugcauauu

SEQ ID NO: 817563 - RNA, 22 nt, Human
cucacugugaccucagcagaca

SEQ ID NO: 817564 - RNA, 22 nt, Human
ucccuucacagaugcgauguuu

SEQ ID NO: 817565 - RNA, 22 nt, Human
uccaugagacagauacuguaag

SEQ ID NO: 817566 - RNA, 22 nt, Human
cuucuucacacuggucugaagc

SEQ ID NO: 817567 - RNA, 18 nt, Human
gagagggaucccucagga

SEQ ID NO: 817568 - RNA, 17 nt, Human
cauuuguugaucaguug

SEQ ID NO: 817569 - RNA, 22 nt, Human
auuuucagagacaucuggacuu

SEQ ID NO: 817570 - RNA, 22 nt, Human
gaggccaaguuggagaccaggu

SEQ ID NO: 817571 - RNA, 22 nt, Human
gagggcaguagccucguacccu

SEQ ID NO: 817572 - RNA, 20 nt, Human
agacaggagcccccauucag

SEQ ID NO: 817573 - RNA, 22 nt, Human
uugcagcuuagugauguuaucu

SEQ ID NO: 817574 - RNA, 22 nt, Human
ucucugguuauuaacuaacucc

SEQ ID NO: 817575 - RNA, 21 nt, Human
uuucuucacuuugccccaugu

SEQ ID NO: 817576 - RNA, 22 nt, Human
uucuucuugaaacuuuagguug

SEQ ID NO: 817577 - RNA, 22 nt, Human
uuacacaacaucuguauuauua

SEQ ID NO: 817578 - RNA, 22 nt, Human
aaaggccaccaacaugaagcau

SEQ ID NO: 817579 - RNA, 22 nt, Human
cagcugacccagugaggaggca

SEQ ID NO: 817580 - RNA, 22 nt, Human
ggaggccagggacccagucagc

SEQ ID NO: 817581 - RNA, 22 nt, Human
aggcaggccccugagaauagac

SEQ ID NO: 817582 - RNA, 22 nt, Human
aagggcaggagaagacggauau

SEQ ID NO: 817583 - RNA, 22 nt, Human
guuuuauaggcuguugcuauau

SEQ ID NO: 817584 - RNA, 22 nt, Human
cuaauacacccuauugcuuguu

SEQ ID NO: 817585 - RNA, 22 nt, Human
aggcagcagugauaagauagga

SEQ ID NO: 817586 - RNA, 22 nt, Human
caaggccauauugccuguaugu

SEQ ID NO: 817587 - RNA, 22 nt, Human
cuuacagagaagaaaauguagu

SEQ ID NO: 817588 - RNA, 22 nt, Human
cugcccagaagccagaugggca

SEQ ID NO: 817589 - RNA, 22 nt, Human
ucccaggacaugggcucugcuc

SEQ ID NO: 817590 - RNA, 22 nt, Human
guucuucacauuucauugagga

SEQ ID NO: 817591 - RNA, 22 nt, Human
ugcaggaacugggagggauagu

SEQ ID NO: 817592 - RNA, 22 nt, Human
ggcagucuuaucagcauuggac

SEQ ID NO: 817593 - RNA, 22 nt, Human
ugaguuuugucuugcuagaagu

SEQ ID NO: 817594 - RNA, 22 nt, Human
uuguuauaaagacuaaauaugu

SEQ ID NO: 817595 - RNA, 22 nt, Human
gagggucccugcucagggccag

SEQ ID NO: 817596 - RNA, 21 nt, Human
ccugcugugaucuuagugagu

SEQ ID NO: 817597 - RNA, 22 nt, Human
uuaucacuuaugagcuuuuugc

SEQ ID NO: 817598 - RNA, 22 nt, Human
ucacagacauggugagguaaca

SEQ ID NO: 817599 - RNA, 22 nt, Human
uuucuucucgacaccuuauccc

SEQ ID NO: 817600 - RNA, 22 nt, Human
cacagcauaaugaaauauacuu

SEQ ID NO: 817601 - RNA, 22 nt, Human
auaucaaacgaaguuauuuuaa

SEQ ID NO: 817602 - RNA, 22 nt, Human
ggcagcucacgggcauggggug

SEQ ID NO: 817603 - RNA, 22 nt, Human
agcccaggagguggagguugca

SEQ ID NO: 817604 - RNA, 22 nt, Human
uuuuauagcugaauaguauucc

SEQ ID NO: 817605 - RNA, 17 nt, Human
gcuguaguuugauaaga

SEQ ID NO: 817606 - RNA, 23 nt, Human
acugucugauauguuuuccauca

SEQ ID NO: 817607 - RNA, 23 nt, Human
ucucuuucaagagcuuaaugugc

SEQ ID NO: 817608 - RNA, 19 nt, Human
gaggcgaggcgugcaggag

SEQ ID NO: 817609 - RNA, 22 nt, Human
gaauauuuuuaaagggacuaau

SEQ ID NO: 817610 - RNA, 22 nt, Human
ucagucucaucaacucuauucc

SEQ ID NO: 817611 - RNA, 18 nt, Human
cugcccagagcacuugug

SEQ ID NO: 817612 - RNA, 22 nt, Human
uaacaauaguguuugcuaguca

SEQ ID NO: 817613 - RNA, 22 nt, Human
gaggagagaugguagauugggu

SEQ ID NO: 817614 - RNA, 22 nt, Human
uuucacuagaacguucuuguuu

SEQ ID NO: 817615 - RNA, 20 nt, Human
uuucacagucccuguuuccu

SEQ ID NO: 817616 - RNA, 22 nt, Human
aguuauaaucugcuacugauau

SEQ ID NO: 817617 - RNA, 22 nt, Human
ucuuucaaugagcauucuuucc

SEQ ID NO: 817618 - RNA, 22 nt, Human
uuauuauagauuaugcaagauu

SEQ ID NO: 817619 - RNA, 18 nt, Human
ugugaacacauuuuucug

SEQ ID NO: 817620 - RNA, 22 nt, Human
ugcccagggauaagccuagaga

SEQ ID NO: 817621 - RNA, 22 nt, Human
accaggaguaacagugaguggu

SEQ ID NO: 817622 - RNA, 22 nt, Human
gauggcaggcaggugaguagag

SEQ ID NO: 817623 - RNA, 22 nt, Human
ccucaggggucacugugaggag

SEQ ID NO: 817624 - RNA, 22 nt, Human
uuucaaagaccauuaacuauca

SEQ ID NO: 817625 - RNA, 22 nt, Human
cagugcugggcagaggagagcg

SEQ ID NO: 817626 - RNA, 22 nt, Human
uugaacuguaagcaugucugcc

SEQ ID NO: 817627 - RNA, 22 nt, Human
cucaggaugcaggucacaggac

SEQ ID NO: 817628 - RNA, 22 nt, Human
augcuguguauuuuacucuuuc

SEQ ID NO: 817629 - RNA, 22 nt, Human
aucauuucccuuuagaucacaa

SEQ ID NO: 817630 - RNA, 20 nt, Human
cagagccaagagcagcaucu

SEQ ID NO: 817631 - RNA, 22 nt, Human
cuuuggcagccucugcuauuga

SEQ ID NO: 817632 - RNA, 22 nt, Human
ggaagaggaggagccaggcuuu

SEQ ID NO: 817633 - RNA, 22 nt, Human
cugcuguguuucacaccucugg

SEQ ID NO: 817634 - RNA, 22 nt, Human
gcagaggagcaaguugcuacag

SEQ ID NO: 817635 - RNA, 22 nt, Human
aggcucagaggugagcaucugc

SEQ ID NO: 817636 - RNA, 22 nt, Human
ucacccuugauaauguucuucu

SEQ ID NO: 817637 - RNA, 22 nt, Human
ucccaggaauccguccucuaga

SEQ ID NO: 817638 - RNA, 22 nt, Human
uuggcagugaugcagcuuguuc

SEQ ID NO: 817639 - RNA, 22 nt, Human
ucucugaguauccugaacugcc

SEQ ID NO: 817640 - RNA, 22 nt, Human
cauuaaaauaucucaugguguu

SEQ ID NO: 817641 - RNA, 22 nt, Human
uauagccauuuccaguggcauc

SEQ ID NO: 817642 - RNA, 22 nt, Human
gaggaggcuuccgggaggcacg

SEQ ID NO: 817643 - RNA, 22 nt, Human
agcucccagagcucgagaguaa

SEQ ID NO: 817644 - RNA, 22 nt, Human
uagauuuuacuucugucauuac

SEQ ID NO: 817645 - RNA, 22 nt, Human
ugcuguggcaguuuauguauag

SEQ ID NO: 817646 - RNA, 22 nt, Human
uuuaaauggcauuuucccagau

SEQ ID NO: 817647 - RNA, 20 nt, Human
ugaaggccauuuguuccaga

SEQ ID NO: 817648 - RNA, 22 nt, Human
gcugcugugaauuuuuuaaaug

SEQ ID NO: 817649 - RNA, 22 nt, Human
aagaacuuccuaauauauuuuc

SEQ ID NO: 817650 - RNA, 22 nt, Human
uccaggagauacacugcaccag

SEQ ID NO: 817651 - RNA, 22 nt, Human
gcaaagcauucuguggagucua

SEQ ID NO: 817652 - RNA, 22 nt, Human
auugaggcagcauaguucaggg

SEQ ID NO: 817653 - RNA, 22 nt, Human
ggcagcuuguccuggaggaugg

SEQ ID NO: 817654 - RNA, 20 nt, Human
ucagaugggagugagccauc

SEQ ID NO: 817655 - RNA, 22 nt, Human
aagcaauagcaacaacuuuaca

SEQ ID NO: 817656 - RNA, 21 nt, Human
aggaggggucuuucccacuga

SEQ ID NO: 817657 - RNA, 22 nt, Human
aguauugugacucaaguauucu

SEQ ID NO: 817658 - RNA, 22 nt, Human
cagcaggauuugaaaggaagag

SEQ ID NO: 817659 - RNA, 22 nt, Human
gaccauuuuuacagagcauuca

SEQ ID NO: 817660 - RNA, 22 nt, Human
auuaguaaaacauuguauaugu

SEQ ID NO: 817661 - RNA, 22 nt, Human
auucuucauaccuacugagguu

SEQ ID NO: 817662 - RNA, 22 nt, Human
uuccaugaaagugaaauggagc

SEQ ID NO: 817663 - RNA, 22 nt, Human
uacauaguauucacauuguuuu

SEQ ID NO: 817664 - RNA, 22 nt, Human
ccccaggaagccucagauuugc

SEQ ID NO: 817665 - RNA, 22 nt, Human
uggcagcuggcucugcgcaggc

SEQ ID NO: 817666 - RNA, 20 nt, Human
uugauucaagggcugaugga

SEQ ID NO: 817667 - RNA, 22 nt, Human
cauucuuacacaauauuuuaau

SEQ ID NO: 817668 - RNA, 22 nt, Human
gagcagcucgagaaggaagcag

SEQ ID NO: 817669 - RNA, 22 nt, Human
aggcagugcaugcaaaggucgg

SEQ ID NO: 817670 - RNA, 22 nt, Human
gcauguguugguuuaugcaugu

SEQ ID NO: 817671 - RNA, 22 nt, Human
ucugggaaaugcuguuccuugu

SEQ ID NO: 817672 - RNA, 21 nt, Human
ucauuugugaucugauuucca

SEQ ID NO: 817673 - RNA, 18 nt, Human
agaggggagguaagucug

SEQ ID NO: 817674 - RNA, 20 nt, Human
uucacagaggacucagguca

SEQ ID NO: 817675 - RNA, 22 nt, Human
cuugcugugugguguucucaga

SEQ ID NO: 817676 - RNA, 22 nt, Human
uaaugcuuaacagcuggcuuuu

SEQ ID NO: 817677 - RNA, 22 nt, Human
cccaggagauaacguucccaag

SEQ ID NO: 817678 - RNA, 22 nt, Human
gcccaggaguugaagggcugac

SEQ ID NO: 817679 - RNA, 22 nt, Human
aggcagcuuucuggugcaccau

SEQ ID NO: 817680 - RNA, 22 nt, Human
ugaaaggugacauuucuuggau

SEQ ID NO: 817681 - RNA, 22 nt, Human
cgucuuccucuuacgaugcgcu

SEQ ID NO: 817682 - RNA, 22 nt, Human
acccaggagccgugagagguua

SEQ ID NO: 817683 - RNA, 22 nt, Human
aaaagucugcucucauuucaga

SEQ ID NO: 817684 - RNA, 22 nt, Human
cccagggaagccauuucugacu

SEQ ID NO: 817685 - RNA, 22 nt, Human
gaacuguaguuaauacuacaca

SEQ ID NO: 817686 - RNA, 22 nt, Human
aggcagguuggugagaagacug

SEQ ID NO: 817687 - RNA, 22 nt, Human
uugagaagaaauaguuugcaau

SEQ ID NO: 817688 - RNA, 22 nt, Human
gcuaugcaggagccuaaugaca

SEQ ID NO: 817689 - RNA, 23 nt, Human
cccaggagccugaguccucucug

SEQ ID NO: 817690 - RNA, 22 nt, Human
aauacauauggaauuccauguu

SEQ ID NO: 817691 - RNA, 22 nt, Human
ccaggcugagcaugauuggagc

SEQ ID NO: 817692 - RNA, 23 nt, Human
uugauuucaaaugcagagaacac

SEQ ID NO: 817693 - RNA, 22 nt, Human
gaggagagaacauuccuccaua

SEQ ID NO: 817694 - RNA, 22 nt, Human
uuuugaauaauucagaaacagc

SEQ ID NO: 817695 - RNA, 22 nt, Human
uugcauuuaaguagauguuaca

SEQ ID NO: 817696 - RNA, 22 nt, Human
auucuucauacagacaaguccu

SEQ ID NO: 817697 - RNA, 22 nt, Human
gaucauuuacuuguucuggacu

SEQ ID NO: 817698 - RNA, 22 nt, Human
cucaggauagcugcgcagccug

SEQ ID NO: 817699 - RNA, 23 nt, Human
uuuauccaacucuguaaucucuc

SEQ ID NO: 817700 - RNA, 22 nt, Human
cuugaaagcuuugcgucuucua

SEQ ID NO: 817701 - RNA, 22 nt, Human
cccaggaguuugaguucagcau

SEQ ID NO: 817702 - RNA, 22 nt, Human
caauacuuccuuguuagaggca

SEQ ID NO: 817703 - RNA, 22 nt, Human
ugaggcagggagaguggauaug

SEQ ID NO: 817704 - RNA, 22 nt, Human
uucuacaauaugaauaaugaag

SEQ ID NO: 817705 - RNA, 22 nt, Human
gaggagagaagcuaacggugcu

SEQ ID NO: 817706 - RNA, 22 nt, Human
uguagggaggaaggguuggaaa

SEQ ID NO: 817707 - RNA, 22 nt, Human
uuugaaagcuacuuucggguca

SEQ ID NO: 817708 - RNA, 22 nt, Human
agaggcaguauacaauccgagc

SEQ ID NO: 817709 - RNA, 22 nt, Human
auuaaauuuucacuaggcuccc

SEQ ID NO: 817710 - RNA, 22 nt, Human
cuucuucaaccugaaaguuuca

SEQ ID NO: 817711 - RNA, 22 nt, Human
cuucuucaucuguaaaacuugg

SEQ ID NO: 817712 - RNA, 22 nt, Human
aggcagugccuggaccccagcu

SEQ ID NO: 817713 - RNA, 22 nt, Human
uucucagaauugacugggagca

SEQ ID NO: 817714 - RNA, 22 nt, Human
agugcuuugagcguuugaaaag

SEQ ID NO: 817715 - RNA, 22 nt, Human
gccagagguucaacaacugucu

SEQ ID NO: 817716 - RNA, 22 nt, Human
uucaggaucaaguugccaguag

SEQ ID NO: 817717 - RNA, 22 nt, Human
agguaggggguuugggaacugc

SEQ ID NO: 817718 - RNA, 22 nt, Human
cucuuucugauucgcugggacc

SEQ ID NO: 817719 - RNA, 22 nt, Human
aggagggagcuuaagccaggca

SEQ ID NO: 817720 - RNA, 22 nt, Human
ugaacuccaaauacugcugauu

SEQ ID NO: 817721 - RNA, 15 nt, Human
caggagaggaagguu

SEQ ID NO: 817722 - RNA, 22 nt, Human
ugaggcaggaauggggaaaagu

SEQ ID NO: 817723 - RNA, 22 nt, Human
ugccgcagugcggggagggccc

SEQ ID NO: 817724 - RNA, 22 nt, Human
augcugugucuagcaggaacac

SEQ ID NO: 817725 - RNA, 22 nt, Human
gauugaaacauaggcagucgag

SEQ ID NO: 817726 - RNA, 22 nt, Human
aucacauuguuagcauagacug

SEQ ID NO: 817727 - RNA, 22 nt, Human
aggcaagcauugggaacagggc

SEQ ID NO: 817728 - RNA, 22 nt, Human
auuucauugaaguuaauucuuc

SEQ ID NO: 817729 - RNA, 22 nt, Human
ucaggaggccaccaggaccugu

SEQ ID NO: 817730 - RNA, 22 nt, Human
ugaaggccuaacuuccagugcu

SEQ ID NO: 817731 - RNA, 22 nt, Human
uggagaggagcaccauggccau

SEQ ID NO: 817732 - RNA, 21 nt, Human
agaggcaggcauuaaguacac

SEQ ID NO: 817733 - RNA, 22 nt, Human
augcugagugagugaaacccag

SEQ ID NO: 817734 - RNA, 22 nt, Human
aucuuucuauuucuaaaaacua

SEQ ID NO: 817735 - RNA, 22 nt, Human
cagcaggaccauugaggcauca

SEQ ID NO: 817736 - RNA, 22 nt, Human
aacaucuacuaagugccaggca

SEQ ID NO: 817737 - RNA, 22 nt, Human
uucuccucuguuggccuucccu

SEQ ID NO: 817738 - RNA, 22 nt, Human
aggcaguuguagagagggcucu

SEQ ID NO: 817739 - RNA, 22 nt, Human
uucuucaugcuguugcugcuug

SEQ ID NO: 817740 - RNA, 22 nt, Human
agaccaagacuauaaugagagg

SEQ ID NO: 817741 - RNA, 22 nt, Human
augcuguggaaguuccugaagc

SEQ ID NO: 817742 - RNA, 22 nt, Human
ucauuguuucugcuuuucauga

SEQ ID NO: 817743 - RNA, 22 nt, Human
ggagccuggucagguuggcucc

SEQ ID NO: 817744 - RNA, 22 nt, Human
ccuccucugggaagauucagag

SEQ ID NO: 817745 - RNA, 22 nt, Human
aaaggccagguuggcugguauu

SEQ ID NO: 817746 - RNA, 23 nt, Human
ucucaggacacacaugucuauca

SEQ ID NO: 817747 - RNA, 22 nt, Human
gcagggaagacccggagcagcg

SEQ ID NO: 817748 - RNA, 22 nt, Human
cuggcagucugccucuucacug

SEQ ID NO: 817749 - RNA, 22 nt, Human
agggcagcucucaccucuggcc

SEQ ID NO: 817750 - RNA, 22 nt, Human
ugaaaugacaaagguuuuucuu

SEQ ID NO: 817751 - RNA, 22 nt, Human
cugcccaggcugaaggaacauc

SEQ ID NO: 817752 - RNA, 23 nt, Human
uggaaagcggaccuggggcagag

SEQ ID NO: 817753 - RNA, 22 nt, Human
uucaggauggaguaccuuuuau

SEQ ID NO: 817754 - RNA, 22 nt, Human
augcuguguuuuaaauggaaau

SEQ ID NO: 817755 - RNA, 22 nt, Human
ccaggagacccagggaaggagc

SEQ ID NO: 817756 - RNA, 22 nt, Human
cccaggagagaggccaguuggc

SEQ ID NO: 817757 - RNA, 22 nt, Human
uuugcaguuucauugcugaaau

SEQ ID NO: 817758 - RNA, 22 nt, Human
guuuuucuaggaccaugugauu

SEQ ID NO: 817759 - RNA, 22 nt, Human
uaggcagccagcaucaguuggg

SEQ ID NO: 817760 - RNA, 22 nt, Human
uaaggccaaguucauauacaac

SEQ ID NO: 817761 - RNA, 22 nt, Human
aguacauauaguaauuuagcca

SEQ ID NO: 817762 - RNA, 22 nt, Human
cccaggaggccaagguugcagu

SEQ ID NO: 817763 - RNA, 22 nt, Human
agaggccacuuugccugugaug

SEQ ID NO: 817764 - RNA, 20 nt, Human
ugcugucguguuuucugcuu

SEQ ID NO: 817765 - RNA, 22 nt, Human
agaaaugacaagacugaucagg

SEQ ID NO: 817766 - RNA, 17 nt, Human
agagggaaaaugcgguu

SEQ ID NO: 817767 - RNA, 22 nt, Human
aagacugugucuauggcuacuc

SEQ ID NO: 817768 - RNA, 22 nt, Human
cuacagacccaccuuggaagaa

SEQ ID NO: 817769 - RNA, 22 nt, Human
agggagcuucuggccucagccu

SEQ ID NO: 817770 - RNA, 22 nt, Human
ucaggagacaaagggugcggag

SEQ ID NO: 817771 - RNA, 18 nt, Human
gcagcugacacuggaguu

SEQ ID NO: 817772 - RNA, 22 nt, Human
auguucuuucagccagugcauc

SEQ ID NO: 817773 - RNA, 22 nt, Human
aaaggccacugcaagggaaggu

SEQ ID NO: 817774 - RNA, 22 nt, Human
cagaaggcuuuguggaguagac

SEQ ID NO: 817775 - RNA, 22 nt, Human
uugagaagaauguguugaguuu

SEQ ID NO: 817776 - RNA, 22 nt, Human
ugaugaaacugagguuccaaga

SEQ ID NO: 817777 - RNA, 22 nt, Human
ccucuucuagguuucagccugc

SEQ ID NO: 817778 - RNA, 22 nt, Human
acauacauauguuuaaaugcau

SEQ ID NO: 817779 - RNA, 22 nt, Human
uucauucuugggaucagagagu

SEQ ID NO: 817780 - RNA, 18 nt, Human
uggcagcuagguaaagaa

SEQ ID NO: 817781 - RNA, 22 nt, Human
aggagacauaacuaugaugaga

SEQ ID NO: 817782 - RNA, 22 nt, Human
accaggagagauuuuauugaga

SEQ ID NO: 817783 - RNA, 22 nt, Human
guccucuguuagaaaugugcuu

SEQ ID NO: 817784 - RNA, 22 nt, Human
guggaaugaauagauuugcauu

SEQ ID NO: 817785 - RNA, 22 nt, Human
aaauacuagaauucagaguuga

SEQ ID NO: 817786 - RNA, 22 nt, Human
gggcaguuuauucuagaugguu

SEQ ID NO: 817787 - RNA, 21 nt, Human
uucuccccagcgaauccucgg

SEQ ID NO: 817788 - RNA, 22 nt, Human
uuacaguuuaguccaagccaga

SEQ ID NO: 817789 - RNA, 22 nt, Human
gaggagaggggcucccaagagc

SEQ ID NO: 817790 - RNA, 22 nt, Human
agaguucugcucuucucaguga

SEQ ID NO: 817791 - RNA, 22 nt, Human
gggaggugauuaggaccaugua

SEQ ID NO: 817792 - RNA, 22 nt, Human
auuugcuuucagguauaaaagg

SEQ ID NO: 817793 - RNA, 22 nt, Human
cagaggauucccuagugaccug

SEQ ID NO: 817794 - RNA, 22 nt, Human
aggagagcuggugucuggaauc

SEQ ID NO: 817795 - RNA, 22 nt, Human
gaggccuggagccgccuaggcg

SEQ ID NO: 817796 - RNA, 22 nt, Human
gcccaggaaaugccccguggug

SEQ ID NO: 817797 - RNA, 22 nt, Human
accuugaugccuuuccaagaug

SEQ ID NO: 817798 - RNA, 20 nt, Human
aggcucagcugagcucuugg

SEQ ID NO: 817799 - RNA, 22 nt, Human
caugucuguguacacaugcaca

SEQ ID NO: 817800 - RNA, 22 nt, Human
uuuguuaaauauuuauugagug

SEQ ID NO: 817801 - RNA, 22 nt, Human
aaaggccauuacuugcuuuuag

SEQ ID NO: 817802 - RNA, 22 nt, Human
gggacuucauagcuaggcacuu

SEQ ID NO: 817803 - RNA, 22 nt, Human
cucucagacugaagggccugug

SEQ ID NO: 817804 - RNA, 22 nt, Human
uccaggaguuugagacugcagu

SEQ ID NO: 817805 - RNA, 22 nt, Human
aucaggauuacacggggaugcu

SEQ ID NO: 817806 - RNA, 22 nt, Human
cacagcuaggaggaaagcagag

SEQ ID NO: 817807 - RNA, 21 nt, Human
ucacuagugccuucugucauu

SEQ ID NO: 817808 - RNA, 22 nt, Human
ggccagcucugcacagcagcug

SEQ ID NO: 817809 - RNA, 22 nt, Human
aggacagcaguuggugagguuc

SEQ ID NO: 817810 - RNA, 17 nt, Human
uuucaucugggaccacc

SEQ ID NO: 817811 - RNA, 22 nt, Human
uuucacaaaugucuuuaacuug

SEQ ID NO: 817812 - RNA, 22 nt, Human
ggcagcuuucaauaggguuaug

SEQ ID NO: 817813 - RNA, 22 nt, Human
ccaagaugaucuuuacaguguu

SEQ ID NO: 817814 - RNA, 20 nt, Human
gcccaagguccagaaggggg

SEQ ID NO: 817815 - RNA, 22 nt, Human
gcuagaaaucgacuucagaauu

SEQ ID NO: 817816 - RNA, 22 nt, Human
uucacagaauggcaaguuaugg

SEQ ID NO: 817817 - RNA, 22 nt, Human
cuugcuggugguguuuucuaug

SEQ ID NO: 817818 - RNA, 22 nt, Human
uuagagucaaaauggcauguua

SEQ ID NO: 817819 - RNA, 19 nt, Human
aaagcagaggagcaucuga

SEQ ID NO: 817820 - RNA, 22 nt, Human
cuuccuucugaagcauagaagc

SEQ ID NO: 817821 - RNA, 22 nt, Human
cagagcagucuggagauccagc

SEQ ID NO: 817822 - RNA, 22 nt, Human
ucccaggaucugagggcagaga

SEQ ID NO: 817823 - RNA, 22 nt, Human
cugcugugacagcugccguguu

SEQ ID NO: 817824 - RNA, 22 nt, Human
gcuggcaggagccuuucccuuu

SEQ ID NO: 817825 - RNA, 23 nt, Human
cccagggacacgaugacaccucc

SEQ ID NO: 817826 - RNA, 23 nt, Human
ucuugaaaagccuacagcaguuc

SEQ ID NO: 817827 - RNA, 22 nt, Human
uaugaaacauucauacaaauaa

SEQ ID NO: 817828 - RNA, 22 nt, Human
aggcaggcacacuuccuccagg

SEQ ID NO: 817829 - RNA, 22 nt, Human
uucauucuuugaaucugaggua

SEQ ID NO: 817830 - RNA, 22 nt, Human
agggugguucuuuuaguggaag

SEQ ID NO: 817831 - RNA, 22 nt, Human
gcaagcugcucuuauguggagg

SEQ ID NO: 817832 - RNA, 22 nt, Human
acaguggagaaggcaugaggcu

SEQ ID NO: 817833 - RNA, 22 nt, Human
aggccagaaaugucagggagug

SEQ ID NO: 817834 - RNA, 22 nt, Human
ccaggagaagcaucugagugua

SEQ ID NO: 817835 - RNA, 22 nt, Human
auuucagauucagaaauguagg

SEQ ID NO: 817836 - RNA, 22 nt, Human
gcagcugcagagaccggguggg

SEQ ID NO: 817837 - RNA, 22 nt, Human
auagcuguuagauuggggucga

SEQ ID NO: 817838 - RNA, 22 nt, Human
ugaaggccagcagagugaaggc

SEQ ID NO: 817839 - RNA, 22 nt, Human
uugcauuugacaaauuauuuaa

SEQ ID NO: 817840 - RNA, 22 nt, Human
uuugaaagaauuuauguacuuu

SEQ ID NO: 817841 - RNA, 16 nt, Human
gcccaggacgggaggc

SEQ ID NO: 817842 - RNA, 22 nt, Human
cugccaggcacgugcagcauca

SEQ ID NO: 817843 - RNA, 22 nt, Human
agggaguuagaaauccaggaua

SEQ ID NO: 817844 - RNA, 22 nt, Human
agggagcucacaguccaguaga

SEQ ID NO: 817845 - RNA, 22 nt, Human
aaagcagacugauuugcaucac

SEQ ID NO: 817846 - RNA, 22 nt, Human
ggcagaagauaggacagggaau

SEQ ID NO: 817847 - RNA, 22 nt, Human
ugaaaugaucaguuugguuacu

SEQ ID NO: 817848 - RNA, 22 nt, Human
uuauuuacaacucuucucuucc

SEQ ID NO: 817849 - RNA, 22 nt, Human
ucccaggaaggauucggcauuu

SEQ ID NO: 817850 - RNA, 22 nt, Human
cucaucugauaaaucacucuua

SEQ ID NO: 817851 - RNA, 22 nt, Human
ccaggagaugggagcaucuaaa

SEQ ID NO: 817852 - RNA, 22 nt, Human
gcagcugccuucagcuggaugg

SEQ ID NO: 817853 - RNA, 22 nt, Human
gcagcuucaguaggugaagaca

SEQ ID NO: 817854 - RNA, 19 nt, Human
gagcgcagagggcagggga

SEQ ID NO: 817855 - RNA, 22 nt, Human
acaauauuguacccagaaguuu

SEQ ID NO: 817856 - RNA, 22 nt, Human
caaaugauacuguuuuuagucu

SEQ ID NO: 817857 - RNA, 22 nt, Human
augcugugucaccuuaggauuu

SEQ ID NO: 817858 - RNA, 19 nt, Human
aggcagcaggccagggaug

SEQ ID NO: 817859 - RNA, 22 nt, Human
caggcagccaggggaccugucc

SEQ ID NO: 817860 - RNA, 22 nt, Human
uuuggaaugguaccuucaguug

SEQ ID NO: 817861 - RNA, 22 nt, Human
aucaggauucaccccagagcug

SEQ ID NO: 817862 - RNA, 22 nt, Human
ccagcagaggggcggagugcag

SEQ ID NO: 817863 - RNA, 20 nt, Human
gcccaggaucucugaggcau

SEQ ID NO: 817864 - RNA, 22 nt, Human
gaggccagaagugccucgggcu

SEQ ID NO: 817865 - RNA, 22 nt, Human
agggagugguuaagaaggugca

SEQ ID NO: 817866 - RNA, 22 nt, Human
caaggccaguuucuccuaguca

SEQ ID NO: 817867 - RNA, 22 nt, Human
gcccaggaugguguguaguggu

SEQ ID NO: 817868 - RNA, 22 nt, Human
guuauacauauguguuaacaaa

SEQ ID NO: 817869 - RNA, 22 nt, Human
aaggcagcaugaaucccuguac

SEQ ID NO: 817870 - RNA, 22 nt, Human
caaggccacugcucagguuucc

SEQ ID NO: 817871 - RNA, 22 nt, Human
aggcagcugaccacaguaugau

SEQ ID NO: 817872 - RNA, 22 nt, Human
ugaugaauaaacuugagaguca

SEQ ID NO: 817873 - RNA, 22 nt, Human
cacaggagagcugggaggugcc

SEQ ID NO: 817874 - RNA, 22 nt, Human
uagcacaucuucuuggccugca

SEQ ID NO: 817875 - RNA, 17 nt, Human
uccaugagacaugaaga

SEQ ID NO: 817876 - RNA, 22 nt, Human
ucuucagaggaagucagucuuu

SEQ ID NO: 817877 - RNA, 22 nt, Human
uaguuaaaauaauggagauguu

SEQ ID NO: 817878 - RNA, 22 nt, Human
uccaggaggcagggcugugccc

SEQ ID NO: 817879 - RNA, 20 nt, Human
ucauuguguugccaauuccc

SEQ ID NO: 817880 - RNA, 22 nt, Human
cucaggauagauuguccucuca

SEQ ID NO: 817881 - RNA, 20 nt, Human
cugcugugugugccucagcc

SEQ ID NO: 817882 - RNA, 22 nt, Human
guggcaggagagacacagccau

SEQ ID NO: 817883 - RNA, 22 nt, Human
auacuguuuugugacuuaucuu

SEQ ID NO: 817884 - RNA, 22 nt, Human
uaacaguguggacuugagaucu

SEQ ID NO: 817885 - RNA, 22 nt, Human
aggccagacagcuagaaacagg

SEQ ID NO: 817886 - RNA, 22 nt, Human
agagugucugguagcugcucug

SEQ ID NO: 817887 - RNA, 21 nt, Human
gauuugcagaaacuagacagg

SEQ ID NO: 817888 - RNA, 22 nt, Human
agccagcuguucuggggcagca

SEQ ID NO: 817889 - RNA, 23 nt, Human
accaggagaaaagcuuugcggga

SEQ ID NO: 817890 - RNA, 22 nt, Human
aaaauugaagugaucaggaacu

SEQ ID NO: 817891 - RNA, 22 nt, Human
ucugcuguaaagaauuucugcc

SEQ ID NO: 817892 - RNA, 22 nt, Human
gaggagcuggcugucgggaggc

SEQ ID NO: 817893 - RNA, 22 nt, Human
ccacagagacaggguccuugcu

SEQ ID NO: 817894 - RNA, 22 nt, Human
uuuauuuggcauccagggagaa

SEQ ID NO: 817895 - RNA, 19 nt, Human
aggcaggugcagagguccc

SEQ ID NO: 817896 - RNA, 22 nt, Human
uucucacuauguauguagauug

SEQ ID NO: 817897 - RNA, 22 nt, Human
gagagguccauuccccugucag

SEQ ID NO: 817898 - RNA, 22 nt, Human
uuauagaaggagcauucacuua

SEQ ID NO: 817899 - RNA, 22 nt, Human
augaggcaguacacacaaagcc

SEQ ID NO: 817900 - RNA, 22 nt, Human
cagucucuaaaucaaucugaau

SEQ ID NO: 817901 - RNA, 22 nt, Human
accaggaguuuugaccaggggc

SEQ ID NO: 817902 - RNA, 22 nt, Human
aacauacauauuucagugucca

SEQ ID NO: 817903 - RNA, 22 nt, Human
cagcuuccgaccgggggcugca

SEQ ID NO: 817904 - RNA, 22 nt, Human
uaaggccaauuaacaaccaggg

SEQ ID NO: 817905 - RNA, 22 nt, Human
aagcaauauacugauaugauua

SEQ ID NO: 817906 - RNA, 22 nt, Human
augcuguguuugagaaccuagg

SEQ ID NO: 817907 - RNA, 22 nt, Human
uuucaucuuccuuggcauaggu

SEQ ID NO: 817908 - RNA, 22 nt, Human
acccaggauaaucuguguaucu

SEQ ID NO: 817909 - RNA, 22 nt, Human
ugaaaugagauaauuuaagugc

SEQ ID NO: 817910 - RNA, 22 nt, Human
aaucuucuuucuuaacaguaca

SEQ ID NO: 817911 - RNA, 19 nt, Human
ugcauaaauuauauacuuu

SEQ ID NO: 817912 - RNA, 22 nt, Human
gaggcugauucggggaacagca

SEQ ID NO: 817913 - RNA, 22 nt, Human
cuugaaguugcaaaacauuaau

SEQ ID NO: 817914 - RNA, 22 nt, Human
cagaugaggcaaccucauugcu

SEQ ID NO: 817915 - RNA, 22 nt, Human
uagaaauaaaucugcagcuggg

SEQ ID NO: 817916 - RNA, 22 nt, Human
ugaggcagggaguuuaauuguc

SEQ ID NO: 817917 - RNA, 22 nt, Human
ugagacaguuuuucuauuucca

SEQ ID NO: 817918 - RNA, 22 nt, Human
ucuggcaggucaaucauucuuu

SEQ ID NO: 817919 - RNA, 15 nt, Human
uggcagcuuguuaag

SEQ ID NO: 817920 - RNA, 22 nt, Human
auuuccaguccuaaugaucugg

SEQ ID NO: 817921 - RNA, 22 nt, Human
gucaggauuuuaaaaucccagu

SEQ ID NO: 817922 - RNA, 23 nt, Human
cagggaggagauacuguguaucu

SEQ ID NO: 817923 - RNA, 22 nt, Human
cucugcauuuuaacagaugauu

SEQ ID NO: 817924 - RNA, 22 nt, Human
agaaaauauucauugagaggcu

SEQ ID NO: 817925 - RNA, 22 nt, Human
aggcagcuggaggcagagacua

SEQ ID NO: 817926 - RNA, 22 nt, Human
cuugaaagcacuccuuugacug

SEQ ID NO: 817927 - RNA, 18 nt, Human
uuccaugauuccuuucac

SEQ ID NO: 817928 - RNA, 22 nt, Human
acuuggcaaguaucuauaaagu

SEQ ID NO: 817929 - RNA, 22 nt, Human
ucaggagagaguuggguaggcu

SEQ ID NO: 817930 - RNA, 22 nt, Human
agaggggaggcgaaccagaguc

SEQ ID NO: 817931 - RNA, 22 nt, Human
gaggacagagccgccuggcaag

SEQ ID NO: 817932 - RNA, 22 nt, Human
agugugagcccuggaguggugc

SEQ ID NO: 817933 - RNA, 22 nt, Human
ugaaagggguugaguuacagcu

SEQ ID NO: 817934 - RNA, 22 nt, Human
ugaggcaggaggauugcaggau

SEQ ID NO: 817935 - RNA, 22 nt, Human
uuccagcaggcagacaggagau

SEQ ID NO: 817936 - RNA, 22 nt, Human
ugccaggauauaagagugcgau

SEQ ID NO: 817937 - RNA, 22 nt, Human
ccauccuaucugaccuacuugu

SEQ ID NO: 817938 - RNA, 22 nt, Human
aucugccuggcuccaggugagc

SEQ ID NO: 817939 - RNA, 22 nt, Human
agcccaggaaguugaggcuugc

SEQ ID NO: 817940 - RNA, 22 nt, Human
acucaggaaaugaagacugguu

SEQ ID NO: 817941 - RNA, 22 nt, Human
uucaugugauaaaugugugacu

SEQ ID NO: 817942 - RNA, 17 nt, Human
ggcagccucaggcguuu

SEQ ID NO: 817943 - RNA, 22 nt, Human
uuaacaauagaguuucuucagg

SEQ ID NO: 817944 - RNA, 22 nt, Human
aaugucugagucucuguauccc

SEQ ID NO: 817945 - RNA, 22 nt, Human
cauuucacaaauggccacauca

SEQ ID NO: 817946 - RNA, 22 nt, Human
acccaggagacggaggugcagu

SEQ ID NO: 817947 - RNA, 22 nt, Human
uaaauuauggcuggcagagcag

SEQ ID NO: 817948 - RNA, 22 nt, Human
ugugaaggagaugaagggagug

SEQ ID NO: 817949 - RNA, 22 nt, Human
uccaggagaaggccauccagcg

SEQ ID NO: 817950 - RNA, 22 nt, Human
guucuucaaagugacaacuaaa

SEQ ID NO: 817951 - RNA, 22 nt, Human
gaaauauuucucuugagccccu

SEQ ID NO: 817952 - RNA, 18 nt, Human
ggucuuuaggucaguguc

SEQ ID NO: 817953 - RNA, 22 nt, Human
uucaggauuauacucucuuccc

SEQ ID NO: 817954 - RNA, 22 nt, Human
agucuuuccugcuugacuguuc

SEQ ID NO: 817955 - RNA, 19 nt, Human
aauacaguguuauagaauu

SEQ ID NO: 817956 - RNA, 22 nt, Human
aaaaugaugcuguaauuuggca

SEQ ID NO: 817957 - RNA, 22 nt, Human
uuuguuuacucauucauugaug

SEQ ID NO: 817958 - RNA, 22 nt, Human
aaugauuuccccuacacagaag

SEQ ID NO: 817959 - RNA, 22 nt, Human
gagggugggccagauaugaggg

SEQ ID NO: 817960 - RNA, 22 nt, Human
gcaagcugaugugauagugaaa

SEQ ID NO: 817961 - RNA, 22 nt, Human
auugugcaaauauuaucuguag

SEQ ID NO: 817962 - RNA, 22 nt, Human
uuucaugagauuccuccacauc

SEQ ID NO: 817963 - RNA, 22 nt, Human
aagugggaauagaaaugaaggu

SEQ ID NO: 817964 - RNA, 22 nt, Human
acaccauacucauguugguucc

SEQ ID NO: 817965 - RNA, 18 nt, Human
gaaaggagagacaguagg

SEQ ID NO: 817966 - RNA, 20 nt, Human
agauuauuccuaagauuucu

SEQ ID NO: 817967 - RNA, 22 nt, Human
aauacaguaauuuugaugaguu

SEQ ID NO: 817968 - RNA, 22 nt, Human
guuuucaauuauaagauggcuu

SEQ ID NO: 817969 - RNA, 22 nt, Human
auacaacagaaaaugauuauuc

SEQ ID NO: 817970 - RNA, 21 nt, Human
ucuuccuccacagcgugccac

SEQ ID NO: 817971 - RNA, 22 nt, Human
uuucaaaauuuugcagugguaa

SEQ ID NO: 817972 - RNA, 22 nt, Human
aagagagggguugcauggaaau

SEQ ID NO: 817973 - RNA, 22 nt, Human
augaaggcuguguagauggaug

SEQ ID NO: 817974 - RNA, 22 nt, Human
uucugagguccaugcaguacug

SEQ ID NO: 817975 - RNA, 22 nt, Human
gucuucuuuaaccuacuaaagc

SEQ ID NO: 817976 - RNA, 22 nt, Human
cugcacaguuugauuucuugcu

SEQ ID NO: 817977 - RNA, 22 nt, Human
ucccaggaggugcuuccuagga

SEQ ID NO: 817978 - RNA, 22 nt, Human
auucauuugcuauuguguaugg

SEQ ID NO: 817979 - RNA, 22 nt, Human
ggagaggauguuuuaguaacuu

SEQ ID NO: 817980 - RNA, 22 nt, Human
uucucagagcacugcugacaaa

SEQ ID NO: 817981 - RNA, 22 nt, Human
ugcauguguguguauuuauaaa

SEQ ID NO: 817982 - RNA, 22 nt, Human
uuaaagggccgauuuccaggcc

SEQ ID NO: 817983 - RNA, 22 nt, Human
cuccaggagggggauggcugua

SEQ ID NO: 817984 - RNA, 22 nt, Human
ucauuguuauguuuugcugucu

SEQ ID NO: 817985 - RNA, 22 nt, Human
acauaccauacauggugagaug

SEQ ID NO: 817986 - RNA, 22 nt, Human
uaaaacuuaacuauccagauua

SEQ ID NO: 817987 - RNA, 23 nt, Human
cccauuuucauguuaacuccugg

SEQ ID NO: 817988 - RNA, 22 nt, Human
aggagggacaccaauauauguu

SEQ ID NO: 817989 - RNA, 22 nt, Human
uggcagcuauuacaaggaaguc

SEQ ID NO: 817990 - RNA, 22 nt, Human
gcugcccacaaugauuacaugg

SEQ ID NO: 817991 - RNA, 22 nt, Human
cuuuccaaugcauuuccaaugu

SEQ ID NO: 817992 - RNA, 22 nt, Human
ggugaaggcacaagagggcaag

SEQ ID NO: 817993 - RNA, 22 nt, Human
gcagaggagaugaagauacuuu

SEQ ID NO: 817994 - RNA, 19 nt, Human
ucccaggaagcaaauguca

SEQ ID NO: 817995 - RNA, 22 nt, Human
uauuucagucacuucuucucug

SEQ ID NO: 817996 - RNA, 22 nt, Human
acuguugucaggcugcuuugga

SEQ ID NO: 817997 - RNA, 22 nt, Human
cagaggcaggaagaugggcagu

SEQ ID NO: 817998 - RNA, 22 nt, Human
aucuuucagggccauuuguauu

SEQ ID NO: 817999 - RNA, 22 nt, Human
uagggcaggugaagaaaagcua

SEQ ID NO: 818000 - RNA, 22 nt, Human
caaggccaagucucugugaaga

SEQ ID NO: 818001 - RNA, 22 nt, Human
gaggcauggccugaggcuagga

SEQ ID NO: 818002 - RNA, 22 nt, Human
ucagauggguuuugaaggaugu

SEQ ID NO: 818003 - RNA, 22 nt, Human
agaccauggccauccuaggaaa

SEQ ID NO: 818004 - RNA, 22 nt, Human
ucucucuucaacccuuaacuag

SEQ ID NO: 818005 - RNA, 22 nt, Human
cccaggagguguagcugcgugg

SEQ ID NO: 818006 - RNA, 22 nt, Human
aggcaguggaugucaggaaugg

SEQ ID NO: 818007 - RNA, 22 nt, Human
agugcuuuauguuguugugcaa

SEQ ID NO: 818008 - RNA, 22 nt, Human
caggaugagguagaggcagaua

SEQ ID NO: 818009 - RNA, 22 nt, Human
agggagcuaggauccugaaggu

SEQ ID NO: 818010 - RNA, 22 nt, Human
acacauuuacauguuuacguau

SEQ ID NO: 818011 - RNA, 23 nt, Human
uaauucacauauacauugcuuca

SEQ ID NO: 818012 - RNA, 21 nt, Human
ccaggaaggacugagcucccu

SEQ ID NO: 818013 - RNA, 22 nt, Human
uagggcagaguccaggaugggc

SEQ ID NO: 818014 - RNA, 23 nt, Human
auguauuuaaauuucagugauga

SEQ ID NO: 818015 - RNA, 22 nt, Human
accaggaggcuacacuguccca

SEQ ID NO: 818016 - RNA, 22 nt, Human
agaggaugguugaggaagaccu

SEQ ID NO: 818017 - RNA, 19 nt, Human
uuugaaaggauuguuauuu

SEQ ID NO: 818018 - RNA, 22 nt, Human
uacaguaagaugaaauagcaau

SEQ ID NO: 818019 - RNA, 22 nt, Human
gcugcccaggguggagccggcu

SEQ ID NO: 818020 - RNA, 22 nt, Human
agggcagcccuucugggagggc

SEQ ID NO: 818021 - RNA, 22 nt, Human
uuuaaaaucagaugggaguugg

SEQ ID NO: 818022 - RNA, 22 nt, Human
uuauucuuuaaacauauauguu

SEQ ID NO: 818023 - RNA, 22 nt, Human
uggaguucucaggugagggcuu

SEQ ID NO: 818024 - RNA, 22 nt, Human
uggaguucauccaugacagcuu

SEQ ID NO: 818025 - RNA, 18 nt, Human
aguaaagcuuauuacaug

SEQ ID NO: 818026 - RNA, 22 nt, Human
auccagucaaaauuaguaaggu

SEQ ID NO: 818027 - RNA, 22 nt, Human
ucucagaguuuagagcugagcc

SEQ ID NO: 818028 - RNA, 22 nt, Human
cugcugugugaccauggacagg

SEQ ID NO: 818029 - RNA, 22 nt, Human
gaggauggaggugugagcuaug

SEQ ID NO: 818030 - RNA, 22 nt, Human
uugcacuaggaaaaggcagcca

SEQ ID NO: 818031 - RNA, 22 nt, Human
uuuauuguuuagaagggggcug

SEQ ID NO: 818032 - RNA, 17 nt, Human
gcccaggaaggacggcc

SEQ ID NO: 818033 - RNA, 22 nt, Human
agcagagguguuuauuauggga

SEQ ID NO: 818034 - RNA, 22 nt, Human
uccaggagggggagccgugccg

SEQ ID NO: 818035 - RNA, 22 nt, Human
cccaggaugucgaggcugcagu

SEQ ID NO: 818036 - RNA, 22 nt, Human
gccugcagaacugugaggcaau

SEQ ID NO: 818037 - RNA, 22 nt, Human
uuugaaaggaaguuaauacuuu

SEQ ID NO: 818038 - RNA, 22 nt, Human
gggcagcucucacagcagccaa

SEQ ID NO: 818039 - RNA, 22 nt, Human
ggagggaaugucuagcauucuu

SEQ ID NO: 818040 - RNA, 22 nt, Human
cgaggcagaggcugaaacggcu

SEQ ID NO: 818041 - RNA, 22 nt, Human
uuucacaucagagguagauuag

SEQ ID NO: 818042 - RNA, 22 nt, Human
aacauucuauuuugcuaaaaca

SEQ ID NO: 818043 - RNA, 22 nt, Human
gggcacagaagucuaagacauc

SEQ ID NO: 818044 - RNA, 22 nt, Human
cagcagagcugggcuuugaauu

SEQ ID NO: 818045 - RNA, 22 nt, Human
cugcugugagcacuccagccug

SEQ ID NO: 818046 - RNA, 22 nt, Human
uggaaauggaucugaugagucu

SEQ ID NO: 818047 - RNA, 22 nt, Human
uaauuauucuagucacauagca

SEQ ID NO: 818048 - RNA, 22 nt, Human
ucugcaggcuuauaggaugggu

SEQ ID NO: 818049 - RNA, 22 nt, Human
cugcuuccauaaauaaugugcu

SEQ ID NO: 818050 - RNA, 22 nt, Human
uuugaaaggagcuuuauccaga

SEQ ID NO: 818051 - RNA, 22 nt, Human
cagcaggaggugaguagcaggu

SEQ ID NO: 818052 - RNA, 22 nt, Human
aacauucugguucuaaaaaccu

SEQ ID NO: 818053 - RNA, 23 nt, Human
uggcaaggaaugggauggagacu

SEQ ID NO: 818054 - RNA, 22 nt, Human
ugaaggccacuuccugugagcu

SEQ ID NO: 818055 - RNA, 22 nt, Human
cccaggaggcgcagguugcggu

SEQ ID NO: 818056 - RNA, 22 nt, Human
ccccggaggcggagguugcagu

SEQ ID NO: 818057 - RNA, 22 nt, Human
ccaggagaaugggauuacccua

SEQ ID NO: 818058 - RNA, 22 nt, Human
uugguuuaggaacuggcuugga

SEQ ID NO: 818059 - RNA, 22 nt, Human
uugcuagcugguguaugcauug

SEQ ID NO: 818060 - RNA, 20 nt, Human
aggcagcugggaaaugaggg

SEQ ID NO: 818061 - RNA, 22 nt, Human
uucaacuaauguuuauuuuaug

SEQ ID NO: 818062 - RNA, 22 nt, Human
augggaggaugcucgggugcuc

SEQ ID NO: 818063 - RNA, 22 nt, Human
cccuggaggucagaggccuggg

SEQ ID NO: 818064 - RNA, 22 nt, Human
uuugcauaagucauguccagug

SEQ ID NO: 818065 - RNA, 22 nt, Human
aauauuguuucaagaucacaga

SEQ ID NO: 818066 - RNA, 22 nt, Human
gcuccucuauuccccacauuuu

SEQ ID NO: 818067 - RNA, 22 nt, Human
agucucugggcaugguugugac

SEQ ID NO: 818068 - RNA, 19 nt, Human
uucacaauuaugaaauuag

SEQ ID NO: 818069 - RNA, 23 nt, Human
uuccagaguccacaucugccacc

SEQ ID NO: 818070 - RNA, 22 nt, Human
uucaggaugcucagaguagucu

SEQ ID NO: 818071 - RNA, 22 nt, Human
cagcuccugggccaucuccuag

SEQ ID NO: 818072 - RNA, 22 nt, Human
gaagcagccacggggagacaga

SEQ ID NO: 818073 - RNA, 22 nt, Human
ggugaagggugucauggcauuu

SEQ ID NO: 818074 - RNA, 22 nt, Human
aggcagaggagaaugaucuucc

SEQ ID NO: 818075 - RNA, 19 nt, Human
uagaggagaagggaagugg

SEQ ID NO: 818076 - RNA, 22 nt, Human
cucuucuugaaagaggaauuca

SEQ ID NO: 818077 - RNA, 19 nt, Human
uccucagugacaaccucag

SEQ ID NO: 818078 - RNA, 22 nt, Human
cugcugugcaggugccuaugau

SEQ ID NO: 818079 - RNA, 22 nt, Human
cuucugugauuugguuaggaua

SEQ ID NO: 818080 - RNA, 22 nt, Human
agcagacauaucucaugucaca

SEQ ID NO: 818081 - RNA, 22 nt, Human
cgaggcagacaaaaguuggaag

SEQ ID NO: 818082 - RNA, 22 nt, Human
aaauguuucuacuugugagcau

SEQ ID NO: 818083 - RNA, 22 nt, Human
uuagccauugucagcacauggc

SEQ ID NO: 818084 - RNA, 22 nt, Human
agagggaucacccuguuucugg

SEQ ID NO: 818085 - RNA, 22 nt, Human
aaccauuugcaguuacugagac

SEQ ID NO: 818086 - RNA, 22 nt, Human
uagaaaugaauguuuaaaaguc

SEQ ID NO: 818087 - RNA, 22 nt, Human
acauugcugcauucuccuuccc

SEQ ID NO: 818088 - RNA, 19 nt, Human
caggaaugagguaauggcu

SEQ ID NO: 818089 - RNA, 22 nt, Human
auacuaaaguauagaacuuagu

SEQ ID NO: 818090 - RNA, 22 nt, Human
cucuucuugccugaugaggcag

SEQ ID NO: 818091 - RNA, 22 nt, Human
ggccagcagucacagggucaga

SEQ ID NO: 818092 - RNA, 22 nt, Human
aggcagugcucaagacagcagc

SEQ ID NO: 818093 - RNA, 22 nt, Human
uaggcagcauggauucugaaua

SEQ ID NO: 818094 - RNA, 22 nt, Human
aauuuuaaucaguggugcugag

SEQ ID NO: 818095 - RNA, 22 nt, Human
auauauuugagaauauucauga

SEQ ID NO: 818096 - RNA, 22 nt, Human
ucuucaaguuccaaagugcagg

SEQ ID NO: 818097 - RNA, 20 nt, Human
cuguggaauuuuaccaugcg

SEQ ID NO: 818098 - RNA, 22 nt, Human
auaaauaucacuguugucccuc

SEQ ID NO: 818099 - RNA, 22 nt, Human
ccucuucugcuucaggagcacu

SEQ ID NO: 818100 - RNA, 22 nt, Human
ugcauggaggaagaugaaugca

SEQ ID NO: 818101 - RNA, 22 nt, Human
auugucuuuccacugagaaguu

SEQ ID NO: 818102 - RNA, 23 nt, Human
ggagaggggugugggcaucuuua

SEQ ID NO: 818103 - RNA, 19 nt, Human
agaaguuagacauugcaau

SEQ ID NO: 818104 - RNA, 22 nt, Human
aucacauucuuucaaagcaguc

SEQ ID NO: 818105 - RNA, 22 nt, Human
aaagccaugaauguuauagagg

SEQ ID NO: 818106 - RNA, 22 nt, Human
gcagaggauagcauaugaaccu

SEQ ID NO: 818107 - RNA, 22 nt, Human
aggacagcccuugagagcacau

SEQ ID NO: 818108 - RNA, 19 nt, Human
uucauucuuucuacuuacc

SEQ ID NO: 818109 - RNA, 22 nt, Human
agugauggugagugagaagcuc

SEQ ID NO: 818110 - RNA, 22 nt, Human
gcucaggacuggaggagcgggg

SEQ ID NO: 818111 - RNA, 22 nt, Human
agagacagaggcaauauagcuu

SEQ ID NO: 818112 - RNA, 22 nt, Human
ucccaggauuuuaggcucucag

SEQ ID NO: 818113 - RNA, 22 nt, Human
gauuucuuuaugaaguacagaa

SEQ ID NO: 818114 - RNA, 22 nt, Human
agacagcugggaaauggagugu

SEQ ID NO: 818115 - RNA, 22 nt, Human
uuuauauuucccaggauuggcc

SEQ ID NO: 818116 - RNA, 22 nt, Human
cccaggaaacccgaaggcgacc

SEQ ID NO: 818117 - RNA, 22 nt, Human
guuuauaaggcccaauauuucu

SEQ ID NO: 818118 - RNA, 22 nt, Human
cagcuucugucugauuagcaag

SEQ ID NO: 818119 - RNA, 22 nt, Human
gcuguguuugacaguagcagac

SEQ ID NO: 818120 - RNA, 22 nt, Human
agcugcccuuuaugaugcugaa

SEQ ID NO: 818121 - RNA, 22 nt, Human
ugaggcaggacugagcgggaug

SEQ ID NO: 818122 - RNA, 22 nt, Human
gaaacugugaucguguucuggg

SEQ ID NO: 818123 - RNA, 22 nt, Human
cagcuggccccacaguagaggc

SEQ ID NO: 818124 - RNA, 21 nt, Human
cucaggaucuuauauauuagu

SEQ ID NO: 818125 - RNA, 22 nt, Human
ucagaaaagguagcugugacaa

SEQ ID NO: 818126 - RNA, 20 nt, Human
aagagaggaaguuauacuag

SEQ ID NO: 818127 - RNA, 22 nt, Human
aggaagcuaaccagggagugag

SEQ ID NO: 818128 - RNA, 22 nt, Human
aggagcagaacugauucugacu

SEQ ID NO: 818129 - RNA, 22 nt, Human
gaggcagcuuaggguacugacu

SEQ ID NO: 818130 - RNA, 22 nt, Human
gacccaggagugcagagagugg

SEQ ID NO: 818131 - RNA, 22 nt, Human
ccugcucagagcgucuugugug

SEQ ID NO: 818132 - RNA, 20 nt, Human
gccaggagggugugaugagc

SEQ ID NO: 818133 - RNA, 22 nt, Human
aggguggccaugagggagagau

SEQ ID NO: 818134 - RNA, 22 nt, Human
ggagaggaaaugccagcacuuc

SEQ ID NO: 818135 - RNA, 22 nt, Human
gagggagggaaaguuuaacacu

SEQ ID NO: 818136 - RNA, 22 nt, Human
gagaaggaguagcugaccuggg

SEQ ID NO: 818137 - RNA, 22 nt, Human
cagaggcacaagaaagcaaggc

SEQ ID NO: 818138 - RNA, 22 nt, Human
aaaggagacuucagaucuccuu

SEQ ID NO: 818139 - RNA, 22 nt, Human
ucugggaacugagcuccccuag

SEQ ID NO: 818140 - RNA, 22 nt, Human
uugguuuacuaggauucaaauu

SEQ ID NO: 818141 - RNA, 22 nt, Human
cuucuucaguugcauguauugg

SEQ ID NO: 818142 - RNA, 22 nt, Human
acaaaugucuccucuuuuguua

SEQ ID NO: 818143 - RNA, 22 nt, Human
auaagcauguuagaauauuuga

SEQ ID NO: 818144 - RNA, 23 nt, Human
cugcugugaaacaugguuuuggu

SEQ ID NO: 818145 - RNA, 22 nt, Human
acauucuuaacaguuaaaaacu

SEQ ID NO: 818146 - RNA, 22 nt, Human
aucaggaucugggagccugaaa

SEQ ID NO: 818147 - RNA, 22 nt, Human
cuacccaggcuuagagggcugg

SEQ ID NO: 818148 - RNA, 22 nt, Human
uuauuuaaugugaucugaagag

SEQ ID NO: 818149 - RNA, 22 nt, Human
cuggaguuagaguagacacuga

SEQ ID NO: 818150 - RNA, 22 nt, Human
ucaggagaaggcaauguggaaa

SEQ ID NO: 818151 - RNA, 22 nt, Human
uucagaaugugaccuuauuugg

SEQ ID NO: 818152 - RNA, 22 nt, Human
uccauuuucuugcucuagguaa

SEQ ID NO: 818153 - RNA, 22 nt, Human
uguuuuuaaauaaugauagaaa

SEQ ID NO: 818154 - RNA, 22 nt, Human
aggcggcugguguccugcaggu

SEQ ID NO: 818155 - RNA, 22 nt, Human
cagagagagucaaaucuuugcu

SEQ ID NO: 818156 - RNA, 22 nt, Human
caggguggggaaauagcgcccu

SEQ ID NO: 818157 - RNA, 22 nt, Human
ggcagcuuccuaggagagggca

SEQ ID NO: 818158 - RNA, 22 nt, Human
cugcccaggaaccagaggggca

SEQ ID NO: 818159 - RNA, 22 nt, Human
cuuuggcaaggguuuuaauugu

SEQ ID NO: 818160 - RNA, 22 nt, Human
gauuucuuugcaagcuguguuc

SEQ ID NO: 818161 - RNA, 22 nt, Human
gagggaggggagcuccacccuc

SEQ ID NO: 818162 - RNA, 22 nt, Human
cuagccaugggcauuaaaggua

SEQ ID NO: 818163 - RNA, 22 nt, Human
uucugagacaauugagagucua

SEQ ID NO: 818164 - RNA, 22 nt, Human
aaggcagcccuggcucagccug

SEQ ID NO: 818165 - RNA, 17 nt, Human
agaacuguaguagcucc

SEQ ID NO: 818166 - RNA, 22 nt, Human
uuugcauaggauggacauuuua

SEQ ID NO: 818167 - RNA, 22 nt, Human
gccaggagaaugcuagcagagg

SEQ ID NO: 818168 - RNA, 22 nt, Human
gaggcaguuccugagugacaag

SEQ ID NO: 818169 - RNA, 22 nt, Human
uuugaaaggugucgagaugugu

SEQ ID NO: 818170 - RNA, 22 nt, Human
cucugcaugccuugcucagaca

SEQ ID NO: 818171 - RNA, 22 nt, Human
gaggcaacacauuuggaaagca

SEQ ID NO: 818172 - RNA, 22 nt, Human
auacuuucugaccaauuaauug

SEQ ID NO: 818173 - RNA, 22 nt, Human
accauuuuggguauuuucagag

SEQ ID NO: 818174 - RNA, 22 nt, Human
gucugucuguuguugagaagca

SEQ ID NO: 818175 - RNA, 22 nt, Human
uggcaaggccacaggugcaguu

SEQ ID NO: 818176 - RNA, 22 nt, Human
uggcagcuacagacagagguga

SEQ ID NO: 818177 - RNA, 22 nt, Human
gcaggaagcauagaagaaugcc

SEQ ID NO: 818178 - RNA, 22 nt, Human
caucacccggaacugugucugc

SEQ ID NO: 818179 - RNA, 22 nt, Human
gcaaauauucaagacuuuucca

SEQ ID NO: 818180 - RNA, 22 nt, Human
gcagcugagagaagaacagggc

SEQ ID NO: 818181 - RNA, 22 nt, Human
gggaagcaggugcagcucgccu

SEQ ID NO: 818182 - RNA, 22 nt, Human
ugaggcagcauucuucaagaca

SEQ ID NO: 818183 - RNA, 22 nt, Human
aaucuguucuacucuauucaga

SEQ ID NO: 818184 - RNA, 22 nt, Human
uuuccaagagcuuauuucugaa

SEQ ID NO: 818185 - RNA, 22 nt, Human
uugauagguuuuauguauaguu

SEQ ID NO: 818186 - RNA, 22 nt, Human
gcugccagccaacuugcugugc

SEQ ID NO: 818187 - RNA, 22 nt, Human
uugcugaaguuaaugcuugcaa

SEQ ID NO: 818188 - RNA, 22 nt, Human
uuaacauacaucaugaacaaug

SEQ ID NO: 818189 - RNA, 22 nt, Human
ucucaagaucucaagauggccc

SEQ ID NO: 818190 - RNA, 22 nt, Human
auucuucaucagagaugcacua

SEQ ID NO: 818191 - RNA, 22 nt, Human
uauuuccauguuagaacuaagu

SEQ ID NO: 818192 - RNA, 22 nt, Human
uagcugcugcagcacagggagg

SEQ ID NO: 818193 - RNA, 22 nt, Human
ugaggcagcccacuuuccuuag

SEQ ID NO: 818194 - RNA, 22 nt, Human
uagaaauguugguauuaacauu

SEQ ID NO: 818195 - RNA, 22 nt, Human
gaaauaagaguccaugccaggu

SEQ ID NO: 818196 - RNA, 23 nt, Human
uccaggagaaccccugucugucc

SEQ ID NO: 818197 - RNA, 22 nt, Human
guaaaauagaauaacguggcua

SEQ ID NO: 818198 - RNA, 22 nt, Human
cucaggaugaaagucaugguga

SEQ ID NO: 818199 - RNA, 22 nt, Human
ccuugcugaccaucaccuuuga

SEQ ID NO: 818200 - RNA, 22 nt, Human
cuccacagcucaggcucagagu

SEQ ID NO: 818201 - RNA, 19 nt, Human
cauuuuaagcauccccagu

SEQ ID NO: 818202 - RNA, 22 nt, Human
agcagaggaggauuuaguuagg

SEQ ID NO: 818203 - RNA, 22 nt, Human
ccaggagagcucuaaauggcug

SEQ ID NO: 818204 - RNA, 22 nt, Human
auauucuugugauuauaaagua

SEQ ID NO: 818205 - RNA, 22 nt, Human
cuggcuugcagcucaucauaaa

SEQ ID NO: 818206 - RNA, 22 nt, Human
auucaaguccagcuucucuaca

SEQ ID NO: 818207 - RNA, 22 nt, Human
aaguauuucguucugaaaaagu

SEQ ID NO: 818208 - RNA, 22 nt, Human
agaggccaugcuagaggccugg

SEQ ID NO: 818209 - RNA, 22 nt, Human
gaggagcugggucagggagaca

SEQ ID NO: 818210 - RNA, 22 nt, Human
cccaugagaccugguuuaaggc

SEQ ID NO: 818211 - RNA, 22 nt, Human
cagucucucagcuuucagcugu

SEQ ID NO: 818212 - RNA, 20 nt, Human
ccucaggaugagggugagca

SEQ ID NO: 818213 - RNA, 22 nt, Human
ucagagaguuacacaaauuguu

SEQ ID NO: 818214 - RNA, 20 nt, Human
agggcagcuugaggagccgg

SEQ ID NO: 818215 - RNA, 22 nt, Human
guaguucugcagugucaccuga

SEQ ID NO: 818216 - RNA, 22 nt, Human
guccucugaaguugugcaaugc

SEQ ID NO: 818217 - RNA, 22 nt, Human
uuaacauuguccuuagcagauu

SEQ ID NO: 818218 - RNA, 23 nt, Human
gccaggaguggguagacuaaugc

SEQ ID NO: 818219 - RNA, 22 nt, Human
auuaaauuggacgcugggggaa

SEQ ID NO: 818220 - RNA, 22 nt, Human
ucugggaaccagugcggcuggg

SEQ ID NO: 818221 - RNA, 22 nt, Human
cccaggaggcagagauagcagu

SEQ ID NO: 818222 - RNA, 22 nt, Human
aggcagcuucugauuagcagcg

SEQ ID NO: 818223 - RNA, 22 nt, Human
gcagagaacccagcagauuggc

SEQ ID NO: 818224 - RNA, 22 nt, Human
uugacaauguccuuugaauuuc

SEQ ID NO: 818225 - RNA, 22 nt, Human
cugcuguguuagcagguuuagu

SEQ ID NO: 818226 - RNA, 22 nt, Human
uugaaagaggcaaaguuugauc

SEQ ID NO: 818227 - RNA, 23 nt, Human
uuucaaauuacucugcagaugac

SEQ ID NO: 818228 - RNA, 22 nt, Human
ucugggaagcugguccuguucu

SEQ ID NO: 818229 - RNA, 22 nt, Human
aggcaguuucugggacagcaua

SEQ ID NO: 818230 - RNA, 17 nt, Human
gagagcugcugcuuccg

SEQ ID NO: 818231 - RNA, 22 nt, Human
cccaguuucaacuuuccagugg

SEQ ID NO: 818232 - RNA, 22 nt, Human
agaggacagacggaaagugcca

SEQ ID NO: 818233 - RNA, 22 nt, Human
ugaggcaggagaaucacaugaa

SEQ ID NO: 818234 - RNA, 19 nt, Human
accaggagacagugagcuu

SEQ ID NO: 818235 - RNA, 22 nt, Human
cugaggaagacagcagcugugu

SEQ ID NO: 818236 - RNA, 22 nt, Human
gaaggccacuuuguguugagaa

SEQ ID NO: 818237 - RNA, 22 nt, Human
ucugucucaaguucuugcacuc

SEQ ID NO: 818238 - RNA, 22 nt, Human
ugucuucagcaaaugccuuucu

SEQ ID NO: 818239 - RNA, 22 nt, Human
aguggcagagccaaguagagcc

SEQ ID NO: 818240 - RNA, 22 nt, Human
uggaaagcgaggaguuggcauu

SEQ ID NO: 818241 - RNA, 22 nt, Human
cugagcugggaguagagacucu

SEQ ID NO: 818242 - RNA, 22 nt, Human
uuuaacagaugugaaauuuuca

SEQ ID NO: 818243 - RNA, 22 nt, Human
augcuuccaaggcuaagacaag

SEQ ID NO: 818244 - RNA, 22 nt, Human
uuucagggagccuagaagagcu

SEQ ID NO: 818245 - RNA, 21 nt, Human
gauuuuaaagagacugccaca

SEQ ID NO: 818246 - RNA, 22 nt, Human
aggagagggguaggauuaauuu

SEQ ID NO: 818247 - RNA, 22 nt, Human
gagaaaugcaugcaugucauca

SEQ ID NO: 818248 - RNA, 22 nt, Human
aggcugcugaggccaccacgcu

SEQ ID NO: 818249 - RNA, 21 nt, Human
ggcagccucuguggaagggga

SEQ ID NO: 818250 - RNA, 22 nt, Human
gucuuucuaugaugaacuguug

SEQ ID NO: 818251 - RNA, 22 nt, Human
accaggagcauuuuuuauuagu

SEQ ID NO: 818252 - RNA, 22 nt, Human
uaaggccaggcuguggucggca

SEQ ID NO: 818253 - RNA, 22 nt, Human
ucauuuaauaauuuuugaguag

SEQ ID NO: 818254 - RNA, 22 nt, Human
caaauguauaaauguacuuucu

SEQ ID NO: 818255 - RNA, 22 nt, Human
aucaggauccaccuugagccug

SEQ ID NO: 818256 - RNA, 22 nt, Human
caacugagcaguagcgucugga

SEQ ID NO: 818257 - RNA, 22 nt, Human
gucuucuguaagaugagguccc

SEQ ID NO: 818258 - RNA, 22 nt, Human
ugaaagguuaaaaguaguauug

SEQ ID NO: 818259 - RNA, 22 nt, Human
ucaacugcaaguuugcuuaguu

SEQ ID NO: 818260 - RNA, 22 nt, Human
ugaacaguuucaagaaaacuuu

SEQ ID NO: 818261 - RNA, 22 nt, Human
cagguaaaaauaaauuugugag

SEQ ID NO: 818262 - RNA, 22 nt, Human
ucucuucucuagugagcaacug

SEQ ID NO: 818263 - RNA, 22 nt, Human
auggagggugucagagagcgaa

SEQ ID NO: 818264 - RNA, 21 nt, Human
uagggcaggcauuggaagaga

SEQ ID NO: 818265 - RNA, 22 nt, Human
gugcaagguacauccuugaugu

SEQ ID NO: 818266 - RNA, 22 nt, Human
ucuucagauaaagggagaguau

SEQ ID NO: 818267 - RNA, 22 nt, Human
uccucagacuucccuuugugua

SEQ ID NO: 818268 - RNA, 22 nt, Human
acccaggaggcagagguugcag

SEQ ID NO: 818269 - RNA, 22 nt, Human
aaagcagauucugaugcaguag

SEQ ID NO: 818270 - RNA, 22 nt, Human
aaggagaaaugguagaugugca

SEQ ID NO: 818271 - RNA, 22 nt, Human
ucuuagaaguuuauggcacgga

SEQ ID NO: 818272 - RNA, 22 nt, Human
auucuuauuauaguaaaacagu

SEQ ID NO: 818273 - RNA, 22 nt, Human
aucuuucaguuucauaccaauu

SEQ ID NO: 818274 - RNA, 22 nt, Human
guaggcagauaggagugcagcc

SEQ ID NO: 818275 - RNA, 17 nt, Human
ggcagcugugugcaugc

SEQ ID NO: 818276 - RNA, 22 nt, Human
gaggcagcugaaggagugacag

SEQ ID NO: 818277 - RNA, 22 nt, Human
cagaauggcuuuuauggcucag

SEQ ID NO: 818278 - RNA, 22 nt, Human
cugcugugcacccaggaaggcu

SEQ ID NO: 818279 - RNA, 22 nt, Human
ggcagcugcaaaucugcucugu

SEQ ID NO: 818280 - RNA, 22 nt, Human
caggcagcagaggaguguggga

SEQ ID NO: 818281 - RNA, 22 nt, Human
cagcagagaccaagugauuuga

SEQ ID NO: 818282 - RNA, 22 nt, Human
cagcuagcuaagaaggccagag

SEQ ID NO: 818283 - RNA, 19 nt, Human
cuucuggcccugagccacc

SEQ ID NO: 818284 - RNA, 22 nt, Human
ccaugagcuuccuauauagggu

SEQ ID NO: 818285 - RNA, 22 nt, Human
gcugauguaagacuuuugguuu

SEQ ID NO: 818286 - RNA, 22 nt, Human
caggauggagaguuguugguug

SEQ ID NO: 818287 - RNA, 22 nt, Human
aggccagcgcugcuagcucccg

SEQ ID NO: 818288 - RNA, 22 nt, Human
aggcagccaaucagaggcugac

SEQ ID NO: 818289 - RNA, 21 nt, Human
acagcaagccuucacaugagu

SEQ ID NO: 818290 - RNA, 22 nt, Human
uucuuucucaacaugaauguuu

SEQ ID NO: 818291 - RNA, 22 nt, Human
aucacuguguauguauaugcag

SEQ ID NO: 818292 - RNA, 22 nt, Human
uugacacaguuuucucauuaag

SEQ ID NO: 818293 - RNA, 21 nt, Human
cucuugugucagagccagagg

SEQ ID NO: 818294 - RNA, 22 nt, Human
uuagccauuaauguccugugca

SEQ ID NO: 818295 - RNA, 22 nt, Human
ucuuugaauccuuuacaucuga

SEQ ID NO: 818296 - RNA, 22 nt, Human
aucuuucaaucaggaaaaaucu

SEQ ID NO: 818297 - RNA, 22 nt, Human
auucuucaccauggauaauuug

SEQ ID NO: 818298 - RNA, 22 nt, Human
gccaggagaaaaggcgaaugau

SEQ ID NO: 818299 - RNA, 22 nt, Human
augauauuugcaaugugcuugc

SEQ ID NO: 818300 - RNA, 22 nt, Human
ugggagcccaagggagcugccg

SEQ ID NO: 818301 - RNA, 22 nt, Human
augcuguguccuagugaaagaa

SEQ ID NO: 818302 - RNA, 22 nt, Human
ucgcugugguuucuguacaugg

SEQ ID NO: 818303 - RNA, 22 nt, Human
ugucugugaccucuuuggagcc

SEQ ID NO: 818304 - RNA, 22 nt, Human
uuugaauguuuuagguacuuaa

SEQ ID NO: 818305 - RNA, 22 nt, Human
acaggacuguggaaggaucucu

SEQ ID NO: 818306 - RNA, 22 nt, Human
ucucuucuaacacuagaaauuc

SEQ ID NO: 818307 - RNA, 22 nt, Human
cagagccauuauggagacuugc

SEQ ID NO: 818308 - RNA, 20 nt, Human
cccagugaagcauggaagag

SEQ ID NO: 818309 - RNA, 22 nt, Human
cucaggaaaggccaugcaaggg

SEQ ID NO: 818310 - RNA, 22 nt, Human
cccaggaccgcgcggcugagcg

SEQ ID NO: 818311 - RNA, 22 nt, Human
gcuguguuuuauguuagguuaa

SEQ ID NO: 818312 - RNA, 22 nt, Human
cauggagauaaacugaaauauu

SEQ ID NO: 818313 - RNA, 22 nt, Human
ggccagcucuuguccacggagg

SEQ ID NO: 818314 - RNA, 22 nt, Human
aaggaguuuggguagucauaca

SEQ ID NO: 818315 - RNA, 22 nt, Human
gcucaggaaauaguuuaguguu

SEQ ID NO: 818316 - RNA, 22 nt, Human
ucaggagauggucuuuauaggc

SEQ ID NO: 818317 - RNA, 22 nt, Human
ccucacugaagaggugacauuu

SEQ ID NO: 818318 - RNA, 22 nt, Human
ugaaucugauuucccuggaggc

SEQ ID NO: 818319 - RNA, 22 nt, Human
cuguguuugaugagaagccacc

SEQ ID NO: 818320 - RNA, 22 nt, Human
auuucccagcuuugaucaguuu

SEQ ID NO: 818321 - RNA, 22 nt, Human
agugcuuucccugaaaccuucc

SEQ ID NO: 818322 - RNA, 22 nt, Human
gcagcugcuggagggaggcagg

SEQ ID NO: 818323 - RNA, 20 nt, Human
ggaggguggaagaaagcaag

SEQ ID NO: 818324 - RNA, 20 nt, Human
agaggaggauuauuuuauuc

SEQ ID NO: 818325 - RNA, 22 nt, Human
gaggcagcuggguccggucggg

SEQ ID NO: 818326 - RNA, 22 nt, Human
ugaggcagauauuuauuggguu

SEQ ID NO: 818327 - RNA, 22 nt, Human
aacacugcugcuggguucugug

SEQ ID NO: 818328 - RNA, 22 nt, Human
auacacauauguguguauaugu

SEQ ID NO: 818329 - RNA, 22 nt, Human
cuuugaauugccguuucaucug

SEQ ID NO: 818330 - RNA, 22 nt, Human
uuuggaauauuaaaaugucuca

SEQ ID NO: 818331 - RNA, 22 nt, Human
uaucuguuaggaucagagcugg

SEQ ID NO: 818332 - RNA, 22 nt, Human
uuauuucauugauuucuaagac

SEQ ID NO: 818333 - RNA, 22 nt, Human
ggcaggcucagcagccaaggag

SEQ ID NO: 818334 - RNA, 22 nt, Human
uucuuaacucaaauauauaucc

SEQ ID NO: 818335 - RNA, 22 nt, Human
ggagaggguguggaaaguuauc

SEQ ID NO: 818336 - RNA, 22 nt, Human
aauauuuguuaguguuuuaaug

SEQ ID NO: 818337 - RNA, 22 nt, Human
gcagaggcuguagggaagguug

SEQ ID NO: 818338 - RNA, 22 nt, Human
guucucucugcuuccaagaugg

SEQ ID NO: 818339 - RNA, 22 nt, Human
uucauucugggcucuaaggaac

SEQ ID NO: 818340 - RNA, 22 nt, Human
uauucaaaguaccuucauugcc

SEQ ID NO: 818341 - RNA, 22 nt, Human
uccaugagagguaacuuuacaa

SEQ ID NO: 818342 - RNA, 22 nt, Human
cccuggaggcuggaggcaguag

SEQ ID NO: 818343 - RNA, 22 nt, Human
uaggagaggugaauggcacacu

SEQ ID NO: 818344 - RNA, 23 nt, Human
aaacugcuuccaauuccugccau

SEQ ID NO: 818345 - RNA, 22 nt, Human
gugguaaucggauucuuaccgg

SEQ ID NO: 818346 - RNA, 22 nt, Human
aucaggauggguuuggcuuagg

SEQ ID NO: 818347 - RNA, 22 nt, Human
agugcuguuagguuaauauagu

SEQ ID NO: 818348 - RNA, 22 nt, Human
aggcagcuggcaaauucuagag

SEQ ID NO: 818349 - RNA, 22 nt, Human
uuaauuaaauucaugagcauug

SEQ ID NO: 818350 - RNA, 22 nt, Human
uuagccauauagaaaaagagcu

SEQ ID NO: 818351 - RNA, 23 nt, Human
acagaaaucauuuguaagguacc

SEQ ID NO: 818352 - RNA, 22 nt, Human
agaggggacagccaccugcccg

SEQ ID NO: 818353 - RNA, 22 nt, Human
cucuggcuucuaccuugcaguu

SEQ ID NO: 818354 - RNA, 20 nt, Human
uaggcagcuugacccuuggu

SEQ ID NO: 818355 - RNA, 20 nt, Human
augauuuugcacuaacuuca

SEQ ID NO: 818356 - RNA, 22 nt, Human
cucuucuuggcccccaugaggg

SEQ ID NO: 818357 - RNA, 22 nt, Human
uuuaucuuuaggacuuugcaga

SEQ ID NO: 818358 - RNA, 22 nt, Human
uccaugaguuugaggaaaagag

SEQ ID NO: 818359 - RNA, 22 nt, Human
cuuugaagagauuacugugcuc

SEQ ID NO: 818360 - RNA, 22 nt, Human
acaggagacccugcugguucug

SEQ ID NO: 818361 - RNA, 22 nt, Human
cagcuacuccucccaugacuuc

SEQ ID NO: 818362 - RNA, 22 nt, Human
aaauuauuaugccccucuauaa

SEQ ID NO: 818363 - RNA, 22 nt, Human
gaggucagucagaccaggguuu

SEQ ID NO: 818364 - RNA, 22 nt, Human
guucuucaggccauccucccag

SEQ ID NO: 818365 - RNA, 22 nt, Human
uucccucuccuacucaggaaag

SEQ ID NO: 818366 - RNA, 22 nt, Human
uauuuuaaagugaagggucuug

SEQ ID NO: 818367 - RNA, 22 nt, Human
gaaggccauugcguccugggau

SEQ ID NO: 818368 - RNA, 22 nt, Human
gaggucaggggagaggcugaug

SEQ ID NO: 818369 - RNA, 19 nt, Human
ucuuucauuucuagcucug

SEQ ID NO: 818370 - RNA, 22 nt, Human
cugcuguguggugaaacucagu

SEQ ID NO: 818371 - RNA, 17 nt, Human
aaggccauuuccaccca

SEQ ID NO: 818372 - RNA, 22 nt, Human
cuuaagaugaggucaugcuaua

SEQ ID NO: 818373 - RNA, 22 nt, Human
ugaggcaguugagcuuccugag

SEQ ID NO: 818374 - RNA, 22 nt, Human
cuugaaagcacuuaguaaauua

SEQ ID NO: 818375 - RNA, 22 nt, Human
aggaugaauaacugaaauggug

SEQ ID NO: 818376 - RNA, 22 nt, Human
ugaaaugagauagauaaucagg

SEQ ID NO: 818377 - RNA, 22 nt, Human
gucauucuuaacaacucaguag

SEQ ID NO: 818378 - RNA, 22 nt, Human
cagcugugaauugucuuaucua

SEQ ID NO: 818379 - RNA, 22 nt, Human
aaaggccacacugcucuuucuc

SEQ ID NO: 818380 - RNA, 22 nt, Human
uauuucagcccuacuacuuggc

SEQ ID NO: 818381 - RNA, 22 nt, Human
ucacuguugaccuggaaguggg

SEQ ID NO: 818382 - RNA, 22 nt, Human
uugaaauggaagugaaaauucu

SEQ ID NO: 818383 - RNA, 22 nt, Human
uuuaaaauuuagaccucuccac

SEQ ID NO: 818384 - RNA, 22 nt, Human
agucuccuuggccucaaugccu

SEQ ID NO: 818385 - RNA, 22 nt, Human
auucuucaguauguguggauug

SEQ ID NO: 818386 - RNA, 22 nt, Human
gaggcagcaauaaaaagaauuu

SEQ ID NO: 818387 - RNA, 22 nt, Human
cccuguacagucucuguggcac

SEQ ID NO: 818388 - RNA, 22 nt, Human
aggggcucaaagugugcaggga

SEQ ID NO: 818389 - RNA, 22 nt, Human
cugcugugauugggagaaaccg

SEQ ID NO: 818390 - RNA, 22 nt, Human
uugugaguagugccgcaauaaa

SEQ ID NO: 818391 - RNA, 22 nt, Human
uugcauuuuuagaugcuucugu

SEQ ID NO: 818392 - RNA, 22 nt, Human
ugaggcagguaagcaaguuuug

SEQ ID NO: 818393 - RNA, 22 nt, Human
uuugaaaguguuuacuugggaa

SEQ ID NO: 818394 - RNA, 19 nt, Human
agaggcagucuccaacagg

SEQ ID NO: 818395 - RNA, 18 nt, Human
caugucugcgccacaagg

SEQ ID NO: 818396 - RNA, 22 nt, Human
gggcagcugcagggauggugac

SEQ ID NO: 818397 - RNA, 22 nt, Human
aggcagcuagagagugaaacug

SEQ ID NO: 818398 - RNA, 16 nt, Human
aaggagggaagagaau

SEQ ID NO: 818399 - RNA, 22 nt, Human
guggaauguccuugaucauaag

SEQ ID NO: 818400 - RNA, 22 nt, Human
ggagcaggagucucuugaauuu

SEQ ID NO: 818401 - RNA, 21 nt, Human
cuguggaagggaacuagaggg

SEQ ID NO: 818402 - RNA, 22 nt, Human
gccaugcuugguaugcugugag

SEQ ID NO: 818403 - RNA, 19 nt, Human
caugcugaccugcuguggu

SEQ ID NO: 818404 - RNA, 22 nt, Human
caucucaugggcaugccaagcu

SEQ ID NO: 818405 - RNA, 22 nt, Human
agaggcagccguauuucaaagg

SEQ ID NO: 818406 - RNA, 22 nt, Human
gaaacuguauguaguuuuuggg

SEQ ID NO: 818407 - RNA, 22 nt, Human
ggagaggagauuguggcauuuu

SEQ ID NO: 818408 - RNA, 22 nt, Human
acagugacguuuauuugagacg

SEQ ID NO: 818409 - RNA, 22 nt, Human
ugagaacugaggauuugaauuc

SEQ ID NO: 818410 - RNA, 22 nt, Human
gagggcauaguuaaauaggagg

SEQ ID NO: 818411 - RNA, 22 nt, Human
aaauguauugcauaggauauuu

SEQ ID NO: 818412 - RNA, 22 nt, Human
ucacaguaaaagcauggaagag

SEQ ID NO: 818413 - RNA, 22 nt, Human
auucucuuuguauaacaucuug

SEQ ID NO: 818414 - RNA, 22 nt, Human
uuccaugagcucugaguucaca

SEQ ID NO: 818415 - RNA, 22 nt, Human
ucagagaggcaauacuguuuaa

SEQ ID NO: 818416 - RNA, 18 nt, Human
cugcugugucgucugggc

SEQ ID NO: 818417 - RNA, 22 nt, Human
uucucugagauagacuaagugg

SEQ ID NO: 818418 - RNA, 22 nt, Human
aucaggauguuuggcugucaua

SEQ ID NO: 818419 - RNA, 22 nt, Human
acacuaaugagaaaggaauuaa

SEQ ID NO: 818420 - RNA, 22 nt, Human
cucuucucugcagccuuugaag

SEQ ID NO: 818421 - RNA, 22 nt, Human
aaugcuuuuugcgaaaugugca

SEQ ID NO: 818422 - RNA, 23 nt, Human
agggagcuaaaaggcuggagcag

SEQ ID NO: 818423 - RNA, 22 nt, Human
uggagucugugaugcucugggu

SEQ ID NO: 818424 - RNA, 22 nt, Human
ucuuugcaaauguuauuaucuu

SEQ ID NO: 818425 - RNA, 22 nt, Human
gagcagcugagcuggaaugaga

SEQ ID NO: 818426 - RNA, 22 nt, Human
gcugguuuccuuaucuauaaag

SEQ ID NO: 818427 - RNA, 22 nt, Human
caaauguaaauucuuuugaagc

SEQ ID NO: 818428 - RNA, 22 nt, Human
cuggguaaguuccuaaggcuca

SEQ ID NO: 818429 - RNA, 22 nt, Human
cuuaaaaucuggcaguuagcua

SEQ ID NO: 818430 - RNA, 20 nt, Human
ugugcaggagagugaggcug

SEQ ID NO: 818431 - RNA, 22 nt, Human
gagaggugaauguggaugccac

SEQ ID NO: 818432 - RNA, 22 nt, Human
auaguuugaaggcuguucuacu

SEQ ID NO: 818433 - RNA, 22 nt, Human
aucaggaugaagcuguagcgaa

SEQ ID NO: 818434 - RNA, 18 nt, Human
augggaggggccaagaga

SEQ ID NO: 818435 - RNA, 22 nt, Human
uggagacugugcuaagggaguu

SEQ ID NO: 818436 - RNA, 23 nt, Human
gaggcagcuccugcagugcccug

SEQ ID NO: 818437 - RNA, 22 nt, Human
cccaggcagugugugcaugcgu

SEQ ID NO: 818438 - RNA, 22 nt, Human
uuuagaaguucacacauuuaaa

SEQ ID NO: 818439 - RNA, 22 nt, Human
ugguaauuuacgcauuucugua

SEQ ID NO: 818440 - RNA, 19 nt, Human
uggcaucuguaaaauggug

SEQ ID NO: 818441 - RNA, 22 nt, Human
ccaggagagcucucguucagug

SEQ ID NO: 818442 - RNA, 22 nt, Human
cugagagugcucuuugauguca

SEQ ID NO: 818443 - RNA, 22 nt, Human
gcauguguuauuuuauguauga

SEQ ID NO: 818444 - RNA, 22 nt, Human
aucugccuccaaguccaugugu

SEQ ID NO: 818445 - RNA, 20 nt, Human
guggcaggcagugaaggagc

SEQ ID NO: 818446 - RNA, 22 nt, Human
augcuguggccagaguucaacu

SEQ ID NO: 818447 - RNA, 22 nt, Human
gagaggggcgcgcagcucgcga

SEQ ID NO: 818448 - RNA, 22 nt, Human
cauuuguuaauuacuauuaucu

SEQ ID NO: 818449 - RNA, 22 nt, Human
acagaaauugggcaaauggaag

SEQ ID NO: 818450 - RNA, 22 nt, Human
cuuucauucuuagauauuagug

SEQ ID NO: 818451 - RNA, 22 nt, Human
cugcuguggguuaagacacugu

SEQ ID NO: 818452 - RNA, 22 nt, Human
ccuucuucuguguggcccaaga

SEQ ID NO: 818453 - RNA, 22 nt, Human
cuugcaggccuuucuagcucua

SEQ ID NO: 818454 - RNA, 22 nt, Human
cacugagcugauagaauuccag

SEQ ID NO: 818455 - RNA, 22 nt, Human
uaucuguucaauggaagaugac

SEQ ID NO: 818456 - RNA, 22 nt, Human
uugaaaggugaacaugaugcac

SEQ ID NO: 818457 - RNA, 23 nt, Human
cuucucagaagucugugccagga

SEQ ID NO: 818458 - RNA, 20 nt, Human
uccaggagguuaguguggcu

SEQ ID NO: 818459 - RNA, 22 nt, Human
ggcagccuugacuagugacuua

SEQ ID NO: 818460 - RNA, 22 nt, Human
gagggaggcaucaugaauccag

SEQ ID NO: 818461 - RNA, 22 nt, Human
ugucaaauuuuuauugcaguau

SEQ ID NO: 818462 - RNA, 22 nt, Human
uucucugaucuugcuagacuga

SEQ ID NO: 818463 - RNA, 22 nt, Human
aaggccaacuaggaugagcuag

SEQ ID NO: 818464 - RNA, 22 nt, Human
uggcagcugaauggcuggaugg

SEQ ID NO: 818465 - RNA, 17 nt, Human
agaggcagauacuugga

SEQ ID NO: 818466 - RNA, 22 nt, Human
uagggauguaaacauaguaauu

SEQ ID NO: 818467 - RNA, 22 nt, Human
aaugucugccagaacugaucau

SEQ ID NO: 818468 - RNA, 18 nt, Human
guaggucaguaccaagca

SEQ ID NO: 818469 - RNA, 22 nt, Human
cucaggauuuaaaggggcacuc

SEQ ID NO: 818470 - RNA, 23 nt, Human
uuugaaguugacugccuuccaga

SEQ ID NO: 818471 - RNA, 22 nt, Human
caggcgagugaacagacucuca

SEQ ID NO: 818472 - RNA, 22 nt, Human
uuucaguucaguuuauuauauc

SEQ ID NO: 818473 - RNA, 22 nt, Human
ucauuuguaccauuuuuuaaga

SEQ ID NO: 818474 - RNA, 22 nt, Human
ggcaugcucuuuguccacagua

SEQ ID NO: 818475 - RNA, 22 nt, Human
cccaggaggaggaaaaagcucg

SEQ ID NO: 818476 - RNA, 22 nt, Human
uggaggaaguggcuggccagaa

SEQ ID NO: 818477 - RNA, 22 nt, Human
agauggaguuaguaccagaguc

SEQ ID NO: 818478 - RNA, 22 nt, Human
uugcaggaaacugagugugagc

SEQ ID NO: 818479 - RNA, 22 nt, Human
aauggccagcugggagaguuga

SEQ ID NO: 818480 - RNA, 22 nt, Human
aagggaggggauguaagccugg

SEQ ID NO: 818481 - RNA, 22 nt, Human
ugaaaugacagucuuaagcucu

SEQ ID NO: 818482 - RNA, 22 nt, Human
gucuucuuguuuugaaggaaau

SEQ ID NO: 818483 - RNA, 18 nt, Human
cucaccauucugcccaau

SEQ ID NO: 818484 - RNA, 22 nt, Human
guggcagcaaaugccuggacua

SEQ ID NO: 818485 - RNA, 22 nt, Human
aucuucucaagcagcauccugu

SEQ ID NO: 818486 - RNA, 17 nt, Human
uuucuccuuccaucuca

SEQ ID NO: 818487 - RNA, 22 nt, Human
agacagugcaagaagagcaggc

SEQ ID NO: 818488 - RNA, 22 nt, Human
uggggcuccuccuggcaggagg

SEQ ID NO: 818489 - RNA, 21 nt, Human
cccaggaggcugagaagagca

SEQ ID NO: 818490 - RNA, 22 nt, Human
uuagccaugugggaaaaacagc

SEQ ID NO: 818491 - RNA, 22 nt, Human
agggcagcagcuccuccuagcu

SEQ ID NO: 818492 - RNA, 22 nt, Human
ggcagcuauuccaagcagcacu

SEQ ID NO: 818493 - RNA, 22 nt, Human
uuagccauuaaauuacaaggug

SEQ ID NO: 818494 - RNA, 22 nt, Human
auggagacgcaagggaccuagg

SEQ ID NO: 818495 - RNA, 22 nt, Human
agaggggaguccuaaucugauu

SEQ ID NO: 818496 - RNA, 22 nt, Human
ggcuuggaaaugguaaugagcu

SEQ ID NO: 818497 - RNA, 22 nt, Human
aaggcagcuuuaaaaaagaugc

SEQ ID NO: 818498 - RNA, 22 nt, Human
cugcuuugggcagcuuuguggc

SEQ ID NO: 818499 - RNA, 22 nt, Human
uucucuuugacauuauucaggu

SEQ ID NO: 818500 - RNA, 15 nt, Human
cccaggaguucgaga

SEQ ID NO: 818501 - RNA, 22 nt, Human
gacuucuauuaauaccucuacu

SEQ ID NO: 818502 - RNA, 22 nt, Human
aggaggcacucacucucagggu

SEQ ID NO: 818503 - RNA, 23 nt, Human
cagcccuuccugcauguuuuugu

SEQ ID NO: 818504 - RNA, 22 nt, Human
gcaggagaaaugaagauugggu

SEQ ID NO: 818505 - RNA, 22 nt, Human
agucucugccagcuuguccucu

SEQ ID NO: 818506 - RNA, 22 nt, Human
aaaauuauagaucuagugccug

SEQ ID NO: 818507 - RNA, 22 nt, Human
gaggcagcugggcuggugguuu

SEQ ID NO: 818508 - RNA, 22 nt, Human
ccauuguaaauucuguggaagu

SEQ ID NO: 818509 - RNA, 22 nt, Human
acauauauuacuaguaaagaca

SEQ ID NO: 818510 - RNA, 22 nt, Human
uugaacugguaguuggaaaucu

SEQ ID NO: 818511 - RNA, 22 nt, Human
guccaugauucugugacacccu

SEQ ID NO: 818512 - RNA, 22 nt, Human
ggccaggagaggagggcacuga

SEQ ID NO: 818513 - RNA, 22 nt, Human
aggccagaaauuuggaguaugu

SEQ ID NO: 818514 - RNA, 22 nt, Human
ccaggcugggcuacaaguugag

SEQ ID NO: 818515 - RNA, 19 nt, Human
uggcagggagaguuugaag

SEQ ID NO: 818516 - RNA, 22 nt, Human
aggagaggucucccuuccccag

SEQ ID NO: 818517 - RNA, 22 nt, Human
agcagccuuugaucaucuggga

SEQ ID NO: 818518 - RNA, 17 nt, Human
uugaacugcugagucag

SEQ ID NO: 818519 - RNA, 22 nt, Human
caagagagaugcagcucacuca

SEQ ID NO: 818520 - RNA, 22 nt, Human
ucagccucucugaguccagacc

SEQ ID NO: 818521 - RNA, 22 nt, Human
cugcuuugauuagaagaguaca

SEQ ID NO: 818522 - RNA, 23 nt, Human
acacauuuuucccguucugaggu

SEQ ID NO: 818523 - RNA, 22 nt, Human
ugcuucuggaaacaguggcugu

SEQ ID NO: 818524 - RNA, 22 nt, Human
gcuuccuaaaugcacagggcag

SEQ ID NO: 818525 - RNA, 22 nt, Human
caaaucuauauguugauauucu

SEQ ID NO: 818526 - RNA, 22 nt, Human
aauuuccagaccccauccacag

SEQ ID NO: 818527 - RNA, 23 nt, Human
cugcuguuuucuguaccugaagc

SEQ ID NO: 818528 - RNA, 22 nt, Human
gaggcagcaugguaccuuggag

SEQ ID NO: 818529 - RNA, 21 nt, Human
uacugagaccucacagugugc

SEQ ID NO: 818530 - RNA, 22 nt, Human
uggcagcuuccugcucauagga

SEQ ID NO: 818531 - RNA, 22 nt, Human
ggauggcaggacaaggacccag

SEQ ID NO: 818532 - RNA, 22 nt, Human
aguucucaagacaauuaccugu

SEQ ID NO: 818533 - RNA, 22 nt, Human
ugaaggcccuaucuccauauac

SEQ ID NO: 818534 - RNA, 22 nt, Human
uaggagagcugaacuauugucu

SEQ ID NO: 818535 - RNA, 22 nt, Human
ggaggggaacuaaucccgugac

SEQ ID NO: 818536 - RNA, 22 nt, Human
uuaguuuucccaucuuuauggu

SEQ ID NO: 818537 - RNA, 22 nt, Human
gaagcacauggcuauagcuauu

SEQ ID NO: 818538 - RNA, 22 nt, Human
aaauuuucagagcacuagagaa

SEQ ID NO: 818539 - RNA, 22 nt, Human
uucucagauauuuacugagcau

SEQ ID NO: 818540 - RNA, 22 nt, Human
uugcugugucugauggcugaga

SEQ ID NO: 818541 - RNA, 22 nt, Human
accaggagccauagagucaggc

SEQ ID NO: 818542 - RNA, 22 nt, Human
gagccaaggguugccauggaga

SEQ ID NO: 818543 - RNA, 22 nt, Human
cacaauguauauguauaucaaa

SEQ ID NO: 818544 - RNA, 22 nt, Human
uuuggaauuggaaagugcugug

SEQ ID NO: 818545 - RNA, 22 nt, Human
gauauuuugagaaauccuauga

SEQ ID NO: 818546 - RNA, 22 nt, Human
uucuucuucauuucugacgaug

SEQ ID NO: 818547 - RNA, 22 nt, Human
gucaggaugagggaugaggagu

SEQ ID NO: 818548 - RNA, 22 nt, Human
uuuuuuaguuaggucagaaugu

SEQ ID NO: 818549 - RNA, 22 nt, Human
agagcagcugugacauggacag

SEQ ID NO: 818550 - RNA, 22 nt, Human
aacauauaaacucuuaaguuca

SEQ ID NO: 818551 - RNA, 23 nt, Human
caguggagacucaugcuuccuua

SEQ ID NO: 818552 - RNA, 21 nt, Human
agccagcuaucacacagcauu

SEQ ID NO: 818553 - RNA, 22 nt, Human
uucuucaaacaaaaguggcaug

SEQ ID NO: 818554 - RNA, 22 nt, Human
gugcugugucuaucaggaauaa

SEQ ID NO: 818555 - RNA, 22 nt, Human
gaucuguuauaaucucuuuuau

SEQ ID NO: 818556 - RNA, 22 nt, Human
caggcagcagccacucugguau

SEQ ID NO: 818557 - RNA, 22 nt, Human
aaagcagaacugagagagcugg

SEQ ID NO: 818558 - RNA, 22 nt, Human
ugcuuggccuacuuguccuuug

SEQ ID NO: 818559 - RNA, 22 nt, Human
acucaggaauggggcugggacu

SEQ ID NO: 818560 - RNA, 22 nt, Human
aggccagaugucgggcuagaag

SEQ ID NO: 818561 - RNA, 22 nt, Human
gaggggcagagguagagaacaa

SEQ ID NO: 818562 - RNA, 20 nt, Human
uucaggauucuagaccacac

SEQ ID NO: 818563 - RNA, 22 nt, Human
ccaggcagcaaauuuucugaau

SEQ ID NO: 818564 - RNA, 22 nt, Human
caacagcugaucuuugaugaag

SEQ ID NO: 818565 - RNA, 22 nt, Human
cauucuuauauuuacucauuca

SEQ ID NO: 818566 - RNA, 22 nt, Human
cagcugacccgugggaggcggg

SEQ ID NO: 818567 - RNA, 22 nt, Human
cagcuuccauaagagauggaga

SEQ ID NO: 818568 - RNA, 22 nt, Human
cccaggagccaucugucuuggc

SEQ ID NO: 818569 - RNA, 22 nt, Human
agcaccugccugcauuggcuau

SEQ ID NO: 818570 - RNA, 22 nt, Human
aggcaguggagcuggaauaggc

SEQ ID NO: 818571 - RNA, 20 nt, Human
augugagggguugaaguggg

SEQ ID NO: 818572 - RNA, 22 nt, Human
gucaggaugacaagugcuuuca

SEQ ID NO: 818573 - RNA, 19 nt, Human
gccaggagggcucuggcug

SEQ ID NO: 818574 - RNA, 22 nt, Human
ggagaggagcuauugggggcuc

SEQ ID NO: 818575 - RNA, 22 nt, Human
cccaggaacagcacagaacagc

SEQ ID NO: 818576 - RNA, 20 nt, Human
accaauguuagcuuaguacu

SEQ ID NO: 818577 - RNA, 22 nt, Human
uuugaauagaggccccucagaa

SEQ ID NO: 818578 - RNA, 22 nt, Human
ugaaaugauguacaagaaggca

SEQ ID NO: 818579 - RNA, 22 nt, Human
aggcagcaugggcccagagucc

SEQ ID NO: 818580 - RNA, 22 nt, Human
ggguacuuaauauuuacggggu

SEQ ID NO: 818581 - RNA, 22 nt, Human
auugaaagauuuugggcucaug

SEQ ID NO: 818582 - RNA, 22 nt, Human
cagcgucucguugugggccucg

SEQ ID NO: 818583 - RNA, 22 nt, Human
uccaggaggaggaaggcugcca

SEQ ID NO: 818584 - RNA, 22 nt, Human
gaggcagagugcaccccaggag

SEQ ID NO: 818585 - RNA, 19 nt, Human
agcuuccauauucucuagu

SEQ ID NO: 818586 - RNA, 22 nt, Human
aagauauucaaagauuuauuag

SEQ ID NO: 818587 - RNA, 18 nt, Human
aggcaggugcuggaaguc

SEQ ID NO: 818588 - RNA, 22 nt, Human
uuugcauaaaggagcauuucuc

SEQ ID NO: 818589 - RNA, 22 nt, Human
cucagaagccuucagucuuggc

SEQ ID NO: 818590 - RNA, 22 nt, Human
cucccagagaccaagcugagaa

SEQ ID NO: 818591 - RNA, 22 nt, Human
cagcugacgccagaguggaauu

SEQ ID NO: 818592 - RNA, 22 nt, Human
aaaaaucuaugacugcuucucc

SEQ ID NO: 818593 - RNA, 22 nt, Human
acucuucuugcugcucauuaau

SEQ ID NO: 818594 - RNA, 22 nt, Human
uucaggauuguguuuuuccuga

SEQ ID NO: 818595 - RNA, 22 nt, Human
gcagcugaauguccauugcugc

SEQ ID NO: 818596 - RNA, 22 nt, Human
ucuuuuggguucuuaugauuua

SEQ ID NO: 818597 - RNA, 20 nt, Human
gcccaggaauuugcauuucu

SEQ ID NO: 818598 - RNA, 22 nt, Human
uggcagcucuguucaacaugag

SEQ ID NO: 818599 - RNA, 22 nt, Human
cacugucuuuugugaagacaau

SEQ ID NO: 818600 - RNA, 22 nt, Human
uccaggagaaaacugacggugg

SEQ ID NO: 818601 - RNA, 21 nt, Human
ugaaugaggaggauggcauuu

SEQ ID NO: 818602 - RNA, 22 nt, Human
uucuucuuaauguccugggaac

SEQ ID NO: 818603 - RNA, 22 nt, Human
uuuggaauguaguuuaaucauc

SEQ ID NO: 818604 - RNA, 22 nt, Human
acaauucugaugguuucccagu

SEQ ID NO: 818605 - RNA, 22 nt, Human
ggaagaggcugagccagguccc

SEQ ID NO: 818606 - RNA, 22 nt, Human
gccugcagauauauaggauggu

SEQ ID NO: 818607 - RNA, 22 nt, Human
cacauauuugaugaagcuuugu

SEQ ID NO: 818608 - RNA, 22 nt, Human
aggcugcucaguagauggagcu

SEQ ID NO: 818609 - RNA, 22 nt, Human
ucuucucucauguaggagggaa

SEQ ID NO: 818610 - RNA, 21 nt, Human
uccaggaguucuaauaggugu

SEQ ID NO: 818611 - RNA, 22 nt, Human
gcuuugaagucugugucuuuug

SEQ ID NO: 818612 - RNA, 22 nt, Human
agcugccgaugcccagcugcau

SEQ ID NO: 818613 - RNA, 22 nt, Human
ccuugcguuuuacagcuucuag

SEQ ID NO: 818614 - RNA, 22 nt, Human
gaggcacuggaggaaaggagaa

SEQ ID NO: 818615 - RNA, 22 nt, Human
uguucucacuggaugcuucaca

SEQ ID NO: 818616 - RNA, 22 nt, Human
gccucugcccuccugggacugc

SEQ ID NO: 818617 - RNA, 22 nt, Human
agacgagggccuggcacacagu

SEQ ID NO: 818618 - RNA, 22 nt, Human
aggccagcccugggcugagaga

SEQ ID NO: 818619 - RNA, 22 nt, Human
acgagagguccuuagaaucugu

SEQ ID NO: 818620 - RNA, 22 nt, Human
gcugaaauucagauuccuaggc

SEQ ID NO: 818621 - RNA, 22 nt, Human
aguggaccagaagacugaagcu

SEQ ID NO: 818622 - RNA, 22 nt, Human
aaaauaacuucuacuauuugca

SEQ ID NO: 818623 - RNA, 22 nt, Human
aagcagcuggaagaguaagaug

SEQ ID NO: 818624 - RNA, 22 nt, Human
uccaugagcuagggauucauca

SEQ ID NO: 818625 - RNA, 22 nt, Human
ugcccaggauugugaggucagg

SEQ ID NO: 818626 - RNA, 22 nt, Human
aggcagcugaggucuggcgccc

SEQ ID NO: 818627 - RNA, 22 nt, Human
cuguguuggcuuuucucuugua

SEQ ID NO: 818628 - RNA, 22 nt, Human
cccaggaggcagagcuugcagu

SEQ ID NO: 818629 - RNA, 22 nt, Human
uuuaaauuuagaagaaacacug

SEQ ID NO: 818630 - RNA, 22 nt, Human
uguugaagauaaaguucucauu

SEQ ID NO: 818631 - RNA, 22 nt, Human
gcccaggauaaugcugucccug

SEQ ID NO: 818632 - RNA, 20 nt, Human
uuucaguugguuaauggcau

SEQ ID NO: 818633 - RNA, 22 nt, Human
aaggcaguuaauuuggcuagaa

SEQ ID NO: 818634 - RNA, 22 nt, Human
ggacaagccugugaguggguuu

SEQ ID NO: 818635 - RNA, 22 nt, Human
acccaggacacagagaugaccc

SEQ ID NO: 818636 - RNA, 20 nt, Human
cuucuucaguaguuuguucu

SEQ ID NO: 818637 - RNA, 22 nt, Human
uccacauccauugcuugacuuu

SEQ ID NO: 818638 - RNA, 22 nt, Human
ccuugcugcgugcuagcacaga

SEQ ID NO: 818639 - RNA, 22 nt, Human
cuucccagaccuuagagugcag

SEQ ID NO: 818640 - RNA, 22 nt, Human
aagagggcagcacagguggguc

SEQ ID NO: 818641 - RNA, 22 nt, Human
uugaaaggguuaaagugguaaa

SEQ ID NO: 818642 - RNA, 20 nt, Human
uauuuacaacuuagagccuc

SEQ ID NO: 818643 - RNA, 22 nt, Human
cccaggaaaguggaggcggcug

SEQ ID NO: 818644 - RNA, 22 nt, Human
cccaggaaaugaacuucugauu

SEQ ID NO: 818645 - RNA, 22 nt, Human
agugcuuuagagaaauggugcu

SEQ ID NO: 818646 - RNA, 22 nt, Human
ccccaggacacauggaccaagu

SEQ ID NO: 818647 - RNA, 18 nt, Human
gaugggagcaagagaaga

SEQ ID NO: 818648 - RNA, 21 nt, Human
acaggagaccgccuggcaguc

SEQ ID NO: 818649 - RNA, 22 nt, Human
gucaggaucaaauugaaguuau

SEQ ID NO: 818650 - RNA, 22 nt, Human
aaaauuauggaguaucccaaag

SEQ ID NO: 818651 - RNA, 22 nt, Human
ccagacaggaacacacaucucc

SEQ ID NO: 818652 - RNA, 22 nt, Human
acaagcaugggcuuugacauca

SEQ ID NO: 818653 - RNA, 22 nt, Human
aaaaugagauacaguuugaaag

SEQ ID NO: 818654 - RNA, 22 nt, Human
cuugcacacauguacaugugua

SEQ ID NO: 818655 - RNA, 22 nt, Human
cugcugugugcuuacuuggguu

SEQ ID NO: 818656 - RNA, 21 nt, Human
gcaaauguucaggaaaaaaga

SEQ ID NO: 818657 - RNA, 22 nt, Human
caggagggcccgagacucuucc

SEQ ID NO: 818658 - RNA, 22 nt, Human
gcagcugagcgugaggaagagu

SEQ ID NO: 818659 - RNA, 22 nt, Human
cauuuauucauuugcuagggcu

SEQ ID NO: 818660 - RNA, 22 nt, Human
cuucagaagccugcagccuuug

SEQ ID NO: 818661 - RNA, 20 nt, Human
uccaugaguuagagacuaua

SEQ ID NO: 818662 - RNA, 17 nt, Human
gaggacagggaaguagg

SEQ ID NO: 818663 - RNA, 22 nt, Human
ucugucuccucugaggugccag

SEQ ID NO: 818664 - RNA, 22 nt, Human
ccucaggauacaggagccacag

SEQ ID NO: 818665 - RNA, 22 nt, Human
ccacuguuuuucaguuaacuuu

SEQ ID NO: 818666 - RNA, 22 nt, Human
uucagaauauuuguuuuacaug

SEQ ID NO: 818667 - RNA, 22 nt, Human
aguaccaugcuuccugacuggu

SEQ ID NO: 818668 - RNA, 22 nt, Human
aacuagucagugauucucagaa

SEQ ID NO: 818669 - RNA, 22 nt, Human
uugcugaagugaagguauguuu

SEQ ID NO: 818670 - RNA, 22 nt, Human
acuggcagcagcagcccuuggg

SEQ ID NO: 818671 - RNA, 19 nt, Human
ugaggggaggagaggccug

SEQ ID NO: 818672 - RNA, 22 nt, Human
cugaaaauguuacacaggaaga

SEQ ID NO: 818673 - RNA, 22 nt, Human
agagcagcuggggcagagacca

SEQ ID NO: 818674 - RNA, 22 nt, Human
gcccaggaguuugcauuuuaac

SEQ ID NO: 818675 - RNA, 22 nt, Human
ccagagagauugcuucuaaaga

SEQ ID NO: 818676 - RNA, 22 nt, Human
uuucuucauucaccuucacccc

SEQ ID NO: 818677 - RNA, 19 nt, Human
ugagaggcuuaaggcagcu

SEQ ID NO: 818678 - RNA, 22 nt, Human
aaauuauaggugccaccuugga

SEQ ID NO: 818679 - RNA, 22 nt, Human
gagcagcucugugccuggagac

SEQ ID NO: 818680 - RNA, 22 nt, Human
agcaccuugcucuuggccuucc

SEQ ID NO: 818681 - RNA, 22 nt, Human
ccaggagaauaauggcagauua

SEQ ID NO: 818682 - RNA, 22 nt, Human
guuugcauauuugcacaggaau

SEQ ID NO: 818683 - RNA, 22 nt, Human
aguugcagacgcagagauguug

SEQ ID NO: 818684 - RNA, 22 nt, Human
uuuguaaauagcaguacucaug

SEQ ID NO: 818685 - RNA, 22 nt, Human
auucaaguucuucugucuuugc

SEQ ID NO: 818686 - RNA, 22 nt, Human
uggcagagugcagaagaggcau

SEQ ID NO: 818687 - RNA, 22 nt, Human
cccauugugguuguugaggaua

SEQ ID NO: 818688 - RNA, 22 nt, Human
ugauugaagaggugaggaaguu

SEQ ID NO: 818689 - RNA, 22 nt, Human
ugaggcagugauguuuaagcac

SEQ ID NO: 818690 - RNA, 22 nt, Human
cagggagggaggaaaauuugcu

SEQ ID NO: 818691 - RNA, 22 nt, Human
caggcagcaggagcccugcucg

SEQ ID NO: 818692 - RNA, 18 nt, Human
ugcuuggagcauuuacca

SEQ ID NO: 818693 - RNA, 22 nt, Human
ucacaauuuggauacagcuaug

SEQ ID NO: 818694 - RNA, 17 nt, Human
agcugaaauugcugaag

SEQ ID NO: 818695 - RNA, 22 nt, Human
guucuucagaggggaaagaacc

SEQ ID NO: 818696 - RNA, 22 nt, Human
ugcugaugcuguucuguuagga

SEQ ID NO: 818697 - RNA, 22 nt, Human
uucuucucucauagauuaaggu

SEQ ID NO: 818698 - RNA, 22 nt, Human
ugagauguaagguaugcuuacu

SEQ ID NO: 818699 - RNA, 22 nt, Human
uuugaaguucccccauaucaga

SEQ ID NO: 818700 - RNA, 22 nt, Human
cagcagaggugguucacauugu

SEQ ID NO: 818701 - RNA, 23 nt, Human
ucaggauauugugugccaaggug

SEQ ID NO: 818702 - RNA, 15 nt, Human
uucaggauaugacuc

SEQ ID NO: 818703 - RNA, 22 nt, Human
aagggcagaauagagaagaugg

SEQ ID NO: 818704 - RNA, 22 nt, Human
uuuauuugaaucaggggagaau

SEQ ID NO: 818705 - RNA, 22 nt, Human
cagcugcuguuacugcuuauua

SEQ ID NO: 818706 - RNA, 22 nt, Human
cuuguaauuauaauguacuguu

SEQ ID NO: 818707 - RNA, 22 nt, Human
ucuuccucuagaucugaggccc

SEQ ID NO: 818708 - RNA, 22 nt, Human
accaggagguguuugcucaagu

SEQ ID NO: 818709 - RNA, 22 nt, Human
cugcuaaaccucucugagagcu

SEQ ID NO: 818710 - RNA, 22 nt, Human
uugcuguguaacuccuggccug

SEQ ID NO: 818711 - RNA, 22 nt, Human
uaguuuuacuugcgaugauaau

SEQ ID NO: 818712 - RNA, 20 nt, Human
cucuccucacccgugucagg

SEQ ID NO: 818713 - RNA, 22 nt, Human
uuuccucauuuaucugcuggga

SEQ ID NO: 818714 - RNA, 21 nt, Human
acagacagggccagugucccc

SEQ ID NO: 818715 - RNA, 22 nt, Human
gcagcugcaauaggcaucaagc

SEQ ID NO: 818716 - RNA, 22 nt, Human
ucccaggacccaggcauucaca

SEQ ID NO: 818717 - RNA, 22 nt, Human
agacagugauguaagcaggagu

SEQ ID NO: 818718 - RNA, 22 nt, Human
caaaugauagagccgauuauca

SEQ ID NO: 818719 - RNA, 22 nt, Human
caaauguauucucacuucaggg

SEQ ID NO: 818720 - RNA, 20 nt, Human
uuuacauuuugaaacaguga

SEQ ID NO: 818721 - RNA, 22 nt, Human
gagaggagguggcuaugacagc

SEQ ID NO: 818722 - RNA, 22 nt, Human
uuuuuggguccaggcuguaucu

SEQ ID NO: 818723 - RNA, 22 nt, Human
ggagugggaacaaugacauggu

SEQ ID NO: 818724 - RNA, 22 nt, Human
ucuuagaaauuccccaguggcu

SEQ ID NO: 818725 - RNA, 22 nt, Human
gaauacaugauacaugaacugc

SEQ ID NO: 818726 - RNA, 22 nt, Human
cggcagcuccgcgccguaggac

SEQ ID NO: 818727 - RNA, 22 nt, Human
uugcuuugccaccagaagucua

SEQ ID NO: 818728 - RNA, 22 nt, Human
cuugcugucccuugguaugaac

SEQ ID NO: 818729 - RNA, 21 nt, Human
cagcagaguaaugcauucgua

SEQ ID NO: 818730 - RNA, 22 nt, Human
cacagacccagaagggaugaag

SEQ ID NO: 818731 - RNA, 22 nt, Human
caaggccaguccauuuuggaag

SEQ ID NO: 818732 - RNA, 22 nt, Human
gagccagcuauguagcaagagg

SEQ ID NO: 818733 - RNA, 22 nt, Human
ggauguugauugaauggccauu

SEQ ID NO: 818734 - RNA, 18 nt, Human
ucuuccaacacugacacc

SEQ ID NO: 818735 - RNA, 22 nt, Human
ggccagaaguuggaaaagagcc

SEQ ID NO: 818736 - RNA, 22 nt, Human
aacauuucagcaaauaagaaca

SEQ ID NO: 818737 - RNA, 22 nt, Human
uuugaaguggaaaaggauuuaa

SEQ ID NO: 818738 - RNA, 22 nt, Human
gaggcaguguugaaaaggagag

SEQ ID NO: 818739 - RNA, 22 nt, Human
aggggagguggcagaaaugugc

SEQ ID NO: 818740 - RNA, 22 nt, Human
gcucaggacccaggugugaccu

SEQ ID NO: 818741 - RNA, 22 nt, Human
aggcaggcugcuauggaguaga

SEQ ID NO: 818742 - RNA, 22 nt, Human
ugcauaaagugccauaguauua

SEQ ID NO: 818743 - RNA, 22 nt, Human
auucaaguggcugcuauguuaa

SEQ ID NO: 818744 - RNA, 22 nt, Human
aggcaggcuggucugaagagug

SEQ ID NO: 818745 - RNA, 21 nt, Human
gcugcaucaaucuacccaggg

SEQ ID NO: 818746 - RNA, 22 nt, Human
auucuucacaaauauauagaag

SEQ ID NO: 818747 - RNA, 20 nt, Human
ucagugauuuugaagaggaa

SEQ ID NO: 818748 - RNA, 21 nt, Human
cacucaggguaugugccaggc

SEQ ID NO: 818749 - RNA, 22 nt, Human
ucuuugcagaauuuaacuuugc

SEQ ID NO: 818750 - RNA, 18 nt, Human
aggcaggcuggagugacu

SEQ ID NO: 818751 - RNA, 19 nt, Human
acaaaugauguugcacuga

SEQ ID NO: 818752 - RNA, 22 nt, Human
cugcugugagugguucuugccu

SEQ ID NO: 818753 - RNA, 22 nt, Human
uccugaggcucacuuugaaugu

SEQ ID NO: 818754 - RNA, 22 nt, Human
uccaggagguuuggaggaagca

SEQ ID NO: 818755 - RNA, 22 nt, Human
cugcuguguuucugcuagaaaa

SEQ ID NO: 818756 - RNA, 22 nt, Human
acuggcaguagagggagcgcau

SEQ ID NO: 818757 - RNA, 22 nt, Human
ugcauguguuugccacagugag

SEQ ID NO: 818758 - RNA, 18 nt, Human
cgaggcaggcggaucacg

SEQ ID NO: 818759 - RNA, 19 nt, Human
uucaggauugacccuacug

SEQ ID NO: 818760 - RNA, 22 nt, Human
ucuucuuccucauuuauacaua

SEQ ID NO: 818761 - RNA, 22 nt, Human
aaaggaagaugccaggacucug

SEQ ID NO: 818762 - RNA, 22 nt, Human
aggcacaguggcucacaccugu

SEQ ID NO: 818763 - RNA, 22 nt, Human
auuguucaaagugcuuugcaug

SEQ ID NO: 818764 - RNA, 22 nt, Human
uggcagcuaucuuuaaugagau

SEQ ID NO: 818765 - RNA, 20 nt, Human
aucaggauucuugcuuuguu

SEQ ID NO: 818766 - RNA, 22 nt, Human
gcaguucuacuuauccauagac

SEQ ID NO: 818767 - RNA, 22 nt, Human
cuccccagguucaggagguggg

SEQ ID NO: 818768 - RNA, 22 nt, Human
cucaggauccaucuccugcccu

SEQ ID NO: 818769 - RNA, 20 nt, Human
uuucaagucagcaauucuca

SEQ ID NO: 818770 - RNA, 22 nt, Human
aucuucucauguguaaugaggu

SEQ ID NO: 818771 - RNA, 22 nt, Human
gaggaacccagcugggguugcc

SEQ ID NO: 818772 - RNA, 22 nt, Human
uuuaagauucaguaaggcaaac

SEQ ID NO: 818773 - RNA, 22 nt, Human
ucuucacaugaccuucaugucu

SEQ ID NO: 818774 - RNA, 22 nt, Human
acucaggagggaucagcuauca

SEQ ID NO: 818775 - RNA, 22 nt, Human
aggcugcugccuuggagagugu

SEQ ID NO: 818776 - RNA, 22 nt, Human
gcccaggagccuggagaugugu

SEQ ID NO: 818777 - RNA, 22 nt, Human
uucaguaaaacacugcaauguc

SEQ ID NO: 818778 - RNA, 22 nt, Human
ugacccauggucugaucauagg

SEQ ID NO: 818779 - RNA, 21 nt, Human
ccauaccuaccucaccugguu

SEQ ID NO: 818780 - RNA, 22 nt, Human
uccuucuuugacaaguggcaga

SEQ ID NO: 818781 - RNA, 21 nt, Human
gagugcagcaagguagagucu

SEQ ID NO: 818782 - RNA, 22 nt, Human
guugaaagaugucuugguuccc

SEQ ID NO: 818783 - RNA, 22 nt, Human
gaggcgagaagcuggagauggu

SEQ ID NO: 818784 - RNA, 19 nt, Human
gaggagcuaucggagacag

SEQ ID NO: 818785 - RNA, 22 nt, Human
ugcaugcugcacacaugcguag

SEQ ID NO: 818786 - RNA, 22 nt, Human
ucagagagugcaaaauauagcu

SEQ ID NO: 818787 - RNA, 22 nt, Human
uuauggcauauuccucauugua

SEQ ID NO: 818788 - RNA, 22 nt, Human
ggcucagaccucccagcuccag

SEQ ID NO: 818789 - RNA, 22 nt, Human
uaacaucuuuagcagcucgaac

SEQ ID NO: 818790 - RNA, 22 nt, Human
aauuuuaagcauaugacugguu

SEQ ID NO: 818791 - RNA, 22 nt, Human
cagugguugguagauacuugag

SEQ ID NO: 818792 - RNA, 22 nt, Human
gaggcagcucuucugaaugggg

SEQ ID NO: 818793 - RNA, 22 nt, Human
cuugcaggauuuugcugcugua

SEQ ID NO: 818794 - RNA, 22 nt, Human
ucagauggcacacagagccugc

SEQ ID NO: 818795 - RNA, 22 nt, Human
uucugggacaucuggacaguuu

SEQ ID NO: 818796 - RNA, 22 nt, Human
uuauuauuggugaguuaaggaa

SEQ ID NO: 818797 - RNA, 20 nt, Human
auaaaauaacugccacaaga

SEQ ID NO: 818798 - RNA, 22 nt, Human
caaauaguuuuucauguauuau

SEQ ID NO: 818799 - RNA, 22 nt, Human
gauggcagucaaccaggugagg

SEQ ID NO: 818800 - RNA, 22 nt, Human
agaggaugauuuuaaggacacu

SEQ ID NO: 818801 - RNA, 22 nt, Human
auauucuuccaaaacaucauuu

SEQ ID NO: 818802 - RNA, 22 nt, Human
cuucuucagcacaauauugaug

SEQ ID NO: 818803 - RNA, 22 nt, Human
aggcaggcaaccaccugggaag

SEQ ID NO: 818804 - RNA, 22 nt, Human
agcaccugucacaagcagaagg

SEQ ID NO: 818805 - RNA, 22 nt, Human
ggccagcugggccaccaggugc

SEQ ID NO: 818806 - RNA, 22 nt, Human
uaaguucauaagcuuauucuua

SEQ ID NO: 818807 - RNA, 22 nt, Human
guugaaagaucauguggcugcc

SEQ ID NO: 818808 - RNA, 20 nt, Human
ucuggcaggugaacgagcug

SEQ ID NO: 818809 - RNA, 22 nt, Human
aacaaaugaccugauuucuucc

SEQ ID NO: 818810 - RNA, 22 nt, Human
acagugcuggcuacaacccugg

SEQ ID NO: 818811 - RNA, 22 nt, Human
gugacaguggucacuuguaguu

SEQ ID NO: 818812 - RNA, 19 nt, Human
uccaggaggcugccauuga

SEQ ID NO: 818813 - RNA, 22 nt, Human
aggccagcuuccagaggggcag

SEQ ID NO: 818814 - RNA, 22 nt, Human
uuaaaugaggcugauguagauu

SEQ ID NO: 818815 - RNA, 19 nt, Human
uggagacugagagugagca

SEQ ID NO: 818816 - RNA, 22 nt, Human
uucaugcuuuuaccgcuguuaa

SEQ ID NO: 818817 - RNA, 22 nt, Human
cagaaauguacugacaugcagu

SEQ ID NO: 818818 - RNA, 22 nt, Human
cacaaauggccguguucaaaga

SEQ ID NO: 818819 - RNA, 22 nt, Human
ggcagcuguaagaugagugaau

SEQ ID NO: 818820 - RNA, 22 nt, Human
gacccaggagagaggguugcau

SEQ ID NO: 818821 - RNA, 22 nt, Human
guaggcagggcuguggggagaa

SEQ ID NO: 818822 - RNA, 22 nt, Human
augcagcugugggcaagaaaug

SEQ ID NO: 818823 - RNA, 22 nt, Human
aggagggaccuaggaauauugc

SEQ ID NO: 818824 - RNA, 17 nt, Human
acagagcacaucaagau

SEQ ID NO: 818825 - RNA, 22 nt, Human
uucuucaauuuuccauauacug

SEQ ID NO: 818826 - RNA, 22 nt, Human
ggagguggcagggaacauaauu

SEQ ID NO: 818827 - RNA, 22 nt, Human
acucaggaaauugagauaaugg

SEQ ID NO: 818828 - RNA, 22 nt, Human
agcuaccuggcuuaucacuguc

SEQ ID NO: 818829 - RNA, 20 nt, Human
ugcguguguauuuauuuucu

SEQ ID NO: 818830 - RNA, 22 nt, Human
guuguuuuuguucucuauagcu

SEQ ID NO: 818831 - RNA, 17 nt, Human
ccaggagagaugcuugu

SEQ ID NO: 818832 - RNA, 22 nt, Human
gaggagagagggacugucugca

SEQ ID NO: 818833 - RNA, 22 nt, Human
ggaggagguggguuaaguugua

SEQ ID NO: 818834 - RNA, 22 nt, Human
uggucuuuaagguagcugucau

SEQ ID NO: 818835 - RNA, 22 nt, Human
guaggcagguggaggagugaag

SEQ ID NO: 818836 - RNA, 22 nt, Human
cuuaacauccugcauuuuucuu

SEQ ID NO: 818837 - RNA, 22 nt, Human
aauacaguagguaauaguucau

SEQ ID NO: 818838 - RNA, 22 nt, Human
gaggguggguuucuugcacguc

SEQ ID NO: 818839 - RNA, 22 nt, Human
caucaucaaaagugacagagaa

SEQ ID NO: 818840 - RNA, 22 nt, Human
cuugaaagucagcagaguggau

SEQ ID NO: 818841 - RNA, 22 nt, Human
gugcauuuaggucacaugaugu

SEQ ID NO: 818842 - RNA, 22 nt, Human
ggcagaggaaggaugaauucac

SEQ ID NO: 818843 - RNA, 22 nt, Human
uguuugaauuuugcuaacgugu

SEQ ID NO: 818844 - RNA, 22 nt, Human
gauggcagcagcagccagggau

SEQ ID NO: 818845 - RNA, 22 nt, Human
cagcuguggcugccacugcucc

SEQ ID NO: 818846 - RNA, 22 nt, Human
ucugggaauuuauuggcacuuu

SEQ ID NO: 818847 - RNA, 22 nt, Human
aaauuguugaucuacaguaagg

SEQ ID NO: 818848 - RNA, 19 nt, Human
ucccaggaaccuuuuauuu

SEQ ID NO: 818849 - RNA, 22 nt, Human
uaggagggcccugaaaauggca

SEQ ID NO: 818850 - RNA, 22 nt, Human
augcugagcagagcugacaugc

SEQ ID NO: 818851 - RNA, 20 nt, Human
uuugucuguuaaguguuucu

SEQ ID NO: 818852 - RNA, 22 nt, Human
caugugguucaaguacuccaca

SEQ ID NO: 818853 - RNA, 23 nt, Human
agcacacuuguacaaugcccuag

SEQ ID NO: 818854 - RNA, 22 nt, Human
ucaaauaccagcaauuucaugu

SEQ ID NO: 818855 - RNA, 22 nt, Human
uagugcuuuaaguuuacagaga

SEQ ID NO: 818856 - RNA, 22 nt, Human
cagugucuccagaugcuccaau

SEQ ID NO: 818857 - RNA, 23 nt, Human
acagacaacacugaugagagaaa

SEQ ID NO: 818858 - RNA, 22 nt, Human
auucugagaaaugcauugucag

SEQ ID NO: 818859 - RNA, 22 nt, Human
aggcaguuguugcugagcagcu

SEQ ID NO: 818860 - RNA, 22 nt, Human
uuucuaggucuuccauacugcc

SEQ ID NO: 818861 - RNA, 22 nt, Human
uuggaugaagucuagcuuuagu

SEQ ID NO: 818862 - RNA, 22 nt, Human
guucuucagcauuagaagucau

SEQ ID NO: 818863 - RNA, 22 nt, Human
auguucuuccaaaucuguaaca

SEQ ID NO: 818864 - RNA, 22 nt, Human
uggcagcugagugcacccccuc

SEQ ID NO: 818865 - RNA, 22 nt, Human
ggaccuggcaauuugcaucucu

SEQ ID NO: 818866 - RNA, 19 nt, Human
uccaggagcaaagccaguu

SEQ ID NO: 818867 - RNA, 17 nt, Human
gaggagcuccaguaggu

SEQ ID NO: 818868 - RNA, 22 nt, Human
gaaggccacaagagaaguuaag

SEQ ID NO: 818869 - RNA, 22 nt, Human
ccaggacagugaacauguaaga

SEQ ID NO: 818870 - RNA, 22 nt, Human
agagguagagguugcagugagc

SEQ ID NO: 818871 - RNA, 19 nt, Human
cccaggagucuggcugguu

SEQ ID NO: 818872 - RNA, 22 nt, Human
uggcagcugugcuucauucuuu

SEQ ID NO: 818873 - RNA, 22 nt, Human
ggagcagggcagugaauucugg

SEQ ID NO: 818874 - RNA, 20 nt, Human
ggcagcuugggcagcaguua

SEQ ID NO: 818875 - RNA, 23 nt, Human
ggagugcaauggcgccaucucgg

SEQ ID NO: 818876 - RNA, 22 nt, Human
uacuaaauaguuuaauuccuca

SEQ ID NO: 818877 - RNA, 22 nt, Human
cagcuggcugcaugaugccaaa

SEQ ID NO: 818878 - RNA, 22 nt, Human
uuuccuaguucuaagaaaugua

SEQ ID NO: 818879 - RNA, 22 nt, Human
cuugcugggguaagucugugcu

SEQ ID NO: 818880 - RNA, 22 nt, Human
gaggagaggcuggacgcgguga

SEQ ID NO: 818881 - RNA, 22 nt, Human
cccaggugcugcgugaagccuc

SEQ ID NO: 818882 - RNA, 22 nt, Human
cagucccuaguggagcucacag

SEQ ID NO: 818883 - RNA, 22 nt, Human
gaaucucaaggcuugugaggau

SEQ ID NO: 818884 - RNA, 22 nt, Human
uacacacaugcauuugccuuau

SEQ ID NO: 818885 - RNA, 22 nt, Human
uuucuucagccuucacaaccug

SEQ ID NO: 818886 - RNA, 22 nt, Human
gcccaggaaguugaggcugccg

SEQ ID NO: 818887 - RNA, 22 nt, Human
ugcauuuccagauuucuggagu

SEQ ID NO: 818888 - RNA, 22 nt, Human
gaggcagcggcucacagagaaa

SEQ ID NO: 818889 - RNA, 22 nt, Human
uuggcaguaaaagaaaaugcuu

SEQ ID NO: 818890 - RNA, 22 nt, Human
uuggcagugucugcaaaaugga

SEQ ID NO: 818891 - RNA, 22 nt, Human
gcucccaggcauggagguaauu

SEQ ID NO: 818892 - RNA, 22 nt, Human
agagggagugaaauggaauaga

SEQ ID NO: 818893 - RNA, 22 nt, Human
caggagauguaagacuucuguu

SEQ ID NO: 818894 - RNA, 22 nt, Human
ucagugugaguaccaugcucag

SEQ ID NO: 818895 - RNA, 20 nt, Human
agaggccaguuaggagucua

SEQ ID NO: 818896 - RNA, 22 nt, Human
gaaggaggugucaguuggacug

SEQ ID NO: 818897 - RNA, 22 nt, Human
uccaggagauucauuaggucau

SEQ ID NO: 818898 - RNA, 22 nt, Human
uugcagcugcaguaaauguuca

SEQ ID NO: 818899 - RNA, 22 nt, Human
ccaggagauaagcugaguuuau

SEQ ID NO: 818900 - RNA, 22 nt, Human
uagggcaggggaggaaucugaa

SEQ ID NO: 818901 - RNA, 22 nt, Human
uuuuguuguaauauaccuaucc

SEQ ID NO: 818902 - RNA, 22 nt, Human
cauuuguauagugcuuagacca

SEQ ID NO: 818903 - RNA, 22 nt, Human
auuggcaguuagugacgaggcu

SEQ ID NO: 818904 - RNA, 22 nt, Human
uaaggccauuauggugggcccg

SEQ ID NO: 818905 - RNA, 23 nt, Human
accaggagccaagaucucccugg

SEQ ID NO: 818906 - RNA, 23 nt, Human
cuccccaguguccucaugcaucu

SEQ ID NO: 818907 - RNA, 22 nt, Human
caggcagcucaaccuugggagc

SEQ ID NO: 818908 - RNA, 22 nt, Human
cccaggagaccuagaucuguuu

SEQ ID NO: 818909 - RNA, 22 nt, Human
uguauuuuuagaccuuuagacc

SEQ ID NO: 818910 - RNA, 20 nt, Human
cugcuguguuauuguagaac

SEQ ID NO: 818911 - RNA, 23 nt, Human
uuuggacuugugacucuucuccu

SEQ ID NO: 818912 - RNA, 22 nt, Human
guucuucagucacaucacagaa

SEQ ID NO: 818913 - RNA, 19 nt, Human
ccauggagagagaugcauu

SEQ ID NO: 818914 - RNA, 22 nt, Human
aagugaagaaauacaugagaau

SEQ ID NO: 818915 - RNA, 22 nt, Human
agcuagaauguuccuuuucauu

SEQ ID NO: 818916 - RNA, 22 nt, Human
aucauucugauggucaaugcua

SEQ ID NO: 818917 - RNA, 22 nt, Human
uucaauucugcucugaucuuag

SEQ ID NO: 818918 - RNA, 22 nt, Human
ucuucucuacaccagcagcccc

SEQ ID NO: 818919 - RNA, 20 nt, Human
ugugaaagcaguagaaugac

SEQ ID NO: 818920 - RNA, 22 nt, Human
cuguggaaauaaacaaugcuaa

SEQ ID NO: 818921 - RNA, 18 nt, Human
agucuucugauccauuuu

SEQ ID NO: 818922 - RNA, 23 nt, Human
cugcuguguuggucucgauggga

SEQ ID NO: 818923 - RNA, 22 nt, Human
ggauggagguucucagaugcuc

SEQ ID NO: 818924 - RNA, 22 nt, Human
aggcagcaugggccccagcucc

SEQ ID NO: 818925 - RNA, 22 nt, Human
aaaggcaggcuuucacaucuca

SEQ ID NO: 818926 - RNA, 22 nt, Human
cacucuccagcacaccccauuu

SEQ ID NO: 818927 - RNA, 22 nt, Human
uucuucagucccacuagccaca

SEQ ID NO: 818928 - RNA, 22 nt, Human
gucaggauuaaugggaguaugc

SEQ ID NO: 818929 - RNA, 22 nt, Human
uucagaaguagcuaagcaguca

SEQ ID NO: 818930 - RNA, 22 nt, Human
aggcacagagaaugcccuccau

SEQ ID NO: 818931 - RNA, 22 nt, Human
guuuuauaauugcuucauaaga

SEQ ID NO: 818932 - RNA, 22 nt, Human
agcugcccugggcuggagaugg

SEQ ID NO: 818933 - RNA, 19 nt, Human
ugcccaggccagguugggc

SEQ ID NO: 818934 - RNA, 22 nt, Human
cacaaugugguuugucaucuuu

SEQ ID NO: 818935 - RNA, 22 nt, Human
gcagaggacagggauuuagauu

SEQ ID NO: 818936 - RNA, 22 nt, Human
aaggagagagcuuugcuggaac

SEQ ID NO: 818937 - RNA, 20 nt, Human
ucacuaguaaccaucugcuu

SEQ ID NO: 818938 - RNA, 22 nt, Human
ugcucuucggggccacugcuug

SEQ ID NO: 818939 - RNA, 22 nt, Human
agcugcccugguaagauugaug

SEQ ID NO: 818940 - RNA, 22 nt, Human
cccaggaaccuaccagcucgag

SEQ ID NO: 818941 - RNA, 22 nt, Human
ucaguagcagaaagcaaugagu

SEQ ID NO: 818942 - RNA, 22 nt, Human
gaaaggccagcucacagaugag

SEQ ID NO: 818943 - RNA, 22 nt, Human
aggcaagcauuuaaccacucau

SEQ ID NO: 818944 - RNA, 22 nt, Human
ggaguaggaguagaacucauca

SEQ ID NO: 818945 - RNA, 22 nt, Human
gcuuuggagccuguguucugcc

SEQ ID NO: 818946 - RNA, 22 nt, Human
ugcuuccuauccacacaaugcc

SEQ ID NO: 818947 - RNA, 22 nt, Human
uaaaauagcaugugcagugaaa

SEQ ID NO: 818948 - RNA, 22 nt, Human
guugaaagagcauggacuugaa

SEQ ID NO: 818949 - RNA, 22 nt, Human
auuugcuuaucuccacaguugu

SEQ ID NO: 818950 - RNA, 22 nt, Human
cuugaaagucacaugcagcccu

SEQ ID NO: 818951 - RNA, 22 nt, Human
gaggaggcacuugagcagaugu

SEQ ID NO: 818952 - RNA, 22 nt, Human
uagugcuuggcccuaccagaua

SEQ ID NO: 818953 - RNA, 22 nt, Human
ugaaagguuauuuaggucugcu

SEQ ID NO: 818954 - RNA, 22 nt, Human
ggaagaggcugaggccaugcug

SEQ ID NO: 818955 - RNA, 23 nt, Human
cuuuuaacuugaucugagaccag

SEQ ID NO: 818956 - RNA, 22 nt, Human
uucuuauagaagcaaccauugu

SEQ ID NO: 818957 - RNA, 22 nt, Human
cauuuauuggcauguaguaggu

SEQ ID NO: 818958 - RNA, 22 nt, Human
uccaggagguagugcuuaauuu

SEQ ID NO: 818959 - RNA, 22 nt, Human
gucuccugagacugcagucacc

SEQ ID NO: 818960 - RNA, 19 nt, Human
ggucagcugggcuagaggc

SEQ ID NO: 818961 - RNA, 22 nt, Human
ccagaagaccccguccaccucc

SEQ ID NO: 818962 - RNA, 22 nt, Human
gaggcagagaccuucaggaccu

SEQ ID NO: 818963 - RNA, 22 nt, Human
acagauguacacucauauauaa

SEQ ID NO: 818964 - RNA, 22 nt, Human
aaauauaauuucugccucaaua

SEQ ID NO: 818965 - RNA, 22 nt, Human
gucauauacacugcauguaauc

SEQ ID NO: 818966 - RNA, 19 nt, Human
ggcagcuugggaagguagc

SEQ ID NO: 818967 - RNA, 22 nt, Human
ggacuucuaagugccagacacu

SEQ ID NO: 818968 - RNA, 22 nt, Human
ucugaacuccagcccugcucuc

SEQ ID NO: 818969 - RNA, 22 nt, Human
ggacagaggguugacagaguau

SEQ ID NO: 818970 - RNA, 21 nt, Human
agagagggagaugaaacaucc

SEQ ID NO: 818971 - RNA, 22 nt, Human
uugaaaguccuucuugaguuac

SEQ ID NO: 818972 - RNA, 22 nt, Human
ucugcugucacucauuugcuuc

SEQ ID NO: 818973 - RNA, 22 nt, Human
uacaaaguagaaauucaguaaa

SEQ ID NO: 818974 - RNA, 22 nt, Human
uuucuucacaggguauugggug

SEQ ID NO: 818975 - RNA, 22 nt, Human
uccaggagucagacagauggug

SEQ ID NO: 818976 - RNA, 22 nt, Human
ugcugaaagucccaaaucucau

SEQ ID NO: 818977 - RNA, 22 nt, Human
cugccaggcagggagauggcug

SEQ ID NO: 818978 - RNA, 22 nt, Human
uucuucaaugugcccuguuuuc

SEQ ID NO: 818979 - RNA, 22 nt, Human
aauauaaugcuguuuuaugcca

SEQ ID NO: 818980 - RNA, 22 nt, Human
ucaggagaaaauaucaggaagu

SEQ ID NO: 818981 - RNA, 22 nt, Human
uuugaaauaugaggcauuauga

SEQ ID NO: 818982 - RNA, 22 nt, Human
gucaggauuauaauccccaugg

SEQ ID NO: 818983 - RNA, 22 nt, Human
uuuguuuagaaagagauuggug

SEQ ID NO: 818984 - RNA, 21 nt, Human
gagacagcccagugccagggc

SEQ ID NO: 818985 - RNA, 22 nt, Human
gaggccaggggccuggagauga

SEQ ID NO: 818986 - RNA, 22 nt, Human
ggccaggaagggaagaucagca

SEQ ID NO: 818987 - RNA, 21 nt, Human
uccuuccuugagguccuuucc

SEQ ID NO: 818988 - RNA, 22 nt, Human
caggcagcucuaauggaaagug

SEQ ID NO: 818989 - RNA, 22 nt, Human
ggaggggaggauuaaugacaaa

SEQ ID NO: 818990 - RNA, 22 nt, Human
uacccaggaggaaacugaggcu

SEQ ID NO: 818991 - RNA, 22 nt, Human
ucauuuuucacacagggucacc

SEQ ID NO: 818992 - RNA, 22 nt, Human
ucauuucuccgaccugcugucc

SEQ ID NO: 818993 - RNA, 22 nt, Human
cacaauuuguuuuaucaguauu

SEQ ID NO: 818994 - RNA, 22 nt, Human
uuucccaguucccugcucuaua

SEQ ID NO: 818995 - RNA, 22 nt, Human
gggcagcugccacuccgcuugc

SEQ ID NO: 818996 - RNA, 22 nt, Human
ccugccugcaccuucucugggg

SEQ ID NO: 818997 - RNA, 22 nt, Human
acucagaaugacugaugcugug

SEQ ID NO: 818998 - RNA, 19 nt, Human
aucugccuguuaucacaua

SEQ ID NO: 818999 - RNA, 22 nt, Human
ucauuauccuaguaucuugaau

SEQ ID NO: 819000 - RNA, 22 nt, Human
ucuuagaaguucauguuccagc

SEQ ID NO: 819001 - RNA, 22 nt, Human
uauugaugcuuggauugggcca

SEQ ID NO: 819002 - RNA, 22 nt, Human
uucuccagagggcucugcagga

SEQ ID NO: 819003 - RNA, 22 nt, Human
auucuuaauugccaugcuguau

SEQ ID NO: 819004 - RNA, 22 nt, Human
cugcuuugacuguuaagaacca

SEQ ID NO: 819005 - RNA, 22 nt, Human
aguuuucacacucaccaaaagg

SEQ ID NO: 819006 - RNA, 18 nt, Human
gaggcagcuagcaauuuu

SEQ ID NO: 819007 - RNA, 22 nt, Human
uggcaguccccugugccuggaa

SEQ ID NO: 819008 - RNA, 22 nt, Human
agacagcuaauaaaugagugug

SEQ ID NO: 819009 - RNA, 22 nt, Human
uggcuucuugggaugggucauu

SEQ ID NO: 819010 - RNA, 22 nt, Human
gcccaggagguggaggugcagu

SEQ ID NO: 819011 - RNA, 22 nt, Human
aaagcagagguugcagugagcu

SEQ ID NO: 819012 - RNA, 22 nt, Human
agagagggcauagaaaaaggga

SEQ ID NO: 819013 - RNA, 22 nt, Human
gguggaaggccuggaaggaggc

SEQ ID NO: 819014 - RNA, 22 nt, Human
gacccaggguauccagagcugc

SEQ ID NO: 819015 - RNA, 22 nt, Human
aagauuauuuaagacaggaacc

SEQ ID NO: 819016 - RNA, 22 nt, Human
cagagcucuauguucauggagg

SEQ ID NO: 819017 - RNA, 22 nt, Human
uguagaaagaauauguuucaua

SEQ ID NO: 819018 - RNA, 22 nt, Human
gacagagaggcugagcaguaca

SEQ ID NO: 819019 - RNA, 22 nt, Human
acagucuacuugagcuuguaua

SEQ ID NO: 819020 - RNA, 19 nt, Human
caggagagcaugcacuuug

SEQ ID NO: 819021 - RNA, 22 nt, Human
ccucaugguacuuacuguagcu

SEQ ID NO: 819022 - RNA, 22 nt, Human
agcugcccuuaauaggcauuca

SEQ ID NO: 819023 - RNA, 22 nt, Human
aaauauagugacacuuauaguc

SEQ ID NO: 819024 - RNA, 22 nt, Human
auugaaagauaggcuacugugg

SEQ ID NO: 819025 - RNA, 22 nt, Human
cucuuaguaaugccaugaagca

SEQ ID NO: 819026 - RNA, 22 nt, Human
gggagagguuacccgagcaacu

SEQ ID NO: 819027 - RNA, 22 nt, Human
gggagcugaauggcaauggaga

SEQ ID NO: 819028 - RNA, 22 nt, Human
ugcaggaaauuccaggguggcc

SEQ ID NO: 819029 - RNA, 22 nt, Human
uucaggauccccaccgcguuua

SEQ ID NO: 819030 - RNA, 22 nt, Human
ugaggcaguauucuccauucca

SEQ ID NO: 819031 - RNA, 22 nt, Human
uauuugcaacauaaaacucuga

SEQ ID NO: 819032 - RNA, 22 nt, Human
uacucagagucauugcccuucu

SEQ ID NO: 819033 - RNA, 22 nt, Human
gggcagcugccaagugcaucgc

SEQ ID NO: 819034 - RNA, 22 nt, Human
aggcaccuugagagcaggagcu

SEQ ID NO: 819035 - RNA, 22 nt, Human
ugccaggauggccagggggcca

SEQ ID NO: 819036 - RNA, 22 nt, Human
agggaagcccuggcugagaccc

SEQ ID NO: 819037 - RNA, 22 nt, Human
ugaaagcagcaccaauaccauu

SEQ ID NO: 819038 - RNA, 22 nt, Human
uggguguguccauauuuugacu

SEQ ID NO: 819039 - RNA, 17 nt, Human
uuagagcuacauguuga

SEQ ID NO: 819040 - RNA, 20 nt, Human
cuugaguucagagcugucau

SEQ ID NO: 819041 - RNA, 19 nt, Human
ucuggcugccaaggauuga

SEQ ID NO: 819042 - RNA, 22 nt, Human
cuaguauuaagugugaguaaaa

SEQ ID NO: 819043 - RNA, 22 nt, Human
uuuguagauuuucucuccagua

SEQ ID NO: 819044 - RNA, 22 nt, Human
guggaaauuuuaggaucaucuu

SEQ ID NO: 819045 - RNA, 22 nt, Human
uaucuguagucucaugguuccu

SEQ ID NO: 819046 - RNA, 22 nt, Human
ucuuauugguaaugauggcauu

SEQ ID NO: 819047 - RNA, 22 nt, Human
auuuugacauugcggcauugcu

SEQ ID NO: 819048 - RNA, 22 nt, Human
augguuuuguccucuuugguuc

SEQ ID NO: 819049 - RNA, 22 nt, Human
guguggcuaggauggcuuugcu

SEQ ID NO: 819050 - RNA, 22 nt, Human
uuucauuauaaaaaguuggcuu

SEQ ID NO: 819051 - RNA, 22 nt, Human
cauuguuggcagagggacagag

SEQ ID NO: 819052 - RNA, 23 nt, Human
cuguggaucuagagggggcccua

SEQ ID NO: 819053 - RNA, 22 nt, Human
guucuuaaagauucaucaagca

SEQ ID NO: 819054 - RNA, 22 nt, Human
uucuguaauucuguuaguuuca

SEQ ID NO: 819055 - RNA, 22 nt, Human
uaauuuugucacagugacaugc

SEQ ID NO: 819056 - RNA, 22 nt, Human
uuuauucucuaguuggucagau

SEQ ID NO: 819057 - RNA, 22 nt, Human
cuuugcuaauguugcauuuuca

SEQ ID NO: 819058 - RNA, 22 nt, Human
gggcucuguuuagaccagagau

SEQ ID NO: 819059 - RNA, 22 nt, Human
uugcuggaguagaaaacuuaac

SEQ ID NO: 819060 - RNA, 23 nt, Human
uuguucuuggaucuuccugaagc

SEQ ID NO: 819061 - RNA, 22 nt, Human
ucauuguuucugcuuuucauga

SEQ ID NO: 819062 - RNA, 22 nt, Human
uuucacauacaguguauaguag

SEQ ID NO: 819063 - RNA, 22 nt, Human
caguuaaacagauugaguguua

SEQ ID NO: 819064 - RNA, 22 nt, Human
cugagggagcugcuggccuugg

SEQ ID NO: 819065 - RNA, 18 nt, Human
uggguggcuagggaguuu

SEQ ID NO: 819066 - RNA, 22 nt, Human
auggaguguggccaggcaguaa

SEQ ID NO: 819067 - RNA, 23 nt, Human
uggcucugagcuuccugguggcc

SEQ ID NO: 819068 - RNA, 22 nt, Human
uuagaaaucaccucugaagauc

SEQ ID NO: 819069 - RNA, 22 nt, Human
augaacugcaguauaaacuugg

SEQ ID NO: 819070 - RNA, 22 nt, Human
caaagaugccaaaaggaagaca

SEQ ID NO: 819071 - RNA, 22 nt, Human
gcuugcugaacaggaaccuggc

SEQ ID NO: 819072 - RNA, 22 nt, Human
aauacagauggcaugugaagau

SEQ ID NO: 819073 - RNA, 22 nt, Human
ucuuuugagggccagaggaaga

SEQ ID NO: 819074 - RNA, 22 nt, Human
guugcaaaugggaagaugguua

SEQ ID NO: 819075 - RNA, 22 nt, Human
cuggccucacagaggcuaagcc

SEQ ID NO: 819076 - RNA, 22 nt, Human
guacacucccccugugaaguug

SEQ ID NO: 819077 - RNA, 22 nt, Human
aaauugcaaaaguacuuuuagg

SEQ ID NO: 819078 - RNA, 22 nt, Human
uuuucaguugugcucucuaguu

SEQ ID NO: 819079 - RNA, 23 nt, Human
uggcuugcuaauguuccaaauaa

SEQ ID NO: 819080 - RNA, 22 nt, Human
ucuaauuuuggcauuuuaaccu

SEQ ID NO: 819081 - RNA, 22 nt, Human
cuaaauguuuuaucuuccuggc

SEQ ID NO: 819082 - RNA, 22 nt, Human
uuuuuaagagucuggaaauagu

SEQ ID NO: 819083 - RNA, 22 nt, Human
aucuggcucccuuggaauccgu

SEQ ID NO: 819084 - RNA, 21 nt, Human
agauuguauggaggugagagg

SEQ ID NO: 819085 - RNA, 22 nt, Human
uguauuucugcuuucucuagua

SEQ ID NO: 819086 - RNA, 22 nt, Human
uguaauguuagaaacaauugcu

SEQ ID NO: 819087 - RNA, 22 nt, Human
ugucuuacagcaaucuguucug

SEQ ID NO: 819088 - RNA, 22 nt, Human
gagcuuuucccgucuuucucgu

SEQ ID NO: 819089 - RNA, 22 nt, Human
cuugcuuuaucugguuucucau

SEQ ID NO: 819090 - RNA, 22 nt, Human
uugaugcugucuuucagaauca

SEQ ID NO: 819091 - RNA, 22 nt, Human
cauugcugugggcauuugcugc

SEQ ID NO: 819092 - RNA, 18 nt, Human
auuugcaggcaugcaggc

SEQ ID NO: 819093 - RNA, 22 nt, Human
cagggagcuggugccagccgac

SEQ ID NO: 819094 - RNA, 19 nt, Human
ggaggcuucuuggggucgg

SEQ ID NO: 819095 - RNA, 22 nt, Human
aauugcuuuacaagccguuuaa

SEQ ID NO: 819096 - RNA, 22 nt, Human
cggcuucucgggucggauuccg

SEQ ID NO: 819097 - RNA, 22 nt, Human
cugguuuuuagugcuuaggagu

SEQ ID NO: 819098 - RNA, 22 nt, Human
uggcuccuuccgcagcaugccu

SEQ ID NO: 819099 - RNA, 22 nt, Human
cuuugugauaguguuaagacca

SEQ ID NO: 819100 - RNA, 18 nt, Human
accugauuggcgcagccc

SEQ ID NO: 819101 - RNA, 22 nt, Human
aggcucugucaggcggagcagc

SEQ ID NO: 819102 - RNA, 22 nt, Human
uuucuucucacccaggacagag

SEQ ID NO: 819103 - RNA, 22 nt, Human
uggugaagucagcggagcccgg

SEQ ID NO: 819104 - RNA, 22 nt, Human
uugaggcacagauuuuaguggc

SEQ ID NO: 819105 - RNA, 22 nt, Human
ggcucuggcgagcuuuaguaca

SEQ ID NO: 819106 - RNA, 22 nt, Human
uaucuguauucugacagucacu

SEQ ID NO: 819107 - RNA, 22 nt, Human
gugggugucaguaucuuuaacg

SEQ ID NO: 819108 - RNA, 22 nt, Human
gcuguauuuauaugaaggcaug

SEQ ID NO: 819109 - RNA, 22 nt, Human
uaccuugugagcuuucuaacau

SEQ ID NO: 819110 - RNA, 22 nt, Human
augcuacauuuugguuuauaaa

SEQ ID NO: 819111 - RNA, 22 nt, Human
uuugcuugauuaggauauggaa

SEQ ID NO: 819112 - RNA, 22 nt, Human
ugccucugcugcauauucaccu

SEQ ID NO: 819113 - RNA, 22 nt, Human
uuucuacacuucgugguguuuu

SEQ ID NO: 819114 - RNA, 22 nt, Human
agcuuucuauauaugaguugcu

SEQ ID NO: 819115 - RNA, 22 nt, Human
uggcucugccccauaccccugc

SEQ ID NO: 819116 - RNA, 22 nt, Human
auggcuucugucuuggaaauuu

SEQ ID NO: 819117 - RNA, 22 nt, Human
guuggcuaugagagcuuuagug

SEQ ID NO: 819118 - RNA, 22 nt, Human
cagcuuuugcagacuucuugcc

SEQ ID NO: 819119 - RNA, 21 nt, Human
ggagucagggucuggcugggg

SEQ ID NO: 819120 - RNA, 22 nt, Human
aggcuuuugcucuggcuccucu

SEQ ID NO: 819121 - RNA, 22 nt, Human
uggcucaucuuuuuagacuuau

SEQ ID NO: 819122 - RNA, 22 nt, Human
cuuuaguucuagaaagugaaac

SEQ ID NO: 819123 - RNA, 22 nt, Human
uacucugcaggauggacuaugg

SEQ ID NO: 819124 - RNA, 22 nt, Human
gaguuugugggaauggaguauu

SEQ ID NO: 819125 - RNA, 22 nt, Human
uauagugucucuagaucaaaga

SEQ ID NO: 819126 - RNA, 22 nt, Human
caauaaaguggaggcccgggcu

SEQ ID NO: 819127 - RNA, 22 nt, Human
uuuuccuuaacagagggagaaa

SEQ ID NO: 819128 - RNA, 22 nt, Human
guugaaauccuaacccccuagu

SEQ ID NO: 819129 - RNA, 22 nt, Human
aguaauggguugaaauuuaguu

SEQ ID NO: 819130 - RNA, 22 nt, Human
uuggaaaugcauuuguuauuau

SEQ ID NO: 819131 - RNA, 22 nt, Human
ggucuggagcuaaucuuguugg

SEQ ID NO: 819132 - RNA, 22 nt, Human
ugcugcuuguuuuguaaauaaa

SEQ ID NO: 819133 - RNA, 22 nt, Human
uuuguaguuguggaugcugaag

SEQ ID NO: 819134 - RNA, 22 nt, Human
aggggcuuguggaguugcuggu

SEQ ID NO: 819135 - RNA, 22 nt, Human
gauugcugggucccacucccag

SEQ ID NO: 819136 - RNA, 22 nt, Human
gaaguucugguguaugugauaa

SEQ ID NO: 819137 - RNA, 22 nt, Human
ugugaagaucaggguccuagag

SEQ ID NO: 819138 - RNA, 22 nt, Human
gaggagcuucagaggaaucuua

SEQ ID NO: 819139 - RNA, 22 nt, Human
cuuuacuucagcaagcuuuccu

SEQ ID NO: 819140 - RNA, 19 nt, Human
agggaguuuauauuugcac

SEQ ID NO: 819141 - RNA, 22 nt, Human
uuuccuacugcccuauacacac

SEQ ID NO: 819142 - RNA, 22 nt, Human
uggcaugcaagaggaggcuccc

SEQ ID NO: 819143 - RNA, 22 nt, Human
uguagggaggaaggguuggaaa

SEQ ID NO: 819144 - RNA, 22 nt, Human
uucuaguuacagaagccuugcu

SEQ ID NO: 819145 - RNA, 22 nt, Human
cacaucauguuaauucauuaca

SEQ ID NO: 819146 - RNA, 22 nt, Human
uuugaaauguaucaguauaggu

SEQ ID NO: 819147 - RNA, 22 nt, Human
aaguuugucucauuugaucuuc

SEQ ID NO: 819148 - RNA, 22 nt, Human
auuguugacuugauuacucaac

SEQ ID NO: 819149 - RNA, 22 nt, Human
uacuuugagaugaugcugaucg

SEQ ID NO: 819150 - RNA, 22 nt, Human
gcugggugauucauuuccauaa

SEQ ID NO: 819151 - RNA, 22 nt, Human
ugucauauagaauguucuauga

SEQ ID NO: 819152 - RNA, 22 nt, Human
gacucugguugcggguucugcu

SEQ ID NO: 819153 - RNA, 22 nt, Human
cagggagccccaauuccaugcc

SEQ ID NO: 819154 - RNA, 22 nt, Human
ugggugaagaggcuaugcuacu

SEQ ID NO: 819155 - RNA, 22 nt, Human
augaauuguccgauguugugca

SEQ ID NO: 819156 - RNA, 22 nt, Human
uguucuuagguauuugacaguc

SEQ ID NO: 819157 - RNA, 22 nt, Human
agguagcuggugcugggcuccu

SEQ ID NO: 819158 - RNA, 22 nt, Human
gcagcuuuggagguggaacucu

SEQ ID NO: 819159 - RNA, 22 nt, Human
gaaaugucaagauauguuugga

SEQ ID NO: 819160 - RNA, 22 nt, Human
ugaggagcaggguggcuuacuc

SEQ ID NO: 819161 - RNA, 22 nt, Human
uauggcuucugggccaaauuua

SEQ ID NO: 819162 - RNA, 22 nt, Human
agggagcugcucugcuuccgug

SEQ ID NO: 819163 - RNA, 22 nt, Human
uauucauguguuggaaaggaac

SEQ ID NO: 819164 - RNA, 22 nt, Human
gcuuuggaaauauagacucaag

SEQ ID NO: 819165 - RNA, 22 nt, Human
aucugguuuggggauccuugug

SEQ ID NO: 819166 - RNA, 22 nt, Human
gugauuucagguuuuucauacu

SEQ ID NO: 819167 - RNA, 19 nt, Human
gaauggguucuguagggag

SEQ ID NO: 819168 - RNA, 22 nt, Human
acuuuagauauuccucuguaca

SEQ ID NO: 819169 - RNA, 22 nt, Human
agcuaauguauguugaaagcac

SEQ ID NO: 819170 - RNA, 22 nt, Human
guuauucuauuaaugugauugu

SEQ ID NO: 819171 - RNA, 22 nt, Human
uuauugagcacauaguaugugg

SEQ ID NO: 819172 - RNA, 22 nt, Human
auauaugaagaagucuugauua

SEQ ID NO: 819173 - RNA, 22 nt, Human
guuguacauaugaggauaaguu

SEQ ID NO: 819174 - RNA, 22 nt, Human
uuguacacacaggaacaaacgu

SEQ ID NO: 819175 - RNA, 22 nt, Human
cugcuuuaaaacugauacauga

SEQ ID NO: 819176 - RNA, 22 nt, Human
ccucuugauugguuggaagcgg

SEQ ID NO: 819177 - RNA, 22 nt, Human
ugauuugaauuuuaaaacacug

SEQ ID NO: 819178 - RNA, 21 nt, Human
uugauuuagcagaucuagcug

SEQ ID NO: 819179 - RNA, 22 nt, Human
cucuauucuaauggauucuggg

SEQ ID NO: 819180 - RNA, 22 nt, Human
aaugugcugguaacugcuuugc

SEQ ID NO: 819181 - RNA, 22 nt, Human
ucauggaugauagcuucauugc

SEQ ID NO: 819182 - RNA, 22 nt, Human
cucucuuuuucgugugccgaag

SEQ ID NO: 819183 - RNA, 23 nt, Human
cauuugauccucacaauaaaugg

SEQ ID NO: 819184 - RNA, 22 nt, Human
acagaauugggguucuugggga

SEQ ID NO: 819185 - RNA, 21 nt, Human
ucugugcuuuuuuggcuccua

SEQ ID NO: 819186 - RNA, 22 nt, Human
cuuucugaggagacgggcuuug

SEQ ID NO: 819187 - RNA, 21 nt, Human
uaagcuaaacauucaguuaac

SEQ ID NO: 819188 - RNA, 22 nt, Human
gauuugucuauauucaaauaug

SEQ ID NO: 819189 - RNA, 22 nt, Human
uaucuuaaaaaucgaagcagau

SEQ ID NO: 819190 - RNA, 22 nt, Human
cuuccucuguggccagagugua

SEQ ID NO: 819191 - RNA, 22 nt, Human
uuugaacuucuaccugucauau

SEQ ID NO: 819192 - RNA, 23 nt, Human
gguuggcuguacccaggcucccu

SEQ ID NO: 819193 - RNA, 22 nt, Human
uuugacaugugcuuauaacuuu

SEQ ID NO: 819194 - RNA, 22 nt, Human
caauguacaaaauaauuacaca

SEQ ID NO: 819195 - RNA, 22 nt, Human
uaguggauguucagagauuuga

SEQ ID NO: 819196 - RNA, 22 nt, Human
augauugaaaaugacauugcca

SEQ ID NO: 819197 - RNA, 22 nt, Human
agagucaguuaugucaagugcu

SEQ ID NO: 819198 - RNA, 22 nt, Human
cucuggaucugcccugacgcca

SEQ ID NO: 819199 - RNA, 22 nt, Human
uuuacuuuugguaaggucauuu

SEQ ID NO: 819200 - RNA, 22 nt, Human
gugaagaugccucaggugaccc

SEQ ID NO: 819201 - RNA, 22 nt, Human
guguacacuugaacugacgguu

SEQ ID NO: 819202 - RNA, 20 nt, Human
cuuguuaaauaugcagguag

SEQ ID NO: 819203 - RNA, 22 nt, Human
gaggggcugggguugacuccaa

SEQ ID NO: 819204 - RNA, 22 nt, Human
uuauuuuguagcucugaucuuu

SEQ ID NO: 819205 - RNA, 22 nt, Human
agaguguggaaauguucagagu

SEQ ID NO: 819206 - RNA, 22 nt, Human
ugugagauuuuauuugauaugc

SEQ ID NO: 819207 - RNA, 22 nt, Human
uugagcuugaggaguuauuuga

SEQ ID NO: 819208 - RNA, 20 nt, Human
uuugauugccccucugacuu

SEQ ID NO: 819209 - RNA, 19 nt, Human
cuggcuucaagcaguccuc

SEQ ID NO: 819210 - RNA, 22 nt, Human
ugcuugacuuaguuucucauuu

SEQ ID NO: 819211 - RNA, 22 nt, Human
uuauugcuaugaugauguguag

SEQ ID NO: 819212 - RNA, 22 nt, Human
auggcucugcugggcaaagcaa

SEQ ID NO: 819213 - RNA, 22 nt, Human
ucugaaauuuuaguuauagaaa

SEQ ID NO: 819214 - RNA, 22 nt, Human
ugaaguuguuaagguugccauu

SEQ ID NO: 819215 - RNA, 22 nt, Human
aauggcugccagggcaggaggu

SEQ ID NO: 819216 - RNA, 20 nt, Human
ugagucagcugcaugggugg

SEQ ID NO: 819217 - RNA, 22 nt, Human
uaacacauagauauuuuaacuu

SEQ ID NO: 819218 - RNA, 23 nt, Human
uggcucuguggaucccucaggag

SEQ ID NO: 819219 - RNA, 22 nt, Human
aaugcuuuuugcgaaaugugca

SEQ ID NO: 819220 - RNA, 20 nt, Human
uugaggagauauugaauacu

SEQ ID NO: 819221 - RNA, 22 nt, Human
uaaaguuggaccugauuuuauu

SEQ ID NO: 819222 - RNA, 22 nt, Human
cuuguauuaggaagaaugcuuu

SEQ ID NO: 819223 - RNA, 22 nt, Human
ucuuauaccccuaaacugcagc

SEQ ID NO: 819224 - RNA, 22 nt, Human
uuauguauggauggcugaaagu

SEQ ID NO: 819225 - RNA, 22 nt, Human
ucuggcuucaguaggguucacu

SEQ ID NO: 819226 - RNA, 22 nt, Human
uucuacauugugaaguucuuua

SEQ ID NO: 819227 - RNA, 22 nt, Human
uugcuauuuugagagucauagu

SEQ ID NO: 819228 - RNA, 22 nt, Human
ucuggcuucaacuuuacugaaa

SEQ ID NO: 819229 - RNA, 22 nt, Human
uuuucaguuccaucucugcucu

SEQ ID NO: 819230 - RNA, 22 nt, Human
uugagcugccuggcuguggcuc

SEQ ID NO: 819231 - RNA, 22 nt, Human
cugggcuuucaggcccuaaggc

SEQ ID NO: 819232 - RNA, 22 nt, Human
uucacauaaucugcagcaagcg

SEQ ID NO: 819233 - RNA, 22 nt, Human
uucugauuguuggaggaugcuu

SEQ ID NO: 819234 - RNA, 21 nt, Human
acuguauuguuuucaaggauc

SEQ ID NO: 819235 - RNA, 22 nt, Human
uggcuuccagaacugagcaaca

SEQ ID NO: 819236 - RNA, 22 nt, Human
ccuuaauuucuguccuucagau

SEQ ID NO: 819237 - RNA, 22 nt, Human
auagucuuagaaucuugagugu

SEQ ID NO: 819238 - RNA, 22 nt, Human
aucugccuggcuccaggugagc

SEQ ID NO: 819239 - RNA, 22 nt, Human
gagguggcugcuugcugggaaa

SEQ ID NO: 819240 - RNA, 22 nt, Human
auucaugcaggauugucuccaa

SEQ ID NO: 819241 - RNA, 22 nt, Human
acucaucuuugaauuuucagua

SEQ ID NO: 819242 - RNA, 22 nt, Human
ugauuugaaaccuuuggcaaga

SEQ ID NO: 819243 - RNA, 21 nt, Human
acucaucuuuuuggagaccag

SEQ ID NO: 819244 - RNA, 22 nt, Human
ugugaagaauuaaugugaauca

SEQ ID NO: 819245 - RNA, 19 nt, Human
aucaggcuucuauuuucuc

SEQ ID NO: 819246 - RNA, 22 nt, Human
uuugacucugggugcuuuuucg

SEQ ID NO: 819247 - RNA, 22 nt, Human
uuucacaugguacugccuguuu

SEQ ID NO: 819248 - RNA, 22 nt, Human
ugagcuucuuuauuuggccaga

SEQ ID NO: 819249 - RNA, 20 nt, Human
agugauuuguuaguacauug

SEQ ID NO: 819250 - RNA, 22 nt, Human
cauugcuguuaauugucucuag

SEQ ID NO: 819251 - RNA, 22 nt, Human
guuucuuauuucaacuggaaca

SEQ ID NO: 819252 - RNA, 22 nt, Human
gauuuucauuauagcuaguuuc

SEQ ID NO: 819253 - RNA, 22 nt, Human parainfluenza virus 1 strain Washington/1964
auugauaugaauuauuggucug

SEQ ID NO: 819254 - RNA, 22 nt, Human parainfluenza virus 1 strain Washington/1964
uccuccugauuuucccgaugcu

SEQ ID NO: 819255 - RNA, 22 nt, Human parainfluenza virus 1 strain Washington/1964
uucuauacaguuugugacaucu

SEQ ID NO: 819256 - RNA, 22 nt, Human parainfluenza virus 1 strain Washington/1964
uaaugggugucauuauugagga

SEQ ID NO: 819257 - RNA, 22 nt, Human parainfluenza virus 1 strain Washington/1964
uuggcacuuucguucauggagg

SEQ ID NO: 819258 - RNA, 22 nt, Human
gcuacugauugaccuuggagag

SEQ ID NO: 819259 - RNA, 22 nt, Human
aagugaagaaauacaugagaau

SEQ ID NO: 819260 - RNA, 22 nt, Human
cuugaaagucacaugcagcccu

SEQ ID NO: 819261 - RNA, 22 nt, Human
uuuguagaggguaauugacaga

SEQ ID NO: 819262 - RNA, 22 nt, Human
ucaggagaacuuccuucuaccc

SEQ ID NO: 819263 - RNA, 22 nt, Human
ugucucugauaaguaguucagu

SEQ ID NO: 819264 - RNA, 22 nt, Human
cuuuggcaaugucauuuucaau

SEQ ID NO: 819265 - RNA, 22 nt, Human
gcagaggacagggauuuagauu

SEQ ID NO: 819266 - RNA, 22 nt, Human
uuuucagaggccuaagagguuu

SEQ ID NO: 819267 - RNA, 22 nt, Human
gucuucuguaagaugagguccc

SEQ ID NO: 819268 - RNA, 22 nt, Human
ucagaaaagguagcugugacaa

SEQ ID NO: 819269 - RNA, 22 nt, Human
ccuccuuuccuguuuuccugag

SEQ ID NO: 819270 - RNA, 22 nt, Human
cuugcacacauguacaugugua

SEQ ID NO: 819271 - RNA, 22 nt, Human
caaggccacguucugcaugcgg

SEQ ID NO: 819272 - RNA, 22 nt, Human
uucauugugaacacauucugcc

SEQ ID NO: 819273 - RNA, 22 nt, Human
uguuugaauuuugcuaacgugu

SEQ ID NO: 819274 - RNA, 22 nt, Human
ucagcugcucaaauuuauguca

SEQ ID NO: 819275 - RNA, 19 nt, Human
uuacuuggcaaagucaguc

SEQ ID NO: 819276 - RNA, 22 nt, Human
auuauuauuguugauguuaggg

SEQ ID NO: 819277 - RNA, 22 nt, Human
uuucaacaccagagaccaugcg

SEQ ID NO: 819278 - RNA, 17 nt, Human
caggcagacauguaagc

SEQ ID NO: 819279 - RNA, 22 nt, Human
cccaggagguggagguugcggu

SEQ ID NO: 819280 - RNA, 22 nt, Human
ucccuucacagaugcgauguuu

SEQ ID NO: 819281 - RNA, 22 nt, Human
auguagagcaguguuguccaau

SEQ ID NO: 819282 - RNA, 22 nt, Human
cccaggaaugagcaggcagggg

SEQ ID NO: 819283 - RNA, 22 nt, Human
aggccagaugucgggcuagaag

SEQ ID NO: 819284 - RNA, 22 nt, Human
cacagcauaaugaaauauacuu

SEQ ID NO: 819285 - RNA, 22 nt, Human
cccaggagaccugugaaaggac

SEQ ID NO: 819286 - RNA, 22 nt, Human
aggagaggguggcauuaaguuu

SEQ ID NO: 819287 - RNA, 22 nt, Human
aagagggcagcacagguggguc

SEQ ID NO: 819288 - RNA, 22 nt, Human
ucauuucuauugcuacugucug

SEQ ID NO: 819289 - RNA, 22 nt, Human
uaaaugagggcugacaugauug

SEQ ID NO: 819290 - RNA, 22 nt, Human
aauguauuccucaugcaagagu

SEQ ID NO: 819291 - RNA, 17 nt, Human
uucaaagcuuaucaagg

SEQ ID NO: 819292 - RNA, 22 nt, Human
guucuucacauuucauugagga

SEQ ID NO: 819293 - RNA, 22 nt, Human
aggcagcagugauaagauagga

SEQ ID NO: 819294 - RNA, 22 nt, Human
uacauaguauucacauuguuuu

SEQ ID NO: 819295 - RNA, 22 nt, Human
uuccaugaaagugaaauggagc

SEQ ID NO: 819296 - RNA, 22 nt, Human
uagggaggaggguuuucaaauc

SEQ ID NO: 819297 - RNA, 22 nt, Human
ugagccuguccugugcauguga

SEQ ID NO: 819298 - RNA, 22 nt, Human
uucccaugccuggccccuaucc

SEQ ID NO: 819299 - RNA, 22 nt, Human
ccaggagagcagaagcccaggc

SEQ ID NO: 819300 - RNA, 22 nt, Human
ggagcaggagucucuugaauuu

SEQ ID NO: 819301 - RNA, 22 nt, Human
guaucacuuuugagagugagaa

SEQ ID NO: 819302 - RNA, 22 nt, Human
gugcauuugugcaugcacaugu

SEQ ID NO: 819303 - RNA, 22 nt, Human
gcuggcuugauaguuucugcuu

SEQ ID NO: 819304 - RNA, 22 nt, Human
agacaggaugcauacucuuggu

SEQ ID NO: 819305 - RNA, 22 nt, Human
auggcagccugagcagaggaau

SEQ ID NO: 819306 - RNA, 22 nt, Human
cucuucuugucucugguuagaa

SEQ ID NO: 819307 - RNA, 22 nt, Human
acuggcaguagagggagcgcau

SEQ ID NO: 819308 - RNA, 22 nt, Human
ccccaggagaaaucuuaaacua

SEQ ID NO: 819309 - RNA, 22 nt, Human
aaguccaugaucaagauguggc

SEQ ID NO: 819310 - RNA, 22 nt, Human
agcuggcagucauccuagugag

SEQ ID NO: 819311 - RNA, 22 nt, Human
cuuuccaaugcauuuccaaugu

SEQ ID NO: 819312 - RNA, 22 nt, Human
uuugcaaagugacuauuauaug

SEQ ID NO: 819313 - RNA, 22 nt, Human
ggaggugggcuaaggacucucu

SEQ ID NO: 819314 - RNA, 22 nt, Human
ucugcaggcuuauaggaugggu

SEQ ID NO: 819315 - RNA, 22 nt, Human
gggugggacugaagucugaggg

SEQ ID NO: 819316 - RNA, 22 nt, Human
cuuaagauuugcgauaccuaau

SEQ ID NO: 819317 - RNA, 23 nt, Human
uggcaaggaaugggauggagacu

SEQ ID NO: 819318 - RNA, 22 nt, Human
aggcagcugaggucuggcgccc

SEQ ID NO: 819319 - RNA, 22 nt, Human
cagcuccugaggacugcuggga

SEQ ID NO: 819320 - RNA, 22 nt, Human
ugaggggagcccgcccuggacg

SEQ ID NO: 819321 - RNA, 22 nt, Human
auguuauuaaaguacagauucu

SEQ ID NO: 819322 - RNA, 21 nt, Human
ggcagccugacccccagagag

SEQ ID NO: 819323 - RNA, 22 nt, Human
aaggcagcaacuaauggaucuc

SEQ ID NO: 819324 - RNA, 22 nt, Human
ccaggagagcgcccucccggcc

SEQ ID NO: 819325 - RNA, 22 nt, Human
uaaugcuuaacagcuggcuuuu

SEQ ID NO: 819326 - RNA, 22 nt, Human
cccaggagaugcacuccauugg

SEQ ID NO: 819327 - RNA, 22 nt, Human
acauuguuugagaauacagaug

SEQ ID NO: 819328 - RNA, 22 nt, Human
uuugaaagggaaauaaacuccu

SEQ ID NO: 819329 - RNA, 22 nt, Human
cccaggaccgcgcggcugagcg

SEQ ID NO: 819330 - RNA, 22 nt, Human
ggaggaugccaagcugugcaca

SEQ ID NO: 819331 - RNA, 16 nt, Human
ccccaggacuuggcac

SEQ ID NO: 819332 - RNA, 22 nt, Human
uacuaaauaguuuaauuccuca

SEQ ID NO: 819333 - RNA, 22 nt, Human
cucaggauggaagccuacagga

SEQ ID NO: 819334 - RNA, 22 nt, Human
aaauuauaggugccaccuugga

SEQ ID NO: 819335 - RNA, 22 nt, Human
gaggcaccucgcgggaggaggc

SEQ ID NO: 819336 - RNA, 22 nt, Human
aaggcagcaagaauuccagguu

SEQ ID NO: 819337 - RNA, 22 nt, Human
gcaggagagccagcaggcuucc

SEQ ID NO: 819338 - RNA, 22 nt, Human
cccaggaacuccagagcuccuc

SEQ ID NO: 819339 - RNA, 22 nt, Human
cagcagaggugguucacauugu

SEQ ID NO: 819340 - RNA, 22 nt, Human
accaggagccacaggaggagcc

SEQ ID NO: 819341 - RNA, 22 nt, Human
uuugaaagagcugauacaugaa

SEQ ID NO: 819342 - RNA, 22 nt, Human
ggguggagcuuggacaccagua

SEQ ID NO: 819343 - RNA, 20 nt, Human
ucacaucuggcagcugauga

SEQ ID NO: 819344 - RNA, 22 nt, Human
ucaucucaaaacccaaggggca

SEQ ID NO: 819345 - RNA, 22 nt, Human
cagaguggcgacccccucagcu

SEQ ID NO: 819346 - RNA, 22 nt, Human
ggaggccagggacccagucagc

SEQ ID NO: 819347 - RNA, 22 nt, Human
aaggccaacuaggaugagcuag

SEQ ID NO: 819348 - RNA, 22 nt, Human
gacagguggggaaacuaaggua

SEQ ID NO: 819349 - RNA, 22 nt, Human
auucuucacauggauaggaucu

SEQ ID NO: 819350 - RNA, 22 nt, Human
cccaggaaaugaacuucugauu

SEQ ID NO: 819351 - RNA, 22 nt, Human
gaggccaaucaauagggcaaua

SEQ ID NO: 819352 - RNA, 22 nt, Human
ugugccagccucuggcuguguc

SEQ ID NO: 819353 - RNA, 22 nt, Human
uugaaauaucaaguuauuagug

SEQ ID NO: 819354 - RNA, 22 nt, Human
cagaauggcuuuuauggcucag

SEQ ID NO: 819355 - RNA, 22 nt, Human
uucaacuaauguuuauuuuaug

SEQ ID NO: 819356 - RNA, 22 nt, Human
aagacugugucuauggcuacuc

SEQ ID NO: 819357 - RNA, 22 nt, Human
aucaggauccaccuugagccug

SEQ ID NO: 819358 - RNA, 22 nt, Human
agugcuuugguauagaacuauu

SEQ ID NO: 819359 - RNA, 22 nt, Human
caggcagaguuagagcaacugg

SEQ ID NO: 819360 - RNA, 22 nt, Human
uuuccucacuucaugagaguuu

SEQ ID NO: 819361 - RNA, 22 nt, Human
ggcuuggaccagucacaguggu

SEQ ID NO: 819362 - RNA, 22 nt, Human
uuuuuuaguuaggucagaaugu

SEQ ID NO: 819363 - RNA, 22 nt, Human
gaggcagcaucuauggugggaa

SEQ ID NO: 819364 - RNA, 22 nt, Human
agcaccauugcaaauauggcag

SEQ ID NO: 819365 - RNA, 20 nt, Human
augugucuguaaacaacucu

SEQ ID NO: 819366 - RNA, 22 nt, Human
uccaggaggccucauuuccugu

SEQ ID NO: 819367 - RNA, 22 nt, Human
auuucagguaccugugggaucc

SEQ ID NO: 819368 - RNA, 22 nt, Human
accaggagaggcacuugcaaug

SEQ ID NO: 819369 - RNA, 20 nt, Human
ccucaggaugagggugagca

SEQ ID NO: 819370 - RNA, 22 nt, Human
uugguuuagagagugugguuac

SEQ ID NO: 819371 - RNA, 22 nt, Human
ggcagcuucucccaggcuguuu

SEQ ID NO: 819372 - RNA, 22 nt, Human
ucaggagaguguucaguggagg

SEQ ID NO: 819373 - RNA, 22 nt, Human
gcugugcuugggaagaaucucu

SEQ ID NO: 819374 - RNA, 22 nt, Human
ccugcuguaaugugucuuuauu

SEQ ID NO: 819375 - RNA, 22 nt, Human
agucuugcauuuucugaagaug

SEQ ID NO: 819376 - RNA, 22 nt, Human
ugaggcagauauuuauuggguu

SEQ ID NO: 819377 - RNA, 22 nt, Human
aaagauuugaguucugcuuaua

SEQ ID NO: 819378 - RNA, 22 nt, Human
cuucuucagcacaauauugaug

SEQ ID NO: 819379 - RNA, 21 nt, Human
uacugagaccucacagugugc

SEQ ID NO: 819380 - RNA, 22 nt, Human
uaucuaaauggaauauuccaga

SEQ ID NO: 819381 - RNA, 22 nt, Human
agacagcuaauaaaugagugug

SEQ ID NO: 819382 - RNA, 22 nt, Human
ugcucccagggacucuggcugg

SEQ ID NO: 819383 - RNA, 22 nt, Human
uuuucagugggcaaugauguga

SEQ ID NO: 819384 - RNA, 22 nt, Human
agacaguguguguauauauggu

SEQ ID NO: 819385 - RNA, 22 nt, Human
uggcuucuugggaugggucauu

SEQ ID NO: 819386 - RNA, 22 nt, Human
cuacagacccaccuuggaagaa

SEQ ID NO: 819387 - RNA, 22 nt, Human
uucacauuggugauauguuucu

SEQ ID NO: 819388 - RNA, 22 nt, Human
aauacaguagguaauaguucau

SEQ ID NO: 819389 - RNA, 22 nt, Human
uucaaacaguguagaauauaug

SEQ ID NO: 819390 - RNA, 22 nt, Human
ugugugucagagucuccauggu

SEQ ID NO: 819391 - RNA, 22 nt, Human
cccaggaggacauuccauaccc

SEQ ID NO: 819392 - RNA, 20 nt, Human
gcucccagccugcagucccc

SEQ ID NO: 819393 - RNA, 22 nt, Human
ccucaggauccgcaggugcagu

SEQ ID NO: 819394 - RNA, 22 nt, Human
uggggcuccuccuggcaggagg

SEQ ID NO: 819395 - RNA, 19 nt, Human
ggucagcugggcuagaggc

SEQ ID NO: 819396 - RNA, 22 nt, Human
gccaggagugucccacucauuu

SEQ ID NO: 819397 - RNA, 22 nt, Human
gggcagcugccccucucugggc

SEQ ID NO: 819398 - RNA, 22 nt, Human
uguacauagaucuugaaaauua

SEQ ID NO: 819399 - RNA, 19 nt, Human
uaucuguuuccugcuuguc

SEQ ID NO: 819400 - RNA, 22 nt, Human
acauaccauacauggugagaug

SEQ ID NO: 819401 - RNA, 22 nt, Human
uaguuuuacuugcgaugauaau

SEQ ID NO: 819402 - RNA, 22 nt, Human
gagggaauggugugcaagaggu

SEQ ID NO: 819403 - RNA, 22 nt, Human
aauauuuguuaguguuuuaaug

SEQ ID NO: 819404 - RNA, 22 nt, Human
ugcugaaagucccaaaucucau

SEQ ID NO: 819405 - RNA, 22 nt, Human
auuuccaguccuaaugaucugg

SEQ ID NO: 819406 - RNA, 22 nt, Human
cuugaaguugcaaaacauuaau

SEQ ID NO: 819407 - RNA, 22 nt, Human
ggacaagccugugaguggguuu

SEQ ID NO: 819408 - RNA, 22 nt, Human
ugcuuggccuacuuguccuuug

SEQ ID NO: 819409 - RNA, 22 nt, Human
cuuuguagcugcuucugauuua

SEQ ID NO: 819410 - RNA, 22 nt, Human
cucaggaugcaauuccaucaag

SEQ ID NO: 819411 - RNA, 22 nt, Human
ggcagcuuguccuucaggagag

SEQ ID NO: 819412 - RNA, 22 nt, Human
ucauuuguugcuguuaccugag

SEQ ID NO: 819413 - RNA, 22 nt, Human
caggagaucuuaggaauucuua

SEQ ID NO: 819414 - RNA, 22 nt, Human
caaggccaaagggccacuguca

SEQ ID NO: 819415 - RNA, 22 nt, Human
agggcagccauugagggauucu

SEQ ID NO: 819416 - RNA, 22 nt, Human
agaaaugacaagacugaucagg

SEQ ID NO: 819417 - RNA, 22 nt, Human
uccaugagcuagggauucauca

SEQ ID NO: 819418 - RNA, 21 nt, Human
gacaaagugaagcaggcagga

SEQ ID NO: 819419 - RNA, 22 nt, Human
gagagucuagugcaccuaguuu

SEQ ID NO: 819420 - RNA, 22 nt, Human
cucuucucugcagccuuugaag

SEQ ID NO: 819421 - RNA, 22 nt, Human
cuucuucauguauugauagucu

SEQ ID NO: 819422 - RNA, 22 nt, Human
agagggcagggcgguaaguccu

SEQ ID NO: 819423 - RNA, 22 nt, Human
gccaggaggcuuaacuggacag

SEQ ID NO: 819424 - RNA, 18 nt, Human
ggucuuuaggucaguguc

SEQ ID NO: 819425 - RNA, 22 nt, Human
uugcauuucccauugaguaaug

SEQ ID NO: 819426 - RNA, 22 nt, Human
agcuucuuggcucagcacuugg

SEQ ID NO: 819427 - RNA, 22 nt, Human
aggcggcuccgggagugugggc

SEQ ID NO: 819428 - RNA, 22 nt, Human
uccuuagagacaagaccaguuu

SEQ ID NO: 819429 - RNA, 22 nt, Human
agggcagcagcuccuccuagcu

SEQ ID NO: 819430 - RNA, 22 nt, Human
aggguagggccguagggccaug

SEQ ID NO: 819431 - RNA, 22 nt, Human
aaggcagcucagcucauggcag

SEQ ID NO: 819432 - RNA, 22 nt, Human
agagguagagguugcagugagc

SEQ ID NO: 819433 - RNA, 22 nt, Human
ucugcugugauuugcuaccugu

SEQ ID NO: 819434 - RNA, 23 nt, Human
uucuucucaauuaguugauucag

SEQ ID NO: 819435 - RNA, 22 nt, Human
augaguucaauuguuucaguca

SEQ ID NO: 819436 - RNA, 22 nt, Human
ucccaggaaugucugaaaguga

SEQ ID NO: 819437 - RNA, 22 nt, Human
gaaggccauuagagccugugcc

SEQ ID NO: 819438 - RNA, 22 nt, Human
caggcagccugcggucugcaca

SEQ ID NO: 819439 - RNA, 22 nt, Human
ccaaaugugccuguuucaacaa

SEQ ID NO: 819440 - RNA, 22 nt, Human
gucccaggugggcuccaccucu

SEQ ID NO: 819441 - RNA, 22 nt, Human
uucauguguauggaacauuuuu

SEQ ID NO: 819442 - RNA, 22 nt, Human
ggcagccuugagggaggccugg

SEQ ID NO: 819443 - RNA, 22 nt, Human
uucauugugauucuuggcuagc

SEQ ID NO: 819444 - RNA, 22 nt, Human
uucugagguccaugcaguacug

SEQ ID NO: 819445 - RNA, 22 nt, Human
cacaauuuguuuuaucaguauu

SEQ ID NO: 819446 - RNA, 23 nt, Human
cuuuuaacuagaguaucagcugc

SEQ ID NO: 819447 - RNA, 20 nt, Human
cagaggcaaggagacuugga

SEQ ID NO: 819448 - RNA, 22 nt, Human
cccaggaggcagagcuugcagu

SEQ ID NO: 819449 - RNA, 22 nt, Human
acccaggaggcagagguugcag

SEQ ID NO: 819450 - RNA, 23 nt, Human
cccauuuucauguuaacuccugg

SEQ ID NO: 819451 - RNA, 22 nt, Human
aacaugcugccuuucuacgagu

SEQ ID NO: 819452 - RNA, 22 nt, Human
ugguaauuuacgcauuucugua

SEQ ID NO: 819453 - RNA, 22 nt, Human
augcuguggggagugaggguag

SEQ ID NO: 819454 - RNA, 22 nt, Human
gcucaggaaauaguuuaguguu

SEQ ID NO: 819455 - RNA, 17 nt, Human
ugauaguucauuuuaag

SEQ ID NO: 819456 - RNA, 22 nt, Human
uaaaugaagaaauggagauugu

SEQ ID NO: 819457 - RNA, 22 nt, Human
aaaggccauuacuugcuuuuag

SEQ ID NO: 819458 - RNA, 22 nt, Human
ugaguucuaguggcugcagauu

SEQ ID NO: 819459 - RNA, 19 nt, Human
cccaggagucuggcugguu

SEQ ID NO: 819460 - RNA, 22 nt, Human
uugcugaauugaauccuuuggu

SEQ ID NO: 819461 - RNA, 22 nt, Human
agaggauguucuaggcacucau

SEQ ID NO: 819462 - RNA, 22 nt, Human
auuacaaaagaagggagaaggu

SEQ ID NO: 819463 - RNA, 22 nt, Human
aggcagcuucugauuagcagcg

SEQ ID NO: 819464 - RNA, 22 nt, Human
cugcugugagcacuccagccug

SEQ ID NO: 819465 - RNA, 22 nt, Human
uccaggaggguuuucugccuuc

SEQ ID NO: 819466 - RNA, 22 nt, Human
uagggauguccugagacuuggc

SEQ ID NO: 819467 - RNA, 22 nt, Human
auuuccaggagaaaggauuuua

SEQ ID NO: 819468 - RNA, 17 nt, Human
gagacagcaggagcccc

SEQ ID NO: 819469 - RNA, 22 nt, Human
aaggccagacaggaccacaucu

SEQ ID NO: 819470 - RNA, 22 nt, Human
uguucauuuggcccuuuuguau

SEQ ID NO: 819471 - RNA, 22 nt, Human
guccaugauucugugacacccu

SEQ ID NO: 819472 - RNA, 22 nt, Human
gauauuuugagaaauccuauga

SEQ ID NO: 819473 - RNA, 22 nt, Human
cucccaggacucagaggagaag

SEQ ID NO: 819474 - RNA, 22 nt, Human
uaaggccaaggggccauagucu

SEQ ID NO: 819475 - RNA, 22 nt, Human
cuuagaaaugcagauucucagg

SEQ ID NO: 819476 - RNA, 18 nt, Human
ucauuuguuuugcaugaa

SEQ ID NO: 819477 - RNA, 22 nt, Human
ggaggggagucucccaaagccg

SEQ ID NO: 819478 - RNA, 21 nt, Human
ugcuggaaaaagugguucuag

SEQ ID NO: 819479 - RNA, 22 nt, Human
uaaggccaaguucauauacaac

SEQ ID NO: 819480 - RNA, 22 nt, Human
auaucacaguaguuguuuaguu

SEQ ID NO: 819481 - RNA, 22 nt, Human
ugcuuucaaaggcuuucuagau

SEQ ID NO: 819482 - RNA, 22 nt, Human
aagggcagaauagagaagaugg

SEQ ID NO: 819483 - RNA, 22 nt, Human
ucaggaauccagacagggcaca

SEQ ID NO: 819484 - RNA, 22 nt, Human
agggagcucuaaguagagggac

SEQ ID NO: 819485 - RNA, 19 nt, Human
ugaggggaggagaggccug

SEQ ID NO: 819486 - RNA, 22 nt, Human
ccaggcagcaaauuuucugaau

SEQ ID NO: 819487 - RNA, 22 nt, Human
aggaagcugcuggaguagugug

SEQ ID NO: 819488 - RNA, 22 nt, Human
auuugcuucugugaaaucaagu

SEQ ID NO: 819489 - RNA, 22 nt, Human
cagagcagucuggagauccagc

SEQ ID NO: 819490 - RNA, 22 nt, Human
uuggaugaagucuagcuuuagu

SEQ ID NO: 819491 - RNA, 19 nt, Human
aguggcagaucuggaagua

SEQ ID NO: 819492 - RNA, 22 nt, Human
gauggcaggugauagccgaguc

SEQ ID NO: 819493 - RNA, 22 nt, Human
auucuucaaagagugucaaagu

SEQ ID NO: 819494 - RNA, 22 nt, Human
ucugggaagcugcgugccuguu

SEQ ID NO: 819495 - RNA, 20 nt, Human
gagauggacagaugaagggg

SEQ ID NO: 819496 - RNA, 22 nt, Human
ugcuuccuauccacacaaugcc

SEQ ID NO: 819497 - RNA, 22 nt, Human
caggaugguggcaugaucagaa

SEQ ID NO: 819498 - RNA, 18 nt, Human
ugugaacacauuuuucug

SEQ ID NO: 819499 - RNA, 22 nt, Human
cuuguaauuauaauguacuguu

SEQ ID NO: 819500 - RNA, 22 nt, Human
cugcugugcuuguggccacccg

SEQ ID NO: 819501 - RNA, 22 nt, Human
cuuugaauugccguuucaucug

SEQ ID NO: 819502 - RNA, 22 nt, Human
cagcuggcaaguggagcagggu

SEQ ID NO: 819503 - RNA, 22 nt, Human
cauuuguauguuccuccuuagg

SEQ ID NO: 819504 - RNA, 19 nt, Human
ucucacaguuuccuugccu

SEQ ID NO: 819505 - RNA, 22 nt, Human
agaggacaaaaugagaagugcu

SEQ ID NO: 819506 - RNA, 22 nt, Human
uuuuuggguccaggcuguaucu

SEQ ID NO: 819507 - RNA, 22 nt, Human
gaggcugcuguuagcccugggc

SEQ ID NO: 819508 - RNA, 22 nt, Human
ucugucccugagagcucaggag

SEQ ID NO: 819509 - RNA, 22 nt, Human
agucucuuccuucaaggcuggu

SEQ ID NO: 819510 - RNA, 17 nt, Human
gaggagcuccaguaggu

SEQ ID NO: 819511 - RNA, 22 nt, Human
ccaggagagcaggcgugcagcu

SEQ ID NO: 819512 - RNA, 22 nt, Human
ucccaggacaugggcucugcuc

SEQ ID NO: 819513 - RNA, 22 nt, Human
aagggcagagggaaucccacau

SEQ ID NO: 819514 - RNA, 22 nt, Human
uuaacauacaucaugaacaaug

SEQ ID NO: 819515 - RNA, 21 nt, Human
aggucagcccagcucuggaag

SEQ ID NO: 819516 - RNA, 22 nt, Human
uaggcagcgcuuggcugugcuu

SEQ ID NO: 819517 - RNA, 22 nt, Human
acucaggaagaaagcagcuggu

SEQ ID NO: 819518 - RNA, 22 nt, Human
aaccauuugccauuaucuuaag

SEQ ID NO: 819519 - RNA, 22 nt, Human
aaaacaguuuaggcaucacagu

SEQ ID NO: 819520 - RNA, 23 nt, Human
cugcuguguuggucucgauggga

SEQ ID NO: 819521 - RNA, 22 nt, Human
uauguguuugacacccugcaag

SEQ ID NO: 819522 - RNA, 22 nt, Human
aaucuguuuaguucugcguaug

SEQ ID NO: 819523 - RNA, 22 nt, Human
cagcuucugucugauuagcaag

SEQ ID NO: 819524 - RNA, 22 nt, Human
gaggagagaacauuccuccaua

SEQ ID NO: 819525 - RNA, 22 nt, Human
gcccaggaguugaaugcagcag

SEQ ID NO: 819526 - RNA, 18 nt, Human
gagaggagccagaauuuu

SEQ ID NO: 819527 - RNA, 22 nt, Human
gaggcaugcagagcuggagcag

SEQ ID NO: 819528 - RNA, 21 nt, Human
auggagggaccagggaagcag

SEQ ID NO: 819529 - RNA, 22 nt, Human
ucuucuuccucauuuauacaua

SEQ ID NO: 819530 - RNA, 22 nt, Human
augcuguguuuuaaauggaaau

SEQ ID NO: 819531 - RNA, 19 nt, Human
acaaaugauguugcacuga

SEQ ID NO: 819532 - RNA, 22 nt, Human
agcugcuacugcucugccagag

SEQ ID NO: 819533 - RNA, 22 nt, Human
agagggaucacccuguuucugg

SEQ ID NO: 819534 - RNA, 22 nt, Human
ugcccaggaucuggcgaugcuc

SEQ ID NO: 819535 - RNA, 22 nt, Human
uuuaaaaucagaugggaguugg

SEQ ID NO: 819536 - RNA, 17 nt, Human
agaggcagauacuugga

SEQ ID NO: 819537 - RNA, 22 nt, Human
ccaggaguggcuggugaccuuc

SEQ ID NO: 819538 - RNA, 22 nt, Human
ccaggagaauaauggcagauua

SEQ ID NO: 819539 - RNA, 23 nt, Human
uggacgccgacuuuggaggcgcu

SEQ ID NO: 819540 - RNA, 22 nt, Human
cauuuccugucuggaggucaaa

SEQ ID NO: 819541 - RNA, 22 nt, Human
ucugcaggcuuggaguggcagc

SEQ ID NO: 819542 - RNA, 22 nt, Human
ggaggcagaacuucccgucagu

SEQ ID NO: 819543 - RNA, 22 nt, Human
ggaggggaacuaaucccgugac

SEQ ID NO: 819544 - RNA, 22 nt, Human
aggguagggcccggagacagac

SEQ ID NO: 819545 - RNA, 20 nt, Human
uccaugaguuagagacuaua

SEQ ID NO: 819546 - RNA, 18 nt, Human
uugcuuuguaagcuugca

SEQ ID NO: 819547 - RNA, 22 nt, Human
auugaaaggcaaaguaggaagc

SEQ ID NO: 819548 - RNA, 22 nt, Human
cagagacauuaagugccaugau

SEQ ID NO: 819549 - RNA, 22 nt, Human
auucuucauuguugauucaugu

SEQ ID NO: 819550 - RNA, 19 nt, Human
uucaggauugacccuacug

SEQ ID NO: 819551 - RNA, 22 nt, Human
acauuuuuauucaucaaagcag

SEQ ID NO: 819552 - RNA, 22 nt, Human
aggaggggcauagaaauguaau

SEQ ID NO: 819553 - RNA, 22 nt, Human
aucuucucauguguaaugaggu

SEQ ID NO: 819554 - RNA, 22 nt, Human
cacccugggcugggccuguuaa

SEQ ID NO: 819555 - RNA, 22 nt, Human
gcucacugccauucucuagaug

SEQ ID NO: 819556 - RNA, 21 nt, Human
gacaggacuagaccagagcuc

SEQ ID NO: 819557 - RNA, 22 nt, Human
cccaggaauuggaggcugcagu

SEQ ID NO: 819558 - RNA, 22 nt, Human
cagcuggcgggcagagccgcca

SEQ ID NO: 819559 - RNA, 22 nt, Human
acuuugcagggcuugauaucca

SEQ ID NO: 819560 - RNA, 22 nt, Human
auuuguagugaagugaaaauaa

SEQ ID NO: 819561 - RNA, 22 nt, Human
ugagaacugaggauuugaauuc

SEQ ID NO: 819562 - RNA, 22 nt, Human
ccagaggaaaaauaucucccua

SEQ ID NO: 819563 - RNA, 22 nt, Human
ggagaggaaaugccagcacuuc

SEQ ID NO: 819564 - RNA, 22 nt, Human
ggcagaggaaggaugaauucac

SEQ ID NO: 819565 - RNA, 22 nt, Human
acccaggaggcaagguugcagu

SEQ ID NO: 819566 - RNA, 19 nt, Human
ucauuguugguuugucggg

SEQ ID NO: 819567 - RNA, 22 nt, Human
ggaguaggaguagaacucauca

SEQ ID NO: 819568 - RNA, 22 nt, Human
aggcagcuggcagcacccaggg

SEQ ID NO: 819569 - RNA, 22 nt, Human
gaggccagcuaguccaggaagu

SEQ ID NO: 819570 - RNA, 22 nt, Human
auuuucagagacaucuggacuu

SEQ ID NO: 819571 - RNA, 22 nt, Human
uuucugcugugcuuucuugcgu

SEQ ID NO: 819572 - RNA, 20 nt, Human
aggcaguuagaaggagauga

SEQ ID NO: 819573 - RNA, 22 nt, Human
agggaggucuuugaggggcuua

SEQ ID NO: 819574 - RNA, 22 nt, Human
gaggagagaugguagauugggu

SEQ ID NO: 819575 - RNA, 22 nt, Human
uuuugcuugagugcacaaaaug

SEQ ID NO: 819576 - RNA, 22 nt, Human
cggagggguuugaacagaggag

SEQ ID NO: 819577 - RNA, 22 nt, Human
auuauucuuaugucaucauggc

SEQ ID NO: 819578 - RNA, 22 nt, Human
cacauuuaauccuuuauaagua

SEQ ID NO: 819579 - RNA, 22 nt, Human
ggugaguugggguucacagguc

SEQ ID NO: 819580 - RNA, 22 nt, Human
uucauucuuugaaucugaggua

SEQ ID NO: 819581 - RNA, 22 nt, Human
cuucaugcugauauccucgaug

SEQ ID NO: 819582 - RNA, 22 nt, Human
gagguagcaugcuggaagggac

SEQ ID NO: 819583 - RNA, 22 nt, Human
uuaugauuugccacagauuggu

SEQ ID NO: 819584 - RNA, 22 nt, Human
gaggucagucagaccaggguuu

SEQ ID NO: 819585 - RNA, 22 nt, Human
gauuucuucauuuguggugaau

SEQ ID NO: 819586 - RNA, 20 nt, Human
ucagaugggagugagccauc

SEQ ID NO: 819587 - RNA, 22 nt, Human
caggauggccccggggcugugc

SEQ ID NO: 819588 - RNA, 22 nt, Human
gugguaauagagcuccaaacua

SEQ ID NO: 819589 - RNA, 23 nt, Human
acuuuauugaccccaggucaguu

SEQ ID NO: 819590 - RNA, 22 nt, Human
uaauuauucuagucacauagca

SEQ ID NO: 819591 - RNA, 22 nt, Human
gcagagaacccagcagauuggc

SEQ ID NO: 819592 - RNA, 22 nt, Human
uucacagacuuuccauagauug

SEQ ID NO: 819593 - RNA, 22 nt, Human
acacauuuacauguuuacguau

SEQ ID NO: 819594 - RNA, 22 nt, Human
agugcugucaguuuuauagaua

SEQ ID NO: 819595 - RNA, 22 nt, Human
ggagaggauguuuuaguaacuu

SEQ ID NO: 819596 - RNA, 22 nt, Human
cagcaggagcagucagacuccu

SEQ ID NO: 819597 - RNA, 22 nt, Human
ccaggagagcucucguucagug

SEQ ID NO: 819598 - RNA, 22 nt, Human
uuauucuuuaaacauauauguu

SEQ ID NO: 819599 - RNA, 22 nt, Human
uccauuuuucaugacuccucaa

SEQ ID NO: 819600 - RNA, 22 nt, Human
aggcagcccugugcuggaugcu

SEQ ID NO: 819601 - RNA, 22 nt, Human
ucccaggaaggauucggcauuu

SEQ ID NO: 819602 - RNA, 22 nt, Human
guugaaagagcauggacuugaa

SEQ ID NO: 819603 - RNA, 22 nt, Human
uuucaguucaguuuauuauauc

SEQ ID NO: 819604 - RNA, 21 nt, Human
cccaggaguccuauuuaaaug

SEQ ID NO: 819605 - RNA, 22 nt, Human
gugggagcuuuggcaucaggcu

SEQ ID NO: 819606 - RNA, 23 nt, Human
ucuccuccuagauacagucaugg

SEQ ID NO: 819607 - RNA, 22 nt, Human
auucuucauaccuacugagguu

SEQ ID NO: 819608 - RNA, 22 nt, Human
cagggaggaugggcuguuuugc

SEQ ID NO: 819609 - RNA, 22 nt, Human
aggaugagccgcgcaagcugac

SEQ ID NO: 819610 - RNA, 22 nt, Human
ucucuucuagcuucuugugguu

SEQ ID NO: 819611 - RNA, 22 nt, Human
uucacagaauggcaaguuaugg

SEQ ID NO: 819612 - RNA, 22 nt, Human
aauauaugugguauugaccagc

SEQ ID NO: 819613 - RNA, 22 nt, Human
ucacugcucagucuguacuaca

SEQ ID NO: 819614 - RNA, 22 nt, Human
uugaagagugccuuccagacau

SEQ ID NO: 819615 - RNA, 22 nt, Human
cauuuuaaaugauuuaagccaa

SEQ ID NO: 819616 - RNA, 22 nt, Human
ggagcggagggagggccacugu

SEQ ID NO: 819617 - RNA, 22 nt, Human
gacagcuguggagaggcaugug

SEQ ID NO: 819618 - RNA, 22 nt, Human
cuggcaaguacugggccagcuc

SEQ ID NO: 819619 - RNA, 21 nt, Human
cccacggaaugaugaggcacu

SEQ ID NO: 819620 - RNA, 22 nt, Human
agacagguaaauagagaugcug

SEQ ID NO: 819621 - RNA, 22 nt, Human
ugaaaggugacauuucuuggau

SEQ ID NO: 819622 - RNA, 23 nt, Human
uccaggagaaccccugucugucc

SEQ ID NO: 819623 - RNA, 22 nt, Human
uugaaagugccaaguccuagug

SEQ ID NO: 819624 - RNA, 22 nt, Human
aauauccacacugugucccugc

SEQ ID NO: 819625 - RNA, 22 nt, Human
caaggccaguuucuccuaguca

SEQ ID NO: 819626 - RNA, 22 nt, Human
gaggccaggaagcccaagauca

SEQ ID NO: 819627 - RNA, 22 nt, Human
cgucuuccucuuacgaugcgcu

SEQ ID NO: 819628 - RNA, 22 nt, Human
ggccagcuuugagcugcaggaa

SEQ ID NO: 819629 - RNA, 22 nt, Human
uccaggagagguagaggguucc

SEQ ID NO: 819630 - RNA, 22 nt, Human
aggaaaggccuuugcauuuggu

SEQ ID NO: 819631 - RNA, 22 nt, Human
agggauggaagacuugaagacc

SEQ ID NO: 819632 - RNA, 22 nt, Human
agggaguuagaaauccaggaua

SEQ ID NO: 819633 - RNA, 23 nt, Human
ucagagagcuguugagagcugcc

SEQ ID NO: 819634 - RNA, 22 nt, Human
uuuuaucugcuucauuaguuga

SEQ ID NO: 819635 - RNA, 22 nt, Human
uggcagcuuccugcucauagga

SEQ ID NO: 819636 - RNA, 22 nt, Human
uuucaaagaccauuaacuauca

SEQ ID NO: 819637 - RNA, 22 nt, Human
cucuucuuauggccguggcuga

SEQ ID NO: 819638 - RNA, 22 nt, Human
cauuguuaauugguaucuuaca

SEQ ID NO: 819639 - RNA, 22 nt, Human
uuugaauguuuuagguacuuaa

SEQ ID NO: 819640 - RNA, 22 nt, Human
gugacaguggucacuuguaguu

SEQ ID NO: 819641 - RNA, 22 nt, Human
ucacagacacagggagaagcau

SEQ ID NO: 819642 - RNA, 22 nt, Human
uuuaacagaugcuaugucuacc

SEQ ID NO: 819643 - RNA, 22 nt, Human
ucuucagagugaaagucuguga

SEQ ID NO: 819644 - RNA, 22 nt, Human
uaucuguuaugggcugaauugc

SEQ ID NO: 819645 - RNA, 22 nt, Human
caaggccaguccauuuuggaag

SEQ ID NO: 819646 - RNA, 22 nt, Human
caggcagcagaggaguguggga

SEQ ID NO: 819647 - RNA, 23 nt, Human
uuuuccagaaucgacucuguaga

SEQ ID NO: 819648 - RNA, 22 nt, Human
cccaggagguggagguugcagu

SEQ ID NO: 819649 - RNA, 22 nt, Human
cugcuuugggcagcuuuguggc

SEQ ID NO: 819650 - RNA, 22 nt, Human
agucaauucuuuucaacucaag

SEQ ID NO: 819651 - RNA, 22 nt, Human
cccaggagguggaguucacagu

SEQ ID NO: 819652 - RNA, 22 nt, Human
uucuuugaguuaguacagucca

SEQ ID NO: 819653 - RNA, 22 nt, Human
ugcaggaaucagaggggaagcg

SEQ ID NO: 819654 - RNA, 22 nt, Human
guugaaaguggagaaccugguu

SEQ ID NO: 819655 - RNA, 22 nt, Human
uucaggauccccaccgcguuua

SEQ ID NO: 819656 - RNA, 20 nt, Human
aggacagcagcugccacuug

SEQ ID NO: 819657 - RNA, 22 nt, Human
gugagggguggcugagcaguuu

SEQ ID NO: 819658 - RNA, 22 nt, Human
aggcagcugugaggacuggauu

SEQ ID NO: 819659 - RNA, 22 nt, Human
uuugcagucuggccugcuuugg

SEQ ID NO: 819660 - RNA, 22 nt, Human
gaggcagcgggucaggaccgug

SEQ ID NO: 819661 - RNA, 22 nt, Human
uuugaaugcaggacauacagaa

SEQ ID NO: 819662 - RNA, 22 nt, Human
acaaauaugguacucggagaaa

SEQ ID NO: 819663 - RNA, 22 nt, Human
uccaggagguugagacugcagu

SEQ ID NO: 819664 - RNA, 22 nt, Human
aaugaaauguagcuuauccaua

SEQ ID NO: 819665 - RNA, 22 nt, Human
aggcuggagggcaauggcaaga

SEQ ID NO: 819666 - RNA, 22 nt, Human
gcucccagacugaccagaggug

SEQ ID NO: 819667 - RNA, 22 nt, Human
gcuucccacagcuggacugggg

SEQ ID NO: 819668 - RNA, 22 nt, Human
uacccagggcuuuucugaugca

SEQ ID NO: 819669 - RNA, 22 nt, Human
caggcagcugggucaccguccc

SEQ ID NO: 819670 - RNA, 22 nt, Human
agcccagggacagggcggaugu

SEQ ID NO: 819671 - RNA, 22 nt, Human
gaaaggccagcucacagaugag

SEQ ID NO: 819672 - RNA, 22 nt, Human
cuucucaaaguugugaaucagg

SEQ ID NO: 819673 - RNA, 22 nt, Human
uucucagguagugcugaugcug

SEQ ID NO: 819674 - RNA, 22 nt, Human
uuuauauuucccaggauuggcc

SEQ ID NO: 819675 - RNA, 22 nt, Human
cagagccacuuggagaugagaa

SEQ ID NO: 819676 - RNA, 22 nt, Human
ccagcagagucuaggaaggagg

SEQ ID NO: 819677 - RNA, 22 nt, Human
uuauuacacugaaagaauugcg

SEQ ID NO: 819678 - RNA, 22 nt, Human
accaggaguaacagugaguggu

SEQ ID NO: 819679 - RNA, 22 nt, Human
acaauucugaugguuucccagu

SEQ ID NO: 819680 - RNA, 22 nt, Human
aagcagaggguauggccagguu

SEQ ID NO: 819681 - RNA, 22 nt, Human
cagcugccccgcuggcugacca

SEQ ID NO: 819682 - RNA, 21 nt, Human
ugaaaugagaaugcugagcac

SEQ ID NO: 819683 - RNA, 22 nt, Human
uccucagaaaccccugugaggu

SEQ ID NO: 819684 - RNA, 22 nt, Human
cugcccaggaaccagaggggca

SEQ ID NO: 819685 - RNA, 22 nt, Human
ggccagaggugguacauagcuu

SEQ ID NO: 819686 - RNA, 22 nt, Human
gcuccucuauuccccacauuuu

SEQ ID NO: 819687 - RNA, 21 nt, Human
ugcugaugucagagaagcaag

SEQ ID NO: 819688 - RNA, 22 nt, Human
ggagaggguguggaaaguuauc

SEQ ID NO: 819689 - RNA, 22 nt, Human
cagaagaguagcugaacaaguu

SEQ ID NO: 819690 - RNA, 22 nt, Human
agaggcagccguauuucaaagg

SEQ ID NO: 819691 - RNA, 22 nt, Human
uucuuaacucaaauauauaucc

SEQ ID NO: 819692 - RNA, 22 nt, Human
cuccaggagggggauggcugua

SEQ ID NO: 819693 - RNA, 22 nt, Human
ugcuggaauaauuucauguuaa

SEQ ID NO: 819694 - RNA, 23 nt, Human
ccacuagcaccuguucaacuucu

SEQ ID NO: 819695 - RNA, 22 nt, Human
aggcaguuuauccccagagccu

SEQ ID NO: 819696 - RNA, 22 nt, Human
agaaaugaauauguagugguua

SEQ ID NO: 819697 - RNA, 22 nt, Human
uauuuccaggccccacucuaga

SEQ ID NO: 819698 - RNA, 22 nt, Human
aguuauaaucugcuacugauau

SEQ ID NO: 819699 - RNA, 22 nt, Human
ucuuagaaguucauguuccagc

SEQ ID NO: 819700 - RNA, 23 nt, Human
aggauguaggauguauggcagag

SEQ ID NO: 819701 - RNA, 22 nt, Human
ucacaaaugaggaaaucgagca

SEQ ID NO: 819702 - RNA, 22 nt, Human
ccaggagauuuuuccauagcac

SEQ ID NO: 819703 - RNA, 22 nt, Human
ugaacuccaaauacugcugauu

SEQ ID NO: 819704 - RNA, 22 nt, Human
uuauggcauauuccucauugua

SEQ ID NO: 819705 - RNA, 22 nt, Human
ugaaagggguugaguuacagcu

SEQ ID NO: 819706 - RNA, 22 nt, Human
auacaacuuuacaugcaauucc

SEQ ID NO: 819707 - RNA, 21 nt, Human
gagugcagcaagguagagucu

SEQ ID NO: 819708 - RNA, 22 nt, Human
ugugauauuugaguauugucaa

SEQ ID NO: 819709 - RNA, 22 nt, Human
agaggagugggaagcagugcaa

SEQ ID NO: 819710 - RNA, 22 nt, Human
cuucugcaauaaguuuuggucc

SEQ ID NO: 819711 - RNA, 22 nt, Human
uucuccagaccuugugacuaug

SEQ ID NO: 819712 - RNA, 20 nt, Human
aggagggaccuggauuggcg

SEQ ID NO: 819713 - RNA, 22 nt, Human
ccaggagcagauauggacauaa

SEQ ID NO: 819714 - RNA, 20 nt, Human
cccagguaggugccaugagu

SEQ ID NO: 819715 - RNA, 22 nt, Human
gaggcagugcauugucuagggg

SEQ ID NO: 819716 - RNA, 22 nt, Human
ggaggugguggcagugacaauu

SEQ ID NO: 819717 - RNA, 22 nt, Human
uccaggaguccugggagugauu

SEQ ID NO: 819718 - RNA, 22 nt, Human
cccaggaggaggaaaaagcucg

SEQ ID NO: 819719 - RNA, 22 nt, Human
ccugcugugaccggggagcagg

SEQ ID NO: 819720 - RNA, 22 nt, Human
ucucucuugucaccccaucugc

SEQ ID NO: 819721 - RNA, 22 nt, Human
ccaggagaagcaucugagugua

SEQ ID NO: 819722 - RNA, 22 nt, Human
auguucuguuuuguaauucaua

SEQ ID NO: 819723 - RNA, 22 nt, Human
uggcagcagacaaaaggccauu

SEQ ID NO: 819724 - RNA, 20 nt, Human
cucaggauacugcaaaguug

SEQ ID NO: 819725 - RNA, 22 nt, Human
cccaggagguggagguugcagc

SEQ ID NO: 819726 - RNA, 22 nt, Human
uaaggccaccguuauagaacca

SEQ ID NO: 819727 - RNA, 22 nt, Human
aggcagauuacuugaggccagg

SEQ ID NO: 819728 - RNA, 22 nt, Human
cauucuuauauuuacucauuca

SEQ ID NO: 819729 - RNA, 22 nt, Human
aucacauuguuagcauagacug

SEQ ID NO: 819730 - RNA, 22 nt, Human
aggcagugcaugcaaaggucgg

SEQ ID NO: 819731 - RNA, 22 nt, Human
gagguggaaggcaggaacaaau

SEQ ID NO: 819732 - RNA, 22 nt, Human
cccaggaaaucaggcuuucuag

SEQ ID NO: 819733 - RNA, 22 nt, Human
ucauuauccuaguaucuugaau

SEQ ID NO: 819734 - RNA, 16 nt, Human
gcccaggacgggaggc

SEQ ID NO: 819735 - RNA, 22 nt, Human
ugcauguggaccccuggugccu

SEQ ID NO: 819736 - RNA, 22 nt, Human
uacaacauuguguugcuucaua

SEQ ID NO: 819737 - RNA, 22 nt, Human
cuggccaggcuugggacagaca

SEQ ID NO: 819738 - RNA, 22 nt, Human
aguggaccagaagacugaagcu

SEQ ID NO: 819739 - RNA, 20 nt, Human
aagcacauuucuacaauaau

SEQ ID NO: 819740 - RNA, 22 nt, Human
aagcaauauacugauaugauua

SEQ ID NO: 819741 - RNA, 22 nt, Human
aacauacauauuucagugucca

SEQ ID NO: 819742 - RNA, 22 nt, Human
ggguacuuaauauuuacggggu

SEQ ID NO: 819743 - RNA, 22 nt, Human
uaaguucauaagcuuauucuua

SEQ ID NO: 819744 - RNA, 23 nt, Human
acacauuuuucccguucugaggu

SEQ ID NO: 819745 - RNA, 21 nt, Human
uuugaaagcuacaucuauagc

SEQ ID NO: 819746 - RNA, 22 nt, Human
cuuaaaaucuggcaguuagcua

SEQ ID NO: 819747 - RNA, 22 nt, Human
gggcagcuagcccucuagccca

SEQ ID NO: 819748 - RNA, 22 nt, Human
cagucucuugcuucauuaguug

SEQ ID NO: 819749 - RNA, 22 nt, Human
aucaggauucaccccagagcug

SEQ ID NO: 819750 - RNA, 19 nt, Human
uuugaaaggauuguuauuu

SEQ ID NO: 819751 - RNA, 22 nt, Human
aggagacaucuaacuguagguu

SEQ ID NO: 819752 - RNA, 22 nt, Human
ugaaggccacuuccugugagcu

SEQ ID NO: 819753 - RNA, 22 nt, Human
aggcagcuuucuggugcaccau

SEQ ID NO: 819754 - RNA, 22 nt, Human
aaucuuucccuauuaaaugugg

SEQ ID NO: 819755 - RNA, 22 nt, Human
ugaaaugaaugugauucgauag

SEQ ID NO: 819756 - RNA, 22 nt, Human
auuaaauuaaguggcuaauuua

SEQ ID NO: 819757 - RNA, 22 nt, Human
aaaauaacuucuacuauuugca

SEQ ID NO: 819758 - RNA, 18 nt, Human
cauuguacaaugcuuuau

SEQ ID NO: 819759 - RNA, 22 nt, Human
uguuuuaaucucccauugcucu

SEQ ID NO: 819760 - RNA, 22 nt, Human
caaggccacugcucagguuucc

SEQ ID NO: 819761 - RNA, 20 nt, Human
gcccaggaucucugaggcau

SEQ ID NO: 819762 - RNA, 22 nt, Human
uucuucaaccaucuacauaaac

SEQ ID NO: 819763 - RNA, 22 nt, Human
cagcuccugggccaucuccuag

SEQ ID NO: 819764 - RNA, 22 nt, Human
ugacaguuaagguauacauuca

SEQ ID NO: 819765 - RNA, 22 nt, Human
uguuguuuucucauggagaaua

SEQ ID NO: 819766 - RNA, 22 nt, Human
uuauacuaaaacgcauugaauu

SEQ ID NO: 819767 - RNA, 22 nt, Human
cauuuguagcuauuuacuguau

SEQ ID NO: 819768 - RNA, 22 nt, Human
cccagggaagccauuucugacu

SEQ ID NO: 819769 - RNA, 22 nt, Human
ccaugagacagcaacugaaagu

SEQ ID NO: 819770 - RNA, 22 nt, Human
uggcagcuagcuguuuucaugc

SEQ ID NO: 819771 - RNA, 22 nt, Human
ggcaugcucuuuguccacagua

SEQ ID NO: 819772 - RNA, 22 nt, Human
gacccaggcccaaggcugccag

SEQ ID NO: 819773 - RNA, 22 nt, Human
ugucucugaggugagggucagc

SEQ ID NO: 819774 - RNA, 22 nt, Human
cagcugacuucauaggaagaca

SEQ ID NO: 819775 - RNA, 22 nt, Human
ggggggugcugaucaguggagc

SEQ ID NO: 819776 - RNA, 22 nt, Human
ucucagaguuuagagcugagcc

SEQ ID NO: 819777 - RNA, 22 nt, Human
agugugucugaucacuugugag

SEQ ID NO: 819778 - RNA, 21 nt, Human
auaagcaugcugauuacauuu

SEQ ID NO: 819779 - RNA, 22 nt, Human
aagacuguacauuuuccagucu

SEQ ID NO: 819780 - RNA, 22 nt, Human
cauuguuaccaucuuuuaccua

SEQ ID NO: 819781 - RNA, 22 nt, Human
ccaggaugacccccacuuuccu

SEQ ID NO: 819782 - RNA, 22 nt, Human
caggcagccugagggaucuggg

SEQ ID NO: 819783 - RNA, 22 nt, Human
uacugcauaacuggcauguggg

SEQ ID NO: 819784 - RNA, 22 nt, Human
cccaugagauucugaauuuggc

SEQ ID NO: 819785 - RNA, 22 nt, Human
gccaggagcccugggcaaguuc

SEQ ID NO: 819786 - RNA, 22 nt, Human
aggagcagaauuuaaugugcag

SEQ ID NO: 819787 - RNA, 22 nt, Human
cccaggagauaacguucccaag

SEQ ID NO: 819788 - RNA, 22 nt, Human
acaauauuguacccagaaguuu

SEQ ID NO: 819789 - RNA, 22 nt, Human
ugucugugaccucuuuggagcc

SEQ ID NO: 819790 - RNA, 22 nt, Human
cacauauuguaguucaccagga

SEQ ID NO: 819791 - RNA, 22 nt, Human
guaaaauagaauaacguggcua

SEQ ID NO: 819792 - RNA, 22 nt, Human
uuucuuauacuauauugucauc

SEQ ID NO: 819793 - RNA, 22 nt, Human
gaaggggacuggcagcugcaga

SEQ ID NO: 819794 - RNA, 22 nt, Human
aaauauaguaaaugcauaguuc

SEQ ID NO: 819795 - RNA, 22 nt, Human
gcagcugagcgugaggaagagu

SEQ ID NO: 819796 - RNA, 22 nt, Human
ggcagcucugcuccacaugagu

SEQ ID NO: 819797 - RNA, 22 nt, Human
uucucugaaggccaugcucacu

SEQ ID NO: 819798 - RNA, 22 nt, Human
cuuugaagagauuacugugcuc

SEQ ID NO: 819799 - RNA, 22 nt, Human
uugaaaguuaucuagauucuga

SEQ ID NO: 819800 - RNA, 22 nt, Human
aggcacagagaaugcccuccau

SEQ ID NO: 819801 - RNA, 22 nt, Human
ugacauaauaauccaaacauac

SEQ ID NO: 819802 - RNA, 22 nt, Human
aaggcagcaugaaucccuguac

SEQ ID NO: 819803 - RNA, 19 nt, Human
gaggcgaggcgugcaggag

SEQ ID NO: 819804 - RNA, 22 nt, Human
agagacugcgugucagcgcugg

SEQ ID NO: 819805 - RNA, 22 nt, Human
ugccuggaaggcccaugggaag

SEQ ID NO: 819806 - RNA, 22 nt, Human
cccaggagagaggggauaaagc

SEQ ID NO: 819807 - RNA, 22 nt, Human
cccaggaggccaagguugcagu

SEQ ID NO: 819808 - RNA, 22 nt, Human
auacacauguguaugugcaugc

SEQ ID NO: 819809 - RNA, 22 nt, Human
ggagaggacauggcucccacag

SEQ ID NO: 819810 - RNA, 22 nt, Human
ucauuucucccggccaaaaacu

SEQ ID NO: 819811 - RNA, 22 nt, Human
auucuucaucagagaugcacua

SEQ ID NO: 819812 - RNA, 22 nt, Human
uuucuucaauugcuaacaagga

SEQ ID NO: 819813 - RNA, 22 nt, Human
acccaggagccgugagagguua

SEQ ID NO: 819814 - RNA, 22 nt, Human
aggggagguggcagaaaugugc

SEQ ID NO: 819815 - RNA, 22 nt, Human
uauuucagggagaauaaauuug

SEQ ID NO: 819816 - RNA, 17 nt, Human
uugaacugcugagucag

SEQ ID NO: 819817 - RNA, 22 nt, Human
aguggcagagugcacucaggca

SEQ ID NO: 819818 - RNA, 22 nt, Human
gucuucuuuucagucugcuugu

SEQ ID NO: 819819 - RNA, 22 nt, Human
ucugggaacucugucauuuccc

SEQ ID NO: 819820 - RNA, 22 nt, Human
cagugaaaucacaacuuuaguu

SEQ ID NO: 819821 - RNA, 22 nt, Human
uuuccaagacuccaguucuccc

SEQ ID NO: 819822 - RNA, 22 nt, Human
ggcagcuucuuaauauggagac

SEQ ID NO: 819823 - RNA, 22 nt, Human
caggguggggaaauagcgcccu

SEQ ID NO: 819824 - RNA, 22 nt, Human
ucacagacauggugagguaaca

SEQ ID NO: 819825 - RNA, 22 nt, Human
aggcaguggcugagaccagggg

SEQ ID NO: 819826 - RNA, 22 nt, Human
uacaaagagguaauugcauaua

SEQ ID NO: 819827 - RNA, 22 nt, Human
ucccaggacuuccaguuggagg

SEQ ID NO: 819828 - RNA, 22 nt, Human
ucucuguaguugggcagcugcu

SEQ ID NO: 819829 - RNA, 22 nt, Human
augaggcaguacacacaaagcc

SEQ ID NO: 819830 - RNA, 22 nt, Human
cccuggaguccuggcaguugau

SEQ ID NO: 819831 - RNA, 22 nt, Human
cuguggaaggccuguccugaaa

SEQ ID NO: 819832 - RNA, 22 nt, Human
ccaggcugugguuuagauagag

SEQ ID NO: 819833 - RNA, 22 nt, Human
aggaagcuuagugaaaggacca

SEQ ID NO: 819834 - RNA, 22 nt, Human
cugcugugcauauuuaucuagg

SEQ ID NO: 819835 - RNA, 23 nt, Human
auuugagaaaguauuuuuaagac

SEQ ID NO: 819836 - RNA, 22 nt, Human
aggcagacaaggucccuggucu

SEQ ID NO: 819837 - RNA, 22 nt, Human
ggagaagggacagacucagcuu

SEQ ID NO: 819838 - RNA, 22 nt, Human
agcaccugucacaagcagaagg

SEQ ID NO: 819839 - RNA, 22 nt, Human
ugaggcagugcugggaagccug

SEQ ID NO: 819840 - RNA, 22 nt, Human
cucuucuuggcccccaugaggg

SEQ ID NO: 819841 - RNA, 20 nt, Human
uuucaguuaucuugaccuuc

SEQ ID NO: 819842 - RNA, 22 nt, Human
ucaggauguuaauauagcauua

SEQ ID NO: 819843 - RNA, 22 nt, Human
cagagagagucaaaucuuugcu

SEQ ID NO: 819844 - RNA, 22 nt, Human
cccaggagcuucucucugccuc

SEQ ID NO: 819845 - RNA, 22 nt, Human
gaggcugccccuuccucagcug

SEQ ID NO: 819846 - RNA, 22 nt, Human
acagucucuccacacugcaggg

SEQ ID NO: 819847 - RNA, 22 nt, Human
caggauggagggagggcuguua

SEQ ID NO: 819848 - RNA, 18 nt, Human
guaggucaguaccaagca

SEQ ID NO: 819849 - RNA, 22 nt, Human
cuugcaggccuuucuagcucua

SEQ ID NO: 819850 - RNA, 22 nt, Human
gcugucccgcugacuuccagcu

SEQ ID NO: 819851 - RNA, 22 nt, Human
gagugucugaauuagagcacaa

SEQ ID NO: 819852 - RNA, 21 nt, Human
uagggcaggcauuggaagaga

SEQ ID NO: 819853 - RNA, 22 nt, Human
uaucuuguaauagguccacuug

SEQ ID NO: 819854 - RNA, 22 nt, Human
agccagcugugggcucaggcgg

SEQ ID NO: 819855 - RNA, 22 nt, Human
cuuuggcaaggguuuuaauugu

SEQ ID NO: 819856 - RNA, 22 nt, Human
cucaggaugcaggucacaggac

SEQ ID NO: 819857 - RNA, 22 nt, Human
acacagaguauuuagaaggggu

SEQ ID NO: 819858 - RNA, 22 nt, Human
cacagacccagaagggaugaag

SEQ ID NO: 819859 - RNA, 23 nt, Human
cuccccaguguccucaugcaucu

SEQ ID NO: 819860 - RNA, 22 nt, Human
ucuuuucaucauuuaauaggua

SEQ ID NO: 819861 - RNA, 22 nt, Human
accaggaggccuugguucugag

SEQ ID NO: 819862 - RNA, 23 nt, Human
uucuuucaagaaguucacagugc

SEQ ID NO: 819863 - RNA, 18 nt, Human
ggcaucugcacagcagcc

SEQ ID NO: 819864 - RNA, 22 nt, Human
aaaauuauggaguaucccaaag

SEQ ID NO: 819865 - RNA, 22 nt, Human
uccaugaguuugaggaaaagag

SEQ ID NO: 819866 - RNA, 22 nt, Human
caugucuguguacacaugcaca

SEQ ID NO: 819867 - RNA, 22 nt, Human
uauuuccagcaguaagaagaca

SEQ ID NO: 819868 - RNA, 22 nt, Human
uaaggccaauuacauauguuca

SEQ ID NO: 819869 - RNA, 22 nt, Human
gaaggccacaagagaaguuaag

SEQ ID NO: 819870 - RNA, 22 nt, Human
gugcuuucugcugcauuccucu

SEQ ID NO: 819871 - RNA, 22 nt, Human
uggcagcucccagagcuuccaa

SEQ ID NO: 819872 - RNA, 22 nt, Human
cuggcuuucucugugguguuca

SEQ ID NO: 819873 - RNA, 22 nt, Human
cagucuucuaaccuagcagccu

SEQ ID NO: 819874 - RNA, 22 nt, Human
augaaggcaguuaaacgucauc

SEQ ID NO: 819875 - RNA, 22 nt, Human
acacaaauuguaggauaauugc

SEQ ID NO: 819876 - RNA, 22 nt, Human
augaggcauuccacucaaacuc

SEQ ID NO: 819877 - RNA, 22 nt, Human
cuucagaaugggacuguguuug

SEQ ID NO: 819878 - RNA, 22 nt, Human
agagcagcacguuguccccaca

SEQ ID NO: 819879 - RNA, 22 nt, Human
ucuggcuuucauuuguuuaaag

SEQ ID NO: 819880 - RNA, 22 nt, Human
uagcuuuccuuguugccugugc

SEQ ID NO: 819881 - RNA, 22 nt, Human
ugaaaugagcauuuauucuuua

SEQ ID NO: 819882 - RNA, 22 nt, Human
cuugcugucuugcauuuagagc

SEQ ID NO: 819883 - RNA, 22 nt, Human
aucugccucuucuucauugcga

SEQ ID NO: 819884 - RNA, 22 nt, Human
aguaccaugcuuccugacuggu

SEQ ID NO: 819885 - RNA, 22 nt, Human
aauuuguuaaaagugagugaca

SEQ ID NO: 819886 - RNA, 22 nt, Human
cuaauacacccuauugcuuguu

SEQ ID NO: 819887 - RNA, 22 nt, Human
caggcagcagccacucugguau

SEQ ID NO: 819888 - RNA, 20 nt, Human
ucucuucuggggagauaaaa

SEQ ID NO: 819889 - RNA, 22 nt, Human
ucuuagaaugucaacugauguu

SEQ ID NO: 819890 - RNA, 22 nt, Human
ccucagggaaugggaggcuggg

SEQ ID NO: 819891 - RNA, 22 nt, Human
acaauacaggcuucuggacuua

SEQ ID NO: 819892 - RNA, 22 nt, Human
aggcaguuguugcugagcagcu

SEQ ID NO: 819893 - RNA, 22 nt, Human
ggagggaaugucuagcauucuu

SEQ ID NO: 819894 - RNA, 22 nt, Human
caggcagcaucagucugcugua

SEQ ID NO: 819895 - RNA, 22 nt, Human
cagaccucaguccucaguagga

SEQ ID NO: 819896 - RNA, 22 nt, Human
gcaccugauugauuucacugcu

SEQ ID NO: 819897 - RNA, 22 nt, Human
auggaaagggaagcaaggaaca

SEQ ID NO: 819898 - RNA, 22 nt, Human
ggacagcucugccaggagcuca

SEQ ID NO: 819899 - RNA, 22 nt, Human
cccaggagguuggggcuacagu

SEQ ID NO: 819900 - RNA, 22 nt, Human
gaggcacuggaggaaaggagaa

SEQ ID NO: 819901 - RNA, 22 nt, Human
cugaacuuauugagugcuugcu

SEQ ID NO: 819902 - RNA, 17 nt, Human
agcugaccagauggacu

SEQ ID NO: 819903 - RNA, 22 nt, Human
gaccuggaggauccucuucuug

SEQ ID NO: 819904 - RNA, 17 nt, Human
uuucaucugggaccacc

SEQ ID NO: 819905 - RNA, 22 nt, Human
cugaggaagacagcagcugugu

SEQ ID NO: 819906 - RNA, 22 nt, Human
agaggaggcagcuuaacucagu

SEQ ID NO: 819907 - RNA, 22 nt, Human
aagauggaguaguguaaugguu

SEQ ID NO: 819908 - RNA, 22 nt, Human
aggcaguggagcuggaauaggc

SEQ ID NO: 819909 - RNA, 18 nt, Human
uugagggaggggcagagu

SEQ ID NO: 819910 - RNA, 22 nt, Human
ccucuucuaggacguccuugug

SEQ ID NO: 819911 - RNA, 22 nt, Human
uggaagggagugacagucagag

SEQ ID NO: 819912 - RNA, 22 nt, Human
ccucaggaaaugaauaaauggc

SEQ ID NO: 819913 - RNA, 22 nt, Human
uuuacaaccucauauucugaug

SEQ ID NO: 819914 - RNA, 22 nt, Human
gacccaggaagcuacuucuggu

SEQ ID NO: 819915 - RNA, 23 nt, Human
cuucucagaagucugugccagga

SEQ ID NO: 819916 - RNA, 22 nt, Human
uccaggagauacacugcaccag

SEQ ID NO: 819917 - RNA, 18 nt, Human
ugcuuggagcauuuacca

SEQ ID NO: 819918 - RNA, 22 nt, Human
acacauuucucuuuuuguaagu

SEQ ID NO: 819919 - RNA, 22 nt, Human
uugaauaggacucagcagugau

SEQ ID NO: 819920 - RNA, 22 nt, Human
gcagaggccaggccaccagcaa

SEQ ID NO: 819921 - RNA, 22 nt, Human
uguggaaaauuggaacguuccu

SEQ ID NO: 819922 - RNA, 22 nt, Human
uuaaauuuuagaaacagacucu

SEQ ID NO: 819923 - RNA, 22 nt, Human
ccacagagcauuagauuucaga

SEQ ID NO: 819924 - RNA, 22 nt, Human
uccaugagacagauacuguaag

SEQ ID NO: 819925 - RNA, 22 nt, Human
aucauuacuccuguaaaauugu

SEQ ID NO: 819926 - RNA, 21 nt, Human
agacaguaacucuucuacucc

SEQ ID NO: 819927 - RNA, 22 nt, Human
caaaugauagagccgauuauca

SEQ ID NO: 819928 - RNA, 22 nt, Human
cugagggugcuauucuugccuu

SEQ ID NO: 819929 - RNA, 20 nt, Human
acaggggcagcacaauaaug

SEQ ID NO: 819930 - RNA, 22 nt, Human
uugcagcuuagugauguuaucu

SEQ ID NO: 819931 - RNA, 22 nt, Human
ugaaagguuaaaaguaguauug

SEQ ID NO: 819932 - RNA, 22 nt, Human
gagagcuggguucaaguagcug

SEQ ID NO: 819933 - RNA, 23 nt, Human
uuugaaaguaucaacucgccuga

SEQ ID NO: 819934 - RNA, 22 nt, Human
agagagggcauagaaaaaggga

SEQ ID NO: 819935 - RNA, 19 nt, Human
ugcugcuguccuugcaggg

SEQ ID NO: 819936 - RNA, 21 nt, Human
uggaggaauaaagcacagaag

SEQ ID NO: 819937 - RNA, 22 nt, Human
gcugccagcuuuccuuggcuga

SEQ ID NO: 819938 - RNA, 22 nt, Human
gaauauuuuuaaagggacuaau

SEQ ID NO: 819939 - RNA, 22 nt, Human
gagaaggaguagcugaccuggg

SEQ ID NO: 819940 - RNA, 21 nt, Human
uaauaauuccacuacagagua

SEQ ID NO: 819941 - RNA, 22 nt, Human
augauauuugcaaugugcuugc

SEQ ID NO: 819942 - RNA, 22 nt, Human
gcucccaggcauggagguaauu

SEQ ID NO: 819943 - RNA, 22 nt, Human
uucaggauuauacucucuuccc

SEQ ID NO: 819944 - RNA, 22 nt, Human
uaaguggaagguuauaugcuaa

SEQ ID NO: 819945 - RNA, 22 nt, Human
ccccaggagauuugggagcaca

SEQ ID NO: 819946 - RNA, 22 nt, Human
ugcauaaagugccauaguauua

SEQ ID NO: 819947 - RNA, 22 nt, Human
caggauggucagaugcauuguc

SEQ ID NO: 819948 - RNA, 22 nt, Human
gcuuugaagucugugucuuuug

SEQ ID NO: 819949 - RNA, 22 nt, Human
uuuauucaucaucuguucauau

SEQ ID NO: 819950 - RNA, 22 nt, Human
gaggaggcuuccgggaggcacg

SEQ ID NO: 819951 - RNA, 20 nt, Human
ucucagcauaagaacccuuc

SEQ ID NO: 819952 - RNA, 22 nt, Human
gagcagcucugggugacccagu

SEQ ID NO: 819953 - RNA, 22 nt, Human
cuuguccccagcagguugguuu

SEQ ID NO: 819954 - RNA, 22 nt, Human
ggcagccuugacuagugacuua

SEQ ID NO: 819955 - RNA, 22 nt, Human
gaucuucuauguaaugaagugu

SEQ ID NO: 819956 - RNA, 22 nt, Human
gcgucugaguugcgggggcuca

SEQ ID NO: 819957 - RNA, 19 nt, Human
caaggccaccauuucuccg

SEQ ID NO: 819958 - RNA, 22 nt, Human
accaggaguagaauaucuguga

SEQ ID NO: 819959 - RNA, 22 nt, Human
guucuucaggccauccucccag

SEQ ID NO: 819960 - RNA, 22 nt, Human
cuacccagauccaggauggcua

SEQ ID NO: 819961 - RNA, 23 nt, Human
uccaggagaauuccagggcccgg

SEQ ID NO: 819962 - RNA, 22 nt, Human
gcagggaagacccggagcagcg

SEQ ID NO: 819963 - RNA, 22 nt, Human
auaguuugugaaacacagcagu

SEQ ID NO: 819964 - RNA, 22 nt, Human
ucugaaaugcaaauuugacuga

SEQ ID NO: 819965 - RNA, 23 nt, Human
cugcugugaaacaugguuuuggu

SEQ ID NO: 819966 - RNA, 22 nt, Human
aaagccaugggucuuuggcaua

SEQ ID NO: 819967 - RNA, 22 nt, Human
gcauugaguccacucugucuuu

SEQ ID NO: 819968 - RNA, 22 nt, Human
acuuucugcaguguuggaaaug

SEQ ID NO: 819969 - RNA, 23 nt, Human
auuucuaggggauuuucuggugc

SEQ ID NO: 819970 - RNA, 22 nt, Human
ggaggaugagcuacgaggagcu

SEQ ID NO: 819971 - RNA, 22 nt, Human
uucuucuuucccccugugguac

SEQ ID NO: 819972 - RNA, 22 nt, Human
agucccuguacuuuccacugcc

SEQ ID NO: 819973 - RNA, 22 nt, Human
ucuuugaauuucugacugucuu

SEQ ID NO: 819974 - RNA, 22 nt, Human
uuuuagauaguuuaacugcacu

SEQ ID NO: 819975 - RNA, 22 nt, Human
ucacacagauugguagagcuga

SEQ ID NO: 819976 - RNA, 22 nt, Human
gccauuuucugucuuguuuauu

SEQ ID NO: 819977 - RNA, 22 nt, Human
caggcagccuucucgucucaca

SEQ ID NO: 819978 - RNA, 19 nt, Human
ggcaggcuggauagagagg

SEQ ID NO: 819979 - RNA, 22 nt, Human
aggcugcugaggccaccacgcu

SEQ ID NO: 819980 - RNA, 22 nt, Human
ucucacuggguauaaaugagua

SEQ ID NO: 819981 - RNA, 22 nt, Human
uuugaaaggguuaugagacuga

SEQ ID NO: 819982 - RNA, 22 nt, Human
ggccagcucuuguccacggagg

SEQ ID NO: 819983 - RNA, 22 nt, Human
gggcagcucuggcugugggaag

SEQ ID NO: 819984 - RNA, 22 nt, Human
aguuauuacucuuuaacauauu

SEQ ID NO: 819985 - RNA, 22 nt, Human
gucagagagggcacgugcacac

SEQ ID NO: 819986 - RNA, 17 nt, Human
ucaggauguagcaguag

SEQ ID NO: 819987 - RNA, 18 nt, Human
agcuucccucugagaggg

SEQ ID NO: 819988 - RNA, 22 nt, Human
ucugagaggcaucugcacuucu

SEQ ID NO: 819989 - RNA, 22 nt, Human
uuuuagcacuaagugauaugcu

SEQ ID NO: 819990 - RNA, 22 nt, Human
agaguucugcucuucucaguga

SEQ ID NO: 819991 - RNA, 23 nt, Human
aaacugcuuccaauuccugccau

SEQ ID NO: 819992 - RNA, 22 nt, Human
uccaggagugugugcuaauggg

SEQ ID NO: 819993 - RNA, 21 nt, Human
cucaaagaccaaaaguguaga

SEQ ID NO: 819994 - RNA, 22 nt, Human
cagcagaggcacgucugugaau

SEQ ID NO: 819995 - RNA, 22 nt, Human
uuuuaucuaccuaugcucauuu

SEQ ID NO: 819996 - RNA, 22 nt, Human
ccuugcauauauuauaucuuug

SEQ ID NO: 819997 - RNA, 22 nt, Human
uccaggaggaggaaggcugcca

SEQ ID NO: 819998 - RNA, 22 nt, Human
aggcaguggaugucaggaaugg

SEQ ID NO: 819999 - RNA, 22 nt, Human
uagcucuucauuucaucugauu

SEQ ID NO: 820000 - RNA, 22 nt, Human
agugcuuuauguuguugugcaa

SEQ ID NO: 820001 - RNA, 22 nt, Human
cagcuggccccacaguagaggc

SEQ ID NO: 820002 - RNA, 21 nt, Human
agggagcuuuagguagaaguu

SEQ ID NO: 820003 - RNA, 22 nt, Human
auauauuugagaauauucauga

SEQ ID NO: 820004 - RNA, 22 nt, Human
agaggaugguugaggaagaccu

SEQ ID NO: 820005 - RNA, 22 nt, Human
uggcagcuuuuuguuucaggcu

SEQ ID NO: 820006 - RNA, 22 nt, Human
augauguuauuuucagaaacau

SEQ ID NO: 820007 - RNA, 22 nt, Human
caguuucuacgaaggucaaccc

SEQ ID NO: 820008 - RNA, 20 nt, Human
uucaggauucuagaccacac

SEQ ID NO: 820009 - RNA, 22 nt, Human
agcgagggaggucugaggacag

SEQ ID NO: 820010 - RNA, 22 nt, Human
ucugggaaaugcuguuccuugu

SEQ ID NO: 820011 - RNA, 22 nt, Human
ccuucauugcaucuuuaagaga

SEQ ID NO: 820012 - RNA, 22 nt, Human
cauucauuuaugaaauaucuau

SEQ ID NO: 820013 - RNA, 22 nt, Human
uggcagcugucuguggggucuc

SEQ ID NO: 820014 - RNA, 22 nt, Human
uuacaagauaaccugaugcugu

SEQ ID NO: 820015 - RNA, 22 nt, Human
gaaauuauugcuagagacugca

SEQ ID NO: 820016 - RNA, 22 nt, Human
ucacugcucuccaauguggagu

SEQ ID NO: 820017 - RNA, 23 nt, Human
uggaggaaacacaucagaagacc

SEQ ID NO: 820018 - RNA, 19 nt, Human
uucauucuuucuacuuacc

SEQ ID NO: 820019 - RNA, 22 nt, Human
aggaugagaagauuggaaucuu

SEQ ID NO: 820020 - RNA, 21 nt, Human
cccaggaggagcuccggcucc

SEQ ID NO: 820021 - RNA, 22 nt, Human
aguucucagcuuaguaugcugu

SEQ ID NO: 820022 - RNA, 22 nt, Human
gaggcagcuggguccggucggg

SEQ ID NO: 820023 - RNA, 22 nt, Human
ucucagucagccuugauguccc

SEQ ID NO: 820024 - RNA, 22 nt, Human
gaggcaguuugccaugccagga

SEQ ID NO: 820025 - RNA, 22 nt, Human
agaaguuguagguuugcauauu

SEQ ID NO: 820026 - RNA, 22 nt, Human
cuucuucaaccugaaaguuuca

SEQ ID NO: 820027 - RNA, 22 nt, Human
ccucugcucugguccaugugcu

SEQ ID NO: 820028 - RNA, 22 nt, Human
gcagcugcagagaccggguggg

SEQ ID NO: 820029 - RNA, 22 nt, Human
auccaugaagguacuucucagg

SEQ ID NO: 820030 - RNA, 22 nt, Human
uucucagauauuuacugagcau

SEQ ID NO: 820031 - RNA, 22 nt, Human
ugugaaagcaagucuaguucuc

SEQ ID NO: 820032 - RNA, 22 nt, Human
ggucagagggugggcugccugu

SEQ ID NO: 820033 - RNA, 22 nt, Human
ggccagagaauaugccuuacgu

SEQ ID NO: 820034 - RNA, 22 nt, Human
ucuacagacagagcagguggga

SEQ ID NO: 820035 - RNA, 22 nt, Human
gucaggauuuuaaaaucccagu

SEQ ID NO: 820036 - RNA, 22 nt, Human
ucuucagaggaagucagucuuu

SEQ ID NO: 820037 - RNA, 22 nt, Human
uccaggagaaaacugacggugg

SEQ ID NO: 820038 - RNA, 22 nt, Human
auauuguugacuauaagaguaa

SEQ ID NO: 820039 - RNA, 18 nt, Human
aggcaggugcuggaaguc

SEQ ID NO: 820040 - RNA, 22 nt, Human
ucuucucucauguaggagggaa

SEQ ID NO: 820041 - RNA, 22 nt, Human
ucuuucaaugagcauucuuucc

SEQ ID NO: 820042 - RNA, 22 nt, Human
aggcaagcccccagugaggcuc

SEQ ID NO: 820043 - RNA, 22 nt, Human
ggcagcaucucuggcagcagcu

SEQ ID NO: 820044 - RNA, 21 nt, Human
aucacauuggcuguuauuauu

SEQ ID NO: 820045 - RNA, 22 nt, Human
cagugguugguagauacuugag

SEQ ID NO: 820046 - RNA, 22 nt, Human
gaggagcugggcugagaggguc

SEQ ID NO: 820047 - RNA, 22 nt, Human
ucuuccucuagaucugaggccc

SEQ ID NO: 820048 - RNA, 22 nt, Human
cagcuccucacgagucuugaaa

SEQ ID NO: 820049 - RNA, 20 nt, Human
caucaucacaugagccaauu

SEQ ID NO: 820050 - RNA, 22 nt, Human
cccaguuucaacuuuccagugg

SEQ ID NO: 820051 - RNA, 22 nt, Human
guuuuauaggcuguugcuauau

SEQ ID NO: 820052 - RNA, 22 nt, Human
uggaaggaaagguagcagagaa

SEQ ID NO: 820053 - RNA, 22 nt, Human
cccaggaguuggaggcuacggu

SEQ ID NO: 820054 - RNA, 22 nt, Human
uucuucaaugugcccuguuuuc

SEQ ID NO: 820055 - RNA, 22 nt, Human
ugaguuuugucuugcuagaagu

SEQ ID NO: 820056 - RNA, 22 nt, Human
ggcuuggaaaugguaaugagcu

SEQ ID NO: 820057 - RNA, 22 nt, Human
cccuugcacauuugucuuuaau

SEQ ID NO: 820058 - RNA, 22 nt, Human
aguaaaucagaccucauuaugu

SEQ ID NO: 820059 - RNA, 22 nt, Human
cagggagggacaauugucaccu

SEQ ID NO: 820060 - RNA, 22 nt, Human
gaggcaacacauuuggaaagca

SEQ ID NO: 820061 - RNA, 22 nt, Human
agcccaggagguggagguugca

SEQ ID NO: 820062 - RNA, 22 nt, Human
guaggcagucucucaggugauc

SEQ ID NO: 820063 - RNA, 20 nt, Human
ggcaggcuuuauauggaggg

SEQ ID NO: 820064 - RNA, 22 nt, Human
cuucagaagccugcagccuuug

SEQ ID NO: 820065 - RNA, 22 nt, Human
acuggcagcagcagcccuuggg

SEQ ID NO: 820066 - RNA, 20 nt, Human
uuucuugucggcuguugcug

SEQ ID NO: 820067 - RNA, 22 nt, Human
uuuagaaguucacacauuuaaa

SEQ ID NO: 820068 - RNA, 22 nt, Human
gagcaccucaauuugcuauuug

SEQ ID NO: 820069 - RNA, 22 nt, Human
ucccaggaauccguccucuaga

SEQ ID NO: 820070 - RNA, 22 nt, Human
uggcagcuugaaugcagucuuu

SEQ ID NO: 820071 - RNA, 22 nt, Human
ugaggcagcaauugauuauuca

SEQ ID NO: 820072 - RNA, 22 nt, Human
uuacuuugcuuucucauuacag

SEQ ID NO: 820073 - RNA, 22 nt, Human
cugcugagaaaagacugaggga

SEQ ID NO: 820074 - RNA, 22 nt, Human
aggccagcacgacagccgcagg

SEQ ID NO: 820075 - RNA, 22 nt, Human
cucaacagcucugccauacucc

SEQ ID NO: 820076 - RNA, 22 nt, Human
cugucauuuaagacauucugga

SEQ ID NO: 820077 - RNA, 22 nt, Human
ucuacugcacuggugucucauc

SEQ ID NO: 820078 - RNA, 22 nt, Human
aucaggauagucuguaaauugu

SEQ ID NO: 820079 - RNA, 22 nt, Human
cuccacagcucaggcucagagu

SEQ ID NO: 820080 - RNA, 20 nt, Human
uccaggagaacugggagccg

SEQ ID NO: 820081 - RNA, 22 nt, Human
ccugcucagagcgucuugugug

SEQ ID NO: 820082 - RNA, 22 nt, Human
gucaggauuuacaaacuucagu

SEQ ID NO: 820083 - RNA, 22 nt, Human
acagaaauugggcaaauggaag

SEQ ID NO: 820084 - RNA, 22 nt, Human
cccaggaaaugggcucuugccu

SEQ ID NO: 820085 - RNA, 22 nt, Human
uggcagcuagauaguguguuua

SEQ ID NO: 820086 - RNA, 22 nt, Human
gcccaggaaagauagggccuca

SEQ ID NO: 820087 - RNA, 22 nt, Human
cacaaugugguuugucaucuuu

SEQ ID NO: 820088 - RNA, 22 nt, Human
aggcaggccccugagaauagac

SEQ ID NO: 820089 - RNA, 22 nt, Human
cccaggaaugaggggcggaggc

SEQ ID NO: 820090 - RNA, 22 nt, Human
gaauacaugauacaugaacugc

SEQ ID NO: 820091 - RNA, 22 nt, Human
auguucuuccaaaucuguaaca

SEQ ID NO: 820092 - RNA, 22 nt, Human
ucucgacagccuggcacagugg

SEQ ID NO: 820093 - RNA, 22 nt, Human
guucuugccagcauccucaggu

SEQ ID NO: 820094 - RNA, 22 nt, Human
gcaucuaauccaguccagcauc

SEQ ID NO: 820095 - RNA, 22 nt, Human
agacgagggcccccaggacagc

SEQ ID NO: 820096 - RNA, 22 nt, Human
uggagcugggguuugaaucugg

SEQ ID NO: 820097 - RNA, 22 nt, Human
gagaggcaggcgcugcaauggu

SEQ ID NO: 820098 - RNA, 22 nt, Human
guugaaugaaucauucuaugua

SEQ ID NO: 820099 - RNA, 22 nt, Human
gaggcaguguuuacugcccugu

SEQ ID NO: 820100 - RNA, 22 nt, Human
aggguaggaacugaguggaagg

SEQ ID NO: 820101 - RNA, 22 nt, Human
aggacagcagugcuggcacuug

SEQ ID NO: 820102 - RNA, 22 nt, Human
cuaaucaucuuucucuuaaagc

SEQ ID NO: 820103 - RNA, 22 nt, Human
uacuuccuguuuccaugucugu

SEQ ID NO: 820104 - RNA, 22 nt, Human
uuuuauagcugaauaguauucc

SEQ ID NO: 820105 - RNA, 22 nt, Human
cccaggaggcagagguuggagc

SEQ ID NO: 820106 - RNA, 22 nt, Human
uggcagagcaaaaagauagaau

SEQ ID NO: 820107 - RNA, 22 nt, Human
agaggcggagguugcagugagc

SEQ ID NO: 820108 - RNA, 22 nt, Human
ucugcaucauuuuucagagccg

SEQ ID NO: 820109 - RNA, 22 nt, Human
cggcagcucgagggccacccgu

SEQ ID NO: 820110 - RNA, 22 nt, Human
ucauuuaauagcuuuugucuuu

SEQ ID NO: 820111 - RNA, 22 nt, Human
gccacaggcacuuaagggcugg

SEQ ID NO: 820112 - RNA, 22 nt, Human
acucaggagggaucagcuauca

SEQ ID NO: 820113 - RNA, 22 nt, Human
gucuccugagacugcagucacc

SEQ ID NO: 820114 - RNA, 22 nt, Human
acagugcuggcuacaacccugg

SEQ ID NO: 820115 - RNA, 22 nt, Human
auuuaaauuuucugauggagag

SEQ ID NO: 820116 - RNA, 22 nt, Human
ggagcugugcagugacuacaga

SEQ ID NO: 820117 - RNA, 22 nt, Human
aauaucaguauauuguaucagu

SEQ ID NO: 820118 - RNA, 23 nt, Human
accaggaguugucucaggaaaca

SEQ ID NO: 820119 - RNA, 21 nt, Human
uugaaaguaaauucagcagcu

SEQ ID NO: 820120 - RNA, 22 nt, Human
uuugacauugccaauuugcuca

SEQ ID NO: 820121 - RNA, 21 nt, Human
auugaaagucaacaaucaguu

SEQ ID NO: 820122 - RNA, 22 nt, Human
uuugcaguuucauugcugaaau

SEQ ID NO: 820123 - RNA, 22 nt, Human
uagauuuuacuucugucauuac

SEQ ID NO: 820124 - RNA, 22 nt, Human
cccaggaaguggagguugcagu

SEQ ID NO: 820125 - RNA, 22 nt, Human
auuugcuugugcuaugaaaguu

SEQ ID NO: 820126 - RNA, 22 nt, Human
ucuuugcaaauguuauuaucuu

SEQ ID NO: 820127 - RNA, 22 nt, Human
ugaggcaguauuuuagugacuu

SEQ ID NO: 820128 - RNA, 22 nt, Human
uucaggauaugugauaucugaa

SEQ ID NO: 820129 - RNA, 22 nt, Human
agcaccugccugcauuggcuau

SEQ ID NO: 820130 - RNA, 22 nt, Human
aaauugcauuuuaaagguagau

SEQ ID NO: 820131 - RNA, 22 nt, Human
aagcagcuggaagaguaagaug

SEQ ID NO: 820132 - RNA, 22 nt, Human
ucaggagaaggcaauguggaaa

SEQ ID NO: 820133 - RNA, 22 nt, Human
gaggccaaguuggagaccaggu

SEQ ID NO: 820134 - RNA, 21 nt, Human
uacagaaugcgcuucagucug

SEQ ID NO: 820135 - RNA, 22 nt, Human
agcugaugccauguggaacagu

SEQ ID NO: 820136 - RNA, 22 nt, Human
cagaggcagugggguugcuccu

SEQ ID NO: 820137 - RNA, 22 nt, Human
agcugcccagauaggaggaggc

SEQ ID NO: 820138 - RNA, 19 nt, Human
ugaguucugugguucucaa

SEQ ID NO: 820139 - RNA, 18 nt, Human
agggaguuuuagggaagg

SEQ ID NO: 820140 - RNA, 19 nt, Human
ucucugcuucucuuggcau

SEQ ID NO: 820141 - RNA, 22 nt, Human
ugcugaugaguccuucuaucgc

SEQ ID NO: 820142 - RNA, 22 nt, Human
gaucuguuauaaucucuuuuau

SEQ ID NO: 820143 - RNA, 22 nt, Human
ucuucccuaaucaccaucuuca

SEQ ID NO: 820144 - RNA, 23 nt, Human
agcacacuuguacaaugcccuag

SEQ ID NO: 820145 - RNA, 22 nt, Human
ugaguaauaaacugucuugcuc

SEQ ID NO: 820146 - RNA, 22 nt, Human
gccaggaguucagaugcauguu

SEQ ID NO: 820147 - RNA, 22 nt, Human
uggaaauggaucugaugagucu

SEQ ID NO: 820148 - RNA, 22 nt, Human
cccaggauggggcugcaguuau

SEQ ID NO: 820149 - RNA, 19 nt, Human
agauggcaaaaugcaaaga

SEQ ID NO: 820150 - RNA, 22 nt, Human
aguuuucacacucaccaaaagg

SEQ ID NO: 820151 - RNA, 22 nt, Human
guucuucagcauuagaagucau

SEQ ID NO: 820152 - RNA, 22 nt, Human
caggauggucucgaucuccuga

SEQ ID NO: 820153 - RNA, 22 nt, Human
aaauuaguacauugcaaagucc

SEQ ID NO: 820154 - RNA, 22 nt, Human
cugcugugcacccaggaaggcu

SEQ ID NO: 820155 - RNA, 20 nt, Human
agggcagcuugaggagccgg

SEQ ID NO: 820156 - RNA, 22 nt, Human
acaguggagaaggcaugaggcu

SEQ ID NO: 820157 - RNA, 22 nt, Human
uaucuguuccaggcacucagcu

SEQ ID NO: 820158 - RNA, 22 nt, Human
aggccagcaagaaagagagucu

SEQ ID NO: 820159 - RNA, 21 nt, Human
uuucuuaggcucuaaaaugac

SEQ ID NO: 820160 - RNA, 23 nt, Human
cccuggaguaaauucuuggaagg

SEQ ID NO: 820161 - RNA, 19 nt, Human
caggagagcaugcacuuug

SEQ ID NO: 820162 - RNA, 22 nt, Human
cuuugcaaacugucacacuuuc

SEQ ID NO: 820163 - RNA, 22 nt, Human
cccaggaggcagagauagcagu

SEQ ID NO: 820164 - RNA, 22 nt, Human
gagguagccacagauagagacu

SEQ ID NO: 820165 - RNA, 22 nt, Human
uucagcaaauggacuguucagg

SEQ ID NO: 820166 - RNA, 22 nt, Human
gagaggggcccaagccacauag

SEQ ID NO: 820167 - RNA, 22 nt, Human
uuugacaucuaagaauucuuac

SEQ ID NO: 820168 - RNA, 22 nt, Human
ucccaggaucugagggcagaga

SEQ ID NO: 820169 - RNA, 22 nt, Human
ccucuucuagguuucagccugc

SEQ ID NO: 820170 - RNA, 22 nt, Human
ugaggcaggaaguuauauaaug

SEQ ID NO: 820171 - RNA, 22 nt, Human
aaggcagccagauccuuugggu

SEQ ID NO: 820172 - RNA, 22 nt, Human
agaggccaugcuagaggccugg

SEQ ID NO: 820173 - RNA, 22 nt, Human
cccaaggaagacgcuugugaua

SEQ ID NO: 820174 - RNA, 22 nt, Human
cauuuccacuucugaaaacugg

SEQ ID NO: 820175 - RNA, 22 nt, Human
ucucaguguguuuucucucaga

SEQ ID NO: 820176 - RNA, 22 nt, Human
cccaggaggcagaaguugcagu

SEQ ID NO: 820177 - RNA, 22 nt, Human
gagaggugaaggcugcccuggg

SEQ ID NO: 820178 - RNA, 22 nt, Human
caaauaguuuuucauguauuau

SEQ ID NO: 820179 - RNA, 20 nt, Human
auaaaauaacugccacaaga

SEQ ID NO: 820180 - RNA, 22 nt, Human
ugccaggauauaagagugcgau

SEQ ID NO: 820181 - RNA, 22 nt, Human
ccucagaugucuuaaggcacug

SEQ ID NO: 820182 - RNA, 22 nt, Human
augugaggcagcacggagauua

SEQ ID NO: 820183 - RNA, 22 nt, Human
cagcugccuucugcgggaaguc

SEQ ID NO: 820184 - RNA, 22 nt, Human
agucucugccagcuuguccucu

SEQ ID NO: 820185 - RNA, 22 nt, Human
ugaaggccuaacuuccagugcu

SEQ ID NO: 820186 - RNA, 22 nt, Human
uggagacugugcuaagggaguu

SEQ ID NO: 820187 - RNA, 23 nt, Human
aggucagcaggcaaggaaauggc

SEQ ID NO: 820188 - RNA, 22 nt, Human
uucuuucucaacaugaauguuu

SEQ ID NO: 820189 - RNA, 19 nt, Human
ucccaggaagcaaauguca

SEQ ID NO: 820190 - RNA, 22 nt, Human
ucacaaauagcuauauuaagga

SEQ ID NO: 820191 - RNA, 22 nt, Human
aguuugaaauguuggcaauauu

SEQ ID NO: 820192 - RNA, 22 nt, Human
aggaaacuccccuacaucucaa

SEQ ID NO: 820193 - RNA, 22 nt, Human
gcagaggauagcauaugaaccu

SEQ ID NO: 820194 - RNA, 22 nt, Human
aaggcagucugguuucaaagca

SEQ ID NO: 820195 - RNA, 22 nt, Human
ucagccucucugaguccagacc

SEQ ID NO: 820196 - RNA, 22 nt, Human
ugaaaugaaacagaacauauca

SEQ ID NO: 820197 - RNA, 22 nt, Human
gcccaggaagugacucagaugu

SEQ ID NO: 820198 - RNA, 22 nt, Human
uuaacauuguccuuagcagauu

SEQ ID NO: 820199 - RNA, 22 nt, Human
aucaggauguuuggcugucaua

SEQ ID NO: 820200 - RNA, 22 nt, Human
uggcagcugagugcacccccuc

SEQ ID NO: 820201 - RNA, 22 nt, Human
ugcuugaaagggguuucccagu

SEQ ID NO: 820202 - RNA, 22 nt, Human
aggaagcuccaugaaggcagag

SEQ ID NO: 820203 - RNA, 23 nt, Human
cccaggaguuucacugcaaaggu

SEQ ID NO: 820204 - RNA, 22 nt, Human
ucucucagaggaagaggcagug

SEQ ID NO: 820205 - RNA, 22 nt, Human
ggacuucuaagugccagacacu

SEQ ID NO: 820206 - RNA, 23 nt, Human
ucagucuucccugucaguaauag

SEQ ID NO: 820207 - RNA, 22 nt, Human
gggcagcugccaagugcaucgc

SEQ ID NO: 820208 - RNA, 22 nt, Human
accgaaggaaacuggaaccguu

SEQ ID NO: 820209 - RNA, 22 nt, Human
uguccauggauagagcugcucg

SEQ ID NO: 820210 - RNA, 22 nt, Human
uccuuagagauacugucuugaa

SEQ ID NO: 820211 - RNA, 22 nt, Human
ccagugcuaagguagccucugc

SEQ ID NO: 820212 - RNA, 22 nt, Human
uuuggaauuggaaagugcugug

SEQ ID NO: 820213 - RNA, 22 nt, Human
gcccaggaugguguguaguggu

SEQ ID NO: 820214 - RNA, 22 nt, Human
uacuuucuguccuucuguuaaa

SEQ ID NO: 820215 - RNA, 22 nt, Human
ucugggaaguccucugucaugc

SEQ ID NO: 820216 - RNA, 22 nt, Human
aaaacuaaauacgcuuugccuc

SEQ ID NO: 820217 - RNA, 19 nt, Human
uugaaagauuagcuuucua

SEQ ID NO: 820218 - RNA, 22 nt, Human
aaggagagagcuuugcuggaac

SEQ ID NO: 820219 - RNA, 22 nt, Human
uccauuuuagagaugaagaaac

SEQ ID NO: 820220 - RNA, 22 nt, Human
ugaaggccagggauuugcagcc

SEQ ID NO: 820221 - RNA, 22 nt, Human
uucaucaauguguuuaauaaug

SEQ ID NO: 820222 - RNA, 22 nt, Human
acagcagcuugcgugucugguc

SEQ ID NO: 820223 - RNA, 22 nt, Human
cuccccagguucaggagguggg

SEQ ID NO: 820224 - RNA, 22 nt, Human
gaaauauugggacucagagcuu

SEQ ID NO: 820225 - RNA, 22 nt, Human
aucauucuaguccuuauggucu

SEQ ID NO: 820226 - RNA, 22 nt, Human
gcaggaagcauagaagaaugcc

SEQ ID NO: 820227 - RNA, 22 nt, Human
aguuggagugaacaugagauug

SEQ ID NO: 820228 - RNA, 20 nt, Human
agcaagaguaaggacagcga

SEQ ID NO: 820229 - RNA, 22 nt, Human
uuccaagagcuuuaauuguuga

SEQ ID NO: 820230 - RNA, 22 nt, Human
ggugguggagccagcugggagu

SEQ ID NO: 820231 - RNA, 22 nt, Human
acaaauguggacauggauaaug

SEQ ID NO: 820232 - RNA, 22 nt, Human
gagggagucugugcaaagaauu

SEQ ID NO: 820233 - RNA, 22 nt, Human
ucugcuguucauucuuuuagcu

SEQ ID NO: 820234 - RNA, 22 nt, Human
aggugagggugccagugcaugg

SEQ ID NO: 820235 - RNA, 22 nt, Human
aggacagcccuugagagcacau

SEQ ID NO: 820236 - RNA, 22 nt, Human
aaagcagacugauuugcaucac

SEQ ID NO: 820237 - RNA, 22 nt, Human
gaggcaguuccugagugacaag

SEQ ID NO: 820238 - RNA, 22 nt, Human
auucuucagaauaucuggcacu

SEQ ID NO: 820239 - RNA, 22 nt, Human
uugcugaaguuaaugcuugcaa

SEQ ID NO: 820240 - RNA, 21 nt, Human
augucaaaugcuuuauuuuau

SEQ ID NO: 820241 - RNA, 22 nt, Human
cuuuccaagaaugcagauaccu

SEQ ID NO: 820242 - RNA, 21 nt, Human
uggagacucugguucuuugug

SEQ ID NO: 820243 - RNA, 22 nt, Human
cccuggagguggagguugcagg

SEQ ID NO: 820244 - RNA, 22 nt, Human
cacaaaugguuguagacauuaa

SEQ ID NO: 820245 - RNA, 22 nt, Human
cccauucauccucgcuuccuuc

SEQ ID NO: 820246 - RNA, 22 nt, Human
gaagcacauggcuauagcuauu

SEQ ID NO: 820247 - RNA, 22 nt, Human
cugucauugagccugucagggc

SEQ ID NO: 820248 - RNA, 22 nt, Human
cccaggcagugugugcaugcgu

SEQ ID NO: 820249 - RNA, 22 nt, Human
uucacagaugccugaugugugg

SEQ ID NO: 820250 - RNA, 22 nt, Human
agccagcuguucuggggcagca

SEQ ID NO: 820251 - RNA, 22 nt, Human
uuuccauguuggugaaaugagg

SEQ ID NO: 820252 - RNA, 22 nt, Human
uuugaaaggagcuuuauccaga

SEQ ID NO: 820253 - RNA, 22 nt, Human
aggagagggguaggauuaauuu

SEQ ID NO: 820254 - RNA, 22 nt, Human
auguuucaccaguuuuauaaga

SEQ ID NO: 820255 - RNA, 22 nt, Human
uccuucuuucccccuagucauu

SEQ ID NO: 820256 - RNA, 22 nt, Human
gccaggagaaugcuagcagagg

SEQ ID NO: 820257 - RNA, 22 nt, Human
gaggaggcacuugagcagaugu

SEQ ID NO: 820258 - RNA, 22 nt, Human
uugaaaguagcagcugcauaug

SEQ ID NO: 820259 - RNA, 22 nt, Human
caggcaggucagugaagaagga

SEQ ID NO: 820260 - RNA, 22 nt, Human
auacuguuuugugacuuaucuu

SEQ ID NO: 820261 - RNA, 19 nt, Human
uucacaauuaugaaauuag

SEQ ID NO: 820262 - RNA, 22 nt, Human
guucucucugcuuccaagaugg

SEQ ID NO: 820263 - RNA, 22 nt, Human
uuuucaguuccaucucugcucu

SEQ ID NO: 820264 - RNA, 23 nt, Human
ucuugaaaagccuacagcaguuc

SEQ ID NO: 820265 - RNA, 22 nt, Human
uacucagagucauugcccuucu

SEQ ID NO: 820266 - RNA, 22 nt, Human
ugaaggccagcucuuuaucagc

SEQ ID NO: 820267 - RNA, 22 nt, Human
cugcagagcaaguaacauccuc

SEQ ID NO: 820268 - RNA, 18 nt, Human
ggcagggaaaagauaggg

SEQ ID NO: 820269 - RNA, 22 nt, Human
uggagagguuuaaacaaaaguu

SEQ ID NO: 820270 - RNA, 22 nt, Human
cagcaggauaugguggagagag

SEQ ID NO: 820271 - RNA, 22 nt, Human
uauguuauuuucauacaacaga

SEQ ID NO: 820272 - RNA, 22 nt, Human
cuggcagucugccucuucacug

SEQ ID NO: 820273 - RNA, 22 nt, Human
gggcagcucugcccaucagagg

SEQ ID NO: 820274 - RNA, 23 nt, Human
acuauaaaguuguucugauuuac

SEQ ID NO: 820275 - RNA, 22 nt, Human
aaagcagagguugcagugagcu

SEQ ID NO: 820276 - RNA, 17 nt, Human
caaggccagcaucuuca

SEQ ID NO: 820277 - RNA, 22 nt, Human
acccaggauaaucuguguaucu

SEQ ID NO: 820278 - RNA, 22 nt, Human
cugccaggcagcagagggagaa

SEQ ID NO: 820279 - RNA, 22 nt, Human
uauuuccaagcugaauccaaug

SEQ ID NO: 820280 - RNA, 22 nt, Human
uucuucaguguagcaacuguau

SEQ ID NO: 820281 - RNA, 22 nt, Human
agucugucugucacuucugcag

SEQ ID NO: 820282 - RNA, 22 nt, Human
ccuggagaccagaggauacuuc

SEQ ID NO: 820283 - RNA, 22 nt, Human
accaggagucuagccuagucaa

SEQ ID NO: 820284 - RNA, 22 nt, Human
gggagacacgcugcaggcauaa

SEQ ID NO: 820285 - RNA, 22 nt, Human
ccccaggagcuuguuuuagaga

SEQ ID NO: 820286 - RNA, 22 nt, Human
acuucuucuucagcugggggau

SEQ ID NO: 820287 - RNA, 22 nt, Human
gagagguccauuccccugucag

SEQ ID NO: 820288 - RNA, 22 nt, Human
caggcagcuagauuuauaacaa

SEQ ID NO: 820289 - RNA, 22 nt, Human
cagugucuccagaugcuccaau

SEQ ID NO: 820290 - RNA, 22 nt, Human
ggaggagggguuuacauuggaa

SEQ ID NO: 820291 - RNA, 22 nt, Human
ucugggaagcugguccuguucu

SEQ ID NO: 820292 - RNA, 22 nt, Human
uuugaauagaggccccucagaa

SEQ ID NO: 820293 - RNA, 22 nt, Human
cuuaaauuuucaucuacaagaa

SEQ ID NO: 820294 - RNA, 22 nt, Human
gucaggaucucccaguacauau

SEQ ID NO: 820295 - RNA, 22 nt, Human
cugggaaauggcuucgagcuca

SEQ ID NO: 820296 - RNA, 22 nt, Human
agcuucccaagguuggaagguu

SEQ ID NO: 820297 - RNA, 22 nt, Human
uggucuuuaagguagcugucau

SEQ ID NO: 820298 - RNA, 22 nt, Human
cuacccaggcuuagagggcugg

SEQ ID NO: 820299 - RNA, 22 nt, Human
uugcaggaaacugagugugagc

SEQ ID NO: 820300 - RNA, 22 nt, Human
uagugcuuuaaguuuacagaga

SEQ ID NO: 820301 - RNA, 22 nt, Human
gaagcagcugccagagaugucu

SEQ ID NO: 820302 - RNA, 22 nt, Human
uaauuauuaugacaacaauugc

SEQ ID NO: 820303 - RNA, 22 nt, Human
auaguuugaaggcuguucuacu

SEQ ID NO: 820304 - RNA, 22 nt, Human
uugcuucaguagcucuuuaaag

SEQ ID NO: 820305 - RNA, 22 nt, Human
accauccugaaaccuucaugcu

SEQ ID NO: 820306 - RNA, 22 nt, Human
uuuggaauauuaaaaugucuca

SEQ ID NO: 820307 - RNA, 22 nt, Human
ucuaaccuuugaaacugcuuuc

SEQ ID NO: 820308 - RNA, 22 nt, Human
gcauguguggaggagaugugcu

SEQ ID NO: 820309 - RNA, 22 nt, Human
ccaggaaauagugcugugaucu

SEQ ID NO: 820310 - RNA, 22 nt, Human
aauauaauuuuauuccuagagu

SEQ ID NO: 820311 - RNA, 22 nt, Human
gcucaggagcucuugguggcgc

SEQ ID NO: 820312 - RNA, 18 nt, Human
gcagcuagccaggggggc

SEQ ID NO: 820313 - RNA, 22 nt, Human
ggauggcauguugggcucuguu

SEQ ID NO: 820314 - RNA, 22 nt, Human
ucuuagcauuucauaacaacug

SEQ ID NO: 820315 - RNA, 22 nt, Human
cccaggagguguagcugcgugg

SEQ ID NO: 820316 - RNA, 22 nt, Human
uucuccagagggcucugcagga

SEQ ID NO: 820317 - RNA, 20 nt, Human
aucuucuuggccagcuugcu

SEQ ID NO: 820318 - RNA, 22 nt, Human
uucucagaugauucagauaaac

SEQ ID NO: 820319 - RNA, 22 nt, Human
aaagcagauucugaugcaguag

SEQ ID NO: 820320 - RNA, 22 nt, Human
auugaaagauuuugggcucaug

SEQ ID NO: 820321 - RNA, 21 nt, Human
ucugagagcaacugcccuuua

SEQ ID NO: 820322 - RNA, 22 nt, Human
caguucuuauuuggccaguguc

SEQ ID NO: 820323 - RNA, 21 nt, Human
aaauacagaaacuuguuuuca

SEQ ID NO: 820324 - RNA, 22 nt, Human
aucuugcauuugcuaaaaugca

SEQ ID NO: 820325 - RNA, 22 nt, Human
uagggcaggugaagaaaagcua

SEQ ID NO: 820326 - RNA, 22 nt, Human
acucaggaauggggcugggacu

SEQ ID NO: 820327 - RNA, 23 nt, Human
gggcagcuuaagcuuguuuuucu

SEQ ID NO: 820328 - RNA, 22 nt, Human
uucucacuauguauguagauug

SEQ ID NO: 820329 - RNA, 22 nt, Human
uuucaguuguccuguuaauagc

SEQ ID NO: 820330 - RNA, 22 nt, Human
cccaggaaaagcagugccagca

SEQ ID NO: 820331 - RNA, 22 nt, Human
gaggucaggggagaggcugaug

SEQ ID NO: 820332 - RNA, 22 nt, Human
ucaguucugcuagaaaaacagu

SEQ ID NO: 820333 - RNA, 22 nt, Human
uuccagcaggcagacaggagau

SEQ ID NO: 820334 - RNA, 22 nt, Human
cagcuguggcugccacugcucc

SEQ ID NO: 820335 - RNA, 22 nt, Human
auucuuauuauaguaaaacagu

SEQ ID NO: 820336 - RNA, 19 nt, Human
uucuccaggcugcagaggg

SEQ ID NO: 820337 - RNA, 22 nt, Human
agcugcccagcuaggaagaagg

SEQ ID NO: 820338 - RNA, 22 nt, Human
uccaggagcauccaggugaagc

SEQ ID NO: 820339 - RNA, 22 nt, Human
uucucagagcacugcugacaaa

SEQ ID NO: 820340 - RNA, 22 nt, Human
acauuucuaguuguucaucucc

SEQ ID NO: 820341 - RNA, 22 nt, Human
caggauggucuucauuuggcuc

SEQ ID NO: 820342 - RNA, 22 nt, Human
cugugauuguuaguuccuauac

SEQ ID NO: 820343 - RNA, 22 nt, Human
gggcagcugccagaggccaugg

SEQ ID NO: 820344 - RNA, 22 nt, Human
aaaauuauagaucuagugccug

SEQ ID NO: 820345 - RNA, 22 nt, Human
aucaggaucugggagccugaaa

SEQ ID NO: 820346 - RNA, 20 nt, Human
aggaagcugagauguagagg

SEQ ID NO: 820347 - RNA, 22 nt, Human
gcauguguugguuuaugcaugu

SEQ ID NO: 820348 - RNA, 22 nt, Human
uuugaaagccuggcuuuucucu

SEQ ID NO: 820349 - RNA, 22 nt, Human
ccaugagcuuccuauauagggu

SEQ ID NO: 820350 - RNA, 22 nt, Human
cugcuuuggacaacuauucuug

SEQ ID NO: 820351 - RNA, 22 nt, Human
aguggcagagguugacugcagu

SEQ ID NO: 820352 - RNA, 22 nt, Human
aggcaggcuggucugaagagug

SEQ ID NO: 820353 - RNA, 18 nt, Human
ccucagggagagagacgc

SEQ ID NO: 820354 - RNA, 22 nt, Human
auugaggcagcauaguucaggg

SEQ ID NO: 820355 - RNA, 22 nt, Human
augcugugcuggcuaaccaugg

SEQ ID NO: 820356 - RNA, 22 nt, Human
agcucccagagcucgagaguaa

SEQ ID NO: 820357 - RNA, 21 nt, Human
uccaggaguggcugggcaggg

SEQ ID NO: 820358 - RNA, 22 nt, Human
aucaggauuauuaaaucuggau

SEQ ID NO: 820359 - RNA, 22 nt, Human
gaggucaggcuugcagcagggu

SEQ ID NO: 820360 - RNA, 22 nt, Human
ugaaaugauaucugauaacaaa

SEQ ID NO: 820361 - RNA, 22 nt, Human
auguggaggaaaugaguguaca

SEQ ID NO: 820362 - RNA, 22 nt, Human
uucuucuucauuucugacgaug

SEQ ID NO: 820363 - RNA, 22 nt, Human
caggagaggcuguacguuucuc

SEQ ID NO: 820364 - RNA, 22 nt, Human
agaggacagacggaaagugcca

SEQ ID NO: 820365 - RNA, 22 nt, Human
ggauggagguucucagaugcuc

SEQ ID NO: 820366 - RNA, 22 nt, Human
uugcauuugaucuuggguucuc

SEQ ID NO: 820367 - RNA, 22 nt, Human
aucauuucccuuuagaucacaa

SEQ ID NO: 820368 - RNA, 19 nt, Human
caggaugaucccaugacac

SEQ ID NO: 820369 - RNA, 22 nt, Human
cucacugacgaggaagcugaga

SEQ ID NO: 820370 - RNA, 22 nt, Human
uucaugugaauauauuugucuu

SEQ ID NO: 820371 - RNA, 22 nt, Human
gaaggaggugucaguuggacug

SEQ ID NO: 820372 - RNA, 22 nt, Human
ugaguucucacccauucuucuu

SEQ ID NO: 820373 - RNA, 22 nt, Human
gcagagcuccccaagacaccaa

SEQ ID NO: 820374 - RNA, 22 nt, Human
ugaggggagacagaguggacuc

SEQ ID NO: 820375 - RNA, 22 nt, Human
ccagugcuuccaggaauacggu

SEQ ID NO: 820376 - RNA, 22 nt, Human
acaggagaaaucuggucaaaag

SEQ ID NO: 820377 - RNA, 22 nt, Human
uuucaaaauuuugcagugguaa

SEQ ID NO: 820378 - RNA, 22 nt, Human
ucucucuucaacccuuaacuag

SEQ ID NO: 820379 - RNA, 22 nt, Human
ugaaucugauuucccuggaggc

SEQ ID NO: 820380 - RNA, 22 nt, Human
agcuaccuggcuuaucacuguc

SEQ ID NO: 820381 - RNA, 22 nt, Human
cagcaggauuugaaaggaagag

SEQ ID NO: 820382 - RNA, 22 nt, Human
uaagauaaguggguugagaugg

SEQ ID NO: 820383 - RNA, 22 nt, Human
augcuuuuaugucacaugguca

SEQ ID NO: 820384 - RNA, 22 nt, Human
cagugauguuucugcaucagag

SEQ ID NO: 820385 - RNA, 22 nt, Human
cuugcuggugguguuuucuaug

SEQ ID NO: 820386 - RNA, 22 nt, Human
gcccaggauggagaauaguggu

SEQ ID NO: 820387 - RNA, 22 nt, Human
ucagauggcacacagagccugc

SEQ ID NO: 820388 - RNA, 22 nt, Human
cuuuggcagccucugcuauuga

SEQ ID NO: 820389 - RNA, 22 nt, Human
cagugcugggcagaggagagcg

SEQ ID NO: 820390 - RNA, 22 nt, Human
gauguuucaugcuagcaugugu

SEQ ID NO: 820391 - RNA, 22 nt, Human
gaaacugugaucguguucuggg

SEQ ID NO: 820392 - RNA, 22 nt, Human
gaggagcugggucagggagaca

SEQ ID NO: 820393 - RNA, 21 nt, Human
gcaaauguucaggaaaaaaga

SEQ ID NO: 820394 - RNA, 22 nt, Human
guugaaaguagaugcuauuugg

SEQ ID NO: 820395 - RNA, 22 nt, Human
cuuagcaugugguguccuugua

SEQ ID NO: 820396 - RNA, 22 nt, Human
agagugucugguagcugcucug

SEQ ID NO: 820397 - RNA, 22 nt, Human
ucauuucaaguucugacagcua

SEQ ID NO: 820398 - RNA, 22 nt, Human
uauuuguauguguguacauaua

SEQ ID NO: 820399 - RNA, 22 nt, Human
uuugacauggaauaacucauuu

SEQ ID NO: 820400 - RNA, 22 nt, Human
uucuuuuacauuaagauuucag

SEQ ID NO: 820401 - RNA, 22 nt, Human
agagggauggccccguaacuca

SEQ ID NO: 820402 - RNA, 22 nt, Human
cagagaaaaaauccugcucuca

SEQ ID NO: 820403 - RNA, 22 nt, Human
acaguuaucuuugaaauagaga

SEQ ID NO: 820404 - RNA, 17 nt, Human
uggcagcugaaagcucu

SEQ ID NO: 820405 - RNA, 22 nt, Human
gcagcugagagaagaacagggc

SEQ ID NO: 820406 - RNA, 22 nt, Human
uaauuauuugaagacauuagag

SEQ ID NO: 820407 - RNA, 22 nt, Human
auuucacucauucauguuacuu

SEQ ID NO: 820408 - RNA, 22 nt, Human
agacaggcagaggcugcagagg

SEQ ID NO: 820409 - RNA, 22 nt, Human
ugaaggcccuaucuccauauac

SEQ ID NO: 820410 - RNA, 22 nt, Human
acaacauuauacauagaaagcu

SEQ ID NO: 820411 - RNA, 22 nt, Human
ucaggagaaaauaucaggaagu

SEQ ID NO: 820412 - RNA, 19 nt, Human
uucccaggaaaggggugca

SEQ ID NO: 820413 - RNA, 22 nt, Human
acuggcagagacccugauggcc

SEQ ID NO: 820414 - RNA, 22 nt, Human
aguugcagacgcagagauguug

SEQ ID NO: 820415 - RNA, 22 nt, Human
gggcagcuguaucugagcuuau

SEQ ID NO: 820416 - RNA, 22 nt, Human
agucucugcugguugugccuau

SEQ ID NO: 820417 - RNA, 22 nt, Human
auucuucaccugagucagucua

SEQ ID NO: 820418 - RNA, 22 nt, Human
ggcagcuaggggcagggaauuc

SEQ ID NO: 820419 - RNA, 22 nt, Human
agcuagccuaggcagagugcau

SEQ ID NO: 820420 - RNA, 22 nt, Human
uccagccuaggggaacagcugc

SEQ ID NO: 820421 - RNA, 20 nt, Human
uuucugugagaaacacuguu

SEQ ID NO: 820422 - RNA, 22 nt, Human
auuaaauuggaucugcauaguu

SEQ ID NO: 820423 - RNA, 22 nt, Human
gucauauacacugcauguaauc

SEQ ID NO: 820424 - RNA, 22 nt, Human
caucacccggaacugugucugc

SEQ ID NO: 820425 - RNA, 22 nt, Human
uccugaggcucacuuugaaugu

SEQ ID NO: 820426 - RNA, 22 nt, Human
agcugaaagugcuuugaggacu

SEQ ID NO: 820427 - RNA, 19 nt, Human
caagugaagccugggaugg

SEQ ID NO: 820428 - RNA, 22 nt, Human
ucuucauuuuauagcaucugug

SEQ ID NO: 820429 - RNA, 22 nt, Human
uccaggagggggagccgugccg

SEQ ID NO: 820430 - RNA, 22 nt, Human
uuaauuaaauucaugagcauug

SEQ ID NO: 820431 - RNA, 21 nt, Human
cucaggaucuuauauauuagu

SEQ ID NO: 820432 - RNA, 22 nt, Human
agacucaagacugcagaagacg

SEQ ID NO: 820433 - RNA, 21 nt, Human
ucucugugucuuuaagcugga

SEQ ID NO: 820434 - RNA, 22 nt, Human
agucucugucguagaucagcgu

SEQ ID NO: 820435 - RNA, 22 nt, Human
gggcacagaagucuaagacauc

SEQ ID NO: 820436 - RNA, 22 nt, Human
gcauucuuuuuaggagguuccu

SEQ ID NO: 820437 - RNA, 22 nt, Human
acacaaugcauauuuuuccaga

SEQ ID NO: 820438 - RNA, 21 nt, Human
acucaggagacuaacuauguc

SEQ ID NO: 820439 - RNA, 22 nt, Human
cacaugugugcugaggacugug

SEQ ID NO: 820440 - RNA, 22 nt, Human
acauucuuaacaguuaaaaacu

SEQ ID NO: 820441 - RNA, 22 nt, Human
uucuuaaaacuuauggacaggu

SEQ ID NO: 820442 - RNA, 22 nt, Human
agaggggaguccuaaucugauu

SEQ ID NO: 820443 - RNA, 21 nt, Human
ggauggauagggaagagauuu

SEQ ID NO: 820444 - RNA, 22 nt, Human
cagcagagaccaagugauuuga

SEQ ID NO: 820445 - RNA, 22 nt, Human
aggcagccaaucagaggcugac

SEQ ID NO: 820446 - RNA, 22 nt, Human
aaggaaccuggaguagagggag

SEQ ID NO: 820447 - RNA, 19 nt, Human
gacagugcaguuguaguac

SEQ ID NO: 820448 - RNA, 22 nt, Human
ucucaggaagugauauugagac

SEQ ID NO: 820449 - RNA, 22 nt, Human
cuagggaguggcagagcuggga

SEQ ID NO: 820450 - RNA, 17 nt, Human
cucacggaggaugaauc

SEQ ID NO: 820451 - RNA, 22 nt, Human
auucauuugcuauuguguaugg

SEQ ID NO: 820452 - RNA, 21 nt, Human
cgcagagcgaacuugcggcgc

SEQ ID NO: 820453 - RNA, 22 nt, Human
aggcacaggaaugucauccagu

SEQ ID NO: 820454 - RNA, 19 nt, Human
uggagggguuugaaugugg

SEQ ID NO: 820455 - RNA, 22 nt, Human
ucagggugaaccaggcaggaau

SEQ ID NO: 820456 - RNA, 23 nt, Human
aggcagcagguuguccaggguga

SEQ ID NO: 820457 - RNA, 22 nt, Human
uuaguuuucccaucuuuauggu

SEQ ID NO: 820458 - RNA, 22 nt, Human
cagcuacuccucccaugacuuc

SEQ ID NO: 820459 - RNA, 22 nt, Human
auugaaagauaggcuacugugg

SEQ ID NO: 820460 - RNA, 22 nt, Human
cauuuguaucauauguaucuua

SEQ ID NO: 820461 - RNA, 22 nt, Human
cagcugccccuccagggcuggg

SEQ ID NO: 820462 - RNA, 22 nt, Human
aaauacuagaauucagaguuga

SEQ ID NO: 820463 - RNA, 22 nt, Human
agggagcuuccgaacuacagcu

SEQ ID NO: 820464 - RNA, 23 nt, Human
gaggcacucaggaaaugugagug

SEQ ID NO: 820465 - RNA, 22 nt, Human
agaggccacuuugccugugaug

SEQ ID NO: 820466 - RNA, 22 nt, Human
uucuucaauuuuccauauacug

SEQ ID NO: 820467 - RNA, 22 nt, Human
uucauucuugucuuuguauagu

SEQ ID NO: 820468 - RNA, 19 nt, Human
uggagaggaaaugcugcuc

SEQ ID NO: 820469 - RNA, 22 nt, Human
aggaugaauaacugaaauggug

SEQ ID NO: 820470 - RNA, 22 nt, Human
cccaggagguggagcuugcagu

SEQ ID NO: 820471 - RNA, 22 nt, Human
uuugaaaucuaaucaaggaaca

SEQ ID NO: 820472 - RNA, 22 nt, Human
uguaggccuauguccagcaauu

SEQ ID NO: 820473 - RNA, 22 nt, Human
cugcugugacagcugccguguu

SEQ ID NO: 820474 - RNA, 22 nt, Human
aucuuucaaucaggaaaaaucu

SEQ ID NO: 820475 - RNA, 22 nt, Human
cucccaggggaacuaucaagua

SEQ ID NO: 820476 - RNA, 22 nt, Human
gauugaaacauaggcagucgag

SEQ ID NO: 820477 - RNA, 22 nt, Human
ucaaucacguguuccauguucu

SEQ ID NO: 820478 - RNA, 22 nt, Human
uacugccuggagcauuggugcu

SEQ ID NO: 820479 - RNA, 22 nt, Human
gacuucuauuaauaccucuacu

SEQ ID NO: 820480 - RNA, 22 nt, Human
ucuggcaggucaaucauucuuu

SEQ ID NO: 820481 - RNA, 22 nt, Human
ccaggagaaugggauuacccua

SEQ ID NO: 820482 - RNA, 22 nt, Human
caguggagagacuuuuacucuu

SEQ ID NO: 820483 - RNA, 19 nt, Human
uuugcagugguuccuuugu

SEQ ID NO: 820484 - RNA, 22 nt, Human
cagaggaguucaguacacagcc

SEQ ID NO: 820485 - RNA, 22 nt, Human
ucaggagggugacaggcccugg

SEQ ID NO: 820486 - RNA, 22 nt, Human
agaggggaaguaaugaaugaua

SEQ ID NO: 820487 - RNA, 22 nt, Human
uuugaaaguucuucugacacua

SEQ ID NO: 820488 - RNA, 22 nt, Human
aaggcaguagguguuucaaacu

SEQ ID NO: 820489 - RNA, 22 nt, Human
ugaaaugacagucuuaagcucu

SEQ ID NO: 820490 - RNA, 22 nt, Human
gaggcagcugggcuggugguuu

SEQ ID NO: 820491 - RNA, 22 nt, Human
auugcuguaaauuaucuuauua

SEQ ID NO: 820492 - RNA, 22 nt, Human
ugccuggauucgguuguuguca

SEQ ID NO: 820493 - RNA, 22 nt, Human
agaggccggccgagcccauggg

SEQ ID NO: 820494 - RNA, 21 nt, Human
uuagaaagcucacuacaguua

SEQ ID NO: 820495 - RNA, 22 nt, Human
uuucacagcuggguggcagagu

SEQ ID NO: 820496 - RNA, 22 nt, Human
aggcagugccuggaccccagcu

SEQ ID NO: 820497 - RNA, 22 nt, Human
uucuuacagaguuuacagagcc

SEQ ID NO: 820498 - RNA, 22 nt, Human
uaccauuucauucuuuccucau

SEQ ID NO: 820499 - RNA, 22 nt, Human
acuguagcugccacuggaugca

SEQ ID NO: 820500 - RNA, 23 nt, Human
agaugaggcuucuccauguuggu

SEQ ID NO: 820501 - RNA, 20 nt, Human
ucauuucuugggguuccaag

SEQ ID NO: 820502 - RNA, 21 nt, Human
acagcaagccuucacaugagu

SEQ ID NO: 820503 - RNA, 22 nt, Human
gccaggagccagcuucuuagca

SEQ ID NO: 820504 - RNA, 22 nt, Human
ucugggaacacacgucacuuca

SEQ ID NO: 820505 - RNA, 22 nt, Human
cuugcuucauuagugucuuagu

SEQ ID NO: 820506 - RNA, 19 nt, Human
uagaggagaagggaagugg

SEQ ID NO: 820507 - RNA, 22 nt, Human
gaggccagggaugcaaugagag

SEQ ID NO: 820508 - RNA, 22 nt, Human
gcagaggcuguagggaagguug

SEQ ID NO: 820509 - RNA, 21 nt, Human
cacucaggguaugugccaggc

SEQ ID NO: 820510 - RNA, 22 nt, Human
guuugcauauuugcacaggaau

SEQ ID NO: 820511 - RNA, 22 nt, Human
gucauucuuaacaacucaguag

SEQ ID NO: 820512 - RNA, 22 nt, Human
cauuuguaguuaaaaaugucuc

SEQ ID NO: 820513 - RNA, 22 nt, Human
gauuucuugauaaguaguguga

SEQ ID NO: 820514 - RNA, 22 nt, Human
uguacauacauagauauacaca

SEQ ID NO: 820515 - RNA, 22 nt, Human
ugcccaggguuucuaagagcag

SEQ ID NO: 820516 - RNA, 22 nt, Human
uaaggccagcaugaaugcagca

SEQ ID NO: 820517 - RNA, 22 nt, Human
gcagaggccuagguggaaggcc

SEQ ID NO: 820518 - RNA, 21 nt, Human
ucucugguuggaguugugcca

SEQ ID NO: 820519 - RNA, 22 nt, Human
uuugaagugggcauuagaaccu

SEQ ID NO: 820520 - RNA, 22 nt, Human
acauauauuacuaguaaagaca

SEQ ID NO: 820521 - RNA, 22 nt, Human
uuauuuaaaagugguaagauuc

SEQ ID NO: 820522 - RNA, 22 nt, Human
gacccaggguauccagagcugc

SEQ ID NO: 820523 - RNA, 22 nt, Human
cucuccucagaacaggcccucu

SEQ ID NO: 820524 - RNA, 22 nt, Human
ccuccucugggaagauucagag

SEQ ID NO: 820525 - RNA, 19 nt, Human
cuuugucagaacaugcuuc

SEQ ID NO: 820526 - RNA, 22 nt, Human
aaggccagcuuguagggcuggu

SEQ ID NO: 820527 - RNA, 22 nt, Human
uuugaaagucaaccuuccaguu

SEQ ID NO: 820528 - RNA, 22 nt, Human
ggagcuguucaggacugcuuca

SEQ ID NO: 820529 - RNA, 22 nt, Human
cuggaguuagaguagacacuga

SEQ ID NO: 820530 - RNA, 22 nt, Human
uauuuuaaagugaagggucuug

SEQ ID NO: 820531 - RNA, 22 nt, Human
uccaugagcuagcuuuccaaag

SEQ ID NO: 820532 - RNA, 22 nt, Human
ccugccugcaccuucucugggg

SEQ ID NO: 820533 - RNA, 22 nt, Human
auauucuugugauuauaaagua

SEQ ID NO: 820534 - RNA, 22 nt, Human
gucuucuuguuuugaaggaaau

SEQ ID NO: 820535 - RNA, 22 nt, Human
aucuuucaguuucauaccaauu

SEQ ID NO: 820536 - RNA, 22 nt, Human
aggccagccucaggcagggacc

SEQ ID NO: 820537 - RNA, 22 nt, Human
uggaaggaagccaaggaagguu

SEQ ID NO: 820538 - RNA, 22 nt, Human
cugcugugccuuaaaaugcaag

SEQ ID NO: 820539 - RNA, 21 nt, Human
agcagaggcugccuggugacu

SEQ ID NO: 820540 - RNA, 22 nt, Human
ucauuuguugaacuuuagugcg

SEQ ID NO: 820541 - RNA, 22 nt, Human
accaggaggcuacacuguccca

SEQ ID NO: 820542 - RNA, 22 nt, Human
acccaggacaugggcacccgug

SEQ ID NO: 820543 - RNA, 22 nt, Human
gcuguucucuguaacaugcauu

SEQ ID NO: 820544 - RNA, 22 nt, Human
gucaggaugacaagugcuuuca

SEQ ID NO: 820545 - RNA, 22 nt, Human
cuggcuguauuaguuugauccu

SEQ ID NO: 820546 - RNA, 22 nt, Human
gaggcagagaccuucaggaccu

SEQ ID NO: 820547 - RNA, 22 nt, Human
aaggcagccgugugacugcaug

SEQ ID NO: 820548 - RNA, 22 nt, Human
ucauuucccuccuacaaagagg

SEQ ID NO: 820549 - RNA, 22 nt, Human
caguuuuugccauuaagaguaa

SEQ ID NO: 820550 - RNA, 22 nt, Human
auggagggugguaagacagaga

SEQ ID NO: 820551 - RNA, 22 nt, Human
aggcagacucaauggcuagaua

SEQ ID NO: 820552 - RNA, 20 nt, Human
agacaggagcccccauucag

SEQ ID NO: 820553 - RNA, 22 nt, Human
gaggauggaggugugagcuaug

SEQ ID NO: 820554 - RNA, 22 nt, Human
uucaugcuuuuaccgcuguuaa

SEQ ID NO: 820555 - RNA, 22 nt, Human
ucucugguuauuaacuaacucc

SEQ ID NO: 820556 - RNA, 22 nt, Human
uuaggaguccagaugucuuggg

SEQ ID NO: 820557 - RNA, 23 nt, Human
aggcccaacucugugagggcugc

SEQ ID NO: 820558 - RNA, 22 nt, Human
aucaggaucacugggagucuug

SEQ ID NO: 820559 - RNA, 22 nt, Human
uucuuaacuggaaaaugucaga

SEQ ID NO: 820560 - RNA, 22 nt, Human
auuguauaacagcauguauuuu

SEQ ID NO: 820561 - RNA, 22 nt, Human
uuacaagcagcuacauaucaca

SEQ ID NO: 820562 - RNA, 22 nt, Human
ugaggcaggacugagcgggaug

SEQ ID NO: 820563 - RNA, 22 nt, Human
uuugaaaggugucgagaugugu

SEQ ID NO: 820564 - RNA, 22 nt, Human
gucuccugagccuugacugcaa

SEQ ID NO: 820565 - RNA, 22 nt, Human
uuauuucauugauuucuaagac

SEQ ID NO: 820566 - RNA, 22 nt, Human
uucagcaagaccaccauguacc

SEQ ID NO: 820567 - RNA, 22 nt, Human
guguugaugacauuuuagaaac

SEQ ID NO: 820568 - RNA, 22 nt, Human
ggggcagcuaccggaaguaggg

SEQ ID NO: 820569 - RNA, 19 nt, Human
caggaaugagguaauggcu

SEQ ID NO: 820570 - RNA, 22 nt, Human
gcugcugucacggugcuaaggg

SEQ ID NO: 820571 - RNA, 22 nt, Human
gacagaggcuggagcaccuccu

SEQ ID NO: 820572 - RNA, 22 nt, Human
ggaggggauuuaguagaugcua

SEQ ID NO: 820573 - RNA, 22 nt, Human
uccaggagauucauuaggucau

SEQ ID NO: 820574 - RNA, 22 nt, Human
uagggcaggggaggaaucugaa

SEQ ID NO: 820575 - RNA, 22 nt, Human
aguuucuuuagauagaaaguuc

SEQ ID NO: 820576 - RNA, 18 nt, Human
uuugcaaaggaaguaugg

SEQ ID NO: 820577 - RNA, 22 nt, Human
uugauagguuuuauguauaguu

SEQ ID NO: 820578 - RNA, 22 nt, Human
ggagaggggcaaguuuaucuag

SEQ ID NO: 820579 - RNA, 22 nt, Human
aaauuauucucauguguuucuu

SEQ ID NO: 820580 - RNA, 22 nt, Human
gcagcugcaauaggcaucaagc

SEQ ID NO: 820581 - RNA, 22 nt, Human
aacacugcugcuggguucugug

SEQ ID NO: 820582 - RNA, 22 nt, Human
ccaggagaugggagcaucuaaa

SEQ ID NO: 820583 - RNA, 22 nt, Human
uuucaucuucccagagaccuug

SEQ ID NO: 820584 - RNA, 22 nt, Human
uaaacauuuguuauucuuguuu

SEQ ID NO: 820585 - RNA, 22 nt, Human
ucuucaauuagauuuaccaauu

SEQ ID NO: 820586 - RNA, 19 nt, Human
ccauggagagagaugcauu

SEQ ID NO: 820587 - RNA, 22 nt, Human
gaagcagcagcuggggacaguu

SEQ ID NO: 820588 - RNA, 22 nt, Human
ggcagcucacgggcauggggug

SEQ ID NO: 820589 - RNA, 22 nt, Human
cuucugagcagaccuccugggg

SEQ ID NO: 820590 - RNA, 22 nt, Human
aggcagauauuggggugaugug

SEQ ID NO: 820591 - RNA, 23 nt, Human
uuccagaguccacaucugccacc

SEQ ID NO: 820592 - RNA, 20 nt, Human
cucaggauugucuagccccu

SEQ ID NO: 820593 - RNA, 22 nt, Human
ggcugaaggaugaaagcugcag

SEQ ID NO: 820594 - RNA, 22 nt, Human
acaggacuguggaaggaucucu

SEQ ID NO: 820595 - RNA, 22 nt, Human
aggcacaguuucauccccgggc

SEQ ID NO: 820596 - RNA, 22 nt, Human
cuccaggaaagccugaggcccg

SEQ ID NO: 820597 - RNA, 22 nt, Human
uccaugagagguaacuuuacaa

SEQ ID NO: 820598 - RNA, 22 nt, Human
auuggcaguuagugacgaggcu

SEQ ID NO: 820599 - RNA, 22 nt, Human
agucuuuccugcuugacuguuc

SEQ ID NO: 820600 - RNA, 22 nt, Human
uugacaauguccuuugaauuuc

SEQ ID NO: 820601 - RNA, 22 nt, Human
uugacacaguuuucucauuaag

SEQ ID NO: 820602 - RNA, 22 nt, Human
gcaggagagucugugccagguu

SEQ ID NO: 820603 - RNA, 22 nt, Human
auugcuguggaaauauaagaug

SEQ ID NO: 820604 - RNA, 22 nt, Human
uuugaauagcauaggauuacau

SEQ ID NO: 820605 - RNA, 22 nt, Human
cggaggggauacauuuucugaa

SEQ ID NO: 820606 - RNA, 18 nt, Human
agucuucugauccauuuu

SEQ ID NO: 820607 - RNA, 23 nt, Human
guaaaauacgcagugcaguguga

SEQ ID NO: 820608 - RNA, 18 nt, Human
gagagggaucccucagga

SEQ ID NO: 820609 - RNA, 22 nt, Human
ucaacugcaaguuugcuuaguu

SEQ ID NO: 820610 - RNA, 22 nt, Human
aauaucagcacuuuugugguau

SEQ ID NO: 820611 - RNA, 22 nt, Human
gagguggugguggaggcauagc

SEQ ID NO: 820612 - RNA, 22 nt, Human
aggcagcuggaggcagagacua

SEQ ID NO: 820613 - RNA, 22 nt, Human
uccaugucuucaugugucuaac

SEQ ID NO: 820614 - RNA, 22 nt, Human
gcugccagccaacuugcugugc

SEQ ID NO: 820615 - RNA, 22 nt, Human
cccuggaggcuggaggcaguag

SEQ ID NO: 820616 - RNA, 22 nt, Human
ugcuuuggccacuagaauucag

SEQ ID NO: 820617 - RNA, 22 nt, Human
uagggauguaaacauaguaauu

SEQ ID NO: 820618 - RNA, 20 nt, Human
cugcugugauucccuccucc

SEQ ID NO: 820619 - RNA, 22 nt, Human
acuuaaaaagaaucuuuucacg

SEQ ID NO: 820620 - RNA, 22 nt, Human
ucccaggauguuuauggcuggu

SEQ ID NO: 820621 - RNA, 22 nt, Human
agaggcagcagucauacuacag

SEQ ID NO: 820622 - RNA, 22 nt, Human
gaggagagagggacugucugca

SEQ ID NO: 820623 - RNA, 22 nt, Human
uggaguucauccaugacagcuu

SEQ ID NO: 820624 - RNA, 22 nt, Human
cagagccaggucuaggagucuc

SEQ ID NO: 820625 - RNA, 22 nt, Human
cugucccuucauuauucacuac

SEQ ID NO: 820626 - RNA, 22 nt, Human
ugaaagguuauuuaggucugcu

SEQ ID NO: 820627 - RNA, 22 nt, Human
aggcagcaugggccccagcucc

SEQ ID NO: 820628 - RNA, 22 nt, Human
cugcugugccucuuuucacgug

SEQ ID NO: 820629 - RNA, 22 nt, Human
ugaugaaaauaugauucugagg

SEQ ID NO: 820630 - RNA, 23 nt, Human
cuuugccacccagagccugacag

SEQ ID NO: 820631 - RNA, 22 nt, Human
uuucaaauagaaucuuuccaaa

SEQ ID NO: 820632 - RNA, 22 nt, Human
caggauggugugagugugagga

SEQ ID NO: 820633 - RNA, 22 nt, Human
aggcagcauuugaauccagguc

SEQ ID NO: 820634 - RNA, 22 nt, Human
cucacuguccaacaggcuuuac

SEQ ID NO: 820635 - RNA, 22 nt, Human
uuucacuagaacguucuuguuu

SEQ ID NO: 820636 - RNA, 22 nt, Human
cauuuucaugaguuucuguuca

SEQ ID NO: 820637 - RNA, 22 nt, Human
cccaggaggugugcccaacucg

SEQ ID NO: 820638 - RNA, 22 nt, Human
agaggcggagcuugcagugagc

SEQ ID NO: 820639 - RNA, 18 nt, Human
gcaggagauggguggggu

SEQ ID NO: 820640 - RNA, 22 nt, Human
ggcagcauauauucagugggca

SEQ ID NO: 820641 - RNA, 22 nt, Human
aucccaugagaccacguuggcu

SEQ ID NO: 820642 - RNA, 22 nt, Human
ugaaugaguuuggcugcuguuc

SEQ ID NO: 820643 - RNA, 22 nt, Human
agcugcccuguggggaggguug

SEQ ID NO: 820644 - RNA, 22 nt, Human
uuucuucauucaccuucacccc

SEQ ID NO: 820645 - RNA, 22 nt, Human
ucacauucucagcaucuauaca

SEQ ID NO: 820646 - RNA, 22 nt, Human
gauaaugaugacaaugacaacc

SEQ ID NO: 820647 - RNA, 22 nt, Human
uuucauugcagagucugugugc

SEQ ID NO: 820648 - RNA, 22 nt, Human
caaguaaagaaucacauuucuu

SEQ ID NO: 820649 - RNA, 20 nt, Human
ugcugucguguuuucugcuu

SEQ ID NO: 820650 - RNA, 16 nt, Human
cuuccucuucacuggc

SEQ ID NO: 820651 - RNA, 22 nt, Human
agggagugguuaagaaggugca

SEQ ID NO: 820652 - RNA, 22 nt, Human
caggcagcccugcaccaagugu

SEQ ID NO: 820653 - RNA, 22 nt, Human
gggcagcuggcuuauagguuug

SEQ ID NO: 820654 - RNA, 22 nt, Human
gaggcauggccugaggcuagga

SEQ ID NO: 820655 - RNA, 20 nt, Human
guugaaaguaauaugaugcu

SEQ ID NO: 820656 - RNA, 22 nt, Human
ggcagcuuucaauaggguuaug

SEQ ID NO: 820657 - RNA, 22 nt, Human
ucagugugaggucuuccacccg

SEQ ID NO: 820658 - RNA, 22 nt, Human
gcagcugcuggagggaggcagg

SEQ ID NO: 820659 - RNA, 22 nt, Human
ugaggcagguggauuacaaggu

SEQ ID NO: 820660 - RNA, 22 nt, Human
cuguuaaucugcuugcaugaug

SEQ ID NO: 820661 - RNA, 22 nt, Human
agcagagguuuguuggaaaccu

SEQ ID NO: 820662 - RNA, 22 nt, Human
gaggcagcucuucugaaugggg

SEQ ID NO: 820663 - RNA, 22 nt, Human
ucauucuugaucacuaguuagu

SEQ ID NO: 820664 - RNA, 22 nt, Human
uucaggaucauuuguuuuaucu

SEQ ID NO: 820665 - RNA, 22 nt, Human
uaugaaacauucauacaaauaa

SEQ ID NO: 820666 - RNA, 22 nt, Human
ucacccuugauaauguucuucu

SEQ ID NO: 820667 - RNA, 22 nt, Human
agcccaggugagggguucgaaa

SEQ ID NO: 820668 - RNA, 22 nt, Human
cccaggaugucgaggcugcagu

SEQ ID NO: 820669 - RNA, 22 nt, Human
uugcagcugcaguaaauguuca

SEQ ID NO: 820670 - RNA, 22 nt, Human
ugaggcagaguaagauacauga

SEQ ID NO: 820671 - RNA, 22 nt, Human
agauggagaaugacaauuaagg

SEQ ID NO: 820672 - RNA, 22 nt, Human
uucccucucacuuaaagcuugg

SEQ ID NO: 820673 - RNA, 22 nt, Human
uugaacugguaguuggaaaucu

SEQ ID NO: 820674 - RNA, 22 nt, Human
aggcagcuuuaacugguaguag

SEQ ID NO: 820675 - RNA, 22 nt, Human
uugcugugucauuuguuuaauc

SEQ ID NO: 820676 - RNA, 22 nt, Human
gaggcagcaauaaaaagaauuu

SEQ ID NO: 820677 - RNA, 22 nt, Human
ggcagaggagcuggaaacaugg

SEQ ID NO: 820678 - RNA, 22 nt, Human
uugcaucuaccauaucaaagau

SEQ ID NO: 820679 - RNA, 22 nt, Human
uuugcauaagucauguccagug

SEQ ID NO: 820680 - RNA, 22 nt, Human
ccaggagacuguacugauauuu

SEQ ID NO: 820681 - RNA, 22 nt, Human
aucaggaugcugucaguuacca

SEQ ID NO: 820682 - RNA, 22 nt, Human
uuucucugcugccugugucgau

SEQ ID NO: 820683 - RNA, 20 nt, Human
aggcucagcugagcucuugg

SEQ ID NO: 820684 - RNA, 22 nt, Human
aaaguauuugugauuuuuacca

SEQ ID NO: 820685 - RNA, 19 nt, Human
ugcauaaauuauauacuuu

SEQ ID NO: 820686 - RNA, 22 nt, Human
augcuguguggucaaguuaauu

SEQ ID NO: 820687 - RNA, 19 nt, Human
accaggagacagugagcuu

SEQ ID NO: 820688 - RNA, 22 nt, Human
caaggccaagguuuugugaacu

SEQ ID NO: 820689 - RNA, 22 nt, Human
ccagugcuucuuugcuagcugg

SEQ ID NO: 820690 - RNA, 22 nt, Human
uucaggauccccuugaugggcu

SEQ ID NO: 820691 - RNA, 22 nt, Human
caggauggagaguuguugguug

SEQ ID NO: 820692 - RNA, 22 nt, Human
gauuucuuuagguguaauagug

SEQ ID NO: 820693 - RNA, 22 nt, Human
ccucacugcuauguguuugcuc

SEQ ID NO: 820694 - RNA, 22 nt, Human
aggcaguguguagcuggaagag

SEQ ID NO: 820695 - RNA, 22 nt, Human
aaagcagaacugagagagcugg

SEQ ID NO: 820696 - RNA, 22 nt, Human
ucuaaagaagaggguucugcgg

SEQ ID NO: 820697 - RNA, 22 nt, Human
uuucaugagauuccuccacauc

SEQ ID NO: 820698 - RNA, 22 nt, Human
aaggcagcccuggcucagccug

SEQ ID NO: 820699 - RNA, 22 nt, Human
cucaggauccaucuccugcccu

SEQ ID NO: 820700 - RNA, 22 nt, Human
ucucaggaagauuagggcuaag

SEQ ID NO: 820701 - RNA, 22 nt, Human
ucagugcacagagauuuuuguu

SEQ ID NO: 820702 - RNA, 21 nt, Human
gcugcaucaaucuacccaggg

SEQ ID NO: 820703 - RNA, 20 nt, Human
uaggcagcuugacccuuggu

SEQ ID NO: 820704 - RNA, 22 nt, Human
uuuugaauaauucagaaacagc

SEQ ID NO: 820705 - RNA, 22 nt, Human
aggcugcugccuuggagagugu

SEQ ID NO: 820706 - RNA, 22 nt, Human
cagauggaacacagaaaggaga

SEQ ID NO: 820707 - RNA, 22 nt, Human
ucacuucacacccacuaucaug

SEQ ID NO: 820708 - RNA, 22 nt, Human
ucuuugaaagcuguucuagagu

SEQ ID NO: 820709 - RNA, 22 nt, Human
gcugaaugaauguauuuuaaaa

SEQ ID NO: 820710 - RNA, 22 nt, Human
gucuauauauugcuugaauaau

SEQ ID NO: 820711 - RNA, 22 nt, Human
acccaggagacagguugcagug

SEQ ID NO: 820712 - RNA, 22 nt, Human
ugaaucaguauaaauucucaaa

SEQ ID NO: 820713 - RNA, 22 nt, Human
uauuucagcaagaagaaugugg

SEQ ID NO: 820714 - RNA, 22 nt, Human
guucuucaggcugugcucuaga

SEQ ID NO: 820715 - RNA, 22 nt, Human
agcuacccgaggacaggcuaag

SEQ ID NO: 820716 - RNA, 22 nt, Human
ucccaggaugaagacaguguug

SEQ ID NO: 820717 - RNA, 22 nt, Human
uuuguuuacucauucauugaug

SEQ ID NO: 820718 - RNA, 22 nt, Human
ggugagaggcagaggacagcuu

SEQ ID NO: 820719 - RNA, 22 nt, Human
uugauacauuuuuaggauaaac

SEQ ID NO: 820720 - RNA, 22 nt, Human
ugaagggggagauauaugugug

SEQ ID NO: 820721 - RNA, 22 nt, Human
cucaggauuuacuaauuucaag

SEQ ID NO: 820722 - RNA, 22 nt, Human
ccuggagauuucuucaagcuuu

SEQ ID NO: 820723 - RNA, 23 nt, Human
uuugaaguugacugccuuccaga

SEQ ID NO: 820724 - RNA, 22 nt, Human
gauuucuugaccccugucucag

SEQ ID NO: 820725 - RNA, 22 nt, Human
agcagcauuaugauauaucuua

SEQ ID NO: 820726 - RNA, 22 nt, Human
aaauuagucgguuuaggaauuu

SEQ ID NO: 820727 - RNA, 22 nt, Human
gaaaggccauuucugaggguuu

SEQ ID NO: 820728 - RNA, 20 nt, Human
acaggagaucugaggaaagg

SEQ ID NO: 820729 - RNA, 22 nt, Human
ucuucagacuccaaauguuuua

SEQ ID NO: 820730 - RNA, 22 nt, Human
acccaggaggugacacagggcu

SEQ ID NO: 820731 - RNA, 20 nt, Human
aaacauucauguacaaguga

SEQ ID NO: 820732 - RNA, 21 nt, Human
aaucauacaaaacaugucagg

SEQ ID NO: 820733 - RNA, 18 nt, Human
aauuuccauaugaauugc

SEQ ID NO: 820734 - RNA, 22 nt, Human
agcaccuguugcacuucauaau

SEQ ID NO: 820735 - RNA, 22 nt, Human
cccagcaguaaccaguggaaau

SEQ ID NO: 820736 - RNA, 22 nt, Human
cccaugagaccugguuuaaggc

SEQ ID NO: 820737 - RNA, 22 nt, Human
auccaugaucaauuuauuacua

SEQ ID NO: 820738 - RNA, 22 nt, Human
ggauggcaggacaaggacccag

SEQ ID NO: 820739 - RNA, 22 nt, Human
cugcuuugauuagaagaguaca

SEQ ID NO: 820740 - RNA, 22 nt, Human
aggaugaggcuggcaggucuug

SEQ ID NO: 820741 - RNA, 22 nt, Human
auacaaagacaaaucucaaucu

SEQ ID NO: 820742 - RNA, 23 nt, Human
ucccaggaaucugcauuuuuaac

SEQ ID NO: 820743 - RNA, 22 nt, Human
caaggccacuccagagacuggu

SEQ ID NO: 820744 - RNA, 22 nt, Human
ucugaaggugcuagagaaagcu

SEQ ID NO: 820745 - RNA, 23 nt, Human
gugcugugagccccuuggccucc

SEQ ID NO: 820746 - RNA, 22 nt, Human
caaggccagggaauuuuucugg

SEQ ID NO: 820747 - RNA, 22 nt, Human
uaucuguugucuuuuacaugua

SEQ ID NO: 820748 - RNA, 22 nt, Human
uucuucuugucugcccucacau

SEQ ID NO: 820749 - RNA, 22 nt, Human
cuucuucaucuguaaaacuugg

SEQ ID NO: 820750 - RNA, 22 nt, Human
gaaggucaccuccccucucugg

SEQ ID NO: 820751 - RNA, 22 nt, Human
agucucuuuguggacucugccu

SEQ ID NO: 820752 - RNA, 19 nt, Human
ugcccaggccagguugggc

SEQ ID NO: 820753 - RNA, 22 nt, Human
cagaggcacaagaaagcaaggc

SEQ ID NO: 820754 - RNA, 22 nt, Human
uuucaguuuuugcucgauguau

SEQ ID NO: 820755 - RNA, 22 nt, Human
cugcuucuccaaaguaggacuu

SEQ ID NO: 820756 - RNA, 22 nt, Human
uucacagacauugcagacugaa

SEQ ID NO: 820757 - RNA, 17 nt, Human
aagagaggcugagcugg

SEQ ID NO: 820758 - RNA, 22 nt, Human
ucagagaguuacacaaauuguu

SEQ ID NO: 820759 - RNA, 22 nt, Human
caggacagcucaacaccuccuc

SEQ ID NO: 820760 - RNA, 22 nt, Human
ggcacagagcccagcuuccuag

SEQ ID NO: 820761 - RNA, 22 nt, Human
cugagacuuucaugugcuuuua

SEQ ID NO: 820762 - RNA, 22 nt, Human
ucagucucaucaacucuauucc

SEQ ID NO: 820763 - RNA, 22 nt, Human
uagaaauaaaucugcagcuggg

SEQ ID NO: 820764 - RNA, 22 nt, Human
uaaaaugaucucucauguucuu

SEQ ID NO: 820765 - RNA, 22 nt, Human
uuugaaguguuauuucuaucac

SEQ ID NO: 820766 - RNA, 22 nt, Human
cucacugugaccucagcagaca

SEQ ID NO: 820767 - RNA, 22 nt, Human
uggcagcuggagggcaauggcc

SEQ ID NO: 820768 - RNA, 22 nt, Human
ccaggagauaagcugaguuuau

SEQ ID NO: 820769 - RNA, 22 nt, Human
cagaggcauacucccagucuug

SEQ ID NO: 820770 - RNA, 20 nt, Human
gaguuccccauuucuccugg

SEQ ID NO: 820771 - RNA, 22 nt, Human
agggcagcagcggcccaggccu

SEQ ID NO: 820772 - RNA, 22 nt, Human
gcggagggcgagcccgcggagc

SEQ ID NO: 820773 - RNA, 22 nt, Human
ugcccaggcuggaaugcagugg

SEQ ID NO: 820774 - RNA, 18 nt, Human
cugcccagagcauuucau

SEQ ID NO: 820775 - RNA, 22 nt, Human
gcccaggaagccaccgggaagu

SEQ ID NO: 820776 - RNA, 19 nt, Human
uuagccauccacagugaaa

SEQ ID NO: 820777 - RNA, 22 nt, Human
aggccagaaauuuggaguaugu

SEQ ID NO: 820778 - RNA, 22 nt, Human
uuuggacuuagccugcagaauu

SEQ ID NO: 820779 - RNA, 22 nt, Human
agacagcugggaaauggagugu

SEQ ID NO: 820780 - RNA, 22 nt, Human
ucauuucaaugauacuacuaag

SEQ ID NO: 820781 - RNA, 22 nt, Human
accuugaugccuuuccaagaug

SEQ ID NO: 820782 - RNA, 22 nt, Human
cagcucccgccaucgggaggca

SEQ ID NO: 820783 - RNA, 22 nt, Human
acccaggauagagugcugcagu

SEQ ID NO: 820784 - RNA, 19 nt, Human
cuucuggcccugagccacc

SEQ ID NO: 820785 - RNA, 22 nt, Human
gaggcagcugggauacaaggga

SEQ ID NO: 820786 - RNA, 19 nt, Human
cccaggagcaguauugaug

SEQ ID NO: 820787 - RNA, 22 nt, Human
ucaggauaaaauguaauggcaa

SEQ ID NO: 820788 - RNA, 22 nt, Human
uuagccauuaaauuacaaggug

SEQ ID NO: 820789 - RNA, 22 nt, Human
acucagaaccauuuacucugag

SEQ ID NO: 820790 - RNA, 22 nt, Human
uuauccuggauuauauauguga

SEQ ID NO: 820791 - RNA, 22 nt, Human
uuagccauuaauguccugugca

SEQ ID NO: 820792 - RNA, 22 nt, Human
gaucauuugcaggaaacauuaa

SEQ ID NO: 820793 - RNA, 22 nt, Human
agggggugucucugauuggguu

SEQ ID NO: 820794 - RNA, 20 nt, Human
uccaggagguuaguguggcu

SEQ ID NO: 820795 - RNA, 22 nt, Human
ccaugagcuucaacugacacag

SEQ ID NO: 820796 - RNA, 22 nt, Human
cuggguaaguuccuaaggcuca

SEQ ID NO: 820797 - RNA, 22 nt, Human
uucucagagugaccaagucuuu

SEQ ID NO: 820798 - RNA, 22 nt, Human
aggccagaaaugucagggagug

SEQ ID NO: 820799 - RNA, 22 nt, Human
aggagacauaacuaugaugaga

SEQ ID NO: 820800 - RNA, 22 nt, Human
uauuucuaagagauaucuguac

SEQ ID NO: 820801 - RNA, 22 nt, Human
uuugcaauuugugcugcaaaug

SEQ ID NO: 820802 - RNA, 22 nt, Human
gaaauauuguacuggagauguu

SEQ ID NO: 820803 - RNA, 22 nt, Human
aggcagugcugugcccugaacc

SEQ ID NO: 820804 - RNA, 21 nt, Human
ggcagccucuguggaagggga

SEQ ID NO: 820805 - RNA, 21 nt, Human
uuugaaagugggugauucuuu

SEQ ID NO: 820806 - RNA, 23 nt, Human
gagugcagaauagacaugcagug

SEQ ID NO: 820807 - RNA, 20 nt, Human
ggcagcuugggcagcaguua

SEQ ID NO: 820808 - RNA, 19 nt, Human
uccaggagcaaagccaguu

SEQ ID NO: 820809 - RNA, 22 nt, Human
aaggcagcagugcacgacugau

SEQ ID NO: 820810 - RNA, 22 nt, Human
uuuauuuggcauccagggagaa

SEQ ID NO: 820811 - RNA, 22 nt, Human
gggcagcucagccaccaugcag

SEQ ID NO: 820812 - RNA, 22 nt, Human
acagucuugcuguauggucagg

SEQ ID NO: 820813 - RNA, 22 nt, Human
ggaagagggaaccacgacugua

SEQ ID NO: 820814 - RNA, 22 nt, Human
uugcauuugacaaauuauuuaa

SEQ ID NO: 820815 - RNA, 22 nt, Human
uauuuccauguuagaacuaagu

SEQ ID NO: 820816 - RNA, 22 nt, Human
cuugaaagucagcagaguggau

SEQ ID NO: 820817 - RNA, 22 nt, Human
auguuuuugagauacaaacaga

SEQ ID NO: 820818 - RNA, 22 nt, Human
uuuaaauucugucugccgcuua

SEQ ID NO: 820819 - RNA, 22 nt, Human
gcucaggaucagccaccucuuu

SEQ ID NO: 820820 - RNA, 22 nt, Human
ugaguuuuuucaacauaugaag

SEQ ID NO: 820821 - RNA, 22 nt, Human
agauggcagggguaccuggaag

SEQ ID NO: 820822 - RNA, 22 nt, Human
uucuucuugaaacuuuagguug

SEQ ID NO: 820823 - RNA, 22 nt, Human
aaagccauugaacuguacuuua

SEQ ID NO: 820824 - RNA, 18 nt, Human
aguaaagcuuauuacaug

SEQ ID NO: 820825 - RNA, 22 nt, Human
ucauuauuuuggacuggagugu

SEQ ID NO: 820826 - RNA, 22 nt, Human
ucuuugaacuuggcugaucucu

SEQ ID NO: 820827 - RNA, 23 nt, Human
cagaaaacccagagcucaguccc

SEQ ID NO: 820828 - RNA, 22 nt, Human
auuuaaaugcuuaagaggguuu

SEQ ID NO: 820829 - RNA, 22 nt, Human
caggauagaaaggccauggagu

SEQ ID NO: 820830 - RNA, 22 nt, Human
agugcuguuagguuaauauagu

SEQ ID NO: 820831 - RNA, 22 nt, Human
aggcagcaugggcccagagucc

SEQ ID NO: 820832 - RNA, 22 nt, Human
auucuuauuuaaauagagucug

SEQ ID NO: 820833 - RNA, 22 nt, Human
cagcugcaguucaaugcuugcu

SEQ ID NO: 820834 - RNA, 22 nt, Human
ugcaugcugcacacaugcguag

SEQ ID NO: 820835 - RNA, 22 nt, Human
uaaauuauggcuggcagagcag

SEQ ID NO: 820836 - RNA, 22 nt, Human
aggaaagguagcgugccagcag

SEQ ID NO: 820837 - RNA, 22 nt, Human
uuugaaauaugaggcauuauga

SEQ ID NO: 820838 - RNA, 22 nt, Human
gccaggagggaaaggacaauuu

SEQ ID NO: 820839 - RNA, 23 nt, Human
uagggcagcugggagggacaugc

SEQ ID NO: 820840 - RNA, 22 nt, Human
aggcagauuuaggagaaaagaa

SEQ ID NO: 820841 - RNA, 22 nt, Human
accaggaguugggggugggacc

SEQ ID NO: 820842 - RNA, 22 nt, Human
uuuggaauguaguuuaaucauc

SEQ ID NO: 820843 - RNA, 22 nt, Human
aaauguuuugcucccauguggu

SEQ ID NO: 820844 - RNA, 22 nt, Human
cuggcugggagcgagcugcuca

SEQ ID NO: 820845 - RNA, 22 nt, Human
auucuucacauaagugcuguac

SEQ ID NO: 820846 - RNA, 22 nt, Human
gggagagguuacccgagcaacu

SEQ ID NO: 820847 - RNA, 22 nt, Human
caggggaguuuuaugcaacaga

SEQ ID NO: 820848 - RNA, 22 nt, Human
cugcugugucagaguccagggg

SEQ ID NO: 820849 - RNA, 22 nt, Human
agaccaagugcaggugccacua

SEQ ID NO: 820850 - RNA, 22 nt, Human
aggaagcuccuggagagccagu

SEQ ID NO: 820851 - RNA, 17 nt, Human
agaacuguaguagcucc

SEQ ID NO: 820852 - RNA, 22 nt, Human
uuagaaagaacuuuagauauca

SEQ ID NO: 820853 - RNA, 22 nt, Human
cuuuuccacugagccucacaaa

SEQ ID NO: 820854 - RNA, 22 nt, Human
ccagaagaccccguccaccucc

SEQ ID NO: 820855 - RNA, 22 nt, Human
auaaaugauucagcaggaaaua

SEQ ID NO: 820856 - RNA, 22 nt, Human
gauuucuuuaugaaguacagaa

SEQ ID NO: 820857 - RNA, 22 nt, Human
uugauacaggcucuauuucauc

SEQ ID NO: 820858 - RNA, 22 nt, Human
agucucugggcaugguugugac

SEQ ID NO: 820859 - RNA, 22 nt, Human
ucuuugaauccuuuacaucuga

SEQ ID NO: 820860 - RNA, 20 nt, Human
cccaggagcugugccccauc

SEQ ID NO: 820861 - RNA, 22 nt, Human
cugcuguguuccuccugcaucu

SEQ ID NO: 820862 - RNA, 22 nt, Human
ucauuuguaccauuuuuuaaga

SEQ ID NO: 820863 - RNA, 22 nt, Human
aggcagcuuucagugucucuca

SEQ ID NO: 820864 - RNA, 22 nt, Human
uuuacuuuugguaaggucauuu

SEQ ID NO: 820865 - RNA, 22 nt, Human
uuugaaagggacaaagucacug

SEQ ID NO: 820866 - RNA, 22 nt, Human
gaucuucuagcagaaguaauuu

SEQ ID NO: 820867 - RNA, 22 nt, Human
cucccaggcacagggaggagcc

SEQ ID NO: 820868 - RNA, 22 nt, Human
uucuccaacacaagcaugaugu

SEQ ID NO: 820869 - RNA, 22 nt, Human
agugcuuugaacgaaaggcuga

SEQ ID NO: 820870 - RNA, 20 nt, Human
ucacuaguaaccaucugcuu

SEQ ID NO: 820871 - RNA, 23 nt, Human
uuuauccaacucuguaaucucuc

SEQ ID NO: 820872 - RNA, 23 nt, Human
gugagucuugccuuugcugugga

SEQ ID NO: 820873 - RNA, 22 nt, Human
aaaauacuguggaguguugaaa

SEQ ID NO: 820874 - RNA, 22 nt, Human
uggagaggaaagugcaguuuug

SEQ ID NO: 820875 - RNA, 22 nt, Human
uugaacauuggcaauuucauau

SEQ ID NO: 820876 - RNA, 22 nt, Human
acuugcauuauauuuaucacaa

SEQ ID NO: 820877 - RNA, 22 nt, Human
cccaggagaauauaauguucuu

SEQ ID NO: 820878 - RNA, 22 nt, Human
aaacauuugcaacucgguuugg

SEQ ID NO: 820879 - RNA, 22 nt, Human
guuuucugauuagcaaaucuga

SEQ ID NO: 820880 - RNA, 22 nt, Human
uugcucagcacuggagccagcu

SEQ ID NO: 820881 - RNA, 22 nt, Human
aacaugauggggaagaacaaga

SEQ ID NO: 820882 - RNA, 22 nt, Human
uguguucuggaaagcucacuga

SEQ ID NO: 820883 - RNA, 22 nt, Human
aauuuuaaucaguggugcugag

SEQ ID NO: 820884 - RNA, 22 nt, Human
guucuucaaagugacaacuaaa

SEQ ID NO: 820885 - RNA, 22 nt, Human
acacauuucuaaauuuuuaccg

SEQ ID NO: 820886 - RNA, 22 nt, Human
ucugucuccucugaggugccag

SEQ ID NO: 820887 - RNA, 20 nt, Human
auuuggcaugaaguauugau

SEQ ID NO: 820888 - RNA, 22 nt, Human
acuguugucaggcugcuuugga

SEQ ID NO: 820889 - RNA, 22 nt, Human
uucaggaugacaccauguccag

SEQ ID NO: 820890 - RNA, 22 nt, Human
uuggcaguaaaagaaaaugcuu

SEQ ID NO: 820891 - RNA, 22 nt, Human
ggagugggaacaaugacauggu

SEQ ID NO: 820892 - RNA, 22 nt, Human
gcaucuaaauaaacgugggagu

SEQ ID NO: 820893 - RNA, 22 nt, Human
aagcaccucuaugauugcuuuu

SEQ ID NO: 820894 - RNA, 22 nt, Human
agaggagguccuuuucugaugu

SEQ ID NO: 820895 - RNA, 22 nt, Human
aagaacuuccuaauauauuuuc

SEQ ID NO: 820896 - RNA, 22 nt, Human
auuggcagaaacagcagggcca

SEQ ID NO: 820897 - RNA, 22 nt, Human
cauuugcagagggugacacucu

SEQ ID NO: 820898 - RNA, 22 nt, Human
aauggccagcugggagaguuga

SEQ ID NO: 820899 - RNA, 22 nt, Human
aaggcaguacuuuauguccaua

SEQ ID NO: 820900 - RNA, 22 nt, Human
aggagaggcaucaagaaaaucg

SEQ ID NO: 820901 - RNA, 22 nt, Human
agauggaguuaguaccagaguc

SEQ ID NO: 820902 - RNA, 22 nt, Human
ugcuguggcaguuuauguauag

SEQ ID NO: 820903 - RNA, 22 nt, Human
aggucagcaugaguagaaggua

SEQ ID NO: 820904 - RNA, 21 nt, Human
cucaggauggcggccuggugg

SEQ ID NO: 820905 - RNA, 20 nt, Human
uuuacauuuugaaacaguga

SEQ ID NO: 820906 - RNA, 22 nt, Human
ggcagucuuaucagcauuggac

SEQ ID NO: 820907 - RNA, 20 nt, Human
ugaggcaggagaauggcaug

SEQ ID NO: 820908 - RNA, 22 nt, Human
uuccaugaaggagacugagaag

SEQ ID NO: 820909 - RNA, 22 nt, Human
acuugcugguggcauuuacagu

SEQ ID NO: 820910 - RNA, 22 nt, Human
gcccaggaucugcucagaucau

SEQ ID NO: 820911 - RNA, 22 nt, Human
uuuuuaguagagguggguuuca

SEQ ID NO: 820912 - RNA, 22 nt, Human
cauuuguuggucagauuguagu

SEQ ID NO: 820913 - RNA, 22 nt, Human
cugacagucucauugauuugcu

SEQ ID NO: 820914 - RNA, 22 nt, Human
uaucuguuguaguacagaugau

SEQ ID NO: 820915 - RNA, 22 nt, Human
uggcuguguuaccacuucaugu

SEQ ID NO: 820916 - RNA, 22 nt, Human
cccuggaggucagaggccuggg

SEQ ID NO: 820917 - RNA, 19 nt, Human
aggcagcaggccagggaug

SEQ ID NO: 820918 - RNA, 22 nt, Human
cuggaggcacccuuagagaggc

SEQ ID NO: 820919 - RNA, 22 nt, Human
ugaggcaggaguucaggcugcg

SEQ ID NO: 820920 - RNA, 21 nt, Human
aggcagcucaggcccagagag

SEQ ID NO: 820921 - RNA, 21 nt, Human
ggacagcugcgcgcagggcuc

SEQ ID NO: 820922 - RNA, 22 nt, Human
gaacuguaguuaauacuacaca

SEQ ID NO: 820923 - RNA, 22 nt, Human
cgaggcagacaaaaguuggaag

SEQ ID NO: 820924 - RNA, 22 nt, Human
uccaggagaggccugaccaggu

SEQ ID NO: 820925 - RNA, 22 nt, Human
agaggccaggcugcagagggau

SEQ ID NO: 820926 - RNA, 22 nt, Human
gcagaagucagaccaucugaau

SEQ ID NO: 820927 - RNA, 19 nt, Human
agaaguuagacauugcaau

SEQ ID NO: 820928 - RNA, 23 nt, Human
agacaguggccgagagguacuag

SEQ ID NO: 820929 - RNA, 22 nt, Human
uucuucaacaaggacacuguua

SEQ ID NO: 820930 - RNA, 22 nt, Human
gauggcagcagcagccagggau

SEQ ID NO: 820931 - RNA, 21 nt, Human
uucugggaaaugagcuggggc

SEQ ID NO: 820932 - RNA, 22 nt, Human
ugcuucuggaaacaguggcugu

SEQ ID NO: 820933 - RNA, 22 nt, Human
acccaggacucucuuccaguag

SEQ ID NO: 820934 - RNA, 22 nt, Human
uauugaugcuuggauugggcca

SEQ ID NO: 820935 - RNA, 22 nt, Human
ggugaagggccuuaggagacag

SEQ ID NO: 820936 - RNA, 22 nt, Human
aacaugcucuguuucuuggaug

SEQ ID NO: 820937 - RNA, 22 nt, Human
aaauauagugacacuuauaguc

SEQ ID NO: 820938 - RNA, 22 nt, Human
agagugcaaccgaaacaagcag

SEQ ID NO: 820939 - RNA, 22 nt, Human
gaggacaggagacucacuguuu

SEQ ID NO: 820940 - RNA, 22 nt, Human
uggcagcugucagaaugcaaau

SEQ ID NO: 820941 - RNA, 19 nt, Human
ucuuucauuucuagcucug

SEQ ID NO: 820942 - RNA, 20 nt, Human
gggcagcuccccucauucug

SEQ ID NO: 820943 - RNA, 22 nt, Human
ugaggcaggacauggacaacug

SEQ ID NO: 820944 - RNA, 22 nt, Human
uuaaauuagucaagcuucucug

SEQ ID NO: 820945 - RNA, 22 nt, Human
gaagcagcuggugagauggagc

SEQ ID NO: 820946 - RNA, 21 nt, Human
agccuguugguuuacugcuca

SEQ ID NO: 820947 - RNA, 22 nt, Human
ugcugaaauuagaacauugagg

SEQ ID NO: 820948 - RNA, 22 nt, Human
uuauuugcccauguuuagcaga

SEQ ID NO: 820949 - RNA, 22 nt, Human
ggcucagacucccaggcccucu

SEQ ID NO: 820950 - RNA, 22 nt, Human
cccagcaggaggagguugcagu

SEQ ID NO: 820951 - RNA, 22 nt, Human
ugcauaguucuccuuccuccuc

SEQ ID NO: 820952 - RNA, 22 nt, Human
cagggagggaggaaaauuugcu

SEQ ID NO: 820953 - RNA, 22 nt, Human
ucauuuauaaggaugcaauuaa

SEQ ID NO: 820954 - RNA, 22 nt, Human
aaggagaguacaggaguuggua

SEQ ID NO: 820955 - RNA, 22 nt, Human
auuuccauagagcgucucacag

SEQ ID NO: 820956 - RNA, 22 nt, Human
acauuuaaauaccuauguuucu

SEQ ID NO: 820957 - RNA, 22 nt, Human
agugagaguauuaaugugaacu

SEQ ID NO: 820958 - RNA, 22 nt, Human
uaaggccagccagcaaaucugu

SEQ ID NO: 820959 - RNA, 22 nt, Human
cauuuguacagaacagcuuuau

SEQ ID NO: 820960 - RNA, 22 nt, Human
aggagggagcuuaagccaggca

SEQ ID NO: 820961 - RNA, 22 nt, Human
augauguuaccaguacuuagag

SEQ ID NO: 820962 - RNA, 22 nt, Human
aacauucuauuuugcuaaaaca

SEQ ID NO: 820963 - RNA, 22 nt, Human
uggaaggagacugggaagugug

SEQ ID NO: 820964 - RNA, 22 nt, Human
cagacaggaauucuggcguggu

SEQ ID NO: 820965 - RNA, 22 nt, Human
agcagccuuugaucaucuggga

SEQ ID NO: 820966 - RNA, 22 nt, Human
uugaacuguaagcaugucugcc

SEQ ID NO: 820967 - RNA, 21 nt, Human
ggcagcguguggacaggaagg

SEQ ID NO: 820968 - RNA, 22 nt, Human
ugaaggcccagccacagaaugg

SEQ ID NO: 820969 - RNA, 22 nt, Human
ucucugaguauccugaacugcc

SEQ ID NO: 820970 - RNA, 22 nt, Human
ggauguugauugaauggccauu

SEQ ID NO: 820971 - RNA, 22 nt, Human
caguuucuuggaugccaauuuc

SEQ ID NO: 820972 - RNA, 22 nt, Human
uugcugaagugaagguauguuu

SEQ ID NO: 820973 - RNA, 22 nt, Human
uuccaugacaccgagggaaguc

SEQ ID NO: 820974 - RNA, 22 nt, Human
agaggcaggaagagcugauuuu

SEQ ID NO: 820975 - RNA, 22 nt, Human
gugcugugugauccaugcuggc

SEQ ID NO: 820976 - RNA, 23 nt, Human
uugcauagacauccucauagauu

SEQ ID NO: 820977 - RNA, 22 nt, Human
ucccaggacaggccacauggaa

SEQ ID NO: 820978 - RNA, 22 nt, Human
uuucaguuacugcuauaucauu

SEQ ID NO: 820979 - RNA, 22 nt, Human
aaggcaguuaauuuggcuagaa

SEQ ID NO: 820980 - RNA, 22 nt, Human
auuucucuuagcaagacauuac

SEQ ID NO: 820981 - RNA, 22 nt, Human
uuaacaauagaguuucuucagg

SEQ ID NO: 820982 - RNA, 20 nt, Human
ccagaagagaugaucaucca

SEQ ID NO: 820983 - RNA, 22 nt, Human
cugcccaggaaggagaggaugg

SEQ ID NO: 820984 - RNA, 22 nt, Human
cacaaaugugcagaaaugugag

SEQ ID NO: 820985 - RNA, 22 nt, Human
cuguaguugaugauuucugaua

SEQ ID NO: 820986 - RNA, 17 nt, Human
cauuuguugaucaguug

SEQ ID NO: 820987 - RNA, 22 nt, Human
cccaggaggguggccucugccc

SEQ ID NO: 820988 - RNA, 22 nt, Human
gugcauuugacgaauacucacu

SEQ ID NO: 820989 - RNA, 23 nt, Human
agggugagcaagcuauggagacc

SEQ ID NO: 820990 - RNA, 22 nt, Human
uuuugugagcccauaaaugcca

SEQ ID NO: 820991 - RNA, 22 nt, Human
ccaagaugaucuuuacaguguu

SEQ ID NO: 820992 - RNA, 22 nt, Human
auacaacuuuaucuguaaugag

SEQ ID NO: 820993 - RNA, 22 nt, Human
gccagagguucaacaacugucu

SEQ ID NO: 820994 - RNA, 23 nt, Human
uacaugcuauaauuucacccuca

SEQ ID NO: 820995 - RNA, 22 nt, Human
augcuguguggccaccuccaug

SEQ ID NO: 820996 - RNA, 22 nt, Human
ugcccaggauugugaggucagg

SEQ ID NO: 820997 - RNA, 22 nt, Human
ugcugcuguauccuuaguguca

SEQ ID NO: 820998 - RNA, 22 nt, Human
gugguuuugccauuacaaguaa

SEQ ID NO: 820999 - RNA, 22 nt, Human
aaggcagccucugccagccggg

SEQ ID NO: 821000 - RNA, 22 nt, Human
uccugucuaaagaccugcaggc

SEQ ID NO: 821001 - RNA, 22 nt, Human
ugaggcaggaauggggaaaagu

SEQ ID NO: 821002 - RNA, 22 nt, Human
uuuccuaguucuaagaaaugua

SEQ ID NO: 821003 - RNA, 19 nt, Human
uccucagugacaaccucag

SEQ ID NO: 821004 - RNA, 22 nt, Human
uaaaacuuaacuauccagauua

SEQ ID NO: 821005 - RNA, 22 nt, Human
acuggcaggcugcuggccggcg

SEQ ID NO: 821006 - RNA, 18 nt, Human
acugugugaauuagcucc

SEQ ID NO: 821007 - RNA, 19 nt, Human
agccuggcuuugcucugcu

SEQ ID NO: 821008 - RNA, 22 nt, Human
cacugagcugauagaauuccag

SEQ ID NO: 821009 - RNA, 22 nt, Human
ugguaaauauguccauucucuu

SEQ ID NO: 821010 - RNA, 22 nt, Human
gcugaaauucagauuccuaggc

SEQ ID NO: 821011 - RNA, 22 nt, Human
cuuaacagagagaaguguugcu

SEQ ID NO: 821012 - RNA, 22 nt, Human
gcaaauauucaagacuuuucca

SEQ ID NO: 821013 - RNA, 19 nt, Human
uggcaucuguaaaauggug

SEQ ID NO: 821014 - RNA, 22 nt, Human
gaaggaggcguuagcccuagga

SEQ ID NO: 821015 - RNA, 22 nt, Human
cucaggauuuaaaggggcacuc

SEQ ID NO: 821016 - RNA, 22 nt, Human
gcuccucugucaaaugagagug

SEQ ID NO: 821017 - RNA, 22 nt, Human
ucccaggaaaacacucgaggac

SEQ ID NO: 821018 - RNA, 19 nt, Human
aaggcagcaguagcaucca

SEQ ID NO: 821019 - RNA, 22 nt, Human
aaggcaguuugggccaccaucu

SEQ ID NO: 821020 - RNA, 22 nt, Human
cuugcugggguaagucugugcu

SEQ ID NO: 821021 - RNA, 22 nt, Human
caggcagcguccugcuuccugu

SEQ ID NO: 821022 - RNA, 22 nt, Human
agauggagaccuuggaugaacu

SEQ ID NO: 821023 - RNA, 22 nt, Human
agggcagcucucaccucuggcc

SEQ ID NO: 821024 - RNA, 22 nt, Human
cugacccauauaagaguggagg

SEQ ID NO: 821025 - RNA, 17 nt, Human
agcugaaauugcugaag

SEQ ID NO: 821026 - RNA, 22 nt, Human
agcccagguucuaaagccaaac

SEQ ID NO: 821027 - RNA, 22 nt, Human
acaacauucuuaaauacacuga

SEQ ID NO: 821028 - RNA, 22 nt, Human
uucauucugcaguucucagcuc

SEQ ID NO: 821029 - RNA, 22 nt, Human
gcucaggaucccaggggugugc

SEQ ID NO: 821030 - RNA, 22 nt, Human
auuucagauucagaaauguagg

SEQ ID NO: 821031 - RNA, 22 nt, Human
uuaaauauuauguugucugcaa

SEQ ID NO: 821032 - RNA, 22 nt, Human
gaucuguuucauucacagucug

SEQ ID NO: 821033 - RNA, 22 nt, Human
ggaggacaggggcugcagcaca

SEQ ID NO: 821034 - RNA, 22 nt, Human
uuuuuauaugaaggauagugcg

SEQ ID NO: 821035 - RNA, 22 nt, Human
ggagcagggcagugaauucugg

SEQ ID NO: 821036 - RNA, 22 nt, Human
augaaggcuguguagauggaug

SEQ ID NO: 821037 - RNA, 22 nt, Human
acagucuugagcaucagccaga

SEQ ID NO: 821038 - RNA, 22 nt, Human
agacccagaaagcagcugcauu

SEQ ID NO: 821039 - RNA, 22 nt, Human
caagauggagaagcagcaaggg

SEQ ID NO: 821040 - RNA, 22 nt, Human
cagagggcacaugguuuccuca

SEQ ID NO: 821041 - RNA, 22 nt, Human
aauggccagcaacaggagugaa

SEQ ID NO: 821042 - RNA, 22 nt, Human
gaagcagcgaaguggaagggac

SEQ ID NO: 821043 - RNA, 20 nt, Human
agcauuugaaauaugacuau

SEQ ID NO: 821044 - RNA, 18 nt, Human
cugcugugucgucugggc

SEQ ID NO: 821045 - RNA, 22 nt, Human
uugcauuugagaaaguucuccu

SEQ ID NO: 821046 - RNA, 22 nt, Human
auuggcaggaaccgaggagggg

SEQ ID NO: 821047 - RNA, 22 nt, Human
aaaggugacugcagcagcuauu

SEQ ID NO: 821048 - RNA, 22 nt, Human
auacacauauguguguauaugu

SEQ ID NO: 821049 - RNA, 22 nt, Human
cucccagggucuaggcugcugg

SEQ ID NO: 821050 - RNA, 22 nt, Human
uuaaauauuuucagcaggguca

SEQ ID NO: 821051 - RNA, 22 nt, Human
aaggcagcuuuaaaaaagaugc

SEQ ID NO: 821052 - RNA, 22 nt, Human
uuggaaagcaagcuggacauac

SEQ ID NO: 821053 - RNA, 22 nt, Human
uauagccauuuccaguggcauc

SEQ ID NO: 821054 - RNA, 22 nt, Human
ugucucaguacacuccgauguu

SEQ ID NO: 821055 - RNA, 22 nt, Human
gucuuuaugguaugaaaacuga

SEQ ID NO: 821056 - RNA, 20 nt, Human
caggaugauuggacacgaug

SEQ ID NO: 821057 - RNA, 22 nt, Human
uucagaaugugaccuuauuugg

SEQ ID NO: 821058 - RNA, 22 nt, Human
cccuugcaucccauguguggcc

SEQ ID NO: 821059 - RNA, 21 nt, Human
cagcagaguaaugcauucgua

SEQ ID NO: 821060 - RNA, 22 nt, Human
uuuaagauucaguaaggcaaac

SEQ ID NO: 821061 - RNA, 21 nt, Human
uucuucaaagaagaaggcaca

SEQ ID NO: 821062 - RNA, 22 nt, Human
uuugaaaguccuaggagagucc

SEQ ID NO: 821063 - RNA, 19 nt, Human
caggaaggggcgaaucugg

SEQ ID NO: 821064 - RNA, 21 nt, Human
gggugggaggacacagcaggc

SEQ ID NO: 821065 - RNA, 22 nt, Human
cugcuguguggugaaacucagu

SEQ ID NO: 821066 - RNA, 22 nt, Human
agggcagcccuucugggagggc

SEQ ID NO: 821067 - RNA, 22 nt, Human
aagauuauggcagauaacaauu

SEQ ID NO: 821068 - RNA, 22 nt, Human
uccucagacuucccuuugugua

SEQ ID NO: 821069 - RNA, 22 nt, Human
acacaaguucuaaagauugcgc

SEQ ID NO: 821070 - RNA, 22 nt, Human
cucugcaugccuugcucagaca

SEQ ID NO: 821071 - RNA, 21 nt, Human
uccaggaguucuaauaggugu

SEQ ID NO: 821072 - RNA, 22 nt, Human
uccaggaguggggcagaggucu

SEQ ID NO: 821073 - RNA, 22 nt, Human
cucaggaucgcuugcccuaggg

SEQ ID NO: 821074 - RNA, 22 nt, Human
cccaggaagagugaguggcauu

SEQ ID NO: 821075 - RNA, 22 nt, Human
caaaugauaccuauuacuaggc

SEQ ID NO: 821076 - RNA, 22 nt, Human
aaauuauuaugccccucuauaa

SEQ ID NO: 821077 - RNA, 22 nt, Human
ucucuucuaauuaggguccaug

SEQ ID NO: 821078 - RNA, 22 nt, Human
ugaggcagcaauuguauuguau

SEQ ID NO: 821079 - RNA, 22 nt, Human
auuugcaaagucguaucuguga

SEQ ID NO: 821080 - RNA, 22 nt, Human
caggguggcacucagcgcaucu

SEQ ID NO: 821081 - RNA, 22 nt, Human
auuaaaauuccaagguaugcca

SEQ ID NO: 821082 - RNA, 22 nt, Human
aaagauaauguuuccuuauucu

SEQ ID NO: 821083 - RNA, 22 nt, Human
uccaggagguugagugaguucc

SEQ ID NO: 821084 - RNA, 22 nt, Human
cucagagaggcaguggaaguca

SEQ ID NO: 821085 - RNA, 22 nt, Human
gaggaacccagcugggguugcc

SEQ ID NO: 821086 - RNA, 22 nt, Human
agucucugcaugccugcugugc

SEQ ID NO: 821087 - RNA, 22 nt, Human
ccaggacagugaacauguaaga

SEQ ID NO: 821088 - RNA, 22 nt, Human
gcuggcaggagccuuucccuuu

SEQ ID NO: 821089 - RNA, 18 nt, Human
ugaauagggguuugcaga

SEQ ID NO: 821090 - RNA, 22 nt, Human
uccaugagaacccuuggagaua

SEQ ID NO: 821091 - RNA, 22 nt, Human
augaggcaucugcagucacuag

SEQ ID NO: 821092 - RNA, 22 nt, Human
uguugaagauaaaguucucauu

SEQ ID NO: 821093 - RNA, 18 nt, Human
uggcagcaggaagccauu

SEQ ID NO: 821094 - RNA, 22 nt, Human
uaaggccaggcuguggucggca

SEQ ID NO: 821095 - RNA, 22 nt, Human
uccaggagacacccuugugugu

SEQ ID NO: 821096 - RNA, 22 nt, Human
aggcuagcuuuggcucaguaaa

SEQ ID NO: 821097 - RNA, 22 nt, Human
gaggggaagacuucuggacagu

SEQ ID NO: 821098 - RNA, 22 nt, Human
aggaagcuaaccagggagugag

SEQ ID NO: 821099 - RNA, 22 nt, Human
gauggcaggcaggugaguagag

SEQ ID NO: 821100 - RNA, 22 nt, Human
uuauucuucuucucuugccagg

SEQ ID NO: 821101 - RNA, 22 nt, Human
ugaggcaggagaaucacaugaa

SEQ ID NO: 821102 - RNA, 23 nt, Human
cuugcaggaagcagauggcacac

SEQ ID NO: 821103 - RNA, 22 nt, Human
agugcuuuagcauccaacuguc

SEQ ID NO: 821104 - RNA, 16 nt, Human
aggaggggaauuagga

SEQ ID NO: 821105 - RNA, 22 nt, Human
gugauuuucuccuccuagaagu

SEQ ID NO: 821106 - RNA, 22 nt, Human
gcuguggucugugagcuccaaa

SEQ ID NO: 821107 - RNA, 22 nt, Human
uuugcauaaaggagcauuucuc

SEQ ID NO: 821108 - RNA, 22 nt, Human
caaauacuggguaaguuaauuu

SEQ ID NO: 821109 - RNA, 22 nt, Human
aagacauugucauuuuauaauu

SEQ ID NO: 821110 - RNA, 22 nt, Human
cccuguacagucucuguggcac

SEQ ID NO: 821111 - RNA, 23 nt, Human
aaugauuucaugaugauagcagc

SEQ ID NO: 821112 - RNA, 22 nt, Human
ggaggugggauuaggaccuaaa

SEQ ID NO: 821113 - RNA, 20 nt, Human
gcagcuacucugucucgcuc

SEQ ID NO: 821114 - RNA, 22 nt, Human
aauauaaugcuguuuuaugcca

SEQ ID NO: 821115 - RNA, 22 nt, Human
uuuaaauggcauuuucccagau

SEQ ID NO: 821116 - RNA, 22 nt, Human
cagcucugaggaacacuccuuu

SEQ ID NO: 821117 - RNA, 22 nt, Human
cucuucuugccugaugaggcag

SEQ ID NO: 821118 - RNA, 22 nt, Human
caggaugagguagaggcagaua

SEQ ID NO: 821119 - RNA, 22 nt, Human
aagauauucaaagauuuauuag

SEQ ID NO: 821120 - RNA, 22 nt, Human
caggaggaagaacucugcaaca

SEQ ID NO: 821121 - RNA, 22 nt, Human
aggccagacagcuagaaacagg

SEQ ID NO: 821122 - RNA, 22 nt, Human
cagaggcaggauaagaacugcg

SEQ ID NO: 821123 - RNA, 22 nt, Human
cccaggagaccuagaucuguuu

SEQ ID NO: 821124 - RNA, 22 nt, Human
auucuucagcaggggacacuau

SEQ ID NO: 821125 - RNA, 22 nt, Human
ucugcugugggucuauauuuua

SEQ ID NO: 821126 - RNA, 22 nt, Human
aucugcaggaaugugugcagag

SEQ ID NO: 821127 - RNA, 22 nt, Human
aauuuccaaauuucugucacac

SEQ ID NO: 821128 - RNA, 22 nt, Human
acagaauugaaaguauaaucug

SEQ ID NO: 821129 - RNA, 22 nt, Human
ugaaggccucugguacaugcca

SEQ ID NO: 821130 - RNA, 22 nt, Human
ggcagcacugcagcuuguuggg

SEQ ID NO: 821131 - RNA, 22 nt, Human
agaccuggauuccaauccuacc

SEQ ID NO: 821132 - RNA, 22 nt, Human
uugaaaggaauacagaggccua

SEQ ID NO: 821133 - RNA, 22 nt, Human
uucuacagacuauaacugugau

SEQ ID NO: 821134 - RNA, 22 nt, Human
cuagccugggauuugaacuuau

SEQ ID NO: 821135 - RNA, 23 nt, Human
acauacauggagauaaagugaug

SEQ ID NO: 821136 - RNA, 22 nt, Human
cuucagaggggacucaaaguca

SEQ ID NO: 821137 - RNA, 22 nt, Human
ggaagaggaggagccaggcuuu

SEQ ID NO: 821138 - RNA, 19 nt, Human
ugaggggcucacagucuca

SEQ ID NO: 821139 - RNA, 22 nt, Human
augcugagcagagcugacaugc

SEQ ID NO: 821140 - RNA, 22 nt, Human
agugcuuucuugcuccaucagu

SEQ ID NO: 821141 - RNA, 20 nt, Human
uacagaaugcaauaaaaugg

SEQ ID NO: 821142 - RNA, 22 nt, Human
uucaugugauaaaugugugacu

SEQ ID NO: 821143 - RNA, 22 nt, Human
gcacaauuauuuaugcaguaug

SEQ ID NO: 821144 - RNA, 22 nt, Human
cccaggaguaagugacauuguu

SEQ ID NO: 821145 - RNA, 22 nt, Human
ugagauguaagguaugcuuacu

SEQ ID NO: 821146 - RNA, 22 nt, Human
ugaggcagggagaguggauaug

SEQ ID NO: 821147 - RNA, 22 nt, Human
caggaugggauguagugggccc

SEQ ID NO: 821148 - RNA, 22 nt, Human
uuccuuaggcuguuugcagugc

SEQ ID NO: 821149 - RNA, 22 nt, Human
ucuuuccauggccacacagucu

SEQ ID NO: 821150 - RNA, 22 nt, Human
aucacaaaggcugcuucaugau

SEQ ID NO: 821151 - RNA, 22 nt, Human
agaggucagauuucuccuggug

SEQ ID NO: 821152 - RNA, 22 nt, Human
uguuuucagucauauagcaggu

SEQ ID NO: 821153 - RNA, 19 nt, Human
uuugaaagaguuuuauugg

SEQ ID NO: 821154 - RNA, 20 nt, Human
cugcugugugugccucagcc

SEQ ID NO: 821155 - RNA, 22 nt, Human
gaggcaguguugaaaaggagag

SEQ ID NO: 821156 - RNA, 22 nt, Human
ucuacccagagcuaugaccuga

SEQ ID NO: 821157 - RNA, 22 nt, Human
uagagcugggcagugcucugag

SEQ ID NO: 821158 - RNA, 22 nt, Human
aagccgaggccacacagcagga

SEQ ID NO: 821159 - RNA, 21 nt, Human
acaggagaccgccuggcaguc

SEQ ID NO: 821160 - RNA, 22 nt, Human
cacaauguauauguauaucaaa

SEQ ID NO: 821161 - RNA, 22 nt, Human
uuagccauugucagcacauggc

SEQ ID NO: 821162 - RNA, 20 nt, Human
guaaaauauggucuuugggu

SEQ ID NO: 821163 - RNA, 22 nt, Human
ugaggggagcuagcaugccuug

SEQ ID NO: 821164 - RNA, 22 nt, Human
cuccaugaauuugagcuuugug

SEQ ID NO: 821165 - RNA, 22 nt, Human
aggcagagcuggguuuugaaau

SEQ ID NO: 821166 - RNA, 22 nt, Human
uguguuauugccacugaagacc

SEQ ID NO: 821167 - RNA, 21 nt, Human
uucucagaucgaguagugaga

SEQ ID NO: 821168 - RNA, 22 nt, Human
gagagcaggaggcagcgggacg

SEQ ID NO: 821169 - RNA, 22 nt, Human
auugaaagguuuugagcagaua

SEQ ID NO: 821170 - RNA, 22 nt, Human
gcuuuggagccuguguucugcc

SEQ ID NO: 821171 - RNA, 22 nt, Human
ucugcagguguuggaaggguca

SEQ ID NO: 821172 - RNA, 22 nt, Human
aggaggggcaaugauagucugg

SEQ ID NO: 821173 - RNA, 23 nt, Human
aguaaagcaauuguuggcgagag

SEQ ID NO: 821174 - RNA, 22 nt, Human
caucaucaaaacaaauggaguc

SEQ ID NO: 821175 - RNA, 22 nt, Human
acagcauugcuccaucucaaga

SEQ ID NO: 821176 - RNA, 22 nt, Human
ucuugcuaaagaccaacacauu

SEQ ID NO: 821177 - RNA, 22 nt, Human
gcaggagaacaaagcaagcugc

SEQ ID NO: 821178 - RNA, 22 nt, Human
gagggaggugauacugaacgua

SEQ ID NO: 821179 - RNA, 22 nt, Human
guuguuuuuguucucuauagcu

SEQ ID NO: 821180 - RNA, 22 nt, Human
aacaguaaagacagaauuuauc

SEQ ID NO: 821181 - RNA, 22 nt, Human
ugaggggaaggcaugauaaaua

SEQ ID NO: 821182 - RNA, 22 nt, Human
gucaggauuugaacucaggucu

SEQ ID NO: 821183 - RNA, 22 nt, Human
aagacaauuugauacuaguugc

SEQ ID NO: 821184 - RNA, 21 nt, Human
uuucacaaaaguaugugacaa

SEQ ID NO: 821185 - RNA, 22 nt, Human
ucaccgccuugcccggccgggc

SEQ ID NO: 821186 - RNA, 22 nt, Human
uuugcacuagcauuuguccaug

SEQ ID NO: 821187 - RNA, 22 nt, Human
cugcuguguuggcauuggauag

SEQ ID NO: 821188 - RNA, 22 nt, Human
guucuucagucacaucacagaa

SEQ ID NO: 821189 - RNA, 22 nt, Human
cugcugugcagacagacucucu

SEQ ID NO: 821190 - RNA, 22 nt, Human
cuucucagaggccagaagcuau

SEQ ID NO: 821191 - RNA, 22 nt, Human
gagggccagcagccucagcaug

SEQ ID NO: 821192 - RNA, 20 nt, Human
gggcaguucaaugccacucu

SEQ ID NO: 821193 - RNA, 22 nt, Human
ugggagcccaagggagcugccg

SEQ ID NO: 821194 - RNA, 22 nt, Human
ucuucagauaaagggagaguau

SEQ ID NO: 821195 - RNA, 22 nt, Human
cccucuacagggaagcgcuuuc

SEQ ID NO: 821196 - RNA, 22 nt, Human
ucgagcucuggagccaaggaug

SEQ ID NO: 821197 - RNA, 22 nt, Human
caaggccauauugccuguaugu

SEQ ID NO: 821198 - RNA, 22 nt, Human
uuuauuguuaucaugggugagu

SEQ ID NO: 821199 - RNA, 17 nt, Human
cccacggaggugugaaa

SEQ ID NO: 821200 - RNA, 22 nt, Human
augcugugucaccuuaggauuu

SEQ ID NO: 821201 - RNA, 21 nt, Human
cugcuguggcccccgacaugc

SEQ ID NO: 821202 - RNA, 22 nt, Human
ucucuuucuauaugugagucuu

SEQ ID NO: 821203 - RNA, 22 nt, Human
cuuaagaugaggucaugcuaua

SEQ ID NO: 821204 - RNA, 19 nt, Human
uguguguuuauauauguau

SEQ ID NO: 821205 - RNA, 22 nt, Human
uuugacaugcaaagcacuuuag

SEQ ID NO: 821206 - RNA, 22 nt, Human
aaggcaguaggaucuuccacag

SEQ ID NO: 821207 - RNA, 22 nt, Human
uucugaaccauugagcacugcc

SEQ ID NO: 821208 - RNA, 18 nt, Human
ucuuccaacacugacacc

SEQ ID NO: 821209 - RNA, 22 nt, Human
gcagaggagcaaguugcuacag

SEQ ID NO: 821210 - RNA, 17 nt, Human
aggcagcucagaacauc

SEQ ID NO: 821211 - RNA, 22 nt, Human
gcccaggaguugguggcugcag

SEQ ID NO: 821212 - RNA, 23 nt, Human
agaggggagcaucugcuggcuga

SEQ ID NO: 821213 - RNA, 22 nt, Human
uagcacauuguugaccagaagg

SEQ ID NO: 821214 - RNA, 22 nt, Human
uugcacuaggaaaaggcagcca

SEQ ID NO: 821215 - RNA, 22 nt, Human
uguucucacuggaugcuucaca

SEQ ID NO: 821216 - RNA, 22 nt, Human
cacauauuugaugaagcuuugu

SEQ ID NO: 821217 - RNA, 23 nt, Human
aucauucuccaaucuggagcagg

SEQ ID NO: 821218 - RNA, 22 nt, Human
uucuucaaacaaaaguggcaug

SEQ ID NO: 821219 - RNA, 22 nt, Human
ucugucucaaguucuugcacuc

SEQ ID NO: 821220 - RNA, 20 nt, Human
gaagcagcuucauguagaca

SEQ ID NO: 821221 - RNA, 22 nt, Human
aauccugugugacucuggggag

SEQ ID NO: 821222 - RNA, 22 nt, Human
auugaaagaguuuucugcugca

SEQ ID NO: 821223 - RNA, 22 nt, Human
cuugaacucaaugugaggaaga

SEQ ID NO: 821224 - RNA, 22 nt, Human
uaucuaaaggauuuaauuuagu

SEQ ID NO: 821225 - RNA, 19 nt, Human
ugaaauggcaguugcuaaa

SEQ ID NO: 821226 - RNA, 22 nt, Human
uuucaguuuccagcuuugucau

SEQ ID NO: 821227 - RNA, 22 nt, Human
uaugaacuuuugaugugacaug

SEQ ID NO: 821228 - RNA, 22 nt, Human
auugucuuuccacugagaaguu

SEQ ID NO: 821229 - RNA, 22 nt, Human
cagucucucugaaguauuaaga

SEQ ID NO: 821230 - RNA, 22 nt, Human
uagaaaugaauguuuaaaaguc

SEQ ID NO: 821231 - RNA, 22 nt, Human
aguggcaggcggagauguagga

SEQ ID NO: 821232 - RNA, 22 nt, Human
gaaggccaguuuugagauaggu

SEQ ID NO: 821233 - RNA, 22 nt, Human
uggaggggcaauggagcgcgga

SEQ ID NO: 821234 - RNA, 22 nt, Human
auguuuccauuuucuuguauca

SEQ ID NO: 821235 - RNA, 22 nt, Human
cagcugugaauugucuuaucua

SEQ ID NO: 821236 - RNA, 22 nt, Human
ucagagagugcaaaauauagcu

SEQ ID NO: 821237 - RNA, 22 nt, Human
guaggcagugguuggaagagaa

SEQ ID NO: 821238 - RNA, 20 nt, Human
ugaaggccagcagcauaggg

SEQ ID NO: 821239 - RNA, 22 nt, Human
caggcagcucgaugccuuguug

SEQ ID NO: 821240 - RNA, 22 nt, Human
uguagaaagaauauguuucaua

SEQ ID NO: 821241 - RNA, 22 nt, Human
agaaggggagaagcuaccagga

SEQ ID NO: 821242 - RNA, 22 nt, Human
agaggggaggcgaaccagaguc

SEQ ID NO: 821243 - RNA, 17 nt, Human
ucccaggaacagggaau

SEQ ID NO: 821244 - RNA, 22 nt, Human
ucacaguaaaagcauggaagag

SEQ ID NO: 821245 - RNA, 22 nt, Human
cccaggaggcagagguugcagu

SEQ ID NO: 821246 - RNA, 22 nt, Human
ucaggaugaccacgagccucua

SEQ ID NO: 821247 - RNA, 22 nt, Human
ggcagcuggggcagugcccugu

SEQ ID NO: 821248 - RNA, 22 nt, Human
ggaggcugagaaguccaagauc

SEQ ID NO: 821249 - RNA, 22 nt, Human
uccaggagaaggccauccagcg

SEQ ID NO: 821250 - RNA, 22 nt, Human
aucugccugagucuagguuuuc

SEQ ID NO: 821251 - RNA, 22 nt, Human
gccaggaguguguggcuauguu

SEQ ID NO: 821252 - RNA, 18 nt, Human
ugaggcagucagugaugg

SEQ ID NO: 821253 - RNA, 22 nt, Human
uggcaaggccacaggugcaguu

SEQ ID NO: 821254 - RNA, 22 nt, Human
cagggaggcugucuuaugccug

SEQ ID NO: 821255 - RNA, 22 nt, Human
ggcaagaaggcuucagguagcu

SEQ ID NO: 821256 - RNA, 19 nt, Human
gaggagcuaucggagacag

SEQ ID NO: 821257 - RNA, 22 nt, Human
gcaugucaugucauguaggaau

SEQ ID NO: 821258 - RNA, 22 nt, Human
cauuuucagcacccaucugaaa

SEQ ID NO: 821259 - RNA, 22 nt, Human
cuguauuuguccucuauuuauu

SEQ ID NO: 821260 - RNA, 22 nt, Human
aucuucucaagcagcauccugu

SEQ ID NO: 821261 - RNA, 22 nt, Human
cugcugugcaacauugcaccua

SEQ ID NO: 821262 - RNA, 22 nt, Human
gcugcugugccuggcguccugu

SEQ ID NO: 821263 - RNA, 23 nt, Human
ucucaggacacacaugucuauca

SEQ ID NO: 821264 - RNA, 22 nt, Human
uuugaaagaauuuauguacuuu

SEQ ID NO: 821265 - RNA, 22 nt, Human
gcagcugccuucagcuggaugg

SEQ ID NO: 821266 - RNA, 22 nt, Human
ugucccucugaggcuucccugg

SEQ ID NO: 821267 - RNA, 22 nt, Human
cauauaaauacaacauguguua

SEQ ID NO: 821268 - RNA, 22 nt, Human
acugugugacuguuauuacugu

SEQ ID NO: 821269 - RNA, 22 nt, Human
gccaucacauccaggcuaccuc

SEQ ID NO: 821270 - RNA, 22 nt, Human
agguccagcuguugcagccucc

SEQ ID NO: 821271 - RNA, 22 nt, Human
agcuggcaguaugacuggugac

SEQ ID NO: 821272 - RNA, 22 nt, Human
ugaggcagcuuuuucugugugu

SEQ ID NO: 821273 - RNA, 17 nt, Human
ggcagccucaggcguuu

SEQ ID NO: 821274 - RNA, 22 nt, Human
ggcagcugcaaaucugcucugu

SEQ ID NO: 821275 - RNA, 22 nt, Human
uuugaagucaggcuuucuaccc

SEQ ID NO: 821276 - RNA, 22 nt, Human
uccaggagguaugaguggcccc

SEQ ID NO: 821277 - RNA, 22 nt, Human
uuugcauaggauggacauuuua

SEQ ID NO: 821278 - RNA, 22 nt, Human
aggagagcuggugucuggaauc

SEQ ID NO: 821279 - RNA, 22 nt, Human
auuguucaaagugcuuugcaug

SEQ ID NO: 821280 - RNA, 22 nt, Human
uuauuauagauuaugcaagauu

SEQ ID NO: 821281 - RNA, 22 nt, Human
aggcacaguggcucacaccugu

SEQ ID NO: 821282 - RNA, 22 nt, Human
gugcagcugcaggagucagguc

SEQ ID NO: 821283 - RNA, 22 nt, Human
gcuuugaagacuuuuccagggu

SEQ ID NO: 821284 - RNA, 22 nt, Human
aggccagcucuacccuuggacu

SEQ ID NO: 821285 - RNA, 20 nt, Human
uucacagaggacucagguca

SEQ ID NO: 821286 - RNA, 22 nt, Human
cagaggauucccuagugaccug

SEQ ID NO: 821287 - RNA, 22 nt, Human
agcugcccugggcuggagaugg

SEQ ID NO: 821288 - RNA, 22 nt, Human
aggccagcccugggcugagaga

SEQ ID NO: 821289 - RNA, 22 nt, Human
gcaucuaaacuugcaucauugu

SEQ ID NO: 821290 - RNA, 22 nt, Human
ucagagagccucaggcacugcc

SEQ ID NO: 821291 - RNA, 22 nt, Human
cuccaggaaaauagggaaugag

SEQ ID NO: 821292 - RNA, 22 nt, Human
auucuucacuguuucagaauga

SEQ ID NO: 821293 - RNA, 22 nt, Human
aggagaggucucccuuccccag

SEQ ID NO: 821294 - RNA, 22 nt, Human
ucaggauggcuucugcaucaaa

SEQ ID NO: 821295 - RNA, 22 nt, Human
uuaacaugucuugacuucaucu

SEQ ID NO: 821296 - RNA, 22 nt, Human
uggcagcugaauggcuggaugg

SEQ ID NO: 821297 - RNA, 22 nt, Human
uuucauggcuaggacuagagug

SEQ ID NO: 821298 - RNA, 22 nt, Human
ugcauauuguccuugauauuau

SEQ ID NO: 821299 - RNA, 22 nt, Human
cagaaggcuuuguggaguagac

SEQ ID NO: 821300 - RNA, 19 nt, Human
ucugccucuggucaggcuc

SEQ ID NO: 821301 - RNA, 22 nt, Human
cucaggauucucgacacucaca

SEQ ID NO: 821302 - RNA, 22 nt, Human
ucugaacuccagcccugcucuc

SEQ ID NO: 821303 - RNA, 22 nt, Human
caggguggcacaucacagcauu

SEQ ID NO: 821304 - RNA, 21 nt, Human
agcaccuuacagcuauaaugg

SEQ ID NO: 821305 - RNA, 22 nt, Human
guuauacauauguguuaacaaa

SEQ ID NO: 821306 - RNA, 22 nt, Human
uuuuaguguagucaccgugggu

SEQ ID NO: 821307 - RNA, 22 nt, Human
gcaguucuacuuauccauagac

SEQ ID NO: 821308 - RNA, 22 nt, Human
ugucugugaccucuuaggcaag

SEQ ID NO: 821309 - RNA, 22 nt, Human
caaggccaguucaccaagggca

SEQ ID NO: 821310 - RNA, 22 nt, Human
ucauuuguacuugugugcuugu

SEQ ID NO: 821311 - RNA, 22 nt, Human
uccaggagcucauccacgucaa

SEQ ID NO: 821312 - RNA, 22 nt, Human
gggaagcaggugcagcucgccu

SEQ ID NO: 821313 - RNA, 22 nt, Human
aucauucugauggucaaugcua

SEQ ID NO: 821314 - RNA, 22 nt, Human
gugguaauuuaauccuacacug

SEQ ID NO: 821315 - RNA, 22 nt, Human
acuguguggaccacucugaggc

SEQ ID NO: 821316 - RNA, 22 nt, Human
cuucccagaccuuagagugcag

SEQ ID NO: 821317 - RNA, 22 nt, Human
acuaagugauucuaagcaucuu

SEQ ID NO: 821318 - RNA, 22 nt, Human
ugaaggccagcagagugaaggc

SEQ ID NO: 821319 - RNA, 22 nt, Human
uuucacauaugguuguugauug

SEQ ID NO: 821320 - RNA, 22 nt, Human
ucuuuggaucccaacuggcugg

SEQ ID NO: 821321 - RNA, 22 nt, Human
ugauugaacugagcuucaagau

SEQ ID NO: 821322 - RNA, 22 nt, Human
aaguauuucguucugaaaaagu

SEQ ID NO: 821323 - RNA, 22 nt, Human
cccaggagguagagguugcagu

SEQ ID NO: 821324 - RNA, 22 nt, Human
cucaugucuucacccauucuaa

SEQ ID NO: 821325 - RNA, 22 nt, Human
cugaaugaggaaaagagugagg

SEQ ID NO: 821326 - RNA, 22 nt, Human
uggcagcugguacagugggucu

SEQ ID NO: 821327 - RNA, 22 nt, Human
cccaggaguuugaguucagcau

SEQ ID NO: 821328 - RNA, 20 nt, Human
gggagucuggaugaaagaug

SEQ ID NO: 821329 - RNA, 22 nt, Human
uaguuaaaauaauggagauguu

SEQ ID NO: 821330 - RNA, 22 nt, Human
ucuggcaggcaaucggcucugg

SEQ ID NO: 821331 - RNA, 22 nt, Human
cacaggagagcugggaggugcc

SEQ ID NO: 821332 - RNA, 21 nt, Human
aggcagcaggauccagggaca

SEQ ID NO: 821333 - RNA, 22 nt, Human
uccaugagggacacuggaugcu

SEQ ID NO: 821334 - RNA, 18 nt, Human
cgaggcaggcggaucacg

SEQ ID NO: 821335 - RNA, 22 nt, Human
cuuuggcacagucucauuugau

SEQ ID NO: 821336 - RNA, 22 nt, Human
caaaucuauauguugauauucu

SEQ ID NO: 821337 - RNA, 22 nt, Human
uuguuugaggucacugauauuu

SEQ ID NO: 821338 - RNA, 22 nt, Human
uauuuguugaguuguuaugucu

SEQ ID NO: 821339 - RNA, 23 nt, Human
cugcccugaucuugaucuauugu

SEQ ID NO: 821340 - RNA, 22 nt, Human
aauaauuagugggacagagaac

SEQ ID NO: 821341 - RNA, 22 nt, Human
cuacuucuaaguacauggugau

SEQ ID NO: 821342 - RNA, 22 nt, Human
uacaaaguagaaauucaguaaa

SEQ ID NO: 821343 - RNA, 22 nt, Human
cugcccaggcugaaggaacauc

SEQ ID NO: 821344 - RNA, 22 nt, Human
aagcuggaacaucuugaggaag

SEQ ID NO: 821345 - RNA, 22 nt, Human
cuggaaauuggagaugauguuu

SEQ ID NO: 821346 - RNA, 20 nt, Human
uugauucaagggcugaugga

SEQ ID NO: 821347 - RNA, 22 nt, Human
uccaugaggaccaaauucguag

SEQ ID NO: 821348 - RNA, 22 nt, Human
cuucucagaucucagcuuugag

SEQ ID NO: 821349 - RNA, 22 nt, Human
agucaauuaucucuaggucauc

SEQ ID NO: 821350 - RNA, 22 nt, Human
gucugucuguuguugagaagca

SEQ ID NO: 821351 - RNA, 22 nt, Human
uuggaauucaaguuguagcuua

SEQ ID NO: 821352 - RNA, 22 nt, Human
aaggcagcuucaccacagcauu

SEQ ID NO: 821353 - RNA, 22 nt, Human
uuucagcugguaaaggaguagc

SEQ ID NO: 821354 - RNA, 22 nt, Human
ugcauggacucaucagacaaga

SEQ ID NO: 821355 - RNA, 21 nt, Human
gauuugcagaaacuagacagg

SEQ ID NO: 821356 - RNA, 19 nt, Human
ggcagcuggacgcuguuca

SEQ ID NO: 821357 - RNA, 22 nt, Human
gcccaggagguggaggugcagu

SEQ ID NO: 821358 - RNA, 22 nt, Human
augaaggcuguguggagccccc

SEQ ID NO: 821359 - RNA, 22 nt, Human
agaggcagaaguguucaaaccc

SEQ ID NO: 821360 - RNA, 22 nt, Human
ugaggcagaaaauagcaguuca

SEQ ID NO: 821361 - RNA, 22 nt, Human
ucaucugucccaggcuuuuuuc

SEQ ID NO: 821362 - RNA, 22 nt, Human
cauuuuaagaugaccugguuuc

SEQ ID NO: 821363 - RNA, 22 nt, Human
cuucuucacacuggucugaagc

SEQ ID NO: 821364 - RNA, 22 nt, Human
uucacagucacccuucuccaug

SEQ ID NO: 821365 - RNA, 22 nt, Human
ucaggagaaagccaauuagagu

SEQ ID NO: 821366 - RNA, 21 nt, Human
uucucagagucuauuacaguu

SEQ ID NO: 821367 - RNA, 21 nt, Human
uuccagagauuguuucaccug

SEQ ID NO: 821368 - RNA, 22 nt, Human
auguuuccagguucuuccuaug

SEQ ID NO: 821369 - RNA, 22 nt, Human
uagugcuuuaggccugaguguc

SEQ ID NO: 821370 - RNA, 20 nt, Human
ucaggaugugcugagugaag

SEQ ID NO: 821371 - RNA, 19 nt, Human
ugcuagaaauucugugacu

SEQ ID NO: 821372 - RNA, 19 nt, Human
guugaaaguaggugagggu

SEQ ID NO: 821373 - RNA, 22 nt, Human
ccccaggacguggcccucauag

SEQ ID NO: 821374 - RNA, 22 nt, Human
cuggccagcugacagcagggcu

SEQ ID NO: 821375 - RNA, 22 nt, Human
cugagagugcucuuugauguca

SEQ ID NO: 821376 - RNA, 19 nt, Human
uucuccagccugaccugag

SEQ ID NO: 821377 - RNA, 22 nt, Human
aucaggaugacuauaaggcugc

SEQ ID NO: 821378 - RNA, 22 nt, Human
cuucucaguugcaagugucaga

SEQ ID NO: 821379 - RNA, 20 nt, Human
cccaggaguuugcucuuacu

SEQ ID NO: 821380 - RNA, 22 nt, Human
cucagaagccuucagucuuggc

SEQ ID NO: 821381 - RNA, 17 nt, Human
uucucugagcuguauug

SEQ ID NO: 821382 - RNA, 22 nt, Human
augacaguucuacacuuaaucu

SEQ ID NO: 821383 - RNA, 18 nt, Human
acucaggaaaugaugaca

SEQ ID NO: 821384 - RNA, 22 nt, Human
uucauucuugggaucagagagu

SEQ ID NO: 821385 - RNA, 22 nt, Human
augcugugucuagcaggaacac

SEQ ID NO: 821386 - RNA, 22 nt, Human
cagaaccaggaacugauggaga

SEQ ID NO: 821387 - RNA, 19 nt, Human
uuucuuaggccuuuggccu

SEQ ID NO: 821388 - RNA, 22 nt, Human
aaggcagcagaggaaaggugcu

SEQ ID NO: 821389 - RNA, 22 nt, Human
uacuuuuagccuauuugauucu

SEQ ID NO: 821390 - RNA, 22 nt, Human
uggcagcugcguuguguuucug

SEQ ID NO: 821391 - RNA, 22 nt, Human
uggcagcuguguccagguagaa

SEQ ID NO: 821392 - RNA, 22 nt, Human
aaacugcuuuccacaguggcua

SEQ ID NO: 821393 - RNA, 23 nt, Human
gggcaguuauguuguccuuggcu

SEQ ID NO: 821394 - RNA, 22 nt, Human
augcugagugagugaaacccag

SEQ ID NO: 821395 - RNA, 22 nt, Human
ucucuucuaacacuagaaauuc

SEQ ID NO: 821396 - RNA, 22 nt, Human
gcagcugccccgacugugaguc

SEQ ID NO: 821397 - RNA, 22 nt, Human
ggugaaggcacaagagggcaag

SEQ ID NO: 821398 - RNA, 22 nt, Human
agcuggcagcucucagggguac

SEQ ID NO: 821399 - RNA, 22 nt, Human
uguauuuuuagaccuuuagacc

SEQ ID NO: 821400 - RNA, 22 nt, Human
ugacccauggucugaucauagg

SEQ ID NO: 821401 - RNA, 22 nt, Human
aaaggaagaugccaggacucug

SEQ ID NO: 821402 - RNA, 22 nt, Human
gaaggccauugcguccugggau

SEQ ID NO: 821403 - RNA, 22 nt, Human
cagcugacccagugaggaggca

SEQ ID NO: 821404 - RNA, 22 nt, Human
gcaaagcauucuguggagucua

SEQ ID NO: 821405 - RNA, 22 nt, Human
ggaggcgauccugggaaacacc

SEQ ID NO: 821406 - RNA, 22 nt, Human
acccaggacaaaauaaccaggu

SEQ ID NO: 821407 - RNA, 22 nt, Human
cccaucacagacacuggguuau

SEQ ID NO: 821408 - RNA, 22 nt, Human
accaggaggaaguguuaaugau

SEQ ID NO: 821409 - RNA, 22 nt, Human
agggacuuguguccuauguaug

SEQ ID NO: 821410 - RNA, 22 nt, Human
uuucuagggcucuugucuucug

SEQ ID NO: 821411 - RNA, 22 nt, Human
uaaugucaaggugauagauuug

SEQ ID NO: 821412 - RNA, 22 nt, Human
uaaugucagcauaguuuauuuu

SEQ ID NO: 821413 - RNA, 22 nt, Human
gaggggaaaguucugcacaagg

SEQ ID NO: 821414 - RNA, 22 nt, Human
ggaggagguggguuaaguugua

SEQ ID NO: 821415 - RNA, 22 nt, Human
aaucauucuuauuucacagcaa

SEQ ID NO: 821416 - RNA, 22 nt, Human
ucugcagggaugugagggguga

SEQ ID NO: 821417 - RNA, 22 nt, Human
cuucuucaagagaaugggagac

SEQ ID NO: 821418 - RNA, 22 nt, Human
ugagccugguugcagugucugg

SEQ ID NO: 821419 - RNA, 22 nt, Human
ucaaauaccagcaauuucaugu

SEQ ID NO: 821420 - RNA, 17 nt, Human
agagggaaaaugcgguu

SEQ ID NO: 821421 - RNA, 22 nt, Human
agcccagggaaccaggaagugg

SEQ ID NO: 821422 - RNA, 22 nt, Human
aacauauaaacucuuaaguuca

SEQ ID NO: 821423 - RNA, 22 nt, Human
uccacauccauugcuugacuuu

SEQ ID NO: 821424 - RNA, 22 nt, Human
ucucacuuuccagacuuuucaa

SEQ ID NO: 821425 - RNA, 23 nt, Human
uccugaggguuucccagccuugg

SEQ ID NO: 821426 - RNA, 22 nt, Human
acuuggcaaguaucuauaaagu

SEQ ID NO: 821427 - RNA, 22 nt, Human
ucuucacauggaacaugaagcu

SEQ ID NO: 821428 - RNA, 17 nt, Human
aaggccauuuccaccca

SEQ ID NO: 821429 - RNA, 22 nt, Human
aaugucugagucucuguauccc

SEQ ID NO: 821430 - RNA, 22 nt, Human
guccaugauucuguguaguaga

SEQ ID NO: 821431 - RNA, 22 nt, Human
ugauuuccccagucuugcugcu

SEQ ID NO: 821432 - RNA, 22 nt, Human
agcaccuugcucuuggccuucc

SEQ ID NO: 821433 - RNA, 22 nt, Human
cuuaaagaaauugaggagagga

SEQ ID NO: 821434 - RNA, 22 nt, Human
accaggaggccuggagcacaaa

SEQ ID NO: 821435 - RNA, 22 nt, Human
ugaggcaggaguuaaugugcuc

SEQ ID NO: 821436 - RNA, 22 nt, Human
ugcuucugggcaaaugugugug

SEQ ID NO: 821437 - RNA, 22 nt, Human
ucccaggaauugaagccagugu

SEQ ID NO: 821438 - RNA, 17 nt, Human
gagagcugcugcuuccg

SEQ ID NO: 821439 - RNA, 22 nt, Human
guuguuuugcaggauccuuaca

SEQ ID NO: 821440 - RNA, 22 nt, Human
gagaggagguggcuaugacagc

SEQ ID NO: 821441 - RNA, 22 nt, Human
cuguaaauaugaagaauauaug

SEQ ID NO: 821442 - RNA, 22 nt, Human
augcagcuucaggauuaugaug

SEQ ID NO: 821443 - RNA, 23 nt, Human
uugauuucaaaugcagagaacac

SEQ ID NO: 821444 - RNA, 22 nt, Human
gcccaggacucagggugucgcg

SEQ ID NO: 821445 - RNA, 22 nt, Human
aucuuucuauuucuaaaaacua

SEQ ID NO: 821446 - RNA, 22 nt, Human
ugaaaugacaaagguuuuucuu

SEQ ID NO: 821447 - RNA, 22 nt, Human
uugagaagaaauaguuugcaau

SEQ ID NO: 821448 - RNA, 22 nt, Human
ccaggcugggcuacaaguugag

SEQ ID NO: 821449 - RNA, 21 nt, Human
ccauaccuaccucaccugguu

SEQ ID NO: 821450 - RNA, 22 nt, Human
aggcaggcugcuauggaguaga

SEQ ID NO: 821451 - RNA, 18 nt, Human
augggaggggccaagaga

SEQ ID NO: 821452 - RNA, 22 nt, Human
acaagcaugggcuuugacauca

SEQ ID NO: 821453 - RNA, 20 nt, Human
ugugcaggagagugaggcug

SEQ ID NO: 821454 - RNA, 22 nt, Human
cagucuuuguucccauuacuga

SEQ ID NO: 821455 - RNA, 22 nt, Human
uguccucagauaugucuacucu

SEQ ID NO: 821456 - RNA, 22 nt, Human
agggugguucuuuuaguggaag

SEQ ID NO: 821457 - RNA, 22 nt, Human
acuucaugcagaagagagcugu

SEQ ID NO: 821458 - RNA, 22 nt, Human
ggaggggagauguuugggcuca

SEQ ID NO: 821459 - RNA, 22 nt, Human
ugucaaauuuuuauugcaguau

SEQ ID NO: 821460 - RNA, 22 nt, Human
gaucuucucuuuaguagaaaca

SEQ ID NO: 821461 - RNA, 22 nt, Human
cugcuguguuucugcuagaaaa

SEQ ID NO: 821462 - RNA, 22 nt, Human
auguuucaccagcaaauuaccu

SEQ ID NO: 821463 - RNA, 22 nt, Human
ggcaugcugcguacagaugaac

SEQ ID NO: 821464 - RNA, 22 nt, Human
uggcagcuauuacaaggaaguc

SEQ ID NO: 821465 - RNA, 22 nt, Human
gcagcugcagacccucagugcu

SEQ ID NO: 821466 - RNA, 22 nt, Human
ggaggaggggcgcuuugucuau

SEQ ID NO: 821467 - RNA, 22 nt, Human
uuccaugaagggcagccucuca

SEQ ID NO: 821468 - RNA, 22 nt, Human
agaaaugaagagagucaagguu

SEQ ID NO: 821469 - RNA, 22 nt, Human
uuucaaagaguuguaaauuacu

SEQ ID NO: 821470 - RNA, 22 nt, Human
ccucacugaagaggugacauuu

SEQ ID NO: 821471 - RNA, 22 nt, Human
ggacagcugcuuucaggccaca

SEQ ID NO: 821472 - RNA, 22 nt, Human
aucaggauggguuuggcuuagg

SEQ ID NO: 821473 - RNA, 22 nt, Human
uagugcuugagucucuccguac

SEQ ID NO: 821474 - RNA, 22 nt, Human
caugcuguguguuuuagcucca

SEQ ID NO: 821475 - RNA, 22 nt, Human
guguguuuagcauuagcagggg

SEQ ID NO: 821476 - RNA, 22 nt, Human
uaggcagcugcaaacuucgguc

SEQ ID NO: 821477 - RNA, 22 nt, Human
cgccucagccguggucaucuuc

SEQ ID NO: 821478 - RNA, 22 nt, Human
ugaaggaaugaguauacuguuu

SEQ ID NO: 821479 - RNA, 22 nt, Human
uuucaucuuccuuggcauaggu

SEQ ID NO: 821480 - RNA, 22 nt, Human
guuuuaguggguggccacugau

SEQ ID NO: 821481 - RNA, 22 nt, Human
aagaggaggacgguucccagaa

SEQ ID NO: 821482 - RNA, 23 nt, Human
uugcacauuggagcuggucuucu

SEQ ID NO: 821483 - RNA, 22 nt, Human
uugcaucuagggcaacccagag

SEQ ID NO: 821484 - RNA, 22 nt, Human
uuucuaggucuuccauacugcc

SEQ ID NO: 821485 - RNA, 22 nt, Human
ccuggauucaagucuuucuuuc

SEQ ID NO: 821486 - RNA, 22 nt, Human
gugcugugucuaucaggaauaa

SEQ ID NO: 821487 - RNA, 22 nt, Human
ggccaggaagggaagaucagca

SEQ ID NO: 821488 - RNA, 22 nt, Human
aggcugcuucaauggauaagau

SEQ ID NO: 821489 - RNA, 20 nt, Human
ggggcugcaugcagagaaga

SEQ ID NO: 821490 - RNA, 22 nt, Human
auucuucacaccuguuccuguu

SEQ ID NO: 821491 - RNA, 22 nt, Human
uuaaauuccagccucauaauag

SEQ ID NO: 821492 - RNA, 22 nt, Human
cugagcugggaguagagacucu

SEQ ID NO: 821493 - RNA, 22 nt, Human
aaucuucuuucuuaacaguaca

SEQ ID NO: 821494 - RNA, 19 nt, Human
aucugccuguuaucacaua

SEQ ID NO: 821495 - RNA, 22 nt, Human
gcuuggcauugaccauuaucau

SEQ ID NO: 821496 - RNA, 22 nt, Human
uuguuauaaagacuaaauaugu

SEQ ID NO: 821497 - RNA, 22 nt, Human
gacagcugugcaggagaagggg

SEQ ID NO: 821498 - RNA, 22 nt, Human
aagugagugguaaggagcaugg

SEQ ID NO: 821499 - RNA, 22 nt, Human
cacucaggcugugucaggagga

SEQ ID NO: 821500 - RNA, 22 nt, Human
uuucacauuuaggcgugaauug

SEQ ID NO: 821501 - RNA, 22 nt, Human
aggcagguccccuggaaggcac

SEQ ID NO: 821502 - RNA, 22 nt, Human
gaaaggcaguacagcugagccu

SEQ ID NO: 821503 - RNA, 22 nt, Human
acaccauacucauguugguucc

SEQ ID NO: 821504 - RNA, 22 nt, Human
aucuuguuauaagagauaaugg

SEQ ID NO: 821505 - RNA, 22 nt, Human
aguaaaaauugaggugcaaaau

SEQ ID NO: 821506 - RNA, 22 nt, Human
uaugauuuguagacauuugauu

SEQ ID NO: 821507 - RNA, 22 nt, Human
ugcugagguuucgucugcuugc

SEQ ID NO: 821508 - RNA, 22 nt, Human
aagcagcuuuugaagagugagg

SEQ ID NO: 821509 - RNA, 22 nt, Human
cugcugugcaggugccuaugau

SEQ ID NO: 821510 - RNA, 22 nt, Human
cagcagagggagccauugaaau

SEQ ID NO: 821511 - RNA, 22 nt, Human
gugacagucaaagacaugacuu

SEQ ID NO: 821512 - RNA, 22 nt, Human
uugcugugaaaccaugggaagu

SEQ ID NO: 821513 - RNA, 22 nt, Human
caacauuucaaggucuuuagga

SEQ ID NO: 821514 - RNA, 22 nt, Human
ccaggaaauggcuugcuucuuu

SEQ ID NO: 821515 - RNA, 22 nt, Human
gagagaggccuccauguacuga

SEQ ID NO: 821516 - RNA, 22 nt, Human
cagaaauguacugacaugcagu

SEQ ID NO: 821517 - RNA, 22 nt, Human
uuuucauuguuccucgagcauu

SEQ ID NO: 821518 - RNA, 22 nt, Human
uucagaaguagcuaagcaguca

SEQ ID NO: 821519 - RNA, 22 nt, Human
cuagccaugggcauuaaaggua

SEQ ID NO: 821520 - RNA, 22 nt, Human
gauuuuauauggcauacugugg

SEQ ID NO: 821521 - RNA, 22 nt, Human
ggggcagccuccaggaaagcug

SEQ ID NO: 821522 - RNA, 22 nt, Human
guugaaagaugucuugguuccc

SEQ ID NO: 821523 - RNA, 22 nt, Human
acccaggagguggaggcugcag

SEQ ID NO: 821524 - RNA, 22 nt, Human
uugcccagaguccacagcguac

SEQ ID NO: 821525 - RNA, 22 nt, Human
auucacaaaaugauauagauac

SEQ ID NO: 821526 - RNA, 21 nt, Human
agggagcuggccacacagccu

SEQ ID NO: 821527 - RNA, 22 nt, Human
uuuuccagauuggacuuagucc

SEQ ID NO: 821528 - RNA, 23 nt, Human
auguauuuaaauuucagugauga

SEQ ID NO: 821529 - RNA, 22 nt, Human
auuaaauuagcaaacugugaaa

SEQ ID NO: 821530 - RNA, 22 nt, Human
cugcuuuguaaaauagacauaa

SEQ ID NO: 821531 - RNA, 22 nt, Human
uucaacuagauuuauacaauuc

SEQ ID NO: 821532 - RNA, 22 nt, Human
uagaaaugauugguugagcucu

SEQ ID NO: 821533 - RNA, 22 nt, Human
cagcugccugucuggaggcaau

SEQ ID NO: 821534 - RNA, 22 nt, Human
caacugagcaguagcgucugga

SEQ ID NO: 821535 - RNA, 22 nt, Human
cagacaggcaggugcugcuuug

SEQ ID NO: 821536 - RNA, 22 nt, Human
gagguagcgaguggacagugca

SEQ ID NO: 821537 - RNA, 22 nt, Human
uucuucuucaagugcugcauuc

SEQ ID NO: 821538 - RNA, 22 nt, Human
gcccaggaguucaagucuagug

SEQ ID NO: 821539 - RNA, 22 nt, Human
uucugugaaucuuuuuucccac

SEQ ID NO: 821540 - RNA, 22 nt, Human
ucucacugcaaauauuauguau

SEQ ID NO: 821541 - RNA, 22 nt, Human
cugagccagcuggcaugugcua

SEQ ID NO: 821542 - RNA, 22 nt, Human
guggaaugaauagauuugcauu

SEQ ID NO: 821543 - RNA, 17 nt, Human
uuugaaaggaugucagu

SEQ ID NO: 821544 - RNA, 22 nt, Human
uuggcagugucugcaaaaugga

SEQ ID NO: 821545 - RNA, 22 nt, Human
ucucccaggcugcccuguggac

SEQ ID NO: 821546 - RNA, 22 nt, Human
cccaggaacagggcucagaccc

SEQ ID NO: 821547 - RNA, 23 nt, Human
ugaguucucaucuuggcuucuau

SEQ ID NO: 821548 - RNA, 22 nt, Human
cucuuaguaaugccaugaagca

SEQ ID NO: 821549 - RNA, 22 nt, Human
ucugaaagaagggcagucuuuu

SEQ ID NO: 821550 - RNA, 22 nt, Human
gagagaaaugugcaguuugggc

SEQ ID NO: 821551 - RNA, 22 nt, Human
uuagccauuuuauacaagugua

SEQ ID NO: 821552 - RNA, 22 nt, Human
agaaaauauucauugagaggcu

SEQ ID NO: 821553 - RNA, 22 nt, Human
gaggacagagccgccuggcaag

SEQ ID NO: 821554 - RNA, 22 nt, Human
ugaaucauggauaaauagcuua

SEQ ID NO: 821555 - RNA, 22 nt, Human
agucacuguucugucaugucaa

SEQ ID NO: 821556 - RNA, 22 nt, Human
uucaauucuaaacuaauauucu

SEQ ID NO: 821557 - RNA, 22 nt, Human
ucccaggauguuggcggcaggu

SEQ ID NO: 821558 - RNA, 22 nt, Human
gaaacugugaggaucuuaacuu

SEQ ID NO: 821559 - RNA, 22 nt, Human
uauuuuaaagacugccagccua

SEQ ID NO: 821560 - RNA, 22 nt, Human
aggaaaacacaguauugaugga

SEQ ID NO: 821561 - RNA, 22 nt, Human
ccauccugcauugcuauucaga

SEQ ID NO: 821562 - RNA, 22 nt, Human
cauuuguaucugggcugcugug

SEQ ID NO: 821563 - RNA, 22 nt, Human
gcuagaaaucgacuucagaauu

SEQ ID NO: 821564 - RNA, 22 nt, Human
agcugcccuuuaugaugcugaa

SEQ ID NO: 821565 - RNA, 22 nt, Human
uuugaaagcaggugugggaggg

SEQ ID NO: 821566 - RNA, 22 nt, Human
uuucuuaguccuagagugauuu

SEQ ID NO: 821567 - RNA, 22 nt, Human
cugcgcagggguggcgccagaa

SEQ ID NO: 821568 - RNA, 22 nt, Human
uucaugugaucacagauuguaa

SEQ ID NO: 821569 - RNA, 22 nt, Human
augcugugguagacagcauucc

SEQ ID NO: 821570 - RNA, 22 nt, Human
gucuucuuguguugccugucuu

SEQ ID NO: 821571 - RNA, 22 nt, Human
uucaggauucucucccauuuac

SEQ ID NO: 821572 - RNA, 22 nt, Human
caauacuuccuuguuagaggca

SEQ ID NO: 821573 - RNA, 22 nt, Human
uggaguuccuuugaaaggcucu

SEQ ID NO: 821574 - RNA, 22 nt, Human
cuguucucuggcgguggcuguu

SEQ ID NO: 821575 - RNA, 22 nt, Human
aagcaccugcaguugacaaaaa

SEQ ID NO: 821576 - RNA, 18 nt, Human
gugcugugggcaguggcc

SEQ ID NO: 821577 - RNA, 22 nt, Human
caggcagcugaggacuuugcua

SEQ ID NO: 821578 - RNA, 22 nt, Human
uaucaauacauguuaucagugu

SEQ ID NO: 821579 - RNA, 21 nt, Human
ccugcugugaucuuagugagu

SEQ ID NO: 821580 - RNA, 22 nt, Human
uaaauuguuuucuagaaguugu

SEQ ID NO: 821581 - RNA, 22 nt, Human
aucugccuggcuccaggugagc

SEQ ID NO: 821582 - RNA, 20 nt, Human
ugcguguguauuuauuuucu

SEQ ID NO: 821583 - RNA, 22 nt, Human
ccaggagaugggaaaguagcag

SEQ ID NO: 821584 - RNA, 22 nt, Human
augcuguggaaguuccugaagc

SEQ ID NO: 821585 - RNA, 22 nt, Human
uuugaaaggaauuaggaugaca

SEQ ID NO: 821586 - RNA, 20 nt, Human
augauuuugcacuaacuuca

SEQ ID NO: 821587 - RNA, 22 nt, Human
cugccaucugagccaaaagugc

SEQ ID NO: 821588 - RNA, 22 nt, Human
gaggcagcaugguaccuuggag

SEQ ID NO: 821589 - RNA, 22 nt, Human
aaaugaugcucacagauuagug

SEQ ID NO: 821590 - RNA, 19 nt, Human
agacagagcucaguggguu

SEQ ID NO: 821591 - RNA, 22 nt, Human
gggacgggcaguccaagggguc

SEQ ID NO: 821592 - RNA, 22 nt, Human
auguucuuguucaaaugucagu

SEQ ID NO: 821593 - RNA, 22 nt, Human
aggguggcuggaggaaucagaa

SEQ ID NO: 821594 - RNA, 22 nt, Human
cggagaggaccugcaacucgcu

SEQ ID NO: 821595 - RNA, 22 nt, Human
uucugaaagccaauucauugaa

SEQ ID NO: 821596 - RNA, 22 nt, Human
gaggccagaguuccccgaguca

SEQ ID NO: 821597 - RNA, 23 nt, Human
uaugaacugcauugcuggugugu

SEQ ID NO: 821598 - RNA, 22 nt, Human
uacacacagaggccaugggauu

SEQ ID NO: 821599 - RNA, 22 nt, Human
auguuuccgugagcauccuuga

SEQ ID NO: 821600 - RNA, 22 nt, Human
ccagguaggagagagggauccu

SEQ ID NO: 821601 - RNA, 22 nt, Human
aagcagaggaccgacggaggga

SEQ ID NO: 821602 - RNA, 22 nt, Human
ucuucuucccaucccucaaaug

SEQ ID NO: 821603 - RNA, 22 nt, Human
cccaggaaaguggaggcggcug

SEQ ID NO: 821604 - RNA, 22 nt, Human
uuucuucucgacaccuuauccc

SEQ ID NO: 821605 - RNA, 22 nt, Human
cauuuguuaauuacuauuaucu

SEQ ID NO: 821606 - RNA, 22 nt, Human
ugccuguguccccuucuuggca

SEQ ID NO: 821607 - RNA, 21 nt, Human
aggcaucuaaagagaguagac

SEQ ID NO: 821608 - RNA, 22 nt, Human
uaagaacuucggacauguuauc

SEQ ID NO: 821609 - RNA, 22 nt, Human
gggagcugaauggcaauggaga

SEQ ID NO: 821610 - RNA, 22 nt, Human
aaagccauuacaaaauuucaua

SEQ ID NO: 821611 - RNA, 22 nt, Human
gggagucugggcuagacuccuu

SEQ ID NO: 821612 - RNA, 22 nt, Human
uugcuuuguggugguucuucca

SEQ ID NO: 821613 - RNA, 22 nt, Human
cuugaaagaagggucuuuuaau

SEQ ID NO: 821614 - RNA, 22 nt, Human
ccuugcugcgugcuagcacaga

SEQ ID NO: 821615 - RNA, 22 nt, Human
auguucuuucagccagugcauc

SEQ ID NO: 821616 - RNA, 22 nt, Human
cugcugugaguuuggaggucua

SEQ ID NO: 821617 - RNA, 22 nt, Human
gucugucucccugugacugaga

SEQ ID NO: 821618 - RNA, 22 nt, Human
cagucccuaguggagcucacag

SEQ ID NO: 821619 - RNA, 22 nt, Human
auugaaagagaauguagcucuu

SEQ ID NO: 821620 - RNA, 22 nt, Human
cuugaaagcacuccuuugacug

SEQ ID NO: 821621 - RNA, 22 nt, Human
aggagggacaccaauauauguu

SEQ ID NO: 821622 - RNA, 22 nt, Human
uugaaaguuuauggagucugca

SEQ ID NO: 821623 - RNA, 22 nt, Human
augcaucuauucccaagggcag

SEQ ID NO: 821624 - RNA, 15 nt, Human
cuccaugauuuugca

SEQ ID NO: 821625 - RNA, 22 nt, Human
cuucuucaauagcaagcgcaua

SEQ ID NO: 821626 - RNA, 22 nt, Human
agaccauagggaccucagguug

SEQ ID NO: 821627 - RNA, 22 nt, Human
ccucaggaaccacauugcugcu

SEQ ID NO: 821628 - RNA, 22 nt, Human
uuuauuguuuagaagggggcug

SEQ ID NO: 821629 - RNA, 21 nt, Human
uucaaaaugguguguuugucu

SEQ ID NO: 821630 - RNA, 22 nt, Human
caggagagauaugaguccccac

SEQ ID NO: 821631 - RNA, 20 nt, Human
aggcagcuggccaggcaggu

SEQ ID NO: 821632 - RNA, 22 nt, Human
cccaggcagccugcagggaagg

SEQ ID NO: 821633 - RNA, 22 nt, Human
auuucaaggcuauuaauauaaa

SEQ ID NO: 821634 - RNA, 22 nt, Human
uggagacucugcaucugugaca

SEQ ID NO: 821635 - RNA, 22 nt, Human
auugaaagcauggauuuggauu

SEQ ID NO: 821636 - RNA, 20 nt, Human
ucuggcaggugaacgagcug

SEQ ID NO: 821637 - RNA, 22 nt, Human
uuauacauguguuuugagauga

SEQ ID NO: 821638 - RNA, 22 nt, Human
ccuggagagagaggccaacugc

SEQ ID NO: 821639 - RNA, 22 nt, Human
caggagaaauguggcugcuacc

SEQ ID NO: 821640 - RNA, 22 nt, Human
ugaggggagaagcagcagccug

SEQ ID NO: 821641 - RNA, 22 nt, Human
ugugaacuggcagguggacggg

SEQ ID NO: 821642 - RNA, 22 nt, Human
ugaggcaguucuuacuuguauu

SEQ ID NO: 821643 - RNA, 22 nt, Human
ucaggagauggucuuuauaggc

SEQ ID NO: 821644 - RNA, 22 nt, Human
uauuuucuguggaggaccagau

SEQ ID NO: 821645 - RNA, 22 nt, Human
ugauuuuuagcuauucugaaga

SEQ ID NO: 821646 - RNA, 22 nt, Human
acucaggaaaugaagacugguu

SEQ ID NO: 821647 - RNA, 22 nt, Human
ucaucugucauccacaaagcug

SEQ ID NO: 821648 - RNA, 22 nt, Human
uacagcuaggcaaaaaugacau

SEQ ID NO: 821649 - RNA, 22 nt, Human
uucucugaguacguuucagugu

SEQ ID NO: 821650 - RNA, 22 nt, Human
cccaggaaacccgaaggcgacc

SEQ ID NO: 821651 - RNA, 22 nt, Human
guaggcagggcuguggggagaa

SEQ ID NO: 821652 - RNA, 22 nt, Human
uguccucuuccagugcuccuuc

SEQ ID NO: 821653 - RNA, 22 nt, Human
ucugggaaccagugcggcuggg

SEQ ID NO: 821654 - RNA, 22 nt, Human
ccaggagacaaagaugacugcu

SEQ ID NO: 821655 - RNA, 22 nt, Human
cauugcuguuaauugucucuag

SEQ ID NO: 821656 - RNA, 19 nt, Human
agcauuuggaauucuacac

SEQ ID NO: 821657 - RNA, 22 nt, Human
ccaggauggggagcagauagaa

SEQ ID NO: 821658 - RNA, 22 nt, Human
ucacugcugcugccaugaugga

SEQ ID NO: 821659 - RNA, 17 nt, Human
gcuguaguuugauaaga

SEQ ID NO: 821660 - RNA, 22 nt, Human
acagucuacuugagcuuguaua

SEQ ID NO: 821661 - RNA, 23 nt, Human
cuugcagggcuggaggcuuagaa

SEQ ID NO: 821662 - RNA, 22 nt, Human
augcagcugugggcaagaaaug

SEQ ID NO: 821663 - RNA, 22 nt, Human
cucagugugaaugcucaguaaa

SEQ ID NO: 821664 - RNA, 22 nt, Human
aggcaggcucaaugcccagucu

SEQ ID NO: 821665 - RNA, 22 nt, Human
uucagcaaacacgaugcuuguu

SEQ ID NO: 821666 - RNA, 22 nt, Human
guucuucagauuccauuucagu

SEQ ID NO: 821667 - RNA, 22 nt, Human
gggcagcuccuguggaauccac

SEQ ID NO: 821668 - RNA, 22 nt, Human
uugaauaguguuuucaguauac

SEQ ID NO: 821669 - RNA, 22 nt, Human
cccuuagcuccaagggguuugg

SEQ ID NO: 821670 - RNA, 22 nt, Human
cuucagaauccagaaucagaau

SEQ ID NO: 821671 - RNA, 22 nt, Human
augcugugucaggaauuugaua

SEQ ID NO: 821672 - RNA, 22 nt, Human
uugcaauagccuuauuuccaaa

SEQ ID NO: 821673 - RNA, 22 nt, Human
agacagugcaagaagagcaggc

SEQ ID NO: 821674 - RNA, 22 nt, Human
auuuugaugcuaucuaaugaau

SEQ ID NO: 821675 - RNA, 22 nt, Human
acaaaugugucuaauugugccu

SEQ ID NO: 821676 - RNA, 22 nt, Human
ccaggagagcaaaggucacucu

SEQ ID NO: 821677 - RNA, 22 nt, Human
gcuugaaaauucauagguauuu

SEQ ID NO: 821678 - RNA, 22 nt, Human
aaaagucugcucucauuucaga

SEQ ID NO: 821679 - RNA, 23 nt, Human
aggcagcuggguagcaucuuucu

SEQ ID NO: 821680 - RNA, 22 nt, Human
cagagcucuauguucauggagg

SEQ ID NO: 821681 - RNA, 22 nt, Human
auuuggcaacauuaauugaauc

SEQ ID NO: 821682 - RNA, 22 nt, Human
uggcaggcagugugggagcugg

SEQ ID NO: 821683 - RNA, 22 nt, Human
cauuuccagcuccugcaucaug

SEQ ID NO: 821684 - RNA, 22 nt, Human
ccucaggauacaggagccacag

SEQ ID NO: 821685 - RNA, 22 nt, Human
uucauucuuauuugugaucugg

SEQ ID NO: 821686 - RNA, 22 nt, Human
aucuuucagggccauuuguauu

SEQ ID NO: 821687 - RNA, 22 nt, Human
aauagcucacugauuucucuuu

SEQ ID NO: 821688 - RNA, 22 nt, Human
gggcagcuggauaguuuuaaau

SEQ ID NO: 821689 - RNA, 22 nt, Human
uagggauguggugagaacugag

SEQ ID NO: 821690 - RNA, 22 nt, Human
uuagagucaaaauggcauguua

SEQ ID NO: 821691 - RNA, 22 nt, Human
auauaauacaaccugcuaagug

SEQ ID NO: 821692 - RNA, 22 nt, Human
uugcuuugccaccagaagucua

SEQ ID NO: 821693 - RNA, 22 nt, Human
aguguuugagacacauuucacu

SEQ ID NO: 821694 - RNA, 19 nt, Human
gcuuuggagggagguucua

SEQ ID NO: 821695 - RNA, 22 nt, Human
aaggccagaguacuagaggcug

SEQ ID NO: 821696 - RNA, 22 nt, Human
cuucugaggcagcuauucaguu

SEQ ID NO: 821697 - RNA, 22 nt, Human
aggcaggcacacuuccuccagg

SEQ ID NO: 821698 - RNA, 22 nt, Human
ucauuugugugagugauuugac

SEQ ID NO: 821699 - RNA, 22 nt, Human
gcugcccaggguggagccggcu

SEQ ID NO: 821700 - RNA, 22 nt, Human
agugcuuugagcguuugaaaag

SEQ ID NO: 821701 - RNA, 22 nt, Human
gaggcugauucggggaacagca

SEQ ID NO: 821702 - RNA, 22 nt, Human
gacccaggguggucaccugaaa

SEQ ID NO: 821703 - RNA, 22 nt, Human
aaaggccaccaacaugaagcau

SEQ ID NO: 821704 - RNA, 22 nt, Human
uugaaaggugaacaugaugcac

SEQ ID NO: 821705 - RNA, 22 nt, Human
agaagucauuuauguuagauga

SEQ ID NO: 821706 - RNA, 22 nt, Human
ccuugcugaccaucaccuuuga

SEQ ID NO: 821707 - RNA, 22 nt, Human
uggaggaaaaaaccaggcagag

SEQ ID NO: 821708 - RNA, 22 nt, Human
cacucaggguacaauggagggc

SEQ ID NO: 821709 - RNA, 21 nt, Human
auacacauacacauaaaugug

SEQ ID NO: 821710 - RNA, 22 nt, Human
acagucauuagauacaaugucu

SEQ ID NO: 821711 - RNA, 22 nt, Human
uccaugaggcagggaggcuggc

SEQ ID NO: 821712 - RNA, 22 nt, Human
aagauggagcacgagcagaagc

SEQ ID NO: 821713 - RNA, 22 nt, Human
agagcagcugugacauggacag

SEQ ID NO: 821714 - RNA, 22 nt, Human
gcucagagcuugaaguuccacu

SEQ ID NO: 821715 - RNA, 22 nt, Human
guuuuucuaggaccaugugauu

SEQ ID NO: 821716 - RNA, 22 nt, Human
uauuucagguauggugugaaau

SEQ ID NO: 821717 - RNA, 22 nt, Human
cugccaggcgauggauuggcug

SEQ ID NO: 821718 - RNA, 22 nt, Human
ucuccucuauuucuguauguau

SEQ ID NO: 821719 - RNA, 22 nt, Human
cagcagagcugggcuuugaauu

SEQ ID NO: 821720 - RNA, 22 nt, Human
guuuucaaggggauuuaacuga

SEQ ID NO: 821721 - RNA, 22 nt, Human
ugcugaaacaauaacauacugg

SEQ ID NO: 821722 - RNA, 22 nt, Human
ugaggcagcauucuucaagaca

SEQ ID NO: 821723 - RNA, 22 nt, Human
gagaggauccacaaaccaggaa

SEQ ID NO: 821724 - RNA, 22 nt, Human
cucaggauagcugcgcagccug

SEQ ID NO: 821725 - RNA, 22 nt, Human
gagugcagaugccagccccagu

SEQ ID NO: 821726 - RNA, 22 nt, Human
gagagggauacugaguuuuggu

SEQ ID NO: 821727 - RNA, 22 nt, Human
acccaggaaaacauggugcaga

SEQ ID NO: 821728 - RNA, 22 nt, Human
guuuuauaggugaaauauuacu

SEQ ID NO: 821729 - RNA, 22 nt, Human
cucaggauagauuguccucuca

SEQ ID NO: 821730 - RNA, 22 nt, Human
guuuuauaauugcuucauaaga

SEQ ID NO: 821731 - RNA, 22 nt, Human
uugacacagaucaauauucaac

SEQ ID NO: 821732 - RNA, 22 nt, Human
auacuuucugaccaauuaauug

SEQ ID NO: 821733 - RNA, 22 nt, Human
gaggcugcuuugaugacaggag

SEQ ID NO: 821734 - RNA, 22 nt, Human
gaggcugcccaacuggagugga

SEQ ID NO: 821735 - RNA, 22 nt, Human
uauuucuucgggauucaagcua

SEQ ID NO: 821736 - RNA, 20 nt, Human
cagaggcauuuucagacucu

SEQ ID NO: 821737 - RNA, 16 nt, Human
aaggagggaagagaau

SEQ ID NO: 821738 - RNA, 22 nt, Human
ugaauaguccuuggaauaacug

SEQ ID NO: 821739 - RNA, 17 nt, Human
agagagagcaugccacc

SEQ ID NO: 821740 - RNA, 22 nt, Human
agugcuuugugcucucacugca

SEQ ID NO: 821741 - RNA, 22 nt, Human
uacaguaagaugaaauagcaau

SEQ ID NO: 821742 - RNA, 22 nt, Human
uugguuuaggaacuggcuugga

SEQ ID NO: 821743 - RNA, 22 nt, Human
uacaaaguaauguauaauaucg

SEQ ID NO: 821744 - RNA, 22 nt, Human
uuauccaagcagaagcugcaca

SEQ ID NO: 821745 - RNA, 22 nt, Human
caaggccaugagcagcgagugu

SEQ ID NO: 821746 - RNA, 22 nt, Human
ugcauguguuugccacagugag

SEQ ID NO: 821747 - RNA, 22 nt, Human
ucuuagcacagcuauauaaguu

SEQ ID NO: 821748 - RNA, 22 nt, Human
uccaggaggcucugguugacgu

SEQ ID NO: 821749 - RNA, 22 nt, Human
gcccaggaaauaaaagugggcu

SEQ ID NO: 821750 - RNA, 23 nt, Human
acugucugauauguuuuccauca

SEQ ID NO: 821751 - RNA, 21 nt, Human
ucacuagugccuucugucauu

SEQ ID NO: 821752 - RNA, 22 nt, Human
uccugagagcagcugcuuugga

SEQ ID NO: 821753 - RNA, 22 nt, Human
uuugagauggagucuugcucug

SEQ ID NO: 821754 - RNA, 23 nt, Human
uccaggagcaugcuggcuggcga

SEQ ID NO: 821755 - RNA, 17 nt, Human
aaucuguuuacagucag

SEQ ID NO: 821756 - RNA, 22 nt, Human
ucugggaauuuauuggcacuuu

SEQ ID NO: 821757 - RNA, 22 nt, Human
gccucugcccuccugggacugc

SEQ ID NO: 821758 - RNA, 22 nt, Human
aaucuucuacuugacaguucuc

SEQ ID NO: 821759 - RNA, 22 nt, Human
cccaggaaccuaccagcucgag

SEQ ID NO: 821760 - RNA, 22 nt, Human
cauagagugauguaagguaugu

SEQ ID NO: 821761 - RNA, 22 nt, Human
ugucucugggugauucaguccu

SEQ ID NO: 821762 - RNA, 22 nt, Human
aagcaauagcaacaacuuuaca

SEQ ID NO: 821763 - RNA, 22 nt, Human
gugcagcugugguggagccagg

SEQ ID NO: 821764 - RNA, 22 nt, Human
ucauggauggccgggaggugau

SEQ ID NO: 821765 - RNA, 22 nt, Human
gguuauauaauucagugcuuuc

SEQ ID NO: 821766 - RNA, 22 nt, Human
caggaggggguggaguuucgcc

SEQ ID NO: 821767 - RNA, 22 nt, Human
cacaauuuccuugcuucacuuu

SEQ ID NO: 821768 - RNA, 22 nt, Human
ugcucuucggggccacugcuug

SEQ ID NO: 821769 - RNA, 22 nt, Human
gauggcagucaaccaggugagg

SEQ ID NO: 821770 - RNA, 22 nt, Human
uuuuguuguaauauaccuaucc

SEQ ID NO: 821771 - RNA, 22 nt, Human
caagauggguguugugaugguu

SEQ ID NO: 821772 - RNA, 22 nt, Human
aggacuuagaacauuauguacu

SEQ ID NO: 821773 - RNA, 22 nt, Human
cacugucuuuugugaagacaau

SEQ ID NO: 821774 - RNA, 22 nt, Human
agugcuuuagagaaauggugcu

SEQ ID NO: 821775 - RNA, 22 nt, Human
acugccauuggucaaaugagug

SEQ ID NO: 821776 - RNA, 22 nt, Human
uaacauuagguagacauaagcc

SEQ ID NO: 821777 - RNA, 22 nt, Human
cccaaggacacgggcagggaca

SEQ ID NO: 821778 - RNA, 22 nt, Human
aguccaugguucugacucaucu

SEQ ID NO: 821779 - RNA, 22 nt, Human
gauuucuuugcaagcuguguuc

SEQ ID NO: 821780 - RNA, 22 nt, Human
ucucaagaucucaagauggccc

SEQ ID NO: 821781 - RNA, 22 nt, Human
ugaggcagcccacuuuccuuag

SEQ ID NO: 821782 - RNA, 22 nt, Human
gcccaggaggcagagguugugg

SEQ ID NO: 821783 - RNA, 22 nt, Human
ugaaagcagcaccaauaccauu

SEQ ID NO: 821784 - RNA, 22 nt, Human
agaaaacuugucacagcucuca

SEQ ID NO: 821785 - RNA, 22 nt, Human
uuucacaucagagguagauuag

SEQ ID NO: 821786 - RNA, 22 nt, Human
uuguuuuaucuuucuacagacu

SEQ ID NO: 821787 - RNA, 22 nt, Human
gaccauuugcuaguaaauugca

SEQ ID NO: 821788 - RNA, 22 nt, Human
guugacagcuggugagcugcua

SEQ ID NO: 821789 - RNA, 22 nt, Human
ugcuucagaggaaaggcaaaag

SEQ ID NO: 821790 - RNA, 22 nt, Human
uucaaauacauucuuugccacu

SEQ ID NO: 821791 - RNA, 22 nt, Human
cccaggagacagaaacagaggu

SEQ ID NO: 821792 - RNA, 22 nt, Human
aguuauaugugaaaacacguau

SEQ ID NO: 821793 - RNA, 22 nt, Human
cucuccucugaaguggugaccc

SEQ ID NO: 821794 - RNA, 22 nt, Human
agugauggugagugagaagcuc

SEQ ID NO: 821795 - RNA, 22 nt, Human
ugaugaauaaacuugagaguca

SEQ ID NO: 821796 - RNA, 22 nt, Human
cugcuguguuucacaccucugg

SEQ ID NO: 821797 - RNA, 22 nt, Human
gccaggagaaaaggcgaaugau

SEQ ID NO: 821798 - RNA, 22 nt, Human
cagguaaaaauaaauuugugag

SEQ ID NO: 821799 - RNA, 22 nt, Human
aggcagccaucugcaggaagga

SEQ ID NO: 821800 - RNA, 22 nt, Human
gccaggaggggagaguguguca

SEQ ID NO: 821801 - RNA, 22 nt, Human
uggagagguugaauaacuuguc

SEQ ID NO: 821802 - RNA, 22 nt, Human
ugcugaaaacucaaccauugug

SEQ ID NO: 821803 - RNA, 22 nt, Human
uggcagcuacagacagagguga

SEQ ID NO: 821804 - RNA, 22 nt, Human
acccaggagcaggcugggcagu

SEQ ID NO: 821805 - RNA, 22 nt, Human
cauuuauucauuugcuagggcu

SEQ ID NO: 821806 - RNA, 22 nt, Human
aagcaccuggguuauaucuuag

SEQ ID NO: 821807 - RNA, 22 nt, Human
acucaggaaaugagaggcucuc

SEQ ID NO: 821808 - RNA, 22 nt, Human
cucaggaugaaagucaugguga

SEQ ID NO: 821809 - RNA, 22 nt, Human
guuugcauuuauuagucuucug

SEQ ID NO: 821810 - RNA, 22 nt, Human
cagcugcuguuacugcuuauua

SEQ ID NO: 821811 - RNA, 22 nt, Human
agacaggagagggaacugccgg

SEQ ID NO: 821812 - RNA, 22 nt, Human
gcccaggauggcuggaggugcu

SEQ ID NO: 821813 - RNA, 18 nt, Human
ugagaggcagguagagga

SEQ ID NO: 821814 - RNA, 22 nt, Human
uuugcagugucagcuucugugu

SEQ ID NO: 821815 - RNA, 22 nt, Human
uuuccagguauuaauacuguau

SEQ ID NO: 821816 - RNA, 17 nt, Human
ugaaggccaugaccacg

SEQ ID NO: 821817 - RNA, 22 nt, Human
aggcagguuggugagaagacug

SEQ ID NO: 821818 - RNA, 22 nt, Human
cccaggagaauauuuuuggguc

SEQ ID NO: 821819 - RNA, 22 nt, Human
acaugauuuuaguaucauaaua

SEQ ID NO: 821820 - RNA, 22 nt, Human
uuugcagugauucuugcaguga

SEQ ID NO: 821821 - RNA, 22 nt, Human
augcuuuuccaggagaaauaua

SEQ ID NO: 821822 - RNA, 22 nt, Human
aggagaggaaucauuauuacaa

SEQ ID NO: 821823 - RNA, 22 nt, Human
acaggagaauuaucuggaacaa

SEQ ID NO: 821824 - RNA, 22 nt, Human
caugcugugcaucuugaugacc

SEQ ID NO: 821825 - RNA, 22 nt, Human
cuggcugugcagucuuccagaa

SEQ ID NO: 821826 - RNA, 22 nt, Human
auuauauaggacuugcccuucc

SEQ ID NO: 821827 - RNA, 22 nt, Human
gaggcagagugcaccccaggag

SEQ ID NO: 821828 - RNA, 22 nt, Human
agaggccagguccagaguuugu

SEQ ID NO: 821829 - RNA, 22 nt, Human
augcugugccuggaaagcggcu

SEQ ID NO: 821830 - RNA, 22 nt, Human
ugaggcaguauucuccauucca

SEQ ID NO: 821831 - RNA, 22 nt, Human
gaggggaaagugugaggcugcg

SEQ ID NO: 821832 - RNA, 22 nt, Human
gucuucaauagagccucaauuu

SEQ ID NO: 821833 - RNA, 22 nt, Human
cuuacagagaagaaaauguagu

SEQ ID NO: 821834 - RNA, 22 nt, Human
uucuaugccauguucagcuacu

SEQ ID NO: 821835 - RNA, 22 nt, Human
gcugcugugaauuuuuuaaaug

SEQ ID NO: 821836 - RNA, 22 nt, Human
aucaggaucagggcuagcagag

SEQ ID NO: 821837 - RNA, 22 nt, Human
aaguugagaugucauaggagac

SEQ ID NO: 821838 - RNA, 22 nt, Human
cucagaagaacaaaggcucuac

SEQ ID NO: 821839 - RNA, 18 nt, Human
uuccaugauuccuuucac

SEQ ID NO: 821840 - RNA, 22 nt, Human
gaaggccauuuuuagguagaau

SEQ ID NO: 821841 - RNA, 22 nt, Human
cagaaggcuggcagauugagau

SEQ ID NO: 821842 - RNA, 22 nt, Human
gcagaggagaugaagauacuuu

SEQ ID NO: 821843 - RNA, 21 nt, Human
acagacagggccagugucccc

SEQ ID NO: 821844 - RNA, 22 nt, Human
ggccaggagaggagggcacuga

SEQ ID NO: 821845 - RNA, 22 nt, Human
cccaggaggucgaagcugcagu

SEQ ID NO: 821846 - RNA, 22 nt, Human
cccagaaggucgaggcugcagu

SEQ ID NO: 821847 - RNA, 22 nt, Human
uuucauuuugguuaugccauaa

SEQ ID NO: 821848 - RNA, 22 nt, Human
ugccugugguuccaguuuuuuc

SEQ ID NO: 821849 - RNA, 22 nt, Human
guucuucaucauuuuagauagg

SEQ ID NO: 821850 - RNA, 22 nt, Human
aacaaaugaccugauuucuucc

SEQ ID NO: 821851 - RNA, 22 nt, Human
gaggagcuugugagaagauguc

SEQ ID NO: 821852 - RNA, 22 nt, Human
aggcagcauccagaggagaaug

SEQ ID NO: 821853 - RNA, 22 nt, Human
cccuuagcucaauuucuugccc

SEQ ID NO: 821854 - RNA, 22 nt, Human
aggcaguuuaggcagcgauuua

SEQ ID NO: 821855 - RNA, 22 nt, Human
augaggcaaucaugguccaguu

SEQ ID NO: 821856 - RNA, 22 nt, Human
augcuguguuugagaaccuagg

SEQ ID NO: 821857 - RNA, 18 nt, Human
cugcccagagcacuugug

SEQ ID NO: 821858 - RNA, 22 nt, Human
gcccaggaaguugaggcugccg

SEQ ID NO: 821859 - RNA, 22 nt, Human
cuuccuucugaagcauagaagc

SEQ ID NO: 821860 - RNA, 22 nt, Human
ugcaugugcccacucuggcuua

SEQ ID NO: 821861 - RNA, 23 nt, Human
accaggagaaaagcuuugcggga

SEQ ID NO: 821862 - RNA, 22 nt, Human
uuucagaaagcugaacauauga

SEQ ID NO: 821863 - RNA, 22 nt, Human
ugccuguguugauuacuuuguc

SEQ ID NO: 821864 - RNA, 22 nt, Human
cucagaauuuagggcucugagg

SEQ ID NO: 821865 - RNA, 22 nt, Human
uuucccagagguaugaauaagu

SEQ ID NO: 821866 - RNA, 22 nt, Human
uugaaggacauccuauuucuag

SEQ ID NO: 821867 - RNA, 18 nt, Human
aggcaggcuggagugacu

SEQ ID NO: 821868 - RNA, 19 nt, Human
acauuuaaauucagaucuc

SEQ ID NO: 821869 - RNA, 22 nt, Human
cugaaaauguuacacaggaaga

SEQ ID NO: 821870 - RNA, 22 nt, Human
aucaggaugaagcuguagcgaa

SEQ ID NO: 821871 - RNA, 22 nt, Human
uuuauuugaaucaggggagaau

SEQ ID NO: 821872 - RNA, 22 nt, Human
caggagggcccgagacucuucc

SEQ ID NO: 821873 - RNA, 22 nt, Human
uuuguaugugauaagacuauuc

SEQ ID NO: 821874 - RNA, 22 nt, Human
cuucaggauuuaggaagaugaa

SEQ ID NO: 821875 - RNA, 22 nt, Human
ugaggcaggagaauggcgggaa

SEQ ID NO: 821876 - RNA, 22 nt, Human
uugaaauacugcauuguucagu

SEQ ID NO: 821877 - RNA, 22 nt, Human
gaagcagccacggggagacaga

SEQ ID NO: 821878 - RNA, 23 nt, Human
acagaaaucauuuguaagguacc

SEQ ID NO: 821879 - RNA, 22 nt, Human
ucugucuucaucagcaugugau

SEQ ID NO: 821880 - RNA, 22 nt, Human
agagggagcccagucauagcug

SEQ ID NO: 821881 - RNA, 22 nt, Human
acaaauauuuacugaauccacu

SEQ ID NO: 821882 - RNA, 23 nt, Human
auucuucauuaucuucuagaaaa

SEQ ID NO: 821883 - RNA, 22 nt, Human
aaagccagagcaagcugucaca

SEQ ID NO: 821884 - RNA, 22 nt, Human
cagcagagaaauuaaacuucug

SEQ ID NO: 821885 - RNA, 22 nt, Human
cuugggaaugcuaacagaugac

SEQ ID NO: 821886 - RNA, 22 nt, Human
aaggcagcaccgccuccugaaa

SEQ ID NO: 821887 - RNA, 22 nt, Human
gaaggccaagaggcuccaagau

SEQ ID NO: 821888 - RNA, 22 nt, Human
ugauugaagaggugaggaaguu

SEQ ID NO: 821889 - RNA, 21 nt, Human
ggcagcucagcagauggggac

SEQ ID NO: 821890 - RNA, 22 nt, Human
caggaugagaagggcucuuacg

SEQ ID NO: 821891 - RNA, 22 nt, Human
caaauguaaauucuuuugaagc

SEQ ID NO: 821892 - RNA, 22 nt, Human
cauggcugcgagaagagugggu

SEQ ID NO: 821893 - RNA, 22 nt, Human
cacaaauggccguguucaaaga

SEQ ID NO: 821894 - RNA, 22 nt, Human
acuuuugguucuguaacuguga

SEQ ID NO: 821895 - RNA, 21 nt, Human
uucuccccagcgaauccucgg

SEQ ID NO: 821896 - RNA, 22 nt, Human
uucugggacaucuggacaguuu

SEQ ID NO: 821897 - RNA, 22 nt, Human
ucccaggagcaccuuuugagcc

SEQ ID NO: 821898 - RNA, 22 nt, Human
cauuucacaaauggccacauca

SEQ ID NO: 821899 - RNA, 22 nt, Human
agggcagccucucagccuaggu

SEQ ID NO: 821900 - RNA, 22 nt, Human
cucaggaugucggugacuauug

SEQ ID NO: 821901 - RNA, 22 nt, Human
ugcugcugauggcaccuaggca

SEQ ID NO: 821902 - RNA, 19 nt, Human
uggcaggcccaggauggac

SEQ ID NO: 821903 - RNA, 22 nt, Human
aaauuuucagagcacuagagaa

SEQ ID NO: 821904 - RNA, 22 nt, Human
uugaaagucacaauggcauuaa

SEQ ID NO: 821905 - RNA, 22 nt, Human
gauggcagcauauugacagcau

SEQ ID NO: 821906 - RNA, 22 nt, Human
guggcagcaaaugccuggacua

SEQ ID NO: 821907 - RNA, 23 nt, Human
uucauuugucuacuucacuuguu

SEQ ID NO: 821908 - RNA, 22 nt, Human
uuucccaguucccugcucuaua

SEQ ID NO: 821909 - RNA, 22 nt, Human
uuagccauauagaaaaagagcu

SEQ ID NO: 821910 - RNA, 19 nt, Human
cuucuucuuggcagccaag

SEQ ID NO: 821911 - RNA, 20 nt, Human
agauuauuccuaagauuucu

SEQ ID NO: 821912 - RNA, 22 nt, Human
ucaggagacauucuuaaaguag

SEQ ID NO: 821913 - RNA, 19 nt, Human
uccaggaggcugccauuga

SEQ ID NO: 821914 - RNA, 22 nt, Human
aaauguauugcauaggauauuu

SEQ ID NO: 821915 - RNA, 22 nt, Human
gcaggagaaaugaagauugggu

SEQ ID NO: 821916 - RNA, 22 nt, Human
uugaaguuguaguucagugaag

SEQ ID NO: 821917 - RNA, 22 nt, Human
cuguauuucccacauucucuau

SEQ ID NO: 821918 - RNA, 21 nt, Human
agccagcuaucacacagcauu

SEQ ID NO: 821919 - RNA, 22 nt, Human
ugcugugagguugagaaggaag

SEQ ID NO: 821920 - RNA, 22 nt, Human
cauggagauaaacugaaauauu

SEQ ID NO: 821921 - RNA, 22 nt, Human
ucacaguaucacacaaggauua

SEQ ID NO: 821922 - RNA, 22 nt, Human
aaaccgcaauuacuuuugcguc

SEQ ID NO: 821923 - RNA, 22 nt, Human
aaguauaagcuauucuucauga

SEQ ID NO: 821924 - RNA, 22 nt, Human
caggcagcugcuggguucagcc

SEQ ID NO: 821925 - RNA, 21 nt, Human
uccuuccuugagguccuuucc

SEQ ID NO: 821926 - RNA, 20 nt, Human
cuguggaauuuuaccaugcg

SEQ ID NO: 821927 - RNA, 22 nt, Human
acccaggacacagagaugaccc

SEQ ID NO: 821928 - RNA, 22 nt, Human
ccaggaagcugucugauaugaa

SEQ ID NO: 821929 - RNA, 18 nt, Human
caugucugcgccacaagg

SEQ ID NO: 821930 - RNA, 22 nt, Human
gcugauguaagacuuuugguuu

SEQ ID NO: 821931 - RNA, 22 nt, Human
gagggcauaguuaaauaggagg

SEQ ID NO: 821932 - RNA, 22 nt, Human
agagggauaauauguauuguaa

SEQ ID NO: 821933 - RNA, 22 nt, Human
uggaggaaguggcuggccagaa

SEQ ID NO: 821934 - RNA, 17 nt, Human
uagcuguguuucagcua

SEQ ID NO: 821935 - RNA, 19 nt, Human
cuggccaggccaggggccc

SEQ ID NO: 821936 - RNA, 22 nt, Human
ggaggggagguccagcugaucu

SEQ ID NO: 821937 - RNA, 18 nt, Human
ccagguggugacagagau

SEQ ID NO: 821938 - RNA, 22 nt, Human
gagcgauguggguauguagaag

SEQ ID NO: 821939 - RNA, 22 nt, Human
auacauacauguaugcacauac

SEQ ID NO: 821940 - RNA, 22 nt, Human
gcagggaagaucuuggagcugc

SEQ ID NO: 821941 - RNA, 23 nt, Human
uaauucacauauacauugcuuca

SEQ ID NO: 821942 - RNA, 22 nt, Human
uaugccugauaacugugucucu

SEQ ID NO: 821943 - RNA, 22 nt, Human
gaaauauucuugucuuguuuuc

SEQ ID NO: 821944 - RNA, 22 nt, Human
cucugcauuuuaacagaugauu

SEQ ID NO: 821945 - RNA, 22 nt, Human
uaucuguuaggaucagagcugg

SEQ ID NO: 821946 - RNA, 21 nt, Human
uucuucuuggacuguuuuggc

SEQ ID NO: 821947 - RNA, 22 nt, Human
ugcuggguuaccuaagccuaaa

SEQ ID NO: 821948 - RNA, 22 nt, Human
agggagcucaguuggaagcggu

SEQ ID NO: 821949 - RNA, 22 nt, Human
gcugguuuccuuaucuauaaag

SEQ ID NO: 821950 - RNA, 22 nt, Human
aggcaccuugcgguccagugaa

SEQ ID NO: 821951 - RNA, 22 nt, Human
cgaggcaggcaggcggaggaua

SEQ ID NO: 821952 - RNA, 22 nt, Human
uuuaaauuuguguuuagagggu

SEQ ID NO: 821953 - RNA, 22 nt, Human
ugcccagggauaagccuagaga

SEQ ID NO: 821954 - RNA, 22 nt, Human
acccaggagacggaggugcagu

SEQ ID NO: 821955 - RNA, 22 nt, Human
accauuuuggguauuuucagag

SEQ ID NO: 821956 - RNA, 22 nt, Human
cauugcuuccuaugucccuucu

SEQ ID NO: 821957 - RNA, 22 nt, Human
aaguguauauaugacuuauaaa

SEQ ID NO: 821958 - RNA, 22 nt, Human
aggacaggauugagcugaacug

SEQ ID NO: 821959 - RNA, 22 nt, Human
gaagaggaugacaggagccggu

SEQ ID NO: 821960 - RNA, 22 nt, Human
caguugccuacuacauggcagg

SEQ ID NO: 821961 - RNA, 22 nt, Human
aauugcuaaagauuauguuuuc

SEQ ID NO: 821962 - RNA, 22 nt, Human
gcccaggaguucaaggcugcag

SEQ ID NO: 821963 - RNA, 20 nt, Human
uauuuguauuugggaaaguu

SEQ ID NO: 821964 - RNA, 22 nt, Human
cccaggagaucuggaucucguc

SEQ ID NO: 821965 - RNA, 22 nt, Human
uuagccauggacugaauugacu

SEQ ID NO: 821966 - RNA, 22 nt, Human
aguucuucauaaccuuacugug

SEQ ID NO: 821967 - RNA, 22 nt, Human
gagaggucaucucccaucagca

SEQ ID NO: 821968 - RNA, 22 nt, Human
uugaaagaagaagcugcgaugu

SEQ ID NO: 821969 - RNA, 22 nt, Human
gaucauuuugaugcccuuuuag

SEQ ID NO: 821970 - RNA, 22 nt, Human
gcccaggaggucaaguagcuau

SEQ ID NO: 821971 - RNA, 22 nt, Human
ggagagugggagcaacuguugc

SEQ ID NO: 821972 - RNA, 22 nt, Human
agucucagaaaagaagcaugga

SEQ ID NO: 821973 - RNA, 22 nt, Human
gugcauuuaggucacaugaugu

SEQ ID NO: 821974 - RNA, 22 nt, Human
ucccaggauuuuaggcucucag

SEQ ID NO: 821975 - RNA, 22 nt, Human
aguaaagcagaguugcaguaca

SEQ ID NO: 821976 - RNA, 22 nt, Human
ucaggagagaguuggguaggcu

SEQ ID NO: 821977 - RNA, 20 nt, Human
uugauaggcagcuugucagg

SEQ ID NO: 821978 - RNA, 22 nt, Human
cugccaggcagggagauggcug

SEQ ID NO: 821979 - RNA, 22 nt, Human
ucuuugaauucaaacuguucaa

SEQ ID NO: 821980 - RNA, 22 nt, Human
ggaggaggcggcagaaguuccu

SEQ ID NO: 821981 - RNA, 22 nt, Human
gccaugcuugguaugcugugag

SEQ ID NO: 821982 - RNA, 22 nt, Human
auucuucaucacuaccuuguga

SEQ ID NO: 821983 - RNA, 22 nt, Human
gaggcagcagggcugguuccuu

SEQ ID NO: 821984 - RNA, 22 nt, Human
uauuuccaccuauuauuuucug

SEQ ID NO: 821985 - RNA, 21 nt, Human
agagagggagaugaaacaucc

SEQ ID NO: 821986 - RNA, 22 nt, Human
ucugcaggcuguacaggaagca

SEQ ID NO: 821987 - RNA, 22 nt, Human
aggaagcuagagccaccggacu

SEQ ID NO: 821988 - RNA, 22 nt, Human
aggcagcuuaagcccuggccca

SEQ ID NO: 821989 - RNA, 22 nt, Human
ggcaggcucagcagccaaggag

SEQ ID NO: 821990 - RNA, 22 nt, Human
gucaggaugggcagccaaacua

SEQ ID NO: 821991 - RNA, 22 nt, Human
ucagguggcuuggagggggacg

SEQ ID NO: 821992 - RNA, 22 nt, Human
ggagccuggucagguuggcucc

SEQ ID NO: 821993 - RNA, 22 nt, Human
agcauccaacaggagggaaggg

SEQ ID NO: 821994 - RNA, 22 nt, Human
gcauguguuauuuuauguauga

SEQ ID NO: 821995 - RNA, 22 nt, Human
cuacccagcaccuaggcugccu

SEQ ID NO: 821996 - RNA, 22 nt, Human
aguuugaaaguauugacagaag

SEQ ID NO: 821997 - RNA, 22 nt, Human
gucccauaaguagugcaacuug

SEQ ID NO: 821998 - RNA, 21 nt, Human
ucuuccuccacagcgugccac

SEQ ID NO: 821999 - RNA, 23 nt, Human
uuucaacuccugccauuauuucu

SEQ ID NO: 822000 - RNA, 23 nt, Human
ucucuuucaagagcuuaaugugc

SEQ ID NO: 822001 - RNA, 22 nt, Human
gcaggggcuaaggacacagaga

SEQ ID NO: 822002 - RNA, 22 nt, Human
uaaggccauuauggugggcccg

SEQ ID NO: 822003 - RNA, 22 nt, Human
gauuuuaauuauaggagguccu

SEQ ID NO: 822004 - RNA, 20 nt, Human
uuugucuguuaaguguuucu

SEQ ID NO: 822005 - RNA, 22 nt, Human
aaggcagcacagcaacugcuca

SEQ ID NO: 822006 - RNA, 20 nt, Human
aggcagcugggaaaugaggg

SEQ ID NO: 822007 - RNA, 22 nt, Human
aagggaggaggauuuauuguac

SEQ ID NO: 822008 - RNA, 19 nt, Human
ugccuggacaaaugugggg

SEQ ID NO: 822009 - RNA, 22 nt, Human
gcagaggggaagcugaggaauu

SEQ ID NO: 822010 - RNA, 22 nt, Human
auguuucagauacagaucaaau

SEQ ID NO: 822011 - RNA, 22 nt, Human
caguaaagcauguaugucuuca

SEQ ID NO: 822012 - RNA, 22 nt, Human
auucaaauuaaguuaauucagc

SEQ ID NO: 822013 - RNA, 21 nt, Human
aaugaaguggcuauuuugagg

SEQ ID NO: 822014 - RNA, 22 nt, Human
uuacuuuggguccugcuuauaa

SEQ ID NO: 822015 - RNA, 22 nt, Human
ucaggagaaucagggcuguccu

SEQ ID NO: 822016 - RNA, 22 nt, Human
uugcaaaggggaauaaagcaau

SEQ ID NO: 822017 - RNA, 22 nt, Human
gucuucaacaauaacuaccacu

SEQ ID NO: 822018 - RNA, 22 nt, Human
agaccaagacuauaaugagagg

SEQ ID NO: 822019 - RNA, 22 nt, Human
gggcaguuuauucuagaugguu

SEQ ID NO: 822020 - RNA, 22 nt, Human
auuacaguaacagcuacaaugc

SEQ ID NO: 822021 - RNA, 22 nt, Human
uguucuucuagauugccuuuua

SEQ ID NO: 822022 - RNA, 23 nt, Human
accaggagccaagaucucccugg

SEQ ID NO: 822023 - RNA, 22 nt, Human
uugcauuuaaguagauguuaca

SEQ ID NO: 822024 - RNA, 22 nt, Human
uuugacaaaggaaaaaugcaca

SEQ ID NO: 822025 - RNA, 22 nt, Human
ugaggcagggaguuuaauuguc

SEQ ID NO: 822026 - RNA, 22 nt, Human
uaaggccaauuaacaaccaggg

SEQ ID NO: 822027 - RNA, 22 nt, Human
caggcagcucaaccuugggagc

SEQ ID NO: 822028 - RNA, 22 nt, Human
ggagugucagaaacaguguccu

SEQ ID NO: 822029 - RNA, 22 nt, Human
ccaggaaaauaccaagcuuuaa

SEQ ID NO: 822030 - RNA, 22 nt, Human
auuaguaaaacauuguauaugu

SEQ ID NO: 822031 - RNA, 22 nt, Human
uuaucacuuaugagcuuuuugc

SEQ ID NO: 822032 - RNA, 22 nt, Human
gucaggaugagggaugaggagu

SEQ ID NO: 822033 - RNA, 22 nt, Human
uucucagaggagucgggagcug

SEQ ID NO: 822034 - RNA, 22 nt, Human
caguugcuggaugugcagcucu

SEQ ID NO: 822035 - RNA, 23 nt, Human
agaugagccaacaccuccaugcc

SEQ ID NO: 822036 - RNA, 22 nt, Human
auuaaauuuucacuaggcuccc

SEQ ID NO: 822037 - RNA, 22 nt, Human
aguggacucuucccagugcuug

SEQ ID NO: 822038 - RNA, 22 nt, Human
ggcagcuuccuaggagagggca

SEQ ID NO: 822039 - RNA, 22 nt, Human
gagggcuccucacauucucuau

SEQ ID NO: 822040 - RNA, 22 nt, Human
augaaacacacacgcgcauacu

SEQ ID NO: 822041 - RNA, 23 nt, Human
acagaaaguucugcuggacagag

SEQ ID NO: 822042 - RNA, 20 nt, Human
aucaggauucuugcuuuguu

SEQ ID NO: 822043 - RNA, 22 nt, Human
auuucauugaaguuaauucuuc

SEQ ID NO: 822044 - RNA, 22 nt, Human
cagcuuccauaagagauggaga

SEQ ID NO: 822045 - RNA, 22 nt, Human
augcugugaaaaagaaggcuga

SEQ ID NO: 822046 - RNA, 22 nt, Human
aaaguauucuugacuguuuuuc

SEQ ID NO: 822047 - RNA, 22 nt, Human
ucuucucuccugcuuggcagaa

SEQ ID NO: 822048 - RNA, 22 nt, Human
ugaggcaggagaaucaccggaa

SEQ ID NO: 822049 - RNA, 23 nt, Human
auugaugacuugauuacacuuuu

SEQ ID NO: 822050 - RNA, 22 nt, Human
ugaaaugaagggcuuguucugg

SEQ ID NO: 822051 - RNA, 22 nt, Human
gcaggcagagguggaggagaca

SEQ ID NO: 822052 - RNA, 22 nt, Human
aggagcagaacugauucugacu

SEQ ID NO: 822053 - RNA, 22 nt, Human
auaagcauguuagaauauuuga

SEQ ID NO: 822054 - RNA, 17 nt, Human
gcugacccuggagaagu

SEQ ID NO: 822055 - RNA, 22 nt, Human
ucucaggaucuaauacauggua

SEQ ID NO: 822056 - RNA, 22 nt, Human
aggcaagcauuuaaccacucau

SEQ ID NO: 822057 - RNA, 22 nt, Human
auucuucauacagacaaguccu

SEQ ID NO: 822058 - RNA, 22 nt, Human
uucuuuuccuacacagcgauuu

SEQ ID NO: 822059 - RNA, 22 nt, Human
aggcagacaaggacacaguggg

SEQ ID NO: 822060 - RNA, 19 nt, Human
ggcagucucaagcagcaca

SEQ ID NO: 822061 - RNA, 22 nt, Human
gaggcagcuuggggcugugggu

SEQ ID NO: 822062 - RNA, 22 nt, Human
uuucaugaggggcaaaaucuca

SEQ ID NO: 822063 - RNA, 22 nt, Human
gagggagggacuagcauucucu

SEQ ID NO: 822064 - RNA, 22 nt, Human
aucaggaugacaacugcugggu

SEQ ID NO: 822065 - RNA, 22 nt, Human
caaauguauucucacuucaggg

SEQ ID NO: 822066 - RNA, 22 nt, Human
gaggcagcaggcugaggaggau

SEQ ID NO: 822067 - RNA, 22 nt, Human
ccuucuucuguguggcccaaga

SEQ ID NO: 822068 - RNA, 20 nt, Human
aagggcagagggaacagacu

SEQ ID NO: 822069 - RNA, 22 nt, Human
gagucuuugguaaagucugcug

SEQ ID NO: 822070 - RNA, 22 nt, Human
uagaagcaguaauagaaauagg

SEQ ID NO: 822071 - RNA, 22 nt, Human
cuuaaauucuuaaugcccucau

SEQ ID NO: 822072 - RNA, 19 nt, Human
aaagcagaggagcaucuga

SEQ ID NO: 822073 - RNA, 22 nt, Human
uccaggagacacaagguacaua

SEQ ID NO: 822074 - RNA, 17 nt, Human
acagagcacaucaagau

SEQ ID NO: 822075 - RNA, 22 nt, Human
uucuucaaaacaacacuggccu

SEQ ID NO: 822076 - RNA, 22 nt, Human
cauuuguaguaucuguuuauau

SEQ ID NO: 822077 - RNA, 22 nt, Human
uugaaagaggcaaaguuugauc

SEQ ID NO: 822078 - RNA, 22 nt, Human
gcucaggaccgaggggugggaa

SEQ ID NO: 822079 - RNA, 22 nt, Human
uggcagcuggaucccaaggcag

SEQ ID NO: 822080 - RNA, 22 nt, Human
gaggcugaggguuagagaguca

SEQ ID NO: 822081 - RNA, 22 nt, Human
aggcaguggaaggagaaagcaa

SEQ ID NO: 822082 - RNA, 22 nt, Human
uuaaaaugaauauugauuagca

SEQ ID NO: 822083 - RNA, 22 nt, Human
ggguggaguagaaagaugaauu

SEQ ID NO: 822084 - RNA, 22 nt, Human
ucacaucucccuggaggacaca

SEQ ID NO: 822085 - RNA, 22 nt, Human
aaugcauauguaggcaagcagu

SEQ ID NO: 822086 - RNA, 22 nt, Human
auuauuauauagggaaaguccc

SEQ ID NO: 822087 - RNA, 22 nt, Human
aucaggauagugguuaccuggg

SEQ ID NO: 822088 - RNA, 22 nt, Human
uccaggagucagacagauggug

SEQ ID NO: 822089 - RNA, 22 nt, Human
uuuccagagcaugucugcucag

SEQ ID NO: 822090 - RNA, 22 nt, Human
cagaugaggcaaccucauugcu

SEQ ID NO: 822091 - RNA, 22 nt, Human
ccagcagagcauggggaggaag

SEQ ID NO: 822092 - RNA, 19 nt, Human
cucucacucgccacauccu

SEQ ID NO: 822093 - RNA, 22 nt, Human
caugcugugugguuagaacugu

SEQ ID NO: 822094 - RNA, 22 nt, Human
ccacuguuuuucaguuaacuuu

SEQ ID NO: 822095 - RNA, 22 nt, Human
uaggcagcagugcuaugauucu

SEQ ID NO: 822096 - RNA, 22 nt, Human
agccuauuccaggaugagcuca

SEQ ID NO: 822097 - RNA, 22 nt, Human
ggacagaggguugacagaguau

SEQ ID NO: 822098 - RNA, 21 nt, Human
uuugaaagcccuauguuuuca

SEQ ID NO: 822099 - RNA, 22 nt, Human
acccaggaugauaauguucaca

SEQ ID NO: 822100 - RNA, 21 nt, Human
cccaggagaagaaaagaugca

SEQ ID NO: 822101 - RNA, 22 nt, Human
ucgcugugguuucuguacaugg

SEQ ID NO: 822102 - RNA, 22 nt, Human
uccaggaguuugaccugugggc

SEQ ID NO: 822103 - RNA, 22 nt, Human
accaggagcauuuuuuauuagu

SEQ ID NO: 822104 - RNA, 22 nt, Human
aacauucugguucuaaaaaccu

SEQ ID NO: 822105 - RNA, 21 nt, Human
acagucuccccagaucucucc

SEQ ID NO: 822106 - RNA, 22 nt, Human
acaucucaugaaugauaaauca

SEQ ID NO: 822107 - RNA, 22 nt, Human
ucugcuguaaagaauuucugcc

SEQ ID NO: 822108 - RNA, 22 nt, Human
aaaggccagguuggcugguauu

SEQ ID NO: 822109 - RNA, 22 nt, Human
uccauuuucaucucauguauaa

SEQ ID NO: 822110 - RNA, 22 nt, Human
uguugauuaguguuuagacuua

SEQ ID NO: 822111 - RNA, 22 nt, Human
aggagaggcucuaacucugugu

SEQ ID NO: 822112 - RNA, 22 nt, Human
augugucuuugagacucugcua

SEQ ID NO: 822113 - RNA, 22 nt, Human
acaggagacccugcugguucug

SEQ ID NO: 822114 - RNA, 21 nt, Human
gugcuuuuccuuaauguucuu

SEQ ID NO: 822115 - RNA, 22 nt, Human
ggaggaggggugacugaaugcu

SEQ ID NO: 822116 - RNA, 21 nt, Human
ugaaugaggaggauggcauuu

SEQ ID NO: 822117 - RNA, 22 nt, Human
ggcagcuguaagaugagugaau

SEQ ID NO: 822118 - RNA, 22 nt, Human
ggcagacuguaauaggagaauu

SEQ ID NO: 822119 - RNA, 22 nt, Human
gaugccucuuuuggcugaauua

SEQ ID NO: 822120 - RNA, 22 nt, Human
guuauaaaaugcacaguuguuu

SEQ ID NO: 822121 - RNA, 22 nt, Human
ccauuguaaauucuguggaagu

SEQ ID NO: 822122 - RNA, 22 nt, Human
augcagcugucagggagaacau

SEQ ID NO: 822123 - RNA, 22 nt, Human
ugaaaugagauagauaaucagg

SEQ ID NO: 822124 - RNA, 19 nt, Human
agaggcagucuccaacagg

SEQ ID NO: 822125 - RNA, 22 nt, Human
uuuucaguaaugucuacauaau

SEQ ID NO: 822126 - RNA, 22 nt, Human
aguauugugacucaaguauucu

SEQ ID NO: 822127 - RNA, 22 nt, Human
cugcuucugggaugauggagua

SEQ ID NO: 822128 - RNA, 22 nt, Human
ucuucauuccguagauauuuau

SEQ ID NO: 822129 - RNA, 22 nt, Human
ucuucaaguuccaaagugcagg

SEQ ID NO: 822130 - RNA, 22 nt, Human
cauuuguaggaugcuucuuguu

SEQ ID NO: 822131 - RNA, 22 nt, Human
agagcagcuggggcagagacca

SEQ ID NO: 822132 - RNA, 22 nt, Human
aguucucaagacaauuaccugu

SEQ ID NO: 822133 - RNA, 22 nt, Human
gcuggcagggacagcugcgugu

SEQ ID NO: 822134 - RNA, 22 nt, Human
uuugaaguggaaaaggauuuaa

SEQ ID NO: 822135 - RNA, 20 nt, Human
aagagaggaaguuauacuag

SEQ ID NO: 822136 - RNA, 22 nt, Human
augcugugauuguagaaauauu

SEQ ID NO: 822137 - RNA, 22 nt, Human
ggaggggucucuagcgaggaga

SEQ ID NO: 822138 - RNA, 22 nt, Human
uccaggagggauugggcugugg

SEQ ID NO: 822139 - RNA, 22 nt, Human
caggaaagggaugggcugccac

SEQ ID NO: 822140 - RNA, 22 nt, Human
ucauuuguucucauucucuacu

SEQ ID NO: 822141 - RNA, 22 nt, Human
cccuggaggcaaagguugcagu

SEQ ID NO: 822142 - RNA, 22 nt, Human
auuucccaugugaaucaauugg

SEQ ID NO: 822143 - RNA, 22 nt, Human
ucuacugugguccuuguaacca

SEQ ID NO: 822144 - RNA, 22 nt, Human
ccagggaguuuccaaucugaga

SEQ ID NO: 822145 - RNA, 22 nt, Human
accaggagguguuugcucaagu

SEQ ID NO: 822146 - RNA, 22 nt, Human
uuggcagugaugcagcuuguuc

SEQ ID NO: 822147 - RNA, 22 nt, Human
caggcagcugacugucagauau

SEQ ID NO: 822148 - RNA, 22 nt, Human
gccaggaggcugcuguguaggc

SEQ ID NO: 822149 - RNA, 22 nt, Human
agcaccaugaccuugccauuga

SEQ ID NO: 822150 - RNA, 22 nt, Human
cagugauggauauggagaaguc

SEQ ID NO: 822151 - RNA, 22 nt, Human
cuugcugucccuugguaugaac

SEQ ID NO: 822152 - RNA, 22 nt, Human
gaaacuguauguaguuuuuggg

SEQ ID NO: 822153 - RNA, 22 nt, Human
gagacagcacaggccacuggga

SEQ ID NO: 822154 - RNA, 22 nt, Human
cuuuuauuuugaauuaagggcu

SEQ ID NO: 822155 - RNA, 22 nt, Human
ccuggacucaggcugugggcac

SEQ ID NO: 822156 - RNA, 22 nt, Human
cagcugacccgugggaggcggg

SEQ ID NO: 822157 - RNA, 22 nt, Human
acacuaaugagaaaggaauuaa

SEQ ID NO: 822158 - RNA, 22 nt, Human
gaggagagccugcacuuugacc

SEQ ID NO: 822159 - RNA, 23 nt, Human
caguggagacucaugcuuccuua

SEQ ID NO: 822160 - RNA, 23 nt, Human
auguuauuauuagcagucuugcc

SEQ ID NO: 822161 - RNA, 22 nt, Human
augcugugagugugccgcagag

SEQ ID NO: 822162 - RNA, 17 nt, Human
guccuacccauggucua

SEQ ID NO: 822163 - RNA, 22 nt, Human
cuugaaagauuuggccucugug

SEQ ID NO: 822164 - RNA, 22 nt, Human
ugaacaaacugcauucuucacu

SEQ ID NO: 822165 - RNA, 22 nt, Human
gugcugugcgcuuuuucuguau

SEQ ID NO: 822166 - RNA, 22 nt, Human
aggcaagcugcagagaguccuu

SEQ ID NO: 822167 - RNA, 22 nt, Human
uuugaauaucacaaacuuucaa

SEQ ID NO: 822168 - RNA, 22 nt, Human
ucuacuguagugaugcugcagu

SEQ ID NO: 822169 - RNA, 22 nt, Human
gagggaggggagcuccacccuc

SEQ ID NO: 822170 - RNA, 22 nt, Human
cccaggaggcggagguuguggu

SEQ ID NO: 822171 - RNA, 22 nt, Human
aaaaugagauacaguuugaaag

SEQ ID NO: 822172 - RNA, 19 nt, Human
agucuuucccacucgucuu

SEQ ID NO: 822173 - RNA, 22 nt, Human
uuucacaaaugucuuuaacuug

SEQ ID NO: 822174 - RNA, 22 nt, Human
agagugcagauaagagaauguu

SEQ ID NO: 822175 - RNA, 22 nt, Human
uucuugcaggucacucacugag

SEQ ID NO: 822176 - RNA, 22 nt, Human
ucuucagauggccaguuguccc

SEQ ID NO: 822177 - RNA, 22 nt, Human
uggcagcuggcucugcgcaggc

SEQ ID NO: 822178 - RNA, 22 nt, Human
uaauaucuacuucauagaguuu

SEQ ID NO: 822179 - RNA, 22 nt, Human
ggcucagaccucccagcuccag

SEQ ID NO: 822180 - RNA, 22 nt, Human
agagggcugcugcacagugcuc

SEQ ID NO: 822181 - RNA, 22 nt, Human
cagaguucaaagccugcuggga

SEQ ID NO: 822182 - RNA, 22 nt, Human
cuuagaaaucgaacucagguua

SEQ ID NO: 822183 - RNA, 22 nt, Human
caaggccaagucucugugaaga

SEQ ID NO: 822184 - RNA, 22 nt, Human
cagcugacagugaggugggggc

SEQ ID NO: 822185 - RNA, 22 nt, Human
aucaggauuacacggggaugcu

SEQ ID NO: 822186 - RNA, 22 nt, Human
aggccagcuuccagaggggcag

SEQ ID NO: 822187 - RNA, 21 nt, Human
ucacagacuggucagugaggc

SEQ ID NO: 822188 - RNA, 22 nt, Human
ccuugcguuuuacagcuucuag

SEQ ID NO: 822189 - RNA, 22 nt, Human
uuucaguuuaugucuugaauua

SEQ ID NO: 822190 - RNA, 22 nt, Human
ggccagcucugcacagcagcug

SEQ ID NO: 822191 - RNA, 22 nt, Human
aaagcagaggugauaugacuua

SEQ ID NO: 822192 - RNA, 22 nt, Human
aaaauuauucauggcuuuugga

SEQ ID NO: 822193 - RNA, 22 nt, Human
acccaggagagagcuauaaaau

SEQ ID NO: 822194 - RNA, 22 nt, Human
caggagagcccggguccgggcu

SEQ ID NO: 822195 - RNA, 22 nt, Human
ucacaaauauuuuaacaguagg

SEQ ID NO: 822196 - RNA, 22 nt, Human
gugguaaucggauucuuaccgg

SEQ ID NO: 822197 - RNA, 22 nt, Human
ggaggacacuggcucugccuuc

SEQ ID NO: 822198 - RNA, 22 nt, Human
aaggaaccauuugugugcaugg

SEQ ID NO: 822199 - RNA, 22 nt, Human
agaaaugaagcaggaguuauua

SEQ ID NO: 822200 - RNA, 22 nt, Human
cuugaaagcacuuaguaaauua

SEQ ID NO: 822201 - RNA, 21 nt, Human
uucuucaugaugauuaauggc

SEQ ID NO: 822202 - RNA, 22 nt, Human
uuaaaugaggcugauguagauu

SEQ ID NO: 822203 - RNA, 22 nt, Human
uagcucuucaaucacugucucc

SEQ ID NO: 822204 - RNA, 22 nt, Human
gagcagcucugugccuggagac

SEQ ID NO: 822205 - RNA, 22 nt, Human
gggacuucauagcuaggcacuu

SEQ ID NO: 822206 - RNA, 22 nt, Human
agagagagggaaacugcuaaac

SEQ ID NO: 822207 - RNA, 22 nt, Human
uaaggccaaacuauuauaguuc

SEQ ID NO: 822208 - RNA, 22 nt, Human
uuuuuauaacucuuuugugaca

SEQ ID NO: 822209 - RNA, 22 nt, Human
cccaggagagaggccaguuggc

SEQ ID NO: 822210 - RNA, 22 nt, Human
cauuuguuuagaagucuuuaua

SEQ ID NO: 822211 - RNA, 22 nt, Human
uuucugugguggguaguucaga

SEQ ID NO: 822212 - RNA, 22 nt, Human
ggcagcugucucugaguuagca

SEQ ID NO: 822213 - RNA, 22 nt, Human
ucaaauaaugccauucaucauc

SEQ ID NO: 822214 - RNA, 22 nt, Human
uaaauuaugucacaugacucug

SEQ ID NO: 822215 - RNA, 22 nt, Human
aucugcuugaaugagcaacagg

SEQ ID NO: 822216 - RNA, 22 nt, Human
cauaauauacuacauugaugaa

SEQ ID NO: 822217 - RNA, 22 nt, Human
gagagucuaggaaccucauaua

SEQ ID NO: 822218 - RNA, 22 nt, Human
uagggcagagcuuguacacgau

SEQ ID NO: 822219 - RNA, 22 nt, Human
uucaggaucaaguugccaguag

SEQ ID NO: 822220 - RNA, 22 nt, Human
gacggcagaaacucaugagguc

SEQ ID NO: 822221 - RNA, 22 nt, Human
guaggcagauaggagugcagcc

SEQ ID NO: 822222 - RNA, 22 nt, Human
auucaaguccagcuucucuaca

SEQ ID NO: 822223 - RNA, 22 nt, Human
uggccaggcagguagaacggcc

SEQ ID NO: 822224 - RNA, 22 nt, Human
aucugcagaggacaggcgagga

SEQ ID NO: 822225 - RNA, 22 nt, Human
uuagccaugcccuagaagagga

SEQ ID NO: 822226 - RNA, 22 nt, Human
cauuuguaauacugacuugcag

SEQ ID NO: 822227 - RNA, 19 nt, Human
uaaggccaaaaguaagugu

SEQ ID NO: 822228 - RNA, 22 nt, Human
gagggucccugcucagggccag

SEQ ID NO: 822229 - RNA, 22 nt, Human
uuuaaauuuagaagaaacacug

SEQ ID NO: 822230 - RNA, 22 nt, Human
gaacccaggcuuuugaggcugu

SEQ ID NO: 822231 - RNA, 22 nt, Human
cuucugugauuugguuaggaua

SEQ ID NO: 822232 - RNA, 18 nt, Human
gucacuguguuucugagc

SEQ ID NO: 822233 - RNA, 22 nt, Human
uuugcaaauaccaugaaacuug

SEQ ID NO: 822234 - RNA, 18 nt, Human
gaugggagcaagagaaga

SEQ ID NO: 822235 - RNA, 22 nt, Human
guacauuucucuuguucuuauu

SEQ ID NO: 822236 - RNA, 22 nt, Human
acagugcuaaacacuucuugaa

SEQ ID NO: 822237 - RNA, 22 nt, Human
agucuucucauuucacaugcuu

SEQ ID NO: 822238 - RNA, 22 nt, Human
agugcagcaugcuggggaggcu

SEQ ID NO: 822239 - RNA, 20 nt, Human
cuucuucaguaguuuguucu

SEQ ID NO: 822240 - RNA, 22 nt, Human
ucuuuuggaaaugaugugcagg

SEQ ID NO: 822241 - RNA, 22 nt, Human
ugaggcagugugagauaauaaa

SEQ ID NO: 822242 - RNA, 22 nt, Human
gcccaggaguuggaggcugcag

SEQ ID NO: 822243 - RNA, 22 nt, Human
gccucugcaauuacauugugcc

SEQ ID NO: 822244 - RNA, 22 nt, Human
gucaggauuauuuuauuaaaag

SEQ ID NO: 822245 - RNA, 22 nt, Human
ucucuucuaauuuucccgagua

SEQ ID NO: 822246 - RNA, 22 nt, Human
aguccaaggagagacagcauuu

SEQ ID NO: 822247 - RNA, 22 nt, Human
gaaaggugccccauaggcagga

SEQ ID NO: 822248 - RNA, 22 nt, Human
uugaauaguuuuggauagcaua

SEQ ID NO: 822249 - RNA, 22 nt, Human
gaggaaccacucugagaagcca

SEQ ID NO: 822250 - RNA, 22 nt, Human
ugaacucgggaggaggcugcag

SEQ ID NO: 822251 - RNA, 22 nt, Human
ggcagaggaggggugaauuugc

SEQ ID NO: 822252 - RNA, 22 nt, Human
uauuucagcccuacuacuuggc

SEQ ID NO: 822253 - RNA, 22 nt, Human
auuucccagcuuugaucaguuu

SEQ ID NO: 822254 - RNA, 22 nt, Human
uugaaaggguuaaagugguaaa

SEQ ID NO: 822255 - RNA, 22 nt, Human
uguagggaggaaggguuggaaa

SEQ ID NO: 822256 - RNA, 19 nt, Human
ccaggagagcuuggagaag

SEQ ID NO: 822257 - RNA, 22 nt, Human
aaggaguuuggguagucauaca

SEQ ID NO: 822258 - RNA, 22 nt, Human
auggagggugucagagagcgaa

SEQ ID NO: 822259 - RNA, 22 nt, Human
uuuggaaugguaccuucaguug

SEQ ID NO: 822260 - RNA, 22 nt, Human
ucugggaacugagcuccccuag

SEQ ID NO: 822261 - RNA, 22 nt, Human
agucuccuuggccucaaugccu

SEQ ID NO: 822262 - RNA, 22 nt, Human
uaauacagaaguguauuaaaau

SEQ ID NO: 822263 - RNA, 22 nt, Human
aguggcagagccaaguagagcc

SEQ ID NO: 822264 - RNA, 22 nt, Human
gaggagcuugaggcuaggagcc

SEQ ID NO: 822265 - RNA, 22 nt, Human
aaugucugcucuacucaggagg

SEQ ID NO: 822266 - RNA, 22 nt, Human
gcccaggauucuuucuuccuua

SEQ ID NO: 822267 - RNA, 22 nt, Human
uguugagacugagggagucagc

SEQ ID NO: 822268 - RNA, 22 nt, Human
aaggcagccauagcaccaucca

SEQ ID NO: 822269 - RNA, 22 nt, Human
cagcuggcugcaugaugccaaa

SEQ ID NO: 822270 - RNA, 23 nt, Human
uccaugagaugugggcuucuagu

SEQ ID NO: 822271 - RNA, 22 nt, Human
ucagugaucuaaggguauggcc

SEQ ID NO: 822272 - RNA, 22 nt, Human
uuucuucagccuucacaaccug

SEQ ID NO: 822273 - RNA, 22 nt, Human
ucccaggacccaggcauucaca

SEQ ID NO: 822274 - RNA, 22 nt, Human
aaaggugacacucugccagcug

SEQ ID NO: 822275 - RNA, 22 nt, Human
aggcuagcaaugggagaugagu

SEQ ID NO: 822276 - RNA, 22 nt, Human
uggcagcugauuagauggugcc

SEQ ID NO: 822277 - RNA, 22 nt, Human
aucacuguguauguauaugcag

SEQ ID NO: 822278 - RNA, 22 nt, Human
agcccaggcagagggaugcuug

SEQ ID NO: 822279 - RNA, 18 nt, Human
ucaggagacacagacgca

SEQ ID NO: 822280 - RNA, 22 nt, Human
aagcuggcaugucaccugagaa

SEQ ID NO: 822281 - RNA, 22 nt, Human
ucaggagagagaaauuggggcu

SEQ ID NO: 822282 - RNA, 22 nt, Human
ccacagcugaccgcaggugagc

SEQ ID NO: 822283 - RNA, 22 nt, Human
gacagcuggcaguggaaaggug

SEQ ID NO: 822284 - RNA, 22 nt, Human
cccgggaggaggaaguugcagu

SEQ ID NO: 822285 - RNA, 22 nt, Human
gggaggugauggcaagcagcgg

SEQ ID NO: 822286 - RNA, 22 nt, Human
uucaggauaguggugaguggca

SEQ ID NO: 822287 - RNA, 17 nt, Human
ucauuuguugugacuag

SEQ ID NO: 822288 - RNA, 22 nt, Human
uugcauuuccuguacuguuuga

SEQ ID NO: 822289 - RNA, 22 nt, Human
agggggugcccagaugaaggau

SEQ ID NO: 822290 - RNA, 22 nt, Human
gcuucccagcagaggaaagacu

SEQ ID NO: 822291 - RNA, 22 nt, Human
cucucagacugaagggccugug

SEQ ID NO: 822292 - RNA, 22 nt, Human
uuuguaaaggccugaauuucag

SEQ ID NO: 822293 - RNA, 22 nt, Human
ugaggcaggaugcuugcacagg

SEQ ID NO: 822294 - RNA, 19 nt, Human
agggaguuuauauuugcac

SEQ ID NO: 822295 - RNA, 22 nt, Human
acauguaaaaggaacaugcaug

SEQ ID NO: 822296 - RNA, 22 nt, Human
ucacaguuauagucuguagaau

SEQ ID NO: 822297 - RNA, 22 nt, Human
auucuucacaaauauauagaag

SEQ ID NO: 822298 - RNA, 22 nt, Human
ugaggcaguugagcuuccugag

SEQ ID NO: 822299 - RNA, 19 nt, Human
gcagcugcuugaaaagaaa

SEQ ID NO: 822300 - RNA, 22 nt, Human
aggcagacugugcgggaagagu

SEQ ID NO: 822301 - RNA, 22 nt, Human
aauuuccagaccccauccacag

SEQ ID NO: 822302 - RNA, 22 nt, Human
aggcaccuugagagcaggagcu

SEQ ID NO: 822303 - RNA, 22 nt, Human
caggcagcgcucguggccuggc

SEQ ID NO: 822304 - RNA, 22 nt, Human
gcuguguuugacaguagcagac

SEQ ID NO: 822305 - RNA, 22 nt, Human
agcagaggaggauuuaguuagg

SEQ ID NO: 822306 - RNA, 22 nt, Human
aagcuggagaguuaggugaaua

SEQ ID NO: 822307 - RNA, 22 nt, Human
cagaagaggacuggguagcuca

SEQ ID NO: 822308 - RNA, 22 nt, Human
ugaugaaauguugaggcaguga

SEQ ID NO: 822309 - RNA, 21 nt, Human
agaggcaggcauuaaguacac

SEQ ID NO: 822310 - RNA, 22 nt, Human
ucuucagacccuuagcugugau

SEQ ID NO: 822311 - RNA, 22 nt, Human
ccucuucugcuucaggagcacu

SEQ ID NO: 822312 - RNA, 22 nt, Human
uuaauuuuaaccuguuuguguc

SEQ ID NO: 822313 - RNA, 22 nt, Human
uugauuucuauucagauguaga

SEQ ID NO: 822314 - RNA, 22 nt, Human
uuucaaaccuacuuguauguuu

SEQ ID NO: 822315 - RNA, 22 nt, Human
acacauauucauauguacuuac

SEQ ID NO: 822316 - RNA, 22 nt, Human
uggaaagucucuuuugacugua

SEQ ID NO: 822317 - RNA, 22 nt, Human
gagggcaguagccucguacccu

SEQ ID NO: 822318 - RNA, 22 nt, Human
uuaaagggccgauuuccaggcc

SEQ ID NO: 822319 - RNA, 22 nt, Human
aaucuguucuacucuauucaga

SEQ ID NO: 822320 - RNA, 22 nt, Human
gcaggagacaacuguaaggaga

SEQ ID NO: 822321 - RNA, 22 nt, Human
gagggaugguaguugacacuga

SEQ ID NO: 822322 - RNA, 22 nt, Human
gccaggaggucagccccucaac

SEQ ID NO: 822323 - RNA, 22 nt, Human
uacccaggagaaacagcagggc

SEQ ID NO: 822324 - RNA, 22 nt, Human
gcucucuugguggcuguccugg

SEQ ID NO: 822325 - RNA, 22 nt, Human
aguucuuuugugaacauaugcu

SEQ ID NO: 822326 - RNA, 22 nt, Human
ucuguggauuuuaguguucaug

SEQ ID NO: 822327 - RNA, 22 nt, Human
gucaggaugcuauuguuauuaa

SEQ ID NO: 822328 - RNA, 22 nt, Human
uuccaagaguaaauucaaauug

SEQ ID NO: 822329 - RNA, 21 nt, Human
ucuugaaaauuguagcaguuu

SEQ ID NO: 822330 - RNA, 22 nt, Human
aggcagcuuuguaguaaagcua

SEQ ID NO: 822331 - RNA, 22 nt, Human
ugaaaugaucaguuugguuacu

SEQ ID NO: 822332 - RNA, 20 nt, Human
cugcuguguuauuguagaac

SEQ ID NO: 822333 - RNA, 22 nt, Human
agggagcucacaguccaguaga

SEQ ID NO: 822334 - RNA, 22 nt, Human
ucugggaacagccuggcugugu

SEQ ID NO: 822335 - RNA, 22 nt, Human
agcugcccugguaagauugaug

SEQ ID NO: 822336 - RNA, 22 nt, Human
auauucuucuuguucagacuau

SEQ ID NO: 822337 - RNA, 22 nt, Human
aaaggaagauugagcuuuucca

SEQ ID NO: 822338 - RNA, 22 nt, Human
uggcagcuguuaauguuuuguu

SEQ ID NO: 822339 - RNA, 22 nt, Human
auauucuuccaaaacaucauuu

SEQ ID NO: 822340 - RNA, 17 nt, Human
cagacaggcugucaccc

SEQ ID NO: 822341 - RNA, 22 nt, Human
gaugagcauuguuucauguguu

SEQ ID NO: 822342 - RNA, 22 nt, Human
aggcagcuggaaaacuccaggc

SEQ ID NO: 822343 - RNA, 19 nt, Human
uggcagggagaguuugaag

SEQ ID NO: 822344 - RNA, 22 nt, Human
cacucuccagcacaccccauuu

SEQ ID NO: 822345 - RNA, 22 nt, Human
gucaggauuaaugggaguaugc

SEQ ID NO: 822346 - RNA, 22 nt, Human
cuucugugcuucacaguugcca

SEQ ID NO: 822347 - RNA, 22 nt, Human
gagaggaguagacacuuugguu

SEQ ID NO: 822348 - RNA, 22 nt, Human
aggcugcucaguagauggagcu

SEQ ID NO: 822349 - RNA, 22 nt, Human
guucuucaguaaaauuaaaugu

SEQ ID NO: 822350 - RNA, 22 nt, Human
gaggccagaagugccucgggcu

SEQ ID NO: 822351 - RNA, 22 nt, Human
aggggaugauccucccgcagcg

SEQ ID NO: 822352 - RNA, 22 nt, Human
cgaggcagaggcugaaacggcu

SEQ ID NO: 822353 - RNA, 22 nt, Human
cccaggagauggugcguggucu

SEQ ID NO: 822354 - RNA, 19 nt, Human
gccaggagggcucuggcug

SEQ ID NO: 822355 - RNA, 22 nt, Human
uuucaaagucaauaucauuacc

SEQ ID NO: 822356 - RNA, 19 nt, Human
uggggcuguguuuugaccc

SEQ ID NO: 822357 - RNA, 22 nt, Human
caaggccauaagagauacaaaa

SEQ ID NO: 822358 - RNA, 22 nt, Human
uuugaacuucuaccugucauau

SEQ ID NO: 822359 - RNA, 22 nt, Human
auguuucaaugcacuuuagccu

SEQ ID NO: 822360 - RNA, 22 nt, Human
gcagcugaauguccauugcugc

SEQ ID NO: 822361 - RNA, 22 nt, Human
auaucaguaucuauguauuugu

SEQ ID NO: 822362 - RNA, 22 nt, Human
auugugcaaauauuaucuguag

SEQ ID NO: 822363 - RNA, 22 nt, Human
ucuuaaagagcgcaauuugagg

SEQ ID NO: 822364 - RNA, 22 nt, Human
cuacccaggcuggagugcagua

SEQ ID NO: 822365 - RNA, 22 nt, Human
uuucuuguaagauguuuauuaa

SEQ ID NO: 822366 - RNA, 22 nt, Human
aaggccagccugagagcuaaca

SEQ ID NO: 822367 - RNA, 22 nt, Human
auuguuaugaaaauaagauguu

SEQ ID NO: 822368 - RNA, 22 nt, Human
cccaggaaagagacugcugggu

SEQ ID NO: 822369 - RNA, 22 nt, Human
auuuagaacuuuguuugccaau

SEQ ID NO: 822370 - RNA, 22 nt, Human
guagggagcccagagcccagug

SEQ ID NO: 822371 - RNA, 21 nt, Human
cucuugugucagagccagagg

SEQ ID NO: 822372 - RNA, 22 nt, Human
uauuugaaaguguacaaaaacu

SEQ ID NO: 822373 - RNA, 22 nt, Human
gaggagaggggcucccaagagc

SEQ ID NO: 822374 - RNA, 22 nt, Human
gaggcgagaagcuggagauggu

SEQ ID NO: 822375 - RNA, 22 nt, Human
ucaagugcuugugagguauuug

SEQ ID NO: 822376 - RNA, 22 nt, Human
aggccagcgcugcuagcucccg

SEQ ID NO: 822377 - RNA, 22 nt, Human
ggaggggaggauuaaugacaaa

SEQ ID NO: 822378 - RNA, 21 nt, Human
gggcagcucuguuuuauuuuc

SEQ ID NO: 822379 - RNA, 22 nt, Human
gaggcagcugaaggagugacag

SEQ ID NO: 822380 - RNA, 22 nt, Human
uugaaauggaagugaaaauucu

SEQ ID NO: 822381 - RNA, 22 nt, Human
uucauucugggcucuaaggaac

SEQ ID NO: 822382 - RNA, 22 nt, Human
aguacauauaguaauuuagcca

SEQ ID NO: 822383 - RNA, 20 nt, Human
cccagugaagcauggaagag

SEQ ID NO: 822384 - RNA, 21 nt, Human
auuucagagcacacaaguaaa

SEQ ID NO: 822385 - RNA, 22 nt, Human
caggagauguaagacuucuguu

SEQ ID NO: 822386 - RNA, 22 nt, Human
aacauuuaugauugagguaaau

SEQ ID NO: 822387 - RNA, 22 nt, Human
ucuuugcaggccaaauuguuaa

SEQ ID NO: 822388 - RNA, 22 nt, Human
gagccagcuauguagcaagagg

SEQ ID NO: 822389 - RNA, 22 nt, Human
cccaggaggcagauguugcagu

SEQ ID NO: 822390 - RNA, 22 nt, Human
ucauacaucuguccuggagcuc

SEQ ID NO: 822391 - RNA, 20 nt, Human
cauuuguuagcuuucuacug

SEQ ID NO: 822392 - RNA, 22 nt, Human
gggcagcugccacuccgcuugc

SEQ ID NO: 822393 - RNA, 22 nt, Human
ggaccuggcaauuugcaucucu

SEQ ID NO: 822394 - RNA, 20 nt, Human
uggcaucucucaauuguagg

SEQ ID NO: 822395 - RNA, 22 nt, Human
uuugacauuauccuguuacugg

SEQ ID NO: 822396 - RNA, 22 nt, Human
ugccaggauggccagggggcca

SEQ ID NO: 822397 - RNA, 22 nt, Human
cauuguuauagcauuacacacc

SEQ ID NO: 822398 - RNA, 22 nt, Human
agaccgagaaguucuccaggcc

SEQ ID NO: 822399 - RNA, 21 nt, Human
cccaggaggcugagaagagca

SEQ ID NO: 822400 - RNA, 22 nt, Human
gagccaggggucagcuccgagg

SEQ ID NO: 822401 - RNA, 22 nt, Human
agcugcccuuaauaggcauuca

SEQ ID NO: 822402 - RNA, 22 nt, Human
aggcaggcccucuggaaaggua

SEQ ID NO: 822403 - RNA, 22 nt, Human
aaggcagccuuuguuugauuga

SEQ ID NO: 822404 - RNA, 22 nt, Human
gaggcaucugggcacagaagug

SEQ ID NO: 822405 - RNA, 22 nt, Human
cugcugugagugguucuugccu

SEQ ID NO: 822406 - RNA, 22 nt, Human
acauugcugcauucuccuuccc

SEQ ID NO: 822407 - RNA, 22 nt, Human
cugcuuugacuguuaagaacca

SEQ ID NO: 822408 - RNA, 22 nt, Human
agcacauucugccuugcuuugc

SEQ ID NO: 822409 - RNA, 22 nt, Human
cucuucuuuaguccagaccauc

SEQ ID NO: 822410 - RNA, 22 nt, Human
cugaacucuuuaugacagcuug

SEQ ID NO: 822411 - RNA, 22 nt, Human
gcccaggaaaugccccguggug

SEQ ID NO: 822412 - RNA, 22 nt, Human
cagaggcagccgggggagaacg

SEQ ID NO: 822413 - RNA, 22 nt, Human
gaggcagcuuaggguacugacu

SEQ ID NO: 822414 - RNA, 22 nt, Human
aaaggagacuucagaucuccuu

SEQ ID NO: 822415 - RNA, 22 nt, Human
uggaguucucaggugagggcuu

SEQ ID NO: 822416 - RNA, 22 nt, Human
ugaggcagucacccccuccugc

SEQ ID NO: 822417 - RNA, 22 nt, Human
gaagcagcaaguauaggacagg

SEQ ID NO: 822418 - RNA, 22 nt, Human
ucucaggaauagaguggcagca

SEQ ID NO: 822419 - RNA, 22 nt, Human
cucacuguuuaauagcuggauc

SEQ ID NO: 822420 - RNA, 22 nt, Human
gacagugcauuuccuggcaugg

SEQ ID NO: 822421 - RNA, 22 nt, Human
gccugcagaacugugaggcaau

SEQ ID NO: 822422 - RNA, 22 nt, Human
auuugcuuaucuccacaguugu

SEQ ID NO: 822423 - RNA, 22 nt, Human
gauggcagguaguggucucauc

SEQ ID NO: 822424 - RNA, 22 nt, Human
uucuuauagaagcaaccauugu

SEQ ID NO: 822425 - RNA, 22 nt, Human
uucuucuuuaucucaguauccu

SEQ ID NO: 822426 - RNA, 22 nt, Human
cccaggaacagcacagaacagc

SEQ ID NO: 822427 - RNA, 22 nt, Human
cauuuguuaaccaguguggauu

SEQ ID NO: 822428 - RNA, 17 nt, Human
gccucugcuugugucau

SEQ ID NO: 822429 - RNA, 22 nt, Human
gaggcagccucaguggaccucg

SEQ ID NO: 822430 - RNA, 19 nt, Human
cccaggaggcggagguugc

SEQ ID NO: 822431 - RNA, 22 nt, Human
gggcagcugucuugguucucaa

SEQ ID NO: 822432 - RNA, 22 nt, Human
cagcgucucguugugggccucg

SEQ ID NO: 822433 - RNA, 20 nt, Human
cuucuucagccuaugcuuca

SEQ ID NO: 822434 - RNA, 22 nt, Human
ugaaagguagcuggccucauag

SEQ ID NO: 822435 - RNA, 22 nt, Human
acugcccucccaucuauugcaa

SEQ ID NO: 822436 - RNA, 22 nt, Human
uugcuagcugguguaugcauug

SEQ ID NO: 822437 - RNA, 22 nt, Human
aaauguuucuacuugugagcau

SEQ ID NO: 822438 - RNA, 22 nt, Human
ucagagaguuagugucuuagcu

SEQ ID NO: 822439 - RNA, 22 nt, Human
ucauuuguggaagugauugugg

SEQ ID NO: 822440 - RNA, 22 nt, Human
uucauugucucuguuugccuuc

SEQ ID NO: 822441 - RNA, 22 nt, Human
aaagcagagcagggcacuuaug

SEQ ID NO: 822442 - RNA, 23 nt, Human
uuagagaugauuaaaaaaucuug

SEQ ID NO: 822443 - RNA, 22 nt, Human
cugcauuagucaugcuuugcag

SEQ ID NO: 822444 - RNA, 22 nt, Human
aggcagcugcccucuccuuccu

SEQ ID NO: 822445 - RNA, 22 nt, Human
uuucuucauagaccuugucuug

SEQ ID NO: 822446 - RNA, 22 nt, Human
ucuucuccagugcuucugcaca

SEQ ID NO: 822447 - RNA, 22 nt, Human
uguucuuuggcuucacagcucu

SEQ ID NO: 822448 - RNA, 22 nt, Human
aggguagguguaagauagcccu

SEQ ID NO: 822449 - RNA, 23 nt, Human
cagcccuuccugcauguuuuugu

SEQ ID NO: 822450 - RNA, 17 nt, Human
uuucuccuuccaucuca

SEQ ID NO: 822451 - RNA, 22 nt, Human
gaaauauuacaguggaggggau

SEQ ID NO: 822452 - RNA, 22 nt, Human
ggugagggaguggaacgaggug

SEQ ID NO: 822453 - RNA, 22 nt, Human
gaaggccacuuuguguugagaa

SEQ ID NO: 822454 - RNA, 22 nt, Human
aaaggcaggcuuucacaucuca

SEQ ID NO: 822455 - RNA, 22 nt, Human
guggcagcggugugcaaggagg

SEQ ID NO: 822456 - RNA, 22 nt, Human
ggaaaugacuuggugcuucguu

SEQ ID NO: 822457 - RNA, 22 nt, Human
uucugagacaauugagagucua

SEQ ID NO: 822458 - RNA, 22 nt, Human
uugagaagaauguguugaguuu

SEQ ID NO: 822459 - RNA, 23 nt, Human
agggagcuaaaaggcuggagcag

SEQ ID NO: 822460 - RNA, 18 nt, Human
gagucuuuguuacugcug

SEQ ID NO: 822461 - RNA, 22 nt, Human
guaguucugcagugucaccuga

SEQ ID NO: 822462 - RNA, 22 nt, Human
ugaaagcacaaguucuaacagg

SEQ ID NO: 822463 - RNA, 22 nt, Human
ucucaggaaauaggauuugagu

SEQ ID NO: 822464 - RNA, 22 nt, Human
aucauucuagcuguuguguuga

SEQ ID NO: 822465 - RNA, 22 nt, Human
gauuuuauuagcccaaacuuug

SEQ ID NO: 822466 - RNA, 22 nt, Human
uuaagauagaacccaguagucu

SEQ ID NO: 822467 - RNA, 22 nt, Human
aauuuuaagcauaugacugguu

SEQ ID NO: 822468 - RNA, 22 nt, Human
ugaugaaacugagguuccaaga

SEQ ID NO: 822469 - RNA, 22 nt, Human
gcauuuccugugcuuggcauau

SEQ ID NO: 822470 - RNA, 22 nt, Human
uauuuuaucugccagaguggag

SEQ ID NO: 822471 - RNA, 22 nt, Human
guccucuguuagaaaugugcuu

SEQ ID NO: 822472 - RNA, 22 nt, Human
uucaggaugcucagaguagucu

SEQ ID NO: 822473 - RNA, 22 nt, Human
ugaggcaggacuugcauaaagu

SEQ ID NO: 822474 - RNA, 22 nt, Human
uucucugagauagacuaagugg

SEQ ID NO: 822475 - RNA, 22 nt, Human
gagaggaguuacuauuuccgag

SEQ ID NO: 822476 - RNA, 22 nt, Human
ggagguggcagggaacauaauu

SEQ ID NO: 822477 - RNA, 22 nt, Human
aaaauugaagugaucaggaacu

SEQ ID NO: 822478 - RNA, 22 nt, Human
auauuucaugggguuccauacu

SEQ ID NO: 822479 - RNA, 22 nt, Human
cccaggaguuagagguuguggu

SEQ ID NO: 822480 - RNA, 22 nt, Human
uucuacaugguugcucagaggg

SEQ ID NO: 822481 - RNA, 20 nt, Human
auccaugagagucuggauuc

SEQ ID NO: 822482 - RNA, 22 nt, Human
cugcuguguugccagugucacc

SEQ ID NO: 822483 - RNA, 22 nt, Human
agaggaugauuuuaaggacacu

SEQ ID NO: 822484 - RNA, 22 nt, Human
cauuuauuggcauguaguaggu

SEQ ID NO: 822485 - RNA, 22 nt, Human
agguaggggguuugggaacugc

SEQ ID NO: 822486 - RNA, 22 nt, Human
cucuuucugauucgcugggacc

SEQ ID NO: 822487 - RNA, 17 nt, Human
gcgcagcuccuggcgcg

SEQ ID NO: 822488 - RNA, 22 nt, Human
guguguuucagaagccaggugu

SEQ ID NO: 822489 - RNA, 23 nt, Human
uuucaaauuacucugcagaugac

SEQ ID NO: 822490 - RNA, 20 nt, Human
ccucaguguccuggacuggg

SEQ ID NO: 822491 - RNA, 22 nt, Human
ugagacaguuuuucuauuucca

SEQ ID NO: 822492 - RNA, 22 nt, Human
cucaucugauaaaucacucuua

SEQ ID NO: 822493 - RNA, 22 nt, Human
cagacagggaccucgcuccaga

SEQ ID NO: 822494 - RNA, 22 nt, Human
ggcagaagauaggacagggaau

SEQ ID NO: 822495 - RNA, 22 nt, Human
ugcacauucacuuagguauugu

SEQ ID NO: 822496 - RNA, 23 nt, Human
uggaaagcggaccuggggcagag

SEQ ID NO: 822497 - RNA, 22 nt, Human
uccagaaacuuuuccagucuca

SEQ ID NO: 822498 - RNA, 22 nt, Human
cugcuuccauaaauaaugugcu

SEQ ID NO: 822499 - RNA, 22 nt, Human
uaacaucuuuagcagcucgaac

SEQ ID NO: 822500 - RNA, 22 nt, Human
uggcagcugccauguccacgug

SEQ ID NO: 822501 - RNA, 22 nt, Human
uuucaucuaacacuacauaggg

SEQ ID NO: 822502 - RNA, 22 nt, Human
uuccaugaaauguguuaugcuu

SEQ ID NO: 822503 - RNA, 22 nt, Human
gcucaggacuggaggagcgggg

SEQ ID NO: 822504 - RNA, 21 nt, Human
cuugaaagguagagucuacag

SEQ ID NO: 822505 - RNA, 22 nt, Human
aucaggaucacagaaacuuuua

SEQ ID NO: 822506 - RNA, 22 nt, Human
auaaauaucacuguugucccuc

SEQ ID NO: 822507 - RNA, 22 nt, Human
cuggcuugcagcucaucauaaa

SEQ ID NO: 822508 - RNA, 22 nt, Human
uucuucagucccacuagccaca

SEQ ID NO: 822509 - RNA, 22 nt, Human
agcagagguguuuauuauggga

SEQ ID NO: 822510 - RNA, 22 nt, Human
guggcaggagagacacagccau

SEQ ID NO: 822511 - RNA, 22 nt, Human
augauguugauaaauuacuuua

SEQ ID NO: 822512 - RNA, 22 nt, Human
caaaugauacuguuuuuagucu

SEQ ID NO: 822513 - RNA, 22 nt, Human
ucagagaguuggaaagaauuaa

SEQ ID NO: 822514 - RNA, 22 nt, Human
guucuucaucauuaacacucug

SEQ ID NO: 822515 - RNA, 22 nt, Human
auggaaagugcauggaagucau

SEQ ID NO: 822516 - RNA, 22 nt, Human
aaaaacugcaauuacuuuuguc

SEQ ID NO: 822517 - RNA, 22 nt, Human
uagggaggcuacuucuuguagg

SEQ ID NO: 822518 - RNA, 22 nt, Human
uccaggaggcaccuuuggacca

SEQ ID NO: 822519 - RNA, 22 nt, Human
uaagcugugggagauuggcaua

SEQ ID NO: 822520 - RNA, 22 nt, Human
gaggaaccaaucugugauauuc

SEQ ID NO: 822521 - RNA, 22 nt, Human
uugcaggauuuuagagaugaca

SEQ ID NO: 822522 - RNA, 19 nt, Human
gugcuuuuuaagagcucag

SEQ ID NO: 822523 - RNA, 22 nt, Human
gggcagcucggaagugggaaag

SEQ ID NO: 822524 - RNA, 22 nt, Human
aagagggcugcaaucuuauugc

SEQ ID NO: 822525 - RNA, 22 nt, Human
gaggaaccaaaucagcuugcac

SEQ ID NO: 822526 - RNA, 22 nt, Human
gcuuuggaugugugccugaggu

SEQ ID NO: 822527 - RNA, 22 nt, Human
uuucuucacaggguauugggug

SEQ ID NO: 822528 - RNA, 22 nt, Human
uucuacaauaugaauaaugaag

SEQ ID NO: 822529 - RNA, 22 nt, Human
cccaggaggcgcagguugcggu

SEQ ID NO: 822530 - RNA, 22 nt, Human
ccccggaggcggagguugcagu

SEQ ID NO: 822531 - RNA, 22 nt, Human
aggcaguuucugggacagcaua

SEQ ID NO: 822532 - RNA, 20 nt, Human
agaggaggauuauuuuauuc

SEQ ID NO: 822533 - RNA, 22 nt, Human
acccaggagcucugggguccuc

SEQ ID NO: 822534 - RNA, 22 nt, Human
uaaauuauguuccauguccuuu

SEQ ID NO: 822535 - RNA, 22 nt, Human
cucaugauguagcgaaugagaa

SEQ ID NO: 822536 - RNA, 22 nt, Human
uaucuguuugcucacagguguu

SEQ ID NO: 822537 - RNA, 22 nt, Human
cagucucuaaaucaaucugaau

SEQ ID NO: 822538 - RNA, 22 nt, Human
uugaagaggacuuugcagcugu

SEQ ID NO: 822539 - RNA, 22 nt, Human
cugacuguaauucuguucuuaa

SEQ ID NO: 822540 - RNA, 22 nt, Human
caucaucaaaagugacagagaa

SEQ ID NO: 822541 - RNA, 22 nt, Human
aagcgccaugguuccugcgcag

SEQ ID NO: 822542 - RNA, 22 nt, Human
ugaaaugagauaauuuaagugc

SEQ ID NO: 822543 - RNA, 22 nt, Human
ucucuucuauuugagacuauuu

SEQ ID NO: 822544 - RNA, 22 nt, Human
uuccugagggacuuuugagauu

SEQ ID NO: 822545 - RNA, 22 nt, Human
ucuucucuacaccagcagcccc

SEQ ID NO: 822546 - RNA, 22 nt, Human
uucuucucggcugucagauagu

SEQ ID NO: 822547 - RNA, 21 nt, Human
gccaggaguagauuacauuua

SEQ ID NO: 822548 - RNA, 22 nt, Human
acucaggaaauugagauaaugg

SEQ ID NO: 822549 - RNA, 22 nt, Human
aucaggaucaugcuggguggga

SEQ ID NO: 822550 - RNA, 22 nt, Human
gcagcugaaagggaucucuaca

SEQ ID NO: 822551 - RNA, 22 nt, Human
uuuguuuagaaagagauuggug

SEQ ID NO: 822552 - RNA, 22 nt, Human
ccacaucucgguccccucuuug

SEQ ID NO: 822553 - RNA, 22 nt, Human
ucucuguacaguacaugccgug

SEQ ID NO: 822554 - RNA, 22 nt, Human
gccugcagauauauaggauggu

SEQ ID NO: 822555 - RNA, 21 nt, Human
gagacagcccagugccagggc

SEQ ID NO: 822556 - RNA, 22 nt, Human
gcaagcugaugugauagugaaa

SEQ ID NO: 822557 - RNA, 22 nt, Human
auucugauaucuuauucuagcu

SEQ ID NO: 822558 - RNA, 22 nt, Human
uaucuguuguccaugcagaaag

SEQ ID NO: 822559 - RNA, 22 nt, Human
gaaauauuucucuugagccccu

SEQ ID NO: 822560 - RNA, 22 nt, Human
caaauguauaaauguacuuucu

SEQ ID NO: 822561 - RNA, 18 nt, Human
aaacuggcuuggccugug

SEQ ID NO: 822562 - RNA, 22 nt, Human
gacagagaggcugagcaguaca

SEQ ID NO: 822563 - RNA, 22 nt, Human
gagggagggaaaguuuaacacu

SEQ ID NO: 822564 - RNA, 22 nt, Human
cucuggcuucuaccuugcaguu

SEQ ID NO: 822565 - RNA, 22 nt, Human
aauauuguuucaagaucacaga

SEQ ID NO: 822566 - RNA, 22 nt, Human
ucauuguuucugcuuuucauga

SEQ ID NO: 822567 - RNA, 22 nt, Human
gagaaaugcaugcaugucauca

SEQ ID NO: 822568 - RNA, 22 nt, Human
ucagucuuugcuuaugacaaua

SEQ ID NO: 822569 - RNA, 17 nt, Human
uccaggagaggcaaugg

SEQ ID NO: 822570 - RNA, 22 nt, Human
ugaaacauuugaugaucuuugg

SEQ ID NO: 822571 - RNA, 20 nt, Human
cccaggagugagcagcuuua

SEQ ID NO: 822572 - RNA, 22 nt, Human
uuauuauuggugaguuaaggaa

SEQ ID NO: 822573 - RNA, 22 nt, Human
ccauccuaucugaccuacuugu

SEQ ID NO: 822574 - RNA, 22 nt, Human
aggcagcagucaugaggaaaga

SEQ ID NO: 822575 - RNA, 22 nt, Human
aucugccugcaguggagguggg

SEQ ID NO: 822576 - RNA, 22 nt, Human
uucuucuuaauguccugggaac

SEQ ID NO: 822577 - RNA, 22 nt, Human
gugcaagguacauccuugaugu

SEQ ID NO: 822578 - RNA, 22 nt, Human
caagauggaguccgggaaugug

SEQ ID NO: 822579 - RNA, 23 nt, Human
gaggcagcuccugcagugcccug

SEQ ID NO: 822580 - RNA, 22 nt, Human
cccaggugcugcgugaagccuc

SEQ ID NO: 822581 - RNA, 22 nt, Human
aaugauuuccccuacacagaag

SEQ ID NO: 822582 - RNA, 18 nt, Human
gaggcagcuagcaauuuu

SEQ ID NO: 822583 - RNA, 22 nt, Human
cuguggaaauaaacaaugcuaa

SEQ ID NO: 822584 - RNA, 22 nt, Human
ggcagcuggguuggccagaaac

SEQ ID NO: 822585 - RNA, 22 nt, Human
uuuaaaauuuagaccucuccac

SEQ ID NO: 822586 - RNA, 20 nt, Human
gucaggauuaguaaacucug

SEQ ID NO: 822587 - RNA, 22 nt, Human
uuucuagucucgaucucuuaau

SEQ ID NO: 822588 - RNA, 22 nt, Human
uuucucaguuacuagcuguggu

SEQ ID NO: 822589 - RNA, 22 nt, Human
caggacagagcccagacugugu

SEQ ID NO: 822590 - RNA, 22 nt, Human
ugcuugugagaguuuuuucaga

SEQ ID NO: 822591 - RNA, 22 nt, Human
ucaguucuuuauuucacaguga

SEQ ID NO: 822592 - RNA, 22 nt, Human
aaugcuuuuugcgaaaugugca

SEQ ID NO: 822593 - RNA, 22 nt, Human
agugcuguaacaacuuauuugg

SEQ ID NO: 822594 - RNA, 22 nt, Human
uuggcaggaauauugcagaggu

SEQ ID NO: 822595 - RNA, 22 nt, Human
acucaggaaaaauguagugaua

SEQ ID NO: 822596 - RNA, 18 nt, Human
agaggggagguaagucug

SEQ ID NO: 822597 - RNA, 22 nt, Human
gcuguguuggugaagcuguagc

SEQ ID NO: 822598 - RNA, 22 nt, Human
ucucugaguaagugacaguuca

SEQ ID NO: 822599 - RNA, 22 nt, Human
gucaggauuggggucaugaguc

SEQ ID NO: 822600 - RNA, 22 nt, Human
uugcauuuuuagaugcuucugu

SEQ ID NO: 822601 - RNA, 22 nt, Human
agggagcuaggauccugaaggu

SEQ ID NO: 822602 - RNA, 22 nt, Human
uuucuucagccacuccaaacug

SEQ ID NO: 822603 - RNA, 22 nt, Human
uggggcucaccuaggcuggaag

SEQ ID NO: 822604 - RNA, 22 nt, Human
gccaggagcaugucauuguuga

SEQ ID NO: 822605 - RNA, 23 nt, Human
uugcuuucaucaugagaugcucc

SEQ ID NO: 822606 - RNA, 19 nt, Human
ugcaagcuuuuucuuguua

SEQ ID NO: 822607 - RNA, 23 nt, Human
ucucaagaggaagcagggcucau

SEQ ID NO: 822608 - RNA, 22 nt, Human
ccaggagagcauugcacagagg

SEQ ID NO: 822609 - RNA, 22 nt, Human
uucaggauggcggauguugggg

SEQ ID NO: 822610 - RNA, 22 nt, Human
ucagugugaguaccaugcucag

SEQ ID NO: 822611 - RNA, 22 nt, Human
uugcuguguaacuccuggccug

SEQ ID NO: 822612 - RNA, 15 nt, Human
uucaggauaugacuc

SEQ ID NO: 822613 - RNA, 22 nt, Human
uuugaaauuaagauauugucca

SEQ ID NO: 822614 - RNA, 22 nt, Human
gaggagagggcugcgggcccac

SEQ ID NO: 822615 - RNA, 19 nt, Human
uggagacugagagugagca

SEQ ID NO: 822616 - RNA, 23 nt, Human
uuucuucagaagccuugcgaggc

SEQ ID NO: 822617 - RNA, 22 nt, Human
caggcagcugcgacaagagagc

SEQ ID NO: 822618 - RNA, 22 nt, Human
gggcagcucuuugguauccuuc

SEQ ID NO: 822619 - RNA, 22 nt, Human
uauuucagucacuucuucucug

SEQ ID NO: 822620 - RNA, 22 nt, Human
caucucaugggcaugccaagcu

SEQ ID NO: 822621 - RNA, 22 nt, Human
gcucaggacccaggugugaccu

SEQ ID NO: 822622 - RNA, 22 nt, Human
gagguggucgaggagggguacc

SEQ ID NO: 822623 - RNA, 22 nt, Human
ccagagagauugcuucuaaaga

SEQ ID NO: 822624 - RNA, 22 nt, Human
uaucuguucaauggaagaugac

SEQ ID NO: 822625 - RNA, 22 nt, Human
gugauuuugagaccuauauagu

SEQ ID NO: 822626 - RNA, 22 nt, Human
uccaggagugauaaggccacug

SEQ ID NO: 822627 - RNA, 22 nt, Human
caguuucuauggcugggcucug

SEQ ID NO: 822628 - RNA, 22 nt, Human
gggcagcugcagggauggugac

SEQ ID NO: 822629 - RNA, 21 nt, Human
auucugaguugucagucuuca

SEQ ID NO: 822630 - RNA, 22 nt, Human
auguuauaguuauaaaaugagg

SEQ ID NO: 822631 - RNA, 22 nt, Human
gcucccagcaauugaggcagcc

SEQ ID NO: 822632 - RNA, 22 nt, Human
uucucuuuugugaugugagaug

SEQ ID NO: 822633 - RNA, 22 nt, Human
aaccauuugcaguuacugagac

SEQ ID NO: 822634 - RNA, 22 nt, Human
guuauauauaguauuucucuga

SEQ ID NO: 822635 - RNA, 22 nt, Human
uuugaaagaaaccagugaguga

SEQ ID NO: 822636 - RNA, 17 nt, Human
acucaggaucugggagu

SEQ ID NO: 822637 - RNA, 22 nt, Human
ucaggaugguccuuuaugagaa

SEQ ID NO: 822638 - RNA, 22 nt, Human
uucaggauucuuucagacuggg

SEQ ID NO: 822639 - RNA, 22 nt, Human
cuggcugugcugcaggcuuugg

SEQ ID NO: 822640 - RNA, 22 nt, Human
guagccauuggcaaugaagccu

SEQ ID NO: 822641 - RNA, 22 nt, Human
auacaacagaaaaugauuauuc

SEQ ID NO: 822642 - RNA, 20 nt, Human
cuucuucauuaacccuacug

SEQ ID NO: 822643 - RNA, 22 nt, Human
ucuuagaaguuuauggcacgga

SEQ ID NO: 822644 - RNA, 22 nt, Human
cauucauuagaauagauaugua

SEQ ID NO: 822645 - RNA, 22 nt, Human
caacugugaauuuuaugauacc

SEQ ID NO: 822646 - RNA, 22 nt, Human
agaggaggaagagcuuuaaaau

SEQ ID NO: 822647 - RNA, 22 nt, Human
ccaugagccaggcugaggaagc

SEQ ID NO: 822648 - RNA, 22 nt, Human
uaacaguguggacuugagaucu

SEQ ID NO: 822649 - RNA, 22 nt, Human
caaggccagagccagcgauaag

SEQ ID NO: 822650 - RNA, 22 nt, Human
uuccuuaguguuagauucugug

SEQ ID NO: 822651 - RNA, 22 nt, Human
uuuuuguagucauuagaagagg

SEQ ID NO: 822652 - RNA, 22 nt, Human
uuuuccagagcugucucuugca

SEQ ID NO: 822653 - RNA, 22 nt, Human
uggcagcuauggucuaagggcc

SEQ ID NO: 822654 - RNA, 22 nt, Human
ggcaggcaaugaggaugggaag

SEQ ID NO: 822655 - RNA, 20 nt, Human
ucagugauuuugaagaggaa

SEQ ID NO: 822656 - RNA, 22 nt, Human
gccaggagacuccauucauuug

SEQ ID NO: 822657 - RNA, 22 nt, Human
ggagaggagcuauugggggcuc

SEQ ID NO: 822658 - RNA, 18 nt, Human
gaaaggagagacaguagg

SEQ ID NO: 822659 - RNA, 22 nt, Human
ucuuuuggguucuuaugauuua

SEQ ID NO: 822660 - RNA, 22 nt, Human
uacacacaugcauuugccuuau

SEQ ID NO: 822661 - RNA, 22 nt, Human
aagcagagcaagcguauuuauu

SEQ ID NO: 822662 - RNA, 22 nt, Human
agacagugauguaagcaggagu

SEQ ID NO: 822663 - RNA, 22 nt, Human
uucaauucugcucugaucuuag

SEQ ID NO: 822664 - RNA, 20 nt, Human
ucauuguguugccaauuccc

SEQ ID NO: 822665 - RNA, 22 nt, Human
aucaggaucugcaucauaagaa

SEQ ID NO: 822666 - RNA, 22 nt, Human
uggcaaggcugugggggcagag

SEQ ID NO: 822667 - RNA, 22 nt, Human
aggcggcugguguccugcaggu

SEQ ID NO: 822668 - RNA, 22 nt, Human
uaggcagcauggauucugaaua

SEQ ID NO: 822669 - RNA, 22 nt, Human
gcuccucuucucccacugaaug

SEQ ID NO: 822670 - RNA, 22 nt, Human
cugcugugugaccauggacagg

SEQ ID NO: 822671 - RNA, 22 nt, Human
uccaggagagguguggggacug

SEQ ID NO: 822672 - RNA, 19 nt, Human
caugcugaccugcuguggu

SEQ ID NO: 822673 - RNA, 22 nt, Human
aaaggccaugguuggaguguuu

SEQ ID NO: 822674 - RNA, 22 nt, Human
ucugggaaugaauaagaccugu

SEQ ID NO: 822675 - RNA, 22 nt, Human
caggcgagugaacagacucuca

SEQ ID NO: 822676 - RNA, 20 nt, Human
cugcccagccacugagggau

SEQ ID NO: 822677 - RNA, 22 nt, Human
gaggccuggagccgccuaggcg

SEQ ID NO: 822678 - RNA, 19 nt, Human
cauuuuaagcauccccagu

SEQ ID NO: 822679 - RNA, 22 nt, Human
gaggcagugucgguggcaggau

SEQ ID NO: 822680 - RNA, 22 nt, Human
gucuuucuaugaugaacuguug

SEQ ID NO: 822681 - RNA, 23 nt, Human
uggcagcuguguaagagaaagca

SEQ ID NO: 822682 - RNA, 22 nt, Human
ucacaugaguauuauuuuccaa

SEQ ID NO: 822683 - RNA, 18 nt, Human
uggcagcuagguaaagaa

SEQ ID NO: 822684 - RNA, 22 nt, Human
ugaaaugauuauaugguguuug

SEQ ID NO: 822685 - RNA, 22 nt, Human
gcagcuaccacccaggaaggac

SEQ ID NO: 822686 - RNA, 20 nt, Human
aggaggcauagucuggaaag

SEQ ID NO: 822687 - RNA, 22 nt, Human
aggcucagaggugagcaucugc

SEQ ID NO: 822688 - RNA, 22 nt, Human
uggagaggagcaccauggccau

SEQ ID NO: 822689 - RNA, 20 nt, Human
gcccaggaauuugcauuucu

SEQ ID NO: 822690 - RNA, 17 nt, Human
acacagggagagggagc

SEQ ID NO: 822691 - RNA, 22 nt, Human
aggacagcaguuggugagguuc

SEQ ID NO: 822692 - RNA, 17 nt, Human
gucauucucagaaaaug

SEQ ID NO: 822693 - RNA, 22 nt, Human
cuucucagcauuuugucagucu

SEQ ID NO: 822694 - RNA, 22 nt, Human
uuucaaaguugggaauuguaau

SEQ ID NO: 822695 - RNA, 18 nt, Human
aggcagacacuagagguc

SEQ ID NO: 822696 - RNA, 22 nt, Human
auccagucaaaauuaguaaggu

SEQ ID NO: 822697 - RNA, 22 nt, Human
uucucagauccaucagaagucc

SEQ ID NO: 822698 - RNA, 22 nt, Human
aguggcaguagaugagcugguu

SEQ ID NO: 822699 - RNA, 22 nt, Human
ugcugcugaucauuuauagucu

SEQ ID NO: 822700 - RNA, 22 nt, Human
auaaagauuucuuuuucucuac

SEQ ID NO: 822701 - RNA, 22 nt, Human
agugcagccgagaucaggugcu

SEQ ID NO: 822702 - RNA, 22 nt, Human
ucucuucucuagugagcaacug

SEQ ID NO: 822703 - RNA, 22 nt, Human
uccauuuuguagguaugcuaca

SEQ ID NO: 822704 - RNA, 22 nt, Human
ccaggcugcagucaaggggcau

SEQ ID NO: 822705 - RNA, 22 nt, Human
ggcaggcagaggcugagacagg

SEQ ID NO: 822706 - RNA, 22 nt, Human
gagggagugccagagggccagc

SEQ ID NO: 822707 - RNA, 22 nt, Human
uauaucaccaaaaacaguucug

SEQ ID NO: 822708 - RNA, 22 nt, Human
augcuguguauuuuacucuuuc

SEQ ID NO: 822709 - RNA, 22 nt, Human
gacccaggagugcagagagugg

SEQ ID NO: 822710 - RNA, 22 nt, Human
cuguaugaggaucagacuggac

SEQ ID NO: 822711 - RNA, 20 nt, Human
aguuauaguaucuagccaug

SEQ ID NO: 822712 - RNA, 21 nt, Human
ugaggcaggggugcuuuuguc

SEQ ID NO: 822713 - RNA, 17 nt, Human
cagcucugcaucuuccu

SEQ ID NO: 822714 - RNA, 22 nt, Human
ugcauguguguguauuuauaaa

SEQ ID NO: 822715 - RNA, 22 nt, Human
ucccaggaggugcuuccuagga

SEQ ID NO: 822716 - RNA, 22 nt, Human
ucugcaggcucuagaugagguu

SEQ ID NO: 822717 - RNA, 22 nt, Human
ucauuuuucacacagggucacc

SEQ ID NO: 822718 - RNA, 22 nt, Human
cccaagagguggagguugcagu

SEQ ID NO: 822719 - RNA, 17 nt, Human
agauggcaggaggcaga

SEQ ID NO: 822720 - RNA, 22 nt, Human
cugccagucuaugcugcucggc

SEQ ID NO: 822721 - RNA, 21 nt, Human
gauugaaaccauggcagugag

SEQ ID NO: 822722 - RNA, 22 nt, Human
aggagaaggaagugcaucacua

SEQ ID NO: 822723 - RNA, 22 nt, Human
auucaaguggcugcuauguuaa

SEQ ID NO: 822724 - RNA, 22 nt, Human
uagggaugacgaaaggacagag

SEQ ID NO: 822725 - RNA, 22 nt, Human
acaggccacaguggagucucug

SEQ ID NO: 822726 - RNA, 23 nt, Human
uguugaaguaacuguuacauaga

SEQ ID NO: 822727 - RNA, 22 nt, Human
uggcagagugcagaagaggcau

SEQ ID NO: 822728 - RNA, 22 nt, Human
ugaaaugagagcacagaauaaa

SEQ ID NO: 822729 - RNA, 22 nt, Human
aggaagcuggugugaggaugaa

SEQ ID NO: 822730 - RNA, 21 nt, Human
ucauuugugaucugauuucca

SEQ ID NO: 822731 - RNA, 21 nt, Human
gcugcccaacccugcaucucc

SEQ ID NO: 822732 - RNA, 21 nt, Human
uaaggccaagucuauuucugu

SEQ ID NO: 822733 - RNA, 22 nt, Human
ucagauggguuuugaaggaugu

SEQ ID NO: 822734 - RNA, 22 nt, Human
cuugaaagcuuugcgucuucua

SEQ ID NO: 822735 - RNA, 22 nt, Human
aucaggauucaguaucuccagc

SEQ ID NO: 822736 - RNA, 22 nt, Human
ugccgcagugcggggagggccc

SEQ ID NO: 822737 - RNA, 22 nt, Human
agcagagccugggcuaggggug

SEQ ID NO: 822738 - RNA, 22 nt, Human
ugugaaggagaugaagggagug

SEQ ID NO: 822739 - RNA, 22 nt, Human
ucuuugcacugugcaagcagaa

SEQ ID NO: 822740 - RNA, 22 nt, Human
gacccaggcucgugggacggcu

SEQ ID NO: 822741 - RNA, 22 nt, Human
gaggcacugcaguacagugacu

SEQ ID NO: 822742 - RNA, 22 nt, Human
guggaauguccuugaucauaag

SEQ ID NO: 822743 - RNA, 22 nt, Human
aaaggccacuugaaggauuuuu

SEQ ID NO: 822744 - RNA, 22 nt, Human
uugcugaaaacaguggguauug

SEQ ID NO: 822745 - RNA, 22 nt, Human
caggcagcucuaauggaaagug

SEQ ID NO: 822746 - RNA, 22 nt, Human
auacuguuucucuucuacauga

SEQ ID NO: 822747 - RNA, 19 nt, Human
auacagauguauccaugau

SEQ ID NO: 822748 - RNA, 22 nt, Human
ucaauucaacacaugcacauug

SEQ ID NO: 822749 - RNA, 22 nt, Human
uucuucuccuaaggagaguccu

SEQ ID NO: 822750 - RNA, 19 nt, Human
uuucccagcccuugcugug

SEQ ID NO: 822751 - RNA, 22 nt, Human
ggagcuguuggcagcuaucuug

SEQ ID NO: 822752 - RNA, 22 nt, Human
uagcugcugcagcacagggagg

SEQ ID NO: 822753 - RNA, 22 nt, Human
ugauuuccuaggucuggagaag

SEQ ID NO: 822754 - RNA, 22 nt, Human
uuguugguggaauugaugcuag

SEQ ID NO: 822755 - RNA, 22 nt, Human
uuucaggguacauggagcaaau

SEQ ID NO: 822756 - RNA, 22 nt, Human
uucuagaugauaaaccagcagc

SEQ ID NO: 822757 - RNA, 22 nt, Human
augugaggaagaaagagguaag

SEQ ID NO: 822758 - RNA, 23 nt, Human
acagacaacacugaugagagaaa

SEQ ID NO: 822759 - RNA, 22 nt, Human
augcuguggccagaguucaacu

SEQ ID NO: 822760 - RNA, 22 nt, Human
aagaagagaacuggcauccuaa

SEQ ID NO: 822761 - RNA, 22 nt, Human
auggaguucuuuaaauucacag

SEQ ID NO: 822762 - RNA, 22 nt, Human
agaaaugaaaccaaagccuaga

SEQ ID NO: 822763 - RNA, 22 nt, Human
ggcaggcugcuugggucauguc

SEQ ID NO: 822764 - RNA, 22 nt, Human
caaauaguaugagcaaugauuc

SEQ ID NO: 822765 - RNA, 22 nt, Human
ugcacauuaguguuugagaugc

SEQ ID NO: 822766 - RNA, 22 nt, Human
ggcagcuuguccuggaggaugg

SEQ ID NO: 822767 - RNA, 22 nt, Human
gaggcagccagagguucucauu

SEQ ID NO: 822768 - RNA, 22 nt, Human
uagggaugagccaguggguagu

SEQ ID NO: 822769 - RNA, 22 nt, Human
gaggcagaaguugcagugagca

SEQ ID NO: 822770 - RNA, 22 nt, Human
ucaggagacaaagggugcggag

SEQ ID NO: 822771 - RNA, 21 nt, Human
aucauucuggaaaauucaagc

SEQ ID NO: 822772 - RNA, 22 nt, Human
uuugaagucagacacugcuuug

SEQ ID NO: 822773 - RNA, 22 nt, Human
uauuauuaaauggcagaauuuu

SEQ ID NO: 822774 - RNA, 22 nt, Human
acaauguguuuuuauacauuug

SEQ ID NO: 822775 - RNA, 22 nt, Human
uguuugaacugaauaacauagu

SEQ ID NO: 822776 - RNA, 22 nt, Human
gggauggggagcuggaaagggg

SEQ ID NO: 822777 - RNA, 22 nt, Human
cggcagcugauugcagagcacc

SEQ ID NO: 822778 - RNA, 22 nt, Human
uuuaacagguaaaguaaaugug

SEQ ID NO: 822779 - RNA, 22 nt, Human
agagagcauugaggaaaucuuc

SEQ ID NO: 822780 - RNA, 22 nt, Human
ugccuugcacauaauauacauu

SEQ ID NO: 822781 - RNA, 22 nt, Human
uuauuucauguaaaauuuaugu

SEQ ID NO: 822782 - RNA, 22 nt, Human
acaugcauaggagaagucuuua

SEQ ID NO: 822783 - RNA, 20 nt, Human
gggugggagagucugagggu

SEQ ID NO: 822784 - RNA, 22 nt, Human
aauuuccagaucagaugacuca

SEQ ID NO: 822785 - RNA, 22 nt, Human
gcucucuuuuuccagugguggu

SEQ ID NO: 822786 - RNA, 22 nt, Human
uggcagcucauuuggaaaugga

SEQ ID NO: 822787 - RNA, 22 nt, Human
aacaucuacuaagugccaggca

SEQ ID NO: 822788 - RNA, 22 nt, Human
uugagaagaggcuuuguaggaa

SEQ ID NO: 822789 - RNA, 23 nt, Human
cugcuguuuucuguaccugaagc

SEQ ID NO: 822790 - RNA, 22 nt, Human
accaggagccauagagucaggc

SEQ ID NO: 822791 - RNA, 22 nt, Human
guccaugacugugacucacaug

SEQ ID NO: 822792 - RNA, 22 nt, Human
agaggggaaggaugugauguga

SEQ ID NO: 822793 - RNA, 22 nt, Human
caggcagccaggggaccugucc

SEQ ID NO: 822794 - RNA, 22 nt, Human
uuuaaauuauaguuaaugucug

SEQ ID NO: 822795 - RNA, 22 nt, Human
gaaucucaguggaagcaggaag

SEQ ID NO: 822796 - RNA, 22 nt, Human
gggagggguugcauguuugagu

SEQ ID NO: 822797 - RNA, 22 nt, Human
aggguggcugaguagauggaag

SEQ ID NO: 822798 - RNA, 22 nt, Human
auuaaauuggacgcugggggaa

SEQ ID NO: 822799 - RNA, 22 nt, Human
gagccaaggguugccauggaga

SEQ ID NO: 822800 - RNA, 19 nt, Human
uugaaauuguuugauaugg

SEQ ID NO: 822801 - RNA, 22 nt, Human
cucccaggguagggagagacua

SEQ ID NO: 822802 - RNA, 22 nt, Human
cuucagaagaaaagcagugugu

SEQ ID NO: 822803 - RNA, 22 nt, Human
ggaggcagaauagagugugggu

SEQ ID NO: 822804 - RNA, 22 nt, Human
aaagauuauggcauugaaauac

SEQ ID NO: 822805 - RNA, 22 nt, Human
agacaaaugguaauuaugucua

SEQ ID NO: 822806 - RNA, 22 nt, Human
uuuuaucuucauuccuaucuac

SEQ ID NO: 822807 - RNA, 22 nt, Human
gaauagcuuccuuuuuuccaaa

SEQ ID NO: 822808 - RNA, 22 nt, Human
uacccaggggcugagcagaggu

SEQ ID NO: 822809 - RNA, 20 nt, Human
acuugcugggcuuuguuacc

SEQ ID NO: 822810 - RNA, 22 nt, Human
ugagggagagggcgaaaaugaa

SEQ ID NO: 822811 - RNA, 22 nt, Human
uucucagaauugacugggagca

SEQ ID NO: 822812 - RNA, 22 nt, Human
agcagacauaucucaugucaca

SEQ ID NO: 822813 - RNA, 17 nt, Human
aggccagaugaggcaag

SEQ ID NO: 822814 - RNA, 20 nt, Human
agaggccaguuaggagucua

SEQ ID NO: 822815 - RNA, 22 nt, Human
ucugguaaccuuuaucccuccu

SEQ ID NO: 822816 - RNA, 22 nt, Human
ugagagggcccagagcacacca

SEQ ID NO: 822817 - RNA, 22 nt, Human
ugaggcagguaagcaaguuuug

SEQ ID NO: 822818 - RNA, 22 nt, Human
cucaggauugugccuagggaga

SEQ ID NO: 822819 - RNA, 22 nt, Human
gcccaggagccuggagaugugu

SEQ ID NO: 822820 - RNA, 22 nt, Human
gaggcagcggcucacagagaaa

SEQ ID NO: 822821 - RNA, 22 nt, Human
uuucacagguacaaacacuccu

SEQ ID NO: 822822 - RNA, 22 nt, Human
aaucauaauuguauacauucau

SEQ ID NO: 822823 - RNA, 22 nt, Human
ucucucuuuuuaaucauguaau

SEQ ID NO: 822824 - RNA, 22 nt, Human
uguggaaaagaauaagggagau

SEQ ID NO: 822825 - RNA, 22 nt, Human
uccauuuucuaaguaucacuua

SEQ ID NO: 822826 - RNA, 22 nt, Human
uaggaggguuagagggaaauau

SEQ ID NO: 822827 - RNA, 22 nt, Human
guuuucaauuauaagauggcuu

SEQ ID NO: 822828 - RNA, 22 nt, Human
cgcagggauuucaaggggccuu

SEQ ID NO: 822829 - RNA, 22 nt, Human
gaggaggccaguggaaggaagc

SEQ ID NO: 822830 - RNA, 20 nt, Human
uuuuccagaaaguaucauug

SEQ ID NO: 822831 - RNA, 22 nt, Human
cuauuucaaggcccagauauga

SEQ ID NO: 822832 - RNA, 22 nt, Human
cagucucagaggugggaguggg

SEQ ID NO: 822833 - RNA, 22 nt, Human
uucaggaucacuaaacccucca

SEQ ID NO: 822834 - RNA, 22 nt, Human
agggaagcuuguuacugagaag

SEQ ID NO: 822835 - RNA, 22 nt, Human
cccaggagauggagguugcagu

SEQ ID NO: 822836 - RNA, 22 nt, Human
uaucaucuuguugucaugcagc

SEQ ID NO: 822837 - RNA, 22 nt, Human
uggaaauguauuugggcaugcc

SEQ ID NO: 822838 - RNA, 22 nt, Human
acccaggacuuggcaaccucau

SEQ ID NO: 822839 - RNA, 22 nt, Human
uauaucauggagauuaacauuc

SEQ ID NO: 822840 - RNA, 22 nt, Human
ugcugcuguuuccuacaucuca

SEQ ID NO: 822841 - RNA, 23 nt, Human
uuuggacuugugacucuucuccu

SEQ ID NO: 822842 - RNA, 22 nt, Human
auucaaguucuucugucuuugc

SEQ ID NO: 822843 - RNA, 22 nt, Human
cacagcuaggaggaaagcagag

SEQ ID NO: 822844 - RNA, 19 nt, Human
ugagaggcuuaaggcagcu

SEQ ID NO: 822845 - RNA, 22 nt, Human
uugguuuacuaggauucaaauu

SEQ ID NO: 822846 - RNA, 22 nt, Human
ugcuguguucuccugacucacc

SEQ ID NO: 822847 - RNA, 22 nt, Human
auucucuuuguauaacaucuug

SEQ ID NO: 822848 - RNA, 22 nt, Human
cccaugagguggagguugcagu

SEQ ID NO: 822849 - RNA, 22 nt, Human
auacuaaaguauagaacuuagu

SEQ ID NO: 822850 - RNA, 22 nt, Human
auuuguugcuagcagcacugau

SEQ ID NO: 822851 - RNA, 17 nt, Human
aagacagaagccaugag

SEQ ID NO: 822852 - RNA, 22 nt, Human
uguuuuaaagccauugccuuuc

SEQ ID NO: 822853 - RNA, 22 nt, Human
cugcugugugcuuacuuggguu

SEQ ID NO: 822854 - RNA, 22 nt, Human
uggcagcagccauggaaggccc

SEQ ID NO: 822855 - RNA, 22 nt, Human
cugccaggcacgugcagcauca

SEQ ID NO: 822856 - RNA, 22 nt, Human
caaugugguggcagaugucagu

SEQ ID NO: 822857 - RNA, 22 nt, Human
guuuuucuuugugugaagacaa

SEQ ID NO: 822858 - RNA, 22 nt, Human
uggcagucuggguuggcaguua

SEQ ID NO: 822859 - RNA, 22 nt, Human
aagagagggguugcauggaaau

SEQ ID NO: 822860 - RNA, 18 nt, Human
uaggagagaauuuauuua

SEQ ID NO: 822861 - RNA, 22 nt, Human
aggccagcagcaugacggcauc

SEQ ID NO: 822862 - RNA, 22 nt, Human
uuguaaaugaccuuuucuaauu

SEQ ID NO: 822863 - RNA, 22 nt, Human
gugucccaggccucuggaauua

SEQ ID NO: 822864 - RNA, 18 nt, Human
ucuuuggacaacuacugg

SEQ ID NO: 822865 - RNA, 22 nt, Human
aacuagucagugauucucagaa

SEQ ID NO: 822866 - RNA, 22 nt, Human
uccaggaguuugagacugcagu

SEQ ID NO: 822867 - RNA, 21 nt, Human
agcagaggggacauguuugau

SEQ ID NO: 822868 - RNA, 22 nt, Human
ugcacagugaccccuggugacu

SEQ ID NO: 822869 - RNA, 22 nt, Human
cagaggcaggaagaugggcagu

SEQ ID NO: 822870 - RNA, 22 nt, Human
ucuucacaugaccuucaugucu

SEQ ID NO: 822871 - RNA, 22 nt, Human
agaggggacagccaccugcccg

SEQ ID NO: 822872 - RNA, 22 nt, Human
augcuguggaugccuugcccca

SEQ ID NO: 822873 - RNA, 22 nt, Human
ggaggcaggaaagacagguuca

SEQ ID NO: 822874 - RNA, 23 nt, Human
ggagugcaauggcgccaucucgg

SEQ ID NO: 822875 - RNA, 22 nt, Human
uucucugaucuugcuagacuga

SEQ ID NO: 822876 - RNA, 22 nt, Human
aucacauucuuucaaagcaguc

SEQ ID NO: 822877 - RNA, 22 nt, Human
agugcuuuaccuagauaauguu

SEQ ID NO: 822878 - RNA, 22 nt, Human
cauguuuacuaccaggagaaug

SEQ ID NO: 822879 - RNA, 22 nt, Human
cugcuguguuagcagguuuagu

SEQ ID NO: 822880 - RNA, 22 nt, Human
ugcuguguggaugugaagaauc

SEQ ID NO: 822881 - RNA, 22 nt, Human
gcugggaagugcaagaucaagg

SEQ ID NO: 822882 - RNA, 22 nt, Human
aggucagcaggccaggggcgaa

SEQ ID NO: 822883 - RNA, 22 nt, Human
uggagucugugaugcucugggu

SEQ ID NO: 822884 - RNA, 22 nt, Human
gaggggagacagggaaaucagu

SEQ ID NO: 822885 - RNA, 22 nt, Human
aauacaguaauuuugaugaguu

SEQ ID NO: 822886 - RNA, 22 nt, Human
ggugaagggugucauggcauuu

SEQ ID NO: 822887 - RNA, 22 nt, Human
aagaggagacuucagcaacuug

SEQ ID NO: 822888 - RNA, 20 nt, Human
gcccaagguccagaaggggg

SEQ ID NO: 822889 - RNA, 22 nt, Human
gcccaggaguuugcauuuuaac

SEQ ID NO: 822890 - RNA, 17 nt, Human
gaggacagggaaguagg

SEQ ID NO: 822891 - RNA, 22 nt, Human
gaagcagcuuucuggugaggag

SEQ ID NO: 822892 - RNA, 22 nt, Human
uauuuccaaaagccuauuauga

SEQ ID NO: 822893 - RNA, 22 nt, Human
ggccagcagucacagggucaga

SEQ ID NO: 822894 - RNA, 22 nt, Human
ucacugucugaaagaaauggcc

SEQ ID NO: 822895 - RNA, 22 nt, Human
aggggcucaaagugugcaggga

SEQ ID NO: 822896 - RNA, 22 nt, Human
agggagcugagcugugagcagc

SEQ ID NO: 822897 - RNA, 22 nt, Human
aggcagaggagaaugaucuucc

SEQ ID NO: 822898 - RNA, 22 nt, Human
gagggaggcaucaugaauccag

SEQ ID NO: 822899 - RNA, 22 nt, Human
cccaggaaugggaaggaggaau

SEQ ID NO: 822900 - RNA, 22 nt, Human
uuuaucuuuaggacuuugcaga

SEQ ID NO: 822901 - RNA, 22 nt, Human
ggcagcuuucucacccaugacc

SEQ ID NO: 822902 - RNA, 22 nt, Human
uugcugaaaucuaugacauccu

SEQ ID NO: 822903 - RNA, 22 nt, Human
cuacccagagugaaucucuuaa

SEQ ID NO: 822904 - RNA, 22 nt, Human
gcuaugcaggagccuaaugaca

SEQ ID NO: 822905 - RNA, 22 nt, Human
aagagaggacauggugaaccug

SEQ ID NO: 822906 - RNA, 22 nt, Human
aaggcagccuuuugaguugauu

SEQ ID NO: 822907 - RNA, 22 nt, Human
aucacauugccagugauuaccc

SEQ ID NO: 822908 - RNA, 22 nt, Human
aggcagaucacuugaggccagg

SEQ ID NO: 822909 - RNA, 22 nt, Human
uucaggaugcagagguuguagu

SEQ ID NO: 822910 - RNA, 22 nt, Human
aggcagcuggcaaauucuagag

SEQ ID NO: 822911 - RNA, 19 nt, Human
augucuggguaacagcugc

SEQ ID NO: 822912 - RNA, 22 nt, Human
uucaauucaauucuaaauauau

SEQ ID NO: 822913 - RNA, 23 nt, Human
agaggcaggaguggcuugcccgg

SEQ ID NO: 822914 - RNA, 22 nt, Human
gagugcagaugaacagaagauu

SEQ ID NO: 822915 - RNA, 23 nt, Human
aggcgagcucuucuccagcacgu

SEQ ID NO: 822916 - RNA, 22 nt, Human
cucuucuugaaagaggaauuca

SEQ ID NO: 822917 - RNA, 22 nt, Human
gggcagcuggccagguauucug

SEQ ID NO: 822918 - RNA, 19 nt, Human
accaggaguaucagagcug

SEQ ID NO: 822919 - RNA, 22 nt, Human
auucauuuagguauucacuuac

SEQ ID NO: 822920 - RNA, 22 nt, Human
ugaaaugauguacaagaaggca

SEQ ID NO: 822921 - RNA, 21 nt, Human
aaugcauuaacauaaagcuga

SEQ ID NO: 822922 - RNA, 22 nt, Human
agugcuuuccuucuugugacau

SEQ ID NO: 822923 - RNA, 22 nt, Human
uucaggaugaaagugugcaaca

SEQ ID NO: 822924 - RNA, 22 nt, Human
gaaauaagaguccaugccaggu

SEQ ID NO: 822925 - RNA, 22 nt, Human
aaaggccacugcaagggaaggu

SEQ ID NO: 822926 - RNA, 22 nt, Human
uggcagcugugcuucauucuuu

SEQ ID NO: 822927 - RNA, 22 nt, Human
ugugcaggugcaggaagggggc

SEQ ID NO: 822928 - RNA, 22 nt, Human
auuccaguuggguucuaauaca

SEQ ID NO: 822929 - RNA, 22 nt, Human
uccaggagggguaggcaguaug

SEQ ID NO: 822930 - RNA, 22 nt, Human
uucuucucagggucccacaugg

SEQ ID NO: 822931 - RNA, 22 nt, Human
ggcucagagaccugcgaucuga

SEQ ID NO: 822932 - RNA, 22 nt, Human
ucaugcuuauugcauauuugga

SEQ ID NO: 822933 - RNA, 22 nt, Human
ugcuuagacgucaaguacagcc

SEQ ID NO: 822934 - RNA, 22 nt, Human
uccauuuucuugcucuagguaa

SEQ ID NO: 822935 - RNA, 22 nt, Human
uucuucucucauagauuaaggu

SEQ ID NO: 822936 - RNA, 22 nt, Human
cggagccugcuuguugcagcug

SEQ ID NO: 822937 - RNA, 22 nt, Human
uggcagcucuguucaacaugag

SEQ ID NO: 822938 - RNA, 22 nt, Human
ugcaggaacugggagggauagu

SEQ ID NO: 822939 - RNA, 22 nt, Human
uuacacaacaucuguauuauua

SEQ ID NO: 822940 - RNA, 22 nt, Human
uuucuucagagagagcuuuccc

SEQ ID NO: 822941 - RNA, 22 nt, Human
ugaggcaggaggauugcaggau

SEQ ID NO: 822942 - RNA, 23 nt, Human
gccaggaguggguagacuaaugc

SEQ ID NO: 822943 - RNA, 22 nt, Human
uuuguaaauagcaguacucaug

SEQ ID NO: 822944 - RNA, 22 nt, Human
ugaggcagugauguuuaagcac

SEQ ID NO: 822945 - RNA, 22 nt, Human
cucaggauuaaggaaucuaaau

SEQ ID NO: 822946 - RNA, 19 nt, Human
acuggcaguuucugcaugg

SEQ ID NO: 822947 - RNA, 22 nt, Human
gcagagcuucuguccuucagga

SEQ ID NO: 822948 - RNA, 23 nt, Human
ggcagcucucaucugaugacuga

SEQ ID NO: 822949 - RNA, 20 nt, Human
aggcaccugucacaggugag

SEQ ID NO: 822950 - RNA, 22 nt, Human
uugggcucaggaguuugagacc

SEQ ID NO: 822951 - RNA, 20 nt, Human
cagagccaagagcagcaucu

SEQ ID NO: 822952 - RNA, 22 nt, Human
cugcuguggugucaagcaucuc

SEQ ID NO: 822953 - RNA, 22 nt, Human
cugcccagaagccagaugggca

SEQ ID NO: 822954 - RNA, 22 nt, Human
ccucaggggucacugugaggag

SEQ ID NO: 822955 - RNA, 22 nt, Human
aucuacccacugaacacaauau

SEQ ID NO: 822956 - RNA, 22 nt, Human
caggcagcauuuacucugauga

SEQ ID NO: 822957 - RNA, 20 nt, Human
augcuuucuugugugcugcu

SEQ ID NO: 822958 - RNA, 22 nt, Human
cuuucauucuuagauauuagug

SEQ ID NO: 822959 - RNA, 22 nt, Human
cagcuuucaucagugacacuca

SEQ ID NO: 822960 - RNA, 22 nt, Human
ccaggcugagcaugauuggagc

SEQ ID NO: 822961 - RNA, 22 nt, Human
ugaacucucucaagugacagaa

SEQ ID NO: 822962 - RNA, 22 nt, Human
uucuucuuuccuauaauuaauu

SEQ ID NO: 822963 - RNA, 22 nt, Human
aggacagggauucaaacuccca

SEQ ID NO: 822964 - RNA, 23 nt, Human
cccagggacacgaugacaccucc

SEQ ID NO: 822965 - RNA, 22 nt, Human
acagugacguuuauuugagacg

SEQ ID NO: 822966 - RNA, 22 nt, Human
uucuucaaauagcagggaguca

SEQ ID NO: 822967 - RNA, 22 nt, Human
ggcaucuccaaaacaugaacuc

SEQ ID NO: 822968 - RNA, 22 nt, Human
gcagagaagaugcccaggcuuc

SEQ ID NO: 822969 - RNA, 22 nt, Human
auuugcuuucagguauaaaagg

SEQ ID NO: 822970 - RNA, 22 nt, Human
aaggagagguuguccguguugu

SEQ ID NO: 822971 - RNA, 22 nt, Human
uccaggagucuagccucaggcc

SEQ ID NO: 822972 - RNA, 22 nt, Human
ggccagaaguuggaaaagagcc

SEQ ID NO: 822973 - RNA, 20 nt, Human
ugaaggccauuuguuccaga

SEQ ID NO: 822974 - RNA, 22 nt, Human
ucuuccaagguugcacacuauc

SEQ ID NO: 822975 - RNA, 23 nt, Human
ggagaggggugugggcaucuuua

SEQ ID NO: 822976 - RNA, 22 nt, Human
agacgagggccuggcacacagu

SEQ ID NO: 822977 - RNA, 22 nt, Human
gcuccuucaggugguagcuguu

SEQ ID NO: 822978 - RNA, 22 nt, Human
guugaaagaucauguggcugcc

SEQ ID NO: 822979 - RNA, 22 nt, Human
gaggagaggccaucguuguuau

SEQ ID NO: 822980 - RNA, 22 nt, Human
cauuuguauagugcuuagacca

SEQ ID NO: 822981 - RNA, 22 nt, Human
caagauggacauaaggagagaa

SEQ ID NO: 822982 - RNA, 22 nt, Human
uuccucagaaaauacuguccaa

SEQ ID NO: 822983 - RNA, 22 nt, Human
ccugcuguucuguuuagugaac

SEQ ID NO: 822984 - RNA, 18 nt, Human
aagaggaggaaacccagg

SEQ ID NO: 822985 - RNA, 22 nt, Human
aagugggaauagaaaugaaggu

SEQ ID NO: 822986 - RNA, 22 nt, Human
cagagccauuauggagacuugc

SEQ ID NO: 822987 - RNA, 21 nt, Human
gauuuuaaagagacugccaca

SEQ ID NO: 822988 - RNA, 22 nt, Human
caagaugggcaccccagcaccu

SEQ ID NO: 822989 - RNA, 20 nt, Human
caguccaaucagaggccacc

SEQ ID NO: 822990 - RNA, 22 nt, Human
uccaggagguagugcuuaauuu

SEQ ID NO: 822991 - RNA, 22 nt, Human
aggcagugcucaagacagcagc

SEQ ID NO: 822992 - RNA, 22 nt, Human
acauuuuuuagagucccacauu

SEQ ID NO: 822993 - RNA, 21 nt, Human
ucacaucuauguuaagcaaac

SEQ ID NO: 822994 - RNA, 22 nt, Human
ggagggacccacucuagaggug

SEQ ID NO: 822995 - RNA, 22 nt, Human
ggauggcagucugcaugagaaa

SEQ ID NO: 822996 - RNA, 22 nt, Human
agaggcaguauacaauccgagc

SEQ ID NO: 822997 - RNA, 22 nt, Human
ucaauucugguccucaggaacu

SEQ ID NO: 822998 - RNA, 22 nt, Human
gucaggauuauaauccccaugg

SEQ ID NO: 822999 - RNA, 22 nt, Human
cuggcaguguccagcucgugau

SEQ ID NO: 823000 - RNA, 22 nt, Human
cggcagcuccgcgccguaggac

SEQ ID NO: 823001 - RNA, 22 nt, Human
agagggagugaaauggaauaga

SEQ ID NO: 823002 - RNA, 22 nt, Human
uacugcaugguggaguggagcu

SEQ ID NO: 823003 - RNA, 22 nt, Human
auuuccagugcacugaauagaa

SEQ ID NO: 823004 - RNA, 22 nt, Human
aagggcaggagaagacggauau

SEQ ID NO: 823005 - RNA, 22 nt, Human
cuagcaucagaugagaagcugu

SEQ ID NO: 823006 - RNA, 22 nt, Human
agggaagcccuggcugagaccc

SEQ ID NO: 823007 - RNA, 22 nt, Human
aaauacagaguugcuuaaaagc

SEQ ID NO: 823008 - RNA, 22 nt, Human
gagagggagccagccaggaacc

SEQ ID NO: 823009 - RNA, 22 nt, Human
agucucuuauucccuauugcug

SEQ ID NO: 823010 - RNA, 22 nt, Human
auucugagacaauugccgucag

SEQ ID NO: 823011 - RNA, 22 nt, Human
aagauuauuuaagacaggaacc

SEQ ID NO: 823012 - RNA, 22 nt, Human
uucaggauucugugucugacaa

SEQ ID NO: 823013 - RNA, 22 nt, Human
cagcaggaggugaguagcaggu

SEQ ID NO: 823014 - RNA, 22 nt, Human
uuucucuguucucuaacuguaa

SEQ ID NO: 823015 - RNA, 22 nt, Human
caaguaaacaauaugugauuca

SEQ ID NO: 823016 - RNA, 22 nt, Human
agggagcuucuggccucagccu

SEQ ID NO: 823017 - RNA, 22 nt, Human
aaguaaaauguuuccuuuauua

SEQ ID NO: 823018 - RNA, 20 nt, Human
ggaggguggaagaaagcaag

SEQ ID NO: 823019 - RNA, 22 nt, Human
uuauuuaaugugaucugaagag

SEQ ID NO: 823020 - RNA, 22 nt, Human
aggcagcguagcaaggcuagua

SEQ ID NO: 823021 - RNA, 22 nt, Human
uaugaacucuggagucugagug

SEQ ID NO: 823022 - RNA, 22 nt, Human
gagggagggccaggucccaacc

SEQ ID NO: 823023 - RNA, 22 nt, Human
uuugcagucaaauuugcuaaau

SEQ ID NO: 823024 - RNA, 22 nt, Human
ccacagagacaggguccuugcu

SEQ ID NO: 823025 - RNA, 22 nt, Human
aggcagcuaagauggauaauga

SEQ ID NO: 823026 - RNA, 22 nt, Human
aucauucuauuguugagcugcc

SEQ ID NO: 823027 - RNA, 20 nt, Human
uucuucucuaguuaucuuca

SEQ ID NO: 823028 - RNA, 22 nt, Human
cuguguuugaugagaagccacc

SEQ ID NO: 823029 - RNA, 22 nt, Human
cagcuggcuggucagugcacaa

SEQ ID NO: 823030 - RNA, 17 nt, Human
ccaggagagaugcuugu

SEQ ID NO: 823031 - RNA, 22 nt, Human
uaggagggcccugaaaauggca

SEQ ID NO: 823032 - RNA, 21 nt, Human
uggcaggcagcuggaagcuug

SEQ ID NO: 823033 - RNA, 22 nt, Human
cggagaggugggggcagcaucu

SEQ ID NO: 823034 - RNA, 22 nt, Human
gcugcccaggagagguggggcu

SEQ ID NO: 823035 - RNA, 22 nt, Human
caggaugaagggcaaaggcaag

SEQ ID NO: 823036 - RNA, 22 nt, Human
caggcagggagcuggaaaggau

SEQ ID NO: 823037 - RNA, 22 nt, Human
ugcuuuggaucuauuugcugag

SEQ ID NO: 823038 - RNA, 22 nt, Human
agagggcagucucagauuggga

SEQ ID NO: 823039 - RNA, 22 nt, Human
cagcuggccaaucagggcgccc

SEQ ID NO: 823040 - RNA, 22 nt, Human
auucuuaauugccaugcuguau

SEQ ID NO: 823041 - RNA, 22 nt, Human
ugccuugcgggcguuucuguug

SEQ ID NO: 823042 - RNA, 20 nt, Human
uauuuacaacuuagagccuc

SEQ ID NO: 823043 - RNA, 22 nt, Human
ucaggaugagcucauaacuaug

SEQ ID NO: 823044 - RNA, 22 nt, Human
agggcaguucaacuucauagug

SEQ ID NO: 823045 - RNA, 22 nt, Human
aagggagguaaagcuauuuaaa

SEQ ID NO: 823046 - RNA, 17 nt, Human
cccaugagcccacuccc

SEQ ID NO: 823047 - RNA, 22 nt, Human
ggcaggcugggugucauggagu

SEQ ID NO: 823048 - RNA, 22 nt, Human
gacccaggagagaggguugcau

SEQ ID NO: 823049 - RNA, 22 nt, Human
auagucuuagaucagauaaagu

SEQ ID NO: 823050 - RNA, 22 nt, Human
uuuguuaauucuuauguuagag

SEQ ID NO: 823051 - RNA, 22 nt, Human
uggcagcugaggggaggcuuug

SEQ ID NO: 823052 - RNA, 22 nt, Human
cugcaucacagcaggaggcaca

SEQ ID NO: 823053 - RNA, 22 nt, Human
cacaugaguccugccagguaug

SEQ ID NO: 823054 - RNA, 22 nt, Human
cugcuuugcauagcugccagag

SEQ ID NO: 823055 - RNA, 23 nt, Human
aaggccagaauuucaauggugcc

SEQ ID NO: 823056 - RNA, 22 nt, Human
aguccuuugggaaaaaugacua

SEQ ID NO: 823057 - RNA, 22 nt, Human
auaucaaacgaaguuauuuuaa

SEQ ID NO: 823058 - RNA, 22 nt, Human
aggguggccaugagggagagau

SEQ ID NO: 823059 - RNA, 22 nt, Human
cccaagagcuucuaggacgcug

SEQ ID NO: 823060 - RNA, 22 nt, Human
aggagagaauguuccaggcuug

SEQ ID NO: 823061 - RNA, 22 nt, Human
augggaggaugcucgggugcuc

SEQ ID NO: 823062 - RNA, 21 nt, Human
uucuucaguuuaauauaaaau

SEQ ID NO: 823063 - RNA, 15 nt, Human
caggagaggaagguu

SEQ ID NO: 823064 - RNA, 22 nt, Human
aagggaggccagagguuuugca

SEQ ID NO: 823065 - RNA, 22 nt, Human
ccugucacgaugacugcacucu

SEQ ID NO: 823066 - RNA, 22 nt, Human
accaggagagauuuuauugaga

SEQ ID NO: 823067 - RNA, 22 nt, Human
ucauucuuuaccaaguugucac

SEQ ID NO: 823068 - RNA, 22 nt, Human
agaccauggccauccuaggaaa

SEQ ID NO: 823069 - RNA, 22 nt, Human
uucacagauguauuggaacucc

SEQ ID NO: 823070 - RNA, 20 nt, Human
uguuaaaggacacuugcuuu

SEQ ID NO: 823071 - RNA, 22 nt, Human
cccaggagacugagcuguaacc

SEQ ID NO: 823072 - RNA, 18 nt, Human
cucaccauucugcccaau

SEQ ID NO: 823073 - RNA, 22 nt, Human
uugugaguagugccgcaauaaa

SEQ ID NO: 823074 - RNA, 22 nt, Human
uuguaaauaguaguaagaugcc

SEQ ID NO: 823075 - RNA, 22 nt, Human
aggcaggcacuccggaaguguc

SEQ ID NO: 823076 - RNA, 22 nt, Human
ccugcugugaagccaggccugu

SEQ ID NO: 823077 - RNA, 22 nt, Human
ucaggagacuggcagugcccac

SEQ ID NO: 823078 - RNA, 22 nt, Human
cccauugugguuguugaggaua

SEQ ID NO: 823079 - RNA, 22 nt, Human
agucucuuuaaucacagugucu

SEQ ID NO: 823080 - RNA, 22 nt, Human
aagggcagccugacucacgguc

SEQ ID NO: 823081 - RNA, 22 nt, Human
gcagcucccagcuugaaagguc

SEQ ID NO: 823082 - RNA, 22 nt, Human
cagcuucugcuaucgaacaucu

SEQ ID NO: 823083 - RNA, 22 nt, Human
uuucacaacugcuuauuugaga

SEQ ID NO: 823084 - RNA, 22 nt, Human
ccucaugguacuuacuguagcu

SEQ ID NO: 823085 - RNA, 22 nt, Human
agccuuguuggucugaguuugg

SEQ ID NO: 823086 - RNA, 22 nt, Human
aaaggccaagcaugagguggac

SEQ ID NO: 823087 - RNA, 21 nt, Human
uuucuucacuuugccccaugu

SEQ ID NO: 823088 - RNA, 19 nt, Human
uucauucucuuauuguugu

SEQ ID NO: 823089 - RNA, 22 nt, Human
ucuuugcaaaauacaacaaugg

SEQ ID NO: 823090 - RNA, 21 nt, Human
aaaggccauaaucacggagca

SEQ ID NO: 823091 - RNA, 22 nt, Human
gguggaaggccuggaaggaggc

SEQ ID NO: 823092 - RNA, 22 nt, Human
ucagucucuggggcuucuguuu

SEQ ID NO: 823093 - RNA, 20 nt, Human
ugugaaagcaguagaaugac

SEQ ID NO: 823094 - RNA, 22 nt, Human
cugcacaguuugauuucuugcu

SEQ ID NO: 823095 - RNA, 22 nt, Human
gaggccaggacaugaaagcuga

SEQ ID NO: 823096 - RNA, 22 nt, Human
ucugcugucacucauuugcuuc

SEQ ID NO: 823097 - RNA, 22 nt, Human
gaggcagcugaagcuucaaaga

SEQ ID NO: 823098 - RNA, 22 nt, Human
cugccuccugccgugcagcuuc

SEQ ID NO: 823099 - RNA, 20 nt, Human
cgugcugugaccuugagcau

SEQ ID NO: 823100 - RNA, 22 nt, Human
uuuuucagccaugaauuacacu

SEQ ID NO: 823101 - RNA, 22 nt, Human
caggaugagaggcccagggaag

SEQ ID NO: 823102 - RNA, 22 nt, Human
ugucuuuggaauauuuagcuga

SEQ ID NO: 823103 - RNA, 22 nt, Human
uuugaaagacagaauauuuuug

SEQ ID NO: 823104 - RNA, 22 nt, Human
uuuaacagaugugaaauuuuca

SEQ ID NO: 823105 - RNA, 15 nt, Human
cccaggaguucgaga

SEQ ID NO: 823106 - RNA, 22 nt, Human
caagagagaugcagcucacuca

SEQ ID NO: 823107 - RNA, 22 nt, Human
agugugagcccuggaguggugc

SEQ ID NO: 823108 - RNA, 22 nt, Human
agagacagaggcaauauagcuu

SEQ ID NO: 823109 - RNA, 22 nt, Human
gucacuguauccagguuccagc

SEQ ID NO: 823110 - RNA, 22 nt, Human
caggagaggaggcuacuucuua

SEQ ID NO: 823111 - RNA, 22 nt, Human
cucaggaaaggccaugcaaggg

SEQ ID NO: 823112 - RNA, 22 nt, Human
uuugaaagcuacuuucggguca

SEQ ID NO: 823113 - RNA, 22 nt, Human
acucuucuugcugcucauuaau

SEQ ID NO: 823114 - RNA, 22 nt, Human
aggaguggugcaggaccugcca

SEQ ID NO: 823115 - RNA, 22 nt, Human
cuucucagucaccugugagucu

SEQ ID NO: 823116 - RNA, 21 nt, Human
aggcagcuggaaggccuggcu

SEQ ID NO: 823117 - RNA, 22 nt, Human
gaggcagcaaaauauaucauaa

SEQ ID NO: 823118 - RNA, 22 nt, Human
ucccaggaugugcgugccgccg

SEQ ID NO: 823119 - RNA, 21 nt, Human
aggaggggucuuucccacuga

SEQ ID NO: 823120 - RNA, 22 nt, Human
uugcugugucugauggcugaga

SEQ ID NO: 823121 - RNA, 22 nt, Human
aauaugcauuaacuguguacau

SEQ ID NO: 823122 - RNA, 22 nt, Human
uaaaauagcaugugcagugaaa

SEQ ID NO: 823123 - RNA, 16 nt, Human
ucccaggaggcggaac

SEQ ID NO: 823124 - RNA, 22 nt, Human
ucucauugguauauacaugugu

SEQ ID NO: 823125 - RNA, 22 nt, Human
gaggagagaagcuaacggugcu

SEQ ID NO: 823126 - RNA, 22 nt, Human
uagaaauguugguauuaacauu

SEQ ID NO: 823127 - RNA, 22 nt, Human
caggaaaggugugucaugaugg

SEQ ID NO: 823128 - RNA, 22 nt, Human
acagagagaaacaaucagcagc

SEQ ID NO: 823129 - RNA, 22 nt, Human
ucugcaggaggcuggcugcagg

SEQ ID NO: 823130 - RNA, 22 nt, Human
aggcagucuaucucuggagccu

SEQ ID NO: 823131 - RNA, 22 nt, Human
acauuuaaccaaacuguuuaau

SEQ ID NO: 823132 - RNA, 22 nt, Human
auuuccuuugcaaagacugugc

SEQ ID NO: 823133 - RNA, 22 nt, Human
uuucaaacauaucuucauuacu

SEQ ID NO: 823134 - RNA, 22 nt, Human
agagggcaaguguaguccagua

SEQ ID NO: 823135 - RNA, 23 nt, Human
ucaggauauugugugccaaggug

SEQ ID NO: 823136 - RNA, 22 nt, Human
cccaggagacauauagaaggac

SEQ ID NO: 823137 - RNA, 21 nt, Human
ucaggagagcccaucuacaaa

SEQ ID NO: 823138 - RNA, 22 nt, Human
ugcuuggcuuucugagcuucug

SEQ ID NO: 823139 - RNA, 22 nt, Human
aggcaggcaaccaccugggaag

SEQ ID NO: 823140 - RNA, 22 nt, Human
ccuuaaauucuccauuugaaag

SEQ ID NO: 823141 - RNA, 22 nt, Human
aggcaguuguagagagggcucu

SEQ ID NO: 823142 - RNA, 20 nt, Human
uuucugugcccaggucuguu

SEQ ID NO: 823143 - RNA, 22 nt, Human
cuucagagugcagaagauuggg

SEQ ID NO: 823144 - RNA, 22 nt, Human
ugaggcagccugcauuaaagag

SEQ ID NO: 823145 - RNA, 22 nt, Human
agcuagaauguuccuuuucauu

SEQ ID NO: 823146 - RNA, 22 nt, Human
cuauuacauuucuggacauuca

SEQ ID NO: 823147 - RNA, 22 nt, Human
ugaggcaggagguugagaacug

SEQ ID NO: 823148 - RNA, 22 nt, Human
uugcagcuucgagucuaucugu

SEQ ID NO: 823149 - RNA, 22 nt, Human
uacaucauaauaauacuuagaa

SEQ ID NO: 823150 - RNA, 22 nt, Human
uucagaauauuuguuuuacaug

SEQ ID NO: 823151 - RNA, 22 nt, Human
gagaggugaauguggaugccac

SEQ ID NO: 823152 - RNA, 22 nt, Human
aggcaacuuuuggggaugaugg

SEQ ID NO: 823153 - RNA, 23 nt, Human
ucguugaauagcaauagcacaac

SEQ ID NO: 823154 - RNA, 22 nt, Human
uggcaucucaaacaggcagauu

SEQ ID NO: 823155 - RNA, 20 nt, Human
cugagagucugugcuuaguc

SEQ ID NO: 823156 - RNA, 22 nt, Human
uuugaaaggaaguuaauacuuu

SEQ ID NO: 823157 - RNA, 22 nt, Human
agaccaugggcucugaagagca

SEQ ID NO: 823158 - RNA, 20 nt, Human
agagcagcaguuggugaggu

SEQ ID NO: 823159 - RNA, 22 nt, Human
uauucaaaguaccuucauugcc

SEQ ID NO: 823160 - RNA, 22 nt, Human
aggagggagaugcccauccugg

SEQ ID NO: 823161 - RNA, 22 nt, Human
uuauagaaggagcauucacuua

SEQ ID NO: 823162 - RNA, 19 nt, Human
aggguggcaaaggagggug

SEQ ID NO: 823163 - RNA, 22 nt, Human
cagcaggaccauugaggcauca

SEQ ID NO: 823164 - RNA, 22 nt, Human
caggaaugaggucguaaguguc

SEQ ID NO: 823165 - RNA, 22 nt, Human
uuugaaguucccccauaucaga

SEQ ID NO: 823166 - RNA, 22 nt, Human
ucucagucuuugcaaggaugcu

SEQ ID NO: 823167 - RNA, 22 nt, Human
uuuuucaagacaaccugcaugu

SEQ ID NO: 823168 - RNA, 22 nt, Human
gcaaguuauuuccauuuaaagc

SEQ ID NO: 823169 - RNA, 22 nt, Human
gcugcugucagugguggcaguu

SEQ ID NO: 823170 - RNA, 19 nt, Human
aucugccuuagugcugcug

SEQ ID NO: 823171 - RNA, 22 nt, Human
cgaggcagggaagcugcaaaag

SEQ ID NO: 823172 - RNA, 22 nt, Human
ccaggcugccgaggaaagaaag

SEQ ID NO: 823173 - RNA, 22 nt, Human
uauuugcaacauaaaacucuga

SEQ ID NO: 823174 - RNA, 22 nt, Human
gagggcuccauuccccgugccc

SEQ ID NO: 823175 - RNA, 21 nt, Human
ggagggcagcccagacuggcu

SEQ ID NO: 823176 - RNA, 22 nt, Human
cuguguuggcuuuucucuugua

SEQ ID NO: 823177 - RNA, 22 nt, Human
caugauuuugucuuguguuaau

SEQ ID NO: 823178 - RNA, 22 nt, Human
gagugcaguuggggugagggga

SEQ ID NO: 823179 - RNA, 22 nt, Human
aaggcagccaugugcuuugggu

SEQ ID NO: 823180 - RNA, 22 nt, Human
ggccaggagcugcacagggcuc

SEQ ID NO: 823181 - RNA, 22 nt, Human
uagugcuuaacacaaagugauu

SEQ ID NO: 823182 - RNA, 22 nt, Human
gcugauguuuaguugauguuac

SEQ ID NO: 823183 - RNA, 22 nt, Human
aagaagagaaaugugcugcugg

SEQ ID NO: 823184 - RNA, 22 nt, Human
ggcagggaagcuggcaucacgg

SEQ ID NO: 823185 - RNA, 22 nt, Human
ugguuuugcuaaaauagaaaga

SEQ ID NO: 823186 - RNA, 22 nt, Human
cuugcugugugguguucucaga

SEQ ID NO: 823187 - RNA, 20 nt, Human
guggcaggcagugaaggagc

SEQ ID NO: 823188 - RNA, 22 nt, Human
ucuccucucuuaccugguacaa

SEQ ID NO: 823189 - RNA, 22 nt, Human
ccauggcaauggucagucuauu

SEQ ID NO: 823190 - RNA, 22 nt, Human
aauaucaacaguguccuucuaa

SEQ ID NO: 823191 - RNA, 17 nt, Human
caagagagaugacugga

SEQ ID NO: 823192 - RNA, 20 nt, Human
uugagcuuuuaguacagaca

SEQ ID NO: 823193 - RNA, 22 nt, Human
gggcagcucucacagcagccaa

SEQ ID NO: 823194 - RNA, 22 nt, Human
cagauccacccuuguagugaca

SEQ ID NO: 823195 - RNA, 22 nt, Human
uucagugucaauuuuuaaauau

SEQ ID NO: 823196 - RNA, 22 nt, Human
uugauuaaacaggcauauucaa

SEQ ID NO: 823197 - RNA, 22 nt, Human
aggaggcacucacucucagggu

SEQ ID NO: 823198 - RNA, 22 nt, Human
gcaagcugcucuuauguggagg

SEQ ID NO: 823199 - RNA, 22 nt, Human
ugcaggaaauuccaggguggcc

SEQ ID NO: 823200 - RNA, 22 nt, Human
auacagauguugaauguuauau

SEQ ID NO: 823201 - RNA, 22 nt, Human
cuuaagauuugagauaccuaau

SEQ ID NO: 823202 - RNA, 22 nt, Human
ugaggggaacugaugcccauug

SEQ ID NO: 823203 - RNA, 22 nt, Human
cagcugcuuuaguuuuccaucc

SEQ ID NO: 823204 - RNA, 22 nt, Human
gaggagaggcuggacgcgguga

SEQ ID NO: 823205 - RNA, 22 nt, Human
aggcacaggccucagcacccag

SEQ ID NO: 823206 - RNA, 22 nt, Human
ccacugaggcaggcaguaucua

SEQ ID NO: 823207 - RNA, 22 nt, Human
auucuucauuuacuguuacuug

SEQ ID NO: 823208 - RNA, 22 nt, Human
auucuucaguauguguggauug

SEQ ID NO: 823209 - RNA, 22 nt, Human
ccaggacaaguguggccauggc

SEQ ID NO: 823210 - RNA, 22 nt, Human
auugcuguacacuucuagaucu

SEQ ID NO: 823211 - RNA, 22 nt, Human
ggagcacuauaauagagauuuu

SEQ ID NO: 823212 - RNA, 22 nt, Human
uaaagcacauaucuuacaauaa

SEQ ID NO: 823213 - RNA, 20 nt, Human
agcuucuucugucuaauuuu

SEQ ID NO: 823214 - RNA, 22 nt, Human
aaaugauugucaaaguucuguu

SEQ ID NO: 823215 - RNA, 21 nt, Human
ccaggaaggacugagcucccu

SEQ ID NO: 823216 - RNA, 22 nt, Human
ucagucuucccuccagugcaac

SEQ ID NO: 823217 - RNA, 22 nt, Human
agucuugcucuugcaucugcuu

SEQ ID NO: 823218 - RNA, 22 nt, Human
uucuccucuguuggccuucccu

SEQ ID NO: 823219 - RNA, 22 nt, Human
ucucaggacuuugggaagcuca

SEQ ID NO: 823220 - RNA, 22 nt, Human
aguuugaauugaaaugcagaug

SEQ ID NO: 823221 - RNA, 22 nt, Human
gaaggccacggaauggagcugg

SEQ ID NO: 823222 - RNA, 22 nt, Human
ggugaagguggaacgcagagca

SEQ ID NO: 823223 - RNA, 22 nt, Human
uucaacuauuaugaauaaaauu

SEQ ID NO: 823224 - RNA, 22 nt, Human
acgagagguccuuagaaucugu

SEQ ID NO: 823225 - RNA, 18 nt, Human
ugcuggguaacuguaugg

SEQ ID NO: 823226 - RNA, 22 nt, Human
gaggcagcauucgcauagacag

SEQ ID NO: 823227 - RNA, 22 nt, Human
aagggaggggauguaagccugg

SEQ ID NO: 823228 - RNA, 22 nt, Human
uggcagcugcaggccuccugag

SEQ ID NO: 823229 - RNA, 17 nt, Human
aggcaggcagagcggga

SEQ ID NO: 823230 - RNA, 22 nt, Human
cccaggaguucgaggcuguagu

SEQ ID NO: 823231 - RNA, 22 nt, Human
ucauuucuccgaccugcugucc

SEQ ID NO: 823232 - RNA, 22 nt, Human
cuguggaaaauuuguauguaau

SEQ ID NO: 823233 - RNA, 22 nt, Human
guccucugaaguugugcaaugc

SEQ ID NO: 823234 - RNA, 17 nt, Human
ccuguguuugcuccuuc

SEQ ID NO: 823235 - RNA, 22 nt, Human
caguucuuaauaccaugugguu

SEQ ID NO: 823236 - RNA, 22 nt, Human
cucaagacugaucgcaguggaa

SEQ ID NO: 823237 - RNA, 22 nt, Human
uggcagcuccuggggccagcac

SEQ ID NO: 823238 - RNA, 22 nt, Human
ugaggggagguuggggcacauc

SEQ ID NO: 823239 - RNA, 22 nt, Human
ucauuguuauguuuugcugucu

SEQ ID NO: 823240 - RNA, 21 nt, Human
uccaggagcacgggacuagga

SEQ ID NO: 823241 - RNA, 19 nt, Human
cuugcugggugguuucugc

SEQ ID NO: 823242 - RNA, 22 nt, Human
cagaccagaaggaagccgacaa

SEQ ID NO: 823243 - RNA, 21 nt, Human
uguaaguuucaucugaauugg

SEQ ID NO: 823244 - RNA, 22 nt, Human
cucacugucuguacuagcugau

SEQ ID NO: 823245 - RNA, 22 nt, Human
ugcuagugcaggguuuucaguu

SEQ ID NO: 823246 - RNA, 19 nt, Human
aaaaacuuaguccagaaag

SEQ ID NO: 823247 - RNA, 22 nt, Human
agacucaagcagauaggaauua

SEQ ID NO: 823248 - RNA, 22 nt, Human
caggcagcaggagcccugcucg

SEQ ID NO: 823249 - RNA, 22 nt, Human
gagggugggccagauaugaggg

SEQ ID NO: 823250 - RNA, 22 nt, Human
auggagacgcaagggaccuagg

SEQ ID NO: 823251 - RNA, 22 nt, Human
accaggagggacccugguggcc

SEQ ID NO: 823252 - RNA, 22 nt, Human
aggcagcuagagagugaaacug

SEQ ID NO: 823253 - RNA, 22 nt, Human
uucauuaguucugaagaugucu

SEQ ID NO: 823254 - RNA, 22 nt, Human
ucuuagaaauuccccaguggcu

SEQ ID NO: 823255 - RNA, 22 nt, Human
cugcugugggcaggguagcugg

SEQ ID NO: 823256 - RNA, 17 nt, Human
uccaugagacaugaaga

SEQ ID NO: 823257 - RNA, 22 nt, Human
uuuuaacuuaaaauacauagau

SEQ ID NO: 823258 - RNA, 22 nt, Human
aaaaacuguaauuacuuuugca

SEQ ID NO: 823259 - RNA, 22 nt, Human
aggaagcucaaagccaugaugu

SEQ ID NO: 823260 - RNA, 22 nt, Human
aaguguagauuauggagugucu

SEQ ID NO: 823261 - RNA, 22 nt, Human
gcaggcaguuauuuaguagaau

SEQ ID NO: 823262 - RNA, 22 nt, Human
uuucaguguaucuuccaaaagc

SEQ ID NO: 823263 - RNA, 22 nt, Human
uagcccagaagagggaagcaac

SEQ ID NO: 823264 - RNA, 22 nt, Human
aacuuucuuggaugucucaaca

SEQ ID NO: 823265 - RNA, 22 nt, Human
auucauaacggcaaaugucacc

SEQ ID NO: 823266 - RNA, 22 nt, Human
gaccauuuguugaaaagauuau

SEQ ID NO: 823267 - RNA, 22 nt, Human
uuugaaaguguuuacuugggaa

SEQ ID NO: 823268 - RNA, 22 nt, Human
ucugcuguauuagguugaacug

SEQ ID NO: 823269 - RNA, 23 nt, Human
uugaaagguagcuggcagcuaga

SEQ ID NO: 823270 - RNA, 22 nt, Human
uccaggaguccuggguggcccc

SEQ ID NO: 823271 - RNA, 22 nt, Human
ucacaauuuggauacagcuaug

SEQ ID NO: 823272 - RNA, 22 nt, Human
uggcagcuaucuuuaaugagau

SEQ ID NO: 823273 - RNA, 22 nt, Human
cugcaucaguggauaugauggu

SEQ ID NO: 823274 - RNA, 22 nt, Human
uucaggauggaguaccuuuuau

SEQ ID NO: 823275 - RNA, 22 nt, Human
uccaggagguuuggaggaagca

SEQ ID NO: 823276 - RNA, 22 nt, Human
agugagggaugaagaacugcgg

SEQ ID NO: 823277 - RNA, 22 nt, Human
ucaugcuuaaaagacacuugag

SEQ ID NO: 823278 - RNA, 22 nt, Human
uauuucagcacaugggauaggu

SEQ ID NO: 823279 - RNA, 22 nt, Human
cucuucuugcuagacugagugc

SEQ ID NO: 823280 - RNA, 22 nt, Human
uccccagggcugcagagggugu

SEQ ID NO: 823281 - RNA, 22 nt, Human
cauuaaaauaucucaugguguu

SEQ ID NO: 823282 - RNA, 22 nt, Human
ccaggagaugauguuggggauu

SEQ ID NO: 823283 - RNA, 22 nt, Human
uuccuuaguugacugucuuagu

SEQ ID NO: 823284 - RNA, 22 nt, Human
ugaggcagaaauuccuguuuuc

SEQ ID NO: 823285 - RNA, 17 nt, Human
gcccaggaaggacggcc

SEQ ID NO: 823286 - RNA, 22 nt, Human
aggcaggcucaggcccaugcuu

SEQ ID NO: 823287 - RNA, 22 nt, Human
gaaucucaaggcuugugaggau

SEQ ID NO: 823288 - RNA, 22 nt, Human
gcuguguuuuauguuagguuaa

SEQ ID NO: 823289 - RNA, 22 nt, Human
gggcaguugauggaggucugga

SEQ ID NO: 823290 - RNA, 22 nt, Human
aaagccaugaauguuauagagg

SEQ ID NO: 823291 - RNA, 22 nt, Human
uuugaaagcaccauuugaguag

SEQ ID NO: 823292 - RNA, 22 nt, Human
augaaacaguguguauagcaaa

SEQ ID NO: 823293 - RNA, 22 nt, Human
gaaguacaguuuuaucuagcca

SEQ ID NO: 823294 - RNA, 22 nt, Human
uccauucauucauugaugaaca

SEQ ID NO: 823295 - RNA, 22 nt, Human
aggcaagcgcagaagcggagga

SEQ ID NO: 823296 - RNA, 22 nt, Human
uggcagcuccggguaggggcug

SEQ ID NO: 823297 - RNA, 22 nt, Human
cccaggaagaaauucugauuug

SEQ ID NO: 823298 - RNA, 22 nt, Human
cugcuaaaccucucugagagcu

SEQ ID NO: 823299 - RNA, 22 nt, Human
guuaaauucgaugauggauaaa

SEQ ID NO: 823300 - RNA, 22 nt, Human
cuuugcaauagaggcacacaug

SEQ ID NO: 823301 - RNA, 22 nt, Human
uugaaagacuucuccugugaaa

SEQ ID NO: 823302 - RNA, 22 nt, Human
ucuccuccuuuuuucaacauag

SEQ ID NO: 823303 - RNA, 22 nt, Human
cucaggauauugggcuggagca

SEQ ID NO: 823304 - RNA, 22 nt, Human
uccuucuuugacaaguggcaga

SEQ ID NO: 823305 - RNA, 22 nt, Human
aaugagacacgugaagcagaug

SEQ ID NO: 823306 - RNA, 20 nt, Human
augugagggguugaaguggg

SEQ ID NO: 823307 - RNA, 22 nt, Human
gaucauuuacuuguucuggacu

SEQ ID NO: 823308 - RNA, 22 nt, Human
agggcagcacaaggcauggacu

SEQ ID NO: 823309 - RNA, 22 nt, Human
aaaggccaauaaagacaagcug

SEQ ID NO: 823310 - RNA, 20 nt, Human
gaugggaaucggagcuggua

SEQ ID NO: 823311 - RNA, 20 nt, Human
uuucacagucccuguuuccu

SEQ ID NO: 823312 - RNA, 22 nt, Human
aacauuucagcaaauaagaaca

SEQ ID NO: 823313 - RNA, 22 nt, Human
gggaggugauuaggaccaugua

SEQ ID NO: 823314 - RNA, 22 nt, Human
uacuuuuuagcacagugugugc

SEQ ID NO: 823315 - RNA, 22 nt, Human
guucuucagaggggaaagaacc

SEQ ID NO: 823316 - RNA, 22 nt, Human
ugaacaguuucaagaaaacuuu

SEQ ID NO: 823317 - RNA, 22 nt, Human
gaauacauuggaaaucagaaua

SEQ ID NO: 823318 - RNA, 22 nt, Human
uagaaaugugauaauagcuuaa

SEQ ID NO: 823319 - RNA, 22 nt, Human
acaaaugucuccucuuuuguua

SEQ ID NO: 823320 - RNA, 22 nt, Human
uccauuuuagaagaaaauccac

SEQ ID NO: 823321 - RNA, 21 nt, Human
cccagggaagccgcagucacc

SEQ ID NO: 823322 - RNA, 22 nt, Human
uuucuaggcacagugucuuccc

SEQ ID NO: 823323 - RNA, 22 nt, Human
uccauguguuuuccuguccaca

SEQ ID NO: 823324 - RNA, 21 nt, Human
auacauucuauuaagcauuua

SEQ ID NO: 823325 - RNA, 18 nt, Human
gcagcugacacuggaguu

SEQ ID NO: 823326 - RNA, 19 nt, Human
agcuuccauauucucuagu

SEQ ID NO: 823327 - RNA, 22 nt, Human
ugccaggagucaggccaggcag

SEQ ID NO: 823328 - RNA, 22 nt, Human
uaggcagccagcaucaguuggg

SEQ ID NO: 823329 - RNA, 22 nt, Human
gugaaggacuagcauggagggc

SEQ ID NO: 823330 - RNA, 22 nt, Human
aaggcaguaaaaucuaccuugc

SEQ ID NO: 823331 - RNA, 22 nt, Human
uguuuuuaaauaaugauagaaa

SEQ ID NO: 823332 - RNA, 22 nt, Human
ugaaguuauauauguugaaaau

SEQ ID NO: 823333 - RNA, 22 nt, Human
augcugugccuucucugugcca

SEQ ID NO: 823334 - RNA, 22 nt, Human
ggguggagaggcuaaguccagu

SEQ ID NO: 823335 - RNA, 22 nt, Human
ggccagcugggccaccaggugc

SEQ ID NO: 823336 - RNA, 22 nt, Human
gagagcuguuuaucuucuucaa

SEQ ID NO: 823337 - RNA, 22 nt, Human
caugugguucaaguacuccaca

SEQ ID NO: 823338 - RNA, 20 nt, Human
cugcugugguccuuuauuuu

SEQ ID NO: 823339 - RNA, 22 nt, Human
auuuucaaaacaucugcugugu

SEQ ID NO: 823340 - RNA, 22 nt, Human
gauggacagccuggaaggaaag

SEQ ID NO: 823341 - RNA, 22 nt, Human
aagcaaaggcaggagcuuguga

SEQ ID NO: 823342 - RNA, 22 nt, Human
uagugcuuaauaaauuucagaa

SEQ ID NO: 823343 - RNA, 20 nt, Human
cucuccucacccgugucagg

SEQ ID NO: 823344 - RNA, 22 nt, Human
ugaggggauacgguacacauug

SEQ ID NO: 823345 - RNA, 22 nt, Human
caacugcugacaccaucacucc

SEQ ID NO: 823346 - RNA, 22 nt, Human
aaauuguugaucuacaguaagg

SEQ ID NO: 823347 - RNA, 22 nt, Human
cccaggagccaucugucuuggc

SEQ ID NO: 823348 - RNA, 22 nt, Human
gagacagugguugcagaagcuc

SEQ ID NO: 823349 - RNA, 22 nt, Human
uuuccucauuuaucugcuggga

SEQ ID NO: 823350 - RNA, 22 nt, Human
ucacuguugaccuggaaguggg

SEQ ID NO: 823351 - RNA, 18 nt, Human
aagaggaggagcagguug

SEQ ID NO: 823352 - RNA, 20 nt, Human
accaauguuagcuuaguacu

SEQ ID NO: 823353 - RNA, 22 nt, Human
ggcagcuaguuuaagaaagagg

SEQ ID NO: 823354 - RNA, 22 nt, Human
uaauuccaaguugagacaugca

SEQ ID NO: 823355 - RNA, 22 nt, Human
auuugcuuuaagguauaaaagg

SEQ ID NO: 823356 - RNA, 22 nt, Human
cagagagggcggcccuggcuuc

SEQ ID NO: 823357 - RNA, 22 nt, Human
ucagagaggcaauacuguuuaa

SEQ ID NO: 823358 - RNA, 22 nt, Human
accauguguuuuacacauggua

SEQ ID NO: 823359 - RNA, 22 nt, Human
cuugcaggauuuugcugcugua

SEQ ID NO: 823360 - RNA, 22 nt, Human
cuguuucaagugaagucagaca

SEQ ID NO: 823361 - RNA, 22 nt, Human
aucugccuccaaguccaugugu

SEQ ID NO: 823362 - RNA, 22 nt, Human
gauguagagggaagauuuuaaa

SEQ ID NO: 823363 - RNA, 22 nt, Human
cugcuguguggauucaauggcu

SEQ ID NO: 823364 - RNA, 22 nt, Human
aagggcaggaaaagauggaugu

SEQ ID NO: 823365 - RNA, 22 nt, Human
caacagcugaucuuugaugaag

SEQ ID NO: 823366 - RNA, 22 nt, Human
aaauaguucagcuuguaaaccc

SEQ ID NO: 823367 - RNA, 22 nt, Human
uugcuuuguuacugcaguuucc

SEQ ID NO: 823368 - RNA, 22 nt, Human
cagcugacgccagaguggaauu

SEQ ID NO: 823369 - RNA, 22 nt, Human
gaggcagcagaacauggaagag

SEQ ID NO: 823370 - RNA, 22 nt, Human
ggaagaggcugaggccaugcug

SEQ ID NO: 823371 - RNA, 22 nt, Human
uuugacaucaauacccuagaau

SEQ ID NO: 823372 - RNA, 22 nt, Human
cagaggaugaucuggccucucu

SEQ ID NO: 823373 - RNA, 22 nt, Human
agcccaggaaguugaggcuugc

SEQ ID NO: 823374 - RNA, 22 nt, Human
cucccagagaccaagcugagaa

SEQ ID NO: 823375 - RNA, 22 nt, Human
cugcuguggaugcaggaccuca

SEQ ID NO: 823376 - RNA, 23 nt, Human
ugcaugugaauucauacuuguuu

SEQ ID NO: 823377 - RNA, 22 nt, Human
uccaggaggugaggggaccaaa

SEQ ID NO: 823378 - RNA, 22 nt, Human
agcugccccaugagaggcaggu

SEQ ID NO: 823379 - RNA, 22 nt, Human
ggcagcuauuccaagcagcacu

SEQ ID NO: 823380 - RNA, 22 nt, Human
gcagcuccuccugggcuggaga

SEQ ID NO: 823381 - RNA, 22 nt, Human
uagaaacaucagcuaaccaaaa

SEQ ID NO: 823382 - RNA, 22 nt, Human
uugaaaguccuucuugaguuac

SEQ ID NO: 823383 - RNA, 22 nt, Human
auguauuucuauguagugaaga

SEQ ID NO: 823384 - RNA, 22 nt, Human
gcccaggagguugggcugugca

SEQ ID NO: 823385 - RNA, 22 nt, Human
cugcuguguaucauuuuagaug

SEQ ID NO: 823386 - RNA, 22 nt, Human
gaggccaggagugcuguaaguu

SEQ ID NO: 823387 - RNA, 20 nt, Human
caggagggacauuucagcau

SEQ ID NO: 823388 - RNA, 20 nt, Human
gccaggagggugugaugagc

SEQ ID NO: 823389 - RNA, 22 nt, Human
cuguggaauugaugcuuagugu

SEQ ID NO: 823390 - RNA, 22 nt, Human
uucaguaaaacacugcaauguc

SEQ ID NO: 823391 - RNA, 22 nt, Human
cagagggaaaaggggaguaaua

SEQ ID NO: 823392 - RNA, 22 nt, Human
aagauaaacucuugauuucuga

SEQ ID NO: 823393 - RNA, 22 nt, Human
acucagaagauauaaugacuca

SEQ ID NO: 823394 - RNA, 22 nt, Human
cugcgcagcaaucagagaggag

SEQ ID NO: 823395 - RNA, 22 nt, Human
uaggagagcugaacuauugucu

SEQ ID NO: 823396 - RNA, 22 nt, Human
uggugguuaugcgcuuuguggg

SEQ ID NO: 823397 - RNA, 22 nt, Human
agaggggagagcuaagcaauuc

SEQ ID NO: 823398 - RNA, 22 nt, Human
uaacaauaguguuugcuaguca

SEQ ID NO: 823399 - RNA, 22 nt, Human
gcucacugcaaccucugcuucc

SEQ ID NO: 823400 - RNA, 22 nt, Human
aggcaagcauugggaacagggc

SEQ ID NO: 823401 - RNA, 22 nt, Human
gcccaggauaaugcugucccug

SEQ ID NO: 823402 - RNA, 22 nt, Human
uggaaagcgaggaguuggcauu

SEQ ID NO: 823403 - RNA, 22 nt, Human
gagaggcagaggccugaaaccg

SEQ ID NO: 823404 - RNA, 23 nt, Human
ccacagagcugccaauuccugug

SEQ ID NO: 823405 - RNA, 22 nt, Human
ggcuuggaaauugcaggacaca

SEQ ID NO: 823406 - RNA, 22 nt, Human
ucauuuguucaucugcucuucu

SEQ ID NO: 823407 - RNA, 22 nt, Human
accaggagacaugaccaaugag

SEQ ID NO: 823408 - RNA, 23 nt, Human
uccuuccuuugagaggcuccauc

SEQ ID NO: 823409 - RNA, 19 nt, Human
agcagcuggagguggagug

SEQ ID NO: 823410 - RNA, 22 nt, Human
guggcaggagacuggaagaugg

SEQ ID NO: 823411 - RNA, 22 nt, Human
gcacagcucgagcucaggaggg

SEQ ID NO: 823412 - RNA, 22 nt, Human
gaaccucagugaaacuggaggu

SEQ ID NO: 823413 - RNA, 22 nt, Human
cagucucucagcuuucagcugu

SEQ ID NO: 823414 - RNA, 22 nt, Human
aaauauaauuucugccucaaua

SEQ ID NO: 823415 - RNA, 22 nt, Human
ucuuuccaaggacucuguagca

SEQ ID NO: 823416 - RNA, 22 nt, Human
aauacauauggaauuccauguu

SEQ ID NO: 823417 - RNA, 22 nt, Human
ggugaaggucagagcaggaaaa

SEQ ID NO: 823418 - RNA, 22 nt, Human
ccagcagaggggcggagugcag

SEQ ID NO: 823419 - RNA, 22 nt, Human
cuuaaauuggaugaguuaaguu

SEQ ID NO: 823420 - RNA, 22 nt, Human
ccaggagagcucuaaauggcug

SEQ ID NO: 823421 - RNA, 21 nt, Human
acagcauguuuguguguuugc

SEQ ID NO: 823422 - RNA, 19 nt, Human
gaggucagcaagaaguauu

SEQ ID NO: 823423 - RNA, 22 nt, Human
ggcaagcucaggccucaggugu

SEQ ID NO: 823424 - RNA, 22 nt, Human
uugauguacagaauuguucaca

SEQ ID NO: 823425 - RNA, 22 nt, Human
aagcagaguccccuucccaugg

SEQ ID NO: 823426 - RNA, 22 nt, Human
aggcagucuaguccccaggcaa

SEQ ID NO: 823427 - RNA, 22 nt, Human
auuucagaugaccaaauggaaa

SEQ ID NO: 823428 - RNA, 22 nt, Human
uuagcaucugcuguaagcuuau

SEQ ID NO: 823429 - RNA, 22 nt, Human
uuuggaauuggcauucuauucu

SEQ ID NO: 823430 - RNA, 22 nt, Human
ggaagaggcugagccagguccc

SEQ ID NO: 823431 - RNA, 22 nt, Human
aggcagcugaccacaguaugau

SEQ ID NO: 823432 - RNA, 19 nt, Human
gagcgcagagggcagggga

SEQ ID NO: 823433 - RNA, 22 nt, Human
cauucucaauaguagaugagua

SEQ ID NO: 823434 - RNA, 22 nt, Human
aaagacuuggcuuaugauuugc

SEQ ID NO: 823435 - RNA, 22 nt, Human
uuauuuacaacucuucucuucc

SEQ ID NO: 823436 - RNA, 22 nt, Human
aaacaugaauagauauuaaaca

SEQ ID NO: 823437 - RNA, 22 nt, Human
ugucuucagcaaaugccuuucu

SEQ ID NO: 823438 - RNA, 22 nt, Human
cagaguggcacucugcuggaug

SEQ ID NO: 823439 - RNA, 22 nt, Human
ccagacaggaacacacaucucc

SEQ ID NO: 823440 - RNA, 22 nt, Human
auucugagaaaugcauugucag

SEQ ID NO: 823441 - RNA, 21 nt, Human
gcucagaguauugcacuguuu

SEQ ID NO: 823442 - RNA, 22 nt, Human
uccaggaggcagggcugugccc

SEQ ID NO: 823443 - RNA, 22 nt, Human
cccaggagagagacuugaaucu

SEQ ID NO: 823444 - RNA, 22 nt, Human
aaugucugccagaacugaucau

SEQ ID NO: 823445 - RNA, 22 nt, Human
ggaugggagcagaggacgacca

SEQ ID NO: 823446 - RNA, 22 nt, Human
ggggcagcucccgagggcagga

SEQ ID NO: 823447 - RNA, 22 nt, Human
aaaggccacacugcucuuucuc

SEQ ID NO: 823448 - RNA, 21 nt, Human
gaacauuuggguuguuucuac

SEQ ID NO: 823449 - RNA, 22 nt, Human
gcucaggaaaacagucuaguaa

SEQ ID NO: 823450 - RNA, 22 nt, Human
aaggcagcaggauuuggugacu

SEQ ID NO: 823451 - RNA, 22 nt, Human
ggcagcuuccugagccagcagc

SEQ ID NO: 823452 - RNA, 20 nt, Human
aggaggggauagaaucaaag

SEQ ID NO: 823453 - RNA, 22 nt, Human
ucuuugcagaauuuaacuuugc

SEQ ID NO: 823454 - RNA, 22 nt, Human
gaccaaggaagaggggagccag

SEQ ID NO: 823455 - RNA, 22 nt, Human
gcccaguaguucaagguugcag

SEQ ID NO: 823456 - RNA, 22 nt, Human
uucuuuugggaauuacguaugc

SEQ ID NO: 823457 - RNA, 22 nt, Human
ucauuuaauaauuuuugaguag

SEQ ID NO: 823458 - RNA, 22 nt, Human
ugcugaugcuguucuguuagga

SEQ ID NO: 823459 - RNA, 22 nt, Human
uccaggaggacugagggggcug

SEQ ID NO: 823460 - RNA, 22 nt, Human
aaaaaucuaugacugcuucucc

SEQ ID NO: 823461 - RNA, 22 nt, Human
ugcauuuccagauuucuggagu

SEQ ID NO: 823462 - RNA, 22 nt, Human
acagauguacacucauauauaa

SEQ ID NO: 823463 - RNA, 22 nt, Human
gguggagcuggaccaggagagg

SEQ ID NO: 823464 - RNA, 22 nt, Human
uucaggauuguguuuuuccuga

SEQ ID NO: 823465 - RNA, 19 nt, Human
aauacaguguuauagaauu

SEQ ID NO: 823466 - RNA, 22 nt, Human
uagcacauacauaauagauaga

SEQ ID NO: 823467 - RNA, 22 nt, Human
uagcuaucuguguccagaucca

SEQ ID NO: 823468 - RNA, 22 nt, Human
ccagagagaaauggauuugagu

SEQ ID NO: 823469 - RNA, 22 nt, Human
ccccaggacacauggaccaagu

SEQ ID NO: 823470 - RNA, 16 nt, Human
auuuccagauuaugca

SEQ ID NO: 823471 - RNA, 23 nt, Human
cuuuuaacuugaucugagaccag

SEQ ID NO: 823472 - RNA, 22 nt, Human
ggaggggaugguuugacccugg

SEQ ID NO: 823473 - RNA, 22 nt, Human
uaggcagcuuagguuagaagug

SEQ ID NO: 823474 - RNA, 22 nt, Human
uugaacaguccuaagagacccu

SEQ ID NO: 823475 - RNA, 22 nt, Human
uagcuguguaagcuugguaaga

SEQ ID NO: 823476 - RNA, 22 nt, Human
uuauucuuuucuccagaauccc

SEQ ID NO: 823477 - RNA, 22 nt, Human
aaaauauuuuagggccaggaga

SEQ ID NO: 823478 - RNA, 22 nt, Human
aggcagaugggagcuggaaguu

SEQ ID NO: 823479 - RNA, 22 nt, Human
uuagagucaagcugcauguucu

SEQ ID NO: 823480 - RNA, 15 nt, Human
uggcagcuuguuaag

SEQ ID NO: 823481 - RNA, 22 nt, Human
aggagcagcuucugaaccaugu

SEQ ID NO: 823482 - RNA, 22 nt, Human
cuucucagcaugguuacuguga

SEQ ID NO: 823483 - RNA, 22 nt, Human
gaggagcuggcugucgggaggc

SEQ ID NO: 823484 - RNA, 22 nt, Human
uuacaguuuaguccaagccaga

SEQ ID NO: 823485 - RNA, 22 nt, Human
caguucuuuguggggaguucuc

SEQ ID NO: 823486 - RNA, 20 nt, Human
uuucaguugguuaauggcau

SEQ ID NO: 823487 - RNA, 22 nt, Human
aggaagcugccugggaugggaa

SEQ ID NO: 823488 - RNA, 22 nt, Human
gcugcuguugauuuaguccaau

SEQ ID NO: 823489 - RNA, 22 nt, Human
auuuuacuacuccaauuaauga

SEQ ID NO: 823490 - RNA, 22 nt, Human
gcccaggagaggccagggcuga

SEQ ID NO: 823491 - RNA, 22 nt, Human
caaauagugucacauugugagg

SEQ ID NO: 823492 - RNA, 22 nt, Human
aggcagcccacaggacacagga

SEQ ID NO: 823493 - RNA, 22 nt, Human
aucuuucuccauauacaucuuu

SEQ ID NO: 823494 - RNA, 22 nt, Human
aaauuauuacaagcuaguuggc

SEQ ID NO: 823495 - RNA, 22 nt, Human
ggcuuugccuggaauuuccuug

SEQ ID NO: 823496 - RNA, 22 nt, Human
aggcacagcacaccuggccccc

SEQ ID NO: 823497 - RNA, 22 nt, Human
cagcuuccgaccgggggcugca

SEQ ID NO: 823498 - RNA, 22 nt, Human
gcaggagacuggcugugguagu

SEQ ID NO: 823499 - RNA, 22 nt, Human
ucaggaugguguggaggaaaua

SEQ ID NO: 823500 - RNA, 18 nt, Human
ggcagcuugacuagcaac

SEQ ID NO: 823501 - RNA, 22 nt, Human
gaaggccacaaaaaaugucaua

SEQ ID NO: 823502 - RNA, 22 nt, Human
uuuccaagagcuuauuucugaa

SEQ ID NO: 823503 - RNA, 20 nt, Human
uuucaagucagcaauucuca

SEQ ID NO: 823504 - RNA, 22 nt, Human
ugcccacauggugccauggcca

SEQ ID NO: 823505 - RNA, 22 nt, Human
gagcagcuccagccgcaugacu

SEQ ID NO: 823506 - RNA, 22 nt, Human
ucuucaucucagauuaacagga

SEQ ID NO: 823507 - RNA, 22 nt, Human
acugcuuuaucugagaaguccu

SEQ ID NO: 823508 - RNA, 22 nt, Human
aucuccaggcauuucaagagac

SEQ ID NO: 823509 - RNA, 22 nt, Human
uuccaugagcucugaguucaca

SEQ ID NO: 823510 - RNA, 22 nt, Human
auuaucuauguagaaugauuuu

SEQ ID NO: 823511 - RNA, 22 nt, Human
agaaaugacacacaugagacau

SEQ ID NO: 823512 - RNA, 22 nt, Human
uaggagaggugaauggcacacu

SEQ ID NO: 823513 - RNA, 22 nt, Human
ucaggagacuuaugucacagug

SEQ ID NO: 823514 - RNA, 22 nt, Human
auugcuaggaacagguugcacc

SEQ ID NO: 823515 - RNA, 22 nt, Human
ucuuuguaacugucuauugaga

SEQ ID NO: 823516 - RNA, 22 nt, Human
aacugcuguggccuaguacuua

SEQ ID NO: 823517 - RNA, 22 nt, Human
accaggaguuuugaccaggggc

SEQ ID NO: 823518 - RNA, 22 nt, Human
caaauauuccagguacaucccu

SEQ ID NO: 823519 - RNA, 22 nt, Human
uagcccagcaugagcagagcug

SEQ ID NO: 823520 - RNA, 22 nt, Human
cauaauaucuccgauuacuugc

SEQ ID NO: 823521 - RNA, 22 nt, Human
ucuucacaggagccugccugcc

SEQ ID NO: 823522 - RNA, 22 nt, Human
gcugcccauuccacuggauggu

SEQ ID NO: 823523 - RNA, 19 nt, Human
ucaucucacagggccuggc

SEQ ID NO: 823524 - RNA, 22 nt, Human
uugcucaggcuggugugcagug

SEQ ID NO: 823525 - RNA, 22 nt, Human
uucugugauugacauguggcuu

SEQ ID NO: 823526 - RNA, 22 nt, Human
gucaggaucaaauugaaguuau

SEQ ID NO: 823527 - RNA, 22 nt, Human
ccaggagacccagggaaggagc

SEQ ID NO: 823528 - RNA, 22 nt, Human
ucacacagguuugcaaugauuu

SEQ ID NO: 823529 - RNA, 22 nt, Human
uggaggaaguugcuggaaguca

SEQ ID NO: 823530 - RNA, 22 nt, Human
cccaggaagaggggucaggugu

SEQ ID NO: 823531 - RNA, 22 nt, Human
acucagaaugacugaugcugug

SEQ ID NO: 823532 - RNA, 22 nt, Human
cagaccagcucuaugaacccaa

SEQ ID NO: 823533 - RNA, 22 nt, Human
acaugcauacacguacauaccu

SEQ ID NO: 823534 - RNA, 18 nt, Human
cugcuugggagacgucag

SEQ ID NO: 823535 - RNA, 19 nt, Human
ugugaaagcuaguguucuu

SEQ ID NO: 823536 - RNA, 22 nt, Human
acacauauauacauauuugugc

SEQ ID NO: 823537 - RNA, 22 nt, Human
gcccaggaguugaagggcugac

SEQ ID NO: 823538 - RNA, 22 nt, Human
guuaucaugcuucaucaucacu

SEQ ID NO: 823539 - RNA, 22 nt, Human
uagggcagaguccaggaugggc

SEQ ID NO: 823540 - RNA, 22 nt, Human
gcuuccuaaaugcacagggcag

SEQ ID NO: 823541 - RNA, 22 nt, Human
ccagaccacccuggccaugcac

SEQ ID NO: 823542 - RNA, 22 nt, Human
uuuccuaggagauugaucacau

SEQ ID NO: 823543 - RNA, 22 nt, Human
cuuaacauccugcauuuuucuu

SEQ ID NO: 823544 - RNA, 22 nt, Human
gaggccaggggccuggagauga

SEQ ID NO: 823545 - RNA, 19 nt, Human
aggcaggugcagagguccc

SEQ ID NO: 823546 - RNA, 22 nt, Human
cugcuguggccagccaggucaa

SEQ ID NO: 823547 - RNA, 22 nt, Human
uucugggagagaaagggccuug

SEQ ID NO: 823548 - RNA, 22 nt, Human
uucuucuccgaggagggcuggu

SEQ ID NO: 823549 - RNA, 22 nt, Human
gaugccuccaaaugagggcaga

SEQ ID NO: 823550 - RNA, 22 nt, Human
cccaggagagggaaccaaaugu

SEQ ID NO: 823551 - RNA, 23 nt, Human
cagggaggagauacuguguaucu

SEQ ID NO: 823552 - RNA, 22 nt, Human
ucaguagcagaaagcaaugagu

SEQ ID NO: 823553 - RNA, 23 nt, Human
cccaggagccugaguccucucug

SEQ ID NO: 823554 - RNA, 22 nt, Human
gguuugaacagcuuuggagaag

SEQ ID NO: 823555 - RNA, 22 nt, Human
cagacaggguccuguccgucac

SEQ ID NO: 823556 - RNA, 22 nt, Human
caagaugugccuaaucagaccu

SEQ ID NO: 823557 - RNA, 22 nt, Human
aggguggcaccuggaagggaug

SEQ ID NO: 823558 - RNA, 22 nt, Human
ugcauggaggaagaugaaugca

SEQ ID NO: 823559 - RNA, 22 nt, Human
ucuuuguaaaugccuagcauaa

SEQ ID NO: 823560 - RNA, 22 nt, Human
ucaggauguccaaaauccagcc

SEQ ID NO: 823561 - RNA, 22 nt, Human
auccaugauuaguaggauaaag

SEQ ID NO: 823562 - RNA, 22 nt, Human
gcagcuucaguaggugaagaca

SEQ ID NO: 823563 - RNA, 22 nt, Human
acaguacauaauccugagucug

SEQ ID NO: 823564 - RNA, 22 nt, Human
gcgcaggagccgcggagggccg

SEQ ID NO: 823565 - RNA, 22 nt, Human
cauucuuacacaauauuuuaau

SEQ ID NO: 823566 - RNA, 22 nt, Human
uagcacaucuggcgcuuauagg

SEQ ID NO: 823567 - RNA, 22 nt, Human
cagugguuauacuuacuguuuc

SEQ ID NO: 823568 - RNA, 22 nt, Human
uacccaggaggaaacugaggcu

SEQ ID NO: 823569 - RNA, 22 nt, Human
aaacugcugguugcuggccagc

SEQ ID NO: 823570 - RNA, 21 nt, Human
agucuguuaggaugacucuga

SEQ ID NO: 823571 - RNA, 22 nt, Human
guugaaagcuuuucauuuaguu

SEQ ID NO: 823572 - RNA, 22 nt, Human
auucuucaccauggauaauuug

SEQ ID NO: 823573 - RNA, 22 nt, Human
agcugccgaugcccagcugcau

SEQ ID NO: 823574 - RNA, 22 nt, Human
augcuguguccuagugaaagaa

SEQ ID NO: 823575 - RNA, 22 nt, Human
auuuucaucauggguuuaacau

SEQ ID NO: 823576 - RNA, 22 nt, Human
uucucuuugacauuauucaggu

SEQ ID NO: 823577 - RNA, 22 nt, Human
aaggagaaaugguagaugugca

SEQ ID NO: 823578 - RNA, 22 nt, Human
agaggacagguuuuccaugggc

SEQ ID NO: 823579 - RNA, 21 nt, Human
agcagaggcagaauguaugca

SEQ ID NO: 823580 - RNA, 19 nt, Human
ggcagcuugggaagguagc

SEQ ID NO: 823581 - RNA, 22 nt, Human
gcugcccacaaugauuacaugg

SEQ ID NO: 823582 - RNA, 22 nt, Human
gagaggggcgcgcagcucgcga

SEQ ID NO: 823583 - RNA, 22 nt, Human
ucccaggaagaucccagggacc

SEQ ID NO: 823584 - RNA, 22 nt, Human
uagugcuuggcccuaccagaua

SEQ ID NO: 823585 - RNA, 22 nt, Human
auucugaguccaugggggcagg

SEQ ID NO: 823586 - RNA, 22 nt, Human
ugguaauuaauuugauagguuc

SEQ ID NO: 823587 - RNA, 22 nt, Human
gagcagcugagcuggaaugaga

SEQ ID NO: 823588 - RNA, 22 nt, Human
aaguggacuaauacaaggacua

SEQ ID NO: 823589 - RNA, 22 nt, Human
uucuucaugcuguugcugcuug

SEQ ID NO: 823590 - RNA, 17 nt, Human
gccaggagguuugagcu

SEQ ID NO: 823591 - RNA, 22 nt, Human
agccagcucccuccccugcagg

SEQ ID NO: 823592 - RNA, 22 nt, Human
guuuauaaggcccaauauuucu

SEQ ID NO: 823593 - RNA, 22 nt, Human
cucacugugccuuuucccaaac

SEQ ID NO: 823594 - RNA, 22 nt, Human
ucucaggagccacagcgggagu

SEQ ID NO: 823595 - RNA, 22 nt, Human
auugaaagcacaaagaacaagu

SEQ ID NO: 823596 - RNA, 22 nt, Human
ugcuggguagaaguauuagucu

SEQ ID NO: 823597 - RNA, 22 nt, Human
agucugucuacuuaaagucugu

SEQ ID NO: 823598 - RNA, 22 nt, Human
auuuuacuuugugaauauugac

SEQ ID NO: 823599 - RNA, 22 nt, Human
gucacuguuuccuauuauauuu

SEQ ID NO: 823600 - RNA, 22 nt, Human
aggcagcuggacauaacuaacc

SEQ ID NO: 823601 - RNA, 22 nt, Human
uucuuuucuuuaggcauugugu

SEQ ID NO: 823602 - RNA, 22 nt, Human
aggagggaccuaggaauauugc

SEQ ID NO: 823603 - RNA, 22 nt, Human
agugcuuucccugaaaccuucc

SEQ ID NO: 823604 - RNA, 22 nt, Human
gugcuuuuaaaggcaauuagua

SEQ ID NO: 823605 - RNA, 22 nt, Human
uagcacaucuucuuggccugca

SEQ ID NO: 823606 - RNA, 22 nt, Human
uugugguuaaccgcacauuuuu

SEQ ID NO: 823607 - RNA, 22 nt, Human
ucaggagauguaaccuuagcug

SEQ ID NO: 823608 - RNA, 22 nt, Human
cucucuguuaugcuuucaugaa

SEQ ID NO: 823609 - RNA, 23 nt, Human
ugaaggccuggaggacgcguugu

SEQ ID NO: 823610 - RNA, 22 nt, Human
uggcaguccccugugccuggaa

SEQ ID NO: 823611 - RNA, 22 nt, Human
caggcagcucugcuuuuccuaa

SEQ ID NO: 823612 - RNA, 22 nt, Human
uuuacauuucccucugucaguu

SEQ ID NO: 823613 - RNA, 22 nt, Human
cuuugcaaacgauuaccacaug

SEQ ID NO: 823614 - RNA, 22 nt, Human
guguuuuaagaaagaagcucag

SEQ ID NO: 823615 - RNA, 22 nt, Human
gccaggagagcuccuucagguu

SEQ ID NO: 823616 - RNA, 22 nt, Human
agaggcaggagguugacuugag

SEQ ID NO: 823617 - RNA, 22 nt, Human
cucccagagagcaggugggccg

SEQ ID NO: 823618 - RNA, 22 nt, Human
cuugauguauaaguugauaugu

SEQ ID NO: 823619 - RNA, 22 nt, Human
aaaaugaugcuguaauuuggca

SEQ ID NO: 823620 - RNA, 21 nt, Human
cuguggaagggaacuagaggg

SEQ ID NO: 823621 - RNA, 22 nt, Human
uccaggagugcugguuagagua

SEQ ID NO: 823622 - RNA, 22 nt, Human
uacuaucucuucuaacuucaga

SEQ ID NO: 823623 - RNA, 22 nt, Human
ccagaggaggggggucuuucug

SEQ ID NO: 823624 - RNA, 22 nt, Human
uuucagggagccuagaagagcu

SEQ ID NO: 823625 - RNA, 22 nt, Human
uggaaugacagagagucugaau

SEQ ID NO: 823626 - RNA, 22 nt, Human
uuagccaugugggaaaaacagc

SEQ ID NO: 823627 - RNA, 22 nt, Human
gucaggauguuuauucuccagu

SEQ ID NO: 823628 - RNA, 22 nt, Human
uucuucaguuugguaaauguaa

SEQ ID NO: 823629 - RNA, 19 nt, Human
ucccaggaaccuuuuauuu

SEQ ID NO: 823630 - RNA, 22 nt, Human
cugguacaaaaugcugauauca

SEQ ID NO: 823631 - RNA, 22 nt, Human
auugaaaguccuaucuaaggga

SEQ ID NO: 823632 - RNA, 22 nt, Human
uucucuuuucaccaguugcuaa

SEQ ID NO: 823633 - RNA, 22 nt, Human
ucaggagagaaagaauacaauu

SEQ ID NO: 823634 - RNA, 22 nt, Human
agcccaggucucaaaguacagg

SEQ ID NO: 823635 - RNA, 22 nt, Human
auagcuguuagauuggggucga

SEQ ID NO: 823636 - RNA, 22 nt, Human
ccccaggaagccucagauuugc

SEQ ID NO: 823637 - RNA, 20 nt, Human
agcugccccugggcacugcc

SEQ ID NO: 823638 - RNA, 22 nt, Human
cagcuagcuaagaaggccagag

SEQ ID NO: 823639 - RNA, 22 nt, Human
gauguguuuccaggauuuguuu

SEQ ID NO: 823640 - RNA, 22 nt, Human
aggguccugggugcaguugcuu

SEQ ID NO: 823641 - RNA, 17 nt, Human
ggcagcugugugcaugc

SEQ ID NO: 823642 - RNA, 22 nt, Human
gaggggcagagguagagaacaa

SEQ ID NO: 823643 - RNA, 22 nt, Human
gauuucuugauaauucaaaucc

SEQ ID NO: 823644 - RNA, 22 nt, Human
uuagaaagcuuuccauagucaa

SEQ ID NO: 823645 - RNA, 20 nt, Human
accaggagauggaggcaggg

SEQ ID NO: 823646 - RNA, 22 nt, Human
uaucuguuggcuccuaguugua

SEQ ID NO: 823647 - RNA, 22 nt, Human
aaguuugcauagauuaagcauu

SEQ ID NO: 823648 - RNA, 20 nt, Human
ccacaggaguccagucgacc

SEQ ID NO: 823649 - RNA, 22 nt, Human
aggcagcuuucuguaggggugu

SEQ ID NO: 823650 - RNA, 22 nt, Human
augcuuccaaggcuaagacaag

SEQ ID NO: 823651 - RNA, 22 nt, Human
gaggguggguuucuugcacguc

SEQ ID NO: 823652 - RNA, 22 nt, Human
agcccaggaaucugcaucuuga

SEQ ID NO: 823653 - RNA, 22 nt, Human
guccucuggaagaugaguucuu

SEQ ID NO: 823654 - RNA, 22 nt, Human
guucuucaucuuaaccaucugu

SEQ ID NO: 823655 - RNA, 22 nt, Human
uuuguuaaauauuuauugagug

SEQ ID NO: 823656 - RNA, 22 nt, Human
cagagggcucuuggcugccugc

SEQ ID NO: 823657 - RNA, 22 nt, Human
cuggccagaguuggagggugug

SEQ ID NO: 823658 - RNA, 22 nt, Human
aucacugucgucaucugagauu

SEQ ID NO: 823659 - RNA, 22 nt, Human
uuccucagcuggccugauuggg

SEQ ID NO: 823660 - RNA, 23 nt, Human
uggagcugacagucagagggagg

SEQ ID NO: 823661 - RNA, 22 nt, Human
aguguguccagaaaucuguauu

SEQ ID NO: 823662 - RNA, 22 nt, Human
uucucagagcucacuguaguaa

SEQ ID NO: 823663 - RNA, 22 nt, Human
cuucuucaguugcauguauugg

SEQ ID NO: 823664 - RNA, 22 nt, Human
ucaucuugcugccauugcuuua

SEQ ID NO: 823665 - RNA, 22 nt, Human
agacaaauggaguaugagcaac

SEQ ID NO: 823666 - RNA, 22 nt, Human
ggagauggaauagauucugacu

SEQ ID NO: 823667 - RNA, 22 nt, Human
uuugacauuggcuuauucuguu

SEQ ID NO: 823668 - RNA, 22 nt, Human
agucauaugacccuucacaaac

SEQ ID NO: 823669 - RNA, 22 nt, Human
gaccauuucuaggaaucagacu

SEQ ID NO: 823670 - RNA, 22 nt, Human
guaggcagguggaggagugaag

SEQ ID NO: 823671 - RNA, 19 nt, Human
uauggcaggccgaggcacu

SEQ ID NO: 823672 - RNA, 22 nt, Human
uucuucuucuggcugcaccugg

SEQ ID NO: 823673 - RNA, 22 nt, Human
cugcuguggguuaagacacugu

SEQ ID NO: 823674 - RNA, 22 nt, Human
cugcugucauagccaucccucc

SEQ ID NO: 823675 - RNA, 22 nt, Human
uauuuucuggacagucuugcuu

SEQ ID NO: 823676 - RNA, 22 nt, Human
gugguuuucuccaacccagaac

SEQ ID NO: 823677 - RNA, 22 nt, Human
uucagggagagcgggacgggug

SEQ ID NO: 823678 - RNA, 22 nt, Human
cagaggcaaaagagguggaggu

SEQ ID NO: 823679 - RNA, 22 nt, Human
agaccaagaaaggaugaggauc

SEQ ID NO: 823680 - RNA, 22 nt, Human
gagugcaggccugagcaccauc

SEQ ID NO: 823681 - RNA, 23 nt, Human
aaauuauugcucuucaauugccu

SEQ ID NO: 823682 - RNA, 22 nt, Human
uccaggagaccagauguaggcc

SEQ ID NO: 823683 - RNA, 22 nt, Human
gucuucuuuaaccuacuaaagc

SEQ ID NO: 823684 - RNA, 22 nt, Human
uucccucuccuacucaggaaag

SEQ ID NO: 823685 - RNA, 22 nt, Human
uuuguuuagaugguaaaucagu

SEQ ID NO: 823686 - RNA, 22 nt, Human
cuucuucauaggcaguccuguu

SEQ ID NO: 823687 - RNA, 22 nt, Human
uuugcaaagaaauuauugcugu

SEQ ID NO: 823688 - RNA, 22 nt, Human
auacauauaugguacuuccugg

SEQ ID NO: 823689 - RNA, 18 nt, Human
agggagagaccgcggguc

SEQ ID NO: 823690 - RNA, 22 nt, Human
uuaaaauagccagugccccucu

SEQ ID NO: 823691 - RNA, 22 nt, Human
ggagguggcagagggacauucu

SEQ ID NO: 823692 - RNA, 22 nt, Human
uguuuuaagagcgcacuuuaua

SEQ ID NO: 823693 - RNA, 22 nt, Human
ucaggaggccaccaggaccugu

SEQ ID NO: 823694 - RNA, 22 nt, Human
acauacauauguuuaaaugcau

SEQ ID NO: 823695 - RNA, 22 nt, Human
gagcagcucgagaaggaagcag

SEQ ID NO: 823696 - RNA, 22 nt, Human
gaccauuuuuacagagcauuca

SEQ ID NO: 823697 - RNA, 23 nt, Human
gcagaggagcaagcuggacacca

SEQ ID NO: 823698 - RNA, 22 nt, Human
uuugcaguagacaucuuauuuu

SEQ ID NO: 823699 - RNA, 22 nt, Human
aaaggccacacagagcagggag

SEQ ID NO: 823700 - RNA, 22 nt, Human
cugcugugauugggagaaaccg

SEQ ID NO: 823701 - RNA, 22 nt, Human
auugaaagauauacuguucuca

SEQ ID NO: 823702 - RNA, 22 nt, Human
uuucacauuagauaugucauuu

SEQ ID NO: 823703 - RNA, 22 nt, Human
cucaggauguacuacagaaggc

SEQ ID NO: 823704 - RNA, 22 nt, Human
aagacugucuuuucugagugac

SEQ ID NO: 823705 - RNA, 22 nt, Human
uugcagcuucuaccacuguuuc

SEQ ID NO: 823706 - RNA, 22 nt, Human
gcugcccagacauugaaucagg

SEQ ID NO: 823707 - RNA, 22 nt, Human
aggcagcucuguggccucccag

SEQ ID NO: 823708 - RNA, 22 nt, Human
ugcuuugggucucucuaguuuc

SEQ ID NO: 823709 - RNA, 22 nt, Human
ggagaggagauuguggcauuuu

SEQ ID NO: 823710 - RNA, 22 nt, Human
auggaguugagcucuguugucc

SEQ ID NO: 823711 - RNA, 22 nt, Human
ucaugucccguugcuggcugcc

SEQ ID NO: 823712 - RNA, 23 nt, Human
ugucuggauucgacugugguugg

SEQ ID NO: 823713 - RNA, 22 nt, Human
aauguuaaguuuagauuauaac

SEQ ID NO: 823714 - RNA, 22 nt, Human
auguccagaguaaagcacauuc

SEQ ID NO: 823715 - RNA, 22 nt, Human
uugagcugccuggcuguggcuc

SEQ ID NO: 823716 - RNA, 22 nt, Human
ucugagugggaacucucaugac

SEQ ID NO: 823717 - RNA, 22 nt, Human
ggcagcugaagaggaacuuugg

SEQ ID NO: 823718 - RNA, 22 nt, Human
ucuuauugguaaugauggcauu

SEQ ID NO: 823719 - RNA, 22 nt, Human
augcaguuagguaauagucuca

SEQ ID NO: 823720 - RNA, 22 nt, Human
aaauacaguggcagcagauaau

SEQ ID NO: 823721 - RNA, 22 nt, Human
guggcagcggcccaggccgucu

SEQ ID NO: 823722 - RNA, 22 nt, Human
uuguugcugcucaaccucuaua

SEQ ID NO: 823723 - RNA, 22 nt, Human
ccuuuguucacuggagagugga

SEQ ID NO: 823724 - RNA, 20 nt, Human
uaugauaauuacaaaauagu

SEQ ID NO: 823725 - RNA, 22 nt, Human
uugagcagaucgggcugugggg

SEQ ID NO: 823726 - RNA, 22 nt, Human
caguaaauguccucgcagggaa

SEQ ID NO: 823727 - RNA, 22 nt, Human
ggucuggagcuaaucuuguugg

SEQ ID NO: 823728 - RNA, 22 nt, Human
gucauuuuugacuuugaaguga

SEQ ID NO: 823729 - RNA, 22 nt, Human
uaaaacuagugguugggacuaa

SEQ ID NO: 823730 - RNA, 22 nt, Human
ugaggucuguccugucuuugga

SEQ ID NO: 823731 - RNA, 23 nt, Human
aaacuacauuuauaguuuuucuc

SEQ ID NO: 823732 - RNA, 22 nt, Human
cucuauucuaauggauucuggg

SEQ ID NO: 823733 - RNA, 22 nt, Human
aaugauguuuuuaaagaacaua

SEQ ID NO: 823734 - RNA, 22 nt, Human
ggcuguggucauuaggagguug

SEQ ID NO: 823735 - RNA, 21 nt, Human
aucuuaaaaggucuuaacuuu

SEQ ID NO: 823736 - RNA, 22 nt, Human
agugugaguuacaaagugugaa

SEQ ID NO: 823737 - RNA, 22 nt, Human
uuaguuuccuguggugugaagu

SEQ ID NO: 823738 - RNA, 22 nt, Human
uguccagcugaaggcagccuca

SEQ ID NO: 823739 - RNA, 22 nt, Human
caucaguuccugccccugcccc

SEQ ID NO: 823740 - RNA, 22 nt, Human
aguggcaguagaugagcugguu

SEQ ID NO: 823741 - RNA, 22 nt, Human
guugcagcaucacugcugagug

SEQ ID NO: 823742 - RNA, 22 nt, Human
augagugcuuagagaguaaucc

SEQ ID NO: 823743 - RNA, 22 nt, Human
gguguuguacauucuguggauu

SEQ ID NO: 823744 - RNA, 22 nt, Human
uuuuccuucugauacuccauuu

SEQ ID NO: 823745 - RNA, 22 nt, Human
ugcugugagaccauuuguugag

SEQ ID NO: 823746 - RNA, 22 nt, Human
aggcuuaacuacaauuuuugcc

SEQ ID NO: 823747 - RNA, 22 nt, Human
uaaauacuuuuacuccacugau

SEQ ID NO: 823748 - RNA, 22 nt, Human
ucuuauugugaugaugaagaac

SEQ ID NO: 823749 - RNA, 22 nt, Human
guucuuaaagauucaucaagca

SEQ ID NO: 823750 - RNA, 22 nt, Human
ugugacguuguucuggauuccc

SEQ ID NO: 823751 - RNA, 22 nt, Human
ugcauguuucuguauguuaaug

SEQ ID NO: 823752 - RNA, 23 nt, Human
uacagccaugucgcugauuuaac

SEQ ID NO: 823753 - RNA, 22 nt, Human
ucugaaauuuuaguuauagaaa

SEQ ID NO: 823754 - RNA, 22 nt, Human
uggaucuugaugcuccaagagu

SEQ ID NO: 823755 - RNA, 22 nt, Human
auuguugacuugauuacucaac

SEQ ID NO: 823756 - RNA, 21 nt, Human
aguuagcagauuucugucucc

SEQ ID NO: 823757 - RNA, 22 nt, Human
cagucauuaugggaguuaaucc

SEQ ID NO: 823758 - RNA, 22 nt, Human
acucuguuugcagguagcucag

SEQ ID NO: 823759 - RNA, 22 nt, Human
agagaauuaacauuccauggcu

SEQ ID NO: 823760 - RNA, 22 nt, Human
aaugaaacuaguagaaucuuug

SEQ ID NO: 823761 - RNA, 22 nt, Human
uuucuuggucuucccgaccugg

SEQ ID NO: 823762 - RNA, 22 nt, Human
ccugugguuuacucuguggcua

SEQ ID NO: 823763 - RNA, 22 nt, Human
ugugagauuuuauuugauaugc

SEQ ID NO: 823764 - RNA, 22 nt, Human
ucuuagaaacuguaucgauuag

SEQ ID NO: 823765 - RNA, 22 nt, Human
ucaugcagauaagaauaaguaa

SEQ ID NO: 823766 - RNA, 22 nt, Human
ggagucugugucuugaagcagu

SEQ ID NO: 823767 - RNA, 22 nt, Human
ugcaugguguaauucuaaugcu

SEQ ID NO: 823768 - RNA, 22 nt, Human
auuguacucuagccucugggca

SEQ ID NO: 823769 - RNA, 22 nt, Human
aucugguuuggggauccuugug

SEQ ID NO: 823770 - RNA, 22 nt, Human
uuggaaguucuuagccuuuuca

SEQ ID NO: 823771 - RNA, 22 nt, Human
uuggauggagguucaagcacua

SEQ ID NO: 823772 - RNA, 22 nt, Human
aagucauugguagcuugauagg

SEQ ID NO: 823773 - RNA, 22 nt, Human
ucucugagaucagccacugacu

SEQ ID NO: 823774 - RNA, 22 nt, Human
guuguuuuugaacggugguggc

SEQ ID NO: 823775 - RNA, 22 nt, Human
aaugaguuuguucuauuauuug

SEQ ID NO: 823776 - RNA, 22 nt, Human
aacacuaaaggucaguuagaag

SEQ ID NO: 823777 - RNA, 17 nt, Human
aguuggcagccguugcu

SEQ ID NO: 823778 - RNA, 22 nt, Human
cugggacacguugugcuuuaac

SEQ ID NO: 823779 - RNA, 22 nt, Human
uagugucucuuccuguuugaaa

SEQ ID NO: 823780 - RNA, 22 nt, Human
agaaucugcauuuuaacaagau

SEQ ID NO: 823781 - RNA, 22 nt, Human
acauucuacaguuaaccauuag

SEQ ID NO: 823782 - RNA, 17 nt, Human
cauucuguaaucuuucu

SEQ ID NO: 823783 - RNA, 22 nt, Human
gaaguucugguguaugugauaa

SEQ ID NO: 823784 - RNA, 19 nt, Human
ggaggcuucuuggggucgg

SEQ ID NO: 823785 - RNA, 22 nt, Human
cucugaguagauagggaaccug

SEQ ID NO: 823786 - RNA, 23 nt, Human
agugaugucacccacagacaagg

SEQ ID NO: 823787 - RNA, 22 nt, Human
aucauugaguaaaaugaauaca

SEQ ID NO: 823788 - RNA, 19 nt, Human
gcagcugugggaagagcca

SEQ ID NO: 823789 - RNA, 22 nt, Human
ugccuguguccccuucuuggca

SEQ ID NO: 823790 - RNA, 22 nt, Human
guuucuuauuucaacuggaaca

SEQ ID NO: 823791 - RNA, 22 nt, Human
auuguauacaagcuuaauuguu

SEQ ID NO: 823792 - RNA, 22 nt, Human
uaucacauacuucucauccagg

SEQ ID NO: 823793 - RNA, 22 nt, Human
guaguucuuucucaauguucaa

SEQ ID NO: 823794 - RNA, 22 nt, Human
guguuuggucagacguccgggg

SEQ ID NO: 823795 - RNA, 22 nt, Human
ucaguaaaugagcaaaaauuuc

SEQ ID NO: 823796 - RNA, 22 nt, Human
uucuaagaaauggaaaacgauu

SEQ ID NO: 823797 - RNA, 22 nt, Human
gagugugucggucagcguggcg

SEQ ID NO: 823798 - RNA, 20 nt, Human
uuugauugccccucugacuu

SEQ ID NO: 823799 - RNA, 22 nt, Human
gaacugcauugugguauauguu

SEQ ID NO: 823800 - RNA, 22 nt, Human
agucuggagugauuauguggga

SEQ ID NO: 823801 - RNA, 22 nt, Human
ucaguguccuucguucuuguug

SEQ ID NO: 823802 - RNA, 22 nt, Human
agcugugaccuucaagagcuac

SEQ ID NO: 823803 - RNA, 22 nt, Human
ugucuggauagagccuaggccc

SEQ ID NO: 823804 - RNA, 22 nt, Human
gaugaguucuuucuauucuauu

SEQ ID NO: 823805 - RNA, 22 nt, Human
uuuguguuguacuucugugcau

SEQ ID NO: 823806 - RNA, 18 nt, Human
aguaaauguuaaauauug

SEQ ID NO: 823807 - RNA, 22 nt, Human
auuaaauuggacgcugggggaa

SEQ ID NO: 823808 - RNA, 22 nt, Human
uucuuucugggguccuucggcu

SEQ ID NO: 823809 - RNA, 22 nt, Human
uaaguauuggccuauagcuaga

SEQ ID NO: 823810 - RNA, 22 nt, Human
ugugucuuuggcgaugucugga

SEQ ID NO: 823811 - RNA, 22 nt, Human
aguggcagggacuucauauaaa

SEQ ID NO: 823812 - RNA, 21 nt, Human
ucaauuauggaugugugcaaa

SEQ ID NO: 823813 - RNA, 17 nt, Human
ucuggaugucauggaag

SEQ ID NO: 823814 - RNA, 22 nt, Human
gauuugucuauauucaaauaug

SEQ ID NO: 823815 - RNA, 22 nt, Human
gucauggaggauugugaguggu

SEQ ID NO: 823816 - RNA, 22 nt, Human
ucuggauggucagcucuuccug

SEQ ID NO: 823817 - RNA, 22 nt, Human
uuuaaacuaacaguacacguug

SEQ ID NO: 823818 - RNA, 22 nt, Human
guuuauuggguauuguggagcc

SEQ ID NO: 823819 - RNA, 22 nt, Human
uauaaacuccucuugcauuccu

SEQ ID NO: 823820 - RNA, 22 nt, Human
cgucauuuguaaaugaucaaga

SEQ ID NO: 823821 - RNA, 22 nt, Human
ucucugagguuguuuccagcac

SEQ ID NO: 823822 - RNA, 22 nt, Human
agugauguagguggauucuggc

SEQ ID NO: 823823 - RNA, 22 nt, Human
ugcauguuuuauaccaaagcuu

SEQ ID NO: 823824 - RNA, 20 nt, Human
aaaaacaguaaugcugaaga

SEQ ID NO: 823825 - RNA, 22 nt, Human
ugucuucuaccuugacagcauu

SEQ ID NO: 823826 - RNA, 22 nt, Human
acagccaacgucuuucuuacuu

SEQ ID NO: 823827 - RNA, 22 nt, Human
uuucaugauuaacuuagugaau

SEQ ID NO: 823828 - RNA, 19 nt, Human
uugcuucaugucuuuugcu

SEQ ID NO: 823829 - RNA, 22 nt, Human
agaugacuaacauaguauugcu

SEQ ID NO: 823830 - RNA, 22 nt, Human
uugcuucacuacuucuaggcuc

SEQ ID NO: 823831 - RNA, 22 nt, Human
cuuguauuaggaagaaugcuuu

SEQ ID NO: 823832 - RNA, 22 nt, Human
gcuucauagcauucauugccug

SEQ ID NO: 823833 - RNA, 22 nt, Human
uuuucuuggaguggcuguccuu

SEQ ID NO: 823834 - RNA, 21 nt, Human
ccuguggugccagaucgccag

SEQ ID NO: 823835 - RNA, 22 nt, Human
uuugcagagugcagaagcaucu

SEQ ID NO: 823836 - RNA, 22 nt, Human
aaauugaauuugggaaacauug

SEQ ID NO: 823837 - RNA, 22 nt, Human
uuuaauuuucugggcccagcag

SEQ ID NO: 823838 - RNA, 22 nt, Human
cauaacauccuugcuacuuuga

SEQ ID NO: 823839 - RNA, 22 nt, Human
cuggagucggcgccccaacaga

SEQ ID NO: 823840 - RNA, 22 nt, Human
aaagcuauuuuauugcagcucu

SEQ ID NO: 823841 - RNA, 22 nt, Human
auguccaggaagucuuaacuca

SEQ ID NO: 823842 - RNA, 22 nt, Human parainfluenza virus 2
acaagggaugcuuucucugcuc

SEQ ID NO: 823843 - RNA, 22 nt, Human parainfluenza virus 2
auugaauugaagaugcaagauu

SEQ ID NO: 823844 - RNA, 22 nt, Human
gccagagguucaacaacugucu

SEQ ID NO: 823845 - RNA, 22 nt, Human
ucaggagaaagccaauuagagu

SEQ ID NO: 823846 - RNA, 22 nt, Human
cagugguuauacuuacuguuuc

SEQ ID NO: 823847 - RNA, 22 nt, Human
ugaggcagaaaauagcaguuca

SEQ ID NO: 823848 - RNA, 22 nt, Human
gcaggcagagguggaggagaca

SEQ ID NO: 823849 - RNA, 22 nt, Human
cucaggaugucggugacuauug

SEQ ID NO: 823850 - RNA, 22 nt, Human
agaggcagaaguguucaaaccc

SEQ ID NO: 823851 - RNA, 22 nt, Human
agacagcugggaaauggagugu

SEQ ID NO: 823852 - RNA, 22 nt, Human
acccaggagacggaggugcagu

SEQ ID NO: 823853 - RNA, 22 nt, Human
cccaggaaaguggaggcggcug

SEQ ID NO: 823854 - RNA, 22 nt, Human
uaaauuauggcuggcagagcag

SEQ ID NO: 823855 - RNA, 22 nt, Human
caggcagccugagggaucuggg

SEQ ID NO: 823856 - RNA, 22 nt, Human
uggcagcuguguccagguagaa

SEQ ID NO: 823857 - RNA, 22 nt, Human
uuagaaagcuuuccauagucaa

SEQ ID NO: 823858 - RNA, 22 nt, Human
cccaggauggggcugcaguuau

SEQ ID NO: 823859 - RNA, 22 nt, Human
gauggcagguaguggucucauc

SEQ ID NO: 823860 - RNA, 22 nt, Human
cuggaguuagaguagacacuga

SEQ ID NO: 823861 - RNA, 22 nt, Human
guguguuucagaagccaggugu

SEQ ID NO: 823862 - RNA, 23 nt, Human
uggaaagcggaccuggggcagag

SEQ ID NO: 823863 - RNA, 22 nt, Human
gcccaggagguggaggugcagu

SEQ ID NO: 823864 - RNA, 22 nt, Human
aagggcaggaaaagauggaugu

SEQ ID NO: 823865 - RNA, 22 nt, Human
gcugaaugaauguauuuuaaaa

SEQ ID NO: 823866 - RNA, 22 nt, Human
aaaggccaagcaugagguggac

SEQ ID NO: 823867 - RNA, 22 nt, Human
uguucucacuggaugcuucaca

SEQ ID NO: 823868 - RNA, 22 nt, Human
acccaggacacagagaugaccc

SEQ ID NO: 823869 - RNA, 22 nt, Human
caggcagcgcucguggccuggc

SEQ ID NO: 823870 - RNA, 22 nt, Human
acauuuuuauucaucaaagcag

SEQ ID NO: 823871 - RNA, 22 nt, Human
aacauuucagcaaauaagaaca

SEQ ID NO: 823872 - RNA, 22 nt, Human
aaggcagucugguuucaaagca

SEQ ID NO: 823873 - RNA, 22 nt, Human
gaggagaggggcucccaagagc

SEQ ID NO: 823874 - RNA, 22 nt, Human
uugauuucuauucagauguaga

SEQ ID NO: 823875 - RNA, 22 nt, Human
caugcuguguguuuuagcucca

SEQ ID NO: 823876 - RNA, 22 nt, Human
uagggaugagccaguggguagu

SEQ ID NO: 823877 - RNA, 22 nt, Human
aaggagaguacaggaguuggua

SEQ ID NO: 823878 - RNA, 22 nt, Human
uuaacaugucuugacuucaucu

SEQ ID NO: 823879 - RNA, 22 nt, Human
caaauguauucucacuucaggg

SEQ ID NO: 823880 - RNA, 23 nt, Human
cccagggacacgaugacaccucc

SEQ ID NO: 823881 - RNA, 22 nt, Human
caggcgagugaacagacucuca

SEQ ID NO: 823882 - RNA, 23 nt, Human
cuuugccacccagagccugacag

SEQ ID NO: 823883 - RNA, 22 nt, Human
gcccaggaugguguguaguggu

SEQ ID NO: 823884 - RNA, 22 nt, Human
cugucccuucauuauucacuac

SEQ ID NO: 823885 - RNA, 22 nt, Human
agggagcuucuggccucagccu

SEQ ID NO: 823886 - RNA, 19 nt, Human
gacagugcaguuguaguac

SEQ ID NO: 823887 - RNA, 22 nt, Human
aaaggccaccaacaugaagcau

SEQ ID NO: 823888 - RNA, 22 nt, Human
gccauuuucugucuuguuuauu

SEQ ID NO: 823889 - RNA, 22 nt, Human
aacauucuauuuugcuaaaaca

SEQ ID NO: 823890 - RNA, 22 nt, Human
agggcagcucucaccucuggcc

SEQ ID NO: 823891 - RNA, 22 nt, Human
uagggauguaaacauaguaauu

SEQ ID NO: 823892 - RNA, 22 nt, Human
agaccaagaaaggaugaggauc

SEQ ID NO: 823893 - RNA, 22 nt, Human
uuugaauagcauaggauuacau

SEQ ID NO: 823894 - RNA, 22 nt, Human
cugagagugcucuuugauguca

SEQ ID NO: 823895 - RNA, 22 nt, Human
ggcagcacugcagcuuguuggg

SEQ ID NO: 823896 - RNA, 22 nt, Human
acaacauucuuaaauacacuga

SEQ ID NO: 823897 - RNA, 22 nt, Human
uuagagucaaaauggcauguua

SEQ ID NO: 823898 - RNA, 22 nt, Human
aaggcagcaccgccuccugaaa

SEQ ID NO: 823899 - RNA, 22 nt, Human
aucauucuaguccuuauggucu

SEQ ID NO: 823900 - RNA, 22 nt, Human
agacaggcagaggcugcagagg

SEQ ID NO: 823901 - RNA, 22 nt, Human
gggcagcuggcuuauagguuug

SEQ ID NO: 823902 - RNA, 22 nt, Human
ugagccuguccugugcauguga

SEQ ID NO: 823903 - RNA, 21 nt, Human
uccaggaguggcugggcaggg

SEQ ID NO: 823904 - RNA, 22 nt, Human
ucuuugaauucaaacuguucaa

SEQ ID NO: 823905 - RNA, 22 nt, Human
ggugaagggugucauggcauuu

SEQ ID NO: 823906 - RNA, 22 nt, Human
cuugaaagaagggucuuuuaau

SEQ ID NO: 823907 - RNA, 22 nt, Human
uugacacaguuuucucauuaag

SEQ ID NO: 823908 - RNA, 22 nt, Human
uccaggagaaggccauccagcg

SEQ ID NO: 823909 - RNA, 18 nt, Human
gagagggaucccucagga

SEQ ID NO: 823910 - RNA, 22 nt, Human
ugauugaacugagcuucaagau

SEQ ID NO: 823911 - RNA, 22 nt, Human
auucugaguccaugggggcagg

SEQ ID NO: 823912 - RNA, 22 nt, Human
augcuguguggucaaguuaauu

SEQ ID NO: 823913 - RNA, 22 nt, Human
uccauguguuuuccuguccaca

SEQ ID NO: 823914 - RNA, 22 nt, Human
aauauaauuuuauuccuagagu

SEQ ID NO: 823915 - RNA, 22 nt, Human
aauacaguaauuuugaugaguu

SEQ ID NO: 823916 - RNA, 22 nt, Human
ccaggagagcucucguucagug

SEQ ID NO: 823917 - RNA, 22 nt, Human
aucauuucccuuuagaucacaa

SEQ ID NO: 823918 - RNA, 22 nt, Human
uauuucuaagagauaucuguac

SEQ ID NO: 823919 - RNA, 22 nt, Human
aagggcagagggaaucccacau

SEQ ID NO: 823920 - RNA, 22 nt, Human
uuucaaagaccauuaacuauca

SEQ ID NO: 823921 - RNA, 22 nt, Human
cagagagagucaaaucuuugcu

SEQ ID NO: 823922 - RNA, 22 nt, Human
uugaagaggacuuugcagcugu

SEQ ID NO: 823923 - RNA, 22 nt, Human
cggcagcucgagggccacccgu

SEQ ID NO: 823924 - RNA, 22 nt, Human
uuuaacagguaaaguaaaugug

SEQ ID NO: 823925 - RNA, 22 nt, Human
uuaaauuuuagaaacagacucu

SEQ ID NO: 823926 - RNA, 22 nt, Human
ugaaaugaagggcuuguucugg

SEQ ID NO: 823927 - RNA, 22 nt, Human
gauuuuauuagcccaaacuuug

SEQ ID NO: 823928 - RNA, 22 nt, Human
cuucaggauuuaggaagaugaa

SEQ ID NO: 823929 - RNA, 23 nt, Human
uuagagaugauuaaaaaaucuug

SEQ ID NO: 823930 - RNA, 18 nt, Human
ggcagcuugacuagcaac

SEQ ID NO: 823931 - RNA, 22 nt, Human
ccucaggauccgcaggugcagu

SEQ ID NO: 823932 - RNA, 22 nt, Human
agccagcucccuccccugcagg

SEQ ID NO: 823933 - RNA, 22 nt, Human
uuuccaagacuccaguucuccc

SEQ ID NO: 823934 - RNA, 22 nt, Human
ucaggaugguguggaggaaaua

SEQ ID NO: 823935 - RNA, 20 nt, Human
augauuuugcacuaacuuca

SEQ ID NO: 823936 - RNA, 22 nt, Human
ccagugcuuccaggaauacggu

SEQ ID NO: 823937 - RNA, 22 nt, Human
aucuuucaaucaggaaaaaucu

SEQ ID NO: 823938 - RNA, 22 nt, Human
gaggucagucagaccaggguuu

SEQ ID NO: 823939 - RNA, 22 nt, Human
caaggccacguucugcaugcgg

SEQ ID NO: 823940 - RNA, 22 nt, Human
agucucuuccuucaaggcuggu

SEQ ID NO: 823941 - RNA, 22 nt, Human
auucuucaccugagucagucua

SEQ ID NO: 823942 - RNA, 22 nt, Human
auucuuaauugccaugcuguau

SEQ ID NO: 823943 - RNA, 22 nt, Human
cagacagggaccucgcuccaga

SEQ ID NO: 823944 - RNA, 19 nt, Human
aauacaguguuauagaauu

SEQ ID NO: 823945 - RNA, 22 nt, Human
agagggcaaguguaguccagua

SEQ ID NO: 823946 - RNA, 22 nt, Human
ucuuaaagagcgcaauuugagg

SEQ ID NO: 823947 - RNA, 22 nt, Human
uaaggccaaguucauauacaac

SEQ ID NO: 823948 - RNA, 22 nt, Human
agaggccggccgagcccauggg

SEQ ID NO: 823949 - RNA, 19 nt, Human
aggguggcaaaggagggug

SEQ ID NO: 823950 - RNA, 22 nt, Human
uucuucaugcuguugcugcuug

SEQ ID NO: 823951 - RNA, 22 nt, Human
uucuucaguguagcaacuguau

SEQ ID NO: 823952 - RNA, 21 nt, Human
uuagaaagcucacuacaguua

SEQ ID NO: 823953 - RNA, 22 nt, Human
uuucacagcuggguggcagagu

SEQ ID NO: 823954 - RNA, 22 nt, Human
uugugguuaaccgcacauuuuu

SEQ ID NO: 823955 - RNA, 22 nt, Human
ugaaaugauguacaagaaggca

SEQ ID NO: 823956 - RNA, 22 nt, Human
cagaugaggcaaccucauugcu

SEQ ID NO: 823957 - RNA, 22 nt, Human
cuucucaguugcaagugucaga

SEQ ID NO: 823958 - RNA, 17 nt, Human
caaggccagcaucuuca

SEQ ID NO: 823959 - RNA, 21 nt, Human
uagggcaggcauuggaagaga

SEQ ID NO: 823960 - RNA, 22 nt, Human
ucauuuguugaacuuuagugcg

SEQ ID NO: 823961 - RNA, 22 nt, Human
auucauuugcuauuguguaugg

SEQ ID NO: 823962 - RNA, 22 nt, Human
gcucccagcaauugaggcagcc

SEQ ID NO: 823963 - RNA, 22 nt, Human
cccaucacagacacuggguuau

SEQ ID NO: 823964 - RNA, 22 nt, Human
cagagccauuauggagacuugc

SEQ ID NO: 823965 - RNA, 22 nt, Human
uucucagagcacugcugacaaa

SEQ ID NO: 823966 - RNA, 22 nt, Human
auacuaaaguauagaacuuagu

SEQ ID NO: 823967 - RNA, 22 nt, Human
gcuuugaagacuuuuccagggu

SEQ ID NO: 823968 - RNA, 22 nt, Human
cugccuccugccgugcagcuuc

SEQ ID NO: 823969 - RNA, 22 nt, Human
uuggcagugucugcaaaaugga

SEQ ID NO: 823970 - RNA, 20 nt, Human
gaugggaaucggagcuggua

SEQ ID NO: 823971 - RNA, 21 nt, Human
ugcugaugucagagaagcaag

SEQ ID NO: 823972 - RNA, 22 nt, Human
cugagcugggaguagagacucu

SEQ ID NO: 823973 - RNA, 22 nt, Human
cccaggaggcagauguugcagu

SEQ ID NO: 823974 - RNA, 22 nt, Human
auacuguuucucuucuacauga

SEQ ID NO: 823975 - RNA, 22 nt, Human
gucugucuguuguugagaagca

SEQ ID NO: 823976 - RNA, 22 nt, Human
gaggagcuugaggcuaggagcc

SEQ ID NO: 823977 - RNA, 22 nt, Human
uuugcagucuggccugcuuugg

SEQ ID NO: 823978 - RNA, 22 nt, Human
uagaaauguugguauuaacauu

SEQ ID NO: 823979 - RNA, 22 nt, Human
uuccaagaguaaauucaaauug

SEQ ID NO: 823980 - RNA, 22 nt, Human
cggaggggauacauuuucugaa

SEQ ID NO: 823981 - RNA, 22 nt, Human
cuuuguagcugcuucugauuua

SEQ ID NO: 823982 - RNA, 22 nt, Human
cauucuuacacaauauuuuaau

SEQ ID NO: 823983 - RNA, 22 nt, Human
gggauggggagcuggaaagggg

SEQ ID NO: 823984 - RNA, 20 nt, Human
uugauaggcagcuugucagg

SEQ ID NO: 823985 - RNA, 22 nt, Human
guucuucagcauuagaagucau

SEQ ID NO: 823986 - RNA, 22 nt, Human
caggggaguuuuaugcaacaga

SEQ ID NO: 823987 - RNA, 22 nt, Human
gaggccaggggccuggagauga

SEQ ID NO: 823988 - RNA, 22 nt, Human
ggugaguugggguucacagguc

SEQ ID NO: 823989 - RNA, 21 nt, Human
auugaaagucaacaaucaguu

SEQ ID NO: 823990 - RNA, 22 nt, Human
aggcagcugaggucuggcgccc

SEQ ID NO: 823991 - RNA, 22 nt, Human
uuugaacuucuaccugucauau

SEQ ID NO: 823992 - RNA, 22 nt, Human
cuagccugggauuugaacuuau

SEQ ID NO: 823993 - RNA, 22 nt, Human
cccaggagaccugugaaaggac

SEQ ID NO: 823994 - RNA, 22 nt, Human
uucucugaguacguuucagugu

SEQ ID NO: 823995 - RNA, 22 nt, Human
uuugaaaggaauuaggaugaca

SEQ ID NO: 823996 - RNA, 22 nt, Human
aaauaguucagcuuguaaaccc

SEQ ID NO: 823997 - RNA, 23 nt, Human
aggauguaggauguauggcagag

SEQ ID NO: 823998 - RNA, 22 nt, Human
ugcuggaauaauuucauguuaa

SEQ ID NO: 823999 - RNA, 22 nt, Human
uugauacaggcucuauuucauc

SEQ ID NO: 824000 - RNA, 22 nt, Human
uucaggauggaguaccuuuuau

SEQ ID NO: 824001 - RNA, 22 nt, Human
ucucuguaguugggcagcugcu

SEQ ID NO: 824002 - RNA, 22 nt, Human
caguucuuaauaccaugugguu

SEQ ID NO: 824003 - RNA, 22 nt, Human
ccacuguuuuucaguuaacuuu

SEQ ID NO: 824004 - RNA, 22 nt, Human
aaggcaguacuuuauguccaua

SEQ ID NO: 824005 - RNA, 19 nt, Human
uguguguuuauauauguau

SEQ ID NO: 824006 - RNA, 22 nt, Human
gauaaugaugacaaugacaacc

SEQ ID NO: 824007 - RNA, 22 nt, Human
ucucaggaucuaauacauggua

SEQ ID NO: 824008 - RNA, 22 nt, Human
aguguguccagaaaucuguauu

SEQ ID NO: 824009 - RNA, 22 nt, Human
uuuugaauaauucagaaacagc

SEQ ID NO: 824010 - RNA, 22 nt, Human
auucaaguccagcuucucuaca

SEQ ID NO: 824011 - RNA, 17 nt, Human
agaggcagauacuugga

SEQ ID NO: 824012 - RNA, 22 nt, Human
gaggauggaggugugagcuaug

SEQ ID NO: 824013 - RNA, 22 nt, Human
ucuucaucucagauuaacagga

SEQ ID NO: 824014 - RNA, 22 nt, Human
ugucugugaccucuuaggcaag

SEQ ID NO: 824015 - RNA, 22 nt, Human
aggagcagaauuuaaugugcag

SEQ ID NO: 824016 - RNA, 22 nt, Human
aucuccaggcauuucaagagac

SEQ ID NO: 824017 - RNA, 22 nt, Human
gcagggaagaucuuggagcugc

SEQ ID NO: 824018 - RNA, 22 nt, Human
gaggaggccaguggaaggaagc

SEQ ID NO: 824019 - RNA, 22 nt, Human
aagugaagaaauacaugagaau

SEQ ID NO: 824020 - RNA, 22 nt, Human
ccuggacucaggcugugggcac

SEQ ID NO: 824021 - RNA, 22 nt, Human
caauacuuccuuguuagaggca

SEQ ID NO: 824022 - RNA, 22 nt, Human
ugaguucuaguggcugcagauu

SEQ ID NO: 824023 - RNA, 22 nt, Human
uuagccauggacugaauugacu

SEQ ID NO: 824024 - RNA, 22 nt, Human
agugcuuuagagaaauggugcu

SEQ ID NO: 824025 - RNA, 22 nt, Human
ucaugcuuaaaagacacuugag

SEQ ID NO: 824026 - RNA, 23 nt, Human
ucagagagcuguugagagcugcc

SEQ ID NO: 824027 - RNA, 22 nt, Human
gugcaagguacauccuugaugu

SEQ ID NO: 824028 - RNA, 21 nt, Human
gauuuuaaagagacugccaca

SEQ ID NO: 824029 - RNA, 22 nt, Human
ucucuucucuagugagcaacug

SEQ ID NO: 824030 - RNA, 22 nt, Human
ucagaaaagguagcugugacaa

SEQ ID NO: 824031 - RNA, 20 nt, Human
agcaagaguaaggacagcga

SEQ ID NO: 824032 - RNA, 22 nt, Human
acagcagcuugcgugucugguc

SEQ ID NO: 824033 - RNA, 21 nt, Human
uggcaggcagcuggaagcuug

SEQ ID NO: 824034 - RNA, 22 nt, Human
ccucagaugucuuaaggcacug

SEQ ID NO: 824035 - RNA, 22 nt, Human
ucccaggacaggccacauggaa

SEQ ID NO: 824036 - RNA, 22 nt, Human
uucagcaaauggacuguucagg

SEQ ID NO: 824037 - RNA, 22 nt, Human
acauuucuaguuguucaucucc

SEQ ID NO: 824038 - RNA, 22 nt, Human
cugcaucaguggauaugauggu

SEQ ID NO: 824039 - RNA, 22 nt, Human
ggccagcuuugagcugcaggaa

SEQ ID NO: 824040 - RNA, 22 nt, Human
gcauguguggaggagaugugcu

SEQ ID NO: 824041 - RNA, 22 nt, Human
agucucuuauucccuauugcug

SEQ ID NO: 824042 - RNA, 22 nt, Human
ucugucuucaucagcaugugau

SEQ ID NO: 824043 - RNA, 22 nt, Human
cagcagagaaauuaaacuucug

SEQ ID NO: 824044 - RNA, 22 nt, Human
uauuucagucacuucuucucug

SEQ ID NO: 824045 - RNA, 22 nt, Human
ucaucugucauccacaaagcug

SEQ ID NO: 824046 - RNA, 18 nt, Human
cugcccagagcauuucau

SEQ ID NO: 824047 - RNA, 22 nt, Human
cccaggagacauauagaaggac

SEQ ID NO: 824048 - RNA, 22 nt, Human
augauguuauuuucagaaacau

SEQ ID NO: 824049 - RNA, 22 nt, Human
auguagagcaguguuguccaau

SEQ ID NO: 824050 - RNA, 22 nt, Human
ucaggagacauucuuaaaguag

SEQ ID NO: 824051 - RNA, 22 nt, Human
ugcuuggccuacuuguccuuug

SEQ ID NO: 824052 - RNA, 22 nt, Human
cuucuucaguugcauguauugg

SEQ ID NO: 824053 - RNA, 23 nt, Human
gaggcacucaggaaaugugagug

SEQ ID NO: 824054 - RNA, 22 nt, Human
uaaguucauaagcuuauucuua

SEQ ID NO: 824055 - RNA, 22 nt, Human
uaucuaaauggaauauuccaga

SEQ ID NO: 824056 - RNA, 22 nt, Human
uaucuguugucuuuuacaugua

SEQ ID NO: 824057 - RNA, 22 nt, Human
augugaggcagcacggagauua

SEQ ID NO: 824058 - RNA, 22 nt, Human
cagcuggccaaucagggcgccc

SEQ ID NO: 824059 - RNA, 22 nt, Human
agugcuuugaacgaaaggcuga

SEQ ID NO: 824060 - RNA, 22 nt, Human
ggcaggcugcuugggucauguc

SEQ ID NO: 824061 - RNA, 22 nt, Human
ggcagcucugcuccacaugagu

SEQ ID NO: 824062 - RNA, 22 nt, Human
uggaggaaguugcuggaaguca

SEQ ID NO: 824063 - RNA, 22 nt, Human
cuauuucaaggcccagauauga

SEQ ID NO: 824064 - RNA, 22 nt, Human
aggagaggaaucauuauuacaa

SEQ ID NO: 824065 - RNA, 22 nt, Human
ucaggagggugacaggcccugg

SEQ ID NO: 824066 - RNA, 22 nt, Human
auccaugaucaauuuauuacua

SEQ ID NO: 824067 - RNA, 22 nt, Human
ucugcagggaugugagggguga

SEQ ID NO: 824068 - RNA, 22 nt, Human
cagcugccccuccagggcuggg

SEQ ID NO: 824069 - RNA, 21 nt, Human
agccagcuaucacacagcauu

SEQ ID NO: 824070 - RNA, 22 nt, Human
ggaagagggaaccacgacugua

SEQ ID NO: 824071 - RNA, 22 nt, Human
cccaggaggcagagguuggagc

SEQ ID NO: 824072 - RNA, 22 nt, Human
gaggccagcuaguccaggaagu

SEQ ID NO: 824073 - RNA, 22 nt, Human
ccugcuguucuguuuagugaac

SEQ ID NO: 824074 - RNA, 23 nt, Human
acacauuuuucccguucugaggu

SEQ ID NO: 824075 - RNA, 22 nt, Human
aggagagaauguuccaggcuug

SEQ ID NO: 824076 - RNA, 22 nt, Human
aaauuaguacauugcaaagucc

SEQ ID NO: 824077 - RNA, 22 nt, Human
uucacagacauugcagacugaa

SEQ ID NO: 824078 - RNA, 22 nt, Human
auuauucuuaugucaucauggc

SEQ ID NO: 824079 - RNA, 22 nt, Human
cugcugugccuuaaaaugcaag

SEQ ID NO: 824080 - RNA, 22 nt, Human
cagcugacuucauaggaagaca

SEQ ID NO: 824081 - RNA, 22 nt, Human
ucaagugcuugugagguauuug

SEQ ID NO: 824082 - RNA, 21 nt, Human
gggcagcucuguuuuauuuuc

SEQ ID NO: 824083 - RNA, 22 nt, Human
uucuucuucaagugcugcauuc

SEQ ID NO: 824084 - RNA, 21 nt, Human
uuugaaagcuacaucuauagc

SEQ ID NO: 824085 - RNA, 22 nt, Human
uucauucugggcucuaaggaac

SEQ ID NO: 824086 - RNA, 22 nt, Human
uguagaaagaauauguuucaua

SEQ ID NO: 824087 - RNA, 22 nt, Human
aguaaagcagaguugcaguaca

SEQ ID NO: 824088 - RNA, 22 nt, Human
aggccagccucaggcagggacc

SEQ ID NO: 824089 - RNA, 22 nt, Human
uucuucuccuaaggagaguccu

SEQ ID NO: 824090 - RNA, 22 nt, Human
cugcugugaguuuggaggucua

SEQ ID NO: 824091 - RNA, 22 nt, Human
ggagugucagaaacaguguccu

SEQ ID NO: 824092 - RNA, 22 nt, Human
gaucuguuauaaucucuuuuau

SEQ ID NO: 824093 - RNA, 22 nt, Human
gaggcugaggguuagagaguca

SEQ ID NO: 824094 - RNA, 22 nt, Human
cuuuuccacugagccucacaaa

SEQ ID NO: 824095 - RNA, 22 nt, Human
ucuucacaggagccugccugcc

SEQ ID NO: 824096 - RNA, 22 nt, Human
agagagggcauagaaaaaggga

SEQ ID NO: 824097 - RNA, 22 nt, Human
ucucuucuaacacuagaaauuc

SEQ ID NO: 824098 - RNA, 22 nt, Human
aaaagucugcucucauuucaga

SEQ ID NO: 824099 - RNA, 22 nt, Human
aaaggugacugcagcagcuauu

SEQ ID NO: 824100 - RNA, 22 nt, Human
caaggccaagguuuugugaacu

SEQ ID NO: 824101 - RNA, 22 nt, Human
uuugacauuggcuuauucuguu

SEQ ID NO: 824102 - RNA, 22 nt, Human
cagcgucucguugugggccucg

SEQ ID NO: 824103 - RNA, 21 nt, Human
ccugcugugaucuuagugagu

SEQ ID NO: 824104 - RNA, 21 nt, Human
cucuugugucagagccagagg

SEQ ID NO: 824105 - RNA, 21 nt, Human
aggaggggucuuucccacuga

SEQ ID NO: 824106 - RNA, 22 nt, Human
aggaaagguagcgugccagcag

SEQ ID NO: 824107 - RNA, 22 nt, Human
aauguauuccucaugcaagagu

SEQ ID NO: 824108 - RNA, 22 nt, Human
cccaggaggacauuccauaccc

SEQ ID NO: 824109 - RNA, 22 nt, Human
aguggcaggcggagauguagga

SEQ ID NO: 824110 - RNA, 22 nt, Human
ggagaggguguggaaaguuauc

SEQ ID NO: 824111 - RNA, 22 nt, Human
agcagccuuugaucaucuggga

SEQ ID NO: 824112 - RNA, 22 nt, Human
guagggagcccagagcccagug

SEQ ID NO: 824113 - RNA, 22 nt, Human
uuucuucagccuucacaaccug

SEQ ID NO: 824114 - RNA, 22 nt, Human
uggcagcugauuagauggugcc

SEQ ID NO: 824115 - RNA, 22 nt, Human
ugaagggggagauauaugugug

SEQ ID NO: 824116 - RNA, 22 nt, Human
gggaggugauggcaagcagcgg

SEQ ID NO: 824117 - RNA, 18 nt, Human
uaggagagaauuuauuua

SEQ ID NO: 824118 - RNA, 22 nt, Human
accauccugaaaccuucaugcu

SEQ ID NO: 824119 - RNA, 17 nt, Human
gagagcugcugcuuccg

SEQ ID NO: 824120 - RNA, 22 nt, Human
uugacaauguccuuugaauuuc

SEQ ID NO: 824121 - RNA, 22 nt, Human
uucaggauccccaccgcguuua

SEQ ID NO: 824122 - RNA, 22 nt, Human
uuugaaaucuaaucaaggaaca

SEQ ID NO: 824123 - RNA, 22 nt, Human
aggguagggcccggagacagac

SEQ ID NO: 824124 - RNA, 22 nt, Human
gggcagcuggccagguauucug

SEQ ID NO: 824125 - RNA, 22 nt, Human
ggaggccagggacccagucagc

SEQ ID NO: 824126 - RNA, 22 nt, Human
ucuugcuaaagaccaacacauu

SEQ ID NO: 824127 - RNA, 22 nt, Human
ccuggauucaagucuuucuuuc

SEQ ID NO: 824128 - RNA, 22 nt, Human
ucuucagaggaagucagucuuu

SEQ ID NO: 824129 - RNA, 22 nt, Human
aguugcagacgcagagauguug

SEQ ID NO: 824130 - RNA, 22 nt, Human
ucacagacauggugagguaaca

SEQ ID NO: 824131 - RNA, 22 nt, Human
ugaaggccagcagagugaaggc

SEQ ID NO: 824132 - RNA, 22 nt, Human
auaagcauguuagaauauuuga

SEQ ID NO: 824133 - RNA, 21 nt, Human
gauugaaaccauggcagugag

SEQ ID NO: 824134 - RNA, 22 nt, Human
cuguauuuguccucuauuuauu

SEQ ID NO: 824135 - RNA, 22 nt, Human
aaauacagaguugcuuaaaagc

SEQ ID NO: 824136 - RNA, 22 nt, Human
gucauauacacugcauguaauc

SEQ ID NO: 824137 - RNA, 22 nt, Human
uggaaagcgaggaguuggcauu

SEQ ID NO: 824138 - RNA, 22 nt, Human
uuucugcugugcuuucuugcgu

SEQ ID NO: 824139 - RNA, 22 nt, Human
cccaggaguaagugacauuguu

SEQ ID NO: 824140 - RNA, 22 nt, Human
uuauggcauauuccucauugua

SEQ ID NO: 824141 - RNA, 22 nt, Human
cuggcugugcugcaggcuuugg

SEQ ID NO: 824142 - RNA, 22 nt, Human
agaaguuguagguuugcauauu

SEQ ID NO: 824143 - RNA, 22 nt, Human
aauaugcauuaacuguguacau

SEQ ID NO: 824144 - RNA, 22 nt, Human
ucuuagaaguuuauggcacgga

SEQ ID NO: 824145 - RNA, 22 nt, Human
auauauuugagaauauucauga

SEQ ID NO: 824146 - RNA, 22 nt, Human
uuucuaggucuuccauacugcc

SEQ ID NO: 824147 - RNA, 22 nt, Human
ggcagcuucuuaauauggagac

SEQ ID NO: 824148 - RNA, 22 nt, Human
aagcagagcaagcguauuuauu

SEQ ID NO: 824149 - RNA, 23 nt, Human
aucauucuccaaucuggagcagg

SEQ ID NO: 824150 - RNA, 22 nt, Human
ucccaggaagaucccagggacc

SEQ ID NO: 824151 - RNA, 22 nt, Human
agucuccuuggccucaaugccu

SEQ ID NO: 824152 - RNA, 21 nt, Human
uucucagaucgaguagugaga

SEQ ID NO: 824153 - RNA, 22 nt, Human
aagagggcagcacagguggguc

SEQ ID NO: 824154 - RNA, 18 nt, Human
ccagguggugacagagau

SEQ ID NO: 824155 - RNA, 22 nt, Human
ggcagcucacgggcauggggug

SEQ ID NO: 824156 - RNA, 20 nt, Human
agggcagcuugaggagccgg

SEQ ID NO: 824157 - RNA, 22 nt, Human
ugaggcaguucuuacuuguauu

SEQ ID NO: 824158 - RNA, 22 nt, Human
caggcagcucuaauggaaagug

SEQ ID NO: 824159 - RNA, 22 nt, Human
ugaggcaggacugagcgggaug

SEQ ID NO: 824160 - RNA, 22 nt, Human
uucaggauucuuucagacuggg

SEQ ID NO: 824161 - RNA, 22 nt, Human
gaagcagcagcuggggacaguu

SEQ ID NO: 824162 - RNA, 22 nt, Human
aggcagcuuucuguaggggugu

SEQ ID NO: 824163 - RNA, 22 nt, Human
uaugaacuuuugaugugacaug

SEQ ID NO: 824164 - RNA, 22 nt, Human
agggagcucacaguccaguaga

SEQ ID NO: 824165 - RNA, 22 nt, Human
ggaggggaacuaaucccgugac

SEQ ID NO: 824166 - RNA, 22 nt, Human
augugucuuugagacucugcua

SEQ ID NO: 824167 - RNA, 22 nt, Human
uuugaaaggugucgagaugugu

SEQ ID NO: 824168 - RNA, 22 nt, Human
gauggcagcauauugacagcau

SEQ ID NO: 824169 - RNA, 22 nt, Human
uccaugagaacccuuggagaua

SEQ ID NO: 824170 - RNA, 22 nt, Human
ggccaggagcugcacagggcuc

SEQ ID NO: 824171 - RNA, 22 nt, Human
acucaggaaaugaagacugguu

SEQ ID NO: 824172 - RNA, 22 nt, Human
uucucuuuugugaugugagaug

SEQ ID NO: 824173 - RNA, 22 nt, Human
gcauguguugguuuaugcaugu

SEQ ID NO: 824174 - RNA, 22 nt, Human
cccauucauccucgcuuccuuc

SEQ ID NO: 824175 - RNA, 22 nt, Human
uaauuauuaugacaacaauugc

SEQ ID NO: 824176 - RNA, 22 nt, Human
cucugcaugccuugcucagaca

SEQ ID NO: 824177 - RNA, 22 nt, Human
cagcugacccagugaggaggca

SEQ ID NO: 824178 - RNA, 22 nt, Human
cccaggagauggagguugcagu

SEQ ID NO: 824179 - RNA, 22 nt, Human
uaaacauuuguuauucuuguuu

SEQ ID NO: 824180 - RNA, 22 nt, Human
gugcugugugauccaugcuggc

SEQ ID NO: 824181 - RNA, 22 nt, Human
gcaggagacuggcugugguagu

SEQ ID NO: 824182 - RNA, 22 nt, Human
aagggcagaauagagaagaugg

SEQ ID NO: 824183 - RNA, 17 nt, Human
cccaugagcccacuccc

SEQ ID NO: 824184 - RNA, 22 nt, Human
ccccaggacacauggaccaagu

SEQ ID NO: 824185 - RNA, 22 nt, Human
caaggccaguuucuccuaguca

SEQ ID NO: 824186 - RNA, 22 nt, Human
ucucaguguguuuucucucaga

SEQ ID NO: 824187 - RNA, 22 nt, Human
auucuucacuguuucagaauga

SEQ ID NO: 824188 - RNA, 22 nt, Human
aguccaugguucugacucaucu

SEQ ID NO: 824189 - RNA, 22 nt, Human
uaggagaggugaauggcacacu

SEQ ID NO: 824190 - RNA, 22 nt, Human
gaggcugauucggggaacagca

SEQ ID NO: 824191 - RNA, 22 nt, Human
uuccagcaggcagacaggagau

SEQ ID NO: 824192 - RNA, 22 nt, Human
cucccaggggaacuaucaagua

SEQ ID NO: 824193 - RNA, 22 nt, Human
uuugacaugcaaagcacuuuag

SEQ ID NO: 824194 - RNA, 22 nt, Human
aggcacaguuucauccccgggc

SEQ ID NO: 824195 - RNA, 22 nt, Human
ugcuucugggcaaaugugugug

SEQ ID NO: 824196 - RNA, 23 nt, Human
gccaggaguggguagacuaaugc

SEQ ID NO: 824197 - RNA, 22 nt, Human
ccaggagaugggagcaucuaaa

SEQ ID NO: 824198 - RNA, 22 nt, Human
gcucagagcuugaaguuccacu

SEQ ID NO: 824199 - RNA, 22 nt, Human
uucagaaugugaccuuauuugg

SEQ ID NO: 824200 - RNA, 22 nt, Human
ucacuguugaccuggaaguggg

SEQ ID NO: 824201 - RNA, 21 nt, Human
uaauaauuccacuacagagua

SEQ ID NO: 824202 - RNA, 22 nt, Human
guucuucaucuuaaccaucugu

SEQ ID NO: 824203 - RNA, 22 nt, Human
agcccaggugagggguucgaaa

SEQ ID NO: 824204 - RNA, 23 nt, Human
acugucugauauguuuuccauca

SEQ ID NO: 824205 - RNA, 19 nt, Human
accaggaguaucagagcug

SEQ ID NO: 824206 - RNA, 22 nt, Human
agcagcauuaugauauaucuua

SEQ ID NO: 824207 - RNA, 20 nt, Human
aucaggauucuugcuuuguu

SEQ ID NO: 824208 - RNA, 22 nt, Human
ucugucccugagagcucaggag

SEQ ID NO: 824209 - RNA, 22 nt, Human
gauggcaggcaggugaguagag

SEQ ID NO: 824210 - RNA, 22 nt, Human
cccaggaagaaauucugauuug

SEQ ID NO: 824211 - RNA, 22 nt, Human
uuuauuugaaucaggggagaau

SEQ ID NO: 824212 - RNA, 22 nt, Human
ccagaggaggggggucuuucug

SEQ ID NO: 824213 - RNA, 19 nt, Human
ucuuucauuucuagcucug

SEQ ID NO: 824214 - RNA, 22 nt, Human
uccaggagggguaggcaguaug

SEQ ID NO: 824215 - RNA, 22 nt, Human
ugccaggagucaggccaggcag

SEQ ID NO: 824216 - RNA, 21 nt, Human
cucaaagaccaaaaguguaga

SEQ ID NO: 824217 - RNA, 22 nt, Human
auucuucauuguugauucaugu

SEQ ID NO: 824218 - RNA, 22 nt, Human
auucuucaguauguguggauug

SEQ ID NO: 824219 - RNA, 20 nt, Human
caggagggacauuucagcau

SEQ ID NO: 824220 - RNA, 22 nt, Human
cagaguucaaagccugcuggga

SEQ ID NO: 824221 - RNA, 22 nt, Human
uguauuuuuagaccuuuagacc

SEQ ID NO: 824222 - RNA, 22 nt, Human
gcauugaguccacucugucuuu

SEQ ID NO: 824223 - RNA, 22 nt, Human
cucaugucuucacccauucuaa

SEQ ID NO: 824224 - RNA, 22 nt, Human
uucuuuucuuuaggcauugugu

SEQ ID NO: 824225 - RNA, 22 nt, Human
uugaacuguaagcaugucugcc

SEQ ID NO: 824226 - RNA, 20 nt, Human
augcuuucuugugugcugcu

SEQ ID NO: 824227 - RNA, 22 nt, Human
uuucaugagauuccuccacauc

SEQ ID NO: 824228 - RNA, 22 nt, Human
uugcugugucauuuguuuaauc

SEQ ID NO: 824229 - RNA, 22 nt, Human
ggccagcagucacagggucaga

SEQ ID NO: 824230 - RNA, 22 nt, Human
cccaggcagugugugcaugcgu

SEQ ID NO: 824231 - RNA, 22 nt, Human
uuugcaaauaccaugaaacuug

SEQ ID NO: 824232 - RNA, 22 nt, Human
uaauuccaaguugagacaugca

SEQ ID NO: 824233 - RNA, 22 nt, Human
uuggcaggaauauugcagaggu

SEQ ID NO: 824234 - RNA, 22 nt, Human
cuucugaggcagcuauucaguu

SEQ ID NO: 824235 - RNA, 22 nt, Human
cccaaggacacgggcagggaca

SEQ ID NO: 824236 - RNA, 22 nt, Human
aggcagcuuuaacugguaguag

SEQ ID NO: 824237 - RNA, 22 nt, Human
cucaggaugcaggucacaggac

SEQ ID NO: 824238 - RNA, 22 nt, Human
cuucagaaugggacuguguuug

SEQ ID NO: 824239 - RNA, 22 nt, Human
auucaaguggcugcuauguuaa

SEQ ID NO: 824240 - RNA, 22 nt, Human
auuacaaaagaagggagaaggu

SEQ ID NO: 824241 - RNA, 22 nt, Human
ugcugaaagucccaaaucucau

SEQ ID NO: 824242 - RNA, 22 nt, Human
ccagugcuaagguagccucugc

SEQ ID NO: 824243 - RNA, 22 nt, Human
cugcccagaagccagaugggca

SEQ ID NO: 824244 - RNA, 23 nt, Human
auuugagaaaguauuuuuaagac

SEQ ID NO: 824245 - RNA, 22 nt, Human
ugaggggauacgguacacauug

SEQ ID NO: 824246 - RNA, 22 nt, Human
cuuagaaaugcagauucucagg

SEQ ID NO: 824247 - RNA, 22 nt, Human
uagaaacaucagcuaaccaaaa

SEQ ID NO: 824248 - RNA, 22 nt, Human
augcugugagugugccgcagag

SEQ ID NO: 824249 - RNA, 19 nt, Human
ugcaagcuuuuucuuguua

SEQ ID NO: 824250 - RNA, 22 nt, Human
caggcagcucaaccuugggagc

SEQ ID NO: 824251 - RNA, 22 nt, Human
cuugcacacauguacaugugua

SEQ ID NO: 824252 - RNA, 22 nt, Human
ucacacagauugguagagcuga

SEQ ID NO: 824253 - RNA, 22 nt, Human
ucucugaguauccugaacugcc

SEQ ID NO: 824254 - RNA, 22 nt, Human
uagggaggaggguuuucaaauc

SEQ ID NO: 824255 - RNA, 22 nt, Human
cccaggagacagaaacagaggu

SEQ ID NO: 824256 - RNA, 22 nt, Human
ggcagcuaguuuaagaaagagg

SEQ ID NO: 824257 - RNA, 22 nt, Human
auuuguugcuagcagcacugau

SEQ ID NO: 824258 - RNA, 22 nt, Human
aaaggccacacugcucuuucuc

SEQ ID NO: 824259 - RNA, 22 nt, Human
ucaggagagagaaauuggggcu

SEQ ID NO: 824260 - RNA, 22 nt, Human
caggcagcugcgacaagagagc

SEQ ID NO: 824261 - RNA, 22 nt, Human
aucaggauuauuaaaucuggau

SEQ ID NO: 824262 - RNA, 22 nt, Human
ugaggggagcccgcccuggacg

SEQ ID NO: 824263 - RNA, 22 nt, Human
gcagcugcagacccucagugcu

SEQ ID NO: 824264 - RNA, 22 nt, Human
ggaggaugagcuacgaggagcu

SEQ ID NO: 824265 - RNA, 22 nt, Human
gggcagcugccagaggccaugg

SEQ ID NO: 824266 - RNA, 22 nt, Human
aaggcagccaugugcuuugggu

SEQ ID NO: 824267 - RNA, 22 nt, Human
cuguuucaagugaagucagaca

SEQ ID NO: 824268 - RNA, 22 nt, Human
aggcaguuuauccccagagccu

SEQ ID NO: 824269 - RNA, 22 nt, Human
acccaggacaaaauaaccaggu

SEQ ID NO: 824270 - RNA, 22 nt, Human
ucagucuuugcuuaugacaaua

SEQ ID NO: 824271 - RNA, 22 nt, Human
uuguaaaugaccuuuucuaauu

SEQ ID NO: 824272 - RNA, 22 nt, Human
ugaugaaaauaugauucugagg

SEQ ID NO: 824273 - RNA, 22 nt, Human
uccaggagauucauuaggucau

SEQ ID NO: 824274 - RNA, 22 nt, Human
uuuccuaguucuaagaaaugua

SEQ ID NO: 824275 - RNA, 22 nt, Human
ugcuuagacgucaaguacagcc

SEQ ID NO: 824276 - RNA, 22 nt, Human
agggcagcacaaggcauggacu

SEQ ID NO: 824277 - RNA, 22 nt, Human
aucaggaucugcaucauaagaa

SEQ ID NO: 824278 - RNA, 22 nt, Human
uuuaaaauuuagaccucuccac

SEQ ID NO: 824279 - RNA, 22 nt, Human
gggcagcucugcccaucagagg

SEQ ID NO: 824280 - RNA, 22 nt, Human
acccaggaggcaagguugcagu

SEQ ID NO: 824281 - RNA, 22 nt, Human
auacaaagacaaaucucaaucu

SEQ ID NO: 824282 - RNA, 22 nt, Human
gcagagaagaugcccaggcuuc

SEQ ID NO: 824283 - RNA, 22 nt, Human
aguaccaugcuuccugacuggu

SEQ ID NO: 824284 - RNA, 19 nt, Human
uagaggagaagggaagugg

SEQ ID NO: 824285 - RNA, 22 nt, Human
uacuaaauaguuuaauuccuca

SEQ ID NO: 824286 - RNA, 22 nt, Human
aauccugugugacucuggggag

SEQ ID NO: 824287 - RNA, 22 nt, Human
gggcagcuguaucugagcuuau

SEQ ID NO: 824288 - RNA, 22 nt, Human
ugaaagguuaaaaguaguauug

SEQ ID NO: 824289 - RNA, 22 nt, Human
uccaggaguggggcagaggucu

SEQ ID NO: 824290 - RNA, 22 nt, Human
guggaauguccuugaucauaag

SEQ ID NO: 824291 - RNA, 22 nt, Human
gcaggagagccagcaggcuucc

SEQ ID NO: 824292 - RNA, 22 nt, Human
guucuucaggcugugcucuaga

SEQ ID NO: 824293 - RNA, 22 nt, Human
aaaugauugucaaaguucuguu

SEQ ID NO: 824294 - RNA, 22 nt, Human
uuucacaucagagguagauuag

SEQ ID NO: 824295 - RNA, 22 nt, Human
ugaggcagguaagcaaguuuug

SEQ ID NO: 824296 - RNA, 22 nt, Human
uggcagcugugcuucauucuuu

SEQ ID NO: 824297 - RNA, 22 nt, Human
cagcucugaggaacacuccuuu

SEQ ID NO: 824298 - RNA, 22 nt, Human
gaugccucuuuuggcugaauua

SEQ ID NO: 824299 - RNA, 22 nt, Human
augcugugaaaaagaaggcuga

SEQ ID NO: 824300 - RNA, 22 nt, Human
uccaugagcuagggauucauca

SEQ ID NO: 824301 - RNA, 22 nt, Human
aggccagcaagaaagagagucu

SEQ ID NO: 824302 - RNA, 18 nt, Human
ggcagggaaaagauaggg

SEQ ID NO: 824303 - RNA, 22 nt, Human
uccaggagacacccuugugugu

SEQ ID NO: 824304 - RNA, 22 nt, Human
uccauuuucuaaguaucacuua

SEQ ID NO: 824305 - RNA, 21 nt, Human
gagugcagcaagguagagucu

SEQ ID NO: 824306 - RNA, 20 nt, Human
ggcagcuugggcagcaguua

SEQ ID NO: 824307 - RNA, 22 nt, Human
gagcagcugagcuggaaugaga

SEQ ID NO: 824308 - RNA, 17 nt, Human
uuucaucugggaccacc

SEQ ID NO: 824309 - RNA, 22 nt, Human
aucauuacuccuguaaaauugu

SEQ ID NO: 824310 - RNA, 22 nt, Human
cugccagucuaugcugcucggc

SEQ ID NO: 824311 - RNA, 22 nt, Human
uugcuuuguuacugcaguuucc

SEQ ID NO: 824312 - RNA, 21 nt, Human
gugcuuuuccuuaauguucuu

SEQ ID NO: 824313 - RNA, 17 nt, Human
gcccaggaaggacggcc

SEQ ID NO: 824314 - RNA, 22 nt, Human
cccaggagaucuggaucucguc

SEQ ID NO: 824315 - RNA, 22 nt, Human
uucuucaaauagcagggaguca

SEQ ID NO: 824316 - RNA, 22 nt, Human
aggacaggauugagcugaacug

SEQ ID NO: 824317 - RNA, 23 nt, Human
aggcccaacucugugagggcugc

SEQ ID NO: 824318 - RNA, 18 nt, Human
ucuuuggacaacuacugg

SEQ ID NO: 824319 - RNA, 22 nt, Human
gugacagucaaagacaugacuu

SEQ ID NO: 824320 - RNA, 22 nt, Human
uauuucuucgggauucaagcua

SEQ ID NO: 824321 - RNA, 22 nt, Human
aggcaguggaaggagaaagcaa

SEQ ID NO: 824322 - RNA, 22 nt, Human
auuaguaaaacauuguauaugu

SEQ ID NO: 824323 - RNA, 19 nt, Human
caggaaugagguaauggcu

SEQ ID NO: 824324 - RNA, 22 nt, Human
aaaaugagauacaguuugaaag

SEQ ID NO: 824325 - RNA, 19 nt, Human
acaaaugauguugcacuga

SEQ ID NO: 824326 - RNA, 20 nt, Human
uugagcuuuuaguacagaca

SEQ ID NO: 824327 - RNA, 22 nt, Human
aaagccauugaacuguacuuua

SEQ ID NO: 824328 - RNA, 22 nt, Human
aaguauuucguucugaaaaagu

SEQ ID NO: 824329 - RNA, 22 nt, Human
gauuucuuuaugaaguacagaa

SEQ ID NO: 824330 - RNA, 22 nt, Human
caaaucuauauguugauauucu

SEQ ID NO: 824331 - RNA, 22 nt, Human
ugaguaauaaacugucuugcuc

SEQ ID NO: 824332 - RNA, 22 nt, Human
aggugagggugccagugcaugg

SEQ ID NO: 824333 - RNA, 22 nt, Human
gaagcagcuggugagauggagc

SEQ ID NO: 824334 - RNA, 22 nt, Human
cugcugugcaacauugcaccua

SEQ ID NO: 824335 - RNA, 22 nt, Human
guaggcagguggaggagugaag

SEQ ID NO: 824336 - RNA, 22 nt, Human
gaggccaggaagcccaagauca

SEQ ID NO: 824337 - RNA, 22 nt, Human
uuugcauaggauggacauuuua

SEQ ID NO: 824338 - RNA, 22 nt, Human
uccaggagcucauccacgucaa

SEQ ID NO: 824339 - RNA, 22 nt, Human
auauucuugugauuauaaagua

SEQ ID NO: 824340 - RNA, 22 nt, Human
cccaggaacuccagagcuccuc

SEQ ID NO: 824341 - RNA, 22 nt, Human
ggagaagggacagacucagcuu

SEQ ID NO: 824342 - RNA, 22 nt, Human
ggcaugcucuuuguccacagua

SEQ ID NO: 824343 - RNA, 19 nt, Human
acuggcaguuucugcaugg

SEQ ID NO: 824344 - RNA, 21 nt, Human
acagcaagccuucacaugagu

SEQ ID NO: 824345 - RNA, 22 nt, Human
gaggcaguuccugagugacaag

SEQ ID NO: 824346 - RNA, 20 nt, Human
ccucaguguccuggacuggg

SEQ ID NO: 824347 - RNA, 22 nt, Human
ugcaugugcccacucuggcuua

SEQ ID NO: 824348 - RNA, 22 nt, Human
cgaggcagaggcugaaacggcu

SEQ ID NO: 824349 - RNA, 21 nt, Human
cucaggauggcggccuggugg

SEQ ID NO: 824350 - RNA, 19 nt, Human
aaagcagaggagcaucuga

SEQ ID NO: 824351 - RNA, 22 nt, Human
uggcaaggccacaggugcaguu

SEQ ID NO: 824352 - RNA, 20 nt, Human
uugauucaagggcugaugga

SEQ ID NO: 824353 - RNA, 22 nt, Human
uuugacaucuaagaauucuuac

SEQ ID NO: 824354 - RNA, 22 nt, Human
ucaggagacuuaugucacagug

SEQ ID NO: 824355 - RNA, 22 nt, Human
auguucuguuuuguaauucaua

SEQ ID NO: 824356 - RNA, 22 nt, Human
auuuccauagagcgucucacag

SEQ ID NO: 824357 - RNA, 22 nt, Human
uuucacauaugguuguugauug

SEQ ID NO: 824358 - RNA, 22 nt, Human
aggccagcccugggcugagaga

SEQ ID NO: 824359 - RNA, 22 nt, Human
augcuguguccuagugaaagaa

SEQ ID NO: 824360 - RNA, 22 nt, Human
uggcagcugcguuguguuucug

SEQ ID NO: 824361 - RNA, 22 nt, Human
gaggagaggcuggacgcgguga

SEQ ID NO: 824362 - RNA, 22 nt, Human
aucuuucuccauauacaucuuu

SEQ ID NO: 824363 - RNA, 22 nt, Human
aaauuauuacaagcuaguuggc

SEQ ID NO: 824364 - RNA, 22 nt, Human
aggguggcaccuggaagggaug

SEQ ID NO: 824365 - RNA, 22 nt, Human
cugcuuccauaaauaaugugcu

SEQ ID NO: 824366 - RNA, 22 nt, Human
gaaauauugggacucagagcuu

SEQ ID NO: 824367 - RNA, 22 nt, Human
cugcuuugggcagcuuuguggc

SEQ ID NO: 824368 - RNA, 22 nt, Human
gggcagcucucacagcagccaa

SEQ ID NO: 824369 - RNA, 22 nt, Human
aucaggaucacagaaacuuuua

SEQ ID NO: 824370 - RNA, 22 nt, Human
ggaaaugacuuggugcuucguu

SEQ ID NO: 824371 - RNA, 22 nt, Human
aaaggccagguuggcugguauu

SEQ ID NO: 824372 - RNA, 22 nt, Human
uauuuccaagcugaauccaaug

SEQ ID NO: 824373 - RNA, 22 nt, Human
acccaggacucucuuccaguag

SEQ ID NO: 824374 - RNA, 21 nt, Human
agucuguuaggaugacucuga

SEQ ID NO: 824375 - RNA, 22 nt, Human
ccacaucucgguccccucuuug

SEQ ID NO: 824376 - RNA, 22 nt, Human
cugcuguggccagccaggucaa

SEQ ID NO: 824377 - RNA, 22 nt, Human
cccaggagauaacguucccaag

SEQ ID NO: 824378 - RNA, 22 nt, Human
cuguauuucccacauucucuau

SEQ ID NO: 824379 - RNA, 22 nt, Human
agggcagccucucagccuaggu

SEQ ID NO: 824380 - RNA, 22 nt, Human
uuauuauuggugaguuaaggaa

SEQ ID NO: 824381 - RNA, 17 nt, Human
ggcagccucaggcguuu

SEQ ID NO: 824382 - RNA, 22 nt, Human
cuggcagucugccucuucacug

SEQ ID NO: 824383 - RNA, 22 nt, Human
agacagugcaagaagagcaggc

SEQ ID NO: 824384 - RNA, 22 nt, Human
ugcccaggguuucuaagagcag

SEQ ID NO: 824385 - RNA, 22 nt, Human
gcagcuucaguaggugaagaca

SEQ ID NO: 824386 - RNA, 22 nt, Human
uaacaucuuuagcagcucgaac

SEQ ID NO: 824387 - RNA, 22 nt, Human
cacaaaugguuguagacauuaa

SEQ ID NO: 824388 - RNA, 22 nt, Human
uauuuuaaagugaagggucuug

SEQ ID NO: 824389 - RNA, 19 nt, Human
agaaguuagacauugcaau

SEQ ID NO: 824390 - RNA, 22 nt, Human
gucaggauuauaauccccaugg

SEQ ID NO: 824391 - RNA, 22 nt, Human
aggcagauuacuugaggccagg

SEQ ID NO: 824392 - RNA, 22 nt, Human
agacgagggccuggcacacagu

SEQ ID NO: 824393 - RNA, 22 nt, Human
aucugcaggaaugugugcagag

SEQ ID NO: 824394 - RNA, 22 nt, Human
cagagaaaaaauccugcucuca

SEQ ID NO: 824395 - RNA, 22 nt, Human
ggagaggaaaugccagcacuuc

SEQ ID NO: 824396 - RNA, 22 nt, Human
caaggccauaagagauacaaaa

SEQ ID NO: 824397 - RNA, 22 nt, Human
gcccaggagguugggcugugca

SEQ ID NO: 824398 - RNA, 22 nt, Human
cauauaaauacaacauguguua

SEQ ID NO: 824399 - RNA, 20 nt, Human
ccucaggaugagggugagca

SEQ ID NO: 824400 - RNA, 20 nt, Human
cuguggaauuuuaccaugcg

SEQ ID NO: 824401 - RNA, 23 nt, Human
caguggagacucaugcuuccuua

SEQ ID NO: 824402 - RNA, 19 nt, Human
cuuugucagaacaugcuuc

SEQ ID NO: 824403 - RNA, 22 nt, Human
uuacaagauaaccugaugcugu

SEQ ID NO: 824404 - RNA, 22 nt, Human
aagggaggccagagguuuugca

SEQ ID NO: 824405 - RNA, 22 nt, Human
cccaagagcuucuaggacgcug

SEQ ID NO: 824406 - RNA, 22 nt, Human
uacacacaugcauuugccuuau

SEQ ID NO: 824407 - RNA, 22 nt, Human
augcuguggaaguuccugaagc

SEQ ID NO: 824408 - RNA, 22 nt, Human
aggccagcacgacagccgcagg

SEQ ID NO: 824409 - RNA, 22 nt, Human
caggauggagaguuguugguug

SEQ ID NO: 824410 - RNA, 22 nt, Human
uggcagcugaggggaggcuuug

SEQ ID NO: 824411 - RNA, 22 nt, Human
ugauuuccuaggucuggagaag

SEQ ID NO: 824412 - RNA, 22 nt, Human
guaguucugcagugucaccuga

SEQ ID NO: 824413 - RNA, 22 nt, Human
gcagaggagaugaagauacuuu

SEQ ID NO: 824414 - RNA, 16 nt, Human
ucccaggaggcggaac

SEQ ID NO: 824415 - RNA, 23 nt, Human
acagaaaguucugcuggacagag

SEQ ID NO: 824416 - RNA, 22 nt, Human
auguuucagauacagaucaaau

SEQ ID NO: 824417 - RNA, 22 nt, Human
cagagccacuuggagaugagaa

SEQ ID NO: 824418 - RNA, 22 nt, Human
acuuuugguucuguaacuguga

SEQ ID NO: 824419 - RNA, 22 nt, Human
gacccaggagagaggguugcau

SEQ ID NO: 824420 - RNA, 22 nt, Human
aggaguggugcaggaccugcca

SEQ ID NO: 824421 - RNA, 22 nt, Human
gcaggagaaaugaagauugggu

SEQ ID NO: 824422 - RNA, 22 nt, Human
aagcaccuggguuauaucuuag

SEQ ID NO: 824423 - RNA, 22 nt, Human
gugcugugucuaucaggaauaa

SEQ ID NO: 824424 - RNA, 22 nt, Human
cuugaacucaaugugaggaaga

SEQ ID NO: 824425 - RNA, 22 nt, Human
gcuuggcauugaccauuaucau

SEQ ID NO: 824426 - RNA, 22 nt, Human
aggcaguggaugucaggaaugg

SEQ ID NO: 824427 - RNA, 22 nt, Human
cagggagggaggaaaauuugcu

SEQ ID NO: 824428 - RNA, 22 nt, Human
gcccaggauucuuucuuccuua

SEQ ID NO: 824429 - RNA, 22 nt, Human
aggaugagaagauuggaaucuu

SEQ ID NO: 824430 - RNA, 22 nt, Human
uggaggaaguggcuggccagaa

SEQ ID NO: 824431 - RNA, 22 nt, Human
auugcuaggaacagguugcacc

SEQ ID NO: 824432 - RNA, 22 nt, Human
cuuugaagagauuacugugcuc

SEQ ID NO: 824433 - RNA, 19 nt, Human
accaggagacagugagcuu

SEQ ID NO: 824434 - RNA, 20 nt, Human
gggcaguucaaugccacucu

SEQ ID NO: 824435 - RNA, 22 nt, Human
gaaggccacuuuguguugagaa

SEQ ID NO: 824436 - RNA, 22 nt, Human
uaaagcacauaucuuacaauaa

SEQ ID NO: 824437 - RNA, 20 nt, Human
gccaggagggugugaugagc

SEQ ID NO: 824438 - RNA, 22 nt, Human
aucauucuauuguugagcugcc

SEQ ID NO: 824439 - RNA, 22 nt, Human
uccucagaaaccccugugaggu

SEQ ID NO: 824440 - RNA, 22 nt, Human
aaagccauuacaaaauuucaua

SEQ ID NO: 824441 - RNA, 22 nt, Human
auuuagaacuuuguuugccaau

SEQ ID NO: 824442 - RNA, 22 nt, Human
agcgagggaggucugaggacag

SEQ ID NO: 824443 - RNA, 22 nt, Human
uugaaagaggcaaaguuugauc

SEQ ID NO: 824444 - RNA, 22 nt, Human
augauguugauaaauuacuuua

SEQ ID NO: 824445 - RNA, 22 nt, Human
gaggggaaagugugaggcugcg

SEQ ID NO: 824446 - RNA, 22 nt, Human
aggcagagcuggguuuugaaau

SEQ ID NO: 824447 - RNA, 22 nt, Human
ggaagaggcugaggccaugcug

SEQ ID NO: 824448 - RNA, 22 nt, Human
cucuucuugccugaugaggcag

SEQ ID NO: 824449 - RNA, 22 nt, Human
aagcagaguccccuucccaugg

SEQ ID NO: 824450 - RNA, 22 nt, Human
acauugcugcauucuccuuccc

SEQ ID NO: 824451 - RNA, 22 nt, Human
cccaggaguuggaggcuacggu

SEQ ID NO: 824452 - RNA, 22 nt, Human
gaggagcugggcugagaggguc

SEQ ID NO: 824453 - RNA, 22 nt, Human
aguuauaaucugcuacugauau

SEQ ID NO: 824454 - RNA, 22 nt, Human
agucucuuuaaucacagugucu

SEQ ID NO: 824455 - RNA, 22 nt, Human
aggcagacugugcgggaagagu

SEQ ID NO: 824456 - RNA, 22 nt, Human
agugagggaugaagaacugcgg

SEQ ID NO: 824457 - RNA, 22 nt, Human
ccccaggagauuugggagcaca

SEQ ID NO: 824458 - RNA, 22 nt, Human
uggugguuaugcgcuuuguggg

SEQ ID NO: 824459 - RNA, 22 nt, Human
uagggaggcuacuucuuguagg

SEQ ID NO: 824460 - RNA, 22 nt, Human
gugggagcuuuggcaucaggcu

SEQ ID NO: 824461 - RNA, 22 nt, Human
ugaaguuauauauguugaaaau

SEQ ID NO: 824462 - RNA, 22 nt, Human
gauauuuugagaaauccuauga

SEQ ID NO: 824463 - RNA, 22 nt, Human
cccaggagaccuagaucuguuu

SEQ ID NO: 824464 - RNA, 22 nt, Human
uuucagcugguaaaggaguagc

SEQ ID NO: 824465 - RNA, 22 nt, Human
ggcaagcucaggccucaggugu

SEQ ID NO: 824466 - RNA, 22 nt, Human
uuuguuuacucauucauugaug

SEQ ID NO: 824467 - RNA, 22 nt, Human
cccuugcacauuugucuuuaau

SEQ ID NO: 824468 - RNA, 22 nt, Human
cagcuccugaggacugcuggga

SEQ ID NO: 824469 - RNA, 22 nt, Human
cccaggaggucgaagcugcagu

SEQ ID NO: 824470 - RNA, 22 nt, Human
cccagaaggucgaggcugcagu

SEQ ID NO: 824471 - RNA, 22 nt, Human
ucugcaggcuguacaggaagca

SEQ ID NO: 824472 - RNA, 22 nt, Human
uagggcaggggaggaaucugaa

SEQ ID NO: 824473 - RNA, 17 nt, Human
gccaggagguuugagcu

SEQ ID NO: 824474 - RNA, 22 nt, Human
gaggccagaagugccucgggcu

SEQ ID NO: 824475 - RNA, 22 nt, Human
aagacauugucauuuuauaauu

SEQ ID NO: 824476 - RNA, 22 nt, Human
caggaugggauguagugggccc

SEQ ID NO: 824477 - RNA, 22 nt, Human
aguucucagcuuaguaugcugu

SEQ ID NO: 824478 - RNA, 22 nt, Human
cuuguccccagcagguugguuu

SEQ ID NO: 824479 - RNA, 22 nt, Human
ugccuguguccccuucuuggca

SEQ ID NO: 824480 - RNA, 22 nt, Human
gaggagcugggucagggagaca

SEQ ID NO: 824481 - RNA, 22 nt, Human
caguucuuuguggggaguucuc

SEQ ID NO: 824482 - RNA, 23 nt, Human
cagggaggagauacuguguaucu

SEQ ID NO: 824483 - RNA, 22 nt, Human
gcacaauuauuuaugcaguaug

SEQ ID NO: 824484 - RNA, 22 nt, Human
cuuuccaaugcauuuccaaugu

SEQ ID NO: 824485 - RNA, 19 nt, Human
uggcagggagaguuugaag

SEQ ID NO: 824486 - RNA, 22 nt, Human
agaaaugaagcaggaguuauua

SEQ ID NO: 824487 - RNA, 22 nt, Human
gaaggccacggaauggagcugg

SEQ ID NO: 824488 - RNA, 22 nt, Human
agaggaggaagagcuuuaaaau

SEQ ID NO: 824489 - RNA, 22 nt, Human
guucuucaucauuaacacucug

SEQ ID NO: 824490 - RNA, 22 nt, Human
ugcuuuggaucuauuugcugag

SEQ ID NO: 824491 - RNA, 22 nt, Human
agacagugauguaagcaggagu

SEQ ID NO: 824492 - RNA, 22 nt, Human
caggcagcugacugucagauau

SEQ ID NO: 824493 - RNA, 19 nt, Human
agccuggcuuugcucugcu

SEQ ID NO: 824494 - RNA, 22 nt, Human
uuugacaucaauacccuagaau

SEQ ID NO: 824495 - RNA, 22 nt, Human
acucaggaaaugagaggcucuc

SEQ ID NO: 824496 - RNA, 23 nt, Human
ggcagcucucaucugaugacuga

SEQ ID NO: 824497 - RNA, 22 nt, Human
uugaagagugccuuccagacau

SEQ ID NO: 824498 - RNA, 21 nt, Human
aggcaucuaaagagaguagac

SEQ ID NO: 824499 - RNA, 22 nt, Human
cccuuagcucaauuucuugccc

SEQ ID NO: 824500 - RNA, 22 nt, Human
cagaggcaggauaagaacugcg

SEQ ID NO: 824501 - RNA, 22 nt, Human
agugauggugagugagaagcuc

SEQ ID NO: 824502 - RNA, 22 nt, Human
gagaggggcgcgcagcucgcga

SEQ ID NO: 824503 - RNA, 20 nt, Human
aggcaccugucacaggugag

SEQ ID NO: 824504 - RNA, 22 nt, Human
uuugaauagaggccccucagaa

SEQ ID NO: 824505 - RNA, 20 nt, Human
cuucuucauuaacccuacug

SEQ ID NO: 824506 - RNA, 19 nt, Human
acauuuaaauucagaucuc

SEQ ID NO: 824507 - RNA, 22 nt, Human
ggagcugugcagugacuacaga

SEQ ID NO: 824508 - RNA, 22 nt, Human
ucccaggacuuccaguuggagg

SEQ ID NO: 824509 - RNA, 22 nt, Human
ggucagagggugggcugccugu

SEQ ID NO: 824510 - RNA, 22 nt, Human
gcaaguuauuuccauuuaaagc

SEQ ID NO: 824511 - RNA, 22 nt, Human
gcucaggaaaacagucuaguaa

SEQ ID NO: 824512 - RNA, 22 nt, Human
ucagauggcacacagagccugc

SEQ ID NO: 824513 - RNA, 22 nt, Human
uaaugcuuaacagcuggcuuuu

SEQ ID NO: 824514 - RNA, 22 nt, Human
uggaguuccuuugaaaggcucu

SEQ ID NO: 824515 - RNA, 22 nt, Human
auucuucacaaauauauagaag

SEQ ID NO: 824516 - RNA, 22 nt, Human
caaguaaacaauaugugauuca

SEQ ID NO: 824517 - RNA, 21 nt, Human
ggcagccucuguggaagggga

SEQ ID NO: 824518 - RNA, 22 nt, Human
cucaggaugcaauuccaucaag

SEQ ID NO: 824519 - RNA, 22 nt, Human
uuaguuuucccaucuuuauggu

SEQ ID NO: 824520 - RNA, 22 nt, Human
ucuacagacagagcagguggga

SEQ ID NO: 824521 - RNA, 22 nt, Human
guucuugccagcauccucaggu

SEQ ID NO: 824522 - RNA, 22 nt, Human
caggcagcuagauuuauaacaa

SEQ ID NO: 824523 - RNA, 20 nt, Human
ugaaggccagcagcauaggg

SEQ ID NO: 824524 - RNA, 22 nt, Human
ggauggcauguugggcucuguu

SEQ ID NO: 824525 - RNA, 22 nt, Human
auugucuuuccacugagaaguu

SEQ ID NO: 824526 - RNA, 22 nt, Human
gaggaggcuuccgggaggcacg

SEQ ID NO: 824527 - RNA, 22 nt, Human
aaauuauuaugccccucuauaa

SEQ ID NO: 824528 - RNA, 22 nt, Human
ugucucaguacacuccgauguu

SEQ ID NO: 824529 - RNA, 22 nt, Human
gaggggaagacuucuggacagu

SEQ ID NO: 824530 - RNA, 22 nt, Human
aucaggaucagggcuagcagag

SEQ ID NO: 824531 - RNA, 22 nt, Human
uuuguaugugauaagacuauuc

SEQ ID NO: 824532 - RNA, 19 nt, Human
uaucuguuuccugcuuguc

SEQ ID NO: 824533 - RNA, 22 nt, Human
aaguaaaauguuuccuuuauua

SEQ ID NO: 824534 - RNA, 22 nt, Human
uuuguaaauagcaguacucaug

SEQ ID NO: 824535 - RNA, 22 nt, Human
uugaaaggaauacagaggccua

SEQ ID NO: 824536 - RNA, 22 nt, Human
ggccagcugggccaccaggugc

SEQ ID NO: 824537 - RNA, 22 nt, Human
aucaggaugacaacugcugggu

SEQ ID NO: 824538 - RNA, 22 nt, Human
uuaaaauagccagugccccucu

SEQ ID NO: 824539 - RNA, 22 nt, Human
gcagaggccaggccaccagcaa

SEQ ID NO: 824540 - RNA, 17 nt, Human
guccuacccauggucua

SEQ ID NO: 824541 - RNA, 22 nt, Human
uaacauuagguagacauaagcc

SEQ ID NO: 824542 - RNA, 22 nt, Human
aucuuucagggccauuuguauu

SEQ ID NO: 824543 - RNA, 22 nt, Human
ccucuucuaggacguccuugug

SEQ ID NO: 824544 - RNA, 22 nt, Human
uugcauuuuuagaugcuucugu

SEQ ID NO: 824545 - RNA, 22 nt, Human
ucuccucucuuaccugguacaa

SEQ ID NO: 824546 - RNA, 22 nt, Human
ucccaggacaugggcucugcuc

SEQ ID NO: 824547 - RNA, 22 nt, Human
cccuguacagucucuguggcac

SEQ ID NO: 824548 - RNA, 22 nt, Human
cccaggagagaggggauaaagc

SEQ ID NO: 824549 - RNA, 22 nt, Human
cugcuaaaccucucugagagcu

SEQ ID NO: 824550 - RNA, 22 nt, Human
cuugaaagauuuggccucugug

SEQ ID NO: 824551 - RNA, 17 nt, Human
aaucuguuuacagucag

SEQ ID NO: 824552 - RNA, 22 nt, Human
gaaggccacaagagaaguuaag

SEQ ID NO: 824553 - RNA, 22 nt, Human
acccaggaaaacauggugcaga

SEQ ID NO: 824554 - RNA, 22 nt, Human
aaaacaguuuaggcaucacagu

SEQ ID NO: 824555 - RNA, 22 nt, Human
uuuccucauuuaucugcuggga

SEQ ID NO: 824556 - RNA, 22 nt, Human
cuggcuguauuaguuugauccu

SEQ ID NO: 824557 - RNA, 22 nt, Human
gaggcagcagaacauggaagag

SEQ ID NO: 824558 - RNA, 22 nt, Human
uugcugaauugaauccuuuggu

SEQ ID NO: 824559 - RNA, 22 nt, Human
ugaaggccucugguacaugcca

SEQ ID NO: 824560 - RNA, 22 nt, Human
aggagaggcaucaagaaaaucg

SEQ ID NO: 824561 - RNA, 22 nt, Human
gcagcuccuccugggcuggaga

SEQ ID NO: 824562 - RNA, 22 nt, Human
uucuucaaccaucuacauaaac

SEQ ID NO: 824563 - RNA, 22 nt, Human
gauuuuauauggcauacugugg

SEQ ID NO: 824564 - RNA, 22 nt, Human
ccaugagacagcaacugaaagu

SEQ ID NO: 824565 - RNA, 22 nt, Human
guuuucugauuagcaaaucuga

SEQ ID NO: 824566 - RNA, 22 nt, Human
gcagcugcaauaggcaucaagc

SEQ ID NO: 824567 - RNA, 22 nt, Human
gaggaacccagcugggguugcc

SEQ ID NO: 824568 - RNA, 22 nt, Human
ucucaggacuuugggaagcuca

SEQ ID NO: 824569 - RNA, 22 nt, Human
agcucccagagcucgagaguaa

SEQ ID NO: 824570 - RNA, 22 nt, Human
caggcagccuucucgucucaca

SEQ ID NO: 824571 - RNA, 22 nt, Human
ugaaaugagauagauaaucagg

SEQ ID NO: 824572 - RNA, 22 nt, Human
ucucauugguauauacaugugu

SEQ ID NO: 824573 - RNA, 22 nt, Human
ggccagcucuuguccacggagg

SEQ ID NO: 824574 - RNA, 22 nt, Human
ggaggggagucucccaaagccg

SEQ ID NO: 824575 - RNA, 22 nt, Human
uggggcucaccuaggcuggaag

SEQ ID NO: 824576 - RNA, 22 nt, Human
gcauguguuauuuuauguauga

SEQ ID NO: 824577 - RNA, 22 nt, Human
aggcuagcaaugggagaugagu

SEQ ID NO: 824578 - RNA, 22 nt, Human
uauuuccaaaagccuauuauga

SEQ ID NO: 824579 - RNA, 20 nt, Human
uaggcagcuugacccuuggu

SEQ ID NO: 824580 - RNA, 18 nt, Human
gcaggagauggguggggu

SEQ ID NO: 824581 - RNA, 22 nt, Human
ucuuccucuagaucugaggccc

SEQ ID NO: 824582 - RNA, 23 nt, Human
agaugagccaacaccuccaugcc

SEQ ID NO: 824583 - RNA, 22 nt, Human
caugcugugcaucuugaugacc

SEQ ID NO: 824584 - RNA, 22 nt, Human
ucugagaggcaucugcacuucu

SEQ ID NO: 824585 - RNA, 21 nt, Human
agcagaggggacauguuugau

SEQ ID NO: 824586 - RNA, 22 nt, Human
guugacagcuggugagcugcua

SEQ ID NO: 824587 - RNA, 22 nt, Human
gcucaggaaauaguuuaguguu

SEQ ID NO: 824588 - RNA, 22 nt, Human
cccaggaaugggaaggaggaau

SEQ ID NO: 824589 - RNA, 22 nt, Human
gaccuggaggauccucuucuug

SEQ ID NO: 824590 - RNA, 22 nt, Human
uuauuugcccauguuuagcaga

SEQ ID NO: 824591 - RNA, 22 nt, Human
gugucccaggccucuggaauua

SEQ ID NO: 824592 - RNA, 23 nt, Human
uggaggaaacacaucagaagacc

SEQ ID NO: 824593 - RNA, 22 nt, Human
ccaggagauaagcugaguuuau

SEQ ID NO: 824594 - RNA, 18 nt, Human
gucacuguguuucugagc

SEQ ID NO: 824595 - RNA, 22 nt, Human
cuguaaauaugaagaauauaug

SEQ ID NO: 824596 - RNA, 22 nt, Human
uuaaaugaggcugauguagauu

SEQ ID NO: 824597 - RNA, 22 nt, Human
uuucaugaggggcaaaaucuca

SEQ ID NO: 824598 - RNA, 22 nt, Human
agucuuuccugcuugacuguuc

SEQ ID NO: 824599 - RNA, 21 nt, Human
auucugaguugucagucuuca

SEQ ID NO: 824600 - RNA, 22 nt, Human
ggaagaggaggagccaggcuuu

SEQ ID NO: 824601 - RNA, 20 nt, Human
guggcaggcagugaaggagc

SEQ ID NO: 824602 - RNA, 22 nt, Human
ugaggcagaguaagauacauga

SEQ ID NO: 824603 - RNA, 22 nt, Human
uuccaugacaccgagggaaguc

SEQ ID NO: 824604 - RNA, 22 nt, Human
uccaugagagguaacuuuacaa

SEQ ID NO: 824605 - RNA, 23 nt, Human
accaggagccaagaucucccugg

SEQ ID NO: 824606 - RNA, 20 nt, Human
cuucuucaguaguuuguucu

SEQ ID NO: 824607 - RNA, 22 nt, Human
uucucagaggagucgggagcug

SEQ ID NO: 824608 - RNA, 22 nt, Human
cagcagaggcacgucugugaau

SEQ ID NO: 824609 - RNA, 22 nt, Human
uccaggagaggccugaccaggu

SEQ ID NO: 824610 - RNA, 22 nt, Human
ugaggcaguugagcuuccugag

SEQ ID NO: 824611 - RNA, 22 nt, Human
uccaggaguuugagacugcagu

SEQ ID NO: 824612 - RNA, 22 nt, Human
auuuccaggagaaaggauuuua

SEQ ID NO: 824613 - RNA, 22 nt, Human
cucaggauuuaaaggggcacuc

SEQ ID NO: 824614 - RNA, 22 nt, Human
uauagccauuuccaguggcauc

SEQ ID NO: 824615 - RNA, 22 nt, Human
ccaggauggggagcagauagaa

SEQ ID NO: 824616 - RNA, 22 nt, Human
uuugaaguucccccauaucaga

SEQ ID NO: 824617 - RNA, 22 nt, Human
uggcagcuccggguaggggcug

SEQ ID NO: 824618 - RNA, 22 nt, Human
uacugcaugguggaguggagcu

SEQ ID NO: 824619 - RNA, 22 nt, Human
acagugcuaaacacuucuugaa

SEQ ID NO: 824620 - RNA, 22 nt, Human
gcugcccaggagagguggggcu

SEQ ID NO: 824621 - RNA, 22 nt, Human
augcugugauuguagaaauauu

SEQ ID NO: 824622 - RNA, 18 nt, Human
cugcugugucgucugggc

SEQ ID NO: 824623 - RNA, 22 nt, Human
acacauauucauauguacuuac

SEQ ID NO: 824624 - RNA, 22 nt, Human
gcccaggacucagggugucgcg

SEQ ID NO: 824625 - RNA, 20 nt, Human
gagauggacagaugaagggg

SEQ ID NO: 824626 - RNA, 21 nt, Human
uucuucaaagaagaaggcaca

SEQ ID NO: 824627 - RNA, 22 nt, Human
ggagggaaugucuagcauucuu

SEQ ID NO: 824628 - RNA, 22 nt, Human
gcugauguuuaguugauguuac

SEQ ID NO: 824629 - RNA, 22 nt, Human
ccaugagcuucaacugacacag

SEQ ID NO: 824630 - RNA, 22 nt, Human
cauuuguaauacugacuugcag

SEQ ID NO: 824631 - RNA, 22 nt, Human
gaaggccauuuuuagguagaau

SEQ ID NO: 824632 - RNA, 22 nt, Human
aagaacuuccuaauauauuuuc

SEQ ID NO: 824633 - RNA, 22 nt, Human
ucucugaguaagugacaguuca

SEQ ID NO: 824634 - RNA, 22 nt, Human
uaaggccaauuacauauguuca

SEQ ID NO: 824635 - RNA, 20 nt, Human
ugugcaggagagugaggcug

SEQ ID NO: 824636 - RNA, 22 nt, Human
cuucuucauguauugauagucu

SEQ ID NO: 824637 - RNA, 22 nt, Human
uuaacauuguccuuagcagauu

SEQ ID NO: 824638 - RNA, 22 nt, Human
aggaaaacacaguauugaugga

SEQ ID NO: 824639 - RNA, 22 nt, Human
aggaagcuggugugaggaugaa

SEQ ID NO: 824640 - RNA, 22 nt, Human
cagcuccugggccaucuccuag

SEQ ID NO: 824641 - RNA, 22 nt, Human
ggauggcagucugcaugagaaa

SEQ ID NO: 824642 - RNA, 22 nt, Human
cugcuguguuucugcuagaaaa

SEQ ID NO: 824643 - RNA, 19 nt, Human
agggaguuuauauuugcac

SEQ ID NO: 824644 - RNA, 22 nt, Human
uuaauuaaauucaugagcauug

SEQ ID NO: 824645 - RNA, 22 nt, Human
aaaggccauuacuugcuuuuag

SEQ ID NO: 824646 - RNA, 22 nt, Human
acuugcugguggcauuuacagu

SEQ ID NO: 824647 - RNA, 22 nt, Human
uuugacauggaauaacucauuu

SEQ ID NO: 824648 - RNA, 22 nt, Human
cuacccaggcuuagagggcugg

SEQ ID NO: 824649 - RNA, 22 nt, Human
cuuaaauuuucaucuacaagaa

SEQ ID NO: 824650 - RNA, 22 nt, Human
uuucacuagaacguucuuguuu

SEQ ID NO: 824651 - RNA, 22 nt, Human
aggcaggcugcuauggaguaga

SEQ ID NO: 824652 - RNA, 22 nt, Human
aauuuccagaucagaugacuca

SEQ ID NO: 824653 - RNA, 22 nt, Human
aaaguauuugugauuuuuacca

SEQ ID NO: 824654 - RNA, 19 nt, Human
uggggcuguguuuugaccc

SEQ ID NO: 824655 - RNA, 20 nt, Human
ccagaagagaugaucaucca

SEQ ID NO: 824656 - RNA, 19 nt, Human
cccaggagucuggcugguu

SEQ ID NO: 824657 - RNA, 21 nt, Human
ucaggagagcccaucuacaaa

SEQ ID NO: 824658 - RNA, 22 nt, Human
auguuucaccagcaaauuaccu

SEQ ID NO: 824659 - RNA, 22 nt, Human
ugaggcaggaguucaggcugcg

SEQ ID NO: 824660 - RNA, 22 nt, Human
gggcagcucuuugguauccuuc

SEQ ID NO: 824661 - RNA, 22 nt, Human
uuuccagagcaugucugcucag

SEQ ID NO: 824662 - RNA, 22 nt, Human
aaggagaaaugguagaugugca

SEQ ID NO: 824663 - RNA, 22 nt, Human
cagcugccccgcuggcugacca

SEQ ID NO: 824664 - RNA, 22 nt, Human
ucaggauggcuucugcaucaaa

SEQ ID NO: 824665 - RNA, 22 nt, Human
aaauuauaggugccaccuugga

SEQ ID NO: 824666 - RNA, 21 nt, Human
cccaggaguccuauuuaaaug

SEQ ID NO: 824667 - RNA, 22 nt, Human
cagcaggaccauugaggcauca

SEQ ID NO: 824668 - RNA, 19 nt, Human
ggcagcuggacgcuguuca

SEQ ID NO: 824669 - RNA, 22 nt, Human
aucugccucuucuucauugcga

SEQ ID NO: 824670 - RNA, 22 nt, Human
uuuggaauauuaaaaugucuca

SEQ ID NO: 824671 - RNA, 22 nt, Human
uuucacauuuaggcgugaauug

SEQ ID NO: 824672 - RNA, 22 nt, Human
ggcagcuauuccaagcagcacu

SEQ ID NO: 824673 - RNA, 22 nt, Human
agccagcuguucuggggcagca

SEQ ID NO: 824674 - RNA, 22 nt, Human
uucucugaucuugcuagacuga

SEQ ID NO: 824675 - RNA, 22 nt, Human
cugcuguggaugcaggaccuca

SEQ ID NO: 824676 - RNA, 22 nt, Human
cagagacauuaagugccaugau

SEQ ID NO: 824677 - RNA, 22 nt, Human
ggaggcagaacuucccgucagu

SEQ ID NO: 824678 - RNA, 22 nt, Human
uuccaagagcuuuaauuguuga

SEQ ID NO: 824679 - RNA, 22 nt, Human
cccaggaguucgaggcuguagu

SEQ ID NO: 824680 - RNA, 22 nt, Human
ugagccugguugcagugucugg

SEQ ID NO: 824681 - RNA, 18 nt, Human
acugugugaauuagcucc

SEQ ID NO: 824682 - RNA, 22 nt, Human
ggaggcgauccugggaaacacc

SEQ ID NO: 824683 - RNA, 23 nt, Human
aggcagcuggguagcaucuuucu

SEQ ID NO: 824684 - RNA, 22 nt, Human
gaggcagccucaguggaccucg

SEQ ID NO: 824685 - RNA, 22 nt, Human
caguucuuauuuggccaguguc

SEQ ID NO: 824686 - RNA, 22 nt, Human
ggagaggagauuguggcauuuu

SEQ ID NO: 824687 - RNA, 22 nt, Human
uuugaaagggaaauaaacuccu

SEQ ID NO: 824688 - RNA, 22 nt, Human
uucaauucugcucugaucuuag

SEQ ID NO: 824689 - RNA, 22 nt, Human
gucuucuuuucagucugcuugu

SEQ ID NO: 824690 - RNA, 22 nt, Human
auugaggcagcauaguucaggg

SEQ ID NO: 824691 - RNA, 22 nt, Human
acaauacaggcuucuggacuua

SEQ ID NO: 824692 - RNA, 22 nt, Human
acagucuugagcaucagccaga

SEQ ID NO: 824693 - RNA, 22 nt, Human
aggaugaggcuggcaggucuug

SEQ ID NO: 824694 - RNA, 22 nt, Human
ccaggcugggcuacaaguugag

SEQ ID NO: 824695 - RNA, 22 nt, Human
cagaaccaggaacugauggaga

SEQ ID NO: 824696 - RNA, 22 nt, Human
ugccuguguugauuacuuuguc

SEQ ID NO: 824697 - RNA, 22 nt, Human
uuagcaucugcuguaagcuuau

SEQ ID NO: 824698 - RNA, 23 nt, Human
acuuuauugaccccaggucaguu

SEQ ID NO: 824699 - RNA, 22 nt, Human
aaaaugaugcuguaauuuggca

SEQ ID NO: 824700 - RNA, 22 nt, Human
cucuuaguaaugccaugaagca

SEQ ID NO: 824701 - RNA, 22 nt, Human
uugaacauuggcaauuucauau

SEQ ID NO: 824702 - RNA, 22 nt, Human
caggcagcaucagucugcugua

SEQ ID NO: 824703 - RNA, 22 nt, Human
uucauguguauggaacauuuuu

SEQ ID NO: 824704 - RNA, 22 nt, Human
ccagcagaggggcggagugcag

SEQ ID NO: 824705 - RNA, 22 nt, Human
ccucaggaaccacauugcugcu

SEQ ID NO: 824706 - RNA, 22 nt, Human
agacaaaugguaauuaugucua

SEQ ID NO: 824707 - RNA, 22 nt, Human
auucugauaucuuauucuagcu

SEQ ID NO: 824708 - RNA, 22 nt, Human
aaucauaauuguauacauucau

SEQ ID NO: 824709 - RNA, 22 nt, Human
gagcgauguggguauguagaag

SEQ ID NO: 824710 - RNA, 22 nt, Human
agccagcugugggcucaggcgg

SEQ ID NO: 824711 - RNA, 22 nt, Human
cagaggauucccuagugaccug

SEQ ID NO: 824712 - RNA, 22 nt, Human
uguuuuaagagcgcacuuuaua

SEQ ID NO: 824713 - RNA, 22 nt, Human
aaggcagcaggauuuggugacu

SEQ ID NO: 824714 - RNA, 22 nt, Human
agcugcccagcuaggaagaagg

SEQ ID NO: 824715 - RNA, 22 nt, Human
ucugggaacugagcuccccuag

SEQ ID NO: 824716 - RNA, 22 nt, Human
gucauucuuaacaacucaguag

SEQ ID NO: 824717 - RNA, 23 nt, Human
ucucaggacacacaugucuauca

SEQ ID NO: 824718 - RNA, 22 nt, Human
ugaugaauaaacuugagaguca

SEQ ID NO: 824719 - RNA, 22 nt, Human
ucauuuguaccauuuuuuaaga

SEQ ID NO: 824720 - RNA, 22 nt, Human
caggaaagggaugggcugccac

SEQ ID NO: 824721 - RNA, 18 nt, Human
aggcagacacuagagguc

SEQ ID NO: 824722 - RNA, 19 nt, Human
gagcgcagagggcagggga

SEQ ID NO: 824723 - RNA, 22 nt, Human
auuugcuuaucuccacaguugu

SEQ ID NO: 824724 - RNA, 22 nt, Human
agugcuuugguauagaacuauu

SEQ ID NO: 824725 - RNA, 22 nt, Human
cauuuucagcacccaucugaaa

SEQ ID NO: 824726 - RNA, 22 nt, Human
auacauacauguaugcacauac

SEQ ID NO: 824727 - RNA, 22 nt, Human
ugcacauucacuuagguauugu

SEQ ID NO: 824728 - RNA, 22 nt, Human
ucugcagguguuggaaggguca

SEQ ID NO: 824729 - RNA, 22 nt, Human
cagaguggcacucugcuggaug

SEQ ID NO: 824730 - RNA, 22 nt, Human
caagaugugccuaaucagaccu

SEQ ID NO: 824731 - RNA, 22 nt, Human
caagagagaugcagcucacuca

SEQ ID NO: 824732 - RNA, 19 nt, Human
ccaggagagcuuggagaag

SEQ ID NO: 824733 - RNA, 22 nt, Human
uugcagcuucgagucuaucugu

SEQ ID NO: 824734 - RNA, 22 nt, Human
uucuucucucauagauuaaggu

SEQ ID NO: 824735 - RNA, 22 nt, Human
uggcagcuaucuuuaaugagau

SEQ ID NO: 824736 - RNA, 22 nt, Human
gggcagcucagccaccaugcag

SEQ ID NO: 824737 - RNA, 22 nt, Human
gccaggaguucagaugcauguu

SEQ ID NO: 824738 - RNA, 23 nt, Human
acagacaacacugaugagagaaa

SEQ ID NO: 824739 - RNA, 22 nt, Human
gggaagcaggugcagcucgccu

SEQ ID NO: 824740 - RNA, 22 nt, Human
auucauaacggcaaaugucacc

SEQ ID NO: 824741 - RNA, 16 nt, Human
auuuccagauuaugca

SEQ ID NO: 824742 - RNA, 22 nt, Human
agacaguguguguauauauggu

SEQ ID NO: 824743 - RNA, 22 nt, Human
uggggcuccuccuggcaggagg

SEQ ID NO: 824744 - RNA, 23 nt, Human
uuugaaaguaucaacucgccuga

SEQ ID NO: 824745 - RNA, 19 nt, Human
agucuuucccacucgucuu

SEQ ID NO: 824746 - RNA, 22 nt, Human
acuggcaggcugcuggccggcg

SEQ ID NO: 824747 - RNA, 22 nt, Human
uuauuuaaugugaucugaagag

SEQ ID NO: 824748 - RNA, 22 nt, Human
gagagucuagugcaccuaguuu

SEQ ID NO: 824749 - RNA, 22 nt, Human
auuguucaaagugcuuugcaug

SEQ ID NO: 824750 - RNA, 22 nt, Human
agaccaugggcucugaagagca

SEQ ID NO: 824751 - RNA, 22 nt, Human
gcaggagacaacuguaaggaga

SEQ ID NO: 824752 - RNA, 22 nt, Human
cccuggaggcuggaggcaguag

SEQ ID NO: 824753 - RNA, 22 nt, Human
auucuuauuuaaauagagucug

SEQ ID NO: 824754 - RNA, 22 nt, Human
agaggggacagccaccugcccg

SEQ ID NO: 824755 - RNA, 22 nt, Human
caggauggagggagggcuguua

SEQ ID NO: 824756 - RNA, 22 nt, Human
uuccaugaaauguguuaugcuu

SEQ ID NO: 824757 - RNA, 22 nt, Human
augcugugucaccuuaggauuu

SEQ ID NO: 824758 - RNA, 22 nt, Human
uaaggccaccguuauagaacca

SEQ ID NO: 824759 - RNA, 22 nt, Human
agucucugcaugccugcugugc

SEQ ID NO: 824760 - RNA, 22 nt, Human
agcugcccuguggggaggguug

SEQ ID NO: 824761 - RNA, 22 nt, Human
accaggagggacccugguggcc

SEQ ID NO: 824762 - RNA, 22 nt, Human
guuugcauuuauuagucuucug

SEQ ID NO: 824763 - RNA, 22 nt, Human
uuucaguuuccagcuuugucau

SEQ ID NO: 824764 - RNA, 22 nt, Human
uggaguucucaggugagggcuu

SEQ ID NO: 824765 - RNA, 18 nt, Human
agggaguuuuagggaagg

SEQ ID NO: 824766 - RNA, 22 nt, Human
agaggaggcagcuuaacucagu

SEQ ID NO: 824767 - RNA, 22 nt, Human
uucuuacagaguuuacagagcc

SEQ ID NO: 824768 - RNA, 22 nt, Human
uucaggaugacaccauguccag

SEQ ID NO: 824769 - RNA, 22 nt, Human
ccucaggauacaggagccacag

SEQ ID NO: 824770 - RNA, 22 nt, Human
cauucuuauauuuacucauuca

SEQ ID NO: 824771 - RNA, 22 nt, Human
uccaggagaccagauguaggcc

SEQ ID NO: 824772 - RNA, 22 nt, Human
aggguggcuggaggaaucagaa

SEQ ID NO: 824773 - RNA, 22 nt, Human
aaggcagccuuuugaguugauu

SEQ ID NO: 824774 - RNA, 22 nt, Human
uggcuucuugggaugggucauu

SEQ ID NO: 824775 - RNA, 19 nt, Human
gaggagcuaucggagacag

SEQ ID NO: 824776 - RNA, 22 nt, Human
uuugaaagacagaauauuuuug

SEQ ID NO: 824777 - RNA, 22 nt, Human
ugcacauuaguguuugagaugc

SEQ ID NO: 824778 - RNA, 22 nt, Human
cuuaaagaaauugaggagagga

SEQ ID NO: 824779 - RNA, 22 nt, Human
ugcauguggaccccuggugccu

SEQ ID NO: 824780 - RNA, 22 nt, Human
uuucuuauacuauauugucauc

SEQ ID NO: 824781 - RNA, 22 nt, Human
ucuuugaaagcuguucuagagu

SEQ ID NO: 824782 - RNA, 22 nt, Human
ucaggagagaguuggguaggcu

SEQ ID NO: 824783 - RNA, 22 nt, Human
cagugaaaucacaacuuuaguu

SEQ ID NO: 824784 - RNA, 22 nt, Human
ugcuucagaggaaaggcaaaag

SEQ ID NO: 824785 - RNA, 22 nt, Human
uugaauaggacucagcagugau

SEQ ID NO: 824786 - RNA, 22 nt, Human
cagaggcagugggguugcuccu

SEQ ID NO: 824787 - RNA, 22 nt, Human
uacagcuaggcaaaaaugacau

SEQ ID NO: 824788 - RNA, 19 nt, Human
ugagaggcuuaaggcagcu

SEQ ID NO: 824789 - RNA, 18 nt, Human
agaggggagguaagucug

SEQ ID NO: 824790 - RNA, 22 nt, Human
caugugguucaaguacuccaca

SEQ ID NO: 824791 - RNA, 22 nt, Human
agucuucucauuucacaugcuu

SEQ ID NO: 824792 - RNA, 20 nt, Human
aggacagcagcugccacuug

SEQ ID NO: 824793 - RNA, 18 nt, Human
uugagggaggggcagagu

SEQ ID NO: 824794 - RNA, 22 nt, Human
gacccaggaagcuacuucuggu

SEQ ID NO: 824795 - RNA, 22 nt, Human
aggucagcaggccaggggcgaa

SEQ ID NO: 824796 - RNA, 22 nt, Human
uucaugugaauauauuugucuu

SEQ ID NO: 824797 - RNA, 22 nt, Human
uaauaucuacuucauagaguuu

SEQ ID NO: 824798 - RNA, 22 nt, Human
aggcaggcuggucugaagagug

SEQ ID NO: 824799 - RNA, 22 nt, Human
uuauacuaaaacgcauugaauu

SEQ ID NO: 824800 - RNA, 19 nt, Human
uucaggauugacccuacug

SEQ ID NO: 824801 - RNA, 22 nt, Human
uuuuagcacuaagugauaugcu

SEQ ID NO: 824802 - RNA, 22 nt, Human
agaaaugaagagagucaagguu

SEQ ID NO: 824803 - RNA, 22 nt, Human
uccaggagguugagugaguucc

SEQ ID NO: 824804 - RNA, 22 nt, Human
cagcugcuguuacugcuuauua

SEQ ID NO: 824805 - RNA, 22 nt, Human
ccaggcugcagucaaggggcau

SEQ ID NO: 824806 - RNA, 22 nt, Human
ugaaagguuauuuaggucugcu

SEQ ID NO: 824807 - RNA, 22 nt, Human
ugaggcagguggauuacaaggu

SEQ ID NO: 824808 - RNA, 22 nt, Human
cuagccaugggcauuaaaggua

SEQ ID NO: 824809 - RNA, 22 nt, Human
ccaggaaauggcuugcuucuuu

SEQ ID NO: 824810 - RNA, 22 nt, Human
uuugaagugggcauuagaaccu

SEQ ID NO: 824811 - RNA, 22 nt, Human
cauuuccugucuggaggucaaa

SEQ ID NO: 824812 - RNA, 18 nt, Human
gagaggagccagaauuuu

SEQ ID NO: 824813 - RNA, 18 nt, Human
ugaggcagucagugaugg

SEQ ID NO: 824814 - RNA, 20 nt, Human
cugcugugauucccuccucc

SEQ ID NO: 824815 - RNA, 22 nt, Human
auguuauaguuauaaaaugagg

SEQ ID NO: 824816 - RNA, 22 nt, Human
uggaguucauccaugacagcuu

SEQ ID NO: 824817 - RNA, 22 nt, Human
agggaggucuuugaggggcuua

SEQ ID NO: 824818 - RNA, 22 nt, Human
cauuuguagcuauuuacuguau

SEQ ID NO: 824819 - RNA, 22 nt, Human
cagcagagcugggcuuugaauu

SEQ ID NO: 824820 - RNA, 22 nt, Human
cauuuguaucugggcugcugug

SEQ ID NO: 824821 - RNA, 22 nt, Human
acucuucuugcugcucauuaau

SEQ ID NO: 824822 - RNA, 22 nt, Human
agcuucccaagguuggaagguu

SEQ ID NO: 824823 - RNA, 22 nt, Human
acccaggaugauaauguucaca

SEQ ID NO: 824824 - RNA, 22 nt, Human
cuugauguauaaguugauaugu

SEQ ID NO: 824825 - RNA, 22 nt, Human
uuagccaugugggaaaaacagc

SEQ ID NO: 824826 - RNA, 22 nt, Human
accauuuuggguauuuucagag

SEQ ID NO: 824827 - RNA, 21 nt, Human
gccaggaguagauuacauuua

SEQ ID NO: 824828 - RNA, 22 nt, Human
uccaggagugcugguuagagua

SEQ ID NO: 824829 - RNA, 22 nt, Human
aggcaggcaaccaccugggaag

SEQ ID NO: 824830 - RNA, 22 nt, Human
gggcaguuuauucuagaugguu

SEQ ID NO: 824831 - RNA, 22 nt, Human
uggucuuuaagguagcugucau

SEQ ID NO: 824832 - RNA, 22 nt, Human
uucauucuugggaucagagagu

SEQ ID NO: 824833 - RNA, 22 nt, Human
aaauauagugacacuuauaguc

SEQ ID NO: 824834 - RNA, 22 nt, Human
cccaggagguggagcuugcagu

SEQ ID NO: 824835 - RNA, 22 nt, Human
uacuuucuguccuucuguuaaa

SEQ ID NO: 824836 - RNA, 22 nt, Human
uagggcagaguccaggaugggc

SEQ ID NO: 824837 - RNA, 22 nt, Human
uuauuuaaaagugguaagauuc

SEQ ID NO: 824838 - RNA, 17 nt, Human
acagagcacaucaagau

SEQ ID NO: 824839 - RNA, 23 nt, Human
uccugaggguuucccagccuugg

SEQ ID NO: 824840 - RNA, 22 nt, Human
ucagccucucugaguccagacc

SEQ ID NO: 824841 - RNA, 22 nt, Human
gagguggugguggaggcauagc

SEQ ID NO: 824842 - RNA, 22 nt, Human
aacaugcucuguuucuuggaug

SEQ ID NO: 824843 - RNA, 20 nt, Human
agcugccccugggcacugcc

SEQ ID NO: 824844 - RNA, 17 nt, Human
agagggaaaaugcgguu

SEQ ID NO: 824845 - RNA, 22 nt, Human
gcagcugccuucagcuggaugg

SEQ ID NO: 824846 - RNA, 22 nt, Human
ugccaggauauaagagugcgau

SEQ ID NO: 824847 - RNA, 22 nt, Human
cagagggaaaaggggaguaaua

SEQ ID NO: 824848 - RNA, 22 nt, Human
ugcauguguguguauuuauaaa

SEQ ID NO: 824849 - RNA, 22 nt, Human
uuauagaaggagcauucacuua

SEQ ID NO: 824850 - RNA, 22 nt, Human
agcugcccugggcuggagaugg

SEQ ID NO: 824851 - RNA, 22 nt, Human
ugaggcagggagaguggauaug

SEQ ID NO: 824852 - RNA, 22 nt, Human
gagggagggaaaguuuaacacu

SEQ ID NO: 824853 - RNA, 22 nt, Human
aucugccugcaguggagguggg

SEQ ID NO: 824854 - RNA, 22 nt, Human
uugcugaaaacaguggguauug

SEQ ID NO: 824855 - RNA, 22 nt, Human
aggaaaggccuuugcauuuggu

SEQ ID NO: 824856 - RNA, 22 nt, Human
auauucuucuuguucagacuau

SEQ ID NO: 824857 - RNA, 22 nt, Human
agucuugcucuugcaucugcuu

SEQ ID NO: 824858 - RNA, 22 nt, Human
ucucuucuauuugagacuauuu

SEQ ID NO: 824859 - RNA, 22 nt, Human
ucugggaagcugguccuguucu

SEQ ID NO: 824860 - RNA, 22 nt, Human
ugcuuccuauccacacaaugcc

SEQ ID NO: 824861 - RNA, 17 nt, Human
uucucugagcuguauug

SEQ ID NO: 824862 - RNA, 22 nt, Human
caaauaguuuuucauguauuau

SEQ ID NO: 824863 - RNA, 22 nt, Human
gcaguucuacuuauccauagac

SEQ ID NO: 824864 - RNA, 22 nt, Human
acagagagaaacaaucagcagc

SEQ ID NO: 824865 - RNA, 22 nt, Human
uuucauggcuaggacuagagug

SEQ ID NO: 824866 - RNA, 22 nt, Human
uuuggaaugguaccuucaguug

SEQ ID NO: 824867 - RNA, 22 nt, Human
uuugaagucaggcuuucuaccc

SEQ ID NO: 824868 - RNA, 22 nt, Human
ccccaggagcuuguuuuagaga

SEQ ID NO: 824869 - RNA, 22 nt, Human
agaggggaaggaugugauguga

SEQ ID NO: 824870 - RNA, 22 nt, Human
auuucaaggcuauuaauauaaa

SEQ ID NO: 824871 - RNA, 22 nt, Human
accgaaggaaacuggaaccguu

SEQ ID NO: 824872 - RNA, 22 nt, Human
cucuucucugcagccuuugaag

SEQ ID NO: 824873 - RNA, 22 nt, Human
uucuucucggcugucagauagu

SEQ ID NO: 824874 - RNA, 23 nt, Human
cuugcagggcuggaggcuuagaa

SEQ ID NO: 824875 - RNA, 22 nt, Human
ggagcuguucaggacugcuuca

SEQ ID NO: 824876 - RNA, 23 nt, Human
ggagaggggugugggcaucuuua

SEQ ID NO: 824877 - RNA, 22 nt, Human
accaggagucuagccuagucaa

SEQ ID NO: 824878 - RNA, 22 nt, Human
uuuugcuugagugcacaaaaug

SEQ ID NO: 824879 - RNA, 22 nt, Human
ucuucuucccaucccucaaaug

SEQ ID NO: 824880 - RNA, 22 nt, Human
gcaucuaaacuugcaucauugu

SEQ ID NO: 824881 - RNA, 17 nt, Human
agaacuguaguagcucc

SEQ ID NO: 824882 - RNA, 22 nt, Human
acuaagugauucuaagcaucuu

SEQ ID NO: 824883 - RNA, 23 nt, Human
cagcccuuccugcauguuuuugu

SEQ ID NO: 824884 - RNA, 22 nt, Human
uagugcuuuaggccugaguguc

SEQ ID NO: 824885 - RNA, 22 nt, Human
uaaauuauguuccauguccuuu

SEQ ID NO: 824886 - RNA, 22 nt, Human
aucuacccacugaacacaauau

SEQ ID NO: 824887 - RNA, 22 nt, Human
aaacugcugguugcuggccagc

SEQ ID NO: 824888 - RNA, 22 nt, Human
gacuucuauuaauaccucuacu

SEQ ID NO: 824889 - RNA, 22 nt, Human
cugcuuugauuagaagaguaca

SEQ ID NO: 824890 - RNA, 22 nt, Human
ugaaagguagcuggccucauag

SEQ ID NO: 824891 - RNA, 23 nt, Human
gugagucuugccuuugcugugga

SEQ ID NO: 824892 - RNA, 22 nt, Human
aaggcagccagauccuuugggu

SEQ ID NO: 824893 - RNA, 22 nt, Human
uuuucagaggccuaagagguuu

SEQ ID NO: 824894 - RNA, 22 nt, Human
aauuuccagaccccauccacag

SEQ ID NO: 824895 - RNA, 22 nt, Human
aaauguuucuacuugugagcau

SEQ ID NO: 824896 - RNA, 22 nt, Human
ccagcagagcauggggaggaag

SEQ ID NO: 824897 - RNA, 20 nt, Human
uuucugugagaaacacuguu

SEQ ID NO: 824898 - RNA, 23 nt, Human
uggcaaggaaugggauggagacu

SEQ ID NO: 824899 - RNA, 22 nt, Human
gcuccuucaggugguagcuguu

SEQ ID NO: 824900 - RNA, 22 nt, Human
ucccaggaucugagggcagaga

SEQ ID NO: 824901 - RNA, 22 nt, Human
gggcagcugucuugguucucaa

SEQ ID NO: 824902 - RNA, 23 nt, Human
uuucaaauuacucugcagaugac

SEQ ID NO: 824903 - RNA, 22 nt, Human
cauuuguaguaucuguuuauau

SEQ ID NO: 824904 - RNA, 22 nt, Human
augcuuccaaggcuaagacaag

SEQ ID NO: 824905 - RNA, 20 nt, Human
auaaaauaacugccacaaga

SEQ ID NO: 824906 - RNA, 22 nt, Human
aucacuguguauguauaugcag

SEQ ID NO: 824907 - RNA, 22 nt, Human
uacugccuggagcauuggugcu

SEQ ID NO: 824908 - RNA, 22 nt, Human
uucuuuugggaauuacguaugc

SEQ ID NO: 824909 - RNA, 22 nt, Human
uugcauuuccuguacuguuuga

SEQ ID NO: 824910 - RNA, 22 nt, Human
ugaaaugaaugugauucgauag

SEQ ID NO: 824911 - RNA, 22 nt, Human
cuucugagcagaccuccugggg

SEQ ID NO: 824912 - RNA, 22 nt, Human
uucaggaugcucagaguagucu

SEQ ID NO: 824913 - RNA, 22 nt, Human
uaaggccaauuaacaaccaggg

SEQ ID NO: 824914 - RNA, 22 nt, Human
auuaucuauguagaaugauuuu

SEQ ID NO: 824915 - RNA, 22 nt, Human
aggaagcuccuggagagccagu

SEQ ID NO: 824916 - RNA, 22 nt, Human
ggguacuuaauauuuacggggu

SEQ ID NO: 824917 - RNA, 22 nt, Human
ucuuuguaacugucuauugaga

SEQ ID NO: 824918 - RNA, 22 nt, Human
aguaaaaauugaggugcaaaau

SEQ ID NO: 824919 - RNA, 22 nt, Human
caguuucuauggcugggcucug

SEQ ID NO: 824920 - RNA, 22 nt, Human
agagugucugguagcugcucug

SEQ ID NO: 824921 - RNA, 22 nt, Human
gaagcagcaaguauaggacagg

SEQ ID NO: 824922 - RNA, 22 nt, Human
aagcagcuuuugaagagugagg

SEQ ID NO: 824923 - RNA, 22 nt, Human
uggaaauguauuugggcaugcc

SEQ ID NO: 824924 - RNA, 22 nt, Human
ugaaaugacagucuuaagcucu

SEQ ID NO: 824925 - RNA, 22 nt, Human
cucacuguuuaauagcuggauc

SEQ ID NO: 824926 - RNA, 23 nt, Human
uacaugcuauaauuucacccuca

SEQ ID NO: 824927 - RNA, 22 nt, Human
cccaggagguguagcugcgugg

SEQ ID NO: 824928 - RNA, 22 nt, Human
aggaaacuccccuacaucucaa

SEQ ID NO: 824929 - RNA, 22 nt, Human
aaugauuuccccuacacagaag

SEQ ID NO: 824930 - RNA, 22 nt, Human
uaucuguuguaguacagaugau

SEQ ID NO: 824931 - RNA, 20 nt, Human
aggaggcauagucuggaaag

SEQ ID NO: 824932 - RNA, 22 nt, Human
acccaggauagagugcugcagu

SEQ ID NO: 824933 - RNA, 19 nt, Human
uuagccauccacagugaaa

SEQ ID NO: 824934 - RNA, 22 nt, Human
agcagagccugggcuaggggug

SEQ ID NO: 824935 - RNA, 22 nt, Human
ccaggagaugauguuggggauu

SEQ ID NO: 824936 - RNA, 22 nt, Human
cccaggaaaagcagugccagca

SEQ ID NO: 824937 - RNA, 22 nt, Human
uagcucuucaaucacugucucc

SEQ ID NO: 824938 - RNA, 22 nt, Human
ucuucagauggccaguuguccc

SEQ ID NO: 824939 - RNA, 22 nt, Human
aggacagcaguuggugagguuc

SEQ ID NO: 824940 - RNA, 22 nt, Human
uacaucauaauaauacuuagaa

SEQ ID NO: 824941 - RNA, 22 nt, Human
ugccuggauucgguuguuguca

SEQ ID NO: 824942 - RNA, 22 nt, Human
cucacuguccaacaggcuuuac

SEQ ID NO: 824943 - RNA, 21 nt, Human
acagacagggccagugucccc

SEQ ID NO: 824944 - RNA, 22 nt, Human
cuggcaaguacugggccagcuc

SEQ ID NO: 824945 - RNA, 22 nt, Human
gagaggaguagacacuuugguu

SEQ ID NO: 824946 - RNA, 22 nt, Human
gaggaaccacucugagaagcca

SEQ ID NO: 824947 - RNA, 22 nt, Human
uccacauccauugcuugacuuu

SEQ ID NO: 824948 - RNA, 21 nt, Human
ucuugaaaauuguagcaguuu

SEQ ID NO: 824949 - RNA, 22 nt, Human
cagcugugaauugucuuaucua

SEQ ID NO: 824950 - RNA, 22 nt, Human
aagauggagcacgagcagaagc

SEQ ID NO: 824951 - RNA, 22 nt, Human
ucucugguuauuaacuaacucc

SEQ ID NO: 824952 - RNA, 21 nt, Human
cucaggaucuuauauauuagu

SEQ ID NO: 824953 - RNA, 22 nt, Human
cauuuuaaaugauuuaagccaa

SEQ ID NO: 824954 - RNA, 22 nt, Human
cugagacuuucaugugcuuuua

SEQ ID NO: 824955 - RNA, 22 nt, Human
uuggcagugaugcagcuuguuc

SEQ ID NO: 824956 - RNA, 22 nt, Human
gucugucucccugugacugaga

SEQ ID NO: 824957 - RNA, 22 nt, Human
ucaggagacuggcagugcccac

SEQ ID NO: 824958 - RNA, 22 nt, Human
guguguuuagcauuagcagggg

SEQ ID NO: 824959 - RNA, 22 nt, Human
gaaauaagaguccaugccaggu

SEQ ID NO: 824960 - RNA, 22 nt, Human
gaucuucuagcagaaguaauuu

SEQ ID NO: 824961 - RNA, 22 nt, Human
guccaugauucugugacacccu

SEQ ID NO: 824962 - RNA, 22 nt, Human
agagcagcugugacauggacag

SEQ ID NO: 824963 - RNA, 22 nt, Human
gaggcugccccuuccucagcug

SEQ ID NO: 824964 - RNA, 22 nt, Human
cuucagagugcagaagauuggg

SEQ ID NO: 824965 - RNA, 22 nt, Human
uaugauuuguagacauuugauu

SEQ ID NO: 824966 - RNA, 22 nt, Human
uuugaaaguguuuacuugggaa

SEQ ID NO: 824967 - RNA, 22 nt, Human
aaguauaagcuauucuucauga

SEQ ID NO: 824968 - RNA, 22 nt, Human
ccuugcugaccaucaccuuuga

SEQ ID NO: 824969 - RNA, 22 nt, Human
uugcauuucccauugaguaaug

SEQ ID NO: 824970 - RNA, 22 nt, Human
ccauggcaauggucagucuauu

SEQ ID NO: 824971 - RNA, 22 nt, Human
agcuggcaguaugacuggugac

SEQ ID NO: 824972 - RNA, 22 nt, Human
ugugaaggagaugaagggagug

SEQ ID NO: 824973 - RNA, 22 nt, Human
ugucucugggugauucaguccu

SEQ ID NO: 824974 - RNA, 22 nt, Human
guccucugaaguugugcaaugc

SEQ ID NO: 824975 - RNA, 22 nt, Human
agcugcccagauaggaggaggc

SEQ ID NO: 824976 - RNA, 22 nt, Human
ucugcugugauuugcuaccugu

SEQ ID NO: 824977 - RNA, 22 nt, Human
cuuaacauccugcauuuuucuu

SEQ ID NO: 824978 - RNA, 22 nt, Human
cuucagaauccagaaucagaau

SEQ ID NO: 824979 - RNA, 22 nt, Human
uggcaggcagugugggagcugg

SEQ ID NO: 824980 - RNA, 22 nt, Human
ucauuuguucucauucucuacu

SEQ ID NO: 824981 - RNA, 22 nt, Human
uaaaugaagaaauggagauugu

SEQ ID NO: 824982 - RNA, 22 nt, Human
cuacuucuaaguacauggugau

SEQ ID NO: 824983 - RNA, 22 nt, Human
caggauggugugagugugagga

SEQ ID NO: 824984 - RNA, 22 nt, Human
gaggcagcgggucaggaccgug

SEQ ID NO: 824985 - RNA, 22 nt, Human
gcccaggauggagaauaguggu

SEQ ID NO: 824986 - RNA, 22 nt, Human
uucccaugccuggccccuaucc

SEQ ID NO: 824987 - RNA, 22 nt, Human
ugaguucucacccauucuucuu

SEQ ID NO: 824988 - RNA, 22 nt, Human
aucugccuggcuccaggugagc

SEQ ID NO: 824989 - RNA, 22 nt, Human
aggcaggcccucuggaaaggua

SEQ ID NO: 824990 - RNA, 22 nt, Human
uggagaggaaagugcaguuuug

SEQ ID NO: 824991 - RNA, 22 nt, Human
ugguuuugcuaaaauagaaaga

SEQ ID NO: 824992 - RNA, 22 nt, Human
cccaggaaagagacugcugggu

SEQ ID NO: 824993 - RNA, 22 nt, Human
ucacacagguuugcaaugauuu

SEQ ID NO: 824994 - RNA, 22 nt, Human
gccaggagacuccauucauuug

SEQ ID NO: 824995 - RNA, 22 nt, Human
cagcuguggcugccacugcucc

SEQ ID NO: 824996 - RNA, 22 nt, Human
uuuuuguagucauuagaagagg

SEQ ID NO: 824997 - RNA, 22 nt, Human
ugccaggauggccagggggcca

SEQ ID NO: 824998 - RNA, 22 nt, Human
aagauuauggcagauaacaauu

SEQ ID NO: 824999 - RNA, 23 nt, Human
gggcagcuuaagcuuguuuuucu

SEQ ID NO: 825000 - RNA, 22 nt, Human
ugaggcaggaguuaaugugcuc

SEQ ID NO: 825001 - RNA, 22 nt, Human
aggguagguguaagauagcccu

SEQ ID NO: 825002 - RNA, 22 nt, Human
guugaaagaugucuugguuccc

SEQ ID NO: 825003 - RNA, 19 nt, Human
ugcauaaauuauauacuuu

SEQ ID NO: 825004 - RNA, 22 nt, Human
aaauguauugcauaggauauuu

SEQ ID NO: 825005 - RNA, 22 nt, Human
ggaggcugagaaguccaagauc

SEQ ID NO: 825006 - RNA, 22 nt, Human
ccaggagagcgcccucccggcc

SEQ ID NO: 825007 - RNA, 22 nt, Human
ucauuuauaaggaugcaauuaa

SEQ ID NO: 825008 - RNA, 22 nt, Human
uguugauuaguguuuagacuua

SEQ ID NO: 825009 - RNA, 22 nt, Human
gaggccagaguuccccgaguca

SEQ ID NO: 825010 - RNA, 22 nt, Human
cuuagcaugugguguccuugua

SEQ ID NO: 825011 - RNA, 22 nt, Human
ucacugcucuccaauguggagu

SEQ ID NO: 825012 - RNA, 22 nt, Human
uggcagcuagauaguguguuua

SEQ ID NO: 825013 - RNA, 22 nt, Human
gaggcugcuuugaugacaggag

SEQ ID NO: 825014 - RNA, 22 nt, Human
uaauuauucuagucacauagca

SEQ ID NO: 825015 - RNA, 22 nt, Human
ucaauucaacacaugcacauug

SEQ ID NO: 825016 - RNA, 22 nt, Human
uucaucaauguguuuaauaaug

SEQ ID NO: 825017 - RNA, 21 nt, Human
ugcuggaaaaagugguucuag

SEQ ID NO: 825018 - RNA, 22 nt, Human
ugccgcagugcggggagggccc

SEQ ID NO: 825019 - RNA, 23 nt, Human
uaauucacauauacauugcuuca

SEQ ID NO: 825020 - RNA, 22 nt, Human
aggagggagaugcccauccugg

SEQ ID NO: 825021 - RNA, 22 nt, Human
aggagagcuggugucuggaauc

SEQ ID NO: 825022 - RNA, 22 nt, Human
ccugcugugaccggggagcagg

SEQ ID NO: 825023 - RNA, 22 nt, Human
gagaggcaggcgcugcaauggu

SEQ ID NO: 825024 - RNA, 22 nt, Human
uucugggagagaaagggccuug

SEQ ID NO: 825025 - RNA, 22 nt, Human
ggcagaggaaggaugaauucac

SEQ ID NO: 825026 - RNA, 22 nt, Human
ugaggggaacugaugcccauug

SEQ ID NO: 825027 - RNA, 20 nt, Human
uuucaagucagcaauucuca

SEQ ID NO: 825028 - RNA, 22 nt, Human
cagcagagaccaagugauuuga

SEQ ID NO: 825029 - RNA, 22 nt, Human
aagcagaggaccgacggaggga

SEQ ID NO: 825030 - RNA, 22 nt, Human
acacuaaugagaaaggaauuaa

SEQ ID NO: 825031 - RNA, 22 nt, Human
aguucuucauaaccuuacugug

SEQ ID NO: 825032 - RNA, 22 nt, Human
ucauucuuuaccaaguugucac

SEQ ID NO: 825033 - RNA, 22 nt, Human
uggcagcucauuuggaaaugga

SEQ ID NO: 825034 - RNA, 22 nt, Human
caaggccacuccagagacuggu

SEQ ID NO: 825035 - RNA, 22 nt, Human
agcagagguguuuauuauggga

SEQ ID NO: 825036 - RNA, 22 nt, Human
uucaacuaauguuuauuuuaug

SEQ ID NO: 825037 - RNA, 20 nt, Human
uggcaucucucaauuguagg

SEQ ID NO: 825038 - RNA, 22 nt, Human
accaggagcauuuuuuauuagu

SEQ ID NO: 825039 - RNA, 22 nt, Human
uugaaguuguaguucagugaag

SEQ ID NO: 825040 - RNA, 22 nt, Human
aauggccagcugggagaguuga

SEQ ID NO: 825041 - RNA, 22 nt, Human
ucaccgccuugcccggccgggc

SEQ ID NO: 825042 - RNA, 19 nt, Human
caagugaagccugggaugg

SEQ ID NO: 825043 - RNA, 22 nt, Human
ugcucccagggacucuggcugg

SEQ ID NO: 825044 - RNA, 22 nt, Human
ugagagggcccagagcacacca

SEQ ID NO: 825045 - RNA, 22 nt, Human
cuucuucaucuguaaaacuugg

SEQ ID NO: 825046 - RNA, 22 nt, Human
cugacuguaauucuguucuuaa

SEQ ID NO: 825047 - RNA, 22 nt, Human
aggcacagcacaccuggccccc

SEQ ID NO: 825048 - RNA, 22 nt, Human
gcuuuggaugugugccugaggu

SEQ ID NO: 825049 - RNA, 20 nt, Human
uauuuguauuugggaaaguu

SEQ ID NO: 825050 - RNA, 17 nt, Human
uuucuccuuccaucuca

SEQ ID NO: 825051 - RNA, 22 nt, Human
gugcagcugcaggagucagguc

SEQ ID NO: 825052 - RNA, 22 nt, Human
uucugaaagccaauucauugaa

SEQ ID NO: 825053 - RNA, 22 nt, Human
uuuguuaaauauuuauugagug

SEQ ID NO: 825054 - RNA, 22 nt, Human
cucuucuuauggccguggcuga

SEQ ID NO: 825055 - RNA, 22 nt, Human
agcugaaagugcuuugaggacu

SEQ ID NO: 825056 - RNA, 22 nt, Human
caaggccagggaauuuuucugg

SEQ ID NO: 825057 - RNA, 22 nt, Human
uguucuuuggcuucacagcucu

SEQ ID NO: 825058 - RNA, 22 nt, Human
ugaaggccagcucuuuaucagc

SEQ ID NO: 825059 - RNA, 22 nt, Human
aggaagcugccugggaugggaa

SEQ ID NO: 825060 - RNA, 22 nt, Human
aggaugagccgcgcaagcugac

SEQ ID NO: 825061 - RNA, 22 nt, Human
cauuucacaaauggccacauca

SEQ ID NO: 825062 - RNA, 22 nt, Human
gaagcagcuuucuggugaggag

SEQ ID NO: 825063 - RNA, 22 nt, Human
gagggaggcaucaugaauccag

SEQ ID NO: 825064 - RNA, 21 nt, Human
ucugagagcaacugcccuuua

SEQ ID NO: 825065 - RNA, 22 nt, Human
cuggcuugcagcucaucauaaa

SEQ ID NO: 825066 - RNA, 22 nt, Human
ugcaggaacugggagggauagu

SEQ ID NO: 825067 - RNA, 22 nt, Human
ggagguggcagggaacauaauu

SEQ ID NO: 825068 - RNA, 21 nt, Human
gacaaagugaagcaggcagga

SEQ ID NO: 825069 - RNA, 22 nt, Human
gaggcagcugggcuggugguuu

SEQ ID NO: 825070 - RNA, 22 nt, Human
auugcuguaaauuaucuuauua

SEQ ID NO: 825071 - RNA, 22 nt, Human
agucugucugucacuucugcag

SEQ ID NO: 825072 - RNA, 19 nt, Human
aucugccuguuaucacaua

SEQ ID NO: 825073 - RNA, 22 nt, Human
ggcagaggagcuggaaacaugg

SEQ ID NO: 825074 - RNA, 22 nt, Human
uauuucagggagaauaaauuug

SEQ ID NO: 825075 - RNA, 21 nt, Human
uccuuccuugagguccuuucc

SEQ ID NO: 825076 - RNA, 22 nt, Human
uucugagguccaugcaguacug

SEQ ID NO: 825077 - RNA, 17 nt, Human
gagacagcaggagcccc

SEQ ID NO: 825078 - RNA, 22 nt, Human
cugcccaggaaggagaggaugg

SEQ ID NO: 825079 - RNA, 22 nt, Human
acauaccauacauggugagaug

SEQ ID NO: 825080 - RNA, 22 nt, Human
uagugcuuaauaaauuucagaa

SEQ ID NO: 825081 - RNA, 22 nt, Human
ggaggacacuggcucugccuuc

SEQ ID NO: 825082 - RNA, 22 nt, Human
auuucauugaaguuaauucuuc

SEQ ID NO: 825083 - RNA, 20 nt, Human
gaguuccccauuucuccugg

SEQ ID NO: 825084 - RNA, 22 nt, Human
uucucuuuucaccaguugcuaa

SEQ ID NO: 825085 - RNA, 22 nt, Human
cugcugugcuuguggccacccg

SEQ ID NO: 825086 - RNA, 22 nt, Human
aggcagacaaggucccuggucu

SEQ ID NO: 825087 - RNA, 22 nt, Human
ucauuuguugcuguuaccugag

SEQ ID NO: 825088 - RNA, 22 nt, Human
acuggcagagacccugauggcc

SEQ ID NO: 825089 - RNA, 22 nt, Human
gcuuuggagccuguguucugcc

SEQ ID NO: 825090 - RNA, 22 nt, Human
aguucuuuugugaacauaugcu

SEQ ID NO: 825091 - RNA, 17 nt, Human
caggcagacauguaagc

SEQ ID NO: 825092 - RNA, 22 nt, Human
caucaucaaaacaaauggaguc

SEQ ID NO: 825093 - RNA, 22 nt, Human
uugauguacagaauuguucaca

SEQ ID NO: 825094 - RNA, 19 nt, Human
ggcagucucaagcagcaca

SEQ ID NO: 825095 - RNA, 22 nt, Human
gcagaagucagaccaucugaau

SEQ ID NO: 825096 - RNA, 22 nt, Human
uuagccauugucagcacauggc

SEQ ID NO: 825097 - RNA, 22 nt, Human
cauuuccacuucugaaaacugg

SEQ ID NO: 825098 - RNA, 19 nt, Human
uggagacugagagugagca

SEQ ID NO: 825099 - RNA, 22 nt, Human
uggcaucucaaacaggcagauu

SEQ ID NO: 825100 - RNA, 22 nt, Human
auuuggcaacauuaauugaauc

SEQ ID NO: 825101 - RNA, 22 nt, Human
ucauuucaaugauacuacuaag

SEQ ID NO: 825102 - RNA, 22 nt, Human
aagcaccugcaguugacaaaaa

SEQ ID NO: 825103 - RNA, 20 nt, Human
aagagaggaaguuauacuag

SEQ ID NO: 825104 - RNA, 22 nt, Human
auuucagaugaccaaauggaaa

SEQ ID NO: 825105 - RNA, 22 nt, Human
aagaagagaaaugugcugcugg

SEQ ID NO: 825106 - RNA, 22 nt, Human
agaggagugggaagcagugcaa

SEQ ID NO: 825107 - RNA, 22 nt, Human
caaauaguaugagcaaugauuc

SEQ ID NO: 825108 - RNA, 22 nt, Human
caggcagcucgaugccuuguug

SEQ ID NO: 825109 - RNA, 22 nt, Human
guuauaaaaugcacaguuguuu

SEQ ID NO: 825110 - RNA, 22 nt, Human
cagcugcaguucaaugcuugcu

SEQ ID NO: 825111 - RNA, 23 nt, Human
uucauuugucuacuucacuuguu

SEQ ID NO: 825112 - RNA, 23 nt, Human
uagggcagcugggagggacaugc

SEQ ID NO: 825113 - RNA, 22 nt, Human
ccucuucuagguuucagccugc

SEQ ID NO: 825114 - RNA, 20 nt, Human
cccagugaagcauggaagag

SEQ ID NO: 825115 - RNA, 21 nt, Human
ucacaucuauguuaagcaaac

SEQ ID NO: 825116 - RNA, 22 nt, Human
gcugugcuugggaagaaucucu

SEQ ID NO: 825117 - RNA, 22 nt, Human
aacaucuacuaagugccaggca

SEQ ID NO: 825118 - RNA, 22 nt, Human
uuacaagcagcuacauaucaca

SEQ ID NO: 825119 - RNA, 22 nt, Human
aggcagcaugggcccagagucc

SEQ ID NO: 825120 - RNA, 22 nt, Human
cagucccuaguggagcucacag

SEQ ID NO: 825121 - RNA, 19 nt, Human
cauuuuaagcauccccagu

SEQ ID NO: 825122 - RNA, 22 nt, Human
aaaggccacuugaaggauuuuu

SEQ ID NO: 825123 - RNA, 22 nt, Human
auguuuuugagauacaaacaga

SEQ ID NO: 825124 - RNA, 22 nt, Human
augcaucuauucccaagggcag

SEQ ID NO: 825125 - RNA, 22 nt, Human
ugcuuggcuuucugagcuucug

SEQ ID NO: 825126 - RNA, 22 nt, Human
ucuucucuacaccagcagcccc

SEQ ID NO: 825127 - RNA, 22 nt, Human
caggcagcugcuggguucagcc

SEQ ID NO: 825128 - RNA, 21 nt, Human
gauuugcagaaacuagacagg

SEQ ID NO: 825129 - RNA, 22 nt, Human
auucaaauuaaguuaauucagc

SEQ ID NO: 825130 - RNA, 22 nt, Human
caggaugagguagaggcagaua

SEQ ID NO: 825131 - RNA, 22 nt, Human
gccaggagagcuccuucagguu

SEQ ID NO: 825132 - RNA, 22 nt, Human
ugaggcaggaauggggaaaagu

SEQ ID NO: 825133 - RNA, 22 nt, Human
uuacuuuggguccugcuuauaa

SEQ ID NO: 825134 - RNA, 22 nt, Human
agucucugggcaugguugugac

SEQ ID NO: 825135 - RNA, 22 nt, Human
aggagaggucucccuuccccag

SEQ ID NO: 825136 - RNA, 17 nt, Human
ugaaggccaugaccacg

SEQ ID NO: 825137 - RNA, 22 nt, Human
ugaggcagggaguuuaauuguc

SEQ ID NO: 825138 - RNA, 22 nt, Human
cugcuguguugccagugucacc

SEQ ID NO: 825139 - RNA, 22 nt, Human
gagggagggccaggucccaacc

SEQ ID NO: 825140 - RNA, 22 nt, Human
ccaagaugaucuuuacaguguu

SEQ ID NO: 825141 - RNA, 19 nt, Human
uuugcagugguuccuuugu

SEQ ID NO: 825142 - RNA, 22 nt, Human
cucaggauauugggcuggagca

SEQ ID NO: 825143 - RNA, 22 nt, Human
uugaauaguuuuggauagcaua

SEQ ID NO: 825144 - RNA, 20 nt, Human
guugaaaguaauaugaugcu

SEQ ID NO: 825145 - RNA, 22 nt, Human
gagccaggggucagcuccgagg

SEQ ID NO: 825146 - RNA, 23 nt, Human
cuugcaggaagcagauggcacac

SEQ ID NO: 825147 - RNA, 22 nt, Human
gaugccuccaaaugagggcaga

SEQ ID NO: 825148 - RNA, 22 nt, Human
gcccaggaguugguggcugcag

SEQ ID NO: 825149 - RNA, 22 nt, Human
aucauucugauggucaaugcua

SEQ ID NO: 825150 - RNA, 22 nt, Human
agcugcccuuuaugaugcugaa

SEQ ID NO: 825151 - RNA, 22 nt, Human
gaggcagcaaaauauaucauaa

SEQ ID NO: 825152 - RNA, 22 nt, Human
aucacauuguuagcauagacug

SEQ ID NO: 825153 - RNA, 22 nt, Human
gcuccucuauuccccacauuuu

SEQ ID NO: 825154 - RNA, 22 nt, Human
aaucuguucuacucuauucaga

SEQ ID NO: 825155 - RNA, 22 nt, Human
gcuguggucugugagcuccaaa

SEQ ID NO: 825156 - RNA, 22 nt, Human
uugaaaggugaacaugaugcac

SEQ ID NO: 825157 - RNA, 22 nt, Human
cuaauacacccuauugcuuguu

SEQ ID NO: 825158 - RNA, 23 nt, Human
uccaggagcaugcuggcuggcga

SEQ ID NO: 825159 - RNA, 22 nt, Human
ugaguuuuuucaacauaugaag

SEQ ID NO: 825160 - RNA, 22 nt, Human
uucacauuggugauauguuucu

SEQ ID NO: 825161 - RNA, 22 nt, Human
uuucuagggcucuugucuucug

SEQ ID NO: 825162 - RNA, 22 nt, Human
ccugcuguaaugugucuuuauu

SEQ ID NO: 825163 - RNA, 22 nt, Human
gcccaggaguucaagucuagug

SEQ ID NO: 825164 - RNA, 20 nt, Human
auccaugagagucuggauuc

SEQ ID NO: 825165 - RNA, 22 nt, Human
aacugcuguggccuaguacuua

SEQ ID NO: 825166 - RNA, 22 nt, Human
ccaggagaaugggauuacccua

SEQ ID NO: 825167 - RNA, 22 nt, Human
acccaggacuuggcaaccucau

SEQ ID NO: 825168 - RNA, 22 nt, Human
aacaguaaagacagaauuuauc

SEQ ID NO: 825169 - RNA, 22 nt, Human
cagggaggaugggcuguuuugc

SEQ ID NO: 825170 - RNA, 22 nt, Human
augcuguggggagugaggguag

SEQ ID NO: 825171 - RNA, 22 nt, Human
ugaggcagauauuuauuggguu

SEQ ID NO: 825172 - RNA, 22 nt, Human
ucacaguaucacacaaggauua

SEQ ID NO: 825173 - RNA, 22 nt, Human
aagggaggaggauuuauuguac

SEQ ID NO: 825174 - RNA, 22 nt, Human
gacagugcauuuccuggcaugg

SEQ ID NO: 825175 - RNA, 22 nt, Human
auaguuugaaggcuguucuacu

SEQ ID NO: 825176 - RNA, 23 nt, Human
gugcugugagccccuuggccucc

SEQ ID NO: 825177 - RNA, 22 nt, Human
uuuauauuucccaggauuggcc

SEQ ID NO: 825178 - RNA, 22 nt, Human
ccacugaggcaggcaguaucua

SEQ ID NO: 825179 - RNA, 22 nt, Human
auuuucaucauggguuuaacau

SEQ ID NO: 825180 - RNA, 22 nt, Human
ucuuuggaucccaacuggcugg

SEQ ID NO: 825181 - RNA, 22 nt, Human
aguuucuuuagauagaaaguuc

SEQ ID NO: 825182 - RNA, 22 nt, Human
uagcuguguaagcuugguaaga

SEQ ID NO: 825183 - RNA, 22 nt, Human
cccagcaguaaccaguggaaau

SEQ ID NO: 825184 - RNA, 18 nt, Human
cucaccauucugcccaau

SEQ ID NO: 825185 - RNA, 22 nt, Human
cugcugucauagccaucccucc

SEQ ID NO: 825186 - RNA, 20 nt, Human
agaggccaguuaggagucua

SEQ ID NO: 825187 - RNA, 22 nt, Human
ucaggauaaaauguaauggcaa

SEQ ID NO: 825188 - RNA, 22 nt, Human
cugcugugagugguucuugccu

SEQ ID NO: 825189 - RNA, 22 nt, Human
cccaggaacagcacagaacagc

SEQ ID NO: 825190 - RNA, 22 nt, Human
uuuguagaggguaauugacaga

SEQ ID NO: 825191 - RNA, 22 nt, Human
agcugcccuuaauaggcauuca

SEQ ID NO: 825192 - RNA, 22 nt, Human
uauuauuaaauggcagaauuuu

SEQ ID NO: 825193 - RNA, 22 nt, Human
ggauggagguucucagaugcuc

SEQ ID NO: 825194 - RNA, 22 nt, Human
gacccaggcccaaggcugccag

SEQ ID NO: 825195 - RNA, 23 nt, Human
aaggccagaauuucaauggugcc

SEQ ID NO: 825196 - RNA, 22 nt, Human
agaggccacuuugccugugaug

SEQ ID NO: 825197 - RNA, 22 nt, Human
cgucuuccucuuacgaugcgcu

SEQ ID NO: 825198 - RNA, 22 nt, Human
cgccucagccguggucaucuuc

SEQ ID NO: 825199 - RNA, 22 nt, Human
ucaggagaguguucaguggagg

SEQ ID NO: 825200 - RNA, 22 nt, Human
caguggagagacuuuuacucuu

SEQ ID NO: 825201 - RNA, 22 nt, Human
ucccaggaaaacacucgaggac

SEQ ID NO: 825202 - RNA, 22 nt, Human
aaaauauuuuagggccaggaga

SEQ ID NO: 825203 - RNA, 22 nt, Human
ugcauuuccagauuucuggagu

SEQ ID NO: 825204 - RNA, 19 nt, Human
ugaguucugugguucucaa

SEQ ID NO: 825205 - RNA, 22 nt, Human
ugggagcccaagggagcugccg

SEQ ID NO: 825206 - RNA, 22 nt, Human
cucccaggguagggagagacua

SEQ ID NO: 825207 - RNA, 22 nt, Human
gguggagcuggaccaggagagg

SEQ ID NO: 825208 - RNA, 22 nt, Human
uuauucuuuucuccagaauccc

SEQ ID NO: 825209 - RNA, 22 nt, Human
ucccaggaugugcgugccgccg

SEQ ID NO: 825210 - RNA, 22 nt, Human
caggaugagaggcccagggaag

SEQ ID NO: 825211 - RNA, 22 nt, Human
cucuccucugaaguggugaccc

SEQ ID NO: 825212 - RNA, 22 nt, Human
agaggggaguccuaaucugauu

SEQ ID NO: 825213 - RNA, 22 nt, Human
agaccauggccauccuaggaaa

SEQ ID NO: 825214 - RNA, 15 nt, Human
caggagaggaagguu

SEQ ID NO: 825215 - RNA, 22 nt, Human
auugaaagauauacuguucuca

SEQ ID NO: 825216 - RNA, 22 nt, Human
uuugaaagucaaccuuccaguu

SEQ ID NO: 825217 - RNA, 22 nt, Human
uaggcagcuuagguuagaagug

SEQ ID NO: 825218 - RNA, 22 nt, Human
ucuuugaacuuggcugaucucu

SEQ ID NO: 825219 - RNA, 22 nt, Human
aucuuguuauaagagauaaugg

SEQ ID NO: 825220 - RNA, 22 nt, Human
aucaggauggguuuggcuuagg

SEQ ID NO: 825221 - RNA, 22 nt, Human
uuuuccagauuggacuuagucc

SEQ ID NO: 825222 - RNA, 22 nt, Human
cauuuguaucauauguaucuua

SEQ ID NO: 825223 - RNA, 22 nt, Human
ccaggagacccagggaaggagc

SEQ ID NO: 825224 - RNA, 22 nt, Human
gcagcugccccgacugugaguc

SEQ ID NO: 825225 - RNA, 22 nt, Human
ucuucagacccuuagcugugau

SEQ ID NO: 825226 - RNA, 22 nt, Human
aagggcagccugacucacgguc

SEQ ID NO: 825227 - RNA, 20 nt, Human
cccagguaggugccaugagu

SEQ ID NO: 825228 - RNA, 22 nt, Human
gugguuuugccauuacaaguaa

SEQ ID NO: 825229 - RNA, 22 nt, Human
ccucaugguacuuacuguagcu

SEQ ID NO: 825230 - RNA, 22 nt, Human
gauugaaacauaggcagucgag

SEQ ID NO: 825231 - RNA, 22 nt, Human
ugaggcagcuuuuucugugugu

SEQ ID NO: 825232 - RNA, 20 nt, Human
aagcacauuucuacaauaau

SEQ ID NO: 825233 - RNA, 22 nt, Human
cagaggcagccgggggagaacg

SEQ ID NO: 825234 - RNA, 22 nt, Human
ugcugaugaguccuucuaucgc

SEQ ID NO: 825235 - RNA, 22 nt, Human
gaggcaguuugccaugccagga

SEQ ID NO: 825236 - RNA, 22 nt, Human
uuuauuuggcauccagggagaa

SEQ ID NO: 825237 - RNA, 17 nt, Human
uucaaagcuuaucaagg

SEQ ID NO: 825238 - RNA, 22 nt, Human
ucuucuccagugcuucugcaca

SEQ ID NO: 825239 - RNA, 21 nt, Human
ccauaccuaccucaccugguu

SEQ ID NO: 825240 - RNA, 22 nt, Human
uucuacagacuauaacugugau

SEQ ID NO: 825241 - RNA, 22 nt, Human
uggcagcuguuaauguuuuguu

SEQ ID NO: 825242 - RNA, 22 nt, Human
uagcucuucauuucaucugauu

SEQ ID NO: 825243 - RNA, 22 nt, Human
uuguuauaaagacuaaauaugu

SEQ ID NO: 825244 - RNA, 22 nt, Human
aaggccagccugagagcuaaca

SEQ ID NO: 825245 - RNA, 23 nt, Human
uaugaacugcauugcuggugugu

SEQ ID NO: 825246 - RNA, 22 nt, Human
aggcagucuaucucuggagccu

SEQ ID NO: 825247 - RNA, 22 nt, Human
ucaacugcaaguuugcuuaguu

SEQ ID NO: 825248 - RNA, 22 nt, Human
auacuuucugaccaauuaauug

SEQ ID NO: 825249 - RNA, 22 nt, Human
ccagcagagucuaggaaggagg

SEQ ID NO: 825250 - RNA, 22 nt, Human
aggcagguccccuggaaggcac

SEQ ID NO: 825251 - RNA, 22 nt, Human
ugaaucugauuucccuggaggc

SEQ ID NO: 825252 - RNA, 22 nt, Human
gaggcgagaagcuggagauggu

SEQ ID NO: 825253 - RNA, 22 nt, Human
uugaaagaagaagcugcgaugu

SEQ ID NO: 825254 - RNA, 22 nt, Human
cagacaggguccuguccgucac

SEQ ID NO: 825255 - RNA, 22 nt, Human
accaggaguugggggugggacc

SEQ ID NO: 825256 - RNA, 22 nt, Human
gaucuguuucauucacagucug

SEQ ID NO: 825257 - RNA, 22 nt, Human
caggaugagaagggcucuuacg

SEQ ID NO: 825258 - RNA, 22 nt, Human
ugcugaugcuguucuguuagga

SEQ ID NO: 825259 - RNA, 22 nt, Human
uugcugugucugauggcugaga

SEQ ID NO: 825260 - RNA, 22 nt, Human
acaugcauacacguacauaccu

SEQ ID NO: 825261 - RNA, 22 nt, Human
uuugcaauuugugcugcaaaug

SEQ ID NO: 825262 - RNA, 22 nt, Human
uggaaauggaucugaugagucu

SEQ ID NO: 825263 - RNA, 22 nt, Human
ugaaaugauuauaugguguuug

SEQ ID NO: 825264 - RNA, 22 nt, Human
aaauguuuugcucccauguggu

SEQ ID NO: 825265 - RNA, 22 nt, Human
gcagcugcuggagggaggcagg

SEQ ID NO: 825266 - RNA, 22 nt, Human
ugcuuugggucucucuaguuuc

SEQ ID NO: 825267 - RNA, 22 nt, Human
cucacugugaccucagcagaca

SEQ ID NO: 825268 - RNA, 22 nt, Human
auggagggugguaagacagaga

SEQ ID NO: 825269 - RNA, 22 nt, Human
augcuguggccagaguucaacu

SEQ ID NO: 825270 - RNA, 21 nt, Human
aaaggccauaaucacggagca

SEQ ID NO: 825271 - RNA, 22 nt, Human
cuucucagaucucagcuuugag

SEQ ID NO: 825272 - RNA, 22 nt, Human
cacaugugugcugaggacugug

SEQ ID NO: 825273 - RNA, 22 nt, Human
caguugcuggaugugcagcucu

SEQ ID NO: 825274 - RNA, 23 nt, Human
cccuggaguaaauucuuggaagg

SEQ ID NO: 825275 - RNA, 22 nt, Human
aaggcagcccuggcucagccug

SEQ ID NO: 825276 - RNA, 22 nt, Human
aaggcagcaagaauuccagguu

SEQ ID NO: 825277 - RNA, 22 nt, Human
cugcugugagcacuccagccug

SEQ ID NO: 825278 - RNA, 22 nt, Human
cauuuguaguuaaaaaugucuc

SEQ ID NO: 825279 - RNA, 22 nt, Human
gccaggaguguguggcuauguu

SEQ ID NO: 825280 - RNA, 22 nt, Human
cagcuggcugcaugaugccaaa

SEQ ID NO: 825281 - RNA, 22 nt, Human
gggacgggcaguccaagggguc

SEQ ID NO: 825282 - RNA, 22 nt, Human
uccagaaacuuuuccagucuca

SEQ ID NO: 825283 - RNA, 22 nt, Human
uccaggagggggagccgugccg

SEQ ID NO: 825284 - RNA, 22 nt, Human
guccaugacugugacucacaug

SEQ ID NO: 825285 - RNA, 22 nt, Human
aucccaugagaccacguuggcu

SEQ ID NO: 825286 - RNA, 22 nt, Human
augaguucaauuguuucaguca

SEQ ID NO: 825287 - RNA, 22 nt, Human
caggaaugaggucguaaguguc

SEQ ID NO: 825288 - RNA, 23 nt, Human
uugcuuucaucaugagaugcucc

SEQ ID NO: 825289 - RNA, 22 nt, Human
aggccagaugucgggcuagaag

SEQ ID NO: 825290 - RNA, 22 nt, Human
ucccuucacagaugcgauguuu

SEQ ID NO: 825291 - RNA, 22 nt, Human
ucacaguuauagucuguagaau

SEQ ID NO: 825292 - RNA, 22 nt, Human
gucaggaucaaauugaaguuau

SEQ ID NO: 825293 - RNA, 22 nt, Human
cucaggaaaggccaugcaaggg

SEQ ID NO: 825294 - RNA, 21 nt, Human
ggcagcguguggacaggaagg

SEQ ID NO: 825295 - RNA, 22 nt, Human
aggcagucuaguccccaggcaa

SEQ ID NO: 825296 - RNA, 22 nt, Human
cauuuguacagaacagcuuuau

SEQ ID NO: 825297 - RNA, 22 nt, Human
ucugcaucauuuuucagagccg

SEQ ID NO: 825298 - RNA, 18 nt, Human
ucuuccaacacugacacc

SEQ ID NO: 825299 - RNA, 22 nt, Human
uaucuguuaugggcugaauugc

SEQ ID NO: 825300 - RNA, 22 nt, Human
aaacaugaauagauauuaaaca

SEQ ID NO: 825301 - RNA, 22 nt, Human
uauuucagcacaugggauaggu

SEQ ID NO: 825302 - RNA, 21 nt, Human
ucuuccuccacagcgugccac

SEQ ID NO: 825303 - RNA, 22 nt, Human
uccaugucuucaugugucuaac

SEQ ID NO: 825304 - RNA, 22 nt, Human
uuguaaauaguaguaagaugcc

SEQ ID NO: 825305 - RNA, 22 nt, Human
ccuucauugcaucuuuaagaga

SEQ ID NO: 825306 - RNA, 22 nt, Human
aggcaagcauuuaaccacucau

SEQ ID NO: 825307 - RNA, 22 nt, Human
ggauguugauugaauggccauu

SEQ ID NO: 825308 - RNA, 22 nt, Human
uaucaucuuguugucaugcagc

SEQ ID NO: 825309 - RNA, 22 nt, Human
uagaaaugugauaauagcuuaa

SEQ ID NO: 825310 - RNA, 20 nt, Human
ucaggaugugcugagugaag

SEQ ID NO: 825311 - RNA, 22 nt, Human
cucaggauuuacuaauuucaag

SEQ ID NO: 825312 - RNA, 15 nt, Human
uucaggauaugacuc

SEQ ID NO: 825313 - RNA, 22 nt, Human
uaaauuaugucacaugacucug

SEQ ID NO: 825314 - RNA, 22 nt, Human
ggcugaaggaugaaagcugcag

SEQ ID NO: 825315 - RNA, 22 nt, Human
auucucuuuguauaacaucuug

SEQ ID NO: 825316 - RNA, 22 nt, Human
ucucgacagccuggcacagugg

SEQ ID NO: 825317 - RNA, 22 nt, Human
ucuacugcacuggugucucauc

SEQ ID NO: 825318 - RNA, 22 nt, Human
gacagcuguggagaggcaugug

SEQ ID NO: 825319 - RNA, 22 nt, Human
aggcagcauccagaggagaaug

SEQ ID NO: 825320 - RNA, 22 nt, Human
uaaggccaggcuguggucggca

SEQ ID NO: 825321 - RNA, 22 nt, Human
uggagucugugaugcucugggu

SEQ ID NO: 825322 - RNA, 22 nt, Human
gagugucugaauuagagcacaa

SEQ ID NO: 825323 - RNA, 22 nt, Human
aaaggcaggcuuucacaucuca

SEQ ID NO: 825324 - RNA, 22 nt, Human
cugcuguguggugaaacucagu

SEQ ID NO: 825325 - RNA, 22 nt, Human
ggaggugggauuaggaccuaaa

SEQ ID NO: 825326 - RNA, 22 nt, Human
gcgucugaguugcgggggcuca

SEQ ID NO: 825327 - RNA, 22 nt, Human
ugaggcagugauguuuaagcac

SEQ ID NO: 825328 - RNA, 22 nt, Human
agacaaauggaguaugagcaac

SEQ ID NO: 825329 - RNA, 22 nt, Human
uccaggaggcucugguugacgu

SEQ ID NO: 825330 - RNA, 22 nt, Human
acaggacuguggaaggaucucu

SEQ ID NO: 825331 - RNA, 22 nt, Human
aacauucugguucuaaaaaccu

SEQ ID NO: 825332 - RNA, 22 nt, Human
uuauuacacugaaagaauugcg

SEQ ID NO: 825333 - RNA, 22 nt, Human
aauauccacacugugucccugc

SEQ ID NO: 825334 - RNA, 22 nt, Human
aucaggauagugguuaccuggg

SEQ ID NO: 825335 - RNA, 22 nt, Human
agagggcagucucagauuggga

SEQ ID NO: 825336 - RNA, 22 nt, Human
ugcuggguuaccuaagccuaaa

SEQ ID NO: 825337 - RNA, 22 nt, Human
ggguggagaggcuaaguccagu

SEQ ID NO: 825338 - RNA, 16 nt, Human
cuuccucuucacuggc

SEQ ID NO: 825339 - RNA, 22 nt, Human
aaucauucuuauuucacagcaa

SEQ ID NO: 825340 - RNA, 22 nt, Human
acauuguuugagaauacagaug

SEQ ID NO: 825341 - RNA, 22 nt, Human
guuguuuuuguucucuauagcu

SEQ ID NO: 825342 - RNA, 22 nt, Human
uucuucuuuaucucaguauccu

SEQ ID NO: 825343 - RNA, 21 nt, Human
augucaaaugcuuuauuuuau

SEQ ID NO: 825344 - RNA, 20 nt, Human
gaagcagcuucauguagaca

SEQ ID NO: 825345 - RNA, 22 nt, Human
guucuucagauuccauuucagu

SEQ ID NO: 825346 - RNA, 22 nt, Human
uugaauaguguuuucaguauac

SEQ ID NO: 825347 - RNA, 18 nt, Human
cgaggcaggcggaucacg

SEQ ID NO: 825348 - RNA, 22 nt, Human
uuauucuuuaaacauauauguu

SEQ ID NO: 825349 - RNA, 22 nt, Human
cugcugugugcuuacuuggguu

SEQ ID NO: 825350 - RNA, 22 nt, Human
aaggaguuuggguagucauaca

SEQ ID NO: 825351 - RNA, 22 nt, Human
cccaggaaccuaccagcucgag

SEQ ID NO: 825352 - RNA, 22 nt, Human
gcucaggagcucuugguggcgc

SEQ ID NO: 825353 - RNA, 22 nt, Human
gauuucuuuagguguaauagug

SEQ ID NO: 825354 - RNA, 22 nt, Human
ccagagagauugcuucuaaaga

SEQ ID NO: 825355 - RNA, 22 nt, Human
cccaggcagccugcagggaagg

SEQ ID NO: 825356 - RNA, 22 nt, Human
aucaggauuacacggggaugcu

SEQ ID NO: 825357 - RNA, 22 nt, Human
uugcuguguaacuccuggccug

SEQ ID NO: 825358 - RNA, 22 nt, Human
caagauggguguugugaugguu

SEQ ID NO: 825359 - RNA, 22 nt, Human
caaugugguggcagaugucagu

SEQ ID NO: 825360 - RNA, 22 nt, Human
gccaggaggcugcuguguaggc

SEQ ID NO: 825361 - RNA, 22 nt, Human
uccaggaggugaggggaccaaa

SEQ ID NO: 825362 - RNA, 22 nt, Human
ccagggaguuuccaaucugaga

SEQ ID NO: 825363 - RNA, 22 nt, Human
cauaauauacuacauugaugaa

SEQ ID NO: 825364 - RNA, 22 nt, Human
uuauacauguguuuugagauga

SEQ ID NO: 825365 - RNA, 22 nt, Human
uuucuucagagagagcuuuccc

SEQ ID NO: 825366 - RNA, 22 nt, Human
ugccugugguuccaguuuuuuc

SEQ ID NO: 825367 - RNA, 22 nt, Human
uuuccucacuucaugagaguuu

SEQ ID NO: 825368 - RNA, 22 nt, Human
ucagugugaggucuuccacccg

SEQ ID NO: 825369 - RNA, 22 nt, Human
cagcugacccgugggaggcggg

SEQ ID NO: 825370 - RNA, 22 nt, Human
ggaggaggcggcagaaguuccu

SEQ ID NO: 825371 - RNA, 22 nt, Human
agcaccuugcucuuggccuucc

SEQ ID NO: 825372 - RNA, 22 nt, Human
cuugcuggugguguuuucuaug

SEQ ID NO: 825373 - RNA, 22 nt, Human
ccccaggagaaaucuuaaacua

SEQ ID NO: 825374 - RNA, 22 nt, Human
cccaggaggcggagguuguggu

SEQ ID NO: 825375 - RNA, 22 nt, Human
ugcauggacucaucagacaaga

SEQ ID NO: 825376 - RNA, 22 nt, Human
aguuugaaaguauugacagaag

SEQ ID NO: 825377 - RNA, 22 nt, Human
cuugaaguugcaaaacauuaau

SEQ ID NO: 825378 - RNA, 22 nt, Human
cuggcaguguccagcucgugau

SEQ ID NO: 825379 - RNA, 21 nt, Human
aggucagcccagcucuggaag

SEQ ID NO: 825380 - RNA, 22 nt, Human
ucugggaagcugcgugccuguu

SEQ ID NO: 825381 - RNA, 22 nt, Human
gaggcaguguugaaaaggagag

SEQ ID NO: 825382 - RNA, 22 nt, Human
cuuccuucugaagcauagaagc

SEQ ID NO: 825383 - RNA, 22 nt, Human
uucaacuagauuuauacaauuc

SEQ ID NO: 825384 - RNA, 22 nt, Human
uaaggccauuauggugggcccg

SEQ ID NO: 825385 - RNA, 22 nt, Human
uuucaaagaguuguaaauuacu

SEQ ID NO: 825386 - RNA, 22 nt, Human
ugagauguaagguaugcuuacu

SEQ ID NO: 825387 - RNA, 22 nt, Human
ugaaucaguauaaauucucaaa

SEQ ID NO: 825388 - RNA, 22 nt, Human
caagaugggcaccccagcaccu

SEQ ID NO: 825389 - RNA, 22 nt, Human
ugcugcugaucauuuauagucu

SEQ ID NO: 825390 - RNA, 22 nt, Human
caggagaggaggcuacuucuua

SEQ ID NO: 825391 - RNA, 22 nt, Human
acccaggagacagguugcagug

SEQ ID NO: 825392 - RNA, 23 nt, Human
agaggcaggaguggcuugcccgg

SEQ ID NO: 825393 - RNA, 22 nt, Human
aggcagugcaugcaaaggucgg

SEQ ID NO: 825394 - RNA, 22 nt, Human
aggagaggcucuaacucugugu

SEQ ID NO: 825395 - RNA, 22 nt, Human
ggagcagggcagugaauucugg

SEQ ID NO: 825396 - RNA, 22 nt, Human
uguccucagauaugucuacucu

SEQ ID NO: 825397 - RNA, 22 nt, Human
agaggcagcagucauacuacag

SEQ ID NO: 825398 - RNA, 21 nt, Human
acagucuccccagaucucucc

SEQ ID NO: 825399 - RNA, 22 nt, Human
cucccaggacucagaggagaag

SEQ ID NO: 825400 - RNA, 22 nt, Human
ccaugagccaggcugaggaagc

SEQ ID NO: 825401 - RNA, 22 nt, Human
acccaggagagagcuauaaaau

SEQ ID NO: 825402 - RNA, 22 nt, Human
uuugcagugauucuugcaguga

SEQ ID NO: 825403 - RNA, 22 nt, Human
ugaggcaggagguugagaacug

SEQ ID NO: 825404 - RNA, 22 nt, Human
cacaauguauauguauaucaaa

SEQ ID NO: 825405 - RNA, 18 nt, Human
ugcuggguaacuguaugg

SEQ ID NO: 825406 - RNA, 20 nt, Human
ucauuguguugccaauuccc

SEQ ID NO: 825407 - RNA, 22 nt, Human
gcugucccgcugacuuccagcu

SEQ ID NO: 825408 - RNA, 22 nt, Human
aucacauugccagugauuaccc

SEQ ID NO: 825409 - RNA, 22 nt, Human
caggcagccugcggucugcaca

SEQ ID NO: 825410 - RNA, 22 nt, Human
cccuggaguccuggcaguugau

SEQ ID NO: 825411 - RNA, 22 nt, Human
uggcagcugcaggccuccugag

SEQ ID NO: 825412 - RNA, 22 nt, Human
cugccaggcacgugcagcauca

SEQ ID NO: 825413 - RNA, 22 nt, Human
uguguuauugccacugaagacc

SEQ ID NO: 825414 - RNA, 22 nt, Human
cuguggaaaauuuguauguaau

SEQ ID NO: 825415 - RNA, 23 nt, Human
uugauuucaaaugcagagaacac

SEQ ID NO: 825416 - RNA, 22 nt, Human
agugagaguauuaaugugaacu

SEQ ID NO: 825417 - RNA, 22 nt, Human
uuugcaaagaaauuauugcugu

SEQ ID NO: 825418 - RNA, 22 nt, Human
uucccucucacuuaaagcuugg

SEQ ID NO: 825419 - RNA, 22 nt, Human
aagacugucuuuucugagugac

SEQ ID NO: 825420 - RNA, 20 nt, Human
accaauguuagcuuaguacu

SEQ ID NO: 825421 - RNA, 22 nt, Human
ggccagaaguuggaaaagagcc

SEQ ID NO: 825422 - RNA, 22 nt, Human
uugcagcugcaguaaauguuca

SEQ ID NO: 825423 - RNA, 22 nt, Human
cagugauguuucugcaucagag

SEQ ID NO: 825424 - RNA, 22 nt, Human
ugcauguguuugccacagugag

SEQ ID NO: 825425 - RNA, 22 nt, Human
uccaggaguccuggguggcccc

SEQ ID NO: 825426 - RNA, 22 nt, Human
aaacugcuuuccacaguggcua

SEQ ID NO: 825427 - RNA, 22 nt, Human
accaggaggccuggagcacaaa

SEQ ID NO: 825428 - RNA, 22 nt, Human
uuggaaagcaagcuggacauac

SEQ ID NO: 825429 - RNA, 22 nt, Human
caaguaaagaaucacauuucuu

SEQ ID NO: 825430 - RNA, 22 nt, Human
uucaugugaucacagauuguaa

SEQ ID NO: 825431 - RNA, 22 nt, Human
aggcagccaaucagaggcugac

SEQ ID NO: 825432 - RNA, 22 nt, Human
auguuuccagguucuuccuaug

SEQ ID NO: 825433 - RNA, 22 nt, Human
gagaggucaucucccaucagca

SEQ ID NO: 825434 - RNA, 22 nt, Human
ggcucagagaccugcgaucuga

SEQ ID NO: 825435 - RNA, 22 nt, Human
auuguauaacagcauguauuuu

SEQ ID NO: 825436 - RNA, 22 nt, Human
ucuucauuuuauagcaucugug

SEQ ID NO: 825437 - RNA, 22 nt, Human
gagugcaguuggggugagggga

SEQ ID NO: 825438 - RNA, 22 nt, Human
uucccucuccuacucaggaaag

SEQ ID NO: 825439 - RNA, 22 nt, Human
accuugaugccuuuccaagaug

SEQ ID NO: 825440 - RNA, 22 nt, Human
uugaaagacuucuccugugaaa

SEQ ID NO: 825441 - RNA, 22 nt, Human
agacgagggcccccaggacagc

SEQ ID NO: 825442 - RNA, 22 nt, Human
uccauuuuguagguaugcuaca

SEQ ID NO: 825443 - RNA, 22 nt, Human
cugcugugacagcugccguguu

SEQ ID NO: 825444 - RNA, 22 nt, Human
uaaaaugaucucucauguucuu

SEQ ID NO: 825445 - RNA, 22 nt, Human
gauggcagucaaccaggugagg

SEQ ID NO: 825446 - RNA, 22 nt, Human
gagaggugaauguggaugccac

SEQ ID NO: 825447 - RNA, 22 nt, Human
cccaggagguggagguugcagu

SEQ ID NO: 825448 - RNA, 22 nt, Human
agggagcuaggauccugaaggu

SEQ ID NO: 825449 - RNA, 22 nt, Human
ucucaggaagauuagggcuaag

SEQ ID NO: 825450 - RNA, 22 nt, Human
caggauggucagaugcauuguc

SEQ ID NO: 825451 - RNA, 22 nt, Human
gcauucuuuuuaggagguuccu

SEQ ID NO: 825452 - RNA, 22 nt, Human
uuucugugguggguaguucaga

SEQ ID NO: 825453 - RNA, 22 nt, Human
auuuguagugaagugaaaauaa

SEQ ID NO: 825454 - RNA, 22 nt, Human
uuugcacuagcauuuguccaug

SEQ ID NO: 825455 - RNA, 22 nt, Human
ucacagacacagggagaagcau

SEQ ID NO: 825456 - RNA, 22 nt, Human
uagcccagaagagggaagcaac

SEQ ID NO: 825457 - RNA, 22 nt, Human
ucauuuuucacacagggucacc

SEQ ID NO: 825458 - RNA, 22 nt, Human
cuguggaaauaaacaaugcuaa

SEQ ID NO: 825459 - RNA, 22 nt, Human
ucugucucaaguucuugcacuc

SEQ ID NO: 825460 - RNA, 22 nt, Human
gcucaggacccaggugugaccu

SEQ ID NO: 825461 - RNA, 22 nt, Human
accaggaguaacagugaguggu

SEQ ID NO: 825462 - RNA, 22 nt, Human
cauggcugcgagaagagugggu

SEQ ID NO: 825463 - RNA, 22 nt, Human
cccaggaggugugcccaacucg

SEQ ID NO: 825464 - RNA, 22 nt, Human
acccaggagcaggcugggcagu

SEQ ID NO: 825465 - RNA, 22 nt, Human
gcagcugagagaagaacagggc

SEQ ID NO: 825466 - RNA, 22 nt, Human
gcagcucccagcuugaaagguc

SEQ ID NO: 825467 - RNA, 22 nt, Human
uuucaaagucaauaucauuacc

SEQ ID NO: 825468 - RNA, 22 nt, Human
gagcaccucaauuugcuauuug

SEQ ID NO: 825469 - RNA, 22 nt, Human
acaggccacaguggagucucug

SEQ ID NO: 825470 - RNA, 22 nt, Human
ucauuuaauaauuuuugaguag

SEQ ID NO: 825471 - RNA, 22 nt, Human
guugaaaguagaugcuauuugg

SEQ ID NO: 825472 - RNA, 22 nt, Human
aaaaaucuaugacugcuucucc

SEQ ID NO: 825473 - RNA, 22 nt, Human
ggugaagggccuuaggagacag

SEQ ID NO: 825474 - RNA, 22 nt, Human
uucucugagauagacuaagugg

SEQ ID NO: 825475 - RNA, 23 nt, Human
agacaguggccgagagguacuag

SEQ ID NO: 825476 - RNA, 22 nt, Human
uugaaagucacaauggcauuaa

SEQ ID NO: 825477 - RNA, 22 nt, Human
cccaggaccgcgcggcugagcg

SEQ ID NO: 825478 - RNA, 22 nt, Human
ccuggagagagaggccaacugc

SEQ ID NO: 825479 - RNA, 22 nt, Human
acauuuaaauaccuauguuucu

SEQ ID NO: 825480 - RNA, 22 nt, Human
agcccaggaaucugcaucuuga

SEQ ID NO: 825481 - RNA, 22 nt, Human
gaggcagugucgguggcaggau

SEQ ID NO: 825482 - RNA, 22 nt, Human
ccaggcagcaaauuuucugaau

SEQ ID NO: 825483 - RNA, 22 nt, Human
ugaaucauggauaaauagcuua

SEQ ID NO: 825484 - RNA, 22 nt, Human
ugagggagagggcgaaaaugaa

SEQ ID NO: 825485 - RNA, 22 nt, Human
cauaauaucuccgauuacuugc

SEQ ID NO: 825486 - RNA, 20 nt, Human
uccaggagaacugggagccg

SEQ ID NO: 825487 - RNA, 22 nt, Human
gaaauauuguacuggagauguu

SEQ ID NO: 825488 - RNA, 20 nt, Human
uuucaguugguuaauggcau

SEQ ID NO: 825489 - RNA, 22 nt, Human
ugaggggaaggcaugauaaaua

SEQ ID NO: 825490 - RNA, 22 nt, Human
aggguggccaugagggagagau

SEQ ID NO: 825491 - RNA, 22 nt, Human
gagggccagcagccucagcaug

SEQ ID NO: 825492 - RNA, 22 nt, Human
agagggauaauauguauuguaa

SEQ ID NO: 825493 - RNA, 22 nt, Human
acucaggagggaucagcuauca

SEQ ID NO: 825494 - RNA, 22 nt, Human
gaggcaguguuuacugcccugu

SEQ ID NO: 825495 - RNA, 22 nt, Human
aauauaaugcuguuuuaugcca

SEQ ID NO: 825496 - RNA, 22 nt, Human
ucucaggaauagaguggcagca

SEQ ID NO: 825497 - RNA, 22 nt, Human
cagucuuuguucccauuacuga

SEQ ID NO: 825498 - RNA, 22 nt, Human
ucgagcucuggagccaaggaug

SEQ ID NO: 825499 - RNA, 22 nt, Human
auacaacuuuacaugcaauucc

SEQ ID NO: 825500 - RNA, 22 nt, Human
cgaggcagacaaaaguuggaag

SEQ ID NO: 825501 - RNA, 22 nt, Human
caacugagcaguagcgucugga

SEQ ID NO: 825502 - RNA, 22 nt, Human
uaccauuucauucuuuccucau

SEQ ID NO: 825503 - RNA, 22 nt, Human
agacccagaaagcagcugcauu

SEQ ID NO: 825504 - RNA, 20 nt, Human
cauuuguuagcuuucuacug

SEQ ID NO: 825505 - RNA, 22 nt, Human
ucuuugcaaaauacaacaaugg

SEQ ID NO: 825506 - RNA, 23 nt, Human
ccacuagcaccuguucaacuucu

SEQ ID NO: 825507 - RNA, 22 nt, Human
ucaggagaaaauaucaggaagu

SEQ ID NO: 825508 - RNA, 22 nt, Human
uacuuuuagccuauuugauucu

SEQ ID NO: 825509 - RNA, 22 nt, Human
auuaaauuaaguggcuaauuua

SEQ ID NO: 825510 - RNA, 22 nt, Human
uuaagauagaacccaguagucu

SEQ ID NO: 825511 - RNA, 22 nt, Human
cccaggagagggaaccaaaugu

SEQ ID NO: 825512 - RNA, 22 nt, Human
gaagaggaugacaggagccggu

SEQ ID NO: 825513 - RNA, 22 nt, Human
gauuucuuugcaagcuguguuc

SEQ ID NO: 825514 - RNA, 22 nt, Human
agaaaauauucauugagaggcu

SEQ ID NO: 825515 - RNA, 22 nt, Human
acacaaauuguaggauaauugc

SEQ ID NO: 825516 - RNA, 22 nt, Human
gaggccuggagccgccuaggcg

SEQ ID NO: 825517 - RNA, 22 nt, Human
uacccaggaggaaacugaggcu

SEQ ID NO: 825518 - RNA, 22 nt, Human
aaggcagcucagcucauggcag

SEQ ID NO: 825519 - RNA, 22 nt, Human
caggcagcugaggacuuugcua

SEQ ID NO: 825520 - RNA, 22 nt, Human
agaggaugauuuuaaggacacu

SEQ ID NO: 825521 - RNA, 22 nt, Human
uucucagagugaccaagucuuu

SEQ ID NO: 825522 - RNA, 22 nt, Human
agucucugcugguugugccuau

SEQ ID NO: 825523 - RNA, 22 nt, Human
uucaggauucucucccauuuac

SEQ ID NO: 825524 - RNA, 22 nt, Human
acugcuuuaucugagaaguccu

SEQ ID NO: 825525 - RNA, 15 nt, Human
cccaggaguucgaga

SEQ ID NO: 825526 - RNA, 22 nt, Human
agacucaagacugcagaagacg

SEQ ID NO: 825527 - RNA, 22 nt, Human
uguccauggauagagcugcucg

SEQ ID NO: 825528 - RNA, 22 nt, Human
guguuuuaagaaagaagcucag

SEQ ID NO: 825529 - RNA, 22 nt, Human
cucaggauggaagccuacagga

SEQ ID NO: 825530 - RNA, 22 nt, Human
uaagaacuucggacauguuauc

SEQ ID NO: 825531 - RNA, 22 nt, Human
gaaacugugaggaucuuaacuu

SEQ ID NO: 825532 - RNA, 21 nt, Human
ucucugugucuuuaagcugga

SEQ ID NO: 825533 - RNA, 22 nt, Human
gggagcugaauggcaauggaga

SEQ ID NO: 825534 - RNA, 22 nt, Human
uuuucauuguuccucgagcauu

SEQ ID NO: 825535 - RNA, 22 nt, Human
ucugcaggaggcuggcugcagg

SEQ ID NO: 825536 - RNA, 22 nt, Human
accaggaguuuugaccaggggc

SEQ ID NO: 825537 - RNA, 22 nt, Human
gucuccugagacugcagucacc

SEQ ID NO: 825538 - RNA, 19 nt, Human
gaggucagcaagaaguauu

SEQ ID NO: 825539 - RNA, 21 nt, Human
aggcagcaggauccagggaca

SEQ ID NO: 825540 - RNA, 22 nt, Human
uucugugauugacauguggcuu

SEQ ID NO: 825541 - RNA, 22 nt, Human
uuugacauugccaauuugcuca

SEQ ID NO: 825542 - RNA, 22 nt, Human
uagauuuuacuucugucauuac

SEQ ID NO: 825543 - RNA, 22 nt, Human
uuuuuuaguuaggucagaaugu

SEQ ID NO: 825544 - RNA, 19 nt, Human
aggcaggugcagagguccc

SEQ ID NO: 825545 - RNA, 22 nt, Human
auuuucagagacaucuggacuu

SEQ ID NO: 825546 - RNA, 22 nt, Human
uuugaaauaugaggcauuauga

SEQ ID NO: 825547 - RNA, 22 nt, Human
uuaugauuugccacagauuggu

SEQ ID NO: 825548 - RNA, 22 nt, Human
auuucagguaccugugggaucc

SEQ ID NO: 825549 - RNA, 22 nt, Human
ucccaggaauccguccucuaga

SEQ ID NO: 825550 - RNA, 21 nt, Human
cgcagagcgaacuugcggcgc

SEQ ID NO: 825551 - RNA, 22 nt, Human
uuuuaucuucauuccuaucuac

SEQ ID NO: 825552 - RNA, 22 nt, Human
aggcagcccacaggacacagga

SEQ ID NO: 825553 - RNA, 20 nt, Human
guaaaauauggucuuugggu

SEQ ID NO: 825554 - RNA, 22 nt, Human
aggcagugcugugcccugaacc

SEQ ID NO: 825555 - RNA, 20 nt, Human
acaggagaucugaggaaagg

SEQ ID NO: 825556 - RNA, 22 nt, Human
gucaggauuugaacucaggucu

SEQ ID NO: 825557 - RNA, 22 nt, Human
cuuacagagaagaaaauguagu

SEQ ID NO: 825558 - RNA, 22 nt, Human
ugugaaagcaagucuaguucuc

SEQ ID NO: 825559 - RNA, 22 nt, Human
gaauacauuggaaaucagaaua

SEQ ID NO: 825560 - RNA, 22 nt, Human
ucugcugugggucuauauuuua

SEQ ID NO: 825561 - RNA, 22 nt, Human
uccaggagaaaacugacggugg

SEQ ID NO: 825562 - RNA, 22 nt, Human
aagcuggcaugucaccugagaa

SEQ ID NO: 825563 - RNA, 22 nt, Human
agggggugcccagaugaaggau

SEQ ID NO: 825564 - RNA, 22 nt, Human
uaucuaaaggauuuaauuuagu

SEQ ID NO: 825565 - RNA, 22 nt, Human
cagcugacgccagaguggaauu

SEQ ID NO: 825566 - RNA, 22 nt, Human
ggugagaggcagaggacagcuu

SEQ ID NO: 825567 - RNA, 22 nt, Human
uggaggaaaaaaccaggcagag

SEQ ID NO: 825568 - RNA, 22 nt, Human
cccuggaggucagaggccuggg

SEQ ID NO: 825569 - RNA, 22 nt, Human
cagucucuugcuucauuaguug

SEQ ID NO: 825570 - RNA, 22 nt, Human
uuuuucaagacaaccugcaugu

SEQ ID NO: 825571 - RNA, 22 nt, Human
uuuguaaaggccugaauuucag

SEQ ID NO: 825572 - RNA, 22 nt, Human
agaggucagauuucuccuggug

SEQ ID NO: 825573 - RNA, 22 nt, Human
ucuuugcagaauuuaacuuugc

SEQ ID NO: 825574 - RNA, 22 nt, Human
uggcagagcaaaaagauagaau

SEQ ID NO: 825575 - RNA, 22 nt, Human
guuuauaaggcccaauauuucu

SEQ ID NO: 825576 - RNA, 22 nt, Human
uacccaggagaaacagcagggc

SEQ ID NO: 825577 - RNA, 22 nt, Human
uugauagguuuuauguauaguu

SEQ ID NO: 825578 - RNA, 19 nt, Human
agcagcuggagguggagug

SEQ ID NO: 825579 - RNA, 17 nt, Human
aagagaggcugagcugg

SEQ ID NO: 825580 - RNA, 22 nt, Human
ggcuuggaaauugcaggacaca

SEQ ID NO: 825581 - RNA, 22 nt, Human
cugucauugagccugucagggc

SEQ ID NO: 825582 - RNA, 22 nt, Human
cuggaggcacccuuagagaggc

SEQ ID NO: 825583 - RNA, 22 nt, Human
aggcaguguguagcuggaagag

SEQ ID NO: 825584 - RNA, 21 nt, Human
agggagcuuuagguagaaguu

SEQ ID NO: 825585 - RNA, 22 nt, Human
acaugcauaggagaagucuuua

SEQ ID NO: 825586 - RNA, 22 nt, Human
ggagugggaacaaugacauggu

SEQ ID NO: 825587 - RNA, 22 nt, Human
cauucucaauaguagaugagua

SEQ ID NO: 825588 - RNA, 22 nt, Human
uaggcagcauggauucugaaua

SEQ ID NO: 825589 - RNA, 22 nt, Human
uuugaaaguccuaggagagucc

SEQ ID NO: 825590 - RNA, 22 nt, Human
ugaggggagcuagcaugccuug

SEQ ID NO: 825591 - RNA, 22 nt, Human
ugaggcagccugcauuaaagag

SEQ ID NO: 825592 - RNA, 22 nt, Human
uacaaaguaauguauaauaucg

SEQ ID NO: 825593 - RNA, 22 nt, Human
aaaggccacugcaagggaaggu

SEQ ID NO: 825594 - RNA, 22 nt, Human
gaaucucaguggaagcaggaag

SEQ ID NO: 825595 - RNA, 20 nt, Human
uuucacagucccuguuuccu

SEQ ID NO: 825596 - RNA, 18 nt, Human
aggcaggugcuggaaguc

SEQ ID NO: 825597 - RNA, 20 nt, Human
augugagggguugaaguggg

SEQ ID NO: 825598 - RNA, 22 nt, Human
cuugaaagucacaugcagcccu

SEQ ID NO: 825599 - RNA, 22 nt, Human
ugaggcaggaugcuugcacagg

SEQ ID NO: 825600 - RNA, 22 nt, Human
auucuucaccauggauaauuug

SEQ ID NO: 825601 - RNA, 22 nt, Human
agggagcucaguuggaagcggu

SEQ ID NO: 825602 - RNA, 22 nt, Human
gaggcaacacauuuggaaagca

SEQ ID NO: 825603 - RNA, 20 nt, Human
aggagggaccuggauuggcg

SEQ ID NO: 825604 - RNA, 22 nt, Human
aaagauuauggcauugaaauac

SEQ ID NO: 825605 - RNA, 22 nt, Human
aguggcagagccaaguagagcc

SEQ ID NO: 825606 - RNA, 22 nt, Human
agagggagugaaauggaauaga

SEQ ID NO: 825607 - RNA, 22 nt, Human
accaggagguguuugcucaagu

SEQ ID NO: 825608 - RNA, 22 nt, Human
cauuguuaccaucuuuuaccua

SEQ ID NO: 825609 - RNA, 22 nt, Human
gucuuucuaugaugaacuguug

SEQ ID NO: 825610 - RNA, 22 nt, Human
ugaggcagcaauugauuauuca

SEQ ID NO: 825611 - RNA, 22 nt, Human
cugggaaauggcuucgagcuca

SEQ ID NO: 825612 - RNA, 17 nt, Human
ucccaggaacagggaau

SEQ ID NO: 825613 - RNA, 22 nt, Human
cagucucucugaaguauuaaga

SEQ ID NO: 825614 - RNA, 22 nt, Human
ggcacagagcccagcuuccuag

SEQ ID NO: 825615 - RNA, 19 nt, Human
ugaaauggcaguugcuaaa

SEQ ID NO: 825616 - RNA, 22 nt, Human
ggaggcaggaaagacagguuca

SEQ ID NO: 825617 - RNA, 22 nt, Human
uccaggagauacacugcaccag

SEQ ID NO: 825618 - RNA, 22 nt, Human
uggagcugggguuugaaucugg

SEQ ID NO: 825619 - RNA, 22 nt, Human
ugagaacugaggauuugaauuc

SEQ ID NO: 825620 - RNA, 22 nt, Human
uuagccauuaauguccugugca

SEQ ID NO: 825621 - RNA, 22 nt, Human
aggcaagcccccagugaggcuc

SEQ ID NO: 825622 - RNA, 22 nt, Human
auuugcaaagucguaucuguga

SEQ ID NO: 825623 - RNA, 22 nt, Human
acugugugacuguuauuacugu

SEQ ID NO: 825624 - RNA, 21 nt, Human
uccaggaguucuaauaggugu

SEQ ID NO: 825625 - RNA, 22 nt, Human
aggccagcucuacccuuggacu

SEQ ID NO: 825626 - RNA, 22 nt, Human
cagugguugguagauacuugag

SEQ ID NO: 825627 - RNA, 22 nt, Human
gaauacaugauacaugaacugc

SEQ ID NO: 825628 - RNA, 19 nt, Human
gccaggagggcucuggcug

SEQ ID NO: 825629 - RNA, 22 nt, Human
gcuucccacagcuggacugggg

SEQ ID NO: 825630 - RNA, 22 nt, Human
acaauucugaugguuucccagu

SEQ ID NO: 825631 - RNA, 22 nt, Human
auuuucaaaacaucugcugugu

SEQ ID NO: 825632 - RNA, 22 nt, Human
uuucagaaagcugaacauauga

SEQ ID NO: 825633 - RNA, 22 nt, Human
gcagaggccuagguggaaggcc

SEQ ID NO: 825634 - RNA, 22 nt, Human
cccaggaaugaggggcggaggc

SEQ ID NO: 825635 - RNA, 22 nt, Human
cccaggagauggugcguggucu

SEQ ID NO: 825636 - RNA, 22 nt, Human
aagccgaggccacacagcagga

SEQ ID NO: 825637 - RNA, 17 nt, Human
ggcagcugugugcaugc

SEQ ID NO: 825638 - RNA, 21 nt, Human
ggcagcucagcagauggggac

SEQ ID NO: 825639 - RNA, 22 nt, Human
uguugaagauaaaguucucauu

SEQ ID NO: 825640 - RNA, 22 nt, Human
uuugaaagccuggcuuuucucu

SEQ ID NO: 825641 - RNA, 22 nt, Human
uggcagcucuguucaacaugag

SEQ ID NO: 825642 - RNA, 22 nt, Human
auauuguugacuauaagaguaa

SEQ ID NO: 825643 - RNA, 22 nt, Human
uuagagucaagcugcauguucu

SEQ ID NO: 825644 - RNA, 22 nt, Human
gaaggucaccuccccucucugg

SEQ ID NO: 825645 - RNA, 22 nt, Human
cuucuucacacuggucugaagc

SEQ ID NO: 825646 - RNA, 22 nt, Human
cuucagaagccugcagccuuug

SEQ ID NO: 825647 - RNA, 22 nt, Human
aaggcaguuugggccaccaucu

SEQ ID NO: 825648 - RNA, 22 nt, Human
uauaucaccaaaaacaguucug

SEQ ID NO: 825649 - RNA, 22 nt, Human
uccuucuuucccccuagucauu

SEQ ID NO: 825650 - RNA, 22 nt, Human
acagucauuagauacaaugucu

SEQ ID NO: 825651 - RNA, 22 nt, Human
cagucucagaggugggaguggg

SEQ ID NO: 825652 - RNA, 22 nt, Human
guaggcagggcuguggggagaa

SEQ ID NO: 825653 - RNA, 22 nt, Human
gagagggauacugaguuuuggu

SEQ ID NO: 825654 - RNA, 22 nt, Human
gggaggugauuaggaccaugua

SEQ ID NO: 825655 - RNA, 18 nt, Human
ugcuuggagcauuuacca

SEQ ID NO: 825656 - RNA, 22 nt, Human
agcagagguuuguuggaaaccu

SEQ ID NO: 825657 - RNA, 18 nt, Human
aagaggaggagcagguug

SEQ ID NO: 825658 - RNA, 22 nt, Human
gcuguguuuuauguuagguuaa

SEQ ID NO: 825659 - RNA, 22 nt, Human
gugguaaucggauucuuaccgg

SEQ ID NO: 825660 - RNA, 22 nt, Human
uuuuccagagcugucucuugca

SEQ ID NO: 825661 - RNA, 22 nt, Human
guuaaauucgaugauggauaaa

SEQ ID NO: 825662 - RNA, 22 nt, Human
aggaggggcauagaaauguaau

SEQ ID NO: 825663 - RNA, 22 nt, Human
cacucaggguacaauggagggc

SEQ ID NO: 825664 - RNA, 22 nt, Human
ugaacucgggaggaggcugcag

SEQ ID NO: 825665 - RNA, 22 nt, Human
gugcugugcgcuuuuucuguau

SEQ ID NO: 825666 - RNA, 22 nt, Human
aguggcagagguugacugcagu

SEQ ID NO: 825667 - RNA, 22 nt, Human
ucucacuggguauaaaugagua

SEQ ID NO: 825668 - RNA, 22 nt, Human
gccaggagcaugucauuguuga

SEQ ID NO: 825669 - RNA, 22 nt, Human
caggagaggcuguacguuucuc

SEQ ID NO: 825670 - RNA, 22 nt, Human
cccaggagccaucugucuuggc

SEQ ID NO: 825671 - RNA, 22 nt, Human
aacaugauggggaagaacaaga

SEQ ID NO: 825672 - RNA, 22 nt, Human
aaaguauucuugacuguuuuuc

SEQ ID NO: 825673 - RNA, 22 nt, Human
guuugcauauuugcacaggaau

SEQ ID NO: 825674 - RNA, 22 nt, Human
gucaggauuauuuuauuaaaag

SEQ ID NO: 825675 - RNA, 22 nt, Human
cagcagaggugguucacauugu

SEQ ID NO: 825676 - RNA, 22 nt, Human
cagugcugggcagaggagagcg

SEQ ID NO: 825677 - RNA, 22 nt, Human
auuggcagaaacagcagggcca

SEQ ID NO: 825678 - RNA, 20 nt, Human
cagaggcaaggagacuugga

SEQ ID NO: 825679 - RNA, 22 nt, Human
auucuucagcaggggacacuau

SEQ ID NO: 825680 - RNA, 22 nt, Human
uaacaauaguguuugcuaguca

SEQ ID NO: 825681 - RNA, 22 nt, Human
gauggacagccuggaaggaaag

SEQ ID NO: 825682 - RNA, 22 nt, Human
ggcagucuuaucagcauuggac

SEQ ID NO: 825683 - RNA, 22 nt, Human
ggagguggcagagggacauucu

SEQ ID NO: 825684 - RNA, 22 nt, Human
ccaugagcuuccuauauagggu

SEQ ID NO: 825685 - RNA, 22 nt, Human
aggcagcuggcagcacccaggg

SEQ ID NO: 825686 - RNA, 23 nt, Human
uuuggacuugugacucuucuccu

SEQ ID NO: 825687 - RNA, 22 nt, Human
ccucacugcuauguguuugcuc

SEQ ID NO: 825688 - RNA, 18 nt, Human
uggcagcaggaagccauu

SEQ ID NO: 825689 - RNA, 22 nt, Human
auauaauacaaccugcuaagug

SEQ ID NO: 825690 - RNA, 22 nt, Human
uaaggccaaacuauuauaguuc

SEQ ID NO: 825691 - RNA, 22 nt, Human
uauucaaaguaccuucauugcc

SEQ ID NO: 825692 - RNA, 19 nt, Human
caaggccaccauuucuccg

SEQ ID NO: 825693 - RNA, 22 nt, Human
uugaaagugccaaguccuagug

SEQ ID NO: 825694 - RNA, 22 nt, Human
uguucuucuagauugccuuuua

SEQ ID NO: 825695 - RNA, 22 nt, Human
agaggacagacggaaagugcca

SEQ ID NO: 825696 - RNA, 19 nt, Human
ggcaggcuggauagagagg

SEQ ID NO: 825697 - RNA, 22 nt, Human
uuuaagauucaguaaggcaaac

SEQ ID NO: 825698 - RNA, 22 nt, Human
ugcuugugagaguuuuuucaga

SEQ ID NO: 825699 - RNA, 22 nt, Human
acuggcagcagcagcccuuggg

SEQ ID NO: 825700 - RNA, 22 nt, Human
cuugcaggauuuugcugcugua

SEQ ID NO: 825701 - RNA, 17 nt, Human
gaggagcuccaguaggu

SEQ ID NO: 825702 - RNA, 22 nt, Human
gaggucaggggagaggcugaug

SEQ ID NO: 825703 - RNA, 22 nt, Human
ucauucuugaucacuaguuagu

SEQ ID NO: 825704 - RNA, 22 nt, Human
cccaggaaacccgaaggcgacc

SEQ ID NO: 825705 - RNA, 22 nt, Human
ucuacuguagugaugcugcagu

SEQ ID NO: 825706 - RNA, 22 nt, Human
gucuucuuuaaccuacuaaagc

SEQ ID NO: 825707 - RNA, 22 nt, Human
auuucccagcuuugaucaguuu

SEQ ID NO: 825708 - RNA, 20 nt, Human
uccaugaguuagagacuaua

SEQ ID NO: 825709 - RNA, 22 nt, Human
cucagaauuuagggcucugagg

SEQ ID NO: 825710 - RNA, 22 nt, Human
uucauucuuauuugugaucugg

SEQ ID NO: 825711 - RNA, 22 nt, Human
aaaauuauggaguaucccaaag

SEQ ID NO: 825712 - RNA, 22 nt, Human
uucaggauaguggugaguggca

SEQ ID NO: 825713 - RNA, 22 nt, Human
ucugucuccucugaggugccag

SEQ ID NO: 825714 - RNA, 22 nt, Human
augcugugccuucucugugcca

SEQ ID NO: 825715 - RNA, 22 nt, Human
ucagagaggcaauacuguuuaa

SEQ ID NO: 825716 - RNA, 20 nt, Human
uacagaaugcaauaaaaugg

SEQ ID NO: 825717 - RNA, 22 nt, Human
uuucuucagccacuccaaacug

SEQ ID NO: 825718 - RNA, 22 nt, Human
uuugaaguggaaaaggauuuaa

SEQ ID NO: 825719 - RNA, 22 nt, Human
gaggucaggcuugcagcagggu

SEQ ID NO: 825720 - RNA, 22 nt, Human
aacaaaugaccugauuucuucc

SEQ ID NO: 825721 - RNA, 22 nt, Human
gccaggaggucagccccucaac

SEQ ID NO: 825722 - RNA, 22 nt, Human
uaggagagcugaacuauugucu

SEQ ID NO: 825723 - RNA, 22 nt, Human
gugcauuuaggucacaugaugu

SEQ ID NO: 825724 - RNA, 22 nt, Human
aagacuguacauuuuccagucu

SEQ ID NO: 825725 - RNA, 17 nt, Human
gaggacagggaaguagg

SEQ ID NO: 825726 - RNA, 22 nt, Human
gaggcugcccaacuggagugga

SEQ ID NO: 825727 - RNA, 22 nt, Human
gagucuuugguaaagucugcug

SEQ ID NO: 825728 - RNA, 22 nt, Human
cucuucuugcuagacugagugc

SEQ ID NO: 825729 - RNA, 22 nt, Human
ggggcagccuccaggaaagcug

SEQ ID NO: 825730 - RNA, 22 nt, Human
gagggaugguaguugacacuga

SEQ ID NO: 825731 - RNA, 22 nt, Human
acacauuucucuuuuuguaagu

SEQ ID NO: 825732 - RNA, 22 nt, Human
guuuuucuuugugugaagacaa

SEQ ID NO: 825733 - RNA, 22 nt, Human
agcuaccuggcuuaucacuguc

SEQ ID NO: 825734 - RNA, 22 nt, Human
uugguuuacuaggauucaaauu

SEQ ID NO: 825735 - RNA, 22 nt, Human
uucugugaaucuuuuuucccac

SEQ ID NO: 825736 - RNA, 22 nt, Human
uguccucuuccagugcuccuuc

SEQ ID NO: 825737 - RNA, 22 nt, Human
ugugcaggugcaggaagggggc

SEQ ID NO: 825738 - RNA, 22 nt, Human
ggagccuggucagguuggcucc

SEQ ID NO: 825739 - RNA, 22 nt, Human
ggcagcauauauucagugggca

SEQ ID NO: 825740 - RNA, 22 nt, Human
agggagcuuccgaacuacagcu

SEQ ID NO: 825741 - RNA, 22 nt, Human
cccaggaaaugggcucuugccu

SEQ ID NO: 825742 - RNA, 22 nt, Human
gcaagcugaugugauagugaaa

SEQ ID NO: 825743 - RNA, 22 nt, Human
aucaggaugcugucaguuacca

SEQ ID NO: 825744 - RNA, 22 nt, Human
aaggccaacuaggaugagcuag

SEQ ID NO: 825745 - RNA, 22 nt, Human
uuucaguucaguuuauuauauc

SEQ ID NO: 825746 - RNA, 22 nt, Human
gcuagaaaucgacuucagaauu

SEQ ID NO: 825747 - RNA, 22 nt, Human
uuagccauuaaauuacaaggug

SEQ ID NO: 825748 - RNA, 22 nt, Human
agagcagcacguuguccccaca

SEQ ID NO: 825749 - RNA, 17 nt, Human
gcgcagcuccuggcgcg

SEQ ID NO: 825750 - RNA, 21 nt, Human
ucacagacuggucagugaggc

SEQ ID NO: 825751 - RNA, 22 nt, Human
aggcagugcucaagacagcagc

SEQ ID NO: 825752 - RNA, 22 nt, Human
caaauacuggguaaguuaauuu

SEQ ID NO: 825753 - RNA, 22 nt, Human
auacacauguguaugugcaugc

SEQ ID NO: 825754 - RNA, 22 nt, Human
gcuccucugucaaaugagagug

SEQ ID NO: 825755 - RNA, 22 nt, Human
agucugucuacuuaaagucugu

SEQ ID NO: 825756 - RNA, 22 nt, Human
acucaggaaauugagauaaugg

SEQ ID NO: 825757 - RNA, 22 nt, Human
uacaaaguagaaauucaguaaa

SEQ ID NO: 825758 - RNA, 22 nt, Human
ggacagcugcuuucaggccaca

SEQ ID NO: 825759 - RNA, 22 nt, Human
uuuucagugggcaaugauguga

SEQ ID NO: 825760 - RNA, 22 nt, Human
uugguuuaggaacuggcuugga

SEQ ID NO: 825761 - RNA, 22 nt, Human
auuucucuuagcaagacauuac

SEQ ID NO: 825762 - RNA, 19 nt, Human
ggcagcuugggaagguagc

SEQ ID NO: 825763 - RNA, 22 nt, Human
ccaaaugugccuguuucaacaa

SEQ ID NO: 825764 - RNA, 22 nt, Human
aguacauauaguaauuuagcca

SEQ ID NO: 825765 - RNA, 22 nt, Human
aauaucaacaguguccuucuaa

SEQ ID NO: 825766 - RNA, 22 nt, Human
cccaugagguggagguugcagu

SEQ ID NO: 825767 - RNA, 19 nt, Human
guugaaaguaggugagggu

SEQ ID NO: 825768 - RNA, 22 nt, Human
agucucugccagcuuguccucu

SEQ ID NO: 825769 - RNA, 22 nt, Human
acagucuacuugagcuuguaua

SEQ ID NO: 825770 - RNA, 22 nt, Human
agcccaggaaguugaggcuugc

SEQ ID NO: 825771 - RNA, 22 nt, Human
cauuuguuggucagauuguagu

SEQ ID NO: 825772 - RNA, 22 nt, Human
uugcaggaaacugagugugagc

SEQ ID NO: 825773 - RNA, 22 nt, Human
uagugcuuggcccuaccagaua

SEQ ID NO: 825774 - RNA, 22 nt, Human
gcuguucucuguaacaugcauu

SEQ ID NO: 825775 - RNA, 21 nt, Human
aggcagcuggaaggccuggcu

SEQ ID NO: 825776 - RNA, 22 nt, Human
auucugagaaaugcauugucag

SEQ ID NO: 825777 - RNA, 22 nt, Human
guaaaauagaauaacguggcua

SEQ ID NO: 825778 - RNA, 22 nt, Human
acaaauauuuacugaauccacu

SEQ ID NO: 825779 - RNA, 22 nt, Human
gcucccagacugaccagaggug

SEQ ID NO: 825780 - RNA, 22 nt, Human
acuuucugcaguguuggaaaug

SEQ ID NO: 825781 - RNA, 22 nt, Human
aaucuucuuucuuaacaguaca

SEQ ID NO: 825782 - RNA, 22 nt, Human
aggcagugccuggaccccagcu

SEQ ID NO: 825783 - RNA, 22 nt, Human
guuaucaugcuucaucaucacu

SEQ ID NO: 825784 - RNA, 22 nt, Human
cccaggagaugcacuccauugg

SEQ ID NO: 825785 - RNA, 22 nt, Human
uauuuccauguuagaacuaagu

SEQ ID NO: 825786 - RNA, 21 nt, Human
uucuucaguuuaauauaaaau

SEQ ID NO: 825787 - RNA, 22 nt, Human
cuugcugggguaagucugugcu

SEQ ID NO: 825788 - RNA, 22 nt, Human
uuuaaauuuguguuuagagggu

SEQ ID NO: 825789 - RNA, 22 nt, Human
auuuccuuugcaaagacugugc

SEQ ID NO: 825790 - RNA, 22 nt, Human
aggcaccuugagagcaggagcu

SEQ ID NO: 825791 - RNA, 22 nt, Human
uuugaaaggaaguuaauacuuu

SEQ ID NO: 825792 - RNA, 22 nt, Human
gggcagcuagcccucuagccca

SEQ ID NO: 825793 - RNA, 22 nt, Human
gagaggugaaggcugcccuggg

SEQ ID NO: 825794 - RNA, 22 nt, Human
guucuucaguaaaauuaaaugu

SEQ ID NO: 825795 - RNA, 22 nt, Human
gaaggccaagaggcuccaagau

SEQ ID NO: 825796 - RNA, 22 nt, Human
gaggagagccugcacuuugacc

SEQ ID NO: 825797 - RNA, 22 nt, Human
gaggcagcuuaggguacugacu

SEQ ID NO: 825798 - RNA, 22 nt, Human
cacaauuuguuuuaucaguauu

SEQ ID NO: 825799 - RNA, 18 nt, Human
agcuucccucugagaggg

SEQ ID NO: 825800 - RNA, 22 nt, Human
ucaggagaacuuccuucuaccc

SEQ ID NO: 825801 - RNA, 22 nt, Human
cugccaucugagccaaaagugc

SEQ ID NO: 825802 - RNA, 21 nt, Human
uggagacucugguucuuugug

SEQ ID NO: 825803 - RNA, 22 nt, Human
aaccauuugccauuaucuuaag

SEQ ID NO: 825804 - RNA, 22 nt, Human
uuuaacagaugugaaauuuuca

SEQ ID NO: 825805 - RNA, 20 nt, Human
cucaggauacugcaaaguug

SEQ ID NO: 825806 - RNA, 20 nt, Human
cugcccagccacugagggau

SEQ ID NO: 825807 - RNA, 22 nt, Human
cacucaggcugugucaggagga

SEQ ID NO: 825808 - RNA, 22 nt, Human
gagggcuccauuccccgugccc

SEQ ID NO: 825809 - RNA, 22 nt, Human
aaaggagacuucagaucuccuu

SEQ ID NO: 825810 - RNA, 22 nt, Human
uggcagcagacaaaaggccauu

SEQ ID NO: 825811 - RNA, 22 nt, Human
gaaggccacaaaaaaugucaua

SEQ ID NO: 825812 - RNA, 22 nt, Human
auuggcaguuagugacgaggcu

SEQ ID NO: 825813 - RNA, 22 nt, Human
aaagacuuggcuuaugauuugc

SEQ ID NO: 825814 - RNA, 19 nt, Human
ugugaaagcuaguguucuu

SEQ ID NO: 825815 - RNA, 22 nt, Human
augcuguguuuuaaauggaaau

SEQ ID NO: 825816 - RNA, 22 nt, Human
gaggcagcaugguaccuuggag

SEQ ID NO: 825817 - RNA, 22 nt, Human
acaaaugucuccucuuuuguua

SEQ ID NO: 825818 - RNA, 22 nt, Human
cuacccagcaccuaggcugccu

SEQ ID NO: 825819 - RNA, 22 nt, Human
ucagguggcuuggagggggacg

SEQ ID NO: 825820 - RNA, 19 nt, Human
uuacuuggcaaagucaguc

SEQ ID NO: 825821 - RNA, 22 nt, Human
gcccaggaguucaaggcugcag

SEQ ID NO: 825822 - RNA, 21 nt, Human
ggcagccugacccccagagag

SEQ ID NO: 825823 - RNA, 22 nt, Human
ugauugaagaggugaggaaguu

SEQ ID NO: 825824 - RNA, 22 nt, Human
agaccaagacuauaaugagagg

SEQ ID NO: 825825 - RNA, 22 nt, Human
ggaggagggguuuacauuggaa

SEQ ID NO: 825826 - RNA, 22 nt, Human
uggcagcuccuggggccagcac

SEQ ID NO: 825827 - RNA, 22 nt, Human
aggcucagaggugagcaucugc

SEQ ID NO: 825828 - RNA, 22 nt, Human
cugcuuuguaaaauagacauaa

SEQ ID NO: 825829 - RNA, 22 nt, Human
uugcauuugaucuuggguucuc

SEQ ID NO: 825830 - RNA, 22 nt, Human
auacaacuuuaucuguaaugag

SEQ ID NO: 825831 - RNA, 22 nt, Human
cuucucagcaugguuacuguga

SEQ ID NO: 825832 - RNA, 21 nt, Human
ggacagcugcgcgcagggcuc

SEQ ID NO: 825833 - RNA, 23 nt, Human
uguugaaguaacuguuacauaga

SEQ ID NO: 825834 - RNA, 22 nt, Human
ggcagccuugagggaggccugg

SEQ ID NO: 825835 - RNA, 22 nt, Human
aggcagcuuuguaguaaagcua

SEQ ID NO: 825836 - RNA, 22 nt, Human
auccagucaaaauuaguaaggu

SEQ ID NO: 825837 - RNA, 22 nt, Human
cacagacccagaagggaugaag

SEQ ID NO: 825838 - RNA, 22 nt, Human
gcuucccagcagaggaaagacu

SEQ ID NO: 825839 - RNA, 22 nt, Human
cagaccucaguccucaguagga

SEQ ID NO: 825840 - RNA, 22 nt, Human
uagagcugggcagugcucugag

SEQ ID NO: 825841 - RNA, 22 nt, Human
cucuccucagaacaggcccucu

SEQ ID NO: 825842 - RNA, 22 nt, Human
uagggcaggugaagaaaagcua

SEQ ID NO: 825843 - RNA, 22 nt, Human
gcccaggaguuugcauuuuaac

SEQ ID NO: 825844 - RNA, 20 nt, Human
agcuucuucugucuaauuuu

SEQ ID NO: 825845 - RNA, 22 nt, Human
aggcagcuuaagcccuggccca

SEQ ID NO: 825846 - RNA, 22 nt, Human
cucaggauguacuacagaaggc

SEQ ID NO: 825847 - RNA, 22 nt, Human
caaggccaugagcagcgagugu

SEQ ID NO: 825848 - RNA, 22 nt, Human
gcccaggaaagauagggccuca

SEQ ID NO: 825849 - RNA, 22 nt, Human
uggcagcuuccugcucauagga

SEQ ID NO: 825850 - RNA, 22 nt, Human
gugaaggacuagcauggagggc

SEQ ID NO: 825851 - RNA, 21 nt, Human
agagagggagaugaaacaucc

SEQ ID NO: 825852 - RNA, 22 nt, Human
agaggggagagcuaagcaauuc

SEQ ID NO: 825853 - RNA, 23 nt, Human
agggagcuaaaaggcuggagcag

SEQ ID NO: 825854 - RNA, 22 nt, Human
caguuucuacgaaggucaaccc

SEQ ID NO: 825855 - RNA, 22 nt, Human
caaauagugucacauugugagg

SEQ ID NO: 825856 - RNA, 22 nt, Human
aacauauaaacucuuaaguuca

SEQ ID NO: 825857 - RNA, 22 nt, Human
guggcaggagacuggaagaugg

SEQ ID NO: 825858 - RNA, 22 nt, Human
cccuggaggcaaagguugcagu

SEQ ID NO: 825859 - RNA, 22 nt, Human
gguuauauaauucagugcuuuc

SEQ ID NO: 825860 - RNA, 19 nt, Human
agcauuuggaauucuacac

SEQ ID NO: 825861 - RNA, 22 nt, Human
gaggcagcauucgcauagacag

SEQ ID NO: 825862 - RNA, 23 nt, Human
auguuauuauuagcagucuugcc

SEQ ID NO: 825863 - RNA, 22 nt, Human
ugaggcaggagaaucacaugaa

SEQ ID NO: 825864 - RNA, 22 nt, Human
aaagcagagguugcagugagcu

SEQ ID NO: 825865 - RNA, 22 nt, Human
gcccaggaucugcucagaucau

SEQ ID NO: 825866 - RNA, 22 nt, Human
auuuugaugcuaucuaaugaau

SEQ ID NO: 825867 - RNA, 22 nt, Human
uccauuuuagaagaaaauccac

SEQ ID NO: 825868 - RNA, 22 nt, Human
accaggaguagaauaucuguga

SEQ ID NO: 825869 - RNA, 22 nt, Human
cuguggaaggccuguccugaaa

SEQ ID NO: 825870 - RNA, 22 nt, Human
aauaucaguauauuguaucagu

SEQ ID NO: 825871 - RNA, 22 nt, Human
aaggcagccucugccagccggg

SEQ ID NO: 825872 - RNA, 22 nt, Human
guaggcagugguuggaagagaa

SEQ ID NO: 825873 - RNA, 22 nt, Human
gccucugcaauuacauugugcc

SEQ ID NO: 825874 - RNA, 22 nt, Human
aggacuuagaacauuauguacu

SEQ ID NO: 825875 - RNA, 17 nt, Human
agagagagcaugccacc

SEQ ID NO: 825876 - RNA, 22 nt, Human
aggcaguuguagagagggcucu

SEQ ID NO: 825877 - RNA, 22 nt, Human
cagagagggcggcccuggcuuc

SEQ ID NO: 825878 - RNA, 22 nt, Human
aguuugaaauguuggcaauauu

SEQ ID NO: 825879 - RNA, 23 nt, Human
aggcagcagguuguccaggguga

SEQ ID NO: 825880 - RNA, 22 nt, Human
ggcucagaccucccagcuccag

SEQ ID NO: 825881 - RNA, 22 nt, Human
agaggauguucuaggcacucau

SEQ ID NO: 825882 - RNA, 22 nt, Human
cacccugggcugggccuguuaa

SEQ ID NO: 825883 - RNA, 22 nt, Human
gugcuuucugcugcauuccucu

SEQ ID NO: 825884 - RNA, 22 nt, Human
ccaggagagcaggcgugcagcu

SEQ ID NO: 825885 - RNA, 22 nt, Human
auguggaggaaaugaguguaca

SEQ ID NO: 825886 - RNA, 22 nt, Human
caugauuuugucuuguguuaau

SEQ ID NO: 825887 - RNA, 22 nt, Human
gggcaguugauggaggucugga

SEQ ID NO: 825888 - RNA, 22 nt, Human
ccaggagaauaauggcagauua

SEQ ID NO: 825889 - RNA, 22 nt, Human
auuugcuuuaagguauaaaagg

SEQ ID NO: 825890 - RNA, 22 nt, Human
agcccagguucuaaagccaaac

SEQ ID NO: 825891 - RNA, 22 nt, Human
uuuuaucuaccuaugcucauuu

SEQ ID NO: 825892 - RNA, 22 nt, Human
acucaggaagaaagcagcuggu

SEQ ID NO: 825893 - RNA, 22 nt, Human
augaggcaucugcagucacuag

SEQ ID NO: 825894 - RNA, 22 nt, Human
cugcugugauugggagaaaccg

SEQ ID NO: 825895 - RNA, 22 nt, Human
cucccagagaccaagcugagaa

SEQ ID NO: 825896 - RNA, 22 nt, Human
uccaggagugugugcuaauggg

SEQ ID NO: 825897 - RNA, 22 nt, Human
ucccaggaggugcuuccuagga

SEQ ID NO: 825898 - RNA, 18 nt, Human
gcagcugacacuggaguu

SEQ ID NO: 825899 - RNA, 22 nt, Human
aggccagcuuccagaggggcag

SEQ ID NO: 825900 - RNA, 22 nt, Human
augaaggcuguguagauggaug

SEQ ID NO: 825901 - RNA, 22 nt, Human
ucuccuccuuuuuucaacauag

SEQ ID NO: 825902 - RNA, 20 nt, Human
aggcaguuagaaggagauga

SEQ ID NO: 825903 - RNA, 22 nt, Human
aaggcaguaaaaucuaccuugc

SEQ ID NO: 825904 - RNA, 20 nt, Human
cucaggauugucuagccccu

SEQ ID NO: 825905 - RNA, 18 nt, Human
agggagagaccgcggguc

SEQ ID NO: 825906 - RNA, 18 nt, Human
ccucagggagagagacgc

SEQ ID NO: 825907 - RNA, 22 nt, Human
ggcuuggaccagucacaguggu

SEQ ID NO: 825908 - RNA, 22 nt, Human
ugcuugaaagggguuucccagu

SEQ ID NO: 825909 - RNA, 22 nt, Human
caggauagaaaggccauggagu

SEQ ID NO: 825910 - RNA, 22 nt, Human
uccugaggcucacuuugaaugu

SEQ ID NO: 825911 - RNA, 22 nt, Human
gugcagcugugguggagccagg

SEQ ID NO: 825912 - RNA, 22 nt, Human
caucacccggaacugugucugc

SEQ ID NO: 825913 - RNA, 22 nt, Human
uuugaaagagcugauacaugaa

SEQ ID NO: 825914 - RNA, 22 nt, Human
gaggacagagccgccuggcaag

SEQ ID NO: 825915 - RNA, 22 nt, Human
cagagccaggucuaggagucuc

SEQ ID NO: 825916 - RNA, 22 nt, Human
aaaacuaaauacgcuuugccuc

SEQ ID NO: 825917 - RNA, 22 nt, Human
ccaggaugacccccacuuuccu

SEQ ID NO: 825918 - RNA, 22 nt, Human
ucugggaaugaauaagaccugu

SEQ ID NO: 825919 - RNA, 17 nt, Human
uggcagcugaaagcucu

SEQ ID NO: 825920 - RNA, 22 nt, Human
uuuaaaaucagaugggaguugg

SEQ ID NO: 825921 - RNA, 22 nt, Human
ggggggugcugaucaguggagc

SEQ ID NO: 825922 - RNA, 19 nt, Human
uggagaggaaaugcugcuc

SEQ ID NO: 825923 - RNA, 22 nt, Human
caaggccaaagggccacuguca

SEQ ID NO: 825924 - RNA, 22 nt, Human
ccaggagacaaagaugacugcu

SEQ ID NO: 825925 - RNA, 22 nt, Human
ucaucucaaaacccaaggggca

SEQ ID NO: 825926 - RNA, 22 nt, Human
ucuggcaggucaaucauucuuu

SEQ ID NO: 825927 - RNA, 22 nt, Human
uucauucuugucuuuguauagu

SEQ ID NO: 825928 - RNA, 22 nt, Human
uuccaugaaggagacugagaag

SEQ ID NO: 825929 - RNA, 22 nt, Human
gaucuucucuuuaguagaaaca

SEQ ID NO: 825930 - RNA, 22 nt, Human
aggcaacuuuuggggaugaugg

SEQ ID NO: 825931 - RNA, 22 nt, Human
uugugaguagugccgcaauaaa

SEQ ID NO: 825932 - RNA, 22 nt, Human
cggcagcugauugcagagcacc

SEQ ID NO: 825933 - RNA, 22 nt, Human
uugcuuuguggugguucuucca

SEQ ID NO: 825934 - RNA, 22 nt, Human
ggagagugggagcaacuguugc

SEQ ID NO: 825935 - RNA, 22 nt, Human
agaggcaggagguugacuugag

SEQ ID NO: 825936 - RNA, 22 nt, Human
cccaggaugucgaggcugcagu

SEQ ID NO: 825937 - RNA, 22 nt, Human
uggaaugacagagagucugaau

SEQ ID NO: 825938 - RNA, 20 nt, Human
uucaggauucuagaccacac

SEQ ID NO: 825939 - RNA, 22 nt, Human
aaagauuugaguucugcuuaua

SEQ ID NO: 825940 - RNA, 22 nt, Human
uuuuuaguagagguggguuuca

SEQ ID NO: 825941 - RNA, 22 nt, Human
gaggaaccaaucugugauauuc

SEQ ID NO: 825942 - RNA, 20 nt, Human
auuuggcaugaaguauugau

SEQ ID NO: 825943 - RNA, 22 nt, Human
uucuucuucuggcugcaccugg

SEQ ID NO: 825944 - RNA, 20 nt, Human
acuugcugggcuuuguuacc

SEQ ID NO: 825945 - RNA, 22 nt, Human
ucaucugucccaggcuuuuuuc

SEQ ID NO: 825946 - RNA, 22 nt, Human
uuuaaauucugucugccgcuua

SEQ ID NO: 825947 - RNA, 22 nt, Human
gcagcugaaagggaucucuaca

SEQ ID NO: 825948 - RNA, 22 nt, Human
ucauuucccuccuacaaagagg

SEQ ID NO: 825949 - RNA, 22 nt, Human
agugcuuucccugaaaccuucc

SEQ ID NO: 825950 - RNA, 21 nt, Human
cuguggaagggaacuagaggg

SEQ ID NO: 825951 - RNA, 22 nt, Human
gagguggaaggcaggaacaaau

SEQ ID NO: 825952 - RNA, 22 nt, Human
acuucuucuucagcugggggau

SEQ ID NO: 825953 - RNA, 22 nt, Human
uccaggagacacaagguacaua

SEQ ID NO: 825954 - RNA, 22 nt, Human
ggcagacuguaauaggagaauu

SEQ ID NO: 825955 - RNA, 22 nt, Human
gucacuguuuccuauuauauuu

SEQ ID NO: 825956 - RNA, 22 nt, Human
uacuaucucuucuaacuucaga

SEQ ID NO: 825957 - RNA, 22 nt, Human
ggcuuggaaaugguaaugagcu

SEQ ID NO: 825958 - RNA, 22 nt, Human
auucacaaaaugauauagauac

SEQ ID NO: 825959 - RNA, 21 nt, Human
auuucagagcacacaaguaaa

SEQ ID NO: 825960 - RNA, 22 nt, Human
acuguguggaccacucugaggc

SEQ ID NO: 825961 - RNA, 17 nt, Human
ucauuuguugugacuag

SEQ ID NO: 825962 - RNA, 22 nt, Human
uccaggaguuugaccugugggc

SEQ ID NO: 825963 - RNA, 21 nt, Human
uaaggccaagucuauuucugu

SEQ ID NO: 825964 - RNA, 21 nt, Human
ugaggcaggggugcuuuuguc

SEQ ID NO: 825965 - RNA, 22 nt, Human
cugcccaggcugaaggaacauc

SEQ ID NO: 825966 - RNA, 23 nt, Human
aggucagcaggcaaggaaauggc

SEQ ID NO: 825967 - RNA, 22 nt, Human
ggaggagguggguuaaguugua

SEQ ID NO: 825968 - RNA, 22 nt, Human
auuauuauuguugauguuaggg

SEQ ID NO: 825969 - RNA, 22 nt, Human
gaaggccauuagagccugugcc

SEQ ID NO: 825970 - RNA, 20 nt, Human
aucuucuuggccagcuugcu

SEQ ID NO: 825971 - RNA, 22 nt, Human
aaagcagauucugaugcaguag

SEQ ID NO: 825972 - RNA, 22 nt, Human
aggcagcagucaugaggaaaga

SEQ ID NO: 825973 - RNA, 22 nt, Human
auuugcuuucagguauaaaagg

SEQ ID NO: 825974 - RNA, 18 nt, Human
aaacuggcuuggccugug

SEQ ID NO: 825975 - RNA, 22 nt, Human
aggguccugggugcaguugcuu

SEQ ID NO: 825976 - RNA, 22 nt, Human
gaccauuuguugaaaagauuau

SEQ ID NO: 825977 - RNA, 17 nt, Human
uccaugagacaugaaga

SEQ ID NO: 825978 - RNA, 17 nt, Human
cagcucugcaucuuccu

SEQ ID NO: 825979 - RNA, 22 nt, Human
ucucuguacaguacaugccgug

SEQ ID NO: 825980 - RNA, 22 nt, Human
uuucuucacaggguauugggug

SEQ ID NO: 825981 - RNA, 22 nt, Human
gcucaggaucagccaccucuuu

SEQ ID NO: 825982 - RNA, 22 nt, Human
acuugcauuauauuuaucacaa

SEQ ID NO: 825983 - RNA, 22 nt, Human
cuucuucagcacaauauugaug

SEQ ID NO: 825984 - RNA, 22 nt, Human
cccaggaggcagaaguugcagu

SEQ ID NO: 825985 - RNA, 22 nt, Human
ggcagaagauaggacagggaau

SEQ ID NO: 825986 - RNA, 22 nt, Human
uuccuuaguguuagauucugug

SEQ ID NO: 825987 - RNA, 20 nt, Human
uuuuccagaaaguaucauug

SEQ ID NO: 825988 - RNA, 22 nt, Human
cucccagagagcaggugggccg

SEQ ID NO: 825989 - RNA, 22 nt, Human
caguugccuacuacauggcagg

SEQ ID NO: 825990 - RNA, 22 nt, Human
uagaaaugauugguugagcucu

SEQ ID NO: 825991 - RNA, 19 nt, Human
ugcccaggccagguugggc

SEQ ID NO: 825992 - RNA, 22 nt, Human
ucauuguuauguuuugcugucu

SEQ ID NO: 825993 - RNA, 22 nt, Human
uuauuuacaacucuucucuucc

SEQ ID NO: 825994 - RNA, 22 nt, Human
cuccaugaauuugagcuuugug

SEQ ID NO: 825995 - RNA, 22 nt, Human
cugcauuagucaugcuuugcag

SEQ ID NO: 825996 - RNA, 22 nt, Human
ucagagaguuagugucuuagcu

SEQ ID NO: 825997 - RNA, 22 nt, Human
cuggcugugcagucuuccagaa

SEQ ID NO: 825998 - RNA, 22 nt, Human
aggccagacagcuagaaacagg

SEQ ID NO: 825999 - RNA, 22 nt, Human
uugcuucaguagcucuuuaaag

SEQ ID NO: 826000 - RNA, 22 nt, Human
auccaugaagguacuucucagg

SEQ ID NO: 826001 - RNA, 22 nt, Human
ccuggagaccagaggauacuuc

SEQ ID NO: 826002 - RNA, 23 nt, Human
uuccagaguccacaucugccacc

SEQ ID NO: 826003 - RNA, 22 nt, Human
auuaaauuuucacuaggcuccc

SEQ ID NO: 826004 - RNA, 22 nt, Human
uuucacagguacaaacacuccu

SEQ ID NO: 826005 - RNA, 22 nt, Human
ucucucuuuuuaaucauguaau

SEQ ID NO: 826006 - RNA, 22 nt, Human
cugguacaaaaugcugauauca

SEQ ID NO: 826007 - RNA, 22 nt, Human
cagcaggauaugguggagagag

SEQ ID NO: 826008 - RNA, 22 nt, Human
uaacaguguggacuugagaucu

SEQ ID NO: 826009 - RNA, 22 nt, Human
ccucuucugcuucaggagcacu

SEQ ID NO: 826010 - RNA, 18 nt, Human
acucaggaaaugaugaca

SEQ ID NO: 826011 - RNA, 22 nt, Human
gagaggcagaggccugaaaccg

SEQ ID NO: 826012 - RNA, 23 nt, Human
cagaaaacccagagcucaguccc

SEQ ID NO: 826013 - RNA, 22 nt, Human
cagcuuccgaccgggggcugca

SEQ ID NO: 826014 - RNA, 22 nt, Human
aaggcagcaacuaauggaucuc

SEQ ID NO: 826015 - RNA, 22 nt, Human
augcugagcagagcugacaugc

SEQ ID NO: 826016 - RNA, 22 nt, Human
aaugucugagucucuguauccc

SEQ ID NO: 826017 - RNA, 22 nt, Human
ucccaggaaggauucggcauuu

SEQ ID NO: 826018 - RNA, 22 nt, Human
augaaggcaguuaaacgucauc

SEQ ID NO: 826019 - RNA, 22 nt, Human
uuuuaucugcuucauuaguuga

SEQ ID NO: 826020 - RNA, 22 nt, Human
gucuucuuguuuugaaggaaau

SEQ ID NO: 826021 - RNA, 22 nt, Human
agcccaggucucaaaguacagg

SEQ ID NO: 826022 - RNA, 22 nt, Human
aaggcagcagaggaaaggugcu

SEQ ID NO: 826023 - RNA, 22 nt, Human
aauauaugugguauugaccagc

SEQ ID NO: 826024 - RNA, 22 nt, Human
aggcacagagaaugcccuccau

SEQ ID NO: 826025 - RNA, 22 nt, Human
uagggauguggugagaacugag

SEQ ID NO: 826026 - RNA, 22 nt, Human
uggaaagucucuuuugacugua

SEQ ID NO: 826027 - RNA, 22 nt, Human
uccuuagagauacugucuugaa

SEQ ID NO: 826028 - RNA, 22 nt, Human
aggcagcugaccacaguaugau

SEQ ID NO: 826029 - RNA, 22 nt, Human
uugcugugaaaccaugggaagu

SEQ ID NO: 826030 - RNA, 22 nt, Human
auucugagacaauugccgucag

SEQ ID NO: 826031 - RNA, 22 nt, Human
caggaaaggugugucaugaugg

SEQ ID NO: 826032 - RNA, 22 nt, Human
auugaaagcacaaagaacaagu

SEQ ID NO: 826033 - RNA, 22 nt, Human
uuuggaauuggaaagugcugug

SEQ ID NO: 826034 - RNA, 22 nt, Human
gagguagccacagauagagacu

SEQ ID NO: 826035 - RNA, 22 nt, Human
ggcagcuuccugagccagcagc

SEQ ID NO: 826036 - RNA, 22 nt, Human
guuuucaaggggauuuaacuga

SEQ ID NO: 826037 - RNA, 22 nt, Human
uuuccaagagcuuauuucugaa

SEQ ID NO: 826038 - RNA, 22 nt, Human
gaaacugugaucguguucuggg

SEQ ID NO: 826039 - RNA, 22 nt, Human
aacauuuaugauugagguaaau

SEQ ID NO: 826040 - RNA, 22 nt, Human
uuucuuguaagauguuuauuaa

SEQ ID NO: 826041 - RNA, 20 nt, Human
acaggggcagcacaauaaug

SEQ ID NO: 826042 - RNA, 22 nt, Human
ugaaggaaugaguauacuguuu

SEQ ID NO: 826043 - RNA, 22 nt, Human
aagagggcugcaaucuuauugc

SEQ ID NO: 826044 - RNA, 22 nt, Human
uuaaaaugaauauugauuagca

SEQ ID NO: 826045 - RNA, 22 nt, Human
uuucuucauagaccuugucuug

SEQ ID NO: 826046 - RNA, 22 nt, Human
guggcaggagagacacagccau

SEQ ID NO: 826047 - RNA, 22 nt, Human
uauuuguugaguuguuaugucu

SEQ ID NO: 826048 - RNA, 22 nt, Human
acaaauaugguacucggagaaa

SEQ ID NO: 826049 - RNA, 22 nt, Human
ccaggcugccgaggaaagaaag

SEQ ID NO: 826050 - RNA, 22 nt, Human
gagggugggccagauaugaggg

SEQ ID NO: 826051 - RNA, 22 nt, Human
uguuuuaaucucccauugcucu

SEQ ID NO: 826052 - RNA, 22 nt, Human
cuuaagaugaggucaugcuaua

SEQ ID NO: 826053 - RNA, 22 nt, Human
uucuuaacuggaaaaugucaga

SEQ ID NO: 826054 - RNA, 22 nt, Human
gcuacugauugaccuuggagag

SEQ ID NO: 826055 - RNA, 22 nt, Human
cauuuguaggaugcuucuuguu

SEQ ID NO: 826056 - RNA, 22 nt, Human
cagucucuaaaucaaucugaau

SEQ ID NO: 826057 - RNA, 22 nt, Human
cucuucuugaaagaggaauuca

SEQ ID NO: 826058 - RNA, 22 nt, Human
ucacuucacacccacuaucaug

SEQ ID NO: 826059 - RNA, 22 nt, Human
uggcaaggcugugggggcagag

SEQ ID NO: 826060 - RNA, 22 nt, Human
aucuuucaguuucauaccaauu

SEQ ID NO: 826061 - RNA, 22 nt, Human
ugcuucuggaaacaguggcugu

SEQ ID NO: 826062 - RNA, 22 nt, Human
agaccaagugcaggugccacua

SEQ ID NO: 826063 - RNA, 22 nt, Human
uauuuucuggacagucuugcuu

SEQ ID NO: 826064 - RNA, 22 nt, Human
auggaguucuuuaaauucacag

SEQ ID NO: 826065 - RNA, 22 nt, Human
uucacagucacccuucuccaug

SEQ ID NO: 826066 - RNA, 22 nt, Human
ggccaggagaggagggcacuga

SEQ ID NO: 826067 - RNA, 22 nt, Human
ucauuuaauagcuuuugucuuu

SEQ ID NO: 826068 - RNA, 20 nt, Human
aaacauucauguacaaguga

SEQ ID NO: 826069 - RNA, 21 nt, Human
acagcauguuuguguguuugc

SEQ ID NO: 826070 - RNA, 22 nt, Human
ucagagaguuacacaaauuguu

SEQ ID NO: 826071 - RNA, 22 nt, Human
uucuuucucaacaugaauguuu

SEQ ID NO: 826072 - RNA, 22 nt, Human
uuucccaguucccugcucuaua

SEQ ID NO: 826073 - RNA, 22 nt, Human
ugaaggccacuuccugugagcu

SEQ ID NO: 826074 - RNA, 22 nt, Human
gaauagcuuccuuuuuuccaaa

SEQ ID NO: 826075 - RNA, 22 nt, Human
ugaggcaguauuuuagugacuu

SEQ ID NO: 826076 - RNA, 22 nt, Human
ugacauaauaauccaaacauac

SEQ ID NO: 826077 - RNA, 22 nt, Human
cugcugugucagaguccagggg

SEQ ID NO: 826078 - RNA, 22 nt, Human
cccaugagaccugguuuaaggc

SEQ ID NO: 826079 - RNA, 22 nt, Human
cagcuccucacgagucuugaaa

SEQ ID NO: 826080 - RNA, 22 nt, Human
agaggccaggcugcagagggau

SEQ ID NO: 826081 - RNA, 22 nt, Human
aggcacaggccucagcacccag

SEQ ID NO: 826082 - RNA, 22 nt, Human
agaaaacuugucacagcucuca

SEQ ID NO: 826083 - RNA, 22 nt, Human
acccaggacaugggcacccgug

SEQ ID NO: 826084 - RNA, 22 nt, Human
uuuuuauaacucuuuugugaca

SEQ ID NO: 826085 - RNA, 22 nt, Human
auuggcaggaaccgaggagggg

SEQ ID NO: 826086 - RNA, 22 nt, Human
cauuuauucauuugcuagggcu

SEQ ID NO: 826087 - RNA, 22 nt, Human
gcuaugcaggagccuaaugaca

SEQ ID NO: 826088 - RNA, 22 nt, Human
guggcagcaaaugccuggacua

SEQ ID NO: 826089 - RNA, 22 nt, Human
uuucacaaaugucuuuaacuug

SEQ ID NO: 826090 - RNA, 22 nt, Human
agagugcaaccgaaacaagcag

SEQ ID NO: 826091 - RNA, 22 nt, Human
agucucugucguagaucagcgu

SEQ ID NO: 826092 - RNA, 17 nt, Human
aaggccauuuccaccca

SEQ ID NO: 826093 - RNA, 22 nt, Human
uauuuccaggccccacucuaga

SEQ ID NO: 826094 - RNA, 22 nt, Human
gcccaggaggcagagguugugg

SEQ ID NO: 826095 - RNA, 23 nt, Human
agaugaggcuucuccauguuggu

SEQ ID NO: 826096 - RNA, 22 nt, Human
gaggguggguuucuugcacguc

SEQ ID NO: 826097 - RNA, 18 nt, Human
ugaauagggguuugcaga

SEQ ID NO: 826098 - RNA, 21 nt, Human
uucuucuuggacuguuuuggc

SEQ ID NO: 826099 - RNA, 22 nt, Human
uuuguuuagaaagagauuggug

SEQ ID NO: 826100 - RNA, 22 nt, Human
agcuggcagcucucagggguac

SEQ ID NO: 826101 - RNA, 22 nt, Human
uucuucucagggucccacaugg

SEQ ID NO: 826102 - RNA, 22 nt, Human
uucuucuuucccccugugguac

SEQ ID NO: 826103 - RNA, 22 nt, Human
uggcagcuacagacagagguga

SEQ ID NO: 826104 - RNA, 23 nt, Human
agaggggagcaucugcuggcuga

SEQ ID NO: 826105 - RNA, 22 nt, Human
agaggcaguauacaauccgagc

SEQ ID NO: 826106 - RNA, 22 nt, Human
uccaggaguccugggagugauu

SEQ ID NO: 826107 - RNA, 22 nt, Human
gaccauuucuaggaaucagacu

SEQ ID NO: 826108 - RNA, 18 nt, Human
augggaggggccaagaga

SEQ ID NO: 826109 - RNA, 22 nt, Human
ccagguaggagagagggauccu

SEQ ID NO: 826110 - RNA, 22 nt, Human
uacccagggcuuuucugaugca

SEQ ID NO: 826111 - RNA, 22 nt, Human
cuagcaucagaugagaagcugu

SEQ ID NO: 826112 - RNA, 21 nt, Human
acaggagaccgccuggcaguc

SEQ ID NO: 826113 - RNA, 22 nt, Human
caaggccauauugccuguaugu

SEQ ID NO: 826114 - RNA, 22 nt, Human
ugaacucucucaagugacagaa

SEQ ID NO: 826115 - RNA, 22 nt, Human
ugcuguguucuccugacucacc

SEQ ID NO: 826116 - RNA, 22 nt, Human
agugugucugaucacuugugag

SEQ ID NO: 826117 - RNA, 22 nt, Human
caggaugaagggcaaaggcaag

SEQ ID NO: 826118 - RNA, 22 nt, Human
gaaccucagugaaacuggaggu

SEQ ID NO: 826119 - RNA, 22 nt, Human
ugaaugaguuuggcugcuguuc

SEQ ID NO: 826120 - RNA, 22 nt, Human
ucaguucugcuagaaaaacagu

SEQ ID NO: 826121 - RNA, 22 nt, Human
aggcagcuucugauuagcagcg

SEQ ID NO: 826122 - RNA, 22 nt, Human
augaggcaaucaugguccaguu

SEQ ID NO: 826123 - RNA, 22 nt, Human
acaugauuuuaguaucauaaua

SEQ ID NO: 826124 - RNA, 22 nt, Human
uuucacauuagauaugucauuu

SEQ ID NO: 826125 - RNA, 22 nt, Human
gcagaggggaagcugaggaauu

SEQ ID NO: 826126 - RNA, 22 nt, Human
cuccaggagggggauggcugua

SEQ ID NO: 826127 - RNA, 22 nt, Human
cagggaggcugucuuaugccug

SEQ ID NO: 826128 - RNA, 19 nt, Human
uccucagugacaaccucag

SEQ ID NO: 826129 - RNA, 22 nt, Human
ugcugugagguugagaaggaag

SEQ ID NO: 826130 - RNA, 19 nt, Human
gaggcgaggcgugcaggag

SEQ ID NO: 826131 - RNA, 22 nt, Human
gaggcagcugaaggagugacag

SEQ ID NO: 826132 - RNA, 22 nt, Human
ggcagcuggggcagugcccugu

SEQ ID NO: 826133 - RNA, 22 nt, Human
guuauacauauguguuaacaaa

SEQ ID NO: 826134 - RNA, 22 nt, Human
ugccuugcgggcguuucuguug

SEQ ID NO: 826135 - RNA, 20 nt, Human
gucaggauuaguaaacucug

SEQ ID NO: 826136 - RNA, 22 nt, Human
gggcagcugccacuccgcuugc

SEQ ID NO: 826137 - RNA, 22 nt, Human
cccaggaagaggggucaggugu

SEQ ID NO: 826138 - RNA, 22 nt, Human
uguuuuaaagccauugccuuuc

SEQ ID NO: 826139 - RNA, 22 nt, Human
caaaugauacuguuuuuagucu

SEQ ID NO: 826140 - RNA, 23 nt, Human
guaaaauacgcagugcaguguga

SEQ ID NO: 826141 - RNA, 22 nt, Human
uauuugaaaguguacaaaaacu

SEQ ID NO: 826142 - RNA, 22 nt, Human
uaucaauacauguuaucagugu

SEQ ID NO: 826143 - RNA, 22 nt, Human
ucuucccuaaucaccaucuuca

SEQ ID NO: 826144 - RNA, 22 nt, Human
cauuaaaauaucucaugguguu

SEQ ID NO: 826145 - RNA, 21 nt, Human
uucuucaugaugauuaauggc

SEQ ID NO: 826146 - RNA, 22 nt, Human
uugcacuaggaaaaggcagcca

SEQ ID NO: 826147 - RNA, 19 nt, Human
agaggcagucuccaacagg

SEQ ID NO: 826148 - RNA, 22 nt, Human
cuggguaaguuccuaaggcuca

SEQ ID NO: 826149 - RNA, 22 nt, Human
gcacagcucgagcucaggaggg

SEQ ID NO: 826150 - RNA, 22 nt, Human
gaagcagccacggggagacaga

SEQ ID NO: 826151 - RNA, 22 nt, Human
ccugccugcaccuucucugggg

SEQ ID NO: 826152 - RNA, 22 nt, Human
cagcaggagcagucagacuccu

SEQ ID NO: 826153 - RNA, 22 nt, Human
gagagguccauuccccugucag

SEQ ID NO: 826154 - RNA, 22 nt, Human
uucuccagagggcucugcagga

SEQ ID NO: 826155 - RNA, 22 nt, Human
uucucagaauugacugggagca

SEQ ID NO: 826156 - RNA, 22 nt, Human
aauugcuaaagauuauguuuuc

SEQ ID NO: 826157 - RNA, 22 nt, Human
acccaggauaaucuguguaucu

SEQ ID NO: 826158 - RNA, 22 nt, Human
uccaugagcuagcuuuccaaag

SEQ ID NO: 826159 - RNA, 22 nt, Human
aaaauugaagugaucaggaacu

SEQ ID NO: 826160 - RNA, 22 nt, Human
agggcagcccuucugggagggc

SEQ ID NO: 826161 - RNA, 22 nt, Human
cccaggagcuucucucugccuc

SEQ ID NO: 826162 - RNA, 22 nt, Human
augaggcaguacacacaaagcc

SEQ ID NO: 826163 - RNA, 22 nt, Human
cgcagggauuucaaggggccuu

SEQ ID NO: 826164 - RNA, 22 nt, Human
uucuuuuccuacacagcgauuu

SEQ ID NO: 826165 - RNA, 22 nt, Human
gcaugucaugucauguaggaau

SEQ ID NO: 826166 - RNA, 22 nt, Human
caggcagcguccugcuuccugu

SEQ ID NO: 826167 - RNA, 22 nt, Human
ucugggaacucugucauuuccc

SEQ ID NO: 826168 - RNA, 18 nt, Human
gaugggagcaagagaaga

SEQ ID NO: 826169 - RNA, 22 nt, Human
ucaggauguuaauauagcauua

SEQ ID NO: 826170 - RNA, 22 nt, Human
acauauauuacuaguaaagaca

SEQ ID NO: 826171 - RNA, 22 nt, Human
cuauuacauuucuggacauuca

SEQ ID NO: 826172 - RNA, 22 nt, Human
auugaaaguccuaucuaaggga

SEQ ID NO: 826173 - RNA, 22 nt, Human
ccagagagaaauggauuugagu

SEQ ID NO: 826174 - RNA, 22 nt, Human
acagaaauugggcaaauggaag

SEQ ID NO: 826175 - RNA, 22 nt, Human
cuuuggcacagucucauuugau

SEQ ID NO: 826176 - RNA, 22 nt, Human
cucccagggucuaggcugcugg

SEQ ID NO: 826177 - RNA, 18 nt, Human
aagaggaggaaacccagg

SEQ ID NO: 826178 - RNA, 22 nt, Human
gaggggagacagggaaaucagu

SEQ ID NO: 826179 - RNA, 22 nt, Human
cucuucuugucucugguuagaa

SEQ ID NO: 826180 - RNA, 22 nt, Human
aggaagcucaaagccaugaugu

SEQ ID NO: 826181 - RNA, 22 nt, Human
gucuccugagccuugacugcaa

SEQ ID NO: 826182 - RNA, 22 nt, Human
auagucuuagaucagauaaagu

SEQ ID NO: 826183 - RNA, 22 nt, Human
gcaucuaaauaaacgugggagu

SEQ ID NO: 826184 - RNA, 19 nt, Human
uauggcaggccgaggcacu

SEQ ID NO: 826185 - RNA, 22 nt, Human
aggacagcccuugagagcacau

SEQ ID NO: 826186 - RNA, 22 nt, Human
cugcuguguaucauuuuagaug

SEQ ID NO: 826187 - RNA, 22 nt, Human
cuggccagcugacagcagggcu

SEQ ID NO: 826188 - RNA, 22 nt, Human
ccauccuaucugaccuacuugu

SEQ ID NO: 826189 - RNA, 22 nt, Human
caucaucaaaagugacagagaa

SEQ ID NO: 826190 - RNA, 20 nt, Human
aggcagcugggaaaugaggg

SEQ ID NO: 826191 - RNA, 22 nt, Human
ucagucuucccuccagugcaac

SEQ ID NO: 826192 - RNA, 22 nt, Human
ggaggacaggggcugcagcaca

SEQ ID NO: 826193 - RNA, 22 nt, Human
acacauuucuaaauuuuuaccg

SEQ ID NO: 826194 - RNA, 22 nt, Human
gaaauauuucucuugagccccu

SEQ ID NO: 826195 - RNA, 22 nt, Human
uugaaauggaagugaaaauucu

SEQ ID NO: 826196 - RNA, 19 nt, Human
ccauggagagagaugcauu

SEQ ID NO: 826197 - RNA, 22 nt, Human
cuucuucaauagcaagcgcaua

SEQ ID NO: 826198 - RNA, 22 nt, Human
aggagacaucuaacuguagguu

SEQ ID NO: 826199 - RNA, 22 nt, Human
cuccccagguucaggagguggg

SEQ ID NO: 826200 - RNA, 22 nt, Human
uucuccagaccuugugacuaug

SEQ ID NO: 826201 - RNA, 22 nt, Human
cacaaaugugcagaaaugugag

SEQ ID NO: 826202 - RNA, 22 nt, Human
cuccaggaaaauagggaaugag

SEQ ID NO: 826203 - RNA, 22 nt, Human
ggagaggacauggcucccacag

SEQ ID NO: 826204 - RNA, 22 nt, Human
uggagagguuuaaacaaaaguu

SEQ ID NO: 826205 - RNA, 22 nt, Human
acaucucaugaaugauaaauca

SEQ ID NO: 826206 - RNA, 22 nt, Human
gcugcuguugauuuaguccaau

SEQ ID NO: 826207 - RNA, 22 nt, Human
agcccagggacagggcggaugu

SEQ ID NO: 826208 - RNA, 22 nt, Human
ggcagcuuccuaggagagggca

SEQ ID NO: 826209 - RNA, 22 nt, Human
uagcugcugcagcacagggagg

SEQ ID NO: 826210 - RNA, 22 nt, Human
uuucucaguuacuagcuguggu

SEQ ID NO: 826211 - RNA, 22 nt, Human
cccaggugcugcgugaagccuc

SEQ ID NO: 826212 - RNA, 22 nt, Human
uuagccauauagaaaaagagcu

SEQ ID NO: 826213 - RNA, 22 nt, Human
uuugaaaguucuucugacacua

SEQ ID NO: 826214 - RNA, 22 nt, Human
accaggaggaaguguuaaugau

SEQ ID NO: 826215 - RNA, 22 nt, Human
uuaggaguccagaugucuuggg

SEQ ID NO: 826216 - RNA, 22 nt, Human
caggcagcagaggaguguggga

SEQ ID NO: 826217 - RNA, 22 nt, Human
aggcaggcacuccggaaguguc

SEQ ID NO: 826218 - RNA, 22 nt, Human
gagccagcuauguagcaagagg

SEQ ID NO: 826219 - RNA, 22 nt, Human
uuugacauuauccuguuacugg

SEQ ID NO: 826220 - RNA, 22 nt, Human
auucuucacauaagugcuguac

SEQ ID NO: 826221 - RNA, 22 nt, Human
uucuucaaacaaaaguggcaug

SEQ ID NO: 826222 - RNA, 22 nt, Human
ucuaaccuuugaaacugcuuuc

SEQ ID NO: 826223 - RNA, 22 nt, Human
gggcagcuccuguggaauccac

SEQ ID NO: 826224 - RNA, 22 nt, Human
aggaagcuagagccaccggacu

SEQ ID NO: 826225 - RNA, 22 nt, Human
uuuacaaccucauauucugaug

SEQ ID NO: 826226 - RNA, 22 nt, Human
aaacauuugcaacucgguuugg

SEQ ID NO: 826227 - RNA, 22 nt, Human
cccaggaaaucaggcuuucuag

SEQ ID NO: 826228 - RNA, 22 nt, Human
ucauuuguucaucugcucuucu

SEQ ID NO: 826229 - RNA, 22 nt, Human
cagagggcucuuggcugccugc

SEQ ID NO: 826230 - RNA, 23 nt, Human
ucucaagaggaagcagggcucau

SEQ ID NO: 826231 - RNA, 22 nt, Human
cgaggcaggcaggcggaggaua

SEQ ID NO: 826232 - RNA, 22 nt, Human
cggagaggugggggcagcaucu

SEQ ID NO: 826233 - RNA, 22 nt, Human
uguacauacauagauauacaca

SEQ ID NO: 826234 - RNA, 22 nt, Human
aagaagagaacuggcauccuaa

SEQ ID NO: 826235 - RNA, 22 nt, Human
uaguuuuacuugcgaugauaau

SEQ ID NO: 826236 - RNA, 20 nt, Human
gggcagcuccccucauucug

SEQ ID NO: 826237 - RNA, 22 nt, Human
acucagaaugacugaugcugug

SEQ ID NO: 826238 - RNA, 22 nt, Human
cccaugagauucugaauuuggc

SEQ ID NO: 826239 - RNA, 23 nt, Human
aaacugcuuccaauuccugccau

SEQ ID NO: 826240 - RNA, 22 nt, Human
ucugggaauuuauuggcacuuu

SEQ ID NO: 826241 - RNA, 22 nt, Human
cuggcuuucucugugguguuca

SEQ ID NO: 826242 - RNA, 22 nt, Human
ucugcaggcucuagaugagguu

SEQ ID NO: 826243 - RNA, 22 nt, Human
gcaggagagucugugccagguu

SEQ ID NO: 826244 - RNA, 22 nt, Human
cugaaugaggaaaagagugagg

SEQ ID NO: 826245 - RNA, 22 nt, Human
ucauuuguacuugugugcuugu

SEQ ID NO: 826246 - RNA, 22 nt, Human
caggcagaguuagagcaacugg

SEQ ID NO: 826247 - RNA, 18 nt, Human
uuccaugauuccuuucac

SEQ ID NO: 826248 - RNA, 22 nt, Human
cagaaggcuggcagauugagau

SEQ ID NO: 826249 - RNA, 22 nt, Human
uaucuguuugcucacagguguu

SEQ ID NO: 826250 - RNA, 22 nt, Human
gcaggaagcauagaagaaugcc

SEQ ID NO: 826251 - RNA, 22 nt, Human
gugcuuuuaaaggcaauuagua

SEQ ID NO: 826252 - RNA, 22 nt, Human
aggccagaaauuuggaguaugu

SEQ ID NO: 826253 - RNA, 21 nt, Human
uuccagagauuguuucaccug

SEQ ID NO: 826254 - RNA, 22 nt, Human
uuccuuaguugacugucuuagu

SEQ ID NO: 826255 - RNA, 22 nt, Human
ccacagagcauuagauuucaga

SEQ ID NO: 826256 - RNA, 22 nt, Human
gcccaguaguucaagguugcag

SEQ ID NO: 826257 - RNA, 22 nt, Human
auaguuugugaaacacagcagu

SEQ ID NO: 826258 - RNA, 22 nt, Human
gcaucuaauccaguccagcauc

SEQ ID NO: 826259 - RNA, 22 nt, Human
gucuucuguaagaugagguccc

SEQ ID NO: 826260 - RNA, 22 nt, Human
auauuucaugggguuccauacu

SEQ ID NO: 826261 - RNA, 22 nt, Human
caggguggcacaucacagcauu

SEQ ID NO: 826262 - RNA, 22 nt, Human
gucaggauguuuauucuccagu

SEQ ID NO: 826263 - RNA, 22 nt, Human
acagugcuggcuacaacccugg

SEQ ID NO: 826264 - RNA, 22 nt, Human
uauugaugcuuggauugggcca

SEQ ID NO: 826265 - RNA, 22 nt, Human
augcuuuuccaggagaaauaua

SEQ ID NO: 826266 - RNA, 22 nt, Human
cauggagauaaacugaaauauu

SEQ ID NO: 826267 - RNA, 22 nt, Human
ugcccaggcuggaaugcagugg

SEQ ID NO: 826268 - RNA, 22 nt, Human
agugugagcccuggaguggugc

SEQ ID NO: 826269 - RNA, 22 nt, Human
uuccucagcuggccugauuggg

SEQ ID NO: 826270 - RNA, 22 nt, Human
cugcugugggcaggguagcugg

SEQ ID NO: 826271 - RNA, 22 nt, Human
uacaaagagguaauugcauaua

SEQ ID NO: 826272 - RNA, 22 nt, Human
ucccaggauuuuaggcucucag

SEQ ID NO: 826273 - RNA, 22 nt, Human
ccugucacgaugacugcacucu

SEQ ID NO: 826274 - RNA, 22 nt, Human
cucaggauucucgacacucaca

SEQ ID NO: 826275 - RNA, 22 nt, Human
uucucuuugacauuauucaggu

SEQ ID NO: 826276 - RNA, 19 nt, Human
cuucuucuuggcagccaag

SEQ ID NO: 826277 - RNA, 22 nt, Human
ugcaggaaucagaggggaagcg

SEQ ID NO: 826278 - RNA, 22 nt, Human
uuucaguuguccuguuaauagc

SEQ ID NO: 826279 - RNA, 22 nt, Human
ggccaggaagggaagaucagca

SEQ ID NO: 826280 - RNA, 22 nt, Human
ggcagcuggguuggccagaaac

SEQ ID NO: 826281 - RNA, 22 nt, Human
uggcagcugguacagugggucu

SEQ ID NO: 826282 - RNA, 22 nt, Human
agucuugcauuuucugaagaug

SEQ ID NO: 826283 - RNA, 22 nt, Human
cuucucaaaguugugaaucagg

SEQ ID NO: 826284 - RNA, 22 nt, Human
gaggacaggagacucacuguuu

SEQ ID NO: 826285 - RNA, 22 nt, Human
agggcagcagcuccuccuagcu

SEQ ID NO: 826286 - RNA, 23 nt, Human
gagugcagaauagacaugcagug

SEQ ID NO: 826287 - RNA, 22 nt, Human
aggcagcugugaggacuggauu

SEQ ID NO: 826288 - RNA, 22 nt, Human
ggagcuguuggcagcuaucuug

SEQ ID NO: 826289 - RNA, 22 nt, Human
ugccuugcacauaauauacauu

SEQ ID NO: 826290 - RNA, 22 nt, Human
ggugaaggcacaagagggcaag

SEQ ID NO: 826291 - RNA, 22 nt, Human
aggagggagcuuaagccaggca

SEQ ID NO: 826292 - RNA, 22 nt, Human
uuugcagucaaauuugcuaaau

SEQ ID NO: 826293 - RNA, 22 nt, Human
ccaggaagcugucugauaugaa

SEQ ID NO: 826294 - RNA, 22 nt, Human
gauggcagcagcagccagggau

SEQ ID NO: 826295 - RNA, 22 nt, Human
caggaggaagaacucugcaaca

SEQ ID NO: 826296 - RNA, 22 nt, Human
aggccagaaaugucagggagug

SEQ ID NO: 826297 - RNA, 22 nt, Human
aagggagguaaagcuauuuaaa

SEQ ID NO: 826298 - RNA, 22 nt, Human
gaggcaucugggcacagaagug

SEQ ID NO: 826299 - RNA, 22 nt, Human
aaugcuuuuugcgaaaugugca

SEQ ID NO: 826300 - RNA, 22 nt, Human
aucaggaugacuauaaggcugc

SEQ ID NO: 826301 - RNA, 17 nt, Human
agauggcaggaggcaga

SEQ ID NO: 826302 - RNA, 22 nt, Human
caagauggaguccgggaaugug

SEQ ID NO: 826303 - RNA, 22 nt, Human
ggaccuggcaauuugcaucucu

SEQ ID NO: 826304 - RNA, 22 nt, Human
cccaggagguggaguucacagu

SEQ ID NO: 826305 - RNA, 22 nt, Human
caggagauguaagacuucuguu

SEQ ID NO: 826306 - RNA, 18 nt, Human
gugcugugggcaguggcc

SEQ ID NO: 826307 - RNA, 22 nt, Human
cccaggaguuugaguucagcau

SEQ ID NO: 826308 - RNA, 22 nt, Human
uucacagaugccugaugugugg

SEQ ID NO: 826309 - RNA, 22 nt, Human
cuacccaggcuggagugcagua

SEQ ID NO: 826310 - RNA, 22 nt, Human
gccaggagggaaaggacaauuu

SEQ ID NO: 826311 - RNA, 22 nt, Human
aggcagacucaauggcuagaua

SEQ ID NO: 826312 - RNA, 22 nt, Human
cugugauuguuaguuccuauac

SEQ ID NO: 826313 - RNA, 22 nt, Human
aacacugcugcuggguucugug

SEQ ID NO: 826314 - RNA, 22 nt, Human
cuucaugcugauauccucgaug

SEQ ID NO: 826315 - RNA, 20 nt, Human
ugugaaagcaguagaaugac

SEQ ID NO: 826316 - RNA, 22 nt, Human
acaauguguuuuuauacauuug

SEQ ID NO: 826317 - RNA, 22 nt, Human
ucugaaagaagggcagucuuuu

SEQ ID NO: 826318 - RNA, 22 nt, Human
uugaaaguuuauggagucugca

SEQ ID NO: 826319 - RNA, 22 nt, Human
acccaggagguggaggcugcag

SEQ ID NO: 826320 - RNA, 17 nt, Human
uccaggagaggcaaugg

SEQ ID NO: 826321 - RNA, 22 nt, Human
uuuguuaauucuuauguuagag

SEQ ID NO: 826322 - RNA, 22 nt, Human
gaggcagccagagguucucauu

SEQ ID NO: 826323 - RNA, 21 nt, Human
aucauucuggaaaauucaagc

SEQ ID NO: 826324 - RNA, 22 nt, Human
ucagcugcucaaauuuauguca

SEQ ID NO: 826325 - RNA, 22 nt, Human
gcuccucuucucccacugaaug

SEQ ID NO: 826326 - RNA, 22 nt, Human
cccaggagagagacuugaaucu

SEQ ID NO: 826327 - RNA, 22 nt, Human
aauuuccaaauuucugucacac

SEQ ID NO: 826328 - RNA, 22 nt, Human
uuguuugaggucacugauauuu

SEQ ID NO: 826329 - RNA, 22 nt, Human
cagaggcauacucccagucuug

SEQ ID NO: 826330 - RNA, 22 nt, Human
auuuuacuacuccaauuaauga

SEQ ID NO: 826331 - RNA, 17 nt, Human
acucaggaucugggagu

SEQ ID NO: 826332 - RNA, 21 nt, Human
ccaggaaggacugagcucccu

SEQ ID NO: 826333 - RNA, 22 nt, Human
uauaucauggagauuaacauuc

SEQ ID NO: 826334 - RNA, 22 nt, Human
aggcagcuaagauggauaauga

SEQ ID NO: 826335 - RNA, 22 nt, Human
cuuuuauuuugaauuaagggcu

SEQ ID NO: 826336 - RNA, 22 nt, Human
uuuggaauguaguuuaaucauc

SEQ ID NO: 826337 - RNA, 22 nt, Human
uggaaggagacugggaagugug

SEQ ID NO: 826338 - RNA, 22 nt, Human
uggaggggcaauggagcgcgga

SEQ ID NO: 826339 - RNA, 22 nt, Human
gucaggaugcuauuguuauuaa

SEQ ID NO: 826340 - RNA, 22 nt, Human
gggagagguuacccgagcaacu

SEQ ID NO: 826341 - RNA, 22 nt, Human
ggaugggagcagaggacgacca

SEQ ID NO: 826342 - RNA, 22 nt, Human
uccauucauucauugaugaaca

SEQ ID NO: 826343 - RNA, 22 nt, Human
uuugaaagaauuuauguacuuu

SEQ ID NO: 826344 - RNA, 22 nt, Human
gaggcacugcaguacagugacu

SEQ ID NO: 826345 - RNA, 22 nt, Human
aaggcagcuuuaaaaaagaugc

SEQ ID NO: 826346 - RNA, 22 nt, Human
uugggcucaggaguuugagacc

SEQ ID NO: 826347 - RNA, 22 nt, Human
ucacaaauagcuauauuaagga

SEQ ID NO: 826348 - RNA, 22 nt, Human
uuucucuguucucuaacuguaa

SEQ ID NO: 826349 - RNA, 22 nt, Human
acacagaguauuuagaaggggu

SEQ ID NO: 826350 - RNA, 22 nt, Human
uuucaguuuuugcucgauguau

SEQ ID NO: 826351 - RNA, 22 nt, Human
cagcaggaggugaguagcaggu

SEQ ID NO: 826352 - RNA, 20 nt, Human
ggaggguggaagaaagcaag

SEQ ID NO: 826353 - RNA, 22 nt, Human
acacauauauacauauuugugc

SEQ ID NO: 826354 - RNA, 22 nt, Human
gccugcagaacugugaggcaau

SEQ ID NO: 826355 - RNA, 22 nt, Human
ucugcugucacucauuugcuuc

SEQ ID NO: 826356 - RNA, 22 nt, Human
auuguuaugaaaauaagauguu

SEQ ID NO: 826357 - RNA, 20 nt, Human
ucagugauuuugaagaggaa

SEQ ID NO: 826358 - RNA, 22 nt, Human
ugcugcuguuuccuacaucuca

SEQ ID NO: 826359 - RNA, 22 nt, Human
caggguggcacucagcgcaucu

SEQ ID NO: 826360 - RNA, 22 nt, Human
agggagcucuaaguagagggac

SEQ ID NO: 826361 - RNA, 17 nt, Human
uuugaaaggaugucagu

SEQ ID NO: 826362 - RNA, 19 nt, Human
ucccaggaagcaaauguca

SEQ ID NO: 826363 - RNA, 22 nt, Human
ucuucucuccugcuuggcagaa

SEQ ID NO: 826364 - RNA, 22 nt, Human
uuaauuuuaaccuguuuguguc

SEQ ID NO: 826365 - RNA, 22 nt, Human
uguuuuuaaauaaugauagaaa

SEQ ID NO: 826366 - RNA, 22 nt, Human
uuuuaacuuaaaauacauagau

SEQ ID NO: 826367 - RNA, 22 nt, Human
uguuguuuucucauggagaaua

SEQ ID NO: 826368 - RNA, 22 nt, Human
ucuucaauuagauuuaccaauu

SEQ ID NO: 826369 - RNA, 22 nt, Human
uguuugaauuuugcuaacgugu

SEQ ID NO: 826370 - RNA, 22 nt, Human
ggagcggagggagggccacugu

SEQ ID NO: 826371 - RNA, 22 nt, Human
ggaggugggcuaaggacucucu

SEQ ID NO: 826372 - RNA, 22 nt, Human
aaggcagccgugugacugcaug

SEQ ID NO: 826373 - RNA, 22 nt, Human
aucaggaucacugggagucuug

SEQ ID NO: 826374 - RNA, 22 nt, Human
ugguaauuaauuugauagguuc

SEQ ID NO: 826375 - RNA, 21 nt, Human
cccacggaaugaugaggcacu

SEQ ID NO: 826376 - RNA, 22 nt, Human
ucacaaaugaggaaaucgagca

SEQ ID NO: 826377 - RNA, 22 nt, Human
ggcaagaaggcuucagguagcu

SEQ ID NO: 826378 - RNA, 22 nt, Human
uucuucaauuuuccauauacug

SEQ ID NO: 826379 - RNA, 22 nt, Human
aguaaaucagaccucauuaugu

SEQ ID NO: 826380 - RNA, 22 nt, Human
ugaggcagaaauuccuguuuuc

SEQ ID NO: 826381 - RNA, 21 nt, Human
cagcagaguaaugcauucgua

SEQ ID NO: 826382 - RNA, 22 nt, Human
uuagaaagaacuuuagauauca

SEQ ID NO: 826383 - RNA, 22 nt, Human
cacaaugugguuugucaucuuu

SEQ ID NO: 826384 - RNA, 22 nt, Human
accaggagagauuuuauugaga

SEQ ID NO: 826385 - RNA, 22 nt, Human
cuggccaggcuugggacagaca

SEQ ID NO: 826386 - RNA, 23 nt, Human
uugaaagguagcuggcagcuaga

SEQ ID NO: 826387 - RNA, 20 nt, Human
aagggcagagggaacagacu

SEQ ID NO: 826388 - RNA, 22 nt, Human
ggguggagcuuggacaccagua

SEQ ID NO: 826389 - RNA, 20 nt, Human
cugcugugguccuuuauuuu

SEQ ID NO: 826390 - RNA, 22 nt, Human
ucaguagcagaaagcaaugagu

SEQ ID NO: 826391 - RNA, 17 nt, Human
ccuguguuugcuccuuc

SEQ ID NO: 826392 - RNA, 22 nt, Human
cugcugugugaccauggacagg

SEQ ID NO: 826393 - RNA, 23 nt, Human
cuuuuaacuugaucugagaccag

SEQ ID NO: 826394 - RNA, 22 nt, Human
uaaaacuuaacuauccagauua

SEQ ID NO: 826395 - RNA, 22 nt, Human
aaaccgcaauuacuuuugcguc

SEQ ID NO: 826396 - RNA, 22 nt, Human
guccucuggaagaugaguucuu

SEQ ID NO: 826397 - RNA, 22 nt, Human
agacagcuaauaaaugagugug

SEQ ID NO: 826398 - RNA, 22 nt, Human
ggcagcaucucuggcagcagcu

SEQ ID NO: 826399 - RNA, 22 nt, Human
agaggaugguugaggaagaccu

SEQ ID NO: 826400 - RNA, 22 nt, Human
ggagcaggagucucuugaauuu

SEQ ID NO: 826401 - RNA, 22 nt, Human
ucuuuucaucauuuaauaggua

SEQ ID NO: 826402 - RNA, 22 nt, Human
uuuaaauuauaguuaaugucug

SEQ ID NO: 826403 - RNA, 22 nt, Human
aauggccagcaacaggagugaa

SEQ ID NO: 826404 - RNA, 22 nt, Human
ucacaauuuggauacagcuaug

SEQ ID NO: 826405 - RNA, 18 nt, Human
ucauuuguuuugcaugaa

SEQ ID NO: 826406 - RNA, 17 nt, Human
acacagggagagggagc

SEQ ID NO: 826407 - RNA, 22 nt, Human
uucuagaugauaaaccagcagc

SEQ ID NO: 826408 - RNA, 19 nt, Human
cuggccaggccaggggccc

SEQ ID NO: 826409 - RNA, 22 nt, Human
aaggccagacaggaccacaucu

SEQ ID NO: 826410 - RNA, 22 nt, Human
uucagcaaacacgaugcuuguu

SEQ ID NO: 826411 - RNA, 22 nt, Human
aggcagcguagcaaggcuagua

SEQ ID NO: 826412 - RNA, 22 nt, Human
ucaugcuuauugcauauuugga

SEQ ID NO: 826413 - RNA, 22 nt, Human
uuaaauauuuucagcaggguca

SEQ ID NO: 826414 - RNA, 22 nt, Human
aaggcaguuaauuuggcuagaa

SEQ ID NO: 826415 - RNA, 22 nt, Human
uucagggagagcgggacgggug

SEQ ID NO: 826416 - RNA, 22 nt, Human
uagaagcaguaauagaaauagg

SEQ ID NO: 826417 - RNA, 22 nt, Human
agcugaugccauguggaacagu

SEQ ID NO: 826418 - RNA, 22 nt, Human
gcuguguuugacaguagcagac

SEQ ID NO: 826419 - RNA, 17 nt, Human
cagacaggcugucaccc

SEQ ID NO: 826420 - RNA, 22 nt, Human
ugaaagcacaaguucuaacagg

SEQ ID NO: 826421 - RNA, 22 nt, Human
aggcaguggagcuggaauaggc

SEQ ID NO: 826422 - RNA, 22 nt, Human
uucugggacaucuggacaguuu

SEQ ID NO: 826423 - RNA, 22 nt, Human
ccuccucugggaagauucagag

SEQ ID NO: 826424 - RNA, 22 nt, Human
aggagagggguaggauuaauuu

SEQ ID NO: 826425 - RNA, 22 nt, Human
acccaggagcucugggguccuc

SEQ ID NO: 826426 - RNA, 22 nt, Human
uaugaacucuggagucugagug

SEQ ID NO: 826427 - RNA, 22 nt, Human
ggguggaguagaaagaugaauu

SEQ ID NO: 826428 - RNA, 22 nt, Human
cucaggauagcugcgcagccug

SEQ ID NO: 826429 - RNA, 22 nt, Human
gagguggucgaggagggguacc

SEQ ID NO: 826430 - RNA, 22 nt, Human
ugcacagugaccccuggugacu

SEQ ID NO: 826431 - RNA, 22 nt, Human
uucuucuucauuucugacgaug

SEQ ID NO: 826432 - RNA, 22 nt, Human
uugauuaaacaggcauauucaa

SEQ ID NO: 826433 - RNA, 22 nt, Human
gaccauuuuuacagagcauuca

SEQ ID NO: 826434 - RNA, 22 nt, Human
uagaaauaaaucugcagcuggg

SEQ ID NO: 826435 - RNA, 22 nt, Human
ggcagcuuucaauaggguuaug

SEQ ID NO: 826436 - RNA, 22 nt, Human
gaggcagcggcucacagagaaa

SEQ ID NO: 826437 - RNA, 22 nt, Human
auucuucacaccuguuccuguu

SEQ ID NO: 826438 - RNA, 22 nt, Human
acaggagaaaucuggucaaaag

SEQ ID NO: 826439 - RNA, 22 nt, Human
caacugcugacaccaucacucc

SEQ ID NO: 826440 - RNA, 22 nt, Human
caggauggucucgaucuccuga

SEQ ID NO: 826441 - RNA, 22 nt, Human
uuaaauuccagccucauaauag

SEQ ID NO: 826442 - RNA, 22 nt, Human
cccucuacagggaagcgcuuuc

SEQ ID NO: 826443 - RNA, 22 nt, Human
uuuucaguuccaucucugcucu

SEQ ID NO: 826444 - RNA, 22 nt, Human
gaggcaugcagagcuggagcag

SEQ ID NO: 826445 - RNA, 22 nt, Human
guucuucaucauuuuagauagg

SEQ ID NO: 826446 - RNA, 22 nt, Human
aggccagcgcugcuagcucccg

SEQ ID NO: 826447 - RNA, 22 nt, Human
agaggcaggaagagcugauuuu

SEQ ID NO: 826448 - RNA, 22 nt, Human
aggcaccuugcgguccagugaa

SEQ ID NO: 826449 - RNA, 22 nt, Human
aggagacauaacuaugaugaga

SEQ ID NO: 826450 - RNA, 22 nt, Human
ucauuauccuaguaucuugaau

SEQ ID NO: 826451 - RNA, 22 nt, Human
ggcagcuuucucacccaugacc

SEQ ID NO: 826452 - RNA, 22 nt, Human
cccaggaaugagcaggcagggg

SEQ ID NO: 826453 - RNA, 22 nt, Human
augauauuugcaaugugcuugc

SEQ ID NO: 826454 - RNA, 22 nt, Human
uucaaauacauucuuugccacu

SEQ ID NO: 826455 - RNA, 22 nt, Human
gagcagcucugugccuggagac

SEQ ID NO: 826456 - RNA, 22 nt, Human
ggcaucuccaaaacaugaacuc

SEQ ID NO: 826457 - RNA, 22 nt, Human
ggcagaggaggggugaauuugc

SEQ ID NO: 826458 - RNA, 19 nt, Human
aguggcagaucuggaagua

SEQ ID NO: 826459 - RNA, 22 nt, Human
auuuccaguccuaaugaucugg

SEQ ID NO: 826460 - RNA, 22 nt, Human
uccaggagugauaaggccacug

SEQ ID NO: 826461 - RNA, 22 nt, Human
ugcugaaacaauaacauacugg

SEQ ID NO: 826462 - RNA, 22 nt, Human
gggcagcuggauaguuuuaaau

SEQ ID NO: 826463 - RNA, 22 nt, Human
agugcuuugugcucucacugca

SEQ ID NO: 826464 - RNA, 22 nt, Human
ccucacugaagaggugacauuu

SEQ ID NO: 826465 - RNA, 22 nt, Human
agggaguuagaaauccaggaua

SEQ ID NO: 826466 - RNA, 22 nt, Human
cuuaagauuugcgauaccuaau

SEQ ID NO: 826467 - RNA, 22 nt, Human
acaggagaauuaucuggaacaa

SEQ ID NO: 826468 - RNA, 22 nt, Human
acuguugucaggcugcuuugga

SEQ ID NO: 826469 - RNA, 22 nt, Human
cauugcuguuaauugucucuag

SEQ ID NO: 826470 - RNA, 22 nt, Human
gaggagagggcugcgggcccac

SEQ ID NO: 826471 - RNA, 22 nt, Human
aucugccuccaaguccaugugu

SEQ ID NO: 826472 - RNA, 22 nt, Human
uagggcagagcuuguacacgau

SEQ ID NO: 826473 - RNA, 23 nt, Human
ucucuuucaagagcuuaaugugc

SEQ ID NO: 826474 - RNA, 22 nt, Human
aggcagacaaggacacaguggg

SEQ ID NO: 826475 - RNA, 22 nt, Human
uggagagguugaauaacuuguc

SEQ ID NO: 826476 - RNA, 22 nt, Human
gagagcuguuuaucuucuucaa

SEQ ID NO: 826477 - RNA, 22 nt, Human
uuuguuuagaugguaaaucagu

SEQ ID NO: 826478 - RNA, 22 nt, Human
cuucuucauaggcaguccuguu

SEQ ID NO: 826479 - RNA, 22 nt, Human
gcccaggauaaugcugucccug

SEQ ID NO: 826480 - RNA, 22 nt, Human
ggagaggagcuauugggggcuc

SEQ ID NO: 826481 - RNA, 22 nt, Human
uugacacagaucaauauucaac

SEQ ID NO: 826482 - RNA, 23 nt, Human
ucaggauauugugugccaaggug

SEQ ID NO: 826483 - RNA, 22 nt, Human
gcuugaaaauucauagguauuu

SEQ ID NO: 826484 - RNA, 22 nt, Human
uggccaggcagguagaacggcc

SEQ ID NO: 826485 - RNA, 22 nt, Human
uaaguggaagguuauaugcuaa

SEQ ID NO: 826486 - RNA, 21 nt, Human
aaugaaguggcuauuuugagg

SEQ ID NO: 826487 - RNA, 22 nt, Human
cagagcagucuggagauccagc

SEQ ID NO: 826488 - RNA, 22 nt, Human
ucucuucuagcuucuugugguu

SEQ ID NO: 826489 - RNA, 19 nt, Human
gcuuuggagggagguucua

SEQ ID NO: 826490 - RNA, 22 nt, Human
aaaggugacacucugccagcug

SEQ ID NO: 826491 - RNA, 22 nt, Human
ugaaaugauaucugauaacaaa

SEQ ID NO: 826492 - RNA, 22 nt, Human
aaggagagguuguccguguugu

SEQ ID NO: 826493 - RNA, 22 nt, Human
gcagcugagcgugaggaagagu

SEQ ID NO: 826494 - RNA, 22 nt, Human
ucagagaguuggaaagaauuaa

SEQ ID NO: 826495 - RNA, 22 nt, Human
aggcacaggaaugucauccagu

SEQ ID NO: 826496 - RNA, 22 nt, Human
acuuaaaaagaaucuuuucacg

SEQ ID NO: 826497 - RNA, 22 nt, Human
augaggcauuccacucaaacuc

SEQ ID NO: 826498 - RNA, 22 nt, Human
gaccauuugcuaguaaauugca

SEQ ID NO: 826499 - RNA, 22 nt, Human
cauagagugauguaagguaugu

SEQ ID NO: 826500 - RNA, 22 nt, Human
gaggcugcuguuagcccugggc

SEQ ID NO: 826501 - RNA, 22 nt, Human
cuuuggcaaggguuuuaauugu

SEQ ID NO: 826502 - RNA, 21 nt, Human
uucucagagucuauuacaguu

SEQ ID NO: 826503 - RNA, 22 nt, Human
gaggagagaugguagauugggu

SEQ ID NO: 826504 - RNA, 20 nt, Human
uuucaguuaucuugaccuuc

SEQ ID NO: 826505 - RNA, 22 nt, Human
cuuguaauuauaauguacuguu

SEQ ID NO: 826506 - RNA, 22 nt, Human
uccauuuuucaugacuccucaa

SEQ ID NO: 826507 - RNA, 21 nt, Human
cacucaggguaugugccaggc

SEQ ID NO: 826508 - RNA, 23 nt, Human
ucagucuucccugucaguaauag

SEQ ID NO: 826509 - RNA, 22 nt, Human
agccuauuccaggaugagcuca

SEQ ID NO: 826510 - RNA, 22 nt, Human
uagggaugacgaaaggacagag

SEQ ID NO: 826511 - RNA, 22 nt, Human
gagagaaaugugcaguuugggc

SEQ ID NO: 826512 - RNA, 22 nt, Human
aggagaaggaagugcaucacua

SEQ ID NO: 826513 - RNA, 22 nt, Human
cagaaauguacugacaugcagu

SEQ ID NO: 826514 - RNA, 22 nt, Human
cggagaggaccugcaacucgcu

SEQ ID NO: 826515 - RNA, 22 nt, Human
ccucaggggucacugugaggag

SEQ ID NO: 826516 - RNA, 22 nt, Human
acuguagcugccacuggaugca

SEQ ID NO: 826517 - RNA, 22 nt, Human
uccugagagcagcugcuuugga

SEQ ID NO: 826518 - RNA, 22 nt, Human
augcugagugagugaaacccag

SEQ ID NO: 826519 - RNA, 22 nt, Human
uuauuucauugauuucuaagac

SEQ ID NO: 826520 - RNA, 22 nt, Human
cauuugcagagggugacacucu

SEQ ID NO: 826521 - RNA, 22 nt, Human
agcaccugucacaagcagaagg

SEQ ID NO: 826522 - RNA, 22 nt, Human
caggaugguggcaugaucagaa

SEQ ID NO: 826523 - RNA, 22 nt, Human
ucuucacaugaccuucaugucu

SEQ ID NO: 826524 - RNA, 22 nt, Human
ucucaagaucucaagauggccc

SEQ ID NO: 826525 - RNA, 22 nt, Human
aggggcucaaagugugcaggga

SEQ ID NO: 826526 - RNA, 22 nt, Human
cugccaggcagcagagggagaa

SEQ ID NO: 826527 - RNA, 22 nt, Human
ugucuucagcaaaugccuuucu

SEQ ID NO: 826528 - RNA, 22 nt, Human
cuuuggcagccucugcuauuga

SEQ ID NO: 826529 - RNA, 22 nt, Human
uccaggagguuuggaggaagca

SEQ ID NO: 826530 - RNA, 22 nt, Human
uucaggauucugugucugacaa

SEQ ID NO: 826531 - RNA, 22 nt, Human
uuauuucauguaaaauuuaugu

SEQ ID NO: 826532 - RNA, 22 nt, Human
cccaagagguggagguugcagu

SEQ ID NO: 826533 - RNA, 22 nt, Human
gggcagcugccccucucugggc

SEQ ID NO: 826534 - RNA, 23 nt, Human
ucuugaaaagccuacagcaguuc

SEQ ID NO: 826535 - RNA, 22 nt, Human
auuauauaggacuugcccuucc

SEQ ID NO: 826536 - RNA, 22 nt, Human
ucuucuuccucauuuauacaua

SEQ ID NO: 826537 - RNA, 22 nt, Human
uuuccuaggagauugaucacau

SEQ ID NO: 826538 - RNA, 22 nt, Human
gcuguguuggugaagcuguagc

SEQ ID NO: 826539 - RNA, 22 nt, Human
cccauugugguuguugaggaua

SEQ ID NO: 826540 - RNA, 22 nt, Human
aucuucucauguguaaugaggu

SEQ ID NO: 826541 - RNA, 22 nt, Human
aggcggcuccgggagugugggc

SEQ ID NO: 826542 - RNA, 22 nt, Human
uucagaaguagcuaagcaguca

SEQ ID NO: 826543 - RNA, 22 nt, Human
cuucucagcauuuugucagucu

SEQ ID NO: 826544 - RNA, 22 nt, Human
ggaggaggggcgcuuugucuau

SEQ ID NO: 826545 - RNA, 22 nt, Human
cacagcuaggaggaaagcagag

SEQ ID NO: 826546 - RNA, 20 nt, Human
caguccaaucagaggccacc

SEQ ID NO: 826547 - RNA, 22 nt, Human
cugagggugcuauucuugccuu

SEQ ID NO: 826548 - RNA, 22 nt, Human
uuugaaauuaagauauugucca

SEQ ID NO: 826549 - RNA, 23 nt, Human
uggacgccgacuuuggaggcgcu

SEQ ID NO: 826550 - RNA, 22 nt, Human
uaggcagcagugcuaugauucu

SEQ ID NO: 826551 - RNA, 22 nt, Human
cuuaaauuggaugaguuaaguu

SEQ ID NO: 826552 - RNA, 22 nt, Human
agaggacaaaaugagaagugcu

SEQ ID NO: 826553 - RNA, 22 nt, Human
ucacauucucagcaucuauaca

SEQ ID NO: 826554 - RNA, 22 nt, Human
uacaacauuguguugcuucaua

SEQ ID NO: 826555 - RNA, 22 nt, Human
ucuccucuauuucuguauguau

SEQ ID NO: 826556 - RNA, 22 nt, Human
gagaggauccacaaaccaggaa

SEQ ID NO: 826557 - RNA, 20 nt, Human
uucuucucuaguuaucuuca

SEQ ID NO: 826558 - RNA, 22 nt, Human
ccucaggaaaugaauaaauggc

SEQ ID NO: 826559 - RNA, 23 nt, Human
uuucuucagaagccuugcgaggc

SEQ ID NO: 826560 - RNA, 21 nt, Human
gcaaauguucaggaaaaaaga

SEQ ID NO: 826561 - RNA, 22 nt, Human
ugaggggagaagcagcagccug

SEQ ID NO: 826562 - RNA, 22 nt, Human
ccaggacagugaacauguaaga

SEQ ID NO: 826563 - RNA, 22 nt, Human
acccaggagccgugagagguua

SEQ ID NO: 826564 - RNA, 22 nt, Human
uucaggaugaaagugugcaaca

SEQ ID NO: 826565 - RNA, 22 nt, Human
uucaaacaguguagaauauaug

SEQ ID NO: 826566 - RNA, 22 nt, Human
uccaugaggcagggaggcuggc

SEQ ID NO: 826567 - RNA, 18 nt, Human
ugagaggcagguagagga

SEQ ID NO: 826568 - RNA, 22 nt, Human
uuuucaguaaugucuacauaau

SEQ ID NO: 826569 - RNA, 22 nt, Human
agaaaugaauauguagugguua

SEQ ID NO: 826570 - RNA, 22 nt, Human
aagaggaggacgguucccagaa

SEQ ID NO: 826571 - RNA, 22 nt, Human
gauuucuugauaaguaguguga

SEQ ID NO: 826572 - RNA, 22 nt, Human
uuucacaacugcuuauuugaga

SEQ ID NO: 826573 - RNA, 22 nt, Human
aucuugcauuugcuaaaaugca

SEQ ID NO: 826574 - RNA, 22 nt, Human
gcugcugucagugguggcaguu

SEQ ID NO: 826575 - RNA, 22 nt, Human
uauuuuaucugccagaguggag

SEQ ID NO: 826576 - RNA, 22 nt, Human
auguucuuguucaaaugucagu

SEQ ID NO: 826577 - RNA, 18 nt, Human
cugcuugggagacgucag

SEQ ID NO: 826578 - RNA, 22 nt, Human
aguggcagagugcacucaggca

SEQ ID NO: 826579 - RNA, 22 nt, Human
aaagcagagcagggcacuuaug

SEQ ID NO: 826580 - RNA, 18 nt, Human
caugucugcgccacaagg

SEQ ID NO: 826581 - RNA, 22 nt, Human
aauuuuaagcauaugacugguu

SEQ ID NO: 826582 - RNA, 22 nt, Human
cccaggaggcagagauagcagu

SEQ ID NO: 826583 - RNA, 22 nt, Human
uuccucagaaaauacuguccaa

SEQ ID NO: 826584 - RNA, 22 nt, Human
uugaacugguaguuggaaaucu

SEQ ID NO: 826585 - RNA, 22 nt, Human
acugcccucccaucuauugcaa

SEQ ID NO: 826586 - RNA, 22 nt, Human
ucugggaaguccucugucaugc

SEQ ID NO: 826587 - RNA, 21 nt, Human
auaagcaugcugauuacauuu

SEQ ID NO: 826588 - RNA, 22 nt, Human
acaguuaucuuugaaauagaga

SEQ ID NO: 826589 - RNA, 22 nt, Human
ccaggagaagcaucugagugua

SEQ ID NO: 826590 - RNA, 22 nt, Human
gccaggagaaaaggcgaaugau

SEQ ID NO: 826591 - RNA, 19 nt, Human
uucccaggaaaggggugca

SEQ ID NO: 826592 - RNA, 22 nt, Human
gcugcugugccuggcguccugu

SEQ ID NO: 826593 - RNA, 22 nt, Human
gcagaggauagcauaugaaccu

SEQ ID NO: 826594 - RNA, 22 nt, Human
uugcugaaguuaaugcuugcaa

SEQ ID NO: 826595 - RNA, 22 nt, Human
uuuggaauuggcauucuauucu

SEQ ID NO: 826596 - RNA, 18 nt, Human
gaggcagcuagcaauuuu

SEQ ID NO: 826597 - RNA, 22 nt, Human
acugccauuggucaaaugagug

SEQ ID NO: 826598 - RNA, 22 nt, Human
auguucuuccaaaucuguaaca

SEQ ID NO: 826599 - RNA, 22 nt, Human
cuaaucaucuuucucuuaaagc

SEQ ID NO: 826600 - RNA, 22 nt, Human
uacuuccuguuuccaugucugu

SEQ ID NO: 826601 - RNA, 21 nt, Human
agccuguugguuuacugcuca

SEQ ID NO: 826602 - RNA, 22 nt, Human
uacugcauaacuggcauguggg

SEQ ID NO: 826603 - RNA, 22 nt, Human
uucucacuauguauguagauug

SEQ ID NO: 826604 - RNA, 22 nt, Human
uugcauuugagaaaguucuccu

SEQ ID NO: 826605 - RNA, 22 nt, Human
gcccaggaggucaaguagcuau

SEQ ID NO: 826606 - RNA, 22 nt, Human
gaggagcuggcugucgggaggc

SEQ ID NO: 826607 - RNA, 22 nt, Human
gagaggggcccaagccacauag

SEQ ID NO: 826608 - RNA, 22 nt, Human
gcagagcuucuguccuucagga

SEQ ID NO: 826609 - RNA, 22 nt, Human
acacaaugcauauuuuuccaga

SEQ ID NO: 826610 - RNA, 23 nt, Human
uuuuccagaaucgacucuguaga

SEQ ID NO: 826611 - RNA, 22 nt, Human
auucuucauuuacuguuacuug

SEQ ID NO: 826612 - RNA, 22 nt, Human
aagugagugguaaggagcaugg

SEQ ID NO: 826613 - RNA, 22 nt, Human
ccuugcugcgugcuagcacaga

SEQ ID NO: 826614 - RNA, 22 nt, Human
cuacagacccaccuuggaagaa

SEQ ID NO: 826615 - RNA, 22 nt, Human
uuuacauuucccucugucaguu

SEQ ID NO: 826616 - RNA, 22 nt, Human
ugcauggaggaagaugaaugca

SEQ ID NO: 826617 - RNA, 22 nt, Human
guuuuaguggguggccacugau

SEQ ID NO: 826618 - RNA, 20 nt, Human
uguuaaaggacacuugcuuu

SEQ ID NO: 826619 - RNA, 22 nt, Human
cucaugauguagcgaaugagaa

SEQ ID NO: 826620 - RNA, 23 nt, Human
uggcagcuguguaagagaaagca

SEQ ID NO: 826621 - RNA, 22 nt, Human
cuucagaagaaaagcagugugu

SEQ ID NO: 826622 - RNA, 22 nt, Human
auuaaauuggaucugcauaguu

SEQ ID NO: 826623 - RNA, 22 nt, Human
uugaacaguccuaagagacccu

SEQ ID NO: 826624 - RNA, 22 nt, Human
ucuuuguaaaugccuagcauaa

SEQ ID NO: 826625 - RNA, 22 nt, Human
aaguuugcauagauuaagcauu

SEQ ID NO: 826626 - RNA, 23 nt, Human
cugcccugaucuugaucuauugu

SEQ ID NO: 826627 - RNA, 22 nt, Human
uggcaguccccugugccuggaa

SEQ ID NO: 826628 - RNA, 22 nt, Human
ggugaagguggaacgcagagca

SEQ ID NO: 826629 - RNA, 22 nt, Human
ugcuagugcaggguuuucaguu

SEQ ID NO: 826630 - RNA, 22 nt, Human
ccaggcugugguuuagauagag

SEQ ID NO: 826631 - RNA, 19 nt, Human
ucccaggaaccuuuuauuu

SEQ ID NO: 826632 - RNA, 22 nt, Human
agcaccuguugcacuucauaau

SEQ ID NO: 826633 - RNA, 22 nt, Human
agaggccaugcuagaggccugg

SEQ ID NO: 826634 - RNA, 22 nt, Human
uggagacugugcuaagggaguu

SEQ ID NO: 826635 - RNA, 22 nt, Human
ucuucacauggaacaugaagcu

SEQ ID NO: 826636 - RNA, 22 nt, Human
gggagucugggcuagacuccuu

SEQ ID NO: 826637 - RNA, 17 nt, Human
aggccagaugaggcaag

SEQ ID NO: 826638 - RNA, 22 nt, Human
ccaggaaaauaccaagcuuuaa

SEQ ID NO: 826639 - RNA, 22 nt, Human
auuaaauuggacgcugggggaa

SEQ ID NO: 826640 - RNA, 22 nt, Human
agaccgagaaguucuccaggcc

SEQ ID NO: 826641 - RNA, 22 nt, Human
cacaugaguccugccagguaug

SEQ ID NO: 826642 - RNA, 22 nt, Human
gagggaauggugugcaagaggu

SEQ ID NO: 826643 - RNA, 20 nt, Human
agauuauuccuaagauuucu

SEQ ID NO: 826644 - RNA, 22 nt, Human
aagauauucaaagauuuauuag

SEQ ID NO: 826645 - RNA, 22 nt, Human
aaaggccaugguuggaguguuu

SEQ ID NO: 826646 - RNA, 22 nt, Human
uugcuagcugguguaugcauug

SEQ ID NO: 826647 - RNA, 22 nt, Human
caagauggagaagcagcaaggg

SEQ ID NO: 826648 - RNA, 22 nt, Human
ggaggggagauguuugggcuca

SEQ ID NO: 826649 - RNA, 22 nt, Human
gaaauauucuugucuuguuuuc

SEQ ID NO: 826650 - RNA, 22 nt, Human
cugcuguggugucaagcaucuc

SEQ ID NO: 826651 - RNA, 22 nt, Human
cccaggaaaugaacuucugauu

SEQ ID NO: 826652 - RNA, 22 nt, Human
cucugcauuuuaacagaugauu

SEQ ID NO: 826653 - RNA, 22 nt, Human
auuucacucauucauguuacuu

SEQ ID NO: 826654 - RNA, 22 nt, Human
uaauuauuugaagacauuagag

SEQ ID NO: 826655 - RNA, 22 nt, Human
ucauuauuuuggacuggagugu

SEQ ID NO: 826656 - RNA, 22 nt, Human
cuguucucuggcgguggcuguu

SEQ ID NO: 826657 - RNA, 22 nt, Human
gagccaaggguugccauggaga

SEQ ID NO: 826658 - RNA, 22 nt, Human
uauuuucuguggaggaccagau

SEQ ID NO: 826659 - RNA, 22 nt, Human
gaggcagcaucuauggugggaa

SEQ ID NO: 826660 - RNA, 22 nt, Human
gcagcugaauguccauugcugc

SEQ ID NO: 826661 - RNA, 22 nt, Human
agcaccauugcaaauauggcag

SEQ ID NO: 826662 - RNA, 20 nt, Human
cugagagucugugcuuaguc

SEQ ID NO: 826663 - RNA, 22 nt, Human
ucauuuguggaagugauugugg

SEQ ID NO: 826664 - RNA, 17 nt, Human
uagcuguguuucagcua

SEQ ID NO: 826665 - RNA, 22 nt, Human
ucucagucagccuugauguccc

SEQ ID NO: 826666 - RNA, 22 nt, Human
agccuuguuggucugaguuugg

SEQ ID NO: 826667 - RNA, 22 nt, Human
gaaaggcaguacagcugagccu

SEQ ID NO: 826668 - RNA, 22 nt, Human
auguauuucuauguagugaaga

SEQ ID NO: 826669 - RNA, 22 nt, Human
uuuuauagcugaauaguauucc

SEQ ID NO: 826670 - RNA, 22 nt, Human
gagguagcgaguggacagugca

SEQ ID NO: 826671 - RNA, 22 nt, Human
ccaggcugagcaugauuggagc

SEQ ID NO: 826672 - RNA, 22 nt, Human
ucuuuccauggccacacagucu

SEQ ID NO: 826673 - RNA, 22 nt, Human
ccccggaggcggagguugcagu

SEQ ID NO: 826674 - RNA, 22 nt, Human
cccaggaggcgcagguugcggu

SEQ ID NO: 826675 - RNA, 22 nt, Human
cagaggaugaucuggccucucu

SEQ ID NO: 826676 - RNA, 22 nt, Human
cauucauuuaugaaauaucuau

SEQ ID NO: 826677 - RNA, 22 nt, Human
gaggcaccucgcgggaggaggc

SEQ ID NO: 826678 - RNA, 22 nt, Human
ccagaccacccuggccaugcac

SEQ ID NO: 826679 - RNA, 22 nt, Human
cugucauuuaagacauucugga

SEQ ID NO: 826680 - RNA, 22 nt, Human
guaggcagucucucaggugauc

SEQ ID NO: 826681 - RNA, 22 nt, Human
uggcagagugcagaagaggcau

SEQ ID NO: 826682 - RNA, 22 nt, Human
aaauuagucgguuuaggaauuu

SEQ ID NO: 826683 - RNA, 22 nt, Human
ugaaaugagcauuuauucuuua

SEQ ID NO: 826684 - RNA, 21 nt, Human
uuucuucacuuugccccaugu

SEQ ID NO: 826685 - RNA, 21 nt, Human
uuucuuaggcucuaaaaugac

SEQ ID NO: 826686 - RNA, 22 nt, Human
caggcagcauuuacucugauga

SEQ ID NO: 826687 - RNA, 22 nt, Human
uggcagcuugaaugcagucuuu

SEQ ID NO: 826688 - RNA, 22 nt, Human
cagcuacuccucccaugacuuc

SEQ ID NO: 826689 - RNA, 22 nt, Human
ggugaaggucagagcaggaaaa

SEQ ID NO: 826690 - RNA, 22 nt, Human
gugagggguggcugagcaguuu

SEQ ID NO: 826691 - RNA, 22 nt, Human
uugcucaggcuggugugcagug

SEQ ID NO: 826692 - RNA, 22 nt, Human
ucucuuucuauaugugagucuu

SEQ ID NO: 826693 - RNA, 22 nt, Human
cuucugugcuucacaguugcca

SEQ ID NO: 826694 - RNA, 22 nt, Human
agauggcagggguaccuggaag

SEQ ID NO: 826695 - RNA, 22 nt, Human
agaggcggagguugcagugagc

SEQ ID NO: 826696 - RNA, 22 nt, Human
gucaggauuuacaaacuucagu

SEQ ID NO: 826697 - RNA, 22 nt, Human
agcaccugccugcauuggcuau

SEQ ID NO: 826698 - RNA, 22 nt, Human
uuugcauaaaggagcauuucuc

SEQ ID NO: 826699 - RNA, 20 nt, Human
ggcaggcuuuauauggaggg

SEQ ID NO: 826700 - RNA, 22 nt, Human
uauuuccagcaguaagaagaca

SEQ ID NO: 826701 - RNA, 22 nt, Human
uugauacauuuuuaggauaaac

SEQ ID NO: 826702 - RNA, 22 nt, Human
uaaaugagggcugacaugauug

SEQ ID NO: 826703 - RNA, 22 nt, Human
uuuaaauggcauuuucccagau

SEQ ID NO: 826704 - RNA, 22 nt, Human
cucccaggcacagggaggagcc

SEQ ID NO: 826705 - RNA, 22 nt, Human
gagggagucugugcaaagaauu

SEQ ID NO: 826706 - RNA, 22 nt, Human
caggauggccccggggcugugc

SEQ ID NO: 826707 - RNA, 22 nt, Human
uggcagcucccagagcuuccaa

SEQ ID NO: 826708 - RNA, 19 nt, Human
uugaaagauuagcuuucua

SEQ ID NO: 826709 - RNA, 19 nt, Human
uucuccagccugaccugag

SEQ ID NO: 826710 - RNA, 22 nt, Human
uccaugagacagauacuguaag

SEQ ID NO: 826711 - RNA, 22 nt, Human
aggagcagcuucugaaccaugu

SEQ ID NO: 826712 - RNA, 22 nt, Human
aguggcaguagaugagcugguu

SEQ ID NO: 826713 - RNA, 22 nt, Human
gagggcaguagccucguacccu

SEQ ID NO: 826714 - RNA, 22 nt, Human
cccaguuucaacuuuccagugg

SEQ ID NO: 826715 - RNA, 22 nt, Human
gaagcacauggcuauagcuauu

SEQ ID NO: 826716 - RNA, 22 nt, Human
uuaacauacaucaugaacaaug

SEQ ID NO: 826717 - RNA, 22 nt, Human
cugcugugcaggugccuaugau

SEQ ID NO: 826718 - RNA, 22 nt, Human
gcuuugaagucugugucuuuug

SEQ ID NO: 826719 - RNA, 22 nt, Human
uggagaggagcaccauggccau

SEQ ID NO: 826720 - RNA, 22 nt, Human
uuugcaaagugacuauuauaug

SEQ ID NO: 826721 - RNA, 22 nt, Human
cagcuuccauaagagauggaga

SEQ ID NO: 826722 - RNA, 22 nt, Human
uaagcugugggagauuggcaua

SEQ ID NO: 826723 - RNA, 23 nt, Human
cugcuguuuucuguaccugaagc

SEQ ID NO: 826724 - RNA, 22 nt, Human
guucuucagaggggaaagaacc

SEQ ID NO: 826725 - RNA, 22 nt, Human
cccaggaggcagagguugcagu

SEQ ID NO: 826726 - RNA, 22 nt, Human
uagcacauacauaauagauaga

SEQ ID NO: 826727 - RNA, 22 nt, Human
gacagcugugcaggagaagggg

SEQ ID NO: 826728 - RNA, 22 nt, Human
gagggucccugcucagggccag

SEQ ID NO: 826729 - RNA, 22 nt, Human
augcuguggaugccuugcccca

SEQ ID NO: 826730 - RNA, 22 nt, Human
ucugaaaugcaaauuugacuga

SEQ ID NO: 826731 - RNA, 22 nt, Human
cuugaaagcacuuaguaaauua

SEQ ID NO: 826732 - RNA, 22 nt, Human
ucacccuugauaauguucuucu

SEQ ID NO: 826733 - RNA, 22 nt, Human
ucucuucuaauuuucccgagua

SEQ ID NO: 826734 - RNA, 22 nt, Human
cuugcaggccuuucuagcucua

SEQ ID NO: 826735 - RNA, 22 nt, Human
auaucaguaucuauguauuugu

SEQ ID NO: 826736 - RNA, 22 nt, Human
gaaaggugccccauaggcagga

SEQ ID NO: 826737 - RNA, 22 nt, Human
gcagagcuccccaagacaccaa

SEQ ID NO: 826738 - RNA, 22 nt, Human
uucaggaucaaguugccaguag

SEQ ID NO: 826739 - RNA, 22 nt, Human
guucuucaggccauccucccag

SEQ ID NO: 826740 - RNA, 22 nt, Human
gaggcagcaauaaaaagaauuu

SEQ ID NO: 826741 - RNA, 23 nt, Human
ggagugcaauggcgccaucucgg

SEQ ID NO: 826742 - RNA, 22 nt, Human
gaaggaggcguuagcccuagga

SEQ ID NO: 826743 - RNA, 19 nt, Human
uuucuuaggccuuuggccu

SEQ ID NO: 826744 - RNA, 22 nt, Human
ucuucagauaaagggagaguau

SEQ ID NO: 826745 - RNA, 22 nt, Human
cucaacagcucugccauacucc

SEQ ID NO: 826746 - RNA, 17 nt, Human
aggcagcucagaacauc

SEQ ID NO: 826747 - RNA, 22 nt, Human
cccaggagagaggccaguuggc

SEQ ID NO: 826748 - RNA, 22 nt, Human
guucuucagucacaucacagaa

SEQ ID NO: 826749 - RNA, 22 nt, Human
uuuaaauuuagaagaaacacug

SEQ ID NO: 826750 - RNA, 22 nt, Human
uucuucaacaaggacacuguua

SEQ ID NO: 826751 - RNA, 22 nt, Human
caaauguauaaauguacuuucu

SEQ ID NO: 826752 - RNA, 22 nt, Human
ggggcagcucccgagggcagga

SEQ ID NO: 826753 - RNA, 22 nt, Human
auggagacgcaagggaccuagg

SEQ ID NO: 826754 - RNA, 22 nt, Human
aggaggggcaaugauagucugg

SEQ ID NO: 826755 - RNA, 23 nt, Human
aguaaagcaauuguuggcgagag

SEQ ID NO: 826756 - RNA, 22 nt, Human
acucagaaccauuuacucugag

SEQ ID NO: 826757 - RNA, 22 nt, Human
aagcagcuggaagaguaagaug

SEQ ID NO: 826758 - RNA, 22 nt, Human
caggacagcucaacaccuccuc

SEQ ID NO: 826759 - RNA, 22 nt, Human
uaggcagcugcaaacuucgguc

SEQ ID NO: 826760 - RNA, 22 nt, Human
ucccaggacccaggcauucaca

SEQ ID NO: 826761 - RNA, 22 nt, Human
aacaugcugccuuucuacgagu

SEQ ID NO: 826762 - RNA, 22 nt, Human
gcugaaauucagauuccuaggc

SEQ ID NO: 826763 - RNA, 22 nt, Human
ccaggagagcaaaggucacucu

SEQ ID NO: 826764 - RNA, 22 nt, Human
accauguguuuuacacauggua

SEQ ID NO: 826765 - RNA, 22 nt, Human
uuuuguuguaauauaccuaucc

SEQ ID NO: 826766 - RNA, 22 nt, Human
gaggcagcucuucugaaugggg

SEQ ID NO: 826767 - RNA, 22 nt, Human
caggcagcaggagcccugcucg

SEQ ID NO: 826768 - RNA, 22 nt, Human
uuaucacuuaugagcuuuuugc

SEQ ID NO: 826769 - RNA, 22 nt, Human
ggaggggucucuagcgaggaga

SEQ ID NO: 826770 - RNA, 22 nt, Human
ucuucauuccguagauauuuau

SEQ ID NO: 826771 - RNA, 22 nt, Human
auuauuauauagggaaaguccc

SEQ ID NO: 826772 - RNA, 22 nt, Human
gauguagagggaagauuuuaaa

SEQ ID NO: 826773 - RNA, 22 nt, Human
cagcuggcgggcagagccgcca

SEQ ID NO: 826774 - RNA, 22 nt, Human
aaaggccacacagagcagggag

SEQ ID NO: 826775 - RNA, 22 nt, Human
ucauuucucccggccaaaaacu

SEQ ID NO: 826776 - RNA, 22 nt, Human
uugcucagcacuggagccagcu

SEQ ID NO: 826777 - RNA, 22 nt, Human
ucauggauggccgggaggugau

SEQ ID NO: 826778 - RNA, 22 nt, Human
cccgggaggaggaaguugcagu

SEQ ID NO: 826779 - RNA, 22 nt, Human
caucucaugggcaugccaagcu

SEQ ID NO: 826780 - RNA, 22 nt, Human
ugaguuuugucuugcuagaagu

SEQ ID NO: 826781 - RNA, 22 nt, Human
ccucugcucugguccaugugcu

SEQ ID NO: 826782 - RNA, 22 nt, Human
ucaaauaaugccauucaucauc

SEQ ID NO: 826783 - RNA, 22 nt, Human
guugaaagaucauguggcugcc

SEQ ID NO: 826784 - RNA, 22 nt, Human
aggcagcauuugaauccagguc

SEQ ID NO: 826785 - RNA, 23 nt, Human
aaugauuucaugaugauagcagc

SEQ ID NO: 826786 - RNA, 22 nt, Human
uauuucagcccuacuacuuggc

SEQ ID NO: 826787 - RNA, 22 nt, Human
uggcagcuauuacaaggaaguc

SEQ ID NO: 826788 - RNA, 22 nt, Human
cagacaggaauucuggcguggu

SEQ ID NO: 826789 - RNA, 22 nt, Human
gugauuuugagaccuauauagu

SEQ ID NO: 826790 - RNA, 22 nt, Human
cuccaggaaagccugaggcccg

SEQ ID NO: 826791 - RNA, 22 nt, Human
aggcaggcacacuuccuccagg

SEQ ID NO: 826792 - RNA, 22 nt, Human
uucauucugcaguucucagcuc

SEQ ID NO: 826793 - RNA, 22 nt, Human
gggcagcucuggcugugggaag

SEQ ID NO: 826794 - RNA, 22 nt, Human
uucaggaugcagagguuguagu

SEQ ID NO: 826795 - RNA, 22 nt, Human
uggcagcuggaucccaaggcag

SEQ ID NO: 826796 - RNA, 22 nt, Human
auuucagauucagaaauguagg

SEQ ID NO: 826797 - RNA, 20 nt, Human
aguuauaguaucuagccaug

SEQ ID NO: 826798 - RNA, 19 nt, Human
ugaggggaggagaggccug

SEQ ID NO: 826799 - RNA, 22 nt, Human
uggcagcuuuuuguuucaggcu

SEQ ID NO: 826800 - RNA, 22 nt, Human
ccaggaaauagugcugugaucu

SEQ ID NO: 826801 - RNA, 22 nt, Human
accaggaggccuugguucugag

SEQ ID NO: 826802 - RNA, 22 nt, Human
cuugcugucccuugguaugaac

SEQ ID NO: 826803 - RNA, 22 nt, Human
aaggcaguaggaucuuccacag

SEQ ID NO: 826804 - RNA, 21 nt, Human
uucaaaaugguguguuugucu

SEQ ID NO: 826805 - RNA, 22 nt, Human
uguguucuggaaagcucacuga

SEQ ID NO: 826806 - RNA, 20 nt, Human
ucuggcaggugaacgagcug

SEQ ID NO: 826807 - RNA, 22 nt, Human
uuugaaaggguuaugagacuga

SEQ ID NO: 826808 - RNA, 22 nt, Human
uugcagcuucuaccacuguuuc

SEQ ID NO: 826809 - RNA, 22 nt, Human
uuugcauaagucauguccagug

SEQ ID NO: 826810 - RNA, 22 nt, Human
uaggcagcgcuuggcugugcuu

SEQ ID NO: 826811 - RNA, 19 nt, Human
ucucacaguuuccuugccu

SEQ ID NO: 826812 - RNA, 22 nt, Human
ugcauaaagugccauaguauua

SEQ ID NO: 826813 - RNA, 22 nt, Human
uucagugucaauuuuuaaauau

SEQ ID NO: 826814 - RNA, 22 nt, Human
acuggcaguagagggagcgcau

SEQ ID NO: 826815 - RNA, 22 nt, Human
accaggagacaugaccaaugag

SEQ ID NO: 826816 - RNA, 22 nt, Human
uuccaugaagggcagccucuca

SEQ ID NO: 826817 - RNA, 22 nt, Human
auuucccaugugaaucaauugg

SEQ ID NO: 826818 - RNA, 17 nt, Human
agcugaccagauggacu

SEQ ID NO: 826819 - RNA, 22 nt, Human
auggagggugucagagagcgaa

SEQ ID NO: 826820 - RNA, 22 nt, Human
guguugaugacauuuuagaaac

SEQ ID NO: 826821 - RNA, 21 nt, Human
auacacauacacauaaaugug

SEQ ID NO: 826822 - RNA, 22 nt, Human
ucucucuugucaccccaucugc

SEQ ID NO: 826823 - RNA, 22 nt, Human
cugcugugccucuuuucacgug

SEQ ID NO: 826824 - RNA, 22 nt, Human
caagauggacauaaggagagaa

SEQ ID NO: 826825 - RNA, 22 nt, Human
caggcagcugggucaccguccc

SEQ ID NO: 826826 - RNA, 22 nt, Human
gacagaggcuggagcaccuccu

SEQ ID NO: 826827 - RNA, 22 nt, Human
aaagauaauguuuccuuauucu

SEQ ID NO: 826828 - RNA, 22 nt, Human
ugcugaaauuagaacauugagg

SEQ ID NO: 826829 - RNA, 22 nt, Human
caaggccagagccagcgauaag

SEQ ID NO: 826830 - RNA, 23 nt, Human
gcagaggagcaagcuggacacca

SEQ ID NO: 826831 - RNA, 22 nt, Human
ucugcaggcuuauaggaugggu

SEQ ID NO: 826832 - RNA, 22 nt, Human
gacagcuggcaguggaaaggug

SEQ ID NO: 826833 - RNA, 22 nt, Human
aucugcagaggacaggcgagga

SEQ ID NO: 826834 - RNA, 22 nt, Human
agacucaagcagauaggaauua

SEQ ID NO: 826835 - RNA, 22 nt, Human
ugaaggcccagccacagaaugg

SEQ ID NO: 826836 - RNA, 19 nt, Human
ucucugcuucucuuggcau

SEQ ID NO: 826837 - RNA, 22 nt, Human
gagagggagccagccaggaacc

SEQ ID NO: 826838 - RNA, 22 nt, Human
cugcuuuggacaacuauucuug

SEQ ID NO: 826839 - RNA, 16 nt, Human
aaggagggaagagaau

SEQ ID NO: 826840 - RNA, 22 nt, Human
aaggccagaguacuagaggcug

SEQ ID NO: 826841 - RNA, 22 nt, Human
agucucuuuguggacucugccu

SEQ ID NO: 826842 - RNA, 22 nt, Human
cagauggaacacagaaaggaga

SEQ ID NO: 826843 - RNA, 22 nt, Human
gagcagcucgagaaggaagcag

SEQ ID NO: 826844 - RNA, 22 nt, Human
aaauauaguaaaugcauaguuc

SEQ ID NO: 826845 - RNA, 22 nt, Human
cucagugugaaugcucaguaaa

SEQ ID NO: 826846 - RNA, 22 nt, Human
ugcuuuggccacuagaauucag

SEQ ID NO: 826847 - RNA, 22 nt, Human
gaggcagaaguugcagugagca

SEQ ID NO: 826848 - RNA, 22 nt, Human
auuccaguuggguucuaauaca

SEQ ID NO: 826849 - RNA, 22 nt, Human
agauggagaccuuggaugaacu

SEQ ID NO: 826850 - RNA, 22 nt, Human
cuugcuucauuagugucuuagu

SEQ ID NO: 826851 - RNA, 22 nt, Human
aaaauuauucauggcuuuugga

SEQ ID NO: 826852 - RNA, 22 nt, Human
gcugccagccaacuugcugugc

SEQ ID NO: 826853 - RNA, 22 nt, Human
gccaugcuugguaugcugugag

SEQ ID NO: 826854 - RNA, 22 nt, Human
guucuucaaagugacaacuaaa

SEQ ID NO: 826855 - RNA, 22 nt, Human
uccucagacuucccuuugugua

SEQ ID NO: 826856 - RNA, 22 nt, Human
gacccaggguauccagagcugc

SEQ ID NO: 826857 - RNA, 22 nt, Human
agggaagcccuggcugagaccc

SEQ ID NO: 826858 - RNA, 22 nt, Human
ucaguucuuuauuucacaguga

SEQ ID NO: 826859 - RNA, 22 nt, Human
cagcugacagugaggugggggc

SEQ ID NO: 826860 - RNA, 22 nt, Human
uguaggccuauguccagcaauu

SEQ ID NO: 826861 - RNA, 22 nt, Human
auucuucauaccuacugagguu

SEQ ID NO: 826862 - RNA, 21 nt, Human
gggugggaggacacagcaggc

SEQ ID NO: 826863 - RNA, 22 nt, Human
aggcuagcuuuggcucaguaaa

SEQ ID NO: 826864 - RNA, 22 nt, Human
uuucuucucgacaccuuauccc

SEQ ID NO: 826865 - RNA, 21 nt, Human
cccaggagaagaaaagaugca

SEQ ID NO: 826866 - RNA, 22 nt, Human
gauguuucaugcuagcaugugu

SEQ ID NO: 826867 - RNA, 22 nt, Human
cggcagcuccgcgccguaggac

SEQ ID NO: 826868 - RNA, 22 nt, Human
uuucagggagccuagaagagcu

SEQ ID NO: 826869 - RNA, 22 nt, Human
uugcaaaggggaauaaagcaau

SEQ ID NO: 826870 - RNA, 22 nt, Human
ucucacugcaaauauuauguau

SEQ ID NO: 826871 - RNA, 22 nt, Human
uacaguaagaugaaauagcaau

SEQ ID NO: 826872 - RNA, 23 nt, Human
cuucucagaagucugugccagga

SEQ ID NO: 826873 - RNA, 22 nt, Human
ggcucagacucccaggcccucu

SEQ ID NO: 826874 - RNA, 22 nt, Human
auucaaguucuucugucuuugc

SEQ ID NO: 826875 - RNA, 20 nt, Human
aggcagcuggccaggcaggu

SEQ ID NO: 826876 - RNA, 22 nt, Human
acauucuuaacaguuaaaaacu

SEQ ID NO: 826877 - RNA, 22 nt, Human
cugccaggcgauggauuggcug

SEQ ID NO: 826878 - RNA, 22 nt, Human
agacaggagagggaacugccgg

SEQ ID NO: 826879 - RNA, 22 nt, Human
uauuuguauguguguacauaua

SEQ ID NO: 826880 - RNA, 22 nt, Human
cuuugcaaacgauuaccacaug

SEQ ID NO: 826881 - RNA, 22 nt, Human
agggacuuguguccuauguaug

SEQ ID NO: 826882 - RNA, 22 nt, Human
uuugaaagcaccauuugaguag

SEQ ID NO: 826883 - RNA, 22 nt, Human
gccaggagugucccacucauuu

SEQ ID NO: 826884 - RNA, 22 nt, Human
ugaacaaacugcauucuucacu

SEQ ID NO: 826885 - RNA, 22 nt, Human
ggaggggauuuaguagaugcua

SEQ ID NO: 826886 - RNA, 22 nt, Human
agcccaggagguggagguugca

SEQ ID NO: 826887 - RNA, 22 nt, Human
uuugagauggagucuugcucug

SEQ ID NO: 826888 - RNA, 22 nt, Human
agcuagaauguuccuuuucauu

SEQ ID NO: 826889 - RNA, 22 nt, Human
uugcaggauuuuagagaugaca

SEQ ID NO: 826890 - RNA, 19 nt, Human
ugcugcuguccuugcaggg

SEQ ID NO: 826891 - RNA, 22 nt, Human
ugcuguguggaugugaagaauc

SEQ ID NO: 826892 - RNA, 22 nt, Human
gacccaggcucgugggacggcu

SEQ ID NO: 826893 - RNA, 22 nt, Human
uuucuucauucaccuucacccc

SEQ ID NO: 826894 - RNA, 22 nt, Human
uuugaaaggagcuuuauccaga

SEQ ID NO: 826895 - RNA, 22 nt, Human
gcuuccuaaaugcacagggcag

SEQ ID NO: 826896 - RNA, 22 nt, Human
uucauugucucuguuugccuuc

SEQ ID NO: 826897 - RNA, 22 nt, Human
uccaggagagguguggggacug

SEQ ID NO: 826898 - RNA, 22 nt, Human
uucaugcuuuuaccgcuguuaa

SEQ ID NO: 826899 - RNA, 22 nt, Human
auucauuuagguauucacuuac

SEQ ID NO: 826900 - RNA, 23 nt, Human
cugcugugaaacaugguuuuggu

SEQ ID NO: 826901 - RNA, 22 nt, Human
uagcacauuguugaccagaagg

SEQ ID NO: 826902 - RNA, 22 nt, Human
cuuugcaaacugucacacuuuc

SEQ ID NO: 826903 - RNA, 22 nt, Human
aagcagaggguauggccagguu

SEQ ID NO: 826904 - RNA, 22 nt, Human
augcugugccuggaaagcggcu

SEQ ID NO: 826905 - RNA, 22 nt, Human
cagaagaguagcugaacaaguu

SEQ ID NO: 826906 - RNA, 23 nt, Human
ucguugaauagcaauagcacaac

SEQ ID NO: 826907 - RNA, 22 nt, Human
agagcagcuggggcagagacca

SEQ ID NO: 826908 - RNA, 20 nt, Human
agagcagcaguuggugaggu

SEQ ID NO: 826909 - RNA, 22 nt, Human
ggggcagcuaccggaaguaggg

SEQ ID NO: 826910 - RNA, 22 nt, Human
gauuucuugaccccugucucag

SEQ ID NO: 826911 - RNA, 22 nt, Human
gccaggaggcuuaacuggacag

SEQ ID NO: 826912 - RNA, 22 nt, Human
ugaggcaggaggauugcaggau

SEQ ID NO: 826913 - RNA, 22 nt, Human
ccucagggaaugggaggcuggg

SEQ ID NO: 826914 - RNA, 22 nt, Human
uguucauuuggcccuuuuguau

SEQ ID NO: 826915 - RNA, 22 nt, Human
gaggccaggacaugaaagcuga

SEQ ID NO: 826916 - RNA, 22 nt, Human
aaagccaugggucuuuggcaua

SEQ ID NO: 826917 - RNA, 22 nt, Human
gcugcccaggguggagccggcu

SEQ ID NO: 826918 - RNA, 22 nt, Human
uguuuucagucauauagcaggu

SEQ ID NO: 826919 - RNA, 22 nt, Human
aucaggauguuuggcugucaua

SEQ ID NO: 826920 - RNA, 22 nt, Human
gaagcagcugccagagaugucu

SEQ ID NO: 826921 - RNA, 22 nt, Human
caggcagccaggggaccugucc

SEQ ID NO: 826922 - RNA, 22 nt, Human
gugcauuugugcaugcacaugu

SEQ ID NO: 826923 - RNA, 22 nt, Human
aggguagggccguagggccaug

SEQ ID NO: 826924 - RNA, 22 nt, Human
ggcaggcugggugucauggagu

SEQ ID NO: 826925 - RNA, 22 nt, Human
aagcuggagaguuaggugaaua

SEQ ID NO: 826926 - RNA, 22 nt, Human
ucugggaacagccuggcugugu

SEQ ID NO: 826927 - RNA, 19 nt, Human
caugcugaccugcuguggu

SEQ ID NO: 826928 - RNA, 22 nt, Human
gcugggaagugcaagaucaagg

SEQ ID NO: 826929 - RNA, 22 nt, Human
aaaggccaauaaagacaagcug

SEQ ID NO: 826930 - RNA, 22 nt, Human
cagcuucugcuaucgaacaucu

SEQ ID NO: 826931 - RNA, 22 nt, Human
uucaggauaugugauaucugaa

SEQ ID NO: 826932 - RNA, 22 nt, Human
uuuugugagcccauaaaugcca

SEQ ID NO: 826933 - RNA, 22 nt, Human
ucauuguuucugcuuuucauga

SEQ ID NO: 826934 - RNA, 22 nt, Human
aggcaagcugcagagaguccuu

SEQ ID NO: 826935 - RNA, 22 nt, Human
uucuucuugaaacuuuagguug

SEQ ID NO: 826936 - RNA, 22 nt, Human
uugagaagaauguguugaguuu

SEQ ID NO: 826937 - RNA, 22 nt, Human
ucuggcuuucauuuguuuaaag

SEQ ID NO: 826938 - RNA, 22 nt, Human
aggagcagaacugauucugacu

SEQ ID NO: 826939 - RNA, 22 nt, Human
uucaauucuaaacuaauauucu

SEQ ID NO: 826940 - RNA, 22 nt, Human
gaagcagcgaaguggaagggac

SEQ ID NO: 826941 - RNA, 22 nt, Human
uugcaucuaccauaucaaagau

SEQ ID NO: 826942 - RNA, 22 nt, Human
uggcagcuggcucugcgcaggc

SEQ ID NO: 826943 - RNA, 22 nt, Human
cagcuggcaaguggagcagggu

SEQ ID NO: 826944 - RNA, 22 nt, Human
uuuagaaguucacacauuuaaa

SEQ ID NO: 826945 - RNA, 22 nt, Human
gagacagcacaggccacuggga

SEQ ID NO: 826946 - RNA, 22 nt, Human
uucacagaauggcaaguuaugg

SEQ ID NO: 826947 - RNA, 22 nt, Human
uuucaaacauaucuucauuacu

SEQ ID NO: 826948 - RNA, 22 nt, Human
uugcaauagccuuauuuccaaa

SEQ ID NO: 826949 - RNA, 22 nt, Human
aauagcucacugauuucucuuu

SEQ ID NO: 826950 - RNA, 22 nt, Human
uuauccaagcagaagcugcaca

SEQ ID NO: 826951 - RNA, 22 nt, Human
cugacccauauaagaguggagg

SEQ ID NO: 826952 - RNA, 22 nt, Human
cccagcaggaggagguugcagu

SEQ ID NO: 826953 - RNA, 22 nt, Human
uugcagcuuagugauguuaucu

SEQ ID NO: 826954 - RNA, 22 nt, Human
ggcuuugccuggaauuuccuug

SEQ ID NO: 826955 - RNA, 22 nt, Human
ucaggagaaucagggcuguccu

SEQ ID NO: 826956 - RNA, 23 nt, Human
auucuucauuaucuucuagaaaa

SEQ ID NO: 826957 - RNA, 22 nt, Human
cuucucagaggccagaagcuau

SEQ ID NO: 826958 - RNA, 22 nt, Human
uaaugucagcauaguuuauuuu

SEQ ID NO: 826959 - RNA, 22 nt, Human
aaaauacuguggaguguugaaa

SEQ ID NO: 826960 - RNA, 21 nt, Human
auggagggaccagggaagcag

SEQ ID NO: 826961 - RNA, 23 nt, Human
cuccccaguguccucaugcaucu

SEQ ID NO: 826962 - RNA, 22 nt, Human
gcaccugauugauuucacugcu

SEQ ID NO: 826963 - RNA, 22 nt, Human
uuucuuaguccuagagugauuu

SEQ ID NO: 826964 - RNA, 22 nt, Human
aguguuugagacacauuucacu

SEQ ID NO: 826965 - RNA, 20 nt, Human
cugcuguguuauuguagaac

SEQ ID NO: 826966 - RNA, 22 nt, Human
cuuagaaaucgaacucagguua

SEQ ID NO: 826967 - RNA, 22 nt, Human
aggcagcucuguggccucccag

SEQ ID NO: 826968 - RNA, 19 nt, Human
ugcuagaaauucugugacu

SEQ ID NO: 826969 - RNA, 21 nt, Human
uggaggaauaaagcacagaag

SEQ ID NO: 826970 - RNA, 22 nt, Human
gauuuuaauuauaggagguccu

SEQ ID NO: 826971 - RNA, 23 nt, Human
uuugaaguugacugccuuccaga

SEQ ID NO: 826972 - RNA, 22 nt, Human
uuagccaugcccuagaagagga

SEQ ID NO: 826973 - RNA, 22 nt, Human
gaaggaggugucaguuggacug

SEQ ID NO: 826974 - RNA, 22 nt, Human
guucucucugcuuccaagaugg

SEQ ID NO: 826975 - RNA, 22 nt, Human
uucauuaguucugaagaugucu

SEQ ID NO: 826976 - RNA, 20 nt, Human
uucacagaggacucagguca

SEQ ID NO: 826977 - RNA, 22 nt, Human
agugcuuucuugcuccaucagu

SEQ ID NO: 826978 - RNA, 22 nt, Human
cucaggauagauuguccucuca

SEQ ID NO: 826979 - RNA, 22 nt, Human
gaucauuuacuuguucuggacu

SEQ ID NO: 826980 - RNA, 18 nt, Human
aggcaggcuggagugacu

SEQ ID NO: 826981 - RNA, 22 nt, Human
ucagucucaucaacucuauucc

SEQ ID NO: 826982 - RNA, 22 nt, Human
cagcagagggagccauugaaau

SEQ ID NO: 826983 - RNA, 22 nt, Human
uccccagggcugcagagggugu

SEQ ID NO: 826984 - RNA, 22 nt, Human
cagugauggauauggagaaguc

SEQ ID NO: 826985 - RNA, 22 nt, Human
guccaugauucuguguaguaga

SEQ ID NO: 826986 - RNA, 22 nt, Human
uggcagucuggguuggcaguua

SEQ ID NO: 826987 - RNA, 22 nt, Human
ucauuucuccgaccugcugucc

SEQ ID NO: 826988 - RNA, 22 nt, Human
cccuugcaucccauguguggcc

SEQ ID NO: 826989 - RNA, 22 nt, Human
cccaggaggccaagguugcagu

SEQ ID NO: 826990 - RNA, 23 nt, Human
auuucuaggggauuuucuggugc

SEQ ID NO: 826991 - RNA, 22 nt, Human
gcucaggaucccaggggugugc

SEQ ID NO: 826992 - RNA, 22 nt, Human
gcucacugccauucucuagaug

SEQ ID NO: 826993 - RNA, 22 nt, Human
aggaagcuuagugaaaggacca

SEQ ID NO: 826994 - RNA, 17 nt, Human
agcugaaauugcugaag

SEQ ID NO: 826995 - RNA, 22 nt, Human
aaggcagcagugcacgacugau

SEQ ID NO: 826996 - RNA, 22 nt, Human
gcaaauauucaagacuuuucca

SEQ ID NO: 826997 - RNA, 22 nt, Human
uucuuugaguuaguacagucca

SEQ ID NO: 826998 - RNA, 22 nt, Human
uaaugucaaggugauagauuug

SEQ ID NO: 826999 - RNA, 23 nt, Human
agggugagcaagcuauggagacc

SEQ ID NO: 827000 - RNA, 21 nt, Human
agacaguaacucuucuacucc

SEQ ID NO: 827001 - RNA, 22 nt, Human
gagcagcucugggugacccagu

SEQ ID NO: 827002 - RNA, 22 nt, Human
ggcagccuugacuagugacuua

SEQ ID NO: 827003 - RNA, 22 nt, Human
cucaggaucgcuugcccuaggg

SEQ ID NO: 827004 - RNA, 19 nt, Human
uaaggccaaaaguaagugu

SEQ ID NO: 827005 - RNA, 22 nt, Human
aaaaacuguaauuacuuuugca

SEQ ID NO: 827006 - RNA, 22 nt, Human
gggacuucauagcuaggcacuu

SEQ ID NO: 827007 - RNA, 22 nt, Human
aggacagggauucaaacuccca

SEQ ID NO: 827008 - RNA, 20 nt, Human
aggaggggauagaaucaaag

SEQ ID NO: 827009 - RNA, 16 nt, Human
aggaggggaauuagga

SEQ ID NO: 827010 - RNA, 22 nt, Human
uccaggagggauugggcugugg

SEQ ID NO: 827011 - RNA, 22 nt, Human
uagggauguccugagacuuggc

SEQ ID NO: 827012 - RNA, 22 nt, Human
augcugugguagacagcauucc

SEQ ID NO: 827013 - RNA, 22 nt, Human
agagggcugcugcacagugcuc

SEQ ID NO: 827014 - RNA, 23 nt, Human
uccaggagaaccccugucugucc

SEQ ID NO: 827015 - RNA, 22 nt, Human
aggcaagcgcagaagcggagga

SEQ ID NO: 827016 - RNA, 22 nt, Human
aguuauuacucuuuaacauauu

SEQ ID NO: 827017 - RNA, 22 nt, Human
cuuugcaauagaggcacacaug

SEQ ID NO: 827018 - RNA, 22 nt, Human
cuucugugauuugguuaggaua

SEQ ID NO: 827019 - RNA, 22 nt, Human
ccaggaguggcuggugaccuuc

SEQ ID NO: 827020 - RNA, 22 nt, Human
cauuuguuuagaagucuuuaua

SEQ ID NO: 827021 - RNA, 22 nt, Human
ucuuugcacugugcaagcagaa

SEQ ID NO: 827022 - RNA, 22 nt, Human
acaacauuauacauagaaagcu

SEQ ID NO: 827023 - RNA, 22 nt, Human
gucaggauuggggucaugaguc

SEQ ID NO: 827024 - RNA, 23 nt, Human
gaggcagcuccugcagugcccug

SEQ ID NO: 827025 - RNA, 22 nt, Human
aucaggaugaagcuguagcgaa

SEQ ID NO: 827026 - RNA, 22 nt, Human
uucaggauuauacucucuuccc

SEQ ID NO: 827027 - RNA, 22 nt, Human
aggcagaucacuugaggccagg

SEQ ID NO: 827028 - RNA, 22 nt, Human
cugcuucuccaaaguaggacuu

SEQ ID NO: 827029 - RNA, 22 nt, Human
cucucuguuaugcuuucaugaa

SEQ ID NO: 827030 - RNA, 22 nt, Human
ggagaggauguuuuaguaacuu

SEQ ID NO: 827031 - RNA, 17 nt, Human
gcugacccuggagaagu

SEQ ID NO: 827032 - RNA, 22 nt, Human
ugaggggagacagaguggacuc

SEQ ID NO: 827033 - RNA, 21 nt, Human
uguaaguuucaucugaauugg

SEQ ID NO: 827034 - RNA, 22 nt, Human
uaucuguuguccaugcagaaag

SEQ ID NO: 827035 - RNA, 22 nt, Human
aucacauucuuucaaagcaguc

SEQ ID NO: 827036 - RNA, 22 nt, Human
guuuuauaauugcuucauaaga

SEQ ID NO: 827037 - RNA, 20 nt, Human
ugaaggccauuuguuccaga

SEQ ID NO: 827038 - RNA, 22 nt, Human
cagagggcacaugguuuccuca

SEQ ID NO: 827039 - RNA, 22 nt, Human
guuuuucuaggaccaugugauu

SEQ ID NO: 827040 - RNA, 22 nt, Human
agaggcagccguauuucaaagg

SEQ ID NO: 827041 - RNA, 20 nt, Human
agcauuugaaauaugacuau

SEQ ID NO: 827042 - RNA, 22 nt, Human
aagcaauauacugauaugauua

SEQ ID NO: 827043 - RNA, 22 nt, Human
ugcugcugauggcaccuaggca

SEQ ID NO: 827044 - RNA, 22 nt, Human
aauacaguagguaauaguucau

SEQ ID NO: 827045 - RNA, 22 nt, Human
gaaaggccagcucacagaugag

SEQ ID NO: 827046 - RNA, 22 nt, Human
auucuucaaagagugucaaagu

SEQ ID NO: 827047 - RNA, 22 nt, Human
ccauccugcauugcuauucaga

SEQ ID NO: 827048 - RNA, 22 nt, Human
cuugaaagcacuccuuugacug

SEQ ID NO: 827049 - RNA, 22 nt, Human
aaauacuagaauucagaguuga

SEQ ID NO: 827050 - RNA, 19 nt, Human
cccaggaggcggagguugc

SEQ ID NO: 827051 - RNA, 22 nt, Human
acagucucuccacacugcaggg

SEQ ID NO: 827052 - RNA, 19 nt, Human
aucugccuuagugcugcug

SEQ ID NO: 827053 - RNA, 22 nt, Human
aacuuucuuggaugucucaaca

SEQ ID NO: 827054 - RNA, 22 nt, Human
uucaggaucauuuguuuuaucu

SEQ ID NO: 827055 - RNA, 22 nt, Human
aggcagcuggacauaacuaacc

SEQ ID NO: 827056 - RNA, 22 nt, Human
cucacugucuguacuagcugau

SEQ ID NO: 827057 - RNA, 22 nt, Human
ugaaaugagauaauuuaagugc

SEQ ID NO: 827058 - RNA, 22 nt, Human
gacagagaggcugagcaguaca

SEQ ID NO: 827059 - RNA, 22 nt, Human
agcccagggaaccaggaagugg

SEQ ID NO: 827060 - RNA, 22 nt, Human
caggagagauaugaguccccac

SEQ ID NO: 827061 - RNA, 22 nt, Human
cccuggagguggagguugcagg

SEQ ID NO: 827062 - RNA, 22 nt, Human
auagcuguuagauuggggucga

SEQ ID NO: 827063 - RNA, 22 nt, Human
uggcagcuagcuguuuucaugc

SEQ ID NO: 827064 - RNA, 22 nt, Human
ucaaucacguguuccauguucu

SEQ ID NO: 827065 - RNA, 22 nt, Human
uucuacaauaugaauaaugaag

SEQ ID NO: 827066 - RNA, 22 nt, Human
auacuguuuugugacuuaucuu

SEQ ID NO: 827067 - RNA, 20 nt, Human
ccacaggaguccagucgacc

SEQ ID NO: 827068 - RNA, 22 nt, Human
ccagaagaccccguccaccucc

SEQ ID NO: 827069 - RNA, 22 nt, Human
aggcagcuuucagugucucuca

SEQ ID NO: 827070 - RNA, 22 nt, Human
aaaugaugcucacagauuagug

SEQ ID NO: 827071 - RNA, 22 nt, Human
cucagaagccuucagucuuggc

SEQ ID NO: 827072 - RNA, 22 nt, Human
uugcaucuagggcaacccagag

SEQ ID NO: 827073 - RNA, 19 nt, Human
auacagauguauccaugau

SEQ ID NO: 827074 - RNA, 20 nt, Human
accaggagauggaggcaggg

SEQ ID NO: 827075 - RNA, 22 nt, Human
uucucagaugauucagauaaac

SEQ ID NO: 827076 - RNA, 22 nt, Human
aggagggaccuaggaauauugc

SEQ ID NO: 827077 - RNA, 22 nt, Human
uguugagacugagggagucagc

SEQ ID NO: 827078 - RNA, 22 nt, Human
cuggaaauuggagaugauguuu

SEQ ID NO: 827079 - RNA, 21 nt, Human
uuugaaagcccuauguuuuca

SEQ ID NO: 827080 - RNA, 22 nt, Human
caggcaggucagugaagaagga

SEQ ID NO: 827081 - RNA, 22 nt, Human
cagaguggcgacccccucagcu

SEQ ID NO: 827082 - RNA, 22 nt, Human
acccaggaggcagagguugcag

SEQ ID NO: 827083 - RNA, 22 nt, Human
cuugcugugugguguucucaga

SEQ ID NO: 827084 - RNA, 20 nt, Human
cagaggcauuuucagacucu

SEQ ID NO: 827085 - RNA, 22 nt, Human
uagugcuuuaaguuuacagaga

SEQ ID NO: 827086 - RNA, 22 nt, Human
gcccaggaagccaccgggaagu

SEQ ID NO: 827087 - RNA, 22 nt, Human
uuugaaagcaggugugggaggg

SEQ ID NO: 827088 - RNA, 22 nt, Human
uaguuaaaauaauggagauguu

SEQ ID NO: 827089 - RNA, 21 nt, Human
gaacauuuggguuguuucuac

SEQ ID NO: 827090 - RNA, 22 nt, Human
auggcagccugagcagaggaau

SEQ ID NO: 827091 - RNA, 22 nt, Human
acucaggaauggggcugggacu

SEQ ID NO: 827092 - RNA, 20 nt, Human
ucacuaguaaccaucugcuu

SEQ ID NO: 827093 - RNA, 22 nt, Human
uucuucagucccacuagccaca

SEQ ID NO: 827094 - RNA, 23 nt, Human
ugaguucucaucuuggcuucuau

SEQ ID NO: 827095 - RNA, 23 nt, Human
accaggagaaaagcuuugcggga

SEQ ID NO: 827096 - RNA, 22 nt, Human
gcccaggaguugaagggcugac

SEQ ID NO: 827097 - RNA, 22 nt, Human
gcagaggacagggauuuagauu

SEQ ID NO: 827098 - RNA, 22 nt, Human
uuucuucaauugcuaacaagga

SEQ ID NO: 827099 - RNA, 22 nt, Human
cagggagggacaauugucaccu

SEQ ID NO: 827100 - RNA, 20 nt, Human
gcccaggaucucugaggcau

SEQ ID NO: 827101 - RNA, 22 nt, Human
gauuucuugauaauucaaaucc

SEQ ID NO: 827102 - RNA, 22 nt, Human
gccugcagauauauaggauggu

SEQ ID NO: 827103 - RNA, 22 nt, Human
auauucuuccaaaacaucauuu

SEQ ID NO: 827104 - RNA, 22 nt, Human
agauggaguuaguaccagaguc

SEQ ID NO: 827105 - RNA, 18 nt, Human
uggcagcuagguaaagaa

SEQ ID NO: 827106 - RNA, 22 nt, Human
ugaaaggugacauuucuuggau

SEQ ID NO: 827107 - RNA, 22 nt, Human
ugaugaaauguugaggcaguga

SEQ ID NO: 827108 - RNA, 18 nt, Human
uugcuuuguaagcuugca

SEQ ID NO: 827109 - RNA, 22 nt, Human
caaauauuccagguacaucccu

SEQ ID NO: 827110 - RNA, 23 nt, Human
uugcacauuggagcuggucuucu

SEQ ID NO: 827111 - RNA, 22 nt, Human
gaggagagaagcuaacggugcu

SEQ ID NO: 827112 - RNA, 22 nt, Human
agcugcccugguaagauugaug

SEQ ID NO: 827113 - RNA, 22 nt, Human
uucuucuuaauguccugggaac

SEQ ID NO: 827114 - RNA, 22 nt, Human
aggagggacaccaauauauguu

SEQ ID NO: 827115 - RNA, 22 nt, Human
auuuaaaugcuuaagaggguuu

SEQ ID NO: 827116 - RNA, 22 nt, Human
cccaggagguggagguugcagc

SEQ ID NO: 827117 - RNA, 22 nt, Human
ucacugucugaaagaaauggcc

SEQ ID NO: 827118 - RNA, 22 nt, Human
uuucaguguaucuuccaaaagc

SEQ ID NO: 827119 - RNA, 22 nt, Human
guccucuguuagaaaugugcuu

SEQ ID NO: 827120 - RNA, 22 nt, Human
uauuuccaccuauuauuuucug

SEQ ID NO: 827121 - RNA, 20 nt, Human
cuucuucagccuaugcuuca

SEQ ID NO: 827122 - RNA, 22 nt, Human
ggcaggcagaggcugagacagg

SEQ ID NO: 827123 - RNA, 22 nt, Human
aucuucucaagcagcauccugu

SEQ ID NO: 827124 - RNA, 22 nt, Human
uuuccauguuggugaaaugagg

SEQ ID NO: 827125 - RNA, 22 nt, Human
gcccaggaagugacucagaugu

SEQ ID NO: 827126 - RNA, 22 nt, Human
ggccagagaauaugccuuacgu

SEQ ID NO: 827127 - RNA, 22 nt, Human
gcauuuccugugcuuggcauau

SEQ ID NO: 827128 - RNA, 22 nt, Human
aguuggagugaacaugagauug

SEQ ID NO: 827129 - RNA, 22 nt, Human
gguggaaggccuggaaggaggc

SEQ ID NO: 827130 - RNA, 22 nt, Human
ugaggcaggaaguuauauaaug

SEQ ID NO: 827131 - RNA, 22 nt, Human
cagcugccuucugcgggaaguc

SEQ ID NO: 827132 - RNA, 22 nt, Human
agaaaugacacacaugagacau

SEQ ID NO: 827133 - RNA, 21 nt, Human
aucacauuggcuguuauuauu

SEQ ID NO: 827134 - RNA, 22 nt, Human
ugaggcaguauucuccauucca

SEQ ID NO: 827135 - RNA, 21 nt, Human
ugaaaugagaaugcugagcac

SEQ ID NO: 827136 - RNA, 22 nt, Human
aagcuggaacaucuugaggaag

SEQ ID NO: 827137 - RNA, 22 nt, Human
agaggggaaguaaugaaugaua

SEQ ID NO: 827138 - RNA, 22 nt, Human
auuuuacuuugugaauauugac

SEQ ID NO: 827139 - RNA, 22 nt, Human
augcuguguuugagaaccuagg

SEQ ID NO: 827140 - RNA, 19 nt, Human
ucugccucuggucaggcuc

SEQ ID NO: 827141 - RNA, 22 nt, Human
aauacauauggaauuccauguu

SEQ ID NO: 827142 - RNA, 22 nt, Human
acucagaagauauaaugacuca

SEQ ID NO: 827143 - RNA, 22 nt, Human
caguaaagcauguaugucuuca

SEQ ID NO: 827144 - RNA, 22 nt, Human
caggguggggaaauagcgcccu

SEQ ID NO: 827145 - RNA, 22 nt, Human
aaggcagcuucaccacagcauu

SEQ ID NO: 827146 - RNA, 22 nt, Human
gcgcaggagccgcggagggccg

SEQ ID NO: 827147 - RNA, 22 nt, Human
uggagacucugcaucugugaca

SEQ ID NO: 827148 - RNA, 22 nt, Human
gccaggagaaugcuagcagagg

SEQ ID NO: 827149 - RNA, 22 nt, Human
gggcagcucggaagugggaaag

SEQ ID NO: 827150 - RNA, 22 nt, Human
ugaggcagcccacuuuccuuag

SEQ ID NO: 827151 - RNA, 19 nt, Human
augucuggguaacagcugc

SEQ ID NO: 827152 - RNA, 22 nt, Human
guugaaagagcauggacuugaa

SEQ ID NO: 827153 - RNA, 22 nt, Human
gagagcuggguucaaguagcug

SEQ ID NO: 827154 - RNA, 22 nt, Human
uugaaauacugcauuguucagu

SEQ ID NO: 827155 - RNA, 22 nt, Human
caggcagcccugcaccaagugu

SEQ ID NO: 827156 - RNA, 22 nt, Human
uccaggagucuagccucaggcc

SEQ ID NO: 827157 - RNA, 21 nt, Human
agcagaggcugccuggugacu

SEQ ID NO: 827158 - RNA, 22 nt, Human
augaaggcuguguggagccccc

SEQ ID NO: 827159 - RNA, 22 nt, Human
uaggaggguuagagggaaauau

SEQ ID NO: 827160 - RNA, 22 nt, Human
auugaaagaguuuucugcugca

SEQ ID NO: 827161 - RNA, 22 nt, Human
aagggcaggagaagacggauau

SEQ ID NO: 827162 - RNA, 22 nt, Human
uccaggaggcaccuuuggacca

SEQ ID NO: 827163 - RNA, 22 nt, Human
auuuccagugcacugaauagaa

SEQ ID NO: 827164 - RNA, 22 nt, Human
ucaggagaaggcaauguggaaa

SEQ ID NO: 827165 - RNA, 22 nt, Human
ucacaugaguauuauuuuccaa

SEQ ID NO: 827166 - RNA, 22 nt, Human
ucauacaucuguccuggagcuc

SEQ ID NO: 827167 - RNA, 22 nt, Human
ccuugcguuuuacagcuucuag

SEQ ID NO: 827168 - RNA, 21 nt, Human
aggcagcucaggcccagagag

SEQ ID NO: 827169 - RNA, 21 nt, Human
aaucauacaaaacaugucagg

SEQ ID NO: 827170 - RNA, 22 nt, Human
uucuucuccgaggagggcuggu

SEQ ID NO: 827171 - RNA, 22 nt, Human
uuugaauguuuuagguacuuaa

SEQ ID NO: 827172 - RNA, 22 nt, Human
gcagcugcagagaccggguggg

SEQ ID NO: 827173 - RNA, 22 nt, Human
gucaggaugagggaugaggagu

SEQ ID NO: 827174 - RNA, 22 nt, Human
cccaggaaguggagguugcagu

SEQ ID NO: 827175 - RNA, 20 nt, Human
uauuuacaacuuagagccuc

SEQ ID NO: 827176 - RNA, 22 nt, Human
uuccaugagcucugaguucaca

SEQ ID NO: 827177 - RNA, 22 nt, Human
caacugugaauuuuaugauacc

SEQ ID NO: 827178 - RNA, 22 nt, Human
cagucucucagcuuucagcugu

SEQ ID NO: 827179 - RNA, 22 nt, Human
ucuacugugguccuuguaacca

SEQ ID NO: 827180 - RNA, 22 nt, Human
auucuucauacagacaaguccu

SEQ ID NO: 827181 - RNA, 22 nt, Human
uuuuagauaguuuaacugcacu

SEQ ID NO: 827182 - RNA, 19 nt, Human
caggaugaucccaugacac

SEQ ID NO: 827183 - RNA, 17 nt, Human
gucauucucagaaaaug

SEQ ID NO: 827184 - RNA, 22 nt, Human
augacaguucuacacuuaaucu

SEQ ID NO: 827185 - RNA, 22 nt, Human
cccaggagaauauuuuuggguc

SEQ ID NO: 827186 - RNA, 22 nt, Human
aaagccagagcaagcugucaca

SEQ ID NO: 827187 - RNA, 22 nt, Human
acagugacguuuauuugagacg

SEQ ID NO: 827188 - RNA, 22 nt, Human
cggagggguuugaacagaggag

SEQ ID NO: 827189 - RNA, 22 nt, Human
uccuuagagacaagaccaguuu

SEQ ID NO: 827190 - RNA, 22 nt, Human
cuggccagaguuggagggugug

SEQ ID NO: 827191 - RNA, 22 nt, Human
uaugaaacauucauacaaauaa

SEQ ID NO: 827192 - RNA, 22 nt, Human
cacauuuaauccuuuauaagua

SEQ ID NO: 827193 - RNA, 22 nt, Human
agugcuuuauguuguugugcaa

SEQ ID NO: 827194 - RNA, 22 nt, Human
gcccaggagaggccagggcuga

SEQ ID NO: 827195 - RNA, 22 nt, Human
uccaggaggccucauuuccugu

SEQ ID NO: 827196 - RNA, 22 nt, Human
caggcagcucugcuuuuccuaa

SEQ ID NO: 827197 - RNA, 22 nt, Human
ggagaggggcaaguuuaucuag

SEQ ID NO: 827198 - RNA, 20 nt, Human
cagagccaagagcagcaucu

SEQ ID NO: 827199 - RNA, 22 nt, Human
auaaauaucacuguugucccuc

SEQ ID NO: 827200 - RNA, 16 nt, Human
ccccaggacuuggcac

SEQ ID NO: 827201 - RNA, 20 nt, Human
gcccaggaauuugcauuucu

SEQ ID NO: 827202 - RNA, 22 nt, Human
cuuaacagagagaaguguugcu

SEQ ID NO: 827203 - RNA, 22 nt, Human
ucccaggaauugaagccagugu

SEQ ID NO: 827204 - RNA, 22 nt, Human
uuuauucaucaucuguucauau

SEQ ID NO: 827205 - RNA, 22 nt, Human
accaggagccacaggaggagcc

SEQ ID NO: 827206 - RNA, 22 nt, Human
uccaggagcauccaggugaagc

SEQ ID NO: 827207 - RNA, 22 nt, Human
uucucagauauuuacugagcau

SEQ ID NO: 827208 - RNA, 22 nt, Human
uccaggagguagugcuuaauuu

SEQ ID NO: 827209 - RNA, 22 nt, Human
aucaggauccaccuugagccug

SEQ ID NO: 827210 - RNA, 22 nt, Human
ugcaugcugcacacaugcguag

SEQ ID NO: 827211 - RNA, 22 nt, Human
gaggcagcagggcugguuccuu

SEQ ID NO: 827212 - RNA, 22 nt, Human
cucaggauuaaggaaucuaaau

SEQ ID NO: 827213 - RNA, 19 nt, Human
agauggcaaaaugcaaaga

SEQ ID NO: 827214 - RNA, 22 nt, Human
cauuguuauagcauuacacacc

SEQ ID NO: 827215 - RNA, 22 nt, Human
aggcagcugcccucuccuuccu

SEQ ID NO: 827216 - RNA, 22 nt, Human
ugucccucugaggcuucccugg

SEQ ID NO: 827217 - RNA, 22 nt, Human
aguuuucacacucaccaaaagg

SEQ ID NO: 827218 - RNA, 22 nt, Human
uaagauaaguggguugagaugg

SEQ ID NO: 827219 - RNA, 22 nt, Human
ugcccagggauaagccuagaga

SEQ ID NO: 827220 - RNA, 22 nt, Human
aggcaguuucugggacagcaua

SEQ ID NO: 827221 - RNA, 22 nt, Human
ugaaacauuugaugaucuuugg

SEQ ID NO: 827222 - RNA, 22 nt, Human
uccaugagggacacuggaugcu

SEQ ID NO: 827223 - RNA, 22 nt, Human
caggagaucuuaggaauucuua

SEQ ID NO: 827224 - RNA, 22 nt, Human
augcagcugugggcaagaaaug

SEQ ID NO: 827225 - RNA, 22 nt, Human
ugucugugaccucuuuggagcc

SEQ ID NO: 827226 - RNA, 22 nt, Human
ucuuuccaaggacucuguagca

SEQ ID NO: 827227 - RNA, 22 nt, Human
ucccaggauguuuauggcuggu

SEQ ID NO: 827228 - RNA, 22 nt, Human
uuuuaguguagucaccgugggu

SEQ ID NO: 827229 - RNA, 18 nt, Human
ugugaacacauuuuucug

SEQ ID NO: 827230 - RNA, 22 nt, Human
cucaggaugaaagucaugguga

SEQ ID NO: 827231 - RNA, 22 nt, Human
uaucuguuaggaucagagcugg

SEQ ID NO: 827232 - RNA, 22 nt, Human
auugcuguggaaauauaagaug

SEQ ID NO: 827233 - RNA, 22 nt, Human
cugcuucugggaugauggagua

SEQ ID NO: 827234 - RNA, 22 nt, Human
aauaauuagugggacagagaac

SEQ ID NO: 827235 - RNA, 22 nt, Human
ccuuaaauucuccauuugaaag

SEQ ID NO: 827236 - RNA, 22 nt, Human
uuucaaaauuuugcagugguaa

SEQ ID NO: 827237 - RNA, 22 nt, Human
aagagagggguugcauggaaau

SEQ ID NO: 827238 - RNA, 22 nt, Human
uuggaugaagucuagcuuuagu

SEQ ID NO: 827239 - RNA, 22 nt, Human
cccaggagaauauaauguucuu

SEQ ID NO: 827240 - RNA, 19 nt, Human
caggaaggggcgaaucugg

SEQ ID NO: 827241 - RNA, 22 nt, Human
agggcagcagcggcccaggccu

SEQ ID NO: 827242 - RNA, 22 nt, Human
aaguccaugaucaagauguggc

SEQ ID NO: 827243 - RNA, 22 nt, Human
uaaaauagcaugugcagugaaa

SEQ ID NO: 827244 - RNA, 22 nt, Human
ucuuagcacagcuauauaaguu

SEQ ID NO: 827245 - RNA, 22 nt, Human
aggucagcaugaguagaaggua

SEQ ID NO: 827246 - RNA, 22 nt, Human
uuucaaaccuacuuguauguuu

SEQ ID NO: 827247 - RNA, 22 nt, Human
uuucaucuaacacuacauaggg

SEQ ID NO: 827248 - RNA, 22 nt, Human
uaaggccagccagcaaaucugu

SEQ ID NO: 827249 - RNA, 22 nt, Human
aggcagcuagagagugaaacug

SEQ ID NO: 827250 - RNA, 22 nt, Human
ccaggagagcucuaaauggcug

SEQ ID NO: 827251 - RNA, 23 nt, Human
accaggaguugucucaggaaaca

SEQ ID NO: 827252 - RNA, 22 nt, Human
uuuuuauaugaaggauagugcg

SEQ ID NO: 827253 - RNA, 22 nt, Human
cagaggcaaaagagguggaggu

SEQ ID NO: 827254 - RNA, 18 nt, Human
agucuucugauccauuuu

SEQ ID NO: 827255 - RNA, 22 nt, Human
ucaggaugaccacgagccucua

SEQ ID NO: 827256 - RNA, 22 nt, Human
gccacaggcacuuaagggcugg

SEQ ID NO: 827257 - RNA, 22 nt, Human
agaaaugaaaccaaagccuaga

SEQ ID NO: 827258 - RNA, 22 nt, Human
uaucuuguaauagguccacuug

SEQ ID NO: 827259 - RNA, 22 nt, Human
cccaggaggaggaaaaagcucg

SEQ ID NO: 827260 - RNA, 22 nt, Human
uucacagauguauuggaacucc

SEQ ID NO: 827261 - RNA, 21 nt, Human
uugaaaguaaauucagcagcu

SEQ ID NO: 827262 - RNA, 22 nt, Human
acagucuugcuguauggucagg

SEQ ID NO: 827263 - RNA, 20 nt, Human
agaggaggauuauuuuauuc

SEQ ID NO: 827264 - RNA, 22 nt, Human
ugaggcagucacccccuccugc

SEQ ID NO: 827265 - RNA, 22 nt, Human
ucuuagaaauuccccaguggcu

SEQ ID NO: 827266 - RNA, 22 nt, Human
ugaggcaggacuugcauaaagu

SEQ ID NO: 827267 - RNA, 22 nt, Human
cagcuuucaucagugacacuca

SEQ ID NO: 827268 - RNA, 22 nt, Human
gaggcagugcauugucuagggg

SEQ ID NO: 827269 - RNA, 22 nt, Human
agaccuggauuccaauccuacc

SEQ ID NO: 827270 - RNA, 22 nt, Human
ccuccuuuccuguuuuccugag

SEQ ID NO: 827271 - RNA, 22 nt, Human
cccaggaguuagagguuguggu

SEQ ID NO: 827272 - RNA, 19 nt, Human
gugcuuuuuaagagcucag

SEQ ID NO: 827273 - RNA, 22 nt, Human
ucuuagcauuucauaacaacug

SEQ ID NO: 827274 - RNA, 17 nt, Human
ccaggagagaugcuugu

SEQ ID NO: 827275 - RNA, 22 nt, Human
gaaggccauugcguccugggau

SEQ ID NO: 827276 - RNA, 22 nt, Human
uuucauugcagagucugugugc

SEQ ID NO: 827277 - RNA, 22 nt, Human
gugcauuugacgaauacucacu

SEQ ID NO: 827278 - RNA, 22 nt, Human
auuaaaauuccaagguaugcca

SEQ ID NO: 827279 - RNA, 21 nt, Human
ugaaugaggaggauggcauuu

SEQ ID NO: 827280 - RNA, 23 nt, Human
cccaggaguuucacugcaaaggu

SEQ ID NO: 827281 - RNA, 22 nt, Human
auguucuuucagccagugcauc

SEQ ID NO: 827282 - RNA, 22 nt, Human
gagggcauaguuaaauaggagg

SEQ ID NO: 827283 - RNA, 22 nt, Human
cuugaaagucagcagaguggau

SEQ ID NO: 827284 - RNA, 22 nt, Human
cugcuuugcauagcugccagag

SEQ ID NO: 827285 - RNA, 22 nt, Human
ggagggacccacucuagaggug

SEQ ID NO: 827286 - RNA, 22 nt, Human
gaaauauuacaguggaggggau

SEQ ID NO: 827287 - RNA, 22 nt, Human
ugaugaaacugagguuccaaga

SEQ ID NO: 827288 - RNA, 22 nt, Human
cagagcucuauguucauggagg

SEQ ID NO: 827289 - RNA, 22 nt, Human
ggcagcuuguccuggaggaugg

SEQ ID NO: 827290 - RNA, 22 nt, Human
ggcagcuaggggcagggaauuc

SEQ ID NO: 827291 - RNA, 22 nt, Human
uggaagggagugacagucagag

SEQ ID NO: 827292 - RNA, 22 nt, Human
ugaaagggguugaguuacagcu

SEQ ID NO: 827293 - RNA, 21 nt, Human
cccaggaggcugagaagagca

SEQ ID NO: 827294 - RNA, 22 nt, Human
uccagccuaggggaacagcugc

SEQ ID NO: 827295 - RNA, 22 nt, Human
agcuagccuaggcagagugcau

SEQ ID NO: 827296 - RNA, 22 nt, Human
agggugguucuuuuaguggaag

SEQ ID NO: 827297 - RNA, 22 nt, Human
cuagggaguggcagagcuggga

SEQ ID NO: 827298 - RNA, 22 nt, Human
ugucucugaggugagggucagc

SEQ ID NO: 827299 - RNA, 22 nt, Human
uugcauuugacaaauuauuuaa

SEQ ID NO: 827300 - RNA, 22 nt, Human
auugcuguacacuucuagaucu

SEQ ID NO: 827301 - RNA, 22 nt, Human
auugaaagcauggauuuggauu

SEQ ID NO: 827302 - RNA, 22 nt, Human
ggcaggcaaugaggaugggaag

SEQ ID NO: 827303 - RNA, 22 nt, Human
agcccaggcagagggaugcuug

SEQ ID NO: 827304 - RNA, 19 nt, Human
uggagggguuugaaugugg

SEQ ID NO: 827305 - RNA, 22 nt, Human
uucauugugauucuuggcuagc

SEQ ID NO: 827306 - RNA, 22 nt, Human
auuacaguaacagcuacaaugc

SEQ ID NO: 827307 - RNA, 22 nt, Human
ccccaggaagccucagauuugc

SEQ ID NO: 827308 - RNA, 22 nt, Human
cugcuguguuccuccugcaucu

SEQ ID NO: 827309 - RNA, 22 nt, Human
gcccaggagccuggagaugugu

SEQ ID NO: 827310 - RNA, 22 nt, Human
gaggcagagaccuucaggaccu

SEQ ID NO: 827311 - RNA, 23 nt, Human
uucuuucaagaaguucacagugc

SEQ ID NO: 827312 - RNA, 22 nt, Human
cauugcuuccuaugucccuucu

SEQ ID NO: 827313 - RNA, 22 nt, Human
ggcagcugcaaaucugcucugu

SEQ ID NO: 827314 - RNA, 21 nt, Human
gacaggacuagaccagagcuc

SEQ ID NO: 827315 - RNA, 22 nt, Human
ugaggcagcauucuucaagaca

SEQ ID NO: 827316 - RNA, 22 nt, Human
aauuuuaaucaguggugcugag

SEQ ID NO: 827317 - RNA, 22 nt, Human
cagcuucugucugauuagcaag

SEQ ID NO: 827318 - RNA, 22 nt, Human
gcggagggcgagcccgcggagc

SEQ ID NO: 827319 - RNA, 22 nt, Human
ccugcucagagcgucuugugug

SEQ ID NO: 827320 - RNA, 22 nt, Human
augugaggaagaaagagguaag

SEQ ID NO: 827321 - RNA, 22 nt, Human
uuauuauagauuaugcaagauu

SEQ ID NO: 827322 - RNA, 22 nt, Human
agacagguaaauagagaugcug

SEQ ID NO: 827323 - RNA, 22 nt, Human
aaaggaagaugccaggacucug

SEQ ID NO: 827324 - RNA, 22 nt, Human
aggcagauuuaggagaaaagaa

SEQ ID NO: 827325 - RNA, 22 nt, Human
uuucccagagguaugaauaagu

SEQ ID NO: 827326 - RNA, 22 nt, Human
acaaaugugucuaauugugccu

SEQ ID NO: 827327 - RNA, 22 nt, Human
uucauugugaacacauucugcc

SEQ ID NO: 827328 - RNA, 20 nt, Human
ugcguguguauuuauuuucu

SEQ ID NO: 827329 - RNA, 22 nt, Human
uugaaaguccuucuugaguuac

SEQ ID NO: 827330 - RNA, 22 nt, Human
cagaggaguucaguacacagcc

SEQ ID NO: 827331 - RNA, 22 nt, Human
ccaggagagcagaagcccaggc

SEQ ID NO: 827332 - RNA, 22 nt, Human
acagaauugaaaguauaaucug

SEQ ID NO: 827333 - RNA, 22 nt, Human
gagggaggggagcuccacccuc

SEQ ID NO: 827334 - RNA, 22 nt, Human
ucagucucuggggcuucuguuu

SEQ ID NO: 827335 - RNA, 22 nt, Human
agucacuguucugucaugucaa

SEQ ID NO: 827336 - RNA, 22 nt, Human
gucacuguauccagguuccagc

SEQ ID NO: 827337 - RNA, 22 nt, Human
cagaauggcuuuuauggcucag

SEQ ID NO: 827338 - RNA, 22 nt, Human
uacacacagaggccaugggauu

SEQ ID NO: 827339 - RNA, 22 nt, Human
cuucugcaauaaguuuuggucc

SEQ ID NO: 827340 - RNA, 22 nt, Human
ucuuugcaaauguuauuaucuu

SEQ ID NO: 827341 - RNA, 22 nt, Human
uugagaagaggcuuuguaggaa

SEQ ID NO: 827342 - RNA, 22 nt, Human
ugcauauuguccuugauauuau

SEQ ID NO: 827343 - RNA, 22 nt, Human
aauuuguuaaaagugagugaca

SEQ ID NO: 827344 - RNA, 22 nt, Human
ucugggaacacacgucacuuca

SEQ ID NO: 827345 - RNA, 22 nt, Human
uuugaaagaaaccagugaguga

SEQ ID NO: 827346 - RNA, 22 nt, Human
ucucaggaagugauauugagac

SEQ ID NO: 827347 - RNA, 22 nt, Human
cugcaucacagcaggaggcaca

SEQ ID NO: 827348 - RNA, 22 nt, Human
ccccaggacguggcccucauag

SEQ ID NO: 827349 - RNA, 22 nt, Human
ugugauauuugaguauugucaa

SEQ ID NO: 827350 - RNA, 22 nt, Human
uucuuaacucaaauauauaucc

SEQ ID NO: 827351 - RNA, 22 nt, Human
uuucauuuugguuaugccauaa

SEQ ID NO: 827352 - RNA, 22 nt, Human
gagguagcaugcuggaagggac

SEQ ID NO: 827353 - RNA, 22 nt, Human
agugcagccgagaucaggugcu

SEQ ID NO: 827354 - RNA, 22 nt, Human
gucuuuaugguaugaaaacuga

SEQ ID NO: 827355 - RNA, 22 nt, Human
uugaaggacauccuauuucuag

SEQ ID NO: 827356 - RNA, 22 nt, Human
aggcagcuggcaaauucuagag

SEQ ID NO: 827357 - RNA, 22 nt, Human
gccaucacauccaggcuaccuc

SEQ ID NO: 827358 - RNA, 22 nt, Human
gagacagugguugcagaagcuc

SEQ ID NO: 827359 - RNA, 22 nt, Human
uucagaauauuuguuuuacaug

SEQ ID NO: 827360 - RNA, 22 nt, Human
uuucuaggcacagugucuuccc

SEQ ID NO: 827361 - RNA, 22 nt, Human
ucuucaaguuccaaagugcagg

SEQ ID NO: 827362 - RNA, 15 nt, Human
uggcagcuuguuaag

SEQ ID NO: 827363 - RNA, 22 nt, Human
cccaggaagagugaguggcauu

SEQ ID NO: 827364 - RNA, 22 nt, Human
uucucagguagugcugaugcug

SEQ ID NO: 827365 - RNA, 20 nt, Human
aggaagcugagauguagagg

SEQ ID NO: 827366 - RNA, 22 nt, Human
gagcagcuccagccgcaugacu

SEQ ID NO: 827367 - RNA, 22 nt, Human
cuuuccaagaaugcagauaccu

SEQ ID NO: 827368 - RNA, 22 nt, Human
ugaggcagugcugggaagccug

SEQ ID NO: 827369 - RNA, 22 nt, Human
aagauuauuuaagacaggaacc

SEQ ID NO: 827370 - RNA, 23 nt, Human
ucuccuccuagauacagucaugg

SEQ ID NO: 827371 - RNA, 22 nt, Human
gcucaggacuggaggagcgggg

SEQ ID NO: 827372 - RNA, 21 nt, Human
uacugagaccucacagugugc

SEQ ID NO: 827373 - RNA, 19 nt, Human
aggcagcaggccagggaug

SEQ ID NO: 827374 - RNA, 22 nt, Human
agucucagaaaagaagcaugga

SEQ ID NO: 827375 - RNA, 22 nt, Human
agggaagcuuguuacugagaag

SEQ ID NO: 827376 - RNA, 22 nt, Human
ggaggggaugguuugacccugg

SEQ ID NO: 827377 - RNA, 22 nt, Human
auguuuccgugagcauccuuga

SEQ ID NO: 827378 - RNA, 22 nt, Human
uuaacaauagaguuucuucagg

SEQ ID NO: 827379 - RNA, 19 nt, Human
cccaggagcaguauugaug

SEQ ID NO: 827380 - RNA, 20 nt, Human
gcucccagccugcagucccc

SEQ ID NO: 827381 - RNA, 22 nt, Human
ccaggagacuguacugauauuu

SEQ ID NO: 827382 - RNA, 22 nt, Human
gcaaagcauucuguggagucua

SEQ ID NO: 827383 - RNA, 22 nt, Human
guugaaaguggagaaccugguu

SEQ ID NO: 827384 - RNA, 22 nt, Human
aaauugcauuuuaaagguagau

SEQ ID NO: 827385 - RNA, 22 nt, Human
ucagagagccucaggcacugcc

SEQ ID NO: 827386 - RNA, 22 nt, Human
aggcagccaucugcaggaagga

SEQ ID NO: 827387 - RNA, 22 nt, Human
ugguaaauauguccauucucuu

SEQ ID NO: 827388 - RNA, 22 nt, Human
uccauuuuagagaugaagaaac

SEQ ID NO: 827389 - RNA, 22 nt, Human
agucaauucuuuucaacucaag

SEQ ID NO: 827390 - RNA, 22 nt, Human
aggccagcagcaugacggcauc

SEQ ID NO: 827391 - RNA, 22 nt, Human
uccaggagagguagaggguucc

SEQ ID NO: 827392 - RNA, 23 nt, Human
gggcaguuauguuguccuuggcu

SEQ ID NO: 827393 - RNA, 22 nt, Human
aaggcagccuuuguuugauuga

SEQ ID NO: 827394 - RNA, 22 nt, Human
guugaaugaaucauucuaugua

SEQ ID NO: 827395 - RNA, 22 nt, Human
cagguaaaaauaaauuugugag

SEQ ID NO: 827396 - RNA, 22 nt, Human
ugacccauggucugaucauagg

SEQ ID NO: 827397 - RNA, 22 nt, Human
agucauaugacccuucacaaac

SEQ ID NO: 827398 - RNA, 22 nt, Human
ucucucagaggaagaggcagug

SEQ ID NO: 827399 - RNA, 22 nt, Human
uauguuauuuucauacaacaga

SEQ ID NO: 827400 - RNA, 22 nt, Human
aaggagagagcuuugcuggaac

SEQ ID NO: 827401 - RNA, 22 nt, Human
cagacaggcaggugcugcuuug

SEQ ID NO: 827402 - RNA, 22 nt, Human
aaauuuucagagcacuagagaa

SEQ ID NO: 827403 - RNA, 22 nt, Human
uuucucugcugccugugucgau

SEQ ID NO: 827404 - RNA, 20 nt, Human
ucagaugggagugagccauc

SEQ ID NO: 827405 - RNA, 23 nt, Human
agcacacuuguacaaugcccuag

SEQ ID NO: 827406 - RNA, 22 nt, Human
cccuuagcuccaagggguuugg

SEQ ID NO: 827407 - RNA, 22 nt, Human
uccaggaggacugagggggcug

SEQ ID NO: 827408 - RNA, 22 nt, Human
uagugcuugagucucuccguac

SEQ ID NO: 827409 - RNA, 22 nt, Human
cugcuguguuggcauuggauag

SEQ ID NO: 827410 - RNA, 22 nt, Human
caggagaaauguggcugcuacc

SEQ ID NO: 827411 - RNA, 22 nt, Human
caaauguaaauucuuuugaagc

SEQ ID NO: 827412 - RNA, 22 nt, Human
agaggggaggcgaaccagaguc

SEQ ID NO: 827413 - RNA, 22 nt, Human
uuugaaagcuacuuucggguca

SEQ ID NO: 827414 - RNA, 22 nt, Human
aggaugaauaacugaaauggug

SEQ ID NO: 827415 - RNA, 21 nt, Human
uucuccccagcgaauccucgg

SEQ ID NO: 827416 - RNA, 22 nt, Human
agagggauggccccguaacuca

SEQ ID NO: 827417 - RNA, 22 nt, Human
agguccagcuguugcagccucc

SEQ ID NO: 827418 - RNA, 20 nt, Human
ucacaucuggcagcugauga

SEQ ID NO: 827419 - RNA, 22 nt, Human
ucuuugaauccuuuacaucuga

SEQ ID NO: 827420 - RNA, 22 nt, Human
ucaggagacaaagggugcggag

SEQ ID NO: 827421 - RNA, 22 nt, Human
ucccaggagcaccuuuugagcc

SEQ ID NO: 827422 - RNA, 22 nt, Human
aggcagguuggugagaagacug

SEQ ID NO: 827423 - RNA, 22 nt, Human
gaggggaaaguucugcacaagg

SEQ ID NO: 827424 - RNA, 18 nt, Human
gcagcuagccaggggggc

SEQ ID NO: 827425 - RNA, 22 nt, Human
ccaggagaugggaaaguagcag

SEQ ID NO: 827426 - RNA, 22 nt, Human
aagcaccucuaugauugcuuuu

SEQ ID NO: 827427 - RNA, 22 nt, Human
cagauccacccuuguagugaca

SEQ ID NO: 827428 - RNA, 22 nt, Human
aggaggcacucacucucagggu

SEQ ID NO: 827429 - RNA, 22 nt, Human
uucauucuuugaaucugaggua

SEQ ID NO: 827430 - RNA, 22 nt, Human
ggagauggaauagauucugacu

SEQ ID NO: 827431 - RNA, 22 nt, Human
cagcaggauuugaaaggaagag

SEQ ID NO: 827432 - RNA, 22 nt, Human
ucaggaauccagacagggcaca

SEQ ID NO: 827433 - RNA, 22 nt, Human
cugcugugcagacagacucucu

SEQ ID NO: 827434 - RNA, 22 nt, Human
aggguaggaacugaguggaagg

SEQ ID NO: 827435 - RNA, 22 nt, Human
cccaaggaagacgcuugugaua

SEQ ID NO: 827436 - RNA, 22 nt, Human
aaagcagacugauuugcaucac

SEQ ID NO: 827437 - RNA, 21 nt, Human
aaauacagaaacuuguuuuca

SEQ ID NO: 827438 - RNA, 22 nt, Human
aagggaggggauguaagccugg

SEQ ID NO: 827439 - RNA, 22 nt, Human
ugaggcaggagaauggcgggaa

SEQ ID NO: 827440 - RNA, 22 nt, Human
aguggacucuucccagugcuug

SEQ ID NO: 827441 - RNA, 22 nt, Human
cccaggagacugagcuguaacc

SEQ ID NO: 827442 - RNA, 22 nt, Human
uucucagagcucacuguaguaa

SEQ ID NO: 827443 - RNA, 22 nt, Human
acauuuuuuagagucccacauu

SEQ ID NO: 827444 - RNA, 22 nt, Human
uaaauuguuuucuagaaguugu

SEQ ID NO: 827445 - RNA, 22 nt, Human
aaggcagccauagcaccaucca

SEQ ID NO: 827446 - RNA, 22 nt, Human
uuguugguggaauugaugcuag

SEQ ID NO: 827447 - RNA, 22 nt, Human
ucagagagugcaaaauauagcu

SEQ ID NO: 827448 - RNA, 22 nt, Human
gaggcagcuuggggcugugggu

SEQ ID NO: 827449 - RNA, 22 nt, Human
agaggccagguccagaguuugu

SEQ ID NO: 827450 - RNA, 22 nt, Human
uggcagcagccauggaaggccc

SEQ ID NO: 827451 - RNA, 22 nt, Human
gcugguuuccuuaucuauaaag

SEQ ID NO: 827452 - RNA, 22 nt, Human
agcuggcagucauccuagugag

SEQ ID NO: 827453 - RNA, 23 nt, Human
ucccaggaaucugcauuuuuaac

SEQ ID NO: 827454 - RNA, 19 nt, Human
agacagagcucaguggguu

SEQ ID NO: 827455 - RNA, 22 nt, Human
gaggagcuugugagaagauguc

SEQ ID NO: 827456 - RNA, 22 nt, Human
ucugguaaccuuuaucccuccu

SEQ ID NO: 827457 - RNA, 22 nt, Human
ugugccagccucuggcuguguc

SEQ ID NO: 827458 - RNA, 23 nt, Human
uggagcugacagucagagggagg

SEQ ID NO: 827459 - RNA, 22 nt, Human
cauuguuaauugguaucuuaca

SEQ ID NO: 827460 - RNA, 23 nt, Human
cuuuuaacuagaguaucagcugc

SEQ ID NO: 827461 - RNA, 22 nt, Human
uuccaugaaagugaaauggagc

SEQ ID NO: 827462 - RNA, 22 nt, Human
uacauaguauucacauuguuuu

SEQ ID NO: 827463 - RNA, 21 nt, Human
uacagaaugcgcuucagucug

SEQ ID NO: 827464 - RNA, 22 nt, Human
cacauauuguaguucaccagga

SEQ ID NO: 827465 - RNA, 22 nt, Human
ucuacccagagcuaugaccuga

SEQ ID NO: 827466 - RNA, 22 nt, Human
uagaaaugaauguuuaaaaguc

SEQ ID NO: 827467 - RNA, 19 nt, Human
uucauucucuuauuguugu

SEQ ID NO: 827468 - RNA, 22 nt, Human
aagauaaacucuugauuucuga

SEQ ID NO: 827469 - RNA, 22 nt, Human
ucuucucucauguaggagggaa

SEQ ID NO: 827470 - RNA, 22 nt, Human
gcccaggaaguugaggcugccg

SEQ ID NO: 827471 - RNA, 22 nt, Human
cugacagucucauugauuugcu

SEQ ID NO: 827472 - RNA, 20 nt, Human
cgugcugugaccuugagcau

SEQ ID NO: 827473 - RNA, 20 nt, Human
ucauuucuugggguuccaag

SEQ ID NO: 827474 - RNA, 22 nt, Human
accaggagaggcacuugcaaug

SEQ ID NO: 827475 - RNA, 20 nt, Human
caucaucacaugagccaauu

SEQ ID NO: 827476 - RNA, 22 nt, Human
cugcgcagcaaucagagaggag

SEQ ID NO: 827477 - RNA, 19 nt, Human
ugaggggcucacagucuca

SEQ ID NO: 827478 - RNA, 22 nt, Human
ugcuguggcaguuuauguauag

SEQ ID NO: 827479 - RNA, 22 nt, Human
uggcagcugucagaaugcaaau

SEQ ID NO: 827480 - RNA, 22 nt, Human
ugaaaugagagcacagaauaaa

SEQ ID NO: 827481 - RNA, 22 nt, Human
cugcuguguuucacaccucugg

SEQ ID NO: 827482 - RNA, 22 nt, Human
aucauucuagcuguuguguuga

SEQ ID NO: 827483 - RNA, 22 nt, Human
acagauguacacucauauauaa

SEQ ID NO: 827484 - RNA, 22 nt, Human
ugaaggcccuaucuccauauac

SEQ ID NO: 827485 - RNA, 22 nt, Human
uuugaauaucacaaacuuucaa

SEQ ID NO: 827486 - RNA, 22 nt, Human
ccaggagauuuuuccauagcac

SEQ ID NO: 827487 - RNA, 22 nt, Human
uucucagauccaucagaagucc

SEQ ID NO: 827488 - RNA, 22 nt, Human
cucucagacugaagggccugug

SEQ ID NO: 827489 - RNA, 22 nt, Human
gucagagagggcacgugcacac

SEQ ID NO: 827490 - RNA, 22 nt, Human
aagagaggacauggugaaccug

SEQ ID NO: 827491 - RNA, 23 nt, Human
acagaaaucauuuguaagguacc

SEQ ID NO: 827492 - RNA, 22 nt, Human
cauguuuacuaccaggagaaug

SEQ ID NO: 827493 - RNA, 22 nt, Human
ucaggagauggucuuuauaggc

SEQ ID NO: 827494 - RNA, 22 nt, Human
aguccuuugggaaaaaugacua

SEQ ID NO: 827495 - RNA, 22 nt, Human
aggcagcagugauaagauagga

SEQ ID NO: 827496 - RNA, 22 nt, Human
uccaggaggguuuucugccuuc

SEQ ID NO: 827497 - RNA, 22 nt, Human
gauggcaggugauagccgaguc

SEQ ID NO: 827498 - RNA, 22 nt, Human
aaguguagauuauggagugucu

SEQ ID NO: 827499 - RNA, 18 nt, Human
aauuuccauaugaauugc

SEQ ID NO: 827500 - RNA, 22 nt, Human
cacagcauaaugaaauauacuu

SEQ ID NO: 827501 - RNA, 22 nt, Human
aggcaggccccugagaauagac

SEQ ID NO: 827502 - RNA, 22 nt, Human
cuuugaauugccguuucaucug

SEQ ID NO: 827503 - RNA, 22 nt, Human
uacuuuuuagcacagugugugc

SEQ ID NO: 827504 - RNA, 22 nt, Human
guuauauauaguauuucucuga

SEQ ID NO: 827505 - RNA, 15 nt, Human
cuccaugauuuugca

SEQ ID NO: 827506 - RNA, 22 nt, Human
uucuuauagaagcaaccauugu

SEQ ID NO: 827507 - RNA, 22 nt, Human
aggcaagcauugggaacagggc

SEQ ID NO: 827508 - RNA, 22 nt, Human
cuucccagaccuuagagugcag

SEQ ID NO: 827509 - RNA, 22 nt, Human
ucagugaucuaaggguauggcc

SEQ ID NO: 827510 - RNA, 18 nt, Human
gaaaggagagacaguagg

SEQ ID NO: 827511 - RNA, 22 nt, Human
ggaagaggcugagccagguccc

SEQ ID NO: 827512 - RNA, 22 nt, Human
aggcagcuggaaaacuccaggc

SEQ ID NO: 827513 - RNA, 22 nt, Human
uaauacagaaguguauuaaaau

SEQ ID NO: 827514 - RNA, 22 nt, Human
cuguguuugaugagaagccacc

SEQ ID NO: 827515 - RNA, 22 nt, Human
aaccauuugcaguuacugagac

SEQ ID NO: 827516 - RNA, 22 nt, Human
agugcuuuccuucuugugacau

SEQ ID NO: 827517 - RNA, 22 nt, Human
uaggagggcccugaaaauggca

SEQ ID NO: 827518 - RNA, 23 nt, Human
auguauuuaaauuucagugauga

SEQ ID NO: 827519 - RNA, 22 nt, Human
ugauuuuuagcuauucugaaga

SEQ ID NO: 827520 - RNA, 23 nt, Human
aggcgagcucuucuccagcacgu

SEQ ID NO: 827521 - RNA, 22 nt, Human
gaccaaggaagaggggagccag

SEQ ID NO: 827522 - RNA, 22 nt, Human
ugaacuccaaauacugcugauu

SEQ ID NO: 827523 - RNA, 22 nt, Human
agggagcugagcugugagcagc

SEQ ID NO: 827524 - RNA, 22 nt, Human
cugcuguggguuaagacacugu

SEQ ID NO: 827525 - RNA, 20 nt, Human
cucuccucacccgugucagg

SEQ ID NO: 827526 - RNA, 22 nt, Human
ccuugcauauauuauaucuuug

SEQ ID NO: 827527 - RNA, 20 nt, Human
uuuacauuuugaaacaguga

SEQ ID NO: 827528 - RNA, 23 nt, Human
uccaggagaauuccagggcccgg

SEQ ID NO: 827529 - RNA, 22 nt, Human
augcagcuucaggauuaugaug

SEQ ID NO: 827530 - RNA, 22 nt, Human
acauacauauguuuaaaugcau

SEQ ID NO: 827531 - RNA, 19 nt, Human
agcuuccauauucucuagu

SEQ ID NO: 827532 - RNA, 22 nt, Human
ggauggcaggacaaggacccag

SEQ ID NO: 827533 - RNA, 22 nt, Human
cauuuccagcuccugcaucaug

SEQ ID NO: 827534 - RNA, 22 nt, Human
uuggcaguaaaagaaaaugcuu

SEQ ID NO: 827535 - RNA, 22 nt, Human
gccaggaggggagaguguguca

SEQ ID NO: 827536 - RNA, 22 nt, Human
caaggccacugcucagguuucc

SEQ ID NO: 827537 - RNA, 22 nt, Human
guucuucacauuucauugagga

SEQ ID NO: 827538 - RNA, 22 nt, Human
ucacaaauauuuuaacaguagg

SEQ ID NO: 827539 - RNA, 22 nt, Human
ugaaaugaucaguuugguuacu

SEQ ID NO: 827540 - RNA, 22 nt, Human
ggaggggaggauuaaugacaaa

SEQ ID NO: 827541 - RNA, 22 nt, Human
aaaaacugcaauuacuuuuguc

SEQ ID NO: 827542 - RNA, 17 nt, Human
aggcaggcagagcggga

SEQ ID NO: 827543 - RNA, 22 nt, Human
cagcugcuuuaguuuuccaucc

SEQ ID NO: 827544 - RNA, 22 nt, Human
uuucuagucucgaucucuuaau

SEQ ID NO: 827545 - RNA, 22 nt, Human
agaagucauuuauguuagauga

SEQ ID NO: 827546 - RNA, 22 nt, Human
gaggcagcaggcugaggaggau

SEQ ID NO: 827547 - RNA, 22 nt, Human
gucaggaugacaagugcuuuca

SEQ ID NO: 827548 - RNA, 22 nt, Human
gucuucaauagagccucaauuu

SEQ ID NO: 827549 - RNA, 22 nt, Human
agcaccaugaccuugccauuga

SEQ ID NO: 827550 - RNA, 22 nt, Human
guaucacuuuugagagugagaa

SEQ ID NO: 827551 - RNA, 22 nt, Human
gccaggagcccugggcaaguuc

SEQ ID NO: 827552 - RNA, 22 nt, Human
aaauuauucucauguguuucuu

SEQ ID NO: 827553 - RNA, 22 nt, Human
auucuucaucagagaugcacua

SEQ ID NO: 827554 - RNA, 22 nt, Human
ucucaggaaauaggauuugagu

SEQ ID NO: 827555 - RNA, 22 nt, Human
ucucccaggcugcccuguggac

SEQ ID NO: 827556 - RNA, 22 nt, Human
ugaggcagcaauuguauuguau

SEQ ID NO: 827557 - RNA, 22 nt, Human
aggcugcugaggccaccacgcu

SEQ ID NO: 827558 - RNA, 22 nt, Human
gccucugcccuccugggacugc

SEQ ID NO: 827559 - RNA, 22 nt, Human
agugcuguuagguuaauauagu

SEQ ID NO: 827560 - RNA, 22 nt, Human
ucacaucucccuggaggacaca

SEQ ID NO: 827561 - RNA, 22 nt, Human
auugugcaaauauuaucuguag

SEQ ID NO: 827562 - RNA, 22 nt, Human
auguuucaaugcacuuuagccu

SEQ ID NO: 827563 - RNA, 22 nt, Human
ggaggugguggcagugacaauu

SEQ ID NO: 827564 - RNA, 22 nt, Human
cacucuccagcacaccccauuu

SEQ ID NO: 827565 - RNA, 22 nt, Human
uuuauuguuaucaugggugagu

SEQ ID NO: 827566 - RNA, 22 nt, Human
acaagcaugggcuuugacauca

SEQ ID NO: 827567 - RNA, 19 nt, Human
uggcaggcccaggauggac

SEQ ID NO: 827568 - RNA, 22 nt, Human
uuugaaguguuauuucuaucac

SEQ ID NO: 827569 - RNA, 22 nt, Human
gcccaggaguugaaugcagcag

SEQ ID NO: 827570 - RNA, 22 nt, Human
ucuucagacuccaaauguuuua

SEQ ID NO: 827571 - RNA, 22 nt, Human
gaggagaggccaucguuguuau

SEQ ID NO: 827572 - RNA, 22 nt, Human
cugaacuuauugagugcuugcu

SEQ ID NO: 827573 - RNA, 22 nt, Human
auuaaauuagcaaacugugaaa

SEQ ID NO: 827574 - RNA, 22 nt, Human
gaacuguaguuaauacuacaca

SEQ ID NO: 827575 - RNA, 22 nt, Human
uuuccagguauuaauacuguau

SEQ ID NO: 827576 - RNA, 20 nt, Human
ucucagcauaagaacccuuc

SEQ ID NO: 827577 - RNA, 22 nt, Human
ucuaaagaagaggguucugcgg

SEQ ID NO: 827578 - RNA, 22 nt, Human
uucuugcaggucacucacugag

SEQ ID NO: 827579 - RNA, 22 nt, Human
uguuugaacugaauaacauagu

SEQ ID NO: 827580 - RNA, 20 nt, Human
uuucugugcccaggucuguu

SEQ ID NO: 827581 - RNA, 21 nt, Human
ggauggauagggaagagauuu

SEQ ID NO: 827582 - RNA, 22 nt, Human
gcaggcaguuauuuaguagaau

SEQ ID NO: 827583 - RNA, 22 nt, Human
cagaaggcuuuguggaguagac

SEQ ID NO: 827584 - RNA, 22 nt, Human
cccaggaauuggaggcugcagu

SEQ ID NO: 827585 - RNA, 22 nt, Human
aggcaggcucaaugcccagucu

SEQ ID NO: 827586 - RNA, 22 nt, Human
augcugugcuggcuaaccaugg

SEQ ID NO: 827587 - RNA, 22 nt, Human
gggugggacugaagucugaggg

SEQ ID NO: 827588 - RNA, 22 nt, Human
uuucaucuucccagagaccuug

SEQ ID NO: 827589 - RNA, 22 nt, Human
guaggcagauaggagugcagcc

SEQ ID NO: 827590 - RNA, 22 nt, Human
uugaaaggguuaaagugguaaa

SEQ ID NO: 827591 - RNA, 22 nt, Human
caguuuuugccauuaagaguaa

SEQ ID NO: 827592 - RNA, 22 nt, Human
guuguuuugcaggauccuuaca

SEQ ID NO: 827593 - RNA, 18 nt, Human
guaggucaguaccaagca

SEQ ID NO: 827594 - RNA, 22 nt, Human
caggacagagcccagacugugu

SEQ ID NO: 827595 - RNA, 22 nt, Human
uguagggaggaaggguuggaaa

SEQ ID NO: 827596 - RNA, 22 nt, Human
caaggccaagucucugugaaga

SEQ ID NO: 827597 - RNA, 22 nt, Human
ucaggauguccaaaauccagcc

SEQ ID NO: 827598 - RNA, 21 nt, Human
agggagcuggccacacagccu

SEQ ID NO: 827599 - RNA, 20 nt, Human
ugcugucguguuuucugcuu

SEQ ID NO: 827600 - RNA, 22 nt, Human
aaagccaugaauguuauagagg

SEQ ID NO: 827601 - RNA, 21 nt, Human
gcugcaucaaucuacccaggg

SEQ ID NO: 827602 - RNA, 22 nt, Human
gacggcagaaacucaugagguc

SEQ ID NO: 827603 - RNA, 23 nt, Human
uuucaacuccugccauuauuucu

SEQ ID NO: 827604 - RNA, 22 nt, Human
ucccaggaaugucugaaaguga

SEQ ID NO: 827605 - RNA, 22 nt, Human
augcuguguauuuuacucuuuc

SEQ ID NO: 827606 - RNA, 19 nt, Human
aaggcagcaguagcaucca

SEQ ID NO: 827607 - RNA, 22 nt, Human
acauuuaaccaaacuguuuaau

SEQ ID NO: 827608 - RNA, 22 nt, Human
uuucaguuacugcuauaucauu

SEQ ID NO: 827609 - RNA, 22 nt, Human
auucuuauuauaguaaaacagu

SEQ ID NO: 827610 - RNA, 22 nt, Human
uucucugaaggccaugcucacu

SEQ ID NO: 827611 - RNA, 22 nt, Human
cuguuaaucugcuugcaugaug

SEQ ID NO: 827612 - RNA, 20 nt, Human
gcccaagguccagaaggggg

SEQ ID NO: 827613 - RNA, 22 nt, Human
gcagaggagcaaguugcuacag

SEQ ID NO: 827614 - RNA, 22 nt, Human
auacagauguugaauguuauau

SEQ ID NO: 827615 - RNA, 22 nt, Human
aaggaaccuggaguagagggag

SEQ ID NO: 827616 - RNA, 22 nt, Human
ggagcacuauaauagagauuuu

SEQ ID NO: 827617 - RNA, 22 nt, Human
ucauuucaaguucugacagcua

SEQ ID NO: 827618 - RNA, 22 nt, Human
auccaugauuaguaggauaaag

SEQ ID NO: 827619 - RNA, 22 nt, Human
ugcugaaaacucaaccauugug

SEQ ID NO: 827620 - RNA, 22 nt, Human
gugguuuucuccaacccagaac

SEQ ID NO: 827621 - RNA, 22 nt, Human
uggcagcugccauguccacgug

SEQ ID NO: 827622 - RNA, 22 nt, Human
caaaugauagagccgauuauca

SEQ ID NO: 827623 - RNA, 22 nt, Human
caggaggggguggaguuucgcc

SEQ ID NO: 827624 - RNA, 22 nt, Human
gggcagcugcagggauggugac

SEQ ID NO: 827625 - RNA, 22 nt, Human
gcagcuaccacccaggaaggac

SEQ ID NO: 827626 - RNA, 22 nt, Human
aguucucaagacaauuaccugu

SEQ ID NO: 827627 - RNA, 22 nt, Human
aucacugucgucaucugagauu

SEQ ID NO: 827628 - RNA, 22 nt, Human
cauuuguauagugcuuagacca

SEQ ID NO: 827629 - RNA, 22 nt, Human
ugcauaguucuccuuccuccuc

SEQ ID NO: 827630 - RNA, 22 nt, Human
aggcagcccugugcuggaugcu

SEQ ID NO: 827631 - RNA, 22 nt, Human
agagguagagguugcagugagc

SEQ ID NO: 827632 - RNA, 22 nt, Human
cagaggcaggaagaugggcagu

SEQ ID NO: 827633 - RNA, 17 nt, Human
aagacagaagccaugag

SEQ ID NO: 827634 - RNA, 22 nt, Human
aaugcauauguaggcaagcagu

SEQ ID NO: 827635 - RNA, 22 nt, Human
ucagggugaaccaggcaggaau

SEQ ID NO: 827636 - RNA, 20 nt, Human
caggaugauuggacacgaug

SEQ ID NO: 827637 - RNA, 22 nt, Human
caugcugugugguuagaacugu

SEQ ID NO: 827638 - RNA, 22 nt, Human
ugccuggaaggcccaugggaag

SEQ ID NO: 827639 - RNA, 22 nt, Human
agaguucugcucuucucaguga

SEQ ID NO: 827640 - RNA, 22 nt, Human
agggagugguuaagaaggugca

SEQ ID NO: 827641 - RNA, 21 nt, Human
cccagggaagccgcagucacc

SEQ ID NO: 827642 - RNA, 22 nt, Human
aauauuuguuaguguuuuaaug

SEQ ID NO: 827643 - RNA, 22 nt, Human
uucuaugccauguucagcuacu

SEQ ID NO: 827644 - RNA, 22 nt, Human
gcucucuuuuuccagugguggu

SEQ ID NO: 827645 - RNA, 22 nt, Human
uucuccucuguuggccuucccu

SEQ ID NO: 827646 - RNA, 22 nt, Human
ucucagaguuuagagcugagcc

SEQ ID NO: 827647 - RNA, 22 nt, Human
cuacccagagugaaucucuuaa

SEQ ID NO: 827648 - RNA, 22 nt, Human
ucuuucaaugagcauucuuucc

SEQ ID NO: 827649 - RNA, 22 nt, Human
gagggagggacuagcauucucu

SEQ ID NO: 827650 - RNA, 22 nt, Human
uucaauucaauucuaaauauau

SEQ ID NO: 827651 - RNA, 22 nt, Human
aguuugaauugaaaugcagaug

SEQ ID NO: 827652 - RNA, 21 nt, Human
uuugaaagugggugauucuuu

SEQ ID NO: 827653 - RNA, 22 nt, Human
uucuucaguuugguaaauguaa

SEQ ID NO: 827654 - RNA, 22 nt, Human
aaaauuauagaucuagugccug

SEQ ID NO: 827655 - RNA, 22 nt, Human
aggcacaguggcucacaccugu

SEQ ID NO: 827656 - RNA, 22 nt, Human
uggcuguguuaccacuucaugu

SEQ ID NO: 827657 - RNA, 22 nt, Human
uuucaggguacauggagcaaau

SEQ ID NO: 827658 - RNA, 22 nt, Human
auugaaagagaauguagcucuu

SEQ ID NO: 827659 - RNA, 22 nt, Human
auacaacagaaaaugauuauuc

SEQ ID NO: 827660 - RNA, 22 nt, Human
gagaaggaguagcugaccuggg

SEQ ID NO: 827661 - RNA, 22 nt, Human
ucagugugaguaccaugcucag

SEQ ID NO: 827662 - RNA, 22 nt, Human
gcccaggaaauaaaagugggcu

SEQ ID NO: 827663 - RNA, 22 nt, Human
ggaguaggaguagaacucauca

SEQ ID NO: 827664 - RNA, 22 nt, Human
uuuaacagaugcuaugucuacc

SEQ ID NO: 827665 - RNA, 22 nt, Human
agggggugucucugauuggguu

SEQ ID NO: 827666 - RNA, 22 nt, Human
cggagccugcuuguugcagcug

SEQ ID NO: 827667 - RNA, 22 nt, Human
uagugcuuaacacaaagugauu

SEQ ID NO: 827668 - RNA, 22 nt, Human
agcauccaacaggagggaaggg

SEQ ID NO: 827669 - RNA, 21 nt, Human
aaugcauuaacauaaagcuga

SEQ ID NO: 827670 - RNA, 22 nt, Human
ucugcuguaaagaauuucugcc

SEQ ID NO: 827671 - RNA, 22 nt, Human
ugauuuccccagucuugcugcu

SEQ ID NO: 827672 - RNA, 22 nt, Human
agauggagaaugacaauuaagg

SEQ ID NO: 827673 - RNA, 22 nt, Human
gcagagaacccagcagauuggc

SEQ ID NO: 827674 - RNA, 22 nt, Human
cauuuguuaauuacuauuaucu

SEQ ID NO: 827675 - RNA, 20 nt, Human
uccaggagguuaguguggcu

SEQ ID NO: 827676 - RNA, 22 nt, Human
acuucaugcagaagagagcugu

SEQ ID NO: 827677 - RNA, 22 nt, Human
agagugcagauaagagaauguu

SEQ ID NO: 827678 - RNA, 22 nt, Human
uuuauuguuuagaagggggcug

SEQ ID NO: 827679 - RNA, 22 nt, Human
gucccauaaguagugcaacuug

SEQ ID NO: 827680 - RNA, 22 nt, Human
cuggcugggagcgagcugcuca

SEQ ID NO: 827681 - RNA, 22 nt, Human
gugguaauagagcuccaaacua

SEQ ID NO: 827682 - RNA, 22 nt, Human
cugcgcagggguggcgccagaa

SEQ ID NO: 827683 - RNA, 22 nt, Human
uaucuguucaauggaagaugac

SEQ ID NO: 827684 - RNA, 22 nt, Human
aggcagauauuggggugaugug

SEQ ID NO: 827685 - RNA, 22 nt, Human
uugcuuugccaccagaagucua

SEQ ID NO: 827686 - RNA, 22 nt, Human
gagugcagaugaacagaagauu

SEQ ID NO: 827687 - RNA, 22 nt, Human
aauaucagcacuuuugugguau

SEQ ID NO: 827688 - RNA, 22 nt, Human
ugucaaauuuuuauugcaguau

SEQ ID NO: 827689 - RNA, 22 nt, Human
ccuucuucuguguggcccaaga

SEQ ID NO: 827690 - RNA, 22 nt, Human
uucaggauccccuugaugggcu

SEQ ID NO: 827691 - RNA, 20 nt, Human
gcagcuacucugucucgcuc

SEQ ID NO: 827692 - RNA, 22 nt, Human
uuugaaugcaggacauacagaa

SEQ ID NO: 827693 - RNA, 22 nt, Human
augcagcugucagggagaacau

SEQ ID NO: 827694 - RNA, 22 nt, Human
uuagccauuuuauacaagugua

SEQ ID NO: 827695 - RNA, 22 nt, Human
cuuaaauucuuaaugcccucau

SEQ ID NO: 827696 - RNA, 22 nt, Human
aagauggaguaguguaaugguu

SEQ ID NO: 827697 - RNA, 22 nt, Human
gaggcauggccugaggcuagga

SEQ ID NO: 827698 - RNA, 22 nt, Human
uggcagcugaauggcuggaugg

SEQ ID NO: 827699 - RNA, 22 nt, Human
cucaucugauaaaucacucuua

SEQ ID NO: 827700 - RNA, 22 nt, Human
augaaacacacacgcgcauacu

SEQ ID NO: 827701 - RNA, 22 nt, Human
aucaggauucaccccagagcug

SEQ ID NO: 827702 - RNA, 23 nt, Human
acuauaaaguuguucugauuuac

SEQ ID NO: 827703 - RNA, 18 nt, Human
cauuguacaaugcuuuau

SEQ ID NO: 827704 - RNA, 22 nt, Human
uuacuuugcuuucucauuacag

SEQ ID NO: 827705 - RNA, 22 nt, Human
uucuccaacacaagcaugaugu

SEQ ID NO: 827706 - RNA, 22 nt, Human
ucuggcaggcaaucggcucugg

SEQ ID NO: 827707 - RNA, 22 nt, Human
agagacagaggcaauauagcuu

SEQ ID NO: 827708 - RNA, 22 nt, Human
gagggagugccagagggccagc

SEQ ID NO: 827709 - RNA, 22 nt, Human
aaggcaguagguguuucaaacu

SEQ ID NO: 827710 - RNA, 22 nt, Human
agucaauuaucucuaggucauc

SEQ ID NO: 827711 - RNA, 22 nt, Human
agguaggggguuugggaacugc

SEQ ID NO: 827712 - RNA, 22 nt, Human
cucuuucugauucgcugggacc

SEQ ID NO: 827713 - RNA, 22 nt, Human
gagggcuccucacauucucuau

SEQ ID NO: 827714 - RNA, 22 nt, Human
cucaggauugugccuagggaga

SEQ ID NO: 827715 - RNA, 21 nt, Human
gagacagcccagugccagggc

SEQ ID NO: 827716 - RNA, 22 nt, Human
auugaaagauaggcuacugugg

SEQ ID NO: 827717 - RNA, 20 nt, Human
gggagucuggaugaaagaug

SEQ ID NO: 827718 - RNA, 22 nt, Human
uuugaaagggacaaagucacug

SEQ ID NO: 827719 - RNA, 21 nt, Human
agcaccuuacagcuauaaugg

SEQ ID NO: 827720 - RNA, 22 nt, Human
gugguaauuuaauccuacacug

SEQ ID NO: 827721 - RNA, 22 nt, Human
guggcagcggugugcaaggagg

SEQ ID NO: 827722 - RNA, 21 nt, Human
agcagaggcagaauguaugca

SEQ ID NO: 827723 - RNA, 22 nt, Human
cagaccagaaggaagccgacaa

SEQ ID NO: 827724 - RNA, 22 nt, Human
cacaggagagcugggaggugcc

SEQ ID NO: 827725 - RNA, 22 nt, Human
ugaaggccagggauuugcagcc

SEQ ID NO: 827726 - RNA, 22 nt, Human
gguuugaacagcuuuggagaag

SEQ ID NO: 827727 - RNA, 22 nt, Human
uguacauagaucuugaaaauua

SEQ ID NO: 827728 - RNA, 22 nt, Human
aaguguauauaugacuuauaaa

SEQ ID NO: 827729 - RNA, 22 nt, Human
ucuucagagugaaagucuguga

SEQ ID NO: 827730 - RNA, 22 nt, Human
ugcccaggaucuggcgaugcuc

SEQ ID NO: 827731 - RNA, 21 nt, Human
acucaggagacuaacuauguc

SEQ ID NO: 827732 - RNA, 22 nt, Human
ugcucuucggggccacugcuug

SEQ ID NO: 827733 - RNA, 22 nt, Human
aaucuuucccuauuaaaugugg

SEQ ID NO: 827734 - RNA, 16 nt, Human
gcccaggacgggaggc

SEQ ID NO: 827735 - RNA, 22 nt, Human
cugaacucuuuaugacagcuug

SEQ ID NO: 827736 - RNA, 22 nt, Human
aguggaccagaagacugaagcu

SEQ ID NO: 827737 - RNA, 22 nt, Human
ugaaagcagcaccaauaccauu

SEQ ID NO: 827738 - RNA, 21 nt, Human
cugcuguggcccccgacaugc

SEQ ID NO: 827739 - RNA, 22 nt, Human
ggacuucuaagugccagacacu

SEQ ID NO: 827740 - RNA, 22 nt, Human
uccaggaggcagggcugugccc

SEQ ID NO: 827741 - RNA, 22 nt, Human
uuguuuuaucuuucuacagacu

SEQ ID NO: 827742 - RNA, 22 nt, Human
uuaaagggccgauuuccaggcc

SEQ ID NO: 827743 - RNA, 22 nt, Human
aaauauaauuucugccucaaua

SEQ ID NO: 827744 - RNA, 22 nt, Human
auguuauuaaaguacagauucu

SEQ ID NO: 827745 - RNA, 22 nt, Human
aggcugcugccuuggagagugu

SEQ ID NO: 827746 - RNA, 22 nt, Human
cuuuggcaaugucauuuucaau

SEQ ID NO: 827747 - RNA, 22 nt, Human
ugucucugauaaguaguucagu

SEQ ID NO: 827748 - RNA, 21 nt, Human
ggagggcagcccagacuggcu

SEQ ID NO: 827749 - RNA, 22 nt, Human
agcagacauaucucaugucaca

SEQ ID NO: 827750 - RNA, 22 nt, Human
agaggacagguuuuccaugggc

SEQ ID NO: 827751 - RNA, 22 nt, Human
aaggcagcaugaaucccuguac

SEQ ID NO: 827752 - RNA, 22 nt, Human
aucaggauucaguaucuccagc

SEQ ID NO: 827753 - RNA, 22 nt, Human
uucaacuauuaugaauaaaauu

SEQ ID NO: 827754 - RNA, 22 nt, Human
acaauauuguacccagaaguuu

SEQ ID NO: 827755 - RNA, 22 nt, Human
uugaaaguuaucuagauucuga

SEQ ID NO: 827756 - RNA, 17 nt, Human
caagagagaugacugga

SEQ ID NO: 827757 - RNA, 22 nt, Human
ggugguggagccagcugggagu

SEQ ID NO: 827758 - RNA, 22 nt, Human
gggcagcugccaagugcaucgc

SEQ ID NO: 827759 - RNA, 22 nt, Human
aggcagcuuucuggugcaccau

SEQ ID NO: 827760 - RNA, 22 nt, Human
uagcacaucuggcgcuuauagg

SEQ ID NO: 827761 - RNA, 22 nt, Human
aaugucugccagaacugaucau

SEQ ID NO: 827762 - RNA, 22 nt, Human
guuuucaauuauaagauggcuu

SEQ ID NO: 827763 - RNA, 22 nt, Human
cuguaguugaugauuucugaua

SEQ ID NO: 827764 - RNA, 22 nt, Human
uagcacaucuucuuggccugca

SEQ ID NO: 827765 - RNA, 19 nt, Human
ucaucucacagggccuggc

SEQ ID NO: 827766 - RNA, 22 nt, Human
uuaaauuagucaagcuucucug

SEQ ID NO: 827767 - RNA, 22 nt, Human
gcugauguaagacuuuugguuu

SEQ ID NO: 827768 - RNA, 22 nt, Human
uauuuuaaagacugccagccua

SEQ ID NO: 827769 - RNA, 19 nt, Human
uccaggagcaaagccaguu

SEQ ID NO: 827770 - RNA, 22 nt, Human
gucuucaacaauaacuaccacu

SEQ ID NO: 827771 - RNA, 22 nt, Human
ugugugucagagucuccauggu

SEQ ID NO: 827772 - RNA, 22 nt, Human
cuguggaauugaugcuuagugu

SEQ ID NO: 827773 - RNA, 22 nt, Human
cacaaauggccguguucaaaga

SEQ ID NO: 827774 - RNA, 22 nt, Human
uucuucuugucugcccucacau

SEQ ID NO: 827775 - RNA, 22 nt, Human
gaggcagcugggauacaaggga

SEQ ID NO: 827776 - RNA, 22 nt, Human
ucaggaugagcucauaacuaug

SEQ ID NO: 827777 - RNA, 22 nt, Human
aaugaaauguagcuuauccaua

SEQ ID NO: 827778 - RNA, 22 nt, Human
auucuucaucacuaccuuguga

SEQ ID NO: 827779 - RNA, 21 nt, Human
cuugaaagguagagucuacag

SEQ ID NO: 827780 - RNA, 22 nt, Human
ccacagagacaggguccuugcu

SEQ ID NO: 827781 - RNA, 22 nt, Human
uugaaaguagcagcugcauaug

SEQ ID NO: 827782 - RNA, 22 nt, Human
uucaugugauaaaugugugacu

SEQ ID NO: 827783 - RNA, 22 nt, Human
uugaaauaucaaguuauuagug

SEQ ID NO: 827784 - RNA, 22 nt, Human
aggcggcugguguccugcaggu

SEQ ID NO: 827785 - RNA, 22 nt, Human
caaggccaguucaccaagggca

SEQ ID NO: 827786 - RNA, 22 nt, Human
aggagaggguggcauuaaguuu

SEQ ID NO: 827787 - RNA, 22 nt, Human
ucagauggguuuugaaggaugu

SEQ ID NO: 827788 - RNA, 17 nt, Human
cucacggaggaugaauc

SEQ ID NO: 827789 - RNA, 22 nt, Human
uuccuuaggcuguuugcagugc

SEQ ID NO: 827790 - RNA, 22 nt, Human
gcucacugcaaccucugcuucc

SEQ ID NO: 827791 - RNA, 22 nt, Human
aguuauaugugaaaacacguau

SEQ ID NO: 827792 - RNA, 22 nt, Human
gagggaggugauacugaacgua

SEQ ID NO: 827793 - RNA, 22 nt, Human
agggcaguucaacuucauagug

SEQ ID NO: 827794 - RNA, 22 nt, Human
augggaggaugcucgggugcuc

SEQ ID NO: 827795 - RNA, 22 nt, Human
cugcugagaaaagacugaggga

SEQ ID NO: 827796 - RNA, 23 nt, Human
uccaugagaugugggcuucuagu

SEQ ID NO: 827797 - RNA, 22 nt, Human
ucuuuuggguucuuaugauuua

SEQ ID NO: 827798 - RNA, 22 nt, Human
uuacaguuuaguccaagccaga

SEQ ID NO: 827799 - RNA, 22 nt, Human
ggcagcuuguccuucaggagag

SEQ ID NO: 827800 - RNA, 22 nt, Human
uuugaagucagacacugcuuug

SEQ ID NO: 827801 - RNA, 19 nt, Human
cuucuggcccugagccacc

SEQ ID NO: 827802 - RNA, 22 nt, Human
uuuuucagccaugaauuacacu

SEQ ID NO: 827803 - RNA, 22 nt, Human
gcccaggaaaugccccguggug

SEQ ID NO: 827804 - RNA, 22 nt, Human
gacccaggagugcagagagugg

SEQ ID NO: 827805 - RNA, 22 nt, Human
auggaaagggaagcaaggaaca

SEQ ID NO: 827806 - RNA, 22 nt, Human
cccaggagguggagguugcggu

SEQ ID NO: 827807 - RNA, 22 nt, Human
uggcagcugagugcacccccuc

SEQ ID NO: 827808 - RNA, 22 nt, Human
gaggcagcugaagcuucaaaga

SEQ ID NO: 827809 - RNA, 22 nt, Human
uucuuuuacauuaagauuucag

SEQ ID NO: 827810 - RNA, 22 nt, Human
gaggcacuggaggaaaggagaa

SEQ ID NO: 827811 - RNA, 20 nt, Human
ggggcugcaugcagagaaga

SEQ ID NO: 827812 - RNA, 22 nt, Human
uuaaauauuauguugucugcaa

SEQ ID NO: 827813 - RNA, 22 nt, Human
ucacugcucagucuguacuaca

SEQ ID NO: 827814 - RNA, 19 nt, Human
uuugaaagaguuuuauugg

SEQ ID NO: 827815 - RNA, 22 nt, Human
ugcccacauggugccauggcca

SEQ ID NO: 827816 - RNA, 22 nt, Human
ggcagcuucucccaggcuguuu

SEQ ID NO: 827817 - RNA, 22 nt, Human
uuucaaaguugggaauuguaau

SEQ ID NO: 827818 - RNA, 20 nt, Human
ugaggcaggagaauggcaug

SEQ ID NO: 827819 - RNA, 22 nt, Human
cagaggcacaagaaagcaaggc

SEQ ID NO: 827820 - RNA, 20 nt, Human
uuucuugucggcuguugcug

SEQ ID NO: 827821 - RNA, 22 nt, Human
agagagcauugaggaaaucuuc

SEQ ID NO: 827822 - RNA, 22 nt, Human
ucauuucuauugcuacugucug

SEQ ID NO: 827823 - RNA, 22 nt, Human
aaagcagaacugagagagcugg

SEQ ID NO: 827824 - RNA, 22 nt, Human
agagacugcgugucagcgcugg

SEQ ID NO: 827825 - RNA, 22 nt, Human
gcaggagaacaaagcaagcugc

SEQ ID NO: 827826 - RNA, 23 nt, Human
ugcaugugaauucauacuuguuu

SEQ ID NO: 827827 - RNA, 22 nt, Human
uucaggauuguguuuuuccuga

SEQ ID NO: 827828 - RNA, 22 nt, Human
cccaggagguagagguugcagu

SEQ ID NO: 827829 - RNA, 21 nt, Human
uuucacaaaaguaugugacaa

SEQ ID NO: 827830 - RNA, 22 nt, Human
uuugacaaaggaaaaaugcaca

SEQ ID NO: 827831 - RNA, 22 nt, Human
gaaggccaguuuugagauaggu

SEQ ID NO: 827832 - RNA, 22 nt, Human
gcucucuugguggcuguccugg

SEQ ID NO: 827833 - RNA, 22 nt, Human
agcagaggaggauuuaguuagg

SEQ ID NO: 827834 - RNA, 22 nt, Human
ccaggagcagauauggacauaa

SEQ ID NO: 827835 - RNA, 22 nt, Human
agcuucuuggcucagcacuugg

SEQ ID NO: 827836 - RNA, 22 nt, Human
ggaggcagaauagagugugggu

SEQ ID NO: 827837 - RNA, 22 nt, Human
ucuuagaaguucauguuccagc

SEQ ID NO: 827838 - RNA, 22 nt, Human
cuucucagucaccugugagucu

SEQ ID NO: 827839 - RNA, 22 nt, Human
ugugaacuggcagguggacggg

SEQ ID NO: 827840 - RNA, 22 nt, Human
aagugggaauagaaaugaaggu

SEQ ID NO: 827841 - RNA, 22 nt, Human
gggagggguugcauguuugagu

SEQ ID NO: 827842 - RNA, 22 nt, Human
ugaaggccuaacuuccagugcu

SEQ ID NO: 827843 - RNA, 22 nt, Human
ucacaguaaaagcauggaagag

SEQ ID NO: 827844 - RNA, 22 nt, Human
gaggccaaguuggagaccaggu

SEQ ID NO: 827845 - RNA, 22 nt, Human
ucccaggauguuggcggcaggu

SEQ ID NO: 827846 - RNA, 22 nt, Human
cauuuauuggcauguaguaggu

SEQ ID NO: 827847 - RNA, 22 nt, Human
uuucaacaccagagaccaugcg

SEQ ID NO: 827848 - RNA, 22 nt, Human
aaguggacuaauacaaggacua

SEQ ID NO: 827849 - RNA, 22 nt, Human
agcugccgaugcccagcugcau

SEQ ID NO: 827850 - RNA, 22 nt, Human
cuuaagauuugagauaccuaau

SEQ ID NO: 827851 - RNA, 22 nt, Human
gaggggcagagguagagaacaa

SEQ ID NO: 827852 - RNA, 22 nt, Human
gcugcccacaaugauuacaugg

SEQ ID NO: 827853 - RNA, 22 nt, Human
gucaggauuaaugggaguaugc

SEQ ID NO: 827854 - RNA, 22 nt, Human
cugaaaauguuacacaggaaga

SEQ ID NO: 827855 - RNA, 22 nt, Human
gugacaguggucacuuguaguu

SEQ ID NO: 827856 - RNA, 18 nt, Human
ucaggagacacagacgca

SEQ ID NO: 827857 - RNA, 22 nt, Human
ucugcuguucauucuuuuagcu

SEQ ID NO: 827858 - RNA, 22 nt, Human
auacacauauguguguauaugu

SEQ ID NO: 827859 - RNA, 22 nt, Human
gucuucuuguguugccugucuu

SEQ ID NO: 827860 - RNA, 22 nt, Human
aagcaauagcaacaacuuuaca

SEQ ID NO: 827861 - RNA, 22 nt, Human
auuugcuugugcuaugaaaguu

SEQ ID NO: 827862 - RNA, 22 nt, Human
ggaggaugccaagcugugcaca

SEQ ID NO: 827863 - RNA, 22 nt, Human
agaaggggagaagcuaccagga

SEQ ID NO: 827864 - RNA, 22 nt, Human
uaugccugauaacugugucucu

SEQ ID NO: 827865 - RNA, 22 nt, Human
aaagcagaggugauaugacuua

SEQ ID NO: 827866 - RNA, 22 nt, Human
acgagagguccuuagaaucugu

SEQ ID NO: 827867 - RNA, 22 nt, Human
aagacaauuugauacuaguugc

SEQ ID NO: 827868 - RNA, 22 nt, Human
aggcugcuucaauggauaagau

SEQ ID NO: 827869 - RNA, 22 nt, Human
ucaggagauguaaccuuagcug

SEQ ID NO: 827870 - RNA, 22 nt, Human
auucuucacauggauaggaucu

SEQ ID NO: 827871 - RNA, 22 nt, Human
acacauuuacauguuuacguau

SEQ ID NO: 827872 - RNA, 22 nt, Human
aggaagcuaaccagggagugag

SEQ ID NO: 827873 - RNA, 22 nt, Human
augauguuaccaguacuuagag

SEQ ID NO: 827874 - RNA, 22 nt, Human
uguggaaaauuggaacguuccu

SEQ ID NO: 827875 - RNA, 19 nt, Human
ugccuggacaaaugugggg

SEQ ID NO: 827876 - RNA, 22 nt, Human
uggcagcuggagggcaauggcc

SEQ ID NO: 827877 - RNA, 22 nt, Human
aaucuucuacuugacaguucuc

SEQ ID NO: 827878 - RNA, 22 nt, Human
cucacugugccuuuucccaaac

SEQ ID NO: 827879 - RNA, 22 nt, Human
gaggccaggagugcuguaaguu

SEQ ID NO: 827880 - RNA, 22 nt, Human
cagcuggccccacaguagaggc

SEQ ID NO: 827881 - RNA, 23 nt, Human
uccuuccuuugagaggcuccauc

SEQ ID NO: 827882 - RNA, 22 nt, Human
caggagggcccgagacucuucc

SEQ ID NO: 827883 - RNA, 22 nt, Human
guuuuauaggcuguugcuauau

SEQ ID NO: 827884 - RNA, 22 nt, Human
cagcugccugucuggaggcaau

SEQ ID NO: 827885 - RNA, 22 nt, Human
uugguuuagagagugugguuac

SEQ ID NO: 827886 - RNA, 22 nt, Human
cugaggaagacagcagcugugu

SEQ ID NO: 827887 - RNA, 19 nt, Human
ucauuguugguuugucggg

SEQ ID NO: 827888 - RNA, 22 nt, Human
gaggcagcuggguccggucggg

SEQ ID NO: 827889 - RNA, 22 nt, Human
aggacagcagugcuggcacuug

SEQ ID NO: 827890 - RNA, 22 nt, Human
uccaggaggaggaaggcugcca

SEQ ID NO: 827891 - RNA, 22 nt, Human
gagaggaguuacuauuuccgag

SEQ ID NO: 827892 - RNA, 22 nt, Human
aggcaguuuaggcagcgauuua

SEQ ID NO: 827893 - RNA, 22 nt, Human
cagcuggcuggucagugcacaa

SEQ ID NO: 827894 - RNA, 22 nt, Human
uggcagcugucuguggggucuc

SEQ ID NO: 827895 - RNA, 22 nt, Human
aaugucugcucuacucaggagg

SEQ ID NO: 827896 - RNA, 22 nt, Human
uggcagcuauggucuaagggcc

SEQ ID NO: 827897 - RNA, 22 nt, Human
agagggaucacccuguuucugg

SEQ ID NO: 827898 - RNA, 22 nt, Human
gaggaaccaaaucagcuugcac

SEQ ID NO: 827899 - RNA, 23 nt, Human
ccacagagcugccaauuccugug

SEQ ID NO: 827900 - RNA, 22 nt, Human
aggcaguggcugagaccagggg

SEQ ID NO: 827901 - RNA, 22 nt, Human
ugcugagguuucgucugcuugc

SEQ ID NO: 827902 - RNA, 22 nt, Human
aucaggauagucuguaaauugu

SEQ ID NO: 827903 - RNA, 21 nt, Human
gcucagaguauugcacuguuu

SEQ ID NO: 827904 - RNA, 22 nt, Human
auguuuccauuuucuuguauca

SEQ ID NO: 827905 - RNA, 22 nt, Human
cuguguuggcuuuucucuugua

SEQ ID NO: 827906 - RNA, 22 nt, Human
aggcagaugggagcuggaaguu

SEQ ID NO: 827907 - RNA, 22 nt, Human
cagaccagcucuaugaacccaa

SEQ ID NO: 827908 - RNA, 22 nt, Human
auugaaagauuuugggcucaug

SEQ ID NO: 827909 - RNA, 22 nt, Human
ggacaagccugugaguggguuu

SEQ ID NO: 827910 - RNA, 22 nt, Human
acauguaaaaggaacaugcaug

SEQ ID NO: 827911 - RNA, 22 nt, Human
acaaauguggacauggauaaug

SEQ ID NO: 827912 - RNA, 22 nt, Human
agagggagcccagucauagcug

SEQ ID NO: 827913 - RNA, 22 nt, Human
uuccugagggacuuuugagauu

SEQ ID NO: 827914 - RNA, 20 nt, Human
cugcugugugugccucagcc

SEQ ID NO: 827915 - RNA, 22 nt, Human
accaggagccauagagucaggc

SEQ ID NO: 827916 - RNA, 22 nt, Human
cuccacagcucaggcucagagu

SEQ ID NO: 827917 - RNA, 22 nt, Human
uccaggagguugagacugcagu

SEQ ID NO: 827918 - RNA, 22 nt, Human
cucagaagaacaaaggcucuac

SEQ ID NO: 827919 - RNA, 22 nt, Human
ccugcugugaagccaggccugu

SEQ ID NO: 827920 - RNA, 22 nt, Human
cugcugugcacccaggaaggcu

SEQ ID NO: 827921 - RNA, 22 nt, Human
agucccuguacuuuccacugcc

SEQ ID NO: 827922 - RNA, 17 nt, Human
cauuuguugaucaguug

SEQ ID NO: 827923 - RNA, 22 nt, Human
agaggagguccuuuucugaugu

SEQ ID NO: 827924 - RNA, 22 nt, Human
cagaagaggacuggguagcuca

SEQ ID NO: 827925 - RNA, 22 nt, Human
cacauauuugaugaagcuuugu

SEQ ID NO: 827926 - RNA, 19 nt, Human
uugaaauuguuugauaugg

SEQ ID NO: 827927 - RNA, 23 nt, Human
ugaaggccuggaggacgcguugu

SEQ ID NO: 827928 - RNA, 22 nt, Human
gaaaggccauuucugaggguuu

SEQ ID NO: 827929 - RNA, 17 nt, Human
cccacggaggugugaaa

SEQ ID NO: 827930 - RNA, 22 nt, Human
acccaggaggugacacagggcu

SEQ ID NO: 827931 - RNA, 22 nt, Human
ucucuucuaauuaggguccaug

SEQ ID NO: 827932 - RNA, 22 nt, Human
gaacccaggcuuuugaggcugu

SEQ ID NO: 827933 - RNA, 22 nt, Human
ggcagcugucucugaguuagca

SEQ ID NO: 827934 - RNA, 22 nt, Human
gugauuuucuccuccuagaagu

SEQ ID NO: 827935 - RNA, 22 nt, Human
cccaggagguuggggcuacagu

SEQ ID NO: 827936 - RNA, 22 nt, Human
cucaggauccaucuccugcccu

SEQ ID NO: 827937 - RNA, 22 nt, Human
ucucucuucaacccuuaacuag

SEQ ID NO: 827938 - RNA, 22 nt, Human
agugcuuuaccuagauaauguu

SEQ ID NO: 827939 - RNA, 22 nt, Human
agaccauagggaccucagguug

SEQ ID NO: 827940 - RNA, 22 nt, Human
agugcuuuagcauccaacuguc

SEQ ID NO: 827941 - RNA, 22 nt, Human
caggagagcccggguccgggcu

SEQ ID NO: 827942 - RNA, 22 nt, Human
uuugcaguagacaucuuauuuu

SEQ ID NO: 827943 - RNA, 22 nt, Human
uucaguaaaacacugcaauguc

SEQ ID NO: 827944 - RNA, 22 nt, Human
cuucuucaagagaaugggagac

SEQ ID NO: 827945 - RNA, 22 nt, Human
acuuugcagggcuugauaucca

SEQ ID NO: 827946 - RNA, 22 nt, Human
aaaauaacuucuacuauuugca

SEQ ID NO: 827947 - RNA, 22 nt, Human
aucuuucuauuucuaaaaacua

SEQ ID NO: 827948 - RNA, 22 nt, Human
ugacaguuaagguauacauuca

SEQ ID NO: 827949 - RNA, 22 nt, Human
gagaggagguggcuaugacagc

SEQ ID NO: 827950 - RNA, 22 nt, Human
cacaauuuccuugcuucacuuu

SEQ ID NO: 827951 - RNA, 22 nt, Human
gaucuucuauguaaugaagugu

SEQ ID NO: 827952 - RNA, 22 nt, Human
aucugcuugaaugagcaacagg

SEQ ID NO: 827953 - RNA, 22 nt, Human
uugcccagaguccacagcguac

SEQ ID NO: 827954 - RNA, 22 nt, Human
gcugcccauuccacuggauggu

SEQ ID NO: 827955 - RNA, 22 nt, Human
cgaggcagggaagcugcaaaag

SEQ ID NO: 827956 - RNA, 19 nt, Human
uucacaauuaugaaauuag

SEQ ID NO: 827957 - RNA, 22 nt, Human
agagagagggaaacugcuaaac

SEQ ID NO: 827958 - RNA, 22 nt, Human
aggaagcugcuggaguagugug

SEQ ID NO: 827959 - RNA, 21 nt, Human
ucauuugugaucugauuucca

SEQ ID NO: 827960 - RNA, 22 nt, Human
aggcugcucaguagauggagcu

SEQ ID NO: 827961 - RNA, 22 nt, Human
ggcaugcugcguacagaugaac

SEQ ID NO: 827962 - RNA, 22 nt, Human
cuuaaaaucuggcaguuagcua

SEQ ID NO: 827963 - RNA, 22 nt, Human
aaugagacacgugaagcagaug

SEQ ID NO: 827964 - RNA, 22 nt, Human
uugagaagaaauaguuugcaau

SEQ ID NO: 827965 - RNA, 22 nt, Human
cuucagaggggacucaaaguca

SEQ ID NO: 827966 - RNA, 22 nt, Human
agugcagcaugcuggggaggcu

SEQ ID NO: 827967 - RNA, 21 nt, Human
uucugggaaaugagcuggggc

SEQ ID NO: 827968 - RNA, 22 nt, Human
agaggcggagcuugcagugagc

SEQ ID NO: 827969 - RNA, 22 nt, Human
ccacagcugaccgcaggugagc

SEQ ID NO: 827970 - RNA, 23 nt, Human
acauacauggagauaaagugaug

SEQ ID NO: 827971 - RNA, 22 nt, Human
cugcuguguggauucaauggcu

SEQ ID NO: 827972 - RNA, 20 nt, Human
uuugucuguuaaguguuucu

SEQ ID NO: 827973 - RNA, 22 nt, Human
uuauucuucuucucuugccagg

SEQ ID NO: 827974 - RNA, 22 nt, Human
uauuucagguauggugugaaau

SEQ ID NO: 827975 - RNA, 22 nt, Human
gagugcaggccugagcaccauc

SEQ ID NO: 827976 - RNA, 22 nt, Human
gagagcaggaggcagcgggacg

SEQ ID NO: 827977 - RNA, 22 nt, Human
cacugucuuuugugaagacaau

SEQ ID NO: 827978 - RNA, 22 nt, Human
ucuuuuggaaaugaugugcagg

SEQ ID NO: 827979 - RNA, 22 nt, Human
cuugcugucuugcauuuagagc

SEQ ID NO: 827980 - RNA, 20 nt, Human
cccaggagugagcagcuuua

SEQ ID NO: 827981 - RNA, 22 nt, Human
cccagggaagccauuucugacu

SEQ ID NO: 827982 - RNA, 22 nt, Human
gcccaggaguuggaggcugcag

SEQ ID NO: 827983 - RNA, 22 nt, Human
aucaggaucugggagccugaaa

SEQ ID NO: 827984 - RNA, 22 nt, Human
cucacugacgaggaagcugaga

SEQ ID NO: 827985 - RNA, 22 nt, Human
gucccaggugggcuccaccucu

SEQ ID NO: 827986 - RNA, 17 nt, Human
ucaggauguagcaguag

SEQ ID NO: 827987 - RNA, 22 nt, Human
gcugcccagacauugaaucagg

SEQ ID NO: 827988 - RNA, 22 nt, Human
acaggagacccugcugguucug

SEQ ID NO: 827989 - RNA, 22 nt, Human
agcugccccaugagaggcaggu

SEQ ID NO: 827990 - RNA, 22 nt, Human
cugagccagcuggcaugugcua

SEQ ID NO: 827991 - RNA, 22 nt, Human
augaaacaguguguauagcaaa

SEQ ID NO: 827992 - RNA, 22 nt, Human
ccagugcuucuuugcuagcugg

SEQ ID NO: 827993 - RNA, 22 nt, Human
ugaggcagugugagauaauaaa

SEQ ID NO: 827994 - RNA, 17 nt, Human
ugauaguucauuuuaag

SEQ ID NO: 827995 - RNA, 22 nt, Human
ucuuugaauuucugacugucuu

SEQ ID NO: 827996 - RNA, 21 nt, Human
gcugcccaacccugcaucucc

SEQ ID NO: 827997 - RNA, 22 nt, Human
auaucacaguaguuguuuaguu

SEQ ID NO: 827998 - RNA, 21 nt, Human
cccaggaggagcuccggcucc

SEQ ID NO: 827999 - RNA, 22 nt, Human
uuacacaacaucuguauuauua

SEQ ID NO: 828000 - RNA, 22 nt, Human
gagagucuaggaaccucauaua

SEQ ID NO: 828001 - RNA, 20 nt, Human
agacaggagcccccauucag

SEQ ID NO: 828002 - RNA, 22 nt, Human
ccagaggaaaaauaucucccua

SEQ ID NO: 828003 - RNA, 22 nt, Human
aucacaaaggcugcuucaugau

SEQ ID NO: 828004 - RNA, 22 nt, Human
caacagcugaucuuugaugaag

SEQ ID NO: 828005 - RNA, 22 nt, Human
ucacugcugcugccaugaugga

SEQ ID NO: 828006 - RNA, 22 nt, Human
agggauggaagacuugaagacc

SEQ ID NO: 828007 - RNA, 22 nt, Human
acagcauugcuccaucucaaga

SEQ ID NO: 828008 - RNA, 22 nt, Human
ucaauucugguccucaggaacu

SEQ ID NO: 828009 - RNA, 22 nt, Human
guacauuucucuuguucuuauu

SEQ ID NO: 828010 - RNA, 22 nt, Human
uucaggaucacuaaacccucca

SEQ ID NO: 828011 - RNA, 19 nt, Human
uucuccaggcugcagaggg

SEQ ID NO: 828012 - RNA, 22 nt, Human
ggcagggaagcuggcaucacgg

SEQ ID NO: 828013 - RNA, 22 nt, Human
gaucauuugcaggaaacauuaa

SEQ ID NO: 828014 - RNA, 22 nt, Human
aaggaaccauuugugugcaugg

SEQ ID NO: 828015 - RNA, 22 nt, Human
agcugcuacugcucugccagag

SEQ ID NO: 828016 - RNA, 22 nt, Human
auaucaaacgaaguuauuuuaa

SEQ ID NO: 828017 - RNA, 22 nt, Human
aaggccagcuuguagggcuggu

SEQ ID NO: 828018 - RNA, 22 nt, Human
gaggccaaucaauagggcaaua

SEQ ID NO: 828019 - RNA, 20 nt, Human
gggugggagagucugagggu

SEQ ID NO: 828020 - RNA, 19 nt, Human
cucucacucgccacauccu

SEQ ID NO: 828021 - RNA, 22 nt, Human
caguuucuuggaugccaauuuc

SEQ ID NO: 828022 - RNA, 22 nt, Human
uuauccuggauuauauauguga

SEQ ID NO: 828023 - RNA, 22 nt, Human
caaaugauaccuauuacuaggc

SEQ ID NO: 828024 - RNA, 22 nt, Human
acucaggaaaaauguagugaua

SEQ ID NO: 828025 - RNA, 22 nt, Human
uugcugaagugaagguauguuu

SEQ ID NO: 828026 - RNA, 22 nt, Human
gaugagcauuguuucauguguu

SEQ ID NO: 828027 - RNA, 22 nt, Human
gaaggggacuggcagcugcaga

SEQ ID NO: 828028 - RNA, 22 nt, Human
uaggcagccagcaucaguuggg

SEQ ID NO: 828029 - RNA, 22 nt, Human
gucuauauauugcuugaauaau

SEQ ID NO: 828030 - RNA, 22 nt, Human
uuucaguuuaugucuugaauua

SEQ ID NO: 828031 - RNA, 22 nt, Human
gcuggcaggagccuuucccuuu

SEQ ID NO: 828032 - RNA, 22 nt, Human
aaguugagaugucauaggagac

SEQ ID NO: 828033 - RNA, 22 nt, Human
cccaggaggcagagcuugcagu

SEQ ID NO: 828034 - RNA, 18 nt, Human
uuugcaaaggaaguaugg

SEQ ID NO: 828035 - RNA, 22 nt, Human
uccuucuuugacaaguggcaga

SEQ ID NO: 828036 - RNA, 22 nt, Human
agugcugucaguuuuauagaua

SEQ ID NO: 828037 - RNA, 22 nt, Human
gaaguacaguuuuaucuagcca

SEQ ID NO: 828038 - RNA, 22 nt, Human
uauuucagcaagaagaaugugg

SEQ ID NO: 828039 - RNA, 22 nt, Human
ugguaauuuacgcauuucugua

SEQ ID NO: 828040 - RNA, 22 nt, Human
ucugggaaaugcuguuccuugu

SEQ ID NO: 828041 - RNA, 22 nt, Human
aggguggcugaguagauggaag

SEQ ID NO: 828042 - RNA, 22 nt, Human
ccaggacaaguguggccauggc

SEQ ID NO: 828043 - RNA, 22 nt, Human
cuacccagauccaggauggcua

SEQ ID NO: 828044 - RNA, 22 nt, Human
auaaagauuucuuuuucucuac

SEQ ID NO: 828045 - RNA, 22 nt, Human
cagugucuccagaugcuccaau

SEQ ID NO: 828046 - RNA, 22 nt, Human
ggacagaggguugacagaguau

SEQ ID NO: 828047 - RNA, 22 nt, Human
gcugcugugaauuuuuuaaaug

SEQ ID NO: 828048 - RNA, 22 nt, Human
gauuucuucauuuguggugaau

SEQ ID NO: 828049 - RNA, 22 nt, Human
gcaagcugcucuuauguggagg

SEQ ID NO: 828050 - RNA, 22 nt, Human
ucaggagagaaagaauacaauu

SEQ ID NO: 828051 - RNA, 23 nt, Human
cugcuguguuggucucgauggga

SEQ ID NO: 828052 - RNA, 22 nt, Human
ccaggagagcauugcacagagg

SEQ ID NO: 828053 - RNA, 20 nt, Human
aggcucagcugagcucuugg

SEQ ID NO: 828054 - RNA, 22 nt, Human
ucucacuuuccagacuuuucaa

SEQ ID NO: 828055 - RNA, 22 nt, Human
uccaggagucagacagauggug

SEQ ID NO: 828056 - RNA, 22 nt, Human
gccaggagccagcuucuuagca

SEQ ID NO: 828057 - RNA, 17 nt, Human
uugaacugcugagucag

SEQ ID NO: 828058 - RNA, 22 nt, Human
cuguaugaggaucagacuggac

SEQ ID NO: 828059 - RNA, 22 nt, Human
uccaugaggaccaaauucguag

SEQ ID NO: 828060 - RNA, 22 nt, Human
gcccaggauggcuggaggugcu

SEQ ID NO: 828061 - RNA, 22 nt, Human
uuucaaauagaaucuuuccaaa

SEQ ID NO: 828062 - RNA, 22 nt, Human
uucuucaaaacaacacuggccu

SEQ ID NO: 828063 - RNA, 22 nt, Human
ucaggaugguccuuuaugagaa

SEQ ID NO: 828064 - RNA, 22 nt, Human
aggggaugauccucccgcagcg

SEQ ID NO: 828065 - RNA, 22 nt, Human
cugcuguguuagcagguuuagu

SEQ ID NO: 828066 - RNA, 23 nt, Human
auugaugacuugauuacacuuuu

SEQ ID NO: 828067 - RNA, 22 nt, Human
auuugcuucugugaaaucaagu

SEQ ID NO: 828068 - RNA, 22 nt, Human
ugaacaguuucaagaaaacuuu

SEQ ID NO: 828069 - RNA, 22 nt, Human
gcucaggaccgaggggugggaa

SEQ ID NO: 828070 - RNA, 22 nt, Human
ccagacaggaacacacaucucc

SEQ ID NO: 828071 - RNA, 22 nt, Human
agugcuuugagcguuugaaaag

SEQ ID NO: 828072 - RNA, 18 nt, Human
ggcaucugcacagcagcc

SEQ ID NO: 828073 - RNA, 22 nt, Human
gacagguggggaaacuaaggua

SEQ ID NO: 828074 - RNA, 22 nt, Human
aggcagaggagaaugaucuucc

SEQ ID NO: 828075 - RNA, 22 nt, Human
guagccauuggcaaugaagccu

SEQ ID NO: 828076 - RNA, 22 nt, Human
uccugucuaaagaccugcaggc

SEQ ID NO: 828077 - RNA, 19 nt, Human
gcagcugcuugaaaagaaa

SEQ ID NO: 828078 - RNA, 22 nt, Human
agcuacccgaggacaggcuaag

SEQ ID NO: 828079 - RNA, 22 nt, Human
cccaggaacagggcucagaccc

SEQ ID NO: 828080 - RNA, 22 nt, Human
guugaaagcuuuucauuuaguu

SEQ ID NO: 828081 - RNA, 21 nt, Human
ucucugguuggaguugugcca

SEQ ID NO: 828082 - RNA, 22 nt, Human
caacauuucaaggucuuuagga

SEQ ID NO: 828083 - RNA, 22 nt, Human
cucaagacugaucgcaguggaa

SEQ ID NO: 828084 - RNA, 18 nt, Human
cugcccagagcacuugug

SEQ ID NO: 828085 - RNA, 22 nt, Human
gagaaaugcaugcaugucauca

SEQ ID NO: 828086 - RNA, 22 nt, Human
uucuuaaaacuuauggacaggu

SEQ ID NO: 828087 - RNA, 22 nt, Human
cagucuucuaaccuagcagccu

SEQ ID NO: 828088 - RNA, 22 nt, Human
ugaggcaggacauggacaacug

SEQ ID NO: 828089 - RNA, 22 nt, Human
guuuuauaggugaaauauuacu

SEQ ID NO: 828090 - RNA, 22 nt, Human
caugucuguguacacaugcaca

SEQ ID NO: 828091 - RNA, 22 nt, Human
ucauuugugugagugauuugac

SEQ ID NO: 828092 - RNA, 22 nt, Human
ggugagggaguggaacgaggug

SEQ ID NO: 828093 - RNA, 22 nt, Human
aggcaggcucaggcccaugcuu

SEQ ID NO: 828094 - RNA, 22 nt, Human
caaggccaguccauuuuggaag

SEQ ID NO: 828095 - RNA, 22 nt, Human
ucaggaggccaccaggaccugu

SEQ ID NO: 828096 - RNA, 22 nt, Human
acuuggcaaguaucuauaaagu

SEQ ID NO: 828097 - RNA, 22 nt, Human
uucugaaccauugagcacugcc

SEQ ID NO: 828098 - RNA, 22 nt, Human
caggcagggagcuggaaaggau

SEQ ID NO: 828099 - RNA, 22 nt, Human
uuuuuggguccaggcuguaucu

SEQ ID NO: 828100 - RNA, 22 nt, Human
uccauuuucuugcucuagguaa

SEQ ID NO: 828101 - RNA, 21 nt, Human
auacauucuauuaagcauuua

SEQ ID NO: 828102 - RNA, 21 nt, Human
agaggcaggcauuaaguacac

SEQ ID NO: 828103 - RNA, 22 nt, Human
gucaggaucucccaguacauau

SEQ ID NO: 828104 - RNA, 22 nt, Human
cauuuguuaaccaguguggauu

SEQ ID NO: 828105 - RNA, 22 nt, Human
agacaggaugcauacucuuggu

SEQ ID NO: 828106 - RNA, 22 nt, Human
ucugcaggcuuggaguggcagc

SEQ ID NO: 828107 - RNA, 22 nt, Human
uucagcaagaccaccauguacc

SEQ ID NO: 828108 - RNA, 22 nt, Human
cugcugugcauauuuaucuagg

SEQ ID NO: 828109 - RNA, 22 nt, Human
gaaucucaaggcuugugaggau

SEQ ID NO: 828110 - RNA, 22 nt, Human
ggaggaggggugacugaaugcu

SEQ ID NO: 828111 - RNA, 22 nt, Human
augcuuuuaugucacaugguca

SEQ ID NO: 828112 - RNA, 22 nt, Human
acaguacauaauccugagucug

SEQ ID NO: 828113 - RNA, 22 nt, Human
aauauuguuucaagaucacaga

SEQ ID NO: 828114 - RNA, 22 nt, Human
gggagacacgcugcaggcauaa

SEQ ID NO: 828115 - RNA, 22 nt, Human
uaaggccagcaugaaugcagca

SEQ ID NO: 828116 - RNA, 22 nt, Human
gucaggaugggcagccaaacua

SEQ ID NO: 828117 - RNA, 22 nt, Human
ucaucuugcugccauugcuuua

SEQ ID NO: 828118 - RNA, 22 nt, Human
ucuuagaaugucaacugauguu

SEQ ID NO: 828119 - RNA, 22 nt, Human
ggcaggcucagcagccaaggag

SEQ ID NO: 828120 - RNA, 22 nt, Human
aaaggaagauugagcuuuucca

SEQ ID NO: 828121 - RNA, 22 nt, Human
ugcuuucaaaggcuuucuagau

SEQ ID NO: 828122 - RNA, 22 nt, Human
cuugggaaugcuaacagaugac

SEQ ID NO: 828123 - RNA, 22 nt, Human
ucagugcacagagauuuuuguu

SEQ ID NO: 828124 - RNA, 19 nt, Human
ggucagcugggcuagaggc

SEQ ID NO: 828125 - RNA, 22 nt, Human
uuuacuuuugguaaggucauuu

SEQ ID NO: 828126 - RNA, 22 nt, Human
aggcuggagggcaauggcaaga

SEQ ID NO: 828127 - RNA, 22 nt, Human
gcagggaagacccggagcagcg

SEQ ID NO: 828128 - RNA, 22 nt, Human
ugaggcaggagaaucaccggaa

SEQ ID NO: 828129 - RNA, 20 nt, Human
augugucuguaaacaacucu

SEQ ID NO: 828130 - RNA, 22 nt, Human
ccuggagauuucuucaagcuuu

SEQ ID NO: 828131 - RNA, 22 nt, Human
ucugaaggugcuagagaaagcu

SEQ ID NO: 828132 - RNA, 22 nt, Human
aguccaaggagagacagcauuu

SEQ ID NO: 828133 - RNA, 22 nt, Human
uaucuguuccaggcacucagcu

SEQ ID NO: 828134 - RNA, 22 nt, Human
cucuucuuuaguccagaccauc

SEQ ID NO: 828135 - RNA, 22 nt, Human
cauuuguauguuccuccuuagg

SEQ ID NO: 828136 - RNA, 22 nt, Human
aucugccugagucuagguuuuc

SEQ ID NO: 828137 - RNA, 18 nt, Human
gagucuuuguuacugcug

SEQ ID NO: 828138 - RNA, 22 nt, Human
auacauauaugguacuuccugg

SEQ ID NO: 828139 - RNA, 22 nt, Human
aaauuguugaucuacaguaagg

SEQ ID NO: 828140 - RNA, 22 nt, Human
aagaggagacuucagcaacuug

SEQ ID NO: 828141 - RNA, 22 nt, Human
uagcuaucuguguccagaucca

SEQ ID NO: 828142 - RNA, 22 nt, Human
auucuucagaauaucuggcacu

SEQ ID NO: 828143 - RNA, 22 nt, Human
aagcaaaggcaggagcuuguga

SEQ ID NO: 828144 - RNA, 22 nt, Human
auggaaagugcauggaagucau

SEQ ID NO: 828145 - RNA, 22 nt, Human
uagcuuuccuuguugccugugc

SEQ ID NO: 828146 - RNA, 22 nt, Human
gacccaggguggucaccugaaa

SEQ ID NO: 828147 - RNA, 22 nt, Human
auuuaaauuuucugauggagag

SEQ ID NO: 828148 - RNA, 22 nt, Human
ccauuguaaauucuguggaagu

SEQ ID NO: 828149 - RNA, 22 nt, Human
aaucuguuuaguucugcguaug

SEQ ID NO: 828150 - RNA, 22 nt, Human
cucuggcuucuaccuugcaguu

SEQ ID NO: 828151 - RNA, 22 nt, Human
cagcuagcuaagaaggccagag

SEQ ID NO: 828152 - RNA, 22 nt, Human
acaguggagaaggcaugaggcu

SEQ ID NO: 828153 - RNA, 22 nt, Human
gaggagagagggacugucugca

SEQ ID NO: 828154 - RNA, 22 nt, Human
gcagaggcuguagggaagguug

SEQ ID NO: 828155 - RNA, 23 nt, Human
uuuauccaacucuguaaucucuc

SEQ ID NO: 828156 - RNA, 17 nt, Human
gccucugcuugugucau

SEQ ID NO: 828157 - RNA, 22 nt, Human
ggccagcucugcacagcagcug

SEQ ID NO: 828158 - RNA, 22 nt, Human
uucaggauggcggauguugggg

SEQ ID NO: 828159 - RNA, 22 nt, Human
cauucauuagaauagauaugua

SEQ ID NO: 828160 - RNA, 22 nt, Human
ggacagcucugccaggagcuca

SEQ ID NO: 828161 - RNA, 22 nt, Human
gaauauuuuuaaagggacuaau

SEQ ID NO: 828162 - RNA, 22 nt, Human
gcugccagcuuuccuuggcuga

SEQ ID NO: 828163 - RNA, 22 nt, Human
gcaggggcuaaggacacagaga

SEQ ID NO: 828164 - RNA, 22 nt, Human
uaaggccaaggggccauagucu

SEQ ID NO: 828165 - RNA, 22 nt, Human
uucuucuuuccuauaauuaauu

SEQ ID NO: 828166 - RNA, 22 nt, Human
aacuagucagugauucucagaa

SEQ ID NO: 828167 - RNA, 22 nt, Human
aggggagguggcagaaaugugc

SEQ ID NO: 828168 - RNA, 19 nt, Human
uccaggaggcugccauuga

SEQ ID NO: 828169 - RNA, 22 nt, Human
uuugcaguuucauugcugaaau

SEQ ID NO: 828170 - RNA, 22 nt, Human
ggaggggagguccagcugaucu

SEQ ID NO: 828171 - RNA, 22 nt, Human
cucagagaggcaguggaaguca

SEQ ID NO: 828172 - RNA, 22 nt, Human
acacaaguucuaaagauugcgc

SEQ ID NO: 828173 - RNA, 22 nt, Human
aggcaguuguugcugagcagcu

SEQ ID NO: 828174 - RNA, 22 nt, Human
gcucccaggcauggagguaauu

SEQ ID NO: 828175 - RNA, 22 nt, Human
agaaaugacaagacugaucagg

SEQ ID NO: 828176 - RNA, 22 nt, Human
aggcagcaugggccccagcucc

SEQ ID NO: 828177 - RNA, 22 nt, Human
cugcacaguuugauuucuugcu

SEQ ID NO: 828178 - RNA, 22 nt, Human
uuuaucuuuaggacuuugcaga

SEQ ID NO: 828179 - RNA, 22 nt, Human
gcugcugucacggugcuaaggg

SEQ ID NO: 828180 - RNA, 22 nt, Human
ucugcuguauuagguugaacug

SEQ ID NO: 828181 - RNA, 19 nt, Human
caggagagcaugcacuuug

SEQ ID NO: 828182 - RNA, 22 nt, Human
uauguguuugacacccugcaag

SEQ ID NO: 828183 - RNA, 22 nt, Human
cuuucauucuuagauauuagug

SEQ ID NO: 828184 - RNA, 22 nt, Human
ucccaggaugaagacaguguug

SEQ ID NO: 828185 - RNA, 22 nt, Human
gaaacuguauguaguuuuuggg

SEQ ID NO: 828186 - RNA, 22 nt, Human
uucuacaugguugcucagaggg

SEQ ID NO: 828187 - RNA, 22 nt, Human
cagcucccgccaucgggaggca

SEQ ID NO: 828188 - RNA, 22 nt, Human
ucuuccaagguugcacacuauc

SEQ ID NO: 828189 - RNA, 22 nt, Human
gagugcagaugccagccccagu

SEQ ID NO: 828190 - RNA, 20 nt, Human
cccaggagcugugccccauc

SEQ ID NO: 828191 - RNA, 22 nt, Human
agagggcagggcgguaaguccu

SEQ ID NO: 828192 - RNA, 22 nt, Human
ugaaaugacaaagguuuuucuu

SEQ ID NO: 828193 - RNA, 22 nt, Human
uuuggacuuagccugcagaauu

SEQ ID NO: 828194 - RNA, 22 nt, Human
agggcagccauugagggauucu

SEQ ID NO: 828195 - RNA, 22 nt, Human
ucugggaaccagugcggcuggg

SEQ ID NO: 828196 - RNA, 22 nt, Human
gcuggcuugauaguuucugcuu

SEQ ID NO: 828197 - RNA, 17 nt, Human
gcuguaguuugauaaga

SEQ ID NO: 828198 - RNA, 22 nt, Human
cugccaggcagggagauggcug

SEQ ID NO: 828199 - RNA, 22 nt, Human
ucucagucuuugcaaggaugcu

SEQ ID NO: 828200 - RNA, 22 nt, Human
auaaaugauucagcaggaaaua

SEQ ID NO: 828201 - RNA, 18 nt, Human
ggucuuuaggucaguguc

SEQ ID NO: 828202 - RNA, 19 nt, Human
uuugaaaggauuguuauuu

SEQ ID NO: 828203 - RNA, 22 nt, Human
auguuucaccaguuuuauaaga

SEQ ID NO: 828204 - RNA, 22 nt, Human
uucuucaaugugcccuguuuuc

SEQ ID NO: 828205 - RNA, 22 nt, Human
ugcugcuguauccuuaguguca

SEQ ID NO: 828206 - RNA, 22 nt, Human
ucucaggagccacagcgggagu

SEQ ID NO: 828207 - RNA, 22 nt, Human
gaaauuauugcuagagacugca

SEQ ID NO: 828208 - RNA, 22 nt, Human
ugcccaggauugugaggucagg

SEQ ID NO: 828209 - RNA, 22 nt, Human
ugagacaguuuuucuauuucca

SEQ ID NO: 828210 - RNA, 22 nt, Human
cugcagagcaaguaacauccuc

SEQ ID NO: 828211 - RNA, 22 nt, Human
uccaggagguaugaguggcccc

SEQ ID NO: 828212 - RNA, 22 nt, Human
ggcagcuguaagaugagugaau

SEQ ID NO: 828213 - RNA, 22 nt, Human
ucgcugugguuucuguacaugg

SEQ ID NO: 828214 - RNA, 22 nt, Human
cauuuuaagaugaccugguuuc

SEQ ID NO: 828215 - RNA, 22 nt, Human
uggaaggaagccaaggaagguu

SEQ ID NO: 828216 - RNA, 22 nt, Human
uccauuuucaucucauguauaa

SEQ ID NO: 828217 - RNA, 22 nt, Human
acaccauacucauguugguucc

SEQ ID NO: 828218 - RNA, 22 nt, Human
aagcgccaugguuccugcgcag

SEQ ID NO: 828219 - RNA, 22 nt, Human
gagagaggccuccauguacuga

SEQ ID NO: 828220 - RNA, 21 nt, Human
ucacuagugccuucugucauu

SEQ ID NO: 828221 - RNA, 20 nt, Human
cccaggaguuugcucuuacu

SEQ ID NO: 828222 - RNA, 22 nt, Human
ugaauaguccuuggaauaacug

SEQ ID NO: 828223 - RNA, 22 nt, Human
uuugcagugucagcuucugugu

SEQ ID NO: 828224 - RNA, 22 nt, Human
agugcuguaacaacuuauuugg

SEQ ID NO: 828225 - RNA, 23 nt, Human
aaauuauugcucuucaauugccu

SEQ ID NO: 828226 - RNA, 22 nt, Human
uucacagacuuuccauagauug

SEQ ID NO: 828227 - RNA, 22 nt, Human
ugcaggaaauuccaggguggcc

SEQ ID NO: 828228 - RNA, 22 nt, Human
agcacauucugccuugcuuugc

SEQ ID NO: 828229 - RNA, 22 nt, Human
uacucagagucauugcccuucu

SEQ ID NO: 828230 - RNA, 22 nt, Human
uccaugaguuugaggaaaagag

SEQ ID NO: 828231 - RNA, 18 nt, Human
aguaaagcuuauuacaug

SEQ ID NO: 828232 - RNA, 22 nt, Human
uuggaauucaaguuguagcuua

SEQ ID NO: 828233 - RNA, 22 nt, Human
uggaaggaaagguagcagagaa

SEQ ID NO: 828234 - RNA, 22 nt, Human
gauguguuuccaggauuuguuu

SEQ ID NO: 828235 - RNA, 22 nt, Human
uauuugcaacauaaaacucuga

SEQ ID NO: 828236 - RNA, 22 nt, Human
caggcagcagccacucugguau

SEQ ID NO: 828237 - RNA, 22 nt, Human
cugcccaggaaccagaggggca

SEQ ID NO: 828238 - RNA, 22 nt, Human
aacauacauauuucagugucca

SEQ ID NO: 828239 - RNA, 22 nt, Human
cacugagcugauagaauuccag

SEQ ID NO: 828240 - RNA, 22 nt, Human
ucaaauaccagcaauuucaugu

SEQ ID NO: 828241 - RNA, 22 nt, Human
cccaggaggguggccucugccc

SEQ ID NO: 828242 - RNA, 19 nt, Human
uggcaucuguaaaauggug

SEQ ID NO: 828243 - RNA, 22 nt, Human
aggaagcuccaugaaggcagag

SEQ ID NO: 828244 - RNA, 22 nt, Human
gaggccagggaugcaaugagag

SEQ ID NO: 828245 - RNA, 19 nt, Human
cuugcugggugguuucugc

SEQ ID NO: 828246 - RNA, 20 nt, Human
ucucuucuggggagauaaaa

SEQ ID NO: 828247 - RNA, 22 nt, Human
augcugugucaggaauuugaua

SEQ ID NO: 828248 - RNA, 22 nt, Human
uaucuguuggcuccuaguugua

SEQ ID NO: 828249 - RNA, 22 nt, Human
ugcuggguagaaguauuagucu

SEQ ID NO: 828250 - RNA, 22 nt, Human
cucuucuuggcccccaugaggg

SEQ ID NO: 828251 - RNA, 22 nt, Human
accaggaggcuacacuguccca

SEQ ID NO: 828252 - RNA, 23 nt, Human
cccauuuucauguuaacuccugg

SEQ ID NO: 828253 - RNA, 22 nt, Human
ucuuugcaggccaaauuguuaa

SEQ ID NO: 828254 - RNA, 22 nt, Human
gaggaggcacuugagcagaugu

SEQ ID NO: 828255 - RNA, 22 nt, Human
augcugugucuagcaggaacac

SEQ ID NO: 828256 - RNA, 22 nt, Human
auugaaagguuuugagcagaua

SEQ ID NO: 828257 - RNA, 22 nt, Human
gucaggauuuuaaaaucccagu

SEQ ID NO: 828258 - RNA, 22 nt, Human
aguauugugacucaaguauucu

SEQ ID NO: 828259 - RNA, 22 nt, Human
cuugaaagcuuugcgucuucua

SEQ ID NO: 828260 - RNA, 22 nt, Human
augcuguguggccaccuccaug

SEQ ID NO: 828261 - RNA, 22 nt, Human
gggcacagaagucuaagacauc

SEQ ID NO: 828262 - RNA, 22 nt, Human
aaggcagcacagcaacugcuca

SEQ ID NO: 828263 - RNA, 19 nt, Human
uuucccagcccuugcugug

SEQ ID NO: 828264 - RNA, 22 nt, Human
aucaggaucaugcuggguggga

SEQ ID NO: 828265 - RNA, 22 nt, Human
gaggagagaacauuccuccaua

SEQ ID NO: 828266 - RNA, 22 nt, Human
aggcagcuggaggcagagacua

SEQ ID NO: 828267 - RNA, 22 nt, Human
uguggaaaagaauaagggagau

SEQ ID NO: 828268 - RNA, 22 nt, Human
uacccaggggcugagcagaggu

SEQ ID NO: 828269 - RNA, 22 nt, Human
cauuuucaugaguuucuguuca

SEQ ID NO: 828270 - RNA, 22 nt, Human
ucugaacuccagcccugcucuc

SEQ ID NO: 828271 - RNA, 22 nt, Human
uuucaucuuccuuggcauaggu

SEQ ID NO: 828272 - RNA, 22 nt, Human
uugcugaaaucuaugacauccu

SEQ ID NO: 828273 - RNA, 22 nt, Human
auugaaaggcaaaguaggaagc

SEQ ID NO: 828274 - RNA, 23 nt, Human
uucuucucaauuaguugauucag

SEQ ID NO: 828275 - RNA, 22 nt, Human
gcuggcagggacagcugcgugu

SEQ ID NO: 828276 - RNA, 19 nt, Human
aaaaacuuaguccagaaag

SEQ ID NO: 828277 - RNA, 22 nt, Human
gaucauuuugaugcccuuuuag

SEQ ID NO: 828278 - RNA, 22 nt, Human
cugcuuugacuguuaagaacca

SEQ ID NO: 828279 - RNA, 22 nt, Human
ugaaaugaaacagaacauauca

SEQ ID NO: 828280 - RNA, 22 nt, Human
caggauggucuucauuuggcuc

SEQ ID NO: 828281 - RNA, 22 nt, Human
cuucuucaaccugaaaguuuca

SEQ ID NO: 828282 - RNA, 22 nt, Human
ugucuuuggaauauuuagcuga

SEQ ID NO: 828283 - RNA, 22 nt, Human
gaggcagagugcaccccaggag

SEQ ID NO: 828284 - RNA, 19 nt, Human
uucauucuuucuacuuacc

SEQ ID NO: 828285 - RNA, 22 nt, Human
ugaggggagguuggggcacauc

SEQ ID NO: 828286 - RNA, 22 nt, Human
ucuguggauuuuaguguucaug

SEQ ID NO: 828287 - RNA, 23 nt, Human
cccaggagccugaguccucucug

SEQ ID NO: 828288 - RNA, 21 nt, Human
uccaggagcacgggacuagga

SEQ ID NO: 828289 - RNA, 23 nt, Human
uugcauagacauccucauagauu

SEQ ID NO: 828290 - RNA, 22 nt, Human
guggaaugaauagauuugcauu

SEQ ID NO: 828291 - RNA, 22 nt, Human
aagacugugucuauggcuacuc

SEQ ID NO: 828292 - RNA, 22 nt, Human
uagcccagcaugagcagagcug

SEQ ID NO: 828293 - RNA, 22 nt, Human
uucugagacaauugagagucua

SEQ ID NO: 828294 - RNA, 22 nt, Human
ggccagaggugguacauagcuu

SEQ ID NO: 828295 - RNA, 22 nt, Human
uugcauuuaaguagauguuaca

SEQ ID NO: 828296 - RNA, 22 nt, Human
uucuguaauucuguuaguuuca

SEQ ID NO: 828297 - RNA, 22 nt, Human
auccauuugccgugcuaugugc

SEQ ID NO: 828298 - RNA, 22 nt, Human
uugggauuacagguguaagcca

SEQ ID NO: 828299 - RNA, 22 nt, Human
ugugagauuuuauuugauaugc

SEQ ID NO: 828300 - RNA, 22 nt, Human
gcuuuugagguccugcucagcc

SEQ ID NO: 828301 - RNA, 22 nt, Human
gaagaaguguaagucuguuuca

SEQ ID NO: 828302 - RNA, 22 nt, Human
uuccuggugguggugacagcac

SEQ ID NO: 828303 - RNA, 22 nt, Human
aguguucuagcgcugugcuugu

SEQ ID NO: 828304 - RNA, 22 nt, Human
aauaucuagccuuuagcagcuu

SEQ ID NO: 828305 - RNA, 22 nt, Human
augauuuguuaacagacuuaau

SEQ ID NO: 828306 - RNA, 22 nt, Human
gugauuuucuccuccuagaagu

SEQ ID NO: 828307 - RNA, 22 nt, Human
aguuggcauuuuauuuaaguau

SEQ ID NO: 828308 - RNA, 22 nt, Human
ugucuuacagcaaucuguucug

SEQ ID NO: 828309 - RNA, 22 nt, Human
auucugcugccuaguuuaugaa

SEQ ID NO: 828310 - RNA, 22 nt, Human
acauuucuccuacuuguuauuu

SEQ ID NO: 828311 - RNA, 22 nt, Human
auauaugaagaagucuugauua

SEQ ID NO: 828312 - RNA, 22 nt, Human
cccuugggcuucagcccuaccg

SEQ ID NO: 828313 - RNA, 22 nt, Human
uaucuuugguagcuuuccuaag

SEQ ID NO: 828314 - RNA, 23 nt, Human
acugccugugccgaucucucuca

SEQ ID NO: 828315 - RNA, 22 nt, Human
cucugguuucgcaggaaauaga

SEQ ID NO: 828316 - RNA, 22 nt, Human
cuuauuugcccauguuucuuua

SEQ ID NO: 828317 - RNA, 22 nt, Human
auauaguuggguuucauucuac

SEQ ID NO: 828318 - RNA, 22 nt, Human
uuuguguuguacuucugugcau

SEQ ID NO: 828319 - RNA, 16 nt, Human
ucucugcuucauaggu

SEQ ID NO: 828320 - RNA, 22 nt, Human
aauggagugguucuugcccucu

SEQ ID NO: 828321 - RNA, 22 nt, Human
guugggcugaagugugugcuua

SEQ ID NO: 828322 - RNA, 22 nt, Human
auuuccuauacaguuguccaua

SEQ ID NO: 828323 - RNA, 23 nt, Human
cauuugauccucacaauaaaugg

SEQ ID NO: 828324 - RNA, 22 nt, Human
agacaagagcugaggacauauu

SEQ ID NO: 828325 - RNA, 22 nt, Human
uuuggauugcuuggaugcuucg

SEQ ID NO: 828326 - RNA, 22 nt, Human
uugaugcugucuuucagaauca

SEQ ID NO: 828327 - RNA, 22 nt, Human
uaucaguccaggguuuugugac

SEQ ID NO: 828328 - RNA, 22 nt, Human
aauguuaaguuuagauuauaac

SEQ ID NO: 828329 - RNA, 22 nt, Human
ucucauuuacuuccacaggcug

SEQ ID NO: 828330 - RNA, 22 nt, Human
auauuuguuuggcagaguucag

SEQ ID NO: 828331 - RNA, 19 nt, Human
ugcucucuggugcuucaug

SEQ ID NO: 828332 - RNA, 22 nt, Human
caaagaugccaaaaggaagaca

SEQ ID NO: 828333 - RNA, 22 nt, Human
agaaaagaggcuuucuaagcau

SEQ ID NO: 828334 - RNA, 22 nt, Human
ugauucaguacuuucucuaacu

SEQ ID NO: 828335 - RNA, 22 nt, Human
auccauuuuuucagaaugcucu

SEQ ID NO: 828336 - RNA, 22 nt, Human
uagauucugacccucuuuuuac

SEQ ID NO: 828337 - RNA, 22 nt, Human
uucagauaagucaaguuaguau

SEQ ID NO: 828338 - RNA, 22 nt, Human
cugggcuccuaaccauccaggu

SEQ ID NO: 828339 - RNA, 22 nt, Human
uuuccuacugcccuauacacac

SEQ ID NO: 828340 - RNA, 22 nt, Human
acauauuuugaaagcuuucuaa

SEQ ID NO: 828341 - RNA, 22 nt, Human
cuuguuuucuucugcagucuau

SEQ ID NO: 828342 - RNA, 22 nt, Human
gucauuuuugacuuugaaguga

SEQ ID NO: 828343 - RNA, 22 nt, Human
ugucauauagaauguucuauga

SEQ ID NO: 828344 - RNA, 22 nt, Human
uauuacaguucgaguuucuagg

SEQ ID NO: 828345 - RNA, 22 nt, Human
ugcaugguuauauacuacuagu

SEQ ID NO: 828346 - RNA, 22 nt, Human
cuugggcuuagaagguaaguga

SEQ ID NO: 828347 - RNA, 20 nt, Human
ucuuuuauuggcagauccug

SEQ ID NO: 828348 - RNA, 17 nt, Human
aguuuuuggaccugugu

SEQ ID NO: 828349 - RNA, 20 nt, Human
auuugcuuaccuuguuucua

SEQ ID NO: 828350 - RNA, 22 nt, Human
uacauguuauuucacuauuggu

SEQ ID NO: 828351 - RNA, 22 nt, Human
ucaucuguuaugggaguuuuug

SEQ ID NO: 828352 - RNA, 22 nt, Human
acauuguugagccucuuguuca

SEQ ID NO: 828353 - RNA, 22 nt, Human
uuuguugguugcacuggugggu

SEQ ID NO: 828354 - RNA, 22 nt, Human
uaucuguauucugacagucacu

SEQ ID NO: 828355 - RNA, 22 nt, Human
ugguuuguauauguuugugaga

SEQ ID NO: 828356 - RNA, 17 nt, Human
uuuguucguuaguccgg

SEQ ID NO: 828357 - RNA, 22 nt, Human
uuucauguuggauacuguuuca

SEQ ID NO: 828358 - RNA, 19 nt, Human
uugcuucaugucuuuugcu

SEQ ID NO: 828359 - RNA, 22 nt, Human
uuauuuuguagcucugaucuuu

SEQ ID NO: 828360 - RNA, 22 nt, Human
ucauggaugauagcuucauugc

SEQ ID NO: 828361 - RNA, 22 nt, Human
ucucucugcagcccgggacacu

SEQ ID NO: 828362 - RNA, 22 nt, Human
cugaucuuaaguaacauuauuu

SEQ ID NO: 828363 - RNA, 22 nt, Human
cuucuucagaggccagccucug

SEQ ID NO: 828364 - RNA, 22 nt, Human
uucugauuguuggaggaugcuu

SEQ ID NO: 828365 - RNA, 22 nt, Human
auguuuguguuucccauucagg

SEQ ID NO: 828366 - RNA, 22 nt, Human
uugagauagguggaaucucuuu

SEQ ID NO: 828367 - RNA, 22 nt, Human
gucccauaaguagugcaacuug

SEQ ID NO: 828368 - RNA, 23 nt, Human
uuguucuuggaucuuccugaagc

SEQ ID NO: 828369 - RNA, 22 nt, Human
ucaaagaucagaugguuguagg

SEQ ID NO: 828370 - RNA, 22 nt, Human
cucugugaaccccuccuuucuu

SEQ ID NO: 828371 - RNA, 22 nt, Human
uuuugguaauuaaguagauauu

SEQ ID NO: 828372 - RNA, 20 nt, Human
uacaauauucccacuuugcu

SEQ ID NO: 828373 - RNA, 22 nt, Human
uguauuucugcuuucucuagua

SEQ ID NO: 828374 - RNA, 22 nt, Human
uacuuugucauucuaaccuucc

SEQ ID NO: 828375 - RNA, 22 nt, Human
gagaaagggaacuuacagagug

SEQ ID NO: 828376 - RNA, 22 nt, Human
guaauucugugugaaucuauua

SEQ ID NO: 828377 - RNA, 22 nt, Human
uuuguaguuguggaugcugaag

SEQ ID NO: 828378 - RNA, 23 nt, Human
aguguucagcauguaguaaauac

SEQ ID NO: 828379 - RNA, 22 nt, Human
ugcucccaggcauucucuguug

SEQ ID NO: 828380 - RNA, 22 nt, Human
ucuaauuuuggcauuuuaaccu

SEQ ID NO: 828381 - RNA, 22 nt, Human
guuucuuauuucaacuggaaca

SEQ ID NO: 828382 - RNA, 22 nt, Human
uggguguguccauauuuugacu

SEQ ID NO: 828383 - RNA, 22 nt, Human
ucucugguuauuaacuaacucc

SEQ ID NO: 828384 - RNA, 22 nt, Human
uuaaguauauccauuugacugg

SEQ ID NO: 828385 - RNA, 22 nt, Human
aucauuaacccuugaugcuggg

SEQ ID NO: 828386 - RNA, 22 nt, Human
caguuuuucaaaauuacaugau

SEQ ID NO: 828387 - RNA, 22 nt, Human
cuauuuucccauaugguugaca

SEQ ID NO: 828388 - RNA, 22 nt, Human
uagaagaacaugucaaacuaua

SEQ ID NO: 828389 - RNA, 22 nt, Human
uaucuguuuuuacagugucuuu

SEQ ID NO: 828390 - RNA, 22 nt, Human
ugauuugaaaccuuuggcaaga

SEQ ID NO: 828391 - RNA, 22 nt, Human
uguauauacacacucccauguu

SEQ ID NO: 828392 - RNA, 22 nt, Human
guauuucuuuacauaugcucau

SEQ ID NO: 828393 - RNA, 22 nt, Human
guguuuugugaggccuucuuuc

SEQ ID NO: 828394 - RNA, 19 nt, Human
auucuucucuuccugcugu

SEQ ID NO: 828395 - RNA, 22 nt, Human
uugucucuacagagaguaguag

SEQ ID NO: 828396 - RNA, 22 nt, Human
ucacuguuaauaaauagcaaag

SEQ ID NO: 828397 - RNA, 22 nt, Human
accagagcuggcagaguaucaa

SEQ ID NO: 828398 - RNA, 22 nt, Human
auuuggcauaggcagaggccca

SEQ ID NO: 828399 - RNA, 22 nt, Human
uuuacuuuugguaaggucauuu

SEQ ID NO: 828400 - RNA, 22 nt, Human
uuugaacuucuaccugucauau

SEQ ID NO: 828401 - RNA, 22 nt, Human
auauaccucauucuuugagugc

SEQ ID NO: 828402 - RNA, 22 nt, Human
cauuuugugcuagacacuaugg

SEQ ID NO: 828403 - RNA, 22 nt, Human
uuuucuaacaucuaguaauuug

SEQ ID NO: 828404 - RNA, 22 nt, Human
auuugcuuguucaccaguacuu

SEQ ID NO: 828405 - RNA, 22 nt, Human
gaguguuccagaaacuggcccu

SEQ ID NO: 828406 - RNA, 23 nt, Human
cuguuauauggguguuaugugcu

SEQ ID NO: 828407 - RNA, 22 nt, Human
ugcuuguauucauaucacagcu

SEQ ID NO: 828408 - RNA, 22 nt, Human
guuauucuauuaaugugauugu

SEQ ID NO: 828409 - RNA, 22 nt, Human
ugucuguccaucugucugggac

SEQ ID NO: 828410 - RNA, 22 nt, Human
uucuguuuauaauuugcaguug

SEQ ID NO: 828411 - RNA, 22 nt, Human
guuugcaaauuguguuaaagcu

SEQ ID NO: 828412 - RNA, 22 nt, Human
uaauuuugucacagugacaugc

SEQ ID NO: 828413 - RNA, 22 nt, Human
uuccuuggagucaaacagggag

SEQ ID NO: 828414 - RNA, 22 nt, Human
cuucuggguauuccagauaccu

SEQ ID NO: 828415 - RNA, 22 nt, Human
auguuguugaacucuuugcaug

SEQ ID NO: 828416 - RNA, 22 nt, Human
gagaugaagaggcccuuggagu

SEQ ID NO: 828417 - RNA, 22 nt, Human
uugauucugcugaucucggacg

SEQ ID NO: 828418 - RNA, 22 nt, Human
agggcucacuacaacccuggga

SEQ ID NO: 828419 - RNA, 22 nt, Human
uucuuucugggguccuucggcu

SEQ ID NO: 828420 - RNA, 22 nt, Human
caagauauguccuguuacuaag

SEQ ID NO: 828421 - RNA, 22 nt, Human
uagauuaucccugauuugucca

SEQ ID NO: 828422 - RNA, 22 nt, Human
uaggauaugcauuuuuauacau

SEQ ID NO: 828423 - RNA, 22 nt, Human
guuguuuuugaacggugguggc

SEQ ID NO: 828424 - RNA, 22 nt, Human
uucugauugcugaugaggccca

SEQ ID NO: 828425 - RNA, 22 nt, Human
cugguuuuccaauguuuugacu

SEQ ID NO: 828426 - RNA, 22 nt, Human
auggaguugagcucuguugucc

SEQ ID NO: 828427 - RNA, 22 nt, Human
uaaguauguuagaaaaucaagu

SEQ ID NO: 828428 - RNA, 22 nt, Human
uauuaugguuguagguuaacaa

SEQ ID NO: 828429 - RNA, 21 nt, Human
ucagcuugcuucauuauuaug

SEQ ID NO: 828430 - RNA, 22 nt, Human
ccuaugaaagacaggagaugcg

SEQ ID NO: 828431 - RNA, 22 nt, Human
ccuuuguucacuggagagugga

SEQ ID NO: 828432 - RNA, 22 nt, Human
ucuuucagaaacuuugucugcg

SEQ ID NO: 828433 - RNA, 23 nt, Human
gccagagcugccugcccuugcug

SEQ ID NO: 828434 - RNA, 22 nt, Human
uucucugaguacguuucagugu

SEQ ID NO: 828435 - RNA, 18 nt, Human
uuugggauccucuuuucu

SEQ ID NO: 828436 - RNA, 22 nt, Human
ugcugugagaccauuuguugag

SEQ ID NO: 828437 - RNA, 22 nt, Human
cuucucuuggguguggugucuu

SEQ ID NO: 828438 - RNA, 22 nt, Human
gucuguccacuuggaagcuccc

SEQ ID NO: 828439 - RNA, 22 nt, Human
cuugucuaguuccuggugaugu

SEQ ID NO: 828440 - RNA, 22 nt, Human
gugcagcugggcgcugaccuuc

SEQ ID NO: 828441 - RNA, 22 nt, Human
gcagcuuuggagguggaacucu

SEQ ID NO: 828442 - RNA, 22 nt, Human
uuccuuacauucauauggcuuc

SEQ ID NO: 828443 - RNA, 22 nt, Human
ucuugggcaauuucucuagagg

SEQ ID NO: 828444 - RNA, 22 nt, Human
agggcucagaaagcagguuuuc

SEQ ID NO: 828445 - RNA, 23 nt, Human
aacucuggcuagcauagaauaga

SEQ ID NO: 828446 - RNA, 22 nt, Human
ucauuguuucugcuuuucauga

SEQ ID NO: 828447 - RNA, 22 nt, Human
uguuugcucugacuaucuugcg

SEQ ID NO: 828448 - RNA, 22 nt, Human
gcauaaaggacuauaaggauca

SEQ ID NO: 828449 - RNA, 22 nt, Human
uugacuauacucuggcggaaaa

SEQ ID NO: 828450 - RNA, 23 nt, Human
uaucauuucagcucucugccugg

SEQ ID NO: 828451 - RNA, 22 nt, Human
cacaguuuuaucuuauacugau

SEQ ID NO: 828452 - RNA, 22 nt, Human
uaucuguagucucaugguuccu

SEQ ID NO: 828453 - RNA, 22 nt, Human
uaucacauacuucucauccagg

SEQ ID NO: 828454 - RNA, 22 nt, Human
gagaggaagccuucuguacuug

SEQ ID NO: 828455 - RNA, 22 nt, Human
gugguuguuuccagguuugaaa

SEQ ID NO: 828456 - RNA, 22 nt, Human
uuuugucagugagaacagaguu

SEQ ID NO: 828457 - RNA, 22 nt, Human
agauaucuuacacuuugaaguu

SEQ ID NO: 828458 - RNA, 22 nt, Human
aauuauugagcaucuacugugu

SEQ ID NO: 828459 - RNA, 22 nt, Human
aucauuugaacagaauuuguuu

SEQ ID NO: 828460 - RNA, 22 nt, Human
guacauauccuuuacguuuugu

SEQ ID NO: 828461 - RNA, 22 nt, Human
ucucuguaagcugccuucucgu

SEQ ID NO: 828462 - RNA, 22 nt, Human
uuuacuguuuacagcuaaugca

SEQ ID NO: 828463 - RNA, 22 nt, Human
agagaagagucuugucaaauua

SEQ ID NO: 828464 - RNA, 22 nt, Human
agauaaaguccaaacuguguag

SEQ ID NO: 828465 - RNA, 22 nt, Human
uuuggucuggaaucuucagggu

SEQ ID NO: 828466 - RNA, 22 nt, Human
gaauuguacugcaaucagggga

SEQ ID NO: 828467 - RNA, 18 nt, Human
agguauaugaaucucuuu

SEQ ID NO: 828468 - RNA, 22 nt, Human
uugauuugauuguaauggcucu

SEQ ID NO: 828469 - RNA, 22 nt, Human
cauuuuccucugcugguguuca

SEQ ID NO: 828470 - RNA, 22 nt, Human
uaucauuuuacugugacauuuu

SEQ ID NO: 828471 - RNA, 22 nt, Human
uucucucaguuaaacuuuguga

SEQ ID NO: 828472 - RNA, 22 nt, Human
cuuucuuucgaagacgugauua

SEQ ID NO: 828473 - RNA, 22 nt, Human
uuucauuauaaaaaguuggcuu

SEQ ID NO: 828474 - RNA, 22 nt, Human
uuguauuaaaauguguuucugu

SEQ ID NO: 828475 - RNA, 22 nt, Human
gagguauaguucuauuagauga

SEQ ID NO: 828476 - RNA, 22 nt, Human
uacucugcaggauggacuaugg

SEQ ID NO: 828477 - RNA, 22 nt, Human
aagauuuaccacuuuauucaag

SEQ ID NO: 828478 - RNA, 22 nt, Human
uucauugauuuccuuggaauaa

SEQ ID NO: 828479 - RNA, 22 nt, Human
uuugggcuguacaauuucugua

SEQ ID NO: 828480 - RNA, 22 nt, Human
ugugugaacucucugauguaca

SEQ ID NO: 828481 - RNA, 22 nt, Human
gugauuucagguuuuucauacu

SEQ ID NO: 828482 - RNA, 22 nt, Human
augugauacuccuucuagugga

SEQ ID NO: 828483 - RNA, 22 nt, Human
uaaggcuguuaggaggauuaaa

SEQ ID NO: 828484 - RNA, 22 nt, Human
aggcuuaacuacaauuuuugcc

SEQ ID NO: 828485 - RNA, 23 nt, Human
uuaagacuggcugaacuuaguag

SEQ ID NO: 828486 - RNA, 22 nt, Human
cagcuuguuuacaugcuuauuc

SEQ ID NO: 828487 - RNA, 22 nt, Human
aauaucaucucucuuuucugca

SEQ ID NO: 828488 - RNA, 22 nt, Human
cuugggcaggggaaacagcugc

SEQ ID NO: 828489 - RNA, 22 nt, Human
augcuacauuuugguuuauaaa

SEQ ID NO: 828490 - RNA, 22 nt, Human
ugcucuguucaguguaucuugu

SEQ ID NO: 828491 - RNA, 22 nt, Human
caaguaugagaaagcuauuacc

SEQ ID NO: 828492 - RNA, 22 nt, Human
auuguauacaagcuuaauuguu

SEQ ID NO: 828493 - RNA, 22 nt, Human
ucucuuugacccuuuagcucca

SEQ ID NO: 828494 - RNA, 22 nt, Human
gcagagcacccugcagugguau

SEQ ID NO: 828495 - RNA, 22 nt, Human
augguuuuguccucuuugguuc

SEQ ID NO: 828496 - RNA, 22 nt, Human
ccucaaaggccuggcaccagaa

SEQ ID NO: 828497 - RNA, 22 nt, Human
uagaucuuucacuacuguguag

SEQ ID NO: 828498 - RNA, 22 nt, Human
ucugcuguuuacugugugauau

SEQ ID NO: 828499 - RNA, 22 nt, Human
acaagauagcuuagaagauuca

SEQ ID NO: 828500 - RNA, 22 nt, Human
ugacuuuggacuagugauuuaa

SEQ ID NO: 828501 - RNA, 22 nt, Human
cgucauuuguaaaugaucaaga

SEQ ID NO: 828502 - RNA, 22 nt, Human
gcaguugcaggauuuguguugu

SEQ ID NO: 828503 - RNA, 22 nt, Human
ucuucaugaaauugauugcuua

SEQ ID NO: 828504 - RNA, 22 nt, Human
ugauaguaucugauuauuucac

SEQ ID NO: 828505 - RNA, 23 nt, Human
aucuguguguggguagggaugau

SEQ ID NO: 828506 - RNA, 20 nt, Human
uuugauugccccucugacuu

SEQ ID NO: 828507 - RNA, 22 nt, Human
cucucuguuaugcuuucaugaa

SEQ ID NO: 828508 - RNA, 17 nt, Human
cauucuguaaucuuucu

SEQ ID NO: 828509 - RNA, 22 nt, Human
guuuuguucaugaacauugggu

SEQ ID NO: 828510 - RNA, 22 nt, Human
cuugaguaaagaaguauuuuag

SEQ ID NO: 828511 - RNA, 23 nt, Human
auuuccuaaaagauaaucauuac

SEQ ID NO: 828512 - RNA, 22 nt, Human
ucugcuugugucuguccagccu

SEQ ID NO: 828513 - RNA, 22 nt, Human
agacauauuggcuugcuuuaau

SEQ ID NO: 828514 - RNA, 22 nt, Human
ucuaugaaccucugcaaugaca

SEQ ID NO: 828515 - RNA, 22 nt, Human
cagucauuaugggaguuaaucc

SEQ ID NO: 828516 - RNA, 22 nt, Human
cuugcuuuaucugguuucucau

SEQ ID NO: 828517 - RNA, 22 nt, Human
uuuuguguugccauguuaagca

SEQ ID NO: 828518 - RNA, 22 nt, Human
uuuuuugucuugaagaaauggu

SEQ ID NO: 828519 - RNA, 22 nt, Human
caauuuuuaaacuaugaaguug

SEQ ID NO: 828520 - RNA, 22 nt, Human
uuuucuuggaguggcuguccuu

SEQ ID NO: 828521 - RNA, 22 nt, Human
cacuguuuuacauguuauuuaa

SEQ ID NO: 828522 - RNA, 22 nt, Human
aagcagaaaaacugagcuccaa

SEQ ID NO: 828523 - RNA, 22 nt, Human
cucucuuuuucgugugccgaag

SEQ ID NO: 828524 - RNA, 22 nt, Human
uuaagagaagaguaucuagaac

SEQ ID NO: 828525 - RNA, 22 nt, Human
gagagaagggggauaugagccu

SEQ ID NO: 828526 - RNA, 22 nt, Human
cuccuuggguucuuucgguucc

SEQ ID NO: 828527 - RNA, 22 nt, Human
cuaguuuuaagcuccuugaggu

SEQ ID NO: 828528 - RNA, 22 nt, Human
cuagagaaaaagcuuagguacg

SEQ ID NO: 828529 - RNA, 22 nt, Human
cccauugugguuguugaggaua

SEQ ID NO: 828530 - RNA, 22 nt, Human
uguuggcagugcuacagucagu

SEQ ID NO: 828531 - RNA, 22 nt, Human
uuuguguuggaagaaaugcuac

SEQ ID NO: 828532 - RNA, 22 nt, Human
uuugacaugugcuuauaacuuu

SEQ ID NO: 828533 - RNA, 22 nt, Human
cuuguauuaggaagaaugcuuu

SEQ ID NO: 828534 - RNA, 22 nt, Human
ugugucuuuggcgaugucugga

SEQ ID NO: 828535 - RNA, 22 nt, Human
uucgcuuugcccguugucauuu

SEQ ID NO: 828536 - RNA, 22 nt, Human
cuuugugauaguguuaagacca

SEQ ID NO: 828537 - RNA, 21 nt, Human
uugauuuagcagaucuagcug

SEQ ID NO: 828538 - RNA, 22 nt, Human
cccagagcaugugcugccuuug

SEQ ID NO: 828539 - RNA, 22 nt, Human
uugcaaucagcaguguuuucac

SEQ ID NO: 828540 - RNA, 22 nt, Human
ucuuauugugaugaugaagaac

SEQ ID NO: 828541 - RNA, 22 nt, Human
uuucucuuucaaucugcaguac

SEQ ID NO: 828542 - RNA, 22 nt, Human
ugauuccugugcuuauuccagu

SEQ ID NO: 828543 - RNA, 22 nt, Human
uuucuucucacccaggacagag

SEQ ID NO: 828544 - RNA, 22 nt, Human
uuucuacacuucgugguguuuu

SEQ ID NO: 828545 - RNA, 23 nt, Human
acucugacuuaguuauagcuauu

SEQ ID NO: 828546 - RNA, 22 nt, Human
auacaugugugugcauacaugu

SEQ ID NO: 828547 - RNA, 22 nt, Human
uuauugagcacauaguaugugg

SEQ ID NO: 828548 - RNA, 22 nt, Human
cauuguguauuucuguaguacu

SEQ ID NO: 828549 - RNA, 22 nt, Human
aucaacuuguccuugauguuaa

SEQ ID NO: 828550 - RNA, 22 nt, Human
caauguuuuuccuuccuuaaua

SEQ ID NO: 828551 - RNA, 22 nt, Human
uuccuuggaaagagacgucgcu

SEQ ID NO: 828552 - RNA, 22 nt, Human
cuccaaaggauaaaagcagagu

SEQ ID NO: 828553 - RNA, 22 nt, Human
auugacuuucccuucuccucau

SEQ ID NO: 828554 - RNA, 22 nt, Human
uggcauuggaauuuguguugca

SEQ ID NO: 828555 - RNA, 22 nt, Human
uauaaacuccucuugcauuccu

SEQ ID NO: 828556 - RNA, 22 nt, Human
acucauuugcaugaugugcuau

SEQ ID NO: 828557 - RNA, 22 nt, Human
uucuucauucccuuacuuccga

SEQ ID NO: 828558 - RNA, 22 nt, Human
gggcugcacuagggcaagguga

SEQ ID NO: 828559 - RNA, 21 nt, Human
uuggaacaagcagcaguuugc

SEQ ID NO: 828560 - RNA, 22 nt, Human
aagaauaagaggauuuagaaca

SEQ ID NO: 828561 - RNA, 22 nt, Human
uuuauucucuaguuggucagau

SEQ ID NO: 828562 - RNA, 22 nt, Human
acaaaggugagcagaagacaca

SEQ ID NO: 828563 - RNA, 22 nt, Human
uuaagguucagaaaucaauacc

SEQ ID NO: 828564 - RNA, 22 nt, Human
guccuuucgagggugagugaaa

SEQ ID NO: 828565 - RNA, 22 nt, Human
gagacagagagguacucaacau

SEQ ID NO: 828566 - RNA, 22 nt, Human
cuguccauggcaaugaugcaga

SEQ ID NO: 828567 - RNA, 22 nt, Human
ugcugcuuguuuuguaaauaaa

SEQ ID NO: 828568 - RNA, 22 nt, Human
ucucaucugccauuugcaggag

SEQ ID NO: 828569 - RNA, 22 nt, Human
cuuucugaggagacgggcuuug

SEQ ID NO: 828570 - RNA, 22 nt, Human
ucuuuugagggccagaggaaga

SEQ ID NO: 828571 - RNA, 22 nt, Human
uuguuuguaaggcucuuagaau

SEQ ID NO: 828572 - RNA, 22 nt, Human parainfluenza virus 3
aagcauauugaauuauagauga

SEQ ID NO: 828573 - RNA, 22 nt, Human parainfluenza virus 3
aagcauauugaauuauagauga

SEQ ID NO: 828574 - RNA, 21 nt, Human parainfluenza virus 3
ucguuuuguucugggauuagu

SEQ ID NO: 828575 - RNA, 19 nt, Human
aguguguacugaaagcacu

SEQ ID NO: 828576 - RNA, 23 nt, Human
cagaaaucugaaaucuagaaaug

SEQ ID NO: 828577 - RNA, 22 nt, Human
gauuuacaaagcucucuagugu

SEQ ID NO: 828578 - RNA, 22 nt, Human
uggcagagugcagaagaggcau

SEQ ID NO: 828579 - RNA, 22 nt, Human
ugauggcuaucccuggaagggc

SEQ ID NO: 828580 - RNA, 22 nt, Human
aauaaucucccuuuuuguaugu

SEQ ID NO: 828581 - RNA, 22 nt, Human
caggagugagaugcgaucacuu

SEQ ID NO: 828582 - RNA, 22 nt, Human
aggugcagcaugaguccaacgg

SEQ ID NO: 828583 - RNA, 22 nt, Human
uggacagguuugggugccuguu

SEQ ID NO: 828584 - RNA, 22 nt, Human
uucaacuuuggagauuuaauaa

SEQ ID NO: 828585 - RNA, 22 nt, Human
cuguuaauugugaauuuuacau

SEQ ID NO: 828586 - RNA, 17 nt, Human
agccccucagcgucacc

SEQ ID NO: 828587 - RNA, 22 nt, Human
uuucacauuagauaugucauuu

SEQ ID NO: 828588 - RNA, 18 nt, Human
gagcccugagucugcaca

SEQ ID NO: 828589 - RNA, 22 nt, Human
uggcuuccuccagagcaggagg

SEQ ID NO: 828590 - RNA, 22 nt, Human
cacacuagucuauccauuagcu

SEQ ID NO: 828591 - RNA, 22 nt, Human
accucugcuucccggguucaag

SEQ ID NO: 828592 - RNA, 22 nt, Human
aacaguaaagacagaauuuauc

SEQ ID NO: 828593 - RNA, 22 nt, Human
aaauaauuauagcgagucuauc

SEQ ID NO: 828594 - RNA, 22 nt, Human
cccaggaaaagcagugccagca

SEQ ID NO: 828595 - RNA, 22 nt, Human
cugagcugguggaagcaugcag

SEQ ID NO: 828596 - RNA, 22 nt, Human
acaugcuuucuagguccuucug

SEQ ID NO: 828597 - RNA, 16 nt, Human
ucccaggaggcggaac

SEQ ID NO: 828598 - RNA, 22 nt, Human
gauuucaaccuaacaguaugac

SEQ ID NO: 828599 - RNA, 22 nt, Human
uaaacagaaagcagauguacuu

SEQ ID NO: 828600 - RNA, 21 nt, Human
ucuagaauccuguauaagacu

SEQ ID NO: 828601 - RNA, 22 nt, Human
aguaugaaucucuuuauucugc

SEQ ID NO: 828602 - RNA, 22 nt, Human
cagaaacauguauaaaguugua

SEQ ID NO: 828603 - RNA, 22 nt, Human
uugaaauaucaaguuauuagug

SEQ ID NO: 828604 - RNA, 22 nt, Human
uaaggcacgcauaagagggggc

SEQ ID NO: 828605 - RNA, 22 nt, Human
gcugaguguaaugauggcagag

SEQ ID NO: 828606 - RNA, 22 nt, Human
uuuuccucugcaauaaaagcag

SEQ ID NO: 828607 - RNA, 22 nt, Human
gggagcuggagcuggaagacuc

SEQ ID NO: 828608 - RNA, 17 nt, Human
aggcuggcucacaggga

SEQ ID NO: 828609 - RNA, 20 nt, Human
cuguaucagguuacaaagua

SEQ ID NO: 828610 - RNA, 22 nt, Human
uaggcaacaugucgaauacugu

SEQ ID NO: 828611 - RNA, 22 nt, Human
uccuugaauauaauaacaguag

SEQ ID NO: 828612 - RNA, 22 nt, Human
ccuguucacgguguguuguuag

SEQ ID NO: 828613 - RNA, 22 nt, Human
aaacggauauaacagcaaacgc

SEQ ID NO: 828614 - RNA, 22 nt, Human
gacccaggcccaaggcugccag

SEQ ID NO: 828615 - RNA, 18 nt, Human
agcagcugugccacacug

SEQ ID NO: 828616 - RNA, 22 nt, Human
aagccgggccugagaaaugaca

SEQ ID NO: 828617 - RNA, 22 nt, Human
gugccuggagcuaauguguaua

SEQ ID NO: 828618 - RNA, 22 nt, Human
gcuuuaaugcuucguggggcca

SEQ ID NO: 828619 - RNA, 22 nt, Human
cguguggucccggcaaggcaag

SEQ ID NO: 828620 - RNA, 22 nt, Human
gaaaugcauaaucuuaguagau

SEQ ID NO: 828621 - RNA, 22 nt, Human
aaaauggucucagcuggcacca

SEQ ID NO: 828622 - RNA, 22 nt, Human
ugcucuguauucuauggcaguu

SEQ ID NO: 828623 - RNA, 22 nt, Human
aaaugcacaggagaaccaauuc

SEQ ID NO: 828624 - RNA, 22 nt, Human
cacugaagguaggaccaaggcu

SEQ ID NO: 828625 - RNA, 22 nt, Human
ucaacugcaaguuugcuuaguu

SEQ ID NO: 828626 - RNA, 22 nt, Human
agaaauguuacaguuguuauuu

SEQ ID NO: 828627 - RNA, 22 nt, Human
cucuugaagcaggggccaguuc

SEQ ID NO: 828628 - RNA, 22 nt, Human
uacauucagcaaaagaaugguu

SEQ ID NO: 828629 - RNA, 22 nt, Human
aagaacuuccuaauauauuuuc

SEQ ID NO: 828630 - RNA, 22 nt, Human
agugcuuuauguuguugugcaa

SEQ ID NO: 828631 - RNA, 21 nt, Human
aaguaaaucagagaaauaacc

SEQ ID NO: 828632 - RNA, 22 nt, Human
agcucccagggcugggcaaguu

SEQ ID NO: 828633 - RNA, 22 nt, Human
ugucauugaggaaaacuaggug

SEQ ID NO: 828634 - RNA, 23 nt, Human
aagaauaaaugacauuaaaggug

SEQ ID NO: 828635 - RNA, 22 nt, Human
ggcugcuuuaucggcugcugaa

SEQ ID NO: 828636 - RNA, 22 nt, Human
auuuaaugucgagcuauuguag

SEQ ID NO: 828637 - RNA, 22 nt, Human
ugcuccauucucuagccagugc

SEQ ID NO: 828638 - RNA, 22 nt, Human
gcaguggcaugaugugggcuca

SEQ ID NO: 828639 - RNA, 22 nt, Human
uugcauuguaggauguuagaag

SEQ ID NO: 828640 - RNA, 22 nt, Human
gcaaaauuuacacuccuucuuc

SEQ ID NO: 828641 - RNA, 22 nt, Human
ggugcagaucuuucucuucagg

SEQ ID NO: 828642 - RNA, 22 nt, Human
gugcaugugcauccauguguac

SEQ ID NO: 828643 - RNA, 17 nt, Human
cugucugcgcaugaggu

SEQ ID NO: 828644 - RNA, 22 nt, Human
gagaugaauguaaacaaaggca

SEQ ID NO: 828645 - RNA, 22 nt, Human
ggcugcuugcuguuucuuggau

SEQ ID NO: 828646 - RNA, 21 nt, Human
acuguucauuugaugaacugg

SEQ ID NO: 828647 - RNA, 22 nt, Human
agcugccccaugagaggcaggu

SEQ ID NO: 828648 - RNA, 19 nt, Human
ccaggagagcuuggagaag

SEQ ID NO: 828649 - RNA, 22 nt, Human
uccagucaggcugaauucaagg

SEQ ID NO: 828650 - RNA, 22 nt, Human
auauuucuugagcaccugguau

SEQ ID NO: 828651 - RNA, 18 nt, Human
uggcagcaggaagccauu

SEQ ID NO: 828652 - RNA, 22 nt, Human
gcagcagagcuuuguccuggcu

SEQ ID NO: 828653 - RNA, 22 nt, Human
agccuguccagaggacagggcu

SEQ ID NO: 828654 - RNA, 21 nt, Human
ucauuugugaucugauuucca

SEQ ID NO: 828655 - RNA, 22 nt, Human
gccugagauucugcauuucuaa

SEQ ID NO: 828656 - RNA, 22 nt, Human
gcucugugggugaguagaaucu

SEQ ID NO: 828657 - RNA, 22 nt, Human
cugagcugcucccgcugcagcg

SEQ ID NO: 828658 - RNA, 22 nt, Human
cuggcagcuucaggacacucgg

SEQ ID NO: 828659 - RNA, 22 nt, Human
cagagggcucuuggcugccugc

SEQ ID NO: 828660 - RNA, 22 nt, Human
uugacaauguccuuugaauuuc

SEQ ID NO: 828661 - RNA, 22 nt, Human
auguaaggcugccuaugacacu

SEQ ID NO: 828662 - RNA, 22 nt, Human
aggcagcuggaggcagagacua

SEQ ID NO: 828663 - RNA, 22 nt, Human
uccucaggcggugaggaggggc

SEQ ID NO: 828664 - RNA, 22 nt, Human
gccccagccaaggugacacgaa

SEQ ID NO: 828665 - RNA, 22 nt, Human
aaguccuuuccaguccugugau

SEQ ID NO: 828666 - RNA, 19 nt, Human
ggccccucucacaggaguu

SEQ ID NO: 828667 - RNA, 22 nt, Human
caggcacuggccagucagcaca

SEQ ID NO: 828668 - RNA, 22 nt, Human
agagaauuuuaaaagccuugaa

SEQ ID NO: 828669 - RNA, 22 nt, Human
guuuuuaucuaauagcaguuau

SEQ ID NO: 828670 - RNA, 22 nt, Human
caguuucugggcguucacaggu

SEQ ID NO: 828671 - RNA, 22 nt, Human
gauuucaaagguucugcaugcc

SEQ ID NO: 828672 - RNA, 22 nt, Human
gccugccugcugucaucugccu

SEQ ID NO: 828673 - RNA, 22 nt, Human
acaaaguccugguguauggcca

SEQ ID NO: 828674 - RNA, 22 nt, Human
ucuccuucgaggcccagcuccc

SEQ ID NO: 828675 - RNA, 22 nt, Human
cuuguacauagagaagaagccu

SEQ ID NO: 828676 - RNA, 18 nt, Human
gcagcugacacuggaguu

SEQ ID NO: 828677 - RNA, 22 nt, Human
gaggaccacagaugagccugca

SEQ ID NO: 828678 - RNA, 22 nt, Human
ucugucugacaggguaugaacu

SEQ ID NO: 828679 - RNA, 22 nt, Human
uuuccucauuuaucugcuggga

SEQ ID NO: 828680 - RNA, 22 nt, Human
aucaguuuaaaugggcuguugg

SEQ ID NO: 828681 - RNA, 22 nt, Human
caggcagcugcgacaagagagc

SEQ ID NO: 828682 - RNA, 22 nt, Human
ucagccagugccuugaucuugc

SEQ ID NO: 828683 - RNA, 22 nt, Human
auuuguacaaauuuauguuagu

SEQ ID NO: 828684 - RNA, 22 nt, Human
agaggccuaauugcuacccuuu

SEQ ID NO: 828685 - RNA, 22 nt, Human
augguuuugaagggaggucaaa

SEQ ID NO: 828686 - RNA, 22 nt, Human
ugaggcagugauguuuaagcac

SEQ ID NO: 828687 - RNA, 23 nt, Human
uugauacagaagaaucaguuugu

SEQ ID NO: 828688 - RNA, 22 nt, Human
uaacaagucauuuuaaauuaug

SEQ ID NO: 828689 - RNA, 22 nt, Human
cugggaggacaacuuggagcuc

SEQ ID NO: 828690 - RNA, 22 nt, Human
uuucacauguggaaugccaggu

SEQ ID NO: 828691 - RNA, 22 nt, Human
uucuuacagcccuauuacuaaa

SEQ ID NO: 828692 - RNA, 22 nt, Human
gucuucuuguguugccugucuu

SEQ ID NO: 828693 - RNA, 22 nt, Human
ucuuacauauagcaugaguaca

SEQ ID NO: 828694 - RNA, 22 nt, Human
acuuugcagagccagaagagaa

SEQ ID NO: 828695 - RNA, 22 nt, Human
gcccaguaguucaagguugcag

SEQ ID NO: 828696 - RNA, 17 nt, Human
agugacuuggaaagagc

SEQ ID NO: 828697 - RNA, 22 nt, Human
gcccccucuuuggagccagcca

SEQ ID NO: 828698 - RNA, 22 nt, Human
ccugugugcugaugacgacaga

SEQ ID NO: 828699 - RNA, 19 nt, Human
caguggccuggaggucucu

SEQ ID NO: 828700 - RNA, 22 nt, Human
gccccagcucugccacaacuag

SEQ ID NO: 828701 - RNA, 22 nt, Human
cuggccugagcacagcggcugc

SEQ ID NO: 828702 - RNA, 22 nt, Human
ccagaggugcugggagaggucu

SEQ ID NO: 828703 - RNA, 22 nt, Human
cccuggaguccggagcucaccu

SEQ ID NO: 828704 - RNA, 22 nt, Human
caaaugcaaaauauaacccugu

SEQ ID NO: 828705 - RNA, 22 nt, Human
ugggacagggaaucugaucccc

SEQ ID NO: 828706 - RNA, 22 nt, Human
agcuggaggauaacucacuucu

SEQ ID NO: 828707 - RNA, 22 nt, Human
uucauuccuucuguaccuugcc

SEQ ID NO: 828708 - RNA, 22 nt, Human
cucauuaaaggaaaucaccugc

SEQ ID NO: 828709 - RNA, 22 nt, Human
cauugcugugggcauuugcugc

SEQ ID NO: 828710 - RNA, 22 nt, Human
ccacccugagccgcaagagcag

SEQ ID NO: 828711 - RNA, 22 nt, Human
gccuucagcccugacuggccag

SEQ ID NO: 828712 - RNA, 22 nt, Human
ugcaggccucacaccuggcacc

SEQ ID NO: 828713 - RNA, 22 nt, Human
uaucuacaggugucagguaaga

SEQ ID NO: 828714 - RNA, 22 nt, Human
uagcaucuggagaaacaagucc

SEQ ID NO: 828715 - RNA, 22 nt, Human
cauacuuugggauaagagugga

SEQ ID NO: 828716 - RNA, 22 nt, Human
uaaacaugugagugugcauaua

SEQ ID NO: 828717 - RNA, 22 nt, Human
uggccugccugggagcagcagg

SEQ ID NO: 828718 - RNA, 22 nt, Human
uggaccugcuggaugggcaggu

SEQ ID NO: 828719 - RNA, 22 nt, Human
ccagagccagagaggugccugc

SEQ ID NO: 828720 - RNA, 22 nt, Human
aggcaacuuuuggggaugaugg

SEQ ID NO: 828721 - RNA, 22 nt, Human
aagcagaguccccuucccaugg

SEQ ID NO: 828722 - RNA, 22 nt, Human
aauguacaaggguuccaguuuu

SEQ ID NO: 828723 - RNA, 22 nt, Human
gagcagugacuggagcaugaga

SEQ ID NO: 828724 - RNA, 16 nt, Human
uguuagcugugcauua

SEQ ID NO: 828725 - RNA, 22 nt, Human
uugugaaauguuucaaaauagu

SEQ ID NO: 828726 - RNA, 22 nt, Human
agcuagccuaggcagagugcau

SEQ ID NO: 828727 - RNA, 22 nt, Human
uuaguuuucccaucuuuauggu

SEQ ID NO: 828728 - RNA, 22 nt, Human
uggcucugcaccucaguguacc

SEQ ID NO: 828729 - RNA, 22 nt, Human
ucauccaguuguggagagggaa

SEQ ID NO: 828730 - RNA, 22 nt, Human
auguuacagaaagcaaagauga

SEQ ID NO: 828731 - RNA, 22 nt, Human
agggagcugcucugcuuccgug

SEQ ID NO: 828732 - RNA, 22 nt, Human
uauuuagaaugcguguacgugu

SEQ ID NO: 828733 - RNA, 22 nt, Human
uccaggagagguagaggguucc

SEQ ID NO: 828734 - RNA, 22 nt, Human
gcccagcacauugcugaggacc

SEQ ID NO: 828735 - RNA, 22 nt, Human
cuggggggagcugcguccagca

SEQ ID NO: 828736 - RNA, 22 nt, Human
ugccuguguccccuucuuggca

SEQ ID NO: 828737 - RNA, 21 nt, Human
gcaggggauagaaauggucug

SEQ ID NO: 828738 - RNA, 22 nt, Human
augcccgauaccuaguuaacuc

SEQ ID NO: 828739 - RNA, 22 nt, Human
uccuugaaaagaaugucuccau

SEQ ID NO: 828740 - RNA, 22 nt, Human
gagaggccaccugacgagcagu

SEQ ID NO: 828741 - RNA, 22 nt, Human
gcaggagcugcucuccugacga

SEQ ID NO: 828742 - RNA, 22 nt, Human
auuuguaauuucuuaucugugu

SEQ ID NO: 828743 - RNA, 22 nt, Human
cugaugcuauaagccacagugg

SEQ ID NO: 828744 - RNA, 22 nt, Human
uugaagcaggaaaauuucuauu

SEQ ID NO: 828745 - RNA, 22 nt, Human
auguuauuaaaguacagauucu

SEQ ID NO: 828746 - RNA, 22 nt, Human
augcugugguagacagcauucc

SEQ ID NO: 828747 - RNA, 22 nt, Human
acugggccuugccauggcagcc

SEQ ID NO: 828748 - RNA, 22 nt, Human
cagagcuggagcuugaauggag

SEQ ID NO: 828749 - RNA, 22 nt, Human
cagcaggcguugggagaaagac

SEQ ID NO: 828750 - RNA, 22 nt, Human
aggauuuaaauccuuaaccacu

SEQ ID NO: 828751 - RNA, 21 nt, Human
agcagcagaucuggugagggc

SEQ ID NO: 828752 - RNA, 22 nt, Human
gggagggaggugaugcuuggcu

SEQ ID NO: 828753 - RNA, 22 nt, Human
gccugcagaacugugaggcaau

SEQ ID NO: 828754 - RNA, 22 nt, Human
uguauguugggucaaaguacau

SEQ ID NO: 828755 - RNA, 22 nt, Human
uaucuguucaauggaagaugac

SEQ ID NO: 828756 - RNA, 22 nt, Human
auugaauagaugcauuauacua

SEQ ID NO: 828757 - RNA, 22 nt, Human
cagagggaaaaggggaguaaua

SEQ ID NO: 828758 - RNA, 22 nt, Human
ggcacugaauuucuuggcaucu

SEQ ID NO: 828759 - RNA, 22 nt, Human
ugccugaggagucagggcaggu

SEQ ID NO: 828760 - RNA, 21 nt, Human
agaugcugugcuccaggagca

SEQ ID NO: 828761 - RNA, 22 nt, Human
uggggcuguggauucucacgaa

SEQ ID NO: 828762 - RNA, 22 nt, Human
agaaauguggaucguuuuaaaa

SEQ ID NO: 828763 - RNA, 21 nt, Human
caauaaacugcacauugagac

SEQ ID NO: 828764 - RNA, 22 nt, Human
cauagaaacugagacaaggauu

SEQ ID NO: 828765 - RNA, 22 nt, Human
caaagguaaagaucugcugugg

SEQ ID NO: 828766 - RNA, 20 nt, Human
gucagugucuucaguaguga

SEQ ID NO: 828767 - RNA, 22 nt, Human
uuaacauuguccuuagcagauu

SEQ ID NO: 828768 - RNA, 22 nt, Human
aauaucaacaguguccuucuaa

SEQ ID NO: 828769 - RNA, 22 nt, Human
acugucuguccugcucuccgug

SEQ ID NO: 828770 - RNA, 23 nt, Human
ccuggcagcaaacgaggagguua

SEQ ID NO: 828771 - RNA, 19 nt, Human
gcuuuggagggagguucua

SEQ ID NO: 828772 - RNA, 22 nt, Human
cugggcagugguggcccuuccc

SEQ ID NO: 828773 - RNA, 22 nt, Human
caucagaacgugagcuccuugu

SEQ ID NO: 828774 - RNA, 22 nt, Human
caacuuucuguuaaauguuagu

SEQ ID NO: 828775 - RNA, 22 nt, Human
agagggcaaguguaguccagua

SEQ ID NO: 828776 - RNA, 22 nt, Human
aagggcagaaagggacgcuuug

SEQ ID NO: 828777 - RNA, 22 nt, Human
gucccuggaucugggacagcug

SEQ ID NO: 828778 - RNA, 22 nt, Human
uggggugggcaugcgcuguccu

SEQ ID NO: 828779 - RNA, 22 nt, Human
uauugacaauaggcaacugagg

SEQ ID NO: 828780 - RNA, 22 nt, Human
uuguaacaaucugucauaaaug

SEQ ID NO: 828781 - RNA, 22 nt, Human
auaugucgcuacaucauuagau

SEQ ID NO: 828782 - RNA, 22 nt, Human
guuccacaaaauguacccaguu

SEQ ID NO: 828783 - RNA, 22 nt, Human
uagaaacagaaaacuguaauag

SEQ ID NO: 828784 - RNA, 22 nt, Human
gucugagaaucuugcauaucau

SEQ ID NO: 828785 - RNA, 22 nt, Human
acauuucugcuagaauagguga

SEQ ID NO: 828786 - RNA, 22 nt, Human
cagggugccaaagaacaaauau

SEQ ID NO: 828787 - RNA, 19 nt, Human
auaaggcagugacuuuuuu

SEQ ID NO: 828788 - RNA, 22 nt, Human
aaguuucaaauguugauuaugc

SEQ ID NO: 828789 - RNA, 22 nt, Human
gaggguccccaugcagagcuca

SEQ ID NO: 828790 - RNA, 22 nt, Human
ucaguuuucauuucaugagcag

SEQ ID NO: 828791 - RNA, 22 nt, Human
ugaaaugagcauuuauucuuua

SEQ ID NO: 828792 - RNA, 22 nt, Human
aagaauguucauuaaacuguug

SEQ ID NO: 828793 - RNA, 23 nt, Human
cuggcuccgaagacuccaggauc

SEQ ID NO: 828794 - RNA, 22 nt, Human
gcugucuugcucacucuugcag

SEQ ID NO: 828795 - RNA, 21 nt, Human
ugaaaguuggagucaaaugua

SEQ ID NO: 828796 - RNA, 22 nt, Human
uugauacaggccuucuagauga

SEQ ID NO: 828797 - RNA, 22 nt, Human
gcaggguaggugacagguaguc

SEQ ID NO: 828798 - RNA, 22 nt, Human
gcagaggacagggauuuagauu

SEQ ID NO: 828799 - RNA, 22 nt, Human
gcagaauucuacagaugauaaa

SEQ ID NO: 828800 - RNA, 22 nt, Human
gauuucuugauaaguaguguga

SEQ ID NO: 828801 - RNA, 22 nt, Human
aaaggucagacuuaggcugggc

SEQ ID NO: 828802 - RNA, 22 nt, Human
gauggcaggugauagccgaguc

SEQ ID NO: 828803 - RNA, 22 nt, Human
ccugggcagggcuggacucuca

SEQ ID NO: 828804 - RNA, 22 nt, Human
augaagcugaccuugucuugcu

SEQ ID NO: 828805 - RNA, 22 nt, Human
gcagcugcuggaaguuccugcc

SEQ ID NO: 828806 - RNA, 22 nt, Human
uaggccaggacagagcuuccag

SEQ ID NO: 828807 - RNA, 22 nt, Human
aaucaguuucuuggcaaguuua

SEQ ID NO: 828808 - RNA, 22 nt, Human
aguaacaagugccaacguuaga

SEQ ID NO: 828809 - RNA, 22 nt, Human
agaccagcugccucccagggcc

SEQ ID NO: 828810 - RNA, 22 nt, Human
uggcccugacuuggaggccuga

SEQ ID NO: 828811 - RNA, 22 nt, Human
aaucuucagugucuaaaaagca

SEQ ID NO: 828812 - RNA, 22 nt, Human
uuuauuguuuagaagggggcug

SEQ ID NO: 828813 - RNA, 22 nt, Human
cagcugacagugaggugggggc

SEQ ID NO: 828814 - RNA, 19 nt, Human
aagcagcccuggcaagagc

SEQ ID NO: 828815 - RNA, 22 nt, Human
gccaugccugugucuccaggcc

SEQ ID NO: 828816 - RNA, 22 nt, Human
gcaggaagcauagaagaaugcc

SEQ ID NO: 828817 - RNA, 22 nt, Human
cagucaccuugaggacucagac

SEQ ID NO: 828818 - RNA, 19 nt, Human
uggcagaggcaguuuguac

SEQ ID NO: 828819 - RNA, 22 nt, Human
gcugccaccguggagaugagug

SEQ ID NO: 828820 - RNA, 22 nt, Human
cuccaggagcugugucuuucuu

SEQ ID NO: 828821 - RNA, 22 nt, Human
aaguguguugacugaauugggg

SEQ ID NO: 828822 - RNA, 22 nt, Human
uuucaucuaacacuacauaggg

SEQ ID NO: 828823 - RNA, 22 nt, Human
uguugauuaguguuuagacuua

SEQ ID NO: 828824 - RNA, 22 nt, Human
aagauacugaugauguaggcua

SEQ ID NO: 828825 - RNA, 22 nt, Human
auggcuuaugguaaauauuucu

SEQ ID NO: 828826 - RNA, 22 nt, Human
uauuccaguccuauccucuuuu

SEQ ID NO: 828827 - RNA, 22 nt, Human
cuggagagaaaugacaaagcua

SEQ ID NO: 828828 - RNA, 18 nt, Human
agcugcagaccaggaggu

SEQ ID NO: 828829 - RNA, 22 nt, Human
uggaggcaucagagugcuuggc

SEQ ID NO: 828830 - RNA, 22 nt, Human
uauucacaggcacgaaauauug

SEQ ID NO: 828831 - RNA, 22 nt, Human
cugccuggaaggagcaagggga

SEQ ID NO: 828832 - RNA, 22 nt, Human
gaggagagaugguagauugggu

SEQ ID NO: 828833 - RNA, 22 nt, Human
acaggugauucaggcucuggga

SEQ ID NO: 828834 - RNA, 22 nt, Human
uacacauguuuggcaaguaugu

SEQ ID NO: 828835 - RNA, 22 nt, Human
accugagggcccaaacuuggua

SEQ ID NO: 828836 - RNA, 22 nt, Human
ggcugggcaggucugcacaggg

SEQ ID NO: 828837 - RNA, 22 nt, Human
uggcagcuggagggcaauggcc

SEQ ID NO: 828838 - RNA, 22 nt, Human
aaaguucuggcauuuucugucu

SEQ ID NO: 828839 - RNA, 22 nt, Human
ucaguuuuucuauacuuuguag

SEQ ID NO: 828840 - RNA, 22 nt, Human
agcaugcacaugacuggcuuaa

SEQ ID NO: 828841 - RNA, 22 nt, Human
agaauuuuugauuaucuacucg

SEQ ID NO: 828842 - RNA, 22 nt, Human
gaggaaaauggaguguaauuaa

SEQ ID NO: 828843 - RNA, 22 nt, Human
ugagauuuguuuuauaaaauag

SEQ ID NO: 828844 - RNA, 22 nt, Human
ggagugacucacagcugggaca

SEQ ID NO: 828845 - RNA, 22 nt, Human
aaagaaucguguguaguuugaa

SEQ ID NO: 828846 - RNA, 22 nt, Human
aagagcuggaagugaagauaac

SEQ ID NO: 828847 - RNA, 22 nt, Human
acaugauuuuaguaucauaaua

SEQ ID NO: 828848 - RNA, 20 nt, Human
aaaguguaagcauauaauua

SEQ ID NO: 828849 - RNA, 20 nt, Human
gccugcagguuggaugggau

SEQ ID NO: 828850 - RNA, 22 nt, Human
ugcucccaggcauucucuguug

SEQ ID NO: 828851 - RNA, 22 nt, Human
ccugggaggcuguuuccagccu

SEQ ID NO: 828852 - RNA, 20 nt, Human
gucagaggacccuagagcga

SEQ ID NO: 828853 - RNA, 22 nt, Human
gggcugagggguaucucauggg

SEQ ID NO: 828854 - RNA, 22 nt, Human
agggcagaaaucgauuacaccu

SEQ ID NO: 828855 - RNA, 22 nt, Human
agaaaaggcuugaagagguuuu

SEQ ID NO: 828856 - RNA, 22 nt, Human
gccugccuucggugcgcagcgg

SEQ ID NO: 828857 - RNA, 20 nt, Human
uacagaaugcaauaaaaugg

SEQ ID NO: 828858 - RNA, 22 nt, Human
cagagguacaagcuaaguuggg

SEQ ID NO: 828859 - RNA, 18 nt, Human
ugucucugaauuccagug

SEQ ID NO: 828860 - RNA, 22 nt, Human
agcccuucaaccugccuacucc

SEQ ID NO: 828861 - RNA, 22 nt, Human
aagagcuggauugugcugcaga

SEQ ID NO: 828862 - RNA, 22 nt, Human
uagggauguaaacauaguaauu

SEQ ID NO: 828863 - RNA, 22 nt, Human
agaaauguacgauguuaugcag

SEQ ID NO: 828864 - RNA, 22 nt, Human
gccugagauucccggagccgug

SEQ ID NO: 828865 - RNA, 22 nt, Human
agcagcuguacuuucaucuguu

SEQ ID NO: 828866 - RNA, 22 nt, Human
ugcuggcccaugaagacgcagu

SEQ ID NO: 828867 - RNA, 22 nt, Human
cagucccagaagagccugggag

SEQ ID NO: 828868 - RNA, 22 nt, Human
aauaguauuuauuuggaaaaag

SEQ ID NO: 828869 - RNA, 21 nt, Human
ggacagcugcgcgcagggcuc

SEQ ID NO: 828870 - RNA, 22 nt, Human
aggcuggcuggcaggggacaca

SEQ ID NO: 828871 - RNA, 22 nt, Human
ggcggggguccaggagccugca

SEQ ID NO: 828872 - RNA, 23 nt, Human
uacauuguggauggaguccuggg

SEQ ID NO: 828873 - RNA, 22 nt, Human
ugcagagguguugcugagauaa

SEQ ID NO: 828874 - RNA, 22 nt, Human
uuaguacugauagggucaauca

SEQ ID NO: 828875 - RNA, 22 nt, Human
gccuggagaggaagccggugga

SEQ ID NO: 828876 - RNA, 22 nt, Human
ggugcagcugcagccugggagc

SEQ ID NO: 828877 - RNA, 22 nt, Human
ucuggcucucaacaaauauuua

SEQ ID NO: 828878 - RNA, 22 nt, Human
cagcuggcugcaugaugccaaa

SEQ ID NO: 828879 - RNA, 21 nt, Human
ccaggaaggacugagcucccu

SEQ ID NO: 828880 - RNA, 20 nt, Human
gcaggcagggaaugggggug

SEQ ID NO: 828881 - RNA, 17 nt, Human
uuccccugaccaagccu

SEQ ID NO: 828882 - RNA, 22 nt, Human
acaagccaauuacugugccagg

SEQ ID NO: 828883 - RNA, 22 nt, Human
caagcuccuuacauccacaggg

SEQ ID NO: 828884 - RNA, 22 nt, Human
uucacauugguucuugauagcu

SEQ ID NO: 828885 - RNA, 17 nt, Human
agcagcuggguugaucu

SEQ ID NO: 828886 - RNA, 22 nt, Human
uccagucaucucccuucacauu

SEQ ID NO: 828887 - RNA, 22 nt, Human
uuauauuaguuagacuugcugu

SEQ ID NO: 828888 - RNA, 22 nt, Human
auggcagggcagccucucagag

SEQ ID NO: 828889 - RNA, 22 nt, Human
gcuggccucuggagaagggcuu

SEQ ID NO: 828890 - RNA, 22 nt, Human
cccaggagagaggggauaaagc

SEQ ID NO: 828891 - RNA, 22 nt, Human
ugauucacagacuucacaaggc

SEQ ID NO: 828892 - RNA, 22 nt, Human
gacagacauuuccugauccaau

SEQ ID NO: 828893 - RNA, 22 nt, Human
guuuuccuucucagccauugcc

SEQ ID NO: 828894 - RNA, 22 nt, Human
agcauuuaguuaguaaauguuu

SEQ ID NO: 828895 - RNA, 22 nt, Human
ucagaaagaacacaggcaguag

SEQ ID NO: 828896 - RNA, 22 nt, Human
aggaaaugcugaugcuccugga

SEQ ID NO: 828897 - RNA, 22 nt, Human
gcuggccauagaagccaaagag

SEQ ID NO: 828898 - RNA, 22 nt, Human
uccugcaggccuguucccagua

SEQ ID NO: 828899 - RNA, 22 nt, Human
uagaaacacagaucugguguca

SEQ ID NO: 828900 - RNA, 22 nt, Human
uagcaauagaaacauauaaagu

SEQ ID NO: 828901 - RNA, 22 nt, Human
cagacaggcuagccagacucac

SEQ ID NO: 828902 - RNA, 22 nt, Human
uuuguaugugauaagacuauuc

SEQ ID NO: 828903 - RNA, 22 nt, Human
gcagaggcaaucagguaugugg

SEQ ID NO: 828904 - RNA, 23 nt, Human
agggaaaguaguaauggccuuug

SEQ ID NO: 828905 - RNA, 22 nt, Human
ucucucagaggccaggguccug

SEQ ID NO: 828906 - RNA, 22 nt, Human
cgggcuggcugcagcugcugga

SEQ ID NO: 828907 - RNA, 22 nt, Human
uacagaauuagauuauuagaga

SEQ ID NO: 828908 - RNA, 22 nt, Human
gaggcagugcauugucuagggg

SEQ ID NO: 828909 - RNA, 22 nt, Human
auaaauuuauaauuguuuccug

SEQ ID NO: 828910 - RNA, 22 nt, Human
ucugucacuuuuauuuacugaa

SEQ ID NO: 828911 - RNA, 22 nt, Human
gcagggcacagacagugccaag

SEQ ID NO: 828912 - RNA, 22 nt, Human
ugcaauaaagugcuauaaaucc

SEQ ID NO: 828913 - RNA, 22 nt, Human
cagagagagucaaaucuuugcu

SEQ ID NO: 828914 - RNA, 22 nt, Human
auuacaauaagguuuauuugua

SEQ ID NO: 828915 - RNA, 22 nt, Human
gcaugggcaagaggacuggggg

SEQ ID NO: 828916 - RNA, 22 nt, Human
auuccaaacucuuucccugucg

SEQ ID NO: 828917 - RNA, 22 nt, Human
caccuggcuggaagugcuccgg

SEQ ID NO: 828918 - RNA, 22 nt, Human
ggcugggcugcugggucagagc

SEQ ID NO: 828919 - RNA, 21 nt, Human
aggauuuacuauuaacugugu

SEQ ID NO: 828920 - RNA, 22 nt, Human
cacugcagcaccaugcagggcu

SEQ ID NO: 828921 - RNA, 22 nt, Human
uggagccaaggccaguucucag

SEQ ID NO: 828922 - RNA, 22 nt, Human
uuagaaaggagcuuauuucuuu

SEQ ID NO: 828923 - RNA, 18 nt, Human
ugcucuggucucacuugg

SEQ ID NO: 828924 - RNA, 22 nt, Human
gaacacauguccuccuuggauu

SEQ ID NO: 828925 - RNA, 23 nt, Human
uccagggauuaaugaagucaguc

SEQ ID NO: 828926 - RNA, 22 nt, Human
aacaaauggggccuuguaugaa

SEQ ID NO: 828927 - RNA, 22 nt, Human
ucugaggcauaaccuguucugc

SEQ ID NO: 828928 - RNA, 22 nt, Human
cugagggccuuggcuccugccc

SEQ ID NO: 828929 - RNA, 22 nt, Human
agcugcugcggaaagaugccac

SEQ ID NO: 828930 - RNA, 22 nt, Human
cagaggcuaagaugagugggug

SEQ ID NO: 828931 - RNA, 17 nt, Human
ucagagggaugagcagg

SEQ ID NO: 828932 - RNA, 22 nt, Human
cccuggagugugacgaggcauu

SEQ ID NO: 828933 - RNA, 22 nt, Human
ugaaaauggccugaagaagcaa

SEQ ID NO: 828934 - RNA, 22 nt, Human
cuuuggcaaggguuuuaauugu

SEQ ID NO: 828935 - RNA, 22 nt, Human
acccagcuggaugcauggaggc

SEQ ID NO: 828936 - RNA, 18 nt, Human
acaaaggucugcaagacc

SEQ ID NO: 828937 - RNA, 22 nt, Human
augaugugugcugaucaagcuu

SEQ ID NO: 828938 - RNA, 22 nt, Human
cauuuguauagugcuuagacca

SEQ ID NO: 828939 - RNA, 22 nt, Human
ccccuuccacagugcuuccuaa

SEQ ID NO: 828940 - RNA, 19 nt, Human
aucugagauuauaaacaga

SEQ ID NO: 828941 - RNA, 22 nt, Human
ucacuuagauggggaucaucac

SEQ ID NO: 828942 - RNA, 22 nt, Human
uuauuuaaaauguagguuggga

SEQ ID NO: 828943 - RNA, 22 nt, Human
aaacauugcuaaauaaugcugc

SEQ ID NO: 828944 - RNA, 22 nt, Human
cugagccagcgggcucacuuuu

SEQ ID NO: 828945 - RNA, 22 nt, Human
gauuuacagguuagguccugua

SEQ ID NO: 828946 - RNA, 21 nt, Human
aguugcauaggccagccaucc

SEQ ID NO: 828947 - RNA, 22 nt, Human
aggagucacucagggcuucauc

SEQ ID NO: 828948 - RNA, 22 nt, Human
agacgagggcccccaggacagc

SEQ ID NO: 828949 - RNA, 22 nt, Human
ucucugcugagaagggcuggca

SEQ ID NO: 828950 - RNA, 22 nt, Human
ugagccugggagauggaggcug

SEQ ID NO: 828951 - RNA, 22 nt, Human
uugaagcauuguggcuuguauu

SEQ ID NO: 828952 - RNA, 19 nt, Human
cagcugccuuuucuuugca

SEQ ID NO: 828953 - RNA, 22 nt, Human
gugcagagaaaugagaagucga

SEQ ID NO: 828954 - RNA, 19 nt, Human
aucuuacagagcagaguac

SEQ ID NO: 828955 - RNA, 22 nt, Human
gaggagcuggcugucgggaggc

SEQ ID NO: 828956 - RNA, 21 nt, Human
ccuguucacagaucuguaacu

SEQ ID NO: 828957 - RNA, 22 nt, Human
accaaggaagaaucuauuugag

SEQ ID NO: 828958 - RNA, 22 nt, Human
auuugucuuugagugcccugcu

SEQ ID NO: 828959 - RNA, 22 nt, Human
caaguccuuuucuuggcucagg

SEQ ID NO: 828960 - RNA, 18 nt, Human
cugcuugggagacgucag

SEQ ID NO: 828961 - RNA, 20 nt, Human
ucagugauuaucucugagug

SEQ ID NO: 828962 - RNA, 22 nt, Human
agcauuuaauuacaguuuaauu

SEQ ID NO: 828963 - RNA, 22 nt, Human
ucugcaggcuguacaggaagca

SEQ ID NO: 828964 - RNA, 19 nt, Human
aguagcagaaagugcagug

SEQ ID NO: 828965 - RNA, 22 nt, Human
ucagaaauguaagcugaugacu

SEQ ID NO: 828966 - RNA, 22 nt, Human
gcccaggaguugaaugcagcag

SEQ ID NO: 828967 - RNA, 22 nt, Human
agccagccgggggaccacagug

SEQ ID NO: 828968 - RNA, 19 nt, Human
cccuggcaggcaagccugg

SEQ ID NO: 828969 - RNA, 22 nt, Human
gggcacagagggucuugaagaa

SEQ ID NO: 828970 - RNA, 22 nt, Human
uaaauuuacccaaggaacaugu

SEQ ID NO: 828971 - RNA, 22 nt, Human
ugugaaaagggcuuuguacaaa

SEQ ID NO: 828972 - RNA, 22 nt, Human
ggguccagaguugaagagguua

SEQ ID NO: 828973 - RNA, 22 nt, Human
uuccaguucccaugaggauuaa

SEQ ID NO: 828974 - RNA, 22 nt, Human
ccuggagcacagcccaguccca

SEQ ID NO: 828975 - RNA, 22 nt, Human
aaauugaaugauuaagugguga

SEQ ID NO: 828976 - RNA, 22 nt, Human
caguccuugcucaaagucuaca

SEQ ID NO: 828977 - RNA, 22 nt, Human
cuggcugcaggaaggagugggc

SEQ ID NO: 828978 - RNA, 18 nt, Human
uccagagcuacuguggug

SEQ ID NO: 828979 - RNA, 21 nt, Human
uuucaauguguucuuuguagu

SEQ ID NO: 828980 - RNA, 22 nt, Human
caaaugcuggcccugcuacuua

SEQ ID NO: 828981 - RNA, 22 nt, Human
ugcuuuaaaauggacuguuuug

SEQ ID NO: 828982 - RNA, 21 nt, Human
cucaggaucuuauauauuagu

SEQ ID NO: 828983 - RNA, 22 nt, Human
auaaggcauauagucacuuuuu

SEQ ID NO: 828984 - RNA, 22 nt, Human
cuccaggccauggcugcggagg

SEQ ID NO: 828985 - RNA, 22 nt, Human
ggagccuggcaaugcugcgucc

SEQ ID NO: 828986 - RNA, 22 nt, Human
agcagggcugcagugugucuuu

SEQ ID NO: 828987 - RNA, 22 nt, Human
caauaugcaagcuauuaaguau

SEQ ID NO: 828988 - RNA, 21 nt, Human
ucaggcaggcgcagagggaag

SEQ ID NO: 828989 - RNA, 22 nt, Human
uuauuacacugaaagaauugcg

SEQ ID NO: 828990 - RNA, 22 nt, Human
gccaggcuggucuugaacuccu

SEQ ID NO: 828991 - RNA, 22 nt, Human
uaggcagcgcuuggcugugcuu

SEQ ID NO: 828992 - RNA, 22 nt, Human
auacauuagaaucugguacuca

SEQ ID NO: 828993 - RNA, 22 nt, Human
aacaaauggaacacaaaucuuu

SEQ ID NO: 828994 - RNA, 20 nt, Human
agaauucuuacccuuugaug

SEQ ID NO: 828995 - RNA, 22 nt, Human
ggccucucuggcauggcugccc

SEQ ID NO: 828996 - RNA, 22 nt, Human
caacacauugaagcuaugauga

SEQ ID NO: 828997 - RNA, 20 nt, Human
cuuuggcaaugagaacaggg

SEQ ID NO: 828998 - RNA, 22 nt, Human
caaguccucaaagggcucugcu

SEQ ID NO: 828999 - RNA, 22 nt, Human
ugggggugacuaucucgggaau

SEQ ID NO: 829000 - RNA, 22 nt, Human
ggccugagcagacagcaugaug

SEQ ID NO: 829001 - RNA, 19 nt, Human
ucaguuuuagucaucaguu

SEQ ID NO: 829002 - RNA, 17 nt, Human
aguggcaggcagauggg

SEQ ID NO: 829003 - RNA, 22 nt, Human
ucacugcaaucucugccuucca

SEQ ID NO: 829004 - RNA, 22 nt, Human
ggaggggaugguuugacccugg

SEQ ID NO: 829005 - RNA, 22 nt, Human
uuuccuaagguagugauaauuu

SEQ ID NO: 829006 - RNA, 22 nt, Human
aaauuauaggugccaccuugga

SEQ ID NO: 829007 - RNA, 23 nt, Human
gggggcugguugacucucugcag

SEQ ID NO: 829008 - RNA, 22 nt, Human
cugucaucacaguugagcagcc

SEQ ID NO: 829009 - RNA, 22 nt, Human
agagugaagguugacacuucac

SEQ ID NO: 829010 - RNA, 22 nt, Human
aggcugcuucaauggauaagau

SEQ ID NO: 829011 - RNA, 22 nt, Human
cuaugaaaugucagauucugca

SEQ ID NO: 829012 - RNA, 23 nt, Human
auggaagucacuguuuucuuguc

SEQ ID NO: 829013 - RNA, 22 nt, Human
uuuccaaaggcuaaacucaguu

SEQ ID NO: 829014 - RNA, 22 nt, Human
ugauuucauaguauauacauga

SEQ ID NO: 829015 - RNA, 22 nt, Human
ugggcuggcugaacuucaaccu

SEQ ID NO: 829016 - RNA, 22 nt, Human
auuucuucaggucagaaauaga

SEQ ID NO: 829017 - RNA, 20 nt, Human
ucacaucuggcagcugauga

SEQ ID NO: 829018 - RNA, 22 nt, Human
cccaggugcugcgugaagccuc

SEQ ID NO: 829019 - RNA, 22 nt, Human
uaucagaacacagccacagcca

SEQ ID NO: 829020 - RNA, 22 nt, Human
aggagcagcuucugaaccaugu

SEQ ID NO: 829021 - RNA, 22 nt, Human
caggcagaguuagagcaacugg

SEQ ID NO: 829022 - RNA, 22 nt, Human
uuaacaauagaguuucuucagg

SEQ ID NO: 829023 - RNA, 22 nt, Human
gaagagcuauguccagggagca

SEQ ID NO: 829024 - RNA, 22 nt, Human
agggcagaaguacagacacuua

SEQ ID NO: 829025 - RNA, 22 nt, Human
ccuggaucuccucuauucauau

SEQ ID NO: 829026 - RNA, 22 nt, Human
gguggccuuucaguggaucagg

SEQ ID NO: 829027 - RNA, 22 nt, Human
aggugccagcucucaggcagga

SEQ ID NO: 829028 - RNA, 22 nt, Human
aggcccugggcaguucuguagc

SEQ ID NO: 829029 - RNA, 22 nt, Human
ccagguggaggugugagguccu

SEQ ID NO: 829030 - RNA, 22 nt, Human
gaggccugguuuccagcauccu

SEQ ID NO: 829031 - RNA, 22 nt, Human
acaugcaugucuaugggcaggu

SEQ ID NO: 829032 - RNA, 22 nt, Human
acagagauggcacagagaaggu

SEQ ID NO: 829033 - RNA, 22 nt, Human
caggguagacaguaggugucug

SEQ ID NO: 829034 - RNA, 22 nt, Human
acuucaugcagaagagagcugu

SEQ ID NO: 829035 - RNA, 22 nt, Human
guccucuguagggcugggccac

SEQ ID NO: 829036 - RNA, 22 nt, Human
ugugccagccucuggcuguguc

SEQ ID NO: 829037 - RNA, 20 nt, Human
ugcuguaagauuagagagcu

SEQ ID NO: 829038 - RNA, 22 nt, Human
cuaacuuuagcuuagauuauca

SEQ ID NO: 829039 - RNA, 22 nt, Human
ucaaaguagggguaagccaggc

SEQ ID NO: 829040 - RNA, 22 nt, Human
ggcucaggaccugggauugcca

SEQ ID NO: 829041 - RNA, 22 nt, Human
cauugcacaucugagaagagau

SEQ ID NO: 829042 - RNA, 20 nt, Human
ccugaggguuuguguucuuu

SEQ ID NO: 829043 - RNA, 22 nt, Human
cucuucuuauggccguggcuga

SEQ ID NO: 829044 - RNA, 22 nt, Human
cagggaguuuuuguuccucuag

SEQ ID NO: 829045 - RNA, 22 nt, Human
caagagcugugaccucauucac

SEQ ID NO: 829046 - RNA, 22 nt, Human
aggcugaggcagguggaucauu

SEQ ID NO: 829047 - RNA, 22 nt, Human
uuuuuaagagauucuccagucu

SEQ ID NO: 829048 - RNA, 22 nt, Human
uuggaaauacagcaguuacuuu

SEQ ID NO: 829049 - RNA, 22 nt, Human
guggccuggauagacuccaucu

SEQ ID NO: 829050 - RNA, 23 nt, Human
gggagccauggguggucauggag

SEQ ID NO: 829051 - RNA, 22 nt, Human
agcagggggccacagucacagc

SEQ ID NO: 829052 - RNA, 22 nt, Human
aguacauuuauuaaugguaaaa

SEQ ID NO: 829053 - RNA, 22 nt, Human
gugcugugucuaucaggaauaa

SEQ ID NO: 829054 - RNA, 22 nt, Human
ggaccuggcaauuugcaucucu

SEQ ID NO: 829055 - RNA, 22 nt, Human
aagaugcuuauugcuccugcag

SEQ ID NO: 829056 - RNA, 22 nt, Human
auguacaaaauguuuugaaaug

SEQ ID NO: 829057 - RNA, 23 nt, Human
uaucagugugaugaggcugcugc

SEQ ID NO: 829058 - RNA, 22 nt, Human
uauagagguggaaacugagguu

SEQ ID NO: 829059 - RNA, 22 nt, Human
ucugaggcuucagacuguacug

SEQ ID NO: 829060 - RNA, 22 nt, Human
agaugcugccucuccucacaag

SEQ ID NO: 829061 - RNA, 22 nt, Human
uagccgcuuaauuauuugguga

SEQ ID NO: 829062 - RNA, 22 nt, Human
uaagcauucaaugcuuagcacu

SEQ ID NO: 829063 - RNA, 22 nt, Human
uuuccucugucaugacagcuga

SEQ ID NO: 829064 - RNA, 22 nt, Human
gcccaggaguucaagucuagug

SEQ ID NO: 829065 - RNA, 19 nt, Human
aacuguaauuaauacccua

SEQ ID NO: 829066 - RNA, 22 nt, Human
aaaguuguaauggaagaaaugc

SEQ ID NO: 829067 - RNA, 22 nt, Human
uuguuuuaucuuucuacagacu

SEQ ID NO: 829068 - RNA, 22 nt, Human
uagagaaauaagcuuugccuug

SEQ ID NO: 829069 - RNA, 22 nt, Human
acagacauuuucuguauugccu

SEQ ID NO: 829070 - RNA, 22 nt, Human
ucagaggacgcacuaggguugu

SEQ ID NO: 829071 - RNA, 22 nt, Human
gcuguucagaugcgauucagga

SEQ ID NO: 829072 - RNA, 22 nt, Human
gcugugcagguccccacugccu

SEQ ID NO: 829073 - RNA, 22 nt, Human
ggggauggugggaaggcaaucu

SEQ ID NO: 829074 - RNA, 22 nt, Human
uaacuuucacaucacacugacu

SEQ ID NO: 829075 - RNA, 22 nt, Human
uugcagcuuagugauguuaucu

SEQ ID NO: 829076 - RNA, 22 nt, Human
aggguggcaguuacuggagcaa

SEQ ID NO: 829077 - RNA, 22 nt, Human
cccucuggcucuucucaggccg

SEQ ID NO: 829078 - RNA, 22 nt, Human
cccagguggcagaagcugcagu

SEQ ID NO: 829079 - RNA, 22 nt, Human
gaacacaucacauuuuacagug

SEQ ID NO: 829080 - RNA, 22 nt, Human
ccuggccuuaagggcagggagc

SEQ ID NO: 829081 - RNA, 22 nt, Human
uaucuaaaggauuuaauuuagu

SEQ ID NO: 829082 - RNA, 22 nt, Human
caucagcacuaugauuaaagua

SEQ ID NO: 829083 - RNA, 22 nt, Human
ucucacugcaaauauuauguau

SEQ ID NO: 829084 - RNA, 19 nt, Human
gggcucuggccucaguggg

SEQ ID NO: 829085 - RNA, 22 nt, Human
uguaacaauuucuuacuauugu

SEQ ID NO: 829086 - RNA, 22 nt, Human
cagcucugugcaggccugggga

SEQ ID NO: 829087 - RNA, 22 nt, Human
gcagagcaguacucucuugacu

SEQ ID NO: 829088 - RNA, 22 nt, Human
cagaacauuccaugugcccugc

SEQ ID NO: 829089 - RNA, 22 nt, Human
aaauaugaaugauaagaguuau

SEQ ID NO: 829090 - RNA, 22 nt, Human
uagacacaagagaaggguauaa

SEQ ID NO: 829091 - RNA, 22 nt, Human
uacacuuuuuacuacagauucu

SEQ ID NO: 829092 - RNA, 22 nt, Human
uagcccagagucccaauuccag

SEQ ID NO: 829093 - RNA, 22 nt, Human
ucccaguguggcaggccaugga

SEQ ID NO: 829094 - RNA, 22 nt, Human
ccagcagccaccuucucgaaau

SEQ ID NO: 829095 - RNA, 22 nt, Human
uguguuuuacaaauucucuuaa

SEQ ID NO: 829096 - RNA, 22 nt, Human
agugcuuugugcucucacugca

SEQ ID NO: 829097 - RNA, 22 nt, Human
ucaucuucuauuaauagggaga

SEQ ID NO: 829098 - RNA, 22 nt, Human
gcccagagagaugcuguagacc

SEQ ID NO: 829099 - RNA, 22 nt, Human
ggcacucagagauucaggcugu

SEQ ID NO: 829100 - RNA, 22 nt, Human
ggaugcuggggaccaaucucug

SEQ ID NO: 829101 - RNA, 22 nt, Human
caugggcuacagaagcaugcug

SEQ ID NO: 829102 - RNA, 22 nt, Human
acuuugcaauacuuaauacaaa

SEQ ID NO: 829103 - RNA, 22 nt, Human
cuuggccucuucucaggguggg

SEQ ID NO: 829104 - RNA, 20 nt, Human
ucaggcaguggggaaaggca

SEQ ID NO: 829105 - RNA, 22 nt, Human
gcuggcuguguuucaucucuga

SEQ ID NO: 829106 - RNA, 22 nt, Human
gaagcucucaaacucuccccuu

SEQ ID NO: 829107 - RNA, 22 nt, Human
auuaggcagugccauuguacgg

SEQ ID NO: 829108 - RNA, 22 nt, Human
ugaccuuauuugaaaauagaga

SEQ ID NO: 829109 - RNA, 22 nt, Human
ccugucacgaugacugcacucu

SEQ ID NO: 829110 - RNA, 22 nt, Human
uguacaaucugaugauguaugg

SEQ ID NO: 829111 - RNA, 22 nt, Human
uggaggaaguugcuggaaguca

SEQ ID NO: 829112 - RNA, 22 nt, Human
aaguaugacauuuaagacaauu

SEQ ID NO: 829113 - RNA, 22 nt, Human
uaaauuauggcuggcagagcag

SEQ ID NO: 829114 - RNA, 22 nt, Human
gacccuguuucuacaaauaauu

SEQ ID NO: 829115 - RNA, 23 nt, Human
gcucugagggcuuaucccuccca

SEQ ID NO: 829116 - RNA, 22 nt, Human
cauuuacacacagaggugugcu

SEQ ID NO: 829117 - RNA, 22 nt, Human
ggcagagcugcaugagcacuca

SEQ ID NO: 829118 - RNA, 22 nt, Human
aaaugucuuucuucugcuacgu

SEQ ID NO: 829119 - RNA, 22 nt, Human
uuguuauaaagacuaaauaugu

SEQ ID NO: 829120 - RNA, 22 nt, Human
agggagagguugaaaccucagu

SEQ ID NO: 829121 - RNA, 22 nt, Human
ucugaaagaagggcagucuuuu

SEQ ID NO: 829122 - RNA, 22 nt, Human
cacuggggugggccugguagag

SEQ ID NO: 829123 - RNA, 21 nt, Human
aagcaggacauaugaugcccu

SEQ ID NO: 829124 - RNA, 22 nt, Human
cuguggaaauaaacaaugcuaa

SEQ ID NO: 829125 - RNA, 22 nt, Human
cccaggagauggugcguggucu

SEQ ID NO: 829126 - RNA, 21 nt, Human
uucaagauauuuaaaaggugg

SEQ ID NO: 829127 - RNA, 22 nt, Human
aaaugcuugcucuugauuauuu

SEQ ID NO: 829128 - RNA, 22 nt, Human
aaaugucuuugaguauuucugc

SEQ ID NO: 829129 - RNA, 22 nt, Human
cauggcuuuguucuguuagaug

SEQ ID NO: 829130 - RNA, 22 nt, Human
uggcagagucugggcuugggca

SEQ ID NO: 829131 - RNA, 22 nt, Human
auguuagaaucucugaaugugg

SEQ ID NO: 829132 - RNA, 22 nt, Human
ggacaagccugugaguggguuu

SEQ ID NO: 829133 - RNA, 22 nt, Human
augguuuguguggcccagauga

SEQ ID NO: 829134 - RNA, 22 nt, Human
guccagggcuaaaucagguucc

SEQ ID NO: 829135 - RNA, 21 nt, Human
aaaguucaugcuuuaauauuc

SEQ ID NO: 829136 - RNA, 22 nt, Human
ucuuuauugcuacugguuuguc

SEQ ID NO: 829137 - RNA, 22 nt, Human
acaauguguuuuuauacauuug

SEQ ID NO: 829138 - RNA, 19 nt, Human
gcucugagaggggcauggg

SEQ ID NO: 829139 - RNA, 22 nt, Human
ugaggcaggagaaucaccggaa

SEQ ID NO: 829140 - RNA, 22 nt, Human
caggggcuagcacuuaauguuu

SEQ ID NO: 829141 - RNA, 22 nt, Human
ucugucaauauaugugcugcag

SEQ ID NO: 829142 - RNA, 22 nt, Human
cagcgucucguugugggccucg

SEQ ID NO: 829143 - RNA, 22 nt, Human
ccugcagcuccggauuucuggg

SEQ ID NO: 829144 - RNA, 22 nt, Human
ccucugcaccauagccuucagc

SEQ ID NO: 829145 - RNA, 22 nt, Human
ucaaagucauggcuaguaauga

SEQ ID NO: 829146 - RNA, 22 nt, Human
ggcuucugccacgagagggaag

SEQ ID NO: 829147 - RNA, 22 nt, Human
augggguggaguccgggcagcg

SEQ ID NO: 829148 - RNA, 22 nt, Human
ucaagagacaggacguguuuca

SEQ ID NO: 829149 - RNA, 19 nt, Human
cccagcuugaccaccugcu

SEQ ID NO: 829150 - RNA, 22 nt, Human
uuagaaaauuugcuucuuugga

SEQ ID NO: 829151 - RNA, 22 nt, Human
uaagaaucggucgcaacagagg

SEQ ID NO: 829152 - RNA, 22 nt, Human
ugccagcccaccuuggggccuc

SEQ ID NO: 829153 - RNA, 18 nt, Human
agcuggcccuggcugccg

SEQ ID NO: 829154 - RNA, 22 nt, Human
aggggccauuguucugcccgcu

SEQ ID NO: 829155 - RNA, 22 nt, Human
uuuccucuccggggccuccagg

SEQ ID NO: 829156 - RNA, 22 nt, Human
cugggcacaaguggcccuggau

SEQ ID NO: 829157 - RNA, 22 nt, Human
aaugaugguauugaugagcuaa

SEQ ID NO: 829158 - RNA, 22 nt, Human
gcggagggcgagcccgcggagc

SEQ ID NO: 829159 - RNA, 22 nt, Human
gcagagguggcaucugggcucu

SEQ ID NO: 829160 - RNA, 22 nt, Human
uccaagggcagccauagaacuu

SEQ ID NO: 829161 - RNA, 22 nt, Human
gcaguggcuaggagucuggcgu

SEQ ID NO: 829162 - RNA, 22 nt, Human
uuugcauuaguuuagauuucaa

SEQ ID NO: 829163 - RNA, 20 nt, Human
guccugggagccacagcaca

SEQ ID NO: 829164 - RNA, 19 nt, Human
cuggccaggccaggggccc

SEQ ID NO: 829165 - RNA, 22 nt, Human
gaacaguaaauuuaugcagcac

SEQ ID NO: 829166 - RNA, 18 nt, Human
ucuuccaacacugacacc

SEQ ID NO: 829167 - RNA, 22 nt, Human
aaggcagcaccgccuccugaaa

SEQ ID NO: 829168 - RNA, 21 nt, Human
uucagcaguccucuagagaua

SEQ ID NO: 829169 - RNA, 22 nt, Human
agaugcugcuccacaggccagg

SEQ ID NO: 829170 - RNA, 18 nt, Human
gugcugugggcaguggcc

SEQ ID NO: 829171 - RNA, 22 nt, Human
ugcauuguuugauaggugaauu

SEQ ID NO: 829172 - RNA, 22 nt, Human
uaagaaucugcauuuuaacaag

SEQ ID NO: 829173 - RNA, 21 nt, Human
gcagagccugagguucuugag

SEQ ID NO: 829174 - RNA, 22 nt, Human
aggugagugugacugcaagaga

SEQ ID NO: 829175 - RNA, 22 nt, Human
cagcagagaccaagugauuuga

SEQ ID NO: 829176 - RNA, 22 nt, Human
ugcuggggcucugaccacucca

SEQ ID NO: 829177 - RNA, 22 nt, Human
caggagccccaggcugacaaua

SEQ ID NO: 829178 - RNA, 22 nt, Human
ucuguucagaauuguaacacuc

SEQ ID NO: 829179 - RNA, 22 nt, Human
uauguacaaucagcaguucaua

SEQ ID NO: 829180 - RNA, 22 nt, Human
agauauaauaauuuacaagugu

SEQ ID NO: 829181 - RNA, 22 nt, Human
guagaaauauuuaucucugaga

SEQ ID NO: 829182 - RNA, 22 nt, Human
caguccuuggcaaguucucagu

SEQ ID NO: 829183 - RNA, 22 nt, Human
agccagcuggagaccacuguuu

SEQ ID NO: 829184 - RNA, 22 nt, Human
agcugcucuuugaaggacacuu

SEQ ID NO: 829185 - RNA, 22 nt, Human
gcuuuauguaaguccaaaggca

SEQ ID NO: 829186 - RNA, 22 nt, Human
uauuucuuguuauucucguuga

SEQ ID NO: 829187 - RNA, 22 nt, Human
augcaguacugauacaugccac

SEQ ID NO: 829188 - RNA, 23 nt, Human
ugcugguguuuuugggaccaggg

SEQ ID NO: 829189 - RNA, 22 nt, Human
ccuuggcccuagccucaggcaa

SEQ ID NO: 829190 - RNA, 22 nt, Human
gugugaaaaugugcacaauaug

SEQ ID NO: 829191 - RNA, 22 nt, Human
ggcagggugccuggcuccuguu

SEQ ID NO: 829192 - RNA, 22 nt, Human
agcaggugcauggcgagcgcgg

SEQ ID NO: 829193 - RNA, 19 nt, Human
ugagagugaggaaggcuuc

SEQ ID NO: 829194 - RNA, 22 nt, Human
agucccagcccaguccuguaag

SEQ ID NO: 829195 - RNA, 22 nt, Human
cacaauuuccaagucauguuau

SEQ ID NO: 829196 - RNA, 22 nt, Human
auaguauuuaauaguuagcuca

SEQ ID NO: 829197 - RNA, 23 nt, Human
agaggccaacuucuugccccucc

SEQ ID NO: 829198 - RNA, 22 nt, Human
gagccagcuauguagcaagagg

SEQ ID NO: 829199 - RNA, 22 nt, Human
ucucuucuaacacuagaaauuc

SEQ ID NO: 829200 - RNA, 22 nt, Human
gcuguuccugcuuagaggucgg

SEQ ID NO: 829201 - RNA, 22 nt, Human
uguuauugagguuacuuauaag

SEQ ID NO: 829202 - RNA, 21 nt, Human
ccuauugaauauaggaagauu

SEQ ID NO: 829203 - RNA, 22 nt, Human
cacuggggaaaacaggcuucuu

SEQ ID NO: 829204 - RNA, 22 nt, Human
uagccuucucaagacaaaguug

SEQ ID NO: 829205 - RNA, 22 nt, Human
ggagagaaauugagguagcaag

SEQ ID NO: 829206 - RNA, 22 nt, Human
ccacagccauuccagggaggcu

SEQ ID NO: 829207 - RNA, 22 nt, Human
ucucuucuagcuucuugugguu

SEQ ID NO: 829208 - RNA, 22 nt, Human
gcucugcugagauaucugggag

SEQ ID NO: 829209 - RNA, 18 nt, Human
aggcaggcuggagugacu

SEQ ID NO: 829210 - RNA, 22 nt, Human
ccuguucaagguauuaauuauc

SEQ ID NO: 829211 - RNA, 22 nt, Human
uguuugaaacuuugaucacuaa

SEQ ID NO: 829212 - RNA, 22 nt, Human
acuaaauacacacauuuguuca

SEQ ID NO: 829213 - RNA, 19 nt, Human
acacagggaucagaggguu

SEQ ID NO: 829214 - RNA, 22 nt, Human
augaguaaaaccacuauuuaca

SEQ ID NO: 829215 - RNA, 22 nt, Human
guaggcagguggaggagugaag

SEQ ID NO: 829216 - RNA, 22 nt, Human
uggcucugugcuucuaguaucu

SEQ ID NO: 829217 - RNA, 22 nt, Human
cagaagucacccucagaauaac

SEQ ID NO: 829218 - RNA, 22 nt, Human
uccuggagccacggagcuuuca

SEQ ID NO: 829219 - RNA, 22 nt, Human
cucugguguccuuuagaauuua

SEQ ID NO: 829220 - RNA, 22 nt, Human
ucuggagcuggcagggcccugg

SEQ ID NO: 829221 - RNA, 22 nt, Human
uuugcaauuugugcugcaaaug

SEQ ID NO: 829222 - RNA, 22 nt, Human
ggccaggcuggucucagacuuc

SEQ ID NO: 829223 - RNA, 22 nt, Human
ucuuaaagagcgcaauuugagg

SEQ ID NO: 829224 - RNA, 22 nt, Human
gcugauguaagacuuuugguuu

SEQ ID NO: 829225 - RNA, 22 nt, Human
cugaagaugucugagaugcuca

SEQ ID NO: 829226 - RNA, 22 nt, Human
cauagaaaagaguagguaaugu

SEQ ID NO: 829227 - RNA, 22 nt, Human
uuccauauuuguguggcaaaag

SEQ ID NO: 829228 - RNA, 22 nt, Human
agcuggccuccgggugccuggg

SEQ ID NO: 829229 - RNA, 22 nt, Human
uugaacaguccuaagagacccu

SEQ ID NO: 829230 - RNA, 21 nt, Human
aagccucaagcagaagacaga

SEQ ID NO: 829231 - RNA, 22 nt, Human
acccaggguagagugcaguggc

SEQ ID NO: 829232 - RNA, 20 nt, Human
cuuccacacaagaagcacag

SEQ ID NO: 829233 - RNA, 22 nt, Human
aaggcagccuuuguuugauuga

SEQ ID NO: 829234 - RNA, 22 nt, Human
ccaggagacccagggaaggagc

SEQ ID NO: 829235 - RNA, 20 nt, Human
uccaggagaacugggagccg

SEQ ID NO: 829236 - RNA, 22 nt, Human
cugucaggggcggguggagcgg

SEQ ID NO: 829237 - RNA, 22 nt, Human
cgagaguggacagggcgcagcu

SEQ ID NO: 829238 - RNA, 19 nt, Human
aggcaggugcagagguccc

SEQ ID NO: 829239 - RNA, 22 nt, Human
ugucaguguauacauacaguau

SEQ ID NO: 829240 - RNA, 22 nt, Human
aacaaauguguggcaguguggg

SEQ ID NO: 829241 - RNA, 22 nt, Human
uccagugguuugaaaggggugu

SEQ ID NO: 829242 - RNA, 22 nt, Human
uuagaaaaaggcuguggucuua

SEQ ID NO: 829243 - RNA, 22 nt, Human
aggccuguuccaggccccuuuu

SEQ ID NO: 829244 - RNA, 22 nt, Human
aauguguauaugaacauacagg

SEQ ID NO: 829245 - RNA, 22 nt, Human
gcugguuuccuuaucuauaaag

SEQ ID NO: 829246 - RNA, 22 nt, Human
uuaagacauucagauauuucua

SEQ ID NO: 829247 - RNA, 22 nt, Human
uaucagaaacucuggggcaggg

SEQ ID NO: 829248 - RNA, 22 nt, Human
ucuucagauaaagggagaguau

SEQ ID NO: 829249 - RNA, 22 nt, Human
caaucaguaaccggaucauggu

SEQ ID NO: 829250 - RNA, 22 nt, Human
guggccuggaugagcuucgaca

SEQ ID NO: 829251 - RNA, 22 nt, Human
caauguguuugcauauuaaaau

SEQ ID NO: 829252 - RNA, 20 nt, Human
uaagaacaagacuaggaagc

SEQ ID NO: 829253 - RNA, 19 nt, Human
cugggagguguucagagaa

SEQ ID NO: 829254 - RNA, 22 nt, Human
guuuacaaauauuuuaaauggu

SEQ ID NO: 829255 - RNA, 22 nt, Human
ccuuccaggugcaggcaagccu

SEQ ID NO: 829256 - RNA, 22 nt, Human
cagaucuagagcuuuuccaucu

SEQ ID NO: 829257 - RNA, 23 nt, Human
uuaaacuucagugcagaacacuc

SEQ ID NO: 829258 - RNA, 22 nt, Human
auuuccuagccucucuugcagu

SEQ ID NO: 829259 - RNA, 22 nt, Human
cccaggaaagagacugcugggu

SEQ ID NO: 829260 - RNA, 22 nt, Human
acuuccugcuaugagcuucugu

SEQ ID NO: 829261 - RNA, 22 nt, Human
ugcccagcacugugccagucac

SEQ ID NO: 829262 - RNA, 22 nt, Human
ugggcagacuaaggucaaagcu

SEQ ID NO: 829263 - RNA, 22 nt, Human
gaaaggagggaaacagagcggu

SEQ ID NO: 829264 - RNA, 22 nt, Human
aggcacuguggaagacaugguu

SEQ ID NO: 829265 - RNA, 20 nt, Human
aacagggggcugcagagggc

SEQ ID NO: 829266 - RNA, 22 nt, Human
ucauuuguggaagugauugugg

SEQ ID NO: 829267 - RNA, 22 nt, Human
caaaguccauaguuuacaauag

SEQ ID NO: 829268 - RNA, 22 nt, Human
ccagggcugagcugugaccaug

SEQ ID NO: 829269 - RNA, 22 nt, Human
augacagaggagugcaggugau

SEQ ID NO: 829270 - RNA, 22 nt, Human
cuuggcugucuauaggaaagag

SEQ ID NO: 829271 - RNA, 22 nt, Human
uggcuggacagugggcagugga

SEQ ID NO: 829272 - RNA, 22 nt, Human
ccuguguguaggccaggggagu

SEQ ID NO: 829273 - RNA, 22 nt, Human
gagucacauuaauuuaauuuua

SEQ ID NO: 829274 - RNA, 22 nt, Human
ucccagagcugauaagccuuua

SEQ ID NO: 829275 - RNA, 22 nt, Human
agcaguggagcgagauguuuaa

SEQ ID NO: 829276 - RNA, 22 nt, Human
aagaaacaaccacugcucuccu

SEQ ID NO: 829277 - RNA, 22 nt, Human
cagcuuggaggaggaucuaaga

SEQ ID NO: 829278 - RNA, 22 nt, Human
acauuucacuguucacagcagg

SEQ ID NO: 829279 - RNA, 22 nt, Human
ucuguucacugagcaauggcaa

SEQ ID NO: 829280 - RNA, 22 nt, Human
acauuuacagugcuagacaauc

SEQ ID NO: 829281 - RNA, 20 nt, Human
agagccuugaggaagaugau

SEQ ID NO: 829282 - RNA, 22 nt, Human
ccagaccacccuggccaugcac

SEQ ID NO: 829283 - RNA, 22 nt, Human
ggcagcacugcagcuuguuggg

SEQ ID NO: 829284 - RNA, 21 nt, Human
cagggcacacagaggauggua

SEQ ID NO: 829285 - RNA, 20 nt, Human
gggaguggugguagccugug

SEQ ID NO: 829286 - RNA, 22 nt, Human
aaaaugaggucaauauccuuuu

SEQ ID NO: 829287 - RNA, 22 nt, Human
cagggcagcuuccuuuguuagg

SEQ ID NO: 829288 - RNA, 22 nt, Human
gcaggcagagagggguuuccag

SEQ ID NO: 829289 - RNA, 22 nt, Human
guuuuauaggcuguugcuauau

SEQ ID NO: 829290 - RNA, 22 nt, Human
gacccaggagagaggguugcau

SEQ ID NO: 829291 - RNA, 22 nt, Human
cagccaggagcucccccugcuc

SEQ ID NO: 829292 - RNA, 22 nt, Human
cagaauuugaaguaauauucca

SEQ ID NO: 829293 - RNA, 22 nt, Human
uuuaaauggcauuuucccagau

SEQ ID NO: 829294 - RNA, 22 nt, Human
cagcugccccauaaaucacagu

SEQ ID NO: 829295 - RNA, 22 nt, Human
guuuuucuuugugugaagacaa

SEQ ID NO: 829296 - RNA, 22 nt, Human
auuugucuucaguagguucuuc

SEQ ID NO: 829297 - RNA, 22 nt, Human
uucacauuaucaggauuguuuc

SEQ ID NO: 829298 - RNA, 22 nt, Human
ccugccaggagcuggugcugca

SEQ ID NO: 829299 - RNA, 22 nt, Human
gaggcagcagaacauggaagag

SEQ ID NO: 829300 - RNA, 22 nt, Human
caagcccaggauuccccaguua

SEQ ID NO: 829301 - RNA, 22 nt, Human
uguacauacauagauauacaca

SEQ ID NO: 829302 - RNA, 22 nt, Human
aaugcacaugccacauguggua

SEQ ID NO: 829303 - RNA, 22 nt, Human
uuaugauuugccacagauuggu

SEQ ID NO: 829304 - RNA, 22 nt, Human
caguugcuggaugugcagcucu

SEQ ID NO: 829305 - RNA, 22 nt, Human
ucagaggguggcugggagcauc

SEQ ID NO: 829306 - RNA, 22 nt, Human
gaggccagcgcgcagcacuuuu

SEQ ID NO: 829307 - RNA, 22 nt, Human
ucagaaauacaaaacacuuacu

SEQ ID NO: 829308 - RNA, 22 nt, Human
aggcucuguuauucuagagggc

SEQ ID NO: 829309 - RNA, 22 nt, Human
ucacugcagagaccucuaguca

SEQ ID NO: 829310 - RNA, 22 nt, Human
uggagccugagucagcggaggc

SEQ ID NO: 829311 - RNA, 22 nt, Human
gggacuggaguagaggccggug

SEQ ID NO: 829312 - RNA, 22 nt, Human
aagaugcagcuuccacuuuugc

SEQ ID NO: 829313 - RNA, 22 nt, Human
aguucacauaucuguuuuauuu

SEQ ID NO: 829314 - RNA, 22 nt, Human
uagaaaguaaaucaguuuuauu

SEQ ID NO: 829315 - RNA, 22 nt, Human
gcucugucaacagcuagcugug

SEQ ID NO: 829316 - RNA, 22 nt, Human
gcuucuggaggagcugggcuga

SEQ ID NO: 829317 - RNA, 22 nt, Human
uaaaguucagugcaugaaugug

SEQ ID NO: 829318 - RNA, 22 nt, Human
aggacagggauucaaacuccca

SEQ ID NO: 829319 - RNA, 22 nt, Human
ugugcuucugcagagacuauuu

SEQ ID NO: 829320 - RNA, 22 nt, Human
ugugcagggaagggcaugcuau

SEQ ID NO: 829321 - RNA, 22 nt, Human
cacagggcuuugauggcugagu

SEQ ID NO: 829322 - RNA, 22 nt, Human
cuguagcagugugcucuuuuuc

SEQ ID NO: 829323 - RNA, 22 nt, Human
caggcagcugggucaccguccc

SEQ ID NO: 829324 - RNA, 23 nt, Human
aguuuguaaagaaauauuugcac

SEQ ID NO: 829325 - RNA, 22 nt, Human
cugcccugccuggccagugugg

SEQ ID NO: 829326 - RNA, 22 nt, Human
aaucagucucauuuagcaggga

SEQ ID NO: 829327 - RNA, 22 nt, Human
agauacaugucaagagacuuau

SEQ ID NO: 829328 - RNA, 22 nt, Human
agaauaucguagcauauuaucu

SEQ ID NO: 829329 - RNA, 22 nt, Human
uuuccucuuauacaguguuuau

SEQ ID NO: 829330 - RNA, 21 nt, Human
agcagaacagucgagcacugc

SEQ ID NO: 829331 - RNA, 22 nt, Human
aauuacuuaagagaaacuuuga

SEQ ID NO: 829332 - RNA, 22 nt, Human
uggaaggcaacggagugagcug

SEQ ID NO: 829333 - RNA, 20 nt, Human
cucaggauugucuagccccu

SEQ ID NO: 829334 - RNA, 22 nt, Human
ccugagagagaagcgaccuggu

SEQ ID NO: 829335 - RNA, 21 nt, Human
ugcagcugacacugguaugcc

SEQ ID NO: 829336 - RNA, 17 nt, Human
agagagagcaugccacc

SEQ ID NO: 829337 - RNA, 22 nt, Human
uauuucugucagccagauaugg

SEQ ID NO: 829338 - RNA, 22 nt, Human
aauauuucuccuucguuauagc

SEQ ID NO: 829339 - RNA, 22 nt, Human
aagaaucauccugcaagagucu

SEQ ID NO: 829340 - RNA, 23 nt, Human
aaugauuucaugaugauagcagc

SEQ ID NO: 829341 - RNA, 22 nt, Human
ucagaagcugguguccuuugaa

SEQ ID NO: 829342 - RNA, 22 nt, Human
agaagcaguuauuuuuugcaca

SEQ ID NO: 829343 - RNA, 22 nt, Human
ugcugccuccaacuccugggcu

SEQ ID NO: 829344 - RNA, 22 nt, Human
cugcugagcccuggcacaggug

SEQ ID NO: 829345 - RNA, 16 nt, Human
gggcugggggauucug

SEQ ID NO: 829346 - RNA, 22 nt, Human
ccugccucaucaacuugucgug

SEQ ID NO: 829347 - RNA, 22 nt, Human
gcucugggaacugacugccuuc

SEQ ID NO: 829348 - RNA, 22 nt, Human
ugucaaaaugacuuuacuacag

SEQ ID NO: 829349 - RNA, 22 nt, Human
aaucucuuuggcucaaggaucc

SEQ ID NO: 829350 - RNA, 22 nt, Human
uaaggcaccauaauauauuuaa

SEQ ID NO: 829351 - RNA, 18 nt, Human
ggucuuuaggucaguguc

SEQ ID NO: 829352 - RNA, 22 nt, Human
uucuuacagaguuuacagagcc

SEQ ID NO: 829353 - RNA, 22 nt, Human
ccaggccuuucuucuuggucug

SEQ ID NO: 829354 - RNA, 22 nt, Human
aggaagcuagagccaccggacu

SEQ ID NO: 829355 - RNA, 22 nt, Human
ucagaaaauaacuguuaguuug

SEQ ID NO: 829356 - RNA, 22 nt, Human
acugugcacaauucuaaguccu

SEQ ID NO: 829357 - RNA, 22 nt, Human
uuagcuaaacuguaacuagaau

SEQ ID NO: 829358 - RNA, 22 nt, Human
guuugcauaucugugaaaugga

SEQ ID NO: 829359 - RNA, 20 nt, Human
uuucuugucggcuguugcug

SEQ ID NO: 829360 - RNA, 22 nt, Human
ucaaaauucuagggagaauggu

SEQ ID NO: 829361 - RNA, 22 nt, Human
uggcugccuuucaccucaucuc

SEQ ID NO: 829362 - RNA, 22 nt, Human
uggcauuuuguucaguauaugg

SEQ ID NO: 829363 - RNA, 22 nt, Human
auggaagguccuacagagcgca

SEQ ID NO: 829364 - RNA, 22 nt, Human
aagugguaggaagagagcacug

SEQ ID NO: 829365 - RNA, 22 nt, Human
cacacaugagucuccccauugg

SEQ ID NO: 829366 - RNA, 23 nt, Human
gggagccaggaccucgcgcccca

SEQ ID NO: 829367 - RNA, 23 nt, Human
uagggcagcugggagggacaugc

SEQ ID NO: 829368 - RNA, 22 nt, Human
ucagagugcagcgggaggcugg

SEQ ID NO: 829369 - RNA, 22 nt, Human
agggcagcacagcugugcuccu

SEQ ID NO: 829370 - RNA, 22 nt, Human
aaacagcuaauggccaggaaua

SEQ ID NO: 829371 - RNA, 22 nt, Human
uggcagcauguuauguaaggaa

SEQ ID NO: 829372 - RNA, 22 nt, Human
auuagcugaccucuaaggagcc

SEQ ID NO: 829373 - RNA, 22 nt, Human
agggagcucaguuggaagcggu

SEQ ID NO: 829374 - RNA, 22 nt, Human
uggccuggccacauccagcagg

SEQ ID NO: 829375 - RNA, 22 nt, Human
ucugugcauuguaacaacuaaa

SEQ ID NO: 829376 - RNA, 22 nt, Human
cugggcacauuuugacuagugu

SEQ ID NO: 829377 - RNA, 21 nt, Human
uccucugcagugagguggccu

SEQ ID NO: 829378 - RNA, 19 nt, Human
cagagcugcuggccucguc

SEQ ID NO: 829379 - RNA, 22 nt, Human
gccccugggagcagagccacca

SEQ ID NO: 829380 - RNA, 22 nt, Human
ucagagugggagaaugugccaa

SEQ ID NO: 829381 - RNA, 22 nt, Human
ugaggcagugugagauaauaaa

SEQ ID NO: 829382 - RNA, 22 nt, Human
auggcuuuucacagaggguucu

SEQ ID NO: 829383 - RNA, 22 nt, Human
ggccagcucuuguccacggagg

SEQ ID NO: 829384 - RNA, 22 nt, Human
ccauaauauuaaaugcuuuugu

SEQ ID NO: 829385 - RNA, 18 nt, Human
gcugucugaggucugagg

SEQ ID NO: 829386 - RNA, 22 nt, Human
acuuccugcagcuucucagccc

SEQ ID NO: 829387 - RNA, 22 nt, Human
aaaucugggucaagguggagug

SEQ ID NO: 829388 - RNA, 22 nt, Human
uaugcccagcuuaaaguacaca

SEQ ID NO: 829389 - RNA, 22 nt, Human
ugaagcugugggcaguggagcc

SEQ ID NO: 829390 - RNA, 22 nt, Human
agaagccauguuuaguaggaug

SEQ ID NO: 829391 - RNA, 22 nt, Human
uuuucauuguuacuaugagcua

SEQ ID NO: 829392 - RNA, 22 nt, Human
agagccuugaagaucuggaaaa

SEQ ID NO: 829393 - RNA, 22 nt, Human
ggagucagccugucagagugua

SEQ ID NO: 829394 - RNA, 22 nt, Human
ggcugucugugguggagcguug

SEQ ID NO: 829395 - RNA, 22 nt, Human
gccuggagacaaggacaaaggg

SEQ ID NO: 829396 - RNA, 23 nt, Human
ugagcugguauuguccaucucca

SEQ ID NO: 829397 - RNA, 22 nt, Human
aggcuggcuuggcucuccugug

SEQ ID NO: 829398 - RNA, 22 nt, Human
gugcucacugugagacguccug

SEQ ID NO: 829399 - RNA, 22 nt, Human
aucuuucaaucaggaaaaaucu

SEQ ID NO: 829400 - RNA, 22 nt, Human
ugucaccaccggaagaaacugc

SEQ ID NO: 829401 - RNA, 22 nt, Human
cuggcucagacagcugugcagu

SEQ ID NO: 829402 - RNA, 22 nt, Human
ugggcacuguagcuggugcugg

SEQ ID NO: 829403 - RNA, 22 nt, Human
ugcauuguuuagaacucuuugg

SEQ ID NO: 829404 - RNA, 22 nt, Human
cuggccucauagccaagcugug

SEQ ID NO: 829405 - RNA, 22 nt, Human
uagggcaguuucauguuaucuu

SEQ ID NO: 829406 - RNA, 22 nt, Human
caacugcugacaccaucacucc

SEQ ID NO: 829407 - RNA, 22 nt, Human
agucccuguacuuuccacugcc

SEQ ID NO: 829408 - RNA, 22 nt, Human
acagggcagagaggcaggcuug

SEQ ID NO: 829409 - RNA, 22 nt, Human
uucuccgcuaaguucucugcag

SEQ ID NO: 829410 - RNA, 22 nt, Human
agccuccaaaugucaggucccg

SEQ ID NO: 829411 - RNA, 22 nt, Human
uggaagccaggcccgcuccuaa

SEQ ID NO: 829412 - RNA, 22 nt, Human
uucuggagcuaaaguccacucu

SEQ ID NO: 829413 - RNA, 22 nt, Human
ccagggccaguaagauuggcau

SEQ ID NO: 829414 - RNA, 22 nt, Human
aagaauucacugguagagucaa

SEQ ID NO: 829415 - RNA, 22 nt, Human
uugaaaggguuaaagugguaaa

SEQ ID NO: 829416 - RNA, 22 nt, Human
uauuucugggaguucagaaauu

SEQ ID NO: 829417 - RNA, 20 nt, Human
ggagagcagggaagacagua

SEQ ID NO: 829418 - RNA, 22 nt, Human
aucauguuccagaaacagugau

SEQ ID NO: 829419 - RNA, 22 nt, Human
agcagcuggugagcaagcucag

SEQ ID NO: 829420 - RNA, 22 nt, Human
ugucuccucauacugucauauu

SEQ ID NO: 829421 - RNA, 22 nt, Human
ccaaggcuucccagagaugcuc

SEQ ID NO: 829422 - RNA, 22 nt, Human
cggggcuguagcacagcugagc

SEQ ID NO: 829423 - RNA, 23 nt, Human
uggcagugaucaaaagcuuacau

SEQ ID NO: 829424 - RNA, 20 nt, Human
uacagaaacaggacuuuugg

SEQ ID NO: 829425 - RNA, 22 nt, Human
uuguuuuuaugaacauccagga

SEQ ID NO: 829426 - RNA, 19 nt, Human
agacagagcucaguggguu

SEQ ID NO: 829427 - RNA, 22 nt, Human
uccucagggaagaugagccuca

SEQ ID NO: 829428 - RNA, 22 nt, Human
agcugccagaugacagugcuau

SEQ ID NO: 829429 - RNA, 22 nt, Human
gucccagggaugcagacaugag

SEQ ID NO: 829430 - RNA, 22 nt, Human
ggcauguuucaucacaucaaga

SEQ ID NO: 829431 - RNA, 22 nt, Human
uggcagaggaaaaagucacugg

SEQ ID NO: 829432 - RNA, 22 nt, Human
gcacagccagcaucugagggau

SEQ ID NO: 829433 - RNA, 22 nt, Human
gcccaggaguugaagggcugac

SEQ ID NO: 829434 - RNA, 22 nt, Human
cagacacaccaggcccauucug

SEQ ID NO: 829435 - RNA, 22 nt, Human
ucuggucaguaauaagaagugg

SEQ ID NO: 829436 - RNA, 22 nt, Human
cuggaagguucuuugugugccu

SEQ ID NO: 829437 - RNA, 22 nt, Human
uugcuucaguagcucuuuaaag

SEQ ID NO: 829438 - RNA, 22 nt, Human
aaauccuaaggagaauaugauu

SEQ ID NO: 829439 - RNA, 22 nt, Human
aagcaccuggguuauaucuuag

SEQ ID NO: 829440 - RNA, 22 nt, Human
cucuggagaacuccuugugucu

SEQ ID NO: 829441 - RNA, 22 nt, Human
cuggccuagcucucugcuugaa

SEQ ID NO: 829442 - RNA, 22 nt, Human
gaaaggugccccauaggcagga

SEQ ID NO: 829443 - RNA, 22 nt, Human
cugguuuagcuguaagguuccc

SEQ ID NO: 829444 - RNA, 22 nt, Human
uagucuuuuuaauaaauaaugc

SEQ ID NO: 829445 - RNA, 22 nt, Human
agcagccaagguaaccugugcu

SEQ ID NO: 829446 - RNA, 22 nt, Human
uuguccuuggaugaagcuggga

SEQ ID NO: 829447 - RNA, 22 nt, Human
gugauuuaguguuaaguauguu

SEQ ID NO: 829448 - RNA, 22 nt, Human
acuguacacgugucauuuacag

SEQ ID NO: 829449 - RNA, 22 nt, Human
cccuggaggaccccaauguggc

SEQ ID NO: 829450 - RNA, 22 nt, Human
uuucaaauaccauaaaccuaau

SEQ ID NO: 829451 - RNA, 17 nt, Human
gcuuccugugcugggga

SEQ ID NO: 829452 - RNA, 17 nt, Human
uggcuucccugggccac

SEQ ID NO: 829453 - RNA, 22 nt, Human
aaagaaauagauggcauuuaaa

SEQ ID NO: 829454 - RNA, 22 nt, Human
aggccagggucccacacucgca

SEQ ID NO: 829455 - RNA, 22 nt, Human
gggcuccagcccgggaccaggu

SEQ ID NO: 829456 - RNA, 22 nt, Human
ggcaaaguuuucaucucauaac

SEQ ID NO: 829457 - RNA, 22 nt, Human
ucagcaaugagaacuggcauuu

SEQ ID NO: 829458 - RNA, 22 nt, Human
augaacaauaaaauagaucaca

SEQ ID NO: 829459 - RNA, 17 nt, Human
uucaaugauuaaugcau

SEQ ID NO: 829460 - RNA, 18 nt, Human
ccagguggugacagagau

SEQ ID NO: 829461 - RNA, 21 nt, Human
gggcagcucuguuuuauuuuc

SEQ ID NO: 829462 - RNA, 22 nt, Human
acuuuggaucugauguaaucag

SEQ ID NO: 829463 - RNA, 22 nt, Human
aggcacugugcugaugucuuau

SEQ ID NO: 829464 - RNA, 22 nt, Human
ccuggugccacuagagaauguc

SEQ ID NO: 829465 - RNA, 22 nt, Human
gucauuguguggacauggagaa

SEQ ID NO: 829466 - RNA, 22 nt, Human
uggcagagagacucuccuugau

SEQ ID NO: 829467 - RNA, 22 nt, Human
ugcccugcagugagugcgucug

SEQ ID NO: 829468 - RNA, 22 nt, Human
aaaugcacucugcuucugugac

SEQ ID NO: 829469 - RNA, 22 nt, Human
guuugaaaaaagcaguauguaa

SEQ ID NO: 829470 - RNA, 22 nt, Human
cugagccauccauaccagcuua

SEQ ID NO: 829471 - RNA, 22 nt, Human
cugcucuguucccccaucaucu

SEQ ID NO: 829472 - RNA, 22 nt, Human
cucaggauauugggcuggagca

SEQ ID NO: 829473 - RNA, 22 nt, Human
aucuguucuucaaaauauuaca

SEQ ID NO: 829474 - RNA, 22 nt, Human
ccagggucucugcugccugaga

SEQ ID NO: 829475 - RNA, 22 nt, Human
caggacaguauaggcuuuagga

SEQ ID NO: 829476 - RNA, 19 nt, Human
aagaagcaauaagcuguga

SEQ ID NO: 829477 - RNA, 22 nt, Human
auguccuuugcuucucuggucc

SEQ ID NO: 829478 - RNA, 22 nt, Human
ucauggagacuuugagccuguu

SEQ ID NO: 829479 - RNA, 22 nt, Human
aacauaauguggccaaagucac

SEQ ID NO: 829480 - RNA, 22 nt, Human
cauggcuucuaagugauaacgu

SEQ ID NO: 829481 - RNA, 22 nt, Human
gggcucuggauggagccugcag

SEQ ID NO: 829482 - RNA, 21 nt, Human
ggugggcacaggagagcagag

SEQ ID NO: 829483 - RNA, 20 nt, Human
ugcagggcugccucccagcu

SEQ ID NO: 829484 - RNA, 23 nt, Human
agcagccagagauccucggcccu

SEQ ID NO: 829485 - RNA, 22 nt, Human
aacuggauuuaggaacagagaa

SEQ ID NO: 829486 - RNA, 22 nt, Human
gaggccugguuugcaugagaau

SEQ ID NO: 829487 - RNA, 22 nt, Human
aggaggggcauagaaauguaau

SEQ ID NO: 829488 - RNA, 22 nt, Human
acugucuccucaucaugccugg

SEQ ID NO: 829489 - RNA, 22 nt, Human
ugacaguuaagguauacauuca

SEQ ID NO: 829490 - RNA, 22 nt, Human
ggcacugagaggcucuuccuaa

SEQ ID NO: 829491 - RNA, 19 nt, Human
ugcaagcuuuuucuuguua

SEQ ID NO: 829492 - RNA, 22 nt, Human
uaagaacagauaaaguuucccc

SEQ ID NO: 829493 - RNA, 22 nt, Human
gcucacugccauucucuagaug

SEQ ID NO: 829494 - RNA, 22 nt, Human
ucaagagauugaauaauaacug

SEQ ID NO: 829495 - RNA, 21 nt, Human
augacagaugcugcagaucgu

SEQ ID NO: 829496 - RNA, 22 nt, Human
acuuugugcccaacagaaagaa

SEQ ID NO: 829497 - RNA, 22 nt, Human
ccugucugcagauaucucaggu

SEQ ID NO: 829498 - RNA, 22 nt, Human
ugucaccacuggcugaaacacc

SEQ ID NO: 829499 - RNA, 22 nt, Human
cacccaggcuggagugcagggg

SEQ ID NO: 829500 - RNA, 22 nt, Human
uugcuuccaguccaagucuguu

SEQ ID NO: 829501 - RNA, 19 nt, Human
aggcugcaagguggugggc

SEQ ID NO: 829502 - RNA, 22 nt, Human
cuaggaggcgggggcugcagua

SEQ ID NO: 829503 - RNA, 22 nt, Human
cuguguccugcgucaagccaau

SEQ ID NO: 829504 - RNA, 22 nt, Human
ggaggaggggcgcuuugucuau

SEQ ID NO: 829505 - RNA, 22 nt, Human
agucaaaugaguaaauauauaa

SEQ ID NO: 829506 - RNA, 22 nt, Human
acuauacauaaaacauuugggu

SEQ ID NO: 829507 - RNA, 22 nt, Human
cuuccucccccacacacucacu

SEQ ID NO: 829508 - RNA, 22 nt, Human
gaagcagcaaguauaggacagg

SEQ ID NO: 829509 - RNA, 22 nt, Human
uggauuuaauggaugaggggca

SEQ ID NO: 829510 - RNA, 22 nt, Human
ccagucccagcucugccaugcu

SEQ ID NO: 829511 - RNA, 22 nt, Human
cagaguguugaccauaagccca

SEQ ID NO: 829512 - RNA, 22 nt, Human
caaagggcucuagacucagcag

SEQ ID NO: 829513 - RNA, 22 nt, Human
cugccucucaggucccugagau

SEQ ID NO: 829514 - RNA, 22 nt, Human
auagaauuugcacuaaaucugc

SEQ ID NO: 829515 - RNA, 22 nt, Human
ucacagaagaugcuggauguug

SEQ ID NO: 829516 - RNA, 22 nt, Human
gggcugcuguagagaacauguu

SEQ ID NO: 829517 - RNA, 22 nt, Human
gcagagcuaucuucuggauuug

SEQ ID NO: 829518 - RNA, 22 nt, Human
uucaacacaggaacaugauaua

SEQ ID NO: 829519 - RNA, 22 nt, Human
uaacagaagagcaggcagcccu

SEQ ID NO: 829520 - RNA, 19 nt, Human
uguguaaagucugugguca

SEQ ID NO: 829521 - RNA, 22 nt, Human
agcagcucuguuuaccuggagg

SEQ ID NO: 829522 - RNA, 22 nt, Human
agacagcauggagcugauaaca

SEQ ID NO: 829523 - RNA, 22 nt, Human
gccaggcucagcagucaaccug

SEQ ID NO: 829524 - RNA, 22 nt, Human
cuucuucaagagaaugggagac

SEQ ID NO: 829525 - RNA, 22 nt, Human
gaacagcuucuugggagcuggg

SEQ ID NO: 829526 - RNA, 22 nt, Human
cagaguguggcaucuuccaacu

SEQ ID NO: 829527 - RNA, 22 nt, Human
ucuagaaacaugacauugaucu

SEQ ID NO: 829528 - RNA, 22 nt, Human
ccaggagacaaagaugacugcu

SEQ ID NO: 829529 - RNA, 22 nt, Human
gcagagccuugcgucaugugcc

SEQ ID NO: 829530 - RNA, 22 nt, Human
caaaggcaguuacugaaugaag

SEQ ID NO: 829531 - RNA, 22 nt, Human
aauugucaaacacaaauaagag

SEQ ID NO: 829532 - RNA, 22 nt, Human
aaucuuucccuauuaaaugugg

SEQ ID NO: 829533 - RNA, 22 nt, Human
ucaaaguaaaaguauagaguuu

SEQ ID NO: 829534 - RNA, 22 nt, Human
cuucugugcuucacaguugcca

SEQ ID NO: 829535 - RNA, 22 nt, Human
cccuccagccauggacccaggu

SEQ ID NO: 829536 - RNA, 17 nt, Human
gcagccagugcagcagg

SEQ ID NO: 829537 - RNA, 22 nt, Human
uuuccaaauaaggucacauucu

SEQ ID NO: 829538 - RNA, 22 nt, Human
cagggagggacaauugucaccu

SEQ ID NO: 829539 - RNA, 22 nt, Human
ggagucaggagcaggcugggcu

SEQ ID NO: 829540 - RNA, 23 nt, Human
aggcagagccaaggucaaaaccc

SEQ ID NO: 829541 - RNA, 22 nt, Human
acagaccaaaaaaggauauugg

SEQ ID NO: 829542 - RNA, 22 nt, Human
guaggcagggcuguggggagaa

SEQ ID NO: 829543 - RNA, 22 nt, Human
uuugaacaugcugcaugauaau

SEQ ID NO: 829544 - RNA, 21 nt, Human
uccucagggccccagagcacu

SEQ ID NO: 829545 - RNA, 22 nt, Human
uacauacacaaauauacuguuu

SEQ ID NO: 829546 - RNA, 22 nt, Human
ugucugugaccucuuaggcaag

SEQ ID NO: 829547 - RNA, 22 nt, Human
gcugcccaggguggagccggcu

SEQ ID NO: 829548 - RNA, 22 nt, Human
agccaaggacacggagccuccu

SEQ ID NO: 829549 - RNA, 22 nt, Human
ugacagcauaacacuggucuug

SEQ ID NO: 829550 - RNA, 22 nt, Human
ucuccuuugaaaguuaggacug

SEQ ID NO: 829551 - RNA, 22 nt, Human
agaucugaccuaaccccaccac

SEQ ID NO: 829552 - RNA, 22 nt, Human
ucacaacucuuuccauuuaaua

SEQ ID NO: 829553 - RNA, 22 nt, Human
aauuccagaggaggacaguccu

SEQ ID NO: 829554 - RNA, 22 nt, Human
ccuaugccugucacucugcgcu

SEQ ID NO: 829555 - RNA, 22 nt, Human
cuguccuggagggcauaggacg

SEQ ID NO: 829556 - RNA, 22 nt, Human
aagcacauuguacauuugugcu

SEQ ID NO: 829557 - RNA, 22 nt, Human
gagcugggcacacgccacuuga

SEQ ID NO: 829558 - RNA, 17 nt, Human
uccuggcucugccacug

SEQ ID NO: 829559 - RNA, 22 nt, Human
ucagggacugcagagggaagcu

SEQ ID NO: 829560 - RNA, 22 nt, Human
cugggcacaggggagcagaguc

SEQ ID NO: 829561 - RNA, 22 nt, Human
cauaacuagagugaaauguuga

SEQ ID NO: 829562 - RNA, 22 nt, Human
ugaccaaagaguugcuuguauu

SEQ ID NO: 829563 - RNA, 22 nt, Human
aguuauauaacuaucuagaugc

SEQ ID NO: 829564 - RNA, 19 nt, Human
uuugaauccagcugguaac

SEQ ID NO: 829565 - RNA, 22 nt, Human
accaggagaggcacuugcaaug

SEQ ID NO: 829566 - RNA, 22 nt, Human
agcagcucacaggauuccugaa

SEQ ID NO: 829567 - RNA, 22 nt, Human
uaauuauucuagucacauagca

SEQ ID NO: 829568 - RNA, 22 nt, Human
cagaccuggaaaacaggcuugc

SEQ ID NO: 829569 - RNA, 22 nt, Human
gaucagaaucuucauuuucagu

SEQ ID NO: 829570 - RNA, 22 nt, Human
cacauaaguggguuccauugca

SEQ ID NO: 829571 - RNA, 22 nt, Human
uggaaagacauucagccgcugg

SEQ ID NO: 829572 - RNA, 23 nt, Human
uaauacugcuucagaggcuuaga

SEQ ID NO: 829573 - RNA, 22 nt, Human
cagcauggggcuuggagucagc

SEQ ID NO: 829574 - RNA, 21 nt, Human
aaacugaccuugccugagaca

SEQ ID NO: 829575 - RNA, 22 nt, Human
cccugcagaccaaugccauaga

SEQ ID NO: 829576 - RNA, 21 nt, Human
gcucccuggcugugugaccug

SEQ ID NO: 829577 - RNA, 22 nt, Human
cuguggcuaugguguacauacu

SEQ ID NO: 829578 - RNA, 22 nt, Human
ccuggagcaggagcugcagagg

SEQ ID NO: 829579 - RNA, 22 nt, Human
uggcccugcagaacuagccugg

SEQ ID NO: 829580 - RNA, 22 nt, Human
aauacugccugugagguaacuc

SEQ ID NO: 829581 - RNA, 22 nt, Human
aggcagacaaggacacaguggg

SEQ ID NO: 829582 - RNA, 22 nt, Human
gagaaccucuccacaagucugg

SEQ ID NO: 829583 - RNA, 22 nt, Human
accuuuuuguucuguucucagc

SEQ ID NO: 829584 - RNA, 22 nt, Human
uccagagccuauauguucaacu

SEQ ID NO: 829585 - RNA, 22 nt, Human
gauacauuuuaucuccuaacag

SEQ ID NO: 829586 - RNA, 22 nt, Human
acugcagcaaagcccgugucuu

SEQ ID NO: 829587 - RNA, 22 nt, Human
uauuccuauuucuaaacauaug

SEQ ID NO: 829588 - RNA, 22 nt, Human
agccuccacagaugcaaagggc

SEQ ID NO: 829589 - RNA, 22 nt, Human
ccagagucuaugaguccucauu

SEQ ID NO: 829590 - RNA, 22 nt, Human
ucacaugcccuguauuuaccag

SEQ ID NO: 829591 - RNA, 22 nt, Human
agcugccaucugaagaacugca

SEQ ID NO: 829592 - RNA, 22 nt, Human
gcacaauaauucuuguuuugcu

SEQ ID NO: 829593 - RNA, 22 nt, Human
aggucagaagugccagggaauu

SEQ ID NO: 829594 - RNA, 22 nt, Human
auaaggcagucccuuaacaagg

SEQ ID NO: 829595 - RNA, 22 nt, Human
gggaugucacugugccuggcac

SEQ ID NO: 829596 - RNA, 22 nt, Human
uuacagaagugaaggccuuuaa

SEQ ID NO: 829597 - RNA, 22 nt, Human
aaacagcaggaacaucuugcca

SEQ ID NO: 829598 - RNA, 22 nt, Human
gagggcugccacguugggcgag

SEQ ID NO: 829599 - RNA, 22 nt, Human
ugugaauagugccgcaauaaac

SEQ ID NO: 829600 - RNA, 22 nt, Human
cugagccaaccacagcaggagc

SEQ ID NO: 829601 - RNA, 22 nt, Human
caggugcucccagagaagugcu

SEQ ID NO: 829602 - RNA, 22 nt, Human
guuuucaaggggauuuaacuga

SEQ ID NO: 829603 - RNA, 22 nt, Human
cagcaggggaacugugggccag

SEQ ID NO: 829604 - RNA, 22 nt, Human
auucuucaguauguguggauug

SEQ ID NO: 829605 - RNA, 22 nt, Human
augaagucugcacaugcaugug

SEQ ID NO: 829606 - RNA, 22 nt, Human
cucaccaggaacagcugcggag

SEQ ID NO: 829607 - RNA, 22 nt, Human
gaaaucugcccagugcacuggu

SEQ ID NO: 829608 - RNA, 23 nt, Human
aaaugcagggucgcagguuacag

SEQ ID NO: 829609 - RNA, 22 nt, Human
acaaaugccauauauaaauucu

SEQ ID NO: 829610 - RNA, 17 nt, Human
gcugagugcagggaguc

SEQ ID NO: 829611 - RNA, 22 nt, Human
ccaggagagcagaagcccaggc

SEQ ID NO: 829612 - RNA, 18 nt, Human
agggucagugucacuggc

SEQ ID NO: 829613 - RNA, 22 nt, Human
uaggcagggauuaggguugauu

SEQ ID NO: 829614 - RNA, 22 nt, Human
cugcugugcaacauugcaccua

SEQ ID NO: 829615 - RNA, 22 nt, Human
caggccuggguucaaaucccuu

SEQ ID NO: 829616 - RNA, 22 nt, Human
acauacauaugacaacuuuccu

SEQ ID NO: 829617 - RNA, 22 nt, Human
acugaaggaaacuuuuguguuu

SEQ ID NO: 829618 - RNA, 22 nt, Human
uccugccucuccaugcuaacua

SEQ ID NO: 829619 - RNA, 21 nt, Human
ggcacugagccagauggacuc

SEQ ID NO: 829620 - RNA, 23 nt, Human
agaauuguaaauagaauauaccu

SEQ ID NO: 829621 - RNA, 22 nt, Human
gcagggacugugaucucacaga

SEQ ID NO: 829622 - RNA, 22 nt, Human
ugcuuaauacguauuugcugga

SEQ ID NO: 829623 - RNA, 22 nt, Human
uggagcugguaaacagugacau

SEQ ID NO: 829624 - RNA, 22 nt, Human
gcacugcagccucagauggugg

SEQ ID NO: 829625 - RNA, 21 nt, Human
aagagcugucaggaaggcugc

SEQ ID NO: 829626 - RNA, 22 nt, Human
uccagaggcuccaaagggagau

SEQ ID NO: 829627 - RNA, 17 nt, Human
ucagcaggggccaagcu

SEQ ID NO: 829628 - RNA, 22 nt, Human
aaagauuucagaagccugugcc

SEQ ID NO: 829629 - RNA, 22 nt, Human
aucacauugccagugauuaccc

SEQ ID NO: 829630 - RNA, 22 nt, Human
gaagccccaaacccucgccauc

SEQ ID NO: 829631 - RNA, 22 nt, Human
uggcuuuaaaucuguauucaua

SEQ ID NO: 829632 - RNA, 22 nt, Human
ccagcagcuuuauuggcucucc

SEQ ID NO: 829633 - RNA, 22 nt, Human
cuggauuuaggacuaguccaag

SEQ ID NO: 829634 - RNA, 22 nt, Human
ugcugcucuguaaagugaugag

SEQ ID NO: 829635 - RNA, 22 nt, Human
uaacacauaagcugagaccaug

SEQ ID NO: 829636 - RNA, 22 nt, Human
uguuaucugagcaacgucgacg

SEQ ID NO: 829637 - RNA, 22 nt, Human
ugaugggaggugcugcaggacc

SEQ ID NO: 829638 - RNA, 22 nt, Human
cuggcagcauuaacagagagca

SEQ ID NO: 829639 - RNA, 22 nt, Human
gaagcagcuagcccacuaguca

SEQ ID NO: 829640 - RNA, 22 nt, Human
agaggccagcagugccuaucug

SEQ ID NO: 829641 - RNA, 22 nt, Human
gccacagggcagaugcgcagag

SEQ ID NO: 829642 - RNA, 22 nt, Human
agagugauucuaguuagggaau

SEQ ID NO: 829643 - RNA, 22 nt, Human
auaaguucagguaaagaaauca

SEQ ID NO: 829644 - RNA, 22 nt, Human
gggguggauuccuacaggucca

SEQ ID NO: 829645 - RNA, 22 nt, Human
uacccagggcuuuucugaugca

SEQ ID NO: 829646 - RNA, 22 nt, Human
ucaguguccggagccugagugc

SEQ ID NO: 829647 - RNA, 20 nt, Human
uauaacaguguugggugugu

SEQ ID NO: 829648 - RNA, 22 nt, Human
uucauagaucucaauuuugagg

SEQ ID NO: 829649 - RNA, 22 nt, Human
auggauaagucaaagaguaucc

SEQ ID NO: 829650 - RNA, 22 nt, Human
gggcucuggaaggugcaccaug

SEQ ID NO: 829651 - RNA, 22 nt, Human
ucugucugcucauuuaccucag

SEQ ID NO: 829652 - RNA, 22 nt, Human
cuucaucaacucuaacaaaugu

SEQ ID NO: 829653 - RNA, 22 nt, Human
ucagaacagaagaaggaacacg

SEQ ID NO: 829654 - RNA, 22 nt, Human
ggggccuguagagcuucaggga

SEQ ID NO: 829655 - RNA, 22 nt, Human
auagaauucguguuuguaauuc

SEQ ID NO: 829656 - RNA, 22 nt, Human
caggcagcgcucguggccuggc

SEQ ID NO: 829657 - RNA, 22 nt, Human
gacugucauucuagugcccaug

SEQ ID NO: 829658 - RNA, 22 nt, Human
gccuggagcucuccacuugggg

SEQ ID NO: 829659 - RNA, 22 nt, Human
ccugagaggcccucucacuguc

SEQ ID NO: 829660 - RNA, 22 nt, Human
cagaacugggcagggagcagag

SEQ ID NO: 829661 - RNA, 20 nt, Human
ucauuucuugggguuccaag

SEQ ID NO: 829662 - RNA, 22 nt, Human
ucugccuggauuuuggaaagcu

SEQ ID NO: 829663 - RNA, 22 nt, Human
gauuucuuuaugaaguacagaa

SEQ ID NO: 829664 - RNA, 22 nt, Human
uagucaccuguugugugaugcc

SEQ ID NO: 829665 - RNA, 20 nt, Human
cagcccuccaguggaggcag

SEQ ID NO: 829666 - RNA, 22 nt, Human
gcugcugucacggugcuaaggg

SEQ ID NO: 829667 - RNA, 22 nt, Human
aguuuuucugggaggcacugcu

SEQ ID NO: 829668 - RNA, 22 nt, Human
cacccagcagcacuuaagacua

SEQ ID NO: 829669 - RNA, 22 nt, Human
auggauaagaacaaauaucuga

SEQ ID NO: 829670 - RNA, 22 nt, Human
augcuguggggagugaggguag

SEQ ID NO: 829671 - RNA, 22 nt, Human
guuccaaagucucugagcugag

SEQ ID NO: 829672 - RNA, 22 nt, Human
cagggugccucccgcucgccgg

SEQ ID NO: 829673 - RNA, 22 nt, Human
aucagcugaaaaacaggcagca

SEQ ID NO: 829674 - RNA, 22 nt, Human
gaggcagcaaaauauaucauaa

SEQ ID NO: 829675 - RNA, 22 nt, Human
agagcuuauaucuuggccaucc

SEQ ID NO: 829676 - RNA, 22 nt, Human
gggacagcuguagugcuuggcu

SEQ ID NO: 829677 - RNA, 22 nt, Human
aaggaagacacagaugaaguga

SEQ ID NO: 829678 - RNA, 22 nt, Human
uuaaugauaccuauguuaauuu

SEQ ID NO: 829679 - RNA, 21 nt, Human
cugcaucucauagaacauguc

SEQ ID NO: 829680 - RNA, 22 nt, Human
uguccauggauagagcugcucg

SEQ ID NO: 829681 - RNA, 22 nt, Human
aggccugggacgggagccguga

SEQ ID NO: 829682 - RNA, 22 nt, Human
uuuuuaagcuccuuugauguca

SEQ ID NO: 829683 - RNA, 22 nt, Human
ccagcuggugggucuuucucug

SEQ ID NO: 829684 - RNA, 22 nt, Human
aagcagcagaccugauuuugaa

SEQ ID NO: 829685 - RNA, 22 nt, Human
agagccugaggaugucccagcu

SEQ ID NO: 829686 - RNA, 22 nt, Human
ugacacauuaaaugcucacaaa

SEQ ID NO: 829687 - RNA, 18 nt, Human
ggcagcuugacuagcaac

SEQ ID NO: 829688 - RNA, 22 nt, Human
ggccucugccccagccacaccu

SEQ ID NO: 829689 - RNA, 22 nt, Human
uguuugaauuuugcuaacgugu

SEQ ID NO: 829690 - RNA, 22 nt, Human
guguaaggugaaaucaacaaau

SEQ ID NO: 829691 - RNA, 22 nt, Human
gaggcagcggcucacagagaaa

SEQ ID NO: 829692 - RNA, 22 nt, Human
ccuggaaguuggagguugcagu

SEQ ID NO: 829693 - RNA, 22 nt, Human
ugguuuugcuaaaauagaaaga

SEQ ID NO: 829694 - RNA, 23 nt, Human
ucccagggaaggugagcgaggcu

SEQ ID NO: 829695 - RNA, 22 nt, Human
agggccugcaucaggagcuugg

SEQ ID NO: 829696 - RNA, 22 nt, Human
aaaauaucagcaaagggugaca

SEQ ID NO: 829697 - RNA, 22 nt, Human
ucugggagguaaccaugcugau

SEQ ID NO: 829698 - RNA, 22 nt, Human
uuuccaaaggaggaaccaguuu

SEQ ID NO: 829699 - RNA, 22 nt, Human
aagggccauaacuugcaguguu

SEQ ID NO: 829700 - RNA, 22 nt, Human
cuggguggaaagugcugagaau

SEQ ID NO: 829701 - RNA, 22 nt, Human
ucuuugcaugugcuucuuggcc

SEQ ID NO: 829702 - RNA, 22 nt, Human
uuaaggauguugugauuuauua

SEQ ID NO: 829703 - RNA, 22 nt, Human
auauccaagaaacaauuaauuc

SEQ ID NO: 829704 - RNA, 22 nt, Human
uggaagcuguggcauaacugag

SEQ ID NO: 829705 - RNA, 22 nt, Human
uauugacagagggucagaagag

SEQ ID NO: 829706 - RNA, 22 nt, Human
ugggaugggaucucgcuguguc

SEQ ID NO: 829707 - RNA, 22 nt, Human
acugaaggcuuucccaagguca

SEQ ID NO: 829708 - RNA, 23 nt, Human
agaucugauguuaccaagaauug

SEQ ID NO: 829709 - RNA, 22 nt, Human
cagaggcagccgggggagaacg

SEQ ID NO: 829710 - RNA, 22 nt, Human
gaaauauuacaguggaggggau

SEQ ID NO: 829711 - RNA, 22 nt, Human
auauucacugagcauaaagcca

SEQ ID NO: 829712 - RNA, 22 nt, Human
acacugaagagcacuuucaaag

SEQ ID NO: 829713 - RNA, 20 nt, Human
guggcaggcagugaaggagc

SEQ ID NO: 829714 - RNA, 22 nt, Human
uauuugaagauucuucugaugu

SEQ ID NO: 829715 - RNA, 19 nt, Human
ugccugucaguagaucuca

SEQ ID NO: 829716 - RNA, 22 nt, Human
cgaggcagacaaaaguuggaag

SEQ ID NO: 829717 - RNA, 22 nt, Human
ucuccaagcagggcugcaaggc

SEQ ID NO: 829718 - RNA, 22 nt, Human
auaaguaggaaaauuugaauau

SEQ ID NO: 829719 - RNA, 22 nt, Human
cuugccuguggcuaguuggcuc

SEQ ID NO: 829720 - RNA, 22 nt, Human
uggagcugggaguccugggcug

SEQ ID NO: 829721 - RNA, 22 nt, Human
ugaggggagcuagcaugccuug

SEQ ID NO: 829722 - RNA, 22 nt, Human
gcucaggagcucuugguggcgc

SEQ ID NO: 829723 - RNA, 22 nt, Human
ugguaaagaaggcuagaucuga

SEQ ID NO: 829724 - RNA, 22 nt, Human
uuuuugcaccaaccuaauagaa

SEQ ID NO: 829725 - RNA, 22 nt, Human
ccuguguggccaggcuggaguc

SEQ ID NO: 829726 - RNA, 22 nt, Human
agacaguguguguauauauggu

SEQ ID NO: 829727 - RNA, 22 nt, Human
cauuuugugcuagacacuaugg

SEQ ID NO: 829728 - RNA, 22 nt, Human
uuugcauugcauacaaggaacu

SEQ ID NO: 829729 - RNA, 22 nt, Human
ucugagaguacgggcugcgcgc

SEQ ID NO: 829730 - RNA, 22 nt, Human
gcugaaugaauguauuuuaaaa

SEQ ID NO: 829731 - RNA, 22 nt, Human
aggaucugugagugcugcagac

SEQ ID NO: 829732 - RNA, 22 nt, Human
aucaguuuauacuuauaaaucu

SEQ ID NO: 829733 - RNA, 23 nt, Human
ugguucuaggccuauaauuauau

SEQ ID NO: 829734 - RNA, 22 nt, Human
uacaguaagaugaaauagcaau

SEQ ID NO: 829735 - RNA, 22 nt, Human
cagagcuggguuugggaaaccu

SEQ ID NO: 829736 - RNA, 22 nt, Human
gcagccccaggagacgcccagg

SEQ ID NO: 829737 - RNA, 22 nt, Human
gcagaacauuucacaguaucuu

SEQ ID NO: 829738 - RNA, 22 nt, Human
ugucugguggguugacaggcag

SEQ ID NO: 829739 - RNA, 22 nt, Human
cacagggcaggccccaggccuc

SEQ ID NO: 829740 - RNA, 22 nt, Human
gaggagagagggacugucugca

SEQ ID NO: 829741 - RNA, 22 nt, Human
cuggcucaggaaaguugcugcu

SEQ ID NO: 829742 - RNA, 22 nt, Human
caggaacaauguaagucucauu

SEQ ID NO: 829743 - RNA, 22 nt, Human
ggagcugggguuggcaucuucc

SEQ ID NO: 829744 - RNA, 22 nt, Human
ugagcugggcugggcugagcug

SEQ ID NO: 829745 - RNA, 22 nt, Human
auaacuuagaguaggcaaaagu

SEQ ID NO: 829746 - RNA, 23 nt, Human
gcucagagguuuuucucuggaug

SEQ ID NO: 829747 - RNA, 22 nt, Human
ugucuuccucuuggcuugagcu

SEQ ID NO: 829748 - RNA, 22 nt, Human
ucagaagccggaagugcuccuc

SEQ ID NO: 829749 - RNA, 22 nt, Human
aggcacugaaggaagcuugcgc

SEQ ID NO: 829750 - RNA, 22 nt, Human
ggaggggaacuaaucccgugac

SEQ ID NO: 829751 - RNA, 22 nt, Human
ucucagagaucuuucugcaugu

SEQ ID NO: 829752 - RNA, 22 nt, Human
uagcugugagcacccaggcugu

SEQ ID NO: 829753 - RNA, 22 nt, Human
agauuuacuggagucuuuggug

SEQ ID NO: 829754 - RNA, 22 nt, Human
ggaggcuccacugcucuuccug

SEQ ID NO: 829755 - RNA, 22 nt, Human
uccuucagucuucugagccaua

SEQ ID NO: 829756 - RNA, 22 nt, Human
agcagcauagaagcugggagga

SEQ ID NO: 829757 - RNA, 22 nt, Human
gauaauaagcacagcaggaugu

SEQ ID NO: 829758 - RNA, 22 nt, Human
gagggcaguagccucguacccu

SEQ ID NO: 829759 - RNA, 22 nt, Human
cugcugcucgaccagucccagg

SEQ ID NO: 829760 - RNA, 22 nt, Human
cuggggacuugcagacacaauu

SEQ ID NO: 829761 - RNA, 22 nt, Human
ugggugaggaugaugaggcagc

SEQ ID NO: 829762 - RNA, 22 nt, Human
cccucagcuccacccucagcag

SEQ ID NO: 829763 - RNA, 21 nt, Human
ggagcugcaggagccgaaggc

SEQ ID NO: 829764 - RNA, 19 nt, Human
guggccugcgcugggugcg

SEQ ID NO: 829765 - RNA, 22 nt, Human
agccagaggccagccugccuca

SEQ ID NO: 829766 - RNA, 18 nt, Human
aucuuuccauagcauguu

SEQ ID NO: 829767 - RNA, 22 nt, Human
agcaguggaccucagugcuauu

SEQ ID NO: 829768 - RNA, 22 nt, Human
ucuagaaauuuugccuuguauu

SEQ ID NO: 829769 - RNA, 22 nt, Human
ugucaaaaauaagagagauugu

SEQ ID NO: 829770 - RNA, 22 nt, Human
agcagagaagacacaggcuuca

SEQ ID NO: 829771 - RNA, 22 nt, Human
ugugaaauucuugaaaugcaca

SEQ ID NO: 829772 - RNA, 22 nt, Human
cguuggagacacuugaggacuu

SEQ ID NO: 829773 - RNA, 22 nt, Human
uuauguacaauguuaauguaaa

SEQ ID NO: 829774 - RNA, 22 nt, Human
cugucuguuucugauucaaccu

SEQ ID NO: 829775 - RNA, 22 nt, Human
aucuagauuagguauaagagcu

SEQ ID NO: 829776 - RNA, 19 nt, Human
ugcugaaguugucagucug

SEQ ID NO: 829777 - RNA, 22 nt, Human
ggugcagaaggaagggagcugg

SEQ ID NO: 829778 - RNA, 22 nt, Human
acaggcagcacuaaucucuggu

SEQ ID NO: 829779 - RNA, 19 nt, Human
gggcuucugggaucaagag

SEQ ID NO: 829780 - RNA, 22 nt, Human
ccucagagaaagguauggcuga

SEQ ID NO: 829781 - RNA, 22 nt, Human
ucucagaguuccucuggagucc

SEQ ID NO: 829782 - RNA, 22 nt, Human
cagucccacaagaucuccacaa

SEQ ID NO: 829783 - RNA, 22 nt, Human
ggcacugauuccauucaugaag

SEQ ID NO: 829784 - RNA, 22 nt, Human
agccacagucaaccuguccaua

SEQ ID NO: 829785 - RNA, 22 nt, Human
aggagcagaacugauucugacu

SEQ ID NO: 829786 - RNA, 22 nt, Human
cuggaaggucuguccccacugc

SEQ ID NO: 829787 - RNA, 22 nt, Human
uaugcugugcuagauacaauau

SEQ ID NO: 829788 - RNA, 22 nt, Human
ucccagggacucucugccuucc

SEQ ID NO: 829789 - RNA, 23 nt, Human
agucucagcuggaaacauguguc

SEQ ID NO: 829790 - RNA, 22 nt, Human
cagagagaggccacugcuauua

SEQ ID NO: 829791 - RNA, 22 nt, Human
uucaagaucuuccaaaggauac

SEQ ID NO: 829792 - RNA, 20 nt, Human
aggaggcauagucuggaaag

SEQ ID NO: 829793 - RNA, 22 nt, Human
uagcauuuauuccagauuugga

SEQ ID NO: 829794 - RNA, 22 nt, Human
uuauuuauggcacuguuggugg

SEQ ID NO: 829795 - RNA, 22 nt, Human
uguacaauagcuauuaucucca

SEQ ID NO: 829796 - RNA, 22 nt, Human
uggcagggccugcucaucaucc

SEQ ID NO: 829797 - RNA, 22 nt, Human
uccuucuuucccccuagucauu

SEQ ID NO: 829798 - RNA, 22 nt, Human
ccuggagagagaggccaacugc

SEQ ID NO: 829799 - RNA, 22 nt, Human
gggcaguuuauucuagaugguu

SEQ ID NO: 829800 - RNA, 22 nt, Human
uuuugaaagaguccugcuacag

SEQ ID NO: 829801 - RNA, 22 nt, Human
aggcucagcugguggugaucgc

SEQ ID NO: 829802 - RNA, 22 nt, Human
aggucagcaugaguagaaggua

SEQ ID NO: 829803 - RNA, 22 nt, Human
cugcagccucaaccuccugagc

SEQ ID NO: 829804 - RNA, 22 nt, Human
ggcccugagcugaaguacugug

SEQ ID NO: 829805 - RNA, 22 nt, Human
ugcugccaccccucaccagagc

SEQ ID NO: 829806 - RNA, 21 nt, Human
ccccugggagcccugucagua

SEQ ID NO: 829807 - RNA, 22 nt, Human
aggcaguuguagagagggcucu

SEQ ID NO: 829808 - RNA, 21 nt, Human
auuauuauuucuguguccagc

SEQ ID NO: 829809 - RNA, 22 nt, Human
auaugugaaguggguuauuuug

SEQ ID NO: 829810 - RNA, 22 nt, Human
ugcaggcaggggaugagcagcc

SEQ ID NO: 829811 - RNA, 22 nt, Human
auccaaacauguaccacacuaa

SEQ ID NO: 829812 - RNA, 22 nt, Human
acugaaggaaagccuuugcaug

SEQ ID NO: 829813 - RNA, 22 nt, Human
cccaggaauuggaggcugcagu

SEQ ID NO: 829814 - RNA, 22 nt, Human
uccugcagccacugcaggcaga

SEQ ID NO: 829815 - RNA, 22 nt, Human
gcagccagaagacucagaacaa

SEQ ID NO: 829816 - RNA, 22 nt, Human
cauggauugaauauaaauuaga

SEQ ID NO: 829817 - RNA, 22 nt, Human
uauggcuuuucauuccuaugug

SEQ ID NO: 829818 - RNA, 22 nt, Human
gcuggaucccugugggaguggu

SEQ ID NO: 829819 - RNA, 22 nt, Human
gagcucagauucuggugucaga

SEQ ID NO: 829820 - RNA, 22 nt, Human
aaggcagccuuuugaguugauu

SEQ ID NO: 829821 - RNA, 19 nt, Human
ggcuccuguggcugcagcc

SEQ ID NO: 829822 - RNA, 22 nt, Human
ccaggccauucccagaguugcu

SEQ ID NO: 829823 - RNA, 22 nt, Human
aaugcugcaagaggugaaaaga

SEQ ID NO: 829824 - RNA, 22 nt, Human
ugcugucugauucagggugauu

SEQ ID NO: 829825 - RNA, 22 nt, Human
agggagugguuaagaaggugca

SEQ ID NO: 829826 - RNA, 22 nt, Human
cagggccagagagggcuggcug

SEQ ID NO: 829827 - RNA, 22 nt, Human
cccaggaacagggcucagaccc

SEQ ID NO: 829828 - RNA, 22 nt, Human
gucacacuagggccaaguggag

SEQ ID NO: 829829 - RNA, 22 nt, Human
uggauuuauggagaccgaaagu

SEQ ID NO: 829830 - RNA, 22 nt, Human
acagggccucagcugauucugg

SEQ ID NO: 829831 - RNA, 18 nt, Human
cguuuuuccgggauugca

SEQ ID NO: 829832 - RNA, 22 nt, Human
auauacaguuuuacaggguuuc

SEQ ID NO: 829833 - RNA, 22 nt, Human
cacuucaauuaacuucagcauu

SEQ ID NO: 829834 - RNA, 22 nt, Human
uggcucuguuuguuaacuagac

SEQ ID NO: 829835 - RNA, 22 nt, Human
uggaggagaauuuauggucgaa

SEQ ID NO: 829836 - RNA, 22 nt, Human
ccagggcaggggcuggaguuca

SEQ ID NO: 829837 - RNA, 22 nt, Human
uccugugccuccaccugcuccg

SEQ ID NO: 829838 - RNA, 19 nt, Human
acaagggcaggcaagguga

SEQ ID NO: 829839 - RNA, 22 nt, Human
gcugugcuggaaggggaccugc

SEQ ID NO: 829840 - RNA, 23 nt, Human
uauggcuuacagugcuuuaggua

SEQ ID NO: 829841 - RNA, 23 nt, Human
agccagggcacugguggagauug

SEQ ID NO: 829842 - RNA, 22 nt, Human
agcugccacugagggugcacag

SEQ ID NO: 829843 - RNA, 22 nt, Human
aggggcugcuggguccgccccu

SEQ ID NO: 829844 - RNA, 22 nt, Human
gcuguucccauguggggcucag

SEQ ID NO: 829845 - RNA, 22 nt, Human
gcagccacucucauuccacgug

SEQ ID NO: 829846 - RNA, 22 nt, Human
augaaaauacugugguugauag

SEQ ID NO: 829847 - RNA, 22 nt, Human
uaaugcacauagaaguacuuag

SEQ ID NO: 829848 - RNA, 22 nt, Human
cggcagagcuuccugcucagcg

SEQ ID NO: 829849 - RNA, 23 nt, Human
gcagacagagcagacuaagacaa

SEQ ID NO: 829850 - RNA, 22 nt, Human
gguuugaacagcuuuggagaag

SEQ ID NO: 829851 - RNA, 22 nt, Human
gagguauguaugcuacauucuu

SEQ ID NO: 829852 - RNA, 22 nt, Human
ucaguucugcuagaaaaacagu

SEQ ID NO: 829853 - RNA, 22 nt, Human
cagcuggcuccaccucugggcu

SEQ ID NO: 829854 - RNA, 22 nt, Human
aggccucacucucagagcuucu

SEQ ID NO: 829855 - RNA, 22 nt, Human
aaugcauauguaggcaagcagu

SEQ ID NO: 829856 - RNA, 22 nt, Human
cagggcagugaagaacacacgu

SEQ ID NO: 829857 - RNA, 22 nt, Human
aaagaaucacauccuucagcaa

SEQ ID NO: 829858 - RNA, 22 nt, Human
ugaggaggucagagucuggcug

SEQ ID NO: 829859 - RNA, 22 nt, Human
gugccugguuuggggaguguuc

SEQ ID NO: 829860 - RNA, 22 nt, Human
aaaaaugugaccacaggguguu

SEQ ID NO: 829861 - RNA, 22 nt, Human
cucacagaugcugugggucagg

SEQ ID NO: 829862 - RNA, 22 nt, Human
agagaugucgccuugcccaggg

SEQ ID NO: 829863 - RNA, 22 nt, Human
gagacaggauuuaaccaaagcu

SEQ ID NO: 829864 - RNA, 22 nt, Human
aaaagguagauucuccuucuau

SEQ ID NO: 829865 - RNA, 22 nt, Human
ggcuccucucuggccgcucccg

SEQ ID NO: 829866 - RNA, 22 nt, Human
cguggccuuugagugagcuccc

SEQ ID NO: 829867 - RNA, 23 nt, Human
gcugucugucaucucugcgggag

SEQ ID NO: 829868 - RNA, 22 nt, Human
ggcugccugaacuuuggggaaa

SEQ ID NO: 829869 - RNA, 18 nt, Human
uggccuggagacaacucu

SEQ ID NO: 829870 - RNA, 22 nt, Human
gagcuggugaucagcuggagga

SEQ ID NO: 829871 - RNA, 22 nt, Human
ugucaaagccugaaucacauag

SEQ ID NO: 829872 - RNA, 22 nt, Human
augaaacagugaauuagucaag

SEQ ID NO: 829873 - RNA, 22 nt, Human
acugauuacacgaguucugacu

SEQ ID NO: 829874 - RNA, 22 nt, Human
uuagaaaacauaagugguaaag

SEQ ID NO: 829875 - RNA, 22 nt, Human
gggcucugcgcucagcuccagc

SEQ ID NO: 829876 - RNA, 22 nt, Human
uagcacauaacuuagaauaguu

SEQ ID NO: 829877 - RNA, 21 nt, Human
ccuucuccacagggucuccgg

SEQ ID NO: 829878 - RNA, 22 nt, Human
cauggcuuuuuagcauauucaa

SEQ ID NO: 829879 - RNA, 22 nt, Human
ucagaagagcuggugcugccug

SEQ ID NO: 829880 - RNA, 22 nt, Human
uaaagaacacagggaauagcac

SEQ ID NO: 829881 - RNA, 20 nt, Human
ccugucuggagacaaagaga

SEQ ID NO: 829882 - RNA, 22 nt, Human
gggcagagguucaacuucaaca

SEQ ID NO: 829883 - RNA, 22 nt, Human
guguauaaugcuguuuguacau

SEQ ID NO: 829884 - RNA, 22 nt, Human
cuuaggcauccaggguucuucc

SEQ ID NO: 829885 - RNA, 22 nt, Human
augguuuauugcuuuaaugaaa

SEQ ID NO: 829886 - RNA, 22 nt, Human
gagugcaguuggggugagggga

SEQ ID NO: 829887 - RNA, 22 nt, Human
uguguacauaucuauccuagau

SEQ ID NO: 829888 - RNA, 23 nt, Human
ugcagagggacugaagccagcuu

SEQ ID NO: 829889 - RNA, 22 nt, Human
aacuagucagugauucucagaa

SEQ ID NO: 829890 - RNA, 22 nt, Human
ugaacaacugcaaaaaucucca

SEQ ID NO: 829891 - RNA, 22 nt, Human
gcaguccucucauuggccuccu

SEQ ID NO: 829892 - RNA, 17 nt, Human
gaggacagggaaguagg

SEQ ID NO: 829893 - RNA, 22 nt, Human
uugaaggaggcuccuuuuuaaa

SEQ ID NO: 829894 - RNA, 17 nt, Human
ucuggccuuccugaacu

SEQ ID NO: 829895 - RNA, 22 nt, Human
cagucccaucucccagguggcu

SEQ ID NO: 829896 - RNA, 22 nt, Human
augcugaggacaaagagaucaa

SEQ ID NO: 829897 - RNA, 22 nt, Human
ugcuguuauacuuagcugguua

SEQ ID NO: 829898 - RNA, 22 nt, Human
acagggccucagccagggcaga

SEQ ID NO: 829899 - RNA, 23 nt, Human
cccagggacacgaugacaccucc

SEQ ID NO: 829900 - RNA, 22 nt, Human
gggucuggacggcugcaggaag

SEQ ID NO: 829901 - RNA, 22 nt, Human
ucaggugggaccugcuaggaca

SEQ ID NO: 829902 - RNA, 22 nt, Human
uuuccaaagcugaguugagcaa

SEQ ID NO: 829903 - RNA, 22 nt, Human
uggcucagcgguggcagcagac

SEQ ID NO: 829904 - RNA, 22 nt, Human
gauauuuugagaaauccuauga

SEQ ID NO: 829905 - RNA, 21 nt, Human
auggcuuuuuuaaagcuugug

SEQ ID NO: 829906 - RNA, 22 nt, Human
ugaagcaacuggacaaguuggc

SEQ ID NO: 829907 - RNA, 22 nt, Human
auaugagagaggaaagauuuua

SEQ ID NO: 829908 - RNA, 22 nt, Human
gugcccugguccccagcauaua

SEQ ID NO: 829909 - RNA, 22 nt, Human
agagaugaacauaaaacaagga

SEQ ID NO: 829910 - RNA, 22 nt, Human
auggcuuuccugggacaugggc

SEQ ID NO: 829911 - RNA, 22 nt, Human
cagaggcugcucuggguggcau

SEQ ID NO: 829912 - RNA, 22 nt, Human
cuugggagacacaagaagacau

SEQ ID NO: 829913 - RNA, 19 nt, Human
cucugccucuggcuguggc

SEQ ID NO: 829914 - RNA, 22 nt, Human
cccagcuccaagggacagcgaa

SEQ ID NO: 829915 - RNA, 22 nt, Human
uuagaaacccagacucuuaggu

SEQ ID NO: 829916 - RNA, 21 nt, Human
ccucugcucgggcaugcguuu

SEQ ID NO: 829917 - RNA, 22 nt, Human
auaaugaggauuugcauauuag

SEQ ID NO: 829918 - RNA, 22 nt, Human
auuuagcaaaaaaugaugaagc

SEQ ID NO: 829919 - RNA, 20 nt, Human
ggcacuggaagcacacagga

SEQ ID NO: 829920 - RNA, 22 nt, Human
gggcugggaauggcuaaguaug

SEQ ID NO: 829921 - RNA, 22 nt, Human
aagagcuggaugaagaaaucaa

SEQ ID NO: 829922 - RNA, 22 nt, Human
uauauuaacacccacuugccuc

SEQ ID NO: 829923 - RNA, 22 nt, Human
aauauuucugcagaaugguuuu

SEQ ID NO: 829924 - RNA, 22 nt, Human
ugaaggagcucaaugaugaugc

SEQ ID NO: 829925 - RNA, 22 nt, Human
ucuuuggauaucgcuagaccgu

SEQ ID NO: 829926 - RNA, 22 nt, Human
acaggcuucucacagaaaaggg

SEQ ID NO: 829927 - RNA, 22 nt, Human
uuucacauaugguuguugauug

SEQ ID NO: 829928 - RNA, 22 nt, Human
aauucuugguccuaguguauaa

SEQ ID NO: 829929 - RNA, 22 nt, Human
gccucugcucucagguagccuc

SEQ ID NO: 829930 - RNA, 22 nt, Human
agugaccaacaaugcugagaag

SEQ ID NO: 829931 - RNA, 22 nt, Human
ugucuuuucuacuguaagcaua

SEQ ID NO: 829932 - RNA, 23 nt, Human
agggagcuaaaaggcuggagcag

SEQ ID NO: 829933 - RNA, 22 nt, Human
ccagagcugcauccagcagguu

SEQ ID NO: 829934 - RNA, 22 nt, Human
gagcucauucauucauugccug

SEQ ID NO: 829935 - RNA, 22 nt, Human
ggaaggaggaugcucuggccuu

SEQ ID NO: 829936 - RNA, 22 nt, Human
ggggauggaauguaguagugau

SEQ ID NO: 829937 - RNA, 22 nt, Human
cugccuuggcccuaguucaugg

SEQ ID NO: 829938 - RNA, 22 nt, Human
ucagggcaaagggcagaguuug

SEQ ID NO: 829939 - RNA, 18 nt, Human
gagaggagccagaauuuu

SEQ ID NO: 829940 - RNA, 22 nt, Human
gggcagagagcuggaacuccuu

SEQ ID NO: 829941 - RNA, 22 nt, Human
ggcagagacuggguuggcagag

SEQ ID NO: 829942 - RNA, 22 nt, Human
ggaucugauuaauaagguggac

SEQ ID NO: 829943 - RNA, 22 nt, Human
aaaguguaaaagcauguuaggg

SEQ ID NO: 829944 - RNA, 22 nt, Human
gugccugccccacuccucagca

SEQ ID NO: 829945 - RNA, 22 nt, Human
ugaguagcggcuauguguaacu

SEQ ID NO: 829946 - RNA, 22 nt, Human
auaguacacauccuacaauguu

SEQ ID NO: 829947 - RNA, 23 nt, Human
aucaaaguggaaaucaauuaucu

SEQ ID NO: 829948 - RNA, 22 nt, Human
agccagcucccuccccugcagg

SEQ ID NO: 829949 - RNA, 20 nt, Human
uugcagcagugaggugaagg

SEQ ID NO: 829950 - RNA, 20 nt, Human
uccagggcuagggagcucau

SEQ ID NO: 829951 - RNA, 22 nt, Human
ucugagcuuuuauuaucaaccu

SEQ ID NO: 829952 - RNA, 22 nt, Human
ccaggagcaggagcuggacaga

SEQ ID NO: 829953 - RNA, 22 nt, Human
uucugucauuuagcauugucau

SEQ ID NO: 829954 - RNA, 22 nt, Human
uaguccuuuaucaaacauuuau

SEQ ID NO: 829955 - RNA, 17 nt, Human
ccucccacaccgcccug

SEQ ID NO: 829956 - RNA, 22 nt, Human
ugucuucaguaaaauacacuau

SEQ ID NO: 829957 - RNA, 22 nt, Human
uauggaaagcucuuuuugauug

SEQ ID NO: 829958 - RNA, 22 nt, Human
cucuccuugcagauggcugccu

SEQ ID NO: 829959 - RNA, 22 nt, Human
agccuccaguagcugaagagac

SEQ ID NO: 829960 - RNA, 22 nt, Human
cauuuucucaaugaacccucuu

SEQ ID NO: 829961 - RNA, 22 nt, Human
ccucacagggccaggccccuca

SEQ ID NO: 829962 - RNA, 22 nt, Human
aaggguggauuucugagcucua

SEQ ID NO: 829963 - RNA, 22 nt, Human
ucaaagucuaucuguaauuacu

SEQ ID NO: 829964 - RNA, 22 nt, Human
uucauacaguggcugcacucca

SEQ ID NO: 829965 - RNA, 22 nt, Human
cuguccuguggaccugaggacg

SEQ ID NO: 829966 - RNA, 22 nt, Human
ugcaacuuguuuggagagaaag

SEQ ID NO: 829967 - RNA, 22 nt, Human
gauuucuugauaauucaaaucc

SEQ ID NO: 829968 - RNA, 22 nt, Human
agucuucccugugccagagugu

SEQ ID NO: 829969 - RNA, 22 nt, Human
gaauuguacgcuuuacauaggu

SEQ ID NO: 829970 - RNA, 22 nt, Human
gggcagcucugcccaucagagg

SEQ ID NO: 829971 - RNA, 22 nt, Human
gugcucuccuggcugcccugac

SEQ ID NO: 829972 - RNA, 22 nt, Human
uucagaaagguuaaucuggauu

SEQ ID NO: 829973 - RNA, 22 nt, Human
aaaguuugagugauuugacaca

SEQ ID NO: 829974 - RNA, 22 nt, Human
guuugauucaagaacaaagagu

SEQ ID NO: 829975 - RNA, 22 nt, Human
agcugcugcgccucacccuggc

SEQ ID NO: 829976 - RNA, 22 nt, Human
uucauacacgaaaaugcaugca

SEQ ID NO: 829977 - RNA, 22 nt, Human
cacucugacuggcccugcagga

SEQ ID NO: 829978 - RNA, 22 nt, Human
caaaggcaacauauacuuguuu

SEQ ID NO: 829979 - RNA, 22 nt, Human
aggagcagcccacuccuguccu

SEQ ID NO: 829980 - RNA, 18 nt, Human
ccagagcuggcuccucgc

SEQ ID NO: 829981 - RNA, 22 nt, Human
gcagugggagcuuaggcagugc

SEQ ID NO: 829982 - RNA, 22 nt, Human
ucagaggaaaggucagauggcu

SEQ ID NO: 829983 - RNA, 22 nt, Human
caggcagcuagauuuauaacaa

SEQ ID NO: 829984 - RNA, 22 nt, Human
cauuuuaagaugaccugguuuc

SEQ ID NO: 829985 - RNA, 22 nt, Human
auuaucuauguagaaugauuuu

SEQ ID NO: 829986 - RNA, 22 nt, Human
cagcaugguggagcugcucuuu

SEQ ID NO: 829987 - RNA, 22 nt, Human
agggcuggcaucucuaaugcug

SEQ ID NO: 829988 - RNA, 22 nt, Human
acacagggucuagaguuaggcc

SEQ ID NO: 829989 - RNA, 22 nt, Human
gggcugugagaguggggcugcu

SEQ ID NO: 829990 - RNA, 22 nt, Human
ggucucagacuggcaggcagug

SEQ ID NO: 829991 - RNA, 22 nt, Human
augauggugggagaugacccag

SEQ ID NO: 829992 - RNA, 22 nt, Human
ggccagggccuggggacugucc

SEQ ID NO: 829993 - RNA, 22 nt, Human
acccaggaugauaauguucaca

SEQ ID NO: 829994 - RNA, 22 nt, Human
uucuucuucuggcugcaccugg

SEQ ID NO: 829995 - RNA, 22 nt, Human
uccagggcugacuugggagagg

SEQ ID NO: 829996 - RNA, 22 nt, Human
uuucauaaugucacagucaaaa

SEQ ID NO: 829997 - RNA, 22 nt, Human
ugcagugccucggcagugcagc

SEQ ID NO: 829998 - RNA, 22 nt, Human
auaaaugccucagaaucauccc

SEQ ID NO: 829999 - RNA, 22 nt, Human
caguggcgugaucucugcucac

SEQ ID NO: 830000 - RNA, 22 nt, Human
cagcauuuaucuuguagcagga

SEQ ID NO: 830001 - RNA, 22 nt, Human
auacacauguguaugugcaugc

SEQ ID NO: 830002 - RNA, 22 nt, Human
uauaaaguuucgaaagauguau

SEQ ID NO: 830003 - RNA, 22 nt, Human
auucuacaacccaauaauaauu

SEQ ID NO: 830004 - RNA, 22 nt, Human
uacuagaaccucacaacaaucc

SEQ ID NO: 830005 - RNA, 22 nt, Human
aaguuacuggcaagggcugcag

SEQ ID NO: 830006 - RNA, 22 nt, Human
augcacuugcguguuugcaaau

SEQ ID NO: 830007 - RNA, 22 nt, Human
uuacaugguuguuggaaaugcu

SEQ ID NO: 830008 - RNA, 22 nt, Human
aaggcagcagaggaaaggugcu

SEQ ID NO: 830009 - RNA, 22 nt, Human
cuucuggaggacacuggcccca

SEQ ID NO: 830010 - RNA, 22 nt, Human
uuaaguccuugguaauuuucuu

SEQ ID NO: 830011 - RNA, 22 nt, Human
ugccaaggguaugggcaagaua

SEQ ID NO: 830012 - RNA, 22 nt, Human
ugcucuguugugcaugugggau

SEQ ID NO: 830013 - RNA, 22 nt, Human
uggcagcuccuggggccagcac

SEQ ID NO: 830014 - RNA, 22 nt, Human
agcaggaggguuuuguagaguc

SEQ ID NO: 830015 - RNA, 22 nt, Human
gcugccugauguccagcaggac

SEQ ID NO: 830016 - RNA, 22 nt, Human
uuuucaguaaugucuacauaau

SEQ ID NO: 830017 - RNA, 23 nt, Human
aaacuacauuuauaguuuuucuc

SEQ ID NO: 830018 - RNA, 22 nt, Human
cauugcacuuuggguccaggac

SEQ ID NO: 830019 - RNA, 17 nt, Human
gcccaggaaggacggcc

SEQ ID NO: 830020 - RNA, 22 nt, Human
cauuucuguucucuuccuguac

SEQ ID NO: 830021 - RNA, 21 nt, Human
ggucuuccaaauaaggagaaa

SEQ ID NO: 830022 - RNA, 22 nt, Human
cuugaaucuggcuuugccacuu

SEQ ID NO: 830023 - RNA, 22 nt, Human
aggauuuagauuuggaggaacu

SEQ ID NO: 830024 - RNA, 20 nt, Human
ggcucuggaaucuggugggc

SEQ ID NO: 830025 - RNA, 22 nt, Human
aauucuauguucuugaguaaga

SEQ ID NO: 830026 - RNA, 22 nt, Human
cagauuucuauuucaaauacau

SEQ ID NO: 830027 - RNA, 18 nt, Human
uccagagguguuggagcc

SEQ ID NO: 830028 - RNA, 22 nt, Human
uuaauauguugaaauuuauuag

SEQ ID NO: 830029 - RNA, 20 nt, Human
agaagucagcucagaaguga

SEQ ID NO: 830030 - RNA, 22 nt, Human
gugaauaauuuuuuaguauaag

SEQ ID NO: 830031 - RNA, 22 nt, Human
ucuggcucuguguccccaccca

SEQ ID NO: 830032 - RNA, 22 nt, Human
guccucugggcuuugagcaguc

SEQ ID NO: 830033 - RNA, 22 nt, Human
ugcuggagaucauuaauguuca

SEQ ID NO: 830034 - RNA, 22 nt, Human
ugcucagggacaauggagaggg

SEQ ID NO: 830035 - RNA, 18 nt, Human
gagaggcccggcugugcc

SEQ ID NO: 830036 - RNA, 22 nt, Human
ucccuggacaacagacuucacu

SEQ ID NO: 830037 - RNA, 22 nt, Human
gggcagcuggcuuauagguuug

SEQ ID NO: 830038 - RNA, 22 nt, Human
ccaaaguccacaguuuacauua

SEQ ID NO: 830039 - RNA, 22 nt, Human
agccagcaggugagugcagccu

SEQ ID NO: 830040 - RNA, 22 nt, Human
ucugggaagcugguccuguucu

SEQ ID NO: 830041 - RNA, 22 nt, Human
gguggguauugaauacaggugu

SEQ ID NO: 830042 - RNA, 22 nt, Human
cccuggagguggagguugcagg

SEQ ID NO: 830043 - RNA, 22 nt, Human
uuugaauagaggccccucagaa

SEQ ID NO: 830044 - RNA, 22 nt, Human
guuauaaaugacugcaaaaguu

SEQ ID NO: 830045 - RNA, 22 nt, Human
ucauaaaaugcuccugauauug

SEQ ID NO: 830046 - RNA, 22 nt, Human
ccacaucucgguccccucuuug

SEQ ID NO: 830047 - RNA, 22 nt, Human
caaagaagagauuuacagagcu

SEQ ID NO: 830048 - RNA, 17 nt, Human
gagugcugguggagcuc

SEQ ID NO: 830049 - RNA, 22 nt, Human
acagcuggaggccccauugucc

SEQ ID NO: 830050 - RNA, 23 nt, Human
ccagcucccaggucugaggacug

SEQ ID NO: 830051 - RNA, 22 nt, Human
uuucuuaggcucuaaaaugacu

SEQ ID NO: 830052 - RNA, 22 nt, Human
gccaggcugcuggcugcugucc

SEQ ID NO: 830053 - RNA, 22 nt, Human
caucagaauagcucuguggaua

SEQ ID NO: 830054 - RNA, 18 nt, Human
gggaagaggaucuggccc

SEQ ID NO: 830055 - RNA, 22 nt, Human
uuuuucagccaugaauuacacu

SEQ ID NO: 830056 - RNA, 22 nt, Human
aggcagccaaucagaggcugac

SEQ ID NO: 830057 - RNA, 22 nt, Human
caguucuuaauaccaugugguu

SEQ ID NO: 830058 - RNA, 22 nt, Human
caguccuugcuaugacccugag

SEQ ID NO: 830059 - RNA, 22 nt, Human
cuuuauguuggggugucuuagu

SEQ ID NO: 830060 - RNA, 22 nt, Human
ccuggaaggugaugguacagca

SEQ ID NO: 830061 - RNA, 22 nt, Human
gugugcaugcauagacaccaca

SEQ ID NO: 830062 - RNA, 23 nt, Human
aguuccagaaaaaugcucaagca

SEQ ID NO: 830063 - RNA, 22 nt, Human
caggcagccugagggaucuggg

SEQ ID NO: 830064 - RNA, 22 nt, Human
ugccugaguuuaacccucagag

SEQ ID NO: 830065 - RNA, 22 nt, Human
acagccagggucucaggaggcg

SEQ ID NO: 830066 - RNA, 22 nt, Human
gcagagugggagcccagggcug

SEQ ID NO: 830067 - RNA, 22 nt, Human
gcucaggaaacagcagggcuug

SEQ ID NO: 830068 - RNA, 22 nt, Human
acauucuuaacaguuaaaaacu

SEQ ID NO: 830069 - RNA, 22 nt, Human
uucaagaugucuucacaauagu

SEQ ID NO: 830070 - RNA, 22 nt, Human
ggagauggaauagauucugacu

SEQ ID NO: 830071 - RNA, 22 nt, Human
gcucuguguccacagcuggaaa

SEQ ID NO: 830072 - RNA, 22 nt, Human
ggggugggguuacucauugugc

SEQ ID NO: 830073 - RNA, 22 nt, Human
cagcaggaggugaguagcaggu

SEQ ID NO: 830074 - RNA, 22 nt, Human
agacagggucuugaucagagcu

SEQ ID NO: 830075 - RNA, 22 nt, Human
gcugggagaggcccugaaguga

SEQ ID NO: 830076 - RNA, 22 nt, Human
uggcagugccccuugaccagug

SEQ ID NO: 830077 - RNA, 22 nt, Human
uggccugacugucaggcuguau

SEQ ID NO: 830078 - RNA, 23 nt, Human
uuuaacuuuccaauaauucauug

SEQ ID NO: 830079 - RNA, 22 nt, Human
caugcuguguguuuuagcucca

SEQ ID NO: 830080 - RNA, 20 nt, Human
cagaaggucuaagcuuuaga

SEQ ID NO: 830081 - RNA, 22 nt, Human
ggaagggcaaaagagaugaacu

SEQ ID NO: 830082 - RNA, 21 nt, Human
gcacagcaugaguguuggcau

SEQ ID NO: 830083 - RNA, 22 nt, Human
uggcucagcugacucggcuucu

SEQ ID NO: 830084 - RNA, 22 nt, Human
uuccaggaagcaguuagcagcc

SEQ ID NO: 830085 - RNA, 22 nt, Human
gcugucugucucugugacuuaa

SEQ ID NO: 830086 - RNA, 22 nt, Human
cagcugccacuugcucucggcu

SEQ ID NO: 830087 - RNA, 22 nt, Human
ucugcaggaggcuggcugcagg

SEQ ID NO: 830088 - RNA, 22 nt, Human
ugaggggagcccgcccuggacg

SEQ ID NO: 830089 - RNA, 22 nt, Human
agaacagcaguuaugguucauu

SEQ ID NO: 830090 - RNA, 22 nt, Human
uagcagggaaggugugcugagc

SEQ ID NO: 830091 - RNA, 22 nt, Human
ccagcucccugaagccuggucu

SEQ ID NO: 830092 - RNA, 22 nt, Human
gccugucaauuuuguguacaau

SEQ ID NO: 830093 - RNA, 22 nt, Human
cagggccagcgucucgggcuau

SEQ ID NO: 830094 - RNA, 22 nt, Human
caggaaagggaugggcugccac

SEQ ID NO: 830095 - RNA, 22 nt, Human
gagggcugcaaugagacagaga

SEQ ID NO: 830096 - RNA, 23 nt, Human
ugcaugugaauucauacuuguuu

SEQ ID NO: 830097 - RNA, 22 nt, Human
uucagucagugacuaagcaguu

SEQ ID NO: 830098 - RNA, 22 nt, Human
uuuacuuuugguaaggucauuu

SEQ ID NO: 830099 - RNA, 22 nt, Human
ugaaggaagaauaggcaguguu

SEQ ID NO: 830100 - RNA, 22 nt, Human
uuuccucugcugccauugcccc

SEQ ID NO: 830101 - RNA, 22 nt, Human
gggcucugguacuuccuggcuc

SEQ ID NO: 830102 - RNA, 22 nt, Human
cagaaagaccugggcucaagag

SEQ ID NO: 830103 - RNA, 22 nt, Human
gcugcaggcgccugcggucucu

SEQ ID NO: 830104 - RNA, 21 nt, Human
acaggcuuuagaaaaugacuc

SEQ ID NO: 830105 - RNA, 22 nt, Human
uaagaacauaaauucauacggg

SEQ ID NO: 830106 - RNA, 22 nt, Human
aaugcacauguuguaauaaaua

SEQ ID NO: 830107 - RNA, 22 nt, Human
gcagcuuggugaaaggugaugg

SEQ ID NO: 830108 - RNA, 22 nt, Human
caguaugagaguugaaucaagg

SEQ ID NO: 830109 - RNA, 22 nt, Human
aaauguuucuacuugugagcau

SEQ ID NO: 830110 - RNA, 22 nt, Human
ucuggcucuaacuaggcaucag

SEQ ID NO: 830111 - RNA, 22 nt, Human
gucaccaggucugaugcagcca

SEQ ID NO: 830112 - RNA, 22 nt, Human
ucagaagcaggagugugcacaa

SEQ ID NO: 830113 - RNA, 22 nt, Human
cuuaggcagggcuggaagaucu

SEQ ID NO: 830114 - RNA, 20 nt, Human
aggaagccaaaggcugucuu

SEQ ID NO: 830115 - RNA, 22 nt, Human
uggaaagucucuuuugacugua

SEQ ID NO: 830116 - RNA, 22 nt, Human
gcuggccauauauuuugcuguu

SEQ ID NO: 830117 - RNA, 22 nt, Human
aaggcacuuuuccugagaugau

SEQ ID NO: 830118 - RNA, 22 nt, Human
gcacagggagacagccguggcc

SEQ ID NO: 830119 - RNA, 22 nt, Human
ucugggaacugagcuccccuag

SEQ ID NO: 830120 - RNA, 22 nt, Human
uggccugccucccggcuucuuu

SEQ ID NO: 830121 - RNA, 22 nt, Human
uuuuucaugagacuagaaguca

SEQ ID NO: 830122 - RNA, 22 nt, Human
auucugucuaagcuggcuacgu

SEQ ID NO: 830123 - RNA, 22 nt, Human
uggcagggugccaguugcgagu

SEQ ID NO: 830124 - RNA, 22 nt, Human
ggguggaggagaacaggcccca

SEQ ID NO: 830125 - RNA, 22 nt, Human
cagccugacaccagcuuugggc

SEQ ID NO: 830126 - RNA, 22 nt, Human
ugaaagguguccaauauuucuc

SEQ ID NO: 830127 - RNA, 22 nt, Human
uuucauaauauccagagauuuu

SEQ ID NO: 830128 - RNA, 22 nt, Human
aaagccuuggucaucugguucc

SEQ ID NO: 830129 - RNA, 22 nt, Human
ccaggacaaguguggccauggc

SEQ ID NO: 830130 - RNA, 22 nt, Human
cuuccagguccuucuugagaag

SEQ ID NO: 830131 - RNA, 22 nt, Human
ccagaggucuccugcacgggau

SEQ ID NO: 830132 - RNA, 22 nt, Human
agggccagcacuccuggcagga

SEQ ID NO: 830133 - RNA, 18 nt, Human
cagucccaaaccuuagga

SEQ ID NO: 830134 - RNA, 22 nt, Human
gugcuuccccaagccacagccu

SEQ ID NO: 830135 - RNA, 22 nt, Human
acuuccuggcugggugaccugg

SEQ ID NO: 830136 - RNA, 22 nt, Human
uguguacaggccuugcuagacu

SEQ ID NO: 830137 - RNA, 22 nt, Human
uagcaggguaaauguagaugga

SEQ ID NO: 830138 - RNA, 22 nt, Human
uuuggaauauuaaaaugucuca

SEQ ID NO: 830139 - RNA, 22 nt, Human
caggccugcaggaaaggcuccc

SEQ ID NO: 830140 - RNA, 22 nt, Human
cucacugucuguacuagcugau

SEQ ID NO: 830141 - RNA, 22 nt, Human
cugagccauaagggaggcuggg

SEQ ID NO: 830142 - RNA, 22 nt, Human
auacagaaaaguggauagccag

SEQ ID NO: 830143 - RNA, 22 nt, Human
aguguuccuugcuuucccagag

SEQ ID NO: 830144 - RNA, 22 nt, Human
gaaguccugguccucucauuca

SEQ ID NO: 830145 - RNA, 18 nt, Human
gcuccuggaccaggucac

SEQ ID NO: 830146 - RNA, 22 nt, Human
gaaguucuuagucucauuugca

SEQ ID NO: 830147 - RNA, 22 nt, Human
caguacuuugaagauauuuuag

SEQ ID NO: 830148 - RNA, 22 nt, Human
gaagccaguacugugcucugca

SEQ ID NO: 830149 - RNA, 22 nt, Human
uggaagggggaagacagcucug

SEQ ID NO: 830150 - RNA, 22 nt, Human
ggacaggguaaguacuagugug

SEQ ID NO: 830151 - RNA, 21 nt, Human
uguaaguuucaucugaauugg

SEQ ID NO: 830152 - RNA, 18 nt, Human
ugaacagaugaguugaag

SEQ ID NO: 830153 - RNA, 22 nt, Human
augucccaagauacagcuagag

SEQ ID NO: 830154 - RNA, 22 nt, Human
cugggccaucagaggggcugga

SEQ ID NO: 830155 - RNA, 17 nt, Human
cccagagaugcugccuu

SEQ ID NO: 830156 - RNA, 22 nt, Human
aggugccaauuuucagugaaca

SEQ ID NO: 830157 - RNA, 22 nt, Human
gagggguguggagccaucaguu

SEQ ID NO: 830158 - RNA, 19 nt, Human
agugucaucagcuacucag

SEQ ID NO: 830159 - RNA, 22 nt, Human
uagggcaggggaggaaucugaa

SEQ ID NO: 830160 - RNA, 21 nt, Human
gaaaggucuuaacuuacagag

SEQ ID NO: 830161 - RNA, 22 nt, Human
gcugucccgaaccccugguaau

SEQ ID NO: 830162 - RNA, 20 nt, Human
caagcccucuuuagccugcc

SEQ ID NO: 830163 - RNA, 22 nt, Human
agugaccaaucaugguuagauu

SEQ ID NO: 830164 - RNA, 22 nt, Human
uacagacaguuuuucagauauu

SEQ ID NO: 830165 - RNA, 22 nt, Human
agacccugcaccucucgugggc

SEQ ID NO: 830166 - RNA, 22 nt, Human
uuuuuccuuagggguuacucac

SEQ ID NO: 830167 - RNA, 22 nt, Human
guucauuuaugauguaacaugu

SEQ ID NO: 830168 - RNA, 22 nt, Human
aaaauguaaagcuugaguguag

SEQ ID NO: 830169 - RNA, 22 nt, Human
aacuuugaggucacugaauucc

SEQ ID NO: 830170 - RNA, 22 nt, Human
ccaggagagcauugcacagagg

SEQ ID NO: 830171 - RNA, 22 nt, Human
aacaguaaugugguguuggguu

SEQ ID NO: 830172 - RNA, 22 nt, Human
ucacuuauaaaaugcaagaucu

SEQ ID NO: 830173 - RNA, 22 nt, Human
ugauuuccuagcugacaugaaa

SEQ ID NO: 830174 - RNA, 22 nt, Human
gaaaagcuaggccaguucagcu

SEQ ID NO: 830175 - RNA, 22 nt, Human
cccuucccuucugggagaucca

SEQ ID NO: 830176 - RNA, 22 nt, Human
uggcccugacacgugguacugg

SEQ ID NO: 830177 - RNA, 22 nt, Human
uccaugagagguaacuuuacaa

SEQ ID NO: 830178 - RNA, 22 nt, Human
gaaagaggaaggagauguauua

SEQ ID NO: 830179 - RNA, 22 nt, Human
agaggcagcagucauacuacag

SEQ ID NO: 830180 - RNA, 22 nt, Human
uuuaaaaaacuagucugagucu

SEQ ID NO: 830181 - RNA, 22 nt, Human
cuacacaguucugccuaauggc

SEQ ID NO: 830182 - RNA, 22 nt, Human
ucaugcuuauugcauauuugga

SEQ ID NO: 830183 - RNA, 22 nt, Human
gcagcuggcccugacacgcaga

SEQ ID NO: 830184 - RNA, 22 nt, Human
acauaauaaaaauaacagcuca

SEQ ID NO: 830185 - RNA, 22 nt, Human
caaauucucacccuguuugauu

SEQ ID NO: 830186 - RNA, 22 nt, Human
ucuggcuccguguccgcuccca

SEQ ID NO: 830187 - RNA, 22 nt, Human
auuucaacauucucaguuguag

SEQ ID NO: 830188 - RNA, 22 nt, Human
uggccacagccucugccaguuc

SEQ ID NO: 830189 - RNA, 22 nt, Human
gcuccuucaggugguagcuguu

SEQ ID NO: 830190 - RNA, 22 nt, Human
cacagggccuugugugacugca

SEQ ID NO: 830191 - RNA, 20 nt, Human
uggagcuccagcguccaugu

SEQ ID NO: 830192 - RNA, 22 nt, Human
cuuuuccacugagccucacaaa

SEQ ID NO: 830193 - RNA, 22 nt, Human
acccaggccugagagacaggag

SEQ ID NO: 830194 - RNA, 22 nt, Human
agugcuuucuugcuccaucagu

SEQ ID NO: 830195 - RNA, 18 nt, Human
aguccuuacgaggcuaua

SEQ ID NO: 830196 - RNA, 22 nt, Human
ggcauuuagauugaauuucugu

SEQ ID NO: 830197 - RNA, 22 nt, Human
aucugcuugaguuugaagucag

SEQ ID NO: 830198 - RNA, 20 nt, Human
gacaucauguacacauugcc

SEQ ID NO: 830199 - RNA, 22 nt, Human
gggucagcugcugggggcugac

SEQ ID NO: 830200 - RNA, 22 nt, Human
gccaggccugcaagugcuggug

SEQ ID NO: 830201 - RNA, 22 nt, Human
ccagggcaauuauuuggagggu

SEQ ID NO: 830202 - RNA, 22 nt, Human
gauuuccucacuaacauccauc

SEQ ID NO: 830203 - RNA, 22 nt, Human
ggcaguggugggaggcucgcuc

SEQ ID NO: 830204 - RNA, 22 nt, Human
augauggugagguugagcacag

SEQ ID NO: 830205 - RNA, 22 nt, Human
cacaaugcguacauauaucaaa

SEQ ID NO: 830206 - RNA, 22 nt, Human
guuaggcauuugccuuaauuuu

SEQ ID NO: 830207 - RNA, 22 nt, Human
agaaaucaauaucuauauguug

SEQ ID NO: 830208 - RNA, 22 nt, Human
uggagccagagcgcagccuggg

SEQ ID NO: 830209 - RNA, 22 nt, Human
gagagcuggauucuggauaggu

SEQ ID NO: 830210 - RNA, 17 nt, Human
uauauguaugccucucc

SEQ ID NO: 830211 - RNA, 22 nt, Human
guccucuguguaggcugcagac

SEQ ID NO: 830212 - RNA, 23 nt, Human
ucuuuccucagcacacaccaaga

SEQ ID NO: 830213 - RNA, 22 nt, Human
aggcagaucacuugaggccagg

SEQ ID NO: 830214 - RNA, 22 nt, Human
cuggcagccaagugggauacuc

SEQ ID NO: 830215 - RNA, 22 nt, Human
ccucagagccuccagaaggaau

SEQ ID NO: 830216 - RNA, 22 nt, Human
cugagcugcggcaggcaccugg

SEQ ID NO: 830217 - RNA, 22 nt, Human
gcucugcuggaaguucucugga

SEQ ID NO: 830218 - RNA, 22 nt, Human
aaucuucuuucuuaacaguaca

SEQ ID NO: 830219 - RNA, 22 nt, Human
gggaggcuggcucuggccacag

SEQ ID NO: 830220 - RNA, 22 nt, Human
gcaggggcuacucugagcuucc

SEQ ID NO: 830221 - RNA, 22 nt, Human
uuauuuacaacucuucucuucc

SEQ ID NO: 830222 - RNA, 22 nt, Human
auccaugaagguacuucucagg

SEQ ID NO: 830223 - RNA, 22 nt, Human
ggagggcugccagguggagcgg

SEQ ID NO: 830224 - RNA, 22 nt, Human
gaggagcugggucagggagaca

SEQ ID NO: 830225 - RNA, 22 nt, Human
ugcccaagcagaggagugauuc

SEQ ID NO: 830226 - RNA, 22 nt, Human
ugggcugcuguuacaggggcug

SEQ ID NO: 830227 - RNA, 22 nt, Human
uaacacugguauuucauuuagu

SEQ ID NO: 830228 - RNA, 22 nt, Human
acagguggcauaggcaguuuga

SEQ ID NO: 830229 - RNA, 22 nt, Human
acacaugagaaacaucaguugu

SEQ ID NO: 830230 - RNA, 20 nt, Human
ccuccuggucaggugugcag

SEQ ID NO: 830231 - RNA, 22 nt, Human
agccucugcuuaugcaaaggua

SEQ ID NO: 830232 - RNA, 22 nt, Human
gagggagggacuagcauucucu

SEQ ID NO: 830233 - RNA, 22 nt, Human
gcagggcagccacaggcccccu

SEQ ID NO: 830234 - RNA, 22 nt, Human
ugcauugauagaaaaacaugga

SEQ ID NO: 830235 - RNA, 22 nt, Human
aaauacuagaauucagaguuga

SEQ ID NO: 830236 - RNA, 22 nt, Human
uccagggcuuggcugggacggu

SEQ ID NO: 830237 - RNA, 22 nt, Human
ggcaagcucaggccucaggugu

SEQ ID NO: 830238 - RNA, 22 nt, Human
ucuucacaggagccugccugcc

SEQ ID NO: 830239 - RNA, 22 nt, Human
uggccuggugcucaggcaguag

SEQ ID NO: 830240 - RNA, 22 nt, Human
uuucuauaugaggagcuaaagu

SEQ ID NO: 830241 - RNA, 18 nt, Human
cccagcccaccauuucuc

SEQ ID NO: 830242 - RNA, 22 nt, Human
uguacacaauucuuaacauaca

SEQ ID NO: 830243 - RNA, 22 nt, Human
aaacaugaauagauauuaaaca

SEQ ID NO: 830244 - RNA, 22 nt, Human
agaggaggaagagcuuuaaaau

SEQ ID NO: 830245 - RNA, 22 nt, Human
guaacaaaguuucuaggugcug

SEQ ID NO: 830246 - RNA, 22 nt, Human
ugaagacacauacaagggaaug

SEQ ID NO: 830247 - RNA, 18 nt, Human
cauuguacaaugcuuuau

SEQ ID NO: 830248 - RNA, 22 nt, Human
cacauccuucagcugagcccag

SEQ ID NO: 830249 - RNA, 22 nt, Human
aagcuccccgaaacccaccucu

SEQ ID NO: 830250 - RNA, 22 nt, Human
uaaaugagggcugacaugauug

SEQ ID NO: 830251 - RNA, 22 nt, Human
gcugcucuggcucugcaguguc

SEQ ID NO: 830252 - RNA, 22 nt, Human
ccauuguaaauucuguggaagu

SEQ ID NO: 830253 - RNA, 22 nt, Human
aacucaguuacauauuagaaua

SEQ ID NO: 830254 - RNA, 22 nt, Human
ucaggagcagcaugggugagag

SEQ ID NO: 830255 - RNA, 22 nt, Human
gaggccuggcugucagucccca

SEQ ID NO: 830256 - RNA, 22 nt, Human
cugagcauggccgguccauggu

SEQ ID NO: 830257 - RNA, 23 nt, Human
uguaaaaugggguaguguuacca

SEQ ID NO: 830258 - RNA, 22 nt, Human
uuacagaaaagggcuuuaagag

SEQ ID NO: 830259 - RNA, 22 nt, Human
ugugccagaaaauaugcugagg

SEQ ID NO: 830260 - RNA, 22 nt, Human
acuggaaaacacuacuacaugc

SEQ ID NO: 830261 - RNA, 22 nt, Human
ggcauuuagagggcuuuucuga

SEQ ID NO: 830262 - RNA, 22 nt, Human
caggugggaccaugauagggca

SEQ ID NO: 830263 - RNA, 22 nt, Human
guucuucaucauuuuagauagg

SEQ ID NO: 830264 - RNA, 22 nt, Human
acuggcagccacaacuggcagg

SEQ ID NO: 830265 - RNA, 22 nt, Human
gcgaaaaauguguaaauauguu

SEQ ID NO: 830266 - RNA, 22 nt, Human
gaaguccuccuaucuugcucuu

SEQ ID NO: 830267 - RNA, 22 nt, Human
ggagagagaugccgccuugcuc

SEQ ID NO: 830268 - RNA, 22 nt, Human
uacaugcuccacuuucuccugu

SEQ ID NO: 830269 - RNA, 22 nt, Human
cugugcuuaccugcccagguga

SEQ ID NO: 830270 - RNA, 22 nt, Human
uuggcagggccaggcucucucu

SEQ ID NO: 830271 - RNA, 22 nt, Human
aagaggagacuucagcaacuug

SEQ ID NO: 830272 - RNA, 22 nt, Human
acuguacuguguauuguagaau

SEQ ID NO: 830273 - RNA, 22 nt, Human
cuggcagguggauggggacucc

SEQ ID NO: 830274 - RNA, 22 nt, Human
aguaugaacggaaggccuggga

SEQ ID NO: 830275 - RNA, 20 nt, Human
aggagcugaauuagaggguu

SEQ ID NO: 830276 - RNA, 18 nt, Human
aggcacuggaauuaaggg

SEQ ID NO: 830277 - RNA, 22 nt, Human
cuggccuuggaagggagcccgu

SEQ ID NO: 830278 - RNA, 22 nt, Human
cacugccuccccaggcuccaca

SEQ ID NO: 830279 - RNA, 22 nt, Human
gcugagcugaggcagggcuggg

SEQ ID NO: 830280 - RNA, 22 nt, Human
aaggcagcuuuaaaaaagaugc

SEQ ID NO: 830281 - RNA, 17 nt, Human
uggacccuugggccucc

SEQ ID NO: 830282 - RNA, 22 nt, Human
auuuucugguugagguuuaaca

SEQ ID NO: 830283 - RNA, 22 nt, Human
cugagccacugcuuguucagug

SEQ ID NO: 830284 - RNA, 22 nt, Human
uuuauuuauccuucuggauugc

SEQ ID NO: 830285 - RNA, 22 nt, Human
gcagccacugggagugcuuaua

SEQ ID NO: 830286 - RNA, 22 nt, Human
uuuucaguuccaucucugcucu

SEQ ID NO: 830287 - RNA, 21 nt, Human
uuccagagauuguuucaccug

SEQ ID NO: 830288 - RNA, 22 nt, Human
ugagccugaguucaaggcugca

SEQ ID NO: 830289 - RNA, 22 nt, Human
guuuuucuaggaccaugugauu

SEQ ID NO: 830290 - RNA, 22 nt, Human
ucugauaacucuggccccaggc

SEQ ID NO: 830291 - RNA, 22 nt, Human
agcuuccucaccucagaggucu

SEQ ID NO: 830292 - RNA, 20 nt, Human
gcuuuuucuaauagcagucc

SEQ ID NO: 830293 - RNA, 22 nt, Human
uguacacugcaggaugcauugc

SEQ ID NO: 830294 - RNA, 22 nt, Human
ccagcuccaaguuugggcauca

SEQ ID NO: 830295 - RNA, 22 nt, Human
uguggccuugcagccuggaggu

SEQ ID NO: 830296 - RNA, 22 nt, Human
gcacaauaacagccaagguuau

SEQ ID NO: 830297 - RNA, 22 nt, Human
ugaacccaggagguugcaguga

SEQ ID NO: 830298 - RNA, 22 nt, Human
uauuccaacugucauagucaua

SEQ ID NO: 830299 - RNA, 22 nt, Human
uacauaguuccauuuacaggaa

SEQ ID NO: 830300 - RNA, 22 nt, Human
auugcagcuggucaggguaauu

SEQ ID NO: 830301 - RNA, 22 nt, Human
aaauauguaagauuagcacuag

SEQ ID NO: 830302 - RNA, 22 nt, Human
caaguaaacaauaugugauuca

SEQ ID NO: 830303 - RNA, 22 nt, Human
aggauuuacaaugauucuaggu

SEQ ID NO: 830304 - RNA, 22 nt, Human
cauugcacuccagcuugggcaa

SEQ ID NO: 830305 - RNA, 22 nt, Human
ugagugaggaagcgguggagga

SEQ ID NO: 830306 - RNA, 22 nt, Human
agcaccugcacaguggaggaaa

SEQ ID NO: 830307 - RNA, 22 nt, Human
aaaagagucuuaggcagucaua

SEQ ID NO: 830308 - RNA, 22 nt, Human
uacagggguaacaguggggaau

SEQ ID NO: 830309 - RNA, 22 nt, Human
acugucuuccaggucuggaggu

SEQ ID NO: 830310 - RNA, 21 nt, Human
ugccaggccugagcugggguc

SEQ ID NO: 830311 - RNA, 21 nt, Human
acagaugggaugagcacacug

SEQ ID NO: 830312 - RNA, 22 nt, Human
cugugcaagacuuacuuuaaua

SEQ ID NO: 830313 - RNA, 19 nt, Human
aagggcugggcaccucacu

SEQ ID NO: 830314 - RNA, 22 nt, Human
auacaucucauguaagagauaa

SEQ ID NO: 830315 - RNA, 22 nt, Human
cauuugaugacucaacucauaa

SEQ ID NO: 830316 - RNA, 22 nt, Human
ugccucugggugaccaaggagc

SEQ ID NO: 830317 - RNA, 22 nt, Human
guguguccucaguaguggcaug

SEQ ID NO: 830318 - RNA, 22 nt, Human
uggccuggcccugaggcccugu

SEQ ID NO: 830319 - RNA, 22 nt, Human
gccuuccugcagcucugagcgu

SEQ ID NO: 830320 - RNA, 22 nt, Human
gggacagaaggaagugagcaca

SEQ ID NO: 830321 - RNA, 22 nt, Human
uccuucagauuccugcuucugg

SEQ ID NO: 830322 - RNA, 22 nt, Human
cuggccaguuguccuggcuugg

SEQ ID NO: 830323 - RNA, 22 nt, Human
uggcacuggaaucguagccuug

SEQ ID NO: 830324 - RNA, 22 nt, Human
acugguuuuccagguuacuucu

SEQ ID NO: 830325 - RNA, 22 nt, Human
auccaguucucagugcuuacag

SEQ ID NO: 830326 - RNA, 22 nt, Human
gucugucauacggcuuauguaa

SEQ ID NO: 830327 - RNA, 22 nt, Human
agggagaacaguugcagcagac

SEQ ID NO: 830328 - RNA, 22 nt, Human
aagauauagauaaaacuaugca

SEQ ID NO: 830329 - RNA, 21 nt, Human
auccuugaucagaagagugcu

SEQ ID NO: 830330 - RNA, 22 nt, Human
uucuucuuuccuauaauuaauu

SEQ ID NO: 830331 - RNA, 22 nt, Human
gucauuucuguuucuucagugc

SEQ ID NO: 830332 - RNA, 22 nt, Human
ucuguucaucucaugggagaau

SEQ ID NO: 830333 - RNA, 22 nt, Human
aguccuuagaacacuguaucug

SEQ ID NO: 830334 - RNA, 22 nt, Human
uccaguucuaggucacucucug

SEQ ID NO: 830335 - RNA, 22 nt, Human
ccaaggcuccucagcuggucuu

SEQ ID NO: 830336 - RNA, 22 nt, Human
agggacagucuacuguucacug

SEQ ID NO: 830337 - RNA, 22 nt, Human
aggcagccaucugcaggaagga

SEQ ID NO: 830338 - RNA, 22 nt, Human
ccucuccuugcacccgucccgc

SEQ ID NO: 830339 - RNA, 22 nt, Human
agugauggugagugagaagcuc

SEQ ID NO: 830340 - RNA, 22 nt, Human
ugcaccauguaaguggccacgu

SEQ ID NO: 830341 - RNA, 22 nt, Human
ggccuugggcagacacgucaca

SEQ ID NO: 830342 - RNA, 22 nt, Human
aaauuauuacaagcuaguuggc

SEQ ID NO: 830343 - RNA, 22 nt, Human
uggccagguguggguucucaga

SEQ ID NO: 830344 - RNA, 18 nt, Human
ugggauggagaguaacug

SEQ ID NO: 830345 - RNA, 22 nt, Human
caggcagcucaaccuugggagc

SEQ ID NO: 830346 - RNA, 22 nt, Human
gcuucccagcagaggaaagacu

SEQ ID NO: 830347 - RNA, 22 nt, Human
agccuuguuggucugaguuugg

SEQ ID NO: 830348 - RNA, 22 nt, Human
ucuuccucucuaauugaucaga

SEQ ID NO: 830349 - RNA, 22 nt, Human
guggcagcggugugcaaggagg

SEQ ID NO: 830350 - RNA, 22 nt, Human
aggaccagaggccagagucagc

SEQ ID NO: 830351 - RNA, 21 nt, Human
agcagcugggcaacauggagg

SEQ ID NO: 830352 - RNA, 22 nt, Human
uccugaggcucacuuugaaugu

SEQ ID NO: 830353 - RNA, 22 nt, Human
gauuucuugaccccugucucag

SEQ ID NO: 830354 - RNA, 20 nt, Human
uuccaacucacaucucuaca

SEQ ID NO: 830355 - RNA, 22 nt, Human
gcagcugcuggagggaggcagg

SEQ ID NO: 830356 - RNA, 22 nt, Human
cagcagggaagcugugcuguuu

SEQ ID NO: 830357 - RNA, 22 nt, Human
uaaugucaaggugauagauuug

SEQ ID NO: 830358 - RNA, 22 nt, Human
gcugcugugaauuuuuuaaaug

SEQ ID NO: 830359 - RNA, 23 nt, Human
ccugucugugcuggguggacaca

SEQ ID NO: 830360 - RNA, 22 nt, Human
ugcucccagggacucuggcugg

SEQ ID NO: 830361 - RNA, 22 nt, Human
guuugcauguauuaagucaaua

SEQ ID NO: 830362 - RNA, 22 nt, Human
ggcugccuggaccuccucuuuc

SEQ ID NO: 830363 - RNA, 21 nt, Human
cauuucuauugaugagaaaag

SEQ ID NO: 830364 - RNA, 22 nt, Human
cuggccagaguuggagggugug

SEQ ID NO: 830365 - RNA, 23 nt, Human
aggauguaggauguauggcagag

SEQ ID NO: 830366 - RNA, 20 nt, Human
gguagcagcugcugucaucc

SEQ ID NO: 830367 - RNA, 22 nt, Human
agcaggaguuugaugcuuuuau

SEQ ID NO: 830368 - RNA, 22 nt, Human
agcagagguguuuauuauggga

SEQ ID NO: 830369 - RNA, 22 nt, Human
uucuccaacacaagcaugaugu

SEQ ID NO: 830370 - RNA, 22 nt, Human
cuugccuucuguuccuauagaa

SEQ ID NO: 830371 - RNA, 22 nt, Human
uaguccuuuaauaguuaaugug

SEQ ID NO: 830372 - RNA, 22 nt, Human
ggagcggagggagggccacugu

SEQ ID NO: 830373 - RNA, 22 nt, Human
caauuucagucucagagaguuc

SEQ ID NO: 830374 - RNA, 22 nt, Human
cugccuggucucaggcaugggg

SEQ ID NO: 830375 - RNA, 22 nt, Human
uccaggcugggcugaagggugc

SEQ ID NO: 830376 - RNA, 22 nt, Human
gcucuggacuggggccugagaa

SEQ ID NO: 830377 - RNA, 22 nt, Human
ucaggggcugugcauuucccag

SEQ ID NO: 830378 - RNA, 21 nt, Human
cugugcuucuuccuaagccag

SEQ ID NO: 830379 - RNA, 22 nt, Human
caggcugccgugaagcaggccu

SEQ ID NO: 830380 - RNA, 22 nt, Human
aggcucugugacaaucaagcug

SEQ ID NO: 830381 - RNA, 22 nt, Human
aagcugccugggaggaagggcu

SEQ ID NO: 830382 - RNA, 22 nt, Human
acagaggccccgugggagagcc

SEQ ID NO: 830383 - RNA, 22 nt, Human
cuuuauguucaguacaaugcuu

SEQ ID NO: 830384 - RNA, 22 nt, Human
gugaauaauauuguuuauaaaa

SEQ ID NO: 830385 - RNA, 22 nt, Human
aagcugccuuccaugugaggaa

SEQ ID NO: 830386 - RNA, 22 nt, Human
gcaaacaaggacauacauccug

SEQ ID NO: 830387 - RNA, 22 nt, Human
uuccaggauggcaauaaugaau

SEQ ID NO: 830388 - RNA, 22 nt, Human
uaauuauagccgcuauuuugcu

SEQ ID NO: 830389 - RNA, 22 nt, Human
ccuggcugccgagugugcagcg

SEQ ID NO: 830390 - RNA, 22 nt, Human
gaagccaacauuccaaguagaa

SEQ ID NO: 830391 - RNA, 22 nt, Human
gaggcccuccagcugucagcug

SEQ ID NO: 830392 - RNA, 22 nt, Human
cacaggcuugucagcaugaggc

SEQ ID NO: 830393 - RNA, 22 nt, Human
ucaggcugguggucagauggcu

SEQ ID NO: 830394 - RNA, 22 nt, Human
gccccagcguggcuguguuagg

SEQ ID NO: 830395 - RNA, 22 nt, Human
ccaccaggacagcccugagggg

SEQ ID NO: 830396 - RNA, 22 nt, Human
gccucugcggagcuguacauca

SEQ ID NO: 830397 - RNA, 22 nt, Human
cagcaguguacaaggugucaga

SEQ ID NO: 830398 - RNA, 22 nt, Human
uacuuugucauucuaaccuucc

SEQ ID NO: 830399 - RNA, 22 nt, Human
gaaaugcauggaucuuggcaga

SEQ ID NO: 830400 - RNA, 21 nt, Human
cagagcuguccaaacccugac

SEQ ID NO: 830401 - RNA, 22 nt, Human
gcugcucuccauggccgugagu

SEQ ID NO: 830402 - RNA, 22 nt, Human
agcugggaggugggcagugaga

SEQ ID NO: 830403 - RNA, 22 nt, Human
ccugugaggucaucugugguaa

SEQ ID NO: 830404 - RNA, 22 nt, Human
aaugcacauauauguguauaca

SEQ ID NO: 830405 - RNA, 22 nt, Human
aguggcaggcggagauguagga

SEQ ID NO: 830406 - RNA, 22 nt, Human
cagcugcuuuaguuuuccaucc

SEQ ID NO: 830407 - RNA, 22 nt, Human
uggcagcagggaggccaguguu

SEQ ID NO: 830408 - RNA, 22 nt, Human
acuuuagaccaucuuccacagu

SEQ ID NO: 830409 - RNA, 22 nt, Human
auuuaagacugacuucaccagu

SEQ ID NO: 830410 - RNA, 17 nt, Human
acagagguuauacagac

SEQ ID NO: 830411 - RNA, 22 nt, Human
cuggacagaaaaggccacugga

SEQ ID NO: 830412 - RNA, 22 nt, Human
ucugcaggccucgacaaggcca

SEQ ID NO: 830413 - RNA, 22 nt, Human
auggcuuuuuagacuuugguac

SEQ ID NO: 830414 - RNA, 22 nt, Human
ugacuucaaaggcucuacuccu

SEQ ID NO: 830415 - RNA, 22 nt, Human
agucucagaguaccugagggac

SEQ ID NO: 830416 - RNA, 22 nt, Human
uaugaaaauuuagcugaagcau

SEQ ID NO: 830417 - RNA, 22 nt, Human
ggguacaaagauuucauaagau

SEQ ID NO: 830418 - RNA, 22 nt, Human
uuuauuccaugugucuaugacc

SEQ ID NO: 830419 - RNA, 22 nt, Human
aggcuccaugcaaaggcuguuu

SEQ ID NO: 830420 - RNA, 22 nt, Human
agggcacaucugcugggaaugg

SEQ ID NO: 830421 - RNA, 22 nt, Human
ucagaggucccuagcaggagug

SEQ ID NO: 830422 - RNA, 22 nt, Human
gcaggcagaucaccugucagga

SEQ ID NO: 830423 - RNA, 22 nt, Human
ucucaggccccugaguuucucu

SEQ ID NO: 830424 - RNA, 22 nt, Human
uggcuggcuuguucacugacug

SEQ ID NO: 830425 - RNA, 22 nt, Human
gagagcccugcuccuaucccag

SEQ ID NO: 830426 - RNA, 22 nt, Human
gugacagucaaagacaugacuu

SEQ ID NO: 830427 - RNA, 22 nt, Human
agccugcaggaugggcagcacc

SEQ ID NO: 830428 - RNA, 22 nt, Human
uccauggggcccaggaugagag

SEQ ID NO: 830429 - RNA, 22 nt, Human
cuuuguagcugcuucugauuua

SEQ ID NO: 830430 - RNA, 23 nt, Human
uugaaagguagcuggcagcuaga

SEQ ID NO: 830431 - RNA, 22 nt, Human
cggagaggaccugcaacucgcu

SEQ ID NO: 830432 - RNA, 22 nt, Human
gcucagaggcacgaccucuugg

SEQ ID NO: 830433 - RNA, 22 nt, Human
agggcuggcuccguuaccuuga

SEQ ID NO: 830434 - RNA, 22 nt, Human
ugcugccaccugguggcugaag

SEQ ID NO: 830435 - RNA, 22 nt, Human
gugucccagcagcacauuggcu

SEQ ID NO: 830436 - RNA, 22 nt, Human
aagguacagaaauuaacaagga

SEQ ID NO: 830437 - RNA, 22 nt, Human
agaaaucuaagaugcucaagga

SEQ ID NO: 830438 - RNA, 22 nt, Human
uaaaacuuaacuauccagauua

SEQ ID NO: 830439 - RNA, 22 nt, Human
caggcaccccaggugagcacug

SEQ ID NO: 830440 - RNA, 22 nt, Human
ucuucuucccaucccucaaaug

SEQ ID NO: 830441 - RNA, 22 nt, Human
cagaaaucauugugaugacagg

SEQ ID NO: 830442 - RNA, 22 nt, Human
agggcugccauuucuggcccaa

SEQ ID NO: 830443 - RNA, 22 nt, Human
uuuaaucaggcaaagcauaaua

SEQ ID NO: 830444 - RNA, 22 nt, Human
cacagguguaugaauaugucca

SEQ ID NO: 830445 - RNA, 20 nt, Human
uauuuagauucaaguaugga

SEQ ID NO: 830446 - RNA, 22 nt, Human
auguuucaaugcacuuuagccu

SEQ ID NO: 830447 - RNA, 22 nt, Human
aucugcuuccugggcuccauga

SEQ ID NO: 830448 - RNA, 22 nt, Human
aaauauaauuucugccucaaua

SEQ ID NO: 830449 - RNA, 22 nt, Human
gcugggcagccuggccgcugcc

SEQ ID NO: 830450 - RNA, 22 nt, Human
auugacaaucuacuauguucug

SEQ ID NO: 830451 - RNA, 22 nt, Human
gagucacaaagccuuucuuauu

SEQ ID NO: 830452 - RNA, 22 nt, Human
agguggggaaaccagcgauccc

SEQ ID NO: 830453 - RNA, 22 nt, Human
acauaugauauugaggaucuca

SEQ ID NO: 830454 - RNA, 22 nt, Human
caggggcugugggcggagccuc

SEQ ID NO: 830455 - RNA, 22 nt, Human
ucucugggaaugggccugggua

SEQ ID NO: 830456 - RNA, 22 nt, Human
augcuguggaaguuccugaagc

SEQ ID NO: 830457 - RNA, 22 nt, Human
uccugccuaccuugcggaggug

SEQ ID NO: 830458 - RNA, 22 nt, Human
ucaggagaaggcaauguggaaa

SEQ ID NO: 830459 - RNA, 22 nt, Human
ccagagccccugagcuucccug

SEQ ID NO: 830460 - RNA, 22 nt, Human
uuauucuuuucuccagaauccc

SEQ ID NO: 830461 - RNA, 22 nt, Human
ugaagcagcaaaugaugggaga

SEQ ID NO: 830462 - RNA, 23 nt, Human
uacagaaggaguagucacuaaga

SEQ ID NO: 830463 - RNA, 22 nt, Human
gagcgauguggguauguagaag

SEQ ID NO: 830464 - RNA, 22 nt, Human
uggccuggaagagaggucgagg

SEQ ID NO: 830465 - RNA, 22 nt, Human
ucuuugaacuuggcugaucucu

SEQ ID NO: 830466 - RNA, 22 nt, Human
gcucagagcacucagacucagc

SEQ ID NO: 830467 - RNA, 22 nt, Human
uugcauuugacaaauuauuuaa

SEQ ID NO: 830468 - RNA, 22 nt, Human
ggcucugcuucagaaggcucau

SEQ ID NO: 830469 - RNA, 22 nt, Human
agccaggcugcaguuggcuggc

SEQ ID NO: 830470 - RNA, 22 nt, Human
ccaggaguuggagguugcagug

SEQ ID NO: 830471 - RNA, 22 nt, Human
gugauuuagauguugaaaguga

SEQ ID NO: 830472 - RNA, 22 nt, Human
ugcucugcaagcaggagcaaga

SEQ ID NO: 830473 - RNA, 22 nt, Human
acguuuucagccuuaauguaga

SEQ ID NO: 830474 - RNA, 22 nt, Human
gccucucucuacccaguaugau

SEQ ID NO: 830475 - RNA, 22 nt, Human
ggcccagccggcgagucucgcg

SEQ ID NO: 830476 - RNA, 22 nt, Human
ugcugccacugguagucucauu

SEQ ID NO: 830477 - RNA, 22 nt, Human
aauauuuguuaguguuuuaaug

SEQ ID NO: 830478 - RNA, 22 nt, Human
ucuggcucucauacucgccagu

SEQ ID NO: 830479 - RNA, 22 nt, Human
ucagaaaagagaaaaucuuaua

SEQ ID NO: 830480 - RNA, 22 nt, Human
agaggccacuuugccugugaug

SEQ ID NO: 830481 - RNA, 22 nt, Human
ugcuagaagauagcuagaagau

SEQ ID NO: 830482 - RNA, 22 nt, Human
gcuggccaguguggugaccacc

SEQ ID NO: 830483 - RNA, 22 nt, Human
ucccagaaaaaggaggcuauga

SEQ ID NO: 830484 - RNA, 22 nt, Human
uuucccagagguaugaauaagu

SEQ ID NO: 830485 - RNA, 22 nt, Human
ggcagcugauuagcaucaagga

SEQ ID NO: 830486 - RNA, 22 nt, Human
agauaugugcgucuuagauuga

SEQ ID NO: 830487 - RNA, 21 nt, Human
gagugcagcaagguagagucu

SEQ ID NO: 830488 - RNA, 22 nt, Human
ccaggaggcggaagguacagug

SEQ ID NO: 830489 - RNA, 22 nt, Human
ucacaaaugaggaaaucgagca

SEQ ID NO: 830490 - RNA, 22 nt, Human
aagaauguucuuguagucauga

SEQ ID NO: 830491 - RNA, 22 nt, Human
aggccagcucuacccuuggacu

SEQ ID NO: 830492 - RNA, 22 nt, Human
ugaggggaaggcaugauaaaua

SEQ ID NO: 830493 - RNA, 22 nt, Human
gugcugucaauugcuuucagua

SEQ ID NO: 830494 - RNA, 22 nt, Human
caguggggaggccaggauagaa

SEQ ID NO: 830495 - RNA, 22 nt, Human
uaauaaaugaaagugcuggcau

SEQ ID NO: 830496 - RNA, 22 nt, Human
ccacagggcucuaggcgcuucc

SEQ ID NO: 830497 - RNA, 22 nt, Human
auuuauuaugggauuuggcaca

SEQ ID NO: 830498 - RNA, 22 nt, Human
uggcccugaggacccagugugg

SEQ ID NO: 830499 - RNA, 22 nt, Human
cuucuucaauagcaagcgcaua

SEQ ID NO: 830500 - RNA, 22 nt, Human
cccagcagaccgcugugauggc

SEQ ID NO: 830501 - RNA, 19 nt, Human
cugccuguuauggagagaa

SEQ ID NO: 830502 - RNA, 22 nt, Human
aggcaguuuauccccagagccu

SEQ ID NO: 830503 - RNA, 22 nt, Human
ucaguggagcuaagcaugagau

SEQ ID NO: 830504 - RNA, 22 nt, Human
ucagggcaucaucaugaauaua

SEQ ID NO: 830505 - RNA, 22 nt, Human
gcauuuaaauuugaacuucaga

SEQ ID NO: 830506 - RNA, 22 nt, Human
ccuggcaggccccuccuggauu

SEQ ID NO: 830507 - RNA, 22 nt, Human
agcugguaugaacaggauagga

SEQ ID NO: 830508 - RNA, 23 nt, Human
gggugggccaaauuagguagccu

SEQ ID NO: 830509 - RNA, 22 nt, Human
uuugcagucaaauuugcuaaau

SEQ ID NO: 830510 - RNA, 22 nt, Human
ucauccuuuugcaugggaaggc

SEQ ID NO: 830511 - RNA, 22 nt, Human
uggcccugccacucacugcuga

SEQ ID NO: 830512 - RNA, 22 nt, Human
guggcagcaaaugccuggacua

SEQ ID NO: 830513 - RNA, 22 nt, Human
gcccaggaaaugccccguggug

SEQ ID NO: 830514 - RNA, 22 nt, Human
uauugaaauucuucauguccuc

SEQ ID NO: 830515 - RNA, 22 nt, Human
gacacagagauaggccuguguu

SEQ ID NO: 830516 - RNA, 23 nt, Human
auucuucauuaucuucuagaaaa

SEQ ID NO: 830517 - RNA, 22 nt, Human
aggccucagugaucaucaucag

SEQ ID NO: 830518 - RNA, 22 nt, Human
uccauggguagcccugguugag

SEQ ID NO: 830519 - RNA, 22 nt, Human
agcccagcaaagggagguucag

SEQ ID NO: 830520 - RNA, 22 nt, Human
gaggcaguuugccaugccagga

SEQ ID NO: 830521 - RNA, 21 nt, Human
ccugggccaaauucccuggac

SEQ ID NO: 830522 - RNA, 22 nt, Human
uuuauuuaaagucguguguuaa

SEQ ID NO: 830523 - RNA, 22 nt, Human
uaacacaugaaagcaccuucuu

SEQ ID NO: 830524 - RNA, 22 nt, Human
gaaaugugggucaugacccauu

SEQ ID NO: 830525 - RNA, 22 nt, Human
guucaaagcuccugguacagua

SEQ ID NO: 830526 - RNA, 23 nt, Human
aagcuuccuucacgucuccuggg

SEQ ID NO: 830527 - RNA, 22 nt, Human
gccuugccucagccauggaaac

SEQ ID NO: 830528 - RNA, 22 nt, Human
cugucccaggagcuguaagaca

SEQ ID NO: 830529 - RNA, 22 nt, Human
agugcuuugagcguuugaaaag

SEQ ID NO: 830530 - RNA, 22 nt, Human
agcugcugagccaggcugaugu

SEQ ID NO: 830531 - RNA, 22 nt, Human
cugaaggaagcagguggccugu

SEQ ID NO: 830532 - RNA, 22 nt, Human
aggaagcucggagagggcaaau

SEQ ID NO: 830533 - RNA, 22 nt, Human
ucugcucagugcuuaucucuaa

SEQ ID NO: 830534 - RNA, 22 nt, Human
cagauauuaggagcucaauaau

SEQ ID NO: 830535 - RNA, 22 nt, Human
uuccauaaaggugauaguauac

SEQ ID NO: 830536 - RNA, 23 nt, Human
uggccuggagagaaaagaugagu

SEQ ID NO: 830537 - RNA, 19 nt, Human
ggcugucucggcccagcca

SEQ ID NO: 830538 - RNA, 22 nt, Human
cauuacauuucaaaauguuucc

SEQ ID NO: 830539 - RNA, 19 nt, Human
ugaggccaaggucacagau

SEQ ID NO: 830540 - RNA, 22 nt, Human
aauacuuuccuauauaaggugc

SEQ ID NO: 830541 - RNA, 22 nt, Human
agccuggagguaaugaggaaac

SEQ ID NO: 830542 - RNA, 22 nt, Human
uuuuccuacugauaaacaguua

SEQ ID NO: 830543 - RNA, 22 nt, Human
ccagggcagccaacccagaugc

SEQ ID NO: 830544 - RNA, 22 nt, Human
uuuauuugaaucaggggagaau

SEQ ID NO: 830545 - RNA, 22 nt, Human
ccccaggacacauggaccaagu

SEQ ID NO: 830546 - RNA, 21 nt, Human
uggcugcuggcccucucucca

SEQ ID NO: 830547 - RNA, 22 nt, Human
cagagccaaaccucagggcccg

SEQ ID NO: 830548 - RNA, 21 nt, Human
ggcagcucagcagauggggac

SEQ ID NO: 830549 - RNA, 22 nt, Human
acagagcuuaggaugacuccca

SEQ ID NO: 830550 - RNA, 22 nt, Human
agcuaggaaauugaggcugaga

SEQ ID NO: 830551 - RNA, 22 nt, Human
acaucugaccauuacaagacau

SEQ ID NO: 830552 - RNA, 22 nt, Human
gccugccugcugugugcaaguu

SEQ ID NO: 830553 - RNA, 22 nt, Human
gugugccaggaacuggcugcug

SEQ ID NO: 830554 - RNA, 22 nt, Human
augucaaacacaacaccagugg

SEQ ID NO: 830555 - RNA, 22 nt, Human
ggcagcuccucucagcaaaaga

SEQ ID NO: 830556 - RNA, 22 nt, Human
aauuuagaauucgcuagcuaau

SEQ ID NO: 830557 - RNA, 21 nt, Human
cccaggaggcugagaagagca

SEQ ID NO: 830558 - RNA, 22 nt, Human
ugugacaugugucaucuuuucu

SEQ ID NO: 830559 - RNA, 22 nt, Human
agugcuuugaacgaaaggcuga

SEQ ID NO: 830560 - RNA, 22 nt, Human
uucuuucccaguagaugugaaa

SEQ ID NO: 830561 - RNA, 22 nt, Human
gccaccagggggcuccagugag

SEQ ID NO: 830562 - RNA, 22 nt, Human
ucaacacuauccaggcaaucuu

SEQ ID NO: 830563 - RNA, 22 nt, Human
gcacugcaucuacuggcaagua

SEQ ID NO: 830564 - RNA, 23 nt, Human
agggguggucaguacccgcagug

SEQ ID NO: 830565 - RNA, 22 nt, Human
gauuucaagcccccagagauuc

SEQ ID NO: 830566 - RNA, 22 nt, Human
aauacaguagguaauaguucau

SEQ ID NO: 830567 - RNA, 22 nt, Human
ugagaggccccagcucuuggcc

SEQ ID NO: 830568 - RNA, 22 nt, Human
uauucugugugauauguaaaug

SEQ ID NO: 830569 - RNA, 22 nt, Human
gaaauauucuugucuuguuuuc

SEQ ID NO: 830570 - RNA, 22 nt, Human
agggcugagacuaaggccagau

SEQ ID NO: 830571 - RNA, 22 nt, Human
acagcuggaggucugugagcac

SEQ ID NO: 830572 - RNA, 22 nt, Human
cagugccaugucugagccccua

SEQ ID NO: 830573 - RNA, 22 nt, Human
uuuucauuguaaaucaggaaac

SEQ ID NO: 830574 - RNA, 22 nt, Human
cccucugcugccuggcuggguc

SEQ ID NO: 830575 - RNA, 22 nt, Human
aguauuuccuggcuuaucugcu

SEQ ID NO: 830576 - RNA, 19 nt, Human
guggccucggagcgcgcgg

SEQ ID NO: 830577 - RNA, 22 nt, Human
augugcuuuauuaaguaaaaau

SEQ ID NO: 830578 - RNA, 22 nt, Human
augaagcuaaacccugcagcca

SEQ ID NO: 830579 - RNA, 22 nt, Human
auggcuuugaaguaauguaauu

SEQ ID NO: 830580 - RNA, 22 nt, Human
cauuucacaaauggccacauca

SEQ ID NO: 830581 - RNA, 22 nt, Human
caggguggggcuggcuaucaaa

SEQ ID NO: 830582 - RNA, 22 nt, Human
augggaggaugcucgggugcuc

SEQ ID NO: 830583 - RNA, 22 nt, Human
cuucucagucaccugugagucu

SEQ ID NO: 830584 - RNA, 22 nt, Human
uaaagguaguuuuaaaggugcu

SEQ ID NO: 830585 - RNA, 22 nt, Human
ucagugcuucggcgagcaccua

SEQ ID NO: 830586 - RNA, 22 nt, Human
ugaaaugauuauaugguguuug

SEQ ID NO: 830587 - RNA, 22 nt, Human
ugcugccacaaauucagcugcc

SEQ ID NO: 830588 - RNA, 21 nt, Human
ugauccuuucccccauguugc

SEQ ID NO: 830589 - RNA, 22 nt, Human
ucagggcaggacaguguaggcc

SEQ ID NO: 830590 - RNA, 22 nt, Human
caagggugguauugggagcaua

SEQ ID NO: 830591 - RNA, 22 nt, Human
acagggcagagugaaaugcuau

SEQ ID NO: 830592 - RNA, 22 nt, Human
gccuggagcucggcugagggcg

SEQ ID NO: 830593 - RNA, 17 nt, Human
guccugggaggagagag

SEQ ID NO: 830594 - RNA, 22 nt, Human
ucugucuucaucagcaugugau

SEQ ID NO: 830595 - RNA, 22 nt, Human
agccagcaugaagacagaggcc

SEQ ID NO: 830596 - RNA, 22 nt, Human
gcuggcuguguuccuucugcca

SEQ ID NO: 830597 - RNA, 22 nt, Human
gcaguggauccaaugguaucuu

SEQ ID NO: 830598 - RNA, 22 nt, Human
gagcaccucaauuugcuauuug

SEQ ID NO: 830599 - RNA, 22 nt, Human
auuauccucagaaaacauguga

SEQ ID NO: 830600 - RNA, 22 nt, Human
uucugucucuguguuuacauua

SEQ ID NO: 830601 - RNA, 22 nt, Human
uuccagugaugggcaauuuggu

SEQ ID NO: 830602 - RNA, 22 nt, Human
uaauacuuaccuugcagagucu

SEQ ID NO: 830603 - RNA, 22 nt, Human
agggcagaaauauugauacugu

SEQ ID NO: 830604 - RNA, 22 nt, Human
acaggccugacacacagagggc

SEQ ID NO: 830605 - RNA, 22 nt, Human
ggccagaggccauccuccugcu

SEQ ID NO: 830606 - RNA, 22 nt, Human
cauggcagagaaggggaacugg

SEQ ID NO: 830607 - RNA, 22 nt, Human
cccaugagauucugaauuuggc

SEQ ID NO: 830608 - RNA, 22 nt, Human
uucucuuauucuggauaugcag

SEQ ID NO: 830609 - RNA, 22 nt, Human
gcugucugucucugucccacca

SEQ ID NO: 830610 - RNA, 22 nt, Human
gcuggccugcugggcaccaccg

SEQ ID NO: 830611 - RNA, 22 nt, Human
cagagccugcucacgucucugu

SEQ ID NO: 830612 - RNA, 22 nt, Human
gaaggagagagacaucgucccu

SEQ ID NO: 830613 - RNA, 22 nt, Human
uauucacauucucaggccuggu

SEQ ID NO: 830614 - RNA, 22 nt, Human
cagucaccuagacagaacuuac

SEQ ID NO: 830615 - RNA, 22 nt, Human
augcuguggccagaguucaacu

SEQ ID NO: 830616 - RNA, 22 nt, Human
ggcucugcagugacuugagggg

SEQ ID NO: 830617 - RNA, 22 nt, Human
acacugaauaauugagaguuga

SEQ ID NO: 830618 - RNA, 22 nt, Human
agcaccuucacaggcucucagg

SEQ ID NO: 830619 - RNA, 22 nt, Human
uucagugugugauaccugcugu

SEQ ID NO: 830620 - RNA, 22 nt, Human
ugaacauauucaccucuaaaua

SEQ ID NO: 830621 - RNA, 22 nt, Human
acagugucaugucguguucccc

SEQ ID NO: 830622 - RNA, 22 nt, Human
gcuggcagaagagcugguucaa

SEQ ID NO: 830623 - RNA, 22 nt, Human
acagaguauuggaaaggcagug

SEQ ID NO: 830624 - RNA, 22 nt, Human
uucuucuugucugcccucacau

SEQ ID NO: 830625 - RNA, 22 nt, Human
ugucccagcacuuugggagucu

SEQ ID NO: 830626 - RNA, 22 nt, Human
gcagggacaacugugcaccuga

SEQ ID NO: 830627 - RNA, 18 nt, Human
cccacggugcuguagggc

SEQ ID NO: 830628 - RNA, 22 nt, Human
caagaucagggugccagaaugg

SEQ ID NO: 830629 - RNA, 22 nt, Human
gugauuccuauuaguacaugca

SEQ ID NO: 830630 - RNA, 22 nt, Human
aacagcuuugcuucuggagaca

SEQ ID NO: 830631 - RNA, 22 nt, Human
cagcccaggccgacaguuccuc

SEQ ID NO: 830632 - RNA, 22 nt, Human
cagaggcagugggguugcuccu

SEQ ID NO: 830633 - RNA, 22 nt, Human
gccaucacauccaggcuaccuc

SEQ ID NO: 830634 - RNA, 22 nt, Human
ccagucacuggaaaaugggaau

SEQ ID NO: 830635 - RNA, 22 nt, Human
uugggugcugucauggggcacg

SEQ ID NO: 830636 - RNA, 22 nt, Human
cugggagucaccaggagcaagg

SEQ ID NO: 830637 - RNA, 22 nt, Human
ggaggggagucucccaaagccg

SEQ ID NO: 830638 - RNA, 22 nt, Human
aaggucauuuaacaauuuauga

SEQ ID NO: 830639 - RNA, 23 nt, Human
cagggcugggcuugguguuaggc

SEQ ID NO: 830640 - RNA, 22 nt, Human
agcagcucuuaacaaagcaugg

SEQ ID NO: 830641 - RNA, 22 nt, Human
ugcccagggauaagccuagaga

SEQ ID NO: 830642 - RNA, 22 nt, Human
uggccugccccgagauccuggc

SEQ ID NO: 830643 - RNA, 22 nt, Human
cuuagaaauuguuacucauuca

SEQ ID NO: 830644 - RNA, 22 nt, Human
uguaaauaaugcauguaaauca

SEQ ID NO: 830645 - RNA, 22 nt, Human
uuccaugaaagugaaauggagc

SEQ ID NO: 830646 - RNA, 22 nt, Human
uacauaguauucacauuguuuu

SEQ ID NO: 830647 - RNA, 22 nt, Human
ugucccaguuuaucugggacug

SEQ ID NO: 830648 - RNA, 22 nt, Human
auacauacguacauacguaugu

SEQ ID NO: 830649 - RNA, 22 nt, Human
caugcuuugggucagaaaugcc

SEQ ID NO: 830650 - RNA, 22 nt, Human
agaaggggagaagcuaccagga

SEQ ID NO: 830651 - RNA, 22 nt, Human
uagugaaauuuaugcacagcua

SEQ ID NO: 830652 - RNA, 22 nt, Human
gcacagaaguaaaauacaaguc

SEQ ID NO: 830653 - RNA, 22 nt, Human
ccuggcugugcauugccggccc

SEQ ID NO: 830654 - RNA, 22 nt, Human
cagggccaagcugcagcaucug

SEQ ID NO: 830655 - RNA, 22 nt, Human
ccagcuggcacuguggcugccc

SEQ ID NO: 830656 - RNA, 22 nt, Human
uguguucuggaaagcucacuga

SEQ ID NO: 830657 - RNA, 22 nt, Human
cagggcacaguuauggaggugg

SEQ ID NO: 830658 - RNA, 22 nt, Human
gcacugaacuuuaaucauuucu

SEQ ID NO: 830659 - RNA, 22 nt, Human
ggggcagaaguagugccccuga

SEQ ID NO: 830660 - RNA, 22 nt, Human
caguuuuugccauuaagaguaa

SEQ ID NO: 830661 - RNA, 22 nt, Human
agggcagagauuaauuaagaca

SEQ ID NO: 830662 - RNA, 22 nt, Human
cccagcucuuuuagcggcaucu

SEQ ID NO: 830663 - RNA, 22 nt, Human
ucuuccaagguugcacacuauc

SEQ ID NO: 830664 - RNA, 22 nt, Human
ggcagucuuaucagcauuggac

SEQ ID NO: 830665 - RNA, 17 nt, Human
ucagcaaagacaaagga

SEQ ID NO: 830666 - RNA, 22 nt, Human
ccagugcuuccaggaauacggu

SEQ ID NO: 830667 - RNA, 22 nt, Human
agcaccuugcucuuggccuucc

SEQ ID NO: 830668 - RNA, 22 nt, Human
uacuuuggauccuuacaauagc

SEQ ID NO: 830669 - RNA, 22 nt, Human
ggaggccacgguuuagcaccga

SEQ ID NO: 830670 - RNA, 22 nt, Human
cucaggaaaggccaugcaaggg

SEQ ID NO: 830671 - RNA, 22 nt, Human
aaaaaucuaugacugcuucucc

SEQ ID NO: 830672 - RNA, 22 nt, Human
uuccauauguauauagcuguua

SEQ ID NO: 830673 - RNA, 22 nt, Human
cugccucaugcugccugcagcc

SEQ ID NO: 830674 - RNA, 22 nt, Human
cuggcuccauccuugagcucug

SEQ ID NO: 830675 - RNA, 22 nt, Human
ggcagcaguggcugcuauuguc

SEQ ID NO: 830676 - RNA, 22 nt, Human
cuggugcaggaaggagcuggca

SEQ ID NO: 830677 - RNA, 22 nt, Human
aggugcagcugguggagucugg

SEQ ID NO: 830678 - RNA, 22 nt, Human
aagcugcagacccccugucuca

SEQ ID NO: 830679 - RNA, 22 nt, Human
aaguaacaaugcuguugaauug

SEQ ID NO: 830680 - RNA, 22 nt, Human
cuuaacauccugcauuuuucuu

SEQ ID NO: 830681 - RNA, 22 nt, Human
ugggugggagcgcccugucugg

SEQ ID NO: 830682 - RNA, 22 nt, Human
cucagaauuacaucccauuuua

SEQ ID NO: 830683 - RNA, 22 nt, Human
guugggaagcagauggaugagc

SEQ ID NO: 830684 - RNA, 22 nt, Human
aauuuuaaucaguggugcugag

SEQ ID NO: 830685 - RNA, 22 nt, Human
ugaaucauggauaaauagcuua

SEQ ID NO: 830686 - RNA, 22 nt, Human
auaaagaggauguauuuacagc

SEQ ID NO: 830687 - RNA, 22 nt, Human
aacaugaagguaggaugguuuu

SEQ ID NO: 830688 - RNA, 22 nt, Human
gcagagcagugcuugcccagcg

SEQ ID NO: 830689 - RNA, 20 nt, Human
augauuuugcacuaacuuca

SEQ ID NO: 830690 - RNA, 22 nt, Human
cagcugccugcaacacaagcuu

SEQ ID NO: 830691 - RNA, 22 nt, Human
cagcucccagagugaccagcag

SEQ ID NO: 830692 - RNA, 22 nt, Human
ccagcugcagguguuccagaug

SEQ ID NO: 830693 - RNA, 22 nt, Human
auuguaauuuuagagaaagugg

SEQ ID NO: 830694 - RNA, 19 nt, Human
gcuguauuaaagauacaug

SEQ ID NO: 830695 - RNA, 19 nt, Human
cacagggcaggucucaugu

SEQ ID NO: 830696 - RNA, 22 nt, Human
uucuuaacucaaauauauaucc

SEQ ID NO: 830697 - RNA, 22 nt, Human
gcagugggcaacaagagcugga

SEQ ID NO: 830698 - RNA, 22 nt, Human
uaucauuguguuauuucuucca

SEQ ID NO: 830699 - RNA, 22 nt, Human
ggagaggguguggaaaguuauc

SEQ ID NO: 830700 - RNA, 21 nt, Human
ucugggcccaugcugccucac

SEQ ID NO: 830701 - RNA, 22 nt, Human
uccuggagagugggcgagcaca

SEQ ID NO: 830702 - RNA, 22 nt, Human
gcagcuggggaggucgugggga

SEQ ID NO: 830703 - RNA, 17 nt, Human
gagacagcaggagcccc

SEQ ID NO: 830704 - RNA, 22 nt, Human
uagcauuucccaaaugcauuug

SEQ ID NO: 830705 - RNA, 22 nt, Human
caggagaaauguggcugcuacc

SEQ ID NO: 830706 - RNA, 22 nt, Human
ccuggaucgaugccgagggaaa

SEQ ID NO: 830707 - RNA, 22 nt, Human
ccaggagucuggaugagguguc

SEQ ID NO: 830708 - RNA, 22 nt, Human
aaucuucacagaaaaaugucug

SEQ ID NO: 830709 - RNA, 15 nt, Human
caggagaggaagguu

SEQ ID NO: 830710 - RNA, 22 nt, Human
uuucucugcugccugugucgau

SEQ ID NO: 830711 - RNA, 22 nt, Human
cuguggaauugaugcuuagugu

SEQ ID NO: 830712 - RNA, 22 nt, Human
ccaaaguccuuucuccaccugc

SEQ ID NO: 830713 - RNA, 22 nt, Human
aguaugaauacagauuuucucu

SEQ ID NO: 830714 - RNA, 22 nt, Human
ucucagagcuucagaaagcacc

SEQ ID NO: 830715 - RNA, 22 nt, Human
ugcaguggaaucuggagagcag

SEQ ID NO: 830716 - RNA, 22 nt, Human
cugugcuggcagaccuggaguu

SEQ ID NO: 830717 - RNA, 19 nt, Human
ucagaggauuuggcuauga

SEQ ID NO: 830718 - RNA, 22 nt, Human
uguguacucaauugagccauuu

SEQ ID NO: 830719 - RNA, 22 nt, Human
guguaugaggggagaauguuuu

SEQ ID NO: 830720 - RNA, 22 nt, Human
uagugcuugagucucuccguac

SEQ ID NO: 830721 - RNA, 22 nt, Human
cugggguggauggguccaaguu

SEQ ID NO: 830722 - RNA, 22 nt, Human
ucaauaaaucccucugacccug

SEQ ID NO: 830723 - RNA, 21 nt, Human
uagggcaggcauuggaagaga

SEQ ID NO: 830724 - RNA, 19 nt, Human
uccaggagcaaagccaguu

SEQ ID NO: 830725 - RNA, 21 nt, Human
ccaggcuccugaggcugguca

SEQ ID NO: 830726 - RNA, 22 nt, Human
aguacaaugucugacacaguag

SEQ ID NO: 830727 - RNA, 22 nt, Human
acaugcauacacguacauaccu

SEQ ID NO: 830728 - RNA, 22 nt, Human
acagugucugacacauuguagc

SEQ ID NO: 830729 - RNA, 22 nt, Human
agccucuggcccuagacugcuu

SEQ ID NO: 830730 - RNA, 22 nt, Human
caagagcuuuagaaaugcucau

SEQ ID NO: 830731 - RNA, 22 nt, Human
cugcuguggugucaagcaucuc

SEQ ID NO: 830732 - RNA, 22 nt, Human
ccagugcaggugagcaccaggu

SEQ ID NO: 830733 - RNA, 22 nt, Human
caccaggcuggagugcagaggu

SEQ ID NO: 830734 - RNA, 19 nt, Human
cuauacagccucugaggaa

SEQ ID NO: 830735 - RNA, 22 nt, Human
cccucugcaggcuggaccugcc

SEQ ID NO: 830736 - RNA, 22 nt, Human
uugaagcaaauucugugcagua

SEQ ID NO: 830737 - RNA, 22 nt, Human
auucuccaucaccacuggcacu

SEQ ID NO: 830738 - RNA, 22 nt, Human
augaaauaucuugaagaaauuc

SEQ ID NO: 830739 - RNA, 22 nt, Human
cauauguauuucucauaauuag

SEQ ID NO: 830740 - RNA, 22 nt, Human
aaaauauuuuagggccaggaga

SEQ ID NO: 830741 - RNA, 22 nt, Human
uaucuguugucuuuuacaugua

SEQ ID NO: 830742 - RNA, 22 nt, Human
ugugaacuggcagguggacggg

SEQ ID NO: 830743 - RNA, 18 nt, Human
cagaagcaggcagugcag

SEQ ID NO: 830744 - RNA, 22 nt, Human
ggcauuuacauaaucuuauuua

SEQ ID NO: 830745 - RNA, 22 nt, Human
aagcccagcugaaagcauuuuu

SEQ ID NO: 830746 - RNA, 22 nt, Human
auuauaaagaacaugugugugg

SEQ ID NO: 830747 - RNA, 22 nt, Human
ggccuugggauguggcugcagc

SEQ ID NO: 830748 - RNA, 22 nt, Human
cuacauuucccagcugccuucc

SEQ ID NO: 830749 - RNA, 22 nt, Human
uuuaaaaucagaugggaguugg

SEQ ID NO: 830750 - RNA, 20 nt, Human
gcugccagugccugaugcuu

SEQ ID NO: 830751 - RNA, 17 nt, Human
agcugccagggagugug

SEQ ID NO: 830752 - RNA, 22 nt, Human
acagccagaggagccaggcugg

SEQ ID NO: 830753 - RNA, 22 nt, Human
aggguggggugcuacaucuuua

SEQ ID NO: 830754 - RNA, 22 nt, Human
cagaggaggccaccgcauaggc

SEQ ID NO: 830755 - RNA, 22 nt, Human
ggccaggagcugcacagggcuc

SEQ ID NO: 830756 - RNA, 22 nt, Human
auggaaagggaagcaaggaaca

SEQ ID NO: 830757 - RNA, 22 nt, Human
ucuuccucuagaucugaggccc

SEQ ID NO: 830758 - RNA, 22 nt, Human
ucaaugauuagaguuuagugug

SEQ ID NO: 830759 - RNA, 20 nt, Human
ugugcaggagagugaggcug

SEQ ID NO: 830760 - RNA, 22 nt, Human
cagcugacgccagaguggaauu

SEQ ID NO: 830761 - RNA, 22 nt, Human
acauuucuucccuuuagcagaa

SEQ ID NO: 830762 - RNA, 22 nt, Human
aaucacaugugcucaauuuuaa

SEQ ID NO: 830763 - RNA, 22 nt, Human
cuggcagcgugagcagcaucca

SEQ ID NO: 830764 - RNA, 22 nt, Human
aaucaguuguccaaaguucaca

SEQ ID NO: 830765 - RNA, 22 nt, Human
cucuggccugcuuccucaggua

SEQ ID NO: 830766 - RNA, 22 nt, Human
ggcgaggccgggacaggcugga

SEQ ID NO: 830767 - RNA, 22 nt, Human
aaauguguuucgaaaacuggug

SEQ ID NO: 830768 - RNA, 19 nt, Human
acacagggcuagaguuaca

SEQ ID NO: 830769 - RNA, 22 nt, Human
ugccgcagugcggggagggccc

SEQ ID NO: 830770 - RNA, 22 nt, Human
uucuuaacuggaaaaugucaga

SEQ ID NO: 830771 - RNA, 22 nt, Human
augucacagcucccauuccucc

SEQ ID NO: 830772 - RNA, 22 nt, Human
ccccagcugcauacuugccaag

SEQ ID NO: 830773 - RNA, 23 nt, Human
ucucuuucaagagcuuaaugugc

SEQ ID NO: 830774 - RNA, 22 nt, Human
aaaugguaagacaacacauuau

SEQ ID NO: 830775 - RNA, 22 nt, Human
augcugugagugugccgcagag

SEQ ID NO: 830776 - RNA, 23 nt, Human
uguaacaauucccagccuuugcc

SEQ ID NO: 830777 - RNA, 22 nt, Human
uauggaaacuaauucauuuuuc

SEQ ID NO: 830778 - RNA, 22 nt, Human
cuaaaugcccuacaaugacugg

SEQ ID NO: 830779 - RNA, 22 nt, Human
ggcagcuaggggcagggaauuc

SEQ ID NO: 830780 - RNA, 17 nt, Human
ugcauguccuuuguucc

SEQ ID NO: 830781 - RNA, 22 nt, Human
aguucacauuccgagguacugg

SEQ ID NO: 830782 - RNA, 22 nt, Human
caauuucaauacaaaauacauu

SEQ ID NO: 830783 - RNA, 22 nt, Human
agggcugggcugcuuguuguca

SEQ ID NO: 830784 - RNA, 22 nt, Human
gcaggccuuggcaaugagccug

SEQ ID NO: 830785 - RNA, 22 nt, Human
agcgagggaggucugaggacag

SEQ ID NO: 830786 - RNA, 22 nt, Human
ggccucugccucaucugggcac

SEQ ID NO: 830787 - RNA, 22 nt, Human
augacacuuggugauacuuugu

SEQ ID NO: 830788 - RNA, 22 nt, Human
aaguucaagagugacauauuag

SEQ ID NO: 830789 - RNA, 22 nt, Human
cugggccagauccagccucaca

SEQ ID NO: 830790 - RNA, 22 nt, Human
uaaggcaccuguccaggcuggg

SEQ ID NO: 830791 - RNA, 22 nt, Human
auaaggcaagcugucaguuugu

SEQ ID NO: 830792 - RNA, 22 nt, Human
gcuguccucuuggacucagggc

SEQ ID NO: 830793 - RNA, 19 nt, Human
ggaccagguccugggcagc

SEQ ID NO: 830794 - RNA, 19 nt, Human
ugcuuaauuccuaguaggu

SEQ ID NO: 830795 - RNA, 22 nt, Human
agcagggcuucugugccugugc

SEQ ID NO: 830796 - RNA, 22 nt, Human
cugcucuaauaucagauagacu

SEQ ID NO: 830797 - RNA, 22 nt, Human
cagcaggcucugaguggcugcc

SEQ ID NO: 830798 - RNA, 22 nt, Human
cucaggagaugacagaagguau

SEQ ID NO: 830799 - RNA, 22 nt, Human
uugaaucauuacaauagauaag

SEQ ID NO: 830800 - RNA, 22 nt, Human
caauaauauccugugcuguuug

SEQ ID NO: 830801 - RNA, 22 nt, Human
ugugggcaggcccgggucugag

SEQ ID NO: 830802 - RNA, 22 nt, Human
cugcccugcccaggccuugggc

SEQ ID NO: 830803 - RNA, 22 nt, Human
uguggcuuaagaaugccuuuaa

SEQ ID NO: 830804 - RNA, 21 nt, Human
ucuuccuccacagcgugccac

SEQ ID NO: 830805 - RNA, 22 nt, Human
gaacagaauuaccgaagaucug

SEQ ID NO: 830806 - RNA, 23 nt, Human
gcagaggagcaagcuggacacca

SEQ ID NO: 830807 - RNA, 22 nt, Human
cuugcaggcagggccuccugga

SEQ ID NO: 830808 - RNA, 22 nt, Human
acagagcuucccagccugagca

SEQ ID NO: 830809 - RNA, 22 nt, Human
cagggagggaggaaaauuugcu

SEQ ID NO: 830810 - RNA, 22 nt, Human
ucucugguggcuccaucaguag

SEQ ID NO: 830811 - RNA, 22 nt, Human
ggcucugcaugugagugggugg

SEQ ID NO: 830812 - RNA, 22 nt, Human
caggggccaggcugucugcugu

SEQ ID NO: 830813 - RNA, 22 nt, Human
ugccuggauucgguuguuguca

SEQ ID NO: 830814 - RNA, 22 nt, Human
caggguccggcugccuggcugu

SEQ ID NO: 830815 - RNA, 22 nt, Human
uuucauaauagugcaguuuguu

SEQ ID NO: 830816 - RNA, 22 nt, Human
aaaugugugcacaaagacagcu

SEQ ID NO: 830817 - RNA, 22 nt, Human
uggcuggggagccccgacuccc

SEQ ID NO: 830818 - RNA, 22 nt, Human
ucuggcucuuugggugauugua

SEQ ID NO: 830819 - RNA, 22 nt, Human
aggagaggcaucaagaaaaucg

SEQ ID NO: 830820 - RNA, 22 nt, Human
cccaggagacagaaacagaggu

SEQ ID NO: 830821 - RNA, 22 nt, Human
gcugccacgaucucugcuguag

SEQ ID NO: 830822 - RNA, 22 nt, Human
cagcagagcauuugguaggagg

SEQ ID NO: 830823 - RNA, 22 nt, Human
gagccagccuucuucugagguc

SEQ ID NO: 830824 - RNA, 22 nt, Human
cagcauuuggugaucaucuuaa

SEQ ID NO: 830825 - RNA, 22 nt, Human
cccaggcuggagugcaauggca

SEQ ID NO: 830826 - RNA, 20 nt, Human
cacugaagacuucuugcuca

SEQ ID NO: 830827 - RNA, 21 nt, Human
cacucaggguaugugccaggc

SEQ ID NO: 830828 - RNA, 22 nt, Human
cagucacauggaugauggauag

SEQ ID NO: 830829 - RNA, 22 nt, Human
uaguaacagauuuauacagucu

SEQ ID NO: 830830 - RNA, 22 nt, Human
ugaaccaggaggcagccagcac

SEQ ID NO: 830831 - RNA, 22 nt, Human
uucacaggaggguggaugcaug

SEQ ID NO: 830832 - RNA, 20 nt, Human
cuccagggaacagacuggag

SEQ ID NO: 830833 - RNA, 22 nt, Human
ugaaggcuguuggauggggaag

SEQ ID NO: 830834 - RNA, 22 nt, Human
gcagggaggaagagaugcuucc

SEQ ID NO: 830835 - RNA, 22 nt, Human
ugaggcaggacauggacaacug

SEQ ID NO: 830836 - RNA, 22 nt, Human
accucuggccuucaggcaucau

SEQ ID NO: 830837 - RNA, 22 nt, Human
uucuguuuuagaaauaaguagu

SEQ ID NO: 830838 - RNA, 22 nt, Human
uugcauuucccauugaguaaug

SEQ ID NO: 830839 - RNA, 22 nt, Human
gccacaugcaauugcagcacgu

SEQ ID NO: 830840 - RNA, 22 nt, Human
aucacaaaggucucagagcaca

SEQ ID NO: 830841 - RNA, 22 nt, Human
gggcuucucuuuagugagcuga

SEQ ID NO: 830842 - RNA, 22 nt, Human
cuuggcagauccaaaaaugaca

SEQ ID NO: 830843 - RNA, 20 nt, Human
cuaucuccuggcgugccuuc

SEQ ID NO: 830844 - RNA, 22 nt, Human
gugguuuucuccaacccagaac

SEQ ID NO: 830845 - RNA, 22 nt, Human
agucucugccagcuuguccucu

SEQ ID NO: 830846 - RNA, 22 nt, Human
acaaaugugucuaauugugccu

SEQ ID NO: 830847 - RNA, 22 nt, Human
uucaaacaaaacuguucccaua

SEQ ID NO: 830848 - RNA, 22 nt, Human
cccagcaguuguuggugcacau

SEQ ID NO: 830849 - RNA, 18 nt, Human
cagauccaggcagcuauu

SEQ ID NO: 830850 - RNA, 22 nt, Human
acaggcugacuuccugccaugu

SEQ ID NO: 830851 - RNA, 22 nt, Human
agaggggaaguaaugaaugaua

SEQ ID NO: 830852 - RNA, 17 nt, Human
gucugggcuuuagagac

SEQ ID NO: 830853 - RNA, 22 nt, Human
acauuugagaugccuuuuaggu

SEQ ID NO: 830854 - RNA, 22 nt, Human
cagcauugaucccaggcugugg

SEQ ID NO: 830855 - RNA, 22 nt, Human
aggcaugugacccuggacucag

SEQ ID NO: 830856 - RNA, 20 nt, Human
aauguauauuuuaugccagg

SEQ ID NO: 830857 - RNA, 20 nt, Human
ccuccaggcacacccaugug

SEQ ID NO: 830858 - RNA, 22 nt, Human
uugcauuccaguccccacugug

SEQ ID NO: 830859 - RNA, 18 nt, Human
cuuuaugugcagagcuuu

SEQ ID NO: 830860 - RNA, 22 nt, Human
ccagcucuuggugcacuuacau

SEQ ID NO: 830861 - RNA, 22 nt, Human
uggccacccagcugacgccuuc

SEQ ID NO: 830862 - RNA, 22 nt, Human
agcagccacacgccuccuucuc

SEQ ID NO: 830863 - RNA, 22 nt, Human
ugcacacaaaugugaacgugcc

SEQ ID NO: 830864 - RNA, 22 nt, Human
aauauguucaaaauagaucacu

SEQ ID NO: 830865 - RNA, 22 nt, Human
cuggcagguuuggugucuggug

SEQ ID NO: 830866 - RNA, 22 nt, Human
acuuguguaacacagaaagaac

SEQ ID NO: 830867 - RNA, 22 nt, Human
agaggcuguuacacucccagau

SEQ ID NO: 830868 - RNA, 22 nt, Human
uucaacuuuaugcauauguauu

SEQ ID NO: 830869 - RNA, 22 nt, Human
uuucucuugcgauaugcuacac

SEQ ID NO: 830870 - RNA, 22 nt, Human
ccucucuguaagggucccuccc

SEQ ID NO: 830871 - RNA, 22 nt, Human
ucagaauucugaccuuggguca

SEQ ID NO: 830872 - RNA, 22 nt, Human
aaaugcacagaaaggaugugga

SEQ ID NO: 830873 - RNA, 22 nt, Human
auuggcaguuagugacgaggcu

SEQ ID NO: 830874 - RNA, 22 nt, Human
aauggcugggaguguauuuugg

SEQ ID NO: 830875 - RNA, 22 nt, Human
cauggggagacaccuagggaaa

SEQ ID NO: 830876 - RNA, 20 nt, Human
agcuucuucugucuaauuuu

SEQ ID NO: 830877 - RNA, 22 nt, Human
uugaagcaaggcgaaucuugug

SEQ ID NO: 830878 - RNA, 22 nt, Human
gccagccugugggggcucugug

SEQ ID NO: 830879 - RNA, 22 nt, Human
aagcaucucuauguggagagug

SEQ ID NO: 830880 - RNA, 18 nt, Human
gucauugcaacauacugu

SEQ ID NO: 830881 - RNA, 22 nt, Human
aagggcagaauagagaagaugg

SEQ ID NO: 830882 - RNA, 22 nt, Human
gcuguucaaaagccacaguuac

SEQ ID NO: 830883 - RNA, 22 nt, Human
gagcucugggaaacaaagugua

SEQ ID NO: 830884 - RNA, 22 nt, Human
uggagcccagggugagaaggag

SEQ ID NO: 830885 - RNA, 22 nt, Human
cuucagaauccagaaucagaau

SEQ ID NO: 830886 - RNA, 22 nt, Human
uccugccuugccugggacauca

SEQ ID NO: 830887 - RNA, 22 nt, Human
auucacaaaaugauauagauac

SEQ ID NO: 830888 - RNA, 22 nt, Human
gcuggggagcuagaccucagca

SEQ ID NO: 830889 - RNA, 22 nt, Human
aaugcagugagccauuaaaugg

SEQ ID NO: 830890 - RNA, 22 nt, Human
uccagggagauacuggcugcca

SEQ ID NO: 830891 - RNA, 22 nt, Human
gaagugaagagauuagaaauca

SEQ ID NO: 830892 - RNA, 22 nt, Human
cagcagcuacuuggagcagcag

SEQ ID NO: 830893 - RNA, 22 nt, Human
caauuuuuuccaugcucuuaca

SEQ ID NO: 830894 - RNA, 22 nt, Human
uguauuagaucugagaacuucu

SEQ ID NO: 830895 - RNA, 22 nt, Human
uuuuccucugagcuuugaauaa

SEQ ID NO: 830896 - RNA, 22 nt, Human
aggauuuaucaggaacucucuu

SEQ ID NO: 830897 - RNA, 22 nt, Human
cugggagcccugacuagccugg

SEQ ID NO: 830898 - RNA, 22 nt, Human
gauggcuucagucuccuugggu

SEQ ID NO: 830899 - RNA, 21 nt, Human
gcagcuggucucagagcuugc

SEQ ID NO: 830900 - RNA, 22 nt, Human
ccagaagggcuauugcagugac

SEQ ID NO: 830901 - RNA, 22 nt, Human
cugaaauuccauuucagccaca

SEQ ID NO: 830902 - RNA, 22 nt, Human
uuuauuauagugguggggacug

SEQ ID NO: 830903 - RNA, 22 nt, Human
auacuuucugaccaauuaauug

SEQ ID NO: 830904 - RNA, 22 nt, Human
ccugccagcccgcguucaugcc

SEQ ID NO: 830905 - RNA, 22 nt, Human
acagucuacuugagcuuguaua

SEQ ID NO: 830906 - RNA, 22 nt, Human
cauggccugccuccuccuggug

SEQ ID NO: 830907 - RNA, 22 nt, Human
cuguccauuuucgugccuccuu

SEQ ID NO: 830908 - RNA, 22 nt, Human
gugccagcucuccccacaucug

SEQ ID NO: 830909 - RNA, 22 nt, Human
agggaaggaaaagcugucgcuu

SEQ ID NO: 830910 - RNA, 22 nt, Human
agagcugggacuuggacucaau

SEQ ID NO: 830911 - RNA, 22 nt, Human
ggacagcucugccaggagcuca

SEQ ID NO: 830912 - RNA, 22 nt, Human
auuucauacuaaggcucaaaaa

SEQ ID NO: 830913 - RNA, 22 nt, Human
ucucagagaugucaagagucua

SEQ ID NO: 830914 - RNA, 22 nt, Human
aggugcuggagucugggcagga

SEQ ID NO: 830915 - RNA, 22 nt, Human
gcugccuguugaagggucugug

SEQ ID NO: 830916 - RNA, 22 nt, Human
cagagccagcuguccuuggcau

SEQ ID NO: 830917 - RNA, 22 nt, Human
aauuaacaaauguagcugugau

SEQ ID NO: 830918 - RNA, 22 nt, Human
uggcaggcagugugggagcugg

SEQ ID NO: 830919 - RNA, 22 nt, Human
uuucauguuuucuuaaauggca

SEQ ID NO: 830920 - RNA, 22 nt, Human
uaagaaucgauguuuauuuaga

SEQ ID NO: 830921 - RNA, 22 nt, Human
cccaggaggcagaaguugcagu

SEQ ID NO: 830922 - RNA, 22 nt, Human
agggugggcuagacucuucccc

SEQ ID NO: 830923 - RNA, 22 nt, Human
cucaggauagauuguccucuca

SEQ ID NO: 830924 - RNA, 19 nt, Human
gaaggagagcugaguuagg

SEQ ID NO: 830925 - RNA, 22 nt, Human
uggcagaggagaauuaagauua

SEQ ID NO: 830926 - RNA, 22 nt, Human
gcugucuuccuugcuccaaggg

SEQ ID NO: 830927 - RNA, 22 nt, Human
aggccaggcaacauucugaagu

SEQ ID NO: 830928 - RNA, 22 nt, Human
ugaccaaaggugguuuauuugg

SEQ ID NO: 830929 - RNA, 22 nt, Human
ucuggcucccagccugcucuca

SEQ ID NO: 830930 - RNA, 22 nt, Human
cuugucugugucggauaaaacu

SEQ ID NO: 830931 - RNA, 22 nt, Human
aaauuauucucauguguuucuu

SEQ ID NO: 830932 - RNA, 22 nt, Human
cauaauuacugauaugcugauu

SEQ ID NO: 830933 - RNA, 22 nt, Human
cagucccagcugcucagaaggc

SEQ ID NO: 830934 - RNA, 22 nt, Human
gagcauuuuugucugcauuuua

SEQ ID NO: 830935 - RNA, 22 nt, Human
acuggcagcuguaggaugcaug

SEQ ID NO: 830936 - RNA, 22 nt, Human
aaggcacucauucaaggagaua

SEQ ID NO: 830937 - RNA, 22 nt, Human
ccugugugucugucacugcaca

SEQ ID NO: 830938 - RNA, 22 nt, Human
gccagagcugagugagguucuu

SEQ ID NO: 830939 - RNA, 22 nt, Human
aggcacugauucuguuuuccau

SEQ ID NO: 830940 - RNA, 22 nt, Human
ucuguucauaguaguguauaug

SEQ ID NO: 830941 - RNA, 22 nt, Human
uccaggaguuugagacugcagu

SEQ ID NO: 830942 - RNA, 22 nt, Human
agguauagaauugaaaggguuu

SEQ ID NO: 830943 - RNA, 22 nt, Human
acauuuagcuguacaaucuaug

SEQ ID NO: 830944 - RNA, 22 nt, Human
uugaagcauuugcuauagcauu

SEQ ID NO: 830945 - RNA, 19 nt, Human
ccagcagcuuugauucucu

SEQ ID NO: 830946 - RNA, 22 nt, Human
ggccagagagccgcuguuagga

SEQ ID NO: 830947 - RNA, 22 nt, Human
agcaucuggucaugagugagaa

SEQ ID NO: 830948 - RNA, 22 nt, Human
ccuuucucauuuuaagcauuag

SEQ ID NO: 830949 - RNA, 22 nt, Human
aagcugccagcugagcugaggc

SEQ ID NO: 830950 - RNA, 22 nt, Human
caaugaaaauuuaaguugcagc

SEQ ID NO: 830951 - RNA, 21 nt, Human
agagagggagaugaaacaucc

SEQ ID NO: 830952 - RNA, 22 nt, Human
uagucccauuuugagguauuug

SEQ ID NO: 830953 - RNA, 22 nt, Human
uuuaaauaggacuccugggggu

SEQ ID NO: 830954 - RNA, 22 nt, Human
agaggggagagcuaagcaauuc

SEQ ID NO: 830955 - RNA, 22 nt, Human
ccagcucugcagggccuggggu

SEQ ID NO: 830956 - RNA, 22 nt, Human
augaacuuauuucugaacuuuu

SEQ ID NO: 830957 - RNA, 22 nt, Human
ggcauggcucggagucagaaca

SEQ ID NO: 830958 - RNA, 22 nt, Human
uggcugcuagccagagcuucag

SEQ ID NO: 830959 - RNA, 22 nt, Human
gugccuggcaugcgccggugcu

SEQ ID NO: 830960 - RNA, 22 nt, Human
cagggagcuggcuggcgugagu

SEQ ID NO: 830961 - RNA, 22 nt, Human
gagccagccgcaagagcuguga

SEQ ID NO: 830962 - RNA, 22 nt, Human
ucuggcucaggagcuguguuca

SEQ ID NO: 830963 - RNA, 22 nt, Human
ggagcugucuguagggcacagg

SEQ ID NO: 830964 - RNA, 21 nt, Human
agcucagccgggcacaguggc

SEQ ID NO: 830965 - RNA, 22 nt, Human
cagguggcuucucccuaggcca

SEQ ID NO: 830966 - RNA, 22 nt, Human
gcaggaguguggugggacaucc

SEQ ID NO: 830967 - RNA, 22 nt, Human
ggccuggccuccagaugugggc

SEQ ID NO: 830968 - RNA, 22 nt, Human
uaacuuucuucauaugugaacc

SEQ ID NO: 830969 - RNA, 22 nt, Human
ggaggccaaggcgggcggauca

SEQ ID NO: 830970 - RNA, 22 nt, Human
guuuuauaauugcuucauaaga

SEQ ID NO: 830971 - RNA, 22 nt, Human
uuugaagacauauuguuacaua

SEQ ID NO: 830972 - RNA, 22 nt, Human
acaaaaauuagcugggcauggu

SEQ ID NO: 830973 - RNA, 22 nt, Human
ugcugcauuuaucuucucaaac

SEQ ID NO: 830974 - RNA, 22 nt, Human
gcccagcuuuuugaggcaggca

SEQ ID NO: 830975 - RNA, 22 nt, Human
ucaaggcuaaacuuucagagua

SEQ ID NO: 830976 - RNA, 22 nt, Human
aggucacauggauaaugaucag

SEQ ID NO: 830977 - RNA, 22 nt, Human
uuaaacaguguuucaugugggg

SEQ ID NO: 830978 - RNA, 22 nt, Human
aggcugggaaauguauuccagc

SEQ ID NO: 830979 - RNA, 22 nt, Human
uuucaauguaacauuuccaggc

SEQ ID NO: 830980 - RNA, 22 nt, Human
gggcugcugccaaucacagccu

SEQ ID NO: 830981 - RNA, 22 nt, Human
ggugggugagcccugggagcug

SEQ ID NO: 830982 - RNA, 22 nt, Human
cuucccagacgggguggcagcc

SEQ ID NO: 830983 - RNA, 22 nt, Human
uagcccagcaugagcagagcug

SEQ ID NO: 830984 - RNA, 22 nt, Human
uucucucauucaaauuaaagug

SEQ ID NO: 830985 - RNA, 22 nt, Human
uccaggagaaaacugacggugg

SEQ ID NO: 830986 - RNA, 22 nt, Human
uauuuguauguguguacauaua

SEQ ID NO: 830987 - RNA, 22 nt, Human
cacucugcgcugggcgccagcg

SEQ ID NO: 830988 - RNA, 22 nt, Human
ggggcagagcauagcuccaauu

SEQ ID NO: 830989 - RNA, 22 nt, Human
gcagcaggcuuuucauaccuug

SEQ ID NO: 830990 - RNA, 22 nt, Human
uagaaauguugguauuaacauu

SEQ ID NO: 830991 - RNA, 22 nt, Human
gggcucugggauucagagcaag

SEQ ID NO: 830992 - RNA, 22 nt, Human
gaucuucuagcagaaguaauuu

SEQ ID NO: 830993 - RNA, 22 nt, Human
ggaagggccucgggcgugggac

SEQ ID NO: 830994 - RNA, 22 nt, Human
ugcagccaccaccucugcugaa

SEQ ID NO: 830995 - RNA, 22 nt, Human
uuucagugcuucuguuuaccgg

SEQ ID NO: 830996 - RNA, 22 nt, Human
uaggagcuaaaauauuuuauau

SEQ ID NO: 830997 - RNA, 22 nt, Human
aagccagggucaggggccuccu

SEQ ID NO: 830998 - RNA, 22 nt, Human
uccuugaacagagggccugggu

SEQ ID NO: 830999 - RNA, 22 nt, Human
agugcuuuagcauccaacuguc

SEQ ID NO: 831000 - RNA, 22 nt, Human
cuguagccaguuuggccucacc

SEQ ID NO: 831001 - RNA, 22 nt, Human
uagcucuucauuucaucugauu

SEQ ID NO: 831002 - RNA, 22 nt, Human
aaguccuuuaauaucacauagu

SEQ ID NO: 831003 - RNA, 22 nt, Human
ggcugaaacagauuucaagaca

SEQ ID NO: 831004 - RNA, 22 nt, Human
agcucccaggcagucaugagga

SEQ ID NO: 831005 - RNA, 22 nt, Human
ggauuuacaaguuuaacucuca

SEQ ID NO: 831006 - RNA, 22 nt, Human
caggaggaacaagagguucugg

SEQ ID NO: 831007 - RNA, 22 nt, Human
uuccuugaaugagucauggaaa

SEQ ID NO: 831008 - RNA, 22 nt, Human
cagcucucacacccuccuccca

SEQ ID NO: 831009 - RNA, 20 nt, Human
ugugugcacacaugacauuc

SEQ ID NO: 831010 - RNA, 22 nt, Human
acaugcauucucuaaaagcaaa

SEQ ID NO: 831011 - RNA, 22 nt, Human
ugccugucagggggagugggaa

SEQ ID NO: 831012 - RNA, 22 nt, Human
uaugagaaaauaaauaucuguu

SEQ ID NO: 831013 - RNA, 22 nt, Human
ucucagagugacaaugagaauu

SEQ ID NO: 831014 - RNA, 22 nt, Human
cuggcagcaguuaugaaacaau

SEQ ID NO: 831015 - RNA, 22 nt, Human
gcucccugaaaagaacaaaguc

SEQ ID NO: 831016 - RNA, 22 nt, Human
acucugugugaguagagccugu

SEQ ID NO: 831017 - RNA, 22 nt, Human
uggaagagggagcuggguggcc

SEQ ID NO: 831018 - RNA, 22 nt, Human
caggcagccaggggaccugucc

SEQ ID NO: 831019 - RNA, 22 nt, Human
gaagagcugacagugucauccu

SEQ ID NO: 831020 - RNA, 22 nt, Human
ugugcccaucccucuggagugu

SEQ ID NO: 831021 - RNA, 22 nt, Human
uaugacauuggccaaguucugu

SEQ ID NO: 831022 - RNA, 22 nt, Human
auguaugaugcuaggcucucag

SEQ ID NO: 831023 - RNA, 22 nt, Human
ucucagggcgcagugaggcagu

SEQ ID NO: 831024 - RNA, 22 nt, Human
auuauuauauagggaaaguccc

SEQ ID NO: 831025 - RNA, 22 nt, Human
uccuucuuugacaaguggcaga

SEQ ID NO: 831026 - RNA, 22 nt, Human
agaggcugucccuugcuauucc

SEQ ID NO: 831027 - RNA, 20 nt, Human
caccagucaugagucaauac

SEQ ID NO: 831028 - RNA, 22 nt, Human
cuaaagaagcuagcaaucuaua

SEQ ID NO: 831029 - RNA, 20 nt, Human
auguagaugaaagcaaaggc

SEQ ID NO: 831030 - RNA, 22 nt, Human
gccagagcugagacacgagucc

SEQ ID NO: 831031 - RNA, 22 nt, Human
gccagcugguaggcaccuagcc

SEQ ID NO: 831032 - RNA, 22 nt, Human
aacagugagaagguggacagga

SEQ ID NO: 831033 - RNA, 22 nt, Human
ucccuggacagccuugccuggg

SEQ ID NO: 831034 - RNA, 22 nt, Human
gcacugcagguggguggagagg

SEQ ID NO: 831035 - RNA, 22 nt, Human
gagccuggauugucaccgacuu

SEQ ID NO: 831036 - RNA, 22 nt, Human
uugcugugaaaccaugggaagu

SEQ ID NO: 831037 - RNA, 22 nt, Human
aguaaaauuguauuggaaaaca

SEQ ID NO: 831038 - RNA, 22 nt, Human
aauuuuaagcauaugacugguu

SEQ ID NO: 831039 - RNA, 22 nt, Human
guggcugcucgggcuccggccc

SEQ ID NO: 831040 - RNA, 22 nt, Human
guggcccugucccaggccuccu

SEQ ID NO: 831041 - RNA, 22 nt, Human
agccccugggaguagcugcugc

SEQ ID NO: 831042 - RNA, 22 nt, Human
augcaguggcagcuccuggugu

SEQ ID NO: 831043 - RNA, 22 nt, Human
gagagcugugguuugaccaggc

SEQ ID NO: 831044 - RNA, 22 nt, Human
uuccuuaguguuagauucugug

SEQ ID NO: 831045 - RNA, 22 nt, Human
agucaguggcuccgagccuggu

SEQ ID NO: 831046 - RNA, 22 nt, Human
aguauguauuuuauacuuacag

SEQ ID NO: 831047 - RNA, 22 nt, Human
agaauaguggcaaugacugcac

SEQ ID NO: 831048 - RNA, 22 nt, Human
uuccaggaggagguacuagagg

SEQ ID NO: 831049 - RNA, 22 nt, Human
uggcagcuccggguaggggcug

SEQ ID NO: 831050 - RNA, 22 nt, Human
guucuucagaggggaaagaacc

SEQ ID NO: 831051 - RNA, 22 nt, Human
caugaaauugcuccuuuggugc

SEQ ID NO: 831052 - RNA, 22 nt, Human
uuuguuuucaaugugucauuca

SEQ ID NO: 831053 - RNA, 22 nt, Human
caagagcugaggcuggagaggu

SEQ ID NO: 831054 - RNA, 22 nt, Human
uuuucuaacaucuaguaauuug

SEQ ID NO: 831055 - RNA, 22 nt, Human
uauugaaaugaaugacagugau

SEQ ID NO: 831056 - RNA, 22 nt, Human
ucccaggaucugagggcagaga

SEQ ID NO: 831057 - RNA, 22 nt, Human
agagugaucagauaucaggugu

SEQ ID NO: 831058 - RNA, 22 nt, Human
gggguugguuuaaaugcuugag

SEQ ID NO: 831059 - RNA, 22 nt, Human
accaggcugugaagugagacua

SEQ ID NO: 831060 - RNA, 22 nt, Human
auggacagugugucuguuucca

SEQ ID NO: 831061 - RNA, 22 nt, Human
agcuugccucuuaaucaccuca

SEQ ID NO: 831062 - RNA, 22 nt, Human
aggcuagcuuuggcucaguaaa

SEQ ID NO: 831063 - RNA, 22 nt, Human
cccucccaagcacucugacaua

SEQ ID NO: 831064 - RNA, 22 nt, Human
aacauuucagcaaauaagaaca

SEQ ID NO: 831065 - RNA, 22 nt, Human
cugacucagcagcugaugaucc

SEQ ID NO: 831066 - RNA, 22 nt, Human
ugaugguugauuauaaaucagu

SEQ ID NO: 831067 - RNA, 23 nt, Human
auuugagaaaguauuuuuaagac

SEQ ID NO: 831068 - RNA, 23 nt, Human
gugcucugcggucugcuagucug

SEQ ID NO: 831069 - RNA, 22 nt, Human
cauugcuuugugcauauuuaaa

SEQ ID NO: 831070 - RNA, 19 nt, Human
ugagugggccccugcagac

SEQ ID NO: 831071 - RNA, 22 nt, Human
acccuuucuuacucacacgcuc

SEQ ID NO: 831072 - RNA, 22 nt, Human
uucagaaaaagaccauugcaau

SEQ ID NO: 831073 - RNA, 22 nt, Human
aguaaaauuaauggaucagaag

SEQ ID NO: 831074 - RNA, 22 nt, Human
cucagcuggcaauucuggcucc

SEQ ID NO: 831075 - RNA, 22 nt, Human
gagagcuguccggcugagcagc

SEQ ID NO: 831076 - RNA, 22 nt, Human
uggcauuuagaaaacaacaugu

SEQ ID NO: 831077 - RNA, 23 nt, Human
aggcgagcucuucuccagcacgu

SEQ ID NO: 831078 - RNA, 18 nt, Human
cagggcuguggggucacu

SEQ ID NO: 831079 - RNA, 22 nt, Human
gcuguccagagcaugggagcaa

SEQ ID NO: 831080 - RNA, 22 nt, Human
gcugcccuaauaucacauguua

SEQ ID NO: 831081 - RNA, 17 nt, Human
ucuguucaagugagagg

SEQ ID NO: 831082 - RNA, 22 nt, Human
uccuugaaugaagagaggugac

SEQ ID NO: 831083 - RNA, 22 nt, Human
cugcccugucuuuuucugauga

SEQ ID NO: 831084 - RNA, 20 nt, Human
acugugaaugcugaauuagc

SEQ ID NO: 831085 - RNA, 22 nt, Human
acagauauaugauuguguaaau

SEQ ID NO: 831086 - RNA, 22 nt, Human
gccccuggcuggccagcuccuc

SEQ ID NO: 831087 - RNA, 22 nt, Human
aucuaacagcaacaccagaaua

SEQ ID NO: 831088 - RNA, 22 nt, Human
cugggugaguugaugaaggaga

SEQ ID NO: 831089 - RNA, 22 nt, Human
uuacauuuuaguuaaccuguga

SEQ ID NO: 831090 - RNA, 22 nt, Human
uucuucucucauagauuaaggu

SEQ ID NO: 831091 - RNA, 22 nt, Human
uuuauccauaucauuaaaaucu

SEQ ID NO: 831092 - RNA, 22 nt, Human
uucaaguuuugccuccccaucc

SEQ ID NO: 831093 - RNA, 22 nt, Human
ugcugcacgauaaauaauuucu

SEQ ID NO: 831094 - RNA, 22 nt, Human
cugcagagaauuguggggcuuc

SEQ ID NO: 831095 - RNA, 22 nt, Human
ucccagagcagaugugcuaaag

SEQ ID NO: 831096 - RNA, 19 nt, Human
uggcuuccaucucucucau

SEQ ID NO: 831097 - RNA, 22 nt, Human
ccuggcagcuguuuggcuuggc

SEQ ID NO: 831098 - RNA, 22 nt, Human
uguacuuccccaaugacagcac

SEQ ID NO: 831099 - RNA, 19 nt, Human
gggaaauucacuugcuucc

SEQ ID NO: 831100 - RNA, 21 nt, Human
ccugcagcaccagaaggagau

SEQ ID NO: 831101 - RNA, 22 nt, Human
ggcaguggguuccccaaggcac

SEQ ID NO: 831102 - RNA, 22 nt, Human
ucugucugcgcuugcccuggug

SEQ ID NO: 831103 - RNA, 22 nt, Human
ucugccagugguuuggcccuga

SEQ ID NO: 831104 - RNA, 22 nt, Human
ggucccaggaaucuguguucua

SEQ ID NO: 831105 - RNA, 20 nt, Human
ggcaggcuuuauauggaggg

SEQ ID NO: 831106 - RNA, 22 nt, Human
acacaauacagggcucaaaaua

SEQ ID NO: 831107 - RNA, 22 nt, Human
accaggagggacccugguggcc

SEQ ID NO: 831108 - RNA, 22 nt, Human
acugcaucugaaacauggguca

SEQ ID NO: 831109 - RNA, 22 nt, Human
aaggccaggacaccaggggacu

SEQ ID NO: 831110 - RNA, 21 nt, Human
acuuuaauauacaugaggagg

SEQ ID NO: 831111 - RNA, 22 nt, Human
caggggaguuuuaugcaacaga

SEQ ID NO: 831112 - RNA, 22 nt, Human
aggcacugacaauucuggacug

SEQ ID NO: 831113 - RNA, 22 nt, Human
cuugcuuuguccagaaauucag

SEQ ID NO: 831114 - RNA, 22 nt, Human
uuacugaaaauucuucaggauu

SEQ ID NO: 831115 - RNA, 18 nt, Human
gagagggaucccucagga

SEQ ID NO: 831116 - RNA, 22 nt, Human
gaugcacaugugaguauagaag

SEQ ID NO: 831117 - RNA, 22 nt, Human
ucaggcagaccaccgugggcag

SEQ ID NO: 831118 - RNA, 22 nt, Human
aagggcugaaagaccuugggca

SEQ ID NO: 831119 - RNA, 22 nt, Human
cuggaaugccucccugucagag

SEQ ID NO: 831120 - RNA, 22 nt, Human
cggcagcucgagggccacccgu

SEQ ID NO: 831121 - RNA, 22 nt, Human
acaguaccugcucucaagcaaa

SEQ ID NO: 831122 - RNA, 22 nt, Human
gcuggagcuugagaggacaggg

SEQ ID NO: 831123 - RNA, 22 nt, Human
gcaccuggcugcccagguggag

SEQ ID NO: 831124 - RNA, 22 nt, Human
gcugucugcugggucgcucagg

SEQ ID NO: 831125 - RNA, 22 nt, Human
guaaaugugcuucuuuuaacuu

SEQ ID NO: 831126 - RNA, 22 nt, Human
agucaccaacaugguucccagg

SEQ ID NO: 831127 - RNA, 22 nt, Human
aaggccaugcacauccuaggca

SEQ ID NO: 831128 - RNA, 22 nt, Human
gaaaugugugacaaguuucaau

SEQ ID NO: 831129 - RNA, 22 nt, Human
cccugggacccgcugcagaggc

SEQ ID NO: 831130 - RNA, 22 nt, Human
aaagucaucagaaccuuccaga

SEQ ID NO: 831131 - RNA, 22 nt, Human
aaaagaggagugguuuaugaca

SEQ ID NO: 831132 - RNA, 22 nt, Human
acuacuuugggccauuuguuua

SEQ ID NO: 831133 - RNA, 22 nt, Human
gagcugccuacauugccaagag

SEQ ID NO: 831134 - RNA, 22 nt, Human
uaauaucuacuucauagaguuu

SEQ ID NO: 831135 - RNA, 22 nt, Human
ucagugcacagagauuuuuguu

SEQ ID NO: 831136 - RNA, 22 nt, Human
ccagucagccaagcugcagcgg

SEQ ID NO: 831137 - RNA, 22 nt, Human
ggcaaaaacagcaaugacuuuu

SEQ ID NO: 831138 - RNA, 22 nt, Human
gguucacacuaagcuuaagugg

SEQ ID NO: 831139 - RNA, 22 nt, Human
ugaaagcuguccacuaggcugu

SEQ ID NO: 831140 - RNA, 22 nt, Human
acauuucuuugcuagacagcag

SEQ ID NO: 831141 - RNA, 22 nt, Human
uggcccugacagguccugggca

SEQ ID NO: 831142 - RNA, 18 nt, Human
agggagagaccgcggguc

SEQ ID NO: 831143 - RNA, 22 nt, Human
cagggugcgccacucagaugua

SEQ ID NO: 831144 - RNA, 22 nt, Human
ucuucacaugaccuucaugucu

SEQ ID NO: 831145 - RNA, 22 nt, Human
uggcagcucuguucaacaugag

SEQ ID NO: 831146 - RNA, 19 nt, Human
uuuuccuucuauauguuuc

SEQ ID NO: 831147 - RNA, 22 nt, Human
uagcagaagaacaacaugaucu

SEQ ID NO: 831148 - RNA, 22 nt, Human
gccaggcucucagugacugccc

SEQ ID NO: 831149 - RNA, 22 nt, Human
uagcagggguagauagagugug

SEQ ID NO: 831150 - RNA, 22 nt, Human
uuuaggcagucauugaacaagu

SEQ ID NO: 831151 - RNA, 22 nt, Human
agccauuuuccugaaauauaac

SEQ ID NO: 831152 - RNA, 22 nt, Human
caaacauucaaguacaagucuu

SEQ ID NO: 831153 - RNA, 22 nt, Human
agagccaggacugugucucacu

SEQ ID NO: 831154 - RNA, 22 nt, Human
aguggcagagguugacugcagu

SEQ ID NO: 831155 - RNA, 23 nt, Human
cuugcaggaagcagauggcacac

SEQ ID NO: 831156 - RNA, 22 nt, Human
uccaggagggguaggcaguaug

SEQ ID NO: 831157 - RNA, 22 nt, Human
auuccaguuggguucuaauaca

SEQ ID NO: 831158 - RNA, 22 nt, Human
ugggcuggugagggaucauuua

SEQ ID NO: 831159 - RNA, 22 nt, Human
agcucccagcagagcuggccac

SEQ ID NO: 831160 - RNA, 22 nt, Human
uuucugaacaaagccauuauca

SEQ ID NO: 831161 - RNA, 22 nt, Human
uucuuuccacagaggggaugau

SEQ ID NO: 831162 - RNA, 22 nt, Human
ugcuagaauuagguuaaacaaa

SEQ ID NO: 831163 - RNA, 22 nt, Human
guccuggcccacuggcaggcug

SEQ ID NO: 831164 - RNA, 22 nt, Human
aaugcuguaaagaugcuaucug

SEQ ID NO: 831165 - RNA, 22 nt, Human
ggaggugaggccguagggugug

SEQ ID NO: 831166 - RNA, 22 nt, Human
gcaggggaguccacucuaugca

SEQ ID NO: 831167 - RNA, 21 nt, Human
cagaggcagguccugggacgg

SEQ ID NO: 831168 - RNA, 22 nt, Human
uugaaaggccuguuuauccagc

SEQ ID NO: 831169 - RNA, 22 nt, Human
caaagucccagcugcuuagaga

SEQ ID NO: 831170 - RNA, 22 nt, Human
cagggcagagccaggauuucaa

SEQ ID NO: 831171 - RNA, 21 nt, Human
uucaaaguuugccuaaagauu

SEQ ID NO: 831172 - RNA, 22 nt, Human
agcuguucccucacugcaguca

SEQ ID NO: 831173 - RNA, 19 nt, Human
gucacauuugucucccagg

SEQ ID NO: 831174 - RNA, 22 nt, Human
cucccugggcagauguggcucu

SEQ ID NO: 831175 - RNA, 22 nt, Human
ucugucaccauucagcuugaau

SEQ ID NO: 831176 - RNA, 22 nt, Human
aggaagcuccuggagagccagu

SEQ ID NO: 831177 - RNA, 21 nt, Human
ggccuuggcgggggccgaauu

SEQ ID NO: 831178 - RNA, 22 nt, Human
agcagugaugcaugacagccua

SEQ ID NO: 831179 - RNA, 22 nt, Human
uacaguauuaugagugauugaa

SEQ ID NO: 831180 - RNA, 22 nt, Human
ugccucagucuaaagucucuca

SEQ ID NO: 831181 - RNA, 22 nt, Human
ccucagcugcuucccuggagcc

SEQ ID NO: 831182 - RNA, 22 nt, Human
gguaaaaugcagauucuuagcc

SEQ ID NO: 831183 - RNA, 22 nt, Human
aauguauuccucaugcaagagu

SEQ ID NO: 831184 - RNA, 22 nt, Human
uaugaacuuuugaugugacaug

SEQ ID NO: 831185 - RNA, 22 nt, Human
caagaaauuucuuaagaacuaa

SEQ ID NO: 831186 - RNA, 22 nt, Human
cagcauggcuugaguguuuccu

SEQ ID NO: 831187 - RNA, 22 nt, Human
guaagagcacugucuccugcug

SEQ ID NO: 831188 - RNA, 22 nt, Human
uuggcuucuggcagucuggacg

SEQ ID NO: 831189 - RNA, 17 nt, Human
gucauucucagaaaaug

SEQ ID NO: 831190 - RNA, 22 nt, Human
ucaggcagaugcagggauggau

SEQ ID NO: 831191 - RNA, 22 nt, Human
ccauggcuuuugagucucaaga

SEQ ID NO: 831192 - RNA, 22 nt, Human
uggagcaagcuggagagaacau

SEQ ID NO: 831193 - RNA, 22 nt, Human
cuuuggaagugaccacaauccu

SEQ ID NO: 831194 - RNA, 22 nt, Human
cugggagguggagguugcauug

SEQ ID NO: 831195 - RNA, 21 nt, Human
ugcaggagucugugagucagg

SEQ ID NO: 831196 - RNA, 22 nt, Human
auggcauuauagcaaugguuug

SEQ ID NO: 831197 - RNA, 22 nt, Human
aggagcugacuuguaaagcauu

SEQ ID NO: 831198 - RNA, 22 nt, Human
caucugccuaaguggcccuguu

SEQ ID NO: 831199 - RNA, 22 nt, Human
cagaggaugaucuggccucucu

SEQ ID NO: 831200 - RNA, 22 nt, Human
agaauaaucacugaaguucaaa

SEQ ID NO: 831201 - RNA, 22 nt, Human
augggaugaacuugaucugcuu

SEQ ID NO: 831202 - RNA, 22 nt, Human
uauugacaauuugugaaacuau

SEQ ID NO: 831203 - RNA, 22 nt, Human
uucuucuugaaacuuuagguug

SEQ ID NO: 831204 - RNA, 23 nt, Human
uggaccugaaccagugccucugu

SEQ ID NO: 831205 - RNA, 21 nt, Human
acaguucaugauaacuccauc

SEQ ID NO: 831206 - RNA, 22 nt, Human
ugcucccaggcucuguggucug

SEQ ID NO: 831207 - RNA, 22 nt, Human
gcagagaacccagcagauuggc

SEQ ID NO: 831208 - RNA, 22 nt, Human
uucaagaugacccagucacacg

SEQ ID NO: 831209 - RNA, 22 nt, Human
augcuuaaccuugguguacaau

SEQ ID NO: 831210 - RNA, 22 nt, Human
gcacagagggcagugagccucu

SEQ ID NO: 831211 - RNA, 22 nt, Human
cccagcaucccagugggcagca

SEQ ID NO: 831212 - RNA, 18 nt, Human
acaaaugugucacaggaa

SEQ ID NO: 831213 - RNA, 22 nt, Human
gagagcuguaauagucaugucu

SEQ ID NO: 831214 - RNA, 22 nt, Human
agcucccaauugacuugaacua

SEQ ID NO: 831215 - RNA, 22 nt, Human
gcugagggcuguaacagcagag

SEQ ID NO: 831216 - RNA, 19 nt, Human
uggagaggaaaugcugcuc

SEQ ID NO: 831217 - RNA, 22 nt, Human
gaaaaaugcuccaaaucugugg

SEQ ID NO: 831218 - RNA, 21 nt, Human
aggucccagguuugggcagca

SEQ ID NO: 831219 - RNA, 22 nt, Human
gccucuggucccucaugcugug

SEQ ID NO: 831220 - RNA, 22 nt, Human
uccaaagggaagcgcuuucugu

SEQ ID NO: 831221 - RNA, 22 nt, Human
agguggguccuggcucugccau

SEQ ID NO: 831222 - RNA, 22 nt, Human
acagccuguguaccagcuggga

SEQ ID NO: 831223 - RNA, 22 nt, Human
aagcccagaugggagcauuuca

SEQ ID NO: 831224 - RNA, 22 nt, Human
gcagagugagccgaggcugcuc

SEQ ID NO: 831225 - RNA, 22 nt, Human
agacaaagacagcaucucaggu

SEQ ID NO: 831226 - RNA, 22 nt, Human
ccugggugaaaucucuccugca

SEQ ID NO: 831227 - RNA, 22 nt, Human
uucagaaugugaccuuauuugg

SEQ ID NO: 831228 - RNA, 22 nt, Human
ugucucagauacgccaucaagg

SEQ ID NO: 831229 - RNA, 22 nt, Human
cuccucugucuaccacgagggu

SEQ ID NO: 831230 - RNA, 22 nt, Human
cccuggggcugagggauggccg

SEQ ID NO: 831231 - RNA, 19 nt, Human
ucucacaucagcuccuagc

SEQ ID NO: 831232 - RNA, 22 nt, Human
gcugccugucccaggaugagga

SEQ ID NO: 831233 - RNA, 22 nt, Human
ccagcccuugcugaaggguggc

SEQ ID NO: 831234 - RNA, 22 nt, Human
ugccugcuaggcccugcugggu

SEQ ID NO: 831235 - RNA, 22 nt, Human
agcagcuuacauguggccuauc

SEQ ID NO: 831236 - RNA, 22 nt, Human
cugaggugcuagggucccugcu

SEQ ID NO: 831237 - RNA, 22 nt, Human
cugagcugggaguggauagugg

SEQ ID NO: 831238 - RNA, 22 nt, Human
ugcuguagcccugcacagugca

SEQ ID NO: 831239 - RNA, 22 nt, Human
ugcaauaaguuguguuaucacu

SEQ ID NO: 831240 - RNA, 23 nt, Human
cagggccaggcagcagcugucac

SEQ ID NO: 831241 - RNA, 22 nt, Human
caugaagcacagcucucuuuuu

SEQ ID NO: 831242 - RNA, 22 nt, Human
uguacaauguggccaguguuaa

SEQ ID NO: 831243 - RNA, 22 nt, Human
gcuggccugaccugaggcuggg

SEQ ID NO: 831244 - RNA, 22 nt, Human
uggcugaauaaaauaugguguu

SEQ ID NO: 831245 - RNA, 21 nt, Human
gcaaauguucaggaaaaaaga

SEQ ID NO: 831246 - RNA, 21 nt, Human
uccuucaguucugcacuuucu

SEQ ID NO: 831247 - RNA, 22 nt, Human
ugugaaagauacuaggcagagg

SEQ ID NO: 831248 - RNA, 22 nt, Human
agugggcagcccaggaggucuu

SEQ ID NO: 831249 - RNA, 19 nt, Human
acagaagcauagaaaagga

SEQ ID NO: 831250 - RNA, 22 nt, Human
gagcugccugaacaagcagcag

SEQ ID NO: 831251 - RNA, 22 nt, Human
agggccuggcgcguggccgccg

SEQ ID NO: 831252 - RNA, 22 nt, Human
uuccuggugguggugacagcac

SEQ ID NO: 831253 - RNA, 22 nt, Human
gggagcuguaguccagauaccg

SEQ ID NO: 831254 - RNA, 22 nt, Human
guuugcauauuugcacaggaau

SEQ ID NO: 831255 - RNA, 22 nt, Human
gcccagcugcacccuggugggu

SEQ ID NO: 831256 - RNA, 22 nt, Human
gccagggcucgcggucccucgu

SEQ ID NO: 831257 - RNA, 22 nt, Human
cuccagggaugagacagaguag

SEQ ID NO: 831258 - RNA, 22 nt, Human
agcucucaagauaagaaagaac

SEQ ID NO: 831259 - RNA, 21 nt, Human
ugcuuuaugggaaaaauguca

SEQ ID NO: 831260 - RNA, 22 nt, Human
uccucagaaaccccugugaggu

SEQ ID NO: 831261 - RNA, 22 nt, Human
ggccugcugcuaugacuuccug

SEQ ID NO: 831262 - RNA, 21 nt, Human
aucauucuggaaaauucaagc

SEQ ID NO: 831263 - RNA, 23 nt, Human
agggugagcaagcuauggagacc

SEQ ID NO: 831264 - RNA, 22 nt, Human
aaaugaccagaauacaggcuuc

SEQ ID NO: 831265 - RNA, 22 nt, Human
augcuacauuuugguuuauaaa

SEQ ID NO: 831266 - RNA, 22 nt, Human
acauuuaaauaccuauguuucu

SEQ ID NO: 831267 - RNA, 22 nt, Human
acccugagucagacagccugac

SEQ ID NO: 831268 - RNA, 19 nt, Human
acagagcucucugcuucug

SEQ ID NO: 831269 - RNA, 22 nt, Human
acauagcuuaaaugagaagaua

SEQ ID NO: 831270 - RNA, 22 nt, Human
agagaggcugggcguagggcuu

SEQ ID NO: 831271 - RNA, 22 nt, Human
cagcuggccccacaguagaggc

SEQ ID NO: 831272 - RNA, 22 nt, Human
ugugccauuucuauucugcagc

SEQ ID NO: 831273 - RNA, 22 nt, Human
cucugagagagcuggugagcac

SEQ ID NO: 831274 - RNA, 22 nt, Human
agggccagaggcaccuugcagc

SEQ ID NO: 831275 - RNA, 22 nt, Human
uggggccugagguggagcugca

SEQ ID NO: 831276 - RNA, 22 nt, Human
uugugucugggggagugacauc

SEQ ID NO: 831277 - RNA, 22 nt, Human
auaaaauuugcuacuguuaaau

SEQ ID NO: 831278 - RNA, 22 nt, Human
cugaaggauucaaaauggcagg

SEQ ID NO: 831279 - RNA, 20 nt, Human
uggcccuguuuucuccaggc

SEQ ID NO: 831280 - RNA, 22 nt, Human
agcacagguacggagaugcuac

SEQ ID NO: 831281 - RNA, 22 nt, Human
cuagaaauacaggcacgugcca

SEQ ID NO: 831282 - RNA, 22 nt, Human
accccaagacaguagaagagaa

SEQ ID NO: 831283 - RNA, 22 nt, Human
uaggauuuaggcuuuaacaucu

SEQ ID NO: 831284 - RNA, 22 nt, Human
ccugccaggacauugcuugaag

SEQ ID NO: 831285 - RNA, 22 nt, Human
aagggcugccagggggugccag

SEQ ID NO: 831286 - RNA, 22 nt, Human
uucaccgugaaccgauuccuca

SEQ ID NO: 831287 - RNA, 22 nt, Human
uggcagagcccagacuccaguc

SEQ ID NO: 831288 - RNA, 22 nt, Human
aaggcugagagucacaguccua

SEQ ID NO: 831289 - RNA, 22 nt, Human
uaaaaguauacuuucaaaggag

SEQ ID NO: 831290 - RNA, 22 nt, Human
gcugccuuuugcuccucccacc

SEQ ID NO: 831291 - RNA, 22 nt, Human
ccugcccagcuucaccucaggc

SEQ ID NO: 831292 - RNA, 22 nt, Human
ccagggugaccagcuggccuag

SEQ ID NO: 831293 - RNA, 17 nt, Human
gaggagcuccaguaggu

SEQ ID NO: 831294 - RNA, 22 nt, Human
agcuggagaucaugcugauacu

SEQ ID NO: 831295 - RNA, 22 nt, Human
cuagaaauucugauucaguagg

SEQ ID NO: 831296 - RNA, 22 nt, Human
gcagcagaggcccuacucuuug

SEQ ID NO: 831297 - RNA, 22 nt, Human
auauaguuggguuucauucuac

SEQ ID NO: 831298 - RNA, 22 nt, Human
ggcugcugguagggguaggaag

SEQ ID NO: 831299 - RNA, 22 nt, Human
gaaauaagaguccaugccaggu

SEQ ID NO: 831300 - RNA, 22 nt, Human
cuggcucauccagguguugcuc

SEQ ID NO: 831301 - RNA, 22 nt, Human
ccagguggcuucugcccgaugu

SEQ ID NO: 831302 - RNA, 22 nt, Human
cucuuaguuuaucuuugacaaa

SEQ ID NO: 831303 - RNA, 22 nt, Human
uaaggcagaaauaugagcaggg

SEQ ID NO: 831304 - RNA, 22 nt, Human
ccugccuguaagauggguacaa

SEQ ID NO: 831305 - RNA, 22 nt, Human
gagguagcgaguggacagugca

SEQ ID NO: 831306 - RNA, 22 nt, Human
uucaagaugcacaguggcauuc

SEQ ID NO: 831307 - RNA, 22 nt, Human
ggcuccugaaagacuaugggaa

SEQ ID NO: 831308 - RNA, 22 nt, Human
uccucaggagagcuccuaugcc

SEQ ID NO: 831309 - RNA, 22 nt, Human
gaguuauucuagguccuuugua

SEQ ID NO: 831310 - RNA, 22 nt, Human
gcuggccucuacaggccggcca

SEQ ID NO: 831311 - RNA, 22 nt, Human
guacuucccugggaggcaagca

SEQ ID NO: 831312 - RNA, 22 nt, Human
gaggccugguagccgagcccca

SEQ ID NO: 831313 - RNA, 22 nt, Human
acugcagccuagggaccacagu

SEQ ID NO: 831314 - RNA, 22 nt, Human
aauggacaggagagcauaguca

SEQ ID NO: 831315 - RNA, 22 nt, Human
cagaggcuguguaggcagacug

SEQ ID NO: 831316 - RNA, 20 nt, Human
ccaccuggccaaggcugugc

SEQ ID NO: 831317 - RNA, 22 nt, Human
ggcucagguugggucacaugac

SEQ ID NO: 831318 - RNA, 22 nt, Human
cagagccuuccuagcagacucu

SEQ ID NO: 831319 - RNA, 22 nt, Human
gagcugccaguguaugaauucu

SEQ ID NO: 831320 - RNA, 23 nt, Human
cauuucaacgaauuuuccuucug

SEQ ID NO: 831321 - RNA, 22 nt, Human
ucagaguguggugagaugugca

SEQ ID NO: 831322 - RNA, 22 nt, Human
cagcaucuuucucuucuggagu

SEQ ID NO: 831323 - RNA, 22 nt, Human
gcauuccugagaaugcagagug

SEQ ID NO: 831324 - RNA, 22 nt, Human
aauguuguuuuucugcaugucu

SEQ ID NO: 831325 - RNA, 22 nt, Human
gcucuguguugucagaggcacc

SEQ ID NO: 831326 - RNA, 22 nt, Human
ccuguucacccuccaugcacag

SEQ ID NO: 831327 - RNA, 22 nt, Human
cccuggagcuagucugagcaga

SEQ ID NO: 831328 - RNA, 22 nt, Human
agucaccaucuguggcagccug

SEQ ID NO: 831329 - RNA, 22 nt, Human
cugcuuuguggaaucacacugg

SEQ ID NO: 831330 - RNA, 22 nt, Human
cugccagucuaugcugcucggc

SEQ ID NO: 831331 - RNA, 22 nt, Human
gaugcacagugacccugccagu

SEQ ID NO: 831332 - RNA, 22 nt, Human
accugccucagugcagcuggau

SEQ ID NO: 831333 - RNA, 22 nt, Human
ucucaggaagauuagggcuaag

SEQ ID NO: 831334 - RNA, 22 nt, Human
cuguaaauaugaagaauauaug

SEQ ID NO: 831335 - RNA, 22 nt, Human
gcccaggaguuggaggcugcag

SEQ ID NO: 831336 - RNA, 22 nt, Human
ucucuuccaguaagagucuuua

SEQ ID NO: 831337 - RNA, 22 nt, Human
guguauaacuaucuaucuagua

SEQ ID NO: 831338 - RNA, 22 nt, Human
uggagccagcccaggccccucu

SEQ ID NO: 831339 - RNA, 22 nt, Human
aggcagcugcccucuccuuccu

SEQ ID NO: 831340 - RNA, 22 nt, Human
uuuuacuuaauucuuggucaug

SEQ ID NO: 831341 - RNA, 22 nt, Human
uaugagaaucugcaguaugcuu

SEQ ID NO: 831342 - RNA, 19 nt, Human
gcauuucucuuuacagcca

SEQ ID NO: 831343 - RNA, 22 nt, Human
ggcuggcacucuguccaguguc

SEQ ID NO: 831344 - RNA, 22 nt, Human
uugaagcagcucaggaggcuua

SEQ ID NO: 831345 - RNA, 22 nt, Human
cuucccuuggugaacagagcau

SEQ ID NO: 831346 - RNA, 22 nt, Human
uuuuuugucuugaagaaauggu

SEQ ID NO: 831347 - RNA, 22 nt, Human
uuuuuccuagugcuuucuggua

SEQ ID NO: 831348 - RNA, 22 nt, Human
aggucauuccuugucuucuugc

SEQ ID NO: 831349 - RNA, 20 nt, Human
agaggaggauuauuuuauuc

SEQ ID NO: 831350 - RNA, 22 nt, Human
uuuuggucagguuggucucgaa

SEQ ID NO: 831351 - RNA, 22 nt, Human
ucucagagccuaacuaaccuaa

SEQ ID NO: 831352 - RNA, 22 nt, Human
uccccagccgugaaggagagga

SEQ ID NO: 831353 - RNA, 22 nt, Human
uucagcagucguccaggaaaag

SEQ ID NO: 831354 - RNA, 22 nt, Human
gcugucacacaugggaucucag

SEQ ID NO: 831355 - RNA, 22 nt, Human
uguaugaagccagaaucuguuu

SEQ ID NO: 831356 - RNA, 22 nt, Human
gaggcaguuccugagugacaag

SEQ ID NO: 831357 - RNA, 22 nt, Human
cagcuggccugaucccuguggc

SEQ ID NO: 831358 - RNA, 17 nt, Human
uccuucagggccucaca

SEQ ID NO: 831359 - RNA, 22 nt, Human
cugagcuuccaguuccuccagg

SEQ ID NO: 831360 - RNA, 21 nt, Human
gccugccugcgugacccucuu

SEQ ID NO: 831361 - RNA, 22 nt, Human
ggcaccugcucaucuggacuca

SEQ ID NO: 831362 - RNA, 22 nt, Human
gcagcuguggguuccaagucua

SEQ ID NO: 831363 - RNA, 22 nt, Human
cauuguuaccaucuuuuaccua

SEQ ID NO: 831364 - RNA, 22 nt, Human
ugaugcugagccugggacugac

SEQ ID NO: 831365 - RNA, 20 nt, Human
ccugucugcaauggagguca

SEQ ID NO: 831366 - RNA, 22 nt, Human
uguaugcaccauuguauuaccu

SEQ ID NO: 831367 - RNA, 22 nt, Human
guaaacauuacugugcuguaua

SEQ ID NO: 831368 - RNA, 22 nt, Human
gcauguguuauuuuauguauga

SEQ ID NO: 831369 - RNA, 23 nt, Human
ggagugcaauggcgccaucucgg

SEQ ID NO: 831370 - RNA, 22 nt, Human
ugagaacugaggauuugaauuc

SEQ ID NO: 831371 - RNA, 22 nt, Human
uaaaauugcggugaauauuucc

SEQ ID NO: 831372 - RNA, 22 nt, Human
uauguguaggaggaggacaggg

SEQ ID NO: 831373 - RNA, 23 nt, Human
ucuggcucuaugugacagcucuc

SEQ ID NO: 831374 - RNA, 22 nt, Human
gaauauuuucaguacagauggu

SEQ ID NO: 831375 - RNA, 22 nt, Human
aaaucaguucacguucugaggu

SEQ ID NO: 831376 - RNA, 22 nt, Human
cauggcccucuucuggagcaau

SEQ ID NO: 831377 - RNA, 22 nt, Human
uucauauauaugcacuacguac

SEQ ID NO: 831378 - RNA, 22 nt, Human
ggaugcugggagacagcaggca

SEQ ID NO: 831379 - RNA, 22 nt, Human
ucagacaguuugcagugugccu

SEQ ID NO: 831380 - RNA, 22 nt, Human
ucaaacuagccugacugguauu

SEQ ID NO: 831381 - RNA, 22 nt, Human
auguuuauguugggcuauauuu

SEQ ID NO: 831382 - RNA, 22 nt, Human
cacaauuuggugcuaaagaaag

SEQ ID NO: 831383 - RNA, 22 nt, Human
ugccagcuccgaggagcugcag

SEQ ID NO: 831384 - RNA, 19 nt, Human
ccaguagagacagcugcag

SEQ ID NO: 831385 - RNA, 22 nt, Human
uggguggcacuucuggggucca

SEQ ID NO: 831386 - RNA, 22 nt, Human
gugccugggguugagcuaugaa

SEQ ID NO: 831387 - RNA, 22 nt, Human
aucagaaaauacccaguguuua

SEQ ID NO: 831388 - RNA, 22 nt, Human
aggcacugaccugcuuccuuga

SEQ ID NO: 831389 - RNA, 22 nt, Human
caggccacaaguuggguucaag

SEQ ID NO: 831390 - RNA, 22 nt, Human
uggcccugucccuggagccugg

SEQ ID NO: 831391 - RNA, 22 nt, Human
uaggccagaggagcagcuuugg

SEQ ID NO: 831392 - RNA, 22 nt, Human
ucuggaucucccucauccuggg

SEQ ID NO: 831393 - RNA, 22 nt, Human
ucugggaacagccuggcugugu

SEQ ID NO: 831394 - RNA, 22 nt, Human
gcuuccugagaaacaaucugau

SEQ ID NO: 831395 - RNA, 22 nt, Human
aguaaaaucuuaagcacagugg

SEQ ID NO: 831396 - RNA, 22 nt, Human
cuccucugucuggcccugagcc

SEQ ID NO: 831397 - RNA, 20 nt, Human
gcacugaagguuccagggga

SEQ ID NO: 831398 - RNA, 22 nt, Human
ggucagggcucuuccaguggcu

SEQ ID NO: 831399 - RNA, 22 nt, Human
aggcacugugcagucccaagca

SEQ ID NO: 831400 - RNA, 22 nt, Human
uccagccaugacucggacagug

SEQ ID NO: 831401 - RNA, 22 nt, Human
cccagcucaagcagagagcuaa

SEQ ID NO: 831402 - RNA, 22 nt, Human
ccagggcaacgcugucucagag

SEQ ID NO: 831403 - RNA, 22 nt, Human
uuacagaaucuacucgugguga

SEQ ID NO: 831404 - RNA, 22 nt, Human
uuagauaaauuaagacuuuaca

SEQ ID NO: 831405 - RNA, 23 nt, Human
accaggagaaaagcuuugcggga

SEQ ID NO: 831406 - RNA, 22 nt, Human
uucuggaguauuccuggcaccu

SEQ ID NO: 831407 - RNA, 22 nt, Human
gaaggaagucauuagugcagac

SEQ ID NO: 831408 - RNA, 22 nt, Human
aaagaggaaccaagagcacgug

SEQ ID NO: 831409 - RNA, 22 nt, Human
gcaggagagccagcaggcuucc

SEQ ID NO: 831410 - RNA, 22 nt, Human
uagggcagccacccaggcugcu

SEQ ID NO: 831411 - RNA, 22 nt, Human
gauggcagucaaccaggugagg

SEQ ID NO: 831412 - RNA, 22 nt, Human
agcuggccuguuagagcugagu

SEQ ID NO: 831413 - RNA, 22 nt, Human
ggagggcaucaaucaggccugg

SEQ ID NO: 831414 - RNA, 22 nt, Human
gcagaauuggauaguugugaua

SEQ ID NO: 831415 - RNA, 22 nt, Human
aauucuaaauguaauuuagaau

SEQ ID NO: 831416 - RNA, 22 nt, Human
auaaaaguaggaccaacuuaca

SEQ ID NO: 831417 - RNA, 22 nt, Human
augcaguaaaauaggagguaau

SEQ ID NO: 831418 - RNA, 22 nt, Human
agagccaggcggcugggcaccu

SEQ ID NO: 831419 - RNA, 22 nt, Human
gucccugcaucaccacgggacu

SEQ ID NO: 831420 - RNA, 22 nt, Human
auaaucuuucuuuuccagauag

SEQ ID NO: 831421 - RNA, 22 nt, Human
cugcucuagagagcauuaguca

SEQ ID NO: 831422 - RNA, 22 nt, Human
aggcaguggagcuggaauaggc

SEQ ID NO: 831423 - RNA, 22 nt, Human
ccagcagcccucuuccaagacu

SEQ ID NO: 831424 - RNA, 22 nt, Human
agcugcccugguaagauugaug

SEQ ID NO: 831425 - RNA, 22 nt, Human
aauguguagauguugcauuccu

SEQ ID NO: 831426 - RNA, 22 nt, Human
aggcagcaugcucugcuucuac

SEQ ID NO: 831427 - RNA, 21 nt, Human
ugagccaggcugacggcugug

SEQ ID NO: 831428 - RNA, 22 nt, Human
gcaaagcugggugugaaugcac

SEQ ID NO: 831429 - RNA, 22 nt, Human
caggcugcagcagcaguggccc

SEQ ID NO: 831430 - RNA, 21 nt, Human
uggaaagauucaaagaccagg

SEQ ID NO: 831431 - RNA, 22 nt, Human
aaggagugcaugacucagagua

SEQ ID NO: 831432 - RNA, 22 nt, Human
agcugcccuggcggagcugcuc

SEQ ID NO: 831433 - RNA, 22 nt, Human
ccaggagcauuaagagaacaua

SEQ ID NO: 831434 - RNA, 22 nt, Human
gggcagcucggaagugggaaag

SEQ ID NO: 831435 - RNA, 22 nt, Human
aaugccaacuuggauauacauu

SEQ ID NO: 831436 - RNA, 22 nt, Human
agugacagcugggaaggugaaa

SEQ ID NO: 831437 - RNA, 22 nt, Human
uaugucaaaguuaagaaauagg

SEQ ID NO: 831438 - RNA, 17 nt, Human
gcgcagcuccuggcgcg

SEQ ID NO: 831439 - RNA, 22 nt, Human
aagcccagaugugagaacugag

SEQ ID NO: 831440 - RNA, 21 nt, Human
aagcuucccugcucuccaggg

SEQ ID NO: 831441 - RNA, 20 nt, Human
ugcagggcucugcuucucuc

SEQ ID NO: 831442 - RNA, 22 nt, Human
cccuguccuuggcugugaggcu

SEQ ID NO: 831443 - RNA, 22 nt, Human
aguuauccgaaggcacugagau

SEQ ID NO: 831444 - RNA, 22 nt, Human
ucucacucauuuccuaggucuu

SEQ ID NO: 831445 - RNA, 22 nt, Human
ggcaggagauaaaauauuaguu

SEQ ID NO: 831446 - RNA, 20 nt, Human
ucuguacacucaucuucugc

SEQ ID NO: 831447 - RNA, 22 nt, Human
cugugcauugucuugucuguag

SEQ ID NO: 831448 - RNA, 22 nt, Human
ucugaggccccugggcaggaug

SEQ ID NO: 831449 - RNA, 22 nt, Human
ugcaugcauaaauguacacaca

SEQ ID NO: 831450 - RNA, 22 nt, Human
aguuaaagucugaaauagagaa

SEQ ID NO: 831451 - RNA, 22 nt, Human
uuauuauugugaccugagaaug

SEQ ID NO: 831452 - RNA, 22 nt, Human
uggcucugcugaaccuagugca

SEQ ID NO: 831453 - RNA, 22 nt, Human
gaggcagcauucgcauagacag

SEQ ID NO: 831454 - RNA, 22 nt, Human
aagugguagacaaagauaauug

SEQ ID NO: 831455 - RNA, 22 nt, Human
uugcucugacuggagugcagug

SEQ ID NO: 831456 - RNA, 22 nt, Human
guggcugcuaagucuccuuccu

SEQ ID NO: 831457 - RNA, 22 nt, Human
augacacaauuuuagagcugaa

SEQ ID NO: 831458 - RNA, 22 nt, Human
gcguaaggccucuggucucgga

SEQ ID NO: 831459 - RNA, 22 nt, Human
ggcagugguuagaaacaugagc

SEQ ID NO: 831460 - RNA, 22 nt, Human
ugcaguggaggccgugagacag

SEQ ID NO: 831461 - RNA, 22 nt, Human
ugagcuuccucccugcauccau

SEQ ID NO: 831462 - RNA, 22 nt, Human
ucaggagauguaaccuuagcug

SEQ ID NO: 831463 - RNA, 22 nt, Human
ggcuuucuagaucuagcucugu

SEQ ID NO: 831464 - RNA, 22 nt, Human
augcacccagugucuggacuau

SEQ ID NO: 831465 - RNA, 22 nt, Human
uuaacacuugaacucuacaugu

SEQ ID NO: 831466 - RNA, 22 nt, Human
ccagggcauccucacaucgcag

SEQ ID NO: 831467 - RNA, 22 nt, Human
gugcuucucuucacacccaacu

SEQ ID NO: 831468 - RNA, 22 nt, Human
aaaguucuuucucuuauuuggu

SEQ ID NO: 831469 - RNA, 22 nt, Human
gcccucagaugggaaaggaggg

SEQ ID NO: 831470 - RNA, 22 nt, Human
uggaggcauuuuagguugucac

SEQ ID NO: 831471 - RNA, 22 nt, Human
ucugcucuaguugcuuccugcc

SEQ ID NO: 831472 - RNA, 19 nt, Human
gugcuuuuuaagagcucag

SEQ ID NO: 831473 - RNA, 22 nt, Human
ccaaagagcuagaauuauaggc

SEQ ID NO: 831474 - RNA, 22 nt, Human
uagugcuuuaggccugaguguc

SEQ ID NO: 831475 - RNA, 22 nt, Human
auucaaauuaaguuaauucagc

SEQ ID NO: 831476 - RNA, 22 nt, Human
uguacaguaggaacuuguuauu

SEQ ID NO: 831477 - RNA, 22 nt, Human
gcugcucuacccaugcaucugu

SEQ ID NO: 831478 - RNA, 22 nt, Human
aaugagcugcugcuguuccacc

SEQ ID NO: 831479 - RNA, 22 nt, Human
aggcaaaauuacaaaguuauua

SEQ ID NO: 831480 - RNA, 23 nt, Human
cagaaauaaacugguuuguagau

SEQ ID NO: 831481 - RNA, 23 nt, Human
uggcagagacccagaaucuacau

SEQ ID NO: 831482 - RNA, 22 nt, Human
ucaagcaucuuggucuacgauc

SEQ ID NO: 831483 - RNA, 22 nt, Human
uugcauugaaaauauauuuuaa

SEQ ID NO: 831484 - RNA, 22 nt, Human
acauuugucuucuuucagauua

SEQ ID NO: 831485 - RNA, 22 nt, Human
gggagagagagcucauguugaa

SEQ ID NO: 831486 - RNA, 22 nt, Human
ucugccuguucaagucuucuag

SEQ ID NO: 831487 - RNA, 22 nt, Human
aaguuugcauagauuaagcauu

SEQ ID NO: 831488 - RNA, 22 nt, Human
aagccagauuucacucuuaauu

SEQ ID NO: 831489 - RNA, 22 nt, Human
uuuggaauuggaaagugcugug

SEQ ID NO: 831490 - RNA, 22 nt, Human
uaguccaguaaaacagcuaacg

SEQ ID NO: 831491 - RNA, 22 nt, Human
uaaugcuuaacagcuggcuuuu

SEQ ID NO: 831492 - RNA, 22 nt, Human
uuuuauguuccucuuuaugcga

SEQ ID NO: 831493 - RNA, 22 nt, Human
ucuuuccuacuuuauugugaac

SEQ ID NO: 831494 - RNA, 22 nt, Human
ucauugcaguugaguuguguua

SEQ ID NO: 831495 - RNA, 21 nt, Human
gcaggcuggucaaaccucagu

SEQ ID NO: 831496 - RNA, 22 nt, Human
gucucagaguccuacuuauucc

SEQ ID NO: 831497 - RNA, 21 nt, Human
uagagaaaagaagcuguuccu

SEQ ID NO: 831498 - RNA, 22 nt, Human
cuggggcugcagcgaucuucau

SEQ ID NO: 831499 - RNA, 22 nt, Human
ucucagggagggcgagucagcg

SEQ ID NO: 831500 - RNA, 21 nt, Human
auagaacaccaggcauauaua

SEQ ID NO: 831501 - RNA, 22 nt, Human
ggauucuaacugaacagaauau

SEQ ID NO: 831502 - RNA, 22 nt, Human
uaagaaacccaggaauuucuua

SEQ ID NO: 831503 - RNA, 22 nt, Human
gaggccacagcuaucagggaca

SEQ ID NO: 831504 - RNA, 22 nt, Human
uuuaauauucugcauucuccuu

SEQ ID NO: 831505 - RNA, 22 nt, Human
ggguccagacacuccagaggaa

SEQ ID NO: 831506 - RNA, 22 nt, Human
acccaggacaugggcacccgug

SEQ ID NO: 831507 - RNA, 22 nt, Human
uuccaagagcuuuaauuguuga

SEQ ID NO: 831508 - RNA, 22 nt, Human
gcagggcaugggcccugucugc

SEQ ID NO: 831509 - RNA, 22 nt, Human
guguaugagccuccagcugggc

SEQ ID NO: 831510 - RNA, 22 nt, Human
cacugagcugauagaauuccag

SEQ ID NO: 831511 - RNA, 22 nt, Human
gccaggcagccacccucugcga

SEQ ID NO: 831512 - RNA, 22 nt, Human
gggauuuaguaggauaguauac

SEQ ID NO: 831513 - RNA, 22 nt, Human
ucaugcacaugugucaccauca

SEQ ID NO: 831514 - RNA, 20 nt, Human
uccugggguaagccaugguc

SEQ ID NO: 831515 - RNA, 22 nt, Human
ucaggagagaaagaauacaauu

SEQ ID NO: 831516 - RNA, 22 nt, Human
gggccaggucggugaaugguca

SEQ ID NO: 831517 - RNA, 22 nt, Human
gcuggugcauuagcugcaguuc

SEQ ID NO: 831518 - RNA, 22 nt, Human
ccagugcuaagguagccucugc

SEQ ID NO: 831519 - RNA, 22 nt, Human
uagaaacaaugacaugcuugua

SEQ ID NO: 831520 - RNA, 21 nt, Human
augucaaaugcuuuauuuuau

SEQ ID NO: 831521 - RNA, 22 nt, Human
cagacacagauaugcauauggc

SEQ ID NO: 831522 - RNA, 22 nt, Human
aauguugagcuugaaaguaggu

SEQ ID NO: 831523 - RNA, 22 nt, Human
auggaaagccaguguuccauca

SEQ ID NO: 831524 - RNA, 22 nt, Human
uagggaggcuacuucuuguagg

SEQ ID NO: 831525 - RNA, 22 nt, Human
auuaaacugagcaaauuaacau

SEQ ID NO: 831526 - RNA, 22 nt, Human
augucuuucucacagccaguuc

SEQ ID NO: 831527 - RNA, 22 nt, Human
auaagguaugaaaaguaaaugg

SEQ ID NO: 831528 - RNA, 22 nt, Human
aagcaauauacugauaugauua

SEQ ID NO: 831529 - RNA, 20 nt, Human
gugugaagcccucaggagga

SEQ ID NO: 831530 - RNA, 22 nt, Human
cuauuucaaggcccagauauga

SEQ ID NO: 831531 - RNA, 22 nt, Human
uccuccagugucuggggccuug

SEQ ID NO: 831532 - RNA, 22 nt, Human
cucugagcagaggccguggcua

SEQ ID NO: 831533 - RNA, 22 nt, Human
gcugcccacaaugauuacaugg

SEQ ID NO: 831534 - RNA, 22 nt, Human
uggaggggcaauggagcgcgga

SEQ ID NO: 831535 - RNA, 23 nt, Human
aggcagcuggguagcaucuuucu

SEQ ID NO: 831536 - RNA, 22 nt, Human
augggaguuuucucugaugcuc

SEQ ID NO: 831537 - RNA, 22 nt, Human
cugcugcucagugucaucaugu

SEQ ID NO: 831538 - RNA, 22 nt, Human
ucaggagagaguuggguaggcu

SEQ ID NO: 831539 - RNA, 22 nt, Human
uaagauaaguggguugagaugg

SEQ ID NO: 831540 - RNA, 22 nt, Human
uuucagaaagcugaacauauga

SEQ ID NO: 831541 - RNA, 22 nt, Human
uggaaggagcuaaggaccuggg

SEQ ID NO: 831542 - RNA, 22 nt, Human
ggcagccagagggcagcuggau

SEQ ID NO: 831543 - RNA, 22 nt, Human
uucugucagaagcuagcuccug

SEQ ID NO: 831544 - RNA, 22 nt, Human
uuuuugcugauaagcagaauuc

SEQ ID NO: 831545 - RNA, 22 nt, Human
auccuuagaagggagugaggac

SEQ ID NO: 831546 - RNA, 22 nt, Human
uuccuguaugucagugaagagc

SEQ ID NO: 831547 - RNA, 22 nt, Human
aucuggcucccuuggaauccgu

SEQ ID NO: 831548 - RNA, 21 nt, Human
uccaggagcacgggacuagga

SEQ ID NO: 831549 - RNA, 22 nt, Human
aucuugcauuugcuaaaaugca

SEQ ID NO: 831550 - RNA, 22 nt, Human
gaaugaauucagcacauggaau

SEQ ID NO: 831551 - RNA, 22 nt, Human
cuggcuggccggagcgaggcgg

SEQ ID NO: 831552 - RNA, 22 nt, Human
ccucagggucugaggagaccgu

SEQ ID NO: 831553 - RNA, 22 nt, Human
acauuucucagguaagucauuu

SEQ ID NO: 831554 - RNA, 22 nt, Human
aacauucuauuuugcuaaaaca

SEQ ID NO: 831555 - RNA, 22 nt, Human
auugucuguacuuuaaaaaugu

SEQ ID NO: 831556 - RNA, 22 nt, Human
gcaucuaaauaaacgugggagu

SEQ ID NO: 831557 - RNA, 22 nt, Human
aggcugcugccuuggagagugu

SEQ ID NO: 831558 - RNA, 22 nt, Human
uauuucagacacugaucuugca

SEQ ID NO: 831559 - RNA, 22 nt, Human
gguagcacauugcauuaggaga

SEQ ID NO: 831560 - RNA, 22 nt, Human
gugagcaggauuucauggugua

SEQ ID NO: 831561 - RNA, 22 nt, Human
cuaaaauuaucaagauaauucc

SEQ ID NO: 831562 - RNA, 22 nt, Human
ugucucugaacagcuuacuaaa

SEQ ID NO: 831563 - RNA, 22 nt, Human
gccuccugguugcuucuccaac

SEQ ID NO: 831564 - RNA, 22 nt, Human
uggcagaguucgcuccuauuca

SEQ ID NO: 831565 - RNA, 22 nt, Human
cagagcugcagauugaaggcau

SEQ ID NO: 831566 - RNA, 22 nt, Human
uuacagaaguauugagagaucc

SEQ ID NO: 831567 - RNA, 22 nt, Human
cacugaguucccugacauuuca

SEQ ID NO: 831568 - RNA, 22 nt, Human
agcugccacagagccuggccag

SEQ ID NO: 831569 - RNA, 22 nt, Human
cugauacauaguagcaugucau

SEQ ID NO: 831570 - RNA, 22 nt, Human
cgugucaucugagccuugggcg

SEQ ID NO: 831571 - RNA, 22 nt, Human
ggcagggguccugguguugacu

SEQ ID NO: 831572 - RNA, 22 nt, Human
gcuggagccaagcugcucuugg

SEQ ID NO: 831573 - RNA, 22 nt, Human
cauuuguaucugggcugcugug

SEQ ID NO: 831574 - RNA, 22 nt, Human
guguguccaggcgggagucaag

SEQ ID NO: 831575 - RNA, 22 nt, Human
cagagccccucagcucucuccc

SEQ ID NO: 831576 - RNA, 22 nt, Human
cacagcuggugcacuagcucug

SEQ ID NO: 831577 - RNA, 22 nt, Human
augggggccugaacaggcaaaa

SEQ ID NO: 831578 - RNA, 18 nt, Human
ccuggcuuccaucuuggu

SEQ ID NO: 831579 - RNA, 22 nt, Human
ccagcugggauuaagggaaaau

SEQ ID NO: 831580 - RNA, 22 nt, Human
ggagaccagaaggaagcuucga

SEQ ID NO: 831581 - RNA, 22 nt, Human
acaaaugcuuaguucaccaaaa

SEQ ID NO: 831582 - RNA, 22 nt, Human
cuucucagaucucagcuuugag

SEQ ID NO: 831583 - RNA, 22 nt, Human
ucuucauuuuacaggcagaccu

SEQ ID NO: 831584 - RNA, 17 nt, Human
cauguguaugugggagu

SEQ ID NO: 831585 - RNA, 23 nt, Human
ggcagagagcauggcuggggccc

SEQ ID NO: 831586 - RNA, 22 nt, Human
aggagaggaaucauuauuacaa

SEQ ID NO: 831587 - RNA, 22 nt, Human
auagaaaacagauguccuuaaa

SEQ ID NO: 831588 - RNA, 22 nt, Human
ggcugcagaaguacuuccggau

SEQ ID NO: 831589 - RNA, 18 nt, Human
ucuuggaguaaugaucaa

SEQ ID NO: 831590 - RNA, 22 nt, Human
aagcagaaaaacugagcuccaa

SEQ ID NO: 831591 - RNA, 22 nt, Human
guuaggcaguuuucuucauucu

SEQ ID NO: 831592 - RNA, 22 nt, Human
aauuuccagaucagaugacuca

SEQ ID NO: 831593 - RNA, 22 nt, Human
gugcagugagcagugcagcacc

SEQ ID NO: 831594 - RNA, 22 nt, Human
uguaugcuuguguauaauauaa

SEQ ID NO: 831595 - RNA, 22 nt, Human
aacauuuaugguagucauugca

SEQ ID NO: 831596 - RNA, 22 nt, Human
gggaaggagguggcuugaagug

SEQ ID NO: 831597 - RNA, 22 nt, Human
ucuacuauguuucuuaaauaga

SEQ ID NO: 831598 - RNA, 22 nt, Human
gaggcugcuuugaugacaggag

SEQ ID NO: 831599 - RNA, 22 nt, Human
acaaaugcagcauaaagugaac

SEQ ID NO: 831600 - RNA, 22 nt, Human
ccagccaggcauugcaaacuga

SEQ ID NO: 831601 - RNA, 22 nt, Human
cagcuccugccugggcagcugu

SEQ ID NO: 831602 - RNA, 22 nt, Human
cagggcucaucugugugaccag

SEQ ID NO: 831603 - RNA, 19 nt, Human
acaaagcugugagcagcuu

SEQ ID NO: 831604 - RNA, 22 nt, Human
cagcccaaagccccaggcuaga

SEQ ID NO: 831605 - RNA, 22 nt, Human
caggagcaaggagcagugggau

SEQ ID NO: 831606 - RNA, 22 nt, Human
cugagcugaaacuugagaggcu

SEQ ID NO: 831607 - RNA, 20 nt, Human
gccugcagagaaggucagag

SEQ ID NO: 831608 - RNA, 22 nt, Human
gggcccuggggccugauuugca

SEQ ID NO: 831609 - RNA, 22 nt, Human
uccuugaauugugccacuuacc

SEQ ID NO: 831610 - RNA, 22 nt, Human
agaagccaacagggcaggagag

SEQ ID NO: 831611 - RNA, 22 nt, Human
cagguggggcgcccucaggcag

SEQ ID NO: 831612 - RNA, 22 nt, Human
ucacaucuuauuagaguaucuc

SEQ ID NO: 831613 - RNA, 22 nt, Human
auccuugaaugacucugcccuc

SEQ ID NO: 831614 - RNA, 22 nt, Human
ugccuguguugauuacuuuguc

SEQ ID NO: 831615 - RNA, 22 nt, Human
ucagaaaagguagcugugacaa

SEQ ID NO: 831616 - RNA, 22 nt, Human
cagcugccacaggacuuucuga

SEQ ID NO: 831617 - RNA, 22 nt, Human
uaugcacacauuagcacagggu

SEQ ID NO: 831618 - RNA, 22 nt, Human
gcaaagguagccaaggagcuca

SEQ ID NO: 831619 - RNA, 23 nt, Human
acagcaagaggaccagaugugag

SEQ ID NO: 831620 - RNA, 22 nt, Human
ugucuguaagguguuuauguua

SEQ ID NO: 831621 - RNA, 22 nt, Human
auuugucucugcacuuuacuca

SEQ ID NO: 831622 - RNA, 22 nt, Human
aggccagcccugggcugagaga

SEQ ID NO: 831623 - RNA, 22 nt, Human
ggaucugagagcaagcaggacc

SEQ ID NO: 831624 - RNA, 22 nt, Human
aaguuuuaacaaguacuuacua

SEQ ID NO: 831625 - RNA, 22 nt, Human
ugccagcacuucuggcugucug

SEQ ID NO: 831626 - RNA, 22 nt, Human
acucccacuccagaguagaagc

SEQ ID NO: 831627 - RNA, 22 nt, Human
uuccugagggacuuuugagauu

SEQ ID NO: 831628 - RNA, 22 nt, Human
agggacacaugugauuauuuau

SEQ ID NO: 831629 - RNA, 22 nt, Human
gucaacuugcaagaugcugggc

SEQ ID NO: 831630 - RNA, 22 nt, Human
gcagguggauuaucagaagugc

SEQ ID NO: 831631 - RNA, 22 nt, Human
ugagguguguccccagggaggu

SEQ ID NO: 831632 - RNA, 22 nt, Human
agcugcugugugcucaggcagg

SEQ ID NO: 831633 - RNA, 22 nt, Human
agucaccauuuucaccugccuc

SEQ ID NO: 831634 - RNA, 22 nt, Human
caagaacaguuugccaaauugg

SEQ ID NO: 831635 - RNA, 22 nt, Human
aguguacauguuuacagcaucu

SEQ ID NO: 831636 - RNA, 22 nt, Human
auucuucaccauggauaauuug

SEQ ID NO: 831637 - RNA, 22 nt, Human
gaggcuggcagaaaagcacagg

SEQ ID NO: 831638 - RNA, 22 nt, Human
cuggagggugagccucaucucu

SEQ ID NO: 831639 - RNA, 22 nt, Human
uggcucagugcauucacaguaa

SEQ ID NO: 831640 - RNA, 22 nt, Human
aaacaaguguaaacuagucugu

SEQ ID NO: 831641 - RNA, 22 nt, Human
ugggcagaguagcucagaagaa

SEQ ID NO: 831642 - RNA, 22 nt, Human
cauguacauucuguagauggag

SEQ ID NO: 831643 - RNA, 22 nt, Human
ucuacuuuucccuauacaguuu

SEQ ID NO: 831644 - RNA, 22 nt, Human
gggagagaugcugauugccaau

SEQ ID NO: 831645 - RNA, 22 nt, Human
gcuggagcugcagccugggccu

SEQ ID NO: 831646 - RNA, 22 nt, Human
agauucuacucuagauccaugg

SEQ ID NO: 831647 - RNA, 22 nt, Human
cucuuuccucagccacagucua

SEQ ID NO: 831648 - RNA, 22 nt, Human
aauacauguuuucuacuauucu

SEQ ID NO: 831649 - RNA, 20 nt, Human
cccagggaccugagcuccau

SEQ ID NO: 831650 - RNA, 22 nt, Human
ugcucuguaaggucagaaaagg

SEQ ID NO: 831651 - RNA, 22 nt, Human
aggguauaaagagcaagcagaa

SEQ ID NO: 831652 - RNA, 22 nt, Human
agagccugugggagaugcagcu

SEQ ID NO: 831653 - RNA, 22 nt, Human
aaucaguucuacaucuuaucca

SEQ ID NO: 831654 - RNA, 22 nt, Human
gagagcugggaaagccguggag

SEQ ID NO: 831655 - RNA, 22 nt, Human
gauuuccuaauguggaucucug

SEQ ID NO: 831656 - RNA, 22 nt, Human
aagccagccagugccagucuua

SEQ ID NO: 831657 - RNA, 22 nt, Human
aacagaaaucauuuagggcucu

SEQ ID NO: 831658 - RNA, 22 nt, Human
gccuggagcucaugugggcauu

SEQ ID NO: 831659 - RNA, 22 nt, Human
ugagccugguugcagugucugg

SEQ ID NO: 831660 - RNA, 18 nt, Human
aaugcacacauuuacucc

SEQ ID NO: 831661 - RNA, 22 nt, Human
ugcuuaauauugugauguaaua

SEQ ID NO: 831662 - RNA, 22 nt, Human
caguacuucuuggaaacuggau

SEQ ID NO: 831663 - RNA, 20 nt, Human
ugugcccaauguccagguuc

SEQ ID NO: 831664 - RNA, 22 nt, Human
gggagggaagguaccuguguga

SEQ ID NO: 831665 - RNA, 22 nt, Human
gcagcuggucuggccuagagua

SEQ ID NO: 831666 - RNA, 22 nt, Human
auagacuugguuaguaaauuug

SEQ ID NO: 831667 - RNA, 22 nt, Human
gccuggcccagggcuccgcagg

SEQ ID NO: 831668 - RNA, 22 nt, Human
cugcagagcauaaaucugaaua

SEQ ID NO: 831669 - RNA, 22 nt, Human
auggggagagaagggcugagcu

SEQ ID NO: 831670 - RNA, 22 nt, Human
auguauccuuauacacauuuau

SEQ ID NO: 831671 - RNA, 22 nt, Human
cacaaaugguuguagacauuaa

SEQ ID NO: 831672 - RNA, 22 nt, Human
ucuccucaccaccagcagcaga

SEQ ID NO: 831673 - RNA, 19 nt, Human
augucuguugaauuucaua

SEQ ID NO: 831674 - RNA, 22 nt, Human
guccucuggugaaagcauuccc

SEQ ID NO: 831675 - RNA, 22 nt, Human
uggaaagagguagaggaucugg

SEQ ID NO: 831676 - RNA, 20 nt, Human
cagagaccugucuucacaga

SEQ ID NO: 831677 - RNA, 22 nt, Human
uauuuccaagcugaauccaaug

SEQ ID NO: 831678 - RNA, 22 nt, Human
ugaucagucccaugaucuucca

SEQ ID NO: 831679 - RNA, 23 nt, Human
agggcugaugccauugcagcucu

SEQ ID NO: 831680 - RNA, 22 nt, Human
aggcaucugaguuugcaagcuu

SEQ ID NO: 831681 - RNA, 22 nt, Human
cagggccaccguguuugcugcu

SEQ ID NO: 831682 - RNA, 22 nt, Human
auguagcaucuauccugauaaa

SEQ ID NO: 831683 - RNA, 22 nt, Human
uggagcaggccggaaguggcuu

SEQ ID NO: 831684 - RNA, 22 nt, Human
uuuccaagacuccaguucuccc

SEQ ID NO: 831685 - RNA, 22 nt, Human
gcugcucugugacagccuccgg

SEQ ID NO: 831686 - RNA, 19 nt, Human
aaagcagaggagcaucuga

SEQ ID NO: 831687 - RNA, 19 nt, Human
cccucaggucugagcaguc

SEQ ID NO: 831688 - RNA, 20 nt, Human
aggcagacaaggagucuguu

SEQ ID NO: 831689 - RNA, 22 nt, Human
agcugcccccagggcugugcuu

SEQ ID NO: 831690 - RNA, 22 nt, Human
uggauuuauuagguuggugaaa

SEQ ID NO: 831691 - RNA, 22 nt, Human
caagggaccugagauggucucu

SEQ ID NO: 831692 - RNA, 22 nt, Human
gccaggagagcuccuucagguu

SEQ ID NO: 831693 - RNA, 22 nt, Human
cagagguauugcaaaagccuag

SEQ ID NO: 831694 - RNA, 22 nt, Human
guccuggggauuauagaguguu

SEQ ID NO: 831695 - RNA, 19 nt, Human
uugaggggccaggggagau

SEQ ID NO: 831696 - RNA, 22 nt, Human
ucuguucaugaaauaucuuuuu

SEQ ID NO: 831697 - RNA, 22 nt, Human
auggcauuugaccgcuuugugg

SEQ ID NO: 831698 - RNA, 22 nt, Human
ucugcuguaaagaauuucugcc

SEQ ID NO: 831699 - RNA, 23 nt, Human
aggugcagcccuggaccugcccc

SEQ ID NO: 831700 - RNA, 21 nt, Human
uuagcaaagcaaacacaugcu

SEQ ID NO: 831701 - RNA, 17 nt, Human
aggccucccuccaggcc

SEQ ID NO: 831702 - RNA, 22 nt, Human
cagugguugguagauacuugag

SEQ ID NO: 831703 - RNA, 21 nt, Human
ugcagagauaucugaagcaga

SEQ ID NO: 831704 - RNA, 22 nt, Human
agccuucauaaucuugggcuuu

SEQ ID NO: 831705 - RNA, 22 nt, Human
agucuugcucuugcaucugcuu

SEQ ID NO: 831706 - RNA, 22 nt, Human
gauaugaaguggcauugugaag

SEQ ID NO: 831707 - RNA, 22 nt, Human
uauuccaaaaucccaaacugcc

SEQ ID NO: 831708 - RNA, 23 nt, Human
aguacauucgaaaaauucuguga

SEQ ID NO: 831709 - RNA, 20 nt, Human
ucugugugccaucaccuaac

SEQ ID NO: 831710 - RNA, 22 nt, Human
aauuucaaacucuugcccucag

SEQ ID NO: 831711 - RNA, 22 nt, Human
uguccuuaaggagcuuaauguc

SEQ ID NO: 831712 - RNA, 22 nt, Human
gcagcuggagccagccagacac

SEQ ID NO: 831713 - RNA, 22 nt, Human
acaugcuuguuuuucacaaccu

SEQ ID NO: 831714 - RNA, 22 nt, Human
guuguauucuucaauaucagag

SEQ ID NO: 831715 - RNA, 22 nt, Human
cagcacugcuucgcagccaggg

SEQ ID NO: 831716 - RNA, 22 nt, Human
caagaaucuugcagcuuagacu

SEQ ID NO: 831717 - RNA, 22 nt, Human
gcacagccacugagugagaacc

SEQ ID NO: 831718 - RNA, 22 nt, Human
ggagcagacauaaccuuacaga

SEQ ID NO: 831719 - RNA, 22 nt, Human
ccugccuggaucagccauccug

SEQ ID NO: 831720 - RNA, 22 nt, Human
agagcuggggccagagucaagg

SEQ ID NO: 831721 - RNA, 22 nt, Human
ucucagaggucuucagccucug

SEQ ID NO: 831722 - RNA, 22 nt, Human
aaggccugcucagcugucugug

SEQ ID NO: 831723 - RNA, 22 nt, Human
gcagugugaccgagcuugcuuc

SEQ ID NO: 831724 - RNA, 22 nt, Human
guucuucaaagugacaacuaaa

SEQ ID NO: 831725 - RNA, 22 nt, Human
aagagggcugcaaucuuauugc

SEQ ID NO: 831726 - RNA, 22 nt, Human
aggcaagcauuuaaccacucau

SEQ ID NO: 831727 - RNA, 22 nt, Human
ggguggaguagaaagaugaauu

SEQ ID NO: 831728 - RNA, 22 nt, Human
uaugaccuuaggaagcaagaag

SEQ ID NO: 831729 - RNA, 21 nt, Human
gauuugcagaaacuagacagg

SEQ ID NO: 831730 - RNA, 18 nt, Human
uggcucagauggcuuuaa

SEQ ID NO: 831731 - RNA, 22 nt, Human
uuugaagauuaugccagaguga

SEQ ID NO: 831732 - RNA, 22 nt, Human
acuccuggggcugccaucacag

SEQ ID NO: 831733 - RNA, 22 nt, Human
ucuguaucacccguucccagaa

SEQ ID NO: 831734 - RNA, 22 nt, Human
acccugggucauauacagugug

SEQ ID NO: 831735 - RNA, 21 nt, Human
agucuguuaggaugacucuga

SEQ ID NO: 831736 - RNA, 22 nt, Human
cauuccuuaacguggggagucu

SEQ ID NO: 831737 - RNA, 22 nt, Human
uauuucugaauccaaaagguca

SEQ ID NO: 831738 - RNA, 22 nt, Human
caaauguguaaggaaguguuag

SEQ ID NO: 831739 - RNA, 22 nt, Human
ggcagcuguaagaugagugaau

SEQ ID NO: 831740 - RNA, 22 nt, Human
uauacagaaccgccugaagucu

SEQ ID NO: 831741 - RNA, 22 nt, Human
gccaggugcauggcugagucuc

SEQ ID NO: 831742 - RNA, 22 nt, Human
uaucagaacacauguuuugcag

SEQ ID NO: 831743 - RNA, 22 nt, Human
uucuucaguguagcaacuguau

SEQ ID NO: 831744 - RNA, 22 nt, Human
uggcccgaccucugcucaugca

SEQ ID NO: 831745 - RNA, 22 nt, Human
cugccuuugcccuugacacugu

SEQ ID NO: 831746 - RNA, 22 nt, Human
gccauccucugagcacuaggca

SEQ ID NO: 831747 - RNA, 22 nt, Human
uggcuuccacugugugcccccu

SEQ ID NO: 831748 - RNA, 22 nt, Human
aaaguugugaaaccgaacaugu

SEQ ID NO: 831749 - RNA, 21 nt, Human
cagaggggcuagccuggcugc

SEQ ID NO: 831750 - RNA, 22 nt, Human
uugaggagcaggaugggaggcu

SEQ ID NO: 831751 - RNA, 22 nt, Human
cagggcccaagacacaaugagg

SEQ ID NO: 831752 - RNA, 22 nt, Human
aggaaagcucccaguagggcuc

SEQ ID NO: 831753 - RNA, 22 nt, Human
cuccuguauguugggcuucaca

SEQ ID NO: 831754 - RNA, 22 nt, Human
uagaaaugcaguguacuguguc

SEQ ID NO: 831755 - RNA, 22 nt, Human
cagucccaaggaggaagcaguc

SEQ ID NO: 831756 - RNA, 22 nt, Human
cacugaaggaaggacuacugca

SEQ ID NO: 831757 - RNA, 22 nt, Human
gauuuccaggucauuaauaaag

SEQ ID NO: 831758 - RNA, 22 nt, Human
uuugacagauccuuaacucagc

SEQ ID NO: 831759 - RNA, 22 nt, Human
augugaaauagcuggauaugaa

SEQ ID NO: 831760 - RNA, 22 nt, Human
cauuuacacuucuaaccacaag

SEQ ID NO: 831761 - RNA, 20 nt, Human
cugccuggaggccucuaccu

SEQ ID NO: 831762 - RNA, 22 nt, Human
ugcagcucugaacagucaugaa

SEQ ID NO: 831763 - RNA, 22 nt, Human
cuucucucugcauaggcauggg

SEQ ID NO: 831764 - RNA, 18 nt, Human
caggucagccuggccuca

SEQ ID NO: 831765 - RNA, 22 nt, Human
aguuauucauuuauucuguaca

SEQ ID NO: 831766 - RNA, 22 nt, Human
ggggcugggauuugaacccagg

SEQ ID NO: 831767 - RNA, 22 nt, Human
uggagacucugcaucugugaca

SEQ ID NO: 831768 - RNA, 22 nt, Human
aaaucaguaaauguucauuaac

SEQ ID NO: 831769 - RNA, 22 nt, Human
agcagggguaacagaaggaaag

SEQ ID NO: 831770 - RNA, 22 nt, Human
guuuaaucagaggaauuauaga

SEQ ID NO: 831771 - RNA, 22 nt, Human
ugaaaugaaacagaacauauca

SEQ ID NO: 831772 - RNA, 22 nt, Human
ugggcuggcccaccacaccucg

SEQ ID NO: 831773 - RNA, 18 nt, Human
cugaggcuggcaggagcc

SEQ ID NO: 831774 - RNA, 22 nt, Human
cugcugggcuccucaugugacu

SEQ ID NO: 831775 - RNA, 22 nt, Human
gagcagggccacuucuguaccu

SEQ ID NO: 831776 - RNA, 16 nt, Human
ccaccugcagcucuca

SEQ ID NO: 831777 - RNA, 22 nt, Human
aggcagcuuucagugucucuca

SEQ ID NO: 831778 - RNA, 22 nt, Human
ucauugcacuccagccugggca

SEQ ID NO: 831779 - RNA, 22 nt, Human
cacugaaggcuaggauuagaug

SEQ ID NO: 831780 - RNA, 22 nt, Human
gcagccuguuguaccagccugu

SEQ ID NO: 831781 - RNA, 23 nt, Human
uaguuauuuucucuguaauuugc

SEQ ID NO: 831782 - RNA, 22 nt, Human
cacauguaguaagcaggcaaug

SEQ ID NO: 831783 - RNA, 21 nt, Human
gcagccacagccaccaagcua

SEQ ID NO: 831784 - RNA, 22 nt, Human
caugucuggguauaugcauaug

SEQ ID NO: 831785 - RNA, 22 nt, Human
aauggcuucugaagcacacuuu

SEQ ID NO: 831786 - RNA, 22 nt, Human
aauuagagaucaguucuuugac

SEQ ID NO: 831787 - RNA, 22 nt, Human
ucuucuuccuccacagggccca

SEQ ID NO: 831788 - RNA, 22 nt, Human
uuuccucugggcccugccaccc

SEQ ID NO: 831789 - RNA, 22 nt, Human
ucccagcagggccgaccagccu

SEQ ID NO: 831790 - RNA, 22 nt, Human
aaaagacauaugugggcauucu

SEQ ID NO: 831791 - RNA, 22 nt, Human
acagagguaggacaugagauau

SEQ ID NO: 831792 - RNA, 22 nt, Human
ggagccagcagggugacacuga

SEQ ID NO: 831793 - RNA, 19 nt, Human
ugcuagaaauucugugacu

SEQ ID NO: 831794 - RNA, 22 nt, Human
uuagaacuuaaacuucagaaag

SEQ ID NO: 831795 - RNA, 22 nt, Human
ccagccugguucagaauuggcu

SEQ ID NO: 831796 - RNA, 22 nt, Human
gcaaggagacuguagggccaag

SEQ ID NO: 831797 - RNA, 19 nt, Human
ccuggguccacucagacua

SEQ ID NO: 831798 - RNA, 22 nt, Human
gcucucuggaggccauggacag

SEQ ID NO: 831799 - RNA, 22 nt, Human
acaacuuuguagcaauuccacg

SEQ ID NO: 831800 - RNA, 22 nt, Human
ucacauuuuaucuauuuuaagu

SEQ ID NO: 831801 - RNA, 22 nt, Human
uccuccuucgggacugcuugac

SEQ ID NO: 831802 - RNA, 22 nt, Human
ugggccuggacaaggccacuag

SEQ ID NO: 831803 - RNA, 22 nt, Human
uguggcucucaugcacucccag

SEQ ID NO: 831804 - RNA, 22 nt, Human
aaaggcuaugagauagaagaua

SEQ ID NO: 831805 - RNA, 22 nt, Human
ugcaauaaggaguaauaguaaa

SEQ ID NO: 831806 - RNA, 22 nt, Human
aaaagucagucucuccuagcuc

SEQ ID NO: 831807 - RNA, 22 nt, Human
uucuggagagaaaccuuacaaa

SEQ ID NO: 831808 - RNA, 22 nt, Human
cugugcccuggccaggccucuc

SEQ ID NO: 831809 - RNA, 22 nt, Human
uggccagguugggcuuugcagc

SEQ ID NO: 831810 - RNA, 22 nt, Human
gcauggcagugaggauggugcu

SEQ ID NO: 831811 - RNA, 22 nt, Human
ccagagccggauugugaagugc

SEQ ID NO: 831812 - RNA, 22 nt, Human
uuugucagucaugucugcuuuu

SEQ ID NO: 831813 - RNA, 22 nt, Human
gagcugccggcccacaguacua

SEQ ID NO: 831814 - RNA, 22 nt, Human
gcuggccugucuagagccuuac

SEQ ID NO: 831815 - RNA, 22 nt, Human
gagcacagcuggagguagcauu

SEQ ID NO: 831816 - RNA, 22 nt, Human
ccccaggacguggcccucauag

SEQ ID NO: 831817 - RNA, 22 nt, Human
uucuucaaaacaacacuggccu

SEQ ID NO: 831818 - RNA, 22 nt, Human
cucuucaaaagucuaauccuua

SEQ ID NO: 831819 - RNA, 22 nt, Human
aggucaaaccacagcucuaggc

SEQ ID NO: 831820 - RNA, 22 nt, Human
cauuugaaugagauugcuguaa

SEQ ID NO: 831821 - RNA, 21 nt, Human
uggcugccuacaugcugcagg

SEQ ID NO: 831822 - RNA, 22 nt, Human
uaucuuuaacuugcaguauuua

SEQ ID NO: 831823 - RNA, 22 nt, Human
agcagcuguggaaaaguaacua

SEQ ID NO: 831824 - RNA, 22 nt, Human
ugucagugguagacccagaggu

SEQ ID NO: 831825 - RNA, 22 nt, Human
uuggaaggugagucccuggguu

SEQ ID NO: 831826 - RNA, 19 nt, Human
uuucuuaggccuuuggccu

SEQ ID NO: 831827 - RNA, 22 nt, Human
cucugggcaaguuucuucauga

SEQ ID NO: 831828 - RNA, 21 nt, Human
gauuucacuuaccuucauuua

SEQ ID NO: 831829 - RNA, 22 nt, Human
uuaguaauguguuaauaugaau

SEQ ID NO: 831830 - RNA, 22 nt, Human
ugaauggucacugagcaucugu

SEQ ID NO: 831831 - RNA, 22 nt, Human
aagcagccuggacuugggcugg

SEQ ID NO: 831832 - RNA, 22 nt, Human
uuugauaagagcugcugaaacu

SEQ ID NO: 831833 - RNA, 22 nt, Human
gguacaaugucuuacagaccca

SEQ ID NO: 831834 - RNA, 22 nt, Human
aaaugcacacaccaggaaacua

SEQ ID NO: 831835 - RNA, 22 nt, Human
uucuuuucuuuaggcauugugu

SEQ ID NO: 831836 - RNA, 22 nt, Human
aggagcagaccguaguccugca

SEQ ID NO: 831837 - RNA, 22 nt, Human
ugaggcuguucuaccagggcca

SEQ ID NO: 831838 - RNA, 22 nt, Human
uuccauuuauucuuguccagau

SEQ ID NO: 831839 - RNA, 22 nt, Human
ccuggccacucagguguggggc

SEQ ID NO: 831840 - RNA, 22 nt, Human
ucacagaacaauguuuaguucu

SEQ ID NO: 831841 - RNA, 22 nt, Human
auacaucuugucagauucaugu

SEQ ID NO: 831842 - RNA, 22 nt, Human
caguggcagagaacagagaccu

SEQ ID NO: 831843 - RNA, 23 nt, Human
acugagccagggccugggucagc

SEQ ID NO: 831844 - RNA, 22 nt, Human
agugggaggcggcugacgggcg

SEQ ID NO: 831845 - RNA, 22 nt, Human
agcagggcuuugcagacuuggg

SEQ ID NO: 831846 - RNA, 22 nt, Human
ccuggagauuauuugguccaau

SEQ ID NO: 831847 - RNA, 22 nt, Human
uaucagaaggaagugccuuuaa

SEQ ID NO: 831848 - RNA, 22 nt, Human
gggcaugagagggcagcuggca

SEQ ID NO: 831849 - RNA, 22 nt, Human
ugacagaaauaguucuuaauuu

SEQ ID NO: 831850 - RNA, 22 nt, Human
cagagccccccuucugaucaca

SEQ ID NO: 831851 - RNA, 22 nt, Human
cgcugccaggucaccaggggua

SEQ ID NO: 831852 - RNA, 22 nt, Human
uuauuauuccccaagucauuau

SEQ ID NO: 831853 - RNA, 15 nt, Human
cuccaugauuuugca

SEQ ID NO: 831854 - RNA, 22 nt, Human
ccagccagcugcccuuggggcc

SEQ ID NO: 831855 - RNA, 22 nt, Human
acagagcaauaacagggagagg

SEQ ID NO: 831856 - RNA, 22 nt, Human
uguucaauccccagguccugaa

SEQ ID NO: 831857 - RNA, 22 nt, Human
guacagaauuaugccaugaggg

SEQ ID NO: 831858 - RNA, 22 nt, Human
uaggggugaggccaggcaucag

SEQ ID NO: 831859 - RNA, 22 nt, Human
caggcagcauuuacucugauga

SEQ ID NO: 831860 - RNA, 22 nt, Human
aggaguguggccagggcucugg

SEQ ID NO: 831861 - RNA, 22 nt, Human
agccaaagaucagugugcaagu

SEQ ID NO: 831862 - RNA, 22 nt, Human
ugacagaaugugacucucagau

SEQ ID NO: 831863 - RNA, 22 nt, Human
agaaaugcauuagcacauauag

SEQ ID NO: 831864 - RNA, 22 nt, Human
agccucucuuuauucccagcua

SEQ ID NO: 831865 - RNA, 22 nt, Human
aggcugcuucagcugcagggag

SEQ ID NO: 831866 - RNA, 22 nt, Human
cuacagaaaccuuuuucauaca

SEQ ID NO: 831867 - RNA, 22 nt, Human
aggaggccgauuucagaggucg

SEQ ID NO: 831868 - RNA, 20 nt, Human
gucugaggagcagugggaaa

SEQ ID NO: 831869 - RNA, 23 nt, Human
ugucacauuuaguuggcauuguu

SEQ ID NO: 831870 - RNA, 22 nt, Human
augacagaaggccucccugaca

SEQ ID NO: 831871 - RNA, 18 nt, Human
cagcugccagcucaugga

SEQ ID NO: 831872 - RNA, 22 nt, Human
ggcugcagcggauuggggauug

SEQ ID NO: 831873 - RNA, 23 nt, Human
ggccuccuggucuaggcuagacu

SEQ ID NO: 831874 - RNA, 22 nt, Human
aggacagaccuaggacuggagc

SEQ ID NO: 831875 - RNA, 22 nt, Human
guaaaauagaauaacguggcua

SEQ ID NO: 831876 - RNA, 22 nt, Human
ggcugccucuggaagcuggaga

SEQ ID NO: 831877 - RNA, 18 nt, Human
ccugcagcccaggaggcc

SEQ ID NO: 831878 - RNA, 22 nt, Human
aguaugaagauuauaauuuuuc

SEQ ID NO: 831879 - RNA, 21 nt, Human
caaucaguuggcauuugagca

SEQ ID NO: 831880 - RNA, 22 nt, Human
acagguggcuuauuggcugauu

SEQ ID NO: 831881 - RNA, 22 nt, Human
ugcuuuaaauaugaauuagcau

SEQ ID NO: 831882 - RNA, 22 nt, Human
caguacuuuucaaccaguauga

SEQ ID NO: 831883 - RNA, 22 nt, Human
auggagggugucagagagcgaa

SEQ ID NO: 831884 - RNA, 22 nt, Human
cugucuccagggcaggugcagg

SEQ ID NO: 831885 - RNA, 22 nt, Human
accagcugcugauugcuaaaug

SEQ ID NO: 831886 - RNA, 22 nt, Human
gccuccugagaagccacaggcu

SEQ ID NO: 831887 - RNA, 22 nt, Human
ucuuuucuggacucugcaugga

SEQ ID NO: 831888 - RNA, 22 nt, Human
cagggccuuuuagcaucuucuc

SEQ ID NO: 831889 - RNA, 22 nt, Human
gaaacauaguugagacacugcu

SEQ ID NO: 831890 - RNA, 22 nt, Human
augcagagacagauguggcaug

SEQ ID NO: 831891 - RNA, 22 nt, Human
uugcacuaggaaaaggcagcca

SEQ ID NO: 831892 - RNA, 22 nt, Human
auuugcuuaucuccacaguugu

SEQ ID NO: 831893 - RNA, 17 nt, Human
cacaggugugguuugag

SEQ ID NO: 831894 - RNA, 20 nt, Human
uuucaagucagcaauucuca

SEQ ID NO: 831895 - RNA, 22 nt, Human
gagauuuaauuggauuaacuua

SEQ ID NO: 831896 - RNA, 22 nt, Human
uaauuguagcuuuguaaucagc

SEQ ID NO: 831897 - RNA, 22 nt, Human
cauuaucugccauugacaccau

SEQ ID NO: 831898 - RNA, 22 nt, Human
uaucagaaaugccuuaaauugg

SEQ ID NO: 831899 - RNA, 22 nt, Human
ucccagggacaccaagcuguuu

SEQ ID NO: 831900 - RNA, 19 nt, Human
accucugcagagauguuua

SEQ ID NO: 831901 - RNA, 22 nt, Human
aggcugcuggcaggcguggacg

SEQ ID NO: 831902 - RNA, 22 nt, Human
gaggcagcgggucaggaccgug

SEQ ID NO: 831903 - RNA, 22 nt, Human
gggaggugauggcaagcagcgg

SEQ ID NO: 831904 - RNA, 23 nt, Human
aauguauguuaguaucuuagaga

SEQ ID NO: 831905 - RNA, 22 nt, Human
cucugcagaauuugagcugcuc

SEQ ID NO: 831906 - RNA, 22 nt, Human
agagacaccgcgcaucauggcu

SEQ ID NO: 831907 - RNA, 22 nt, Human
caguccuuucaauggugaccuu

SEQ ID NO: 831908 - RNA, 19 nt, Human
gagguggguccccgcagcc

SEQ ID NO: 831909 - RNA, 22 nt, Human
uuuaggcacaacuacucagcua

SEQ ID NO: 831910 - RNA, 19 nt, Human
agaggcagucuccaacagg

SEQ ID NO: 831911 - RNA, 22 nt, Human
gaagagcugcaguuuccugggc

SEQ ID NO: 831912 - RNA, 22 nt, Human
gagguggaaggcaggaacaaau

SEQ ID NO: 831913 - RNA, 22 nt, Human
caggagauguaagacuucuguu

SEQ ID NO: 831914 - RNA, 22 nt, Human
auguuuuugagauacaaacaga

SEQ ID NO: 831915 - RNA, 22 nt, Human
gcagcugcagagaccggguggg

SEQ ID NO: 831916 - RNA, 23 nt, Human
auguuauuauuagcagucuugcc

SEQ ID NO: 831917 - RNA, 22 nt, Human
uggggcugugagacuacaggau

SEQ ID NO: 831918 - RNA, 22 nt, Human
ugaaauauuuagagaguaaguu

SEQ ID NO: 831919 - RNA, 22 nt, Human
gaugugagugguagcugggauu

SEQ ID NO: 831920 - RNA, 22 nt, Human
uccagccaagccuugguagcug

SEQ ID NO: 831921 - RNA, 22 nt, Human
cagcaggcccaggugcugguga

SEQ ID NO: 831922 - RNA, 22 nt, Human
uucuuacuaguauguuucagca

SEQ ID NO: 831923 - RNA, 22 nt, Human
cuucucaguugcaagugucaga

SEQ ID NO: 831924 - RNA, 22 nt, Human
cuggacagaaagggcugcugug

SEQ ID NO: 831925 - RNA, 22 nt, Human
gcagagugauggaaugugggug

SEQ ID NO: 831926 - RNA, 22 nt, Human
uuuguaaagucuguucugaguu

SEQ ID NO: 831927 - RNA, 22 nt, Human
gccuggaggaauguagcugagg

SEQ ID NO: 831928 - RNA, 22 nt, Human
uccuuuccagccucaccucagc

SEQ ID NO: 831929 - RNA, 22 nt, Human
agucccagcuacucaagaggcu

SEQ ID NO: 831930 - RNA, 22 nt, Human
auaaggcacacauagauagggu

SEQ ID NO: 831931 - RNA, 22 nt, Human
uuucuagugguuaagauuuaca

SEQ ID NO: 831932 - RNA, 22 nt, Human
ggcagagaugugggucagaauc

SEQ ID NO: 831933 - RNA, 22 nt, Human
cagcucugaggaacacuccuuu

SEQ ID NO: 831934 - RNA, 22 nt, Human
ggcagccaugucccagggcuuc

SEQ ID NO: 831935 - RNA, 22 nt, Human
ucaguucuuuauuucacaguga

SEQ ID NO: 831936 - RNA, 22 nt, Human
agagcuggcugguagcccugau

SEQ ID NO: 831937 - RNA, 22 nt, Human
ugaggcagguaagcaaguuuug

SEQ ID NO: 831938 - RNA, 22 nt, Human
cucugcuuggaacuggacagaa

SEQ ID NO: 831939 - RNA, 22 nt, Human
ugcugccuuagcagccaggcaa

SEQ ID NO: 831940 - RNA, 22 nt, Human
ucagccaggccaccuucagcuu

SEQ ID NO: 831941 - RNA, 19 nt, Human
uagaggagaagggaagugg

SEQ ID NO: 831942 - RNA, 23 nt, Human
gagcugggauacaggcuuacugc

SEQ ID NO: 831943 - RNA, 22 nt, Human
uucagagaugacaccugguguu

SEQ ID NO: 831944 - RNA, 22 nt, Human
caggaaggcccaccuguccugu

SEQ ID NO: 831945 - RNA, 22 nt, Human
caggugggccaugaaaaaugac

SEQ ID NO: 831946 - RNA, 22 nt, Human
ugcagcuccucuggcugccuga

SEQ ID NO: 831947 - RNA, 22 nt, Human
ucucagagggaaacaugaguga

SEQ ID NO: 831948 - RNA, 22 nt, Human
ggggccugcgagguucaacuuc

SEQ ID NO: 831949 - RNA, 22 nt, Human
gagcacagaaucuucccaugca

SEQ ID NO: 831950 - RNA, 22 nt, Human
aggcacugagaggcuguguugc

SEQ ID NO: 831951 - RNA, 22 nt, Human
cccuggguucuggcugggcugc

SEQ ID NO: 831952 - RNA, 19 nt, Human
guucaaacacugauucagc

SEQ ID NO: 831953 - RNA, 19 nt, Human
ggcagcuugggaagguagc

SEQ ID NO: 831954 - RNA, 22 nt, Human
agaggccagggacacugcucaa

SEQ ID NO: 831955 - RNA, 22 nt, Human
uaaguccuggcugguuugaagc

SEQ ID NO: 831956 - RNA, 22 nt, Human
acagagaaagugggcugaagau

SEQ ID NO: 831957 - RNA, 22 nt, Human
gagggugggccagauaugaggg

SEQ ID NO: 831958 - RNA, 22 nt, Human
ucaguuuuuaaaugauauaauu

SEQ ID NO: 831959 - RNA, 23 nt, Human
acagagaucuugacuuguaugga

SEQ ID NO: 831960 - RNA, 22 nt, Human
uagcagcuuccagagagggcag

SEQ ID NO: 831961 - RNA, 22 nt, Human
cugcuguggaugcaggaccuca

SEQ ID NO: 831962 - RNA, 22 nt, Human
ucuggcuccacucugugcaugc

SEQ ID NO: 831963 - RNA, 22 nt, Human
gggagcugagggaccucugugg

SEQ ID NO: 831964 - RNA, 23 nt, Human
aaaguuugaagcaacaguaguug

SEQ ID NO: 831965 - RNA, 22 nt, Human
ucagggcaccaaaaaagaugcc

SEQ ID NO: 831966 - RNA, 22 nt, Human
cuucuccucugaguccugggag

SEQ ID NO: 831967 - RNA, 22 nt, Human
auggcuuaugaauaacaguagg

SEQ ID NO: 831968 - RNA, 22 nt, Human
caaauucacaugauugcuucug

SEQ ID NO: 831969 - RNA, 22 nt, Human
aucaguuuugggggacauacug

SEQ ID NO: 831970 - RNA, 22 nt, Human
gugugcagugagcaaaagaucu

SEQ ID NO: 831971 - RNA, 22 nt, Human
acaaaauuaccuaguuauuuuc

SEQ ID NO: 831972 - RNA, 22 nt, Human
ucccagagucagagguggggcc

SEQ ID NO: 831973 - RNA, 22 nt, Human
ucaauaaauagcuuggcucagc

SEQ ID NO: 831974 - RNA, 22 nt, Human
gugggacucuucuuuggcagug

SEQ ID NO: 831975 - RNA, 22 nt, Human
cugagguguugaugaccuaugc

SEQ ID NO: 831976 - RNA, 22 nt, Human
ggccugcuauuggugggcagac

SEQ ID NO: 831977 - RNA, 22 nt, Human
ccugucagcugauggcuaugua

SEQ ID NO: 831978 - RNA, 22 nt, Human
ucagagccccuccgcuguccca

SEQ ID NO: 831979 - RNA, 22 nt, Human
cguccuuacagagggucacagc

SEQ ID NO: 831980 - RNA, 22 nt, Human
agugaaaucagguuuugacugc

SEQ ID NO: 831981 - RNA, 22 nt, Human
gaugguuuggaaugaaguagcu

SEQ ID NO: 831982 - RNA, 21 nt, Human
ggacuuacauagguaaggggu

SEQ ID NO: 831983 - RNA, 22 nt, Human
uuucaguguaucuuccaaaagc

SEQ ID NO: 831984 - RNA, 22 nt, Human
gaauauuuguaauuacuguuga

SEQ ID NO: 831985 - RNA, 21 nt, Human
ucaguaaaccuaaagauugua

SEQ ID NO: 831986 - RNA, 22 nt, Human
ugucccaguuuugcagguuaga

SEQ ID NO: 831987 - RNA, 22 nt, Human
ucugagagagggucagaugcua

SEQ ID NO: 831988 - RNA, 22 nt, Human
gagaaaugcaugcaugucauca

SEQ ID NO: 831989 - RNA, 22 nt, Human
ucauuacagagauauaaucuac

SEQ ID NO: 831990 - RNA, 22 nt, Human
cguguacagucuaucuuuuuuc

SEQ ID NO: 831991 - RNA, 22 nt, Human
ccucagggacuccaugcugcag

SEQ ID NO: 831992 - RNA, 22 nt, Human
gcagugccuugcuucucugucu

SEQ ID NO: 831993 - RNA, 22 nt, Human
ugaggcaggaauggggaaaagu

SEQ ID NO: 831994 - RNA, 22 nt, Human
gauggguggucucagacuugcc

SEQ ID NO: 831995 - RNA, 22 nt, Human
cuggagccagccagggcccucu

SEQ ID NO: 831996 - RNA, 22 nt, Human
gggcagugguccaggcuacagc

SEQ ID NO: 831997 - RNA, 22 nt, Human
acaggggcuccgaaggugaggg

SEQ ID NO: 831998 - RNA, 22 nt, Human
ucacaggguuuggaagccuccu

SEQ ID NO: 831999 - RNA, 22 nt, Human
ccagugggugcugggcucugcc

SEQ ID NO: 832000 - RNA, 21 nt, Human
accucaagcaacaaccaaggu

SEQ ID NO: 832001 - RNA, 22 nt, Human
ggcugccugaggcagugagaga

SEQ ID NO: 832002 - RNA, 22 nt, Human
gguggggucacgacagagggaa

SEQ ID NO: 832003 - RNA, 22 nt, Human
caguugccuacuacauggcagg

SEQ ID NO: 832004 - RNA, 22 nt, Human
ggcagagguagcuggaaccagg

SEQ ID NO: 832005 - RNA, 22 nt, Human
ggauggagguucucagaugcuc

SEQ ID NO: 832006 - RNA, 22 nt, Human
gcugggagucgcgucuguggcc

SEQ ID NO: 832007 - RNA, 22 nt, Human
cauugcccaguaggaucaccag

SEQ ID NO: 832008 - RNA, 22 nt, Human
cugaacucuuuaugacagcuug

SEQ ID NO: 832009 - RNA, 22 nt, Human
acccuggggguggccagugcca

SEQ ID NO: 832010 - RNA, 22 nt, Human
ugggcagacgggagcuugccuu

SEQ ID NO: 832011 - RNA, 22 nt, Human
aagccagguuccauggaggagc

SEQ ID NO: 832012 - RNA, 22 nt, Human
ggggggugcugaucaguggagc

SEQ ID NO: 832013 - RNA, 22 nt, Human
ccucugcucccuggugucugag

SEQ ID NO: 832014 - RNA, 22 nt, Human
gcaccugggacccagaggcacc

SEQ ID NO: 832015 - RNA, 21 nt, Human
acaugucucuaaucucaguga

SEQ ID NO: 832016 - RNA, 22 nt, Human
aggccugagcagaggaguggac

SEQ ID NO: 832017 - RNA, 22 nt, Human
uacaaaguuuucuuggauugag

SEQ ID NO: 832018 - RNA, 22 nt, Human
uggauuuaguucuucacaggcc

SEQ ID NO: 832019 - RNA, 20 nt, Human
caccaggcgcucugagaaca

SEQ ID NO: 832020 - RNA, 22 nt, Human
uucacaaaacacuauuuucugg

SEQ ID NO: 832021 - RNA, 22 nt, Human
ucccagggucaguggugaggcc

SEQ ID NO: 832022 - RNA, 22 nt, Human
ucuuguccuaagagcuggauuc

SEQ ID NO: 832023 - RNA, 22 nt, Human
agccucugcacgggcacgggug

SEQ ID NO: 832024 - RNA, 22 nt, Human
aauuuccaaauuucugucacac

SEQ ID NO: 832025 - RNA, 18 nt, Human
uccugccugcgggcuccc

SEQ ID NO: 832026 - RNA, 22 nt, Human
ccugcagacacuuguccagcaa

SEQ ID NO: 832027 - RNA, 22 nt, Human
ucauugcauuuauucacuggca

SEQ ID NO: 832028 - RNA, 22 nt, Human
agcagccagaaagggcagucga

SEQ ID NO: 832029 - RNA, 22 nt, Human
cagaggccuauccaguguccau

SEQ ID NO: 832030 - RNA, 22 nt, Human
uugugcucuguguuauuuaagg

SEQ ID NO: 832031 - RNA, 22 nt, Human
augcuguagaucuuagccucua

SEQ ID NO: 832032 - RNA, 22 nt, Human
uuccaggaauucagcucucagu

SEQ ID NO: 832033 - RNA, 23 nt, Human
acaguuauagcugugaauaacau

SEQ ID NO: 832034 - RNA, 22 nt, Human
ccugcagguccccggaugcgca

SEQ ID NO: 832035 - RNA, 22 nt, Human
gaagaggaugacaggagccggu

SEQ ID NO: 832036 - RNA, 22 nt, Human
cuggcuccuccaaggccuggag

SEQ ID NO: 832037 - RNA, 23 nt, Human
gugauuucagggaacagaaucag

SEQ ID NO: 832038 - RNA, 22 nt, Human
ucccaggacccaggcauucaca

SEQ ID NO: 832039 - RNA, 22 nt, Human
gcaucuucacacaaagccagug

SEQ ID NO: 832040 - RNA, 22 nt, Human
aggcagcugaggucuggcgccc

SEQ ID NO: 832041 - RNA, 22 nt, Human
cagagcagugaggaguugugua

SEQ ID NO: 832042 - RNA, 22 nt, Human
aagaaauauugggccuuauaaa

SEQ ID NO: 832043 - RNA, 22 nt, Human
caagagcuagaaauugguuaga

SEQ ID NO: 832044 - RNA, 22 nt, Human
ugguuugcccacucgagugauu

SEQ ID NO: 832045 - RNA, 22 nt, Human
accaaggagaaggugcaagcuu

SEQ ID NO: 832046 - RNA, 22 nt, Human
cagcugagucugagguucuuug

SEQ ID NO: 832047 - RNA, 22 nt, Human
aggucauuuccuuagaggcaga

SEQ ID NO: 832048 - RNA, 22 nt, Human
gggaagcaggugcagcucgccu

SEQ ID NO: 832049 - RNA, 22 nt, Human
ugaggugaagaguggagcucag

SEQ ID NO: 832050 - RNA, 22 nt, Human
uuagccauguugaagauuuaga

SEQ ID NO: 832051 - RNA, 22 nt, Human
aggagccaguuccaccccagga

SEQ ID NO: 832052 - RNA, 22 nt, Human
uugauuucuauucagauguaga

SEQ ID NO: 832053 - RNA, 21 nt, Human
aacaaagggaugcucaucuuu

SEQ ID NO: 832054 - RNA, 22 nt, Human
uaauucagggccagaaucccca

SEQ ID NO: 832055 - RNA, 22 nt, Human
uuuaggcagaacauggacuuug

SEQ ID NO: 832056 - RNA, 22 nt, Human
gcagagccaggagcccaggauc

SEQ ID NO: 832057 - RNA, 22 nt, Human
ggugaaggaggaagcugaugga

SEQ ID NO: 832058 - RNA, 22 nt, Human
aagacuguacauuuuccagucu

SEQ ID NO: 832059 - RNA, 19 nt, Human
gcaggcaguggcauucgga

SEQ ID NO: 832060 - RNA, 22 nt, Human
cuggugguucaggagaauggcu

SEQ ID NO: 832061 - RNA, 22 nt, Human
ucuguucaguugauuagacaga

SEQ ID NO: 832062 - RNA, 22 nt, Human
acuuuaucaggaaucacacagc

SEQ ID NO: 832063 - RNA, 23 nt, Human
aguguuccaguugguugagagug

SEQ ID NO: 832064 - RNA, 22 nt, Human
uguguacuugaaagggcagguc

SEQ ID NO: 832065 - RNA, 22 nt, Human
ggcacagggaggcccuggugug

SEQ ID NO: 832066 - RNA, 22 nt, Human
cugggcacagcguugggcucuu

SEQ ID NO: 832067 - RNA, 22 nt, Human
gcccagccuccaagcuccaagg

SEQ ID NO: 832068 - RNA, 22 nt, Human
aaagccaugggucuuuggcaua

SEQ ID NO: 832069 - RNA, 22 nt, Human
ggccucucucccuggcuugcag

SEQ ID NO: 832070 - RNA, 22 nt, Human
auauaauacaaccugcuaagug

SEQ ID NO: 832071 - RNA, 22 nt, Human
acuguucacccagcacuagcag

SEQ ID NO: 832072 - RNA, 18 nt, Human
ucugggcuucccgaggcu

SEQ ID NO: 832073 - RNA, 22 nt, Human
gugcagggcuggcaccggaggc

SEQ ID NO: 832074 - RNA, 20 nt, Human
cucaggauacugcaaaguug

SEQ ID NO: 832075 - RNA, 22 nt, Human
cuguuuuugugcugugucuccc

SEQ ID NO: 832076 - RNA, 22 nt, Human
ccuugcugaccaucaccuuuga

SEQ ID NO: 832077 - RNA, 22 nt, Human
caggaaauaucuccuggcagag

SEQ ID NO: 832078 - RNA, 22 nt, Human
ggggcagagucuggacuguugu

SEQ ID NO: 832079 - RNA, 22 nt, Human
uuccaaagaaauugaccaagac

SEQ ID NO: 832080 - RNA, 22 nt, Human
uaugcacauucacacaaaaaug

SEQ ID NO: 832081 - RNA, 22 nt, Human
gcuggguggaucggaggcucug

SEQ ID NO: 832082 - RNA, 22 nt, Human
ccagcagagcauggggaggaag

SEQ ID NO: 832083 - RNA, 22 nt, Human
aagggcuggaucucucugagca

SEQ ID NO: 832084 - RNA, 22 nt, Human
cugggaggauucauugagguga

SEQ ID NO: 832085 - RNA, 22 nt, Human
cuggcaaguacugggccagcuc

SEQ ID NO: 832086 - RNA, 22 nt, Human
agccagggacgcugcaggcuac

SEQ ID NO: 832087 - RNA, 22 nt, Human
ugucucugauaaguaguucagu

SEQ ID NO: 832088 - RNA, 22 nt, Human
aaaguccuguuugaaggaccug

SEQ ID NO: 832089 - RNA, 22 nt, Human
cuggagccacuuuuuauccuuu

SEQ ID NO: 832090 - RNA, 22 nt, Human
acaaagcuagagaagagaauug

SEQ ID NO: 832091 - RNA, 22 nt, Human
gcaacuuuagaaaaaucuauaa

SEQ ID NO: 832092 - RNA, 22 nt, Human
auuuccuuugcaaagacugugc

SEQ ID NO: 832093 - RNA, 22 nt, Human
cuuugaaagcucccaggacuua

SEQ ID NO: 832094 - RNA, 22 nt, Human
agcagccaauuggaggaugaag

SEQ ID NO: 832095 - RNA, 22 nt, Human
auuuugaaaagcauuugaguaa

SEQ ID NO: 832096 - RNA, 22 nt, Human
auugauggcggccucuccauau

SEQ ID NO: 832097 - RNA, 20 nt, Human
cagcaguggaugagaguuuu

SEQ ID NO: 832098 - RNA, 22 nt, Human
uguccucuuccagugcuccuuc

SEQ ID NO: 832099 - RNA, 22 nt, Human
auguguauacuugugcuuacuc

SEQ ID NO: 832100 - RNA, 22 nt, Human
caggagacaauggcuguggggc

SEQ ID NO: 832101 - RNA, 22 nt, Human
uaucuguuaugggcugaauugc

SEQ ID NO: 832102 - RNA, 22 nt, Human
caggcagggagcuggaaaggau

SEQ ID NO: 832103 - RNA, 22 nt, Human
aaaugcagguucuugagccaag

SEQ ID NO: 832104 - RNA, 22 nt, Human
ggggcacacuuuugguagauau

SEQ ID NO: 832105 - RNA, 22 nt, Human
cugggagcuagcucugagcuga

SEQ ID NO: 832106 - RNA, 22 nt, Human
agauauguuuguauauauuugu

SEQ ID NO: 832107 - RNA, 22 nt, Human
gccugugacucgucuugggcca

SEQ ID NO: 832108 - RNA, 22 nt, Human
aucugacaaccuauugacuuga

SEQ ID NO: 832109 - RNA, 22 nt, Human
uccuuccuggggucucugcugc

SEQ ID NO: 832110 - RNA, 22 nt, Human
agggcagagcacugaauuggga

SEQ ID NO: 832111 - RNA, 22 nt, Human
gcaaggcagcgcggaguagcua

SEQ ID NO: 832112 - RNA, 22 nt, Human
uuaggaaauuaugguuucagau

SEQ ID NO: 832113 - RNA, 19 nt, Human
agugaaauggaguauucaa

SEQ ID NO: 832114 - RNA, 22 nt, Human
ggcugccacgucgaggguccaa

SEQ ID NO: 832115 - RNA, 22 nt, Human
agggcuggcaagggauugaaau

SEQ ID NO: 832116 - RNA, 22 nt, Human
cagcaauaacucaaagccauuu

SEQ ID NO: 832117 - RNA, 22 nt, Human
gcacagaacuucucuuaguagg

SEQ ID NO: 832118 - RNA, 22 nt, Human
ugucuucagcaaaugccuuucu

SEQ ID NO: 832119 - RNA, 22 nt, Human
ugggaggaucgcuugagcccag

SEQ ID NO: 832120 - RNA, 22 nt, Human
cagugccucuuaagugucaccc

SEQ ID NO: 832121 - RNA, 22 nt, Human
uggcucaggccuacgacgccuu

SEQ ID NO: 832122 - RNA, 22 nt, Human
ucuggcucauacaagccugcaa

SEQ ID NO: 832123 - RNA, 22 nt, Human
gcucccaccuccagccugaguu

SEQ ID NO: 832124 - RNA, 22 nt, Human
uguguacaagaguguuuacugu

SEQ ID NO: 832125 - RNA, 22 nt, Human
agaggauguucuaggcacucau

SEQ ID NO: 832126 - RNA, 20 nt, Human
agugacagagacuguguggc

SEQ ID NO: 832127 - RNA, 22 nt, Human
uuagauaaauugcaacuugauu

SEQ ID NO: 832128 - RNA, 22 nt, Human
uguagcauguaaauugguuauu

SEQ ID NO: 832129 - RNA, 20 nt, Human
cuucuucauuaacccuacug

SEQ ID NO: 832130 - RNA, 22 nt, Human
gcagagccaggagagacccuug

SEQ ID NO: 832131 - RNA, 22 nt, Human
gaggagcugggcugagaggguc

SEQ ID NO: 832132 - RNA, 22 nt, Human
gaggccuggaauuccagccugg

SEQ ID NO: 832133 - RNA, 22 nt, Human
auucuucacaaauauauagaag

SEQ ID NO: 832134 - RNA, 22 nt, Human
uccucugcuggaagggcaagag

SEQ ID NO: 832135 - RNA, 22 nt, Human
agcagcauucucugguaugggg

SEQ ID NO: 832136 - RNA, 22 nt, Human
uguaucaaaccaaauuaauucu

SEQ ID NO: 832137 - RNA, 22 nt, Human
cgcagaagagguugucuagucc

SEQ ID NO: 832138 - RNA, 22 nt, Human
ucagggcacauucugcaguggc

SEQ ID NO: 832139 - RNA, 19 nt, Human
cugaagucuuuucagcugg

SEQ ID NO: 832140 - RNA, 20 nt, Human
aguaggggaaugcaagagca

SEQ ID NO: 832141 - RNA, 22 nt, Human
ucagcagucacauguuguccca

SEQ ID NO: 832142 - RNA, 22 nt, Human
cucugugauuuugugagccaga

SEQ ID NO: 832143 - RNA, 19 nt, Human
gcagcugcuugaaaagaaa

SEQ ID NO: 832144 - RNA, 22 nt, Human
aaugaacauauaaagagaucuu

SEQ ID NO: 832145 - RNA, 22 nt, Human
ugucacaaacauacauuauaga

SEQ ID NO: 832146 - RNA, 22 nt, Human
agacaaaggauuaaugaugaug

SEQ ID NO: 832147 - RNA, 22 nt, Human
ugugugcagccucugucuuugg

SEQ ID NO: 832148 - RNA, 22 nt, Human
ggaggugggcuaaggacucucu

SEQ ID NO: 832149 - RNA, 22 nt, Human
aauguaugagcgugaaagcacu

SEQ ID NO: 832150 - RNA, 22 nt, Human
aagauuuccuggauguaauucc

SEQ ID NO: 832151 - RNA, 22 nt, Human
cuguggugagcaacugacugaa

SEQ ID NO: 832152 - RNA, 22 nt, Human
cucugggcaaagaugccucauc

SEQ ID NO: 832153 - RNA, 22 nt, Human
ugaagcaggaaccagcagcauu

SEQ ID NO: 832154 - RNA, 22 nt, Human
uuuagaaauugcagagugggug

SEQ ID NO: 832155 - RNA, 22 nt, Human
gagacugauggggcucccagaa

SEQ ID NO: 832156 - RNA, 22 nt, Human
gcugagguggcugccuuaguaa

SEQ ID NO: 832157 - RNA, 22 nt, Human
cacauguacagaagcaggcugg

SEQ ID NO: 832158 - RNA, 22 nt, Human
uuugaacaagagcuucacauua

SEQ ID NO: 832159 - RNA, 21 nt, Human
gccuggcagguggaagggcuc

SEQ ID NO: 832160 - RNA, 22 nt, Human
ggcaggugcaccugagccaucu

SEQ ID NO: 832161 - RNA, 22 nt, Human
uugaagcaugguacuuguucaa

SEQ ID NO: 832162 - RNA, 22 nt, Human
guggcaggagagacacagccau

SEQ ID NO: 832163 - RNA, 22 nt, Human
ucugccugccagucugguccuc

SEQ ID NO: 832164 - RNA, 22 nt, Human
acaaauaugguacucggagaaa

SEQ ID NO: 832165 - RNA, 22 nt, Human
ucccagagacagagccuccucc

SEQ ID NO: 832166 - RNA, 22 nt, Human
caguagcagggauuauuuuagg

SEQ ID NO: 832167 - RNA, 22 nt, Human
cugcaggauucucccaguugga

SEQ ID NO: 832168 - RNA, 22 nt, Human
uaugcacaccuggguccuuguc

SEQ ID NO: 832169 - RNA, 22 nt, Human
aggcugccucgugagcucgcug

SEQ ID NO: 832170 - RNA, 22 nt, Human
augaacacauguacacauuucu

SEQ ID NO: 832171 - RNA, 22 nt, Human
accugaggcuguuagucuaggu

SEQ ID NO: 832172 - RNA, 20 nt, Human
cccuggccuguuucaugccc

SEQ ID NO: 832173 - RNA, 22 nt, Human
uuggcaguaaaagaaaaugcuu

SEQ ID NO: 832174 - RNA, 22 nt, Human
ggcagcuccucaaaaaauuaaa

SEQ ID NO: 832175 - RNA, 22 nt, Human
guccaugacugugacucacaug

SEQ ID NO: 832176 - RNA, 22 nt, Human
cccaggaggucgaagcugcagu

SEQ ID NO: 832177 - RNA, 22 nt, Human
cccagaaggucgaggcugcagu

SEQ ID NO: 832178 - RNA, 22 nt, Human
gauuuacagcuauacccaaugg

SEQ ID NO: 832179 - RNA, 22 nt, Human
auucuucacuguuucagaauga

SEQ ID NO: 832180 - RNA, 22 nt, Human
ugaaauagucuaaaaaaccaga

SEQ ID NO: 832181 - RNA, 22 nt, Human
agugaaauccuggucaacaggu

SEQ ID NO: 832182 - RNA, 22 nt, Human
uuugaagaccuuaucucuaaau

SEQ ID NO: 832183 - RNA, 22 nt, Human
uuagaaauauggugcugccgcc

SEQ ID NO: 832184 - RNA, 22 nt, Human
ccagugcacagccaggcaggug

SEQ ID NO: 832185 - RNA, 22 nt, Human
gggcuacagacaugcucuaagc

SEQ ID NO: 832186 - RNA, 22 nt, Human
cagaggcagaggucaucucugg

SEQ ID NO: 832187 - RNA, 22 nt, Human
ugcuuuggccacuagaauucag

SEQ ID NO: 832188 - RNA, 23 nt, Human
aggauccugguacaggagcagag

SEQ ID NO: 832189 - RNA, 22 nt, Human
uuuguaaaggccugaauuucag

SEQ ID NO: 832190 - RNA, 22 nt, Human
ucucagaguuuagagcugagcc

SEQ ID NO: 832191 - RNA, 22 nt, Human
agaggagguggugaugcuuuaa

SEQ ID NO: 832192 - RNA, 23 nt, Human
aaguucaagucacagccugucuu

SEQ ID NO: 832193 - RNA, 22 nt, Human
cacauacuuguguguacauaug

SEQ ID NO: 832194 - RNA, 22 nt, Human
cccaggagacugagcuguaacc

SEQ ID NO: 832195 - RNA, 22 nt, Human
ccagcccugccagagagagcug

SEQ ID NO: 832196 - RNA, 22 nt, Human
gcugcagcaagcccuccagggg

SEQ ID NO: 832197 - RNA, 22 nt, Human
ccuggcugcauuuugcuggaug

SEQ ID NO: 832198 - RNA, 22 nt, Human
uccaucagauucccuccugaga

SEQ ID NO: 832199 - RNA, 22 nt, Human
uuucaaagucaauaucauuacc

SEQ ID NO: 832200 - RNA, 22 nt, Human
cugaggaguuuggguuguucaa

SEQ ID NO: 832201 - RNA, 22 nt, Human
uaauauauuucugcuaagcuca

SEQ ID NO: 832202 - RNA, 22 nt, Human
uaggagggcccugaaaauggca

SEQ ID NO: 832203 - RNA, 22 nt, Human
caaugauucugcaacugugugc

SEQ ID NO: 832204 - RNA, 22 nt, Human
acauaauagcauuucuaauuug

SEQ ID NO: 832205 - RNA, 21 nt, Human
ucagggcagcugcucuucaga

SEQ ID NO: 832206 - RNA, 21 nt, Human
uggcccuggccacggcugcca

SEQ ID NO: 832207 - RNA, 22 nt, Human
ucuggccuauuucugucagauc

SEQ ID NO: 832208 - RNA, 22 nt, Human
agccaggaauuggacaacacau

SEQ ID NO: 832209 - RNA, 22 nt, Human
ggucucagcuggaguccuuggu

SEQ ID NO: 832210 - RNA, 22 nt, Human
cagaggccauauuucuucacuc

SEQ ID NO: 832211 - RNA, 22 nt, Human
aaguucaagucuccugaguaua

SEQ ID NO: 832212 - RNA, 23 nt, Human
agacccagagacuggcucugcuc

SEQ ID NO: 832213 - RNA, 22 nt, Human
ugugacagaucuuuaaauaaug

SEQ ID NO: 832214 - RNA, 22 nt, Human
ggcagcuuguccuggaggaugg

SEQ ID NO: 832215 - RNA, 22 nt, Human
aaugcuguauaucuuagcuaau

SEQ ID NO: 832216 - RNA, 22 nt, Human
uaucaauugggccaaaugguac

SEQ ID NO: 832217 - RNA, 22 nt, Human
uguggccucaaggcugcccuca

SEQ ID NO: 832218 - RNA, 22 nt, Human
caggggcucccugggugccagu

SEQ ID NO: 832219 - RNA, 22 nt, Human
ccugggagcuguggaaaggcug

SEQ ID NO: 832220 - RNA, 22 nt, Human
aagacaauuugauacuaguugc

SEQ ID NO: 832221 - RNA, 22 nt, Human
caggugggagcgaggagcuacu

SEQ ID NO: 832222 - RNA, 22 nt, Human
agaaaauauucauugagaggcu

SEQ ID NO: 832223 - RNA, 22 nt, Human
acaggcugccuaccaaguauca

SEQ ID NO: 832224 - RNA, 22 nt, Human
gccugggaagacuaagugggag

SEQ ID NO: 832225 - RNA, 22 nt, Human
ugaaagcucugucaucauuccu

SEQ ID NO: 832226 - RNA, 22 nt, Human
cugucagguuggucucagagcu

SEQ ID NO: 832227 - RNA, 22 nt, Human
gcucaagggaugggagugggug

SEQ ID NO: 832228 - RNA, 22 nt, Human
gcugcagccaaauucauuguca

SEQ ID NO: 832229 - RNA, 19 nt, Human
uguguguuuauauauguau

SEQ ID NO: 832230 - RNA, 22 nt, Human
ugccagcacaaguuaagagauc

SEQ ID NO: 832231 - RNA, 22 nt, Human
uggagggaacccaggcugcucu

SEQ ID NO: 832232 - RNA, 22 nt, Human
auacagaacaagccucaccucc

SEQ ID NO: 832233 - RNA, 22 nt, Human
uagugauuaaaggcagaauguu

SEQ ID NO: 832234 - RNA, 22 nt, Human
uggaggaugccauccaggauac

SEQ ID NO: 832235 - RNA, 22 nt, Human
uuggccuuaaccucucugugcc

SEQ ID NO: 832236 - RNA, 22 nt, Human
agccauugaauuuagugccuuu

SEQ ID NO: 832237 - RNA, 22 nt, Human
agaacagaugugggcagaccug

SEQ ID NO: 832238 - RNA, 22 nt, Human
uguagcacagagcuuugacacu

SEQ ID NO: 832239 - RNA, 22 nt, Human
cagcucugugggagcguaugug

SEQ ID NO: 832240 - RNA, 20 nt, Human
cuggcaggagcgagucuacc

SEQ ID NO: 832241 - RNA, 22 nt, Human
gacauucacaguuuccgauggu

SEQ ID NO: 832242 - RNA, 22 nt, Human
guauuuucaagagcaguaguau

SEQ ID NO: 832243 - RNA, 22 nt, Human
gagcccuccauggagccaggca

SEQ ID NO: 832244 - RNA, 22 nt, Human
uccagcagcccgaaggcccauc

SEQ ID NO: 832245 - RNA, 22 nt, Human
aaggcagagggcuggaucagag

SEQ ID NO: 832246 - RNA, 22 nt, Human
guggguggaucaccugagguca

SEQ ID NO: 832247 - RNA, 22 nt, Human
uuccucuccucccaccagguga

SEQ ID NO: 832248 - RNA, 19 nt, Human
ccagcagacacagcugccc

SEQ ID NO: 832249 - RNA, 22 nt, Human
ggcucaggggccaggccugucc

SEQ ID NO: 832250 - RNA, 21 nt, Human
auccuuagcacuuagaagagu

SEQ ID NO: 832251 - RNA, 22 nt, Human
ggcaccuggagguuuacuggau

SEQ ID NO: 832252 - RNA, 22 nt, Human
aggccucuucagggagcaugga

SEQ ID NO: 832253 - RNA, 22 nt, Human
cagggcaguuuuacuucucucu

SEQ ID NO: 832254 - RNA, 22 nt, Human
guggaaugaauagauuugcauu

SEQ ID NO: 832255 - RNA, 22 nt, Human
gcugcucuuuucagagaugaga

SEQ ID NO: 832256 - RNA, 22 nt, Human
ggugaggcccagugaucugugu

SEQ ID NO: 832257 - RNA, 22 nt, Human
gccaggaggggagaguguguca

SEQ ID NO: 832258 - RNA, 22 nt, Human
acagacagauuuugucugaugu

SEQ ID NO: 832259 - RNA, 23 nt, Human
uggcucugagcuuccugguggcc

SEQ ID NO: 832260 - RNA, 22 nt, Human
uugaagaaauuauuuuauauag

SEQ ID NO: 832261 - RNA, 22 nt, Human
gucaaguuaagauaaggucaug

SEQ ID NO: 832262 - RNA, 22 nt, Human
ugcagucuggauguccucagau

SEQ ID NO: 832263 - RNA, 19 nt, Human
aggaaagguggccuuagca

SEQ ID NO: 832264 - RNA, 22 nt, Human
auauaggcuaacaacuauugag

SEQ ID NO: 832265 - RNA, 22 nt, Human
ccuguucaagggaugauugacc

SEQ ID NO: 832266 - RNA, 22 nt, Human
uuccucucgcucuccggggccc

SEQ ID NO: 832267 - RNA, 22 nt, Human
uguaugcagggcuuguaugcag

SEQ ID NO: 832268 - RNA, 22 nt, Human
gccaggcuggugucacaacucu

SEQ ID NO: 832269 - RNA, 22 nt, Human
agggugcagaaggagccuagga

SEQ ID NO: 832270 - RNA, 22 nt, Human
cuggagccuucaccaggggaaa

SEQ ID NO: 832271 - RNA, 23 nt, Human
aggagccaggugcagcccuugug

SEQ ID NO: 832272 - RNA, 22 nt, Human
aaaggucaaaaucgugacauug

SEQ ID NO: 832273 - RNA, 22 nt, Human
acagcauugagagcuaaauuua

SEQ ID NO: 832274 - RNA, 22 nt, Human
guauacagauacuuagacgugc

SEQ ID NO: 832275 - RNA, 22 nt, Human
uucacauugugcagauuauggu

SEQ ID NO: 832276 - RNA, 22 nt, Human
ggguccaggucuucaggcagag

SEQ ID NO: 832277 - RNA, 22 nt, Human
uccagugguaguaaagaggucu

SEQ ID NO: 832278 - RNA, 22 nt, Human
cugccagcucgccacaaugaca

SEQ ID NO: 832279 - RNA, 22 nt, Human
cacuguguaagaagaugggcuu

SEQ ID NO: 832280 - RNA, 22 nt, Human
uaagauguuuugguuugauaag

SEQ ID NO: 832281 - RNA, 22 nt, Human
uuguaauuugcaaauguauugu

SEQ ID NO: 832282 - RNA, 22 nt, Human
guccucugaaguugugcaaugc

SEQ ID NO: 832283 - RNA, 22 nt, Human
acaaauauuuacugaauccacu

SEQ ID NO: 832284 - RNA, 22 nt, Human
ggcagcugugaagugccucaca

SEQ ID NO: 832285 - RNA, 22 nt, Human
ugaacaaacugcauucuucacu

SEQ ID NO: 832286 - RNA, 22 nt, Human
uauuuaguuaucuuucauaaaa

SEQ ID NO: 832287 - RNA, 22 nt, Human
ccugucugaaggcagggggaug

SEQ ID NO: 832288 - RNA, 22 nt, Human
auagaauagcauagaaaauuga

SEQ ID NO: 832289 - RNA, 22 nt, Human
auggccuggccagagcucugcu

SEQ ID NO: 832290 - RNA, 22 nt, Human
auuguaucuugucauuaugcau

SEQ ID NO: 832291 - RNA, 22 nt, Human
gucccucugugucccugcaguc

SEQ ID NO: 832292 - RNA, 22 nt, Human
aggcacuguggguguggccgga

SEQ ID NO: 832293 - RNA, 22 nt, Human
gggccacauugaagggugggua

SEQ ID NO: 832294 - RNA, 22 nt, Human
ccaucagcuccaguaucuucug

SEQ ID NO: 832295 - RNA, 22 nt, Human
ugaaagauugugauucaauaug

SEQ ID NO: 832296 - RNA, 22 nt, Human
aguuuuaugcaguguucugaua

SEQ ID NO: 832297 - RNA, 22 nt, Human
uuugacaggacuaacauauggc

SEQ ID NO: 832298 - RNA, 22 nt, Human
augagcugugggauuccagagg

SEQ ID NO: 832299 - RNA, 22 nt, Human
cacugagaggucucauuuccaa

SEQ ID NO: 832300 - RNA, 22 nt, Human
ugaaaugaucaguuugguuacu

SEQ ID NO: 832301 - RNA, 22 nt, Human
aacuuucagaauccuaugcauu

SEQ ID NO: 832302 - RNA, 22 nt, Human
aaggcagccucugccagccggg

SEQ ID NO: 832303 - RNA, 21 nt, Human
guguuuccuguuuauggcuug

SEQ ID NO: 832304 - RNA, 22 nt, Human
uacugaaaagccacaaggacca

SEQ ID NO: 832305 - RNA, 22 nt, Human
agaaugcuccagagcugaaaga

SEQ ID NO: 832306 - RNA, 22 nt, Human
agcagaaccacagcacuguuga

SEQ ID NO: 832307 - RNA, 22 nt, Human
cccaggagaauauaauguucuu

SEQ ID NO: 832308 - RNA, 22 nt, Human
cuucccugauaagagccucaga

SEQ ID NO: 832309 - RNA, 22 nt, Human
uaggcagcagugcuaugauucu

SEQ ID NO: 832310 - RNA, 22 nt, Human
gaagcagccacggggagacaga

SEQ ID NO: 832311 - RNA, 22 nt, Human
uggaggaugccuggggaggccu

SEQ ID NO: 832312 - RNA, 19 nt, Human
ugcugcuguccuugcaggg

SEQ ID NO: 832313 - RNA, 22 nt, Human
gauuuuauuagcccaaacuuug

SEQ ID NO: 832314 - RNA, 22 nt, Human
cugggccucaaucucagaguuu

SEQ ID NO: 832315 - RNA, 22 nt, Human
ccugucugagccagggugggca

SEQ ID NO: 832316 - RNA, 22 nt, Human
aaguaugugauacauguuaauu

SEQ ID NO: 832317 - RNA, 22 nt, Human
uuucaguggguuuauuucaugu

SEQ ID NO: 832318 - RNA, 22 nt, Human
augcuacagaguuugaauaugu

SEQ ID NO: 832319 - RNA, 22 nt, Human
cugugucggacgugggcagcag

SEQ ID NO: 832320 - RNA, 22 nt, Human
ugaaggaaaugacggcagaaga

SEQ ID NO: 832321 - RNA, 22 nt, Human
ugguggccaauucacagggcuc

SEQ ID NO: 832322 - RNA, 22 nt, Human
aaaucaguuggaacacaagcag

SEQ ID NO: 832323 - RNA, 20 nt, Human
gagauggcuaagugcugaac

SEQ ID NO: 832324 - RNA, 22 nt, Human
ggaaaaggccacagggacacau

SEQ ID NO: 832325 - RNA, 20 nt, Human
cucugcagcaaggccugggu

SEQ ID NO: 832326 - RNA, 22 nt, Human
ugccuugcgggcguuucuguug

SEQ ID NO: 832327 - RNA, 22 nt, Human
cugggagcggcugucacugguu

SEQ ID NO: 832328 - RNA, 22 nt, Human
gcagcugccgugagcucacgcc

SEQ ID NO: 832329 - RNA, 22 nt, Human
cugcuguguuggcauuggauag

SEQ ID NO: 832330 - RNA, 22 nt, Human
cucugaaagaguuuaguauuau

SEQ ID NO: 832331 - RNA, 22 nt, Human
aagcagaggguauggccagguu

SEQ ID NO: 832332 - RNA, 20 nt, Human
gggcaguucaaugccacucu

SEQ ID NO: 832333 - RNA, 22 nt, Human
uugauccaguugaaagugauga

SEQ ID NO: 832334 - RNA, 22 nt, Human
aagcccaguuucacacugagac

SEQ ID NO: 832335 - RNA, 22 nt, Human
uguacauugucacucaucaagu

SEQ ID NO: 832336 - RNA, 22 nt, Human
accagcucagaagccagaaaga

SEQ ID NO: 832337 - RNA, 22 nt, Human
gggagggaaagcuugaucuguc

SEQ ID NO: 832338 - RNA, 23 nt, Human
uggcagcuguguaagagaaagca

SEQ ID NO: 832339 - RNA, 19 nt, Human
uggcagggagugauauuag

SEQ ID NO: 832340 - RNA, 22 nt, Human
cgcuggccauagccuccugugu

SEQ ID NO: 832341 - RNA, 22 nt, Human
aauuucagagguagagauucua

SEQ ID NO: 832342 - RNA, 22 nt, Human
acugcagccuuugggcucauaa

SEQ ID NO: 832343 - RNA, 22 nt, Human
cuacccaggcuggagugcagua

SEQ ID NO: 832344 - RNA, 22 nt, Human
ccuguucaugaaacugcuuucc

SEQ ID NO: 832345 - RNA, 22 nt, Human
aggugagguuugggagguguca

SEQ ID NO: 832346 - RNA, 22 nt, Human
uggcuggggccacaguuuuccu

SEQ ID NO: 832347 - RNA, 22 nt, Human
agauuucagaugcucggcaguu

SEQ ID NO: 832348 - RNA, 22 nt, Human
ccugugcccucagccuggcucu

SEQ ID NO: 832349 - RNA, 22 nt, Human
agaaaagggcaggagggauaca

SEQ ID NO: 832350 - RNA, 22 nt, Human
uuuccucuuccgagggggaggc

SEQ ID NO: 832351 - RNA, 22 nt, Human
caggcacuagcagaaugaggcu

SEQ ID NO: 832352 - RNA, 22 nt, Human
cagggcugagaauuuagagaca

SEQ ID NO: 832353 - RNA, 17 nt, Human
cucuccuuccucugagg

SEQ ID NO: 832354 - RNA, 22 nt, Human
gggcagggguagcauuccaagu

SEQ ID NO: 832355 - RNA, 22 nt, Human
gaagaauccuguccucuuuagg

SEQ ID NO: 832356 - RNA, 22 nt, Human
uuucaagcauaacugggaagag

SEQ ID NO: 832357 - RNA, 22 nt, Human
ggcuuccuggggccuccugcaa

SEQ ID NO: 832358 - RNA, 22 nt, Human
ggugccagccuagugcaguggu

SEQ ID NO: 832359 - RNA, 22 nt, Human
acauuucuuccacaugcugcug

SEQ ID NO: 832360 - RNA, 22 nt, Human
ggcugccaggagggaggccagu

SEQ ID NO: 832361 - RNA, 19 nt, Human
ugcuuccucaccaucuccc

SEQ ID NO: 832362 - RNA, 22 nt, Human
aacaacugaaaagcuuuuucug

SEQ ID NO: 832363 - RNA, 22 nt, Human
ugcucuccggcuuccguggccu

SEQ ID NO: 832364 - RNA, 22 nt, Human
auauucuugugauuauaaagua

SEQ ID NO: 832365 - RNA, 22 nt, Human
gugucccaauguucaggacggc

SEQ ID NO: 832366 - RNA, 22 nt, Human
ggaaagagcuaaaagggugaga

SEQ ID NO: 832367 - RNA, 22 nt, Human
agaggaugguugaggaagaccu

SEQ ID NO: 832368 - RNA, 22 nt, Human
ugggggugaaagucuggacagu

SEQ ID NO: 832369 - RNA, 22 nt, Human
ggcagcaucucuggcagcagcu

SEQ ID NO: 832370 - RNA, 22 nt, Human
cagcucaaguuucccaggucag

SEQ ID NO: 832371 - RNA, 22 nt, Human
aggugauguccacagcuugcag

SEQ ID NO: 832372 - RNA, 18 nt, Human
acugugguuuauguguag

SEQ ID NO: 832373 - RNA, 22 nt, Human
aggcagcaaagaaaugaugcug

SEQ ID NO: 832374 - RNA, 20 nt, Human
uccaagggcagcagaaucag

SEQ ID NO: 832375 - RNA, 22 nt, Human
gccugcagaggugcugcuagcu

SEQ ID NO: 832376 - RNA, 22 nt, Human
uugucugaaagaucauuacauu

SEQ ID NO: 832377 - RNA, 23 nt, Human
ugaugggaaggaacgacuaccac

SEQ ID NO: 832378 - RNA, 22 nt, Human
acucugccuuucagcagaugaa

SEQ ID NO: 832379 - RNA, 20 nt, Human
gcagcugaaaguaugacacc

SEQ ID NO: 832380 - RNA, 22 nt, Human
uggcagcuugaaugcagucuuu

SEQ ID NO: 832381 - RNA, 22 nt, Human
gagcugccuguugcauagcaac

SEQ ID NO: 832382 - RNA, 22 nt, Human
gcauacagagaggauguggcau

SEQ ID NO: 832383 - RNA, 22 nt, Human
agagcagauggccagggggccu

SEQ ID NO: 832384 - RNA, 22 nt, Human
uuacagauggaucuagcaaaau

SEQ ID NO: 832385 - RNA, 22 nt, Human
ugaacacauaaggcuuuccugu

SEQ ID NO: 832386 - RNA, 22 nt, Human
ccaaaguccauaguuuacauua

SEQ ID NO: 832387 - RNA, 21 nt, Human
uuucacaaaaguaugugacaa

SEQ ID NO: 832388 - RNA, 22 nt, Human
aauaugcauguauacaugugua

SEQ ID NO: 832389 - RNA, 22 nt, Human
uucagagccacuucaagucuaa

SEQ ID NO: 832390 - RNA, 22 nt, Human
aaauaguuagcccugcauauau

SEQ ID NO: 832391 - RNA, 22 nt, Human
cagggaggaugggcuguuuugc

SEQ ID NO: 832392 - RNA, 22 nt, Human
uuuaggcaagggcaagauuauc

SEQ ID NO: 832393 - RNA, 22 nt, Human
ccaggcuggauuuugcaguuca

SEQ ID NO: 832394 - RNA, 22 nt, Human
aaagcucacaguaauacaaggc

SEQ ID NO: 832395 - RNA, 22 nt, Human
agagcaggcauaaagcuuugaa

SEQ ID NO: 832396 - RNA, 22 nt, Human
acagauugaucuugagaauuau

SEQ ID NO: 832397 - RNA, 22 nt, Human
uucuucaaaauccagcaugauu

SEQ ID NO: 832398 - RNA, 22 nt, Human
ucacauuuuccuugguaucugu

SEQ ID NO: 832399 - RNA, 22 nt, Human
cagggccaagccccuuuggcug

SEQ ID NO: 832400 - RNA, 22 nt, Human
ggggagugacgcagggccauag

SEQ ID NO: 832401 - RNA, 22 nt, Human
caggguuucaccauguuagcag

SEQ ID NO: 832402 - RNA, 22 nt, Human
caucagaagaaagacaaaugau

SEQ ID NO: 832403 - RNA, 18 nt, Human
uaaaugcauguuaauaac

SEQ ID NO: 832404 - RNA, 22 nt, Human
ucccaggaaaacacucgaggac

SEQ ID NO: 832405 - RNA, 22 nt, Human
cauaucccauuggccaggacau

SEQ ID NO: 832406 - RNA, 22 nt, Human
cucugagcuccuggaagcgugc

SEQ ID NO: 832407 - RNA, 21 nt, Human
caaagccaggcaacucucucc

SEQ ID NO: 832408 - RNA, 22 nt, Human
cugaaggacacgugaggagcca

SEQ ID NO: 832409 - RNA, 23 nt, Human
agcaauaagaagggauacaugug

SEQ ID NO: 832410 - RNA, 22 nt, Human
uuuagaaguucacacauuuaaa

SEQ ID NO: 832411 - RNA, 22 nt, Human
cuuguucaguugccucuccugc

SEQ ID NO: 832412 - RNA, 22 nt, Human
agccuggauccauguggcuacc

SEQ ID NO: 832413 - RNA, 22 nt, Human
caguucacacugugcuaucugc

SEQ ID NO: 832414 - RNA, 22 nt, Human
agcauugccugccuauugcuaa

SEQ ID NO: 832415 - RNA, 22 nt, Human
cauuuacagcagacugaugaaa

SEQ ID NO: 832416 - RNA, 22 nt, Human
uguacaugugucuguauaucuu

SEQ ID NO: 832417 - RNA, 22 nt, Human
aagauuuccuucaguagagcua

SEQ ID NO: 832418 - RNA, 22 nt, Human
ucaguaaaugagcaaaaauuuc

SEQ ID NO: 832419 - RNA, 22 nt, Human
gcccagcugucuggcagggaug

SEQ ID NO: 832420 - RNA, 22 nt, Human
cccaggagagagacuugaaucu

SEQ ID NO: 832421 - RNA, 22 nt, Human
auccaaagcccuaaguuaacug

SEQ ID NO: 832422 - RNA, 22 nt, Human
ugggcagauguggcucuccuug

SEQ ID NO: 832423 - RNA, 22 nt, Human
agguccagcuguugcagccucc

SEQ ID NO: 832424 - RNA, 22 nt, Human
acgcagaagggccuggcgugcc

SEQ ID NO: 832425 - RNA, 22 nt, Human
aacauuggauauuuauuaaaag

SEQ ID NO: 832426 - RNA, 22 nt, Human
uuucuguaaguggcaaauaaug

SEQ ID NO: 832427 - RNA, 22 nt, Human
acaggggaauuuacugucauua

SEQ ID NO: 832428 - RNA, 22 nt, Human
uagacagauuuaaaggaaugga

SEQ ID NO: 832429 - RNA, 22 nt, Human
gcccugugcgacucuagagguu

SEQ ID NO: 832430 - RNA, 22 nt, Human
uuuccucuuuguaccuugacua

SEQ ID NO: 832431 - RNA, 22 nt, Human
ugucaccagcugcuccucagga

SEQ ID NO: 832432 - RNA, 23 nt, Human
gaggcacucaggaaaugugagug

SEQ ID NO: 832433 - RNA, 22 nt, Human
agccucucuccagcuuggcaga

SEQ ID NO: 832434 - RNA, 22 nt, Human
gugugccaccagucaaggugaa

SEQ ID NO: 832435 - RNA, 22 nt, Human
uggugugggcguggcaggcaag

SEQ ID NO: 832436 - RNA, 22 nt, Human
gaggccuggucuaugagauguu

SEQ ID NO: 832437 - RNA, 22 nt, Human
gucagcugucuccccagagugg

SEQ ID NO: 832438 - RNA, 22 nt, Human
augcugucgaaaccaaacaucu

SEQ ID NO: 832439 - RNA, 22 nt, Human
agccuccuggaguuucugggau

SEQ ID NO: 832440 - RNA, 21 nt, Human
uuuuauugaugaauggccacu

SEQ ID NO: 832441 - RNA, 22 nt, Human
ccaaggcuggagugcaguggcg

SEQ ID NO: 832442 - RNA, 19 nt, Human
ugcucauggggacuucucc

SEQ ID NO: 832443 - RNA, 22 nt, Human
aagauauucaaagauuuauuag

SEQ ID NO: 832444 - RNA, 22 nt, Human
uuugaaguaccugguucugacu

SEQ ID NO: 832445 - RNA, 22 nt, Human
guggauggauugaggcaguggg

SEQ ID NO: 832446 - RNA, 16 nt, Human
uucugucacguacggc

SEQ ID NO: 832447 - RNA, 22 nt, Human
caagaacauugugaucacuuca

SEQ ID NO: 832448 - RNA, 22 nt, Human
gaggcacugcaguacagugacu

SEQ ID NO: 832449 - RNA, 22 nt, Human
gcugcccauuccacuggauggu

SEQ ID NO: 832450 - RNA, 20 nt, Human
guggccuguccuguuguggg

SEQ ID NO: 832451 - RNA, 22 nt, Human
aagacauuuauuugaaucaauu

SEQ ID NO: 832452 - RNA, 22 nt, Human
caagagcucagaaacccuugcu

SEQ ID NO: 832453 - RNA, 22 nt, Human
ccuggagcccaaggcagugaga

SEQ ID NO: 832454 - RNA, 22 nt, Human
uucuucuccgaggagggcuggu

SEQ ID NO: 832455 - RNA, 22 nt, Human
uugaauaauauguucaggagga

SEQ ID NO: 832456 - RNA, 22 nt, Human
acagcagcacuauugacauuuu

SEQ ID NO: 832457 - RNA, 22 nt, Human
ugggaggagcccucugggaagg

SEQ ID NO: 832458 - RNA, 22 nt, Human
agccuggaauuaaggaaaugca

SEQ ID NO: 832459 - RNA, 22 nt, Human
uccaaaaaacguuugaauaguu

SEQ ID NO: 832460 - RNA, 22 nt, Human
ucagagcuuuggagaccaggaa

SEQ ID NO: 832461 - RNA, 22 nt, Human
agcucugggccaggaacccuaa

SEQ ID NO: 832462 - RNA, 22 nt, Human
aaaguuacuaucacaaugaaau

SEQ ID NO: 832463 - RNA, 22 nt, Human
ggagugacucucggggccacua

SEQ ID NO: 832464 - RNA, 22 nt, Human
uacaaagccugguagauaucug

SEQ ID NO: 832465 - RNA, 22 nt, Human
ucauugcaccccagucccagcu

SEQ ID NO: 832466 - RNA, 22 nt, Human
uggccuggggaccugugagacc

SEQ ID NO: 832467 - RNA, 22 nt, Human
uuuaggcacagggaguugguuu

SEQ ID NO: 832468 - RNA, 22 nt, Human
ccuccaggcugaauaucuagaa

SEQ ID NO: 832469 - RNA, 22 nt, Human
gcaaggcugagcacauuugcau

SEQ ID NO: 832470 - RNA, 22 nt, Human
ugcuggcucaguuugcagacuc

SEQ ID NO: 832471 - RNA, 22 nt, Human
acugggccggugcagaguaguu

SEQ ID NO: 832472 - RNA, 22 nt, Human
agaauguagucuuggagauuua

SEQ ID NO: 832473 - RNA, 22 nt, Human
aggguccaucaaggacugcaca

SEQ ID NO: 832474 - RNA, 22 nt, Human
ggagaaggugcuggucacugug

SEQ ID NO: 832475 - RNA, 22 nt, Human
augcuacagcaucucucaucag

SEQ ID NO: 832476 - RNA, 22 nt, Human
aucuuucagggccauuuguauu

SEQ ID NO: 832477 - RNA, 22 nt, Human
uuggaucauggaaugucugcuu

SEQ ID NO: 832478 - RNA, 22 nt, Human
gcaggauggugcccuuucugcc

SEQ ID NO: 832479 - RNA, 22 nt, Human
ugugaggagaggcccagcuccc

SEQ ID NO: 832480 - RNA, 22 nt, Human
gggcauggugaugugcaccugu

SEQ ID NO: 832481 - RNA, 22 nt, Human
agggccugagcuggcugaccuc

SEQ ID NO: 832482 - RNA, 22 nt, Human
auaggcuuauauaaaaacaucu

SEQ ID NO: 832483 - RNA, 22 nt, Human
agggcagauggaacuuccccga

SEQ ID NO: 832484 - RNA, 22 nt, Human
gcugugugaaaacugggccugg

SEQ ID NO: 832485 - RNA, 22 nt, Human
auucuucagcaggggacacuau

SEQ ID NO: 832486 - RNA, 22 nt, Human
aacaugauggggaagaacaaga

SEQ ID NO: 832487 - RNA, 22 nt, Human
ucaggggaaaucucucagcgaa

SEQ ID NO: 832488 - RNA, 22 nt, Human
uguagaaacuacacaugcaaca

SEQ ID NO: 832489 - RNA, 22 nt, Human
auguauuucuauguagugaaga

SEQ ID NO: 832490 - RNA, 22 nt, Human
aaauguauccuacuuccugagu

SEQ ID NO: 832491 - RNA, 22 nt, Human
guggcaggucccauuggagcag

SEQ ID NO: 832492 - RNA, 22 nt, Human
aggccugagguuccugugcuca

SEQ ID NO: 832493 - RNA, 18 nt, Human
cuucagugacagucuggc

SEQ ID NO: 832494 - RNA, 22 nt, Human
uuaauaaacaggugcagcugaa

SEQ ID NO: 832495 - RNA, 22 nt, Human
augcuuuaaacuauaaauccac

SEQ ID NO: 832496 - RNA, 22 nt, Human
ucccaaagcuacucuucugacu

SEQ ID NO: 832497 - RNA, 22 nt, Human
gaaggggacuggcagcugcaga

SEQ ID NO: 832498 - RNA, 21 nt, Human
aaauggauagggcaauggaag

SEQ ID NO: 832499 - RNA, 22 nt, Human
ugucucagaguaucccugaacu

SEQ ID NO: 832500 - RNA, 22 nt, Human
gcagcccagguguagcucuuug

SEQ ID NO: 832501 - RNA, 22 nt, Human
cugugaggcccugggugcugga

SEQ ID NO: 832502 - RNA, 22 nt, Human
cacagcugccauggcugcacuu

SEQ ID NO: 832503 - RNA, 22 nt, Human
cacacaggagagugcuggaggu

SEQ ID NO: 832504 - RNA, 20 nt, Human
gccuguccugagugucaugg

SEQ ID NO: 832505 - RNA, 22 nt, Human
ugaaaugacaaagguuuuucuu

SEQ ID NO: 832506 - RNA, 20 nt, Human
gcaaauggaucccacaagcc

SEQ ID NO: 832507 - RNA, 22 nt, Human
cuguccuguagcuccaucaguc

SEQ ID NO: 832508 - RNA, 22 nt, Human
agcucccagcuccuuugagaga

SEQ ID NO: 832509 - RNA, 20 nt, Human
ggcugcugugggcagagagg

SEQ ID NO: 832510 - RNA, 22 nt, Human
ucacaaaagcuuuugaauuugg

SEQ ID NO: 832511 - RNA, 22 nt, Human
caaagauuuuagaauuugcaau

SEQ ID NO: 832512 - RNA, 22 nt, Human
accuuaaaacugacacauggag

SEQ ID NO: 832513 - RNA, 22 nt, Human
ucagcagggaggcucugugccc

SEQ ID NO: 832514 - RNA, 22 nt, Human
uuuuuccuagcgauuugucagc

SEQ ID NO: 832515 - RNA, 22 nt, Human
uuuuccagagcugucucuugca

SEQ ID NO: 832516 - RNA, 22 nt, Human
uggagcauauucuggagcuugg

SEQ ID NO: 832517 - RNA, 22 nt, Human
auuuuuaugacaaaccauccuc

SEQ ID NO: 832518 - RNA, 22 nt, Human
acaguguccuuguggucccugu

SEQ ID NO: 832519 - RNA, 22 nt, Human
gaggccugggagccuguccucc

SEQ ID NO: 832520 - RNA, 22 nt, Human
uaacagaaauaguaggugaggg

SEQ ID NO: 832521 - RNA, 22 nt, Human
ucaaguuucucucagauuaugg

SEQ ID NO: 832522 - RNA, 22 nt, Human
uaaguccuauuccaggucucuc

SEQ ID NO: 832523 - RNA, 22 nt, Human
ccagccagucccgcaugaccgc

SEQ ID NO: 832524 - RNA, 22 nt, Human
ucuguucauguugggcuuuucc

SEQ ID NO: 832525 - RNA, 18 nt, Human
cugcccagagcauuucau

SEQ ID NO: 832526 - RNA, 22 nt, Human
gggaaggagccugcuugcuaga

SEQ ID NO: 832527 - RNA, 22 nt, Human
ggagccaguauuuaguggucuu

SEQ ID NO: 832528 - RNA, 22 nt, Human
agccaggaaugcaugcucugcu

SEQ ID NO: 832529 - RNA, 22 nt, Human
aaagcugcugccaaucaggcuu

SEQ ID NO: 832530 - RNA, 22 nt, Human
gcagcugcagguggucccaugc

SEQ ID NO: 832531 - RNA, 18 nt, Human
aagaggaggaaacccagg

SEQ ID NO: 832532 - RNA, 22 nt, Human
cccaggaggaggaaaaagcucg

SEQ ID NO: 832533 - RNA, 22 nt, Human
ccagcucugccaagcgucagcu

SEQ ID NO: 832534 - RNA, 22 nt, Human
cuagaaaucucuguuuacauca

SEQ ID NO: 832535 - RNA, 22 nt, Human
aucuuugaagaggacuugaagu

SEQ ID NO: 832536 - RNA, 22 nt, Human
ugucagaugcgauaaacuagug

SEQ ID NO: 832537 - RNA, 22 nt, Human
uuccaggagacuuccagaaaua

SEQ ID NO: 832538 - RNA, 22 nt, Human
caggcacugugcugagcucugc

SEQ ID NO: 832539 - RNA, 22 nt, Human
cgucuuccucuuacgaugcgcu

SEQ ID NO: 832540 - RNA, 22 nt, Human
aggcagggucuugcuauguugc

SEQ ID NO: 832541 - RNA, 22 nt, Human
auuucaacagaguuugaaggca

SEQ ID NO: 832542 - RNA, 22 nt, Human
aaaguggucaccuucucauuuc

SEQ ID NO: 832543 - RNA, 22 nt, Human
cagcagaggaaagcaaaucuaa

SEQ ID NO: 832544 - RNA, 20 nt, Human
uaugaagauaugugaacagc

SEQ ID NO: 832545 - RNA, 22 nt, Human
uauuaaagggaaguuaugcaug

SEQ ID NO: 832546 - RNA, 22 nt, Human
cuuuauguccuugaagaguugu

SEQ ID NO: 832547 - RNA, 22 nt, Human
gggaaccagccgcuuccgccuc

SEQ ID NO: 832548 - RNA, 22 nt, Human
cuggggcccaucgagggcugag

SEQ ID NO: 832549 - RNA, 21 nt, Human
ggucagggggugccuccaggu

SEQ ID NO: 832550 - RNA, 22 nt, Human
ucuguucagaaauggaagugcc

SEQ ID NO: 832551 - RNA, 23 nt, Human
uguagcaucucuuauuucucagc

SEQ ID NO: 832552 - RNA, 22 nt, Human
gcacugaaugccaaaguguagg

SEQ ID NO: 832553 - RNA, 22 nt, Human
ugcaggggcuugucugggccug

SEQ ID NO: 832554 - RNA, 22 nt, Human
cugggcacuugcucacagcucu

SEQ ID NO: 832555 - RNA, 22 nt, Human
gaaagccagagagaaagggcuc

SEQ ID NO: 832556 - RNA, 22 nt, Human
ucugccuuuucacugccacuaa

SEQ ID NO: 832557 - RNA, 21 nt, Human
cuacuuaaguaggggauuagg

SEQ ID NO: 832558 - RNA, 22 nt, Human
gggcugggcaugguguucccuc

SEQ ID NO: 832559 - RNA, 22 nt, Human
ggugacugguuuaucuggcagu

SEQ ID NO: 832560 - RNA, 22 nt, Human
ugaaaucuuuaguuucuguccc

SEQ ID NO: 832561 - RNA, 22 nt, Human
ugaaacauuugaugaucuuugg

SEQ ID NO: 832562 - RNA, 23 nt, Human
aggugccaacugagagcugagag

SEQ ID NO: 832563 - RNA, 22 nt, Human
ccugcugugaccggggagcagg

SEQ ID NO: 832564 - RNA, 18 nt, Human
aggagccuuugcacugga

SEQ ID NO: 832565 - RNA, 22 nt, Human
cccagcauuucugggcugcacu

SEQ ID NO: 832566 - RNA, 22 nt, Human
ucuucagauugcacugagcaag

SEQ ID NO: 832567 - RNA, 22 nt, Human
caggagggcccgagacucuucc

SEQ ID NO: 832568 - RNA, 22 nt, Human
gauauguauugaaugaucauuu

SEQ ID NO: 832569 - RNA, 22 nt, Human
cauuuaguuauacuaaaacauu

SEQ ID NO: 832570 - RNA, 22 nt, Human
accaggaggccuggagcacaaa

SEQ ID NO: 832571 - RNA, 22 nt, Human
uggcucaguuucugcccagcug

SEQ ID NO: 832572 - RNA, 22 nt, Human
ggcaguggcuccucucuacucc

SEQ ID NO: 832573 - RNA, 23 nt, Human
ugaaacauuuaggguagaauuuc

SEQ ID NO: 832574 - RNA, 22 nt, Human
ugcugcugauggcaccuaggca

SEQ ID NO: 832575 - RNA, 22 nt, Human
ccaaagucagugcucagucguc

SEQ ID NO: 832576 - RNA, 22 nt, Human
ccuccagggcagacggggagca

SEQ ID NO: 832577 - RNA, 22 nt, Human
ugcaaacaggagaguaaguaua

SEQ ID NO: 832578 - RNA, 20 nt, Human
ucuggcucuuugcuccuccc

SEQ ID NO: 832579 - RNA, 22 nt, Human
uguccuuagggauauaaaauau

SEQ ID NO: 832580 - RNA, 22 nt, Human
aggagucagauaugggaaaguu

SEQ ID NO: 832581 - RNA, 22 nt, Human
uauuccaguucaccuuuucauc

SEQ ID NO: 832582 - RNA, 19 nt, Human
ccugggagucagcugaagg

SEQ ID NO: 832583 - RNA, 22 nt, Human
agagcuguucaacguagcaaug

SEQ ID NO: 832584 - RNA, 17 nt, Human
ugaaacaccaagacugu

SEQ ID NO: 832585 - RNA, 19 nt, Human
ucaaggcucccugagggau

SEQ ID NO: 832586 - RNA, 22 nt, Human
aaauggaucuguggaauacauu

SEQ ID NO: 832587 - RNA, 22 nt, Human
caggcaggagccagggauucca

SEQ ID NO: 832588 - RNA, 22 nt, Human
gcagggcaaugaucccgagagg

SEQ ID NO: 832589 - RNA, 22 nt, Human
ucaggccacggcucacugagac

SEQ ID NO: 832590 - RNA, 18 nt, Human
aaggcuucaaagaguaga

SEQ ID NO: 832591 - RNA, 22 nt, Human
uugguccacugugaaauuggga

SEQ ID NO: 832592 - RNA, 22 nt, Human
ucauauaaguuuaaaacuaucu

SEQ ID NO: 832593 - RNA, 22 nt, Human
ggucucagaucuuuauuaaggc

SEQ ID NO: 832594 - RNA, 22 nt, Human
auuucaguagaaaaucuugauu

SEQ ID NO: 832595 - RNA, 22 nt, Human
cagccaggagccucugcaacua

SEQ ID NO: 832596 - RNA, 22 nt, Human
acuggcaguagagggagcgcau

SEQ ID NO: 832597 - RNA, 22 nt, Human
uccaggagauucauuaggucau

SEQ ID NO: 832598 - RNA, 22 nt, Human
aaaaagauguccugaaguuuag

SEQ ID NO: 832599 - RNA, 22 nt, Human
gccaggaggucagccccucaac

SEQ ID NO: 832600 - RNA, 22 nt, Human
gauacaaauucaugucugaauu

SEQ ID NO: 832601 - RNA, 20 nt, Human
acuggaucuggcuggagcug

SEQ ID NO: 832602 - RNA, 22 nt, Human
uauacuuuccugcaacuuugau

SEQ ID NO: 832603 - RNA, 22 nt, Human
accagagcuggcagaguaucaa

SEQ ID NO: 832604 - RNA, 20 nt, Human
aggcacuguugucuguaucc

SEQ ID NO: 832605 - RNA, 22 nt, Human
aggggcuggaguucgagguuac

SEQ ID NO: 832606 - RNA, 22 nt, Human
ggggugggcgugcagggacacc

SEQ ID NO: 832607 - RNA, 22 nt, Human
uuuccucuaaacgcauuugcuu

SEQ ID NO: 832608 - RNA, 22 nt, Human
acuggcugaaguuuacuuuuug

SEQ ID NO: 832609 - RNA, 22 nt, Human
caaggagaaaacggcuucugaa

SEQ ID NO: 832610 - RNA, 22 nt, Human
cucuucuugaaagaggaauuca

SEQ ID NO: 832611 - RNA, 22 nt, Human
augguguagcaugugauaugac

SEQ ID NO: 832612 - RNA, 22 nt, Human
aggcagcuucugauuagcagcg

SEQ ID NO: 832613 - RNA, 22 nt, Human
caggcugcagaggccuuucaug

SEQ ID NO: 832614 - RNA, 22 nt, Human
uggugcaagucucugaggaggg

SEQ ID NO: 832615 - RNA, 22 nt, Human
ugcagggcacacgcacgggugu

SEQ ID NO: 832616 - RNA, 22 nt, Human
uuagauaauguagagauaugag

SEQ ID NO: 832617 - RNA, 22 nt, Human
uggaagcacuuggguuuuguug

SEQ ID NO: 832618 - RNA, 22 nt, Human
cuggagccccagacagggagag

SEQ ID NO: 832619 - RNA, 22 nt, Human
uucacagaguuauuuuuaugcu

SEQ ID NO: 832620 - RNA, 22 nt, Human
gcaaauauucaagacuuuucca

SEQ ID NO: 832621 - RNA, 18 nt, Human
uggcagagugucuguucu

SEQ ID NO: 832622 - RNA, 22 nt, Human
gagcagggagacaacucuggug

SEQ ID NO: 832623 - RNA, 22 nt, Human
ccacagagacagagcccagggu

SEQ ID NO: 832624 - RNA, 22 nt, Human
acagcagccugcagcccugugu

SEQ ID NO: 832625 - RNA, 22 nt, Human
ucacaauacucacucaauggcu

SEQ ID NO: 832626 - RNA, 22 nt, Human
aggggagcuaacaccagagccc

SEQ ID NO: 832627 - RNA, 22 nt, Human
ccaggaguggcuggugaccuuc

SEQ ID NO: 832628 - RNA, 22 nt, Human
ggaugcaggggcagcagagccu

SEQ ID NO: 832629 - RNA, 22 nt, Human
gcuuagucaauuauaaauaggc

SEQ ID NO: 832630 - RNA, 23 nt, Human
cuccccaguguccucaugcaucu

SEQ ID NO: 832631 - RNA, 22 nt, Human
cauuugcagagggugacacucu

SEQ ID NO: 832632 - RNA, 22 nt, Human
caaguaaagaaucacauuucuu

SEQ ID NO: 832633 - RNA, 22 nt, Human
cuugcugucccuugguaugaac

SEQ ID NO: 832634 - RNA, 17 nt, Human
aauagcugcucagagag

SEQ ID NO: 832635 - RNA, 22 nt, Human
acaauucuggguauuuauauag

SEQ ID NO: 832636 - RNA, 22 nt, Human
auaacagagagcuacugaacug

SEQ ID NO: 832637 - RNA, 22 nt, Human
ucccaggaauugaagccagugu

SEQ ID NO: 832638 - RNA, 22 nt, Human
agcuggguguguaucagauaaa

SEQ ID NO: 832639 - RNA, 22 nt, Human
caguggaggcucaagugugcuu

SEQ ID NO: 832640 - RNA, 22 nt, Human
gcagugcuaaguagcuggccca

SEQ ID NO: 832641 - RNA, 22 nt, Human
ugcaggugaaaauuaugaggau

SEQ ID NO: 832642 - RNA, 22 nt, Human
agaaaguucugugaguuguuca

SEQ ID NO: 832643 - RNA, 22 nt, Human
cccucccaggaguggccagaga

SEQ ID NO: 832644 - RNA, 22 nt, Human
gcugucaguuuuacccacagac

SEQ ID NO: 832645 - RNA, 22 nt, Human
ucuggcucccuggagcuccaca

SEQ ID NO: 832646 - RNA, 21 nt, Human
gagcauggcuuacaucagcag

SEQ ID NO: 832647 - RNA, 22 nt, Human
uccuucagggggccgccugcac

SEQ ID NO: 832648 - RNA, 22 nt, Human
ugagccuguggggugacaacca

SEQ ID NO: 832649 - RNA, 22 nt, Human
gcuggcaccugcaccaagcagg

SEQ ID NO: 832650 - RNA, 22 nt, Human
auugacaagugagcugggcugc

SEQ ID NO: 832651 - RNA, 22 nt, Human
gcaguggcaccgcuggcucugg

SEQ ID NO: 832652 - RNA, 22 nt, Human
ccagcuccugggucuuagucag

SEQ ID NO: 832653 - RNA, 17 nt, Human
cgagggcuugcuggcuc

SEQ ID NO: 832654 - RNA, 22 nt, Human
gucccaggcuuauguggagcuu

SEQ ID NO: 832655 - RNA, 22 nt, Human
aaaucaguuaagaugaggccau

SEQ ID NO: 832656 - RNA, 22 nt, Human
aauacugucuuucacagauauu

SEQ ID NO: 832657 - RNA, 22 nt, Human
agugucugccagcugccaggug

SEQ ID NO: 832658 - RNA, 22 nt, Human
ccugggagguggagguugcagc

SEQ ID NO: 832659 - RNA, 23 nt, Human
cuuugccacccagagccugacag

SEQ ID NO: 832660 - RNA, 22 nt, Human
aacacuuucuauuauuaugguu

SEQ ID NO: 832661 - RNA, 22 nt, Human
cuggcucauuuuagcaucaggu

SEQ ID NO: 832662 - RNA, 22 nt, Human
auguguagaacuguaaugccca

SEQ ID NO: 832663 - RNA, 22 nt, Human
cacauuucuaggaaauuaaaug

SEQ ID NO: 832664 - RNA, 22 nt, Human
uuauuauuuuguguacagcaaa

SEQ ID NO: 832665 - RNA, 22 nt, Human
uaacagaaauauuuccagguga

SEQ ID NO: 832666 - RNA, 22 nt, Human
ggagccuggucagguuggcucc

SEQ ID NO: 832667 - RNA, 22 nt, Human
gcagugcugaucccauggcaga

SEQ ID NO: 832668 - RNA, 22 nt, Human
gcucaggaccgaggggugggaa

SEQ ID NO: 832669 - RNA, 22 nt, Human
gcugagcugggacaguccuggg

SEQ ID NO: 832670 - RNA, 22 nt, Human
ccugggcuugcaucugugcugg

SEQ ID NO: 832671 - RNA, 22 nt, Human
gagccagcugagcugcacuguc

SEQ ID NO: 832672 - RNA, 22 nt, Human
gcccaggaguuugcauuuuaac

SEQ ID NO: 832673 - RNA, 22 nt, Human
cggggcugcgcucuuccugccg

SEQ ID NO: 832674 - RNA, 22 nt, Human
aucaguuugagugcugugucaa

SEQ ID NO: 832675 - RNA, 22 nt, Human
ucagaacauuuaaaaagugguu

SEQ ID NO: 832676 - RNA, 22 nt, Human
gccugccuggagcuugagguga

SEQ ID NO: 832677 - RNA, 22 nt, Human
gaggcaugcagagcuggagcag

SEQ ID NO: 832678 - RNA, 22 nt, Human
ccuggagcuuggucacgcugcg

SEQ ID NO: 832679 - RNA, 22 nt, Human
gcccugugccagucacgcugug

SEQ ID NO: 832680 - RNA, 22 nt, Human
cuuguucaguccugacuuccug

SEQ ID NO: 832681 - RNA, 22 nt, Human
cugccucuauucacugaggcag

SEQ ID NO: 832682 - RNA, 22 nt, Human
ugggcugcugucugcacaugcu

SEQ ID NO: 832683 - RNA, 22 nt, Human
gggauggacuuggggacuccag

SEQ ID NO: 832684 - RNA, 22 nt, Human
ugccugugucacagugauguuu

SEQ ID NO: 832685 - RNA, 21 nt, Human
aggcagaaagagcccaggcug

SEQ ID NO: 832686 - RNA, 22 nt, Human
agagugaaguuuuugaaaguga

SEQ ID NO: 832687 - RNA, 22 nt, Human
cugaggugcuauggaggauacg

SEQ ID NO: 832688 - RNA, 23 nt, Human
aguuuuucugcaugguucuguau

SEQ ID NO: 832689 - RNA, 22 nt, Human
augagcuucccagacaggaugg

SEQ ID NO: 832690 - RNA, 22 nt, Human
ucaguguagcagacuuguagcc

SEQ ID NO: 832691 - RNA, 22 nt, Human
cccuggaggcuggaggcaguag

SEQ ID NO: 832692 - RNA, 22 nt, Human
ugagaguauuuuggcauuauca

SEQ ID NO: 832693 - RNA, 22 nt, Human
ucugagagcuguagaagccuau

SEQ ID NO: 832694 - RNA, 20 nt, Human
gcucccugguagaaauguuu

SEQ ID NO: 832695 - RNA, 22 nt, Human
auuggcagaaacagcagggcca

SEQ ID NO: 832696 - RNA, 22 nt, Human
ucuuuucaucauuuaauaggua

SEQ ID NO: 832697 - RNA, 22 nt, Human
caaaugaagaaccuucucaccu

SEQ ID NO: 832698 - RNA, 22 nt, Human
gagcucuggcagggcaggucug

SEQ ID NO: 832699 - RNA, 22 nt, Human
aacuuuauuguuaggggcuaaa

SEQ ID NO: 832700 - RNA, 22 nt, Human
ggaggggucucuagcgaggaga

SEQ ID NO: 832701 - RNA, 22 nt, Human
ucaguuuuuacggucacaggga

SEQ ID NO: 832702 - RNA, 22 nt, Human
gcuguggccaacaaaccacuuu

SEQ ID NO: 832703 - RNA, 22 nt, Human
cuccagggagcuguggagguuu

SEQ ID NO: 832704 - RNA, 22 nt, Human
acuguucauccuuuuugaacaa

SEQ ID NO: 832705 - RNA, 22 nt, Human
gaacagcccuguuaagucuguu

SEQ ID NO: 832706 - RNA, 22 nt, Human
cagcagugucuccagcaucaca

SEQ ID NO: 832707 - RNA, 22 nt, Human
ggagccuuccagacugcccaca

SEQ ID NO: 832708 - RNA, 19 nt, Human
guuaggcaggguggggagu

SEQ ID NO: 832709 - RNA, 22 nt, Human
aaauuccagaaacucaguauau

SEQ ID NO: 832710 - RNA, 22 nt, Human
aaacauguuuucugaauauuuu

SEQ ID NO: 832711 - RNA, 22 nt, Human
acauuucucccugcaugccugc

SEQ ID NO: 832712 - RNA, 22 nt, Human
ugcuggaggggccugaccagga

SEQ ID NO: 832713 - RNA, 22 nt, Human
ugagccugcugucgcuggaccc

SEQ ID NO: 832714 - RNA, 22 nt, Human
cucuuccuacagucugcuaugc

SEQ ID NO: 832715 - RNA, 22 nt, Human
uugggcucaggaguuugagacc

SEQ ID NO: 832716 - RNA, 22 nt, Human
gccagcagggcccaaaugcugg

SEQ ID NO: 832717 - RNA, 19 nt, Human
ucccagagucuagagguug

SEQ ID NO: 832718 - RNA, 22 nt, Human
aggucaaggccaaaagaguggu

SEQ ID NO: 832719 - RNA, 22 nt, Human
gcccagcagcugguggagaagg

SEQ ID NO: 832720 - RNA, 22 nt, Human
cuggcugcuggccugaggaugc

SEQ ID NO: 832721 - RNA, 22 nt, Human
aagauauagauggugguauaaa

SEQ ID NO: 832722 - RNA, 22 nt, Human
aguggcagaagucacuggguag

SEQ ID NO: 832723 - RNA, 22 nt, Human
gcagacaggcccaguggaggga

SEQ ID NO: 832724 - RNA, 22 nt, Human
gaagucuucauucucucugaga

SEQ ID NO: 832725 - RNA, 22 nt, Human
ugccugggggacuaaggccaaa

SEQ ID NO: 832726 - RNA, 22 nt, Human
ggugccaggcuguagucagggu

SEQ ID NO: 832727 - RNA, 22 nt, Human
ugucugugaccucuuuggagcc

SEQ ID NO: 832728 - RNA, 22 nt, Human
uuggaucaaauuucaugcuguc

SEQ ID NO: 832729 - RNA, 22 nt, Human
cucucugggggccaugccaaga

SEQ ID NO: 832730 - RNA, 20 nt, Human
agcugguuaucuuaauucuu

SEQ ID NO: 832731 - RNA, 22 nt, Human
aggggagaguuaaugugaaugu

SEQ ID NO: 832732 - RNA, 22 nt, Human
caggcgagugaacagacucuca

SEQ ID NO: 832733 - RNA, 22 nt, Human
ggaggccaggaaggcucggaga

SEQ ID NO: 832734 - RNA, 22 nt, Human
caggccucuccuuagucuggca

SEQ ID NO: 832735 - RNA, 22 nt, Human
acuagaaauuacucagaauaaa

SEQ ID NO: 832736 - RNA, 22 nt, Human
cccucugccugggaccaagucc

SEQ ID NO: 832737 - RNA, 22 nt, Human
gugguuuugccauuacaaguaa

SEQ ID NO: 832738 - RNA, 22 nt, Human
uuucuugacugcuuaggaaugc

SEQ ID NO: 832739 - RNA, 22 nt, Human
uccaggcuagguuuacaggaca

SEQ ID NO: 832740 - RNA, 22 nt, Human
uggaugcuguaggacacgcucu

SEQ ID NO: 832741 - RNA, 20 nt, Human
uuuacauuuugaaacaguga

SEQ ID NO: 832742 - RNA, 22 nt, Human
ucugugcucuucucaguaucac

SEQ ID NO: 832743 - RNA, 22 nt, Human
uugcauguguaauuuuucuaaa

SEQ ID NO: 832744 - RNA, 22 nt, Human
uuuaggcaauagauggcagugu

SEQ ID NO: 832745 - RNA, 22 nt, Human
ugaggggauacgguacacauug

SEQ ID NO: 832746 - RNA, 22 nt, Human
gccucugcacuguggcacacca

SEQ ID NO: 832747 - RNA, 22 nt, Human
uuacaguauuguuaaacucuuu

SEQ ID NO: 832748 - RNA, 22 nt, Human
gcucugucuucagcacacagua

SEQ ID NO: 832749 - RNA, 22 nt, Human
acuccugggugcugaccagcgu

SEQ ID NO: 832750 - RNA, 22 nt, Human
ucaauaaaauuguuuuccuauc

SEQ ID NO: 832751 - RNA, 22 nt, Human
acuggcagagguuggacaccau

SEQ ID NO: 832752 - RNA, 22 nt, Human
uuaaagaauagugccccuauug

SEQ ID NO: 832753 - RNA, 22 nt, Human
ugcuauacggagcaucuucagg

SEQ ID NO: 832754 - RNA, 22 nt, Human
uguguacacagauaguaauggc

SEQ ID NO: 832755 - RNA, 22 nt, Human
auggcuuuguuccaauaaaacu

SEQ ID NO: 832756 - RNA, 20 nt, Human
gcagcugcccccagucccug

SEQ ID NO: 832757 - RNA, 22 nt, Human
aggggacacggcuucuccaggg

SEQ ID NO: 832758 - RNA, 18 nt, Human
agcagaauucuaggguuc

SEQ ID NO: 832759 - RNA, 22 nt, Human
aguaaacauuuucauauuuucu

SEQ ID NO: 832760 - RNA, 22 nt, Human
gcagugacagggcugcugccuu

SEQ ID NO: 832761 - RNA, 22 nt, Human
uccucugcuccaucuuuacugu

SEQ ID NO: 832762 - RNA, 22 nt, Human
auggcagcaaaugucuggcugg

SEQ ID NO: 832763 - RNA, 22 nt, Human
gguuuaauggagauauuucaga

SEQ ID NO: 832764 - RNA, 20 nt, Human
uguuccaagcuaaugaauga

SEQ ID NO: 832765 - RNA, 22 nt, Human
cugcucuggcguacucggcauc

SEQ ID NO: 832766 - RNA, 22 nt, Human
cucuggccgcagcucagcucug

SEQ ID NO: 832767 - RNA, 22 nt, Human
aaguccaugaucaagauguggc

SEQ ID NO: 832768 - RNA, 22 nt, Human
agaaucucuacucaaguacuug

SEQ ID NO: 832769 - RNA, 22 nt, Human
uaauuuaauuucaugccagccu

SEQ ID NO: 832770 - RNA, 22 nt, Human
uguaugugcuugagaagguggg

SEQ ID NO: 832771 - RNA, 22 nt, Human
aggggugaaggcccgauaggag

SEQ ID NO: 832772 - RNA, 22 nt, Human
aggcagauauuggggugaugug

SEQ ID NO: 832773 - RNA, 22 nt, Human
uguauuuuuaggaaugcgcuau

SEQ ID NO: 832774 - RNA, 22 nt, Human
uacugcaugguggaguggagcu

SEQ ID NO: 832775 - RNA, 22 nt, Human
ugcaccauuuugucaggcuacu

SEQ ID NO: 832776 - RNA, 22 nt, Human
uacaaagugagcaaccucuuuu

SEQ ID NO: 832777 - RNA, 22 nt, Human
uagaauucauguuacuguuagc

SEQ ID NO: 832778 - RNA, 22 nt, Human
ugccagccagguucugaggcua

SEQ ID NO: 832779 - RNA, 22 nt, Human
gacaaaggaucagagguuggga

SEQ ID NO: 832780 - RNA, 22 nt, Human
cagagaccccgcugcccuucug

SEQ ID NO: 832781 - RNA, 22 nt, Human
ggaccugccagaacucaggcua

SEQ ID NO: 832782 - RNA, 22 nt, Human
auuuggcaacauuaauugaauc

SEQ ID NO: 832783 - RNA, 22 nt, Human
uccagcagaaaagagguaggga

SEQ ID NO: 832784 - RNA, 22 nt, Human
ucuguucagcugccucagggua

SEQ ID NO: 832785 - RNA, 22 nt, Human
agggcacagccuaaagccuaug

SEQ ID NO: 832786 - RNA, 22 nt, Human
aaaagacaucuauuucaggcag

SEQ ID NO: 832787 - RNA, 22 nt, Human
cuguagcaaguuauucaauaaa

SEQ ID NO: 832788 - RNA, 22 nt, Human
aaguuugacagaaguuucuaau

SEQ ID NO: 832789 - RNA, 22 nt, Human
uguacauuuagagcucaauaga

SEQ ID NO: 832790 - RNA, 22 nt, Human
uccagccaagggagguuacuag

SEQ ID NO: 832791 - RNA, 22 nt, Human
agggaucaaaaaauguacaugc

SEQ ID NO: 832792 - RNA, 22 nt, Human
uagaaaugaauguuuaaaaguc

SEQ ID NO: 832793 - RNA, 20 nt, Human
cuuagaaauuuuuacccugg

SEQ ID NO: 832794 - RNA, 22 nt, Human
augcuuuuccuaaaaugaugcc

SEQ ID NO: 832795 - RNA, 23 nt, Human
uggcccugaaucuguccuggagg

SEQ ID NO: 832796 - RNA, 22 nt, Human
gacacagcacuguacaaggaau

SEQ ID NO: 832797 - RNA, 22 nt, Human
gaucugaaucaauagaauaacu

SEQ ID NO: 832798 - RNA, 22 nt, Human
ccuguucaauauucuuccuugu

SEQ ID NO: 832799 - RNA, 20 nt, Human
gacaggagaguuagguaggu

SEQ ID NO: 832800 - RNA, 22 nt, Human
gccuggagugcaguggcgugau

SEQ ID NO: 832801 - RNA, 22 nt, Human
uguguuauugccacugaagacc

SEQ ID NO: 832802 - RNA, 22 nt, Human
ccagcccuugagauggaaggga

SEQ ID NO: 832803 - RNA, 23 nt, Human
ggccucuguguucugcccacaug

SEQ ID NO: 832804 - RNA, 22 nt, Human
gaaguuuauuucaaucuauuca

SEQ ID NO: 832805 - RNA, 22 nt, Human
ccagagcccgggaccuggacuu

SEQ ID NO: 832806 - RNA, 22 nt, Human
ucucagagaaaugugucaccau

SEQ ID NO: 832807 - RNA, 20 nt, Human
ucccuggaggugguggcauc

SEQ ID NO: 832808 - RNA, 22 nt, Human
cugcuguguuucacaccucugg

SEQ ID NO: 832809 - RNA, 22 nt, Human
aggaagccaugguggacgucua

SEQ ID NO: 832810 - RNA, 22 nt, Human
ggcagcaggagccaucugguag

SEQ ID NO: 832811 - RNA, 22 nt, Human
gguagcagggcugugagucaga

SEQ ID NO: 832812 - RNA, 22 nt, Human
ugccugucuuggaguccuggcc

SEQ ID NO: 832813 - RNA, 22 nt, Human
ucuuugaaagcuguucuagagu

SEQ ID NO: 832814 - RNA, 22 nt, Human
ugaaauagaaaaacaggcuucu

SEQ ID NO: 832815 - RNA, 22 nt, Human
uggcucaguuccaucaucugga

SEQ ID NO: 832816 - RNA, 22 nt, Human
agagcugcaggguggacccagg

SEQ ID NO: 832817 - RNA, 22 nt, Human
ugaacucucucaagugacagaa

SEQ ID NO: 832818 - RNA, 22 nt, Human
auguuauuuuggaaaauacaaa

SEQ ID NO: 832819 - RNA, 22 nt, Human
ucuuuaauucagcaugaugcgg

SEQ ID NO: 832820 - RNA, 22 nt, Human
uggaauaaagugcuuugaucag

SEQ ID NO: 832821 - RNA, 22 nt, Human
cuuuggcagccucugcuauuga

SEQ ID NO: 832822 - RNA, 22 nt, Human
cacugccugugagcugugugcc

SEQ ID NO: 832823 - RNA, 22 nt, Human
ucugcagaaguggcugggccac

SEQ ID NO: 832824 - RNA, 22 nt, Human
uacaugcucaguaacuuucagu

SEQ ID NO: 832825 - RNA, 22 nt, Human
ugugugccugagccgugccugg

SEQ ID NO: 832826 - RNA, 22 nt, Human
ccaagggcucugacuugccugc

SEQ ID NO: 832827 - RNA, 22 nt, Human
acaaagaucuugcuuuccuacu

SEQ ID NO: 832828 - RNA, 22 nt, Human
acugugugcccugacgccaggg

SEQ ID NO: 832829 - RNA, 21 nt, Human
agaaauguaucauucuuuucc

SEQ ID NO: 832830 - RNA, 22 nt, Human
ccuccugggccuugcucuguga

SEQ ID NO: 832831 - RNA, 22 nt, Human
agaagucauuuauguuagauga

SEQ ID NO: 832832 - RNA, 22 nt, Human
gaaaacuauuggccuagaacaa

SEQ ID NO: 832833 - RNA, 22 nt, Human
aaguuauuuccucgugacugaa

SEQ ID NO: 832834 - RNA, 22 nt, Human
gugcucaggaagcuguuccugc

SEQ ID NO: 832835 - RNA, 22 nt, Human
gcuggaaggcuaggcucaguug

SEQ ID NO: 832836 - RNA, 22 nt, Human
gcugggagcaaagccaugcaua

SEQ ID NO: 832837 - RNA, 21 nt, Human
uccugccuuaguccagagcag

SEQ ID NO: 832838 - RNA, 22 nt, Human
gagcuguccuaccaggaguccu

SEQ ID NO: 832839 - RNA, 22 nt, Human
gaagagcuuaguuguccuagaa

SEQ ID NO: 832840 - RNA, 22 nt, Human
aaaaauagcuucucuugucccu

SEQ ID NO: 832841 - RNA, 22 nt, Human
uucaacuagauuuauacaauuc

SEQ ID NO: 832842 - RNA, 22 nt, Human
aucuacaggcugaggugggagg

SEQ ID NO: 832843 - RNA, 22 nt, Human
cucuggaauuaaggaagccugu

SEQ ID NO: 832844 - RNA, 23 nt, Human
cugcuguuuucuguaccugaagc

SEQ ID NO: 832845 - RNA, 23 nt, Human
gcugagguacauuuacaggaaga

SEQ ID NO: 832846 - RNA, 18 nt, Human
cuguucuagaacuccugu

SEQ ID NO: 832847 - RNA, 22 nt, Human
cauuuauucauuugcuagggcu

SEQ ID NO: 832848 - RNA, 22 nt, Human
agcacaggaccaaggaagcugu

SEQ ID NO: 832849 - RNA, 22 nt, Human
ggaggcucugcuccguguguuc

SEQ ID NO: 832850 - RNA, 19 nt, Human
caggaaggggcgaaucugg

SEQ ID NO: 832851 - RNA, 22 nt, Human
uacuuugaagacaauaucugga

SEQ ID NO: 832852 - RNA, 22 nt, Human
aucuauuaugcugagaaacugu

SEQ ID NO: 832853 - RNA, 22 nt, Human
ugcaccauuaauuuaugugaga

SEQ ID NO: 832854 - RNA, 22 nt, Human
ccugcugugaaacuggcauaug

SEQ ID NO: 832855 - RNA, 22 nt, Human
cugagccaguagucagggacaa

SEQ ID NO: 832856 - RNA, 22 nt, Human
uugcagggaccugcagaaagcu

SEQ ID NO: 832857 - RNA, 22 nt, Human
ugaagcaguucucagaaguggg

SEQ ID NO: 832858 - RNA, 20 nt, Human
gagccuuccccucaccacug

SEQ ID NO: 832859 - RNA, 22 nt, Human
ucacugggagaugugggaaggg

SEQ ID NO: 832860 - RNA, 22 nt, Human
gcugggaagugcaagaucaagg

SEQ ID NO: 832861 - RNA, 22 nt, Human
uccagggacagcgcuggagcua

SEQ ID NO: 832862 - RNA, 22 nt, Human
gcugccacauuuucaggacuaa

SEQ ID NO: 832863 - RNA, 22 nt, Human
uggagccuguguuucugcccag

SEQ ID NO: 832864 - RNA, 22 nt, Human
uauucacagcugccgcacucag

SEQ ID NO: 832865 - RNA, 22 nt, Human
aauuccaggaugcaggaggugc

SEQ ID NO: 832866 - RNA, 22 nt, Human
guuucacagaugguguucauau

SEQ ID NO: 832867 - RNA, 22 nt, Human
cagggcaggaauuugacauugc

SEQ ID NO: 832868 - RNA, 22 nt, Human
uccuugaaaaucuugguuuaga

SEQ ID NO: 832869 - RNA, 22 nt, Human
ccucugaggucauggacuuggc

SEQ ID NO: 832870 - RNA, 22 nt, Human
uggccaggggaguuccccucca

SEQ ID NO: 832871 - RNA, 22 nt, Human
cugagguggaacagaggugaag

SEQ ID NO: 832872 - RNA, 23 nt, Human
agaagcagcuucuggaguaucgg

SEQ ID NO: 832873 - RNA, 22 nt, Human
ucuuugcaucccuuccauaguu

SEQ ID NO: 832874 - RNA, 22 nt, Human
gugacagaguuuuagaucucau

SEQ ID NO: 832875 - RNA, 22 nt, Human
aguuauuacucuuuaacauauu

SEQ ID NO: 832876 - RNA, 22 nt, Human
agagagagggaaacugcuaaac

SEQ ID NO: 832877 - RNA, 22 nt, Human
cagaguggcagucccaggccca

SEQ ID NO: 832878 - RNA, 22 nt, Human
caagagcuacccugugccauau

SEQ ID NO: 832879 - RNA, 22 nt, Human
acuuccuguguuggucuugcug

SEQ ID NO: 832880 - RNA, 22 nt, Human
ugagcuguagcagaugcuguug

SEQ ID NO: 832881 - RNA, 22 nt, Human
guuaaauucgaugauggauaaa

SEQ ID NO: 832882 - RNA, 22 nt, Human
uuuuuccaccguacuuccugag

SEQ ID NO: 832883 - RNA, 21 nt, Human
auucugucaucccagcuacuu

SEQ ID NO: 832884 - RNA, 22 nt, Human
gagaggccaaaaucccugcccc

SEQ ID NO: 832885 - RNA, 22 nt, Human
acuucuugggacccuggcaccg

SEQ ID NO: 832886 - RNA, 22 nt, Human
ugcuguguggaugugaagaauc

SEQ ID NO: 832887 - RNA, 22 nt, Human
ucucuucauagugacacccauc

SEQ ID NO: 832888 - RNA, 22 nt, Human
uaaucuguguaccuucaucgga

SEQ ID NO: 832889 - RNA, 22 nt, Human
agagcuguagcuuccuagagcc

SEQ ID NO: 832890 - RNA, 19 nt, Human
uccuuugaauaucaguuga

SEQ ID NO: 832891 - RNA, 19 nt, Human
agucuuucccacucgucuu

SEQ ID NO: 832892 - RNA, 22 nt, Human
caggugggccgggguuuguucu

SEQ ID NO: 832893 - RNA, 18 nt, Human
aggccugggaagcugagg

SEQ ID NO: 832894 - RNA, 21 nt, Human
agagaauugccuuagauguuc

SEQ ID NO: 832895 - RNA, 22 nt, Human
guuugcauaaaguggaugcagg

SEQ ID NO: 832896 - RNA, 22 nt, Human
gggcuggaucuccugcaggcag

SEQ ID NO: 832897 - RNA, 22 nt, Human
ugguggcuucugaggauggcga

SEQ ID NO: 832898 - RNA, 20 nt, Human
cuguggcucaugcaucugcc

SEQ ID NO: 832899 - RNA, 22 nt, Human
aucaguuuuuauuaauguagcu

SEQ ID NO: 832900 - RNA, 22 nt, Human
aagucagagcaacugagacauu

SEQ ID NO: 832901 - RNA, 18 nt, Human
ucugucuguacaaguauc

SEQ ID NO: 832902 - RNA, 22 nt, Human
aaagauaauguuuccuuauucu

SEQ ID NO: 832903 - RNA, 22 nt, Human
caggcagcguccugcuuccugu

SEQ ID NO: 832904 - RNA, 19 nt, Human
auagaaaggguuaaagaca

SEQ ID NO: 832905 - RNA, 22 nt, Human
ucagcaauccucccacaggugg

SEQ ID NO: 832906 - RNA, 22 nt, Human
gcagauggugccaugucuugug

SEQ ID NO: 832907 - RNA, 22 nt, Human
ggccucugcccucacuccuguc

SEQ ID NO: 832908 - RNA, 22 nt, Human
cuucuuuacuuucuagaaauaa

SEQ ID NO: 832909 - RNA, 22 nt, Human
cacagccugcugcacucaagaa

SEQ ID NO: 832910 - RNA, 22 nt, Human
agcaggguuccaggaguugcag

SEQ ID NO: 832911 - RNA, 22 nt, Human
cucugcagaggcccaaggcuga

SEQ ID NO: 832912 - RNA, 22 nt, Human
ucuauacaugugcacacacauc

SEQ ID NO: 832913 - RNA, 22 nt, Human
ugucccauggauaccaggcuau

SEQ ID NO: 832914 - RNA, 22 nt, Human
uaaaugcaguacaaauuguucu

SEQ ID NO: 832915 - RNA, 22 nt, Human
uuucagaaagcaucaucaaagu

SEQ ID NO: 832916 - RNA, 22 nt, Human
ggccugugucugugccuguccu

SEQ ID NO: 832917 - RNA, 22 nt, Human
aucuggcuuaccuagggugccu

SEQ ID NO: 832918 - RNA, 22 nt, Human
uacauauacugagugauuugcu

SEQ ID NO: 832919 - RNA, 22 nt, Human
aggagcugagucagcccgacag

SEQ ID NO: 832920 - RNA, 22 nt, Human
auuauccagcaccaaugucaga

SEQ ID NO: 832921 - RNA, 22 nt, Human
ugccugucucugacugccauua

SEQ ID NO: 832922 - RNA, 22 nt, Human
gaggcugggaaguccaagacca

SEQ ID NO: 832923 - RNA, 22 nt, Human
uuuuuccuuggaugugucucuc

SEQ ID NO: 832924 - RNA, 22 nt, Human
gcacccaggccggcgacugcag

SEQ ID NO: 832925 - RNA, 23 nt, Human
ccugggcauuggcugcagcuucu

SEQ ID NO: 832926 - RNA, 22 nt, Human
auuccaaacuuaccccagagga

SEQ ID NO: 832927 - RNA, 22 nt, Human
uggcugcucaagggaggaggcu

SEQ ID NO: 832928 - RNA, 18 nt, Human
gaugggagcaagagaaga

SEQ ID NO: 832929 - RNA, 22 nt, Human
ucauugcaguagggagagaccc

SEQ ID NO: 832930 - RNA, 22 nt, Human
uuuaaagaaauuccucaucuuu

SEQ ID NO: 832931 - RNA, 17 nt, Human
uguuccauuugaccacc

SEQ ID NO: 832932 - RNA, 22 nt, Human
augaauaaaacauuuuaaucag

SEQ ID NO: 832933 - RNA, 22 nt, Human
ugucucagaggcaggaagagcc

SEQ ID NO: 832934 - RNA, 22 nt, Human
ucucaggggccuggaguccugg

SEQ ID NO: 832935 - RNA, 22 nt, Human
aaugccaguguguugauuccag

SEQ ID NO: 832936 - RNA, 22 nt, Human
aggaggugacagccugcaucug

SEQ ID NO: 832937 - RNA, 22 nt, Human
ucccagagacaucauuucuccg

SEQ ID NO: 832938 - RNA, 22 nt, Human
uuuucuuauggugaagcacaaa

SEQ ID NO: 832939 - RNA, 22 nt, Human
aagcugccaccagcccagggca

SEQ ID NO: 832940 - RNA, 19 nt, Human
acucaagucuaaugaaauc

SEQ ID NO: 832941 - RNA, 22 nt, Human
uccucucagugugguuguggga

SEQ ID NO: 832942 - RNA, 22 nt, Human
gagucaccuuggccgcuguccc

SEQ ID NO: 832943 - RNA, 22 nt, Human
agcugcaggcccaugcucaguc

SEQ ID NO: 832944 - RNA, 22 nt, Human
gagcugccaagauuacaaucag

SEQ ID NO: 832945 - RNA, 22 nt, Human
caccugagugucaguauucuca

SEQ ID NO: 832946 - RNA, 22 nt, Human
cagcuggcaaguggagcagggu

SEQ ID NO: 832947 - RNA, 23 nt, Human
uggcuucugccccauucucucca

SEQ ID NO: 832948 - RNA, 22 nt, Human
auucccaucgucaacuucacug

SEQ ID NO: 832949 - RNA, 22 nt, Human
ucuguggccuguguccaagugc

SEQ ID NO: 832950 - RNA, 22 nt, Human
cuuaacagagagaaguguugcu

SEQ ID NO: 832951 - RNA, 22 nt, Human
agccccucuguggcucugccuc

SEQ ID NO: 832952 - RNA, 22 nt, Human
uuaugacaggaaaaucacagaa

SEQ ID NO: 832953 - RNA, 22 nt, Human
aaugguuugauggacaaaauga

SEQ ID NO: 832954 - RNA, 22 nt, Human
caguggcugugaccagggaccu

SEQ ID NO: 832955 - RNA, 22 nt, Human
guuuagaauucuaacuuuaagg

SEQ ID NO: 832956 - RNA, 22 nt, Human
agcagcuggggccugugacgau

SEQ ID NO: 832957 - RNA, 22 nt, Human
uccugcugagcgucugucauuu

SEQ ID NO: 832958 - RNA, 22 nt, Human
cauugaaauauggaaacugaug

SEQ ID NO: 832959 - RNA, 22 nt, Human
gcucccagcauugcugcugaau

SEQ ID NO: 832960 - RNA, 22 nt, Human
gggccccuuguaucucuggcuc

SEQ ID NO: 832961 - RNA, 22 nt, Human
aagcugcccuguguuagaguuc

SEQ ID NO: 832962 - RNA, 22 nt, Human
auuauguauuugguauaguuug

SEQ ID NO: 832963 - RNA, 22 nt, Human
uucuuucccuuccagcagcucc

SEQ ID NO: 832964 - RNA, 22 nt, Human
ugugcaguuucuauguugucca

SEQ ID NO: 832965 - RNA, 22 nt, Human
ggggcagauggaacagagcaca

SEQ ID NO: 832966 - RNA, 22 nt, Human
aggccugcagcaggagcaaacc

SEQ ID NO: 832967 - RNA, 22 nt, Human
cuuguccccagcagguugguuu

SEQ ID NO: 832968 - RNA, 22 nt, Human
cugcuccacaccuccauuuccu

SEQ ID NO: 832969 - RNA, 22 nt, Human
gaagcagcuaggaucuucauuu

SEQ ID NO: 832970 - RNA, 22 nt, Human
ggcuucucgugccgaagcaaga

SEQ ID NO: 832971 - RNA, 22 nt, Human
ggagccugacagugcccagcau

SEQ ID NO: 832972 - RNA, 22 nt, Human
cugggccagcaacugcaaugga

SEQ ID NO: 832973 - RNA, 23 nt, Human
ccucccaccuauuucacuuucuu

SEQ ID NO: 832974 - RNA, 22 nt, Human
cugccacuagcuuucacaucuu

SEQ ID NO: 832975 - RNA, 21 nt, Human
ugguggagugugcugagcaug

SEQ ID NO: 832976 - RNA, 22 nt, Human
agcuuuaugggagcuuagauaa

SEQ ID NO: 832977 - RNA, 22 nt, Human
uuggaaagauuauuauuaugaa

SEQ ID NO: 832978 - RNA, 22 nt, Human
gugaauaaucacccuucuggau

SEQ ID NO: 832979 - RNA, 22 nt, Human
uggcagcugugcuucauucuuu

SEQ ID NO: 832980 - RNA, 23 nt, Human
ugggccuggaaagccuuagagag

SEQ ID NO: 832981 - RNA, 22 nt, Human
aaguuauaucaucucauugacg

SEQ ID NO: 832982 - RNA, 22 nt, Human
aagcugccuugcugaggagaaa

SEQ ID NO: 832983 - RNA, 22 nt, Human
agcuguguggugucugacagcu

SEQ ID NO: 832984 - RNA, 22 nt, Human
uuucuucagagagagcuuuccc

SEQ ID NO: 832985 - RNA, 22 nt, Human
uuucaugaggggcaaaaucuca

SEQ ID NO: 832986 - RNA, 22 nt, Human
ccucccaccauuuagagagagc

SEQ ID NO: 832987 - RNA, 22 nt, Human
aggaagcuaaccagggagugag

SEQ ID NO: 832988 - RNA, 22 nt, Human
agacagcaggggagucugguuu

SEQ ID NO: 832989 - RNA, 22 nt, Human
uuuccucugacugcuccccugc

SEQ ID NO: 832990 - RNA, 22 nt, Human
ucuggcucugaauucacuucug

SEQ ID NO: 832991 - RNA, 22 nt, Human
aaaugcagauugucauucagga

SEQ ID NO: 832992 - RNA, 22 nt, Human
agcugcccuguggggaggguug

SEQ ID NO: 832993 - RNA, 22 nt, Human
ccugagguggcugcagcacugc

SEQ ID NO: 832994 - RNA, 22 nt, Human
uaaucuacuguuuauaugaaau

SEQ ID NO: 832995 - RNA, 22 nt, Human
uaaguucagaguucucauuugu

SEQ ID NO: 832996 - RNA, 22 nt, Human
ugggcacaaacaucugccuguu

SEQ ID NO: 832997 - RNA, 22 nt, Human
aguuagaauauaauuauguuaa

SEQ ID NO: 832998 - RNA, 21 nt, Human
uuaagagcuuagcaguaggcc

SEQ ID NO: 832999 - RNA, 22 nt, Human
aucagaaaucuaggauucagaa

SEQ ID NO: 833000 - RNA, 22 nt, Human
ccugcagaccacacucaguccu

SEQ ID NO: 833001 - RNA, 22 nt, Human
agaagcugacagaugcagcagg

SEQ ID NO: 833002 - RNA, 22 nt, Human
gguuggaggugggaauagcuag

SEQ ID NO: 833003 - RNA, 22 nt, Human
gaggcucagagggagcaugguc

SEQ ID NO: 833004 - RNA, 22 nt, Human
uguggcccagaugagugugcua

SEQ ID NO: 833005 - RNA, 22 nt, Human
uuucuucauucaccuucacccc

SEQ ID NO: 833006 - RNA, 22 nt, Human
accuuucaaaguggcuaucacu

SEQ ID NO: 833007 - RNA, 22 nt, Human
uuacauaacgguaugaaaaaug

SEQ ID NO: 833008 - RNA, 22 nt, Human
gcucuggagauggagccuugag

SEQ ID NO: 833009 - RNA, 22 nt, Human
augguuuuccucugcugcuuaa

SEQ ID NO: 833010 - RNA, 22 nt, Human
ucccaagugucuuggaccaggg

SEQ ID NO: 833011 - RNA, 22 nt, Human
aaucuucuacuugacaguucuc

SEQ ID NO: 833012 - RNA, 22 nt, Human
agugucugccaacugcaugguc

SEQ ID NO: 833013 - RNA, 22 nt, Human
gacuuucucuccucccaggugu

SEQ ID NO: 833014 - RNA, 22 nt, Human
auaauuuaaauuaguaugugau

SEQ ID NO: 833015 - RNA, 22 nt, Human
ugauuuccucuacuagcaauua

SEQ ID NO: 833016 - RNA, 22 nt, Human
ucaguaaaugaaugaauauaug

SEQ ID NO: 833017 - RNA, 22 nt, Human
ugauaauauuuugaaucauaag

SEQ ID NO: 833018 - RNA, 22 nt, Human
ucugucacccgagcaggcgaga

SEQ ID NO: 833019 - RNA, 22 nt, Human
accaggaguagaauaucuguga

SEQ ID NO: 833020 - RNA, 22 nt, Human
aaucagaaagaggucauguugc

SEQ ID NO: 833021 - RNA, 22 nt, Human
uuuuccucugcagagcaguuag

SEQ ID NO: 833022 - RNA, 22 nt, Human
uccaggagauacacugcaccag

SEQ ID NO: 833023 - RNA, 22 nt, Human
gggcaguugauggaggucugga

SEQ ID NO: 833024 - RNA, 20 nt, Human
gccugccucagcuagcugag

SEQ ID NO: 833025 - RNA, 22 nt, Human
cauucauuuacuuucaacagcu

SEQ ID NO: 833026 - RNA, 22 nt, Human
gcugccugguuucucagcugca

SEQ ID NO: 833027 - RNA, 22 nt, Human
caagagcucccagaccugggca

SEQ ID NO: 833028 - RNA, 22 nt, Human
gaggcagcucuucugaaugggg

SEQ ID NO: 833029 - RNA, 22 nt, Human
ccugcagguugcagaggcggaa

SEQ ID NO: 833030 - RNA, 18 nt, Human
ccugagcccugcuuacuu

SEQ ID NO: 833031 - RNA, 22 nt, Human
gaguguuccagaaacuggcccu

SEQ ID NO: 833032 - RNA, 22 nt, Human
cucuggaguggguggccgggag

SEQ ID NO: 833033 - RNA, 21 nt, Human
ugggggagaauugguugcuuu

SEQ ID NO: 833034 - RNA, 22 nt, Human
ccaugagcuuccuauauagggu

SEQ ID NO: 833035 - RNA, 22 nt, Human
ugcuuccuucccguucuucucc

SEQ ID NO: 833036 - RNA, 22 nt, Human
uugcauugggagugaggagacc

SEQ ID NO: 833037 - RNA, 22 nt, Human
uccaggagaccagauguaggcc

SEQ ID NO: 833038 - RNA, 22 nt, Human
guuauguacuuuuuaaaucuug

SEQ ID NO: 833039 - RNA, 22 nt, Human
cagagcugauuggauccagaga

SEQ ID NO: 833040 - RNA, 23 nt, Human
agucuucauuguauuuccagacc

SEQ ID NO: 833041 - RNA, 22 nt, Human
uuucuaggcacagugucuuccc

SEQ ID NO: 833042 - RNA, 22 nt, Human
ccuugcguuuuacagcuucuag

SEQ ID NO: 833043 - RNA, 22 nt, Human
gcucagagaaucagcagacacc

SEQ ID NO: 833044 - RNA, 22 nt, Human
agugcuguaacaacuuauuugg

SEQ ID NO: 833045 - RNA, 22 nt, Human
gcuuugaagucugugucuuuug

SEQ ID NO: 833046 - RNA, 22 nt, Human
gggcuugcugauuugggcagga

SEQ ID NO: 833047 - RNA, 22 nt, Human
ccagcuccccucagcagguaau

SEQ ID NO: 833048 - RNA, 20 nt, Human
ugaaaggugggaauuguggg

SEQ ID NO: 833049 - RNA, 22 nt, Human
aagcagccagccaucaugcccg

SEQ ID NO: 833050 - RNA, 20 nt, Human
cugcucugcuuugcaggugg

SEQ ID NO: 833051 - RNA, 22 nt, Human
agucccagagaggucggggcca

SEQ ID NO: 833052 - RNA, 22 nt, Human
acagugacguuuauuugagacg

SEQ ID NO: 833053 - RNA, 22 nt, Human
acagaagagcacauuuaguaug

SEQ ID NO: 833054 - RNA, 22 nt, Human
cagucacacaaguggacuuggg

SEQ ID NO: 833055 - RNA, 22 nt, Human
gcagagcucuguucuuaucucc

SEQ ID NO: 833056 - RNA, 22 nt, Human
uuucauaugggcauuggcaaua

SEQ ID NO: 833057 - RNA, 22 nt, Human
cuuugaaaggaagccacacagc

SEQ ID NO: 833058 - RNA, 22 nt, Human
ccagcucuagccccauguggcu

SEQ ID NO: 833059 - RNA, 22 nt, Human
uccucaggcugccuggaagacu

SEQ ID NO: 833060 - RNA, 22 nt, Human
aaaugccucugcuguacacaau

SEQ ID NO: 833061 - RNA, 22 nt, Human
cuguccugauggugccacuggu

SEQ ID NO: 833062 - RNA, 22 nt, Human
cuauugaaaguguacaauucaa

SEQ ID NO: 833063 - RNA, 19 nt, Human
ucucuggggacacuuucac

SEQ ID NO: 833064 - RNA, 22 nt, Human
caucuucagguucauggucaua

SEQ ID NO: 833065 - RNA, 22 nt, Human
gcccaggacucagggugucgcg

SEQ ID NO: 833066 - RNA, 22 nt, Human
gugucauguagaaauugaugaa

SEQ ID NO: 833067 - RNA, 22 nt, Human
ucuggcucugacacuacuguua

SEQ ID NO: 833068 - RNA, 22 nt, Human
augugucaauuuucaaaugcuu

SEQ ID NO: 833069 - RNA, 22 nt, Human
uccuucagccaugggcucucca

SEQ ID NO: 833070 - RNA, 22 nt, Human
uauagccauuuccaguggcauc

SEQ ID NO: 833071 - RNA, 22 nt, Human
uccucacagucaacacuuugag

SEQ ID NO: 833072 - RNA, 22 nt, Human
gccaggugcuaucccugcgcug

SEQ ID NO: 833073 - RNA, 22 nt, Human
uuuuccaaaguaccaugucccu

SEQ ID NO: 833074 - RNA, 22 nt, Human
ucaagagaaggggaaauagacu

SEQ ID NO: 833075 - RNA, 22 nt, Human
aaaguuagaaugauaucaacga

SEQ ID NO: 833076 - RNA, 22 nt, Human
ccaaggaguagagcaggaagcu

SEQ ID NO: 833077 - RNA, 18 nt, Human
ggagagugacagagucgu

SEQ ID NO: 833078 - RNA, 22 nt, Human
uacagaaaucacaucgcuuuga

SEQ ID NO: 833079 - RNA, 23 nt, Human
ucuccagugucucuucauugagu

SEQ ID NO: 833080 - RNA, 22 nt, Human
cugccuggagcauucugaaggu

SEQ ID NO: 833081 - RNA, 22 nt, Human
ccugucugcaugagugagcaua

SEQ ID NO: 833082 - RNA, 22 nt, Human
gcuuuccuggcccugucccugc

SEQ ID NO: 833083 - RNA, 22 nt, Human
ccugccuggcugucagcagagc

SEQ ID NO: 833084 - RNA, 22 nt, Human
uuaaaaccaucagcuguaagau

SEQ ID NO: 833085 - RNA, 22 nt, Human
aucugcagaggacaggcgagga

SEQ ID NO: 833086 - RNA, 22 nt, Human
augugaaaauccaauggcagca

SEQ ID NO: 833087 - RNA, 22 nt, Human
ugcugccagggcucugcccaca

SEQ ID NO: 833088 - RNA, 23 nt, Human
acugucugauauguuuuccauca

SEQ ID NO: 833089 - RNA, 22 nt, Human
acagaacugggggcacagauag

SEQ ID NO: 833090 - RNA, 22 nt, Human
acaaaguuauucuuucagagga

SEQ ID NO: 833091 - RNA, 20 nt, Human
gcagagcuguucugugggga

SEQ ID NO: 833092 - RNA, 22 nt, Human
gccagccuucuguggccugcaa

SEQ ID NO: 833093 - RNA, 22 nt, Human
gggagccaugcuggucuucuuu

SEQ ID NO: 833094 - RNA, 22 nt, Human
ugucaagucucugaaugaaaug

SEQ ID NO: 833095 - RNA, 20 nt, Human
auacaaagagauugauguau

SEQ ID NO: 833096 - RNA, 19 nt, Human
ccuuggaguuccaggugga

SEQ ID NO: 833097 - RNA, 23 nt, Human
acauacauggagauaaagugaug

SEQ ID NO: 833098 - RNA, 22 nt, Human
cagccugcagggcugccuguug

SEQ ID NO: 833099 - RNA, 22 nt, Human
uuauuccaauuucuccuacaaa

SEQ ID NO: 833100 - RNA, 22 nt, Human
gcagaauugauggagaacuuaa

SEQ ID NO: 833101 - RNA, 22 nt, Human
cauugcacugcagcccgggcaa

SEQ ID NO: 833102 - RNA, 23 nt, Human
agcagggccagaauacuugcugu

SEQ ID NO: 833103 - RNA, 17 nt, Human
aaugaaugaauucuuug

SEQ ID NO: 833104 - RNA, 22 nt, Human
uuguuuugcuaaagggucauca

SEQ ID NO: 833105 - RNA, 22 nt, Human
uucaagauccagcacaacagug

SEQ ID NO: 833106 - RNA, 17 nt, Human
agcugaccagauggacu

SEQ ID NO: 833107 - RNA, 22 nt, Human
cagagccaggguugcaccccug

SEQ ID NO: 833108 - RNA, 22 nt, Human
uuccuguauucuaaagggaaag

SEQ ID NO: 833109 - RNA, 22 nt, Human
agcagccagagaaugaugcagu

SEQ ID NO: 833110 - RNA, 22 nt, Human
gguucacauauugagaguauuc

SEQ ID NO: 833111 - RNA, 19 nt, Human
ggcugccuggagcgagggc

SEQ ID NO: 833112 - RNA, 22 nt, Human
uacauguaagacaugagacucu

SEQ ID NO: 833113 - RNA, 22 nt, Human
ggguaauuggggccuugcagug

SEQ ID NO: 833114 - RNA, 22 nt, Human
cacagcugaaguagccaugugg

SEQ ID NO: 833115 - RNA, 22 nt, Human
ugaauagauuuuuaacauauaa

SEQ ID NO: 833116 - RNA, 23 nt, Human
aacaccaaggcucagagagauaa

SEQ ID NO: 833117 - RNA, 22 nt, Human
aguuuauagcccagauucaugg

SEQ ID NO: 833118 - RNA, 22 nt, Human
gcugucacucuccggccuuccc

SEQ ID NO: 833119 - RNA, 22 nt, Human
gucucccaaccccugugcccag

SEQ ID NO: 833120 - RNA, 22 nt, Human
gugaacuauuggguaucauaaa

SEQ ID NO: 833121 - RNA, 22 nt, Human
cugagagcagggacuugagcca

SEQ ID NO: 833122 - RNA, 22 nt, Human
aucuauacucagaguuaauauc

SEQ ID NO: 833123 - RNA, 22 nt, Human
uaguuuuuucaacaaauggugc

SEQ ID NO: 833124 - RNA, 19 nt, Human
acccucucagugccugagg

SEQ ID NO: 833125 - RNA, 21 nt, Human
aggcucagcagguguauaaag

SEQ ID NO: 833126 - RNA, 22 nt, Human
augugcaugcacuuacaugugu

SEQ ID NO: 833127 - RNA, 22 nt, Human
ccagcccuguaaggaugaggca

SEQ ID NO: 833128 - RNA, 22 nt, Human
uugaaucuggguacuuguaaua

SEQ ID NO: 833129 - RNA, 22 nt, Human
agugcuuuccuucuugugacau

SEQ ID NO: 833130 - RNA, 23 nt, Human
agcuggaggcugucuacucccaa

SEQ ID NO: 833131 - RNA, 22 nt, Human
gauuucaaggaguuuucacagu

SEQ ID NO: 833132 - RNA, 22 nt, Human
gaggggaaaguucugcacaagg

SEQ ID NO: 833133 - RNA, 22 nt, Human
agcugucugucuccugaggaga

SEQ ID NO: 833134 - RNA, 22 nt, Human
gcauaugaucacgugugucggu

SEQ ID NO: 833135 - RNA, 22 nt, Human
uccagcagaccaucaaggcuca

SEQ ID NO: 833136 - RNA, 22 nt, Human
cagcaggguagguuguaucagu

SEQ ID NO: 833137 - RNA, 22 nt, Human
ugaagaauaaaugguugagacu

SEQ ID NO: 833138 - RNA, 22 nt, Human
ugugccuggcauucugggcuuc

SEQ ID NO: 833139 - RNA, 22 nt, Human
agggcccaggacagcaucaggg

SEQ ID NO: 833140 - RNA, 22 nt, Human
cugcuucuaagaaccugcagcu

SEQ ID NO: 833141 - RNA, 22 nt, Human
uaaugaauaaacuugagaguca

SEQ ID NO: 833142 - RNA, 19 nt, Human
ccaggccaucccaguuccc

SEQ ID NO: 833143 - RNA, 22 nt, Human
cugcccuguuuggacagcccgg

SEQ ID NO: 833144 - RNA, 22 nt, Human
ugaagcaggugaauggaugucg

SEQ ID NO: 833145 - RNA, 22 nt, Human
cagagccagaacuagaccuugu

SEQ ID NO: 833146 - RNA, 22 nt, Human
agggagcuucuggccucagccu

SEQ ID NO: 833147 - RNA, 22 nt, Human
agccauucauugugcucucaga

SEQ ID NO: 833148 - RNA, 22 nt, Human
acuggcagagacccugauggcc

SEQ ID NO: 833149 - RNA, 22 nt, Human
gcagugguggagcuuacauauc

SEQ ID NO: 833150 - RNA, 22 nt, Human
agaaagaacgcacuugugcugc

SEQ ID NO: 833151 - RNA, 22 nt, Human
aggaugagccgcgcaagcugac

SEQ ID NO: 833152 - RNA, 22 nt, Human
auuuuccucaagccucuggaag

SEQ ID NO: 833153 - RNA, 22 nt, Human
gccugcagggugaugggcugcc

SEQ ID NO: 833154 - RNA, 18 nt, Human
gggcacuggggacuggag

SEQ ID NO: 833155 - RNA, 22 nt, Human
uugcuuuguggugguucuucca

SEQ ID NO: 833156 - RNA, 22 nt, Human
ugaggcagguggauuacaaggu

SEQ ID NO: 833157 - RNA, 20 nt, Human
ugcugcaguuucaugggacu

SEQ ID NO: 833158 - RNA, 22 nt, Human
gagaggccauggcugugcagug

SEQ ID NO: 833159 - RNA, 22 nt, Human
cugccucuugacagaucguggc

SEQ ID NO: 833160 - RNA, 22 nt, Human
aaaguauuugugauuuuuacca

SEQ ID NO: 833161 - RNA, 22 nt, Human
aggauuuauuccagaaaugcaa

SEQ ID NO: 833162 - RNA, 22 nt, Human
cucacuggcaagacuacaggug

SEQ ID NO: 833163 - RNA, 22 nt, Human
gaggcaccucgcgggaggaggc

SEQ ID NO: 833164 - RNA, 22 nt, Human
auaaagauuucuuuuucucuac

SEQ ID NO: 833165 - RNA, 19 nt, Human
ggccuggauuuagggcucc

SEQ ID NO: 833166 - RNA, 22 nt, Human
ggaggccuagccagcuccaguu

SEQ ID NO: 833167 - RNA, 22 nt, Human
cugugcagcuggcuuccuggaa

SEQ ID NO: 833168 - RNA, 22 nt, Human
aggcagcugugaggacuggauu

SEQ ID NO: 833169 - RNA, 22 nt, Human
ccaggagacuguacugauauuu

SEQ ID NO: 833170 - RNA, 22 nt, Human
cauagaaaguauuauggaauuu

SEQ ID NO: 833171 - RNA, 22 nt, Human
uaauuuaauccaaguguuacau

SEQ ID NO: 833172 - RNA, 22 nt, Human
uuugacauuauccuguuacugg

SEQ ID NO: 833173 - RNA, 22 nt, Human
aaggacagaaacagauugcugg

SEQ ID NO: 833174 - RNA, 22 nt, Human
uauuucugauugcucaugaggc

SEQ ID NO: 833175 - RNA, 22 nt, Human
cagggugccuguccucagcaaa

SEQ ID NO: 833176 - RNA, 18 nt, Human
acauuucuaggugaaagc

SEQ ID NO: 833177 - RNA, 22 nt, Human
uggcauuugggcuggcuuuucu

SEQ ID NO: 833178 - RNA, 22 nt, Human
aaauguuuugcucccauguggu

SEQ ID NO: 833179 - RNA, 22 nt, Human
agaauuucaaauggaaguuuua

SEQ ID NO: 833180 - RNA, 22 nt, Human
uuccucaugggguuccuucaga

SEQ ID NO: 833181 - RNA, 22 nt, Human
cagcagcucccauccgcugagc

SEQ ID NO: 833182 - RNA, 21 nt, Human
cugagggccgcagcugggcuc

SEQ ID NO: 833183 - RNA, 22 nt, Human
gccugguggacacugggcauca

SEQ ID NO: 833184 - RNA, 22 nt, Human
gcugccaauccagcugugggag

SEQ ID NO: 833185 - RNA, 22 nt, Human
aggagcugggcugcugcuggga

SEQ ID NO: 833186 - RNA, 23 nt, Human
ccugaagggucaggguccucagc

SEQ ID NO: 833187 - RNA, 22 nt, Human
agccuggaagaaccugaagucu

SEQ ID NO: 833188 - RNA, 22 nt, Human
cccagcaguaaccaguggaaau

SEQ ID NO: 833189 - RNA, 22 nt, Human
ggaaaugacuuggugcuucguu

SEQ ID NO: 833190 - RNA, 22 nt, Human
cagccuucugaaugaacguacu

SEQ ID NO: 833191 - RNA, 22 nt, Human
cuggccacaacuagcccaggac

SEQ ID NO: 833192 - RNA, 22 nt, Human
cccauugugguuguugaggaua

SEQ ID NO: 833193 - RNA, 22 nt, Human
caguacuuuucuggcuuucuac

SEQ ID NO: 833194 - RNA, 22 nt, Human
aaggucauugguucugaauucu

SEQ ID NO: 833195 - RNA, 17 nt, Human
auuuccucagggcugag

SEQ ID NO: 833196 - RNA, 22 nt, Human
uucagaaagguaaauggauuuc

SEQ ID NO: 833197 - RNA, 22 nt, Human
gagaggagucccuaucacaguu

SEQ ID NO: 833198 - RNA, 22 nt, Human
ccaggccuggaccaugccaggg

SEQ ID NO: 833199 - RNA, 22 nt, Human
cagggguggcugcagcagaggu

SEQ ID NO: 833200 - RNA, 22 nt, Human
ccagcugagaaguguaaaguga

SEQ ID NO: 833201 - RNA, 22 nt, Human
aaaagucugcucucauuucaga

SEQ ID NO: 833202 - RNA, 22 nt, Human
uccugggaagagaccugagcau

SEQ ID NO: 833203 - RNA, 18 nt, Human
gcccugguggagcuggug

SEQ ID NO: 833204 - RNA, 21 nt, Human
agugaaaugaaguguaugcuc

SEQ ID NO: 833205 - RNA, 22 nt, Human
uauuuccaccuauuauuuucug

SEQ ID NO: 833206 - RNA, 21 nt, Human
ggcagaaguagcauggacggg

SEQ ID NO: 833207 - RNA, 22 nt, Human
ugggagcaagcuggugcuggag

SEQ ID NO: 833208 - RNA, 22 nt, Human
ucaugcccagagcaguaaauua

SEQ ID NO: 833209 - RNA, 20 nt, Human
ugggagcuggugaggucuca

SEQ ID NO: 833210 - RNA, 23 nt, Human
aucaagauaauccagaugaccua

SEQ ID NO: 833211 - RNA, 22 nt, Human
cugaggucaauuaaucaacaac

SEQ ID NO: 833212 - RNA, 20 nt, Human
gcugaccccugcugucaugc

SEQ ID NO: 833213 - RNA, 22 nt, Human
gcucccaggaugaggagccagg

SEQ ID NO: 833214 - RNA, 15 nt, Human
aggcacugugggacc

SEQ ID NO: 833215 - RNA, 22 nt, Human
uauuucagcaagaagaaugugg

SEQ ID NO: 833216 - RNA, 22 nt, Human
ggagccuguuaguugagugcuc

SEQ ID NO: 833217 - RNA, 22 nt, Human
uggagcagggcaucacugugcg

SEQ ID NO: 833218 - RNA, 22 nt, Human
uacauuaucuuguuaucuuuca

SEQ ID NO: 833219 - RNA, 22 nt, Human
gagaagccgagucagcugagcc

SEQ ID NO: 833220 - RNA, 22 nt, Human
uaaagguagugugacauauugu

SEQ ID NO: 833221 - RNA, 22 nt, Human
acaacuuucuggguuaucugau

SEQ ID NO: 833222 - RNA, 22 nt, Human
augcagcuucaggauuaugaug

SEQ ID NO: 833223 - RNA, 22 nt, Human
ccauuguaguaucuguuuuagu

SEQ ID NO: 833224 - RNA, 22 nt, Human
gguggccucugcaggccucgac

SEQ ID NO: 833225 - RNA, 22 nt, Human
aggcugcugaggccaccacgcu

SEQ ID NO: 833226 - RNA, 22 nt, Human
uguuccaucaguuuuugguuga

SEQ ID NO: 833227 - RNA, 22 nt, Human
uggcacugccaaccugcuaggu

SEQ ID NO: 833228 - RNA, 22 nt, Human
ccugccugggcucacuugccag

SEQ ID NO: 833229 - RNA, 22 nt, Human
aagggcaggaaaagauggaugu

SEQ ID NO: 833230 - RNA, 22 nt, Human
auaaacaguagagaaagguggu

SEQ ID NO: 833231 - RNA, 22 nt, Human
gcauuuguguucuuccuagagc

SEQ ID NO: 833232 - RNA, 18 nt, Human
ucagcuggggcugcagcc

SEQ ID NO: 833233 - RNA, 22 nt, Human
agcugagagguggcaagcugua

SEQ ID NO: 833234 - RNA, 22 nt, Human
ccagagagauugcuucuaaaga

SEQ ID NO: 833235 - RNA, 22 nt, Human
ugguccagaugccuuggcuuua

SEQ ID NO: 833236 - RNA, 23 nt, Human
cuugcagggcuggaggcuuagaa

SEQ ID NO: 833237 - RNA, 19 nt, Human
agcauccagucaugggauc

SEQ ID NO: 833238 - RNA, 22 nt, Human
ugggacagagugagcuuuggcc

SEQ ID NO: 833239 - RNA, 22 nt, Human
uuuaggcaugcaguucuauuua

SEQ ID NO: 833240 - RNA, 22 nt, Human
uguguauucagcaagcgaaaca

SEQ ID NO: 833241 - RNA, 22 nt, Human
augaaaacggaccagagcuauu

SEQ ID NO: 833242 - RNA, 22 nt, Human
cugagccaugagccugcgccca

SEQ ID NO: 833243 - RNA, 22 nt, Human
gagaggggcccaagccacauag

SEQ ID NO: 833244 - RNA, 22 nt, Human
agcuccugaaaagcgcuugcuu

SEQ ID NO: 833245 - RNA, 22 nt, Human
ucuggcugcugcgugagugcuu

SEQ ID NO: 833246 - RNA, 22 nt, Human
ugaaaucuuauacuuugguagu

SEQ ID NO: 833247 - RNA, 22 nt, Human
ucagaguguuuuacuaaacaag

SEQ ID NO: 833248 - RNA, 22 nt, Human
cauauuugguauaacuuaagca

SEQ ID NO: 833249 - RNA, 22 nt, Human
uauccaaacauauagucucucu

SEQ ID NO: 833250 - RNA, 20 nt, Human
acccagcucugugcccuggg

SEQ ID NO: 833251 - RNA, 22 nt, Human
aaacuuuguagagaaugcuggc

SEQ ID NO: 833252 - RNA, 22 nt, Human
gcuggauccugauucgucuuug

SEQ ID NO: 833253 - RNA, 22 nt, Human
ccugggcaucucaugcaccugc

SEQ ID NO: 833254 - RNA, 22 nt, Human
uuucacacaacgugaauauacu

SEQ ID NO: 833255 - RNA, 22 nt, Human
agggaggucuuugaggggcuua

SEQ ID NO: 833256 - RNA, 22 nt, Human
uucaaaacagcuagauauugga

SEQ ID NO: 833257 - RNA, 22 nt, Human
ugcauauuuguaugauguuuag

SEQ ID NO: 833258 - RNA, 22 nt, Human
aucaguuuguauaugaaacacu

SEQ ID NO: 833259 - RNA, 22 nt, Human
cccauuuaucccaagguuacuc

SEQ ID NO: 833260 - RNA, 22 nt, Human
cuaauacucauuucuguaacuc

SEQ ID NO: 833261 - RNA, 22 nt, Human
caggaggccaacugugggacuu

SEQ ID NO: 833262 - RNA, 22 nt, Human
ugaaacaagauccacagacuug

SEQ ID NO: 833263 - RNA, 22 nt, Human
ccucaggguggcaucagaucuu

SEQ ID NO: 833264 - RNA, 22 nt, Human
agcaggagcccuuaucaccagg

SEQ ID NO: 833265 - RNA, 22 nt, Human
cucucuguuaugcuuucaugaa

SEQ ID NO: 833266 - RNA, 22 nt, Human
caaaggagguaaugggugugag

SEQ ID NO: 833267 - RNA, 22 nt, Human
guccucugacucagccuuggga

SEQ ID NO: 833268 - RNA, 22 nt, Human
aaggagcucccggcagaccagg

SEQ ID NO: 833269 - RNA, 22 nt, Human
cugggagcccgcguccuggugg

SEQ ID NO: 833270 - RNA, 22 nt, Human
auuugaagaaaguuuucuagau

SEQ ID NO: 833271 - RNA, 22 nt, Human
ggcaggguggcccuccagugag

SEQ ID NO: 833272 - RNA, 22 nt, Human
ugcugcacucaccaacagauaa

SEQ ID NO: 833273 - RNA, 22 nt, Human
agcccaggucucaaaguacagg

SEQ ID NO: 833274 - RNA, 22 nt, Human
aggucaccauggcaugcuccac

SEQ ID NO: 833275 - RNA, 22 nt, Human
cacaauacuauuuuuaggucuu

SEQ ID NO: 833276 - RNA, 22 nt, Human
uccugggcugcagggaagagca

SEQ ID NO: 833277 - RNA, 22 nt, Human
cagcucugcugggaggaugcag

SEQ ID NO: 833278 - RNA, 18 nt, Human
aaguccuuccuuugcuuu

SEQ ID NO: 833279 - RNA, 22 nt, Human
aaaguucaugguguuauagaaa

SEQ ID NO: 833280 - RNA, 22 nt, Human
gucccagaugucuggaacuccc

SEQ ID NO: 833281 - RNA, 22 nt, Human
uagaaaauagggccuguggagc

SEQ ID NO: 833282 - RNA, 22 nt, Human
uggcaauuuuaggugguuuagu

SEQ ID NO: 833283 - RNA, 22 nt, Human
ucagggcaggcgagcagcugcu

SEQ ID NO: 833284 - RNA, 20 nt, Human
gagggcaggcacccauuuca

SEQ ID NO: 833285 - RNA, 22 nt, Human
aguccuuaugagaugcugccuu

SEQ ID NO: 833286 - RNA, 22 nt, Human
uuugcauuuguuuagaaccuga

SEQ ID NO: 833287 - RNA, 22 nt, Human
uuccuuagaguuuccagaaagc

SEQ ID NO: 833288 - RNA, 22 nt, Human
ccugagugaauucccucacugu

SEQ ID NO: 833289 - RNA, 22 nt, Human
ccuggguggcagagguugcagu

SEQ ID NO: 833290 - RNA, 22 nt, Human
gcuauacagcaggagaauggaa

SEQ ID NO: 833291 - RNA, 22 nt, Human
agccuccaucccaugcacaaag

SEQ ID NO: 833292 - RNA, 22 nt, Human
ugcagaaggaggaggaaaucca

SEQ ID NO: 833293 - RNA, 23 nt, Human
uucuucucaauuaguugauucag

SEQ ID NO: 833294 - RNA, 22 nt, Human
augcugugaaaaagaaggcuga

SEQ ID NO: 833295 - RNA, 22 nt, Human
cuggugggaggcaagguggaag

SEQ ID NO: 833296 - RNA, 22 nt, Human
gcaggccucuguugagggccuu

SEQ ID NO: 833297 - RNA, 22 nt, Human
uucaugaauggaaucaaugcuc

SEQ ID NO: 833298 - RNA, 22 nt, Human
ucccugggccuccugcuaugca

SEQ ID NO: 833299 - RNA, 20 nt, Human
cacaggccuugugagcagac

SEQ ID NO: 833300 - RNA, 18 nt, Human
agcagcugucagaaugcc

SEQ ID NO: 833301 - RNA, 22 nt, Human
ggagcugcauuuagggagccuu

SEQ ID NO: 833302 - RNA, 22 nt, Human
cccuggagcaucucugcugucu

SEQ ID NO: 833303 - RNA, 22 nt, Human
ggugcucaagagggcauccucu

SEQ ID NO: 833304 - RNA, 22 nt, Human
caauuucagguggauagguuuu

SEQ ID NO: 833305 - RNA, 22 nt, Human
uggccuggaaaaaugcagaugg

SEQ ID NO: 833306 - RNA, 22 nt, Human
caagcagagacuagauagcugu

SEQ ID NO: 833307 - RNA, 22 nt, Human
cggcagcaaaggaagccagguc

SEQ ID NO: 833308 - RNA, 22 nt, Human
gcagaggcuguagggaagguug

SEQ ID NO: 833309 - RNA, 22 nt, Human
aaucccagcuacucaggaaguu

SEQ ID NO: 833310 - RNA, 22 nt, Human
cagcuggcuggucagugcacaa

SEQ ID NO: 833311 - RNA, 22 nt, Human
ggcucuggcaaggggaggcuac

SEQ ID NO: 833312 - RNA, 19 nt, Human
gaguuauugccagggcaug

SEQ ID NO: 833313 - RNA, 22 nt, Human
ugagggcugcuuccagagcuag

SEQ ID NO: 833314 - RNA, 22 nt, Human
aaaguuagacagcaucauuucu

SEQ ID NO: 833315 - RNA, 22 nt, Human
acccagagccagggucaggagc

SEQ ID NO: 833316 - RNA, 22 nt, Human
ugcauuguaggauguuuagcag

SEQ ID NO: 833317 - RNA, 23 nt, Human
cagaaaacccagagcucaguccc

SEQ ID NO: 833318 - RNA, 22 nt, Human
cagcuuccgaccgggggcugca

SEQ ID NO: 833319 - RNA, 22 nt, Human
gcauuucugugcauacacauga

SEQ ID NO: 833320 - RNA, 23 nt, Human
ggaguuggauuguacuugcugcu

SEQ ID NO: 833321 - RNA, 22 nt, Human
ugcccaaguccuccaccgaggu

SEQ ID NO: 833322 - RNA, 22 nt, Human
ucuggccacccgaggccccugc

SEQ ID NO: 833323 - RNA, 22 nt, Human
cuggccuggcagggagggcaug

SEQ ID NO: 833324 - RNA, 22 nt, Human
ugcugguggagaaaguggaggu

SEQ ID NO: 833325 - RNA, 22 nt, Human
gaggacagagccgccuggcaag

SEQ ID NO: 833326 - RNA, 22 nt, Human
aguuucuaccgguacauucagg

SEQ ID NO: 833327 - RNA, 22 nt, Human
ccucccuuggccauagccagcc

SEQ ID NO: 833328 - RNA, 22 nt, Human
aaaaguaauugcaauuuuguag

SEQ ID NO: 833329 - RNA, 22 nt, Human
cagugucuuauuuguagcucag

SEQ ID NO: 833330 - RNA, 22 nt, Human
guagaagugaugucauguuaua

SEQ ID NO: 833331 - RNA, 22 nt, Human
uuuuccagauuggacuuagucc

SEQ ID NO: 833332 - RNA, 22 nt, Human
caggcagcagccacucugguau

SEQ ID NO: 833333 - RNA, 22 nt, Human
uuccaggauagcuuucaggaau

SEQ ID NO: 833334 - RNA, 22 nt, Human
ugaauaaucuuggguauuaaua

SEQ ID NO: 833335 - RNA, 22 nt, Human
aauaauuacccaucuuuuugua

SEQ ID NO: 833336 - RNA, 22 nt, Human
aucuggcuuucuuaaugacuua

SEQ ID NO: 833337 - RNA, 20 nt, Human
agguggcuccugcugggggu

SEQ ID NO: 833338 - RNA, 20 nt, Human
uauuucugggcaaccauuua

SEQ ID NO: 833339 - RNA, 22 nt, Human
cauuucaaggaccacccuggga

SEQ ID NO: 833340 - RNA, 22 nt, Human
uucuuaaagaggcaaaacacag

SEQ ID NO: 833341 - RNA, 19 nt, Human
ucaaaugccaaugucacag

SEQ ID NO: 833342 - RNA, 22 nt, Human
gacaauacagaaagggacaugc

SEQ ID NO: 833343 - RNA, 22 nt, Human
gcucugagaggugcagcaguaa

SEQ ID NO: 833344 - RNA, 22 nt, Human
accaggaguuuugaccaggggc

SEQ ID NO: 833345 - RNA, 22 nt, Human
auacaacagaaaaugauuauuc

SEQ ID NO: 833346 - RNA, 22 nt, Human
ugcaauaacuacuuuaauguug

SEQ ID NO: 833347 - RNA, 22 nt, Human
uucuaacucuguuauguguuuc

SEQ ID NO: 833348 - RNA, 22 nt, Human
augguacaaaauguauaaaguc

SEQ ID NO: 833349 - RNA, 22 nt, Human
agagaaaacucauugagguguc

SEQ ID NO: 833350 - RNA, 15 nt, Human
cagucccagggaccc

SEQ ID NO: 833351 - RNA, 22 nt, Human
uaaucuguauuccuacuuugca

SEQ ID NO: 833352 - RNA, 22 nt, Human
agcugcagauucuaucuagaag

SEQ ID NO: 833353 - RNA, 22 nt, Human
cacacagaugguaagggaggga

SEQ ID NO: 833354 - RNA, 22 nt, Human
agcuguguagggaaucagagaa

SEQ ID NO: 833355 - RNA, 19 nt, Human
ccucccacggauuccuucc

SEQ ID NO: 833356 - RNA, 22 nt, Human
guggagccaggaucuccgcaca

SEQ ID NO: 833357 - RNA, 22 nt, Human
ugaggcuggcaaggcugguauu

SEQ ID NO: 833358 - RNA, 22 nt, Human
cuggcucccagcuuucagggag

SEQ ID NO: 833359 - RNA, 22 nt, Human
uucucuuuucaccaguugcuaa

SEQ ID NO: 833360 - RNA, 21 nt, Human
cuguggaagggaacuagaggg

SEQ ID NO: 833361 - RNA, 22 nt, Human
acauuaucccuggcacaacugc

SEQ ID NO: 833362 - RNA, 21 nt, Human
cugcucuggggaccggcugug

SEQ ID NO: 833363 - RNA, 22 nt, Human
ugcucugugguccaagauggcu

SEQ ID NO: 833364 - RNA, 22 nt, Human
augcuuaauacacuguuaaagg

SEQ ID NO: 833365 - RNA, 22 nt, Human
ggguccagcgacagcaggcuca

SEQ ID NO: 833366 - RNA, 22 nt, Human
gacagaagaggaacuuggacag

SEQ ID NO: 833367 - RNA, 22 nt, Human
cagcaaaagccagcauaagcuc

SEQ ID NO: 833368 - RNA, 22 nt, Human
aucaguuuggugcuuucaguga

SEQ ID NO: 833369 - RNA, 22 nt, Human
ucaccuuagcuagaggaagaga

SEQ ID NO: 833370 - RNA, 22 nt, Human
uuauuuaaaagugguaagauuc

SEQ ID NO: 833371 - RNA, 22 nt, Human
aagcugccugccacgcuagaua

SEQ ID NO: 833372 - RNA, 22 nt, Human
uuauagaaggagcauucacuua

SEQ ID NO: 833373 - RNA, 20 nt, Human
ucugaggcugagcucuacuu

SEQ ID NO: 833374 - RNA, 22 nt, Human
cggcuggguucggcugcaggcc

SEQ ID NO: 833375 - RNA, 22 nt, Human
auguccuuccauuuugaucugu

SEQ ID NO: 833376 - RNA, 22 nt, Human
aucagaaaggugggcaagcaga

SEQ ID NO: 833377 - RNA, 22 nt, Human
uucaaagugcauguuccucaga

SEQ ID NO: 833378 - RNA, 22 nt, Human
ccucugggagacugcuacugag

SEQ ID NO: 833379 - RNA, 22 nt, Human
ugaaacaaugugaaguugcuga

SEQ ID NO: 833380 - RNA, 22 nt, Human
aggacagcccuugagagcacau

SEQ ID NO: 833381 - RNA, 17 nt, Human
agagggaaaaugcgguu

SEQ ID NO: 833382 - RNA, 21 nt, Human
auggauuuaaacaggccacaa

SEQ ID NO: 833383 - RNA, 22 nt, Human
ucagagaaaugaaguagggauu

SEQ ID NO: 833384 - RNA, 22 nt, Human
cagcugggagcuccauuagaua

SEQ ID NO: 833385 - RNA, 22 nt, Human
cugggcacuuuggggagccuac

SEQ ID NO: 833386 - RNA, 22 nt, Human
gccagcucagaugcaggaagga

SEQ ID NO: 833387 - RNA, 21 nt, Human
uggcucugcucagagcagucc

SEQ ID NO: 833388 - RNA, 22 nt, Human
ugggcagacugagcccuguccc

SEQ ID NO: 833389 - RNA, 22 nt, Human
ucauuuccucaaauucaagguu

SEQ ID NO: 833390 - RNA, 20 nt, Human
auugucagccuucagaggag

SEQ ID NO: 833391 - RNA, 22 nt, Human
aguuuccaaagcauguucacac

SEQ ID NO: 833392 - RNA, 22 nt, Human
agucccagugacuuggccagaa

SEQ ID NO: 833393 - RNA, 22 nt, Human
uuucuaguaaucaauauaaagu

SEQ ID NO: 833394 - RNA, 22 nt, Human
uuaauacaagcauaugcacaca

SEQ ID NO: 833395 - RNA, 22 nt, Human
gagcagcuguccccaaagcuuc

SEQ ID NO: 833396 - RNA, 22 nt, Human
cugccacuuacuaggcauggug

SEQ ID NO: 833397 - RNA, 22 nt, Human
uaauuccaaguugagacaugca

SEQ ID NO: 833398 - RNA, 22 nt, Human
ucagggacuaggugcugccuga

SEQ ID NO: 833399 - RNA, 18 nt, Human
ggcugagguugacuagaa

SEQ ID NO: 833400 - RNA, 22 nt, Human
acagcagccuuguugguuucga

SEQ ID NO: 833401 - RNA, 20 nt, Human
cacguuuuuccacuagcaaa

SEQ ID NO: 833402 - RNA, 22 nt, Human
aggcaggcacacuuccuccagg

SEQ ID NO: 833403 - RNA, 22 nt, Human
uguauagaguuggaagaugacu

SEQ ID NO: 833404 - RNA, 22 nt, Human
acuguucaucucuuagaaagua

SEQ ID NO: 833405 - RNA, 22 nt, Human
cccagcuccagagccagaaaca

SEQ ID NO: 833406 - RNA, 22 nt, Human
acugugcaugaaccgaaacaaa

SEQ ID NO: 833407 - RNA, 22 nt, Human
agggcuggcuaggugcguuccc

SEQ ID NO: 833408 - RNA, 22 nt, Human
uccugaggaaaguucaugaaug

SEQ ID NO: 833409 - RNA, 22 nt, Human
gaugcagggcuggcaggagcuu

SEQ ID NO: 833410 - RNA, 22 nt, Human
gagaagguggaccugaaggagc

SEQ ID NO: 833411 - RNA, 22 nt, Human
uaauauguguuacugacuuuuu

SEQ ID NO: 833412 - RNA, 22 nt, Human
gcaggaaagguugagacuuugc

SEQ ID NO: 833413 - RNA, 22 nt, Human
cagcaggaccauugaggcauca

SEQ ID NO: 833414 - RNA, 22 nt, Human
gucaugccagcggagcucggga

SEQ ID NO: 833415 - RNA, 22 nt, Human
ugggaauggaugcuaagugcua

SEQ ID NO: 833416 - RNA, 22 nt, Human
uguuuuaaagccauugccuuuc

SEQ ID NO: 833417 - RNA, 19 nt, Human
ugaaggagggggauggcca

SEQ ID NO: 833418 - RNA, 22 nt, Human
uagcagggccaggcugggaacc

SEQ ID NO: 833419 - RNA, 22 nt, Human
ugaaaugagagcacagaauaaa

SEQ ID NO: 833420 - RNA, 22 nt, Human
cccgggaggaggaaguugcagu

SEQ ID NO: 833421 - RNA, 22 nt, Human
acaaaugcaaguuuuaugucaa

SEQ ID NO: 833422 - RNA, 22 nt, Human
agcucccagagcucgagaguaa

SEQ ID NO: 833423 - RNA, 22 nt, Human
gcauguguggaggagaugugcu

SEQ ID NO: 833424 - RNA, 22 nt, Human
agggcucugagugggaaagagg

SEQ ID NO: 833425 - RNA, 22 nt, Human
cuugcaggccuuucuagcucua

SEQ ID NO: 833426 - RNA, 22 nt, Human
uaugaacauguucauugacuua

SEQ ID NO: 833427 - RNA, 18 nt, Human
agaggggagguaagucug

SEQ ID NO: 833428 - RNA, 22 nt, Human
augaagauaagaccaggcugga

SEQ ID NO: 833429 - RNA, 22 nt, Human
caguggugaagagcaggggcuc

SEQ ID NO: 833430 - RNA, 22 nt, Human
uggaaauguauuugggcaugcc

SEQ ID NO: 833431 - RNA, 22 nt, Human
ucagugucuugggcuugaaugc

SEQ ID NO: 833432 - RNA, 22 nt, Human
agaucugaggguccaagggagg

SEQ ID NO: 833433 - RNA, 22 nt, Human
guaauugacucagcucuguuca

SEQ ID NO: 833434 - RNA, 22 nt, Human
acugcccucccaucuauugcaa

SEQ ID NO: 833435 - RNA, 22 nt, Human
ggagaaggaagaaagcuacuau

SEQ ID NO: 833436 - RNA, 22 nt, Human
ugcacuggggucccagcgcacg

SEQ ID NO: 833437 - RNA, 22 nt, Human
uauauuuaaauccagguugaaa

SEQ ID NO: 833438 - RNA, 22 nt, Human
cagagguaccagcagccucugg

SEQ ID NO: 833439 - RNA, 22 nt, Human
acagauauuuggggaaagacgu

SEQ ID NO: 833440 - RNA, 22 nt, Human
ccaaagcaagucacaugaucaa

SEQ ID NO: 833441 - RNA, 22 nt, Human
uguccuuauauuguggaagggg

SEQ ID NO: 833442 - RNA, 22 nt, Human
gccuaauaugcaaaauugauac

SEQ ID NO: 833443 - RNA, 22 nt, Human
ccuguggcacaugcagggauuc

SEQ ID NO: 833444 - RNA, 22 nt, Human
gccugaggaaugcuccugacuu

SEQ ID NO: 833445 - RNA, 22 nt, Human
cucagggcaguauggcugagag

SEQ ID NO: 833446 - RNA, 22 nt, Human
ugaggcagaguaagauacauga

SEQ ID NO: 833447 - RNA, 19 nt, Human
cuggggcuuugguacugcc

SEQ ID NO: 833448 - RNA, 22 nt, Human
gacuaugugaagugugaauagg

SEQ ID NO: 833449 - RNA, 22 nt, Human
ugcuugugagaguuuuuucaga

SEQ ID NO: 833450 - RNA, 22 nt, Human
ggccccacgggggaguccuagu

SEQ ID NO: 833451 - RNA, 21 nt, Human
aggcucagagaucaaacagua

SEQ ID NO: 833452 - RNA, 22 nt, Human
aaucaguguguaaaguggcugc

SEQ ID NO: 833453 - RNA, 22 nt, Human
aguccuuacaccuggaaccuau

SEQ ID NO: 833454 - RNA, 22 nt, Human
ccagcagcccacaggcgucccu

SEQ ID NO: 833455 - RNA, 22 nt, Human
acuuugaaucucagauaaccaa

SEQ ID NO: 833456 - RNA, 22 nt, Human
uuugggaagaggaaucucugga

SEQ ID NO: 833457 - RNA, 22 nt, Human
ugaacucgggaggaggcugcag

SEQ ID NO: 833458 - RNA, 22 nt, Human
cuucagaggggacucaaaguca

SEQ ID NO: 833459 - RNA, 22 nt, Human
gccugcagugagugcagaaggu

SEQ ID NO: 833460 - RNA, 22 nt, Human
gguggcagucuuaagagaucuu

SEQ ID NO: 833461 - RNA, 22 nt, Human
cccaggcagagagcuggugagc

SEQ ID NO: 833462 - RNA, 22 nt, Human
auuucacucuuaauugcuuccu

SEQ ID NO: 833463 - RNA, 22 nt, Human
augcuuaagcucaguuauauau

SEQ ID NO: 833464 - RNA, 22 nt, Human
auuucagauucagaaauguagg

SEQ ID NO: 833465 - RNA, 22 nt, Human
uuccuuagccugccuuccaggg

SEQ ID NO: 833466 - RNA, 22 nt, Human
aucuggcugagcgaggcccaca

SEQ ID NO: 833467 - RNA, 22 nt, Human
acacaaguucuaaagauugcgc

SEQ ID NO: 833468 - RNA, 22 nt, Human
caguacuugggaaugcugggga

SEQ ID NO: 833469 - RNA, 22 nt, Human
cagcccagcagucuuagccugc

SEQ ID NO: 833470 - RNA, 22 nt, Human
ugcuggcuacugauggcaggcc

SEQ ID NO: 833471 - RNA, 17 nt, Human
ugaauucaaucugcacu

SEQ ID NO: 833472 - RNA, 22 nt, Human
uaaauuaugucacaugacucug

SEQ ID NO: 833473 - RNA, 22 nt, Human
uuuuuauaacucuuuugugaca

SEQ ID NO: 833474 - RNA, 22 nt, Human
gaacuguaguuaauacuacaca

SEQ ID NO: 833475 - RNA, 20 nt, Human
cucucccagcacagcuuccu

SEQ ID NO: 833476 - RNA, 22 nt, Human
cagcugaguuacucugaggucu

SEQ ID NO: 833477 - RNA, 20 nt, Human
aggaagcugagauguagagg

SEQ ID NO: 833478 - RNA, 22 nt, Human
gaacaucagucauaauuuaacg

SEQ ID NO: 833479 - RNA, 23 nt, Human
uagaauucaaucuguuccacauc

SEQ ID NO: 833480 - RNA, 22 nt, Human
ccguagcacaugcuccuggggc

SEQ ID NO: 833481 - RNA, 21 nt, Human
guauugcagaguuaugugcuc

SEQ ID NO: 833482 - RNA, 22 nt, Human
gacagcagggacauguaggaag

SEQ ID NO: 833483 - RNA, 22 nt, Human
guuccauaucacagcagacgaa

SEQ ID NO: 833484 - RNA, 22 nt, Human
agaaaaaucuuggcgcuugucu

SEQ ID NO: 833485 - RNA, 22 nt, Human
caggagaucuuaggaauucuua

SEQ ID NO: 833486 - RNA, 22 nt, Human
ccagcacugcucucagacugag

SEQ ID NO: 833487 - RNA, 20 nt, Human
ugcagagcuggcuggcuccu

SEQ ID NO: 833488 - RNA, 22 nt, Human
uaaagguagcaugaaacugcaa

SEQ ID NO: 833489 - RNA, 22 nt, Human
auggcauuugaaucugucuuuu

SEQ ID NO: 833490 - RNA, 22 nt, Human
uguggccagcagguggcugugu

SEQ ID NO: 833491 - RNA, 17 nt, Human
uugggagagaaagguau

SEQ ID NO: 833492 - RNA, 22 nt, Human
ugucccagauacuggacauaga

SEQ ID NO: 833493 - RNA, 22 nt, Human
uuucaacguguaaucuuauuua

SEQ ID NO: 833494 - RNA, 22 nt, Human
uuugacaucaauacccuagaau

SEQ ID NO: 833495 - RNA, 22 nt, Human
cagugcauaaucuaaauggggg

SEQ ID NO: 833496 - RNA, 22 nt, Human
uacuaaauaguuuaauuccuca

SEQ ID NO: 833497 - RNA, 22 nt, Human
agcugcuguccuaggcacugua

SEQ ID NO: 833498 - RNA, 22 nt, Human
aggcucaguuugguuuccauug

SEQ ID NO: 833499 - RNA, 22 nt, Human
acacaguaugaaaagucuaguu

SEQ ID NO: 833500 - RNA, 22 nt, Human
uagagcuggaaaacugcaggua

SEQ ID NO: 833501 - RNA, 22 nt, Human
gagaagcaaucaguggccaccc

SEQ ID NO: 833502 - RNA, 20 nt, Human
aaggcacuaugucugcuagc

SEQ ID NO: 833503 - RNA, 20 nt, Human
gcugccuguuucuguaagua

SEQ ID NO: 833504 - RNA, 22 nt, Human
accaggaggaaguguuaaugau

SEQ ID NO: 833505 - RNA, 22 nt, Human
agauaaaaugguucaaaggcua

SEQ ID NO: 833506 - RNA, 22 nt, Human
caaaugcaugagaaauaagagg

SEQ ID NO: 833507 - RNA, 22 nt, Human
aagaguuaagcaacagauacca

SEQ ID NO: 833508 - RNA, 22 nt, Human
uacagauauagagauuuauaga

SEQ ID NO: 833509 - RNA, 19 nt, Human
uacauuuguguacacuugu

SEQ ID NO: 833510 - RNA, 22 nt, Human
gcauguuauguaucugcccagc

SEQ ID NO: 833511 - RNA, 22 nt, Human
ugucuagggagcugcucaggcu

SEQ ID NO: 833512 - RNA, 22 nt, Human
cccaagaucuuucgugcacuaa

SEQ ID NO: 833513 - RNA, 22 nt, Human
ccagcagagucuaggaaggagg

SEQ ID NO: 833514 - RNA, 22 nt, Human
cagggcugguuugucgaagaaa

SEQ ID NO: 833515 - RNA, 22 nt, Human
ugaagcaaacgcuucuguuccu

SEQ ID NO: 833516 - RNA, 19 nt, Human
uguuggugcggauguggag

SEQ ID NO: 833517 - RNA, 22 nt, Human
gggcucugggaugcucuuagag

SEQ ID NO: 833518 - RNA, 22 nt, Human
cucaaggaaagucuggagaaga

SEQ ID NO: 833519 - RNA, 22 nt, Human
cucugauuuccuuauucuguca

SEQ ID NO: 833520 - RNA, 23 nt, Human
uuuuccagaaucgacucuguaga

SEQ ID NO: 833521 - RNA, 18 nt, Human
aucucccauuggccaagg

SEQ ID NO: 833522 - RNA, 22 nt, Human
gaguccuuccagcaggcauuua

SEQ ID NO: 833523 - RNA, 22 nt, Human
ugucucaguucccuucucugga

SEQ ID NO: 833524 - RNA, 22 nt, Human
aaucagaacgcucgaucuucgg

SEQ ID NO: 833525 - RNA, 22 nt, Human
cuaugacacaggccauuauaua

SEQ ID NO: 833526 - RNA, 23 nt, Human
caguacuuaguguagcguuaauu

SEQ ID NO: 833527 - RNA, 22 nt, Human
ggucccaggcugcgggcuggug

SEQ ID NO: 833528 - RNA, 22 nt, Human
aggaagccugcaggugacugcu

SEQ ID NO: 833529 - RNA, 22 nt, Human
ucaaaguuuuugagaauuacau

SEQ ID NO: 833530 - RNA, 22 nt, Human
auacaugugggucuaaacauau

SEQ ID NO: 833531 - RNA, 22 nt, Human
agggccuggugaccuggguccu

SEQ ID NO: 833532 - RNA, 22 nt, Human
cugccuuggaaaaugugguaau

SEQ ID NO: 833533 - RNA, 22 nt, Human
cucagcagugacaagagaguau

SEQ ID NO: 833534 - RNA, 22 nt, Human
ucugagcuacgaugccugucac

SEQ ID NO: 833535 - RNA, 22 nt, Human
ucuggcucaaaauacguacucu

SEQ ID NO: 833536 - RNA, 22 nt, Human
ccugggagagucuguggucucc

SEQ ID NO: 833537 - RNA, 22 nt, Human
ugggaccaagucauuucuuuag

SEQ ID NO: 833538 - RNA, 22 nt, Human
gcuguauuuaacaacuggcuca

SEQ ID NO: 833539 - RNA, 22 nt, Human
ggccucugggguccugagccca

SEQ ID NO: 833540 - RNA, 19 nt, Human
guuccaaaggccagaccuu

SEQ ID NO: 833541 - RNA, 22 nt, Human
agcugagcugcagaugacugua

SEQ ID NO: 833542 - RNA, 22 nt, Human
ugcagaagacacaagguaacgu

SEQ ID NO: 833543 - RNA, 21 nt, Human
ugccagcauuaaacagucauu

SEQ ID NO: 833544 - RNA, 22 nt, Human
ucacaauauuuaucuuccaauu

SEQ ID NO: 833545 - RNA, 22 nt, Human
cucagagaagucuuugcuaaac

SEQ ID NO: 833546 - RNA, 23 nt, Human
uccagcagagccuuccaggaggg

SEQ ID NO: 833547 - RNA, 22 nt, Human
ggcugccuucccugagccccgg

SEQ ID NO: 833548 - RNA, 21 nt, Human
cauugucgacauuuuccccuc

SEQ ID NO: 833549 - RNA, 22 nt, Human
cagccagccucucaaccaugca

SEQ ID NO: 833550 - RNA, 22 nt, Human
gcugcaggagcuggagcugugg

SEQ ID NO: 833551 - RNA, 23 nt, Human
aggcagcagguuguccaggguga

SEQ ID NO: 833552 - RNA, 22 nt, Human
cuggagcuaauaauccaucuga

SEQ ID NO: 833553 - RNA, 23 nt, Human
uuagagaugauuaaaaaaucuug

SEQ ID NO: 833554 - RNA, 22 nt, Human
cugugccuggggggcagagcug

SEQ ID NO: 833555 - RNA, 22 nt, Human
gagagucacugucugcauuucc

SEQ ID NO: 833556 - RNA, 22 nt, Human
agaggggcucaagcaguggucu

SEQ ID NO: 833557 - RNA, 22 nt, Human
cccaggaggcagagguugcagu

SEQ ID NO: 833558 - RNA, 22 nt, Human
uaaaaguuuuaguuguacauaa

SEQ ID NO: 833559 - RNA, 22 nt, Human
uguacaguauauuucaaagcca

SEQ ID NO: 833560 - RNA, 22 nt, Human
aagaacugugcuccaggcucca

SEQ ID NO: 833561 - RNA, 22 nt, Human
cccagcugcaccucuauggccu

SEQ ID NO: 833562 - RNA, 20 nt, Human
uccuucaggcagggccuagu

SEQ ID NO: 833563 - RNA, 22 nt, Human
gcagcagcccagggcucucaga

SEQ ID NO: 833564 - RNA, 22 nt, Human
ucagagaaguaagguggggugc

SEQ ID NO: 833565 - RNA, 22 nt, Human
gagagcugggcuuugggugaag

SEQ ID NO: 833566 - RNA, 22 nt, Human
aagccgaggccacacagcagga

SEQ ID NO: 833567 - RNA, 22 nt, Human
ucugccugcaguguggcagggc

SEQ ID NO: 833568 - RNA, 22 nt, Human
gcaguggggcgcugggaguugg

SEQ ID NO: 833569 - RNA, 22 nt, Human
ugggccuggguuccuccugggc

SEQ ID NO: 833570 - RNA, 22 nt, Human
aaugcacagcuaaagugguucc

SEQ ID NO: 833571 - RNA, 22 nt, Human
uuucaguuuuugcucgauguau

SEQ ID NO: 833572 - RNA, 22 nt, Human
ugaggcaggaugcuugcacagg

SEQ ID NO: 833573 - RNA, 22 nt, Human
uggcuucagacuucugcuacgu

SEQ ID NO: 833574 - RNA, 22 nt, Human
aguccaugguucugacucaucu

SEQ ID NO: 833575 - RNA, 22 nt, Human
acaauguaggauauguacuugu

SEQ ID NO: 833576 - RNA, 23 nt, Human
cccuggccuuggggcacaggcug

SEQ ID NO: 833577 - RNA, 22 nt, Human
cagcagagcugugugggaaggg

SEQ ID NO: 833578 - RNA, 22 nt, Human
agugaaauuccuggucuuuguu

SEQ ID NO: 833579 - RNA, 22 nt, Human
caaggcaggaagccugucuuau

SEQ ID NO: 833580 - RNA, 18 nt, Human
gcagcugcaguuguagcu

SEQ ID NO: 833581 - RNA, 22 nt, Human
ggcacagggagccgcaguugca

SEQ ID NO: 833582 - RNA, 22 nt, Human
gcugauuauuacaugucugugg

SEQ ID NO: 833583 - RNA, 22 nt, Human
uccaggagggauugggcugugg

SEQ ID NO: 833584 - RNA, 22 nt, Human
ucaaaauuagugaccaaaggca

SEQ ID NO: 833585 - RNA, 22 nt, Human
cugggagggguagccaauccua

SEQ ID NO: 833586 - RNA, 22 nt, Human
gcagggccuuagcagcggcugc

SEQ ID NO: 833587 - RNA, 20 nt, Human
cccugcagccaugggagugg

SEQ ID NO: 833588 - RNA, 22 nt, Human
ggcuuaaugguucuuuuucuca

SEQ ID NO: 833589 - RNA, 22 nt, Human
agugucugaaccaccggggcau

SEQ ID NO: 833590 - RNA, 22 nt, Human
ugcugucuguuuacuggcuaua

SEQ ID NO: 833591 - RNA, 22 nt, Human
ugaaaucaauugcaauguuuau

SEQ ID NO: 833592 - RNA, 22 nt, Human
accaugggucagccaccucagc

SEQ ID NO: 833593 - RNA, 22 nt, Human
ucucaggaauagaguggcagca

SEQ ID NO: 833594 - RNA, 22 nt, Human
gcagcugagcgugaggaagagu

SEQ ID NO: 833595 - RNA, 22 nt, Human
ggacacagcugcagccacaccc

SEQ ID NO: 833596 - RNA, 17 nt, Human
uucaaagcuuaucaagg

SEQ ID NO: 833597 - RNA, 22 nt, Human
ucauggcacuuagcacaguccu

SEQ ID NO: 833598 - RNA, 22 nt, Human
gaauuucagagguaacaucauc

SEQ ID NO: 833599 - RNA, 22 nt, Human
aggcagaccaugaaucaugacc

SEQ ID NO: 833600 - RNA, 22 nt, Human
uugcuagcugguguaugcauug

SEQ ID NO: 833601 - RNA, 22 nt, Human
cagugcaguugguggcaggggu

SEQ ID NO: 833602 - RNA, 19 nt, Human
uggcugggcgugccuccgu

SEQ ID NO: 833603 - RNA, 20 nt, Human
ucuggcaggugaacgagcug

SEQ ID NO: 833604 - RNA, 22 nt, Human
guguggcugauugacaugguca

SEQ ID NO: 833605 - RNA, 21 nt, Human
cuguuucuugugaagugacac

SEQ ID NO: 833606 - RNA, 22 nt, Human
caaauaguaugagcaaugauuc

SEQ ID NO: 833607 - RNA, 22 nt, Human
ccacagggcacagacaggaagc

SEQ ID NO: 833608 - RNA, 19 nt, Human
uucuccaggcugcagaggg

SEQ ID NO: 833609 - RNA, 22 nt, Human
aagcagaugggacuccaaggca

SEQ ID NO: 833610 - RNA, 22 nt, Human
cagggucuuauaaggccaauuu

SEQ ID NO: 833611 - RNA, 22 nt, Human
uuucuggcagcgggacaggggu

SEQ ID NO: 833612 - RNA, 22 nt, Human
cuuuuuccagcuucaggguggg

SEQ ID NO: 833613 - RNA, 22 nt, Human
uagaaacugauagucuugugcu

SEQ ID NO: 833614 - RNA, 22 nt, Human
uauguacaccggggaagguggg

SEQ ID NO: 833615 - RNA, 22 nt, Human
ccugggugacccgugagcgucc

SEQ ID NO: 833616 - RNA, 22 nt, Human
cagaguacugggagaacagaag

SEQ ID NO: 833617 - RNA, 22 nt, Human
ggcagcagggucuagauugaug

SEQ ID NO: 833618 - RNA, 22 nt, Human
cuugggaaugcuaacagaugac

SEQ ID NO: 833619 - RNA, 22 nt, Human
uuccuuccgggcaccaggcacu

SEQ ID NO: 833620 - RNA, 23 nt, Human
aaccagauaaauggcuccagggc

SEQ ID NO: 833621 - RNA, 22 nt, Human
ccuggagcucacugggagccgg

SEQ ID NO: 833622 - RNA, 22 nt, Human
cagccaucccagccugugguuc

SEQ ID NO: 833623 - RNA, 22 nt, Human
uuuauauuucccaggauuggcc

SEQ ID NO: 833624 - RNA, 22 nt, Human
ugaaggugucuuugugaacauc

SEQ ID NO: 833625 - RNA, 22 nt, Human
ugucugagugugccugggcauu

SEQ ID NO: 833626 - RNA, 23 nt, Human
cuggcucuguagguggcauccuu

SEQ ID NO: 833627 - RNA, 22 nt, Human
uggaaagcgaggaguuggcauu

SEQ ID NO: 833628 - RNA, 22 nt, Human
agcaauauaaauguuggguaga

SEQ ID NO: 833629 - RNA, 22 nt, Human
ugcagccaucuuucuuggagga

SEQ ID NO: 833630 - RNA, 22 nt, Human
aaaguuguucaguaagaaacuc

SEQ ID NO: 833631 - RNA, 22 nt, Human
cucuuaguaaugccaugaagca

SEQ ID NO: 833632 - RNA, 22 nt, Human
agguaaagacugcaaggagaau

SEQ ID NO: 833633 - RNA, 22 nt, Human
gccuccuggccuuugcuccuca

SEQ ID NO: 833634 - RNA, 22 nt, Human
cuggccuuggugcuugcagaca

SEQ ID NO: 833635 - RNA, 18 nt, Human
uacagauuauagauacau

SEQ ID NO: 833636 - RNA, 22 nt, Human
ucuaaccuuugaaacugcuuuc

SEQ ID NO: 833637 - RNA, 22 nt, Human
guacucucuugaaggccuuucu

SEQ ID NO: 833638 - RNA, 21 nt, Human
agagagaaggccauauggucc

SEQ ID NO: 833639 - RNA, 22 nt, Human
gggccuguguguucaggagccu

SEQ ID NO: 833640 - RNA, 22 nt, Human
caguacuugggggguucuaagu

SEQ ID NO: 833641 - RNA, 23 nt, Human
uggcaccaggcauucuaggggua

SEQ ID NO: 833642 - RNA, 22 nt, Human
caggggcuguggcacauggugu

SEQ ID NO: 833643 - RNA, 22 nt, Human
uuccuuagauccuucaaucacg

SEQ ID NO: 833644 - RNA, 22 nt, Human
auaauuuaauuuucacaguggu

SEQ ID NO: 833645 - RNA, 22 nt, Human
accucugcaaugcaaugucaug

SEQ ID NO: 833646 - RNA, 22 nt, Human
agaggagcugggaggcccucgu

SEQ ID NO: 833647 - RNA, 22 nt, Human
uuuccaaaaugaaucuaaugca

SEQ ID NO: 833648 - RNA, 22 nt, Human
uuaaacagguuuuugaauggcc

SEQ ID NO: 833649 - RNA, 22 nt, Human
ccaaacaaauccccauucuuag

SEQ ID NO: 833650 - RNA, 18 nt, Human
uggcagggaggaaauaua

SEQ ID NO: 833651 - RNA, 22 nt, Human
gaaggcaggcuucugauuaggu

SEQ ID NO: 833652 - RNA, 22 nt, Human
gugaaaauaaggcugguucuug

SEQ ID NO: 833653 - RNA, 22 nt, Human
uuccuuagggaaagggauaagg

SEQ ID NO: 833654 - RNA, 22 nt, Human
augcuauacucaaagaaauuca

SEQ ID NO: 833655 - RNA, 22 nt, Human
agggcugcuccuccuucaggcc

SEQ ID NO: 833656 - RNA, 22 nt, Human
auaaacacuucuagggcacaca

SEQ ID NO: 833657 - RNA, 22 nt, Human
cugaaggauuagagagcacuua

SEQ ID NO: 833658 - RNA, 22 nt, Human
cucaggauuaaggaaucuaaau

SEQ ID NO: 833659 - RNA, 22 nt, Human
uucauacaaugggauauuauga

SEQ ID NO: 833660 - RNA, 20 nt, Human
ucugcccaccccggcuccca

SEQ ID NO: 833661 - RNA, 22 nt, Human
gcagcugguuaaugggagaauu

SEQ ID NO: 833662 - RNA, 22 nt, Human
gcagagacuccacugucuugug

SEQ ID NO: 833663 - RNA, 22 nt, Human
ggagcauguggggugagcaggg

SEQ ID NO: 833664 - RNA, 22 nt, Human
guuuucuuugaaugcuucuaga

SEQ ID NO: 833665 - RNA, 22 nt, Human
ucaccacugaacagaccuuugg

SEQ ID NO: 833666 - RNA, 22 nt, Human
auuucuguaacuuaugaaaguu

SEQ ID NO: 833667 - RNA, 22 nt, Human
aguauaaagugguuuucagcac

SEQ ID NO: 833668 - RNA, 21 nt, Human
cacugcagccuugaccugggc

SEQ ID NO: 833669 - RNA, 22 nt, Human
uggccugccuucgcugagcuga

SEQ ID NO: 833670 - RNA, 22 nt, Human
gguauaaaugaucagaucgcug

SEQ ID NO: 833671 - RNA, 22 nt, Human
acugaaggaagcgggcaggggu

SEQ ID NO: 833672 - RNA, 21 nt, Human
agaggccuuacaggauagacc

SEQ ID NO: 833673 - RNA, 20 nt, Human
gggcaguggcgcuaucucag

SEQ ID NO: 833674 - RNA, 22 nt, Human
cugggccauggaagucucugcc

SEQ ID NO: 833675 - RNA, 22 nt, Human
cagugaaaucacaacuuuaguu

SEQ ID NO: 833676 - RNA, 22 nt, Human
uuagaaaugucacagaucugau

SEQ ID NO: 833677 - RNA, 22 nt, Human
cuuguagaauugaaauggucuc

SEQ ID NO: 833678 - RNA, 22 nt, Human
ucagagugugacuuggucauga

SEQ ID NO: 833679 - RNA, 22 nt, Human
aagaaaagaaaccugaggcuuu

SEQ ID NO: 833680 - RNA, 22 nt, Human
cugagcccaggcgggagcugag

SEQ ID NO: 833681 - RNA, 22 nt, Human
uguucaaaugaucuucuuaaau

SEQ ID NO: 833682 - RNA, 22 nt, Human
aggcuggaguacaguggcuauu

SEQ ID NO: 833683 - RNA, 22 nt, Human
ccagcugcgggcaucgagaguu

SEQ ID NO: 833684 - RNA, 22 nt, Human
ucucugucugagccuggcagac

SEQ ID NO: 833685 - RNA, 23 nt, Human
acuuuagauaaauuaugugcaca

SEQ ID NO: 833686 - RNA, 22 nt, Human
cguauacaugaagacauugcug

SEQ ID NO: 833687 - RNA, 22 nt, Human
gcucugcugcuuacuagauggu

SEQ ID NO: 833688 - RNA, 22 nt, Human
uuccuuguuuguagcucuggga

SEQ ID NO: 833689 - RNA, 22 nt, Human
gcaggagcagucaggggcagcu

SEQ ID NO: 833690 - RNA, 22 nt, Human
cagcauggugccagugagucca

SEQ ID NO: 833691 - RNA, 22 nt, Human
agagugauggguugugcugacc

SEQ ID NO: 833692 - RNA, 22 nt, Human
aggugcuuggcucgugcacaca

SEQ ID NO: 833693 - RNA, 22 nt, Human
cucuggaggccuaaggaagugg

SEQ ID NO: 833694 - RNA, 22 nt, Human
agcagcuccugccaugagugcu

SEQ ID NO: 833695 - RNA, 22 nt, Human
uggcucaggcuugaaaauagau

SEQ ID NO: 833696 - RNA, 19 nt, Human
ucucaauguucagaaagcu

SEQ ID NO: 833697 - RNA, 22 nt, Human
ucucccaggcugcccuguggac

SEQ ID NO: 833698 - RNA, 22 nt, Human
agccacagugcaagagagaaaa

SEQ ID NO: 833699 - RNA, 22 nt, Human
aaaucaguuguuauauuaaaga

SEQ ID NO: 833700 - RNA, 22 nt, Human
aaucaguguggugacuugucug

SEQ ID NO: 833701 - RNA, 22 nt, Human
ucccaggauguuggcggcaggu

SEQ ID NO: 833702 - RNA, 22 nt, Human
ccagcugguguuccuuaggacc

SEQ ID NO: 833703 - RNA, 22 nt, Human
ugagacaguucugcagcugggu

SEQ ID NO: 833704 - RNA, 22 nt, Human
aagcaaaagguuacacuucugg

SEQ ID NO: 833705 - RNA, 22 nt, Human
cagggccaaguuggugccuuuu

SEQ ID NO: 833706 - RNA, 22 nt, Human
cuccuuagugccucugcacgag

SEQ ID NO: 833707 - RNA, 22 nt, Human
gggcaggaugcaguuucagaga

SEQ ID NO: 833708 - RNA, 22 nt, Human
auuggcaggaaccgaggagggg

SEQ ID NO: 833709 - RNA, 22 nt, Human
auacaucuuccuuuuaaaaugc

SEQ ID NO: 833710 - RNA, 22 nt, Human
cacugaaauauuaauaucuuau

SEQ ID NO: 833711 - RNA, 22 nt, Human
uacagucuuuggaaagagauag

SEQ ID NO: 833712 - RNA, 22 nt, Human
caucagcaggcaacacucuugg

SEQ ID NO: 833713 - RNA, 22 nt, Human
ugggcucugcugcguaccaguu

SEQ ID NO: 833714 - RNA, 22 nt, Human
ggcugagcacuuuaggcaggag

SEQ ID NO: 833715 - RNA, 22 nt, Human
uccugccucuugccuucuucac

SEQ ID NO: 833716 - RNA, 22 nt, Human
guacaugucaaaaaaugcauaa

SEQ ID NO: 833717 - RNA, 22 nt, Human
ccucuuccacugggccccaucc

SEQ ID NO: 833718 - RNA, 22 nt, Human
gcucugggugaacuuggagcaa

SEQ ID NO: 833719 - RNA, 22 nt, Human
caguaaagcauguaugucuuca

SEQ ID NO: 833720 - RNA, 22 nt, Human
uggaggcaccacuggcugcccg

SEQ ID NO: 833721 - RNA, 22 nt, Human
acaguuaucuuugaaauagaga

SEQ ID NO: 833722 - RNA, 22 nt, Human
ucacuggggccuuuggucagga

SEQ ID NO: 833723 - RNA, 22 nt, Human
uggcucaggauaauuuucccaa

SEQ ID NO: 833724 - RNA, 22 nt, Human
aggcugagauagguggaucauu

SEQ ID NO: 833725 - RNA, 22 nt, Human
gggcagcagagcccugccgagu

SEQ ID NO: 833726 - RNA, 22 nt, Human
ugaagcagagaauuugacaguc

SEQ ID NO: 833727 - RNA, 22 nt, Human
aggagagagcugagcuuugcug

SEQ ID NO: 833728 - RNA, 22 nt, Human
ucugugacuugcgggaggagaa

SEQ ID NO: 833729 - RNA, 22 nt, Human
uggcauuuggcuuacuuauguu

SEQ ID NO: 833730 - RNA, 22 nt, Human
ccaggacucaguggggaaaggg

SEQ ID NO: 833731 - RNA, 22 nt, Human
guuuaauaauguugaauuacua

SEQ ID NO: 833732 - RNA, 22 nt, Human
gaaggaaaggucucaugccuuu

SEQ ID NO: 833733 - RNA, 22 nt, Human
agggcucuguccccagaggccc

SEQ ID NO: 833734 - RNA, 22 nt, Human
ucaccaggcuggaaugcagugg

SEQ ID NO: 833735 - RNA, 22 nt, Human
uggggcugucccgguuuggcga

SEQ ID NO: 833736 - RNA, 22 nt, Human
ugggagcugggguuggacgucu

SEQ ID NO: 833737 - RNA, 22 nt, Human
cccugccucugaagcugcucag

SEQ ID NO: 833738 - RNA, 22 nt, Human
caggacaguuugcuuugcccug

SEQ ID NO: 833739 - RNA, 22 nt, Human
auuaaauuggacgcugggggaa

SEQ ID NO: 833740 - RNA, 22 nt, Human
ugaaaaggagccuuagguaggu

SEQ ID NO: 833741 - RNA, 22 nt, Human
uuaacacauauuuaucaauugc

SEQ ID NO: 833742 - RNA, 22 nt, Human
uuaauuaaauucaugagcauug

SEQ ID NO: 833743 - RNA, 22 nt, Human
cagcacuggggggauucggagc

SEQ ID NO: 833744 - RNA, 22 nt, Human
cgcugccaggauccccugccgg

SEQ ID NO: 833745 - RNA, 22 nt, Human
caggcuugggagcagagccacu

SEQ ID NO: 833746 - RNA, 22 nt, Human
aagauuucugcuuuuggaggca

SEQ ID NO: 833747 - RNA, 19 nt, Human
agggcugcucuggccuggg

SEQ ID NO: 833748 - RNA, 23 nt, Human
cacugcagcguggucuggcagga

SEQ ID NO: 833749 - RNA, 22 nt, Human
ccagagacgucggucagggcgc

SEQ ID NO: 833750 - RNA, 22 nt, Human
ucagcaauaugauaggcuuugu

SEQ ID NO: 833751 - RNA, 22 nt, Human
aaucagaaauucuacaucacaa

SEQ ID NO: 833752 - RNA, 22 nt, Human
auaaaaguucaagagaguacag

SEQ ID NO: 833753 - RNA, 22 nt, Human
ucacugcaaggaggcuucucaa

SEQ ID NO: 833754 - RNA, 22 nt, Human
aggagaggguggcauuaaguuu

SEQ ID NO: 833755 - RNA, 22 nt, Human
aagcagcuggaagaguaagaug

SEQ ID NO: 833756 - RNA, 22 nt, Human
cacaaaugugcagaaaugugag

SEQ ID NO: 833757 - RNA, 22 nt, Human
ccuguguggaaaccgcaugacg

SEQ ID NO: 833758 - RNA, 17 nt, Human
ucuguccagggagugug

SEQ ID NO: 833759 - RNA, 22 nt, Human
ccacagaguuacaaaacaguca

SEQ ID NO: 833760 - RNA, 22 nt, Human
ucugcagauuuaucagcagcug

SEQ ID NO: 833761 - RNA, 23 nt, Human
gugagucuugccuuugcugugga

SEQ ID NO: 833762 - RNA, 20 nt, Human
ugcuuccuggccacugcggg

SEQ ID NO: 833763 - RNA, 22 nt, Human
cagaauaaagguacaauugagu

SEQ ID NO: 833764 - RNA, 22 nt, Human
aggaugaggcuggcaggucuug

SEQ ID NO: 833765 - RNA, 22 nt, Human
cacagggcagguacucucagag

SEQ ID NO: 833766 - RNA, 22 nt, Human
ggcuggcacugaggagagcucu

SEQ ID NO: 833767 - RNA, 19 nt, Human
agccagggugagaaggagc

SEQ ID NO: 833768 - RNA, 22 nt, Human
guuugcauggaagacagugagu

SEQ ID NO: 833769 - RNA, 22 nt, Human
ccaggguguagggauuccagau

SEQ ID NO: 833770 - RNA, 22 nt, Human
aaaucagugcucauuugaaagg

SEQ ID NO: 833771 - RNA, 17 nt, Human
uuccucucacauuuuuu

SEQ ID NO: 833772 - RNA, 22 nt, Human
auuuaguguauucuaauaugug

SEQ ID NO: 833773 - RNA, 22 nt, Human
ugcugcuguuuccuacaucuca

SEQ ID NO: 833774 - RNA, 22 nt, Human
aagcagcacaguaauauuggug

SEQ ID NO: 833775 - RNA, 22 nt, Human
gccaccucggcuuucucugcuc

SEQ ID NO: 833776 - RNA, 22 nt, Human
uuauuccauucaguucaacaag

SEQ ID NO: 833777 - RNA, 22 nt, Human
ccauaaggagccagacauucca

SEQ ID NO: 833778 - RNA, 22 nt, Human
gacagggcgagacucagucuca

SEQ ID NO: 833779 - RNA, 22 nt, Human
uuagagucaaaauggcauguua

SEQ ID NO: 833780 - RNA, 23 nt, Human
aucaaacuggugagaaugucagu

SEQ ID NO: 833781 - RNA, 22 nt, Human
gcaagauguuaacauagggaga

SEQ ID NO: 833782 - RNA, 19 nt, Human
gcagccaggugcucuaccu

SEQ ID NO: 833783 - RNA, 22 nt, Human
auuaaaagcuucccaagaguua

SEQ ID NO: 833784 - RNA, 22 nt, Human
aauguauaaaguguuaauaacu

SEQ ID NO: 833785 - RNA, 22 nt, Human
ggcccaucucuugcucuggguu

SEQ ID NO: 833786 - RNA, 22 nt, Human
acugucaccaucagagcgggaa

SEQ ID NO: 833787 - RNA, 23 nt, Human
ggcugagacuacaggcgcuugcc

SEQ ID NO: 833788 - RNA, 22 nt, Human
gggacugggagauccuccuggc

SEQ ID NO: 833789 - RNA, 22 nt, Human
aacuagaaccacuuguauuucc

SEQ ID NO: 833790 - RNA, 22 nt, Human
ucagcagauggguuguguuggc

SEQ ID NO: 833791 - RNA, 22 nt, Human
gggaguggguuuggccuaggcc

SEQ ID NO: 833792 - RNA, 22 nt, Human
gcagggugauagugaggcucag

SEQ ID NO: 833793 - RNA, 21 nt, Human
ggccugagcaccuguccaccu

SEQ ID NO: 833794 - RNA, 22 nt, Human
augggaggaagagaagaugucu

SEQ ID NO: 833795 - RNA, 22 nt, Human
gacagggccgcagauggagacu

SEQ ID NO: 833796 - RNA, 22 nt, Human
gcucccacgcaauucuuuucag

SEQ ID NO: 833797 - RNA, 22 nt, Human
aauuucagaacccaaauuagcg

SEQ ID NO: 833798 - RNA, 19 nt, Human
auuccucaaggacagaaau

SEQ ID NO: 833799 - RNA, 22 nt, Human
aagauuuagggccaguuuacau

SEQ ID NO: 833800 - RNA, 18 nt, Human
gggcaagcggcugucacc

SEQ ID NO: 833801 - RNA, 22 nt, Human
ugugaaaagcguguguucuagg

SEQ ID NO: 833802 - RNA, 22 nt, Human
uuaaacagacaguaaaugaaac

SEQ ID NO: 833803 - RNA, 22 nt, Human
ccaguccagugccaugcauggc

SEQ ID NO: 833804 - RNA, 22 nt, Human
ucaggcugccuaucagacugug

SEQ ID NO: 833805 - RNA, 22 nt, Human
ggcugcuggcauugagguaggu

SEQ ID NO: 833806 - RNA, 22 nt, Human
cagcuggccaaucagggcgccc

SEQ ID NO: 833807 - RNA, 22 nt, Human
auucuccagcucacuguccaua

SEQ ID NO: 833808 - RNA, 23 nt, Human
uggcucugugucacauacaggau

SEQ ID NO: 833809 - RNA, 22 nt, Human
cagcacagggacaauagcagau

SEQ ID NO: 833810 - RNA, 22 nt, Human
agcugccacaugcccaagggca

SEQ ID NO: 833811 - RNA, 22 nt, Human
uggcagaguggaccauacucaa

SEQ ID NO: 833812 - RNA, 22 nt, Human
uaaauguaccuucugccuuacu

SEQ ID NO: 833813 - RNA, 22 nt, Human
ugccuggguccaggccaagccu

SEQ ID NO: 833814 - RNA, 22 nt, Human
uggcuccuucauucuccugcca

SEQ ID NO: 833815 - RNA, 22 nt, Human
uauguacuaacuuucauucuag

SEQ ID NO: 833816 - RNA, 22 nt, Human
ucugccugcuaacuccugcacc

SEQ ID NO: 833817 - RNA, 22 nt, Human
cugcaguguucuggaaugcauu

SEQ ID NO: 833818 - RNA, 22 nt, Human
gucuggagccacccuaagcauu

SEQ ID NO: 833819 - RNA, 20 nt, Human
ugcuccaucuaaagugauua

SEQ ID NO: 833820 - RNA, 21 nt, Human
uccaggaguggcugggcaggg

SEQ ID NO: 833821 - RNA, 22 nt, Human
uaugcauaauuggauaaguaga

SEQ ID NO: 833822 - RNA, 22 nt, Human
gugcauugcgaugcagacgacc

SEQ ID NO: 833823 - RNA, 22 nt, Human
ugggccuggcccuguggaggag

SEQ ID NO: 833824 - RNA, 22 nt, Human
gggcuggaggaccggccucgga

SEQ ID NO: 833825 - RNA, 23 nt, Human
gugcugugagccccuuggccucc

SEQ ID NO: 833826 - RNA, 22 nt, Human
ucagggcauggcugcacuuggc

SEQ ID NO: 833827 - RNA, 22 nt, Human
ucuccucugcgcggcagugccc

SEQ ID NO: 833828 - RNA, 22 nt, Human
uuuaacuuaaucugcuugauga

SEQ ID NO: 833829 - RNA, 22 nt, Human
cugccuggccugaucuccacgc

SEQ ID NO: 833830 - RNA, 22 nt, Human
agcucacagaaauccugcagga

SEQ ID NO: 833831 - RNA, 22 nt, Human
aacaugucuggguauucacaag

SEQ ID NO: 833832 - RNA, 22 nt, Human
gccgaagcugccgucugguccu

SEQ ID NO: 833833 - RNA, 22 nt, Human
ggcuccuggggaggugagcuug

SEQ ID NO: 833834 - RNA, 22 nt, Human
uagggcuauucugaguaauaau

SEQ ID NO: 833835 - RNA, 22 nt, Human
agauuuauguggucacacucag

SEQ ID NO: 833836 - RNA, 22 nt, Human
uugaacagcuguuacauuguua

SEQ ID NO: 833837 - RNA, 22 nt, Human
auuucauugaaguuaauucuuc

SEQ ID NO: 833838 - RNA, 22 nt, Human
uccuucaagaugccacagcuuu

SEQ ID NO: 833839 - RNA, 22 nt, Human
agaauuguaagcaauuugauua

SEQ ID NO: 833840 - RNA, 22 nt, Human
ccaggcugggcuacaaguugag

SEQ ID NO: 833841 - RNA, 17 nt, Human
cugcuuugugcaacgcu

SEQ ID NO: 833842 - RNA, 22 nt, Human
augggaggguggaaaggcucug

SEQ ID NO: 833843 - RNA, 22 nt, Human
uuuugaaagggugauuuggcuu

SEQ ID NO: 833844 - RNA, 18 nt, Human
uggagccagcucuaggau

SEQ ID NO: 833845 - RNA, 22 nt, Human
cagccacguagcccuuggccgu

SEQ ID NO: 833846 - RNA, 22 nt, Human
cagcugacccagugaggaggca

SEQ ID NO: 833847 - RNA, 22 nt, Human
caggccagugugcuucccaggc

SEQ ID NO: 833848 - RNA, 22 nt, Human
gcugcugguccucagagcucau

SEQ ID NO: 833849 - RNA, 22 nt, Human
ucaaguuuaauugagauguuua

SEQ ID NO: 833850 - RNA, 22 nt, Human
cuugaacucaaugugaggaaga

SEQ ID NO: 833851 - RNA, 22 nt, Human
gacagggcauggugcagaguuc

SEQ ID NO: 833852 - RNA, 22 nt, Human
ugcagcauugcaaagcagucuu

SEQ ID NO: 833853 - RNA, 22 nt, Human
caaguccuccaugugacuaggu

SEQ ID NO: 833854 - RNA, 22 nt, Human
uccuuccucggggacccagauc

SEQ ID NO: 833855 - RNA, 22 nt, Human
ggcugcugugaccucaggugau

SEQ ID NO: 833856 - RNA, 22 nt, Human
ucucuggccgagagucccuggg

SEQ ID NO: 833857 - RNA, 22 nt, Human
agagccugcuguguaagucaca

SEQ ID NO: 833858 - RNA, 22 nt, Human
uuccauaaucaccuuauucuuu

SEQ ID NO: 833859 - RNA, 22 nt, Human
cugcaggcugagcgccugccgg

SEQ ID NO: 833860 - RNA, 22 nt, Human
agcugcugagagucugccgggc

SEQ ID NO: 833861 - RNA, 21 nt, Human
gucagcagauccagcacuugu

SEQ ID NO: 833862 - RNA, 22 nt, Human
uuugcauuacuugacuuuaguu

SEQ ID NO: 833863 - RNA, 20 nt, Human
cuucaggacccauccucccc

SEQ ID NO: 833864 - RNA, 22 nt, Human
ccagggugagugucauggguua

SEQ ID NO: 833865 - RNA, 22 nt, Human
ccuuagagaguacugggcugcc

SEQ ID NO: 833866 - RNA, 21 nt, Human
gcagacugcccugcugucccc

SEQ ID NO: 833867 - RNA, 22 nt, Human
cagagcagaaaccugggugauu

SEQ ID NO: 833868 - RNA, 22 nt, Human
ggccaggaagggaagaucagca

SEQ ID NO: 833869 - RNA, 22 nt, Human
uguuugaacugaauaacauagu

SEQ ID NO: 833870 - RNA, 22 nt, Human
uccaggagagguguggggacug

SEQ ID NO: 833871 - RNA, 22 nt, Human
cagaggccccagaacuagcucu

SEQ ID NO: 833872 - RNA, 22 nt, Human
agacaugucaccaauucuuacu

SEQ ID NO: 833873 - RNA, 22 nt, Human
caggaaugacugcagauggggc

SEQ ID NO: 833874 - RNA, 22 nt, Human
gccagcagccacagaagucacu

SEQ ID NO: 833875 - RNA, 22 nt, Human
agugcugaagacuggcuaggga

SEQ ID NO: 833876 - RNA, 22 nt, Human
ugccugucuucaggagugucac

SEQ ID NO: 833877 - RNA, 21 nt, Human
auaagcaugcugauuacauuu

SEQ ID NO: 833878 - RNA, 22 nt, Human
cugugcuugcggguguggagcc

SEQ ID NO: 833879 - RNA, 23 nt, Human
acagcugcaccuggccgccuggc

SEQ ID NO: 833880 - RNA, 22 nt, Human
ucugagaguagagcugccucuu

SEQ ID NO: 833881 - RNA, 22 nt, Human
acaggggauugauuggaagucu

SEQ ID NO: 833882 - RNA, 22 nt, Human
gggagcaggagccugccugcca

SEQ ID NO: 833883 - RNA, 18 nt, Human
acugugugaauuagcucc

SEQ ID NO: 833884 - RNA, 22 nt, Human
ugcucacagcccagaacauaau

SEQ ID NO: 833885 - RNA, 22 nt, Human
agcccaagcuaugaggugaccu

SEQ ID NO: 833886 - RNA, 22 nt, Human
gugcauguuaaugguguacaaa

SEQ ID NO: 833887 - RNA, 22 nt, Human
gcagcugagagaagaacagggc

SEQ ID NO: 833888 - RNA, 22 nt, Human
cagguaaaaauaaauuugugag

SEQ ID NO: 833889 - RNA, 18 nt, Human
acccucuggcuucugagc

SEQ ID NO: 833890 - RNA, 22 nt, Human
auuuaugacuggugaauagaac

SEQ ID NO: 833891 - RNA, 18 nt, Human
uaaauauauuucccccuu

SEQ ID NO: 833892 - RNA, 22 nt, Human
auguuacacauaggcauaaaug

SEQ ID NO: 833893 - RNA, 17 nt, Human
ccaggagagaugcuugu

SEQ ID NO: 833894 - RNA, 22 nt, Human
uuugaaauaugaggcauuauga

SEQ ID NO: 833895 - RNA, 22 nt, Human
gguggcaggcccugagcauccc

SEQ ID NO: 833896 - RNA, 22 nt, Human
cagagccuaaaacgacuccacu

SEQ ID NO: 833897 - RNA, 22 nt, Human
uggguggcggccugguucugag

SEQ ID NO: 833898 - RNA, 22 nt, Human
uaaaucucacuggguauauugg

SEQ ID NO: 833899 - RNA, 22 nt, Human
aauuuacaguugcugaugguac

SEQ ID NO: 833900 - RNA, 22 nt, Human
cccuuccucccaggcuucugug

SEQ ID NO: 833901 - RNA, 22 nt, Human
ucccagcagucagagcuaugug

SEQ ID NO: 833902 - RNA, 19 nt, Human
ucaaugcaugaaaucagcc

SEQ ID NO: 833903 - RNA, 22 nt, Human
uccagggaaggugugaggcugg

SEQ ID NO: 833904 - RNA, 22 nt, Human
gaguaagagcuggcuuuggugu

SEQ ID NO: 833905 - RNA, 22 nt, Human
cggagaggugggggcagcaucu

SEQ ID NO: 833906 - RNA, 22 nt, Human
uggcaggggaggugcuugcuua

SEQ ID NO: 833907 - RNA, 22 nt, Human
guccuggggaauacagaagccg

SEQ ID NO: 833908 - RNA, 22 nt, Human
ugcaggugguuuggacacugcu

SEQ ID NO: 833909 - RNA, 22 nt, Human
agaggcaggaagagcugauuuu

SEQ ID NO: 833910 - RNA, 22 nt, Human
augugcuuguaauguuaaaugu

SEQ ID NO: 833911 - RNA, 22 nt, Human
acagggcagagggcaguuggua

SEQ ID NO: 833912 - RNA, 22 nt, Human
gggcagcuccuguggaauccac

SEQ ID NO: 833913 - RNA, 22 nt, Human
uuuauuauucucuggagaaugu

SEQ ID NO: 833914 - RNA, 22 nt, Human
cugcugugggcaggguagcugg

SEQ ID NO: 833915 - RNA, 22 nt, Human
cagaagcaaaugccuugcugag

SEQ ID NO: 833916 - RNA, 22 nt, Human
cccuggaggaaaaucugaggcu

SEQ ID NO: 833917 - RNA, 22 nt, Human
ccuuccaggagucucugcaggu

SEQ ID NO: 833918 - RNA, 22 nt, Human
cugucucucuaggacacugggg

SEQ ID NO: 833919 - RNA, 22 nt, Human
aagggcugcuguagaagcagag

SEQ ID NO: 833920 - RNA, 22 nt, Human
ugaagcaguuacuggguguuaa

SEQ ID NO: 833921 - RNA, 22 nt, Human
cccaggcagggacgugcucugg

SEQ ID NO: 833922 - RNA, 22 nt, Human
agcugaaggcuagaacagcugg

SEQ ID NO: 833923 - RNA, 22 nt, Human
guggcagcaaaauccugcauuc

SEQ ID NO: 833924 - RNA, 22 nt, Human
ucacugaauacuugucucaucc

SEQ ID NO: 833925 - RNA, 22 nt, Human
acaagguauccacauuaaaugu

SEQ ID NO: 833926 - RNA, 22 nt, Human
cagaauuuuucgaauguacugu

SEQ ID NO: 833927 - RNA, 22 nt, Human
gucacuguauccagguuccagc

SEQ ID NO: 833928 - RNA, 22 nt, Human
gauuuccuugcauauugguaau

SEQ ID NO: 833929 - RNA, 23 nt, Human
aagucaccaagaggaaggcggag

SEQ ID NO: 833930 - RNA, 22 nt, Human
uagcuguguaagcuugguaaga

SEQ ID NO: 833931 - RNA, 22 nt, Human
cccaggagguggagguugcggu

SEQ ID NO: 833932 - RNA, 22 nt, Human
ucuucucaguuucucuaggaug

SEQ ID NO: 833933 - RNA, 22 nt, Human
aagccagguguugugguaagag

SEQ ID NO: 833934 - RNA, 22 nt, Human
ggcaaaaaccauaauuacuuuu

SEQ ID NO: 833935 - RNA, 22 nt, Human
ggcaggcugggugucauggagu

SEQ ID NO: 833936 - RNA, 22 nt, Human
aagaaauguagagccuaguaaa

SEQ ID NO: 833937 - RNA, 22 nt, Human
gagaggucaucucccaucagca

SEQ ID NO: 833938 - RNA, 22 nt, Human
agcaggcuuucaagagucuucu

SEQ ID NO: 833939 - RNA, 22 nt, Human
uugucccaggacuugcauagau

SEQ ID NO: 833940 - RNA, 22 nt, Human
guccuggguccccgcaggucag

SEQ ID NO: 833941 - RNA, 23 nt, Human
uggcccugugcaugcugcuuccc

SEQ ID NO: 833942 - RNA, 22 nt, Human
ggcccugugguuuugcaaaguc

SEQ ID NO: 833943 - RNA, 22 nt, Human
cagaagcauuccagcaaauagu

SEQ ID NO: 833944 - RNA, 22 nt, Human
ggcugggcuccgggagcaugcg

SEQ ID NO: 833945 - RNA, 22 nt, Human
ggccugcugacccaaguccugu

SEQ ID NO: 833946 - RNA, 22 nt, Human
cagcuugcuaauuuugacuuca

SEQ ID NO: 833947 - RNA, 22 nt, Human
cacugaaggcugcagcucagcc

SEQ ID NO: 833948 - RNA, 22 nt, Human
agagccugggaauuugcauguu

SEQ ID NO: 833949 - RNA, 22 nt, Human
aaugugguuaacccauuuaaga

SEQ ID NO: 833950 - RNA, 22 nt, Human
ccuggcagcaggugggcccgug

SEQ ID NO: 833951 - RNA, 22 nt, Human
uuaagacaguguauuuguuuuc

SEQ ID NO: 833952 - RNA, 22 nt, Human
cugcugcauuacucuucucaag

SEQ ID NO: 833953 - RNA, 22 nt, Human
cacugcaguaacucuaggacug

SEQ ID NO: 833954 - RNA, 22 nt, Human
cagcagagaaauuaaacuucug

SEQ ID NO: 833955 - RNA, 22 nt, Human
acauuucuccuacuuguuauuu

SEQ ID NO: 833956 - RNA, 22 nt, Human
aaaccgcaauuacuuuugcguc

SEQ ID NO: 833957 - RNA, 22 nt, Human
agggcuggagccacagcuggga

SEQ ID NO: 833958 - RNA, 21 nt, Human
auacagaaggcagacucucuc

SEQ ID NO: 833959 - RNA, 22 nt, Human
aggggugauuugggacaggaca

SEQ ID NO: 833960 - RNA, 22 nt, Human
ggcagccaugcacgcugccugg

SEQ ID NO: 833961 - RNA, 22 nt, Human
ugggcagagucauacaggagac

SEQ ID NO: 833962 - RNA, 22 nt, Human
gaggggcuugaggcccugaugg

SEQ ID NO: 833963 - RNA, 22 nt, Human
aggguagguguaagauagcccu

SEQ ID NO: 833964 - RNA, 22 nt, Human
aggcagugcaugcaaaggucgg

SEQ ID NO: 833965 - RNA, 22 nt, Human
ucagcugccuuucccaugcuag

SEQ ID NO: 833966 - RNA, 22 nt, Human
uuucagauggagguuuaggaca

SEQ ID NO: 833967 - RNA, 22 nt, Human
ccaggaggcagaaguugcagug

SEQ ID NO: 833968 - RNA, 22 nt, Human
ugggaguguucuuggcuugcuu

SEQ ID NO: 833969 - RNA, 22 nt, Human
gcuggcagaauuucuucuugcu

SEQ ID NO: 833970 - RNA, 22 nt, Human
ugguccugagcaccagccugac

SEQ ID NO: 833971 - RNA, 22 nt, Human
uggcagagguauauugggagga

SEQ ID NO: 833972 - RNA, 22 nt, Human
ucccaggaugugcgugccgccg

SEQ ID NO: 833973 - RNA, 22 nt, Human
augaugguaaauucaguauccg

SEQ ID NO: 833974 - RNA, 22 nt, Human
caguccaggccuggaggagcca

SEQ ID NO: 833975 - RNA, 22 nt, Human
cagcaauaguguguuuguuuca

SEQ ID NO: 833976 - RNA, 22 nt, Human
aucuacagugcacaggacagcc

SEQ ID NO: 833977 - RNA, 22 nt, Human
uaguccauuuucacacugcuga

SEQ ID NO: 833978 - RNA, 22 nt, Human
cagcuggcccuuugguagccuu

SEQ ID NO: 833979 - RNA, 20 nt, Human
cugagcugagcuccaugggu

SEQ ID NO: 833980 - RNA, 22 nt, Human
uaucagaagacuuacaguaucg

SEQ ID NO: 833981 - RNA, 22 nt, Human
caucaguguggcaguucacugu

SEQ ID NO: 833982 - RNA, 22 nt, Human
gcugugcuugggaagaaucucu

SEQ ID NO: 833983 - RNA, 22 nt, Human
uuuucauuuacauuagggaaga

SEQ ID NO: 833984 - RNA, 22 nt, Human
agaauucuccuucagggcagga

SEQ ID NO: 833985 - RNA, 22 nt, Human
gcugaaggaggcucugguacua

SEQ ID NO: 833986 - RNA, 22 nt, Human
gcugucacucaccaggccugca

SEQ ID NO: 833987 - RNA, 19 nt, Human
uugaaauuguuugauaugg

SEQ ID NO: 833988 - RNA, 22 nt, Human
uguggcuguguccaccugcugc

SEQ ID NO: 833989 - RNA, 22 nt, Human
uggcccugcugggucagagcug

SEQ ID NO: 833990 - RNA, 22 nt, Human
aagcaacucccuccucauuuuu

SEQ ID NO: 833991 - RNA, 22 nt, Human
ugugccugaguuggcugaguac

SEQ ID NO: 833992 - RNA, 22 nt, Human
cauaauuugauaugcuugaugg

SEQ ID NO: 833993 - RNA, 23 nt, Human
ccacuagcaccuguucaacuucu

SEQ ID NO: 833994 - RNA, 22 nt, Human
ggucccugguucccucugagcu

SEQ ID NO: 833995 - RNA, 22 nt, Human
aaggccugggaguacugggaca

SEQ ID NO: 833996 - RNA, 22 nt, Human
aaaacucugcaguuaguuucua

SEQ ID NO: 833997 - RNA, 22 nt, Human
caggugggcguggcgagaaggc

SEQ ID NO: 833998 - RNA, 22 nt, Human
uuccucugaaauggcuuggaaa

SEQ ID NO: 833999 - RNA, 22 nt, Human
acaggugggcuuaagagucggc

SEQ ID NO: 834000 - RNA, 21 nt, Human
ugacugaggcuucuucacaca

SEQ ID NO: 834001 - RNA, 22 nt, Human
agcugcccugggucuugcugcu

SEQ ID NO: 834002 - RNA, 20 nt, Human
gcugaggucauuaugccuca

SEQ ID NO: 834003 - RNA, 19 nt, Human
cuucuucuuggcagccaag

SEQ ID NO: 834004 - RNA, 22 nt, Human
uuccuaauggcaaaacauguuu

SEQ ID NO: 834005 - RNA, 23 nt, Human
gaggcagcuccugcagugcccug

SEQ ID NO: 834006 - RNA, 22 nt, Human
gcugcuuccuuuccugcugacc

SEQ ID NO: 834007 - RNA, 20 nt, Human
ugggccugagccugugggcu

SEQ ID NO: 834008 - RNA, 22 nt, Human
gggccuggugcuucugacuccu

SEQ ID NO: 834009 - RNA, 22 nt, Human
cuggccuuuuguuucuggagaa

SEQ ID NO: 834010 - RNA, 22 nt, Human
ccucaggauccgcaggugcagu

SEQ ID NO: 834011 - RNA, 22 nt, Human
uucauguauuuaucauguaaau

SEQ ID NO: 834012 - RNA, 22 nt, Human
ugccucagcugaggccgcucca

SEQ ID NO: 834013 - RNA, 22 nt, Human
caaagaugcugauguuggauca

SEQ ID NO: 834014 - RNA, 22 nt, Human
uacaugaaccuuuaugugugau

SEQ ID NO: 834015 - RNA, 19 nt, Human
cagaacagaggucauggcc

SEQ ID NO: 834016 - RNA, 22 nt, Human
uggcuuaauauuucauauuuaa

SEQ ID NO: 834017 - RNA, 22 nt, Human
cuggugggagcagcaggcagcu

SEQ ID NO: 834018 - RNA, 22 nt, Human
aggagccaagcagaacuaagga

SEQ ID NO: 834019 - RNA, 22 nt, Human
cagaguguaucuguguaagcau

SEQ ID NO: 834020 - RNA, 19 nt, Human
ugcagaagacacaguggug

SEQ ID NO: 834021 - RNA, 22 nt, Human
uucuucaauuuuccauauacug

SEQ ID NO: 834022 - RNA, 18 nt, Human
ucucuuuuccccucauug

SEQ ID NO: 834023 - RNA, 22 nt, Human
augauacaagcaaaacuaauca

SEQ ID NO: 834024 - RNA, 22 nt, Human
ugcaggugcguuuucaagccuc

SEQ ID NO: 834025 - RNA, 22 nt, Human
agugucauuuuguccaucuucu

SEQ ID NO: 834026 - RNA, 19 nt, Human
agauggcaaaaugcaaaga

SEQ ID NO: 834027 - RNA, 22 nt, Human
aagcaccugcaguugacaaaaa

SEQ ID NO: 834028 - RNA, 22 nt, Human
guguccagggccguguugucuu

SEQ ID NO: 834029 - RNA, 22 nt, Human
cccaagggagugccuggucaac

SEQ ID NO: 834030 - RNA, 22 nt, Human
uaggcagcugcaaacuucgguc

SEQ ID NO: 834031 - RNA, 22 nt, Human
caggaaagguagucacaaugua

SEQ ID NO: 834032 - RNA, 22 nt, Human
gcacagcaauuucuauaagcuc

SEQ ID NO: 834033 - RNA, 22 nt, Human
gggugggaucuguggagccuca

SEQ ID NO: 834034 - RNA, 22 nt, Human
aagaugauguuguguuuucacu

SEQ ID NO: 834035 - RNA, 22 nt, Human
cagggcuguggcuuugugcugu

SEQ ID NO: 834036 - RNA, 22 nt, Human
cagagcucagagcagggcacuc

SEQ ID NO: 834037 - RNA, 23 nt, Human
gagugcagaauagacaugcagug

SEQ ID NO: 834038 - RNA, 22 nt, Human
agugaguggacccugcaaggaa

SEQ ID NO: 834039 - RNA, 22 nt, Human
cccaggaaguggagguugcagu

SEQ ID NO: 834040 - RNA, 20 nt, Human
uuuaggcauuacucuuuugu

SEQ ID NO: 834041 - RNA, 22 nt, Human
guugcacaguuccucaagcagg

SEQ ID NO: 834042 - RNA, 22 nt, Human
gagagggagccagccaggaacc

SEQ ID NO: 834043 - RNA, 22 nt, Human
caggcuugauuauucagacaau

SEQ ID NO: 834044 - RNA, 21 nt, Human
ugaggcuguuguaccagggag

SEQ ID NO: 834045 - RNA, 22 nt, Human
uggcuucaucugcagcacugcc

SEQ ID NO: 834046 - RNA, 19 nt, Human
auaaggcaggaggaaauuu

SEQ ID NO: 834047 - RNA, 22 nt, Human
cucuggacacuggcaugggguc

SEQ ID NO: 834048 - RNA, 22 nt, Human
uacauuccacuagugacuggcg

SEQ ID NO: 834049 - RNA, 22 nt, Human
ggcuggucacaccacugcaggg

SEQ ID NO: 834050 - RNA, 22 nt, Human
caccagggacaaugcuaggggu

SEQ ID NO: 834051 - RNA, 22 nt, Human
gaaaccucuuagccucucuuug

SEQ ID NO: 834052 - RNA, 17 nt, Human
ggcagccucaggcguuu

SEQ ID NO: 834053 - RNA, 22 nt, Human
uacuuacacagcuguagaaggu

SEQ ID NO: 834054 - RNA, 22 nt, Human
uggcagaguuauggguauuuau

SEQ ID NO: 834055 - RNA, 21 nt, Human
aggcuguccuuugccagcccu

SEQ ID NO: 834056 - RNA, 22 nt, Human
gcugcccaguucugcugcugcc

SEQ ID NO: 834057 - RNA, 22 nt, Human
aaauagauugcugaggcauuac

SEQ ID NO: 834058 - RNA, 22 nt, Human
aggguaggaacugaguggaagg

SEQ ID NO: 834059 - RNA, 22 nt, Human
gcuucucucucagacugcaagc

SEQ ID NO: 834060 - RNA, 22 nt, Human
ggcugccuccucgagacaggau

SEQ ID NO: 834061 - RNA, 22 nt, Human
gcuguguuugacaguagcagac

SEQ ID NO: 834062 - RNA, 22 nt, Human
cucuggcuuugcucaugcaucc

SEQ ID NO: 834063 - RNA, 22 nt, Human
uuugcagucuggccugcuuugg

SEQ ID NO: 834064 - RNA, 22 nt, Human
ugauuucaaguagugacaugcu

SEQ ID NO: 834065 - RNA, 18 nt, Human
gaaagccaugcagcagug

SEQ ID NO: 834066 - RNA, 22 nt, Human
cacagcauaaugaaauauacuu

SEQ ID NO: 834067 - RNA, 17 nt, Human
ccucacagggaccagac

SEQ ID NO: 834068 - RNA, 22 nt, Human
uuugcauuuugauaagaucacu

SEQ ID NO: 834069 - RNA, 22 nt, Human
caggcagcugcuggguucagcc

SEQ ID NO: 834070 - RNA, 22 nt, Human
cccaggagguggagguugcagu

SEQ ID NO: 834071 - RNA, 22 nt, Human
gucauauacacugcauguaauc

SEQ ID NO: 834072 - RNA, 22 nt, Human
ugaggcaggacugagcgggaug

SEQ ID NO: 834073 - RNA, 22 nt, Human
ugaggcaguucuuacuuguauu

SEQ ID NO: 834074 - RNA, 22 nt, Human
aaucaugugggauagucugcuc

SEQ ID NO: 834075 - RNA, 22 nt, Human
uccagggagauggcagaggcug

SEQ ID NO: 834076 - RNA, 22 nt, Human
cuggcccuucucuugcuuccug

SEQ ID NO: 834077 - RNA, 22 nt, Human
caucagaaggccagaggguagc

SEQ ID NO: 834078 - RNA, 22 nt, Human
agucucagggccacccggggaa

SEQ ID NO: 834079 - RNA, 22 nt, Human
agggccaggaacaccugaaggg

SEQ ID NO: 834080 - RNA, 22 nt, Human
gaggaaugucagcacaggccuc

SEQ ID NO: 834081 - RNA, 22 nt, Human
gcuggcugggucccugagaggc

SEQ ID NO: 834082 - RNA, 22 nt, Human
cccagcaucuccaggcauggcc

SEQ ID NO: 834083 - RNA, 22 nt, Human
acuuugcagggcuugauaucca

SEQ ID NO: 834084 - RNA, 19 nt, Human
gcaggguguugacuguccc

SEQ ID NO: 834085 - RNA, 22 nt, Human
guuuagaacacggaaauacuga

SEQ ID NO: 834086 - RNA, 22 nt, Human
auaugagaguaaaugccgaucu

SEQ ID NO: 834087 - RNA, 22 nt, Human
uacaguaaccuuauuugucauu

SEQ ID NO: 834088 - RNA, 22 nt, Human
aggcucagcccaagguggagag

SEQ ID NO: 834089 - RNA, 22 nt, Human
cucucugguacauagaguuugg

SEQ ID NO: 834090 - RNA, 22 nt, Human
uacauaugaacuuuauaacuug

SEQ ID NO: 834091 - RNA, 22 nt, Human
caggccucagagaguggcgggg

SEQ ID NO: 834092 - RNA, 17 nt, Human
gcuggcugacccaugcc

SEQ ID NO: 834093 - RNA, 22 nt, Human
ucugggagacguguguugucag

SEQ ID NO: 834094 - RNA, 22 nt, Human
ccagccugaaaugccucauccu

SEQ ID NO: 834095 - RNA, 19 nt, Human
cugucaggggcuggauguu

SEQ ID NO: 834096 - RNA, 22 nt, Human
uccuggaggggacagcaugggc

SEQ ID NO: 834097 - RNA, 22 nt, Human
agcucauggugcuaucucaggg

SEQ ID NO: 834098 - RNA, 22 nt, Human
ucccucuguguugggcaugccu

SEQ ID NO: 834099 - RNA, 22 nt, Human
ugggcugcggauaggccucgga

SEQ ID NO: 834100 - RNA, 20 nt, Human
ccaggcacugucccaugcag

SEQ ID NO: 834101 - RNA, 22 nt, Human
uauuucuuucagguauguguug

SEQ ID NO: 834102 - RNA, 22 nt, Human
aucagcaaggcaaucacugcag

SEQ ID NO: 834103 - RNA, 22 nt, Human
agagggcauuaacucugucuug

SEQ ID NO: 834104 - RNA, 22 nt, Human
uggcagagaaccugggcuuugu

SEQ ID NO: 834105 - RNA, 22 nt, Human
auauacuuggagacuaucauug

SEQ ID NO: 834106 - RNA, 22 nt, Human
uaacacauauuugcaguaagca

SEQ ID NO: 834107 - RNA, 22 nt, Human
gggcuggggcucaauaauuugu

SEQ ID NO: 834108 - RNA, 22 nt, Human
uacugaaauacuaagaaguuaa

SEQ ID NO: 834109 - RNA, 22 nt, Human
cccuguccuggaugggagcacu

SEQ ID NO: 834110 - RNA, 22 nt, Human
cccagccucugggcucacccaa

SEQ ID NO: 834111 - RNA, 22 nt, Human
agcugcuccuuuccugcaggcg

SEQ ID NO: 834112 - RNA, 22 nt, Human
gcaggcuccaaggccugggaga

SEQ ID NO: 834113 - RNA, 22 nt, Human
agguaggguuaauggagauaua

SEQ ID NO: 834114 - RNA, 19 nt, Human
ggccaggcugacugugguc

SEQ ID NO: 834115 - RNA, 22 nt, Human
uuugaagauaaauauggagaaa

SEQ ID NO: 834116 - RNA, 22 nt, Human
cagcucuguaaauuccuucauc

SEQ ID NO: 834117 - RNA, 22 nt, Human
gcagggugaaggucacauagaa

SEQ ID NO: 834118 - RNA, 22 nt, Human
ucuaaagaagaggguucugcgg

SEQ ID NO: 834119 - RNA, 21 nt, Human
aggaggggucuuucccacuga

SEQ ID NO: 834120 - RNA, 22 nt, Human
augucuuuauaaauguauaaug

SEQ ID NO: 834121 - RNA, 22 nt, Human
agaugcugugucuguucccuug

SEQ ID NO: 834122 - RNA, 22 nt, Human
aaggcugauuagacugauagcu

SEQ ID NO: 834123 - RNA, 22 nt, Human
ugucccauggacacaacuucuu

SEQ ID NO: 834124 - RNA, 22 nt, Human
ugacccauggucugaucauagg

SEQ ID NO: 834125 - RNA, 23 nt, Human
ucaugcccaggcuccagauguca

SEQ ID NO: 834126 - RNA, 22 nt, Human
ggccucacccaucggugccuuu

SEQ ID NO: 834127 - RNA, 22 nt, Human
gaaacuuacuuacucacauuuc

SEQ ID NO: 834128 - RNA, 22 nt, Human
cauuuacaauguacagguugug

SEQ ID NO: 834129 - RNA, 21 nt, Human
gaggccacuaauaggggcaga

SEQ ID NO: 834130 - RNA, 22 nt, Human
cucugucccagacccaccucuc

SEQ ID NO: 834131 - RNA, 22 nt, Human
ggcugcuggggacgugggagag

SEQ ID NO: 834132 - RNA, 17 nt, Human
ucccaggaacagggaau

SEQ ID NO: 834133 - RNA, 22 nt, Human
caggaccuggaaugcuugugaa

SEQ ID NO: 834134 - RNA, 22 nt, Human
cuugugcaauugacauugaauc

SEQ ID NO: 834135 - RNA, 22 nt, Human
uuuccuuccagguuccuaaggc

SEQ ID NO: 834136 - RNA, 22 nt, Human
cugggaggauacacaagaucag

SEQ ID NO: 834137 - RNA, 22 nt, Human
acagagcauauaaagugcuuug

SEQ ID NO: 834138 - RNA, 22 nt, Human
cagcagugugcaggugugcugg

SEQ ID NO: 834139 - RNA, 22 nt, Human
aggcagcuggcagcacccaggg

SEQ ID NO: 834140 - RNA, 20 nt, Human
ugaugguucuuuccggguug

SEQ ID NO: 834141 - RNA, 22 nt, Human
caaaugugacuuuugggcuucu

SEQ ID NO: 834142 - RNA, 18 nt, Human
cauaauuuucuuucuuua

SEQ ID NO: 834143 - RNA, 21 nt, Human
ggcagcugaccgcgcggugca

SEQ ID NO: 834144 - RNA, 22 nt, Human
cugugcaagcccaagauaaaac

SEQ ID NO: 834145 - RNA, 22 nt, Human
ggcagggagagcaugcugauaa

SEQ ID NO: 834146 - RNA, 22 nt, Human
ugggcugcugagaaugagagag

SEQ ID NO: 834147 - RNA, 22 nt, Human
ucaugucaguuucuucuauaaa

SEQ ID NO: 834148 - RNA, 22 nt, Human
ugcugcucucagccaccaggaa

SEQ ID NO: 834149 - RNA, 22 nt, Human
agcuggagcuucaagcagguaa

SEQ ID NO: 834150 - RNA, 22 nt, Human
gugucccacucuggaggugaag

SEQ ID NO: 834151 - RNA, 22 nt, Human
gaggccuggcucugcccuccug

SEQ ID NO: 834152 - RNA, 22 nt, Human
caaagguauaaguuaauauaca

SEQ ID NO: 834153 - RNA, 22 nt, Human
ugucucagggcagcagcagggg

SEQ ID NO: 834154 - RNA, 19 nt, Human
caugagcugcucacuuccc

SEQ ID NO: 834155 - RNA, 22 nt, Human
cagcuccagcccaggcagcucc

SEQ ID NO: 834156 - RNA, 22 nt, Human
ucauuuauaaggaugcaauuaa

SEQ ID NO: 834157 - RNA, 22 nt, Human
uauuucaugugcaccauaauuc

SEQ ID NO: 834158 - RNA, 22 nt, Human
cccaggaaugggaaggaggaau

SEQ ID NO: 834159 - RNA, 22 nt, Human
uggaggaaaauuacuggggucu

SEQ ID NO: 834160 - RNA, 22 nt, Human
uuccaaaguuaguuauuagaaa

SEQ ID NO: 834161 - RNA, 22 nt, Human
cugcucuaacugcauuaguuuu

SEQ ID NO: 834162 - RNA, 22 nt, Human
ucuuugaauccuuuacaucuga

SEQ ID NO: 834163 - RNA, 22 nt, Human
uuguuuucacagcuuugcccgg

SEQ ID NO: 834164 - RNA, 22 nt, Human
agggcugcaggcaagauauggc

SEQ ID NO: 834165 - RNA, 22 nt, Human
ccagaucuaguguuguaaagcu

SEQ ID NO: 834166 - RNA, 23 nt, Human
uugcauguagcccaugaguaacu

SEQ ID NO: 834167 - RNA, 22 nt, Human
gaagaagcaggaguguguagca

SEQ ID NO: 834168 - RNA, 22 nt, Human
cugccagccaggccagguaggc

SEQ ID NO: 834169 - RNA, 22 nt, Human
acuuccuguuaugugugccucu

SEQ ID NO: 834170 - RNA, 22 nt, Human
uuguaugaucaaaagaaaugua

SEQ ID NO: 834171 - RNA, 22 nt, Human
ccuggagccccucuggccagcc

SEQ ID NO: 834172 - RNA, 22 nt, Human
aaggccugggaggccucucuuc

SEQ ID NO: 834173 - RNA, 20 nt, Human
agcagcuguguuuucauccu

SEQ ID NO: 834174 - RNA, 22 nt, Human
ucacaggacccugaggguggcg

SEQ ID NO: 834175 - RNA, 22 nt, Human
uuacagaaaguuucccaugccg

SEQ ID NO: 834176 - RNA, 22 nt, Human
gcucucugccuuucucaaugac

SEQ ID NO: 834177 - RNA, 22 nt, Human
gagucaccuugggucagcgaua

SEQ ID NO: 834178 - RNA, 21 nt, Human
uggcagaguugaguaguuaug

SEQ ID NO: 834179 - RNA, 22 nt, Human
ccuugcaggggaacaggcagug

SEQ ID NO: 834180 - RNA, 22 nt, Human
gcugucuggguugagggcccug

SEQ ID NO: 834181 - RNA, 22 nt, Human
ggcaguagccagggacuggcag

SEQ ID NO: 834182 - RNA, 23 nt, Human
ggagaggggugugggcaucuuua

SEQ ID NO: 834183 - RNA, 22 nt, Human
agugaaauugcuguaagaggaa

SEQ ID NO: 834184 - RNA, 22 nt, Human
uuaacacuccuaacuacagucu

SEQ ID NO: 834185 - RNA, 22 nt, Human
cugaaggagguagagugacaua

SEQ ID NO: 834186 - RNA, 22 nt, Human
cuccagggcagcauggcagugg

SEQ ID NO: 834187 - RNA, 22 nt, Human
aggaagcccuugucauuucugu

SEQ ID NO: 834188 - RNA, 22 nt, Human
uggcucagcaagacauugaccu

SEQ ID NO: 834189 - RNA, 22 nt, Human
uaacacauuuuccucauacgga

SEQ ID NO: 834190 - RNA, 22 nt, Human
acauaucuuucccucuccugaa

SEQ ID NO: 834191 - RNA, 22 nt, Human
ugcagcuguuacggacccuguc

SEQ ID NO: 834192 - RNA, 22 nt, Human
guguccagagaaacucacagcu

SEQ ID NO: 834193 - RNA, 22 nt, Human
ucucaggggauucacuggcacc

SEQ ID NO: 834194 - RNA, 22 nt, Human
gcagagaagaugcccaggcuuc

SEQ ID NO: 834195 - RNA, 22 nt, Human
cugcuguguggauucaauggcu

SEQ ID NO: 834196 - RNA, 22 nt, Human
uuguuuguaugcugagaagaau

SEQ ID NO: 834197 - RNA, 22 nt, Human
cccaggcugaugggaugggcca

SEQ ID NO: 834198 - RNA, 22 nt, Human
cccagcagaaucugaugagggc

SEQ ID NO: 834199 - RNA, 22 nt, Human
ggcagcuccaaaaggaaacacu

SEQ ID NO: 834200 - RNA, 22 nt, Human
cccccaaggccaggcugagacc

SEQ ID NO: 834201 - RNA, 22 nt, Human
uuucaagaacaacauucauuca

SEQ ID NO: 834202 - RNA, 22 nt, Human
cauuggaaugcauuugaagaga

SEQ ID NO: 834203 - RNA, 22 nt, Human
caggcugagcucuggccugggc

SEQ ID NO: 834204 - RNA, 22 nt, Human
agagaagagcaaugauaaauuu

SEQ ID NO: 834205 - RNA, 22 nt, Human
aaaugcagauuuugaugcagca

SEQ ID NO: 834206 - RNA, 23 nt, Human
ccagccucugggucuucauccag

SEQ ID NO: 834207 - RNA, 22 nt, Human
ccucuugccaaucagcuacaga

SEQ ID NO: 834208 - RNA, 22 nt, Human
auuuaaaugcuuaagaggguuu

SEQ ID NO: 834209 - RNA, 22 nt, Human
uguauuuucugaagauaaucaa

SEQ ID NO: 834210 - RNA, 22 nt, Human
aaacucuggagauguuuaugca

SEQ ID NO: 834211 - RNA, 22 nt, Human
gcugccagcucacucuccugag

SEQ ID NO: 834212 - RNA, 22 nt, Human
cagguaagagacggauuggccc

SEQ ID NO: 834213 - RNA, 22 nt, Human
uccucugcucagcauuccucac

SEQ ID NO: 834214 - RNA, 22 nt, Human
gaggcagcaugguaccuuggag

SEQ ID NO: 834215 - RNA, 22 nt, Human
gagccauacaaccuauaaagug

SEQ ID NO: 834216 - RNA, 22 nt, Human
cgcuggggcuuuuugcuugaga

SEQ ID NO: 834217 - RNA, 22 nt, Human
cuagucacucagcacugacaaa

SEQ ID NO: 834218 - RNA, 22 nt, Human
gcuggaucauauggugguucua

SEQ ID NO: 834219 - RNA, 22 nt, Human
ugggggagauugugcaucucua

SEQ ID NO: 834220 - RNA, 22 nt, Human
uuuggaaugguaccuucaguug

SEQ ID NO: 834221 - RNA, 22 nt, Human
cuggagccuagguugaccuggg

SEQ ID NO: 834222 - RNA, 22 nt, Human
agggcagcagcccauggcucug

SEQ ID NO: 834223 - RNA, 22 nt, Human
cuuaaaaucuggcaguuagcua

SEQ ID NO: 834224 - RNA, 22 nt, Human
uuuauccaccuuacccuguucc

SEQ ID NO: 834225 - RNA, 22 nt, Human
uggcuauugagugaucucuaga

SEQ ID NO: 834226 - RNA, 22 nt, Human
agggcaaguugagugugcgugg

SEQ ID NO: 834227 - RNA, 22 nt, Human
uccucugccccagaugaaauuu

SEQ ID NO: 834228 - RNA, 22 nt, Human
aacagaaaagguagguggcuuu

SEQ ID NO: 834229 - RNA, 22 nt, Human
gaggccugucgcuaggccucug

SEQ ID NO: 834230 - RNA, 22 nt, Human
ugggcagaggcucugaagucca

SEQ ID NO: 834231 - RNA, 22 nt, Human
ggcugcaggcagaggcugucug

SEQ ID NO: 834232 - RNA, 22 nt, Human
aauuaguauugcgauucauuag

SEQ ID NO: 834233 - RNA, 22 nt, Human
ugucuucaucuccaugcacaga

SEQ ID NO: 834234 - RNA, 22 nt, Human
cuugcaggauuuugcugcugua

SEQ ID NO: 834235 - RNA, 22 nt, Human
uucuggagaucugccuauggga

SEQ ID NO: 834236 - RNA, 22 nt, Human
ccuggaucuuuguuguaaauau

SEQ ID NO: 834237 - RNA, 22 nt, Human
uguuccaauaaggaguugaaau

SEQ ID NO: 834238 - RNA, 22 nt, Human
uaucagaaagauauuacugggg

SEQ ID NO: 834239 - RNA, 22 nt, Human
agguacagaugaaagucuaguu

SEQ ID NO: 834240 - RNA, 22 nt, Human
uuagacauagaauauugucuag

SEQ ID NO: 834241 - RNA, 22 nt, Human
uugaauuagacuuugcuacagg

SEQ ID NO: 834242 - RNA, 22 nt, Human
aaguucaagucugcaucuuuuu

SEQ ID NO: 834243 - RNA, 22 nt, Human
ccagaagucaggaaugagucuu

SEQ ID NO: 834244 - RNA, 22 nt, Human
gaacacaugauuauaaaugcua

SEQ ID NO: 834245 - RNA, 22 nt, Human
acaaaagugagugugucucaga

SEQ ID NO: 834246 - RNA, 22 nt, Human
cuguuuaucccuuuggucagca

SEQ ID NO: 834247 - RNA, 22 nt, Human
accaggagagauuuuauugaga

SEQ ID NO: 834248 - RNA, 22 nt, Human
auguaucagauaaagcaugugg

SEQ ID NO: 834249 - RNA, 22 nt, Human
acaggcagcgucauugcugcuc

SEQ ID NO: 834250 - RNA, 22 nt, Human
ccucuggggguccucagagucu

SEQ ID NO: 834251 - RNA, 22 nt, Human
gcacagggcccugugcguaggu

SEQ ID NO: 834252 - RNA, 22 nt, Human
agggcagacuaggauggaagug

SEQ ID NO: 834253 - RNA, 22 nt, Human
uuguuugaggucacugauauuu

SEQ ID NO: 834254 - RNA, 22 nt, Human
cacuggaauucaagauacugag

SEQ ID NO: 834255 - RNA, 22 nt, Human
cacagggcaccaguuggccauc

SEQ ID NO: 834256 - RNA, 22 nt, Human
cuggagaggcugggaacagguu

SEQ ID NO: 834257 - RNA, 22 nt, Human
aaaguuugaaugauauauuagu

SEQ ID NO: 834258 - RNA, 20 nt, Human
ccuggagccuggaaggaguc

SEQ ID NO: 834259 - RNA, 23 nt, Human
gggauauggaccuuggaggaguc

SEQ ID NO: 834260 - RNA, 22 nt, Human
guccucagagugggcagguccu

SEQ ID NO: 834261 - RNA, 22 nt, Human
cagcugccccgcuggcugacca

SEQ ID NO: 834262 - RNA, 22 nt, Human
agcauuuaggagaauuugagaa

SEQ ID NO: 834263 - RNA, 20 nt, Human
ugcagaagaacguucugguu

SEQ ID NO: 834264 - RNA, 21 nt, Human
agugaaauugcaucagaggga

SEQ ID NO: 834265 - RNA, 22 nt, Human
ugugcuucuugcagcuccugua

SEQ ID NO: 834266 - RNA, 22 nt, Human
ugugaauaccuugaauucauca

SEQ ID NO: 834267 - RNA, 22 nt, Human
cuggcucauagagcagcuccaa

SEQ ID NO: 834268 - RNA, 23 nt, Human
uuacuuuugcaccaaccuaauau

SEQ ID NO: 834269 - RNA, 22 nt, Human
augcugagacuggagcagcugg

SEQ ID NO: 834270 - RNA, 22 nt, Human
acagaguagcucaagaagauug

SEQ ID NO: 834271 - RNA, 22 nt, Human
caauuucacuaauaauauuuac

SEQ ID NO: 834272 - RNA, 22 nt, Human
ccagaauucagaaagggcauaa

SEQ ID NO: 834273 - RNA, 22 nt, Human
ccaggaagcggugagggcugcc

SEQ ID NO: 834274 - RNA, 22 nt, Human
uaaagcaguguugggucggacg

SEQ ID NO: 834275 - RNA, 22 nt, Human
gcucccaguucccaaagugacc

SEQ ID NO: 834276 - RNA, 22 nt, Human
ucugggaaguccucugucaugc

SEQ ID NO: 834277 - RNA, 22 nt, Human
agcagaggaggauuuaguuagg

SEQ ID NO: 834278 - RNA, 22 nt, Human
cuggggugucucgucugccauu

SEQ ID NO: 834279 - RNA, 22 nt, Human
aggaguggugcaggaccugcca

SEQ ID NO: 834280 - RNA, 22 nt, Human
agaaaucucaguaucucaggga

SEQ ID NO: 834281 - RNA, 22 nt, Human
caggccuggcccccggcacacc

SEQ ID NO: 834282 - RNA, 23 nt, Human
aggcugcagaagaauagggucau

SEQ ID NO: 834283 - RNA, 22 nt, Human
ugaggcagggagaguggauaug

SEQ ID NO: 834284 - RNA, 22 nt, Human
caggaggcccaaagggcgcaga

SEQ ID NO: 834285 - RNA, 19 nt, Human
ccucugccagcccgccucu

SEQ ID NO: 834286 - RNA, 22 nt, Human
aaaaguuuaagacucauucuag

SEQ ID NO: 834287 - RNA, 22 nt, Human
ucuggaucggguuccucagguc

SEQ ID NO: 834288 - RNA, 21 nt, Human
aggcagcaggauccagggaca

SEQ ID NO: 834289 - RNA, 21 nt, Human
ucagcagcaucugccuagagu

SEQ ID NO: 834290 - RNA, 22 nt, Human
ggcucagguuuccuucccagcu

SEQ ID NO: 834291 - RNA, 22 nt, Human
uuguugguggaauugaugcuag

SEQ ID NO: 834292 - RNA, 22 nt, Human
gcaccugauugauuucacugcu

SEQ ID NO: 834293 - RNA, 22 nt, Human
auggcagccugagcagaggaau

SEQ ID NO: 834294 - RNA, 22 nt, Human
acuggauuccauugugcaaaga

SEQ ID NO: 834295 - RNA, 22 nt, Human
ggcagcugggucacaccgaucu

SEQ ID NO: 834296 - RNA, 19 nt, Human
gagcugccuuuugaagacc

SEQ ID NO: 834297 - RNA, 22 nt, Human
aggauuuauuggugggaaguua

SEQ ID NO: 834298 - RNA, 17 nt, Human
aucuggcugcuucuaga

SEQ ID NO: 834299 - RNA, 22 nt, Human
cucuggccagagccugcgggaa

SEQ ID NO: 834300 - RNA, 22 nt, Human
acagugucuccugguacccagu

SEQ ID NO: 834301 - RNA, 22 nt, Human
ugggacacccucacgccugcac

SEQ ID NO: 834302 - RNA, 22 nt, Human
gggcagcuagcccucuagccca

SEQ ID NO: 834303 - RNA, 22 nt, Human
auaauguagguauguguauuua

SEQ ID NO: 834304 - RNA, 22 nt, Human
aauucuauaggcaagcuauuuu

SEQ ID NO: 834305 - RNA, 22 nt, Human
cuuccaaaauuuauauguugaa

SEQ ID NO: 834306 - RNA, 23 nt, Human
aguaaagcaauuguuggcgagag

SEQ ID NO: 834307 - RNA, 22 nt, Human
aggugaguugguaggaaguuug

SEQ ID NO: 834308 - RNA, 22 nt, Human
ugccaggccucaggagucucca

SEQ ID NO: 834309 - RNA, 22 nt, Human
gaacccaguccaggugcagccu

SEQ ID NO: 834310 - RNA, 22 nt, Human
cacagcagaaaguguaggagga

SEQ ID NO: 834311 - RNA, 22 nt, Human
guacagaaauggggccccaggu

SEQ ID NO: 834312 - RNA, 21 nt, Human
ugcagcagaguaagcagggga

SEQ ID NO: 834313 - RNA, 22 nt, Human
gagagcacaugaacauggagga

SEQ ID NO: 834314 - RNA, 22 nt, Human
gagggggcgugcaaggcuccgc

SEQ ID NO: 834315 - RNA, 22 nt, Human
cagguaggauggaagggcucaa

SEQ ID NO: 834316 - RNA, 22 nt, Human
ucagcagggagaggagaaugca

SEQ ID NO: 834317 - RNA, 18 nt, Human
ugugaacacauuuuucug

SEQ ID NO: 834318 - RNA, 22 nt, Human
uuugaguugcuuauuuaauagg

SEQ ID NO: 834319 - RNA, 17 nt, Human
uuccuggaagucauucc

SEQ ID NO: 834320 - RNA, 22 nt, Human
caaagugcuaggauuacaggcc

SEQ ID NO: 834321 - RNA, 22 nt, Human
cuccagggggcauccacacagc

SEQ ID NO: 834322 - RNA, 22 nt, Human
gagauggggucagcugggacau

SEQ ID NO: 834323 - RNA, 22 nt, Human
uguccucagauaugucuacucu

SEQ ID NO: 834324 - RNA, 22 nt, Human
ugcccacauggugccauggcca

SEQ ID NO: 834325 - RNA, 22 nt, Human
ugaagaauaagauagauggagc

SEQ ID NO: 834326 - RNA, 22 nt, Human
aggaccuguaccucagcaucua

SEQ ID NO: 834327 - RNA, 22 nt, Human
gcugggaggaucucucccuguc

SEQ ID NO: 834328 - RNA, 22 nt, Human
ccacagaaaguugucuagagua

SEQ ID NO: 834329 - RNA, 22 nt, Human
ggcacugauaauguccucucuc

SEQ ID NO: 834330 - RNA, 22 nt, Human
cccaggaacuccagagcuccuc

SEQ ID NO: 834331 - RNA, 22 nt, Human
acagcugugaaaauccacagga

SEQ ID NO: 834332 - RNA, 22 nt, Human
ggcagcuucucccaggcuguuu

SEQ ID NO: 834333 - RNA, 22 nt, Human
ugcugccaggucuugcugucca

SEQ ID NO: 834334 - RNA, 23 nt, Human
ggcucugugcugggccugcagga

SEQ ID NO: 834335 - RNA, 21 nt, Human
aggagcuguguuagcuggucg

SEQ ID NO: 834336 - RNA, 22 nt, Human
aaggcaggaugcggacccaucu

SEQ ID NO: 834337 - RNA, 22 nt, Human
agcuuaggaggaugaugaacau

SEQ ID NO: 834338 - RNA, 22 nt, Human
cugcagcugucucuacugggca

SEQ ID NO: 834339 - RNA, 22 nt, Human
cagcuucugucugauuagcaag

SEQ ID NO: 834340 - RNA, 22 nt, Human
ccuggagggcgccgcacagucc

SEQ ID NO: 834341 - RNA, 22 nt, Human
agcugccacauggugucacugu

SEQ ID NO: 834342 - RNA, 18 nt, Human
gagucuuuguuacugcug

SEQ ID NO: 834343 - RNA, 22 nt, Human
aauuuccagaccccauccacag

SEQ ID NO: 834344 - RNA, 22 nt, Human
gagugguaggcaguguuaggaa

SEQ ID NO: 834345 - RNA, 22 nt, Human
gaggccuguagucauggaugua

SEQ ID NO: 834346 - RNA, 22 nt, Human
gagcagcugcagugcagacccu

SEQ ID NO: 834347 - RNA, 22 nt, Human
gucauaaagcuuguugcauuua

SEQ ID NO: 834348 - RNA, 22 nt, Human
aaugugaaaccgcacagaauaa

SEQ ID NO: 834349 - RNA, 22 nt, Human
gcagaauuuucuguuuucuaga

SEQ ID NO: 834350 - RNA, 22 nt, Human
augugaaaaauuucuuauuaca

SEQ ID NO: 834351 - RNA, 22 nt, Human
ugggcccaagagagucuccaac

SEQ ID NO: 834352 - RNA, 22 nt, Human
cuggccuuuagccccagugucu

SEQ ID NO: 834353 - RNA, 22 nt, Human
agcagcugcagagggcuccccc

SEQ ID NO: 834354 - RNA, 22 nt, Human
aaguucuacuguggguaaaaug

SEQ ID NO: 834355 - RNA, 22 nt, Human
auacaacuuuaucuguaaugag

SEQ ID NO: 834356 - RNA, 22 nt, Human
gaagcagcuuucuggugaggag

SEQ ID NO: 834357 - RNA, 22 nt, Human
acaguacauaauccugagucug

SEQ ID NO: 834358 - RNA, 22 nt, Human
uuaacacuaucugucauaauua

SEQ ID NO: 834359 - RNA, 22 nt, Human
caggggcaggugugagaucauc

SEQ ID NO: 834360 - RNA, 21 nt, Human
gcagcagaggcuugacagaca

SEQ ID NO: 834361 - RNA, 18 nt, Human
acaaauguagugucuuaa

SEQ ID NO: 834362 - RNA, 20 nt, Human
auguaaaauuauaaggcuga

SEQ ID NO: 834363 - RNA, 17 nt, Human
auccccagcaucuagaa

SEQ ID NO: 834364 - RNA, 22 nt, Human
agcuggccuucggugucacugg

SEQ ID NO: 834365 - RNA, 23 nt, Human
uuuuccuguggagacaugacugg

SEQ ID NO: 834366 - RNA, 22 nt, Human
auuaaauuuucacuaggcuccc

SEQ ID NO: 834367 - RNA, 22 nt, Human
gucuggggaagucagggcauca

SEQ ID NO: 834368 - RNA, 22 nt, Human
gccuggagaaaggaagguggga

SEQ ID NO: 834369 - RNA, 22 nt, Human
cuucucucccuggcacucagac

SEQ ID NO: 834370 - RNA, 22 nt, Human
acuuggagagcauugcugggga

SEQ ID NO: 834371 - RNA, 22 nt, Human
ccagagugacgugaagugugaa

SEQ ID NO: 834372 - RNA, 22 nt, Human
uggcccugugugcaggcugcac

SEQ ID NO: 834373 - RNA, 18 nt, Human
ugucucaggcugaaacag

SEQ ID NO: 834374 - RNA, 22 nt, Human
gcccugucccuuggcuucuagg

SEQ ID NO: 834375 - RNA, 22 nt, Human
auaucuuuguuuuugccaagau

SEQ ID NO: 834376 - RNA, 22 nt, Human
ucugggcuuuacacugugcuua

SEQ ID NO: 834377 - RNA, 23 nt, Human
ugcugggcagagcuggugcugag

SEQ ID NO: 834378 - RNA, 22 nt, Human
ucacugcucucuaagcaucgcc

SEQ ID NO: 834379 - RNA, 22 nt, Human
gcaggcaggagcccaacugccu

SEQ ID NO: 834380 - RNA, 22 nt, Human
gugggaugcaguggugaguggc

SEQ ID NO: 834381 - RNA, 22 nt, Human
auuucugauaaacguaagcugc

SEQ ID NO: 834382 - RNA, 22 nt, Human
gcaugguggccuuaggguagcc

SEQ ID NO: 834383 - RNA, 22 nt, Human
aaggcagcaacuaauggaucuc

SEQ ID NO: 834384 - RNA, 22 nt, Human
ugucccaggccucauguugcca

SEQ ID NO: 834385 - RNA, 21 nt, Human
ucagaguggaagacaguuuga

SEQ ID NO: 834386 - RNA, 22 nt, Human
uugucuuaaauggauggacaau

SEQ ID NO: 834387 - RNA, 22 nt, Human
caucagaaggaaggacgauuau

SEQ ID NO: 834388 - RNA, 22 nt, Human
cuggcaggcagacuucugcaag

SEQ ID NO: 834389 - RNA, 22 nt, Human
ggagccagggaagcugcuuccu

SEQ ID NO: 834390 - RNA, 22 nt, Human
uaucuguuaggaucagagcugg

SEQ ID NO: 834391 - RNA, 22 nt, Human
cagcuccugcagcugcugccgu

SEQ ID NO: 834392 - RNA, 22 nt, Human
acacacucaauugcauaagcac

SEQ ID NO: 834393 - RNA, 22 nt, Human
uuugcauugcauuaaguauucu

SEQ ID NO: 834394 - RNA, 22 nt, Human
gagauuuagagagacuuaaaca

SEQ ID NO: 834395 - RNA, 22 nt, Human
ucaaaauuuuauuucucaagga

SEQ ID NO: 834396 - RNA, 20 nt, Human
uuccuguauacaaagaguuc

SEQ ID NO: 834397 - RNA, 22 nt, Human
ugaagcagagugaaggugaauu

SEQ ID NO: 834398 - RNA, 20 nt, Human
gcccaggaucucugaggcau

SEQ ID NO: 834399 - RNA, 19 nt, Human
ggagccuggagcacgugcc

SEQ ID NO: 834400 - RNA, 22 nt, Human
cuccaggccagggaaguggaca

SEQ ID NO: 834401 - RNA, 22 nt, Human
accagagcagacuacuggaggu

SEQ ID NO: 834402 - RNA, 22 nt, Human
gagacagaguuucacucuuguu

SEQ ID NO: 834403 - RNA, 22 nt, Human
gggugggagucuggcccucaaa

SEQ ID NO: 834404 - RNA, 22 nt, Human
cagcccuguccagcagagggug

SEQ ID NO: 834405 - RNA, 22 nt, Human
uaguuucagcuccuucauccug

SEQ ID NO: 834406 - RNA, 23 nt, Human
ccagcuccgugagccucgggcuc

SEQ ID NO: 834407 - RNA, 22 nt, Human
aagaaugagcucaaagaucuua

SEQ ID NO: 834408 - RNA, 20 nt, Human
auaaaauaacugccacaaga

SEQ ID NO: 834409 - RNA, 21 nt, Human
agcugggccucagccugcagu

SEQ ID NO: 834410 - RNA, 22 nt, Human
ggcccaaggcccaggucgagcu

SEQ ID NO: 834411 - RNA, 22 nt, Human
aaggccauuauucugauauauu

SEQ ID NO: 834412 - RNA, 22 nt, Human
gacauaauccuccucaccuacu

SEQ ID NO: 834413 - RNA, 17 nt, Human
aagauuucauuagcuga

SEQ ID NO: 834414 - RNA, 22 nt, Human
gaguggggucugggcaucaguc

SEQ ID NO: 834415 - RNA, 22 nt, Human
uuucaaacauaucuucauuacu

SEQ ID NO: 834416 - RNA, 22 nt, Human
cagcauuuggaggagaggcuuu

SEQ ID NO: 834417 - RNA, 22 nt, Human
uucucugaucuugcuagacuga

SEQ ID NO: 834418 - RNA, 22 nt, Human
cagaauguagaucaucaucaag

SEQ ID NO: 834419 - RNA, 22 nt, Human
ccaggcagccaagugugugugu

SEQ ID NO: 834420 - RNA, 22 nt, Human
cuggugccuccucccugugcuu

SEQ ID NO: 834421 - RNA, 22 nt, Human
ccaaggagcaaguuuacaccug

SEQ ID NO: 834422 - RNA, 22 nt, Human
augcaguauaaaucauuucugg

SEQ ID NO: 834423 - RNA, 22 nt, Human
aguugaaauuagaguccuggcu

SEQ ID NO: 834424 - RNA, 22 nt, Human
aaggcugagacagcacaggucc

SEQ ID NO: 834425 - RNA, 22 nt, Human
gcucaagagagaugcaguucuu

SEQ ID NO: 834426 - RNA, 20 nt, Human
acauguacuaaugaauacag

SEQ ID NO: 834427 - RNA, 22 nt, Human
uugugucccccuuugagagcca

SEQ ID NO: 834428 - RNA, 22 nt, Human
acagaauacuacagacugguua

SEQ ID NO: 834429 - RNA, 22 nt, Human
ccagagccuggcaucugcauaa

SEQ ID NO: 834430 - RNA, 22 nt, Human
accagcagaguugaggaggaca

SEQ ID NO: 834431 - RNA, 20 nt, Human
uuacagaaaugauguuauuu

SEQ ID NO: 834432 - RNA, 20 nt, Human
uguauauuuucugguguaaa

SEQ ID NO: 834433 - RNA, 22 nt, Human
aggcagaggagaaugaucuucc

SEQ ID NO: 834434 - RNA, 22 nt, Human
aggggcugggacagagccaagc

SEQ ID NO: 834435 - RNA, 22 nt, Human
ccugggagugucagacuugcuu

SEQ ID NO: 834436 - RNA, 22 nt, Human
auguaacaggugaagcucugag

SEQ ID NO: 834437 - RNA, 22 nt, Human
uaauguguugaauauuuguaca

SEQ ID NO: 834438 - RNA, 22 nt, Human
aggcaguuucugggacagcaua

SEQ ID NO: 834439 - RNA, 22 nt, Human
ugggcucucuggcaggaaggcu

SEQ ID NO: 834440 - RNA, 22 nt, Human
aagucacaagcauauaugcauu

SEQ ID NO: 834441 - RNA, 22 nt, Human
uguggccuccccacuucugggg

SEQ ID NO: 834442 - RNA, 22 nt, Human
uccucccacauaggacaauggg

SEQ ID NO: 834443 - RNA, 22 nt, Human
aggguagggccguagggccaug

SEQ ID NO: 834444 - RNA, 22 nt, Human
cuggcuucugggccagggcaga

SEQ ID NO: 834445 - RNA, 22 nt, Human
gcucagagauggggaaugaaaa

SEQ ID NO: 834446 - RNA, 22 nt, Human
ucauugcaggcauuccccugcc

SEQ ID NO: 834447 - RNA, 22 nt, Human
cccaggaguuugaguucagcau

SEQ ID NO: 834448 - RNA, 22 nt, Human
cucugugccucaguuuucuucu

SEQ ID NO: 834449 - RNA, 22 nt, Human
ccauggcaauggucagucuauu

SEQ ID NO: 834450 - RNA, 22 nt, Human
acagaauuugcuugggcaaugg

SEQ ID NO: 834451 - RNA, 22 nt, Human
aggcacugacucaagggagcca

SEQ ID NO: 834452 - RNA, 22 nt, Human
ugcugccaugcagagcaacaga

SEQ ID NO: 834453 - RNA, 22 nt, Human
guccugggaaggaagccaggga

SEQ ID NO: 834454 - RNA, 22 nt, Human
cuggugucugcucccucacagc

SEQ ID NO: 834455 - RNA, 21 nt, Human
uuugcauuuuacaugugggga

SEQ ID NO: 834456 - RNA, 21 nt, Human
aaugaaguggcuauuuugagg

SEQ ID NO: 834457 - RNA, 22 nt, Human
aucaguuucacuugcuugcaaa

SEQ ID NO: 834458 - RNA, 22 nt, Human
aaaagagguuaaccaggugugu

SEQ ID NO: 834459 - RNA, 22 nt, Human
uuauuuauuguguaccuacugu

SEQ ID NO: 834460 - RNA, 22 nt, Human
gcauuuccugugcuuggcauau

SEQ ID NO: 834461 - RNA, 21 nt, Human
uaagaacauuaucuucuuccu

SEQ ID NO: 834462 - RNA, 21 nt, Human
cuugaaagguagagucuacag

SEQ ID NO: 834463 - RNA, 22 nt, Human
caguacuuauuucuauuuaggg

SEQ ID NO: 834464 - RNA, 21 nt, Human
ucucugggcccuccugugggg

SEQ ID NO: 834465 - RNA, 22 nt, Human
cugggcugagccugggcugugu

SEQ ID NO: 834466 - RNA, 21 nt, Human
uuucugaaggcaacaucuauc

SEQ ID NO: 834467 - RNA, 22 nt, Human
ucagaauaugcuaaugacauuu

SEQ ID NO: 834468 - RNA, 22 nt, Human
ggccucucauguccugggcuuc

SEQ ID NO: 834469 - RNA, 22 nt, Human
acagaacugcaggaggaaaagc

SEQ ID NO: 834470 - RNA, 22 nt, Human
acagacagggcaccugccuccu

SEQ ID NO: 834471 - RNA, 18 nt, Human
ggcugugcguggaggcug

SEQ ID NO: 834472 - RNA, 22 nt, Human
uuucagaaaacuuaucaucagu

SEQ ID NO: 834473 - RNA, 22 nt, Human
uuuccauauuuggucuuuggga

SEQ ID NO: 834474 - RNA, 22 nt, Human
aucauuccacauguaccacuag

SEQ ID NO: 834475 - RNA, 22 nt, Human
cacagcuuguuuagugacucac

SEQ ID NO: 834476 - RNA, 22 nt, Human
auuuguugcuagcagcacugau

SEQ ID NO: 834477 - RNA, 20 nt, Human
aggagccauugacugcagca

SEQ ID NO: 834478 - RNA, 22 nt, Human
uuaauucugccuuucauguaac

SEQ ID NO: 834479 - RNA, 22 nt, Human
ucccagggugcgccugcccucg

SEQ ID NO: 834480 - RNA, 22 nt, Human
augcagcugugggcaagaaaug

SEQ ID NO: 834481 - RNA, 22 nt, Human
ccagggcuccauugcucauccu

SEQ ID NO: 834482 - RNA, 23 nt, Human
cuggccuccgacacuggccaaga

SEQ ID NO: 834483 - RNA, 22 nt, Human
aagucacccuagggccuggacu

SEQ ID NO: 834484 - RNA, 18 nt, Human
gccugcaggcacgggggu

SEQ ID NO: 834485 - RNA, 22 nt, Human
gcuguguuggugaagcuguagc

SEQ ID NO: 834486 - RNA, 22 nt, Human
ugggccaggauuucaagacccu

SEQ ID NO: 834487 - RNA, 22 nt, Human
uaaaguuuguagcaauugauau

SEQ ID NO: 834488 - RNA, 22 nt, Human
ucccagggcagcuguccagaag

SEQ ID NO: 834489 - RNA, 22 nt, Human
ucccagacaaucauuggccacc

SEQ ID NO: 834490 - RNA, 22 nt, Human
auaaauaucacuguugucccuc

SEQ ID NO: 834491 - RNA, 22 nt, Human
uuauuccagcuaagaguccugg

SEQ ID NO: 834492 - RNA, 22 nt, Human
ccauggcuuucuuucauuguaa

SEQ ID NO: 834493 - RNA, 22 nt, Human
gagaggugaaggcugcccuggg

SEQ ID NO: 834494 - RNA, 22 nt, Human
auuuccaagaaagcuuuaggau

SEQ ID NO: 834495 - RNA, 22 nt, Human
gcugugcagccaagugccucug

SEQ ID NO: 834496 - RNA, 22 nt, Human
ugcuggggguucagaugaguaa

SEQ ID NO: 834497 - RNA, 22 nt, Human
gcagcuuuguggagaggcccau

SEQ ID NO: 834498 - RNA, 22 nt, Human
aauaaacugcucaauugcauca

SEQ ID NO: 834499 - RNA, 22 nt, Human
auucuguauuucuaauaagauc

SEQ ID NO: 834500 - RNA, 22 nt, Human
guggccugccgugugguauggg

SEQ ID NO: 834501 - RNA, 22 nt, Human
aguaacuaugcuugagaaucag

SEQ ID NO: 834502 - RNA, 22 nt, Human
gucucuggguuaagcagugcau

SEQ ID NO: 834503 - RNA, 22 nt, Human
acagagcuguacaugugccaug

SEQ ID NO: 834504 - RNA, 21 nt, Human
cuggacugaggagacagucgc

SEQ ID NO: 834505 - RNA, 22 nt, Human
uucagaaaugaauauugguauu

SEQ ID NO: 834506 - RNA, 22 nt, Human
caagagcucaccggagagcauu

SEQ ID NO: 834507 - RNA, 22 nt, Human
uacaguaaagcugcuaugaauu

SEQ ID NO: 834508 - RNA, 20 nt, Human
agcccaggccugugugaguc

SEQ ID NO: 834509 - RNA, 22 nt, Human
ccuuaaauucuccauuugaaag

SEQ ID NO: 834510 - RNA, 22 nt, Human
ggagccagagucugcaguguaa

SEQ ID NO: 834511 - RNA, 22 nt, Human
ugugccugucacccucagagag

SEQ ID NO: 834512 - RNA, 18 nt, Human
gucaccuggaucagauua

SEQ ID NO: 834513 - RNA, 22 nt, Human
cugggcugugguguggcccaaa

SEQ ID NO: 834514 - RNA, 22 nt, Human
cauuaugugggaaaauguucuu

SEQ ID NO: 834515 - RNA, 22 nt, Human
acacauauauacauauuugugc

SEQ ID NO: 834516 - RNA, 22 nt, Human
uugaaaggugcugugugcugau

SEQ ID NO: 834517 - RNA, 22 nt, Human
cucuuaaagaauguuccagcug

SEQ ID NO: 834518 - RNA, 22 nt, Human
aaucauucuuauuucacagcaa

SEQ ID NO: 834519 - RNA, 22 nt, Human
agaaaucaugacuaagagcagu

SEQ ID NO: 834520 - RNA, 22 nt, Human
uuuaggcauacuuuugggagaa

SEQ ID NO: 834521 - RNA, 22 nt, Human
gcaggcagagaaggaacauuua

SEQ ID NO: 834522 - RNA, 21 nt, Human
aggcagcucaggcccagagag

SEQ ID NO: 834523 - RNA, 22 nt, Human
ccagaaaaugcagaacauagaa

SEQ ID NO: 834524 - RNA, 17 nt, Human
agaggcagauacuugga

SEQ ID NO: 834525 - RNA, 22 nt, Human
uccuuggcagcagggagcauga

SEQ ID NO: 834526 - RNA, 22 nt, Human
acuguucauuuggauuucucug

SEQ ID NO: 834527 - RNA, 22 nt, Human
uguggccuccuguuccugggua

SEQ ID NO: 834528 - RNA, 22 nt, Human
uaauuuaauuccauggauucua

SEQ ID NO: 834529 - RNA, 22 nt, Human
guguguuucagaagccaggugu

SEQ ID NO: 834530 - RNA, 22 nt, Human
uacccaggaggaaacugaggcu

SEQ ID NO: 834531 - RNA, 22 nt, Human
ucaccugggagggcugugguag

SEQ ID NO: 834532 - RNA, 21 nt, Human
cagaaguaaggguaacuucuc

SEQ ID NO: 834533 - RNA, 20 nt, Human
uacaauacacaugcauauga

SEQ ID NO: 834534 - RNA, 22 nt, Human
cuggggcucacuuuggucaggc

SEQ ID NO: 834535 - RNA, 22 nt, Human
gaguccuucuggcuggcaggau

SEQ ID NO: 834536 - RNA, 21 nt, Human
guauucuuuaugaagugaaaa

SEQ ID NO: 834537 - RNA, 22 nt, Human
guucuccauucagcuuccugug

SEQ ID NO: 834538 - RNA, 22 nt, Human
uggcucagaacuacuucuaguu

SEQ ID NO: 834539 - RNA, 22 nt, Human
agugugucugaucacuugugag

SEQ ID NO: 834540 - RNA, 22 nt, Human
gccagggcaggggagcaucugc

SEQ ID NO: 834541 - RNA, 19 nt, Human
ucaaagucugagucacuuu

SEQ ID NO: 834542 - RNA, 22 nt, Human
cauuuguaauacugacuugcag

SEQ ID NO: 834543 - RNA, 22 nt, Human
ugcuuauucuuuccacaauuca

SEQ ID NO: 834544 - RNA, 22 nt, Human
augaaacacacacgcgcauacu

SEQ ID NO: 834545 - RNA, 22 nt, Human
cccaggagaugcacuccauugg

SEQ ID NO: 834546 - RNA, 20 nt, Human
uccaagcccuccuuccauuc

SEQ ID NO: 834547 - RNA, 22 nt, Human
agaaaaggauugauggaucaga

SEQ ID NO: 834548 - RNA, 22 nt, Human
uagaauaaguugaugauauaug

SEQ ID NO: 834549 - RNA, 22 nt, Human
cucuacucuuaacacagcuagg

SEQ ID NO: 834550 - RNA, 22 nt, Human
accugccuaucagcugccugcu

SEQ ID NO: 834551 - RNA, 22 nt, Human
acagccaggagccaugggcagg

SEQ ID NO: 834552 - RNA, 22 nt, Human
uaucugagaaagaagcaccaga

SEQ ID NO: 834553 - RNA, 22 nt, Human
aaaguucuggggguguuucugg

SEQ ID NO: 834554 - RNA, 22 nt, Human
ucccagaguucaaugggaaggu

SEQ ID NO: 834555 - RNA, 18 nt, Human
ccuggaccugucuccuuu

SEQ ID NO: 834556 - RNA, 22 nt, Human
augguuuguaacccaauacucc

SEQ ID NO: 834557 - RNA, 19 nt, Human
uucacaauuaugaaauuag

SEQ ID NO: 834558 - RNA, 22 nt, Human
ggagguggcagggaacauaauu

SEQ ID NO: 834559 - RNA, 20 nt, Human
aagcagaagcugcucucagc

SEQ ID NO: 834560 - RNA, 22 nt, Human
acagcaggauuuggcgauguug

SEQ ID NO: 834561 - RNA, 22 nt, Human
gccuggcuccuaaggacuggcu

SEQ ID NO: 834562 - RNA, 22 nt, Human
caggaagagaacauggaggcug

SEQ ID NO: 834563 - RNA, 22 nt, Human
agcugcucucacuggacgccug

SEQ ID NO: 834564 - RNA, 22 nt, Human
uaacacauaucuacaacaugug

SEQ ID NO: 834565 - RNA, 22 nt, Human
aaggcagcucagcucauggcag

SEQ ID NO: 834566 - RNA, 22 nt, Human
ucucagagauuuauggaaaacu

SEQ ID NO: 834567 - RNA, 22 nt, Human
cccagcucucugcucuuagccu

SEQ ID NO: 834568 - RNA, 22 nt, Human
auucuucacauaagugcuguac

SEQ ID NO: 834569 - RNA, 22 nt, Human
guggcuucuggcugggccucag

SEQ ID NO: 834570 - RNA, 22 nt, Human
cucuucuugcuagacugagugc

SEQ ID NO: 834571 - RNA, 22 nt, Human
auugcuaggaacagguugcacc

SEQ ID NO: 834572 - RNA, 22 nt, Human
agcaccuguugcacuucauaau

SEQ ID NO: 834573 - RNA, 22 nt, Human
gcuguucauagaaauggucuca

SEQ ID NO: 834574 - RNA, 22 nt, Human
ggcuucugguaaagaccacacc

SEQ ID NO: 834575 - RNA, 22 nt, Human
acacccagagcgccagugccga

SEQ ID NO: 834576 - RNA, 22 nt, Human
aggcagaaaauagucauccaaa

SEQ ID NO: 834577 - RNA, 22 nt, Human
cacaaaaguaggaggcaggcgg

SEQ ID NO: 834578 - RNA, 22 nt, Human
uuucuuaguccuagagugauuu

SEQ ID NO: 834579 - RNA, 22 nt, Human
uagaaaucagguuuuuagaaag

SEQ ID NO: 834580 - RNA, 22 nt, Human
ugcuuaauaggaguugaacauu

SEQ ID NO: 834581 - RNA, 22 nt, Human
caagacaagaucuaagcaugcu

SEQ ID NO: 834582 - RNA, 22 nt, Human
uguucagagacagaaauucuaa

SEQ ID NO: 834583 - RNA, 22 nt, Human
gcagacagacugcagugauuuu

SEQ ID NO: 834584 - RNA, 22 nt, Human
ugcuggccaacaaggcuccaag

SEQ ID NO: 834585 - RNA, 22 nt, Human
agcagagccaggucucucugua

SEQ ID NO: 834586 - RNA, 22 nt, Human
aauuuguuaaaagugagugaca

SEQ ID NO: 834587 - RNA, 22 nt, Human
agauuucccaaauacuuguuau

SEQ ID NO: 834588 - RNA, 22 nt, Human
ggcaguggguggaucucaggga

SEQ ID NO: 834589 - RNA, 22 nt, Human
gccuggcacucacugaagaggc

SEQ ID NO: 834590 - RNA, 21 nt, Human
uggagacucugguucuuugug

SEQ ID NO: 834591 - RNA, 22 nt, Human
auucaguaggucuagaauaaga

SEQ ID NO: 834592 - RNA, 20 nt, Human
acaaaauagguacuggguag

SEQ ID NO: 834593 - RNA, 22 nt, Human
agccuguggaucccugcacugg

SEQ ID NO: 834594 - RNA, 22 nt, Human
gauuucaaggauguuagaggug

SEQ ID NO: 834595 - RNA, 22 nt, Human
aucacgucaugguuugaucugg

SEQ ID NO: 834596 - RNA, 22 nt, Human
uauguacauggagagcaauuga

SEQ ID NO: 834597 - RNA, 22 nt, Human
uuucucuaaauagggaggcuua

SEQ ID NO: 834598 - RNA, 22 nt, Human
ggcugccauaacugauaccaua

SEQ ID NO: 834599 - RNA, 22 nt, Human
gccagcucccaagugagccccu

SEQ ID NO: 834600 - RNA, 22 nt, Human
ucagugucuugaccugggugug

SEQ ID NO: 834601 - RNA, 22 nt, Human
aguggcagccgagcaggagaug

SEQ ID NO: 834602 - RNA, 22 nt, Human
caaauagugucacauugugagg

SEQ ID NO: 834603 - RNA, 22 nt, Human
cgcugggggaacagcgagggug

SEQ ID NO: 834604 - RNA, 22 nt, Human
uccuucagcuacucaguuucca

SEQ ID NO: 834605 - RNA, 20 nt, Human
uggcuccucuuggcuguggc

SEQ ID NO: 834606 - RNA, 19 nt, Human
ugucacugucauggcccag

SEQ ID NO: 834607 - RNA, 22 nt, Human
cuggccugagaaugcuacccuu

SEQ ID NO: 834608 - RNA, 22 nt, Human
ccagucacucugugagagcuac

SEQ ID NO: 834609 - RNA, 22 nt, Human
cugugucccuugucccagagcc

SEQ ID NO: 834610 - RNA, 20 nt, Human
uugagcuuuuaguacagaca

SEQ ID NO: 834611 - RNA, 22 nt, Human
uaauaucuggcauucaaacaug

SEQ ID NO: 834612 - RNA, 22 nt, Human
uccaggaggcaccuuuggacca

SEQ ID NO: 834613 - RNA, 22 nt, Human
aucuagaaaguguugaagauca

SEQ ID NO: 834614 - RNA, 22 nt, Human
uauuccagugugaucuuuguag

SEQ ID NO: 834615 - RNA, 22 nt, Human
uggggacauagccagucuggcu

SEQ ID NO: 834616 - RNA, 22 nt, Human
ugggauaguggccaggaccccc

SEQ ID NO: 834617 - RNA, 22 nt, Human
uggcucuguugugcugagccag

SEQ ID NO: 834618 - RNA, 22 nt, Human
cuggcuggucaucagcaguacg

SEQ ID NO: 834619 - RNA, 22 nt, Human
gcugucuccauagcuguguguc

SEQ ID NO: 834620 - RNA, 22 nt, Human
agcccuagagcuggaggucagu

SEQ ID NO: 834621 - RNA, 21 nt, Human
ugcucacagaugugcucagug

SEQ ID NO: 834622 - RNA, 22 nt, Human
gggugcugacuggggccugaaa

SEQ ID NO: 834623 - RNA, 22 nt, Human
acaaauguggacauggauaaug

SEQ ID NO: 834624 - RNA, 22 nt, Human
agagugcaaccgaaacaagcag

SEQ ID NO: 834625 - RNA, 22 nt, Human
uaggaaaagucuagauugauga

SEQ ID NO: 834626 - RNA, 22 nt, Human
cagcaggauaugguggagagag

SEQ ID NO: 834627 - RNA, 22 nt, Human
cuguguuggcuuuucucuugua

SEQ ID NO: 834628 - RNA, 22 nt, Human
uugacaauugggagauauaaag

SEQ ID NO: 834629 - RNA, 22 nt, Human
agcaggguuuggggauuggcac

SEQ ID NO: 834630 - RNA, 22 nt, Human
gcugucugggaugucacugcug

SEQ ID NO: 834631 - RNA, 22 nt, Human
cuagccaugggcauuaaaggua

SEQ ID NO: 834632 - RNA, 22 nt, Human
gcagagaaaguuuuguccucag

SEQ ID NO: 834633 - RNA, 22 nt, Human
uugcugugucugauggcugaga

SEQ ID NO: 834634 - RNA, 22 nt, Human
ugcagcucauugguguccuggu

SEQ ID NO: 834635 - RNA, 22 nt, Human
uaaggcauucucaugcugugaa

SEQ ID NO: 834636 - RNA, 22 nt, Human
cucuccagccacagaagcugcu

SEQ ID NO: 834637 - RNA, 22 nt, Human
aucuacauaaaacgaauacaua

SEQ ID NO: 834638 - RNA, 22 nt, Human
ggcugugcgggcagccguggga

SEQ ID NO: 834639 - RNA, 20 nt, Human
uaguauuugcauaaggauag

SEQ ID NO: 834640 - RNA, 22 nt, Human
ucccaggaugaagacaguguug

SEQ ID NO: 834641 - RNA, 22 nt, Human
gcagcuaccacccaggaaggac

SEQ ID NO: 834642 - RNA, 22 nt, Human
ugcaagggcuuagggggcugug

SEQ ID NO: 834643 - RNA, 22 nt, Human
guuaugaaauaaauauagauca

SEQ ID NO: 834644 - RNA, 22 nt, Human
gggcuggcgggaaaggcaauuc

SEQ ID NO: 834645 - RNA, 22 nt, Human
auuccaaaggcuggccuggagg

SEQ ID NO: 834646 - RNA, 22 nt, Human
agcagcugccagagagaguucc

SEQ ID NO: 834647 - RNA, 22 nt, Human
uuuccucugagugagcugggag

SEQ ID NO: 834648 - RNA, 22 nt, Human
caguagcaggcaggugcuuuug

SEQ ID NO: 834649 - RNA, 22 nt, Human
ccacugucuuuuccaggcugaa

SEQ ID NO: 834650 - RNA, 22 nt, Human
uacuauaccauguaagauauga

SEQ ID NO: 834651 - RNA, 22 nt, Human
aauaauuagugggacagagaac

SEQ ID NO: 834652 - RNA, 22 nt, Human
acauguggucaaucuguguagg

SEQ ID NO: 834653 - RNA, 22 nt, Human
cuggagccaugucuugacugcu

SEQ ID NO: 834654 - RNA, 22 nt, Human
gugcucuggcuggucucccggu

SEQ ID NO: 834655 - RNA, 22 nt, Human
gagaggauccacaaaccaggaa

SEQ ID NO: 834656 - RNA, 22 nt, Human
uugguacaaaaguaacuguggu

SEQ ID NO: 834657 - RNA, 22 nt, Human
ugggugcuucgucagcucugag

SEQ ID NO: 834658 - RNA, 22 nt, Human
uccagagguauguagagaguau

SEQ ID NO: 834659 - RNA, 22 nt, Human
uuuacacaaaagauagcacacc

SEQ ID NO: 834660 - RNA, 22 nt, Human
ugccaggagagugcaugcaggg

SEQ ID NO: 834661 - RNA, 21 nt, Human
guggccugauuaugaaugggu

SEQ ID NO: 834662 - RNA, 22 nt, Human
ugaaauagacacagugcuauac

SEQ ID NO: 834663 - RNA, 22 nt, Human
gcugcagcagcugcaggguugu

SEQ ID NO: 834664 - RNA, 22 nt, Human
aaauguguguauguacauauau

SEQ ID NO: 834665 - RNA, 22 nt, Human
cuccagggagcugcgggagcca

SEQ ID NO: 834666 - RNA, 22 nt, Human
aggcagaauguuggaaaggaag

SEQ ID NO: 834667 - RNA, 22 nt, Human
ugcuagaaaucugaaacuagca

SEQ ID NO: 834668 - RNA, 22 nt, Human
aggaugggccugggauaugcuu

SEQ ID NO: 834669 - RNA, 22 nt, Human
aggcugucaucuuugcaggcag

SEQ ID NO: 834670 - RNA, 22 nt, Human
aaaacuaaauacgcuuugccuc

SEQ ID NO: 834671 - RNA, 22 nt, Human
agccaacuaauuaaacaacuuu

SEQ ID NO: 834672 - RNA, 22 nt, Human
gcuggagguuucaccugaguuu

SEQ ID NO: 834673 - RNA, 22 nt, Human
agaaaugcucuuccugaccaga

SEQ ID NO: 834674 - RNA, 22 nt, Human
ucucuucuauuugagacuauuu

SEQ ID NO: 834675 - RNA, 22 nt, Human
gucagaggaauggaugagugau

SEQ ID NO: 834676 - RNA, 22 nt, Human
agauuucccacuccauguauug

SEQ ID NO: 834677 - RNA, 22 nt, Human
ggcugcugguggaaugguaggc

SEQ ID NO: 834678 - RNA, 22 nt, Human
ccucuucugagugagacucccu

SEQ ID NO: 834679 - RNA, 22 nt, Human
cugcagugcaagcccagaugga

SEQ ID NO: 834680 - RNA, 22 nt, Human
uaggacaggugaggggcugugg

SEQ ID NO: 834681 - RNA, 22 nt, Human
ccaggcagagggauccccaucc

SEQ ID NO: 834682 - RNA, 22 nt, Human
aggagcuggaguccaggcaagu

SEQ ID NO: 834683 - RNA, 20 nt, Human
agcaagaguaaggacagcga

SEQ ID NO: 834684 - RNA, 22 nt, Human
uaguccuugcugggcacagagu

SEQ ID NO: 834685 - RNA, 23 nt, Human
ugcaggggaggcuuaaagcaggu

SEQ ID NO: 834686 - RNA, 22 nt, Human
gagggagggaaaguuuaacacu

SEQ ID NO: 834687 - RNA, 22 nt, Human
cagcuggggcagccacgugcgg

SEQ ID NO: 834688 - RNA, 22 nt, Human
uuacagaacugcccuaguuggc

SEQ ID NO: 834689 - RNA, 22 nt, Human
cacugcagaucagaggcugaga

SEQ ID NO: 834690 - RNA, 22 nt, Human
ggccuguguccuccuugcccug

SEQ ID NO: 834691 - RNA, 22 nt, Human
uggaaggaaagguagcagagaa

SEQ ID NO: 834692 - RNA, 22 nt, Human
guggcccaggcuuggcgcuggc

SEQ ID NO: 834693 - RNA, 22 nt, Human
uuuccagagcaugucugcucag

SEQ ID NO: 834694 - RNA, 22 nt, Human
uuuuaugugcuggacuggcagu

SEQ ID NO: 834695 - RNA, 22 nt, Human
aagcgccaugguuccugcgcag

SEQ ID NO: 834696 - RNA, 22 nt, Human
ucugcagcuugcacaggcaggc

SEQ ID NO: 834697 - RNA, 22 nt, Human
gcccaggagguggaggugcagu

SEQ ID NO: 834698 - RNA, 22 nt, Human
gaggaugugucuggucugggca

SEQ ID NO: 834699 - RNA, 22 nt, Human
caaaguuaugaaugauaagauu

SEQ ID NO: 834700 - RNA, 22 nt, Human
ugagccuggccugcagagacca

SEQ ID NO: 834701 - RNA, 22 nt, Human
uugaaggacaucuuguuucuag

SEQ ID NO: 834702 - RNA, 22 nt, Human
aagcagccacuggccaguuaua

SEQ ID NO: 834703 - RNA, 22 nt, Human
aggccuggugugccggaugcag

SEQ ID NO: 834704 - RNA, 22 nt, Human
gggcugcuuccuggggaaugcu

SEQ ID NO: 834705 - RNA, 22 nt, Human
gcugagcugcuguucauccugc

SEQ ID NO: 834706 - RNA, 22 nt, Human
gucugucacucaggggcuggag

SEQ ID NO: 834707 - RNA, 22 nt, Human
augauugaccaucugcugggcu

SEQ ID NO: 834708 - RNA, 22 nt, Human
aucugucuugccuugcauauuu

SEQ ID NO: 834709 - RNA, 22 nt, Human
uacaguagaauuuuuaguaacu

SEQ ID NO: 834710 - RNA, 22 nt, Human
augcuguguggucaaguuaauu

SEQ ID NO: 834711 - RNA, 22 nt, Human
ggacacaagcuccggggcugca

SEQ ID NO: 834712 - RNA, 22 nt, Human
acgagagguccuuagaaucugu

SEQ ID NO: 834713 - RNA, 22 nt, Human
gccaggcugcuccagggaggcc

SEQ ID NO: 834714 - RNA, 22 nt, Human
ggcugaaguguaguggcucacu

SEQ ID NO: 834715 - RNA, 22 nt, Human
ggucccagaauugguuagcaca

SEQ ID NO: 834716 - RNA, 22 nt, Human
agcccaaggcuucccugcuggc

SEQ ID NO: 834717 - RNA, 22 nt, Human
cagccagggagcaaagaguuga

SEQ ID NO: 834718 - RNA, 17 nt, Human
accagccucuccugggg

SEQ ID NO: 834719 - RNA, 22 nt, Human
ucccaggaaggauucggcauuu

SEQ ID NO: 834720 - RNA, 22 nt, Human
ggcagccuccagggcacuggug

SEQ ID NO: 834721 - RNA, 22 nt, Human
auguuucaccaguuuuauaaga

SEQ ID NO: 834722 - RNA, 22 nt, Human
aggugagggugccagugcaugg

SEQ ID NO: 834723 - RNA, 22 nt, Human
ucuggagccuuggaugggaaag

SEQ ID NO: 834724 - RNA, 22 nt, Human
uaacacaugguuaguacacaau

SEQ ID NO: 834725 - RNA, 22 nt, Human
caugucuguguacacaugcaca

SEQ ID NO: 834726 - RNA, 22 nt, Human
cauauuuauagaucuggcauuu

SEQ ID NO: 834727 - RNA, 22 nt, Human
agagugggccucugagucccag

SEQ ID NO: 834728 - RNA, 22 nt, Human
acacaggggaaaguggagcuga

SEQ ID NO: 834729 - RNA, 22 nt, Human
uuugcauucuagaaaaauuucu

SEQ ID NO: 834730 - RNA, 22 nt, Human
uguguuuugaacucaucuacug

SEQ ID NO: 834731 - RNA, 22 nt, Human
uccaggagguuuggaggaagca

SEQ ID NO: 834732 - RNA, 22 nt, Human
uuaugaaagacauuucuguugg

SEQ ID NO: 834733 - RNA, 22 nt, Human
cuuucaaugugccugccuuggg

SEQ ID NO: 834734 - RNA, 22 nt, Human
gugaggggaguaaagccauguu

SEQ ID NO: 834735 - RNA, 22 nt, Human
ucauuuguucucauucucuacu

SEQ ID NO: 834736 - RNA, 22 nt, Human
agugggcagugcgcucggaugc

SEQ ID NO: 834737 - RNA, 22 nt, Human
auguacaguggaaacuaacaaa

SEQ ID NO: 834738 - RNA, 22 nt, Human
uuugugaaaugaagucacaacu

SEQ ID NO: 834739 - RNA, 22 nt, Human
uauuacugagguuuuauggagu

SEQ ID NO: 834740 - RNA, 22 nt, Human
acagcuugcaauggcuuucaac

SEQ ID NO: 834741 - RNA, 22 nt, Human
cccagccucuguuugcuccucu

SEQ ID NO: 834742 - RNA, 22 nt, Human
gaaauuauugcuagagacugca

SEQ ID NO: 834743 - RNA, 22 nt, Human
aucuggcucgcuaggcucuggg

SEQ ID NO: 834744 - RNA, 22 nt, Human
uuccagggcuaauuccugugga

SEQ ID NO: 834745 - RNA, 21 nt, Human
guggcccugguguggcugcac

SEQ ID NO: 834746 - RNA, 21 nt, Human
aggaaguggccagauugggaa

SEQ ID NO: 834747 - RNA, 22 nt, Human
ccacucugauuuuggcuccacu

SEQ ID NO: 834748 - RNA, 22 nt, Human
gcuggcauuacaggagagaacc

SEQ ID NO: 834749 - RNA, 22 nt, Human
uauagaagagacaugugcauag

SEQ ID NO: 834750 - RNA, 22 nt, Human
ggaggccaaagugugggcggcu

SEQ ID NO: 834751 - RNA, 22 nt, Human
ugucccagguccuagaugacca

SEQ ID NO: 834752 - RNA, 22 nt, Human
auuucaaggcuauuaauauaaa

SEQ ID NO: 834753 - RNA, 22 nt, Human
ucucuucacaugcuugcuccaa

SEQ ID NO: 834754 - RNA, 22 nt, Human
aucuggcuuuuaccccacggcc

SEQ ID NO: 834755 - RNA, 23 nt, Human
aggaggccugaaacugaggcuga

SEQ ID NO: 834756 - RNA, 22 nt, Human
ucauaauacaaagaguucugca

SEQ ID NO: 834757 - RNA, 22 nt, Human
ugcuggaggaguuuacuguggc

SEQ ID NO: 834758 - RNA, 22 nt, Human
aauguucagaggacaauauaaa

SEQ ID NO: 834759 - RNA, 22 nt, Human
uuucuucaauugcuaacaagga

SEQ ID NO: 834760 - RNA, 23 nt, Human
gcauugucuccccacuucugggc

SEQ ID NO: 834761 - RNA, 22 nt, Human
uacuuuaaaaacugauaauuca

SEQ ID NO: 834762 - RNA, 22 nt, Human
acacaggaagucagcacugaug

SEQ ID NO: 834763 - RNA, 22 nt, Human
uuaauacagucuccagaaguaa

SEQ ID NO: 834764 - RNA, 22 nt, Human
aagagcuggagcugcuacagga

SEQ ID NO: 834765 - RNA, 22 nt, Human
gcagaagggaauaaggagcuuu

SEQ ID NO: 834766 - RNA, 22 nt, Human
gaggccagaaugagcugaaugc

SEQ ID NO: 834767 - RNA, 22 nt, Human
uuugcagugucagcuucugugu

SEQ ID NO: 834768 - RNA, 22 nt, Human
agggccugucagcgguguccug

SEQ ID NO: 834769 - RNA, 22 nt, Human
auagcuuucuuaaauauauaaa

SEQ ID NO: 834770 - RNA, 22 nt, Human
ucucagaggugcccuggcaucu

SEQ ID NO: 834771 - RNA, 22 nt, Human
gaagaacaagcagugcuuuccu

SEQ ID NO: 834772 - RNA, 22 nt, Human
cucugagaggugagaagcagca

SEQ ID NO: 834773 - RNA, 22 nt, Human
auuucaacguuagauguaauag

SEQ ID NO: 834774 - RNA, 22 nt, Human
ugcccaggauugugaggucagg

SEQ ID NO: 834775 - RNA, 22 nt, Human
gauguguuuccaggauuuguuu

SEQ ID NO: 834776 - RNA, 22 nt, Human
acucugagcaucccaagucuua

SEQ ID NO: 834777 - RNA, 22 nt, Human
ucagcugaguucuagagcacuc

SEQ ID NO: 834778 - RNA, 22 nt, Human
caggagcugggucuggaagcag

SEQ ID NO: 834779 - RNA, 22 nt, Human
uacauguaauuuucauaguaag

SEQ ID NO: 834780 - RNA, 22 nt, Human
cuaucauuuuacaugguuggug

SEQ ID NO: 834781 - RNA, 22 nt, Human
uuucuguagggauuucacaguu

SEQ ID NO: 834782 - RNA, 22 nt, Human
gggaucagcaagccacugcacc

SEQ ID NO: 834783 - RNA, 22 nt, Human
cagcuagcuaagaaggccagag

SEQ ID NO: 834784 - RNA, 22 nt, Human
ucuucucuacaccagcagcccc

SEQ ID NO: 834785 - RNA, 22 nt, Human
aggugccagugcuguggucccc

SEQ ID NO: 834786 - RNA, 22 nt, Human
agcagggggaguuagacuagau

SEQ ID NO: 834787 - RNA, 22 nt, Human
aggaaaaauaaggcagcagggc

SEQ ID NO: 834788 - RNA, 23 nt, Human
cugucuccugggcuagguggaau

SEQ ID NO: 834789 - RNA, 22 nt, Human
uuuccaaaguugccauaagcuu

SEQ ID NO: 834790 - RNA, 22 nt, Human
auaacuuucuucacccuugcug

SEQ ID NO: 834791 - RNA, 22 nt, Human
gcugccucaggcaccuccuggc

SEQ ID NO: 834792 - RNA, 22 nt, Human
acuuugaaacuaaaauucauua

SEQ ID NO: 834793 - RNA, 17 nt, Human
cuggagccaagagggcc

SEQ ID NO: 834794 - RNA, 22 nt, Human
ccagggcaaaugagaucauagc

SEQ ID NO: 834795 - RNA, 22 nt, Human
aggcaguguauugcuagcggcu

SEQ ID NO: 834796 - RNA, 22 nt, Human
ccuggagauuucuucaagcuuu

SEQ ID NO: 834797 - RNA, 21 nt, Human
agaaaaguagaguuuucagag

SEQ ID NO: 834798 - RNA, 22 nt, Human
uugcuuugccaccagaagucua

SEQ ID NO: 834799 - RNA, 22 nt, Human
ccuggcagacugugagggcagg

SEQ ID NO: 834800 - RNA, 22 nt, Human
aucuggcucauucagggaacgg

SEQ ID NO: 834801 - RNA, 22 nt, Human
agcugggucuugggccaggaga

SEQ ID NO: 834802 - RNA, 22 nt, Human
ucuggagauaagacagacagau

SEQ ID NO: 834803 - RNA, 22 nt, Human
gguggccucgguggugcacagg

SEQ ID NO: 834804 - RNA, 22 nt, Human
ggccugccucacagucagcacc

SEQ ID NO: 834805 - RNA, 22 nt, Human
aaaucagucccucuuggaauuu

SEQ ID NO: 834806 - RNA, 22 nt, Human
agaucaguuagauagcuugaug

SEQ ID NO: 834807 - RNA, 22 nt, Human
agaauccuguuuuacuucauca

SEQ ID NO: 834808 - RNA, 22 nt, Human
ggggagaguccuuuccaguucc

SEQ ID NO: 834809 - RNA, 22 nt, Human
auguuuuauauuuugcagcagu

SEQ ID NO: 834810 - RNA, 22 nt, Human
ccugggagugugccaucucugu

SEQ ID NO: 834811 - RNA, 22 nt, Human
gcccucuggcagccuuggcugg

SEQ ID NO: 834812 - RNA, 22 nt, Human
cucuggagcauuucaccuacau

SEQ ID NO: 834813 - RNA, 22 nt, Human
ggucccaggauugguugcgcag

SEQ ID NO: 834814 - RNA, 22 nt, Human
ugaauaguccuuggaauaacug

SEQ ID NO: 834815 - RNA, 22 nt, Human
ucagaacauugacauucuuauu

SEQ ID NO: 834816 - RNA, 22 nt, Human
ugcagauucaaaugaaaugcaa

SEQ ID NO: 834817 - RNA, 22 nt, Human
cauaauuucccaagagauugaa

SEQ ID NO: 834818 - RNA, 22 nt, Human
agggauggaagcucgucugcaa

SEQ ID NO: 834819 - RNA, 22 nt, Human
agaggacaaaaugagaagugcu

SEQ ID NO: 834820 - RNA, 22 nt, Human
gugucauuaaccaccaugcaaa

SEQ ID NO: 834821 - RNA, 20 nt, Human
ccucaggaugagggugagca

SEQ ID NO: 834822 - RNA, 22 nt, Human
caauaguucgguccugaaggcc

SEQ ID NO: 834823 - RNA, 22 nt, Human
aacucaguguguuucuuaguau

SEQ ID NO: 834824 - RNA, 22 nt, Human
aaagacuuggcuuaugauuugc

SEQ ID NO: 834825 - RNA, 22 nt, Human
aauaauaagauacuaagggagu

SEQ ID NO: 834826 - RNA, 22 nt, Human
ucccugggcuucuccagacuug

SEQ ID NO: 834827 - RNA, 22 nt, Human
auaucagaaauaguaagcagag

SEQ ID NO: 834828 - RNA, 22 nt, Human
cauuucaauacaguuuguaaau

SEQ ID NO: 834829 - RNA, 22 nt, Human
uuauuauagauuaugcaagauu

SEQ ID NO: 834830 - RNA, 22 nt, Human
ugggcagagaguagaggcaacg

SEQ ID NO: 834831 - RNA, 22 nt, Human
cugggccuagcaacagaggagu

SEQ ID NO: 834832 - RNA, 22 nt, Human
uagaaacagauguuuuugaaga

SEQ ID NO: 834833 - RNA, 22 nt, Human
auggauaauggugauaguugca

SEQ ID NO: 834834 - RNA, 22 nt, Human
auggcauuccaagucuucuuuu

SEQ ID NO: 834835 - RNA, 22 nt, Human
uccaggagggggagccgugccg

SEQ ID NO: 834836 - RNA, 22 nt, Human
caggaccccauauucacugaac

SEQ ID NO: 834837 - RNA, 22 nt, Human
ccugggagggcaagugcugaug

SEQ ID NO: 834838 - RNA, 22 nt, Human
uuaagucacuuaucuaaagaca

SEQ ID NO: 834839 - RNA, 23 nt, Human
ugccagaggcagucacaguggug

SEQ ID NO: 834840 - RNA, 22 nt, Human
caagaugugccuaaucagaccu

SEQ ID NO: 834841 - RNA, 22 nt, Human
guuccaggcaagugggauagga

SEQ ID NO: 834842 - RNA, 22 nt, Human
aaguccaucucugccccacaca

SEQ ID NO: 834843 - RNA, 22 nt, Human
aauauaauuuuauuccuagagu

SEQ ID NO: 834844 - RNA, 22 nt, Human
ugaagguggcauaggagagaug

SEQ ID NO: 834845 - RNA, 22 nt, Human
auacaaagacaaaucucaaucu

SEQ ID NO: 834846 - RNA, 22 nt, Human
ggcaugggccgaggugccuccu

SEQ ID NO: 834847 - RNA, 22 nt, Human
gaugcacuugccccuccucaga

SEQ ID NO: 834848 - RNA, 22 nt, Human
agucucagaaaagaagcaugga

SEQ ID NO: 834849 - RNA, 22 nt, Human
gcagcaugagcuauacaaagua

SEQ ID NO: 834850 - RNA, 23 nt, Human
uccaggagaaccccugucugucc

SEQ ID NO: 834851 - RNA, 22 nt, Human
cacagcuuaugccacugauugg

SEQ ID NO: 834852 - RNA, 16 nt, Human
gagggcagaggcggaa

SEQ ID NO: 834853 - RNA, 22 nt, Human
ggcucugggucuguggggagcg

SEQ ID NO: 834854 - RNA, 22 nt, Human
cugagaggcacaaggcauuucg

SEQ ID NO: 834855 - RNA, 22 nt, Human
ggagacagugacuuagagacug

SEQ ID NO: 834856 - RNA, 23 nt, Human
ugggccuggccucccaguccagc

SEQ ID NO: 834857 - RNA, 22 nt, Human
cuacagaaaaucagccacaggc

SEQ ID NO: 834858 - RNA, 22 nt, Human
cagccugcauuuguaucuguau

SEQ ID NO: 834859 - RNA, 22 nt, Human
agguggagacccagagaaggcg

SEQ ID NO: 834860 - RNA, 22 nt, Human
guggcagcugguaugcagacag

SEQ ID NO: 834861 - RNA, 22 nt, Human
cuaaaugccuuuccuaccuaac

SEQ ID NO: 834862 - RNA, 22 nt, Human
gccuggaguucagccaaguccc

SEQ ID NO: 834863 - RNA, 23 nt, Human
uuacaguaggaguuggaaaacca

SEQ ID NO: 834864 - RNA, 22 nt, Human
ugauuuccaguugcugggugcu

SEQ ID NO: 834865 - RNA, 22 nt, Human
uaggagagcugaacuauugucu

SEQ ID NO: 834866 - RNA, 22 nt, Human
agaggccaguggcugugcuguc

SEQ ID NO: 834867 - RNA, 22 nt, Human
uaaauguauaggcacuaaaccu

SEQ ID NO: 834868 - RNA, 22 nt, Human
aaggccuggauuuagguuguga

SEQ ID NO: 834869 - RNA, 22 nt, Human
cucccuggaggugagcuggcac

SEQ ID NO: 834870 - RNA, 22 nt, Human
gccugaugagcuuccagcugag

SEQ ID NO: 834871 - RNA, 22 nt, Human
augaagcugguuuuggcuuggg

SEQ ID NO: 834872 - RNA, 22 nt, Human
ggagcuggucagccuugagcau

SEQ ID NO: 834873 - RNA, 22 nt, Human
uguaugaagguuuaccugcugu

SEQ ID NO: 834874 - RNA, 22 nt, Human
gcucugcuggagggaaagagaa

SEQ ID NO: 834875 - RNA, 22 nt, Human
aggcaguguguagcuggaagag

SEQ ID NO: 834876 - RNA, 21 nt, Human
gcagccagccgagaccaugcc

SEQ ID NO: 834877 - RNA, 22 nt, Human
ucgagcucuggagccaaggaug

SEQ ID NO: 834878 - RNA, 22 nt, Human
agauuucaauggauauugcaag

SEQ ID NO: 834879 - RNA, 22 nt, Human
aagcagagcaagcguauuuauu

SEQ ID NO: 834880 - RNA, 21 nt, Human
uccaaaaaggagcguccuucu

SEQ ID NO: 834881 - RNA, 22 nt, Human
uggcagcuaucuuuaaugagau

SEQ ID NO: 834882 - RNA, 18 nt, Human
gaggcagcuagcaauuuu

SEQ ID NO: 834883 - RNA, 23 nt, Human
uccugagaugagacagugcugcc

SEQ ID NO: 834884 - RNA, 22 nt, Human
uauuuccagcaguaagaagaca

SEQ ID NO: 834885 - RNA, 22 nt, Human
ggugaaggcacaagagggcaag

SEQ ID NO: 834886 - RNA, 18 nt, Human
cauuaugugguuauagaa

SEQ ID NO: 834887 - RNA, 18 nt, Human
cucugcuaaugggcagcu

SEQ ID NO: 834888 - RNA, 22 nt, Human
uuguauuucuccacuuucuguu

SEQ ID NO: 834889 - RNA, 22 nt, Human
gagacaaaaguuggagugcaag

SEQ ID NO: 834890 - RNA, 22 nt, Human
agucccagcucagaaccacuag

SEQ ID NO: 834891 - RNA, 22 nt, Human
ugccaggcgugguggugcgcac

SEQ ID NO: 834892 - RNA, 22 nt, Human
uggcucagcagguuagaaacua

SEQ ID NO: 834893 - RNA, 20 nt, Human
aggcagagcgcacuuuuaga

SEQ ID NO: 834894 - RNA, 22 nt, Human
cuuuacauccuguuucccguuu

SEQ ID NO: 834895 - RNA, 22 nt, Human
gaaacuguauguaguuuuuggg

SEQ ID NO: 834896 - RNA, 22 nt, Human
ucacaugcuugaggaaagaaaa

SEQ ID NO: 834897 - RNA, 22 nt, Human
gcuggagccauuggcuuggccu

SEQ ID NO: 834898 - RNA, 19 nt, Human
ugggccugcaucugggucu

SEQ ID NO: 834899 - RNA, 22 nt, Human
uuucaauguaugucuuucugag

SEQ ID NO: 834900 - RNA, 22 nt, Human
caggcagagugagguggucuaa

SEQ ID NO: 834901 - RNA, 22 nt, Human
gagagcuguguucauucuacca

SEQ ID NO: 834902 - RNA, 22 nt, Human
guggcuugaccaucccugcuac

SEQ ID NO: 834903 - RNA, 22 nt, Human
agcugggagcagagccacagcc

SEQ ID NO: 834904 - RNA, 22 nt, Human
cucaggaugcaggucacaggac

SEQ ID NO: 834905 - RNA, 22 nt, Human
cuggguggcgucuggggccagu

SEQ ID NO: 834906 - RNA, 22 nt, Human
gugcagcagggggaagacagug

SEQ ID NO: 834907 - RNA, 22 nt, Human
cuguggaaaauuuguauguaau

SEQ ID NO: 834908 - RNA, 22 nt, Human
cugccugcuucugagccagagg

SEQ ID NO: 834909 - RNA, 22 nt, Human
aacauuuaugauugagguaaau

SEQ ID NO: 834910 - RNA, 22 nt, Human
aaugcacagcguuccaugcuug

SEQ ID NO: 834911 - RNA, 22 nt, Human
aaaggcuccuucucccaugacc

SEQ ID NO: 834912 - RNA, 22 nt, Human
uaacacacugaaggugagaugg

SEQ ID NO: 834913 - RNA, 22 nt, Human
caguuucuuaucuucaaaauug

SEQ ID NO: 834914 - RNA, 22 nt, Human
guccaugauucuguguaguaga

SEQ ID NO: 834915 - RNA, 22 nt, Human
ggcagauggaagaggcuggguc

SEQ ID NO: 834916 - RNA, 22 nt, Human
uuuccuaugauauucuaugugu

SEQ ID NO: 834917 - RNA, 22 nt, Human
cugcuguguaucauuuuagaug

SEQ ID NO: 834918 - RNA, 22 nt, Human
uucuuuuccuacacagcgauuu

SEQ ID NO: 834919 - RNA, 22 nt, Human
ugucccucauugacgcugugcc

SEQ ID NO: 834920 - RNA, 22 nt, Human
cacagguguucuugcagugaaa

SEQ ID NO: 834921 - RNA, 19 nt, Human
cuggcucuuggguggagga

SEQ ID NO: 834922 - RNA, 22 nt, Human
uguggcugucuguucuccuagg

SEQ ID NO: 834923 - RNA, 22 nt, Human
uguaggauuuucaccagaccuu

SEQ ID NO: 834924 - RNA, 22 nt, Human
uggcucuguugagguauggauu

SEQ ID NO: 834925 - RNA, 22 nt, Human
gaggggcucuugggcaugaagg

SEQ ID NO: 834926 - RNA, 22 nt, Human
gcaaggcugugcacuuugcauu

SEQ ID NO: 834927 - RNA, 22 nt, Human
ucuggcuccuggcuccacugcc

SEQ ID NO: 834928 - RNA, 22 nt, Human
gcagcugauggaaguccuauug

SEQ ID NO: 834929 - RNA, 22 nt, Human
uucugugaaucuuuuuucccac

SEQ ID NO: 834930 - RNA, 22 nt, Human
cagaaguaagauuacugugaga

SEQ ID NO: 834931 - RNA, 22 nt, Human
cugccaggacugacgucuucag

SEQ ID NO: 834932 - RNA, 22 nt, Human
ucagaauucagagggagugggg

SEQ ID NO: 834933 - RNA, 22 nt, Human
gugcauauaugcacauaugugu

SEQ ID NO: 834934 - RNA, 22 nt, Human
ugcagugguguccagguguacu

SEQ ID NO: 834935 - RNA, 22 nt, Human
agucucuuuguggacucugccu

SEQ ID NO: 834936 - RNA, 22 nt, Human
gcugucucauacaaggcccugc

SEQ ID NO: 834937 - RNA, 22 nt, Human
cagcaauaaugucuacaaaucu

SEQ ID NO: 834938 - RNA, 22 nt, Human
gagguggucgaggagggguacc

SEQ ID NO: 834939 - RNA, 22 nt, Human
gccuggaggggacagucucugg

SEQ ID NO: 834940 - RNA, 22 nt, Human
aagaauguggguggauaugaug

SEQ ID NO: 834941 - RNA, 22 nt, Human
gcuuuuauugucuuuacgacga

SEQ ID NO: 834942 - RNA, 21 nt, Human
gcucuuggaaggggcucagcu

SEQ ID NO: 834943 - RNA, 19 nt, Human
aaaauugcguauuuugagg

SEQ ID NO: 834944 - RNA, 22 nt, Human
ccugaggggcugcaggccagcu

SEQ ID NO: 834945 - RNA, 22 nt, Human
uucaaugagcccaagaacguga

SEQ ID NO: 834946 - RNA, 22 nt, Human
ucagugugaguaccaugcucag

SEQ ID NO: 834947 - RNA, 22 nt, Human
gggcuggcaucgguugcugaga

SEQ ID NO: 834948 - RNA, 22 nt, Human
cccagccuggugcacugugggg

SEQ ID NO: 834949 - RNA, 22 nt, Human
ggcacugaaccaggacacaagc

SEQ ID NO: 834950 - RNA, 22 nt, Human
gaagcagcaaaucugcaguauc

SEQ ID NO: 834951 - RNA, 22 nt, Human
guuauguauugggaaauccaag

SEQ ID NO: 834952 - RNA, 22 nt, Human
agaagcuuccuacauuguucuu

SEQ ID NO: 834953 - RNA, 22 nt, Human
uguggccaccagagcugcuauu

SEQ ID NO: 834954 - RNA, 19 nt, Human
uuacuuggcaaagucaguc

SEQ ID NO: 834955 - RNA, 22 nt, Human
aucuggcuuuuacugaauugcu

SEQ ID NO: 834956 - RNA, 22 nt, Human
ugcucugguccucccucggcgc

SEQ ID NO: 834957 - RNA, 22 nt, Human
cugaaagaauaagauguuuaca

SEQ ID NO: 834958 - RNA, 22 nt, Human
gccugccuuugugaggaagcgg

SEQ ID NO: 834959 - RNA, 22 nt, Human
ccugucugcggaggaguggaag

SEQ ID NO: 834960 - RNA, 22 nt, Human
aacaugcuuugauaaauaaaag

SEQ ID NO: 834961 - RNA, 22 nt, Human
caucagaauguuauggggggcu

SEQ ID NO: 834962 - RNA, 22 nt, Human
guuuuaguggguggccacugau

SEQ ID NO: 834963 - RNA, 22 nt, Human
cagcaguggaacuacccaggga

SEQ ID NO: 834964 - RNA, 22 nt, Human
uuggaaaaacacgauagugguu

SEQ ID NO: 834965 - RNA, 22 nt, Human
agaguggggaagguguugagaa

SEQ ID NO: 834966 - RNA, 19 nt, Human
gagcacagcggcauuuggu

SEQ ID NO: 834967 - RNA, 22 nt, Human
aacagaauugcugcugccaaug

SEQ ID NO: 834968 - RNA, 22 nt, Human
cauuugaaauaguucauucuug

SEQ ID NO: 834969 - RNA, 22 nt, Human
cauguuuucuaggcuuucacaa

SEQ ID NO: 834970 - RNA, 20 nt, Human
aggcucagcugagcucuugg

SEQ ID NO: 834971 - RNA, 22 nt, Human
uggcagggccugaaucuuauac

SEQ ID NO: 834972 - RNA, 22 nt, Human
ugaggcaggaguucaggcugcg

SEQ ID NO: 834973 - RNA, 22 nt, Human
uucauuccuucccuaagcaacu

SEQ ID NO: 834974 - RNA, 22 nt, Human
aagaaaucauaucauuucuugg

SEQ ID NO: 834975 - RNA, 22 nt, Human
cccugagagugagugccaccuu

SEQ ID NO: 834976 - RNA, 22 nt, Human
acagcauucaauaaauaauaac

SEQ ID NO: 834977 - RNA, 22 nt, Human
ccugcccuagagaugacacaau

SEQ ID NO: 834978 - RNA, 22 nt, Human
uggcagcuguguccagguagaa

SEQ ID NO: 834979 - RNA, 22 nt, Human
cugccuuccaaccccagacucc

SEQ ID NO: 834980 - RNA, 22 nt, Human
ugaaaugacagucuuaagcucu

SEQ ID NO: 834981 - RNA, 23 nt, Human
cauggcagcaagagcucauggcc

SEQ ID NO: 834982 - RNA, 22 nt, Human
agaaguuaccacauacuucucu

SEQ ID NO: 834983 - RNA, 22 nt, Human
ggagcugggaauuggaucaucu

SEQ ID NO: 834984 - RNA, 22 nt, Human
cccagacugcagagcgggcaga

SEQ ID NO: 834985 - RNA, 17 nt, Human
aaucagauuucugagga

SEQ ID NO: 834986 - RNA, 22 nt, Human
acaauuccacauggcaugcagg

SEQ ID NO: 834987 - RNA, 22 nt, Human
aaagcccauguggaaguacagg

SEQ ID NO: 834988 - RNA, 22 nt, Human
gauggcuucacuuacauggcug

SEQ ID NO: 834989 - RNA, 22 nt, Human
aacaaaugaccugauuucuucc

SEQ ID NO: 834990 - RNA, 22 nt, Human
cagagccaggucuaggagucuc

SEQ ID NO: 834991 - RNA, 21 nt, Human
uggccucccacacuuccaugg

SEQ ID NO: 834992 - RNA, 22 nt, Human
gaagaaucugaggacagucauu

SEQ ID NO: 834993 - RNA, 22 nt, Human
caaaagauacuugcaucuaacu

SEQ ID NO: 834994 - RNA, 22 nt, Human
cccaggaguaagugacauuguu

SEQ ID NO: 834995 - RNA, 22 nt, Human
aaggcaggaugggaaaagauuu

SEQ ID NO: 834996 - RNA, 22 nt, Human
aaggcagccgugugacugcaug

SEQ ID NO: 834997 - RNA, 22 nt, Human
gaagaauccaugcuaauuuacc

SEQ ID NO: 834998 - RNA, 22 nt, Human
agccacagucugaugccugaga

SEQ ID NO: 834999 - RNA, 22 nt, Human
ccccagccuuccaugggaauug

SEQ ID NO: 835000 - RNA, 22 nt, Human
cuucagaacuauaaaaaguacu

SEQ ID NO: 835001 - RNA, 22 nt, Human
caguauguacucuuaucaugua

SEQ ID NO: 835002 - RNA, 20 nt, Human
agucccuuuggucagguauu

SEQ ID NO: 835003 - RNA, 22 nt, Human
gggugggacugaagucugaggg

SEQ ID NO: 835004 - RNA, 20 nt, Human
gaagcagcuucauguagaca

SEQ ID NO: 835005 - RNA, 22 nt, Human
cucuugggagugcucuggagaa

SEQ ID NO: 835006 - RNA, 22 nt, Human
acuucacagaaauuuuaugagg

SEQ ID NO: 835007 - RNA, 22 nt, Human
gcucucuggguggugggcaaca

SEQ ID NO: 835008 - RNA, 22 nt, Human
uccaggaggcagggcugugccc

SEQ ID NO: 835009 - RNA, 22 nt, Human
cccaggaggcagagguuggagc

SEQ ID NO: 835010 - RNA, 22 nt, Human
gaaggagacccugaagaugcug

SEQ ID NO: 835011 - RNA, 22 nt, Human
acuguucauauucuuagaaauu

SEQ ID NO: 835012 - RNA, 22 nt, Human
ggaggcgauccugggaaacacc

SEQ ID NO: 835013 - RNA, 22 nt, Human
cggagggguuugaacagaggag

SEQ ID NO: 835014 - RNA, 22 nt, Human
uggcagaguucgcugugccuuu

SEQ ID NO: 835015 - RNA, 22 nt, Human
ucaagagaagugcuccacagua

SEQ ID NO: 835016 - RNA, 22 nt, Human
uccucaggaucuaggagugcuu

SEQ ID NO: 835017 - RNA, 22 nt, Human
gcuggauccacaaauaacuuug

SEQ ID NO: 835018 - RNA, 22 nt, Human
aagucauuaucucuucuaaucu

SEQ ID NO: 835019 - RNA, 22 nt, Human
agauuuccaucuuuuucaugug

SEQ ID NO: 835020 - RNA, 22 nt, Human
augcagcaguuuacaaagcaau

SEQ ID NO: 835021 - RNA, 22 nt, Human
ggucucuguugccuccaucaag

SEQ ID NO: 835022 - RNA, 22 nt, Human
ccacagcaugcaggccugacac

SEQ ID NO: 835023 - RNA, 22 nt, Human
ugucucugugagaucugacgau

SEQ ID NO: 835024 - RNA, 22 nt, Human
ccagguaggagagagggauccu

SEQ ID NO: 835025 - RNA, 22 nt, Human
ccuggccugugaaucugagagc

SEQ ID NO: 835026 - RNA, 20 nt, Human
gcugucuggauuagaagccu

SEQ ID NO: 835027 - RNA, 22 nt, Human
auugaaagauaggcuacugugg

SEQ ID NO: 835028 - RNA, 22 nt, Human
ugggaggcagguaggugaugau

SEQ ID NO: 835029 - RNA, 22 nt, Human
cuggagccggaccagggacggu

SEQ ID NO: 835030 - RNA, 22 nt, Human
aaagccuucaaguagauguaag

SEQ ID NO: 835031 - RNA, 22 nt, Human
uggcuguguuaccacuucaugu

SEQ ID NO: 835032 - RNA, 22 nt, Human
ugggccugggucuuugcugcca

SEQ ID NO: 835033 - RNA, 22 nt, Human
aaguucaaguguaaucuuuauu

SEQ ID NO: 835034 - RNA, 22 nt, Human
cgaugguucuggcugcuuguau

SEQ ID NO: 835035 - RNA, 22 nt, Human
cacugcauggaugauggcugua

SEQ ID NO: 835036 - RNA, 22 nt, Human
ccagcccucacugaggccucuc

SEQ ID NO: 835037 - RNA, 22 nt, Human
ugcugcuccccagcacacagca

SEQ ID NO: 835038 - RNA, 22 nt, Human
ggagucccagcaaagccuuccc

SEQ ID NO: 835039 - RNA, 22 nt, Human
aguuuauguagaauuggcaaua

SEQ ID NO: 835040 - RNA, 22 nt, Human
agaucucaccucuguguauuau

SEQ ID NO: 835041 - RNA, 22 nt, Human
acuguguccuauuuccuugaca

SEQ ID NO: 835042 - RNA, 23 nt, Human
cugcccugaucuugaucuauugu

SEQ ID NO: 835043 - RNA, 22 nt, Human
caauuucaucuugugcuucaau

SEQ ID NO: 835044 - RNA, 22 nt, Human
uguauauucugccuaaaagcuu

SEQ ID NO: 835045 - RNA, 22 nt, Human
ggcugccuacuuucccagaguu

SEQ ID NO: 835046 - RNA, 22 nt, Human
cuuguggcccauggcuuccugc

SEQ ID NO: 835047 - RNA, 22 nt, Human
aaagcagguugcaauuacagug

SEQ ID NO: 835048 - RNA, 22 nt, Human
cugcaggcccccuuccuggagu

SEQ ID NO: 835049 - RNA, 22 nt, Human
uacauagcaaggaaaugacaga

SEQ ID NO: 835050 - RNA, 22 nt, Human
uuagaaauacaagugagguuga

SEQ ID NO: 835051 - RNA, 19 nt, Human
gcugugugaccuugggcaa

SEQ ID NO: 835052 - RNA, 22 nt, Human
uggcugggugcuauccaguacu

SEQ ID NO: 835053 - RNA, 22 nt, Human
aaaaggcauggagguugauagu

SEQ ID NO: 835054 - RNA, 22 nt, Human
uggcagggaguugcaggauuuc

SEQ ID NO: 835055 - RNA, 22 nt, Human
acuuuuuacaggguguauacca

SEQ ID NO: 835056 - RNA, 22 nt, Human
cagagacagaaaauggaucuag

SEQ ID NO: 835057 - RNA, 22 nt, Human
agacaggacacaagcugcauaa

SEQ ID NO: 835058 - RNA, 21 nt, Human
uaugaacaugaccaauagucc

SEQ ID NO: 835059 - RNA, 22 nt, Human
agaagccauucccuguaggcuc

SEQ ID NO: 835060 - RNA, 22 nt, Human
ggccuggaaugcuuuccuacca

SEQ ID NO: 835061 - RNA, 22 nt, Human
ucuucagacccuuagcugugau

SEQ ID NO: 835062 - RNA, 19 nt, Human
uucacauuggaagaaguag

SEQ ID NO: 835063 - RNA, 22 nt, Human
gacucguucauaguuccaauuu

SEQ ID NO: 835064 - RNA, 22 nt, Human
gcucaggacccaggugugaccu

SEQ ID NO: 835065 - RNA, 22 nt, Human
aggaaaaaccuguuaaugguag

SEQ ID NO: 835066 - RNA, 18 nt, Human
cugcugugucgucugggc

SEQ ID NO: 835067 - RNA, 22 nt, Human
uaaagcaggccacauaugugau

SEQ ID NO: 835068 - RNA, 22 nt, Human
cuccagggagcuuggaaagacc

SEQ ID NO: 835069 - RNA, 22 nt, Human
ugccucagagugggcuugcuau

SEQ ID NO: 835070 - RNA, 22 nt, Human
uagucaccuuuggcaccugcaa

SEQ ID NO: 835071 - RNA, 22 nt, Human
ucugccuuccccauaaucugau

SEQ ID NO: 835072 - RNA, 22 nt, Human
ggagggacccacucuagaggug

SEQ ID NO: 835073 - RNA, 22 nt, Human
uuuaacagaugcuaugucuacc

SEQ ID NO: 835074 - RNA, 22 nt, Human
gagguagcaugcuggaagggac

SEQ ID NO: 835075 - RNA, 22 nt, Human
aggcccugcuuuccagagcuca

SEQ ID NO: 835076 - RNA, 22 nt, Human
gccugagcaggcguggaccaug

SEQ ID NO: 835077 - RNA, 22 nt, Human
cagggcagccaggccccguggg

SEQ ID NO: 835078 - RNA, 22 nt, Human
uaaaugcaagugcuccugggag

SEQ ID NO: 835079 - RNA, 22 nt, Human
agcagggccucuggcacugguc

SEQ ID NO: 835080 - RNA, 22 nt, Human
ccaggcucugucuggucagaag

SEQ ID NO: 835081 - RNA, 22 nt, Human
uuucucugaggcuggccucccu

SEQ ID NO: 835082 - RNA, 22 nt, Human
agccuggccacucagggccuga

SEQ ID NO: 835083 - RNA, 22 nt, Human
caggucagaggcgcagccccca

SEQ ID NO: 835084 - RNA, 22 nt, Human
uaguauuuaaucacuuuugucu

SEQ ID NO: 835085 - RNA, 23 nt, Human
ccugugugcccuuaauucacagc

SEQ ID NO: 835086 - RNA, 22 nt, Human
cuccugagcucugaggaagcuu

SEQ ID NO: 835087 - RNA, 22 nt, Human
cuggcccagagagcagagcuua

SEQ ID NO: 835088 - RNA, 22 nt, Human
uuuccaaacccagcgagcuaca

SEQ ID NO: 835089 - RNA, 22 nt, Human
auccaggguguggagagagcuc

SEQ ID NO: 835090 - RNA, 22 nt, Human
aaaguguagagacuuuggaacc

SEQ ID NO: 835091 - RNA, 22 nt, Human
uuuccaaaaguuuguucugugc

SEQ ID NO: 835092 - RNA, 23 nt, Human
cagcccuuccugcauguuuuugu

SEQ ID NO: 835093 - RNA, 22 nt, Human
caggaugggauguagugggccc

SEQ ID NO: 835094 - RNA, 23 nt, Human
uauuacaauuggucuuauuaaga

SEQ ID NO: 835095 - RNA, 22 nt, Human
gcaucuaaacuugcaucauugu

SEQ ID NO: 835096 - RNA, 22 nt, Human
uggaggugagugugguacagca

SEQ ID NO: 835097 - RNA, 22 nt, Human
gugccugggcaugagcuuguug

SEQ ID NO: 835098 - RNA, 22 nt, Human
gcugagagcaaagcaugucuag

SEQ ID NO: 835099 - RNA, 22 nt, Human
gugggccucuugaggguggcua

SEQ ID NO: 835100 - RNA, 22 nt, Human
uuaaaguucauuaaaugagcca

SEQ ID NO: 835101 - RNA, 22 nt, Human
cugguucauccccuuccaggaa

SEQ ID NO: 835102 - RNA, 18 nt, Human
cagagcagagguggagcg

SEQ ID NO: 835103 - RNA, 22 nt, Human
acugugcaaugaguaauaaacu

SEQ ID NO: 835104 - RNA, 22 nt, Human
ccagggcaggagaaagacucac

SEQ ID NO: 835105 - RNA, 22 nt, Human
cccagcccugaccuauuggaaa

SEQ ID NO: 835106 - RNA, 22 nt, Human
guccucugggagccuugagccu

SEQ ID NO: 835107 - RNA, 22 nt, Human
auggcucauuuaucuugcagcc

SEQ ID NO: 835108 - RNA, 22 nt, Human
uaggaaaugcuccauugcauaa

SEQ ID NO: 835109 - RNA, 19 nt, Human
ucugucacuggggguauuc

SEQ ID NO: 835110 - RNA, 22 nt, Human
augguuuaagggagaauauuga

SEQ ID NO: 835111 - RNA, 22 nt, Human
cugcagaggguuugagcauccu

SEQ ID NO: 835112 - RNA, 22 nt, Human
aaaauuauagaucuagugccug

SEQ ID NO: 835113 - RNA, 22 nt, Human
uguucuugagccuuuagaccua

SEQ ID NO: 835114 - RNA, 22 nt, Human
cuacagaaacacuggacaugug

SEQ ID NO: 835115 - RNA, 22 nt, Human
ccauuuguucgcccagcuccaa

SEQ ID NO: 835116 - RNA, 22 nt, Human
gcugugugcucacguaguggaa

SEQ ID NO: 835117 - RNA, 22 nt, Human
uucagugucaauuuuuaaauau

SEQ ID NO: 835118 - RNA, 22 nt, Human
cagcaagauuuuuaaagcaagg

SEQ ID NO: 835119 - RNA, 22 nt, Human
agggugcauguuugcaagagug

SEQ ID NO: 835120 - RNA, 22 nt, Human
gccccagguugccugucccagg

SEQ ID NO: 835121 - RNA, 20 nt, Human
agaaaaaguguggaaauuuc

SEQ ID NO: 835122 - RNA, 22 nt, Human
cucugucaggcugcagaugcuc

SEQ ID NO: 835123 - RNA, 21 nt, Human
aaagagguuaauauuguaagu

SEQ ID NO: 835124 - RNA, 22 nt, Human
gggcagcucuuugguauccuuc

SEQ ID NO: 835125 - RNA, 22 nt, Human
uguacaaugccgagacuaacuc

SEQ ID NO: 835126 - RNA, 22 nt, Human
cugggaggugaacagaaaaacu

SEQ ID NO: 835127 - RNA, 22 nt, Human
uagaauucaagauucaacaggc

SEQ ID NO: 835128 - RNA, 22 nt, Human
ucacagaagagauauugacaga

SEQ ID NO: 835129 - RNA, 22 nt, Human
cagcugccugucuggaggcaau

SEQ ID NO: 835130 - RNA, 18 nt, Human
aggcagacacuagagguc

SEQ ID NO: 835131 - RNA, 23 nt, Human
agcacagacuagaaaggucuuuc

SEQ ID NO: 835132 - RNA, 22 nt, Human
uguccuuacaaggucccuuucg

SEQ ID NO: 835133 - RNA, 22 nt, Human
cccaggaaaguggaggcggcug

SEQ ID NO: 835134 - RNA, 22 nt, Human
uguuuucagucauauagcaggu

SEQ ID NO: 835135 - RNA, 22 nt, Human
uuagacauguuugcuaaaauga

SEQ ID NO: 835136 - RNA, 22 nt, Human
auauuccauugguuucccuucu

SEQ ID NO: 835137 - RNA, 22 nt, Human
ucaguuuucaauuucaucagag

SEQ ID NO: 835138 - RNA, 22 nt, Human
gagcugccagacaugggaauga

SEQ ID NO: 835139 - RNA, 22 nt, Human
agggcagagcugucuaaauggc

SEQ ID NO: 835140 - RNA, 22 nt, Human
agcccuccucacaucagcgucc

SEQ ID NO: 835141 - RNA, 22 nt, Human
cuggcagcuuagcacucugguu

SEQ ID NO: 835142 - RNA, 22 nt, Human
uuccucagcuggccugauuggg

SEQ ID NO: 835143 - RNA, 22 nt, Human
gcgcaggagccgcggagggccg

SEQ ID NO: 835144 - RNA, 22 nt, Human
acccaggacaaaauaaccaggu

SEQ ID NO: 835145 - RNA, 22 nt, Human
ccuguucaaguugcagggcugg

SEQ ID NO: 835146 - RNA, 22 nt, Human
aaagccuugcccgucacuggga

SEQ ID NO: 835147 - RNA, 22 nt, Human
uccuggagaauccugccaccug

SEQ ID NO: 835148 - RNA, 22 nt, Human
ugcugggggcuuucuggauacc

SEQ ID NO: 835149 - RNA, 22 nt, Human
agaaaguucacugguauauuuu

SEQ ID NO: 835150 - RNA, 22 nt, Human
agggccucugacgcccccagcc

SEQ ID NO: 835151 - RNA, 22 nt, Human
uguacauagaucuugaaaauua

SEQ ID NO: 835152 - RNA, 22 nt, Human
ucuguucaagacugaggugaca

SEQ ID NO: 835153 - RNA, 22 nt, Human
auugaaagguuuugagcagaua

SEQ ID NO: 835154 - RNA, 22 nt, Human
ugcugccagagagacagggacu

SEQ ID NO: 835155 - RNA, 22 nt, Human
gcugugcagucuuuggugugcc

SEQ ID NO: 835156 - RNA, 22 nt, Human
ugaaagguuaaaaguaguauug

SEQ ID NO: 835157 - RNA, 20 nt, Human
aggaaaaauggaaacuggag

SEQ ID NO: 835158 - RNA, 22 nt, Human
ggccucugguucguggugaccu

SEQ ID NO: 835159 - RNA, 22 nt, Human
cagggccaguucucgcagcagu

SEQ ID NO: 835160 - RNA, 22 nt, Human
uggccuuggacagagcgcuccu

SEQ ID NO: 835161 - RNA, 22 nt, Human
gcugccuccugaaagcgcucug

SEQ ID NO: 835162 - RNA, 22 nt, Human
aucacaaaggcugcuucaugau

SEQ ID NO: 835163 - RNA, 22 nt, Human
gcagcuccuccugggcuggaga

SEQ ID NO: 835164 - RNA, 22 nt, Human
guaggcagugguuggaagagaa

SEQ ID NO: 835165 - RNA, 22 nt, Human
caggccucccggugcacacuga

SEQ ID NO: 835166 - RNA, 22 nt, Human
uacaacauuguguugcuucaua

SEQ ID NO: 835167 - RNA, 22 nt, Human
uggucaggcugcucugcggcgu

SEQ ID NO: 835168 - RNA, 22 nt, Human
agagcagugcugaagaguaggg

SEQ ID NO: 835169 - RNA, 22 nt, Human
uauuuccauguuagaacuaagu

SEQ ID NO: 835170 - RNA, 22 nt, Human
uugcacagaugagggugaugcu

SEQ ID NO: 835171 - RNA, 22 nt, Human
aggguggcuggaggaaucagaa

SEQ ID NO: 835172 - RNA, 22 nt, Human
cagucaccauagaauaaaacau

SEQ ID NO: 835173 - RNA, 22 nt, Human
agaagccacuggagguugagau

SEQ ID NO: 835174 - RNA, 22 nt, Human
cauuuccacuucugaaaacugg

SEQ ID NO: 835175 - RNA, 22 nt, Human
aggagcugaaacuucucauaug

SEQ ID NO: 835176 - RNA, 18 nt, Human
uuccaugauuccuuucac

SEQ ID NO: 835177 - RNA, 22 nt, Human
cuagaauugcauucuaugaaua

SEQ ID NO: 835178 - RNA, 22 nt, Human
caguuaaaggcccaauaucugg

SEQ ID NO: 835179 - RNA, 22 nt, Human
uuuacagauguggaaagugagc

SEQ ID NO: 835180 - RNA, 22 nt, Human
cuucuaggcuucucagggggca

SEQ ID NO: 835181 - RNA, 22 nt, Human
agucugucuacuuaaagucugu

SEQ ID NO: 835182 - RNA, 22 nt, Human
aggggugugcauccuggaggau

SEQ ID NO: 835183 - RNA, 22 nt, Human
agccuggagaagauguguauug

SEQ ID NO: 835184 - RNA, 22 nt, Human
cagucaccaccagguggcagua

SEQ ID NO: 835185 - RNA, 22 nt, Human
ggaggccaucuggcuggaggcu

SEQ ID NO: 835186 - RNA, 22 nt, Human
ccugucuggaacauggccuguu

SEQ ID NO: 835187 - RNA, 19 nt, Human
ggcugccuuuccuuaccag

SEQ ID NO: 835188 - RNA, 22 nt, Human
agugcagccgagaucaggugcu

SEQ ID NO: 835189 - RNA, 22 nt, Human
gcaggggcugagcaccagcggg

SEQ ID NO: 835190 - RNA, 22 nt, Human
auaugaagaauuccaauuugga

SEQ ID NO: 835191 - RNA, 22 nt, Human
agagacaggguuuugccauguu

SEQ ID NO: 835192 - RNA, 22 nt, Human
uggcuuccgccgcgggccucgg

SEQ ID NO: 835193 - RNA, 22 nt, Human
cagagcuguccaaacccugaca

SEQ ID NO: 835194 - RNA, 22 nt, Human
ucccuggccauuccucuaggcc

SEQ ID NO: 835195 - RNA, 22 nt, Human
aggcagacaaggucccuggucu

SEQ ID NO: 835196 - RNA, 22 nt, Human
uggcagcucauuuggaaaugga

SEQ ID NO: 835197 - RNA, 18 nt, Human
ucagagguacagaaaagu

SEQ ID NO: 835198 - RNA, 22 nt, Human
uccuugaauggacauuacacug

SEQ ID NO: 835199 - RNA, 22 nt, Human
uggggcuggggaucuugagccu

SEQ ID NO: 835200 - RNA, 22 nt, Human
agucccagacuccaguuuucug

SEQ ID NO: 835201 - RNA, 22 nt, Human
ucuuagaaauuccccaguggcu

SEQ ID NO: 835202 - RNA, 22 nt, Human
aggcagcauccagaggagaaug

SEQ ID NO: 835203 - RNA, 22 nt, Human
cugccaaggcuggggaggacaa

SEQ ID NO: 835204 - RNA, 18 nt, Human
uguacaguuaugagcauu

SEQ ID NO: 835205 - RNA, 22 nt, Human
aggcagcuagagagugaaacug

SEQ ID NO: 835206 - RNA, 22 nt, Human
ggcaggagaaaggucucuucuu

SEQ ID NO: 835207 - RNA, 22 nt, Human
gcucugagagugggugauucug

SEQ ID NO: 835208 - RNA, 22 nt, Human
cugaggcuuugugugcaugccu

SEQ ID NO: 835209 - RNA, 22 nt, Human
cccaggaaugagcaggcagggg

SEQ ID NO: 835210 - RNA, 22 nt, Human
uauacaaugaguacauucuggg

SEQ ID NO: 835211 - RNA, 22 nt, Human
ucccaggcuaggccucugcguu

SEQ ID NO: 835212 - RNA, 20 nt, Human
uauuugaaauggccaagugu

SEQ ID NO: 835213 - RNA, 22 nt, Human
cccagccaaggugcugguguug

SEQ ID NO: 835214 - RNA, 22 nt, Human
ggaggggagauguuugggcuca

SEQ ID NO: 835215 - RNA, 22 nt, Human
ugggcacaggggaauggaugaa

SEQ ID NO: 835216 - RNA, 22 nt, Human
cagggcaguuugugccuaugag

SEQ ID NO: 835217 - RNA, 18 nt, Human
uccauuguucuacuguga

SEQ ID NO: 835218 - RNA, 22 nt, Human
auuucuuuucaagagggugcuu

SEQ ID NO: 835219 - RNA, 22 nt, Human
uaaguucaaugaacucaguucu

SEQ ID NO: 835220 - RNA, 22 nt, Human
uuacagaagaguaacuuggcaa

SEQ ID NO: 835221 - RNA, 22 nt, Human
uaaauucagugaguaauuucug

SEQ ID NO: 835222 - RNA, 22 nt, Human
uuaagauagaacccaguagucu

SEQ ID NO: 835223 - RNA, 17 nt, Human
ccugggaggaguuauga

SEQ ID NO: 835224 - RNA, 22 nt, Human
uauuucagggagaauaaauuug

SEQ ID NO: 835225 - RNA, 21 nt, Human
ugccagcauguaggcuaguug

SEQ ID NO: 835226 - RNA, 22 nt, Human
acaaaguuugugguauuccaag

SEQ ID NO: 835227 - RNA, 22 nt, Human
accaggcuggagugcaguggcg

SEQ ID NO: 835228 - RNA, 22 nt, Human
gggaaauugucaacacucucaa

SEQ ID NO: 835229 - RNA, 22 nt, Human
cucaggaugucggugacuauug

SEQ ID NO: 835230 - RNA, 22 nt, Human
aggccugggcaagaaggggcgu

SEQ ID NO: 835231 - RNA, 20 nt, Human
aauaaaagaagccuucaccc

SEQ ID NO: 835232 - RNA, 20 nt, Human
aggaggggauagaaucaaag

SEQ ID NO: 835233 - RNA, 22 nt, Human
caggcagcucgaugccuuguug

SEQ ID NO: 835234 - RNA, 22 nt, Human
gcucaggauuucauccaugugu

SEQ ID NO: 835235 - RNA, 20 nt, Human
gcugcucuccacggucugca

SEQ ID NO: 835236 - RNA, 22 nt, Human
uggccucugcaauggauucacc

SEQ ID NO: 835237 - RNA, 21 nt, Human
uucaaugaaaacaaagugagg

SEQ ID NO: 835238 - RNA, 23 nt, Human
augaaugaauaaggcaggaaagc

SEQ ID NO: 835239 - RNA, 18 nt, Human
cccucuccugcuaguggg

SEQ ID NO: 835240 - RNA, 22 nt, Human
aaaugaacucuuccugcauccc

SEQ ID NO: 835241 - RNA, 22 nt, Human
auaugaaaauguuuuagcugua

SEQ ID NO: 835242 - RNA, 22 nt, Human
uggcagaguuggagguggaaga

SEQ ID NO: 835243 - RNA, 22 nt, Human
uccuguaguugcuaaguuuguu

SEQ ID NO: 835244 - RNA, 22 nt, Human
aguccuuugggaaaaaugacua

SEQ ID NO: 835245 - RNA, 20 nt, Human
ggaagcagagaacuguuuuc

SEQ ID NO: 835246 - RNA, 21 nt, Human
uccuuccuugagguccuuucc

SEQ ID NO: 835247 - RNA, 22 nt, Human
ucaguguaaguuauguagaugu

SEQ ID NO: 835248 - RNA, 22 nt, Human
ucucagagcuucaguuauuuuc

SEQ ID NO: 835249 - RNA, 20 nt, Human
auucuacaagaauaagcaug

SEQ ID NO: 835250 - RNA, 22 nt, Human
cuuacauuuaaucaugugucau

SEQ ID NO: 835251 - RNA, 22 nt, Human
gagauuggccuggcuugccaac

SEQ ID NO: 835252 - RNA, 22 nt, Human
guggaggacaaaagaagccuuu

SEQ ID NO: 835253 - RNA, 22 nt, Human
uggagcaggacugcugcccuca

SEQ ID NO: 835254 - RNA, 23 nt, Human
ugacacauuuccuuuccacugca

SEQ ID NO: 835255 - RNA, 22 nt, Human
uucacaggcuuggagguggggg

SEQ ID NO: 835256 - RNA, 22 nt, Human
agccccuuccaguucucagauc

SEQ ID NO: 835257 - RNA, 22 nt, Human
cugggaguguucuaggucacau

SEQ ID NO: 835258 - RNA, 22 nt, Human
ucccuggaacagagagacaacg

SEQ ID NO: 835259 - RNA, 19 nt, Human
gcaugcuugguggcuucug

SEQ ID NO: 835260 - RNA, 22 nt, Human
caucagcagucacaugaugcug

SEQ ID NO: 835261 - RNA, 22 nt, Human
ugggcuguccagcaccugggcu

SEQ ID NO: 835262 - RNA, 22 nt, Human
uuccuuagugacuucuagcuac

SEQ ID NO: 835263 - RNA, 22 nt, Human
auucuuaauugccaugcuguau

SEQ ID NO: 835264 - RNA, 22 nt, Human
ggcagcaggcgacuucccuauu

SEQ ID NO: 835265 - RNA, 22 nt, Human
ugcccaggcuggaaugcagugg

SEQ ID NO: 835266 - RNA, 22 nt, Human
caauuucaugccauguauugcu

SEQ ID NO: 835267 - RNA, 19 nt, Human
agauggggaagagugugag

SEQ ID NO: 835268 - RNA, 22 nt, Human
uucugaaagccaauucauugaa

SEQ ID NO: 835269 - RNA, 22 nt, Human
acaguccuuguguggaacauua

SEQ ID NO: 835270 - RNA, 22 nt, Human
aagggcagcuuaaauugguagc

SEQ ID NO: 835271 - RNA, 22 nt, Human
gcagcugccccgacugugaguc

SEQ ID NO: 835272 - RNA, 20 nt, Human
ucugugcaccugcuacaagg

SEQ ID NO: 835273 - RNA, 20 nt, Human
gaugggaaucggagcuggua

SEQ ID NO: 835274 - RNA, 22 nt, Human
ggugcagugguguggcaaaggg

SEQ ID NO: 835275 - RNA, 22 nt, Human
uaugacuuauuucaucaguucu

SEQ ID NO: 835276 - RNA, 22 nt, Human
cccaggagguggaguucacagu

SEQ ID NO: 835277 - RNA, 22 nt, Human
ggcgcacaaugugcagguuugu

SEQ ID NO: 835278 - RNA, 22 nt, Human
auucuucauuuacuguuacuug

SEQ ID NO: 835279 - RNA, 22 nt, Human
cucuucuugucucugguuagaa

SEQ ID NO: 835280 - RNA, 17 nt, Human
uucaagauauugaaaug

SEQ ID NO: 835281 - RNA, 22 nt, Human
auugaaaauaaggccagaaaca

SEQ ID NO: 835282 - RNA, 22 nt, Human
uggcagcugaggggaggcuuug

SEQ ID NO: 835283 - RNA, 23 nt, Human
gagagcugacugucaagacuguu

SEQ ID NO: 835284 - RNA, 22 nt, Human
uucuaacaaguggcuuguuagu

SEQ ID NO: 835285 - RNA, 19 nt, Human
cauaauacaguggaucuga

SEQ ID NO: 835286 - RNA, 22 nt, Human
caugaagcauguuuugucauga

SEQ ID NO: 835287 - RNA, 22 nt, Human
uauuccaagcacagcaacccag

SEQ ID NO: 835288 - RNA, 22 nt, Human
ugucauuuucuaaucuguuguc

SEQ ID NO: 835289 - RNA, 22 nt, Human
auuauguaacugugguucagca

SEQ ID NO: 835290 - RNA, 22 nt, Human
gccacaggcacuuaagggcugg

SEQ ID NO: 835291 - RNA, 22 nt, Human
aucuggcuauugacauguuaua

SEQ ID NO: 835292 - RNA, 22 nt, Human
cagcuucugcuaucgaacaucu

SEQ ID NO: 835293 - RNA, 22 nt, Human
uacacacagaggccaugggauu

SEQ ID NO: 835294 - RNA, 22 nt, Human
accucugcaacccuggaauggg

SEQ ID NO: 835295 - RNA, 21 nt, Human
agaauaaugguaucauuugcu

SEQ ID NO: 835296 - RNA, 22 nt, Human
gcugggcuucucaaugcugccu

SEQ ID NO: 835297 - RNA, 22 nt, Human
uagauuuccucuuccucauucc

SEQ ID NO: 835298 - RNA, 22 nt, Human
cugugucccccucagccaggug

SEQ ID NO: 835299 - RNA, 20 nt, Human
cccagguaggugccaugagu

SEQ ID NO: 835300 - RNA, 22 nt, Human
acaugcuuuaacuuauuuugau

SEQ ID NO: 835301 - RNA, 22 nt, Human
aagaacaacugcuuuaaaagca

SEQ ID NO: 835302 - RNA, 22 nt, Human
aggcagugcucaagacagcagc

SEQ ID NO: 835303 - RNA, 22 nt, Human
cuuuggaauauuuuauugagaa

SEQ ID NO: 835304 - RNA, 16 nt, Human
agcagccagcacugga

SEQ ID NO: 835305 - RNA, 22 nt, Human
agccacgucccugucaggguca

SEQ ID NO: 835306 - RNA, 22 nt, Human
uggcagaguaggauggcccugu

SEQ ID NO: 835307 - RNA, 22 nt, Human
ccagucugaggccuggugaggg

SEQ ID NO: 835308 - RNA, 22 nt, Human
ggcugcucugccuuccagcugg

SEQ ID NO: 835309 - RNA, 18 nt, Human
acacugcagcagucugcu

SEQ ID NO: 835310 - RNA, 22 nt, Human
ucugcaggcucuagaugagguu

SEQ ID NO: 835311 - RNA, 23 nt, Human
uaauucacauauacauugcuuca

SEQ ID NO: 835312 - RNA, 20 nt, Human
agauuauuccuaagauuucu

SEQ ID NO: 835313 - RNA, 23 nt, Human
ucugggcaccuuguugacaugau

SEQ ID NO: 835314 - RNA, 22 nt, Human
auacaugucaucauauguuugu

SEQ ID NO: 835315 - RNA, 22 nt, Human
uauaauuuaucaugucacaguu

SEQ ID NO: 835316 - RNA, 22 nt, Human
uugacacaguuuucucauuaag

SEQ ID NO: 835317 - RNA, 20 nt, Human
ucucaggccccaguuuucuu

SEQ ID NO: 835318 - RNA, 22 nt, Human
aaaggucaagcuggacucaggu

SEQ ID NO: 835319 - RNA, 22 nt, Human
gccugccugaaggcuguaccag

SEQ ID NO: 835320 - RNA, 22 nt, Human
ugggcugccggcaggcucugcc

SEQ ID NO: 835321 - RNA, 22 nt, Human
acagaaauugggcaaauggaag

SEQ ID NO: 835322 - RNA, 22 nt, Human
ugggugagugggaaaagcccag

SEQ ID NO: 835323 - RNA, 20 nt, Human
caggcacacucauuccugcu

SEQ ID NO: 835324 - RNA, 22 nt, Human
ucauguaaguauagaaagcagu

SEQ ID NO: 835325 - RNA, 22 nt, Human
agaggcuggauugagcauagac

SEQ ID NO: 835326 - RNA, 19 nt, Human
cagaaauagcgaaguguaa

SEQ ID NO: 835327 - RNA, 22 nt, Human
ugcaagaggaauucuagaagca

SEQ ID NO: 835328 - RNA, 22 nt, Human
aauccugugugacucuggggag

SEQ ID NO: 835329 - RNA, 22 nt, Human
ugaagcagauggucuggucauu

SEQ ID NO: 835330 - RNA, 22 nt, Human
ccugccagugaagcugacgggc

SEQ ID NO: 835331 - RNA, 22 nt, Human
cccagacuccucuggcuggugg

SEQ ID NO: 835332 - RNA, 22 nt, Human
gcacagggcaacaggucuguua

SEQ ID NO: 835333 - RNA, 22 nt, Human
aauaucaguauauuguaucagu

SEQ ID NO: 835334 - RNA, 22 nt, Human
accuuucauuaaagucuguagu

SEQ ID NO: 835335 - RNA, 22 nt, Human
ggccucaguuucuucaacugua

SEQ ID NO: 835336 - RNA, 20 nt, Human
aaguuacauuguauuguacc

SEQ ID NO: 835337 - RNA, 22 nt, Human
uuuccaaaggaguaccacgcau

SEQ ID NO: 835338 - RNA, 22 nt, Human
cuggcugugcugcaggcuuugg

SEQ ID NO: 835339 - RNA, 22 nt, Human
auagauacauuagguaacuugu

SEQ ID NO: 835340 - RNA, 22 nt, Human
guguccaucagcagccacugug

SEQ ID NO: 835341 - RNA, 22 nt, Human
ggagaggaaaugccagcacuuc

SEQ ID NO: 835342 - RNA, 22 nt, Human
uuauacuaaaacgcauugaauu

SEQ ID NO: 835343 - RNA, 22 nt, Human
acaacuuuagucuggagggaaa

SEQ ID NO: 835344 - RNA, 22 nt, Human
acagcagcgucaacuuaaaauu

SEQ ID NO: 835345 - RNA, 19 nt, Human
uggcuccugccugccuucu

SEQ ID NO: 835346 - RNA, 22 nt, Human
caggaggggguggaguuucgcc

SEQ ID NO: 835347 - RNA, 22 nt, Human
agggcacaagacucugagcccc

SEQ ID NO: 835348 - RNA, 22 nt, Human
cuagaaauguagauucuuagug

SEQ ID NO: 835349 - RNA, 22 nt, Human
uccucagggggccaacccagcc

SEQ ID NO: 835350 - RNA, 18 nt, Human
uaggagagaauuuauuua

SEQ ID NO: 835351 - RNA, 22 nt, Human
ugucucugugacuccuuccgcc

SEQ ID NO: 835352 - RNA, 22 nt, Human
cagaggcaaaagagguggaggu

SEQ ID NO: 835353 - RNA, 22 nt, Human
aaggccagcuuguagggcuggu

SEQ ID NO: 835354 - RNA, 22 nt, Human
cugucuguuuuaccuucuccag

SEQ ID NO: 835355 - RNA, 22 nt, Human
aggagccuccuucucaugugca

SEQ ID NO: 835356 - RNA, 22 nt, Human
acaguaauuaaaauggaucugc

SEQ ID NO: 835357 - RNA, 22 nt, Human
aacauacagugagcaguggacu

SEQ ID NO: 835358 - RNA, 22 nt, Human
acagagcauuugggacagagag

SEQ ID NO: 835359 - RNA, 22 nt, Human
gcucaaggcaggcagacaugag

SEQ ID NO: 835360 - RNA, 22 nt, Human
ccauuucacucuuccugaagga

SEQ ID NO: 835361 - RNA, 22 nt, Human
gccuguguggaugcgccggugc

SEQ ID NO: 835362 - RNA, 22 nt, Human
gcucccaggaagagaagggcca

SEQ ID NO: 835363 - RNA, 22 nt, Human
uccaggagaggccugaccaggu

SEQ ID NO: 835364 - RNA, 22 nt, Human
ccgggccucgggacaccgggua

SEQ ID NO: 835365 - RNA, 22 nt, Human
ugagguaggugguaagagauac

SEQ ID NO: 835366 - RNA, 22 nt, Human
ggccucgcggcuucugguggcu

SEQ ID NO: 835367 - RNA, 23 nt, Human
uagagcagggaaaucugucagag

SEQ ID NO: 835368 - RNA, 22 nt, Human
cauggcuuguaauaaauuuaua

SEQ ID NO: 835369 - RNA, 22 nt, Human
cugccaggcagggagauggcug

SEQ ID NO: 835370 - RNA, 22 nt, Human
uguguaaagcuuguuccagaaa

SEQ ID NO: 835371 - RNA, 22 nt, Human
caaauccagaucccagucguag

SEQ ID NO: 835372 - RNA, 22 nt, Human
aaggcugcuuuuaacaugcaua

SEQ ID NO: 835373 - RNA, 22 nt, Human
aaucaguuaggguguuaaugag

SEQ ID NO: 835374 - RNA, 22 nt, Human
uucauuacugcgguagucacac

SEQ ID NO: 835375 - RNA, 18 nt, Human
auccuugaugagaggucu

SEQ ID NO: 835376 - RNA, 22 nt, Human
gaaugcacuuccaacaucuauu

SEQ ID NO: 835377 - RNA, 22 nt, Human
ugucauaaucaguuuugcaugu

SEQ ID NO: 835378 - RNA, 22 nt, Human
cucugugcccuacugcucagcu

SEQ ID NO: 835379 - RNA, 22 nt, Human
ugaaauuaugcauuguuguacc

SEQ ID NO: 835380 - RNA, 22 nt, Human
cuccucuggaaauuccucugcc

SEQ ID NO: 835381 - RNA, 22 nt, Human
ugagagugaaaugucacauguc

SEQ ID NO: 835382 - RNA, 22 nt, Human
ggcaggcugcuugggucauguc

SEQ ID NO: 835383 - RNA, 22 nt, Human
ucuaaacaguuucacucuuaau

SEQ ID NO: 835384 - RNA, 22 nt, Human
auaagaaacauuauucuuucca

SEQ ID NO: 835385 - RNA, 22 nt, Human
gcacagggagcaggucucuggu

SEQ ID NO: 835386 - RNA, 22 nt, Human
aagacagagggaagcaaugaug

SEQ ID NO: 835387 - RNA, 22 nt, Human
gacagagugcagggcuagaaga

SEQ ID NO: 835388 - RNA, 22 nt, Human
ggcuggagugggcuccagaguu

SEQ ID NO: 835389 - RNA, 22 nt, Human
ucaagugcuugugagguauuug

SEQ ID NO: 835390 - RNA, 22 nt, Human
cccuggccagcucaugucugag

SEQ ID NO: 835391 - RNA, 22 nt, Human
acaaugaacacacaaggaauuc

SEQ ID NO: 835392 - RNA, 22 nt, Human
gaggcagcaucuauggugggaa

SEQ ID NO: 835393 - RNA, 22 nt, Human
ggagccaggcaaucuguacuuu

SEQ ID NO: 835394 - RNA, 22 nt, Human
ucccagcgcggggggaggaucc

SEQ ID NO: 835395 - RNA, 22 nt, Human
ugcagaagcugcaggucagugg

SEQ ID NO: 835396 - RNA, 22 nt, Human
ugggccacggggguggagagcu

SEQ ID NO: 835397 - RNA, 22 nt, Human
gagggcauaguuaaauaggagg

SEQ ID NO: 835398 - RNA, 22 nt, Human
gccuuaauuuaugucuaacaua

SEQ ID NO: 835399 - RNA, 20 nt, Human
uuccuuaggcauuggaagaa

SEQ ID NO: 835400 - RNA, 22 nt, Human
aggcugggcuccgcccaacucc

SEQ ID NO: 835401 - RNA, 22 nt, Human
gcagauggcugagccugcagau

SEQ ID NO: 835402 - RNA, 22 nt, Human
uuaggaguccagaugucuuggg

SEQ ID NO: 835403 - RNA, 22 nt, Human
ucagggcagaauccaaagaauu

SEQ ID NO: 835404 - RNA, 22 nt, Human
gccaggagggaaaggacaauuu

SEQ ID NO: 835405 - RNA, 22 nt, Human
ccuuuuucccuggagggacagc

SEQ ID NO: 835406 - RNA, 20 nt, Human
agugucugggccucaggccc

SEQ ID NO: 835407 - RNA, 22 nt, Human
gugcugucguggaacugggcug

SEQ ID NO: 835408 - RNA, 22 nt, Human
cugggugguuuugaugugaauu

SEQ ID NO: 835409 - RNA, 22 nt, Human
aaguccuucccaagcauguacc

SEQ ID NO: 835410 - RNA, 22 nt, Human
uauuugagcgaagcaguguuuu

SEQ ID NO: 835411 - RNA, 22 nt, Human
uguguacagcaggauuucucaa

SEQ ID NO: 835412 - RNA, 19 nt, Human
agcagagcagggccguggg

SEQ ID NO: 835413 - RNA, 22 nt, Human
cucugcaggggaggcaugcacu

SEQ ID NO: 835414 - RNA, 22 nt, Human
ugggcuccucgucacucgcugu

SEQ ID NO: 835415 - RNA, 22 nt, Human
ugcaggccggcccuaggccuca

SEQ ID NO: 835416 - RNA, 22 nt, Human
ugugaauacagcaugugcuucu

SEQ ID NO: 835417 - RNA, 22 nt, Human
caguugcuacaguucaagugug

SEQ ID NO: 835418 - RNA, 22 nt, Human
uggcuuuacugucauucuuaug

SEQ ID NO: 835419 - RNA, 22 nt, Human
agggcagcauugccuuucucca

SEQ ID NO: 835420 - RNA, 22 nt, Human
auguagcagauauuugugcaca

SEQ ID NO: 835421 - RNA, 22 nt, Human
uuuccucugaugcugacuugga

SEQ ID NO: 835422 - RNA, 22 nt, Human
gugcauuuaggucacaugaugu

SEQ ID NO: 835423 - RNA, 22 nt, Human
aucaguuucuaccauguggaau

SEQ ID NO: 835424 - RNA, 22 nt, Human
ucagcauaucuugagcuucaug

SEQ ID NO: 835425 - RNA, 22 nt, Human
uggcagagaugaagaguuguuu

SEQ ID NO: 835426 - RNA, 22 nt, Human
uaguuuuacuugcgaugauaau

SEQ ID NO: 835427 - RNA, 22 nt, Human
gcugccuggcuuuaguccacuu

SEQ ID NO: 835428 - RNA, 22 nt, Human
ucccaggacaggccacauggaa

SEQ ID NO: 835429 - RNA, 22 nt, Human
ucagggcacaggccuguggguu

SEQ ID NO: 835430 - RNA, 22 nt, Human
agcuggcagcucucagggguac

SEQ ID NO: 835431 - RNA, 22 nt, Human
cugcucugaguauuaacggagg

SEQ ID NO: 835432 - RNA, 21 nt, Human
gggugcuguggucaugcagga

SEQ ID NO: 835433 - RNA, 22 nt, Human
ugcagggccuucuagaccaugg

SEQ ID NO: 835434 - RNA, 22 nt, Human
auguagaaaguucauagaugcg

SEQ ID NO: 835435 - RNA, 22 nt, Human
agcuggcaguaugacuggugac

SEQ ID NO: 835436 - RNA, 22 nt, Human
agccagcagggcuuagaggaca

SEQ ID NO: 835437 - RNA, 22 nt, Human
auucuagaugcuguaaguagca

SEQ ID NO: 835438 - RNA, 22 nt, Human
uaugcauaugaccccaagcuug

SEQ ID NO: 835439 - RNA, 22 nt, Human
auaaagucuaccguauuaaaga

SEQ ID NO: 835440 - RNA, 22 nt, Human
gcagcucccagcuugaaagguc

SEQ ID NO: 835441 - RNA, 22 nt, Human
uggccuugggcagguggccugc

SEQ ID NO: 835442 - RNA, 22 nt, Human
uguaugaaugggaaaaggaaac

SEQ ID NO: 835443 - RNA, 22 nt, Human
cuuuggcaaugaaacacaagaa

SEQ ID NO: 835444 - RNA, 22 nt, Human
uccagaauauuugggaaagaug

SEQ ID NO: 835445 - RNA, 22 nt, Human
uauuuuaaagacugccagccua

SEQ ID NO: 835446 - RNA, 22 nt, Human
agggcagcuagcuguagaaaga

SEQ ID NO: 835447 - RNA, 22 nt, Human
ucccagccauuccuuuaggugu

SEQ ID NO: 835448 - RNA, 22 nt, Human
ccugucauacuaacguaguggg

SEQ ID NO: 835449 - RNA, 22 nt, Human
cuguccuuacugcuucuggcuu

SEQ ID NO: 835450 - RNA, 22 nt, Human
cccuggcaaaacacucucuuga

SEQ ID NO: 835451 - RNA, 22 nt, Human
gcucaggagcugacagccucaa

SEQ ID NO: 835452 - RNA, 22 nt, Human
cccaggaaaucaggcuuucuag

SEQ ID NO: 835453 - RNA, 22 nt, Human
acguguucaauuuccaucugac

SEQ ID NO: 835454 - RNA, 22 nt, Human
aagaaaugcagaaaugugcugg

SEQ ID NO: 835455 - RNA, 22 nt, Human
cuggguaaguuccuaaggcuca

SEQ ID NO: 835456 - RNA, 22 nt, Human
caggagcccguugcuccggcgg

SEQ ID NO: 835457 - RNA, 20 nt, Human
cugugcuuuggaaccuggaa

SEQ ID NO: 835458 - RNA, 22 nt, Human
agugccuggaccccaugacaua

SEQ ID NO: 835459 - RNA, 22 nt, Human
caucagaaagaguccuggacuu

SEQ ID NO: 835460 - RNA, 22 nt, Human
cagcauuuagaauuugaagugu

SEQ ID NO: 835461 - RNA, 22 nt, Human
aggcaggggagcuggaagggua

SEQ ID NO: 835462 - RNA, 22 nt, Human
gccucugcaucuucgccgcacu

SEQ ID NO: 835463 - RNA, 22 nt, Human
gaggcagcugaagcuucaaaga

SEQ ID NO: 835464 - RNA, 21 nt, Human
aggccucuucauggccaugau

SEQ ID NO: 835465 - RNA, 22 nt, Human
cuuggcagcuuuuggaggagcc

SEQ ID NO: 835466 - RNA, 22 nt, Human
uguguauuucuggaacagacua

SEQ ID NO: 835467 - RNA, 22 nt, Human
gcugucugcaucucuagagcuu

SEQ ID NO: 835468 - RNA, 22 nt, Human
caggccugaguguggaagucuu

SEQ ID NO: 835469 - RNA, 23 nt, Human
agaugaggcuucuccauguuggu

SEQ ID NO: 835470 - RNA, 22 nt, Human
ucaguauccacaaaugcucaaa

SEQ ID NO: 835471 - RNA, 22 nt, Human
uuuaggcauugaauuagaauag

SEQ ID NO: 835472 - RNA, 22 nt, Human
agcagcaggcuguguggacuga

SEQ ID NO: 835473 - RNA, 23 nt, Human
uuucacaaugagcauuacagaau

SEQ ID NO: 835474 - RNA, 22 nt, Human
ugggcagaaggaagagccaccu

SEQ ID NO: 835475 - RNA, 22 nt, Human
auccaaaucaugucagaagaac

SEQ ID NO: 835476 - RNA, 22 nt, Human
gggcagcucagccaccaugcag

SEQ ID NO: 835477 - RNA, 22 nt, Human
uagaaacucaggauacucuucc

SEQ ID NO: 835478 - RNA, 22 nt, Human
ggagauggcucugcaaggucua

SEQ ID NO: 835479 - RNA, 22 nt, Human
ucagguguuagaagaaauuuca

SEQ ID NO: 835480 - RNA, 22 nt, Human
agcaccaucagaugcaauaucu

SEQ ID NO: 835481 - RNA, 22 nt, Human
ggcucuggcguccaauggagcg

SEQ ID NO: 835482 - RNA, 22 nt, Human
uagcagaaccagcagucaauuu

SEQ ID NO: 835483 - RNA, 22 nt, Human
ggcccuguccuggcugucuccg

SEQ ID NO: 835484 - RNA, 22 nt, Human
gaaucacgguauucugcacggg

SEQ ID NO: 835485 - RNA, 17 nt, Human
aggagucucagaugagc

SEQ ID NO: 835486 - RNA, 22 nt, Human
gagccuucaucgcagccuuguu

SEQ ID NO: 835487 - RNA, 22 nt, Human
uguaugaaagaacaagggcuua

SEQ ID NO: 835488 - RNA, 22 nt, Human
uggcugcugcuuggucuucuuc

SEQ ID NO: 835489 - RNA, 22 nt, Human
ccaggagagcgcccucccggcc

SEQ ID NO: 835490 - RNA, 19 nt, Human
ugaagcagcaaacucucag

SEQ ID NO: 835491 - RNA, 22 nt, Human
cggagccugcuuguugcagcug

SEQ ID NO: 835492 - RNA, 22 nt, Human
ggguggagaggcuaaguccagu

SEQ ID NO: 835493 - RNA, 22 nt, Human
uaucuuuagaggaagagaaucu

SEQ ID NO: 835494 - RNA, 22 nt, Human
ccacaggaccagaggagaucac

SEQ ID NO: 835495 - RNA, 22 nt, Human
ccucagcucuucccugugcaca

SEQ ID NO: 835496 - RNA, 22 nt, Human
cacauauuguaguucaccagga

SEQ ID NO: 835497 - RNA, 22 nt, Human
acaaucauuccguucacaacag

SEQ ID NO: 835498 - RNA, 22 nt, Human
uccugagauaaaucucauguga

SEQ ID NO: 835499 - RNA, 22 nt, Human
uuauuucauugauuucuaagac

SEQ ID NO: 835500 - RNA, 22 nt, Human
ucaaaagucugcauucuucaca

SEQ ID NO: 835501 - RNA, 22 nt, Human
acugcaggagacacagcugcug

SEQ ID NO: 835502 - RNA, 22 nt, Human
ugcccuguuccugccuccagcu

SEQ ID NO: 835503 - RNA, 22 nt, Human
auccauuugaaagaacagucca

SEQ ID NO: 835504 - RNA, 22 nt, Human
uuccuucucagcccucgaggau

SEQ ID NO: 835505 - RNA, 22 nt, Human
auaaaaacugacccauccuuug

SEQ ID NO: 835506 - RNA, 22 nt, Human
aaagauuuaugaaguucaauua

SEQ ID NO: 835507 - RNA, 22 nt, Human
cagauacuguaaaauuucagua

SEQ ID NO: 835508 - RNA, 22 nt, Human
agccucugauggcucccaagga

SEQ ID NO: 835509 - RNA, 22 nt, Human
uugcagcuucuaccacuguuuc

SEQ ID NO: 835510 - RNA, 22 nt, Human
ugugaaauauuuauauacucaa

SEQ ID NO: 835511 - RNA, 22 nt, Human
gaggcuggugguuaguuccauu

SEQ ID NO: 835512 - RNA, 22 nt, Human
uugcucuguaauaaucuggggu

SEQ ID NO: 835513 - RNA, 22 nt, Human
agacagcugggaaauggagugu

SEQ ID NO: 835514 - RNA, 22 nt, Human
ugugggcucccccucacucugu

SEQ ID NO: 835515 - RNA, 20 nt, Human
ugcucaggauggagaggugu

SEQ ID NO: 835516 - RNA, 22 nt, Human
uucuuuccucccagccuuugga

SEQ ID NO: 835517 - RNA, 22 nt, Human
uccaggacuagcauuucugaua

SEQ ID NO: 835518 - RNA, 22 nt, Human
agaggcagccguauuucaaagg

SEQ ID NO: 835519 - RNA, 22 nt, Human
agucauaugacccuucacaaac

SEQ ID NO: 835520 - RNA, 22 nt, Human
aagaagagaacuggcauccuaa

SEQ ID NO: 835521 - RNA, 22 nt, Human
uaauuucaccguugcuagaaau

SEQ ID NO: 835522 - RNA, 22 nt, Human
ugcuggaauaauuucauguuaa

SEQ ID NO: 835523 - RNA, 22 nt, Human
cccagccugugacagccguccu

SEQ ID NO: 835524 - RNA, 22 nt, Human
uccuuggcaugccgucuucucc

SEQ ID NO: 835525 - RNA, 22 nt, Human
aaggcacuuaacgugggaggau

SEQ ID NO: 835526 - RNA, 22 nt, Human
uccaggaggugaggggaccaaa

SEQ ID NO: 835527 - RNA, 22 nt, Human
aucuggcuccuacacuugaaga

SEQ ID NO: 835528 - RNA, 22 nt, Human
ucucagaguuugaaucuggagu

SEQ ID NO: 835529 - RNA, 22 nt, Human
ggcagcuguggacgucgucauu

SEQ ID NO: 835530 - RNA, 22 nt, Human
agguauaagaagauuauuuaua

SEQ ID NO: 835531 - RNA, 22 nt, Human
uuccuugguagagagaauauuu

SEQ ID NO: 835532 - RNA, 22 nt, Human
gcccaggagguugggcugugca

SEQ ID NO: 835533 - RNA, 22 nt, Human
aauguguguauuucuaggcgag

SEQ ID NO: 835534 - RNA, 23 nt, Human
aaggucacagaacuuagcaagcc

SEQ ID NO: 835535 - RNA, 22 nt, Human
gagcccucucuguaggcaagua

SEQ ID NO: 835536 - RNA, 22 nt, Human
acaaggaggucuggggggcccu

SEQ ID NO: 835537 - RNA, 23 nt, Human
accaggaguugucucaggaaaca

SEQ ID NO: 835538 - RNA, 22 nt, Human
caggacagguguucuagaucag

SEQ ID NO: 835539 - RNA, 22 nt, Human
gcuggcucccauugguccuucc

SEQ ID NO: 835540 - RNA, 22 nt, Human
gaggccugaaaggggaccuaug

SEQ ID NO: 835541 - RNA, 22 nt, Human
caaauuccucagaaucagaaaa

SEQ ID NO: 835542 - RNA, 19 nt, Human
aggacucuggaggcaugag

SEQ ID NO: 835543 - RNA, 22 nt, Human
uggcucaggagggaucuuugcu

SEQ ID NO: 835544 - RNA, 22 nt, Human
uuccucaucugugcaccucacu

SEQ ID NO: 835545 - RNA, 20 nt, Human
uugcauuggaugugcaggug

SEQ ID NO: 835546 - RNA, 22 nt, Human
aauaauguugacgauagucuua

SEQ ID NO: 835547 - RNA, 22 nt, Human
agaugaaaagauaagcagcaau

SEQ ID NO: 835548 - RNA, 22 nt, Human
uguggccuggaaggggcugcuc

SEQ ID NO: 835549 - RNA, 22 nt, Human
gcuuccuggagggagagagcug

SEQ ID NO: 835550 - RNA, 18 nt, Human
cagaaaucacaccagcac

SEQ ID NO: 835551 - RNA, 22 nt, Human
uucaugaaacuuaacuguuggg

SEQ ID NO: 835552 - RNA, 22 nt, Human
acaggagaaaucuggucaaaag

SEQ ID NO: 835553 - RNA, 22 nt, Human
ugucccaggcugaaguacagug

SEQ ID NO: 835554 - RNA, 22 nt, Human
uggcagcacuagguacugagcu

SEQ ID NO: 835555 - RNA, 22 nt, Human
uuuauuuauaagccacuugcug

SEQ ID NO: 835556 - RNA, 22 nt, Human
uggcucagucauggaugaguaa

SEQ ID NO: 835557 - RNA, 22 nt, Human
caggcagcaggagcccugcucg

SEQ ID NO: 835558 - RNA, 22 nt, Human
guggccucaugucuauaaagag

SEQ ID NO: 835559 - RNA, 22 nt, Human
agaaaacuugucacagcucuca

SEQ ID NO: 835560 - RNA, 22 nt, Human
ucucagagauucagggagaagu

SEQ ID NO: 835561 - RNA, 22 nt, Human
ugagguggcuagggaggcacuc

SEQ ID NO: 835562 - RNA, 22 nt, Human
uccuuagagacaagaccaguuu

SEQ ID NO: 835563 - RNA, 22 nt, Human
gucugcugcagagcauggcuuu

SEQ ID NO: 835564 - RNA, 22 nt, Human
cauacauaugcauguguguaua

SEQ ID NO: 835565 - RNA, 22 nt, Human
aaaugcaccuugcugugagacu

SEQ ID NO: 835566 - RNA, 22 nt, Human
caggcugcggucggcucugguc

SEQ ID NO: 835567 - RNA, 22 nt, Human
uggcagaggcucugugauguug

SEQ ID NO: 835568 - RNA, 22 nt, Human
ucacaggguguacaucaccuau

SEQ ID NO: 835569 - RNA, 22 nt, Human
gaaauagacacuuucuaugaau

SEQ ID NO: 835570 - RNA, 22 nt, Human
gccugaagaacagcugugagga

SEQ ID NO: 835571 - RNA, 22 nt, Human
auuauaggcuugagccaccgug

SEQ ID NO: 835572 - RNA, 22 nt, Human
cugcaggggccucgagcacagg

SEQ ID NO: 835573 - RNA, 22 nt, Human
cugggcuccuaaccauccaggu

SEQ ID NO: 835574 - RNA, 22 nt, Human
ggaaggucgagcugcaucuggc

SEQ ID NO: 835575 - RNA, 22 nt, Human
aucauuucccuuuagaucacaa

SEQ ID NO: 835576 - RNA, 22 nt, Human
uucagaaagugaaucuuguuau

SEQ ID NO: 835577 - RNA, 22 nt, Human
ccagugcuucuuugcuagcugg

SEQ ID NO: 835578 - RNA, 22 nt, Human
agagggauggccccguaacuca

SEQ ID NO: 835579 - RNA, 21 nt, Human
ggugucaguuuuggucauuag

SEQ ID NO: 835580 - RNA, 22 nt, Human
uuucccaguucccugcucuaua

SEQ ID NO: 835581 - RNA, 22 nt, Human
aggccagccucaggcagggacc

SEQ ID NO: 835582 - RNA, 22 nt, Human
cugaagcacagcauauaaauaa

SEQ ID NO: 835583 - RNA, 20 nt, Human
aggcaccugucacaggugag

SEQ ID NO: 835584 - RNA, 22 nt, Human
aaaugcagcagcuaauugaaaa

SEQ ID NO: 835585 - RNA, 22 nt, Human
aaauaguucagcuuguaaaccc

SEQ ID NO: 835586 - RNA, 22 nt, Human
caaggcugcugcgggucgcacc

SEQ ID NO: 835587 - RNA, 22 nt, Human
gcagggucugaggccacagagg

SEQ ID NO: 835588 - RNA, 21 nt, Human
agcuuccugcagugggagguc

SEQ ID NO: 835589 - RNA, 19 nt, Human
gagcccucuccauggccac

SEQ ID NO: 835590 - RNA, 19 nt, Human
caggagagcaugcacuuug

SEQ ID NO: 835591 - RNA, 22 nt, Human
ggucccugaagaggccuggggu

SEQ ID NO: 835592 - RNA, 22 nt, Human
agggccagagucuguguagaua

SEQ ID NO: 835593 - RNA, 22 nt, Human
ugcagggcccuugggguugaac

SEQ ID NO: 835594 - RNA, 22 nt, Human
uuugaaaucuaaucaaggaaca

SEQ ID NO: 835595 - RNA, 22 nt, Human
acugaaagauaaaucaguuagc

SEQ ID NO: 835596 - RNA, 20 nt, Human
ucacauccucucccaacaug

SEQ ID NO: 835597 - RNA, 22 nt, Human
gaauauauuggugaaaauaguu

SEQ ID NO: 835598 - RNA, 22 nt, Human
cagccagaaccuaggaugagcu

SEQ ID NO: 835599 - RNA, 22 nt, Human
ugggcagaguugugaugaacug

SEQ ID NO: 835600 - RNA, 22 nt, Human
gcuucacaggcaaguuaagccu

SEQ ID NO: 835601 - RNA, 22 nt, Human
ccucaggggcuuuucguuguug

SEQ ID NO: 835602 - RNA, 22 nt, Human
ccagcugcuugggaaaaugucu

SEQ ID NO: 835603 - RNA, 22 nt, Human
uuagagucaagcugcauguucu

SEQ ID NO: 835604 - RNA, 22 nt, Human
uacauauuugucuuuguacugu

SEQ ID NO: 835605 - RNA, 22 nt, Human
caugcuuuucaaucuaucuuaa

SEQ ID NO: 835606 - RNA, 22 nt, Human
gagcugaguuaccuccagauca

SEQ ID NO: 835607 - RNA, 20 nt, Human
cuuggccuacuuagcuuugu

SEQ ID NO: 835608 - RNA, 22 nt, Human
uuucacauuuaggcgugaauug

SEQ ID NO: 835609 - RNA, 22 nt, Human
cuggggcugcgguggaggagcc

SEQ ID NO: 835610 - RNA, 22 nt, Human
aauguauguguauaucaaauca

SEQ ID NO: 835611 - RNA, 22 nt, Human
acauuucucaucuaguagagua

SEQ ID NO: 835612 - RNA, 22 nt, Human
aggcagcguagcaaggcuagua

SEQ ID NO: 835613 - RNA, 22 nt, Human
cauugcacuccacccuaggcaa

SEQ ID NO: 835614 - RNA, 22 nt, Human
gcucagagauguucaguagcuu

SEQ ID NO: 835615 - RNA, 22 nt, Human
guuuuuccuugcugaggacccg

SEQ ID NO: 835616 - RNA, 21 nt, Human
gcugccaccgcgugcuccagg

SEQ ID NO: 835617 - RNA, 21 nt, Human
gccagggaagagaguuggcug

SEQ ID NO: 835618 - RNA, 22 nt, Human
ggcccugggcagaggagugggc

SEQ ID NO: 835619 - RNA, 22 nt, Human
auguuugaaauuguaaguauau

SEQ ID NO: 835620 - RNA, 22 nt, Human
uuugcuauuuuucugugcagcu

SEQ ID NO: 835621 - RNA, 23 nt, Human
gcugucaguuguuuuugucucua

SEQ ID NO: 835622 - RNA, 22 nt, Human
caaggaaacaugaaaugcauug

SEQ ID NO: 835623 - RNA, 22 nt, Human
auguaucaugcaggguccauga

SEQ ID NO: 835624 - RNA, 22 nt, Human
guuuuguugcugcagagcucaa

SEQ ID NO: 835625 - RNA, 22 nt, Human
agagcuggaaucagaccucagg

SEQ ID NO: 835626 - RNA, 22 nt, Human
caggcuggaguuaccuuuaggg

SEQ ID NO: 835627 - RNA, 22 nt, Human
uugauggcugugauuuacucag

SEQ ID NO: 835628 - RNA, 21 nt, Human
gcccagcaaggugagaaggcc

SEQ ID NO: 835629 - RNA, 22 nt, Human
acauuucuaauuuaauguaaca

SEQ ID NO: 835630 - RNA, 22 nt, Human
agugugggugagggaggcccuc

SEQ ID NO: 835631 - RNA, 22 nt, Human
uucuucuucauuucugacgaug

SEQ ID NO: 835632 - RNA, 22 nt, Human
cugggcugcaggaguggggcaa

SEQ ID NO: 835633 - RNA, 22 nt, Human
agcaauauuucagcuagcaggu

SEQ ID NO: 835634 - RNA, 22 nt, Human
agacaaauggaguaugagcaac

SEQ ID NO: 835635 - RNA, 22 nt, Human
caacuuuucugugaauuuaagu

SEQ ID NO: 835636 - RNA, 22 nt, Human
cugaauaauguucucuuguaug

SEQ ID NO: 835637 - RNA, 22 nt, Human
aggauuuauuauaugcccucau

SEQ ID NO: 835638 - RNA, 22 nt, Human
gcuguucagggcacucaugggc

SEQ ID NO: 835639 - RNA, 21 nt, Human
agggaaagaaaaugagcuaau

SEQ ID NO: 835640 - RNA, 22 nt, Human
aauuauguagccauaugaaaca

SEQ ID NO: 835641 - RNA, 22 nt, Human
agccuggacagcuacggagaac

SEQ ID NO: 835642 - RNA, 22 nt, Human
ucaaauaugugauagaagcuaa

SEQ ID NO: 835643 - RNA, 22 nt, Human
agagucuuccaggcagccugag

SEQ ID NO: 835644 - RNA, 22 nt, Human
uaaugcacaugacugaacuauu

SEQ ID NO: 835645 - RNA, 22 nt, Human
cccaggcuggauuucgguggca

SEQ ID NO: 835646 - RNA, 21 nt, Human
uagaaaucagcuggugccucu

SEQ ID NO: 835647 - RNA, 22 nt, Human
cauugcacuccaucuugggcaa

SEQ ID NO: 835648 - RNA, 22 nt, Human
caugcuuauucauucugcuaac

SEQ ID NO: 835649 - RNA, 18 nt, Human
agaugaaagcaaaugaca

SEQ ID NO: 835650 - RNA, 22 nt, Human
acugcuuuucagagucugccug

SEQ ID NO: 835651 - RNA, 22 nt, Human
caguuuuucaaaauuacaugau

SEQ ID NO: 835652 - RNA, 22 nt, Human
gggcugcuuuuuucuuagcaga

SEQ ID NO: 835653 - RNA, 22 nt, Human
ugaaauguuugaagaccacuga

SEQ ID NO: 835654 - RNA, 22 nt, Human
cacaugggcguaauguccaugg

SEQ ID NO: 835655 - RNA, 22 nt, Human
acaggauuagcaaguaaucagg

SEQ ID NO: 835656 - RNA, 22 nt, Human
agcugaguuaauucaucacuua

SEQ ID NO: 835657 - RNA, 22 nt, Human
ccuggcuguggcggugcucuca

SEQ ID NO: 835658 - RNA, 22 nt, Human
cuggcucaauaaauauuagcug

SEQ ID NO: 835659 - RNA, 22 nt, Human
uauucacaguugauuuacaguu

SEQ ID NO: 835660 - RNA, 22 nt, Human
ccagggcagaaaaagagggaau

SEQ ID NO: 835661 - RNA, 22 nt, Human
ucugcaggcuuauaggaugggu

SEQ ID NO: 835662 - RNA, 21 nt, Human
cccaggaguccuauuuaaaug

SEQ ID NO: 835663 - RNA, 22 nt, Human
aguaucaaggaucuccagcacc

SEQ ID NO: 835664 - RNA, 22 nt, Human
aucuaggauuugaaugcacagu

SEQ ID NO: 835665 - RNA, 22 nt, Human
gcaaagucucaagacccaagug

SEQ ID NO: 835666 - RNA, 22 nt, Human
ucauuguuucugcuuuucauga

SEQ ID NO: 835667 - RNA, 18 nt, Human
caagaaucucuaaagaag

SEQ ID NO: 835668 - RNA, 22 nt, Human
agggguggccugccuuacuccc

SEQ ID NO: 835669 - RNA, 22 nt, Human
uucuacagacuauaacugugau

SEQ ID NO: 835670 - RNA, 22 nt, Human
cugggccuagaggaagcugaca

SEQ ID NO: 835671 - RNA, 22 nt, Human
uaaguucaagucuuggauauaa

SEQ ID NO: 835672 - RNA, 22 nt, Human
aggcagugccuggaccccagcu

SEQ ID NO: 835673 - RNA, 22 nt, Human
uaucuguuccaggcacucagcu

SEQ ID NO: 835674 - RNA, 22 nt, Human
agcugcagucaagcugggccac

SEQ ID NO: 835675 - RNA, 22 nt, Human
gaggcagcuuaggguacugacu

SEQ ID NO: 835676 - RNA, 23 nt, Human
ucugucaccuauggcugcucuuc

SEQ ID NO: 835677 - RNA, 22 nt, Human
acauucaugucccacuucuagc

SEQ ID NO: 835678 - RNA, 22 nt, Human
ucagagugaccuuacauggucu

SEQ ID NO: 835679 - RNA, 22 nt, Human
agccacagagagggagcugcaa

SEQ ID NO: 835680 - RNA, 22 nt, Human
uaugaacucuggagucugagug

SEQ ID NO: 835681 - RNA, 22 nt, Human
uugcauguuauuuaaucuguau

SEQ ID NO: 835682 - RNA, 22 nt, Human
uuucaacaccagagaccaugcg

SEQ ID NO: 835683 - RNA, 22 nt, Human
auacagaauuugcccuuuucau

SEQ ID NO: 835684 - RNA, 22 nt, Human
ccuggggcucaagauggcgccg

SEQ ID NO: 835685 - RNA, 22 nt, Human
acagaccaaguuuccagcaggu

SEQ ID NO: 835686 - RNA, 22 nt, Human
cucauaaugugacuguauuuga

SEQ ID NO: 835687 - RNA, 22 nt, Human
agccauggcgccacuagaggga

SEQ ID NO: 835688 - RNA, 22 nt, Human
gcucugagccgggggccugucc

SEQ ID NO: 835689 - RNA, 22 nt, Human
acccagagcugggcuuggcaaa

SEQ ID NO: 835690 - RNA, 22 nt, Human
ugguccagacauuucugaggua

SEQ ID NO: 835691 - RNA, 22 nt, Human
caggccugauacacugaacucu

SEQ ID NO: 835692 - RNA, 22 nt, Human
cuguggaaggccuguccugaaa

SEQ ID NO: 835693 - RNA, 22 nt, Human
gcucugggauuaccagccuuag

SEQ ID NO: 835694 - RNA, 22 nt, Human
uaaagaucuuaggaagauuuuc

SEQ ID NO: 835695 - RNA, 22 nt, Human
auaugcacauacauacauaggu

SEQ ID NO: 835696 - RNA, 22 nt, Human
gccuucaguagugucagcugua

SEQ ID NO: 835697 - RNA, 22 nt, Human
ggcuggcauccagggaaaucca

SEQ ID NO: 835698 - RNA, 22 nt, Human
gggauggcucaaaggagucagg

SEQ ID NO: 835699 - RNA, 22 nt, Human
aaauacugucucugagagagcc

SEQ ID NO: 835700 - RNA, 22 nt, Human
cucaaauauaagcuaaaugugg

SEQ ID NO: 835701 - RNA, 22 nt, Human
uccaggagacacccuugugugu

SEQ ID NO: 835702 - RNA, 22 nt, Human
aucauaaagugcuaucugauug

SEQ ID NO: 835703 - RNA, 23 nt, Human
uaagaacagacaagcauuuacau

SEQ ID NO: 835704 - RNA, 22 nt, Human
guccaaauuuuucacauguaga

SEQ ID NO: 835705 - RNA, 23 nt, Human
uggcagcagaucuuaaagugacc

SEQ ID NO: 835706 - RNA, 22 nt, Human
acagucauuagauacaaugucu

SEQ ID NO: 835707 - RNA, 22 nt, Human
ggagcagggcagugaauucugg

SEQ ID NO: 835708 - RNA, 22 nt, Human
gaggcagagucacaaagagucu

SEQ ID NO: 835709 - RNA, 22 nt, Human
aagaaauuaaggaaugcaacga

SEQ ID NO: 835710 - RNA, 22 nt, Human
agcagcugaucaaagcacuuau

SEQ ID NO: 835711 - RNA, 22 nt, Human
uaagaagcuucugcuaaugccu

SEQ ID NO: 835712 - RNA, 22 nt, Human
ggaggacacuggcucugccuuc

SEQ ID NO: 835713 - RNA, 22 nt, Human
acauuuaggauguuuugagaga

SEQ ID NO: 835714 - RNA, 22 nt, Human
ggcagaggagcuggaaacaugg

SEQ ID NO: 835715 - RNA, 22 nt, Human
gcaaagucugcaucuggaucag

SEQ ID NO: 835716 - RNA, 22 nt, Human
ugauuucccuguagccucugaa

SEQ ID NO: 835717 - RNA, 22 nt, Human
gggcagugguuacacagcugag

SEQ ID NO: 835718 - RNA, 22 nt, Human
uaauacuuuugccuuguauuca

SEQ ID NO: 835719 - RNA, 22 nt, Human
guucagggagggacagaugaag

SEQ ID NO: 835720 - RNA, 19 nt, Human
gaggagcuaucggagacag

SEQ ID NO: 835721 - RNA, 22 nt, Human
ucacaaauauuuuaacaguagg

SEQ ID NO: 835722 - RNA, 22 nt, Human
uaagugcaauguuuuacuuaaa

SEQ ID NO: 835723 - RNA, 22 nt, Human
agcccaggcagagggaugcuug

SEQ ID NO: 835724 - RNA, 22 nt, Human
aagauuucucuccuggaaagca

SEQ ID NO: 835725 - RNA, 22 nt, Human
gagcagugaagacagaaguaca

SEQ ID NO: 835726 - RNA, 22 nt, Human
cagguccccuccccuaccaggc

SEQ ID NO: 835727 - RNA, 22 nt, Human
cagggccuccuaaggcaucuaa

SEQ ID NO: 835728 - RNA, 18 nt, Human
ccuggagcuccacagcaa

SEQ ID NO: 835729 - RNA, 23 nt, Human
aggaacugaggccuagggaggua

SEQ ID NO: 835730 - RNA, 22 nt, Human
uggcucugaccagguagaggag

SEQ ID NO: 835731 - RNA, 23 nt, Human
cagaccuggcagucauccucaac

SEQ ID NO: 835732 - RNA, 22 nt, Human
cucuucagauaaaagggauauu

SEQ ID NO: 835733 - RNA, 22 nt, Human
auuuggaaaugcaucucuugag

SEQ ID NO: 835734 - RNA, 22 nt, Human
uguuuguucccucucuuuccug

SEQ ID NO: 835735 - RNA, 22 nt, Human
uguaucaaggguuuauguaagc

SEQ ID NO: 835736 - RNA, 22 nt, Human
cccagcauccucagggagcggg

SEQ ID NO: 835737 - RNA, 22 nt, Human
uuuuauuggagugauaccaagc

SEQ ID NO: 835738 - RNA, 22 nt, Human
auagaauucuuugaaauuuaug

SEQ ID NO: 835739 - RNA, 22 nt, Human
cugaaaauguuacacaggaaga

SEQ ID NO: 835740 - RNA, 22 nt, Human
agccacagcccacaggacucuu

SEQ ID NO: 835741 - RNA, 22 nt, Human
agcuucuuggcucagcacuugg

SEQ ID NO: 835742 - RNA, 22 nt, Human
ucaggcugcccguucagggcuc

SEQ ID NO: 835743 - RNA, 22 nt, Human
cagggaggcugucuuaugccug

SEQ ID NO: 835744 - RNA, 22 nt, Human
gggagagagaaaacguggcgca

SEQ ID NO: 835745 - RNA, 23 nt, Human
ggucccaguggagaggccucacc

SEQ ID NO: 835746 - RNA, 22 nt, Human
uccaagaagucaucuaaacugu

SEQ ID NO: 835747 - RNA, 22 nt, Human
cauuuucagcacccaucugaaa

SEQ ID NO: 835748 - RNA, 22 nt, Human
cagaaauucccauuucagauuc

SEQ ID NO: 835749 - RNA, 22 nt, Human
gcccaggaguucaaggcugcag

SEQ ID NO: 835750 - RNA, 17 nt, Human
uccaugagacaugaaga

SEQ ID NO: 835751 - RNA, 22 nt, Human
uggagcaggugcucaggguaau

SEQ ID NO: 835752 - RNA, 22 nt, Human
ggcagcagggcugucucccuac

SEQ ID NO: 835753 - RNA, 20 nt, Human
ugagugauggaggcggguca

SEQ ID NO: 835754 - RNA, 22 nt, Human
ccucugcugcuguugagcaccg

SEQ ID NO: 835755 - RNA, 22 nt, Human
ugcuagaauuugcagaagcaua

SEQ ID NO: 835756 - RNA, 22 nt, Human
cugccuguuagucuagcaguua

SEQ ID NO: 835757 - RNA, 22 nt, Human
ucuuucagccacuuaccugucu

SEQ ID NO: 835758 - RNA, 22 nt, Human
aaggaggaauuucagggugaau

SEQ ID NO: 835759 - RNA, 22 nt, Human
gggcugagucugcugccuguca

SEQ ID NO: 835760 - RNA, 22 nt, Human
gcagggagguuugcugaccugg

SEQ ID NO: 835761 - RNA, 22 nt, Human
auguaacuucugugaaucugac

SEQ ID NO: 835762 - RNA, 22 nt, Human
aaagccuugggauuugugauca

SEQ ID NO: 835763 - RNA, 20 nt, Human
ccugggcuccaggagccccg

SEQ ID NO: 835764 - RNA, 22 nt, Human
ucaaaauuucagcacuagcccu

SEQ ID NO: 835765 - RNA, 22 nt, Human
cuuccucaugugcaaugcaagc

SEQ ID NO: 835766 - RNA, 22 nt, Human
uggagcaggugggaugucguga

SEQ ID NO: 835767 - RNA, 22 nt, Human
ucagagucauugcaaguagaag

SEQ ID NO: 835768 - RNA, 22 nt, Human
ucagcuggagaugagaaccgaa

SEQ ID NO: 835769 - RNA, 22 nt, Human
uggcccugacugauguggaggg

SEQ ID NO: 835770 - RNA, 20 nt, Human
aaguuuucuccaaauacagu

SEQ ID NO: 835771 - RNA, 22 nt, Human
uuacagaauguucuuccaacag

SEQ ID NO: 835772 - RNA, 22 nt, Human
gcagcccagagcgcaggacccc

SEQ ID NO: 835773 - RNA, 22 nt, Human
aagggccuccuggggagccugg

SEQ ID NO: 835774 - RNA, 22 nt, Human
gccugccuuuuggaggcacauu

SEQ ID NO: 835775 - RNA, 22 nt, Human
ggacacaguggaagacagcuug

SEQ ID NO: 835776 - RNA, 22 nt, Human
uggaaagaauuccuaugguuca

SEQ ID NO: 835777 - RNA, 22 nt, Human
aaaugcaucagcucauaagaga

SEQ ID NO: 835778 - RNA, 22 nt, Human
ggcagaguggagugcggccucc

SEQ ID NO: 835779 - RNA, 22 nt, Human
ucacaauuuggauacagcuaug

SEQ ID NO: 835780 - RNA, 22 nt, Human
ucucugaguauccugaacugcc

SEQ ID NO: 835781 - RNA, 19 nt, Human
uaaaaugucuguggucagu

SEQ ID NO: 835782 - RNA, 17 nt, Human
uugaacugcugagucag

SEQ ID NO: 835783 - RNA, 22 nt, Human
guacacauuaugcuucucuaaa

SEQ ID NO: 835784 - RNA, 22 nt, Human
ccuggcugaaccaaugaagugg

SEQ ID NO: 835785 - RNA, 22 nt, Human
agcccagccggauucccaguuc

SEQ ID NO: 835786 - RNA, 22 nt, Human
uaggcagaauuguugaaugaag

SEQ ID NO: 835787 - RNA, 22 nt, Human
auagaauuauggaaagcaucuu

SEQ ID NO: 835788 - RNA, 22 nt, Human
ccuggcugguggcagcgacaag

SEQ ID NO: 835789 - RNA, 22 nt, Human
caauuuuuguacuuauaguacu

SEQ ID NO: 835790 - RNA, 22 nt, Human
gcucagaggaugcuccuuuaug

SEQ ID NO: 835791 - RNA, 22 nt, Human
auguaucaacaaauuguacagu

SEQ ID NO: 835792 - RNA, 22 nt, Human
gagauguacaauguguauuaau

SEQ ID NO: 835793 - RNA, 22 nt, Human
aggcuuccgaguagcugggacu

SEQ ID NO: 835794 - RNA, 22 nt, Human
gggcucucaugaguguguggua

SEQ ID NO: 835795 - RNA, 22 nt, Human
uuucauggcuaggacuagagug

SEQ ID NO: 835796 - RNA, 21 nt, Human
uucaauacuauuucaauaguc

SEQ ID NO: 835797 - RNA, 22 nt, Human
acauuucucauucuccccuaac

SEQ ID NO: 835798 - RNA, 22 nt, Human
augcacaagaggcuagaaaaga

SEQ ID NO: 835799 - RNA, 22 nt, Human
auuucucuuagcaagacauuac

SEQ ID NO: 835800 - RNA, 22 nt, Human
cacugaaucucaaggggagggu

SEQ ID NO: 835801 - RNA, 22 nt, Human
gaggcagccucaguggaccucg

SEQ ID NO: 835802 - RNA, 22 nt, Human
aguuuuauuccaaugugcagca

SEQ ID NO: 835803 - RNA, 18 nt, Human
uggcucugcagccagaug

SEQ ID NO: 835804 - RNA, 22 nt, Human
ucaaucacguguuccauguucu

SEQ ID NO: 835805 - RNA, 22 nt, Human
auauuauucuaguaacagugau

SEQ ID NO: 835806 - RNA, 22 nt, Human
ggagcaggagucucuugaauuu

SEQ ID NO: 835807 - RNA, 22 nt, Human
accaguccgcggagcuccgggg

SEQ ID NO: 835808 - RNA, 22 nt, Human
auggguuucccucugaaauuau

SEQ ID NO: 835809 - RNA, 22 nt, Human
aggggcuguggaaaccaacucu

SEQ ID NO: 835810 - RNA, 22 nt, Human
auuucuguaguccacauucuuu

SEQ ID NO: 835811 - RNA, 19 nt, Human
aguggcagaucuggaagua

SEQ ID NO: 835812 - RNA, 21 nt, Human
ucaggggcuguguuuuccauc

SEQ ID NO: 835813 - RNA, 22 nt, Human
ugccacagaggugaagcccacu

SEQ ID NO: 835814 - RNA, 22 nt, Human
gaggcaggguguugauuacaga

SEQ ID NO: 835815 - RNA, 22 nt, Human
ucucuggguuuuuguccuguac

SEQ ID NO: 835816 - RNA, 22 nt, Human
gcucccagcauugcuucccagg

SEQ ID NO: 835817 - RNA, 22 nt, Human
agagugaaguaauuguuaggau

SEQ ID NO: 835818 - RNA, 22 nt, Human
uuuuaguguagucaccgugggu

SEQ ID NO: 835819 - RNA, 22 nt, Human
cagcccuggugccaagguuccc

SEQ ID NO: 835820 - RNA, 22 nt, Human
ugaguuuuuucaacauaugaag

SEQ ID NO: 835821 - RNA, 22 nt, Human
ucucagaguuuacggggcugaa

SEQ ID NO: 835822 - RNA, 22 nt, Human
caguucuuauuuggccaguguc

SEQ ID NO: 835823 - RNA, 19 nt, Human
gcuggcagauguggccgug

SEQ ID NO: 835824 - RNA, 22 nt, Human
aaucagaacuccuaccacagag

SEQ ID NO: 835825 - RNA, 22 nt, Human
aaaguccugacugcaggggaug

SEQ ID NO: 835826 - RNA, 22 nt, Human
ugcagcaggagccaggccuggu

SEQ ID NO: 835827 - RNA, 22 nt, Human
gauaaaauaacuauggaauacu

SEQ ID NO: 835828 - RNA, 22 nt, Human
uccaggagucuagccucaggcc

SEQ ID NO: 835829 - RNA, 22 nt, Human
ugcauuguugaugaguugaaua

SEQ ID NO: 835830 - RNA, 22 nt, Human
gccaggaguucagaugcauguu

SEQ ID NO: 835831 - RNA, 22 nt, Human
caggguggaauggaaugcuggc

SEQ ID NO: 835832 - RNA, 22 nt, Human
gaggcugcaggcaaugcugccc

SEQ ID NO: 835833 - RNA, 22 nt, Human
aaaagggacuacucucagcucc

SEQ ID NO: 835834 - RNA, 21 nt, Human
uucucagaucgaguagugaga

SEQ ID NO: 835835 - RNA, 22 nt, Human
uaaggcacuucaauguuuagaa

SEQ ID NO: 835836 - RNA, 19 nt, Human
ugucuuaauuaacucagag

SEQ ID NO: 835837 - RNA, 22 nt, Human
aggccuccuggcuccaggccuu

SEQ ID NO: 835838 - RNA, 22 nt, Human
cagaggcugaugugggaugggc

SEQ ID NO: 835839 - RNA, 22 nt, Human
accccagaggcggaggcugcag

SEQ ID NO: 835840 - RNA, 22 nt, Human
ugcuuuauguuaucagaagggu

SEQ ID NO: 835841 - RNA, 22 nt, Human
uuucuguuaggcaucauuuuaa

SEQ ID NO: 835842 - RNA, 20 nt, Human
uguucacaguaguugcugcu

SEQ ID NO: 835843 - RNA, 22 nt, Human
aucuucucaagcagcauccugu

SEQ ID NO: 835844 - RNA, 22 nt, Human
gcuguccugggaacaggcacua

SEQ ID NO: 835845 - RNA, 22 nt, Human
gccucugggcucugccccuggc

SEQ ID NO: 835846 - RNA, 19 nt, Human
cucagcuguagcucaugug

SEQ ID NO: 835847 - RNA, 22 nt, Human
ccaaggagaaugacaccaugga

SEQ ID NO: 835848 - RNA, 20 nt, Human
guaaugaauguaaacaguaa

SEQ ID NO: 835849 - RNA, 22 nt, Human
uggcacuggcgcaggauggcgg

SEQ ID NO: 835850 - RNA, 19 nt, Human
guggccagggcaggggcug

SEQ ID NO: 835851 - RNA, 22 nt, Human
ugcuauugugaacagugccaca

SEQ ID NO: 835852 - RNA, 22 nt, Human
cugcccuggucccauggcugau

SEQ ID NO: 835853 - RNA, 19 nt, Human
cccaggagucuggcugguu

SEQ ID NO: 835854 - RNA, 22 nt, Human
auucuuggcaaggagauuuaaa

SEQ ID NO: 835855 - RNA, 22 nt, Human
uggccugcuuucauuugaugcu

SEQ ID NO: 835856 - RNA, 22 nt, Human
caaguccuaaauguauuuguug

SEQ ID NO: 835857 - RNA, 22 nt, Human
gcaggagccacuucagggaugc

SEQ ID NO: 835858 - RNA, 22 nt, Human
ugcacacacaugaaguagcaug

SEQ ID NO: 835859 - RNA, 21 nt, Human
acagcaagccuuccuuucagg

SEQ ID NO: 835860 - RNA, 22 nt, Human
guggccucuguuggcuccuagg

SEQ ID NO: 835861 - RNA, 22 nt, Human
ugcaguggcgccaucucagcuc

SEQ ID NO: 835862 - RNA, 22 nt, Human
caggcagcccugcaccaagugu

SEQ ID NO: 835863 - RNA, 20 nt, Human
cagcaggaaaagugccucag

SEQ ID NO: 835864 - RNA, 22 nt, Human
caggaaccuaaagagacauuac

SEQ ID NO: 835865 - RNA, 22 nt, Human
gcagcuucaguaggugaagaca

SEQ ID NO: 835866 - RNA, 22 nt, Human
gcugagggcauguguggcgacu

SEQ ID NO: 835867 - RNA, 21 nt, Human
auggagggaccagggaagcag

SEQ ID NO: 835868 - RNA, 22 nt, Human
gcccucugcacagcucugagca

SEQ ID NO: 835869 - RNA, 22 nt, Human
ucacagcaaaagugugcagagc

SEQ ID NO: 835870 - RNA, 22 nt, Human
cugcugcugcuaucuacccagg

SEQ ID NO: 835871 - RNA, 22 nt, Human
gagcuggcuccgccaugcugcu

SEQ ID NO: 835872 - RNA, 18 nt, Human
caauuucauccuuaagcc

SEQ ID NO: 835873 - RNA, 22 nt, Human
ggaggcucccacgcagcucaca

SEQ ID NO: 835874 - RNA, 22 nt, Human
aggauuuaggagcuggcuaacg

SEQ ID NO: 835875 - RNA, 22 nt, Human
aguaaacacugucuuuauauau

SEQ ID NO: 835876 - RNA, 22 nt, Human
cauugcucaggcccagcaggaa

SEQ ID NO: 835877 - RNA, 22 nt, Human
aaacuuuguucgucugaugugg

SEQ ID NO: 835878 - RNA, 22 nt, Human
uuuaaugaauaauucaaaucug

SEQ ID NO: 835879 - RNA, 17 nt, Human
uggagcugcguguguuc

SEQ ID NO: 835880 - RNA, 23 nt, Human
ggggccugcaccggucugcgcgg

SEQ ID NO: 835881 - RNA, 22 nt, Human
gcugggcagccccuacagagag

SEQ ID NO: 835882 - RNA, 22 nt, Human
uuauccaagcagaagcugcaca

SEQ ID NO: 835883 - RNA, 22 nt, Human
cugagccaaaaagcagagcuug

SEQ ID NO: 835884 - RNA, 22 nt, Human
uuguggaaauacagacuccaag

SEQ ID NO: 835885 - RNA, 22 nt, Human
caugugguucaaguacuccaca

SEQ ID NO: 835886 - RNA, 18 nt, Human
gcaggcuuuuccuggguc

SEQ ID NO: 835887 - RNA, 22 nt, Human
uggccuggggaagaccaugggc

SEQ ID NO: 835888 - RNA, 22 nt, Human
gcagccacacuguuacagaaug

SEQ ID NO: 835889 - RNA, 22 nt, Human
uucaagauggcugcaaauacuu

SEQ ID NO: 835890 - RNA, 22 nt, Human
uggacucaaguccaaguucacg

SEQ ID NO: 835891 - RNA, 22 nt, Human
cagggccuuauccugccauuga

SEQ ID NO: 835892 - RNA, 23 nt, Human
gccucagagaaacagcugcacac

SEQ ID NO: 835893 - RNA, 20 nt, Human
gcccacucuaauccacuguc

SEQ ID NO: 835894 - RNA, 16 nt, Human
aggaggggaauuagga

SEQ ID NO: 835895 - RNA, 22 nt, Human
ucucugggugauggcagggcac

SEQ ID NO: 835896 - RNA, 22 nt, Human
ggugagaggcagaggacagcuu

SEQ ID NO: 835897 - RNA, 22 nt, Human
aaaugcauguagaauaauagag

SEQ ID NO: 835898 - RNA, 18 nt, Human
ggcagggaaaagauaggg

SEQ ID NO: 835899 - RNA, 22 nt, Human
aguuagaaaguaaaucauuuga

SEQ ID NO: 835900 - RNA, 22 nt, Human
cugccgagugggucaugaggca

SEQ ID NO: 835901 - RNA, 22 nt, Human
agccagggagguggagguugca

SEQ ID NO: 835902 - RNA, 22 nt, Human
ccugagaccaaguugcagccau

SEQ ID NO: 835903 - RNA, 22 nt, Human
ccuggccugcucggcucuuaag

SEQ ID NO: 835904 - RNA, 22 nt, Human
ucucagagagcuguguuuuccu

SEQ ID NO: 835905 - RNA, 19 nt, Human
ggucucagugcagcugcag

SEQ ID NO: 835906 - RNA, 22 nt, Human
cuacaaugacagaauugaguag

SEQ ID NO: 835907 - RNA, 22 nt, Human
cccuuagcucaauuucuugccc

SEQ ID NO: 835908 - RNA, 22 nt, Human
aaagaacaaauuagcuguuuua

SEQ ID NO: 835909 - RNA, 22 nt, Human
agccaagcugaucuccugcuga

SEQ ID NO: 835910 - RNA, 22 nt, Human
agggaggaucugcuccuugucu

SEQ ID NO: 835911 - RNA, 22 nt, Human
agccagccaguucacuaggaaa

SEQ ID NO: 835912 - RNA, 22 nt, Human
cucagaagaacaaaggcucuac

SEQ ID NO: 835913 - RNA, 19 nt, Human
cugcucaggucagucuguc

SEQ ID NO: 835914 - RNA, 22 nt, Human
guucuucaucauuaacacucug

SEQ ID NO: 835915 - RNA, 22 nt, Human
gagagaggccuccauguacuga

SEQ ID NO: 835916 - RNA, 22 nt, Human
ugcugccacauuuaaagagggg

SEQ ID NO: 835917 - RNA, 22 nt, Human
gucucccacuuucuggccucuu

SEQ ID NO: 835918 - RNA, 22 nt, Human
gcucccagauuucagccuugug

SEQ ID NO: 835919 - RNA, 22 nt, Human
aagagagagcauucuucuguua

SEQ ID NO: 835920 - RNA, 22 nt, Human
cuuugcaaacgauuaccacaug

SEQ ID NO: 835921 - RNA, 22 nt, Human
ccaggagagcaggcgugcagcu

SEQ ID NO: 835922 - RNA, 22 nt, Human
ugcccuguuaucuuggaagagu

SEQ ID NO: 835923 - RNA, 22 nt, Human
uggagcugauacagcuggcuuu

SEQ ID NO: 835924 - RNA, 22 nt, Human
aaacuuuaagacaguccucaag

SEQ ID NO: 835925 - RNA, 22 nt, Human
aaauguguuucuuugugaaugg

SEQ ID NO: 835926 - RNA, 22 nt, Human
cccaggagguuggggcuacagu

SEQ ID NO: 835927 - RNA, 22 nt, Human
gcuguccaugucuggccucagu

SEQ ID NO: 835928 - RNA, 19 nt, Human
cgcaggagccgaggugacc

SEQ ID NO: 835929 - RNA, 22 nt, Human
ccaggcauccauugcuuccucu

SEQ ID NO: 835930 - RNA, 22 nt, Human
caggagaagguuuggagugcag

SEQ ID NO: 835931 - RNA, 22 nt, Human
uuugacaaauccuucagcaaug

SEQ ID NO: 835932 - RNA, 22 nt, Human
ugcucuggguccugggccuccu

SEQ ID NO: 835933 - RNA, 22 nt, Human
uugcuuuguuacugcaguuucc

SEQ ID NO: 835934 - RNA, 22 nt, Human
ucaaggugcugugcugugcuag

SEQ ID NO: 835935 - RNA, 22 nt, Human
uugucugugaaauggaaauagu

SEQ ID NO: 835936 - RNA, 22 nt, Human
uaagaauuguguugaauagagu

SEQ ID NO: 835937 - RNA, 22 nt, Human
ccaggcaucacgggcauguggc

SEQ ID NO: 835938 - RNA, 22 nt, Human
uauacagaaagaauucaagucu

SEQ ID NO: 835939 - RNA, 22 nt, Human
ccugggcaacauagugagaccc

SEQ ID NO: 835940 - RNA, 22 nt, Human
ggcagugaaaaaguauguuucc

SEQ ID NO: 835941 - RNA, 20 nt, Human
guaaaauauggucuuugggu

SEQ ID NO: 835942 - RNA, 22 nt, Human
acuuucucaggaauucacagac

SEQ ID NO: 835943 - RNA, 22 nt, Human
aaaugauugucaaaguucuguu

SEQ ID NO: 835944 - RNA, 22 nt, Human
auuuucaaaacaucugcugugu

SEQ ID NO: 835945 - RNA, 22 nt, Human
auguuuccagguucuuccuaug

SEQ ID NO: 835946 - RNA, 22 nt, Human
gugcugcucacaucuggaggua

SEQ ID NO: 835947 - RNA, 22 nt, Human
uagucaccucuuuaaauguccu

SEQ ID NO: 835948 - RNA, 19 nt, Human
ugcccaggccagguugggc

SEQ ID NO: 835949 - RNA, 22 nt, Human
gucacaggccuggaugaggggc

SEQ ID NO: 835950 - RNA, 22 nt, Human
gaaggaaaaauacucuguaagg

SEQ ID NO: 835951 - RNA, 22 nt, Human
cuggacuuuggcccaucugcca

SEQ ID NO: 835952 - RNA, 22 nt, Human
ucugggcccuaaaccagcucua

SEQ ID NO: 835953 - RNA, 22 nt, Human
cuguccuaugaguacucacuag

SEQ ID NO: 835954 - RNA, 22 nt, Human
uugaauaauuaauuacacucag

SEQ ID NO: 835955 - RNA, 22 nt, Human
agcacagaguugcagagagcgu

SEQ ID NO: 835956 - RNA, 22 nt, Human
gaggggaagacuucuggacagu

SEQ ID NO: 835957 - RNA, 22 nt, Human
caguuucuacgacuuaagcaca

SEQ ID NO: 835958 - RNA, 22 nt, Human
agucuucagagaaauuaacucu

SEQ ID NO: 835959 - RNA, 22 nt, Human
aggaaaaucgagucuggaggca

SEQ ID NO: 835960 - RNA, 22 nt, Human
agauuuccuaugguaauuauag

SEQ ID NO: 835961 - RNA, 22 nt, Human
caggagaggcuguacguuucuc

SEQ ID NO: 835962 - RNA, 22 nt, Human
ugggcuacucugggagccuaac

SEQ ID NO: 835963 - RNA, 22 nt, Human
gcccaugcucucaggcgggccu

SEQ ID NO: 835964 - RNA, 21 nt, Human
aggcccagcuuuccucuugcu

SEQ ID NO: 835965 - RNA, 22 nt, Human
uaagacaauucuucagucacaa

SEQ ID NO: 835966 - RNA, 22 nt, Human
ugccugcucuuaccacucuccc

SEQ ID NO: 835967 - RNA, 22 nt, Human
gaggggcuggguagggcaaccc

SEQ ID NO: 835968 - RNA, 19 nt, Human
ucccaggaagcaaauguca

SEQ ID NO: 835969 - RNA, 22 nt, Human
auguaguauuuggaaauguaaa

SEQ ID NO: 835970 - RNA, 21 nt, Human
gugguuauuuucauuagcauc

SEQ ID NO: 835971 - RNA, 22 nt, Human
cugcgcagggguggcgccagaa

SEQ ID NO: 835972 - RNA, 22 nt, Human
auuuugcuggucugaauuacuu

SEQ ID NO: 835973 - RNA, 22 nt, Human
ggguuggggcccagcagucugc

SEQ ID NO: 835974 - RNA, 16 nt, Human
cagaguguaaacagga

SEQ ID NO: 835975 - RNA, 22 nt, Human
cuucuugcugggggccucagug

SEQ ID NO: 835976 - RNA, 22 nt, Human
aggagcagaauuuaaugugcag

SEQ ID NO: 835977 - RNA, 22 nt, Human
gccuucaggaggguuccagaca

SEQ ID NO: 835978 - RNA, 22 nt, Human
ucccagaggaaauggcagcuga

SEQ ID NO: 835979 - RNA, 22 nt, Human
ccucugcagcagagagccagag

SEQ ID NO: 835980 - RNA, 22 nt, Human
gugcagguguuuuggcugccag

SEQ ID NO: 835981 - RNA, 19 nt, Human
caucuggaugauucuccug

SEQ ID NO: 835982 - RNA, 22 nt, Human
aggcucagagagcuguguccau

SEQ ID NO: 835983 - RNA, 22 nt, Human
gucaaguuuauccgcucauuca

SEQ ID NO: 835984 - RNA, 22 nt, Human
ugaaaggugacauuucuuggau

SEQ ID NO: 835985 - RNA, 22 nt, Human
agacaaagaaaccguagaagca

SEQ ID NO: 835986 - RNA, 22 nt, Human
uucccaguauuaccuucaggaa

SEQ ID NO: 835987 - RNA, 23 nt, Human
ccucagcauggcaggagcccagc

SEQ ID NO: 835988 - RNA, 22 nt, Human
agcagaugagccucaugacugg

SEQ ID NO: 835989 - RNA, 22 nt, Human
ugcagccaucgcagagucugua

SEQ ID NO: 835990 - RNA, 22 nt, Human
uagaagcaguaauagaaauagg

SEQ ID NO: 835991 - RNA, 22 nt, Human
uugauacauuuuuaggauaaac

SEQ ID NO: 835992 - RNA, 22 nt, Human
ugccucugugugcaggugagca

SEQ ID NO: 835993 - RNA, 22 nt, Human
agcugguuagcaaucuaaguga

SEQ ID NO: 835994 - RNA, 22 nt, Human
cagagccaugguaugggcuugu

SEQ ID NO: 835995 - RNA, 19 nt, Human
cagagcagugguuccugaa

SEQ ID NO: 835996 - RNA, 22 nt, Human
cucccuggaggcccagaccugg

SEQ ID NO: 835997 - RNA, 22 nt, Human
gccucugcaggugcgguuaucc

SEQ ID NO: 835998 - RNA, 22 nt, Human
ugucaugcuuauguuacauacu

SEQ ID NO: 835999 - RNA, 22 nt, Human
uccuuggcuuucuggagcuucu

SEQ ID NO: 836000 - RNA, 22 nt, Human
acacagggauauuucagguggu

SEQ ID NO: 836001 - RNA, 22 nt, Human
cagcucccaguggcagcuccuu

SEQ ID NO: 836002 - RNA, 22 nt, Human
uggagcaggaagucuauggcug

SEQ ID NO: 836003 - RNA, 22 nt, Human
agggacugagcuaggaucuagu

SEQ ID NO: 836004 - RNA, 22 nt, Human
uggcagcagacaaaaggccauu

SEQ ID NO: 836005 - RNA, 22 nt, Human
ugaaggcauugaugaaggaauc

SEQ ID NO: 836006 - RNA, 22 nt, Human
uggcugaacuaaugugcuguuu

SEQ ID NO: 836007 - RNA, 22 nt, Human
uucuucaaacaaaaguggcaug

SEQ ID NO: 836008 - RNA, 22 nt, Human
cacagguggcuccaaguuagag

SEQ ID NO: 836009 - RNA, 22 nt, Human
agggcugcccagugugagagcu

SEQ ID NO: 836010 - RNA, 22 nt, Human
cagugcaugaaacaauaugcag

SEQ ID NO: 836011 - RNA, 20 nt, Human
ugcugucguguuuucugcuu

SEQ ID NO: 836012 - RNA, 22 nt, Human
uccagggagagccgcugcucca

SEQ ID NO: 836013 - RNA, 22 nt, Human
uagaggugacacugagaccaua

SEQ ID NO: 836014 - RNA, 22 nt, Human
auaaggcaucucucaguuagca

SEQ ID NO: 836015 - RNA, 22 nt, Human
aggacuucaucaccuguauaaa

SEQ ID NO: 836016 - RNA, 22 nt, Human
uuuggaaaguguacaaauuuga

SEQ ID NO: 836017 - RNA, 23 nt, Human
uuccacaaugaaaauaaagcagg

SEQ ID NO: 836018 - RNA, 22 nt, Human
acaaagucugaaaccugaggca

SEQ ID NO: 836019 - RNA, 22 nt, Human
augcugugccuucucugugcca

SEQ ID NO: 836020 - RNA, 21 nt, Human
auacauucuauuaagcauuua

SEQ ID NO: 836021 - RNA, 22 nt, Human
auuuaucaccaguuagcugacu

SEQ ID NO: 836022 - RNA, 22 nt, Human
aaaaaugaaacggcugguuggc

SEQ ID NO: 836023 - RNA, 22 nt, Human
ccagagcuucggggcggcugua

SEQ ID NO: 836024 - RNA, 22 nt, Human
gccucugcaccaguacugugcc

SEQ ID NO: 836025 - RNA, 22 nt, Human
cccaggaagaaauucugauuug

SEQ ID NO: 836026 - RNA, 22 nt, Human
gugucccaggccucuggaauua

SEQ ID NO: 836027 - RNA, 22 nt, Human
ccuggcuccugccucugcaggg

SEQ ID NO: 836028 - RNA, 22 nt, Human
cccuggugguacggcacuggca

SEQ ID NO: 836029 - RNA, 22 nt, Human
ggagcugaaggggugggcucag

SEQ ID NO: 836030 - RNA, 23 nt, Human
cagagcuggcucagagcugccug

SEQ ID NO: 836031 - RNA, 22 nt, Human
ggaggccauaguuugggaguca

SEQ ID NO: 836032 - RNA, 22 nt, Human
guacauaaaggaggcucuuugc

SEQ ID NO: 836033 - RNA, 20 nt, Human
uucauucauuccacaacuuc

SEQ ID NO: 836034 - RNA, 22 nt, Human
ccacccuggacaggccucugag

SEQ ID NO: 836035 - RNA, 22 nt, Human
uccucaugccgggucucacgcu

SEQ ID NO: 836036 - RNA, 22 nt, Human
agauacaucuugaacuucuaga

SEQ ID NO: 836037 - RNA, 22 nt, Human
cacagaguggaggcuuggccug

SEQ ID NO: 836038 - RNA, 22 nt, Human
cugggcuguucugccccugggu

SEQ ID NO: 836039 - RNA, 23 nt, Human
gguggcaggaguggaugcugagc

SEQ ID NO: 836040 - RNA, 17 nt, Human
agcuccugcccauggcu

SEQ ID NO: 836041 - RNA, 22 nt, Human
ugagcuucuuuauuuggccaga

SEQ ID NO: 836042 - RNA, 22 nt, Human
uguauguguauguacauaugca

SEQ ID NO: 836043 - RNA, 22 nt, Human
augccuguaaucccagugcuuu

SEQ ID NO: 836044 - RNA, 22 nt, Human
auguuagaaggaauguuaaaag

SEQ ID NO: 836045 - RNA, 22 nt, Human
ucacauuuucauauucucugag

SEQ ID NO: 836046 - RNA, 22 nt, Human
gucauuccuuauguugauucag

SEQ ID NO: 836047 - RNA, 22 nt, Human
acaggugguaaaauggacuguc

SEQ ID NO: 836048 - RNA, 22 nt, Human
agcugcaggccucuccugggga

SEQ ID NO: 836049 - RNA, 22 nt, Human
uguacaaucuuggucccuuuau

SEQ ID NO: 836050 - RNA, 22 nt, Human
uucaucaauguguuuaauaaug

SEQ ID NO: 836051 - RNA, 22 nt, Human
ugcagcugguuuagaacuagau

SEQ ID NO: 836052 - RNA, 22 nt, Human
agccuucagcaguucaggugcc

SEQ ID NO: 836053 - RNA, 19 nt, Human
ucuggcuccugccaggcug

SEQ ID NO: 836054 - RNA, 22 nt, Human
cuucccagaccuuagagugcag

SEQ ID NO: 836055 - RNA, 22 nt, Human
aaguaaaauguuuccuuuauua

SEQ ID NO: 836056 - RNA, 22 nt, Human
cugggcaguuuauucaguucug

SEQ ID NO: 836057 - RNA, 22 nt, Human
ccaggcugagcaugauuggagc

SEQ ID NO: 836058 - RNA, 22 nt, Human
cuggccugaucucaugcugucc

SEQ ID NO: 836059 - RNA, 17 nt, Human
aggcagcucagaacauc

SEQ ID NO: 836060 - RNA, 20 nt, Human
ccagagcugauggcugcccg

SEQ ID NO: 836061 - RNA, 22 nt, Human
ucagucuucccuccagugcaac

SEQ ID NO: 836062 - RNA, 22 nt, Human
uugaaucucuugaaucucuguu

SEQ ID NO: 836063 - RNA, 22 nt, Human
ccaggagcaaagaucacuggga

SEQ ID NO: 836064 - RNA, 22 nt, Human
aaagcucuuuuccaaguauuga

SEQ ID NO: 836065 - RNA, 22 nt, Human
caacagaaggaagcagggucag

SEQ ID NO: 836066 - RNA, 22 nt, Human
ugauuuccacgugcacccaggu

SEQ ID NO: 836067 - RNA, 20 nt, Human
acugcuucuuucucugaccu

SEQ ID NO: 836068 - RNA, 22 nt, Human
uucucauucugacucaguguag

SEQ ID NO: 836069 - RNA, 22 nt, Human
ggcagccauggacacuggcuag

SEQ ID NO: 836070 - RNA, 22 nt, Human
uccagcagggaauuaguagucu

SEQ ID NO: 836071 - RNA, 22 nt, Human
gaggggcugggguugacuccaa

SEQ ID NO: 836072 - RNA, 23 nt, Human
uggagaugccccacucccugucu

SEQ ID NO: 836073 - RNA, 22 nt, Human
ucagagucucccccaguuuggg

SEQ ID NO: 836074 - RNA, 22 nt, Human
aaggagagguuguccguguugu

SEQ ID NO: 836075 - RNA, 22 nt, Human
uaaaauagcaugugcagugaaa

SEQ ID NO: 836076 - RNA, 22 nt, Human
gccuggcugagguggggaggca

SEQ ID NO: 836077 - RNA, 22 nt, Human
uccagaaacuuuuccagucuca

SEQ ID NO: 836078 - RNA, 22 nt, Human
ccuggcucuguccucgcgcaaa

SEQ ID NO: 836079 - RNA, 22 nt, Human
ucuggagccacaaaccucagcu

SEQ ID NO: 836080 - RNA, 22 nt, Human
auuccaaagguuaaugcccauu

SEQ ID NO: 836081 - RNA, 22 nt, Human
acucugcuuauugcugcaggca

SEQ ID NO: 836082 - RNA, 22 nt, Human
gacagcugugcaggagaagggg

SEQ ID NO: 836083 - RNA, 21 nt, Human
uccagggaacuucucaggaau

SEQ ID NO: 836084 - RNA, 22 nt, Human
guagaaaugguguguuucuucu

SEQ ID NO: 836085 - RNA, 22 nt, Human
guauagaaacccagaaagauag

SEQ ID NO: 836086 - RNA, 22 nt, Human
ggacacagauaaucacacagau

SEQ ID NO: 836087 - RNA, 22 nt, Human
ugcccaggguggagugcagcgg

SEQ ID NO: 836088 - RNA, 22 nt, Human
uuugcagugauucuugcaguga

SEQ ID NO: 836089 - RNA, 22 nt, Human
gcagaggcauuucugacgcugc

SEQ ID NO: 836090 - RNA, 22 nt, Human
aaauuucaguuggaaugagcuc

SEQ ID NO: 836091 - RNA, 22 nt, Human
aagcugccacacggugaguacu

SEQ ID NO: 836092 - RNA, 22 nt, Human
uaaauucuacaacuucaaagau

SEQ ID NO: 836093 - RNA, 23 nt, Human
ucacacagcuggucagguacaga

SEQ ID NO: 836094 - RNA, 22 nt, Human
ucuuuccaaggacucuguagca

SEQ ID NO: 836095 - RNA, 22 nt, Human
ucccagagcucuggagguugga

SEQ ID NO: 836096 - RNA, 22 nt, Human
gcuuuaaugcaauuucaccuca

SEQ ID NO: 836097 - RNA, 22 nt, Human
gagcagagacaguacaacuggc

SEQ ID NO: 836098 - RNA, 20 nt, Human
ucagagucaucaaagauggu

SEQ ID NO: 836099 - RNA, 21 nt, Human
uacugagaccucacagugugc

SEQ ID NO: 836100 - RNA, 22 nt, Human
ugggcagagaucuggaucaaac

SEQ ID NO: 836101 - RNA, 22 nt, Human
gcucccuccaugaggcagaccg

SEQ ID NO: 836102 - RNA, 22 nt, Human
uucagggagagcgggacgggug

SEQ ID NO: 836103 - RNA, 22 nt, Human
aguagaaagaaggcacugggcc

SEQ ID NO: 836104 - RNA, 22 nt, Human
ccuggaucuaaggaagcuggga

SEQ ID NO: 836105 - RNA, 23 nt, Human
cagguggcuccacgagggguggg

SEQ ID NO: 836106 - RNA, 22 nt, Human
gccaccucuuugucucugccgc

SEQ ID NO: 836107 - RNA, 22 nt, Human
gaauuucaagcagugcaauguu

SEQ ID NO: 836108 - RNA, 22 nt, Human
ugaggcaggaaguuauauaaug

SEQ ID NO: 836109 - RNA, 22 nt, Human
uagaaaucauuuagaaguauug

SEQ ID NO: 836110 - RNA, 22 nt, Human
ccuguggcucucuuuggagguc

SEQ ID NO: 836111 - RNA, 22 nt, Human
agcuuccuuggcgcugaggccu

SEQ ID NO: 836112 - RNA, 22 nt, Human
agaaauguauagugaauuuuuc

SEQ ID NO: 836113 - RNA, 18 nt, Human
cgaggcaggcggaucacg

SEQ ID NO: 836114 - RNA, 22 nt, Human
guggcugcagagggcacagcau

SEQ ID NO: 836115 - RNA, 22 nt, Human
ugagcccaggaguaugaggcug

SEQ ID NO: 836116 - RNA, 22 nt, Human
aggccucacauugggcuucaag

SEQ ID NO: 836117 - RNA, 22 nt, Human
ccuggcagcauugguagagauu

SEQ ID NO: 836118 - RNA, 22 nt, Human
cuacccagauccaggauggcua

SEQ ID NO: 836119 - RNA, 22 nt, Human
cuggcugccacuucagggucuu

SEQ ID NO: 836120 - RNA, 22 nt, Human
ccuggaucuuucugacugacaa

SEQ ID NO: 836121 - RNA, 22 nt, Human
uuuaucuuuggaucuucagaaa

SEQ ID NO: 836122 - RNA, 22 nt, Human
aagguacaaaguauuauuuaaa

SEQ ID NO: 836123 - RNA, 22 nt, Human
uucagaaaucgaguuucauguc

SEQ ID NO: 836124 - RNA, 22 nt, Human
cuguucacacacuuguacucuc

SEQ ID NO: 836125 - RNA, 22 nt, Human
auucuguauggaaaagcacuau

SEQ ID NO: 836126 - RNA, 22 nt, Human
cuccagggaaaggggcguccgc

SEQ ID NO: 836127 - RNA, 22 nt, Human
gcugcugugccuggcguccugu

SEQ ID NO: 836128 - RNA, 22 nt, Human
cccaugagaccugguuuaaggc

SEQ ID NO: 836129 - RNA, 22 nt, Human
gugaauaagaccuaaggaugaa

SEQ ID NO: 836130 - RNA, 22 nt, Human
agagggcagucucagauuggga

SEQ ID NO: 836131 - RNA, 22 nt, Human
ggcccucccugagccagguggg

SEQ ID NO: 836132 - RNA, 22 nt, Human
agaugaagauaucugcaggggc

SEQ ID NO: 836133 - RNA, 22 nt, Human
aggcaccuugagagcaggagcu

SEQ ID NO: 836134 - RNA, 22 nt, Human
auugucuuuggugcuuccagga

SEQ ID NO: 836135 - RNA, 22 nt, Human
aaaugcauugguuucuacuugu

SEQ ID NO: 836136 - RNA, 22 nt, Human
gcagcuggggccacacuuaggc

SEQ ID NO: 836137 - RNA, 22 nt, Human
caggcagccuucucgucucaca

SEQ ID NO: 836138 - RNA, 22 nt, Human
gcuggccugggcucaagaccag

SEQ ID NO: 836139 - RNA, 22 nt, Human
auuugcuuuuacuauguuaaaa

SEQ ID NO: 836140 - RNA, 22 nt, Human
agguaagggucacaguucauau

SEQ ID NO: 836141 - RNA, 22 nt, Human
cucugaacucuugggcagcaug

SEQ ID NO: 836142 - RNA, 22 nt, Human
ccagccuggacugggucuugug

SEQ ID NO: 836143 - RNA, 22 nt, Human
ggagccuguggcugcuugaagc

SEQ ID NO: 836144 - RNA, 22 nt, Human
aagcagcuuaaauuagagccug

SEQ ID NO: 836145 - RNA, 22 nt, Human
gggagccuugggagugccagcc

SEQ ID NO: 836146 - RNA, 22 nt, Human
cccagcccagcguucgaggggu

SEQ ID NO: 836147 - RNA, 22 nt, Human
ccacagagagugucagccuuug

SEQ ID NO: 836148 - RNA, 22 nt, Human
cauaauuucuguaucagcacca

SEQ ID NO: 836149 - RNA, 22 nt, Human
gagaaagcuucuuucccacagg

SEQ ID NO: 836150 - RNA, 21 nt, Human
gcugcugccccuagugaggcc

SEQ ID NO: 836151 - RNA, 22 nt, Human
ccucuucugcuucaggagcacu

SEQ ID NO: 836152 - RNA, 22 nt, Human
gggcagcucucacagcagccaa

SEQ ID NO: 836153 - RNA, 22 nt, Human
aaaucucacuguagucaaagug

SEQ ID NO: 836154 - RNA, 22 nt, Human
gucccagggagguucagggcuu

SEQ ID NO: 836155 - RNA, 22 nt, Human
uuccaugaaauguguuaugcuu

SEQ ID NO: 836156 - RNA, 22 nt, Human
uagcuagaaugcuucgugauau

SEQ ID NO: 836157 - RNA, 22 nt, Human
ucaugaacaucucaaauaacca

SEQ ID NO: 836158 - RNA, 22 nt, Human
aaaucuggccccuugccuauuu

SEQ ID NO: 836159 - RNA, 22 nt, Human
guuauacauauguguuaacaaa

SEQ ID NO: 836160 - RNA, 22 nt, Human
gagagugaggcaucaggggcag

SEQ ID NO: 836161 - RNA, 22 nt, Human
cuuuauguccaccagacugcaa

SEQ ID NO: 836162 - RNA, 22 nt, Human
cagacuggccacaucugcacug

SEQ ID NO: 836163 - RNA, 22 nt, Human
uggagggcaugcuguccauggg

SEQ ID NO: 836164 - RNA, 22 nt, Human
gugagcagaacagguggcuucu

SEQ ID NO: 836165 - RNA, 22 nt, Human
cuguguggacugguugaggccc

SEQ ID NO: 836166 - RNA, 22 nt, Human
caggagcccagaguccucagcu

SEQ ID NO: 836167 - RNA, 22 nt, Human
gggcccacuggcugucugaccc

SEQ ID NO: 836168 - RNA, 22 nt, Human
agccuggaggccaggagacagu

SEQ ID NO: 836169 - RNA, 22 nt, Human
uggcuaggcuccaagagcugga

SEQ ID NO: 836170 - RNA, 22 nt, Human
guuaauaaagguauagaaucag

SEQ ID NO: 836171 - RNA, 22 nt, Human
ucugcucuguggcuucagcuaa

SEQ ID NO: 836172 - RNA, 20 nt, Human
gccugagcuccgccuccugu

SEQ ID NO: 836173 - RNA, 22 nt, Human
aggucauuacaauuaucauuuu

SEQ ID NO: 836174 - RNA, 22 nt, Human
ucuuugaugugguuaauuauga

SEQ ID NO: 836175 - RNA, 22 nt, Human
gggcugcuuauacugaugauaa

SEQ ID NO: 836176 - RNA, 22 nt, Human
ugaagcuuuccuguggucagga

SEQ ID NO: 836177 - RNA, 21 nt, Human
cauuucaaagagcuggaaauc

SEQ ID NO: 836178 - RNA, 22 nt, Human
aaaguucagauuagacucaaga

SEQ ID NO: 836179 - RNA, 22 nt, Human
acucugccccgaguucugggaa

SEQ ID NO: 836180 - RNA, 22 nt, Human
ggacagagcccugguggccuaa

SEQ ID NO: 836181 - RNA, 22 nt, Human
agaggccaucugcucugugggg

SEQ ID NO: 836182 - RNA, 22 nt, Human
augggaggcagcagagcccagc

SEQ ID NO: 836183 - RNA, 22 nt, Human
acagaauuaucaggaaauguua

SEQ ID NO: 836184 - RNA, 22 nt, Human
auguacauuuguaguaauauca

SEQ ID NO: 836185 - RNA, 22 nt, Human
gacagggcgcccagccuguuuc

SEQ ID NO: 836186 - RNA, 22 nt, Human
ucuuaaaaguaugccaauugga

SEQ ID NO: 836187 - RNA, 22 nt, Human
gugcuuaauacaugucaauaac

SEQ ID NO: 836188 - RNA, 22 nt, Human
uacagaaguaaauaccaaaagc

SEQ ID NO: 836189 - RNA, 23 nt, Human
agaauuccaguuucuuaugucac

SEQ ID NO: 836190 - RNA, 22 nt, Human
gaagaacaccugcugcccagug

SEQ ID NO: 836191 - RNA, 22 nt, Human
ucucugaguaagugacaguuca

SEQ ID NO: 836192 - RNA, 22 nt, Human
aaaguccuuuuugccaugcaag

SEQ ID NO: 836193 - RNA, 22 nt, Human
cagaaucagcccuugcuauuaa

SEQ ID NO: 836194 - RNA, 22 nt, Human
auacagauguugaauguuauau

SEQ ID NO: 836195 - RNA, 22 nt, Human
aaagaaggaccuggaggaggau

SEQ ID NO: 836196 - RNA, 22 nt, Human
ugcuggaggauuaaacaaguca

SEQ ID NO: 836197 - RNA, 22 nt, Human
agccagcuggugggucagcugg

SEQ ID NO: 836198 - RNA, 22 nt, Human
ugcagggcuacaggacuacaac

SEQ ID NO: 836199 - RNA, 22 nt, Human
aauuuacacuucauuuggaggg

SEQ ID NO: 836200 - RNA, 22 nt, Human
agccuggcccugcugaacucug

SEQ ID NO: 836201 - RNA, 22 nt, Human
acugugugaaacaucaaugugu

SEQ ID NO: 836202 - RNA, 22 nt, Human
cagcuggcgggcagagccgcca

SEQ ID NO: 836203 - RNA, 22 nt, Human
uagcaggguccaaugugaggca

SEQ ID NO: 836204 - RNA, 22 nt, Human
uuggcaggaauauugcagaggu

SEQ ID NO: 836205 - RNA, 22 nt, Human
uugaaaggugacauuguuagag

SEQ ID NO: 836206 - RNA, 22 nt, Human
cccagggagguagcaggagaaa

SEQ ID NO: 836207 - RNA, 22 nt, Human
uaaauguguuagucaugguuuu

SEQ ID NO: 836208 - RNA, 22 nt, Human
uucuucaaauagcagggaguca

SEQ ID NO: 836209 - RNA, 18 nt, Human
gggcauggaugcagcauc

SEQ ID NO: 836210 - RNA, 22 nt, Human
uuuccucuucgauuaaguuugg

SEQ ID NO: 836211 - RNA, 22 nt, Human
uuguuacacauaauaacauuuu

SEQ ID NO: 836212 - RNA, 22 nt, Human
uucuuauagaagcaaccauugu

SEQ ID NO: 836213 - RNA, 22 nt, Human
gcagcaggcacggucucgacau

SEQ ID NO: 836214 - RNA, 22 nt, Human
gcagugggaagguuggcacaug

SEQ ID NO: 836215 - RNA, 22 nt, Human
cuggcuuuggucaugugaucau

SEQ ID NO: 836216 - RNA, 22 nt, Human
auucuucagaauaucuggcacu

SEQ ID NO: 836217 - RNA, 22 nt, Human
ggcauuuaauccaucugauuga

SEQ ID NO: 836218 - RNA, 22 nt, Human
ggggcagcucccgagggcagga

SEQ ID NO: 836219 - RNA, 22 nt, Human
ucugaggcuaagagacagaggc

SEQ ID NO: 836220 - RNA, 22 nt, Human
ucagaagaagagacuccacagc

SEQ ID NO: 836221 - RNA, 22 nt, Human
ggagcagagcucuucaucugca

SEQ ID NO: 836222 - RNA, 22 nt, Human
agugcugucaguuuuauagaua

SEQ ID NO: 836223 - RNA, 22 nt, Human
gcugcagcuguaggacacaauu

SEQ ID NO: 836224 - RNA, 22 nt, Human
guggcugcagagccagcaagcu

SEQ ID NO: 836225 - RNA, 21 nt, Human
ggcagccugacccccagagag

SEQ ID NO: 836226 - RNA, 22 nt, Human
cccuucagcugagugggacagc

SEQ ID NO: 836227 - RNA, 22 nt, Human
ucuucacaccgggcagcaggaa

SEQ ID NO: 836228 - RNA, 22 nt, Human
uuuggaauuggcauucuauucu

SEQ ID NO: 836229 - RNA, 22 nt, Human
uguguccauucaggcacugacc

SEQ ID NO: 836230 - RNA, 22 nt, Human
caguccuuauuccuauauuccu

SEQ ID NO: 836231 - RNA, 20 nt, Human
cauuugaaucuccauucugc

SEQ ID NO: 836232 - RNA, 22 nt, Human
cauucauuuaugaaauaucuau

SEQ ID NO: 836233 - RNA, 22 nt, Human
gcaggagacaacuguaaggaga

SEQ ID NO: 836234 - RNA, 19 nt, Human
ucuguucacauuguuucgc

SEQ ID NO: 836235 - RNA, 22 nt, Human
uaacagaaauuuuaguuagggg

SEQ ID NO: 836236 - RNA, 22 nt, Human
aaaugugucaguuucauucucu

SEQ ID NO: 836237 - RNA, 22 nt, Human
ucccaggaagaucccagggacc

SEQ ID NO: 836238 - RNA, 22 nt, Human
ggaggccuugaggccaggagcu

SEQ ID NO: 836239 - RNA, 22 nt, Human
uccaggaggcucugguugacgu

SEQ ID NO: 836240 - RNA, 22 nt, Human
acagugaaugcccaagaaaagu

SEQ ID NO: 836241 - RNA, 22 nt, Human
aggccagguuccucaaucuuga

SEQ ID NO: 836242 - RNA, 22 nt, Human
cuuuccaaugucacuaugaauc

SEQ ID NO: 836243 - RNA, 22 nt, Human
gaggucaggcuugcagcagggu

SEQ ID NO: 836244 - RNA, 22 nt, Human
aaggugucacugggacaggaaa

SEQ ID NO: 836245 - RNA, 22 nt, Human
ucugagagguuaagcaauuuga

SEQ ID NO: 836246 - RNA, 21 nt, Human
cucuggaggcaagggagagug

SEQ ID NO: 836247 - RNA, 22 nt, Human
ccagcccugucaccaacuggag

SEQ ID NO: 836248 - RNA, 22 nt, Human
cugugugcugaaaugcagugag

SEQ ID NO: 836249 - RNA, 22 nt, Human
auucuucauuguugauucaugu

SEQ ID NO: 836250 - RNA, 23 nt, Human
caauuucauaugauucuaccuaa

SEQ ID NO: 836251 - RNA, 22 nt, Human
auucuggauuaucaguccacca

SEQ ID NO: 836252 - RNA, 22 nt, Human
aaaacaguuuaggcaucacagu

SEQ ID NO: 836253 - RNA, 22 nt, Human
gauuucaaguaucuugggcgag

SEQ ID NO: 836254 - RNA, 18 nt, Human
gcaggagauggguggggu

SEQ ID NO: 836255 - RNA, 22 nt, Human
cagcuugggucaggugccugcu

SEQ ID NO: 836256 - RNA, 22 nt, Human
ucacccuugauaauguucuucu

SEQ ID NO: 836257 - RNA, 22 nt, Human
uuuccagguauuaauacuguau

SEQ ID NO: 836258 - RNA, 22 nt, Human
ugaugcugcugggaguggugcu

SEQ ID NO: 836259 - RNA, 22 nt, Human
uguaagaaucagucuuuaaugu

SEQ ID NO: 836260 - RNA, 22 nt, Human
caggaaaggugugucaugaugg

SEQ ID NO: 836261 - RNA, 22 nt, Human
cagcagccuacaaugcacagaa

SEQ ID NO: 836262 - RNA, 22 nt, Human
gcaugcugcaccagagccucuc

SEQ ID NO: 836263 - RNA, 22 nt, Human
ugucccagcagcuggguucucu

SEQ ID NO: 836264 - RNA, 22 nt, Human
gcaggcagucaucuuucauauu

SEQ ID NO: 836265 - RNA, 22 nt, Human
acccaggagcucugggguccuc

SEQ ID NO: 836266 - RNA, 22 nt, Human
agaaauguauucuguauguuuu

SEQ ID NO: 836267 - RNA, 22 nt, Human
guguuuuaagaaagaagcucag

SEQ ID NO: 836268 - RNA, 22 nt, Human
gggcuguggagccgcgagggcu

SEQ ID NO: 836269 - RNA, 20 nt, Human
gccagcacagggagcaguuc

SEQ ID NO: 836270 - RNA, 22 nt, Human
ucgcugugguuucuguacaugg

SEQ ID NO: 836271 - RNA, 22 nt, Human
uccuggagauaauugcagugaa

SEQ ID NO: 836272 - RNA, 22 nt, Human
cuggcagucugccucuucacug

SEQ ID NO: 836273 - RNA, 22 nt, Human
uggcagcugcguuguguuucug

SEQ ID NO: 836274 - RNA, 22 nt, Human
cccagcucucucaguucugcuu

SEQ ID NO: 836275 - RNA, 22 nt, Human
ggccucucuccuuggcuugcag

SEQ ID NO: 836276 - RNA, 22 nt, Human
gcugucuguggugucagcugac

SEQ ID NO: 836277 - RNA, 21 nt, Human
ccagaggccucucuuggccac

SEQ ID NO: 836278 - RNA, 22 nt, Human
gcagagccccauugcuggcggg

SEQ ID NO: 836279 - RNA, 22 nt, Human
ucccaggacuuccaguuggagg

SEQ ID NO: 836280 - RNA, 22 nt, Human
ucucagagggaaaggccaauuu

SEQ ID NO: 836281 - RNA, 22 nt, Human
gaacaauagugguaacaaagcc

SEQ ID NO: 836282 - RNA, 22 nt, Human
ccaguacugucuccaauauucc

SEQ ID NO: 836283 - RNA, 22 nt, Human
gccugagacagugugguccaau

SEQ ID NO: 836284 - RNA, 22 nt, Human
uacaaaguuugggguccucaaa

SEQ ID NO: 836285 - RNA, 22 nt, Human
ugccagaagugcuuuauaagug

SEQ ID NO: 836286 - RNA, 22 nt, Human
uaguccuuuccggcugcuauaa

SEQ ID NO: 836287 - RNA, 22 nt, Human
ucucccacgguacaggauaaac

SEQ ID NO: 836288 - RNA, 22 nt, Human
aggucauuuuugccuucuauuu

SEQ ID NO: 836289 - RNA, 22 nt, Human
caaggcaggcaguucacuugag

SEQ ID NO: 836290 - RNA, 22 nt, Human
ugaagcaggaucguuugcuuca

SEQ ID NO: 836291 - RNA, 22 nt, Human
caagggccuccaccuugcucgu

SEQ ID NO: 836292 - RNA, 22 nt, Human
uucagcaaacacgaugcuuguu

SEQ ID NO: 836293 - RNA, 22 nt, Human
ggcugcucuucuuggcgaccuc

SEQ ID NO: 836294 - RNA, 22 nt, Human
acaaaauuaugaagaggccuug

SEQ ID NO: 836295 - RNA, 22 nt, Human
uuugacaucuaagaauucuuac

SEQ ID NO: 836296 - RNA, 22 nt, Human
aagauuuacuagcauaauagcu

SEQ ID NO: 836297 - RNA, 22 nt, Human
ccugagccugaguggugcaggg

SEQ ID NO: 836298 - RNA, 22 nt, Human
aucaguuuaacugucaagagcc

SEQ ID NO: 836299 - RNA, 22 nt, Human
uuccaggaagauucaacaaaag

SEQ ID NO: 836300 - RNA, 22 nt, Human
agugaaauaaagcugccuaugg

SEQ ID NO: 836301 - RNA, 22 nt, Human
gagaggcugacuggcuguccug

SEQ ID NO: 836302 - RNA, 22 nt, Human
uuacuuuggguccugcuuauaa

SEQ ID NO: 836303 - RNA, 22 nt, Human
gagagggccgggggccagcucc

SEQ ID NO: 836304 - RNA, 20 nt, Human
uaaggcuguuuuguauuccu

SEQ ID NO: 836305 - RNA, 22 nt, Human
ucucccacagccgugcuucaag

SEQ ID NO: 836306 - RNA, 22 nt, Human
gcugcuguugauuuaguccaau

SEQ ID NO: 836307 - RNA, 19 nt, Human
uagcugccuguuaccucca

SEQ ID NO: 836308 - RNA, 20 nt, Human
gggcuggcgcauggggaaag

SEQ ID NO: 836309 - RNA, 22 nt, Human
cagggcugcuggccgugcccuc

SEQ ID NO: 836310 - RNA, 21 nt, Human
aggcacuguuugugguuuggg

SEQ ID NO: 836311 - RNA, 22 nt, Human
cugcucugcagcuuggacuccc

SEQ ID NO: 836312 - RNA, 22 nt, Human
ucuucagagugaaagucuguga

SEQ ID NO: 836313 - RNA, 22 nt, Human
aauaaaaugaacugguagaguu

SEQ ID NO: 836314 - RNA, 22 nt, Human
gagccagcgccuugccucuggg

SEQ ID NO: 836315 - RNA, 22 nt, Human
gccagggaacccaagggccuca

SEQ ID NO: 836316 - RNA, 22 nt, Human
gccauuuagggaggcaagguga

SEQ ID NO: 836317 - RNA, 22 nt, Human
gcccaggauggcuggaggugcu

SEQ ID NO: 836318 - RNA, 22 nt, Human
ccucuggggugagugggccacu

SEQ ID NO: 836319 - RNA, 22 nt, Human
auugcaccuuggguuuugaaag

SEQ ID NO: 836320 - RNA, 22 nt, Human
uccaugagcuagcuuuccaaag

SEQ ID NO: 836321 - RNA, 22 nt, Human
uacuaucucuucuaacuucaga

SEQ ID NO: 836322 - RNA, 22 nt, Human
ucagcagggccuccuugugcag

SEQ ID NO: 836323 - RNA, 22 nt, Human
acagccaggaauucuggagaag

SEQ ID NO: 836324 - RNA, 22 nt, Human
uccauuuucaucucauguauaa

SEQ ID NO: 836325 - RNA, 22 nt, Human
ggcuccugggaugggacugagc

SEQ ID NO: 836326 - RNA, 22 nt, Human
agaggcugggaaggguccccgg

SEQ ID NO: 836327 - RNA, 22 nt, Human
uugcauaaagauuuuauugcau

SEQ ID NO: 836328 - RNA, 22 nt, Human
ggcgugggaaguggggcuucug

SEQ ID NO: 836329 - RNA, 22 nt, Human
acuguguggaccacucugaggc

SEQ ID NO: 836330 - RNA, 22 nt, Human
aggauccuuuuucugcuguuug

SEQ ID NO: 836331 - RNA, 22 nt, Human
auugucgcuuauuuaggugcuu

SEQ ID NO: 836332 - RNA, 19 nt, Human
ucccaggaaccuuuuauuu

SEQ ID NO: 836333 - RNA, 22 nt, Human
caaauguauaaauguacuuucu

SEQ ID NO: 836334 - RNA, 22 nt, Human
gacaggggucccucugggcugu

SEQ ID NO: 836335 - RNA, 22 nt, Human
ugccaggauauaagagugcgau

SEQ ID NO: 836336 - RNA, 22 nt, Human
ugaggcagccugcauuaaagag

SEQ ID NO: 836337 - RNA, 22 nt, Human
uaagacauuugaaaugugaucc

SEQ ID NO: 836338 - RNA, 22 nt, Human
agcauuuauuucuuagaaauug

SEQ ID NO: 836339 - RNA, 22 nt, Human
aggugaguuacaggaggagguc

SEQ ID NO: 836340 - RNA, 22 nt, Human
ucagcagcagcucagcauguuu

SEQ ID NO: 836341 - RNA, 22 nt, Human
ccauggcucuuaccuuguuaua

SEQ ID NO: 836342 - RNA, 22 nt, Human
cugcucugcaaggcacagugau

SEQ ID NO: 836343 - RNA, 22 nt, Human
ugcaucuguucagagcugucga

SEQ ID NO: 836344 - RNA, 22 nt, Human
aucuuguuaaaaugcagaaacu

SEQ ID NO: 836345 - RNA, 20 nt, Human
uuucagugguuugugccuag

SEQ ID NO: 836346 - RNA, 22 nt, Human
gcuggagccuucugcucuguug

SEQ ID NO: 836347 - RNA, 22 nt, Human
uggaaggaagccaaggaagguu

SEQ ID NO: 836348 - RNA, 20 nt, Human
ccugucuccucuuaccuggc

SEQ ID NO: 836349 - RNA, 22 nt, Human
uuccaggggcagcagugauggu

SEQ ID NO: 836350 - RNA, 22 nt, Human
aauguguguucggggcccagag

SEQ ID NO: 836351 - RNA, 22 nt, Human
ccagggcugcugugggacucca

SEQ ID NO: 836352 - RNA, 22 nt, Human
cagaagcacuaggaggaaacgu

SEQ ID NO: 836353 - RNA, 22 nt, Human
uggucucuucuuccaagauggc

SEQ ID NO: 836354 - RNA, 17 nt, Human
gugcagggaugaaggau

SEQ ID NO: 836355 - RNA, 22 nt, Human
gcuccagaugaaaggccagagg

SEQ ID NO: 836356 - RNA, 22 nt, Human
ggucaggguuccagguaucuuc

SEQ ID NO: 836357 - RNA, 22 nt, Human
cucacugcccugaaguuggguu

SEQ ID NO: 836358 - RNA, 22 nt, Human
gggagcugguuccugcccucca

SEQ ID NO: 836359 - RNA, 22 nt, Human
augacaaaagaagacaugaggu

SEQ ID NO: 836360 - RNA, 22 nt, Human
auggaaagugcauggaagucau

SEQ ID NO: 836361 - RNA, 22 nt, Human
acauuucuuagccuaguuccag

SEQ ID NO: 836362 - RNA, 19 nt, Human
ugcucaggccaaggagccc

SEQ ID NO: 836363 - RNA, 22 nt, Human
uggcacugaccccaggccugug

SEQ ID NO: 836364 - RNA, 22 nt, Human
aucagcaaaaaugccuucagaa

SEQ ID NO: 836365 - RNA, 22 nt, Human
agcugccgaugcccagcugcau

SEQ ID NO: 836366 - RNA, 20 nt, Human
cucuggcuccgcgugaccgc

SEQ ID NO: 836367 - RNA, 22 nt, Human
cacacuuugugcuaaucuauuu

SEQ ID NO: 836368 - RNA, 22 nt, Human
caaguccucugguuucaaauag

SEQ ID NO: 836369 - RNA, 22 nt, Human
aaguuucaugauguaauuauug

SEQ ID NO: 836370 - RNA, 22 nt, Human
gcagaggccaucaacuuugcca

SEQ ID NO: 836371 - RNA, 22 nt, Human
cugggcagcuaccaccacugcu

SEQ ID NO: 836372 - RNA, 22 nt, Human
ccagagccugcugagccccauu

SEQ ID NO: 836373 - RNA, 22 nt, Human
guaaaucccauccuuucucugg

SEQ ID NO: 836374 - RNA, 22 nt, Human
uuuccucuccaccaggaggucu

SEQ ID NO: 836375 - RNA, 22 nt, Human
cuggcuuucccuggacaacagc

SEQ ID NO: 836376 - RNA, 22 nt, Human
uaauuucacugauaugaaguca

SEQ ID NO: 836377 - RNA, 22 nt, Human
ucuauacacacaaagaaugcuu

SEQ ID NO: 836378 - RNA, 22 nt, Human
aauuucaaugcacucaugguug

SEQ ID NO: 836379 - RNA, 22 nt, Human
ggcuguccuuggccaaggcacu

SEQ ID NO: 836380 - RNA, 22 nt, Human
ugcauguguguguauuuauaaa

SEQ ID NO: 836381 - RNA, 22 nt, Human
ucuggaucuccagcacuuauca

SEQ ID NO: 836382 - RNA, 22 nt, Human
gaaguccucaaugcauugucuu

SEQ ID NO: 836383 - RNA, 22 nt, Human
aguguccccuccaagggccugg

SEQ ID NO: 836384 - RNA, 22 nt, Human
cugugggcugaaagugcucccg

SEQ ID NO: 836385 - RNA, 22 nt, Human
agugucauuccagggacccucg

SEQ ID NO: 836386 - RNA, 20 nt, Human
uucaggauucuagaccacac

SEQ ID NO: 836387 - RNA, 22 nt, Human
uuguaacagcugcuuaauagag

SEQ ID NO: 836388 - RNA, 22 nt, Human
cagaaaaggaagagcuauguaa

SEQ ID NO: 836389 - RNA, 22 nt, Human
gguggggcccuggcacugguau

SEQ ID NO: 836390 - RNA, 20 nt, Human
agaaucugacccagagagac

SEQ ID NO: 836391 - RNA, 22 nt, Human
uagaacagaggguugcccagau

SEQ ID NO: 836392 - RNA, 22 nt, Human
gcugagagcaguguggccuuaa

SEQ ID NO: 836393 - RNA, 22 nt, Human
auaauucaugggccuuucaccu

SEQ ID NO: 836394 - RNA, 22 nt, Human
uuccaggacuggguguuugaag

SEQ ID NO: 836395 - RNA, 22 nt, Human
aggauuuauuacaagccauggu

SEQ ID NO: 836396 - RNA, 22 nt, Human
aucauucuaguccuuauggucu

SEQ ID NO: 836397 - RNA, 22 nt, Human
uuacaucuaaacugugaacaau

SEQ ID NO: 836398 - RNA, 22 nt, Human
uccucagacacccugcuggcuu

SEQ ID NO: 836399 - RNA, 22 nt, Human
uuucuagaggcuccaggggagu

SEQ ID NO: 836400 - RNA, 22 nt, Human
uuccucagaaaauacuguccaa

SEQ ID NO: 836401 - RNA, 22 nt, Human
uaguaucuuucuauauuuccca

SEQ ID NO: 836402 - RNA, 22 nt, Human
uaucuguuguaguacagaugau

SEQ ID NO: 836403 - RNA, 17 nt, Human
gcucccugaggacagcu

SEQ ID NO: 836404 - RNA, 22 nt, Human
gaggccuggguuggaggugcau

SEQ ID NO: 836405 - RNA, 17 nt, Human
uccuucagugccucugc

SEQ ID NO: 836406 - RNA, 22 nt, Human
gccuggagcagacgugucccgg

SEQ ID NO: 836407 - RNA, 22 nt, Human
ugcugggggugucucaccaggc

SEQ ID NO: 836408 - RNA, 22 nt, Human
auguguccacaggugugagaga

SEQ ID NO: 836409 - RNA, 22 nt, Human
augaccccuaaaauuuacuguc

SEQ ID NO: 836410 - RNA, 22 nt, Human
agauacauauagaaaacaucaa

SEQ ID NO: 836411 - RNA, 22 nt, Human
aggcccugaagucggccccuca

SEQ ID NO: 836412 - RNA, 22 nt, Human
gggucccaggaaggagcagugu

SEQ ID NO: 836413 - RNA, 21 nt, Human
acagauauuucauugaacauu

SEQ ID NO: 836414 - RNA, 22 nt, Human
ccuccaggauaagucagggccu

SEQ ID NO: 836415 - RNA, 22 nt, Human
gguggguuuggaagagcaggcu

SEQ ID NO: 836416 - RNA, 18 nt, Human
cugagggcagccccuggg

SEQ ID NO: 836417 - RNA, 22 nt, Human
ggacucagcagccaggaguggc

SEQ ID NO: 836418 - RNA, 22 nt, Human
acuggaaaugagaugauaucag

SEQ ID NO: 836419 - RNA, 22 nt, Human
gagggggagaugugcacacacu

SEQ ID NO: 836420 - RNA, 22 nt, Human
gggcagcuguaucugagcuuau

SEQ ID NO: 836421 - RNA, 22 nt, Human
agccaacuaggagauuaaggua

SEQ ID NO: 836422 - RNA, 22 nt, Human
gcugguuagaaaacagagcuca

SEQ ID NO: 836423 - RNA, 22 nt, Human
acaggagaauuaucuggaacaa

SEQ ID NO: 836424 - RNA, 22 nt, Human
agcaggaaguagucuguaagca

SEQ ID NO: 836425 - RNA, 22 nt, Human
uaagaaauuuaguuauagaaug

SEQ ID NO: 836426 - RNA, 22 nt, Human
cagagccacugucugccaggca

SEQ ID NO: 836427 - RNA, 22 nt, Human
ucucuucuuguguuuuccugcc

SEQ ID NO: 836428 - RNA, 22 nt, Human
gaggagagaagcuaacggugcu

SEQ ID NO: 836429 - RNA, 22 nt, Human
cacuuaagcaguuaauuuaucu

SEQ ID NO: 836430 - RNA, 18 nt, Human
caguuuuuauaucuggca

SEQ ID NO: 836431 - RNA, 22 nt, Human
aguguuccugcucucaggaagc

SEQ ID NO: 836432 - RNA, 22 nt, Human
ucacauuuucuacuacuguacg

SEQ ID NO: 836433 - RNA, 22 nt, Human
ugggcugcccaagguggccaug

SEQ ID NO: 836434 - RNA, 22 nt, Human
guuucacagucugcagaauuuu

SEQ ID NO: 836435 - RNA, 22 nt, Human
aggagguggccugagcgugccc

SEQ ID NO: 836436 - RNA, 23 nt, Human
cagggaggagauacuguguaucu

SEQ ID NO: 836437 - RNA, 22 nt, Human
uaugauuuguagacauuugauu

SEQ ID NO: 836438 - RNA, 22 nt, Human
gcacagggccuggcacauaaga

SEQ ID NO: 836439 - RNA, 22 nt, Human
uccucugccaaagggaguugcc

SEQ ID NO: 836440 - RNA, 22 nt, Human
aauaacuucaguucuuacauua

SEQ ID NO: 836441 - RNA, 22 nt, Human
gggaguggauuauguggaccca

SEQ ID NO: 836442 - RNA, 22 nt, Human
uagcagggucucaggagucagg

SEQ ID NO: 836443 - RNA, 22 nt, Human
uugucuguaaagacggccacca

SEQ ID NO: 836444 - RNA, 22 nt, Human
uaucuuugcaaauaucucuaag

SEQ ID NO: 836445 - RNA, 22 nt, Human
aagauuauuuaagacaggaacc

SEQ ID NO: 836446 - RNA, 22 nt, Human
aaguuguauauaccgcuuuaag

SEQ ID NO: 836447 - RNA, 22 nt, Human
gaucagaaugggacauauccug

SEQ ID NO: 836448 - RNA, 22 nt, Human
uuuuaaguuaauauaauugagg

SEQ ID NO: 836449 - RNA, 22 nt, Human
uaguuacagcaggcaggauaua

SEQ ID NO: 836450 - RNA, 22 nt, Human
accacuguaucuccagcacauu

SEQ ID NO: 836451 - RNA, 22 nt, Human
ucacuugccuagcccaguucag

SEQ ID NO: 836452 - RNA, 22 nt, Human
cuggcagcucuacucagagccu

SEQ ID NO: 836453 - RNA, 22 nt, Human
uggagagguugaauaacuuguc

SEQ ID NO: 836454 - RNA, 22 nt, Human
cagugcaguuucccagaugcug

SEQ ID NO: 836455 - RNA, 22 nt, Human
acaagaauuuacauguagugga

SEQ ID NO: 836456 - RNA, 22 nt, Human
gagcuguccgccccugggccga

SEQ ID NO: 836457 - RNA, 23 nt, Human
auacauacagucuuacugacuuu

SEQ ID NO: 836458 - RNA, 22 nt, Human
ugcuauaagaauuauauuacuc

SEQ ID NO: 836459 - RNA, 22 nt, Human
uggcaaggcugugggggcagag

SEQ ID NO: 836460 - RNA, 22 nt, Human
agcugggccugagcuggaagcu

SEQ ID NO: 836461 - RNA, 22 nt, Human
cagagccaggccugcccucuuu

SEQ ID NO: 836462 - RNA, 22 nt, Human
uuggcagugucugcaaaaugga

SEQ ID NO: 836463 - RNA, 23 nt, Human
acacaaggguaacugccagccau

SEQ ID NO: 836464 - RNA, 22 nt, Human
gguuauauaauucagugcuuuc

SEQ ID NO: 836465 - RNA, 22 nt, Human
uuguaugaggauagcaagaagc

SEQ ID NO: 836466 - RNA, 22 nt, Human
uccuuuccaugcuucuagaggc

SEQ ID NO: 836467 - RNA, 22 nt, Human
agcugccauggccugaauuuac

SEQ ID NO: 836468 - RNA, 22 nt, Human
cugacucuccucaagcauaaau

SEQ ID NO: 836469 - RNA, 22 nt, Human
uaguaucuauuaguaacaagag

SEQ ID NO: 836470 - RNA, 22 nt, Human
auggaaaggcuguggaaacuua

SEQ ID NO: 836471 - RNA, 22 nt, Human
cuggaagguuccucccagcucc

SEQ ID NO: 836472 - RNA, 22 nt, Human
ugcagaccucccauggcugccu

SEQ ID NO: 836473 - RNA, 22 nt, Human
gccucugcugcaagccugguug

SEQ ID NO: 836474 - RNA, 18 nt, Human
cuccagggaacucaguca

SEQ ID NO: 836475 - RNA, 22 nt, Human
gcucaggaaaacagucuaguaa

SEQ ID NO: 836476 - RNA, 22 nt, Human
cuggagccgcauggagcaggga

SEQ ID NO: 836477 - RNA, 22 nt, Human
gagacauggcaaaagcacuggu

SEQ ID NO: 836478 - RNA, 22 nt, Human
ugaaaugaagggcuuguucugg

SEQ ID NO: 836479 - RNA, 22 nt, Human
cucugcugcccaggccugcuag

SEQ ID NO: 836480 - RNA, 22 nt, Human
aacagaauaguugauguacagu

SEQ ID NO: 836481 - RNA, 22 nt, Human
ucugccuugagguccucagcuc

SEQ ID NO: 836482 - RNA, 22 nt, Human
ggcagggaggaggugaaaguga

SEQ ID NO: 836483 - RNA, 22 nt, Human
ugggagcucagaaagggagguc

SEQ ID NO: 836484 - RNA, 22 nt, Human
acaugucaauuuaguacucuua

SEQ ID NO: 836485 - RNA, 22 nt, Human
uuucuucauagaccuugucuug

SEQ ID NO: 836486 - RNA, 22 nt, Human
cuguacaucucugaggacagua

SEQ ID NO: 836487 - RNA, 22 nt, Human
aaaguucuaaaacucuuuguga

SEQ ID NO: 836488 - RNA, 22 nt, Human
ugggcagaauugugguaguuaa

SEQ ID NO: 836489 - RNA, 22 nt, Human
acccaggacucucuuccaguag

SEQ ID NO: 836490 - RNA, 20 nt, Human
gccuggaggcaaugggaaga

SEQ ID NO: 836491 - RNA, 22 nt, Human
gauggggaugagaagugagcag

SEQ ID NO: 836492 - RNA, 22 nt, Human
uucucugagauagacuaagugg

SEQ ID NO: 836493 - RNA, 22 nt, Human
guugaguggguuaggaugcuga

SEQ ID NO: 836494 - RNA, 22 nt, Human
ggagcuggcuacagagaacucc

SEQ ID NO: 836495 - RNA, 22 nt, Human
gcagaggcuccauuuuacagau

SEQ ID NO: 836496 - RNA, 20 nt, Human
uauggcuuggcaaagcuuca

SEQ ID NO: 836497 - RNA, 22 nt, Human
uguccucacaggaaugaacuuu

SEQ ID NO: 836498 - RNA, 22 nt, Human
caggccugagacaucugagaua

SEQ ID NO: 836499 - RNA, 22 nt, Human
ggucacugcucuaaacaaaagu

SEQ ID NO: 836500 - RNA, 22 nt, Human
aaugagcuagaccugcuuccuc

SEQ ID NO: 836501 - RNA, 22 nt, Human
uacauugcuuucuaauacaucu

SEQ ID NO: 836502 - RNA, 18 nt, Human
cagaugagaugcaaucuc

SEQ ID NO: 836503 - RNA, 22 nt, Human
uggcucaggguccccaaauggu

SEQ ID NO: 836504 - RNA, 22 nt, Human
uccagaauacucugaaaucauu

SEQ ID NO: 836505 - RNA, 17 nt, Human
agguauaaaaugguagc

SEQ ID NO: 836506 - RNA, 22 nt, Human
aagcuuccugaaugcucauuua

SEQ ID NO: 836507 - RNA, 22 nt, Human
caggugggagccacagcguaca

SEQ ID NO: 836508 - RNA, 22 nt, Human
agcaccugucacaagcagaagg

SEQ ID NO: 836509 - RNA, 21 nt, Human
uucucagagucuauuacaguu

SEQ ID NO: 836510 - RNA, 22 nt, Human
gcuuuggaugugugccugaggu

SEQ ID NO: 836511 - RNA, 22 nt, Human
agguaggggguuugggaacugc

SEQ ID NO: 836512 - RNA, 21 nt, Human
aaagaacaggcagauguucuu

SEQ ID NO: 836513 - RNA, 22 nt, Human
uggcugaaggaagauucuucua

SEQ ID NO: 836514 - RNA, 22 nt, Human
cugguccuugacgcgugggagg

SEQ ID NO: 836515 - RNA, 22 nt, Human
ucaggggacuuaggagagaagu

SEQ ID NO: 836516 - RNA, 22 nt, Human
caucagaauuacuuggggagcu

SEQ ID NO: 836517 - RNA, 22 nt, Human
cagcuuccauaagagauggaga

SEQ ID NO: 836518 - RNA, 17 nt, Human
cucagaguugcuuuguc

SEQ ID NO: 836519 - RNA, 22 nt, Human
aagggcuggcccugggaagagu

SEQ ID NO: 836520 - RNA, 22 nt, Human
cugaggccucucuccugggcuu

SEQ ID NO: 836521 - RNA, 22 nt, Human
uccagcagguuggucaggugca

SEQ ID NO: 836522 - RNA, 22 nt, Human
uauuugcaacauaaaacucuga

SEQ ID NO: 836523 - RNA, 22 nt, Human
agcccagguugaggcugcagug

SEQ ID NO: 836524 - RNA, 22 nt, Human
cugaggcucccucgggucugcu

SEQ ID NO: 836525 - RNA, 22 nt, Human
cacagaggaaaggcaguuggua

SEQ ID NO: 836526 - RNA, 22 nt, Human
uuucagcugguaaaggaguagc

SEQ ID NO: 836527 - RNA, 22 nt, Human
cagcugaacauguagagcaucu

SEQ ID NO: 836528 - RNA, 22 nt, Human
ucaauucaauugaacaguuacu

SEQ ID NO: 836529 - RNA, 21 nt, Human
gcagccacugccuucaacaau

SEQ ID NO: 836530 - RNA, 22 nt, Human
gcccaggaucugcucagaucau

SEQ ID NO: 836531 - RNA, 22 nt, Human
ucugggcagcagcagcuaguag

SEQ ID NO: 836532 - RNA, 22 nt, Human
ucucagagagaugaaacuucca

SEQ ID NO: 836533 - RNA, 17 nt, Human
cagacagauauccuggg

SEQ ID NO: 836534 - RNA, 22 nt, Human
uuuguaaaaggaggaagcaugg

SEQ ID NO: 836535 - RNA, 22 nt, Human
cucuggagggaggcugagcugg

SEQ ID NO: 836536 - RNA, 22 nt, Human
aaucauaauuguauacauucau

SEQ ID NO: 836537 - RNA, 22 nt, Human
gcugucugagaacaugguggaa

SEQ ID NO: 836538 - RNA, 20 nt, Human
cugggaggucuuccaaauca

SEQ ID NO: 836539 - RNA, 22 nt, Human
ugaaaugagauaauuuaagugc

SEQ ID NO: 836540 - RNA, 22 nt, Human
ccucuguccuggggaguggagc

SEQ ID NO: 836541 - RNA, 22 nt, Human
ggcaugcucuuuguccacagua

SEQ ID NO: 836542 - RNA, 22 nt, Human
augucacagucugacucaguga

SEQ ID NO: 836543 - RNA, 22 nt, Human
auucauucugaccucaagagaa

SEQ ID NO: 836544 - RNA, 22 nt, Human
gcaggcagagguggaggagaca

SEQ ID NO: 836545 - RNA, 22 nt, Human
ggcacugacacuagcauggcac

SEQ ID NO: 836546 - RNA, 20 nt, Human
uaacuuucuaugcuuucagc

SEQ ID NO: 836547 - RNA, 21 nt, Human
ucucuacacuuucacuaggcu

SEQ ID NO: 836548 - RNA, 22 nt, Human
caggcaggucagugaagaagga

SEQ ID NO: 836549 - RNA, 22 nt, Human
ucuggccaacaaaaacuaaguc

SEQ ID NO: 836550 - RNA, 22 nt, Human
aacugcuguggccuaguacuua

SEQ ID NO: 836551 - RNA, 23 nt, Human
augcucugggcugugggaccugc

SEQ ID NO: 836552 - RNA, 23 nt, Human
ucccagccucuucucuugcauac

SEQ ID NO: 836553 - RNA, 22 nt, Human
gcugucugcaagccaggaaaug

SEQ ID NO: 836554 - RNA, 22 nt, Human
uccucacaagcaagcacaggua

SEQ ID NO: 836555 - RNA, 22 nt, Human
ucugcuguucauucuuuuagcu

SEQ ID NO: 836556 - RNA, 22 nt, Human
guaacauaguuugugcuucauc

SEQ ID NO: 836557 - RNA, 17 nt, Human
caagagagaugacugga

SEQ ID NO: 836558 - RNA, 22 nt, Human
augcuguguggccaccuccaug

SEQ ID NO: 836559 - RNA, 22 nt, Human
cccaaggccucuccuuggcuug

SEQ ID NO: 836560 - RNA, 22 nt, Human
ggcuucuuccugugaacauguu

SEQ ID NO: 836561 - RNA, 22 nt, Human
ugaagccaucaggaagccagca

SEQ ID NO: 836562 - RNA, 17 nt, Human
agcagcuggcacaggag

SEQ ID NO: 836563 - RNA, 22 nt, Human
ccccuuccaggaagcagaaucg

SEQ ID NO: 836564 - RNA, 20 nt, Human
cagcugccuggcucugggau

SEQ ID NO: 836565 - RNA, 22 nt, Human
uuauuuucagcuaggaaagcca

SEQ ID NO: 836566 - RNA, 22 nt, Human
uucauucauuacgugccaggca

SEQ ID NO: 836567 - RNA, 22 nt, Human
aagggagacaguugugugagga

SEQ ID NO: 836568 - RNA, 22 nt, Human
agccuggagaggcgccauacac

SEQ ID NO: 836569 - RNA, 22 nt, Human
gccagcagguggagagaucaag

SEQ ID NO: 836570 - RNA, 22 nt, Human
uccaugagcuagggauucauca

SEQ ID NO: 836571 - RNA, 22 nt, Human
aaaaacugcaauuacuuuuguc

SEQ ID NO: 836572 - RNA, 22 nt, Human
cuggcuuuaacccuacaaaccu

SEQ ID NO: 836573 - RNA, 22 nt, Human
gaaaucugucuuuguuugaaua

SEQ ID NO: 836574 - RNA, 22 nt, Human
uuagaaaucugcugccaugcaa

SEQ ID NO: 836575 - RNA, 22 nt, Human
aaguguguauuguuuaugcugc

SEQ ID NO: 836576 - RNA, 22 nt, Human
ugcacauucacuuagguauugu

SEQ ID NO: 836577 - RNA, 22 nt, Human
auagaaauggcagcuggugcua

SEQ ID NO: 836578 - RNA, 22 nt, Human
uaugaacuagcugauuuaguuu

SEQ ID NO: 836579 - RNA, 18 nt, Human
ucugagggugcgggagcu

SEQ ID NO: 836580 - RNA, 22 nt, Human
uacucagagucauugcccuucu

SEQ ID NO: 836581 - RNA, 22 nt, Human
uccuauugguagacauuucugu

SEQ ID NO: 836582 - RNA, 22 nt, Human
ucucuucugaaaccugucuuua

SEQ ID NO: 836583 - RNA, 22 nt, Human
gaaagauauuuauuggcaacag

SEQ ID NO: 836584 - RNA, 22 nt, Human
gacagguggggaaacuaaggua

SEQ ID NO: 836585 - RNA, 22 nt, Human
aguuacaaccaugacacaagca

SEQ ID NO: 836586 - RNA, 22 nt, Human
ccuauugacaauucucuucucc

SEQ ID NO: 836587 - RNA, 22 nt, Human
uggcagcuauggucuaagggcc

SEQ ID NO: 836588 - RNA, 20 nt, Human
cagagacccaggcuucagcu

SEQ ID NO: 836589 - RNA, 22 nt, Human
gaggagggagcuggaagcucuu

SEQ ID NO: 836590 - RNA, 20 nt, Human
gaaguccuuucacucuuccc

SEQ ID NO: 836591 - RNA, 22 nt, Human
ccaucuccacugucccugucaa

SEQ ID NO: 836592 - RNA, 22 nt, Human
uggacagguugaguaggaggag

SEQ ID NO: 836593 - RNA, 22 nt, Human
ggugaggcagguggcugcugag

SEQ ID NO: 836594 - RNA, 22 nt, Human
agucugucugucacuucugcag

SEQ ID NO: 836595 - RNA, 22 nt, Human
aagauauacuauuaaguaccau

SEQ ID NO: 836596 - RNA, 22 nt, Human
uaugaguacaaggacucugucu

SEQ ID NO: 836597 - RNA, 22 nt, Human
ucaagaaagggcuucaccagga

SEQ ID NO: 836598 - RNA, 21 nt, Human
ccuccaggagcagagcccuga

SEQ ID NO: 836599 - RNA, 22 nt, Human
gagauucuguagucaggcaucu

SEQ ID NO: 836600 - RNA, 22 nt, Human
acaacaaaaucacuagucuucc

SEQ ID NO: 836601 - RNA, 20 nt, Human
auauguguacguguauacau

SEQ ID NO: 836602 - RNA, 23 nt, Human
cccaggaguuucacugcaaaggu

SEQ ID NO: 836603 - RNA, 22 nt, Human
aucaauucuuaggaaaauagcu

SEQ ID NO: 836604 - RNA, 22 nt, Human
cugggaaauggcuucgagcuca

SEQ ID NO: 836605 - RNA, 20 nt, Human
cccugagacaaaggaggggc

SEQ ID NO: 836606 - RNA, 22 nt, Human
aucagaaauugcuaccagugga

SEQ ID NO: 836607 - RNA, 21 nt, Human
agcugcuccagggagcucagg

SEQ ID NO: 836608 - RNA, 22 nt, Human
caauuucagaccuuuccuugga

SEQ ID NO: 836609 - RNA, 22 nt, Human
ugaggggagacagaguggacuc

SEQ ID NO: 836610 - RNA, 22 nt, Human
aggaccaacauagcagcagugg

SEQ ID NO: 836611 - RNA, 22 nt, Human
aaaagccaugcauaccuaagag

SEQ ID NO: 836612 - RNA, 22 nt, Human
cucagaagccuucagucuuggc

SEQ ID NO: 836613 - RNA, 22 nt, Human
cuuaggcagacugcugaugcag

SEQ ID NO: 836614 - RNA, 19 nt, Human
uggggccuccugucccugg

SEQ ID NO: 836615 - RNA, 22 nt, Human
cugggccagucucggccgcucu

SEQ ID NO: 836616 - RNA, 22 nt, Human
aacauauaaacucuuaaguuca

SEQ ID NO: 836617 - RNA, 20 nt, Human
ugaaaaggucaggagacaug

SEQ ID NO: 836618 - RNA, 22 nt, Human
uucuucaugcuguugcugcuug

SEQ ID NO: 836619 - RNA, 22 nt, Human
ugggccuguugggguugaguua

SEQ ID NO: 836620 - RNA, 22 nt, Human
acucuugucucaacuuuuguau

SEQ ID NO: 836621 - RNA, 22 nt, Human
caggguggcccuguggucucau

SEQ ID NO: 836622 - RNA, 21 nt, Human
auacuuugaauuacagccuug

SEQ ID NO: 836623 - RNA, 18 nt, Human
agaaggagcuaugggcag

SEQ ID NO: 836624 - RNA, 22 nt, Human
cccaaggcugcagugagcauga

SEQ ID NO: 836625 - RNA, 22 nt, Human
ucagaaauuuucucaguaguuc

SEQ ID NO: 836626 - RNA, 17 nt, Human
gcugacccuggagaagu

SEQ ID NO: 836627 - RNA, 22 nt, Human
cuugaauccaaaugggagauga

SEQ ID NO: 836628 - RNA, 22 nt, Human
gagccaggucgggccgcggcga

SEQ ID NO: 836629 - RNA, 22 nt, Human
acacacagguaaaggagccugg

SEQ ID NO: 836630 - RNA, 22 nt, Human
gcaagcugaugugauagugaaa

SEQ ID NO: 836631 - RNA, 22 nt, Human
ugacagggugauuaugagagcu

SEQ ID NO: 836632 - RNA, 22 nt, Human
uggggaggacgggcgccuuccu

SEQ ID NO: 836633 - RNA, 22 nt, Human
auguaagguucagaguauguga

SEQ ID NO: 836634 - RNA, 22 nt, Human
gaauuucaacaguccucaaaug

SEQ ID NO: 836635 - RNA, 22 nt, Human
acauuucugagcagggagcugu

SEQ ID NO: 836636 - RNA, 22 nt, Human
agcagagucugugugcacuuua

SEQ ID NO: 836637 - RNA, 22 nt, Human
agugugugcaugcauucgugca

SEQ ID NO: 836638 - RNA, 22 nt, Human
gucuucuuguuuugaaggaaau

SEQ ID NO: 836639 - RNA, 22 nt, Human
agagccaggcaggcaauguuga

SEQ ID NO: 836640 - RNA, 21 nt, Human
ugcugccaucaugcagagaug

SEQ ID NO: 836641 - RNA, 22 nt, Human
gggaggugauuaggaccaugua

SEQ ID NO: 836642 - RNA, 22 nt, Human
auaaaacuuauuagaauugugu

SEQ ID NO: 836643 - RNA, 22 nt, Human
ugaauaauuaugggaguccuaa

SEQ ID NO: 836644 - RNA, 21 nt, Human
ucccacucuaaauggacugaa

SEQ ID NO: 836645 - RNA, 22 nt, Human
gagaggcagaggccugaaaccg

SEQ ID NO: 836646 - RNA, 22 nt, Human
uggcucagccagcccuaggaac

SEQ ID NO: 836647 - RNA, 22 nt, Human
auggccuuagugaugauuaaua

SEQ ID NO: 836648 - RNA, 22 nt, Human
ucagccagcaucagcuaagugc

SEQ ID NO: 836649 - RNA, 22 nt, Human
uuggaaggcccugccuagcagg

SEQ ID NO: 836650 - RNA, 22 nt, Human
ccuggcagcuaagugcuuugag

SEQ ID NO: 836651 - RNA, 22 nt, Human
uugaaagggauauaucuuucug

SEQ ID NO: 836652 - RNA, 17 nt, Human
ugguggcuggagucagg

SEQ ID NO: 836653 - RNA, 22 nt, Human
agacaucagcuugugugcaggg

SEQ ID NO: 836654 - RNA, 22 nt, Human
aggucauuggggacuaucuccg

SEQ ID NO: 836655 - RNA, 22 nt, Human
ugaggccagucucaucacaggc

SEQ ID NO: 836656 - RNA, 22 nt, Human
gccuggucucuuucaugucagu

SEQ ID NO: 836657 - RNA, 22 nt, Human
caggcugaucagggcugggaug

SEQ ID NO: 836658 - RNA, 22 nt, Human
guagaaauagugguugacagga

SEQ ID NO: 836659 - RNA, 22 nt, Human
cauauaauguuugaagaugugg

SEQ ID NO: 836660 - RNA, 22 nt, Human
agcuggcuccagaaggagucgu

SEQ ID NO: 836661 - RNA, 21 nt, Human
acagcagggcuggcaugacag

SEQ ID NO: 836662 - RNA, 22 nt, Human
aguguuccacacaucuggggaa

SEQ ID NO: 836663 - RNA, 22 nt, Human
ccaggcaggcgauggugcagug

SEQ ID NO: 836664 - RNA, 22 nt, Human
auggaguucuuuaaauucacag

SEQ ID NO: 836665 - RNA, 20 nt, Human
ucucuucuggggagauaaaa

SEQ ID NO: 836666 - RNA, 22 nt, Human
acuuggcaaguaucuauaaagu

SEQ ID NO: 836667 - RNA, 22 nt, Human
ccagcuugaagaugugcugguu

SEQ ID NO: 836668 - RNA, 20 nt, Human
ccuaggcaugcugagucucc

SEQ ID NO: 836669 - RNA, 22 nt, Human
uacaguaaccagucuacuuaga

SEQ ID NO: 836670 - RNA, 22 nt, Human
cccaggagguguagcugcgugg

SEQ ID NO: 836671 - RNA, 22 nt, Human
ucugagggugggagaaggagcu

SEQ ID NO: 836672 - RNA, 22 nt, Human
uuugcauuuuagauuuaggccu

SEQ ID NO: 836673 - RNA, 22 nt, Human
ccaaagugcugggguuacaggc

SEQ ID NO: 836674 - RNA, 22 nt, Human
uuacagaaagguugugggauag

SEQ ID NO: 836675 - RNA, 22 nt, Human
ucagucuuugcuuaugacaaua

SEQ ID NO: 836676 - RNA, 22 nt, Human
cugcucugugguccaugagaca

SEQ ID NO: 836677 - RNA, 22 nt, Human
aggucacccguuugacuaucca

SEQ ID NO: 836678 - RNA, 22 nt, Human
ucuguucagguuucagagaacu

SEQ ID NO: 836679 - RNA, 22 nt, Human
auuacaguaacagcuacaaugc

SEQ ID NO: 836680 - RNA, 22 nt, Human
ugucaugccaccguuucccaga

SEQ ID NO: 836681 - RNA, 22 nt, Human
gagcagaugugugccaggaugc

SEQ ID NO: 836682 - RNA, 22 nt, Human
uucucagaauugacugggagca

SEQ ID NO: 836683 - RNA, 22 nt, Human
uuacaaagagugccagagugug

SEQ ID NO: 836684 - RNA, 21 nt, Human
caaguccuuugccaaagugcu

SEQ ID NO: 836685 - RNA, 22 nt, Human
cagagggcucaguccugcugga

SEQ ID NO: 836686 - RNA, 22 nt, Human
cauggcaggugcagauucugug

SEQ ID NO: 836687 - RNA, 22 nt, Human
gcccuuccaacccagagggcaa

SEQ ID NO: 836688 - RNA, 22 nt, Human
ggacuggccggcgcugaggccc

SEQ ID NO: 836689 - RNA, 22 nt, Human
caucuggcuagcuaucauugug

SEQ ID NO: 836690 - RNA, 22 nt, Human
gagcugcugguugcuggugccu

SEQ ID NO: 836691 - RNA, 22 nt, Human
acugaaggcuuaacucuuucau

SEQ ID NO: 836692 - RNA, 22 nt, Human
uacagaguggugagaucuuuug

SEQ ID NO: 836693 - RNA, 22 nt, Human
cccuggaguagcacugggucgc

SEQ ID NO: 836694 - RNA, 22 nt, Human
ucagccucucugaguccagacc

SEQ ID NO: 836695 - RNA, 22 nt, Human
gccucugcggggcccgagcccg

SEQ ID NO: 836696 - RNA, 22 nt, Human
auccuugagccaaugacugauu

SEQ ID NO: 836697 - RNA, 22 nt, Human
uucacagauuucccugcacaug

SEQ ID NO: 836698 - RNA, 22 nt, Human
acagguggccccgagggagugg

SEQ ID NO: 836699 - RNA, 22 nt, Human
uucuuguauauaaaaaucauuu

SEQ ID NO: 836700 - RNA, 22 nt, Human
uaaguaaauuuauaaugugauu

SEQ ID NO: 836701 - RNA, 22 nt, Human
ugaaacacugcgauaaaauccu

SEQ ID NO: 836702 - RNA, 22 nt, Human
ggcugcugcccaccccugcaug

SEQ ID NO: 836703 - RNA, 22 nt, Human
acauaauaggugccugaauauu

SEQ ID NO: 836704 - RNA, 22 nt, Human
agcuucuguucaucuuccaggc

SEQ ID NO: 836705 - RNA, 22 nt, Human
cucagagcaaugaacaugcaaa

SEQ ID NO: 836706 - RNA, 22 nt, Human
agcugccagcaaguuucaaaca

SEQ ID NO: 836707 - RNA, 22 nt, Human
uugcaauagccuuauuuccaaa

SEQ ID NO: 836708 - RNA, 22 nt, Human
ugcagccuugccuccucccagc

SEQ ID NO: 836709 - RNA, 22 nt, Human
cuacccaggcuuagagggcugg

SEQ ID NO: 836710 - RNA, 22 nt, Human
acaaaaagggagaugagguaga

SEQ ID NO: 836711 - RNA, 22 nt, Human
agugcuuucccugaaaccuucc

SEQ ID NO: 836712 - RNA, 22 nt, Human
agucuacaaagaaaaguuauug

SEQ ID NO: 836713 - RNA, 22 nt, Human
agcccaggaaucugcaucuuga

SEQ ID NO: 836714 - RNA, 22 nt, Human
gcugggagcccuggucugcucc

SEQ ID NO: 836715 - RNA, 19 nt, Human
ugcaggaggacugagcaga

SEQ ID NO: 836716 - RNA, 22 nt, Human
uagggcaggugaagaaaagcua

SEQ ID NO: 836717 - RNA, 22 nt, Human
cuuaacagauacaucugugguu

SEQ ID NO: 836718 - RNA, 18 nt, Human
ccgggcuuuggugacaca

SEQ ID NO: 836719 - RNA, 22 nt, Human
ccagggugagaaaaggcuggau

SEQ ID NO: 836720 - RNA, 22 nt, Human
gcugccaugguccaggcuccag

SEQ ID NO: 836721 - RNA, 20 nt, Human
cccugagaccagagagcagc

SEQ ID NO: 836722 - RNA, 22 nt, Human
ggaaagaccugagauaggaaua

SEQ ID NO: 836723 - RNA, 22 nt, Human
ugaaacaaauuuggaaaaucua

SEQ ID NO: 836724 - RNA, 22 nt, Human
gccucugcaugcucagcaccca

SEQ ID NO: 836725 - RNA, 22 nt, Human
agggcagcuaaggugcugacug

SEQ ID NO: 836726 - RNA, 22 nt, Human
cugcugggucuaugcaagugga

SEQ ID NO: 836727 - RNA, 22 nt, Human
gcuccugucuuggggcacuggc

SEQ ID NO: 836728 - RNA, 22 nt, Human
cauuuacagugagaguuuuuac

SEQ ID NO: 836729 - RNA, 22 nt, Human
ucacaccuguaaucccaggccu

SEQ ID NO: 836730 - RNA, 22 nt, Human
agaaugcaguuugaaauaaggu

SEQ ID NO: 836731 - RNA, 22 nt, Human
aagacuuucaaaccuauguuug

SEQ ID NO: 836732 - RNA, 22 nt, Human
gcacugaaaauguuggauucca

SEQ ID NO: 836733 - RNA, 22 nt, Human
cucaggauugugccuagggaga

SEQ ID NO: 836734 - RNA, 22 nt, Human
auugagaauccauuugagauga

SEQ ID NO: 836735 - RNA, 22 nt, Human
guggagccaggggcuguaggua

SEQ ID NO: 836736 - RNA, 16 nt, Human
uuuccaaagggcagcu

SEQ ID NO: 836737 - RNA, 22 nt, Human
ucuuuccuuagaauaauucuuu

SEQ ID NO: 836738 - RNA, 22 nt, Human
uaacagaagaugaaacuucuuu

SEQ ID NO: 836739 - RNA, 22 nt, Human
uaugaaaagguggccaauguag

SEQ ID NO: 836740 - RNA, 22 nt, Human
ucugucacucccugaugaugaa

SEQ ID NO: 836741 - RNA, 22 nt, Human
agagccuguuuugugggagaug

SEQ ID NO: 836742 - RNA, 22 nt, Human
gggccuccggggugagcugugg

SEQ ID NO: 836743 - RNA, 22 nt, Human
ggcaggugcucugugggccugg

SEQ ID NO: 836744 - RNA, 22 nt, Human
augaaaauugacagcggaagua

SEQ ID NO: 836745 - RNA, 22 nt, Human
augggugugaaaauggucaucu

SEQ ID NO: 836746 - RNA, 22 nt, Human
ccacugggcguuucuguccaau

SEQ ID NO: 836747 - RNA, 23 nt, Human
uacaugcuauaauuucacccuca

SEQ ID NO: 836748 - RNA, 22 nt, Human
uugaagcauuucuuugagcuuc

SEQ ID NO: 836749 - RNA, 22 nt, Human
uggucuuuaagguagcugucau

SEQ ID NO: 836750 - RNA, 22 nt, Human
uuuaggcagcuacauacuaacu

SEQ ID NO: 836751 - RNA, 22 nt, Human
agggcagagggugccucaccug

SEQ ID NO: 836752 - RNA, 22 nt, Human
cuguccugcaguugggggcagg

SEQ ID NO: 836753 - RNA, 22 nt, Human
auggcuuucucuaaugugguau

SEQ ID NO: 836754 - RNA, 22 nt, Human
uguaugaaaaggaauagauuga

SEQ ID NO: 836755 - RNA, 20 nt, Human
acugccuugguucaguaggu

SEQ ID NO: 836756 - RNA, 22 nt, Human
gacccaggguuucugcacaggg

SEQ ID NO: 836757 - RNA, 22 nt, Human
uuucuguagugugguauguagg

SEQ ID NO: 836758 - RNA, 22 nt, Human
ggagaugguggaagcuggugca

SEQ ID NO: 836759 - RNA, 23 nt, Human
caugccaguuugugcaggcagau

SEQ ID NO: 836760 - RNA, 22 nt, Human
cccaggucugugccagcucuga

SEQ ID NO: 836761 - RNA, 22 nt, Human
acagauauaaacuauaguagug

SEQ ID NO: 836762 - RNA, 23 nt, Human
aaguaacagggauaauagcaguu

SEQ ID NO: 836763 - RNA, 22 nt, Human
ggccucugcaacuggcuguggc

SEQ ID NO: 836764 - RNA, 22 nt, Human
ugugaaggcagcagcucugucc

SEQ ID NO: 836765 - RNA, 23 nt, Human
agccucuuuucuccugcccugca

SEQ ID NO: 836766 - RNA, 22 nt, Human
cuuauguacacacauauauugu

SEQ ID NO: 836767 - RNA, 22 nt, Human
ccagcagcucccucaggguccg

SEQ ID NO: 836768 - RNA, 17 nt, Human
agaacuguaguagcucc

SEQ ID NO: 836769 - RNA, 22 nt, Human
uagaaaugcccagauucugcua

SEQ ID NO: 836770 - RNA, 22 nt, Human
aagauucuacaguagguacauu

SEQ ID NO: 836771 - RNA, 22 nt, Human
aggaaaggccuuugcauuuggu

SEQ ID NO: 836772 - RNA, 22 nt, Human
gcagggacagggcagggccuuu

SEQ ID NO: 836773 - RNA, 22 nt, Human
uauuuguauuucaugcaguaaa

SEQ ID NO: 836774 - RNA, 22 nt, Human
uggagcagagaugguggccuuc

SEQ ID NO: 836775 - RNA, 22 nt, Human
ucccagccacagguguagcccu

SEQ ID NO: 836776 - RNA, 22 nt, Human
cugcccugucugcagccuggcu

SEQ ID NO: 836777 - RNA, 22 nt, Human
uucauacucacuccaauaacug

SEQ ID NO: 836778 - RNA, 22 nt, Human
aaaggugacacucugccagcug

SEQ ID NO: 836779 - RNA, 22 nt, Human
ugagaauuuucaguuucacuuu

SEQ ID NO: 836780 - RNA, 22 nt, Human
gccugggugucgaucacuagug

SEQ ID NO: 836781 - RNA, 22 nt, Human
ugaaguaacuguccaggaucca

SEQ ID NO: 836782 - RNA, 22 nt, Human
uuucaucuuccuuggcauaggu

SEQ ID NO: 836783 - RNA, 22 nt, Human
aggcacugcuucuaaguaggaa

SEQ ID NO: 836784 - RNA, 22 nt, Human
cugccagcucaaagcgcagcua

SEQ ID NO: 836785 - RNA, 23 nt, Human
uggaggaaacacaucagaagacc

SEQ ID NO: 836786 - RNA, 22 nt, Human
cuuaaagaguauuuaauauaau

SEQ ID NO: 836787 - RNA, 22 nt, Human
cuggccacuggagguggcaccc

SEQ ID NO: 836788 - RNA, 22 nt, Human
gccuucccacccugcgaggcug

SEQ ID NO: 836789 - RNA, 22 nt, Human
ccagcagagggucuuggccauu

SEQ ID NO: 836790 - RNA, 22 nt, Human
ugggccuguggcuuggcucuag

SEQ ID NO: 836791 - RNA, 22 nt, Human
ggcuucuccagguacugagcau

SEQ ID NO: 836792 - RNA, 22 nt, Human
ucucagagauuuuguuucccuu

SEQ ID NO: 836793 - RNA, 22 nt, Human
gucccauaaguagugcaacuug

SEQ ID NO: 836794 - RNA, 21 nt, Human
ugcaggaaagugcugcgaccc

SEQ ID NO: 836795 - RNA, 22 nt, Human
cuccugaguaguagcauuguca

SEQ ID NO: 836796 - RNA, 22 nt, Human
uuguaacacuuuucuauuaaua

SEQ ID NO: 836797 - RNA, 22 nt, Human
uucugaggcacuggcucuccca

SEQ ID NO: 836798 - RNA, 23 nt, Human
uugaaggagaaagcuuucuuggu

SEQ ID NO: 836799 - RNA, 22 nt, Human
uugaaucuauguauucagugua

SEQ ID NO: 836800 - RNA, 22 nt, Human
ucauugucuugauaugauuguc

SEQ ID NO: 836801 - RNA, 22 nt, Human
aaucacuuuucucuaauguagc

SEQ ID NO: 836802 - RNA, 22 nt, Human
cugcagccuccugggguacaug

SEQ ID NO: 836803 - RNA, 22 nt, Human
gggcagaggcucuggcccaucc

SEQ ID NO: 836804 - RNA, 22 nt, Human
gcccaggauucuuucuuccuua

SEQ ID NO: 836805 - RNA, 22 nt, Human
aguggcagagcaggugcuggaa

SEQ ID NO: 836806 - RNA, 22 nt, Human
aagggcaggagaagacggauau

SEQ ID NO: 836807 - RNA, 22 nt, Human
ugagccuggagucguggagggg

SEQ ID NO: 836808 - RNA, 22 nt, Human
agguggggccaaaugcuacagu

SEQ ID NO: 836809 - RNA, 22 nt, Human
uccaggagguaugaguggcccc

SEQ ID NO: 836810 - RNA, 21 nt, Human
guuugcaugaacaagucagcc

SEQ ID NO: 836811 - RNA, 22 nt, Human
acccaggaggcagagguugcag

SEQ ID NO: 836812 - RNA, 22 nt, Human
ugaggcagggaguuuaauuguc

SEQ ID NO: 836813 - RNA, 22 nt, Human
ucuuugcaggccaaauuguuaa

SEQ ID NO: 836814 - RNA, 22 nt, Human
auguaugagagauucuuuuauu

SEQ ID NO: 836815 - RNA, 22 nt, Human
uagcugccuagacagcuauagc

SEQ ID NO: 836816 - RNA, 17 nt, Human
ugcugccaagucccaac

SEQ ID NO: 836817 - RNA, 22 nt, Human
caguuauuaugaggucauuagg

SEQ ID NO: 836818 - RNA, 22 nt, Human
gaggagaggcuggacgcgguga

SEQ ID NO: 836819 - RNA, 18 nt, Human
uggagccauugccaccau

SEQ ID NO: 836820 - RNA, 22 nt, Human
ucauacaucuuguauaucuauc

SEQ ID NO: 836821 - RNA, 22 nt, Human
cuucuucaaccugaaaguuuca

SEQ ID NO: 836822 - RNA, 22 nt, Human
guggcugggcuccgagcggcuu

SEQ ID NO: 836823 - RNA, 22 nt, Human
cuucaagauauuucuagaauca

SEQ ID NO: 836824 - RNA, 22 nt, Human
uaacaguguggacuugagaucu

SEQ ID NO: 836825 - RNA, 22 nt, Human
aggcacugggggaugagcaagg

SEQ ID NO: 836826 - RNA, 22 nt, Human
aaauguauugcauaggauauuu

SEQ ID NO: 836827 - RNA, 22 nt, Human
agagacaggauaucugcucaug

SEQ ID NO: 836828 - RNA, 22 nt, Human
cuuccugcaggacagccaucug

SEQ ID NO: 836829 - RNA, 22 nt, Human
ggucagccuuggauuugguagc

SEQ ID NO: 836830 - RNA, 22 nt, Human
cacagaaguuucauagucucga

SEQ ID NO: 836831 - RNA, 21 nt, Human
ugaaaucugaugggacaaaug

SEQ ID NO: 836832 - RNA, 22 nt, Human
gagcucccaggccccagcaagg

SEQ ID NO: 836833 - RNA, 20 nt, Human
ugccagggccagcagaggcu

SEQ ID NO: 836834 - RNA, 22 nt, Human
ccuccugggcuccugucugcac

SEQ ID NO: 836835 - RNA, 22 nt, Human
agaacagcagcacgucaagcug

SEQ ID NO: 836836 - RNA, 22 nt, Human
guacauuucauuuaaaugaugu

SEQ ID NO: 836837 - RNA, 22 nt, Human
ugcucauuggcgaucugaggga

SEQ ID NO: 836838 - RNA, 22 nt, Human
cuggcugcaggaugaggcugcc

SEQ ID NO: 836839 - RNA, 22 nt, Human
ugggcaagucacuucugucuuu

SEQ ID NO: 836840 - RNA, 22 nt, Human
cucaggaggaggaaguucauug

SEQ ID NO: 836841 - RNA, 22 nt, Human
ugaugcuucacgcugaauaugc

SEQ ID NO: 836842 - RNA, 22 nt, Human
aacagacagaaaaaugugaucu

SEQ ID NO: 836843 - RNA, 22 nt, Human
ucagcugccccaguggccccag

SEQ ID NO: 836844 - RNA, 22 nt, Human
uaccuuuugcuuauuaugacac

SEQ ID NO: 836845 - RNA, 22 nt, Human
aaggcugagggcuguaccuggc

SEQ ID NO: 836846 - RNA, 22 nt, Human
uuauuccaguaaucucuguaau

SEQ ID NO: 836847 - RNA, 22 nt, Human
gggccugugcacaguucuguua

SEQ ID NO: 836848 - RNA, 22 nt, Human
aguuucauauuaccaugucacc

SEQ ID NO: 836849 - RNA, 22 nt, Human
gccggggcuggggagagacaug

SEQ ID NO: 836850 - RNA, 22 nt, Human
ugaggcagucacccccuccugc

SEQ ID NO: 836851 - RNA, 22 nt, Human
uuccuuagacagagguggucau

SEQ ID NO: 836852 - RNA, 22 nt, Human
caggcagcaucagucugcugua

SEQ ID NO: 836853 - RNA, 22 nt, Human
gccuccugaaaggaagagcucc

SEQ ID NO: 836854 - RNA, 22 nt, Human
aggagaguucacacuggucaga

SEQ ID NO: 836855 - RNA, 22 nt, Human
gccagcccagcuccaggggaaa

SEQ ID NO: 836856 - RNA, 22 nt, Human
uugaaaggcacaggcaccuggg

SEQ ID NO: 836857 - RNA, 22 nt, Human
cuuuacagaauaagaauacugg

SEQ ID NO: 836858 - RNA, 22 nt, Human
uuauacuuuauacuacaucauu

SEQ ID NO: 836859 - RNA, 22 nt, Human
uggcagcuagauaguguguuua

SEQ ID NO: 836860 - RNA, 22 nt, Human
ugggaggcuuccagaccuugcu

SEQ ID NO: 836861 - RNA, 22 nt, Human
agccuggauccuaggcucagcu

SEQ ID NO: 836862 - RNA, 22 nt, Human
gccuuccuuuuaccaccagcca

SEQ ID NO: 836863 - RNA, 22 nt, Human
aaagccauugaacuguacuuua

SEQ ID NO: 836864 - RNA, 22 nt, Human
uacaguagacaauguuaguaug

SEQ ID NO: 836865 - RNA, 22 nt, Human
uauaaaauucucaguuuggggu

SEQ ID NO: 836866 - RNA, 22 nt, Human
cugggaggcggagguuguagug

SEQ ID NO: 836867 - RNA, 22 nt, Human
uccagcagguccgagacaaguu

SEQ ID NO: 836868 - RNA, 23 nt, Human
uagaaugucauucaaugauaugg

SEQ ID NO: 836869 - RNA, 22 nt, Human
uuuucucuacaaaauaaccagc

SEQ ID NO: 836870 - RNA, 22 nt, Human
aaaguuuguuauaugauaagga

SEQ ID NO: 836871 - RNA, 22 nt, Human
aaaaguucccugguuagaaaag

SEQ ID NO: 836872 - RNA, 22 nt, Human
ggagcugcucagagccaguccc

SEQ ID NO: 836873 - RNA, 22 nt, Human
cagaggcaggaagaugggcagu

SEQ ID NO: 836874 - RNA, 22 nt, Human
augcugugucaccuuaggauuu

SEQ ID NO: 836875 - RNA, 22 nt, Human
cgaggcagaggcugaaacggcu

SEQ ID NO: 836876 - RNA, 22 nt, Human
cacauugaaaugacccaauaau

SEQ ID NO: 836877 - RNA, 22 nt, Human
acccugggcuuggccugcucag

SEQ ID NO: 836878 - RNA, 22 nt, Human
auucuccacacauccagaccuu

SEQ ID NO: 836879 - RNA, 22 nt, Human
uaucagaaugcagccaugugca

SEQ ID NO: 836880 - RNA, 22 nt, Human
agcaggugacagggcuguggug

SEQ ID NO: 836881 - RNA, 22 nt, Human
accaaggaguuugguauuuuag

SEQ ID NO: 836882 - RNA, 21 nt, Human
acagcauguuuguguguuugc

SEQ ID NO: 836883 - RNA, 22 nt, Human
ucaggauccauagacucccaaa

SEQ ID NO: 836884 - RNA, 23 nt, Human
gaguguucauagcaggcucuugc

SEQ ID NO: 836885 - RNA, 22 nt, Human
ucucuuucuauaugugagucuu

SEQ ID NO: 836886 - RNA, 22 nt, Human
cugccuggcauggagaagagaa

SEQ ID NO: 836887 - RNA, 22 nt, Human
aggcugcuuccuuacguggcug

SEQ ID NO: 836888 - RNA, 22 nt, Human
ucucugauguauaucagagaac

SEQ ID NO: 836889 - RNA, 22 nt, Human
ugaggcaggagguugagaacug

SEQ ID NO: 836890 - RNA, 19 nt, Human
uccccagcaccucugaguc

SEQ ID NO: 836891 - RNA, 22 nt, Human
cccaggagauaacguucccaag

SEQ ID NO: 836892 - RNA, 22 nt, Human
uauggcuugucuuuauaccagg

SEQ ID NO: 836893 - RNA, 22 nt, Human
gcccaggaagccaccgggaagu

SEQ ID NO: 836894 - RNA, 22 nt, Human
acaagagauuaucuacagauga

SEQ ID NO: 836895 - RNA, 22 nt, Human
cauucuuacacaauauuuuaau

SEQ ID NO: 836896 - RNA, 22 nt, Human
uugcaggauuuuagagaugaca

SEQ ID NO: 836897 - RNA, 22 nt, Human
uaaaugaagaaauggagauugu

SEQ ID NO: 836898 - RNA, 22 nt, Human
cuggggcuggugaggcaggcuc

SEQ ID NO: 836899 - RNA, 22 nt, Human
gcagacuguaucaaugucagua

SEQ ID NO: 836900 - RNA, 22 nt, Human
gugcccaggcccaaggcaccac

SEQ ID NO: 836901 - RNA, 22 nt, Human
accugagaaugggggcaugugu

SEQ ID NO: 836902 - RNA, 22 nt, Human
uucacagaauggcaaguuaugg

SEQ ID NO: 836903 - RNA, 19 nt, Human
ugggcuuccccagggcaga

SEQ ID NO: 836904 - RNA, 23 nt, Human
uugucugugcuuuuccaguugcu

SEQ ID NO: 836905 - RNA, 22 nt, Human
cauuucugauuacagaauacua

SEQ ID NO: 836906 - RNA, 22 nt, Human
agggcagcccuucugggagggc

SEQ ID NO: 836907 - RNA, 22 nt, Human
uugauacagcagccugugaucc

SEQ ID NO: 836908 - RNA, 23 nt, Human
guggagccacaucacaggcuccu

SEQ ID NO: 836909 - RNA, 21 nt, Human
ccugagggugguugugaagau

SEQ ID NO: 836910 - RNA, 22 nt, Human
aaaugcacagaggccagagagg

SEQ ID NO: 836911 - RNA, 23 nt, Human
ugggaguguugggaucucugcuc

SEQ ID NO: 836912 - RNA, 22 nt, Human
uuucaguuuccagcuuugucau

SEQ ID NO: 836913 - RNA, 17 nt, Human
ccaggugggaggugggg

SEQ ID NO: 836914 - RNA, 22 nt, Human
augcacgccccacacuggugug

SEQ ID NO: 836915 - RNA, 22 nt, Human
gaggcugcccaacuggagugga

SEQ ID NO: 836916 - RNA, 22 nt, Human
cgcugggcgccgaccugcuggc

SEQ ID NO: 836917 - RNA, 22 nt, Human
cugucaguaggcucccaucauu

SEQ ID NO: 836918 - RNA, 18 nt, Human
uucaccagugugaugggu

SEQ ID NO: 836919 - RNA, 22 nt, Human
gcuggccugggcagccugucgg

SEQ ID NO: 836920 - RNA, 22 nt, Human
ucgugucagaucagagguuccu

SEQ ID NO: 836921 - RNA, 17 nt, Human
caauuucauagguuuug

SEQ ID NO: 836922 - RNA, 22 nt, Human
agcccaagcauaggagggaggc

SEQ ID NO: 836923 - RNA, 22 nt, Human
cuacauuuggagaguauaggaa

SEQ ID NO: 836924 - RNA, 22 nt, Human
uguaugaaccuuuaauauagug

SEQ ID NO: 836925 - RNA, 22 nt, Human
acaugcuuccaaauuauguugg

SEQ ID NO: 836926 - RNA, 22 nt, Human
uuacuacugcuuuacuacuggg

SEQ ID NO: 836927 - RNA, 22 nt, Human
uaaauaugcauguauccuuauc

SEQ ID NO: 836928 - RNA, 22 nt, Human
aaaguauucuugacuguuuuuc

SEQ ID NO: 836929 - RNA, 17 nt, Human
uucucuuccuggauagu

SEQ ID NO: 836930 - RNA, 22 nt, Human
gcaggcagguggcaucuuguga

SEQ ID NO: 836931 - RNA, 19 nt, Human
gcugcuggcucuggcugga

SEQ ID NO: 836932 - RNA, 22 nt, Human
uucugucuguaaacuucucaau

SEQ ID NO: 836933 - RNA, 22 nt, Human
ugcauaauacguuuccuauaac

SEQ ID NO: 836934 - RNA, 22 nt, Human
agggccagcugaugagaaugag

SEQ ID NO: 836935 - RNA, 22 nt, Human
acauuucuugaugccucuguga

SEQ ID NO: 836936 - RNA, 22 nt, Human
ugaaccagagucuccagugguu

SEQ ID NO: 836937 - RNA, 20 nt, Human
cgugcugugaccuugagcau

SEQ ID NO: 836938 - RNA, 21 nt, Human
accaggcuugugggagggagc

SEQ ID NO: 836939 - RNA, 22 nt, Human
acuucucuucauagguggcaau

SEQ ID NO: 836940 - RNA, 22 nt, Human
aaguuuuccuguguccaagaug

SEQ ID NO: 836941 - RNA, 22 nt, Human
uggcucagccauucguguugcc

SEQ ID NO: 836942 - RNA, 23 nt, Human
gugagcagcccacuaggaaugcc

SEQ ID NO: 836943 - RNA, 22 nt, Human
uggcucagcuuuccccaucugg

SEQ ID NO: 836944 - RNA, 22 nt, Human
ggcaaggccuugcccagcauuc

SEQ ID NO: 836945 - RNA, 22 nt, Human
uuacaguaugaucaacuuuuca

SEQ ID NO: 836946 - RNA, 23 nt, Human
accaggagccaagaucucccugg

SEQ ID NO: 836947 - RNA, 22 nt, Human
ggacucuguuuuccugaucacu

SEQ ID NO: 836948 - RNA, 20 nt, Human
ucagggcaugggacagcccc

SEQ ID NO: 836949 - RNA, 22 nt, Human
ugucucaggcccaagccaguaa

SEQ ID NO: 836950 - RNA, 21 nt, Human
uccuccuucaaguccuggccu

SEQ ID NO: 836951 - RNA, 21 nt, Human
gugcuuuuccuuaauguucuu

SEQ ID NO: 836952 - RNA, 22 nt, Human
gccaggcaaauuaaggaaugca

SEQ ID NO: 836953 - RNA, 22 nt, Human
gucccuggggaaucagcuggag

SEQ ID NO: 836954 - RNA, 22 nt, Human
ugucucagaauggcucauaaua

SEQ ID NO: 836955 - RNA, 22 nt, Human
cugcugugcaggugccuaugau

SEQ ID NO: 836956 - RNA, 22 nt, Human
ugauuuccaaaaggcuucuaag

SEQ ID NO: 836957 - RNA, 22 nt, Human
cugcuguguuucugcuagaaaa

SEQ ID NO: 836958 - RNA, 22 nt, Human
guuauguaugagggaaugauua

SEQ ID NO: 836959 - RNA, 22 nt, Human
ggccaggagcaagccaggcucu

SEQ ID NO: 836960 - RNA, 22 nt, Human
aguuugaaauguuggcaauauu

SEQ ID NO: 836961 - RNA, 22 nt, Human
aaaugucuuucaauagagaaau

SEQ ID NO: 836962 - RNA, 22 nt, Human
aguaaaucagaccucauuaugu

SEQ ID NO: 836963 - RNA, 22 nt, Human
gcccagcuccucugcagacccu

SEQ ID NO: 836964 - RNA, 22 nt, Human
gggagggaaggaggcgccgugu

SEQ ID NO: 836965 - RNA, 20 nt, Human
agucccagaucaaauuucug

SEQ ID NO: 836966 - RNA, 22 nt, Human
uuugcauaagucauguccagug

SEQ ID NO: 836967 - RNA, 22 nt, Human
uuguaacagguacuaaauaacu

SEQ ID NO: 836968 - RNA, 22 nt, Human
agggucaggagacacuggcaac

SEQ ID NO: 836969 - RNA, 22 nt, Human
caaacuggcuaugggaaucuug

SEQ ID NO: 836970 - RNA, 22 nt, Human
cagucccaggguugguucagcu

SEQ ID NO: 836971 - RNA, 20 nt, Human
cugagcgucuaagaggugag

SEQ ID NO: 836972 - RNA, 17 nt, Human
agguggcugcugcgccu

SEQ ID NO: 836973 - RNA, 22 nt, Human
aauauuguuucaagaucacaga

SEQ ID NO: 836974 - RNA, 22 nt, Human
gcuugggauaugcugauguaaa

SEQ ID NO: 836975 - RNA, 22 nt, Human
uuccaaaggaauggggagcuau

SEQ ID NO: 836976 - RNA, 22 nt, Human
caguccuggggaccaggcugag

SEQ ID NO: 836977 - RNA, 22 nt, Human
auaaagauuuuuaggcauuucu

SEQ ID NO: 836978 - RNA, 22 nt, Human
ucccagagcccaaguuggagag

SEQ ID NO: 836979 - RNA, 22 nt, Human
cagagcagcagagcuuccaugg

SEQ ID NO: 836980 - RNA, 22 nt, Human
aaaugcacugaacacauguugu

SEQ ID NO: 836981 - RNA, 22 nt, Human
acucagaagauauaaugacuca

SEQ ID NO: 836982 - RNA, 20 nt, Human
cuuugccuauucucugccug

SEQ ID NO: 836983 - RNA, 22 nt, Human
aaaaucugcuuccuuuuacaga

SEQ ID NO: 836984 - RNA, 22 nt, Human
caguuucuucaucaguuaagca

SEQ ID NO: 836985 - RNA, 22 nt, Human
acaagauagcuuagaagauuca

SEQ ID NO: 836986 - RNA, 22 nt, Human
ugcagaaggccugacauugcac

SEQ ID NO: 836987 - RNA, 22 nt, Human
ucaggcuggaaugcaguggggc

SEQ ID NO: 836988 - RNA, 22 nt, Human
uggcagcacuugaacuugagcc

SEQ ID NO: 836989 - RNA, 22 nt, Human
gcuaggagauugagcucugaag

SEQ ID NO: 836990 - RNA, 22 nt, Human
cuacauuuuaauaagcugcuua

SEQ ID NO: 836991 - RNA, 22 nt, Human
aggagaggucucccuuccccag

SEQ ID NO: 836992 - RNA, 22 nt, Human
caaagugcuggaauuacaggug

SEQ ID NO: 836993 - RNA, 21 nt, Human
ggcagcguguggacaggaagg

SEQ ID NO: 836994 - RNA, 22 nt, Human
gccaggcauucuagaaguagug

SEQ ID NO: 836995 - RNA, 22 nt, Human
agaagccagcuucagcugcccg

SEQ ID NO: 836996 - RNA, 22 nt, Human
guguaugauuucaaauggcuag

SEQ ID NO: 836997 - RNA, 21 nt, Human
acagccugucaucucaugguc

SEQ ID NO: 836998 - RNA, 22 nt, Human
ccagauuugagcgucuuaaacc

SEQ ID NO: 836999 - RNA, 22 nt, Human
ugucauaacuuagugacaaauc

SEQ ID NO: 837000 - RNA, 22 nt, Human
aaagaacaauguggaaucuccu

SEQ ID NO: 837001 - RNA, 22 nt, Human
aagauguaucaguuaagucuuc

SEQ ID NO: 837002 - RNA, 22 nt, Human
uucuuccucagcagggcugccu

SEQ ID NO: 837003 - RNA, 22 nt, Human
ucuucauauauaaaguggaaua

SEQ ID NO: 837004 - RNA, 22 nt, Human
aggcuccuaucgcuuucagcaa

SEQ ID NO: 837005 - RNA, 22 nt, Human
uugguacaaugugcuagguagg

SEQ ID NO: 837006 - RNA, 22 nt, Human
cuggccuuuaaaaugaccuuau

SEQ ID NO: 837007 - RNA, 22 nt, Human
ggcagcuuccugagccagcagc

SEQ ID NO: 837008 - RNA, 20 nt, Human
agcauuugaaauaugacuau

SEQ ID NO: 837009 - RNA, 22 nt, Human
gucccugggaugcccuucuggg

SEQ ID NO: 837010 - RNA, 22 nt, Human
agagaacacgugcaucugcaau

SEQ ID NO: 837011 - RNA, 22 nt, Human
aggcagagcuggguuuugaaau

SEQ ID NO: 837012 - RNA, 22 nt, Human
cccuccagagcuugaccugcug

SEQ ID NO: 837013 - RNA, 22 nt, Human
cuaaucaucuuucucuuaaagc

SEQ ID NO: 837014 - RNA, 22 nt, Human
gggcuggcaucaguugccgaga

SEQ ID NO: 837015 - RNA, 22 nt, Human
agccucucuuucugguggcuaa

SEQ ID NO: 837016 - RNA, 22 nt, Human
agagcagcuggggcagagacca

SEQ ID NO: 837017 - RNA, 22 nt, Human
aacaguaucuuuuaucagaaau

SEQ ID NO: 837018 - RNA, 22 nt, Human
gaggauggaggugugagcuaug

SEQ ID NO: 837019 - RNA, 22 nt, Human
ucacuguaucauguugcacuua

SEQ ID NO: 837020 - RNA, 22 nt, Human
gcucuccaaacccuguggcuuu

SEQ ID NO: 837021 - RNA, 22 nt, Human
cagagacauucaguaaauuauc

SEQ ID NO: 837022 - RNA, 17 nt, Human
ugaaaucagcacccagg

SEQ ID NO: 837023 - RNA, 22 nt, Human
cucaaggacuuauucaugccug

SEQ ID NO: 837024 - RNA, 22 nt, Human
aggcagcuggaaaacuccaggc

SEQ ID NO: 837025 - RNA, 22 nt, Human
aacaucuuuuuguuugcugaaa

SEQ ID NO: 837026 - RNA, 19 nt, Human
gggaugggcccucacccuc

SEQ ID NO: 837027 - RNA, 22 nt, Human
ucccagggacugggcuaggcuu

SEQ ID NO: 837028 - RNA, 22 nt, Human
cacaagacuuauuuguguagaa

SEQ ID NO: 837029 - RNA, 22 nt, Human
ccaggguggcguagaugcuggg

SEQ ID NO: 837030 - RNA, 22 nt, Human
cugcugugcagacagacucucu

SEQ ID NO: 837031 - RNA, 22 nt, Human
cccaggaggcagauguugcagu

SEQ ID NO: 837032 - RNA, 18 nt, Human
ggccugaggauuucagca

SEQ ID NO: 837033 - RNA, 22 nt, Human
gcaggagaaaugaagauugggu

SEQ ID NO: 837034 - RNA, 22 nt, Human
gcucugugcaguucagggacac

SEQ ID NO: 837035 - RNA, 19 nt, Human
augauacaggugaaaauug

SEQ ID NO: 837036 - RNA, 22 nt, Human
uugcucaggcuuagagcuacua

SEQ ID NO: 837037 - RNA, 22 nt, Human
uaaauuguuuucuagaaguugu

SEQ ID NO: 837038 - RNA, 22 nt, Human
uucacauuugcccuuaugugug

SEQ ID NO: 837039 - RNA, 22 nt, Human
gcagugcuuuagucuguccuuu

SEQ ID NO: 837040 - RNA, 22 nt, Human
auugaaagagaauguagcucuu

SEQ ID NO: 837041 - RNA, 22 nt, Human
ugaacuccaaauacugcugauu

SEQ ID NO: 837042 - RNA, 22 nt, Human
gauuuccuagacauggggcaga

SEQ ID NO: 837043 - RNA, 22 nt, Human
gccagguggucuggcuccagag

SEQ ID NO: 837044 - RNA, 22 nt, Human
ucugccagaaguucugagagua

SEQ ID NO: 837045 - RNA, 22 nt, Human
uggccuggcucacagugagauu

SEQ ID NO: 837046 - RNA, 22 nt, Human
ccuugcugcgugcuagcacaga

SEQ ID NO: 837047 - RNA, 22 nt, Human
cauuucuguacauguuuuggug

SEQ ID NO: 837048 - RNA, 22 nt, Human
uuugcauuaucucacuuauaua

SEQ ID NO: 837049 - RNA, 22 nt, Human
uugcauuguugcaaugaaguau

SEQ ID NO: 837050 - RNA, 20 nt, Human
aagaaacuugaaaguacaag

SEQ ID NO: 837051 - RNA, 22 nt, Human
caaugugugcuuacaggccagu

SEQ ID NO: 837052 - RNA, 22 nt, Human
uguacaaugcugagguuugggg

SEQ ID NO: 837053 - RNA, 22 nt, Human
aggugcagcugacaccaugugg

SEQ ID NO: 837054 - RNA, 22 nt, Human
cuuaagaugaggucaugcuaua

SEQ ID NO: 837055 - RNA, 22 nt, Human
cugcugugacagcugccguguu

SEQ ID NO: 837056 - RNA, 22 nt, Human
uucauucugggcucuaaggaac

SEQ ID NO: 837057 - RNA, 22 nt, Human
uucaaugagcccggggccauag

SEQ ID NO: 837058 - RNA, 22 nt, Human
uuuaaaauuuagaccucuccac

SEQ ID NO: 837059 - RNA, 22 nt, Human
ccugaagcaaggguaggcaggu

SEQ ID NO: 837060 - RNA, 22 nt, Human
ucuuuaaugugauuguaauuau

SEQ ID NO: 837061 - RNA, 22 nt, Human
acagugcuggcuacaacccugg

SEQ ID NO: 837062 - RNA, 22 nt, Human
gcugccuuuuaaagccucgcuu

SEQ ID NO: 837063 - RNA, 22 nt, Human
cagcuacuccucccaugacuuc

SEQ ID NO: 837064 - RNA, 22 nt, Human
ccuucucuacuccugaugcaug

SEQ ID NO: 837065 - RNA, 22 nt, Human
caucugcuguuccuuggacuca

SEQ ID NO: 837066 - RNA, 22 nt, Human
ccucucauagucuguauccuuu

SEQ ID NO: 837067 - RNA, 22 nt, Human
ugccuggcaaugccagaagcca

SEQ ID NO: 837068 - RNA, 22 nt, Human
uauguguacaucugguugagca

SEQ ID NO: 837069 - RNA, 22 nt, Human
ugcagaaguauuccaggcccca

SEQ ID NO: 837070 - RNA, 21 nt, Human
uggcucugagccucauggcug

SEQ ID NO: 837071 - RNA, 22 nt, Human
uauguuaagugggauaaucaaa

SEQ ID NO: 837072 - RNA, 22 nt, Human
agugaaauggaugcugcuacug

SEQ ID NO: 837073 - RNA, 22 nt, Human
agagccagcauuugacacuggc

SEQ ID NO: 837074 - RNA, 22 nt, Human
ucccagccuuucuuuucugcug

SEQ ID NO: 837075 - RNA, 22 nt, Human
uuucagaugcaauuaauuuuca

SEQ ID NO: 837076 - RNA, 22 nt, Human
caaggagauaaaauguugagcu

SEQ ID NO: 837077 - RNA, 22 nt, Human
uuucagacagauucuucucagu

SEQ ID NO: 837078 - RNA, 22 nt, Human
ugaggcagcaauugauuauuca

SEQ ID NO: 837079 - RNA, 22 nt, Human
agcccagaggcugggcgugcau

SEQ ID NO: 837080 - RNA, 21 nt, Human
agagaagaggacuuucucaca

SEQ ID NO: 837081 - RNA, 22 nt, Human
gggcuggugaggcugcccugca

SEQ ID NO: 837082 - RNA, 22 nt, Human
gcugagcucccagcaguaucug

SEQ ID NO: 837083 - RNA, 22 nt, Human
cugggguggugcaggccucaug

SEQ ID NO: 837084 - RNA, 22 nt, Human
uuggcuuccaggaucucagcag

SEQ ID NO: 837085 - RNA, 22 nt, Human
uggaagcagugauucuugucug

SEQ ID NO: 837086 - RNA, 23 nt, Human
cucugcaggagagugggcagggc

SEQ ID NO: 837087 - RNA, 22 nt, Human
agaauuccuccucugggacacu

SEQ ID NO: 837088 - RNA, 22 nt, Human
ggcuggagauaugucuggaaca

SEQ ID NO: 837089 - RNA, 22 nt, Human
gcagccacuuugcaaccaagag

SEQ ID NO: 837090 - RNA, 22 nt, Human
ggaaggagggcggcaaugauga

SEQ ID NO: 837091 - RNA, 22 nt, Human
cccuggagcugcuugcauguug

SEQ ID NO: 837092 - RNA, 22 nt, Human
cgcagcagccccgugguaggug

SEQ ID NO: 837093 - RNA, 22 nt, Human
ggcucccugccuguccucaguc

SEQ ID NO: 837094 - RNA, 22 nt, Human
ugcagccaauucauucauucuu

SEQ ID NO: 837095 - RNA, 22 nt, Human
uuuaagagcuaguaugucauuu

SEQ ID NO: 837096 - RNA, 22 nt, Human
guuccaaacaagucauaaagua

SEQ ID NO: 837097 - RNA, 22 nt, Human
ggaggccaaggcagguggauca

SEQ ID NO: 837098 - RNA, 17 nt, Human
ugagcaguagaagaugc

SEQ ID NO: 837099 - RNA, 21 nt, Human
uguucacauggagcagaaugu

SEQ ID NO: 837100 - RNA, 22 nt, Human
ggcuccuguggcaagacagcuu

SEQ ID NO: 837101 - RNA, 22 nt, Human
agacuuugagcucuuagagaag

SEQ ID NO: 837102 - RNA, 23 nt, Human
ucugucacuuucugcuguggagu

SEQ ID NO: 837103 - RNA, 22 nt, Human
uuaugcuaagugcaacaagcca

SEQ ID NO: 837104 - RNA, 22 nt, Human
ugcugccucagcuuccugggcu

SEQ ID NO: 837105 - RNA, 22 nt, Human
uauaguaaaauuuucauuuaug

SEQ ID NO: 837106 - RNA, 22 nt, Human
aggccugaaggaagaugagcug

SEQ ID NO: 837107 - RNA, 22 nt, Human
aagagggcagcacagguggguc

SEQ ID NO: 837108 - RNA, 22 nt, Human
aggggcuggcuuaucugagagu

SEQ ID NO: 837109 - RNA, 22 nt, Human
ccauggcauuuuaugugucuua

SEQ ID NO: 837110 - RNA, 21 nt, Human
ucaaagcacauauuugcacau

SEQ ID NO: 837111 - RNA, 22 nt, Human
ucugcugcugagcacacuccua

SEQ ID NO: 837112 - RNA, 22 nt, Human
cugcucucuguuccccuggauc

SEQ ID NO: 837113 - RNA, 22 nt, Human
uuucaaauggagucgugaaaug

SEQ ID NO: 837114 - RNA, 22 nt, Human
ucaagauaccaccauuauaugu

SEQ ID NO: 837115 - RNA, 19 nt, Human
uccugggcugggccagguc

SEQ ID NO: 837116 - RNA, 22 nt, Human
uaauacagaaguguauuaaaau

SEQ ID NO: 837117 - RNA, 22 nt, Human
ugacaauacagagagagcaaaa

SEQ ID NO: 837118 - RNA, 22 nt, Human
ucccagaggcuccagucucuau

SEQ ID NO: 837119 - RNA, 22 nt, Human
aaaugcauuuuuaauuagaccc

SEQ ID NO: 837120 - RNA, 17 nt, Human
ucugccgacugccagcu

SEQ ID NO: 837121 - RNA, 22 nt, Human
caaacugagcaucagaaaguuu

SEQ ID NO: 837122 - RNA, 22 nt, Human
ccugcacuaccuggggcugcug

SEQ ID NO: 837123 - RNA, 22 nt, Human
aggcugcaggucugggucaugu

SEQ ID NO: 837124 - RNA, 22 nt, Human
aguuugaauugaaaugcagaug

SEQ ID NO: 837125 - RNA, 22 nt, Human
ccacugaggcaggcaguaucua

SEQ ID NO: 837126 - RNA, 23 nt, Human
ucugagagaacaaugccuccuau

SEQ ID NO: 837127 - RNA, 22 nt, Human
agggaagcuuguuacugagaag

SEQ ID NO: 837128 - RNA, 22 nt, Human
gagcugucucuauaugaaugcu

SEQ ID NO: 837129 - RNA, 22 nt, Human
gcaggaguuaggcgucguggau

SEQ ID NO: 837130 - RNA, 22 nt, Human
ucugucuccucugaggugccag

SEQ ID NO: 837131 - RNA, 22 nt, Human
aaucgguugaacccaggaagug

SEQ ID NO: 837132 - RNA, 22 nt, Human
cagagggagcccuccaggagca

SEQ ID NO: 837133 - RNA, 22 nt, Human
ugcugccaaaugcgagcucugu

SEQ ID NO: 837134 - RNA, 22 nt, Human
aggcaggugggucacuugaguc

SEQ ID NO: 837135 - RNA, 22 nt, Human
cuggccugaggccgccuucaga

SEQ ID NO: 837136 - RNA, 22 nt, Human
acuggcagcagcagcccuuggg

SEQ ID NO: 837137 - RNA, 22 nt, Human
cuuagaaaucgaacucagguua

SEQ ID NO: 837138 - RNA, 22 nt, Human
aagcuggcaauuaucaaaacug

SEQ ID NO: 837139 - RNA, 22 nt, Human
uguuuaagcugaugagguaucg

SEQ ID NO: 837140 - RNA, 22 nt, Human
cccagacauaacagcagagagg

SEQ ID NO: 837141 - RNA, 22 nt, Human
aggaggggcaaugauagucugg

SEQ ID NO: 837142 - RNA, 22 nt, Human
gcuuccuagaucugugguacuc

SEQ ID NO: 837143 - RNA, 22 nt, Human
augguuuuagaaucaggaaaaa

SEQ ID NO: 837144 - RNA, 22 nt, Human
gcugcccucccagggcaagcuu

SEQ ID NO: 837145 - RNA, 22 nt, Human
uuacagaaggaacacuacucag

SEQ ID NO: 837146 - RNA, 22 nt, Human
uuucuucagccuucacaaccug

SEQ ID NO: 837147 - RNA, 22 nt, Human
aaguucaagaucaagguuccag

SEQ ID NO: 837148 - RNA, 22 nt, Human
cuacagaauucaacaaaugguu

SEQ ID NO: 837149 - RNA, 22 nt, Human
caaauucaaugaacauguuuaa

SEQ ID NO: 837150 - RNA, 22 nt, Human
aggcagagaaaaaccagauaug

SEQ ID NO: 837151 - RNA, 22 nt, Human
ccuggcagguggcgcccucggc

SEQ ID NO: 837152 - RNA, 22 nt, Human
aggcagcugaccacaguaugau

SEQ ID NO: 837153 - RNA, 22 nt, Human
cagguggguacaucacagagac

SEQ ID NO: 837154 - RNA, 22 nt, Human
cacccacccacugcucauuggc

SEQ ID NO: 837155 - RNA, 22 nt, Human
uuccaaacugccaauucagaag

SEQ ID NO: 837156 - RNA, 22 nt, Human
acaaagucacaauaauuaaccu

SEQ ID NO: 837157 - RNA, 22 nt, Human
cauguugaauggccuugauuuu

SEQ ID NO: 837158 - RNA, 22 nt, Human
uacaguuuguuacauuguuagu

SEQ ID NO: 837159 - RNA, 22 nt, Human
aggcggcugguguccugcaggu

SEQ ID NO: 837160 - RNA, 22 nt, Human
gcagagccaggcuggggcaggu

SEQ ID NO: 837161 - RNA, 20 nt, Human
aagauucauuguaauuaggg

SEQ ID NO: 837162 - RNA, 22 nt, Human
gagcagcugguaggugaaccca

SEQ ID NO: 837163 - RNA, 22 nt, Human
gagagcugcagccgagaggggg

SEQ ID NO: 837164 - RNA, 22 nt, Human
accaaggagacaaagguguauu

SEQ ID NO: 837165 - RNA, 22 nt, Human
ccaugagcuucaacugacacag

SEQ ID NO: 837166 - RNA, 20 nt, Human
aauaaacuacugagagaugu

SEQ ID NO: 837167 - RNA, 22 nt, Human
aaacagaaggguagguaaacau

SEQ ID NO: 837168 - RNA, 20 nt, Human
acagaaagagagaaugucag

SEQ ID NO: 837169 - RNA, 22 nt, Human
ccucucccacguggcagaggcu

SEQ ID NO: 837170 - RNA, 22 nt, Human
gcugccucugcgacucugggcg

SEQ ID NO: 837171 - RNA, 23 nt, Human
cauguacagaguuugauaaagug

SEQ ID NO: 837172 - RNA, 22 nt, Human
aguuugaaaguauugacagaag

SEQ ID NO: 837173 - RNA, 22 nt, Human
cccagagcugagucugauauau

SEQ ID NO: 837174 - RNA, 22 nt, Human
ucugucucaaguucuugcacuc

SEQ ID NO: 837175 - RNA, 22 nt, Human
ugggacaguuguccuccacucu

SEQ ID NO: 837176 - RNA, 22 nt, Human
ugaaaucuuagccauucugccu

SEQ ID NO: 837177 - RNA, 22 nt, Human
caggaguggugugagggacucc

SEQ ID NO: 837178 - RNA, 22 nt, Human
caacagucugguuuauauaaua

SEQ ID NO: 837179 - RNA, 22 nt, Human
uguagaaagaauauguuucaua

SEQ ID NO: 837180 - RNA, 22 nt, Human
ugagacaaccuaauuaaacacc

SEQ ID NO: 837181 - RNA, 18 nt, Human
caugucugcgccacaagg

SEQ ID NO: 837182 - RNA, 22 nt, Human
aacagaacccgagugugaaucu

SEQ ID NO: 837183 - RNA, 22 nt, Human
cuggcagcugcccgagaugccc

SEQ ID NO: 837184 - RNA, 22 nt, Human
guuccaaauuuggaucuuuagg

SEQ ID NO: 837185 - RNA, 19 nt, Human
gccugcagaaaaggcaggg

SEQ ID NO: 837186 - RNA, 22 nt, Human
agccaagcacucaacuccugga

SEQ ID NO: 837187 - RNA, 22 nt, Human
aaaguuuguugcuuacaaagaa

SEQ ID NO: 837188 - RNA, 22 nt, Human
uucaagaugccagggacgcggc

SEQ ID NO: 837189 - RNA, 23 nt, Human
cugcagucgccggccugggugcc

SEQ ID NO: 837190 - RNA, 22 nt, Human
uagaaagcuugggguguuuaaa

SEQ ID NO: 837191 - RNA, 20 nt, Human
gugaccagaagacagugggu

SEQ ID NO: 837192 - RNA, 20 nt, Human
gaaguccuguuauauccuuu

SEQ ID NO: 837193 - RNA, 19 nt, Human
aucugccuguuaucacaua

SEQ ID NO: 837194 - RNA, 22 nt, Human
augguuuacaauguuuucaguu

SEQ ID NO: 837195 - RNA, 22 nt, Human
uggaaagaaaaacaggccauga

SEQ ID NO: 837196 - RNA, 22 nt, Human
ucaaguguaguggugucagguc

SEQ ID NO: 837197 - RNA, 22 nt, Human
gcucccagggaccgcagggcag

SEQ ID NO: 837198 - RNA, 22 nt, Human
cagacagaaggcuccuugaggu

SEQ ID NO: 837199 - RNA, 22 nt, Human
gcuucccacagcuggacugggg

SEQ ID NO: 837200 - RNA, 22 nt, Human
cuggcucaccuccgcuccagca

SEQ ID NO: 837201 - RNA, 22 nt, Human
uggcagcuguuaauguuuuguu

SEQ ID NO: 837202 - RNA, 22 nt, Human
gccagggggucagcaggcacuu

SEQ ID NO: 837203 - RNA, 22 nt, Human
agggggcccuugcaggugagcg

SEQ ID NO: 837204 - RNA, 22 nt, Human
gaggagaggggcucccaagagc

SEQ ID NO: 837205 - RNA, 22 nt, Human
cuucucaaaguugugaaucagg

SEQ ID NO: 837206 - RNA, 22 nt, Human
ucaaaccaccuuguuacugggg

SEQ ID NO: 837207 - RNA, 22 nt, Human
ugcucccaaacgaccuacugug

SEQ ID NO: 837208 - RNA, 22 nt, Human
aagaggucauaccagauaaggg

SEQ ID NO: 837209 - RNA, 22 nt, Human
aucuagcaguguuauaauugga

SEQ ID NO: 837210 - RNA, 22 nt, Human
aaaaugugaucuacaaaugcaa

SEQ ID NO: 837211 - RNA, 22 nt, Human
uuucagacaggacuucauaugu

SEQ ID NO: 837212 - RNA, 22 nt, Human
agcucacaguguccuuccucaa

SEQ ID NO: 837213 - RNA, 22 nt, Human
ucuguucagacacuuuacaugu

SEQ ID NO: 837214 - RNA, 22 nt, Human
aagaacagauucagccugaacu

SEQ ID NO: 837215 - RNA, 22 nt, Human
ugacagggcuagaggcaaugca

SEQ ID NO: 837216 - RNA, 22 nt, Human
cagcccucagguccucagcagc

SEQ ID NO: 837217 - RNA, 22 nt, Human
guagggagcccagagcccagug

SEQ ID NO: 837218 - RNA, 22 nt, Human
ucugccugagggagcugaggaa

SEQ ID NO: 837219 - RNA, 22 nt, Human
ucuuugcaaauguuauuaucuu

SEQ ID NO: 837220 - RNA, 22 nt, Human
agaaaugaauauguagugguua

SEQ ID NO: 837221 - RNA, 22 nt, Human
gaggucaauaauaugugcuuua

SEQ ID NO: 837222 - RNA, 22 nt, Human
cagccaggacagggaaacuagu

SEQ ID NO: 837223 - RNA, 22 nt, Human
acauucuagaagucuuugcaau

SEQ ID NO: 837224 - RNA, 22 nt, Human
agucuugcauuuucugaagaug

SEQ ID NO: 837225 - RNA, 22 nt, Human
cagaaauguuuauauguggugu

SEQ ID NO: 837226 - RNA, 20 nt, Human
gcucccagccugcagucccc

SEQ ID NO: 837227 - RNA, 22 nt, Human
aggcugggaaauguagucuucc

SEQ ID NO: 837228 - RNA, 22 nt, Human
cuguauuuucaugccuacguac

SEQ ID NO: 837229 - RNA, 21 nt, Human
acauucacaggauauuaucau

SEQ ID NO: 837230 - RNA, 22 nt, Human
agccugccuugggcugcuugag

SEQ ID NO: 837231 - RNA, 22 nt, Human
auugcuuaucuaucuuuaaguc

SEQ ID NO: 837232 - RNA, 22 nt, Human
guucuaauauuuuaaaagccaa

SEQ ID NO: 837233 - RNA, 22 nt, Human
agaauucucuuccauugaaaca

SEQ ID NO: 837234 - RNA, 22 nt, Human
cugcccugaccugccucagagu

SEQ ID NO: 837235 - RNA, 22 nt, Human
ugcugaugaguccuucuaucgc

SEQ ID NO: 837236 - RNA, 22 nt, Human
cuccucacuuuccagacugggc

SEQ ID NO: 837237 - RNA, 22 nt, Human
agguuuucagcuguauccugag

SEQ ID NO: 837238 - RNA, 22 nt, Human
agcagccaaccuuacauucauc

SEQ ID NO: 837239 - RNA, 22 nt, Human
uuaagaauggaaugaggaauuu

SEQ ID NO: 837240 - RNA, 23 nt, Human
ugcucugugaauaguuggugacu

SEQ ID NO: 837241 - RNA, 22 nt, Human
uagcagcucacagccucccauu

SEQ ID NO: 837242 - RNA, 22 nt, Human
aaauauacuagaugaugaccca

SEQ ID NO: 837243 - RNA, 22 nt, Human
ucaaaugcacguagagaaaaua

SEQ ID NO: 837244 - RNA, 22 nt, Human
cugccuggaaugccagcuucuc

SEQ ID NO: 837245 - RNA, 22 nt, Human
ucaaaugcuucuacuccuaaga

SEQ ID NO: 837246 - RNA, 22 nt, Human
uucuccagaccuugugacuaug

SEQ ID NO: 837247 - RNA, 22 nt, Human
ucuuugcaaaauacaacaaugg

SEQ ID NO: 837248 - RNA, 22 nt, Human
uaguccuuacuuacuagaauaa

SEQ ID NO: 837249 - RNA, 22 nt, Human
ucaaaaguuucacauagagaua

SEQ ID NO: 837250 - RNA, 22 nt, Human
aaguccuuauguggaggggcua

SEQ ID NO: 837251 - RNA, 22 nt, Human
cagagcugcucaugguggccag

SEQ ID NO: 837252 - RNA, 22 nt, Human
ucagaggaccuuacugagaacc

SEQ ID NO: 837253 - RNA, 22 nt, Human
ugcugccuucuaggcgugcccu

SEQ ID NO: 837254 - RNA, 22 nt, Human
cugccacuuucacccagugcuc

SEQ ID NO: 837255 - RNA, 22 nt, Human
cugggccucauccucagaguuu

SEQ ID NO: 837256 - RNA, 22 nt, Human
caggccagguggcaggcaaaac

SEQ ID NO: 837257 - RNA, 22 nt, Human
agagggcagggcgguaaguccu

SEQ ID NO: 837258 - RNA, 22 nt, Human
cuuguauuccccuaucucuaaa

SEQ ID NO: 837259 - RNA, 17 nt, Human
ccagguggaaucgugga

SEQ ID NO: 837260 - RNA, 22 nt, Human
auacaaguugugauaauguaaa

SEQ ID NO: 837261 - RNA, 21 nt, Human
aaagugguaaggauuauuuug

SEQ ID NO: 837262 - RNA, 22 nt, Human
agucccagaucuccauucgguc

SEQ ID NO: 837263 - RNA, 22 nt, Human
gcugccuggagcucagccugcc

SEQ ID NO: 837264 - RNA, 22 nt, Human
gcuggaccaggugugcacaggc

SEQ ID NO: 837265 - RNA, 22 nt, Human
gcaggccugacuguagggggca

SEQ ID NO: 837266 - RNA, 22 nt, Human
acugucacuccaacugagucgu

SEQ ID NO: 837267 - RNA, 22 nt, Human
guacaaaguggaccugauagua

SEQ ID NO: 837268 - RNA, 22 nt, Human
uguaauggaagugggauugcau

SEQ ID NO: 837269 - RNA, 22 nt, Human
cagugguggaaugaggaauugu

SEQ ID NO: 837270 - RNA, 22 nt, Human
ugucagaacucuauugaugucc

SEQ ID NO: 837271 - RNA, 22 nt, Human
uggcugggggugcuauagcugc

SEQ ID NO: 837272 - RNA, 22 nt, Human
cugcccagaaucacucacucga

SEQ ID NO: 837273 - RNA, 22 nt, Human
cuucagaagaaaagcagugugu

SEQ ID NO: 837274 - RNA, 22 nt, Human
cuggcuccacucccugccugac

SEQ ID NO: 837275 - RNA, 22 nt, Human
agcuucuggaagccuggcagca

SEQ ID NO: 837276 - RNA, 19 nt, Human
acagggcagcaauaggaua

SEQ ID NO: 837277 - RNA, 22 nt, Human
cugucccucaucaccucugggu

SEQ ID NO: 837278 - RNA, 22 nt, Human
ggaagagggaaccacgacugua

SEQ ID NO: 837279 - RNA, 20 nt, Human
ugggcagcacugcuggcugg

SEQ ID NO: 837280 - RNA, 22 nt, Human
gccaggcuccccggaucccugg

SEQ ID NO: 837281 - RNA, 22 nt, Human
agaaaugacaagacugaucagg

SEQ ID NO: 837282 - RNA, 22 nt, Human
gugcagcugcaggagucagguc

SEQ ID NO: 837283 - RNA, 22 nt, Human
cugggcucagcccaugcugucc

SEQ ID NO: 837284 - RNA, 22 nt, Human
agaggggaggcgaaccagaguc

SEQ ID NO: 837285 - RNA, 22 nt, Human
aucacaggugguaggaaaagaa

SEQ ID NO: 837286 - RNA, 22 nt, Human
gccagagcacaggcugguagua

SEQ ID NO: 837287 - RNA, 22 nt, Human
aaaugcagaucccugaaucuca

SEQ ID NO: 837288 - RNA, 22 nt, Human
ucuuucaaugagcauucuuucc

SEQ ID NO: 837289 - RNA, 21 nt, Human
agccagcuaucacacagcauu

SEQ ID NO: 837290 - RNA, 22 nt, Human
gaggcagaggaagguggucucu

SEQ ID NO: 837291 - RNA, 22 nt, Human
uacacacaugcauuugccuuau

SEQ ID NO: 837292 - RNA, 22 nt, Human
gaaaucugcuucuugcauagua

SEQ ID NO: 837293 - RNA, 22 nt, Human
uaauuauuugaagacauuagag

SEQ ID NO: 837294 - RNA, 22 nt, Human
ucuuagaaguucauguuccagc

SEQ ID NO: 837295 - RNA, 22 nt, Human
acagccuguuugaucuggugcu

SEQ ID NO: 837296 - RNA, 22 nt, Human
aggcagcagccacaaggccuga

SEQ ID NO: 837297 - RNA, 20 nt, Human
cugggcagguguuugaucuc

SEQ ID NO: 837298 - RNA, 22 nt, Human
auuauauugaguauaaccagag

SEQ ID NO: 837299 - RNA, 22 nt, Human
agagcuuagaauuucagaugau

SEQ ID NO: 837300 - RNA, 20 nt, Human
uggagcugugguaaggagca

SEQ ID NO: 837301 - RNA, 22 nt, Human
aggagagcuggugucuggaauc

SEQ ID NO: 837302 - RNA, 22 nt, Human
uuccucuccucacaugagucac

SEQ ID NO: 837303 - RNA, 22 nt, Human
agaggcggagguugcagugagc

SEQ ID NO: 837304 - RNA, 22 nt, Human
auaaacagcuccauuuagugcc

SEQ ID NO: 837305 - RNA, 22 nt, Human
gcugccugcucggcuccuggga

SEQ ID NO: 837306 - RNA, 22 nt, Human
uauauguaaauaagucuaaugu

SEQ ID NO: 837307 - RNA, 22 nt, Human
ugggauggagccugaguauagu

SEQ ID NO: 837308 - RNA, 20 nt, Human
caggaggcaaggucaagguc

SEQ ID NO: 837309 - RNA, 22 nt, Human
uagggaugacgaaaggacagag

SEQ ID NO: 837310 - RNA, 22 nt, Human
cucccacuccuggcucaccaca

SEQ ID NO: 837311 - RNA, 19 nt, Human
agucccaggcccgaaagag

SEQ ID NO: 837312 - RNA, 22 nt, Human
gggcuggaggugagcaggacag

SEQ ID NO: 837313 - RNA, 22 nt, Human
gaaaauguuagcuucauaguca

SEQ ID NO: 837314 - RNA, 22 nt, Human
acugucugcaaaacucauacuc

SEQ ID NO: 837315 - RNA, 22 nt, Human
uccugcagagacagaggccuca

SEQ ID NO: 837316 - RNA, 22 nt, Human
ccuguucacuuugacuucucca

SEQ ID NO: 837317 - RNA, 22 nt, Human
aaugcacauaaauauggucuua

SEQ ID NO: 837318 - RNA, 22 nt, Human
aggcaggccccugagaauagac

SEQ ID NO: 837319 - RNA, 22 nt, Human
ugcacauuaguguuugagaugc

SEQ ID NO: 837320 - RNA, 22 nt, Human
uccacagaauguaagauccaca

SEQ ID NO: 837321 - RNA, 22 nt, Human
uacaagaaauuucugcauauau

SEQ ID NO: 837322 - RNA, 22 nt, Human
gccaccagguuagauccagccu

SEQ ID NO: 837323 - RNA, 22 nt, Human
gggcuggcucccagguguugaa

SEQ ID NO: 837324 - RNA, 22 nt, Human
aggagcugagggagcgcccuug

SEQ ID NO: 837325 - RNA, 22 nt, Human
ggcuucagugacuggugcccuc

SEQ ID NO: 837326 - RNA, 22 nt, Human
gaguggggcguggauccagcgu

SEQ ID NO: 837327 - RNA, 22 nt, Human
cuacauuaaauuggcuuacuua

SEQ ID NO: 837328 - RNA, 19 nt, Human
ugcagccacgugagagacu

SEQ ID NO: 837329 - RNA, 22 nt, Human
gaggucagucagaccaggguuu

SEQ ID NO: 837330 - RNA, 22 nt, Human
uugcauaaaugcuuaaaauuug

SEQ ID NO: 837331 - RNA, 22 nt, Human
aucagaauaauuagauuucaga

SEQ ID NO: 837332 - RNA, 22 nt, Human
augggaggcagacacuaaguuc

SEQ ID NO: 837333 - RNA, 22 nt, Human
uacuuguagcagguggcauuua

SEQ ID NO: 837334 - RNA, 19 nt, Human
uggagggguuugaaugugg

SEQ ID NO: 837335 - RNA, 22 nt, Human
caguacuuugcaucauuccacu

SEQ ID NO: 837336 - RNA, 22 nt, Human
ggugggcaggucacucugccuc

SEQ ID NO: 837337 - RNA, 22 nt, Human
gccugccuguuggcugaggugc

SEQ ID NO: 837338 - RNA, 22 nt, Human
uuguguccugauuugacacaau

SEQ ID NO: 837339 - RNA, 22 nt, Human
cccaggaggacauuccauaccc

SEQ ID NO: 837340 - RNA, 22 nt, Human
uuauguauggauggcugaaagu

SEQ ID NO: 837341 - RNA, 22 nt, Human
uauuuugucuucugcucaucac

SEQ ID NO: 837342 - RNA, 22 nt, Human
ggcagccauacucagaccuggg

SEQ ID NO: 837343 - RNA, 16 nt, Human
ugggcagaugagaaga

SEQ ID NO: 837344 - RNA, 22 nt, Human
uauggcuuuuuauucaucuuac

SEQ ID NO: 837345 - RNA, 22 nt, Human
gagcacaggcuuugguggacac

SEQ ID NO: 837346 - RNA, 22 nt, Human
uugaaauggaagugaaaauucu

SEQ ID NO: 837347 - RNA, 22 nt, Human
gaaggcugaugacagauucugc

SEQ ID NO: 837348 - RNA, 22 nt, Human
ccugccuggagcugagugugga

SEQ ID NO: 837349 - RNA, 21 nt, Human
gggcagaggggccuccugggu

SEQ ID NO: 837350 - RNA, 22 nt, Human
gcccacagcucguuccucuccu

SEQ ID NO: 837351 - RNA, 22 nt, Human
augugcuucauucuacaugaca

SEQ ID NO: 837352 - RNA, 22 nt, Human
ucuucccuaaucaccaucuuca

SEQ ID NO: 837353 - RNA, 22 nt, Human
gagcucaggagcaucagaagaa

SEQ ID NO: 837354 - RNA, 22 nt, Human
acagaaauuagcagugaguuua

SEQ ID NO: 837355 - RNA, 22 nt, Human
gagccaggcccguacuugcugu

SEQ ID NO: 837356 - RNA, 23 nt, Human
uccaugagaugugggcuucuagu

SEQ ID NO: 837357 - RNA, 22 nt, Human
uccuggaguauuucuguggugu

SEQ ID NO: 837358 - RNA, 22 nt, Human
ucauugcagaaauaaaggugaa

SEQ ID NO: 837359 - RNA, 22 nt, Human
gaguuauuuguagggauuauau

SEQ ID NO: 837360 - RNA, 22 nt, Human
agaucugaaucucauccgagga

SEQ ID NO: 837361 - RNA, 22 nt, Human
ugugcccauuacacagaggcau

SEQ ID NO: 837362 - RNA, 22 nt, Human
cugggcagagcuaacaccugag

SEQ ID NO: 837363 - RNA, 22 nt, Human
cuuauguauaauguuccacaua

SEQ ID NO: 837364 - RNA, 22 nt, Human
cucuggagcaccgggcuaucca

SEQ ID NO: 837365 - RNA, 22 nt, Human
auauaugcauguguacuuaugu

SEQ ID NO: 837366 - RNA, 22 nt, Human
cagggccacuguagaugaggag

SEQ ID NO: 837367 - RNA, 22 nt, Human
ucauacacaagagcauguaaca

SEQ ID NO: 837368 - RNA, 20 nt, Human
uauuuacaacuuagagccuc

SEQ ID NO: 837369 - RNA, 22 nt, Human
ugcaccugagaggucucugagg

SEQ ID NO: 837370 - RNA, 22 nt, Human
uucaugugaauauauuugucuu

SEQ ID NO: 837371 - RNA, 20 nt, Human
ggcagcaggaguuuccucuu

SEQ ID NO: 837372 - RNA, 22 nt, Human
caaaguccuagaacagugcuug

SEQ ID NO: 837373 - RNA, 19 nt, Human
accaggcuuauggucagug

SEQ ID NO: 837374 - RNA, 22 nt, Human
ccucuggucccagcucugcugc

SEQ ID NO: 837375 - RNA, 17 nt, Human
gagagcugcugcuuccg

SEQ ID NO: 837376 - RNA, 22 nt, Human
gagcagugggaaggaacagggu

SEQ ID NO: 837377 - RNA, 22 nt, Human
ugccuucaaucaggauggucuc

SEQ ID NO: 837378 - RNA, 22 nt, Human
cagaguguauucugcaguugca

SEQ ID NO: 837379 - RNA, 22 nt, Human
ccaggaaauagugcugugaucu

SEQ ID NO: 837380 - RNA, 22 nt, Human
agggcugccugcucugcauuga

SEQ ID NO: 837381 - RNA, 22 nt, Human
uaauuacagguccaaaacaauc

SEQ ID NO: 837382 - RNA, 22 nt, Human
gcaggagucacugacuuggucc

SEQ ID NO: 837383 - RNA, 22 nt, Human
cagggcuggcucaugaaaaguu

SEQ ID NO: 837384 - RNA, 22 nt, Human
aaauucuaugucaauguuuauu

SEQ ID NO: 837385 - RNA, 22 nt, Human
gggcagcugcagggauggugac

SEQ ID NO: 837386 - RNA, 22 nt, Human
agauguguuucuaguuccugca

SEQ ID NO: 837387 - RNA, 22 nt, Human
uauaagaaacaaggcaaauuuu

SEQ ID NO: 837388 - RNA, 22 nt, Human
gaugagggccugguggcugugc

SEQ ID NO: 837389 - RNA, 22 nt, Human
uggcauuuucuccuuugaguuu

SEQ ID NO: 837390 - RNA, 22 nt, Human
aucuuccuucacuuucucccac

SEQ ID NO: 837391 - RNA, 22 nt, Human
guuauauauaguauuucucuga

SEQ ID NO: 837392 - RNA, 22 nt, Human
caaaaugugagucccaccucaa

SEQ ID NO: 837393 - RNA, 22 nt, Human
uuccaguuaaggaagcuauucu

SEQ ID NO: 837394 - RNA, 20 nt, Human
agauggugaaggccagggag

SEQ ID NO: 837395 - RNA, 22 nt, Human
ggaggccaucagggagggcauu

SEQ ID NO: 837396 - RNA, 22 nt, Human
cugagacuuucaugugcuuuua

SEQ ID NO: 837397 - RNA, 22 nt, Human
gcccagcaccucucucaggguu

SEQ ID NO: 837398 - RNA, 22 nt, Human
gcugucacaaauauuucucagc

SEQ ID NO: 837399 - RNA, 22 nt, Human
ggagaggugaauggcugcucua

SEQ ID NO: 837400 - RNA, 22 nt, Human
agcaggaguguccccuggcugu

SEQ ID NO: 837401 - RNA, 22 nt, Human
auuugcauaauagugauuugua

SEQ ID NO: 837402 - RNA, 22 nt, Human
uuaucauugucgcagucuaauu

SEQ ID NO: 837403 - RNA, 22 nt, Human
cccuggagggcagacagaugcc

SEQ ID NO: 837404 - RNA, 22 nt, Human
uauuucuguaacucagggucug

SEQ ID NO: 837405 - RNA, 22 nt, Human
acacaggggcucggcugggugc

SEQ ID NO: 837406 - RNA, 22 nt, Human
cuggccuggagccucugggugg

SEQ ID NO: 837407 - RNA, 22 nt, Human
cacuggugacuucugagcugga

SEQ ID NO: 837408 - RNA, 22 nt, Human
ucagagguaagggcugagagga

SEQ ID NO: 837409 - RNA, 22 nt, Human
ugcugggcuugaaagcugcuaa

SEQ ID NO: 837410 - RNA, 22 nt, Human
aggcuuccuggaggaagaggua

SEQ ID NO: 837411 - RNA, 22 nt, Human
gcugggcugagcuagacuuggc

SEQ ID NO: 837412 - RNA, 22 nt, Human
uuaucguacgcuucagaaauuu

SEQ ID NO: 837413 - RNA, 22 nt, Human
aucagaaaguucaucauguuug

SEQ ID NO: 837414 - RNA, 22 nt, Human
ucgagucauguucucccauuaa

SEQ ID NO: 837415 - RNA, 22 nt, Human
cuuugaauuccaguacaauaac

SEQ ID NO: 837416 - RNA, 22 nt, Human
cugccucuguugggcauggucu

SEQ ID NO: 837417 - RNA, 22 nt, Human
uuucacauaaauauuaugccua

SEQ ID NO: 837418 - RNA, 22 nt, Human
aaggucauuguugcauguucuc

SEQ ID NO: 837419 - RNA, 22 nt, Human
uguuuuguuuaugagagcacag

SEQ ID NO: 837420 - RNA, 22 nt, Human
ucugauuagagcauucuugagu

SEQ ID NO: 837421 - RNA, 22 nt, Human
cagcaauauacacagucuaugg

SEQ ID NO: 837422 - RNA, 22 nt, Human
uugcucagcacuggagccagcu

SEQ ID NO: 837423 - RNA, 21 nt, Human
gggagcuggaaacugggugac

SEQ ID NO: 837424 - RNA, 22 nt, Human
aaaugucagaggaacauauuga

SEQ ID NO: 837425 - RNA, 22 nt, Human
ggcucaggccuguaauccuagc

SEQ ID NO: 837426 - RNA, 22 nt, Human
uuccaugacaccgagggaaguc

SEQ ID NO: 837427 - RNA, 22 nt, Human
gcccugggauuggguggaggcu

SEQ ID NO: 837428 - RNA, 22 nt, Human
ugcugcugaucauuuauagucu

SEQ ID NO: 837429 - RNA, 22 nt, Human
guuauguaugggggccuuauga

SEQ ID NO: 837430 - RNA, 22 nt, Human
gcccaggcuggagugcaguagc

SEQ ID NO: 837431 - RNA, 22 nt, Human
uauuucuucgggauucaagcua

SEQ ID NO: 837432 - RNA, 22 nt, Human
aggcacuggguaauuaguagcu

SEQ ID NO: 837433 - RNA, 22 nt, Human
uggcucugaucagauguccagu

SEQ ID NO: 837434 - RNA, 23 nt, Human
uuucuucagaagccuugcgaggc

SEQ ID NO: 837435 - RNA, 22 nt, Human
agucucagcaagcauggcuagu

SEQ ID NO: 837436 - RNA, 22 nt, Human
accugccucuaagcagcaggug

SEQ ID NO: 837437 - RNA, 20 nt, Human
aggcucagagcaguaguaca

SEQ ID NO: 837438 - RNA, 22 nt, Human
cccagacucaucccugggagcu

SEQ ID NO: 837439 - RNA, 22 nt, Human
aucuggguucaccaugcuccug

SEQ ID NO: 837440 - RNA, 22 nt, Human
cagcuggcguggagugauugca

SEQ ID NO: 837441 - RNA, 22 nt, Human
uuugaaguguuauuucuaucac

SEQ ID NO: 837442 - RNA, 22 nt, Human
gaaaugcaggcuuggauucagc

SEQ ID NO: 837443 - RNA, 18 nt, Human
uuucacaaccuccagagg

SEQ ID NO: 837444 - RNA, 22 nt, Human
gaugaggggucauuggcuggga

SEQ ID NO: 837445 - RNA, 17 nt, Human
cugagcauccgugcucu

SEQ ID NO: 837446 - RNA, 22 nt, Human
cccaugccuucugacucacagg

SEQ ID NO: 837447 - RNA, 22 nt, Human
agggggugcccagaugaaggau

SEQ ID NO: 837448 - RNA, 22 nt, Human
cagaguccuggacacagagaca

SEQ ID NO: 837449 - RNA, 22 nt, Human
aguagaauagauggauacuauu

SEQ ID NO: 837450 - RNA, 22 nt, Human
gcauucuuuuuaggagguuccu

SEQ ID NO: 837451 - RNA, 22 nt, Human
acuuauuagcugugugaccuug

SEQ ID NO: 837452 - RNA, 22 nt, Human
agugaguggguuacagauggga

SEQ ID NO: 837453 - RNA, 22 nt, Human
uagagcauuuagaggggcagga

SEQ ID NO: 837454 - RNA, 22 nt, Human
cugacagucucauugauuugcu

SEQ ID NO: 837455 - RNA, 22 nt, Human
gaaggaggugucaguuggacug

SEQ ID NO: 837456 - RNA, 19 nt, Human
cuggcagccugucuguguc

SEQ ID NO: 837457 - RNA, 22 nt, Human
uuccauaacugaccgaaugcau

SEQ ID NO: 837458 - RNA, 22 nt, Human
cuccucccugcgauugcucugc

SEQ ID NO: 837459 - RNA, 22 nt, Human
uggcagcucccagagcuuccaa

SEQ ID NO: 837460 - RNA, 22 nt, Human
uucugucacuuuuuuggaaucu

SEQ ID NO: 837461 - RNA, 22 nt, Human
gccuuuuuuguugcucugucac

SEQ ID NO: 837462 - RNA, 22 nt, Human
cugggccuuggauugacacugu

SEQ ID NO: 837463 - RNA, 22 nt, Human
cauuuccagcuccugcaucaug

SEQ ID NO: 837464 - RNA, 22 nt, Human
aaauguguauaugaaacaugau

SEQ ID NO: 837465 - RNA, 22 nt, Human
cugagccagcuggcaugugcua

SEQ ID NO: 837466 - RNA, 22 nt, Human
auuucacucucccugccacuua

SEQ ID NO: 837467 - RNA, 22 nt, Human
caugaaaauaacauuguuguga

SEQ ID NO: 837468 - RNA, 22 nt, Human
uucuuguauguaugcaaaauca

SEQ ID NO: 837469 - RNA, 22 nt, Human
uggcuuccugcacagugucugc

SEQ ID NO: 837470 - RNA, 22 nt, Human
ccccaggagauuugggagcaca

SEQ ID NO: 837471 - RNA, 22 nt, Human
ucaggagagagaaauuggggcu

SEQ ID NO: 837472 - RNA, 22 nt, Human
cagcugacccgugggaggcggg

SEQ ID NO: 837473 - RNA, 22 nt, Human
guggggggacguuggucacuuu

SEQ ID NO: 837474 - RNA, 22 nt, Human
ggcagcaugagccuggugaauu

SEQ ID NO: 837475 - RNA, 22 nt, Human
caugcugugugguuagaacugu

SEQ ID NO: 837476 - RNA, 22 nt, Human
guaacugaggcagcuuuuaaga

SEQ ID NO: 837477 - RNA, 22 nt, Human
caggccuggcugcagcucgccu

SEQ ID NO: 837478 - RNA, 22 nt, Human
ccugggcuggaguacagcagug

SEQ ID NO: 837479 - RNA, 22 nt, Human
augcacaagcaagagauaaugg

SEQ ID NO: 837480 - RNA, 22 nt, Human
acauuuaaauaugccuuauauu

SEQ ID NO: 837481 - RNA, 22 nt, Human
ccaggacuuuaaguccagcacu

SEQ ID NO: 837482 - RNA, 22 nt, Human
acagagcuuaauucaggagcuu

SEQ ID NO: 837483 - RNA, 22 nt, Human
aucaaaguuucccagaaguugu

SEQ ID NO: 837484 - RNA, 20 nt, Human
cugcugugguccuuuauuuu

SEQ ID NO: 837485 - RNA, 22 nt, Human
ugagauguaagguaugcuuacu

SEQ ID NO: 837486 - RNA, 22 nt, Human
ucagaaauacuaucagcuuuug

SEQ ID NO: 837487 - RNA, 22 nt, Human
gugcuuuccauccucccugcug

SEQ ID NO: 837488 - RNA, 23 nt, Human
ccuucagaagaaguaacaggggc

SEQ ID NO: 837489 - RNA, 20 nt, Human
cugagagucugugcuuaguc

SEQ ID NO: 837490 - RNA, 22 nt, Human
agugagggaugaagaacugcgg

SEQ ID NO: 837491 - RNA, 22 nt, Human
gugaauaacuuucuauguuaau

SEQ ID NO: 837492 - RNA, 22 nt, Human
gagccuggggacccuccugagu

SEQ ID NO: 837493 - RNA, 22 nt, Human
gccucccuguucuuccacaaua

SEQ ID NO: 837494 - RNA, 22 nt, Human
ugagccagccuugcagcugugc

SEQ ID NO: 837495 - RNA, 22 nt, Human
auucuucaucagagaugcacua

SEQ ID NO: 837496 - RNA, 22 nt, Human
ggggauggauuccgggucccug

SEQ ID NO: 837497 - RNA, 22 nt, Human
augugugccccuuuuacucuuu

SEQ ID NO: 837498 - RNA, 19 nt, Human
ugagaggcuuaaggcagcu

SEQ ID NO: 837499 - RNA, 22 nt, Human
agaauucuuggugguuagaaua

SEQ ID NO: 837500 - RNA, 22 nt, Human
agccuggauucgugcauccaca

SEQ ID NO: 837501 - RNA, 22 nt, Human
uauuccuaagucccaacuacau

SEQ ID NO: 837502 - RNA, 22 nt, Human
gcuuuguguagaaggaggaugg

SEQ ID NO: 837503 - RNA, 22 nt, Human
uaaaugugucuauggacccgcc

SEQ ID NO: 837504 - RNA, 22 nt, Human
aaucaguuaaauauugaguaca

SEQ ID NO: 837505 - RNA, 22 nt, Human
ccaggugggaggaaagcagaga

SEQ ID NO: 837506 - RNA, 22 nt, Human
aaaugugucauauucaaaguca

SEQ ID NO: 837507 - RNA, 22 nt, Human
caguacuuguccucagguguua

SEQ ID NO: 837508 - RNA, 22 nt, Human
auuaggcauucugaaugagguc

SEQ ID NO: 837509 - RNA, 22 nt, Human
auguuucaccagcaaauuaccu

SEQ ID NO: 837510 - RNA, 22 nt, Human
guguacauagaauugugcuuug

SEQ ID NO: 837511 - RNA, 22 nt, Human
gaggcaguguugaaaaggagag

SEQ ID NO: 837512 - RNA, 22 nt, Human
cagcagcuuugccaagucagcc

SEQ ID NO: 837513 - RNA, 22 nt, Human
caggugcuguccugcacauguc

SEQ ID NO: 837514 - RNA, 18 nt, Human
gaaaggagagacaguagg

SEQ ID NO: 837515 - RNA, 22 nt, Human
ccuguucagagcuaagcaucau

SEQ ID NO: 837516 - RNA, 22 nt, Human
acuccuggguugcaguccucaa

SEQ ID NO: 837517 - RNA, 22 nt, Human
gcagggcuguggacacuuuggu

SEQ ID NO: 837518 - RNA, 22 nt, Human
uuccuuaguugacugucuuagu

SEQ ID NO: 837519 - RNA, 22 nt, Human
guggcagcggcccaggccgucu

SEQ ID NO: 837520 - RNA, 22 nt, Human
uguuccaugucuuuguaggacu

SEQ ID NO: 837521 - RNA, 22 nt, Human
gcugucaccaaagcaggcacug

SEQ ID NO: 837522 - RNA, 22 nt, Human
guggguggaggcgucgagggca

SEQ ID NO: 837523 - RNA, 22 nt, Human
ggcugcugaguuggccaggaga

SEQ ID NO: 837524 - RNA, 22 nt, Human
agucagugaaggcauugcucaa

SEQ ID NO: 837525 - RNA, 22 nt, Human
aagggcuggccacauucugggu

SEQ ID NO: 837526 - RNA, 22 nt, Human
cccuggagugccggaaucaaga

SEQ ID NO: 837527 - RNA, 22 nt, Human
aggcagcauuugaauccagguc

SEQ ID NO: 837528 - RNA, 22 nt, Human
cccucugccugcgcccuggugu

SEQ ID NO: 837529 - RNA, 22 nt, Human
uaugcacacaggcuuaauucau

SEQ ID NO: 837530 - RNA, 22 nt, Human
uucaccacagucucaucuacgc

SEQ ID NO: 837531 - RNA, 22 nt, Human
gcugggcuugguuucccugcuu

SEQ ID NO: 837532 - RNA, 22 nt, Human
gauucugagcugguguuuuacg

SEQ ID NO: 837533 - RNA, 22 nt, Human
aguuacagugaccauuuauuua

SEQ ID NO: 837534 - RNA, 22 nt, Human
uauguacaguccuuaacuuaaa

SEQ ID NO: 837535 - RNA, 22 nt, Human
agucuuuccugcuugacuguuc

SEQ ID NO: 837536 - RNA, 22 nt, Human
ggccugcuuuccgagccugcag

SEQ ID NO: 837537 - RNA, 22 nt, Human
aggcacugauucucagaguuac

SEQ ID NO: 837538 - RNA, 22 nt, Human
aguauacauauauuagccuucg

SEQ ID NO: 837539 - RNA, 22 nt, Human
aaucugucguaguaaaaagcag

SEQ ID NO: 837540 - RNA, 22 nt, Human
uggccuggugucugcgaggccu

SEQ ID NO: 837541 - RNA, 22 nt, Human
uaacagaaguuguucauugugg

SEQ ID NO: 837542 - RNA, 22 nt, Human
cagggcugaaaucaagguguag

SEQ ID NO: 837543 - RNA, 22 nt, Human
ggcuucuguccucuggaucugu

SEQ ID NO: 837544 - RNA, 22 nt, Human
gccuuggccaacaccuugcaaa

SEQ ID NO: 837545 - RNA, 22 nt, Human
cucugagcugaaacaugagcau

SEQ ID NO: 837546 - RNA, 23 nt, Human
cagggcugguagggaagagcgug

SEQ ID NO: 837547 - RNA, 22 nt, Human
aggcagcuuuaacugguaguag

SEQ ID NO: 837548 - RNA, 22 nt, Human
caguggccugagccaggcuucc

SEQ ID NO: 837549 - RNA, 21 nt, Human
cccuugccugcacuccucggc

SEQ ID NO: 837550 - RNA, 22 nt, Human
gguggggccugcuccagcggcc

SEQ ID NO: 837551 - RNA, 22 nt, Human
uauaucauggagauuaacauuc

SEQ ID NO: 837552 - RNA, 17 nt, Human
ucugggcuucagugguc

SEQ ID NO: 837553 - RNA, 20 nt, Human
augcuuucuugugugcugcu

SEQ ID NO: 837554 - RNA, 20 nt, Human
cacaagagaauacacacugg

SEQ ID NO: 837555 - RNA, 22 nt, Human
cccagcacaggcaauuccauac

SEQ ID NO: 837556 - RNA, 22 nt, Human
ggaguuggugagcaccaggcuu

SEQ ID NO: 837557 - RNA, 19 nt, Human
cagagccucagagcuagaa

SEQ ID NO: 837558 - RNA, 22 nt, Human
uauuucuugaguggucaguuuc

SEQ ID NO: 837559 - RNA, 22 nt, Human
agugagaguauuaaugugaacu

SEQ ID NO: 837560 - RNA, 22 nt, Human
acuggagcccguggaggcgcag

SEQ ID NO: 837561 - RNA, 19 nt, Human
ucugaggguccagaugcau

SEQ ID NO: 837562 - RNA, 22 nt, Human
ggaggugggagacauaggcggc

SEQ ID NO: 837563 - RNA, 22 nt, Human
gaucuucucuuuaguagaaaca

SEQ ID NO: 837564 - RNA, 19 nt, Human
ggcugggucuggcagguuc

SEQ ID NO: 837565 - RNA, 22 nt, Human
cagagcugcaaaugccccuccg

SEQ ID NO: 837566 - RNA, 22 nt, Human
auuacaaucgagagaaacaaau

SEQ ID NO: 837567 - RNA, 22 nt, Human
uaaagguaacaugaacugcuuu

SEQ ID NO: 837568 - RNA, 22 nt, Human
guacauuuugagguuaaaacaa

SEQ ID NO: 837569 - RNA, 22 nt, Human
uucagcaagaccaccauguacc

SEQ ID NO: 837570 - RNA, 22 nt, Human
aggacagcaguuggugagguuc

SEQ ID NO: 837571 - RNA, 22 nt, Human
gcugagagcggccagcugggaa

SEQ ID NO: 837572 - RNA, 22 nt, Human
gagcugccugugugccaugaug

SEQ ID NO: 837573 - RNA, 22 nt, Human
cauuuccugucuggaggucaaa

SEQ ID NO: 837574 - RNA, 22 nt, Human
aggcaagcccccagugaggcuc

SEQ ID NO: 837575 - RNA, 22 nt, Human
ccacagcugaccgcaggugagc

SEQ ID NO: 837576 - RNA, 21 nt, Human
uggcagggguaguaguacagc

SEQ ID NO: 837577 - RNA, 22 nt, Human
aucuucaacuugaucauuugaa

SEQ ID NO: 837578 - RNA, 22 nt, Human
uagugcuuaacacaaagugauu

SEQ ID NO: 837579 - RNA, 22 nt, Human
uguaggaaaaacaaugaucugc

SEQ ID NO: 837580 - RNA, 22 nt, Human
augcucugggcaggagcccugg

SEQ ID NO: 837581 - RNA, 22 nt, Human
uugaauuauaagugugucuacu

SEQ ID NO: 837582 - RNA, 22 nt, Human
gcaggaugagugaguacauuua

SEQ ID NO: 837583 - RNA, 22 nt, Human
ccaggagguggagauugcagug

SEQ ID NO: 837584 - RNA, 22 nt, Human
aacaaauguaaaaugcagaugc

SEQ ID NO: 837585 - RNA, 22 nt, Human
gccugucugcagggcugucauu

SEQ ID NO: 837586 - RNA, 21 nt, Human
aggagggcacaaggccaggaa

SEQ ID NO: 837587 - RNA, 22 nt, Human
uucagaaguagcuaagcaguca

SEQ ID NO: 837588 - RNA, 22 nt, Human
cugcuggccuagcccauccucu

SEQ ID NO: 837589 - RNA, 20 nt, Human
gcugccuuguccugcuuggu

SEQ ID NO: 837590 - RNA, 22 nt, Human
ccccaggagaaaucuuaaacua

SEQ ID NO: 837591 - RNA, 22 nt, Human
ggaggagacaguaaaaagcacg

SEQ ID NO: 837592 - RNA, 22 nt, Human
gggcuccaacggugagcaugga

SEQ ID NO: 837593 - RNA, 22 nt, Human
agcagccacagcagaucugagu

SEQ ID NO: 837594 - RNA, 22 nt, Human
uggggugguaauacaccguucu

SEQ ID NO: 837595 - RNA, 22 nt, Human
acaugaaacuguugcauuagaa

SEQ ID NO: 837596 - RNA, 22 nt, Human
agaagauuuagguugacgcuau

SEQ ID NO: 837597 - RNA, 20 nt, Human
accuugaacccgccagccau

SEQ ID NO: 837598 - RNA, 22 nt, Human
ggcucugcuggauugaggccag

SEQ ID NO: 837599 - RNA, 22 nt, Human
gccaggcuggcaaaaggaaacc

SEQ ID NO: 837600 - RNA, 22 nt, Human
ucugggaaugaauaagaccugu

SEQ ID NO: 837601 - RNA, 22 nt, Human
cagaauuuagcacaauguaugg

SEQ ID NO: 837602 - RNA, 22 nt, Human
gugcccugaguggguaggagag

SEQ ID NO: 837603 - RNA, 22 nt, Human
auugcuguggaaauauaagaug

SEQ ID NO: 837604 - RNA, 22 nt, Human
ucauucuugaucacuaguuagu

SEQ ID NO: 837605 - RNA, 22 nt, Human
agcuuuauucaugauuucaggg

SEQ ID NO: 837606 - RNA, 22 nt, Human
ggcugccuucagacuccagcuu

SEQ ID NO: 837607 - RNA, 22 nt, Human
gggcagcuggccagguauucug

SEQ ID NO: 837608 - RNA, 22 nt, Human
gcccagcagaucucagugucuc

SEQ ID NO: 837609 - RNA, 22 nt, Human
ugcacagagagaugagacacgu

SEQ ID NO: 837610 - RNA, 22 nt, Human
uggccugggugcugcugacauc

SEQ ID NO: 837611 - RNA, 22 nt, Human
aucuaucccaguuuaacucauu

SEQ ID NO: 837612 - RNA, 22 nt, Human
aggcagguccccuggaaggcac

SEQ ID NO: 837613 - RNA, 22 nt, Human
ugagcuggucacuccuucugaa

SEQ ID NO: 837614 - RNA, 22 nt, Human
uuucuuauacuauauugucauc

SEQ ID NO: 837615 - RNA, 22 nt, Human
agcagcuucuuucacuccugga

SEQ ID NO: 837616 - RNA, 20 nt, Human
cagaggcaaggagacuugga

SEQ ID NO: 837617 - RNA, 20 nt, Human
cuggguggcaagcaaggggg

SEQ ID NO: 837618 - RNA, 22 nt, Human
gccuggaguagcauggcaagcc

SEQ ID NO: 837619 - RNA, 22 nt, Human
cuuagaaaugcagauucucagg

SEQ ID NO: 837620 - RNA, 22 nt, Human
auuauguagcuaaaaauugugu

SEQ ID NO: 837621 - RNA, 22 nt, Human
ugucucugcuuuccuugcaggg

SEQ ID NO: 837622 - RNA, 22 nt, Human
uagagcuggccgggacagcugg

SEQ ID NO: 837623 - RNA, 22 nt, Human
gcucccacaaccuucuugcucc

SEQ ID NO: 837624 - RNA, 22 nt, Human
aggcccuguuaugagccacugu

SEQ ID NO: 837625 - RNA, 22 nt, Human
cagaauaugacaagauuuuccu

SEQ ID NO: 837626 - RNA, 22 nt, Human
uaacagaauuugcuaaacuccg

SEQ ID NO: 837627 - RNA, 22 nt, Human
cuggccugaggucggcuguagg

SEQ ID NO: 837628 - RNA, 22 nt, Human
augcugugcuggcuaaccaugg

SEQ ID NO: 837629 - RNA, 22 nt, Human
gugggccuugcagggugcaggg

SEQ ID NO: 837630 - RNA, 22 nt, Human
ugaacagauggcccagcagagg

SEQ ID NO: 837631 - RNA, 22 nt, Human
agcaugcugguguucauggcag

SEQ ID NO: 837632 - RNA, 22 nt, Human
aagcugcccaagacugaagcau

SEQ ID NO: 837633 - RNA, 22 nt, Human
cauagcaacagcaucaagucaa

SEQ ID NO: 837634 - RNA, 22 nt, Human
cuuuaagacucugcucuuggug

SEQ ID NO: 837635 - RNA, 22 nt, Human
uccaugugccaaggggcagagg

SEQ ID NO: 837636 - RNA, 23 nt, Human
uuacagaaaguaugcuuuuguuu

SEQ ID NO: 837637 - RNA, 22 nt, Human
gagauuuagcugcuuaacuccu

SEQ ID NO: 837638 - RNA, 22 nt, Human
auucuaacacaugcucuaagaa

SEQ ID NO: 837639 - RNA, 22 nt, Human
cagagcagguaucuuuggugaa

SEQ ID NO: 837640 - RNA, 22 nt, Human
ugcagaagauggucugagcacc

SEQ ID NO: 837641 - RNA, 22 nt, Human
agucucagccacacagaccuau

SEQ ID NO: 837642 - RNA, 22 nt, Human
gaugcacuuucuuuucaacagu

SEQ ID NO: 837643 - RNA, 22 nt, Human
gcucucugggugugucuagaua

SEQ ID NO: 837644 - RNA, 22 nt, Human
uauguuuuucaagugcacacua

SEQ ID NO: 837645 - RNA, 22 nt, Human
caguggccaugguggcaggggu

SEQ ID NO: 837646 - RNA, 22 nt, Human
uaauguguccugaaagcuucug

SEQ ID NO: 837647 - RNA, 22 nt, Human
guucuaauuuggggcuccuuag

SEQ ID NO: 837648 - RNA, 22 nt, Human
uggcgugcccuccagacuuggc

SEQ ID NO: 837649 - RNA, 21 nt, Human
uuuuuucuugcgugaggccug

SEQ ID NO: 837650 - RNA, 22 nt, Human
gaggccugcagcguggucccug

SEQ ID NO: 837651 - RNA, 18 nt, Human
aggcaggugcuggaaguc

SEQ ID NO: 837652 - RNA, 22 nt, Human
ccaggagagcucuaaauggcug

SEQ ID NO: 837653 - RNA, 17 nt, Human
uggcagcugaaagcucu

SEQ ID NO: 837654 - RNA, 22 nt, Human
acaggagacccugcugguucug

SEQ ID NO: 837655 - RNA, 22 nt, Human
ggagugaaucacuagaugcaga

SEQ ID NO: 837656 - RNA, 22 nt, Human
aucuaagauguauugagcacuu

SEQ ID NO: 837657 - RNA, 22 nt, Human
acacagaaccucauagccucuc

SEQ ID NO: 837658 - RNA, 22 nt, Human
uuccuuagcugucccuggaaau

SEQ ID NO: 837659 - RNA, 22 nt, Human
uguuagaauauuguaauauucg

SEQ ID NO: 837660 - RNA, 22 nt, Human
auucuaggcuugaaacaugaag

SEQ ID NO: 837661 - RNA, 22 nt, Human
uccaggaggaggaaggcugcca

SEQ ID NO: 837662 - RNA, 22 nt, Human
aggcaggcucaaugcccagucu

SEQ ID NO: 837663 - RNA, 22 nt, Human
gcccucucuucugcagccucca

SEQ ID NO: 837664 - RNA, 22 nt, Human
cagagacaguuucacagggucu

SEQ ID NO: 837665 - RNA, 22 nt, Human
aguucacagccauguucaugug

SEQ ID NO: 837666 - RNA, 22 nt, Human
acaugauuuuuaaagagauaau

SEQ ID NO: 837667 - RNA, 22 nt, Human
uccuucagaggacggcagccag

SEQ ID NO: 837668 - RNA, 23 nt, Human
cuuuuaacuagaguaucagcugc

SEQ ID NO: 837669 - RNA, 22 nt, Human
ucuggcucaggucagacaggga

SEQ ID NO: 837670 - RNA, 22 nt, Human
gugcaggggaucagguugcagc

SEQ ID NO: 837671 - RNA, 22 nt, Human
ucagaauuugauuccugggaua

SEQ ID NO: 837672 - RNA, 19 nt, Human
guuuuucccagacgaggca

SEQ ID NO: 837673 - RNA, 22 nt, Human
cugagaaggaagccuccacucu

SEQ ID NO: 837674 - RNA, 19 nt, Human
ugccagcauuaggcugaag

SEQ ID NO: 837675 - RNA, 22 nt, Human
ggucuuccgagaggccugugcu

SEQ ID NO: 837676 - RNA, 22 nt, Human
agagccagguguagucucggag

SEQ ID NO: 837677 - RNA, 22 nt, Human
cccugcugucaggugcugggag

SEQ ID NO: 837678 - RNA, 22 nt, Human
cuuucucuguguuucacaugcu

SEQ ID NO: 837679 - RNA, 22 nt, Human
gugauugcccagcaccauuguu

SEQ ID NO: 837680 - RNA, 22 nt, Human
aacacaaagaagcugcaggauc

SEQ ID NO: 837681 - RNA, 22 nt, Human
ugaggccaaugacccugggcag

SEQ ID NO: 837682 - RNA, 22 nt, Human
gcucagagcuugaaguuccacu

SEQ ID NO: 837683 - RNA, 22 nt, Human
cgucccaguuccagccgcgcug

SEQ ID NO: 837684 - RNA, 18 nt, Human
gcucugcccaggcugccc

SEQ ID NO: 837685 - RNA, 22 nt, Human
guuuuuccugcugacuuggguc

SEQ ID NO: 837686 - RNA, 22 nt, Human
caggagagcccggguccgggcu

SEQ ID NO: 837687 - RNA, 22 nt, Human
acaugauuggacuccuuccccu

SEQ ID NO: 837688 - RNA, 22 nt, Human
cacaugggugugccuggaggaa

SEQ ID NO: 837689 - RNA, 22 nt, Human
gaauauuuuuaaagggacuaau

SEQ ID NO: 837690 - RNA, 22 nt, Human
cagggccucauccucagagauu

SEQ ID NO: 837691 - RNA, 21 nt, Human
augaagucuaugcuucugugu

SEQ ID NO: 837692 - RNA, 20 nt, Human
gcagagccucacugcaaggg

SEQ ID NO: 837693 - RNA, 22 nt, Human
acuuucuccagaaaaccaagga

SEQ ID NO: 837694 - RNA, 22 nt, Human
uguaugcuuuccaaaaaugcug

SEQ ID NO: 837695 - RNA, 20 nt, Human
uagauuucauacuucucuuu

SEQ ID NO: 837696 - RNA, 19 nt, Human
gccucugcuggggacaggc

SEQ ID NO: 837697 - RNA, 22 nt, Human
agggagcaugggugaagcaggc

SEQ ID NO: 837698 - RNA, 22 nt, Human
uuuguguuuguacaaugcacua

SEQ ID NO: 837699 - RNA, 22 nt, Human
aaugcacaaaaauuguauguaa

SEQ ID NO: 837700 - RNA, 22 nt, Human
guccuggggauacagaagugaa

SEQ ID NO: 837701 - RNA, 22 nt, Human
cugcaggcaucuaacugugggc

SEQ ID NO: 837702 - RNA, 22 nt, Human
ugggcagacauugaguuuguuc

SEQ ID NO: 837703 - RNA, 22 nt, Human
aauauaugagggagcuauuuga

SEQ ID NO: 837704 - RNA, 23 nt, Human
uggggcugauggagacggaccag

SEQ ID NO: 837705 - RNA, 22 nt, Human
cugucuguucagauucauuacu

SEQ ID NO: 837706 - RNA, 22 nt, Human
cagugcagccaaggacaggcac

SEQ ID NO: 837707 - RNA, 22 nt, Human
uggggugccgacagggagggca

SEQ ID NO: 837708 - RNA, 22 nt, Human
auguacauuuuccuaauguuuu

SEQ ID NO: 837709 - RNA, 22 nt, Human
ugacaaaacugcaauuacuuuu

SEQ ID NO: 837710 - RNA, 22 nt, Human
agcugagcacauucaaacaggu

SEQ ID NO: 837711 - RNA, 22 nt, Human
aagguacaccaaaguucaaguu

SEQ ID NO: 837712 - RNA, 22 nt, Human
ucugucaaaaguuuucaauaaa

SEQ ID NO: 837713 - RNA, 22 nt, Human
caucacugacgcugagauucca

SEQ ID NO: 837714 - RNA, 20 nt, Human
ggguggaguugcggucugug

SEQ ID NO: 837715 - RNA, 20 nt, Human
ucagaggcugccagcugggg

SEQ ID NO: 837716 - RNA, 22 nt, Human
ccacagggugucaucagcuuga

SEQ ID NO: 837717 - RNA, 18 nt, Human
aagcugcccucaggcagg

SEQ ID NO: 837718 - RNA, 22 nt, Human
ggccuugggaggagggucagaa

SEQ ID NO: 837719 - RNA, 19 nt, Human
gugaggauacugcucagag

SEQ ID NO: 837720 - RNA, 22 nt, Human
ccagaauuuggaucaugauuuu

SEQ ID NO: 837721 - RNA, 21 nt, Human
agggagcuuuagguagaaguu

SEQ ID NO: 837722 - RNA, 22 nt, Human
augcagcugucagggagaacau

SEQ ID NO: 837723 - RNA, 22 nt, Human
uuuccuuccuugcuagccugag

SEQ ID NO: 837724 - RNA, 22 nt, Human
aaucuggcauguaagcuuagag

SEQ ID NO: 837725 - RNA, 22 nt, Human
ggucccagcuggucacugucag

SEQ ID NO: 837726 - RNA, 22 nt, Human
aagggcaggugggcauuucugg

SEQ ID NO: 837727 - RNA, 22 nt, Human
acugucugcccugagaugccag

SEQ ID NO: 837728 - RNA, 22 nt, Human
gaaauguguuguucauuucuaa

SEQ ID NO: 837729 - RNA, 22 nt, Human
cugcuuuguaaaauagacauaa

SEQ ID NO: 837730 - RNA, 22 nt, Human
ggguggcuccuaugggcauagc

SEQ ID NO: 837731 - RNA, 22 nt, Human
gagccugaugaaacaggcagac

SEQ ID NO: 837732 - RNA, 22 nt, Human
ucucuggagcugcagauccagg

SEQ ID NO: 837733 - RNA, 21 nt, Human
agggcagauuagcuguaagag

SEQ ID NO: 837734 - RNA, 22 nt, Human
gccuggagcccaguguggggcu

SEQ ID NO: 837735 - RNA, 22 nt, Human
cccacucccugcacgccugccg

SEQ ID NO: 837736 - RNA, 22 nt, Human
cucagagaaaaggagcaagggu

SEQ ID NO: 837737 - RNA, 22 nt, Human
uggcugucagcugccuggugcg

SEQ ID NO: 837738 - RNA, 22 nt, Human
uacaaguaaauuguagauacca

SEQ ID NO: 837739 - RNA, 22 nt, Human
ggagaggagauuguggcauuuu

SEQ ID NO: 837740 - RNA, 22 nt, Human
gagcaggcauucuaguggcuga

SEQ ID NO: 837741 - RNA, 22 nt, Human
agcuacccgaggacaggcuaag

SEQ ID NO: 837742 - RNA, 22 nt, Human
gguuugcaugugauguugggca

SEQ ID NO: 837743 - RNA, 22 nt, Human
cccaggagaccuagaucuguuu

SEQ ID NO: 837744 - RNA, 22 nt, Human
uucugaaccauugagcacugcc

SEQ ID NO: 837745 - RNA, 22 nt, Human
ugccagaagauucucuaucaga

SEQ ID NO: 837746 - RNA, 22 nt, Human
ugauuaacugucuauuaaucau

SEQ ID NO: 837747 - RNA, 22 nt, Human
cucuggagguugagcccagcaa

SEQ ID NO: 837748 - RNA, 23 nt, Human
agccuucaggcaaugucaguaga

SEQ ID NO: 837749 - RNA, 22 nt, Human
aggccugaaguguggagugggg

SEQ ID NO: 837750 - RNA, 18 nt, Human
uccagcgugcuccagggc

SEQ ID NO: 837751 - RNA, 22 nt, Human
uuuuaaucaugcuucuaugucc

SEQ ID NO: 837752 - RNA, 22 nt, Human
ucuaggagaaccaucagggagg

SEQ ID NO: 837753 - RNA, 22 nt, Human
aagucaccccacacucuuggga

SEQ ID NO: 837754 - RNA, 22 nt, Human
gaaggccucacucugcagcaua

SEQ ID NO: 837755 - RNA, 22 nt, Human
cccuggaggucagaggccuggg

SEQ ID NO: 837756 - RNA, 22 nt, Human
aagauuuaccacuuuauucaag

SEQ ID NO: 837757 - RNA, 20 nt, Human
uaugaguauuacuuucagga

SEQ ID NO: 837758 - RNA, 22 nt, Human
ggggcuggcucacuaagagacu

SEQ ID NO: 837759 - RNA, 22 nt, Human
uaaaauguagcuucuaggcugg

SEQ ID NO: 837760 - RNA, 22 nt, Human
agcacaauagagcaguuaaaaa

SEQ ID NO: 837761 - RNA, 22 nt, Human
augguuuuucaaguauucagaa

SEQ ID NO: 837762 - RNA, 22 nt, Human
uccauguggccagacacuggca

SEQ ID NO: 837763 - RNA, 22 nt, Human
agcagccagaaauccagaggug

SEQ ID NO: 837764 - RNA, 22 nt, Human
ucucagggcagcaaggaagcau

SEQ ID NO: 837765 - RNA, 21 nt, Human
uugaagcaaggguggcucuga

SEQ ID NO: 837766 - RNA, 22 nt, Human
agcagagcgccugcucagaggg

SEQ ID NO: 837767 - RNA, 22 nt, Human
auaagagcuagucuuuuccuug

SEQ ID NO: 837768 - RNA, 22 nt, Human
gacucugcuacaggccgagguu

SEQ ID NO: 837769 - RNA, 22 nt, Human
agggcagaggcggacacggaag

SEQ ID NO: 837770 - RNA, 22 nt, Human
auacagaagccuguauuucugg

SEQ ID NO: 837771 - RNA, 22 nt, Human
gcaggugguccccguggagugg

SEQ ID NO: 837772 - RNA, 22 nt, Human
ugggcagaggacagggaagauc

SEQ ID NO: 837773 - RNA, 22 nt, Human
caggaucccuggccuccgccca

SEQ ID NO: 837774 - RNA, 22 nt, Human
caggaacagcaccaggagcuag

SEQ ID NO: 837775 - RNA, 22 nt, Human
cuuuccuagauggccaucuuuc

SEQ ID NO: 837776 - RNA, 22 nt, Human
auuuccaauuucauccaugucc

SEQ ID NO: 837777 - RNA, 22 nt, Human
aggcacugaagugguaaaugua

SEQ ID NO: 837778 - RNA, 22 nt, Human
ccaccagcagugugcaaggauu

SEQ ID NO: 837779 - RNA, 22 nt, Human
uugaaagacuucuccugugaaa

SEQ ID NO: 837780 - RNA, 18 nt, Human
aggaagcaggaggaaggc

SEQ ID NO: 837781 - RNA, 22 nt, Human
auucugucauuucaagaaaaac

SEQ ID NO: 837782 - RNA, 21 nt, Human
ucugucucuccacugcccugc

SEQ ID NO: 837783 - RNA, 17 nt, Human
cagugcagagcccuuuc

SEQ ID NO: 837784 - RNA, 22 nt, Human
agaaaugaagagagucaagguu

SEQ ID NO: 837785 - RNA, 22 nt, Human
gaaaauagcagauagaccaaug

SEQ ID NO: 837786 - RNA, 22 nt, Human
ccugggaggcggagguugcagg

SEQ ID NO: 837787 - RNA, 22 nt, Human
aaucaguuguucacucugaaaa

SEQ ID NO: 837788 - RNA, 19 nt, Human
gagaggccugugcuugaag

SEQ ID NO: 837789 - RNA, 22 nt, Human
aacagcagggggaccugcuggu

SEQ ID NO: 837790 - RNA, 22 nt, Human
uaggccaguggcagguugugug

SEQ ID NO: 837791 - RNA, 22 nt, Human
agagcagcugugacauggacag

SEQ ID NO: 837792 - RNA, 22 nt, Human
agaaguaggcagggcuguauca

SEQ ID NO: 837793 - RNA, 22 nt, Human
cacugaaggacaguaggaaggg

SEQ ID NO: 837794 - RNA, 22 nt, Human
gcauguguugguuuaugcaugu

SEQ ID NO: 837795 - RNA, 22 nt, Human
aaacagcugucauuguuuuaaa

SEQ ID NO: 837796 - RNA, 22 nt, Human
gaauuucacaaggugaggauaa

SEQ ID NO: 837797 - RNA, 22 nt, Human
gaggaggcuuccgggaggcacg

SEQ ID NO: 837798 - RNA, 22 nt, Human
ccagccuggagggcaguggugg

SEQ ID NO: 837799 - RNA, 17 nt, Human
auuucacuuagcaugag

SEQ ID NO: 837800 - RNA, 22 nt, Human
gugggggcaggcagugcuagga

SEQ ID NO: 837801 - RNA, 22 nt, Human
uuuauucaucaucuguucauau

SEQ ID NO: 837802 - RNA, 22 nt, Human
ggcaggagggcggacaaugacc

SEQ ID NO: 837803 - RNA, 22 nt, Human
cagacaugauguaagcagaggc

SEQ ID NO: 837804 - RNA, 18 nt, Human
ugcuuggagcauuuacca

SEQ ID NO: 837805 - RNA, 22 nt, Human
ccagccucacuggcaucaccua

SEQ ID NO: 837806 - RNA, 22 nt, Human
cugcucuguuaauuaaacuuug

SEQ ID NO: 837807 - RNA, 22 nt, Human
uacaugaacaaaauagcagaaa

SEQ ID NO: 837808 - RNA, 22 nt, Human
acagagcaguucuggagcuggc

SEQ ID NO: 837809 - RNA, 22 nt, Human
uguacaguguagucaugagguu

SEQ ID NO: 837810 - RNA, 22 nt, Human
gcugucuggaggcucugaggga

SEQ ID NO: 837811 - RNA, 22 nt, Human
ggagggaaugucuagcauucuu

SEQ ID NO: 837812 - RNA, 22 nt, Human
cagagcugucauuugccaguga

SEQ ID NO: 837813 - RNA, 22 nt, Human
ccacugaaggucaacauagagc

SEQ ID NO: 837814 - RNA, 22 nt, Human
gucuuuaugguaugaaaacuga

SEQ ID NO: 837815 - RNA, 22 nt, Human
uagaaucuaguucauucauuug

SEQ ID NO: 837816 - RNA, 22 nt, Human
ucucuucuugauuuucacugga

SEQ ID NO: 837817 - RNA, 22 nt, Human
caaaaguucucacccagacaug

SEQ ID NO: 837818 - RNA, 22 nt, Human
cuucagggugacgcaggcugca

SEQ ID NO: 837819 - RNA, 22 nt, Human
ggagcuguugcgcaugcgcucg

SEQ ID NO: 837820 - RNA, 22 nt, Human
aaauguaguauguugcauguau

SEQ ID NO: 837821 - RNA, 22 nt, Human
gcagggcucaacaggacacccc

SEQ ID NO: 837822 - RNA, 22 nt, Human
agaaaugaagcaggaguuauua

SEQ ID NO: 837823 - RNA, 22 nt, Human
agagaugaaaaguggagacugg

SEQ ID NO: 837824 - RNA, 22 nt, Human
cagguggggagaguguggagca

SEQ ID NO: 837825 - RNA, 22 nt, Human
acaaagucaaauugcagccgcc

SEQ ID NO: 837826 - RNA, 22 nt, Human
gcugucuucacuuccugguuuc

SEQ ID NO: 837827 - RNA, 22 nt, Human
uccuuugacuucuugcagucca

SEQ ID NO: 837828 - RNA, 22 nt, Human
ugagccuggguggucgaggcug

SEQ ID NO: 837829 - RNA, 22 nt, Human
agcugauuccacuuuuucccca

SEQ ID NO: 837830 - RNA, 22 nt, Human
aaaauuauggaguaucccaaag

SEQ ID NO: 837831 - RNA, 22 nt, Human
aaaagccaagguccucuucaga

SEQ ID NO: 837832 - RNA, 22 nt, Human
aucagaaauugcccagcuguuu

SEQ ID NO: 837833 - RNA, 22 nt, Human
ugggccuggagcccuggagagu

SEQ ID NO: 837834 - RNA, 19 nt, Human
agcagccauagacaauaug

SEQ ID NO: 837835 - RNA, 22 nt, Human
aaagaacaucggagugggcggg

SEQ ID NO: 837836 - RNA, 22 nt, Human
uuguccuuaccucaaucuggaa

SEQ ID NO: 837837 - RNA, 22 nt, Human
aagagagaacucccuucgccag

SEQ ID NO: 837838 - RNA, 22 nt, Human
aggcacugaagaacucuuuuug

SEQ ID NO: 837839 - RNA, 22 nt, Human
ccacagggcacaagggagguug

SEQ ID NO: 837840 - RNA, 22 nt, Human
guaaacauuuucaucugugccc

SEQ ID NO: 837841 - RNA, 22 nt, Human
gcaggguccauggaggcagccc

SEQ ID NO: 837842 - RNA, 22 nt, Human
agaggcggagcuugcagugagc

SEQ ID NO: 837843 - RNA, 22 nt, Human
gcuccuggucuggagcuucaag

SEQ ID NO: 837844 - RNA, 22 nt, Human
ucagggcauccauugccuguug

SEQ ID NO: 837845 - RNA, 21 nt, Human
ggggcagagcuaggcccugca

SEQ ID NO: 837846 - RNA, 22 nt, Human
gaaguacaguuuuaucuagcca

SEQ ID NO: 837847 - RNA, 22 nt, Human
gaauacauuggaaaucagaaua

SEQ ID NO: 837848 - RNA, 22 nt, Human
guuaggcagcccaagaugucag

SEQ ID NO: 837849 - RNA, 22 nt, Human
gcaucuuucuguccauucagca

SEQ ID NO: 837850 - RNA, 20 nt, Human
gcagcuacucugucucgcuc

SEQ ID NO: 837851 - RNA, 22 nt, Human
gguggccucucaugcaagguag

SEQ ID NO: 837852 - RNA, 22 nt, Human
aagacauugucauuuuauaauu

SEQ ID NO: 837853 - RNA, 22 nt, Human
cugagcuggucuauggacuugg

SEQ ID NO: 837854 - RNA, 22 nt, Human
ggaagaagggucauuggcagcc

SEQ ID NO: 837855 - RNA, 22 nt, Human
aagaauacguaucaacaauggu

SEQ ID NO: 837856 - RNA, 22 nt, Human
ugcuggccgugagcucucggga

SEQ ID NO: 837857 - RNA, 22 nt, Human
aguuagaauagucagauuguag

SEQ ID NO: 837858 - RNA, 22 nt, Human
ucugggaauuuauuggcacuuu

SEQ ID NO: 837859 - RNA, 22 nt, Human
cuauugaauagcccaaaucauu

SEQ ID NO: 837860 - RNA, 23 nt, Human
ugugaaauuugaggucagugcuu

SEQ ID NO: 837861 - RNA, 22 nt, Human
ggcagcucugaugaugcucugg

SEQ ID NO: 837862 - RNA, 22 nt, Human
auuuuucucuuuccacugagau

SEQ ID NO: 837863 - RNA, 22 nt, Human
aaugaugguuucaucacuugaa

SEQ ID NO: 837864 - RNA, 22 nt, Human
cuccuugguguaguacugagca

SEQ ID NO: 837865 - RNA, 20 nt, Human
auuucaguguuugcaauuuc

SEQ ID NO: 837866 - RNA, 22 nt, Human
uaaaugcagauuccugagccua

SEQ ID NO: 837867 - RNA, 22 nt, Human
uuugcauuguaauauuuaguuc

SEQ ID NO: 837868 - RNA, 22 nt, Human
ucacagggcauuauggcuccag

SEQ ID NO: 837869 - RNA, 22 nt, Human
uuccagaauuuuguucugcuug

SEQ ID NO: 837870 - RNA, 23 nt, Human
ccuggcuggauucucugcauuca

SEQ ID NO: 837871 - RNA, 22 nt, Human
uggagcagcaucacuuugagcu

SEQ ID NO: 837872 - RNA, 22 nt, Human
uuuccaauaaagugucauuguu

SEQ ID NO: 837873 - RNA, 23 nt, Human
uacuuaggguuuagaucugacug

SEQ ID NO: 837874 - RNA, 22 nt, Human
accaucaguacuggaugcugac

SEQ ID NO: 837875 - RNA, 23 nt, Human
aaucuauacuuaggcugguaaua

SEQ ID NO: 837876 - RNA, 22 nt, Human
ggaggcaggaaagacagguuca

SEQ ID NO: 837877 - RNA, 21 nt, Human
uuacuuuugcaccaaccuaau

SEQ ID NO: 837878 - RNA, 22 nt, Human
agaggcugagaaacccucuucu

SEQ ID NO: 837879 - RNA, 22 nt, Human
guguuuccaguucagaaagcaa

SEQ ID NO: 837880 - RNA, 19 nt, Human
ggcucucccuugagagagc

SEQ ID NO: 837881 - RNA, 22 nt, Human
agagcugaauuuggguggugga

SEQ ID NO: 837882 - RNA, 19 nt, Human
uggcauuuggaggcaaccu

SEQ ID NO: 837883 - RNA, 22 nt, Human
uuagucaauagugaauauagag

SEQ ID NO: 837884 - RNA, 22 nt, Human
agcucccagaaggcccugcgcc

SEQ ID NO: 837885 - RNA, 22 nt, Human
ccauaagguugaaaacuguaca

SEQ ID NO: 837886 - RNA, 22 nt, Human
aguaugaaccuggguucuggau

SEQ ID NO: 837887 - RNA, 21 nt, Human
agucccaggggugagugaugu

SEQ ID NO: 837888 - RNA, 22 nt, Human
cagcugcccauccugggaaaug

SEQ ID NO: 837889 - RNA, 22 nt, Human
gcuggccaggugcuuugguucu

SEQ ID NO: 837890 - RNA, 22 nt, Human
cucagggacguuagaggacagg

SEQ ID NO: 837891 - RNA, 22 nt, Human
gcucccacugcagcccugagcc

SEQ ID NO: 837892 - RNA, 20 nt, Human
uucuuucaucuacacguugu

SEQ ID NO: 837893 - RNA, 22 nt, Human
cagagcugugauaaauagauau

SEQ ID NO: 837894 - RNA, 22 nt, Human
aauaaaauggucaguuuucuca

SEQ ID NO: 837895 - RNA, 22 nt, Human
ggcagggucuggacugaaagcu

SEQ ID NO: 837896 - RNA, 22 nt, Human
aaauuguugaucuacaguaagg

SEQ ID NO: 837897 - RNA, 22 nt, Human
gggucuggcaugcugagaugga

SEQ ID NO: 837898 - RNA, 22 nt, Human
gcaggagcucguuuccaggcug

SEQ ID NO: 837899 - RNA, 22 nt, Human
cugccugugccaaugcuccuuu

SEQ ID NO: 837900 - RNA, 22 nt, Human
guggccugucagaagccguggg

SEQ ID NO: 837901 - RNA, 22 nt, Human
aggccuguuccuuccugggcac

SEQ ID NO: 837902 - RNA, 18 nt, Human
gagcugccauauuuaguu

SEQ ID NO: 837903 - RNA, 17 nt, Human
gagauggguggaucacc

SEQ ID NO: 837904 - RNA, 22 nt, Human
agcagggcagugaucagaaagg

SEQ ID NO: 837905 - RNA, 22 nt, Human
augcaucauggaaaacucaguu

SEQ ID NO: 837906 - RNA, 22 nt, Human
uaaagccaacacuuuacugcuc

SEQ ID NO: 837907 - RNA, 22 nt, Human
cagauggccagaggcagcugca

SEQ ID NO: 837908 - RNA, 22 nt, Human
caaguccuuagaugguucuuug

SEQ ID NO: 837909 - RNA, 22 nt, Human
ucauugcagacuaacaaucuca

SEQ ID NO: 837910 - RNA, 22 nt, Human
acacagggcagagagcuggcuc

SEQ ID NO: 837911 - RNA, 22 nt, Human
guguacauauugagucugcuga

SEQ ID NO: 837912 - RNA, 22 nt, Human
uccagccacucagcagggauug

SEQ ID NO: 837913 - RNA, 22 nt, Human
cuggcagcgcagcaugaagucg

SEQ ID NO: 837914 - RNA, 20 nt, Human
aggaaaaggguggugguaga

SEQ ID NO: 837915 - RNA, 22 nt, Human
acaacuuuucuaucauguggaa

SEQ ID NO: 837916 - RNA, 23 nt, Human
ugcugggguaguuuguggcacag

SEQ ID NO: 837917 - RNA, 22 nt, Human
cugggaguugacgaggcuugua

SEQ ID NO: 837918 - RNA, 22 nt, Human
ggcagccuugacuagugacuua

SEQ ID NO: 837919 - RNA, 22 nt, Human
aaugggagagaacacaaagucc

SEQ ID NO: 837920 - RNA, 22 nt, Human
gcagaauuuggggguaaccuuu

SEQ ID NO: 837921 - RNA, 22 nt, Human
uucacauaaugauacaaagcuu

SEQ ID NO: 837922 - RNA, 22 nt, Human
ccucuggguaucuguggaagua

SEQ ID NO: 837923 - RNA, 22 nt, Human
uguccucuaauuggccucuugc

SEQ ID NO: 837924 - RNA, 22 nt, Human
uaaaucccuacaucuguguuuu

SEQ ID NO: 837925 - RNA, 22 nt, Human
aaaaagguugauccagauuagg

SEQ ID NO: 837926 - RNA, 22 nt, Human
auuuaguguguauugcuauuau

SEQ ID NO: 837927 - RNA, 22 nt, Human
agggagcuguggucagcucagu

SEQ ID NO: 837928 - RNA, 22 nt, Human
gcaggagcccuggcauguucuu

SEQ ID NO: 837929 - RNA, 22 nt, Human
gauggcaggcaggugaguagag

SEQ ID NO: 837930 - RNA, 22 nt, Human
gggacuggcacagggcugggag

SEQ ID NO: 837931 - RNA, 21 nt, Human
cagcagaguaaugcauucgua

SEQ ID NO: 837932 - RNA, 22 nt, Human
ggcugccugcuccuccugcacg

SEQ ID NO: 837933 - RNA, 20 nt, Human
aggagaugauccagagucag

SEQ ID NO: 837934 - RNA, 22 nt, Human
aauugugcuaugauuaugaaag

SEQ ID NO: 837935 - RNA, 22 nt, Human
ccagacuguggaguuccuggug

SEQ ID NO: 837936 - RNA, 22 nt, Human
ugggcugcugcggugcucuugg

SEQ ID NO: 837937 - RNA, 22 nt, Human
agccuggcuguaaccucauggu

SEQ ID NO: 837938 - RNA, 22 nt, Human
uugguacagaugagguauucuc

SEQ ID NO: 837939 - RNA, 22 nt, Human
ugaaguuauauauguugaaaau

SEQ ID NO: 837940 - RNA, 22 nt, Human
cagggccucuccuccaggaacu

SEQ ID NO: 837941 - RNA, 22 nt, Human
agucuucacucuucacuacuau

SEQ ID NO: 837942 - RNA, 22 nt, Human
gaaacccaaacuaagacaguag

SEQ ID NO: 837943 - RNA, 22 nt, Human
guaggcagauaggagugcagcc

SEQ ID NO: 837944 - RNA, 19 nt, Human
auggaaaaugccagacuga

SEQ ID NO: 837945 - RNA, 22 nt, Human
uucauucugcaguucucagcuc

SEQ ID NO: 837946 - RNA, 22 nt, Human
cccaggagagaggccaguuggc

SEQ ID NO: 837947 - RNA, 22 nt, Human
uuuauguaauuucauaggugug

SEQ ID NO: 837948 - RNA, 22 nt, Human
agagccagcaagugaauaguga

SEQ ID NO: 837949 - RNA, 20 nt, Human
ccuguucacugcgcaguuuc

SEQ ID NO: 837950 - RNA, 22 nt, Human
cuccagggaggucugcaggacu

SEQ ID NO: 837951 - RNA, 22 nt, Human
acugcuuuagaccuagagcucu

SEQ ID NO: 837952 - RNA, 22 nt, Human
uucacaggaauguaggggucuu

SEQ ID NO: 837953 - RNA, 19 nt, Human
uggcauugguccagauaaa

SEQ ID NO: 837954 - RNA, 22 nt, Human
caucagaaccaguggggacauu

SEQ ID NO: 837955 - RNA, 20 nt, Human
agcccuguuuccuggagaga

SEQ ID NO: 837956 - RNA, 22 nt, Human
ugcaggaacugggagggauagu

SEQ ID NO: 837957 - RNA, 22 nt, Human
gcuggcucuucaguggagauag

SEQ ID NO: 837958 - RNA, 22 nt, Human
ggcuggcuggcugguagacaag

SEQ ID NO: 837959 - RNA, 22 nt, Human
gugugcagaagacacaagacau

SEQ ID NO: 837960 - RNA, 22 nt, Human
aggccuuccucggagacaggga

SEQ ID NO: 837961 - RNA, 22 nt, Human
cagcccugccauggagccuccu

SEQ ID NO: 837962 - RNA, 22 nt, Human
auagucuuagucuauaguuuug

SEQ ID NO: 837963 - RNA, 22 nt, Human
aggggccucgcaggaccgcucc

SEQ ID NO: 837964 - RNA, 22 nt, Human
auguacaguuucuagacucaaa

SEQ ID NO: 837965 - RNA, 22 nt, Human
aaagcagaggugauaugacuua

SEQ ID NO: 837966 - RNA, 22 nt, Human
ugccuggaugugcuggccucac

SEQ ID NO: 837967 - RNA, 22 nt, Human
gcucugcucuugacuuaccagg

SEQ ID NO: 837968 - RNA, 22 nt, Human
ccugacgaaaggcgugcuggag

SEQ ID NO: 837969 - RNA, 22 nt, Human
agggcagcucucaccucuggcc

SEQ ID NO: 837970 - RNA, 21 nt, Human
ugcagccauucagcccuaugc

SEQ ID NO: 837971 - RNA, 22 nt, Human
aggagugcaaauaguccagaga

SEQ ID NO: 837972 - RNA, 22 nt, Human
cagaaauaaacuucucacaucg

SEQ ID NO: 837973 - RNA, 22 nt, Human
aggcagcagggccacuggcuga

SEQ ID NO: 837974 - RNA, 22 nt, Human
gccuggagugguccugcugccc

SEQ ID NO: 837975 - RNA, 22 nt, Human
ugaacgcagguccacauggcuc

SEQ ID NO: 837976 - RNA, 22 nt, Human
uuacaaagcguugagacaagua

SEQ ID NO: 837977 - RNA, 21 nt, Human
cuacagaaucgagcauucugg

SEQ ID NO: 837978 - RNA, 22 nt, Human
auaugcuugggacugauacagu

SEQ ID NO: 837979 - RNA, 22 nt, Human
cucacugcaaguuccaccuacc

SEQ ID NO: 837980 - RNA, 22 nt, Human
uuccaguugguagaauguaagg

SEQ ID NO: 837981 - RNA, 22 nt, Human
auacaagacucagcacagacgg

SEQ ID NO: 837982 - RNA, 22 nt, Human
ucacauuuguuccucugcacuu

SEQ ID NO: 837983 - RNA, 22 nt, Human
agaggccuaaccaagauguccu

SEQ ID NO: 837984 - RNA, 22 nt, Human
cacugcuuaguugguaaaugug

SEQ ID NO: 837985 - RNA, 22 nt, Human
cagcuucccuuggcugagcaga

SEQ ID NO: 837986 - RNA, 22 nt, Human
uuugcuauaaaagggucacacg

SEQ ID NO: 837987 - RNA, 22 nt, Human
gcaggcaguuugcuuuucccuc

SEQ ID NO: 837988 - RNA, 22 nt, Human
cacugaagccugggaguaagac

SEQ ID NO: 837989 - RNA, 22 nt, Human
uuucaguuuaugucuugaauua

SEQ ID NO: 837990 - RNA, 22 nt, Human
cacagugcaugaugggcagaag

SEQ ID NO: 837991 - RNA, 22 nt, Human
cacaggcucuucucacuugauu

SEQ ID NO: 837992 - RNA, 22 nt, Human
auuugcuuuaagguauaaaagg

SEQ ID NO: 837993 - RNA, 22 nt, Human
aggcagagagcaguggccgucu

SEQ ID NO: 837994 - RNA, 22 nt, Human
ggaccagagcucgggcuucuca

SEQ ID NO: 837995 - RNA, 22 nt, Human
gagcccaggcagagguugcagu

SEQ ID NO: 837996 - RNA, 22 nt, Human
uuucugaagauacagcuuugcu

SEQ ID NO: 837997 - RNA, 22 nt, Human
ggcugcuucucacucauuugca

SEQ ID NO: 837998 - RNA, 20 nt, Human
ccuggaagagcuccccaggc

SEQ ID NO: 837999 - RNA, 22 nt, Human
cuccugggaauuuaguugugag

SEQ ID NO: 838000 - RNA, 22 nt, Human
cuggcuuucuguuauaaagaca

SEQ ID NO: 838001 - RNA, 22 nt, Human
agcugcucccuauccuuuccuu

SEQ ID NO: 838002 - RNA, 22 nt, Human
ugagggaguuggguguauagga

SEQ ID NO: 838003 - RNA, 22 nt, Human
uuugcauuuccagaguagcaga

SEQ ID NO: 838004 - RNA, 20 nt, Human
uuucacagucccuguuuccu

SEQ ID NO: 838005 - RNA, 20 nt, Human
ucuuauacagaaaacauuuu

SEQ ID NO: 838006 - RNA, 22 nt, Human
uuugcauuucuaaugagcuccg

SEQ ID NO: 838007 - RNA, 22 nt, Human
ugggggucaggaugaggccuug

SEQ ID NO: 838008 - RNA, 22 nt, Human
ugggacagugugccuugcuccu

SEQ ID NO: 838009 - RNA, 22 nt, Human
gcucucugguuccagucaggaa

SEQ ID NO: 838010 - RNA, 22 nt, Human
ugcauauugugaaaauguagau

SEQ ID NO: 838011 - RNA, 22 nt, Human
uauuaucauugguaauaugguc

SEQ ID NO: 838012 - RNA, 22 nt, Human
gcagcugcagacccucagugcu

SEQ ID NO: 838013 - RNA, 22 nt, Human
agccagggauggcagugcccag

SEQ ID NO: 838014 - RNA, 19 nt, Human
ucauucaggaccaguggau

SEQ ID NO: 838015 - RNA, 22 nt, Human
agcagccacccagcugcucauu

SEQ ID NO: 838016 - RNA, 22 nt, Human
aaaguguaaggaauuuaaguaa

SEQ ID NO: 838017 - RNA, 22 nt, Human
gcaaggcugcugccacccaucu

SEQ ID NO: 838018 - RNA, 20 nt, Human
gcuuccuucccagcccccac

SEQ ID NO: 838019 - RNA, 22 nt, Human
gccugggagagggauagugcag

SEQ ID NO: 838020 - RNA, 22 nt, Human
aucucagacauguuguccauga

SEQ ID NO: 838021 - RNA, 22 nt, Human
agugcagcaugcuggggaggcu

SEQ ID NO: 838022 - RNA, 22 nt, Human
ucugggaacucugucauuuccc

SEQ ID NO: 838023 - RNA, 22 nt, Human
cggggcugcucguccuccugug

SEQ ID NO: 838024 - RNA, 22 nt, Human
cccaggucuaugccagcucuga

SEQ ID NO: 838025 - RNA, 22 nt, Human
uuuuagcacuaagugauaugcu

SEQ ID NO: 838026 - RNA, 19 nt, Human
aacuagaaagguuuugaga

SEQ ID NO: 838027 - RNA, 22 nt, Human
ccaaggagcucauauucuuguu

SEQ ID NO: 838028 - RNA, 17 nt, Human
ugccagccugucccagg

SEQ ID NO: 838029 - RNA, 22 nt, Human
gcagggaagacccggagcagcg

SEQ ID NO: 838030 - RNA, 22 nt, Human
gaaaucugaacucuguauccuu

SEQ ID NO: 838031 - RNA, 23 nt, Human
agagcuuucuaaaauguaaaucu

SEQ ID NO: 838032 - RNA, 22 nt, Human
uggagcuggaauuugagcugga

SEQ ID NO: 838033 - RNA, 23 nt, Human
gugugccaagcacugugccagga

SEQ ID NO: 838034 - RNA, 22 nt, Human
gcuggccacauugugccguccu

SEQ ID NO: 838035 - RNA, 22 nt, Human
gcugcccugugguccagcaggu

SEQ ID NO: 838036 - RNA, 22 nt, Human
ugccauuuugagauguuaauga

SEQ ID NO: 838037 - RNA, 22 nt, Human
aguaaugugccugaaauacuug

SEQ ID NO: 838038 - RNA, 22 nt, Human
aagugaguggccuggagaggug

SEQ ID NO: 838039 - RNA, 22 nt, Human
aaagagcuucauuuccauuuau

SEQ ID NO: 838040 - RNA, 22 nt, Human
ggccucggcccacugcugcggu

SEQ ID NO: 838041 - RNA, 22 nt, Human
uaggcagccagcaucaguuggg

SEQ ID NO: 838042 - RNA, 22 nt, Human
aucuucucauguguaaugaggu

SEQ ID NO: 838043 - RNA, 23 nt, Human
caggcaggaugaggacuacacuc

SEQ ID NO: 838044 - RNA, 22 nt, Human
augggcugugagguccggcagg

SEQ ID NO: 838045 - RNA, 22 nt, Human
cuccaggaaagccugaggcccg

SEQ ID NO: 838046 - RNA, 22 nt, Human
uccaggagugugugcuaauggg

SEQ ID NO: 838047 - RNA, 22 nt, Human
agaggcuccaccuucucugucc

SEQ ID NO: 838048 - RNA, 20 nt, Human
gggugagauguaggagaggg

SEQ ID NO: 838049 - RNA, 22 nt, Human
acugaaauacugcucuuggauu

SEQ ID NO: 838050 - RNA, 19 nt, Human
gugauuucuuuccacaagc

SEQ ID NO: 838051 - RNA, 22 nt, Human
accugagccuagggagguugag

SEQ ID NO: 838052 - RNA, 22 nt, Human
cacugucuuuugugaagacaau

SEQ ID NO: 838053 - RNA, 22 nt, Human
uuauuccauagaagucaaggaa

SEQ ID NO: 838054 - RNA, 22 nt, Human
gcgucugaguugcgggggcuca

SEQ ID NO: 838055 - RNA, 22 nt, Human
agagccugaggccaggaaaaug

SEQ ID NO: 838056 - RNA, 22 nt, Human
caggagugucuccacacagcaa

SEQ ID NO: 838057 - RNA, 22 nt, Human
cacaggagguuaggaagugguc

SEQ ID NO: 838058 - RNA, 22 nt, Human
gcagccagccccucugaccucu

SEQ ID NO: 838059 - RNA, 22 nt, Human
ggcucuggagcacagacgucug

SEQ ID NO: 838060 - RNA, 22 nt, Human
ucagggcauucaagaggccugg

SEQ ID NO: 838061 - RNA, 22 nt, Human
gcagggcugcugaaacuuguuu

SEQ ID NO: 838062 - RNA, 22 nt, Human
uuaaaugaggcugauguagauu

SEQ ID NO: 838063 - RNA, 22 nt, Human
gcugccugccuugccuggagga

SEQ ID NO: 838064 - RNA, 22 nt, Human
aaagaacaaaugauauaugguu

SEQ ID NO: 838065 - RNA, 22 nt, Human
aguguuucuggcaaaugaaagu

SEQ ID NO: 838066 - RNA, 22 nt, Human
uuauucuucuucucuugccagg

SEQ ID NO: 838067 - RNA, 22 nt, Human
caugguuuugagccuauuaugc

SEQ ID NO: 838068 - RNA, 19 nt, Human
aucagcaagguaggaugug

SEQ ID NO: 838069 - RNA, 22 nt, Human
acugucucucuagcaguucagg

SEQ ID NO: 838070 - RNA, 22 nt, Human
gcuccugggcucuaccuugcua

SEQ ID NO: 838071 - RNA, 22 nt, Human
ugauuuccacagucaggggugc

SEQ ID NO: 838072 - RNA, 22 nt, Human
ccugccuguacuagagacccag

SEQ ID NO: 838073 - RNA, 22 nt, Human
ucaacuuugaaaccauagugaa

SEQ ID NO: 838074 - RNA, 22 nt, Human
aaggcagauauaaagacuagag

SEQ ID NO: 838075 - RNA, 22 nt, Human
cccugcagcuuuugcauaguca

SEQ ID NO: 838076 - RNA, 22 nt, Human
gcaggagccaggccgagcuggu

SEQ ID NO: 838077 - RNA, 22 nt, Human
ccagucccaggcagaaauccag

SEQ ID NO: 838078 - RNA, 22 nt, Human
aaguucuaauuuugcauucagg

SEQ ID NO: 838079 - RNA, 22 nt, Human
agagaggcgaguuaccugugcu

SEQ ID NO: 838080 - RNA, 22 nt, Human
ugcuggcuacauuauugcuguc

SEQ ID NO: 838081 - RNA, 22 nt, Human
uaucuauuccaaauaucagcgu

SEQ ID NO: 838082 - RNA, 22 nt, Human
agggcagagagaugaaugggau

SEQ ID NO: 838083 - RNA, 22 nt, Human
gcugccugauuuacauagugaa

SEQ ID NO: 838084 - RNA, 22 nt, Human
cuggcagcagcuucuggaucga

SEQ ID NO: 838085 - RNA, 22 nt, Human
gcugccacuuggucaugucaug

SEQ ID NO: 838086 - RNA, 22 nt, Human
uggcaggguggcaacuuuuggu

SEQ ID NO: 838087 - RNA, 20 nt, Human
aagcacauuucuacaauaau

SEQ ID NO: 838088 - RNA, 22 nt, Human
uguguccuucugggagucccag

SEQ ID NO: 838089 - RNA, 22 nt, Human
uggccuccccuaacagccucuu

SEQ ID NO: 838090 - RNA, 22 nt, Human
uggcuccuaucaaggagugggu

SEQ ID NO: 838091 - RNA, 22 nt, Human
auaucauuauguuaugagcaca

SEQ ID NO: 838092 - RNA, 22 nt, Human
ucaguaaacagguuuaaguccu

SEQ ID NO: 838093 - RNA, 22 nt, Human
aucuggcuuacgaagcacuggu

SEQ ID NO: 838094 - RNA, 22 nt, Human
auucuucaucacuaccuuguga

SEQ ID NO: 838095 - RNA, 22 nt, Human
cagggccagcgcccaggcccag

SEQ ID NO: 838096 - RNA, 22 nt, Human
ugaggccaggaucccaggcucu

SEQ ID NO: 838097 - RNA, 22 nt, Human
agccuggaccaggggccucaga

SEQ ID NO: 838098 - RNA, 22 nt, Human
cugugucccaguaccuugggua

SEQ ID NO: 838099 - RNA, 17 nt, Human
uagagcugguucaggag

SEQ ID NO: 838100 - RNA, 22 nt, Human
gugugcaguagagaaagagcag

SEQ ID NO: 838101 - RNA, 20 nt, Human
acagccagaggaggcagaca

SEQ ID NO: 838102 - RNA, 22 nt, Human
acugcuuuaucugagaaguccu

SEQ ID NO: 838103 - RNA, 22 nt, Human
uaacauguuaagaaauuagaua

SEQ ID NO: 838104 - RNA, 22 nt, Human
uccaggaggguuuucugccuuc

SEQ ID NO: 838105 - RNA, 22 nt, Human
cuccaggagggggauggcugua

SEQ ID NO: 838106 - RNA, 22 nt, Human
uuccaugagcucugaguucaca

SEQ ID NO: 838107 - RNA, 22 nt, Human
agcuaccuggcuuaucacuguc

SEQ ID NO: 838108 - RNA, 22 nt, Human
ucuugauuacaaauaacaucau

SEQ ID NO: 838109 - RNA, 22 nt, Human
uuuuccuucuagagcagauuuc

SEQ ID NO: 838110 - RNA, 22 nt, Human
ccagcuccaggacugggagcug

SEQ ID NO: 838111 - RNA, 22 nt, Human
cuacauaaauuuaucacagacu

SEQ ID NO: 838112 - RNA, 22 nt, Human
cugggcuucucccccuggcaga

SEQ ID NO: 838113 - RNA, 22 nt, Human
aggcagcccugugcuggaugcu

SEQ ID NO: 838114 - RNA, 23 nt, Human
auaauaacgucugucuugucucu

SEQ ID NO: 838115 - RNA, 22 nt, Human
uccuugaagagugggcggucga

SEQ ID NO: 838116 - RNA, 22 nt, Human
cccaggccagaacuugguugcu

SEQ ID NO: 838117 - RNA, 22 nt, Human
uucagaaacccauugggucucu

SEQ ID NO: 838118 - RNA, 22 nt, Human
acaacaggguaaggcaggccau

SEQ ID NO: 838119 - RNA, 22 nt, Human
ggcaggagaauggcgugaacuc

SEQ ID NO: 838120 - RNA, 22 nt, Human
gggagagguuacccgagcaacu

SEQ ID NO: 838121 - RNA, 22 nt, Human
ucaggacagccagggugcagac

SEQ ID NO: 838122 - RNA, 22 nt, Human
auaugaagucagacaaacuggg

SEQ ID NO: 838123 - RNA, 22 nt, Human
uggagcuggaauuucugggccu

SEQ ID NO: 838124 - RNA, 22 nt, Human
ggggaugguggcauuuguaaaa

SEQ ID NO: 838125 - RNA, 22 nt, Human
ucaggaaagaagaugcucagug

SEQ ID NO: 838126 - RNA, 22 nt, Human
cagcaggauuugaaaggaagag

SEQ ID NO: 838127 - RNA, 22 nt, Human
gcaggcaguuauuuaguagaau

SEQ ID NO: 838128 - RNA, 18 nt, Human
auuuugaacaaugcugua

SEQ ID NO: 838129 - RNA, 22 nt, Human
ccagguggaaggucugugcucu

SEQ ID NO: 838130 - RNA, 18 nt, Human
uggagcugagugcugugc

SEQ ID NO: 838131 - RNA, 20 nt, Human
ugucauuguuucuaggaccu

SEQ ID NO: 838132 - RNA, 22 nt, Human
uugaggagcacuagucagguau

SEQ ID NO: 838133 - RNA, 22 nt, Human
cacaauuuccuugcuucacuuu

SEQ ID NO: 838134 - RNA, 22 nt, Human
gggcucuguccauuccuucaua

SEQ ID NO: 838135 - RNA, 22 nt, Human
cuucucuucccagggacacagg

SEQ ID NO: 838136 - RNA, 22 nt, Human
ucacaugcuacugagccagacc

SEQ ID NO: 838137 - RNA, 22 nt, Human
uuugggaaacuuaggggucaga

SEQ ID NO: 838138 - RNA, 22 nt, Human
acacagggcaaugcuuugaccu

SEQ ID NO: 838139 - RNA, 22 nt, Human
aaauaguucagccacggugacu

SEQ ID NO: 838140 - RNA, 18 nt, Human
gaggauggaaggagaugc

SEQ ID NO: 838141 - RNA, 22 nt, Human
agaccuggauuccaauccuacc

SEQ ID NO: 838142 - RNA, 22 nt, Human
agcagcaugaugacagagucuc

SEQ ID NO: 838143 - RNA, 22 nt, Human
uccaggagcauccaggugaagc

SEQ ID NO: 838144 - RNA, 22 nt, Human
auguacacaugcaugcaugugc

SEQ ID NO: 838145 - RNA, 22 nt, Human
gcaggcaggcuuccuugaacug

SEQ ID NO: 838146 - RNA, 22 nt, Human
acagcagagugugagauagcca

SEQ ID NO: 838147 - RNA, 21 nt, Human
uuuaaagaauaggaagggagg

SEQ ID NO: 838148 - RNA, 22 nt, Human
gcacaugagcugcugggauggg

SEQ ID NO: 838149 - RNA, 22 nt, Human
ugcuuuaaccaucuuguuugga

SEQ ID NO: 838150 - RNA, 22 nt, Human
agaugaagacucaggagcaggu

SEQ ID NO: 838151 - RNA, 22 nt, Human
aaggcugaguaaaacagagaac

SEQ ID NO: 838152 - RNA, 22 nt, Human
auacuucuuugauguucacagg

SEQ ID NO: 838153 - RNA, 22 nt, Human
caggccaggcugcauuugcccc

SEQ ID NO: 838154 - RNA, 22 nt, Human
cucccagagaccaagcugagaa

SEQ ID NO: 838155 - RNA, 22 nt, Human
cuauacaguaaccacagugauu

SEQ ID NO: 838156 - RNA, 22 nt, Human
agaauucauaggaaguuuccua

SEQ ID NO: 838157 - RNA, 22 nt, Human
gcucaggaucccaggggugugc

SEQ ID NO: 838158 - RNA, 22 nt, Human
ccugaagaugcuguggccuggu

SEQ ID NO: 838159 - RNA, 22 nt, Human
cagcaugcaaguccagaugugg

SEQ ID NO: 838160 - RNA, 22 nt, Human
gcugucacauuuggagcacugg

SEQ ID NO: 838161 - RNA, 22 nt, Human
ggcucugguugaccaugauggc

SEQ ID NO: 838162 - RNA, 23 nt, Human
agcccagcagagaaccuaggucc

SEQ ID NO: 838163 - RNA, 22 nt, Human
caacagaagguguacuacugaa

SEQ ID NO: 838164 - RNA, 22 nt, Human
gugucccaaucuacuuuucccu

SEQ ID NO: 838165 - RNA, 22 nt, Human
auuuagacuucccagcacugug

SEQ ID NO: 838166 - RNA, 22 nt, Human
cccacucuggcucccuucuagu

SEQ ID NO: 838167 - RNA, 22 nt, Human
ggccucaguuucuccauggguu

SEQ ID NO: 838168 - RNA, 22 nt, Human
guacagaaaugugaugacgcaa

SEQ ID NO: 838169 - RNA, 22 nt, Human
cacagcuugggcucugacaaua

SEQ ID NO: 838170 - RNA, 22 nt, Human
uggcaguguauagguggcuccu

SEQ ID NO: 838171 - RNA, 22 nt, Human
cuucuucauaggcaguccuguu

SEQ ID NO: 838172 - RNA, 22 nt, Human
uugaaaggaauacagaggccua

SEQ ID NO: 838173 - RNA, 22 nt, Human
cugcugggaaggucugcucagu

SEQ ID NO: 838174 - RNA, 22 nt, Human
agguggcuccucccauggcugg

SEQ ID NO: 838175 - RNA, 22 nt, Human
gccugagccgccugagcggcgg

SEQ ID NO: 838176 - RNA, 22 nt, Human
gcugucagcgcccaaggagcuc

SEQ ID NO: 838177 - RNA, 20 nt, Human
uaggcagcuugacccuuggu

SEQ ID NO: 838178 - RNA, 22 nt, Human
cagcaucaccgccauuucugau

SEQ ID NO: 838179 - RNA, 22 nt, Human
ugucauguguucuuaaauacau

SEQ ID NO: 838180 - RNA, 22 nt, Human
ucagcuggcaguucagaggcug

SEQ ID NO: 838181 - RNA, 23 nt, Human
cccuguagcccaggacaggcuuu

SEQ ID NO: 838182 - RNA, 22 nt, Human
gcacccagaggucagcagugcu

SEQ ID NO: 838183 - RNA, 22 nt, Human
agagcugaggauccagcugagc

SEQ ID NO: 838184 - RNA, 22 nt, Human
aggagcccugcgggaggcagag

SEQ ID NO: 838185 - RNA, 22 nt, Human
uccucugcuguucugguucuuu

SEQ ID NO: 838186 - RNA, 19 nt, Human
accaggaguaucagagcug

SEQ ID NO: 838187 - RNA, 22 nt, Human
ucucucuucaacccuuaacuag

SEQ ID NO: 838188 - RNA, 22 nt, Human
acaaugcaccagcaucuucacc

SEQ ID NO: 838189 - RNA, 21 nt, Human
ccugagccuguuuauccagaa

SEQ ID NO: 838190 - RNA, 22 nt, Human
uuugaacugauaaucuucuguu

SEQ ID NO: 838191 - RNA, 22 nt, Human
gggggcuguccugugcauugua

SEQ ID NO: 838192 - RNA, 22 nt, Human
caucacuguccaaaguucaguu

SEQ ID NO: 838193 - RNA, 22 nt, Human
guaaauuauuucaagaucaucu

SEQ ID NO: 838194 - RNA, 22 nt, Human
uuucaugagauuccuccacauc

SEQ ID NO: 838195 - RNA, 22 nt, Human
gcagggcugcagagggcacugu

SEQ ID NO: 838196 - RNA, 22 nt, Human
aauguuaauguguuugcuuaug

SEQ ID NO: 838197 - RNA, 22 nt, Human
uucaaauacauucuuugccacu

SEQ ID NO: 838198 - RNA, 22 nt, Human
gcacagguugcaaaaguucaca

SEQ ID NO: 838199 - RNA, 22 nt, Human
gaauuucagaucagagaccauu

SEQ ID NO: 838200 - RNA, 22 nt, Human
ugccugggguuggcaaacugcu

SEQ ID NO: 838201 - RNA, 22 nt, Human
gagccuguguuuccuguagcca

SEQ ID NO: 838202 - RNA, 22 nt, Human
gcugcagcagaaguucucagag

SEQ ID NO: 838203 - RNA, 22 nt, Human
acaggcucucagccaguuggca

SEQ ID NO: 838204 - RNA, 22 nt, Human
ucagaggagccaaaguucugag

SEQ ID NO: 838205 - RNA, 22 nt, Human
gccuucagcggccgcucgcugc

SEQ ID NO: 838206 - RNA, 22 nt, Human
cuggagcagguuuaggaguccc

SEQ ID NO: 838207 - RNA, 22 nt, Human
gagccugaaauacaggucacug

SEQ ID NO: 838208 - RNA, 22 nt, Human
auuccaaagcacaucagaacua

SEQ ID NO: 838209 - RNA, 22 nt, Human
ccacagagacaggguccuugcu

SEQ ID NO: 838210 - RNA, 22 nt, Human
augccagucaaagaagaugaca

SEQ ID NO: 838211 - RNA, 21 nt, Human
ugcaggcaggcagagaugcug

SEQ ID NO: 838212 - RNA, 22 nt, Human
uggcagcaauuugugauguuga

SEQ ID NO: 838213 - RNA, 22 nt, Human
ggcuggaaguccaagaucaagg

SEQ ID NO: 838214 - RNA, 22 nt, Human
gucccugcccuccugggacuca

SEQ ID NO: 838215 - RNA, 22 nt, Human
aagcuuucagagcagaauguga

SEQ ID NO: 838216 - RNA, 22 nt, Human
uucucagguagugcugaugcug

SEQ ID NO: 838217 - RNA, 22 nt, Human
ucuguagcaagugagaggcauu

SEQ ID NO: 838218 - RNA, 22 nt, Human
uccuucagaaaaccucagucuu

SEQ ID NO: 838219 - RNA, 22 nt, Human
gauuucaccugaucuugucauc

SEQ ID NO: 838220 - RNA, 19 nt, Human
agccuggcuuugcucugcu

SEQ ID NO: 838221 - RNA, 22 nt, Human
gaaggccauugcguccugggau

SEQ ID NO: 838222 - RNA, 22 nt, Human
ccugucugcaugaucccugcca

SEQ ID NO: 838223 - RNA, 22 nt, Human
aggagccaggaaaccugcucug

SEQ ID NO: 838224 - RNA, 22 nt, Human
caggaaagagcugccaggcagg

SEQ ID NO: 838225 - RNA, 22 nt, Human
ggcaggcagaggcugagacagg

SEQ ID NO: 838226 - RNA, 22 nt, Human
acuccuggggauccauuccuuu

SEQ ID NO: 838227 - RNA, 22 nt, Human
ccagaggcuggguucaccucag

SEQ ID NO: 838228 - RNA, 22 nt, Human
augaaacaugagaaauggagag

SEQ ID NO: 838229 - RNA, 22 nt, Human
ugcaggagcagagauggcugga

SEQ ID NO: 838230 - RNA, 22 nt, Human
ucuggcagggguucugcacuug

SEQ ID NO: 838231 - RNA, 21 nt, Human
aggcaucuaaagagaguagac

SEQ ID NO: 838232 - RNA, 22 nt, Human
ugaggcaguauuuuagugacuu

SEQ ID NO: 838233 - RNA, 22 nt, Human
aucuacccacugaacacaauau

SEQ ID NO: 838234 - RNA, 22 nt, Human
cauauaaauacaacauguguua

SEQ ID NO: 838235 - RNA, 22 nt, Human
auugaaagaguuuucugcugca

SEQ ID NO: 838236 - RNA, 20 nt, Human
gcauugaguauagacagaug

SEQ ID NO: 838237 - RNA, 22 nt, Human
ccacagggaacaugacagccuu

SEQ ID NO: 838238 - RNA, 22 nt, Human
auuauauaggacuugcccuucc

SEQ ID NO: 838239 - RNA, 22 nt, Human
aaggcagcaagaauuccagguu

SEQ ID NO: 838240 - RNA, 22 nt, Human
gccacugcacuccagcccaggc

SEQ ID NO: 838241 - RNA, 22 nt, Human
cagguggguguaugaaugcaaa

SEQ ID NO: 838242 - RNA, 22 nt, Human
gcccuuccuuagacagcaggau

SEQ ID NO: 838243 - RNA, 22 nt, Human
auagaacagaaacagaugcaca

SEQ ID NO: 838244 - RNA, 22 nt, Human
guucauauuacuuugagugcag

SEQ ID NO: 838245 - RNA, 22 nt, Human
uugacagcuauuuugcuuugau

SEQ ID NO: 838246 - RNA, 21 nt, Human
agcaccuuacagcuauaaugg

SEQ ID NO: 838247 - RNA, 22 nt, Human
ucauaaaugcagugucauaaau

SEQ ID NO: 838248 - RNA, 23 nt, Human
ggcacugaagcuacaauggugag

SEQ ID NO: 838249 - RNA, 22 nt, Human
agggacagaugaaugacugagu

SEQ ID NO: 838250 - RNA, 22 nt, Human
ugaugggacugccagcugcuga

SEQ ID NO: 838251 - RNA, 22 nt, Human
ucagggcauacucuucaagguc

SEQ ID NO: 838252 - RNA, 22 nt, Human
ccugggucuugguucaugcucu

SEQ ID NO: 838253 - RNA, 22 nt, Human
ccagagccucuuaugaagaucg

SEQ ID NO: 838254 - RNA, 22 nt, Human
aggccagcacgacagccgcagg

SEQ ID NO: 838255 - RNA, 22 nt, Human
uucucuucuguucagugcccaa

SEQ ID NO: 838256 - RNA, 22 nt, Human
auugcacaaacacagucagacu

SEQ ID NO: 838257 - RNA, 22 nt, Human
auguagaauuccuucuacuuug

SEQ ID NO: 838258 - RNA, 19 nt, Human
augucuggguaacagcugc

SEQ ID NO: 838259 - RNA, 22 nt, Human
gauuucuuugcaagcuguguuc

SEQ ID NO: 838260 - RNA, 22 nt, Human
cacaggugcuccucggggagcu

SEQ ID NO: 838261 - RNA, 22 nt, Human
cuguuuauuacacuggauagca

SEQ ID NO: 838262 - RNA, 22 nt, Human
uccauugucuuugguccuagcc

SEQ ID NO: 838263 - RNA, 22 nt, Human
gccugcuggcuguccauugcag

SEQ ID NO: 838264 - RNA, 22 nt, Human
gccaggcuggccagcaccuucu

SEQ ID NO: 838265 - RNA, 22 nt, Human
gugcaugugucuuuauaguaga

SEQ ID NO: 838266 - RNA, 22 nt, Human
gcuggcuugauaguuucugcuu

SEQ ID NO: 838267 - RNA, 22 nt, Human
agaaaugaaaccaaagccuaga

SEQ ID NO: 838268 - RNA, 22 nt, Human
caggcuggagugcaguugugca

SEQ ID NO: 838269 - RNA, 22 nt, Human
guggauggauuuugaggaaugg

SEQ ID NO: 838270 - RNA, 17 nt, Human
uguagcuucuccuucuc

SEQ ID NO: 838271 - RNA, 22 nt, Human
ccagcuggcaggagagucaggg

SEQ ID NO: 838272 - RNA, 22 nt, Human
cuggcagcgguuugcagccugg

SEQ ID NO: 838273 - RNA, 22 nt, Human
aggugccagaugcacagcugaa

SEQ ID NO: 838274 - RNA, 22 nt, Human
uggcaggagguuuucuccagga

SEQ ID NO: 838275 - RNA, 22 nt, Human
acauuguuugagaauacagaug

SEQ ID NO: 838276 - RNA, 21 nt, Human
aaggcagaagcauggaaugag

SEQ ID NO: 838277 - RNA, 22 nt, Human
cugcuggggucagagcacuggg

SEQ ID NO: 838278 - RNA, 22 nt, Human
gauuuuauauggcauacugugg

SEQ ID NO: 838279 - RNA, 17 nt, Human
uguggccuucugagcuu

SEQ ID NO: 838280 - RNA, 21 nt, Human
uauacaugugugcauacgugu

SEQ ID NO: 838281 - RNA, 22 nt, Human
cagaaauggaauuuuccaucac

SEQ ID NO: 838282 - RNA, 22 nt, Human
agcuggcagucauccuagugag

SEQ ID NO: 838283 - RNA, 22 nt, Human
agucccaguucgguucuuccuc

SEQ ID NO: 838284 - RNA, 22 nt, Human
cagcugccuucugcgggaaguc

SEQ ID NO: 838285 - RNA, 22 nt, Human
aauauugagaaccagcauguuu

SEQ ID NO: 838286 - RNA, 22 nt, Human
ucccagccuuccagucugguuu

SEQ ID NO: 838287 - RNA, 17 nt, Human
ugagacagggcaggccc

SEQ ID NO: 838288 - RNA, 22 nt, Human
agcauaaaggcacuagaaagag

SEQ ID NO: 838289 - RNA, 22 nt, Human
cagagcugagaauguugaugcu

SEQ ID NO: 838290 - RNA, 22 nt, Human
cuucuucagcacaauauugaug

SEQ ID NO: 838291 - RNA, 22 nt, Human
gcagcugccuucagcuggaugg

SEQ ID NO: 838292 - RNA, 22 nt, Human
gucauucuuaacaacucaguag

SEQ ID NO: 838293 - RNA, 22 nt, Human
uccugccuucauacugcuguau

SEQ ID NO: 838294 - RNA, 22 nt, Human
uuuuccucuguauuugaaaugc

SEQ ID NO: 838295 - RNA, 22 nt, Human
uaaauucccaacucugcucuuc

SEQ ID NO: 838296 - RNA, 22 nt, Human
acagaauucuaguauguggcuu

SEQ ID NO: 838297 - RNA, 22 nt, Human
cuuugaagagauuacugugcuc

SEQ ID NO: 838298 - RNA, 22 nt, Human
ucugugaacaucacauugacag

SEQ ID NO: 838299 - RNA, 22 nt, Human
cucugggcacauuuuccaggac

SEQ ID NO: 838300 - RNA, 22 nt, Human
uuucauaaccucaagcuacagu

SEQ ID NO: 838301 - RNA, 22 nt, Human
ugacaugcuuguuuuccuugaa

SEQ ID NO: 838302 - RNA, 22 nt, Human
uagggaggaggguuuucaaauc

SEQ ID NO: 838303 - RNA, 22 nt, Human
ccagggcacuuaggcccagccc

SEQ ID NO: 838304 - RNA, 21 nt, Human
cagugcucaaucugacagugg

SEQ ID NO: 838305 - RNA, 22 nt, Human
cugcaagauuggaagaugcaau

SEQ ID NO: 838306 - RNA, 22 nt, Human
ucuuuguaaaugccuagcauaa

SEQ ID NO: 838307 - RNA, 22 nt, Human
ccuggacucaggcugugggcac

SEQ ID NO: 838308 - RNA, 22 nt, Human
ccuuaaaagaacuaucucuucu

SEQ ID NO: 838309 - RNA, 18 nt, Human
caggaugagugaugggga

SEQ ID NO: 838310 - RNA, 22 nt, Human
caaauguauucucacuucaggg

SEQ ID NO: 838311 - RNA, 22 nt, Human
ugaggcagcauucuucaagaca

SEQ ID NO: 838312 - RNA, 19 nt, Human
uauggcaggccgaggcacu

SEQ ID NO: 838313 - RNA, 22 nt, Human
ccuuucucuggcagcaggacag

SEQ ID NO: 838314 - RNA, 22 nt, Human
agcauuuaugacuaauguaaaa

SEQ ID NO: 838315 - RNA, 22 nt, Human
uguuuaauaauucuaugauagu

SEQ ID NO: 838316 - RNA, 22 nt, Human
accuugaugccuuuccaagaug

SEQ ID NO: 838317 - RNA, 22 nt, Human
ggcaggugugagaucgaggcca

SEQ ID NO: 838318 - RNA, 22 nt, Human
gaauuucauugcucugcugugu

SEQ ID NO: 838319 - RNA, 23 nt, Human
auguauuuaaauuucagugauga

SEQ ID NO: 838320 - RNA, 22 nt, Human
cgggcagauugggaagguucau

SEQ ID NO: 838321 - RNA, 22 nt, Human
agggccugacacccuugccagc

SEQ ID NO: 838322 - RNA, 20 nt, Human
ggcagcuugggcagcaguua

SEQ ID NO: 838323 - RNA, 22 nt, Human
agagcucaagacgcucacagua

SEQ ID NO: 838324 - RNA, 22 nt, Human
gagcuuggugaugccuccuggu

SEQ ID NO: 838325 - RNA, 22 nt, Human
gaggggcuggcacgauggcugc

SEQ ID NO: 838326 - RNA, 19 nt, Human
ccugugugggguagagauc

SEQ ID NO: 838327 - RNA, 22 nt, Human
ucccagaggcaguugguaacuu

SEQ ID NO: 838328 - RNA, 22 nt, Human
ucucuucucuagugagcaacug

SEQ ID NO: 838329 - RNA, 22 nt, Human
cagccccucacagagcuguccu

SEQ ID NO: 838330 - RNA, 22 nt, Human
cagggcaggaugcugugauuau

SEQ ID NO: 838331 - RNA, 22 nt, Human
gagagaaaugugcaguuugggc

SEQ ID NO: 838332 - RNA, 22 nt, Human
uuccuguccgcaauggccuggg

SEQ ID NO: 838333 - RNA, 22 nt, Human
cagagagagugggguguggauu

SEQ ID NO: 838334 - RNA, 22 nt, Human
cugcagcuguagaggacagugg

SEQ ID NO: 838335 - RNA, 22 nt, Human
agggaaaguaagcauuucauua

SEQ ID NO: 838336 - RNA, 22 nt, Human
gggaguguugagcgcccugcca

SEQ ID NO: 838337 - RNA, 22 nt, Human
gcccaggagccuggagaugugu

SEQ ID NO: 838338 - RNA, 22 nt, Human
aagauucucagagugaaagaau

SEQ ID NO: 838339 - RNA, 22 nt, Human
uuaugcuaaaugaaucaaguca

SEQ ID NO: 838340 - RNA, 18 nt, Human
cucucuggucuggauccc

SEQ ID NO: 838341 - RNA, 22 nt, Human
uggaggaugagugugggcucug

SEQ ID NO: 838342 - RNA, 22 nt, Human
ugcagcagguuccaaaggguua

SEQ ID NO: 838343 - RNA, 22 nt, Human
cccagcuaccucugcuaggaga

SEQ ID NO: 838344 - RNA, 22 nt, Human
aagaaauuaaugugccauuacu

SEQ ID NO: 838345 - RNA, 22 nt, Human
acagaaauauagaagguaggaa

SEQ ID NO: 838346 - RNA, 22 nt, Human
ccagggcaucacauccaguguu

SEQ ID NO: 838347 - RNA, 22 nt, Human
augauuuccaguuguugcuaag

SEQ ID NO: 838348 - RNA, 22 nt, Human
gcauuucuuccuggugugagcc

SEQ ID NO: 838349 - RNA, 22 nt, Human
auugaaaguccuaucuaaggga

SEQ ID NO: 838350 - RNA, 22 nt, Human
caaugaaauugagauccagaga

SEQ ID NO: 838351 - RNA, 22 nt, Human
cagggagaagucuggucagucc

SEQ ID NO: 838352 - RNA, 22 nt, Human
aucucccagccacagcauucuu

SEQ ID NO: 838353 - RNA, 19 nt, Human
ugacaggcuguugccuuga

SEQ ID NO: 838354 - RNA, 22 nt, Human
cucagggucugguccuuagauu

SEQ ID NO: 838355 - RNA, 22 nt, Human
agaguguaauaagggcaagggc

SEQ ID NO: 838356 - RNA, 22 nt, Human
uuccauaauaaccugagagaaa

SEQ ID NO: 838357 - RNA, 22 nt, Human
uuccugaugcacacagucauuu

SEQ ID NO: 838358 - RNA, 22 nt, Human
uuuagacauggcuugcucacuu

SEQ ID NO: 838359 - RNA, 22 nt, Human
gcauuguccugcuucugagugu

SEQ ID NO: 838360 - RNA, 22 nt, Human
cccaggaggguggccucugccc

SEQ ID NO: 838361 - RNA, 22 nt, Human
uggcagagucucuccuuuccag

SEQ ID NO: 838362 - RNA, 22 nt, Human
gaagcagcucagauugacugaa

SEQ ID NO: 838363 - RNA, 22 nt, Human
agucagcagccuggccaggaga

SEQ ID NO: 838364 - RNA, 20 nt, Human
gccuggaggcagagauaaag

SEQ ID NO: 838365 - RNA, 22 nt, Human
ccagggccucguguucugagug

SEQ ID NO: 838366 - RNA, 22 nt, Human
gcagaagcccggucagcgcacg

SEQ ID NO: 838367 - RNA, 22 nt, Human
cagggcuguaaauuagugcuga

SEQ ID NO: 838368 - RNA, 22 nt, Human
cugggagcugucaggagcgugu

SEQ ID NO: 838369 - RNA, 22 nt, Human
ucaccgucgggggucgcugucu

SEQ ID NO: 838370 - RNA, 21 nt, Human
aaucauacaaaacaugucagg

SEQ ID NO: 838371 - RNA, 22 nt, Human
ucuuagaaaugaaguucuuucu

SEQ ID NO: 838372 - RNA, 23 nt, Human
uucaagauacgguuuccaggcug

SEQ ID NO: 838373 - RNA, 19 nt, Human
gcagccaccgcggcggccg

SEQ ID NO: 838374 - RNA, 22 nt, Human
cugggggcaauggucagagugu

SEQ ID NO: 838375 - RNA, 22 nt, Human
cccuuagcuccaagggguuugg

SEQ ID NO: 838376 - RNA, 22 nt, Human
gccugggugaauuugauccuaa

SEQ ID NO: 838377 - RNA, 22 nt, Human
cagcugcccugccuugcccuua

SEQ ID NO: 838378 - RNA, 21 nt, Human
agcuggugucagagcucuggg

SEQ ID NO: 838379 - RNA, 22 nt, Human
auucacuggcagacagaacuca

SEQ ID NO: 838380 - RNA, 22 nt, Human
aggaagcuccaugaaggcagag

SEQ ID NO: 838381 - RNA, 22 nt, Human
ucccagccggugccuggguccc

SEQ ID NO: 838382 - RNA, 22 nt, Human
ccaggagauuuuuccauagcac

SEQ ID NO: 838383 - RNA, 22 nt, Human
gcugccuguccugaggaguccg

SEQ ID NO: 838384 - RNA, 22 nt, Human
aagaaugauuacaaagcaacga

SEQ ID NO: 838385 - RNA, 18 nt, Human
ugugguggagcugccuuc

SEQ ID NO: 838386 - RNA, 22 nt, Human
cagagcuguuacuauucaugaa

SEQ ID NO: 838387 - RNA, 22 nt, Human
gcaccaggcuuagagccccagg

SEQ ID NO: 838388 - RNA, 22 nt, Human
aagagggaggugcgggugcaga

SEQ ID NO: 838389 - RNA, 22 nt, Human
ggcugcuguacugaugucaguu

SEQ ID NO: 838390 - RNA, 22 nt, Human
uuuccaaauaaggucacacuca

SEQ ID NO: 838391 - RNA, 22 nt, Human
gggcccuggauuuaagcaugga

SEQ ID NO: 838392 - RNA, 22 nt, Human
gggcucagccccauugaaccag

SEQ ID NO: 838393 - RNA, 22 nt, Human
cagcccagcacuaaguagauuu

SEQ ID NO: 838394 - RNA, 22 nt, Human
uauccaaaggaacaaucacagc

SEQ ID NO: 838395 - RNA, 22 nt, Human
ucacuuauugcucaucucaugc

SEQ ID NO: 838396 - RNA, 22 nt, Human
uuuauuauguacaggcacuaua

SEQ ID NO: 838397 - RNA, 22 nt, Human
gcacagggaggcuggccuggcc

SEQ ID NO: 838398 - RNA, 22 nt, Human
agaagccauugaagcagaccuc

SEQ ID NO: 838399 - RNA, 22 nt, Human
uuuuuccuaagcaguggagcug

SEQ ID NO: 838400 - RNA, 22 nt, Human
uggucaguugcaucagagaagu

SEQ ID NO: 838401 - RNA, 22 nt, Human
aauagaaaggaggggcucuugu

SEQ ID NO: 838402 - RNA, 22 nt, Human
agacagcugcucgcagagcuau

SEQ ID NO: 838403 - RNA, 22 nt, Human
ugcuccuuccucauccugugca

SEQ ID NO: 838404 - RNA, 21 nt, Human
gauaaaaugggccuugguccu

SEQ ID NO: 838405 - RNA, 22 nt, Human
guuuucaauuauaagauggcuu

SEQ ID NO: 838406 - RNA, 22 nt, Human
cuggagcauccaugcccagggu

SEQ ID NO: 838407 - RNA, 22 nt, Human
cucuucuuggcccccaugaggg

SEQ ID NO: 838408 - RNA, 22 nt, Human
acauuuaaugauccuacuguga

SEQ ID NO: 838409 - RNA, 22 nt, Human
uccaggaguuugaccugugggc

SEQ ID NO: 838410 - RNA, 22 nt, Human
uucugucagcugcuuugucuca

SEQ ID NO: 838411 - RNA, 22 nt, Human
uaugcacaguuacaagaauauc

SEQ ID NO: 838412 - RNA, 22 nt, Human
cuccucacacccacugcaacca

SEQ ID NO: 838413 - RNA, 22 nt, Human
aauuucagaccauuugcaauua

SEQ ID NO: 838414 - RNA, 22 nt, Human
ucauugaauuucacagcuuuau

SEQ ID NO: 838415 - RNA, 22 nt, Human
uagagcuagcuucaaaaugcga

SEQ ID NO: 838416 - RNA, 22 nt, Human
ucaggccacuucacaggugauu

SEQ ID NO: 838417 - RNA, 22 nt, Human
aaugucugagucucuguauccc

SEQ ID NO: 838418 - RNA, 22 nt, Human
aggcaggcaaccaccugggaag

SEQ ID NO: 838419 - RNA, 22 nt, Human
guaaaguucuauuugaauuuag

SEQ ID NO: 838420 - RNA, 22 nt, Human
auacagaagaacuauagccacu

SEQ ID NO: 838421 - RNA, 22 nt, Human
gcccaugcacuuucugugaugg

SEQ ID NO: 838422 - RNA, 21 nt, Human
agcaggaggcagucacagcuc

SEQ ID NO: 838423 - RNA, 22 nt, Human
cccagcacuuugaauaugucac

SEQ ID NO: 838424 - RNA, 22 nt, Human
acaaaauuuuuagacaaggcuu

SEQ ID NO: 838425 - RNA, 22 nt, Human
agcagcaggagccgugggguga

SEQ ID NO: 838426 - RNA, 22 nt, Human
uaauacuguauacugcaaauuu

SEQ ID NO: 838427 - RNA, 22 nt, Human
cuugauguauaaguugauaugu

SEQ ID NO: 838428 - RNA, 22 nt, Human
gaaauauuucucuugagccccu

SEQ ID NO: 838429 - RNA, 22 nt, Human
ccuggaggagcgcugaccagcu

SEQ ID NO: 838430 - RNA, 22 nt, Human
aaguuugagagccuuuaguaua

SEQ ID NO: 838431 - RNA, 22 nt, Human
aaaaaaucagaucuuugguuaa

SEQ ID NO: 838432 - RNA, 22 nt, Human
uaugaagaaguucugugaaaug

SEQ ID NO: 838433 - RNA, 22 nt, Human
aagaggaacugggggcugaguc

SEQ ID NO: 838434 - RNA, 22 nt, Human
ccagagcugauuccugggacuu

SEQ ID NO: 838435 - RNA, 22 nt, Human
guuuccauggcucuguuaaugg

SEQ ID NO: 838436 - RNA, 22 nt, Human
uagcagaaacuguuacagaagg

SEQ ID NO: 838437 - RNA, 22 nt, Human
cagagcuggagaaguggauuua

SEQ ID NO: 838438 - RNA, 22 nt, Human
cccaagagguggagguugcagu

SEQ ID NO: 838439 - RNA, 22 nt, Human
uugccuugauucuucucaugug

SEQ ID NO: 838440 - RNA, 22 nt, Human
gagcucugacugcugggugaca

SEQ ID NO: 838441 - RNA, 22 nt, Human
aaaugcacagguuuuaaauccu

SEQ ID NO: 838442 - RNA, 22 nt, Human
uuaacagagugccuggcaugua

SEQ ID NO: 838443 - RNA, 22 nt, Human
cugagcucuaaugucagccuug

SEQ ID NO: 838444 - RNA, 22 nt, Human
acauuucugucuuagggacugu

SEQ ID NO: 838445 - RNA, 22 nt, Human
cagucccacuagugccaauacc

SEQ ID NO: 838446 - RNA, 22 nt, Human
cugccagguuggcgcucgcucu

SEQ ID NO: 838447 - RNA, 19 nt, Human
ccuuccuccccagggccau

SEQ ID NO: 838448 - RNA, 22 nt, Human
ucagccaggccaggcauucaca

SEQ ID NO: 838449 - RNA, 22 nt, Human
ucauuucaaugauacuacuaag

SEQ ID NO: 838450 - RNA, 22 nt, Human
gaaccaaguaggauacaaggag

SEQ ID NO: 838451 - RNA, 22 nt, Human
aauucugugcaggcagagcuau

SEQ ID NO: 838452 - RNA, 22 nt, Human
auuaggcagggcaugguggcuc

SEQ ID NO: 838453 - RNA, 18 nt, Human
gcuggcugcacuucugcu

SEQ ID NO: 838454 - RNA, 22 nt, Human
ugggcugccagcucuccagaug

SEQ ID NO: 838455 - RNA, 22 nt, Human
uuuucuuaggugcuccaaguag

SEQ ID NO: 838456 - RNA, 22 nt, Human
ggggacugccuuccacagacac

SEQ ID NO: 838457 - RNA, 22 nt, Human
cccugggcagucugcacuucag

SEQ ID NO: 838458 - RNA, 22 nt, Human
ucccagaguuuccuguguccca

SEQ ID NO: 838459 - RNA, 21 nt, Human
uucuucuuggacuguuuuggc

SEQ ID NO: 838460 - RNA, 22 nt, Human
aggccugaggaccagauaaaug

SEQ ID NO: 838461 - RNA, 22 nt, Human
cugaagcaaaugaaacagcucu

SEQ ID NO: 838462 - RNA, 17 nt, Human
gguggccugcaguggcu

SEQ ID NO: 838463 - RNA, 22 nt, Human
ggucaggguauaaucaagugag

SEQ ID NO: 838464 - RNA, 22 nt, Human
ucaugcaaggcugaaacauggu

SEQ ID NO: 838465 - RNA, 22 nt, Human
cauucauuagaauagauaugua

SEQ ID NO: 838466 - RNA, 22 nt, Human
uguggugagaaacugguagauu

SEQ ID NO: 838467 - RNA, 22 nt, Human
guccuggcuuaguucgcuguaa

SEQ ID NO: 838468 - RNA, 22 nt, Human
uuaucacuuaugagcuuuuugc

SEQ ID NO: 838469 - RNA, 22 nt, Human
gggcagcucuggcugugggaag

SEQ ID NO: 838470 - RNA, 22 nt, Human
cagggacaauggcagagccuga

SEQ ID NO: 838471 - RNA, 22 nt, Human
ggcugcagguugguuggcagcu

SEQ ID NO: 838472 - RNA, 22 nt, Human
auuucccaugugaaucaauugg

SEQ ID NO: 838473 - RNA, 21 nt, Human
ggccugaguauaggacaggcc

SEQ ID NO: 838474 - RNA, 22 nt, Human
uaaauguggagacucaggaguc

SEQ ID NO: 838475 - RNA, 22 nt, Human
ccugagacaugaaccaggcucc

SEQ ID NO: 838476 - RNA, 22 nt, Human
aaacagaaauuuccucaugcuc

SEQ ID NO: 838477 - RNA, 22 nt, Human
uggcucagaguucaucuuuuag

SEQ ID NO: 838478 - RNA, 22 nt, Human
gagucuuugguaaagucugcug

SEQ ID NO: 838479 - RNA, 22 nt, Human
uguaggaguccaaucaggagac

SEQ ID NO: 838480 - RNA, 22 nt, Human
ggguggcacaggugcagagggu

SEQ ID NO: 838481 - RNA, 22 nt, Human
acaggagugaaucuggcacuua

SEQ ID NO: 838482 - RNA, 22 nt, Human
ggcucuggugaggguaggagau

SEQ ID NO: 838483 - RNA, 22 nt, Human
ucagggcagguuaacuugggug

SEQ ID NO: 838484 - RNA, 22 nt, Human
ucuguucaucaucuggacacau

SEQ ID NO: 838485 - RNA, 22 nt, Human
gcucugucauuuugcagacacu

SEQ ID NO: 838486 - RNA, 22 nt, Human
gaacacauuucucugacuguag

SEQ ID NO: 838487 - RNA, 22 nt, Human
gcagccaggaaagcuggacccu

SEQ ID NO: 838488 - RNA, 19 nt, Human
uucauucucuuauuguugu

SEQ ID NO: 838489 - RNA, 22 nt, Human
ugcccacauucaaaaggugaug

SEQ ID NO: 838490 - RNA, 22 nt, Human
cagcuucugagcaagccagggg

SEQ ID NO: 838491 - RNA, 22 nt, Human
gcucccaggcauggagguaauu

SEQ ID NO: 838492 - RNA, 22 nt, Human
aggcuggcccuacuggcugccu

SEQ ID NO: 838493 - RNA, 22 nt, Human
ucaguaacuuacuuauucaccu

SEQ ID NO: 838494 - RNA, 22 nt, Human
ugccucugcugcuguggcauca

SEQ ID NO: 838495 - RNA, 22 nt, Human
aaucauaauucaaauaagcuua

SEQ ID NO: 838496 - RNA, 22 nt, Human
acuaaggaauaugacaaacuca

SEQ ID NO: 838497 - RNA, 22 nt, Human
uauauagaaaagcagauguugg

SEQ ID NO: 838498 - RNA, 22 nt, Human
ggcagcugucucugaguuagca

SEQ ID NO: 838499 - RNA, 22 nt, Human
augcuguguauuuuacucuuuc

SEQ ID NO: 838500 - RNA, 18 nt, Human
ucauuuguuuugcaugaa

SEQ ID NO: 838501 - RNA, 22 nt, Human
caagagcauuuaguuagcuggu

SEQ ID NO: 838502 - RNA, 22 nt, Human
cugccuguuuucugauagauuu

SEQ ID NO: 838503 - RNA, 22 nt, Human
gcugccuguggcccuucugggu

SEQ ID NO: 838504 - RNA, 23 nt, Human
uccaagggcuacaaacacagacc

SEQ ID NO: 838505 - RNA, 22 nt, Human
agccuggccugggcaggcacau

SEQ ID NO: 838506 - RNA, 18 nt, Human
gcagagugcgucucugug

SEQ ID NO: 838507 - RNA, 22 nt, Human
uuuguaaauagcaguacucaug

SEQ ID NO: 838508 - RNA, 22 nt, Human
uccagggaugguaaugagcagu

SEQ ID NO: 838509 - RNA, 22 nt, Human
auuccaaacgccucgcggacuu

SEQ ID NO: 838510 - RNA, 18 nt, Human
ugucauaauauaucaccu

SEQ ID NO: 838511 - RNA, 22 nt, Human
ucugccugcggcugcagguggc

SEQ ID NO: 838512 - RNA, 22 nt, Human
auguguacaaccaagcacuaaa

SEQ ID NO: 838513 - RNA, 22 nt, Human
uacaaagucaccagcuucuugc

SEQ ID NO: 838514 - RNA, 20 nt, Human
gaggccucagccucagcucc

SEQ ID NO: 838515 - RNA, 22 nt, Human
ccacugucugcaggccucagca

SEQ ID NO: 838516 - RNA, 22 nt, Human
cagcucccuauggugaggcgac

SEQ ID NO: 838517 - RNA, 22 nt, Human
ccucuucuaggacguccuugug

SEQ ID NO: 838518 - RNA, 22 nt, Human
uguagggaggaaggguuggaaa

SEQ ID NO: 838519 - RNA, 22 nt, Human
auuugucuuuggaccugugaga

SEQ ID NO: 838520 - RNA, 22 nt, Human
ucaaaugcaggucuggucuugg

SEQ ID NO: 838521 - RNA, 22 nt, Human
auguagaagcugacagugcugu

SEQ ID NO: 838522 - RNA, 22 nt, Human
aaagauuugaaauuaggcauca

SEQ ID NO: 838523 - RNA, 21 nt, Human
cugccuugaaugguacuggga

SEQ ID NO: 838524 - RNA, 22 nt, Human
auaacaugaccugugcuucaca

SEQ ID NO: 838525 - RNA, 22 nt, Human
cugaacuuauugagugcuugcu

SEQ ID NO: 838526 - RNA, 22 nt, Human
cccaggaggccaagguugcagu

SEQ ID NO: 838527 - RNA, 22 nt, Human
aagaaugucguugguauuuuaa

SEQ ID NO: 838528 - RNA, 22 nt, Human
ugaaauaggaaacagauguuuc

SEQ ID NO: 838529 - RNA, 22 nt, Human
agaguguuuuucugucaaggac

SEQ ID NO: 838530 - RNA, 22 nt, Human
ggcuucuccccuuugagucuuc

SEQ ID NO: 838531 - RNA, 22 nt, Human
agccagagagccccagguucua

SEQ ID NO: 838532 - RNA, 19 nt, Human
gcuuuuuguugucaaaggu

SEQ ID NO: 838533 - RNA, 21 nt, Human
acaugucuggucauuuuuagc

SEQ ID NO: 838534 - RNA, 22 nt, Human
cuuuggcaaugucauuuucaau

SEQ ID NO: 838535 - RNA, 22 nt, Human
ugcagugguugagagcccagac

SEQ ID NO: 838536 - RNA, 21 nt, Human
ugcuggccucaagggugacuu

SEQ ID NO: 838537 - RNA, 22 nt, Human
ccugccugacagagaagguuca

SEQ ID NO: 838538 - RNA, 22 nt, Human
acugccuugaaagauuguugag

SEQ ID NO: 838539 - RNA, 22 nt, Human
uucaagguaugguagcugguca

SEQ ID NO: 838540 - RNA, 22 nt, Human
aauuccaaauguuuucaaucca

SEQ ID NO: 838541 - RNA, 22 nt, Human
auggacagugugaagcagauag

SEQ ID NO: 838542 - RNA, 22 nt, Human
gcugcuccgucugagcucuggu

SEQ ID NO: 838543 - RNA, 22 nt, Human
gcaccugcaggaugagccaggg

SEQ ID NO: 838544 - RNA, 22 nt, Human
guggcucuaggugagcauggag

SEQ ID NO: 838545 - RNA, 22 nt, Human
cucaggauggaagccuacagga

SEQ ID NO: 838546 - RNA, 22 nt, Human
uggcucucaggccugcugcguu

SEQ ID NO: 838547 - RNA, 22 nt, Human
uucagaaacagagugagugagu

SEQ ID NO: 838548 - RNA, 22 nt, Human
aaaauacacauacuaggggaaa

SEQ ID NO: 838549 - RNA, 22 nt, Human
cggcuggggcuguccccaugac

SEQ ID NO: 838550 - RNA, 19 nt, Human
ccuuugaaucaggacacuu

SEQ ID NO: 838551 - RNA, 22 nt, Human
gggcaagcucuucagaagcucu

SEQ ID NO: 838552 - RNA, 22 nt, Human
ccagcugucagugugaaaauaa

SEQ ID NO: 838553 - RNA, 22 nt, Human
aaucaguuagaaggaagagaau

SEQ ID NO: 838554 - RNA, 20 nt, Human
uaucaaucagaaagaagacu

SEQ ID NO: 838555 - RNA, 18 nt, Human
gggcuguguucaugccca

SEQ ID NO: 838556 - RNA, 22 nt, Human
uauaauguuuuccauggacuga

SEQ ID NO: 838557 - RNA, 22 nt, Human
accaggagccauagagucaggc

SEQ ID NO: 838558 - RNA, 22 nt, Human
uucuucuucaagugcugcauuc

SEQ ID NO: 838559 - RNA, 22 nt, Human
aggagucaggaccaaauggaaa

SEQ ID NO: 838560 - RNA, 22 nt, Human
ugaaguccuagaacuccuggua

SEQ ID NO: 838561 - RNA, 22 nt, Human
ucugucccugagagcucaggag

SEQ ID NO: 838562 - RNA, 22 nt, Human
gccagcagcccagaaggacuuu

SEQ ID NO: 838563 - RNA, 22 nt, Human
cuucucagaggccagaagcuau

SEQ ID NO: 838564 - RNA, 22 nt, Human
ggcugagggccagggcuagucu

SEQ ID NO: 838565 - RNA, 21 nt, Human
agcugagcccagaagacuggu

SEQ ID NO: 838566 - RNA, 22 nt, Human
acucccagguugccuggcaggc

SEQ ID NO: 838567 - RNA, 22 nt, Human
agcacagauucugaagaguccu

SEQ ID NO: 838568 - RNA, 22 nt, Human
cccaccaguacagaugguagau

SEQ ID NO: 838569 - RNA, 22 nt, Human
aaucagaauuuauugaaucuuu

SEQ ID NO: 838570 - RNA, 22 nt, Human
ggccucagugggccgcugcagg

SEQ ID NO: 838571 - RNA, 22 nt, Human
ugcagaguaaaagcagaugcua

SEQ ID NO: 838572 - RNA, 22 nt, Human
cacaggcugcccgcagcuggga

SEQ ID NO: 838573 - RNA, 22 nt, Human
uuuuauagcugaauaguauucc

SEQ ID NO: 838574 - RNA, 21 nt, Human
uggcucugaaagagugcugca

SEQ ID NO: 838575 - RNA, 22 nt, Human
gcugagcuagaaaaggaccaca

SEQ ID NO: 838576 - RNA, 22 nt, Human
uccauaagcagguucuuccuga

SEQ ID NO: 838577 - RNA, 20 nt, Human
gugggcagcaggcauacugg

SEQ ID NO: 838578 - RNA, 22 nt, Human
agcaggugacccaagcaggcug

SEQ ID NO: 838579 - RNA, 22 nt, Human
acacagccaggguaguaaggcu

SEQ ID NO: 838580 - RNA, 22 nt, Human
aaaucucaggccucuauuuacu

SEQ ID NO: 838581 - RNA, 22 nt, Human
ggcagaaggccucccagcuccu

SEQ ID NO: 838582 - RNA, 22 nt, Human
ccagcccugccucucagggccc

SEQ ID NO: 838583 - RNA, 22 nt, Human
gaaaagggcaagagagagggca

SEQ ID NO: 838584 - RNA, 19 nt, Human
uauuucaaagugccgucua

SEQ ID NO: 838585 - RNA, 22 nt, Human
ucucaaaucaaacuuugagcuu

SEQ ID NO: 838586 - RNA, 22 nt, Human
ccuggagcacauggcaggaggc

SEQ ID NO: 838587 - RNA, 22 nt, Human
cacugcuuuuuuggcuauguac

SEQ ID NO: 838588 - RNA, 22 nt, Human
uuauccaaacuggugaaucauu

SEQ ID NO: 838589 - RNA, 22 nt, Human
gccuugcuuugcuucuggacag

SEQ ID NO: 838590 - RNA, 22 nt, Human
ccucccuggccagagcagcagc

SEQ ID NO: 838591 - RNA, 22 nt, Human
ugauuuuuagcuauucugaaga

SEQ ID NO: 838592 - RNA, 22 nt, Human
uucuucucggcugucagauagu

SEQ ID NO: 838593 - RNA, 22 nt, Human
gccagguggcugagcagcugca

SEQ ID NO: 838594 - RNA, 22 nt, Human
caucagaacaaaucgguuaaga

SEQ ID NO: 838595 - RNA, 22 nt, Human
cacagggccacuuucccaguaa

SEQ ID NO: 838596 - RNA, 20 nt, Human
ugcuggggacauacagggug

SEQ ID NO: 838597 - RNA, 18 nt, Human
aagccagagaccacugcc

SEQ ID NO: 838598 - RNA, 22 nt, Human
uccagucauuuccauuguuccc

SEQ ID NO: 838599 - RNA, 22 nt, Human
gugaaacagaagcuccuggaau

SEQ ID NO: 838600 - RNA, 23 nt, Human
agaugaaagcuucccaucacagu

SEQ ID NO: 838601 - RNA, 21 nt, Human
ugggcagauggcaguguggcu

SEQ ID NO: 838602 - RNA, 22 nt, Human
gcccaggaggucaaguagcuau

SEQ ID NO: 838603 - RNA, 22 nt, Human
gcagaggccaggccaccagcaa

SEQ ID NO: 838604 - RNA, 20 nt, Human
uccugcaguuccuaggaggg

SEQ ID NO: 838605 - RNA, 21 nt, Human
uuuauguacuucauagaguag

SEQ ID NO: 838606 - RNA, 21 nt, Human
ccacaggggcuccccugucag

SEQ ID NO: 838607 - RNA, 22 nt, Human
aggcacugaauauccaguaaaa

SEQ ID NO: 838608 - RNA, 22 nt, Human
auuacaagaugcauccauauuu

SEQ ID NO: 838609 - RNA, 22 nt, Human
auggcccaggccuccuguggcu

SEQ ID NO: 838610 - RNA, 22 nt, Human
agauacauuaguaguuacuugu

SEQ ID NO: 838611 - RNA, 22 nt, Human
aguguuucccaguaggaugaaa

SEQ ID NO: 838612 - RNA, 19 nt, Human
agagaggcugugugaggga

SEQ ID NO: 838613 - RNA, 22 nt, Human
uggaaggggagcuggaaagggg

SEQ ID NO: 838614 - RNA, 21 nt, Human
ccauaccuaccucaccugguu

SEQ ID NO: 838615 - RNA, 22 nt, Human
uauuuuaucugccagaguggag

SEQ ID NO: 838616 - RNA, 22 nt, Human
ggcugccugaggcugaggcccg

SEQ ID NO: 838617 - RNA, 22 nt, Human
ccaggagagcaaaggucacucu

SEQ ID NO: 838618 - RNA, 22 nt, Human
cucagcccagcccaggaccagg

SEQ ID NO: 838619 - RNA, 20 nt, Human
uaacagaaguagaagugggu

SEQ ID NO: 838620 - RNA, 22 nt, Human
cauuuagaaacuguuuuuaaca

SEQ ID NO: 838621 - RNA, 22 nt, Human
aauugcaauuuucuuaaggucu

SEQ ID NO: 838622 - RNA, 19 nt, Human
aaggcagcaguagcaucca

SEQ ID NO: 838623 - RNA, 21 nt, Human
gccacugcacuccagccuggg

SEQ ID NO: 838624 - RNA, 22 nt, Human
ucagggcagccuaaggcaccuc

SEQ ID NO: 838625 - RNA, 22 nt, Human
uuaacagagaacauagaaguag

SEQ ID NO: 838626 - RNA, 22 nt, Human
guggagacuucuacuagagacc

SEQ ID NO: 838627 - RNA, 22 nt, Human
aggugcugccccgagaaggaug

SEQ ID NO: 838628 - RNA, 22 nt, Human
gcuauacacauuucuugguagu

SEQ ID NO: 838629 - RNA, 17 nt, Human
ucaugcccaacuauuac

SEQ ID NO: 838630 - RNA, 22 nt, Human
gacaggguacgggcuaggcaca

SEQ ID NO: 838631 - RNA, 22 nt, Human
aaugaugggaaggagaaaagca

SEQ ID NO: 838632 - RNA, 22 nt, Human
gaugcugaagugaagugaucuu

SEQ ID NO: 838633 - RNA, 22 nt, Human
cagccugggcuccagagucccu

SEQ ID NO: 838634 - RNA, 22 nt, Human
ggcugccuugacccuggcuccg

SEQ ID NO: 838635 - RNA, 22 nt, Human
ccugggugaugugcugcccucg

SEQ ID NO: 838636 - RNA, 22 nt, Human
uuugacaaaggaaaaaugcaca

SEQ ID NO: 838637 - RNA, 22 nt, Human
aaaaauaggucaaccguguaug

SEQ ID NO: 838638 - RNA, 22 nt, Human
cuuuaagagaucaccaaucaca

SEQ ID NO: 838639 - RNA, 22 nt, Human
cugcugagguccuugcucagac

SEQ ID NO: 838640 - RNA, 22 nt, Human
aggcucagcaucugauucauau

SEQ ID NO: 838641 - RNA, 22 nt, Human
agagcagguggcaacucuggga

SEQ ID NO: 838642 - RNA, 22 nt, Human
caugauaauuguuaacaaagua

SEQ ID NO: 838643 - RNA, 22 nt, Human
cugcccaggaaccagaggggca

SEQ ID NO: 838644 - RNA, 22 nt, Human
ugagcccagagaucugagcuau

SEQ ID NO: 838645 - RNA, 22 nt, Human
ggccugaggcgucccagcugug

SEQ ID NO: 838646 - RNA, 22 nt, Human
gcuggcaggguucucacugaaa

SEQ ID NO: 838647 - RNA, 22 nt, Human
ucugggagcacacgcagugauc

SEQ ID NO: 838648 - RNA, 22 nt, Human
auuucaguguugguuagcaagc

SEQ ID NO: 838649 - RNA, 22 nt, Human
cagccagcuucagauccaagcc

SEQ ID NO: 838650 - RNA, 22 nt, Human
caauauauaggaacaacuuagg

SEQ ID NO: 838651 - RNA, 22 nt, Human
cagccucucuguaucucaggau

SEQ ID NO: 838652 - RNA, 18 nt, Human
uggugaaggguggaggag

SEQ ID NO: 838653 - RNA, 16 nt, Human
ggagagugucugcaaa

SEQ ID NO: 838654 - RNA, 22 nt, Human
ccaggccucuggcugcuuaguc

SEQ ID NO: 838655 - RNA, 22 nt, Human
ccugccugcagaaaguaucucc

SEQ ID NO: 838656 - RNA, 22 nt, Human
cugcuuugacuguuaagaacca

SEQ ID NO: 838657 - RNA, 22 nt, Human
auucuuauuauaguaaaacagu

SEQ ID NO: 838658 - RNA, 22 nt, Human
acucugaggagugacuagaggu

SEQ ID NO: 838659 - RNA, 23 nt, Human
cugcugugaaacaugguuuuggu

SEQ ID NO: 838660 - RNA, 22 nt, Human
gccaguuccuguggagucagag

SEQ ID NO: 838661 - RNA, 22 nt, Human
agcgggugcugugucagcccuc

SEQ ID NO: 838662 - RNA, 22 nt, Human
aggcuucuacguggucccaggg

SEQ ID NO: 838663 - RNA, 22 nt, Human
aucagaaaaacauaauguuauu

SEQ ID NO: 838664 - RNA, 23 nt, Human
cuuuccuuucuuugacacccagc

SEQ ID NO: 838665 - RNA, 22 nt, Human
uuagauaauguuauuguaauuu

SEQ ID NO: 838666 - RNA, 22 nt, Human
aggcccugcccagugccacaag

SEQ ID NO: 838667 - RNA, 22 nt, Human
uucuuuaaaauagugagaaaga

SEQ ID NO: 838668 - RNA, 22 nt, Human
ggucucagcaguugcuuugacu

SEQ ID NO: 838669 - RNA, 22 nt, Human
uucuuaaaacuuauggacaggu

SEQ ID NO: 838670 - RNA, 22 nt, Human
ugcucuucggggccacugcuug

SEQ ID NO: 838671 - RNA, 22 nt, Human
agaugguguuuccccaggugga

SEQ ID NO: 838672 - RNA, 22 nt, Human
uucaacuauuaugaauaaaauu

SEQ ID NO: 838673 - RNA, 22 nt, Human
ugcuuuuaagaacaaugcugcu

SEQ ID NO: 838674 - RNA, 22 nt, Human
uuccucucaacaugccugccgg

SEQ ID NO: 838675 - RNA, 18 nt, Human
ccugccagucuggagcag

SEQ ID NO: 838676 - RNA, 22 nt, Human
gcaguggggaaugcuggggaga

SEQ ID NO: 838677 - RNA, 22 nt, Human
uuccacaauguaugaauaagau

SEQ ID NO: 838678 - RNA, 22 nt, Human
aacauucugguucuaaaaaccu

SEQ ID NO: 838679 - RNA, 22 nt, Human
ggaagaggaggagccaggcuuu

SEQ ID NO: 838680 - RNA, 22 nt, Human
cauucacaucuuguuccaucac

SEQ ID NO: 838681 - RNA, 22 nt, Human
accaggagacaugaccaaugag

SEQ ID NO: 838682 - RNA, 22 nt, Human
ugggcagaucuuugguggcuag

SEQ ID NO: 838683 - RNA, 22 nt, Human
gaacaguaucaguagugccagu

SEQ ID NO: 838684 - RNA, 20 nt, Human
gucaucgccggcagcaaaga

SEQ ID NO: 838685 - RNA, 22 nt, Human
uggcucagcuuacuuuugaggg

SEQ ID NO: 838686 - RNA, 22 nt, Human
agccugagccccauccagcuga

SEQ ID NO: 838687 - RNA, 22 nt, Human
uggccucugggaaagcagauuc

SEQ ID NO: 838688 - RNA, 22 nt, Human
acuguucaaguuuuaugcugga

SEQ ID NO: 838689 - RNA, 18 nt, Human
acauacauucugucugca

SEQ ID NO: 838690 - RNA, 22 nt, Human
gcucugcugaagccccuugcau

SEQ ID NO: 838691 - RNA, 22 nt, Human
ugcaggugccucuugagcuugu

SEQ ID NO: 838692 - RNA, 22 nt, Human
ucggagcuguagaugaaacccu

SEQ ID NO: 838693 - RNA, 22 nt, Human
cugagggcccugaagcuuggca

SEQ ID NO: 838694 - RNA, 22 nt, Human
uacauucuggaaaggcacagac

SEQ ID NO: 838695 - RNA, 22 nt, Human
agauggggcagaauggagccau

SEQ ID NO: 838696 - RNA, 22 nt, Human
caaaucuauauguugauauucu

SEQ ID NO: 838697 - RNA, 22 nt, Human
uuagcauuucaguacacauguu

SEQ ID NO: 838698 - RNA, 22 nt, Human
gcagcuggacccacacggcuua

SEQ ID NO: 838699 - RNA, 22 nt, Human
ggcugcaguuugucuuuugcuu

SEQ ID NO: 838700 - RNA, 22 nt, Human
ggggcccagcaccccuccucgc

SEQ ID NO: 838701 - RNA, 22 nt, Human
ccuggaucagagccagagaagc

SEQ ID NO: 838702 - RNA, 22 nt, Human
ugaaaagacugcaagagagcau

SEQ ID NO: 838703 - RNA, 22 nt, Human
uuacuuuguucucaagauaugu

SEQ ID NO: 838704 - RNA, 22 nt, Human
aaugaaaauuggacccuagaac

SEQ ID NO: 838705 - RNA, 22 nt, Human
ugcugggcuaggguggagcucu

SEQ ID NO: 838706 - RNA, 22 nt, Human
ucagugugaggucuuccacccg

SEQ ID NO: 838707 - RNA, 22 nt, Human
uaagacacaugcguacaagaua

SEQ ID NO: 838708 - RNA, 22 nt, Human
cuagagggauguuaggauagca

SEQ ID NO: 838709 - RNA, 22 nt, Human
ucuucuccagugcuucugcaca

SEQ ID NO: 838710 - RNA, 22 nt, Human
ucucaagcuuguugguauguuu

SEQ ID NO: 838711 - RNA, 22 nt, Human
ucucaggaguagugggauccau

SEQ ID NO: 838712 - RNA, 22 nt, Human
guguaaggccccagguucuuua

SEQ ID NO: 838713 - RNA, 22 nt, Human
agauauauuuaagguaauaagu

SEQ ID NO: 838714 - RNA, 20 nt, Human
ugcagcugguuucacaggga

SEQ ID NO: 838715 - RNA, 19 nt, Human
uguagcaguuuaaaacaac

SEQ ID NO: 838716 - RNA, 22 nt, Human
ccugcugggccugagcaaugag

SEQ ID NO: 838717 - RNA, 22 nt, Human
cagccagcuggcacugugagua

SEQ ID NO: 838718 - RNA, 22 nt, Human
agcuggugcugaagcucuugag

SEQ ID NO: 838719 - RNA, 22 nt, Human
ggaggguuagcaaaggcacaga

SEQ ID NO: 838720 - RNA, 22 nt, Human
gccuuugcaccaucagugcaau

SEQ ID NO: 838721 - RNA, 22 nt, Human
cagggcuguuagcugcugcucu

SEQ ID NO: 838722 - RNA, 22 nt, Human
uuccgcuggggccgccuggcgg

SEQ ID NO: 838723 - RNA, 22 nt, Human
cuggagcuggcuuccuuccacu

SEQ ID NO: 838724 - RNA, 22 nt, Human
gugcauuucucauacacuaaau

SEQ ID NO: 838725 - RNA, 22 nt, Human
auuuagccucauuuuugacaua

SEQ ID NO: 838726 - RNA, 22 nt, Human
uuugagauggagucuugcucug

SEQ ID NO: 838727 - RNA, 22 nt, Human
uaguuaaaauaauggagauguu

SEQ ID NO: 838728 - RNA, 22 nt, Human
uaauuuacuugcaaauaacaau

SEQ ID NO: 838729 - RNA, 22 nt, Human
ggcagcuuucaauaggguuaug

SEQ ID NO: 838730 - RNA, 22 nt, Human
gauuucuuuagguguaauagug

SEQ ID NO: 838731 - RNA, 18 nt, Human
gagguccugcucuagccc

SEQ ID NO: 838732 - RNA, 22 nt, Human
uacacauguauuuauguguaca

SEQ ID NO: 838733 - RNA, 19 nt, Human
gggcuuggggcugaagccu

SEQ ID NO: 838734 - RNA, 22 nt, Human
accacugggcgggcagccugcu

SEQ ID NO: 838735 - RNA, 22 nt, Human
ccaggcugugguuuagauagag

SEQ ID NO: 838736 - RNA, 22 nt, Human
uagaaauccccagucucauagu

SEQ ID NO: 838737 - RNA, 22 nt, Human
ccugugucagccccugccucca

SEQ ID NO: 838738 - RNA, 22 nt, Human
uuuggaaaguugucacuuuaga

SEQ ID NO: 838739 - RNA, 22 nt, Human
uguccuuauaagaaaaggaaau

SEQ ID NO: 838740 - RNA, 22 nt, Human
ucucugcucugugccucaguuu

SEQ ID NO: 838741 - RNA, 22 nt, Human
cagagcaguaaaucuggggcac

SEQ ID NO: 838742 - RNA, 22 nt, Human
auguaauaggguaacauaacau

SEQ ID NO: 838743 - RNA, 22 nt, Human
gagguuagaggucagugcaguc

SEQ ID NO: 838744 - RNA, 22 nt, Human
gcagggacaucuuugucuagua

SEQ ID NO: 838745 - RNA, 22 nt, Human
agcagggcagcugaugcgcacg

SEQ ID NO: 838746 - RNA, 22 nt, Human
aaggaaagacauauaaaugacu

SEQ ID NO: 838747 - RNA, 22 nt, Human
caggugggcuugggagaacacu

SEQ ID NO: 838748 - RNA, 22 nt, Human
aguuggagugaacaugagauug

SEQ ID NO: 838749 - RNA, 22 nt, Human
uuuccuaguucuaagaaaugua

SEQ ID NO: 838750 - RNA, 21 nt, Human
ggagucagggucuggcugggg

SEQ ID NO: 838751 - RNA, 22 nt, Human
gcugcucucagagcucaugcug

SEQ ID NO: 838752 - RNA, 20 nt, Human
aguacaauguaugauucaga

SEQ ID NO: 838753 - RNA, 22 nt, Human
ugcagcaggcacaggacggaag

SEQ ID NO: 838754 - RNA, 23 nt, Human
uuaagacuggcugaacuuaguag

SEQ ID NO: 838755 - RNA, 22 nt, Human
agccagcugccuuucacaucug

SEQ ID NO: 838756 - RNA, 22 nt, Human
uagcagagcagggaucagagcc

SEQ ID NO: 838757 - RNA, 22 nt, Human
aggcacugaaagguggccagag

SEQ ID NO: 838758 - RNA, 22 nt, Human
uccuucaguuaucacaguacug

SEQ ID NO: 838759 - RNA, 22 nt, Human
cuggagccccaggcugugcaga

SEQ ID NO: 838760 - RNA, 20 nt, Human
cccuggagagaagcuccacg

SEQ ID NO: 838761 - RNA, 22 nt, Human
gaugugggguugagggaccagc

SEQ ID NO: 838762 - RNA, 22 nt, Human
aggaccagccuccaggucucuu

SEQ ID NO: 838763 - RNA, 22 nt, Human
uguccugcaacugaaggagaag

SEQ ID NO: 838764 - RNA, 22 nt, Human
cccaggcucccaggugggacaa

SEQ ID NO: 838765 - RNA, 22 nt, Human
aaauucuuucauggcuaauaag

SEQ ID NO: 838766 - RNA, 22 nt, Human
guauuugauacaugaaauggug

SEQ ID NO: 838767 - RNA, 19 nt, Human
ggugaccaccuggucagug

SEQ ID NO: 838768 - RNA, 22 nt, Human
auuguauaacagcauguauuuu

SEQ ID NO: 838769 - RNA, 22 nt, Human
aaugcacaugucuuggccucac

SEQ ID NO: 838770 - RNA, 22 nt, Human
ggaggggccggcugccugccac

SEQ ID NO: 838771 - RNA, 22 nt, Human
ucagaacagaagcuggcuauaa

SEQ ID NO: 838772 - RNA, 22 nt, Human
cuggggccacaacggcgcacgc

SEQ ID NO: 838773 - RNA, 22 nt, Human
ugaaagguuauuuaggucugcu

SEQ ID NO: 838774 - RNA, 21 nt, Human
agaaaauggcguuuuagauuu

SEQ ID NO: 838775 - RNA, 22 nt, Human
gggagguucuguucgcacuuga

SEQ ID NO: 838776 - RNA, 22 nt, Human
uuaacacaucccugcucuaccc

SEQ ID NO: 838777 - RNA, 22 nt, Human
agcugcccuuuaugaugcugaa

SEQ ID NO: 838778 - RNA, 22 nt, Human
agguacagcaauauaagagguc

SEQ ID NO: 838779 - RNA, 22 nt, Human
uagggcagaguccaggaugggc

SEQ ID NO: 838780 - RNA, 22 nt, Human
uagcauuaucugucuuaucauu

SEQ ID NO: 838781 - RNA, 22 nt, Human
uauuaguagcuugaaauuggug

SEQ ID NO: 838782 - RNA, 19 nt, Human
gcucagagggcccugugcu

SEQ ID NO: 838783 - RNA, 22 nt, Human
cuuccuggccauugccauggca

SEQ ID NO: 838784 - RNA, 22 nt, Human
uauuccagaugaaaucauucag

SEQ ID NO: 838785 - RNA, 22 nt, Human
gcaggagugacauggaugugga

SEQ ID NO: 838786 - RNA, 22 nt, Human
cuggcugguuacuauuucuggu

SEQ ID NO: 838787 - RNA, 18 nt, Human
uccuccuuuggccuuuuc

SEQ ID NO: 838788 - RNA, 23 nt, Human
uggccugcagaguuucugcuggg

SEQ ID NO: 838789 - RNA, 21 nt, Human
aguguccuugaucuugccuug

SEQ ID NO: 838790 - RNA, 22 nt, Human
cuuuggcacagucucauuugau

SEQ ID NO: 838791 - RNA, 22 nt, Human
ucuucucuccugcuuggcagaa

SEQ ID NO: 838792 - RNA, 22 nt, Human
agccacaggaaacagagacagc

SEQ ID NO: 838793 - RNA, 22 nt, Human
ucagaggauugccucagcgagc

SEQ ID NO: 838794 - RNA, 22 nt, Human
gagggagggccaggucccaacc

SEQ ID NO: 838795 - RNA, 22 nt, Human
aaugaacagauacacauaggca

SEQ ID NO: 838796 - RNA, 22 nt, Human
auguuucagauacagaucaaau

SEQ ID NO: 838797 - RNA, 22 nt, Human
uagauauguguuuauuaugcug

SEQ ID NO: 838798 - RNA, 22 nt, Human
gcugccugggcaggaggcgcug

SEQ ID NO: 838799 - RNA, 22 nt, Human
guuuuauaggugaaauauuacu

SEQ ID NO: 838800 - RNA, 22 nt, Human
cauuuguauguuccuccuuagg

SEQ ID NO: 838801 - RNA, 22 nt, Human
uuugacagacauuuacuacauu

SEQ ID NO: 838802 - RNA, 22 nt, Human
caaaugcuacuaauaggcaagu

SEQ ID NO: 838803 - RNA, 22 nt, Human
acagagcugggugcccccugga

SEQ ID NO: 838804 - RNA, 22 nt, Human
cuuuacauaaggauaaaccugg

SEQ ID NO: 838805 - RNA, 22 nt, Human
cuuccuguugucacagucugcg

SEQ ID NO: 838806 - RNA, 22 nt, Human
agaaaugacacacaugagacau

SEQ ID NO: 838807 - RNA, 22 nt, Human
aaagguuugcauggaauuuacc

SEQ ID NO: 838808 - RNA, 22 nt, Human
ggcagggaaacagcugauccca

SEQ ID NO: 838809 - RNA, 22 nt, Human
cagagcagaagcgguccucaca

SEQ ID NO: 838810 - RNA, 22 nt, Human
gcugagaguguaggauguuuac

SEQ ID NO: 838811 - RNA, 22 nt, Human
ucagaccauccugcuguuagug

SEQ ID NO: 838812 - RNA, 22 nt, Human
uauuugaaggcauacauuuuga

SEQ ID NO: 838813 - RNA, 22 nt, Human
gaccagagaaaggcacuggaag

SEQ ID NO: 838814 - RNA, 19 nt, Human
aggguggcaaaggagggug

SEQ ID NO: 838815 - RNA, 22 nt, Human
aagauacauaaagguagagucu

SEQ ID NO: 838816 - RNA, 22 nt, Human
agaaacauccugcuuuccauuu

SEQ ID NO: 838817 - RNA, 22 nt, Human
uguauacaauucacacuuccca

SEQ ID NO: 838818 - RNA, 22 nt, Human
gcccuggccuucaucucagaca

SEQ ID NO: 838819 - RNA, 22 nt, Human
uccugucugucuuuggucccuu

SEQ ID NO: 838820 - RNA, 17 nt, Human
ucuuuccugccaugcuc

SEQ ID NO: 838821 - RNA, 22 nt, Human
gccuggugugcgccgcgcagcu

SEQ ID NO: 838822 - RNA, 22 nt, Human
uguggcugacuccuggucccca

SEQ ID NO: 838823 - RNA, 22 nt, Human
aagaagagaaaugugcugcugg

SEQ ID NO: 838824 - RNA, 22 nt, Human
uuuugugagcccauaaaugcca

SEQ ID NO: 838825 - RNA, 22 nt, Human
cugcagccuaggugcagcuggg

SEQ ID NO: 838826 - RNA, 21 nt, Human
uugaccaagggugcgugcucc

SEQ ID NO: 838827 - RNA, 22 nt, Human
ccugggugucaugggcagcugg

SEQ ID NO: 838828 - RNA, 22 nt, Human
ccuccagcugccucagucucuu

SEQ ID NO: 838829 - RNA, 22 nt, Human
caaauguguuuuuucuucuaca

SEQ ID NO: 838830 - RNA, 22 nt, Human
uguuccaagcugcuggauaagc

SEQ ID NO: 838831 - RNA, 22 nt, Human
uccugccucacaguugaaguuu

SEQ ID NO: 838832 - RNA, 22 nt, Human
uucaagauggcaccagugagug

SEQ ID NO: 838833 - RNA, 22 nt, Human
agaaaucagaacccugaaguuc

SEQ ID NO: 838834 - RNA, 22 nt, Human
cuacagaaggagaaauggguaa

SEQ ID NO: 838835 - RNA, 22 nt, Human
uuuucacacaaggugauaaguu

SEQ ID NO: 838836 - RNA, 22 nt, Human
ucagcugcucuguugagcugaa

SEQ ID NO: 838837 - RNA, 22 nt, Human
gcuguauuuauuuucuaggguu

SEQ ID NO: 838838 - RNA, 22 nt, Human
ugucucuggcccaugagcagag

SEQ ID NO: 838839 - RNA, 18 nt, Human
gagacacaagggccugga

SEQ ID NO: 838840 - RNA, 17 nt, Human
uuagcaaaauagcacuu

SEQ ID NO: 838841 - RNA, 22 nt, Human
ggccagaaaguuaagcuguggc

SEQ ID NO: 838842 - RNA, 22 nt, Human
accagguggccccagcgugguu

SEQ ID NO: 838843 - RNA, 22 nt, Human
cugcugcugagagcucagccug

SEQ ID NO: 838844 - RNA, 19 nt, Human
caguggagauuggaggagg

SEQ ID NO: 838845 - RNA, 22 nt, Human
agagcccuuucuccaggcaccu

SEQ ID NO: 838846 - RNA, 22 nt, Human
agggugccugcugcagguucag

SEQ ID NO: 838847 - RNA, 22 nt, Human
cccagggacagaugggcagcua

SEQ ID NO: 838848 - RNA, 22 nt, Human
acucugaggcaggucagggcag

SEQ ID NO: 838849 - RNA, 23 nt, Human
ccagcccuccaccagcucuaggc

SEQ ID NO: 838850 - RNA, 22 nt, Human
gauaccagacagggagggagaa

SEQ ID NO: 838851 - RNA, 22 nt, Human
gagaggcaggcgcugcaauggu

SEQ ID NO: 838852 - RNA, 20 nt, Human
gaguccuuaugggcugaggu

SEQ ID NO: 838853 - RNA, 22 nt, Human
ucaaguauaucuagucauuagg

SEQ ID NO: 838854 - RNA, 22 nt, Human
agggcugcugcuccgggcccag

SEQ ID NO: 838855 - RNA, 22 nt, Human
cauucuuauauuuacucauuca

SEQ ID NO: 838856 - RNA, 22 nt, Human
ugaggcagaaauuccuguuuuc

SEQ ID NO: 838857 - RNA, 22 nt, Human
guuaaagaguuuggcuuucuuc

SEQ ID NO: 838858 - RNA, 22 nt, Human
guggauggacaugggcaagagg

SEQ ID NO: 838859 - RNA, 22 nt, Human
ucugcagcuucuugccagagag

SEQ ID NO: 838860 - RNA, 22 nt, Human
ugaaggaauggaggaucagagc

SEQ ID NO: 838861 - RNA, 22 nt, Human
gaggccuggagccgccuaggcg

SEQ ID NO: 838862 - RNA, 22 nt, Human
ccugccugguguaagucuaagg

SEQ ID NO: 838863 - RNA, 22 nt, Human
agcagagccagaauuggaccag

SEQ ID NO: 838864 - RNA, 22 nt, Human
gagagcugucagcguagcaccg

SEQ ID NO: 838865 - RNA, 22 nt, Human
cauuuuaaaugauuuaagccaa

SEQ ID NO: 838866 - RNA, 22 nt, Human
ugugaauaaugccgcaauaaac

SEQ ID NO: 838867 - RNA, 22 nt, Human
agagcuguuuggacaucugagu

SEQ ID NO: 838868 - RNA, 22 nt, Human
accucugcaguagggcugugcc

SEQ ID NO: 838869 - RNA, 22 nt, Human
gcucuccacugaccacggggca

SEQ ID NO: 838870 - RNA, 22 nt, Human
ucugucacaauuugcuuacucu

SEQ ID NO: 838871 - RNA, 22 nt, Human
aauaauuuugagagccuggaaa

SEQ ID NO: 838872 - RNA, 22 nt, Human
cagcucuggcgucagggagcga

SEQ ID NO: 838873 - RNA, 22 nt, Human
uggagaugaauauguguaccug

SEQ ID NO: 838874 - RNA, 20 nt, Human
agggucaguagcacagagcu

SEQ ID NO: 838875 - RNA, 22 nt, Human
auuuuucucuccacuccauuaa

SEQ ID NO: 838876 - RNA, 22 nt, Human
ggcaggagcucuccaguuugcc

SEQ ID NO: 838877 - RNA, 22 nt, Human
caguacuuggucaaggaagcag

SEQ ID NO: 838878 - RNA, 22 nt, Human
uauuccuauggccacugcuacu

SEQ ID NO: 838879 - RNA, 21 nt, Human
ugugucacuaacuagaggcua

SEQ ID NO: 838880 - RNA, 22 nt, Human
ugacauaauaauccaaacauac

SEQ ID NO: 838881 - RNA, 22 nt, Human
ccaggcucaggugcgagagaca

SEQ ID NO: 838882 - RNA, 21 nt, Human
gcaaggcuuuuguguuuccca

SEQ ID NO: 838883 - RNA, 22 nt, Human
auguagaaauuaggaugauagu

SEQ ID NO: 838884 - RNA, 23 nt, Human
cccagagcacagccuccagaugc

SEQ ID NO: 838885 - RNA, 22 nt, Human
guccucaguaagagggccucug

SEQ ID NO: 838886 - RNA, 22 nt, Human
gggccucugugcagaggggccu

SEQ ID NO: 838887 - RNA, 22 nt, Human
uacauugugauguuucaauaca

SEQ ID NO: 838888 - RNA, 22 nt, Human
acauacuuaugcuaaaaauaua

SEQ ID NO: 838889 - RNA, 22 nt, Human
acuugaauuauauuucuagaga

SEQ ID NO: 838890 - RNA, 22 nt, Human
uuugcaguuucauugcugaaau

SEQ ID NO: 838891 - RNA, 22 nt, Human
gcucuggacccuggaguggcug

SEQ ID NO: 838892 - RNA, 22 nt, Human
uuaagucauuucugauuauaga

SEQ ID NO: 838893 - RNA, 22 nt, Human
aaguucaaggugauaguggcag

SEQ ID NO: 838894 - RNA, 22 nt, Human
gccuggugguauccuggcaaga

SEQ ID NO: 838895 - RNA, 22 nt, Human
ccagcccuucccaacuggccag

SEQ ID NO: 838896 - RNA, 22 nt, Human
ggagaggacauggcucccacag

SEQ ID NO: 838897 - RNA, 19 nt, Human
agaggcugucaccuguagc

SEQ ID NO: 838898 - RNA, 22 nt, Human
uccugccucaggcucuggagua

SEQ ID NO: 838899 - RNA, 22 nt, Human
caguggucugugcuucuguaca

SEQ ID NO: 838900 - RNA, 22 nt, Human
gcccagcuggcuuccagcacau

SEQ ID NO: 838901 - RNA, 22 nt, Human
cuggggaggcagggcugccccu

SEQ ID NO: 838902 - RNA, 21 nt, Human
caauuucaugggaagauggga

SEQ ID NO: 838903 - RNA, 22 nt, Human
auuaggcacuagaaugucaauu

SEQ ID NO: 838904 - RNA, 22 nt, Human
uucucagauauuuacugagcau

SEQ ID NO: 838905 - RNA, 22 nt, Human
agccaaggagugcagguggcuu

SEQ ID NO: 838906 - RNA, 22 nt, Human
gaggggcucuuuaauaguaaca

SEQ ID NO: 838907 - RNA, 22 nt, Human
aaaggugacugcagcagcuauu

SEQ ID NO: 838908 - RNA, 22 nt, Human
agcugaugccauguggaacagu

SEQ ID NO: 838909 - RNA, 22 nt, Human
aggagccaugagugacaucaca

SEQ ID NO: 838910 - RNA, 22 nt, Human
gucaccagucccagcuccugaa

SEQ ID NO: 838911 - RNA, 22 nt, Human
uccaggaguccugggagugauu

SEQ ID NO: 838912 - RNA, 22 nt, Human
auaucuuuuagagcaagcuugu

SEQ ID NO: 838913 - RNA, 22 nt, Human
aagcagaggaccgacggaggga

SEQ ID NO: 838914 - RNA, 22 nt, Human
agcuucuugaccaagccuguaa

SEQ ID NO: 838915 - RNA, 22 nt, Human
gcucccugcacucugcagcccu

SEQ ID NO: 838916 - RNA, 22 nt, Human
cuuagaaauaaugguuucaguu

SEQ ID NO: 838917 - RNA, 22 nt, Human
uuuugaauaauucagaaacagc

SEQ ID NO: 838918 - RNA, 22 nt, Human
uccagccaugcaugacaaucac

SEQ ID NO: 838919 - RNA, 22 nt, Human
gcugucucggggcuuucuccug

SEQ ID NO: 838920 - RNA, 22 nt, Human
caagaugaaacuacagggagga

SEQ ID NO: 838921 - RNA, 23 nt, Human
cccaggagccugaguccucucug

SEQ ID NO: 838922 - RNA, 22 nt, Human
agcuggguggagggcccacggu

SEQ ID NO: 838923 - RNA, 22 nt, Human
gucccagagagcacuaguccau

SEQ ID NO: 838924 - RNA, 19 nt, Human
cuucuggcccugagccacc

SEQ ID NO: 838925 - RNA, 21 nt, Human
uaaaugugagcagggcugggc

SEQ ID NO: 838926 - RNA, 22 nt, Human
aauguuaauuuacugucuucau

SEQ ID NO: 838927 - RNA, 22 nt, Human
cauucugugauucuaaaucccu

SEQ ID NO: 838928 - RNA, 22 nt, Human
uggcucagcgcggccuggucuu

SEQ ID NO: 838929 - RNA, 22 nt, Human
auguuauggcucaaacauuugg

SEQ ID NO: 838930 - RNA, 22 nt, Human
ccuggaugauccaugucaugga

SEQ ID NO: 838931 - RNA, 22 nt, Human
cagggccugcuuccuucuuguu

SEQ ID NO: 838932 - RNA, 22 nt, Human
cauugcacuucugcuuuuccuc

SEQ ID NO: 838933 - RNA, 22 nt, Human
aguaaacauuucagauuuauuu

SEQ ID NO: 838934 - RNA, 22 nt, Human
gcugucacaucaaggcacuaaa

SEQ ID NO: 838935 - RNA, 22 nt, Human
ucacagggauggaauagaaaua

SEQ ID NO: 838936 - RNA, 22 nt, Human
auuugucuagugguauucacgu

SEQ ID NO: 838937 - RNA, 22 nt, Human
uuacuuugcuuucucauuacag

SEQ ID NO: 838938 - RNA, 23 nt, Human
acucacaaagcaggaucauguug

SEQ ID NO: 838939 - RNA, 22 nt, Human
ucagggcaagucucagaagguu

SEQ ID NO: 838940 - RNA, 22 nt, Human
acugaaggucucagcaaggaug

SEQ ID NO: 838941 - RNA, 22 nt, Human
uaugcacauauaaccugcacug

SEQ ID NO: 838942 - RNA, 22 nt, Human
ggcucugcccagguggacagca

SEQ ID NO: 838943 - RNA, 22 nt, Human
auggacaggcugagcuuccuca

SEQ ID NO: 838944 - RNA, 22 nt, Human
ccaggccuagccccugagggua

SEQ ID NO: 838945 - RNA, 22 nt, Human
gggcaguggguggcugcagccu

SEQ ID NO: 838946 - RNA, 22 nt, Human
ucuuugaauucaaacuguucaa

SEQ ID NO: 838947 - RNA, 22 nt, Human
gagggcugaagauuguggcccc

SEQ ID NO: 838948 - RNA, 22 nt, Human
aggacaggauugagcugaacug

SEQ ID NO: 838949 - RNA, 22 nt, Human
gaggcccaggucaagcagccac

SEQ ID NO: 838950 - RNA, 22 nt, Human
acuggcaguuugagaaugcauu

SEQ ID NO: 838951 - RNA, 22 nt, Human
auuguggugucaguuauaggca

SEQ ID NO: 838952 - RNA, 22 nt, Human
aaaauugaggcucauguuaaau

SEQ ID NO: 838953 - RNA, 22 nt, Human
cugaaggauguguggugggagu

SEQ ID NO: 838954 - RNA, 20 nt, Human
uccuggccuucucgggcagu

SEQ ID NO: 838955 - RNA, 22 nt, Human
cugaggcuggggaagggaagug

SEQ ID NO: 838956 - RNA, 22 nt, Human
uucagaaacaucaguggaugga

SEQ ID NO: 838957 - RNA, 22 nt, Human
caaauucucaagguuuauccca

SEQ ID NO: 838958 - RNA, 22 nt, Human
gcagggacaccuuugugaagcu

SEQ ID NO: 838959 - RNA, 22 nt, Human
ucucagagauguuagggaagag

SEQ ID NO: 838960 - RNA, 22 nt, Human
uggcuggcccugggagugcaga

SEQ ID NO: 838961 - RNA, 22 nt, Human
augcagguugggcaaguguggg

SEQ ID NO: 838962 - RNA, 22 nt, Human
ugugcuucaucacuucucaguu

SEQ ID NO: 838963 - RNA, 22 nt, Human
gcuguauuccugcacuguauag

SEQ ID NO: 838964 - RNA, 22 nt, Human
aaaugcagguaguauuuauuuu

SEQ ID NO: 838965 - RNA, 22 nt, Human
ugcaggaaucagaggggaagcg

SEQ ID NO: 838966 - RNA, 20 nt, Human
accucugcaucaauccuuug

SEQ ID NO: 838967 - RNA, 22 nt, Human
gcaacuuucaagcaccaugggg

SEQ ID NO: 838968 - RNA, 22 nt, Human
ucauacaucuguccuggagcuc

SEQ ID NO: 838969 - RNA, 22 nt, Human
aaguauaagcuauucuucauga

SEQ ID NO: 838970 - RNA, 22 nt, Human
cugcccuguggcucugagucau

SEQ ID NO: 838971 - RNA, 21 nt, Human
acagcagacaggcuuaggacc

SEQ ID NO: 838972 - RNA, 22 nt, Human
aagcugaggcccauggcaaggu

SEQ ID NO: 838973 - RNA, 22 nt, Human
aaaauguguuuaugcauuucgu

SEQ ID NO: 838974 - RNA, 22 nt, Human
acccagaggugucuagcaagcu

SEQ ID NO: 838975 - RNA, 22 nt, Human
aguacuucagaggcugcccagg

SEQ ID NO: 838976 - RNA, 22 nt, Human
ggaggaggcggcagaaguuccu

SEQ ID NO: 838977 - RNA, 22 nt, Human
ccacuucaucagugcuccauuu

SEQ ID NO: 838978 - RNA, 22 nt, Human
caauuucaaugaggccacaggg

SEQ ID NO: 838979 - RNA, 19 nt, Human
uugcauuguaguuggacug

SEQ ID NO: 838980 - RNA, 22 nt, Human
gcaggcugugaggcucagaugg

SEQ ID NO: 838981 - RNA, 22 nt, Human
aaagaaggggucuacauccaau

SEQ ID NO: 838982 - RNA, 22 nt, Human
aagaacagguucuagaaccauu

SEQ ID NO: 838983 - RNA, 22 nt, Human
ccucccaccguaucucaguggc

SEQ ID NO: 838984 - RNA, 23 nt, Human
cugcagccgcguggggacgugga

SEQ ID NO: 838985 - RNA, 22 nt, Human
ccuggcugcuauagcagcaugu

SEQ ID NO: 838986 - RNA, 22 nt, Human
uuacuuuggauggucaagaaag

SEQ ID NO: 838987 - RNA, 23 nt, Human
ugggcaucuccucugugccaggc

SEQ ID NO: 838988 - RNA, 22 nt, Human
cccaggcagucuggcucuaaag

SEQ ID NO: 838989 - RNA, 22 nt, Human
uagccucucuccuccacaaccu

SEQ ID NO: 838990 - RNA, 22 nt, Human
uacaauauguggccuuuuguga

SEQ ID NO: 838991 - RNA, 22 nt, Human
gaguccuuuugugccacaggga

SEQ ID NO: 838992 - RNA, 22 nt, Human
ggcugcagggcagcuggugugg

SEQ ID NO: 838993 - RNA, 22 nt, Human
ucauugcagugauguuguaugu

SEQ ID NO: 838994 - RNA, 22 nt, Human
gaggccuggugugucucccgcu

SEQ ID NO: 838995 - RNA, 22 nt, Human
cagugggugaugaguccugggg

SEQ ID NO: 838996 - RNA, 22 nt, Human
cagucccagacauaguaaggga

SEQ ID NO: 838997 - RNA, 22 nt, Human
gaggagguuccggguggagaag

SEQ ID NO: 838998 - RNA, 22 nt, Human
gagaggcuaugagguucugugu

SEQ ID NO: 838999 - RNA, 22 nt, Human
cuggcucccucgcugaggugcu

SEQ ID NO: 839000 - RNA, 22 nt, Human
cagggcuggcuguggcaaucuc

SEQ ID NO: 839001 - RNA, 22 nt, Human
caggcacucauucagagaggug

SEQ ID NO: 839002 - RNA, 22 nt, Human
gccuggaggggccaggguggua

SEQ ID NO: 839003 - RNA, 22 nt, Human
gaggcagcugggauacaaggga

SEQ ID NO: 839004 - RNA, 22 nt, Human
aucuggcucuuccuggaguucc

SEQ ID NO: 839005 - RNA, 22 nt, Human
ucucuccuuaucauuguguuua

SEQ ID NO: 839006 - RNA, 22 nt, Human
ugcccacaggaagacaccagcg

SEQ ID NO: 839007 - RNA, 22 nt, Human
gguccuggaaauugacggaaag

SEQ ID NO: 839008 - RNA, 22 nt, Human
uaacagaaaggggacagaaaua

SEQ ID NO: 839009 - RNA, 22 nt, Human
gcugucacaagcaucuggggca

SEQ ID NO: 839010 - RNA, 19 nt, Human
cucuggagcagacacugga

SEQ ID NO: 839011 - RNA, 22 nt, Human
aagggagguaaagcuauuuaaa

SEQ ID NO: 839012 - RNA, 22 nt, Human
aucagcaagcauuuauugagug

SEQ ID NO: 839013 - RNA, 22 nt, Human
caaaugcauagaaagaugaaac

SEQ ID NO: 839014 - RNA, 22 nt, Human
aaguucaaucagaugaaaaagc

SEQ ID NO: 839015 - RNA, 22 nt, Human
acagagcugggaucugaaccca

SEQ ID NO: 839016 - RNA, 22 nt, Human
auacaacuuuacaugcaauucc

SEQ ID NO: 839017 - RNA, 23 nt, Human
ucagcugcuuccuccugccugcc

SEQ ID NO: 839018 - RNA, 19 nt, Human
gacagugcaguuguaguac

SEQ ID NO: 839019 - RNA, 22 nt, Human
uuucaggguacauggagcaaau

SEQ ID NO: 839020 - RNA, 22 nt, Human
uagaaaucuacuuagacuuucu

SEQ ID NO: 839021 - RNA, 22 nt, Human
gcuggcugaggucuagcucuuu

SEQ ID NO: 839022 - RNA, 22 nt, Human
uauugucuguccgggucaaagc

SEQ ID NO: 839023 - RNA, 22 nt, Human
acuauacagaagaggauaggaa

SEQ ID NO: 839024 - RNA, 22 nt, Human
gagcucagcacuaaaaucaugu

SEQ ID NO: 839025 - RNA, 22 nt, Human
ccugcuucagggaugauggcac

SEQ ID NO: 839026 - RNA, 22 nt, Human
uagauauggccgucuguuuuaa

SEQ ID NO: 839027 - RNA, 22 nt, Human
cagcugaggucaaagaagcagg

SEQ ID NO: 839028 - RNA, 22 nt, Human
uuacaagcagcuacauaucaca

SEQ ID NO: 839029 - RNA, 23 nt, Human
uggaauaauaagguacauuaaca

SEQ ID NO: 839030 - RNA, 22 nt, Human
uuguaacagcuguuuauauagu

SEQ ID NO: 839031 - RNA, 22 nt, Human
ugccugugguuccaguuuuuuc

SEQ ID NO: 839032 - RNA, 22 nt, Human
uaaagucaucuuuacaucuuug

SEQ ID NO: 839033 - RNA, 22 nt, Human
ugcccaaguguuuggcugaguc

SEQ ID NO: 839034 - RNA, 22 nt, Human
ucaugaaucguggaaugauuua

SEQ ID NO: 839035 - RNA, 22 nt, Human
cuggcucaauuuguacugcugu

SEQ ID NO: 839036 - RNA, 22 nt, Human
uugaggaguguuuagggugagg

SEQ ID NO: 839037 - RNA, 22 nt, Human
guggagaccuccuaggaugugu

SEQ ID NO: 839038 - RNA, 22 nt, Human
agaaaugugaauuucauuuccu

SEQ ID NO: 839039 - RNA, 17 nt, Human
cccaugagcccacuccc

SEQ ID NO: 839040 - RNA, 22 nt, Human
agccuucaaccuagcuagagca

SEQ ID NO: 839041 - RNA, 22 nt, Human
ucucagggaccaugaugaugac

SEQ ID NO: 839042 - RNA, 22 nt, Human
uuacagaaaagggguuguccuu

SEQ ID NO: 839043 - RNA, 22 nt, Human
ugcuugaaagggguuucccagu

SEQ ID NO: 839044 - RNA, 22 nt, Human
ggagagugggagcaacuguugc

SEQ ID NO: 839045 - RNA, 22 nt, Human
cugagccuuauucaccagcccu

SEQ ID NO: 839046 - RNA, 22 nt, Human
aggcuggguaccugucauaugc

SEQ ID NO: 839047 - RNA, 22 nt, Human
aaaugugcuugugaucagcugu

SEQ ID NO: 839048 - RNA, 22 nt, Human
ucuuccagcaaugugaaaucac

SEQ ID NO: 839049 - RNA, 22 nt, Human
cuguccucuguccucagcagga

SEQ ID NO: 839050 - RNA, 22 nt, Human
gcccaggaaguugaggcugccg

SEQ ID NO: 839051 - RNA, 22 nt, Human
uuuauuguuaucaugggugagu

SEQ ID NO: 839052 - RNA, 20 nt, Human
cugugccuaaaccuccgggu

SEQ ID NO: 839053 - RNA, 22 nt, Human
ugcugucaguuggcaggaugag

SEQ ID NO: 839054 - RNA, 22 nt, Human
aggcagacugugcgggaagagu

SEQ ID NO: 839055 - RNA, 22 nt, Human
acuguguguuugucuagcacag

SEQ ID NO: 839056 - RNA, 22 nt, Human
auauacaaagggcaaccucgcu

SEQ ID NO: 839057 - RNA, 22 nt, Human
agcaggugaauuccuggaugug

SEQ ID NO: 839058 - RNA, 22 nt, Human
caguccuucauuccuccuuuga

SEQ ID NO: 839059 - RNA, 22 nt, Human
gcagaugguggggcaggaaaau

SEQ ID NO: 839060 - RNA, 22 nt, Human
ccaggcccugcuccucacacca

SEQ ID NO: 839061 - RNA, 22 nt, Human
cuggcucaguucuugguuuuca

SEQ ID NO: 839062 - RNA, 22 nt, Human
uucucagauccaucagaagucc

SEQ ID NO: 839063 - RNA, 22 nt, Human
uugaaggacauccuauuucuag

SEQ ID NO: 839064 - RNA, 22 nt, Human
aagcagaauuucccacuaguug

SEQ ID NO: 839065 - RNA, 17 nt, Human
uggcucugaggcugaau

SEQ ID NO: 839066 - RNA, 22 nt, Human
ucccaggaauccguccucuaga

SEQ ID NO: 839067 - RNA, 22 nt, Human
ccuggccucgugcucacggcuc

SEQ ID NO: 839068 - RNA, 22 nt, Human
ccugccugcaaaaugggacaag

SEQ ID NO: 839069 - RNA, 22 nt, Human
ucucugggauaaacugggccag

SEQ ID NO: 839070 - RNA, 22 nt, Human
cccaaggaagacgcuugugaua

SEQ ID NO: 839071 - RNA, 22 nt, Human
cugcaucacagcaggaggcaca

SEQ ID NO: 839072 - RNA, 22 nt, Human
gcaggagagucugugccagguu

SEQ ID NO: 839073 - RNA, 22 nt, Human
ugcugugagguugagaaggaag

SEQ ID NO: 839074 - RNA, 21 nt, Human
aggugggagaccauguagguc

SEQ ID NO: 839075 - RNA, 22 nt, Human
acccugagggguauagcagaag

SEQ ID NO: 839076 - RNA, 22 nt, Human
agaaauaugcugauuagaugaa

SEQ ID NO: 839077 - RNA, 20 nt, Human
aucuggcucagauccugcag

SEQ ID NO: 839078 - RNA, 22 nt, Human
uucuucaaagaugucuguugga

SEQ ID NO: 839079 - RNA, 22 nt, Human
uuccaaagucauguugcugaua

SEQ ID NO: 839080 - RNA, 22 nt, Human
caagauaagaucauuuacacua

SEQ ID NO: 839081 - RNA, 22 nt, Human
acugaguguaggacuuugaguu

SEQ ID NO: 839082 - RNA, 22 nt, Human
uagcugcccaucuuuccuuuag

SEQ ID NO: 839083 - RNA, 22 nt, Human
auuuagaacuuuguuugccaau

SEQ ID NO: 839084 - RNA, 22 nt, Human
agaauaauacugaaaugcugaa

SEQ ID NO: 839085 - RNA, 22 nt, Human
aggagagaauguuccaggcuug

SEQ ID NO: 839086 - RNA, 22 nt, Human
auaaggcagaaauagggaaagu

SEQ ID NO: 839087 - RNA, 22 nt, Human
ggcugggcucgcugauuggcug

SEQ ID NO: 839088 - RNA, 22 nt, Human
cccccuggcaggcuggccucuc

SEQ ID NO: 839089 - RNA, 22 nt, Human
gaugaaaaucuugagaugucga

SEQ ID NO: 839090 - RNA, 22 nt, Human
agcuuuauuugucauucacggc

SEQ ID NO: 839091 - RNA, 17 nt, Human
acaagcaguggccaugg

SEQ ID NO: 839092 - RNA, 22 nt, Human
cugugccaggcccagcugacuu

SEQ ID NO: 839093 - RNA, 22 nt, Human
aaggcagcagugcacgacugau

SEQ ID NO: 839094 - RNA, 22 nt, Human
uugcacuccagcccgagcaaca

SEQ ID NO: 839095 - RNA, 23 nt, Human
ggauuuaguggaugagcugagug

SEQ ID NO: 839096 - RNA, 22 nt, Human
agucccagaucuacaggaggga

SEQ ID NO: 839097 - RNA, 22 nt, Human
acagcuguggccacuugcaucc

SEQ ID NO: 839098 - RNA, 22 nt, Human
gugggcaaggucccugccagcu

SEQ ID NO: 839099 - RNA, 17 nt, Human
gcugcagcgguaggcag

SEQ ID NO: 839100 - RNA, 22 nt, Human
aguuuucacacucaccaaaagg

SEQ ID NO: 839101 - RNA, 22 nt, Human
cccagcagccagaaugaggagc

SEQ ID NO: 839102 - RNA, 22 nt, Human
cccugccuacaggguuuucuuu

SEQ ID NO: 839103 - RNA, 22 nt, Human
cacagggcagaggguccguggc

SEQ ID NO: 839104 - RNA, 22 nt, Human
uuagagaaauucugguaaugua

SEQ ID NO: 839105 - RNA, 22 nt, Human
uauauacuuucuuccuggguag

SEQ ID NO: 839106 - RNA, 22 nt, Human
cauuucugggagacaugcuaga

SEQ ID NO: 839107 - RNA, 22 nt, Human
accugccuucucaaggacauga

SEQ ID NO: 839108 - RNA, 22 nt, Human
aauaacuggcacauaucacaua

SEQ ID NO: 839109 - RNA, 22 nt, Human
guaguuuucugaaaauuacuuu

SEQ ID NO: 839110 - RNA, 22 nt, Human
uaaaagcucuucuguugaguua

SEQ ID NO: 839111 - RNA, 22 nt, Human
uuaagcaacacacauuaauuau

SEQ ID NO: 839112 - RNA, 20 nt, Human
ggcucugcuugugagcagcc

SEQ ID NO: 839113 - RNA, 21 nt, Human
cugaggcagcacagcuaguca

SEQ ID NO: 839114 - RNA, 22 nt, Human
cagcugcccaggccaccuggag

SEQ ID NO: 839115 - RNA, 22 nt, Human
aagggcaggcagagaucauaua

SEQ ID NO: 839116 - RNA, 22 nt, Human
gaaguucaaaagacagauuuga

SEQ ID NO: 839117 - RNA, 22 nt, Human
aguaugaagcugaaugauuuua

SEQ ID NO: 839118 - RNA, 19 nt, Human
gccugccuggguuucugag

SEQ ID NO: 839119 - RNA, 22 nt, Human
cagcugccaugacauguccugc

SEQ ID NO: 839120 - RNA, 19 nt, Human
acagaaauuaguuauuuuc

SEQ ID NO: 839121 - RNA, 22 nt, Human
cagacuuucaaggagugaaggc

SEQ ID NO: 839122 - RNA, 22 nt, Human
uguauuuucuucuggaagcuua

SEQ ID NO: 839123 - RNA, 22 nt, Human
gagcaggccagcaauggaaggg

SEQ ID NO: 839124 - RNA, 22 nt, Human
ucucagaguaauucuuuaaggu

SEQ ID NO: 839125 - RNA, 17 nt, Human
uccaggagaggcaaugg

SEQ ID NO: 839126 - RNA, 22 nt, Human
gcagggaagaucuuggagcugc

SEQ ID NO: 839127 - RNA, 22 nt, Human
cagcuggcauaccugggcccgg

SEQ ID NO: 839128 - RNA, 22 nt, Human
ggaggggagguccagcugaucu

SEQ ID NO: 839129 - RNA, 22 nt, Human
cucuaacacuguaaugcuuucu

SEQ ID NO: 839130 - RNA, 22 nt, Human
agcagagcugcaguggccugcu

SEQ ID NO: 839131 - RNA, 22 nt, Human
aaaaccaggcguuuccuauuau

SEQ ID NO: 839132 - RNA, 22 nt, Human
ugggccugggagggcagacgcu

SEQ ID NO: 839133 - RNA, 22 nt, Human
uauguacauaacaugaaaugca

SEQ ID NO: 839134 - RNA, 22 nt, Human
ucucuuuuauguacacccugac

SEQ ID NO: 839135 - RNA, 21 nt, Human
ggagauggguaucgccugggc

SEQ ID NO: 839136 - RNA, 22 nt, Human
ugcaggagaaaguacggagcgu

SEQ ID NO: 839137 - RNA, 23 nt, Human
gucagggcuggggucagagugac

SEQ ID NO: 839138 - RNA, 22 nt, Human
ucaaagcaucagucaauuuagg

SEQ ID NO: 839139 - RNA, 22 nt, Human
caggguggcaggcaccauggcc

SEQ ID NO: 839140 - RNA, 22 nt, Human
accaucagagcacaguccgugc

SEQ ID NO: 839141 - RNA, 22 nt, Human
gauuuagagaauguuuuguaag

SEQ ID NO: 839142 - RNA, 22 nt, Human
cuuguccuuuacuugagacuca

SEQ ID NO: 839143 - RNA, 22 nt, Human
cacugcuuauaaauucuaggca

SEQ ID NO: 839144 - RNA, 22 nt, Human
ccagggcuggugggagaugcug

SEQ ID NO: 839145 - RNA, 22 nt, Human
ugggcccugacuucaagcaucc

SEQ ID NO: 839146 - RNA, 22 nt, Human
aucugcuuuugagaauuuacuu

SEQ ID NO: 839147 - RNA, 22 nt, Human
cagaacauucacucauaugugg

SEQ ID NO: 839148 - RNA, 21 nt, Human
cuccugggcuaagauauagug

SEQ ID NO: 839149 - RNA, 22 nt, Human
ccugagagcgaguggccucaug

SEQ ID NO: 839150 - RNA, 22 nt, Human
ucagaggacaagcucccuggug

SEQ ID NO: 839151 - RNA, 22 nt, Human
aaaucaguuagugguaggauug

SEQ ID NO: 839152 - RNA, 22 nt, Human
agcuggcauacuuugcuaggaa

SEQ ID NO: 839153 - RNA, 22 nt, Human
agagauguucauucagcauguu

SEQ ID NO: 839154 - RNA, 22 nt, Human
uagcugccaaaagggugggcua

SEQ ID NO: 839155 - RNA, 22 nt, Human
cagcaguggccaucuguguggu

SEQ ID NO: 839156 - RNA, 19 nt, Human
ucucagaggaaaaauugcu

SEQ ID NO: 839157 - RNA, 22 nt, Human
agaaugcauuuuguguagcuau

SEQ ID NO: 839158 - RNA, 22 nt, Human
gccugccucaaaaucccaguuc

SEQ ID NO: 839159 - RNA, 22 nt, Human
acacaguaccccaaggcugggc

SEQ ID NO: 839160 - RNA, 22 nt, Human
gccugguggugugcucaagugg

SEQ ID NO: 839161 - RNA, 22 nt, Human
agaugggcgcccuggacugagg

SEQ ID NO: 839162 - RNA, 22 nt, Human
uugcaggggaaggagcagagcu

SEQ ID NO: 839163 - RNA, 22 nt, Human
uggcagucuggguuggcaguua

SEQ ID NO: 839164 - RNA, 22 nt, Human
accaggggugucaacagcauuu

SEQ ID NO: 839165 - RNA, 22 nt, Human
auguucaaacaaguuaaugcca

SEQ ID NO: 839166 - RNA, 22 nt, Human
gggagggacacaaagaguuccc

SEQ ID NO: 839167 - RNA, 22 nt, Human
uguuagaaguuaaucacuaauu

SEQ ID NO: 839168 - RNA, 22 nt, Human
caggccugugaguugaggcccc

SEQ ID NO: 839169 - RNA, 22 nt, Human
uuuucuuacugucugugauccu

SEQ ID NO: 839170 - RNA, 21 nt, Human
ugggagagggcucagcuaccc

SEQ ID NO: 839171 - RNA, 22 nt, Human
auuucacaucuaucucagauuu

SEQ ID NO: 839172 - RNA, 22 nt, Human
agagccugcagcugugaagaaa

SEQ ID NO: 839173 - RNA, 22 nt, Human
gggcugcacguauucugcucac

SEQ ID NO: 839174 - RNA, 22 nt, Human
ugaaggaaagagggaacauccc

SEQ ID NO: 839175 - RNA, 22 nt, Human
ccuauacaggcuucuuuacaug

SEQ ID NO: 839176 - RNA, 22 nt, Human
uuauguaccugaauuaguaaag

SEQ ID NO: 839177 - RNA, 22 nt, Human
cucagggccaaggaugcuguug

SEQ ID NO: 839178 - RNA, 22 nt, Human
uaguuauuauuguuacuaucag

SEQ ID NO: 839179 - RNA, 22 nt, Human
ugggcucugcaucagugcccau

SEQ ID NO: 839180 - RNA, 22 nt, Human
aucuacagcugucugcacagua

SEQ ID NO: 839181 - RNA, 22 nt, Human
cccaucaggaacccaggagccc

SEQ ID NO: 839182 - RNA, 19 nt, Human
aaaagucuauucaauuaca

SEQ ID NO: 839183 - RNA, 21 nt, Human
uuucuuaggcucuaaaaugac

SEQ ID NO: 839184 - RNA, 22 nt, Human
cuuugcaauagaggcacacaug

SEQ ID NO: 839185 - RNA, 18 nt, Human
ggagccagucugucucug

SEQ ID NO: 839186 - RNA, 22 nt, Human
uggagcagagaugggagcccaa

SEQ ID NO: 839187 - RNA, 22 nt, Human
ucccagagguugagucacuuau

SEQ ID NO: 839188 - RNA, 22 nt, Human
gggcugcugcugccagcgacac

SEQ ID NO: 839189 - RNA, 22 nt, Human
ugggcuggcugaggcauucacu

SEQ ID NO: 839190 - RNA, 22 nt, Human
gcugccugccuaguuccacagu

SEQ ID NO: 839191 - RNA, 20 nt, Human
aggcugggguguuuugccca

SEQ ID NO: 839192 - RNA, 22 nt, Human
uuucaaagaguuguaaauuacu

SEQ ID NO: 839193 - RNA, 22 nt, Human
cagccugcccuggaagcccagc

SEQ ID NO: 839194 - RNA, 22 nt, Human
ccacuugugaaauaaucaaaua

SEQ ID NO: 839195 - RNA, 22 nt, Human
acauacauauguuuaaaugcau

SEQ ID NO: 839196 - RNA, 22 nt, Human
uagucucuggagacucuagggg

SEQ ID NO: 839197 - RNA, 22 nt, Human
gcagagccugugucugagcaaa

SEQ ID NO: 839198 - RNA, 22 nt, Human
aaucagaacuucucaggguggg

SEQ ID NO: 839199 - RNA, 22 nt, Human
aaauacagaguugcuuaaaagc

SEQ ID NO: 839200 - RNA, 21 nt, Human
ucccagagugcuugggacugc

SEQ ID NO: 839201 - RNA, 22 nt, Human
uuuuagaaauacugauuuagug

SEQ ID NO: 839202 - RNA, 22 nt, Human
ugcuauacauguacauauuagu

SEQ ID NO: 839203 - RNA, 22 nt, Human
caggaugugaggaggccauuug

SEQ ID NO: 839204 - RNA, 22 nt, Human
cagagagcuuagugugcugcau

SEQ ID NO: 839205 - RNA, 22 nt, Human
ccuggcucuucagagguuccua

SEQ ID NO: 839206 - RNA, 23 nt, Human
gccucugcagccuaguuaguguc

SEQ ID NO: 839207 - RNA, 20 nt, Human
ggccuuggccucuuugcagc

SEQ ID NO: 839208 - RNA, 22 nt, Human
ccccagccagcaggaccucuga

SEQ ID NO: 839209 - RNA, 22 nt, Human
cucuucuuuaguccagaccauc

SEQ ID NO: 839210 - RNA, 22 nt, Human
ggcaagaaggcuucagguagcu

SEQ ID NO: 839211 - RNA, 22 nt, Human
ccacacagggggaugaguuauu

SEQ ID NO: 839212 - RNA, 23 nt, Human
gccagccuugcucuccugcagcc

SEQ ID NO: 839213 - RNA, 22 nt, Human
gaggacagcuuagggcuuccug

SEQ ID NO: 839214 - RNA, 22 nt, Human
auguucaaacuuuuuacacacc

SEQ ID NO: 839215 - RNA, 22 nt, Human
acagaaauaacuuuuuauguuu

SEQ ID NO: 839216 - RNA, 22 nt, Human
uccaggagguugagugaguucc

SEQ ID NO: 839217 - RNA, 22 nt, Human
cuuaggcaguuuaggaaagaga

SEQ ID NO: 839218 - RNA, 22 nt, Human
agggcagagacaugcuuccuga

SEQ ID NO: 839219 - RNA, 22 nt, Human
gugcuuucugcaugguuccuac

SEQ ID NO: 839220 - RNA, 22 nt, Human
cuccaggggccagaagccuggc

SEQ ID NO: 839221 - RNA, 22 nt, Human
agcccaggugagggguucgaaa

SEQ ID NO: 839222 - RNA, 22 nt, Human
augguauugcaacaacugucau

SEQ ID NO: 839223 - RNA, 22 nt, Human
acagaguacauucagagacuau

SEQ ID NO: 839224 - RNA, 22 nt, Human
aucccugcccucauggagcuua

SEQ ID NO: 839225 - RNA, 20 nt, Human
acagaauaugcugguugugg

SEQ ID NO: 839226 - RNA, 22 nt, Human
gcccaucaucacuguggaggcu

SEQ ID NO: 839227 - RNA, 22 nt, Human
gcugguccacucccuggaggcu

SEQ ID NO: 839228 - RNA, 22 nt, Human
gaggccaggacaugaaagcuga

SEQ ID NO: 839229 - RNA, 22 nt, Human
gaggcaucugggcacagaagug

SEQ ID NO: 839230 - RNA, 22 nt, Human
gcugcuucucugauggagucca

SEQ ID NO: 839231 - RNA, 22 nt, Human
cuggccugggagcugcuagcgu

SEQ ID NO: 839232 - RNA, 22 nt, Human
agcagcagauccaaaaaaugug

SEQ ID NO: 839233 - RNA, 22 nt, Human
ucauuauccuaguaucuugaau

SEQ ID NO: 839234 - RNA, 22 nt, Human
agggccuggcuucacuuucuca

SEQ ID NO: 839235 - RNA, 22 nt, Human
ucacaggaaccaucagagaaau

SEQ ID NO: 839236 - RNA, 22 nt, Human
acugugugacuguuauuacugu

SEQ ID NO: 839237 - RNA, 22 nt, Human
ugucccucugaggcuucccugg

SEQ ID NO: 839238 - RNA, 22 nt, Human
gguucacacuuucaugauuuca

SEQ ID NO: 839239 - RNA, 23 nt, Human
uucuuucaagaaguucacagugc

SEQ ID NO: 839240 - RNA, 22 nt, Human
aggccagcgcugcuagcucccg

SEQ ID NO: 839241 - RNA, 21 nt, Human
caagccagaccaauagcagcc

SEQ ID NO: 839242 - RNA, 22 nt, Human
gauuucuguaacacuucagaua

SEQ ID NO: 839243 - RNA, 22 nt, Human
agccucuguagaaagcagugug

SEQ ID NO: 839244 - RNA, 22 nt, Human
agagcugcccacacagcagauu

SEQ ID NO: 839245 - RNA, 22 nt, Human
ccaggcagcaaauuuucugaau

SEQ ID NO: 839246 - RNA, 22 nt, Human
ugaaacuuauaagaauaugaau

SEQ ID NO: 839247 - RNA, 22 nt, Human
gaaaugugcagaauguguuaga

SEQ ID NO: 839248 - RNA, 22 nt, Human
auggggugaccaugagcauuua

SEQ ID NO: 839249 - RNA, 22 nt, Human
cuguauuuaguuaaaaugcuaa

SEQ ID NO: 839250 - RNA, 22 nt, Human
ucaugacaucuguuuaucucaa

SEQ ID NO: 839251 - RNA, 20 nt, Human
cagagcuguuauggaugaug

SEQ ID NO: 839252 - RNA, 22 nt, Human
cucagaguccauaguuuacagu

SEQ ID NO: 839253 - RNA, 22 nt, Human
auguagcagaagauguuuuccu

SEQ ID NO: 839254 - RNA, 22 nt, Human
ugagcuuacgugggaacagacu

SEQ ID NO: 839255 - RNA, 22 nt, Human
uuucacauuuuauacuuaagcc

SEQ ID NO: 839256 - RNA, 22 nt, Human
cagaagaguagcugaacaaguu

SEQ ID NO: 839257 - RNA, 22 nt, Human
uccacuuuagcaaugauugaau

SEQ ID NO: 839258 - RNA, 22 nt, Human
uuucacaaugcaauccuacuuc

SEQ ID NO: 839259 - RNA, 22 nt, Human
ccugcuguaaugugucuuuauu

SEQ ID NO: 839260 - RNA, 22 nt, Human
ccucuggcuguaccacuggcac

SEQ ID NO: 839261 - RNA, 22 nt, Human
ccuguucacugcacaguuuccg

SEQ ID NO: 839262 - RNA, 20 nt, Human
uccaggagguuaguguggcu

SEQ ID NO: 839263 - RNA, 22 nt, Human
ugggcacuauggcucugugcac

SEQ ID NO: 839264 - RNA, 22 nt, Human
cuggagcuaggaaguccaagau

SEQ ID NO: 839265 - RNA, 22 nt, Human
acugccuuauaugcugugugug

SEQ ID NO: 839266 - RNA, 22 nt, Human
gggcagagaaauggacaguugg

SEQ ID NO: 839267 - RNA, 20 nt, Human
aguguacagacacuagaaau

SEQ ID NO: 839268 - RNA, 22 nt, Human
gucuuuauuugagauugucauu

SEQ ID NO: 839269 - RNA, 22 nt, Human
auuguacaaugccuggaacauu

SEQ ID NO: 839270 - RNA, 22 nt, Human
uauuucagucacuucuucucug

SEQ ID NO: 839271 - RNA, 19 nt, Human
uccauaagcuuguguucau

SEQ ID NO: 839272 - RNA, 22 nt, Human
ucagcagugcagggugaggcag

SEQ ID NO: 839273 - RNA, 22 nt, Human
ugucucugccagcuagcagaau

SEQ ID NO: 839274 - RNA, 22 nt, Human
uuaaauuagucaagcuucucug

SEQ ID NO: 839275 - RNA, 22 nt, Human
ugggccacuugaaaguggaugu

SEQ ID NO: 839276 - RNA, 23 nt, Human
uucaaaacuggaaaaucagaugc

SEQ ID NO: 839277 - RNA, 22 nt, Human
caauauauaaugaguacuuucc

SEQ ID NO: 839278 - RNA, 22 nt, Human
ugccagugggugugcagagacu

SEQ ID NO: 839279 - RNA, 22 nt, Human
uuagaaaugcacccaagaccua

SEQ ID NO: 839280 - RNA, 22 nt, Human
ggucucaggagacuggagagca

SEQ ID NO: 839281 - RNA, 22 nt, Human
ucuggagcgaggucccugucug

SEQ ID NO: 839282 - RNA, 22 nt, Human
gcagcuggcucagagagguggg

SEQ ID NO: 839283 - RNA, 22 nt, Human
cugaggagagaucacguggugu

SEQ ID NO: 839284 - RNA, 21 nt, Human
ucucuggaauuagaccauguu

SEQ ID NO: 839285 - RNA, 22 nt, Human
agggcagccucucagccuaggu

SEQ ID NO: 839286 - RNA, 22 nt, Human
acuauacaagauuagggauuug

SEQ ID NO: 839287 - RNA, 22 nt, Human
uggcuuuacacauccacugccu

SEQ ID NO: 839288 - RNA, 22 nt, Human
ucccaggauuuuaggcucucag

SEQ ID NO: 839289 - RNA, 22 nt, Human
ucugggagauccaagcagaacu

SEQ ID NO: 839290 - RNA, 22 nt, Human
gccuuccuuacaccugcucagc

SEQ ID NO: 839291 - RNA, 20 nt, Human
ccucaagcagacugacagcu

SEQ ID NO: 839292 - RNA, 22 nt, Human
gcuuugaagacuuuuccagggu

SEQ ID NO: 839293 - RNA, 22 nt, Human
gugauuucuaaucaucugaaug

SEQ ID NO: 839294 - RNA, 22 nt, Human
aauacaaucaaauucacuagca

SEQ ID NO: 839295 - RNA, 22 nt, Human
agaucuauuagcaaacugccau

SEQ ID NO: 839296 - RNA, 20 nt, Human
augccucuaauuuugcaaac

SEQ ID NO: 839297 - RNA, 22 nt, Human
uuuaggcaaacucauugucaga

SEQ ID NO: 839298 - RNA, 22 nt, Human
ucaggagaguguucaguggagg

SEQ ID NO: 839299 - RNA, 22 nt, Human
caugcugugcaucuugaugacc

SEQ ID NO: 839300 - RNA, 22 nt, Human
uggugaagucagcggagcccgg

SEQ ID NO: 839301 - RNA, 22 nt, Human
uaaaucacuccuaauaaucagu

SEQ ID NO: 839302 - RNA, 22 nt, Human
aaaagguuuugaguacaaauau

SEQ ID NO: 839303 - RNA, 22 nt, Human
uccucaggucaaagcaggagaa

SEQ ID NO: 839304 - RNA, 18 nt, Human
agagcagcggcaucacac

SEQ ID NO: 839305 - RNA, 22 nt, Human
gagcugagccuggguggaccgc

SEQ ID NO: 839306 - RNA, 22 nt, Human
ucccaggaaugucugaaaguga

SEQ ID NO: 839307 - RNA, 22 nt, Human
aggagaaggaagugcaucacua

SEQ ID NO: 839308 - RNA, 22 nt, Human
uaaacauuuguuauucuuguuu

SEQ ID NO: 839309 - RNA, 22 nt, Human
uuucagaucauuuuuuaaguac

SEQ ID NO: 839310 - RNA, 22 nt, Human
ccaucagcaugggagcaugggc

SEQ ID NO: 839311 - RNA, 22 nt, Human
uuuuagauugggaaauguaaag

SEQ ID NO: 839312 - RNA, 22 nt, Human
cugugucucuccuuacaagacu

SEQ ID NO: 839313 - RNA, 20 nt, Human
gacauucauaguuauuacca

SEQ ID NO: 839314 - RNA, 22 nt, Human
cuggggugugcucagagcaggg

SEQ ID NO: 839315 - RNA, 22 nt, Human
cagaagcauugacuccuugcuc

SEQ ID NO: 839316 - RNA, 22 nt, Human
uggcucugagacacaggcucuc

SEQ ID NO: 839317 - RNA, 22 nt, Human
uguggucucguuauguugccca

SEQ ID NO: 839318 - RNA, 22 nt, Human
ccaggaaugaaauguagauaaa

SEQ ID NO: 839319 - RNA, 22 nt, Human
auacauuagcucauaugauuaa

SEQ ID NO: 839320 - RNA, 22 nt, Human
gaacagcugcuagagaucugug

SEQ ID NO: 839321 - RNA, 22 nt, Human
accaggagucuagccuagucaa

SEQ ID NO: 839322 - RNA, 22 nt, Human
ugaaaucuucacuaagucucuu

SEQ ID NO: 839323 - RNA, 22 nt, Human
aaaugguguuucuaaugcuaga

SEQ ID NO: 839324 - RNA, 22 nt, Human
cugcugugugaccauggacagg

SEQ ID NO: 839325 - RNA, 22 nt, Human
cccaggcuggagugcaauggug

SEQ ID NO: 839326 - RNA, 22 nt, Human
ggucacaggggagaagagugau

SEQ ID NO: 839327 - RNA, 22 nt, Human
cuggcaggcggcagagcccagg

SEQ ID NO: 839328 - RNA, 22 nt, Human
ccaaagucuggagcagcagagc

SEQ ID NO: 839329 - RNA, 22 nt, Human
gggcaugguggcaggcaccugu

SEQ ID NO: 839330 - RNA, 22 nt, Human
cagagccugccucuggcugugg

SEQ ID NO: 839331 - RNA, 21 nt, Human
ccuggcuucagggugcacugg

SEQ ID NO: 839332 - RNA, 22 nt, Human
ucccuucacagaugcgauguuu

SEQ ID NO: 839333 - RNA, 19 nt, Human
aggcagcaggccagggaug

SEQ ID NO: 839334 - RNA, 22 nt, Human
ugggcagaggcagcagaaaccu

SEQ ID NO: 839335 - RNA, 22 nt, Human
aggcccugcccagagcuccucg

SEQ ID NO: 839336 - RNA, 22 nt, Human
ggcagcuuuuaucccugacaga

SEQ ID NO: 839337 - RNA, 22 nt, Human
uccuuguugcugcagucaccug

SEQ ID NO: 839338 - RNA, 22 nt, Human
caaguccuaggucugauugaac

SEQ ID NO: 839339 - RNA, 22 nt, Human
aagggcagccugacucacgguc

SEQ ID NO: 839340 - RNA, 23 nt, Human
agaggcaggaguggcuugcccgg

SEQ ID NO: 839341 - RNA, 22 nt, Human
auagucacugccuuccauuugu

SEQ ID NO: 839342 - RNA, 22 nt, Human
aucagcaaucucguguauuagg

SEQ ID NO: 839343 - RNA, 22 nt, Human
ggugggcaacauuuggccugag

SEQ ID NO: 839344 - RNA, 22 nt, Human
aaaugaacaguugcauucucug

SEQ ID NO: 839345 - RNA, 19 nt, Human
gcaggcacagcccugggug

SEQ ID NO: 839346 - RNA, 22 nt, Human
cugcugucuuuauuucacugcu

SEQ ID NO: 839347 - RNA, 22 nt, Human
ccugggcauucuuugaguucuc

SEQ ID NO: 839348 - RNA, 22 nt, Human
acagagcacauagauuggaguu

SEQ ID NO: 839349 - RNA, 22 nt, Human
aaacuguaaacacagcaguaca

SEQ ID NO: 839350 - RNA, 20 nt, Human
aaaaacaguaaugcugaaga

SEQ ID NO: 839351 - RNA, 22 nt, Human
ccauggccgccgcugcucagga

SEQ ID NO: 839352 - RNA, 22 nt, Human
ucuuuguaacugucuauugaga

SEQ ID NO: 839353 - RNA, 22 nt, Human
uucucagaugauucagauaaac

SEQ ID NO: 839354 - RNA, 22 nt, Human
ugcauuauuugcaugugccugu

SEQ ID NO: 839355 - RNA, 22 nt, Human
aguguuugagacacauuucacu

SEQ ID NO: 839356 - RNA, 22 nt, Human
uauucacauguacauaugcuca

SEQ ID NO: 839357 - RNA, 22 nt, Human
ucuuuaauguacuuucuuucac

SEQ ID NO: 839358 - RNA, 22 nt, Human
uuugcauaggauggacauuuua

SEQ ID NO: 839359 - RNA, 22 nt, Human
gugccugugcggacucagggaa

SEQ ID NO: 839360 - RNA, 22 nt, Human
uugcauuuaaguagauguuaca

SEQ ID NO: 839361 - RNA, 21 nt, Human
uuacagaauccaugggaaguc

SEQ ID NO: 839362 - RNA, 22 nt, Human
acaaaauuguguuaaacuuuau

SEQ ID NO: 839363 - RNA, 23 nt, Human
ucacaggggccagcgcucugugg

SEQ ID NO: 839364 - RNA, 22 nt, Human
cugcugugucagaguccagggg

SEQ ID NO: 839365 - RNA, 22 nt, Human
ugugugccagccuacgaggagc

SEQ ID NO: 839366 - RNA, 22 nt, Human
cuggcagggugggcuuugcuuu

SEQ ID NO: 839367 - RNA, 22 nt, Human
agcaaggcagucagcuggcugg

SEQ ID NO: 839368 - RNA, 22 nt, Human
cagaggauucccuagugaccug

SEQ ID NO: 839369 - RNA, 22 nt, Human
uugaacauuggcaauuucauau

SEQ ID NO: 839370 - RNA, 22 nt, Human
uuuaucuuuaggacuuugcaga

SEQ ID NO: 839371 - RNA, 23 nt, Human
uggcucugagagguucagaugcu

SEQ ID NO: 839372 - RNA, 22 nt, Human
agcugagccagcagcaacagga

SEQ ID NO: 839373 - RNA, 22 nt, Human
cugcuguguuccuccugcaucu

SEQ ID NO: 839374 - RNA, 22 nt, Human
uggccucaagucugagggccuu

SEQ ID NO: 839375 - RNA, 22 nt, Human
uuuuaacuuaaaauacauagau

SEQ ID NO: 839376 - RNA, 22 nt, Human
uucugucacuuaggaggucaua

SEQ ID NO: 839377 - RNA, 22 nt, Human
uggugcuguggaggggcagaag

SEQ ID NO: 839378 - RNA, 22 nt, Human
uccuggagcuuccuucauggua

SEQ ID NO: 839379 - RNA, 22 nt, Human
agagcuggccagggaucacucu

SEQ ID NO: 839380 - RNA, 22 nt, Human
gggcacuguacacugugcaugg

SEQ ID NO: 839381 - RNA, 22 nt, Human
auuugcuuucagguauaaaagg

SEQ ID NO: 839382 - RNA, 21 nt, Human
uccauaagagaccaucuccua

SEQ ID NO: 839383 - RNA, 22 nt, Human
auuaaagaaacccagcauguga

SEQ ID NO: 839384 - RNA, 22 nt, Human
guggugcauccuugaguaagcu

SEQ ID NO: 839385 - RNA, 22 nt, Human
ucucaccauggugcuugcuuau

SEQ ID NO: 839386 - RNA, 22 nt, Human
aaugggauaauuguucauggga

SEQ ID NO: 839387 - RNA, 22 nt, Human
acuaaacugaagcaugaaaagg

SEQ ID NO: 839388 - RNA, 22 nt, Human
auccagggauaaaaguaagguu

SEQ ID NO: 839389 - RNA, 22 nt, Human
aaguucaauggaaaagcuuuag

SEQ ID NO: 839390 - RNA, 22 nt, Human
aaaugcacagagccuuagagau

SEQ ID NO: 839391 - RNA, 22 nt, Human
acuuccugcaaucguccacucc

SEQ ID NO: 839392 - RNA, 22 nt, Human
gaggaggcuggcgccgccugcc

SEQ ID NO: 839393 - RNA, 22 nt, Human
agcuggccuuagugagcaccug

SEQ ID NO: 839394 - RNA, 18 nt, Human
gaagggagcuggaaugca

SEQ ID NO: 839395 - RNA, 22 nt, Human
uggaaauggaucugaugagucu

SEQ ID NO: 839396 - RNA, 22 nt, Human
gcagcugccuauucagggcuug

SEQ ID NO: 839397 - RNA, 22 nt, Human
uucugucaaagacuuuuucagg

SEQ ID NO: 839398 - RNA, 22 nt, Human
auuacucugucugccucugacc

SEQ ID NO: 839399 - RNA, 22 nt, Human
cccagggaagccauuucugacu

SEQ ID NO: 839400 - RNA, 22 nt, Human
agccuggaguucccaggagaag

SEQ ID NO: 839401 - RNA, 22 nt, Human
uccagccaacugccuagggagc

SEQ ID NO: 839402 - RNA, 22 nt, Human
ucuggaucgccggcgccugggc

SEQ ID NO: 839403 - RNA, 22 nt, Human
uuugaagucaaagauugauucc

SEQ ID NO: 839404 - RNA, 22 nt, Human
aauauaugugguauugaccagc

SEQ ID NO: 839405 - RNA, 22 nt, Human
gaguggggcccacugcugggug

SEQ ID NO: 839406 - RNA, 18 nt, Human
agccuggaggguugaagu

SEQ ID NO: 839407 - RNA, 22 nt, Human
ugggcugcagggguugagagcu

SEQ ID NO: 839408 - RNA, 22 nt, Human
gggugggaacaggaugccagga

SEQ ID NO: 839409 - RNA, 22 nt, Human
uuugcauuugcaaauaaugaaa

SEQ ID NO: 839410 - RNA, 22 nt, Human
agaguguuauuugcucuguauu

SEQ ID NO: 839411 - RNA, 21 nt, Human
agagucugcauuucugacaag

SEQ ID NO: 839412 - RNA, 22 nt, Human
cacagcuucugagugaggauuu

SEQ ID NO: 839413 - RNA, 22 nt, Human
ugucacagggauaccauggggc

SEQ ID NO: 839414 - RNA, 22 nt, Human
agucucaggcagaggaaggcua

SEQ ID NO: 839415 - RNA, 22 nt, Human
aguaugaagaauacauagauga

SEQ ID NO: 839416 - RNA, 22 nt, Human
cccaggagauggagguugcagu

SEQ ID NO: 839417 - RNA, 22 nt, Human
gugacucacacaggccugggcu

SEQ ID NO: 839418 - RNA, 22 nt, Human
acagagguguuccagaccuagg

SEQ ID NO: 839419 - RNA, 22 nt, Human
auggggugagacuaggauuaaa

SEQ ID NO: 839420 - RNA, 22 nt, Human
gaggggcugcccuggugucagg

SEQ ID NO: 839421 - RNA, 22 nt, Human
aaaucugguucaguaaguccuc

SEQ ID NO: 839422 - RNA, 22 nt, Human
guggcccucugauagggucagg

SEQ ID NO: 839423 - RNA, 22 nt, Human
gcagugaaacaauaggaucaaa

SEQ ID NO: 839424 - RNA, 22 nt, Human
augugcauuaaaugucaauguu

SEQ ID NO: 839425 - RNA, 22 nt, Human
ugaaaaggaguccuuguuuuca

SEQ ID NO: 839426 - RNA, 22 nt, Human
uaaugcacagaauugacauggg

SEQ ID NO: 839427 - RNA, 22 nt, Human
cuggccaacuugcuuguuggca

SEQ ID NO: 839428 - RNA, 22 nt, Human
cacccaggcuagagugcagugg

SEQ ID NO: 839429 - RNA, 22 nt, Human
aggcugaggcagguggaucacc

SEQ ID NO: 839430 - RNA, 22 nt, Human
acacugaauguuuaagaacuug

SEQ ID NO: 839431 - RNA, 22 nt, Human
cuuauguaaacuacagauaaua

SEQ ID NO: 839432 - RNA, 22 nt, Human
uuccauaauuaaguggagagaa

SEQ ID NO: 839433 - RNA, 22 nt, Human
aggagcugcuuaaaugguuggu

SEQ ID NO: 839434 - RNA, 22 nt, Human
auauauuuugcggucacguggc

SEQ ID NO: 839435 - RNA, 22 nt, Human
aaagaucagucugaagcaacau

SEQ ID NO: 839436 - RNA, 22 nt, Human
cauggucuacaauuucauuuua

SEQ ID NO: 839437 - RNA, 22 nt, Human
cauuuucaugaguuucuguuca

SEQ ID NO: 839438 - RNA, 22 nt, Human
cuuucauaaaggaaaugaugag

SEQ ID NO: 839439 - RNA, 22 nt, Human
uccuggccugucuggaguagcu

SEQ ID NO: 839440 - RNA, 22 nt, Human
ucagggcauguauguuucuuua

SEQ ID NO: 839441 - RNA, 22 nt, Human
uccaagaucuacagcaguuuag

SEQ ID NO: 839442 - RNA, 22 nt, Human
ucucccaggugggugccuggag

SEQ ID NO: 839443 - RNA, 22 nt, Human
ccaggggaaacagggagcacuc

SEQ ID NO: 839444 - RNA, 22 nt, Human
caggagugcagguggugaggca

SEQ ID NO: 839445 - RNA, 22 nt, Human
acagaggucauggagaguucuc

SEQ ID NO: 839446 - RNA, 22 nt, Human
gaggagcuggcagcgucuccgc

SEQ ID NO: 839447 - RNA, 22 nt, Human
gucagugucuuaacagagauua

SEQ ID NO: 839448 - RNA, 20 nt, Human
uuucuguaaggcauuaaucu

SEQ ID NO: 839449 - RNA, 22 nt, Human
gcagggcagcuuagucccuguc

SEQ ID NO: 839450 - RNA, 22 nt, Human
acuuugaaggggaacauuuuaa

SEQ ID NO: 839451 - RNA, 22 nt, Human
uggagcugggguuugaaucugg

SEQ ID NO: 839452 - RNA, 22 nt, Human
cagcaggcugcgauugcucauu

SEQ ID NO: 839453 - RNA, 22 nt, Human
agacaaaugguaauuaugucua

SEQ ID NO: 839454 - RNA, 22 nt, Human
ugggccugugaugcugggcuau

SEQ ID NO: 839455 - RNA, 22 nt, Human
ggagccagaggcugcugcugug

SEQ ID NO: 839456 - RNA, 22 nt, Human
accuggcaugaagcaugccuua

SEQ ID NO: 839457 - RNA, 22 nt, Human
gccuggaguggacuuggccccu

SEQ ID NO: 839458 - RNA, 22 nt, Human
gccuaggaguacagaaugguuu

SEQ ID NO: 839459 - RNA, 22 nt, Human
agaggggaaggaugugauguga

SEQ ID NO: 839460 - RNA, 22 nt, Human
caggccugacccugagcuucac

SEQ ID NO: 839461 - RNA, 22 nt, Human
aggaccuguagggccugcaucc

SEQ ID NO: 839462 - RNA, 22 nt, Human
aagcuggcaugucaccugagaa

SEQ ID NO: 839463 - RNA, 22 nt, Human
cagcagcuucuguugaucagaa

SEQ ID NO: 839464 - RNA, 22 nt, Human
aagccagcauuuucccauuccu

SEQ ID NO: 839465 - RNA, 23 nt, Human
ucagucuucccugucaguaauag

SEQ ID NO: 839466 - RNA, 22 nt, Human
agaugcugucacacacacuguu

SEQ ID NO: 839467 - RNA, 22 nt, Human
acagaaugcguagugcauguug

SEQ ID NO: 839468 - RNA, 22 nt, Human
aguucuuuugugaacauaugcu

SEQ ID NO: 839469 - RNA, 22 nt, Human
ucacagaaauaagauaguuauu

SEQ ID NO: 839470 - RNA, 22 nt, Human
ggcugccugggagcccuccucu

SEQ ID NO: 839471 - RNA, 22 nt, Human
cauggcagaaaccugagcugcu

SEQ ID NO: 839472 - RNA, 22 nt, Human
ccaguuuuuccagugcuuucug

SEQ ID NO: 839473 - RNA, 22 nt, Human
aagaugauaggacuugcuuaag

SEQ ID NO: 839474 - RNA, 22 nt, Human
acagagcucccagccaucuccu

SEQ ID NO: 839475 - RNA, 22 nt, Human
cacagggcagagaccugggugc

SEQ ID NO: 839476 - RNA, 22 nt, Human
ccagcuggugacauccccaacc

SEQ ID NO: 839477 - RNA, 23 nt, Human
gcccaugcuguugggcccgagca

SEQ ID NO: 839478 - RNA, 22 nt, Human
acauuuguaugcguuuuuacug

SEQ ID NO: 839479 - RNA, 19 nt, Human
auacagauguauccaugau

SEQ ID NO: 839480 - RNA, 20 nt, Human
cuguagggugcagcaggcuc

SEQ ID NO: 839481 - RNA, 22 nt, Human
accauccugaaaccuucaugcu

SEQ ID NO: 839482 - RNA, 22 nt, Human
cagcugccacaccucuuucucu

SEQ ID NO: 839483 - RNA, 22 nt, Human
aucaguuaguuacugcuaagau

SEQ ID NO: 839484 - RNA, 22 nt, Human
ucuggauggucagcucuuccug

SEQ ID NO: 839485 - RNA, 22 nt, Human
cucuccuggggagcacacacac

SEQ ID NO: 839486 - RNA, 22 nt, Human
ucugagaggauuccugucccga

SEQ ID NO: 839487 - RNA, 19 nt, Human
ucacaggcaucuccccaga

SEQ ID NO: 839488 - RNA, 18 nt, Human
aguaaagcuuauuacaug

SEQ ID NO: 839489 - RNA, 20 nt, Human
agcuggccuguccuaggccu

SEQ ID NO: 839490 - RNA, 22 nt, Human
acagagcacugcccugugccgc

SEQ ID NO: 839491 - RNA, 21 nt, Human
gccagagcaguacaaugaggu

SEQ ID NO: 839492 - RNA, 22 nt, Human
ggccagggggcuucagacucca

SEQ ID NO: 839493 - RNA, 22 nt, Human
ggcuccuguccccucagcugcu

SEQ ID NO: 839494 - RNA, 21 nt, Human
ucuguucaaggaacuacggau

SEQ ID NO: 839495 - RNA, 20 nt, Human
ucucugcuguccacauuugc

SEQ ID NO: 839496 - RNA, 19 nt, Human
agcaacaccguuuauuucc

SEQ ID NO: 839497 - RNA, 22 nt, Human
ggccugagcucuggggaggcaa

SEQ ID NO: 839498 - RNA, 22 nt, Human
guagaaauuccauuuacuuuga

SEQ ID NO: 839499 - RNA, 22 nt, Human
ucuccuggucaccucagaaguc

SEQ ID NO: 839500 - RNA, 18 nt, Human
ucacagugcucuugccua

SEQ ID NO: 839501 - RNA, 22 nt, Human
aagagaggacauggugaaccug

SEQ ID NO: 839502 - RNA, 22 nt, Human
ugguuuaauuuccauuuccuug

SEQ ID NO: 839503 - RNA, 22 nt, Human
uggcucagugaagagauaacuu

SEQ ID NO: 839504 - RNA, 22 nt, Human
caugugucaaaugauguagcug

SEQ ID NO: 839505 - RNA, 22 nt, Human
acugcagggcauccuggccaag

SEQ ID NO: 839506 - RNA, 22 nt, Human
ggaaccaggaguuacacgaguu

SEQ ID NO: 839507 - RNA, 18 nt, Human
ucaaagucuggcuccacu

SEQ ID NO: 839508 - RNA, 22 nt, Human
gcugccuguguggccacucacu

SEQ ID NO: 839509 - RNA, 23 nt, Human
agacagaggcugaggcuggccgc

SEQ ID NO: 839510 - RNA, 17 nt, Human
cccagcuggcagugccg

SEQ ID NO: 839511 - RNA, 22 nt, Human
aaggcucuuggagugaaugcag

SEQ ID NO: 839512 - RNA, 22 nt, Human
ggagaggggcaaguuuaucuag

SEQ ID NO: 839513 - RNA, 22 nt, Human
ggacagcccauacacaugucug

SEQ ID NO: 839514 - RNA, 22 nt, Human
guggcuucacauggcauuuggc

SEQ ID NO: 839515 - RNA, 22 nt, Human
gcaagcuggcuguuagaggaug

SEQ ID NO: 839516 - RNA, 22 nt, Human
ucuguucauacagaguauagua

SEQ ID NO: 839517 - RNA, 22 nt, Human
aaauugcaaaaguacuuuuagg

SEQ ID NO: 839518 - RNA, 22 nt, Human
ccagcugauucgguggugguug

SEQ ID NO: 839519 - RNA, 19 nt, Human
gggcagaauggcaucucag

SEQ ID NO: 839520 - RNA, 22 nt, Human
uacauuaacuuacguccacaug

SEQ ID NO: 839521 - RNA, 23 nt, Human
ggccauuucauuugguucaaacu

SEQ ID NO: 839522 - RNA, 22 nt, Human
cauuaucucuucuauaugcuag

SEQ ID NO: 839523 - RNA, 22 nt, Human
aaugucugccugaacuuuauau

SEQ ID NO: 839524 - RNA, 22 nt, Human
cacagaggacuguagcggggag

SEQ ID NO: 839525 - RNA, 22 nt, Human
gcagcagagaacacaaugaugg

SEQ ID NO: 839526 - RNA, 22 nt, Human
ugagacaaaauugacagacaaa

SEQ ID NO: 839527 - RNA, 22 nt, Human
ggcucacgcaauuaucccggcc

SEQ ID NO: 839528 - RNA, 22 nt, Human
uagcuuuaccauagaagaguau

SEQ ID NO: 839529 - RNA, 22 nt, Human
gggcacugcuggaggcucccug

SEQ ID NO: 839530 - RNA, 22 nt, Human
aggcucugaucagguggcugug

SEQ ID NO: 839531 - RNA, 22 nt, Human
aaacaugagcaucucuucaagc

SEQ ID NO: 839532 - RNA, 22 nt, Human
auuaggcauauaugcuuuuaau

SEQ ID NO: 839533 - RNA, 22 nt, Human
cucucuggcuuggcacggagau

SEQ ID NO: 839534 - RNA, 22 nt, Human
uggaagcaucacuucuugccug

SEQ ID NO: 839535 - RNA, 20 nt, Human
uucugucagauuauauggga

SEQ ID NO: 839536 - RNA, 22 nt, Human
auauuucuccaaauguuuucaa

SEQ ID NO: 839537 - RNA, 22 nt, Human
uuaauaaaguaugaauuggaaa

SEQ ID NO: 839538 - RNA, 22 nt, Human
caugaaaaugucaaguucugcu

SEQ ID NO: 839539 - RNA, 22 nt, Human
caggcuugcugcuagagcacuu

SEQ ID NO: 839540 - RNA, 22 nt, Human
ccuuucagaugggcauggaccg

SEQ ID NO: 839541 - RNA, 22 nt, Human
agugugcugcuuaaacaguugu

SEQ ID NO: 839542 - RNA, 22 nt, Human
ggcagggaagcuggcaucacgg

SEQ ID NO: 839543 - RNA, 17 nt, Human
gagaguguauuggaugc

SEQ ID NO: 839544 - RNA, 22 nt, Human
ucacaacuugaagcugauuuaa

SEQ ID NO: 839545 - RNA, 22 nt, Human
aggccaaguagcuagcauugaa

SEQ ID NO: 839546 - RNA, 22 nt, Human
guuaauauuuaccugucaagaa

SEQ ID NO: 839547 - RNA, 17 nt, Human
uuuagaauacaauguuu

SEQ ID NO: 839548 - RNA, 22 nt, Human
ccaaaauguuugaaugcaugug

SEQ ID NO: 839549 - RNA, 22 nt, Human
ggagggagucagcugauuagaa

SEQ ID NO: 839550 - RNA, 22 nt, Human
gauaucauaucagacaaccucu

SEQ ID NO: 839551 - RNA, 22 nt, Human
agaaaugugagccccuuaucaa

SEQ ID NO: 839552 - RNA, 22 nt, Human
aauguaaacagcaagagaaggg

SEQ ID NO: 839553 - RNA, 22 nt, Human
uggcucagagcagggacucugg

SEQ ID NO: 839554 - RNA, 22 nt, Human
cagucaccugaagacuugacca

SEQ ID NO: 839555 - RNA, 22 nt, Human
ugcuuaauagugcacugguuuc

SEQ ID NO: 839556 - RNA, 23 nt, Human
auaaggcauaaagguacauugga

SEQ ID NO: 839557 - RNA, 21 nt, Human
gccugcagaccccaccaggcu

SEQ ID NO: 839558 - RNA, 22 nt, Human
uaugaaacauucauacaaauaa

SEQ ID NO: 839559 - RNA, 22 nt, Human
cagagccaaaugcugugguuau

SEQ ID NO: 839560 - RNA, 22 nt, Human
ugugaaagucaaauuaauugaa

SEQ ID NO: 839561 - RNA, 22 nt, Human
acagagccaaaaggacauagua

SEQ ID NO: 839562 - RNA, 22 nt, Human
aguggugcugcgcgcggagcuc

SEQ ID NO: 839563 - RNA, 22 nt, Human
ucuaaacacuaagucuugaugc

SEQ ID NO: 839564 - RNA, 22 nt, Human
ugaggcaggaggauugcaggau

SEQ ID NO: 839565 - RNA, 19 nt, Human
ggcagucucaagcagcaca

SEQ ID NO: 839566 - RNA, 22 nt, Human
uggcucaguuuagcagcucagu

SEQ ID NO: 839567 - RNA, 22 nt, Human
agcugccaucagccuuuggaug

SEQ ID NO: 839568 - RNA, 22 nt, Human
caaaugugguuucucagcauuc

SEQ ID NO: 839569 - RNA, 22 nt, Human
uugugaaacauucauggauuug

SEQ ID NO: 839570 - RNA, 22 nt, Human
auauucuuccaaaacaucauuu

SEQ ID NO: 839571 - RNA, 22 nt, Human
gugccuuccccgguggucuguu

SEQ ID NO: 839572 - RNA, 22 nt, Human
uggcagaggaggcucagauuga

SEQ ID NO: 839573 - RNA, 22 nt, Human
auugucuucuggucuuaucuuu

SEQ ID NO: 839574 - RNA, 22 nt, Human
gcuuccucgcugggcagaggca

SEQ ID NO: 839575 - RNA, 22 nt, Human
gccugucucuuggaacuuggua

SEQ ID NO: 839576 - RNA, 22 nt, Human
gucaaauauacuaagagguaaa

SEQ ID NO: 839577 - RNA, 22 nt, Human
caggcugggcagccuccccggc

SEQ ID NO: 839578 - RNA, 22 nt, Human
gcugagguggagauugcaguga

SEQ ID NO: 839579 - RNA, 22 nt, Human
gauuuagagcaggaaugcaugg

SEQ ID NO: 839580 - RNA, 22 nt, Human
ugucccagucaaggcugucauc

SEQ ID NO: 839581 - RNA, 19 nt, Human
gcucugugaugcugagggg

SEQ ID NO: 839582 - RNA, 22 nt, Human
cacauacaaugguguuauuugg

SEQ ID NO: 839583 - RNA, 22 nt, Human
uauguacaugauuucauuugcu

SEQ ID NO: 839584 - RNA, 22 nt, Human
cacaggaggaggccagagcgua

SEQ ID NO: 839585 - RNA, 22 nt, Human
gauccuugcaacucugugaggu

SEQ ID NO: 839586 - RNA, 22 nt, Human
uuaaaaugaauauugauuagca

SEQ ID NO: 839587 - RNA, 22 nt, Human
ggccccuggcaccaggcugauu

SEQ ID NO: 839588 - RNA, 22 nt, Human
ucagggacauuuagacacugau

SEQ ID NO: 839589 - RNA, 22 nt, Human
acuuucucaaaucagacuuuaa

SEQ ID NO: 839590 - RNA, 22 nt, Human
uccaggagucagacagauggug

SEQ ID NO: 839591 - RNA, 22 nt, Human
augugaaagagguguucagugg

SEQ ID NO: 839592 - RNA, 22 nt, Human
ccuggccuccuggccuucucau

SEQ ID NO: 839593 - RNA, 18 nt, Human
ugcuggguaacuguaugg

SEQ ID NO: 839594 - RNA, 22 nt, Human
caauuucacugacacccuggaa

SEQ ID NO: 839595 - RNA, 22 nt, Human
aucaaaguccaucagaagguag

SEQ ID NO: 839596 - RNA, 22 nt, Human
uauuacaauuuacauugcacuu

SEQ ID NO: 839597 - RNA, 22 nt, Human
agccaugcaccuuacucuugcu

SEQ ID NO: 839598 - RNA, 22 nt, Human
ggcucuggugcccuggcuccca

SEQ ID NO: 839599 - RNA, 22 nt, Human
gagcuggugugugcccgagcac

SEQ ID NO: 839600 - RNA, 22 nt, Human
aaaugcuguaacugauauucug

SEQ ID NO: 839601 - RNA, 22 nt, Human
ugcuggaggccugacuguguuu

SEQ ID NO: 839602 - RNA, 22 nt, Human
uggccugcccagagcagcucug

SEQ ID NO: 839603 - RNA, 22 nt, Human
acuauacauugaauguuaaggu

SEQ ID NO: 839604 - RNA, 22 nt, Human
cucugggcuuguugaccugcac

SEQ ID NO: 839605 - RNA, 22 nt, Human
uggccugggccggcagauauac

SEQ ID NO: 839606 - RNA, 22 nt, Human
gcagagcuguuaauggagcuga

SEQ ID NO: 839607 - RNA, 22 nt, Human
augguuuaguuagggcuuuuca

SEQ ID NO: 839608 - RNA, 22 nt, Human
uggcuucuuagaccaguggccu

SEQ ID NO: 839609 - RNA, 22 nt, Human
aauaacuucauguaacauuuaa

SEQ ID NO: 839610 - RNA, 22 nt, Human
ugacacaggcagcucccagcac

SEQ ID NO: 839611 - RNA, 22 nt, Human
gcccagcacagcuggaagaguc

SEQ ID NO: 839612 - RNA, 22 nt, Human
aggaaaaagaguugcugccuuc

SEQ ID NO: 839613 - RNA, 22 nt, Human
augcaguaaauguucuaguuug

SEQ ID NO: 839614 - RNA, 22 nt, Human
auggggcucugcggcugcuccc

SEQ ID NO: 839615 - RNA, 22 nt, Human
cugcccugagggccuguguguu

SEQ ID NO: 839616 - RNA, 19 nt, Human
cagcugcaccgugaccauc

SEQ ID NO: 839617 - RNA, 22 nt, Human
ugaggcaggacuugcauaaagu

SEQ ID NO: 839618 - RNA, 22 nt, Human
ucaguggauauuucuguggcug

SEQ ID NO: 839619 - RNA, 22 nt, Human
ugggacugcucuugcugggguc

SEQ ID NO: 839620 - RNA, 22 nt, Human
gacuguguccaugugcuggauu

SEQ ID NO: 839621 - RNA, 23 nt, Human
aggcuuccuaucuuagagcuggg

SEQ ID NO: 839622 - RNA, 22 nt, Human
cauaauuucacugucguauggc

SEQ ID NO: 839623 - RNA, 22 nt, Human
ggcagcuuccuaggagagggca

SEQ ID NO: 839624 - RNA, 21 nt, Human
agcugcuuucagcuccuagag

SEQ ID NO: 839625 - RNA, 22 nt, Human
ucucagagaggggccgggccuu

SEQ ID NO: 839626 - RNA, 22 nt, Human
ugauuucccucaucauaacaga

SEQ ID NO: 839627 - RNA, 22 nt, Human
ggggcagcuaccggaaguaggg

SEQ ID NO: 839628 - RNA, 22 nt, Human
cagugguuauacuuacuguuuc

SEQ ID NO: 839629 - RNA, 20 nt, Human
accauaauguuaauuacaaa

SEQ ID NO: 839630 - RNA, 22 nt, Human
acugagcugugacaaugcuuaa

SEQ ID NO: 839631 - RNA, 22 nt, Human
cugcugugcauauuuaucuagg

SEQ ID NO: 839632 - RNA, 22 nt, Human
uaaggucauggugaauaauaag

SEQ ID NO: 839633 - RNA, 22 nt, Human
aucuagaaguggcaugaauuac

SEQ ID NO: 839634 - RNA, 22 nt, Human
aggaaaaaagucugugauuaua

SEQ ID NO: 839635 - RNA, 22 nt, Human
uugggcugaaguagagggcaga

SEQ ID NO: 839636 - RNA, 22 nt, Human
aggaagccuggggcugcccucg

SEQ ID NO: 839637 - RNA, 22 nt, Human
agugaaauacugucguuuuuag

SEQ ID NO: 839638 - RNA, 22 nt, Human
ccucccucuguuagagcugucu

SEQ ID NO: 839639 - RNA, 22 nt, Human
agaauuccucuaggaucugccc

SEQ ID NO: 839640 - RNA, 23 nt, Human
acagaaaguucugcuggacagag

SEQ ID NO: 839641 - RNA, 20 nt, Human
uguuucuuuuaaugagcggc

SEQ ID NO: 839642 - RNA, 22 nt, Human
uccuucagggcugaccacaggc

SEQ ID NO: 839643 - RNA, 22 nt, Human
ugcucacugaacucuugcuguc

SEQ ID NO: 839644 - RNA, 22 nt, Human
caaaagcaguucuaucugaguu

SEQ ID NO: 839645 - RNA, 22 nt, Human
cagcugaguguuggcauguuca

SEQ ID NO: 839646 - RNA, 22 nt, Human
cagccaggccuggugaccaaag

SEQ ID NO: 839647 - RNA, 22 nt, Human
uaauuucaaauuucuuagcgug

SEQ ID NO: 839648 - RNA, 22 nt, Human
auuuacugagguaaauaaacug

SEQ ID NO: 839649 - RNA, 22 nt, Human
cuuuaacaaaugacucuugucu

SEQ ID NO: 839650 - RNA, 22 nt, Human
cugaggccagcugcagagcucu

SEQ ID NO: 839651 - RNA, 22 nt, Human
cucucaggcuugggucguggca

SEQ ID NO: 839652 - RNA, 22 nt, Human
aaaucucaguguucuaagcauu

SEQ ID NO: 839653 - RNA, 22 nt, Human
uaucaucuuguugucaugcagc

SEQ ID NO: 839654 - RNA, 22 nt, Human
uauagaaguaagcauugugaug

SEQ ID NO: 839655 - RNA, 18 nt, Human
gguggcaggucagaugcc

SEQ ID NO: 839656 - RNA, 22 nt, Human
gcuuuggagccuguguucugcc

SEQ ID NO: 839657 - RNA, 22 nt, Human
uaaguccuaacagacugggggc

SEQ ID NO: 839658 - RNA, 22 nt, Human
ugcugagaucugccaguagaug

SEQ ID NO: 839659 - RNA, 22 nt, Human
agagaacaaauuaaaggugguu

SEQ ID NO: 839660 - RNA, 22 nt, Human
accaggggaugguuggcacugu

SEQ ID NO: 839661 - RNA, 22 nt, Human
gagcagcucugggugacccagu

SEQ ID NO: 839662 - RNA, 22 nt, Human
cagagacauuaagugccaugau

SEQ ID NO: 839663 - RNA, 22 nt, Human
uccugccugagcguggaggagg

SEQ ID NO: 839664 - RNA, 22 nt, Human
uguuacuuaucucacgugaugc

SEQ ID NO: 839665 - RNA, 18 nt, Human
aggccagcccugcuacug

SEQ ID NO: 839666 - RNA, 22 nt, Human
aguaaacauagaauguucuucc

SEQ ID NO: 839667 - RNA, 22 nt, Human
cucuggaguucuucaagcuacu

SEQ ID NO: 839668 - RNA, 22 nt, Human
gccaccaggagcccaguccaaa

SEQ ID NO: 839669 - RNA, 22 nt, Human
agaaacugaauuauuucugagg

SEQ ID NO: 839670 - RNA, 22 nt, Human
agccacagagcaggagaccuuu

SEQ ID NO: 839671 - RNA, 22 nt, Human
ucaaaugcuguauuguaguaau

SEQ ID NO: 839672 - RNA, 22 nt, Human
caggaacacaaugagucucaaa

SEQ ID NO: 839673 - RNA, 22 nt, Human
ucugucacccaggcuggagugc

SEQ ID NO: 839674 - RNA, 21 nt, Human
aaggccugcuuacugcuaguu

SEQ ID NO: 839675 - RNA, 22 nt, Human
auccaugauuaguaggauaaag

SEQ ID NO: 839676 - RNA, 22 nt, Human
ugaggaugacgauggcaauggc

SEQ ID NO: 839677 - RNA, 22 nt, Human
cagagccagcccacuguucccg

SEQ ID NO: 839678 - RNA, 22 nt, Human
aaagauuuaagaauaauuugug

SEQ ID NO: 839679 - RNA, 22 nt, Human
uuccuguauuuugcgaauuuuc

SEQ ID NO: 839680 - RNA, 22 nt, Human
agaugcuucaguguuuaauuua

SEQ ID NO: 839681 - RNA, 22 nt, Human
cagacagcugcuuucuugcugu

SEQ ID NO: 839682 - RNA, 22 nt, Human
uggccuuccuggugacucauga

SEQ ID NO: 839683 - RNA, 22 nt, Human
uugcauugcuuggucuucaaga

SEQ ID NO: 839684 - RNA, 22 nt, Human
aaagucauguaaugauaugauu

SEQ ID NO: 839685 - RNA, 22 nt, Human
ugugcccauuccacuugaguac

SEQ ID NO: 839686 - RNA, 20 nt, Human
auccaugagagucuggauuc

SEQ ID NO: 839687 - RNA, 22 nt, Human
ucauuucucccggccaaaaacu

SEQ ID NO: 839688 - RNA, 21 nt, Human
ggagggcagcccagacuggcu

SEQ ID NO: 839689 - RNA, 22 nt, Human
gaugggggccagggccugcuuu

SEQ ID NO: 839690 - RNA, 22 nt, Human
acagaauuuacacaucucuaaa

SEQ ID NO: 839691 - RNA, 22 nt, Human
aggguggcaccuggaagggaug

SEQ ID NO: 839692 - RNA, 22 nt, Human
aaaugucuguuagucauaucau

SEQ ID NO: 839693 - RNA, 22 nt, Human
ggaggaccccagcagcucccca

SEQ ID NO: 839694 - RNA, 22 nt, Human
ccugcagguaaggcuaacugcc

SEQ ID NO: 839695 - RNA, 22 nt, Human
aacugcauucagaaagcucacu

SEQ ID NO: 839696 - RNA, 22 nt, Human
cuggcagcccaaccuagagucu

SEQ ID NO: 839697 - RNA, 22 nt, Human
cacccaggcagguggcugagaa

SEQ ID NO: 839698 - RNA, 22 nt, Human
ggccugggcccacugucaagag

SEQ ID NO: 839699 - RNA, 22 nt, Human
ucaggggcccuucccucagcag

SEQ ID NO: 839700 - RNA, 22 nt, Human
uccaguggcacuggagacuaga

SEQ ID NO: 839701 - RNA, 22 nt, Human
ggcucuggucagugaggggccu

SEQ ID NO: 839702 - RNA, 22 nt, Human
cauacauugcucauucaguauc

SEQ ID NO: 839703 - RNA, 22 nt, Human
cugcuggagguuggagcaugca

SEQ ID NO: 839704 - RNA, 22 nt, Human
gcaugugucuccccaguggagg

SEQ ID NO: 839705 - RNA, 22 nt, Human
ggagccagagggaugcaguuga

SEQ ID NO: 839706 - RNA, 22 nt, Human
gugcuuuuaaaggcaauuagua

SEQ ID NO: 839707 - RNA, 22 nt, Human
uuuacagagagagaacuggacu

SEQ ID NO: 839708 - RNA, 22 nt, Human
gccuggagaccugcuccucuac

SEQ ID NO: 839709 - RNA, 22 nt, Human
auaugugugaugcauggacuaa

SEQ ID NO: 839710 - RNA, 22 nt, Human
cucuucucugcagccuuugaag

SEQ ID NO: 839711 - RNA, 22 nt, Human
aaagcagagguugcagugagcu

SEQ ID NO: 839712 - RNA, 22 nt, Human
cacacaugaaucccuaguaccu

SEQ ID NO: 839713 - RNA, 22 nt, Human
cuugccuucuuuuccuauagaa

SEQ ID NO: 839714 - RNA, 22 nt, Human
uuugggcaguagauguaucacu

SEQ ID NO: 839715 - RNA, 22 nt, Human
ucaucacuguaucauugauaga

SEQ ID NO: 839716 - RNA, 22 nt, Human
aggauccuccuuagaaaagacc

SEQ ID NO: 839717 - RNA, 18 nt, Human
ucuuuggacaacuacugg

SEQ ID NO: 839718 - RNA, 22 nt, Human
ugccugucuuaauaucuggaaa

SEQ ID NO: 839719 - RNA, 22 nt, Human
uuccugggacuggagcagccca

SEQ ID NO: 839720 - RNA, 22 nt, Human
gcacacccucucaccagcacug

SEQ ID NO: 839721 - RNA, 22 nt, Human
agugggcaugaucuggugucug

SEQ ID NO: 839722 - RNA, 22 nt, Human
ucaguaaaguucuuucuugcug

SEQ ID NO: 839723 - RNA, 20 nt, Human
aggagaaauucgggacaccu

SEQ ID NO: 839724 - RNA, 22 nt, Human
acagaauuaaugaaaauuacaa

SEQ ID NO: 839725 - RNA, 22 nt, Human
uuguccaaaguaacacaucuag

SEQ ID NO: 839726 - RNA, 22 nt, Human
agugcauugcaucucugcuuca

SEQ ID NO: 839727 - RNA, 22 nt, Human
aguauguagugcaaucagucag

SEQ ID NO: 839728 - RNA, 22 nt, Human
uacagauacagaucuagauaca

SEQ ID NO: 839729 - RNA, 22 nt, Human
uccuggauucugcccugaaggc

SEQ ID NO: 839730 - RNA, 20 nt, Human
acuuucucgguuucucaccu

SEQ ID NO: 839731 - RNA, 22 nt, Human
ugaggcaggagaaucacaugaa

SEQ ID NO: 839732 - RNA, 22 nt, Human
gucaaaaaguagucauuucugu

SEQ ID NO: 839733 - RNA, 22 nt, Human
caugcacagugauaucugaaga

SEQ ID NO: 839734 - RNA, 22 nt, Human
ugcccaggaucuggcgaugcuc

SEQ ID NO: 839735 - RNA, 21 nt, Human
ugguuugcggccaaaguuaaa

SEQ ID NO: 839736 - RNA, 18 nt, Human
gccugccuagagcuugcc

SEQ ID NO: 839737 - RNA, 22 nt, Human
gagccuggccuccugccucagc

SEQ ID NO: 839738 - RNA, 22 nt, Human
aguugacauccauaacaggaag

SEQ ID NO: 839739 - RNA, 22 nt, Human
gaaaggucuuccggucuuccag

SEQ ID NO: 839740 - RNA, 22 nt, Human
acuucacagauauuuauuuggu

SEQ ID NO: 839741 - RNA, 22 nt, Human
agcaccuggucuccuggcgcug

SEQ ID NO: 839742 - RNA, 22 nt, Human
uagugcuuggcccuaccagaua

SEQ ID NO: 839743 - RNA, 20 nt, Human
accuuucaaaugauucagca

SEQ ID NO: 839744 - RNA, 22 nt, Human
gcuggccucaucacugacuucu

SEQ ID NO: 839745 - RNA, 22 nt, Human
uaugcacacauguaugcaugug

SEQ ID NO: 839746 - RNA, 22 nt, Human
ggugggcaggcgaggcccaggu

SEQ ID NO: 839747 - RNA, 22 nt, Human
uuuuauguaauccuuacugucg

SEQ ID NO: 839748 - RNA, 22 nt, Human
agucucugcacaguaagaagca

SEQ ID NO: 839749 - RNA, 19 nt, Human
aggguccagggagcggcuc

SEQ ID NO: 839750 - RNA, 22 nt, Human
acaggcugcccgcuccccaccu

SEQ ID NO: 839751 - RNA, 22 nt, Human
gccucacugcagccccaggaag

SEQ ID NO: 839752 - RNA, 22 nt, Human
gggccuggggugacguaccccu

SEQ ID NO: 839753 - RNA, 22 nt, Human
ucagaauugucuggggaauguu

SEQ ID NO: 839754 - RNA, 22 nt, Human
cccuggaggcggauguugcagu

SEQ ID NO: 839755 - RNA, 22 nt, Human
aauuucaauuacuuuugcacca

SEQ ID NO: 839756 - RNA, 22 nt, Human
cucuuucugauucgcugggacc

SEQ ID NO: 839757 - RNA, 22 nt, Human
cccaggcagugugugcaugcgu

SEQ ID NO: 839758 - RNA, 22 nt, Human
ucuuucucucuaaucaagcaca

SEQ ID NO: 839759 - RNA, 22 nt, Human
agaggacagguuuuccaugggc

SEQ ID NO: 839760 - RNA, 22 nt, Human
ggauggagaugaccauggugac

SEQ ID NO: 839761 - RNA, 22 nt, Human
aagucacagcuaaauagcuaag

SEQ ID NO: 839762 - RNA, 22 nt, Human
gcaggaugccagggcagcagcg

SEQ ID NO: 839763 - RNA, 22 nt, Human
ggcuuccuggagaaggucugag

SEQ ID NO: 839764 - RNA, 22 nt, Human
aaguuucauuguucauguaaca

SEQ ID NO: 839765 - RNA, 22 nt, Human
uuugaaguucccccauaucaga

SEQ ID NO: 839766 - RNA, 22 nt, Human
guuugaaugcaguaugcauuuu

SEQ ID NO: 839767 - RNA, 23 nt, Human
aggcacugaaugugucagugagu

SEQ ID NO: 839768 - RNA, 22 nt, Human
aaaucuguaagcaauugcucag

SEQ ID NO: 839769 - RNA, 22 nt, Human
aggggagguggcagaaaugugc

SEQ ID NO: 839770 - RNA, 22 nt, Human
cugggccugguagggcuugaaa

SEQ ID NO: 839771 - RNA, 22 nt, Human
uggcucagaagaaaagguaaac

SEQ ID NO: 839772 - RNA, 22 nt, Human
uagggcagcugcaucaggcacu

SEQ ID NO: 839773 - RNA, 22 nt, Human
gcugucacacauggccccagcu

SEQ ID NO: 839774 - RNA, 22 nt, Human
guauucauauuaaacauaucaa

SEQ ID NO: 839775 - RNA, 22 nt, Human
aaaaugcaugagaaugugcucg

SEQ ID NO: 839776 - RNA, 22 nt, Human
caguaaauuugagggaucuaau

SEQ ID NO: 839777 - RNA, 21 nt, Human
accagcaggagaucagaagga

SEQ ID NO: 839778 - RNA, 22 nt, Human
uauguagaagcugcucaaagaa

SEQ ID NO: 839779 - RNA, 22 nt, Human
aaauacauaaagguuguaccag

SEQ ID NO: 839780 - RNA, 22 nt, Human
cuuccaaacccaggguaugggc

SEQ ID NO: 839781 - RNA, 22 nt, Human
augccacugacauggacaauuu

SEQ ID NO: 839782 - RNA, 22 nt, Human
ccugagagcauuccacacugaa

SEQ ID NO: 839783 - RNA, 22 nt, Human
gggcugucaugugucagugacc

SEQ ID NO: 839784 - RNA, 22 nt, Human
uaaagccacuucauucuagucu

SEQ ID NO: 839785 - RNA, 22 nt, Human
cuugaaucuucugaguauuugc

SEQ ID NO: 839786 - RNA, 22 nt, Human
uaaaaguggauaagcuguagga

SEQ ID NO: 839787 - RNA, 22 nt, Human
ccaugagccaggcugaggaagc

SEQ ID NO: 839788 - RNA, 22 nt, Human
uccagggcuggguuggcucagc

SEQ ID NO: 839789 - RNA, 22 nt, Human
aaaggucauugaaaaggaggaa

SEQ ID NO: 839790 - RNA, 22 nt, Human
uugggaaggcguggaagcagaa

SEQ ID NO: 839791 - RNA, 22 nt, Human
gagguacaugaggauacacagg

SEQ ID NO: 839792 - RNA, 22 nt, Human
ugaagcaggguggccagauugu

SEQ ID NO: 839793 - RNA, 22 nt, Human
cagcuccccaugguuccugaag

SEQ ID NO: 839794 - RNA, 22 nt, Human
cuacagaauggagggucagaga

SEQ ID NO: 839795 - RNA, 20 nt, Human
cugcugugugugccucagcc

SEQ ID NO: 839796 - RNA, 22 nt, Human
auaacagauacucucugugagg

SEQ ID NO: 839797 - RNA, 22 nt, Human
gggugggccacugagcagcgug

SEQ ID NO: 839798 - RNA, 22 nt, Human
agaaagcaucuccauuguaggu

SEQ ID NO: 839799 - RNA, 22 nt, Human
cagaaugcaaauuuuauaauau

SEQ ID NO: 839800 - RNA, 21 nt, Human
ccagccucagaucagggagcu

SEQ ID NO: 839801 - RNA, 22 nt, Human
ccaggccuguguuguguggagg

SEQ ID NO: 839802 - RNA, 22 nt, Human
uuccagagcaguuuucagauca

SEQ ID NO: 839803 - RNA, 18 nt, Human
gccugggaggaggaaaug

SEQ ID NO: 839804 - RNA, 22 nt, Human
aaggcacugagccagccgucuc

SEQ ID NO: 839805 - RNA, 22 nt, Human
caagccucagaaucuucuccau

SEQ ID NO: 839806 - RNA, 22 nt, Human
cagcagugcuucagugugagau

SEQ ID NO: 839807 - RNA, 22 nt, Human
guggccuggcgagcuggcgcgg

SEQ ID NO: 839808 - RNA, 22 nt, Human
ggagaagggacagacucagcuu

SEQ ID NO: 839809 - RNA, 22 nt, Human
auuuacagaagcauguaauagc

SEQ ID NO: 839810 - RNA, 19 nt, Human
guaagggcuaauggacuau

SEQ ID NO: 839811 - RNA, 22 nt, Human
uucuguauauuguaaagacuca

SEQ ID NO: 839812 - RNA, 22 nt, Human
caggccuggagugcaauggcac

SEQ ID NO: 839813 - RNA, 22 nt, Human
uugcauugaugucuauacgcug

SEQ ID NO: 839814 - RNA, 22 nt, Human
ggcugagcaauuuugaugacau

SEQ ID NO: 839815 - RNA, 22 nt, Human
aguuuaugaaacacagauuuga

SEQ ID NO: 839816 - RNA, 22 nt, Human
uagcauuucacugaucuucacu

SEQ ID NO: 839817 - RNA, 21 nt, Human
acagggcaugcagcuggcugu

SEQ ID NO: 839818 - RNA, 22 nt, Human
uggcucugucaaacugcacaca

SEQ ID NO: 839819 - RNA, 22 nt, Human
ugcaggcuuuagccccauggcu

SEQ ID NO: 839820 - RNA, 19 nt, Human
cugagcagcggcagcacuu

SEQ ID NO: 839821 - RNA, 22 nt, Human
aggaggccccuccuggguugcu

SEQ ID NO: 839822 - RNA, 22 nt, Human
agaacuguccuuggaggagagu

SEQ ID NO: 839823 - RNA, 22 nt, Human
gaguccuuggcaucaucaguac

SEQ ID NO: 839824 - RNA, 22 nt, Human
aagugagauuauauguacggga

SEQ ID NO: 839825 - RNA, 22 nt, Human
auugcuguaaauuaucuuauua

SEQ ID NO: 839826 - RNA, 22 nt, Human
uuucacauacaguguauaguag

SEQ ID NO: 839827 - RNA, 22 nt, Human
aacagcaugcuggguaacauug

SEQ ID NO: 839828 - RNA, 22 nt, Human
caauuucagugcuguggagagg

SEQ ID NO: 839829 - RNA, 19 nt, Human
agaggccucagcagcuggc

SEQ ID NO: 839830 - RNA, 22 nt, Human
ccagaucuucuuuucagugucu

SEQ ID NO: 839831 - RNA, 22 nt, Human
uuccaggacaagauguuucagg

SEQ ID NO: 839832 - RNA, 22 nt, Human
uagcagcucugauucugggccc

SEQ ID NO: 839833 - RNA, 22 nt, Human
uuuccuucaucaucugagagcu

SEQ ID NO: 839834 - RNA, 22 nt, Human
acauaauagguaccugaauaau

SEQ ID NO: 839835 - RNA, 22 nt, Human
uccugggcuguggccccgggca

SEQ ID NO: 839836 - RNA, 22 nt, Human
caugcuuuuuucuaguauaaau

SEQ ID NO: 839837 - RNA, 22 nt, Human
ugagaaaagguugagaugauaa

SEQ ID NO: 839838 - RNA, 22 nt, Human
aggcugcagaacagucaggugc

SEQ ID NO: 839839 - RNA, 22 nt, Human
gaugggaggaaccugggucccu

SEQ ID NO: 839840 - RNA, 22 nt, Human
aggcccuguccauggugcugaa

SEQ ID NO: 839841 - RNA, 22 nt, Human
acccaggauaaucuguguaucu

SEQ ID NO: 839842 - RNA, 20 nt, Human
ugucagugccugaggcacag

SEQ ID NO: 839843 - RNA, 22 nt, Human
uuagaacuuaagaauacugucu

SEQ ID NO: 839844 - RNA, 17 nt, Human
gauuuccugaaguucuu

SEQ ID NO: 839845 - RNA, 22 nt, Human
ggugaggcuaagugacacaggg

SEQ ID NO: 839846 - RNA, 22 nt, Human
guguaauuauauaaagaucuac

SEQ ID NO: 839847 - RNA, 22 nt, Human
uaauuuauuucaacugccaagg

SEQ ID NO: 839848 - RNA, 22 nt, Human
cauugucacccaaagcucauag

SEQ ID NO: 839849 - RNA, 22 nt, Human
aauuccugucuuaacaguucug

SEQ ID NO: 839850 - RNA, 23 nt, Human
cucccuggaguuucuggaagaug

SEQ ID NO: 839851 - RNA, 22 nt, Human
aggcaagggggcgccaccuucc

SEQ ID NO: 839852 - RNA, 22 nt, Human
ugcuguguucuccugacucacc

SEQ ID NO: 839853 - RNA, 22 nt, Human
uggcagcugucagaaugcaaau

SEQ ID NO: 839854 - RNA, 22 nt, Human
aggcucagauucacauuugguu

SEQ ID NO: 839855 - RNA, 22 nt, Human
augaguaagaccauaauuuuug

SEQ ID NO: 839856 - RNA, 19 nt, Human
ugccuggacaaaugugggg

SEQ ID NO: 839857 - RNA, 23 nt, Human
gccaggaguggguagacuaaugc

SEQ ID NO: 839858 - RNA, 22 nt, Human
uuucauugucuacauaugacau

SEQ ID NO: 839859 - RNA, 22 nt, Human
gagggacagcuaaagagaaauu

SEQ ID NO: 839860 - RNA, 22 nt, Human
cugcugccggcgagccucccuu

SEQ ID NO: 839861 - RNA, 22 nt, Human
ggcagacuguaauaggagaauu

SEQ ID NO: 839862 - RNA, 22 nt, Human
gcuguccucugaucucuggagg

SEQ ID NO: 839863 - RNA, 22 nt, Human
guguuuccuaguuuaaugaaug

SEQ ID NO: 839864 - RNA, 22 nt, Human
ccaaaugugccuguuucaacaa

SEQ ID NO: 839865 - RNA, 22 nt, Human
ccagucugugugccagccugcg

SEQ ID NO: 839866 - RNA, 22 nt, Human
cagggcugugcccaucuucccc

SEQ ID NO: 839867 - RNA, 20 nt, Human
agaaauauugaguucagagg

SEQ ID NO: 839868 - RNA, 21 nt, Human
cagcaaaucauugggcagacu

SEQ ID NO: 839869 - RNA, 22 nt, Human
gcagggugugucucauacaguu

SEQ ID NO: 839870 - RNA, 20 nt, Human
uacugggcaagcccacagac

SEQ ID NO: 839871 - RNA, 22 nt, Human
gugcugcagagucucgugccgc

SEQ ID NO: 839872 - RNA, 22 nt, Human
aucugucagccugggauuaggg

SEQ ID NO: 839873 - RNA, 22 nt, Human
cuagaaauauuuuacagucaag

SEQ ID NO: 839874 - RNA, 22 nt, Human
cuggaguuagaguagacacuga

SEQ ID NO: 839875 - RNA, 22 nt, Human
ggcuucauggaggaggugaguc

SEQ ID NO: 839876 - RNA, 22 nt, Human
ugcagaggagucagccugggca

SEQ ID NO: 839877 - RNA, 22 nt, Human
aaacuuuggauugugauugugc

SEQ ID NO: 839878 - RNA, 22 nt, Human
acucaagauagggaaaguacaa

SEQ ID NO: 839879 - RNA, 22 nt, Human
cauuuguaggaugcuucuuguu

SEQ ID NO: 839880 - RNA, 22 nt, Human
cuacagaagccguggucaggaa

SEQ ID NO: 839881 - RNA, 22 nt, Human
ggcaggcuggcuuuguuccagg

SEQ ID NO: 839882 - RNA, 22 nt, Human
agguaaagacagugaaagaggg

SEQ ID NO: 839883 - RNA, 22 nt, Human
cucccuggcuuuguccugaggc

SEQ ID NO: 839884 - RNA, 22 nt, Human
gcugucugucuucacaucucgc

SEQ ID NO: 839885 - RNA, 22 nt, Human
agccccacacucucucugagaa

SEQ ID NO: 839886 - RNA, 22 nt, Human
aaaucugggagcagcucggcca

SEQ ID NO: 839887 - RNA, 22 nt, Human
augcugugucaggaauuugaua

SEQ ID NO: 839888 - RNA, 22 nt, Human
agcuucccaagguuggaagguu

SEQ ID NO: 839889 - RNA, 22 nt, Human
uccucugcuccaggcuggacuu

SEQ ID NO: 839890 - RNA, 22 nt, Human
aaaucuaggcucauccuggucc

SEQ ID NO: 839891 - RNA, 22 nt, Human
ccaggagaugggagcaucuaaa

SEQ ID NO: 839892 - RNA, 22 nt, Human
uuucagggagccuagaagagcu

SEQ ID NO: 839893 - RNA, 22 nt, Human
ucuucacagaugcauauacuuc

SEQ ID NO: 839894 - RNA, 20 nt, Human
ccacaggaguccagucgacc

SEQ ID NO: 839895 - RNA, 22 nt, Human
ucuaaaaaagucuguucacuug

SEQ ID NO: 839896 - RNA, 22 nt, Human
agauguaguagugggucuuuua

SEQ ID NO: 839897 - RNA, 22 nt, Human
gggcccagcgugguuccaucug

SEQ ID NO: 839898 - RNA, 22 nt, Human
agggugccuggaagccacucac

SEQ ID NO: 839899 - RNA, 22 nt, Human
aggaggcccuagagcucuagag

SEQ ID NO: 839900 - RNA, 22 nt, Human
caagccugucucaccagugcua

SEQ ID NO: 839901 - RNA, 22 nt, Human
ucaucacauaugucaugauuug

SEQ ID NO: 839902 - RNA, 22 nt, Human
acugagcugcuugaagugaacu

SEQ ID NO: 839903 - RNA, 22 nt, Human
agggcugcugaggaagccuugc

SEQ ID NO: 839904 - RNA, 22 nt, Human
auaauuuacuaagcucuaccuu

SEQ ID NO: 839905 - RNA, 22 nt, Human
ugccuguccugaggaugagggu

SEQ ID NO: 839906 - RNA, 22 nt, Human
agagccuggcucccagcuaccg

SEQ ID NO: 839907 - RNA, 22 nt, Human
uucuccagagggcucugcagga

SEQ ID NO: 839908 - RNA, 22 nt, Human
gaggugggagggcagucccuaa

SEQ ID NO: 839909 - RNA, 22 nt, Human
caggcacugugcuagauccuug

SEQ ID NO: 839910 - RNA, 22 nt, Human
auugaaagauuuugggcucaug

SEQ ID NO: 839911 - RNA, 19 nt, Human
gaaguccucuaguaaauuu

SEQ ID NO: 839912 - RNA, 22 nt, Human
cuuuccaagaaugcagauaccu

SEQ ID NO: 839913 - RNA, 22 nt, Human
ggguggagcuuggacaccagua

SEQ ID NO: 839914 - RNA, 22 nt, Human
gaggagagaacauuccuccaua

SEQ ID NO: 839915 - RNA, 22 nt, Human
gcacagaagagcuuuggaauga

SEQ ID NO: 839916 - RNA, 20 nt, Human
ggccuuggguuucgccuguu

SEQ ID NO: 839917 - RNA, 22 nt, Human
gcugucuguucgagcguguguu

SEQ ID NO: 839918 - RNA, 22 nt, Human
gauuucuucauuuguggugaau

SEQ ID NO: 839919 - RNA, 22 nt, Human
uuuugcuugagugcacaaaaug

SEQ ID NO: 839920 - RNA, 22 nt, Human
ccaggagaaugggauuacccua

SEQ ID NO: 839921 - RNA, 22 nt, Human
accucugcucaagaccccuccg

SEQ ID NO: 839922 - RNA, 19 nt, Human
cccagagcauccugaacuu

SEQ ID NO: 839923 - RNA, 22 nt, Human
cccugaggggaguggugaggug

SEQ ID NO: 839924 - RNA, 21 nt, Human
ugggcacugagggugcugcuc

SEQ ID NO: 839925 - RNA, 22 nt, Human
gggcguggauggucagugcagg

SEQ ID NO: 839926 - RNA, 19 nt, Human
ucuaacagaagugucgucc

SEQ ID NO: 839927 - RNA, 21 nt, Human
gccagccuguuuaccuguggu

SEQ ID NO: 839928 - RNA, 22 nt, Human
uucauucaucucuaaaaugccu

SEQ ID NO: 839929 - RNA, 22 nt, Human
gagccuggagcuggaacgaagc

SEQ ID NO: 839930 - RNA, 22 nt, Human
uauguuaaauguuugauguuua

SEQ ID NO: 839931 - RNA, 22 nt, Human
aaggcagcacagcaacugcuca

SEQ ID NO: 839932 - RNA, 18 nt, Human
cccagcuccacuucccuc

SEQ ID NO: 839933 - RNA, 22 nt, Human
cucuggacagcaggugcugugg

SEQ ID NO: 839934 - RNA, 22 nt, Human
cugcuuugauuagaagaguaca

SEQ ID NO: 839935 - RNA, 20 nt, Human
gugcuucagaagccauugcu

SEQ ID NO: 839936 - RNA, 22 nt, Human
agcccagggaaccaggaagugg

SEQ ID NO: 839937 - RNA, 22 nt, Human
gggaguggagagcaauggauga

SEQ ID NO: 839938 - RNA, 22 nt, Human
cugccucugguuuuggucccug

SEQ ID NO: 839939 - RNA, 22 nt, Human
uacauauguaaacauguauaaa

SEQ ID NO: 839940 - RNA, 22 nt, Human
gacagggcaagacucugucuaa

SEQ ID NO: 839941 - RNA, 22 nt, Human
aggggagccccugguccuggug

SEQ ID NO: 839942 - RNA, 22 nt, Human
cagagccugccaccuuucuccc

SEQ ID NO: 839943 - RNA, 22 nt, Human
agaauaugaugguuggagaauu

SEQ ID NO: 839944 - RNA, 22 nt, Human
cccaggagguggagcuugcagu

SEQ ID NO: 839945 - RNA, 22 nt, Human
uaucuguuggcuccuaguugua

SEQ ID NO: 839946 - RNA, 22 nt, Human
gcuggccuugugucugaggaag

SEQ ID NO: 839947 - RNA, 22 nt, Human
ggcucagguuuaaagugcuuua

SEQ ID NO: 839948 - RNA, 20 nt, Human
cucuccuugccgacuuggca

SEQ ID NO: 839949 - RNA, 22 nt, Human
gcacagaacagagaaauagcca

SEQ ID NO: 839950 - RNA, 22 nt, Human
uagccucuggaauccuuucucu

SEQ ID NO: 839951 - RNA, 22 nt, Human
agugugaccuuauuuggaaaca

SEQ ID NO: 839952 - RNA, 22 nt, Human
gggcagcugccaagugcaucgc

SEQ ID NO: 839953 - RNA, 22 nt, Human
auuaugcugguuuacacauuuu

SEQ ID NO: 839954 - RNA, 22 nt, Human
gcucucuugguggcuguccugg

SEQ ID NO: 839955 - RNA, 22 nt, Human
augaaacaguguguauagcaaa

SEQ ID NO: 839956 - RNA, 22 nt, Human
aauugcaacagguagacuuuuc

SEQ ID NO: 839957 - RNA, 22 nt, Human
ucuagaaaaaaacugcugugga

SEQ ID NO: 839958 - RNA, 20 nt, Human
auaauuuacccugcaccacu

SEQ ID NO: 839959 - RNA, 22 nt, Human
ccaggagcaacuugaaggcaag

SEQ ID NO: 839960 - RNA, 22 nt, Human
cacaagagagugcgcguugcaa

SEQ ID NO: 839961 - RNA, 22 nt, Human
aagccagauagaagaacucauu

SEQ ID NO: 839962 - RNA, 16 nt, Human
ccccaggacuuggcac

SEQ ID NO: 839963 - RNA, 22 nt, Human
cgccaggcuugguagcucaugc

SEQ ID NO: 839964 - RNA, 22 nt, Human
uucuuguaauuuggagaaauga

SEQ ID NO: 839965 - RNA, 22 nt, Human
cucuguccuugcacaguuccua

SEQ ID NO: 839966 - RNA, 22 nt, Human
gggauggggucaacauguaccu

SEQ ID NO: 839967 - RNA, 21 nt, Human
cagaggccucaugcucugugc

SEQ ID NO: 839968 - RNA, 20 nt, Human
aguaccuuuuguauguuacc

SEQ ID NO: 839969 - RNA, 22 nt, Human
agagagggcauagaaaaaggga

SEQ ID NO: 839970 - RNA, 22 nt, Human
ccagggcuggguuugucggugu

SEQ ID NO: 839971 - RNA, 22 nt, Human
aguccuucaagaaaucuggaaa

SEQ ID NO: 839972 - RNA, 22 nt, Human
gggccugggaacuugcauuuag

SEQ ID NO: 839973 - RNA, 22 nt, Human
caggggcugagaaggaacgucc

SEQ ID NO: 839974 - RNA, 22 nt, Human
gagaaguuucugguuugcauag

SEQ ID NO: 839975 - RNA, 22 nt, Human
cacaugaagagagucuaguaau

SEQ ID NO: 839976 - RNA, 22 nt, Human
caaauucucuuacuguuugaca

SEQ ID NO: 839977 - RNA, 22 nt, Human
gcugauccuuuuaugucuagcu

SEQ ID NO: 839978 - RNA, 22 nt, Human
gaggccaggaagcccaagauca

SEQ ID NO: 839979 - RNA, 22 nt, Human
uagaaacagcauauauuagccc

SEQ ID NO: 839980 - RNA, 22 nt, Human
ugcuagaauaccuaccuggagg

SEQ ID NO: 839981 - RNA, 22 nt, Human
ugugcagcuaguccuggacuug

SEQ ID NO: 839982 - RNA, 22 nt, Human
acaacaaagacacuugaaauga

SEQ ID NO: 839983 - RNA, 22 nt, Human
ucuguucaguugauguaguuuu

SEQ ID NO: 839984 - RNA, 18 nt, Human
ugacucacccugucagug

SEQ ID NO: 839985 - RNA, 22 nt, Human
aauuuggcagugucuugaagua

SEQ ID NO: 839986 - RNA, 20 nt, Human
ucuaauuaaaauugucuagu

SEQ ID NO: 839987 - RNA, 22 nt, Human
cugaggaagacagcagcugugu

SEQ ID NO: 839988 - RNA, 22 nt, Human
agucccagccuguaggauuggg

SEQ ID NO: 839989 - RNA, 22 nt, Human
acagcuggcaggggggcaugaa

SEQ ID NO: 839990 - RNA, 22 nt, Human
uaugcacacaucgcagcaggaa

SEQ ID NO: 839991 - RNA, 21 nt, Human
ccagagccugcugagcccccu

SEQ ID NO: 839992 - RNA, 22 nt, Human
ccugugucuuccccacuggugu

SEQ ID NO: 839993 - RNA, 22 nt, Human
gagggugguggcuuaaggugcu

SEQ ID NO: 839994 - RNA, 22 nt, Human
gcacugaaugcuuuuacuguaa

SEQ ID NO: 839995 - RNA, 22 nt, Human
cacagggcagugcugcccacuc

SEQ ID NO: 839996 - RNA, 22 nt, Human
cagagccaacgccaccugccca

SEQ ID NO: 839997 - RNA, 22 nt, Human
uagagcaguuggcagcuguauu

SEQ ID NO: 839998 - RNA, 18 nt, Human
cuuguucuucucuuggcg

SEQ ID NO: 839999 - RNA, 22 nt, Human
gaaugugugacucuauugagca

SEQ ID NO: 840000 - RNA, 22 nt, Human
ucccuggagauaacuucuggga

SEQ ID NO: 840001 - RNA, 22 nt, Human
cauuuagagucuugcaauuuua

SEQ ID NO: 840002 - RNA, 22 nt, Human
acagcauugcuccaucucaaga

SEQ ID NO: 840003 - RNA, 22 nt, Human
cauugcuuccuaugucccuucu

SEQ ID NO: 840004 - RNA, 22 nt, Human
uggagcugagaaguggagcucu

SEQ ID NO: 840005 - RNA, 22 nt, Human
ggugaggggagagugaaagaaa

SEQ ID NO: 840006 - RNA, 22 nt, Human
augauguugauaaauuacuuua

SEQ ID NO: 840007 - RNA, 22 nt, Human
caggcagaagaaguggaaggac

SEQ ID NO: 840008 - RNA, 22 nt, Human
uagaaacauguucuguucuguu

SEQ ID NO: 840009 - RNA, 22 nt, Human
cuggccgguauuugccucuggg

SEQ ID NO: 840010 - RNA, 22 nt, Human
acagaauucucucugcagaggc

SEQ ID NO: 840011 - RNA, 22 nt, Human
aaguguauauaugacuuauaaa

SEQ ID NO: 840012 - RNA, 17 nt, Human
ggcagcugccacuuuuu

SEQ ID NO: 840013 - RNA, 22 nt, Human
uuucacaucagagguagauuag

SEQ ID NO: 840014 - RNA, 22 nt, Human
ucagaagacuacuaggacacau

SEQ ID NO: 840015 - RNA, 22 nt, Human
gauuucaaaaguagauccauca

SEQ ID NO: 840016 - RNA, 22 nt, Human
gagcugggacauggguccucuc

SEQ ID NO: 840017 - RNA, 21 nt, Human
cagagcagcguucugcugugg

SEQ ID NO: 840018 - RNA, 22 nt, Human
cuggcuggccggaggcaucccu

SEQ ID NO: 840019 - RNA, 22 nt, Human
agccaagcaccacuggcacucg

SEQ ID NO: 840020 - RNA, 20 nt, Human
cagggccacgcuccaaggca

SEQ ID NO: 840021 - RNA, 22 nt, Human
gaugccugcauuucaggagagu

SEQ ID NO: 840022 - RNA, 22 nt, Human
gcugugcuauaucucugagugu

SEQ ID NO: 840023 - RNA, 21 nt, Human
agagaagggacucuuccaguc

SEQ ID NO: 840024 - RNA, 22 nt, Human
ccccaggagcuuguuuuagaga

SEQ ID NO: 840025 - RNA, 22 nt, Human
cuacagaagaaacuaucacuau

SEQ ID NO: 840026 - RNA, 22 nt, Human
aggcccagggcugcucucugaa

SEQ ID NO: 840027 - RNA, 22 nt, Human
gcagggcagaccuccagccuau

SEQ ID NO: 840028 - RNA, 22 nt, Human
uccugucagugaggcagaugaa

SEQ ID NO: 840029 - RNA, 22 nt, Human
cagggccugccugguuccugga

SEQ ID NO: 840030 - RNA, 22 nt, Human
auacauguaacugcauuguaau

SEQ ID NO: 840031 - RNA, 22 nt, Human
gcucccucugcucaggcacuug

SEQ ID NO: 840032 - RNA, 22 nt, Human
uguagcucuccagccagcaagg

SEQ ID NO: 840033 - RNA, 22 nt, Human
aucauuuuuaagagacucuucu

SEQ ID NO: 840034 - RNA, 22 nt, Human
gcaagcugcuuaagcucauugu

SEQ ID NO: 840035 - RNA, 22 nt, Human
aaaaaugaauucuucaguggca

SEQ ID NO: 840036 - RNA, 22 nt, Human
agcaggcuaagggaccuguuua

SEQ ID NO: 840037 - RNA, 22 nt, Human
cagaaaauaaaguuucuacgca

SEQ ID NO: 840038 - RNA, 22 nt, Human
uacaggaggauuaucaaaggau

SEQ ID NO: 840039 - RNA, 18 nt, Human
aggcacagagcauacaua

SEQ ID NO: 840040 - RNA, 22 nt, Human
gcagagccugggggucugcgga

SEQ ID NO: 840041 - RNA, 22 nt, Human
gccaagagaaugugagagaaau

SEQ ID NO: 840042 - RNA, 20 nt, Human
uccaugaguuagagacuaua

SEQ ID NO: 840043 - RNA, 22 nt, Human
uauuuccugcauggugauguaa

SEQ ID NO: 840044 - RNA, 22 nt, Human
gcagcuuuuuggaugucaguua

SEQ ID NO: 840045 - RNA, 22 nt, Human
guaagcaucugucucuucugca

SEQ ID NO: 840046 - RNA, 22 nt, Human
cacugcaggucugagauggggg

SEQ ID NO: 840047 - RNA, 22 nt, Human
uuucaacuuguuugcuuccaua

SEQ ID NO: 840048 - RNA, 22 nt, Human
ucugucaucucuaaaauagaaa

SEQ ID NO: 840049 - RNA, 22 nt, Human
gagacagcagggccagggccug

SEQ ID NO: 840050 - RNA, 22 nt, Human
aauaacuuuuaaaagacccugg

SEQ ID NO: 840051 - RNA, 22 nt, Human
ucagagugaggcgucaacauga

SEQ ID NO: 840052 - RNA, 22 nt, Human
aggauccuguauggagaagcug

SEQ ID NO: 840053 - RNA, 22 nt, Human
aucuaacacuguaaacugucuu

SEQ ID NO: 840054 - RNA, 22 nt, Human
uggccugaggcucggcaugggu

SEQ ID NO: 840055 - RNA, 22 nt, Human
cuggcucucugagauauugagu

SEQ ID NO: 840056 - RNA, 22 nt, Human
ucacauuucugauuauaccaaa

SEQ ID NO: 840057 - RNA, 22 nt, Human
ccaggcugcucacaagcugccc

SEQ ID NO: 840058 - RNA, 22 nt, Human
ucagugcagaauagugaugcau

SEQ ID NO: 840059 - RNA, 22 nt, Human
aguccuuacucgggggcccaga

SEQ ID NO: 840060 - RNA, 22 nt, Human
caguacuuaacuuauaggagag

SEQ ID NO: 840061 - RNA, 19 nt, Human
cccaggaggcggagguugc

SEQ ID NO: 840062 - RNA, 22 nt, Human
gcaggcugaugacuggaguugg

SEQ ID NO: 840063 - RNA, 22 nt, Human
gacccaggcucgugggacggcu

SEQ ID NO: 840064 - RNA, 22 nt, Human
cuugaaguugcaaaacauuaau

SEQ ID NO: 840065 - RNA, 22 nt, Human
ucuuuggaucccaacuggcugg

SEQ ID NO: 840066 - RNA, 19 nt, Human
ucccuuccugucgggcucc

SEQ ID NO: 840067 - RNA, 18 nt, Human
gggcccuggcguccgccc

SEQ ID NO: 840068 - RNA, 22 nt, Human
ccuucagaccuagacaggaauc

SEQ ID NO: 840069 - RNA, 22 nt, Human
cuggugcuggagccuagucccu

SEQ ID NO: 840070 - RNA, 22 nt, Human
aaagauuauggcauugaaauac

SEQ ID NO: 840071 - RNA, 22 nt, Human
cuugaaagcuuugcgucuucua

SEQ ID NO: 840072 - RNA, 22 nt, Human
uuacagaagagaaagaauucag

SEQ ID NO: 840073 - RNA, 22 nt, Human
gcacagggcugccaggcggcuu

SEQ ID NO: 840074 - RNA, 22 nt, Human
gaagagcuaaaggcacaggcuu

SEQ ID NO: 840075 - RNA, 18 nt, Human
gggaucaggcugccuagg

SEQ ID NO: 840076 - RNA, 22 nt, Human
agagcagagggcucugggacaa

SEQ ID NO: 840077 - RNA, 22 nt, Human
uaugaacuguacuguacuaagc

SEQ ID NO: 840078 - RNA, 22 nt, Human
ucucaagagggaggcaaucaug

SEQ ID NO: 840079 - RNA, 22 nt, Human
gcugggagccguaccugucacg

SEQ ID NO: 840080 - RNA, 22 nt, Human
caggcugaggcaguaggguuug

SEQ ID NO: 840081 - RNA, 22 nt, Human
cuuaggcaaccaggucaaugcu

SEQ ID NO: 840082 - RNA, 22 nt, Human
cucauggauauaagaacuguuu

SEQ ID NO: 840083 - RNA, 22 nt, Human
uuuaaugauagcuguuucacau

SEQ ID NO: 840084 - RNA, 22 nt, Human
cccuggcaugcaugucccuggc

SEQ ID NO: 840085 - RNA, 21 nt, Human
uggcucuguucaauauaugga

SEQ ID NO: 840086 - RNA, 22 nt, Human
auguagaacagguuaaugacag

SEQ ID NO: 840087 - RNA, 20 nt, Human
caggagggacauuucagcau

SEQ ID NO: 840088 - RNA, 22 nt, Human
guucccauacaguaucagugcu

SEQ ID NO: 840089 - RNA, 22 nt, Human
ccagggcagggaccacgugucu

SEQ ID NO: 840090 - RNA, 22 nt, Human
gguggccaggccagcucuggcc

SEQ ID NO: 840091 - RNA, 18 nt, Human
gugagcagagagcaucac

SEQ ID NO: 840092 - RNA, 22 nt, Human
uuuaacacuaguuucuuuaacu

SEQ ID NO: 840093 - RNA, 22 nt, Human
auuugaagucuucaugauuucu

SEQ ID NO: 840094 - RNA, 22 nt, Human
cucuggagugcagccugguggc

SEQ ID NO: 840095 - RNA, 22 nt, Human
agccucugugacucacagguca

SEQ ID NO: 840096 - RNA, 17 nt, Human
aggugcuggagcaucag

SEQ ID NO: 840097 - RNA, 22 nt, Human
caggcagcagaggaguguggga

SEQ ID NO: 840098 - RNA, 22 nt, Human
acugggaggcaaagagcaagga

SEQ ID NO: 840099 - RNA, 22 nt, Human
ucuucaaguuccaaagugcagg

SEQ ID NO: 840100 - RNA, 22 nt, Human
ucaagcaggguagcaagcuggu

SEQ ID NO: 840101 - RNA, 22 nt, Human
ucacauacacuaggauauuuuu

SEQ ID NO: 840102 - RNA, 22 nt, Human
ggaggccaaggcaggcggauca

SEQ ID NO: 840103 - RNA, 22 nt, Human
ucuaaacagccucuuaccaacu

SEQ ID NO: 840104 - RNA, 22 nt, Human
caggagcagaggguggucagca

SEQ ID NO: 840105 - RNA, 22 nt, Human
ccugagcugaacuaagcaguuu

SEQ ID NO: 840106 - RNA, 22 nt, Human
agggagacacaugaggaaguca

SEQ ID NO: 840107 - RNA, 22 nt, Human
aagggaaaucauauggugcagu

SEQ ID NO: 840108 - RNA, 22 nt, Human
ccagcccugaacccugcugcau

SEQ ID NO: 840109 - RNA, 22 nt, Human
aaagguuaagguguucaagaaa

SEQ ID NO: 840110 - RNA, 22 nt, Human
gucaccagugcuaagaggugga

SEQ ID NO: 840111 - RNA, 22 nt, Human
ccaaaguccauaguuuacuuua

SEQ ID NO: 840112 - RNA, 22 nt, Human
uaagaacauuuucggaaagaua

SEQ ID NO: 840113 - RNA, 22 nt, Human
gggauggggagcuggaaagggg

SEQ ID NO: 840114 - RNA, 22 nt, Human
aaaucaguucucccuuucuuca

SEQ ID NO: 840115 - RNA, 22 nt, Human
agggaagaagcugguaguaggu

SEQ ID NO: 840116 - RNA, 22 nt, Human
cauaccuuucucaagcacaugu

SEQ ID NO: 840117 - RNA, 22 nt, Human
cauuauguucaguagcuuaaaa

SEQ ID NO: 840118 - RNA, 21 nt, Human
ccuggcagaagccugauaugc

SEQ ID NO: 840119 - RNA, 21 nt, Human
gcagccagacgggauucaguu

SEQ ID NO: 840120 - RNA, 20 nt, Human
gccuggcacccggggcuggc

SEQ ID NO: 840121 - RNA, 22 nt, Human
gugccugugccaggggugugcu

SEQ ID NO: 840122 - RNA, 22 nt, Human
ccagccaggcuggcuguggagg

SEQ ID NO: 840123 - RNA, 22 nt, Human
uauuuaauuagugauuguagag

SEQ ID NO: 840124 - RNA, 22 nt, Human
uccucuucugcccaucagaggc

SEQ ID NO: 840125 - RNA, 22 nt, Human
gccugcuggauguggccaggcc

SEQ ID NO: 840126 - RNA, 20 nt, Human
aagggcagagggaacagacu

SEQ ID NO: 840127 - RNA, 19 nt, Human
uguggccaugguucagcug

SEQ ID NO: 840128 - RNA, 22 nt, Human
cagugggaagggcagaggcuuu

SEQ ID NO: 840129 - RNA, 22 nt, Human
ccugccugucccucaguccaca

SEQ ID NO: 840130 - RNA, 22 nt, Human
cucuuucaguucugauagucuc

SEQ ID NO: 840131 - RNA, 22 nt, Human
aaauuagucgguuuaggaauuu

SEQ ID NO: 840132 - RNA, 22 nt, Human
ucugucuccugccagugccucu

SEQ ID NO: 840133 - RNA, 22 nt, Human
ucuggccauggcaagccgagug

SEQ ID NO: 840134 - RNA, 22 nt, Human
gcaaagcauucuguggagucua

SEQ ID NO: 840135 - RNA, 22 nt, Human
gcccagaguucaaggcugcagu

SEQ ID NO: 840136 - RNA, 22 nt, Human
cuuccucugcggcgccgggcgc

SEQ ID NO: 840137 - RNA, 22 nt, Human
cugggcagugguggcaucuuug

SEQ ID NO: 840138 - RNA, 22 nt, Human
gcauuccuacaggcugcuauga

SEQ ID NO: 840139 - RNA, 22 nt, Human
uaacagaaaagaacugaguuug

SEQ ID NO: 840140 - RNA, 22 nt, Human
gauccuugcacuugacuuggca

SEQ ID NO: 840141 - RNA, 22 nt, Human
ucaggaucggccuuuuuuuaag

SEQ ID NO: 840142 - RNA, 22 nt, Human
ugccugggaaccaauccuggcu

SEQ ID NO: 840143 - RNA, 22 nt, Human
guauuugauagauuucaaagga

SEQ ID NO: 840144 - RNA, 17 nt, Human
agaaagaggauccacag

SEQ ID NO: 840145 - RNA, 22 nt, Human
ucagcugaaguggagaagcaga

SEQ ID NO: 840146 - RNA, 22 nt, Human
acaaaggugcgucccuucagcu

SEQ ID NO: 840147 - RNA, 22 nt, Human
aaaugaaaugagugccuggagg

SEQ ID NO: 840148 - RNA, 22 nt, Human
gcuucacacuaaaaauguuaaa

SEQ ID NO: 840149 - RNA, 22 nt, Human
acagguggaggcuuuaggaggu

SEQ ID NO: 840150 - RNA, 22 nt, Human
ugacuuccugcacucaggugau

SEQ ID NO: 840151 - RNA, 22 nt, Human
uaaugucagcauaguuuauuuu

SEQ ID NO: 840152 - RNA, 22 nt, Human
ggucccaggcucccucuugucc

SEQ ID NO: 840153 - RNA, 22 nt, Human
gcagaggagcaaguugcuacag

SEQ ID NO: 840154 - RNA, 20 nt, Human
aggcagcugggaaaugaggg

SEQ ID NO: 840155 - RNA, 18 nt, Human
agugugugcccuuucagg

SEQ ID NO: 840156 - RNA, 22 nt, Human
uacaaaguuugagaaugcuuuc

SEQ ID NO: 840157 - RNA, 22 nt, Human
aaguuauugcagcaauccaagu

SEQ ID NO: 840158 - RNA, 22 nt, Human
aauucucagguaaaaguuaagu

SEQ ID NO: 840159 - RNA, 18 nt, Human
aagucaccccugcucccu

SEQ ID NO: 840160 - RNA, 22 nt, Human
ugcuaucucuauauccauuuau

SEQ ID NO: 840161 - RNA, 21 nt, Human
ucagcagcuuuugcagucccu

SEQ ID NO: 840162 - RNA, 22 nt, Human
auguacaaaaugccacugaauu

SEQ ID NO: 840163 - RNA, 22 nt, Human
gcccauggcagaacugugagca

SEQ ID NO: 840164 - RNA, 22 nt, Human
auguuacauaguccuuauuugu

SEQ ID NO: 840165 - RNA, 22 nt, Human
ucuucuuaugugccauuaucuc

SEQ ID NO: 840166 - RNA, 22 nt, Human
gaauuacaugacccugaguaga

SEQ ID NO: 840167 - RNA, 17 nt, Human
ggugaguguccaggugg

SEQ ID NO: 840168 - RNA, 22 nt, Human
uuaugggagcaauuggggaggu

SEQ ID NO: 840169 - RNA, 22 nt, Human
uggcucagaggggaagugguuu

SEQ ID NO: 840170 - RNA, 22 nt, Human
gcaucuaauccaguccagcauc

SEQ ID NO: 840171 - RNA, 22 nt, Human
uggguuuaaacucaacucuaaa

SEQ ID NO: 840172 - RNA, 22 nt, Human
ugaguuuugucuugcuagaagu

SEQ ID NO: 840173 - RNA, 22 nt, Human
gacauuucaaucucauuauggg

SEQ ID NO: 840174 - RNA, 21 nt, Human
gcugucucuggcuccugggaa

SEQ ID NO: 840175 - RNA, 23 nt, Human
ugggggugcacgggccacaucuu

SEQ ID NO: 840176 - RNA, 22 nt, Human
ccuggaucagucacuguugcug

SEQ ID NO: 840177 - RNA, 22 nt, Human
gugucaugcacacucaguguug

SEQ ID NO: 840178 - RNA, 21 nt, Human
ccaagacucccaucuaguggu

SEQ ID NO: 840179 - RNA, 22 nt, Human
auugacaagacaauggcucuua

SEQ ID NO: 840180 - RNA, 22 nt, Human
uuguacaaauaggaaccucuga

SEQ ID NO: 840181 - RNA, 22 nt, Human
uaaguuuaaauguacaugaagc

SEQ ID NO: 840182 - RNA, 22 nt, Human
guacuuccagccaagugagaca

SEQ ID NO: 840183 - RNA, 22 nt, Human
aaggacuccaauucuuucaucu

SEQ ID NO: 840184 - RNA, 22 nt, Human
ucucucagucagaugcuaaaga

SEQ ID NO: 840185 - RNA, 22 nt, Human
acccaggauagagugcugcagu

SEQ ID NO: 840186 - RNA, 22 nt, Human
aaaguuugcaauuuauguuaau

SEQ ID NO: 840187 - RNA, 22 nt, Human
augaaaacuuuagccucauuag

SEQ ID NO: 840188 - RNA, 22 nt, Human
uaauuccaccuuuuuccaacuu

SEQ ID NO: 840189 - RNA, 22 nt, Human
gcuggcuguuggagguaccugc

SEQ ID NO: 840190 - RNA, 22 nt, Human
ucuggagcuuguuucagauggu

SEQ ID NO: 840191 - RNA, 22 nt, Human
ugaggcagugcugggaagccug

SEQ ID NO: 840192 - RNA, 20 nt, Human
gcuguucacauuauuaguag

SEQ ID NO: 840193 - RNA, 22 nt, Human
cugcccugcuugaugacagcga

SEQ ID NO: 840194 - RNA, 22 nt, Human
uggcuucugggacuugugagca

SEQ ID NO: 840195 - RNA, 22 nt, Human
gugcagugaaaaaagaaugucc

SEQ ID NO: 840196 - RNA, 19 nt, Human
uccuccuuacuuccucuug

SEQ ID NO: 840197 - RNA, 22 nt, Human
aggcagcuuucuggugcaccau

SEQ ID NO: 840198 - RNA, 22 nt, Human
cagagcuguugcggggcuuggc

SEQ ID NO: 840199 - RNA, 22 nt, Human
auuucaguguuuuaagaguuca

SEQ ID NO: 840200 - RNA, 19 nt, Human
ucucagagcccuagaggcc

SEQ ID NO: 840201 - RNA, 22 nt, Human
auguaugauauuuccaguauca

SEQ ID NO: 840202 - RNA, 19 nt, Human
gcuucccaccagccagccc

SEQ ID NO: 840203 - RNA, 22 nt, Human
ggauuugaauuguugaaaugau

SEQ ID NO: 840204 - RNA, 22 nt, Human
ucuggcucagggcucugaggga

SEQ ID NO: 840205 - RNA, 22 nt, Human
guccugggccugcugaggcuga

SEQ ID NO: 840206 - RNA, 22 nt, Human
gccagcagguugucaaggagcu

SEQ ID NO: 840207 - RNA, 22 nt, Human
uguguauuaccauuuuacagcu

SEQ ID NO: 840208 - RNA, 22 nt, Human
aacaaauguguuuuguaauuaa

SEQ ID NO: 840209 - RNA, 22 nt, Human
ggcuggaaguccaagaucaaga

SEQ ID NO: 840210 - RNA, 21 nt, Human
gcucucugcaugguggcucag

SEQ ID NO: 840211 - RNA, 22 nt, Human
cagagcagggugcaccuugggc

SEQ ID NO: 840212 - RNA, 22 nt, Human
acagccugagaguggagcuggc

SEQ ID NO: 840213 - RNA, 22 nt, Human
uuucaaguguccugauuaaugg

SEQ ID NO: 840214 - RNA, 22 nt, Human
gcuggcucagggacuagaguuu

SEQ ID NO: 840215 - RNA, 22 nt, Human
ugcauuauaacugaauguuguu

SEQ ID NO: 840216 - RNA, 22 nt, Human
aauuccaaguagcaucccauca

SEQ ID NO: 840217 - RNA, 19 nt, Human
accaggagacagugagcuu

SEQ ID NO: 840218 - RNA, 22 nt, Human
ccaccuccaccuauugccagcc

SEQ ID NO: 840219 - RNA, 18 nt, Human
agaguguucucagugaaa

SEQ ID NO: 840220 - RNA, 22 nt, Human
cagcaguguggaagcugagggg

SEQ ID NO: 840221 - RNA, 22 nt, Human
ccuguggcugccacuuggguga

SEQ ID NO: 840222 - RNA, 22 nt, Human
gcucuguccagcgugcacagaa

SEQ ID NO: 840223 - RNA, 22 nt, Human
aucuggcugcugugcuuaagcu

SEQ ID NO: 840224 - RNA, 22 nt, Human
cagcauuuucuuaauguaggug

SEQ ID NO: 840225 - RNA, 20 nt, Human
ccucucugaagaggucaucu

SEQ ID NO: 840226 - RNA, 22 nt, Human
ucaaggaggugcuuggcuucac

SEQ ID NO: 840227 - RNA, 22 nt, Human
uuagcucagaaaauuuaaacuu

SEQ ID NO: 840228 - RNA, 22 nt, Human
gguaugaaaugauuccauguua

SEQ ID NO: 840229 - RNA, 22 nt, Human
uugaauaauguguauguuguua

SEQ ID NO: 840230 - RNA, 22 nt, Human
gccuucaggaaaucaguccuug

SEQ ID NO: 840231 - RNA, 22 nt, Human
ggugcccaccugucuuccugga

SEQ ID NO: 840232 - RNA, 19 nt, Human
uagucuuuauucuuaauuu

SEQ ID NO: 840233 - RNA, 22 nt, Human
ucucuggggauggaccugggag

SEQ ID NO: 840234 - RNA, 22 nt, Human
gagcccagguucugcuuccagc

SEQ ID NO: 840235 - RNA, 22 nt, Human
gccaggagugucccacucauuu

SEQ ID NO: 840236 - RNA, 22 nt, Human
caccaucagcagcaggugucaa

SEQ ID NO: 840237 - RNA, 22 nt, Human
gucccuggaauggacucugcgc

SEQ ID NO: 840238 - RNA, 22 nt, Human
cugggacuuuacccuguggccc

SEQ ID NO: 840239 - RNA, 22 nt, Human
ucugagccaauuucugugucca

SEQ ID NO: 840240 - RNA, 22 nt, Human
aaaaaguuucaacugccaacuc

SEQ ID NO: 840241 - RNA, 22 nt, Human
cuugcugugugguguucucaga

SEQ ID NO: 840242 - RNA, 22 nt, Human
aaacugaauucccaagggcaug

SEQ ID NO: 840243 - RNA, 22 nt, Human
agaaaucaugucuuauuucuau

SEQ ID NO: 840244 - RNA, 19 nt, Human
ggaggccuggguauuugcc

SEQ ID NO: 840245 - RNA, 22 nt, Human
uugaagaaagucauauauaaug

SEQ ID NO: 840246 - RNA, 22 nt, Human
gcccagaaguugaggcugcagu

SEQ ID NO: 840247 - RNA, 22 nt, Human
ggaagagccuggggugucaggc

SEQ ID NO: 840248 - RNA, 22 nt, Human
cagcagugaugugugaggguuc

SEQ ID NO: 840249 - RNA, 22 nt, Human
ccucacucugcacccugcagca

SEQ ID NO: 840250 - RNA, 22 nt, Human
agagcccucucauuggcuuauu

SEQ ID NO: 840251 - RNA, 22 nt, Human
ugcaggugugguuccucagcca

SEQ ID NO: 840252 - RNA, 22 nt, Human
gcacccagccagcaucucagag

SEQ ID NO: 840253 - RNA, 22 nt, Human
uggcuccuaggauggugccugg

SEQ ID NO: 840254 - RNA, 22 nt, Human
cugcucuguuucuuagcugggu

SEQ ID NO: 840255 - RNA, 22 nt, Human
uggcucagagagggagugugga

SEQ ID NO: 840256 - RNA, 22 nt, Human
agccacagagguugaugugguu

SEQ ID NO: 840257 - RNA, 22 nt, Human
gcuugcucaacccccgucucuc

SEQ ID NO: 840258 - RNA, 22 nt, Human
agcccagcagaaaguccagccu

SEQ ID NO: 840259 - RNA, 22 nt, Human
uccaugagggacacuggaugcu

SEQ ID NO: 840260 - RNA, 22 nt, Human
uaagaacaguagaacaguaggu

SEQ ID NO: 840261 - RNA, 22 nt, Human
aaagcagacugauuugcaucac

SEQ ID NO: 840262 - RNA, 22 nt, Human
cccagcucaucaggagccgccc

SEQ ID NO: 840263 - RNA, 22 nt, Human
aaugaugguuaaacacuggagg

SEQ ID NO: 840264 - RNA, 22 nt, Human
aauaguguuguucacucaggag

SEQ ID NO: 840265 - RNA, 22 nt, Human
ccuggcugggccugauuucuca

SEQ ID NO: 840266 - RNA, 22 nt, Human
gccaggcugaggcucuggaaga

SEQ ID NO: 840267 - RNA, 22 nt, Human
ggaggaugccaagcugugcaca

SEQ ID NO: 840268 - RNA, 22 nt, Human
gccuggagggucccucucugga

SEQ ID NO: 840269 - RNA, 22 nt, Human
acucagaguuugcguuccauac

SEQ ID NO: 840270 - RNA, 22 nt, Human
augcuuuuccaggagaaauaua

SEQ ID NO: 840271 - RNA, 22 nt, Human
uucacaggauauaugugcaggg

SEQ ID NO: 840272 - RNA, 22 nt, Human
aagaauuauugcaauacuagau

SEQ ID NO: 840273 - RNA, 22 nt, Human
gaaaucugaacaacagcuguca

SEQ ID NO: 840274 - RNA, 22 nt, Human
auaaggcagugacuucaucuau

SEQ ID NO: 840275 - RNA, 22 nt, Human
ccugggcagguguggcuucccc

SEQ ID NO: 840276 - RNA, 21 nt, Human
acagacagggccagugucccc

SEQ ID NO: 840277 - RNA, 22 nt, Human
aucuggcucaccuggguaaaua

SEQ ID NO: 840278 - RNA, 22 nt, Human
aaaugucuuuaucucauguaac

SEQ ID NO: 840279 - RNA, 22 nt, Human
gccaggagaaaaggcgaaugau

SEQ ID NO: 840280 - RNA, 20 nt, Human
cuguccccgaggucaccagg

SEQ ID NO: 840281 - RNA, 23 nt, Human
guggccuccccggaaugccucgc

SEQ ID NO: 840282 - RNA, 22 nt, Human
ugaaaucugucccacuuuagcu

SEQ ID NO: 840283 - RNA, 19 nt, Human
auaaggcaauuggauuugg

SEQ ID NO: 840284 - RNA, 16 nt, Human
agcagggcgggaagga

SEQ ID NO: 840285 - RNA, 22 nt, Human
cugcucuggggaagccagaugu

SEQ ID NO: 840286 - RNA, 22 nt, Human
ggcagcaguaggagcuaaucuu

SEQ ID NO: 840287 - RNA, 22 nt, Human
aagacugugucuauggcuacuc

SEQ ID NO: 840288 - RNA, 22 nt, Human
uaagauaugguaggaaguuugg

SEQ ID NO: 840289 - RNA, 22 nt, Human
aguaggaggcgggagcaugaag

SEQ ID NO: 840290 - RNA, 22 nt, Human
ccugcaggggagagacuucuag

SEQ ID NO: 840291 - RNA, 22 nt, Human
aguguugucaaacggcucagca

SEQ ID NO: 840292 - RNA, 22 nt, Human
gcucccagaaccaaggcugggg

SEQ ID NO: 840293 - RNA, 22 nt, Human
caguccuuaaggaaacauuugu

SEQ ID NO: 840294 - RNA, 21 nt, Human
cgggcuggccgggcccucacc

SEQ ID NO: 840295 - RNA, 22 nt, Human
gaggcagcuggguccggucggg

SEQ ID NO: 840296 - RNA, 22 nt, Human
gcucaggacuggaggagcgggg

SEQ ID NO: 840297 - RNA, 16 nt, Human
ccuuucucugccuucc

SEQ ID NO: 840298 - RNA, 22 nt, Human
aaggagucucagcugggccuga

SEQ ID NO: 840299 - RNA, 22 nt, Human
ccuguucaccauggucacgugc

SEQ ID NO: 840300 - RNA, 22 nt, Human
aucucagggcuggagcccugga

SEQ ID NO: 840301 - RNA, 20 nt, Human
acuguucaagggccuggugg

SEQ ID NO: 840302 - RNA, 22 nt, Human
uggcuuaagauuuaugcuuuua

SEQ ID NO: 840303 - RNA, 22 nt, Human
cccugccuugggguccacaccg

SEQ ID NO: 840304 - RNA, 22 nt, Human
auaauaaaccaggaugggucug

SEQ ID NO: 840305 - RNA, 22 nt, Human
ggagccugggcauuaguaauuu

SEQ ID NO: 840306 - RNA, 20 nt, Human
caguagcaauaauuagaagc

SEQ ID NO: 840307 - RNA, 22 nt, Human
cagggcagggagcuuagaauga

SEQ ID NO: 840308 - RNA, 22 nt, Human
uggggagugaugccucggauaa

SEQ ID NO: 840309 - RNA, 22 nt, Human
agaaaugggccuugggacacaa

SEQ ID NO: 840310 - RNA, 22 nt, Human
ucacguuuuacugagugagaua

SEQ ID NO: 840311 - RNA, 19 nt, Human
ggcagaagguguaggggga

SEQ ID NO: 840312 - RNA, 22 nt, Human
aacuucuugguccugagcuguu

SEQ ID NO: 840313 - RNA, 22 nt, Human
agugaccauuuucagcuagagg

SEQ ID NO: 840314 - RNA, 22 nt, Human
cugagagccuccuguuggcuag

SEQ ID NO: 840315 - RNA, 22 nt, Human
ugccaggcccugugcuggaugc

SEQ ID NO: 840316 - RNA, 22 nt, Human
uggcugggagcuggaacugggc

SEQ ID NO: 840317 - RNA, 22 nt, Human
cauacauuuugcauauuuacca

SEQ ID NO: 840318 - RNA, 22 nt, Human
ugaaacuucuaauaugaauagu

SEQ ID NO: 840319 - RNA, 22 nt, Human
aaauaauguuaggccuuugcuc

SEQ ID NO: 840320 - RNA, 22 nt, Human
agagcugagaauguggcuuccu

SEQ ID NO: 840321 - RNA, 22 nt, Human
ugucccagacacaguaugcgcu

SEQ ID NO: 840322 - RNA, 22 nt, Human
agaggggaguccuaaucugauu

SEQ ID NO: 840323 - RNA, 22 nt, Human
ugggcagauuaaugcaguggcu

SEQ ID NO: 840324 - RNA, 22 nt, Human
uggacucagaaguguucuuuua

SEQ ID NO: 840325 - RNA, 22 nt, Human
accugaggccuccccagcagac

SEQ ID NO: 840326 - RNA, 22 nt, Human
acuggcucagaguuccuagaga

SEQ ID NO: 840327 - RNA, 21 nt, Human
agaagccuggguggagguggg

SEQ ID NO: 840328 - RNA, 22 nt, Human
cucuuuccaggguaccccaggu

SEQ ID NO: 840329 - RNA, 22 nt, Human
aguggcaguagaugagcugguu

SEQ ID NO: 840330 - RNA, 22 nt, Human
uccagccaccaccuugauugcc

SEQ ID NO: 840331 - RNA, 22 nt, Human
ucaucaaagucaaagaaugacu

SEQ ID NO: 840332 - RNA, 22 nt, Human
ccauaagguuuggggccaugca

SEQ ID NO: 840333 - RNA, 22 nt, Human
ugugucccuuggaaccucagcu

SEQ ID NO: 840334 - RNA, 22 nt, Human
auccaaaccuggacaugagugg

SEQ ID NO: 840335 - RNA, 22 nt, Human
aaguauuucuggccugugaaag

SEQ ID NO: 840336 - RNA, 23 nt, Human
ucaguuuuggcuguucaguguug

SEQ ID NO: 840337 - RNA, 22 nt, Human
uccaggaggacugagggggcug

SEQ ID NO: 840338 - RNA, 22 nt, Human
ucuggagcuggagggcaaggca

SEQ ID NO: 840339 - RNA, 19 nt, Human
gguaaaagugagcuucagg

SEQ ID NO: 840340 - RNA, 22 nt, Human
acuuuacaagcuuauagccuag

SEQ ID NO: 840341 - RNA, 19 nt, Human
uccaggaggcugccauuga

SEQ ID NO: 840342 - RNA, 21 nt, Human
ucacuuauaauguauuugcug

SEQ ID NO: 840343 - RNA, 22 nt, Human
gggcagcagcaggaggucucug

SEQ ID NO: 840344 - RNA, 22 nt, Human
auauacaggugguauguguaaa

SEQ ID NO: 840345 - RNA, 22 nt, Human
ggugaaggucagagcaggaaaa

SEQ ID NO: 840346 - RNA, 22 nt, Human
auaaagucauuaugaagaucua

SEQ ID NO: 840347 - RNA, 22 nt, Human
uguacaauggcuauaauacccu

SEQ ID NO: 840348 - RNA, 22 nt, Human
auaaacucaugccaagaaauga

SEQ ID NO: 840349 - RNA, 22 nt, Human
ggccuggcucuugcccagccug

SEQ ID NO: 840350 - RNA, 22 nt, Human
uggggcuggcacagucucuauu

SEQ ID NO: 840351 - RNA, 18 nt, Human
guucaaggucaagagaga

SEQ ID NO: 840352 - RNA, 19 nt, Human
ggaugagggucaggcauag

SEQ ID NO: 840353 - RNA, 22 nt, Human
gcucugagcacugugcggcugg

SEQ ID NO: 840354 - RNA, 22 nt, Human
ugucucugguauuaggugaaaa

SEQ ID NO: 840355 - RNA, 22 nt, Human
ugaagccuuguguggccucucu

SEQ ID NO: 840356 - RNA, 20 nt, Human
ugcguguguauuuauuuucu

SEQ ID NO: 840357 - RNA, 22 nt, Human
uagggaugagccaguggguagu

SEQ ID NO: 840358 - RNA, 22 nt, Human
ccugucagaugaaguaauugug

SEQ ID NO: 840359 - RNA, 22 nt, Human
uauuauuaaauggcagaauuuu

SEQ ID NO: 840360 - RNA, 19 nt, Human
acagaaauguaagugagac

SEQ ID NO: 840361 - RNA, 22 nt, Human
aagaagaugguuaacuuucagu

SEQ ID NO: 840362 - RNA, 18 nt, Human
uggagcagguaggcauga

SEQ ID NO: 840363 - RNA, 22 nt, Human
aggguggcugaguagauggaag

SEQ ID NO: 840364 - RNA, 22 nt, Human
uaacacauuaguucuccuagau

SEQ ID NO: 840365 - RNA, 22 nt, Human
ugcccugugugugcaagcacug

SEQ ID NO: 840366 - RNA, 22 nt, Human
ugagcccagagcccuuguaggg

SEQ ID NO: 840367 - RNA, 22 nt, Human
uggccugggcaugaagcaucgu

SEQ ID NO: 840368 - RNA, 22 nt, Human
aaagcaguauauugguaguugu

SEQ ID NO: 840369 - RNA, 22 nt, Human
gcucaggaaggcucaaccagga

SEQ ID NO: 840370 - RNA, 19 nt, Human
uggcaggcccaggauggac

SEQ ID NO: 840371 - RNA, 22 nt, Human
ugcagcauuauucacaguagcc

SEQ ID NO: 840372 - RNA, 22 nt, Human
ugagcccaggaguuggagaccg

SEQ ID NO: 840373 - RNA, 22 nt, Human
augagcugggccauccagugau

SEQ ID NO: 840374 - RNA, 22 nt, Human
auuuaaauuuucugauggagag

SEQ ID NO: 840375 - RNA, 19 nt, Human
ugaagcaggcagagaagau

SEQ ID NO: 840376 - RNA, 22 nt, Human
gcuggagcugaguucccugggc

SEQ ID NO: 840377 - RNA, 22 nt, Human
cugggcaggagggcucuaugga

SEQ ID NO: 840378 - RNA, 22 nt, Human
acauuucucuuagaguuggacu

SEQ ID NO: 840379 - RNA, 22 nt, Human
aggcacugugcuucuuauaugu

SEQ ID NO: 840380 - RNA, 22 nt, Human
gcucccagcaauugaggcagcc

SEQ ID NO: 840381 - RNA, 22 nt, Human
cugugugugucugcagcauacu

SEQ ID NO: 840382 - RNA, 22 nt, Human
aagggaggccagagguuuugca

SEQ ID NO: 840383 - RNA, 22 nt, Human
auuacagaaugcaguuccuuau

SEQ ID NO: 840384 - RNA, 22 nt, Human
acucuucuugcugcucauuaau

SEQ ID NO: 840385 - RNA, 20 nt, Human
ggggcccaagcccucuugcc

SEQ ID NO: 840386 - RNA, 22 nt, Human
gcugcaggcauuuuccugggca

SEQ ID NO: 840387 - RNA, 22 nt, Human
cucuucaauagauuguugaggg

SEQ ID NO: 840388 - RNA, 22 nt, Human
cauuucugcagaauugcucuuc

SEQ ID NO: 840389 - RNA, 23 nt, Human
ugcagccacucaggagcucagug

SEQ ID NO: 840390 - RNA, 22 nt, Human
ucucccagaggaucccagugga

SEQ ID NO: 840391 - RNA, 22 nt, Human
cagaaugagauaacccagauug

SEQ ID NO: 840392 - RNA, 22 nt, Human
ccacagaggacaacugccuggc

SEQ ID NO: 840393 - RNA, 22 nt, Human
ucccagagcaguacuccaggag

SEQ ID NO: 840394 - RNA, 22 nt, Human
gguacaaugguucauuuuaugu

SEQ ID NO: 840395 - RNA, 22 nt, Human
gaagcccagggcguggccgggc

SEQ ID NO: 840396 - RNA, 22 nt, Human
gccagacacuccccugggcagg

SEQ ID NO: 840397 - RNA, 22 nt, Human
agauuuagacugccuuaaucau

SEQ ID NO: 840398 - RNA, 22 nt, Human
ugguuuaaccugucucuuauua

SEQ ID NO: 840399 - RNA, 22 nt, Human
uccugagggcgauucagcaggu

SEQ ID NO: 840400 - RNA, 22 nt, Human
uacaggaaguaaguaaugaaau

SEQ ID NO: 840401 - RNA, 22 nt, Human
gauggcagcauauugacagcau

SEQ ID NO: 840402 - RNA, 22 nt, Human
ucagaggagaaguugggaaaau

SEQ ID NO: 840403 - RNA, 22 nt, Human
ucauucuuuaccaaguugucac

SEQ ID NO: 840404 - RNA, 22 nt, Human
uuucuagucucgaucucuuaau

SEQ ID NO: 840405 - RNA, 20 nt, Human
uuguuucugcuauuuucuaa

SEQ ID NO: 840406 - RNA, 22 nt, Human
ucccacacagcccgcucaccgg

SEQ ID NO: 840407 - RNA, 21 nt, Human
gccauuguuuucuaccuggag

SEQ ID NO: 840408 - RNA, 22 nt, Human
uuucaaacauagaucugaauau

SEQ ID NO: 840409 - RNA, 20 nt, Human
gaggaaaagcugccaggccu

SEQ ID NO: 840410 - RNA, 22 nt, Human
aguccuuaugugguggagagag

SEQ ID NO: 840411 - RNA, 22 nt, Human
uuguuucugaguuuucauguau

SEQ ID NO: 840412 - RNA, 22 nt, Human
ggagagcugguagcuggcucca

SEQ ID NO: 840413 - RNA, 22 nt, Human
cagcugccccuccagggcuggg

SEQ ID NO: 840414 - RNA, 22 nt, Human
ggaggccaaggaggagcuugcc

SEQ ID NO: 840415 - RNA, 22 nt, Human
augauacaucuucaugucagug

SEQ ID NO: 840416 - RNA, 22 nt, Human
ugugugcauucacaugcaugcc

SEQ ID NO: 840417 - RNA, 22 nt, Human
cugugcugauucagcacaggcc

SEQ ID NO: 840418 - RNA, 22 nt, Human
uaaaaugaucucucauguucuu

SEQ ID NO: 840419 - RNA, 22 nt, Human
aauguaugugauuauuccucua

SEQ ID NO: 840420 - RNA, 18 nt, Human
aguggucuguuauaucau

SEQ ID NO: 840421 - RNA, 22 nt, Human
ugagcuuacuucuguacacaga

SEQ ID NO: 840422 - RNA, 22 nt, Human
gcugcccaggagagguggggcu

SEQ ID NO: 840423 - RNA, 22 nt, Human
auuucugugcaguaaaugguga

SEQ ID NO: 840424 - RNA, 22 nt, Human
uuggcuucucuuaacccuaaag

SEQ ID NO: 840425 - RNA, 21 nt, Human
uggcaggcagcuggaagcuug

SEQ ID NO: 840426 - RNA, 22 nt, Human
aggggugaaagagggcccucaa

SEQ ID NO: 840427 - RNA, 22 nt, Human
caagggcuucaaguggccaaga

SEQ ID NO: 840428 - RNA, 17 nt, Human
ggccuuggggccucagu

SEQ ID NO: 840429 - RNA, 22 nt, Human
uuugcagcaaggagagagcauu

SEQ ID NO: 840430 - RNA, 22 nt, Human
uauuuagaacagacaauagaaa

SEQ ID NO: 840431 - RNA, 22 nt, Human
caggaggaaaugugacccugcu

SEQ ID NO: 840432 - RNA, 21 nt, Human
acuguucaucuguucagaagc

SEQ ID NO: 840433 - RNA, 22 nt, Human
aauuauccuuaaugcaguaagc

SEQ ID NO: 840434 - RNA, 22 nt, Human
cucuccuccaacagcccugccg

SEQ ID NO: 840435 - RNA, 22 nt, Human
acaaagucucuaauaaucuucu

SEQ ID NO: 840436 - RNA, 22 nt, Human
gaauuucaaagagguuaagagg

SEQ ID NO: 840437 - RNA, 22 nt, Human
gcagcugaauguccauugcugc

SEQ ID NO: 840438 - RNA, 22 nt, Human
ccugccugauuccaggauggcu

SEQ ID NO: 840439 - RNA, 22 nt, Human
gcaggaguguauuugcauguaa

SEQ ID NO: 840440 - RNA, 22 nt, Human
uggagaauuuugucaccagaca

SEQ ID NO: 840441 - RNA, 22 nt, Human
ucugggcucugucagcaccucu

SEQ ID NO: 840442 - RNA, 22 nt, Human
cuguuuucaaagagagagaaug

SEQ ID NO: 840443 - RNA, 22 nt, Human
cuggaagggucuacuuagcaga

SEQ ID NO: 840444 - RNA, 22 nt, Human
agggucccgaaggagacagcaa

SEQ ID NO: 840445 - RNA, 22 nt, Human
agggcagccauugagggauucu

SEQ ID NO: 840446 - RNA, 22 nt, Human
uagaaaagaauuuuauuugaua

SEQ ID NO: 840447 - RNA, 22 nt, Human
agcagugggugacagagcugag

SEQ ID NO: 840448 - RNA, 22 nt, Human
cuggccuguccugacccagccu

SEQ ID NO: 840449 - RNA, 22 nt, Human
cuuacauugugugcaugagggg

SEQ ID NO: 840450 - RNA, 22 nt, Human
uuguuacaucuuauguaagugg

SEQ ID NO: 840451 - RNA, 22 nt, Human
cugcugugcacccaggaaggcu

SEQ ID NO: 840452 - RNA, 22 nt, Human
auaucuuuguaugguucagcag

SEQ ID NO: 840453 - RNA, 18 nt, Human
agucucagcggaggagua

SEQ ID NO: 840454 - RNA, 22 nt, Human
ccaggcagagugcuccagaaag

SEQ ID NO: 840455 - RNA, 22 nt, Human
aaggcgacacaggcagcaggcc

SEQ ID NO: 840456 - RNA, 22 nt, Human
gaaacaacuacuauugauuucu

SEQ ID NO: 840457 - RNA, 22 nt, Human
uaggagaggugaauggcacacu

SEQ ID NO: 840458 - RNA, 22 nt, Human
cuggcagcuuccuuugcaucug

SEQ ID NO: 840459 - RNA, 22 nt, Human
uauugaaauccauuacguucuu

SEQ ID NO: 840460 - RNA, 22 nt, Human
ggagggugcauuuuacccugug

SEQ ID NO: 840461 - RNA, 22 nt, Human
cagaaaaccugacucuagaacu

SEQ ID NO: 840462 - RNA, 22 nt, Human
cagaaauguucuaaugauucag

SEQ ID NO: 840463 - RNA, 22 nt, Human
aaagccauuacaaaauuucaua

SEQ ID NO: 840464 - RNA, 22 nt, Human
ucugccuuggcaaccacagcuu

SEQ ID NO: 840465 - RNA, 22 nt, Human
uuuacagagaauguacauaaag

SEQ ID NO: 840466 - RNA, 22 nt, Human
uugcagagaucagcagguuuga

SEQ ID NO: 840467 - RNA, 22 nt, Human
ucccugggcaucacguugcuuc

SEQ ID NO: 840468 - RNA, 18 nt, Human
ugcuggcaacuacuauug

SEQ ID NO: 840469 - RNA, 22 nt, Human
cagggccagccgcagcauccac

SEQ ID NO: 840470 - RNA, 22 nt, Human
uagagaaaagcagggaucagga

SEQ ID NO: 840471 - RNA, 22 nt, Human
ugggcaggaugcguugauucuu

SEQ ID NO: 840472 - RNA, 22 nt, Human
caggcagcugaggacuuugcua

SEQ ID NO: 840473 - RNA, 22 nt, Human
cuguguuugaugagaagccacc

SEQ ID NO: 840474 - RNA, 22 nt, Human
uuucucuguucucuaacuguaa

SEQ ID NO: 840475 - RNA, 22 nt, Human
aggcugucugaccccagagccc

SEQ ID NO: 840476 - RNA, 22 nt, Human
cccauuuaaacacaagcuuuca

SEQ ID NO: 840477 - RNA, 22 nt, Human
caggugccgggaaugcagcaau

SEQ ID NO: 840478 - RNA, 22 nt, Human
gucucccaucguuugugaggaa

SEQ ID NO: 840479 - RNA, 22 nt, Human
cauacuuuugcccugacauucu

SEQ ID NO: 840480 - RNA, 22 nt, Human
acuuuguauaagacaauaaaga

SEQ ID NO: 840481 - RNA, 22 nt, Human
aggcaggcacuccggaaguguc

SEQ ID NO: 840482 - RNA, 22 nt, Human
caggugggagcggagacugauu

SEQ ID NO: 840483 - RNA, 22 nt, Human
agccaggacguugcucagcucc

SEQ ID NO: 840484 - RNA, 22 nt, Human
uggcucugugucucccagcagc

SEQ ID NO: 840485 - RNA, 22 nt, Human
uugagucaguaauuccauuucu

SEQ ID NO: 840486 - RNA, 22 nt, Human
aggaaagguagcgugccagcag

SEQ ID NO: 840487 - RNA, 22 nt, Human
agcauauaaauggacauauuug

SEQ ID NO: 840488 - RNA, 22 nt, Human
agagcagccugugaugaugcac

SEQ ID NO: 840489 - RNA, 22 nt, Human
cagaccugagguugaguaccag

SEQ ID NO: 840490 - RNA, 22 nt, Human
uuagccauauagaaaaagagcu

SEQ ID NO: 840491 - RNA, 22 nt, Human
aagggaggaggauuuauuguac

SEQ ID NO: 840492 - RNA, 22 nt, Human
caagggcucuuuugaggaaugu

SEQ ID NO: 840493 - RNA, 22 nt, Human
gugccugcugcagagucgcugu

SEQ ID NO: 840494 - RNA, 22 nt, Human
caccagggcucugagcucugaa

SEQ ID NO: 840495 - RNA, 22 nt, Human
cauaauaucuccgauuacuugc

SEQ ID NO: 840496 - RNA, 22 nt, Human
ucucucuugucaccccaucugc

SEQ ID NO: 840497 - RNA, 22 nt, Human
uggcuuuauaaauccacugguu

SEQ ID NO: 840498 - RNA, 22 nt, Human
agggcccucuggcaggccaggc

SEQ ID NO: 840499 - RNA, 22 nt, Human
aucucauaacucauuugaagac

SEQ ID NO: 840500 - RNA, 22 nt, Human
uagggcaguuauaacauuagug

SEQ ID NO: 840501 - RNA, 22 nt, Human
ccagggcacguugggacaguac

SEQ ID NO: 840502 - RNA, 22 nt, Human
agacccugucaguguuaggaaa

SEQ ID NO: 840503 - RNA, 22 nt, Human
gccaggaggcuuaacuggacag

SEQ ID NO: 840504 - RNA, 22 nt, Human
gaggccuggcugggaggaggug

SEQ ID NO: 840505 - RNA, 22 nt, Human
uggcagcagggccccuggagga

SEQ ID NO: 840506 - RNA, 22 nt, Human
cagccucuaagcacagccucuc

SEQ ID NO: 840507 - RNA, 22 nt, Human
auuccaguucuccucucuaaag

SEQ ID NO: 840508 - RNA, 22 nt, Human
ccugucuguauugguuugcuau

SEQ ID NO: 840509 - RNA, 16 nt, Human
auuuccagauuaugca

SEQ ID NO: 840510 - RNA, 22 nt, Human
aagcacagaaaaggagcaugga

SEQ ID NO: 840511 - RNA, 22 nt, Human
ucaggagauggucuuuauaggc

SEQ ID NO: 840512 - RNA, 21 nt, Human
ucucugggaggacuugugaga

SEQ ID NO: 840513 - RNA, 22 nt, Human
aaucuucauuuugacaagauuc

SEQ ID NO: 840514 - RNA, 21 nt, Human
gauuuuaaagagacugccaca

SEQ ID NO: 840515 - RNA, 22 nt, Human
cugagaggaugcugcaguggag

SEQ ID NO: 840516 - RNA, 19 nt, Human
cccaggagcaguauugaug

SEQ ID NO: 840517 - RNA, 22 nt, Human
ugccuggguucccaccccaaag

SEQ ID NO: 840518 - RNA, 21 nt, Human
ccagcuccaggaccuuggauc

SEQ ID NO: 840519 - RNA, 23 nt, Human
ucccaggaaucugcauuuuuaac

SEQ ID NO: 840520 - RNA, 22 nt, Human
gagcagugguugaacagaggca

SEQ ID NO: 840521 - RNA, 20 nt, Human
cagcucugggaaagaggcca

SEQ ID NO: 840522 - RNA, 22 nt, Human
ucaucugucauccacaaagcug

SEQ ID NO: 840523 - RNA, 22 nt, Human
cagagccauuauggagacuugc

SEQ ID NO: 840524 - RNA, 22 nt, Human
ugaaagaacuagcaucuucaag

SEQ ID NO: 840525 - RNA, 22 nt, Human
aagggcagggaguuugugucua

SEQ ID NO: 840526 - RNA, 19 nt, Human
cuuugucagaacaugcuuc

SEQ ID NO: 840527 - RNA, 22 nt, Human
uuugaagugggcauuagaaccu

SEQ ID NO: 840528 - RNA, 22 nt, Human
uccucagggcggccuccgucuu

SEQ ID NO: 840529 - RNA, 22 nt, Human
ugcauuucagaagaaaauucgg

SEQ ID NO: 840530 - RNA, 22 nt, Human
cugccuugaaaaugaagcuuua

SEQ ID NO: 840531 - RNA, 22 nt, Human
uuccauaauaggcuuaagugaa

SEQ ID NO: 840532 - RNA, 22 nt, Human
uuacaagauaaccugaugcugu

SEQ ID NO: 840533 - RNA, 22 nt, Human
gugcaguggcagauccuagcuc

SEQ ID NO: 840534 - RNA, 22 nt, Human
ggaggacaggggcugcagcaca

SEQ ID NO: 840535 - RNA, 22 nt, Human
augcuuaacuuccuagucuaua

SEQ ID NO: 840536 - RNA, 22 nt, Human
auuugcaugcuucuauugugaa

SEQ ID NO: 840537 - RNA, 22 nt, Human
acuauaaaaggauaaaccagaa

SEQ ID NO: 840538 - RNA, 22 nt, Human
ucauuuguucaucugcucuucu

SEQ ID NO: 840539 - RNA, 22 nt, Human
ccuuccagaguucagucugccc

SEQ ID NO: 840540 - RNA, 22 nt, Human
ucaguuuuuguuugccagauag

SEQ ID NO: 840541 - RNA, 20 nt, Human
ugccaugguaacagagugug

SEQ ID NO: 840542 - RNA, 22 nt, Human
uucaagucaaggaaagaggucu

SEQ ID NO: 840543 - RNA, 22 nt, Human
augggaggaucacuugaggcca

SEQ ID NO: 840544 - RNA, 22 nt, Human
ucaggcugugggcacuggccau

SEQ ID NO: 840545 - RNA, 22 nt, Human
aaggaagggaaauagugauguc

SEQ ID NO: 840546 - RNA, 20 nt, Human
uauuuguauuugggaaaguu

SEQ ID NO: 840547 - RNA, 22 nt, Human
uuguuaaaaauagauuuccagg

SEQ ID NO: 840548 - RNA, 22 nt, Human
ccugcugugaagccaggccugu

SEQ ID NO: 840549 - RNA, 22 nt, Human
acauacuaugaauacauguguc

SEQ ID NO: 840550 - RNA, 20 nt, Human
aacuuguucuaccuguuuca

SEQ ID NO: 840551 - RNA, 22 nt, Human
gcagguguggaguggggugagc

SEQ ID NO: 840552 - RNA, 22 nt, Human
aaauguagaccuauagggaccu

SEQ ID NO: 840553 - RNA, 22 nt, Human
uccucuggggucagggcacuac

SEQ ID NO: 840554 - RNA, 22 nt, Human
gugccagcaguuauggugauuu

SEQ ID NO: 840555 - RNA, 22 nt, Human
caaugaaagcaacugccuauaa

SEQ ID NO: 840556 - RNA, 22 nt, Human
acagagcaauucuuggguguuu

SEQ ID NO: 840557 - RNA, 22 nt, Human
gcagccacuaguuuuccuguuu

SEQ ID NO: 840558 - RNA, 22 nt, Human
cugcaucaguggauaugauggu

SEQ ID NO: 840559 - RNA, 22 nt, Human
uggcccuguguccugcugccag

SEQ ID NO: 840560 - RNA, 22 nt, Human
aaauucaguuuuaauaaucacu

SEQ ID NO: 840561 - RNA, 22 nt, Human
cccaggagaucuggaucucguc

SEQ ID NO: 840562 - RNA, 22 nt, Human
ccaggccuggccaggggaugcc

SEQ ID NO: 840563 - RNA, 22 nt, Human
agagacaaugccaaugcacacg

SEQ ID NO: 840564 - RNA, 22 nt, Human
ucuuuaauuguggaagagcagc

SEQ ID NO: 840565 - RNA, 21 nt, Human
gaugaagcaaucuuucuguug

SEQ ID NO: 840566 - RNA, 22 nt, Human
gccuguccacuaaacagccaag

SEQ ID NO: 840567 - RNA, 22 nt, Human
agcagggcagguaaggaucaga

SEQ ID NO: 840568 - RNA, 22 nt, Human
ccaggccugauugggaaucuug

SEQ ID NO: 840569 - RNA, 22 nt, Human
auuucacaaaccauccugauuu

SEQ ID NO: 840570 - RNA, 22 nt, Human
ugguggcaauguccuggagaag

SEQ ID NO: 840571 - RNA, 22 nt, Human
agcaccugccugcauuggcuau

SEQ ID NO: 840572 - RNA, 22 nt, Human
ggaugcugacuuuggagcaugg

SEQ ID NO: 840573 - RNA, 22 nt, Human
cugugcuucgcaacuccaaggu

SEQ ID NO: 840574 - RNA, 22 nt, Human
cugcugugugcuuacuuggguu

SEQ ID NO: 840575 - RNA, 22 nt, Human
ucagcagggcugugguguggcu

SEQ ID NO: 840576 - RNA, 22 nt, Human
cuucaagaagacagcagagcau

SEQ ID NO: 840577 - RNA, 22 nt, Human
aaggcacucagccuugggacag

SEQ ID NO: 840578 - RNA, 22 nt, Human
uagcugccauugcuccaggaag

SEQ ID NO: 840579 - RNA, 22 nt, Human
cccuggaagguucucuggcuca

SEQ ID NO: 840580 - RNA, 22 nt, Human
uucacacacagcuuccuauugu

SEQ ID NO: 840581 - RNA, 17 nt, Human
uagcuguguuucagcua

SEQ ID NO: 840582 - RNA, 22 nt, Human
ccagcagcagcguccaaggaga

SEQ ID NO: 840583 - RNA, 22 nt, Human
gugucaugggagucagaaguga

SEQ ID NO: 840584 - RNA, 22 nt, Human
ugcugcucuucaccauggccuc

SEQ ID NO: 840585 - RNA, 22 nt, Human
agaagccaauucugugugaguc

SEQ ID NO: 840586 - RNA, 22 nt, Human
gcuggccugaccagccacaggc

SEQ ID NO: 840587 - RNA, 22 nt, Human
cagggguguuuuuggccaggag

SEQ ID NO: 840588 - RNA, 22 nt, Human
gcaggaugaaggcagaggcuga

SEQ ID NO: 840589 - RNA, 22 nt, Human
agaggcuccuagccacuggcuu

SEQ ID NO: 840590 - RNA, 22 nt, Human
agucucagcuacuugggaggcu

SEQ ID NO: 840591 - RNA, 21 nt, Human
agacagaacaacugcucucca

SEQ ID NO: 840592 - RNA, 21 nt, Human
uucaaaaugguguguuugucu

SEQ ID NO: 840593 - RNA, 22 nt, Human
cuugcugucuugcauuuagagc

SEQ ID NO: 840594 - RNA, 22 nt, Human
gggagggaaggaccuuaugaau

SEQ ID NO: 840595 - RNA, 21 nt, Human
ucuuuccugcccaguugcccu

SEQ ID NO: 840596 - RNA, 22 nt, Human
uccuucagcuuauuucuuagga

SEQ ID NO: 840597 - RNA, 22 nt, Human
ggagccaggggaccuucacaga

SEQ ID NO: 840598 - RNA, 22 nt, Human
uccugccuguuuaccuguacuu

SEQ ID NO: 840599 - RNA, 22 nt, Human
uaaguucauuagacuacagaua

SEQ ID NO: 840600 - RNA, 22 nt, Human
ggccccugcggacugccuagag

SEQ ID NO: 840601 - RNA, 22 nt, Human
ggccugugagcccuugcaugua

SEQ ID NO: 840602 - RNA, 19 nt, Human
cugaggugcaguaagaggc

SEQ ID NO: 840603 - RNA, 22 nt, Human
gaauuuuucuggaagcaauuau

SEQ ID NO: 840604 - RNA, 22 nt, Human
uggcugaaucugcagcaggaag

SEQ ID NO: 840605 - RNA, 22 nt, Human
ucccacugugaauccaaggccu

SEQ ID NO: 840606 - RNA, 22 nt, Human
auuuaucucuggaaacuaagca

SEQ ID NO: 840607 - RNA, 20 nt, Human
uggcuccugcgguggaacca

SEQ ID NO: 840608 - RNA, 22 nt, Human
uaugaagacaaugauagcauga

SEQ ID NO: 840609 - RNA, 22 nt, Human
aauguguacuuuuucaugcuca

SEQ ID NO: 840610 - RNA, 22 nt, Human
guccacauaggaacccagcuuc

SEQ ID NO: 840611 - RNA, 22 nt, Human
ucugcgcugccuugauccuugg

SEQ ID NO: 840612 - RNA, 22 nt, Human
gaggcagcaggcugaggaggau

SEQ ID NO: 840613 - RNA, 22 nt, Human
uagaacuacaagcauuaaaagu

SEQ ID NO: 840614 - RNA, 17 nt, Human
ccuuucucuuucaucuc

SEQ ID NO: 840615 - RNA, 22 nt, Human
uuucuguauuuaaaagaucugg

SEQ ID NO: 840616 - RNA, 22 nt, Human
aggcucauucuugccucugagc

SEQ ID NO: 840617 - RNA, 22 nt, Human
aagacugucuuuucugagugac

SEQ ID NO: 840618 - RNA, 21 nt, Human
cugcucugacagugaggccag

SEQ ID NO: 840619 - RNA, 22 nt, Human
cauuuguaguuaaaaaugucuc

SEQ ID NO: 840620 - RNA, 21 nt, Human
gugucaugguugacuuuggca

SEQ ID NO: 840621 - RNA, 22 nt, Human
gggcugacucugcacugagcca

SEQ ID NO: 840622 - RNA, 22 nt, Human
caaaguuaucaacugcaacauu

SEQ ID NO: 840623 - RNA, 22 nt, Human
acuuccuggcguagcugacauu

SEQ ID NO: 840624 - RNA, 22 nt, Human
agccagacauggcuccugcucc

SEQ ID NO: 840625 - RNA, 22 nt, Human
ucaagagagugcugcuuggggu

SEQ ID NO: 840626 - RNA, 22 nt, Human
agaggcuccuucacucuggcac

SEQ ID NO: 840627 - RNA, 22 nt, Human
auuuucagagacaucuggacuu

SEQ ID NO: 840628 - RNA, 22 nt, Human
auauguguacgugcaguauaua

SEQ ID NO: 840629 - RNA, 22 nt, Human
gagagaagaauguuccgaggcc

SEQ ID NO: 840630 - RNA, 22 nt, Human
cugcagaggccucgccuccucu

SEQ ID NO: 840631 - RNA, 22 nt, Human
ucugggaacacacgucacuuca

SEQ ID NO: 840632 - RNA, 20 nt, Human
uggccuuuaaauaguauucc

SEQ ID NO: 840633 - RNA, 22 nt, Human
ucagagugugagacauauugga

SEQ ID NO: 840634 - RNA, 22 nt, Human
gccugggagggcagcagugugg

SEQ ID NO: 840635 - RNA, 22 nt, Human
caucagucuagauucuaguacc

SEQ ID NO: 840636 - RNA, 22 nt, Human
gcagauggcucagacacugggg

SEQ ID NO: 840637 - RNA, 22 nt, Human
agguggggaggagugucucuuu

SEQ ID NO: 840638 - RNA, 22 nt, Human
uuacaaagaguguucuuuucca

SEQ ID NO: 840639 - RNA, 22 nt, Human
uggcccugcuuaugucucucuu

SEQ ID NO: 840640 - RNA, 22 nt, Human
uucaaacaguguagaauauaug

SEQ ID NO: 840641 - RNA, 22 nt, Human
gugcaugucggggugcauguca

SEQ ID NO: 840642 - RNA, 22 nt, Human
uuacagaaaggaaggacugacu

SEQ ID NO: 840643 - RNA, 22 nt, Human
aguggcagaucucuggucugga

SEQ ID NO: 840644 - RNA, 22 nt, Human
ccuggcagaauauuaaagugca

SEQ ID NO: 840645 - RNA, 22 nt, Human
ggaggugguggcagugacaauu

SEQ ID NO: 840646 - RNA, 22 nt, Human
aauuaaauugguuuagagagga

SEQ ID NO: 840647 - RNA, 22 nt, Human
gcugccuggaauaacggcuggc

SEQ ID NO: 840648 - RNA, 22 nt, Human
uguguuccugccuggcucuggu

SEQ ID NO: 840649 - RNA, 22 nt, Human
gccucugcaacuccgccuuggu

SEQ ID NO: 840650 - RNA, 22 nt, Human
ccucccucuuucagucccacag

SEQ ID NO: 840651 - RNA, 22 nt, Human
cagaagccugccucagaugcac

SEQ ID NO: 840652 - RNA, 22 nt, Human
ucuuugcaacucccauuuccau

SEQ ID NO: 840653 - RNA, 22 nt, Human
gacaucauagggugggaggaaa

SEQ ID NO: 840654 - RNA, 22 nt, Human
ugaacuuagugggaauaucucu

SEQ ID NO: 840655 - RNA, 22 nt, Human
agaggcugaaugaugucaucau

SEQ ID NO: 840656 - RNA, 22 nt, Human
ggccccaggaccuccacggucc

SEQ ID NO: 840657 - RNA, 23 nt, Human
uugcuucugugcaauucaguacu

SEQ ID NO: 840658 - RNA, 22 nt, Human
cugaagaggacgcagcagcaag

SEQ ID NO: 840659 - RNA, 22 nt, Human
cuggaugcuuccucucugcuag

SEQ ID NO: 840660 - RNA, 22 nt, Human
aaacacaucauucaugucguca

SEQ ID NO: 840661 - RNA, 22 nt, Human
aucuuucagagcuccaucaggg

SEQ ID NO: 840662 - RNA, 22 nt, Human
uuuggacuuagccugcagaauu

SEQ ID NO: 840663 - RNA, 19 nt, Human
uccuucagucagaucuggg

SEQ ID NO: 840664 - RNA, 22 nt, Human
guggcugcagcccagcggcacg

SEQ ID NO: 840665 - RNA, 22 nt, Human
cugcccagaagccagaugggca

SEQ ID NO: 840666 - RNA, 22 nt, Human
augggaugcauggcuguggcca

SEQ ID NO: 840667 - RNA, 22 nt, Human
aauuauauuguggugugaaugu

SEQ ID NO: 840668 - RNA, 22 nt, Human
aacaugcugccuuucuacgagu

SEQ ID NO: 840669 - RNA, 22 nt, Human
gaggaggcuaagugggcucugg

SEQ ID NO: 840670 - RNA, 22 nt, Human
cacaugcaucugucauguuugg

SEQ ID NO: 840671 - RNA, 22 nt, Human
uggcacugagcagccgcggcag

SEQ ID NO: 840672 - RNA, 22 nt, Human
cugccaggcacgugcagcauca

SEQ ID NO: 840673 - RNA, 20 nt, Human
aggcacuggauuucuuauau

SEQ ID NO: 840674 - RNA, 22 nt, Human
auccugggcagugugucacucu

SEQ ID NO: 840675 - RNA, 22 nt, Human
gcccugucggaacugcgaccuc

SEQ ID NO: 840676 - RNA, 22 nt, Human
uuaauuacuaagcacaaugcaa

SEQ ID NO: 840677 - RNA, 22 nt, Human
aagccucuggggccucaucugu

SEQ ID NO: 840678 - RNA, 22 nt, Human
ucuuuaauauaaaggaaugaau

SEQ ID NO: 840679 - RNA, 22 nt, Human
agcaggagagcagugcgugguc

SEQ ID NO: 840680 - RNA, 22 nt, Human
aggugaaguugaggaggcagaa

SEQ ID NO: 840681 - RNA, 22 nt, Human
gguuugcacgauauuuccaugg

SEQ ID NO: 840682 - RNA, 22 nt, Human
augcacagcagugaguucagug

SEQ ID NO: 840683 - RNA, 22 nt, Human
ugucucaguauacgaaacacuu

SEQ ID NO: 840684 - RNA, 22 nt, Human
cugagauggaguuuugcucuug

SEQ ID NO: 840685 - RNA, 22 nt, Human
agacccagaaagcagcugcauu

SEQ ID NO: 840686 - RNA, 21 nt, Human
gggccacaccuucugcagacc

SEQ ID NO: 840687 - RNA, 22 nt, Human
ugggcagaaugugggauccaga

SEQ ID NO: 840688 - RNA, 22 nt, Human
cagcauuggguuaccuuuguuu

SEQ ID NO: 840689 - RNA, 22 nt, Human
uguucuucuagauugccuuuua

SEQ ID NO: 840690 - RNA, 22 nt, Human
uuugacaguaauaaagcacaag

SEQ ID NO: 840691 - RNA, 22 nt, Human
aguauucuggaauucuauguga

SEQ ID NO: 840692 - RNA, 22 nt, Human
ggcuggguuauuuauggccaag

SEQ ID NO: 840693 - RNA, 20 nt, Human
auacuuguuuucaggcuuuu

SEQ ID NO: 840694 - RNA, 22 nt, Human
aacuuucuuggaugucucaaca

SEQ ID NO: 840695 - RNA, 22 nt, Human
ggcugucucugugacugccacc

SEQ ID NO: 840696 - RNA, 22 nt, Human
cuggagagauccuccugaaaaa

SEQ ID NO: 840697 - RNA, 22 nt, Human
aucuucaaagggauguccaugg

SEQ ID NO: 840698 - RNA, 22 nt, Human
cauugcacagcccuguggugau

SEQ ID NO: 840699 - RNA, 22 nt, Human
uuugaacaggaguaucuauagu

SEQ ID NO: 840700 - RNA, 22 nt, Human
ucuuuacacaagacaagaauaa

SEQ ID NO: 840701 - RNA, 22 nt, Human
uccaggaguccuggguggcccc

SEQ ID NO: 840702 - RNA, 22 nt, Human
ggucccagcugcucaagaggcu

SEQ ID NO: 840703 - RNA, 22 nt, Human
guuaacacaggacucucugccu

SEQ ID NO: 840704 - RNA, 22 nt, Human
aggauccugcgcuuugggggag

SEQ ID NO: 840705 - RNA, 22 nt, Human
gcagggcuaauggggcaaguag

SEQ ID NO: 840706 - RNA, 22 nt, Human
ccugcuggccaguggagggcug

SEQ ID NO: 840707 - RNA, 22 nt, Human
uaucaauacauguuaucagugu

SEQ ID NO: 840708 - RNA, 22 nt, Human
cucaggaugaaagucaugguga

SEQ ID NO: 840709 - RNA, 22 nt, Human
aguacaauuauauuuagauggu

SEQ ID NO: 840710 - RNA, 22 nt, Human
gauuuuaauuauaggagguccu

SEQ ID NO: 840711 - RNA, 22 nt, Human
ggcagaagaaaggcuaagucuc

SEQ ID NO: 840712 - RNA, 22 nt, Human
cucugagaaagcugugagcuaa

SEQ ID NO: 840713 - RNA, 22 nt, Human
gccagcuggagugagagugggc

SEQ ID NO: 840714 - RNA, 22 nt, Human
auagaaauguauuuuggacuag

SEQ ID NO: 840715 - RNA, 22 nt, Human
gcucugaggcugggagcacucu

SEQ ID NO: 840716 - RNA, 22 nt, Human
agauggcagggguaccuggaag

SEQ ID NO: 840717 - RNA, 22 nt, Human
gggugcaggcagcccaggcagg

SEQ ID NO: 840718 - RNA, 19 nt, Human
ucccgcccacugagcgugc

SEQ ID NO: 840719 - RNA, 22 nt, Human
cggagcugccugccaagccugc

SEQ ID NO: 840720 - RNA, 22 nt, Human
ugcuggccaauggcagaggcgg

SEQ ID NO: 840721 - RNA, 22 nt, Human
gugcagcugugguggagccagg

SEQ ID NO: 840722 - RNA, 22 nt, Human
agggaggagaauggacuccuuc

SEQ ID NO: 840723 - RNA, 22 nt, Human
caggggcuuaagugacagaagg

SEQ ID NO: 840724 - RNA, 22 nt, Human
agaacagaggccuuauguuuca

SEQ ID NO: 840725 - RNA, 22 nt, Human
uauugaguuacagaaaauacuu

SEQ ID NO: 840726 - RNA, 22 nt, Human
ucacauuuuauaucucugguuu

SEQ ID NO: 840727 - RNA, 22 nt, Human
cucagaguccccacaucugggu

SEQ ID NO: 840728 - RNA, 22 nt, Human
aucacaaaggguuuucucugag

SEQ ID NO: 840729 - RNA, 22 nt, Human
uggcuucugcuuucaguggagg

SEQ ID NO: 840730 - RNA, 22 nt, Human
ucaggagaaucagggcuguccu

SEQ ID NO: 840731 - RNA, 22 nt, Human
cccugcagccuugcaugccuuc

SEQ ID NO: 840732 - RNA, 21 nt, Human
uucugggaaaugagcuggggc

SEQ ID NO: 840733 - RNA, 22 nt, Human
uagaaacaucagcuaaccaaaa

SEQ ID NO: 840734 - RNA, 22 nt, Human
ggugggcacccgagacuggauc

SEQ ID NO: 840735 - RNA, 22 nt, Human
augaauaaguaaacuccuuugg

SEQ ID NO: 840736 - RNA, 22 nt, Human
aucuucaaagcacaucguuugu

SEQ ID NO: 840737 - RNA, 22 nt, Human
uccuucagcucucuauuuagau

SEQ ID NO: 840738 - RNA, 22 nt, Human
acagcuuuucaauucugcugag

SEQ ID NO: 840739 - RNA, 22 nt, Human
agcauggggcuccgcaaugaac

SEQ ID NO: 840740 - RNA, 21 nt, Human
auccauccaucuuggccuaac

SEQ ID NO: 840741 - RNA, 22 nt, Human
augaaacaugcuuuguggauga

SEQ ID NO: 840742 - RNA, 22 nt, Human
ggcacugagcugccuuggggca

SEQ ID NO: 840743 - RNA, 22 nt, Human
ccugcagagccacgugccagcg

SEQ ID NO: 840744 - RNA, 22 nt, Human
uguccuuagaagaagugaaaga

SEQ ID NO: 840745 - RNA, 21 nt, Human
aucuuuauuacgcagagaaga

SEQ ID NO: 840746 - RNA, 18 nt, Human
caauuucaauggucugaa

SEQ ID NO: 840747 - RNA, 22 nt, Human
aaaguucagugccuucuauaca

SEQ ID NO: 840748 - RNA, 22 nt, Human
cugggccagggaggugucugua

SEQ ID NO: 840749 - RNA, 22 nt, Human
agcugucagugcugugccugua

SEQ ID NO: 840750 - RNA, 22 nt, Human
agauaucaccaguuuuacauac

SEQ ID NO: 840751 - RNA, 22 nt, Human
acaagcaugggcuuugacauca

SEQ ID NO: 840752 - RNA, 19 nt, Human
augucccaccgccccugag

SEQ ID NO: 840753 - RNA, 22 nt, Human
agccuucaguaaauccacugug

SEQ ID NO: 840754 - RNA, 22 nt, Human
acuguugucaggcugcuuugga

SEQ ID NO: 840755 - RNA, 22 nt, Human
uuccucuagcuucucacuaaca

SEQ ID NO: 840756 - RNA, 22 nt, Human
aguauuucuaguugguucuacu

SEQ ID NO: 840757 - RNA, 22 nt, Human
auaauaacaccugaauaggaaa

SEQ ID NO: 840758 - RNA, 22 nt, Human
cuuccugcauugugccagaguu

SEQ ID NO: 840759 - RNA, 22 nt, Human
uuguuacagcagugauuucaga

SEQ ID NO: 840760 - RNA, 17 nt, Human
uuccaguuuaguauugu

SEQ ID NO: 840761 - RNA, 22 nt, Human
cugagcugggacucaguagcaa

SEQ ID NO: 840762 - RNA, 22 nt, Human
gaggcucugugaugugccaggc

SEQ ID NO: 840763 - RNA, 22 nt, Human
ugccaggauggccagggggcca

SEQ ID NO: 840764 - RNA, 23 nt, Human
cccagcagauuguaaagugucca

SEQ ID NO: 840765 - RNA, 22 nt, Human
ugccaggaggaggugggacaga

SEQ ID NO: 840766 - RNA, 22 nt, Human
ucucccacugcaagcccaggcu

SEQ ID NO: 840767 - RNA, 22 nt, Human
auuuauguaucuguguagauca

SEQ ID NO: 840768 - RNA, 19 nt, Human
cuugcugggugguuucugc

SEQ ID NO: 840769 - RNA, 22 nt, Human
cauacaagcguucaauagaugu

SEQ ID NO: 840770 - RNA, 22 nt, Human
aauucaugaguagaaucuauau

SEQ ID NO: 840771 - RNA, 22 nt, Human
caugggcuuuggaggcuggagg

SEQ ID NO: 840772 - RNA, 18 nt, Human
acagaacucaggggcacc

SEQ ID NO: 840773 - RNA, 22 nt, Human
ccucugccugcacaucauccug

SEQ ID NO: 840774 - RNA, 20 nt, Human
uuugagaccagucugcccaa

SEQ ID NO: 840775 - RNA, 22 nt, Human
gccaggcagcagcgaggauggu

SEQ ID NO: 840776 - RNA, 22 nt, Human
guucuucagucacaucacagaa

SEQ ID NO: 840777 - RNA, 22 nt, Human
uggcagcuacagacagagguga

SEQ ID NO: 840778 - RNA, 22 nt, Human
aguggggagguccaggccaccc

SEQ ID NO: 840779 - RNA, 22 nt, Human
gccucugcccauccaccaucag

SEQ ID NO: 840780 - RNA, 22 nt, Human
acuuucuaggucucaguccuuu

SEQ ID NO: 840781 - RNA, 18 nt, Human
uggguggcuagggaguuu

SEQ ID NO: 840782 - RNA, 22 nt, Human
accagagcuggcucugagcacc

SEQ ID NO: 840783 - RNA, 22 nt, Human
uggcagcugcaggccuccugag

SEQ ID NO: 840784 - RNA, 22 nt, Human
gcccuggaaucucuccauggga

SEQ ID NO: 840785 - RNA, 19 nt, Human
uuccaaaaucaggauuuga

SEQ ID NO: 840786 - RNA, 22 nt, Human
ugagggagagggcgaaaaugaa

SEQ ID NO: 840787 - RNA, 17 nt, Human
ugcauuguuggaaauuu

SEQ ID NO: 840788 - RNA, 22 nt, Human
cagagcugcuucccaguuugug

SEQ ID NO: 840789 - RNA, 22 nt, Human
uacauucaacaugucacuaugu

SEQ ID NO: 840790 - RNA, 22 nt, Human
auggaucagaaucccgggaggg

SEQ ID NO: 840791 - RNA, 22 nt, Human
uuguaacaggcacucugugcca

SEQ ID NO: 840792 - RNA, 22 nt, Human
cuacauggagaagaaaauucuu

SEQ ID NO: 840793 - RNA, 22 nt, Human
gugucacaugguuuacugcagc

SEQ ID NO: 840794 - RNA, 22 nt, Human
aucuuguuauaagagauaaugg

SEQ ID NO: 840795 - RNA, 22 nt, Human
ccuccagguguuacauaugacu

SEQ ID NO: 840796 - RNA, 22 nt, Human
auaauuaauuucaguaaucucc

SEQ ID NO: 840797 - RNA, 22 nt, Human
ucaacacucuuuggcacaguua

SEQ ID NO: 840798 - RNA, 22 nt, Human
uuucacuagaacguucuuguuu

SEQ ID NO: 840799 - RNA, 23 nt, Human
guaaaauacgcagugcaguguga

SEQ ID NO: 840800 - RNA, 22 nt, Human
aaagcaaugaugguagacacgu

SEQ ID NO: 840801 - RNA, 22 nt, Human
agcugcucuugggugacuucaa

SEQ ID NO: 840802 - RNA, 22 nt, Human
gagugugucggucagcguggcg

SEQ ID NO: 840803 - RNA, 22 nt, Human
cugaaggagaaggccacuguuc

SEQ ID NO: 840804 - RNA, 22 nt, Human
uaucuugagagacaacacagca

SEQ ID NO: 840805 - RNA, 22 nt, Human
cuguuuaucuaggaguugcagg

SEQ ID NO: 840806 - RNA, 22 nt, Human
ucaaugauaucagcaggaugug

SEQ ID NO: 840807 - RNA, 22 nt, Human
cacagaaucugugacuccaaga

SEQ ID NO: 840808 - RNA, 22 nt, Human
agcugcccagcuaggaagaagg

SEQ ID NO: 840809 - RNA, 22 nt, Human
aucccuggacggcgccucccca

SEQ ID NO: 840810 - RNA, 22 nt, Human
gucagcagugucagcucugggg

SEQ ID NO: 840811 - RNA, 22 nt, Human
gcccaggcuagcguagagugca

SEQ ID NO: 840812 - RNA, 22 nt, Human
cccaggagguggagguugcagc

SEQ ID NO: 840813 - RNA, 22 nt, Human
agcagcugagccccagcuguga

SEQ ID NO: 840814 - RNA, 22 nt, Human
aaccaggacaauuugaauagaa

SEQ ID NO: 840815 - RNA, 22 nt, Human
acccaggagagagcuauaaaau

SEQ ID NO: 840816 - RNA, 22 nt, Human
uuuaauauuucuuuccugaagc

SEQ ID NO: 840817 - RNA, 22 nt, Human
gagcaggcuugcagagaagggg

SEQ ID NO: 840818 - RNA, 22 nt, Human
gcucugggcugcccucuggaca

SEQ ID NO: 840819 - RNA, 22 nt, Human
acuucauuguaauauuauagca

SEQ ID NO: 840820 - RNA, 22 nt, Human
aucagcaaucaaauugcagagu

SEQ ID NO: 840821 - RNA, 22 nt, Human
ugagugccugaacauagaguag

SEQ ID NO: 840822 - RNA, 22 nt, Human
ugucauaaaacacaagcuguug

SEQ ID NO: 840823 - RNA, 22 nt, Human
gccuggccugaacuaggaggug

SEQ ID NO: 840824 - RNA, 22 nt, Human
gccaggaguguguggcuauguu

SEQ ID NO: 840825 - RNA, 17 nt, Human
ggagagugggaauggcc

SEQ ID NO: 840826 - RNA, 22 nt, Human
guuauaaauaccuaauaggauu

SEQ ID NO: 840827 - RNA, 22 nt, Human
cugaggucuagacaccccaggg

SEQ ID NO: 840828 - RNA, 22 nt, Human
ucucuggaauuggcugaggcaa

SEQ ID NO: 840829 - RNA, 22 nt, Human
cuuaagauuugcgauaccuaau

SEQ ID NO: 840830 - RNA, 22 nt, Human
cccuuucccuucuggcucaggg

SEQ ID NO: 840831 - RNA, 22 nt, Human
aagauuucuuacuuauugaugc

SEQ ID NO: 840832 - RNA, 22 nt, Human
ccagguggugaaagugggcccu

SEQ ID NO: 840833 - RNA, 22 nt, Human
uggaggaaucagggcuuaggcu

SEQ ID NO: 840834 - RNA, 22 nt, Human
ggccuugguaaagggaugcaug

SEQ ID NO: 840835 - RNA, 22 nt, Human
aauacuauguagccaaaauaau

SEQ ID NO: 840836 - RNA, 22 nt, Human
cuguucauggaaaaauaguugg

SEQ ID NO: 840837 - RNA, 22 nt, Human
ggaccagagaagugagcaccug

SEQ ID NO: 840838 - RNA, 22 nt, Human
gcugugcacuaccuauacaucc

SEQ ID NO: 840839 - RNA, 22 nt, Human
uaguacaguuuaaauauuaaua

SEQ ID NO: 840840 - RNA, 22 nt, Human
cugaagcaaaggaucgagcuaa

SEQ ID NO: 840841 - RNA, 23 nt, Human
aggucagcaggcaaggaaauggc

SEQ ID NO: 840842 - RNA, 21 nt, Human
aaggaaaagcuuggucucuga

SEQ ID NO: 840843 - RNA, 22 nt, Human
uccacauccauugcuugacuuu

SEQ ID NO: 840844 - RNA, 22 nt, Human
gagguggugguggaggcauagc

SEQ ID NO: 840845 - RNA, 22 nt, Human
uccugggcuugcuccuccagcu

SEQ ID NO: 840846 - RNA, 22 nt, Human
agggcccauagaucgucagcuu

SEQ ID NO: 840847 - RNA, 22 nt, Human
acccaggaaaacauggugcaga

SEQ ID NO: 840848 - RNA, 19 nt, Human
acacugaauguagaauugg

SEQ ID NO: 840849 - RNA, 21 nt, Human
agcagccauggaugguaugua

SEQ ID NO: 840850 - RNA, 22 nt, Human
cauaugaaauaugaguugaaca

SEQ ID NO: 840851 - RNA, 22 nt, Human
ucuauacugaugggauacuauu

SEQ ID NO: 840852 - RNA, 22 nt, Human
cacaguggauugggugaugccc

SEQ ID NO: 840853 - RNA, 22 nt, Human
uauguaaaaauucaucaggcug

SEQ ID NO: 840854 - RNA, 20 nt, Human
cagccuccacucacucagcu

SEQ ID NO: 840855 - RNA, 22 nt, Human
aucagcaagcaugguuaggugu

SEQ ID NO: 840856 - RNA, 22 nt, Human
cagggcagggauguugcggcag

SEQ ID NO: 840857 - RNA, 22 nt, Human
cagggugcagugucgcugcuag

SEQ ID NO: 840858 - RNA, 22 nt, Human
uuagaaaucaccucugaagauc

SEQ ID NO: 840859 - RNA, 22 nt, Human
cagggagaucuuggcuccuggu

SEQ ID NO: 840860 - RNA, 22 nt, Human
aaagaauagccuuuguccaaau

SEQ ID NO: 840861 - RNA, 22 nt, Human
acauugaucagccucccaugca

SEQ ID NO: 840862 - RNA, 22 nt, Human
uuugcauaaaggagcauuucuc

SEQ ID NO: 840863 - RNA, 22 nt, Human
acccaggacacagagaugaccc

SEQ ID NO: 840864 - RNA, 22 nt, Human
ucaggagacuuaugucacagug

SEQ ID NO: 840865 - RNA, 22 nt, Human
gcaaaugcucuccuuggucagg

SEQ ID NO: 840866 - RNA, 22 nt, Human
agcugcucugauaaaccuacuu

SEQ ID NO: 840867 - RNA, 22 nt, Human
agugcuuuaccuagauaauguu

SEQ ID NO: 840868 - RNA, 22 nt, Human
cucacaggagaaagucaugguc

SEQ ID NO: 840869 - RNA, 20 nt, Human
aucagcaacugccacucagu

SEQ ID NO: 840870 - RNA, 22 nt, Human
cacauuuaauccuuuauaagua

SEQ ID NO: 840871 - RNA, 22 nt, Human
aaagguaguacuucuagaaggg

SEQ ID NO: 840872 - RNA, 22 nt, Human
uuaauuaugcaaaaggccccau

SEQ ID NO: 840873 - RNA, 22 nt, Human
aggcacugacagauucuguguc

SEQ ID NO: 840874 - RNA, 22 nt, Human
uacuacauuaauaaaacauuca

SEQ ID NO: 840875 - RNA, 22 nt, Human
ugcuuagacgucaaguacagcc

SEQ ID NO: 840876 - RNA, 22 nt, Human
uagaaagugaagguuaauuaau

SEQ ID NO: 840877 - RNA, 22 nt, Human
ucucauucauacccuacaugcu

SEQ ID NO: 840878 - RNA, 22 nt, Human
gucuaacaagcauuaggaaccc

SEQ ID NO: 840879 - RNA, 22 nt, Human
aaggcacugacugugcagggga

SEQ ID NO: 840880 - RNA, 22 nt, Human
caggggcucugagauugucuaa

SEQ ID NO: 840881 - RNA, 22 nt, Human
cuugcuggugguguuuucuaug

SEQ ID NO: 840882 - RNA, 22 nt, Human
aucuguuccccuaugcucucua

SEQ ID NO: 840883 - RNA, 22 nt, Human
auuaaagacagcagauggaugg

SEQ ID NO: 840884 - RNA, 22 nt, Human
acccaggaggcaagguugcagu

SEQ ID NO: 840885 - RNA, 20 nt, Human
ugaggcaggagaauggcaug

SEQ ID NO: 840886 - RNA, 22 nt, Human
gugcgccagcucaaggggaggc

SEQ ID NO: 840887 - RNA, 22 nt, Human
gcugagagaaaagugagguucu

SEQ ID NO: 840888 - RNA, 19 nt, Human
ccagagcccgccagauggg

SEQ ID NO: 840889 - RNA, 22 nt, Human
ccagcaccuugaucuuggaguu

SEQ ID NO: 840890 - RNA, 22 nt, Human
cugccugugccaccgccucauu

SEQ ID NO: 840891 - RNA, 22 nt, Human
gccucuggggcagcugagucau

SEQ ID NO: 840892 - RNA, 22 nt, Human
cccaggaggcagagauagcagu

SEQ ID NO: 840893 - RNA, 22 nt, Human
gaggcagcagggcugguuccuu

SEQ ID NO: 840894 - RNA, 22 nt, Human
auuccaaagccugaauaaugga

SEQ ID NO: 840895 - RNA, 22 nt, Human
cuggucugagggcucuugaggc

SEQ ID NO: 840896 - RNA, 22 nt, Human
aguacauauaguaauuuagcca

SEQ ID NO: 840897 - RNA, 22 nt, Human
cugcucugagaggcucuuccua

SEQ ID NO: 840898 - RNA, 22 nt, Human
aagggacuuugucagcuuucca

SEQ ID NO: 840899 - RNA, 22 nt, Human
cagaaauguacugacaugcagu

SEQ ID NO: 840900 - RNA, 22 nt, Human
uguauaaaccauggacagcuuu

SEQ ID NO: 840901 - RNA, 22 nt, Human
gcaacuuuagggccagcaagua

SEQ ID NO: 840902 - RNA, 22 nt, Human
ugccugucuuuccucccucgua

SEQ ID NO: 840903 - RNA, 23 nt, Human
gcugcagcuguggauguucucag

SEQ ID NO: 840904 - RNA, 22 nt, Human
acacugcagaugaaagcauaag

SEQ ID NO: 840905 - RNA, 22 nt, Human
ggagugggcagcacugcccugu

SEQ ID NO: 840906 - RNA, 22 nt, Human
ucugggggcgaccagggacugc

SEQ ID NO: 840907 - RNA, 22 nt, Human
aaacaaacaauuaguugugugg

SEQ ID NO: 840908 - RNA, 22 nt, Human
uggaggaaaaaaccaggcagag

SEQ ID NO: 840909 - RNA, 22 nt, Human
uuuuguuguaauauaccuaucc

SEQ ID NO: 840910 - RNA, 22 nt, Human
gccuucugauaucucuuggcau

SEQ ID NO: 840911 - RNA, 21 nt, Human
uuucuucacuuugccccaugu

SEQ ID NO: 840912 - RNA, 22 nt, Human
agcagccagagucugaacauua

SEQ ID NO: 840913 - RNA, 22 nt, Human
auuucaggauagccuaguuuug

SEQ ID NO: 840914 - RNA, 22 nt, Human
guuucauacagauuauucaugg

SEQ ID NO: 840915 - RNA, 22 nt, Human
ggccucugguucacagggagga

SEQ ID NO: 840916 - RNA, 22 nt, Human
ugaagcccugugucagcuucca

SEQ ID NO: 840917 - RNA, 22 nt, Human
cugagagucagcuucuccuccu

SEQ ID NO: 840918 - RNA, 22 nt, Human
ggcugugccucaaggcuacuca

SEQ ID NO: 840919 - RNA, 22 nt, Human
uggagcugagagccaggcuggc

SEQ ID NO: 840920 - RNA, 22 nt, Human
cuggagcuccagggucuccucu

SEQ ID NO: 840921 - RNA, 22 nt, Human
uagauaaauuagaaaguuuacu

SEQ ID NO: 840922 - RNA, 22 nt, Human
gucauuccuauccauuugauac

SEQ ID NO: 840923 - RNA, 22 nt, Human
cccuugcacauuugucuuuaau

SEQ ID NO: 840924 - RNA, 22 nt, Human
uuuauugcauacacaaauguca

SEQ ID NO: 840925 - RNA, 22 nt, Human
cccuggagggauuucucaauca

SEQ ID NO: 840926 - RNA, 22 nt, Human
ugaauaaucauguccauagugu

SEQ ID NO: 840927 - RNA, 22 nt, Human
agcugccaggccccugagaacc

SEQ ID NO: 840928 - RNA, 22 nt, Human
uuaaauauuauguugucugcaa

SEQ ID NO: 840929 - RNA, 22 nt, Human
ucagagugaggcccagcaaucu

SEQ ID NO: 840930 - RNA, 17 nt, Human
cuggagccuccaacucc

SEQ ID NO: 840931 - RNA, 22 nt, Human
ggccaggagaggagggcacuga

SEQ ID NO: 840932 - RNA, 22 nt, Human
acagggcagguggcuacugguc

SEQ ID NO: 840933 - RNA, 22 nt, Human
ucacuuuugaucccuaugcagu

SEQ ID NO: 840934 - RNA, 22 nt, Human
gccuggcccagggcucuuguug

SEQ ID NO: 840935 - RNA, 22 nt, Human
ugucaugcccaggagcaaggua

SEQ ID NO: 840936 - RNA, 21 nt, Human
ugcucaugcaaugcaugucca

SEQ ID NO: 840937 - RNA, 22 nt, Human
acauuucugcauguaggguaau

SEQ ID NO: 840938 - RNA, 22 nt, Human
uccuugaauccuagcauccuau

SEQ ID NO: 840939 - RNA, 22 nt, Human
caauuucauuaauagauauaga

SEQ ID NO: 840940 - RNA, 20 nt, Human
gaaaugugaccucuucugug

SEQ ID NO: 840941 - RNA, 22 nt, Human
ugcagaagcagagaguugccaa

SEQ ID NO: 840942 - RNA, 22 nt, Human
gggcagcugucuugguucucaa

SEQ ID NO: 840943 - RNA, 22 nt, Human
aucagcaucuuuaacaauuacc

SEQ ID NO: 840944 - RNA, 22 nt, Human
ucagggcaagauugguuaauaa

SEQ ID NO: 840945 - RNA, 22 nt, Human
cacaauguauauguauaucaaa

SEQ ID NO: 840946 - RNA, 20 nt, Human
uuucacaaugaacaugucuc

SEQ ID NO: 840947 - RNA, 23 nt, Human
ccugcagcugcuggggcuccacc

SEQ ID NO: 840948 - RNA, 20 nt, Human
uuuuuccuucucuacaggca

SEQ ID NO: 840949 - RNA, 22 nt, Human
aaagauuucacaucccaagccu

SEQ ID NO: 840950 - RNA, 22 nt, Human
ccacacagucaguuuccaagaa

SEQ ID NO: 840951 - RNA, 22 nt, Human
uuuagaaugugacuguauuuga

SEQ ID NO: 840952 - RNA, 17 nt, Human
gguguauggggagggaa

SEQ ID NO: 840953 - RNA, 22 nt, Human
auggccuggggagcaugggaag

SEQ ID NO: 840954 - RNA, 22 nt, Human
uuugaagucaggcuuucuaccc

SEQ ID NO: 840955 - RNA, 22 nt, Human
uuacagaaugugccauuugguc

SEQ ID NO: 840956 - RNA, 22 nt, Human
agccacagggggugagggacaa

SEQ ID NO: 840957 - RNA, 22 nt, Human
uguaccuuuuucugugcaugcu

SEQ ID NO: 840958 - RNA, 19 nt, Human
cugagagaugcuucacaca

SEQ ID NO: 840959 - RNA, 17 nt, Human
ucuguucaugcauaccu

SEQ ID NO: 840960 - RNA, 22 nt, Human
accccagcccugcuucugggag

SEQ ID NO: 840961 - RNA, 22 nt, Human
aagucacccacaggcagcagaa

SEQ ID NO: 840962 - RNA, 22 nt, Human
gagaaagauguaggcugggagg

SEQ ID NO: 840963 - RNA, 22 nt, Human
cggaggggauacauuuucugaa

SEQ ID NO: 840964 - RNA, 22 nt, Human
uauuucuguaugcauaaaagga

SEQ ID NO: 840965 - RNA, 22 nt, Human
accuuucacgguaucagacauc

SEQ ID NO: 840966 - RNA, 22 nt, Human
ccucauggaccucagacugucc

SEQ ID NO: 840967 - RNA, 22 nt, Human
ucauccaguucacauggugagu

SEQ ID NO: 840968 - RNA, 22 nt, Human
augaaauauuucagagcagagu

SEQ ID NO: 840969 - RNA, 22 nt, Human
auacauguucguguacauguuc

SEQ ID NO: 840970 - RNA, 22 nt, Human
augcugaauugaugcgagggag

SEQ ID NO: 840971 - RNA, 22 nt, Human
gauagaaagaauauagauucca

SEQ ID NO: 840972 - RNA, 22 nt, Human
ucaguagcagaaagcaaugagu

SEQ ID NO: 840973 - RNA, 22 nt, Human
uuuuccuaguaggccuauuaga

SEQ ID NO: 840974 - RNA, 23 nt, Human
aggcccugccugucccucuuuuu

SEQ ID NO: 840975 - RNA, 22 nt, Human
gccuggagacagcagaggcggc

SEQ ID NO: 840976 - RNA, 22 nt, Human
ucuggcucggauuugucuagca

SEQ ID NO: 840977 - RNA, 18 nt, Human
gcaggugccacugcuguu

SEQ ID NO: 840978 - RNA, 22 nt, Human
ucugcagcuuuuugguggggug

SEQ ID NO: 840979 - RNA, 22 nt, Human
ugaucugagagcagaucaccau

SEQ ID NO: 840980 - RNA, 22 nt, Human
cagcugccuaugaccuagccuc

SEQ ID NO: 840981 - RNA, 17 nt, Human
acacagccagguucucc

SEQ ID NO: 840982 - RNA, 22 nt, Human
agcugggaugauaaccucaguc

SEQ ID NO: 840983 - RNA, 22 nt, Human
uaacacauuuuaagccauuuua

SEQ ID NO: 840984 - RNA, 22 nt, Human
ccagagcccagggucaugcagg

SEQ ID NO: 840985 - RNA, 22 nt, Human
caugaaaucugaguauguuucc

SEQ ID NO: 840986 - RNA, 22 nt, Human
acuuucugcaguguuggaaaug

SEQ ID NO: 840987 - RNA, 22 nt, Human
gcacccaggcuugggcagcaac

SEQ ID NO: 840988 - RNA, 22 nt, Human
agagcccucuucacugccccuu

SEQ ID NO: 840989 - RNA, 19 nt, Human
acauauguggauauacaug

SEQ ID NO: 840990 - RNA, 22 nt, Human
ggagccuggccuggcucugugu

SEQ ID NO: 840991 - RNA, 22 nt, Human
acaaagguggaccauguggcuu

SEQ ID NO: 840992 - RNA, 22 nt, Human
aaugguuuucuagaacaugaaa

SEQ ID NO: 840993 - RNA, 22 nt, Human
ucagccaguuugauucuauuug

SEQ ID NO: 840994 - RNA, 22 nt, Human
gcccauggacacccaagugcca

SEQ ID NO: 840995 - RNA, 20 nt, Human
acaauagauuugagcaaagu

SEQ ID NO: 840996 - RNA, 22 nt, Human
cugcaggaauucaaagugagcu

SEQ ID NO: 840997 - RNA, 22 nt, Human
gaagcccaggcuuccuuggcuu

SEQ ID NO: 840998 - RNA, 22 nt, Human
cuggaaauuggagaugauguuu

SEQ ID NO: 840999 - RNA, 22 nt, Human
caguccuuggcuucauccgagu

SEQ ID NO: 841000 - RNA, 22 nt, Human
caaagucauggggaugcagguc

SEQ ID NO: 841001 - RNA, 22 nt, Human
guuaucaugcuucaucaucacu

SEQ ID NO: 841002 - RNA, 19 nt, Human
agauuuaccucauauaguu

SEQ ID NO: 841003 - RNA, 21 nt, Human
ccugggagaucagcugccuuc

SEQ ID NO: 841004 - RNA, 23 nt, Human
uugugggcagauuccauggggag

SEQ ID NO: 841005 - RNA, 22 nt, Human
aaguccuuguauacagaaucaa

SEQ ID NO: 841006 - RNA, 22 nt, Human
agugguaacuaaguccugcuua

SEQ ID NO: 841007 - RNA, 22 nt, Human
acauuucuuucuauucaguagc

SEQ ID NO: 841008 - RNA, 22 nt, Human
auccugggaagcugacauugaa

SEQ ID NO: 841009 - RNA, 22 nt, Human
uugcauugaucccagcuugggc

SEQ ID NO: 841010 - RNA, 22 nt, Human
agauuucccucuuguauuugca

SEQ ID NO: 841011 - RNA, 22 nt, Human
uugcauaaaagaguauaucuua

SEQ ID NO: 841012 - RNA, 22 nt, Human
auggcuuaagaaugcuuuugug

SEQ ID NO: 841013 - RNA, 22 nt, Human
auacauauaugguacuuccugg

SEQ ID NO: 841014 - RNA, 22 nt, Human
agaauaaaucaaauguccugag

SEQ ID NO: 841015 - RNA, 22 nt, Human
aucagcaagauugugucuugua

SEQ ID NO: 841016 - RNA, 22 nt, Human
cugagcugggcucucuugaggg

SEQ ID NO: 841017 - RNA, 22 nt, Human
cacacaugucucuccaugcucu

SEQ ID NO: 841018 - RNA, 22 nt, Human
agcacauucugccuugcuuugc

SEQ ID NO: 841019 - RNA, 22 nt, Human
cagcaucuaaucuucaugccgg

SEQ ID NO: 841020 - RNA, 22 nt, Human
ucuucucucauguaggagggaa

SEQ ID NO: 841021 - RNA, 22 nt, Human
acauuugaggauguuaagaaug

SEQ ID NO: 841022 - RNA, 21 nt, Human
gggugggaggacacagcaggc

SEQ ID NO: 841023 - RNA, 22 nt, Human
uaucagaaggcacauggagucu

SEQ ID NO: 841024 - RNA, 22 nt, Human
uucugucaaaugccaguagaga

SEQ ID NO: 841025 - RNA, 22 nt, Human
gcucuggguagccacugccugg

SEQ ID NO: 841026 - RNA, 22 nt, Human
uccagggccaagucauggaacc

SEQ ID NO: 841027 - RNA, 22 nt, Human
aucugucaagauagacucugca

SEQ ID NO: 841028 - RNA, 22 nt, Human
gagggcagagacagugauucac

SEQ ID NO: 841029 - RNA, 22 nt, Human
augaaaauguacauguguauaa

SEQ ID NO: 841030 - RNA, 22 nt, Human
ugugcucuggaguugccuucac

SEQ ID NO: 841031 - RNA, 22 nt, Human
acucucagaggguggcagcaau

SEQ ID NO: 841032 - RNA, 19 nt, Human
acuuucuccaggaccuguu

SEQ ID NO: 841033 - RNA, 22 nt, Human
cacugccuggaaggagagacau

SEQ ID NO: 841034 - RNA, 22 nt, Human
aaugcuagugugauauguaagg

SEQ ID NO: 841035 - RNA, 23 nt, Human
cuucucagaagucugugccagga

SEQ ID NO: 841036 - RNA, 19 nt, Human
agggagaauuccaagagga

SEQ ID NO: 841037 - RNA, 22 nt, Human
cccagcuccgagcuccgagccg

SEQ ID NO: 841038 - RNA, 22 nt, Human
uagcaucuguucuuucauuaaa

SEQ ID NO: 841039 - RNA, 22 nt, Human
aggauuuacuagcaaggauucu

SEQ ID NO: 841040 - RNA, 22 nt, Human
ucuuggagaauggcagagaagc

SEQ ID NO: 841041 - RNA, 22 nt, Human
agagccagagaccuggguucac

SEQ ID NO: 841042 - RNA, 23 nt, Human
aaauucaguccuucaacucugag

SEQ ID NO: 841043 - RNA, 18 nt, Human
uggacaggguggagaaaa

SEQ ID NO: 841044 - RNA, 22 nt, Human
ugagcuucaaaauaugugaauc

SEQ ID NO: 841045 - RNA, 22 nt, Human
ggccugucucacccccgggugc

SEQ ID NO: 841046 - RNA, 22 nt, Human
uggcagcugguacagugggucu

SEQ ID NO: 841047 - RNA, 22 nt, Human
cacaggguuguucugaggauuc

SEQ ID NO: 841048 - RNA, 20 nt, Human
caucagaaauccugacccac

SEQ ID NO: 841049 - RNA, 22 nt, Human
aagcaauaagccagauuuggau

SEQ ID NO: 841050 - RNA, 22 nt, Human
gaaagccaucuggcugcuggga

SEQ ID NO: 841051 - RNA, 22 nt, Human
cuggcagcguguuuaugaacau

SEQ ID NO: 841052 - RNA, 22 nt, Human
gguccccagcaguggcugcuuc

SEQ ID NO: 841053 - RNA, 22 nt, Human
gcugagaggcacuaucuccgga

SEQ ID NO: 841054 - RNA, 22 nt, Human
uguuuauuacaguucuuggaau

SEQ ID NO: 841055 - RNA, 22 nt, Human
augacaguucuacacuuaaucu

SEQ ID NO: 841056 - RNA, 22 nt, Human
gagaaacuuggaguuauucugg

SEQ ID NO: 841057 - RNA, 22 nt, Human
uuccaaaccucaaauaauuaau

SEQ ID NO: 841058 - RNA, 22 nt, Human
uguaaauaauuccuaggcuuuu

SEQ ID NO: 841059 - RNA, 22 nt, Human
auccuugacacacuccaguacu

SEQ ID NO: 841060 - RNA, 22 nt, Human
agcugguucagaaauuagaugg

SEQ ID NO: 841061 - RNA, 22 nt, Human
ucugccuggguguggagcagag

SEQ ID NO: 841062 - RNA, 22 nt, Human
aguggggacuuaugccagcauu

SEQ ID NO: 841063 - RNA, 17 nt, Human
uucucugagcuguauug

SEQ ID NO: 841064 - RNA, 22 nt, Human
uuucaaauagaaucuuuccaaa

SEQ ID NO: 841065 - RNA, 22 nt, Human
cagcaggguauacagggaauuu

SEQ ID NO: 841066 - RNA, 22 nt, Human
caccaggcugaaccagagggga

SEQ ID NO: 841067 - RNA, 22 nt, Human
gggccugacugagagcuccuca

SEQ ID NO: 841068 - RNA, 22 nt, Human
cugccucuccccagaguggccc

SEQ ID NO: 841069 - RNA, 22 nt, Human
aaugcugcucucauaauuauag

SEQ ID NO: 841070 - RNA, 22 nt, Human
ggccagcugggccaccaggugc

SEQ ID NO: 841071 - RNA, 22 nt, Human
cugucccuucauuauucacuac

SEQ ID NO: 841072 - RNA, 22 nt, Human
cugggguggaggagcuccccug

SEQ ID NO: 841073 - RNA, 22 nt, Human
cagagccucagaauccugugga

SEQ ID NO: 841074 - RNA, 22 nt, Human
cuugcugggguaagucugugcu

SEQ ID NO: 841075 - RNA, 21 nt, Human
cccagggaagccgcagucacc

SEQ ID NO: 841076 - RNA, 22 nt, Human
cugggccugggaggccaggucu

SEQ ID NO: 841077 - RNA, 22 nt, Human
ggccagcucugcacagcagcug

SEQ ID NO: 841078 - RNA, 21 nt, Human
agacagagugcagucuacaua

SEQ ID NO: 841079 - RNA, 22 nt, Human
uggcuggcuagugggcaggauu

SEQ ID NO: 841080 - RNA, 20 nt, Human
cugagcccccagccugcagg

SEQ ID NO: 841081 - RNA, 22 nt, Human
ccaggacagugaacauguaaga

SEQ ID NO: 841082 - RNA, 22 nt, Human
cugggcuacguguugacagcau

SEQ ID NO: 841083 - RNA, 22 nt, Human
cugcccugacugaccuuuugaa

SEQ ID NO: 841084 - RNA, 22 nt, Human
uagauuucucauucauagauug

SEQ ID NO: 841085 - RNA, 22 nt, Human
cauuuacauuuaagguuaauau

SEQ ID NO: 841086 - RNA, 22 nt, Human
auucagagcacuggguagaauu

SEQ ID NO: 841087 - RNA, 22 nt, Human
agagggagcccagucauagcug

SEQ ID NO: 841088 - RNA, 22 nt, Human
caauuuuuaaacuaugaaguug

SEQ ID NO: 841089 - RNA, 23 nt, Human
uggauaaagcugugcugcauagg

SEQ ID NO: 841090 - RNA, 22 nt, Human
gagugagggcagcaggggcugc

SEQ ID NO: 841091 - RNA, 22 nt, Human
ugggccugggcuccuguccucu

SEQ ID NO: 841092 - RNA, 22 nt, Human
gagagugaugaaugguuaaaca

SEQ ID NO: 841093 - RNA, 22 nt, Human
guuuauaaggcccaauauuucu

SEQ ID NO: 841094 - RNA, 22 nt, Human
ccaggagccacucaggcccaca

SEQ ID NO: 841095 - RNA, 22 nt, Human
ugagccuggggccugggcagcg

SEQ ID NO: 841096 - RNA, 19 nt, Human
gcacacccugcaccaccau

SEQ ID NO: 841097 - RNA, 22 nt, Human
ugaggccacuuccccacagccc

SEQ ID NO: 841098 - RNA, 22 nt, Human
ccagcugaggcagccacacagg

SEQ ID NO: 841099 - RNA, 22 nt, Human
cugccugugugugccugcagaa

SEQ ID NO: 841100 - RNA, 22 nt, Human
cugcucugaagccaggauucug

SEQ ID NO: 841101 - RNA, 22 nt, Human
cugaggcucaagggcagguggg

SEQ ID NO: 841102 - RNA, 22 nt, Human
ccuggcagcagcacaugccuuc

SEQ ID NO: 841103 - RNA, 17 nt, Human
ggccuguguggcugcag

SEQ ID NO: 841104 - RNA, 22 nt, Human
cucugggcaaguaugauagaaa

SEQ ID NO: 841105 - RNA, 22 nt, Human
ccugaggcccuggcugugcuga

SEQ ID NO: 841106 - RNA, 22 nt, Human
ggccacuccgcugcuacuggaa

SEQ ID NO: 841107 - RNA, 18 nt, Human
ugggcugccuggccucug

SEQ ID NO: 841108 - RNA, 22 nt, Human
acacagggggcauucuaggagu

SEQ ID NO: 841109 - RNA, 22 nt, Human
aggaggccgcugaugggcuccc

SEQ ID NO: 841110 - RNA, 23 nt, Human
gccugggacugguagugugaccu

SEQ ID NO: 841111 - RNA, 22 nt, Human
cccagcuccuuggaugggcagg

SEQ ID NO: 841112 - RNA, 22 nt, Human
uucagaauauuuguuuuacaug

SEQ ID NO: 841113 - RNA, 22 nt, Human
ggcuucagugagcugagcucac

SEQ ID NO: 841114 - RNA, 22 nt, Human
cagggccaugaggcacaggguc

SEQ ID NO: 841115 - RNA, 22 nt, Human
gugcugugcgcuuuuucuguau

SEQ ID NO: 841116 - RNA, 22 nt, Human
cccaggaagagugaguggcauu

SEQ ID NO: 841117 - RNA, 22 nt, Human
gaauguaauagucaguagaaca

SEQ ID NO: 841118 - RNA, 22 nt, Human
aaauuauuaugccccucuauaa

SEQ ID NO: 841119 - RNA, 22 nt, Human
aauaucuucuaaggauagaacu

SEQ ID NO: 841120 - RNA, 22 nt, Human
cuuucucugugugguaaagggc

SEQ ID NO: 841121 - RNA, 22 nt, Human
gcuuggaaguaggauugggaga

SEQ ID NO: 841122 - RNA, 18 nt, Human
aaaugcuaggcuacauga

SEQ ID NO: 841123 - RNA, 22 nt, Human
agauuccagaucccaaaaauga

SEQ ID NO: 841124 - RNA, 22 nt, Human
gcugcucuugaggggcucacug

SEQ ID NO: 841125 - RNA, 22 nt, Human
uuucauaauacuguacaugaaa

SEQ ID NO: 841126 - RNA, 22 nt, Human
acacagggaggaggugcugugc

SEQ ID NO: 841127 - RNA, 22 nt, Human
gcuucauuacugacagucugug

SEQ ID NO: 841128 - RNA, 17 nt, Human
gcugccaccuuuggagc

SEQ ID NO: 841129 - RNA, 22 nt, Human
gaagcacauggcuauagcuauu

SEQ ID NO: 841130 - RNA, 20 nt, Human
gagagcuggggaugaggcug

SEQ ID NO: 841131 - RNA, 22 nt, Human
ggaggggcagccauggaacucc

SEQ ID NO: 841132 - RNA, 22 nt, Human
guauccuuugcggaaauuucua

SEQ ID NO: 841133 - RNA, 20 nt, Human
agaguaacuggcacauaggg

SEQ ID NO: 841134 - RNA, 22 nt, Human
agaggagguccuuuucugaugu

SEQ ID NO: 841135 - RNA, 22 nt, Human
ggcucugcgcgguaaagugacu

SEQ ID NO: 841136 - RNA, 22 nt, Human
uuuggacaaguuacugguuucc

SEQ ID NO: 841137 - RNA, 22 nt, Human
ccuggggagaagagcuuccccc

SEQ ID NO: 841138 - RNA, 22 nt, Human
ccuuccuggcuguccgccugau

SEQ ID NO: 841139 - RNA, 22 nt, Human
gcaguucuacuuauccauagac

SEQ ID NO: 841140 - RNA, 22 nt, Human
ccucaggggugcccacagcugc

SEQ ID NO: 841141 - RNA, 22 nt, Human
guuugcauuuauuagucuucug

SEQ ID NO: 841142 - RNA, 22 nt, Human
gcaaacaagcugccugaagauu

SEQ ID NO: 841143 - RNA, 23 nt, Human
aggagaagagauuuccacaugca

SEQ ID NO: 841144 - RNA, 22 nt, Human
acccaggaggugacacagggcu

SEQ ID NO: 841145 - RNA, 22 nt, Human
uggcagcuggaucccaaggcag

SEQ ID NO: 841146 - RNA, 22 nt, Human
ucuuugaauuucugacugucuu

SEQ ID NO: 841147 - RNA, 22 nt, Human
acauuccaaaaacuagcagaua

SEQ ID NO: 841148 - RNA, 22 nt, Human
caggauccuggcugcauggacg

SEQ ID NO: 841149 - RNA, 22 nt, Human
agcagcugcagggagggucugc

SEQ ID NO: 841150 - RNA, 21 nt, Human
cucacaggaugcaguguuacu

SEQ ID NO: 841151 - RNA, 22 nt, Human
agaaaucugacugcugugcaca

SEQ ID NO: 841152 - RNA, 22 nt, Human
ucccaggacaugggcucugcuc

SEQ ID NO: 841153 - RNA, 22 nt, Human
cagagguagaaggcaugcagug

SEQ ID NO: 841154 - RNA, 22 nt, Human
cagggccacccucugcugggug

SEQ ID NO: 841155 - RNA, 22 nt, Human
ucaaugaugcugaagguagcgu

SEQ ID NO: 841156 - RNA, 22 nt, Human
gcuggccauggggagugaggag

SEQ ID NO: 841157 - RNA, 22 nt, Human
gccuggcaaggcccuguugacu

SEQ ID NO: 841158 - RNA, 22 nt, Human
ugccuaggaaaccucaugcuuc

SEQ ID NO: 841159 - RNA, 22 nt, Human
auggaaagcuaagccauuuacc

SEQ ID NO: 841160 - RNA, 22 nt, Human
uggcuggggccugaauccugca

SEQ ID NO: 841161 - RNA, 22 nt, Human
ucaaauaaugccauucaucauc

SEQ ID NO: 841162 - RNA, 22 nt, Human
aagcagcugauuucacagcuca

SEQ ID NO: 841163 - RNA, 22 nt, Human
aacucaguucuuuccacaaugc

SEQ ID NO: 841164 - RNA, 22 nt, Human
aagcaauagcaacaacuuuaca

SEQ ID NO: 841165 - RNA, 22 nt, Human
aaggcccuggccccagcuucuu

SEQ ID NO: 841166 - RNA, 22 nt, Human
ugcugccuugaccuccugggcu

SEQ ID NO: 841167 - RNA, 22 nt, Human
uucugggacaucuggacaguuu

SEQ ID NO: 841168 - RNA, 22 nt, Human
cuuaacagcaagaucuguguca

SEQ ID NO: 841169 - RNA, 22 nt, Human
uuucugaaaucucuuuugagga

SEQ ID NO: 841170 - RNA, 22 nt, Human
uggagucugugaugcucugggu

SEQ ID NO: 841171 - RNA, 22 nt, Human
acaguaauauugaugcucguca

SEQ ID NO: 841172 - RNA, 23 nt, Human
uggcucagcuaguuuuccauuuc

SEQ ID NO: 841173 - RNA, 22 nt, Human
agcagcugucccuuaacaucag

SEQ ID NO: 841174 - RNA, 22 nt, Human
uaacagaaaggcucaggugcuc

SEQ ID NO: 841175 - RNA, 22 nt, Human
guggccaggacauugccaggca

SEQ ID NO: 841176 - RNA, 22 nt, Human
gccuggagagcacugugcgcuu

SEQ ID NO: 841177 - RNA, 22 nt, Human
gagaaagacguaggcugggagg

SEQ ID NO: 841178 - RNA, 22 nt, Human
gcacaauaauuuuuuuaagagg

SEQ ID NO: 841179 - RNA, 22 nt, Human
agagaagacuuacagccacagu

SEQ ID NO: 841180 - RNA, 22 nt, Human
caggcugggaacgccacccgcu

SEQ ID NO: 841181 - RNA, 22 nt, Human
uaaauguguuguggaugaaguu

SEQ ID NO: 841182 - RNA, 22 nt, Human
guggccuggaguuugauguagg

SEQ ID NO: 841183 - RNA, 22 nt, Human
uuggaucagaugauaucuuugu

SEQ ID NO: 841184 - RNA, 22 nt, Human
aucugguuuggggauccuugug

SEQ ID NO: 841185 - RNA, 22 nt, Human
ggaggaugagcuacgaggagcu

SEQ ID NO: 841186 - RNA, 22 nt, Human
cucaggcccacagcagacccac

SEQ ID NO: 841187 - RNA, 22 nt, Human
ucagccugcgucauggugacac

SEQ ID NO: 841188 - RNA, 22 nt, Human
cugguccuccuugccuucagau

SEQ ID NO: 841189 - RNA, 22 nt, Human
agcccucauggaacagcuccua

SEQ ID NO: 841190 - RNA, 22 nt, Human
gcagaaggucuggcacuucagg

SEQ ID NO: 841191 - RNA, 22 nt, Human
cugggagagaagcgaagcuggg

SEQ ID NO: 841192 - RNA, 20 nt, Human
gauuucaaagcagaguggcc

SEQ ID NO: 841193 - RNA, 19 nt, Human
aaacacagauuucuuacca

SEQ ID NO: 841194 - RNA, 22 nt, Human
aaucagcuaaauaaacuaguca

SEQ ID NO: 841195 - RNA, 22 nt, Human
auuucaacacuuuuggaauuag

SEQ ID NO: 841196 - RNA, 22 nt, Human
ggagaggauguuuuaguaacuu

SEQ ID NO: 841197 - RNA, 22 nt, Human
uucauaaucaccaaaaacugga

SEQ ID NO: 841198 - RNA, 22 nt, Human
gagcuuccacucuagaaggagu

SEQ ID NO: 841199 - RNA, 22 nt, Human
gaggcugcuguuagcccugggc

SEQ ID NO: 841200 - RNA, 22 nt, Human
ucauagaagcaccagaagauau

SEQ ID NO: 841201 - RNA, 22 nt, Human
gcccugagggguggugucugua

SEQ ID NO: 841202 - RNA, 22 nt, Human
augaagcugaaaaaggcauaua

SEQ ID NO: 841203 - RNA, 22 nt, Human
cucugggcaggaccaguggacc

SEQ ID NO: 841204 - RNA, 22 nt, Human
uuugcaaagaaauuauugcugu

SEQ ID NO: 841205 - RNA, 22 nt, Human
ccaaggagaaaugcugugcuuu

SEQ ID NO: 841206 - RNA, 22 nt, Human
ucacagugaugacgugggagca

SEQ ID NO: 841207 - RNA, 22 nt, Human
gauaaaauucuuauuuuacccg

SEQ ID NO: 841208 - RNA, 22 nt, Human
uuuaagauucaguaaggcaaac

SEQ ID NO: 841209 - RNA, 22 nt, Human
agagccagccuucucagcuuac

SEQ ID NO: 841210 - RNA, 22 nt, Human
caugggcucuucuggacugcac

SEQ ID NO: 841211 - RNA, 22 nt, Human
augguuuuguccucuuugguuc

SEQ ID NO: 841212 - RNA, 22 nt, Human
augcauaauguauguauugacu

SEQ ID NO: 841213 - RNA, 23 nt, Human
gugcaugugucuuuacaguagca

SEQ ID NO: 841214 - RNA, 22 nt, Human
ggcaugcugcguacagaugaac

SEQ ID NO: 841215 - RNA, 22 nt, Human
gcguggugcugcccugcacaca

SEQ ID NO: 841216 - RNA, 22 nt, Human
uauucacaggcuggagugaugu

SEQ ID NO: 841217 - RNA, 22 nt, Human
aaggcagcaugaaucccuguac

SEQ ID NO: 841218 - RNA, 22 nt, Human
ggagauagacuuggugagccac

SEQ ID NO: 841219 - RNA, 22 nt, Human
aggccuggugaaugaaguaucu

SEQ ID NO: 841220 - RNA, 22 nt, Human
acaguaauaaguguuggugagg

SEQ ID NO: 841221 - RNA, 22 nt, Human
cuaaaugacuuccagugguuau

SEQ ID NO: 841222 - RNA, 22 nt, Human
aggccagcuuccagaggggcag

SEQ ID NO: 841223 - RNA, 22 nt, Human
cucacaggcaucucaucaggcu

SEQ ID NO: 841224 - RNA, 22 nt, Human
augcuguggaugccuugcccca

SEQ ID NO: 841225 - RNA, 22 nt, Human
cugggcugucaauggcccucug

SEQ ID NO: 841226 - RNA, 22 nt, Human
ugaugggaaaaugaggccuggg

SEQ ID NO: 841227 - RNA, 22 nt, Human
ucuggccagugaaaugcagaau

SEQ ID NO: 841228 - RNA, 22 nt, Human
gcagcagaugcuuucauggaca

SEQ ID NO: 841229 - RNA, 22 nt, Human
ucucaguguguuuucucucaga

SEQ ID NO: 841230 - RNA, 22 nt, Human
aauccagguggcggagguugug

SEQ ID NO: 841231 - RNA, 22 nt, Human
ccugccaggcuuugggcuucug

SEQ ID NO: 841232 - RNA, 22 nt, Human
uguauacauuuaacuagauaga

SEQ ID NO: 841233 - RNA, 22 nt, Human
aacagcauaaguauuuauuuca

SEQ ID NO: 841234 - RNA, 22 nt, Human
ggugaagguggaacgcagagca

SEQ ID NO: 841235 - RNA, 22 nt, Human
ugagaauuuuuugucaugcauu

SEQ ID NO: 841236 - RNA, 23 nt, Human
ggccuguguuuugucugaaguac

SEQ ID NO: 841237 - RNA, 22 nt, Human
uggccugggucacaccaggguc

SEQ ID NO: 841238 - RNA, 22 nt, Human
ccauuugucaccucugcacucc

SEQ ID NO: 841239 - RNA, 22 nt, Human
uggggcuguccuuagucugaga

SEQ ID NO: 841240 - RNA, 17 nt, Human
acacagggagagggagc

SEQ ID NO: 841241 - RNA, 22 nt, Human
ggcgcuggccacgguggcucug

SEQ ID NO: 841242 - RNA, 22 nt, Human
auugaaagcacaaagaacaagu

SEQ ID NO: 841243 - RNA, 22 nt, Human
agucauauguggcauuuucuaa

SEQ ID NO: 841244 - RNA, 22 nt, Human
aagccaggaagagagccuucac

SEQ ID NO: 841245 - RNA, 17 nt, Human
gccaaaggguuccaauc

SEQ ID NO: 841246 - RNA, 22 nt, Human
ugucugucugcaagccagaaag

SEQ ID NO: 841247 - RNA, 22 nt, Human
agcuggggcugcagagaacagg

SEQ ID NO: 841248 - RNA, 22 nt, Human
auuuccaggagaaaggauuuua

SEQ ID NO: 841249 - RNA, 22 nt, Human
ccuccagcgcgauccacuccgg

SEQ ID NO: 841250 - RNA, 23 nt, Human
ucuggcuccauccuuggggaucc

SEQ ID NO: 841251 - RNA, 22 nt, Human
cugccucuggccucaggcccag

SEQ ID NO: 841252 - RNA, 22 nt, Human
cugggcucagaugagaggaagg

SEQ ID NO: 841253 - RNA, 22 nt, Human
ggaguaggaguagaacucauca

SEQ ID NO: 841254 - RNA, 22 nt, Human
ugagccagaggaggcugugugg

SEQ ID NO: 841255 - RNA, 18 nt, Human
uugcuuuguaagcuugca

SEQ ID NO: 841256 - RNA, 22 nt, Human
ucucucagcuuugagaccugcu

SEQ ID NO: 841257 - RNA, 22 nt, Human
cccagcuccuuacagggccgaa

SEQ ID NO: 841258 - RNA, 22 nt, Human
ugacacagauuagagacauacc

SEQ ID NO: 841259 - RNA, 22 nt, Human
uuauuugcccauguuuagcaga

SEQ ID NO: 841260 - RNA, 22 nt, Human
ggguccagcuacaucagggugg

SEQ ID NO: 841261 - RNA, 22 nt, Human
cugcugugccucuuuucacgug

SEQ ID NO: 841262 - RNA, 22 nt, Human
uggcuuccuggacagaugcggu

SEQ ID NO: 841263 - RNA, 22 nt, Human
uugcuuccucgaggccagcgug

SEQ ID NO: 841264 - RNA, 18 nt, Human
cucugucauaagugucau

SEQ ID NO: 841265 - RNA, 22 nt, Human
aaggcacuugcccagagcugca

SEQ ID NO: 841266 - RNA, 22 nt, Human
ucauuuguaccauuuuuuaaga

SEQ ID NO: 841267 - RNA, 22 nt, Human
ugcagcauucuuggccacuacu

SEQ ID NO: 841268 - RNA, 22 nt, Human
aucaaaguggaaguuuacuagg

SEQ ID NO: 841269 - RNA, 21 nt, Human
gcugcccaacccugcaucucc

SEQ ID NO: 841270 - RNA, 22 nt, Human
uauacagauggaaagauacaca

SEQ ID NO: 841271 - RNA, 22 nt, Human
uacccaggagaaacagcagggc

SEQ ID NO: 841272 - RNA, 22 nt, Human
cccaggaguuggaggcuacggu

SEQ ID NO: 841273 - RNA, 22 nt, Human
caugcuuuaccaaagcagugau

SEQ ID NO: 841274 - RNA, 18 nt, Human
uggcagcuagguaaagaa

SEQ ID NO: 841275 - RNA, 22 nt, Human
auccuucaaggggcugacagcu

SEQ ID NO: 841276 - RNA, 22 nt, Human
ucuuuacaguccucugucaauc

SEQ ID NO: 841277 - RNA, 22 nt, Human
aggcccuggcacugccugggag

SEQ ID NO: 841278 - RNA, 22 nt, Human
cagccagagaaagggcacugcc

SEQ ID NO: 841279 - RNA, 22 nt, Human
cuggcaguguccagcucgugau

SEQ ID NO: 841280 - RNA, 22 nt, Human
gccaggagcccugggcaaguuc

SEQ ID NO: 841281 - RNA, 22 nt, Human
agggggugcuacuuccagaguu

SEQ ID NO: 841282 - RNA, 22 nt, Human
gaagcuucguggcucuucaaau

SEQ ID NO: 841283 - RNA, 22 nt, Human
auuuguagugaagugaaaauaa

SEQ ID NO: 841284 - RNA, 19 nt, Human
acuggcaguuucugcaugg

SEQ ID NO: 841285 - RNA, 22 nt, Human
aucuggcuugacuuugcgacuu

SEQ ID NO: 841286 - RNA, 22 nt, Human
uucacagggcagcagcugagcc

SEQ ID NO: 841287 - RNA, 22 nt, Human
cuggcucaggguggucuggguc

SEQ ID NO: 841288 - RNA, 17 nt, Human
cuuuuaauuuacuuccc

SEQ ID NO: 841289 - RNA, 22 nt, Human
uaggcagcauggauucugaaua

SEQ ID NO: 841290 - RNA, 22 nt, Human
aagggcaggcacccacccucac

SEQ ID NO: 841291 - RNA, 22 nt, Human
gccucaggacuggcauacucau

SEQ ID NO: 841292 - RNA, 22 nt, Human
ggcuuccuaauacucccuacac

SEQ ID NO: 841293 - RNA, 22 nt, Human
ccugagggaaggaugcuaccca

SEQ ID NO: 841294 - RNA, 22 nt, Human
ggcucugcccagaugaagagga

SEQ ID NO: 841295 - RNA, 22 nt, Human
aaugggaggauuuucucucuug

SEQ ID NO: 841296 - RNA, 22 nt, Human
ucaaaguuuguggcaauuuauu

SEQ ID NO: 841297 - RNA, 22 nt, Human
uggagugaaguaaagaggacaa

SEQ ID NO: 841298 - RNA, 22 nt, Human
ggagagcaggguccugagauac

SEQ ID NO: 841299 - RNA, 22 nt, Human
gaggcugcugagagcccuguuu

SEQ ID NO: 841300 - RNA, 22 nt, Human
aagacuuucucccaaauccuca

SEQ ID NO: 841301 - RNA, 22 nt, Human
gcugaagcugcagcaggaggaa

SEQ ID NO: 841302 - RNA, 22 nt, Human
guccucagggaauguggcgggu

SEQ ID NO: 841303 - RNA, 22 nt, Human
ugcuggcugggcugcuggagac

SEQ ID NO: 841304 - RNA, 19 nt, Human
agccuggagggcuggucac

SEQ ID NO: 841305 - RNA, 22 nt, Human
agagucugaggcagcugcagcc

SEQ ID NO: 841306 - RNA, 23 nt, Human
ucacagggcacuggcugggguug

SEQ ID NO: 841307 - RNA, 22 nt, Human
uggcugggccgggccuugugcc

SEQ ID NO: 841308 - RNA, 22 nt, Human
aggucagcaggccaggggcgaa

SEQ ID NO: 841309 - RNA, 22 nt, Human
ccucucucuccugcacacacac

SEQ ID NO: 841310 - RNA, 19 nt, Human
cugugcuuuaaacuccuau

SEQ ID NO: 841311 - RNA, 22 nt, Human
accucccagcucugagcuuggg

SEQ ID NO: 841312 - RNA, 22 nt, Human
gacagaguuguugauguaugcu

SEQ ID NO: 841313 - RNA, 22 nt, Human
gagaggagguggcuaugacagc

SEQ ID NO: 841314 - RNA, 22 nt, Human
gccuucugcgcucgugucuccg

SEQ ID NO: 841315 - RNA, 22 nt, Human
uugcagggcaggaccauggaca

SEQ ID NO: 841316 - RNA, 22 nt, Human
aagguacaguuuuaagaauaag

SEQ ID NO: 841317 - RNA, 22 nt, Human
ugcacacacgcggcacaucugu

SEQ ID NO: 841318 - RNA, 22 nt, Human
uuuucauuguuccucgagcauu

SEQ ID NO: 841319 - RNA, 22 nt, Human
uguucuuuggcuucacagcucu

SEQ ID NO: 841320 - RNA, 22 nt, Human
acagccagaggugguccugggu

SEQ ID NO: 841321 - RNA, 23 nt, Human
acagagguccaaacaguauaagc

SEQ ID NO: 841322 - RNA, 20 nt, Human
ccagagcagccacugaaguu

SEQ ID NO: 841323 - RNA, 22 nt, Human
agggagcugagcugugagcagc

SEQ ID NO: 841324 - RNA, 22 nt, Human
ucacugcucagucuguacuaca

SEQ ID NO: 841325 - RNA, 22 nt, Human
aguggggaagagcaugggcccu

SEQ ID NO: 841326 - RNA, 22 nt, Human
ucugcagguguuggaaggguca

SEQ ID NO: 841327 - RNA, 23 nt, Human
ggcuggcccggggcugcuccuga

SEQ ID NO: 841328 - RNA, 22 nt, Human
cuuaagauuugagauaccuaau

SEQ ID NO: 841329 - RNA, 22 nt, Human
cugggagauugcuagagaugca

SEQ ID NO: 841330 - RNA, 23 nt, Human
ugucauugugacuacagaaccag

SEQ ID NO: 841331 - RNA, 22 nt, Human
aaucuagucuccuuaagucuuu

SEQ ID NO: 841332 - RNA, 22 nt, Human
cauugcacucuggcuggaacgg

SEQ ID NO: 841333 - RNA, 22 nt, Human
guauucuugguuaucaaaauac

SEQ ID NO: 841334 - RNA, 22 nt, Human
uuuacagaugaggaaacugaga

SEQ ID NO: 841335 - RNA, 22 nt, Human
cccaccccuggacaggugagug

SEQ ID NO: 841336 - RNA, 22 nt, Human
gccaggcuguggggaacuugaa

SEQ ID NO: 841337 - RNA, 22 nt, Human
acagcacaaucugagucccaga

SEQ ID NO: 841338 - RNA, 22 nt, Human
ggcaccagccaccuauuucuag

SEQ ID NO: 841339 - RNA, 22 nt, Human
ugaaaugauguacaagaaggca

SEQ ID NO: 841340 - RNA, 22 nt, Human
cuguacaggugaggagggggcu

SEQ ID NO: 841341 - RNA, 22 nt, Human
uugggcaaaguguuucuggagc

SEQ ID NO: 841342 - RNA, 22 nt, Human
aaugcacacauuugguacugaa

SEQ ID NO: 841343 - RNA, 22 nt, Human
uccagggaagagcagaggcuac

SEQ ID NO: 841344 - RNA, 22 nt, Human
ccugucuguaucgguucagagu

SEQ ID NO: 841345 - RNA, 20 nt, Human
uguacacaguacuuuacaau

SEQ ID NO: 841346 - RNA, 17 nt, Human
aggugcagaggcagagc

SEQ ID NO: 841347 - RNA, 22 nt, Human
cagggagaggcaucauagggaa

SEQ ID NO: 841348 - RNA, 22 nt, Human
ggcagcauauauucagugggca

SEQ ID NO: 841349 - RNA, 22 nt, Human
gcaggaugggagcuucacuuug

SEQ ID NO: 841350 - RNA, 22 nt, Human
acagggccaggugagaggugcu

SEQ ID NO: 841351 - RNA, 22 nt, Human
caguaaauuaucucaucucugu

SEQ ID NO: 841352 - RNA, 22 nt, Human
uccagggacacagaguccuucu

SEQ ID NO: 841353 - RNA, 22 nt, Human
ggccagcuuugagcugcaggaa

SEQ ID NO: 841354 - RNA, 22 nt, Human
ggaugggagcagaggacgacca

SEQ ID NO: 841355 - RNA, 22 nt, Human
uuauacaguuuauacuuagaau

SEQ ID NO: 841356 - RNA, 22 nt, Human
auugacaauuagcccuuaggug

SEQ ID NO: 841357 - RNA, 22 nt, Human
ugugacaucgcugugucuguuu

SEQ ID NO: 841358 - RNA, 22 nt, Human
caagaaucaacauuauuuagug

SEQ ID NO: 841359 - RNA, 22 nt, Human
cuggccucaccucagacuuacu

SEQ ID NO: 841360 - RNA, 22 nt, Human
gggggcuggaauauccaucaac

SEQ ID NO: 841361 - RNA, 22 nt, Human
ggccagagaauaugccuuacgu

SEQ ID NO: 841362 - RNA, 22 nt, Human
ucuccuggauggaccuucucuu

SEQ ID NO: 841363 - RNA, 22 nt, Human
agugaaaugauucugagcaaga

SEQ ID NO: 841364 - RNA, 22 nt, Human
aacaucuacuaagugccaggca

SEQ ID NO: 841365 - RNA, 22 nt, Human
ucuguaucuaauuuuacaguag

SEQ ID NO: 841366 - RNA, 22 nt, Human
acagagccuccaggagugcugg

SEQ ID NO: 841367 - RNA, 22 nt, Human
gucacagaguuauuaauugugu

SEQ ID NO: 841368 - RNA, 18 nt, Human
auagaaaccuuuaaucag

SEQ ID NO: 841369 - RNA, 22 nt, Human
gcaggccuccccugcuggagcu

SEQ ID NO: 841370 - RNA, 20 nt, Human
ugcucugucuaaaacuuccc

SEQ ID NO: 841371 - RNA, 22 nt, Human
cacucugcagcugaagggcugg

SEQ ID NO: 841372 - RNA, 22 nt, Human
gggcaugguggugcacaccugu

SEQ ID NO: 841373 - RNA, 22 nt, Human
uacaaaaguaauuacgguuuuu

SEQ ID NO: 841374 - RNA, 21 nt, Human
uucuuuccccagaggacuaaa

SEQ ID NO: 841375 - RNA, 23 nt, Human
gccuggagaaaagcugcaguuca

SEQ ID NO: 841376 - RNA, 21 nt, Human
acagagccgggcacaaagcug

SEQ ID NO: 841377 - RNA, 22 nt, Human
auccuuaguuaagaacaggagu

SEQ ID NO: 841378 - RNA, 22 nt, Human
aaagccuugagauccuauaguu

SEQ ID NO: 841379 - RNA, 22 nt, Human
aaguucaaggcagguccugagg

SEQ ID NO: 841380 - RNA, 22 nt, Human
aggaagcugccugggaugggaa

SEQ ID NO: 841381 - RNA, 22 nt, Human
ucagagcuaaggggagagcaaa

SEQ ID NO: 841382 - RNA, 22 nt, Human
gagggcugauaacaggaauaca

SEQ ID NO: 841383 - RNA, 22 nt, Human
uggcucaguuugggggauugaa

SEQ ID NO: 841384 - RNA, 22 nt, Human
aggcucagauccuuguguccug

SEQ ID NO: 841385 - RNA, 20 nt, Human
gugccuggagaagaggcugu

SEQ ID NO: 841386 - RNA, 22 nt, Human
gaaacugugaggaucuuaacuu

SEQ ID NO: 841387 - RNA, 22 nt, Human
uaacaucuuuagcagcucgaac

SEQ ID NO: 841388 - RNA, 22 nt, Human
uucugucaaacucacaggccga

SEQ ID NO: 841389 - RNA, 22 nt, Human
uauuuugagguauuuuugagcu

SEQ ID NO: 841390 - RNA, 22 nt, Human
uaguaaaaguuuaguugaaagu

SEQ ID NO: 841391 - RNA, 22 nt, Human
cacacaggaugaagcagcagaa

SEQ ID NO: 841392 - RNA, 22 nt, Human
ucuugccucuuccccuuuccau

SEQ ID NO: 841393 - RNA, 22 nt, Human
cccagcuugcccaggacugagg

SEQ ID NO: 841394 - RNA, 22 nt, Human
ugaaggaaugaguauacuguuu

SEQ ID NO: 841395 - RNA, 22 nt, Human
uucucuuagcuguaaagucaau

SEQ ID NO: 841396 - RNA, 22 nt, Human
uguucauaucauuuugaaagcu

SEQ ID NO: 841397 - RNA, 22 nt, Human
aagcuggagaguuaggugaaua

SEQ ID NO: 841398 - RNA, 22 nt, Human
aaggcugaggagggccugcagg

SEQ ID NO: 841399 - RNA, 22 nt, Human
gcccaggaaauaaaagugggcu

SEQ ID NO: 841400 - RNA, 21 nt, Human
ccaggcagagcugugaguucu

SEQ ID NO: 841401 - RNA, 22 nt, Human
guaucuuuccacaucuucagua

SEQ ID NO: 841402 - RNA, 22 nt, Human
cugaaggagcauagucaguuuu

SEQ ID NO: 841403 - RNA, 22 nt, Human
agcagccaaaugaagauuuuac

SEQ ID NO: 841404 - RNA, 16 nt, Human
agaggccuugaggaag

SEQ ID NO: 841405 - RNA, 22 nt, Human
acaauauuguacccagaaguuu

SEQ ID NO: 841406 - RNA, 22 nt, Human
uuauuauaaugagggauaaaaa

SEQ ID NO: 841407 - RNA, 22 nt, Human
gcugggaggaauuuggggaaua

SEQ ID NO: 841408 - RNA, 22 nt, Human
agcagcauuaugauauaucuua

SEQ ID NO: 841409 - RNA, 22 nt, Human
ugggagaagcagcagccaagug

SEQ ID NO: 841410 - RNA, 22 nt, Human
ucuguccucuuugaagcugcuc

SEQ ID NO: 841411 - RNA, 22 nt, Human
caaaugcauaguuuauaagaag

SEQ ID NO: 841412 - RNA, 23 nt, Human
aggauuuaaaggcaaugcauuuu

SEQ ID NO: 841413 - RNA, 22 nt, Human
cuuuggcaugguccucacuaua

SEQ ID NO: 841414 - RNA, 22 nt, Human
cauuuauuggcauguaguaggu

SEQ ID NO: 841415 - RNA, 22 nt, Human
uguaggacauguacuuguaaca

SEQ ID NO: 841416 - RNA, 22 nt, Human
ucagaauuagagcucuucuuga

SEQ ID NO: 841417 - RNA, 22 nt, Human
auaaggcagaaaugauucuagu

SEQ ID NO: 841418 - RNA, 21 nt, Human
ucuccaguauccuucucugag

SEQ ID NO: 841419 - RNA, 22 nt, Human
ggcucuggguucugcaaugcgu

SEQ ID NO: 841420 - RNA, 22 nt, Human
aucaguuauuuuuaagcuauaa

SEQ ID NO: 841421 - RNA, 22 nt, Human
aguacagaccugucucuuccug

SEQ ID NO: 841422 - RNA, 22 nt, Human
ccuguucauuuuuugacucugc

SEQ ID NO: 841423 - RNA, 20 nt, Human
aguagcagugugacauugac

SEQ ID NO: 841424 - RNA, 16 nt, Human
uggaaggggucuccgg

SEQ ID NO: 841425 - RNA, 22 nt, Human
ucucagagggaggauuacugcc

SEQ ID NO: 841426 - RNA, 22 nt, Human
ugagccuguccugugcauguga

SEQ ID NO: 841427 - RNA, 22 nt, Human
uuucuguaaggacuuaaugcaa

SEQ ID NO: 841428 - RNA, 22 nt, Human
ccucagagguuuucauucugua

SEQ ID NO: 841429 - RNA, 22 nt, Human
gaaggagggugcggaucugagc

SEQ ID NO: 841430 - RNA, 22 nt, Human
cagugcuccugauguacccuug

SEQ ID NO: 841431 - RNA, 22 nt, Human
agcacuuuccuggcaaaugugg

SEQ ID NO: 841432 - RNA, 22 nt, Human
ggcugggcaaacaagacucuuc

SEQ ID NO: 841433 - RNA, 22 nt, Human
cuggccagacuacacaugugug

SEQ ID NO: 841434 - RNA, 22 nt, Human
gagagcugcaagguagggcggg

SEQ ID NO: 841435 - RNA, 22 nt, Human
acagagguguguguaggacagu

SEQ ID NO: 841436 - RNA, 22 nt, Human
ucaguuuuuaagaguuaugcga

SEQ ID NO: 841437 - RNA, 22 nt, Human
accuuuuuucagaacucuaaag

SEQ ID NO: 841438 - RNA, 18 nt, Human
ccauuucaugauuauuac

SEQ ID NO: 841439 - RNA, 22 nt, Human
cuccuucccuucaaguguuccu

SEQ ID NO: 841440 - RNA, 22 nt, Human
aaauggauggaaagcaauuuuu

SEQ ID NO: 841441 - RNA, 22 nt, Human
cugugauuguuaguuccuauac

SEQ ID NO: 841442 - RNA, 22 nt, Human
gaugaagccugacuucucggug

SEQ ID NO: 841443 - RNA, 22 nt, Human
auacagaagaccccuccgucau

SEQ ID NO: 841444 - RNA, 22 nt, Human
uacaucauaauaauacuuagaa

SEQ ID NO: 841445 - RNA, 22 nt, Human
cuugaaagucacaugcagcccu

SEQ ID NO: 841446 - RNA, 22 nt, Human
gcagagccagaauggccaggac

SEQ ID NO: 841447 - RNA, 22 nt, Human
ggaggaggggugacugaaugcu

SEQ ID NO: 841448 - RNA, 22 nt, Human
ugcuuuauuuauaaaauagcaa

SEQ ID NO: 841449 - RNA, 21 nt, Human
caugaagccgguucccuguuu

SEQ ID NO: 841450 - RNA, 22 nt, Human
gccagcuggagacuggcagggg

SEQ ID NO: 841451 - RNA, 22 nt, Human
aagcugccuagaguugaauguc

SEQ ID NO: 841452 - RNA, 22 nt, Human
aggcuauuuccacucuucucau

SEQ ID NO: 841453 - RNA, 22 nt, Human
gaauuucaggacaacuggaagg

SEQ ID NO: 841454 - RNA, 22 nt, Human
gaauuucaaaagccagaacggg

SEQ ID NO: 841455 - RNA, 22 nt, Human
ucagaggaauaaugcugcauuu

SEQ ID NO: 841456 - RNA, 22 nt, Human
gaguggagcaaaagagguagau

SEQ ID NO: 841457 - RNA, 22 nt, Human
cccugcagccggccagcucauu

SEQ ID NO: 841458 - RNA, 22 nt, Human
aaugggagguaguaugggaggu

SEQ ID NO: 841459 - RNA, 22 nt, Human
ugucaugccauuuaaaauguuu

SEQ ID NO: 841460 - RNA, 22 nt, Human
auguaucaauuaucugucugca

SEQ ID NO: 841461 - RNA, 22 nt, Human
cucaguuucugacauuaaaauc

SEQ ID NO: 841462 - RNA, 22 nt, Human
agggaauguagcaagaugccaa

SEQ ID NO: 841463 - RNA, 22 nt, Human
gguggcagaggugcaucagccc

SEQ ID NO: 841464 - RNA, 22 nt, Human
gguacaauccacuguggguuag

SEQ ID NO: 841465 - RNA, 22 nt, Human
ccagagccuaagaucugauccu

SEQ ID NO: 841466 - RNA, 22 nt, Human
ucagagcugcccaugcaagggg

SEQ ID NO: 841467 - RNA, 22 nt, Human
ugaaugaacuaaaucauaguuc

SEQ ID NO: 841468 - RNA, 19 nt, Human
agcagcuggagguggagug

SEQ ID NO: 841469 - RNA, 22 nt, Human
ugaucugaaggacaugggaccc

SEQ ID NO: 841470 - RNA, 22 nt, Human
gcacaauuauuuaugcaguaug

SEQ ID NO: 841471 - RNA, 20 nt, Human
ggcagcucacuacuuucugu

SEQ ID NO: 841472 - RNA, 22 nt, Human
aucauucugauggucaaugcua

SEQ ID NO: 841473 - RNA, 22 nt, Human
gagugcaucguggccauuuuaa

SEQ ID NO: 841474 - RNA, 23 nt, Human
agagcuuagggaauucacaugag

SEQ ID NO: 841475 - RNA, 22 nt, Human
uugcaaaagccgaggcacucca

SEQ ID NO: 841476 - RNA, 22 nt, Human
uagggauguggugagaacugag

SEQ ID NO: 841477 - RNA, 22 nt, Human
gcauccagucuuggcuccugga

SEQ ID NO: 841478 - RNA, 22 nt, Human
guuaggcaaauaacuguggagc

SEQ ID NO: 841479 - RNA, 22 nt, Human
uuuucagugggcaaugauguga

SEQ ID NO: 841480 - RNA, 22 nt, Human
ucaauauauuccauguuuucuc

SEQ ID NO: 841481 - RNA, 22 nt, Human
augccuggacugacaugcacug

SEQ ID NO: 841482 - RNA, 23 nt, Human
agccacuucuaucuugcuccugg

SEQ ID NO: 841483 - RNA, 22 nt, Human
cauugaaaccuaacauaggcug

SEQ ID NO: 841484 - RNA, 22 nt, Human
caaggccugccucuggcagaaa

SEQ ID NO: 841485 - RNA, 22 nt, Human
acaugcuucauauuauaaccaa

SEQ ID NO: 841486 - RNA, 22 nt, Human
cuggggcugcggacgggagccc

SEQ ID NO: 841487 - RNA, 22 nt, Human
aggggcugccuggcuuggcacu

SEQ ID NO: 841488 - RNA, 22 nt, Human
cauguacaaaaggcaaaugccu

SEQ ID NO: 841489 - RNA, 23 nt, Human
acaacuuuacagauacauuuugu

SEQ ID NO: 841490 - RNA, 20 nt, Human
cccucugcacauggcugugg

SEQ ID NO: 841491 - RNA, 22 nt, Human
ugcagggccagacuggguugga

SEQ ID NO: 841492 - RNA, 22 nt, Human
aaaguguugauaugugacaucc

SEQ ID NO: 841493 - RNA, 22 nt, Human
uauaauuaguaaauggcagauu

SEQ ID NO: 841494 - RNA, 22 nt, Human
uauuuauaaucugccaaagaga

SEQ ID NO: 841495 - RNA, 18 nt, Human
ucauagaagugaaucaga

SEQ ID NO: 841496 - RNA, 22 nt, Human
guccagggaaauagcgacaggg

SEQ ID NO: 841497 - RNA, 22 nt, Human
ggugagggaguggaacgaggug

SEQ ID NO: 841498 - RNA, 22 nt, Human
cagauaaaggcuuacuaguagu

SEQ ID NO: 841499 - RNA, 22 nt, Human
uguuagaaauuauuaguaauau

SEQ ID NO: 841500 - RNA, 22 nt, Human
gcuggggucugugaggagggcu

SEQ ID NO: 841501 - RNA, 22 nt, Human
acauaaguuauggauaaaaugu

SEQ ID NO: 841502 - RNA, 22 nt, Human
cuggcagcugugugaagaacug

SEQ ID NO: 841503 - RNA, 22 nt, Human
gcagacagccagacugcacugg

SEQ ID NO: 841504 - RNA, 22 nt, Human
aauaauuuccagccaacuggaa

SEQ ID NO: 841505 - RNA, 19 nt, Human
uggauuuauauucuuuauc

SEQ ID NO: 841506 - RNA, 22 nt, Human
agcuucuggaaggcaaggcuug

SEQ ID NO: 841507 - RNA, 22 nt, Human
aggcagcuuucuguaggggugu

SEQ ID NO: 841508 - RNA, 22 nt, Human
uggcuagcccuuguggggagag

SEQ ID NO: 841509 - RNA, 22 nt, Human
cccagccagccucuucccauau

SEQ ID NO: 841510 - RNA, 22 nt, Human
ugcuuggcuuucugagcuucug

SEQ ID NO: 841511 - RNA, 22 nt, Human
ccaaggaggccccaggucagcu

SEQ ID NO: 841512 - RNA, 22 nt, Human
uagucuuuugagaaguauaucu

SEQ ID NO: 841513 - RNA, 22 nt, Human
uguaugaaucucauuuguuuaa

SEQ ID NO: 841514 - RNA, 22 nt, Human
uucauucuugggaucagagagu

SEQ ID NO: 841515 - RNA, 22 nt, Human
ugacagcugagccccaggcaag

SEQ ID NO: 841516 - RNA, 22 nt, Human
uguaugaaguuacugagccucu

SEQ ID NO: 841517 - RNA, 22 nt, Human
caguccuuccuugccccuuggg

SEQ ID NO: 841518 - RNA, 22 nt, Human
cugagagugcucuuugauguca

SEQ ID NO: 841519 - RNA, 22 nt, Human
uagcagugccaggauuuugcug

SEQ ID NO: 841520 - RNA, 22 nt, Human
agguaugagauaaaucaaugaa

SEQ ID NO: 841521 - RNA, 22 nt, Human
ucccuggcugggggcugccuug

SEQ ID NO: 841522 - RNA, 22 nt, Human
agaggcaggagguugacuugag

SEQ ID NO: 841523 - RNA, 22 nt, Human
uauguuauuuucauacaacaga

SEQ ID NO: 841524 - RNA, 18 nt, Human
gcacuucacccagcuagu

SEQ ID NO: 841525 - RNA, 22 nt, Human
auaugugugccauuucagcagu

SEQ ID NO: 841526 - RNA, 22 nt, Human
gccuuaauuuuuuauaaucucu

SEQ ID NO: 841527 - RNA, 22 nt, Human
caucacagauguuguguggagu

SEQ ID NO: 841528 - RNA, 22 nt, Human
gcacacagauuaggaaacagaa

SEQ ID NO: 841529 - RNA, 22 nt, Human
ucuggccuuaucuguccaagcc

SEQ ID NO: 841530 - RNA, 22 nt, Human
auuuugaugcuaucuaaugaau

SEQ ID NO: 841531 - RNA, 22 nt, Human
augggcagcagcugccauucau

SEQ ID NO: 841532 - RNA, 22 nt, Human
ucucaccaaagccuugaccaua

SEQ ID NO: 841533 - RNA, 22 nt, Human
aauuugcaugaugagaacaaua

SEQ ID NO: 841534 - RNA, 22 nt, Human
guccugggcccaggggcugccu

SEQ ID NO: 841535 - RNA, 22 nt, Human
acuuugaaagccuuggccccgg

SEQ ID NO: 841536 - RNA, 22 nt, Human
aagccaggcaugcuuggacagu

SEQ ID NO: 841537 - RNA, 22 nt, Human
uccaaaguguugggauuauagg

SEQ ID NO: 841538 - RNA, 22 nt, Human
gccaggcagauaugugagcuua

SEQ ID NO: 841539 - RNA, 22 nt, Human
uuuccuguugccaucaagaaug

SEQ ID NO: 841540 - RNA, 22 nt, Human
gauagaaagagugguucuuuuu

SEQ ID NO: 841541 - RNA, 19 nt, Human
ucccuggcgccucucgggc

SEQ ID NO: 841542 - RNA, 22 nt, Human
accagagcuuacaugcuagaaa

SEQ ID NO: 841543 - RNA, 22 nt, Human
ccaauacacuuuauagaagaaa

SEQ ID NO: 841544 - RNA, 22 nt, Human
aaaauugaagugaucaggaacu

SEQ ID NO: 841545 - RNA, 22 nt, Human
uuaguaaauaaagucuacuuuc

SEQ ID NO: 841546 - RNA, 22 nt, Human
uggcucuggcgugaagcccaga

SEQ ID NO: 841547 - RNA, 22 nt, Human
acaguuucuccauuuacaccuu

SEQ ID NO: 841548 - RNA, 22 nt, Human
ggaggccaguccuggccgggcu

SEQ ID NO: 841549 - RNA, 22 nt, Human
ccacugggggcugcaggcacuc

SEQ ID NO: 841550 - RNA, 22 nt, Human
agagagcccgggccagggcaca

SEQ ID NO: 841551 - RNA, 22 nt, Human
auuugaauggcuuaacacaacg

SEQ ID NO: 841552 - RNA, 21 nt, Human
guuuuaagggagaaaaccuag

SEQ ID NO: 841553 - RNA, 22 nt, Human
gucccagaaacauauugcuggu

SEQ ID NO: 841554 - RNA, 22 nt, Human
ugauuuccuggcuuuggaguuc

SEQ ID NO: 841555 - RNA, 22 nt, Human
auauaauuguucugaaguguuu

SEQ ID NO: 841556 - RNA, 22 nt, Human
uaucuguuguccaugcagaaag

SEQ ID NO: 841557 - RNA, 22 nt, Human
aggcagugcagaguccucuucu

SEQ ID NO: 841558 - RNA, 22 nt, Human
gccuccccugcaauuguccuug

SEQ ID NO: 841559 - RNA, 22 nt, Human
gggccuggcaugcagccccguu

SEQ ID NO: 841560 - RNA, 22 nt, Human
cacaggcuuccaguccccagcu

SEQ ID NO: 841561 - RNA, 22 nt, Human
ggacagcugcuuucaggccaca

SEQ ID NO: 841562 - RNA, 22 nt, Human
auacauguuguaccauauguuu

SEQ ID NO: 841563 - RNA, 22 nt, Human
auuguggcuagacagucacaau

SEQ ID NO: 841564 - RNA, 23 nt, Human
uggaaagcggaccuggggcagag

SEQ ID NO: 841565 - RNA, 22 nt, Human
aggccuggcuuugguuugcuga

SEQ ID NO: 841566 - RNA, 22 nt, Human
gcuuccugucccucagccauga

SEQ ID NO: 841567 - RNA, 22 nt, Human
gaugauaacagcauuucaacug

SEQ ID NO: 841568 - RNA, 22 nt, Human
uucacauuagugguucuauaua

SEQ ID NO: 841569 - RNA, 22 nt, Human
gucccuggucuaccguggcuuc

SEQ ID NO: 841570 - RNA, 22 nt, Human
uauacagucuuuugcuauauuc

SEQ ID NO: 841571 - RNA, 22 nt, Human
cacagagagcuacgugcagcgu

SEQ ID NO: 841572 - RNA, 22 nt, Human
aggcuucugcugauauuucauu

SEQ ID NO: 841573 - RNA, 22 nt, Human
guggaggagaggcgccuugcgg

SEQ ID NO: 841574 - RNA, 22 nt, Human
uaugaagauauaucugaucucu

SEQ ID NO: 841575 - RNA, 22 nt, Human
ucuggagagucacagugccaga

SEQ ID NO: 841576 - RNA, 22 nt, Human
ccuccaaguuugacucaggaca

SEQ ID NO: 841577 - RNA, 19 nt, Human
gccagcagaaugaugaggc

SEQ ID NO: 841578 - RNA, 22 nt, Human
ugugaugguucacugggcauga

SEQ ID NO: 841579 - RNA, 20 nt, Human
uccuugaaagugggguauau

SEQ ID NO: 841580 - RNA, 22 nt, Human
ccacaggggcccacgagccgcu

SEQ ID NO: 841581 - RNA, 18 nt, Human
agcuggggccucuggucc

SEQ ID NO: 841582 - RNA, 22 nt, Human
ucaugaauauugaaugcuucau

SEQ ID NO: 841583 - RNA, 22 nt, Human
caugggagcuaucuccaucacu

SEQ ID NO: 841584 - RNA, 22 nt, Human
gaugguuugguaaaaguauguu

SEQ ID NO: 841585 - RNA, 22 nt, Human
aggagggacaccaauauauguu

SEQ ID NO: 841586 - RNA, 22 nt, Human
ugggccugauucuugaauccug

SEQ ID NO: 841587 - RNA, 18 nt, Human
guccugagcucugcugua

SEQ ID NO: 841588 - RNA, 22 nt, Human
guagaaauguaaccaggagaua

SEQ ID NO: 841589 - RNA, 22 nt, Human
cugaagccaugugcucacuggu

SEQ ID NO: 841590 - RNA, 22 nt, Human
aagcaccucuaugauugcuuuu

SEQ ID NO: 841591 - RNA, 20 nt, Human
agaaaucagaccacacacua

SEQ ID NO: 841592 - RNA, 22 nt, Human
gcaguggcuaagcucgcaugca

SEQ ID NO: 841593 - RNA, 21 nt, Human
ugaaagaaggugcagucugaa

SEQ ID NO: 841594 - RNA, 22 nt, Human
auaagcauguuagaauauuuga

SEQ ID NO: 841595 - RNA, 22 nt, Human
ucauuuugggguuugucaucuu

SEQ ID NO: 841596 - RNA, 23 nt, Human
uggugccucagaagcagugggcu

SEQ ID NO: 841597 - RNA, 22 nt, Human
agugaaaugauaguguaaauac

SEQ ID NO: 841598 - RNA, 22 nt, Human
uccauacauugaaauaccauuc

SEQ ID NO: 841599 - RNA, 21 nt, Human
cugcuuuacuucagaggaucu

SEQ ID NO: 841600 - RNA, 22 nt, Human
gagugaaaaaggaagggccaua

SEQ ID NO: 841601 - RNA, 22 nt, Human
augucuaaaagauaaaguuuaa

SEQ ID NO: 841602 - RNA, 22 nt, Human
guccucugggcagcugccccac

SEQ ID NO: 841603 - RNA, 22 nt, Human
gacaguccuugcccaguaucua

SEQ ID NO: 841604 - RNA, 22 nt, Human
ggcagagcuugcagugagccga

SEQ ID NO: 841605 - RNA, 22 nt, Human
guuggccugaauggucaagagg

SEQ ID NO: 841606 - RNA, 22 nt, Human
ucucagaguuuuuuuccaggac

SEQ ID NO: 841607 - RNA, 22 nt, Human
cuggcuuucauuucaagcacgu

SEQ ID NO: 841608 - RNA, 22 nt, Human
cccaggaguucgaggcuguagu

SEQ ID NO: 841609 - RNA, 22 nt, Human
uuuccaaagguggcaggaacaa

SEQ ID NO: 841610 - RNA, 22 nt, Human
gaggcagcugggcuggugguuu

SEQ ID NO: 841611 - RNA, 22 nt, Human
aggccugaggaccuucuggagg

SEQ ID NO: 841612 - RNA, 22 nt, Human
agaauaugaucggaauacagau

SEQ ID NO: 841613 - RNA, 22 nt, Human
ccagcuggagcucgcagauagg

SEQ ID NO: 841614 - RNA, 22 nt, Human
gauagaaagguguugaaaucca

SEQ ID NO: 841615 - RNA, 22 nt, Human
aggcacuguacuagguacaggg

SEQ ID NO: 841616 - RNA, 22 nt, Human
uguccugggaaugggaugcagu

SEQ ID NO: 841617 - RNA, 22 nt, Human
auaugccauuagcuagaaauaa

SEQ ID NO: 841618 - RNA, 22 nt, Human
gaggccugaggcugccuggagc

SEQ ID NO: 841619 - RNA, 22 nt, Human
acacaaauuguaggauaauugc

SEQ ID NO: 841620 - RNA, 22 nt, Human
ucaccagucuuucuuaccauug

SEQ ID NO: 841621 - RNA, 22 nt, Human
aggcaguggaaggagaaagcaa

SEQ ID NO: 841622 - RNA, 22 nt, Human
aagcugccauagaacgagaggu

SEQ ID NO: 841623 - RNA, 20 nt, Human
uacuggauuagggcucaccc

SEQ ID NO: 841624 - RNA, 22 nt, Human
aaguucaaggaagccuccaguu

SEQ ID NO: 841625 - RNA, 22 nt, Human
uguaugaagacuucuucugugu

SEQ ID NO: 841626 - RNA, 22 nt, Human
gagggcaggggucuugcacggu

SEQ ID NO: 841627 - RNA, 22 nt, Human
cagugucuccagaugcuccaau

SEQ ID NO: 841628 - RNA, 22 nt, Human
agcuuguuaaggaugcauauua

SEQ ID NO: 841629 - RNA, 22 nt, Human
ugggcuguggagcaccuuugca

SEQ ID NO: 841630 - RNA, 23 nt, Human
cccagcuuucccacugccgagag

SEQ ID NO: 841631 - RNA, 22 nt, Human
uuuuccuauaugcaaagaaugc

SEQ ID NO: 841632 - RNA, 23 nt, Human
gaaucaguggcuaacaaggaaac

SEQ ID NO: 841633 - RNA, 22 nt, Human
aagagcugcccaaggugaacag

SEQ ID NO: 841634 - RNA, 22 nt, Human
agcucagcuuccucuccaugcu

SEQ ID NO: 841635 - RNA, 22 nt, Human
gaguucuaaaggcagaacauaa

SEQ ID NO: 841636 - RNA, 22 nt, Human
acuggaucagaaucugauuuuu

SEQ ID NO: 841637 - RNA, 22 nt, Human
gugaaaucugaggcccaugaug

SEQ ID NO: 841638 - RNA, 22 nt, Human
cugggaggcacuauucaggagg

SEQ ID NO: 841639 - RNA, 22 nt, Human
aacugcauuugcauaaguccau

SEQ ID NO: 841640 - RNA, 22 nt, Human
uaagaaguacaaaaauuuucug

SEQ ID NO: 841641 - RNA, 22 nt, Human
ugcuagugcaggguuuucaguu

SEQ ID NO: 841642 - RNA, 22 nt, Human
uaaaugugucuuuuuaaggccu

SEQ ID NO: 841643 - RNA, 22 nt, Human
gaauuguagagggaacagaagc

SEQ ID NO: 841644 - RNA, 22 nt, Human
uacuuuuugucucuuugaaugu

SEQ ID NO: 841645 - RNA, 22 nt, Human
ccaggccugcaucugcugcgca

SEQ ID NO: 841646 - RNA, 22 nt, Human
cuauuacauuucuggacauuca

SEQ ID NO: 841647 - RNA, 22 nt, Human
cccucaggagaugucagcugga

SEQ ID NO: 841648 - RNA, 22 nt, Human
caaaauguucuggcaccuuuaa

SEQ ID NO: 841649 - RNA, 22 nt, Human
uacuuuagaaggaaauaaguuc

SEQ ID NO: 841650 - RNA, 22 nt, Human
ucaaauaccagcaauuucaugu

SEQ ID NO: 841651 - RNA, 22 nt, Human
uggccucugugggagcugagca

SEQ ID NO: 841652 - RNA, 22 nt, Human
gggagacacgcugcaggcauaa

SEQ ID NO: 841653 - RNA, 22 nt, Human
cucuguccacagguuugucccu

SEQ ID NO: 841654 - RNA, 22 nt, Human
cccagcauggagugaggacuca

SEQ ID NO: 841655 - RNA, 20 nt, Human
guucucacugaucugcaggg

SEQ ID NO: 841656 - RNA, 23 nt, Human
uuucaaauuacucugcagaugac

SEQ ID NO: 841657 - RNA, 22 nt, Human
ucccagccuuccuuguggugaa

SEQ ID NO: 841658 - RNA, 22 nt, Human
cugcccugugaggguccuuggg

SEQ ID NO: 841659 - RNA, 22 nt, Human
uuuuccucaggaaugcuaagcu

SEQ ID NO: 841660 - RNA, 22 nt, Human
caguguccucagccagcagcua

SEQ ID NO: 841661 - RNA, 22 nt, Human
acagcuguauccccagagcuca

SEQ ID NO: 841662 - RNA, 22 nt, Human
gagaaggggugauguggguaau

SEQ ID NO: 841663 - RNA, 22 nt, Human
cuacagaaguuucccuugcuua

SEQ ID NO: 841664 - RNA, 22 nt, Human
acauuucuuuucaucucuauau

SEQ ID NO: 841665 - RNA, 20 nt, Human
gucucagaauggauuugcau

SEQ ID NO: 841666 - RNA, 18 nt, Human
aaaaugcaggcgacaugg

SEQ ID NO: 841667 - RNA, 22 nt, Human
gagcucuguguagccugagggu

SEQ ID NO: 841668 - RNA, 22 nt, Human
agggccugggauguccuccuag

SEQ ID NO: 841669 - RNA, 22 nt, Human
agccaucauuucugucacuggc

SEQ ID NO: 841670 - RNA, 22 nt, Human
auccaguuuaugucauauucuu

SEQ ID NO: 841671 - RNA, 22 nt, Human
cuguggagcuuguggcaguggg

SEQ ID NO: 841672 - RNA, 22 nt, Human
aaauucaauuaacuuucaugcu

SEQ ID NO: 841673 - RNA, 22 nt, Human
acauugaugaaaagguaucauu

SEQ ID NO: 841674 - RNA, 22 nt, Human
ugcagccaggaaauauuugcug

SEQ ID NO: 841675 - RNA, 22 nt, Human
ugcauuauacuuuuagaaauuu

SEQ ID NO: 841676 - RNA, 22 nt, Human
ccccuuccuuccucagacagcc

SEQ ID NO: 841677 - RNA, 22 nt, Human
gugccucagcaccgccugcagc

SEQ ID NO: 841678 - RNA, 22 nt, Human
cucuggagguggagguugcagu

SEQ ID NO: 841679 - RNA, 22 nt, Human
ucagaaauagucuuuaaaauga

SEQ ID NO: 841680 - RNA, 22 nt, Human
cugccagcacugccuccugagg

SEQ ID NO: 841681 - RNA, 22 nt, Human
uggcucaguggcagccgcagcu

SEQ ID NO: 841682 - RNA, 22 nt, Human
agggaguguaaauggugcucag

SEQ ID NO: 841683 - RNA, 22 nt, Human
aaggcugccucugccagaggag

SEQ ID NO: 841684 - RNA, 22 nt, Human
caugcuccaaaaacaagagaau

SEQ ID NO: 841685 - RNA, 22 nt, Human
ggccuuggggaggauggugucc

SEQ ID NO: 841686 - RNA, 21 nt, Human
aacugguucaauucaacuaga

SEQ ID NO: 841687 - RNA, 22 nt, Human
gaagaaucaagcaguaauuugu

SEQ ID NO: 841688 - RNA, 22 nt, Human
aggaggccgggauucuggagau

SEQ ID NO: 841689 - RNA, 22 nt, Human
cuggcugcuuguagacucgacu

SEQ ID NO: 841690 - RNA, 22 nt, Human
ggcagcuauuccaagcagcacu

SEQ ID NO: 841691 - RNA, 22 nt, Human
ugcccaggguuucuaagagcag

SEQ ID NO: 841692 - RNA, 22 nt, Human
ugugcuucagguugucgccacg

SEQ ID NO: 841693 - RNA, 22 nt, Human
gagccagguuggaggcugcagu

SEQ ID NO: 841694 - RNA, 23 nt, Human
gagauuuagcagacaaagcucuu

SEQ ID NO: 841695 - RNA, 22 nt, Human
agaggcccucucucuccugaug

SEQ ID NO: 841696 - RNA, 22 nt, Human
ggucccagguugacagggagac

SEQ ID NO: 841697 - RNA, 22 nt, Human
ucuggcucuguguccucaccca

SEQ ID NO: 841698 - RNA, 22 nt, Human
uagugcuuuaaguuuacagaga

SEQ ID NO: 841699 - RNA, 22 nt, Human
gcacacagccagcugagggcua

SEQ ID NO: 841700 - RNA, 22 nt, Human
cagcuuggcuuccgcuuuacug

SEQ ID NO: 841701 - RNA, 22 nt, Human
ccugccugaaggucagccaccc

SEQ ID NO: 841702 - RNA, 22 nt, Human
agaggucagaacaggaaagugu

SEQ ID NO: 841703 - RNA, 22 nt, Human
ucugggcucuuaguguacccuc

SEQ ID NO: 841704 - RNA, 22 nt, Human
ugcugcuguauccuuaguguca

SEQ ID NO: 841705 - RNA, 22 nt, Human
cugcagaguggagccucggcug

SEQ ID NO: 841706 - RNA, 22 nt, Human
guucauuuuacuguaaauagca

SEQ ID NO: 841707 - RNA, 20 nt, Human
ucugucucugagcuagacuu

SEQ ID NO: 841708 - RNA, 22 nt, Human
cccaugagguggagguugcagu

SEQ ID NO: 841709 - RNA, 22 nt, Human
aaagaaucuauauaucaccacc

SEQ ID NO: 841710 - RNA, 22 nt, Human
uggcucagugacauuccuccca

SEQ ID NO: 841711 - RNA, 22 nt, Human
ccagggcauguaacuaauggug

SEQ ID NO: 841712 - RNA, 22 nt, Human
agaugagggguagaaaggacuu

SEQ ID NO: 841713 - RNA, 20 nt, Human
agacaaaaugacuucaugca

SEQ ID NO: 841714 - RNA, 22 nt, Human
uggagcagcuaagccucugaga

SEQ ID NO: 841715 - RNA, 22 nt, Human
ucaggggacagccagcuggagg

SEQ ID NO: 841716 - RNA, 22 nt, Human
aacaaaugauaccaguucucaa

SEQ ID NO: 841717 - RNA, 22 nt, Human
ccagcuggaagagugcagaacu

SEQ ID NO: 841718 - RNA, 22 nt, Human
uagaaguuaaaggaauacagaa

SEQ ID NO: 841719 - RNA, 22 nt, Human
gaggguggguuucuugcacguc

SEQ ID NO: 841720 - RNA, 22 nt, Human
cccuggcagaaugucucugggc

SEQ ID NO: 841721 - RNA, 22 nt, Human
gcugccaguaguuggagcucca

SEQ ID NO: 841722 - RNA, 22 nt, Human
acuguguggaaauuugugaggg

SEQ ID NO: 841723 - RNA, 22 nt, Human
augagcuguaagguggcuuccu

SEQ ID NO: 841724 - RNA, 22 nt, Human
gacagccucaugaggagcaaaa

SEQ ID NO: 841725 - RNA, 22 nt, Human
ggcucaggacugcagcguagag

SEQ ID NO: 841726 - RNA, 22 nt, Human
ggugggcacauucagucucugu

SEQ ID NO: 841727 - RNA, 22 nt, Human
uuaaaaugcagauucugauuca

SEQ ID NO: 841728 - RNA, 19 nt, Human
cuugguuaugguaugaugc

SEQ ID NO: 841729 - RNA, 22 nt, Human
uguaagauauucagcuuauuga

SEQ ID NO: 841730 - RNA, 22 nt, Human
augguuuacugaucuuuuuggu

SEQ ID NO: 841731 - RNA, 22 nt, Human
ucacacauucuagguauguuga

SEQ ID NO: 841732 - RNA, 20 nt, Human
aaucagaaagugugagcucu

SEQ ID NO: 841733 - RNA, 22 nt, Human
ucuuuccuaggugauaugcaau

SEQ ID NO: 841734 - RNA, 22 nt, Human
acaggcugcugggcuccgugcu

SEQ ID NO: 841735 - RNA, 22 nt, Human
augucuuucgcaucaguagcua

SEQ ID NO: 841736 - RNA, 20 nt, Human
auuuggcaugaaguauugau

SEQ ID NO: 841737 - RNA, 21 nt, Human
ugaggcaggggugcuuuuguc

SEQ ID NO: 841738 - RNA, 22 nt, Human
gcuucucuggccugcagggcau

SEQ ID NO: 841739 - RNA, 22 nt, Human
aggagcagaacuguuguggagg

SEQ ID NO: 841740 - RNA, 23 nt, Human
cccagcagagaugaggagggguc

SEQ ID NO: 841741 - RNA, 22 nt, Human
cagucccaugagcccagaacau

SEQ ID NO: 841742 - RNA, 22 nt, Human
ugaaacauugcacuguaugaau

SEQ ID NO: 841743 - RNA, 22 nt, Human
auguuaaaugguuuauuauuaa

SEQ ID NO: 841744 - RNA, 22 nt, Human
gccagagcagaauagaguggcc

SEQ ID NO: 841745 - RNA, 18 nt, Human
ucaagacaucaugaaaua

SEQ ID NO: 841746 - RNA, 22 nt, Human
uugggcugaacccugcagcuga

SEQ ID NO: 841747 - RNA, 22 nt, Human
ccuccuggugggcgcuucuggc

SEQ ID NO: 841748 - RNA, 22 nt, Human
uaacagaaacagauaaguguaa

SEQ ID NO: 841749 - RNA, 21 nt, Human
gacaggggaagaagcaaggag

SEQ ID NO: 841750 - RNA, 22 nt, Human
ugcauauuuuauaaagauggaa

SEQ ID NO: 841751 - RNA, 22 nt, Human
gccugcagauauauaggauggu

SEQ ID NO: 841752 - RNA, 22 nt, Human
uucuucaaugugcccuguuuuc

SEQ ID NO: 841753 - RNA, 22 nt, Human
gagagugagauaauuucacaua

SEQ ID NO: 841754 - RNA, 22 nt, Human
gcugcugcgcuugucuacuguu

SEQ ID NO: 841755 - RNA, 22 nt, Human
agcaccuguggcucaugcucgu

SEQ ID NO: 841756 - RNA, 22 nt, Human
uuagcugcauuaucaaaguuau

SEQ ID NO: 841757 - RNA, 22 nt, Human
aaaagcucuuucugcuguagau

SEQ ID NO: 841758 - RNA, 22 nt, Human
auugaaagcauggauuuggauu

SEQ ID NO: 841759 - RNA, 21 nt, Human
ccucuggcuugugcugugccc

SEQ ID NO: 841760 - RNA, 22 nt, Human
aaagaauuuguacacccuacua

SEQ ID NO: 841761 - RNA, 22 nt, Human
cagcccugagagaaccaucuau

SEQ ID NO: 841762 - RNA, 22 nt, Human
aaagaacagauguguggugcau

SEQ ID NO: 841763 - RNA, 22 nt, Human
gagggcugaugcuuacuuauuu

SEQ ID NO: 841764 - RNA, 22 nt, Human
agcaggagcugugggaagaugg

SEQ ID NO: 841765 - RNA, 22 nt, Human
uucaaucauuuuuacauagucc

SEQ ID NO: 841766 - RNA, 22 nt, Human
ugcuggggucauggggcgcccg

SEQ ID NO: 841767 - RNA, 20 nt, Human
gaggcucugggcauggcgcc

SEQ ID NO: 841768 - RNA, 22 nt, Human
aauacuauguugugacacauga

SEQ ID NO: 841769 - RNA, 22 nt, Human
uggcacugggaugcuacuguua

SEQ ID NO: 841770 - RNA, 22 nt, Human
augucaaaucaguuuuaucaga

SEQ ID NO: 841771 - RNA, 22 nt, Human
agaucaaagccaugagagauuu

SEQ ID NO: 841772 - RNA, 21 nt, Human
auacagaacauugauccaaga

SEQ ID NO: 841773 - RNA, 22 nt, Human
ucuucacauggaacaugaagcu

SEQ ID NO: 841774 - RNA, 22 nt, Human
uaggaggguuagagggaaauau

SEQ ID NO: 841775 - RNA, 22 nt, Human
uaagaacaucuguccccagauu

SEQ ID NO: 841776 - RNA, 22 nt, Human
caugguuuauuagagcuuauuu

SEQ ID NO: 841777 - RNA, 22 nt, Human
ucauugaacgaagagcuccauu

SEQ ID NO: 841778 - RNA, 22 nt, Human
ucuggcccagccccugagguca

SEQ ID NO: 841779 - RNA, 22 nt, Human
ugggcugcuucuauuggugguc

SEQ ID NO: 841780 - RNA, 21 nt, Human
ccuggcugcacaguugcuggu

SEQ ID NO: 841781 - RNA, 23 nt, Human
ugcuucucugcuugacaguucug

SEQ ID NO: 841782 - RNA, 22 nt, Human
gagagcuggccagcuucaguau

SEQ ID NO: 841783 - RNA, 22 nt, Human
gcuaccugagcaagagcuucaa

SEQ ID NO: 841784 - RNA, 22 nt, Human
ggccugagcuugggcagcguau

SEQ ID NO: 841785 - RNA, 17 nt, Human
gcaaucucagucuccuu

SEQ ID NO: 841786 - RNA, 22 nt, Human
ugcagaagaccuuccagggcug

SEQ ID NO: 841787 - RNA, 22 nt, Human
gaggagagggcugcgggcccac

SEQ ID NO: 841788 - RNA, 22 nt, Human
ggagccugugcccaagcccaga

SEQ ID NO: 841789 - RNA, 22 nt, Human
gcugccacucugagcuugcuuc

SEQ ID NO: 841790 - RNA, 22 nt, Human
acugugcuuucucuggaggcau

SEQ ID NO: 841791 - RNA, 22 nt, Human
acagagcaugcucaguguguga

SEQ ID NO: 841792 - RNA, 22 nt, Human
cucuucuugccugaugaggcag

SEQ ID NO: 841793 - RNA, 22 nt, Human
agggggcaucagguccuggcuc

SEQ ID NO: 841794 - RNA, 22 nt, Human
aaauuaguacauugcaaagucc

SEQ ID NO: 841795 - RNA, 22 nt, Human
ccaggaguuugaggcugcagug

SEQ ID NO: 841796 - RNA, 22 nt, Human
acauauuuccaugcagcauguc

SEQ ID NO: 841797 - RNA, 22 nt, Human
ucucuggaagcgcagaucuguu

SEQ ID NO: 841798 - RNA, 22 nt, Human
uacagaaaaacuggcauugaag

SEQ ID NO: 841799 - RNA, 22 nt, Human
uucauucccuuauauuagcauu

SEQ ID NO: 841800 - RNA, 22 nt, Human
agaauuucuggaagauugcaag

SEQ ID NO: 841801 - RNA, 22 nt, Human
ugcuuugggucucucuaguuuc

SEQ ID NO: 841802 - RNA, 22 nt, Human
uguaugaauauguuggggaggu

SEQ ID NO: 841803 - RNA, 17 nt, Human
uaaagccagucaaguca

SEQ ID NO: 841804 - RNA, 22 nt, Human
ggaggccaggguggguggaucg

SEQ ID NO: 841805 - RNA, 22 nt, Human
guacagaaaguacccauagaag

SEQ ID NO: 841806 - RNA, 22 nt, Human
uuauuauugugguugcauuauc

SEQ ID NO: 841807 - RNA, 22 nt, Human
aagcagcuuuugaagagugagg

SEQ ID NO: 841808 - RNA, 22 nt, Human
ucaacuuuaguguagcuauuua

SEQ ID NO: 841809 - RNA, 22 nt, Human
uguccacaucacucacuuguca

SEQ ID NO: 841810 - RNA, 22 nt, Human
gaguccuugacacauaguaggu

SEQ ID NO: 841811 - RNA, 21 nt, Human
aacugcuggucuuuucugucu

SEQ ID NO: 841812 - RNA, 21 nt, Human
cugugcuuuuuaagugugaug

SEQ ID NO: 841813 - RNA, 22 nt, Human
uucuucaaccaucuacauaaac

SEQ ID NO: 841814 - RNA, 17 nt, Human
agaugcuggccacaugu

SEQ ID NO: 841815 - RNA, 22 nt, Human
ugcugccaagcccgugcuccug

SEQ ID NO: 841816 - RNA, 22 nt, Human
cuguccccgcgaguccagagcu

SEQ ID NO: 841817 - RNA, 22 nt, Human
cugaggcaugaaugugggcuuu

SEQ ID NO: 841818 - RNA, 22 nt, Human
ugugccaggcacuugcccaggc

SEQ ID NO: 841819 - RNA, 22 nt, Human
caguagccacuagacacaugua

SEQ ID NO: 841820 - RNA, 22 nt, Human
auuugagaugguaaauaacuuu

SEQ ID NO: 841821 - RNA, 22 nt, Human
ccaaaauuaagccucuuauguu

SEQ ID NO: 841822 - RNA, 22 nt, Human
gguaacaguauguagaguaaga

SEQ ID NO: 841823 - RNA, 22 nt, Human
cugcagcuccccugagaucaag

SEQ ID NO: 841824 - RNA, 22 nt, Human
ugaaaucugcaugcaaaguccu

SEQ ID NO: 841825 - RNA, 22 nt, Human
aggccugggucucgugccuacc

SEQ ID NO: 841826 - RNA, 22 nt, Human
gaaguucaggugggaauugagc

SEQ ID NO: 841827 - RNA, 22 nt, Human
caacauuugaguaaagaaaugg

SEQ ID NO: 841828 - RNA, 22 nt, Human
aaggcacuacgcugcuggggcg

SEQ ID NO: 841829 - RNA, 19 nt, Human
uagaaugcccacuuaaaaa

SEQ ID NO: 841830 - RNA, 22 nt, Human
ggagcagagcauuucacagccu

SEQ ID NO: 841831 - RNA, 22 nt, Human
aacuuucaggcaaugaauauuu

SEQ ID NO: 841832 - RNA, 22 nt, Human
agcccaggaaguugaggcuugc

SEQ ID NO: 841833 - RNA, 22 nt, Human
caguggguaggaaaggcucuuc

SEQ ID NO: 841834 - RNA, 22 nt, Human
gggcacugugcuaggugcugag

SEQ ID NO: 841835 - RNA, 22 nt, Human
gggcagcugccacuccgcuugc

SEQ ID NO: 841836 - RNA, 19 nt, Human
ggcucucuuaaagcuguuu

SEQ ID NO: 841837 - RNA, 22 nt, Human
ucauuucccuccuacaaagagg

SEQ ID NO: 841838 - RNA, 22 nt, Human
ggcugccauaacagaguaccac

SEQ ID NO: 841839 - RNA, 22 nt, Human
ugaaaguugcacauaagagaau

SEQ ID NO: 841840 - RNA, 22 nt, Human
ccugugcauccgguggucauug

SEQ ID NO: 841841 - RNA, 22 nt, Human
gauuucuucauucauuagaugg

SEQ ID NO: 841842 - RNA, 22 nt, Human
gcugggagccccgagccagcgc

SEQ ID NO: 841843 - RNA, 22 nt, Human
caagauuugccaguggccaacu

SEQ ID NO: 841844 - RNA, 22 nt, Human
gaggaaaagagacagguuauug

SEQ ID NO: 841845 - RNA, 22 nt, Human
gccucugcucggacuuugccuc

SEQ ID NO: 841846 - RNA, 22 nt, Human
gaaaugugaccuacuuccuugu

SEQ ID NO: 841847 - RNA, 22 nt, Human
aggucauugaaguuauuuucuu

SEQ ID NO: 841848 - RNA, 22 nt, Human
ccagcuuguuugaagcucguca

SEQ ID NO: 841849 - RNA, 20 nt, Human
aggcacuggggauagguaag

SEQ ID NO: 841850 - RNA, 22 nt, Human
uuccuuagggucagccagaucu

SEQ ID NO: 841851 - RNA, 22 nt, Human
agggcucugggguggcagagau

SEQ ID NO: 841852 - RNA, 22 nt, Human
uaugcauagguaucuauacuca

SEQ ID NO: 841853 - RNA, 22 nt, Human
gggcugcugcccaggaggcacc

SEQ ID NO: 841854 - RNA, 22 nt, Human
caaaguauauuggauugaaugg

SEQ ID NO: 841855 - RNA, 22 nt, Human
ccacaaguuucagcacccagag

SEQ ID NO: 841856 - RNA, 22 nt, Human
cuggcugugcagucuuccagaa

SEQ ID NO: 841857 - RNA, 23 nt, Human
ggcagcucucaucugaugacuga

SEQ ID NO: 841858 - RNA, 18 nt, Human
ugaggcagucagugaugg

SEQ ID NO: 841859 - RNA, 22 nt, Human
aggaggcacucacucucagggu

SEQ ID NO: 841860 - RNA, 22 nt, Human
uuugcauuguuucaaaagugaa

SEQ ID NO: 841861 - RNA, 22 nt, Human
gcaggaagaugagcucagguaa

SEQ ID NO: 841862 - RNA, 22 nt, Human
uacaaacuuguuuuaaguaagu

SEQ ID NO: 841863 - RNA, 22 nt, Human
uucuuuuacauuaagauuucag

SEQ ID NO: 841864 - RNA, 22 nt, Human
guuagaaacacauucuuauuga

SEQ ID NO: 841865 - RNA, 21 nt, Human
aacauuucaggauccaaauug

SEQ ID NO: 841866 - RNA, 22 nt, Human
ucccagagaagagcuggaugga

SEQ ID NO: 841867 - RNA, 22 nt, Human
aggcaagcauugggaacagggc

SEQ ID NO: 841868 - RNA, 22 nt, Human
gucugaggaagaugcaggggga

SEQ ID NO: 841869 - RNA, 22 nt, Human
uuugaacuucuccauucugaug

SEQ ID NO: 841870 - RNA, 22 nt, Human
cuagccugggauuugaacuuau

SEQ ID NO: 841871 - RNA, 17 nt, Human
gcuguaguuugauaaga

SEQ ID NO: 841872 - RNA, 22 nt, Human
uguuuuauuucuccaagaggga

SEQ ID NO: 841873 - RNA, 22 nt, Human
agcuccugcacccagccuugag

SEQ ID NO: 841874 - RNA, 19 nt, Human
ggaagagaggaaaggugga

SEQ ID NO: 841875 - RNA, 22 nt, Human
uccuuccugcaggccaaguccu

SEQ ID NO: 841876 - RNA, 22 nt, Human
cagaagcagugagagaugugca

SEQ ID NO: 841877 - RNA, 22 nt, Human
gcagcuggugcaaaugucacuc

SEQ ID NO: 841878 - RNA, 22 nt, Human
ccacucugcugugcuccaugau

SEQ ID NO: 841879 - RNA, 22 nt, Human
uuuauuuggcauccagggagaa

SEQ ID NO: 841880 - RNA, 22 nt, Human
ugccugucuccucugcagggug

SEQ ID NO: 841881 - RNA, 22 nt, Human
aaacaaacauagguuugaaagu

SEQ ID NO: 841882 - RNA, 22 nt, Human
ucaguuaacaacuauuuauuga

SEQ ID NO: 841883 - RNA, 22 nt, Human
gagacugcauuguccaaggguu

SEQ ID NO: 841884 - RNA, 22 nt, Human
ggaagaggcugaggccaugcug

SEQ ID NO: 841885 - RNA, 22 nt, Human
uuuaggaaugugguuuuugagc

SEQ ID NO: 841886 - RNA, 22 nt, Human
uuauacauguguuuugagauga

SEQ ID NO: 841887 - RNA, 18 nt, Human
ggaaaaggagugucuagc

SEQ ID NO: 841888 - RNA, 22 nt, Human
aaucaaaaccuacagagguaau

SEQ ID NO: 841889 - RNA, 22 nt, Human
agacgagggccuggcacacagu

SEQ ID NO: 841890 - RNA, 22 nt, Human
gagccugagugcugccuccccu

SEQ ID NO: 841891 - RNA, 22 nt, Human
aggccuggccugggcggcauug

SEQ ID NO: 841892 - RNA, 22 nt, Human
uuuacuuugugucaagucaaga

SEQ ID NO: 841893 - RNA, 22 nt, Human
cagguacacucccuugugcuga

SEQ ID NO: 841894 - RNA, 22 nt, Human
accuggcacuacaggcaccugu

SEQ ID NO: 841895 - RNA, 22 nt, Human
gaggcagaaguugcagugagca

SEQ ID NO: 841896 - RNA, 22 nt, Human
ucaggagaacuuccuucuaccc

SEQ ID NO: 841897 - RNA, 22 nt, Human
ugaaaucuacccuauucagggu

SEQ ID NO: 841898 - RNA, 22 nt, Human
ccagcugcugugaggaccacag

SEQ ID NO: 841899 - RNA, 22 nt, Human
guggccugggguuuguucugag

SEQ ID NO: 841900 - RNA, 22 nt, Human
cuucaagagaaugcagggaugu

SEQ ID NO: 841901 - RNA, 22 nt, Human
ucugggaaccagugcggcuggg

SEQ ID NO: 841902 - RNA, 22 nt, Human
agugcuguccaguuucacaggu

SEQ ID NO: 841903 - RNA, 22 nt, Human
uccuucaggguugaggccgacu

SEQ ID NO: 841904 - RNA, 19 nt, Human
ggaaacaggggccagagga

SEQ ID NO: 841905 - RNA, 22 nt, Human
uauauucaaugauuaguaucag

SEQ ID NO: 841906 - RNA, 22 nt, Human
ggaggccaccugaccugcuguu

SEQ ID NO: 841907 - RNA, 22 nt, Human
aucuuucuauuucuaaaaacua

SEQ ID NO: 841908 - RNA, 21 nt, Human
ccaggguccagcugccauggu

SEQ ID NO: 841909 - RNA, 22 nt, Human
gcuggccauggccugcgccauc

SEQ ID NO: 841910 - RNA, 18 nt, Human
cucagggcaucagucugg

SEQ ID NO: 841911 - RNA, 22 nt, Human
ccucucuguguggccucuccau

SEQ ID NO: 841912 - RNA, 22 nt, Human
auuaaauuaaguggcuaauuua

SEQ ID NO: 841913 - RNA, 22 nt, Human
gaggagcuugaggcuaggagcc

SEQ ID NO: 841914 - RNA, 22 nt, Human
gcuccuggcuccaggcagccaa

SEQ ID NO: 841915 - RNA, 22 nt, Human
ggugggcagcucuuggcaggca

SEQ ID NO: 841916 - RNA, 22 nt, Human
guccucaggaaagcagauaaca

SEQ ID NO: 841917 - RNA, 22 nt, Human
uuucuaggucuuccauacugcc

SEQ ID NO: 841918 - RNA, 20 nt, Human
uuuuccagaaaguaucauug

SEQ ID NO: 841919 - RNA, 22 nt, Human
aaaugucugagacuucugaacu

SEQ ID NO: 841920 - RNA, 22 nt, Human
gccuggccgcuccgagcuccgc

SEQ ID NO: 841921 - RNA, 22 nt, Human
gcagcugaaagggaucucuaca

SEQ ID NO: 841922 - RNA, 22 nt, Human
aggcuucuaggguuggcagcgg

SEQ ID NO: 841923 - RNA, 22 nt, Human
gugauuucagguuuuucauacu

SEQ ID NO: 841924 - RNA, 22 nt, Human
aagaaaucagaaaagcauucgu

SEQ ID NO: 841925 - RNA, 22 nt, Human
uuguuuuggagaugagcuaaaa

SEQ ID NO: 841926 - RNA, 22 nt, Human
cuguaugaacccauauacuuau

SEQ ID NO: 841927 - RNA, 22 nt, Human
uuuauuguuguuagucauaagu

SEQ ID NO: 841928 - RNA, 23 nt, Human
uggagcugggcucagacccuggg

SEQ ID NO: 841929 - RNA, 22 nt, Human
gcucccaccuuugcuaucagua

SEQ ID NO: 841930 - RNA, 22 nt, Human
aaggcagcaggauuuggugacu

SEQ ID NO: 841931 - RNA, 19 nt, Human
ucgagucaagacacuaggc

SEQ ID NO: 841932 - RNA, 22 nt, Human
ccaggagcagggcuggcugcac

SEQ ID NO: 841933 - RNA, 23 nt, Human
ugcauuauccucucugaagacca

SEQ ID NO: 841934 - RNA, 22 nt, Human
cccaggaaaugggcucuugccu

SEQ ID NO: 841935 - RNA, 22 nt, Human
uggcaguggcucagagugcaga

SEQ ID NO: 841936 - RNA, 22 nt, Human
cacauggggcgcugcauuggcc

SEQ ID NO: 841937 - RNA, 22 nt, Human
cugcccugggauggucugugcg

SEQ ID NO: 841938 - RNA, 22 nt, Human
uccucacauggugagccacaca

SEQ ID NO: 841939 - RNA, 22 nt, Human
uaacaauaguguuugcuaguca

SEQ ID NO: 841940 - RNA, 22 nt, Human
uuguaugagcuccaggaacuca

SEQ ID NO: 841941 - RNA, 23 nt, Human
cccuggaguaaauucuuggaagg

SEQ ID NO: 841942 - RNA, 22 nt, Human
gucucagagagcuacucucuua

SEQ ID NO: 841943 - RNA, 22 nt, Human
aucaguuucugugaagaacaca

SEQ ID NO: 841944 - RNA, 22 nt, Human
gauuuacagaucuaagggucac

SEQ ID NO: 841945 - RNA, 22 nt, Human
gcugucccaugguugcaagaug

SEQ ID NO: 841946 - RNA, 22 nt, Human
gccugagcccaggugugcagag

SEQ ID NO: 841947 - RNA, 22 nt, Human
uggggguguccuggugcacaca

SEQ ID NO: 841948 - RNA, 22 nt, Human
gggcaguggcucacgccuguaa

SEQ ID NO: 841949 - RNA, 21 nt, Human
cugguguagcacucaggugcu

SEQ ID NO: 841950 - RNA, 22 nt, Human
aggcugccuguuccaaucuccu

SEQ ID NO: 841951 - RNA, 22 nt, Human
ugcauccuuaaccagcaucacu

SEQ ID NO: 841952 - RNA, 22 nt, Human
uuucaaagguggaagagugaau

SEQ ID NO: 841953 - RNA, 22 nt, Human
caucagaaucugagucucugcc

SEQ ID NO: 841954 - RNA, 22 nt, Human
agguggaacguucaggugcuag

SEQ ID NO: 841955 - RNA, 22 nt, Human
cuccaggaaaauagggaaugag

SEQ ID NO: 841956 - RNA, 22 nt, Human
ccuccuggcccugggccuggaa

SEQ ID NO: 841957 - RNA, 22 nt, Human
auaugugaaugauaucacuuug

SEQ ID NO: 841958 - RNA, 22 nt, Human
gaggaguguauuccacaccacu

SEQ ID NO: 841959 - RNA, 22 nt, Human
aauaugugagguauguucagug

SEQ ID NO: 841960 - RNA, 22 nt, Human
cagcucucuaaggucuugcuuu

SEQ ID NO: 841961 - RNA, 22 nt, Human
agccuucacugggaccuuggau

SEQ ID NO: 841962 - RNA, 22 nt, Human
ucaucacucauuggacaacaga

SEQ ID NO: 841963 - RNA, 18 nt, Human
aauuuccauaugaauugc

SEQ ID NO: 841964 - RNA, 22 nt, Human
uuagccaugcccuagaagagga

SEQ ID NO: 841965 - RNA, 23 nt, Human
uccaggagcaugcuggcuggcga

SEQ ID NO: 841966 - RNA, 22 nt, Human
uggcucaguuucaguccugguu

SEQ ID NO: 841967 - RNA, 21 nt, Human
agaggcaggcauuaaguacac

SEQ ID NO: 841968 - RNA, 22 nt, Human
auccuugagccuuaucuuuugu

SEQ ID NO: 841969 - RNA, 22 nt, Human
aggggcucaguuacuuuggcag

SEQ ID NO: 841970 - RNA, 22 nt, Human
aaggcacuguacuaguuaguua

SEQ ID NO: 841971 - RNA, 22 nt, Human
gagggaugguaguugacacuga

SEQ ID NO: 841972 - RNA, 20 nt, Human
caggccucugggggcccugg

SEQ ID NO: 841973 - RNA, 22 nt, Human
ugagccagucugucugggugaa

SEQ ID NO: 841974 - RNA, 22 nt, Human
gcagccaccucccauggcgggg

SEQ ID NO: 841975 - RNA, 21 nt, Human
guggcucugccaggacugaaa

SEQ ID NO: 841976 - RNA, 22 nt, Human
caucagaaugaauguucuggag

SEQ ID NO: 841977 - RNA, 22 nt, Human
aggggccuggacauggacgcgc

SEQ ID NO: 841978 - RNA, 22 nt, Human
cagagguagccgagugcaaucg

SEQ ID NO: 841979 - RNA, 22 nt, Human
ucugagcauugaauuuucuucc

SEQ ID NO: 841980 - RNA, 22 nt, Human
acaggcuuacaggcugcaagua

SEQ ID NO: 841981 - RNA, 22 nt, Human
gcaccacaucaaugaggggagc

SEQ ID NO: 841982 - RNA, 22 nt, Human
auacagaaguuuuccacuuauu

SEQ ID NO: 841983 - RNA, 22 nt, Human
aucagcaagauguaauuucuau

SEQ ID NO: 841984 - RNA, 22 nt, Human
ugaaaucuccucuuuauauauc

SEQ ID NO: 841985 - RNA, 22 nt, Human
agagcagaggcauggccguggg

SEQ ID NO: 841986 - RNA, 22 nt, Human
acagggucaagggugcuacaag

SEQ ID NO: 841987 - RNA, 22 nt, Human
uuuaggcagcacgggcagcccu

SEQ ID NO: 841988 - RNA, 22 nt, Human
ucagaacaauugggaaccauua

SEQ ID NO: 841989 - RNA, 22 nt, Human
agggagcucacaguccaguaga

SEQ ID NO: 841990 - RNA, 22 nt, Human
cagaaagcuuaggcaaguugga

SEQ ID NO: 841991 - RNA, 22 nt, Human
ggcuucugagugcucugcuguu

SEQ ID NO: 841992 - RNA, 22 nt, Human
uuuauguaaguggaaugaugcc

SEQ ID NO: 841993 - RNA, 22 nt, Human
uggagcaggcaucuuucucucu

SEQ ID NO: 841994 - RNA, 22 nt, Human
ggagggcucaauugacuccuga

SEQ ID NO: 841995 - RNA, 22 nt, Human
ggucauugaaaucagaaggguu

SEQ ID NO: 841996 - RNA, 22 nt, Human
agcucccagaagccagagucgg

SEQ ID NO: 841997 - RNA, 22 nt, Human
agcugcccugggcuggagaugg

SEQ ID NO: 841998 - RNA, 22 nt, Human
caaugucaugauuuuccauuag

SEQ ID NO: 841999 - RNA, 22 nt, Human
aaaaguauuuauggcuauguaa

SEQ ID NO: 842000 - RNA, 22 nt, Human
cacaggagagcugggaggugcc

SEQ ID NO: 842001 - RNA, 22 nt, Human
cacucugaugguuucuguucaa

SEQ ID NO: 842002 - RNA, 18 nt, Human
acauuucucucugcguga

SEQ ID NO: 842003 - RNA, 22 nt, Human
ucaaaguuacuugugguuuucu

SEQ ID NO: 842004 - RNA, 22 nt, Human
agugacugggcagggcagggcc

SEQ ID NO: 842005 - RNA, 22 nt, Human
cagcuugcaguacuuguuuuug

SEQ ID NO: 842006 - RNA, 20 nt, Human
gaggcugcggacugcuggac

SEQ ID NO: 842007 - RNA, 22 nt, Human
cugcauuagucaugcuuugcag

SEQ ID NO: 842008 - RNA, 22 nt, Human
aaacagcuggucucaaauguuc

SEQ ID NO: 842009 - RNA, 22 nt, Human
acuggcaggcugcuggccggcg

SEQ ID NO: 842010 - RNA, 22 nt, Human
ccugccugcguccucugagggc

SEQ ID NO: 842011 - RNA, 17 nt, Human
ucaggcugggugcagug

SEQ ID NO: 842012 - RNA, 22 nt, Human
agguggggugagcugcagacua

SEQ ID NO: 842013 - RNA, 22 nt, Human
aaaguuuuagaacuaggaagca

SEQ ID NO: 842014 - RNA, 22 nt, Human
agcaccaugaccuugccauuga

SEQ ID NO: 842015 - RNA, 22 nt, Human
aaccaggacaauuuugaaagua

SEQ ID NO: 842016 - RNA, 22 nt, Human
agucucugcaugaugcagcaca

SEQ ID NO: 842017 - RNA, 22 nt, Human
ugcugaggucaccuugcugcua

SEQ ID NO: 842018 - RNA, 19 nt, Human
agggaaggauucugucauu

SEQ ID NO: 842019 - RNA, 22 nt, Human
aggccugacuugaauuuagggc

SEQ ID NO: 842020 - RNA, 22 nt, Human
gacaauaaaaugaucuuacagu

SEQ ID NO: 842021 - RNA, 22 nt, Human
cagcccugagaaggaggaucuc

SEQ ID NO: 842022 - RNA, 21 nt, Human
ugcaugcuauguuuuuauuuc

SEQ ID NO: 842023 - RNA, 22 nt, Human
cauuucaagcauugacuucuau

SEQ ID NO: 842024 - RNA, 22 nt, Human
aucauucuauuguugagcugcc

SEQ ID NO: 842025 - RNA, 22 nt, Human
gaggcaggcagauugcuugagg

SEQ ID NO: 842026 - RNA, 22 nt, Human
caguauguuugggagacaugac

SEQ ID NO: 842027 - RNA, 22 nt, Human
ucugccuucgcugcucccugaa

SEQ ID NO: 842028 - RNA, 22 nt, Human
agugcacaccuuaguacaaagu

SEQ ID NO: 842029 - RNA, 22 nt, Human
gcucccaccaggcagaccuacc

SEQ ID NO: 842030 - RNA, 23 nt, Human
ucuguacacaucagcaucuccca

SEQ ID NO: 842031 - RNA, 22 nt, Human
gcucacagccggcuggcagggg

SEQ ID NO: 842032 - RNA, 22 nt, Human
ucuuuccauggccacacagucu

SEQ ID NO: 842033 - RNA, 22 nt, Human
agagugggugaucucuguuguc

SEQ ID NO: 842034 - RNA, 22 nt, Human
cacuggcaugugaggcgguggc

SEQ ID NO: 842035 - RNA, 22 nt, Human
aguauaauuagauaucaaaagu

SEQ ID NO: 842036 - RNA, 22 nt, Human
auauguguauuugguuagccua

SEQ ID NO: 842037 - RNA, 22 nt, Human
gcacacaggcaguuuccagcca

SEQ ID NO: 842038 - RNA, 22 nt, Human
cucaggacccgguccagguggg

SEQ ID NO: 842039 - RNA, 22 nt, Human
ucaggcacugcuuucugauaug

SEQ ID NO: 842040 - RNA, 22 nt, Human
ugggggugugccagggaccucc

SEQ ID NO: 842041 - RNA, 22 nt, Human
uccucaggauguggaguagaau

SEQ ID NO: 842042 - RNA, 22 nt, Human
gccugugcuuaacugacgugag

SEQ ID NO: 842043 - RNA, 17 nt, Human
agcugagcuggccaggg

SEQ ID NO: 842044 - RNA, 19 nt, Human
ugccuggcaccagcuccac

SEQ ID NO: 842045 - RNA, 22 nt, Human
ucugcaggcuuggaguggcagc

SEQ ID NO: 842046 - RNA, 22 nt, Human
guuccaaaguuagaguguauug

SEQ ID NO: 842047 - RNA, 22 nt, Human
gaugcugagagguggagggaac

SEQ ID NO: 842048 - RNA, 22 nt, Human
uccuggaguugugcagugcaca

SEQ ID NO: 842049 - RNA, 22 nt, Human
aagauaaacucuugauuucuga

SEQ ID NO: 842050 - RNA, 22 nt, Human
agucucugagguucagaugccu

SEQ ID NO: 842051 - RNA, 22 nt, Human
cugccugugcaugcagucagaa

SEQ ID NO: 842052 - RNA, 22 nt, Human
auuuagaaguuggagggcaaga

SEQ ID NO: 842053 - RNA, 22 nt, Human
uuugaaugcaggacauacagaa

SEQ ID NO: 842054 - RNA, 22 nt, Human
guacaauagucccuguuuggau

SEQ ID NO: 842055 - RNA, 22 nt, Human
cugggacacccaaggaaagagc

SEQ ID NO: 842056 - RNA, 22 nt, Human
auuuccagugcacugaauagaa

SEQ ID NO: 842057 - RNA, 22 nt, Human
aggagggagaugcccauccugg

SEQ ID NO: 842058 - RNA, 22 nt, Human
aacagacaacuccuguggcuca

SEQ ID NO: 842059 - RNA, 22 nt, Human
ggcugccugccuccaagccggg

SEQ ID NO: 842060 - RNA, 22 nt, Human
ccuggcagguggagguugcagu

SEQ ID NO: 842061 - RNA, 18 nt, Human
gggcucugauccuucacc

SEQ ID NO: 842062 - RNA, 22 nt, Human
caaauguguagagcuuuugggg

SEQ ID NO: 842063 - RNA, 22 nt, Human
aagagcugcaucuaagccauga

SEQ ID NO: 842064 - RNA, 22 nt, Human
agggacuggcucucugagcagg

SEQ ID NO: 842065 - RNA, 22 nt, Human
gggagcugagcuggaagagaau

SEQ ID NO: 842066 - RNA, 22 nt, Human
gcagaagcugggcagcgaggug

SEQ ID NO: 842067 - RNA, 22 nt, Human
gcuggugagcaaaggagaagga

SEQ ID NO: 842068 - RNA, 22 nt, Human
uggcagggaauacagauguuua

SEQ ID NO: 842069 - RNA, 22 nt, Human
gcccaggaaagauagggccuca

SEQ ID NO: 842070 - RNA, 22 nt, Human
cauuuacuuaaaucuuuacaag

SEQ ID NO: 842071 - RNA, 22 nt, Human
caagaaauguuuacugagcauc

SEQ ID NO: 842072 - RNA, 22 nt, Human
ugacaccacaacuagccauuga

SEQ ID NO: 842073 - RNA, 22 nt, Human
uuagugucuucuucauccucug

SEQ ID NO: 842074 - RNA, 22 nt, Human
agcagugggggaguguuaguuu

SEQ ID NO: 842075 - RNA, 22 nt, Human
gaaaaugugucaucccuacugu

SEQ ID NO: 842076 - RNA, 20 nt, Human
uguaacaaucuggauguugc

SEQ ID NO: 842077 - RNA, 22 nt, Human
ccagagcuccagggcuacagaa

SEQ ID NO: 842078 - RNA, 22 nt, Human
auuguauuuccagcuugaaugu

SEQ ID NO: 842079 - RNA, 22 nt, Human
uauuccagguuucuuguuguau

SEQ ID NO: 842080 - RNA, 22 nt, Human
gggcccuggacguggcggcaga

SEQ ID NO: 842081 - RNA, 22 nt, Human
ugaaaguuacaggaaaacagau

SEQ ID NO: 842082 - RNA, 22 nt, Human
caggucagagucccccuguccu

SEQ ID NO: 842083 - RNA, 22 nt, Human
gagcagcuuaugucaagccaga

SEQ ID NO: 842084 - RNA, 21 nt, Human
uaucuacuggugucuuucaga

SEQ ID NO: 842085 - RNA, 22 nt, Human
ggagcagagcugggcuuggcug

SEQ ID NO: 842086 - RNA, 21 nt, Human
gccucugcugucuuauuguga

SEQ ID NO: 842087 - RNA, 22 nt, Human
ccuaagaauuaaugaauacacc

SEQ ID NO: 842088 - RNA, 20 nt, Human
uuucugugcccaggucuguu

SEQ ID NO: 842089 - RNA, 22 nt, Human
aggccugagccccagguuuguu

SEQ ID NO: 842090 - RNA, 21 nt, Human
uggcucuggguaggagagugc

SEQ ID NO: 842091 - RNA, 22 nt, Human
aaguauuucguucugaaaaagu

SEQ ID NO: 842092 - RNA, 22 nt, Human
aggacucaucccugcuugucag

SEQ ID NO: 842093 - RNA, 19 nt, Human
ugaagcaauaccauuuuug

SEQ ID NO: 842094 - RNA, 22 nt, Human
gugggaugguagguagguaaua

SEQ ID NO: 842095 - RNA, 22 nt, Human
cucuguagaaacagggcagaag

SEQ ID NO: 842096 - RNA, 22 nt, Human
ugcagggcuuccucuuggaguu

SEQ ID NO: 842097 - RNA, 22 nt, Human
uggcagagucaucacaucugga

SEQ ID NO: 842098 - RNA, 22 nt, Human
agagugaaguucaucgugcagc

SEQ ID NO: 842099 - RNA, 22 nt, Human
uccuccaggucuaggguggcuu

SEQ ID NO: 842100 - RNA, 22 nt, Human
agguggagaagagaugggcagu

SEQ ID NO: 842101 - RNA, 19 nt, Human
uccucaggggcucacagac

SEQ ID NO: 842102 - RNA, 22 nt, Human
uggacagcgaaagugccuggga

SEQ ID NO: 842103 - RNA, 22 nt, Human
ucaaaauuaaaccaacguccag

SEQ ID NO: 842104 - RNA, 22 nt, Human
aguacaauuuaaugaagauagc

SEQ ID NO: 842105 - RNA, 22 nt, Human
auugucuuuccacugagaaguu

SEQ ID NO: 842106 - RNA, 22 nt, Human
gcagcacauauaaacaaagaga

SEQ ID NO: 842107 - RNA, 21 nt, Human
cuacagaagcucuccuaucca

SEQ ID NO: 842108 - RNA, 22 nt, Human
ucuggcaggcaaucggcucugg

SEQ ID NO: 842109 - RNA, 23 nt, Human
ccaaagucgaagucuaguccaga

SEQ ID NO: 842110 - RNA, 22 nt, Human
aggagggugauccgggcugguc

SEQ ID NO: 842111 - RNA, 22 nt, Human
caaagcaccacaaaccagguga

SEQ ID NO: 842112 - RNA, 18 nt, Human
uuugcaaaggaaguaugg

SEQ ID NO: 842113 - RNA, 22 nt, Human
aucauuacuccuguaaaauugu

SEQ ID NO: 842114 - RNA, 22 nt, Human
ucaaaugcugccuuugugugcc

SEQ ID NO: 842115 - RNA, 22 nt, Human
cucucccagucaggcucaggau

SEQ ID NO: 842116 - RNA, 22 nt, Human
uaaauuauguuccauguccuuu

SEQ ID NO: 842117 - RNA, 22 nt, Human
ugcuauaaguagacauucaaca

SEQ ID NO: 842118 - RNA, 22 nt, Human
ggagcugaugacgucaccaugg

SEQ ID NO: 842119 - RNA, 22 nt, Human
uuauccuggauuauauauguga

SEQ ID NO: 842120 - RNA, 22 nt, Human
ugccuuccuggagcugaaggcu

SEQ ID NO: 842121 - RNA, 19 nt, Human
ggacacagaaagcugcauu

SEQ ID NO: 842122 - RNA, 22 nt, Human
agcagccagugggagugauaca

SEQ ID NO: 842123 - RNA, 22 nt, Human
auuguacuuuuauuacauguag

SEQ ID NO: 842124 - RNA, 22 nt, Human
agccucugguccucccucagcu

SEQ ID NO: 842125 - RNA, 22 nt, Human
ucugccugaaauucacauguaa

SEQ ID NO: 842126 - RNA, 22 nt, Human
uaggcaggugugcacugcccac

SEQ ID NO: 842127 - RNA, 22 nt, Human
caggcaggugcagauuccucuu

SEQ ID NO: 842128 - RNA, 22 nt, Human
gguggcagcgucuaucugacau

SEQ ID NO: 842129 - RNA, 22 nt, Human
uuauuuaauuuucucacucaga

SEQ ID NO: 842130 - RNA, 22 nt, Human
uaaaugugcacagguuagaagg

SEQ ID NO: 842131 - RNA, 22 nt, Human
gcugugugacugagagccuggc

SEQ ID NO: 842132 - RNA, 22 nt, Human
uuuucagaggccuaagagguuu

SEQ ID NO: 842133 - RNA, 22 nt, Human
aaaauuauucauggcuuuugga

SEQ ID NO: 842134 - RNA, 22 nt, Human
uccaguggugguuugaagggca

SEQ ID NO: 842135 - RNA, 22 nt, Human
caauacuuccuuguuagaggca

SEQ ID NO: 842136 - RNA, 20 nt, Human
cugcuguguuauuguagaac

SEQ ID NO: 842137 - RNA, 22 nt, Human
caggaggaggugagguagaacu

SEQ ID NO: 842138 - RNA, 22 nt, Human
uaugcacagaaguuugcugaau

SEQ ID NO: 842139 - RNA, 22 nt, Human
uugugcauuucucugagugugu

SEQ ID NO: 842140 - RNA, 22 nt, Human
acaauacuauuuucaguauccu

SEQ ID NO: 842141 - RNA, 22 nt, Human
ucccagcauaacaaacugcccg

SEQ ID NO: 842142 - RNA, 22 nt, Human
aagacagaccacgugacagggc

SEQ ID NO: 842143 - RNA, 22 nt, Human
caggucccgccccgggcugacc

SEQ ID NO: 842144 - RNA, 22 nt, Human
acacauauucauauguacuuac

SEQ ID NO: 842145 - RNA, 22 nt, Human
guggccuuuccugaagaaauga

SEQ ID NO: 842146 - RNA, 22 nt, Human
aggcagcuuuguaguaaagcua

SEQ ID NO: 842147 - RNA, 20 nt, Human
gccagcccugacacaggagc

SEQ ID NO: 842148 - RNA, 22 nt, Human
ccugugugcacacgaggccaug

SEQ ID NO: 842149 - RNA, 22 nt, Human
aggagcugaagucucugcacuc

SEQ ID NO: 842150 - RNA, 22 nt, Human
acauuguagacuuuucauaugu

SEQ ID NO: 842151 - RNA, 22 nt, Human
cuccugggcucaagugauccuc

SEQ ID NO: 842152 - RNA, 21 nt, Human
gggcuggacaugguggcucau

SEQ ID NO: 842153 - RNA, 22 nt, Human
uacugaaaguggucaacagugg

SEQ ID NO: 842154 - RNA, 22 nt, Human
gucugcccucacgccagcuggg

SEQ ID NO: 842155 - RNA, 22 nt, Human
uagccgggugugguggaacucc

SEQ ID NO: 842156 - RNA, 22 nt, Human
uuugaagugcaaugaggauucu

SEQ ID NO: 842157 - RNA, 22 nt, Human
ggcuagaacuuuacacuuugca

SEQ ID NO: 842158 - RNA, 22 nt, Human
aggcuccuuguucaucauccau

SEQ ID NO: 842159 - RNA, 22 nt, Human
ugcucuggagggugaagcuuuu

SEQ ID NO: 842160 - RNA, 22 nt, Human
ugggcuccagcaccugugcucu

SEQ ID NO: 842161 - RNA, 22 nt, Human
aguggcaggaaaguggaagaga

SEQ ID NO: 842162 - RNA, 22 nt, Human
uuugaauguuuuagguacuuaa

SEQ ID NO: 842163 - RNA, 22 nt, Human
cagggcuggauccuccagacuc

SEQ ID NO: 842164 - RNA, 22 nt, Human
uuuauguuugacaaugaucugg

SEQ ID NO: 842165 - RNA, 22 nt, Human
cacugcuuuaaggcugaguaac

SEQ ID NO: 842166 - RNA, 22 nt, Human
gcguuaauaacauuaauaaugc

SEQ ID NO: 842167 - RNA, 22 nt, Human
aaucuuagguuuggcuucaucu

SEQ ID NO: 842168 - RNA, 22 nt, Human
aguuuuucugcuggucucacua

SEQ ID NO: 842169 - RNA, 22 nt, Human
uaaauguguguagccaucugug

SEQ ID NO: 842170 - RNA, 22 nt, Human
agccagucggggccaugcuggg

SEQ ID NO: 842171 - RNA, 22 nt, Human
ugcauuaucuuuaauguucuca

SEQ ID NO: 842172 - RNA, 22 nt, Human
ucaggggcuugaggugcauguc

SEQ ID NO: 842173 - RNA, 22 nt, Human
caggagacaaguuagcagcuga

SEQ ID NO: 842174 - RNA, 22 nt, Human
cugccuggcuaaacucaagucg

SEQ ID NO: 842175 - RNA, 22 nt, Human
cccaucacagacacuggguuau

SEQ ID NO: 842176 - RNA, 22 nt, Human
uggcagggugggcuucagcccc

SEQ ID NO: 842177 - RNA, 22 nt, Human
auugugcaaauauuaucuguag

SEQ ID NO: 842178 - RNA, 22 nt, Human
aaucagaaucaguugacacagc

SEQ ID NO: 842179 - RNA, 22 nt, Human
aaaguguugggauuacaggugu

SEQ ID NO: 842180 - RNA, 22 nt, Human
cagcauggagacaaagugggca

SEQ ID NO: 842181 - RNA, 22 nt, Human
ccucacuggccagccaggggug

SEQ ID NO: 842182 - RNA, 22 nt, Human
ggcugcugggaauaugccagcu

SEQ ID NO: 842183 - RNA, 22 nt, Human
ggaggggaggauuaaugacaaa

SEQ ID NO: 842184 - RNA, 19 nt, Human
ucaaagcaagcauguucug

SEQ ID NO: 842185 - RNA, 22 nt, Human
agucucagaaaauaugcuuuuu

SEQ ID NO: 842186 - RNA, 19 nt, Human
ccugucugucuucagcuag

SEQ ID NO: 842187 - RNA, 22 nt, Human
cuuaauuacccaaugugguagg

SEQ ID NO: 842188 - RNA, 22 nt, Human
cauuucaaacaguuacagcugc

SEQ ID NO: 842189 - RNA, 22 nt, Human
cucucugaggaaggagcaucug

SEQ ID NO: 842190 - RNA, 22 nt, Human
uccagugguacauggagacacu

SEQ ID NO: 842191 - RNA, 22 nt, Human
gcuguggcuguacagagaccau

SEQ ID NO: 842192 - RNA, 19 nt, Human
aauguaguguuaugucaac

SEQ ID NO: 842193 - RNA, 22 nt, Human
aggaggcugguucaggccauau

SEQ ID NO: 842194 - RNA, 22 nt, Human
cccaagagcuucuaggacgcug

SEQ ID NO: 842195 - RNA, 22 nt, Human
acagauguacacucauauauaa

SEQ ID NO: 842196 - RNA, 22 nt, Human
guacagaaggagcuuuggauuc

SEQ ID NO: 842197 - RNA, 22 nt, Human
acucagaaccauuuacucugag

SEQ ID NO: 842198 - RNA, 19 nt, Human
uucccaggaaaggggugca

SEQ ID NO: 842199 - RNA, 22 nt, Human
gagaggaguagacacuuugguu

SEQ ID NO: 842200 - RNA, 22 nt, Human
acaauucugaugguuucccagu

SEQ ID NO: 842201 - RNA, 22 nt, Human
ucaguuuucucaucuguaauuu

SEQ ID NO: 842202 - RNA, 20 nt, Human
cccucccagaugcuucccaa

SEQ ID NO: 842203 - RNA, 22 nt, Human
agauauuuguaucuugcuauug

SEQ ID NO: 842204 - RNA, 22 nt, Human
ccagcagaagcucccgcugggu

SEQ ID NO: 842205 - RNA, 18 nt, Human
gguggccuugacuucucu

SEQ ID NO: 842206 - RNA, 22 nt, Human
aaguucaaggcucuagaguucc

SEQ ID NO: 842207 - RNA, 22 nt, Human
ggcaaaaaccgcaauaacuucu

SEQ ID NO: 842208 - RNA, 22 nt, Human
ccacccagccagaugcaggaag

SEQ ID NO: 842209 - RNA, 19 nt, Human
uggcugggugccaauggcc

SEQ ID NO: 842210 - RNA, 22 nt, Human
agaacagaagggaggaaggccu

SEQ ID NO: 842211 - RNA, 20 nt, Human
uggagccaaggugugucugg

SEQ ID NO: 842212 - RNA, 22 nt, Human
cuaucuuucgauucuagcuuaa

SEQ ID NO: 842213 - RNA, 22 nt, Human
accucaggauguggacacagaa

SEQ ID NO: 842214 - RNA, 18 nt, Human
agggaguuuuagggaagg

SEQ ID NO: 842215 - RNA, 22 nt, Human
uggcucaggggucuggcucugu

SEQ ID NO: 842216 - RNA, 22 nt, Human
guuuggggucugcagagcggcg

SEQ ID NO: 842217 - RNA, 22 nt, Human
aaugauuuccccuacacagaag

SEQ ID NO: 842218 - RNA, 22 nt, Human
ugcagaggaccauuguccugga

SEQ ID NO: 842219 - RNA, 22 nt, Human
gcauucaucuuccuccaugcag

SEQ ID NO: 842220 - RNA, 22 nt, Human
auuuccucaugaucauaaugca

SEQ ID NO: 842221 - RNA, 22 nt, Human
cagagaaaaaauccugcucuca

SEQ ID NO: 842222 - RNA, 22 nt, Human
cucuggaguucucaugaggaac

SEQ ID NO: 842223 - RNA, 22 nt, Human
ucugcagcgugcaggcuggugc

SEQ ID NO: 842224 - RNA, 22 nt, Human
gagccaggcaccuucuguguug

SEQ ID NO: 842225 - RNA, 22 nt, Human
ccagagcccagcacacggugcu

SEQ ID NO: 842226 - RNA, 21 nt, Human
ucuauucauuacaguuauuug

SEQ ID NO: 842227 - RNA, 22 nt, Human
ucaguuuucucauuuaugagau

SEQ ID NO: 842228 - RNA, 22 nt, Human
uccucuggcucuuucccuagga

SEQ ID NO: 842229 - RNA, 22 nt, Human
gguggguauaguuagggccucu

SEQ ID NO: 842230 - RNA, 22 nt, Human
uugucugucccagcuugugcau

SEQ ID NO: 842231 - RNA, 22 nt, Human
aaguccuucuuuauaugagagu

SEQ ID NO: 842232 - RNA, 22 nt, Human
auuaggcagacaacguagccgg

SEQ ID NO: 842233 - RNA, 22 nt, Human
guaggaagcucugaggcuaguu

SEQ ID NO: 842234 - RNA, 22 nt, Human
gaaagaagcuuuagauggcuau

SEQ ID NO: 842235 - RNA, 22 nt, Human
caccagcuuugcccacugccca

SEQ ID NO: 842236 - RNA, 22 nt, Human
cagcuggguuuaguggggugug

SEQ ID NO: 842237 - RNA, 21 nt, Human
acaugcauagagagauuucug

SEQ ID NO: 842238 - RNA, 22 nt, Human
uggccugucuuguugugcuaga

SEQ ID NO: 842239 - RNA, 22 nt, Human
cacagaggcaaccuucuggggu

SEQ ID NO: 842240 - RNA, 22 nt, Human
gagaggcugaaaucacaggagc

SEQ ID NO: 842241 - RNA, 22 nt, Human
ucuggcuccugaguccaugcuc

SEQ ID NO: 842242 - RNA, 18 nt, Human
ggcucaggcuauccuaac

SEQ ID NO: 842243 - RNA, 22 nt, Human
cagcccagcagggucuggcccu

SEQ ID NO: 842244 - RNA, 22 nt, Human
agaaaagaggcuuucuaagcau

SEQ ID NO: 842245 - RNA, 22 nt, Human
uccauuuacuauucucauaucg

SEQ ID NO: 842246 - RNA, 22 nt, Human
ggcauuuaucuaauauaguuua

SEQ ID NO: 842247 - RNA, 22 nt, Human
ccugucuguccucucaugagcc

SEQ ID NO: 842248 - RNA, 22 nt, Human
cauuaagauuuuuuucuacugg

SEQ ID NO: 842249 - RNA, 22 nt, Human
cugcugugagugguucuugccu

SEQ ID NO: 842250 - RNA, 22 nt, Human
gcaaaugaguuguaacauaaaa

SEQ ID NO: 842251 - RNA, 22 nt, Human
gggacagacccaugggccaggu

SEQ ID NO: 842252 - RNA, 22 nt, Human
uauuucaagaacuucuauccau

SEQ ID NO: 842253 - RNA, 22 nt, Human
aaacacagggauauauauucca

SEQ ID NO: 842254 - RNA, 22 nt, Human
uucacauuauaaucaguucugc

SEQ ID NO: 842255 - RNA, 22 nt, Human
acugagcucuugacugggaguu

SEQ ID NO: 842256 - RNA, 19 nt, Human
agcaccugugagagccugg

SEQ ID NO: 842257 - RNA, 22 nt, Human
uuaaaauuauggcccauuugga

SEQ ID NO: 842258 - RNA, 22 nt, Human
uaaaauguuugcaagagaccag

SEQ ID NO: 842259 - RNA, 22 nt, Human
guuauguaucuugauugggugg

SEQ ID NO: 842260 - RNA, 22 nt, Human
gcagcguggggcugagucagcu

SEQ ID NO: 842261 - RNA, 22 nt, Human
cugcuuugggcagcuuuguggc

SEQ ID NO: 842262 - RNA, 22 nt, Human
gcagauggacuguaugaccuga

SEQ ID NO: 842263 - RNA, 22 nt, Human
ccuuggagcggucagcacuggu

SEQ ID NO: 842264 - RNA, 22 nt, Human
acauguguauagccuguauaga

SEQ ID NO: 842265 - RNA, 22 nt, Human
gaaggaagugcucauacuaguu

SEQ ID NO: 842266 - RNA, 22 nt, Human
gccugcuguuaacugcaggaau

SEQ ID NO: 842267 - RNA, 22 nt, Human
gacauucacagguaaacauucc

SEQ ID NO: 842268 - RNA, 19 nt, Human
ucuggagcugaugcaggug

SEQ ID NO: 842269 - RNA, 22 nt, Human
ccaaaauuauuacauuuguagg

SEQ ID NO: 842270 - RNA, 22 nt, Human
gcucagaaaagugaggcucagu

SEQ ID NO: 842271 - RNA, 22 nt, Human
cuuccuucugaagcauagaagc

SEQ ID NO: 842272 - RNA, 22 nt, Human
guggcugguuuccugcaugcaa

SEQ ID NO: 842273 - RNA, 22 nt, Human
gagagugagauccuccugggga

SEQ ID NO: 842274 - RNA, 22 nt, Human
ugugaaaggagccauagacagu

SEQ ID NO: 842275 - RNA, 22 nt, Human
ccaggccucccuuuuccagcca

SEQ ID NO: 842276 - RNA, 22 nt, Human
cagaguguuucuuugggugggu

SEQ ID NO: 842277 - RNA, 22 nt, Human
cccaguccuaaagcagacgcca

SEQ ID NO: 842278 - RNA, 22 nt, Human
cauuguuauagcauuacacacc

SEQ ID NO: 842279 - RNA, 22 nt, Human
uuuacagaaugucaauuucuau

SEQ ID NO: 842280 - RNA, 22 nt, Human
caggugccucaggaugagacaa

SEQ ID NO: 842281 - RNA, 18 nt, Human
ugagagugugugcucuug

SEQ ID NO: 842282 - RNA, 22 nt, Human
ucugucacucuagagauggcag

SEQ ID NO: 842283 - RNA, 22 nt, Human
ggagcugcuccuucagccaagu

SEQ ID NO: 842284 - RNA, 19 nt, Human
cagcucaguuugauucucu

SEQ ID NO: 842285 - RNA, 22 nt, Human
ggcagaggaaggaugaauucac

SEQ ID NO: 842286 - RNA, 22 nt, Human
aagcagaaguugaucuaccaua

SEQ ID NO: 842287 - RNA, 22 nt, Human
agggggugucucugauuggguu

SEQ ID NO: 842288 - RNA, 21 nt, Human
aggcugcuggcucaggguccu

SEQ ID NO: 842289 - RNA, 22 nt, Human
cacauguuuggcaugucaccaa

SEQ ID NO: 842290 - RNA, 21 nt, Human
gaauaguucuguggcagcagu

SEQ ID NO: 842291 - RNA, 18 nt, Human
acaggccucaguccugca

SEQ ID NO: 842292 - RNA, 22 nt, Human
aggcaggcccucuggaaaggua

SEQ ID NO: 842293 - RNA, 22 nt, Human
uuuagaaauucaucuauggccu

SEQ ID NO: 842294 - RNA, 22 nt, Human
aaugcaguuucauuuguagaau

SEQ ID NO: 842295 - RNA, 22 nt, Human
cagugggcugugauggauucac

SEQ ID NO: 842296 - RNA, 22 nt, Human
agaggcugcacuugcucaugau

SEQ ID NO: 842297 - RNA, 22 nt, Human
aggccuggcaugagaccugaga

SEQ ID NO: 842298 - RNA, 22 nt, Human
uaaucacaucaggguaaauggg

SEQ ID NO: 842299 - RNA, 22 nt, Human
ucccagcccagauuugugugac

SEQ ID NO: 842300 - RNA, 22 nt, Human
cuuucagagguuacucaggaaa

SEQ ID NO: 842301 - RNA, 22 nt, Human
ccacacugaaccucagugucuu

SEQ ID NO: 842302 - RNA, 22 nt, Human
gcucucugccauaugaggauac

SEQ ID NO: 842303 - RNA, 22 nt, Human
gcucucuguuauuaagaucuuu

SEQ ID NO: 842304 - RNA, 22 nt, Human
acuggacagaggaaauauggag

SEQ ID NO: 842305 - RNA, 22 nt, Human
ucagccuggcaggauggccugg

SEQ ID NO: 842306 - RNA, 22 nt, Human
acucugccaucccaggugcugu

SEQ ID NO: 842307 - RNA, 22 nt, Human
agagcugugaaaaugagguuug

SEQ ID NO: 842308 - RNA, 22 nt, Human
agcauucauugcuagaauguaa

SEQ ID NO: 842309 - RNA, 22 nt, Human
ggcucugcugguaagaugccuc

SEQ ID NO: 842310 - RNA, 22 nt, Human
agagccaggaugucuucugggg

SEQ ID NO: 842311 - RNA, 22 nt, Human
gagcuggcuaauacugacuuau

SEQ ID NO: 842312 - RNA, 22 nt, Human
auauaaaguguuuagaaagcug

SEQ ID NO: 842313 - RNA, 22 nt, Human
gcauccagagguagccacugug

SEQ ID NO: 842314 - RNA, 22 nt, Human
agugaaaugacugaaucagaua

SEQ ID NO: 842315 - RNA, 22 nt, Human
agagcugcaauuucauguggug

SEQ ID NO: 842316 - RNA, 22 nt, Human
ucaaaguccuugcuuuuucugu

SEQ ID NO: 842317 - RNA, 22 nt, Human
ugggccugccccaggcuucagc

SEQ ID NO: 842318 - RNA, 22 nt, Human
aguuauaugugaaaacacguau

SEQ ID NO: 842319 - RNA, 22 nt, Human
aaaagguaguugccaaauaagg

SEQ ID NO: 842320 - RNA, 22 nt, Human
uuuaaauuuguguuuagagggu

SEQ ID NO: 842321 - RNA, 22 nt, Human
ugagccuggcggaagcagcgug

SEQ ID NO: 842322 - RNA, 22 nt, Human
gccaggggacgcggagcgacga

SEQ ID NO: 842323 - RNA, 22 nt, Human
acccaggacuuggcaaccucau

SEQ ID NO: 842324 - RNA, 22 nt, Human
gugcuuccugccuggugccuuu

SEQ ID NO: 842325 - RNA, 22 nt, Human
ggcagcuggggcagugcccugu

SEQ ID NO: 842326 - RNA, 22 nt, Human
aggagcuggguuccuuuggugg

SEQ ID NO: 842327 - RNA, 22 nt, Human
ucagaggugguaaaggacagca

SEQ ID NO: 842328 - RNA, 22 nt, Human
agugcagugguuaggagccagg

SEQ ID NO: 842329 - RNA, 22 nt, Human
aauguauggauucaugucugug

SEQ ID NO: 842330 - RNA, 22 nt, Human
ugucaccucuuuggcugcagcu

SEQ ID NO: 842331 - RNA, 21 nt, Human
aagggagauaggaaucaggcc

SEQ ID NO: 842332 - RNA, 22 nt, Human
cucaaguaagaaacagaauugg

SEQ ID NO: 842333 - RNA, 23 nt, Human
ucuguacaauugagaagagaaca

SEQ ID NO: 842334 - RNA, 22 nt, Human
guuauugcaguauagaggucua

SEQ ID NO: 842335 - RNA, 22 nt, Human
uucugggagagaaagggccuug

SEQ ID NO: 842336 - RNA, 18 nt, Human
uacaugcauaaaugaagc

SEQ ID NO: 842337 - RNA, 22 nt, Human
cugaggugagcuucccugggcu

SEQ ID NO: 842338 - RNA, 22 nt, Human
uuuauuaugauggacaccuucg

SEQ ID NO: 842339 - RNA, 22 nt, Human
gcaaauucuuaacuggacugug

SEQ ID NO: 842340 - RNA, 22 nt, Human
uuuaggcagaagcccugcugau

SEQ ID NO: 842341 - RNA, 22 nt, Human
uuuccucacuucaugagaguuu

SEQ ID NO: 842342 - RNA, 18 nt, Human
acagacaaaauggaaaug

SEQ ID NO: 842343 - RNA, 22 nt, Human
ucagagccaaucauggugcauu

SEQ ID NO: 842344 - RNA, 22 nt, Human
cugggcugcagcgggagcgacg

SEQ ID NO: 842345 - RNA, 22 nt, Human
cagagcagagugauuguucugg

SEQ ID NO: 842346 - RNA, 22 nt, Human
uaaccauauuuuccauuaaguu

SEQ ID NO: 842347 - RNA, 22 nt, Human
ugaaucugauuucccuggaggc

SEQ ID NO: 842348 - RNA, 22 nt, Human
uucuugaaucacuuuagagaua

SEQ ID NO: 842349 - RNA, 22 nt, Human
gccuggguccacugaucaugcu

SEQ ID NO: 842350 - RNA, 22 nt, Human
agcagcugaccagugaguccug

SEQ ID NO: 842351 - RNA, 22 nt, Human
caguaaauacauaucagagaag

SEQ ID NO: 842352 - RNA, 22 nt, Human
uggaaauacuugccauaaaacu

SEQ ID NO: 842353 - RNA, 17 nt, Human
aagagaggcugagcugg

SEQ ID NO: 842354 - RNA, 22 nt, Human
ucagcugccucucccuggaaga

SEQ ID NO: 842355 - RNA, 22 nt, Human
aaguccuuucucauggaggaau

SEQ ID NO: 842356 - RNA, 20 nt, Human
ugcagcugcaggaggguggg

SEQ ID NO: 842357 - RNA, 22 nt, Human
gcucucugaggugcuggcagag

SEQ ID NO: 842358 - RNA, 22 nt, Human
gaaggcuggcuuucugagagca

SEQ ID NO: 842359 - RNA, 22 nt, Human
uggcagcugauuagauggugcc

SEQ ID NO: 842360 - RNA, 22 nt, Human
gcauugucaaaagugguaugac

SEQ ID NO: 842361 - RNA, 22 nt, Human
acagggcaaccucugggagacu

SEQ ID NO: 842362 - RNA, 22 nt, Human
uaugcauauagaugcacacaca

SEQ ID NO: 842363 - RNA, 22 nt, Human
caggaugggugucggccagcac

SEQ ID NO: 842364 - RNA, 22 nt, Human
ugucaccacauuugucaauauc

SEQ ID NO: 842365 - RNA, 22 nt, Human
ugagccaguggaagauggcagu

SEQ ID NO: 842366 - RNA, 22 nt, Human
gcaagcugcucuuauguggagg

SEQ ID NO: 842367 - RNA, 22 nt, Human
auaauuuacaacugcuuuuaau

SEQ ID NO: 842368 - RNA, 22 nt, Human
aaaaguaauugaugcaaucgua

SEQ ID NO: 842369 - RNA, 22 nt, Human
ccagaggugccacagaaagagc

SEQ ID NO: 842370 - RNA, 22 nt, Human
gcugccaugccacagcacucac

SEQ ID NO: 842371 - RNA, 20 nt, Human
cucaguguggccugaguguu

SEQ ID NO: 842372 - RNA, 22 nt, Human
gaugcagaaaguagacaccauc

SEQ ID NO: 842373 - RNA, 22 nt, Human
gacauguugaagaauauuugga

SEQ ID NO: 842374 - RNA, 22 nt, Human
ugcagcugaggccagcuaugcc

SEQ ID NO: 842375 - RNA, 20 nt, Human
gcacugaaauucaauguuug

SEQ ID NO: 842376 - RNA, 22 nt, Human
uggggccuggucagagcugcac

SEQ ID NO: 842377 - RNA, 22 nt, Human
uucuuucccagaagauauguuu

SEQ ID NO: 842378 - RNA, 22 nt, Human
caaugauguuuagauaaaaucc

SEQ ID NO: 842379 - RNA, 22 nt, Human
uuauccaacaugacuuaugucc

SEQ ID NO: 842380 - RNA, 20 nt, Human
cccaggagcugugccccauc

SEQ ID NO: 842381 - RNA, 22 nt, Human
gcaggagaacaaagcaagcugc

SEQ ID NO: 842382 - RNA, 22 nt, Human
cuaauuauguuguuauaaucaa

SEQ ID NO: 842383 - RNA, 20 nt, Human
cccagugaagcauggaagag

SEQ ID NO: 842384 - RNA, 22 nt, Human
uggagcugacucacaccagcua

SEQ ID NO: 842385 - RNA, 22 nt, Human
uagcacauacauaauagauaga

SEQ ID NO: 842386 - RNA, 22 nt, Human
cugggacagcugagacaggaga

SEQ ID NO: 842387 - RNA, 22 nt, Human
ucugagaguccaucuccaagcc

SEQ ID NO: 842388 - RNA, 22 nt, Human
ccucuuugugccugcaggcugc

SEQ ID NO: 842389 - RNA, 22 nt, Human
ugggggagauuagagcuucuua

SEQ ID NO: 842390 - RNA, 22 nt, Human
agcugcccuuaauaggcauuca

SEQ ID NO: 842391 - RNA, 22 nt, Human
ccagggcauguccaagacuuag

SEQ ID NO: 842392 - RNA, 19 nt, Human
aggccugggguuuugcacu

SEQ ID NO: 842393 - RNA, 22 nt, Human
agugacugacaccuguaauccc

SEQ ID NO: 842394 - RNA, 22 nt, Human
gcuuggcauugaccauuaucau

SEQ ID NO: 842395 - RNA, 22 nt, Human
ugcaugcagcuggugauaagaa

SEQ ID NO: 842396 - RNA, 22 nt, Human
ugggcagauguccucugaagug

SEQ ID NO: 842397 - RNA, 19 nt, Human
uacuuuuucaggacagagu

SEQ ID NO: 842398 - RNA, 21 nt, Human
ucucuggaguuagcagagaga

SEQ ID NO: 842399 - RNA, 22 nt, Human
ccaaaguccauaguuuacauaa

SEQ ID NO: 842400 - RNA, 22 nt, Human
gacagaggcaagaccagaagcc

SEQ ID NO: 842401 - RNA, 17 nt, Human
guuugcaugguguuaac

SEQ ID NO: 842402 - RNA, 22 nt, Human
cuggauuuuagaaggcuuccua

SEQ ID NO: 842403 - RNA, 22 nt, Human
aacaaaugauuguugguuggag

SEQ ID NO: 842404 - RNA, 22 nt, Human
aauuucaaacuaauaggaacca

SEQ ID NO: 842405 - RNA, 22 nt, Human
aguugaauaauuagacauaucu

SEQ ID NO: 842406 - RNA, 22 nt, Human
ucaggagucugugcaguuccac

SEQ ID NO: 842407 - RNA, 23 nt, Human
augguuuaugucacacuuuugau

SEQ ID NO: 842408 - RNA, 22 nt, Human
uccugggcccaggcugccaggg

SEQ ID NO: 842409 - RNA, 23 nt, Human
aggagccaggaaccagcuucccc

SEQ ID NO: 842410 - RNA, 22 nt, Human
caguguguggauccucccagga

SEQ ID NO: 842411 - RNA, 19 nt, Human
agaaaucucgagauuuguu

SEQ ID NO: 842412 - RNA, 22 nt, Human
uucaacucuucaagaucacauc

SEQ ID NO: 842413 - RNA, 22 nt, Human
gaaggagcuaaagggagcccug

SEQ ID NO: 842414 - RNA, 22 nt, Human
cucuggaaaaccacuagcagga

SEQ ID NO: 842415 - RNA, 22 nt, Human
augcaguaaauguuaagaaaaa

SEQ ID NO: 842416 - RNA, 18 nt, Human
ccagcaugccagaggcug

SEQ ID NO: 842417 - RNA, 22 nt, Human
auagacauuuugcauucaagca

SEQ ID NO: 842418 - RNA, 22 nt, Human
uguuccuaaauaugaauggaga

SEQ ID NO: 842419 - RNA, 22 nt, Human
gcuuccugauauucauacuguu

SEQ ID NO: 842420 - RNA, 22 nt, Human
ccuggagcacucucccuggcug

SEQ ID NO: 842421 - RNA, 22 nt, Human
acagcagcuaaaggugucuccu

SEQ ID NO: 842422 - RNA, 22 nt, Human
aauguuaaaaccuucagugcuu

SEQ ID NO: 842423 - RNA, 22 nt, Human
ggcuggaaaagacaaagcuauu

SEQ ID NO: 842424 - RNA, 22 nt, Human
acugagcugcaagucagggagg

SEQ ID NO: 842425 - RNA, 19 nt, Human
cugugcaggccgggcugag

SEQ ID NO: 842426 - RNA, 22 nt, Human
gggugaggagcugccagucaug

SEQ ID NO: 842427 - RNA, 22 nt, Human
uggaggaaguggcuggccagaa

SEQ ID NO: 842428 - RNA, 22 nt, Human
ucagcaguggcucucaugcagu

SEQ ID NO: 842429 - RNA, 22 nt, Human
aaucagaaagaucuugaugaga

SEQ ID NO: 842430 - RNA, 22 nt, Human
uugaacauuaacuucagucuau

SEQ ID NO: 842431 - RNA, 19 nt, Human
ccucuccgcccaccagccc

SEQ ID NO: 842432 - RNA, 21 nt, Human
uguaugcacgcacaugcacac

SEQ ID NO: 842433 - RNA, 22 nt, Human
cuguggcuaggaagcuguggga

SEQ ID NO: 842434 - RNA, 22 nt, Human
gugauaaagacgugucauaauu

SEQ ID NO: 842435 - RNA, 23 nt, Human
uuguuuuuagagguggcaugaga

SEQ ID NO: 842436 - RNA, 22 nt, Human
augagacuaccuguaauguggc

SEQ ID NO: 842437 - RNA, 22 nt, Human
guggcugcuacagagcuggagg

SEQ ID NO: 842438 - RNA, 22 nt, Human
uagagcugcuggacuguaacag

SEQ ID NO: 842439 - RNA, 22 nt, Human
uauacacaaggugugcauuugu

SEQ ID NO: 842440 - RNA, 22 nt, Human
cuucaguucuaaaguagaaugu

SEQ ID NO: 842441 - RNA, 22 nt, Human
uggguagagcaggcuggggcuu

SEQ ID NO: 842442 - RNA, 22 nt, Human
cugggagucuggccucuggucc

SEQ ID NO: 842443 - RNA, 19 nt, Human
gccugggaugggcagaacu

SEQ ID NO: 842444 - RNA, 22 nt, Human
acccaggagguggaggcugcag

SEQ ID NO: 842445 - RNA, 22 nt, Human
caggagacuauggcccaaggcc

SEQ ID NO: 842446 - RNA, 21 nt, Human
uaucagaagagaaagaaugau

SEQ ID NO: 842447 - RNA, 23 nt, Human
ccacagagcugccaauuccugug

SEQ ID NO: 842448 - RNA, 22 nt, Human
ucugcugugauuugcuaccugu

SEQ ID NO: 842449 - RNA, 22 nt, Human
uuccucucucuugccagaaugu

SEQ ID NO: 842450 - RNA, 22 nt, Human
ccagcuggagccaagguggacu

SEQ ID NO: 842451 - RNA, 22 nt, Human
uuccuuaguuauuugguccccu

SEQ ID NO: 842452 - RNA, 19 nt, Human
auuugaaagcugugcuugc

SEQ ID NO: 842453 - RNA, 22 nt, Human
gccuggugaaaggcagagagcg

SEQ ID NO: 842454 - RNA, 22 nt, Human
guguguuuagcauuagcagggg

SEQ ID NO: 842455 - RNA, 22 nt, Human
aggcaggcugcuauggaguaga

SEQ ID NO: 842456 - RNA, 22 nt, Human
aggauuuaccgucauuuagucu

SEQ ID NO: 842457 - RNA, 22 nt, Human
cagagacagggcagggagugug

SEQ ID NO: 842458 - RNA, 22 nt, Human
gccccucccagucaggagcacu

SEQ ID NO: 842459 - RNA, 22 nt, Human
gccuggugcuaugagggccagc

SEQ ID NO: 842460 - RNA, 22 nt, Human
ccaugagacagcaacugaaagu

SEQ ID NO: 842461 - RNA, 22 nt, Human
cagccaucaguaaagacagcuu

SEQ ID NO: 842462 - RNA, 22 nt, Human
uuugcaaauaccaugaaacuug

SEQ ID NO: 842463 - RNA, 22 nt, Human
cccucagcuucucccugcagcu

SEQ ID NO: 842464 - RNA, 22 nt, Human
gcucugcugucuucuugcaggc

SEQ ID NO: 842465 - RNA, 20 nt, Human
cccaggagugagcagcuuua

SEQ ID NO: 842466 - RNA, 22 nt, Human
ugagcuggucuugaguguagcu

SEQ ID NO: 842467 - RNA, 22 nt, Human
caguagcauguaauaaagacag

SEQ ID NO: 842468 - RNA, 22 nt, Human
uuugcauuauauuuauagaaga

SEQ ID NO: 842469 - RNA, 22 nt, Human
agccucugcuggcccuggcacu

SEQ ID NO: 842470 - RNA, 20 nt, Human
ugggccuguggcagaagucu

SEQ ID NO: 842471 - RNA, 22 nt, Human
uagccggguguugugucaugca

SEQ ID NO: 842472 - RNA, 22 nt, Human
cugggcuggcgcauccgacacg

SEQ ID NO: 842473 - RNA, 19 nt, Human
ccagcccugucacuucuug

SEQ ID NO: 842474 - RNA, 19 nt, Human
uccaaaggacccaccucca

SEQ ID NO: 842475 - RNA, 22 nt, Human
guuguuuugcaggauccuuaca

SEQ ID NO: 842476 - RNA, 22 nt, Human
cucugucagaguguugucccca

SEQ ID NO: 842477 - RNA, 22 nt, Human
ugcuuaauguacgugaguguac

SEQ ID NO: 842478 - RNA, 22 nt, Human
cucucugggcccaguuggcacc

SEQ ID NO: 842479 - RNA, 22 nt, Human
aaaguaguuagucaugugaaaa

SEQ ID NO: 842480 - RNA, 22 nt, Human
uuuuucuuaaauguggguuggc

SEQ ID NO: 842481 - RNA, 22 nt, Human
ugggcugcacccucagccucug

SEQ ID NO: 842482 - RNA, 22 nt, Human
caggacagagcccagacugugu

SEQ ID NO: 842483 - RNA, 22 nt, Human
uucccucucacuuaaagcuugg

SEQ ID NO: 842484 - RNA, 22 nt, Human
ggcauuaagaauaucauuaaaa

SEQ ID NO: 842485 - RNA, 22 nt, Human
cccaggcugaguuagagguguc

SEQ ID NO: 842486 - RNA, 22 nt, Human
uuauuccauuauuucacuuagg

SEQ ID NO: 842487 - RNA, 22 nt, Human
cccccagccagcagugcucagc

SEQ ID NO: 842488 - RNA, 23 nt, Human
gcagagcugcccuauugccuugg

SEQ ID NO: 842489 - RNA, 22 nt, Human
agccucugucaagcuuuucaaa

SEQ ID NO: 842490 - RNA, 22 nt, Human
uguuaaucaaucaacaguauua

SEQ ID NO: 842491 - RNA, 22 nt, Human
uguaugcaaauuuauuagcaca

SEQ ID NO: 842492 - RNA, 22 nt, Human
ggcccacacugacagcugagcu

SEQ ID NO: 842493 - RNA, 22 nt, Human
cuacccagcaccuaggcugccu

SEQ ID NO: 842494 - RNA, 22 nt, Human
ugcacacaguucucaggaaaga

SEQ ID NO: 842495 - RNA, 22 nt, Human
ccccaccugugcgucugccgca

SEQ ID NO: 842496 - RNA, 21 nt, Human
agggagcuggccacacagccu

SEQ ID NO: 842497 - RNA, 22 nt, Human
ucacaggagggagagacaccca

SEQ ID NO: 842498 - RNA, 22 nt, Human
cucaccacagagccuguccagc

SEQ ID NO: 842499 - RNA, 22 nt, Human
uaaucauggccucaaauuuuau

SEQ ID NO: 842500 - RNA, 22 nt, Human
cucuggaauguuuacaugcccu

SEQ ID NO: 842501 - RNA, 22 nt, Human
uagaucugauacaauucaucug

SEQ ID NO: 842502 - RNA, 22 nt, Human
uaauaguuucauaaugugcuuc

SEQ ID NO: 842503 - RNA, 22 nt, Human
uuacauuagacccacuuucaug

SEQ ID NO: 842504 - RNA, 22 nt, Human
auggcuuucagauggugaaaga

SEQ ID NO: 842505 - RNA, 22 nt, Human
ucacagaauagcacuguaagcg

SEQ ID NO: 842506 - RNA, 22 nt, Human
cuggagagaccgaaagaggcug

SEQ ID NO: 842507 - RNA, 22 nt, Human
uuagggcuuuucugaauaggcc

SEQ ID NO: 842508 - RNA, 22 nt, Human
ucugggugcccuuugcucuguu

SEQ ID NO: 842509 - RNA, 22 nt, Human
gcagagcucaagguguucagcu

SEQ ID NO: 842510 - RNA, 22 nt, Human
auuaguaaaacauuguauaugu

SEQ ID NO: 842511 - RNA, 22 nt, Human
cccagggauuauaaaggugaaa

SEQ ID NO: 842512 - RNA, 22 nt, Human
auaucaguaucuauguauuugu

SEQ ID NO: 842513 - RNA, 22 nt, Human
uuggaaauggcuguaguuauga

SEQ ID NO: 842514 - RNA, 22 nt, Human
uagcugccuaugugauaagaga

SEQ ID NO: 842515 - RNA, 22 nt, Human
uggcucaggaucuaagcagaau

SEQ ID NO: 842516 - RNA, 22 nt, Human
acugccuugucucuugccuguu

SEQ ID NO: 842517 - RNA, 22 nt, Human
aggaaaacacaguauugaugga

SEQ ID NO: 842518 - RNA, 22 nt, Human
uauaucuuauaugugcagguac

SEQ ID NO: 842519 - RNA, 22 nt, Human
ucagaguggugguuuugccuuc

SEQ ID NO: 842520 - RNA, 20 nt, Human
ucuguucaaaucuuaguucc

SEQ ID NO: 842521 - RNA, 22 nt, Human
caucagaagauggcucuggaaa

SEQ ID NO: 842522 - RNA, 22 nt, Human
cagccccucccucaggcaggug

SEQ ID NO: 842523 - RNA, 22 nt, Human
auuugucugcuugcugccuucc

SEQ ID NO: 842524 - RNA, 22 nt, Human
gccagucugcucccacaaguuc

SEQ ID NO: 842525 - RNA, 21 nt, Human
cccaggaggagcuccggcucc

SEQ ID NO: 842526 - RNA, 22 nt, Human
ccaggcugcuguugguguccgc

SEQ ID NO: 842527 - RNA, 22 nt, Human
ggcuucucucuucacauggcuu

SEQ ID NO: 842528 - RNA, 22 nt, Human
uauaguacauggaaucuucaua

SEQ ID NO: 842529 - RNA, 22 nt, Human
ggugacuggagggacccaggcc

SEQ ID NO: 842530 - RNA, 22 nt, Human
ggccugagucccaccuggcugu

SEQ ID NO: 842531 - RNA, 22 nt, Human
aggcuagcaaugggagaugagu

SEQ ID NO: 842532 - RNA, 22 nt, Human
cucagaguccccaguggguuug

SEQ ID NO: 842533 - RNA, 22 nt, Human
ugagaaaugggucugcugaaga

SEQ ID NO: 842534 - RNA, 22 nt, Human
ugggcugcccugaugguccuca

SEQ ID NO: 842535 - RNA, 21 nt, Human
aagagcuggaucaaggauaag

SEQ ID NO: 842536 - RNA, 22 nt, Human
ugucagugaguuaguugcaagu

SEQ ID NO: 842537 - RNA, 22 nt, Human
uggggacacagagccaaacuau

SEQ ID NO: 842538 - RNA, 19 nt, Human
agcauuuggaauucuacac

SEQ ID NO: 842539 - RNA, 22 nt, Human
cacaagucuguggucuccaaca

SEQ ID NO: 842540 - RNA, 22 nt, Human
ugauuuccaugaagcugaaggc

SEQ ID NO: 842541 - RNA, 22 nt, Human
ugcaauaacccaguaucuguga

SEQ ID NO: 842542 - RNA, 22 nt, Human
uuucacacugcagcaucagaga

SEQ ID NO: 842543 - RNA, 22 nt, Human
uuugugaagggaacagaagugu

SEQ ID NO: 842544 - RNA, 23 nt, Human
aaaguugauuugcaguuuaagag

SEQ ID NO: 842545 - RNA, 22 nt, Human
ugagccagaguggagugugccu

SEQ ID NO: 842546 - RNA, 22 nt, Human
aaaguguugggaagaaagugca

SEQ ID NO: 842547 - RNA, 22 nt, Human
auguaacuguuauauuuuguug

SEQ ID NO: 842548 - RNA, 22 nt, Human
gaaggaaaacagaucugccuga

SEQ ID NO: 842549 - RNA, 22 nt, Human
uauuucagguauggugugaaau

SEQ ID NO: 842550 - RNA, 22 nt, Human
ccuggagcuuuuccauccugga

SEQ ID NO: 842551 - RNA, 22 nt, Human
uccagccuaauguucuucccac

SEQ ID NO: 842552 - RNA, 22 nt, Human
cuuccaaagcacuuuauggacc

SEQ ID NO: 842553 - RNA, 21 nt, Human
gagccuucccucugcccuuuc

SEQ ID NO: 842554 - RNA, 22 nt, Human
cugccucuauaggaguccacca

SEQ ID NO: 842555 - RNA, 23 nt, Human
uuugcaaauuggacacaaccaca

SEQ ID NO: 842556 - RNA, 22 nt, Human
cuguccuccggccaccuacagu

SEQ ID NO: 842557 - RNA, 22 nt, Human
aggcacugcagauuacaggcgc

SEQ ID NO: 842558 - RNA, 22 nt, Human
caagauggacauaaggagagaa

SEQ ID NO: 842559 - RNA, 22 nt, Human
aggggcugacuggaaagugcca

SEQ ID NO: 842560 - RNA, 22 nt, Human
gcuggcagagacaagaagacua

SEQ ID NO: 842561 - RNA, 22 nt, Human
aggagagucuugagucacuggu

SEQ ID NO: 842562 - RNA, 22 nt, Human
cagagcugcacauucuaugaug

SEQ ID NO: 842563 - RNA, 22 nt, Human
ccagggucuuggagaggagugc

SEQ ID NO: 842564 - RNA, 22 nt, Human
cccaguuucaacuuuccagugg

SEQ ID NO: 842565 - RNA, 22 nt, Human
uggcucuggugcgggcuccugc

SEQ ID NO: 842566 - RNA, 22 nt, Human
uaugaaaugguaguaggaaggg

SEQ ID NO: 842567 - RNA, 22 nt, Human
ccagucccaucucugucgcuua

SEQ ID NO: 842568 - RNA, 22 nt, Human
caaugauggcuaggcagcugcu

SEQ ID NO: 842569 - RNA, 22 nt, Human
gaaaauguuuguccggagcuga

SEQ ID NO: 842570 - RNA, 22 nt, Human
uucacaggugacuggggauaac

SEQ ID NO: 842571 - RNA, 22 nt, Human
agucuccuuggccucaaugccu

SEQ ID NO: 842572 - RNA, 22 nt, Human
gggcuggaggagauccagaggc

SEQ ID NO: 842573 - RNA, 22 nt, Human
ugccucugaggaagauuguguu

SEQ ID NO: 842574 - RNA, 22 nt, Human
ugccuuggugcuucuucaugug

SEQ ID NO: 842575 - RNA, 18 nt, Human
gcagcuagccaggggggc

SEQ ID NO: 842576 - RNA, 22 nt, Human
gagagcaggaggcagcgggacg

SEQ ID NO: 842577 - RNA, 20 nt, Human
cccucugcuacacugggagc

SEQ ID NO: 842578 - RNA, 22 nt, Human
cuggagcaggcuugucccagcu

SEQ ID NO: 842579 - RNA, 22 nt, Human
uugaagcacaaugucuuuuauc

SEQ ID NO: 842580 - RNA, 22 nt, Human
agccuauuccaggaugagcuca

SEQ ID NO: 842581 - RNA, 21 nt, Human
ugaagccugaggcauagcccc

SEQ ID NO: 842582 - RNA, 22 nt, Human
caggccuggggcuggcuuccag

SEQ ID NO: 842583 - RNA, 22 nt, Human
agcagggcagugcuucagcucu

SEQ ID NO: 842584 - RNA, 22 nt, Human
ugggaaauguguuucuggacca

SEQ ID NO: 842585 - RNA, 22 nt, Human
aagcugccagauucagucugcu

SEQ ID NO: 842586 - RNA, 22 nt, Human
aggaagcuuagugaaaggacca

SEQ ID NO: 842587 - RNA, 22 nt, Human
aagagguugucugugaugaguu

SEQ ID NO: 842588 - RNA, 22 nt, Human
uuccagauuucuacacaagacc

SEQ ID NO: 842589 - RNA, 22 nt, Human
gcugucugggaggccuccacuu

SEQ ID NO: 842590 - RNA, 22 nt, Human
cccucugcucaggugcauaggc

SEQ ID NO: 842591 - RNA, 22 nt, Human
uuccaggaggcacugacagagg

SEQ ID NO: 842592 - RNA, 22 nt, Human
uagaaaugauuuugaugcuuca

SEQ ID NO: 842593 - RNA, 21 nt, Human
gugcucugggcagcagagggc

SEQ ID NO: 842594 - RNA, 22 nt, Human
agccacagcuccuugguggaga

SEQ ID NO: 842595 - RNA, 22 nt, Human
acuugcugguggcauuuacagu

SEQ ID NO: 842596 - RNA, 20 nt, Human
uggagccacagucagguucc

SEQ ID NO: 842597 - RNA, 22 nt, Human
ggaagaggcugagccagguccc

SEQ ID NO: 842598 - RNA, 19 nt, Human
gccugagccagccaugcaa

SEQ ID NO: 842599 - RNA, 22 nt, Human
aaaaugugcaguuuuuaagcug

SEQ ID NO: 842600 - RNA, 22 nt, Human
aaagaaucagaagucucaaaca

SEQ ID NO: 842601 - RNA, 22 nt, Human
agaggucagauuucuccuggug

SEQ ID NO: 842602 - RNA, 22 nt, Human
ccaccagcuuugccacccugcu

SEQ ID NO: 842603 - RNA, 22 nt, Human
gggcacuguggggcccaugcug

SEQ ID NO: 842604 - RNA, 22 nt, Human
acaaaguuaacaguuggauagu

SEQ ID NO: 842605 - RNA, 21 nt, Human
ucauuuuuauugcuaccuugc

SEQ ID NO: 842606 - RNA, 22 nt, Human
aaaaugacauuccagugauauu

SEQ ID NO: 842607 - RNA, 22 nt, Human
uaauaguugugacuuuguaaag

SEQ ID NO: 842608 - RNA, 21 nt, Human
ucccagggccaggugccauca

SEQ ID NO: 842609 - RNA, 22 nt, Human
uugggguguuggauggagcaag

SEQ ID NO: 842610 - RNA, 22 nt, Human
gcucccuguucucagccaugau

SEQ ID NO: 842611 - RNA, 22 nt, Human
cagaggcauacucccagucuug

SEQ ID NO: 842612 - RNA, 22 nt, Human
agcccaggagguggagguugca

SEQ ID NO: 842613 - RNA, 22 nt, Human
cugaauaaagcccucgcgcgcu

SEQ ID NO: 842614 - RNA, 22 nt, Human
uacuuccagcaaucugcauauu

SEQ ID NO: 842615 - RNA, 22 nt, Human
uuugaauaaucacugggcauua

SEQ ID NO: 842616 - RNA, 22 nt, Human
aggccuggccccaguugcuagg

SEQ ID NO: 842617 - RNA, 22 nt, Human
cugcucugacccuuucaccuuc

SEQ ID NO: 842618 - RNA, 22 nt, Human
ugcacacaaguuggagaaugaa

SEQ ID NO: 842619 - RNA, 22 nt, Human
cacugcuucuggaggaauuugg

SEQ ID NO: 842620 - RNA, 22 nt, Human
uggcucagauaauucaaggggc

SEQ ID NO: 842621 - RNA, 22 nt, Human
ccagggaguuuccaaucugaga

SEQ ID NO: 842622 - RNA, 22 nt, Human
gcacacaguauaugcucauuaa

SEQ ID NO: 842623 - RNA, 22 nt, Human
gagagaagggggauaugagccu

SEQ ID NO: 842624 - RNA, 22 nt, Human
cuacccagagugaaucucuuaa

SEQ ID NO: 842625 - RNA, 22 nt, Human
gagagugucgggggccccagga

SEQ ID NO: 842626 - RNA, 18 nt, Human
ccucaggggaccuggcag

SEQ ID NO: 842627 - RNA, 22 nt, Human
gguggccuccagggcauaggug

SEQ ID NO: 842628 - RNA, 22 nt, Human
agggcccuccccgcucagggca

SEQ ID NO: 842629 - RNA, 22 nt, Human
acuguucaagcaaaugacauug

SEQ ID NO: 842630 - RNA, 22 nt, Human
cuuugaauugccguuucaucug

SEQ ID NO: 842631 - RNA, 22 nt, Human
gugaauaaaacaccugccaaga

SEQ ID NO: 842632 - RNA, 22 nt, Human
acacaguauuacaauaggugcu

SEQ ID NO: 842633 - RNA, 22 nt, Human
uucauagugauuguucagauag

SEQ ID NO: 842634 - RNA, 22 nt, Human
cagcugccaagaaucuuuucua

SEQ ID NO: 842635 - RNA, 22 nt, Human
caugccaguuuugagaugcacc

SEQ ID NO: 842636 - RNA, 22 nt, Human
ugucacauaauuuaucuguagg

SEQ ID NO: 842637 - RNA, 22 nt, Human
caguggcuguuucuggaaggca

SEQ ID NO: 842638 - RNA, 22 nt, Human
gagcuucccucugcagucccug

SEQ ID NO: 842639 - RNA, 17 nt, Human
uauguaguacuuauaaa

SEQ ID NO: 842640 - RNA, 22 nt, Human
aggcugcucaguagauggagcu

SEQ ID NO: 842641 - RNA, 22 nt, Human
aagggcagcugacagaugcuua

SEQ ID NO: 842642 - RNA, 22 nt, Human
uuccaagaguaaauucaaauug

SEQ ID NO: 842643 - RNA, 22 nt, Human
agagccugugauugucaucacc

SEQ ID NO: 842644 - RNA, 22 nt, Human
ggcagcuccuccuagucugccc

SEQ ID NO: 842645 - RNA, 22 nt, Human
caggcacuggggaugcugggau

SEQ ID NO: 842646 - RNA, 22 nt, Human
cuggggcuucaaugcuucggug

SEQ ID NO: 842647 - RNA, 22 nt, Human
auguagaagugggcauuauaga

SEQ ID NO: 842648 - RNA, 22 nt, Human
gaaugaaaaccuuggcucaaau

SEQ ID NO: 842649 - RNA, 22 nt, Human
agugaaaacacuaguucuugcc

SEQ ID NO: 842650 - RNA, 22 nt, Human
cugaaggauuuaguucuuugcu

SEQ ID NO: 842651 - RNA, 22 nt, Human
agaauuguugggguaauaaaag

SEQ ID NO: 842652 - RNA, 22 nt, Human
cauucacucagcgaugccagua

SEQ ID NO: 842653 - RNA, 22 nt, Human
uccugccugcaaucccagcacu

SEQ ID NO: 842654 - RNA, 22 nt, Human
auucugucuuuuuaaaauaaua

SEQ ID NO: 842655 - RNA, 22 nt, Human
uguuuuaagagcgcacuuuaua

SEQ ID NO: 842656 - RNA, 22 nt, Human
acaacauucuuaaauacacuga

SEQ ID NO: 842657 - RNA, 22 nt, Human
uaucagaaaucaacacacagug

SEQ ID NO: 842658 - RNA, 22 nt, Human
gagugcagaugaacagaagauu

SEQ ID NO: 842659 - RNA, 22 nt, Human
gaaugugucacccugucccaug

SEQ ID NO: 842660 - RNA, 22 nt, Human
caggguggaagcuguagagugg

SEQ ID NO: 842661 - RNA, 22 nt, Human
ucuuugcaugcauuuucccuua

SEQ ID NO: 842662 - RNA, 22 nt, Human
gaccuggaggauccucuucuug

SEQ ID NO: 842663 - RNA, 22 nt, Human
auucauaacggcaaaugucacc

SEQ ID NO: 842664 - RNA, 22 nt, Human
acaggugugagaacaugccuug

SEQ ID NO: 842665 - RNA, 22 nt, Human
cagggccuccccggcagucuuu

SEQ ID NO: 842666 - RNA, 22 nt, Human
acagaaagaagguguauuugag

SEQ ID NO: 842667 - RNA, 22 nt, Human
cagagcaguccuugucaaucag

SEQ ID NO: 842668 - RNA, 22 nt, Human
aagauuauggcagauaacaauu

SEQ ID NO: 842669 - RNA, 22 nt, Human
agccugucugucuccaaagcug

SEQ ID NO: 842670 - RNA, 22 nt, Human
uugcauugauguuccuucuugc

SEQ ID NO: 842671 - RNA, 22 nt, Human
caggcagauuugcugcccucca

SEQ ID NO: 842672 - RNA, 22 nt, Human
gagagggauacugaguuuuggu

SEQ ID NO: 842673 - RNA, 22 nt, Human
caguuucucucaauaagcaucg

SEQ ID NO: 842674 - RNA, 22 nt, Human
aggcaagcgcagaagcggagga

SEQ ID NO: 842675 - RNA, 22 nt, Human
ugguacuuggaggcagaaaaau

SEQ ID NO: 842676 - RNA, 22 nt, Human
cauguacacucauguaacuaua

SEQ ID NO: 842677 - RNA, 22 nt, Human
ucugcaggacugaggccuguuu

SEQ ID NO: 842678 - RNA, 18 nt, Human
gcugagguggugucagag

SEQ ID NO: 842679 - RNA, 22 nt, Human
uucuucucagggucccacaugg

SEQ ID NO: 842680 - RNA, 22 nt, Human
gggcuggcucugucuagaaagg

SEQ ID NO: 842681 - RNA, 22 nt, Human
cagggugacugcccuggccacu

SEQ ID NO: 842682 - RNA, 22 nt, Human
gggugggguguaucggauccua

SEQ ID NO: 842683 - RNA, 22 nt, Human
guccucagucaguuuggugggg

SEQ ID NO: 842684 - RNA, 22 nt, Human
auaaaguuuaaaagucaauagu

SEQ ID NO: 842685 - RNA, 22 nt, Human
cuuauguauauuuggaacguac

SEQ ID NO: 842686 - RNA, 22 nt, Human
ugcacagugaccccuggugacu

SEQ ID NO: 842687 - RNA, 22 nt, Human
uauuggugggggcagagagaga

SEQ ID NO: 842688 - RNA, 22 nt, Human
gccagagccggcuucacaggau

SEQ ID NO: 842689 - RNA, 22 nt, Human
auaugaaaagaagucaccauug

SEQ ID NO: 842690 - RNA, 22 nt, Human
cccaggaggcggagguuguggu

SEQ ID NO: 842691 - RNA, 22 nt, Human
ccugggaggcggagguugcagu

SEQ ID NO: 842692 - RNA, 22 nt, Human
ucucuucuaauuuucccgagua

SEQ ID NO: 842693 - RNA, 22 nt, Human
ugaaacuaggccaaucaaauua

SEQ ID NO: 842694 - RNA, 23 nt, Human
cauuucugggagauuuauaaaau

SEQ ID NO: 842695 - RNA, 20 nt, Human
cacaggcuauaugagagcca

SEQ ID NO: 842696 - RNA, 22 nt, Human
cagcuuccaucuccacugcccu

SEQ ID NO: 842697 - RNA, 22 nt, Human
gagcagcucugugccuggagac

SEQ ID NO: 842698 - RNA, 22 nt, Human
cuuccucccggcccaugcucug

SEQ ID NO: 842699 - RNA, 22 nt, Human
uuccaaagugcuggaauuacau

SEQ ID NO: 842700 - RNA, 22 nt, Human
uucugucauccuuucuagaugu

SEQ ID NO: 842701 - RNA, 22 nt, Human
acagguggagugguuagcaggc

SEQ ID NO: 842702 - RNA, 22 nt, Human
cacagaauuaagggagaaauau

SEQ ID NO: 842703 - RNA, 22 nt, Human
gaggcaggcccugaaugaguca

SEQ ID NO: 842704 - RNA, 17 nt, Human
ggaaaaggaugauacag

SEQ ID NO: 842705 - RNA, 22 nt, Human
acccuggguucccgcagcacca

SEQ ID NO: 842706 - RNA, 20 nt, Human
agggcagagggauuacaggc

SEQ ID NO: 842707 - RNA, 22 nt, Human
agcucccugagaugccacagca

SEQ ID NO: 842708 - RNA, 22 nt, Human
ucccagagugugggcaucaagg

SEQ ID NO: 842709 - RNA, 22 nt, Human
cugcuguguuagcagguuuagu

SEQ ID NO: 842710 - RNA, 23 nt, Human
uugcuuucaucaugagaugcucc

SEQ ID NO: 842711 - RNA, 22 nt, Human
cauuugaaccuggauguucuua

SEQ ID NO: 842712 - RNA, 20 nt, Human
ugucaugcauuagaugaaga

SEQ ID NO: 842713 - RNA, 22 nt, Human
cggggacacacuggcagcuccu

SEQ ID NO: 842714 - RNA, 22 nt, Human
uagugcacacgcauguagcagu

SEQ ID NO: 842715 - RNA, 15 nt, Human
ugauuuccuacuaac

SEQ ID NO: 842716 - RNA, 22 nt, Human
uuuaaauuauaguuaaugucug

SEQ ID NO: 842717 - RNA, 22 nt, Human
cagggcaguaccgcccucuggc

SEQ ID NO: 842718 - RNA, 22 nt, Human
guggccucugugcuccugccua

SEQ ID NO: 842719 - RNA, 22 nt, Human
cagaggugcauacaggucauua

SEQ ID NO: 842720 - RNA, 20 nt, Human
gucucaaguaucucacaguc

SEQ ID NO: 842721 - RNA, 22 nt, Human
uaaauucugaucaaguuccuuc

SEQ ID NO: 842722 - RNA, 22 nt, Human
ggcaggcucagcagccaaggag

SEQ ID NO: 842723 - RNA, 22 nt, Human
caggggacauuaaagcuccaua

SEQ ID NO: 842724 - RNA, 22 nt, Human
auucaacggguagaagggucuu

SEQ ID NO: 842725 - RNA, 21 nt, Human
gcagagccggggcgagaaggc

SEQ ID NO: 842726 - RNA, 22 nt, Human
uuugcauugccucugacuuaug

SEQ ID NO: 842727 - RNA, 22 nt, Human
ucccagauuguugauggcuuaa

SEQ ID NO: 842728 - RNA, 22 nt, Human
caaggaaaacagaugaucaaca

SEQ ID NO: 842729 - RNA, 17 nt, Human
gcacugaacaauccugu

SEQ ID NO: 842730 - RNA, 22 nt, Human
auagcuuuacagaagaguuuag

SEQ ID NO: 842731 - RNA, 22 nt, Human
uuugaauagcauaggauuacau

SEQ ID NO: 842732 - RNA, 22 nt, Human
acagggcagugucuugaaaaau

SEQ ID NO: 842733 - RNA, 22 nt, Human
uggugccuugggccuacagcgc

SEQ ID NO: 842734 - RNA, 22 nt, Human
gggcugcacagaucuucaaggg

SEQ ID NO: 842735 - RNA, 22 nt, Human
ugcugccagccaggccauggag

SEQ ID NO: 842736 - RNA, 22 nt, Human
aaauaguuguuuggaucaauaa

SEQ ID NO: 842737 - RNA, 22 nt, Human
gcccaggaggcagagguugugg

SEQ ID NO: 842738 - RNA, 22 nt, Human
cagacuugacggcagcugcuuu

SEQ ID NO: 842739 - RNA, 22 nt, Human
agccaggauuggcugagccuua

SEQ ID NO: 842740 - RNA, 23 nt, Human
aaauuauugcucuucaauugccu

SEQ ID NO: 842741 - RNA, 22 nt, Human
uccuuuuuaagucguuguggua

SEQ ID NO: 842742 - RNA, 22 nt, Human
cccaggaugucgaggcugcagu

SEQ ID NO: 842743 - RNA, 22 nt, Human
cugugccuaagaugcaugucuc

SEQ ID NO: 842744 - RNA, 22 nt, Human
ugggaggacuugugggcuucau

SEQ ID NO: 842745 - RNA, 22 nt, Human
agcuucucaggagucugaggca

SEQ ID NO: 842746 - RNA, 20 nt, Human
uuucaguuaucuugaccuuc

SEQ ID NO: 842747 - RNA, 22 nt, Human
gcaaugauauugaagugaugaa

SEQ ID NO: 842748 - RNA, 22 nt, Human
gcagcccaauggacugagacag

SEQ ID NO: 842749 - RNA, 22 nt, Human
ucaucaaagcgcuuggaguagg

SEQ ID NO: 842750 - RNA, 22 nt, Human
gcaguaaaaaaggauaugugca

SEQ ID NO: 842751 - RNA, 22 nt, Human
aagugacaccucuucccuuucc

SEQ ID NO: 842752 - RNA, 22 nt, Human
guuccaaagcaaaggaggugag

SEQ ID NO: 842753 - RNA, 22 nt, Human
cauauucuuuaagcaaugcucu

SEQ ID NO: 842754 - RNA, 22 nt, Human
ggccuagggaguggccaugccu

SEQ ID NO: 842755 - RNA, 22 nt, Human
ucaauuaugccauugcaauauu

SEQ ID NO: 842756 - RNA, 22 nt, Human
gaaugcagauggcugguguaug

SEQ ID NO: 842757 - RNA, 22 nt, Human
caugaagcuugaagcaguccac

SEQ ID NO: 842758 - RNA, 22 nt, Human
gcucacuggccugaagaggacg

SEQ ID NO: 842759 - RNA, 22 nt, Human
ugucucaguacacuccgauguu

SEQ ID NO: 842760 - RNA, 23 nt, Human
gccugccugaccugugcaaaguc

SEQ ID NO: 842761 - RNA, 22 nt, Human
ccagcagcgauagggugagugc

SEQ ID NO: 842762 - RNA, 22 nt, Human
gaugagcauuguuucauguguu

SEQ ID NO: 842763 - RNA, 22 nt, Human
aucugacuucacgcccaugcca

SEQ ID NO: 842764 - RNA, 22 nt, Human
ugcugggcuagaagcugaggcc

SEQ ID NO: 842765 - RNA, 22 nt, Human
uaaaugugaccuucauuuuaua

SEQ ID NO: 842766 - RNA, 22 nt, Human
ucucauguauugcccuggugug

SEQ ID NO: 842767 - RNA, 22 nt, Human
uggccuggaaccuggcagggac

SEQ ID NO: 842768 - RNA, 20 nt, Human
aguguuccggaagacuggca

SEQ ID NO: 842769 - RNA, 22 nt, Human
cuggagcugcuguccuugggug

SEQ ID NO: 842770 - RNA, 22 nt, Human
caggccucaggggcucaggcug

SEQ ID NO: 842771 - RNA, 22 nt, Human
ugcauuugucuugucucaugaa

SEQ ID NO: 842772 - RNA, 22 nt, Human
ugucuguacaaauuuucugugu

SEQ ID NO: 842773 - RNA, 22 nt, Human
aguuuuuccguggcuacgauaa

SEQ ID NO: 842774 - RNA, 22 nt, Human
acacugaauauacaaugaauau

SEQ ID NO: 842775 - RNA, 22 nt, Human
ccacagagcauuagauuucaga

SEQ ID NO: 842776 - RNA, 19 nt, Human
ccugcagggaugagagguu

SEQ ID NO: 842777 - RNA, 22 nt, Human
gccuucugaucgcuggacugac

SEQ ID NO: 842778 - RNA, 22 nt, Human
ucugccuggauuccauucucca

SEQ ID NO: 842779 - RNA, 22 nt, Human
agaggucauaucucagaagaga

SEQ ID NO: 842780 - RNA, 22 nt, Human
uuuaagaugguauuuuauaaag

SEQ ID NO: 842781 - RNA, 19 nt, Human
uagcagcugccaaaggaga

SEQ ID NO: 842782 - RNA, 22 nt, Human
ccucugggugggaggccgggcg

SEQ ID NO: 842783 - RNA, 22 nt, Human
cuggcagguccagcuggacuca

SEQ ID NO: 842784 - RNA, 21 nt, Human
acagaguaguugaaacagaga

SEQ ID NO: 842785 - RNA, 22 nt, Human
cauuucugucacguucuuuuau

SEQ ID NO: 842786 - RNA, 22 nt, Human
ggcucaggacacagugguuuag

SEQ ID NO: 842787 - RNA, 22 nt, Human
agcugccugcuuaugagcucca

SEQ ID NO: 842788 - RNA, 22 nt, Human
ggcugcagcagagggacucacg

SEQ ID NO: 842789 - RNA, 22 nt, Human
cugaaggacuuggugauaguug

SEQ ID NO: 842790 - RNA, 22 nt, Human
aaaacuuucagggauacagaaa

SEQ ID NO: 842791 - RNA, 22 nt, Human
caagggcucacggucugcuggg

SEQ ID NO: 842792 - RNA, 22 nt, Human
uccaggaggccucauuuccugu

SEQ ID NO: 842793 - RNA, 22 nt, Human
ccuggcugggguagaagugagg

SEQ ID NO: 842794 - RNA, 19 nt, Human
uacauacuuauucuaaaag

SEQ ID NO: 842795 - RNA, 22 nt, Human
ugggcacuggaagccugcugug

SEQ ID NO: 842796 - RNA, 22 nt, Human
caggcagccugcggucugcaca

SEQ ID NO: 842797 - RNA, 22 nt, Human
ugcucugucaagaaaagaugcc

SEQ ID NO: 842798 - RNA, 22 nt, Human
aggccagguggucaugcuugcu

SEQ ID NO: 842799 - RNA, 22 nt, Human
aguugacauccagagacauucu

SEQ ID NO: 842800 - RNA, 23 nt, Human
ugagcccaggaggucaaggcugc

SEQ ID NO: 842801 - RNA, 22 nt, Human
ggcuggccuguguggccgccac

SEQ ID NO: 842802 - RNA, 22 nt, Human
uacaaagcuguauagccugguc

SEQ ID NO: 842803 - RNA, 22 nt, Human
cuggugccauucuguggccuag

SEQ ID NO: 842804 - RNA, 22 nt, Human
caugaguuuuuuaguucaugca

SEQ ID NO: 842805 - RNA, 22 nt, Human
ugaagaaucccagggaauuugg

SEQ ID NO: 842806 - RNA, 22 nt, Human
agcuggaggggccagcaggugu

SEQ ID NO: 842807 - RNA, 22 nt, Human
gccugccuagaauugcagcuuu

SEQ ID NO: 842808 - RNA, 23 nt, Human
gccucugcucugcguuggggacu

SEQ ID NO: 842809 - RNA, 22 nt, Human
aauucuguaacuuuacugaauu

SEQ ID NO: 842810 - RNA, 22 nt, Human
uuucaugauuaacuuagugaau

SEQ ID NO: 842811 - RNA, 22 nt, Human
gcagcuuggauuucuguaguuu

SEQ ID NO: 842812 - RNA, 22 nt, Human
aggcagcuuaagcccuggccca

SEQ ID NO: 842813 - RNA, 22 nt, Human
gcagugguccaguucacaccca

SEQ ID NO: 842814 - RNA, 22 nt, Human
ggcagccuugagggaggccugg

SEQ ID NO: 842815 - RNA, 22 nt, Human
gugcuaggauuacaggcauggg

SEQ ID NO: 842816 - RNA, 22 nt, Human
uauaaaauggcaucagcuccaa

SEQ ID NO: 842817 - RNA, 22 nt, Human
accagagauggggcuucucugu

SEQ ID NO: 842818 - RNA, 18 nt, Human
cggcagagugcuucuagc

SEQ ID NO: 842819 - RNA, 22 nt, Human
aguguuucucagaagggccuau

SEQ ID NO: 842820 - RNA, 22 nt, Human
cccuggaguccuggcaguugau

SEQ ID NO: 842821 - RNA, 22 nt, Human
accaggagguguuugcucaagu

SEQ ID NO: 842822 - RNA, 22 nt, Human
auguccuucuccucuuaccugc

SEQ ID NO: 842823 - RNA, 22 nt, Human
uccagggaucuuuagagucuuu

SEQ ID NO: 842824 - RNA, 22 nt, Human
uaacagaagaaaacauauugga

SEQ ID NO: 842825 - RNA, 22 nt, Human
cagcccuuuccuucucagcuuu

SEQ ID NO: 842826 - RNA, 22 nt, Human
auacacauauguguguauaugu

SEQ ID NO: 842827 - RNA, 22 nt, Human
uuggcagugaugcagcuuguuc

SEQ ID NO: 842828 - RNA, 22 nt, Human
uaccugagcccagugcagcaua

SEQ ID NO: 842829 - RNA, 19 nt, Human
cugcugggugcugagggag

SEQ ID NO: 842830 - RNA, 23 nt, Human
aucauucuccaaucuggagcagg

SEQ ID NO: 842831 - RNA, 23 nt, Human
cugcuguguuggucucgauggga

SEQ ID NO: 842832 - RNA, 22 nt, Human
gagauuggauuuaauggccaaa

SEQ ID NO: 842833 - RNA, 22 nt, Human
gagcucagcccaaagagcagug

SEQ ID NO: 842834 - RNA, 22 nt, Human
aagucacacuagacaacugagg

SEQ ID NO: 842835 - RNA, 22 nt, Human
cacugugucaguuugguuagac

SEQ ID NO: 842836 - RNA, 22 nt, Human
ucacacguccuugcuacuccuc

SEQ ID NO: 842837 - RNA, 22 nt, Human
cagugcauagauccugaggccu

SEQ ID NO: 842838 - RNA, 22 nt, Human
aauagguagccagauauauaaa

SEQ ID NO: 842839 - RNA, 22 nt, Human
aagauucagccaaauuguucau

SEQ ID NO: 842840 - RNA, 22 nt, Human
agcuagaaguacagccauauga

SEQ ID NO: 842841 - RNA, 22 nt, Human
acagccugcugccugcuucuug

SEQ ID NO: 842842 - RNA, 22 nt, Human
ugguuuuagaugccuuuacugc

SEQ ID NO: 842843 - RNA, 22 nt, Human
uuugaaaauuuaagugcuacac

SEQ ID NO: 842844 - RNA, 22 nt, Human
aaugaacaucaaaugccuacca

SEQ ID NO: 842845 - RNA, 22 nt, Human
uggacaggugagugacucaggg

SEQ ID NO: 842846 - RNA, 22 nt, Human
uuuuaucaaucauuaagacauu

SEQ ID NO: 842847 - RNA, 22 nt, Human
uggcuuuaggagcuauauaccu

SEQ ID NO: 842848 - RNA, 22 nt, Human
ccuggcugcuuucacuauggag

SEQ ID NO: 842849 - RNA, 22 nt, Human
guucuucacauuucauugagga

SEQ ID NO: 842850 - RNA, 22 nt, Human
gacagcuguggagaggcaugug

SEQ ID NO: 842851 - RNA, 21 nt, Human
acaggagaccgccuggcaguc

SEQ ID NO: 842852 - RNA, 22 nt, Human
caugcacaaagguaagaugcgu

SEQ ID NO: 842853 - RNA, 22 nt, Human
cacagcagaaauaugaaggcag

SEQ ID NO: 842854 - RNA, 22 nt, Human
uuaaauauuuucagcaggguca

SEQ ID NO: 842855 - RNA, 22 nt, Human
uccaugagacagauacuguaag

SEQ ID NO: 842856 - RNA, 22 nt, Human
aaaguccagagggcacacugaa

SEQ ID NO: 842857 - RNA, 22 nt, Human
uaccaggcagcugcacagaggc

SEQ ID NO: 842858 - RNA, 22 nt, Human
uggagggcaucuguggucaggc

SEQ ID NO: 842859 - RNA, 22 nt, Human
uauacagaacugcacgugcacg

SEQ ID NO: 842860 - RNA, 22 nt, Human
aucuggcucucucauuuacaaa

SEQ ID NO: 842861 - RNA, 17 nt, Human
uuuucucucuuggauuc

SEQ ID NO: 842862 - RNA, 21 nt, Human
uaaagaagaugaaugugauca

SEQ ID NO: 842863 - RNA, 22 nt, Human
agcacauaccagaaccacaggu

SEQ ID NO: 842864 - RNA, 22 nt, Human
guccucugcccaggucaagguu

SEQ ID NO: 842865 - RNA, 22 nt, Human
cagggcaguaacgggaacaucu

SEQ ID NO: 842866 - RNA, 22 nt, Human
ugaggcucaaggucugguggag

SEQ ID NO: 842867 - RNA, 22 nt, Human
auggacaggaacucccuuggca

SEQ ID NO: 842868 - RNA, 22 nt, Human
uugcagcagggugaauucacuc

SEQ ID NO: 842869 - RNA, 22 nt, Human
auucaguuaaaaacuguacuuc

SEQ ID NO: 842870 - RNA, 22 nt, Human
ggcugagcucaggggcagcagg

SEQ ID NO: 842871 - RNA, 22 nt, Human
agcaaagucaguggaaccaucc

SEQ ID NO: 842872 - RNA, 22 nt, Human
caaauacuggguaaguuaauuu

SEQ ID NO: 842873 - RNA, 22 nt, Human
caggaggcuccuagggcucugu

SEQ ID NO: 842874 - RNA, 23 nt, Human
uccaggagaauuccagggcccgg

SEQ ID NO: 842875 - RNA, 22 nt, Human
uccucagacuucccuuugugua

SEQ ID NO: 842876 - RNA, 23 nt, Human
uuucuguuggguauauauccaag

SEQ ID NO: 842877 - RNA, 20 nt, Human
agccagaagaaggcuggaga

SEQ ID NO: 842878 - RNA, 22 nt, Human
ggccuguccagccugccuggcu

SEQ ID NO: 842879 - RNA, 18 nt, Human
cccucuugcacaaagcaa

SEQ ID NO: 842880 - RNA, 22 nt, Human
gcagcuguguaaugagcccaca

SEQ ID NO: 842881 - RNA, 22 nt, Human
gugauuuucuccuccuagaagu

SEQ ID NO: 842882 - RNA, 22 nt, Human
gcacuaaaccaacauguaauaa

SEQ ID NO: 842883 - RNA, 20 nt, Human
cguaaggcaagugcugcauc

SEQ ID NO: 842884 - RNA, 22 nt, Human
ggccucuguuuggagccaggau

SEQ ID NO: 842885 - RNA, 22 nt, Human
acagcagcaauagcagugacau

SEQ ID NO: 842886 - RNA, 22 nt, Human
uaauuucaaguuuagggcucua

SEQ ID NO: 842887 - RNA, 22 nt, Human
uggccaggcagguagaacggcc

SEQ ID NO: 842888 - RNA, 22 nt, Human
gaggccuggaccagccacagag

SEQ ID NO: 842889 - RNA, 22 nt, Human
cccaggaggugugcccaacucg

SEQ ID NO: 842890 - RNA, 22 nt, Human
gaggcugguaggaaaggaaaca

SEQ ID NO: 842891 - RNA, 16 nt, Human
gagccaggugccuuga

SEQ ID NO: 842892 - RNA, 22 nt, Human
gcagagugaggaagagcuucca

SEQ ID NO: 842893 - RNA, 22 nt, Human
cagggccauaucuugugcacca

SEQ ID NO: 842894 - RNA, 22 nt, Human
cugauuccugauucaugcucuu

SEQ ID NO: 842895 - RNA, 22 nt, Human
gcuguucaagacuaggaaauuu

SEQ ID NO: 842896 - RNA, 22 nt, Human
ugccagcaguagcaguaggcca

SEQ ID NO: 842897 - RNA, 23 nt, Human
cacaccaggagccgucugggcca

SEQ ID NO: 842898 - RNA, 23 nt, Human
auauggcuguuguguguuaacau

SEQ ID NO: 842899 - RNA, 23 nt, Human
ugcagcugccucuggcgggccgg

SEQ ID NO: 842900 - RNA, 22 nt, Human
ugcaguggugguaaagaugcuc

SEQ ID NO: 842901 - RNA, 22 nt, Human
aggaaagggguagguguggacg

SEQ ID NO: 842902 - RNA, 22 nt, Human
ggaggcagaacuucccgucagu

SEQ ID NO: 842903 - RNA, 22 nt, Human
augauauuugcaaugugcuugc

SEQ ID NO: 842904 - RNA, 22 nt, Human
cauuucaauuauuugcucuucu

SEQ ID NO: 842905 - RNA, 22 nt, Human
uuauuuucuccucagaaagugg

SEQ ID NO: 842906 - RNA, 22 nt, Human
cuggcuuccucaggagcagugg

SEQ ID NO: 842907 - RNA, 22 nt, Human
agagccuggacuuuucugagcc

SEQ ID NO: 842908 - RNA, 22 nt, Human
agaggggacagccaccugcccg

SEQ ID NO: 842909 - RNA, 22 nt, Human
ucuucuuccucauuuauacaua

SEQ ID NO: 842910 - RNA, 22 nt, Human
ccaaagugcugagauuacaggu

SEQ ID NO: 842911 - RNA, 22 nt, Human
uguuuuuaaauaaugauagaaa

SEQ ID NO: 842912 - RNA, 22 nt, Human
accagccugucugagucguggg

SEQ ID NO: 842913 - RNA, 22 nt, Human
uggcagucggacuucuaucuca

SEQ ID NO: 842914 - RNA, 22 nt, Human
ugagcaguaggucugaauagug

SEQ ID NO: 842915 - RNA, 22 nt, Human
uuuacagaauguugaauuuggg

SEQ ID NO: 842916 - RNA, 22 nt, Human
uaauccacaauagagauuaucu

SEQ ID NO: 842917 - RNA, 22 nt, Human
ccuuggaggacugcugcuucuu

SEQ ID NO: 842918 - RNA, 22 nt, Human
agccucugacugucagcaaggu

SEQ ID NO: 842919 - RNA, 22 nt, Human
ucugagcuggagcccaucaccu

SEQ ID NO: 842920 - RNA, 22 nt, Human
uacaguaacauguuguacaagc

SEQ ID NO: 842921 - RNA, 22 nt, Human
ccuggcagcgugccgagcugcg

SEQ ID NO: 842922 - RNA, 22 nt, Human
agagccugucugccuuucuacc

SEQ ID NO: 842923 - RNA, 22 nt, Human
uggcucugggaaucuguugcuu

SEQ ID NO: 842924 - RNA, 22 nt, Human
ugauuuccaauaaggagaaugu

SEQ ID NO: 842925 - RNA, 22 nt, Human
gaggggcagaaugugaucaggg

SEQ ID NO: 842926 - RNA, 19 nt, Human
caaggguugggucugucau

SEQ ID NO: 842927 - RNA, 22 nt, Human
ggcugcuggaagacugaacaag

SEQ ID NO: 842928 - RNA, 22 nt, Human
auuucagcccaguaugagcccc

SEQ ID NO: 842929 - RNA, 22 nt, Human
cauuagaagaacaguuauauua

SEQ ID NO: 842930 - RNA, 22 nt, Human
aaaaucugguaauuugaaugug

SEQ ID NO: 842931 - RNA, 22 nt, Human
uugacacagaucaauauucaac

SEQ ID NO: 842932 - RNA, 21 nt, Human
uccucugcucucauaccacaa

SEQ ID NO: 842933 - RNA, 22 nt, Human
ccagcaugagacgaugaugaag

SEQ ID NO: 842934 - RNA, 22 nt, Human
aucuggcuuggguguggguagc

SEQ ID NO: 842935 - RNA, 22 nt, Human
gagccagguuugaaucucaguc

SEQ ID NO: 842936 - RNA, 17 nt, Human
gcagugaaaagagauca

SEQ ID NO: 842937 - RNA, 22 nt, Human
cugcuguguggugaaacucagu

SEQ ID NO: 842938 - RNA, 22 nt, Human
ugacccugcuucuuggugcagg

SEQ ID NO: 842939 - RNA, 22 nt, Human
uaugaacugugagugugauggg

SEQ ID NO: 842940 - RNA, 22 nt, Human
gcagauggugggggaggaguac

SEQ ID NO: 842941 - RNA, 23 nt, Human
ccaggcaguagcuauugaaguga

SEQ ID NO: 842942 - RNA, 22 nt, Human
uacuuagagcgauaauuuauac

SEQ ID NO: 842943 - RNA, 22 nt, Human
agucagugaaaacuagaauguu

SEQ ID NO: 842944 - RNA, 22 nt, Human
gcugccagcuuuccuuggcuga

SEQ ID NO: 842945 - RNA, 22 nt, Human
uccaguggguugcugagggagg

SEQ ID NO: 842946 - RNA, 22 nt, Human
uagacagauuucuuguuagaca

SEQ ID NO: 842947 - RNA, 22 nt, Human
agucucugcaugccugcugugc

SEQ ID NO: 842948 - RNA, 22 nt, Human
aacauucaaaacccaguucagu

SEQ ID NO: 842949 - RNA, 18 nt, Human
agcuucccucugagaggg

SEQ ID NO: 842950 - RNA, 22 nt, Human
agggccuggaacuggagaccac

SEQ ID NO: 842951 - RNA, 21 nt, Human
uugcaccaugauaaauucaga

SEQ ID NO: 842952 - RNA, 22 nt, Human
cuucagaagccugcagccuuug

SEQ ID NO: 842953 - RNA, 22 nt, Human
agagccacugggagacagagca

SEQ ID NO: 842954 - RNA, 22 nt, Human
uccaaauacauuuacuguauuu

SEQ ID NO: 842955 - RNA, 22 nt, Human
uucuucuuucccccugugguac

SEQ ID NO: 842956 - RNA, 22 nt, Human
agaggacagacggaaagugcca

SEQ ID NO: 842957 - RNA, 22 nt, Human
uuggaaauugcaagugauuugc

SEQ ID NO: 842958 - RNA, 18 nt, Human
cagggccccagaauuauc

SEQ ID NO: 842959 - RNA, 22 nt, Human
ugggcagaaaucaguaucagau

SEQ ID NO: 842960 - RNA, 22 nt, Human
guagcccaccuggggagggcga

SEQ ID NO: 842961 - RNA, 22 nt, Human
auauuaaauggauuuugggagc

SEQ ID NO: 842962 - RNA, 22 nt, Human
uccaggaguggggcagaggucu

SEQ ID NO: 842963 - RNA, 22 nt, Human
uccuugaaaggggcugcagggc

SEQ ID NO: 842964 - RNA, 22 nt, Human
ccuggcagcuccuccccggcgg

SEQ ID NO: 842965 - RNA, 22 nt, Human
aggcaagcugcagagaguccuu

SEQ ID NO: 842966 - RNA, 22 nt, Human
gacucagugauuugacaugccu

SEQ ID NO: 842967 - RNA, 21 nt, Human
agagcugggacuugccugaga

SEQ ID NO: 842968 - RNA, 22 nt, Human
auuaggcauucaugcagcuccu

SEQ ID NO: 842969 - RNA, 22 nt, Human
uccagucaagcuugagaauuuc

SEQ ID NO: 842970 - RNA, 19 nt, Human
gggcuccuugggccucucu

SEQ ID NO: 842971 - RNA, 20 nt, Human
acauugauuauguuuguaga

SEQ ID NO: 842972 - RNA, 18 nt, Human
ggcugccuguuccugaag

SEQ ID NO: 842973 - RNA, 22 nt, Human
aaucagaauuuguccccugagu

SEQ ID NO: 842974 - RNA, 22 nt, Human
aguuuagaguucaaauuaguuc

SEQ ID NO: 842975 - RNA, 22 nt, Human
uccuuuuuauaguuagagaaac

SEQ ID NO: 842976 - RNA, 22 nt, Human
gccaggcagcaggaagccagug

SEQ ID NO: 842977 - RNA, 22 nt, Human
uagagcugauaaugaggccaag

SEQ ID NO: 842978 - RNA, 22 nt, Human
uuuaguaaguucacugcaaagc

SEQ ID NO: 842979 - RNA, 22 nt, Human
auggcuuugcucaaguuuagcc

SEQ ID NO: 842980 - RNA, 22 nt, Human
ugcucuguaacaaauugacaug

SEQ ID NO: 842981 - RNA, 22 nt, Human
acucacuuuccauucaagcacc

SEQ ID NO: 842982 - RNA, 21 nt, Human
uuucagaccuaucuuugaagg

SEQ ID NO: 842983 - RNA, 22 nt, Human
ugauuuccugugcgcccuuagg

SEQ ID NO: 842984 - RNA, 22 nt, Human
guuugcauuccaauuuagggga

SEQ ID NO: 842985 - RNA, 22 nt, Human
cugaauaauauuccauuaugag

SEQ ID NO: 842986 - RNA, 22 nt, Human
gaaaggucaguuccacuuccau

SEQ ID NO: 842987 - RNA, 22 nt, Human
ggguguccugugccaagcuggg

SEQ ID NO: 842988 - RNA, 22 nt, Human
ucucccacuggccuuguaugau

SEQ ID NO: 842989 - RNA, 22 nt, Human
auugacaaauggauguugacau

SEQ ID NO: 842990 - RNA, 22 nt, Human
cacaggaggaggugcccgggcc

SEQ ID NO: 842991 - RNA, 22 nt, Human
cucagugugaaugcucaguaaa

SEQ ID NO: 842992 - RNA, 22 nt, Human
auucuucacaccuguuccuguu

SEQ ID NO: 842993 - RNA, 22 nt, Human
agggaaagguagugaggucaca

SEQ ID NO: 842994 - RNA, 22 nt, Human
gacccaggaagcuacuucuggu

SEQ ID NO: 842995 - RNA, 22 nt, Human
uagaaaagauaacauucugugc

SEQ ID NO: 842996 - RNA, 22 nt, Human
ugcagcagacugaguaugagaa

SEQ ID NO: 842997 - RNA, 22 nt, Human
cagagccagcaguggggacagg

SEQ ID NO: 842998 - RNA, 22 nt, Human
ggagcuguaacgagccauugcu

SEQ ID NO: 842999 - RNA, 22 nt, Human
aaauguguuccuuugcuacaga

SEQ ID NO: 843000 - RNA, 22 nt, Human
cucagaguggggcucccugagg

SEQ ID NO: 843001 - RNA, 21 nt, Human
agcuuguguguaucacagugu

SEQ ID NO: 843002 - RNA, 22 nt, Human
caacagcugaucuuugaugaag

SEQ ID NO: 843003 - RNA, 22 nt, Human
agucugcacucagguggagguc

SEQ ID NO: 843004 - RNA, 22 nt, Human
aaggcacugaaaaauugugugu

SEQ ID NO: 843005 - RNA, 22 nt, Human
uugcugugucauuuguuuaauc

SEQ ID NO: 843006 - RNA, 22 nt, Human
ccugggaggcugugggucugcu

SEQ ID NO: 843007 - RNA, 22 nt, Human
uuacaaaguguuaugauaaaca

SEQ ID NO: 843008 - RNA, 22 nt, Human
agggcugguauguccaugaaag

SEQ ID NO: 843009 - RNA, 22 nt, Human
uggagggcucuuucaccuggua

SEQ ID NO: 843010 - RNA, 22 nt, Human
ugugccuggaucucugugacaa

SEQ ID NO: 843011 - RNA, 22 nt, Human
gguguccaucaggcugugcuuc

SEQ ID NO: 843012 - RNA, 22 nt, Human
ccagcuccgggaguugcugcug

SEQ ID NO: 843013 - RNA, 22 nt, Human
uugcauuuuuagaugcuucugu

SEQ ID NO: 843014 - RNA, 22 nt, Human
ugguccaggguguaguacagag

SEQ ID NO: 843015 - RNA, 22 nt, Human
cccagagcuccgguccugccca

SEQ ID NO: 843016 - RNA, 22 nt, Human
uccaggcuggacaugaggcggg

SEQ ID NO: 843017 - RNA, 22 nt, Human
cuuauguaugcuacuuuguggu

SEQ ID NO: 843018 - RNA, 22 nt, Human
gagagaagaaagccaugguccu

SEQ ID NO: 843019 - RNA, 22 nt, Human
ugccaggagucaggccaggcag

SEQ ID NO: 843020 - RNA, 22 nt, Human
ggagcugcacgcucugaagccu

SEQ ID NO: 843021 - RNA, 22 nt, Human
uuuuagauaguuuaacugcacu

SEQ ID NO: 843022 - RNA, 22 nt, Human
gccuggcuccuaagagcacaac

SEQ ID NO: 843023 - RNA, 21 nt, Human
agaaaaaccagcauguuuuca

SEQ ID NO: 843024 - RNA, 22 nt, Human
guauacauagaugaugaacaag

SEQ ID NO: 843025 - RNA, 19 nt, Human
ugaggggaggagaggccug

SEQ ID NO: 843026 - RNA, 22 nt, Human
auuucuguauccugcugucaga

SEQ ID NO: 843027 - RNA, 22 nt, Human
gcuguucugcgucccaggcugg

SEQ ID NO: 843028 - RNA, 22 nt, Human
agaaagcacucugucuuuuacc

SEQ ID NO: 843029 - RNA, 22 nt, Human
ucaggggagguugaaucgucuc

SEQ ID NO: 843030 - RNA, 22 nt, Human
gcuggccugggcagaggcuaug

SEQ ID NO: 843031 - RNA, 17 nt, Human
gccuuccuuccuccaca

SEQ ID NO: 843032 - RNA, 22 nt, Human
gucugucaucugagauggagug

SEQ ID NO: 843033 - RNA, 19 nt, Human
ggcccaaguacugagugcc

SEQ ID NO: 843034 - RNA, 23 nt, Human
ucagagaaguuguaggcugggga

SEQ ID NO: 843035 - RNA, 22 nt, Human
gugccaggugcuaagcugugcu

SEQ ID NO: 843036 - RNA, 22 nt, Human
gggugggccugucuggccaugu

SEQ ID NO: 843037 - RNA, 22 nt, Human
acauacuuuuuaaaagauugcu

SEQ ID NO: 843038 - RNA, 22 nt, Human
aggcaggcuggucugaagagug

SEQ ID NO: 843039 - RNA, 22 nt, Human
agaggccuuucuguugagugaa

SEQ ID NO: 843040 - RNA, 22 nt, Human
gcaggggaguggaugauggauu

SEQ ID NO: 843041 - RNA, 22 nt, Human
aguaaaauuucugcugaggaga

SEQ ID NO: 843042 - RNA, 22 nt, Human
cauacuuucuuuuucacgcaua

SEQ ID NO: 843043 - RNA, 22 nt, Human
agauuucacaugcugcucuauu

SEQ ID NO: 843044 - RNA, 21 nt, Human
gccaccucgucucggagcagc

SEQ ID NO: 843045 - RNA, 22 nt, Human
gccucugcgccucagccgaccu

SEQ ID NO: 843046 - RNA, 22 nt, Human
ucuguucauuugccucggcucu

SEQ ID NO: 843047 - RNA, 22 nt, Human
gugauaaaauucaaauagcucu

SEQ ID NO: 843048 - RNA, 22 nt, Human
cauaaguuggguaauauaauga

SEQ ID NO: 843049 - RNA, 23 nt, Human
ggagccuggcauaugagacgcau

SEQ ID NO: 843050 - RNA, 23 nt, Human
cuggggcuuucaaaucugggcag

SEQ ID NO: 843051 - RNA, 22 nt, Human
uaaaucaguuucucuuauuggu

SEQ ID NO: 843052 - RNA, 22 nt, Human
cugggagaugacucagagcagg

SEQ ID NO: 843053 - RNA, 20 nt, Human
ccuggcugcauucaggacgg

SEQ ID NO: 843054 - RNA, 22 nt, Human
cuguuucaagugaagucagaca

SEQ ID NO: 843055 - RNA, 22 nt, Human
uucaguaaaacacugcaauguc

SEQ ID NO: 843056 - RNA, 22 nt, Human
uuuaccaagcuuuaauuacaua

SEQ ID NO: 843057 - RNA, 22 nt, Human
agaaugcaagauaaacuuuauu

SEQ ID NO: 843058 - RNA, 22 nt, Human
ccagagccggcucccucagcuu

SEQ ID NO: 843059 - RNA, 22 nt, Human
gcuggaucaaguccuucaccca

SEQ ID NO: 843060 - RNA, 22 nt, Human
aguaaaaauugaggugcaaaau

SEQ ID NO: 843061 - RNA, 22 nt, Human
acguuuucagugacugugcuuc

SEQ ID NO: 843062 - RNA, 22 nt, Human
gggcagccucggugccugcugc

SEQ ID NO: 843063 - RNA, 22 nt, Human
gucuauauauugcuugaauaau

SEQ ID NO: 843064 - RNA, 22 nt, Human
ucugagggcuugaggggaagua

SEQ ID NO: 843065 - RNA, 22 nt, Human
cucccaagggguaagggagcug

SEQ ID NO: 843066 - RNA, 22 nt, Human
uucucuuuugugaugugagaug

SEQ ID NO: 843067 - RNA, 22 nt, Human
auucuucaaagagugucaaagu

SEQ ID NO: 843068 - RNA, 22 nt, Human
caaauucagaaaauugguagag

SEQ ID NO: 843069 - RNA, 22 nt, Human
cugccucugcgucccacagagu

SEQ ID NO: 843070 - RNA, 22 nt, Human
augaaaauucuaugcaggccag

SEQ ID NO: 843071 - RNA, 22 nt, Human
cucaggauagcugcgcagccug

SEQ ID NO: 843072 - RNA, 22 nt, Human
ccccagcucagugcagggacau

SEQ ID NO: 843073 - RNA, 22 nt, Human
aguccagugaacuguaaauagg

SEQ ID NO: 843074 - RNA, 22 nt, Human
ccaggcuggagugcaauggugc

SEQ ID NO: 843075 - RNA, 22 nt, Human
gcagccugaugaucuggguugu

SEQ ID NO: 843076 - RNA, 20 nt, Human
cagcuuggaugagaggcuga

SEQ ID NO: 843077 - RNA, 22 nt, Human
cagggcaggacagauacauuac

SEQ ID NO: 843078 - RNA, 22 nt, Human
aaguucaaguaguguuacaugg

SEQ ID NO: 843079 - RNA, 22 nt, Human
aauuccagcuaggaaaagcuuc

SEQ ID NO: 843080 - RNA, 22 nt, Human
uccaugagaacccuuggagaua

SEQ ID NO: 843081 - RNA, 22 nt, Human
ucugucugcaccuaagcacagu

SEQ ID NO: 843082 - RNA, 22 nt, Human
caagaugccccugguagggauc

SEQ ID NO: 843083 - RNA, 22 nt, Human
aaaaauugcugagaacggaauu

SEQ ID NO: 843084 - RNA, 20 nt, Human
cacagcuugccuuuuaugac

SEQ ID NO: 843085 - RNA, 22 nt, Human
cagucacauugcccugcauuua

SEQ ID NO: 843086 - RNA, 20 nt, Human
acuggagccaucucagccua

SEQ ID NO: 843087 - RNA, 23 nt, Human
uugauuucaaaugcagagaacac

SEQ ID NO: 843088 - RNA, 22 nt, Human
uuugacauugccaauuugcuca

SEQ ID NO: 843089 - RNA, 22 nt, Human
gagggaaagguuaauacaugau

SEQ ID NO: 843090 - RNA, 20 nt, Human
gccugagcuauugccaggau

SEQ ID NO: 843091 - RNA, 22 nt, Human
uuuauccagcagcuauucaaaa

SEQ ID NO: 843092 - RNA, 22 nt, Human
gugugaaagcuuguccucugua

SEQ ID NO: 843093 - RNA, 22 nt, Human
agagccuggaccugagcuacaa

SEQ ID NO: 843094 - RNA, 19 nt, Human
ggucagcugggcuagaggc

SEQ ID NO: 843095 - RNA, 21 nt, Human
ugggaugggucugggaccagc

SEQ ID NO: 843096 - RNA, 22 nt, Human
aagaggaaaugauugacuauau

SEQ ID NO: 843097 - RNA, 22 nt, Human
uugagggucuggaucugcugcu

SEQ ID NO: 843098 - RNA, 22 nt, Human
gaaaugcaaauucucucucgcu

SEQ ID NO: 843099 - RNA, 22 nt, Human
uauaauccauucauugauuucu

SEQ ID NO: 843100 - RNA, 22 nt, Human
gucuuucuaugaugaacuguug

SEQ ID NO: 843101 - RNA, 22 nt, Human
gcaaaugcuaaaguguagagac

SEQ ID NO: 843102 - RNA, 22 nt, Human
cacguuuuaugacagaagaagc

SEQ ID NO: 843103 - RNA, 22 nt, Human
ccagcuccuucugucuguggag

SEQ ID NO: 843104 - RNA, 22 nt, Human
auucuucaccugagucagucua

SEQ ID NO: 843105 - RNA, 22 nt, Human
gggacuguaaauucauauggcc

SEQ ID NO: 843106 - RNA, 22 nt, Human
uagagcuguaucaaagagccuu

SEQ ID NO: 843107 - RNA, 22 nt, Human
gagucaccacugugauagucga

SEQ ID NO: 843108 - RNA, 22 nt, Human
guuaggcagugugguauagcag

SEQ ID NO: 843109 - RNA, 22 nt, Human
caucagaaccagcugggugagg

SEQ ID NO: 843110 - RNA, 22 nt, Human
agcugucuccagauacaggauu

SEQ ID NO: 843111 - RNA, 23 nt, Human
gggcaguuauguuguccuuggcu

SEQ ID NO: 843112 - RNA, 22 nt, Human
uccauuuuguagguaugcuaca

SEQ ID NO: 843113 - RNA, 22 nt, Human
gaagagcugugauucaggcuua

SEQ ID NO: 843114 - RNA, 22 nt, Human
acagaaauauucguggugcuug

SEQ ID NO: 843115 - RNA, 22 nt, Human
uggccugguccuugucaaggca

SEQ ID NO: 843116 - RNA, 22 nt, Human
agaggggcucauauccugucau

SEQ ID NO: 843117 - RNA, 22 nt, Human
gcagcugcaggcaggcuugcug

SEQ ID NO: 843118 - RNA, 22 nt, Human
ugcaguggaaagacucagacuu

SEQ ID NO: 843119 - RNA, 22 nt, Human
uguguuccuucgucuucccuuc

SEQ ID NO: 843120 - RNA, 22 nt, Human
ugaggcaguauucuccauucca

SEQ ID NO: 843121 - RNA, 22 nt, Human
uugccaggagcucaucugaggg

SEQ ID NO: 843122 - RNA, 22 nt, Human
uagggauguccugagacuuggc

SEQ ID NO: 843123 - RNA, 22 nt, Human
ccuggagguggagguugcagug

SEQ ID NO: 843124 - RNA, 22 nt, Human
gcucaggaucagccaccucuuu

SEQ ID NO: 843125 - RNA, 22 nt, Human
ccacagggauaggaauggggcu

SEQ ID NO: 843126 - RNA, 22 nt, Human
aggaggcuguggagcacuccau

SEQ ID NO: 843127 - RNA, 22 nt, Human
ggugaagggugucauggcauuu

SEQ ID NO: 843128 - RNA, 22 nt, Human
uucucugaaggccaugcucacu

SEQ ID NO: 843129 - RNA, 22 nt, Human
ccacagggccuuuccugcuggc

SEQ ID NO: 843130 - RNA, 22 nt, Human
uccccagggcugcagagggugu

SEQ ID NO: 843131 - RNA, 22 nt, Human
gccagggagucugggccacaga

SEQ ID NO: 843132 - RNA, 22 nt, Human
gggcugccuuucuucugggagc

SEQ ID NO: 843133 - RNA, 21 nt, Human
ugauuuccaucuuaaaauaaa

SEQ ID NO: 843134 - RNA, 22 nt, Human
uggauuagugcugaaaugaugg

SEQ ID NO: 843135 - RNA, 22 nt, Human
uagaacagaguuccagugauca

SEQ ID NO: 843136 - RNA, 22 nt, Human
auacuaaaguauagaacuuagu

SEQ ID NO: 843137 - RNA, 22 nt, Human
ggcaggcaggagcgugcuuggg

SEQ ID NO: 843138 - RNA, 21 nt, Human
aacauuucugggagaacucac

SEQ ID NO: 843139 - RNA, 22 nt, Human
ccugggcuuucaaaaccagccu

SEQ ID NO: 843140 - RNA, 22 nt, Human
uccugagauguggagcuccaug

SEQ ID NO: 843141 - RNA, 22 nt, Human
aauguacaaaagucagccaacu

SEQ ID NO: 843142 - RNA, 22 nt, Human
uggccugguuauauugcuauca

SEQ ID NO: 843143 - RNA, 22 nt, Human
agauuuagugguggaauuuugg

SEQ ID NO: 843144 - RNA, 22 nt, Human
acauaugugcuuauauccauga

SEQ ID NO: 843145 - RNA, 22 nt, Human
caggcacugugcaagggucucg

SEQ ID NO: 843146 - RNA, 20 nt, Human
aggcugccaggucucacauc

SEQ ID NO: 843147 - RNA, 22 nt, Human
agcugagcucaggcugauguaa

SEQ ID NO: 843148 - RNA, 19 nt, Human
cccucuugcacaaagcaaa

SEQ ID NO: 843149 - RNA, 22 nt, Human
gaucaaaagcuggguucuaaaa

SEQ ID NO: 843150 - RNA, 22 nt, Human
ccaccagcuucagcagccgcgg

SEQ ID NO: 843151 - RNA, 22 nt, Human
cccucccagaugggcuugaggu

SEQ ID NO: 843152 - RNA, 22 nt, Human
gggggcucugacucccucagcu

SEQ ID NO: 843153 - RNA, 22 nt, Human
uugggcuggcagagguggucuu

SEQ ID NO: 843154 - RNA, 21 nt, Human
ucuggagcccuaagcugagaa

SEQ ID NO: 843155 - RNA, 22 nt, Human
gggaaauugugugagaucuuug

SEQ ID NO: 843156 - RNA, 22 nt, Human
ucccuggcagcuaagggugguc

SEQ ID NO: 843157 - RNA, 22 nt, Human
uauaacacucagaaagaaucau

SEQ ID NO: 843158 - RNA, 22 nt, Human
agggccugggguagcuuacugc

SEQ ID NO: 843159 - RNA, 22 nt, Human
gaaaaaggauaaauacaguguu

SEQ ID NO: 843160 - RNA, 21 nt, Human
acagcaagccuucacaugagu

SEQ ID NO: 843161 - RNA, 19 nt, Human
cauguuaugcuguaguauc

SEQ ID NO: 843162 - RNA, 22 nt, Human
ugauuuccccagucuugcugcu

SEQ ID NO: 843163 - RNA, 23 nt, Human
uugcauagacauccucauagauu

SEQ ID NO: 843164 - RNA, 22 nt, Human
uaaguccuucaccuaauccuca

SEQ ID NO: 843165 - RNA, 22 nt, Human
agagugaaggccagguuacagu

SEQ ID NO: 843166 - RNA, 22 nt, Human
gcugcagcuuuaggauccagug

SEQ ID NO: 843167 - RNA, 21 nt, Human
uugaaggaucacuucuguacc

SEQ ID NO: 843168 - RNA, 22 nt, Human
ugaggcagaaaauagcaguuca

SEQ ID NO: 843169 - RNA, 19 nt, Human
ccauggcaaugaucugaug

SEQ ID NO: 843170 - RNA, 22 nt, Human
caggcacuucugcugcuugucu

SEQ ID NO: 843171 - RNA, 22 nt, Human
gcuggcagggacagcugcgugu

SEQ ID NO: 843172 - RNA, 17 nt, Human
caggcagacauguaagc

SEQ ID NO: 843173 - RNA, 22 nt, Human
aaguccuuuauccuaaaagguc

SEQ ID NO: 843174 - RNA, 22 nt, Human
ggaggagggguuuacauuggaa

SEQ ID NO: 843175 - RNA, 22 nt, Human
gcugccuucaguucugauucau

SEQ ID NO: 843176 - RNA, 20 nt, Human
uccucagaagacauuugggg

SEQ ID NO: 843177 - RNA, 22 nt, Human
ggcucaggccagaccacgacuc

SEQ ID NO: 843178 - RNA, 22 nt, Human
gcuuuaaugaagucacgcaaag

SEQ ID NO: 843179 - RNA, 22 nt, Human
cuguagccagaagcagaaggcc

SEQ ID NO: 843180 - RNA, 22 nt, Human
cccugcaggggaccugcagccu

SEQ ID NO: 843181 - RNA, 22 nt, Human
caggaacauuuaaccacagggu

SEQ ID NO: 843182 - RNA, 22 nt, Human
gucaacuuuaagaugaucuuuu

SEQ ID NO: 843183 - RNA, 22 nt, Human
cugccaggcagcagagggagaa

SEQ ID NO: 843184 - RNA, 22 nt, Human
caggagagauaugaguccccac

SEQ ID NO: 843185 - RNA, 22 nt, Human
ugaggggagguuggggcacauc

SEQ ID NO: 843186 - RNA, 22 nt, Human
ucauaaaaauagacucuaaagu

SEQ ID NO: 843187 - RNA, 22 nt, Human
cagggcccaggccacuggguug

SEQ ID NO: 843188 - RNA, 22 nt, Human
agcuuccuguugagagagggag

SEQ ID NO: 843189 - RNA, 22 nt, Human
uccagagcagguggucagaagg

SEQ ID NO: 843190 - RNA, 22 nt, Human
gacccaggguauccagagcugc

SEQ ID NO: 843191 - RNA, 22 nt, Human
cagacagacagccguggccacc

SEQ ID NO: 843192 - RNA, 22 nt, Human
ggcucuggugggaagguuagau

SEQ ID NO: 843193 - RNA, 22 nt, Human
ucucucuuuuuaaucauguaau

SEQ ID NO: 843194 - RNA, 21 nt, Human
agcagaggcugccuggugacu

SEQ ID NO: 843195 - RNA, 22 nt, Human
aggauuuagcaugaaaugugaa

SEQ ID NO: 843196 - RNA, 22 nt, Human
accaggaggcuacacuguccca

SEQ ID NO: 843197 - RNA, 22 nt, Human
aagagcuggcccaaucugagca

SEQ ID NO: 843198 - RNA, 22 nt, Human
gcugucugacuccaaguuggag

SEQ ID NO: 843199 - RNA, 17 nt, Human
ugcuuaauuuugacugg

SEQ ID NO: 843200 - RNA, 22 nt, Human
uggcaguccccugugccuggaa

SEQ ID NO: 843201 - RNA, 22 nt, Human
agguuauaugucauacugaagu

SEQ ID NO: 843202 - RNA, 22 nt, Human
uggcagcacaagguggcccaug

SEQ ID NO: 843203 - RNA, 22 nt, Human
cugacuguaauucuguucuuaa

SEQ ID NO: 843204 - RNA, 22 nt, Human
cucucugguuucagcgaagggg

SEQ ID NO: 843205 - RNA, 22 nt, Human
cagcugagaccagaaugcaggu

SEQ ID NO: 843206 - RNA, 22 nt, Human
ugggcucuccuggaggacaaca

SEQ ID NO: 843207 - RNA, 22 nt, Human
ucauuucuccgaccugcugucc

SEQ ID NO: 843208 - RNA, 19 nt, Human
aggugaugugacucuagaa

SEQ ID NO: 843209 - RNA, 22 nt, Human
acagaauauugguuacuguugc

SEQ ID NO: 843210 - RNA, 22 nt, Human
agggcagccaugagccuucagg

SEQ ID NO: 843211 - RNA, 22 nt, Human
aguguguguuugggcgguuuau

SEQ ID NO: 843212 - RNA, 22 nt, Human
uccagagggcgauggcuggggg

SEQ ID NO: 843213 - RNA, 22 nt, Human
guaacacagaaaugaaauucca

SEQ ID NO: 843214 - RNA, 22 nt, Human
uccaugaguuugaggaaaagag

SEQ ID NO: 843215 - RNA, 21 nt, Human
cccuguguuccacagcagaca

SEQ ID NO: 843216 - RNA, 22 nt, Human
ugcaggaaauuccaggguggcc

SEQ ID NO: 843217 - RNA, 17 nt, Human
ggcagcugugugcaugc

SEQ ID NO: 843218 - RNA, 22 nt, Human
gcuggcuguaucaccuggccag

SEQ ID NO: 843219 - RNA, 22 nt, Human
agguggguaucaugagagauua

SEQ ID NO: 843220 - RNA, 19 nt, Human
auacacauacguaaacuga

SEQ ID NO: 843221 - RNA, 22 nt, Human
cucaggguaaugaaagacgaau

SEQ ID NO: 843222 - RNA, 22 nt, Human
caggggcagucugugugcgugg

SEQ ID NO: 843223 - RNA, 22 nt, Human
ggcuccagggaguggagagaag

SEQ ID NO: 843224 - RNA, 19 nt, Human
uggcagggagaguuugaag

SEQ ID NO: 843225 - RNA, 21 nt, Human
agcagagugcuuugacuuugu

SEQ ID NO: 843226 - RNA, 22 nt, Human
gacagcaggagaucaugauaga

SEQ ID NO: 843227 - RNA, 22 nt, Human
acauuucuaucauccuguaaug

SEQ ID NO: 843228 - RNA, 22 nt, Human
caguaucugucaguaaucaggu

SEQ ID NO: 843229 - RNA, 22 nt, Human
gaggcagagugcaccccaggag

SEQ ID NO: 843230 - RNA, 20 nt, Human
ugaagcagccuugauucugu

SEQ ID NO: 843231 - RNA, 22 nt, Human
ggcacugaucugauuucccucc

SEQ ID NO: 843232 - RNA, 22 nt, Human
gacagaggcuggagcaccuccu

SEQ ID NO: 843233 - RNA, 22 nt, Human
agugcacagcgugauguauugg

SEQ ID NO: 843234 - RNA, 22 nt, Human
cagcuggcagcccuggcccugc

SEQ ID NO: 843235 - RNA, 22 nt, Human
aggaguggaauuacuggguucu

SEQ ID NO: 843236 - RNA, 22 nt, Human
ucagcaggcgguuccuuguggg

SEQ ID NO: 843237 - RNA, 22 nt, Human
ugggccuggaguuuguccagag

SEQ ID NO: 843238 - RNA, 22 nt, Human
ccuacucugagcgccuccgcau

SEQ ID NO: 843239 - RNA, 22 nt, Human
cccaggauggggcugcaguuau

SEQ ID NO: 843240 - RNA, 23 nt, Human
augcaguauaugucaguaguuua

SEQ ID NO: 843241 - RNA, 22 nt, Human
uacauauagacaguuacucuag

SEQ ID NO: 843242 - RNA, 22 nt, Human
aguaaugucccuuaaauguggu

SEQ ID NO: 843243 - RNA, 23 nt, Human
ugauuuccagugagucaguggga

SEQ ID NO: 843244 - RNA, 22 nt, Human
ugaauaauuccuuuuugucaag

SEQ ID NO: 843245 - RNA, 22 nt, Human
ucagcaguuuuauaugcagcuu

SEQ ID NO: 843246 - RNA, 22 nt, Human
ucccagcagcauagcucagaau

SEQ ID NO: 843247 - RNA, 22 nt, Human
aucuauacccaucaugauuuaa

SEQ ID NO: 843248 - RNA, 22 nt, Human
cuguccuugcuggccagguaug

SEQ ID NO: 843249 - RNA, 22 nt, Human
acaagagacaagagguucuucu

SEQ ID NO: 843250 - RNA, 22 nt, Human
ucaguuuucucaucugugaaau

SEQ ID NO: 843251 - RNA, 22 nt, Human
caguggguccuaaguacaguuc

SEQ ID NO: 843252 - RNA, 23 nt, Human
ugucccagagggagggauaggcu

SEQ ID NO: 843253 - RNA, 22 nt, Human
cuggagcccugaaugggcagga

SEQ ID NO: 843254 - RNA, 22 nt, Human
ccaggagcagauauggacauaa

SEQ ID NO: 843255 - RNA, 22 nt, Human
uguccuuaucuccaaacaauca

SEQ ID NO: 843256 - RNA, 22 nt, Human
cgcaccacugaauuccagccug

SEQ ID NO: 843257 - RNA, 23 nt, Human
aaagacugcugagaauuuuagga

SEQ ID NO: 843258 - RNA, 22 nt, Human
ggcagcuggguuggccagaaac

SEQ ID NO: 843259 - RNA, 22 nt, Human
cauugcaccacauugcaucccu

SEQ ID NO: 843260 - RNA, 22 nt, Human
ugugugacccccagugaagccu

SEQ ID NO: 843261 - RNA, 22 nt, Human
aggcagaugggagcuggaaguu

SEQ ID NO: 843262 - RNA, 22 nt, Human
cauggcuuuguucauauaauuu

SEQ ID NO: 843263 - RNA, 22 nt, Human
ugcugaugcuguucuguuagga

SEQ ID NO: 843264 - RNA, 22 nt, Human
agcucccagucuccucuccaug

SEQ ID NO: 843265 - RNA, 22 nt, Human
ugaaacagucuccagacuugga

SEQ ID NO: 843266 - RNA, 22 nt, Human
ucuggauccuaugcacuggacu

SEQ ID NO: 843267 - RNA, 22 nt, Human
aagccuuccugagugcaaggcc

SEQ ID NO: 843268 - RNA, 22 nt, Human
aggcagcccacaggacacagga

SEQ ID NO: 843269 - RNA, 21 nt, Human
gcucccugcucagcuccuggg

SEQ ID NO: 843270 - RNA, 22 nt, Human
cugcugugaguuuggaggucua

SEQ ID NO: 843271 - RNA, 22 nt, Human
ugccagggugucaggagagcua

SEQ ID NO: 843272 - RNA, 22 nt, Human
uaagcuauuccugaagaagguu

SEQ ID NO: 843273 - RNA, 19 nt, Human
auuucaagagguuuauugg

SEQ ID NO: 843274 - RNA, 22 nt, Human
gcagcagaguuugggagauggu

SEQ ID NO: 843275 - RNA, 22 nt, Human
caguaugucuacuggacaaagu

SEQ ID NO: 843276 - RNA, 22 nt, Human
cagggugggcacccagccucca

SEQ ID NO: 843277 - RNA, 22 nt, Human
ugucuuuggaauauuuagcuga

SEQ ID NO: 843278 - RNA, 22 nt, Human
caauauucaguggaaaagccau

SEQ ID NO: 843279 - RNA, 22 nt, Human
aggccagcaagaaagagagucu

SEQ ID NO: 843280 - RNA, 22 nt, Human
agggaugguggagguugcaagu

SEQ ID NO: 843281 - RNA, 22 nt, Human
aaggagcuuguucgccuuccuc

SEQ ID NO: 843282 - RNA, 21 nt, Human
aaugugugcuauuuaucuuuu

SEQ ID NO: 843283 - RNA, 22 nt, Human
ccagggugcucuguggcgucgc

SEQ ID NO: 843284 - RNA, 22 nt, Human
ggccuuuaagcaauugaaaaga

SEQ ID NO: 843285 - RNA, 22 nt, Human
cugcugggcagaggcugcauga

SEQ ID NO: 843286 - RNA, 22 nt, Human
cccaggagguagagguugcagu

SEQ ID NO: 843287 - RNA, 22 nt, Human
ccuggccuggcacucccucugc

SEQ ID NO: 843288 - RNA, 22 nt, Human
ccugggcucuauccugacccag

SEQ ID NO: 843289 - RNA, 22 nt, Human
cacagcugcccuacuccaugug

SEQ ID NO: 843290 - RNA, 22 nt, Human
uggaggcauaggccugggcccu

SEQ ID NO: 843291 - RNA, 22 nt, Human
ggaggagguggguuaaguugua

SEQ ID NO: 843292 - RNA, 22 nt, Human
caguccuugauccaauaguggg

SEQ ID NO: 843293 - RNA, 22 nt, Human
gagcacagccaaaguaagaagg

SEQ ID NO: 843294 - RNA, 22 nt, Human
uaagacuucauuaguaauaugg

SEQ ID NO: 843295 - RNA, 22 nt, Human
uucuucuccuaaggagaguccu

SEQ ID NO: 843296 - RNA, 22 nt, Human
acaugucuguaauuauuuuagg

SEQ ID NO: 843297 - RNA, 22 nt, Human
ggcagcucacgggcauggggug

SEQ ID NO: 843298 - RNA, 22 nt, Human
gagaggaguaggcugauggugc

SEQ ID NO: 843299 - RNA, 22 nt, Human
uucacagggccacuggcaggag

SEQ ID NO: 843300 - RNA, 22 nt, Human
agguaaaauagauaguauuucu

SEQ ID NO: 843301 - RNA, 22 nt, Human
ccuggccucagacagagggugg

SEQ ID NO: 843302 - RNA, 22 nt, Human
ugggggagccuucacaguagcu

SEQ ID NO: 843303 - RNA, 22 nt, Human
ugacuucaagguucagcaccuu

SEQ ID NO: 843304 - RNA, 22 nt, Human
gaaaguuucuucauuaagaugu

SEQ ID NO: 843305 - RNA, 22 nt, Human
cuucagagugcagaagauuggg

SEQ ID NO: 843306 - RNA, 22 nt, Human
ugcuggggagugauugaccauc

SEQ ID NO: 843307 - RNA, 22 nt, Human
agcagcucuggcacuguagcau

SEQ ID NO: 843308 - RNA, 22 nt, Human
guacauguugguuguuuccagu

SEQ ID NO: 843309 - RNA, 22 nt, Human
uggcauuucaguauuuucauaa

SEQ ID NO: 843310 - RNA, 22 nt, Human
agggcugccugacuccagagcc

SEQ ID NO: 843311 - RNA, 22 nt, Human
auuuuuccaugauacuuaucug

SEQ ID NO: 843312 - RNA, 19 nt, Human
aaaugugaugguacaauuc

SEQ ID NO: 843313 - RNA, 22 nt, Human
gacccagcuuaagucacauguu

SEQ ID NO: 843314 - RNA, 16 nt, Human
gggagggaguuggugg

SEQ ID NO: 843315 - RNA, 23 nt, Human
gaauaguuuuagaaauuggagaa

SEQ ID NO: 843316 - RNA, 22 nt, Human
gauucacucauauuuuacguuu

SEQ ID NO: 843317 - RNA, 17 nt, Human
ccagagcuacugagacu

SEQ ID NO: 843318 - RNA, 22 nt, Human
acacaggagauauguaauggcu

SEQ ID NO: 843319 - RNA, 22 nt, Human
gccagcaguauguccuggcagu

SEQ ID NO: 843320 - RNA, 21 nt, Human
cccacggaaugaugaggcacu

SEQ ID NO: 843321 - RNA, 22 nt, Human
ucuggaucaccacuucugccuc

SEQ ID NO: 843322 - RNA, 22 nt, Human
ucuucaaaugcuaguaauauca

SEQ ID NO: 843323 - RNA, 22 nt, Human
ucuguggauuuuaguguucaug

SEQ ID NO: 843324 - RNA, 21 nt, Human
uggcucaguugcugggcacag

SEQ ID NO: 843325 - RNA, 22 nt, Human
cugccagcaaugugaccaugcu

SEQ ID NO: 843326 - RNA, 22 nt, Human
augcacagacccaaaggccauc

SEQ ID NO: 843327 - RNA, 22 nt, Human
aggacccugagcgggcaugccg

SEQ ID NO: 843328 - RNA, 22 nt, Human
uuugcacuagcauuuguccaug

SEQ ID NO: 843329 - RNA, 15 nt, Human
uggcagcuuguuaag

SEQ ID NO: 843330 - RNA, 22 nt, Human
cucccaggguagggagagacua

SEQ ID NO: 843331 - RNA, 22 nt, Human
aaguauauuuuuugaagcauau

SEQ ID NO: 843332 - RNA, 22 nt, Human
aggggaugauccucccgcagcg

SEQ ID NO: 843333 - RNA, 22 nt, Human
acuuguucauugaguacauaug

SEQ ID NO: 843334 - RNA, 22 nt, Human
gccuaggaguggggauggcggu

SEQ ID NO: 843335 - RNA, 22 nt, Human
cacuggaauauggcguugaacc

SEQ ID NO: 843336 - RNA, 22 nt, Human
gugaauaaccuacuccaggccu

SEQ ID NO: 843337 - RNA, 22 nt, Human
ugaaugaauccuaacaaagaca

SEQ ID NO: 843338 - RNA, 22 nt, Human
uucuuuccccauggaguucgga

SEQ ID NO: 843339 - RNA, 22 nt, Human
ugggcaaguaucggacucugag

SEQ ID NO: 843340 - RNA, 22 nt, Human
cagaggcaggauaagaacugcg

SEQ ID NO: 843341 - RNA, 23 nt, Human
aagcugccagucugaagccuggg

SEQ ID NO: 843342 - RNA, 22 nt, Human
agaagugccauacuguggucca

SEQ ID NO: 843343 - RNA, 22 nt, Human
ucaggcugaggucaucugcauc

SEQ ID NO: 843344 - RNA, 22 nt, Human
gggcuggagccagcuguggcug

SEQ ID NO: 843345 - RNA, 22 nt, Human
uggcauuucuguuagacucuca

SEQ ID NO: 843346 - RNA, 22 nt, Human
gaaggccuagggaugcucugcg

SEQ ID NO: 843347 - RNA, 22 nt, Human
uuauugccugauugaggucauu

SEQ ID NO: 843348 - RNA, 22 nt, Human
ucaggagaaaauaucaggaagu

SEQ ID NO: 843349 - RNA, 22 nt, Human
agaauccugaugaaaaggagag

SEQ ID NO: 843350 - RNA, 20 nt, Human
gggugggagagucugagggu

SEQ ID NO: 843351 - RNA, 20 nt, Human
ccagguggugccuggagagg

SEQ ID NO: 843352 - RNA, 22 nt, Human
gcaaaauuaaacuuagcaucau

SEQ ID NO: 843353 - RNA, 22 nt, Human
aaaaacuguaauuacuuuugca

SEQ ID NO: 843354 - RNA, 22 nt, Human
uagaauaugauuaauuuucuua

SEQ ID NO: 843355 - RNA, 22 nt, Human
ucaugcuuaaaagacacuugag

SEQ ID NO: 843356 - RNA, 22 nt, Human
cuguucucuggcgguggcuguu

SEQ ID NO: 843357 - RNA, 22 nt, Human
auguuuccgugagcauccuuga

SEQ ID NO: 843358 - RNA, 23 nt, Human
cccuggagcuagucugagcagag

SEQ ID NO: 843359 - RNA, 22 nt, Human
agcuuguuagaaauguagacuc

SEQ ID NO: 843360 - RNA, 22 nt, Human
aguuacuugagacguuuaugaa

SEQ ID NO: 843361 - RNA, 22 nt, Human
cagguggggcagcugugggagc

SEQ ID NO: 843362 - RNA, 22 nt, Human
gugccugcagcaauccauggca

SEQ ID NO: 843363 - RNA, 22 nt, Human
gcagggacgccagggacagcaa

SEQ ID NO: 843364 - RNA, 22 nt, Human
aggccuguuggcgugggcucua

SEQ ID NO: 843365 - RNA, 22 nt, Human
cagcugcccaagccccagaugu

SEQ ID NO: 843366 - RNA, 22 nt, Human
ccccuuccgucucuugaguguc

SEQ ID NO: 843367 - RNA, 22 nt, Human
gagcucccuggagguucagaua

SEQ ID NO: 843368 - RNA, 22 nt, Human
uuaugcuaguauaguccuuaga

SEQ ID NO: 843369 - RNA, 20 nt, Human
agcaggaaugaugcuuucau

SEQ ID NO: 843370 - RNA, 22 nt, Human
gggacaggccccucgcuagcuu

SEQ ID NO: 843371 - RNA, 22 nt, Human
ugcugccauggucgcugguguc

SEQ ID NO: 843372 - RNA, 22 nt, Human
ggugucccaggccagcugugug

SEQ ID NO: 843373 - RNA, 22 nt, Human
uucauacuaaaguguaagaugu

SEQ ID NO: 843374 - RNA, 22 nt, Human
ucaguuuugaaaacauugaaug

SEQ ID NO: 843375 - RNA, 22 nt, Human
ugcauugcauuugucaugaaga

SEQ ID NO: 843376 - RNA, 22 nt, Human
ccugccagucacuaugucaccu

SEQ ID NO: 843377 - RNA, 22 nt, Human
ucucacugggucacagcagagg

SEQ ID NO: 843378 - RNA, 22 nt, Human
auuccaaacagugcugcagacu

SEQ ID NO: 843379 - RNA, 22 nt, Human
acauuuagaguucuuuacucca

SEQ ID NO: 843380 - RNA, 22 nt, Human
ucugguuagccaauaaugccaa

SEQ ID NO: 843381 - RNA, 22 nt, Human
cccagcucucgcacuuacuagc

SEQ ID NO: 843382 - RNA, 22 nt, Human
ggcuucugaaaucucugugcgu

SEQ ID NO: 843383 - RNA, 22 nt, Human
guuuuccugaaacugauggugu

SEQ ID NO: 843384 - RNA, 22 nt, Human
acuccagggcuccaucccuugu

SEQ ID NO: 843385 - RNA, 22 nt, Human
cagcuggaugggagaccauguu

SEQ ID NO: 843386 - RNA, 22 nt, Human
aaucagaaauugagggucuggu

SEQ ID NO: 843387 - RNA, 18 nt, Human
uucagcagcagacacacu

SEQ ID NO: 843388 - RNA, 22 nt, Human
ucacaugaguauuauuuuccaa

SEQ ID NO: 843389 - RNA, 18 nt, Human
uggagcaggaagccuggc

SEQ ID NO: 843390 - RNA, 22 nt, Human
cucacagguaccagcacccucc

SEQ ID NO: 843391 - RNA, 22 nt, Human
agcagccauuuaaaaugaauug

SEQ ID NO: 843392 - RNA, 22 nt, Human
aggcucaggcaggaauggcgga

SEQ ID NO: 843393 - RNA, 20 nt, Human
uauuccaaggguagagaaaa

SEQ ID NO: 843394 - RNA, 18 nt, Human
aggcuucccaggcaggcc

SEQ ID NO: 843395 - RNA, 22 nt, Human
agguaacacuacuuaguauacu

SEQ ID NO: 843396 - RNA, 22 nt, Human
aaucagaaccuugggucauaac

SEQ ID NO: 843397 - RNA, 22 nt, Human
ugcugugcuggcggcagaggcc

SEQ ID NO: 843398 - RNA, 22 nt, Human
gucccacaccuugaggggucuu

SEQ ID NO: 843399 - RNA, 22 nt, Human
uccuucaguucaauuaguccgu

SEQ ID NO: 843400 - RNA, 22 nt, Human
cuuaaagaugucaaggcuguuu

SEQ ID NO: 843401 - RNA, 22 nt, Human
ccuuucucuuggauaccgauug

SEQ ID NO: 843402 - RNA, 23 nt, Human
gccuggccaccccagggcugcuu

SEQ ID NO: 843403 - RNA, 22 nt, Human
aaggcagccaugugcuuugggu

SEQ ID NO: 843404 - RNA, 22 nt, Human
cccagcccccgagugucuggaa

SEQ ID NO: 843405 - RNA, 22 nt, Human
ggguguguuccuaaggaaacca

SEQ ID NO: 843406 - RNA, 21 nt, Human
caggaaaagcggaagucuagc

SEQ ID NO: 843407 - RNA, 22 nt, Human
ugcuuuaagagauuguuaguac

SEQ ID NO: 843408 - RNA, 22 nt, Human
ugcagaagaaaacagcugugug

SEQ ID NO: 843409 - RNA, 22 nt, Human
ugcaggagcugugcggugaggg

SEQ ID NO: 843410 - RNA, 22 nt, Human
uuuaggcacagaguugagggac

SEQ ID NO: 843411 - RNA, 19 nt, Human
gcacugaagaguuggucac

SEQ ID NO: 843412 - RNA, 22 nt, Human
uggcagagaauaaaucuugacu

SEQ ID NO: 843413 - RNA, 22 nt, Human
agggugguucuuuuaguggaag

SEQ ID NO: 843414 - RNA, 22 nt, Human
agaaauguuuauggcugccuau

SEQ ID NO: 843415 - RNA, 22 nt, Human
uugaaauacugcauuguucagu

SEQ ID NO: 843416 - RNA, 22 nt, Human
cucagggggaaucaggucacag

SEQ ID NO: 843417 - RNA, 21 nt, Human
auaaaguuuuacaggaaugca

SEQ ID NO: 843418 - RNA, 22 nt, Human
ccaggagaugauguuggggauu

SEQ ID NO: 843419 - RNA, 22 nt, Human
accagcuguguccuggcugcag

SEQ ID NO: 843420 - RNA, 22 nt, Human
aggcaccuugcgguccagugaa

SEQ ID NO: 843421 - RNA, 20 nt, Human
uacauucaaaacaaacucug

SEQ ID NO: 843422 - RNA, 22 nt, Human
aggcugaggcagguggaucacu

SEQ ID NO: 843423 - RNA, 22 nt, Human
uuucuucugagaucagggagaa

SEQ ID NO: 843424 - RNA, 22 nt, Human
cugcuguggccagccaggucaa

SEQ ID NO: 843425 - RNA, 22 nt, Human
uggcucagccuggcccuuucau

SEQ ID NO: 843426 - RNA, 19 nt, Human
acaggcagaauugggugug

SEQ ID NO: 843427 - RNA, 20 nt, Human
uucuggaggcuacaagucug

SEQ ID NO: 843428 - RNA, 22 nt, Human
cucccucugucuuguccagaaa

SEQ ID NO: 843429 - RNA, 22 nt, Human
ggcaucuguccaucucuccagc

SEQ ID NO: 843430 - RNA, 22 nt, Human
ucugucacccagagugcagugg

SEQ ID NO: 843431 - RNA, 22 nt, Human
aaauuuucagagcacuagagaa

SEQ ID NO: 843432 - RNA, 22 nt, Human
uucauuaauucauucagugacu

SEQ ID NO: 843433 - RNA, 22 nt, Human
aggcggcuccgggagugugggc

SEQ ID NO: 843434 - RNA, 22 nt, Human
ggaggcccagagaggugaagug

SEQ ID NO: 843435 - RNA, 22 nt, Human
uccugagaugagacagugcugc

SEQ ID NO: 843436 - RNA, 22 nt, Human
uucaacccaaguucuccauuuu

SEQ ID NO: 843437 - RNA, 22 nt, Human
acucucucacagcuuggcugau

SEQ ID NO: 843438 - RNA, 22 nt, Human
aggcacugguccauuuucugca

SEQ ID NO: 843439 - RNA, 22 nt, Human
uaauuucagugggcucugggcu

SEQ ID NO: 843440 - RNA, 19 nt, Human
ggcuggcaagugacagugu

SEQ ID NO: 843441 - RNA, 22 nt, Human
ucugcugcacaaauucaucucu

SEQ ID NO: 843442 - RNA, 20 nt, Human
gcaaaauaggcucuguuggu

SEQ ID NO: 843443 - RNA, 22 nt, Human
auaacagaugugaagugcuaau

SEQ ID NO: 843444 - RNA, 22 nt, Human
ucugcugucacucauuugcuuc

SEQ ID NO: 843445 - RNA, 22 nt, Human
gagagcuggguucaaguagcug

SEQ ID NO: 843446 - RNA, 22 nt, Human
gaaaguuuauagguuauauaau

SEQ ID NO: 843447 - RNA, 22 nt, Human
cucuaacaccacagugugguuu

SEQ ID NO: 843448 - RNA, 22 nt, Human
ugucccuggaacuauggcucca

SEQ ID NO: 843449 - RNA, 22 nt, Human
auguguaugcaugcacuaagau

SEQ ID NO: 843450 - RNA, 22 nt, Human
cugagaggugacagcgugcugg

SEQ ID NO: 843451 - RNA, 22 nt, Human
ugaagccaucccucagauggcc

SEQ ID NO: 843452 - RNA, 22 nt, Human
caacugugaauuuuaugauacc

SEQ ID NO: 843453 - RNA, 23 nt, Human
aagcugccuucgcaguuggucug

SEQ ID NO: 843454 - RNA, 22 nt, Human
ugcuucaaguugaaauauucuu

SEQ ID NO: 843455 - RNA, 22 nt, Human
ccucugagaccagcucugcacc

SEQ ID NO: 843456 - RNA, 22 nt, Human
cugccuggaccggcagcccucc

SEQ ID NO: 843457 - RNA, 21 nt, Human
uguccuuaaugcaauguccuu

SEQ ID NO: 843458 - RNA, 22 nt, Human
aaugcaaagcaagcagagauuu

SEQ ID NO: 843459 - RNA, 22 nt, Human
ucaaagucacaacucucuaauu

SEQ ID NO: 843460 - RNA, 22 nt, Human
uagugaaacaguuaucaaucug

SEQ ID NO: 843461 - RNA, 22 nt, Human
guuuccaaccccaccaaagugc

SEQ ID NO: 843462 - RNA, 22 nt, Human
agggaggauaguagucaguuua

SEQ ID NO: 843463 - RNA, 22 nt, Human
gcucaggaaauaguuuaguguu

SEQ ID NO: 843464 - RNA, 21 nt, Human
aucagcaaaugccugucuccc

SEQ ID NO: 843465 - RNA, 22 nt, Human
guuuucugauuagcaaaucuga

SEQ ID NO: 843466 - RNA, 18 nt, Human
gucuggaggucaggagcu

SEQ ID NO: 843467 - RNA, 22 nt, Human
ucagggcaaugucccucagaag

SEQ ID NO: 843468 - RNA, 22 nt, Human
aaauguguuuagaugguuuauu

SEQ ID NO: 843469 - RNA, 22 nt, Human
agagguagagguugcagugagc

SEQ ID NO: 843470 - RNA, 22 nt, Human
gccugcaguucugugcuaggca

SEQ ID NO: 843471 - RNA, 19 nt, Human
uuacaucugcaacacuggu

SEQ ID NO: 843472 - RNA, 22 nt, Human
augaugguuguccuaggugcau

SEQ ID NO: 843473 - RNA, 22 nt, Human
aggagaguaccauugggccgca

SEQ ID NO: 843474 - RNA, 22 nt, Human
accaggaggccuugguucugag

SEQ ID NO: 843475 - RNA, 22 nt, Human
auucagcauaaucaguagcuug

SEQ ID NO: 843476 - RNA, 22 nt, Human
aagagcuggauggaaucuggga

SEQ ID NO: 843477 - RNA, 22 nt, Human
aucugcuugaaugagcaacagg

SEQ ID NO: 843478 - RNA, 17 nt, Human
gcuuccucaugcaguuc

SEQ ID NO: 843479 - RNA, 22 nt, Human
gagcagcucgagaaggaagcag

SEQ ID NO: 843480 - RNA, 22 nt, Human
gagcaacaguuuaugguuuuuc

SEQ ID NO: 843481 - RNA, 22 nt, Human
auuucccagcuuugaucaguuu

SEQ ID NO: 843482 - RNA, 22 nt, Human
cagcagcugggaaggaggcuga

SEQ ID NO: 843483 - RNA, 22 nt, Human
aagaacaguugggaggugagcc

SEQ ID NO: 843484 - RNA, 23 nt, Human
uccucccaaauuucagccucauu

SEQ ID NO: 843485 - RNA, 19 nt, Human
agcagccaucgaccaugga

SEQ ID NO: 843486 - RNA, 22 nt, Human
ccugucucccuggcauggcuca

SEQ ID NO: 843487 - RNA, 22 nt, Human
cagcagcaaaucuagaagagga

SEQ ID NO: 843488 - RNA, 21 nt, Human
acagaacuguauagugauaaa

SEQ ID NO: 843489 - RNA, 22 nt, Human
aaggcacuagcaagcugccugg

SEQ ID NO: 843490 - RNA, 22 nt, Human
ucccagaagugaaauuucuaga

SEQ ID NO: 843491 - RNA, 22 nt, Human
gagccaggguuugaaacuagac

SEQ ID NO: 843492 - RNA, 22 nt, Human
cccaaggacacgggcagggaca

SEQ ID NO: 843493 - RNA, 19 nt, Human
cucuggccucuggaugcug

SEQ ID NO: 843494 - RNA, 22 nt, Human
ccugggagguggagguugcagu

SEQ ID NO: 843495 - RNA, 22 nt, Human
agagggcccauguugggcugcu

SEQ ID NO: 843496 - RNA, 21 nt, Human
uccagaaaagaggucauuagc

SEQ ID NO: 843497 - RNA, 22 nt, Human
aaaaaugcugugguagcugugu

SEQ ID NO: 843498 - RNA, 22 nt, Human
agcaggcuuguuaugucugaga

SEQ ID NO: 843499 - RNA, 22 nt, Human
cccacaggcuagggguagggca

SEQ ID NO: 843500 - RNA, 22 nt, Human
ggcuucucucccccagcuccac

SEQ ID NO: 843501 - RNA, 22 nt, Human
agauacauagcugugagcacac

SEQ ID NO: 843502 - RNA, 22 nt, Human
gauggcagcagcagccagggau

SEQ ID NO: 843503 - RNA, 22 nt, Human
ccucucaucauuaucgcuuugu

SEQ ID NO: 843504 - RNA, 22 nt, Human
uaguccuugguaaaauucuaug

SEQ ID NO: 843505 - RNA, 22 nt, Human
aagaggaggacgguucccagaa

SEQ ID NO: 843506 - RNA, 22 nt, Human
gaggggcuggcuguggucccau

SEQ ID NO: 843507 - RNA, 22 nt, Human
auaguaacuggcauguuuauga

SEQ ID NO: 843508 - RNA, 22 nt, Human
ugaugguuuuauuaauaggacc

SEQ ID NO: 843509 - RNA, 22 nt, Human
cauuugaaauucuuagaacaaa

SEQ ID NO: 843510 - RNA, 22 nt, Human
caggggcuguuugccucaggcc

SEQ ID NO: 843511 - RNA, 22 nt, Human
gcagggccagguacaagaagca

SEQ ID NO: 843512 - RNA, 22 nt, Human
cugcccugagucaugccagaug

SEQ ID NO: 843513 - RNA, 22 nt, Human
ucuucucccaucuccaggcagg

SEQ ID NO: 843514 - RNA, 22 nt, Human
gaguuguucaacgugugugaaa

SEQ ID NO: 843515 - RNA, 22 nt, Human
ggccugcucugcagccucuaca

SEQ ID NO: 843516 - RNA, 22 nt, Human
gguggaaggccuggaaggaggc

SEQ ID NO: 843517 - RNA, 22 nt, Human
caugcacuuaccugaaauucaa

SEQ ID NO: 843518 - RNA, 22 nt, Human
gccugggaacucugaucuccug

SEQ ID NO: 843519 - RNA, 22 nt, Human
gaaucauuuauuuuugacagca

SEQ ID NO: 843520 - RNA, 22 nt, Human
cccugccuuguuggagccuaug

SEQ ID NO: 843521 - RNA, 22 nt, Human
gugaaacacccuccaaugcaca

SEQ ID NO: 843522 - RNA, 22 nt, Human
aagccucaccuuuuagaagcua

SEQ ID NO: 843523 - RNA, 22 nt, Human
uugcauugaaugcacauuuuua

SEQ ID NO: 843524 - RNA, 22 nt, Human
cuggcuuucuauuuggugcuau

SEQ ID NO: 843525 - RNA, 22 nt, Human
gcucagaggagcaucauaagga

SEQ ID NO: 843526 - RNA, 22 nt, Human
ggagguggcagagggacauucu

SEQ ID NO: 843527 - RNA, 17 nt, Human
agcagaagucagaggga

SEQ ID NO: 843528 - RNA, 22 nt, Human
uaacacugauuuguucucaggg

SEQ ID NO: 843529 - RNA, 22 nt, Human
gggaagggagggaccucagucu

SEQ ID NO: 843530 - RNA, 22 nt, Human
ucaugacaacuauauuauucca

SEQ ID NO: 843531 - RNA, 22 nt, Human
agaugauggccauguccucucc

SEQ ID NO: 843532 - RNA, 22 nt, Human
gcucuaauugaaaaauacugca

SEQ ID NO: 843533 - RNA, 22 nt, Human
aggguagggcccggagacagac

SEQ ID NO: 843534 - RNA, 22 nt, Human
ggcucagguuaccagucccucc

SEQ ID NO: 843535 - RNA, 22 nt, Human
uuucacaaucaaauggugaaau

SEQ ID NO: 843536 - RNA, 22 nt, Human
ccuggcacgaagggcugagguu

SEQ ID NO: 843537 - RNA, 23 nt, Human
agucaguguaaguuuggaaugca

SEQ ID NO: 843538 - RNA, 22 nt, Human
gggccucucccuucucacgcau

SEQ ID NO: 843539 - RNA, 22 nt, Human
cugagggcaugaacauuccaua

SEQ ID NO: 843540 - RNA, 22 nt, Human
ggagugaguacuggaguagcug

SEQ ID NO: 843541 - RNA, 22 nt, Human
cugaaugucgaucagcuugggu

SEQ ID NO: 843542 - RNA, 22 nt, Human
gagcuuaggccagggacaggga

SEQ ID NO: 843543 - RNA, 21 nt, Human
gcaggaugcaucuuggugucu

SEQ ID NO: 843544 - RNA, 22 nt, Human
gaguuauuucagaaggaaagau

SEQ ID NO: 843545 - RNA, 22 nt, Human
ccagggugugagaaggaaguag

SEQ ID NO: 843546 - RNA, 22 nt, Human
acagaacugggaaaugcacaua

SEQ ID NO: 843547 - RNA, 22 nt, Human
gggccagagcuuggcagcuggg

SEQ ID NO: 843548 - RNA, 22 nt, Human
ccagggugggaggcugaaggcg

SEQ ID NO: 843549 - RNA, 22 nt, Human
aaauauaguaaaugcauaguuc

SEQ ID NO: 843550 - RNA, 19 nt, Human
cccaaggcccugggcaggc

SEQ ID NO: 843551 - RNA, 22 nt, Human
aggcaguggcugagaccagggg

SEQ ID NO: 843552 - RNA, 22 nt, Human
cccaggaaccuaccagcucgag

SEQ ID NO: 843553 - RNA, 22 nt, Human
acagguuuuuguggauauaugu

SEQ ID NO: 843554 - RNA, 22 nt, Human
cacugaagccacuggaagagga

SEQ ID NO: 843555 - RNA, 22 nt, Human
caggugcugcguggcggagcug

SEQ ID NO: 843556 - RNA, 18 nt, Human
ggcaucugcacagcagcc

SEQ ID NO: 843557 - RNA, 22 nt, Human
auauuguugacuauaagaguaa

SEQ ID NO: 843558 - RNA, 22 nt, Human
ugaaagcagcaccaauaccauu

SEQ ID NO: 843559 - RNA, 22 nt, Human
cauuucaauacuaucugagaau

SEQ ID NO: 843560 - RNA, 19 nt, Human
ugucucagugucccuuccu

SEQ ID NO: 843561 - RNA, 22 nt, Human
gggugggguucaggaaucuuca

SEQ ID NO: 843562 - RNA, 19 nt, Human
auauauguauacaaugugg

SEQ ID NO: 843563 - RNA, 22 nt, Human
cugcagcuuuggaaaccuguuu

SEQ ID NO: 843564 - RNA, 17 nt, Human
gggcagggacuccuggg

SEQ ID NO: 843565 - RNA, 22 nt, Human
guacagaaugcuugguaaggca

SEQ ID NO: 843566 - RNA, 22 nt, Human
gccugggagugcacagugaggu

SEQ ID NO: 843567 - RNA, 22 nt, Human
gggcugggauugcuugcuguga

SEQ ID NO: 843568 - RNA, 22 nt, Human
acauucacuauguccaaacucu

SEQ ID NO: 843569 - RNA, 22 nt, Human
uugaauaaaugagcagugaauu

SEQ ID NO: 843570 - RNA, 22 nt, Human
gcucagagcaucccagugaaug

SEQ ID NO: 843571 - RNA, 22 nt, Human
auuaggcaauucugggcaucuc

SEQ ID NO: 843572 - RNA, 22 nt, Human
ugcugccuuugggaccuggccu

SEQ ID NO: 843573 - RNA, 22 nt, Human
uggcagcagccauggaaggccc

SEQ ID NO: 843574 - RNA, 22 nt, Human
caggaacacaaguucagggaug

SEQ ID NO: 843575 - RNA, 22 nt, Human
ugcagagggacagccacagcuc

SEQ ID NO: 843576 - RNA, 22 nt, Human
cauagaaacuugcagcaagcac

SEQ ID NO: 843577 - RNA, 16 nt, Human
ccuggauccccugugg

SEQ ID NO: 843578 - RNA, 22 nt, Human
acuucacacagcaaauuuaucu

SEQ ID NO: 843579 - RNA, 22 nt, Human
agggacacugaugagaaauucu

SEQ ID NO: 843580 - RNA, 22 nt, Human
aagagcuggaguuugcagcccu

SEQ ID NO: 843581 - RNA, 22 nt, Human
ucugggagagcugcugucagag

SEQ ID NO: 843582 - RNA, 22 nt, Human
cuacauuuguucuauagcuuuu

SEQ ID NO: 843583 - RNA, 22 nt, Human
aguauuuagcauagugguuagu

SEQ ID NO: 843584 - RNA, 22 nt, Human
aaaguuuccugcuaagugcuau

SEQ ID NO: 843585 - RNA, 22 nt, Human
gaggcagagaccuucaggaccu

SEQ ID NO: 843586 - RNA, 22 nt, Human
aggcuucccaagcagcugcaaa

SEQ ID NO: 843587 - RNA, 22 nt, Human
gcugggagcaaguacucaucuu

SEQ ID NO: 843588 - RNA, 22 nt, Human
ucucuggagggcuccaggcggg

SEQ ID NO: 843589 - RNA, 22 nt, Human
agggagccagaguugggagcuc

SEQ ID NO: 843590 - RNA, 21 nt, Human
uucaaagacuugaugcugacc

SEQ ID NO: 843591 - RNA, 22 nt, Human
acugcagccuugaacucugggc

SEQ ID NO: 843592 - RNA, 20 nt, Human
agggcagcuugaggagccgg

SEQ ID NO: 843593 - RNA, 22 nt, Human
agccccaguaagggagggccug

SEQ ID NO: 843594 - RNA, 20 nt, Human
guggccucucacauucugag

SEQ ID NO: 843595 - RNA, 22 nt, Human
aaaauacuguggaguguugaaa

SEQ ID NO: 843596 - RNA, 22 nt, Human
uuuccuuccaaaugcccgggag

SEQ ID NO: 843597 - RNA, 22 nt, Human
guaacagaggguuugcagauau

SEQ ID NO: 843598 - RNA, 22 nt, Human
cagcccuggaacagcugacuca

SEQ ID NO: 843599 - RNA, 22 nt, Human
cauuuguagcuauuuacuguau

SEQ ID NO: 843600 - RNA, 22 nt, Human
agcugcccuucucuugcccuug

SEQ ID NO: 843601 - RNA, 20 nt, Human
cucugcugcccgccggcugc

SEQ ID NO: 843602 - RNA, 22 nt, Human
gaaagccauagcccagcuuuac

SEQ ID NO: 843603 - RNA, 22 nt, Human
ggcaguggaggacccugugucu

SEQ ID NO: 843604 - RNA, 22 nt, Human
ccuuucucuaucgacccaucgc

SEQ ID NO: 843605 - RNA, 22 nt, Human
augaauaaacaggugccucuuc

SEQ ID NO: 843606 - RNA, 22 nt, Human
gccagccccuuagggcucuccc

SEQ ID NO: 843607 - RNA, 22 nt, Human
ccagggugggguccaggaacca

SEQ ID NO: 843608 - RNA, 22 nt, Human
ugcugucugcaacaguacuaca

SEQ ID NO: 843609 - RNA, 22 nt, Human
caggagugaguuggggucuaca

SEQ ID NO: 843610 - RNA, 22 nt, Human
auccuugaacuuagacacuagg

SEQ ID NO: 843611 - RNA, 22 nt, Human
agauaugacuagaagcucauuu

SEQ ID NO: 843612 - RNA, 22 nt, Human
ggcacugagaacaggcugacuu

SEQ ID NO: 843613 - RNA, 21 nt, Human
cagcuuugucugucuucgggg

SEQ ID NO: 843614 - RNA, 23 nt, Human
uccuuccuuugagaggcuccauc

SEQ ID NO: 843615 - RNA, 22 nt, Human
ucuuccaguguagacaucugcc

SEQ ID NO: 843616 - RNA, 22 nt, Human
cugggcuggagugcaauggcgc

SEQ ID NO: 843617 - RNA, 22 nt, Human
ggcagcuggccuccucgcccac

SEQ ID NO: 843618 - RNA, 23 nt, Human
gacagagugagaccuugucuuac

SEQ ID NO: 843619 - RNA, 22 nt, Human
cagacccucgggugaguuggcc

SEQ ID NO: 843620 - RNA, 22 nt, Human
cuggggcucucuggaaugcuug

SEQ ID NO: 843621 - RNA, 22 nt, Human
aggaccugacuggcuccugcuu

SEQ ID NO: 843622 - RNA, 22 nt, Human
uuugcaaagugacuauuauaug

SEQ ID NO: 843623 - RNA, 22 nt, Human
aagagcauauuaauaguggaga

SEQ ID NO: 843624 - RNA, 22 nt, Human
gugccugguuuggggaauguuc

SEQ ID NO: 843625 - RNA, 22 nt, Human
cuggagccacugggucuuguau

SEQ ID NO: 843626 - RNA, 19 nt, Human
uaucuguuuccugcuuguc

SEQ ID NO: 843627 - RNA, 22 nt, Human
uugugugguagcuucauugaac

SEQ ID NO: 843628 - RNA, 22 nt, Human
gaaaaugugccuuuggguauug

SEQ ID NO: 843629 - RNA, 22 nt, Human
auuaaauuggaucugcauaguu

SEQ ID NO: 843630 - RNA, 22 nt, Human
ccagcgcuucccaucagggagg

SEQ ID NO: 843631 - RNA, 22 nt, Human
caguccuugcucugggaugaug

SEQ ID NO: 843632 - RNA, 23 nt, Human
agcagccauagggaagcaauaca

SEQ ID NO: 843633 - RNA, 22 nt, Human
aaaguuucaauagaggaagugg

SEQ ID NO: 843634 - RNA, 22 nt, Human
gcugccagucuaaugggaaaca

SEQ ID NO: 843635 - RNA, 22 nt, Human
cugucaccuguucacugcagca

SEQ ID NO: 843636 - RNA, 22 nt, Human
auuaggcauuauggggauaagg

SEQ ID NO: 843637 - RNA, 22 nt, Human
ugucccagacauaaguggacau

SEQ ID NO: 843638 - RNA, 22 nt, Human
uuucuugaccacuauguugaua

SEQ ID NO: 843639 - RNA, 22 nt, Human
auuguucaaagugcuuugcaug

SEQ ID NO: 843640 - RNA, 22 nt, Human
uggccugcagaggcuguggggc

SEQ ID NO: 843641 - RNA, 22 nt, Human
ggcaugggguguauguggcacg

SEQ ID NO: 843642 - RNA, 22 nt, Human
aggauuuaccuccagcuaggcu

SEQ ID NO: 843643 - RNA, 22 nt, Human
ggcagcuuucucacccaugacc

SEQ ID NO: 843644 - RNA, 22 nt, Human
uugaccauaccuccaggcaguu

SEQ ID NO: 843645 - RNA, 22 nt, Human
gcagggcugggugggagacaga

SEQ ID NO: 843646 - RNA, 22 nt, Human
caaauaguuuuucauguauuau

SEQ ID NO: 843647 - RNA, 22 nt, Human
augcugugauuguagaaauauu

SEQ ID NO: 843648 - RNA, 22 nt, Human
guucuucaguaaaauuaaaugu

SEQ ID NO: 843649 - RNA, 22 nt, Human
agacuucucaguuuuauuagua

SEQ ID NO: 843650 - RNA, 22 nt, Human
gcagaagucagaccaucugaau

SEQ ID NO: 843651 - RNA, 22 nt, Human
ugguaaaguguacugaauauga

SEQ ID NO: 843652 - RNA, 22 nt, Human
ucuucaaaaaauauccaucagu

SEQ ID NO: 843653 - RNA, 22 nt, Human
uagucaaaccucagaauacccc

SEQ ID NO: 843654 - RNA, 22 nt, Human
cagugcagaacacauggaaaau

SEQ ID NO: 843655 - RNA, 22 nt, Human
uggagcucaaaggccuguggga

SEQ ID NO: 843656 - RNA, 22 nt, Human
uacaugaaguugucuaaacugg

SEQ ID NO: 843657 - RNA, 22 nt, Human
uugauacaggcucuauuucauc

SEQ ID NO: 843658 - RNA, 22 nt, Human
auaaggaaugauguaucaguuu

SEQ ID NO: 843659 - RNA, 22 nt, Human
cuccucccucuuugccacacau

SEQ ID NO: 843660 - RNA, 22 nt, Human
uuuauguaguuacggacuauca

SEQ ID NO: 843661 - RNA, 21 nt, Human
ggagucauuagucauuuccuu

SEQ ID NO: 843662 - RNA, 22 nt, Human
cugggcugcaguuccugguccu

SEQ ID NO: 843663 - RNA, 22 nt, Human
cuggcucacaggugagaugcau

SEQ ID NO: 843664 - RNA, 22 nt, Human
gcucccagacugaccagaggug

SEQ ID NO: 843665 - RNA, 22 nt, Human
caggggacaguaugguggauga

SEQ ID NO: 843666 - RNA, 22 nt, Human
gcucuggaagcaucugagagga

SEQ ID NO: 843667 - RNA, 22 nt, Human
ucuuuccuguaacugcuguuca

SEQ ID NO: 843668 - RNA, 22 nt, Human
cugccucucagccugaccgcca

SEQ ID NO: 843669 - RNA, 20 nt, Human
aaaaucucccagaaacuuau

SEQ ID NO: 843670 - RNA, 22 nt, Human
gugcagggagcccagaaggucc

SEQ ID NO: 843671 - RNA, 22 nt, Human
uuggcugaagguuaagugcugg

SEQ ID NO: 843672 - RNA, 22 nt, Human
gucucagauucagacaucuaca

SEQ ID NO: 843673 - RNA, 22 nt, Human
auaucagacagaaagcauugac

SEQ ID NO: 843674 - RNA, 19 nt, Human
aggcucugagcuccuggag

SEQ ID NO: 843675 - RNA, 22 nt, Human
caaaugauagagccgauuauca

SEQ ID NO: 843676 - RNA, 22 nt, Human
uaacuacauuucacugcaauua

SEQ ID NO: 843677 - RNA, 22 nt, Human
cacucaggcugugucaggagga

SEQ ID NO: 843678 - RNA, 22 nt, Human
uuucaguuguccuguuaauagc

SEQ ID NO: 843679 - RNA, 21 nt, Human
ugcugccauagaccugaggga

SEQ ID NO: 843680 - RNA, 22 nt, Human
ugcuuauugcuuucaagacugu

SEQ ID NO: 843681 - RNA, 22 nt, Human
agucaguguagaaagcccaggc

SEQ ID NO: 843682 - RNA, 22 nt, Human
cccaggaaacccgaaggcgacc

SEQ ID NO: 843683 - RNA, 22 nt, Human
uaauaaacugcuacgcuuaguu

SEQ ID NO: 843684 - RNA, 22 nt, Human
ugaggggaacugaugcccauug

SEQ ID NO: 843685 - RNA, 22 nt, Human
acagccaggaggaacucaguga

SEQ ID NO: 843686 - RNA, 22 nt, Human
cugcuguggguuaagacacugu

SEQ ID NO: 843687 - RNA, 22 nt, Human
caaagguauucucauuuuggaa

SEQ ID NO: 843688 - RNA, 23 nt, Human
acagggcauugcuggccucgagg

SEQ ID NO: 843689 - RNA, 22 nt, Human
ccuggcaggcuggggacagugc

SEQ ID NO: 843690 - RNA, 22 nt, Human
aaauugcauuuuaaagguagau

SEQ ID NO: 843691 - RNA, 21 nt, Human
auugaaagucaacaaucaguu

SEQ ID NO: 843692 - RNA, 21 nt, Human
agcuggcagauauggugucug

SEQ ID NO: 843693 - RNA, 22 nt, Human
uugaaguuguaguucagugaag

SEQ ID NO: 843694 - RNA, 22 nt, Human
uuauuuugguaaauguuugccu

SEQ ID NO: 843695 - RNA, 22 nt, Human
gcuggccuuugaggaagcugcg

SEQ ID NO: 843696 - RNA, 22 nt, Human
cugagcugggaguagagacucu

SEQ ID NO: 843697 - RNA, 22 nt, Human
uccaggagguugagacugcagu

SEQ ID NO: 843698 - RNA, 22 nt, Human
ccaggagucaauaaaggaagcu

SEQ ID NO: 843699 - RNA, 22 nt, Human
uggcagcuuccugcucauagga

SEQ ID NO: 843700 - RNA, 22 nt, Human
ugggaggaaugucacugagcca

SEQ ID NO: 843701 - RNA, 22 nt, Human
caguguacuuggaauguaacag

SEQ ID NO: 843702 - RNA, 22 nt, Human
cuaauacacccuauugcuuguu

SEQ ID NO: 843703 - RNA, 22 nt, Human
guucacauccuugugaggauuu

SEQ ID NO: 843704 - RNA, 22 nt, Human
ugcucucucaggccuggcccac

SEQ ID NO: 843705 - RNA, 22 nt, Human
cacagggcuucucauggggugc

SEQ ID NO: 843706 - RNA, 23 nt, Human
gccucuggagccccagugcucag

SEQ ID NO: 843707 - RNA, 22 nt, Human
gaagcagcuggugagauggagc

SEQ ID NO: 843708 - RNA, 22 nt, Human
agugcuuugguauagaacuauu

SEQ ID NO: 843709 - RNA, 22 nt, Human
ccuucugcucccuggccagggc

SEQ ID NO: 843710 - RNA, 22 nt, Human
caggguacagaguuuucuaaac

SEQ ID NO: 843711 - RNA, 21 nt, Human
gcuauacagaauggccagagg

SEQ ID NO: 843712 - RNA, 22 nt, Human
guggccagcaagugcugccucu

SEQ ID NO: 843713 - RNA, 22 nt, Human
guacauuuuacuuuguuugaau

SEQ ID NO: 843714 - RNA, 22 nt, Human
uugcauuugagaaaguucuccu

SEQ ID NO: 843715 - RNA, 22 nt, Human
uaugcacgucuauuuaugaaga

SEQ ID NO: 843716 - RNA, 22 nt, Human
aauguaugaagguuccaguuuc

SEQ ID NO: 843717 - RNA, 22 nt, Human
cuggcuugcagcucaucauaaa

SEQ ID NO: 843718 - RNA, 22 nt, Human
cccaggagaauauuuuuggguc

SEQ ID NO: 843719 - RNA, 22 nt, Human
agccacagcauguguguaugua

SEQ ID NO: 843720 - RNA, 22 nt, Human
uggacucagugcugccauuccc

SEQ ID NO: 843721 - RNA, 22 nt, Human
aguugcagacgcagagauguug

SEQ ID NO: 843722 - RNA, 22 nt, Human
uacauggguagguuaagucaua

SEQ ID NO: 843723 - RNA, 22 nt, Human
ugguccugccccgugcacagag

SEQ ID NO: 843724 - RNA, 22 nt, Human
uucugucacagugcugguauca

SEQ ID NO: 843725 - RNA, 22 nt, Human
aggcugggcaccguuuugaucc

SEQ ID NO: 843726 - RNA, 19 nt, Human
aggcagcacccaguccuug

SEQ ID NO: 843727 - RNA, 22 nt, Human
ugcagaggagcuggaaggcugg

SEQ ID NO: 843728 - RNA, 22 nt, Human
cggcagcuccgcgccguaggac

SEQ ID NO: 843729 - RNA, 23 nt, Human
uggcaaggaaugggauggagacu

SEQ ID NO: 843730 - RNA, 22 nt, Human
uuauucuuuaaacauauauguu

SEQ ID NO: 843731 - RNA, 21 nt, Human
ugcauaaagaaauacaaauac

SEQ ID NO: 843732 - RNA, 22 nt, Human
uaugugcaguuugcucuuaaca

SEQ ID NO: 843733 - RNA, 22 nt, Human
agaauuagucacaauuauagga

SEQ ID NO: 843734 - RNA, 22 nt, Human
aggcucugcagaccccagcugu

SEQ ID NO: 843735 - RNA, 22 nt, Human
uaagaacagugucugucucaca

SEQ ID NO: 843736 - RNA, 22 nt, Human
ggagugggaacaaugacauggu

SEQ ID NO: 843737 - RNA, 22 nt, Human
uguacaaugccagggaacacca

SEQ ID NO: 843738 - RNA, 18 nt, Human
gaggccugagaaccaggu

SEQ ID NO: 843739 - RNA, 19 nt, Human
gagcagcugcacccauuga

SEQ ID NO: 843740 - RNA, 22 nt, Human
auuucuguuugcuacuauaagu

SEQ ID NO: 843741 - RNA, 22 nt, Human
ugcaucuuacguuuugaaaggg

SEQ ID NO: 843742 - RNA, 22 nt, Human
auggggcuguucucugcccugc

SEQ ID NO: 843743 - RNA, 22 nt, Human
cuuucauucuuagauauuagug

SEQ ID NO: 843744 - RNA, 22 nt, Human
aaugguauuugucaagcauagu

SEQ ID NO: 843745 - RNA, 22 nt, Human
cuguucaugcugauucuguaug

SEQ ID NO: 843746 - RNA, 22 nt, Human
uuucaaugacacaaaagagaaa

SEQ ID NO: 843747 - RNA, 22 nt, Human
uguauuuugugaggaucacucu

SEQ ID NO: 843748 - RNA, 22 nt, Human
ggucccaguccucucccugcua

SEQ ID NO: 843749 - RNA, 22 nt, Human
ccagggagccuggugugucagc

SEQ ID NO: 843750 - RNA, 22 nt, Human
gagcugucuggggacucugggu

SEQ ID NO: 843751 - RNA, 22 nt, Human
uuucaaacuuuacucuugaauc

SEQ ID NO: 843752 - RNA, 22 nt, Human
ugguggccuugauggcaucugc

SEQ ID NO: 843753 - RNA, 22 nt, Human
ugucucugagaugacucccacc

SEQ ID NO: 843754 - RNA, 21 nt, Human
augugaaaccuuccacgcuga

SEQ ID NO: 843755 - RNA, 22 nt, Human
aaauaguuacuucugcugucuu

SEQ ID NO: 843756 - RNA, 22 nt, Human
gcaggguauaauacuuagguga

SEQ ID NO: 843757 - RNA, 20 nt, Human
uucuauacauaucacugaaa

SEQ ID NO: 843758 - RNA, 22 nt, Human
uccugccuuagagcaaggaaaa

SEQ ID NO: 843759 - RNA, 20 nt, Human
accccagccccucuaucuga

SEQ ID NO: 843760 - RNA, 22 nt, Human
uacauucagaagaauggacacg

SEQ ID NO: 843761 - RNA, 22 nt, Human
uauuuuaaagugaagggucuug

SEQ ID NO: 843762 - RNA, 19 nt, Human
cauuuuaagcauccccagu

SEQ ID NO: 843763 - RNA, 22 nt, Human
acaggugaccugcucauaugaa

SEQ ID NO: 843764 - RNA, 22 nt, Human
acuucuggugucauacugcauu

SEQ ID NO: 843765 - RNA, 22 nt, Human
uggccugaauuauggcagaucu

SEQ ID NO: 843766 - RNA, 22 nt, Human
uggggcuggcuauugucucccu

SEQ ID NO: 843767 - RNA, 18 nt, Human
ccuggcagccaugcgcgc

SEQ ID NO: 843768 - RNA, 22 nt, Human
cauuguuaauugguaucuuaca

SEQ ID NO: 843769 - RNA, 22 nt, Human
cccaagcagggugcagaggcau

SEQ ID NO: 843770 - RNA, 22 nt, Human
ugccugagugauguggcagcca

SEQ ID NO: 843771 - RNA, 22 nt, Human
agaauucuggaguugggaggaa

SEQ ID NO: 843772 - RNA, 22 nt, Human
cuugugcauuucauuccucagg

SEQ ID NO: 843773 - RNA, 22 nt, Human
cuuaggcaagcagagcccaucc

SEQ ID NO: 843774 - RNA, 22 nt, Human
ucauaaaacacaccagguaguu

SEQ ID NO: 843775 - RNA, 22 nt, Human
uucugucacuugcaaucaagag

SEQ ID NO: 843776 - RNA, 22 nt, Human
gcuccacuugcagcuaggcuug

SEQ ID NO: 843777 - RNA, 22 nt, Human
caggggaagaugccaagggaga

SEQ ID NO: 843778 - RNA, 22 nt, Human
uucaacuaauguuuauuuuaug

SEQ ID NO: 843779 - RNA, 22 nt, Human
aagcacuuagaagagugccugc

SEQ ID NO: 843780 - RNA, 22 nt, Human
aaacuguaagagaauaaacuac

SEQ ID NO: 843781 - RNA, 22 nt, Human
uacaguaucuucuggcaagcau

SEQ ID NO: 843782 - RNA, 22 nt, Human
uaaauguguaaaccuccauuac

SEQ ID NO: 843783 - RNA, 22 nt, Human
ucugcucugggccagcuauuaa

SEQ ID NO: 843784 - RNA, 22 nt, Human
gcucucuuuuuccagugguggu

SEQ ID NO: 843785 - RNA, 22 nt, Human
ggcauuuauuugucucauucuu

SEQ ID NO: 843786 - RNA, 22 nt, Human
aaaucucaauuugaauuguagc

SEQ ID NO: 843787 - RNA, 22 nt, Human
cagcaauaagguaagcuucucc

SEQ ID NO: 843788 - RNA, 22 nt, Human
uagccaggcgaggucagugucg

SEQ ID NO: 843789 - RNA, 22 nt, Human
auucuuauuuaaauagagucug

SEQ ID NO: 843790 - RNA, 22 nt, Human
gagagugaggccugggaaucua

SEQ ID NO: 843791 - RNA, 22 nt, Human
gguacaauggaccauaaaagcu

SEQ ID NO: 843792 - RNA, 22 nt, Human
ccaggcagcucugauuuauguc

SEQ ID NO: 843793 - RNA, 22 nt, Human
uuucaacauauaccauaaugcc

SEQ ID NO: 843794 - RNA, 22 nt, Human
ucucccacagucucccauggcu

SEQ ID NO: 843795 - RNA, 22 nt, Human
agccacagcgaaccucucuucc

SEQ ID NO: 843796 - RNA, 22 nt, Human
ugaaaaggguagaucccuaagu

SEQ ID NO: 843797 - RNA, 22 nt, Human
gaagccaagugcaaaugccuua

SEQ ID NO: 843798 - RNA, 22 nt, Human
aauacaguaauuuugaugaguu

SEQ ID NO: 843799 - RNA, 22 nt, Human
gcuggccuucugcagaguucug

SEQ ID NO: 843800 - RNA, 23 nt, Human
auguaucucauccaaggaagcuc

SEQ ID NO: 843801 - RNA, 22 nt, Human
ugcuccagugagcuggccaucc

SEQ ID NO: 843802 - RNA, 22 nt, Human
acagcagcuggguucccaccau

SEQ ID NO: 843803 - RNA, 22 nt, Human
auuucuguugcuuauaaauuac

SEQ ID NO: 843804 - RNA, 22 nt, Human
acuuaaaaagaaucuuuucacg

SEQ ID NO: 843805 - RNA, 22 nt, Human
ugucaccaugccagcuucugcc

SEQ ID NO: 843806 - RNA, 22 nt, Human
ugaaagguagcuggccucauag

SEQ ID NO: 843807 - RNA, 22 nt, Human
cucagaguucuccugggaggug

SEQ ID NO: 843808 - RNA, 22 nt, Human
ucagccaguuuguuuauuccgg

SEQ ID NO: 843809 - RNA, 22 nt, Human
uggcucuggggacaguaagucc

SEQ ID NO: 843810 - RNA, 22 nt, Human
accaaggaagagauucucaguu

SEQ ID NO: 843811 - RNA, 22 nt, Human
agccacaccuguccugccagcu

SEQ ID NO: 843812 - RNA, 22 nt, Human
gagcccuggcagucugggaugg

SEQ ID NO: 843813 - RNA, 22 nt, Human
uuaaacagagucugaaauguaa

SEQ ID NO: 843814 - RNA, 21 nt, Human
ucagaacaauuccaugccucc

SEQ ID NO: 843815 - RNA, 22 nt, Human
ggcuagaauaauugacuucauu

SEQ ID NO: 843816 - RNA, 22 nt, Human
ugccuggcaacuguggugggcu

SEQ ID NO: 843817 - RNA, 22 nt, Human
gcugagugagguccagagcuug

SEQ ID NO: 843818 - RNA, 22 nt, Human
aggcagauuuaggagaaaagaa

SEQ ID NO: 843819 - RNA, 17 nt, Human
ggcugcugugcuggugc

SEQ ID NO: 843820 - RNA, 22 nt, Human
ucagcugagcuccagcucauag

SEQ ID NO: 843821 - RNA, 17 nt, Human
aggcauggucuggggug

SEQ ID NO: 843822 - RNA, 22 nt, Human
agcccagggacagggcggaugu

SEQ ID NO: 843823 - RNA, 22 nt, Human
uuguggcucgugagauguuagg

SEQ ID NO: 843824 - RNA, 22 nt, Human
guggcugcuguccucucugguu

SEQ ID NO: 843825 - RNA, 21 nt, Human
agccagucuguuuucuagugc

SEQ ID NO: 843826 - RNA, 20 nt, Human
aggacagcagcugccacuug

SEQ ID NO: 843827 - RNA, 22 nt, Human
agucccagaugacccagcuacu

SEQ ID NO: 843828 - RNA, 22 nt, Human
uugcucaggcuggugugcagug

SEQ ID NO: 843829 - RNA, 22 nt, Human
ucagcugcucaaauuuauguca

SEQ ID NO: 843830 - RNA, 22 nt, Human
agcaauauuuaaagguuugcaa

SEQ ID NO: 843831 - RNA, 22 nt, Human
auccaaagauggaaagaacuuu

SEQ ID NO: 843832 - RNA, 22 nt, Human
gaguguucccacaccccaguug

SEQ ID NO: 843833 - RNA, 20 nt, Human
ucagccagcuaacaugggga

SEQ ID NO: 843834 - RNA, 21 nt, Human
agucccauccgguaagcaagc

SEQ ID NO: 843835 - RNA, 22 nt, Human
ggucaugcugugaaucagugcu

SEQ ID NO: 843836 - RNA, 22 nt, Human
aaauguguuugauaggaauauu

SEQ ID NO: 843837 - RNA, 22 nt, Human
aggaagcucaaagccaugaugu

SEQ ID NO: 843838 - RNA, 22 nt, Human
aggccuagaggaauggccaggg

SEQ ID NO: 843839 - RNA, 22 nt, Human
acccaggagacggaggugcagu

SEQ ID NO: 843840 - RNA, 22 nt, Human
ugugauauuugaguauugucaa

SEQ ID NO: 843841 - RNA, 22 nt, Human
ugaggcagcuuuuucugugugu

SEQ ID NO: 843842 - RNA, 22 nt, Human
cagaaauggagcccaggaaucu

SEQ ID NO: 843843 - RNA, 22 nt, Human
ugcuugggaauguggagucaga

SEQ ID NO: 843844 - RNA, 22 nt, Human
ugcuucucccaaccagggccug

SEQ ID NO: 843845 - RNA, 22 nt, Human
guccugucccccaaggcugugg

SEQ ID NO: 843846 - RNA, 22 nt, Human
ucucagagcaucauuuucuuag

SEQ ID NO: 843847 - RNA, 22 nt, Human
aauguguacaugacagauagaa

SEQ ID NO: 843848 - RNA, 21 nt, Human
ucagaguguguuacagcaagc

SEQ ID NO: 843849 - RNA, 22 nt, Human
caguacuuaguucucaugguuu

SEQ ID NO: 843850 - RNA, 22 nt, Human
ccucgaccuccccaggcucagg

SEQ ID NO: 843851 - RNA, 22 nt, Human
cuggcucacuagcccugcccug

SEQ ID NO: 843852 - RNA, 22 nt, Human
acuguucacagauuagucgaug

SEQ ID NO: 843853 - RNA, 22 nt, Human
uggcucagagccuugagagcug

SEQ ID NO: 843854 - RNA, 22 nt, Human
ucccagagucuucuccuguaau

SEQ ID NO: 843855 - RNA, 22 nt, Human
uagcagcugugaguaaaagcca

SEQ ID NO: 843856 - RNA, 21 nt, Human
agcugccacccuagcuucuga

SEQ ID NO: 843857 - RNA, 22 nt, Human
agccccaguccgcugcgggcgg

SEQ ID NO: 843858 - RNA, 22 nt, Human
ggcugccuccugcugggcugga

SEQ ID NO: 843859 - RNA, 22 nt, Human
aggacccagaggcagaggacgu

SEQ ID NO: 843860 - RNA, 22 nt, Human
cuggccaggcuugggacagaca

SEQ ID NO: 843861 - RNA, 22 nt, Human
gugaggugguacaauauuaacu

SEQ ID NO: 843862 - RNA, 22 nt, Human
cugcuuuguguggucccuccag

SEQ ID NO: 843863 - RNA, 22 nt, Human
uuccuuaggggacagggggaua

SEQ ID NO: 843864 - RNA, 22 nt, Human
cucaggaggugguagaggcccu

SEQ ID NO: 843865 - RNA, 22 nt, Human
gagguagccacagauagagacu

SEQ ID NO: 843866 - RNA, 22 nt, Human
ccugccugucaucgccugcgcc

SEQ ID NO: 843867 - RNA, 22 nt, Human
ccugaagagcacucuagaguug

SEQ ID NO: 843868 - RNA, 22 nt, Human
acaauacuuaccaauguuuuug

SEQ ID NO: 843869 - RNA, 19 nt, Human
ucucuacacuacauuucua

SEQ ID NO: 843870 - RNA, 18 nt, Human
aagaggaggagcagguug

SEQ ID NO: 843871 - RNA, 22 nt, Human
aaggcacugaacuuaaauucug

SEQ ID NO: 843872 - RNA, 22 nt, Human
gcuguguuuuauguuagguuaa

SEQ ID NO: 843873 - RNA, 20 nt, Human
aggcaguuagaaggagauga

SEQ ID NO: 843874 - RNA, 22 nt, Human
uuugcauuucucguaaggaaac

SEQ ID NO: 843875 - RNA, 22 nt, Human
ugcagaagcagagccgguggcc

SEQ ID NO: 843876 - RNA, 22 nt, Human
gaaacauauuaauccagugaaa

SEQ ID NO: 843877 - RNA, 22 nt, Human
cugaggccuaagacaugaauga

SEQ ID NO: 843878 - RNA, 22 nt, Human
gugacaguggucacuuguaguu

SEQ ID NO: 843879 - RNA, 22 nt, Human
agauacaucauuuauaccuuca

SEQ ID NO: 843880 - RNA, 22 nt, Human
auaguuugaaggcuguucuacu

SEQ ID NO: 843881 - RNA, 22 nt, Human
ggaaagaggauaguggguaggu

SEQ ID NO: 843882 - RNA, 22 nt, Human
uuaauuacaaaacacauagguu

SEQ ID NO: 843883 - RNA, 22 nt, Human
aggcuucuucuuccuauuuagu

SEQ ID NO: 843884 - RNA, 22 nt, Human
gacagugcauuuccuggcaugg

SEQ ID NO: 843885 - RNA, 22 nt, Human
agggcugcaucugccuggugaa

SEQ ID NO: 843886 - RNA, 22 nt, Human
cuauugaauuaacuauuaaagu

SEQ ID NO: 843887 - RNA, 22 nt, Human
uucuucagucccacuagccaca

SEQ ID NO: 843888 - RNA, 22 nt, Human
aucuaaacagguguucuuuaga

SEQ ID NO: 843889 - RNA, 22 nt, Human
gaggcccaguccugcaagcacg

SEQ ID NO: 843890 - RNA, 22 nt, Human
gcugccaguguggcaugaugca

SEQ ID NO: 843891 - RNA, 22 nt, Human
gccuggcacauugcaguggauu

SEQ ID NO: 843892 - RNA, 22 nt, Human
uacauuuauaaggcuucucugu

SEQ ID NO: 843893 - RNA, 23 nt, Human
uuucauaugguguggaugaagaa

SEQ ID NO: 843894 - RNA, 22 nt, Human
uuugaaguggaaaaggauuuaa

SEQ ID NO: 843895 - RNA, 22 nt, Human
gcugauguuuaguugauguuac

SEQ ID NO: 843896 - RNA, 20 nt, Human
uguugauuggugucaucuca

SEQ ID NO: 843897 - RNA, 22 nt, Human
uggccgggccgggcgccuccac

SEQ ID NO: 843898 - RNA, 22 nt, Human
cuauagaaaauuguaucacacg

SEQ ID NO: 843899 - RNA, 23 nt, Human
auuucuaggggauuuucuggugc

SEQ ID NO: 843900 - RNA, 22 nt, Human
cagucccaccaggaucgcucuu

SEQ ID NO: 843901 - RNA, 22 nt, Human
uaagaaucaguagauauagauu

SEQ ID NO: 843902 - RNA, 22 nt, Human
agccugguguggggcugcagag

SEQ ID NO: 843903 - RNA, 22 nt, Human
agcaccauugcaaauauggcag

SEQ ID NO: 843904 - RNA, 22 nt, Human
ccaggaaaauaccaagcuuuaa

SEQ ID NO: 843905 - RNA, 22 nt, Human
ccaggaagcugucugauaugaa

SEQ ID NO: 843906 - RNA, 22 nt, Human
caugagcugcugggagccuguc

SEQ ID NO: 843907 - RNA, 22 nt, Human
auacaucuaugccuuucugaca

SEQ ID NO: 843908 - RNA, 22 nt, Human
gucucagggacugcuucugggg

SEQ ID NO: 843909 - RNA, 22 nt, Human
aauguaugcugugguaucuucu

SEQ ID NO: 843910 - RNA, 22 nt, Human
uuuuccucuguuauuaguguga

SEQ ID NO: 843911 - RNA, 20 nt, Human
ccuggcuuugcaucugugau

SEQ ID NO: 843912 - RNA, 17 nt, Human
ggccuugggcugcucuu

SEQ ID NO: 843913 - RNA, 20 nt, Human
aagagcugacucacaguggu

SEQ ID NO: 843914 - RNA, 22 nt, Human
uucuugauuucaugcaguuaag

SEQ ID NO: 843915 - RNA, 22 nt, Human
cucagagcccaggguacacccg

SEQ ID NO: 843916 - RNA, 22 nt, Human
aagcucugcucagcagacuagg

SEQ ID NO: 843917 - RNA, 22 nt, Human
uuuccauauucugcgucugcca

SEQ ID NO: 843918 - RNA, 22 nt, Human
aguacuuuacuucuuacaguuu

SEQ ID NO: 843919 - RNA, 22 nt, Human
cugcagugaaaucaggaagcaa

SEQ ID NO: 843920 - RNA, 22 nt, Human
ggugugccuggggcuuagcugc

SEQ ID NO: 843921 - RNA, 22 nt, Human
gagagcugcauucucagacaca

SEQ ID NO: 843922 - RNA, 22 nt, Human
gggcacagcugcuacccagugc

SEQ ID NO: 843923 - RNA, 22 nt, Human
caaagccauagaguagauaaga

SEQ ID NO: 843924 - RNA, 22 nt, Human
cauuucaaguaacagauugcuu

SEQ ID NO: 843925 - RNA, 22 nt, Human
ggaugcugcuaucaggcuucga

SEQ ID NO: 843926 - RNA, 22 nt, Human
uccuggaggcaaaugaagacuc

SEQ ID NO: 843927 - RNA, 22 nt, Human
gcuggcugcgucaucacagggc

SEQ ID NO: 843928 - RNA, 23 nt, Human
acacaauagaguacuauucagcc

SEQ ID NO: 843929 - RNA, 22 nt, Human
acaguaaugauucugagucucu

SEQ ID NO: 843930 - RNA, 22 nt, Human
uagggcagauucgguggaguuu

SEQ ID NO: 843931 - RNA, 22 nt, Human
cacaugaguccugccagguaug

SEQ ID NO: 843932 - RNA, 22 nt, Human
uuagaacugaagaagauuaagg

SEQ ID NO: 843933 - RNA, 21 nt, Human
agaugaggauacugaggccua

SEQ ID NO: 843934 - RNA, 17 nt, Human
uccagagcacagagcuc

SEQ ID NO: 843935 - RNA, 22 nt, Human
gcugccuugaacuuggccuggg

SEQ ID NO: 843936 - RNA, 22 nt, Human
augugaaacugaagcauccaua

SEQ ID NO: 843937 - RNA, 22 nt, Human
gcagagccccucaagccagccu

SEQ ID NO: 843938 - RNA, 22 nt, Human
uucauucuuugaaucugaggua

SEQ ID NO: 843939 - RNA, 22 nt, Human
ugguggcuguugcagaacugag

SEQ ID NO: 843940 - RNA, 22 nt, Human
gccuggagaauuaaaaggaagg

SEQ ID NO: 843941 - RNA, 22 nt, Human
aaacacauuuuaggaaaaucua

SEQ ID NO: 843942 - RNA, 22 nt, Human
uuuaagacuuagauuuauuggg

SEQ ID NO: 843943 - RNA, 22 nt, Human
cugcugcaggaugggcacucug

SEQ ID NO: 843944 - RNA, 22 nt, Human
uuuauccaaggguuuuaacugu

SEQ ID NO: 843945 - RNA, 23 nt, Human
ccuccugggcacaggccugaugg

SEQ ID NO: 843946 - RNA, 22 nt, Human
uacaaagucacauugaaaugaa

SEQ ID NO: 843947 - RNA, 22 nt, Human
auguaucagaaauagcauuggc

SEQ ID NO: 843948 - RNA, 22 nt, Human
aaucagucauuagcucugaccu

SEQ ID NO: 843949 - RNA, 22 nt, Human
uauguacaucguugaauucaaa

SEQ ID NO: 843950 - RNA, 22 nt, Human
ggcaggaggugaguggcgggug

SEQ ID NO: 843951 - RNA, 22 nt, Human
agcuuccuacaaccaucucaga

SEQ ID NO: 843952 - RNA, 22 nt, Human
uuuaggcaaauuucagaugugc

SEQ ID NO: 843953 - RNA, 22 nt, Human
gugauuuugagaccuauauagu

SEQ ID NO: 843954 - RNA, 22 nt, Human
gaugaaaaaagacgagcauaua

SEQ ID NO: 843955 - RNA, 23 nt, Human
uuucaacuccugccauuauuucu

SEQ ID NO: 843956 - RNA, 22 nt, Human
ucccccacucuaaaggagccuu

SEQ ID NO: 843957 - RNA, 22 nt, Human
aggccagcagcaugacggcauc

SEQ ID NO: 843958 - RNA, 22 nt, Human
acagccagguaaaggcauggca

SEQ ID NO: 843959 - RNA, 18 nt, Human
aguaguggguuuagcuuc

SEQ ID NO: 843960 - RNA, 22 nt, Human
acacagggcggaaagcaugaga

SEQ ID NO: 843961 - RNA, 22 nt, Human
ugaggggagaagcagcagccug

SEQ ID NO: 843962 - RNA, 22 nt, Human
ucuuggagacucuuguauauuu

SEQ ID NO: 843963 - RNA, 22 nt, Human
cugaggccucuguucaccagaa

SEQ ID NO: 843964 - RNA, 22 nt, Human
cacaaauggccguguucaaaga

SEQ ID NO: 843965 - RNA, 22 nt, Human
ucugucaccgagggcauccaaa

SEQ ID NO: 843966 - RNA, 22 nt, Human
aguaaagcagaguugcaguaca

SEQ ID NO: 843967 - RNA, 22 nt, Human
uggcagagaacacacaugauuc

SEQ ID NO: 843968 - RNA, 22 nt, Human
gaugguuuaugauagaugggaa

SEQ ID NO: 843969 - RNA, 22 nt, Human
uacagagauacucuagaucaaa

SEQ ID NO: 843970 - RNA, 22 nt, Human
acugcuuuucuaagauucugug

SEQ ID NO: 843971 - RNA, 22 nt, Human
uuccuauuuccaugaaacacaa

SEQ ID NO: 843972 - RNA, 22 nt, Human
caggagugaaaugaggcccagg

SEQ ID NO: 843973 - RNA, 22 nt, Human
aagauaauauucauuaacuaga

SEQ ID NO: 843974 - RNA, 22 nt, Human
uuugaauaucacaaacuuucaa

SEQ ID NO: 843975 - RNA, 22 nt, Human
cauugcuguuaauugucucuag

SEQ ID NO: 843976 - RNA, 22 nt, Human
gaguuauuaauggcugaguuug

SEQ ID NO: 843977 - RNA, 22 nt, Human
uucaaugaggauagaacuggau

SEQ ID NO: 843978 - RNA, 22 nt, Human
agaguguuucagucuuccuaga

SEQ ID NO: 843979 - RNA, 22 nt, Human
gggcuacauugugagagaaguu

SEQ ID NO: 843980 - RNA, 22 nt, Human
cuuugaaaacuuaaauaacagc

SEQ ID NO: 843981 - RNA, 22 nt, Human
guuauaaaaugcacaguuguuu

SEQ ID NO: 843982 - RNA, 22 nt, Human
auaccuuuuagacauguaguug

SEQ ID NO: 843983 - RNA, 22 nt, Human
agcagccaggaaucugcagagc

SEQ ID NO: 843984 - RNA, 19 nt, Human
uuugcagugguuccuuugu

SEQ ID NO: 843985 - RNA, 22 nt, Human
guacauuggcaacucucuuaga

SEQ ID NO: 843986 - RNA, 22 nt, Human
aaauauagcaauuaugccuacu

SEQ ID NO: 843987 - RNA, 19 nt, Human
ucugcuggcagaauucccu

SEQ ID NO: 843988 - RNA, 22 nt, Human
uuuauuugucuugccauuuagu

SEQ ID NO: 843989 - RNA, 22 nt, Human
auuaaauuagcaaacugugaaa

SEQ ID NO: 843990 - RNA, 22 nt, Human
ugucauuuaguccucugugugu

SEQ ID NO: 843991 - RNA, 22 nt, Human
aaaaguguccagauuaugaaga

SEQ ID NO: 843992 - RNA, 23 nt, Human
gccugggacucaggaggagcuca

SEQ ID NO: 843993 - RNA, 22 nt, Human
ccuuuugcucucccauccagaa

SEQ ID NO: 843994 - RNA, 22 nt, Human
gcagugaaucuggcaagaauuu

SEQ ID NO: 843995 - RNA, 22 nt, Human
augggaggaaggaggcccuuga

SEQ ID NO: 843996 - RNA, 22 nt, Human
cacaggcuccggccuugcagcc

SEQ ID NO: 843997 - RNA, 22 nt, Human
ucccagcagagccagcaagccg

SEQ ID NO: 843998 - RNA, 22 nt, Human
cagagaaacucagauagcugau

SEQ ID NO: 843999 - RNA, 22 nt, Human
cuggccugcugggugagguccu

SEQ ID NO: 844000 - RNA, 22 nt, Human
gaggccagcuaguccaggaagu

SEQ ID NO: 844001 - RNA, 22 nt, Human
ggcuggcucagggcuugagaga

SEQ ID NO: 844002 - RNA, 22 nt, Human
aggagagagaacacuugggucc

SEQ ID NO: 844003 - RNA, 22 nt, Human
acaaagugcacaagaugagaac

SEQ ID NO: 844004 - RNA, 22 nt, Human
auaaaacuuggguaugaucccu

SEQ ID NO: 844005 - RNA, 22 nt, Human
ugaagacagaccaaggagaaug

SEQ ID NO: 844006 - RNA, 22 nt, Human
uggcagcuauuacaaggaaguc

SEQ ID NO: 844007 - RNA, 22 nt, Human
ucuguggcacgauugcacugca

SEQ ID NO: 844008 - RNA, 22 nt, Human
ucagggacuuacaaaccagaag

SEQ ID NO: 844009 - RNA, 22 nt, Human
acagggccagccugggaccugg

SEQ ID NO: 844010 - RNA, 22 nt, Human
uuggccuuguuaaggaggcccu

SEQ ID NO: 844011 - RNA, 22 nt, Human
ggucccugcugaagccuuggug

SEQ ID NO: 844012 - RNA, 22 nt, Human
ucauacauaacuuguacaguga

SEQ ID NO: 844013 - RNA, 22 nt, Human
uauuucagcacaugggauaggu

SEQ ID NO: 844014 - RNA, 22 nt, Human
gcagcugcaauaggcaucaagc

SEQ ID NO: 844015 - RNA, 22 nt, Human
acagaguucccacuccagaagc

SEQ ID NO: 844016 - RNA, 22 nt, Human
ccuugcauauauuauaucuuug

SEQ ID NO: 844017 - RNA, 21 nt, Human
agauuguauggaggugagagg

SEQ ID NO: 844018 - RNA, 22 nt, Human
gaagcagcagcuggggacaguu

SEQ ID NO: 844019 - RNA, 22 nt, Human
uugcagcugcaguaaauguuca

SEQ ID NO: 844020 - RNA, 22 nt, Human
cugccuggguucaaguccuguu

SEQ ID NO: 844021 - RNA, 22 nt, Human
caaagucagcugccagucccaa

SEQ ID NO: 844022 - RNA, 22 nt, Human
gagucaguaauggauaugucau

SEQ ID NO: 844023 - RNA, 22 nt, Human
ggggauggaggcgugugguccu

SEQ ID NO: 844024 - RNA, 21 nt, Human
agcagcugcaguuucuaucug

SEQ ID NO: 844025 - RNA, 22 nt, Human
gccaggaggcugcuguguaggc

SEQ ID NO: 844026 - RNA, 22 nt, Human
cccaggaagaggggucaggugu

SEQ ID NO: 844027 - RNA, 22 nt, Human
uucagaaaggauaauuggaagg

SEQ ID NO: 844028 - RNA, 22 nt, Human
uggcagcuuuuuguuucaggcu

SEQ ID NO: 844029 - RNA, 22 nt, Human
gggagggauuaguucugccugg

SEQ ID NO: 844030 - RNA, 22 nt, Human
ggccuugggcuggcugcaguau

SEQ ID NO: 844031 - RNA, 22 nt, Human
ccagggcagugggagaaggugc

SEQ ID NO: 844032 - RNA, 22 nt, Human
guaacagaaagucaugcucauu

SEQ ID NO: 844033 - RNA, 22 nt, Human
uggcuuuagguugcauguuucu

SEQ ID NO: 844034 - RNA, 22 nt, Human
aggcagauuacuugaggccagg

SEQ ID NO: 844035 - RNA, 22 nt, Human
uucugucaugcucauguaauug

SEQ ID NO: 844036 - RNA, 22 nt, Human
ugcuuuggaucuauuugcugag

SEQ ID NO: 844037 - RNA, 22 nt, Human
agcagacaacccagaugaccca

SEQ ID NO: 844038 - RNA, 22 nt, Human
gccagagcaugcacugccugca

SEQ ID NO: 844039 - RNA, 22 nt, Human
cuuuccaaugcauuuccaaugu

SEQ ID NO: 844040 - RNA, 22 nt, Human
uucugugauugacauguggcuu

SEQ ID NO: 844041 - RNA, 22 nt, Human
cccacagguccccaugaacucg

SEQ ID NO: 844042 - RNA, 22 nt, Human
gcagauggcagcccaggcuggg

SEQ ID NO: 844043 - RNA, 21 nt, Human
agagccugagaucuuccagca

SEQ ID NO: 844044 - RNA, 22 nt, Human
cucaggagacaguguccacaug

SEQ ID NO: 844045 - RNA, 22 nt, Human
uuaaauuauuucuagugaggug

SEQ ID NO: 844046 - RNA, 22 nt, Human
gagccucguggcggccacugcg

SEQ ID NO: 844047 - RNA, 22 nt, Human
ugcagggcuaagucagagccug

SEQ ID NO: 844048 - RNA, 22 nt, Human
cccaggaggcagagcuugcagu

SEQ ID NO: 844049 - RNA, 22 nt, Human
aaaguguacuaugucaugaaca

SEQ ID NO: 844050 - RNA, 22 nt, Human
auacagaaaaugaugcagaguu

SEQ ID NO: 844051 - RNA, 22 nt, Human
ucccagagugagccaggggcag

SEQ ID NO: 844052 - RNA, 22 nt, Human
uauuauguagaguaaggguuaa

SEQ ID NO: 844053 - RNA, 22 nt, Human
ggcucuggugugaagcagccuc

SEQ ID NO: 844054 - RNA, 22 nt, Human
ggcuugcuucuuguccaggaau

SEQ ID NO: 844055 - RNA, 22 nt, Human
aaacacagauuucuuuguccca

SEQ ID NO: 844056 - RNA, 22 nt, Human
ucuggcuccaccuccuuuacua

SEQ ID NO: 844057 - RNA, 22 nt, Human
aguuauauuccauagauucaga

SEQ ID NO: 844058 - RNA, 21 nt, Human
ugucagaaauaagcaugugau

SEQ ID NO: 844059 - RNA, 22 nt, Human
gcugagucuugagcacugagca

SEQ ID NO: 844060 - RNA, 22 nt, Human
gagggaggugauacugaacgua

SEQ ID NO: 844061 - RNA, 22 nt, Human
guguccacggcugagaaugauu

SEQ ID NO: 844062 - RNA, 22 nt, Human
acagguuugucugauguaauga

SEQ ID NO: 844063 - RNA, 22 nt, Human
gccuguccuggaugcucugcaa

SEQ ID NO: 844064 - RNA, 22 nt, Human
ucagcuccucaugcaggggaua

SEQ ID NO: 844065 - RNA, 22 nt, Human
guuuaagaggguuucauuccca

SEQ ID NO: 844066 - RNA, 22 nt, Human
uuguaugaauguauccuaauuu

SEQ ID NO: 844067 - RNA, 23 nt, Human
uuugaaguugacugccuuccaga

SEQ ID NO: 844068 - RNA, 22 nt, Human
guuugcauuucuugaacuauau

SEQ ID NO: 844069 - RNA, 22 nt, Human
ucuggccugaaaguccaugcuu

SEQ ID NO: 844070 - RNA, 21 nt, Human
gcugagagguugggaaguuca

SEQ ID NO: 844071 - RNA, 20 nt, Human
auacacauauucuugcaacu

SEQ ID NO: 844072 - RNA, 22 nt, Human
ggaaagagcccagcagugcuug

SEQ ID NO: 844073 - RNA, 22 nt, Human
agcugccagggacugggcaugg

SEQ ID NO: 844074 - RNA, 20 nt, Human
ggcugccuccuuccuuuccu

SEQ ID NO: 844075 - RNA, 22 nt, Human
caagaauuguacaaacugggug

SEQ ID NO: 844076 - RNA, 19 nt, Human
augagcuggcauuucaggu

SEQ ID NO: 844077 - RNA, 22 nt, Human
acacacaacucauuguguaaua

SEQ ID NO: 844078 - RNA, 20 nt, Human
cuguggaauuuuaccaugcg

SEQ ID NO: 844079 - RNA, 22 nt, Human
caauguguguguuuuucucaac

SEQ ID NO: 844080 - RNA, 22 nt, Human
ccaggccuccugugaguggacc

SEQ ID NO: 844081 - RNA, 22 nt, Human
cuuccagagauagggccucaag

SEQ ID NO: 844082 - RNA, 22 nt, Human
uagaauaugugguaggaucugg

SEQ ID NO: 844083 - RNA, 22 nt, Human
acauuguauaaugauuaucaca

SEQ ID NO: 844084 - RNA, 17 nt, Human
uaaguccuaguuauuuu

SEQ ID NO: 844085 - RNA, 19 nt, Human
acuuugcaugugugucuaa

SEQ ID NO: 844086 - RNA, 22 nt, Human
agagcuggacgucugagcccua

SEQ ID NO: 844087 - RNA, 22 nt, Human
ucaguucaguauacacuauucu

SEQ ID NO: 844088 - RNA, 22 nt, Human
agcagcucugagaggccagcac

SEQ ID NO: 844089 - RNA, 19 nt, Human
cagcaauaaugccagaugg

SEQ ID NO: 844090 - RNA, 19 nt, Human
caguccuuuccgcuuucuc

SEQ ID NO: 844091 - RNA, 22 nt, Human
cuauacagagcauccuuaacuu

SEQ ID NO: 844092 - RNA, 22 nt, Human
aaauacuguagauaauagaguu

SEQ ID NO: 844093 - RNA, 22 nt, Human
gagccugaauuugaccugcuua

SEQ ID NO: 844094 - RNA, 22 nt, Human
cucucccccacagcagccuucu

SEQ ID NO: 844095 - RNA, 21 nt, Human
uccauuguuuucccaggguuu

SEQ ID NO: 844096 - RNA, 22 nt, Human
gccuggagaagauggaacuagc

SEQ ID NO: 844097 - RNA, 22 nt, Human
uccuucagugucccgcucaggu

SEQ ID NO: 844098 - RNA, 22 nt, Human
gaggcagcuuggggcugugggu

SEQ ID NO: 844099 - RNA, 22 nt, Human
auguucuuguucaaaugucagu

SEQ ID NO: 844100 - RNA, 22 nt, Human
gccaccagccccaugcgcugug

SEQ ID NO: 844101 - RNA, 22 nt, Human
ucccaggagcaccuuuugagcc

SEQ ID NO: 844102 - RNA, 22 nt, Human
gggcugcuuuuaagggucucag

SEQ ID NO: 844103 - RNA, 22 nt, Human
ccagaucuaaguccaaaguacu

SEQ ID NO: 844104 - RNA, 22 nt, Human
uaagcauaacuaaaaaugauuu

SEQ ID NO: 844105 - RNA, 22 nt, Human
gccaggcagcugggagggugcc

SEQ ID NO: 844106 - RNA, 22 nt, Human
cacauuucucuaccucacacaa

SEQ ID NO: 844107 - RNA, 22 nt, Human
cugucucugucuuaacucccag

SEQ ID NO: 844108 - RNA, 22 nt, Human
gggccacacagaaccuccuggu

SEQ ID NO: 844109 - RNA, 22 nt, Human
auaucauucugauguauaucuu

SEQ ID NO: 844110 - RNA, 20 nt, Human
ccugccugccucggcucauu

SEQ ID NO: 844111 - RNA, 22 nt, Human
caaugugucaggaaaagggcca

SEQ ID NO: 844112 - RNA, 22 nt, Human
cauuuguacagaacagcuuuau

SEQ ID NO: 844113 - RNA, 22 nt, Human
caggcagcucuaauggaaagug

SEQ ID NO: 844114 - RNA, 22 nt, Human
gagcagaacuacucacauaucg

SEQ ID NO: 844115 - RNA, 22 nt, Human
acugccaggauggcacuagagg

SEQ ID NO: 844116 - RNA, 22 nt, Human
ccagucccgcaugguccagaau

SEQ ID NO: 844117 - RNA, 22 nt, Human
aaacugcuuuccacaguggcua

SEQ ID NO: 844118 - RNA, 22 nt, Human
ccugccaggccagugagcuucc

SEQ ID NO: 844119 - RNA, 22 nt, Human
uggcagagaacacggcugaucu

SEQ ID NO: 844120 - RNA, 22 nt, Human
gggaucagaaacauagcccuga

SEQ ID NO: 844121 - RNA, 22 nt, Human
cacaggggcaaacuguagggga

SEQ ID NO: 844122 - RNA, 22 nt, Human
uggagaagucaaagugaacagg

SEQ ID NO: 844123 - RNA, 22 nt, Human
auguauguuaguguauuaucua

SEQ ID NO: 844124 - RNA, 22 nt, Human
uucauucuugucuuuguauagu

SEQ ID NO: 844125 - RNA, 22 nt, Human
aauaaugucuuuggcuugacca

SEQ ID NO: 844126 - RNA, 22 nt, Human
ggaaaaggccauuguuucucug

SEQ ID NO: 844127 - RNA, 22 nt, Human
uuggagguuugaaaauaugugu

SEQ ID NO: 844128 - RNA, 22 nt, Human
cuuccucacggugcaacaggaa

SEQ ID NO: 844129 - RNA, 22 nt, Human
cauaagaaauaaugaugaugac

SEQ ID NO: 844130 - RNA, 22 nt, Human
auucacaguuuccucauauucu

SEQ ID NO: 844131 - RNA, 22 nt, Human
gaggagcuugugagaagauguc

SEQ ID NO: 844132 - RNA, 22 nt, Human
aggacagcagugcuggcacuug

SEQ ID NO: 844133 - RNA, 22 nt, Human
gcugucaggaacaugccuuggu

SEQ ID NO: 844134 - RNA, 22 nt, Human
ugcagucuuccagcugcacaaa

SEQ ID NO: 844135 - RNA, 22 nt, Human
cagcucccgccaucgggaggca

SEQ ID NO: 844136 - RNA, 22 nt, Human
auucuucauaccuacugagguu

SEQ ID NO: 844137 - RNA, 22 nt, Human
aaugauguauuaguacaacaca

SEQ ID NO: 844138 - RNA, 22 nt, Human
ucucagagaacaguuggugcuu

SEQ ID NO: 844139 - RNA, 22 nt, Human
uauucacaaaaugagguccuca

SEQ ID NO: 844140 - RNA, 20 nt, Human
uuucugugagaaacacuguu

SEQ ID NO: 844141 - RNA, 22 nt, Human
aggcagccagauggcagccugc

SEQ ID NO: 844142 - RNA, 20 nt, Human
gcccaggaauuugcauuucu

SEQ ID NO: 844143 - RNA, 22 nt, Human
cuguaguugaugauuucugaua

SEQ ID NO: 844144 - RNA, 22 nt, Human
ugugucagaaggcaauggggau

SEQ ID NO: 844145 - RNA, 22 nt, Human
uuucaaagaccauuaacuauca

SEQ ID NO: 844146 - RNA, 22 nt, Human
uaguacuuaucucugucauugu

SEQ ID NO: 844147 - RNA, 22 nt, Human
gaggccagaguuccccgaguca

SEQ ID NO: 844148 - RNA, 22 nt, Human
ccaggagaugggaaaguagcag

SEQ ID NO: 844149 - RNA, 22 nt, Human
aauguaugugcaucauuuacau

SEQ ID NO: 844150 - RNA, 22 nt, Human
aucucuguaaaccauaaauuga

SEQ ID NO: 844151 - RNA, 22 nt, Human
gcucugugccacaugcaguguu

SEQ ID NO: 844152 - RNA, 22 nt, Human
cuucucagcaugguuacuguga

SEQ ID NO: 844153 - RNA, 22 nt, Human
uacaguucacaguaucauaaau

SEQ ID NO: 844154 - RNA, 22 nt, Human
uuaaauuccagccucauaauag

SEQ ID NO: 844155 - RNA, 22 nt, Human
aagugaaacauguaucucuuua

SEQ ID NO: 844156 - RNA, 21 nt, Human
cugcuguggcccccgacaugc

SEQ ID NO: 844157 - RNA, 22 nt, Human
uuugacaugcaaagcacuuuag

SEQ ID NO: 844158 - RNA, 22 nt, Human
uggcccugcuggccaaaggcua

SEQ ID NO: 844159 - RNA, 22 nt, Human
ucaaagucauggcaggcucaga

SEQ ID NO: 844160 - RNA, 21 nt, Human
uaacacauuuugguacuuugg

SEQ ID NO: 844161 - RNA, 22 nt, Human
uuauuaaugaguacaaguuauu

SEQ ID NO: 844162 - RNA, 22 nt, Human
gccuuugccugcgacguggcug

SEQ ID NO: 844163 - RNA, 22 nt, Human
cccuggagggacagcugcucua

SEQ ID NO: 844164 - RNA, 22 nt, Human
ugaauaauccacagucauucau

SEQ ID NO: 844165 - RNA, 20 nt, Human
uagaaaucuuauaaaagacu

SEQ ID NO: 844166 - RNA, 22 nt, Human
accaggaguugggggugggacc

SEQ ID NO: 844167 - RNA, 20 nt, Human
acaggagaucugaggaaagg

SEQ ID NO: 844168 - RNA, 22 nt, Human
gaguccuuaauacacuggugga

SEQ ID NO: 844169 - RNA, 22 nt, Human
gugucccaaagauuagaaauca

SEQ ID NO: 844170 - RNA, 22 nt, Human
acugcuuuuagaaaucuauaga

SEQ ID NO: 844171 - RNA, 22 nt, Human
uucacagagagaacucaaacca

SEQ ID NO: 844172 - RNA, 22 nt, Human
auccccagaaaauaggugccua

SEQ ID NO: 844173 - RNA, 22 nt, Human
uuccuuagcagaccugguaucc

SEQ ID NO: 844174 - RNA, 22 nt, Human
acguuuucuagagaauaugcag

SEQ ID NO: 844175 - RNA, 22 nt, Human
cagcuggcagaaccugcaucca

SEQ ID NO: 844176 - RNA, 22 nt, Human
uagcugccagaccauucuuacu

SEQ ID NO: 844177 - RNA, 22 nt, Human
ucacugaagacugggcucuaaa

SEQ ID NO: 844178 - RNA, 22 nt, Human
gagagcugauagaugagcuacu

SEQ ID NO: 844179 - RNA, 18 nt, Human
gcugccugcauuccucac

SEQ ID NO: 844180 - RNA, 22 nt, Human
ugagaaagugggugccuagcaa

SEQ ID NO: 844181 - RNA, 22 nt, Human
gaauagcuuccuuuuuuccaaa

SEQ ID NO: 844182 - RNA, 22 nt, Human
uugauuccuugaaauauccuug

SEQ ID NO: 844183 - RNA, 22 nt, Human
cucaguuucuucauauuguagg

SEQ ID NO: 844184 - RNA, 22 nt, Human
gcuguucacggaggaggauggg

SEQ ID NO: 844185 - RNA, 22 nt, Human
ccugccugcuuucugcuuugca

SEQ ID NO: 844186 - RNA, 22 nt, Human
uugcauuuccuguacuguuuga

SEQ ID NO: 844187 - RNA, 22 nt, Human
uaagagaacuggauagauagga

SEQ ID NO: 844188 - RNA, 22 nt, Human
ccucccagugccuccagagcag

SEQ ID NO: 844189 - RNA, 22 nt, Human
uuuccaagagcuuauuucugaa

SEQ ID NO: 844190 - RNA, 22 nt, Human
ggccugaggcaauagucagaca

SEQ ID NO: 844191 - RNA, 22 nt, Human
ccagcagacacacaggcguggg

SEQ ID NO: 844192 - RNA, 22 nt, Human
gcagggccagggcucaggcugu

SEQ ID NO: 844193 - RNA, 22 nt, Human
ucccugcucagcucaccuggca

SEQ ID NO: 844194 - RNA, 22 nt, Human
uccuguuuaucugugugacucg

SEQ ID NO: 844195 - RNA, 20 nt, Human
agguauaagaaaugugauuu

SEQ ID NO: 844196 - RNA, 22 nt, Human
gccaggcuggugcaaggauauu

SEQ ID NO: 844197 - RNA, 22 nt, Human
ccuggauccaugaaaaggcuac

SEQ ID NO: 844198 - RNA, 22 nt, Human
ugcccuuggguaacuugcugau

SEQ ID NO: 844199 - RNA, 22 nt, Human
cuuugcauacaauuuuuagaaa

SEQ ID NO: 844200 - RNA, 21 nt, Human
aggcagcuggaaggccuggcu

SEQ ID NO: 844201 - RNA, 22 nt, Human
aaugauggucauggcaacuuuu

SEQ ID NO: 844202 - RNA, 22 nt, Human
ucucagggugaggaaagaauuu

SEQ ID NO: 844203 - RNA, 18 nt, Human
gaaaugugauucuagggc

SEQ ID NO: 844204 - RNA, 22 nt, Human
aggcuggcgacaucuggcgggc

SEQ ID NO: 844205 - RNA, 22 nt, Human
ucagccugcuccaagugcugcc

SEQ ID NO: 844206 - RNA, 22 nt, Human
uucucuggaacugaaacaagau

SEQ ID NO: 844207 - RNA, 22 nt, Human
acccagcucuuugauggucuug

SEQ ID NO: 844208 - RNA, 22 nt, Human
agcagcugagaugguaagauuc

SEQ ID NO: 844209 - RNA, 22 nt, Human
gaggcugccccuuccucagcug

SEQ ID NO: 844210 - RNA, 22 nt, Human
uaggccagcccuuaguccuguc

SEQ ID NO: 844211 - RNA, 22 nt, Human
cugcgcagcaaucagagaggag

SEQ ID NO: 844212 - RNA, 22 nt, Human
uauuuccaaaagccuauuauga

SEQ ID NO: 844213 - RNA, 22 nt, Human
ggcagcucacugauuagcaauu

SEQ ID NO: 844214 - RNA, 22 nt, Human
cugggccuggcguuccaggcug

SEQ ID NO: 844215 - RNA, 22 nt, Human
uuugcauuccugccugcauuca

SEQ ID NO: 844216 - RNA, 22 nt, Human
gaguguggugaacaggagcacc

SEQ ID NO: 844217 - RNA, 22 nt, Human
ugaaaugaaugugauucgauag

SEQ ID NO: 844218 - RNA, 22 nt, Human
ucugaacuccagcccugcucuc

SEQ ID NO: 844219 - RNA, 22 nt, Human
augaacaaguauuugcaugagc

SEQ ID NO: 844220 - RNA, 22 nt, Human
gucccaggcagagucaggaggg

SEQ ID NO: 844221 - RNA, 22 nt, Human
gucuuucuuaauucaagugcuu

SEQ ID NO: 844222 - RNA, 20 nt, Human
cugcccagccacugagggau

SEQ ID NO: 844223 - RNA, 22 nt, Human
uaagaacaguguuucaucucua

SEQ ID NO: 844224 - RNA, 22 nt, Human
uggcugccuagucccucagccu

SEQ ID NO: 844225 - RNA, 22 nt, Human
aucaguuuggaacauucaggcc

SEQ ID NO: 844226 - RNA, 18 nt, Human
agggaucaucacugcagc

SEQ ID NO: 844227 - RNA, 22 nt, Human
agggccagggaagcuguauuuu

SEQ ID NO: 844228 - RNA, 22 nt, Human
guugggaaggcaagaaguagaa

SEQ ID NO: 844229 - RNA, 22 nt, Human
ucccuggguccugcuugcucuc

SEQ ID NO: 844230 - RNA, 22 nt, Human
ugcagcucauugcuggggucug

SEQ ID NO: 844231 - RNA, 22 nt, Human
ugaugauguuuaucuugguauu

SEQ ID NO: 844232 - RNA, 22 nt, Human
gagaacucagacgcaggucaug

SEQ ID NO: 844233 - RNA, 22 nt, Human
acagaguaggugcugucgacug

SEQ ID NO: 844234 - RNA, 22 nt, Human
guucuucaucuuaaccaucugu

SEQ ID NO: 844235 - RNA, 22 nt, Human
ggguggggcccaggaaaucuau

SEQ ID NO: 844236 - RNA, 20 nt, Human
cccuccagcaaccaggacuu

SEQ ID NO: 844237 - RNA, 19 nt, Human
ccugggaggcggagguugc

SEQ ID NO: 844238 - RNA, 22 nt, Human
agcugccauccuguucagcacc

SEQ ID NO: 844239 - RNA, 22 nt, Human
ggugcugguucaggguggcugu

SEQ ID NO: 844240 - RNA, 22 nt, Human
uuucacaagacagcuacuguug

SEQ ID NO: 844241 - RNA, 22 nt, Human
cuguacauauacauuuuuuucc

SEQ ID NO: 844242 - RNA, 22 nt, Human
cucccaggcacagggaggagcc

SEQ ID NO: 844243 - RNA, 22 nt, Human
cauaauuuuccaugguuugcua

SEQ ID NO: 844244 - RNA, 22 nt, Human
agcaguggcugaagauguuccu

SEQ ID NO: 844245 - RNA, 22 nt, Human
ugagcccaggaguuggaggcug

SEQ ID NO: 844246 - RNA, 22 nt, Human
aucaaaaugcuccagugauggu

SEQ ID NO: 844247 - RNA, 22 nt, Human
guccucuggaagaugaguucuu

SEQ ID NO: 844248 - RNA, 22 nt, Human
aaagacugguguguuacauaua

SEQ ID NO: 844249 - RNA, 22 nt, Human
acauuucuaguuguucaucucc

SEQ ID NO: 844250 - RNA, 22 nt, Human
caggggcuuuuccucuauaagg

SEQ ID NO: 844251 - RNA, 22 nt, Human
ccagcuucucucugaugcagcu

SEQ ID NO: 844252 - RNA, 22 nt, Human
cuuaaagaaauugaggagagga

SEQ ID NO: 844253 - RNA, 15 nt, Human
cccaggaguucgaga

SEQ ID NO: 844254 - RNA, 22 nt, Human
agggcugcuauguugauucaga

SEQ ID NO: 844255 - RNA, 22 nt, Human
gucuucaacaauaacuaccacu

SEQ ID NO: 844256 - RNA, 22 nt, Human
cuggcaggaaguuagaugguaa

SEQ ID NO: 844257 - RNA, 21 nt, Human
ucauucacaggguauuguaua

SEQ ID NO: 844258 - RNA, 22 nt, Human
gggcagcugccagaggccaugg

SEQ ID NO: 844259 - RNA, 22 nt, Human
uuacuuugaugaucaaugagcg

SEQ ID NO: 844260 - RNA, 20 nt, Human
agcuggagaagggcccuucc

SEQ ID NO: 844261 - RNA, 22 nt, Human
aggugcagaaaaaaguccuuua

SEQ ID NO: 844262 - RNA, 22 nt, Human
agggccagaaucccucagucua

SEQ ID NO: 844263 - RNA, 22 nt, Human
ugggcucauggcccagcacugg

SEQ ID NO: 844264 - RNA, 22 nt, Human
gacagccaugcacuucugcugu

SEQ ID NO: 844265 - RNA, 22 nt, Human
agcagaacauuuucagggcugu

SEQ ID NO: 844266 - RNA, 22 nt, Human
uucccaauauucugcuuuuaug

SEQ ID NO: 844267 - RNA, 22 nt, Human
acuguguccucauguggcagaa

SEQ ID NO: 844268 - RNA, 22 nt, Human
aggcccuggguuagggcccacu

SEQ ID NO: 844269 - RNA, 22 nt, Human
uggcugggcccccaccugccuc

SEQ ID NO: 844270 - RNA, 22 nt, Human
cacugggcaauucugagccuaa

SEQ ID NO: 844271 - RNA, 22 nt, Human
auguaaaucaagcagugcuggu

SEQ ID NO: 844272 - RNA, 22 nt, Human
guggagcccugccuugcucaug

SEQ ID NO: 844273 - RNA, 22 nt, Human
agucucuuccuucaaggcuggu

SEQ ID NO: 844274 - RNA, 22 nt, Human
cuggccuucagacucggacuga

SEQ ID NO: 844275 - RNA, 22 nt, Human
ggcccugggaugcucagcagug

SEQ ID NO: 844276 - RNA, 22 nt, Human
ccuucuucuguguggcccaaga

SEQ ID NO: 844277 - RNA, 22 nt, Human
ggauaagaaaauuguaauaacu

SEQ ID NO: 844278 - RNA, 22 nt, Human
ccagccuucugagcugccugga

SEQ ID NO: 844279 - RNA, 22 nt, Human
cuuacauuaaguaagagauuga

SEQ ID NO: 844280 - RNA, 22 nt, Human
ucauucagguugggcaaguguc

SEQ ID NO: 844281 - RNA, 22 nt, Human
auaguggugagcugcauuuaug

SEQ ID NO: 844282 - RNA, 20 nt, Human
aaacauucauguacaaguga

SEQ ID NO: 844283 - RNA, 22 nt, Human
uuuaaagagaaugugaaggagu

SEQ ID NO: 844284 - RNA, 18 nt, Human
uguuccaaggaaggaauc

SEQ ID NO: 844285 - RNA, 22 nt, Human
ucauugcaagcucauuuaucug

SEQ ID NO: 844286 - RNA, 22 nt, Human
ggcugccugugcccaggcacac

SEQ ID NO: 844287 - RNA, 22 nt, Human
auugacaauguauuuguaucug

SEQ ID NO: 844288 - RNA, 22 nt, Human
uggcagagagagugcagucgac

SEQ ID NO: 844289 - RNA, 22 nt, Human
uggcucaguagcagugugguca

SEQ ID NO: 844290 - RNA, 22 nt, Human
uggguaaacugggucuggagag

SEQ ID NO: 844291 - RNA, 22 nt, Human
cuggcucagugccuucagaagu

SEQ ID NO: 844292 - RNA, 22 nt, Human
ucuugggauugcccugcaguuc

SEQ ID NO: 844293 - RNA, 22 nt, Human
ucagaauucuacaauagaucag

SEQ ID NO: 844294 - RNA, 22 nt, Human
uucagcaaauggacuguucagg

SEQ ID NO: 844295 - RNA, 22 nt, Human
uagacauuucugguuauugaca

SEQ ID NO: 844296 - RNA, 22 nt, Human
auugaaaggcaaaguaggaagc

SEQ ID NO: 844297 - RNA, 22 nt, Human
gcuggucacucugggagcugcu

SEQ ID NO: 844298 - RNA, 22 nt, Human
ugggugggagcacccugucugg

SEQ ID NO: 844299 - RNA, 22 nt, Human
ggcaggcaaugaggaugggaag

SEQ ID NO: 844300 - RNA, 22 nt, Human
uuccuuaggcuguuugcagugc

SEQ ID NO: 844301 - RNA, 22 nt, Human
ccugggaagagcugacaggagg

SEQ ID NO: 844302 - RNA, 22 nt, Human
uccagggaccucccugagagcu

SEQ ID NO: 844303 - RNA, 22 nt, Human
ucugguaaccuuuaucccuccu

SEQ ID NO: 844304 - RNA, 22 nt, Human
gccucugcaucaucacuccagc

SEQ ID NO: 844305 - RNA, 22 nt, Human
aguacuuugcacuuugcucaga

SEQ ID NO: 844306 - RNA, 22 nt, Human
gcucccugcagcugagaguucc

SEQ ID NO: 844307 - RNA, 22 nt, Human
ucugcuguauuagguugaacug

SEQ ID NO: 844308 - RNA, 22 nt, Human
ucuuuaauaucugccccagagc

SEQ ID NO: 844309 - RNA, 22 nt, Human
agcucccauuaucuucugaaac

SEQ ID NO: 844310 - RNA, 22 nt, Human
ggcuccuguccuccuggagcuc

SEQ ID NO: 844311 - RNA, 22 nt, Human
aaagaugucauacacauuaaga

SEQ ID NO: 844312 - RNA, 22 nt, Human
gagaccaggaaguacagcagcc

SEQ ID NO: 844313 - RNA, 22 nt, Human
ucacagugagccaugucagaga

SEQ ID NO: 844314 - RNA, 22 nt, Human
agggccuggaacugugggcagg

SEQ ID NO: 844315 - RNA, 22 nt, Human
uacaaagugugcccaugcugag

SEQ ID NO: 844316 - RNA, 22 nt, Human
aaaaucuaaguagcgaguaagg

SEQ ID NO: 844317 - RNA, 22 nt, Human
aacagaaugcaggggaugcugc

SEQ ID NO: 844318 - RNA, 21 nt, Human
gcaggguccuuuccauuccua

SEQ ID NO: 844319 - RNA, 22 nt, Human
ugugaaaagcaggcuacuuucu

SEQ ID NO: 844320 - RNA, 22 nt, Human
aauuaaaugacaggggaagaug

SEQ ID NO: 844321 - RNA, 20 nt, Human
agugcaagaaagcacagcug

SEQ ID NO: 844322 - RNA, 22 nt, Human
agggcagagaucugagugggca

SEQ ID NO: 844323 - RNA, 22 nt, Human
agcaagcuaccuagauagucua

SEQ ID NO: 844324 - RNA, 22 nt, Human
agagugcagauaagagaauguu

SEQ ID NO: 844325 - RNA, 22 nt, Human
augucuuuggcuuugacauggc

SEQ ID NO: 844326 - RNA, 21 nt, Human
auuucagagcacacaaguaaa

SEQ ID NO: 844327 - RNA, 22 nt, Human
aaauugugcucacacugauauu

SEQ ID NO: 844328 - RNA, 22 nt, Human
ugccugccaugcagaaagcuga

SEQ ID NO: 844329 - RNA, 19 nt, Human
aggauuuauuaugugcuca

SEQ ID NO: 844330 - RNA, 22 nt, Human
aggcaacuguuugauaauguug

SEQ ID NO: 844331 - RNA, 22 nt, Human
ugaaagcacaaguucuaacagg

SEQ ID NO: 844332 - RNA, 22 nt, Human
ucaugccacuuacaaaauaaug

SEQ ID NO: 844333 - RNA, 23 nt, Human
acuuaaaugguucuuuaucucag

SEQ ID NO: 844334 - RNA, 22 nt, Human
auggcuuucagauuucuauguu

SEQ ID NO: 844335 - RNA, 22 nt, Human
agcagggcaaagucaggcuaac

SEQ ID NO: 844336 - RNA, 22 nt, Human
gacccugccaugagugacaggg

SEQ ID NO: 844337 - RNA, 22 nt, Human
ugcuuccuugagcucuccaauc

SEQ ID NO: 844338 - RNA, 22 nt, Human
uagacacauccguggaagcuuc

SEQ ID NO: 844339 - RNA, 22 nt, Human
uuucaucuucccagagaccuug

SEQ ID NO: 844340 - RNA, 22 nt, Human
caggccugugacaccgugucug

SEQ ID NO: 844341 - RNA, 22 nt, Human
gaugauuuuaugucuugucauu

SEQ ID NO: 844342 - RNA, 20 nt, Human
cccagccccuaccuguugcc

SEQ ID NO: 844343 - RNA, 22 nt, Human
aguguccccuacagaggcauuc

SEQ ID NO: 844344 - RNA, 22 nt, Human
cagaagaggacuggguagcuca

SEQ ID NO: 844345 - RNA, 22 nt, Human
augcuguguuugagaaccuagg

SEQ ID NO: 844346 - RNA, 22 nt, Human
ccugggagagccaucuguggcc

SEQ ID NO: 844347 - RNA, 22 nt, Human
caaguccaggucaauuuaaagc

SEQ ID NO: 844348 - RNA, 22 nt, Human
aaucucuugggaggaaugaauu

SEQ ID NO: 844349 - RNA, 22 nt, Human
ugagcccagucugucugacaug

SEQ ID NO: 844350 - RNA, 22 nt, Human
ggcaaaaaguucccaucagugu

SEQ ID NO: 844351 - RNA, 22 nt, Human
uugaacugguaguuggaaaucu

SEQ ID NO: 844352 - RNA, 22 nt, Human
gcccaggaugguguguaguggu

SEQ ID NO: 844353 - RNA, 22 nt, Human
caggacagcucaacaccuccuc

SEQ ID NO: 844354 - RNA, 22 nt, Human
uugaagauggaucgccacucuc

SEQ ID NO: 844355 - RNA, 22 nt, Human
uauucaaaguaccuucauugcc

SEQ ID NO: 844356 - RNA, 22 nt, Human
ucuggagaacuugcaagaggau

SEQ ID NO: 844357 - RNA, 22 nt, Human
auggaucacagugccgugggug

SEQ ID NO: 844358 - RNA, 22 nt, Human
gcccugcugucuucagaguaua

SEQ ID NO: 844359 - RNA, 22 nt, Human
ccugaggcuuaaucugucccaa

SEQ ID NO: 844360 - RNA, 22 nt, Human
gacagcauggugucuguucagg

SEQ ID NO: 844361 - RNA, 22 nt, Human
ccagccuccauguagauagcug

SEQ ID NO: 844362 - RNA, 22 nt, Human
uuucaguucaguuuauuauauc

SEQ ID NO: 844363 - RNA, 21 nt, Human
ugauuuccagaaaauuggccc

SEQ ID NO: 844364 - RNA, 22 nt, Human
uugcauugugauuacagaggug

SEQ ID NO: 844365 - RNA, 16 nt, Human
uguaugaacgucucca

SEQ ID NO: 844366 - RNA, 22 nt, Human
ucauugcagcuucagguguuca

SEQ ID NO: 844367 - RNA, 22 nt, Human
auagugguuggauaugucagag

SEQ ID NO: 844368 - RNA, 22 nt, Human
uacaaaguagaaauucaguaaa

SEQ ID NO: 844369 - RNA, 22 nt, Human
gaaggagagggucaaggauaau

SEQ ID NO: 844370 - RNA, 22 nt, Human
uagauuuaagacccugaauuug

SEQ ID NO: 844371 - RNA, 22 nt, Human
uaaguucaguuggucgaaguag

SEQ ID NO: 844372 - RNA, 22 nt, Human
gagccuccuccuggugugccga

SEQ ID NO: 844373 - RNA, 22 nt, Human
ggcagcagaacuggcccuguau

SEQ ID NO: 844374 - RNA, 22 nt, Human
uggcuuuacaucaaauugagua

SEQ ID NO: 844375 - RNA, 22 nt, Human
uuuacauuucccucugucaguu

SEQ ID NO: 844376 - RNA, 22 nt, Human
augugacaauauuuggucuuau

SEQ ID NO: 844377 - RNA, 22 nt, Human
ucaguuuuaagguuugagaauu

SEQ ID NO: 844378 - RNA, 22 nt, Human
agccaggaaccagcuacagucu

SEQ ID NO: 844379 - RNA, 22 nt, Human
gcagggugccgacuucagggau

SEQ ID NO: 844380 - RNA, 22 nt, Human
agcucuccacacauaggacuag

SEQ ID NO: 844381 - RNA, 22 nt, Human
caggccucuauggucagcugag

SEQ ID NO: 844382 - RNA, 22 nt, Human
uuggaauucaaguuguagcuua

SEQ ID NO: 844383 - RNA, 22 nt, Human
agcugagcuaguaguuccagug

SEQ ID NO: 844384 - RNA, 19 nt, Human
uuucagacucaucuccagc

SEQ ID NO: 844385 - RNA, 19 nt, Human
uuuggcacucugaaguguu

SEQ ID NO: 844386 - RNA, 22 nt, Human
uguacaauguguuuguuggcuu

SEQ ID NO: 844387 - RNA, 22 nt, Human
ugagcccuaagggucaagcagg

SEQ ID NO: 844388 - RNA, 22 nt, Human
cagggacaugacuggucucugu

SEQ ID NO: 844389 - RNA, 22 nt, Human
uuuugaaagccagguuuguaug

SEQ ID NO: 844390 - RNA, 20 nt, Human
ggcugugcccuuccguggcc

SEQ ID NO: 844391 - RNA, 22 nt, Human
uacagcauauacagaaugaaca

SEQ ID NO: 844392 - RNA, 22 nt, Human
uaucuguuugcucacagguguu

SEQ ID NO: 844393 - RNA, 22 nt, Human
aucaguuugauaauaaggcuug

SEQ ID NO: 844394 - RNA, 22 nt, Human
auuuaagauugcguauucaugu

SEQ ID NO: 844395 - RNA, 22 nt, Human
aaggcacugcuuugcugcgccc

SEQ ID NO: 844396 - RNA, 22 nt, Human
guucacaucacuucacugaacc

SEQ ID NO: 844397 - RNA, 22 nt, Human
ggcucagaaacuaaaggcgcug

SEQ ID NO: 844398 - RNA, 22 nt, Human
guggagacgggacagaagcuaa

SEQ ID NO: 844399 - RNA, 21 nt, Human
gggaaauuaggauugcucauc

SEQ ID NO: 844400 - RNA, 22 nt, Human
auggauuuggaugagauuacuu

SEQ ID NO: 844401 - RNA, 22 nt, Human
gugcugugugauccaugcuggc

SEQ ID NO: 844402 - RNA, 22 nt, Human
gucccuaguggaaagacaugau

SEQ ID NO: 844403 - RNA, 22 nt, Human
aauguguagggugccuguuuuu

SEQ ID NO: 844404 - RNA, 22 nt, Human
ccuggcuggcaagaucgugaag

SEQ ID NO: 844405 - RNA, 22 nt, Human
ugcagcuguaacagaggccuca

SEQ ID NO: 844406 - RNA, 22 nt, Human
ggugauuuucgaguuucauguu

SEQ ID NO: 844407 - RNA, 22 nt, Human
aagggcagcuauuaucgucauc

SEQ ID NO: 844408 - RNA, 22 nt, Human
agcaucuggcagaaagucagaa

SEQ ID NO: 844409 - RNA, 22 nt, Human
gaaaucugaaucuucuguuggu

SEQ ID NO: 844410 - RNA, 22 nt, Human
gggcugugcugaguaggaggug

SEQ ID NO: 844411 - RNA, 21 nt, Human
acccuggguucuccauacccu

SEQ ID NO: 844412 - RNA, 23 nt, Human
aaauaugucugagggcaaagaau

SEQ ID NO: 844413 - RNA, 22 nt, Human
ucagccacuacccaccuuaaca

SEQ ID NO: 844414 - RNA, 22 nt, Human
uacuuucuagcucuccccaguu

SEQ ID NO: 844415 - RNA, 22 nt, Human
ccuguucaaugcccuggcuuca

SEQ ID NO: 844416 - RNA, 22 nt, Human
ucccugggccacagcugugagc

SEQ ID NO: 844417 - RNA, 22 nt, Human
ugggccacaagccaugggacca

SEQ ID NO: 844418 - RNA, 20 nt, Human
acuugcugggcuuuguuacc

SEQ ID NO: 844419 - RNA, 22 nt, Human
ugagacaguuuuucuauuucca

SEQ ID NO: 844420 - RNA, 22 nt, Human
aaugaacacagcccucuacuuu

SEQ ID NO: 844421 - RNA, 17 nt, Human
ucaggcugugccuggua

SEQ ID NO: 844422 - RNA, 22 nt, Human
agcugguucauucauucauggu

SEQ ID NO: 844423 - RNA, 19 nt, Human
agguggucuaggcuggaga

SEQ ID NO: 844424 - RNA, 22 nt, Human
aaggagaaaugguagaugugca

SEQ ID NO: 844425 - RNA, 22 nt, Human
uagcacaucuucuuggccugca

SEQ ID NO: 844426 - RNA, 22 nt, Human
uggcagagcccagaacugagca

SEQ ID NO: 844427 - RNA, 22 nt, Human
gaagagcuguagccugcucuuu

SEQ ID NO: 844428 - RNA, 22 nt, Human
cugcuguguugccagugucacc

SEQ ID NO: 844429 - RNA, 22 nt, Human
uuggaaggagucaaccagcuga

SEQ ID NO: 844430 - RNA, 22 nt, Human
cagaggccucacuuccagccag

SEQ ID NO: 844431 - RNA, 22 nt, Human
aacuagaacgucuaguugcugg

SEQ ID NO: 844432 - RNA, 17 nt, Human
ugaaggaaggaugaugu

SEQ ID NO: 844433 - RNA, 22 nt, Human
caaauauuccagguacaucccu

SEQ ID NO: 844434 - RNA, 23 nt, Human
uggccucuccccaccuggcagaa

SEQ ID NO: 844435 - RNA, 22 nt, Human
uggcugcuuguuuuagugaggc

SEQ ID NO: 844436 - RNA, 22 nt, Human
caguagcaggcacucagcacgu

SEQ ID NO: 844437 - RNA, 22 nt, Human
cuccccagguucaggagguggg

SEQ ID NO: 844438 - RNA, 22 nt, Human
gaggugggaugugugugcuacu

SEQ ID NO: 844439 - RNA, 19 nt, Human
ggcagcuggacgcuguuca

SEQ ID NO: 844440 - RNA, 22 nt, Human
cucugagcccgcugcagcccca

SEQ ID NO: 844441 - RNA, 22 nt, Human
gcucccugccuacacggaccuu

SEQ ID NO: 844442 - RNA, 22 nt, Human
cuuaaauucuuaaugcccucau

SEQ ID NO: 844443 - RNA, 22 nt, Human
cugcagggcccgccugagcccu

SEQ ID NO: 844444 - RNA, 22 nt, Human
agggccugcucuaucacucuca

SEQ ID NO: 844445 - RNA, 22 nt, Human
uuaacagauguuuauggagcau

SEQ ID NO: 844446 - RNA, 22 nt, Human
ugcauuaugcuugugcuguaua

SEQ ID NO: 844447 - RNA, 22 nt, Human
ucugcagggaugugagggguga

SEQ ID NO: 844448 - RNA, 19 nt, Human
uuucccagcccuugcugug

SEQ ID NO: 844449 - RNA, 22 nt, Human
ccucagccuuggccccaggcag

SEQ ID NO: 844450 - RNA, 22 nt, Human
aucuaaaaggagcucuuuaucu

SEQ ID NO: 844451 - RNA, 22 nt, Human
ugggccugaguuugggaacugg

SEQ ID NO: 844452 - RNA, 22 nt, Human
guaaacaucagccacucuauuu

SEQ ID NO: 844453 - RNA, 22 nt, Human
caauuucacuaaugaugugggg

SEQ ID NO: 844454 - RNA, 22 nt, Human
agggaaaggcugaugcuguggg

SEQ ID NO: 844455 - RNA, 22 nt, Human
gaggccacgguuuuccuugggg

SEQ ID NO: 844456 - RNA, 22 nt, Human
uguauaaauuuaaauuccugcu

SEQ ID NO: 844457 - RNA, 22 nt, Human
uuuagaguugaguauucauugg

SEQ ID NO: 844458 - RNA, 22 nt, Human
augcuuuuaugucacaugguca

SEQ ID NO: 844459 - RNA, 21 nt, Human
agggccugugcucuccagguc

SEQ ID NO: 844460 - RNA, 22 nt, Human
ucuuagcacagcuauauaaguu

SEQ ID NO: 844461 - RNA, 21 nt, Human
augugaaauaucaucagagca

SEQ ID NO: 844462 - RNA, 22 nt, Human
aaauaaguaguuuaguguugug

SEQ ID NO: 844463 - RNA, 22 nt, Human
cuguggcuuucucugccuccuu

SEQ ID NO: 844464 - RNA, 22 nt, Human
ggcccacuugaaauggagcuca

SEQ ID NO: 844465 - RNA, 22 nt, Human
ucuggcaggucaaucauucuuu

SEQ ID NO: 844466 - RNA, 22 nt, Human
cuggccagcauuuuugcuuuag

SEQ ID NO: 844467 - RNA, 23 nt, Human
aucuguucaucugacacagauuc

SEQ ID NO: 844468 - RNA, 22 nt, Human
gaaaugcagaaccugagaccau

SEQ ID NO: 844469 - RNA, 22 nt, Human
gcuggggaggcagcagagaaca

SEQ ID NO: 844470 - RNA, 22 nt, Human
acaugcuuugcacuuacaucau

SEQ ID NO: 844471 - RNA, 22 nt, Human
aguccaggaguugggugacauu

SEQ ID NO: 844472 - RNA, 22 nt, Human
gucucagauaacauguauucua

SEQ ID NO: 844473 - RNA, 22 nt, Human
cuacauuuugugauuaugaaau

SEQ ID NO: 844474 - RNA, 22 nt, Human
gcaggcucuucuuucugcccag

SEQ ID NO: 844475 - RNA, 22 nt, Human
uuagucuucuuccuuauauguu

SEQ ID NO: 844476 - RNA, 22 nt, Human
ucuucagaggaagucagucuuu

SEQ ID NO: 844477 - RNA, 22 nt, Human
gaguccuuuucucuguccacug

SEQ ID NO: 844478 - RNA, 22 nt, Human
ucucacuuuguugcccagacuu

SEQ ID NO: 844479 - RNA, 22 nt, Human
ccucuucuagguuucagccugc

SEQ ID NO: 844480 - RNA, 22 nt, Human
ccuggcucucugcagauccugg

SEQ ID NO: 844481 - RNA, 21 nt, Human
uucaaagagugggcauuguca

SEQ ID NO: 844482 - RNA, 22 nt, Human
cuuagcaugugguguccuugua

SEQ ID NO: 844483 - RNA, 22 nt, Human
cugagccagggccacacaugga

SEQ ID NO: 844484 - RNA, 22 nt, Human
aaaauucugucauuaaauugug

SEQ ID NO: 844485 - RNA, 22 nt, Human
aggacuccauguguccuggaga

SEQ ID NO: 844486 - RNA, 22 nt, Human
ugagaaccaugaaaagcuguca

SEQ ID NO: 844487 - RNA, 22 nt, Human
ccuggaagauucaccacuacca

SEQ ID NO: 844488 - RNA, 19 nt, Human
ccaggccuccugggagguc

SEQ ID NO: 844489 - RNA, 22 nt, Human
ggcucaggcuggagugcagugg

SEQ ID NO: 844490 - RNA, 22 nt, Human
uuuaucuguuguacauuuaugc

SEQ ID NO: 844491 - RNA, 22 nt, Human
ugggcagcagcaaagccagacu

SEQ ID NO: 844492 - RNA, 22 nt, Human
cuccuuccugguuagcaccuua

SEQ ID NO: 844493 - RNA, 22 nt, Human
aagcaaaggcaggagcuuguga

SEQ ID NO: 844494 - RNA, 20 nt, Human
ucauccaggacaggaguggc

SEQ ID NO: 844495 - RNA, 22 nt, Human
gaggagcacaugaggcugaggg

SEQ ID NO: 844496 - RNA, 22 nt, Human
cuuugcaaacugucacacuuuc

SEQ ID NO: 844497 - RNA, 22 nt, Human
aggacugggugcagagggcauc

SEQ ID NO: 844498 - RNA, 22 nt, Human
augccaaagcccaaguucauca

SEQ ID NO: 844499 - RNA, 22 nt, Human
aggcccaguagugcugccuuua

SEQ ID NO: 844500 - RNA, 22 nt, Human
uuuccauauuuaaucaaaauaa

SEQ ID NO: 844501 - RNA, 22 nt, Human
acauugcugcauucuccuuccc

SEQ ID NO: 844502 - RNA, 22 nt, Human
ugucuucaucucagacacaguu

SEQ ID NO: 844503 - RNA, 22 nt, Human
agauuuccugcacugccuuuga

SEQ ID NO: 844504 - RNA, 22 nt, Human
ugagggaggcccuuugagcaga

SEQ ID NO: 844505 - RNA, 22 nt, Human
ccuuucucuuugcugaucaugu

SEQ ID NO: 844506 - RNA, 22 nt, Human
aggcuccuugcucacaggcuca

SEQ ID NO: 844507 - RNA, 22 nt, Human
cagggacauugguggccagguu

SEQ ID NO: 844508 - RNA, 22 nt, Human
gcagggcuguucaggagggugg

SEQ ID NO: 844509 - RNA, 22 nt, Human
aaggcagcuucaccacagcauu

SEQ ID NO: 844510 - RNA, 22 nt, Human
ugcauuccuccaccuccugcac

SEQ ID NO: 844511 - RNA, 22 nt, Human
cccaggaggcgcagguugcggu

SEQ ID NO: 844512 - RNA, 22 nt, Human
ccccggaggcggagguugcagu

SEQ ID NO: 844513 - RNA, 22 nt, Human
ucccagagccaagcuauggaug

SEQ ID NO: 844514 - RNA, 22 nt, Human
aauuaacagagggcuuauuacu

SEQ ID NO: 844515 - RNA, 22 nt, Human
ggcagcucaccucugguccagg

SEQ ID NO: 844516 - RNA, 22 nt, Human
agcauggggcaaugcaugugcu

SEQ ID NO: 844517 - RNA, 22 nt, Human
ugccacccagccaggaguggga

SEQ ID NO: 844518 - RNA, 22 nt, Human
caagagcuagacuuugucagga

SEQ ID NO: 844519 - RNA, 22 nt, Human
ucucaggcuaccuugcacaagg

SEQ ID NO: 844520 - RNA, 22 nt, Human
gaguccuuuguuccuugccaca

SEQ ID NO: 844521 - RNA, 22 nt, Human
acauuucugcaucucagagcua

SEQ ID NO: 844522 - RNA, 20 nt, Human
uacagacaugacaauaaugg

SEQ ID NO: 844523 - RNA, 20 nt, Human
ucacaggggaccaggagcag

SEQ ID NO: 844524 - RNA, 22 nt, Human
uccugccuagcaggugaccuau

SEQ ID NO: 844525 - RNA, 22 nt, Human
gggcauggaggucugucugcag

SEQ ID NO: 844526 - RNA, 22 nt, Human
gcugagugauugauauuuuagu

SEQ ID NO: 844527 - RNA, 22 nt, Human
acacugcucacuucuucccuug

SEQ ID NO: 844528 - RNA, 19 nt, Human
gcugucugaugcugagguc

SEQ ID NO: 844529 - RNA, 22 nt, Human
cucaggauucucgacacucaca

SEQ ID NO: 844530 - RNA, 22 nt, Human
uggcccugcuaugauccugcaa

SEQ ID NO: 844531 - RNA, 22 nt, Human
aggcagcucuguggccucccag

SEQ ID NO: 844532 - RNA, 21 nt, Human
gcccucaggggaggauggccu

SEQ ID NO: 844533 - RNA, 22 nt, Human
ucacaaauagcuauauuaagga

SEQ ID NO: 844534 - RNA, 22 nt, Human
augaaggauggcuggcugcccu

SEQ ID NO: 844535 - RNA, 22 nt, Human
aaggucauggcaaauuacuuuu

SEQ ID NO: 844536 - RNA, 22 nt, Human
uuuauucuugagagugagaaga

SEQ ID NO: 844537 - RNA, 22 nt, Human
gccuggguuccaugaucuccag

SEQ ID NO: 844538 - RNA, 19 nt, Human
aaaaacuuaguccagaaag

SEQ ID NO: 844539 - RNA, 22 nt, Human
ucuguaguagguuguaguucuu

SEQ ID NO: 844540 - RNA, 17 nt, Human
gccucugcuugugucau

SEQ ID NO: 844541 - RNA, 22 nt, Human
cuggccacaugugugcugagca

SEQ ID NO: 844542 - RNA, 22 nt, Human
uuugacauggaauaacucauuu

SEQ ID NO: 844543 - RNA, 22 nt, Human
aggucauuccagccauuccccu

SEQ ID NO: 844544 - RNA, 19 nt, Human
ccauggagagagaugcauu

SEQ ID NO: 844545 - RNA, 22 nt, Human
gaaaaaugagcugaugucaggg

SEQ ID NO: 844546 - RNA, 22 nt, Human
aagagguaaccauagcaaccac

SEQ ID NO: 844547 - RNA, 22 nt, Human
ugggcuggcguggagaguuuag

SEQ ID NO: 844548 - RNA, 22 nt, Human
ccagcucuggcuucuugcuggg

SEQ ID NO: 844549 - RNA, 22 nt, Human
uacauggugguggcacuugacu

SEQ ID NO: 844550 - RNA, 22 nt, Human
ugcaccccauuuuacauuuaca

SEQ ID NO: 844551 - RNA, 22 nt, Human
cagcagggggcagcgcagauca

SEQ ID NO: 844552 - RNA, 22 nt, Human
uccaggagugauaaggccacug

SEQ ID NO: 844553 - RNA, 22 nt, Human
cagcagagacgguaagcagaac

SEQ ID NO: 844554 - RNA, 22 nt, Human
ccaggaggcagagguuacagug

SEQ ID NO: 844555 - RNA, 22 nt, Human
ugcucagacaagcugaacagua

SEQ ID NO: 844556 - RNA, 22 nt, Human
ccuggaaggcaggcauggauug

SEQ ID NO: 844557 - RNA, 22 nt, Human
gcucagccgaacuucagagcag

SEQ ID NO: 844558 - RNA, 22 nt, Human
uccugucugcucacagagcugg

SEQ ID NO: 844559 - RNA, 22 nt, Human
cuggguggcuguccagccagcc

SEQ ID NO: 844560 - RNA, 22 nt, Human
gggcacugaaugccaagcuagg

SEQ ID NO: 844561 - RNA, 22 nt, Human
agugacucacuagcucucagug

SEQ ID NO: 844562 - RNA, 22 nt, Human
uuguauuagcuguaaauuuucu

SEQ ID NO: 844563 - RNA, 22 nt, Human
aaauugugagcuauagaucuag

SEQ ID NO: 844564 - RNA, 22 nt, Human
ucccaaggcacagggcagggac

SEQ ID NO: 844565 - RNA, 22 nt, Human
ugggggacugcacuggcgucag

SEQ ID NO: 844566 - RNA, 22 nt, Human
gccuggcaggccugggccagca

SEQ ID NO: 844567 - RNA, 22 nt, Human
uggccucuuaggacauccucua

SEQ ID NO: 844568 - RNA, 22 nt, Human
acauguaaaaggaacaugcaug

SEQ ID NO: 844569 - RNA, 22 nt, Human
ccucuccaguuuuaacgugacc

SEQ ID NO: 844570 - RNA, 21 nt, Human
aggucagcccagcucuggaag

SEQ ID NO: 844571 - RNA, 21 nt, Human
aaugcauuaacauaaagcuga

SEQ ID NO: 844572 - RNA, 19 nt, Human
ccuggcccugcugcgcggg

SEQ ID NO: 844573 - RNA, 22 nt, Human
gcugccugaagugucuacacug

SEQ ID NO: 844574 - RNA, 22 nt, Human
acagagaugcaaguguguauuu

SEQ ID NO: 844575 - RNA, 22 nt, Human
gggcuggcaggaccugggcuga

SEQ ID NO: 844576 - RNA, 22 nt, Human
ucaaaugcggucauggcuuuua

SEQ ID NO: 844577 - RNA, 22 nt, Human
ugacagaaagaauaugucaauc

SEQ ID NO: 844578 - RNA, 18 nt, Human
auggucucauacugggag

SEQ ID NO: 844579 - RNA, 22 nt, Human
acuggaucuaauugguuauagu

SEQ ID NO: 844580 - RNA, 22 nt, Human
guauuuauaggggaaugagagu

SEQ ID NO: 844581 - RNA, 22 nt, Human
auggccugggcccgcuucagau

SEQ ID NO: 844582 - RNA, 22 nt, Human
cagcugccuguauuguccucau

SEQ ID NO: 844583 - RNA, 22 nt, Human
acaauucucucauaucuuauua

SEQ ID NO: 844584 - RNA, 22 nt, Human
agcagaacugaugagacuugag

SEQ ID NO: 844585 - RNA, 22 nt, Human
acauucacgcucucaaagcuga

SEQ ID NO: 844586 - RNA, 22 nt, Human
ugugucagagguagagauggca

SEQ ID NO: 844587 - RNA, 22 nt, Human
cagcuucucagaaagcugaggu

SEQ ID NO: 844588 - RNA, 22 nt, Human
uggcccucagucuugcuccugc

SEQ ID NO: 844589 - RNA, 22 nt, Human
aaggcagcccuggcucagccug

SEQ ID NO: 844590 - RNA, 22 nt, Human
uucuucaacaaggacacuguua

SEQ ID NO: 844591 - RNA, 22 nt, Human
cauucacaaagcugauugaugg

SEQ ID NO: 844592 - RNA, 22 nt, Human
accaaggagccacauacaaccu

SEQ ID NO: 844593 - RNA, 22 nt, Human
aggguauguuuuuaucuacugu

SEQ ID NO: 844594 - RNA, 22 nt, Human
cugcugugcuuguggccacccg

SEQ ID NO: 844595 - RNA, 22 nt, Human
ucauaaaucauacuccauuugc

SEQ ID NO: 844596 - RNA, 20 nt, Human
cagaggcauuuucagacucu

SEQ ID NO: 844597 - RNA, 22 nt, Human
ccuucugcuggucaucccagug

SEQ ID NO: 844598 - RNA, 22 nt, Human
agccaggggauucaucagggac

SEQ ID NO: 844599 - RNA, 22 nt, Human
ugaaggaaugagggaguggguc

SEQ ID NO: 844600 - RNA, 22 nt, Human
caaaguuuaaaguagauuucag

SEQ ID NO: 844601 - RNA, 22 nt, Human
aaguaaauaucuguuuauagca

SEQ ID NO: 844602 - RNA, 22 nt, Human
cagagcuggagggaacccuggc

SEQ ID NO: 844603 - RNA, 22 nt, Human
aaguuuaagguggaaguggugg

SEQ ID NO: 844604 - RNA, 22 nt, Human
gcugcccagcaggccccagggg

SEQ ID NO: 844605 - RNA, 22 nt, Human
gaggaguggaguugcuggguug

SEQ ID NO: 844606 - RNA, 22 nt, Human
cagagcaggcccacugcccucc

SEQ ID NO: 844607 - RNA, 22 nt, Human
uaaagcacauaucuuacaauaa

SEQ ID NO: 844608 - RNA, 22 nt, Human
gcaggugggggucggugcaucu

SEQ ID NO: 844609 - RNA, 17 nt, Human
ugagaaguaggcaucau

SEQ ID NO: 844610 - RNA, 22 nt, Human
gcaggccagcugugcagauggg

SEQ ID NO: 844611 - RNA, 22 nt, Human
uagcacaucuggcgcuuauagg

SEQ ID NO: 844612 - RNA, 22 nt, Human
agcaugaaagcauaggacaguc

SEQ ID NO: 844613 - RNA, 22 nt, Human
aggaagcuggugugaggaugaa

SEQ ID NO: 844614 - RNA, 22 nt, Human
aggagaggcucuaacucugugu

SEQ ID NO: 844615 - RNA, 22 nt, Human
aggccagagaggggaccagccu

SEQ ID NO: 844616 - RNA, 22 nt, Human
cugucacacugauaucaggcuu

SEQ ID NO: 844617 - RNA, 22 nt, Human
agggucugacuccucuggcaag

SEQ ID NO: 844618 - RNA, 22 nt, Human
ucugaagauuaccagcuaaaug

SEQ ID NO: 844619 - RNA, 22 nt, Human
cuguaugaguugggaauagaau

SEQ ID NO: 844620 - RNA, 22 nt, Human
augcugugucuagcaggaacac

SEQ ID NO: 844621 - RNA, 22 nt, Human
aaagcuaugaggcaugcauuuc

SEQ ID NO: 844622 - RNA, 22 nt, Human
auucugauaucuuauucuagcu

SEQ ID NO: 844623 - RNA, 22 nt, Human
ccucugccaccucccacgaggc

SEQ ID NO: 844624 - RNA, 22 nt, Human
ugcuguggcaguuuauguauag

SEQ ID NO: 844625 - RNA, 22 nt, Human
aucuggcucacuuagucuagga

SEQ ID NO: 844626 - RNA, 22 nt, Human
aguucucaagacaauuaccugu

SEQ ID NO: 844627 - RNA, 22 nt, Human
uuagauauguuuuugcuaaugc

SEQ ID NO: 844628 - RNA, 22 nt, Human
ggcucuggaaaguguccuugau

SEQ ID NO: 844629 - RNA, 22 nt, Human
auuuccauagagcgucucacag

SEQ ID NO: 844630 - RNA, 19 nt, Human
agcuggggcgguguguguu

SEQ ID NO: 844631 - RNA, 22 nt, Human
aauucauccaugaacaauucca

SEQ ID NO: 844632 - RNA, 22 nt, Human
aguggccagugcugcucugggg

SEQ ID NO: 844633 - RNA, 22 nt, Human
caggguggcacucagcgcaucu

SEQ ID NO: 844634 - RNA, 22 nt, Human
cugccuggggaaugugaggauu

SEQ ID NO: 844635 - RNA, 22 nt, Human
gcagagcuucuguccuucagga

SEQ ID NO: 844636 - RNA, 22 nt, Human
acugggaggcaucuggagcuga

SEQ ID NO: 844637 - RNA, 22 nt, Human
ggaggccaugaggcucuaggug

SEQ ID NO: 844638 - RNA, 22 nt, Human
cccuggaggcggagcuugcagu

SEQ ID NO: 844639 - RNA, 22 nt, Human
gcccaggagaggccagggcuga

SEQ ID NO: 844640 - RNA, 21 nt, Human
aagaagcaauuuauuggaagg

SEQ ID NO: 844641 - RNA, 22 nt, Human
agaccacagucaggcuccuggu

SEQ ID NO: 844642 - RNA, 22 nt, Human
caggaaagaaaugagaacacca

SEQ ID NO: 844643 - RNA, 22 nt, Human
acaccauacucauguugguucc

SEQ ID NO: 844644 - RNA, 22 nt, Human
agccuggagcuugaguuaugag

SEQ ID NO: 844645 - RNA, 22 nt, Human
ggccagaggccacagcuguguc

SEQ ID NO: 844646 - RNA, 22 nt, Human
gcccucugcuggccucaccucg

SEQ ID NO: 844647 - RNA, 22 nt, Human
agaaggaguguacaggucaugc

SEQ ID NO: 844648 - RNA, 22 nt, Human
acuuugcaaugggcagaaccca

SEQ ID NO: 844649 - RNA, 22 nt, Human
cugcacagagcagggcagacac

SEQ ID NO: 844650 - RNA, 22 nt, Human
auacaguauuaccuguucagga

SEQ ID NO: 844651 - RNA, 22 nt, Human
agccagcuguucuggggcagca

SEQ ID NO: 844652 - RNA, 22 nt, Human
gugggcuucuguuagggaggcu

SEQ ID NO: 844653 - RNA, 22 nt, Human
aaaugcaggaaauuaugcuuuu

SEQ ID NO: 844654 - RNA, 22 nt, Human
uggccuguggcuuaaggucugu

SEQ ID NO: 844655 - RNA, 20 nt, Human
agagccuggaaaaagacauc

SEQ ID NO: 844656 - RNA, 22 nt, Human
ucauacaauucaaucucugauu

SEQ ID NO: 844657 - RNA, 22 nt, Human
cucaggaucgcuugcccuaggg

SEQ ID NO: 844658 - RNA, 22 nt, Human
ccugccuggcuuccagaagaga

SEQ ID NO: 844659 - RNA, 22 nt, Human
uggccugguuguugcugccguu

SEQ ID NO: 844660 - RNA, 22 nt, Human
gagauuucuuuugaugccuguc

SEQ ID NO: 844661 - RNA, 22 nt, Human
ugaaaugagauagauaaucagg

SEQ ID NO: 844662 - RNA, 22 nt, Human
agaggcagaaguguucaaaccc

SEQ ID NO: 844663 - RNA, 22 nt, Human
uuuauccaguguuggaauuuuu

SEQ ID NO: 844664 - RNA, 22 nt, Human
aguggcagagugcacucaggca

SEQ ID NO: 844665 - RNA, 22 nt, Human
acagcaagccagcuugucacug

SEQ ID NO: 844666 - RNA, 22 nt, Human
ccaggagcuggagggugcagug

SEQ ID NO: 844667 - RNA, 22 nt, Human
gagccugggacugggggucaug

SEQ ID NO: 844668 - RNA, 21 nt, Human
ucugucugguuuuagaguggc

SEQ ID NO: 844669 - RNA, 22 nt, Human
guggcagagguuccucagugug

SEQ ID NO: 844670 - RNA, 22 nt, Human
aggcacuggucuaccccuuagu

SEQ ID NO: 844671 - RNA, 22 nt, Human
caggggcucugggugaugugag

SEQ ID NO: 844672 - RNA, 22 nt, Human
ggcacugggcaccggcugaggg

SEQ ID NO: 844673 - RNA, 22 nt, Human
uagagcuggaauuugcagcaag

SEQ ID NO: 844674 - RNA, 22 nt, Human
agaagaaacugucggggauauu

SEQ ID NO: 844675 - RNA, 22 nt, Human
ggccaagauggaaggagagaug

SEQ ID NO: 844676 - RNA, 22 nt, Human
guccaugauucugugacacccu

SEQ ID NO: 844677 - RNA, 22 nt, Human
uuaaauuuuagaaacagacucu

SEQ ID NO: 844678 - RNA, 19 nt, Human
agcuccugggcucugggcc

SEQ ID NO: 844679 - RNA, 19 nt, Human
aacuggauaauggccacau

SEQ ID NO: 844680 - RNA, 22 nt, Human
ucuggccugggccugccggugc

SEQ ID NO: 844681 - RNA, 22 nt, Human
ccugucaguugcugucagggau

SEQ ID NO: 844682 - RNA, 22 nt, Human
ccagcugguuaaaauagagaaa

SEQ ID NO: 844683 - RNA, 22 nt, Human
augcuuuacaguuuuccaaaca

SEQ ID NO: 844684 - RNA, 22 nt, Human
cacauuuaaagguugaagcuga

SEQ ID NO: 844685 - RNA, 22 nt, Human
aggccagcuguuacuagagcca

SEQ ID NO: 844686 - RNA, 22 nt, Human
uggcucuguuuuaugaguacca

SEQ ID NO: 844687 - RNA, 22 nt, Human
uuuccauguuggugaaaugagg

SEQ ID NO: 844688 - RNA, 22 nt, Human
uugcagcuucgagucuaucugu

SEQ ID NO: 844689 - RNA, 22 nt, Human
gggccuggggacaccaccauga

SEQ ID NO: 844690 - RNA, 22 nt, Human
gcaaguuauuuccauuuaaagc

SEQ ID NO: 844691 - RNA, 22 nt, Human
uagcuuuacaaagugcugcacc

SEQ ID NO: 844692 - RNA, 21 nt, Human
cacaggugggucagugaggcc

SEQ ID NO: 844693 - RNA, 22 nt, Human
uuccuguaguugugcaauguac

SEQ ID NO: 844694 - RNA, 22 nt, Human
cugggaggcagucucucuagaa

SEQ ID NO: 844695 - RNA, 22 nt, Human
ugguuuauuucucugaaagguu

SEQ ID NO: 844696 - RNA, 22 nt, Human
aggguggagggagucccugagc

SEQ ID NO: 844697 - RNA, 22 nt, Human
guguaugaacgaaagaauggau

SEQ ID NO: 844698 - RNA, 22 nt, Human
ucucagagugguggucccucug

SEQ ID NO: 844699 - RNA, 22 nt, Human
agggcagcagcuccuccuagcu

SEQ ID NO: 844700 - RNA, 22 nt, Human
cagggcagagggaaacuccuuu

SEQ ID NO: 844701 - RNA, 22 nt, Human
cugggcaguuuuacaucauugc

SEQ ID NO: 844702 - RNA, 22 nt, Human
guaucuuuuacaccaggaaauu

SEQ ID NO: 844703 - RNA, 22 nt, Human
agcaguggcuggauggugugcu

SEQ ID NO: 844704 - RNA, 22 nt, Human
aagugacaaaaggguauccaaa

SEQ ID NO: 844705 - RNA, 19 nt, Human
acuguaaggcauuuuuuuc

SEQ ID NO: 844706 - RNA, 22 nt, Human
ggugaagggccuuaggagacag

SEQ ID NO: 844707 - RNA, 22 nt, Human
gccuggagcuacuggacacuga

SEQ ID NO: 844708 - RNA, 19 nt, Human
acccagagcccuuugcagg

SEQ ID NO: 844709 - RNA, 22 nt, Human
agcagcagaggucagaaaggua

SEQ ID NO: 844710 - RNA, 22 nt, Human
ccugggucacucaggcaggcgg

SEQ ID NO: 844711 - RNA, 22 nt, Human
augcuguguccuagugaaagaa

SEQ ID NO: 844712 - RNA, 17 nt, Human
cuguuaauucauuuccc

SEQ ID NO: 844713 - RNA, 22 nt, Human
aaucuggcauuugagaguagga

SEQ ID NO: 844714 - RNA, 22 nt, Human
ucuggcucucucaucacccaau

SEQ ID NO: 844715 - RNA, 22 nt, Human
agcugccaccucugccuuuggg

SEQ ID NO: 844716 - RNA, 22 nt, Human
uccaggagguagugcuuaauuu

SEQ ID NO: 844717 - RNA, 22 nt, Human
aaaguuaguuucuuauaugucu

SEQ ID NO: 844718 - RNA, 21 nt, Human
gccaggaguagauuacauuua

SEQ ID NO: 844719 - RNA, 22 nt, Human
ucugauuagcaguuuagggaaa

SEQ ID NO: 844720 - RNA, 22 nt, Human
agggacacacuccaguguuauu

SEQ ID NO: 844721 - RNA, 22 nt, Human
uccugggccuguacuccauccg

SEQ ID NO: 844722 - RNA, 17 nt, Human
gccaggagguuugagcu

SEQ ID NO: 844723 - RNA, 22 nt, Human
ccagggcagcgccccuccacgc

SEQ ID NO: 844724 - RNA, 22 nt, Human
uuauguacucugcaauguuuga

SEQ ID NO: 844725 - RNA, 22 nt, Human
gucucagaccacccucuuuggc

SEQ ID NO: 844726 - RNA, 22 nt, Human
cccaggagacauauagaaggac

SEQ ID NO: 844727 - RNA, 22 nt, Human
uucuacaauaugaauaaugaag

SEQ ID NO: 844728 - RNA, 22 nt, Human
uuucaugugcaauuagcaauau

SEQ ID NO: 844729 - RNA, 22 nt, Human
ucccagcauuaaugccugucag

SEQ ID NO: 844730 - RNA, 22 nt, Human
cuucacauguuggaguccuuug

SEQ ID NO: 844731 - RNA, 22 nt, Human
caugcacaacauacucaagagg

SEQ ID NO: 844732 - RNA, 22 nt, Human
cucccugguguccccuccagga

SEQ ID NO: 844733 - RNA, 22 nt, Human
cccaaggcauggcaugguggca

SEQ ID NO: 844734 - RNA, 22 nt, Human
uggcagggucuugcuguguugc

SEQ ID NO: 844735 - RNA, 22 nt, Human
gccuucugauugcuggacugac

SEQ ID NO: 844736 - RNA, 22 nt, Human
cugccaggcgauggauuggcug

SEQ ID NO: 844737 - RNA, 22 nt, Human
ugcugucccccgugucugggcu

SEQ ID NO: 844738 - RNA, 21 nt, Human
uggagcugaauuuuuggcauc

SEQ ID NO: 844739 - RNA, 22 nt, Human
gggcagcuggauaguuuuaaau

SEQ ID NO: 844740 - RNA, 22 nt, Human
auuucuuccucugucaguaacu

SEQ ID NO: 844741 - RNA, 22 nt, Human
gcugcucucucccuaaguuggg

SEQ ID NO: 844742 - RNA, 15 nt, Human
aaucuggcggcaagu

SEQ ID NO: 844743 - RNA, 19 nt, Human
cuguccuuggcugcacugu

SEQ ID NO: 844744 - RNA, 22 nt, Human
ugguaucagagccaucuguauu

SEQ ID NO: 844745 - RNA, 22 nt, Human
cuucuucaucuguaaaacuugg

SEQ ID NO: 844746 - RNA, 22 nt, Human
gcccaggaagugacucagaugu

SEQ ID NO: 844747 - RNA, 22 nt, Human
acagggucauuuuaugaucugu

SEQ ID NO: 844748 - RNA, 22 nt, Human
ggcugccucaaagcucaagcuc

SEQ ID NO: 844749 - RNA, 22 nt, Human
cagggcccauggcucagguagg

SEQ ID NO: 844750 - RNA, 22 nt, Human
ggcagcaguccauggcccaagg

SEQ ID NO: 844751 - RNA, 22 nt, Human
ugucccagaucacaggagggga

SEQ ID NO: 844752 - RNA, 22 nt, Human
acagccagggcauugucgccga

SEQ ID NO: 844753 - RNA, 22 nt, Human
gcucugagucucagcuaccaca

SEQ ID NO: 844754 - RNA, 22 nt, Human
cucucuggaagggggagcugau

SEQ ID NO: 844755 - RNA, 20 nt, Human
agcugaggcaccugagguua

SEQ ID NO: 844756 - RNA, 22 nt, Human
uuaauuuauguccaaaccagau

SEQ ID NO: 844757 - RNA, 22 nt, Human
ugccuggaaggcccaugggaag

SEQ ID NO: 844758 - RNA, 22 nt, Human
ggcugggagcuggacaggccgg

SEQ ID NO: 844759 - RNA, 22 nt, Human
agcagccauccuuagagaaaga

SEQ ID NO: 844760 - RNA, 22 nt, Human
ccagggcaauaggaacacuuuu

SEQ ID NO: 844761 - RNA, 22 nt, Human
uuggaggcaaugggaaggaggc

SEQ ID NO: 844762 - RNA, 22 nt, Human
ggcagcugaccuagcaccaucc

SEQ ID NO: 844763 - RNA, 22 nt, Human
gaagaacacuucaugauucauu

SEQ ID NO: 844764 - RNA, 22 nt, Human
cucaggggaccuggcuccgagu

SEQ ID NO: 844765 - RNA, 22 nt, Human
ugucaccaugcgaggcuaauuu

SEQ ID NO: 844766 - RNA, 22 nt, Human
auauucuucuuguucagacuau

SEQ ID NO: 844767 - RNA, 22 nt, Human
cacugcuuucacaguuuguucc

SEQ ID NO: 844768 - RNA, 23 nt, Human
uaugaacugcauugcuggugugu

SEQ ID NO: 844769 - RNA, 22 nt, Human
guccucugcuucaugcccugau

SEQ ID NO: 844770 - RNA, 22 nt, Human
aucauucuagcuguuguguuga

SEQ ID NO: 844771 - RNA, 22 nt, Human
ggcagcagcaagguuggagcug

SEQ ID NO: 844772 - RNA, 22 nt, Human
aaauuucaguuaccuuuacguu

SEQ ID NO: 844773 - RNA, 22 nt, Human
ccagggugaggaggcucccacg

SEQ ID NO: 844774 - RNA, 22 nt, Human
gaaacugugaucguguucuggg

SEQ ID NO: 844775 - RNA, 22 nt, Human
cacauuucugugagucaauauu

SEQ ID NO: 844776 - RNA, 22 nt, Human
gaauuucauuuguuuccuacca

SEQ ID NO: 844777 - RNA, 22 nt, Human
aaggagaguacaggaguuggua

SEQ ID NO: 844778 - RNA, 19 nt, Human
cagucccaaauucuuguca

SEQ ID NO: 844779 - RNA, 22 nt, Human
agagcagauggagcuggaagag

SEQ ID NO: 844780 - RNA, 22 nt, Human
agcagagcggggccuccggaag

SEQ ID NO: 844781 - RNA, 22 nt, Human
agcagcugggcucagagcuggg

SEQ ID NO: 844782 - RNA, 22 nt, Human
cuguuuauacgacagguggagg

SEQ ID NO: 844783 - RNA, 22 nt, Human
uaugaacuguaacccucaccgc

SEQ ID NO: 844784 - RNA, 20 nt, Human
cagagccaagagcagcaucu

SEQ ID NO: 844785 - RNA, 22 nt, Human
ggcccuguuagagcucccacaa

SEQ ID NO: 844786 - RNA, 22 nt, Human
gccagagccacuuuugggugau

SEQ ID NO: 844787 - RNA, 22 nt, Human
gggcuucucuuaugcuaacugg

SEQ ID NO: 844788 - RNA, 22 nt, Human
uccuuucccuuuccauccuggc

SEQ ID NO: 844789 - RNA, 22 nt, Human
agcauuuagucuuuauugcagc

SEQ ID NO: 844790 - RNA, 22 nt, Human
aauaucagcacuuuugugguau

SEQ ID NO: 844791 - RNA, 22 nt, Human
ugccaggcauauggccucuuug

SEQ ID NO: 844792 - RNA, 22 nt, Human
uuucaacuagccccuaaguccu

SEQ ID NO: 844793 - RNA, 22 nt, Human
agauaaugaaugccaugacauu

SEQ ID NO: 844794 - RNA, 22 nt, Human
caagagcuggagaggcagucua

SEQ ID NO: 844795 - RNA, 22 nt, Human
uuucauugaugggugauagaaa

SEQ ID NO: 844796 - RNA, 22 nt, Human
agccuggaggaggaguugagca

SEQ ID NO: 844797 - RNA, 22 nt, Human
uguuuauaccuugguauaacca

SEQ ID NO: 844798 - RNA, 22 nt, Human
ugcuucaggagaugucaccaug

SEQ ID NO: 844799 - RNA, 22 nt, Human
agcuguccuggcucaggcugug

SEQ ID NO: 844800 - RNA, 22 nt, Human
cccugagaugccucacccuagu

SEQ ID NO: 844801 - RNA, 22 nt, Human
ccaggggcuggugcugagcugg

SEQ ID NO: 844802 - RNA, 22 nt, Human
uuaugacauaugaguacaagua

SEQ ID NO: 844803 - RNA, 22 nt, Human
cuuccugguuugaagcucgccg

SEQ ID NO: 844804 - RNA, 19 nt, Human
ccucugcgcuguccugcuc

SEQ ID NO: 844805 - RNA, 22 nt, Human
uacagcauguccuuagcaaggc

SEQ ID NO: 844806 - RNA, 22 nt, Human
gagguucacaggcuaucacagu

SEQ ID NO: 844807 - RNA, 22 nt, Human
uuugguccugagcaaaacuaug

SEQ ID NO: 844808 - RNA, 22 nt, Human
uuauuuaaugugaucugaagag

SEQ ID NO: 844809 - RNA, 22 nt, Human
auucacagaauaguuuuaccag

SEQ ID NO: 844810 - RNA, 22 nt, Human
ccaaaugcuccacugacuuugg

SEQ ID NO: 844811 - RNA, 22 nt, Human
gaaacauacgauuuaggagaaa

SEQ ID NO: 844812 - RNA, 22 nt, Human
gagguggccucaagcagucuuc

SEQ ID NO: 844813 - RNA, 23 nt, Human
cccagcgcugagcccugcaggca

SEQ ID NO: 844814 - RNA, 22 nt, Human
ccuguucauuuguauuugucuu

SEQ ID NO: 844815 - RNA, 22 nt, Human
uucaugaaaguguaucuugugg

SEQ ID NO: 844816 - RNA, 22 nt, Human
uccuggauaucaaacaaacauu

SEQ ID NO: 844817 - RNA, 22 nt, Human
uagcugccuuugggcuccugcu

SEQ ID NO: 844818 - RNA, 22 nt, Human
cuggcccauggugagcucuggg

SEQ ID NO: 844819 - RNA, 22 nt, Human
cccaggcagccugcagggaagg

SEQ ID NO: 844820 - RNA, 22 nt, Human
ugcuggggauccguaccaaccc

SEQ ID NO: 844821 - RNA, 21 nt, Human
agccuggcccagggggaggcu

SEQ ID NO: 844822 - RNA, 22 nt, Human
ucuucagagacucugagccccu

SEQ ID NO: 844823 - RNA, 22 nt, Human
aauuucaaguggcaucuuugau

SEQ ID NO: 844824 - RNA, 22 nt, Human
auaaaugauucagcaggaaaua

SEQ ID NO: 844825 - RNA, 22 nt, Human
aggucacacaacugucagaggc

SEQ ID NO: 844826 - RNA, 22 nt, Human
acaaggcugaacagugaagccg

SEQ ID NO: 844827 - RNA, 22 nt, Human
aggagucauugagagggguccu

SEQ ID NO: 844828 - RNA, 23 nt, Human
uguaacaauuucauauacaugca

SEQ ID NO: 844829 - RNA, 22 nt, Human
cagccuccugggacacucaccg

SEQ ID NO: 844830 - RNA, 22 nt, Human
auuucagaugaccaaauggaaa

SEQ ID NO: 844831 - RNA, 22 nt, Human
ccuuugggugaauuccucucuu

SEQ ID NO: 844832 - RNA, 22 nt, Human
cuucaagauccauagauauugc

SEQ ID NO: 844833 - RNA, 21 nt, Human
cauuuacaugacagauugguu

SEQ ID NO: 844834 - RNA, 22 nt, Human
aaaugcuacauacacaucaggg

SEQ ID NO: 844835 - RNA, 22 nt, Human
ugcaagcacucaaugcaaacag

SEQ ID NO: 844836 - RNA, 22 nt, Human
cccaggagccaucugucuuggc

SEQ ID NO: 844837 - RNA, 22 nt, Human
ccaggacuuauuacaguauaac

SEQ ID NO: 844838 - RNA, 22 nt, Human
gagcagcuggacaggccucccu

SEQ ID NO: 844839 - RNA, 22 nt, Human
gugaggugggcuggccagagac

SEQ ID NO: 844840 - RNA, 22 nt, Human
gcagcugggccccagccucucc

SEQ ID NO: 844841 - RNA, 22 nt, Human
uacaaaugaaccaacuuugaug

SEQ ID NO: 844842 - RNA, 22 nt, Human
ugucaugcagguuuguuauaga

SEQ ID NO: 844843 - RNA, 21 nt, Human
ugaaaugagaaugcugagcac

SEQ ID NO: 844844 - RNA, 23 nt, Human
cagaagcaccuguugacugcugc

SEQ ID NO: 844845 - RNA, 22 nt, Human
uggccugauuuugcuaagagaa

SEQ ID NO: 844846 - RNA, 22 nt, Human
gcuuccuaaaugcacagggcag

SEQ ID NO: 844847 - RNA, 22 nt, Human
aguaaacauaauuuaccuguag

SEQ ID NO: 844848 - RNA, 22 nt, Human
ccagcuccucuucccaguguca

SEQ ID NO: 844849 - RNA, 22 nt, Human
uguaugcagcaaaacaauuagu

SEQ ID NO: 844850 - RNA, 22 nt, Human
ggccuuggugccauggccaguu

SEQ ID NO: 844851 - RNA, 22 nt, Human
ggauccuuaacuaucacaguga

SEQ ID NO: 844852 - RNA, 22 nt, Human
cugucagcacucuacuacagau

SEQ ID NO: 844853 - RNA, 22 nt, Human
uccacugcagcuucugauggaa

SEQ ID NO: 844854 - RNA, 22 nt, Human
caguucuuuguggggaguucuc

SEQ ID NO: 844855 - RNA, 22 nt, Human
uauccaauucaccauugauggg

SEQ ID NO: 844856 - RNA, 22 nt, Human
gaucagaauuuacuuauaauug

SEQ ID NO: 844857 - RNA, 20 nt, Human
uccugagauuuaagggguuc

SEQ ID NO: 844858 - RNA, 21 nt, Human
auacacauacacauaaaugug

SEQ ID NO: 844859 - RNA, 22 nt, Human
cugggccugucagggcuuuuug

SEQ ID NO: 844860 - RNA, 22 nt, Human
cagagccauccaggugccuguu

SEQ ID NO: 844861 - RNA, 22 nt, Human
ccuuuaauuuacaauguuaauu

SEQ ID NO: 844862 - RNA, 22 nt, Human
uaugacauugcuuuuuagaacu

SEQ ID NO: 844863 - RNA, 22 nt, Human
gucaggggccaugggccaagga

SEQ ID NO: 844864 - RNA, 22 nt, Human
aagaacauuuuguagaaugaca

SEQ ID NO: 844865 - RNA, 22 nt, Human
uacaaaguauauuucuagcugu

SEQ ID NO: 844866 - RNA, 22 nt, Human
uggcagcuagcuguuuucaugc

SEQ ID NO: 844867 - RNA, 17 nt, Human
agcagcugaagcagcca

SEQ ID NO: 844868 - RNA, 20 nt, Human
ccagcugagccaaggggaga

SEQ ID NO: 844869 - RNA, 22 nt, Human
uucaagauaauaggaaugaaaa

SEQ ID NO: 844870 - RNA, 22 nt, Human
cgcagggauuucaaggggccuu

SEQ ID NO: 844871 - RNA, 20 nt, Human
aucuucuuggccagcuugcu

SEQ ID NO: 844872 - RNA, 22 nt, Human
gaaauauacauugcaggaagag

SEQ ID NO: 844873 - RNA, 22 nt, Human
cuccucuggcuuccuggaggca

SEQ ID NO: 844874 - RNA, 22 nt, Human
aucagaaauagucauguuacuu

SEQ ID NO: 844875 - RNA, 22 nt, Human
uccuugaagaaugauucuugga

SEQ ID NO: 844876 - RNA, 22 nt, Human
ugaagcaggaaacuucuuguuu

SEQ ID NO: 844877 - RNA, 22 nt, Human
ucuguucaguuguaccuucccc

SEQ ID NO: 844878 - RNA, 22 nt, Human
aaggcacuagcagaauuaguga

SEQ ID NO: 844879 - RNA, 22 nt, Human
gagcuggcaggaggcuccccga

SEQ ID NO: 844880 - RNA, 20 nt, Human
agugccagggcaggugagag

SEQ ID NO: 844881 - RNA, 22 nt, Human
auaugcauaugucaaaacuuau

SEQ ID NO: 844882 - RNA, 22 nt, Human
agagacaggguuuugucguguu

SEQ ID NO: 844883 - RNA, 22 nt, Human
agccugagagccaagcugugca

SEQ ID NO: 844884 - RNA, 22 nt, Human
ccugggcaggaugggcccggug

SEQ ID NO: 844885 - RNA, 22 nt, Human
ggagacaguauggcuuguagcu

SEQ ID NO: 844886 - RNA, 22 nt, Human
ucugagaggcagaccuuccuaa

SEQ ID NO: 844887 - RNA, 22 nt, Human
gaguccuuuucauagcaguggg

SEQ ID NO: 844888 - RNA, 22 nt, Human
gaguuauuggguggaaagguag

SEQ ID NO: 844889 - RNA, 22 nt, Human
cuggacucugcagagaaaagua

SEQ ID NO: 844890 - RNA, 22 nt, Human
acagaaugggauuugaauauuu

SEQ ID NO: 844891 - RNA, 22 nt, Human
gcagggucuugagaggcagcca

SEQ ID NO: 844892 - RNA, 22 nt, Human
uauauguaagcuauguaagagu

SEQ ID NO: 844893 - RNA, 22 nt, Human
caggcagcugacugucagauau

SEQ ID NO: 844894 - RNA, 22 nt, Human
gcuccagguauuugcccuuuua

SEQ ID NO: 844895 - RNA, 22 nt, Human
gggcuucucccuaaggacucug

SEQ ID NO: 844896 - RNA, 22 nt, Human
cauagcuuagggguuaaacuca

SEQ ID NO: 844897 - RNA, 22 nt, Human
ccucaggcuuacgggcaaugga

SEQ ID NO: 844898 - RNA, 22 nt, Human
aggggaggagcuuuucuugccu

SEQ ID NO: 844899 - RNA, 22 nt, Human
ugugcaggugcaggaagggggc

SEQ ID NO: 844900 - RNA, 22 nt, Human
auguuugacugaguuuggcaga

SEQ ID NO: 844901 - RNA, 22 nt, Human
cacucugagaaguacaagcucc

SEQ ID NO: 844902 - RNA, 22 nt, Human
ugaggcagcccacuuuccuuag

SEQ ID NO: 844903 - RNA, 21 nt, Human
ucacaugcccauuacuggagc

SEQ ID NO: 844904 - RNA, 22 nt, Human
ucaucuugcugccauugcuuua

SEQ ID NO: 844905 - RNA, 22 nt, Human
ggggcagccuccaggaaagcug

SEQ ID NO: 844906 - RNA, 22 nt, Human
ccuggcaguuuugcccaggauu

SEQ ID NO: 844907 - RNA, 22 nt, Human
ccugacucuggccaggccagcu

SEQ ID NO: 844908 - RNA, 22 nt, Human
ucucuggaguauaaccagggau

SEQ ID NO: 844909 - RNA, 22 nt, Human
caggauccccaggucgccgucc

SEQ ID NO: 844910 - RNA, 22 nt, Human
agcugccaaguuucucaguuua

SEQ ID NO: 844911 - RNA, 22 nt, Human
ggucauuguucuuuucugugau

SEQ ID NO: 844912 - RNA, 22 nt, Human
uaauuauaacaguuacaucuua

SEQ ID NO: 844913 - RNA, 22 nt, Human
uuucagaaccgcuaaaauaaau

SEQ ID NO: 844914 - RNA, 22 nt, Human
ggccuggcauggggacuaaggg

SEQ ID NO: 844915 - RNA, 22 nt, Human
aagccagguguuuaggccagcg

SEQ ID NO: 844916 - RNA, 22 nt, Human
ucagagugguagccuauuuucu

SEQ ID NO: 844917 - RNA, 22 nt, Human
cagcugacuucauaggaagaca

SEQ ID NO: 844918 - RNA, 22 nt, Human
aaguugaagcaugaaccaaggu

SEQ ID NO: 844919 - RNA, 22 nt, Human
cccagcucugcagaccugcccu

SEQ ID NO: 844920 - RNA, 22 nt, Human
ugugcugguacaugugaggaug

SEQ ID NO: 844921 - RNA, 22 nt, Human
agagauucauguuuacuguagg

SEQ ID NO: 844922 - RNA, 22 nt, Human
agauacauuguucuaagcauug

SEQ ID NO: 844923 - RNA, 23 nt, Human
uggcuggcagaaacugaagcaug

SEQ ID NO: 844924 - RNA, 22 nt, Human
agagauaugaguaguugugaca

SEQ ID NO: 844925 - RNA, 20 nt, Human
uacuugaauguugcagcagu

SEQ ID NO: 844926 - RNA, 22 nt, Human
gccagaaacauacacaucacuu

SEQ ID NO: 844927 - RNA, 22 nt, Human
ugaagcaggcauugacugauga

SEQ ID NO: 844928 - RNA, 22 nt, Human
uggcucuguucgccaucaggag

SEQ ID NO: 844929 - RNA, 22 nt, Human
augcuuaacucuguacauaguu

SEQ ID NO: 844930 - RNA, 22 nt, Human
ucaaauaccagcuuuuccagaa

SEQ ID NO: 844931 - RNA, 22 nt, Human
cauuugaauuguucugugggaa

SEQ ID NO: 844932 - RNA, 22 nt, Human
cuucuugcaauuuucaucuuau

SEQ ID NO: 844933 - RNA, 22 nt, Human
agcagaaccugcagaccugucu

SEQ ID NO: 844934 - RNA, 22 nt, Human
uccugagagcagaguccaggug

SEQ ID NO: 844935 - RNA, 22 nt, Human
gugucaugggguuuguuauaca

SEQ ID NO: 844936 - RNA, 22 nt, Human
agaacuuaggaacaacagcuua

SEQ ID NO: 844937 - RNA, 20 nt, Human
agccugccagcuggcccaga

SEQ ID NO: 844938 - RNA, 22 nt, Human
accucugccacuuucuaacucu

SEQ ID NO: 844939 - RNA, 22 nt, Human
uugcaggaaacugagugugagc

SEQ ID NO: 844940 - RNA, 22 nt, Human
aggcuucuuagauuggcuggag

SEQ ID NO: 844941 - RNA, 22 nt, Human
aaaaaucacuuuuauaggcagc

SEQ ID NO: 844942 - RNA, 22 nt, Human
gucuggaguggggccugagaau

SEQ ID NO: 844943 - RNA, 22 nt, Human
cuacugaguccuucagcugcca

SEQ ID NO: 844944 - RNA, 22 nt, Human
ggccagaaguuggaaaagagcc

SEQ ID NO: 844945 - RNA, 22 nt, Human
aggcuggggaauugaauuugcu

SEQ ID NO: 844946 - RNA, 22 nt, Human
uuccagaagccuccauauuacu

SEQ ID NO: 844947 - RNA, 22 nt, Human
cucagcagcagggaagagguca

SEQ ID NO: 844948 - RNA, 22 nt, Human
cucagagucugcauuucuguca

SEQ ID NO: 844949 - RNA, 22 nt, Human
ccugccugcggcccgcggggag

SEQ ID NO: 844950 - RNA, 22 nt, Human
cugcccugggaguaccuguccu

SEQ ID NO: 844951 - RNA, 22 nt, Human
uaauaguuaugguugguucuca

SEQ ID NO: 844952 - RNA, 20 nt, Human
ggcagagcuaugucuguugc

SEQ ID NO: 844953 - RNA, 22 nt, Human
aaguguuaaaagauuaaaugcu

SEQ ID NO: 844954 - RNA, 22 nt, Human
uagcagggaagaugaucagaau

SEQ ID NO: 844955 - RNA, 22 nt, Human
cagccuguagaauacaguaaau

SEQ ID NO: 844956 - RNA, 22 nt, Human
caugagauaauuuuucuccagu

SEQ ID NO: 844957 - RNA, 20 nt, Human
cucucuggaaggugggagcc

SEQ ID NO: 844958 - RNA, 22 nt, Human
gucagaggggcagcugccaggc

SEQ ID NO: 844959 - RNA, 22 nt, Human
cagggcuccccgcaccgcagcc

SEQ ID NO: 844960 - RNA, 22 nt, Human
acauuucucauaggagagccac

SEQ ID NO: 844961 - RNA, 22 nt, Human
gggcugcugccaccagguggau

SEQ ID NO: 844962 - RNA, 22 nt, Human
gucccagaggcuuuggccacag

SEQ ID NO: 844963 - RNA, 22 nt, Human
aggcccaguuauccuacuuguu

SEQ ID NO: 844964 - RNA, 22 nt, Human
agccucucuguuagucacuggg

SEQ ID NO: 844965 - RNA, 20 nt, Human
aaaauauguauaacucuucu

SEQ ID NO: 844966 - RNA, 22 nt, Human
gcuguucacaucuggaccauuu

SEQ ID NO: 844967 - RNA, 22 nt, Human
aucugcaggaaugugugcagag

SEQ ID NO: 844968 - RNA, 22 nt, Human
uuccaugugaguacacugugau

SEQ ID NO: 844969 - RNA, 18 nt, Human
gugacagcugcuagcuca

SEQ ID NO: 844970 - RNA, 22 nt, Human
uaaaugcaaugugcuuuaccag

SEQ ID NO: 844971 - RNA, 22 nt, Human
auacauacauguaugcacauac

SEQ ID NO: 844972 - RNA, 22 nt, Human
cuggccuggggccucagcugcu

SEQ ID NO: 844973 - RNA, 19 nt, Human
auagucuuuccaauuauac

SEQ ID NO: 844974 - RNA, 22 nt, Human
gcacugaaauuauaugcauuug

SEQ ID NO: 844975 - RNA, 22 nt, Human
uaagaaucuauuaggaauaugu

SEQ ID NO: 844976 - RNA, 22 nt, Human
ugcauuaugcuacccagaagcu

SEQ ID NO: 844977 - RNA, 22 nt, Human
uacauuguucaugcaugagaaa

SEQ ID NO: 844978 - RNA, 22 nt, Human
aucuuucuccauauacaucuuu

SEQ ID NO: 844979 - RNA, 22 nt, Human
auggagggugguaagacagaga

SEQ ID NO: 844980 - RNA, 22 nt, Human
gaaauuuauuaucuacaucauu

SEQ ID NO: 844981 - RNA, 23 nt, Human
ucuguucaaggcuuucuccuuga

SEQ ID NO: 844982 - RNA, 22 nt, Human
aaguccuuggagaauagaaagg

SEQ ID NO: 844983 - RNA, 22 nt, Human
gauaaaauauguggccuuuagu

SEQ ID NO: 844984 - RNA, 22 nt, Human
cugugccuuuguagcugugccu

SEQ ID NO: 844985 - RNA, 22 nt, Human
gcugccugaucauacaccaggg

SEQ ID NO: 844986 - RNA, 22 nt, Human
aacuacauuguccuuucugaag

SEQ ID NO: 844987 - RNA, 22 nt, Human
ucaacagaagugauagcuauua

SEQ ID NO: 844988 - RNA, 20 nt, Human
uuucaguugguuaauggcau

SEQ ID NO: 844989 - RNA, 22 nt, Human
caucaaauggcaagugaaagcu

SEQ ID NO: 844990 - RNA, 22 nt, Human
ucuuugcagaauuuaacuuugc

SEQ ID NO: 844991 - RNA, 22 nt, Human
uuuuugaaggcugaugugauua

SEQ ID NO: 844992 - RNA, 22 nt, Human
ucuggagcuuccucauuuacag

SEQ ID NO: 844993 - RNA, 22 nt, Human
acuauacaccaaaauauuaagg

SEQ ID NO: 844994 - RNA, 19 nt, Human
uuccuuagaggaggcggug

SEQ ID NO: 844995 - RNA, 22 nt, Human
uggagcaggugccaggugugug

SEQ ID NO: 844996 - RNA, 22 nt, Human
ggcaugggagugagcaaccuua

SEQ ID NO: 844997 - RNA, 19 nt, Human
uccauaaugaagauagagg

SEQ ID NO: 844998 - RNA, 22 nt, Human
uuggccuucccuaccugggcca

SEQ ID NO: 844999 - RNA, 22 nt, Human
acauguuagaaaugcagaaucu

SEQ ID NO: 845000 - RNA, 22 nt, Human
caaaguuuggcucucaugacau

SEQ ID NO: 845001 - RNA, 22 nt, Human
agcugguggauuaugcuguaca

SEQ ID NO: 845002 - RNA, 22 nt, Human
gcagaggagaugaagauacuuu

SEQ ID NO: 845003 - RNA, 22 nt, Human
ucuggcucuccagugcucuuag

SEQ ID NO: 845004 - RNA, 22 nt, Human
cgggcagaucacacagggcuug

SEQ ID NO: 845005 - RNA, 22 nt, Human
aaucaagucaaccaucaugugc

SEQ ID NO: 845006 - RNA, 22 nt, Human
cagggccauuggcguggcuguc

SEQ ID NO: 845007 - RNA, 22 nt, Human
ucauuuguugcuguuaccugag

SEQ ID NO: 845008 - RNA, 22 nt, Human
aaaguguggagauugaacuaaa

SEQ ID NO: 845009 - RNA, 22 nt, Human
ucuucaucucagauuaacagga

SEQ ID NO: 845010 - RNA, 22 nt, Human
gcagaggauagcauaugaaccu

SEQ ID NO: 845011 - RNA, 22 nt, Human
aacuuuaaggcuauaaauuaug

SEQ ID NO: 845012 - RNA, 22 nt, Human
ggccucuggcaggcaggcccuc

SEQ ID NO: 845013 - RNA, 22 nt, Human
agcagagcuauucuugugcaau

SEQ ID NO: 845014 - RNA, 22 nt, Human
ugaacagaucaauagaacugac

SEQ ID NO: 845015 - RNA, 22 nt, Human
uggugcugauaauggcaggauu

SEQ ID NO: 845016 - RNA, 22 nt, Human
aacaugaaaguugcuaagugca

SEQ ID NO: 845017 - RNA, 22 nt, Human
aaacacauuagcccuguggaaa

SEQ ID NO: 845018 - RNA, 22 nt, Human
ugcauugcaguuaacucaguau

SEQ ID NO: 845019 - RNA, 21 nt, Human
acaggcucuggggaugcuggg

SEQ ID NO: 845020 - RNA, 22 nt, Human
gccugagagucugcauuucuaa

SEQ ID NO: 845021 - RNA, 22 nt, Human
aagccaggggcugcuuaggaga

SEQ ID NO: 845022 - RNA, 22 nt, Human
uccugagauucugcauuucuaa

SEQ ID NO: 845023 - RNA, 22 nt, Human
auccagucaaaauuaguaaggu

SEQ ID NO: 845024 - RNA, 22 nt, Human
gcagcugaagcugcaguuccag

SEQ ID NO: 845025 - RNA, 19 nt, Human
acauuuagaauguacuugc

SEQ ID NO: 845026 - RNA, 19 nt, Human
aggcagaggcuuggcuagc

SEQ ID NO: 845027 - RNA, 22 nt, Human
ucuggccaggauggcaagacca

SEQ ID NO: 845028 - RNA, 22 nt, Human
uuuucguuuauuugacauguaa

SEQ ID NO: 845029 - RNA, 22 nt, Human
gcucuggcuacuguggcuaccg

SEQ ID NO: 845030 - RNA, 22 nt, Human
aagcugccaaugguaagcugcu

SEQ ID NO: 845031 - RNA, 22 nt, Human
agccaaggcagcuagagcucug

SEQ ID NO: 845032 - RNA, 22 nt, Human
auugaaagauauacuguucuca

SEQ ID NO: 845033 - RNA, 22 nt, Human
uccucagaugcucuuggacgcc

SEQ ID NO: 845034 - RNA, 22 nt, Human
uuacaaaguucugaguucaaac

SEQ ID NO: 845035 - RNA, 22 nt, Human
aauguguagcauuuaaugcagu

SEQ ID NO: 845036 - RNA, 22 nt, Human
uaugcuguggaaaauacaaaga

SEQ ID NO: 845037 - RNA, 22 nt, Human
acccugccgugggcugcuugug

SEQ ID NO: 845038 - RNA, 22 nt, Human
uucaggagcuggcugcgaagga

SEQ ID NO: 845039 - RNA, 22 nt, Human
cauggcaggaggcugcuggcag

SEQ ID NO: 845040 - RNA, 22 nt, Human
ccucagaguaggucucagcugu

SEQ ID NO: 845041 - RNA, 18 nt, Human
aaauguacuguccauggc

SEQ ID NO: 845042 - RNA, 22 nt, Human
gcugcagcccggcgcgccugag

SEQ ID NO: 845043 - RNA, 20 nt, Human
agaagcugauacugauggaa

SEQ ID NO: 845044 - RNA, 20 nt, Human
aaagucuuaugguuaauuuu

SEQ ID NO: 845045 - RNA, 19 nt, Human
ucaggacugacuugaaguc

SEQ ID NO: 845046 - RNA, 22 nt, Human
ugggagagugcucaaugugcaa

SEQ ID NO: 845047 - RNA, 22 nt, Human
uuuuaauacugcuauuguagga

SEQ ID NO: 845048 - RNA, 22 nt, Human
ucaggcugagaaaaucuggacc

SEQ ID NO: 845049 - RNA, 22 nt, Human
uuucacaacugcuuauuugaga

SEQ ID NO: 845050 - RNA, 22 nt, Human
cuuacauugucuuaguuuucaa

SEQ ID NO: 845051 - RNA, 22 nt, Human
aggaccaguaugagagcaucug

SEQ ID NO: 845052 - RNA, 21 nt, Human
uuacuuuugcagcaaccuaau

SEQ ID NO: 845053 - RNA, 22 nt, Human
accugccuaguugguucugccc

SEQ ID NO: 845054 - RNA, 21 nt, Human
gagcucucaggcaagaagcag

SEQ ID NO: 845055 - RNA, 22 nt, Human
uuugacauuggcuuauucuguu

SEQ ID NO: 845056 - RNA, 22 nt, Human
ggcagugaaugaaacagaggcu

SEQ ID NO: 845057 - RNA, 22 nt, Human
ucucuuucuauugcaccaugcu

SEQ ID NO: 845058 - RNA, 22 nt, Human
ggggcagagagaaggaagcuug

SEQ ID NO: 845059 - RNA, 22 nt, Human
uuagaaaggaaucuucauuuca

SEQ ID NO: 845060 - RNA, 22 nt, Human
cugaggcuuggaggggucuggu

SEQ ID NO: 845061 - RNA, 21 nt, Human
ucccugcuuucuggcccaguc

SEQ ID NO: 845062 - RNA, 19 nt, Human
cagaguccuugaccagucc

SEQ ID NO: 845063 - RNA, 22 nt, Human
ggcagcugagcauggcuaccuu

SEQ ID NO: 845064 - RNA, 22 nt, Human
aauaacuuaagaaauuucccca

SEQ ID NO: 845065 - RNA, 18 nt, Human
cagaaguccuucaaggcc

SEQ ID NO: 845066 - RNA, 22 nt, Human
cuggccugugggcugucuccgg

SEQ ID NO: 845067 - RNA, 22 nt, Human
caagagcuggguggcaagcuag

SEQ ID NO: 845068 - RNA, 22 nt, Human
ucauauaacuggauauuuucaa

SEQ ID NO: 845069 - RNA, 22 nt, Human
gccugagaaggauaggaagcga

SEQ ID NO: 845070 - RNA, 22 nt, Human
gagggcagugaauuuugaagcu

SEQ ID NO: 845071 - RNA, 19 nt, Human
auguaugaggucuucugcu

SEQ ID NO: 845072 - RNA, 22 nt, Human
auguucuuucagccagugcauc

SEQ ID NO: 845073 - RNA, 22 nt, Human
uguauguaaaguuuguaauaga

SEQ ID NO: 845074 - RNA, 22 nt, Human
uggcagaaguacacaagcaugc

SEQ ID NO: 845075 - RNA, 22 nt, Human
auauacugauagcugcacuucu

SEQ ID NO: 845076 - RNA, 22 nt, Human
cuagguauucauguuucguggc

SEQ ID NO: 845077 - RNA, 22 nt, Human
uccugcagaccucagucagguc

SEQ ID NO: 845078 - RNA, 22 nt, Human
uaagacaugguugaucuagugu

SEQ ID NO: 845079 - RNA, 22 nt, Human
aaguccuugaagaaacaguucu

SEQ ID NO: 845080 - RNA, 19 nt, Human
caagugaagccugggaugg

SEQ ID NO: 845081 - RNA, 22 nt, Human
aucuggcugacuuugugggaca

SEQ ID NO: 845082 - RNA, 22 nt, Human
gacagcagacagaacuaccugc

SEQ ID NO: 845083 - RNA, 22 nt, Human
ugagagugguucagcucagaag

SEQ ID NO: 845084 - RNA, 22 nt, Human
caugcuuucuguccaaauguua

SEQ ID NO: 845085 - RNA, 22 nt, Human
ggaaccaguggaaugauaugcu

SEQ ID NO: 845086 - RNA, 22 nt, Human
ucuagacacuacuaguaaccgg

SEQ ID NO: 845087 - RNA, 22 nt, Human
agucccaggcagccgagccggu

SEQ ID NO: 845088 - RNA, 22 nt, Human
auguagcaugaggcacugugcc

SEQ ID NO: 845089 - RNA, 22 nt, Human
gcugccucuguagcuuuggacc

SEQ ID NO: 845090 - RNA, 22 nt, Human
gggaggucagggugccugcugg

SEQ ID NO: 845091 - RNA, 22 nt, Human
aaagacuagcauuuauauguac

SEQ ID NO: 845092 - RNA, 22 nt, Human
ggggcggggcucugagaagcau

SEQ ID NO: 845093 - RNA, 22 nt, Human
gguggagcuggaccaggagagg

SEQ ID NO: 845094 - RNA, 22 nt, Human
ucugggugaugaaaugcacugu

SEQ ID NO: 845095 - RNA, 22 nt, Human
ucccuggcuguguucaggugcg

SEQ ID NO: 845096 - RNA, 22 nt, Human
uuuugucuaagaacuuugcaaa

SEQ ID NO: 845097 - RNA, 22 nt, Human
auuuagaaauuccaaaaguauu

SEQ ID NO: 845098 - RNA, 22 nt, Human
agcuuuauauuuaaugaauucu

SEQ ID NO: 845099 - RNA, 18 nt, Human
caugggugacagguggau

SEQ ID NO: 845100 - RNA, 23 nt, Human
ggguccagagacaggcaugggug

SEQ ID NO: 845101 - RNA, 22 nt, Human
ggccucucuccagucagugcag

SEQ ID NO: 845102 - RNA, 22 nt, Human
uggccugcagcucucagggaag

SEQ ID NO: 845103 - RNA, 22 nt, Human
agagggagugaaauggaauaga

SEQ ID NO: 845104 - RNA, 22 nt, Human
gguacaaggagugaagguuugg

SEQ ID NO: 845105 - RNA, 22 nt, Human
caggugcccagcuccugcugug

SEQ ID NO: 845106 - RNA, 22 nt, Human
gcccucucggcauagcaggggc

SEQ ID NO: 845107 - RNA, 22 nt, Human
gaggggagacagggaaaucagu

SEQ ID NO: 845108 - RNA, 23 nt, Human
uuuggacuugugacucuucuccu

SEQ ID NO: 845109 - RNA, 22 nt, Human
agcaggcuccuuccuucucugg

SEQ ID NO: 845110 - RNA, 22 nt, Human
guaggcagucucucaggugauc

SEQ ID NO: 845111 - RNA, 22 nt, Human
uucuucuuuaucucaguauccu

SEQ ID NO: 845112 - RNA, 22 nt, Human
cccaggaaaugaacuucugauu

SEQ ID NO: 845113 - RNA, 22 nt, Human
gcuggugccuuguuguuguuac

SEQ ID NO: 845114 - RNA, 22 nt, Human
acagaauuuaaagcucuagacu

SEQ ID NO: 845115 - RNA, 22 nt, Human
cccuggagucagguuggccugg

SEQ ID NO: 845116 - RNA, 22 nt, Human
aauaacaggcucaucagaugcu

SEQ ID NO: 845117 - RNA, 22 nt, Human
agaagcagacucugaggcaagg

SEQ ID NO: 845118 - RNA, 18 nt, Human
uucacaggaaaugucuuu

SEQ ID NO: 845119 - RNA, 22 nt, Human
gucuuguuugggauguggaugg

SEQ ID NO: 845120 - RNA, 22 nt, Human
augcugugccuggaaagcggcu

SEQ ID NO: 845121 - RNA, 22 nt, Human
gcuguucacagacucugcucug

SEQ ID NO: 845122 - RNA, 22 nt, Human
uaaacauggauucugaucacag

SEQ ID NO: 845123 - RNA, 22 nt, Human
gucacuggggccacaugcagaa

SEQ ID NO: 845124 - RNA, 22 nt, Human
guuaggcaugaguguguauuaa

SEQ ID NO: 845125 - RNA, 21 nt, Human
gcagcaguguucuagaauacu

SEQ ID NO: 845126 - RNA, 20 nt, Human
ggucccugcccucugucauc

SEQ ID NO: 845127 - RNA, 22 nt, Human
uucagaaaaaacuucaauaagu

SEQ ID NO: 845128 - RNA, 22 nt, Human
gaagagcuuagacagaaucaaa

SEQ ID NO: 845129 - RNA, 22 nt, Human
ggccugcuccgggggcugagcu

SEQ ID NO: 845130 - RNA, 22 nt, Human
auucacagggacaaugggagag

SEQ ID NO: 845131 - RNA, 22 nt, Human
aggaaucccgcaccagcugcug

SEQ ID NO: 845132 - RNA, 22 nt, Human
ccaggccaaauucagucagcag

SEQ ID NO: 845133 - RNA, 22 nt, Human
ugaagaaucagauuggccugcg

SEQ ID NO: 845134 - RNA, 22 nt, Human
gagcagcuagauaaagcccuuc

SEQ ID NO: 845135 - RNA, 19 nt, Human
ugucucugaaagaugagcu

SEQ ID NO: 845136 - RNA, 22 nt, Human
uggccucuuacgacauagccuu

SEQ ID NO: 845137 - RNA, 22 nt, Human
agcaccugcuaugugucaggga

SEQ ID NO: 845138 - RNA, 22 nt, Human
cccaggaccgcgcggcugagcg

SEQ ID NO: 845139 - RNA, 22 nt, Human
uuucuaaaugguggcugcauug

SEQ ID NO: 845140 - RNA, 22 nt, Human
aaggagagagcuuugcuggaac

SEQ ID NO: 845141 - RNA, 22 nt, Human
auauauuugagaauauucauga

SEQ ID NO: 845142 - RNA, 22 nt, Human
ugaaauaauaucuggaucaauc

SEQ ID NO: 845143 - RNA, 22 nt, Human
cuccuuccugccccagugauaa

SEQ ID NO: 845144 - RNA, 22 nt, Human
ucccacucccaggcaggccucu

SEQ ID NO: 845145 - RNA, 22 nt, Human
gggcugccaagccugccugccu

SEQ ID NO: 845146 - RNA, 22 nt, Human
gaaauauuguacuggagauguu

SEQ ID NO: 845147 - RNA, 22 nt, Human
aaagcagaacugagagagcugg

SEQ ID NO: 845148 - RNA, 22 nt, Human
agcuuccugaugcaagagggcu

SEQ ID NO: 845149 - RNA, 22 nt, Human
gcagggcaaacccagguguuca

SEQ ID NO: 845150 - RNA, 19 nt, Human
uggccagguacugucugcu

SEQ ID NO: 845151 - RNA, 22 nt, Human
agaaauguuguggguuuuguua

SEQ ID NO: 845152 - RNA, 20 nt, Human
auuccauaguuggcacuuuu

SEQ ID NO: 845153 - RNA, 23 nt, Human
gccuucagcucgggaaggcuccc

SEQ ID NO: 845154 - RNA, 22 nt, Human
cucaggaugcaauuccaucaag

SEQ ID NO: 845155 - RNA, 22 nt, Human
ugcuggcccaguauggacugca

SEQ ID NO: 845156 - RNA, 22 nt, Human
gggcagcugccccucucugggc

SEQ ID NO: 845157 - RNA, 22 nt, Human
ggaggccaaggagggcggauca

SEQ ID NO: 845158 - RNA, 20 nt, Human
uggagcuguaaucuugucug

SEQ ID NO: 845159 - RNA, 22 nt, Human
acugggaguucuccaugucccu

SEQ ID NO: 845160 - RNA, 22 nt, Human
ucccagagcucugacaccagcu

SEQ ID NO: 845161 - RNA, 22 nt, Human
ucuggaguccagauccauuugg

SEQ ID NO: 845162 - RNA, 22 nt, Human
ggagcugcuuugaucugaagaa

SEQ ID NO: 845163 - RNA, 22 nt, Human
aaauaucauuuauaacuuuuaa

SEQ ID NO: 845164 - RNA, 22 nt, Human
gaggggaaagugugaggcugcg

SEQ ID NO: 845165 - RNA, 22 nt, Human
cuccauugaacauccucucaga

SEQ ID NO: 845166 - RNA, 22 nt, Human
uucugucaaauuugccauaugg

SEQ ID NO: 845167 - RNA, 22 nt, Human
acaaaugucuccucuuuuguua

SEQ ID NO: 845168 - RNA, 21 nt, Human
ggccucugccuugccccacuc

SEQ ID NO: 845169 - RNA, 22 nt, Human
gaacagaagaggcuggugccac

SEQ ID NO: 845170 - RNA, 22 nt, Human
uguguacacaaugauugcagag

SEQ ID NO: 845171 - RNA, 22 nt, Human
cccaggaacagcacagaacagc

SEQ ID NO: 845172 - RNA, 22 nt, Human
augaguugaagcuacaagaggc

SEQ ID NO: 845173 - RNA, 22 nt, Human
agggcagaccacgugcaaggau

SEQ ID NO: 845174 - RNA, 22 nt, Human
aggcuuccucgugccuuagaua

SEQ ID NO: 845175 - RNA, 22 nt, Human
ccagcugacgaugccuggucuc

SEQ ID NO: 845176 - RNA, 22 nt, Human
uggagcccagacacuggcauug

SEQ ID NO: 845177 - RNA, 22 nt, Human
acuccugguuuguguccuggcu

SEQ ID NO: 845178 - RNA, 22 nt, Human
gugucauggaaaauugcaaugg

SEQ ID NO: 845179 - RNA, 22 nt, Human
agagccaggugcugcuguuuga

SEQ ID NO: 845180 - RNA, 22 nt, Human
caguuuuuagauuaguuggugg

SEQ ID NO: 845181 - RNA, 19 nt, Human
gaagaagcuugagaaguag

SEQ ID NO: 845182 - RNA, 22 nt, Human
uuuaacagaugugaaauuuuca

SEQ ID NO: 845183 - RNA, 22 nt, Human
agauuucagguuggggcagaag

SEQ ID NO: 845184 - RNA, 22 nt, Human
cugaggaugguguggucuucuc

SEQ ID NO: 845185 - RNA, 22 nt, Human
gagagugaaggcuucccagcaa

SEQ ID NO: 845186 - RNA, 22 nt, Human
cucucugagugagggacaagcu

SEQ ID NO: 845187 - RNA, 22 nt, Human
uuucacaaguuucaggauucug

SEQ ID NO: 845188 - RNA, 22 nt, Human
aagagcuggcucuugcagcagc

SEQ ID NO: 845189 - RNA, 18 nt, Human
cugcccagagcacuugug

SEQ ID NO: 845190 - RNA, 22 nt, Human
auuucagguaccugugggaucc

SEQ ID NO: 845191 - RNA, 23 nt, Human
gcagauggccccagagugcugcc

SEQ ID NO: 845192 - RNA, 22 nt, Human
gagguacagaguguuccaaugu

SEQ ID NO: 845193 - RNA, 22 nt, Human
auaucaaacgaaguuauuuuaa

SEQ ID NO: 845194 - RNA, 22 nt, Human
cagcuccccucuguggggcagu

SEQ ID NO: 845195 - RNA, 22 nt, Human
uauguacauguuaaagggcaaa

SEQ ID NO: 845196 - RNA, 22 nt, Human
ugcucugguaacucacuuccau

SEQ ID NO: 845197 - RNA, 22 nt, Human
gugggugauguacuggaggcca

SEQ ID NO: 845198 - RNA, 22 nt, Human
uucuaguguccuuggacuugcu

SEQ ID NO: 845199 - RNA, 22 nt, Human
agugaaauuuguuuagauaggu

SEQ ID NO: 845200 - RNA, 22 nt, Human
gccuggagggcucuagagaggc

SEQ ID NO: 845201 - RNA, 22 nt, Human
agagccagcaacucuagcccug

SEQ ID NO: 845202 - RNA, 22 nt, Human
uucucagagcucacuguaguaa

SEQ ID NO: 845203 - RNA, 22 nt, Human
uguggcucucagauccuccaau

SEQ ID NO: 845204 - RNA, 22 nt, Human
ugcauauuguccuugauauuau

SEQ ID NO: 845205 - RNA, 22 nt, Human
uuuccucuucuggcaggcaggg

SEQ ID NO: 845206 - RNA, 22 nt, Human
uaagaacuucggacauguuauc

SEQ ID NO: 845207 - RNA, 22 nt, Human
gcucagggaacuuuuugcaggc

SEQ ID NO: 845208 - RNA, 22 nt, Human
uaauuucuagggacuaaggugc

SEQ ID NO: 845209 - RNA, 22 nt, Human
ucuggcuccaggaccgggcaca

SEQ ID NO: 845210 - RNA, 22 nt, Human
cagccagguaugggcgugcggg

SEQ ID NO: 845211 - RNA, 22 nt, Human
uucaagaucuggguuuucagcu

SEQ ID NO: 845212 - RNA, 22 nt, Human
aguguguccagaaaucuguauu

SEQ ID NO: 845213 - RNA, 22 nt, Human
gagcugcuucugugugccgggu

SEQ ID NO: 845214 - RNA, 22 nt, Human
auuauucuuaugucaucauggc

SEQ ID NO: 845215 - RNA, 22 nt, Human
uuaacacagggggagacaaagu

SEQ ID NO: 845216 - RNA, 22 nt, Human
ugugugaaggagccacuguuca

SEQ ID NO: 845217 - RNA, 22 nt, Human
aaguuucaaauauaaaauuaca

SEQ ID NO: 845218 - RNA, 22 nt, Human
cuggagagggagcccuggcagu

SEQ ID NO: 845219 - RNA, 22 nt, Human
cauuuguaucauauguaucuua

SEQ ID NO: 845220 - RNA, 23 nt, Human
uuuauauuccuaaugucuugagc

SEQ ID NO: 845221 - RNA, 22 nt, Human
gugcuuccaucuagagggucac

SEQ ID NO: 845222 - RNA, 22 nt, Human
agcucuggaauaaugaugugau

SEQ ID NO: 845223 - RNA, 22 nt, Human
ucauagaaugaguuaaugaacu

SEQ ID NO: 845224 - RNA, 22 nt, Human
agggcagcagcggcccaggccu

SEQ ID NO: 845225 - RNA, 22 nt, Human
gggacgggcaguccaagggguc

SEQ ID NO: 845226 - RNA, 22 nt, Human
ugcaaucucggcacuuugggag

SEQ ID NO: 845227 - RNA, 22 nt, Human
uccagccuuucuacucacugag

SEQ ID NO: 845228 - RNA, 22 nt, Human
acuguucauuuguccuguaucu

SEQ ID NO: 845229 - RNA, 22 nt, Human
aagcgccacgagaagcuggacc

SEQ ID NO: 845230 - RNA, 22 nt, Human
cucucugcuguauccuuaggcu

SEQ ID NO: 845231 - RNA, 22 nt, Human
uaggaaauggcucaguuacugc

SEQ ID NO: 845232 - RNA, 22 nt, Human
cagagcugguguuacaagucca

SEQ ID NO: 845233 - RNA, 22 nt, Human
aguucuucauaaccuuacugug

SEQ ID NO: 845234 - RNA, 22 nt, Human
ccagaggcauguucaaagcaau

SEQ ID NO: 845235 - RNA, 22 nt, Human
cagacagaccugcaagggcaca

SEQ ID NO: 845236 - RNA, 22 nt, Human
aggagcugcauggauaccuggu

SEQ ID NO: 845237 - RNA, 22 nt, Human
ucauuauuuuggacuggagugu

SEQ ID NO: 845238 - RNA, 22 nt, Human
ugcagucuccaccuccugggug

SEQ ID NO: 845239 - RNA, 22 nt, Human
caucauaaaauugagauaacug

SEQ ID NO: 845240 - RNA, 22 nt, Human
cucugagagcggucuguggcuu

SEQ ID NO: 845241 - RNA, 22 nt, Human
ugggcagagucguggggaauag

SEQ ID NO: 845242 - RNA, 22 nt, Human
ggccucugaggacagccuuggc

SEQ ID NO: 845243 - RNA, 22 nt, Human
ccaggccuuccaguacgcagaa

SEQ ID NO: 845244 - RNA, 22 nt, Human
aagaaaucugauauuuguuuca

SEQ ID NO: 845245 - RNA, 22 nt, Human
auccaugaucaauuuauuacua

SEQ ID NO: 845246 - RNA, 22 nt, Human
agggcagccugagugcuggccc

SEQ ID NO: 845247 - RNA, 22 nt, Human
agaagcugccuacaugaccagc

SEQ ID NO: 845248 - RNA, 22 nt, Human
aaauuuaagaagugugugcgug

SEQ ID NO: 845249 - RNA, 22 nt, Human
ugcauuguugaccaguugugca

SEQ ID NO: 845250 - RNA, 22 nt, Human
gggcuggucuggcuuagucagg

SEQ ID NO: 845251 - RNA, 22 nt, Human
gaaagagaaccugggccuagau

SEQ ID NO: 845252 - RNA, 22 nt, Human
aaaguccuugcaguuuccucuu

SEQ ID NO: 845253 - RNA, 22 nt, Human
augcaguacagauaauucuaca

SEQ ID NO: 845254 - RNA, 22 nt, Human
ugguccuggggaucugcaguga

SEQ ID NO: 845255 - RNA, 22 nt, Human
aguaugaaaguuaaucaauuua

SEQ ID NO: 845256 - RNA, 22 nt, Human
aggucaaguuuagauagaguua

SEQ ID NO: 845257 - RNA, 22 nt, Human
gaggcagccagagguucucauu

SEQ ID NO: 845258 - RNA, 22 nt, Human
ccagggccaagagaccucgagg

SEQ ID NO: 845259 - RNA, 22 nt, Human
gagccuggauugaagugggugg

SEQ ID NO: 845260 - RNA, 22 nt, Human
acagaacuuccugcuggagugg

SEQ ID NO: 845261 - RNA, 22 nt, Human
ucuguucaugucuuuuuaagug

SEQ ID NO: 845262 - RNA, 22 nt, Human
agaggccagguccagaguuugu

SEQ ID NO: 845263 - RNA, 22 nt, Human
agcaggguauguuagagcugua

SEQ ID NO: 845264 - RNA, 22 nt, Human
ggcagcugcaaaucugcucugu

SEQ ID NO: 845265 - RNA, 22 nt, Human
uuacaguuuaguccaagccaga

SEQ ID NO: 845266 - RNA, 22 nt, Human
ccagccagccuugaucugagua

SEQ ID NO: 845267 - RNA, 22 nt, Human
cuuaaacugaaagcuacaagau

SEQ ID NO: 845268 - RNA, 22 nt, Human
uacauguaggugacauuuuaau

SEQ ID NO: 845269 - RNA, 22 nt, Human
accaggaguaacagugaguggu

SEQ ID NO: 845270 - RNA, 22 nt, Human
uauuuaucgagugucuacuaug

SEQ ID NO: 845271 - RNA, 22 nt, Human
gagggaggggagcuccacccuc

SEQ ID NO: 845272 - RNA, 22 nt, Human
aggagggagcuuaagccaggca

SEQ ID NO: 845273 - RNA, 22 nt, Human
gauuuccauuuucaacuccugc

SEQ ID NO: 845274 - RNA, 22 nt, Human
uauguacacauacacuuguaau

SEQ ID NO: 845275 - RNA, 22 nt, Human
ucaaagucucugcuucuguaac

SEQ ID NO: 845276 - RNA, 22 nt, Human
accugggagucacaccugagaa

SEQ ID NO: 845277 - RNA, 22 nt, Human
uagaacauaagucauucauuug

SEQ ID NO: 845278 - RNA, 22 nt, Human
uggcuggcaaggcuggagucag

SEQ ID NO: 845279 - RNA, 22 nt, Human
ggucccaguugcccaggucagg

SEQ ID NO: 845280 - RNA, 22 nt, Human
uucuuucagaacacaagugauu

SEQ ID NO: 845281 - RNA, 22 nt, Human
ccugggcucaagugauccuccu

SEQ ID NO: 845282 - RNA, 22 nt, Human
aucuaagaguuaacaucaagaa

SEQ ID NO: 845283 - RNA, 22 nt, Human
aagaugauagaucugucaaugu

SEQ ID NO: 845284 - RNA, 22 nt, Human
cacagcagagggagccauugaa

SEQ ID NO: 845285 - RNA, 22 nt, Human
gcuagaucucucauaaauucca

SEQ ID NO: 845286 - RNA, 22 nt, Human
caaagcucaugcucuuagccau

SEQ ID NO: 845287 - RNA, 22 nt, Human
gcagccacagaggagggaugca

SEQ ID NO: 845288 - RNA, 22 nt, Human
gcagagccugacgggauuuuuc

SEQ ID NO: 845289 - RNA, 21 nt, Human
ggccucugucauccugggaag

SEQ ID NO: 845290 - RNA, 22 nt, Human
gagcucauccccaugguccguc

SEQ ID NO: 845291 - RNA, 18 nt, Human
cugcugcaggcacucagg

SEQ ID NO: 845292 - RNA, 22 nt, Human
cugucuccuccacugcauggga

SEQ ID NO: 845293 - RNA, 22 nt, Human
ggcuucaccaggugcaugcaug

SEQ ID NO: 845294 - RNA, 22 nt, Human
gcucugaggcugugaggugcug

SEQ ID NO: 845295 - RNA, 22 nt, Human
agugaaauaugcccauugcugu

SEQ ID NO: 845296 - RNA, 22 nt, Human
ccuggugcuuaccagagcuuuu

SEQ ID NO: 845297 - RNA, 22 nt, Human
agcugagcauuugauccaccuc

SEQ ID NO: 845298 - RNA, 22 nt, Human
cuagggaguggcagagcuggga

SEQ ID NO: 845299 - RNA, 22 nt, Human
acaaacuaccuacagauguuca

SEQ ID NO: 845300 - RNA, 22 nt, Human
aagcagcauaauugcuauuuua

SEQ ID NO: 845301 - RNA, 22 nt, Human
cuggagcugucuucacaggccu

SEQ ID NO: 845302 - RNA, 22 nt, Human
ugcucuggggagcuccucugcg

SEQ ID NO: 845303 - RNA, 22 nt, Human
cccaggagaccugugaaaggac

SEQ ID NO: 845304 - RNA, 22 nt, Human
agucucuuauucccuauugcug

SEQ ID NO: 845305 - RNA, 22 nt, Human
ugacacagaaauuaagcuguca

SEQ ID NO: 845306 - RNA, 22 nt, Human
gagcauuugguuauaguaauuu

SEQ ID NO: 845307 - RNA, 22 nt, Human
cucagagucccuucccucgugg

SEQ ID NO: 845308 - RNA, 22 nt, Human
ggcucuggagacauguggagag

SEQ ID NO: 845309 - RNA, 22 nt, Human
uuucuuauauucugucauuguu

SEQ ID NO: 845310 - RNA, 22 nt, Human
agaauccucuucaguaaauucu

SEQ ID NO: 845311 - RNA, 22 nt, Human
caccagcagaagacugagggug

SEQ ID NO: 845312 - RNA, 22 nt, Human
cgaggcaggcaggcggaggaua

SEQ ID NO: 845313 - RNA, 22 nt, Human
gcagauggaaagugcuugaggg

SEQ ID NO: 845314 - RNA, 22 nt, Human
uagggcuauaagagaauaagac

SEQ ID NO: 845315 - RNA, 21 nt, Human
aauaaaacaguuggugucaau

SEQ ID NO: 845316 - RNA, 22 nt, Human
uugauuaaucccaugugaguag

SEQ ID NO: 845317 - RNA, 22 nt, Human
cugcccaggaaggagaggaugg

SEQ ID NO: 845318 - RNA, 22 nt, Human
uggagccaugccuggccuuucc

SEQ ID NO: 845319 - RNA, 22 nt, Human
ggcaggaggaagaguuagcacc

SEQ ID NO: 845320 - RNA, 22 nt, Human
aggcagagcugauguucuguga

SEQ ID NO: 845321 - RNA, 22 nt, Human
aggcugggaagguaaaguugua

SEQ ID NO: 845322 - RNA, 22 nt, Human
uaacagaauagcagaaacagaa

SEQ ID NO: 845323 - RNA, 20 nt, Human
caccacagaauuggggacag

SEQ ID NO: 845324 - RNA, 22 nt, Human
acaacuuugacccuuguucuua

SEQ ID NO: 845325 - RNA, 22 nt, Human
cccuccccacaaagcuucacac

SEQ ID NO: 845326 - RNA, 22 nt, Human
acacaaugcauauuuuuccaga

SEQ ID NO: 845327 - RNA, 22 nt, Human
ccagccaguccagcauuggugu

SEQ ID NO: 845328 - RNA, 22 nt, Human
gcuggagauaguaggauccaua

SEQ ID NO: 845329 - RNA, 21 nt, Human
ugcugaugucagagaagcaag

SEQ ID NO: 845330 - RNA, 22 nt, Human
caggguccaucuuucaucacug

SEQ ID NO: 845331 - RNA, 22 nt, Human
ugacucuguaccugucugccuu

SEQ ID NO: 845332 - RNA, 22 nt, Human
cugucugcuagaacaucuauac

SEQ ID NO: 845333 - RNA, 22 nt, Human
caggccugucugcacaugaggc

SEQ ID NO: 845334 - RNA, 22 nt, Human
caauuucaagauucuguucuuu

SEQ ID NO: 845335 - RNA, 22 nt, Human
cuggcugggagcgagcugcuca

SEQ ID NO: 845336 - RNA, 22 nt, Human
guggaauguccuugaucauaag

SEQ ID NO: 845337 - RNA, 22 nt, Human
gcugguuaggugagggugcgcc

SEQ ID NO: 845338 - RNA, 22 nt, Human
ucugggcacugcugagccugua

SEQ ID NO: 845339 - RNA, 20 nt, Human
augugaaagaucaguugucu

SEQ ID NO: 845340 - RNA, 22 nt, Human
uugacagcaaagauugugccua

SEQ ID NO: 845341 - RNA, 22 nt, Human
ucugaggcuauguucaggcuaa

SEQ ID NO: 845342 - RNA, 20 nt, Human
ucauugcacauaauggaagc

SEQ ID NO: 845343 - RNA, 22 nt, Human
uuugaaucugauauggcagcau

SEQ ID NO: 845344 - RNA, 22 nt, Human
uaaguccuagaugauucacaga

SEQ ID NO: 845345 - RNA, 22 nt, Human
caggaggaagaacucugcaaca

SEQ ID NO: 845346 - RNA, 22 nt, Human
acagggcaugugcaagagacau

SEQ ID NO: 845347 - RNA, 22 nt, Human
ugucccagggaaggcccagcac

SEQ ID NO: 845348 - RNA, 23 nt, Human
cauaaaauauuaguaugguagca

SEQ ID NO: 845349 - RNA, 22 nt, Human
ucauucuccucuggaaaaggca

SEQ ID NO: 845350 - RNA, 22 nt, Human
ggagggagcauccccuugcuga

SEQ ID NO: 845351 - RNA, 22 nt, Human
guggagcccugguagggacccc

SEQ ID NO: 845352 - RNA, 22 nt, Human
ccucuggcaacuucacagccca

SEQ ID NO: 845353 - RNA, 22 nt, Human
gaucuguuauaaucucuuuuau

SEQ ID NO: 845354 - RNA, 22 nt, Human
caaggaaaaagcgagcucgggg

SEQ ID NO: 845355 - RNA, 22 nt, Human
ucaggcaggcagagggcaaaug

SEQ ID NO: 845356 - RNA, 22 nt, Human
uccuucaaagcuccuagugagc

SEQ ID NO: 845357 - RNA, 22 nt, Human
gguugccggggcaggacuggaa

SEQ ID NO: 845358 - RNA, 22 nt, Human
ugcuuggccuacuuguccuuug

SEQ ID NO: 845359 - RNA, 22 nt, Human
aaguccauucuuccagccagcu

SEQ ID NO: 845360 - RNA, 22 nt, Human
ugcaccauacccauuccccucu

SEQ ID NO: 845361 - RNA, 22 nt, Human
uggccuuguguuuuagagaaag

SEQ ID NO: 845362 - RNA, 22 nt, Human
uggcagcauuuuuuccagaaca

SEQ ID NO: 845363 - RNA, 22 nt, Human
uaaguucauaagcuuauucuua

SEQ ID NO: 845364 - RNA, 22 nt, Human
ugugugucagagucuccauggu

SEQ ID NO: 845365 - RNA, 21 nt, Human
gagauuuagaaggaucaauuu

SEQ ID NO: 845366 - RNA, 22 nt, Human
cuugcuucauuagugucuuagu

SEQ ID NO: 845367 - RNA, 17 nt, Human
cccacggaggugugaaa

SEQ ID NO: 845368 - RNA, 22 nt, Human
ggcagcucugcuccacaugagu

SEQ ID NO: 845369 - RNA, 23 nt, Human
gggcugcuccaggccaaggcugg

SEQ ID NO: 845370 - RNA, 22 nt, Human
aagaacauguuaaaagauucac

SEQ ID NO: 845371 - RNA, 22 nt, Human
cuuuuauuuugaauuaagggcu

SEQ ID NO: 845372 - RNA, 22 nt, Human
gagggaauggugugcaagaggu

SEQ ID NO: 845373 - RNA, 22 nt, Human
acacagccgugaaucugcuucu

SEQ ID NO: 845374 - RNA, 22 nt, Human
aagguucuaagggaagccaugc

SEQ ID NO: 845375 - RNA, 22 nt, Human
auuauguagguuaggugguugu

SEQ ID NO: 845376 - RNA, 22 nt, Human
agucauaauuauaaacaucagu

SEQ ID NO: 845377 - RNA, 17 nt, Human
cugaggcccagggccca

SEQ ID NO: 845378 - RNA, 20 nt, Human
cagaccugcacccacuucga

SEQ ID NO: 845379 - RNA, 22 nt, Human
aagacuuucaaguaugcaugca

SEQ ID NO: 845380 - RNA, 22 nt, Human
aauuaugagguagauaucacau

SEQ ID NO: 845381 - RNA, 22 nt, Human
guaagggauuugaacauagguu

SEQ ID NO: 845382 - RNA, 18 nt, Human
ucucagaggccauccuag

SEQ ID NO: 845383 - RNA, 22 nt, Human
agccugagugcuuaggacuguu

SEQ ID NO: 845384 - RNA, 22 nt, Human
aggcugggaaaccugaaguugu

SEQ ID NO: 845385 - RNA, 22 nt, Human
uucaguuucagucuugcaaaaa

SEQ ID NO: 845386 - RNA, 22 nt, Human
gaggugagaagggggucagaug

SEQ ID NO: 845387 - RNA, 22 nt, Human
cuuaagaauauugaaguugugg

SEQ ID NO: 845388 - RNA, 22 nt, Human
ggcucaggaugagccuucucau

SEQ ID NO: 845389 - RNA, 22 nt, Human
ggagcugggacccugucaucug

SEQ ID NO: 845390 - RNA, 22 nt, Human
gcaggggcaggagaucucaggc

SEQ ID NO: 845391 - RNA, 22 nt, Human
aucagcaagacuaggggaauac

SEQ ID NO: 845392 - RNA, 21 nt, Human
ccugcugugaucuuagugagu

SEQ ID NO: 845393 - RNA, 22 nt, Human
uaggcagcuuagguuagaagug

SEQ ID NO: 845394 - RNA, 22 nt, Human
cagagcugacccaaggauugaa

SEQ ID NO: 845395 - RNA, 22 nt, Human
uuuguagaggguaauugacaga

SEQ ID NO: 845396 - RNA, 22 nt, Human
acucagaaugacugaugcugug

SEQ ID NO: 845397 - RNA, 21 nt, Human
cagagguggccugaccucuga

SEQ ID NO: 845398 - RNA, 22 nt, Human
ucagggcaaaagggaaaccauu

SEQ ID NO: 845399 - RNA, 23 nt, Human
caugggagugagaaugccagcuc

SEQ ID NO: 845400 - RNA, 22 nt, Human
accaucagucacauguagagaa

SEQ ID NO: 845401 - RNA, 22 nt, Human
uggcuggcaguaggcuaguggc

SEQ ID NO: 845402 - RNA, 21 nt, Human
aggggacagaguagcuccagg

SEQ ID NO: 845403 - RNA, 22 nt, Human
cauggagauaaacugaaauauu

SEQ ID NO: 845404 - RNA, 22 nt, Human
gagcugugagggacacauugcu

SEQ ID NO: 845405 - RNA, 22 nt, Human
uucucagagcacugcugacaaa

SEQ ID NO: 845406 - RNA, 22 nt, Human
ccugcuguucuguuuagugaac

SEQ ID NO: 845407 - RNA, 22 nt, Human
ucugucacuauuggccagaaca

SEQ ID NO: 845408 - RNA, 22 nt, Human
cccucugccucugaguaggaca

SEQ ID NO: 845409 - RNA, 22 nt, Human
ccuagagcucugcuuuaucuaa

SEQ ID NO: 845410 - RNA, 22 nt, Human
gagcagugagugaauguugccu

SEQ ID NO: 845411 - RNA, 22 nt, Human
ggcucaggagaggggcuaaaag

SEQ ID NO: 845412 - RNA, 22 nt, Human
gaggcugcggggaggagccugc

SEQ ID NO: 845413 - RNA, 22 nt, Human
uuauagaacagccuccucuaga

SEQ ID NO: 845414 - RNA, 22 nt, Human
ucuuuaaucauaaccaagaugg

SEQ ID NO: 845415 - RNA, 22 nt, Human
ugaggcagauauuuauuggguu

SEQ ID NO: 845416 - RNA, 22 nt, Human
auacuuacuuuucuucagacua

SEQ ID NO: 845417 - RNA, 18 nt, Human
accugccuguucuucucu

SEQ ID NO: 845418 - RNA, 22 nt, Human
agugcuguuagguuaauauagu

SEQ ID NO: 845419 - RNA, 22 nt, Human
aaaugcacaaaguaaguguaau

SEQ ID NO: 845420 - RNA, 22 nt, Human
uccaggagaaggccauccagcg

SEQ ID NO: 845421 - RNA, 22 nt, Human
uggcacugggacagaugcucuc

SEQ ID NO: 845422 - RNA, 21 nt, Human
aguucauacugaguaacaaaa

SEQ ID NO: 845423 - RNA, 19 nt, Human
cagaguacaccagauagga

SEQ ID NO: 845424 - RNA, 22 nt, Human
auucugucuuuuuauacaucua

SEQ ID NO: 845425 - RNA, 22 nt, Human
gaguccaguuguucacagaggc

SEQ ID NO: 845426 - RNA, 22 nt, Human
cagcugagcucccaggccauca

SEQ ID NO: 845427 - RNA, 22 nt, Human
aggcagcaugggcccagagucc

SEQ ID NO: 845428 - RNA, 21 nt, Human
agaauucuuaaguauucuaau

SEQ ID NO: 845429 - RNA, 22 nt, Human
cuuucaacuacauacaggcgau

SEQ ID NO: 845430 - RNA, 22 nt, Human
ggcagugacuguucagacgucc

SEQ ID NO: 845431 - RNA, 22 nt, Human
ucugagagucucugaggcagau

SEQ ID NO: 845432 - RNA, 22 nt, Human
ugaaugaaugaauuaauagagu

SEQ ID NO: 845433 - RNA, 22 nt, Human
auguuuccauuuucuuguauca

SEQ ID NO: 845434 - RNA, 22 nt, Human
agagugaaaagcuagagcagua

SEQ ID NO: 845435 - RNA, 22 nt, Human
auucaagagcccauguuuccug

SEQ ID NO: 845436 - RNA, 22 nt, Human
ggcaucuccaaaacaugaacuc

SEQ ID NO: 845437 - RNA, 22 nt, Human
auacauaauuacuuccgauguu

SEQ ID NO: 845438 - RNA, 22 nt, Human
ugcaggcuguaaucugaggcua

SEQ ID NO: 845439 - RNA, 22 nt, Human
cucaggauuuaaaggggcacuc

SEQ ID NO: 845440 - RNA, 22 nt, Human
uaacagaauccuguuauugcca

SEQ ID NO: 845441 - RNA, 22 nt, Human
uguauuagagcaguagaauuau

SEQ ID NO: 845442 - RNA, 22 nt, Human
gugucccaggagaggagacaau

SEQ ID NO: 845443 - RNA, 22 nt, Human
uucuucaauuauuggaaagaaa

SEQ ID NO: 845444 - RNA, 22 nt, Human
agguacaguagacagacaguua

SEQ ID NO: 845445 - RNA, 22 nt, Human
uguaacaaaauaccuuggauug

SEQ ID NO: 845446 - RNA, 23 nt, Human
gaagcagaugucugaguaggcag

SEQ ID NO: 845447 - RNA, 22 nt, Human
gcagcugcuguggcaucaagcu

SEQ ID NO: 845448 - RNA, 22 nt, Human
ggaggccaaggugggcggauca

SEQ ID NO: 845449 - RNA, 22 nt, Human
uaucuaaauggaauauuccaga

SEQ ID NO: 845450 - RNA, 22 nt, Human
agcagggcuugccgcuuguccu

SEQ ID NO: 845451 - RNA, 22 nt, Human
ugcagugggccggaggccaggg

SEQ ID NO: 845452 - RNA, 22 nt, Human
accauuuaauaaguauuuccau

SEQ ID NO: 845453 - RNA, 22 nt, Human
cagcauggggaucacuguaggc

SEQ ID NO: 845454 - RNA, 22 nt, Human
accagagaaaacacagcaggcu

SEQ ID NO: 845455 - RNA, 22 nt, Human
ggucccaggaagugcggcggcg

SEQ ID NO: 845456 - RNA, 21 nt, Human
ccugccaggaaacugaguguc

SEQ ID NO: 845457 - RNA, 21 nt, Human
ugaaacaaucagacagagucu

SEQ ID NO: 845458 - RNA, 22 nt, Human
aguggcagagcugugucuugaa

SEQ ID NO: 845459 - RNA, 22 nt, Human
ccucagagguguggcaucucug

SEQ ID NO: 845460 - RNA, 20 nt, Human
gcaaggcacagugaggaggg

SEQ ID NO: 845461 - RNA, 22 nt, Human
ugccugaugcaggaguaucaga

SEQ ID NO: 845462 - RNA, 22 nt, Human
agggaaauuaaugugagcaaug

SEQ ID NO: 845463 - RNA, 22 nt, Human
agaaacuucagcuauucuuuug

SEQ ID NO: 845464 - RNA, 22 nt, Human
uauuucuaagagauaucuguac

SEQ ID NO: 845465 - RNA, 22 nt, Human
cucucugaggcaggccuguggg

SEQ ID NO: 845466 - RNA, 22 nt, Human
gcugccucccccauggcuggaa

SEQ ID NO: 845467 - RNA, 22 nt, Human
gcuggcagguccaagauagagc

SEQ ID NO: 845468 - RNA, 22 nt, Human
auaucacaaacaagucuguacu

SEQ ID NO: 845469 - RNA, 22 nt, Human
cuucuucauguauugauagucu

SEQ ID NO: 845470 - RNA, 22 nt, Human
ggagaaugauauauagcucagu

SEQ ID NO: 845471 - RNA, 22 nt, Human
ggucagggggaucugugaggua

SEQ ID NO: 845472 - RNA, 22 nt, Human
gcuggcuuugcacugggugcau

SEQ ID NO: 845473 - RNA, 23 nt, Human
uggagcugacagucagagggagg

SEQ ID NO: 845474 - RNA, 22 nt, Human
cuuguacaggaauccaugguau

SEQ ID NO: 845475 - RNA, 22 nt, Human
acagggcauuuccucuaugugu

SEQ ID NO: 845476 - RNA, 22 nt, Human
agcuagaauauugaucugaaau

SEQ ID NO: 845477 - RNA, 22 nt, Human
gcccucagaguuccccacagug

SEQ ID NO: 845478 - RNA, 22 nt, Human
agccagugcaacagcagugaag

SEQ ID NO: 845479 - RNA, 22 nt, Human
cuggcaggucucgcugacgugu

SEQ ID NO: 845480 - RNA, 22 nt, Human
cagcagcccacgcgugcugucc

SEQ ID NO: 845481 - RNA, 22 nt, Human
gccucugcugacaagauggaca

SEQ ID NO: 845482 - RNA, 22 nt, Human
cucugaagggagggccaagccc

SEQ ID NO: 845483 - RNA, 22 nt, Human
cccagaggugcuucagaggugc

SEQ ID NO: 845484 - RNA, 21 nt, Human
ggcccugguuacgccuccucu

SEQ ID NO: 845485 - RNA, 23 nt, Human
cuccucguaacucuguggugggu

SEQ ID NO: 845486 - RNA, 21 nt, Human
ccuucucuugcuucagcuuca

SEQ ID NO: 845487 - RNA, 22 nt, Human
gauuucaauccagcuuucuucu

SEQ ID NO: 845488 - RNA, 23 nt, Human
ucagaaugcacugaauuuacccu

SEQ ID NO: 845489 - RNA, 23 nt, Human
aguacaauaaguauaauucuuuc

SEQ ID NO: 845490 - RNA, 22 nt, Human
cuacauuuuucaccgagccucu

SEQ ID NO: 845491 - RNA, 22 nt, Human
uucaugugauaaaugugugacu

SEQ ID NO: 845492 - RNA, 22 nt, Human
agagggauaauauguauuguaa

SEQ ID NO: 845493 - RNA, 18 nt, Human
acauuucuaugcuucugg

SEQ ID NO: 845494 - RNA, 22 nt, Human
agagcugcaccuaugcagaccu

SEQ ID NO: 845495 - RNA, 22 nt, Human
auugaaucugcacuaguauuuu

SEQ ID NO: 845496 - RNA, 22 nt, Human
auuugcuugugcuaugaaaguu

SEQ ID NO: 845497 - RNA, 22 nt, Human
auuuuuccaauuaggauaaaga

SEQ ID NO: 845498 - RNA, 22 nt, Human
uacuaaacaucuggcauuaaau

SEQ ID NO: 845499 - RNA, 22 nt, Human
cuggugagacgguugacaggag

SEQ ID NO: 845500 - RNA, 22 nt, Human
ggcagcuuguccuucaggagag

SEQ ID NO: 845501 - RNA, 22 nt, Human
ucagcaguguaguuuaucauuc

SEQ ID NO: 845502 - RNA, 22 nt, Human
ccugucuggccaccagggcgau

SEQ ID NO: 845503 - RNA, 22 nt, Human
ccagauaaggcuuuuuaaaagc

SEQ ID NO: 845504 - RNA, 22 nt, Human
cugcucuggucucuucauguuu

SEQ ID NO: 845505 - RNA, 22 nt, Human
gcugagcuagcuaucucagucu

SEQ ID NO: 845506 - RNA, 22 nt, Human
cucccagggucuaggcugcugg

SEQ ID NO: 845507 - RNA, 22 nt, Human
uauuuugacuauuaaaccaaca

SEQ ID NO: 845508 - RNA, 22 nt, Human
ggcugcagagcugggugggccu

SEQ ID NO: 845509 - RNA, 22 nt, Human
cagucuuuguucccauuacuga

SEQ ID NO: 845510 - RNA, 22 nt, Human
cacccagccuucacacaggagu

SEQ ID NO: 845511 - RNA, 22 nt, Human
aggccagcucacccuggcuccu

SEQ ID NO: 845512 - RNA, 22 nt, Human
ucugggcugggagcguguggac

SEQ ID NO: 845513 - RNA, 22 nt, Human
ugcugucccuaagucucuucaa

SEQ ID NO: 845514 - RNA, 19 nt, Human
uggcucugucgaaggcaca

SEQ ID NO: 845515 - RNA, 22 nt, Human
uuguaaauaguaguaagaugcc

SEQ ID NO: 845516 - RNA, 22 nt, Human
uucauacuguguuuccaaguuu

SEQ ID NO: 845517 - RNA, 22 nt, Human
aucaaaguaggcauauguuuuu

SEQ ID NO: 845518 - RNA, 22 nt, Human
agcaauaugacauugcuacauc

SEQ ID NO: 845519 - RNA, 22 nt, Human
aauguaugggugagaaaguuga

SEQ ID NO: 845520 - RNA, 22 nt, Human
cacugggcguguccugggugag

SEQ ID NO: 845521 - RNA, 22 nt, Human
aagaguuuucuauaaucuuggc

SEQ ID NO: 845522 - RNA, 22 nt, Human
uagcucuucaaucacugucucc

SEQ ID NO: 845523 - RNA, 20 nt, Human
aucugcuugccuguccucgg

SEQ ID NO: 845524 - RNA, 22 nt, Human
ugccugggccucugaggaaggc

SEQ ID NO: 845525 - RNA, 22 nt, Human
uggcucagaugcucuuccagug

SEQ ID NO: 845526 - RNA, 22 nt, Human
cuggcucccguuguccuugaag

SEQ ID NO: 845527 - RNA, 22 nt, Human
aagacauuacuggaaucugacu

SEQ ID NO: 845528 - RNA, 22 nt, Human
ucaggagacauucuuaaaguag

SEQ ID NO: 845529 - RNA, 22 nt, Human
cccugcagaaccacagacaaac

SEQ ID NO: 845530 - RNA, 19 nt, Human
ccuggaggugaagguucuc

SEQ ID NO: 845531 - RNA, 22 nt, Human
ggauucagugucuguuaauagu

SEQ ID NO: 845532 - RNA, 22 nt, Human
cuggagaggccccaagauauuu

SEQ ID NO: 845533 - RNA, 22 nt, Human
auucuuggagcagucaaagaag

SEQ ID NO: 845534 - RNA, 22 nt, Human
ucccuggggauguuggccugcc

SEQ ID NO: 845535 - RNA, 22 nt, Human
gaaggaaaucugugauuuaugc

SEQ ID NO: 845536 - RNA, 22 nt, Human
uccagggguaccggccaggcag

SEQ ID NO: 845537 - RNA, 22 nt, Human
gugcagugacccuggagagcug

SEQ ID NO: 845538 - RNA, 22 nt, Human
ugcuuauuuauagucaauagag

SEQ ID NO: 845539 - RNA, 22 nt, Human
uuuggaauguaguuuaaucauc

SEQ ID NO: 845540 - RNA, 22 nt, Human
cagaggcucuuccucacugccc

SEQ ID NO: 845541 - RNA, 22 nt, Human
caauagcagcuucugaaugcaa

SEQ ID NO: 845542 - RNA, 22 nt, Human
aggcagguuggugagaagacug

SEQ ID NO: 845543 - RNA, 22 nt, Human
uggcucaguaaucgagucuccu

SEQ ID NO: 845544 - RNA, 22 nt, Human
ucaggagacaaagggugcggag

SEQ ID NO: 845545 - RNA, 22 nt, Human
ggagccuugggcgcucucccau

SEQ ID NO: 845546 - RNA, 22 nt, Human
ccuuuggguucaaucucggucu

SEQ ID NO: 845547 - RNA, 22 nt, Human
agcagccauagauagcaugcaa

SEQ ID NO: 845548 - RNA, 22 nt, Human
cuggagccauguauagccuaug

SEQ ID NO: 845549 - RNA, 22 nt, Human
gccuggaguuguggugaagcca

SEQ ID NO: 845550 - RNA, 22 nt, Human
caaauguaaauucuuuugaagc

SEQ ID NO: 845551 - RNA, 22 nt, Human
cugcugugccuuaaaaugcaag

SEQ ID NO: 845552 - RNA, 22 nt, Human
uaggaaaaauacagaauuauau

SEQ ID NO: 845553 - RNA, 22 nt, Human
uaacacaugguucugucaggaa

SEQ ID NO: 845554 - RNA, 22 nt, Human
aaauuucaagcaaaguagcuau

SEQ ID NO: 845555 - RNA, 22 nt, Human
cugagccagagggagucggguc

SEQ ID NO: 845556 - RNA, 22 nt, Human
cuguaauucacuagggucagcg

SEQ ID NO: 845557 - RNA, 22 nt, Human
caagaaucagaccugucagggu

SEQ ID NO: 845558 - RNA, 22 nt, Human
uccuggagggaggcggugcuac

SEQ ID NO: 845559 - RNA, 22 nt, Human
caggcugucugaauggaggccc

SEQ ID NO: 845560 - RNA, 22 nt, Human
uuugggaacucuaucauggaaa

SEQ ID NO: 845561 - RNA, 22 nt, Human
uggaaggagacugggaagugug

SEQ ID NO: 845562 - RNA, 22 nt, Human
agauaacuuuuggguauucaug

SEQ ID NO: 845563 - RNA, 22 nt, Human
cgccugggaguccacaccugcu

SEQ ID NO: 845564 - RNA, 22 nt, Human
uugcuauuuugagagucauagu

SEQ ID NO: 845565 - RNA, 22 nt, Human
auuuggaaacaauuauauucuu

SEQ ID NO: 845566 - RNA, 22 nt, Human
ggcccagcacagugcuuggggg

SEQ ID NO: 845567 - RNA, 22 nt, Human
ugcugcucaaugagaugccauc

SEQ ID NO: 845568 - RNA, 22 nt, Human
gcugucaggccaugugggccuu

SEQ ID NO: 845569 - RNA, 22 nt, Human
auccuuagguggugcaucaggg

SEQ ID NO: 845570 - RNA, 22 nt, Human
gcugcccagacauugaaucagg

SEQ ID NO: 845571 - RNA, 21 nt, Human
gccaccccuggcacaggugcu

SEQ ID NO: 845572 - RNA, 22 nt, Human
ucauccaguaccauggaaggca

SEQ ID NO: 845573 - RNA, 22 nt, Human
cacaugcauaaggauaauuacu

SEQ ID NO: 845574 - RNA, 22 nt, Human
aggcagugcugugcccugaacc

SEQ ID NO: 845575 - RNA, 22 nt, Human
cuagaaaugcucaagagaaagu

SEQ ID NO: 845576 - RNA, 22 nt, Human
gggcagaggggcgcuucccucu

SEQ ID NO: 845577 - RNA, 21 nt, Human
aaauguguuccauaaugcuuu

SEQ ID NO: 845578 - RNA, 22 nt, Human
agaucauaugaaaaauuucaag

SEQ ID NO: 845579 - RNA, 22 nt, Human
uuucugugguggguaguucaga

SEQ ID NO: 845580 - RNA, 22 nt, Human
cuucuggggauggagcccagaa

SEQ ID NO: 845581 - RNA, 22 nt, Human
cuacuuuaauuuucugcagaga

SEQ ID NO: 845582 - RNA, 22 nt, Human
gccaggcauuuguuaggugcug

SEQ ID NO: 845583 - RNA, 22 nt, Human
gugaccaucagagaauaacaaa

SEQ ID NO: 845584 - RNA, 22 nt, Human
accagagcgcucaagccuuccc

SEQ ID NO: 845585 - RNA, 22 nt, Human
caaaggcaggcccccugugcag

SEQ ID NO: 845586 - RNA, 22 nt, Human
cuucuucaguugcauguauugg

SEQ ID NO: 845587 - RNA, 22 nt, Human
agcccugggaggccagcuugua

SEQ ID NO: 845588 - RNA, 22 nt, Human
ccugauggagcccugcugcaug

SEQ ID NO: 845589 - RNA, 22 nt, Human
gggauggggggaagcguccaug

SEQ ID NO: 845590 - RNA, 22 nt, Human
acaggcugcugagccauuugcu

SEQ ID NO: 845591 - RNA, 22 nt, Human
acucacauuucaucaggccaag

SEQ ID NO: 845592 - RNA, 22 nt, Human
cagacacagcaauucuguguug

SEQ ID NO: 845593 - RNA, 22 nt, Human
cagguggcaugacugccuacaa

SEQ ID NO: 845594 - RNA, 22 nt, Human
guuagaauaaaaggucagagag

SEQ ID NO: 845595 - RNA, 22 nt, Human
caguccuuagauuuuacugcca

SEQ ID NO: 845596 - RNA, 22 nt, Human
ccaggcugggcggggaaccugg

SEQ ID NO: 845597 - RNA, 22 nt, Human
gugagggguggcugagcaguuu

SEQ ID NO: 845598 - RNA, 23 nt, Human
gccaggcuccggucuguggccac

SEQ ID NO: 845599 - RNA, 22 nt, Human
uuucaaaccuacuuguauguuu

SEQ ID NO: 845600 - RNA, 22 nt, Human
ugggccuguugccugaguccau

SEQ ID NO: 845601 - RNA, 22 nt, Human
uuuaggcagcagugaggaugaa

SEQ ID NO: 845602 - RNA, 22 nt, Human
acugcuuacccggccugacuuc

SEQ ID NO: 845603 - RNA, 22 nt, Human
ugcaguggaagagguggagauc

SEQ ID NO: 845604 - RNA, 22 nt, Human
uacaaaugaguuguaugaacca

SEQ ID NO: 845605 - RNA, 22 nt, Human
guaaugaaugaaagaaacuggg

SEQ ID NO: 845606 - RNA, 20 nt, Human
agcugccccugggcacugcc

SEQ ID NO: 845607 - RNA, 22 nt, Human
cugagauggaguuucgcucuuc

SEQ ID NO: 845608 - RNA, 22 nt, Human
cuucugggcauucagcugcaca

SEQ ID NO: 845609 - RNA, 22 nt, Human
auaaaaguuuccaaucaugccu

SEQ ID NO: 845610 - RNA, 22 nt, Human
augcuuaaugaggguauauaug

SEQ ID NO: 845611 - RNA, 22 nt, Human
uuuaaauuuagaagaaacacug

SEQ ID NO: 845612 - RNA, 22 nt, Human
caggaaaaaugccaggagucag

SEQ ID NO: 845613 - RNA, 22 nt, Human
gggcugggauggcuugaagauu

SEQ ID NO: 845614 - RNA, 22 nt, Human
uauuuuguuaauaauccagucc

SEQ ID NO: 845615 - RNA, 22 nt, Human
accuggccauccagcuggcauc

SEQ ID NO: 845616 - RNA, 21 nt, Human
gagcugggcgaggcuccgggg

SEQ ID NO: 845617 - RNA, 22 nt, Human
caaguccucgcuucuagcugug

SEQ ID NO: 845618 - RNA, 22 nt, Human
ucauuugugugagugauuugac

SEQ ID NO: 845619 - RNA, 22 nt, Human
gcucucagguacaaagcugugu

SEQ ID NO: 845620 - RNA, 22 nt, Human
cauggccucaaaggacugcaga

SEQ ID NO: 845621 - RNA, 22 nt, Human
ugugccuucucaguccugcuca

SEQ ID NO: 845622 - RNA, 22 nt, Human
guuuaagaaaauucauguuguu

SEQ ID NO: 845623 - RNA, 22 nt, Human
ccaggagaagcaucugagugua

SEQ ID NO: 845624 - RNA, 22 nt, Human
cacagaauaaauugguaucaga

SEQ ID NO: 845625 - RNA, 22 nt, Human
ggcuuggaaauugcaggacaca

SEQ ID NO: 845626 - RNA, 22 nt, Human
gccugaaguuucaugccucuau

SEQ ID NO: 845627 - RNA, 19 nt, Human
gcuccugggccucacucau

SEQ ID NO: 845628 - RNA, 18 nt, Human
ugacagaaccuggagccu

SEQ ID NO: 845629 - RNA, 22 nt, Human
aaugaaacuguauauagacugu

SEQ ID NO: 845630 - RNA, 22 nt, Human
ugcuggguuaccuaagccuaaa

SEQ ID NO: 845631 - RNA, 22 nt, Human
ccauggcucuagagauugaaaa

SEQ ID NO: 845632 - RNA, 22 nt, Human
caaagccucugauuucacuugu

SEQ ID NO: 845633 - RNA, 22 nt, Human
gccuggagggauagaaugcaag

SEQ ID NO: 845634 - RNA, 22 nt, Human
cuggauuugccuauggugcuuu

SEQ ID NO: 845635 - RNA, 22 nt, Human
ggcaccuggauguagcagugaa

SEQ ID NO: 845636 - RNA, 22 nt, Human
uuacacaacaucuguauuauua

SEQ ID NO: 845637 - RNA, 22 nt, Human
cagcagagcugggcuuugaauu

SEQ ID NO: 845638 - RNA, 22 nt, Human
uaaaugcagcaguuucuguucu

SEQ ID NO: 845639 - RNA, 22 nt, Human
caauuucauggauaaaagaugu

SEQ ID NO: 845640 - RNA, 17 nt, Human
uccauacaauucucucu

SEQ ID NO: 845641 - RNA, 22 nt, Human
cuggcucuaucuccaaggcugg

SEQ ID NO: 845642 - RNA, 22 nt, Human
ggauccuucuuugaccucacag

SEQ ID NO: 845643 - RNA, 22 nt, Human
uggacaggaucugagacugaga

SEQ ID NO: 845644 - RNA, 22 nt, Human
ucccagagauuuccucuccuuc

SEQ ID NO: 845645 - RNA, 22 nt, Human
ugaggcaguugagcuuccugag

SEQ ID NO: 845646 - RNA, 22 nt, Human
caaagccaggcuuucuaaugua

SEQ ID NO: 845647 - RNA, 22 nt, Human
aacacuuugggcauggccuucc

SEQ ID NO: 845648 - RNA, 22 nt, Human
uagaaauguuagauguauugag

SEQ ID NO: 845649 - RNA, 21 nt, Human
ucuuguccuugcucucccacu

SEQ ID NO: 845650 - RNA, 22 nt, Human
gcagagcugucuaagucacuuc

SEQ ID NO: 845651 - RNA, 20 nt, Human
uccagccacuuccgcugguc

SEQ ID NO: 845652 - RNA, 22 nt, Human
uguuuaaucuauaaaauggaga

SEQ ID NO: 845653 - RNA, 22 nt, Human
aggaugagaagauuggaaucuu

SEQ ID NO: 845654 - RNA, 22 nt, Human
gcucagagggaacaaggggcug

SEQ ID NO: 845655 - RNA, 22 nt, Human
gggauggcuuuguggcugacuc

SEQ ID NO: 845656 - RNA, 22 nt, Human
agguauaagucucauuucuguu

SEQ ID NO: 845657 - RNA, 22 nt, Human
agcccccaaaagugcuuaugau

SEQ ID NO: 845658 - RNA, 22 nt, Human
caggguggaaaagcuaguugga

SEQ ID NO: 845659 - RNA, 22 nt, Human
cagaucuguaguaaaagaucuc

SEQ ID NO: 845660 - RNA, 22 nt, Human
gcacccagggacuuggcuggcc

SEQ ID NO: 845661 - RNA, 22 nt, Human
ucagaaaugaucguuauucauu

SEQ ID NO: 845662 - RNA, 22 nt, Human
uggcucuggauuaaucuaggaa

SEQ ID NO: 845663 - RNA, 22 nt, Human
uuucaacuugaagaauugauac

SEQ ID NO: 845664 - RNA, 22 nt, Human
aggagcugucagagugccagag

SEQ ID NO: 845665 - RNA, 21 nt, Human
gcacagggacagaucaucaca

SEQ ID NO: 845666 - RNA, 22 nt, Human
cagucccagacccagaaggugg

SEQ ID NO: 845667 - RNA, 22 nt, Human
cuggcagcauggagccugugcu

SEQ ID NO: 845668 - RNA, 22 nt, Human
guggcucuccauugacauggaa

SEQ ID NO: 845669 - RNA, 22 nt, Human
ucuucaauuagauuuaccaauu

SEQ ID NO: 845670 - RNA, 22 nt, Human
caggggccggcuguccgugccc

SEQ ID NO: 845671 - RNA, 22 nt, Human
ugucacauugaauaugauuuau

SEQ ID NO: 845672 - RNA, 23 nt, Human
ugcucccaggugacgcugcuguu

SEQ ID NO: 845673 - RNA, 23 nt, Human
ucccuggaggcagguccagggcc

SEQ ID NO: 845674 - RNA, 22 nt, Human
aauucuguuacuaaugugaugu

SEQ ID NO: 845675 - RNA, 22 nt, Human
gcuggccacacugcugauggag

SEQ ID NO: 845676 - RNA, 22 nt, Human
cugcaggcucgaagacacggau

SEQ ID NO: 845677 - RNA, 22 nt, Human
accaucagucauugucaguggg

SEQ ID NO: 845678 - RNA, 22 nt, Human
cauuucaaugccuucaacauag

SEQ ID NO: 845679 - RNA, 22 nt, Human
ccaggccagcaggcacaccugc

SEQ ID NO: 845680 - RNA, 22 nt, Human
ugccugcugcuaagcucuuugu

SEQ ID NO: 845681 - RNA, 22 nt, Human
ugccucugguuaucugguaccu

SEQ ID NO: 845682 - RNA, 22 nt, Human
cagcagaggcacgucugugaau

SEQ ID NO: 845683 - RNA, 22 nt, Human
aagccagggauuccugagggag

SEQ ID NO: 845684 - RNA, 22 nt, Human
cucccagggccaucgagucacu

SEQ ID NO: 845685 - RNA, 22 nt, Human
gaagcccacguuuggugaugua

SEQ ID NO: 845686 - RNA, 22 nt, Human
uaucuacuccucuuucagaugc

SEQ ID NO: 845687 - RNA, 22 nt, Human
ugccugggccuucccaccucug

SEQ ID NO: 845688 - RNA, 22 nt, Human
agcagaagaaagccacaugacu

SEQ ID NO: 845689 - RNA, 22 nt, Human
ucccagagaaagucaaggucuu

SEQ ID NO: 845690 - RNA, 22 nt, Human
cccuggcauaaaacuucuccag

SEQ ID NO: 845691 - RNA, 22 nt, Human
ucuguucagaagaggugaaagu

SEQ ID NO: 845692 - RNA, 22 nt, Human
ucugaaaugcaaauuugacuga

SEQ ID NO: 845693 - RNA, 22 nt, Human
agugaggcuaauaggcaauggu

SEQ ID NO: 845694 - RNA, 22 nt, Human
ucaauaauggcaggauaaauuu

SEQ ID NO: 845695 - RNA, 22 nt, Human
aauuuagauugauaaacaugga

SEQ ID NO: 845696 - RNA, 22 nt, Human
agagccuggucugagauaggac

SEQ ID NO: 845697 - RNA, 22 nt, Human
acugggccuggauuggcguguc

SEQ ID NO: 845698 - RNA, 21 nt, Human
agccuguugguuuacugcuca

SEQ ID NO: 845699 - RNA, 22 nt, Human
uacacaugaucauuuaguagca

SEQ ID NO: 845700 - RNA, 22 nt, Human
agacugaauaacaagcaaauaa

SEQ ID NO: 845701 - RNA, 22 nt, Human
guguaucaaagcacagacuuca

SEQ ID NO: 845702 - RNA, 22 nt, Human
cugucaguucuuccagauagag

SEQ ID NO: 845703 - RNA, 22 nt, Human
agaggcaguauacaauccgagc

SEQ ID NO: 845704 - RNA, 23 nt, Human
cagugcagggcaacucagacucc

SEQ ID NO: 845705 - RNA, 22 nt, Human
agggagaaugaccaagguauau

SEQ ID NO: 845706 - RNA, 22 nt, Human
uauauauucuuaaguaguguag

SEQ ID NO: 845707 - RNA, 22 nt, Human
uucuuuggggaauauucugguu

SEQ ID NO: 845708 - RNA, 22 nt, Human
cccaggagagggaaccaaaugu

SEQ ID NO: 845709 - RNA, 22 nt, Human
ugggguggauagaaagugaugu

SEQ ID NO: 845710 - RNA, 22 nt, Human
cacugcaguuccccagugcgca

SEQ ID NO: 845711 - RNA, 22 nt, Human
agaugaaagauuuuuauagaga

SEQ ID NO: 845712 - RNA, 22 nt, Human
ugcauaguucuccuuccuccuc

SEQ ID NO: 845713 - RNA, 16 nt, Human
aaggagggaagagaau

SEQ ID NO: 845714 - RNA, 22 nt, Human
cauuuacuguugaaucccuagc

SEQ ID NO: 845715 - RNA, 22 nt, Human
augcuuuagugucaaguuuggg

SEQ ID NO: 845716 - RNA, 22 nt, Human
uacuuacagaaggaagcaauug

SEQ ID NO: 845717 - RNA, 22 nt, Human
uagaugcuguagaaauacuuau

SEQ ID NO: 845718 - RNA, 22 nt, Human
uagcauuuauggucaugugucc

SEQ ID NO: 845719 - RNA, 22 nt, Human
gaugggauuuuuuauguguuca

SEQ ID NO: 845720 - RNA, 17 nt, Human
ggugagaccucccacuc

SEQ ID NO: 845721 - RNA, 22 nt, Human
guggugcaggccagcaggggcg

SEQ ID NO: 845722 - RNA, 22 nt, Human
uauucacaugaaaacaaauuuu

SEQ ID NO: 845723 - RNA, 19 nt, Human
gcccugcaggagguggggc

SEQ ID NO: 845724 - RNA, 22 nt, Human
aguaauaauuuauauuagggag

SEQ ID NO: 845725 - RNA, 21 nt, Human
aggugccaaggagaagcaggc

SEQ ID NO: 845726 - RNA, 22 nt, Human
agaaaacauuacauaggugugu

SEQ ID NO: 845727 - RNA, 22 nt, Human
uugucuguccaggcaccccaag

SEQ ID NO: 845728 - RNA, 22 nt, Human
ucuucagauggccaguuguccc

SEQ ID NO: 845729 - RNA, 22 nt, Human
cagccagggagggcaaaugaga

SEQ ID NO: 845730 - RNA, 19 nt, Human
cuggugcuugagugaguca

SEQ ID NO: 845731 - RNA, 22 nt, Human
gcaggagacuggcugugguagu

SEQ ID NO: 845732 - RNA, 22 nt, Human
gcuauacaaguguagaauagag

SEQ ID NO: 845733 - RNA, 19 nt, Human
ugucccagacuccgugucu

SEQ ID NO: 845734 - RNA, 22 nt, Human
gcccucagcuccuggacacaug

SEQ ID NO: 845735 - RNA, 22 nt, Human
gauuuauuggucuuucauuggu

SEQ ID NO: 845736 - RNA, 22 nt, Human
uggaggccagagguacugggac

SEQ ID NO: 845737 - RNA, 19 nt, Human
ggucacagggguuacaagg

SEQ ID NO: 845738 - RNA, 22 nt, Human
uauuccagguauucuucaagag

SEQ ID NO: 845739 - RNA, 22 nt, Human
ugccucuguggaaauggugguc

SEQ ID NO: 845740 - RNA, 21 nt, Human
gccacguuucagucuucucag

SEQ ID NO: 845741 - RNA, 22 nt, Human
cauuucugugacacuuccaucu

SEQ ID NO: 845742 - RNA, 22 nt, Human
ucuguuccauguuuuguuccau

SEQ ID NO: 845743 - RNA, 22 nt, Human
ccucccacuucuugcugagguc

SEQ ID NO: 845744 - RNA, 22 nt, Human
aucuggcuggauucuuagcguu

SEQ ID NO: 845745 - RNA, 22 nt, Human
ggacccugggcuugcuccuggg

SEQ ID NO: 845746 - RNA, 20 nt, Human
ucugcucagcccucaguggc

SEQ ID NO: 845747 - RNA, 22 nt, Human
uauaacaguuuaggugguguca

SEQ ID NO: 845748 - RNA, 22 nt, Human
ugggcucugaagucagucugcu

SEQ ID NO: 845749 - RNA, 22 nt, Human
acaaagucuuuuacaacaguca

SEQ ID NO: 845750 - RNA, 22 nt, Human
augcucuggaguacgugaaauu

SEQ ID NO: 845751 - RNA, 22 nt, Human
accccagcucugagccacacca

SEQ ID NO: 845752 - RNA, 17 nt, Human
uuucaucugggaccacc

SEQ ID NO: 845753 - RNA, 22 nt, Human
uacaaaaaauugauacugacga

SEQ ID NO: 845754 - RNA, 18 nt, Human
aaguaacagaagagcaca

SEQ ID NO: 845755 - RNA, 22 nt, Human
ucuuugcaggagcccuuugaac

SEQ ID NO: 845756 - RNA, 22 nt, Human
caugggagguuggcuuggcaug

SEQ ID NO: 845757 - RNA, 22 nt, Human
ugggauggcauccugggccuug

SEQ ID NO: 845758 - RNA, 22 nt, Human
caaaugcuaacuucuuuccaaa

SEQ ID NO: 845759 - RNA, 22 nt, Human
gagucccaugaugauagccaca

SEQ ID NO: 845760 - RNA, 22 nt, Human
agcagccaguucucugugguag

SEQ ID NO: 845761 - RNA, 22 nt, Human
gauuauauaauggaagcucuug

SEQ ID NO: 845762 - RNA, 22 nt, Human
ccaggacuucgaggcuacagug

SEQ ID NO: 845763 - RNA, 22 nt, Human
gagggagagugauggaccauug

SEQ ID NO: 845764 - RNA, 18 nt, Human
ggagagugagaucaaaca

SEQ ID NO: 845765 - RNA, 22 nt, Human
auuuuacuacuccaauuaauga

SEQ ID NO: 845766 - RNA, 22 nt, Human
gaggcaugucuggccuguccca

SEQ ID NO: 845767 - RNA, 22 nt, Human
uccaggagcucauccacgucaa

SEQ ID NO: 845768 - RNA, 21 nt, Human
ugcuucucuagaucaacuacu

SEQ ID NO: 845769 - RNA, 22 nt, Human
ugcauuguugaauauuucauag

SEQ ID NO: 845770 - RNA, 22 nt, Human
gcuaugcaggagccuaaugaca

SEQ ID NO: 845771 - RNA, 22 nt, Human
gaaauauacaugaagucggcug

SEQ ID NO: 845772 - RNA, 22 nt, Human
cugcuuccaugcaauggcaguc

SEQ ID NO: 845773 - RNA, 22 nt, Human
ugaaguuguuaagguugccauu

SEQ ID NO: 845774 - RNA, 22 nt, Human
ugcagggccgcuggaggucaug

SEQ ID NO: 845775 - RNA, 23 nt, Human
ucagugauguugaaccuagcagu

SEQ ID NO: 845776 - RNA, 21 nt, Human
uggagcugccacuuguccucc

SEQ ID NO: 845777 - RNA, 22 nt, Human
uggcagcuggcucugcgcaggc

SEQ ID NO: 845778 - RNA, 22 nt, Human
gagcuuccugaugccgaccagu

SEQ ID NO: 845779 - RNA, 22 nt, Human
auuccaaagacagaagcagcug

SEQ ID NO: 845780 - RNA, 22 nt, Human
cggcagagacggcgcuuugaac

SEQ ID NO: 845781 - RNA, 22 nt, Human
cccagcaggucggugcugccug

SEQ ID NO: 845782 - RNA, 22 nt, Human
cuugaaagauuuggccucugug

SEQ ID NO: 845783 - RNA, 22 nt, Human
gcauuauuaauagcugcaugag

SEQ ID NO: 845784 - RNA, 22 nt, Human
aaggucauuuuuuccucuguug

SEQ ID NO: 845785 - RNA, 22 nt, Human
uacuuacagagcuuauaaguua

SEQ ID NO: 845786 - RNA, 22 nt, Human
agcuucuugggcuuuacacaaa

SEQ ID NO: 845787 - RNA, 22 nt, Human
gcagggucgcucuaggagauca

SEQ ID NO: 845788 - RNA, 22 nt, Human
ucacuguauuugcugaugcaua

SEQ ID NO: 845789 - RNA, 22 nt, Human
uaaggcacccauguucauacag

SEQ ID NO: 845790 - RNA, 22 nt, Human
guucuucaggcugugcucuaga

SEQ ID NO: 845791 - RNA, 22 nt, Human
agcucccagaguccucugccca

SEQ ID NO: 845792 - RNA, 22 nt, Human
acagcagcuugcgugucugguc

SEQ ID NO: 845793 - RNA, 22 nt, Human
aaucagaaaggcuaaggaagca

SEQ ID NO: 845794 - RNA, 22 nt, Human
cugccagcucucuggaggcucu

SEQ ID NO: 845795 - RNA, 22 nt, Human
cacagggcuaaaugaaggguug

SEQ ID NO: 845796 - RNA, 22 nt, Human
cacaggagcuguggggcagugu

SEQ ID NO: 845797 - RNA, 22 nt, Human
uccugccucuuuucuuauucca

SEQ ID NO: 845798 - RNA, 19 nt, Human
gaggucagcaagaaguauu

SEQ ID NO: 845799 - RNA, 22 nt, Human
agguggccggugccagccgggc

SEQ ID NO: 845800 - RNA, 23 nt, Human
cauguacacacagcuguacagug

SEQ ID NO: 845801 - RNA, 22 nt, Human
ggagccuguggccgucacgacu

SEQ ID NO: 845802 - RNA, 22 nt, Human
cagcagggcccccgggugcgcc

SEQ ID NO: 845803 - RNA, 22 nt, Human
gccugagagacccauggggcaa

SEQ ID NO: 845804 - RNA, 22 nt, Human
ccgggcgggggcucucgucacc

SEQ ID NO: 845805 - RNA, 22 nt, Human
auagacauagccguaauuuauu

SEQ ID NO: 845806 - RNA, 22 nt, Human
uuccuuagcuccucauggccug

SEQ ID NO: 845807 - RNA, 22 nt, Human
ggcuggcaagugucugcucaug

SEQ ID NO: 845808 - RNA, 22 nt, Human
agcagagcccuuccauggccuu

SEQ ID NO: 845809 - RNA, 22 nt, Human
ggagccugugggaugagaugug

SEQ ID NO: 845810 - RNA, 22 nt, Human
ggaugcaggaguugaagaagga

SEQ ID NO: 845811 - RNA, 22 nt, Human
gaucuguuucauucacagucug

SEQ ID NO: 845812 - RNA, 22 nt, Human
ggccauggaccccgagcugacc

SEQ ID NO: 845813 - RNA, 22 nt, Human
cuucugugauuugguuaggaua

SEQ ID NO: 845814 - RNA, 22 nt, Human
cagcuggaucccugcagaacuu

SEQ ID NO: 845815 - RNA, 22 nt, Human
aggccugucuggggcucagcca

SEQ ID NO: 845816 - RNA, 22 nt, Human
ugccucagaguugucccuacca

SEQ ID NO: 845817 - RNA, 22 nt, Human
cugcugagcaucagggcugccc

SEQ ID NO: 845818 - RNA, 22 nt, Human
gaugauggacaaagcauuggug

SEQ ID NO: 845819 - RNA, 22 nt, Human
acauauuuugaaagcuuucuaa

SEQ ID NO: 845820 - RNA, 22 nt, Human
aguuuuuccugauuuuacagaa

SEQ ID NO: 845821 - RNA, 22 nt, Human
ucagcaaugugauacugugcaa

SEQ ID NO: 845822 - RNA, 20 nt, Human
cuucuucagccuaugcuuca

SEQ ID NO: 845823 - RNA, 22 nt, Human
aagcagugcgcucaucuaaggg

SEQ ID NO: 845824 - RNA, 22 nt, Human
acauaauaccuaggacaguuug

SEQ ID NO: 845825 - RNA, 22 nt, Human
cggcuggguagaggugccgggu

SEQ ID NO: 845826 - RNA, 22 nt, Human
ucauaacagcuaagucccuuuc

SEQ ID NO: 845827 - RNA, 22 nt, Human
gcugucugcugugcacugagca

SEQ ID NO: 845828 - RNA, 22 nt, Human
gcugaagggagugcugagucug

SEQ ID NO: 845829 - RNA, 22 nt, Human
caguguuccaggcggcagugaa

SEQ ID NO: 845830 - RNA, 19 nt, Human
cugaggcccauguaccaug

SEQ ID NO: 845831 - RNA, 22 nt, Human
ggugaaggucuacugugugcca

SEQ ID NO: 845832 - RNA, 22 nt, Human
aaagccaugaauguuauagagg

SEQ ID NO: 845833 - RNA, 22 nt, Human
agcagggccaacaguaaacacc

SEQ ID NO: 845834 - RNA, 22 nt, Human
uauuucugaggcccaggaagug

SEQ ID NO: 845835 - RNA, 22 nt, Human
cuagaaaaauacuuuauuguga

SEQ ID NO: 845836 - RNA, 19 nt, Human
agucucaguguacagaggc

SEQ ID NO: 845837 - RNA, 22 nt, Human
aagucauugguagcuugauagg

SEQ ID NO: 845838 - RNA, 22 nt, Human
uagggcagccuuauagcuccca

SEQ ID NO: 845839 - RNA, 22 nt, Human
cagggcagggccacacccccug

SEQ ID NO: 845840 - RNA, 22 nt, Human
gacggcagaaacucaugagguc

SEQ ID NO: 845841 - RNA, 22 nt, Human
auuguauuagcacaauacaauu

SEQ ID NO: 845842 - RNA, 22 nt, Human
auuaaaauuccaagguaugcca

SEQ ID NO: 845843 - RNA, 22 nt, Human
aaaugcacaauaaaguaaaggc

SEQ ID NO: 845844 - RNA, 22 nt, Human
aguccuuagaacagugccuggg

SEQ ID NO: 845845 - RNA, 22 nt, Human
cuggagcucuguguguuccuga

SEQ ID NO: 845846 - RNA, 22 nt, Human
agggagguaggagcuucuagcu

SEQ ID NO: 845847 - RNA, 22 nt, Human
uauuucaacguaugaaaagcug

SEQ ID NO: 845848 - RNA, 22 nt, Human
cugaauaauacagacuagcuuc

SEQ ID NO: 845849 - RNA, 17 nt, Human
aggcugcugggccaggg

SEQ ID NO: 845850 - RNA, 22 nt, Human
gccuaggagacaagcgugaaag

SEQ ID NO: 845851 - RNA, 22 nt, Human
gcagagcugggucuguauccaa

SEQ ID NO: 845852 - RNA, 22 nt, Human
aauucacaaaaguuagauccau

SEQ ID NO: 845853 - RNA, 22 nt, Human
augggcuguccuaguccagccc

SEQ ID NO: 845854 - RNA, 22 nt, Human
cagcugcuguuacugcuuauua

SEQ ID NO: 845855 - RNA, 22 nt, Human
ccugucaggguuugccucagaa

SEQ ID NO: 845856 - RNA, 22 nt, Human
agucccagcuucccccaugcag

SEQ ID NO: 845857 - RNA, 22 nt, Human
cagggacugagauccagacugu

SEQ ID NO: 845858 - RNA, 22 nt, Human
acaacauuauacauagaaagcu

SEQ ID NO: 845859 - RNA, 22 nt, Human
cuucucagcauuuugucagucu

SEQ ID NO: 845860 - RNA, 22 nt, Human
ucuuagaaguuuauggcacgga

SEQ ID NO: 845861 - RNA, 22 nt, Human
aauuucaagucuugaagaagua

SEQ ID NO: 845862 - RNA, 22 nt, Human
uccugagagcagcugcuuugga

SEQ ID NO: 845863 - RNA, 22 nt, Human
uuuauccagaaucaggauuuuu

SEQ ID NO: 845864 - RNA, 22 nt, Human
ccaggcucugcgcuggacaugg

SEQ ID NO: 845865 - RNA, 22 nt, Human
ggccugagaaccauggggccaa

SEQ ID NO: 845866 - RNA, 22 nt, Human
aaauugcagaugcuaaaugacu

SEQ ID NO: 845867 - RNA, 22 nt, Human
cugacccauauaagaguggagg

SEQ ID NO: 845868 - RNA, 22 nt, Human
uaaaguucuggugagagguaag

SEQ ID NO: 845869 - RNA, 22 nt, Human
cauuacaugguccaggauauau

SEQ ID NO: 845870 - RNA, 22 nt, Human
ggauguugauugaauggccauu

SEQ ID NO: 845871 - RNA, 22 nt, Human
ccuuuccuuuuuagugugggag

SEQ ID NO: 845872 - RNA, 18 nt, Human
uggcucuggacuugcucc

SEQ ID NO: 845873 - RNA, 22 nt, Human
gcugcucugaaaaugacuguug

SEQ ID NO: 845874 - RNA, 18 nt, Human
cugccuguugcugagagg

SEQ ID NO: 845875 - RNA, 22 nt, Human
uggcucagauuuuuguaggcuu

SEQ ID NO: 845876 - RNA, 22 nt, Human
uaaagccacgcuggaaaucagg

SEQ ID NO: 845877 - RNA, 22 nt, Human
cagucccaguuugagacucugg

SEQ ID NO: 845878 - RNA, 22 nt, Human
augguuuaaagaguaugacuuu

SEQ ID NO: 845879 - RNA, 22 nt, Human
agagggaucacccuguuucugg

SEQ ID NO: 845880 - RNA, 22 nt, Human
cucccaggacucagaggagaag

SEQ ID NO: 845881 - RNA, 22 nt, Human
agcugccaaguuggaguagcaa

SEQ ID NO: 845882 - RNA, 22 nt, Human
gccucccuggcccacagcagcg

SEQ ID NO: 845883 - RNA, 22 nt, Human
caguccagcccccugcuaaaag

SEQ ID NO: 845884 - RNA, 22 nt, Human
cuucagaaugggacuguguuug

SEQ ID NO: 845885 - RNA, 22 nt, Human
acauuucuccuugcaggaguca

SEQ ID NO: 845886 - RNA, 22 nt, Human
uuucaguguaagguuuccagga

SEQ ID NO: 845887 - RNA, 22 nt, Human
uccagggaugccagccauguug

SEQ ID NO: 845888 - RNA, 22 nt, Human
gcagcaggagaguuuguccugc

SEQ ID NO: 845889 - RNA, 17 nt, Human
gcagcagagagacccuc

SEQ ID NO: 845890 - RNA, 22 nt, Human
ccaggaaauggcuugcuucuuu

SEQ ID NO: 845891 - RNA, 22 nt, Human
cugaauaauuuucuguuguaug

SEQ ID NO: 845892 - RNA, 22 nt, Human
cacaguggcagguguggguugu

SEQ ID NO: 845893 - RNA, 22 nt, Human
aaucacaauuacuuuugcacca

SEQ ID NO: 845894 - RNA, 22 nt, Human
ccaggugguucaggucaccaua

SEQ ID NO: 845895 - RNA, 22 nt, Human
gcagggcucugcuguaguccua

SEQ ID NO: 845896 - RNA, 22 nt, Human
cagcagagcuuauguuggguca

SEQ ID NO: 845897 - RNA, 22 nt, Human
acaugcuuuucccacaauuaua

SEQ ID NO: 845898 - RNA, 22 nt, Human
agucaguguucuccggagaggc

SEQ ID NO: 845899 - RNA, 22 nt, Human
agaaaagguugaaaguaggauu

SEQ ID NO: 845900 - RNA, 22 nt, Human
aacaucagaauauccauguugg

SEQ ID NO: 845901 - RNA, 22 nt, Human
uccucaggugacuagguaucuu

SEQ ID NO: 845902 - RNA, 22 nt, Human
uguaugaauauguauuuucaua

SEQ ID NO: 845903 - RNA, 22 nt, Human
cagcugccagcuucucuccauc

SEQ ID NO: 845904 - RNA, 17 nt, Human
acagggcagaaacagcu

SEQ ID NO: 845905 - RNA, 22 nt, Human
aaaugcuguguuuuaacauaga

SEQ ID NO: 845906 - RNA, 22 nt, Human
ucuggcuccacaccucacugca

SEQ ID NO: 845907 - RNA, 22 nt, Human
gcagagcauguccucaggacag

SEQ ID NO: 845908 - RNA, 22 nt, Human
caguagcacuagauaugugugg

SEQ ID NO: 845909 - RNA, 22 nt, Human
cugaagagcucuccuguccccu

SEQ ID NO: 845910 - RNA, 22 nt, Human
cugucucagcaggaagucauca

SEQ ID NO: 845911 - RNA, 18 nt, Human
aaagaaggauuggagagc

SEQ ID NO: 845912 - RNA, 18 nt, Human
ugcucuguuuaaugauuu

SEQ ID NO: 845913 - RNA, 22 nt, Human
uggucucugacucugaagaccc

SEQ ID NO: 845914 - RNA, 22 nt, Human
gcacccagaauaaggacaggac

SEQ ID NO: 845915 - RNA, 22 nt, Human
ugccuggcaagaggggcuggcu

SEQ ID NO: 845916 - RNA, 22 nt, Human
cauugacaguucuuuaaguugc

SEQ ID NO: 845917 - RNA, 23 nt, Human
ucucaggacacacaugucuauca

SEQ ID NO: 845918 - RNA, 22 nt, Human
gcuggggagggcgucaaggcca

SEQ ID NO: 845919 - RNA, 18 nt, Human
ucuggcucaggacugaac

SEQ ID NO: 845920 - RNA, 19 nt, Human
agcagagcccugaagaucc

SEQ ID NO: 845921 - RNA, 22 nt, Human
uagauuucaggcuggcuugcgg

SEQ ID NO: 845922 - RNA, 22 nt, Human
uggcuuccugcauggauccucu

SEQ ID NO: 845923 - RNA, 22 nt, Human
uauuaaauuauggauuuaggag

SEQ ID NO: 845924 - RNA, 22 nt, Human
ccugucuggccuuccacggggg

SEQ ID NO: 845925 - RNA, 22 nt, Human
ucacaugcucaccuaagccaca

SEQ ID NO: 845926 - RNA, 22 nt, Human
auuguacaugcagugagucauc

SEQ ID NO: 845927 - RNA, 22 nt, Human
agacaacaucacuaaagcugag

SEQ ID NO: 845928 - RNA, 22 nt, Human
uggauaaacucacuguaaguug

SEQ ID NO: 845929 - RNA, 22 nt, Human
ugucaccaaguugaugaaugca

SEQ ID NO: 845930 - RNA, 22 nt, Human
ccucccacauugaggacaugcu

SEQ ID NO: 845931 - RNA, 22 nt, Human
augaacugcaguauaaacuugg

SEQ ID NO: 845932 - RNA, 22 nt, Human
ugaacaguuucaagaaaacuuu

SEQ ID NO: 845933 - RNA, 22 nt, Human
agugcuuuagagaaauggugcu

SEQ ID NO: 845934 - RNA, 22 nt, Human
aaggacagggaugguugauugu

SEQ ID NO: 845935 - RNA, 22 nt, Human
uugacaagaaucguugccuugg

SEQ ID NO: 845936 - RNA, 22 nt, Human
gugcauuugugcaugcacaugu

SEQ ID NO: 845937 - RNA, 22 nt, Human
uaagaacaagauguuccuguuu

SEQ ID NO: 845938 - RNA, 22 nt, Human
agcagccuuugaucaucuggga

SEQ ID NO: 845939 - RNA, 22 nt, Human
cugggaugucuauagaacacuu

SEQ ID NO: 845940 - RNA, 22 nt, Human
agacagagauacuauguuguca

SEQ ID NO: 845941 - RNA, 22 nt, Human
gguggccugcccugaucccugg

SEQ ID NO: 845942 - RNA, 22 nt, Human
uauacaauggcugaaucaucca

SEQ ID NO: 845943 - RNA, 22 nt, Human
ggcccagcugugcuuccagccc

SEQ ID NO: 845944 - RNA, 22 nt, Human
gcuguucauuagaaauagaaug

SEQ ID NO: 845945 - RNA, 23 nt, Human
acagaaaucauuuguaagguacc

SEQ ID NO: 845946 - RNA, 22 nt, Human
accugagcaugccaggagagug

SEQ ID NO: 845947 - RNA, 22 nt, Human
ggggcugguggugguuucucca

SEQ ID NO: 845948 - RNA, 22 nt, Human
agauuucaaugugagcauuagu

SEQ ID NO: 845949 - RNA, 22 nt, Human
cucccuggcacagcgagagguu

SEQ ID NO: 845950 - RNA, 22 nt, Human
cauguacaguuuuucuguccug

SEQ ID NO: 845951 - RNA, 22 nt, Human
ggccucuggucaagacaagcau

SEQ ID NO: 845952 - RNA, 22 nt, Human
uaaacauguugacaucuuaccu

SEQ ID NO: 845953 - RNA, 22 nt, Human
agaugcugugaggaagcuagga

SEQ ID NO: 845954 - RNA, 22 nt, Human
ugugaagcuggauccuggagcu

SEQ ID NO: 845955 - RNA, 22 nt, Human
gucuggaggaggaagaaggcac

SEQ ID NO: 845956 - RNA, 22 nt, Human
aguguuguaugggaugacugcu

SEQ ID NO: 845957 - RNA, 22 nt, Human
gacaguuuuuaauccuuucaug

SEQ ID NO: 845958 - RNA, 22 nt, Human
agggaagagcuugcaagaaacc

SEQ ID NO: 845959 - RNA, 22 nt, Human
gcuggccugcaaagcccggcug

SEQ ID NO: 845960 - RNA, 22 nt, Human
cagagauuauuauaacuaauua

SEQ ID NO: 845961 - RNA, 21 nt, Human
ucaggagagcccaucuacaaa

SEQ ID NO: 845962 - RNA, 22 nt, Human
uagcccagaagagggaagcaac

SEQ ID NO: 845963 - RNA, 21 nt, Human
ccugugugucugacugggcua

SEQ ID NO: 845964 - RNA, 22 nt, Human
gcuacugauugaccuuggagag

SEQ ID NO: 845965 - RNA, 22 nt, Human
cccagggacagcuagguggggc

SEQ ID NO: 845966 - RNA, 22 nt, Human
gagggaggcaucaugaauccag

SEQ ID NO: 845967 - RNA, 22 nt, Human
aagccaaugagagaggccucag

SEQ ID NO: 845968 - RNA, 19 nt, Human
augauggucccauucaccu

SEQ ID NO: 845969 - RNA, 22 nt, Human
auccuugagaaaauaaaugacc

SEQ ID NO: 845970 - RNA, 22 nt, Human
acuuuaauuaaugaacuguggc

SEQ ID NO: 845971 - RNA, 22 nt, Human
aaagagcuaacauugccgagau

SEQ ID NO: 845972 - RNA, 22 nt, Human
cugagauggccacugggucuca

SEQ ID NO: 845973 - RNA, 22 nt, Human
uuuccucuucuucccaugucau

SEQ ID NO: 845974 - RNA, 22 nt, Human
ugcagccauuuucugccaaugc

SEQ ID NO: 845975 - RNA, 22 nt, Human
gaggggcugggcagucccugga

SEQ ID NO: 845976 - RNA, 22 nt, Human
agucccagugagaugaaccagg

SEQ ID NO: 845977 - RNA, 22 nt, Human
uggccucucuaccaggcagccu

SEQ ID NO: 845978 - RNA, 22 nt, Human
gaauaguucuauggcugcaggg

SEQ ID NO: 845979 - RNA, 22 nt, Human
aaguuacaggagaaagagauca

SEQ ID NO: 845980 - RNA, 23 nt, Human
ggacagggcccugcccuauggcc

SEQ ID NO: 845981 - RNA, 22 nt, Human
aauauccacacugugucccugc

SEQ ID NO: 845982 - RNA, 22 nt, Human
ucaugaacauggaauaucuuuu

SEQ ID NO: 845983 - RNA, 22 nt, Human
cauuuagacauuugauuugggg

SEQ ID NO: 845984 - RNA, 22 nt, Human
cauggacucugguuuggggagc

SEQ ID NO: 845985 - RNA, 22 nt, Human
auuugcuucugugaaaucaagu

SEQ ID NO: 845986 - RNA, 22 nt, Human
aggagccaagauggggcaagua

SEQ ID NO: 845987 - RNA, 22 nt, Human
aaugggauaggucuucaggaau

SEQ ID NO: 845988 - RNA, 22 nt, Human
cagccagguucaaguccuuaua

SEQ ID NO: 845989 - RNA, 22 nt, Human
ccuggcugucguuuugugaaau

SEQ ID NO: 845990 - RNA, 22 nt, Human
acaugucuuuuaaagucuaaua

SEQ ID NO: 845991 - RNA, 22 nt, Human
uguccucaaggagcuucagucu

SEQ ID NO: 845992 - RNA, 22 nt, Human
uccuuagagauacugucuugaa

SEQ ID NO: 845993 - RNA, 22 nt, Human
gcuccaggagagggaagcagau

SEQ ID NO: 845994 - RNA, 22 nt, Human
ucucagggccccaaaggcuagu

SEQ ID NO: 845995 - RNA, 22 nt, Human
agcagccacagucugggacagg

SEQ ID NO: 845996 - RNA, 18 nt, Human
cucucugggugaggacaa

SEQ ID NO: 845997 - RNA, 21 nt, Human
ccaccaggucuucugcucggg

SEQ ID NO: 845998 - RNA, 23 nt, Human
uguaugaauaugccacaguuuaa

SEQ ID NO: 845999 - RNA, 23 nt, Human
gggaccagcuagggcugugaccu

SEQ ID NO: 846000 - RNA, 22 nt, Human
cacagggccuggggcagcugcu

SEQ ID NO: 846001 - RNA, 22 nt, Human
auucuucauguugaagcuguca

SEQ ID NO: 846002 - RNA, 22 nt, Human
uaucuuguaauagguccacuug

SEQ ID NO: 846003 - RNA, 17 nt, Human
cagggcugucugccuag

SEQ ID NO: 846004 - RNA, 22 nt, Human
aagacaagcaucaaaucaggca

SEQ ID NO: 846005 - RNA, 22 nt, Human
cugaaggaagcagaagcgaggu

SEQ ID NO: 846006 - RNA, 22 nt, Human
ccauuguaaagaguauacuuug

SEQ ID NO: 846007 - RNA, 22 nt, Human
ugaagaugucagcagggguggu

SEQ ID NO: 846008 - RNA, 22 nt, Human
aaaaguuaccucuguaauauaa

SEQ ID NO: 846009 - RNA, 22 nt, Human
gcugccagccaacuugcugugc

SEQ ID NO: 846010 - RNA, 22 nt, Human
uucuguguggguagcuccuguu

SEQ ID NO: 846011 - RNA, 22 nt, Human
gcucugcuguguuuguucagca

SEQ ID NO: 846012 - RNA, 22 nt, Human
aauagcucacugauuucucuuu

SEQ ID NO: 846013 - RNA, 21 nt, Human
gaguccuuccaauguccucag

SEQ ID NO: 846014 - RNA, 22 nt, Human
acugugugggccgcucacuggg

SEQ ID NO: 846015 - RNA, 22 nt, Human
ugggcuggagcuuguugcuucc

SEQ ID NO: 846016 - RNA, 22 nt, Human
gcucugcucuaacauuccugac

SEQ ID NO: 846017 - RNA, 22 nt, Human
auuugcaaagucguaucuguga

SEQ ID NO: 846018 - RNA, 22 nt, Human
uccguauuugacuauugcaccg

SEQ ID NO: 846019 - RNA, 22 nt, Human
ucccaggauguuuauggcuggu

SEQ ID NO: 846020 - RNA, 22 nt, Human
ggaggaccugcuggcccugcaa

SEQ ID NO: 846021 - RNA, 22 nt, Human
ucuccuuuaagauuuccucagg

SEQ ID NO: 846022 - RNA, 19 nt, Human
cauuuagaaguacauauua

SEQ ID NO: 846023 - RNA, 22 nt, Human
gagggcagagucuaaugaugca

SEQ ID NO: 846024 - RNA, 22 nt, Human
uuccuuccauagcaaaacaugc

SEQ ID NO: 846025 - RNA, 22 nt, Human
cauguuuacuaccaggagaaug

SEQ ID NO: 846026 - RNA, 21 nt, Human
gggccuggcugcgcaggacgg

SEQ ID NO: 846027 - RNA, 22 nt, Human
cccagggcccuggacagcuaca

SEQ ID NO: 846028 - RNA, 22 nt, Human
ccugggaguggcacucacagca

SEQ ID NO: 846029 - RNA, 22 nt, Human
ccaguugguuucaaugggacag

SEQ ID NO: 846030 - RNA, 22 nt, Human
uaacauuagguagacauaagcc

SEQ ID NO: 846031 - RNA, 22 nt, Human
acagagccacuuuggugccuac

SEQ ID NO: 846032 - RNA, 22 nt, Human
ucugcuggccuuagcaggucua

SEQ ID NO: 846033 - RNA, 22 nt, Human
cugggcagugcagcuauagaac

SEQ ID NO: 846034 - RNA, 22 nt, Human
guaaacaacacaaaucauuuga

SEQ ID NO: 846035 - RNA, 22 nt, Human
gugucacaagagcccaggaaac

SEQ ID NO: 846036 - RNA, 22 nt, Human
cagagcugggaucccaugggcg

SEQ ID NO: 846037 - RNA, 22 nt, Human
ggcugccaggagaagcucagug

SEQ ID NO: 846038 - RNA, 18 nt, Human
uuccauaauguauguaac

SEQ ID NO: 846039 - RNA, 22 nt, Human
gagcagaacaggccggguggga

SEQ ID NO: 846040 - RNA, 22 nt, Human
gcagcuggaagugacacucugu

SEQ ID NO: 846041 - RNA, 22 nt, Human
cagaauuuaaguggauuauucu

SEQ ID NO: 846042 - RNA, 22 nt, Human
cucaggccauucuuccagcugc

SEQ ID NO: 846043 - RNA, 23 nt, Human
ugccucugccucccuagucugca

SEQ ID NO: 846044 - RNA, 22 nt, Human
ggucucagcccucgccagcagc

SEQ ID NO: 846045 - RNA, 22 nt, Human
ugcuggcuguauaugugagagu

SEQ ID NO: 846046 - RNA, 18 nt, Human
uccugccugugccccagg

SEQ ID NO: 846047 - RNA, 22 nt, Human
acagcugggugcugcucagagc

SEQ ID NO: 846048 - RNA, 22 nt, Human
cuggguggcagagccugcagug

SEQ ID NO: 846049 - RNA, 22 nt, Human
gaagcccauuuguacagcacau

SEQ ID NO: 846050 - RNA, 22 nt, Human
uugaagcagagaaauacuugaa

SEQ ID NO: 846051 - RNA, 22 nt, Human
ucccaggguccucuucuggaau

SEQ ID NO: 846052 - RNA, 22 nt, Human
agacaacaccaaaugcuagugu

SEQ ID NO: 846053 - RNA, 23 nt, Human
gggcagcuuaagcuuguuuuucu

SEQ ID NO: 846054 - RNA, 23 nt, Human
acuuuauugaccccaggucaguu

SEQ ID NO: 846055 - RNA, 18 nt, Human
gguggcucagucaugggg

SEQ ID NO: 846056 - RNA, 21 nt, Human
ucuuugcaucaguuguuuucu

SEQ ID NO: 846057 - RNA, 22 nt, Human
aggcagucuaucucuggagccu

SEQ ID NO: 846058 - RNA, 22 nt, Human
agggggcaggagagaccugcug

SEQ ID NO: 846059 - RNA, 23 nt, Human
ucuauacauacugcagccucugg

SEQ ID NO: 846060 - RNA, 20 nt, Human
agugucuggugcagggccuc

SEQ ID NO: 846061 - RNA, 22 nt, Human
auguaaacaagguuauugucca

SEQ ID NO: 846062 - RNA, 22 nt, Human
uggccuuggcagugagaagagu

SEQ ID NO: 846063 - RNA, 22 nt, Human
aagauuuccauuucuagcucau

SEQ ID NO: 846064 - RNA, 22 nt, Human
ugcuucagaggaaaggcaaaag

SEQ ID NO: 846065 - RNA, 23 nt, Human
ucucagaggauuccugggccuug

SEQ ID NO: 846066 - RNA, 22 nt, Human
aaagguuaguucuuagaagugc

SEQ ID NO: 846067 - RNA, 22 nt, Human
acugcuuacaaaaggaaagaau

SEQ ID NO: 846068 - RNA, 22 nt, Human
gcuggcaucacuggcuucggug

SEQ ID NO: 846069 - RNA, 22 nt, Human
uagcugucagcaaucaaguggu

SEQ ID NO: 846070 - RNA, 22 nt, Human
uacaauacuuaaccuauuuugc

SEQ ID NO: 846071 - RNA, 22 nt, Human
ugcaagagguaaaaugaaagga

SEQ ID NO: 846072 - RNA, 23 nt, Human
cugaggccugcugcguucagguu

SEQ ID NO: 846073 - RNA, 22 nt, Human
acuuccugggcaugcagagucc

SEQ ID NO: 846074 - RNA, 22 nt, Human
ugguauaaaacuuuuuauugaa

SEQ ID NO: 846075 - RNA, 22 nt, Human
ucccagaggucucugcugguuc

SEQ ID NO: 846076 - RNA, 20 nt, Human
uccaguuuuggagacauucu

SEQ ID NO: 846077 - RNA, 22 nt, Human
caggccuccacuccacgcagac

SEQ ID NO: 846078 - RNA, 22 nt, Human
gccaccagugggggccugggca

SEQ ID NO: 846079 - RNA, 22 nt, Human
auucauuuagguauucacuuac

SEQ ID NO: 846080 - RNA, 20 nt, Human
aagagcauaguacaggaaga

SEQ ID NO: 846081 - RNA, 19 nt, Human
ggcucagggcgcugccgcc

SEQ ID NO: 846082 - RNA, 21 nt, Human
uggcacugcuuagcagguucc

SEQ ID NO: 846083 - RNA, 22 nt, Human
gggacuggaacuacuggugcag

SEQ ID NO: 846084 - RNA, 22 nt, Human
ucauuucuauugcuacugucug

SEQ ID NO: 846085 - RNA, 22 nt, Human
cacaaugugguuugucaucuuu

SEQ ID NO: 846086 - RNA, 22 nt, Human
ccucagggaggccucuguggcu

SEQ ID NO: 846087 - RNA, 22 nt, Human
cagaggcucaccagccuuucac

SEQ ID NO: 846088 - RNA, 22 nt, Human
uuagacaagggcuccuuaaaag

SEQ ID NO: 846089 - RNA, 23 nt, Human
aaucuggcugauguuuuuucucu

SEQ ID NO: 846090 - RNA, 22 nt, Human
ccugggcaaaugccagagacaa

SEQ ID NO: 846091 - RNA, 22 nt, Human
cacugcucgcugcagcauggcc

SEQ ID NO: 846092 - RNA, 22 nt, Human
agcccuggcccggcugugcuuu

SEQ ID NO: 846093 - RNA, 22 nt, Human
agcucagggcgaucugucucgg

SEQ ID NO: 846094 - RNA, 22 nt, Human
uugcccagaguccacagcguac

SEQ ID NO: 846095 - RNA, 22 nt, Human
cacccugggcugggccuguuaa

SEQ ID NO: 846096 - RNA, 22 nt, Human
cagauuucagcucauauauuau

SEQ ID NO: 846097 - RNA, 22 nt, Human
agggcuggaggguacuaguuua

SEQ ID NO: 846098 - RNA, 22 nt, Human
agaaaugcucaggucaacuuaa

SEQ ID NO: 846099 - RNA, 22 nt, Human
ccaggagaauaauggcagauua

SEQ ID NO: 846100 - RNA, 23 nt, Human
aggaggaaaaguuaucugcugag

SEQ ID NO: 846101 - RNA, 22 nt, Human
gcuggcaggagccuuucccuuu

SEQ ID NO: 846102 - RNA, 22 nt, Human
agaaucugguagaaccaaggau

SEQ ID NO: 846103 - RNA, 22 nt, Human
gcccaggccggagagcagugcu

SEQ ID NO: 846104 - RNA, 21 nt, Human
agcagaggggacauguuugau

SEQ ID NO: 846105 - RNA, 22 nt, Human
aaaacugaaauacgauccaaug

SEQ ID NO: 846106 - RNA, 22 nt, Human
guggccaggccgacugccaggc

SEQ ID NO: 846107 - RNA, 22 nt, Human
ugcuuuaacauaagauaucuuu

SEQ ID NO: 846108 - RNA, 22 nt, Human
cucuggagcgcugcuucccgcg

SEQ ID NO: 846109 - RNA, 22 nt, Human
gccaggcuccaggcccuccuga

SEQ ID NO: 846110 - RNA, 23 nt, Human
aacaauagguuuuggcagaauag

SEQ ID NO: 846111 - RNA, 22 nt, Human
uggagaggagcaccauggccau

SEQ ID NO: 846112 - RNA, 22 nt, Human
ucaguuuugauuccugguucuc

SEQ ID NO: 846113 - RNA, 22 nt, Human
ccuccaggaacuugagagacac

SEQ ID NO: 846114 - RNA, 22 nt, Human
gcaaggaccuuugagcgugcca

SEQ ID NO: 846115 - RNA, 22 nt, Human
gaggccagaagugccucgggcu

SEQ ID NO: 846116 - RNA, 19 nt, Human
ugagaaggcaguggggagc

SEQ ID NO: 846117 - RNA, 22 nt, Human
gugccagggggcacugaacaga

SEQ ID NO: 846118 - RNA, 21 nt, Human
guggcccugccgcagugucca

SEQ ID NO: 846119 - RNA, 22 nt, Human
ccugagggaggguauaggcugu

SEQ ID NO: 846120 - RNA, 22 nt, Human
agaauuuccuaugagagauucc

SEQ ID NO: 846121 - RNA, 22 nt, Human
uaaagccauacugaaagccacu

SEQ ID NO: 846122 - RNA, 22 nt, Human
agcaguggccuggggcucugug

SEQ ID NO: 846123 - RNA, 22 nt, Human
ugggcaggauaauaucucaugu

SEQ ID NO: 846124 - RNA, 22 nt, Human
uucauguaauuccauaagguaa

SEQ ID NO: 846125 - RNA, 20 nt, Human
ccugccuguguuugugauga

SEQ ID NO: 846126 - RNA, 20 nt, Human
acugagcugcauggagagga

SEQ ID NO: 846127 - RNA, 22 nt, Human
gccuaauaacuagcuguguaac

SEQ ID NO: 846128 - RNA, 22 nt, Human
aaaugcauggcuguuuuaaagc

SEQ ID NO: 846129 - RNA, 22 nt, Human
ccucagaggugaacaucagugc

SEQ ID NO: 846130 - RNA, 22 nt, Human
caaagguaguauauauauuguu

SEQ ID NO: 846131 - RNA, 22 nt, Human
cagcuuugauucuuucugccau

SEQ ID NO: 846132 - RNA, 22 nt, Human
ugcauggaggaagaugaaugca

SEQ ID NO: 846133 - RNA, 22 nt, Human
acacuuuguuguggcauauacg

SEQ ID NO: 846134 - RNA, 22 nt, Human
ucuggcucaucucuccagguaa

SEQ ID NO: 846135 - RNA, 22 nt, Human
uaaucugaagaaacaggacuug

SEQ ID NO: 846136 - RNA, 22 nt, Human
ugcucugggcaacagccucccu

SEQ ID NO: 846137 - RNA, 15 nt, Human
aaucagaaguguggc

SEQ ID NO: 846138 - RNA, 22 nt, Human
uauuucagcccuacuacuuggc

SEQ ID NO: 846139 - RNA, 22 nt, Human
ugagagugauugguucgaaugu

SEQ ID NO: 846140 - RNA, 22 nt, Human
gcuuucucuucacugauguuca

SEQ ID NO: 846141 - RNA, 22 nt, Human
agaauucuguucuucgggugug

SEQ ID NO: 846142 - RNA, 22 nt, Human
ggggcagaguagcuggggugug

SEQ ID NO: 846143 - RNA, 22 nt, Human
caggcuggagugaguguagugg

SEQ ID NO: 846144 - RNA, 22 nt, Human
ggcagcuaguuuaagaaagagg

SEQ ID NO: 846145 - RNA, 22 nt, Human
agagcugugcuuugcaccacgu

SEQ ID NO: 846146 - RNA, 22 nt, Human
aggccuggguguucaccagaag

SEQ ID NO: 846147 - RNA, 22 nt, Human
uggcucagucuggguugacuga

SEQ ID NO: 846148 - RNA, 22 nt, Human
cuggaaggcucugcugccuguc

SEQ ID NO: 846149 - RNA, 22 nt, Human
uugaggagucaggggcacggaa

SEQ ID NO: 846150 - RNA, 22 nt, Human
accugccuauggagccacaugg

SEQ ID NO: 846151 - RNA, 22 nt, Human
cuggaagaggaagccagcugga

SEQ ID NO: 846152 - RNA, 22 nt, Human
auauaaguuaguggucauguuu

SEQ ID NO: 846153 - RNA, 19 nt, Human
uuucaauggcuuagagaaa

SEQ ID NO: 846154 - RNA, 22 nt, Human
uggagccaggagccugggaguc

SEQ ID NO: 846155 - RNA, 22 nt, Human
uuaaaaucuaaagcaguugucu

SEQ ID NO: 846156 - RNA, 22 nt, Human
uugcaccauuucacuuccauua

SEQ ID NO: 846157 - RNA, 22 nt, Human
uaugacauuauaaaggauuauu

SEQ ID NO: 846158 - RNA, 22 nt, Human
gaaaugcagauucugauucugu

SEQ ID NO: 846159 - RNA, 22 nt, Human
uuccuccacgugacaggagcca

SEQ ID NO: 846160 - RNA, 22 nt, Human
ucacagacaauuguuuuggugu

SEQ ID NO: 846161 - RNA, 22 nt, Human
uucuauacaaagauuucucaca

SEQ ID NO: 846162 - RNA, 22 nt, Human
uggauuuaccacagggccacag

SEQ ID NO: 846163 - RNA, 22 nt, Human
aacccuggggcagcugcuaggg

SEQ ID NO: 846164 - RNA, 22 nt, Human
gggcuaggcuuggccagcacug

SEQ ID NO: 846165 - RNA, 22 nt, Human
auaugagaauuggaaaauauca

SEQ ID NO: 846166 - RNA, 22 nt, Human
gcagggaccugccacugcuguc

SEQ ID NO: 846167 - RNA, 22 nt, Human
gccuuggcugaugugcgaauga

SEQ ID NO: 846168 - RNA, 22 nt, Human
ccugagcuggaagagcuugugc

SEQ ID NO: 846169 - RNA, 22 nt, Human
aucugucaucagcaccacaggu

SEQ ID NO: 846170 - RNA, 22 nt, Human
uggagaggaaagugcaguuuug

SEQ ID NO: 846171 - RNA, 22 nt, Human
ccugccagggccuuggaagaaa

SEQ ID NO: 846172 - RNA, 22 nt, Human
agcaccugcuuaaugugcagug

SEQ ID NO: 846173 - RNA, 22 nt, Human
uacuguauuugauaagugaagu

SEQ ID NO: 846174 - RNA, 23 nt, Human
gggagaauaugaggaugauggug

SEQ ID NO: 846175 - RNA, 22 nt, Human
ccggggacuuaaagugaaggaa

SEQ ID NO: 846176 - RNA, 22 nt, Human
aacauacauauuucagugucca

SEQ ID NO: 846177 - RNA, 22 nt, Human
uacagcuaggcaaaaaugacau

SEQ ID NO: 846178 - RNA, 22 nt, Human
ccaggaagccucagaugcugag

SEQ ID NO: 846179 - RNA, 22 nt, Human
cuauaauuaugcucaaaaugua

SEQ ID NO: 846180 - RNA, 22 nt, Human
cacucccuucaggagccuagga

SEQ ID NO: 846181 - RNA, 22 nt, Human
ccugaggacacacgcugcagga

SEQ ID NO: 846182 - RNA, 22 nt, Human
uggaggagggcuggugucugua

SEQ ID NO: 846183 - RNA, 22 nt, Human
caugcuuaugauuugcuaagcc

SEQ ID NO: 846184 - RNA, 22 nt, Human
gcuggcagucccaucagcuggg

SEQ ID NO: 846185 - RNA, 22 nt, Human
agguagagcuccaguagaaaau

SEQ ID NO: 846186 - RNA, 22 nt, Human
uuggcugagagaggaaaagggc

SEQ ID NO: 846187 - RNA, 19 nt, Human
gcugcucugggucucaucu

SEQ ID NO: 846188 - RNA, 22 nt, Human
agaaguuguagguuugcauauu

SEQ ID NO: 846189 - RNA, 22 nt, Human
ccagcuggucugugcucauguu

SEQ ID NO: 846190 - RNA, 23 nt, Human
ucugcucugaaguucggcugagc

SEQ ID NO: 846191 - RNA, 22 nt, Human
agaggccuccgaaaggugggcu

SEQ ID NO: 846192 - RNA, 22 nt, Human
ggagacagugguagggccuaag

SEQ ID NO: 846193 - RNA, 18 nt, Human
aggcccuggccucgaaca

SEQ ID NO: 846194 - RNA, 22 nt, Human
cugcagaggucuugcugauggu

SEQ ID NO: 846195 - RNA, 22 nt, Human
acaugcuuugauguauuuugca

SEQ ID NO: 846196 - RNA, 22 nt, Human
cagccugcuagggcaaugccuu

SEQ ID NO: 846197 - RNA, 22 nt, Human
agcuggcccucgagagccaauu

SEQ ID NO: 846198 - RNA, 22 nt, Human
cuccaguaucuguaggaaaagg

SEQ ID NO: 846199 - RNA, 22 nt, Human
cugccuugaggagguuguggga

SEQ ID NO: 846200 - RNA, 22 nt, Human
augauucagcaauuuuauaucu

SEQ ID NO: 846201 - RNA, 22 nt, Human
gaugcacugcaguauauacugu

SEQ ID NO: 846202 - RNA, 19 nt, Human
gagcgcagagggcagggga

SEQ ID NO: 846203 - RNA, 22 nt, Human
gcacccagcccagggcgugaug

SEQ ID NO: 846204 - RNA, 22 nt, Human
agcugccuguccuaggccauca

SEQ ID NO: 846205 - RNA, 22 nt, Human
ugccagggcugcuacuggcuga

SEQ ID NO: 846206 - RNA, 22 nt, Human
aagagcuggucacagguccauu

SEQ ID NO: 846207 - RNA, 20 nt, Human
gugggcagaugugugcaugg

SEQ ID NO: 846208 - RNA, 23 nt, Human
uccuccuuuugcuugugcuuccc

SEQ ID NO: 846209 - RNA, 22 nt, Human
cugccugcugccuguggagggu

SEQ ID NO: 846210 - RNA, 22 nt, Human
auaacaugagccagauugaaag

SEQ ID NO: 846211 - RNA, 22 nt, Human
uggaaagaugaagauguuuaag

SEQ ID NO: 846212 - RNA, 22 nt, Human
gcccaggaguugguggcugcag

SEQ ID NO: 846213 - RNA, 22 nt, Human
uccucuggauauaagccucacc

SEQ ID NO: 846214 - RNA, 22 nt, Human
acccagaggcggagguugcagu

SEQ ID NO: 846215 - RNA, 22 nt, Human
agugucauaugccacugcaucc

SEQ ID NO: 846216 - RNA, 22 nt, Human
gcauggcugguguccugaggga

SEQ ID NO: 846217 - RNA, 22 nt, Human
auugucugaauccaaagcucug

SEQ ID NO: 846218 - RNA, 22 nt, Human
gggcagcagaggaucccuuaau

SEQ ID NO: 846219 - RNA, 22 nt, Human
cugccagcagaggccagcgcug

SEQ ID NO: 846220 - RNA, 22 nt, Human
ugggcucugugccagguuggug

SEQ ID NO: 846221 - RNA, 17 nt, Human
ugcauuguaggcuagcc

SEQ ID NO: 846222 - RNA, 22 nt, Human
ggcucaagcagucugccugccu

SEQ ID NO: 846223 - RNA, 22 nt, Human
augcaaaauaaggcagaaacau

SEQ ID NO: 846224 - RNA, 22 nt, Human
ucuggcucauaggaaggccauu

SEQ ID NO: 846225 - RNA, 22 nt, Human
aguguccaacucagcuugucaa

SEQ ID NO: 846226 - RNA, 22 nt, Human
ugggcagacgcuguuggaaggc

SEQ ID NO: 846227 - RNA, 22 nt, Human
aagauuucugcuccugagagaa

SEQ ID NO: 846228 - RNA, 22 nt, Human
aaaaguauuggccaccauuucu

SEQ ID NO: 846229 - RNA, 22 nt, Human
uaaagguacgaagugagggauu

SEQ ID NO: 846230 - RNA, 22 nt, Human
guaugaaaauuguaaaguucuu

SEQ ID NO: 846231 - RNA, 22 nt, Human
augucccagcugagagacaacu

SEQ ID NO: 846232 - RNA, 22 nt, Human
agauuuacugagaacugauuac

SEQ ID NO: 846233 - RNA, 21 nt, Human
agggagcuauuuauaguaagc

SEQ ID NO: 846234 - RNA, 22 nt, Human
ccaugcacaccagcaggcagac

SEQ ID NO: 846235 - RNA, 22 nt, Human
aaaugguauuuacucuguauua

SEQ ID NO: 846236 - RNA, 22 nt, Human
guuugucuuaauuaggcaucga

SEQ ID NO: 846237 - RNA, 23 nt, Human
uuuauccaacucuguaaucucuc

SEQ ID NO: 846238 - RNA, 22 nt, Human
ccagagucuuuauauuccugaa

SEQ ID NO: 846239 - RNA, 22 nt, Human
agagaaaagaguucaggcuuug

SEQ ID NO: 846240 - RNA, 22 nt, Human
auugcuguacacuucuagaucu

SEQ ID NO: 846241 - RNA, 22 nt, Human
agcagcaacuuauuuuucuuau

SEQ ID NO: 846242 - RNA, 22 nt, Human
ggcauggcuggguucuggugag

SEQ ID NO: 846243 - RNA, 22 nt, Human
cagaggcugggaccucaggcau

SEQ ID NO: 846244 - RNA, 19 nt, Human
uucuccagccugaccugag

SEQ ID NO: 846245 - RNA, 22 nt, Human
caaaugauacuguuuuuagucu

SEQ ID NO: 846246 - RNA, 22 nt, Human
acagggccauuaucuguucuag

SEQ ID NO: 846247 - RNA, 22 nt, Human
auuauuauuguugauguuaggg

SEQ ID NO: 846248 - RNA, 20 nt, Human
agacccuguguccuguggcc

SEQ ID NO: 846249 - RNA, 22 nt, Human
cccagcccaucucaaaggucua

SEQ ID NO: 846250 - RNA, 22 nt, Human
uugaauaauaugcuucguucuc

SEQ ID NO: 846251 - RNA, 22 nt, Human
aacuuucagcaaguaauucugg

SEQ ID NO: 846252 - RNA, 22 nt, Human
agagccaggaucuguuuugggg

SEQ ID NO: 846253 - RNA, 22 nt, Human
cuuggcagagggcugggcucag

SEQ ID NO: 846254 - RNA, 22 nt, Human
gugcuaaaggguuaugaacaag

SEQ ID NO: 846255 - RNA, 22 nt, Human
gggagccaaggagagaggccuu

SEQ ID NO: 846256 - RNA, 22 nt, Human
uggcacugccuggcagggcccc

SEQ ID NO: 846257 - RNA, 22 nt, Human
auauuucaugggguuccauacu

SEQ ID NO: 846258 - RNA, 20 nt, Human
gcccuggagccuuguccugg

SEQ ID NO: 846259 - RNA, 22 nt, Human
uuuaagaaguuauguuauaaau

SEQ ID NO: 846260 - RNA, 22 nt, Human
ucuaggagcaugaagggaaggc

SEQ ID NO: 846261 - RNA, 22 nt, Human
ggcucagggaaugaggaagaau

SEQ ID NO: 846262 - RNA, 22 nt, Human
gcccucagaggacagcugacuu

SEQ ID NO: 846263 - RNA, 20 nt, Human
uuccagagaucugcauuuua

SEQ ID NO: 846264 - RNA, 17 nt, Human
gccuggcccagccuggc

SEQ ID NO: 846265 - RNA, 22 nt, Human
uuucucaguuacuagcuguggu

SEQ ID NO: 846266 - RNA, 22 nt, Human
ggagagaauuccauggacaugu

SEQ ID NO: 846267 - RNA, 22 nt, Human
uccucuggcccagcugccucug

SEQ ID NO: 846268 - RNA, 22 nt, Human
uuuuccuguccaggcaauuauu

SEQ ID NO: 846269 - RNA, 22 nt, Human
ccagggcaugggaagaacugaa

SEQ ID NO: 846270 - RNA, 22 nt, Human
gcugggagugggcaagaugaga

SEQ ID NO: 846271 - RNA, 22 nt, Human
cucaggauuuacuaauuucaag

SEQ ID NO: 846272 - RNA, 21 nt, Human
ggcagcccgcccucuccuggc

SEQ ID NO: 846273 - RNA, 22 nt, Human
cucagcagagaccagggaggaa

SEQ ID NO: 846274 - RNA, 22 nt, Human
uaaggcacccgugagcugccag

SEQ ID NO: 846275 - RNA, 22 nt, Human
aaaauugagagucuugugcaag

SEQ ID NO: 846276 - RNA, 22 nt, Human
agccucucugaugugacagcua

SEQ ID NO: 846277 - RNA, 22 nt, Human
ggagauuuauagcacacuucag

SEQ ID NO: 846278 - RNA, 22 nt, Human
cugugagcuggguggccaggac

SEQ ID NO: 846279 - RNA, 22 nt, Human
uucauucccaagaguaaacaua

SEQ ID NO: 846280 - RNA, 19 nt, Human
gccacuccugaugcugccc

SEQ ID NO: 846281 - RNA, 22 nt, Human
aacuuuguguguuuaauauggc

SEQ ID NO: 846282 - RNA, 22 nt, Human
guguaauugaaauugagaacca

SEQ ID NO: 846283 - RNA, 22 nt, Human
cugggcagccucacacaauguu

SEQ ID NO: 846284 - RNA, 21 nt, Human
agcagaggcagaauguaugca

SEQ ID NO: 846285 - RNA, 22 nt, Human
uaaggcacccuucugaguagag

SEQ ID NO: 846286 - RNA, 19 nt, Human
gcauaaaaugucaaugugu

SEQ ID NO: 846287 - RNA, 22 nt, Human
uucucuuugacauuauucaggu

SEQ ID NO: 846288 - RNA, 22 nt, Human
cagguggaucucuaaggacuga

SEQ ID NO: 846289 - RNA, 22 nt, Human
ccagguggacggcgaguacagg

SEQ ID NO: 846290 - RNA, 22 nt, Human
ucacacgugagguucuauccug

SEQ ID NO: 846291 - RNA, 22 nt, Human
agaauucugacaauagaauugg

SEQ ID NO: 846292 - RNA, 22 nt, Human
agaaacauuuagauuauauguc

SEQ ID NO: 846293 - RNA, 22 nt, Human
ggaaaguggugguggaaagagg

SEQ ID NO: 846294 - RNA, 21 nt, Human
ucagggcagugggagguuccu

SEQ ID NO: 846295 - RNA, 22 nt, Human
ccaaggagcaaggcucaacaag

SEQ ID NO: 846296 - RNA, 18 nt, Human
uccucucuuuccccaggg

SEQ ID NO: 846297 - RNA, 23 nt, Human
acuauaaaguuguucugauuuac

SEQ ID NO: 846298 - RNA, 22 nt, Human
uggcucugccacuaacuuggua

SEQ ID NO: 846299 - RNA, 22 nt, Human
gaagcccuauccucuccuggga

SEQ ID NO: 846300 - RNA, 22 nt, Human
ccuggccucagccuagggcuga

SEQ ID NO: 846301 - RNA, 22 nt, Human
gaaggaggcguuagcccuagga

SEQ ID NO: 846302 - RNA, 22 nt, Human
uguaaauaguuagcuugccucu

SEQ ID NO: 846303 - RNA, 22 nt, Human
aggcagcuggacauaacuaacc

SEQ ID NO: 846304 - RNA, 22 nt, Human
gccugccuuuguaugacccuga

SEQ ID NO: 846305 - RNA, 22 nt, Human
caugggaggucugcaaggugcu

SEQ ID NO: 846306 - RNA, 22 nt, Human
gccagggaggcuguaggguccu

SEQ ID NO: 846307 - RNA, 22 nt, Human
uggaaggcaugggaacuguucu

SEQ ID NO: 846308 - RNA, 22 nt, Human
ugcacccucaucagucaaaugg

SEQ ID NO: 846309 - RNA, 22 nt, Human
caccagacagguguaugcauau

SEQ ID NO: 846310 - RNA, 22 nt, Human
gagauggggaauaggagcaagc

SEQ ID NO: 846311 - RNA, 22 nt, Human
cacagucacauaucuaugugug

SEQ ID NO: 846312 - RNA, 22 nt, Human
cagcaggguuaagugacucacc

SEQ ID NO: 846313 - RNA, 22 nt, Human
aaguuugagaagcuuauagaua

SEQ ID NO: 846314 - RNA, 21 nt, Human
ucuguacaucauugagucccc

SEQ ID NO: 846315 - RNA, 17 nt, Human
agauggcaggaggcaga

SEQ ID NO: 846316 - RNA, 22 nt, Human
gcucugagauugagccuuuggu

SEQ ID NO: 846317 - RNA, 22 nt, Human
ucucaggaucuaauacauggua

SEQ ID NO: 846318 - RNA, 22 nt, Human
ugagagucucagaccuccuggu

SEQ ID NO: 846319 - RNA, 22 nt, Human
agguacagggugaaaguuuaug

SEQ ID NO: 846320 - RNA, 22 nt, Human
gcugcucugcuguguaagcagg

SEQ ID NO: 846321 - RNA, 22 nt, Human
acagcagagacacucaggaggc

SEQ ID NO: 846322 - RNA, 22 nt, Human
ugcauggacucaucagacaaga

SEQ ID NO: 846323 - RNA, 22 nt, Human
agagcugaaaaagcugacccgg

SEQ ID NO: 846324 - RNA, 22 nt, Human
gguuggggcgagcuggaggccc

SEQ ID NO: 846325 - RNA, 22 nt, Human
ccaggcugccgaggaaagaaag

SEQ ID NO: 846326 - RNA, 22 nt, Human
gccuuucaguuccaucaaagga

SEQ ID NO: 846327 - RNA, 22 nt, Human
agcuugaguuuuggaugaagug

SEQ ID NO: 846328 - RNA, 22 nt, Human
ccagucacagguguguuuauau

SEQ ID NO: 846329 - RNA, 22 nt, Human
ggcagaggaagcuggaaguggg

SEQ ID NO: 846330 - RNA, 20 nt, Human
accaggagauggaggcaggg

SEQ ID NO: 846331 - RNA, 22 nt, Human
ugugccaugaggcucugauaug

SEQ ID NO: 846332 - RNA, 21 nt, Human
aaggagccuaggaggcucagg

SEQ ID NO: 846333 - RNA, 22 nt, Human
gccaggagccagcuucuuagca

SEQ ID NO: 846334 - RNA, 20 nt, Human
ccagcauguacacaugugga

SEQ ID NO: 846335 - RNA, 22 nt, Human
cacuacuugaaagaauuacaga

SEQ ID NO: 846336 - RNA, 22 nt, Human
cugagccaaggggacagugaca

SEQ ID NO: 846337 - RNA, 22 nt, Human
aaauauagugacacuuauaguc

SEQ ID NO: 846338 - RNA, 22 nt, Human
ucucagagaagugaugagcaau

SEQ ID NO: 846339 - RNA, 22 nt, Human
aauaaauguuaagauugucuca

SEQ ID NO: 846340 - RNA, 22 nt, Human
aggagaaagacuggacagccaa

SEQ ID NO: 846341 - RNA, 22 nt, Human
uaguccagccuuggguguagcc

SEQ ID NO: 846342 - RNA, 22 nt, Human
ucacugcagacaaccucaguca

SEQ ID NO: 846343 - RNA, 22 nt, Human
uugaauucauuucucauugagu

SEQ ID NO: 846344 - RNA, 21 nt, Human
aaauacagaaacuuguuuuca

SEQ ID NO: 846345 - RNA, 22 nt, Human
acuuagaacaggcagaauucca

SEQ ID NO: 846346 - RNA, 22 nt, Human
auacagaauucacuacaguuuc

SEQ ID NO: 846347 - RNA, 22 nt, Human
uggagagguuuaaacaaaaguu

SEQ ID NO: 846348 - RNA, 22 nt, Human
cugcccaggcugaaggaacauc

SEQ ID NO: 846349 - RNA, 22 nt, Human
cucucuucccgugaguguugca

SEQ ID NO: 846350 - RNA, 22 nt, Human
acuauacaguauguacgugcac

SEQ ID NO: 846351 - RNA, 22 nt, Human
gcugcugucagugguggcaguu

SEQ ID NO: 846352 - RNA, 21 nt, Human
cucaggauggcggccuggugg

SEQ ID NO: 846353 - RNA, 22 nt, Human
gcagaggccuagguggaaggcc

SEQ ID NO: 846354 - RNA, 22 nt, Human
uacaguauguucuugaauuugg

SEQ ID NO: 846355 - RNA, 22 nt, Human
cuuauuauaaaauccuguuuga

SEQ ID NO: 846356 - RNA, 22 nt, Human
cacagaagaaucaugcuguguu

SEQ ID NO: 846357 - RNA, 22 nt, Human
cagggagaaaucuccaggaggu

SEQ ID NO: 846358 - RNA, 22 nt, Human
aggagggaccuaggaauauugc

SEQ ID NO: 846359 - RNA, 22 nt, Human
ucugucugagggagugacauuu

SEQ ID NO: 846360 - RNA, 22 nt, Human
agagagcauugaggaaaucuuc

SEQ ID NO: 846361 - RNA, 22 nt, Human
agggacaguuacaucaucagac

SEQ ID NO: 846362 - RNA, 22 nt, Human
aguuuauguaaaauuaguaaug

SEQ ID NO: 846363 - RNA, 22 nt, Human
aaugaacaaaauaugcuuugca

SEQ ID NO: 846364 - RNA, 19 nt, Human
augcuuuauguuauuucuu

SEQ ID NO: 846365 - RNA, 22 nt, Human
gcagggcuauuggaaggagaug

SEQ ID NO: 846366 - RNA, 22 nt, Human
gaagugaagguuacucuagauu

SEQ ID NO: 846367 - RNA, 22 nt, Human
ccugggcauaaaucacuccaag

SEQ ID NO: 846368 - RNA, 22 nt, Human
cacuguaucuuuuccaaagucu

SEQ ID NO: 846369 - RNA, 22 nt, Human
acauuucuauagugcaucuguu

SEQ ID NO: 846370 - RNA, 22 nt, Human
aaucuggcucagaagaagauga

SEQ ID NO: 846371 - RNA, 22 nt, Human
uuuauacauggagaauuuuugc

SEQ ID NO: 846372 - RNA, 22 nt, Human
cuggagccggcgagccccagcc

SEQ ID NO: 846373 - RNA, 19 nt, Human
agcaaauacaucaaaauug

SEQ ID NO: 846374 - RNA, 22 nt, Human
ugcagcagcagggaggaggcuc

SEQ ID NO: 846375 - RNA, 22 nt, Human
aggagucauaaaugugaacaaa

SEQ ID NO: 846376 - RNA, 22 nt, Human
ucacaggguaucugggauggau

SEQ ID NO: 846377 - RNA, 22 nt, Human
auuguaaguagaaauguuaugg

SEQ ID NO: 846378 - RNA, 22 nt, Human
uuuacagaucuguugauuuguu

SEQ ID NO: 846379 - RNA, 19 nt, Human
uuggaaggagccagagugg

SEQ ID NO: 846380 - RNA, 22 nt, Human
aggggccugguuggccucuguu

SEQ ID NO: 846381 - RNA, 22 nt, Human
uauuucuggcuuugagggugau

SEQ ID NO: 846382 - RNA, 22 nt, Human
uuucuucacaggguauugggug

SEQ ID NO: 846383 - RNA, 22 nt, Human
ccacugucagaggggcugugcc

SEQ ID NO: 846384 - RNA, 22 nt, Human
ggcuuccuuucacuacccucag

SEQ ID NO: 846385 - RNA, 22 nt, Human
ggcugcaggcaggguauccacu

SEQ ID NO: 846386 - RNA, 22 nt, Human
ggcagcuucuuaauauggagac

SEQ ID NO: 846387 - RNA, 22 nt, Human
cacacucauuagucauuucucu

SEQ ID NO: 846388 - RNA, 22 nt, Human
caggcagcucugcuuuuccuaa

SEQ ID NO: 846389 - RNA, 22 nt, Human
uguaacaguaagccugugagcu

SEQ ID NO: 846390 - RNA, 22 nt, Human
uuguuaaaaugcauauucuggu

SEQ ID NO: 846391 - RNA, 22 nt, Human
aaguugaaugcguacgugacau

SEQ ID NO: 846392 - RNA, 22 nt, Human
cagcugagcaucacuagucugg

SEQ ID NO: 846393 - RNA, 22 nt, Human
agagccagcauuugggcccugc

SEQ ID NO: 846394 - RNA, 22 nt, Human
caaauaucuuuggcaaagagaa

SEQ ID NO: 846395 - RNA, 22 nt, Human
uggccucuggcugaggacuaac

SEQ ID NO: 846396 - RNA, 22 nt, Human
uaaaguuuggcagacaauaaca

SEQ ID NO: 846397 - RNA, 22 nt, Human
uuucucaucuggaaacagugcu

SEQ ID NO: 846398 - RNA, 22 nt, Human
uggcucaggugugagcugaaga

SEQ ID NO: 846399 - RNA, 22 nt, Human
cuacagaaucuaccucaagcca

SEQ ID NO: 846400 - RNA, 22 nt, Human
uguucucacuggaugcuucaca

SEQ ID NO: 846401 - RNA, 22 nt, Human
ucucuggaauuuugagagugac

SEQ ID NO: 846402 - RNA, 22 nt, Human
uggcagcugaauggcuggaugg

SEQ ID NO: 846403 - RNA, 22 nt, Human
gccugugcauagcagcggacuc

SEQ ID NO: 846404 - RNA, 22 nt, Human
aggagagggguaggauuaauuu

SEQ ID NO: 846405 - RNA, 19 nt, Human
agaaguuagacauugcaau

SEQ ID NO: 846406 - RNA, 22 nt, Human
auacagaauacuaauuccugag

SEQ ID NO: 846407 - RNA, 22 nt, Human
ggugccaggcucccagcucagg

SEQ ID NO: 846408 - RNA, 22 nt, Human
gcugcccugucugcagcaggac

SEQ ID NO: 846409 - RNA, 22 nt, Human
ucuccugugcacccucccugug

SEQ ID NO: 846410 - RNA, 22 nt, Human
guccucuggccuuucccaggac

SEQ ID NO: 846411 - RNA, 22 nt, Human
cugaggcugcccagggccaggu

SEQ ID NO: 846412 - RNA, 22 nt, Human
ccagagcaauucucacagaacu

SEQ ID NO: 846413 - RNA, 22 nt, Human
ucccagccugacagugcaucaa

SEQ ID NO: 846414 - RNA, 22 nt, Human
ugagccagauaagggcucacgc

SEQ ID NO: 846415 - RNA, 20 nt, Human
cagucccaauccagggccag

SEQ ID NO: 846416 - RNA, 22 nt, Human
cgaggcagggaagcugcaaaag

SEQ ID NO: 846417 - RNA, 22 nt, Human
gugggcuggacccuccugcucc

SEQ ID NO: 846418 - RNA, 22 nt, Human
uuccauaaugagauucccagcc

SEQ ID NO: 846419 - RNA, 22 nt, Human
agccauugaguuuuaugugcua

SEQ ID NO: 846420 - RNA, 22 nt, Human
gaggccagggaugcaaugagag

SEQ ID NO: 846421 - RNA, 22 nt, Human
auguaguguagagauuagucuc

SEQ ID NO: 846422 - RNA, 22 nt, Human
cccagccugucuuucccaauga

SEQ ID NO: 846423 - RNA, 22 nt, Human
ggccgggcaggucucagccagc

SEQ ID NO: 846424 - RNA, 22 nt, Human
uguuaacaucuuggacucguga

SEQ ID NO: 846425 - RNA, 22 nt, Human
uccaugaggaccaaauucguag

SEQ ID NO: 846426 - RNA, 22 nt, Human
ugccuugguucucuacuuggag

SEQ ID NO: 846427 - RNA, 22 nt, Human
uccaggagacacaagguacaua

SEQ ID NO: 846428 - RNA, 18 nt, Human
cacaggcucccagugagg

SEQ ID NO: 846429 - RNA, 22 nt, Human
aaaguuugucacuuggcuagaa

SEQ ID NO: 846430 - RNA, 20 nt, Human
ugcagcuucaccugugucau

SEQ ID NO: 846431 - RNA, 22 nt, Human
augcuuuaaaugucuuuugcuu

SEQ ID NO: 846432 - RNA, 22 nt, Human
uaaugcaguacugauauaaaca

SEQ ID NO: 846433 - RNA, 22 nt, Human
guucucucugcuuccaagaugg

SEQ ID NO: 846434 - RNA, 22 nt, Human
aaugucauugguaaagauuagg

SEQ ID NO: 846435 - RNA, 22 nt, Human
ugccucuguugagccuuggcug

SEQ ID NO: 846436 - RNA, 22 nt, Human
cagagugaaauaggggaucaag

SEQ ID NO: 846437 - RNA, 22 nt, Human
cuggcucuucagugcuugguuc

SEQ ID NO: 846438 - RNA, 22 nt, Human
gaauuucagggucugguaggaa

SEQ ID NO: 846439 - RNA, 22 nt, Human
caagaauccuguucuugaagau

SEQ ID NO: 846440 - RNA, 22 nt, Human
acaggcucuggggcaggauggc

SEQ ID NO: 846441 - RNA, 22 nt, Human
cauugaaaaacguugacugagu

SEQ ID NO: 846442 - RNA, 22 nt, Human
cauggaaggcaaaagacacaga

SEQ ID NO: 846443 - RNA, 21 nt, Human
auuuccaaauaaggucacauu

SEQ ID NO: 846444 - RNA, 23 nt, Human
agcuggguggccugcgugaagcu

SEQ ID NO: 846445 - RNA, 22 nt, Human
aaauaauugaguuggucaauau

SEQ ID NO: 846446 - RNA, 22 nt, Human
ucaggagaaagccaauuagagu

SEQ ID NO: 846447 - RNA, 22 nt, Human
agcugcaguaaagcucuccagg

SEQ ID NO: 846448 - RNA, 22 nt, Human
gcaggaugggagcuucacucug

SEQ ID NO: 846449 - RNA, 22 nt, Human
cuucuucacacuggucugaagc

SEQ ID NO: 846450 - RNA, 22 nt, Human
aauguugaggauaucagaaaau

SEQ ID NO: 846451 - RNA, 22 nt, Human
ggugguggagccagcugggagu

SEQ ID NO: 846452 - RNA, 22 nt, Human
ggccuggaagaggacagagaaa

SEQ ID NO: 846453 - RNA, 22 nt, Human
aagcaaagaguuuaguggguga

SEQ ID NO: 846454 - RNA, 22 nt, Human
gagggagucugugcaaagaauu

SEQ ID NO: 846455 - RNA, 21 nt, Human
ugccagggauuuacagagccu

SEQ ID NO: 846456 - RNA, 22 nt, Human
ucccagaguauuagcaauugcu

SEQ ID NO: 846457 - RNA, 22 nt, Human
ggcuucaccgcgggguugcagg

SEQ ID NO: 846458 - RNA, 22 nt, Human
aggcagaggaaggguggauuug

SEQ ID NO: 846459 - RNA, 22 nt, Human
uuuuucuugugcuggaucuaau

SEQ ID NO: 846460 - RNA, 22 nt, Human
cccugccugugggcaucaacau

SEQ ID NO: 846461 - RNA, 22 nt, Human
gggcuucuagaccagcagugag

SEQ ID NO: 846462 - RNA, 22 nt, Human
gaaauauugggacucagagcuu

SEQ ID NO: 846463 - RNA, 22 nt, Human
auuccaaaaggauguuagaaug

SEQ ID NO: 846464 - RNA, 22 nt, Human
ggggcagaaagcccacagagug

SEQ ID NO: 846465 - RNA, 22 nt, Human
cuccaugaauuugagcuuugug

SEQ ID NO: 846466 - RNA, 22 nt, Human
gggcuuggcacaugggcucagc

SEQ ID NO: 846467 - RNA, 22 nt, Human
gaacacauuagucugaguuggc

SEQ ID NO: 846468 - RNA, 22 nt, Human
cauggccuugagugacugcacu

SEQ ID NO: 846469 - RNA, 22 nt, Human
acacaugcauaagccuucccuu

SEQ ID NO: 846470 - RNA, 22 nt, Human
uaacacauauuucaagaguagu

SEQ ID NO: 846471 - RNA, 22 nt, Human
acccaggagccgugagagguua

SEQ ID NO: 846472 - RNA, 22 nt, Human
ugcagaagugagucaugaggaa

SEQ ID NO: 846473 - RNA, 22 nt, Human
caagaaaugggauuugacugcc

SEQ ID NO: 846474 - RNA, 22 nt, Human
cuggagccugcaguuuucacuu

SEQ ID NO: 846475 - RNA, 22 nt, Human
ggagagcagggaggcugcucug

SEQ ID NO: 846476 - RNA, 22 nt, Human
ggaucauuaacacauccaucac

SEQ ID NO: 846477 - RNA, 22 nt, Human
auuuucaucauggguuuaacau

SEQ ID NO: 846478 - RNA, 22 nt, Human
auauacugaggagacuuuauau

SEQ ID NO: 846479 - RNA, 22 nt, Human
cagcugugcuguauuaagcucu

SEQ ID NO: 846480 - RNA, 22 nt, Human
aaguuucauguggagguagacu

SEQ ID NO: 846481 - RNA, 21 nt, Human
auacagaagguggcaaaguac

SEQ ID NO: 846482 - RNA, 22 nt, Human
uuauguaauuuguuugcucuuc

SEQ ID NO: 846483 - RNA, 22 nt, Human
auucuucauacagacaaguccu

SEQ ID NO: 846484 - RNA, 22 nt, Human
ccugagagcagcuuccugcuua

SEQ ID NO: 846485 - RNA, 22 nt, Human
cacaccuguaauaccagcuacu

SEQ ID NO: 846486 - RNA, 22 nt, Human
guuugcauguguacuuaauugg

SEQ ID NO: 846487 - RNA, 22 nt, Human
ggccugcuucucagugagcuug

SEQ ID NO: 846488 - RNA, 22 nt, Human
gucuucaauagagccucaauuu

SEQ ID NO: 846489 - RNA, 22 nt, Human
gccaggagaaugcuagcagagg

SEQ ID NO: 846490 - RNA, 22 nt, Human
ucagagaacacagaggugaugu

SEQ ID NO: 846491 - RNA, 22 nt, Human
uagauuucgcugcaucucaauc

SEQ ID NO: 846492 - RNA, 22 nt, Human
cuggccuggucuggccucucca

SEQ ID NO: 846493 - RNA, 22 nt, Human
uagaggugucacuuugggaagu

SEQ ID NO: 846494 - RNA, 22 nt, Human
cuccagaagacccauccucaug

SEQ ID NO: 846495 - RNA, 21 nt, Human
aauguauguuuaucucacagu

SEQ ID NO: 846496 - RNA, 22 nt, Human
agaggaugauuuuaaggacacu

SEQ ID NO: 846497 - RNA, 22 nt, Human
ugcucuggaguggcuugugcac

SEQ ID NO: 846498 - RNA, 22 nt, Human
ccuggaucccgauggcugugag

SEQ ID NO: 846499 - RNA, 22 nt, Human
cagcagcugauggggaagugau

SEQ ID NO: 846500 - RNA, 22 nt, Human
cauuuguaguaucuguuuauau

SEQ ID NO: 846501 - RNA, 22 nt, Human
ccacccuuggguucggaggccg

SEQ ID NO: 846502 - RNA, 22 nt, Human
ccucacuuuccuuucuccuggg

SEQ ID NO: 846503 - RNA, 22 nt, Human
gagaggaguuacuauuuccgag

SEQ ID NO: 846504 - RNA, 19 nt, Human
ccagguggaacugagguag

SEQ ID NO: 846505 - RNA, 22 nt, Human
agugcauuauauguuucaaugg

SEQ ID NO: 846506 - RNA, 22 nt, Human
aguauugugacucaaguauucu

SEQ ID NO: 846507 - RNA, 21 nt, Human
gagugcaggucugaugccauc

SEQ ID NO: 846508 - RNA, 22 nt, Human
cacauuugaaggaauuagcauu

SEQ ID NO: 846509 - RNA, 22 nt, Human
gugucccagccccacaggccug

SEQ ID NO: 846510 - RNA, 19 nt, Human
aggucauugauagugcagg

SEQ ID NO: 846511 - RNA, 22 nt, Human
agcugcucaggagagccagguc

SEQ ID NO: 846512 - RNA, 22 nt, Human
cagaggccuuucuacagugaua

SEQ ID NO: 846513 - RNA, 22 nt, Human
acacaugcugauaagaauauaa

SEQ ID NO: 846514 - RNA, 22 nt, Human
gagaagcaauuuccaacugugc

SEQ ID NO: 846515 - RNA, 22 nt, Human
cugucugucaaguucaucucca

SEQ ID NO: 846516 - RNA, 20 nt, Human
uugauucaagggcugaugga

SEQ ID NO: 846517 - RNA, 22 nt, Human
aaugaacaggugaaugucagau

SEQ ID NO: 846518 - RNA, 22 nt, Human
cuuccaaauguaaauaaguuuc

SEQ ID NO: 846519 - RNA, 22 nt, Human
gauggcagguaguggucucauc

SEQ ID NO: 846520 - RNA, 22 nt, Human
acaaagugaauugcaucgaguu

SEQ ID NO: 846521 - RNA, 22 nt, Human
aauacugagaucccacaaagca

SEQ ID NO: 846522 - RNA, 22 nt, Human
aucuuucaguuucauaccaauu

SEQ ID NO: 846523 - RNA, 22 nt, Human
acaugaaaaauguuugcaguuu

SEQ ID NO: 846524 - RNA, 22 nt, Human
cucuggaguuagugaucugggc

SEQ ID NO: 846525 - RNA, 22 nt, Human
guuauguaaucuaacacucagu

SEQ ID NO: 846526 - RNA, 22 nt, Human
cagaguguuagcgcugguuggg

SEQ ID NO: 846527 - RNA, 22 nt, Human
ucuggcucacuucaggcuucac

SEQ ID NO: 846528 - RNA, 22 nt, Human
aacuagaaaacaagaugcugau

SEQ ID NO: 846529 - RNA, 22 nt, Human
gcuggccugcgagggcaggcug

SEQ ID NO: 846530 - RNA, 22 nt, Human
ggugcagaggagccagcugggg

SEQ ID NO: 846531 - RNA, 22 nt, Human
cagccaggcccccgagucguug

SEQ ID NO: 846532 - RNA, 23 nt, Human
uggggccaagugaggaagggucu

SEQ ID NO: 846533 - RNA, 22 nt, Human
gggcacuggaaggcucucaggc

SEQ ID NO: 846534 - RNA, 22 nt, Human
auuugcagagcucugaauuuug

SEQ ID NO: 846535 - RNA, 22 nt, Human
cagcaaaauuugaggauugccu

SEQ ID NO: 846536 - RNA, 22 nt, Human
caggcugcagugcaguggcuau

SEQ ID NO: 846537 - RNA, 22 nt, Human
ggcucugccugcccagcagcac

SEQ ID NO: 846538 - RNA, 22 nt, Human
cacaauuuguuuuaucaguauu

SEQ ID NO: 846539 - RNA, 22 nt, Human
cugccgaguacagccauagaaa

SEQ ID NO: 846540 - RNA, 22 nt, Human
gauggcacacagacauccccgc

SEQ ID NO: 846541 - RNA, 22 nt, Human
acauauauuacuaguaaagaca

SEQ ID NO: 846542 - RNA, 22 nt, Human
uuccggaagguucucuagaauu

SEQ ID NO: 846543 - RNA, 22 nt, Human
uacuuuuagccuauuugauucu

SEQ ID NO: 846544 - RNA, 22 nt, Human
gagcagcugagcuggaaugaga

SEQ ID NO: 846545 - RNA, 22 nt, Human
uuagaaaugauuucaccucuuu

SEQ ID NO: 846546 - RNA, 22 nt, Human
aagcagccaccucaucuccacu

SEQ ID NO: 846547 - RNA, 22 nt, Human
ccuggagaccagaggauacuuc

SEQ ID NO: 846548 - RNA, 22 nt, Human
acagggcccuugccagcacaag

SEQ ID NO: 846549 - RNA, 22 nt, Human
aucaguuuuguucacuacuaua

SEQ ID NO: 846550 - RNA, 22 nt, Human
uggggaagggcacccuggagac

SEQ ID NO: 846551 - RNA, 22 nt, Human
ccaggcugcuuagccuuaucuu

SEQ ID NO: 846552 - RNA, 22 nt, Human
gcagcaaucuucacagugucau

SEQ ID NO: 846553 - RNA, 22 nt, Human
uuauuuuuaaaaguucacacag

SEQ ID NO: 846554 - RNA, 22 nt, Human
acagaggaaggcugagcugccc

SEQ ID NO: 846555 - RNA, 22 nt, Human
ucagccagguaauguggagaug

SEQ ID NO: 846556 - RNA, 22 nt, Human
uaaagguaugucuuaaucaaac

SEQ ID NO: 846557 - RNA, 22 nt, Human
uggcuggcgccgggcuagccac

SEQ ID NO: 846558 - RNA, 22 nt, Human
guuccuauauagccuuaaggau

SEQ ID NO: 846559 - RNA, 22 nt, Human
gcucagagaugucugcugccuu

SEQ ID NO: 846560 - RNA, 22 nt, Human
agcccaugcaacaggccuagcg

SEQ ID NO: 846561 - RNA, 21 nt, Human
auucagaguaauucaucuuua

SEQ ID NO: 846562 - RNA, 22 nt, Human
uaaguccuagcuuugguaggaa

SEQ ID NO: 846563 - RNA, 22 nt, Human
cuggccagcugacagcagggcu

SEQ ID NO: 846564 - RNA, 22 nt, Human
gcaggcuccaggccggccccuu

SEQ ID NO: 846565 - RNA, 22 nt, Human
ugaagccagcuuuggaagacac

SEQ ID NO: 846566 - RNA, 22 nt, Human
cauaaaauggcuuguucuuuaa

SEQ ID NO: 846567 - RNA, 22 nt, Human
uucuucaguuugguaaauguaa

SEQ ID NO: 846568 - RNA, 22 nt, Human
uuugacagcuuguuacaaaguu

SEQ ID NO: 846569 - RNA, 22 nt, Human
uguaaaaccaaaucaaucuagu

SEQ ID NO: 846570 - RNA, 22 nt, Human
agcuggagaugcccagcaccgg

SEQ ID NO: 846571 - RNA, 22 nt, Human
ucagagugcagggaguagcagc

SEQ ID NO: 846572 - RNA, 22 nt, Human
ggucccaggagaauaggugcaa

SEQ ID NO: 846573 - RNA, 22 nt, Human
gccagcucagugccaggccccu

SEQ ID NO: 846574 - RNA, 22 nt, Human
aagcagccuggcaugaugcuuu

SEQ ID NO: 846575 - RNA, 22 nt, Human
aacaugcucuguuucuuggaug

SEQ ID NO: 846576 - RNA, 22 nt, Human
cucuuccucucaugcggucaua

SEQ ID NO: 846577 - RNA, 22 nt, Human
cugugcaguaggucagggcugg

SEQ ID NO: 846578 - RNA, 22 nt, Human
aaggcccuggcaggaagcagga

SEQ ID NO: 846579 - RNA, 22 nt, Human
uaaguccuaauggcagaagucu

SEQ ID NO: 846580 - RNA, 22 nt, Human
ggcugccagugagugcagaccg

SEQ ID NO: 846581 - RNA, 22 nt, Human
cuuaaauuuucaucuacaagaa

SEQ ID NO: 846582 - RNA, 22 nt, Human
ccauggaguuccucuggucuau

SEQ ID NO: 846583 - RNA, 22 nt, Human
caggaaccuaaugaaggcucac

SEQ ID NO: 846584 - RNA, 22 nt, Human
aggcacugggaauaugcugagg

SEQ ID NO: 846585 - RNA, 22 nt, Human
auuuuucucucacacuuaccag

SEQ ID NO: 846586 - RNA, 22 nt, Human
gaagcagcugccagagaugucu

SEQ ID NO: 846587 - RNA, 22 nt, Human
auggggcugggauucuccucgg

SEQ ID NO: 846588 - RNA, 22 nt, Human
ugaagcagcaccauuuuagagc

SEQ ID NO: 846589 - RNA, 22 nt, Human
uaaaugugcacuuuacuuuuca

SEQ ID NO: 846590 - RNA, 22 nt, Human
ucagaagcauguggggagccug

SEQ ID NO: 846591 - RNA, 22 nt, Human
acaggcagggaccuuggcuaag

SEQ ID NO: 846592 - RNA, 22 nt, Human
cccaggagcuucucucugccuc

SEQ ID NO: 846593 - RNA, 22 nt, Human
ccaguggguaggccauggugag

SEQ ID NO: 846594 - RNA, 22 nt, Human
caaaagucuuccuauucucuua

SEQ ID NO: 846595 - RNA, 22 nt, Human
aaaaugaugcuguaauuuggca

SEQ ID NO: 846596 - RNA, 22 nt, Human
uuuccucuuugugacacagcug

SEQ ID NO: 846597 - RNA, 23 nt, Human
uggcucagggucucuuaugaagu

SEQ ID NO: 846598 - RNA, 20 nt, Human
aggcagcuggccaggcaggu

SEQ ID NO: 846599 - RNA, 22 nt, Human
accaggagcauuuuuuauuagu

SEQ ID NO: 846600 - RNA, 22 nt, Human
cuuugaagauggcaaauuuaga

SEQ ID NO: 846601 - RNA, 22 nt, Human
uggcugaauaauauucuguugu

SEQ ID NO: 846602 - RNA, 22 nt, Human
auuucauagauuguaaaucccu

SEQ ID NO: 846603 - RNA, 22 nt, Human
ccuggcuuccuggagcucacaa

SEQ ID NO: 846604 - RNA, 21 nt, Human
uccacaaguuagaaggaaauu

SEQ ID NO: 846605 - RNA, 22 nt, Human
cugcagagcuaggcugagugaa

SEQ ID NO: 846606 - RNA, 22 nt, Human
aaaacauguccauacagaaacu

SEQ ID NO: 846607 - RNA, 23 nt, Human
gagguacagcaccagugaauagg

SEQ ID NO: 846608 - RNA, 22 nt, Human
aggcagcagucaugaggaaaga

SEQ ID NO: 846609 - RNA, 22 nt, Human
uggccugggccugccggugcaa

SEQ ID NO: 846610 - RNA, 23 nt, Human
acaaaugcccauacaucuaguuc

SEQ ID NO: 846611 - RNA, 22 nt, Human
ucuguuuaggcaaaauagcuac

SEQ ID NO: 846612 - RNA, 20 nt, Human
ccaagagcaugcaugaggaa

SEQ ID NO: 846613 - RNA, 22 nt, Human
ucugaagaacugaguaaacaug

SEQ ID NO: 846614 - RNA, 22 nt, Human
uuucauguuuauggaaaaugag

SEQ ID NO: 846615 - RNA, 22 nt, Human
gccugucugcgucacgcuuauu

SEQ ID NO: 846616 - RNA, 22 nt, Human
agugauggagcuuccucugcua

SEQ ID NO: 846617 - RNA, 22 nt, Human
ggaggagacccugugucaguuu

SEQ ID NO: 846618 - RNA, 22 nt, Human
caggaugagguagaggcagaua

SEQ ID NO: 846619 - RNA, 22 nt, Human
cccugggcaagcccuauuuucc

SEQ ID NO: 846620 - RNA, 22 nt, Human
uggcucagcauucacuggucuu

SEQ ID NO: 846621 - RNA, 22 nt, Human
caguaaaugcagauauagauac

SEQ ID NO: 846622 - RNA, 22 nt, Human
uggcugccuagugucugagcag

SEQ ID NO: 846623 - RNA, 22 nt, Human
uagaugcuacaauuuuguacuc

SEQ ID NO: 846624 - RNA, 22 nt, Human
aacaaacaaacauuuugucauc

SEQ ID NO: 846625 - RNA, 22 nt, Human
agaaagaacguugguuaucuua

SEQ ID NO: 846626 - RNA, 22 nt, Human
gggccccaaaaugccaggcucu

SEQ ID NO: 846627 - RNA, 22 nt, Human
guacaguuuucaguguucacug

SEQ ID NO: 846628 - RNA, 18 nt, Human
uggcagccagcugcuccu

SEQ ID NO: 846629 - RNA, 22 nt, Human
uccagaguacggaagagucauc

SEQ ID NO: 846630 - RNA, 22 nt, Human
ugcuggguagaaguauuagucu

SEQ ID NO: 846631 - RNA, 22 nt, Human
gcccagcaggacagagugguuu

SEQ ID NO: 846632 - RNA, 22 nt, Human
ugagaggcagaauggugccugc

SEQ ID NO: 846633 - RNA, 22 nt, Human
ugcugaggagguggcugugcuu

SEQ ID NO: 846634 - RNA, 22 nt, Human
ucaaacuguuuacagugagaua

SEQ ID NO: 846635 - RNA, 22 nt, Human
ucaguguauggagugcuggauu

SEQ ID NO: 846636 - RNA, 22 nt, Human
cagcagagguuggaacaguucu

SEQ ID NO: 846637 - RNA, 22 nt, Human
aaagccuuugucucaggcucug

SEQ ID NO: 846638 - RNA, 22 nt, Human
uggccugguaccacauagauuu

SEQ ID NO: 846639 - RNA, 18 nt, Human
auauguuaauuagguagg

SEQ ID NO: 846640 - RNA, 23 nt, Human
uugcacauuggagcuggucuucu

SEQ ID NO: 846641 - RNA, 22 nt, Human
cucuggcuucuaccuugcaguu

SEQ ID NO: 846642 - RNA, 19 nt, Human
cagaccuguccagccugug

SEQ ID NO: 846643 - RNA, 20 nt, Human
ccagucccugagcaccaggg

SEQ ID NO: 846644 - RNA, 22 nt, Human
aaucuucacagagaaaauuagg

SEQ ID NO: 846645 - RNA, 22 nt, Human
gacagcuggcaguggaaaggug

SEQ ID NO: 846646 - RNA, 22 nt, Human
ccugguguugugaaguagccgu

SEQ ID NO: 846647 - RNA, 22 nt, Human
uuggaucacucugaagccuuac

SEQ ID NO: 846648 - RNA, 22 nt, Human
ucaggcaguagaauugcuugaa

SEQ ID NO: 846649 - RNA, 22 nt, Human
ggcugaguugagaggauuacuu

SEQ ID NO: 846650 - RNA, 22 nt, Human
uuuaggcauugggugcucaagu

SEQ ID NO: 846651 - RNA, 22 nt, Human
aauauaaugcuguuuuaugcca

SEQ ID NO: 846652 - RNA, 18 nt, Human
agcagagcccaugcauuc

SEQ ID NO: 846653 - RNA, 22 nt, Human
cucaggauguacuacagaaggc

SEQ ID NO: 846654 - RNA, 22 nt, Human
auuguuaugaaaauaagauguu

SEQ ID NO: 846655 - RNA, 22 nt, Human
cagguggagcugacugagggca

SEQ ID NO: 846656 - RNA, 22 nt, Human
aguacaacauuagaguaucuua

SEQ ID NO: 846657 - RNA, 22 nt, Human
aggaagcugcuggaguagugug

SEQ ID NO: 846658 - RNA, 22 nt, Human
cagcucugaagaaaggugucua

SEQ ID NO: 846659 - RNA, 22 nt, Human
gccagguggcugagugacugag

SEQ ID NO: 846660 - RNA, 22 nt, Human
uaaggcacacaguugcugcaug

SEQ ID NO: 846661 - RNA, 22 nt, Human
aagcccagcaucccugcaccag

SEQ ID NO: 846662 - RNA, 22 nt, Human
cacagaaaaaggcuugaaaauc

SEQ ID NO: 846663 - RNA, 22 nt, Human
aagcuguucucuaaguuucaug

SEQ ID NO: 846664 - RNA, 22 nt, Human
uuccuuagugccucuuccgcug

SEQ ID NO: 846665 - RNA, 22 nt, Human
uaucauaaguuaauuaaacagu

SEQ ID NO: 846666 - RNA, 22 nt, Human
cacagcuuccauuagaaugaga

SEQ ID NO: 846667 - RNA, 22 nt, Human
caaagugcugagauuacaggua

SEQ ID NO: 846668 - RNA, 22 nt, Human
ucagagaugcagugccaccuac

SEQ ID NO: 846669 - RNA, 22 nt, Human
cuggcagcucugagucccuucu

SEQ ID NO: 846670 - RNA, 17 nt, Human
aagacagaagccaugag

SEQ ID NO: 846671 - RNA, 22 nt, Human
cauaauuugugguaguggggga

SEQ ID NO: 846672 - RNA, 22 nt, Human
ggcugcuguuucagagacuguu

SEQ ID NO: 846673 - RNA, 18 nt, Human
ugucauugccagggaagc

SEQ ID NO: 846674 - RNA, 20 nt, Human
ggaggguggaagaaagcaag

SEQ ID NO: 846675 - RNA, 22 nt, Human
gugcaugugucuuuauaguagc

SEQ ID NO: 846676 - RNA, 19 nt, Human
uuagaaacuguugacacug

SEQ ID NO: 846677 - RNA, 22 nt, Human
caggcacagaguuauucauuua

SEQ ID NO: 846678 - RNA, 22 nt, Human
caagugucuauaucagugcuug

SEQ ID NO: 846679 - RNA, 22 nt, Human
ggcuuggaaaugguaaugagcu

SEQ ID NO: 846680 - RNA, 22 nt, Human
agcuguguguuuccacugagcu

SEQ ID NO: 846681 - RNA, 22 nt, Human
ggggaggcugaugugggcaaag

SEQ ID NO: 846682 - RNA, 22 nt, Human
uucauuccugagcccauauuua

SEQ ID NO: 846683 - RNA, 22 nt, Human
uccugggcugugugccacucug

SEQ ID NO: 846684 - RNA, 20 nt, Human
acaaaugcauucugugacau

SEQ ID NO: 846685 - RNA, 22 nt, Human
ucugagccguauggcuuggcua

SEQ ID NO: 846686 - RNA, 22 nt, Human
caagggaguuacugagggcggg

SEQ ID NO: 846687 - RNA, 21 nt, Human
gagacagacuuucguccccug

SEQ ID NO: 846688 - RNA, 22 nt, Human
uauuugaaaguguacaaaaacu

SEQ ID NO: 846689 - RNA, 22 nt, Human
caggagcucuuaaggaugugau

SEQ ID NO: 846690 - RNA, 18 nt, Human
caggagcaggaguugaac

SEQ ID NO: 846691 - RNA, 22 nt, Human
aauucuuguuguuaguauauuu

SEQ ID NO: 846692 - RNA, 23 nt, Human
ggccauggagacuuagaaugggc

SEQ ID NO: 846693 - RNA, 22 nt, Human
uacugcauaacuggcauguggg

SEQ ID NO: 846694 - RNA, 23 nt, Human
agcacacuuguacaaugcccuag

SEQ ID NO: 846695 - RNA, 22 nt, Human
aucaaauauaauaauuuucgcu

SEQ ID NO: 846696 - RNA, 22 nt, Human
aauuaauggaaaguaaggaagg

SEQ ID NO: 846697 - RNA, 22 nt, Human
cugggaggcaccgcgucgugcu

SEQ ID NO: 846698 - RNA, 22 nt, Human
ugccuggguguaaagggccaac

SEQ ID NO: 846699 - RNA, 22 nt, Human
cagcagcuggugagacacagcc

SEQ ID NO: 846700 - RNA, 18 nt, Human
cugaaggauccaggugua

SEQ ID NO: 846701 - RNA, 22 nt, Human
agguacaaaagaguauaugaga

SEQ ID NO: 846702 - RNA, 22 nt, Human
aggagcugcaaauauuaguaau

SEQ ID NO: 846703 - RNA, 22 nt, Human
cuuccugaacaaugccaucaau

SEQ ID NO: 846704 - RNA, 16 nt, Human
gccuggaguggcaggg

SEQ ID NO: 846705 - RNA, 22 nt, Human
agccagagcugaugucauucuc

SEQ ID NO: 846706 - RNA, 22 nt, Human
aggccuggccuuuauguucaag

SEQ ID NO: 846707 - RNA, 22 nt, Human
auuacacuuguucaucaucacc

SEQ ID NO: 846708 - RNA, 22 nt, Human
gcugucagaaggugaaggguaa

SEQ ID NO: 846709 - RNA, 22 nt, Human
ugucacauguguggcauuuuuc

SEQ ID NO: 846710 - RNA, 22 nt, Human
uuaacagacauauauauuugua

SEQ ID NO: 846711 - RNA, 22 nt, Human
guucuucagcauuagaagucau

SEQ ID NO: 846712 - RNA, 22 nt, Human
uucuucuuaauguccugggaac

SEQ ID NO: 846713 - RNA, 22 nt, Human
cuggcuuccaugcuguaguggc

SEQ ID NO: 846714 - RNA, 20 nt, Human
caaugcacacagcugcuucu

SEQ ID NO: 846715 - RNA, 22 nt, Human
cccuggaggcaaagguugcagu

SEQ ID NO: 846716 - RNA, 22 nt, Human
uucucagaggagucgggagcug

SEQ ID NO: 846717 - RNA, 22 nt, Human
cuguuuauaaauagaggggagu

SEQ ID NO: 846718 - RNA, 22 nt, Human
agggaagcccuggcugagaccc

SEQ ID NO: 846719 - RNA, 23 nt, Human
acuuuauccuauaucuuuguucu

SEQ ID NO: 846720 - RNA, 20 nt, Human
aggaacuggaagggaggaaa

SEQ ID NO: 846721 - RNA, 22 nt, Human
agauggguaacuggagucugcu

SEQ ID NO: 846722 - RNA, 22 nt, Human
guaucuuucccaccaaucacaa

SEQ ID NO: 846723 - RNA, 22 nt, Human
uucucugaguacguuucagugu

SEQ ID NO: 846724 - RNA, 22 nt, Human
gugcauuggugcgccacuucac

SEQ ID NO: 846725 - RNA, 22 nt, Human
uggguggaauaaaucaguucug

SEQ ID NO: 846726 - RNA, 21 nt, Human
uacagaaugcgcuucagucug

SEQ ID NO: 846727 - RNA, 22 nt, Human
gggcagagacucagaaacagaa

SEQ ID NO: 846728 - RNA, 22 nt, Human
ucagaagcaaacaucacucuag

SEQ ID NO: 846729 - RNA, 22 nt, Human
ccagcucuuuuggcugagugag

SEQ ID NO: 846730 - RNA, 22 nt, Human
agcugcccagauaggaggaggc

SEQ ID NO: 846731 - RNA, 22 nt, Human
gaggccaggggccuggagauga

SEQ ID NO: 846732 - RNA, 22 nt, Human
ucucaggguuuccugggggcug

SEQ ID NO: 846733 - RNA, 22 nt, Human
cauuucaaaagaauugccagaa

SEQ ID NO: 846734 - RNA, 19 nt, Human
agacacacuugauaugugu

SEQ ID NO: 846735 - RNA, 22 nt, Human
gucaugccuggcuucuuagaca

SEQ ID NO: 846736 - RNA, 22 nt, Human
augacucuuagcuaaagguaag

SEQ ID NO: 846737 - RNA, 21 nt, Human
ccagcagcucaaggaucucuu

SEQ ID NO: 846738 - RNA, 22 nt, Human
gccuggcaggccuguuggggcu

SEQ ID NO: 846739 - RNA, 22 nt, Human
ugguuucccauuaucugcagga

SEQ ID NO: 846740 - RNA, 22 nt, Human
aaauacauacacuguacguggc

SEQ ID NO: 846741 - RNA, 22 nt, Human
cagcuugggaguuugguuuuau

SEQ ID NO: 846742 - RNA, 22 nt, Human
gcuggccucgcaggcaggaugu

SEQ ID NO: 846743 - RNA, 22 nt, Human
uuuaaauucugucugccgcuua

SEQ ID NO: 846744 - RNA, 22 nt, Human
cugcuuuggacaacuauucuug

SEQ ID NO: 846745 - RNA, 20 nt, Human
acaauacagguugugucuga

SEQ ID NO: 846746 - RNA, 22 nt, Human
aaacuuugguauguagcaaaac

SEQ ID NO: 846747 - RNA, 22 nt, Human
ggcacugagcgggcucugagcg

SEQ ID NO: 846748 - RNA, 22 nt, Human
aguuuguaucaauuugcuuuau

SEQ ID NO: 846749 - RNA, 22 nt, Human
cuccuggacauggagcggagga

SEQ ID NO: 846750 - RNA, 22 nt, Human
gggggcuggacuuucccacaca

SEQ ID NO: 846751 - RNA, 22 nt, Human
aggccuccugcagggaugagug

SEQ ID NO: 846752 - RNA, 22 nt, Human
agagaauuacagaagaauguca

SEQ ID NO: 846753 - RNA, 22 nt, Human
uaugcacauugguuuccucauu

SEQ ID NO: 846754 - RNA, 22 nt, Human
uaacacauagauauuuuaacuu

SEQ ID NO: 846755 - RNA, 22 nt, Human
ccugcagcuguaggagaaggcg

SEQ ID NO: 846756 - RNA, 22 nt, Human
cagccagcugaauguaccauga

SEQ ID NO: 846757 - RNA, 22 nt, Human
agaaaucauucccaaacccaua

SEQ ID NO: 846758 - RNA, 22 nt, Human
uauuuagaugcauuuggauugc

SEQ ID NO: 846759 - RNA, 20 nt, Human
gagccugggaagucuaaggu

SEQ ID NO: 846760 - RNA, 22 nt, Human
uucaaucauuagaaucucaggc

SEQ ID NO: 846761 - RNA, 22 nt, Human
aaauucagcagugaaaugcccc

SEQ ID NO: 846762 - RNA, 17 nt, Human
aaaauucuguaaagagg

SEQ ID NO: 846763 - RNA, 18 nt, Human
ucaggagacacagacgca

SEQ ID NO: 846764 - RNA, 22 nt, Human
uugaaaacuuucuagaccaaga

SEQ ID NO: 846765 - RNA, 22 nt, Human
cccauuuagauaacaguucaaa

SEQ ID NO: 846766 - RNA, 22 nt, Human
aguguauugauuggaacagccu

SEQ ID NO: 846767 - RNA, 20 nt, Human
uaggcagagcugugcagccu

SEQ ID NO: 846768 - RNA, 22 nt, Human
cuuaauuacuguccaauaugca

SEQ ID NO: 846769 - RNA, 22 nt, Human
gaggacagugugaucugccagc

SEQ ID NO: 846770 - RNA, 22 nt, Human
uggcucagcugucacagccugg

SEQ ID NO: 846771 - RNA, 22 nt, Human
aaaugcauaucaaagacuugaa

SEQ ID NO: 846772 - RNA, 22 nt, Human
ggcauuuaguuuucauauucug

SEQ ID NO: 846773 - RNA, 22 nt, Human
ccaaggagcugcaggcacuugu

SEQ ID NO: 846774 - RNA, 17 nt, Human
gaaagguccuagaaauc

SEQ ID NO: 846775 - RNA, 22 nt, Human
ucagggcucaccagccucugcc

SEQ ID NO: 846776 - RNA, 22 nt, Human
cuggaucaugcauugcuugucc

SEQ ID NO: 846777 - RNA, 22 nt, Human
agggauggaagacuugaagacc

SEQ ID NO: 846778 - RNA, 22 nt, Human
agauaauuugaguaaauuaauu

SEQ ID NO: 846779 - RNA, 22 nt, Human
uuugaaauuaagauauugucca

SEQ ID NO: 846780 - RNA, 22 nt, Human
aaaugucuaucuggcauauucc

SEQ ID NO: 846781 - RNA, 22 nt, Human
aaauacugggcucaaaaggguu

SEQ ID NO: 846782 - RNA, 22 nt, Human
agccuggcacugaggcagggcg

SEQ ID NO: 846783 - RNA, 22 nt, Human
cugugcuggagaugggccagag

SEQ ID NO: 846784 - RNA, 22 nt, Human
uaugagcuuccaguguugcaug

SEQ ID NO: 846785 - RNA, 22 nt, Human
uugauaaaaugauaucuucuuu

SEQ ID NO: 846786 - RNA, 22 nt, Human
ggagccaguuuagaccucaguu

SEQ ID NO: 846787 - RNA, 22 nt, Human
uggcccugaggggcugugcccc

SEQ ID NO: 846788 - RNA, 22 nt, Human
ucagagagccucaggcacugcc

SEQ ID NO: 846789 - RNA, 22 nt, Human
augugucuuugagacucugcua

SEQ ID NO: 846790 - RNA, 22 nt, Human
gagcagcuccagccgcaugacu

SEQ ID NO: 846791 - RNA, 22 nt, Human
uguauaaacuuaagcaggaacc

SEQ ID NO: 846792 - RNA, 22 nt, Human
uucaaaggcaggauagcagcug

SEQ ID NO: 846793 - RNA, 22 nt, Human
ggagccugcgggagcucccauu

SEQ ID NO: 846794 - RNA, 22 nt, Human
gcuugcuggugccugcaggcuc

SEQ ID NO: 846795 - RNA, 22 nt, Human
aagugacacauggcacuucuau

SEQ ID NO: 846796 - RNA, 22 nt, Human
cagaagaaaguggggagacaag

SEQ ID NO: 846797 - RNA, 22 nt, Human
ggccaugguuggggaagacaug

SEQ ID NO: 846798 - RNA, 22 nt, Human
cagcagagggagccauugaaau

SEQ ID NO: 846799 - RNA, 22 nt, Human
agucccagcucugccacuuacu

SEQ ID NO: 846800 - RNA, 22 nt, Human
gucaaacaaauuaacauaucca

SEQ ID NO: 846801 - RNA, 22 nt, Human
agagccuggggauuggcaaggg

SEQ ID NO: 846802 - RNA, 22 nt, Human
ccucugagagaaggccuucagc

SEQ ID NO: 846803 - RNA, 22 nt, Human
uaaugugugucaucaguagagu

SEQ ID NO: 846804 - RNA, 22 nt, Human
ggcugccucugaugugcagacg

SEQ ID NO: 846805 - RNA, 22 nt, Human
ggggcuguuuuuggaauggcug

SEQ ID NO: 846806 - RNA, 22 nt, Human
aaaaaugucauuauggaacuga

SEQ ID NO: 846807 - RNA, 22 nt, Human
cuguacaucccgagagccagua

SEQ ID NO: 846808 - RNA, 22 nt, Human
gaggcaggcacuguuaucagca

SEQ ID NO: 846809 - RNA, 22 nt, Human
caguggcaugguugacugcagu

SEQ ID NO: 846810 - RNA, 22 nt, Human
cucagaaguucagccuagagua

SEQ ID NO: 846811 - RNA, 22 nt, Human
ugcuuccugaggccgucuucuc

SEQ ID NO: 846812 - RNA, 22 nt, Human
augggagugacagggccacugg

SEQ ID NO: 846813 - RNA, 22 nt, Human
auuuccagcagcauauuugucu

SEQ ID NO: 846814 - RNA, 22 nt, Human
aucaaaguucguaacugauaac

SEQ ID NO: 846815 - RNA, 22 nt, Human
ugagagagccugaaucucuuac

SEQ ID NO: 846816 - RNA, 22 nt, Human
guuucaaauagguuucagcaaa

SEQ ID NO: 846817 - RNA, 22 nt, Human
uaagaacaagcuggggguucca

SEQ ID NO: 846818 - RNA, 22 nt, Human
uacccaggggcugagcagaggu

SEQ ID NO: 846819 - RNA, 22 nt, Human
ugucacauaggcaaaauguuuu

SEQ ID NO: 846820 - RNA, 22 nt, Human
gguacaauucugggguaugcuc

SEQ ID NO: 846821 - RNA, 22 nt, Human
acaugcauacaagcacauguag

SEQ ID NO: 846822 - RNA, 22 nt, Human
uuucuguaauuaaaagggcagg

SEQ ID NO: 846823 - RNA, 22 nt, Human
agcugccagcaucccggaaggg

SEQ ID NO: 846824 - RNA, 22 nt, Human
uugcaccaaaugaguuaaaauu

SEQ ID NO: 846825 - RNA, 22 nt, Human
aggcagacucaauggcuagaua

SEQ ID NO: 846826 - RNA, 22 nt, Human
aaggcagccauagcaccaucca

SEQ ID NO: 846827 - RNA, 22 nt, Human
agucccagugagaugagccacg

SEQ ID NO: 846828 - RNA, 22 nt, Human
gaggaagcagggcuuggcugag

SEQ ID NO: 846829 - RNA, 22 nt, Human
cagaagaauggugucugagcuc

SEQ ID NO: 846830 - RNA, 22 nt, Human
uagcugucaccagaaauggcca

SEQ ID NO: 846831 - RNA, 22 nt, Human
uuacagaaguuucagcguuuua

SEQ ID NO: 846832 - RNA, 22 nt, Human
uggggcugaggagccucacucu

SEQ ID NO: 846833 - RNA, 22 nt, Human
gaaugcacucacccaucacuca

SEQ ID NO: 846834 - RNA, 22 nt, Human
guggcaggagacuggaagaugg

SEQ ID NO: 846835 - RNA, 19 nt, Human
ggcugucuggcguguggau

SEQ ID NO: 846836 - RNA, 22 nt, Human
acuagaaacuaauggauuauua

SEQ ID NO: 846837 - RNA, 22 nt, Human
cuuacagagaagaaaauguagu

SEQ ID NO: 846838 - RNA, 22 nt, Human
uagaaaucagcaggcauaugua

SEQ ID NO: 846839 - RNA, 18 nt, Human
uuaagagcugaaagggga

SEQ ID NO: 846840 - RNA, 22 nt, Human
caugauuuugucuuguguuaau

SEQ ID NO: 846841 - RNA, 22 nt, Human
agacagaacagaauaauuguug

SEQ ID NO: 846842 - RNA, 22 nt, Human
ccagcugcaggggagcagugga

SEQ ID NO: 846843 - RNA, 22 nt, Human
uacauuguuuuuucuugccauc

SEQ ID NO: 846844 - RNA, 22 nt, Human
ucaaauguucccuguacuggcc

SEQ ID NO: 846845 - RNA, 22 nt, Human
gcaggcuggaggcuguucuggg

SEQ ID NO: 846846 - RNA, 22 nt, Human
ugcagcugcuggcccaggugcu

SEQ ID NO: 846847 - RNA, 22 nt, Human
uuuacagaugaggauacugagg

SEQ ID NO: 846848 - RNA, 22 nt, Human
agcugcagagguuugugcaaca

SEQ ID NO: 846849 - RNA, 22 nt, Human
cucugugggggagaggcagcug

SEQ ID NO: 846850 - RNA, 22 nt, Human
aaguaugaaucaaagacuaucu

SEQ ID NO: 846851 - RNA, 22 nt, Human
ggaaggaggggcaaagcaguuc

SEQ ID NO: 846852 - RNA, 22 nt, Human
aaaguccuagcgauccacagaa

SEQ ID NO: 846853 - RNA, 22 nt, Human
uggguagaggaauugggcuacc

SEQ ID NO: 846854 - RNA, 22 nt, Human
gucuugaucuccugaccuugug

SEQ ID NO: 846855 - RNA, 22 nt, Human
gagcuuccauggacgccaucug

SEQ ID NO: 846856 - RNA, 19 nt, Human
uucauucuuucuacuuacc

SEQ ID NO: 846857 - RNA, 21 nt, Human
auuauuauaaagaccacaggg

SEQ ID NO: 846858 - RNA, 22 nt, Human
cugggugguucuaacuguugau

SEQ ID NO: 846859 - RNA, 22 nt, Human
uggcuuucucccccagcuucuc

SEQ ID NO: 846860 - RNA, 22 nt, Human
uggcagggccuaccccaauauc

SEQ ID NO: 846861 - RNA, 22 nt, Human
gaaggcuugcagcucuguggca

SEQ ID NO: 846862 - RNA, 22 nt, Human
cugugcuugacagugggaagca

SEQ ID NO: 846863 - RNA, 22 nt, Human
ucuggcucuauaacuccuagcu

SEQ ID NO: 846864 - RNA, 22 nt, Human
aacucagcauccugcacagaga

SEQ ID NO: 846865 - RNA, 22 nt, Human
aucagugcuaaagcaaaugccc

SEQ ID NO: 846866 - RNA, 22 nt, Human
cucuguccuaugcuugauagaa

SEQ ID NO: 846867 - RNA, 22 nt, Human
caaauacuaaacauaagauuuu

SEQ ID NO: 846868 - RNA, 22 nt, Human
ggucaggggcugcucuacagag

SEQ ID NO: 846869 - RNA, 22 nt, Human
acagaguaucuaucaggaguau

SEQ ID NO: 846870 - RNA, 22 nt, Human
ggaguucacugugcaggcucug

SEQ ID NO: 846871 - RNA, 22 nt, Human
ggccucagaccggagcuggcca

SEQ ID NO: 846872 - RNA, 22 nt, Human
aggagcugcagauucugccuug

SEQ ID NO: 846873 - RNA, 22 nt, Human
gucugucucucuccagagugca

SEQ ID NO: 846874 - RNA, 22 nt, Human
ugcugcuccugccuggcuccca

SEQ ID NO: 846875 - RNA, 16 nt, Human
ccacagggcaaggggc

SEQ ID NO: 846876 - RNA, 21 nt, Human
aaagaaucauggguaauuuca

SEQ ID NO: 846877 - RNA, 22 nt, Human
uguuaaauguuccuuuacugga

SEQ ID NO: 846878 - RNA, 22 nt, Human
gauuuucauuugcacucuagaa

SEQ ID NO: 846879 - RNA, 22 nt, Human
uuugaagacagaucaauauaag

SEQ ID NO: 846880 - RNA, 19 nt, Human
gcugugccucucuccugcu

SEQ ID NO: 846881 - RNA, 23 nt, Human
uggcucuguggaucccucaggag

SEQ ID NO: 846882 - RNA, 22 nt, Human
gugcauuuggugacucucaccc

SEQ ID NO: 846883 - RNA, 22 nt, Human
uucuggaggccccuuccuucuc

SEQ ID NO: 846884 - RNA, 22 nt, Human
guuaaagaagaauaguuccuuu

SEQ ID NO: 846885 - RNA, 21 nt, Human
ccagacuggccuaugugguag

SEQ ID NO: 846886 - RNA, 22 nt, Human
caguugaugggacucauguggg

SEQ ID NO: 846887 - RNA, 22 nt, Human
acuuugcacuaaguuacucauu

SEQ ID NO: 846888 - RNA, 22 nt, Human
agucaccaggguuugcuggguu

SEQ ID NO: 846889 - RNA, 22 nt, Human
ccagcagaggggcggagugcag

SEQ ID NO: 846890 - RNA, 22 nt, Human
agagcagcacguuguccccaca

SEQ ID NO: 846891 - RNA, 23 nt, Human
aauaucaaggugauguucccaga

SEQ ID NO: 846892 - RNA, 22 nt, Human
uagagugguuaacaguuuagaa

SEQ ID NO: 846893 - RNA, 22 nt, Human
cugcagagguugguucuaagau

SEQ ID NO: 846894 - RNA, 22 nt, Human
agacagcaugauacaugaugcu

SEQ ID NO: 846895 - RNA, 22 nt, Human
ucucaggguuuguacaagugua

SEQ ID NO: 846896 - RNA, 20 nt, Human
uuuuccuucugaguauguug

SEQ ID NO: 846897 - RNA, 22 nt, Human
uccuugaaugaauguucucucc

SEQ ID NO: 846898 - RNA, 22 nt, Human
uuaaugcagaaaucaaacugac

SEQ ID NO: 846899 - RNA, 22 nt, Human
cccuccagcucaaagcaaccgg

SEQ ID NO: 846900 - RNA, 22 nt, Human
uaacacaugucugggaugugaa

SEQ ID NO: 846901 - RNA, 22 nt, Human
agcagcauguugggaugugaaa

SEQ ID NO: 846902 - RNA, 22 nt, Human
cugucccagauguucucagcac

SEQ ID NO: 846903 - RNA, 22 nt, Human
cuggagcccaggccuggugucu

SEQ ID NO: 846904 - RNA, 22 nt, Human
aggcucugcagugcuggaggac

SEQ ID NO: 846905 - RNA, 18 nt, Human
cagcagagacauucaaaa

SEQ ID NO: 846906 - RNA, 22 nt, Human
aaagcagagcagggcacuuaug

SEQ ID NO: 846907 - RNA, 20 nt, Human
agucucuguagugccugaga

SEQ ID NO: 846908 - RNA, 22 nt, Human
uagaaauaaaucugcagcuggg

SEQ ID NO: 846909 - RNA, 22 nt, Human
cagagcugggcauggugaaagg

SEQ ID NO: 846910 - RNA, 20 nt, Human
ccagacagcaccugccuggu

SEQ ID NO: 846911 - RNA, 22 nt, Human
aagagcugauuaagucaugagg

SEQ ID NO: 846912 - RNA, 22 nt, Human
auaacagaguugggaagugaaa

SEQ ID NO: 846913 - RNA, 22 nt, Human
uacaugcaugucacagaaugaa

SEQ ID NO: 846914 - RNA, 22 nt, Human
uacccagcuucaagucaggacu

SEQ ID NO: 846915 - RNA, 22 nt, Human
aacaugaaguuuucuauaguga

SEQ ID NO: 846916 - RNA, 22 nt, Human
aaucagugguucccagcccagg

SEQ ID NO: 846917 - RNA, 17 nt, Human
ugaggccugcaucagug

SEQ ID NO: 846918 - RNA, 22 nt, Human
gcagagcccuggggguauggug

SEQ ID NO: 846919 - RNA, 22 nt, Human
ucaggcagaggauggggagcgu

SEQ ID NO: 846920 - RNA, 21 nt, Human
ggcuccugcuuugugaggggc

SEQ ID NO: 846921 - RNA, 22 nt, Human
uugaaaggugaacaugaugcac

SEQ ID NO: 846922 - RNA, 22 nt, Human
cuggguggaucgcagccccagg

SEQ ID NO: 846923 - RNA, 22 nt, Human
uucugagacaauugagagucua

SEQ ID NO: 846924 - RNA, 22 nt, Human
caucacuguccucagcauucca

SEQ ID NO: 846925 - RNA, 22 nt, Human
gaggugaguggaucacgagguc

SEQ ID NO: 846926 - RNA, 22 nt, Human
ggggacaguuaaagaccaagac

SEQ ID NO: 846927 - RNA, 22 nt, Human
uggcucaguuaggucagaaaca

SEQ ID NO: 846928 - RNA, 22 nt, Human
ggcagauggagaagcagcaggu

SEQ ID NO: 846929 - RNA, 22 nt, Human
uugaacuguaagcaugucugcc

SEQ ID NO: 846930 - RNA, 22 nt, Human
guuuacauauuuuaauugguga

SEQ ID NO: 846931 - RNA, 22 nt, Human
cucugggcaccaaagagcagcu

SEQ ID NO: 846932 - RNA, 22 nt, Human
uauguacagggauagaacuuga

SEQ ID NO: 846933 - RNA, 22 nt, Human
uccuugaagcaacgugcagaca

SEQ ID NO: 846934 - RNA, 22 nt, Human
uacaaaugaccauagccacuua

SEQ ID NO: 846935 - RNA, 22 nt, Human
cccaggcugauguucagcgggu

SEQ ID NO: 846936 - RNA, 22 nt, Human
cagggccagccauccugcuggg

SEQ ID NO: 846937 - RNA, 22 nt, Human
uggagccauaacccuuucguac

SEQ ID NO: 846938 - RNA, 21 nt, Human
ugagagccuccaaccggcuac

SEQ ID NO: 846939 - RNA, 22 nt, Human
gccaggcacaguucuaggugcu

SEQ ID NO: 846940 - RNA, 22 nt, Human
caggagcuacucagguuggguu

SEQ ID NO: 846941 - RNA, 20 nt, Human
uucuucucuaguuaucuuca

SEQ ID NO: 846942 - RNA, 22 nt, Human
cuggugugauugagcccaggug

SEQ ID NO: 846943 - RNA, 22 nt, Human
guuacacaggaaaacauuagca

SEQ ID NO: 846944 - RNA, 22 nt, Human
gacacauagaucuaucucacuc

SEQ ID NO: 846945 - RNA, 22 nt, Human
uggcagcugccauguccacgug

SEQ ID NO: 846946 - RNA, 22 nt, Human
guguuccauguuugagguaguu

SEQ ID NO: 846947 - RNA, 22 nt, Human
acuggaagccaguugacaauca

SEQ ID NO: 846948 - RNA, 22 nt, Human
caguagcacucugucagugaag

SEQ ID NO: 846949 - RNA, 22 nt, Human
uacauuugcuuugauuuucagc

SEQ ID NO: 846950 - RNA, 22 nt, Human
aauacauauggaauuccauguu

SEQ ID NO: 846951 - RNA, 22 nt, Human
ggcuucccagcagagggcgcac

SEQ ID NO: 846952 - RNA, 22 nt, Human
acacugaaugcuguuuagaaau

SEQ ID NO: 846953 - RNA, 22 nt, Human
ccugcucugguuuagucagucu

SEQ ID NO: 846954 - RNA, 22 nt, Human
gaaaagagaacaucugaggauc

SEQ ID NO: 846955 - RNA, 22 nt, Human
gaggagagccugcacuuugacc

SEQ ID NO: 846956 - RNA, 22 nt, Human
ccagcccuccuccaucagagga

SEQ ID NO: 846957 - RNA, 22 nt, Human
auuuuacuuugugaauauugac

SEQ ID NO: 846958 - RNA, 22 nt, Human
ggaggggauuuaguagaugcua

SEQ ID NO: 846959 - RNA, 22 nt, Human
caggugaccuuuguccuaaguu

SEQ ID NO: 846960 - RNA, 22 nt, Human
agaagugagugugacucagcag

SEQ ID NO: 846961 - RNA, 22 nt, Human
gcccacacaccagcucaggagg

SEQ ID NO: 846962 - RNA, 20 nt, Human
agugugcauuuagagucugc

SEQ ID NO: 846963 - RNA, 22 nt, Human
agagcuggguggacuuguaguu

SEQ ID NO: 846964 - RNA, 22 nt, Human
aucuauacuacaaauggcuggu

SEQ ID NO: 846965 - RNA, 22 nt, Human
aaauagcagccuuuaguuaaca

SEQ ID NO: 846966 - RNA, 17 nt, Human
ccuguguuugcuccuuc

SEQ ID NO: 846967 - RNA, 22 nt, Human
uauggcuuuaaacaacuuaggu

SEQ ID NO: 846968 - RNA, 22 nt, Human
cauguaaaacacucagaacagu

SEQ ID NO: 846969 - RNA, 22 nt, Human
ucugcugugggucuauauuuua

SEQ ID NO: 846970 - RNA, 22 nt, Human
cuaugaaaggauuuggaguugu

SEQ ID NO: 846971 - RNA, 22 nt, Human
caggccugggcuucggggcuga

SEQ ID NO: 846972 - RNA, 22 nt, Human
acuuuauuuccuauugcaucca

SEQ ID NO: 846973 - RNA, 22 nt, Human
gcucccugacucaguuccugag

SEQ ID NO: 846974 - RNA, 22 nt, Human
cuacuucugugaugaaacuaca

SEQ ID NO: 846975 - RNA, 22 nt, Human
gaagagcugcucagaacaugau

SEQ ID NO: 846976 - RNA, 22 nt, Human
aggucccaggcauagcuggucu

SEQ ID NO: 846977 - RNA, 22 nt, Human
ucuggagcaacagagcaggaca

SEQ ID NO: 846978 - RNA, 22 nt, Human
uagagcuauuuagagcauuuua

SEQ ID NO: 846979 - RNA, 22 nt, Human
uucacauuggugauauguuucu

SEQ ID NO: 846980 - RNA, 22 nt, Human
gagagugauucccucccauaga

SEQ ID NO: 846981 - RNA, 22 nt, Human
uggcccuguggaggucagugag

SEQ ID NO: 846982 - RNA, 22 nt, Human
gggaccaggugggugcauuccg

SEQ ID NO: 846983 - RNA, 22 nt, Human
aaggcagccagauccuuugggu

SEQ ID NO: 846984 - RNA, 22 nt, Human
aucuagaacuuaaagucaguca

SEQ ID NO: 846985 - RNA, 22 nt, Human
cuuaaauuggaugaguuaaguu

SEQ ID NO: 846986 - RNA, 22 nt, Human
gcuggcccagggucaccuagga

SEQ ID NO: 846987 - RNA, 22 nt, Human
uguaguaagugcgcaauaaaua

SEQ ID NO: 846988 - RNA, 22 nt, Human
ggccugcacagagguggcucua

SEQ ID NO: 846989 - RNA, 22 nt, Human
uagcacauuguugaccagaagg

SEQ ID NO: 846990 - RNA, 22 nt, Human
aucuggcuauuucuggucgggg

SEQ ID NO: 846991 - RNA, 22 nt, Human
gccuggcaggggccugggagug

SEQ ID NO: 846992 - RNA, 22 nt, Human
caguuucuguuuuaaauagcag

SEQ ID NO: 846993 - RNA, 22 nt, Human
augaugguggguaauguguaaa

SEQ ID NO: 846994 - RNA, 22 nt, Human
gcaagcaguuguggcuucugag

SEQ ID NO: 846995 - RNA, 19 nt, Human
cucugccucccuccugggu

SEQ ID NO: 846996 - RNA, 22 nt, Human
uaaaauguguuucuguaugguu

SEQ ID NO: 846997 - RNA, 22 nt, Human
ggaugcaggacggcauggaugu

SEQ ID NO: 846998 - RNA, 22 nt, Human
guuagaaagugucugcuugggu

SEQ ID NO: 846999 - RNA, 22 nt, Human
ggcacugggagaggugagacgg

SEQ ID NO: 847000 - RNA, 18 nt, Human
augggaggggccaagaga

SEQ ID NO: 847001 - RNA, 22 nt, Human
caaugguggugucagaagagau

SEQ ID NO: 847002 - RNA, 19 nt, Human
gccaggagggcucuggcug

SEQ ID NO: 847003 - RNA, 22 nt, Human
ggcuucccaaggagccaggaug

SEQ ID NO: 847004 - RNA, 19 nt, Human
cuguggcugaccucuggcc

SEQ ID NO: 847005 - RNA, 22 nt, Human
aaaaucaguacacuuuauuuug

SEQ ID NO: 847006 - RNA, 22 nt, Human
uggcagcaaguucuugggaggu

SEQ ID NO: 847007 - RNA, 22 nt, Human
agggcugcaccggggcuucgcg

SEQ ID NO: 847008 - RNA, 22 nt, Human
ugucccaguucccaggguugcu

SEQ ID NO: 847009 - RNA, 22 nt, Human
ugggccugacucaccugccucc

SEQ ID NO: 847010 - RNA, 22 nt, Human
gagggccagcagccucagcaug

SEQ ID NO: 847011 - RNA, 22 nt, Human
ucucagaggcccgacguucucc

SEQ ID NO: 847012 - RNA, 22 nt, Human
cuggcucaugugaugagggcaa

SEQ ID NO: 847013 - RNA, 20 nt, Human
uugauucccucuaaacucgc

SEQ ID NO: 847014 - RNA, 22 nt, Human
ggaggcagaauagagugugggu

SEQ ID NO: 847015 - RNA, 22 nt, Human
ucagguggcuucggggaguggc

SEQ ID NO: 847016 - RNA, 22 nt, Human
gaucugaagagcaaugaaauau

SEQ ID NO: 847017 - RNA, 22 nt, Human
acaugcauaggagaagucuuua

SEQ ID NO: 847018 - RNA, 22 nt, Human
ucacgagaggcacagaauagag

SEQ ID NO: 847019 - RNA, 22 nt, Human
gcuggccuccugcuagauggaa

SEQ ID NO: 847020 - RNA, 22 nt, Human
cauuaaaauaucucaugguguu

SEQ ID NO: 847021 - RNA, 22 nt, Human
agcugccauccgaggugucaga

SEQ ID NO: 847022 - RNA, 22 nt, Human
accuggagucauuugaggagua

SEQ ID NO: 847023 - RNA, 20 nt, Human
augugucuguaaacaacucu

SEQ ID NO: 847024 - RNA, 22 nt, Human
uggaaauauacaaugugucucu

SEQ ID NO: 847025 - RNA, 22 nt, Human
uggagcagccaugaugacagag

SEQ ID NO: 847026 - RNA, 22 nt, Human
ucaaugauaguacaaucagccu

SEQ ID NO: 847027 - RNA, 22 nt, Human
acagaaguuggaauuagauacu

SEQ ID NO: 847028 - RNA, 22 nt, Human
auguucuuccaaaucuguaaca

SEQ ID NO: 847029 - RNA, 22 nt, Human
ugcagcugauuaaagggcagac

SEQ ID NO: 847030 - RNA, 22 nt, Human
gcagagccgugaauggauuuca

SEQ ID NO: 847031 - RNA, 22 nt, Human
uccaaauucuagggccuugguu

SEQ ID NO: 847032 - RNA, 22 nt, Human
ccugagggcgccgagcucccag

SEQ ID NO: 847033 - RNA, 22 nt, Human
ccuguccuccaagagcacaucu

SEQ ID NO: 847034 - RNA, 22 nt, Human
gagugugggcacgggggccuug

SEQ ID NO: 847035 - RNA, 22 nt, Human
aggagaaguaaggcuagaugau

SEQ ID NO: 847036 - RNA, 22 nt, Human
aacaggagaguaaauauaugau

SEQ ID NO: 847037 - RNA, 22 nt, Human
agcugccugggcuuguacaccu

SEQ ID NO: 847038 - RNA, 22 nt, Human
ccacaggggucucuguagcuga

SEQ ID NO: 847039 - RNA, 22 nt, Human
ucugucacuuauuaagauggau

SEQ ID NO: 847040 - RNA, 22 nt, Human
gcugcagcucgccuuccggccu

SEQ ID NO: 847041 - RNA, 22 nt, Human
ggggaugguagaccggugacgu

SEQ ID NO: 847042 - RNA, 20 nt, Human
ggaccagguggggcgguggc

SEQ ID NO: 847043 - RNA, 22 nt, Human
ucuggaaguuagaggaggaaag

SEQ ID NO: 847044 - RNA, 22 nt, Human
uuccaugaaggagacugagaag

SEQ ID NO: 847045 - RNA, 22 nt, Human
uguaaucauuacaguacaugga

SEQ ID NO: 847046 - RNA, 22 nt, Human
agggagcuuccgaacuacagcu

SEQ ID NO: 847047 - RNA, 22 nt, Human
aggucacacuuggaucauagaa

SEQ ID NO: 847048 - RNA, 22 nt, Human
aggguggccaugagggagagau

SEQ ID NO: 847049 - RNA, 22 nt, Human
aaauauguauggaguucaugaa

SEQ ID NO: 847050 - RNA, 22 nt, Human
uuuaacagguaaaguaaaugug

SEQ ID NO: 847051 - RNA, 22 nt, Human
ccugccagcauggcuuaucucc

SEQ ID NO: 847052 - RNA, 22 nt, Human
uggcuuccaaaggaaugggccu

SEQ ID NO: 847053 - RNA, 22 nt, Human
ccagagagaaauggauuugagu

SEQ ID NO: 847054 - RNA, 22 nt, Human
guuguuuuuguucucuauagcu

SEQ ID NO: 847055 - RNA, 22 nt, Human
ucaaaugcucuuugcagagagg

SEQ ID NO: 847056 - RNA, 22 nt, Human
ucacaggcuccagggccuggau

SEQ ID NO: 847057 - RNA, 22 nt, Human
uggccuggcagagcaaggccug

SEQ ID NO: 847058 - RNA, 22 nt, Human
ugaagcagcuucuuucugucaa

SEQ ID NO: 847059 - RNA, 22 nt, Human
ugacuagaccuauaucuuuuug

SEQ ID NO: 847060 - RNA, 22 nt, Human
gucccuuggcucacaaacagcu

SEQ ID NO: 847061 - RNA, 22 nt, Human
ggcuggccucaggguccucgcu

SEQ ID NO: 847062 - RNA, 22 nt, Human
gccaggcuggaaagaacagaca

SEQ ID NO: 847063 - RNA, 22 nt, Human
ucacugcaaccucugccuuccg

SEQ ID NO: 847064 - RNA, 22 nt, Human
ccugcucagagcgucuugugug

SEQ ID NO: 847065 - RNA, 19 nt, Human
ucauaaggagagaggaaau

SEQ ID NO: 847066 - RNA, 22 nt, Human
ugcauuuccagauuucuggagu

SEQ ID NO: 847067 - RNA, 22 nt, Human
aaguccuuaggaagcagucguu

SEQ ID NO: 847068 - RNA, 22 nt, Human
cagaggcacaagaaagcaaggc

SEQ ID NO: 847069 - RNA, 22 nt, Human
uuuucauuuuuguagaugcaag

SEQ ID NO: 847070 - RNA, 22 nt, Human
gcuuccuucuaccacaucaugc

SEQ ID NO: 847071 - RNA, 22 nt, Human
auuuccaguccuaaugaucugg

SEQ ID NO: 847072 - RNA, 22 nt, Human
agggucuguggaugcaucuggg

SEQ ID NO: 847073 - RNA, 22 nt, Human
gggagggguugcauguuugagu

SEQ ID NO: 847074 - RNA, 22 nt, Human
gaggcaguguuuacugcccugu

SEQ ID NO: 847075 - RNA, 22 nt, Human
auuuccauacacccauuucuga

SEQ ID NO: 847076 - RNA, 23 nt, Human
ccaggccucucagagggugugcc

SEQ ID NO: 847077 - RNA, 22 nt, Human
agucucugugagcucccaaugg

SEQ ID NO: 847078 - RNA, 22 nt, Human
augcaguagauaggcacuuuua

SEQ ID NO: 847079 - RNA, 22 nt, Human
ucugcaggaaaaaagugccugg

SEQ ID NO: 847080 - RNA, 18 nt, Human
gggcaucauucacaaagu

SEQ ID NO: 847081 - RNA, 22 nt, Human
gaggcaacacauuuggaaagca

SEQ ID NO: 847082 - RNA, 22 nt, Human
ggcuccuggcaucuggugggua

SEQ ID NO: 847083 - RNA, 22 nt, Human
accucugccaagaugugcuccc

SEQ ID NO: 847084 - RNA, 21 nt, Human
ggcagccucuguggaagggga

SEQ ID NO: 847085 - RNA, 22 nt, Human
ucccagagccucugccacucug

SEQ ID NO: 847086 - RNA, 22 nt, Human
uuugcauuuauaaguuggugga

SEQ ID NO: 847087 - RNA, 22 nt, Human
acacuaaugagaaaggaauuaa

SEQ ID NO: 847088 - RNA, 22 nt, Human
ucucagggccucccucuguuuc

SEQ ID NO: 847089 - RNA, 22 nt, Human
auagucuuagaucagauaaagu

SEQ ID NO: 847090 - RNA, 22 nt, Human
uaugugaauacagcaguggaug

SEQ ID NO: 847091 - RNA, 22 nt, Human
uguuacacagcagaauagcaag

SEQ ID NO: 847092 - RNA, 22 nt, Human
aaaguucugggggagaagaacg

SEQ ID NO: 847093 - RNA, 22 nt, Human
caggcacuguguuaggcacugu

SEQ ID NO: 847094 - RNA, 22 nt, Human
ccagcuauugcuguguaacagu

SEQ ID NO: 847095 - RNA, 20 nt, Human
agagcagcaguuggugaggu

SEQ ID NO: 847096 - RNA, 22 nt, Human
auucuucacauggauaggaucu

SEQ ID NO: 847097 - RNA, 22 nt, Human
cagcagaggugguucacauugu

SEQ ID NO: 847098 - RNA, 22 nt, Human
acaccagggccuagccagggcg

SEQ ID NO: 847099 - RNA, 22 nt, Human
ucaggaucaggggccuuuccuu

SEQ ID NO: 847100 - RNA, 22 nt, Human
ugcacagcgggugucugucagg

SEQ ID NO: 847101 - RNA, 21 nt, Human
ugcuccuuagcugccccugcc

SEQ ID NO: 847102 - RNA, 22 nt, Human
caguauuuauggcuugaguauu

SEQ ID NO: 847103 - RNA, 22 nt, Human
aaagcagucacuccagugugau

SEQ ID NO: 847104 - RNA, 22 nt, Human
agggguggagaguguugccagu

SEQ ID NO: 847105 - RNA, 22 nt, Human
aggcuucccagcugagcucagc

SEQ ID NO: 847106 - RNA, 22 nt, Human
uggcucaggccacuucuuuuau

SEQ ID NO: 847107 - RNA, 22 nt, Human
ggcuggcuugccaagcucaggg

SEQ ID NO: 847108 - RNA, 22 nt, Human
gccagccugugcuuggccaggc

SEQ ID NO: 847109 - RNA, 23 nt, Human
uggggagaguuacccuggaagcg

SEQ ID NO: 847110 - RNA, 22 nt, Human
ccagagaccagaacauggggau

SEQ ID NO: 847111 - RNA, 22 nt, Human
cucuccagaucugcugagccag

SEQ ID NO: 847112 - RNA, 22 nt, Human
cugaggucucuuuccauaguga

SEQ ID NO: 847113 - RNA, 22 nt, Human
gcucugcuugcaucaugacugc

SEQ ID NO: 847114 - RNA, 22 nt, Human
cugcugugagcacuccagccug

SEQ ID NO: 847115 - RNA, 22 nt, Human
caggggcucuaaugcaugauca

SEQ ID NO: 847116 - RNA, 22 nt, Human
uuacaggggacauuggggacau

SEQ ID NO: 847117 - RNA, 22 nt, Human
ucuggaucccaccgccacacac

SEQ ID NO: 847118 - RNA, 22 nt, Human
acccucccauuuccauguagca

SEQ ID NO: 847119 - RNA, 22 nt, Human
guaucuuuugguggaaaaauaa

SEQ ID NO: 847120 - RNA, 22 nt, Human
gccaaagcagucuugccucugc

SEQ ID NO: 847121 - RNA, 22 nt, Human
auacuuuggggguuaguguaga

SEQ ID NO: 847122 - RNA, 22 nt, Human
cuguuuaucucuaaccuguuua

SEQ ID NO: 847123 - RNA, 22 nt, Human
ugcagcuucuccaucuccuugu

SEQ ID NO: 847124 - RNA, 22 nt, Human
agaaaucacaggaggcagaagg

SEQ ID NO: 847125 - RNA, 22 nt, Human
uuaacauacaucaugaacaaug

SEQ ID NO: 847126 - RNA, 23 nt, Human
ugcuguccaacagacuggccaug

SEQ ID NO: 847127 - RNA, 22 nt, Human
agggccagcccauaaugccaaa

SEQ ID NO: 847128 - RNA, 22 nt, Human
guggcucucgccagccugcggg

SEQ ID NO: 847129 - RNA, 22 nt, Human
uggccuggcugcccugucugga

SEQ ID NO: 847130 - RNA, 22 nt, Human
uggcucagaaggcugccuucac

SEQ ID NO: 847131 - RNA, 22 nt, Human
uuucauaaggguuucuagacuu

SEQ ID NO: 847132 - RNA, 22 nt, Human
cugggaggugcagcaaaaauca

SEQ ID NO: 847133 - RNA, 22 nt, Human
cacagcuucuccuugauaucgc

SEQ ID NO: 847134 - RNA, 22 nt, Human
agggcagagaaauguaguugag

SEQ ID NO: 847135 - RNA, 22 nt, Human
gcucuguacgcaggaugagggg

SEQ ID NO: 847136 - RNA, 22 nt, Human
gcagccacccucaaggcugaau

SEQ ID NO: 847137 - RNA, 22 nt, Human
aaaggucagcugccaucguucu

SEQ ID NO: 847138 - RNA, 22 nt, Human
ggggacccucaggacugcgucu

SEQ ID NO: 847139 - RNA, 22 nt, Human
aucagcuuuucucaucagaaau

SEQ ID NO: 847140 - RNA, 22 nt, Human
cagaaguaagauuacugugagu

SEQ ID NO: 847141 - RNA, 22 nt, Human
cauugacaucaggcuuggccaa

SEQ ID NO: 847142 - RNA, 23 nt, Human
auuuccuacuauaaaagagguaa

SEQ ID NO: 847143 - RNA, 22 nt, Human
uccuggaggcaaaugagcacau

SEQ ID NO: 847144 - RNA, 22 nt, Human
uaagagaauguuguggcuaggu

SEQ ID NO: 847145 - RNA, 22 nt, Human
ggcuuggaccagucacaguggu

SEQ ID NO: 847146 - RNA, 22 nt, Human
cauuguauugaggauacuuaag

SEQ ID NO: 847147 - RNA, 22 nt, Human
ccagcagcuguggcuuugccuc

SEQ ID NO: 847148 - RNA, 22 nt, Human
gaagcagcgaaguggaagggac

SEQ ID NO: 847149 - RNA, 22 nt, Human
ggucagguuuuuaggagugacc

SEQ ID NO: 847150 - RNA, 22 nt, Human
ccagcauggcaccugagaugag

SEQ ID NO: 847151 - RNA, 22 nt, Human
aggcagcagugauaagauagga

SEQ ID NO: 847152 - RNA, 22 nt, Human
cagcucugggugacaggagggc

SEQ ID NO: 847153 - RNA, 22 nt, Human
gcaggggcugcugggaacucgg

SEQ ID NO: 847154 - RNA, 22 nt, Human
ugcuggcccuggcucagggaac

SEQ ID NO: 847155 - RNA, 22 nt, Human
caaaguuuuaguaaacauauau

SEQ ID NO: 847156 - RNA, 22 nt, Human
acacuuuacagcuuccuuugca

SEQ ID NO: 847157 - RNA, 22 nt, Human
gccagcaguccugcugugugcc

SEQ ID NO: 847158 - RNA, 22 nt, Human
agagcuguggauaguccuggau

SEQ ID NO: 847159 - RNA, 22 nt, Human
uuauuucauguaaaauuuaugu

SEQ ID NO: 847160 - RNA, 22 nt, Human
agauguuccagccaaugggaau

SEQ ID NO: 847161 - RNA, 22 nt, Human
ccucagggccaucucugucccu

SEQ ID NO: 847162 - RNA, 22 nt, Human
ucugaaauagaagugucuuucu

SEQ ID NO: 847163 - RNA, 22 nt, Human
uucaaugauuuuuagggaucau

SEQ ID NO: 847164 - RNA, 22 nt, Human
ggcugagccuggagcaucuggu

SEQ ID NO: 847165 - RNA, 22 nt, Human
acagauuuuugguaaauaauuu

SEQ ID NO: 847166 - RNA, 22 nt, Human
gaaugaaagauuugcauucuau

SEQ ID NO: 847167 - RNA, 22 nt, Human
caaggagaguaauugaaugaga

SEQ ID NO: 847168 - RNA, 22 nt, Human
uccauguguuuuccuguccaca

SEQ ID NO: 847169 - RNA, 22 nt, Human
ucuacccagagcuaugaccuga

SEQ ID NO: 847170 - RNA, 22 nt, Human
uguacaaagguacuuugauguu

SEQ ID NO: 847171 - RNA, 22 nt, Human
uguggcugcucaggugcagacc

SEQ ID NO: 847172 - RNA, 22 nt, Human
aaaugcaauuguauguacucca

SEQ ID NO: 847173 - RNA, 22 nt, Human
augacaugaccugguagagaca

SEQ ID NO: 847174 - RNA, 22 nt, Human
cagcccugcacgcugccuccgc

SEQ ID NO: 847175 - RNA, 22 nt, Human
agagccugcaucaggcuugggg

SEQ ID NO: 847176 - RNA, 22 nt, Human
uauacagauuaacagauuuaaa

SEQ ID NO: 847177 - RNA, 22 nt, Human
uccucaggaugugggguagaau

SEQ ID NO: 847178 - RNA, 22 nt, Human
cagcugcaggaacaaaaaugug

SEQ ID NO: 847179 - RNA, 22 nt, Human
agggauguaaauucuucuucuu

SEQ ID NO: 847180 - RNA, 22 nt, Human
uguaggaauguuuuuaaguugg

SEQ ID NO: 847181 - RNA, 22 nt, Human
aguaaaaucaccaucucuuugu

SEQ ID NO: 847182 - RNA, 22 nt, Human
uuguuuuggaagaacuuacucu

SEQ ID NO: 847183 - RNA, 22 nt, Human
ccagcugcugugcagggaggcu

SEQ ID NO: 847184 - RNA, 22 nt, Human
uggcugcugagaaggcagcugu

SEQ ID NO: 847185 - RNA, 22 nt, Human
ucccagaggacuguuggugcua

SEQ ID NO: 847186 - RNA, 22 nt, Human
gugcucuguguauuaggauguc

SEQ ID NO: 847187 - RNA, 22 nt, Human
aagggcagagggaaucccacau

SEQ ID NO: 847188 - RNA, 22 nt, Human
gcugaagcccacguggcuugua

SEQ ID NO: 847189 - RNA, 19 nt, Human
uugguggugguuuugguuc

SEQ ID NO: 847190 - RNA, 22 nt, Human
cccucugaccuccugccacagu

SEQ ID NO: 847191 - RNA, 22 nt, Human
auaaggcagucacuggaauguu

SEQ ID NO: 847192 - RNA, 22 nt, Human
gaaugcacacgugugugcaugc

SEQ ID NO: 847193 - RNA, 22 nt, Human
ggcagggcuugucucugugaug

SEQ ID NO: 847194 - RNA, 22 nt, Human
guguuuccucacuucucugacu

SEQ ID NO: 847195 - RNA, 22 nt, Human
guuuacauguacucauuauacu

SEQ ID NO: 847196 - RNA, 22 nt, Human
aauguuuuaaaagagauugaga

SEQ ID NO: 847197 - RNA, 22 nt, Human
cuggcccagucucagaguguca

SEQ ID NO: 847198 - RNA, 22 nt, Human
auggcagccuguggacagucaa

SEQ ID NO: 847199 - RNA, 22 nt, Human
gcagggcucauucuaguacaau

SEQ ID NO: 847200 - RNA, 21 nt, Human
gcaugccugcaucuuaguguu

SEQ ID NO: 847201 - RNA, 19 nt, Human
agcaaauauaauaguguuc

SEQ ID NO: 847202 - RNA, 22 nt, Human
cugugcuuccaggauggcagcu

SEQ ID NO: 847203 - RNA, 22 nt, Human
guguuuccucuagaagccaugg

SEQ ID NO: 847204 - RNA, 22 nt, Human
auucaguucuaaggucagugcc

SEQ ID NO: 847205 - RNA, 22 nt, Human
cugggcugucccaaccccaucc

SEQ ID NO: 847206 - RNA, 22 nt, Human
cagcagguauguuuguucagca

SEQ ID NO: 847207 - RNA, 21 nt, Human
uagcacuucgcuguaauuggg

SEQ ID NO: 847208 - RNA, 22 nt, Human
ggccuuggugcucuguguugca

SEQ ID NO: 847209 - RNA, 22 nt, Human
cagaauaaaagucccaaggcau

SEQ ID NO: 847210 - RNA, 22 nt, Human
uguauacaggcauaagagauac

SEQ ID NO: 847211 - RNA, 21 nt, Human
gagugucuaauccaggcuguc

SEQ ID NO: 847212 - RNA, 20 nt, Human
gggcagcuccccucauucug

SEQ ID NO: 847213 - RNA, 22 nt, Human
uugcauuugaucuuggguucuc

SEQ ID NO: 847214 - RNA, 22 nt, Human
gcagacuggucuucagccuugg

SEQ ID NO: 847215 - RNA, 17 nt, Human
ugauaguucauuuuaag

SEQ ID NO: 847216 - RNA, 22 nt, Human
ugcccugucuaagcugucagua

SEQ ID NO: 847217 - RNA, 22 nt, Human
uggcccugcuguaucaucugcu

SEQ ID NO: 847218 - RNA, 22 nt, Human
cuggcuccaucacugggugaug

SEQ ID NO: 847219 - RNA, 19 nt, Human
uggaggagaggaaaaguca

SEQ ID NO: 847220 - RNA, 22 nt, Human
auuuacagaugaugcuauuuga

SEQ ID NO: 847221 - RNA, 22 nt, Human
gggagggaucugcuaggcaaug

SEQ ID NO: 847222 - RNA, 22 nt, Human
gcagggacaaggcagguguucu

SEQ ID NO: 847223 - RNA, 22 nt, Human
uaaaugugagugaugcggugaa

SEQ ID NO: 847224 - RNA, 22 nt, Human
uuugaacuucuaccugucauau

SEQ ID NO: 847225 - RNA, 22 nt, Human
uacauuccauguguguguauuc

SEQ ID NO: 847226 - RNA, 22 nt, Human
augaagucuagcaagcauugaa

SEQ ID NO: 847227 - RNA, 20 nt, Human
auacacauucauagaaaaau

SEQ ID NO: 847228 - RNA, 17 nt, Human
agugaaauuuacauugc

SEQ ID NO: 847229 - RNA, 22 nt, Human
guguggcugccagccaagaggc

SEQ ID NO: 847230 - RNA, 22 nt, Human
agggcagaaaccaccuugaugg

SEQ ID NO: 847231 - RNA, 22 nt, Human
aaaucauguuggcacaauaaaa

SEQ ID NO: 847232 - RNA, 22 nt, Human
ucugggcuugguuagggcuguu

SEQ ID NO: 847233 - RNA, 22 nt, Human
aggcucagagaugaguaagcac

SEQ ID NO: 847234 - RNA, 22 nt, Human
uguaauauuguagugacaguac

SEQ ID NO: 847235 - RNA, 22 nt, Human
aaggccaugaccacuugcugug

SEQ ID NO: 847236 - RNA, 22 nt, Human
gcauaauauacaugcuugaucc

SEQ ID NO: 847237 - RNA, 22 nt, Human
gcaaaaaaugcuuguugcuuag

SEQ ID NO: 847238 - RNA, 20 nt, Human
caggccagagguuugauggc

SEQ ID NO: 847239 - RNA, 22 nt, Human
aauguacaauaagacaaagagg

SEQ ID NO: 847240 - RNA, 22 nt, Human
ucaguuuuguauguuguaaguc

SEQ ID NO: 847241 - RNA, 22 nt, Human
uauccaaaguuucucagaaacu

SEQ ID NO: 847242 - RNA, 22 nt, Human
aagcugcccucauucccagugc

SEQ ID NO: 847243 - RNA, 22 nt, Human
uccuucaggccucauucucaua

SEQ ID NO: 847244 - RNA, 18 nt, Human
acagaaauagcugugccu

SEQ ID NO: 847245 - RNA, 22 nt, Human
gcccaggauaaugcugucccug

SEQ ID NO: 847246 - RNA, 22 nt, Human
caacuuuaugauugguuuguca

SEQ ID NO: 847247 - RNA, 21 nt, Human
uaaauaauaaguugcugagau

SEQ ID NO: 847248 - RNA, 22 nt, Human
ccucugaguccucccugguugc

SEQ ID NO: 847249 - RNA, 22 nt, Human
aauguguauacuggcaauuaag

SEQ ID NO: 847250 - RNA, 22 nt, Human
cagggacagccuugggguggcg

SEQ ID NO: 847251 - RNA, 22 nt, Human
uucagagcaucucuaaagccag

SEQ ID NO: 847252 - RNA, 22 nt, Human
auguacauuuagaucauuucug

SEQ ID NO: 847253 - RNA, 22 nt, Human
gagguggguguaucacagguca

SEQ ID NO: 847254 - RNA, 22 nt, Human
acuggcaguggcagcagaaaga

SEQ ID NO: 847255 - RNA, 20 nt, Human
gccaggagggugugaugagc

SEQ ID NO: 847256 - RNA, 22 nt, Human
caguccuuucugaaauccuaua

SEQ ID NO: 847257 - RNA, 22 nt, Human
uguuccauaaguggugcuuugu

SEQ ID NO: 847258 - RNA, 22 nt, Human
auauucguggucaaguaaggcc

SEQ ID NO: 847259 - RNA, 22 nt, Human
uauuuccaggccccacucuaga

SEQ ID NO: 847260 - RNA, 22 nt, Human
agcugucuuucugccuccugau

SEQ ID NO: 847261 - RNA, 22 nt, Human
gaggcgagaagcuggagauggu

SEQ ID NO: 847262 - RNA, 22 nt, Human
aaugugaucgcuuuagaagcuu

SEQ ID NO: 847263 - RNA, 22 nt, Human
ccuggagcaaaaaucuaaggag

SEQ ID NO: 847264 - RNA, 22 nt, Human
agaaaucauugaauuauuugcu

SEQ ID NO: 847265 - RNA, 22 nt, Human
uucucagagugaccaagucuuu

SEQ ID NO: 847266 - RNA, 22 nt, Human
augcaguacauacaaacacuga

SEQ ID NO: 847267 - RNA, 22 nt, Human
uggggacaggagacuuacagcu

SEQ ID NO: 847268 - RNA, 22 nt, Human
ccugugccauccugagcauccc

SEQ ID NO: 847269 - RNA, 22 nt, Human
gccugcagccucaagggcugag

SEQ ID NO: 847270 - RNA, 22 nt, Human
uuggcucaggaccccugugacu

SEQ ID NO: 847271 - RNA, 22 nt, Human
guguggcugugggagauguuca

SEQ ID NO: 847272 - RNA, 22 nt, Human
uccugcagagccgcccucaggu

SEQ ID NO: 847273 - RNA, 22 nt, Human
gaugaaaaauugcugugucaua

SEQ ID NO: 847274 - RNA, 20 nt, Human
uccagcugucuuucagagac

SEQ ID NO: 847275 - RNA, 22 nt, Human
uggauuaguuaagaaauguuag

SEQ ID NO: 847276 - RNA, 22 nt, Human
uaacagaaauagaaaugagagu

SEQ ID NO: 847277 - RNA, 22 nt, Human
acugucugcuggccccugguua

SEQ ID NO: 847278 - RNA, 22 nt, Human
agcugucuaccugcagaguccu

SEQ ID NO: 847279 - RNA, 20 nt, Human
aggagggaccuggauuggcg

SEQ ID NO: 847280 - RNA, 22 nt, Human
gggugacauuucccaaugagcc

SEQ ID NO: 847281 - RNA, 21 nt, Human
aagaaguuuggauuuuguccu

SEQ ID NO: 847282 - RNA, 22 nt, Human
acccaggagcaggcugggcagu

SEQ ID NO: 847283 - RNA, 19 nt, Human
gcagcugugggaagagcca

SEQ ID NO: 847284 - RNA, 22 nt, Human
agaaggccuaacuugggggcaa

SEQ ID NO: 847285 - RNA, 22 nt, Human
ucaggagacuggcagugcccac

SEQ ID NO: 847286 - RNA, 22 nt, Human
guacagaaggauuucuaguagu

SEQ ID NO: 847287 - RNA, 22 nt, Human
ccugggcuucugucuagauguu

SEQ ID NO: 847288 - RNA, 22 nt, Human
ugggccugaaggagcugcgccc

SEQ ID NO: 847289 - RNA, 22 nt, Human
aaguaaaagcuuuaccaugcgc

SEQ ID NO: 847290 - RNA, 22 nt, Human
uuugaagucagacacugcuuug

SEQ ID NO: 847291 - RNA, 22 nt, Human
uuuuaagaugcuaguauuucag

SEQ ID NO: 847292 - RNA, 22 nt, Human
uacaagagguauauagaaacag

SEQ ID NO: 847293 - RNA, 22 nt, Human
aagcagggcuuuaagcgguuuu

SEQ ID NO: 847294 - RNA, 22 nt, Human
aggcugcucugcgaagucagcu

SEQ ID NO: 847295 - RNA, 22 nt, Human
gccaggagacuccauucauuug

SEQ ID NO: 847296 - RNA, 22 nt, Human
aaugaaauguagcuuauccaua

SEQ ID NO: 847297 - RNA, 22 nt, Human
aaacuguauauuuauggcaugu

SEQ ID NO: 847298 - RNA, 22 nt, Human
agugccaggagcaaggagcucc

SEQ ID NO: 847299 - RNA, 22 nt, Human
augcaagauguauagaagacuu

SEQ ID NO: 847300 - RNA, 22 nt, Human
auucucaauggcuacuuucaua

SEQ ID NO: 847301 - RNA, 22 nt, Human
ucagccaguugccccaguuagu

SEQ ID NO: 847302 - RNA, 23 nt, Human
ugcucugggaggcccuggagagc

SEQ ID NO: 847303 - RNA, 17 nt, Human
uaucagaauguguuuac

SEQ ID NO: 847304 - RNA, 22 nt, Human
aacauguugcuuuaauaauauu

SEQ ID NO: 847305 - RNA, 22 nt, Human
gccuccuggauuuuagugccau

SEQ ID NO: 847306 - RNA, 22 nt, Human
aggcucugguuggcaaguaaag

SEQ ID NO: 847307 - RNA, 22 nt, Human
caggagcucucaucgucagggc

SEQ ID NO: 847308 - RNA, 22 nt, Human
aagaggaagucuccauggagag

SEQ ID NO: 847309 - RNA, 22 nt, Human
ugggcugcagagcccggccuuc

SEQ ID NO: 847310 - RNA, 22 nt, Human
agucccagccuaggcugugcug

SEQ ID NO: 847311 - RNA, 22 nt, Human
agacagcuaauaaaugagugug

SEQ ID NO: 847312 - RNA, 22 nt, Human
ugagccugcaauaagcacagcc

SEQ ID NO: 847313 - RNA, 22 nt, Human
aguauuucugcucaugaaagag

SEQ ID NO: 847314 - RNA, 22 nt, Human
aaugcuuuuugcgaaaugugca

SEQ ID NO: 847315 - RNA, 19 nt, Human
cugguccugacugaggggu

SEQ ID NO: 847316 - RNA, 22 nt, Human
auucauaaguaaaugauuaccu

SEQ ID NO: 847317 - RNA, 19 nt, Human
gaucuuugccaauuuaagc

SEQ ID NO: 847318 - RNA, 22 nt, Human
agcugcuaugacaacaccagcc

SEQ ID NO: 847319 - RNA, 22 nt, Human
cacagggcagugauuguccaca

SEQ ID NO: 847320 - RNA, 22 nt, Human
aagggcugaaugaaggguugaa

SEQ ID NO: 847321 - RNA, 20 nt, Human
uggggccuguuucugugguu

SEQ ID NO: 847322 - RNA, 22 nt, Human
uggcaccugaacuuagaggugu

SEQ ID NO: 847323 - RNA, 22 nt, Human
uuugcauuuguucaaguauuga

SEQ ID NO: 847324 - RNA, 22 nt, Human
ccugggcaacauagugagaccu

SEQ ID NO: 847325 - RNA, 22 nt, Human
uguuucaugauugcugucauuu

SEQ ID NO: 847326 - RNA, 22 nt, Human
uaucaagugacuaucacagaac

SEQ ID NO: 847327 - RNA, 17 nt, Human
cucugcagugcauggcu

SEQ ID NO: 847328 - RNA, 20 nt, Human
ucucccaggcucagggaaga

SEQ ID NO: 847329 - RNA, 19 nt, Human
gcuggggccugaccagaca

SEQ ID NO: 847330 - RNA, 22 nt, Human
uuaauucuaguuuaacacuuag

SEQ ID NO: 847331 - RNA, 22 nt, Human
gagagcugggggacuguggaug

SEQ ID NO: 847332 - RNA, 22 nt, Human
uggcucugggcaccguguccac

SEQ ID NO: 847333 - RNA, 22 nt, Human
cccagagccucauucuguuggg

SEQ ID NO: 847334 - RNA, 22 nt, Human
caggagaggaggcuacuucuua

SEQ ID NO: 847335 - RNA, 22 nt, Human
gcagcguggggacaggagcuca

SEQ ID NO: 847336 - RNA, 19 nt, Human
aauacaguguuauagaauu

SEQ ID NO: 847337 - RNA, 23 nt, Human
uuuuaauuuggacauaagaagau

SEQ ID NO: 847338 - RNA, 22 nt, Human
gaggcagugucgguggcaggau

SEQ ID NO: 847339 - RNA, 20 nt, Human
aauuuacucacagaaugaau

SEQ ID NO: 847340 - RNA, 22 nt, Human
aguuauaaucugcuacugauau

SEQ ID NO: 847341 - RNA, 22 nt, Human
ucagccagaggcuucuugguuu

SEQ ID NO: 847342 - RNA, 22 nt, Human
gccugguguccagaggcgagug

SEQ ID NO: 847343 - RNA, 22 nt, Human
uccaaacacccuccaugcugca

SEQ ID NO: 847344 - RNA, 22 nt, Human
augcccaaugucacaauuuuug

SEQ ID NO: 847345 - RNA, 22 nt, Human
uggcagaaguucacuaguagcu

SEQ ID NO: 847346 - RNA, 22 nt, Human
gcccugagacugagcauggguu

SEQ ID NO: 847347 - RNA, 22 nt, Human
agucucuuuaaucacagugucu

SEQ ID NO: 847348 - RNA, 22 nt, Human
ugccaggggaccuagggauguc

SEQ ID NO: 847349 - RNA, 22 nt, Human
agguaaggcuguaagcuaagcc

SEQ ID NO: 847350 - RNA, 23 nt, Human
uccagcagccaagaaggguagaa

SEQ ID NO: 847351 - RNA, 22 nt, Human
aauguaugacaguucuaguggu

SEQ ID NO: 847352 - RNA, 22 nt, Human
ggauuuccucuugacucuaaag

SEQ ID NO: 847353 - RNA, 22 nt, Human
cuucuuaaugacagauuaaaau

SEQ ID NO: 847354 - RNA, 17 nt, Human
ucaggauccaggguucu

SEQ ID NO: 847355 - RNA, 22 nt, Human
aaguucaagcucugccuaaaau

SEQ ID NO: 847356 - RNA, 19 nt, Human
ugcagcucagggcaggggc

SEQ ID NO: 847357 - RNA, 22 nt, Human
gaggccugcuuuggcacucugg

SEQ ID NO: 847358 - RNA, 20 nt, Human
gagauuuccaaucaugccca

SEQ ID NO: 847359 - RNA, 22 nt, Human
uaauuucaauagcuugcauaau

SEQ ID NO: 847360 - RNA, 22 nt, Human
ugcagcugcuugauucaucuug

SEQ ID NO: 847361 - RNA, 22 nt, Human
uuuccuaggagauugaucacau

SEQ ID NO: 847362 - RNA, 18 nt, Human
cuuucagauggauaugcu

SEQ ID NO: 847363 - RNA, 22 nt, Human
gcucuuccauuucucuugaacu

SEQ ID NO: 847364 - RNA, 22 nt, Human
uggcucugucacugugagcuau

SEQ ID NO: 847365 - RNA, 22 nt, Human
uccauuggucucugugcccagg

SEQ ID NO: 847366 - RNA, 22 nt, Human
uguacuaaggcuguguagaugu

SEQ ID NO: 847367 - RNA, 22 nt, Human
auggauuugcuuauacacaugu

SEQ ID NO: 847368 - RNA, 22 nt, Human
aggucauuaaaguuaaaugagg

SEQ ID NO: 847369 - RNA, 22 nt, Human
gagggcagaaaauuaugcggug

SEQ ID NO: 847370 - RNA, 22 nt, Human
guucuaauaggagaaaagacag

SEQ ID NO: 847371 - RNA, 22 nt, Human
caagagcugcaaauagcgugac

SEQ ID NO: 847372 - RNA, 20 nt, Human
aagagaagaagucuuugaaa

SEQ ID NO: 847373 - RNA, 22 nt, Human
aaaaaugcuuggacuuaauaaa

SEQ ID NO: 847374 - RNA, 22 nt, Human
uucuuuccaaccagauauuggu

SEQ ID NO: 847375 - RNA, 22 nt, Human
ccuuccuggagcccaugcagau

SEQ ID NO: 847376 - RNA, 22 nt, Human
agucaccagguuuuagagaccu

SEQ ID NO: 847377 - RNA, 22 nt, Human
acagaauugaaaguauaaucug

SEQ ID NO: 847378 - RNA, 22 nt, Human
aucuacaggauuuuacagaguu

SEQ ID NO: 847379 - RNA, 22 nt, Human
agauuguagaaacuguagcauu

SEQ ID NO: 847380 - RNA, 22 nt, Human
gaggcacuggaggaaaggagaa

SEQ ID NO: 847381 - RNA, 22 nt, Human
acugaaggguaaugugggagcc

SEQ ID NO: 847382 - RNA, 22 nt, Human
cccccaggcucugacacaggag

SEQ ID NO: 847383 - RNA, 22 nt, Human
gaaaauguuuccuguuauuugc

SEQ ID NO: 847384 - RNA, 22 nt, Human
cuauuucugccuaaugaccugu

SEQ ID NO: 847385 - RNA, 22 nt, Human
acucugggccccagguggagcu

SEQ ID NO: 847386 - RNA, 22 nt, Human
agggggaggcugugcugcgucu

SEQ ID NO: 847387 - RNA, 22 nt, Human
agauacauugaguuuccuccug

SEQ ID NO: 847388 - RNA, 22 nt, Human
ugcuggcuggccuggccuggac

SEQ ID NO: 847389 - RNA, 22 nt, Human
uguuguuuucucauggagaaua

SEQ ID NO: 847390 - RNA, 22 nt, Human
acagaauugauggaaaucucag

SEQ ID NO: 847391 - RNA, 22 nt, Human
gagucaccacacggugcugacu

SEQ ID NO: 847392 - RNA, 22 nt, Human
aucagcaaguccuguuaauucu

SEQ ID NO: 847393 - RNA, 22 nt, Human
aggcuucugugagcucauacaa

SEQ ID NO: 847394 - RNA, 22 nt, Human
cccagcaggaggagguugcagu

SEQ ID NO: 847395 - RNA, 22 nt, Human
ucagagcuuaucucuugcugga

SEQ ID NO: 847396 - RNA, 22 nt, Human
ggagaggagcuauugggggcuc

SEQ ID NO: 847397 - RNA, 22 nt, Human
ugcacaaacuugugucccaggg

SEQ ID NO: 847398 - RNA, 22 nt, Human
caggggcaagaaugcugucagc

SEQ ID NO: 847399 - RNA, 22 nt, Human
gcuuuuucaaaugaaagcuggu

SEQ ID NO: 847400 - RNA, 22 nt, Human
cccaggccccagggcuugucag

SEQ ID NO: 847401 - RNA, 22 nt, Human
aagaacaguguccugggacucg

SEQ ID NO: 847402 - RNA, 22 nt, Human
ccugccugcaccuucucugggg

SEQ ID NO: 847403 - RNA, 22 nt, Human
uaaaugcaguuaguacuugcca

SEQ ID NO: 847404 - RNA, 19 nt, Human
ucuggcuccgccucuuagu

SEQ ID NO: 847405 - RNA, 22 nt, Human
cugcagggcagggccuccuggc

SEQ ID NO: 847406 - RNA, 22 nt, Human
ggcagucagugugguucauaaa

SEQ ID NO: 847407 - RNA, 22 nt, Human
agagaaggucacuaaggaccca

SEQ ID NO: 847408 - RNA, 22 nt, Human
uaugcacaauaugaucuauuug

SEQ ID NO: 847409 - RNA, 22 nt, Human
guggccuggaaaggcuggucug

SEQ ID NO: 847410 - RNA, 22 nt, Human
cugcuuugcauagcugccagag

SEQ ID NO: 847411 - RNA, 22 nt, Human
aaagccagguugugugcaggaa

SEQ ID NO: 847412 - RNA, 22 nt, Human
ucagcuuggacagcuugguuga

SEQ ID NO: 847413 - RNA, 22 nt, Human
augggaggcaggcucagaaccg

SEQ ID NO: 847414 - RNA, 22 nt, Human
ccuggcaguggugaagaagagg

SEQ ID NO: 847415 - RNA, 22 nt, Human
uggcaggguuggccaccuuacc

SEQ ID NO: 847416 - RNA, 20 nt, Human
cuguuaaaagguaugaauuc

SEQ ID NO: 847417 - RNA, 22 nt, Human
auugacaaggaaacuauaccag

SEQ ID NO: 847418 - RNA, 22 nt, Human
gugauuucaaauauagagugag

SEQ ID NO: 847419 - RNA, 22 nt, Human
gcuggcuccucuguccucacgg

SEQ ID NO: 847420 - RNA, 22 nt, Human
ugcagcuucuuguccugugauu

SEQ ID NO: 847421 - RNA, 22 nt, Human
cugcugcauuccucuuuaugag

SEQ ID NO: 847422 - RNA, 22 nt, Human
ugaagcagaggggucuugagcu

SEQ ID NO: 847423 - RNA, 22 nt, Human
ucugaggcccugcaggcagugu

SEQ ID NO: 847424 - RNA, 22 nt, Human
ggcugcagauagccagccacca

SEQ ID NO: 847425 - RNA, 22 nt, Human
ugggccagcaauugcugcucag

SEQ ID NO: 847426 - RNA, 22 nt, Human
caaucaguuucuguuguauaau

SEQ ID NO: 847427 - RNA, 22 nt, Human
gaggcagcugaaggagugacag

SEQ ID NO: 847428 - RNA, 22 nt, Human
gccuggaguacuccuugaagug

SEQ ID NO: 847429 - RNA, 20 nt, Human
ucucaggguucagcaaagua

SEQ ID NO: 847430 - RNA, 22 nt, Human
ugccuugcacauaauauacauu

SEQ ID NO: 847431 - RNA, 22 nt, Human
acagccauagaugcuuauguaa

SEQ ID NO: 847432 - RNA, 21 nt, Human
agcagccauuucacagagacu

SEQ ID NO: 847433 - RNA, 22 nt, Human
gcugagagugagcacuggauau

SEQ ID NO: 847434 - RNA, 19 nt, Human
ccuguucaugacucugucc

SEQ ID NO: 847435 - RNA, 20 nt, Human
uggaaguucuguugcauugg

SEQ ID NO: 847436 - RNA, 22 nt, Human
uguuucauuaguacugacaaua

SEQ ID NO: 847437 - RNA, 22 nt, Human
uggcagcugucuguggggucuc

SEQ ID NO: 847438 - RNA, 22 nt, Human
aguuuuucuccccuggcuucau

SEQ ID NO: 847439 - RNA, 22 nt, Human
cagcauuuaaugcagugcuucc

SEQ ID NO: 847440 - RNA, 22 nt, Human
cagggcagaaggcacucuacuc

SEQ ID NO: 847441 - RNA, 22 nt, Human
acccaggagacagguugcagug

SEQ ID NO: 847442 - RNA, 22 nt, Human
gagcaggcucugccuguguguc

SEQ ID NO: 847443 - RNA, 20 nt, Human
cugggcugcccagcuauggg

SEQ ID NO: 847444 - RNA, 22 nt, Human
agucuacaaucuuaaaugaacu

SEQ ID NO: 847445 - RNA, 22 nt, Human
guuauaaaggugauaaugguca

SEQ ID NO: 847446 - RNA, 22 nt, Human
acauuucuggaguuucucaaca

SEQ ID NO: 847447 - RNA, 22 nt, Human
uaauuuuuccacguacacuggg

SEQ ID NO: 847448 - RNA, 22 nt, Human
uaauuauuaugacaacaauugc

SEQ ID NO: 847449 - RNA, 22 nt, Human
guguacaugagaaaucaacuuu

SEQ ID NO: 847450 - RNA, 18 nt, Human
agagaugguguagaguuu

SEQ ID NO: 847451 - RNA, 21 nt, Human
uggaggaauaaagcacagaag

SEQ ID NO: 847452 - RNA, 22 nt, Human
aggcaggcucaggcccaugcuu

SEQ ID NO: 847453 - RNA, 22 nt, Human
gcccaggauggagaauaguggu

SEQ ID NO: 847454 - RNA, 17 nt, Human
agguggguggaucaccu

SEQ ID NO: 847455 - RNA, 22 nt, Human
cuggcagcuggaggcuagaggc

SEQ ID NO: 847456 - RNA, 22 nt, Human
uucauucuuauuugugaucugg

SEQ ID NO: 847457 - RNA, 22 nt, Human
uggugcugacaguucugagugc

SEQ ID NO: 847458 - RNA, 22 nt, Human
ggccucuguucugcauuccucc

SEQ ID NO: 847459 - RNA, 19 nt, Human
auuuacugccuaaaaucuc

SEQ ID NO: 847460 - RNA, 22 nt, Human
ccaagggcugcugaggugucca

SEQ ID NO: 847461 - RNA, 22 nt, Human
aggcugcuuucauggccgcccc

SEQ ID NO: 847462 - RNA, 22 nt, Human
uuguaaaugaccuuuucuaauu

SEQ ID NO: 847463 - RNA, 22 nt, Human
ccuuuuucaauauagaauugca

SEQ ID NO: 847464 - RNA, 22 nt, Human
guuguauagagggcaugaaucu

SEQ ID NO: 847465 - RNA, 22 nt, Human
acaacuuuaauggguuucagcu

SEQ ID NO: 847466 - RNA, 22 nt, Human
ccaggagauaagcugaguuuau

SEQ ID NO: 847467 - RNA, 22 nt, Human
ucuagaauuuugccauauagcu

SEQ ID NO: 847468 - RNA, 22 nt, Human
uuauuuauggcccucaccugau

SEQ ID NO: 847469 - RNA, 22 nt, Human
cacauauuugaugaagcuuugu

SEQ ID NO: 847470 - RNA, 23 nt, Human
gcaggugguucgaacagaaguuu

SEQ ID NO: 847471 - RNA, 22 nt, Human
gccuggcaggccucaugagggg

SEQ ID NO: 847472 - RNA, 22 nt, Human
guagcuuauuagggauaauagu

SEQ ID NO: 847473 - RNA, 22 nt, Human
ugcuucaggaagaaacgccagg

SEQ ID NO: 847474 - RNA, 22 nt, Human
ggcacugacugugcagcgcacc

SEQ ID NO: 847475 - RNA, 21 nt, Human
ugcccacagcaaaugcagagg

SEQ ID NO: 847476 - RNA, 22 nt, Human
gaauacaugauacaugaacugc

SEQ ID NO: 847477 - RNA, 22 nt, Human
cugcuuugaggggcucuguaua

SEQ ID NO: 847478 - RNA, 22 nt, Human
uuucaaaguugggaauuguaau

SEQ ID NO: 847479 - RNA, 22 nt, Human
ggcugggccagggccuguggac

SEQ ID NO: 847480 - RNA, 22 nt, Human
acauuucucuugaugucucuau

SEQ ID NO: 847481 - RNA, 22 nt, Human
auucucaaacaagugguuugau

SEQ ID NO: 847482 - RNA, 22 nt, Human
ccagcuccagguagaugggcag

SEQ ID NO: 847483 - RNA, 22 nt, Human
cuggcaggagcauucacagagg

SEQ ID NO: 847484 - RNA, 22 nt, Human
caguguggagggagagagccug

SEQ ID NO: 847485 - RNA, 22 nt, Human
gcagcccaaaaaagagguagau

SEQ ID NO: 847486 - RNA, 22 nt, Human
ucacauaaauuauacaauuuca

SEQ ID NO: 847487 - RNA, 22 nt, Human
ccuccugggacaggcuggcaca

SEQ ID NO: 847488 - RNA, 22 nt, Human
agcaggaaagaaaaaucugugu

SEQ ID NO: 847489 - RNA, 22 nt, Human
cuuauguaaaacggaaagggaa

SEQ ID NO: 847490 - RNA, 22 nt, Human
agccagcugugggcucaggcgg

SEQ ID NO: 847491 - RNA, 22 nt, Human
aggcagcaugggccccagcucc

SEQ ID NO: 847492 - RNA, 22 nt, Human
gcucucugucguuaugcuucau

SEQ ID NO: 847493 - RNA, 22 nt, Human
uuacagaaaauguguuuuaacu

SEQ ID NO: 847494 - RNA, 19 nt, Human
uggcagcauugguaccuug

SEQ ID NO: 847495 - RNA, 22 nt, Human
cagaucuguuugccagaucagc

SEQ ID NO: 847496 - RNA, 22 nt, Human
ucuuagaaugucaacugauguu

SEQ ID NO: 847497 - RNA, 22 nt, Human
acccacgaagaugagcggcaug

SEQ ID NO: 847498 - RNA, 22 nt, Human
uggcagagcaaaaagauagaau

SEQ ID NO: 847499 - RNA, 22 nt, Human
ggcugccugcucaggugcggcg

SEQ ID NO: 847500 - RNA, 22 nt, Human
cccuggaggagcuuagagcuug

SEQ ID NO: 847501 - RNA, 22 nt, Human
guacuuccguggacuaauuguu

SEQ ID NO: 847502 - RNA, 22 nt, Human
gcuguucacauuuugggccaaa

SEQ ID NO: 847503 - RNA, 22 nt, Human
gcugccuuugugagccaagggg

SEQ ID NO: 847504 - RNA, 22 nt, Human
ugcuugagacacauaugaauuu

SEQ ID NO: 847505 - RNA, 22 nt, Human
caucagaauguuagagaaggga

SEQ ID NO: 847506 - RNA, 22 nt, Human
cagcccuggccccagguggucu

SEQ ID NO: 847507 - RNA, 19 nt, Human
uggcuucuguuuucauguu

SEQ ID NO: 847508 - RNA, 22 nt, Human
gagggauggugugagaggcuca

SEQ ID NO: 847509 - RNA, 20 nt, Human
agaggcuuccuugggaggag

SEQ ID NO: 847510 - RNA, 18 nt, Human
caaagcucacguuccauc

SEQ ID NO: 847511 - RNA, 22 nt, Human
aucugucaggagcaaggacuac

SEQ ID NO: 847512 - RNA, 22 nt, Human
agccccaggcccggacgccucu

SEQ ID NO: 847513 - RNA, 22 nt, Human
aacuggauuaacuggcucaaau

SEQ ID NO: 847514 - RNA, 22 nt, Human
aauuuacaggugcacucgccau

SEQ ID NO: 847515 - RNA, 22 nt, Human
gagccuggauagccuuguucca

SEQ ID NO: 847516 - RNA, 22 nt, Human
ucaggcagagcuguggagcucu

SEQ ID NO: 847517 - RNA, 22 nt, Human
cauuaauauuguucuucuuuag

SEQ ID NO: 847518 - RNA, 22 nt, Human
ggugcuggacacguggcacucc

SEQ ID NO: 847519 - RNA, 22 nt, Human
aaggcccuaauagagcacauau

SEQ ID NO: 847520 - RNA, 22 nt, Human
ccagccuggguguuagaagaca

SEQ ID NO: 847521 - RNA, 22 nt, Human
gucagcaggguccccuugagug

SEQ ID NO: 847522 - RNA, 22 nt, Human
cuugcacacauguacaugugua

SEQ ID NO: 847523 - RNA, 22 nt, Human
aacagcaauagcacuauucauu

SEQ ID NO: 847524 - RNA, 22 nt, Human
uccaauauggauaaaaggggcc

SEQ ID NO: 847525 - RNA, 23 nt, Human
aaacugcuuccaauuccugccau

SEQ ID NO: 847526 - RNA, 22 nt, Human
aagaauguuaguuucugauaca

SEQ ID NO: 847527 - RNA, 22 nt, Human
cacacauugaauucauucuugu

SEQ ID NO: 847528 - RNA, 22 nt, Human
cugggcagaauuuuaggauggc

SEQ ID NO: 847529 - RNA, 22 nt, Human
uggcagcaaaaccagaaucaga

SEQ ID NO: 847530 - RNA, 22 nt, Human
uagggcagagcuuguacacgau

SEQ ID NO: 847531 - RNA, 21 nt, Human
uucuucaaagaagaaggcaca

SEQ ID NO: 847532 - RNA, 22 nt, Human
acauuucucagggaguuuugcu

SEQ ID NO: 847533 - RNA, 22 nt, Human
uggcagcaauuagcuagagcug

SEQ ID NO: 847534 - RNA, 22 nt, Human
agcagcugguaggaguggccac

SEQ ID NO: 847535 - RNA, 22 nt, Human
acuguucacuagugaggguuga

SEQ ID NO: 847536 - RNA, 22 nt, Human
guggccugaugccagcccugug

SEQ ID NO: 847537 - RNA, 22 nt, Human
cugggcugcgggcgccccucca

SEQ ID NO: 847538 - RNA, 23 nt, Human
agaggggagcaucugcuggcuga

SEQ ID NO: 847539 - RNA, 22 nt, Human
uacaaaguaauguauaauaucg

SEQ ID NO: 847540 - RNA, 22 nt, Human
cuggcaggaagaggaaagguca

SEQ ID NO: 847541 - RNA, 22 nt, Human
auuuccagacuuuuuccaggaa

SEQ ID NO: 847542 - RNA, 19 nt, Human
ggcugcugguuacagaggc

SEQ ID NO: 847543 - RNA, 22 nt, Human
guggccugccagcagauggcgc

SEQ ID NO: 847544 - RNA, 22 nt, Human
accaggagccacaggaggagcc

SEQ ID NO: 847545 - RNA, 22 nt, Human
agcugcuguggggcucggccug

SEQ ID NO: 847546 - RNA, 16 nt, Human
gcaacuuugggguuga

SEQ ID NO: 847547 - RNA, 22 nt, Human
aauuccaggcagaaaugugagu

SEQ ID NO: 847548 - RNA, 22 nt, Human
ggaggccaaggcagguggaucg

SEQ ID NO: 847549 - RNA, 22 nt, Human
ggcaauuucaugugguuuaaac

SEQ ID NO: 847550 - RNA, 22 nt, Human
gugcauuugacgaauacucacu

SEQ ID NO: 847551 - RNA, 22 nt, Human
ggaggugggauuaggaccuaaa

SEQ ID NO: 847552 - RNA, 22 nt, Human
aguaccaugcuuccugacuggu

SEQ ID NO: 847553 - RNA, 22 nt, Human
ugaggcaggaguuaaugugcuc

SEQ ID NO: 847554 - RNA, 22 nt, Human
gguggcuggaggagcugaugga

SEQ ID NO: 847555 - RNA, 22 nt, Human
uuagauaacaguagaauaucaa

SEQ ID NO: 847556 - RNA, 22 nt, Human
cugggcugcaucaaagaggcau

SEQ ID NO: 847557 - RNA, 22 nt, Human
gagggucccgagcccugucaga

SEQ ID NO: 847558 - RNA, 22 nt, Human
aaugauggauuuagacaagcug

SEQ ID NO: 847559 - RNA, 22 nt, Human
ugcagggcccucauuccugucc

SEQ ID NO: 847560 - RNA, 20 nt, Human
ccugggguacacuggcaugu

SEQ ID NO: 847561 - RNA, 22 nt, Human
gagggcugauaaaugcgcaugg

SEQ ID NO: 847562 - RNA, 22 nt, Human
gaauaaucaugaaauucaguga

SEQ ID NO: 847563 - RNA, 20 nt, Human
uccagcugggaacagcugau

SEQ ID NO: 847564 - RNA, 22 nt, Human
ggggcagagaauaaaaaccuaa

SEQ ID NO: 847565 - RNA, 22 nt, Human
gcuguggucugugagcuccaaa

SEQ ID NO: 847566 - RNA, 22 nt, Human
agcuccuccugugccaggccag

SEQ ID NO: 847567 - RNA, 22 nt, Human
caguccuuagucuggauggcuu

SEQ ID NO: 847568 - RNA, 22 nt, Human
ggccaccuuccaguugccugca

SEQ ID NO: 847569 - RNA, 22 nt, Human
uccuggguccauggcagccgaa

SEQ ID NO: 847570 - RNA, 22 nt, Human
uacauguauguguacgugcaug

SEQ ID NO: 847571 - RNA, 22 nt, Human
cagcaauaagccagguuagaca

SEQ ID NO: 847572 - RNA, 22 nt, Human
ugaaucaguauaaauucucaaa

SEQ ID NO: 847573 - RNA, 22 nt, Human
uagucaccugugagcugcguag

SEQ ID NO: 847574 - RNA, 22 nt, Human
guguggcuaccucagaggagca

SEQ ID NO: 847575 - RNA, 22 nt, Human
gagacacacacaggagguggca

SEQ ID NO: 847576 - RNA, 22 nt, Human
agugcugucccgacaacugagg

SEQ ID NO: 847577 - RNA, 22 nt, Human
agggcagcacaaggcauggacu

SEQ ID NO: 847578 - RNA, 22 nt, Human
uucugucagcgucagaaauucu

SEQ ID NO: 847579 - RNA, 22 nt, Human
gucuucuuuaaccuacuaaagc

SEQ ID NO: 847580 - RNA, 22 nt, Human
gagugcagaugccagccccagu

SEQ ID NO: 847581 - RNA, 22 nt, Human
uauaauuuggggaaaguggugu

SEQ ID NO: 847582 - RNA, 22 nt, Human
ugugaaaggggucacagggaaa

SEQ ID NO: 847583 - RNA, 22 nt, Human
cccaggaaugaggggcggaggc

SEQ ID NO: 847584 - RNA, 22 nt, Human
uuucacaaaugucuuuaacuug

SEQ ID NO: 847585 - RNA, 22 nt, Human
ugcuuuaagacacuaaguuuga

SEQ ID NO: 847586 - RNA, 22 nt, Human
gccaggagcaugucauuguuga

SEQ ID NO: 847587 - RNA, 22 nt, Human
gagauauguuagaaagcuauug

SEQ ID NO: 847588 - RNA, 22 nt, Human
ccuccugguccagcaucucuuu

SEQ ID NO: 847589 - RNA, 18 nt, Human
acagaggcagacauguau

SEQ ID NO: 847590 - RNA, 22 nt, Human
uucccaggcugugcuaccagag

SEQ ID NO: 847591 - RNA, 22 nt, Human
caaaugauaccuauuacuaggc

SEQ ID NO: 847592 - RNA, 22 nt, Human
agagcccugaagcagagcuaaa

SEQ ID NO: 847593 - RNA, 22 nt, Human
ggccugagucacaucaggagag

SEQ ID NO: 847594 - RNA, 22 nt, Human
augcugcacaagccacauguag

SEQ ID NO: 847595 - RNA, 22 nt, Human
acagcagcauaaacugacuaag

SEQ ID NO: 847596 - RNA, 22 nt, Human
gguuugcauucugaaaggcuca

SEQ ID NO: 847597 - RNA, 22 nt, Human
ccagggcagcagaauuggggca

SEQ ID NO: 847598 - RNA, 22 nt, Human
ugaggcagcaauuguauuguau

SEQ ID NO: 847599 - RNA, 22 nt, Human
cccuugcaucccauguguggcc

SEQ ID NO: 847600 - RNA, 22 nt, Human
caagaugaucccugaaggcagc

SEQ ID NO: 847601 - RNA, 22 nt, Human
cagagcugcgcuuuuuccuggu

SEQ ID NO: 847602 - RNA, 22 nt, Human
caaauucaaauuucaucagugu

SEQ ID NO: 847603 - RNA, 22 nt, Human
ugucaccaguuccaggaaauaa

SEQ ID NO: 847604 - RNA, 22 nt, Human
ucugucaaaugagcaaguaacu

SEQ ID NO: 847605 - RNA, 22 nt, Human
agaggugacauaggagaggcuc

SEQ ID NO: 847606 - RNA, 22 nt, Human
gccacguugccacccgggugac

SEQ ID NO: 847607 - RNA, 22 nt, Human
ucaggugguccuaagugccauc

SEQ ID NO: 847608 - RNA, 22 nt, Human
ugcagaagaauguaggcauaag

SEQ ID NO: 847609 - RNA, 22 nt, Human
uccuugaagcuuguaucuaaua

SEQ ID NO: 847610 - RNA, 20 nt, Human
cuucuucaguaguuuguucu

SEQ ID NO: 847611 - RNA, 22 nt, Human
uucaagaucgaguuuaaaguga

SEQ ID NO: 847612 - RNA, 22 nt, Human
aaaguguggucguucauuuugu

SEQ ID NO: 847613 - RNA, 19 nt, Human
ccagucccauacaggagau

SEQ ID NO: 847614 - RNA, 22 nt, Human
uagauauaagguccuuagaaca

SEQ ID NO: 847615 - RNA, 23 nt, Human
ucuaauacaugaaaccuagaugu

SEQ ID NO: 847616 - RNA, 22 nt, Human
agauggggcucaguguggaggc

SEQ ID NO: 847617 - RNA, 22 nt, Human
ugcauguguuugccacagugag

SEQ ID NO: 847618 - RNA, 22 nt, Human
uagcagcuuaaguaauuagaau

SEQ ID NO: 847619 - RNA, 22 nt, Human
cuggggugagcagaaacagggg

SEQ ID NO: 847620 - RNA, 22 nt, Human
cucauacauaugccauuccugc

SEQ ID NO: 847621 - RNA, 22 nt, Human
ucaggaguccugccugcagccu

SEQ ID NO: 847622 - RNA, 21 nt, Human
gcacagugccaggcacacagu

SEQ ID NO: 847623 - RNA, 22 nt, Human
ugcagaagaaugagcuuggagu

SEQ ID NO: 847624 - RNA, 21 nt, Human
gcagggacaaagcuucaggag

SEQ ID NO: 847625 - RNA, 22 nt, Human
ucagaauuuuuguuacccuuga

SEQ ID NO: 847626 - RNA, 22 nt, Human
uauuccaaaauaguuaagcacu

SEQ ID NO: 847627 - RNA, 22 nt, Human
gagugcaggccugagcaccauc

SEQ ID NO: 847628 - RNA, 22 nt, Human
acagggcagaaauguugcaucu

SEQ ID NO: 847629 - RNA, 22 nt, Human
gauaaugaugacaaugacaacc

SEQ ID NO: 847630 - RNA, 22 nt, Human
ccuggcagcgccgaagcuggcc

SEQ ID NO: 847631 - RNA, 22 nt, Human
aggcagcuggcaaauucuagag

SEQ ID NO: 847632 - RNA, 21 nt, Human
gcuccuggugcugcguggcgc

SEQ ID NO: 847633 - RNA, 22 nt, Human
aaaucaaaagacauguguuuua

SEQ ID NO: 847634 - RNA, 22 nt, Human
ugccaggcuaaguggaggacuu

SEQ ID NO: 847635 - RNA, 22 nt, Human
gcugucagugaggugagacaug

SEQ ID NO: 847636 - RNA, 22 nt, Human
aaaucacuaaguuauagugugg

SEQ ID NO: 847637 - RNA, 22 nt, Human
auuucaggagcaguuucagugg

SEQ ID NO: 847638 - RNA, 22 nt, Human
gcaagcaagcagguagagcuga

SEQ ID NO: 847639 - RNA, 22 nt, Human
gccugagcuacuagggagucug

SEQ ID NO: 847640 - RNA, 22 nt, Human
guucuucaggccauccucccag

SEQ ID NO: 847641 - RNA, 22 nt, Human
aauaauuuuagcucagaguugu

SEQ ID NO: 847642 - RNA, 22 nt, Human
ggcagagcuuguuccuucuguu

SEQ ID NO: 847643 - RNA, 22 nt, Human
gacccaggguggucaccugaaa

SEQ ID NO: 847644 - RNA, 22 nt, Human
uuacagaacugucuugaaauuu

SEQ ID NO: 847645 - RNA, 22 nt, Human
agagcugggugaagugccauca

SEQ ID NO: 847646 - RNA, 22 nt, Human
ugggcugcuuccucagcugaga

SEQ ID NO: 847647 - RNA, 22 nt, Human
cagcacugcugcuguacacaca

SEQ ID NO: 847648 - RNA, 22 nt, Human
uggcucucagcucccagcagcc

SEQ ID NO: 847649 - RNA, 22 nt, Human
uggggacacagagguucguugg

SEQ ID NO: 847650 - RNA, 22 nt, Human
uggguagagacacagucugggg

SEQ ID NO: 847651 - RNA, 22 nt, Human
acagggcaccugagguaggaag

SEQ ID NO: 847652 - RNA, 22 nt, Human
ucccuuaaaacucauguguugu

SEQ ID NO: 847653 - RNA, 22 nt, Human
uagcaguggaaucuuuugucca

SEQ ID NO: 847654 - RNA, 19 nt, Human
acaaaugauguugcacuga

SEQ ID NO: 847655 - RNA, 22 nt, Human
ccucugcucugguccaugugcu

SEQ ID NO: 847656 - RNA, 22 nt, Human
acagaugauuuuuaugaaaaca

SEQ ID NO: 847657 - RNA, 22 nt, Human
gccacccccaaguagguggucu

SEQ ID NO: 847658 - RNA, 22 nt, Human
gaucuucuauguaaugaagugu

SEQ ID NO: 847659 - RNA, 22 nt, Human
uuucacaaguaaaguccuaagu

SEQ ID NO: 847660 - RNA, 22 nt, Human
agcagagguuuguuggaaaccu

SEQ ID NO: 847661 - RNA, 22 nt, Human
gccucugcaauuacauugugcc

SEQ ID NO: 847662 - RNA, 22 nt, Human
aagauuucagaguuugggggaa

SEQ ID NO: 847663 - RNA, 22 nt, Human
aauauucaaguuauucuuucuu

SEQ ID NO: 847664 - RNA, 22 nt, Human
uagaaacauauaggauggcagg

SEQ ID NO: 847665 - RNA, 21 nt, Human
cucuggagucaagagcuucca

SEQ ID NO: 847666 - RNA, 23 nt, Human
cuggcucauccugguugcagugg

SEQ ID NO: 847667 - RNA, 22 nt, Human
uccaguggagugugggggugaa

SEQ ID NO: 847668 - RNA, 20 nt, Human
ugcuugucaugcacucaggc

SEQ ID NO: 847669 - RNA, 22 nt, Human
uacauucuacuuuuucacuccc

SEQ ID NO: 847670 - RNA, 22 nt, Human
ucucacuggguauaaaugagua

SEQ ID NO: 847671 - RNA, 22 nt, Human
guaaaguucuacuagaaucaac

SEQ ID NO: 847672 - RNA, 22 nt, Human
cucuaauccuuugucccugggu

SEQ ID NO: 847673 - RNA, 22 nt, Human
ucagcagaggggaaggcaucug

SEQ ID NO: 847674 - RNA, 22 nt, Human
cuggaucaugggaaagggauca

SEQ ID NO: 847675 - RNA, 22 nt, Human
cagccagggucaggcagcuucu

SEQ ID NO: 847676 - RNA, 22 nt, Human
augcuguguuuuaaauggaaau

SEQ ID NO: 847677 - RNA, 22 nt, Human
agaggaggcagcuuaacucagu

SEQ ID NO: 847678 - RNA, 22 nt, Human
acagcagcuaaccccugggcca

SEQ ID NO: 847679 - RNA, 22 nt, Human
augccaggccccacgcugggca

SEQ ID NO: 847680 - RNA, 22 nt, Human
ucucagagcucacaccuccugg

SEQ ID NO: 847681 - RNA, 22 nt, Human
auuuugaaaccaaguuauuucc

SEQ ID NO: 847682 - RNA, 22 nt, Human
gacaugcaacaauuuggcauuu

SEQ ID NO: 847683 - RNA, 22 nt, Human
gccaggugggagacagacagca

SEQ ID NO: 847684 - RNA, 22 nt, Human
ugauacagucagcucacaauug

SEQ ID NO: 847685 - RNA, 22 nt, Human
gacaggaggcagagcucaggug

SEQ ID NO: 847686 - RNA, 22 nt, Human
ucuucagacuccaaauguuuua

SEQ ID NO: 847687 - RNA, 22 nt, Human
gcugcaggggggucuggacuug

SEQ ID NO: 847688 - RNA, 22 nt, Human
ucucuucuaauuaggguccaug

SEQ ID NO: 847689 - RNA, 22 nt, Human
uuguuuucuccacugcaucuua

SEQ ID NO: 847690 - RNA, 22 nt, Human
aauuucaaagcucacuggcaua

SEQ ID NO: 847691 - RNA, 22 nt, Human
ucaaugauagacaagaucuaag

SEQ ID NO: 847692 - RNA, 22 nt, Human
acagguggggaggcugagguuc

SEQ ID NO: 847693 - RNA, 22 nt, Human
aaaaauguuaucuacuguccga

SEQ ID NO: 847694 - RNA, 22 nt, Human
accacugcccauggugaaaacu

SEQ ID NO: 847695 - RNA, 22 nt, Human
cauaauuuuuuuaagucagaac

SEQ ID NO: 847696 - RNA, 22 nt, Human
cccagccucagcuuuacuucca

SEQ ID NO: 847697 - RNA, 20 nt, Human
caauuucaucauuuccugug

SEQ ID NO: 847698 - RNA, 22 nt, Human
auaguuugugaaacacagcagu

SEQ ID NO: 847699 - RNA, 22 nt, Human
cauaauauacuacauugaugaa

SEQ ID NO: 847700 - RNA, 22 nt, Human
ugcauauuauguguaucugucu

SEQ ID NO: 847701 - RNA, 22 nt, Human
caggaggcaucauggagcggac

SEQ ID NO: 847702 - RNA, 22 nt, Human
caggauggucagaugcauuguc

SEQ ID NO: 847703 - RNA, 22 nt, Human
aagucuguuugagugucacacu

SEQ ID NO: 847704 - RNA, 15 nt, Human
ugggcagaucacuug

SEQ ID NO: 847705 - RNA, 22 nt, Human
uuacaaagagaaguuguagaau

SEQ ID NO: 847706 - RNA, 22 nt, Human
caccagcuacagacuacugugu

SEQ ID NO: 847707 - RNA, 22 nt, Human
uuccauuguuucugucuucacu

SEQ ID NO: 847708 - RNA, 21 nt, Human
cagaggcugagagggcaaucu

SEQ ID NO: 847709 - RNA, 22 nt, Human
agcagcucaaagccugcaagga

SEQ ID NO: 847710 - RNA, 22 nt, Human
aagagcuguaugccauaugauu

SEQ ID NO: 847711 - RNA, 22 nt, Human
caacuuugugugaccuagauag

SEQ ID NO: 847712 - RNA, 23 nt, Human
ucuuuacauacugaugaguucuc

SEQ ID NO: 847713 - RNA, 22 nt, Human
cagggcagaacauauagauagu

SEQ ID NO: 847714 - RNA, 22 nt, Human
ccaggcaggcagcguucucagg

SEQ ID NO: 847715 - RNA, 21 nt, Human
aaaaugugagcgugaugcuua

SEQ ID NO: 847716 - RNA, 22 nt, Human
gccaggcuguuuuuauuacugu

SEQ ID NO: 847717 - RNA, 22 nt, Human
cugagucucccggcaguggagg

SEQ ID NO: 847718 - RNA, 22 nt, Human
uccaugaggcagggaggcuggc

SEQ ID NO: 847719 - RNA, 22 nt, Human
acaggcuuuuuuagaaugacau

SEQ ID NO: 847720 - RNA, 22 nt, Human
aggcugccaaagcuucugucuc

SEQ ID NO: 847721 - RNA, 21 nt, Human
uccaggaguucuaauaggugu

SEQ ID NO: 847722 - RNA, 22 nt, Human
uaugcacauuaucuaauccauu

SEQ ID NO: 847723 - RNA, 22 nt, Human
uacuaaacccucgauggaucuu

SEQ ID NO: 847724 - RNA, 22 nt, Human
ugucacuucaggaaugcaggga

SEQ ID NO: 847725 - RNA, 22 nt, Human
uacauguauugauuucucuucu

SEQ ID NO: 847726 - RNA, 22 nt, Human
gucuucuuuucagucugcuugu

SEQ ID NO: 847727 - RNA, 21 nt, Human
agguggggcugcaccucugcu

SEQ ID NO: 847728 - RNA, 22 nt, Human
acacagggcugcgccugacccc

SEQ ID NO: 847729 - RNA, 22 nt, Human
ggccuucacgugaccuggcgug

SEQ ID NO: 847730 - RNA, 22 nt, Human
gcugggcaccggagagacccca

SEQ ID NO: 847731 - RNA, 22 nt, Human
gcuggccagggcugcucgcgga

SEQ ID NO: 847732 - RNA, 22 nt, Human
cugccugggccggccacccucu

SEQ ID NO: 847733 - RNA, 22 nt, Human
uggcauuugcucccuuguguuc

SEQ ID NO: 847734 - RNA, 22 nt, Human
gggcagauggggcacaggcuga

SEQ ID NO: 847735 - RNA, 22 nt, Human
agggagcuaggauccugaaggu

SEQ ID NO: 847736 - RNA, 22 nt, Human
ggaggcugcugccucacguggg

SEQ ID NO: 847737 - RNA, 22 nt, Human
cugggcuguaauguggcacuga

SEQ ID NO: 847738 - RNA, 22 nt, Human
uaauuucacaguucaacgcaca

SEQ ID NO: 847739 - RNA, 22 nt, Human
caaaugcagucccuuuguugcu

SEQ ID NO: 847740 - RNA, 22 nt, Human
gcagagccaugggagguuuuug

SEQ ID NO: 847741 - RNA, 22 nt, Human
gaggcauggccugaggcuagga

SEQ ID NO: 847742 - RNA, 21 nt, Human
ccuccaggugauuccgugcuc

SEQ ID NO: 847743 - RNA, 22 nt, Human
auacaaauuuauagaugcauuu

SEQ ID NO: 847744 - RNA, 22 nt, Human
ugccucugugggccuuccuggc

SEQ ID NO: 847745 - RNA, 22 nt, Human
aggcaguuguugcugagcagcu

SEQ ID NO: 847746 - RNA, 22 nt, Human
ucaucuaagagucuuacauuua

SEQ ID NO: 847747 - RNA, 22 nt, Human
acagugcuaaacacuucuugaa

SEQ ID NO: 847748 - RNA, 22 nt, Human
cuuggggcugucacucuggcau

SEQ ID NO: 847749 - RNA, 22 nt, Human
ccuggcagucaggggaguccuu

SEQ ID NO: 847750 - RNA, 22 nt, Human
cccagggcuuuucucacuagac

SEQ ID NO: 847751 - RNA, 22 nt, Human
ccaggguggaggcuggauggag

SEQ ID NO: 847752 - RNA, 22 nt, Human
gcucccagcuggagccucaaca

SEQ ID NO: 847753 - RNA, 22 nt, Human
caguccuucuccauuaaggcuc

SEQ ID NO: 847754 - RNA, 22 nt, Human
gcaggcugauagaggauuccau

SEQ ID NO: 847755 - RNA, 22 nt, Human
ucuuuccucugagcuccuguag

SEQ ID NO: 847756 - RNA, 22 nt, Human
cuggcuguauuaguuugauccu

SEQ ID NO: 847757 - RNA, 22 nt, Human
gauguagagggaagauuuuaaa

SEQ ID NO: 847758 - RNA, 22 nt, Human
aggcacuguucccaguuauccu

SEQ ID NO: 847759 - RNA, 22 nt, Human
auuguguaauuuucagcucaua

SEQ ID NO: 847760 - RNA, 22 nt, Human
auccugucaucauaguacuuga

SEQ ID NO: 847761 - RNA, 22 nt, Human
uggcauuucuggccauuugugu

SEQ ID NO: 847762 - RNA, 22 nt, Human
uccagcucuaacaugcugggcc

SEQ ID NO: 847763 - RNA, 22 nt, Human
aauucuagcauugugaaaauau

SEQ ID NO: 847764 - RNA, 22 nt, Human
acuugauuuugaaccuuucuac

SEQ ID NO: 847765 - RNA, 22 nt, Human
cauuuacauaacaguaacgcug

SEQ ID NO: 847766 - RNA, 22 nt, Human
gccucugcccuccugggacugc

SEQ ID NO: 847767 - RNA, 22 nt, Human
gucccagggaagaaggcagcac

SEQ ID NO: 847768 - RNA, 22 nt, Human
aggauccuuuggccacuucuua

SEQ ID NO: 847769 - RNA, 22 nt, Human
ggagccagugcccucuggugga

SEQ ID NO: 847770 - RNA, 20 nt, Human
gcugggggugugcugaguga

SEQ ID NO: 847771 - RNA, 22 nt, Human
cccugccuucuuggccuuuaaa

SEQ ID NO: 847772 - RNA, 22 nt, Human
agagcuggauggucaagauggc

SEQ ID NO: 847773 - RNA, 22 nt, Human
aacucagucauaaagcgaaugc

SEQ ID NO: 847774 - RNA, 22 nt, Human
uagauauaucugucauacuggu

SEQ ID NO: 847775 - RNA, 23 nt, Human
ggaaagagaggaguugugcauag

SEQ ID NO: 847776 - RNA, 20 nt, Human
aagcaauauagugcaaaugu

SEQ ID NO: 847777 - RNA, 22 nt, Human
gaggcagcaauaaaaagaauuu

SEQ ID NO: 847778 - RNA, 22 nt, Human
uucucuagguuuuagaugaaga

SEQ ID NO: 847779 - RNA, 22 nt, Human
aaaguccuguuaacuguuaaca

SEQ ID NO: 847780 - RNA, 22 nt, Human
cauagaaaucaggugagaaucu

SEQ ID NO: 847781 - RNA, 22 nt, Human
gauggcuuugugcaccaugauu

SEQ ID NO: 847782 - RNA, 22 nt, Human
ucuguuccaguagaaaggugca

SEQ ID NO: 847783 - RNA, 22 nt, Human
gaggucaggggagaggcugaug

SEQ ID NO: 847784 - RNA, 22 nt, Human
gucauugcaguggcaaaucaca

SEQ ID NO: 847785 - RNA, 22 nt, Human
cacugaagaugcgacuagugcu

SEQ ID NO: 847786 - RNA, 22 nt, Human
ggaagagagggcugggccucaa

SEQ ID NO: 847787 - RNA, 22 nt, Human
uaaagccaauauaccuagcaua

SEQ ID NO: 847788 - RNA, 23 nt, Human
acaagauagggauaaaaagauaa

SEQ ID NO: 847789 - RNA, 22 nt, Human
gccucugccaagggggcugcgg

SEQ ID NO: 847790 - RNA, 22 nt, Human
ugcuacaauucacaucuggaua

SEQ ID NO: 847791 - RNA, 22 nt, Human
acaaaaguguaggaauuccuua

SEQ ID NO: 847792 - RNA, 22 nt, Human
ccucccacauccuagcucugcu

SEQ ID NO: 847793 - RNA, 22 nt, Human
uggcagcaguggagguagaaag

SEQ ID NO: 847794 - RNA, 22 nt, Human
cuguguggccucaagccagccu

SEQ ID NO: 847795 - RNA, 22 nt, Human
ggcagaggaggggugaauuugc

SEQ ID NO: 847796 - RNA, 22 nt, Human
gugcagcugugugagagcucca

SEQ ID NO: 847797 - RNA, 22 nt, Human
uugcuguguaacuccuggccug

SEQ ID NO: 847798 - RNA, 22 nt, Human
uggcagagcuggcugcggauga

SEQ ID NO: 847799 - RNA, 22 nt, Human
cacugaagcuuucauucucuug

SEQ ID NO: 847800 - RNA, 22 nt, Human
uccagggauguccuguagcacu

SEQ ID NO: 847801 - RNA, 22 nt, Human
cagaggccaccuguggccacug

SEQ ID NO: 847802 - RNA, 22 nt, Human
gcauuuagcuuuaaaauauuuc

SEQ ID NO: 847803 - RNA, 22 nt, Human
agcccagguucuaaagccaaac

SEQ ID NO: 847804 - RNA, 22 nt, Human
ugcugucuuccaggauggugaa

SEQ ID NO: 847805 - RNA, 20 nt, Human
gggguuggcuggcacaggga

SEQ ID NO: 847806 - RNA, 22 nt, Human
uuugcaguagacaucuuauuuu

SEQ ID NO: 847807 - RNA, 22 nt, Human
auauauaaccuggauaaggcuu

SEQ ID NO: 847808 - RNA, 22 nt, Human
aaguuacacauuuucauuguaa

SEQ ID NO: 847809 - RNA, 18 nt, Human
gcccagaggucugggccc

SEQ ID NO: 847810 - RNA, 22 nt, Human
uuaaaauagccagugccccucu

SEQ ID NO: 847811 - RNA, 22 nt, Human
guggcuucugcggugugcgcag

SEQ ID NO: 847812 - RNA, 22 nt, Human
ugugugaaggaauauauacuca

SEQ ID NO: 847813 - RNA, 22 nt, Human
gcaggggcuaaggacacagaga

SEQ ID NO: 847814 - RNA, 18 nt, Human
uugagggaggggcagagu

SEQ ID NO: 847815 - RNA, 22 nt, Human
uuucauuacguguuugacuugu

SEQ ID NO: 847816 - RNA, 22 nt, Human
gcaggcaguugcaguuuucuag

SEQ ID NO: 847817 - RNA, 22 nt, Human
ucagaauugcagggagggcagg

SEQ ID NO: 847818 - RNA, 22 nt, Human
cuggagcucuccagagccccgu

SEQ ID NO: 847819 - RNA, 22 nt, Human
ucugucaggagauuggcagcug

SEQ ID NO: 847820 - RNA, 22 nt, Human
cagcugaauucuucagacucca

SEQ ID NO: 847821 - RNA, 22 nt, Human
ugagccaggcucaagugauccu

SEQ ID NO: 847822 - RNA, 22 nt, Human
ucccaggaggugcuuccuagga

SEQ ID NO: 847823 - RNA, 22 nt, Human
aagcagccucauuugugguaag

SEQ ID NO: 847824 - RNA, 22 nt, Human
uuucuucagccacuccaaacug

SEQ ID NO: 847825 - RNA, 22 nt, Human
gauggacagccuggaaggaaag

SEQ ID NO: 847826 - RNA, 22 nt, Human
uaaaugugggggccacgggcuu

SEQ ID NO: 847827 - RNA, 22 nt, Human
cuguguccucccgcugcaccca

SEQ ID NO: 847828 - RNA, 22 nt, Human
acagaaggcggggacaaggcgg

SEQ ID NO: 847829 - RNA, 22 nt, Human
agcugcugaaugacacugcaag

SEQ ID NO: 847830 - RNA, 22 nt, Human
ugaggugaccgcagaugggaag

SEQ ID NO: 847831 - RNA, 22 nt, Human
ggcuccugauaggagaaugcgg

SEQ ID NO: 847832 - RNA, 22 nt, Human
cugcugugauugggagaaaccg

SEQ ID NO: 847833 - RNA, 22 nt, Human
cugggggcaagcagacagcugu

SEQ ID NO: 847834 - RNA, 18 nt, Human
aggcuucuuggcucaguc

SEQ ID NO: 847835 - RNA, 22 nt, Human
ccugucucuuucaaucugagag

SEQ ID NO: 847836 - RNA, 22 nt, Human
ucugggaaaugcuguuccuugu

SEQ ID NO: 847837 - RNA, 22 nt, Human
ugaaagcacucacuucugcucu

SEQ ID NO: 847838 - RNA, 22 nt, Human
ucagaggucacacagcaaguuu

SEQ ID NO: 847839 - RNA, 22 nt, Human
auugacaagcaguaugucuuag

SEQ ID NO: 847840 - RNA, 22 nt, Human
agcagggcucuguggagggugg

SEQ ID NO: 847841 - RNA, 23 nt, Human
uccuucagagccucccuccaagc

SEQ ID NO: 847842 - RNA, 22 nt, Human
ggcacugaaguggguguugggu

SEQ ID NO: 847843 - RNA, 20 nt, Human
uuaucugucaaucugucuca

SEQ ID NO: 847844 - RNA, 22 nt, Human
ucagaauuuugguuugguuggu

SEQ ID NO: 847845 - RNA, 22 nt, Human
agccaggauggucucgaucggc

SEQ ID NO: 847846 - RNA, 22 nt, Human
ugucagggcaugcgguccagcc

SEQ ID NO: 847847 - RNA, 22 nt, Human
cagagugaaaacugagcucaaa

SEQ ID NO: 847848 - RNA, 22 nt, Human
uuccaugaagggcagccucuca

SEQ ID NO: 847849 - RNA, 21 nt, Human
uaauaauuccacuacagagua

SEQ ID NO: 847850 - RNA, 22 nt, Human
aagcagggugucuugacccaug

SEQ ID NO: 847851 - RNA, 22 nt, Human
ugccugggagugaccaagacuc

SEQ ID NO: 847852 - RNA, 20 nt, Human
agagaauucccuuuggagau

SEQ ID NO: 847853 - RNA, 22 nt, Human
cucaggauccaucuccugcccu

SEQ ID NO: 847854 - RNA, 18 nt, Human
ucugucucuguccuugcu

SEQ ID NO: 847855 - RNA, 22 nt, Human
uggagcugaacuuugaggccag

SEQ ID NO: 847856 - RNA, 22 nt, Human
gaccugccugagcugccucugc

SEQ ID NO: 847857 - RNA, 22 nt, Human
ccuggagcgcgggucaagcugg

SEQ ID NO: 847858 - RNA, 22 nt, Human
agggagaaaauuggaugcacaa

SEQ ID NO: 847859 - RNA, 22 nt, Human
cuccuuccccuacucagcaucc

SEQ ID NO: 847860 - RNA, 22 nt, Human
gaggagaggccaucguuguuau

SEQ ID NO: 847861 - RNA, 22 nt, Human
gggucucucucggcuccacgcg

SEQ ID NO: 847862 - RNA, 22 nt, Human
ggcaaaaaccacaauuacuuuu

SEQ ID NO: 847863 - RNA, 22 nt, Human
agcugguguccuccuggagcug

SEQ ID NO: 847864 - RNA, 22 nt, Human
gcagcuggagcaucuucucauc

SEQ ID NO: 847865 - RNA, 22 nt, Human
ugaaaugauaucugauaacaaa

SEQ ID NO: 847866 - RNA, 22 nt, Human
cagcaggagcagucagacuccu

SEQ ID NO: 847867 - RNA, 23 nt, Human
agggcccaagccuggacagcagg

SEQ ID NO: 847868 - RNA, 22 nt, Human
gugugccaacaaaagacagugc

SEQ ID NO: 847869 - RNA, 22 nt, Human
gaucagaauucuuguguguuuc

SEQ ID NO: 847870 - RNA, 22 nt, Human
uugaacaguuuugucagguuca

SEQ ID NO: 847871 - RNA, 22 nt, Human
cuucccacuaguaucacagagc

SEQ ID NO: 847872 - RNA, 22 nt, Human
aaggccugaacaugaggagaug

SEQ ID NO: 847873 - RNA, 22 nt, Human
auucagcaguuccugcuucagu

SEQ ID NO: 847874 - RNA, 22 nt, Human
gggcugugggacccggcacuuu

SEQ ID NO: 847875 - RNA, 22 nt, Human
uuuauguacauauccacaagga

SEQ ID NO: 847876 - RNA, 19 nt, Human
ggcaggcuggauagagagg

SEQ ID NO: 847877 - RNA, 22 nt, Human
aauaauauuugaagcuucaaag

SEQ ID NO: 847878 - RNA, 22 nt, Human
caguggaggccuugggaccuuu

SEQ ID NO: 847879 - RNA, 22 nt, Human
uagugcuuaauaaauuucagaa

SEQ ID NO: 847880 - RNA, 22 nt, Human
aggacuuagaacauuauguacu

SEQ ID NO: 847881 - RNA, 22 nt, Human
gccuucugugcuccuggccuuu

SEQ ID NO: 847882 - RNA, 22 nt, Human
aaaauaacuucuacuauuugca

SEQ ID NO: 847883 - RNA, 22 nt, Human
ucuuuccuagaggcugaugagu

SEQ ID NO: 847884 - RNA, 22 nt, Human
acaauacaggcuucuggacuua

SEQ ID NO: 847885 - RNA, 22 nt, Human
ucucucagggggaaggcugaag

SEQ ID NO: 847886 - RNA, 22 nt, Human
agaugaaaauacgugacuuuaa

SEQ ID NO: 847887 - RNA, 22 nt, Human
acagaauuaaaguguuugugga

SEQ ID NO: 847888 - RNA, 22 nt, Human
cugcccuggcagccuaccaugg

SEQ ID NO: 847889 - RNA, 22 nt, Human
ggagaguggauuccagcuguau

SEQ ID NO: 847890 - RNA, 22 nt, Human
uuugcauugcagugguuuacag

SEQ ID NO: 847891 - RNA, 22 nt, Human
ugagaauuacaaaugagucaca

SEQ ID NO: 847892 - RNA, 22 nt, Human
auguguaggugaaucgaggcug

SEQ ID NO: 847893 - RNA, 22 nt, Human
cagggccugagggcugcucugc

SEQ ID NO: 847894 - RNA, 22 nt, Human
gucccaggugggcuccaccucu

SEQ ID NO: 847895 - RNA, 22 nt, Human
gcagggccagugcagagaggaa

SEQ ID NO: 847896 - RNA, 22 nt, Human
gugaauaaagggaguuuucaaa

SEQ ID NO: 847897 - RNA, 22 nt, Human
uagacacaucaaguauaguuaa

SEQ ID NO: 847898 - RNA, 22 nt, Human
aagccaggcugcacuugcuggg

SEQ ID NO: 847899 - RNA, 22 nt, Human
aggagcuguuuuguucagcaaa

SEQ ID NO: 847900 - RNA, 22 nt, Human
ugguuuugcuccaguauaaaua

SEQ ID NO: 847901 - RNA, 22 nt, Human
uggcagcugagugcacccccuc

SEQ ID NO: 847902 - RNA, 22 nt, Human
uuauagugggcccaacauggcg

SEQ ID NO: 847903 - RNA, 22 nt, Human
ucugagagccucuagccuaagu

SEQ ID NO: 847904 - RNA, 22 nt, Human
uaauuuuaugacaguguauuuu

SEQ ID NO: 847905 - RNA, 22 nt, Human
cuggcugcgucugcucugacag

SEQ ID NO: 847906 - RNA, 22 nt, Human
aaucagaaaauucaguggaauu

SEQ ID NO: 847907 - RNA, 22 nt, Human
uggauuagguacuaugaauaua

SEQ ID NO: 847908 - RNA, 23 nt, Human
auggagcugguacuagcuaccuc

SEQ ID NO: 847909 - RNA, 22 nt, Human
cuggaggcugaguugggucucc

SEQ ID NO: 847910 - RNA, 17 nt, Human
aggaaacauuuucuuuc

SEQ ID NO: 847911 - RNA, 22 nt, Human
uuccagaaaucuuucagcucaa

SEQ ID NO: 847912 - RNA, 22 nt, Human
gucccagaggacagggucacau

SEQ ID NO: 847913 - RNA, 22 nt, Human
ugaagccacagagcaucugccu

SEQ ID NO: 847914 - RNA, 22 nt, Human
uaaucuaccacuauugcaauau

SEQ ID NO: 847915 - RNA, 22 nt, Human
cagagugagggccugcaccugc

SEQ ID NO: 847916 - RNA, 22 nt, Human
uaugccugauaacugugucucu

SEQ ID NO: 847917 - RNA, 22 nt, Human
agccacagcaacaagugcaauu

SEQ ID NO: 847918 - RNA, 20 nt, Human
aagagaggaaguuauacuag

SEQ ID NO: 847919 - RNA, 22 nt, Human
agucucugcugguugugccuau

SEQ ID NO: 847920 - RNA, 18 nt, Human
acauuucuccuucugacc

SEQ ID NO: 847921 - RNA, 22 nt, Human
ugucaugccaggaaauaguccc

SEQ ID NO: 847922 - RNA, 22 nt, Human
auggcaggcccagguguucauu

SEQ ID NO: 847923 - RNA, 22 nt, Human
gcuuccaaaucuguucaaaaug

SEQ ID NO: 847924 - RNA, 22 nt, Human
aaauaguuuagcucucauuuca

SEQ ID NO: 847925 - RNA, 22 nt, Human
cccugagcccauaguugacauu

SEQ ID NO: 847926 - RNA, 22 nt, Human
ccucaugguacuuacuguagcu

SEQ ID NO: 847927 - RNA, 22 nt, Human
gguggagcuguggacaggaagg

SEQ ID NO: 847928 - RNA, 22 nt, Human
uugauacuauuaagcacugggc

SEQ ID NO: 847929 - RNA, 22 nt, Human
cagcugaguuuccaagucugcc

SEQ ID NO: 847930 - RNA, 22 nt, Human
cuaauguaucauggcucucagc

SEQ ID NO: 847931 - RNA, 22 nt, Human
aaggcucucugauggcagcagu

SEQ ID NO: 847932 - RNA, 22 nt, Human
ggcagcucugugucugggaagc

SEQ ID NO: 847933 - RNA, 22 nt, Human
gucacacucagaaugacuagag

SEQ ID NO: 847934 - RNA, 22 nt, Human
uggaaagaaaguaaaggcguau

SEQ ID NO: 847935 - RNA, 22 nt, Human
ugcugcacaauuggaaaguauc

SEQ ID NO: 847936 - RNA, 22 nt, Human
uagucaccagcuacaggacagc

SEQ ID NO: 847937 - RNA, 22 nt, Human
gugugccagacaugaugcuaug

SEQ ID NO: 847938 - RNA, 22 nt, Human
gggcacugcuuugcucugucac

SEQ ID NO: 847939 - RNA, 22 nt, Human
aggcagcuaagauggauaauga

SEQ ID NO: 847940 - RNA, 23 nt, Human
cuuuuaacuugaucugagaccag

SEQ ID NO: 847941 - RNA, 20 nt, Human
aggauuuacuacuaccugcu

SEQ ID NO: 847942 - RNA, 22 nt, Human
uaagaacagugacagccaacau

SEQ ID NO: 847943 - RNA, 22 nt, Human
uuuucucuuguuaauguacuga

SEQ ID NO: 847944 - RNA, 22 nt, Human
aggucauuguuaagucaccaua

SEQ ID NO: 847945 - RNA, 22 nt, Human
acuguagcugccacuggaugca

SEQ ID NO: 847946 - RNA, 22 nt, Human
ggcuggcuuucucuccgcaccu

SEQ ID NO: 847947 - RNA, 23 nt, Human
cuguggcugaguccuguuggagu

SEQ ID NO: 847948 - RNA, 22 nt, Human
gagacagcacaggccacuggga

SEQ ID NO: 847949 - RNA, 22 nt, Human
gcagguggcagaggugggaucu

SEQ ID NO: 847950 - RNA, 21 nt, Human
auggagccuaagaguggaggu

SEQ ID NO: 847951 - RNA, 22 nt, Human
cggcagcugauugcagagcacc

SEQ ID NO: 847952 - RNA, 22 nt, Human
ucuuugcacugugcaagcagaa

SEQ ID NO: 847953 - RNA, 22 nt, Human
cagcagcugcgugcccaggccg

SEQ ID NO: 847954 - RNA, 22 nt, Human
gagcugcccugagcuuugcaug

SEQ ID NO: 847955 - RNA, 22 nt, Human
acuuucucccacccacccgucu

SEQ ID NO: 847956 - RNA, 22 nt, Human
caggaugagaagggcucuuacg

SEQ ID NO: 847957 - RNA, 20 nt, Human
cugccaugauugauagagug

SEQ ID NO: 847958 - RNA, 22 nt, Human
gaguccuugucauaauucagug

SEQ ID NO: 847959 - RNA, 22 nt, Human
ugacagaacagguugggagcaa

SEQ ID NO: 847960 - RNA, 22 nt, Human
ugaggcaggagaauggcgggaa

SEQ ID NO: 847961 - RNA, 22 nt, Human
uuggagcccugaggaucuggau

SEQ ID NO: 847962 - RNA, 22 nt, Human
caaguccaucagauaagcaaga

SEQ ID NO: 847963 - RNA, 22 nt, Human
cugaauaauuuuauaguugcug

SEQ ID NO: 847964 - RNA, 22 nt, Human
auguagaauggugauuggcagg

SEQ ID NO: 847965 - RNA, 22 nt, Human
cagagcugguaagugguagagg

SEQ ID NO: 847966 - RNA, 22 nt, Human
gcaggagcuggaaagugauguu

SEQ ID NO: 847967 - RNA, 22 nt, Human
ccagcucucagcgggagacuca

SEQ ID NO: 847968 - RNA, 22 nt, Human
aauauuaucaaaagcuuuuuca

SEQ ID NO: 847969 - RNA, 20 nt, Human
uguuccaugacuauuuggau

SEQ ID NO: 847970 - RNA, 22 nt, Human
uuaaacagucccagaggcugac

SEQ ID NO: 847971 - RNA, 22 nt, Human
gaaaucugcggugaggccugag

SEQ ID NO: 847972 - RNA, 22 nt, Human
gcuggggcugggcugaggaaga

SEQ ID NO: 847973 - RNA, 22 nt, Human
ucuggccuacuggaguccauga

SEQ ID NO: 847974 - RNA, 20 nt, Human
cugcugugauucccuccucc

SEQ ID NO: 847975 - RNA, 22 nt, Human
gacccaggagugcagagagugg

SEQ ID NO: 847976 - RNA, 22 nt, Human
ccugucugaggaggugcucuuu

SEQ ID NO: 847977 - RNA, 22 nt, Human
agggagcucuaaguagagggac

SEQ ID NO: 847978 - RNA, 22 nt, Human
ccugggaggcagagguugcagu

SEQ ID NO: 847979 - RNA, 22 nt, Human
ucccuguccugggcaaucccag

SEQ ID NO: 847980 - RNA, 22 nt, Human
uugauacauagcacaguuuagg

SEQ ID NO: 847981 - RNA, 22 nt, Human
ucaguaaaugguugcuguuauu

SEQ ID NO: 847982 - RNA, 22 nt, Human
caucaaauaggaauauuuggca

SEQ ID NO: 847983 - RNA, 21 nt, Human
uucuucaguuuaauauaaaau

SEQ ID NO: 847984 - RNA, 22 nt, Human
aagcaggcauuccagagacaau

SEQ ID NO: 847985 - RNA, 22 nt, Human
cugagcuuggccaggaaugaau

SEQ ID NO: 847986 - RNA, 22 nt, Human
uauggcuuuuaacugucguaug

SEQ ID NO: 847987 - RNA, 22 nt, Human
uaaacauggcuguuucaguuau

SEQ ID NO: 847988 - RNA, 22 nt, Human
auaauucagguuuucuggcaca

SEQ ID NO: 847989 - RNA, 19 nt, Human
gaggcgaggcgugcaggag

SEQ ID NO: 847990 - RNA, 22 nt, Human
uccuggcccacuaugccagcau

SEQ ID NO: 847991 - RNA, 22 nt, Human
ccaggguggggcaggcccacug

SEQ ID NO: 847992 - RNA, 18 nt, Human
cuggcuuucuuauccauc

SEQ ID NO: 847993 - RNA, 22 nt, Human
ucucagagaccugaacucccug

SEQ ID NO: 847994 - RNA, 22 nt, Human
ucugggaagcugcgugccuguu

SEQ ID NO: 847995 - RNA, 22 nt, Human
ucugucacugagcucaggauuc

SEQ ID NO: 847996 - RNA, 22 nt, Human
ccugccagauccccugagcuga

SEQ ID NO: 847997 - RNA, 22 nt, Human
augaacaagagagggaagauuc

SEQ ID NO: 847998 - RNA, 22 nt, Human
ccuauacagccucagcugagau

SEQ ID NO: 847999 - RNA, 22 nt, Human
aacccagccguguagcugccgc

SEQ ID NO: 848000 - RNA, 22 nt, Human
caucacccggaacugugucugc

SEQ ID NO: 848001 - RNA, 22 nt, Human
uuuaggcaagaacucacugaga

SEQ ID NO: 848002 - RNA, 22 nt, Human
gccuucaguaguauccucauga

SEQ ID NO: 848003 - RNA, 22 nt, Human
uuucuagggcucuugucuucug

SEQ ID NO: 848004 - RNA, 22 nt, Human
cucugucacuucuccagcugag

SEQ ID NO: 848005 - RNA, 22 nt, Human
gccuggagccucagcaaggagg

SEQ ID NO: 848006 - RNA, 22 nt, Human
ugccaggcccagcuccagagcu

SEQ ID NO: 848007 - RNA, 22 nt, Human
cugaagccacgauagcuuccua

SEQ ID NO: 848008 - RNA, 23 nt, Human
uuccagaguccacaucugccacc

SEQ ID NO: 848009 - RNA, 22 nt, Human
uuaaagauucugaggcugauua

SEQ ID NO: 848010 - RNA, 22 nt, Human
cucagggcuugaguguccagga

SEQ ID NO: 848011 - RNA, 22 nt, Human
cagcugucuaaguugagcagga

SEQ ID NO: 848012 - RNA, 22 nt, Human
ucuggcuccacuuucuucauuu

SEQ ID NO: 848013 - RNA, 22 nt, Human
gggagggaggugcugguucacg

SEQ ID NO: 848014 - RNA, 22 nt, Human
gcuggccauucucuuugagaug

SEQ ID NO: 848015 - RNA, 22 nt, Human
agggcuggccacaugauuuggu

SEQ ID NO: 848016 - RNA, 22 nt, Human
gcagcugggacacugaggccag

SEQ ID NO: 848017 - RNA, 22 nt, Human
ggacagaggguugacagaguau

SEQ ID NO: 848018 - RNA, 22 nt, Human
cugcuuuggcucagugacauca

SEQ ID NO: 848019 - RNA, 22 nt, Human
cugucucuguugccuguaggug

SEQ ID NO: 848020 - RNA, 22 nt, Human
aaguuaugaaauuuggacagcu

SEQ ID NO: 848021 - RNA, 22 nt, Human
acagcuguggggacucuugccc

SEQ ID NO: 848022 - RNA, 22 nt, Human
acuuaguauuuuucagcuuuga

SEQ ID NO: 848023 - RNA, 22 nt, Human
cugcucuggcuguguacuucag

SEQ ID NO: 848024 - RNA, 18 nt, Human
aaacuggcuuggccugug

SEQ ID NO: 848025 - RNA, 22 nt, Human
gagcuuugcuggaagccugggg

SEQ ID NO: 848026 - RNA, 22 nt, Human
auguaugaagcuuuguuuggga

SEQ ID NO: 848027 - RNA, 22 nt, Human
cauugcacgggcgucugucugu

SEQ ID NO: 848028 - RNA, 20 nt, Human
gugcauuucaccuguacugu

SEQ ID NO: 848029 - RNA, 17 nt, Human
aggcaggcagagcggga

SEQ ID NO: 848030 - RNA, 22 nt, Human
ccaaagucugcauuuuaacaug

SEQ ID NO: 848031 - RNA, 22 nt, Human
aagcacaaugaacaucuuagau

SEQ ID NO: 848032 - RNA, 20 nt, Human
cccaggaguuugcucuuacu

SEQ ID NO: 848033 - RNA, 22 nt, Human
uguuuuaugagccauauaaccu

SEQ ID NO: 848034 - RNA, 22 nt, Human
gaauucuuuucuuucugaaagu

SEQ ID NO: 848035 - RNA, 22 nt, Human
aaagaaggaugggagaaauccu

SEQ ID NO: 848036 - RNA, 22 nt, Human
aguaaacaguaucuuuaguguc

SEQ ID NO: 848037 - RNA, 22 nt, Human
uggcuuaagcgcaacucugucu

SEQ ID NO: 848038 - RNA, 22 nt, Human
uguguguauaugcauuuaucua

SEQ ID NO: 848039 - RNA, 22 nt, Human
acacagauuuuacauguuaugc

SEQ ID NO: 848040 - RNA, 22 nt, Human
acagagauguggaugagggauu

SEQ ID NO: 848041 - RNA, 22 nt, Human
uuucacagcuggguggcagagu

SEQ ID NO: 848042 - RNA, 22 nt, Human
gugccuggcacacagaaggcaa

SEQ ID NO: 848043 - RNA, 22 nt, Human
aaagcagauucugaugcaguag

SEQ ID NO: 848044 - RNA, 22 nt, Human
cucuccagaauaugccgccgug

SEQ ID NO: 848045 - RNA, 21 nt, Human
cccaggagaagaaaagaugca

SEQ ID NO: 848046 - RNA, 22 nt, Human
aggacuucuccgauaagucaga

SEQ ID NO: 848047 - RNA, 22 nt, Human
auacagaacucucaguuguaua

SEQ ID NO: 848048 - RNA, 22 nt, Human
ucauuuguugaacuuuagugcg

SEQ ID NO: 848049 - RNA, 22 nt, Human
uaauuucagugcaagcucacgg

SEQ ID NO: 848050 - RNA, 22 nt, Human
cuuauaguaugauguugagaau

SEQ ID NO: 848051 - RNA, 22 nt, Human
ugucucaggggcauugaaauaa

SEQ ID NO: 848052 - RNA, 22 nt, Human
ggcuucccuuuccgagaggaga

SEQ ID NO: 848053 - RNA, 22 nt, Human
aagggaggggauguaagccugg

SEQ ID NO: 848054 - RNA, 22 nt, Human
ugcagcccuuccuuccucuggg

SEQ ID NO: 848055 - RNA, 22 nt, Human
uucagcagugcagacacccagu

SEQ ID NO: 848056 - RNA, 22 nt, Human
cccaggaguuagagguuguggu

SEQ ID NO: 848057 - RNA, 23 nt, Human
cagcugaagcagccugggcugga

SEQ ID NO: 848058 - RNA, 22 nt, Human
ccagggugugggcgucggcacg

SEQ ID NO: 848059 - RNA, 22 nt, Human
ggacuggacucucaggcucaca

SEQ ID NO: 848060 - RNA, 17 nt, Human
cccugccaccaggaagc

SEQ ID NO: 848061 - RNA, 22 nt, Human
ggucauugucagagccuguacu

SEQ ID NO: 848062 - RNA, 22 nt, Human
gcugaagagagaugcguccagc

SEQ ID NO: 848063 - RNA, 22 nt, Human
ugaaaucaaugucuucugucuc

SEQ ID NO: 848064 - RNA, 19 nt, Human
aaucagaaauaucgaggcc

SEQ ID NO: 848065 - RNA, 22 nt, Human
caggcccugggcaggaucagcc

SEQ ID NO: 848066 - RNA, 22 nt, Human
ccccaggaagccucagauuugc

SEQ ID NO: 848067 - RNA, 22 nt, Human
cugcagcuauauuuucccacag

SEQ ID NO: 848068 - RNA, 22 nt, Human
auguuauaguuauaaaaugagg

SEQ ID NO: 848069 - RNA, 22 nt, Human
gcugagguaggagguugcagug

SEQ ID NO: 848070 - RNA, 22 nt, Human
ucugccuggaugauggcagggc

SEQ ID NO: 848071 - RNA, 21 nt, Human
aggugcagagccagggaccag

SEQ ID NO: 848072 - RNA, 22 nt, Human
cugggcacacagugacucugca

SEQ ID NO: 848073 - RNA, 23 nt, Human
uggcucucucagugcugcagagg

SEQ ID NO: 848074 - RNA, 22 nt, Human
agggaagaaaauccaucgcugc

SEQ ID NO: 848075 - RNA, 22 nt, Human
ugggccuccaauuccagcggga

SEQ ID NO: 848076 - RNA, 22 nt, Human
uuauuauuggugaguuaaggaa

SEQ ID NO: 848077 - RNA, 19 nt, Human
uacuaaacaugcauauugg

SEQ ID NO: 848078 - RNA, 22 nt, Human
auguguaaaaagugcuuaauau

SEQ ID NO: 848079 - RNA, 22 nt, Human
acacaaacugcuagaaaauugg

SEQ ID NO: 848080 - RNA, 22 nt, Human
gcagacagcauguugggcuauu

SEQ ID NO: 848081 - RNA, 22 nt, Human
auaugcacacucugcccacaga

SEQ ID NO: 848082 - RNA, 22 nt, Human
ucugaggcauacccaggccccc

SEQ ID NO: 848083 - RNA, 22 nt, Human
aauaagauccugaagauauguu

SEQ ID NO: 848084 - RNA, 22 nt, Human
aaggcacuuuucuaaagaccuu

SEQ ID NO: 848085 - RNA, 22 nt, Human
gcugccugcacagagcugcuuu

SEQ ID NO: 848086 - RNA, 22 nt, Human
guggccagaagacugcaaugcu

SEQ ID NO: 848087 - RNA, 21 nt, Human
gagacagcccagugccagggc

SEQ ID NO: 848088 - RNA, 22 nt, Human
acauuucuuccuaauuaucccu

SEQ ID NO: 848089 - RNA, 22 nt, Human
uccuucaguuaaagaucucaca

SEQ ID NO: 848090 - RNA, 23 nt, Human
agaaaagcuuggacacauggccu

SEQ ID NO: 848091 - RNA, 22 nt, Human
uucacaauggcaaaccauuaaa

SEQ ID NO: 848092 - RNA, 21 nt, Human
uauuucuuugacucucucccu

SEQ ID NO: 848093 - RNA, 22 nt, Human
ucaggcagcuccaggaauggua

SEQ ID NO: 848094 - RNA, 22 nt, Human
ucacuuaaaaauucuaguuaug

SEQ ID NO: 848095 - RNA, 22 nt, Human
acuucuucuucagcugggggau

SEQ ID NO: 848096 - RNA, 22 nt, Human
uguagaaccuguuuauuauaga

SEQ ID NO: 848097 - RNA, 22 nt, Human
guccuuaguuacuuuucauguc

SEQ ID NO: 848098 - RNA, 22 nt, Human
uauguacuacacuagaacauuu

SEQ ID NO: 848099 - RNA, 22 nt, Human
uccaggagugcugguuagagua

SEQ ID NO: 848100 - RNA, 22 nt, Human
uccuuuuugguccaaggugacc

SEQ ID NO: 848101 - RNA, 22 nt, Human
gaggaggccaguggaaggaagc

SEQ ID NO: 848102 - RNA, 22 nt, Human
ucccacugcuuugcucugcuca

SEQ ID NO: 848103 - RNA, 22 nt, Human
gcaggggaguggcaggcccgga

SEQ ID NO: 848104 - RNA, 22 nt, Human
aaacugcugguugcuggccagc

SEQ ID NO: 848105 - RNA, 22 nt, Human
cuggcuggcaaguagaacacaa

SEQ ID NO: 848106 - RNA, 22 nt, Human
agggucugacaaugugacuuag

SEQ ID NO: 848107 - RNA, 20 nt, Human
ugacucugcaaccgucucuc

SEQ ID NO: 848108 - RNA, 22 nt, Human
ggcuuugccuggaauuuccuug

SEQ ID NO: 848109 - RNA, 22 nt, Human
aaagcucuuauagcagagugug

SEQ ID NO: 848110 - RNA, 16 nt, Human
gcccaggacgggaggc

SEQ ID NO: 848111 - RNA, 22 nt, Human
caucagaaaccuugaggaaacu

SEQ ID NO: 848112 - RNA, 22 nt, Human
cccagggucccugcucucugug

SEQ ID NO: 848113 - RNA, 22 nt, Human
aggagccccucuucaguccugg

SEQ ID NO: 848114 - RNA, 22 nt, Human
cccagccuuugcuuccugguuc

SEQ ID NO: 848115 - RNA, 22 nt, Human
cagcaggcagccauuucacugu

SEQ ID NO: 848116 - RNA, 22 nt, Human
ucuauacaaguuucacuuugac

SEQ ID NO: 848117 - RNA, 22 nt, Human
aggcaguggaugucaggaaugg

SEQ ID NO: 848118 - RNA, 18 nt, Human
ugaaacaagaauggugca

SEQ ID NO: 848119 - RNA, 22 nt, Human
agugaaauagcauuuaugaagc

SEQ ID NO: 848120 - RNA, 22 nt, Human
gcaaggcuuugugaauuuuaaa

SEQ ID NO: 848121 - RNA, 22 nt, Human
uuacauuuggcuauguccucua

SEQ ID NO: 848122 - RNA, 22 nt, Human
guucuucagauuccauuucagu

SEQ ID NO: 848123 - RNA, 22 nt, Human
aguguggguuuuauggagcccu

SEQ ID NO: 848124 - RNA, 22 nt, Human
uggcagccacaucucguggauu

SEQ ID NO: 848125 - RNA, 22 nt, Human
guucuguacuccaagcucuucc

SEQ ID NO: 848126 - RNA, 22 nt, Human
agaaauuccuaagguacacaag

SEQ ID NO: 848127 - RNA, 22 nt, Human
auucucuuuguauaacaucuug

SEQ ID NO: 848128 - RNA, 22 nt, Human
agcaucuggugagggccuaguu

SEQ ID NO: 848129 - RNA, 22 nt, Human
cuagagaggcagauguccugug

SEQ ID NO: 848130 - RNA, 22 nt, Human
aaagauuugaguucugcuuaua

SEQ ID NO: 848131 - RNA, 22 nt, Human
cucagaaucugccaaguucagg

SEQ ID NO: 848132 - RNA, 22 nt, Human
uuucuuccuuaccuuacuagag

SEQ ID NO: 848133 - RNA, 22 nt, Human
ugcguugcgcuccugcagcagg

SEQ ID NO: 848134 - RNA, 22 nt, Human
ccacagggacuguuaaaacccu

SEQ ID NO: 848135 - RNA, 22 nt, Human
aagagagggguugcauggaaau

SEQ ID NO: 848136 - RNA, 22 nt, Human
uuucaguuacugcuauaucauu

SEQ ID NO: 848137 - RNA, 22 nt, Human
acaguggagaaggcaugaggcu

SEQ ID NO: 848138 - RNA, 22 nt, Human
gccuuggccuuccuaggccuga

SEQ ID NO: 848139 - RNA, 22 nt, Human
acagccuggacuggcucucugc

SEQ ID NO: 848140 - RNA, 22 nt, Human
ccuggccucuccgaguaaccug

SEQ ID NO: 848141 - RNA, 22 nt, Human
ccacagggucagccacucugca

SEQ ID NO: 848142 - RNA, 17 nt, Human
uagcugccccgaaugcu

SEQ ID NO: 848143 - RNA, 22 nt, Human
guuaggcaauaccucuuacacc

SEQ ID NO: 848144 - RNA, 22 nt, Human
agugcauauaugaagaguauga

SEQ ID NO: 848145 - RNA, 22 nt, Human
uccucuggggcgugguccugga

SEQ ID NO: 848146 - RNA, 22 nt, Human
uuucuucucacccaggacagag

SEQ ID NO: 848147 - RNA, 22 nt, Human
gcuguguccucacacagccuuu

SEQ ID NO: 848148 - RNA, 22 nt, Human
uuucaaaauuuugcagugguaa

SEQ ID NO: 848149 - RNA, 22 nt, Human
caguggguggcuaaguggcuga

SEQ ID NO: 848150 - RNA, 22 nt, Human
acuagauaauuauaaaagguag

SEQ ID NO: 848151 - RNA, 22 nt, Human
cccagggaaugacucuggccuu

SEQ ID NO: 848152 - RNA, 22 nt, Human
cagcaggcccagaguuucaugg

SEQ ID NO: 848153 - RNA, 22 nt, Human
cuuauacacccucuucccaggc

SEQ ID NO: 848154 - RNA, 22 nt, Human
caagcagacaguaggccuagaa

SEQ ID NO: 848155 - RNA, 22 nt, Human
cugcuuugaaaauaaacuuguc

SEQ ID NO: 848156 - RNA, 22 nt, Human
gaggaggcacuugagcagaugu

SEQ ID NO: 848157 - RNA, 22 nt, Human
aggcugcagugcagguaggauu

SEQ ID NO: 848158 - RNA, 22 nt, Human
cuggccuggcaggggaccucua

SEQ ID NO: 848159 - RNA, 22 nt, Human
uucaagauggccccagugagcc

SEQ ID NO: 848160 - RNA, 22 nt, Human
ccuggcagacagcacugaagcu

SEQ ID NO: 848161 - RNA, 22 nt, Human
ccucauggccuugagcugaggg

SEQ ID NO: 848162 - RNA, 22 nt, Human
uuccucagagggcgcuggggaa

SEQ ID NO: 848163 - RNA, 22 nt, Human
gcucccagggcagcgcagaaga

SEQ ID NO: 848164 - RNA, 22 nt, Human
cugggaggcccacguugggaag

SEQ ID NO: 848165 - RNA, 22 nt, Human
gaaacaauuuuuguugucuaag

SEQ ID NO: 848166 - RNA, 22 nt, Human
aguaugaauugcuuugccugua

SEQ ID NO: 848167 - RNA, 23 nt, Human
aaaguguagccagguuaagaacc

SEQ ID NO: 848168 - RNA, 22 nt, Human
cuguggcugcagccuugguccu

SEQ ID NO: 848169 - RNA, 22 nt, Human
uggcaaggccacaggugcaguu

SEQ ID NO: 848170 - RNA, 22 nt, Human
aggcagucuaguccccaggcaa

SEQ ID NO: 848171 - RNA, 22 nt, Human
cagggccuucguaaguguccgg

SEQ ID NO: 848172 - RNA, 22 nt, Human
gcauuuauuucuuuacugcauc

SEQ ID NO: 848173 - RNA, 22 nt, Human
aagacccacaaggcugaauguu

SEQ ID NO: 848174 - RNA, 22 nt, Human
cccagguggguuggccucuguc

SEQ ID NO: 848175 - RNA, 20 nt, Human
cucugcuuuaggagagucag

SEQ ID NO: 848176 - RNA, 22 nt, Human
ugauuuccuaggucuggagaag

SEQ ID NO: 848177 - RNA, 22 nt, Human
agagcuguucagcagccagguu

SEQ ID NO: 848178 - RNA, 19 nt, Human
uguuuuguuaaagcagucc

SEQ ID NO: 848179 - RNA, 22 nt, Human
ccaggagagcucucguucagug

SEQ ID NO: 848180 - RNA, 20 nt, Human
ggccugagcauggcuggcag

SEQ ID NO: 848181 - RNA, 22 nt, Human
ccagagccucgcccggagccuc

SEQ ID NO: 848182 - RNA, 22 nt, Human parechovirus 2
aaggauaugguacuaucaguau

SEQ ID NO: 848183 - RNA, 22 nt, Human parechovirus 2
aaugcuuuagguuauuuacugu

SEQ ID NO: 848184 - RNA, 22 nt, Human parechovirus 2
cacgcaaggacgaaccaccauc

SEQ ID NO: 848185 - RNA, 22 nt, Human parechovirus 2
ccaaauuucuucuuucccuuac

SEQ ID NO: 848186 - RNA, 23 nt, Human parechovirus 2
guaaauauagaggagauuuggca

SEQ ID NO: 848187 - RNA, 22 nt, Human parechovirus 2
auuacaaagugaauucagaacu

SEQ ID NO: 848188 - RNA, 21 nt, Human parechovirus 2
auagagauauuccuuagcuug

SEQ ID NO: 848189 - RNA, 22 nt, Human
ccugggcaggccggacgcuggg

SEQ ID NO: 848190 - RNA, 22 nt, Human
ggggccccucggacacgugcgg

SEQ ID NO: 848191 - RNA, 22 nt, Human
ucugugccaccucuccaguguc

SEQ ID NO: 848192 - RNA, 23 nt, Human
cuucucagaagucugugccagga

SEQ ID NO: 848193 - RNA, 21 nt, Human
gaccccagaccagcagacaca

SEQ ID NO: 848194 - RNA, 22 nt, Human
uaauaucuacuucauagaguuu

SEQ ID NO: 848195 - RNA, 19 nt, Human
ggcugagcgccuuggcugc

SEQ ID NO: 848196 - RNA, 22 nt, Human
uccaggagauacacugcaccag

SEQ ID NO: 848197 - RNA, 22 nt, Human
gagugucagugccuggcuuguu

SEQ ID NO: 848198 - RNA, 21 nt, Human
uuauugagacauuuguggaaa

SEQ ID NO: 848199 - RNA, 20 nt, Human
uuucacagucccuguuuccu

SEQ ID NO: 848200 - RNA, 21 nt, Human
uucuucaugaugauuaauggc

SEQ ID NO: 848201 - RNA, 20 nt, Human
caggaugauuggacacgaug

SEQ ID NO: 848202 - RNA, 22 nt, Human
ggagguggcagagggacauucu

SEQ ID NO: 848203 - RNA, 22 nt, Human
ccuccuggagcauuggugagga

SEQ ID NO: 848204 - RNA, 22 nt, Human
aaaguaacaauaagguucuauu

SEQ ID NO: 848205 - RNA, 22 nt, Human
gauaaugaugacaaugacaacc

SEQ ID NO: 848206 - RNA, 22 nt, Human
uuuauauagagauuugugcaug

SEQ ID NO: 848207 - RNA, 22 nt, Human
cagagcuguccaaacccugaca

SEQ ID NO: 848208 - RNA, 21 nt, Human
gccaccccuggcacaggugcu

SEQ ID NO: 848209 - RNA, 22 nt, Human
gcugccuguggcccuucugggu

SEQ ID NO: 848210 - RNA, 21 nt, Human
gcuccuggugcugcguggcgc

SEQ ID NO: 848211 - RNA, 22 nt, Human
uccauguguuuuccuguccaca

SEQ ID NO: 848212 - RNA, 22 nt, Human
ccugagguuauccaucuaccug

SEQ ID NO: 848213 - RNA, 22 nt, Human
uucuucuucauuucugacgaug

SEQ ID NO: 848214 - RNA, 20 nt, Human
caucaucacaugagccaauu

SEQ ID NO: 848215 - RNA, 22 nt, Human
gcagcuccuccugggcuggaga

SEQ ID NO: 848216 - RNA, 22 nt, Human
accuacaucaagggagugguag

SEQ ID NO: 848217 - RNA, 22 nt, Human
agucagauuuagauguagcaag

SEQ ID NO: 848218 - RNA, 22 nt, Human
cuuguccccagcagguugguuu

SEQ ID NO: 848219 - RNA, 22 nt, Human
ucaggaggccaccaggaccugu

SEQ ID NO: 848220 - RNA, 20 nt, Human
ucucuucuggggagauaaaa

SEQ ID NO: 848221 - RNA, 22 nt, Human
uuaaauauuauguugucugcaa

SEQ ID NO: 848222 - RNA, 22 nt, Human
gagggagugccagagggccagc

SEQ ID NO: 848223 - RNA, 22 nt, Human
aaaaugaagcaaaggcauucag

SEQ ID NO: 848224 - RNA, 22 nt, Human
gaggcacugcaguacagugacu

SEQ ID NO: 848225 - RNA, 22 nt, Human
aaaauuauucauggcuuuugga

SEQ ID NO: 848226 - RNA, 22 nt, Human
uccaggagagguguggggacug

SEQ ID NO: 848227 - RNA, 22 nt, Human
ucuggccaggggucccugaagg

SEQ ID NO: 848228 - RNA, 22 nt, Human
agugcuuuagcauccaacuguc

SEQ ID NO: 848229 - RNA, 22 nt, Human
uggcuucugagcauugaaacgu

SEQ ID NO: 848230 - RNA, 22 nt, Human
cccaggaccgcgcggcugagcg

SEQ ID NO: 848231 - RNA, 22 nt, Human
auacaucuuccuuuuaaaaugc

SEQ ID NO: 848232 - RNA, 22 nt, Human
agcagcuguggggacaagggua

SEQ ID NO: 848233 - RNA, 22 nt, Human
agcaguuacuaguuaaaugcau

SEQ ID NO: 848234 - RNA, 22 nt, Human
uuucacuagaacguucuuguuu

SEQ ID NO: 848235 - RNA, 22 nt, Human
caugucuguguacacaugcaca

SEQ ID NO: 848236 - RNA, 22 nt, Human
uaacugccuacugugcaaauau

SEQ ID NO: 848237 - RNA, 22 nt, Human
caaauaguuuuucauguauuau

SEQ ID NO: 848238 - RNA, 23 nt, Human
ucuccuccuagauacagucaugg

SEQ ID NO: 848239 - RNA, 19 nt, Human
gugucaggaugugcagggg

SEQ ID NO: 848240 - RNA, 22 nt, Human
cucaggauuaaggaaucuaaau

SEQ ID NO: 848241 - RNA, 22 nt, Human
uuaacaauagaguuucuucagg

SEQ ID NO: 848242 - RNA, 19 nt, Human
aggcagcaggccagggaug

SEQ ID NO: 848243 - RNA, 22 nt, Human
agcugaggcauggacaggcugc

SEQ ID NO: 848244 - RNA, 22 nt, Human
cugcuguggugucaagcaucuc

SEQ ID NO: 848245 - RNA, 22 nt, Human
cuaggcugagcugggcugagcu

SEQ ID NO: 848246 - RNA, 22 nt, Human
uugcuggcuugaagauagagga

SEQ ID NO: 848247 - RNA, 22 nt, Human
uacauaguauucacauuguuuu

SEQ ID NO: 848248 - RNA, 22 nt, Human
uuccaugaaagugaaauggagc

SEQ ID NO: 848249 - RNA, 22 nt, Human
uaacugguauaucaguguacac

SEQ ID NO: 848250 - RNA, 22 nt, Human
ugagccuguccugugcauguga

SEQ ID NO: 848251 - RNA, 22 nt, Human
gaaguuuagaguguuguaauuu

SEQ ID NO: 848252 - RNA, 23 nt, Human
agaggcaggaguggcuugcccgg

SEQ ID NO: 848253 - RNA, 23 nt, Human
uugaaagguagcuggcagcuaga

SEQ ID NO: 848254 - RNA, 22 nt, Human
aacaucuacuaagugccaggca

SEQ ID NO: 848255 - RNA, 22 nt, Human
uaaagugguggugcuaauguau

SEQ ID NO: 848256 - RNA, 22 nt, Human
auguuucagauacagaucaaau

SEQ ID NO: 848257 - RNA, 22 nt, Human
cugcugugcuuguggccacccg

SEQ ID NO: 848258 - RNA, 18 nt, Human
cugaggcuggcaggagcc

SEQ ID NO: 848259 - RNA, 22 nt, Human
agcaagaugaaggauucaagac

SEQ ID NO: 848260 - RNA, 21 nt, Human
uggaccaaaguaauuugccuu

SEQ ID NO: 848261 - RNA, 22 nt, Human
agagggcugcugcacagugcuc

SEQ ID NO: 848262 - RNA, 22 nt, Human
ugcuucuggaaacaguggcugu

SEQ ID NO: 848263 - RNA, 21 nt, Human
uccuggccagggcacuaggca

SEQ ID NO: 848264 - RNA, 22 nt, Human
uucuuuuccuacacagcgauuu

SEQ ID NO: 848265 - RNA, 22 nt, Human
cacaaaugugcagaaaugugag

SEQ ID NO: 848266 - RNA, 22 nt, Human
auugaaagauuuugggcucaug

SEQ ID NO: 848267 - RNA, 22 nt, Human
ggauggcauguugggcucuguu

SEQ ID NO: 848268 - RNA, 22 nt, Human
ugaggucugcagggcugugcau

SEQ ID NO: 848269 - RNA, 22 nt, Human
cccaggcagccugcagggaagg

SEQ ID NO: 848270 - RNA, 22 nt, Human
auuuaguuuaggaaaaguaggu

SEQ ID NO: 848271 - RNA, 22 nt, Human
gaucuguuucauucacagucug

SEQ ID NO: 848272 - RNA, 22 nt, Human
auggagggugguaagacagaga

SEQ ID NO: 848273 - RNA, 20 nt, Human
ucucaguuucuagagucagg

SEQ ID NO: 848274 - RNA, 22 nt, Human
ucaguucugcuagaaaaacagu

SEQ ID NO: 848275 - RNA, 22 nt, Human
gcugaggaaaccaaugcucaga

SEQ ID NO: 848276 - RNA, 22 nt, Human
uuggaugaagucuagcuuuagu

SEQ ID NO: 848277 - RNA, 22 nt, Human
acacuuuuagcuaugaguuaau

SEQ ID NO: 848278 - RNA, 22 nt, Human
ugaggcagcaauuguauuguau

SEQ ID NO: 848279 - RNA, 22 nt, Human
ucugcaucauuuuucagagccg

SEQ ID NO: 848280 - RNA, 22 nt, Human
ggcugcggaucuaaggcuggga

SEQ ID NO: 848281 - RNA, 22 nt, Human
agagguagagguugcagugagc

SEQ ID NO: 848282 - RNA, 22 nt, Human
cccaggugcugcgugaagccuc

SEQ ID NO: 848283 - RNA, 22 nt, Human
ggcagcuucuuaauauggagac

SEQ ID NO: 848284 - RNA, 22 nt, Human
gccucaguugaucugugugagc

SEQ ID NO: 848285 - RNA, 22 nt, Human
aggaagcuccuggagagccagu

SEQ ID NO: 848286 - RNA, 22 nt, Human
ugccuggauucgguuguuguca

SEQ ID NO: 848287 - RNA, 22 nt, Human
gcagaggccuagguggaaggcc

SEQ ID NO: 848288 - RNA, 22 nt, Human
acaaaugucuccucuuuuguua

SEQ ID NO: 848289 - RNA, 22 nt, Human
cugccaggcacgugcagcauca

SEQ ID NO: 848290 - RNA, 22 nt, Human
uaauuauaacaguuacaucuua

SEQ ID NO: 848291 - RNA, 22 nt, Human
aggcaagcccccagugaggcuc

SEQ ID NO: 848292 - RNA, 22 nt, Human
ugucaaauuuuuauugcaguau

SEQ ID NO: 848293 - RNA, 22 nt, Human
augcagcugucagggagaacau

SEQ ID NO: 848294 - RNA, 21 nt, Human
ugaaaugagaaugcugagcac

SEQ ID NO: 848295 - RNA, 22 nt, Human
ggaagaggcugagccagguccc

SEQ ID NO: 848296 - RNA, 22 nt, Human
gcaggcuguagacaccaaacua

SEQ ID NO: 848297 - RNA, 19 nt, Human
gcuccuggaugaccugugg

SEQ ID NO: 848298 - RNA, 20 nt, Human
agggcugagaagggacuagc

SEQ ID NO: 848299 - RNA, 22 nt, Human
gcugccugguuucucagcugca

SEQ ID NO: 848300 - RNA, 22 nt, Human
uaaaugaagaaauggagauugu

SEQ ID NO: 848301 - RNA, 22 nt, Human
caggguggcacucagcgcaucu

SEQ ID NO: 848302 - RNA, 22 nt, Human
aaggaaccauuugugugcaugg

SEQ ID NO: 848303 - RNA, 22 nt, Human
gcucugggcugaaucauuuauc

SEQ ID NO: 848304 - RNA, 22 nt, Human
ggaggcagaacuucccgucagu

SEQ ID NO: 848305 - RNA, 22 nt, Human
gaggccaaucaauagggcaaua

SEQ ID NO: 848306 - RNA, 22 nt, Human
cugaggccccucucuugagcuu

SEQ ID NO: 848307 - RNA, 22 nt, Human
gagagggauacugaguuuuggu

SEQ ID NO: 848308 - RNA, 22 nt, Human
uagggcuguuuaaaagugaggu

SEQ ID NO: 848309 - RNA, 22 nt, Human
gcugagcugaggcagggcuggg

SEQ ID NO: 848310 - RNA, 22 nt, Human
gaggagaggggcucccaagagc

SEQ ID NO: 848311 - RNA, 22 nt, Human
uggaguuccuuugaaaggcucu

SEQ ID NO: 848312 - RNA, 22 nt, Human
uaauuauaacaugcuuucuggc

SEQ ID NO: 848313 - RNA, 22 nt, Human
ugaggcagauauuuauuggguu

SEQ ID NO: 848314 - RNA, 22 nt, Human
uuucuucagagagagcuuuccc

SEQ ID NO: 848315 - RNA, 22 nt, Human
aggcuggagacccgccaagaaa

SEQ ID NO: 848316 - RNA, 22 nt, Human
agccacagcauguguguaugua

SEQ ID NO: 848317 - RNA, 22 nt, Human
acagagcuuaggaugacuccca

SEQ ID NO: 848318 - RNA, 22 nt, Human
gcugcuggggccuucccucggg

SEQ ID NO: 848319 - RNA, 22 nt, Human
cuggugguucaggagaauggcu

SEQ ID NO: 848320 - RNA, 23 nt, Human
uucuuauuuacuuuggaaucucc

SEQ ID NO: 848321 - RNA, 22 nt, Human
uucagaaauaaaauaucccaac

SEQ ID NO: 848322 - RNA, 22 nt, Human
ucuccuggagcaggaagguggg

SEQ ID NO: 848323 - RNA, 22 nt, Human
cuacacuuugguugacuuugug

SEQ ID NO: 848324 - RNA, 22 nt, Human
aguccaaggagagacagcauuu

SEQ ID NO: 848325 - RNA, 22 nt, Human
cccaggagauggugcguggucu

SEQ ID NO: 848326 - RNA, 22 nt, Human
aggcagcucuguggccucccag

SEQ ID NO: 848327 - RNA, 22 nt, Human
uggcuacaaguguguuuaguuu

SEQ ID NO: 848328 - RNA, 22 nt, Human
agaggcagcagucauacuacag

SEQ ID NO: 848329 - RNA, 19 nt, Human
cacaauuaugagacacuua

SEQ ID NO: 848330 - RNA, 22 nt, Human
cccugggcucagagcagguagc

SEQ ID NO: 848331 - RNA, 22 nt, Human
aaaggccauuacuugcuuuuag

SEQ ID NO: 848332 - RNA, 22 nt, Human
aacugguagaaagcaguaagug

SEQ ID NO: 848333 - RNA, 22 nt, Human
agggcagcccuucugggagggc

SEQ ID NO: 848334 - RNA, 22 nt, Human
uucuaugccauguucagcuacu

SEQ ID NO: 848335 - RNA, 22 nt, Human
cagcaagauggugaaugagacg

SEQ ID NO: 848336 - RNA, 22 nt, Human
cucccaggacucagaggagaag

SEQ ID NO: 848337 - RNA, 22 nt, Human
ggcugaguucucuugcugaauc

SEQ ID NO: 848338 - RNA, 22 nt, Human
ccucacugcuauguguuugcuc

SEQ ID NO: 848339 - RNA, 22 nt, Human
uuauuauagauuaugcaagauu

SEQ ID NO: 848340 - RNA, 22 nt, Human
augcuguguauuuuacucuuuc

SEQ ID NO: 848341 - RNA, 22 nt, Human
agagcugaauucaagugcuggc

SEQ ID NO: 848342 - RNA, 22 nt, Human
aaggcagcaacuaauggaucuc

SEQ ID NO: 848343 - RNA, 22 nt, Human
aguaaagcagaguugcaguaca

SEQ ID NO: 848344 - RNA, 22 nt, Human
cacugguagcaguuaaguuagg

SEQ ID NO: 848345 - RNA, 20 nt, Human
aggagggaccuggauuggcg

SEQ ID NO: 848346 - RNA, 22 nt, Human
aucaggauucaccccagagcug

SEQ ID NO: 848347 - RNA, 20 nt, Human
cucaggauacugcaaaguug

SEQ ID NO: 848348 - RNA, 22 nt, Human
agggagcucacaguccaguaga

SEQ ID NO: 848349 - RNA, 22 nt, Human
uuaugaaguuccuguuacagug

SEQ ID NO: 848350 - RNA, 22 nt, Human
uuagccauauagaaaaagagcu

SEQ ID NO: 848351 - RNA, 22 nt, Human
uaacugguacucugguagccug

SEQ ID NO: 848352 - RNA, 22 nt, Human
acugagguuuacuugaaggaga

SEQ ID NO: 848353 - RNA, 22 nt, Human
ggggcagcuaccggaaguaggg

SEQ ID NO: 848354 - RNA, 22 nt, Human
augaggcauuccacucaaacuc

SEQ ID NO: 848355 - RNA, 22 nt, Human
aagacaauuugauacuaguugc

SEQ ID NO: 848356 - RNA, 22 nt, Human
cucugcauuuuaacagaugauu

SEQ ID NO: 848357 - RNA, 22 nt, Human
caaaucuauauguugauauucu

SEQ ID NO: 848358 - RNA, 20 nt, Human
gcugaggauuccuggccccu

SEQ ID NO: 848359 - RNA, 22 nt, Human
caaggccaaagggccacuguca

SEQ ID NO: 848360 - RNA, 22 nt, Human
aggcugaugcuggcugaggcug

SEQ ID NO: 848361 - RNA, 22 nt, Human
aaggcagcaugaaucccuguac

SEQ ID NO: 848362 - RNA, 22 nt, Human
uuagggaaauaaaauuaucagu

SEQ ID NO: 848363 - RNA, 22 nt, Human
cccauugugguuguugaggaua

SEQ ID NO: 848364 - RNA, 22 nt, Human
uggcuucuaguuugaggaaaaa

SEQ ID NO: 848365 - RNA, 22 nt, Human
uagaacugcucucauacuugcu

SEQ ID NO: 848366 - RNA, 22 nt, Human
uagaaaguacuaaauuuaacug

SEQ ID NO: 848367 - RNA, 22 nt, Human
aauuaggaaaugagaguauuug

SEQ ID NO: 848368 - RNA, 20 nt, Human
gacaugucuuucucacacaa

SEQ ID NO: 848369 - RNA, 22 nt, Human
cacuguaauagcauuauaagug

SEQ ID NO: 848370 - RNA, 22 nt, Human
agaaaggagaccagcucugccc

SEQ ID NO: 848371 - RNA, 22 nt, Human
uaaccauauuuuccauuaaguu

SEQ ID NO: 848372 - RNA, 22 nt, Human
ggccacagcaaugcugugaugu

SEQ ID NO: 848373 - RNA, 20 nt, Human
uuucuugucggcuguugcug

SEQ ID NO: 848374 - RNA, 22 nt, Human
uuugacauugccaauuugcuca

SEQ ID NO: 848375 - RNA, 22 nt, Human
cuggguccuggugcugaguucu

SEQ ID NO: 848376 - RNA, 22 nt, Human
aaacuacuaugggaauguacuu

SEQ ID NO: 848377 - RNA, 22 nt, Human
uauuagguagauuuuacugauu

SEQ ID NO: 848378 - RNA, 22 nt, Human
uccaggagagguagaggguucc

SEQ ID NO: 848379 - RNA, 18 nt, Human
uugagggaggggcagagu

SEQ ID NO: 848380 - RNA, 22 nt, Human
ggacugaggcccacuugaggga

SEQ ID NO: 848381 - RNA, 22 nt, Human
aaagccaugaauguuauagagg

SEQ ID NO: 848382 - RNA, 21 nt, Human
cacucaggguaugugccaggc

SEQ ID NO: 848383 - RNA, 22 nt, Human
cuuauuagugucugucugaguu

SEQ ID NO: 848384 - RNA, 22 nt, Human
aagugaguucagcauucacucg

SEQ ID NO: 848385 - RNA, 22 nt, Human
auauaauacaaccugcuaagug

SEQ ID NO: 848386 - RNA, 22 nt, Human
uaauuauuaugacaacaauugc

SEQ ID NO: 848387 - RNA, 22 nt, Human
augaggucaucuugaaguaggg

SEQ ID NO: 848388 - RNA, 22 nt, Human
cugcuucacccugccugagaac

SEQ ID NO: 848389 - RNA, 22 nt, Human
gccugaccucuucugcccuggg

SEQ ID NO: 848390 - RNA, 22 nt, Human
cccaggaaugaggggcggaggc

SEQ ID NO: 848391 - RNA, 22 nt, Human
acaauguguuuuuauacauuug

SEQ ID NO: 848392 - RNA, 22 nt, Human
caggaaaugggguuuaguuauu

SEQ ID NO: 848393 - RNA, 22 nt, Human
cagugugaggaauuagugucca

SEQ ID NO: 848394 - RNA, 22 nt, Human
gacugaggagguaagguuugaa

SEQ ID NO: 848395 - RNA, 22 nt, Human
ugaggcccaucugagauuuuga

SEQ ID NO: 848396 - RNA, 21 nt, Human
cuugaaagguagagucuacag

SEQ ID NO: 848397 - RNA, 22 nt, Human
uaaaauagcaugugcagugaaa

SEQ ID NO: 848398 - RNA, 22 nt, Human
caugcuguguguuuuagcucca

SEQ ID NO: 848399 - RNA, 22 nt, Human
ugaggcaguugagcuuccugag

SEQ ID NO: 848400 - RNA, 22 nt, Human
cauauaaauacaacauguguua

SEQ ID NO: 848401 - RNA, 22 nt, Human
ucccuucacagaugcgauguuu

SEQ ID NO: 848402 - RNA, 20 nt, Human
cugcuguguuauuguagaac

SEQ ID NO: 848403 - RNA, 22 nt, Human
acugacuuuggaauauuucuag

SEQ ID NO: 848404 - RNA, 22 nt, Human
uaucaauacauguuaucagugu

SEQ ID NO: 848405 - RNA, 22 nt, Human
uaggcagauguuaacaggaaaa

SEQ ID NO: 848406 - RNA, 22 nt, Human
gcugagguccagcauucgccua

SEQ ID NO: 848407 - RNA, 22 nt, Human
acccaggacacagagaugaccc

SEQ ID NO: 848408 - RNA, 22 nt, Human
uuuauaaguacuuugucugcuu

SEQ ID NO: 848409 - RNA, 23 nt, Human
uagagcagggaaaucugucagag

SEQ ID NO: 848410 - RNA, 22 nt, Human
gcugcuguugauuuaguccaau

SEQ ID NO: 848411 - RNA, 21 nt, Human
uccuggcccacucuaucccca

SEQ ID NO: 848412 - RNA, 19 nt, Human
aagggcugggcaccucacu

SEQ ID NO: 848413 - RNA, 22 nt, Human
guauaucuucagaaauuauagg

SEQ ID NO: 848414 - RNA, 22 nt, Human
acgguaacagauaccacagacu

SEQ ID NO: 848415 - RNA, 22 nt, Human
ggugguggagccagcugggagu

SEQ ID NO: 848416 - RNA, 22 nt, Human
uucagcaaauggacuguucagg

SEQ ID NO: 848417 - RNA, 22 nt, Human
gagggucccugcucagggccag

SEQ ID NO: 848418 - RNA, 22 nt, Human
cccaggaugucgaggcugcagu

SEQ ID NO: 848419 - RNA, 22 nt, Human
uaguccagguuaaucccugccu

SEQ ID NO: 848420 - RNA, 22 nt, Human
cuucuucaucuguaaaacuugg

SEQ ID NO: 848421 - RNA, 22 nt, Human
ggcugcugggucaugaugcaga

SEQ ID NO: 848422 - RNA, 22 nt, Human
caaggcugcugcgggucgcacc

SEQ ID NO: 848423 - RNA, 22 nt, Human
cuaaauuauuugcacauuagag

SEQ ID NO: 848424 - RNA, 22 nt, Human
accuugaugccuuuccaagaug

SEQ ID NO: 848425 - RNA, 22 nt, Human
uaggcugagcuaagagagcuua

SEQ ID NO: 848426 - RNA, 22 nt, Human
acagucuggaagcagggggcaa

SEQ ID NO: 848427 - RNA, 20 nt, Human
uugauaggcagcuugucagg

SEQ ID NO: 848428 - RNA, 22 nt, Human
ccaggcuggagugcaauggugc

SEQ ID NO: 848429 - RNA, 22 nt, Human
gaaguuacucucguuaaauaug

SEQ ID NO: 848430 - RNA, 22 nt, Human
cccaggaaaguggaggcggcug

SEQ ID NO: 848431 - RNA, 22 nt, Human
aucacauuguuagcauagacug

SEQ ID NO: 848432 - RNA, 22 nt, Human
aagcaagaggaaauguggaccu

SEQ ID NO: 848433 - RNA, 22 nt, Human
aagcgccaugguuccugcgcag

SEQ ID NO: 848434 - RNA, 22 nt, Human
uacuggguauacaaagaugaau

SEQ ID NO: 848435 - RNA, 22 nt, Human
aagcaccuggguuauaucuuag

SEQ ID NO: 848436 - RNA, 22 nt, Human
cuugaaagcuuugcgucuucua

SEQ ID NO: 848437 - RNA, 22 nt, Human
aggugagggugccagugcaugg

SEQ ID NO: 848438 - RNA, 22 nt, Human
gaggcugaaguguacaugggug

SEQ ID NO: 848439 - RNA, 22 nt, Human
gcccugaggcaaaagaacaguc

SEQ ID NO: 848440 - RNA, 20 nt, Human
uucuaauuugauggaguagc

SEQ ID NO: 848441 - RNA, 22 nt, Human
ucagucuucccuccagugcaac

SEQ ID NO: 848442 - RNA, 22 nt, Human
guggcagagcaggagacaggac

SEQ ID NO: 848443 - RNA, 22 nt, Human
cugucuaguuaggaugccagca

SEQ ID NO: 848444 - RNA, 22 nt, Human
uucuucagucccacuagccaca

SEQ ID NO: 848445 - RNA, 22 nt, Human
uggcagcuugaaugcagucuuu

SEQ ID NO: 848446 - RNA, 21 nt, Human
ccauaccuaccucaccugguu

SEQ ID NO: 848447 - RNA, 22 nt, Human
agagagggcauagaaaaaggga

SEQ ID NO: 848448 - RNA, 22 nt, Human
ucagaaaagaccacauuauucu

SEQ ID NO: 848449 - RNA, 19 nt, Human
uccaggagcaaagccaguu

SEQ ID NO: 848450 - RNA, 22 nt, Human
auacaucuagagucauaaaaac

SEQ ID NO: 848451 - RNA, 22 nt, Human
agucaauucuuuucaacucaag

SEQ ID NO: 848452 - RNA, 22 nt, Human
acaccuuuuauucgccaggcac

SEQ ID NO: 848453 - RNA, 22 nt, Human
gacuuucugcuauacuuucugu

SEQ ID NO: 848454 - RNA, 22 nt, Human
auucuucaaagagugucaaagu

SEQ ID NO: 848455 - RNA, 22 nt, Human
ugcaggcucucugcugccagau

SEQ ID NO: 848456 - RNA, 22 nt, Human
aguucucagcuuaguaugcugu

SEQ ID NO: 848457 - RNA, 22 nt, Human
uagaagaacaugucaaacuaua

SEQ ID NO: 848458 - RNA, 23 nt, Human
ucaguuuguauaauccauaugca

SEQ ID NO: 848459 - RNA, 22 nt, Human
uggcagcagccauggaaggccc

SEQ ID NO: 848460 - RNA, 22 nt, Human
aguucagaguaaauguugaagg

SEQ ID NO: 848461 - RNA, 22 nt, Human
uaacucuagucccaggcaugaa

SEQ ID NO: 848462 - RNA, 22 nt, Human
auuggaaauacaguagaaaaau

SEQ ID NO: 848463 - RNA, 22 nt, Human
cgagcaugaugacggcuguggc

SEQ ID NO: 848464 - RNA, 22 nt, Human
cagcaggaccauugaggcauca

SEQ ID NO: 848465 - RNA, 22 nt, Human
uggucaaaaaggccuagacaca

SEQ ID NO: 848466 - RNA, 22 nt, Human
cacucaggguacaauggagggc

SEQ ID NO: 848467 - RNA, 22 nt, Human
aagcugaggcuccccugaggga

SEQ ID NO: 848468 - RNA, 22 nt, Human
ugagggagagggcgaaaaugaa

SEQ ID NO: 848469 - RNA, 22 nt, Human
cuugcuggugguguuuucuaug

SEQ ID NO: 848470 - RNA, 22 nt, Human
ggaaaugacuuggugcuucguu

SEQ ID NO: 848471 - RNA, 22 nt, Human
acuauacaccaaaauauuaagg

SEQ ID NO: 848472 - RNA, 22 nt, Human
agucucugccagcuuguccucu

SEQ ID NO: 848473 - RNA, 19 nt, Human
uuuaggauaaagucuggac

SEQ ID NO: 848474 - RNA, 22 nt, Human
gaggccagcuaguccaggaagu

SEQ ID NO: 848475 - RNA, 22 nt, Human
uucuucuugaaacuuuagguug

SEQ ID NO: 848476 - RNA, 22 nt, Human
caggcugcagcagcaguggccc

SEQ ID NO: 848477 - RNA, 22 nt, Human
uggaaggagacugggaagugug

SEQ ID NO: 848478 - RNA, 20 nt, Human
uauuuacaacuuagagccuc

SEQ ID NO: 848479 - RNA, 22 nt, Human
ggccuucugccuuucagcaaug

SEQ ID NO: 848480 - RNA, 22 nt, Human
uugaggucccugccuugccuuc

SEQ ID NO: 848481 - RNA, 22 nt, Human
acacagaagaucucuuaaugcu

SEQ ID NO: 848482 - RNA, 22 nt, Human
uggcacauagcagguacucagu

SEQ ID NO: 848483 - RNA, 22 nt, Human
ucaggcugugucuuuaaacaau

SEQ ID NO: 848484 - RNA, 22 nt, Human
gaauacaccaaggaaucagaau

SEQ ID NO: 848485 - RNA, 22 nt, Human
uacauguaagacaugagacucu

SEQ ID NO: 848486 - RNA, 22 nt, Human
ugggagcccaagggagcugccg

SEQ ID NO: 848487 - RNA, 19 nt, Human
aguggcagaucuggaagua

SEQ ID NO: 848488 - RNA, 22 nt, Human
uuaggaaaaugaaauuaccugu

SEQ ID NO: 848489 - RNA, 22 nt, Human
cugagccccucugaccucagag

SEQ ID NO: 848490 - RNA, 22 nt, Human
cucaggaugcaggucacaggac

SEQ ID NO: 848491 - RNA, 20 nt, Human
gcucccagccugcagucccc

SEQ ID NO: 848492 - RNA, 22 nt, Human
uaagauaaguggguugagaugg

SEQ ID NO: 848493 - RNA, 22 nt, Human
uugcucagcacuggagccagcu

SEQ ID NO: 848494 - RNA, 22 nt, Human
cugaggucaggaguucaagcug

SEQ ID NO: 848495 - RNA, 22 nt, Human
ugaauaguccuuggaauaacug

SEQ ID NO: 848496 - RNA, 22 nt, Human
gucuuugcugucuuugcucuca

SEQ ID NO: 848497 - RNA, 22 nt, Human
ccugguugugaguugaguugag

SEQ ID NO: 848498 - RNA, 17 nt, Human
uaaauacacaaggguau

SEQ ID NO: 848499 - RNA, 22 nt, Human
cugcugugagugguucuugccu

SEQ ID NO: 848500 - RNA, 22 nt, Human
gaggcaguuugccaugccagga

SEQ ID NO: 848501 - RNA, 20 nt, Human
auuaggauuuuaggucauca

SEQ ID NO: 848502 - RNA, 22 nt, Human
cugcccaggaaccagaggggca

SEQ ID NO: 848503 - RNA, 22 nt, Human
ccugggugacagagugagaccu

SEQ ID NO: 848504 - RNA, 22 nt, Human
uucugagccucauucaugaggc

SEQ ID NO: 848505 - RNA, 22 nt, Human
cuccaugaauuugagcuuugug

SEQ ID NO: 848506 - RNA, 22 nt, Human
cugacuuugcucauaggucaaa

SEQ ID NO: 848507 - RNA, 22 nt, Human
guugaaagaucauguggcugcc

SEQ ID NO: 848508 - RNA, 22 nt, Human
uagggcugcuuuguauucugcu

SEQ ID NO: 848509 - RNA, 22 nt, Human
ugaguuuugucuugcuagaagu

SEQ ID NO: 848510 - RNA, 22 nt, Human
gcugagguuuucugccugcuca

SEQ ID NO: 848511 - RNA, 22 nt, Human
uucauucugggcucuaaggaac

SEQ ID NO: 848512 - RNA, 22 nt, Human
uagacuuugauauuguacaccc

SEQ ID NO: 848513 - RNA, 23 nt, Human
uuggcagcgggucaggcuguggg

SEQ ID NO: 848514 - RNA, 22 nt, Human
ucucuucuaacacuagaaauuc

SEQ ID NO: 848515 - RNA, 22 nt, Human
uuacaguuuaguccaagccaga

SEQ ID NO: 848516 - RNA, 22 nt, Human
uuuguuaauucuuauguuagag

SEQ ID NO: 848517 - RNA, 22 nt, Human
ggagaggaaaugccagcacuuc

SEQ ID NO: 848518 - RNA, 22 nt, Human
agaaauucaauucuaauuagcu

SEQ ID NO: 848519 - RNA, 22 nt, Human
cagugcuggcuguuaggacagu

SEQ ID NO: 848520 - RNA, 22 nt, Human
uggacaaaugauuucuaccuuu

SEQ ID NO: 848521 - RNA, 22 nt, Human
agaggccaugcuagaggccugg

SEQ ID NO: 848522 - RNA, 22 nt, Human
uucacaaaacacuauuuucugg

SEQ ID NO: 848523 - RNA, 22 nt, Human
aucuuucuauuucuaaaaacua

SEQ ID NO: 848524 - RNA, 22 nt, Human
ugcugaggagggcacccggggg

SEQ ID NO: 848525 - RNA, 22 nt, Human
aucaaugacaguugaauucuac

SEQ ID NO: 848526 - RNA, 22 nt, Human
gcccaggaguugguggcugcag

SEQ ID NO: 848527 - RNA, 22 nt, Human
uaacuguauauuaagguggccc

SEQ ID NO: 848528 - RNA, 22 nt, Human
aggacagggauucaaacuccca

SEQ ID NO: 848529 - RNA, 22 nt, Human
uccauuuucuugcucuagguaa

SEQ ID NO: 848530 - RNA, 22 nt, Human
agcugcccuuaauaggcauuca

SEQ ID NO: 848531 - RNA, 22 nt, Human
aacauucuauuuugcuaaaaca

SEQ ID NO: 848532 - RNA, 22 nt, Human
cccaaggacacgggcagggaca

SEQ ID NO: 848533 - RNA, 22 nt, Human
uaugaaacauucauacaaauaa

SEQ ID NO: 848534 - RNA, 22 nt, Human
agggaagcccuggcugagaccc

SEQ ID NO: 848535 - RNA, 22 nt, Human
uaaauuauggcuggcagagcag

SEQ ID NO: 848536 - RNA, 22 nt, Human
gccugccugcugucaucugccu

SEQ ID NO: 848537 - RNA, 22 nt, Human
auccaugauuaguaggauaaag

SEQ ID NO: 848538 - RNA, 22 nt, Human
ggaccuggcaauuugcaucucu

SEQ ID NO: 848539 - RNA, 23 nt, Human
aaacugcuuccaauuccugccau

SEQ ID NO: 848540 - RNA, 22 nt, Human
aaaaacuguaauuacuuuugca

SEQ ID NO: 848541 - RNA, 22 nt, Human
ccaugagcuucaacugacacag

SEQ ID NO: 848542 - RNA, 22 nt, Human
guagauaaggauugauuuuuau

SEQ ID NO: 848543 - RNA, 23 nt, Human
cugcccugaucuugaucuauugu

SEQ ID NO: 848544 - RNA, 20 nt, Human
aguuacgcuauuacucuccu

SEQ ID NO: 848545 - RNA, 22 nt, Human
acaaauauuuacugaauccacu

SEQ ID NO: 848546 - RNA, 22 nt, Human
acuuggcaaguaucuauaaagu

SEQ ID NO: 848547 - RNA, 22 nt, Human
acagaagugucuuuuucauuca

SEQ ID NO: 848548 - RNA, 22 nt, Human
acuggccagguucaaaauacag

SEQ ID NO: 848549 - RNA, 22 nt, Human
uaggauguagcuaugucaucau

SEQ ID NO: 848550 - RNA, 22 nt, Human
agugcuguuagguuaauauagu

SEQ ID NO: 848551 - RNA, 22 nt, Human
uuggccaagacucauguccuau

SEQ ID NO: 848552 - RNA, 22 nt, Human
agggauggaagacuugaagacc

SEQ ID NO: 848553 - RNA, 22 nt, Human
acaggcugccuaccaaguauca

SEQ ID NO: 848554 - RNA, 22 nt, Human
gggaggugauuaggaccaugua

SEQ ID NO: 848555 - RNA, 22 nt, Human
ugagccaaacuucuccuugguc

SEQ ID NO: 848556 - RNA, 20 nt, Human
uggcaucucucaauuguagg

SEQ ID NO: 848557 - RNA, 21 nt, Human
auacauucuauuaagcauuua

SEQ ID NO: 848558 - RNA, 22 nt, Human
uucuacaauaugaauaaugaag

SEQ ID NO: 848559 - RNA, 22 nt, Human
caaggccagggaauuuuucugg

SEQ ID NO: 848560 - RNA, 20 nt, Human
ucaggaugugcugagugaag

SEQ ID NO: 848561 - RNA, 22 nt, Human
gaccaggaaagagugugacuaa

SEQ ID NO: 848562 - RNA, 22 nt, Human
cauuuguuggucagauuguagu

SEQ ID NO: 848563 - RNA, 22 nt, Human
cccaggagguggagguugcagc

SEQ ID NO: 848564 - RNA, 22 nt, Human
aagggcuggcccugggaagagu

SEQ ID NO: 848565 - RNA, 22 nt, Human
uuugaacuucuaccugucauau

SEQ ID NO: 848566 - RNA, 17 nt, Human
gacugagguaaggugag

SEQ ID NO: 848567 - RNA, 22 nt, Human
uucaacuaauguuuauuuuaug

SEQ ID NO: 848568 - RNA, 22 nt, Human
cuuaggauuuaauuucagacuc

SEQ ID NO: 848569 - RNA, 22 nt, Human
uuauucaggcucucuuuggcua

SEQ ID NO: 848570 - RNA, 22 nt, Human
caccaggcuggagugcagaggu

SEQ ID NO: 848571 - RNA, 18 nt, Human
gagagcccagcagguggu

SEQ ID NO: 848572 - RNA, 22 nt, Human
guuauauauaguauuucucuga

SEQ ID NO: 848573 - RNA, 22 nt, Human
aauuaggaaauucagccauuuu

SEQ ID NO: 848574 - RNA, 22 nt, Human
acagugaggaagcagcugugcu

SEQ ID NO: 848575 - RNA, 22 nt, Human
uccuggccgcuggccccugaga

SEQ ID NO: 848576 - RNA, 22 nt, Human
agugcagcaugcuggggaggcu

SEQ ID NO: 848577 - RNA, 22 nt, Human
uggcaucucaaacaggcagauu

SEQ ID NO: 848578 - RNA, 22 nt, Human
aauacaguagguaauaguucau

SEQ ID NO: 848579 - RNA, 22 nt, Human
uugagaaauguuuuuuaagcug

SEQ ID NO: 848580 - RNA, 22 nt, Human
uucugagagugccagaaguucu

SEQ ID NO: 848581 - RNA, 22 nt, Human
cuuauuagaaagaaaagacaug

SEQ ID NO: 848582 - RNA, 22 nt, Human
cugaggacauugaugaggcaau

SEQ ID NO: 848583 - RNA, 22 nt, Human
ucuuggcuguaccauugacuag

SEQ ID NO: 848584 - RNA, 22 nt, Human
cccaggagaauauuuuuggguc

SEQ ID NO: 848585 - RNA, 22 nt, Human
uggcuucuccagaaaucuuggu

SEQ ID NO: 848586 - RNA, 22 nt, Human
gucuucuuuaaccuacuaaagc

SEQ ID NO: 848587 - RNA, 22 nt, Human
agugacagggaaaaugacacug

SEQ ID NO: 848588 - RNA, 22 nt, Human
uucaaacaguguagaauauaug

SEQ ID NO: 848589 - RNA, 23 nt, Human
ucguugaauagcaauagcacaac

SEQ ID NO: 848590 - RNA, 22 nt, Human
cugggccacaagccugugugau

SEQ ID NO: 848591 - RNA, 22 nt, Human
accuguuuggaggagguguuag

SEQ ID NO: 848592 - RNA, 22 nt, Human
ccaccagagggcagacugugau

SEQ ID NO: 848593 - RNA, 22 nt, Human
cugaggcuggcguuugaggaag

SEQ ID NO: 848594 - RNA, 22 nt, Human
gucuccugagacugcagucacc

SEQ ID NO: 848595 - RNA, 22 nt, Human
agauggagaccuuggaugaacu

SEQ ID NO: 848596 - RNA, 21 nt, Human
ggauggauagggaagagauuu

SEQ ID NO: 848597 - RNA, 22 nt, Human
gcauucuuuuuaggagguuccu

SEQ ID NO: 848598 - RNA, 22 nt, Human
ccagagcuaaacacacaggcug

SEQ ID NO: 848599 - RNA, 22 nt, Human
uugaaaguuuauggagucugca

SEQ ID NO: 848600 - RNA, 22 nt, Human
ccuaggcccauuaauuccccuu

SEQ ID NO: 848601 - RNA, 23 nt, Human
agacaaaagccucagucuuaggc

SEQ ID NO: 848602 - RNA, 22 nt, Human
aucuccaggcauuucaagagac

SEQ ID NO: 848603 - RNA, 22 nt, Human
gaaggaggugucaguuggacug

SEQ ID NO: 848604 - RNA, 22 nt, Human
agcuacccgaggacaggcuaag

SEQ ID NO: 848605 - RNA, 22 nt, Human
ucauggauggccgggaggugau

SEQ ID NO: 848606 - RNA, 22 nt, Human
cuugcaggauuuugcugcugua

SEQ ID NO: 848607 - RNA, 22 nt, Human
uuaggaaaggaacauugaaacg

SEQ ID NO: 848608 - RNA, 22 nt, Human
ccaggcugcucacaagcugccc

SEQ ID NO: 848609 - RNA, 22 nt, Human
cugaggucuauuuugaaacugc

SEQ ID NO: 848610 - RNA, 22 nt, Human
ucuucuucccaucccucaaaug

SEQ ID NO: 848611 - RNA, 23 nt, Human
cuuuuaacuugaucugagaccag

SEQ ID NO: 848612 - RNA, 22 nt, Human
agggggugcauuugugaaugaa

SEQ ID NO: 848613 - RNA, 22 nt, Human
ucucagucuuugcaaggaugcu

SEQ ID NO: 848614 - RNA, 18 nt, Human
ggagcccagaggacagga

SEQ ID NO: 848615 - RNA, 22 nt, Human
uguacauagaucuugaaaauua

SEQ ID NO: 848616 - RNA, 22 nt, Human
ggcugagccacugcgccuggcu

SEQ ID NO: 848617 - RNA, 22 nt, Human
auuuccaguccuaaugaucugg

SEQ ID NO: 848618 - RNA, 22 nt, Human
cauguuuacuaccaggagaaug

SEQ ID NO: 848619 - RNA, 22 nt, Human
uaggcagccagcaucaguuggg

SEQ ID NO: 848620 - RNA, 21 nt, Human
ccugggccaaauucccuggac

SEQ ID NO: 848621 - RNA, 22 nt, Human
ucuuugcacugugcaagcagaa

SEQ ID NO: 848622 - RNA, 22 nt, Human
cugcuguguggauucaauggcu

SEQ ID NO: 848623 - RNA, 22 nt, Human
uuaggaaacgcugcuauugacu

SEQ ID NO: 848624 - RNA, 20 nt, Human
agcuucuucugucuaauuuu

SEQ ID NO: 848625 - RNA, 22 nt, Human
ggccucaguuucuucaacugua

SEQ ID NO: 848626 - RNA, 22 nt, Human
aagggcuggagacugggucuuc

SEQ ID NO: 848627 - RNA, 22 nt, Human
caaauacuaaacauaagauuuu

SEQ ID NO: 848628 - RNA, 22 nt, Human
cucaggauguacuacagaaggc

SEQ ID NO: 848629 - RNA, 22 nt, Human
gagggcugcaaugagacagaga

SEQ ID NO: 848630 - RNA, 22 nt, Human
uuccuggccucucucugagcag

SEQ ID NO: 848631 - RNA, 22 nt, Human
auaucaguaucuauguauuugu

SEQ ID NO: 848632 - RNA, 22 nt, Human
ucuagaaauuuugccuuguauu

SEQ ID NO: 848633 - RNA, 22 nt, Human
ucuccuggccuuuagguuaagg

SEQ ID NO: 848634 - RNA, 22 nt, Human
augcuguguuugagaaccuagg

SEQ ID NO: 848635 - RNA, 18 nt, Human
uggcagagugucuguucu

SEQ ID NO: 848636 - RNA, 22 nt, Human
uucagaaacagagugagugagu

SEQ ID NO: 848637 - RNA, 22 nt, Human
aguuuucacacucaccaaaagg

SEQ ID NO: 848638 - RNA, 22 nt, Human
uggcagcuguuaauguuuuguu

SEQ ID NO: 848639 - RNA, 19 nt, Human
cuggccaggccaggggccc

SEQ ID NO: 848640 - RNA, 22 nt, Human
cugagauggccacugggucuca

SEQ ID NO: 848641 - RNA, 22 nt, Human
ggcugaaggaugaaagcugcag

SEQ ID NO: 848642 - RNA, 22 nt, Human
gcaggcugaaacucggggucua

SEQ ID NO: 848643 - RNA, 22 nt, Human
cagaggaguucaguacacagcc

SEQ ID NO: 848644 - RNA, 22 nt, Human
gcugcccaggagagguggggcu

SEQ ID NO: 848645 - RNA, 22 nt, Human
ggcugcaggaacgacggagggg

SEQ ID NO: 848646 - RNA, 22 nt, Human
uggcaggcagugugggagcugg

SEQ ID NO: 848647 - RNA, 23 nt, Human
gcagacagagcagacuaagacaa

SEQ ID NO: 848648 - RNA, 18 nt, Human
guaggucaguaccaagca

SEQ ID NO: 848649 - RNA, 22 nt, Human
uccaggaggccucauuuccugu

SEQ ID NO: 848650 - RNA, 22 nt, Human
uucagcaaacacgaugcuuguu

SEQ ID NO: 848651 - RNA, 22 nt, Human
gaggcugaugcugccucacaga

SEQ ID NO: 848652 - RNA, 22 nt, Human
cagcugacccagugaggaggca

SEQ ID NO: 848653 - RNA, 22 nt, Human
cuguccuggccgcccuugugag

SEQ ID NO: 848654 - RNA, 22 nt, Human
aagcaagacagaaguuacugcc

SEQ ID NO: 848655 - RNA, 22 nt, Human
uguauuuuuagaccuuuagacc

SEQ ID NO: 848656 - RNA, 22 nt, Human
aggcuccaugcaaaggcuguuu

SEQ ID NO: 848657 - RNA, 22 nt, Human
gugagggguggcugagcaguuu

SEQ ID NO: 848658 - RNA, 22 nt, Human
aguguguccagaaaucuguauu

SEQ ID NO: 848659 - RNA, 19 nt, Human
cauuaggauuagagacaag

SEQ ID NO: 848660 - RNA, 22 nt, Human
agaggggaggcgaaccagaguc

SEQ ID NO: 848661 - RNA, 22 nt, Human
auguucuuguucaaaugucagu

SEQ ID NO: 848662 - RNA, 22 nt, Human
aacauguugaguugaaaguagc

SEQ ID NO: 848663 - RNA, 22 nt, Human
cagaguggcacucugcuggaug

SEQ ID NO: 848664 - RNA, 22 nt, Human
gcuuugaagacuuuuccagggu

SEQ ID NO: 848665 - RNA, 22 nt, Human
acugaggucaugcauaguuucu

SEQ ID NO: 848666 - RNA, 22 nt, Human
cuucucagaggccagaagcuau

SEQ ID NO: 848667 - RNA, 22 nt, Human
ucaccgccuugcccggccgggc

SEQ ID NO: 848668 - RNA, 22 nt, Human
uccaggagaaaacugacggugg

SEQ ID NO: 848669 - RNA, 22 nt, Human
ggccaggagcugcacagggcuc

SEQ ID NO: 848670 - RNA, 22 nt, Human
caagauggaguccgggaaugug

SEQ ID NO: 848671 - RNA, 22 nt, Human
ggcagucaagagggagucugaa

SEQ ID NO: 848672 - RNA, 22 nt, Human
accauccugaaaccuucaugcu

SEQ ID NO: 848673 - RNA, 22 nt, Human
aauacaguaauuuugaugaguu

SEQ ID NO: 848674 - RNA, 22 nt, Human
uggcagagugcagaagaggcau

SEQ ID NO: 848675 - RNA, 22 nt, Human
aggggaugauccucccgcagcg

SEQ ID NO: 848676 - RNA, 22 nt, Human
uaacauauuguguggcacuagg

SEQ ID NO: 848677 - RNA, 23 nt, Human
aagaacugcgaauggagaaagua

SEQ ID NO: 848678 - RNA, 22 nt, Human
guuuuucuuugugugaagacaa

SEQ ID NO: 848679 - RNA, 22 nt, Human
uacccagggcuuuucugaugca

SEQ ID NO: 848680 - RNA, 22 nt, Human
aagaacuuccuaauauauuuuc

SEQ ID NO: 848681 - RNA, 22 nt, Human
uugaaaguccuucuugaguuac

SEQ ID NO: 848682 - RNA, 22 nt, Human
auuagguaaucuuuagauacac

SEQ ID NO: 848683 - RNA, 22 nt, Human
acacauauucauauguacuuac

SEQ ID NO: 848684 - RNA, 22 nt, Human
uuaggcauuggaaggucagcuu

SEQ ID NO: 848685 - RNA, 22 nt, Human
gcccaggaguucaagucuagug

SEQ ID NO: 848686 - RNA, 22 nt, Human
uaucuaaaggauuuaauuuagu

SEQ ID NO: 848687 - RNA, 22 nt, Human
caccagcuccaccagggcaggu

SEQ ID NO: 848688 - RNA, 22 nt, Human
cagggcuggauuucauuucuag

SEQ ID NO: 848689 - RNA, 22 nt, Human
ucaggagagaguuggguaggcu

SEQ ID NO: 848690 - RNA, 22 nt, Human
augguacaaaauguauaaaguc

SEQ ID NO: 848691 - RNA, 22 nt, Human
uacagagauacucuagaucaaa

SEQ ID NO: 848692 - RNA, 22 nt, Human
uuuuaguguagucaccgugggu

SEQ ID NO: 848693 - RNA, 18 nt, Human
uccuggccacacuaccuu

SEQ ID NO: 848694 - RNA, 22 nt, Human
auguggcacagcacaguaagag

SEQ ID NO: 848695 - RNA, 23 nt, Human
gugcugugagccccuuggccucc

SEQ ID NO: 848696 - RNA, 22 nt, Human
cugggccaaaagaaguguucuu

SEQ ID NO: 848697 - RNA, 23 nt, Human
uuaaguggucaguuuuagacaac

SEQ ID NO: 848698 - RNA, 22 nt, Human
aggcaguggagcuggaauaggc

SEQ ID NO: 848699 - RNA, 22 nt, Human
uauuucagguauggugugaaau

SEQ ID NO: 848700 - RNA, 22 nt, Human
ugaggcagaaauuccuguuuuc

SEQ ID NO: 848701 - RNA, 22 nt, Human
uggcagcucccagagcuuccaa

SEQ ID NO: 848702 - RNA, 22 nt, Human
gccaggagcaugucauuguuga

SEQ ID NO: 848703 - RNA, 22 nt, Human
ucccaggacaugggcucugcuc

SEQ ID NO: 848704 - RNA, 22 nt, Human
uccugagcuucaaaacacuuug

SEQ ID NO: 848705 - RNA, 22 nt, Human
aguaaacagaaagcaagaugau

SEQ ID NO: 848706 - RNA, 22 nt, Human
cuucagaaugggacuguguuug

SEQ ID NO: 848707 - RNA, 22 nt, Human
aacuuacaaggaugauagcugc

SEQ ID NO: 848708 - RNA, 17 nt, Human
aagacagaagccaugag

SEQ ID NO: 848709 - RNA, 22 nt, Human
guauuaguuaucuacugcugug

SEQ ID NO: 848710 - RNA, 22 nt, Human
aagggcuguuauguuuuuauac

SEQ ID NO: 848711 - RNA, 22 nt, Human
uucucagagugaccaagucuuu

SEQ ID NO: 848712 - RNA, 22 nt, Human
ggcagccaugcacgcugccugg

SEQ ID NO: 848713 - RNA, 22 nt, Human
ugugauauuugaguauugucaa

SEQ ID NO: 848714 - RNA, 22 nt, Human
gaggcugacggcaccaucuucu

SEQ ID NO: 848715 - RNA, 22 nt, Human
uccuuagagauacugucuugaa

SEQ ID NO: 848716 - RNA, 22 nt, Human
cuuuguagcugcuucugauuua

SEQ ID NO: 848717 - RNA, 22 nt, Human
cccaggaaccuaccagcucgag

SEQ ID NO: 848718 - RNA, 20 nt, Human
ucauuucuugggguuccaag

SEQ ID NO: 848719 - RNA, 19 nt, Human
cuucuucuuggcagccaag

SEQ ID NO: 848720 - RNA, 22 nt, Human
aguuugaaauguuggcaauauu

SEQ ID NO: 848721 - RNA, 22 nt, Human
uuugaaaggaauuaggaugaca

SEQ ID NO: 848722 - RNA, 22 nt, Human
gcccacuggcuggagugcuggu

SEQ ID NO: 848723 - RNA, 22 nt, Human
ccuccuggguucaagcgauucu

SEQ ID NO: 848724 - RNA, 22 nt, Human
uguccucuuccagugcuccuuc

SEQ ID NO: 848725 - RNA, 22 nt, Human
uaaggccaauuaacaaccaggg

SEQ ID NO: 848726 - RNA, 22 nt, Human
uuagagucaagcugcauguucu

SEQ ID NO: 848727 - RNA, 22 nt, Human
gucuauauauugcuugaauaau

SEQ ID NO: 848728 - RNA, 19 nt, Human
aaacuaaggggaaauguuu

SEQ ID NO: 848729 - RNA, 22 nt, Human
aguguuugagacacauuucacu

SEQ ID NO: 848730 - RNA, 22 nt, Human
ucaagugcuugugagguauuug

SEQ ID NO: 848731 - RNA, 22 nt, Human
gaccaaggaagaggggagccag

SEQ ID NO: 848732 - RNA, 22 nt, Human
ccuuuuauacucagugauauca

SEQ ID NO: 848733 - RNA, 22 nt, Human
gaguccaggcuguugcucaucu

SEQ ID NO: 848734 - RNA, 20 nt, Human
cugcugugauucccuccucc

SEQ ID NO: 848735 - RNA, 22 nt, Human
aaggcagcaccgccuccugaaa

SEQ ID NO: 848736 - RNA, 22 nt, Human
ucucuucuagcuucuugugguu

SEQ ID NO: 848737 - RNA, 22 nt, Human
gagggagggacuagcauucucu

SEQ ID NO: 848738 - RNA, 22 nt, Human
accaggagaggcacuugcaaug

SEQ ID NO: 848739 - RNA, 22 nt, Human
acuguggccaaagccucuggga

SEQ ID NO: 848740 - RNA, 22 nt, Human
ucuuagaaauuccccaguggcu

SEQ ID NO: 848741 - RNA, 22 nt, Human
ucccaggaauccguccucuaga

SEQ ID NO: 848742 - RNA, 22 nt, Human
aguaacaucuuugacauuuguu

SEQ ID NO: 848743 - RNA, 22 nt, Human
ccaggagcagauauggacauaa

SEQ ID NO: 848744 - RNA, 22 nt, Human
ugaggcaggaaguuauauaaug

SEQ ID NO: 848745 - RNA, 22 nt, Human
ucuugcuaaagaccaacacauu

SEQ ID NO: 848746 - RNA, 22 nt, Human
gaggagagaugguagauugggu

SEQ ID NO: 848747 - RNA, 22 nt, Human
gccaggagugucccacucauuu

SEQ ID NO: 848748 - RNA, 22 nt, Human
ccucuccuugcacccgucccgc

SEQ ID NO: 848749 - RNA, 22 nt, Human
aggcugagcaaagggccuuacc

SEQ ID NO: 848750 - RNA, 23 nt, Human
ucagagagcuguugagagcugcc

SEQ ID NO: 848751 - RNA, 22 nt, Human
acugccugcucauaacauugcu

SEQ ID NO: 848752 - RNA, 22 nt, Human
uuucauuauaaaaaguuggcuu

SEQ ID NO: 848753 - RNA, 21 nt, Human
uuugaaagcuacaucuauagc

SEQ ID NO: 848754 - RNA, 22 nt, Human
caaauacugagcacgcaaucaa

SEQ ID NO: 848755 - RNA, 22 nt, Human
caaaauuagaaaugcagcuguu

SEQ ID NO: 848756 - RNA, 22 nt, Human
gcucagggucccuuggugcugg

SEQ ID NO: 848757 - RNA, 22 nt, Human
cucagaauuuagggcucugagg

SEQ ID NO: 848758 - RNA, 22 nt, Human
cugaggcuucucuaguucagcu

SEQ ID NO: 848759 - RNA, 22 nt, Human
uaaauacuuuuacuccacugau

SEQ ID NO: 848760 - RNA, 22 nt, Human
cagaacugggcucgcucugguu

SEQ ID NO: 848761 - RNA, 22 nt, Human
gcccaggaaaugccccguggug

SEQ ID NO: 848762 - RNA, 22 nt, Human
acauguuuaaguuuaaugaaaa

SEQ ID NO: 848763 - RNA, 20 nt, Human
agauuauuccuaagauuucu

SEQ ID NO: 848764 - RNA, 17 nt, Human
ucugaagccagucugcu

SEQ ID NO: 848765 - RNA, 22 nt, Human
acugagguauaauugacauaac

SEQ ID NO: 848766 - RNA, 22 nt, Human
gggauggggagcuggaaagggg

SEQ ID NO: 848767 - RNA, 22 nt, Human
acaaguuaccaaaaaagauuca

SEQ ID NO: 848768 - RNA, 22 nt, Human
aaggcagcuuuaaaaaagaugc

SEQ ID NO: 848769 - RNA, 22 nt, Human
ugccuggcccugacagcccugg

SEQ ID NO: 848770 - RNA, 23 nt, Human
ggacccuguggagggugagaguc

SEQ ID NO: 848771 - RNA, 22 nt, Human
uccuggccuugcuccugaugcc

SEQ ID NO: 848772 - RNA, 22 nt, Human
caggcagccugagggaucuggg

SEQ ID NO: 848773 - RNA, 20 nt, Human
ccacaggaguccagucgacc

SEQ ID NO: 848774 - RNA, 22 nt, Human
aggcucagaggugagcaucugc

SEQ ID NO: 848775 - RNA, 22 nt, Human
uagaaagaucuguaggcaagag

SEQ ID NO: 848776 - RNA, 18 nt, Human
ccuaagcuccagccccag

SEQ ID NO: 848777 - RNA, 22 nt, Human
agaggaugguugaggaagaccu

SEQ ID NO: 848778 - RNA, 22 nt, Human
ucccaggauuuuaggcucucag

SEQ ID NO: 848779 - RNA, 22 nt, Human
cuguucucuggcgguggcuguu

SEQ ID NO: 848780 - RNA, 22 nt, Human
gauagucaccucccuuaacuuu

SEQ ID NO: 848781 - RNA, 22 nt, Human
acagagcuaauguugcauaggc

SEQ ID NO: 848782 - RNA, 22 nt, Human
gcugcccagacauugaaucagg

SEQ ID NO: 848783 - RNA, 22 nt, Human
uuuggaaugguaccuucaguug

SEQ ID NO: 848784 - RNA, 22 nt, Human
uuuuauucuaaguaugauggga

SEQ ID NO: 848785 - RNA, 22 nt, Human
cagaguggcgacccccucagcu

SEQ ID NO: 848786 - RNA, 22 nt, Human
uggcugagaaaaaagagcuaua

SEQ ID NO: 848787 - RNA, 22 nt, Human
gucuuucuaugaugaacuguug

SEQ ID NO: 848788 - RNA, 21 nt, Human
ccugagguuucuggccucugu

SEQ ID NO: 848789 - RNA, 20 nt, Human
acacacuuugaucuugagcc

SEQ ID NO: 848790 - RNA, 18 nt, Human
aggcagacacuagagguc

SEQ ID NO: 848791 - RNA, 22 nt, Human
uagggcuguuaguaauucucag

SEQ ID NO: 848792 - RNA, 20 nt, Human
ugcugcugccuccgccucug

SEQ ID NO: 848793 - RNA, 20 nt, Human
agggccuguugcaagcguuu

SEQ ID NO: 848794 - RNA, 20 nt, Human
auuagagcuacauggcuaca

SEQ ID NO: 848795 - RNA, 22 nt, Human
aaaauuaagugucugggaagcc

SEQ ID NO: 848796 - RNA, 22 nt, Human
gcuuuauuuugugagggauuac

SEQ ID NO: 848797 - RNA, 22 nt, Human
gaaaauuauugaaaauggcucu

SEQ ID NO: 848798 - RNA, 22 nt, Human
gccaggagagcuccuucagguu

SEQ ID NO: 848799 - RNA, 22 nt, Human
auguucuguuuuguaauucaua

SEQ ID NO: 848800 - RNA, 22 nt, Human
gaggcgagaagcuggagauggu

SEQ ID NO: 848801 - RNA, 23 nt, Human
agugcugaauugaaagcuccagg

SEQ ID NO: 848802 - RNA, 22 nt, Human
guaggcagugguuggaagagaa

SEQ ID NO: 848803 - RNA, 22 nt, Human
acagagcugggaucugaaccca

SEQ ID NO: 848804 - RNA, 22 nt, Human
agcugccaucugaagaacugca

SEQ ID NO: 848805 - RNA, 22 nt, Human
cucagagaggcaguggaaguca

SEQ ID NO: 848806 - RNA, 22 nt, Human
uagcaagaaaacacaagaauua

SEQ ID NO: 848807 - RNA, 22 nt, Human
aaauuaguacauugcaaagucc

SEQ ID NO: 848808 - RNA, 22 nt, Human
uggcugagaaaaugguuuuagg

SEQ ID NO: 848809 - RNA, 22 nt, Human
agaccuggauuccaauccuacc

SEQ ID NO: 848810 - RNA, 22 nt, Human
gagugcaguaugagaggcugcu

SEQ ID NO: 848811 - RNA, 22 nt, Human
aagggcugaaugaaggguugaa

SEQ ID NO: 848812 - RNA, 22 nt, Human
gcauacagagaggauguggcau

SEQ ID NO: 848813 - RNA, 22 nt, Human
aaguuacaguuauuauuuaaaa

SEQ ID NO: 848814 - RNA, 22 nt, Human
cagcuaauccucucuauccaag

SEQ ID NO: 848815 - RNA, 23 nt, Human
accaggagaaaagcuuugcggga

SEQ ID NO: 848816 - RNA, 22 nt, Human
aggcuggagcaagggggcauau

SEQ ID NO: 848817 - RNA, 22 nt, Human
ucccaggacccaggcauucaca

SEQ ID NO: 848818 - RNA, 22 nt, Human
gcccaggaguugaagggcugac

SEQ ID NO: 848819 - RNA, 22 nt, Human
aaaggccacacugcucuuucuc

SEQ ID NO: 848820 - RNA, 22 nt, Human
ggcuagaguggaacuggagcgg

SEQ ID NO: 848821 - RNA, 22 nt, Human
cagacaggcaggugcugcuuug

SEQ ID NO: 848822 - RNA, 22 nt, Human
acuacauuucucaguaccugaa

SEQ ID NO: 848823 - RNA, 22 nt, Human
aauuauacaugaaggcauuaua

SEQ ID NO: 848824 - RNA, 22 nt, Human
cccaggagagggaaccaaaugu

SEQ ID NO: 848825 - RNA, 22 nt, Human
agacucaagacugcagaagacg

SEQ ID NO: 848826 - RNA, 22 nt, Human
uuccaugacaccgagggaaguc

SEQ ID NO: 848827 - RNA, 22 nt, Human
auuaaauacugcaggcuaagca

SEQ ID NO: 848828 - RNA, 22 nt, Human
agacccagaaagcagcugcauu

SEQ ID NO: 848829 - RNA, 22 nt, Human
gguccaccuccaagcuggggac

SEQ ID NO: 848830 - RNA, 19 nt, Human
uauggcaggccgaggcacu

SEQ ID NO: 848831 - RNA, 22 nt, Human
auuauucuuaugucaucauggc

SEQ ID NO: 848832 - RNA, 22 nt, Human
uuugaaagucaaccuuccaguu

SEQ ID NO: 848833 - RNA, 22 nt, Human
aggcagaugggagcuggaaguu

SEQ ID NO: 848834 - RNA, 22 nt, Human
cuggucaaggagagucucugca

SEQ ID NO: 848835 - RNA, 22 nt, Human
uuuauuauguacaggcacuaua

SEQ ID NO: 848836 - RNA, 22 nt, Human
gccaggagggaaaggacaauuu

SEQ ID NO: 848837 - RNA, 17 nt, Human
ucccaggaacagggaau

SEQ ID NO: 848838 - RNA, 22 nt, Human
uuuuauauggcacauugguugg

SEQ ID NO: 848839 - RNA, 22 nt, Human
accgaaggaaacuggaaccguu

SEQ ID NO: 848840 - RNA, 22 nt, Human
uuggcacacaguaagcccuaag

SEQ ID NO: 848841 - RNA, 22 nt, Human
cccauucauccucgcuuccuuc

SEQ ID NO: 848842 - RNA, 22 nt, Human
aacauauaaacucuuaaguuca

SEQ ID NO: 848843 - RNA, 22 nt, Human
gcuuaguccccaagagagacca

SEQ ID NO: 848844 - RNA, 17 nt, Human
gccaggagguuugagcu

SEQ ID NO: 848845 - RNA, 20 nt, Human
gagcugaguguggucauggg

SEQ ID NO: 848846 - RNA, 22 nt, Human
auucauuugcuauuguguaugg

SEQ ID NO: 848847 - RNA, 23 nt, Human
agacugaggcugccagggucaga

SEQ ID NO: 848848 - RNA, 22 nt, Human
gcuggagcugcagccugggccu

SEQ ID NO: 848849 - RNA, 22 nt, Human
acccaggaggcagagguugcag

SEQ ID NO: 848850 - RNA, 22 nt, Human
uccuggcccuguggccugcagu

SEQ ID NO: 848851 - RNA, 22 nt, Human
uagcaagaagggagaugggguu

SEQ ID NO: 848852 - RNA, 22 nt, Human
auuuccagugcacugaauagaa

SEQ ID NO: 848853 - RNA, 22 nt, Human
gcugccuccgccggcuccacag

SEQ ID NO: 848854 - RNA, 22 nt, Human
cugcccucuagggaugcacugg

SEQ ID NO: 848855 - RNA, 18 nt, Human
ggcagggaaaagauaggg

SEQ ID NO: 848856 - RNA, 22 nt, Human
ugcauuuccagauuucuggagu

SEQ ID NO: 848857 - RNA, 22 nt, Human
ucugcccucauugcugccugga

SEQ ID NO: 848858 - RNA, 22 nt, Human
gaaauauugggacucagagcuu

SEQ ID NO: 848859 - RNA, 22 nt, Human
ucugagguucccucaacuaccu

SEQ ID NO: 848860 - RNA, 22 nt, Human
cauuuguaguaucuguuuauau

SEQ ID NO: 848861 - RNA, 22 nt, Human
aguauugugacucaaguauucu

SEQ ID NO: 848862 - RNA, 22 nt, Human
ucccagaggucucugcugguuc

SEQ ID NO: 848863 - RNA, 22 nt, Human
cuguaacucugccaagaaggcu

SEQ ID NO: 848864 - RNA, 22 nt, Human
ucccaggaagaucccagggacc

SEQ ID NO: 848865 - RNA, 22 nt, Human
aucuacccacugaacacaauau

SEQ ID NO: 848866 - RNA, 22 nt, Human
ugcuggcuuugcgagaugcauu

SEQ ID NO: 848867 - RNA, 22 nt, Human
ggcugagcccccucugcguagg

SEQ ID NO: 848868 - RNA, 22 nt, Human
ucuucacaggagccugccugcc

SEQ ID NO: 848869 - RNA, 22 nt, Human
uccccagaggugaggcagcuuu

SEQ ID NO: 848870 - RNA, 22 nt, Human
cacugguguauuagagcuagaa

SEQ ID NO: 848871 - RNA, 22 nt, Human
ugcugcugacauuuggggcuug

SEQ ID NO: 848872 - RNA, 22 nt, Human
acaggcuggaggaggaccaaga

SEQ ID NO: 848873 - RNA, 22 nt, Human
agaccaugggcucugaagagca

SEQ ID NO: 848874 - RNA, 22 nt, Human
ucuccuggauagauacuaucca

SEQ ID NO: 848875 - RNA, 22 nt, Human
ccaggcugaauauguuccaggg

SEQ ID NO: 848876 - RNA, 21 nt, Human
uuuauuuauauaggacacaug

SEQ ID NO: 848877 - RNA, 22 nt, Human
cugaggcucaagggcagguggg

SEQ ID NO: 848878 - RNA, 22 nt, Human
uacaaaguagaaauucaguaaa

SEQ ID NO: 848879 - RNA, 22 nt, Human
uagcaagagugggcuuuguggg

SEQ ID NO: 848880 - RNA, 22 nt, Human
agaggcaggaagagcugauuuu

SEQ ID NO: 848881 - RNA, 22 nt, Human
uagugugguaaauaaauguuuu

SEQ ID NO: 848882 - RNA, 22 nt, Human
cuuaauaauaggugaggcuaug

SEQ ID NO: 848883 - RNA, 22 nt, Human
uccaugaggcagggaggcuggc

SEQ ID NO: 848884 - RNA, 22 nt, Human
caggagaaauguggcugcuacc

SEQ ID NO: 848885 - RNA, 22 nt, Human
uggccucagauuauugcacagu

SEQ ID NO: 848886 - RNA, 22 nt, Human
guggccaagaaaauagaugcau

SEQ ID NO: 848887 - RNA, 23 nt, Human
agcacacuuguacaaugcccuag

SEQ ID NO: 848888 - RNA, 20 nt, Human
agacaggagcccccauucag

SEQ ID NO: 848889 - RNA, 22 nt, Human
ccuguuuagugaggugaggagu

SEQ ID NO: 848890 - RNA, 22 nt, Human
gugguuuucuccaacccagaac

SEQ ID NO: 848891 - RNA, 22 nt, Human
uagaagcacagguuaaaggcau

SEQ ID NO: 848892 - RNA, 22 nt, Human
uuccaugagcucugaguucaca

SEQ ID NO: 848893 - RNA, 22 nt, Human
aggcacaguuucauccccgggc

SEQ ID NO: 848894 - RNA, 22 nt, Human
ggccugaggcgucccagcugug

SEQ ID NO: 848895 - RNA, 22 nt, Human
gugcugagauuacaggugugag

SEQ ID NO: 848896 - RNA, 22 nt, Human
uuguuuuaucuuucuacagacu

SEQ ID NO: 848897 - RNA, 22 nt, Human
cuggcugaguuacuccacugag

SEQ ID NO: 848898 - RNA, 23 nt, Human
ggccacaaauagucuccccuggc

SEQ ID NO: 848899 - RNA, 22 nt, Human
gcuggcagggacagcugcgugu

SEQ ID NO: 848900 - RNA, 22 nt, Human
gagcugagacacacuuuggcaa

SEQ ID NO: 848901 - RNA, 22 nt, Human
aaucuguuuaguucugcguaug

SEQ ID NO: 848902 - RNA, 22 nt, Human
uuaaguaacuuguccaaaugag

SEQ ID NO: 848903 - RNA, 22 nt, Human
uuucuucagccuucacaaccug

SEQ ID NO: 848904 - RNA, 22 nt, Human
ccuggagcccaaggcagugaga

SEQ ID NO: 848905 - RNA, 22 nt, Human
cccugccuucuuggccuuuaaa

SEQ ID NO: 848906 - RNA, 19 nt, Human
accaggagacagugagcuu

SEQ ID NO: 848907 - RNA, 21 nt, Human
gauuugcagaaacuagacagg

SEQ ID NO: 848908 - RNA, 22 nt, Human
gagaaacuuggaguuauucugg

SEQ ID NO: 848909 - RNA, 22 nt, Human
caggagauguaagacuucuguu

SEQ ID NO: 848910 - RNA, 22 nt, Human
agcugcccagcuaggaagaagg

SEQ ID NO: 848911 - RNA, 22 nt, Human
aggcuggagugugcaguggcgc

SEQ ID NO: 848912 - RNA, 22 nt, Human
ugcuuagacgucaaguacagcc

SEQ ID NO: 848913 - RNA, 22 nt, Human
cugaggaagacagcagcugugu

SEQ ID NO: 848914 - RNA, 22 nt, Human
aguggcagagugcacucaggca

SEQ ID NO: 848915 - RNA, 22 nt, Human
uuccuggcugaacugaacuccu

SEQ ID NO: 848916 - RNA, 22 nt, Human
uucuucucucauagauuaaggu

SEQ ID NO: 848917 - RNA, 22 nt, Human
ccacuuucugagggaacagcag

SEQ ID NO: 848918 - RNA, 22 nt, Human
ugaggcaguauuuuagugacuu

SEQ ID NO: 848919 - RNA, 22 nt, Human
ccagagcugaggagaugggcuu

SEQ ID NO: 848920 - RNA, 22 nt, Human
uuccucagaaaauacuguccaa

SEQ ID NO: 848921 - RNA, 22 nt, Human
acuaacuugcugagugaccaug

SEQ ID NO: 848922 - RNA, 22 nt, Human
cagucagggacaccagcuagga

SEQ ID NO: 848923 - RNA, 22 nt, Human
cugagcugggaguagagacucu

SEQ ID NO: 848924 - RNA, 22 nt, Human
cugcugccauuagggcacagac

SEQ ID NO: 848925 - RNA, 22 nt, Human
gucuggccugccagcucuggug

SEQ ID NO: 848926 - RNA, 22 nt, Human
agucucugggcaugguugugac

SEQ ID NO: 848927 - RNA, 22 nt, Human
caaggccagagccagcgauaag

SEQ ID NO: 848928 - RNA, 22 nt, Human
guauuagucaauuacagugggg

SEQ ID NO: 848929 - RNA, 22 nt, Human
gaggcugagaguuuguucuacu

SEQ ID NO: 848930 - RNA, 22 nt, Human
acucagaagauauaaugacuca

SEQ ID NO: 848931 - RNA, 22 nt, Human
ccccaccauguagaaacugaga

SEQ ID NO: 848932 - RNA, 22 nt, Human
gcugaagcugcagcaggaggaa

SEQ ID NO: 848933 - RNA, 20 nt, Human
cugagccaacucucuucuug

SEQ ID NO: 848934 - RNA, 22 nt, Human
cccaggagaauauaauguucuu

SEQ ID NO: 848935 - RNA, 22 nt, Human
cagcaggauaugguggagagag

SEQ ID NO: 848936 - RNA, 20 nt, Human
ugcugaggccugaggccugg

SEQ ID NO: 848937 - RNA, 22 nt, Human
ucuggguaugaccuauuuuucc

SEQ ID NO: 848938 - RNA, 22 nt, Human
aaaggcaggcuuucacaucuca

SEQ ID NO: 848939 - RNA, 22 nt, Human
uccuggccuccguucucugcau

SEQ ID NO: 848940 - RNA, 22 nt, Human
gucuuuaugguaugaaaacuga

SEQ ID NO: 848941 - RNA, 22 nt, Human
uggucaaauuuagucucuggaa

SEQ ID NO: 848942 - RNA, 22 nt, Human
cagagcugcgcuuuuuccuggu

SEQ ID NO: 848943 - RNA, 22 nt, Human
agaaaaaucuuggcgcuugucu

SEQ ID NO: 848944 - RNA, 22 nt, Human
ugagagggcccagagcacacca

SEQ ID NO: 848945 - RNA, 22 nt, Human
ucaucugucccaggcuuuuuuc

SEQ ID NO: 848946 - RNA, 22 nt, Human
uauuuccaagcugaauccaaug

SEQ ID NO: 848947 - RNA, 22 nt, Human
aagggaggaggauuuauuguac

SEQ ID NO: 848948 - RNA, 22 nt, Human
gaaaacuuggaucucuagaaug

SEQ ID NO: 848949 - RNA, 22 nt, Human
gacuucuauuaauaccucuacu

SEQ ID NO: 848950 - RNA, 21 nt, Human
uagaagcacauagguucaaag

SEQ ID NO: 848951 - RNA, 22 nt, Human
aaauuauucucauguguuucuu

SEQ ID NO: 848952 - RNA, 22 nt, Human
cuuaauaaaugguagcuguuau

SEQ ID NO: 848953 - RNA, 20 nt, Human
uuuauucacagagaagaguu

SEQ ID NO: 848954 - RNA, 22 nt, Human
uuuggaaagugugauuucaagg

SEQ ID NO: 848955 - RNA, 20 nt, Human
uuggcagcaguuccaaguga

SEQ ID NO: 848956 - RNA, 22 nt, Human
cagugcuguugggcccagagag

SEQ ID NO: 848957 - RNA, 22 nt, Human
gcucccaggcauggagguaauu

SEQ ID NO: 848958 - RNA, 22 nt, Human
guuaggauguggggacuuuggg

SEQ ID NO: 848959 - RNA, 22 nt, Human
ccuggcugccgagugugcagcg

SEQ ID NO: 848960 - RNA, 22 nt, Human
cagggucuuauaaggccaauuu

SEQ ID NO: 848961 - RNA, 22 nt, Human
aacuccagggcauugucuccug

SEQ ID NO: 848962 - RNA, 22 nt, Human
uggcacaugguuaaucauaauu

SEQ ID NO: 848963 - RNA, 22 nt, Human
ggccagcagucacagggucaga

SEQ ID NO: 848964 - RNA, 22 nt, Human
uuucuauuuuaaaggcauaugg

SEQ ID NO: 848965 - RNA, 22 nt, Human
uucacagacuuuccauagauug

SEQ ID NO: 848966 - RNA, 22 nt, Human
caguugccuacuacauggcagg

SEQ ID NO: 848967 - RNA, 22 nt, Human
uagcaagaccaauauguagaua

SEQ ID NO: 848968 - RNA, 22 nt, Human
gaaaggcaguacagcugagccu

SEQ ID NO: 848969 - RNA, 22 nt, Human
ugagcagagcaguaacaggagc

SEQ ID NO: 848970 - RNA, 20 nt, Human
ucauuguguugccaauuccc

SEQ ID NO: 848971 - RNA, 22 nt, Human
ucugagccaaaauaaacagcau

SEQ ID NO: 848972 - RNA, 22 nt, Human
acccaggacaugggcacccgug

SEQ ID NO: 848973 - RNA, 22 nt, Human
ugauuuccccagucuugcugcu

SEQ ID NO: 848974 - RNA, 22 nt, Human
acuucuucuucagcugggggau

SEQ ID NO: 848975 - RNA, 17 nt, Human
caggcagacauguaagc

SEQ ID NO: 848976 - RNA, 22 nt, Human
auacacuugaccuggagugaag

SEQ ID NO: 848977 - RNA, 22 nt, Human
ccauggcaauggucagucuauu

SEQ ID NO: 848978 - RNA, 22 nt, Human
ccccaggagcuuguuuuagaga

SEQ ID NO: 848979 - RNA, 22 nt, Human
aucauacacucacauaaacaga

SEQ ID NO: 848980 - RNA, 18 nt, Human
ucagcuggggcugcagcc

SEQ ID NO: 848981 - RNA, 22 nt, Human
ggagggcugagacuggggucug

SEQ ID NO: 848982 - RNA, 22 nt, Human
aggcuccacccuacagagcucc

SEQ ID NO: 848983 - RNA, 22 nt, Human
guaaucguggugguuaauucca

SEQ ID NO: 848984 - RNA, 22 nt, Human
cuggcucaccuccgcuccagca

SEQ ID NO: 848985 - RNA, 22 nt, Human
aaauucacuugccugcuuagcu

SEQ ID NO: 848986 - RNA, 22 nt, Human
gaggcagcauucgcauagacag

SEQ ID NO: 848987 - RNA, 22 nt, Human
ucugagguuaauccugcugcau

SEQ ID NO: 848988 - RNA, 22 nt, Human
agugcuuugaacgaaaggcuga

SEQ ID NO: 848989 - RNA, 22 nt, Human
ugaggcaggacuugcauaaagu

SEQ ID NO: 848990 - RNA, 22 nt, Human
acucaggaaaaauguagugaua

SEQ ID NO: 848991 - RNA, 22 nt, Human
cccaaggaagacgcuugugaua

SEQ ID NO: 848992 - RNA, 22 nt, Human
uauuucagggagaauaaauuug

SEQ ID NO: 848993 - RNA, 20 nt, Human
uuggcagcagcucagccacc

SEQ ID NO: 848994 - RNA, 22 nt, Human
ugaaggccagggauuugcagcc

SEQ ID NO: 848995 - RNA, 22 nt, Human
aaggcugagguagggccuaaaa

SEQ ID NO: 848996 - RNA, 22 nt, Human
cagaggcacaagaaagcaaggc

SEQ ID NO: 848997 - RNA, 22 nt, Human
uggcuucucagaauacucugga

SEQ ID NO: 848998 - RNA, 22 nt, Human
augacaaauucagaccauagca

SEQ ID NO: 848999 - RNA, 22 nt, Human
aggugcuguuugucagcaguuu

SEQ ID NO: 849000 - RNA, 21 nt, Human
uccaggagcacgggacuagga

SEQ ID NO: 849001 - RNA, 22 nt, Human
acuggcaggcugcuggccggcg

SEQ ID NO: 849002 - RNA, 22 nt, Human
caucaucaaaagugacagagaa

SEQ ID NO: 849003 - RNA, 20 nt, Human
augauuuugcacuaacuuca

SEQ ID NO: 849004 - RNA, 22 nt, Human
cgccucagccguggucaucuuc

SEQ ID NO: 849005 - RNA, 22 nt, Human
uuucaguucaguuuauuauauc

SEQ ID NO: 849006 - RNA, 22 nt, Human
uuagccauugucagcacauggc

SEQ ID NO: 849007 - RNA, 22 nt, Human
uucugagacaauugagagucua

SEQ ID NO: 849008 - RNA, 23 nt, Human
cccauuuucauguuaacuccugg

SEQ ID NO: 849009 - RNA, 22 nt, Human
gucaggauuuuaaaaucccagu

SEQ ID NO: 849010 - RNA, 22 nt, Human
gcccaggagccuggagaugugu

SEQ ID NO: 849011 - RNA, 22 nt, Human
agugucauuccagggacccucg

SEQ ID NO: 849012 - RNA, 22 nt, Human
uagggcugccuauggcuagaua

SEQ ID NO: 849013 - RNA, 22 nt, Human
uagacagauuuaaaggaaugga

SEQ ID NO: 849014 - RNA, 22 nt, Human
uaaggccaauuacauauguuca

SEQ ID NO: 849015 - RNA, 22 nt, Human
gcugccucuccugaguugacag

SEQ ID NO: 849016 - RNA, 22 nt, Human
uggcaaacuggaggaagcccug

SEQ ID NO: 849017 - RNA, 21 nt, Human
gcuguugcccgccgccucuuc

SEQ ID NO: 849018 - RNA, 22 nt, Human
gaaauuauugcuagagacugca

SEQ ID NO: 849019 - RNA, 22 nt, Human
gcagaggcuguagggaagguug

SEQ ID NO: 849020 - RNA, 22 nt, Human
gagggcauaguuaaauaggagg

SEQ ID NO: 849021 - RNA, 22 nt, Human
auuuagaacuuuguuugccaau

SEQ ID NO: 849022 - RNA, 22 nt, Human
uuucuucauagaccuugucuug

SEQ ID NO: 849023 - RNA, 22 nt, Human
ucuucagacccuuagcugugau

SEQ ID NO: 849024 - RNA, 22 nt, Human
aagaacuguuuacaauuuucac

SEQ ID NO: 849025 - RNA, 22 nt, Human
ucuucucuacaccagcagcccc

SEQ ID NO: 849026 - RNA, 21 nt, Human
uucuccccagcgaauccucgg

SEQ ID NO: 849027 - RNA, 22 nt, Human
uuggccaaggaaguagcaacgg

SEQ ID NO: 849028 - RNA, 22 nt, Human
aggauauuugcuuaagauagcu

SEQ ID NO: 849029 - RNA, 23 nt, Human
agaugaggcuucuccauguuggu

SEQ ID NO: 849030 - RNA, 21 nt, Human
agaggcaggcauuaaguacac

SEQ ID NO: 849031 - RNA, 22 nt, Human
uuagaaagggugucugaaucug

SEQ ID NO: 849032 - RNA, 22 nt, Human
uggcaacaugucgaagugcugu

SEQ ID NO: 849033 - RNA, 22 nt, Human
aacuucugccaaacagcuguua

SEQ ID NO: 849034 - RNA, 22 nt, Human
auuaggaaauguguugcaagca

SEQ ID NO: 849035 - RNA, 22 nt, Human
cucuccucagaacaggcccucu

SEQ ID NO: 849036 - RNA, 22 nt, Human
cccuggaggcggagcuugcagu

SEQ ID NO: 849037 - RNA, 22 nt, Human
uccaugaguuugaggaaaagag

SEQ ID NO: 849038 - RNA, 22 nt, Human
ugaggcucuccaagcagaugag

SEQ ID NO: 849039 - RNA, 22 nt, Human
auuaguagcuguaauaacuggg

SEQ ID NO: 849040 - RNA, 22 nt, Human
caagagagaugcagcucacuca

SEQ ID NO: 849041 - RNA, 17 nt, Human
uuucuccuuccaucuca

SEQ ID NO: 849042 - RNA, 22 nt, Human
gagggaggugauacugaacgua

SEQ ID NO: 849043 - RNA, 22 nt, Human
uagggaggaggguuuucaaauc

SEQ ID NO: 849044 - RNA, 22 nt, Human
ccugagccuggcucaugcacuc

SEQ ID NO: 849045 - RNA, 22 nt, Human
agaggcaggagguugacuugag

SEQ ID NO: 849046 - RNA, 22 nt, Human
guucucucugcuuccaagaugg

SEQ ID NO: 849047 - RNA, 22 nt, Human
aggauguuaucugugcaggugg

SEQ ID NO: 849048 - RNA, 22 nt, Human
cagagcugcuucccaguuugug

SEQ ID NO: 849049 - RNA, 19 nt, Human
cugaagucuuuucagcugg

SEQ ID NO: 849050 - RNA, 22 nt, Human
uuugaaaggguuaugagacuga

SEQ ID NO: 849051 - RNA, 22 nt, Human
ucugcugugggucuauauuuua

SEQ ID NO: 849052 - RNA, 22 nt, Human
acucagaaugacugaugcugug

SEQ ID NO: 849053 - RNA, 22 nt, Human
guguguuucagaagccaggugu

SEQ ID NO: 849054 - RNA, 22 nt, Human
ccaaaugugccuguuucaacaa

SEQ ID NO: 849055 - RNA, 22 nt, Human
cagcuggcaaguggagcagggu

SEQ ID NO: 849056 - RNA, 20 nt, Human
uucuucucuaguuaucuuca

SEQ ID NO: 849057 - RNA, 22 nt, Human
uuauuuacaacucuucucuucc

SEQ ID NO: 849058 - RNA, 22 nt, Human
cccaggagauaacguucccaag

SEQ ID NO: 849059 - RNA, 22 nt, Human
aguuauuacucuuuaacauauu

SEQ ID NO: 849060 - RNA, 22 nt, Human
gcaggcugcugagauccuuagg

SEQ ID NO: 849061 - RNA, 22 nt, Human
aggccagaaauuuggaguaugu

SEQ ID NO: 849062 - RNA, 19 nt, Human
ugcaagcuuuuucuuguua

SEQ ID NO: 849063 - RNA, 22 nt, Human
uagugcuuuaaguuuacagaga

SEQ ID NO: 849064 - RNA, 22 nt, Human
aaggcagcuucaccacagcauu

SEQ ID NO: 849065 - RNA, 22 nt, Human
uguagaaagaauauguuucaua

SEQ ID NO: 849066 - RNA, 22 nt, Human
cagccuuuuccauguauuguug

SEQ ID NO: 849067 - RNA, 22 nt, Human
auugcuaggaacagguugcacc

SEQ ID NO: 849068 - RNA, 22 nt, Human
aaagauuugaguucugcuuaua

SEQ ID NO: 849069 - RNA, 22 nt, Human
ggcaggcaaugaggaugggaag

SEQ ID NO: 849070 - RNA, 22 nt, Human
cugcugugaguuuggaggucua

SEQ ID NO: 849071 - RNA, 22 nt, Human
gccucugcaauuacauugugcc

SEQ ID NO: 849072 - RNA, 22 nt, Human
gagggccagcagccucagcaug

SEQ ID NO: 849073 - RNA, 22 nt, Human
guucacagaaauuguguaccuc

SEQ ID NO: 849074 - RNA, 22 nt, Human
ccuggccauuugaacuucagac

SEQ ID NO: 849075 - RNA, 22 nt, Human
auuaaauuggacgcugggggaa

SEQ ID NO: 849076 - RNA, 22 nt, Human
gagugucacuugaugcagggca

SEQ ID NO: 849077 - RNA, 22 nt, Human
gaggcagcagggcugguuccuu

SEQ ID NO: 849078 - RNA, 23 nt, Human
uauacacauguggcaguauagug

SEQ ID NO: 849079 - RNA, 22 nt, Human
gagagucuagugcaccuaguuu

SEQ ID NO: 849080 - RNA, 22 nt, Human
agugcuuuauguuguugugcaa

SEQ ID NO: 849081 - RNA, 22 nt, Human
acaggcuggugguccuggccau

SEQ ID NO: 849082 - RNA, 17 nt, Human
gagacagcaggagcccc

SEQ ID NO: 849083 - RNA, 22 nt, Human
agacaggaugcauacucuuggu

SEQ ID NO: 849084 - RNA, 22 nt, Human
gccuccccaaagugcugacagc

SEQ ID NO: 849085 - RNA, 21 nt, Human
uaaggccaagucuauuucugu

SEQ ID NO: 849086 - RNA, 22 nt, Human
cugccuuugaaaguucuguuga

SEQ ID NO: 849087 - RNA, 22 nt, Human
uucuuaacucaaauauauaucc

SEQ ID NO: 849088 - RNA, 22 nt, Human
acaguuaucuuugaaauagaga

SEQ ID NO: 849089 - RNA, 22 nt, Human
auuagagcaguguauuaugaua

SEQ ID NO: 849090 - RNA, 22 nt, Human
ccugccucccagagguccucua

SEQ ID NO: 849091 - RNA, 22 nt, Human
uggcucagccauucguguugcc

SEQ ID NO: 849092 - RNA, 22 nt, Human
uggaaggaaagguagcagagaa

SEQ ID NO: 849093 - RNA, 22 nt, Human
uuuacuuuugguaaggucauuu

SEQ ID NO: 849094 - RNA, 22 nt, Human
cucugcaugccuugcucagaca

SEQ ID NO: 849095 - RNA, 22 nt, Human
uuggcaucaguguaggaccugu

SEQ ID NO: 849096 - RNA, 22 nt, Human
uugcugaaguuaaugcuugcaa

SEQ ID NO: 849097 - RNA, 22 nt, Human
gcugccugcucacccggccugg

SEQ ID NO: 849098 - RNA, 22 nt, Human
ggagggaaugucuagcauucuu

SEQ ID NO: 849099 - RNA, 22 nt, Human
uucaugcuuuuaccgcuguuaa

SEQ ID NO: 849100 - RNA, 22 nt, Human
auuuuacuuugugaauauugac

SEQ ID NO: 849101 - RNA, 22 nt, Human
ccugguggcgaauggugguagg

SEQ ID NO: 849102 - RNA, 21 nt, Human
auaagcaugcugauuacauuu

SEQ ID NO: 849103 - RNA, 22 nt, Human
aaaggugacugcagcagcuauu

SEQ ID NO: 849104 - RNA, 22 nt, Human
acaggcagcaaaaucagccuca

SEQ ID NO: 849105 - RNA, 19 nt, Human
agaggcagucuccaacagg

SEQ ID NO: 849106 - RNA, 22 nt, Human
ucagagaguuacacaaauuguu

SEQ ID NO: 849107 - RNA, 22 nt, Human
ucuucuccagugcuucugcaca

SEQ ID NO: 849108 - RNA, 22 nt, Human
aaucuauaugcuuuucacauac

SEQ ID NO: 849109 - RNA, 22 nt, Human
uucaggauucucucccauuuac

SEQ ID NO: 849110 - RNA, 22 nt, Human
gaaauauucuugucuuguuuuc

SEQ ID NO: 849111 - RNA, 22 nt, Human
agugcugacucugggcacagug

SEQ ID NO: 849112 - RNA, 18 nt, Human
aggccaaacuuguaagca

SEQ ID NO: 849113 - RNA, 22 nt, Human
ucaggcugauuucuuuugaggg

SEQ ID NO: 849114 - RNA, 22 nt, Human
augaaggcuguguggagccccc

SEQ ID NO: 849115 - RNA, 22 nt, Human
auacaacagaaaaugauuauuc

SEQ ID NO: 849116 - RNA, 22 nt, Human
ucugcuguaaagaauuucugcc

SEQ ID NO: 849117 - RNA, 22 nt, Human
uuucaguguaucuuccaaaagc

SEQ ID NO: 849118 - RNA, 22 nt, Human
cugucuggauauaccuuggcca

SEQ ID NO: 849119 - RNA, 22 nt, Human
agaggccggccgagcccauggg

SEQ ID NO: 849120 - RNA, 22 nt, Human
cagcaagagaggcagggcaaau

SEQ ID NO: 849121 - RNA, 22 nt, Human
ucuuuccaaggacucuguagca

SEQ ID NO: 849122 - RNA, 22 nt, Human
uagaaagagcauaguauuauaa

SEQ ID NO: 849123 - RNA, 22 nt, Human
caaggccauaagagauacaaaa

SEQ ID NO: 849124 - RNA, 22 nt, Human
cacaggagagcugggaggugcc

SEQ ID NO: 849125 - RNA, 22 nt, Human
uggcugaggcuuuucuuaaaga

SEQ ID NO: 849126 - RNA, 22 nt, Human
aauccugugugacucuggggag

SEQ ID NO: 849127 - RNA, 22 nt, Human
gagggcguucagucagugucuc

SEQ ID NO: 849128 - RNA, 22 nt, Human
uuuuaucuucauuccuaucuac

SEQ ID NO: 849129 - RNA, 22 nt, Human
cccaggaaaagcagugccagca

SEQ ID NO: 849130 - RNA, 22 nt, Human
uucaggauucugugucugacaa

SEQ ID NO: 849131 - RNA, 22 nt, Human
cagcaggaggugaguagcaggu

SEQ ID NO: 849132 - RNA, 22 nt, Human
aggagacauaacuaugaugaga

SEQ ID NO: 849133 - RNA, 22 nt, Human
cucuggcuucuaccuugcaguu

SEQ ID NO: 849134 - RNA, 22 nt, Human
ucugcagguguuggaaggguca

SEQ ID NO: 849135 - RNA, 22 nt, Human
ggugaaggucagagcaggaaaa

SEQ ID NO: 849136 - RNA, 22 nt, Human
ccaggagacccagggaaggagc

SEQ ID NO: 849137 - RNA, 22 nt, Human
aauuuguuaaaagugagugaca

SEQ ID NO: 849138 - RNA, 22 nt, Human
cugaggccggagcacugaagag

SEQ ID NO: 849139 - RNA, 22 nt, Human
aggaagcugccugggaugggaa

SEQ ID NO: 849140 - RNA, 22 nt, Human
ccuggccacagggcucugcauu

SEQ ID NO: 849141 - RNA, 22 nt, Human
gcagacagcauguugggcuauu

SEQ ID NO: 849142 - RNA, 22 nt, Human
gaauuauaggcaaagcagucau

SEQ ID NO: 849143 - RNA, 22 nt, Human
auaucacaguaguuguuuaguu

SEQ ID NO: 849144 - RNA, 22 nt, Human
gugcugaggugggugggcagcc

SEQ ID NO: 849145 - RNA, 22 nt, Human
gccaugaggaacuguaagacaa

SEQ ID NO: 849146 - RNA, 22 nt, Human
gaggcagcugggcuggugguuu

SEQ ID NO: 849147 - RNA, 22 nt, Human
gacccaggguauccagagcugc

SEQ ID NO: 849148 - RNA, 22 nt, Human
cugccucacauuggcuguguga

SEQ ID NO: 849149 - RNA, 22 nt, Human
auugaggcagcauaguucaggg

SEQ ID NO: 849150 - RNA, 22 nt, Human
gagcugagcagggagccucacu

SEQ ID NO: 849151 - RNA, 22 nt, Human
cagauaaauagacuuggucaga

SEQ ID NO: 849152 - RNA, 22 nt, Human
uuucagggagccuagaagagcu

SEQ ID NO: 849153 - RNA, 22 nt, Human
ugaggggagacagaguggacuc

SEQ ID NO: 849154 - RNA, 22 nt, Human
cuccacagcucaggcucagagu

SEQ ID NO: 849155 - RNA, 20 nt, Human
gcccaggaucucugaggcau

SEQ ID NO: 849156 - RNA, 23 nt, Human
ccacuagcaccuguucaacuucu

SEQ ID NO: 849157 - RNA, 22 nt, Human
uuaauuaaauucaugagcauug

SEQ ID NO: 849158 - RNA, 22 nt, Human
uuuuaguuguacugucaacagu

SEQ ID NO: 849159 - RNA, 22 nt, Human
uggcugaguucuccaggaguag

SEQ ID NO: 849160 - RNA, 22 nt, Human
agaccaagaaaggaugaggauc

SEQ ID NO: 849161 - RNA, 18 nt, Human
gaggcagcuagcaauuuu

SEQ ID NO: 849162 - RNA, 22 nt, Human
uuuggacuuagccugcagaauu

SEQ ID NO: 849163 - RNA, 22 nt, Human
aaagauuauggcauugaaauac

SEQ ID NO: 849164 - RNA, 22 nt, Human
cugccaccaugccccagcagag

SEQ ID NO: 849165 - RNA, 22 nt, Human
uugcuuuguuacugcaguuucc

SEQ ID NO: 849166 - RNA, 22 nt, Human
ggagaggauguuuuaguaacuu

SEQ ID NO: 849167 - RNA, 22 nt, Human
ggcagaggaggggugaauuugc

SEQ ID NO: 849168 - RNA, 22 nt, Human
ccaggagauaagcugaguuuau

SEQ ID NO: 849169 - RNA, 22 nt, Human
ugcugaugaguccuucuaucgc

SEQ ID NO: 849170 - RNA, 22 nt, Human
uccauucauucauugaugaaca

SEQ ID NO: 849171 - RNA, 22 nt, Human
ugcaccuuguugcuuuuacgaa

SEQ ID NO: 849172 - RNA, 22 nt, Human
ggaggggaggauuaaugacaaa

SEQ ID NO: 849173 - RNA, 22 nt, Human
ugcugagggcuguuaaggaagc

SEQ ID NO: 849174 - RNA, 22 nt, Human
ucauuuuucacacagggucacc

SEQ ID NO: 849175 - RNA, 22 nt, Human
aggcggcuccgggagugugggc

SEQ ID NO: 849176 - RNA, 22 nt, Human
cagcagagcugggcuuugaauu

SEQ ID NO: 849177 - RNA, 22 nt, Human
cagcugcuguuacugcuuauua

SEQ ID NO: 849178 - RNA, 22 nt, Human
gcaagcugcucuuauguggagg

SEQ ID NO: 849179 - RNA, 22 nt, Human
cuguaugaggaucagacuggac

SEQ ID NO: 849180 - RNA, 22 nt, Human
uucaggauccccuugaugggcu

SEQ ID NO: 849181 - RNA, 22 nt, Human
agaccauagggaccucagguug

SEQ ID NO: 849182 - RNA, 22 nt, Human
aaggcugaguaaaacagagaac

SEQ ID NO: 849183 - RNA, 22 nt, Human
gcuggccaaaguguaccuggag

SEQ ID NO: 849184 - RNA, 19 nt, Human
ucuuggcuuugucuacugu

SEQ ID NO: 849185 - RNA, 22 nt, Human
ccacugcuaacuugcugcagcu

SEQ ID NO: 849186 - RNA, 22 nt, Human
ucuaagccuaggaaaugaguuu

SEQ ID NO: 849187 - RNA, 22 nt, Human
cuggcgcaacagaaaaucugga

SEQ ID NO: 849188 - RNA, 19 nt, Human
agucuuucccacucgucuu

SEQ ID NO: 849189 - RNA, 22 nt, Human
caggagaggcuguacguuucuc

SEQ ID NO: 849190 - RNA, 22 nt, Human
ccucaugguacuuacuguagcu

SEQ ID NO: 849191 - RNA, 22 nt, Human
ugcaccuuguccauuuuuggcc

SEQ ID NO: 849192 - RNA, 22 nt, Human
cccugccuugggguccacaccg

SEQ ID NO: 849193 - RNA, 22 nt, Human
ugugugucagagucuccauggu

SEQ ID NO: 849194 - RNA, 22 nt, Human
gcugccuggaauaacggcuggc

SEQ ID NO: 849195 - RNA, 22 nt, Human
uggcagcugaggggaggcuuug

SEQ ID NO: 849196 - RNA, 22 nt, Human
cccaggagguggaguucacagu

SEQ ID NO: 849197 - RNA, 22 nt, Human
cuuugaauugccguuucaucug

SEQ ID NO: 849198 - RNA, 22 nt, Human
uuuaagauucaguaaggcaaac

SEQ ID NO: 849199 - RNA, 22 nt, Human
gcgucugaguugcgggggcuca

SEQ ID NO: 849200 - RNA, 22 nt, Human
ccuccuggauggauuuggugga

SEQ ID NO: 849201 - RNA, 22 nt, Human
caucacccggaacugugucugc

SEQ ID NO: 849202 - RNA, 22 nt, Human
auucuucacaccuguuccuguu

SEQ ID NO: 849203 - RNA, 21 nt, Human
uucugggaaaugagcuggggc

SEQ ID NO: 849204 - RNA, 22 nt, Human
cagugcugugcuggaagcuguu

SEQ ID NO: 849205 - RNA, 22 nt, Human
aucugccuccaaguccaugugu

SEQ ID NO: 849206 - RNA, 22 nt, Human
ggaggggucucuagcgaggaga

SEQ ID NO: 849207 - RNA, 22 nt, Human
aagggcagaauagagaagaugg

SEQ ID NO: 849208 - RNA, 22 nt, Human
gugcauuuaggucacaugaugu

SEQ ID NO: 849209 - RNA, 22 nt, Human
cuacccagagugaaucucuuaa

SEQ ID NO: 849210 - RNA, 22 nt, Human
gcucaggaaauaguuuaguguu

SEQ ID NO: 849211 - RNA, 22 nt, Human
auccagucaaaauuaguaaggu

SEQ ID NO: 849212 - RNA, 22 nt, Human
uguggaaaauuggaacguuccu

SEQ ID NO: 849213 - RNA, 22 nt, Human
agaagucauuuauguuagauga

SEQ ID NO: 849214 - RNA, 22 nt, Human
cagagggcacaugguuuccuca

SEQ ID NO: 849215 - RNA, 23 nt, Human
uugcuuucaucaugagaugcucc

SEQ ID NO: 849216 - RNA, 22 nt, Human
aauguauuccucaugcaagagu

SEQ ID NO: 849217 - RNA, 22 nt, Human
ggcugagcaauuuugaugacau

SEQ ID NO: 849218 - RNA, 22 nt, Human
uggcagcuggcucugcgcaggc

SEQ ID NO: 849219 - RNA, 22 nt, Human
agucugaguaucucugagccag

SEQ ID NO: 849220 - RNA, 22 nt, Human
ucuggagaagcagugagaguca

SEQ ID NO: 849221 - RNA, 22 nt, Human
guuagagcacauacuuugcaug

SEQ ID NO: 849222 - RNA, 17 nt, Human
uggcagcugaaagcucu

SEQ ID NO: 849223 - RNA, 22 nt, Human
uugugaguagugccgcaauaaa

SEQ ID NO: 849224 - RNA, 22 nt, Human
cagcagagaccaagugauuuga

SEQ ID NO: 849225 - RNA, 21 nt, Human
ugcugcugaucgggguuggcu

SEQ ID NO: 849226 - RNA, 22 nt, Human
uccuggcccucugcaaacgcca

SEQ ID NO: 849227 - RNA, 22 nt, Human
ccaggagaugauguuggggauu

SEQ ID NO: 849228 - RNA, 22 nt, Human
agugagggaugaagaacugcgg

SEQ ID NO: 849229 - RNA, 22 nt, Human
acaggagacccugcugguucug

SEQ ID NO: 849230 - RNA, 21 nt, Human
uucugagcacucaucacuguc

SEQ ID NO: 849231 - RNA, 22 nt, Human
aggucagcaugaguagaaggua

SEQ ID NO: 849232 - RNA, 20 nt, Human
augugucuguaaacaacucu

SEQ ID NO: 849233 - RNA, 22 nt, Human
gaaauacuguaaaguuauuauu

SEQ ID NO: 849234 - RNA, 22 nt, Human
uaagauuauacuuaaagagaaa

SEQ ID NO: 849235 - RNA, 22 nt, Human
agaggggaguccuaaucugauu

SEQ ID NO: 849236 - RNA, 21 nt, Human
cggccaaauuccuccuaggga

SEQ ID NO: 849237 - RNA, 22 nt, Human
auauacuuccccauuauggggg

SEQ ID NO: 849238 - RNA, 22 nt, Human
cagaggcauacucccagucuug

SEQ ID NO: 849239 - RNA, 22 nt, Human
gcugaggugaggcuggaaagga

SEQ ID NO: 849240 - RNA, 22 nt, Human
cugggccagcaacugcaaugga

SEQ ID NO: 849241 - RNA, 22 nt, Human
ccugccugcaccuucucugggg

SEQ ID NO: 849242 - RNA, 22 nt, Human
cuucagaagccugcagccuuug

SEQ ID NO: 849243 - RNA, 22 nt, Human
ccuggccacccagccuuggcca

SEQ ID NO: 849244 - RNA, 22 nt, Human
gagggcugugaaggagcggguu

SEQ ID NO: 849245 - RNA, 22 nt, Human
uuccaugaaggagacugagaag

SEQ ID NO: 849246 - RNA, 22 nt, Human
uuuaaauuauaguuaaugucug

SEQ ID NO: 849247 - RNA, 22 nt, Human
auuggcagaaacagcagggcca

SEQ ID NO: 849248 - RNA, 22 nt, Human
acuuucugucaucuagacaagu

SEQ ID NO: 849249 - RNA, 22 nt, Human
gguggaguaauucgcagagguu

SEQ ID NO: 849250 - RNA, 22 nt, Human
gggagucugggcuagacuccuu

SEQ ID NO: 849251 - RNA, 23 nt, Human
acugucugauauguuuuccauca

SEQ ID NO: 849252 - RNA, 22 nt, Human
aaagaaauagauggcauuuaaa

SEQ ID NO: 849253 - RNA, 23 nt, Human
cuuugccacccagagccugacag

SEQ ID NO: 849254 - RNA, 22 nt, Human
caggcagcaggagcccugcucg

SEQ ID NO: 849255 - RNA, 22 nt, Human
aggcaguuguugcugagcagcu

SEQ ID NO: 849256 - RNA, 22 nt, Human
ugaggccagcuucagcagugga

SEQ ID NO: 849257 - RNA, 22 nt, Human
ugacauuauuaucaugucacca

SEQ ID NO: 849258 - RNA, 22 nt, Human
aggcagugcucaagacagcagc

SEQ ID NO: 849259 - RNA, 22 nt, Human
cagucuuuguucccauuacuga

SEQ ID NO: 849260 - RNA, 22 nt, Human
gagcuguccaagauggucguaa

SEQ ID NO: 849261 - RNA, 22 nt, Human
uggcugagggggcaguucagga

SEQ ID NO: 849262 - RNA, 22 nt, Human
ugccaggauggccagggggcca

SEQ ID NO: 849263 - RNA, 22 nt, Human
uauuagguuggugcaacaguaa

SEQ ID NO: 849264 - RNA, 22 nt, Human
ugaggcucagagcaccugcucc

SEQ ID NO: 849265 - RNA, 22 nt, Human
acuccuggggauccauuccuuu

SEQ ID NO: 849266 - RNA, 22 nt, Human
agaaaugaagcaggaguuauua

SEQ ID NO: 849267 - RNA, 22 nt, Human
uaagaugaccuuauaaagagca

SEQ ID NO: 849268 - RNA, 22 nt, Human
accaggagguguuugcucaagu

SEQ ID NO: 849269 - RNA, 17 nt, Human
gcugagaggcagcacag

SEQ ID NO: 849270 - RNA, 21 nt, Human
acauuauaauucauauuccac

SEQ ID NO: 849271 - RNA, 22 nt, Human
ucucuucuaauuuucccgagua

SEQ ID NO: 849272 - RNA, 22 nt, Human
gcuccugggcccugggcuaacu

SEQ ID NO: 849273 - RNA, 22 nt, Human
ugucaccaaguugaugaaugca

SEQ ID NO: 849274 - RNA, 22 nt, Human
uaaauuaaagauuggagaagga

SEQ ID NO: 849275 - RNA, 22 nt, Human
ggauguugauugaauggccauu

SEQ ID NO: 849276 - RNA, 22 nt, Human
cugagguaugugggacuagccu

SEQ ID NO: 849277 - RNA, 22 nt, Human
acuccuggguugcaguccucaa

SEQ ID NO: 849278 - RNA, 19 nt, Human
ucucacaguuuccuugccu

SEQ ID NO: 849279 - RNA, 22 nt, Human
ugcuggaauaauuucauguuaa

SEQ ID NO: 849280 - RNA, 22 nt, Human
ugucugccugcgggccggcaca

SEQ ID NO: 849281 - RNA, 22 nt, Human
aggcugaggaucccuguguucu

SEQ ID NO: 849282 - RNA, 22 nt, Human
aguggcagagguugacugcagu

SEQ ID NO: 849283 - RNA, 22 nt, Human
aaaccgcaauuacuuuugcguc

SEQ ID NO: 849284 - RNA, 22 nt, Human
aggagcagcuucugaaccaugu

SEQ ID NO: 849285 - RNA, 23 nt, Human
ugucuggcucauggugggucuca

SEQ ID NO: 849286 - RNA, 22 nt, Human
gaggccagaguuccccgaguca

SEQ ID NO: 849287 - RNA, 22 nt, Human
uuuccaagagcuuauuucugaa

SEQ ID NO: 849288 - RNA, 22 nt, Human
aaaguauuugugauuuuuacca

SEQ ID NO: 849289 - RNA, 22 nt, Human
gcuccucugucaaaugagagug

SEQ ID NO: 849290 - RNA, 22 nt, Human
gagggagggccaggucccaacc

SEQ ID NO: 849291 - RNA, 22 nt, Human
caggcugccgugggguccaggc

SEQ ID NO: 849292 - RNA, 23 nt, Human
gcugccucuguuggucuucaguu

SEQ ID NO: 849293 - RNA, 22 nt, Human
uuugacauggaauaacucauuu

SEQ ID NO: 849294 - RNA, 22 nt, Human
uuugcauaaaggagcauuucuc

SEQ ID NO: 849295 - RNA, 22 nt, Human
gcaggcugagaguccaagaagg

SEQ ID NO: 849296 - RNA, 22 nt, Human
uuagaaaggagcuuauuucuuu

SEQ ID NO: 849297 - RNA, 21 nt, Human
aguugcugcugcugcagguga

SEQ ID NO: 849298 - RNA, 22 nt, Human
uuucacaaaugucuuuaacuug

SEQ ID NO: 849299 - RNA, 22 nt, Human
cuuuggcagccucugcuauuga

SEQ ID NO: 849300 - RNA, 22 nt, Human
uuugaaaggugucgagaugugu

SEQ ID NO: 849301 - RNA, 22 nt, Human
ugaggcucacgaacagaagacu

SEQ ID NO: 849302 - RNA, 22 nt, Human
aaugcauauguaggcaagcagu

SEQ ID NO: 849303 - RNA, 16 nt, Human
ccccaggacuuggcac

SEQ ID NO: 849304 - RNA, 22 nt, Human
ugcccugggaacacagaugcca

SEQ ID NO: 849305 - RNA, 22 nt, Human
uggcuucucaaaauaacugguu

SEQ ID NO: 849306 - RNA, 22 nt, Human
auguucuuucagccagugcauc

SEQ ID NO: 849307 - RNA, 22 nt, Human
gccaggagaaaaggcgaaugau

SEQ ID NO: 849308 - RNA, 22 nt, Human
aucugccugagucuagguuuuc

SEQ ID NO: 849309 - RNA, 22 nt, Human
uccugccucuccaugcuaacua

SEQ ID NO: 849310 - RNA, 22 nt, Human
cagcuguggcugccacugcucc

SEQ ID NO: 849311 - RNA, 20 nt, Human
uccaggagguuaguguggcu

SEQ ID NO: 849312 - RNA, 18 nt, Human
gcagaugaguaguguacc

SEQ ID NO: 849313 - RNA, 22 nt, Human
agcauaaguugguacagccacu

SEQ ID NO: 849314 - RNA, 22 nt, Human
uuucaguuacugcuauaucauu

SEQ ID NO: 849315 - RNA, 22 nt, Human
cuccuggaagcccgcccugcug

SEQ ID NO: 849316 - RNA, 22 nt, Human
agagggcagggcgguaaguccu

SEQ ID NO: 849317 - RNA, 22 nt, Human
gaaaggccagcucacagaugag

SEQ ID NO: 849318 - RNA, 22 nt, Human
ucagggugaaccaggcaggaau

SEQ ID NO: 849319 - RNA, 22 nt, Human
aggaaaacacaguauugaugga

SEQ ID NO: 849320 - RNA, 22 nt, Human
uucucuuuugugaugugagaug

SEQ ID NO: 849321 - RNA, 22 nt, Human
uucagaaagugaaucuuguuau

SEQ ID NO: 849322 - RNA, 22 nt, Human
ugaggcccucugggcugguccu

SEQ ID NO: 849323 - RNA, 22 nt, Human
ggagaggggcaaguuuaucuag

SEQ ID NO: 849324 - RNA, 22 nt, Human
cccuggagcuagucugagcaga

SEQ ID NO: 849325 - RNA, 22 nt, Human
ccaggagauuuuuccauagcac

SEQ ID NO: 849326 - RNA, 23 nt, Human
cagggcugguagggaagagcgug

SEQ ID NO: 849327 - RNA, 22 nt, Human
guucuucagucacaucacagaa

SEQ ID NO: 849328 - RNA, 22 nt, Human
cacagcaauagcuaacugauac

SEQ ID NO: 849329 - RNA, 22 nt, Human
caaauaguaugagcaaugauuc

SEQ ID NO: 849330 - RNA, 22 nt, Human
uucauucuuauuugugaucugg

SEQ ID NO: 849331 - RNA, 22 nt, Human
auuuauuaugggauuuggcaca

SEQ ID NO: 849332 - RNA, 22 nt, Human
cugagccaugagccugcgccca

SEQ ID NO: 849333 - RNA, 22 nt, Human
uaacugguuaagggugaaaucc

SEQ ID NO: 849334 - RNA, 22 nt, Human
uuugaaauaugaggcauuauga

SEQ ID NO: 849335 - RNA, 22 nt, Human
uguuugaauuuugcuaacgugu

SEQ ID NO: 849336 - RNA, 22 nt, Human
ucaggaauccagacagggcaca

SEQ ID NO: 849337 - RNA, 22 nt, Human
aaggagagguuguccguguugu

SEQ ID NO: 849338 - RNA, 19 nt, Human
ccuggcucugagcccagcc

SEQ ID NO: 849339 - RNA, 22 nt, Human
ucuccuggucaccucagaaguc

SEQ ID NO: 849340 - RNA, 22 nt, Human
gugcugagcaucaugaggcacu

SEQ ID NO: 849341 - RNA, 22 nt, Human
ucuuuauuuaagucuguuguaa

SEQ ID NO: 849342 - RNA, 20 nt, Human
uccaugaguuagagacuaua

SEQ ID NO: 849343 - RNA, 22 nt, Human
cugggucccacagccugcuggg

SEQ ID NO: 849344 - RNA, 22 nt, Human
cugaggucaauuaaucaacaac

SEQ ID NO: 849345 - RNA, 22 nt, Human
auuauuauauagggaaaguccc

SEQ ID NO: 849346 - RNA, 22 nt, Human
cucaguuucuuacucuguauaa

SEQ ID NO: 849347 - RNA, 22 nt, Human
cauuguuaauugguaucuuaca

SEQ ID NO: 849348 - RNA, 22 nt, Human
caaaugaagguggugggucauu

SEQ ID NO: 849349 - RNA, 22 nt, Human
uggcuucugguuuauccuuaua

SEQ ID NO: 849350 - RNA, 22 nt, Human
ucagcugcucaaauuuauguca

SEQ ID NO: 849351 - RNA, 18 nt, Human
ggucuuuaggucaguguc

SEQ ID NO: 849352 - RNA, 22 nt, Human
cacaugaguccugccagguaug

SEQ ID NO: 849353 - RNA, 17 nt, Human
acucaggaucugggagu

SEQ ID NO: 849354 - RNA, 22 nt, Human
aucagcugcuacauuggccucu

SEQ ID NO: 849355 - RNA, 22 nt, Human
gacuuucuugcagaaauauucc

SEQ ID NO: 849356 - RNA, 22 nt, Human
acccagaggcggagguugcagu

SEQ ID NO: 849357 - RNA, 22 nt, Human
uugaaggacauccuauuucuag

SEQ ID NO: 849358 - RNA, 22 nt, Human
gguuugaacagcuuuggagaag

SEQ ID NO: 849359 - RNA, 22 nt, Human
acugagguagggcacaccuagg

SEQ ID NO: 849360 - RNA, 22 nt, Human
gucuucaacaauaacuaccacu

SEQ ID NO: 849361 - RNA, 22 nt, Human
aucugcagaggacaggcgagga

SEQ ID NO: 849362 - RNA, 22 nt, Human
gcaucuaaauaaacgugggagu

SEQ ID NO: 849363 - RNA, 22 nt, Human
uggcagcugagugcacccccuc

SEQ ID NO: 849364 - RNA, 22 nt, Human
cccaggagacauauagaaggac

SEQ ID NO: 849365 - RNA, 22 nt, Human
gcuggcuugauaguuucugcuu

SEQ ID NO: 849366 - RNA, 22 nt, Human
gcaugucaugucauguaggaau

SEQ ID NO: 849367 - RNA, 22 nt, Human
cuguggaaggccuguccugaaa

SEQ ID NO: 849368 - RNA, 22 nt, Human
ggaggggagauguuugggcuca

SEQ ID NO: 849369 - RNA, 18 nt, Human
uggcagcuagguaaagaa

SEQ ID NO: 849370 - RNA, 22 nt, Human
uagugcuugagucucuccguac

SEQ ID NO: 849371 - RNA, 22 nt, Human
gcugaggcugggagcagccugu

SEQ ID NO: 849372 - RNA, 22 nt, Human
ucaggcuggggugcuaaggugu

SEQ ID NO: 849373 - RNA, 22 nt, Human
gaggccaggaagcccaagauca

SEQ ID NO: 849374 - RNA, 22 nt, Human
aaggcugaggcagugaggcaga

SEQ ID NO: 849375 - RNA, 22 nt, Human
cugcuuugauuagaagaguaca

SEQ ID NO: 849376 - RNA, 22 nt, Human
acuggccaugggauuuauauuu

SEQ ID NO: 849377 - RNA, 22 nt, Human
gcaggcugugguauguugggca

SEQ ID NO: 849378 - RNA, 22 nt, Human
ggcugcagggcagcuggugugg

SEQ ID NO: 849379 - RNA, 22 nt, Human
cugagggugcuauucuugccuu

SEQ ID NO: 849380 - RNA, 22 nt, Human
cuggcaguguccagcucgugau

SEQ ID NO: 849381 - RNA, 22 nt, Human
uaaggccauuauggugggcccg

SEQ ID NO: 849382 - RNA, 22 nt, Human
ucugggaacacacgucacuuca

SEQ ID NO: 849383 - RNA, 22 nt, Human
uguucauuuggcccuuuuguau

SEQ ID NO: 849384 - RNA, 22 nt, Human
gcaggagagccagcaggcuucc

SEQ ID NO: 849385 - RNA, 22 nt, Human
ugugaacuggcagguggacggg

SEQ ID NO: 849386 - RNA, 22 nt, Human
ugcugagggcagaugaauuaga

SEQ ID NO: 849387 - RNA, 21 nt, Human
ccaggcuggccaugguauuga

SEQ ID NO: 849388 - RNA, 22 nt, Human
cugagauggaguuucgcucuuc

SEQ ID NO: 849389 - RNA, 22 nt, Human
uggcugagccacuuguucagau

SEQ ID NO: 849390 - RNA, 22 nt, Human
aagggcugagcacagugagcca

SEQ ID NO: 849391 - RNA, 22 nt, Human
accccagaggcggaggcugcag

SEQ ID NO: 849392 - RNA, 22 nt, Human
auuugcuuucagguauaaaagg

SEQ ID NO: 849393 - RNA, 22 nt, Human
gcuccucuucucccacugaaug

SEQ ID NO: 849394 - RNA, 21 nt, Human
uuucuucacuuugccccaugu

SEQ ID NO: 849395 - RNA, 22 nt, Human
uggcagcugguacagugggucu

SEQ ID NO: 849396 - RNA, 22 nt, Human
ucauuauccuaguaucuugaau

SEQ ID NO: 849397 - RNA, 22 nt, Human
gaggcagcugaagcuucaaaga

SEQ ID NO: 849398 - RNA, 22 nt, Human
guauuaggaaauaugaagaaag

SEQ ID NO: 849399 - RNA, 22 nt, Human
aaacuggugucacugagggcug

SEQ ID NO: 849400 - RNA, 22 nt, Human
ucuaagaucuacuauacaugug

SEQ ID NO: 849401 - RNA, 22 nt, Human
cugccuggguucaaguccuguu

SEQ ID NO: 849402 - RNA, 22 nt, Human
agcuggcagcucucagggguac

SEQ ID NO: 849403 - RNA, 22 nt, Human
aaggcagcagugcacgacugau

SEQ ID NO: 849404 - RNA, 22 nt, Human
ccagguaggagagagggauccu

SEQ ID NO: 849405 - RNA, 21 nt, Human
auggagggaccagggaagcag

SEQ ID NO: 849406 - RNA, 22 nt, Human
gaucuucuagcagaaguaauuu

SEQ ID NO: 849407 - RNA, 22 nt, Human
caugcugugugguuagaacugu

SEQ ID NO: 849408 - RNA, 22 nt, Human
aacuuucuccagugccaacuau

SEQ ID NO: 849409 - RNA, 22 nt, Human
uggcagaguucgcugugccuuu

SEQ ID NO: 849410 - RNA, 22 nt, Human
uucauucuugucuuuguauagu

SEQ ID NO: 849411 - RNA, 22 nt, Human
aggcugugaacucuaugcugaa

SEQ ID NO: 849412 - RNA, 17 nt, Human
gaggacagggaaguagg

SEQ ID NO: 849413 - RNA, 22 nt, Human
agagcagauggagcuggaagag

SEQ ID NO: 849414 - RNA, 19 nt, Human
uuagccauccacagugaaa

SEQ ID NO: 849415 - RNA, 22 nt, Human
cagcugaguuacucugaggucu

SEQ ID NO: 849416 - RNA, 22 nt, Human
ccaggaaaauaccaagcuuuaa

SEQ ID NO: 849417 - RNA, 23 nt, Human
uucauuugucuacuucacuuguu

SEQ ID NO: 849418 - RNA, 22 nt, Human
ugaggcaggaauggggaaaagu

SEQ ID NO: 849419 - RNA, 21 nt, Human
ggcugcagggagcccuggggu

SEQ ID NO: 849420 - RNA, 22 nt, Human
uaauuauaaacugcaguaggua

SEQ ID NO: 849421 - RNA, 23 nt, Human
aaugauuucaugaugauagcagc

SEQ ID NO: 849422 - RNA, 20 nt, Human
cugagcccccagccugcagg

SEQ ID NO: 849423 - RNA, 22 nt, Human
uccuggcccgaucccugugaag

SEQ ID NO: 849424 - RNA, 22 nt, Human
uuacacaacaucuguauuauua

SEQ ID NO: 849425 - RNA, 22 nt, Human
acccaggaugauaauguucaca

SEQ ID NO: 849426 - RNA, 22 nt, Human
caaauguaaauucuuuugaagc

SEQ ID NO: 849427 - RNA, 22 nt, Human
agcugagguuaguauaaaugug

SEQ ID NO: 849428 - RNA, 22 nt, Human
agggcaguucaacuucauagug

SEQ ID NO: 849429 - RNA, 22 nt, Human
aucauucuagcuguuguguuga

SEQ ID NO: 849430 - RNA, 22 nt, Human
uaucuaaauggaauauuccaga

SEQ ID NO: 849431 - RNA, 17 nt, Human
gcugacccuggagaagu

SEQ ID NO: 849432 - RNA, 22 nt, Human
auguuuccauuuucuuguauca

SEQ ID NO: 849433 - RNA, 22 nt, Human
ucagucucuggggcuucuguuu

SEQ ID NO: 849434 - RNA, 22 nt, Human
auaaucuuucuuuuccagauag

SEQ ID NO: 849435 - RNA, 22 nt, Human
gcugagagcaaggacaaagcau

SEQ ID NO: 849436 - RNA, 22 nt, Human
aggcagauuuaggagaaaagaa

SEQ ID NO: 849437 - RNA, 23 nt, Human
aacuccugaaucgugagccaucu

SEQ ID NO: 849438 - RNA, 22 nt, Human
uguccccagguccucugccguc

SEQ ID NO: 849439 - RNA, 20 nt, Human
acaggggcagcacaauaaug

SEQ ID NO: 849440 - RNA, 22 nt, Human
gucauauacacugcauguaauc

SEQ ID NO: 849441 - RNA, 22 nt, Human
ccucaggaaccacauugcugcu

SEQ ID NO: 849442 - RNA, 22 nt, Human
caacuccuggcuguuaggcaca

SEQ ID NO: 849443 - RNA, 22 nt, Human
aaggcagcaagaauuccagguu

SEQ ID NO: 849444 - RNA, 22 nt, Human
aaugccuuggagagccuagagg

SEQ ID NO: 849445 - RNA, 22 nt, Human
ugaaagcagcaccaauaccauu

SEQ ID NO: 849446 - RNA, 22 nt, Human
acaauauuguacccagaaguuu

SEQ ID NO: 849447 - RNA, 22 nt, Human
accagcuggucaccugggcacu

SEQ ID NO: 849448 - RNA, 22 nt, Human
cugagccagggccacacaugga

SEQ ID NO: 849449 - RNA, 22 nt, Human
uuguaaauaguaguaagaugcc

SEQ ID NO: 849450 - RNA, 22 nt, Human
acagucuacuugagcuuguaua

SEQ ID NO: 849451 - RNA, 22 nt, Human
agaguucugcucuucucaguga

SEQ ID NO: 849452 - RNA, 22 nt, Human
ggucugaguagagggcuggcga

SEQ ID NO: 849453 - RNA, 22 nt, Human
accuauuuaugcaauuaugaaa

SEQ ID NO: 849454 - RNA, 19 nt, Human
ugagaggcuuaaggcagcu

SEQ ID NO: 849455 - RNA, 22 nt, Human
ccaggcuguaagagugauguug

SEQ ID NO: 849456 - RNA, 22 nt, Human
gauuuuauauggcauacugugg

SEQ ID NO: 849457 - RNA, 22 nt, Human
cccuggagguggagguugcagg

SEQ ID NO: 849458 - RNA, 22 nt, Human
uucaacuauuaugaauaaaauu

SEQ ID NO: 849459 - RNA, 18 nt, Human
ucauuuguuuugcaugaa

SEQ ID NO: 849460 - RNA, 22 nt, Human
uaguaacucuacacacgacacu

SEQ ID NO: 849461 - RNA, 22 nt, Human
cauuuucaugaguuucuguuca

SEQ ID NO: 849462 - RNA, 22 nt, Human
cugaguccagggacagaggcgu

SEQ ID NO: 849463 - RNA, 22 nt, Human
aagggaggccagagguuuugca

SEQ ID NO: 849464 - RNA, 18 nt, Human
aguaaagcuuauuacaug

SEQ ID NO: 849465 - RNA, 22 nt, Human
aaggcaguacuuuauguccaua

SEQ ID NO: 849466 - RNA, 22 nt, Human
cauuuauucauuugcuagggcu

SEQ ID NO: 849467 - RNA, 22 nt, Human
auacaucuugucagauucaugu

SEQ ID NO: 849468 - RNA, 22 nt, Human
uugaggucucuacagaagagug

SEQ ID NO: 849469 - RNA, 22 nt, Human
ucuuugaacuuggcugaucucu

SEQ ID NO: 849470 - RNA, 22 nt, Human
gacagguggggaaacuaaggua

SEQ ID NO: 849471 - RNA, 22 nt, Human
ugcauaaagugccauaguauua

SEQ ID NO: 849472 - RNA, 22 nt, Human
aggcagaggagaaugaucuucc

SEQ ID NO: 849473 - RNA, 22 nt, Human
cggccaaauugcagagagaagc

SEQ ID NO: 849474 - RNA, 20 nt, Human
uucugccuaggguuagccug

SEQ ID NO: 849475 - RNA, 19 nt, Human
uagggcuggccgggcggug

SEQ ID NO: 849476 - RNA, 22 nt, Human
uauuagguuggugcaaaauuaa

SEQ ID NO: 849477 - RNA, 22 nt, Human
uauuucagcccuacuacuuggc

SEQ ID NO: 849478 - RNA, 22 nt, Human
uggcacaaaucuagucccuggu

SEQ ID NO: 849479 - RNA, 22 nt, Human
cuuuuauuuugaauuaagggcu

SEQ ID NO: 849480 - RNA, 20 nt, Human
ccuggccaaugagauaggaa

SEQ ID NO: 849481 - RNA, 22 nt, Human
cccuggcagagggggcaggugc

SEQ ID NO: 849482 - RNA, 22 nt, Human
aacacugcugcuggguucugug

SEQ ID NO: 849483 - RNA, 22 nt, Human
ggugaagggugucauggcauuu

SEQ ID NO: 849484 - RNA, 23 nt, Human
gagugcagaauagacaugcagug

SEQ ID NO: 849485 - RNA, 22 nt, Human
ugcuuccuauccacacaaugcc

SEQ ID NO: 849486 - RNA, 22 nt, Human
cucagaagaacaaaggcucuac

SEQ ID NO: 849487 - RNA, 22 nt, Human
ugaacaguuucaagaaaacuuu

SEQ ID NO: 849488 - RNA, 22 nt, Human
cccuggaggagcuuagagcuug

SEQ ID NO: 849489 - RNA, 22 nt, Human
uccagccuaggggaacagcugc

SEQ ID NO: 849490 - RNA, 22 nt, Human
ggcagcuaggggcagggaauuc

SEQ ID NO: 849491 - RNA, 20 nt, Human
ccuggcugcauucaggacgg

SEQ ID NO: 849492 - RNA, 22 nt, Human
gaggcagcucuucugaaugggg

SEQ ID NO: 849493 - RNA, 22 nt, Human
gucuucuuuucagucugcuugu

SEQ ID NO: 849494 - RNA, 20 nt, Human
ccagaagagaugaucaucca

SEQ ID NO: 849495 - RNA, 22 nt, Human
uuuuucagccaugaauuacacu

SEQ ID NO: 849496 - RNA, 22 nt, Human
gugcugaguagaaugaaugccu

SEQ ID NO: 849497 - RNA, 22 nt, Human
aacugcuuguaaauaauguuga

SEQ ID NO: 849498 - RNA, 22 nt, Human
uagaacuggcggcuagaccacu

SEQ ID NO: 849499 - RNA, 22 nt, Human
ucuggagaggaggauguggaca

SEQ ID NO: 849500 - RNA, 22 nt, Human
cugucauuuaagacauucugga

SEQ ID NO: 849501 - RNA, 22 nt, Human
auguggcauucuuggucauuuc

SEQ ID NO: 849502 - RNA, 22 nt, Human
augaacagcauugaaauccagc

SEQ ID NO: 849503 - RNA, 22 nt, Human
uucucagagcacugcugacaaa

SEQ ID NO: 849504 - RNA, 22 nt, Human
aaagaaguguugaauuugcaag

SEQ ID NO: 849505 - RNA, 22 nt, Human
uguagcagugucuaccacauua

SEQ ID NO: 849506 - RNA, 22 nt, Human
gcuggccagggcugcucgcgga

SEQ ID NO: 849507 - RNA, 22 nt, Human
agccauuggcugccuggugcgu

SEQ ID NO: 849508 - RNA, 22 nt, Human
gagcaguguuuguggaccugga

SEQ ID NO: 849509 - RNA, 22 nt, Human
auuuauuaagcaucugcuaugu

SEQ ID NO: 849510 - RNA, 22 nt, Human
cagggcugcuggccgugcccuc

SEQ ID NO: 849511 - RNA, 22 nt, Human
guaggcagguggaggagugaag

SEQ ID NO: 849512 - RNA, 22 nt, Human
uaucuguugucuuuuacaugua

SEQ ID NO: 849513 - RNA, 22 nt, Human
gggcagcugccagaggccaugg

SEQ ID NO: 849514 - RNA, 22 nt, Human
uuaggaaagucucuuggcuggg

SEQ ID NO: 849515 - RNA, 18 nt, Human
agggagagaccgcggguc

SEQ ID NO: 849516 - RNA, 22 nt, Human
aucugacaaggccacauauucu

SEQ ID NO: 849517 - RNA, 22 nt, Human
gaggaaccaaaucagcuugcac

SEQ ID NO: 849518 - RNA, 22 nt, Human
ucuucauuuuauagcaucugug

SEQ ID NO: 849519 - RNA, 19 nt, Human
acaaaugauguugcacuga

SEQ ID NO: 849520 - RNA, 22 nt, Human
agggcagcacaaggcauggacu

SEQ ID NO: 849521 - RNA, 22 nt, Human
agcugcccuguggggaggguug

SEQ ID NO: 849522 - RNA, 22 nt, Human
auuagguuagugugcaagagaa

SEQ ID NO: 849523 - RNA, 22 nt, Human
cugagcugcaguccuggcucug

SEQ ID NO: 849524 - RNA, 22 nt, Human
ccaggagagcaggcgugcagcu

SEQ ID NO: 849525 - RNA, 22 nt, Human
ggugaguugggguucacagguc

SEQ ID NO: 849526 - RNA, 22 nt, Human
uuaggauagucuguuagaaaag

SEQ ID NO: 849527 - RNA, 22 nt, Human
agguaaacaggagaaaaugaga

SEQ ID NO: 849528 - RNA, 19 nt, Human
cugaggcccauguaccaug

SEQ ID NO: 849529 - RNA, 19 nt, Human
uucuccaggcugcagaggg

SEQ ID NO: 849530 - RNA, 22 nt, Human
cauagagugauguaagguaugu

SEQ ID NO: 849531 - RNA, 22 nt, Human
acaguggagaaggcaugaggcu

SEQ ID NO: 849532 - RNA, 22 nt, Human
agagggcaaguguaguccagua

SEQ ID NO: 849533 - RNA, 22 nt, Human
uccccaccuacacacugcuccu

SEQ ID NO: 849534 - RNA, 22 nt, Human
gcaggcagagguggaggagaca

SEQ ID NO: 849535 - RNA, 20 nt, Human
uuuuccagaaaguaucauug

SEQ ID NO: 849536 - RNA, 22 nt, Human
aguggaccagaagacugaagcu

SEQ ID NO: 849537 - RNA, 22 nt, Human
ugcuggcugcagugcugucaaa

SEQ ID NO: 849538 - RNA, 22 nt, Human
ggugaagguggaacgcagagca

SEQ ID NO: 849539 - RNA, 22 nt, Human
cuguguuggcuuuucucuugua

SEQ ID NO: 849540 - RNA, 22 nt, Human
gcuggccagugucccagggauc

SEQ ID NO: 849541 - RNA, 22 nt, Human
uaucuguuccaggcacucagcu

SEQ ID NO: 849542 - RNA, 22 nt, Human
uuggaacaggauucaauuaaag

SEQ ID NO: 849543 - RNA, 22 nt, Human
uucuucaaaacaacacuggccu

SEQ ID NO: 849544 - RNA, 22 nt, Human
aagaguuauaccuauuucuaac

SEQ ID NO: 849545 - RNA, 22 nt, Human
aggcugagacugugcauuagug

SEQ ID NO: 849546 - RNA, 19 nt, Human
aaagcagaggagcaucuga

SEQ ID NO: 849547 - RNA, 19 nt, Human
auuagcaugcuugaggaug

SEQ ID NO: 849548 - RNA, 22 nt, Human
agaacguggaauguggcuccuu

SEQ ID NO: 849549 - RNA, 22 nt, Human
aacugguagcugauuaaguaua

SEQ ID NO: 849550 - RNA, 22 nt, Human
agcugccgaugcccagcugcau

SEQ ID NO: 849551 - RNA, 22 nt, Human
gaaggccacaaaaaaugucaua

SEQ ID NO: 849552 - RNA, 22 nt, Human
uauacagucuuuugcuauauuc

SEQ ID NO: 849553 - RNA, 22 nt, Human
auauaauaguuucauaaaggcu

SEQ ID NO: 849554 - RNA, 23 nt, Human
acagaaaguucugcuggacagag

SEQ ID NO: 849555 - RNA, 22 nt, Human
ggcugaguggcugggucuaguu

SEQ ID NO: 849556 - RNA, 22 nt, Human
caccucuuugauuugaggcaag

SEQ ID NO: 849557 - RNA, 21 nt, Human
uucucagagucuauuacaguu

SEQ ID NO: 849558 - RNA, 22 nt, Human
auauucuauaagcaguuggaag

SEQ ID NO: 849559 - RNA, 22 nt, Human
cugguggcaucuugagaugguu

SEQ ID NO: 849560 - RNA, 22 nt, Human
cucaguuuccucaacugcaaaa

SEQ ID NO: 849561 - RNA, 22 nt, Human
uaaaacugaauacauacugagg

SEQ ID NO: 849562 - RNA, 22 nt, Human
uucucagaugauucagauaaac

SEQ ID NO: 849563 - RNA, 23 nt, Human
cagucugcagcccacuugggcag

SEQ ID NO: 849564 - RNA, 22 nt, Human
auggccaaggggccuaggcagg

SEQ ID NO: 849565 - RNA, 21 nt, Human
acugccugucuccauagucua

SEQ ID NO: 849566 - RNA, 22 nt, Human
aguccaugguucugacucaucu

SEQ ID NO: 849567 - RNA, 22 nt, Human
aauaccaccucauucuggaggc

SEQ ID NO: 849568 - RNA, 22 nt, Human
ucucuucucuagugagcaacug

SEQ ID NO: 849569 - RNA, 22 nt, Human
ggauuuggaagaccgggucaca

SEQ ID NO: 849570 - RNA, 22 nt, Human
gggaggugauggcaagcagcgg

SEQ ID NO: 849571 - RNA, 22 nt, Human
uuugaaaggagcuuuauccaga

SEQ ID NO: 849572 - RNA, 22 nt, Human
cccaggagacagaaacagaggu

SEQ ID NO: 849573 - RNA, 22 nt, Human
aaucuucuacuugacaguucuc

SEQ ID NO: 849574 - RNA, 22 nt, Human
uagcacaucuucuuggccugca

SEQ ID NO: 849575 - RNA, 22 nt, Human
ccagagcugauuccugggacuu

SEQ ID NO: 849576 - RNA, 22 nt, Human
agcaagaugcauuauuucuuau

SEQ ID NO: 849577 - RNA, 22 nt, Human
ugacuuuagaauuuuauccaga

SEQ ID NO: 849578 - RNA, 22 nt, Human
ccuggcugcugucacugaccau

SEQ ID NO: 849579 - RNA, 21 nt, Human
gucaaacuugcaccagugccc

SEQ ID NO: 849580 - RNA, 22 nt, Human
uccuugacugugaggaacuagc

SEQ ID NO: 849581 - RNA, 22 nt, Human
uaacuguauuuuucugagauuc

SEQ ID NO: 849582 - RNA, 22 nt, Human
auacacuuccaaauauugauua

SEQ ID NO: 849583 - RNA, 22 nt, Human
aagaggaggacgguucccagaa

SEQ ID NO: 849584 - RNA, 22 nt, Human
uucuccagagggcucugcagga

SEQ ID NO: 849585 - RNA, 22 nt, Human
cuucuuaucaaguggcaaaucu

SEQ ID NO: 849586 - RNA, 20 nt, Human
ucaccuuuguugguauucau

SEQ ID NO: 849587 - RNA, 22 nt, Human
aggcucagccugggccuagagc

SEQ ID NO: 849588 - RNA, 22 nt, Human
guuuauaaggcccaauauuucu

SEQ ID NO: 849589 - RNA, 22 nt, Human
auuaucuauguagaaugauuuu

SEQ ID NO: 849590 - RNA, 23 nt, Human
gccaggaguggguagacuaaugc

SEQ ID NO: 849591 - RNA, 22 nt, Human
ccuggagaccagaggauacuuc

SEQ ID NO: 849592 - RNA, 22 nt, Human
auacaucucuuugaagugcuuu

SEQ ID NO: 849593 - RNA, 22 nt, Human
agggcagcagcuccuccuagcu

SEQ ID NO: 849594 - RNA, 22 nt, Human
uagugucauuucaguggaguuu

SEQ ID NO: 849595 - RNA, 22 nt, Human
gccugcagauauauaggauggu

SEQ ID NO: 849596 - RNA, 22 nt, Human
aggaucuugcuguagaggauag

SEQ ID NO: 849597 - RNA, 22 nt, Human
gaauuauagguuugcaugcuaa

SEQ ID NO: 849598 - RNA, 22 nt, Human
ugaauuagcaguagacagacug

SEQ ID NO: 849599 - RNA, 22 nt, Human
ucucugcuugguguaugugagu

SEQ ID NO: 849600 - RNA, 21 nt, Human
aggcagcaggauccagggaca

SEQ ID NO: 849601 - RNA, 22 nt, Human
cugcgcagggguggcgccagaa

SEQ ID NO: 849602 - RNA, 22 nt, Human
agggaggucuuugaggggcuua

SEQ ID NO: 849603 - RNA, 22 nt, Human
cagcuagcuaagaaggccagag

SEQ ID NO: 849604 - RNA, 22 nt, Human
uggcugaguguuccaaggagca

SEQ ID NO: 849605 - RNA, 22 nt, Human
augcuuccaaggcuaagacaag

SEQ ID NO: 849606 - RNA, 22 nt, Human
ugaaacagcuaucaguagacug

SEQ ID NO: 849607 - RNA, 22 nt, Human
cccuuccuggaguacccucugu

SEQ ID NO: 849608 - RNA, 18 nt, Human
acauacauucugucugca

SEQ ID NO: 849609 - RNA, 21 nt, Human
ccuggccaaucugauaggguu

SEQ ID NO: 849610 - RNA, 22 nt, Human
uggcagcagacaaaaggccauu

SEQ ID NO: 849611 - RNA, 22 nt, Human
cuggcagucugccucuucacug

SEQ ID NO: 849612 - RNA, 22 nt, Human
caaaugaaaauggcgucuugga

SEQ ID NO: 849613 - RNA, 22 nt, Human
ugcauguguguguauuuauaaa

SEQ ID NO: 849614 - RNA, 22 nt, Human
acucuggcccuccugcugccag

SEQ ID NO: 849615 - RNA, 22 nt, Human
uuagauaaaaguguucaauaaa

SEQ ID NO: 849616 - RNA, 22 nt, Human
augcugugucaggaauuugaua

SEQ ID NO: 849617 - RNA, 22 nt, Human
gaauuuaagaggaugaaucugu

SEQ ID NO: 849618 - RNA, 19 nt, Human
acauuuaaauucagaucuc

SEQ ID NO: 849619 - RNA, 19 nt, Human
uuacuuggcaaagucaguc

SEQ ID NO: 849620 - RNA, 22 nt, Human
gcagaggggaagcugaggaauu

SEQ ID NO: 849621 - RNA, 18 nt, Human
cauuguacaaugcuuuau

SEQ ID NO: 849622 - RNA, 20 nt, Human
aggcagcuggccaggcaggu

SEQ ID NO: 849623 - RNA, 22 nt, Human
uaacuggugaguaggauuuaua

SEQ ID NO: 849624 - RNA, 22 nt, Human
gaauagcuuccuuuuuuccaaa

SEQ ID NO: 849625 - RNA, 22 nt, Human
ggcagggaagcuggcaucacgg

SEQ ID NO: 849626 - RNA, 22 nt, Human
caugcugauucuuccugagcuu

SEQ ID NO: 849627 - RNA, 22 nt, Human
ggcacacauagaucugcacugg

SEQ ID NO: 849628 - RNA, 22 nt, Human
uugacaauguccuuugaauuuc

SEQ ID NO: 849629 - RNA, 22 nt, Human
acagucugucccccaggugcua

SEQ ID NO: 849630 - RNA, 22 nt, Human
auugaaaguccuaucuaaggga

SEQ ID NO: 849631 - RNA, 22 nt, Human
ucauuguuucugcuuuucauga

SEQ ID NO: 849632 - RNA, 22 nt, Human
ucuuagcacagcuauauaaguu

SEQ ID NO: 849633 - RNA, 22 nt, Human
gcugagagaucaaggcaggauu

SEQ ID NO: 849634 - RNA, 22 nt, Human
acaaaugugucuaauugugccu

SEQ ID NO: 849635 - RNA, 22 nt, Human
uucugagguccaugcaguacug

SEQ ID NO: 849636 - RNA, 22 nt, Human
cccaugagaccugguuuaaggc

SEQ ID NO: 849637 - RNA, 22 nt, Human
agcggcuggaccagcguucaag

SEQ ID NO: 849638 - RNA, 22 nt, Human
uggcagcuggagggcaauggcc

SEQ ID NO: 849639 - RNA, 22 nt, Human
ugacagguucguuagucauguu

SEQ ID NO: 849640 - RNA, 22 nt, Human
uuauuauuggugaguuaaggaa

SEQ ID NO: 849641 - RNA, 22 nt, Human
agaaguuguagguuugcauauu

SEQ ID NO: 849642 - RNA, 22 nt, Human
ucagucuuugcuuaugacaaua

SEQ ID NO: 849643 - RNA, 22 nt, Human
ucagugaucuaaggguauggcc

SEQ ID NO: 849644 - RNA, 22 nt, Human
aaggcagccagauccuuugggu

SEQ ID NO: 849645 - RNA, 22 nt, Human
gcugccucaggcaccuccuggc

SEQ ID NO: 849646 - RNA, 22 nt, Human
gccaggagccagcuucuuagca

SEQ ID NO: 849647 - RNA, 22 nt, Human
aggucaccauggcaugcuccac

SEQ ID NO: 849648 - RNA, 22 nt, Human
aaaugaugcucacagauuagug

SEQ ID NO: 849649 - RNA, 22 nt, Human
aucacuguguauguauaugcag

SEQ ID NO: 849650 - RNA, 22 nt, Human
cccagggacagcuagguggggc

SEQ ID NO: 849651 - RNA, 22 nt, Human
gcugccuccugagauuugggca

SEQ ID NO: 849652 - RNA, 22 nt, Human
aagagggcugcaaucuuauugc

SEQ ID NO: 849653 - RNA, 22 nt, Human
cuacuucuaaguacauggugau

SEQ ID NO: 849654 - RNA, 22 nt, Human
cuccuggcucugccacuuacua

SEQ ID NO: 849655 - RNA, 22 nt, Human
gauugaaacauaggcagucgag

SEQ ID NO: 849656 - RNA, 19 nt, Human
uagaggagaagggaagugg

SEQ ID NO: 849657 - RNA, 22 nt, Human
acaaugaaaaaauuuacugugg

SEQ ID NO: 849658 - RNA, 22 nt, Human
ggccacaagugguccugagucc

SEQ ID NO: 849659 - RNA, 22 nt, Human
accagagcuggcucugagcacc

SEQ ID NO: 849660 - RNA, 22 nt, Human
auucuagauaagaaaagggcug

SEQ ID NO: 849661 - RNA, 22 nt, Human
gcuggccauucucuuugagaug

SEQ ID NO: 849662 - RNA, 22 nt, Human
uuugaaaguucuucugacacua

SEQ ID NO: 849663 - RNA, 21 nt, Human
aggcagcaucugauuuauaug

SEQ ID NO: 849664 - RNA, 22 nt, Human
gggugaggcccauuugaggcca

SEQ ID NO: 849665 - RNA, 22 nt, Human
uuauugagcacauaguaugugg

SEQ ID NO: 849666 - RNA, 19 nt, Human
cuuauuagagugagagcuu

SEQ ID NO: 849667 - RNA, 22 nt, Human
ccaggcugagcaugauuggagc

SEQ ID NO: 849668 - RNA, 22 nt, Human
cagcugacgccagaguggaauu

SEQ ID NO: 849669 - RNA, 22 nt, Human
gaucauuuugaugcccuuuuag

SEQ ID NO: 849670 - RNA, 21 nt, Human
ucugacuugaucuauucuccc

SEQ ID NO: 849671 - RNA, 22 nt, Human
cacauuaaaauccuaacuucca

SEQ ID NO: 849672 - RNA, 22 nt, Human
auucauaacggcaaaugucacc

SEQ ID NO: 849673 - RNA, 22 nt, Human
ugagugcucuguaugugccaga

SEQ ID NO: 849674 - RNA, 20 nt, Human
caggagggacauuucagcau

SEQ ID NO: 849675 - RNA, 22 nt, Human
uugcuagcugguguaugcauug

SEQ ID NO: 849676 - RNA, 22 nt, Human
uuucaucuuccuuggcauaggu

SEQ ID NO: 849677 - RNA, 22 nt, Human
cuccuggaccagggcuauuggg

SEQ ID NO: 849678 - RNA, 19 nt, Human
ggcagcuggacgcuguuca

SEQ ID NO: 849679 - RNA, 22 nt, Human
gccaggagaaugcuagcagagg

SEQ ID NO: 849680 - RNA, 22 nt, Human
ucuuuccagaggaauuuuuaga

SEQ ID NO: 849681 - RNA, 23 nt, Human
cuugcagggcuggaggcuuagaa

SEQ ID NO: 849682 - RNA, 22 nt, Human
acagaaauucaaacuggaauuu

SEQ ID NO: 849683 - RNA, 22 nt, Human
cagcugccccgcuggcugacca

SEQ ID NO: 849684 - RNA, 22 nt, Human
aggccaaagcacagagcuggaa

SEQ ID NO: 849685 - RNA, 22 nt, Human
uggcagcuagcuguuuucaugc

SEQ ID NO: 849686 - RNA, 22 nt, Human
uacaacauuguguugcuucaua

SEQ ID NO: 849687 - RNA, 22 nt, Human
uuagacaggauguaugaaagcu

SEQ ID NO: 849688 - RNA, 22 nt, Human
ugaaggccagcagagugaaggc

SEQ ID NO: 849689 - RNA, 22 nt, Human
acaccuuugccccaagucauag

SEQ ID NO: 849690 - RNA, 22 nt, Human
uagccaggcugcagcugauccg

SEQ ID NO: 849691 - RNA, 22 nt, Human
uucuucaacaaggacacuguua

SEQ ID NO: 849692 - RNA, 22 nt, Human
ccuggccagaggcgugccugug

SEQ ID NO: 849693 - RNA, 22 nt, Human
guuuauuauacaacaaaagcua

SEQ ID NO: 849694 - RNA, 22 nt, Human
gcccaggaugguguguaguggu

SEQ ID NO: 849695 - RNA, 22 nt, Human
ucauuucuccgaccugcugucc

SEQ ID NO: 849696 - RNA, 22 nt, Human
uuggucagcucaauggagaggg

SEQ ID NO: 849697 - RNA, 22 nt, Human
gcccaggaggucaaguagcuau

SEQ ID NO: 849698 - RNA, 22 nt, Human
ucacugucugaaagaaauggcc

SEQ ID NO: 849699 - RNA, 22 nt, Human
gcccaggaguucaaggcugcag

SEQ ID NO: 849700 - RNA, 22 nt, Human
guuuucaaggggauuuaacuga

SEQ ID NO: 849701 - RNA, 22 nt, Human
cagcaagauuaagggcagaaaa

SEQ ID NO: 849702 - RNA, 22 nt, Human
ccccuuccacagugcuuccuaa

SEQ ID NO: 849703 - RNA, 20 nt, Human
cccaggaguuugcucuuacu

SEQ ID NO: 849704 - RNA, 22 nt, Human
cugcuguggaugcaggaccuca

SEQ ID NO: 849705 - RNA, 22 nt, Human
uuguugguggaauugaugcuag

SEQ ID NO: 849706 - RNA, 22 nt, Human
cccagggaagggcuaccugagg

SEQ ID NO: 849707 - RNA, 22 nt, Human
uuauuuauaucucugcaguuua

SEQ ID NO: 849708 - RNA, 17 nt, Human
agcagcugaagcagcca

SEQ ID NO: 849709 - RNA, 22 nt, Human
aacuuucuggcuuuggggagag

SEQ ID NO: 849710 - RNA, 22 nt, Human
aguguugcaugaggcaguacca

SEQ ID NO: 849711 - RNA, 22 nt, Human
uagcugcugcagcacagggagg

SEQ ID NO: 849712 - RNA, 22 nt, Human
ggcugcugcccaccccugcaug

SEQ ID NO: 849713 - RNA, 22 nt, Human
ggcggcacgcaggcugcugucg

SEQ ID NO: 849714 - RNA, 22 nt, Human
gugugcaggggcuugguggagc

SEQ ID NO: 849715 - RNA, 22 nt, Human
ugcugcucgccacggcccaggg

SEQ ID NO: 849716 - RNA, 22 nt, Human
agggacccauagagagaccagu

SEQ ID NO: 849717 - RNA, 22 nt, Human
uuuucaguaaugucuacauaau

SEQ ID NO: 849718 - RNA, 22 nt, Human
gauacaguauuuaaagagcaac

SEQ ID NO: 849719 - RNA, 22 nt, Human
cccaggaaugagcaggcagggg

SEQ ID NO: 849720 - RNA, 22 nt, Human
gugguaauagagcuccaaacua

SEQ ID NO: 849721 - RNA, 22 nt, Human
cugacaaaggcaaggcaggggg

SEQ ID NO: 849722 - RNA, 22 nt, Human
augauguugauaaauuacuuua

SEQ ID NO: 849723 - RNA, 22 nt, Human
aguaacaugaguuuuucuaaug

SEQ ID NO: 849724 - RNA, 22 nt, Human
uuuucagaggccuaagagguuu

SEQ ID NO: 849725 - RNA, 22 nt, Human
ucagagaguuggaaagaauuaa

SEQ ID NO: 849726 - RNA, 22 nt, Human
gggcagcucugcccaucagagg

SEQ ID NO: 849727 - RNA, 22 nt, Human
ugaaaugaucaguuugguuacu

SEQ ID NO: 849728 - RNA, 22 nt, Human
gggcugagacgauggggucuuc

SEQ ID NO: 849729 - RNA, 22 nt, Human
auggccaacugaaaugaaagau

SEQ ID NO: 849730 - RNA, 22 nt, Human
cugcugugcaggugccuaugau

SEQ ID NO: 849731 - RNA, 22 nt, Human
aggcagcuggaaaacuccaggc

SEQ ID NO: 849732 - RNA, 22 nt, Human
acaggcugaaaguuaaguucug

SEQ ID NO: 849733 - RNA, 22 nt, Human
ggcuggagacaacguccugccc

SEQ ID NO: 849734 - RNA, 22 nt, Human
aucaggaucaugcuggguggga

SEQ ID NO: 849735 - RNA, 22 nt, Human
ucucuguacaguacaugccgug

SEQ ID NO: 849736 - RNA, 22 nt, Human
ucuucaucucagauuaacagga

SEQ ID NO: 849737 - RNA, 22 nt, Human
auauuguugacuauaagaguaa

SEQ ID NO: 849738 - RNA, 22 nt, Human
uucuucucggcugucagauagu

SEQ ID NO: 849739 - RNA, 22 nt, Human
ucuuugcaggccaaauuguuaa

SEQ ID NO: 849740 - RNA, 19 nt, Human
uucacaauuaugaaauuag

SEQ ID NO: 849741 - RNA, 22 nt, Human
agccacagucugaugccugaga

SEQ ID NO: 849742 - RNA, 22 nt, Human
ucucuucuaauuaggguccaug

SEQ ID NO: 849743 - RNA, 22 nt, Human
uccuucuuucccccuagucauu

SEQ ID NO: 849744 - RNA, 22 nt, Human
aaaauacuacugucuucuuccc

SEQ ID NO: 849745 - RNA, 21 nt, Human
gcugcugugggccagggaggc

SEQ ID NO: 849746 - RNA, 22 nt, Human
gacggcagaaacucaugagguc

SEQ ID NO: 849747 - RNA, 22 nt, Human
aaaggccacacagagcagggag

SEQ ID NO: 849748 - RNA, 19 nt, Human
uagaagcacuaggcaaacu

SEQ ID NO: 849749 - RNA, 22 nt, Human
ucaggcugccuaucagacugug

SEQ ID NO: 849750 - RNA, 22 nt, Human
ugagccugguugcagugucugg

SEQ ID NO: 849751 - RNA, 22 nt, Human
ucuggcaaaggcaaccacaguu

SEQ ID NO: 849752 - RNA, 22 nt, Human
uuucuucaauugcuaacaagga

SEQ ID NO: 849753 - RNA, 22 nt, Human
cagcuggcgggcagagccgcca

SEQ ID NO: 849754 - RNA, 22 nt, Human
agcuccugaaaauccagacugg

SEQ ID NO: 849755 - RNA, 22 nt, Human
guccucuguuagaaaugugcuu

SEQ ID NO: 849756 - RNA, 22 nt, Human
agcccaggcagagggaugcuug

SEQ ID NO: 849757 - RNA, 22 nt, Human
cuaacauuuauugagcacuuag

SEQ ID NO: 849758 - RNA, 22 nt, Human
gcccccagaagggccacagauu

SEQ ID NO: 849759 - RNA, 22 nt, Human
agucugucuacuuaaagucugu

SEQ ID NO: 849760 - RNA, 22 nt, Human
gugacagucaaagacaugacuu

SEQ ID NO: 849761 - RNA, 22 nt, Human
gagagcuguccggcugagcagc

SEQ ID NO: 849762 - RNA, 18 nt, Human
aaacuggcuuggccugug

SEQ ID NO: 849763 - RNA, 22 nt, Human
caggcuugagggcaggcccagu

SEQ ID NO: 849764 - RNA, 21 nt, Human
uggcaggcagcuggaagcuug

SEQ ID NO: 849765 - RNA, 22 nt, Human
cucaggauccaucuccugcccu

SEQ ID NO: 849766 - RNA, 22 nt, Human
acuuccugcaaucguccacucc

SEQ ID NO: 849767 - RNA, 22 nt, Human
auucuucauuguugauucaugu

SEQ ID NO: 849768 - RNA, 22 nt, Human
ucagagaggcaauacuguuuaa

SEQ ID NO: 849769 - RNA, 21 nt, Human
ucaggcugaugucgauguuag

SEQ ID NO: 849770 - RNA, 22 nt, Human
gaagcagcaaguauaggacagg

SEQ ID NO: 849771 - RNA, 22 nt, Human
gagagcuggguucaaguagcug

SEQ ID NO: 849772 - RNA, 22 nt, Human
auucaaauuaaguuaauucagc

SEQ ID NO: 849773 - RNA, 22 nt, Human
gggcugagggccaauuccuacu

SEQ ID NO: 849774 - RNA, 22 nt, Human
ugaaagguuaaaaguaguauug

SEQ ID NO: 849775 - RNA, 22 nt, Human
ccaggcugcuuuauuacucugu

SEQ ID NO: 849776 - RNA, 22 nt, Human
uaaaaugaucucucauguucuu

SEQ ID NO: 849777 - RNA, 22 nt, Human
uuugaaagacagaauauuuuug

SEQ ID NO: 849778 - RNA, 23 nt, Human
aggcccaacucugugagggcugc

SEQ ID NO: 849779 - RNA, 22 nt, Human
gcugccugcacagagcugcuuu

SEQ ID NO: 849780 - RNA, 22 nt, Human
agucuugcauuuucugaagaug

SEQ ID NO: 849781 - RNA, 22 nt, Human
cuugagguuuugacucagcuuu

SEQ ID NO: 849782 - RNA, 22 nt, Human
ucagugcacagagauuuuuguu

SEQ ID NO: 849783 - RNA, 20 nt, Human
uucaggauucuagaccacac

SEQ ID NO: 849784 - RNA, 22 nt, Human
auggcuggaggccgggcuuccu

SEQ ID NO: 849785 - RNA, 22 nt, Human
ugcaggcugccuucacagagcc

SEQ ID NO: 849786 - RNA, 22 nt, Human
uuugcagucaaauuugcuaaau

SEQ ID NO: 849787 - RNA, 22 nt, Human
uggaaugacagagagucugaau

SEQ ID NO: 849788 - RNA, 20 nt, Human
ccaggcuggcaaaugggggc

SEQ ID NO: 849789 - RNA, 22 nt, Human
gcuucugaggaaggcucagccu

SEQ ID NO: 849790 - RNA, 21 nt, Human
cuggccgaccccucugugcuc

SEQ ID NO: 849791 - RNA, 22 nt, Human
uugugguuaaccgcacauuuuu

SEQ ID NO: 849792 - RNA, 22 nt, Human
acucaggaaauugagauaaugg

SEQ ID NO: 849793 - RNA, 22 nt, Human
aaugauuuccccuacacagaag

SEQ ID NO: 849794 - RNA, 23 nt, Human
acucguggaauucucugcgaucg

SEQ ID NO: 849795 - RNA, 22 nt, Human
uucaugugauaaaugugugacu

SEQ ID NO: 849796 - RNA, 22 nt, Human
ucaggcuguaaauggugugggu

SEQ ID NO: 849797 - RNA, 22 nt, Human
ugaugaauaaacuugagaguca

SEQ ID NO: 849798 - RNA, 20 nt, Human
aggcagcugggaaaugaggg

SEQ ID NO: 849799 - RNA, 22 nt, Human
ugucaauguguacaggagcuca

SEQ ID NO: 849800 - RNA, 22 nt, Human
caacuauagaucaaaugaguuu

SEQ ID NO: 849801 - RNA, 22 nt, Human
ucaaucacguguuccauguucu

SEQ ID NO: 849802 - RNA, 22 nt, Human
uaagaugaucaccaaaugcugg

SEQ ID NO: 849803 - RNA, 22 nt, Human
uuucucugcugccugugucgau

SEQ ID NO: 849804 - RNA, 22 nt, Human
uuaacaugucuugacuucaucu

SEQ ID NO: 849805 - RNA, 22 nt, Human
ucacaguaaaagcauggaagag

SEQ ID NO: 849806 - RNA, 22 nt, Human
gggcugagugaccucaggccaa

SEQ ID NO: 849807 - RNA, 23 nt, Human
uccaugagaugugggcuucuagu

SEQ ID NO: 849808 - RNA, 22 nt, Human
cuggccaacaucuggggcacau

SEQ ID NO: 849809 - RNA, 22 nt, Human
acaccuuucagguccagacagu

SEQ ID NO: 849810 - RNA, 22 nt, Human
cauuuguaggaugcuucuuguu

SEQ ID NO: 849811 - RNA, 22 nt, Human
aggcagccaaucagaggcugac

SEQ ID NO: 849812 - RNA, 22 nt, Human
augggaggaugcucgggugcuc

SEQ ID NO: 849813 - RNA, 22 nt, Human
ggcagcuuccugagccagcagc

SEQ ID NO: 849814 - RNA, 22 nt, Human
aaauugcauuuuaaagguagau

SEQ ID NO: 849815 - RNA, 22 nt, Human
gcaggcugccaccuucugaguu

SEQ ID NO: 849816 - RNA, 22 nt, Human
ugcugagguuguggagugcauu

SEQ ID NO: 849817 - RNA, 22 nt, Human
acuugcauuauauuuaucacaa

SEQ ID NO: 849818 - RNA, 22 nt, Human
uucuucaguuugguaaauguaa

SEQ ID NO: 849819 - RNA, 22 nt, Human
uggucuuuaagguagcugucau

SEQ ID NO: 849820 - RNA, 22 nt, Human
uuccaugaagggcagccucuca

SEQ ID NO: 849821 - RNA, 22 nt, Human
uguuuuuaaauaaugauagaaa

SEQ ID NO: 849822 - RNA, 22 nt, Human
agaggggagagcuaagcaauuc

SEQ ID NO: 849823 - RNA, 22 nt, Human
ucaggcuggagugcaguggcgc

SEQ ID NO: 849824 - RNA, 22 nt, Human
ucuggccaggauggcaagacca

SEQ ID NO: 849825 - RNA, 21 nt, Human
uuccagaaaucucuuucuuca

SEQ ID NO: 849826 - RNA, 22 nt, Human
auugaaagcauggauuuggauu

SEQ ID NO: 849827 - RNA, 22 nt, Human
uauuuucuggacagucuugcuu

SEQ ID NO: 849828 - RNA, 21 nt, Human
aaucauacaaaacaugucagg

SEQ ID NO: 849829 - RNA, 22 nt, Human
ggcugagacaaccugggaccca

SEQ ID NO: 849830 - RNA, 22 nt, Human
cuggagaggcugggaacagguu

SEQ ID NO: 849831 - RNA, 22 nt, Human
ucaggcugguccccacagugga

SEQ ID NO: 849832 - RNA, 22 nt, Human
uguucucuaagaaaagaagcau

SEQ ID NO: 849833 - RNA, 22 nt, Human
uucaaugauuuuuagggaucau

SEQ ID NO: 849834 - RNA, 22 nt, Human
aaacugguagcaauuuaagggu

SEQ ID NO: 849835 - RNA, 22 nt, Human
cuggaaauuggagaugauguuu

SEQ ID NO: 849836 - RNA, 22 nt, Human
aacauacauauuucagugucca

SEQ ID NO: 849837 - RNA, 22 nt, Human
auguuauaguuauaaaaugagg

SEQ ID NO: 849838 - RNA, 22 nt, Human
uuauuagggugguuuauguucu

SEQ ID NO: 849839 - RNA, 22 nt, Human
aggcaguuguagagagggcucu

SEQ ID NO: 849840 - RNA, 22 nt, Human
aacacuuuccugccuuucugau

SEQ ID NO: 849841 - RNA, 22 nt, Human
aaaauauuuuagggccaggaga

SEQ ID NO: 849842 - RNA, 22 nt, Human
auggagacgcaagggaccuagg

SEQ ID NO: 849843 - RNA, 22 nt, Human
uuacaagauaaccugaugcugu

SEQ ID NO: 849844 - RNA, 22 nt, Human
acauauauuacuaguaaagaca

SEQ ID NO: 849845 - RNA, 22 nt, Human
aauaauuauuugagagcagacc

SEQ ID NO: 849846 - RNA, 22 nt, Human
aguuaaagaaagauaauucgcc

SEQ ID NO: 849847 - RNA, 20 nt, Human
ugugcaggagagugaggcug

SEQ ID NO: 849848 - RNA, 22 nt, Human
acauuuuuauucaucaaagcag

SEQ ID NO: 849849 - RNA, 22 nt, Human
uuucagaauagcaaagcaagcu

SEQ ID NO: 849850 - RNA, 22 nt, Human
uccccuccucuccugauauggg

SEQ ID NO: 849851 - RNA, 22 nt, Human
gugcagcugugguggagccagg

SEQ ID NO: 849852 - RNA, 22 nt, Human
aggcagcuuucuguaggggugu

SEQ ID NO: 849853 - RNA, 22 nt, Human
aggaagcuccaugaaggcagag

SEQ ID NO: 849854 - RNA, 22 nt, Human
ugaugaaaauaugauucugagg

SEQ ID NO: 849855 - RNA, 22 nt, Human
ucugggaaaugcuguuccuugu

SEQ ID NO: 849856 - RNA, 22 nt, Human
uagcaagaaguagcucuggauu

SEQ ID NO: 849857 - RNA, 22 nt, Human
cucaguuugagggguagguguu

SEQ ID NO: 849858 - RNA, 22 nt, Human
uggcuucuugucuaauuuguua

SEQ ID NO: 849859 - RNA, 22 nt, Human
uugcaauagccuuauuuccaaa

SEQ ID NO: 849860 - RNA, 22 nt, Human
guuuuauaauugcuucauaaga

SEQ ID NO: 849861 - RNA, 22 nt, Human
uuuuaugauugagcuggcuaca

SEQ ID NO: 849862 - RNA, 22 nt, Human
uaaagcacauaucuuacaauaa

SEQ ID NO: 849863 - RNA, 22 nt, Human
gaggagaggcuggacgcgguga

SEQ ID NO: 849864 - RNA, 22 nt, Human
cucccaggggaacuaucaagua

SEQ ID NO: 849865 - RNA, 22 nt, Human
cucucuguuaugcuuucaugaa

SEQ ID NO: 849866 - RNA, 22 nt, Human
gacuccugccuccucuguuugc

SEQ ID NO: 849867 - RNA, 18 nt, Human
ggcugagguugacuagaa

SEQ ID NO: 849868 - RNA, 22 nt, Human
cacuccuguuccacuaaaugag

SEQ ID NO: 849869 - RNA, 22 nt, Human
gacugaggcuccccuaggcuca

SEQ ID NO: 849870 - RNA, 22 nt, Human
cagauggaacacagaaaggaga

SEQ ID NO: 849871 - RNA, 22 nt, Human
aggcaagcugcagagaguccuu

SEQ ID NO: 849872 - RNA, 22 nt, Human
acccaggacuuggcaaccucau

SEQ ID NO: 849873 - RNA, 22 nt, Human
cccaggaacagggcucagaccc

SEQ ID NO: 849874 - RNA, 22 nt, Human
uucaauucuaaacuaauauucu

SEQ ID NO: 849875 - RNA, 22 nt, Human
cacagccuuacugagauccacu

SEQ ID NO: 849876 - RNA, 22 nt, Human
agucucuuuaaucacagugucu

SEQ ID NO: 849877 - RNA, 22 nt, Human
uuuauuguuaucaugggugagu

SEQ ID NO: 849878 - RNA, 22 nt, Human
uccugaggcucacuuugaaugu

SEQ ID NO: 849879 - RNA, 22 nt, Human
ucugccugagaaguggggugcc

SEQ ID NO: 849880 - RNA, 22 nt, Human
gagaggaguagacacuuugguu

SEQ ID NO: 849881 - RNA, 22 nt, Human
aagcagaguccccuucccaugg

SEQ ID NO: 849882 - RNA, 22 nt, Human
uugaggucuugaguacugggga

SEQ ID NO: 849883 - RNA, 22 nt, Human
gaaacugugaggaucuuaacuu

SEQ ID NO: 849884 - RNA, 23 nt, Human
guuaauaaugaacacuuucuccc

SEQ ID NO: 849885 - RNA, 19 nt, Human
cuguggcugaccucuggcc

SEQ ID NO: 849886 - RNA, 22 nt, Human
gcugcccacaaugauuacaugg

SEQ ID NO: 849887 - RNA, 19 nt, Human
aucauacauguuacacucu

SEQ ID NO: 849888 - RNA, 22 nt, Human
cacaggcuuccaguccccagcu

SEQ ID NO: 849889 - RNA, 22 nt, Human
ugcugaggcagaugucugugac

SEQ ID NO: 849890 - RNA, 19 nt, Human
uuugaaaggauuguuauuu

SEQ ID NO: 849891 - RNA, 22 nt, Human
uggcugagagucauccugugug

SEQ ID NO: 849892 - RNA, 22 nt, Human
aaauuaacuaucacuuuuguga

SEQ ID NO: 849893 - RNA, 22 nt, Human
uuuguaaauagcaguacucaug

SEQ ID NO: 849894 - RNA, 18 nt, Human
gcagcugacacuggaguu

SEQ ID NO: 849895 - RNA, 23 nt, Human
uaauucacauauacauugcuuca

SEQ ID NO: 849896 - RNA, 22 nt, Human
auucugauaucuuauucuagcu

SEQ ID NO: 849897 - RNA, 22 nt, Human
auuagguaagauaaagcagagg

SEQ ID NO: 849898 - RNA, 22 nt, Human
acuguagcugccacuggaugca

SEQ ID NO: 849899 - RNA, 22 nt, Human
uggcacauagaaaaggaucaau

SEQ ID NO: 849900 - RNA, 22 nt, Human
uacauacauguauguguguauu

SEQ ID NO: 849901 - RNA, 22 nt, Human
cagaaguuccuauuuaccuccu

SEQ ID NO: 849902 - RNA, 22 nt, Human
aggacaggauugagcugaacug

SEQ ID NO: 849903 - RNA, 22 nt, Human
ucugggaacucugucauuuccc

SEQ ID NO: 849904 - RNA, 22 nt, Human
aagaugacccugagggcaauug

SEQ ID NO: 849905 - RNA, 22 nt, Human
uccaaauauucggucuuucuga

SEQ ID NO: 849906 - RNA, 22 nt, Human
gagcugaggcugaggccucacu

SEQ ID NO: 849907 - RNA, 22 nt, Human
uauauuaguggaaugauaugaa

SEQ ID NO: 849908 - RNA, 22 nt, Human
auugucuuuccacugagaaguu

SEQ ID NO: 849909 - RNA, 22 nt, Human
aggcagcagucaugaggaaaga

SEQ ID NO: 849910 - RNA, 22 nt, Human
uuuguuuagaaagagauuggug

SEQ ID NO: 849911 - RNA, 22 nt, Human
ugaggccagucucaucacaggc

SEQ ID NO: 849912 - RNA, 22 nt, Human
cccaggagguggagcuugcagu

SEQ ID NO: 849913 - RNA, 22 nt, Human
aacaugcauauagguaaaugga

SEQ ID NO: 849914 - RNA, 22 nt, Human
gaggucaggcuugcagcagggu

SEQ ID NO: 849915 - RNA, 22 nt, Human
cauuuauuggcauguaguaggu

SEQ ID NO: 849916 - RNA, 20 nt, Human
ugcugagguugacaugccca

SEQ ID NO: 849917 - RNA, 22 nt, Human
cugcuucacuucgguugcauag

SEQ ID NO: 849918 - RNA, 22 nt, Human
aggccagcgcugcuagcucccg

SEQ ID NO: 849919 - RNA, 19 nt, Human
aggcuggagacaccaggcc

SEQ ID NO: 849920 - RNA, 22 nt, Human
agagggauaauauguauuguaa

SEQ ID NO: 849921 - RNA, 22 nt, Human
gaggccagggaugcaaugagag

SEQ ID NO: 849922 - RNA, 22 nt, Human
ucacuucacacccacuaucaug

SEQ ID NO: 849923 - RNA, 22 nt, Human
uccaccagagccuucccaugcu

SEQ ID NO: 849924 - RNA, 22 nt, Human
aaaggugacacucugccagcug

SEQ ID NO: 849925 - RNA, 22 nt, Human
uucaggauuauacucucuuccc

SEQ ID NO: 849926 - RNA, 21 nt, Human
auguaggaguuauuggaacag

SEQ ID NO: 849927 - RNA, 22 nt, Human
aaugcuuuuugcgaaaugugca

SEQ ID NO: 849928 - RNA, 22 nt, Human
ccugaggucacaacuugcuuau

SEQ ID NO: 849929 - RNA, 22 nt, Human
ugcccuggcauuggguuggaua

SEQ ID NO: 849930 - RNA, 22 nt, Human
augaaggcuguguagauggaug

SEQ ID NO: 849931 - RNA, 22 nt, Human
aguaaguuccaguuucauuaug

SEQ ID NO: 849932 - RNA, 22 nt, Human
cauuuguagcuauuuacuguau

SEQ ID NO: 849933 - RNA, 23 nt, Human
ggagugcaauggcgccaucucgg

SEQ ID NO: 849934 - RNA, 22 nt, Human
aagggcuggccacauucugggu

SEQ ID NO: 849935 - RNA, 22 nt, Human
augcagcuucaggauuaugaug

SEQ ID NO: 849936 - RNA, 23 nt, Human
cagaugagguuggcagcaugguc

SEQ ID NO: 849937 - RNA, 22 nt, Human
aggcugaggaucguacuuucca

SEQ ID NO: 849938 - RNA, 23 nt, Human
uucuucucaauuaguugauucag

SEQ ID NO: 849939 - RNA, 22 nt, Human
cacaggcuuuucugacauaggc

SEQ ID NO: 849940 - RNA, 22 nt, Human
aggcugaggcggguagaucacc

SEQ ID NO: 849941 - RNA, 22 nt, Human
gcugagauuacgggcaugagcc

SEQ ID NO: 849942 - RNA, 22 nt, Human
gagcagcuccagccgcaugacu

SEQ ID NO: 849943 - RNA, 22 nt, Human
ggaggccagccugaggcugagg

SEQ ID NO: 849944 - RNA, 22 nt, Human
uuacuuuggguccugcuuauaa

SEQ ID NO: 849945 - RNA, 22 nt, Human
gcugcccaggguggagccggcu

SEQ ID NO: 849946 - RNA, 22 nt, Human
augcuguguggccaccuccaug

SEQ ID NO: 849947 - RNA, 22 nt, Human
ccuggcugaacaaagucccucc

SEQ ID NO: 849948 - RNA, 22 nt, Human
uucuuuucuuuaggcauugugu

SEQ ID NO: 849949 - RNA, 22 nt, Human
gaagaaguauuuuuguccuguu

SEQ ID NO: 849950 - RNA, 22 nt, Human
uggcagcacuugaacuugagcc

SEQ ID NO: 849951 - RNA, 18 nt, Human
ucauuagggauugcaaag

SEQ ID NO: 849952 - RNA, 22 nt, Human
uucaggaugcucagaguagucu

SEQ ID NO: 849953 - RNA, 22 nt, Human
ccacaucucgguccccucuuug

SEQ ID NO: 849954 - RNA, 22 nt, Human
ucccuccccacuucugagcuuu

SEQ ID NO: 849955 - RNA, 22 nt, Human
uucauucuuugaaucugaggua

SEQ ID NO: 849956 - RNA, 17 nt, Human
acagagcacaucaagau

SEQ ID NO: 849957 - RNA, 22 nt, Human
cagaugaggcaaccucauugcu

SEQ ID NO: 849958 - RNA, 22 nt, Human
aaggagaaaugguagaugugca

SEQ ID NO: 849959 - RNA, 22 nt, Human
acaggcugcugggcuccgugcu

SEQ ID NO: 849960 - RNA, 22 nt, Human
auugaaagagaauguagcucuu

SEQ ID NO: 849961 - RNA, 22 nt, Human
uccaagcuugcuuuagccacag

SEQ ID NO: 849962 - RNA, 22 nt, Human
uccccacacagauacagaguag

SEQ ID NO: 849963 - RNA, 22 nt, Human
ucucaagaucucaagauggccc

SEQ ID NO: 849964 - RNA, 22 nt, Human
uagauuuuacuucugucauuac

SEQ ID NO: 849965 - RNA, 22 nt, Human
uagaaauguugguauuaacauu

SEQ ID NO: 849966 - RNA, 22 nt, Human
ggcugcuggggacgugggagag

SEQ ID NO: 849967 - RNA, 17 nt, Human
guguaacuaugagccau

SEQ ID NO: 849968 - RNA, 23 nt, Human
cccagggacacgaugacaccucc

SEQ ID NO: 849969 - RNA, 22 nt, Human
augaggucuggcaaucagaaac

SEQ ID NO: 849970 - RNA, 19 nt, Human
cucugccucuggcuguggc

SEQ ID NO: 849971 - RNA, 22 nt, Human
auuuccuuugcaaagacugugc

SEQ ID NO: 849972 - RNA, 22 nt, Human
ugaagggggagauauaugugug

SEQ ID NO: 849973 - RNA, 22 nt, Human
gacaguaagucagagacuuggu

SEQ ID NO: 849974 - RNA, 22 nt, Human
aaguggacuaauacaaggacua

SEQ ID NO: 849975 - RNA, 22 nt, Human
uuucacauaugguuguugauug

SEQ ID NO: 849976 - RNA, 22 nt, Human
cuucaguuaguuucaugugagc

SEQ ID NO: 849977 - RNA, 20 nt, Human
acuugcugggcuuuguuacc

SEQ ID NO: 849978 - RNA, 22 nt, Human
ugcugcaggcagccccucuacu

SEQ ID NO: 849979 - RNA, 22 nt, Human
gggcugagagcuggaaucugag

SEQ ID NO: 849980 - RNA, 22 nt, Human
cuccccagguucaggagguggg

SEQ ID NO: 849981 - RNA, 22 nt, Human
cccagcaggaggagguugcagu

SEQ ID NO: 849982 - RNA, 22 nt, Human
cuauuuaugugcuauuuuguau

SEQ ID NO: 849983 - RNA, 22 nt, Human
augcugugucuagcaggaacac

SEQ ID NO: 849984 - RNA, 22 nt, Human
aaguuugcauagauuaagcauu

SEQ ID NO: 849985 - RNA, 22 nt, Human
ucugccuccugcuugucccgac

SEQ ID NO: 849986 - RNA, 22 nt, Human
cagggcugguuugucgaagaaa

SEQ ID NO: 849987 - RNA, 22 nt, Human
auauucuuccaaaacaucauuu

SEQ ID NO: 849988 - RNA, 22 nt, Human
ucaggcuggaaugcaguggggc

SEQ ID NO: 849989 - RNA, 22 nt, Human
cugccucucagccugaccgcca

SEQ ID NO: 849990 - RNA, 22 nt, Human
uugcauuuuuagaugcuucugu

SEQ ID NO: 849991 - RNA, 22 nt, Human
uguuuucagucauauagcaggu

SEQ ID NO: 849992 - RNA, 22 nt, Human
ccucagggaaugggaggcuggg

SEQ ID NO: 849993 - RNA, 22 nt, Human
uaacaucuuuagcagcucgaac

SEQ ID NO: 849994 - RNA, 22 nt, Human
cagagcugagucuucaagguug

SEQ ID NO: 849995 - RNA, 22 nt, Human
uggagacucugcaucugugaca

SEQ ID NO: 849996 - RNA, 22 nt, Human
agggcugagacuaaggccagau

SEQ ID NO: 849997 - RNA, 20 nt, Human
ucacuaguaaccaucugcuu

SEQ ID NO: 849998 - RNA, 22 nt, Human
gcuagaaaucgacuucagaauu

SEQ ID NO: 849999 - RNA, 22 nt, Human
ucacagaaaucuguuuuuucua

SEQ ID NO: 850000 - RNA, 22 nt, Human
uagggcugugucuccaggacca

SEQ ID NO: 850001 - RNA, 22 nt, Human
uacuuuuagccuauuugauucu

SEQ ID NO: 850002 - RNA, 22 nt, Human
acucaggaaaugagaggcucuc

SEQ ID NO: 850003 - RNA, 22 nt, Human
acagucuugcuguauggucagg

SEQ ID NO: 850004 - RNA, 22 nt, Human
agcugugaccuucaagagcuac

SEQ ID NO: 850005 - RNA, 22 nt, Human
uugcugaaaacaguggguauug

SEQ ID NO: 850006 - RNA, 22 nt, Human
agguccacaguucagcugccca

SEQ ID NO: 850007 - RNA, 22 nt, Human
cccugagcaacaaacugaauac

SEQ ID NO: 850008 - RNA, 22 nt, Human
ugucaccaugcgaggcuaauuu

SEQ ID NO: 850009 - RNA, 22 nt, Human
uacccaggagaaacagcagggc

SEQ ID NO: 850010 - RNA, 22 nt, Human
aaacuccugggcucaagcaguu

SEQ ID NO: 850011 - RNA, 22 nt, Human
cuaagaaauguugugaaugcca

SEQ ID NO: 850012 - RNA, 22 nt, Human
ggcuguagguuggugcuggaca

SEQ ID NO: 850013 - RNA, 22 nt, Human
guagcagaaucagugcuacaga

SEQ ID NO: 850014 - RNA, 22 nt, Human
agucaauuaucucuaggucauc

SEQ ID NO: 850015 - RNA, 22 nt, Human
aauucacugaacuucucugaga

SEQ ID NO: 850016 - RNA, 23 nt, Human
gcugccuccuacaaaagcccagc

SEQ ID NO: 850017 - RNA, 22 nt, Human
uucucugaguacguuucagugu

SEQ ID NO: 850018 - RNA, 22 nt, Human
guggcaggagacuggaagaugg

SEQ ID NO: 850019 - RNA, 22 nt, Human
auuggcaaggcugcggugucug

SEQ ID NO: 850020 - RNA, 22 nt, Human
uucucagaggagucgggagcug

SEQ ID NO: 850021 - RNA, 20 nt, Human
agagcagcaguuggugaggu

SEQ ID NO: 850022 - RNA, 22 nt, Human
ccacaguagaauucaucucccu

SEQ ID NO: 850023 - RNA, 22 nt, Human
acuuuaaggaggcacucaucuc

SEQ ID NO: 850024 - RNA, 22 nt, Human
guaaaucauggucagaauaaau

SEQ ID NO: 850025 - RNA, 22 nt, Human
uuugcauaagucauguccagug

SEQ ID NO: 850026 - RNA, 22 nt, Human
gcaggcugggguagccccacuu

SEQ ID NO: 850027 - RNA, 20 nt, Human
ggccgaaauaauaguggcuu

SEQ ID NO: 850028 - RNA, 22 nt, Human
ugcucaguagcagugugcugcu

SEQ ID NO: 850029 - RNA, 22 nt, Human
uaggagagcugaacuauugucu

SEQ ID NO: 850030 - RNA, 20 nt, Human
guugaaaguaauaugaugcu

SEQ ID NO: 850031 - RNA, 20 nt, Human
ucagugauuuugaagaggaa

SEQ ID NO: 850032 - RNA, 22 nt, Human
uggcuucuuuguagaaauugaa

SEQ ID NO: 850033 - RNA, 22 nt, Human
gagguccaggguggggccugag

SEQ ID NO: 850034 - RNA, 22 nt, Human
aaauauaguaaaugcauaguuc

SEQ ID NO: 850035 - RNA, 22 nt, Human
gcagcugagagaagaacagggc

SEQ ID NO: 850036 - RNA, 16 nt, Human
gucuggccuaccugcc

SEQ ID NO: 850037 - RNA, 22 nt, Human
uuuaguagaaauauuugggccu

SEQ ID NO: 850038 - RNA, 22 nt, Human
uaggcagcagugcuaugauucu

SEQ ID NO: 850039 - RNA, 22 nt, Human
uggccauagcucagcuccuuca

SEQ ID NO: 850040 - RNA, 22 nt, Human
cccaggaagagugaguggcauu

SEQ ID NO: 850041 - RNA, 22 nt, Human
ucaauuauuugauaugaaaggg

SEQ ID NO: 850042 - RNA, 22 nt, Human
gugaaggacuagcauggagggc

SEQ ID NO: 850043 - RNA, 22 nt, Human
gagucuuugguaaagucugcug

SEQ ID NO: 850044 - RNA, 22 nt, Human
gcugcaggcuguggcaggggag

SEQ ID NO: 850045 - RNA, 20 nt, Human
cugcugugguccuuuauuuu

SEQ ID NO: 850046 - RNA, 22 nt, Human
cugcucugacccuuucaccuuc

SEQ ID NO: 850047 - RNA, 22 nt, Human
acaguaauugugaacuuaacgu

SEQ ID NO: 850048 - RNA, 22 nt, Human
ccagagcuugacgugcaacgga

SEQ ID NO: 850049 - RNA, 22 nt, Human
aagaaguuggaaaugauugaga

SEQ ID NO: 850050 - RNA, 18 nt, Human
uaacugguuucuucccau

SEQ ID NO: 850051 - RNA, 22 nt, Human
cuaagaaaauagaagcaugcua

SEQ ID NO: 850052 - RNA, 22 nt, Human
cuguggucaccaggcuggggcc

SEQ ID NO: 850053 - RNA, 22 nt, Human
uugaauaguuuuggauagcaua

SEQ ID NO: 850054 - RNA, 22 nt, Human
ucuggcaggcaaucggcucugg

SEQ ID NO: 850055 - RNA, 22 nt, Human
ugcuuugggucucucuaguuuc

SEQ ID NO: 850056 - RNA, 22 nt, Human
gauuaggagggagaggcaagua

SEQ ID NO: 850057 - RNA, 22 nt, Human
ggccaggaagggaagaucagca

SEQ ID NO: 850058 - RNA, 21 nt, Human
aaggcugagacaacucaggag

SEQ ID NO: 850059 - RNA, 22 nt, Human
ccucuucuaggacguccuugug

SEQ ID NO: 850060 - RNA, 22 nt, Human
ucucuggccgagagucccuggg

SEQ ID NO: 850061 - RNA, 22 nt, Human
cagcaagacuucagggcuuggu

SEQ ID NO: 850062 - RNA, 22 nt, Human
agguaggggguuugggaacugc

SEQ ID NO: 850063 - RNA, 22 nt, Human
acaguaacucuuuuacccuccu

SEQ ID NO: 850064 - RNA, 22 nt, Human
gcaggaagcauagaagaaugcc

SEQ ID NO: 850065 - RNA, 22 nt, Human
uucuucaaugugcccuguuuuc

SEQ ID NO: 850066 - RNA, 22 nt, Human
ggcucagagaccugcgaucuga

SEQ ID NO: 850067 - RNA, 22 nt, Human
ggguggagaggcuaaguccagu

SEQ ID NO: 850068 - RNA, 22 nt, Human
gauuaaguaacugaacacuuug

SEQ ID NO: 850069 - RNA, 22 nt, Human
ucuucuaguaggccaagaagcu

SEQ ID NO: 850070 - RNA, 22 nt, Human
uguugaagauaaaguucucauu

SEQ ID NO: 850071 - RNA, 22 nt, Human
uugaauuauaagugugucuacu

SEQ ID NO: 850072 - RNA, 23 nt, Human
cugcuguuuucuguaccugaagc

SEQ ID NO: 850073 - RNA, 22 nt, Human
ucugaggucacagauuucaaga

SEQ ID NO: 850074 - RNA, 22 nt, Human
agaggacagacggaaagugcca

SEQ ID NO: 850075 - RNA, 22 nt, Human
auuugcuuuaagguauaaaagg

SEQ ID NO: 850076 - RNA, 22 nt, Human
cuucagagugcagaagauuggg

SEQ ID NO: 850077 - RNA, 19 nt, Human
agcuuccauauucucuagu

SEQ ID NO: 850078 - RNA, 20 nt, Human
uaggcagcuugacccuuggu

SEQ ID NO: 850079 - RNA, 22 nt, Human
ccuuuucaacuaagauucugca

SEQ ID NO: 850080 - RNA, 22 nt, Human
uugaggucuucagcugacaccu

SEQ ID NO: 850081 - RNA, 22 nt, Human
agacaggcagaggcugcagagg

SEQ ID NO: 850082 - RNA, 22 nt, Human
cagcaagauuuuuaaagcaagg

SEQ ID NO: 850083 - RNA, 22 nt, Human
uguccucagauaugucuacucu

SEQ ID NO: 850084 - RNA, 22 nt, Human
uucccucucacuuaaagcuugg

SEQ ID NO: 850085 - RNA, 22 nt, Human
gcauugaguccacucugucuuu

SEQ ID NO: 850086 - RNA, 22 nt, Human
cuuugcaauagaggcacacaug

SEQ ID NO: 850087 - RNA, 22 nt, Human
guugacagaaaaauaacauagc

SEQ ID NO: 850088 - RNA, 22 nt, Human
auuagagaaugugcugacauug

SEQ ID NO: 850089 - RNA, 22 nt, Human
uuuauuagauuaucaaagaggu

SEQ ID NO: 850090 - RNA, 22 nt, Human
aaaggccacugcaagggaaggu

SEQ ID NO: 850091 - RNA, 22 nt, Human
caggcgagggcccugaggagcc

SEQ ID NO: 850092 - RNA, 22 nt, Human
ucuccuggcaugugggucaucu

SEQ ID NO: 850093 - RNA, 22 nt, Human
uggguccacaaacaucagauau

SEQ ID NO: 850094 - RNA, 22 nt, Human
cccaggagagaggccaguuggc

SEQ ID NO: 850095 - RNA, 22 nt, Human
gagggcugccacguugggcgag

SEQ ID NO: 850096 - RNA, 22 nt, Human
guggccaagaggggacuggaua

SEQ ID NO: 850097 - RNA, 22 nt, Human
ucuaaagaagaggguucugcgg

SEQ ID NO: 850098 - RNA, 22 nt, Human
gggcagcuggcuuauagguuug

SEQ ID NO: 850099 - RNA, 22 nt, Human
auuuucaaaacaucugcugugu

SEQ ID NO: 850100 - RNA, 18 nt, Human
agaggggagguaagucug

SEQ ID NO: 850101 - RNA, 22 nt, Human
cacagcuaggaggaaagcagag

SEQ ID NO: 850102 - RNA, 22 nt, Human
aucuucucauguguaaugaggu

SEQ ID NO: 850103 - RNA, 22 nt, Human
ucugccugcggcugcagguggc

SEQ ID NO: 850104 - RNA, 22 nt, Human
cagugauggauauggagaaguc

SEQ ID NO: 850105 - RNA, 22 nt, Human
uauuucagcaagaagaaugugg

SEQ ID NO: 850106 - RNA, 22 nt, Human
caaggcugucuccagcuuccaa

SEQ ID NO: 850107 - RNA, 22 nt, Human
cagucucucugaaguauuaaga

SEQ ID NO: 850108 - RNA, 23 nt, Human
gcagaggagcaagcuggacacca

SEQ ID NO: 850109 - RNA, 22 nt, Human
ucugagccguauggcuuggcua

SEQ ID NO: 850110 - RNA, 22 nt, Human
acccucccauuuccauguagca

SEQ ID NO: 850111 - RNA, 22 nt, Human
acccagagaacugugccuugag

SEQ ID NO: 850112 - RNA, 22 nt, Human
uuuuaucuaccuaugcucauuu

SEQ ID NO: 850113 - RNA, 22 nt, Human
ugcugaggcccaggagcacuuu

SEQ ID NO: 850114 - RNA, 22 nt, Human
gucaggauuggggucaugaguc

SEQ ID NO: 850115 - RNA, 22 nt, Human
ugaaggcugggcucagccagcu

SEQ ID NO: 850116 - RNA, 21 nt, Human
ucacagacuggucagugaggc

SEQ ID NO: 850117 - RNA, 22 nt, Human
gugggguagaucuuucucagga

SEQ ID NO: 850118 - RNA, 23 nt, Human
acauacauggagauaaagugaug

SEQ ID NO: 850119 - RNA, 22 nt, Human
uucaaauacauucuuugccacu

SEQ ID NO: 850120 - RNA, 22 nt, Human
gcccaggaggcagagguugugg

SEQ ID NO: 850121 - RNA, 20 nt, Human
cuucuucaguaguuuguucu

SEQ ID NO: 850122 - RNA, 21 nt, Human
agggagcuuuagguagaaguu

SEQ ID NO: 850123 - RNA, 23 nt, Human
aaaugacauaugguuucugaagg

SEQ ID NO: 850124 - RNA, 22 nt, Human
uuuauucaucaucuguucauau

SEQ ID NO: 850125 - RNA, 22 nt, Human
uuccaagaguaaauucaaauug

SEQ ID NO: 850126 - RNA, 22 nt, Human
cuguccccgcgaguccagagcu

SEQ ID NO: 850127 - RNA, 22 nt, Human
gcugccucugcgacucugggcg

SEQ ID NO: 850128 - RNA, 22 nt, Human
ucuucaaguuccaaagugcagg

SEQ ID NO: 850129 - RNA, 22 nt, Human
aacaugauggggaagaacaaga

SEQ ID NO: 850130 - RNA, 22 nt, Human
uuugcaaauaccaugaaacuug

SEQ ID NO: 850131 - RNA, 22 nt, Human
gguguccaucaggcugugcuuc

SEQ ID NO: 850132 - RNA, 22 nt, Human
gagccaagaucgcaccacugca

SEQ ID NO: 850133 - RNA, 22 nt, Human
caugauuuugucuuguguuaau

SEQ ID NO: 850134 - RNA, 22 nt, Human
gggcagcucuggcugugggaag

SEQ ID NO: 850135 - RNA, 22 nt, Human
auauacaugggaauauguggag

SEQ ID NO: 850136 - RNA, 22 nt, Human
uccccagggcugcagagggugu

SEQ ID NO: 850137 - RNA, 22 nt, Human
ugaaguuauauauguugaaaau

SEQ ID NO: 850138 - RNA, 22 nt, Human
caagauggguguugugaugguu

SEQ ID NO: 850139 - RNA, 22 nt, Human
uugaggucuggcaguagcguug

SEQ ID NO: 850140 - RNA, 22 nt, Human
aaauuguugaucuacaguaagg

SEQ ID NO: 850141 - RNA, 22 nt, Human
uaacaguaaaguaaguuagcuu

SEQ ID NO: 850142 - RNA, 22 nt, Human
uuugcaaagaaauuauugcugu

SEQ ID NO: 850143 - RNA, 22 nt, Human
ugaggcccagccgcccugagag

SEQ ID NO: 850144 - RNA, 22 nt, Human
gcuggcugcacaggggcucacu

SEQ ID NO: 850145 - RNA, 22 nt, Human
agcagccuuugaucaucuggga

SEQ ID NO: 850146 - RNA, 18 nt, Human
aagaggaggagcagguug

SEQ ID NO: 850147 - RNA, 22 nt, Human
uagugcuuaauaaauuucagaa

SEQ ID NO: 850148 - RNA, 22 nt, Human
gacaggcuucauccucagaguu

SEQ ID NO: 850149 - RNA, 22 nt, Human
aguuacagugaccauuuauuua

SEQ ID NO: 850150 - RNA, 22 nt, Human
agccagcugugggcucaggcgg

SEQ ID NO: 850151 - RNA, 22 nt, Human
uccugggcuuuguuucucuccu

SEQ ID NO: 850152 - RNA, 22 nt, Human
uugaaaggguuaaagugguaaa

SEQ ID NO: 850153 - RNA, 22 nt, Human
ugaaaugagagcacagaauaaa

SEQ ID NO: 850154 - RNA, 22 nt, Human
uuggcagcccagcuuacuagca

SEQ ID NO: 850155 - RNA, 22 nt, Human
gccugcuggaggagccucaggg

SEQ ID NO: 850156 - RNA, 20 nt, Human
gggcagcuccccucauucug

SEQ ID NO: 850157 - RNA, 19 nt, Human
ccagaguuggcagagcagg

SEQ ID NO: 850158 - RNA, 20 nt, Human
guaacucuggcuaaguaaau

SEQ ID NO: 850159 - RNA, 22 nt, Human
aacuggauuuugaugagcaguu

SEQ ID NO: 850160 - RNA, 22 nt, Human
cacuuucucaugaauuuggccc

SEQ ID NO: 850161 - RNA, 22 nt, Human
aggcuggcgacaucuggcgggc

SEQ ID NO: 850162 - RNA, 22 nt, Human
auguggaggaaaugaguguaca

SEQ ID NO: 850163 - RNA, 22 nt, Human
gagcugagggucuaggaggguu

SEQ ID NO: 850164 - RNA, 22 nt, Human
guuugcauauuugcacaggaau

SEQ ID NO: 850165 - RNA, 22 nt, Human
cuagccugggauuugaacuuau

SEQ ID NO: 850166 - RNA, 22 nt, Human
auuugcaaagucguaucuguga

SEQ ID NO: 850167 - RNA, 22 nt, Human
cucaggaucgcuugcccuaggg

SEQ ID NO: 850168 - RNA, 22 nt, Human
auggaaagggaagcaaggaaca

SEQ ID NO: 850169 - RNA, 22 nt, Human
guucuucaucuuaaccaucugu

SEQ ID NO: 850170 - RNA, 22 nt, Human
auauuagguuggugcaaaagua

SEQ ID NO: 850171 - RNA, 22 nt, Human
uccugagcugccgcaucagcag

SEQ ID NO: 850172 - RNA, 22 nt, Human
uagaaacaucagcuaaccaaaa

SEQ ID NO: 850173 - RNA, 22 nt, Human
ggagcggagggagggccacugu

SEQ ID NO: 850174 - RNA, 22 nt, Human
uggcacauaguaggugcucaau

SEQ ID NO: 850175 - RNA, 22 nt, Human
cagagggcucuuggcugccugc

SEQ ID NO: 850176 - RNA, 22 nt, Human
gucaggaugggcagccaaacua

SEQ ID NO: 850177 - RNA, 20 nt, Human
aggcaguuagaaggagauga

SEQ ID NO: 850178 - RNA, 22 nt, Human
gcaaauauucaagacuuuucca

SEQ ID NO: 850179 - RNA, 22 nt, Human
gggcagcuggccagguauucug

SEQ ID NO: 850180 - RNA, 21 nt, Human
cagaggucauccugaggacaa

SEQ ID NO: 850181 - RNA, 22 nt, Human
ccuccuggaaaaauucccuggc

SEQ ID NO: 850182 - RNA, 22 nt, Human
uacacauacaccaaugugguca

SEQ ID NO: 850183 - RNA, 22 nt, Human
uuauguaggauaaugaauugcc

SEQ ID NO: 850184 - RNA, 21 nt, Human
gcugcccaacccugcaucucc

SEQ ID NO: 850185 - RNA, 22 nt, Human
ccaggaguggcuggugaccuuc

SEQ ID NO: 850186 - RNA, 22 nt, Human
guggcagagugcgguucugacc

SEQ ID NO: 850187 - RNA, 22 nt, Human
accaggaggccuggagcacaaa

SEQ ID NO: 850188 - RNA, 22 nt, Human
ucuuggcuaguaccuuccugcc

SEQ ID NO: 850189 - RNA, 22 nt, Human
auuagagcuguuagugaagugc

SEQ ID NO: 850190 - RNA, 22 nt, Human
ccugagccucuugcacgcucag

SEQ ID NO: 850191 - RNA, 22 nt, Human
gaggccaggagugcuguaaguu

SEQ ID NO: 850192 - RNA, 22 nt, Human
ucacaaaagcuuuugaauuugg

SEQ ID NO: 850193 - RNA, 22 nt, Human
cugguacaguguuacaaaaugg

SEQ ID NO: 850194 - RNA, 23 nt, Human
uccaggagcaugcuggcuggcga

SEQ ID NO: 850195 - RNA, 22 nt, Human
aggcugagcggggucccagagc

SEQ ID NO: 850196 - RNA, 22 nt, Human
cucaguuuugcuagcuggaguu

SEQ ID NO: 850197 - RNA, 22 nt, Human
gcauguguggaggagaugugcu

SEQ ID NO: 850198 - RNA, 22 nt, Human
gguggagcuggaccaggagagg

SEQ ID NO: 850199 - RNA, 22 nt, Human
gaaggggacuggcagcugcaga

SEQ ID NO: 850200 - RNA, 22 nt, Human
aagcugaggucaaguagcuagu

SEQ ID NO: 850201 - RNA, 22 nt, Human
augaggucauucuuggauuaca

SEQ ID NO: 850202 - RNA, 22 nt, Human
gcugagguuucaggaguggcag

SEQ ID NO: 850203 - RNA, 22 nt, Human
uccaggagguugagacugcagu

SEQ ID NO: 850204 - RNA, 22 nt, Human
acuggcagccacaacuggcagg

SEQ ID NO: 850205 - RNA, 22 nt, Human
agguaacacuacuuaguauacu

SEQ ID NO: 850206 - RNA, 21 nt, Human
uuaccaauggcuucucuuucc

SEQ ID NO: 850207 - RNA, 22 nt, Human
uugguacaugcagauauuuagu

SEQ ID NO: 850208 - RNA, 22 nt, Human
caucucaugggcaugccaagcu

SEQ ID NO: 850209 - RNA, 17 nt, Human
cccacggaggugugaaa

SEQ ID NO: 850210 - RNA, 22 nt, Human
acuaaaguaucuccuauuucau

SEQ ID NO: 850211 - RNA, 22 nt, Human
cauuuguaucauauguaucuua

SEQ ID NO: 850212 - RNA, 22 nt, Human
uccaggagacacccuugugugu

SEQ ID NO: 850213 - RNA, 22 nt, Human
gcagacagaugagggugcuggg

SEQ ID NO: 850214 - RNA, 23 nt, Human
uuucaacuccugccauuauuucu

SEQ ID NO: 850215 - RNA, 22 nt, Human
ccuggcuggauggagccccugg

SEQ ID NO: 850216 - RNA, 22 nt, Human
uagcagaggcaaggaugugaau

SEQ ID NO: 850217 - RNA, 22 nt, Human
cuggcuguauuaguuugauccu

SEQ ID NO: 850218 - RNA, 22 nt, Human
ggccaggagaggagggcacuga

SEQ ID NO: 850219 - RNA, 22 nt, Human
aggccaaagugcuccuuuuaga

SEQ ID NO: 850220 - RNA, 22 nt, Human
cugagccagcuggcaugugcua

SEQ ID NO: 850221 - RNA, 22 nt, Human
gagcaccucaauuugcuauuug

SEQ ID NO: 850222 - RNA, 22 nt, Human
uaguuaggguucugcagagaca

SEQ ID NO: 850223 - RNA, 22 nt, Human
auucuucaguauguguggauug

SEQ ID NO: 850224 - RNA, 20 nt, Human
ucauuacagugcuaagaugu

SEQ ID NO: 850225 - RNA, 22 nt, Human
uccuggccaaguuacucucugc

SEQ ID NO: 850226 - RNA, 22 nt, Human
uauuuccaaaagccuauuauga

SEQ ID NO: 850227 - RNA, 19 nt, Human
caggaaugagguaauggcu

SEQ ID NO: 850228 - RNA, 22 nt, Human
cagcuggccaaucagggcgccc

SEQ ID NO: 850229 - RNA, 22 nt, Human
ucugagguuuucauguuuucug

SEQ ID NO: 850230 - RNA, 22 nt, Human
uacacuuuucaauguagucugu

SEQ ID NO: 850231 - RNA, 22 nt, Human
cugggccagaccuuguggucuu

SEQ ID NO: 850232 - RNA, 22 nt, Human
cagaauggcuuuuauggcucag

SEQ ID NO: 850233 - RNA, 22 nt, Human
ucucaggacuuugggaagcuca

SEQ ID NO: 850234 - RNA, 21 nt, Human
gccuggcucucacuggccugg

SEQ ID NO: 850235 - RNA, 22 nt, Human
uacauacagagaugcuaguuaa

SEQ ID NO: 850236 - RNA, 22 nt, Human
ggaggaggcggcagaaguuccu

SEQ ID NO: 850237 - RNA, 22 nt, Human
gcucaggaucccaggggugugc

SEQ ID NO: 850238 - RNA, 22 nt, Human
uuugaaguucccccauaucaga

SEQ ID NO: 850239 - RNA, 20 nt, Human
cacguuuuuccacuagcaaa

SEQ ID NO: 850240 - RNA, 22 nt, Human
gcccuccccucuggguggugag

SEQ ID NO: 850241 - RNA, 22 nt, Human
aucuucucaagcagcauccugu

SEQ ID NO: 850242 - RNA, 20 nt, Human
aggccaaacccagcgcgccc

SEQ ID NO: 850243 - RNA, 22 nt, Human
cagagagagucaaaucuuugcu

SEQ ID NO: 850244 - RNA, 22 nt, Human
ggguccaccugagcagcagccu

SEQ ID NO: 850245 - RNA, 22 nt, Human
aagcagcuuuugaagagugagg

SEQ ID NO: 850246 - RNA, 22 nt, Human
cucccaggcacagggaggagcc

SEQ ID NO: 850247 - RNA, 22 nt, Human
guuuucaauuauaagauggcuu

SEQ ID NO: 850248 - RNA, 22 nt, Human
guguuuuaagaaagaagcucag

SEQ ID NO: 850249 - RNA, 22 nt, Human
uuagagucaaaauggcauguua

SEQ ID NO: 850250 - RNA, 22 nt, Human
cgaggcagggaagcugcaaaag

SEQ ID NO: 850251 - RNA, 22 nt, Human
cucuucucugcagccuuugaag

SEQ ID NO: 850252 - RNA, 22 nt, Human
uuugaaagggacaaagucacug

SEQ ID NO: 850253 - RNA, 22 nt, Human
ugaaaugaagggcuuguucugg

SEQ ID NO: 850254 - RNA, 22 nt, Human
cugcugugcacccaggaaggcu

SEQ ID NO: 850255 - RNA, 22 nt, Human
ggaguaggaguagaacucauca

SEQ ID NO: 850256 - RNA, 22 nt, Human
ugauuuccuaggucuggagaag

SEQ ID NO: 850257 - RNA, 22 nt, Human
uuuuacuuaauucuuggucaug

SEQ ID NO: 850258 - RNA, 22 nt, Human
gcccagggcuucaaagagagaa

SEQ ID NO: 850259 - RNA, 23 nt, Human
uugcacauuggagcuggucuucu

SEQ ID NO: 850260 - RNA, 22 nt, Human
gagcugaguguccuaggcaugg

SEQ ID NO: 850261 - RNA, 22 nt, Human
gccuggcucccucugcagcucc

SEQ ID NO: 850262 - RNA, 22 nt, Human
aggccagaugucgggcuagaag

SEQ ID NO: 850263 - RNA, 22 nt, Human
cuggaggcacccuuagagaggc

SEQ ID NO: 850264 - RNA, 22 nt, Human
ucacaguaucacacaaggauua

SEQ ID NO: 850265 - RNA, 22 nt, Human
gcucaggaaaacagucuaguaa

SEQ ID NO: 850266 - RNA, 22 nt, Human
ccuccucugggaagauucagag

SEQ ID NO: 850267 - RNA, 22 nt, Human
aucaggaucugcaucauaagaa

SEQ ID NO: 850268 - RNA, 22 nt, Human
uccaggagguaugaguggcccc

SEQ ID NO: 850269 - RNA, 22 nt, Human
uuuaauuaggaaaugggcaggg

SEQ ID NO: 850270 - RNA, 23 nt, Human
ugauuaggucuacucuuggcucc

SEQ ID NO: 850271 - RNA, 22 nt, Human
ucucugcccauccucaguccac

SEQ ID NO: 850272 - RNA, 22 nt, Human
cagcugccugucuggaggcaau

SEQ ID NO: 850273 - RNA, 22 nt, Human
gaaaugaaacaggcuuuuaagg

SEQ ID NO: 850274 - RNA, 22 nt, Human
ugaggcuguucuaccagggcca

SEQ ID NO: 850275 - RNA, 22 nt, Human
acagcauugcuccaucucaaga

SEQ ID NO: 850276 - RNA, 22 nt, Human
agaauaaaauagucugaagaug

SEQ ID NO: 850277 - RNA, 22 nt, Human
cagcgucucguugugggccucg

SEQ ID NO: 850278 - RNA, 22 nt, Human
ggcugcugguagggguaggaag

SEQ ID NO: 850279 - RNA, 23 nt, Human
ccuggcuguggauuugggccugc

SEQ ID NO: 850280 - RNA, 21 nt, Human
agacagaacaacugcucucca

SEQ ID NO: 850281 - RNA, 22 nt, Human
augcaucuauucccaagggcag

SEQ ID NO: 850282 - RNA, 22 nt, Human
acucauuugacacuuuaaacug

SEQ ID NO: 850283 - RNA, 22 nt, Human
uacagagaauaauaggacaggu

SEQ ID NO: 850284 - RNA, 22 nt, Human
ugaaagcacaaguucuaacagg

SEQ ID NO: 850285 - RNA, 22 nt, Human
agcacagggcccagccuaggcc

SEQ ID NO: 850286 - RNA, 22 nt, Human
uucucaaagaaagcugucauua

SEQ ID NO: 850287 - RNA, 19 nt, Human
gaggucagcaagaaguauu

SEQ ID NO: 850288 - RNA, 22 nt, Human
agacaaauggaguaugagcaac

SEQ ID NO: 850289 - RNA, 22 nt, Human
auucuucacuguuucagaauga

SEQ ID NO: 850290 - RNA, 22 nt, Human
uucaccuugaauaugucuuaaa

SEQ ID NO: 850291 - RNA, 22 nt, Human
cucuuucugauucgcugggacc

SEQ ID NO: 850292 - RNA, 22 nt, Human
cagcugcuuuaguuuuccaucc

SEQ ID NO: 850293 - RNA, 22 nt, Human
cuggcuugcagcucaucauaaa

SEQ ID NO: 850294 - RNA, 19 nt, Human
uucuccagccugaccugag

SEQ ID NO: 850295 - RNA, 22 nt, Human
ugucucugauaaguaguucagu

SEQ ID NO: 850296 - RNA, 22 nt, Human
cccaggaauuggaggcugcagu

SEQ ID NO: 850297 - RNA, 22 nt, Human
gagcuguccgccccugggccga

SEQ ID NO: 850298 - RNA, 22 nt, Human
gucaggaugagggaugaggagu

SEQ ID NO: 850299 - RNA, 22 nt, Human
caggaugagguagaggcagaua

SEQ ID NO: 850300 - RNA, 22 nt, Human
uguagauaaguaaaagcccagu

SEQ ID NO: 850301 - RNA, 22 nt, Human
gcucccagacugaccagaggug

SEQ ID NO: 850302 - RNA, 22 nt, Human
agcacuguggggaacucacaga

SEQ ID NO: 850303 - RNA, 22 nt, Human
acaaugaacgcuuuuuaacugu

SEQ ID NO: 850304 - RNA, 22 nt, Human
ucacauucucagcaucuauaca

SEQ ID NO: 850305 - RNA, 22 nt, Human
gauauagguucauaguguuaca

SEQ ID NO: 850306 - RNA, 22 nt, Human
cuuuggcacagucucauuugau

SEQ ID NO: 850307 - RNA, 22 nt, Human
auucuagaaggcaaagcaaggg

SEQ ID NO: 850308 - RNA, 22 nt, Human
uggcucaggggucuggcucugu

SEQ ID NO: 850309 - RNA, 22 nt, Human
gggcaguugauggaggucugga

SEQ ID NO: 850310 - RNA, 22 nt, Human
guguugaugacauuuuagaaac

SEQ ID NO: 850311 - RNA, 22 nt, Human
aaaaacugguaacuauucccca

SEQ ID NO: 850312 - RNA, 22 nt, Human
cagucucucagcuuucagcugu

SEQ ID NO: 850313 - RNA, 22 nt, Human
gcugggaagugcaagaucaagg

SEQ ID NO: 850314 - RNA, 22 nt, Human
agcuucccaagguuggaagguu

SEQ ID NO: 850315 - RNA, 19 nt, Human
uucccaggaaaggggugca

SEQ ID NO: 850316 - RNA, 22 nt, Human
augcugugguagacagcauucc

SEQ ID NO: 850317 - RNA, 21 nt, Human
uuuuauugaugaauggccacu

SEQ ID NO: 850318 - RNA, 22 nt, Human
ugauuuuuagcuauucugaaga

SEQ ID NO: 850319 - RNA, 22 nt, Human
cucaggaugucggugacuauug

SEQ ID NO: 850320 - RNA, 22 nt, Human
uuuuuuaguuaggucagaaugu

SEQ ID NO: 850321 - RNA, 22 nt, Human
uacuuucuagcucuccccaguu

SEQ ID NO: 850322 - RNA, 22 nt, Human
auaguuugugaaacacagcagu

SEQ ID NO: 850323 - RNA, 22 nt, Human
uagggauguaaacauaguaauu

SEQ ID NO: 850324 - RNA, 22 nt, Human
caaauacuggguaaguuaauuu

SEQ ID NO: 850325 - RNA, 22 nt, Human
agaggaggaagagcuuuaaaau

SEQ ID NO: 850326 - RNA, 22 nt, Human
gaggcagcagaacauggaagag

SEQ ID NO: 850327 - RNA, 22 nt, Human
gcugccugccuugccuggagga

SEQ ID NO: 850328 - RNA, 22 nt, Human
uuuuuauaugaaggauagugcg

SEQ ID NO: 850329 - RNA, 22 nt, Human
ggccugagaaccauggggccaa

SEQ ID NO: 850330 - RNA, 22 nt, Human
ugaggcucagagaagugcuguu

SEQ ID NO: 850331 - RNA, 22 nt, Human
ccuggauucaagucuuucuuuc

SEQ ID NO: 850332 - RNA, 22 nt, Human
gggcugagucaucuggggccuc

SEQ ID NO: 850333 - RNA, 22 nt, Human
ccaggcuggucugaauuucuag

SEQ ID NO: 850334 - RNA, 22 nt, Human
cugccuggggaaugugaggauu

SEQ ID NO: 850335 - RNA, 21 nt, Human
uucaaaaugguguguuugucu

SEQ ID NO: 850336 - RNA, 22 nt, Human
agcagcuggaacauaugaagaa

SEQ ID NO: 850337 - RNA, 22 nt, Human
aaaaaugaaacggcugguuggc

SEQ ID NO: 850338 - RNA, 22 nt, Human
acuccuggguuccggagauucu

SEQ ID NO: 850339 - RNA, 22 nt, Human
ggcuaggcgggcacauggugga

SEQ ID NO: 850340 - RNA, 22 nt, Human
ugaguucuaguggcugcagauu

SEQ ID NO: 850341 - RNA, 19 nt, Human
gagcgcagagggcagggga

SEQ ID NO: 850342 - RNA, 22 nt, Human
cuucugcaauaaguuuuggucc

SEQ ID NO: 850343 - RNA, 22 nt, Human
gagaaggaguagcugaccuggg

SEQ ID NO: 850344 - RNA, 22 nt, Human
gccaggggacgcggagcgacga

SEQ ID NO: 850345 - RNA, 22 nt, Human
aaagauuaggcggcaacugggc

SEQ ID NO: 850346 - RNA, 22 nt, Human
aaauaaguuaaacuagaaugau

SEQ ID NO: 850347 - RNA, 22 nt, Human
gacacuuuauuaagcuguuguu

SEQ ID NO: 850348 - RNA, 19 nt, Human
gccaggcuccauagccggc

SEQ ID NO: 850349 - RNA, 22 nt, Human
uuucaaagaguuguaaauuacu

SEQ ID NO: 850350 - RNA, 18 nt, Human
agggaguuuuagggaagg

SEQ ID NO: 850351 - RNA, 20 nt, Human
uuucaguuaucuugaccuuc

SEQ ID NO: 850352 - RNA, 22 nt, Human
cugagggccuuggcuccugccc

SEQ ID NO: 850353 - RNA, 22 nt, Human
uuaaaauagccagugccccucu

SEQ ID NO: 850354 - RNA, 22 nt, Human
ccuguccuccaagagcacaucu

SEQ ID NO: 850355 - RNA, 22 nt, Human
gacugguaagguauuggaauuc

SEQ ID NO: 850356 - RNA, 22 nt, Human
ggcagaggaaggaugaauucac

SEQ ID NO: 850357 - RNA, 22 nt, Human
uaauacagaaguguauuaaaau

SEQ ID NO: 850358 - RNA, 20 nt, Human
uaggcagagcugugcagccu

SEQ ID NO: 850359 - RNA, 22 nt, Human
caguugcuggaugugcagcucu

SEQ ID NO: 850360 - RNA, 19 nt, Human
aucugccuguuaucacaua

SEQ ID NO: 850361 - RNA, 22 nt, Human
ugcugcugaugcauagucugcu

SEQ ID NO: 850362 - RNA, 22 nt, Human
uacacacaugcauuugccuuau

SEQ ID NO: 850363 - RNA, 22 nt, Human
ucugagguggggcuggagcauu

SEQ ID NO: 850364 - RNA, 22 nt, Human
uugcucaggcuggugugcagug

SEQ ID NO: 850365 - RNA, 22 nt, Human
cugcacaguuugauuucuugcu

SEQ ID NO: 850366 - RNA, 18 nt, Human
uuugcaaaggaaguaugg

SEQ ID NO: 850367 - RNA, 22 nt, Human
auauauuugagaauauucauga

SEQ ID NO: 850368 - RNA, 15 nt, Human
caggagaggaagguu

SEQ ID NO: 850369 - RNA, 22 nt, Human
cuuagagccuuacucuucuugu

SEQ ID NO: 850370 - RNA, 22 nt, Human
uuauuuaaugugaucugaagag

SEQ ID NO: 850371 - RNA, 22 nt, Human
ugcccuggggagcccagccagg

SEQ ID NO: 850372 - RNA, 22 nt, Human
guggccaaacaccaguuuagga

SEQ ID NO: 850373 - RNA, 22 nt, Human
cugcuguggccagccaggucaa

SEQ ID NO: 850374 - RNA, 22 nt, Human
acaggcugggcgcuuccugcgg

SEQ ID NO: 850375 - RNA, 22 nt, Human
ucucauugguauauacaugugu

SEQ ID NO: 850376 - RNA, 22 nt, Human
gcuggccauggccugcgccauc

SEQ ID NO: 850377 - RNA, 22 nt, Human
ugaggcaguucuuacuuguauu

SEQ ID NO: 850378 - RNA, 22 nt, Human
ucaggagaaggcaauguggaaa

SEQ ID NO: 850379 - RNA, 23 nt, Human
uggccacagggugcuccauugua

SEQ ID NO: 850380 - RNA, 22 nt, Human
ggaggcugagaaguccaagauc

SEQ ID NO: 850381 - RNA, 22 nt, Human
agaaaguuugagaacuguagau

SEQ ID NO: 850382 - RNA, 22 nt, Human
cagagccacuuggagaugagaa

SEQ ID NO: 850383 - RNA, 22 nt, Human
ucauuugugugagugauuugac

SEQ ID NO: 850384 - RNA, 22 nt, Human
aagacuguacauuuuccagucu

SEQ ID NO: 850385 - RNA, 22 nt, Human
aaagccaugggucuuuggcaua

SEQ ID NO: 850386 - RNA, 22 nt, Human
gaaggccauuuuuagguagaau

SEQ ID NO: 850387 - RNA, 22 nt, Human
uuucaguuuaugucuugaauua

SEQ ID NO: 850388 - RNA, 22 nt, Human
caagaagugucagcuuuuuaaa

SEQ ID NO: 850389 - RNA, 22 nt, Human
uuugaaagcaccauuugaguag

SEQ ID NO: 850390 - RNA, 22 nt, Human
uguagggaggaaggguuggaaa

SEQ ID NO: 850391 - RNA, 22 nt, Human
aaguuacaguuacagaauggag

SEQ ID NO: 850392 - RNA, 22 nt, Human
gcuguagguaaggauggcaaag

SEQ ID NO: 850393 - RNA, 22 nt, Human
ucuuuuggaaaugaugugcagg

SEQ ID NO: 850394 - RNA, 20 nt, Human
guggcaggcagugaaggagc

SEQ ID NO: 850395 - RNA, 22 nt, Human
ggagcagggcagugaauucugg

SEQ ID NO: 850396 - RNA, 22 nt, Human
auuaggauguuccuaugcacau

SEQ ID NO: 850397 - RNA, 22 nt, Human
aaacugguaauaaaauggauua

SEQ ID NO: 850398 - RNA, 22 nt, Human
cuggccaauccauuaauuuguu

SEQ ID NO: 850399 - RNA, 20 nt, Human
cauacacuauucuguauagu

SEQ ID NO: 850400 - RNA, 22 nt, Human
uaaguggaagguuauaugcuaa

SEQ ID NO: 850401 - RNA, 22 nt, Human
caagauggacauaaggagagaa

SEQ ID NO: 850402 - RNA, 22 nt, Human
uauuucuucgggauucaagcua

SEQ ID NO: 850403 - RNA, 22 nt, Human
uagaaaagauaacauucugugc

SEQ ID NO: 850404 - RNA, 22 nt, Human
aauaucaacaguguccuucuaa

SEQ ID NO: 850405 - RNA, 22 nt, Human
cuucugaggcagcuauucaguu

SEQ ID NO: 850406 - RNA, 22 nt, Human
gaggcagcggcucacagagaaa

SEQ ID NO: 850407 - RNA, 22 nt, Human
gagggcugauaaaugcgcaugg

SEQ ID NO: 850408 - RNA, 22 nt, Human
gagcaagacccuggguucucuc

SEQ ID NO: 850409 - RNA, 22 nt, Human
ucaggauguuaauauagcauua

SEQ ID NO: 850410 - RNA, 22 nt, Human
cagugcagguggcagaggacag

SEQ ID NO: 850411 - RNA, 22 nt, Human
ggcugagaacaggcccagccuc

SEQ ID NO: 850412 - RNA, 22 nt, Human
agcccagguucuaaagccaaac

SEQ ID NO: 850413 - RNA, 23 nt, Human
cugcuguguuggucucgauggga

SEQ ID NO: 850414 - RNA, 22 nt, Human
gcucaggaccgaggggugggaa

SEQ ID NO: 850415 - RNA, 22 nt, Human
ugaggucauggcugauauuucc

SEQ ID NO: 850416 - RNA, 22 nt, Human
uacaucuagccuuacaauuauu

SEQ ID NO: 850417 - RNA, 22 nt, Human
ccaggagacaaagaugacugcu

SEQ ID NO: 850418 - RNA, 23 nt, Human
ucucaagaggaagcagggcucau

SEQ ID NO: 850419 - RNA, 22 nt, Human
cccuggaggucagaggccuggg

SEQ ID NO: 850420 - RNA, 22 nt, Human
gagagaagaacaaugucauuca

SEQ ID NO: 850421 - RNA, 19 nt, Human
aggguggcaaaggagggug

SEQ ID NO: 850422 - RNA, 19 nt, Human
caaggccaccauuucuccg

SEQ ID NO: 850423 - RNA, 22 nt, Human
ggagagaaucugaaccugcucc

SEQ ID NO: 850424 - RNA, 19 nt, Human
caggaugaucccaugacac

SEQ ID NO: 850425 - RNA, 21 nt, Human
cccacggaaugaugaggcacu

SEQ ID NO: 850426 - RNA, 22 nt, Human
ccaggcugcuguugguguccgc

SEQ ID NO: 850427 - RNA, 22 nt, Human
ccaggcuguaaacaccuucaaa

SEQ ID NO: 850428 - RNA, 22 nt, Human
ucaacugcaaguuugcuuaguu

SEQ ID NO: 850429 - RNA, 22 nt, Human
uuucuucagccacuccaaacug

SEQ ID NO: 850430 - RNA, 22 nt, Human
gagugcaguuggggugagggga

SEQ ID NO: 850431 - RNA, 22 nt, Human
aaaugauugucaaaguucuguu

SEQ ID NO: 850432 - RNA, 18 nt, Human
gaugggagcaagagaaga

SEQ ID NO: 850433 - RNA, 22 nt, Human
acuuccugaauggggcuaauua

SEQ ID NO: 850434 - RNA, 20 nt, Human
uuggcagcuucaggguacua

SEQ ID NO: 850435 - RNA, 22 nt, Human
ugcuucagaggaaaggcaaaag

SEQ ID NO: 850436 - RNA, 19 nt, Human
uaaggccaaaaguaagugu

SEQ ID NO: 850437 - RNA, 23 nt, Human
gcuggcuggcaguaaagguuguu

SEQ ID NO: 850438 - RNA, 22 nt, Human
uggcuuuaggagcuauauaccu

SEQ ID NO: 850439 - RNA, 22 nt, Human
uaauuccaaguugagacaugca

SEQ ID NO: 850440 - RNA, 22 nt, Human
cagcuccugggccaucuccuag

SEQ ID NO: 850441 - RNA, 22 nt, Human
augcugugagugugccgcagag

SEQ ID NO: 850442 - RNA, 22 nt, Human
caggcagccuucucgucucaca

SEQ ID NO: 850443 - RNA, 19 nt, Human
ugcugcuguccuugcaggg

SEQ ID NO: 850444 - RNA, 22 nt, Human
gcugacagagugccuggccuca

SEQ ID NO: 850445 - RNA, 22 nt, Human
uuccaaagaaguucacauuuac

SEQ ID NO: 850446 - RNA, 22 nt, Human
uagcccagaagagggaagcaac

SEQ ID NO: 850447 - RNA, 22 nt, Human
gaggaacccagcugggguugcc

SEQ ID NO: 850448 - RNA, 22 nt, Human
agucugggagaaggugagauua

SEQ ID NO: 850449 - RNA, 22 nt, Human
uggggcucaccuaggcuggaag

SEQ ID NO: 850450 - RNA, 22 nt, Human
ucacaaauauuuuaacaguagg

SEQ ID NO: 850451 - RNA, 22 nt, Human
cuggcugugcugcaggcuuugg

SEQ ID NO: 850452 - RNA, 22 nt, Human
gcacugguaucaccugagagcu

SEQ ID NO: 850453 - RNA, 22 nt, Human
ccaggagagcgcccucccggcc

SEQ ID NO: 850454 - RNA, 18 nt, Human
auaaagugcuaauaaugg

SEQ ID NO: 850455 - RNA, 22 nt, Human
agaaaacuugucacagcucuca

SEQ ID NO: 850456 - RNA, 20 nt, Human
ucucagcauaagaacccuuc

SEQ ID NO: 850457 - RNA, 22 nt, Human
cugagggcuggagcugaggccu

SEQ ID NO: 850458 - RNA, 19 nt, Human
cucugccucccuccugggu

SEQ ID NO: 850459 - RNA, 22 nt, Human
aaagaguuggacuuucucaggc

SEQ ID NO: 850460 - RNA, 23 nt, Human
auugaugacuugauuacacuuuu

SEQ ID NO: 850461 - RNA, 22 nt, Human
acaggcagagaacucagccaga

SEQ ID NO: 850462 - RNA, 22 nt, Human
uagaaaugaauguuuaaaaguc

SEQ ID NO: 850463 - RNA, 22 nt, Human
cugagccaccggcagggacauc

SEQ ID NO: 850464 - RNA, 22 nt, Human
uuauuagguuauucucuguacu

SEQ ID NO: 850465 - RNA, 22 nt, Human
ccuccugggcuccugucugcac

SEQ ID NO: 850466 - RNA, 22 nt, Human
ugcugaggaaaaaugugacucu

SEQ ID NO: 850467 - RNA, 22 nt, Human
cagaaguugauccugcguuucc

SEQ ID NO: 850468 - RNA, 17 nt, Human
gagagcugcugcuuccg

SEQ ID NO: 850469 - RNA, 22 nt, Human
cagcacaguagaguaguuguaa

SEQ ID NO: 850470 - RNA, 22 nt, Human
aggcugaggggcgagggacccu

SEQ ID NO: 850471 - RNA, 23 nt, Human
cuugcaggaagcagauggcacac

SEQ ID NO: 850472 - RNA, 21 nt, Human
uaauaauuccacuacagagua

SEQ ID NO: 850473 - RNA, 22 nt, Human
gauguagagggaagauuuuaaa

SEQ ID NO: 850474 - RNA, 22 nt, Human
ccuggagcacauggcaggaggc

SEQ ID NO: 850475 - RNA, 20 nt, Human
aguuauaguaucuagccaug

SEQ ID NO: 850476 - RNA, 22 nt, Human
ccaggcuguuuucaaacuuggg

SEQ ID NO: 850477 - RNA, 22 nt, Human
gcaggggcuaaggacacagaga

SEQ ID NO: 850478 - RNA, 22 nt, Human
gcaggcugaguauuacccuagu

SEQ ID NO: 850479 - RNA, 22 nt, Human
cauuuguaguuaaaaaugucuc

SEQ ID NO: 850480 - RNA, 22 nt, Human
ccaggaaauagugcugugaucu

SEQ ID NO: 850481 - RNA, 20 nt, Human
acuguuaguauacuugugcc

SEQ ID NO: 850482 - RNA, 18 nt, Human
uaggagagaauuuauuua

SEQ ID NO: 850483 - RNA, 22 nt, Human
gagggcugauguugccaccuca

SEQ ID NO: 850484 - RNA, 22 nt, Human
cuccuuggccguuaaugucaca

SEQ ID NO: 850485 - RNA, 22 nt, Human
ucuccuggcccugucgccaucu

SEQ ID NO: 850486 - RNA, 22 nt, Human
cucaguuuuugcugucugguuc

SEQ ID NO: 850487 - RNA, 22 nt, Human
ucuccuggcucuaaaaggcugu

SEQ ID NO: 850488 - RNA, 22 nt, Human
ccagugcuuccaggaauacggu

SEQ ID NO: 850489 - RNA, 22 nt, Human
cacauauuguaguucaccagga

SEQ ID NO: 850490 - RNA, 22 nt, Human
uuugaaagaaaccagugaguga

SEQ ID NO: 850491 - RNA, 22 nt, Human
cuguccugauggugccacuggu

SEQ ID NO: 850492 - RNA, 22 nt, Human
cacuggugccagagaacagaau

SEQ ID NO: 850493 - RNA, 22 nt, Human
aaggccagaguacuagaggcug

SEQ ID NO: 850494 - RNA, 22 nt, Human
gaggcaguguuuacugcccugu

SEQ ID NO: 850495 - RNA, 22 nt, Human
uuacaagcagcuacauaucaca

SEQ ID NO: 850496 - RNA, 22 nt, Human
uuucuuauacuauauugucauc

SEQ ID NO: 850497 - RNA, 22 nt, Human
cccgggaggaggaaguugcagu

SEQ ID NO: 850498 - RNA, 22 nt, Human
cugcugugacagcugccguguu

SEQ ID NO: 850499 - RNA, 22 nt, Human
ucauauuaggguaaugauaaga

SEQ ID NO: 850500 - RNA, 22 nt, Human
ggcugucucugugacugccacc

SEQ ID NO: 850501 - RNA, 22 nt, Human
cugacagucucauugauuugcu

SEQ ID NO: 850502 - RNA, 22 nt, Human
caaggccacguucugcaugcgg

SEQ ID NO: 850503 - RNA, 22 nt, Human
caaguaaagaaucacauuucuu

SEQ ID NO: 850504 - RNA, 22 nt, Human
gcccagggcagggcaagaguga

SEQ ID NO: 850505 - RNA, 22 nt, Human
uggcugagguuaugcugguugu

SEQ ID NO: 850506 - RNA, 22 nt, Human
ucauuuauaaggaugcaauuaa

SEQ ID NO: 850507 - RNA, 22 nt, Human
uauacacauuuuuaccuauagu

SEQ ID NO: 850508 - RNA, 22 nt, Human
gauggcaggcaggugaguagag

SEQ ID NO: 850509 - RNA, 22 nt, Human
cggcugagcagugcugauggaa

SEQ ID NO: 850510 - RNA, 22 nt, Human
aggcuguggcccuggucuagca

SEQ ID NO: 850511 - RNA, 22 nt, Human
uagagaaaagcagggaucagga

SEQ ID NO: 850512 - RNA, 22 nt, Human
aggaagcugcuggaguagugug

SEQ ID NO: 850513 - RNA, 22 nt, Human
gaacccaggcuuuugaggcugu

SEQ ID NO: 850514 - RNA, 22 nt, Human
uauuagguaaaggacuugcagg

SEQ ID NO: 850515 - RNA, 20 nt, Human
cacaggcuauaugagagcca

SEQ ID NO: 850516 - RNA, 22 nt, Human
gccugccucaaaaucccaguuc

SEQ ID NO: 850517 - RNA, 22 nt, Human
gggacuucauagcuaggcacuu

SEQ ID NO: 850518 - RNA, 22 nt, Human
auuccaguuggguucuaauaca

SEQ ID NO: 850519 - RNA, 22 nt, Human
agagacugcgugucagcgcugg

SEQ ID NO: 850520 - RNA, 19 nt, Human
ucuuucauuucuagcucug

SEQ ID NO: 850521 - RNA, 22 nt, Human
gcugcuguuccuccaguggauc

SEQ ID NO: 850522 - RNA, 22 nt, Human
ugcugaugcuguucuguuagga

SEQ ID NO: 850523 - RNA, 22 nt, Human
uucaggaugaaagugugcaaca

SEQ ID NO: 850524 - RNA, 22 nt, Human
uuggcagugaugcagcuuguuc

SEQ ID NO: 850525 - RNA, 22 nt, Human
uccugccugcaaucccagcacu

SEQ ID NO: 850526 - RNA, 22 nt, Human
acagaauugaaaguauaaucug

SEQ ID NO: 850527 - RNA, 22 nt, Human
gcagagaagaugcccaggcuuc

SEQ ID NO: 850528 - RNA, 20 nt, Human
aagagaggaaguuauacuag

SEQ ID NO: 850529 - RNA, 22 nt, Human
uauuuccagcaguaagaagaca

SEQ ID NO: 850530 - RNA, 22 nt, Human
caaguaacuugauuaagguaag

SEQ ID NO: 850531 - RNA, 20 nt, Human
cucaggauugucuagccccu

SEQ ID NO: 850532 - RNA, 22 nt, Human
ucauucuuuaccaaguugucac

SEQ ID NO: 850533 - RNA, 22 nt, Human
uuacagaacugucuugaaauuu

SEQ ID NO: 850534 - RNA, 22 nt, Human
ggcgagggagcagugcgguggg

SEQ ID NO: 850535 - RNA, 22 nt, Human
ggagauggaauagauucugacu

SEQ ID NO: 850536 - RNA, 22 nt, Human
aaggaguuuggguagucauaca

SEQ ID NO: 850537 - RNA, 22 nt, Human
aaguuacauaaauguccucuag

SEQ ID NO: 850538 - RNA, 22 nt, Human
ggcagcugcaaaucugcucugu

SEQ ID NO: 850539 - RNA, 22 nt, Human
ccccaggagauuugggagcaca

SEQ ID NO: 850540 - RNA, 22 nt, Human
gucagagagggcacgugcacac

SEQ ID NO: 850541 - RNA, 22 nt, Human
uuuuguuguaauauaccuaucc

SEQ ID NO: 850542 - RNA, 22 nt, Human
accuguuuguguccauuaguga

SEQ ID NO: 850543 - RNA, 22 nt, Human
ucaggcugaccagguuuugcuc

SEQ ID NO: 850544 - RNA, 22 nt, Human
auacaucuaugccuuucugaca

SEQ ID NO: 850545 - RNA, 22 nt, Human
aucauuacuccuguaaaauugu

SEQ ID NO: 850546 - RNA, 21 nt, Human
acauaacugucaaguaacguu

SEQ ID NO: 850547 - RNA, 22 nt, Human
uuucacaaagcauagcacuuua

SEQ ID NO: 850548 - RNA, 22 nt, Human
aacugguaucucuucaguguaa

SEQ ID NO: 850549 - RNA, 22 nt, Human
cauuuguauguuccuccuuagg

SEQ ID NO: 850550 - RNA, 22 nt, Human
ucuccugggcuugguugaaguu

SEQ ID NO: 850551 - RNA, 22 nt, Human
uuuaacagaugcuaugucuacc

SEQ ID NO: 850552 - RNA, 22 nt, Human
ggccagcugggccaccaggugc

SEQ ID NO: 850553 - RNA, 22 nt, Human
aaggcaguuaauuuggcuagaa

SEQ ID NO: 850554 - RNA, 22 nt, Human
cuaggcuggagugcauuggcgu

SEQ ID NO: 850555 - RNA, 22 nt, Human
cauaauaucuccgauuacuugc

SEQ ID NO: 850556 - RNA, 22 nt, Human
ugagaacugaggauuugaauuc

SEQ ID NO: 850557 - RNA, 22 nt, Human
cagagcugggaucccaugggcg

SEQ ID NO: 850558 - RNA, 22 nt, Human
ugaggcaggaugcuugcacagg

SEQ ID NO: 850559 - RNA, 22 nt, Human
agucccuguacuuuccacugcc

SEQ ID NO: 850560 - RNA, 22 nt, Human
ccaccaggcacucacagggaag

SEQ ID NO: 850561 - RNA, 22 nt, Human
uagagcaguggguaccauggca

SEQ ID NO: 850562 - RNA, 22 nt, Human
ggggggugcugaucaguggagc

SEQ ID NO: 850563 - RNA, 18 nt, Human
cugcccagagcauuucau

SEQ ID NO: 850564 - RNA, 22 nt, Human
acacaaguucuaaagauugcgc

SEQ ID NO: 850565 - RNA, 22 nt, Human
ucugagccaauuucugugucca

SEQ ID NO: 850566 - RNA, 22 nt, Human
cuuagaaaugcagauucucagg

SEQ ID NO: 850567 - RNA, 22 nt, Human
caggaaugaggucguaaguguc

SEQ ID NO: 850568 - RNA, 22 nt, Human
uuuugugagcccauaaaugcca

SEQ ID NO: 850569 - RNA, 22 nt, Human
guggcagagccgugcagguagg

SEQ ID NO: 850570 - RNA, 22 nt, Human
uugaacaguccuaagagacccu

SEQ ID NO: 850571 - RNA, 22 nt, Human
agauggagaaugacaauuaagg

SEQ ID NO: 850572 - RNA, 22 nt, Human
uaacugguagauuuuaaaucgg

SEQ ID NO: 850573 - RNA, 22 nt, Human
uuggaaaagcguucucuguagc

SEQ ID NO: 850574 - RNA, 22 nt, Human
ccacugcuagagaugcaucccc

SEQ ID NO: 850575 - RNA, 22 nt, Human
agguccagcuguugcagccucc

SEQ ID NO: 850576 - RNA, 22 nt, Human
auugcuguggaaauauaagaug

SEQ ID NO: 850577 - RNA, 22 nt, Human
gaaucuuaaaucggaaucuuaa

SEQ ID NO: 850578 - RNA, 22 nt, Human
gaggcagcaauaaaaagaauuu

SEQ ID NO: 850579 - RNA, 22 nt, Human
cuucaguguugccagggccuag

SEQ ID NO: 850580 - RNA, 22 nt, Human
gucugcugcagagcauggcuuu

SEQ ID NO: 850581 - RNA, 22 nt, Human
gcugaggaggugugguuaggug

SEQ ID NO: 850582 - RNA, 22 nt, Human
ugcaggaaucagaggggaagcg

SEQ ID NO: 850583 - RNA, 22 nt, Human
ucucugaguaagugacaguuca

SEQ ID NO: 850584 - RNA, 22 nt, Human
ggcaggcugcuugggucauguc

SEQ ID NO: 850585 - RNA, 23 nt, Human
ucaggauauugugugccaaggug

SEQ ID NO: 850586 - RNA, 22 nt, Human
ucacugcucuccaauguggagu

SEQ ID NO: 850587 - RNA, 22 nt, Human
ggcaugcugcguacagaugaac

SEQ ID NO: 850588 - RNA, 22 nt, Human
cauuuguuuagaagucuuuaua

SEQ ID NO: 850589 - RNA, 22 nt, Human
uccuggccucgcuguccaccuu

SEQ ID NO: 850590 - RNA, 22 nt, Human
gaggcugaauggccagaagcca

SEQ ID NO: 850591 - RNA, 22 nt, Human
ggcugagacuagagugaggcau

SEQ ID NO: 850592 - RNA, 22 nt, Human
cuggccaguugccuuccugggu

SEQ ID NO: 850593 - RNA, 22 nt, Human
aggcaggcugcuauggaguaga

SEQ ID NO: 850594 - RNA, 22 nt, Human
aacuccagugucagcugcaaug

SEQ ID NO: 850595 - RNA, 22 nt, Human
gauuucuugaccccugucucag

SEQ ID NO: 850596 - RNA, 22 nt, Human
uggcugagggcacuaugaagcc

SEQ ID NO: 850597 - RNA, 22 nt, Human
ucaggcuguagggccccuggag

SEQ ID NO: 850598 - RNA, 22 nt, Human
uaacuacaagggcggucucugu

SEQ ID NO: 850599 - RNA, 22 nt, Human
gaaggccauugcguccugggau

SEQ ID NO: 850600 - RNA, 21 nt, Human
aggcaucuaaagagaguagac

SEQ ID NO: 850601 - RNA, 22 nt, Human
uuagugauuacuacauagauga

SEQ ID NO: 850602 - RNA, 23 nt, Human
uuucuucagaagccuugcgaggc

SEQ ID NO: 850603 - RNA, 22 nt, Human
cuguccugaaagggagauuggg

SEQ ID NO: 850604 - RNA, 22 nt, Human
ggagagaaauugagguagcaag

SEQ ID NO: 850605 - RNA, 22 nt, Human
uguuuuaagagcgcacuuuaua

SEQ ID NO: 850606 - RNA, 19 nt, Human
ugaggggcucacagucuca

SEQ ID NO: 850607 - RNA, 22 nt, Human
ugaaaugauuauaugguguuug

SEQ ID NO: 850608 - RNA, 22 nt, Human
uagcaaaaacugcaguuacuuu

SEQ ID NO: 850609 - RNA, 22 nt, Human
aguuacaaacacuaucaguucu

SEQ ID NO: 850610 - RNA, 22 nt, Human
cagggcuggcucaugaaaaguu

SEQ ID NO: 850611 - RNA, 22 nt, Human
accaggagagauuuuauugaga

SEQ ID NO: 850612 - RNA, 22 nt, Human
cggcagcugauugcagagcacc

SEQ ID NO: 850613 - RNA, 22 nt, Human
uaaugucagcauaguuuauuuu

SEQ ID NO: 850614 - RNA, 22 nt, Human
caccuuuugugucugcguuugu

SEQ ID NO: 850615 - RNA, 22 nt, Human
aggauuuugacuuauucaggga

SEQ ID NO: 850616 - RNA, 22 nt, Human
cugcuaaaccucucugagagcu

SEQ ID NO: 850617 - RNA, 22 nt, Human
uugaggucuucaggaucaggcu

SEQ ID NO: 850618 - RNA, 22 nt, Human
uuuguuuagaugguaaaucagu

SEQ ID NO: 850619 - RNA, 22 nt, Human
acagucauuagauacaaugucu

SEQ ID NO: 850620 - RNA, 22 nt, Human
cacaugugugcugaggacugug

SEQ ID NO: 850621 - RNA, 22 nt, Human
ugaggcucauucugcaugccaa

SEQ ID NO: 850622 - RNA, 22 nt, Human
uccuggccgccgcguggggccg

SEQ ID NO: 850623 - RNA, 22 nt, Human
ugaaggcccuaucuccauauac

SEQ ID NO: 850624 - RNA, 22 nt, Human
acaggagaaaucuggucaaaag

SEQ ID NO: 850625 - RNA, 22 nt, Human
uggcuucuagcaguguugauuu

SEQ ID NO: 850626 - RNA, 22 nt, Human
uggccaguagagcucagauagu

SEQ ID NO: 850627 - RNA, 22 nt, Human
ugguaacuuucagcauggugac

SEQ ID NO: 850628 - RNA, 21 nt, Human
agaggcccucggacugggcgu

SEQ ID NO: 850629 - RNA, 22 nt, Human
cccucccugaagaaguuacucu

SEQ ID NO: 850630 - RNA, 22 nt, Human
gacagcuguggagaggcaugug

SEQ ID NO: 850631 - RNA, 22 nt, Human
ccuggccagcuaauugcccauc

SEQ ID NO: 850632 - RNA, 22 nt, Human
cugcccaaauccuucuuccucu

SEQ ID NO: 850633 - RNA, 22 nt, Human
gugcugagcacaccuuggagca

SEQ ID NO: 850634 - RNA, 22 nt, Human
augcugugccuggaaagcggcu

SEQ ID NO: 850635 - RNA, 19 nt, Human
uaacuggugccuucaguca

SEQ ID NO: 850636 - RNA, 23 nt, Human
ggcugagaagucccaugauaggu

SEQ ID NO: 850637 - RNA, 22 nt, Human
agcugaggaauaauaacaaggu

SEQ ID NO: 850638 - RNA, 22 nt, Human
uggcugaguaaguugugauaug

SEQ ID NO: 850639 - RNA, 22 nt, Human
uugauguacagaauuguucaca

SEQ ID NO: 850640 - RNA, 22 nt, Human
ggacaguagucacuaaacuaga

SEQ ID NO: 850641 - RNA, 22 nt, Human
auggccaaaucuaaacuguugg

SEQ ID NO: 850642 - RNA, 22 nt, Human
ucuggcaggucaaucauucuuu

SEQ ID NO: 850643 - RNA, 22 nt, Human
gagaggggcccaagccacauag

SEQ ID NO: 850644 - RNA, 22 nt, Human
uuaggauaugaaacaguauaag

SEQ ID NO: 850645 - RNA, 22 nt, Human
uuagccauggacugaauugacu

SEQ ID NO: 850646 - RNA, 22 nt, Human
cuguaacuuaaugagaggcaga

SEQ ID NO: 850647 - RNA, 23 nt, Human
aguaacaugcaaauaacagucug

SEQ ID NO: 850648 - RNA, 22 nt, Human
aaucuuacaccgaauuuaaacu

SEQ ID NO: 850649 - RNA, 22 nt, Human
uucuuaaaacuuauggacaggu

SEQ ID NO: 850650 - RNA, 22 nt, Human
cuucaggauuuaggaagaugaa

SEQ ID NO: 850651 - RNA, 22 nt, Human
gcuggccacacugcugauggag

SEQ ID NO: 850652 - RNA, 22 nt, Human
aagaacugaguacguuaauaaa

SEQ ID NO: 850653 - RNA, 18 nt, Human
augggaggggccaagaga

SEQ ID NO: 850654 - RNA, 22 nt, Human
uucuagauugccuguaaguaaa

SEQ ID NO: 850655 - RNA, 22 nt, Human
auaaagauuucuuuuucucuac

SEQ ID NO: 850656 - RNA, 22 nt, Human
gacagguugaaguaucaaaggu

SEQ ID NO: 850657 - RNA, 22 nt, Human
caguuggaggaaugaggcugua

SEQ ID NO: 850658 - RNA, 22 nt, Human
uggccacaguguccagcagcag

SEQ ID NO: 850659 - RNA, 22 nt, Human
ugccucagcugaggccgcucca

SEQ ID NO: 850660 - RNA, 22 nt, Human
cccaggagaccuagaucuguuu

SEQ ID NO: 850661 - RNA, 20 nt, Human
uuaggcauuuggauuggcuu

SEQ ID NO: 850662 - RNA, 22 nt, Human
ucugagguggacgauggagccu

SEQ ID NO: 850663 - RNA, 22 nt, Human
ugaggcaggaggauugcaggau

SEQ ID NO: 850664 - RNA, 22 nt, Human
ucuggccagaaagacuugaugu

SEQ ID NO: 850665 - RNA, 22 nt, Human
cuugaaagcacuccuuugacug

SEQ ID NO: 850666 - RNA, 22 nt, Human
ucacacagguuugcaaugauuu

SEQ ID NO: 850667 - RNA, 22 nt, Human
ccacuguuuuucaguuaacuuu

SEQ ID NO: 850668 - RNA, 22 nt, Human
gaggagagagggacugucugca

SEQ ID NO: 850669 - RNA, 22 nt, Human
cugcugugccuuaaaaugcaag

SEQ ID NO: 850670 - RNA, 22 nt, Human
augcagcugugggcaagaaaug

SEQ ID NO: 850671 - RNA, 22 nt, Human
gggagagguuacccgagcaacu

SEQ ID NO: 850672 - RNA, 22 nt, Human
ccugaggucagccauucuugcc

SEQ ID NO: 850673 - RNA, 22 nt, Human
cugggccauggaagucucugcc

SEQ ID NO: 850674 - RNA, 22 nt, Human
caaauguauucucacuucaggg

SEQ ID NO: 850675 - RNA, 22 nt, Human
uaucaucuuguugucaugcagc

SEQ ID NO: 850676 - RNA, 22 nt, Human
auacauuagaaucugguacuca

SEQ ID NO: 850677 - RNA, 22 nt, Human
uggcaaggccacaggugcaguu

SEQ ID NO: 850678 - RNA, 22 nt, Human
aggaugaauaacugaaauggug

SEQ ID NO: 850679 - RNA, 22 nt, Human
gcccaggauggagaauaguggu

SEQ ID NO: 850680 - RNA, 20 nt, Human
ccuggagccuggaaggaguc

SEQ ID NO: 850681 - RNA, 22 nt, Human
aagcaccucuaugauugcuuuu

SEQ ID NO: 850682 - RNA, 22 nt, Human
ucaguucuuuauuucacaguga

SEQ ID NO: 850683 - RNA, 22 nt, Human
uuugaauauacuucaaacaaag

SEQ ID NO: 850684 - RNA, 22 nt, Human
cugcuguguuccuccugcaucu

SEQ ID NO: 850685 - RNA, 22 nt, Human
uugagguccaggugugggcagg

SEQ ID NO: 850686 - RNA, 20 nt, Human
aagaaguugguaagcagugc

SEQ ID NO: 850687 - RNA, 22 nt, Human
gcagggaagaucuuggagcugc

SEQ ID NO: 850688 - RNA, 20 nt, Human
caaaugaagcuguuggccuc

SEQ ID NO: 850689 - RNA, 22 nt, Human
ggcagcuggggcagugcccugu

SEQ ID NO: 850690 - RNA, 22 nt, Human
acucuuuuauaaagcaucuuga

SEQ ID NO: 850691 - RNA, 22 nt, Human
gggcugagagugacuguucugu

SEQ ID NO: 850692 - RNA, 22 nt, Human
gcagaggacagggauuuagauu

SEQ ID NO: 850693 - RNA, 22 nt, Human
cccaucacagacacuggguuau

SEQ ID NO: 850694 - RNA, 22 nt, Human
aggaugagccgcgcaagcugac

SEQ ID NO: 850695 - RNA, 22 nt, Human
ugcccaggcuggaaugcagugg

SEQ ID NO: 850696 - RNA, 22 nt, Human
uagugcuuaacacaaagugauu

SEQ ID NO: 850697 - RNA, 22 nt, Human
uuugcagugucagcuucugugu

SEQ ID NO: 850698 - RNA, 22 nt, Human
aagcugaggcccauggcaaggu

SEQ ID NO: 850699 - RNA, 23 nt, Human
uggcugagauccuacuguuugcu

SEQ ID NO: 850700 - RNA, 22 nt, Human
gcaccuuucuauauucaguggc

SEQ ID NO: 850701 - RNA, 22 nt, Human
cuguuuaucuaggaguugcagg

SEQ ID NO: 850702 - RNA, 22 nt, Human
auggcuucgaguauauacauag

SEQ ID NO: 850703 - RNA, 22 nt, Human
agggaguuagaaauccaggaua

SEQ ID NO: 850704 - RNA, 22 nt, Human
uccucagaaaccccugugaggu

SEQ ID NO: 850705 - RNA, 22 nt, Human
ggcaggcaggagcgugcuuggg

SEQ ID NO: 850706 - RNA, 20 nt, Human
cuacacuuggcaccuggcau

SEQ ID NO: 850707 - RNA, 22 nt, Human
acauuucuaguuguucaucucc

SEQ ID NO: 850708 - RNA, 22 nt, Human
cugagguccuugacugcuugcc

SEQ ID NO: 850709 - RNA, 22 nt, Human
gaaaaaugagcugaugucaggg

SEQ ID NO: 850710 - RNA, 17 nt, Human
caagagagaugacugga

SEQ ID NO: 850711 - RNA, 22 nt, Human
cuugaaagcacuuaguaaauua

SEQ ID NO: 850712 - RNA, 22 nt, Human
cuucuucaagagaaugggagac

SEQ ID NO: 850713 - RNA, 22 nt, Human
uuaggcauauggcacaugauag

SEQ ID NO: 850714 - RNA, 22 nt, Human
ucagccucucugaguccagacc

SEQ ID NO: 850715 - RNA, 22 nt, Human
aauuaggaauaaaugaguacuu

SEQ ID NO: 850716 - RNA, 22 nt, Human
gacagaggcuggagcaccuccu

SEQ ID NO: 850717 - RNA, 22 nt, Human
ugaggcaggagaauggcgggaa

SEQ ID NO: 850718 - RNA, 22 nt, Human
uaucuauaaguacuaacauggu

SEQ ID NO: 850719 - RNA, 22 nt, Human
uagugucaaacagggauuagaa

SEQ ID NO: 850720 - RNA, 22 nt, Human
cagggcuggcuguggcaaucuc

SEQ ID NO: 850721 - RNA, 18 nt, Human
acaggcugugggaauggu

SEQ ID NO: 850722 - RNA, 22 nt, Human
ucuuggcuauccaaguuaucca

SEQ ID NO: 850723 - RNA, 22 nt, Human
ugcacuucauuguaaauuguac

SEQ ID NO: 850724 - RNA, 22 nt, Human
auggccaagaaguauuccugac

SEQ ID NO: 850725 - RNA, 22 nt, Human
gacccaggagagaggguugcau

SEQ ID NO: 850726 - RNA, 22 nt, Human
ugaaggccuaacuuccagugcu

SEQ ID NO: 850727 - RNA, 22 nt, Human
aacuuucuaauuuuggcugagc

SEQ ID NO: 850728 - RNA, 22 nt, Human
ccagaagaccccguccaccucc

SEQ ID NO: 850729 - RNA, 22 nt, Human
uugaaagaagaagcugcgaugu

SEQ ID NO: 850730 - RNA, 22 nt, Human
gagaggugaaggcugcccuggg

SEQ ID NO: 850731 - RNA, 22 nt, Human
cccucgccgcagcugcuucccg

SEQ ID NO: 850732 - RNA, 22 nt, Human
uggcaucauagccaaggugcuu

SEQ ID NO: 850733 - RNA, 22 nt, Human
gucauucuuaacaacucaguag

SEQ ID NO: 850734 - RNA, 22 nt, Human
gauggcagcagcagccagggau

SEQ ID NO: 850735 - RNA, 22 nt, Human
uggcugcugcagacagacagga

SEQ ID NO: 850736 - RNA, 22 nt, Human
guccucuggaagaugaguucuu

SEQ ID NO: 850737 - RNA, 22 nt, Human
cagcagaggugguucacauugu

SEQ ID NO: 850738 - RNA, 22 nt, Human
agcugcccugguaagauugaug

SEQ ID NO: 850739 - RNA, 22 nt, Human
ggcagcuuucaauaggguuaug

SEQ ID NO: 850740 - RNA, 22 nt, Human
uccucuccaugucucacgccac

SEQ ID NO: 850741 - RNA, 22 nt, Human
aggcaggccccugagaauagac

SEQ ID NO: 850742 - RNA, 22 nt, Human
cugaggcugggcugaggguaua

SEQ ID NO: 850743 - RNA, 22 nt, Human
gucacuguauccagguuccagc

SEQ ID NO: 850744 - RNA, 23 nt, Human
acuuuauugaccccaggucaguu

SEQ ID NO: 850745 - RNA, 22 nt, Human
cccaggagaucuggaucucguc

SEQ ID NO: 850746 - RNA, 22 nt, Human
cuaaaugauauuuugguuuccu

SEQ ID NO: 850747 - RNA, 22 nt, Human
ggccaaaugaaaucugagcaau

SEQ ID NO: 850748 - RNA, 22 nt, Human
ugaggcagaguaagauacauga

SEQ ID NO: 850749 - RNA, 22 nt, Human
agaggccacuuugccugugaug

SEQ ID NO: 850750 - RNA, 22 nt, Human
uucugagcuacauaguacuggg

SEQ ID NO: 850751 - RNA, 22 nt, Human
agacaggcugcugucugcuagg

SEQ ID NO: 850752 - RNA, 22 nt, Human
uucuuucucaacaugaauguuu

SEQ ID NO: 850753 - RNA, 22 nt, Human
agcccuggguuagggugggagc

SEQ ID NO: 850754 - RNA, 22 nt, Human
aacuccuguucuaugacaagag

SEQ ID NO: 850755 - RNA, 22 nt, Human
aauaugcauuaacuguguacau

SEQ ID NO: 850756 - RNA, 22 nt, Human
cugccuggccacaacccagggu

SEQ ID NO: 850757 - RNA, 22 nt, Human
gaaugaaagauuugcauucuau

SEQ ID NO: 850758 - RNA, 22 nt, Human
cagaacugagucucauggccau

SEQ ID NO: 850759 - RNA, 22 nt, Human
cagcaagagacuguucucuaag

SEQ ID NO: 850760 - RNA, 22 nt, Human
cucuggccuggggccugcuccc

SEQ ID NO: 850761 - RNA, 22 nt, Human
ugcugaggcaguccuaacagga

SEQ ID NO: 850762 - RNA, 22 nt, Human
ucuucucuccugcuuggcagaa

SEQ ID NO: 850763 - RNA, 22 nt, Human
ccuuuauucaauuaguccuaau

SEQ ID NO: 850764 - RNA, 22 nt, Human
ggaggggaacuaaucccgugac

SEQ ID NO: 850765 - RNA, 22 nt, Human
ccuuuuaugaacuugagcaggu

SEQ ID NO: 850766 - RNA, 20 nt, Human
aggcucagcugagcucuugg

SEQ ID NO: 850767 - RNA, 20 nt, Human
aggacagcagcugccacuug

SEQ ID NO: 850768 - RNA, 22 nt, Human
aagaguuagcucaauaacuuga

SEQ ID NO: 850769 - RNA, 18 nt, Human
cuggucucccuucgcuuu

SEQ ID NO: 850770 - RNA, 22 nt, Human
ggagcuguucaggacugcuuca

SEQ ID NO: 850771 - RNA, 22 nt, Human
ucuuuggaucccaacuggcugg

SEQ ID NO: 850772 - RNA, 22 nt, Human
cuggagcauccaugcccagggu

SEQ ID NO: 850773 - RNA, 22 nt, Human
ucccagagccaagcuauggaug

SEQ ID NO: 850774 - RNA, 22 nt, Human
agcugaggcucugagagggaag

SEQ ID NO: 850775 - RNA, 22 nt, Human
aucaggaugacuauaaggcugc

SEQ ID NO: 850776 - RNA, 22 nt, Human
cagggcugaggacacaaguaaa

SEQ ID NO: 850777 - RNA, 22 nt, Human
caaauacuuuauauacuucaaa

SEQ ID NO: 850778 - RNA, 22 nt, Human
ugaggccucugaggccuaggcu

SEQ ID NO: 850779 - RNA, 22 nt, Human
uacacacagaggccaugggauu

SEQ ID NO: 850780 - RNA, 22 nt, Human
agccugagccccauccagcuga

SEQ ID NO: 850781 - RNA, 22 nt, Human
uccaaauauucaucuacuucug

SEQ ID NO: 850782 - RNA, 22 nt, Human
gaggcccaggguacaggccgcu

SEQ ID NO: 850783 - RNA, 22 nt, Human
auucuuugcaucucuggguggc

SEQ ID NO: 850784 - RNA, 22 nt, Human
gcuggagcugaguucccugggc

SEQ ID NO: 850785 - RNA, 19 nt, Human
ugcuagaaauucugugacu

SEQ ID NO: 850786 - RNA, 17 nt, Human
uagauuaaacacggcca

SEQ ID NO: 850787 - RNA, 22 nt, Human
gaggcagcugggauacaaggga

SEQ ID NO: 850788 - RNA, 22 nt, Human
caaaugaagagggcaacuucug

SEQ ID NO: 850789 - RNA, 22 nt, Human
ucuuggccccaccugugccagc

SEQ ID NO: 850790 - RNA, 22 nt, Human
gauguguuuccaggauuuguuu

SEQ ID NO: 850791 - RNA, 22 nt, Human
cugcuucauauuucauagugau

SEQ ID NO: 850792 - RNA, 22 nt, Human
gagaggcuggcagugccagguu

SEQ ID NO: 850793 - RNA, 22 nt, Human
ggcugcagauuguagucuguua

SEQ ID NO: 850794 - RNA, 22 nt, Human
aaggcaguaaaaucuaccuugc

SEQ ID NO: 850795 - RNA, 22 nt, Human
aggcaagcauuuaaccacucau

SEQ ID NO: 850796 - RNA, 22 nt, Human
acugccauuggucaaaugagug

SEQ ID NO: 850797 - RNA, 22 nt, Human
cuucuucauguauugauagucu

SEQ ID NO: 850798 - RNA, 22 nt, Human
ucugcaggaggcuggcugcagg

SEQ ID NO: 850799 - RNA, 22 nt, Human
cucaguuuccccggccugggcg

SEQ ID NO: 850800 - RNA, 22 nt, Human
ucugagccuauuucaaauuccu

SEQ ID NO: 850801 - RNA, 20 nt, Human
gcugaggggucuauggcaua

SEQ ID NO: 850802 - RNA, 22 nt, Human
ggcagcucugcuccacaugagu

SEQ ID NO: 850803 - RNA, 22 nt, Human
aggcugaggcuuuccuuggaga

SEQ ID NO: 850804 - RNA, 22 nt, Human
cagggucuuggcgccaucaccc

SEQ ID NO: 850805 - RNA, 22 nt, Human
ugaggcaggagaaucaccggaa

SEQ ID NO: 850806 - RNA, 18 nt, Human
cucaccauucugcccaau

SEQ ID NO: 850807 - RNA, 22 nt, Human
caacugcugacaccaucacucc

SEQ ID NO: 850808 - RNA, 17 nt, Human
acacagggagagggagc

SEQ ID NO: 850809 - RNA, 22 nt, Human
uucugucaugcucauguaauug

SEQ ID NO: 850810 - RNA, 22 nt, Human
ucuuuauuuuaugcuugugcaa

SEQ ID NO: 850811 - RNA, 22 nt, Human
caggcagaguuagagcaacugg

SEQ ID NO: 850812 - RNA, 22 nt, Human
ccuccuggugggcgcuucuggc

SEQ ID NO: 850813 - RNA, 20 nt, Human
ucacaucuggcagcugauga

SEQ ID NO: 850814 - RNA, 22 nt, Human
gcuggccagcccucuuccucca

SEQ ID NO: 850815 - RNA, 22 nt, Human
ccaggagaugggagcaucuaaa

SEQ ID NO: 850816 - RNA, 22 nt, Human
gacuucuguuaacuuguaagag

SEQ ID NO: 850817 - RNA, 22 nt, Human
caaggcugcaaaacuacauggg

SEQ ID NO: 850818 - RNA, 22 nt, Human
agucuugcucuugcaucugcuu

SEQ ID NO: 850819 - RNA, 22 nt, Human
cggccaagccggggccccgaag

SEQ ID NO: 850820 - RNA, 22 nt, Human
uugcugugucugauggcugaga

SEQ ID NO: 850821 - RNA, 23 nt, Human
uuccuggcagguacaacuuuuac

SEQ ID NO: 850822 - RNA, 23 nt, Human
auauuagggagauuagcccucua

SEQ ID NO: 850823 - RNA, 22 nt, Human
cuagggaguggcagagcuggga

SEQ ID NO: 850824 - RNA, 23 nt, Human
gugagucuugccuuugcugugga

SEQ ID NO: 850825 - RNA, 22 nt, Human
cucaucugauaaaucacucuua

SEQ ID NO: 850826 - RNA, 22 nt, Human
uucugaaagccaauucauugaa

SEQ ID NO: 850827 - RNA, 22 nt, Human
cugcuucugggaugauggagua

SEQ ID NO: 850828 - RNA, 22 nt, Human
aggcagauuacuugaggccagg

SEQ ID NO: 850829 - RNA, 22 nt, Human
aggccagaaaugucagggagug

SEQ ID NO: 850830 - RNA, 22 nt, Human
cagcagagaaauuaaacuucug

SEQ ID NO: 850831 - RNA, 22 nt, Human
cggcugaggaucuccaggccug

SEQ ID NO: 850832 - RNA, 22 nt, Human
cucaggauagcugcgcagccug

SEQ ID NO: 850833 - RNA, 21 nt, Human
aaugcauuaacauaaagcuga

SEQ ID NO: 850834 - RNA, 22 nt, Human
ggcugcaggcagaggcugucug

SEQ ID NO: 850835 - RNA, 22 nt, Human
gggcacagaagucuaagacauc

SEQ ID NO: 850836 - RNA, 23 nt, Human
uggacgccgacuuuggaggcgcu

SEQ ID NO: 850837 - RNA, 22 nt, Human
cugaggucuagacaccccaggg

SEQ ID NO: 850838 - RNA, 22 nt, Human
ggccagcucugcacagcagcug

SEQ ID NO: 850839 - RNA, 22 nt, Human
agcacugugagcaccagcacgc

SEQ ID NO: 850840 - RNA, 22 nt, Human
aucaggauccaccuugagccug

SEQ ID NO: 850841 - RNA, 22 nt, Human
gcuccuucaggugguagcuguu

SEQ ID NO: 850842 - RNA, 22 nt, Human
uccccuccaacuccaacuaugg

SEQ ID NO: 850843 - RNA, 22 nt, Human
cacugguacacugaauggcguu

SEQ ID NO: 850844 - RNA, 22 nt, Human
auagucacucuguuagguguuu

SEQ ID NO: 850845 - RNA, 23 nt, Human
ucugggccacuugucugcacuuc

SEQ ID NO: 850846 - RNA, 22 nt, Human
ggcucagaccucccagcuccag

SEQ ID NO: 850847 - RNA, 22 nt, Human
cugaacucuuuaugacagcuug

SEQ ID NO: 850848 - RNA, 22 nt, Human
cagcaagaguugggguuguugg

SEQ ID NO: 850849 - RNA, 20 nt, Human
aacuuucucccauuggacug

SEQ ID NO: 850850 - RNA, 22 nt, Human
gcuggagguuucaccugaguuu

SEQ ID NO: 850851 - RNA, 23 nt, Human
ucuagaaaaugaaagaaugcagu

SEQ ID NO: 850852 - RNA, 22 nt, Human
agccagcucccuccccugcagg

SEQ ID NO: 850853 - RNA, 22 nt, Human
acacagcuuucagucauuaucu

SEQ ID NO: 850854 - RNA, 22 nt, Human
uccaggaggcaccuuuggacca

SEQ ID NO: 850855 - RNA, 22 nt, Human
cuugccucccucagcucacagc

SEQ ID NO: 850856 - RNA, 21 nt, Human
ugguacagaggaggugaagug

SEQ ID NO: 850857 - RNA, 22 nt, Human
agcugaaagugcuuugaggacu

SEQ ID NO: 850858 - RNA, 22 nt, Human
cagcaagaaaauucacaugcuc

SEQ ID NO: 850859 - RNA, 22 nt, Human
ugugaaagcaagucuaguucuc

SEQ ID NO: 850860 - RNA, 22 nt, Human
ugcuagaauuugcagaagcaua

SEQ ID NO: 850861 - RNA, 22 nt, Human
uccuaggcaguuggugcuccau

SEQ ID NO: 850862 - RNA, 22 nt, Human
gagggcuccauuccccgugccc

SEQ ID NO: 850863 - RNA, 22 nt, Human
gcagaggauagcauaugaaccu

SEQ ID NO: 850864 - RNA, 23 nt, Human
ucuugaaaagccuacagcaguuc

SEQ ID NO: 850865 - RNA, 22 nt, Human
aguugcugcuucucucuagaga

SEQ ID NO: 850866 - RNA, 22 nt, Human
uuauuuagucuagaugaauuuu

SEQ ID NO: 850867 - RNA, 22 nt, Human
gauuucuuuaugaaguacagaa

SEQ ID NO: 850868 - RNA, 22 nt, Human
gaagaggaugacaggagccggu

SEQ ID NO: 850869 - RNA, 22 nt, Human
cugggaaauggcuucgagcuca

SEQ ID NO: 850870 - RNA, 22 nt, Human
acacaaauuguaggauaauugc

SEQ ID NO: 850871 - RNA, 22 nt, Human
uuuccaagacuccaguucuccc

SEQ ID NO: 850872 - RNA, 22 nt, Human
ccagaggaggggggucuuucug

SEQ ID NO: 850873 - RNA, 22 nt, Human
ggccagggccuggggacugucc

SEQ ID NO: 850874 - RNA, 22 nt, Human
cucacugugccuuuucccaaac

SEQ ID NO: 850875 - RNA, 22 nt, Human
gggcugagccauuugaaccuug

SEQ ID NO: 850876 - RNA, 22 nt, Human
agaggaugauuuuaaggacacu

SEQ ID NO: 850877 - RNA, 22 nt, Human
uugaggucugugauaaaaguca

SEQ ID NO: 850878 - RNA, 22 nt, Human
cacagacccagaagggaugaag

SEQ ID NO: 850879 - RNA, 22 nt, Human
auacaaagacaaaucucaaucu

SEQ ID NO: 850880 - RNA, 22 nt, Human
augcuguggaugccuugcccca

SEQ ID NO: 850881 - RNA, 22 nt, Human
uuguuauaaagacuaaauaugu

SEQ ID NO: 850882 - RNA, 22 nt, Human
cugagguggcauccuagcucua

SEQ ID NO: 850883 - RNA, 17 nt, Human
agagggaaaaugcgguu

SEQ ID NO: 850884 - RNA, 22 nt, Human
uagggauguggugagaacugag

SEQ ID NO: 850885 - RNA, 22 nt, Human
uagggaggcuacuucuuguagg

SEQ ID NO: 850886 - RNA, 22 nt, Human
ugaccaaaaaauucccugugag

SEQ ID NO: 850887 - RNA, 22 nt, Human
cuuuccaagaaugcagauaccu

SEQ ID NO: 850888 - RNA, 22 nt, Human
cccaggagguuggggcuacagu

SEQ ID NO: 850889 - RNA, 22 nt, Human
auacauauaugguacuuccugg

SEQ ID NO: 850890 - RNA, 22 nt, Human
cuccuggcuucugaaaucgugg

SEQ ID NO: 850891 - RNA, 21 nt, Human
agcagcugggcaacauggagg

SEQ ID NO: 850892 - RNA, 22 nt, Human
uggucaacaggcagggaugaaa

SEQ ID NO: 850893 - RNA, 22 nt, Human
ucgagcucuggagccaaggaug

SEQ ID NO: 850894 - RNA, 22 nt, Human
gagccagcuauguagcaagagg

SEQ ID NO: 850895 - RNA, 22 nt, Human
gagcugagcuuaacuccuugaa

SEQ ID NO: 850896 - RNA, 22 nt, Human
agaauuagucacaauuauagga

SEQ ID NO: 850897 - RNA, 22 nt, Human
uugcagcuuagugauguuaucu

SEQ ID NO: 850898 - RNA, 22 nt, Human
uucucuuugacauuauucaggu

SEQ ID NO: 850899 - RNA, 22 nt, Human
gcaccuuuggaaugaaaaguug

SEQ ID NO: 850900 - RNA, 23 nt, Human
acugagguacugagguugugaca

SEQ ID NO: 850901 - RNA, 22 nt, Human
uuauuuaauuuucucacucaga

SEQ ID NO: 850902 - RNA, 22 nt, Human
gcugacaguuacugcuguaaca

SEQ ID NO: 850903 - RNA, 22 nt, Human
uagugcuuuaggccugaguguc

SEQ ID NO: 850904 - RNA, 22 nt, Human
uggcagcuacagacagagguga

SEQ ID NO: 850905 - RNA, 22 nt, Human
aaugucugagucucuguauccc

SEQ ID NO: 850906 - RNA, 22 nt, Human
cacaauuuguuuuaucaguauu

SEQ ID NO: 850907 - RNA, 22 nt, Human
uucuucuuaauguccugggaac

SEQ ID NO: 850908 - RNA, 22 nt, Human
cagaaacuagauuuagacacaa

SEQ ID NO: 850909 - RNA, 22 nt, Human
gccagagguucaacaacugucu

SEQ ID NO: 850910 - RNA, 22 nt, Human
uggaaauggaucugaugagucu

SEQ ID NO: 850911 - RNA, 23 nt, Human
ugagacccuaauuuagcaagugu

SEQ ID NO: 850912 - RNA, 22 nt, Human
gugagguccuaauagacaucga

SEQ ID NO: 850913 - RNA, 22 nt, Human
gaggcaguuccugagugacaag

SEQ ID NO: 850914 - RNA, 22 nt, Human
agcugcagucaagcugggccac

SEQ ID NO: 850915 - RNA, 22 nt, Human
uaucuguuaugggcugaauugc

SEQ ID NO: 850916 - RNA, 22 nt, Human
gcagcuaccacccaggaaggac

SEQ ID NO: 850917 - RNA, 22 nt, Human
cugagaguauuggcaggcuugg

SEQ ID NO: 850918 - RNA, 22 nt, Human
uauacacuguuguugggagucu

SEQ ID NO: 850919 - RNA, 22 nt, Human
ucuggccagugaaaugcagaau

SEQ ID NO: 850920 - RNA, 22 nt, Human
ucugaggucauaaagcaacuuu

SEQ ID NO: 850921 - RNA, 22 nt, Human
aggcaguuucugggacagcaua

SEQ ID NO: 850922 - RNA, 19 nt, Human
gcugcucugggucucaucu

SEQ ID NO: 850923 - RNA, 22 nt, Human
uuuuauauugagugagaguucc

SEQ ID NO: 850924 - RNA, 22 nt, Human
gcugcucugugacagccuccgg

SEQ ID NO: 850925 - RNA, 22 nt, Human
uggaguucauccaugacagcuu

SEQ ID NO: 850926 - RNA, 22 nt, Human
gcauuuccugugcuuggcauau

SEQ ID NO: 850927 - RNA, 22 nt, Human
cugccuuugcccuugacacugu

SEQ ID NO: 850928 - RNA, 22 nt, Human
aaggagaguacaggaguuggua

SEQ ID NO: 850929 - RNA, 22 nt, Human
uccugggcuuaagugauccucc

SEQ ID NO: 850930 - RNA, 22 nt, Human
aggcugagcuggcccuugaaau

SEQ ID NO: 850931 - RNA, 22 nt, Human
aguuggagugaacaugagauug

SEQ ID NO: 850932 - RNA, 20 nt, Human
auccaugagagucuggauuc

SEQ ID NO: 850933 - RNA, 22 nt, Human
caggcagcuagauuuauaacaa

SEQ ID NO: 850934 - RNA, 21 nt, Human
gagacagcccagugccagggc

SEQ ID NO: 850935 - RNA, 22 nt, Human
gaggggaaagugugaggcugcg

SEQ ID NO: 850936 - RNA, 23 nt, Human
acuauaaaguuguucugauuuac

SEQ ID NO: 850937 - RNA, 18 nt, Human
gagucuuuguuacugcug

SEQ ID NO: 850938 - RNA, 21 nt, Human
ucucugguuggaguugugcca

SEQ ID NO: 850939 - RNA, 22 nt, Human
ucauuuguaccauuuuuuaaga

SEQ ID NO: 850940 - RNA, 22 nt, Human
uaacuguauagcuuggacuaaa

SEQ ID NO: 850941 - RNA, 22 nt, Human
aucaggauagugguuaccuggg

SEQ ID NO: 850942 - RNA, 22 nt, Human
cucccagagagcaggugggccg

SEQ ID NO: 850943 - RNA, 22 nt, Human
uagaagcaguaauagaaauagg

SEQ ID NO: 850944 - RNA, 22 nt, Human
gcugaaugaauguauuuuaaaa

SEQ ID NO: 850945 - RNA, 21 nt, Human
cauuaaguaccagggcacugu

SEQ ID NO: 850946 - RNA, 23 nt, Human
ugaaggccuggaggacgcguugu

SEQ ID NO: 850947 - RNA, 19 nt, Human
gcugagguggaggaaggag

SEQ ID NO: 850948 - RNA, 22 nt, Human
cugagggccuucuaugcugagc

SEQ ID NO: 850949 - RNA, 22 nt, Human
uguccacaucacucacuuguca

SEQ ID NO: 850950 - RNA, 22 nt, Human
gacuuucuuaggcccccuaaua

SEQ ID NO: 850951 - RNA, 21 nt, Human
uuugaaagcccuauguuuuca

SEQ ID NO: 850952 - RNA, 19 nt, Human
ucccaggaagcaaauguca

SEQ ID NO: 850953 - RNA, 22 nt, Human
aggccacaagaacuaccccauc

SEQ ID NO: 850954 - RNA, 21 nt, Human
ccagugcuacagcugccugac

SEQ ID NO: 850955 - RNA, 22 nt, Human
auuauuauuguugauguuaggg

SEQ ID NO: 850956 - RNA, 22 nt, Human
uacaguaagaugaaauagcaau

SEQ ID NO: 850957 - RNA, 22 nt, Human
aaaggccagguuggcugguauu

SEQ ID NO: 850958 - RNA, 22 nt, Human
gaagcagccacggggagacaga

SEQ ID NO: 850959 - RNA, 22 nt, Human
ucagguccagcuccugugccuc

SEQ ID NO: 850960 - RNA, 22 nt, Human
uaguaacugguugaacaacugu

SEQ ID NO: 850961 - RNA, 22 nt, Human
uagcagcaauuacacaguccgu

SEQ ID NO: 850962 - RNA, 22 nt, Human
agacaaaugguaauuaugucua

SEQ ID NO: 850963 - RNA, 22 nt, Human
uucucuuuucaccaguugcuaa

SEQ ID NO: 850964 - RNA, 22 nt, Human
agagggagcccagucauagcug

SEQ ID NO: 850965 - RNA, 22 nt, Human
cuuauuucagcccugggcaccc

SEQ ID NO: 850966 - RNA, 22 nt, Human
aauaauuagugggacagagaac

SEQ ID NO: 850967 - RNA, 22 nt, Human
ugaaugaguuuggcugcuguuc

SEQ ID NO: 850968 - RNA, 22 nt, Human
auuauuagugauguuguuacug

SEQ ID NO: 850969 - RNA, 20 nt, Human
uguccccaccaaaauuucau

SEQ ID NO: 850970 - RNA, 21 nt, Human
cuguggaagggaacuagaggg

SEQ ID NO: 850971 - RNA, 22 nt, Human
auggcuucuagcauugucacaa

SEQ ID NO: 850972 - RNA, 22 nt, Human
ugauggucaggaugcauggaga

SEQ ID NO: 850973 - RNA, 22 nt, Human
cccaggagcuucucucugccuc

SEQ ID NO: 850974 - RNA, 21 nt, Human
uggcugagccaggugugugga

SEQ ID NO: 850975 - RNA, 22 nt, Human
gaggagaaauuuggggaccuga

SEQ ID NO: 850976 - RNA, 22 nt, Human
cugccucuccccagaguggccc

SEQ ID NO: 850977 - RNA, 22 nt, Human
cucccucaggccuuagcccugc

SEQ ID NO: 850978 - RNA, 22 nt, Human
ucuaaccuuugaaacugcuuuc

SEQ ID NO: 850979 - RNA, 22 nt, Human
uuuucagugggcaaugauguga

SEQ ID NO: 850980 - RNA, 22 nt, Human
uuuguaugugauaagacuauuc

SEQ ID NO: 850981 - RNA, 22 nt, Human
uaucuguuggcuccuaguugua

SEQ ID NO: 850982 - RNA, 22 nt, Human
auauguuacucuuucaagcaga

SEQ ID NO: 850983 - RNA, 22 nt, Human
agucacuguuucagaacugagu

SEQ ID NO: 850984 - RNA, 22 nt, Human
ugaggcucagagaacagugacu

SEQ ID NO: 850985 - RNA, 22 nt, Human
aaccauuugcaguuacugagac

SEQ ID NO: 850986 - RNA, 22 nt, Human
uacaaagagguaauugcauaua

SEQ ID NO: 850987 - RNA, 22 nt, Human
auucuuauuauaguaaaacagu

SEQ ID NO: 850988 - RNA, 22 nt, Human
uccuggccuagcucacccugga

SEQ ID NO: 850989 - RNA, 22 nt, Human
gcugccucacuccagcccaaua

SEQ ID NO: 850990 - RNA, 22 nt, Human
ggagaaaggauaggaaugugcu

SEQ ID NO: 850991 - RNA, 22 nt, Human
guggcagcggugugcaaggagg

SEQ ID NO: 850992 - RNA, 23 nt, Human
aggcagcuggguagcaucuuucu

SEQ ID NO: 850993 - RNA, 22 nt, Human
guccacugcugugugcuucacc

SEQ ID NO: 850994 - RNA, 22 nt, Human
ugacauaauaauccaaacauac

SEQ ID NO: 850995 - RNA, 18 nt, Human
caaauacuguugucuuau

SEQ ID NO: 850996 - RNA, 22 nt, Human
ugucucugggugauucaguccu

SEQ ID NO: 850997 - RNA, 22 nt, Human
ucacugcucagucuguacuaca

SEQ ID NO: 850998 - RNA, 22 nt, Human
uggcagcugcaggccuccugag

SEQ ID NO: 850999 - RNA, 22 nt, Human
cagugccaaggagaaggacagc

SEQ ID NO: 851000 - RNA, 23 nt, Human
ccagugugguagguccacaggug

SEQ ID NO: 851001 - RNA, 22 nt, Human
aggcagcguagcaaggcuagua

SEQ ID NO: 851002 - RNA, 22 nt, Human
cagcuggccccacaguagaggc

SEQ ID NO: 851003 - RNA, 22 nt, Human
gagugucagcagggcagagcac

SEQ ID NO: 851004 - RNA, 22 nt, Human
aaaugccucuggguuauucuag

SEQ ID NO: 851005 - RNA, 22 nt, Human
uggcucaguuucaguccugguu

SEQ ID NO: 851006 - RNA, 20 nt, Human
gggcaguucaaugccacucu

SEQ ID NO: 851007 - RNA, 22 nt, Human
agcagagguguuuauuauggga

SEQ ID NO: 851008 - RNA, 22 nt, Human
ggccugagcuugggcagcguau

SEQ ID NO: 851009 - RNA, 22 nt, Human
aagcagaggguauggccagguu

SEQ ID NO: 851010 - RNA, 22 nt, Human
cugccaucugagccaaaagugc

SEQ ID NO: 851011 - RNA, 22 nt, Human
gacagugcauuuccuggcaugg

SEQ ID NO: 851012 - RNA, 22 nt, Human
gaggaggcacuugagcagaugu

SEQ ID NO: 851013 - RNA, 22 nt, Human
uuuauaagaagcaaugucugag

SEQ ID NO: 851014 - RNA, 17 nt, Human
gccucugcuugugucau

SEQ ID NO: 851015 - RNA, 22 nt, Human
ugccucagucagcuucccuggg

SEQ ID NO: 851016 - RNA, 22 nt, Human
aggauuugaaccugcauccagu

SEQ ID NO: 851017 - RNA, 22 nt, Human
uggagaggaaagugcaguuuug

SEQ ID NO: 851018 - RNA, 22 nt, Human
uaagaaauuuaguuauagaaug

SEQ ID NO: 851019 - RNA, 22 nt, Human
uucuucuccgaggagggcuggu

SEQ ID NO: 851020 - RNA, 22 nt, Human
cuguuuauggagguaaggcauc

SEQ ID NO: 851021 - RNA, 22 nt, Human
aaauaguucagcuuguaaaccc

SEQ ID NO: 851022 - RNA, 22 nt, Human
auucucuuuguauaacaucuug

SEQ ID NO: 851023 - RNA, 21 nt, Human
acugagguuagaugccuugcc

SEQ ID NO: 851024 - RNA, 22 nt, Human
caguuucuauggcugggcucug

SEQ ID NO: 851025 - RNA, 20 nt, Human
uugauucaagggcugaugga

SEQ ID NO: 851026 - RNA, 22 nt, Human
guggccaaggcagagaaagagc

SEQ ID NO: 851027 - RNA, 22 nt, Human
ggcagacaccuuuaugucuaau

SEQ ID NO: 851028 - RNA, 22 nt, Human
cacagucucuguugcugggacc

SEQ ID NO: 851029 - RNA, 22 nt, Human
ccaggaugacccccacuuuccu

SEQ ID NO: 851030 - RNA, 22 nt, Human
uuucuuuguuguuaucacauca

SEQ ID NO: 851031 - RNA, 22 nt, Human
acugagguaauugugaggauua

SEQ ID NO: 851032 - RNA, 22 nt, Human
uggcuucucgccugucaucccg

SEQ ID NO: 851033 - RNA, 22 nt, Human
uucaggauuguguuuuuccuga

SEQ ID NO: 851034 - RNA, 22 nt, Human
auuagagaaauguugccaagau

SEQ ID NO: 851035 - RNA, 22 nt, Human
ucugggaagcugcgugccuguu

SEQ ID NO: 851036 - RNA, 22 nt, Human
agcagcugagccccagcuguga

SEQ ID NO: 851037 - RNA, 22 nt, Human
auuuauuauugugguuacuucu

SEQ ID NO: 851038 - RNA, 22 nt, Human
cccugagccgcugcuccaaccu

SEQ ID NO: 851039 - RNA, 22 nt, Human
ccagagcuccagggcuacagaa

SEQ ID NO: 851040 - RNA, 22 nt, Human
uaaucacagaaacagacuguuu

SEQ ID NO: 851041 - RNA, 22 nt, Human
gcuccuggcuucacugacauca

SEQ ID NO: 851042 - RNA, 22 nt, Human
auuaaauuaaguggcuaauuua

SEQ ID NO: 851043 - RNA, 22 nt, Human
ucugguaaccuuuaucccuccu

SEQ ID NO: 851044 - RNA, 22 nt, Human
ugcugcuguaucaugccuucau

SEQ ID NO: 851045 - RNA, 22 nt, Human
gaggccacuuccuacuggagga

SEQ ID NO: 851046 - RNA, 22 nt, Human
uggcacaugguaagugcuuaac

SEQ ID NO: 851047 - RNA, 22 nt, Human
gagaggcagaggccugaaaccg

SEQ ID NO: 851048 - RNA, 22 nt, Human
agacaguguguguauauauggu

SEQ ID NO: 851049 - RNA, 22 nt, Human
uuucaaaauuuugcagugguaa

SEQ ID NO: 851050 - RNA, 22 nt, Human
guggcagaaauauucuugcucu

SEQ ID NO: 851051 - RNA, 22 nt, Human
aggcugaggcaagaggaucacu

SEQ ID NO: 851052 - RNA, 22 nt, Human
cugcuguguaucauuuuagaug

SEQ ID NO: 851053 - RNA, 22 nt, Human
aggcugagguaggaggaucgcu

SEQ ID NO: 851054 - RNA, 22 nt, Human
acccagagucauggcacuuagc

SEQ ID NO: 851055 - RNA, 22 nt, Human
aucauacauguaacuaaguaaa

SEQ ID NO: 851056 - RNA, 22 nt, Human
cauuuguaucugggcugcugug

SEQ ID NO: 851057 - RNA, 22 nt, Human
ccaggcuggaguguagucgcau

SEQ ID NO: 851058 - RNA, 22 nt, Human
cuucagaauccagaaucagaau

SEQ ID NO: 851059 - RNA, 22 nt, Human
caaaugaagggagcugaagucu

SEQ ID NO: 851060 - RNA, 21 nt, Human
uuccuggcggcagaaacguga

SEQ ID NO: 851061 - RNA, 22 nt, Human
ucauucacuuugaaauaaacga

SEQ ID NO: 851062 - RNA, 22 nt, Human
gcccaggauggcuggaggugcu

SEQ ID NO: 851063 - RNA, 22 nt, Human
gcuguucucuguaacaugcauu

SEQ ID NO: 851064 - RNA, 22 nt, Human
ggccaaaugaaggcaaugggac

SEQ ID NO: 851065 - RNA, 22 nt, Human
guuuuauuuccaugagagaccg

SEQ ID NO: 851066 - RNA, 22 nt, Human
uucucagaauugacugggagca

SEQ ID NO: 851067 - RNA, 22 nt, Human
aggcaguggaaggagaaagcaa

SEQ ID NO: 851068 - RNA, 21 nt, Human
agcagaggcugccuggugacu

SEQ ID NO: 851069 - RNA, 22 nt, Human
augugaggcagcacggagauua

SEQ ID NO: 851070 - RNA, 22 nt, Human
guuuaaauaauuaggggccugu

SEQ ID NO: 851071 - RNA, 22 nt, Human
gaggaaccaaucugugauauuc

SEQ ID NO: 851072 - RNA, 19 nt, Human
gaggagcuaucggagacag

SEQ ID NO: 851073 - RNA, 22 nt, Human
agaaguuauccaccuuagaugc

SEQ ID NO: 851074 - RNA, 22 nt, Human
gcuggccaggugcuuugguucu

SEQ ID NO: 851075 - RNA, 22 nt, Human
aaggcagucugguuucaaagca

SEQ ID NO: 851076 - RNA, 22 nt, Human
uguugauuaguguuuagacuua

SEQ ID NO: 851077 - RNA, 22 nt, Human
ccagaggaaaaauaucucccua

SEQ ID NO: 851078 - RNA, 22 nt, Human
ugaaaugacagucuuaagcucu

SEQ ID NO: 851079 - RNA, 22 nt, Human
accucagauuguggcuccgcug

SEQ ID NO: 851080 - RNA, 22 nt, Human
aaguauuucguucugaaaaagu

SEQ ID NO: 851081 - RNA, 22 nt, Human
gagguggugguggaggcauagc

SEQ ID NO: 851082 - RNA, 22 nt, Human
guuaggauuauauaucccauga

SEQ ID NO: 851083 - RNA, 22 nt, Human
uuuguagaggguaauugacaga

SEQ ID NO: 851084 - RNA, 19 nt, Human
acuggcaguuucugcaugg

SEQ ID NO: 851085 - RNA, 22 nt, Human
cugagccagcgggcucacuuuu

SEQ ID NO: 851086 - RNA, 22 nt, Human
uaaaccuugguagcaucuugcu

SEQ ID NO: 851087 - RNA, 22 nt, Human
agaaaagugcucuagugagagc

SEQ ID NO: 851088 - RNA, 22 nt, Human
auuauuaggugcucucugacaa

SEQ ID NO: 851089 - RNA, 22 nt, Human
uggcaacauggacaggucugcc

SEQ ID NO: 851090 - RNA, 18 nt, Human
uuuaugagcugugggacc

SEQ ID NO: 851091 - RNA, 22 nt, Human
uccaggagacacaagguacaua

SEQ ID NO: 851092 - RNA, 22 nt, Human
aacugcuguggccuaguacuua

SEQ ID NO: 851093 - RNA, 22 nt, Human
cccaggagguagagguugcagu

SEQ ID NO: 851094 - RNA, 22 nt, Human
guugaaagagcauggacuugaa

SEQ ID NO: 851095 - RNA, 22 nt, Human
acuccuggguucuaaauuugaa

SEQ ID NO: 851096 - RNA, 22 nt, Human
uaacaugauuugcuauuuagau

SEQ ID NO: 851097 - RNA, 23 nt, Human
agggagcuaaaaggcuggagcag

SEQ ID NO: 851098 - RNA, 22 nt, Human
uguuacagugacuaauguuuua

SEQ ID NO: 851099 - RNA, 22 nt, Human
gaccauuuguugaaaagauuau

SEQ ID NO: 851100 - RNA, 22 nt, Human
auuuccauagagcgucucacag

SEQ ID NO: 851101 - RNA, 22 nt, Human
auggccaagagucgauuugggg

SEQ ID NO: 851102 - RNA, 22 nt, Human
cuuccugggcaauguucugcuu

SEQ ID NO: 851103 - RNA, 20 nt, Human
acuaaucauccagucacagu

SEQ ID NO: 851104 - RNA, 21 nt, Human
gagaacugaaccagagcagcu

SEQ ID NO: 851105 - RNA, 22 nt, Human
cuuaaauucuuaaugcccucau

SEQ ID NO: 851106 - RNA, 22 nt, Human
uagcucuucaaucacugucucc

SEQ ID NO: 851107 - RNA, 23 nt, Human
uguugaaguaacuguuacauaga

SEQ ID NO: 851108 - RNA, 22 nt, Human
uguucuucuagauugccuuuua

SEQ ID NO: 851109 - RNA, 22 nt, Human
ccugagguugaaguauaaauug

SEQ ID NO: 851110 - RNA, 19 nt, Human
uaucuguuuccugcuuguc

SEQ ID NO: 851111 - RNA, 22 nt, Human
ugcccuggcuccucccacgcug

SEQ ID NO: 851112 - RNA, 21 nt, Human
cugagggccgcagcugggcuc

SEQ ID NO: 851113 - RNA, 22 nt, Human
ugaggcagcuuuuucugugugu

SEQ ID NO: 851114 - RNA, 22 nt, Human
ugcccuggugaagugcucuccu

SEQ ID NO: 851115 - RNA, 22 nt, Human
cagggcuguggaaaacuggugc

SEQ ID NO: 851116 - RNA, 22 nt, Human
aauuaacuaauuugguacaaga

SEQ ID NO: 851117 - RNA, 22 nt, Human
ggcccacacugacagcugagcu

SEQ ID NO: 851118 - RNA, 22 nt, Human
aguacauauaguaauuuagcca

SEQ ID NO: 851119 - RNA, 22 nt, Human
gucaggauguuuauucuccagu

SEQ ID NO: 851120 - RNA, 22 nt, Human
augccuggacuguaucccagau

SEQ ID NO: 851121 - RNA, 22 nt, Human
uucaggaugacaccauguccag

SEQ ID NO: 851122 - RNA, 22 nt, Human
uuagauaaauugcaacuugauu

SEQ ID NO: 851123 - RNA, 22 nt, Human
cuugcugugugguguucucaga

SEQ ID NO: 851124 - RNA, 22 nt, Human
guauuagguuggugcaaaagua

SEQ ID NO: 851125 - RNA, 22 nt, Human
cuuaaauuggaugaguuaaguu

SEQ ID NO: 851126 - RNA, 19 nt, Human
caugcugaccugcuguggu

SEQ ID NO: 851127 - RNA, 22 nt, Human
uaggagaggugaauggcacacu

SEQ ID NO: 851128 - RNA, 22 nt, Human
aacuuucugaaaagcuugauca

SEQ ID NO: 851129 - RNA, 22 nt, Human
ggcugaggguuaagaucagaca

SEQ ID NO: 851130 - RNA, 22 nt, Human
ugacccauggucugaucauagg

SEQ ID NO: 851131 - RNA, 22 nt, Human
ggcagcuguaagaugagugaau

SEQ ID NO: 851132 - RNA, 22 nt, Human
ggcaagcauaaccuguacagcc

SEQ ID NO: 851133 - RNA, 22 nt, Human
cugcuucacguugugccuuguu

SEQ ID NO: 851134 - RNA, 20 nt, Human
aggcugaguucuaugcacuu

SEQ ID NO: 851135 - RNA, 22 nt, Human
uaaguucauaagcuuauucuua

SEQ ID NO: 851136 - RNA, 22 nt, Human
uauuauuaaauggcagaauuuu

SEQ ID NO: 851137 - RNA, 22 nt, Human
ucgcugugguuucuguacaugg

SEQ ID NO: 851138 - RNA, 22 nt, Human
aggagacaucuaacuguagguu

SEQ ID NO: 851139 - RNA, 22 nt, Human
auguuucaaugcacuuuagccu

SEQ ID NO: 851140 - RNA, 22 nt, Human
uggaggaaguggcuggccagaa

SEQ ID NO: 851141 - RNA, 22 nt, Human
cccagggagguagcaggagaaa

SEQ ID NO: 851142 - RNA, 22 nt, Human
augcuguguccuagugaaagaa

SEQ ID NO: 851143 - RNA, 17 nt, Human
gcgcagcuccuggcgcg

SEQ ID NO: 851144 - RNA, 22 nt, Human
ucagggacuuacaaaccagaag

SEQ ID NO: 851145 - RNA, 22 nt, Human
cagaacuggccuuucaucaguc

SEQ ID NO: 851146 - RNA, 22 nt, Human
cuggccagaguuggagggugug

SEQ ID NO: 851147 - RNA, 22 nt, Human
auucuucauuuacuguuacuug

SEQ ID NO: 851148 - RNA, 22 nt, Human
ugaaaugagauagauaaucagg

SEQ ID NO: 851149 - RNA, 22 nt, Human
gcccaggacucagggugucgcg

SEQ ID NO: 851150 - RNA, 22 nt, Human
aaugaaauguagcuuauccaua

SEQ ID NO: 851151 - RNA, 22 nt, Human
ccugcuguucuguuuagugaac

SEQ ID NO: 851152 - RNA, 22 nt, Human
guuaggaauuuguuacugugua

SEQ ID NO: 851153 - RNA, 22 nt, Human
ugucagagcaaugagguucagc

SEQ ID NO: 851154 - RNA, 22 nt, Human
ggcugaggcucaugccaucuug

SEQ ID NO: 851155 - RNA, 19 nt, Human
ugcccaggccagguugggc

SEQ ID NO: 851156 - RNA, 22 nt, Human
uuucacaucagagguagauuag

SEQ ID NO: 851157 - RNA, 22 nt, Human
cuauuucaaggcccagauauga

SEQ ID NO: 851158 - RNA, 22 nt, Human
gggcagcugucuugguucucaa

SEQ ID NO: 851159 - RNA, 22 nt, Human
ggccacaacuugcuccuagccc

SEQ ID NO: 851160 - RNA, 22 nt, Human
gaggcagccagagguucucauu

SEQ ID NO: 851161 - RNA, 22 nt, Human
ugcugaggucauuuccaaguga

SEQ ID NO: 851162 - RNA, 22 nt, Human
uuuggaauuggcauucuauucu

SEQ ID NO: 851163 - RNA, 22 nt, Human
cuucagaagaaaagcagugugu

SEQ ID NO: 851164 - RNA, 22 nt, Human
acacaaugcauauuuuuccaga

SEQ ID NO: 851165 - RNA, 22 nt, Human
uugcuguguaacuccuggccug

SEQ ID NO: 851166 - RNA, 22 nt, Human
agcugcugcggaaagaugccac

SEQ ID NO: 851167 - RNA, 22 nt, Human
gugagguccugagaggcuugug

SEQ ID NO: 851168 - RNA, 22 nt, Human
ugcauaguucuccuuccuccuc

SEQ ID NO: 851169 - RNA, 22 nt, Human
aauuauacaauugucaaguucu

SEQ ID NO: 851170 - RNA, 22 nt, Human
aggcaggcucaggcccaugcuu

SEQ ID NO: 851171 - RNA, 22 nt, Human
aggcuaagauguggucugagca

SEQ ID NO: 851172 - RNA, 22 nt, Human
cagcuuccgaccgggggcugca

SEQ ID NO: 851173 - RNA, 22 nt, Human
aagaggagacuucagcaacuug

SEQ ID NO: 851174 - RNA, 22 nt, Human
ggaggggagucucccaaagccg

SEQ ID NO: 851175 - RNA, 22 nt, Human
cccaggaggccaagguugcagu

SEQ ID NO: 851176 - RNA, 22 nt, Human
ccuggcugagggaccucgggua

SEQ ID NO: 851177 - RNA, 22 nt, Human
uggcuucuucauaugugaucuu

SEQ ID NO: 851178 - RNA, 22 nt, Human
cuggugagacucagggaugcuu

SEQ ID NO: 851179 - RNA, 22 nt, Human
gaaggccacaagagaaguuaag

SEQ ID NO: 851180 - RNA, 22 nt, Human
uauuagcgcuuacugaguugcc

SEQ ID NO: 851181 - RNA, 22 nt, Human
aaaaguuaccucuguaauauaa

SEQ ID NO: 851182 - RNA, 22 nt, Human
guuuuauuggaacacagccaug

SEQ ID NO: 851183 - RNA, 22 nt, Human
cuguccccugugcuuucacuug

SEQ ID NO: 851184 - RNA, 22 nt, Human
uauaucaccaaaaacaguucug

SEQ ID NO: 851185 - RNA, 22 nt, Human
cccaggaaaucaggcuuucuag

SEQ ID NO: 851186 - RNA, 23 nt, Human
uggccaagauaaucucaguuuuc

SEQ ID NO: 851187 - RNA, 23 nt, Human
cagugugacgaggugaggcaggc

SEQ ID NO: 851188 - RNA, 22 nt, Human
ccaugagacagcaacugaaagu

SEQ ID NO: 851189 - RNA, 21 nt, Human
agagagggagaugaaacaucc

SEQ ID NO: 851190 - RNA, 22 nt, Human
gacaggcaauuaccagcgccca

SEQ ID NO: 851191 - RNA, 22 nt, Human
aggcugaggcuggcagcuccag

SEQ ID NO: 851192 - RNA, 22 nt, Human
augaggucacaguguuuggcau

SEQ ID NO: 851193 - RNA, 22 nt, Human
cuugaaagauuuggccucugug

SEQ ID NO: 851194 - RNA, 22 nt, Human
auaaauaucacuguugucccuc

SEQ ID NO: 851195 - RNA, 22 nt, Human
cucaguuuccucuucuguugaa

SEQ ID NO: 851196 - RNA, 22 nt, Human
uagcaagaugucacuccaaguu

SEQ ID NO: 851197 - RNA, 22 nt, Human
cccucccugugugccucauuug

SEQ ID NO: 851198 - RNA, 22 nt, Human
cucagugugaaugcucaguaaa

SEQ ID NO: 851199 - RNA, 22 nt, Human
uuugaauaucacaaacuuucaa

SEQ ID NO: 851200 - RNA, 22 nt, Human
gaagcagcagcuggggacaguu

SEQ ID NO: 851201 - RNA, 22 nt, Human
ucuuagcauuucauaacaacug

SEQ ID NO: 851202 - RNA, 22 nt, Human
agucucugucguagaucagcgu

SEQ ID NO: 851203 - RNA, 20 nt, Human
ucugagguaugauagggucu

SEQ ID NO: 851204 - RNA, 18 nt, Human
ugcuuggagcauuuacca

SEQ ID NO: 851205 - RNA, 22 nt, Human
aagaacugguuauguuaucuug

SEQ ID NO: 851206 - RNA, 22 nt, Human
caggcagcugcgacaagagagc

SEQ ID NO: 851207 - RNA, 22 nt, Human
auggccaaauaacagcuugcau

SEQ ID NO: 851208 - RNA, 18 nt, Human
aagaacugagguccuaga

SEQ ID NO: 851209 - RNA, 22 nt, Human
gcagcugccccgacugugaguc

SEQ ID NO: 851210 - RNA, 22 nt, Human
ggcugcugguggaaugguaggc

SEQ ID NO: 851211 - RNA, 22 nt, Human
gcuggccaguguggugaccacc

SEQ ID NO: 851212 - RNA, 23 nt, Human
ucugagguggcucuugcuuugaa

SEQ ID NO: 851213 - RNA, 22 nt, Human
gggcagcuccuguggaauccac

SEQ ID NO: 851214 - RNA, 22 nt, Human
aggcaugacuuuggcugaagaa

SEQ ID NO: 851215 - RNA, 22 nt, Human
aaggcugacguuuguguuuauu

SEQ ID NO: 851216 - RNA, 22 nt, Human
acuguaacacucauacugaagu

SEQ ID NO: 851217 - RNA, 22 nt, Human
acauuguuugagaauacagaug

SEQ ID NO: 851218 - RNA, 22 nt, Human
uauuagguaugaacuggcaacc

SEQ ID NO: 851219 - RNA, 22 nt, Human
guggccaaaucaugucaaaggc

SEQ ID NO: 851220 - RNA, 22 nt, Human
ccauccugcauugcuauucaga

SEQ ID NO: 851221 - RNA, 22 nt, Human
cugcuuuggacaacuauucuug

SEQ ID NO: 851222 - RNA, 22 nt, Human
aagcaggauggagguugaguua

SEQ ID NO: 851223 - RNA, 22 nt, Human
gugcugugugauccaugcuggc

SEQ ID NO: 851224 - RNA, 19 nt, Human
uccugggcugcgucuugcc

SEQ ID NO: 851225 - RNA, 22 nt, Human
ccaggcugggcuacaaguugag

SEQ ID NO: 851226 - RNA, 22 nt, Human
gcuugaaaauucauagguauuu

SEQ ID NO: 851227 - RNA, 22 nt, Human
aaugagacacgugaagcagaug

SEQ ID NO: 851228 - RNA, 22 nt, Human
uuugaagucagacacugcuuug

SEQ ID NO: 851229 - RNA, 17 nt, Human
ccagagcuacugagacu

SEQ ID NO: 851230 - RNA, 22 nt, Human
uagaacuggaauuuugugguuu

SEQ ID NO: 851231 - RNA, 22 nt, Human
cugccucagcguuguggcccua

SEQ ID NO: 851232 - RNA, 22 nt, Human
uacugcauaacuggcauguggg

SEQ ID NO: 851233 - RNA, 23 nt, Human
agcugaggcagaggggcauucuc

SEQ ID NO: 851234 - RNA, 22 nt, Human
uccaggaggugaggggaccaaa

SEQ ID NO: 851235 - RNA, 22 nt, Human
gacaguaacugagagauguaau

SEQ ID NO: 851236 - RNA, 22 nt, Human
ugcugaaauuagaacauugagg

SEQ ID NO: 851237 - RNA, 22 nt, Human
aauacuggcugucaaagaugga

SEQ ID NO: 851238 - RNA, 22 nt, Human
agagcugaggauccagcugagc

SEQ ID NO: 851239 - RNA, 22 nt, Human
gagggcugaaguguuuuaugag

SEQ ID NO: 851240 - RNA, 23 nt, Human
cuuuuaacuagaguaucagcugc

SEQ ID NO: 851241 - RNA, 18 nt, Human
ggcaucugcacagcagcc

SEQ ID NO: 851242 - RNA, 22 nt, Human
uugguuuacuaggauucaaauu

SEQ ID NO: 851243 - RNA, 18 nt, Human
gagagggaucccucagga

SEQ ID NO: 851244 - RNA, 22 nt, Human
ggcugagguguggggaacuaua

SEQ ID NO: 851245 - RNA, 22 nt, Human
cuacccagcaccuaggcugccu

SEQ ID NO: 851246 - RNA, 22 nt, Human
gaaggccaguuuugagauaggu

SEQ ID NO: 851247 - RNA, 22 nt, Human
agugacagggaaggauaggauu

SEQ ID NO: 851248 - RNA, 22 nt, Human
cagagccaggucuaggagucuc

SEQ ID NO: 851249 - RNA, 22 nt, Human
cugggccagggaggugucugua

SEQ ID NO: 851250 - RNA, 22 nt, Human
uuccuggccccaccccuggaga

SEQ ID NO: 851251 - RNA, 22 nt, Human
uuuacagauguggaaagugagc

SEQ ID NO: 851252 - RNA, 22 nt, Human
ucacaaaugaggaaaucgagca

SEQ ID NO: 851253 - RNA, 22 nt, Human
auggcugagaugggcuccaggc

SEQ ID NO: 851254 - RNA, 22 nt, Human
aggaagcuggugugaggaugaa

SEQ ID NO: 851255 - RNA, 22 nt, Human
aagaacugugcuccaggcucca

SEQ ID NO: 851256 - RNA, 22 nt, Human
ccccaggacguggcccucauag

SEQ ID NO: 851257 - RNA, 22 nt, Human
guuuuucuaggaccaugugauu

SEQ ID NO: 851258 - RNA, 22 nt, Human
gcccaggaguuggaggcugcag

SEQ ID NO: 851259 - RNA, 22 nt, Human
cugccugcacugccuggcucca

SEQ ID NO: 851260 - RNA, 22 nt, Human
aacuucuggauguuucaaaugu

SEQ ID NO: 851261 - RNA, 22 nt, Human
cugagguagcugugaauguucu

SEQ ID NO: 851262 - RNA, 22 nt, Human
uuuuaucugcuucauuaguuga

SEQ ID NO: 851263 - RNA, 22 nt, Human
gauggcagcauauugacagcau

SEQ ID NO: 851264 - RNA, 22 nt, Human
cugccaggcagcagagggagaa

SEQ ID NO: 851265 - RNA, 22 nt, Human
acucaggaagaaagcagcuggu

SEQ ID NO: 851266 - RNA, 22 nt, Human
uuaguuaggaaacaaaguuguu

SEQ ID NO: 851267 - RNA, 22 nt, Human
ucucucuugucaccccaucugc

SEQ ID NO: 851268 - RNA, 22 nt, Human
acauguaaaaggaacaugcaug

SEQ ID NO: 851269 - RNA, 17 nt, Human
uccaugagacaugaaga

SEQ ID NO: 851270 - RNA, 22 nt, Human
aguccuuugggaaaaaugacua

SEQ ID NO: 851271 - RNA, 22 nt, Human
auuauuagacuuauaugguagu

SEQ ID NO: 851272 - RNA, 22 nt, Human
cuguggaauugaugcuuagugu

SEQ ID NO: 851273 - RNA, 22 nt, Human
aaagcagagcagggcacuuaug

SEQ ID NO: 851274 - RNA, 22 nt, Human
uguugccuggggaagcucugau

SEQ ID NO: 851275 - RNA, 22 nt, Human
uggcugaggcuggagugcagug

SEQ ID NO: 851276 - RNA, 19 nt, Human
aguccaugaauggaggaug

SEQ ID NO: 851277 - RNA, 19 nt, Human
ucccaggaaccuuuuauuu

SEQ ID NO: 851278 - RNA, 22 nt, Human
augcugagacuggagcagcugg

SEQ ID NO: 851279 - RNA, 19 nt, Human
agcuccugauugugccucg

SEQ ID NO: 851280 - RNA, 22 nt, Human
guaguucugcagugucaccuga

SEQ ID NO: 851281 - RNA, 22 nt, Human
ugaggcagguggauuacaaggu

SEQ ID NO: 851282 - RNA, 19 nt, Human
ggcucagggcgcugccgcc

SEQ ID NO: 851283 - RNA, 22 nt, Human
uaaggccaaacuauuauaguuc

SEQ ID NO: 851284 - RNA, 19 nt, Human
uggcagcauugguaccuug

SEQ ID NO: 851285 - RNA, 20 nt, Human
gcugaggucccugugguuuu

SEQ ID NO: 851286 - RNA, 22 nt, Human
aacaugaaaacuaccugugauu

SEQ ID NO: 851287 - RNA, 22 nt, Human
cccuuagcuccaagggguuugg

SEQ ID NO: 851288 - RNA, 22 nt, Human
uggagaggagcaccauggccau

SEQ ID NO: 851289 - RNA, 22 nt, Human
gcugaguguaaugauggcagag

SEQ ID NO: 851290 - RNA, 22 nt, Human
aacugcuucuuacugcugggca

SEQ ID NO: 851291 - RNA, 22 nt, Human
uauuucagucacuucuucucug

SEQ ID NO: 851292 - RNA, 22 nt, Human
ccccggaggcggagguugcagu

SEQ ID NO: 851293 - RNA, 22 nt, Human
cccaggaggcgcagguugcggu

SEQ ID NO: 851294 - RNA, 22 nt, Human
ucucaggagccacagcgggagu

SEQ ID NO: 851295 - RNA, 22 nt, Human
uuaaauauuuucagcaggguca

SEQ ID NO: 851296 - RNA, 22 nt, Human
aaugaaacucgaaauaaucaca

SEQ ID NO: 851297 - RNA, 22 nt, Human
caggcgagugaacagacucuca

SEQ ID NO: 851298 - RNA, 22 nt, Human
aacacuuuuuauauauuguauc

SEQ ID NO: 851299 - RNA, 22 nt, Human
cagagcugcaaaugccccuccg

SEQ ID NO: 851300 - RNA, 22 nt, Human
cuugcugucccuugguaugaac

SEQ ID NO: 851301 - RNA, 22 nt, Human
cuaagccacucaaaucuugugg

SEQ ID NO: 851302 - RNA, 22 nt, Human
uggcagcagcuaacuuaggcag

SEQ ID NO: 851303 - RNA, 22 nt, Human
aaguuacaguuaugaaacucac

SEQ ID NO: 851304 - RNA, 22 nt, Human
agcaguguggccuuagacccgg

SEQ ID NO: 851305 - RNA, 22 nt, Human
uugacacaguuuucucauuaag

SEQ ID NO: 851306 - RNA, 22 nt, Human
auuucagguaccugugggaucc

SEQ ID NO: 851307 - RNA, 22 nt, Human
uauaucauggagauuaacauuc

SEQ ID NO: 851308 - RNA, 22 nt, Human
agugugucugaucacuugugag

SEQ ID NO: 851309 - RNA, 22 nt, Human
gaaaugaaauagcaccaagguu

SEQ ID NO: 851310 - RNA, 22 nt, Human
cugccaggcagggagauggcug

SEQ ID NO: 851311 - RNA, 22 nt, Human
ucagguggcuuggagggggacg

SEQ ID NO: 851312 - RNA, 22 nt, Human
uuuaaauuuagaagaaacacug

SEQ ID NO: 851313 - RNA, 22 nt, Human
ucuccucuauuucuguauguau

SEQ ID NO: 851314 - RNA, 22 nt, Human
acccagagcagagcuuggcuuc

SEQ ID NO: 851315 - RNA, 22 nt, Human
uggcuucuugggaugggucauu

SEQ ID NO: 851316 - RNA, 22 nt, Human
aggcagacaaggacacaguggg

SEQ ID NO: 851317 - RNA, 19 nt, Human
uuugcagugguuccuuugu

SEQ ID NO: 851318 - RNA, 22 nt, Human
cccaggaggacauuccauaccc

SEQ ID NO: 851319 - RNA, 22 nt, Human
uggcugcagaucaagggcaggc

SEQ ID NO: 851320 - RNA, 21 nt, Human
agccugaaucccaccaguuca

SEQ ID NO: 851321 - RNA, 22 nt, Human
gcuggccaggaagagucucaga

SEQ ID NO: 851322 - RNA, 22 nt, Human
cugcuguguugccagugucacc

SEQ ID NO: 851323 - RNA, 22 nt, Human
ucugagguguagcugggcuuca

SEQ ID NO: 851324 - RNA, 21 nt, Human
aaugaaguggcuauuuugagg

SEQ ID NO: 851325 - RNA, 22 nt, Human
ccacagcugaccgcaggugagc

SEQ ID NO: 851326 - RNA, 22 nt, Human
uggcucagaaggcugccuucac

SEQ ID NO: 851327 - RNA, 22 nt, Human
ucauuucucccggccaaaaacu

SEQ ID NO: 851328 - RNA, 22 nt, Human
aggagcugggcugcugcuggga

SEQ ID NO: 851329 - RNA, 22 nt, Human
ugguuacauauccuuuggagcc

SEQ ID NO: 851330 - RNA, 22 nt, Human
caggagaggaggcuacuucuua

SEQ ID NO: 851331 - RNA, 22 nt, Human
guagacaucuagauuuaugugu

SEQ ID NO: 851332 - RNA, 22 nt, Human
gagaacugauuagcauuugcca

SEQ ID NO: 851333 - RNA, 22 nt, Human
aacuccugaggaaauggucuca

SEQ ID NO: 851334 - RNA, 22 nt, Human
uggcugagagaagacggggaag

SEQ ID NO: 851335 - RNA, 22 nt, Human
aaauacauacacuguacguggc

SEQ ID NO: 851336 - RNA, 22 nt, Human
aaucuucuuucuuaacaguaca

SEQ ID NO: 851337 - RNA, 22 nt, Human
uuauuucauguaaaauuuaugu

SEQ ID NO: 851338 - RNA, 22 nt, Human
caggacagagcccagacugugu

SEQ ID NO: 851339 - RNA, 22 nt, Human
caacagcugaucuuugaugaag

SEQ ID NO: 851340 - RNA, 22 nt, Human
ugaaucaguauaaauucucaaa

SEQ ID NO: 851341 - RNA, 22 nt, Human
uacagccucacauuuacuuaca

SEQ ID NO: 851342 - RNA, 22 nt, Human
ggaggggaugguuugacccugg

SEQ ID NO: 851343 - RNA, 22 nt, Human
auucuucaucagagaugcacua

SEQ ID NO: 851344 - RNA, 22 nt, Human
agggugguucuuuuaguggaag

SEQ ID NO: 851345 - RNA, 22 nt, Human
agcugaugccauguggaacagu

SEQ ID NO: 851346 - RNA, 22 nt, Human
ucucgacagccuggcacagugg

SEQ ID NO: 851347 - RNA, 22 nt, Human
uuugaaaguccuaggagagucc

SEQ ID NO: 851348 - RNA, 22 nt, Human
ucaggugguccuaagugccauc

SEQ ID NO: 851349 - RNA, 22 nt, Human
uucauucugcaguucucagcuc

SEQ ID NO: 851350 - RNA, 22 nt, Human
ucucuggcagggauaucuggcu

SEQ ID NO: 851351 - RNA, 22 nt, Human
uggcucagucuggguugacuga

SEQ ID NO: 851352 - RNA, 21 nt, Human
cagagcuguccaaacccugac

SEQ ID NO: 851353 - RNA, 22 nt, Human
cacaggcugcccgcagcuggga

SEQ ID NO: 851354 - RNA, 19 nt, Human
uggggcuguguuuugaccc

SEQ ID NO: 851355 - RNA, 22 nt, Human
uggcuucugcauauuuuuagag

SEQ ID NO: 851356 - RNA, 22 nt, Human
cagcagaggcacgucugugaau

SEQ ID NO: 851357 - RNA, 22 nt, Human
uugaggucuucauucuugggca

SEQ ID NO: 851358 - RNA, 22 nt, Human
ggcaagaaggcuucagguagcu

SEQ ID NO: 851359 - RNA, 22 nt, Human
auuuggauucuuauuuagcacu

SEQ ID NO: 851360 - RNA, 22 nt, Human
guggaaugaauagauuugcauu

SEQ ID NO: 851361 - RNA, 22 nt, Human
cagggcuguaaauuagugcuga

SEQ ID NO: 851362 - RNA, 22 nt, Human
aggaaagguagcgugccagcag

SEQ ID NO: 851363 - RNA, 22 nt, Human
uaaaacugcuugguauggucua

SEQ ID NO: 851364 - RNA, 22 nt, Human
cugaacuuauugagugcuugcu

SEQ ID NO: 851365 - RNA, 22 nt, Human
uggcagagcaaaaagauagaau

SEQ ID NO: 851366 - RNA, 20 nt, Human
agguccacugaggcugccuc

SEQ ID NO: 851367 - RNA, 23 nt, Human
aaauuauugcucuucaauugccu

SEQ ID NO: 851368 - RNA, 22 nt, Human
gucaggauuauaauccccaugg

SEQ ID NO: 851369 - RNA, 22 nt, Human
gugucccaggccucuggaauua

SEQ ID NO: 851370 - RNA, 22 nt, Human
agcugaggccacgagugaaggg

SEQ ID NO: 851371 - RNA, 22 nt, Human
ugcuugcuggaggcagacagaa

SEQ ID NO: 851372 - RNA, 21 nt, Human
cucaggaucuuauauauuagu

SEQ ID NO: 851373 - RNA, 22 nt, Human
cgaggcagaggcugaaacggcu

SEQ ID NO: 851374 - RNA, 22 nt, Human
acagaacuggaauuggaacuca

SEQ ID NO: 851375 - RNA, 22 nt, Human
guacacuugacucauaggaaau

SEQ ID NO: 851376 - RNA, 18 nt, Human
auggucucauacugggag

SEQ ID NO: 851377 - RNA, 22 nt, Human
uggcugagguaacuaugaauaa

SEQ ID NO: 851378 - RNA, 20 nt, Human
gaagcagcuucauguagaca

SEQ ID NO: 851379 - RNA, 22 nt, Human
ucucucagaggaagaggcagug

SEQ ID NO: 851380 - RNA, 22 nt, Human
ucugccugcuaacuccugcacc

SEQ ID NO: 851381 - RNA, 22 nt, Human
cuaaaugacagguaccauagug

SEQ ID NO: 851382 - RNA, 22 nt, Human
auuugcuucugugaaaucaagu

SEQ ID NO: 851383 - RNA, 22 nt, Human
cuucagugauauaggcuucucc

SEQ ID NO: 851384 - RNA, 22 nt, Human
gucugucucccugugacugaga

SEQ ID NO: 851385 - RNA, 22 nt, Human
gcucagagcuugaaguuccacu

SEQ ID NO: 851386 - RNA, 22 nt, Human
cugaggccugggggcguggacg

SEQ ID NO: 851387 - RNA, 22 nt, Human
aagacauugucauuuuauaauu

SEQ ID NO: 851388 - RNA, 22 nt, Human
cggagggguuugaacagaggag

SEQ ID NO: 851389 - RNA, 22 nt, Human
ggaggcaggaaagacagguuca

SEQ ID NO: 851390 - RNA, 22 nt, Human
auuaggauguguauauuguguu

SEQ ID NO: 851391 - RNA, 22 nt, Human
ccaggcugggcggggaaccugg

SEQ ID NO: 851392 - RNA, 22 nt, Human
aucauacagaaccugagcacuu

SEQ ID NO: 851393 - RNA, 22 nt, Human
uauuagagaaaagauggaugug

SEQ ID NO: 851394 - RNA, 22 nt, Human
uuaggaaagcauuguguaaaag

SEQ ID NO: 851395 - RNA, 22 nt, Human
guuauaaaaugcacaguuguuu

SEQ ID NO: 851396 - RNA, 22 nt, Human
ucugagguuacugcuuuguaga

SEQ ID NO: 851397 - RNA, 22 nt, Human
ugaggcagcaauugauuauuca

SEQ ID NO: 851398 - RNA, 22 nt, Human
agcagcugguaggaguggccac

SEQ ID NO: 851399 - RNA, 22 nt, Human
gaggcagcaggcugaggaggau

SEQ ID NO: 851400 - RNA, 19 nt, Human
acacuguagauauagcuau

SEQ ID NO: 851401 - RNA, 22 nt, Human
gauuuuaauuauaggagguccu

SEQ ID NO: 851402 - RNA, 22 nt, Human
acugcccucccaucuauugcaa

SEQ ID NO: 851403 - RNA, 22 nt, Human
ucugcugucacucauuugcuuc

SEQ ID NO: 851404 - RNA, 22 nt, Human
uuuauuauccaguguugucaug

SEQ ID NO: 851405 - RNA, 22 nt, Human
uggucaaaaacucucaguggac

SEQ ID NO: 851406 - RNA, 22 nt, Human
ggcagcuggguuggccagaaac

SEQ ID NO: 851407 - RNA, 22 nt, Human
aauacauauggaauuccauguu

SEQ ID NO: 851408 - RNA, 22 nt, Human
uuuagauaaugcucaagcaauu

SEQ ID NO: 851409 - RNA, 22 nt, Human
ugcuguggcaguuuauguauag

SEQ ID NO: 851410 - RNA, 22 nt, Human
cugccucagccuucugggugac

SEQ ID NO: 851411 - RNA, 20 nt, Human
uuucugugagaaacacuguu

SEQ ID NO: 851412 - RNA, 22 nt, Human
cagcugagaguagaaauggagg

SEQ ID NO: 851413 - RNA, 22 nt, Human
gcugagcuagaaaaggaccaca

SEQ ID NO: 851414 - RNA, 19 nt, Human
auacacuaauauaaaccac

SEQ ID NO: 851415 - RNA, 22 nt, Human
caguaguuauuaguugccacug

SEQ ID NO: 851416 - RNA, 22 nt, Human
cugaguguuuucagccacggcc

SEQ ID NO: 851417 - RNA, 22 nt, Human
agaaaagaggcuuucuaagcau

SEQ ID NO: 851418 - RNA, 22 nt, Human
aaaaccugauugaauucuauuu

SEQ ID NO: 851419 - RNA, 22 nt, Human
uuuccuaguucuaagaaaugua

SEQ ID NO: 851420 - RNA, 21 nt, Human
uccaggaguggcugggcaggg

SEQ ID NO: 851421 - RNA, 22 nt, Human
gccaggaggcuuaacuggacag

SEQ ID NO: 851422 - RNA, 22 nt, Human
aggacagcagugcuggcacuug

SEQ ID NO: 851423 - RNA, 22 nt, Human
gagggcaguagccucguacccu

SEQ ID NO: 851424 - RNA, 22 nt, Human
ccuggccagccagggcuggggu

SEQ ID NO: 851425 - RNA, 22 nt, Human
guaacuuaccauuguagcauca

SEQ ID NO: 851426 - RNA, 23 nt, Human
aggauguaggauguauggcagag

SEQ ID NO: 851427 - RNA, 22 nt, Human
agccuaaugcuuuucccaaagu

SEQ ID NO: 851428 - RNA, 22 nt, Human
cuuguagcugcuucuucugaag

SEQ ID NO: 851429 - RNA, 21 nt, Human
ccugcugugaucuuagugagu

SEQ ID NO: 851430 - RNA, 22 nt, Human
uuccagcaggcagacaggagau

SEQ ID NO: 851431 - RNA, 22 nt, Human
uaacugguccucggauguugug

SEQ ID NO: 851432 - RNA, 22 nt, Human
uaugaacucuggagucugagug

SEQ ID NO: 851433 - RNA, 22 nt, Human
accaggaguaacagugaguggu

SEQ ID NO: 851434 - RNA, 22 nt, Human
cuuugaagagauuacugugcuc

SEQ ID NO: 851435 - RNA, 22 nt, Human
cuggcucaauuuguacugcugu

SEQ ID NO: 851436 - RNA, 22 nt, Human
cuggguaaguuccuaaggcuca

SEQ ID NO: 851437 - RNA, 22 nt, Human
ugauugaagaggugaggaaguu

SEQ ID NO: 851438 - RNA, 22 nt, Human
uccaggaggcagggcugugccc

SEQ ID NO: 851439 - RNA, 22 nt, Human
uggcagcaauuugugauguuga

SEQ ID NO: 851440 - RNA, 22 nt, Human
cucuucuuuaguccagaccauc

SEQ ID NO: 851441 - RNA, 22 nt, Human
caggauggugugagugugagga

SEQ ID NO: 851442 - RNA, 22 nt, Human
accaggaguugggggugggacc

SEQ ID NO: 851443 - RNA, 20 nt, Human
uuccaacucacaucucuaca

SEQ ID NO: 851444 - RNA, 22 nt, Human
guuaucaugcuucaucaucacu

SEQ ID NO: 851445 - RNA, 22 nt, Human
auuaacuguacuuucuaauuuu

SEQ ID NO: 851446 - RNA, 22 nt, Human
gcccagugcugagggugcugcu

SEQ ID NO: 851447 - RNA, 20 nt, Human
uccuggccucccuggggcuc

SEQ ID NO: 851448 - RNA, 22 nt, Human
uggguccagugcagcugcgcgu

SEQ ID NO: 851449 - RNA, 22 nt, Human
cggagaggaccugcaacucgcu

SEQ ID NO: 851450 - RNA, 22 nt, Human
ccagagagaaauggauuugagu

SEQ ID NO: 851451 - RNA, 22 nt, Human
ccccaggacacauggaccaagu

SEQ ID NO: 851452 - RNA, 22 nt, Human
uucuuaacuggaaaaugucaga

SEQ ID NO: 851453 - RNA, 22 nt, Human
uucaauucugcucugaucuuag

SEQ ID NO: 851454 - RNA, 22 nt, Human
uuaucacuuaugagcuuuuugc

SEQ ID NO: 851455 - RNA, 22 nt, Human
gaccauuugcuaguaaauugca

SEQ ID NO: 851456 - RNA, 22 nt, Human
uuauggcauauuccucauugua

SEQ ID NO: 851457 - RNA, 22 nt, Human
uuuagaaguucacacauuuaaa

SEQ ID NO: 851458 - RNA, 22 nt, Human
aagaaaugcacacaacugcugg

SEQ ID NO: 851459 - RNA, 22 nt, Human
aaggcugagagucacaguccua

SEQ ID NO: 851460 - RNA, 23 nt, Human
uccuuccuuugagaggcuccauc

SEQ ID NO: 851461 - RNA, 18 nt, Human
cugccugcucuccagcuu

SEQ ID NO: 851462 - RNA, 22 nt, Human
uuauguagcagaaagauguuug

SEQ ID NO: 851463 - RNA, 22 nt, Human
cccaggaaagagacugcugggu

SEQ ID NO: 851464 - RNA, 22 nt, Human
uugauacauuuuuaggauaaac

SEQ ID NO: 851465 - RNA, 21 nt, Human
uugaaaguaaauucagcagcu

SEQ ID NO: 851466 - RNA, 22 nt, Human
ggcugagccaugggcacugcag

SEQ ID NO: 851467 - RNA, 22 nt, Human
auuugcuuaucuccacaguugu

SEQ ID NO: 851468 - RNA, 22 nt, Human
auaaaugauucagcaggaaaua

SEQ ID NO: 851469 - RNA, 21 nt, Human
gcuggagagccaggcaggggc

SEQ ID NO: 851470 - RNA, 22 nt, Human
uaggauaugguagaaaucauuc

SEQ ID NO: 851471 - RNA, 21 nt, Human
gcaaauguucaggaaaaaaga

SEQ ID NO: 851472 - RNA, 17 nt, Human
aggcuggcucacaggga

SEQ ID NO: 851473 - RNA, 22 nt, Human
ucugcuguauuagguugaacug

SEQ ID NO: 851474 - RNA, 22 nt, Human
aauauaugugguauugaccagc

SEQ ID NO: 851475 - RNA, 22 nt, Human
uuuauagggacaguucuuggag

SEQ ID NO: 851476 - RNA, 22 nt, Human
ucuccuggcucaccaggcugga

SEQ ID NO: 851477 - RNA, 22 nt, Human
ucuucucucauguaggagggaa

SEQ ID NO: 851478 - RNA, 22 nt, Human
uaauuaacauacaaaacagcug

SEQ ID NO: 851479 - RNA, 22 nt, Human
uaaauuguuuucuagaaguugu

SEQ ID NO: 851480 - RNA, 21 nt, Human
uuuauuaacaacuguggacgu

SEQ ID NO: 851481 - RNA, 22 nt, Human
ugccugugguuccaguuuuuuc

SEQ ID NO: 851482 - RNA, 21 nt, Human
cugcuguggcccccgacaugc

SEQ ID NO: 851483 - RNA, 22 nt, Human
gggcugagauuggugcccuguc

SEQ ID NO: 851484 - RNA, 22 nt, Human
ugucuagaggccaacaggaaag

SEQ ID NO: 851485 - RNA, 22 nt, Human
gcugagagcggccagcugggaa

SEQ ID NO: 851486 - RNA, 22 nt, Human
uucugaaccauugagcacugcc

SEQ ID NO: 851487 - RNA, 22 nt, Human
ucuguccagaacguacaucuug

SEQ ID NO: 851488 - RNA, 22 nt, Human
ugaggcucuaugugguagauua

SEQ ID NO: 851489 - RNA, 22 nt, Human
ucacugcugcugccaugaugga

SEQ ID NO: 851490 - RNA, 22 nt, Human
uucuuugaguuaguacagucca

SEQ ID NO: 851491 - RNA, 22 nt, Human
agaggggaaggaugugauguga

SEQ ID NO: 851492 - RNA, 22 nt, Human
uaaccuuuguucaauguaagau

SEQ ID NO: 851493 - RNA, 22 nt, Human
gcugaagagcaaggcugggucu

SEQ ID NO: 851494 - RNA, 22 nt, Human
ggcagcucacgggcauggggug

SEQ ID NO: 851495 - RNA, 22 nt, Human
uuugaagugggcauuagaaccu

SEQ ID NO: 851496 - RNA, 21 nt, Human
ggcagccucuguggaagggga

SEQ ID NO: 851497 - RNA, 22 nt, Human
gucaggaucaaauugaaguuau

SEQ ID NO: 851498 - RNA, 22 nt, Human
cccaggaaguggagguugcagu

SEQ ID NO: 851499 - RNA, 22 nt, Human
acuggcagcagcagcccuuggg

SEQ ID NO: 851500 - RNA, 22 nt, Human
gaggcugccccuuccucagcug

SEQ ID NO: 851501 - RNA, 22 nt, Human
aaggcugaccaguuuacacuuu

SEQ ID NO: 851502 - RNA, 22 nt, Human
ccuccugggccuugcucuguga

SEQ ID NO: 851503 - RNA, 22 nt, Human
ucaggcugcaguggcaaaagac

SEQ ID NO: 851504 - RNA, 22 nt, Human
cuggcugaggucaccaguagcu

SEQ ID NO: 851505 - RNA, 22 nt, Human
cacuaaguugguguuaauuagu

SEQ ID NO: 851506 - RNA, 22 nt, Human
uuccuuaggcuguuugcagugc

SEQ ID NO: 851507 - RNA, 22 nt, Human
ccuccccugcucagaacucugg

SEQ ID NO: 851508 - RNA, 23 nt, Human
uggcugagguccagguaguuuca

SEQ ID NO: 851509 - RNA, 22 nt, Human
cgaggcagacaaaaguuggaag

SEQ ID NO: 851510 - RNA, 22 nt, Human
ccucagcuugauuucugcagag

SEQ ID NO: 851511 - RNA, 22 nt, Human
acucaggaaaugaagacugguu

SEQ ID NO: 851512 - RNA, 22 nt, Human
acuucuggauagagucagcuuu

SEQ ID NO: 851513 - RNA, 22 nt, Human
ggcugcugaaguguggcaaucu

SEQ ID NO: 851514 - RNA, 22 nt, Human
gcagaggagaugaagauacuuu

SEQ ID NO: 851515 - RNA, 22 nt, Human
ggccagcuuugagcugcaggaa

SEQ ID NO: 851516 - RNA, 22 nt, Human
cccaggaggcagauguugcagu

SEQ ID NO: 851517 - RNA, 22 nt, Human
guauuaggagguggagccuuug

SEQ ID NO: 851518 - RNA, 22 nt, Human
caauacuuccuuguuagaggca

SEQ ID NO: 851519 - RNA, 22 nt, Human
guucuucagcauuagaagucau

SEQ ID NO: 851520 - RNA, 22 nt, Human
agggagcucaguuggaagcggu

SEQ ID NO: 851521 - RNA, 22 nt, Human
aggguggcaccuggaagggaug

SEQ ID NO: 851522 - RNA, 22 nt, Human
agcaugcgcuugaucagcucca

SEQ ID NO: 851523 - RNA, 20 nt, Human
guacacuucauguuucaccu

SEQ ID NO: 851524 - RNA, 22 nt, Human
gcagagcuucuguccuucagga

SEQ ID NO: 851525 - RNA, 22 nt, Human
aaguaguuggaaauaagacaga

SEQ ID NO: 851526 - RNA, 22 nt, Human
caggcugcggccgugugagcau

SEQ ID NO: 851527 - RNA, 22 nt, Human
ccaggauggggagcagauagaa

SEQ ID NO: 851528 - RNA, 22 nt, Human
uauuuucuguggaggaccagau

SEQ ID NO: 851529 - RNA, 22 nt, Human
agcauacaguugaaaguggcuu

SEQ ID NO: 851530 - RNA, 22 nt, Human
aggggagguggcagaaaugugc

SEQ ID NO: 851531 - RNA, 23 nt, Human
cuccuggaggguccggcccugcc

SEQ ID NO: 851532 - RNA, 22 nt, Human
cagggcugagaauuuagagaca

SEQ ID NO: 851533 - RNA, 22 nt, Human
uugcaggaaacugagugugagc

SEQ ID NO: 851534 - RNA, 22 nt, Human
ucaggaugguguggaggaaaua

SEQ ID NO: 851535 - RNA, 22 nt, Human
auuagcauauuaaauagucauu

SEQ ID NO: 851536 - RNA, 22 nt, Human
cagaggcagugggguugcuccu

SEQ ID NO: 851537 - RNA, 22 nt, Human
gaggcagcugaaggagugacag

SEQ ID NO: 851538 - RNA, 22 nt, Human
uuuguaaaggccugaauuucag

SEQ ID NO: 851539 - RNA, 22 nt, Human
agagggauggccccguaacuca

SEQ ID NO: 851540 - RNA, 22 nt, Human
agagggaucacccuguuucugg

SEQ ID NO: 851541 - RNA, 22 nt, Human
auuacaguaacagcuacaaugc

SEQ ID NO: 851542 - RNA, 22 nt, Human
uaaugucaaggugauagauuug

SEQ ID NO: 851543 - RNA, 17 nt, Human
guccuacccauggucua

SEQ ID NO: 851544 - RNA, 22 nt, Human
aauuuccaaauuucugucacac

SEQ ID NO: 851545 - RNA, 22 nt, Human
uucugggacaucuggacaguuu

SEQ ID NO: 851546 - RNA, 22 nt, Human
acuccugggugcugaccagcgu

SEQ ID NO: 851547 - RNA, 22 nt, Human
cugcugugcaacauugcaccua

SEQ ID NO: 851548 - RNA, 22 nt, Human
ucaauucaacacaugcacauug

SEQ ID NO: 851549 - RNA, 23 nt, Human
gguccacccgagccugcagcuuc

SEQ ID NO: 851550 - RNA, 22 nt, Human
ucauuucccuccuacaaagagg

SEQ ID NO: 851551 - RNA, 22 nt, Human
agucauaugacccuucacaaac

SEQ ID NO: 851552 - RNA, 22 nt, Human
ugaguucucacccauucuucuu

SEQ ID NO: 851553 - RNA, 20 nt, Human
cagaggcaaggagacuugga

SEQ ID NO: 851554 - RNA, 22 nt, Human
ucuuagaaguuuauggcacgga

SEQ ID NO: 851555 - RNA, 20 nt, Human
ugugaaagcaguagaaugac

SEQ ID NO: 851556 - RNA, 22 nt, Human
cauucauuagaauagauaugua

SEQ ID NO: 851557 - RNA, 22 nt, Human
ugguagcaacaucucaguggcu

SEQ ID NO: 851558 - RNA, 22 nt, Human
cuaauacacccuauugcuuguu

SEQ ID NO: 851559 - RNA, 22 nt, Human
ccuggguggcagagguugcagu

SEQ ID NO: 851560 - RNA, 22 nt, Human
guggcacaaggcuuacacagca

SEQ ID NO: 851561 - RNA, 22 nt, Human
ucuuuauuucugaaucccccau

SEQ ID NO: 851562 - RNA, 22 nt, Human
uuuaguagaugcagcauuauuu

SEQ ID NO: 851563 - RNA, 22 nt, Human
caucuuuuggccuauucugagg

SEQ ID NO: 851564 - RNA, 21 nt, Human
uacagaaugcgcuucagucug

SEQ ID NO: 851565 - RNA, 22 nt, Human
acagagagaaacaaucagcagc

SEQ ID NO: 851566 - RNA, 22 nt, Human
ccugggcaacauagggagaccc

SEQ ID NO: 851567 - RNA, 22 nt, Human
auucuucagaauaucuggcacu

SEQ ID NO: 851568 - RNA, 23 nt, Human
guaacuggggaauuugagcuaug

SEQ ID NO: 851569 - RNA, 22 nt, Human
uccaggaggguuuucugccuuc

SEQ ID NO: 851570 - RNA, 22 nt, Human
aagggaggggauguaagccugg

SEQ ID NO: 851571 - RNA, 22 nt, Human
augugaggaagaaagagguaag

SEQ ID NO: 851572 - RNA, 22 nt, Human
cugggcaauaugcugggccugg

SEQ ID NO: 851573 - RNA, 22 nt, Human
uucuuacagaguuuacagagcc

SEQ ID NO: 851574 - RNA, 22 nt, Human
uccaggagugugugcuaauggg

SEQ ID NO: 851575 - RNA, 22 nt, Human
cuucucagucaccugugagucu

SEQ ID NO: 851576 - RNA, 22 nt, Human
cagugcugggcagaggagagcg

SEQ ID NO: 851577 - RNA, 22 nt, Human
aggcugaggagggauguugcuu

SEQ ID NO: 851578 - RNA, 23 nt, Human
acacuuucaaauaugcacagagc

SEQ ID NO: 851579 - RNA, 19 nt, Human
cuucuggcccugagccacc

SEQ ID NO: 851580 - RNA, 22 nt, Human
cugguacaaaaugcugauauca

SEQ ID NO: 851581 - RNA, 22 nt, Human
gagcaagauuuuauaaguugug

SEQ ID NO: 851582 - RNA, 22 nt, Human
uccuggccuuauccccaaacug

SEQ ID NO: 851583 - RNA, 22 nt, Human
gaacuggugagaguucacggga

SEQ ID NO: 851584 - RNA, 22 nt, Human
ugcccugggaguuggagcugcu

SEQ ID NO: 851585 - RNA, 22 nt, Human
ugugaaggagaugaagggagug

SEQ ID NO: 851586 - RNA, 22 nt, Human
aaacugguuucugagauggaac

SEQ ID NO: 851587 - RNA, 22 nt, Human
caggauagaaaggccauggagu

SEQ ID NO: 851588 - RNA, 22 nt, Human
ugcucuucggggccacugcuug

SEQ ID NO: 851589 - RNA, 22 nt, Human
ucaggagaguguucaguggagg

SEQ ID NO: 851590 - RNA, 21 nt, Human
agcaccuuacagcuauaaugg

SEQ ID NO: 851591 - RNA, 22 nt, Human
caaggcugcuggcuucugagcu

SEQ ID NO: 851592 - RNA, 22 nt, Human
cacaaauggccguguucaaaga

SEQ ID NO: 851593 - RNA, 22 nt, Human
ccugccucaggacucugcauau

SEQ ID NO: 851594 - RNA, 18 nt, Human
ucuuuggacaacuacugg

SEQ ID NO: 851595 - RNA, 22 nt, Human
uaggaugaucuuguagagagau

SEQ ID NO: 851596 - RNA, 22 nt, Human
uuuuauuaucuuugaaugggac

SEQ ID NO: 851597 - RNA, 22 nt, Human
cucucagacugaagggccugug

SEQ ID NO: 851598 - RNA, 22 nt, Human
uucaugugaauauauuugucuu

SEQ ID NO: 851599 - RNA, 22 nt, Human
cugaagccaugugcucacuggu

SEQ ID NO: 851600 - RNA, 22 nt, Human
gucuucuuguuuugaaggaaau

SEQ ID NO: 851601 - RNA, 22 nt, Human
gcugagguggagauugcaguga

SEQ ID NO: 851602 - RNA, 22 nt, Human
uucagaaaaaacuucaauaagu

SEQ ID NO: 851603 - RNA, 22 nt, Human
auucuucaccugagucagucua

SEQ ID NO: 851604 - RNA, 22 nt, Human
caggcagcguccugcuuccugu

SEQ ID NO: 851605 - RNA, 22 nt, Human
aagggcuggagaggaaagguug

SEQ ID NO: 851606 - RNA, 22 nt, Human
uuuacauuucccucugucaguu

SEQ ID NO: 851607 - RNA, 22 nt, Human
guuaaauucgaugauggauaaa

SEQ ID NO: 851608 - RNA, 22 nt, Human
aggcaguggaugucaggaaugg

SEQ ID NO: 851609 - RNA, 22 nt, Human
gacagcuggcaguggaaaggug

SEQ ID NO: 851610 - RNA, 22 nt, Human
aggcuggcccuacuggcugccu

SEQ ID NO: 851611 - RNA, 22 nt, Human
ggcugaggguauagcuguccca

SEQ ID NO: 851612 - RNA, 22 nt, Human
augaggauuaacuguugucaua

SEQ ID NO: 851613 - RNA, 22 nt, Human
cuggccacugguggucauaggc

SEQ ID NO: 851614 - RNA, 22 nt, Human
cugcuguguggugaaacucagu

SEQ ID NO: 851615 - RNA, 23 nt, Human
uacuuaggaauggggacggcaag

SEQ ID NO: 851616 - RNA, 22 nt, Human
gaggcugaguagcuuugugcuc

SEQ ID NO: 851617 - RNA, 22 nt, Human
acaaauaugguacucggagaaa

SEQ ID NO: 851618 - RNA, 22 nt, Human
gcagggaagacccggagcagcg

SEQ ID NO: 851619 - RNA, 19 nt, Human
uuucuuaggccuuuggccu

SEQ ID NO: 851620 - RNA, 22 nt, Human
ucccagaggaaauggcagcuga

SEQ ID NO: 851621 - RNA, 22 nt, Human
uaccacaguuuaucuauucagc

SEQ ID NO: 851622 - RNA, 22 nt, Human
ucaggcugagaaaaucuggacc

SEQ ID NO: 851623 - RNA, 22 nt, Human
ggguacuuaauauuuacggggu

SEQ ID NO: 851624 - RNA, 22 nt, Human
uuucaucuaacacuacauaggg

SEQ ID NO: 851625 - RNA, 22 nt, Human
agagaagagcaaugauaaauuu

SEQ ID NO: 851626 - RNA, 22 nt, Human
aacugguauggugagaagagag

SEQ ID NO: 851627 - RNA, 22 nt, Human
gagaagcaaucaguggccaccc

SEQ ID NO: 851628 - RNA, 22 nt, Human
cagacaggagacuggaucaugg

SEQ ID NO: 851629 - RNA, 16 nt, Human
aaggagggaagagaau

SEQ ID NO: 851630 - RNA, 22 nt, Human
cuccuggcucgcccccagcuga

SEQ ID NO: 851631 - RNA, 18 nt, Human
ugugaacacauuuuucug

SEQ ID NO: 851632 - RNA, 22 nt, Human
augcuguguuuuaaauggaaau

SEQ ID NO: 851633 - RNA, 22 nt, Human
uggcugaggagggucuucuggu

SEQ ID NO: 851634 - RNA, 21 nt, Human
gcccagugauuucuucacagu

SEQ ID NO: 851635 - RNA, 22 nt, Human
ugaggccccgaagcugagguuu

SEQ ID NO: 851636 - RNA, 22 nt, Human
aaauacuggcaagugcuaauuc

SEQ ID NO: 851637 - RNA, 23 nt, Human
uggcagcuguguaagagaaagca

SEQ ID NO: 851638 - RNA, 22 nt, Human
gagagcaggaggcagcgggacg

SEQ ID NO: 851639 - RNA, 22 nt, Human
agccugagugcuuaggacuguu

SEQ ID NO: 851640 - RNA, 22 nt, Human
aaauacuagaauucagaguuga

SEQ ID NO: 851641 - RNA, 21 nt, Human
agucuguuaggaugacucuga

SEQ ID NO: 851642 - RNA, 22 nt, Human
auauauaaccuggauaaggcuu

SEQ ID NO: 851643 - RNA, 19 nt, Human
ggggagaacuagagacagc

SEQ ID NO: 851644 - RNA, 18 nt, Human
cucuuucuuuggcacaaa

SEQ ID NO: 851645 - RNA, 22 nt, Human
ccuccugguugcaaugaaaugg

SEQ ID NO: 851646 - RNA, 22 nt, Human
ugaaaugaaacagaacauauca

SEQ ID NO: 851647 - RNA, 22 nt, Human
cauuuguacagaacagcuuuau

SEQ ID NO: 851648 - RNA, 21 nt, Human
gugcuuuuccuuaauguucuu

SEQ ID NO: 851649 - RNA, 19 nt, Human
agggccugcagcucaagcu

SEQ ID NO: 851650 - RNA, 22 nt, Human
uuucuagggcucuugucuucug

SEQ ID NO: 851651 - RNA, 22 nt, Human
acacauuucucuuuuuguaagu

SEQ ID NO: 851652 - RNA, 22 nt, Human
cagaguucaaagccugcuggga

SEQ ID NO: 851653 - RNA, 22 nt, Human
uucuccagaccuugugacuaug

SEQ ID NO: 851654 - RNA, 22 nt, Human
cagggcuggauccuccagacuc

SEQ ID NO: 851655 - RNA, 22 nt, Human
gaguccaguuagugaggcuggg

SEQ ID NO: 851656 - RNA, 22 nt, Human
ucuucagauaaagggagaguau

SEQ ID NO: 851657 - RNA, 22 nt, Human
uuagaaagaacuuuagauauca

SEQ ID NO: 851658 - RNA, 22 nt, Human
cugagcccauugggugcuguua

SEQ ID NO: 851659 - RNA, 20 nt, Human
uguuaaaggacacuugcuuu

SEQ ID NO: 851660 - RNA, 22 nt, Human
aggaugaggcuggcaggucuug

SEQ ID NO: 851661 - RNA, 22 nt, Human
aguugcucaauguggcugugga

SEQ ID NO: 851662 - RNA, 22 nt, Human
aguaaaaauugaggugcaaaau

SEQ ID NO: 851663 - RNA, 19 nt, Human
cucucacucgccacauccu

SEQ ID NO: 851664 - RNA, 22 nt, Human
cagcuggcugcaugaugccaaa

SEQ ID NO: 851665 - RNA, 22 nt, Human
uggcagcaccagcaguguccuu

SEQ ID NO: 851666 - RNA, 17 nt, Human
agaacuguaguagcucc

SEQ ID NO: 851667 - RNA, 22 nt, Human
cuuauuagaguuguguucuguu

SEQ ID NO: 851668 - RNA, 20 nt, Human
aggaaaaauggaaacuggag

SEQ ID NO: 851669 - RNA, 21 nt, Human
cucaggauggcggccuggugg

SEQ ID NO: 851670 - RNA, 22 nt, Human
cugaggccguuggugggccuua

SEQ ID NO: 851671 - RNA, 22 nt, Human
ccuggccaaucuagggcuguua

SEQ ID NO: 851672 - RNA, 22 nt, Human
aauggccagcugggagaguuga

SEQ ID NO: 851673 - RNA, 22 nt, Human
uggagcugggguuugaaucugg

SEQ ID NO: 851674 - RNA, 22 nt, Human
uuucauugcagagucugugugc

SEQ ID NO: 851675 - RNA, 22 nt, Human
uugaggucaauucuguuuccug

SEQ ID NO: 851676 - RNA, 22 nt, Human
aggguaggaacugaguggaagg

SEQ ID NO: 851677 - RNA, 22 nt, Human
ggucugaguggggccugagauu

SEQ ID NO: 851678 - RNA, 22 nt, Human
uuuucaguuccaucucugcucu

SEQ ID NO: 851679 - RNA, 22 nt, Human
uauacacugauauaaggaguaa

SEQ ID NO: 851680 - RNA, 22 nt, Human
gucaggauuuacaaacuucagu

SEQ ID NO: 851681 - RNA, 22 nt, Human
uggagucugugaugcucugggu

SEQ ID NO: 851682 - RNA, 22 nt, Human
ugguaaauauguccauucucuu

SEQ ID NO: 851683 - RNA, 22 nt, Human
aucauucuauuguugagcugcc

SEQ ID NO: 851684 - RNA, 22 nt, Human
gggcugagccacagcuuuuguu

SEQ ID NO: 851685 - RNA, 22 nt, Human
ugaggggagcuagcaugccuug

SEQ ID NO: 851686 - RNA, 22 nt, Human
gcccagggcugcaaguggacgc

SEQ ID NO: 851687 - RNA, 22 nt, Human
ggcagaggagcuggaaacaugg

SEQ ID NO: 851688 - RNA, 22 nt, Human
uggcugagugaacauguccauu

SEQ ID NO: 851689 - RNA, 22 nt, Human
caaauacuguacugaacacugu

SEQ ID NO: 851690 - RNA, 22 nt, Human
uuacacuuuugacaaaccugag

SEQ ID NO: 851691 - RNA, 22 nt, Human
uuacuggcugggccugagggcu

SEQ ID NO: 851692 - RNA, 22 nt, Human
aggcagcuggcaaauucuagag

SEQ ID NO: 851693 - RNA, 22 nt, Human
ccaggagaagcaucugagugua

SEQ ID NO: 851694 - RNA, 22 nt, Human
uuccugagggacuuuugagauu

SEQ ID NO: 851695 - RNA, 22 nt, Human
cagaacugaccucugauucuag

SEQ ID NO: 851696 - RNA, 22 nt, Human
cagucucuugcuucauuaguug

SEQ ID NO: 851697 - RNA, 23 nt, Human
uccugaggguuucccagccuugg

SEQ ID NO: 851698 - RNA, 22 nt, Human
gccaggagcccugggcaaguuc

SEQ ID NO: 851699 - RNA, 22 nt, Human
gaggcauggccugaggcuagga

SEQ ID NO: 851700 - RNA, 22 nt, Human
agcacagagguggaaguguaua

SEQ ID NO: 851701 - RNA, 19 nt, Human
cugggccagaaucagcuca

SEQ ID NO: 851702 - RNA, 22 nt, Human
uauuugcaacauaaaacucuga

SEQ ID NO: 851703 - RNA, 22 nt, Human
acaggacuguggaaggaucucu

SEQ ID NO: 851704 - RNA, 22 nt, Human
cugaggccucucuccugggcuu

SEQ ID NO: 851705 - RNA, 22 nt, Human
uccaggagcucauccacgucaa

SEQ ID NO: 851706 - RNA, 22 nt, Human
cccuuccugggugucccggagu

SEQ ID NO: 851707 - RNA, 22 nt, Human
ccuaauuaucucccaaagaucc

SEQ ID NO: 851708 - RNA, 21 nt, Human
uacaguaaguugggugguccu

SEQ ID NO: 851709 - RNA, 16 nt, Human
cuuccucuucacuggc

SEQ ID NO: 851710 - RNA, 22 nt, Human
acgcuuuuacuauuuugagcuc

SEQ ID NO: 851711 - RNA, 22 nt, Human
ucaggagacuuaugucacagug

SEQ ID NO: 851712 - RNA, 22 nt, Human
uuuggaauuggaaagugcugug

SEQ ID NO: 851713 - RNA, 22 nt, Human
gaggccacaguccugaggcauc

SEQ ID NO: 851714 - RNA, 22 nt, Human
ccuuuuauaaaguuguauugaa

SEQ ID NO: 851715 - RNA, 22 nt, Human
uggcaagccugagauccgggag

SEQ ID NO: 851716 - RNA, 22 nt, Human
uucuucaguguagcaacuguau

SEQ ID NO: 851717 - RNA, 22 nt, Human
uagcaagacaacuuuucucagu

SEQ ID NO: 851718 - RNA, 22 nt, Human
uuugaagucaggcuuucuaccc

SEQ ID NO: 851719 - RNA, 22 nt, Human
guggccaaaaggaagaagguua

SEQ ID NO: 851720 - RNA, 22 nt, Human
uugauuucuauucagauguaga

SEQ ID NO: 851721 - RNA, 22 nt, Human
gauuucuugauaauucaaaucc

SEQ ID NO: 851722 - RNA, 22 nt, Human
guaacucuuuggaaaacauuuu

SEQ ID NO: 851723 - RNA, 22 nt, Human
caguucuuauuuggccaguguc

SEQ ID NO: 851724 - RNA, 22 nt, Human
cacaggcugggaagccuaggcc

SEQ ID NO: 851725 - RNA, 22 nt, Human
uuggccaagggaucgagguugg

SEQ ID NO: 851726 - RNA, 22 nt, Human
gaggauggaggugugagcuaug

SEQ ID NO: 851727 - RNA, 22 nt, Human
acauguuuaaguuuguuauaug

SEQ ID NO: 851728 - RNA, 22 nt, Human
auugaaagguuuugagcagaua

SEQ ID NO: 851729 - RNA, 22 nt, Human
uuaagauagaacccaguagucu

SEQ ID NO: 851730 - RNA, 22 nt, Human
uuacacuucugaaagccuaggu

SEQ ID NO: 851731 - RNA, 16 nt, Human
ucccaggaggcggaac

SEQ ID NO: 851732 - RNA, 22 nt, Human
guccaugauucuguguaguaga

SEQ ID NO: 851733 - RNA, 22 nt, Human
ucugggaaguccucugucaugc

SEQ ID NO: 851734 - RNA, 22 nt, Human
agggccuggaacugugggcagg

SEQ ID NO: 851735 - RNA, 22 nt, Human
uaguccaggacaaucuucauau

SEQ ID NO: 851736 - RNA, 22 nt, Human
gugcugccugccagcuucuggg

SEQ ID NO: 851737 - RNA, 22 nt, Human
cuccaggaaaauagggaaugag

SEQ ID NO: 851738 - RNA, 22 nt, Human
uuggaaauacgaguaguaucau

SEQ ID NO: 851739 - RNA, 22 nt, Human
uccaggaguuugaccugugggc

SEQ ID NO: 851740 - RNA, 22 nt, Human
guacauuucucuuguucuuauu

SEQ ID NO: 851741 - RNA, 22 nt, Human
aucuuucaguuucauaccaauu

SEQ ID NO: 851742 - RNA, 22 nt, Human
uccugagagcagcugcuuugga

SEQ ID NO: 851743 - RNA, 22 nt, Human
gauuucuugauaaguaguguga

SEQ ID NO: 851744 - RNA, 22 nt, Human
gaggcaguguugaaaaggagag

SEQ ID NO: 851745 - RNA, 22 nt, Human
ccuggagagagaggccaacugc

SEQ ID NO: 851746 - RNA, 23 nt, Human
uuccagaguccacaucugccacc

SEQ ID NO: 851747 - RNA, 22 nt, Human
aguggcaggcggagauguagga

SEQ ID NO: 851748 - RNA, 22 nt, Human
auggccaugccaguuuacagcc

SEQ ID NO: 851749 - RNA, 22 nt, Human
caggagagauaugaguccccac

SEQ ID NO: 851750 - RNA, 22 nt, Human
cuggccauguugccucugagac

SEQ ID NO: 851751 - RNA, 22 nt, Human
cuggggcccaucgagggcugag

SEQ ID NO: 851752 - RNA, 22 nt, Human
gagggcugcuggaaaaaugcag

SEQ ID NO: 851753 - RNA, 22 nt, Human
aggccagacagcuagaaacagg

SEQ ID NO: 851754 - RNA, 22 nt, Human
ccuggccaggcauggagucaca

SEQ ID NO: 851755 - RNA, 22 nt, Human
uuggaaagcaagcuggacauac

SEQ ID NO: 851756 - RNA, 22 nt, Human
agacccugcauuuuccaggguu

SEQ ID NO: 851757 - RNA, 22 nt, Human
caaggaaaagaaguauuucaga

SEQ ID NO: 851758 - RNA, 22 nt, Human
gcaggagagucugugccagguu

SEQ ID NO: 851759 - RNA, 22 nt, Human
aaugucugcucuacucaggagg

SEQ ID NO: 851760 - RNA, 22 nt, Human
agcagagccugggcuaggggug

SEQ ID NO: 851761 - RNA, 22 nt, Human
gugagagaucccccacucaucu

SEQ ID NO: 851762 - RNA, 22 nt, Human
gaggcagagugcaccccaggag

SEQ ID NO: 851763 - RNA, 22 nt, Human
cagcuuucaucagugacacuca

SEQ ID NO: 851764 - RNA, 22 nt, Human
cuugaaagaagggucuuuuaau

SEQ ID NO: 851765 - RNA, 23 nt, Human
gcccucccucccagguggguguu

SEQ ID NO: 851766 - RNA, 22 nt, Human
ggcugcuggccagccuaggagu

SEQ ID NO: 851767 - RNA, 19 nt, Human
uccucagugacaaccucag

SEQ ID NO: 851768 - RNA, 20 nt, Human
accagagcucucaguaugug

SEQ ID NO: 851769 - RNA, 22 nt, Human
cugcuuugacuguuaagaacca

SEQ ID NO: 851770 - RNA, 22 nt, Human
gcugccuguccugaggaguccg

SEQ ID NO: 851771 - RNA, 22 nt, Human
cuuuauauccagauguuuggug

SEQ ID NO: 851772 - RNA, 22 nt, Human
cagagcuguuacuauucaugaa

SEQ ID NO: 851773 - RNA, 22 nt, Human
uggcaguccccugugccuggaa

SEQ ID NO: 851774 - RNA, 22 nt, Human
aucugcaggaaugugugcagag

SEQ ID NO: 851775 - RNA, 22 nt, Human
uuucugcugugcuuucuugcgu

SEQ ID NO: 851776 - RNA, 22 nt, Human
cuuagagcuuaggcuagccauu

SEQ ID NO: 851777 - RNA, 22 nt, Human
cuugaaagucagcagaguggau

SEQ ID NO: 851778 - RNA, 22 nt, Human
uuggaaauacagcaguuacuuu

SEQ ID NO: 851779 - RNA, 22 nt, Human
ccuggccagggucugggcugcu

SEQ ID NO: 851780 - RNA, 22 nt, Human
gaggagcugggcugagaggguc

SEQ ID NO: 851781 - RNA, 22 nt, Human
aagugaagaaauacaugagaau

SEQ ID NO: 851782 - RNA, 22 nt, Human
aaggcagccuuuguuugauuga

SEQ ID NO: 851783 - RNA, 21 nt, Human
auucuagacaacacugaaauc

SEQ ID NO: 851784 - RNA, 22 nt, Human
ggcaugaguggcagugggcagu

SEQ ID NO: 851785 - RNA, 19 nt, Human
aauacaguguuauagaauu

SEQ ID NO: 851786 - RNA, 22 nt, Human
aggcagucuaguccccaggcaa

SEQ ID NO: 851787 - RNA, 22 nt, Human
accuuuuauguaaauauauguu

SEQ ID NO: 851788 - RNA, 21 nt, Human
uuucuuaggcucuaaaaugac

SEQ ID NO: 851789 - RNA, 20 nt, Human
ugaggcucagagagguugag

SEQ ID NO: 851790 - RNA, 20 nt, Human
aagcacauuucuacaauaau

SEQ ID NO: 851791 - RNA, 19 nt, Human
uucaggauugacccuacug

SEQ ID NO: 851792 - RNA, 20 nt, Human
gcugagguuucuuccuauau

SEQ ID NO: 851793 - RNA, 22 nt, Human
auuggcaguuagugacgaggcu

SEQ ID NO: 851794 - RNA, 22 nt, Human
ucacaagacugagcuugcuuga

SEQ ID NO: 851795 - RNA, 18 nt, Human
gugcugugggcaguggcc

SEQ ID NO: 851796 - RNA, 22 nt, Human
uggcagcugucuguggggucuc

SEQ ID NO: 851797 - RNA, 22 nt, Human
agaggagguccuuuucugaugu

SEQ ID NO: 851798 - RNA, 22 nt, Human
ccuccugguaauuagcgaaagg

SEQ ID NO: 851799 - RNA, 22 nt, Human
cugcuguguuucacaccucugg

SEQ ID NO: 851800 - RNA, 22 nt, Human
acaccauacucauguugguucc

SEQ ID NO: 851801 - RNA, 22 nt, Human
auaguuugaaggcuguucuacu

SEQ ID NO: 851802 - RNA, 22 nt, Human
cagcuccucacgagucuugaaa

SEQ ID NO: 851803 - RNA, 22 nt, Human
ccagugcuaagguagccucugc

SEQ ID NO: 851804 - RNA, 22 nt, Human
gugcagcugcaggagucagguc

SEQ ID NO: 851805 - RNA, 22 nt, Human
cugagccauccauaccagcuua

SEQ ID NO: 851806 - RNA, 22 nt, Human
cuaggaaagacacagagaguuu

SEQ ID NO: 851807 - RNA, 22 nt, Human
auacaacuuuacaugcaauucc

SEQ ID NO: 851808 - RNA, 22 nt, Human
uucuucaugcuguugcugcuug

SEQ ID NO: 851809 - RNA, 22 nt, Human
ugaaggcccagccacagaaugg

SEQ ID NO: 851810 - RNA, 22 nt, Human
aggcugagaaagugggaagaug

SEQ ID NO: 851811 - RNA, 22 nt, Human
uacaucauaauaauacuuagaa

SEQ ID NO: 851812 - RNA, 22 nt, Human
uuucaaagucaauaucauuacc

SEQ ID NO: 851813 - RNA, 22 nt, Human
aaaaaucuaugacugcuucucc

SEQ ID NO: 851814 - RNA, 22 nt, Human
uuaacauuguccuuagcagauu

SEQ ID NO: 851815 - RNA, 22 nt, Human
ggcuuugccuggaauuuccuug

SEQ ID NO: 851816 - RNA, 22 nt, Human
uccaccagccaggcccaggcug

SEQ ID NO: 851817 - RNA, 22 nt, Human
caggacagcucaacaccuccuc

SEQ ID NO: 851818 - RNA, 22 nt, Human
aguuugaaaguauugacagaag

SEQ ID NO: 851819 - RNA, 20 nt, Human
ucuccuggugacaguaccca

SEQ ID NO: 851820 - RNA, 22 nt, Human
uagagcugggcagugcucugag

SEQ ID NO: 851821 - RNA, 22 nt, Human
uaauuauucuagucacauagca

SEQ ID NO: 851822 - RNA, 22 nt, Human
ucagauggguuuugaaggaugu

SEQ ID NO: 851823 - RNA, 22 nt, Human
uugacacagaucaauauucaac

SEQ ID NO: 851824 - RNA, 18 nt, Human
ugcuggguaacuguaugg

SEQ ID NO: 851825 - RNA, 21 nt, Human
aguguaggucauuagcuguug

SEQ ID NO: 851826 - RNA, 21 nt, Human
uaaaacuguaacuuuguccug

SEQ ID NO: 851827 - RNA, 22 nt, Human
gaugccucuuuuggcugaauua

SEQ ID NO: 851828 - RNA, 22 nt, Human
aaauauagugacacuuauaguc

SEQ ID NO: 851829 - RNA, 22 nt, Human
aggcuccaaauuaccaagcucu

SEQ ID NO: 851830 - RNA, 22 nt, Human
gcugcugucagugguggcaguu

SEQ ID NO: 851831 - RNA, 22 nt, Human
guacacuugucuugaacagccu

SEQ ID NO: 851832 - RNA, 22 nt, Human
cagaaauguacugacaugcagu

SEQ ID NO: 851833 - RNA, 22 nt, Human
caggaugagaggcccagggaag

SEQ ID NO: 851834 - RNA, 22 nt, Human
cagcuuccauaagagauggaga

SEQ ID NO: 851835 - RNA, 22 nt, Human
agaccgagaaguucuccaggcc

SEQ ID NO: 851836 - RNA, 22 nt, Human
uuucuucucgacaccuuauccc

SEQ ID NO: 851837 - RNA, 22 nt, Human
aucaggauggguuuggcuuagg

SEQ ID NO: 851838 - RNA, 22 nt, Human
ggcugcugggaauaugccagcu

SEQ ID NO: 851839 - RNA, 22 nt, Human
ccugguugagggagguguggac

SEQ ID NO: 851840 - RNA, 22 nt, Human
cuuuuuaucucuuaaugauguu

SEQ ID NO: 851841 - RNA, 22 nt, Human
ucccagaguauuagcaauugcu

SEQ ID NO: 851842 - RNA, 22 nt, Human
uagggcugccauuugcuuuucu

SEQ ID NO: 851843 - RNA, 22 nt, Human
aagugagugguaaggagcaugg

SEQ ID NO: 851844 - RNA, 22 nt, Human
gaacuguucccucacaggcugg

SEQ ID NO: 851845 - RNA, 22 nt, Human
gcuggugcauuagcugcaguuc

SEQ ID NO: 851846 - RNA, 22 nt, Human
uggcagcugccauguccacgug

SEQ ID NO: 851847 - RNA, 22 nt, Human
uaacuguacaacugguuaguca

SEQ ID NO: 851848 - RNA, 22 nt, Human
ccagggccugccacuuagcaag

SEQ ID NO: 851849 - RNA, 22 nt, Human
cuuaagauuugagauaccuaau

SEQ ID NO: 851850 - RNA, 22 nt, Human
uuuccuaggagauugaucacau

SEQ ID NO: 851851 - RNA, 22 nt, Human
aaaggccaugguuggaguguuu

SEQ ID NO: 851852 - RNA, 22 nt, Human
ggcugaugagcuuagcuagaga

SEQ ID NO: 851853 - RNA, 22 nt, Human
aagggcugcauuugauguguca

SEQ ID NO: 851854 - RNA, 22 nt, Human
ugguccacagggaguccgugcu

SEQ ID NO: 851855 - RNA, 22 nt, Human
gucaggauuauuuuauuaaaag

SEQ ID NO: 851856 - RNA, 22 nt, Human
gcugagguaggagguugcagug

SEQ ID NO: 851857 - RNA, 22 nt, Human
ugcuggguagaaguauuagucu

SEQ ID NO: 851858 - RNA, 22 nt, Human
uucuaaauuuuggaagaugcag

SEQ ID NO: 851859 - RNA, 22 nt, Human
ucaggaugagcucauaacuaug

SEQ ID NO: 851860 - RNA, 22 nt, Human
gugcaagguacauccuugaugu

SEQ ID NO: 851861 - RNA, 22 nt, Human
ucaggcugguggucagauggcu

SEQ ID NO: 851862 - RNA, 22 nt, Human
gcuccuggcuccaggcagccaa

SEQ ID NO: 851863 - RNA, 22 nt, Human
ggacuucuaagugccagacacu

SEQ ID NO: 851864 - RNA, 22 nt, Human
gaggccaaguuggagaccaggu

SEQ ID NO: 851865 - RNA, 22 nt, Human
gagagguccauuccccugucag

SEQ ID NO: 851866 - RNA, 22 nt, Human
cauuuccacuucugaaaacugg

SEQ ID NO: 851867 - RNA, 22 nt, Human
ucaggcugcuguacugugaaug

SEQ ID NO: 851868 - RNA, 23 nt, Human
aggcugagcucucccagcuucag

SEQ ID NO: 851869 - RNA, 22 nt, Human
caaggccaagucucugugaaga

SEQ ID NO: 851870 - RNA, 22 nt, Human
gagguccacugaggcaacaggg

SEQ ID NO: 851871 - RNA, 22 nt, Human
uuuuauugucaaugaagacaga

SEQ ID NO: 851872 - RNA, 22 nt, Human
gcugaggauauagcaggaacaa

SEQ ID NO: 851873 - RNA, 22 nt, Human
agucuuaggcuccauuaguaga

SEQ ID NO: 851874 - RNA, 22 nt, Human
uuucaugagauuccuccacauc

SEQ ID NO: 851875 - RNA, 22 nt, Human
cauggagauaaacugaaauauu

SEQ ID NO: 851876 - RNA, 22 nt, Human
uuagagaaaggguuugauuccg

SEQ ID NO: 851877 - RNA, 22 nt, Human
aagauggagcacgagcagaagc

SEQ ID NO: 851878 - RNA, 22 nt, Human
ccuggcugcauuuugcuggaug

SEQ ID NO: 851879 - RNA, 22 nt, Human
uggcagcauuaauuauucaggu

SEQ ID NO: 851880 - RNA, 20 nt, Human
aucaggauucuugcuuuguu

SEQ ID NO: 851881 - RNA, 22 nt, Human
uacuuucuuguuccuuucauaa

SEQ ID NO: 851882 - RNA, 22 nt, Human
cccugcuuugcacccaggcugg

SEQ ID NO: 851883 - RNA, 22 nt, Human
ucugagguaccagcugguuuau

SEQ ID NO: 851884 - RNA, 22 nt, Human
auacaguaauuuguaacucauc

SEQ ID NO: 851885 - RNA, 22 nt, Human
uccauuuucaucucauguauaa

SEQ ID NO: 851886 - RNA, 20 nt, Human
aaacauucauguacaaguga

SEQ ID NO: 851887 - RNA, 22 nt, Human
gcugcuguguuggagagggacu

SEQ ID NO: 851888 - RNA, 22 nt, Human
cugaaugaggaaaagagugagg

SEQ ID NO: 851889 - RNA, 22 nt, Human
aggcagcuuuguaguaaagcua

SEQ ID NO: 851890 - RNA, 22 nt, Human
acagugugguuugagcacuggg

SEQ ID NO: 851891 - RNA, 22 nt, Human
uuucaaauagaaucuuuccaaa

SEQ ID NO: 851892 - RNA, 22 nt, Human
cugaggucaccccacuggcugu

SEQ ID NO: 851893 - RNA, 22 nt, Human
agagccugugggagaugcagcu

SEQ ID NO: 851894 - RNA, 22 nt, Human
uaucuagauaccaagaagcaca

SEQ ID NO: 851895 - RNA, 22 nt, Human
acccaggacaaaauaaccaggu

SEQ ID NO: 851896 - RNA, 16 nt, Human
uagggcugggaaggag

SEQ ID NO: 851897 - RNA, 22 nt, Human
aagggcugcaauccaaaacacu

SEQ ID NO: 851898 - RNA, 21 nt, Human
acaggagaccgccuggcaguc

SEQ ID NO: 851899 - RNA, 22 nt, Human
uccucagacuucccuuugugua

SEQ ID NO: 851900 - RNA, 20 nt, Human
cacaggaaagcuacucaguu

SEQ ID NO: 851901 - RNA, 22 nt, Human
cuagaaaaauacuuuauuguga

SEQ ID NO: 851902 - RNA, 22 nt, Human
uuagccaugcccuagaagagga

SEQ ID NO: 851903 - RNA, 22 nt, Human
uggcagcuauuacaaggaaguc

SEQ ID NO: 851904 - RNA, 21 nt, Human
acagucuccccagaucucucc

SEQ ID NO: 851905 - RNA, 22 nt, Human
uugaggucuguguaggcagcaa

SEQ ID NO: 851906 - RNA, 22 nt, Human
agggaagcuuguuacugagaag

SEQ ID NO: 851907 - RNA, 22 nt, Human
cauuuccugucuggaggucaaa

SEQ ID NO: 851908 - RNA, 22 nt, Human
gaggagcuggcugucgggaggc

SEQ ID NO: 851909 - RNA, 23 nt, Human
auguuauuauuagcagucuugcc

SEQ ID NO: 851910 - RNA, 22 nt, Human
aacuuucuuucacagaaguauc

SEQ ID NO: 851911 - RNA, 22 nt, Human
acuccaggguuuugcaccugga

SEQ ID NO: 851912 - RNA, 22 nt, Human
caaugugguggcagaugucagu

SEQ ID NO: 851913 - RNA, 22 nt, Human
gcugagcagguguaaggaaggc

SEQ ID NO: 851914 - RNA, 22 nt, Human
acugagcucuugacugggaguu

SEQ ID NO: 851915 - RNA, 22 nt, Human
auuuggaaaaucugguuauaga

SEQ ID NO: 851916 - RNA, 22 nt, Human
uuauuugcccauguuuagcaga

SEQ ID NO: 851917 - RNA, 22 nt, Human
uagcaagaggaaacaaggggcc

SEQ ID NO: 851918 - RNA, 19 nt, Human
agauggcaaaaugcaaaga

SEQ ID NO: 851919 - RNA, 22 nt, Human
uguccaggcuaaagugcagugg

SEQ ID NO: 851920 - RNA, 22 nt, Human
uuccaagagcuuuaauuguuga

SEQ ID NO: 851921 - RNA, 22 nt, Human
cugcugccaagggugccacagg

SEQ ID NO: 851922 - RNA, 22 nt, Human
acagagcuguacaugugccaug

SEQ ID NO: 851923 - RNA, 22 nt, Human
agcuggcaguaugacuggugac

SEQ ID NO: 851924 - RNA, 22 nt, Human
uacuuucuuucccaagaggugg

SEQ ID NO: 851925 - RNA, 23 nt, Human
ugaguucucaucuuggcuucuau

SEQ ID NO: 851926 - RNA, 20 nt, Human
agugccagggcaggugagag

SEQ ID NO: 851927 - RNA, 22 nt, Human
uuggcagugucugcaaaaugga

SEQ ID NO: 851928 - RNA, 22 nt, Human
acuggcaguagagggagcgcau

SEQ ID NO: 851929 - RNA, 22 nt, Human
ggagccuggucagguuggcucc

SEQ ID NO: 851930 - RNA, 22 nt, Human
gcuuccuaaaugcacagggcag

SEQ ID NO: 851931 - RNA, 22 nt, Human
gaauauuuuuaaagggacuaau

SEQ ID NO: 851932 - RNA, 20 nt, Human
acuaacauuugcaaggggcu

SEQ ID NO: 851933 - RNA, 22 nt, Human
uacuuccuguuuccaugucugu

SEQ ID NO: 851934 - RNA, 22 nt, Human
cuaaucaucuuucucuuaaagc

SEQ ID NO: 851935 - RNA, 22 nt, Human
gcaccaggcagcugagcaggcc

SEQ ID NO: 851936 - RNA, 22 nt, Human
cuguggaaauaaacaaugcuaa

SEQ ID NO: 851937 - RNA, 22 nt, Human
aggcugcuucaauggauaagau

SEQ ID NO: 851938 - RNA, 22 nt, Human
gcuggagaugcuaugcagaggg

SEQ ID NO: 851939 - RNA, 22 nt, Human
ugaggcaggacauggacaacug

SEQ ID NO: 851940 - RNA, 22 nt, Human
cuugaaagucacaugcagcccu

SEQ ID NO: 851941 - RNA, 22 nt, Human
cccuugcaucccauguguggcc

SEQ ID NO: 851942 - RNA, 22 nt, Human
ccugggcaauauagugaggccc

SEQ ID NO: 851943 - RNA, 22 nt, Human
aagauuauuuaagacaggaacc

SEQ ID NO: 851944 - RNA, 22 nt, Human
ggacagcucugccaggagcuca

SEQ ID NO: 851945 - RNA, 22 nt, Human
auuaggcagggcaugguggcuc

SEQ ID NO: 851946 - RNA, 22 nt, Human
uucaggauaugugauaucugaa

SEQ ID NO: 851947 - RNA, 20 nt, Human
ugcugcugcuucacccccau

SEQ ID NO: 851948 - RNA, 19 nt, Human
agggaguuuauauuugcac

SEQ ID NO: 851949 - RNA, 22 nt, Human
uaaacagcuacugugucaaagg

SEQ ID NO: 851950 - RNA, 22 nt, Human
ucauucuugaucacuaguuagu

SEQ ID NO: 851951 - RNA, 22 nt, Human
aggaggggcaaugauagucugg

SEQ ID NO: 851952 - RNA, 22 nt, Human
cccuugcacauuugucuuuaau

SEQ ID NO: 851953 - RNA, 22 nt, Human
ucuuugcaaauguuauuaucuu

SEQ ID NO: 851954 - RNA, 22 nt, Human
cuaggcaguccugacgguacua

SEQ ID NO: 851955 - RNA, 22 nt, Human
uggcuggauuauuggcuaguac

SEQ ID NO: 851956 - RNA, 22 nt, Human
auggacauuugaguuauuucca

SEQ ID NO: 851957 - RNA, 19 nt, Human
gccugccuggguuucugag

SEQ ID NO: 851958 - RNA, 22 nt, Human
auuuggcaacauuaauugaauc

SEQ ID NO: 851959 - RNA, 22 nt, Human
acaggagaauuaucuggaacaa

SEQ ID NO: 851960 - RNA, 22 nt, Human
aaauuauuaugccccucuauaa

SEQ ID NO: 851961 - RNA, 22 nt, Human
cuggcucauccagguguugcuc

SEQ ID NO: 851962 - RNA, 22 nt, Human
auacagauguugaauguuauau

SEQ ID NO: 851963 - RNA, 22 nt, Human
cuguuuauuacacuggauagca

SEQ ID NO: 851964 - RNA, 18 nt, Human
gcugagguggugucagag

SEQ ID NO: 851965 - RNA, 23 nt, Human
uggagcugacagucagagggagg

SEQ ID NO: 851966 - RNA, 22 nt, Human
caaggaaaacagaugaucaaca

SEQ ID NO: 851967 - RNA, 22 nt, Human
gcugucccgcugacuuccagcu

SEQ ID NO: 851968 - RNA, 22 nt, Human
acagcuaacuuaaacuaaccua

SEQ ID NO: 851969 - RNA, 22 nt, Human
cccaggagaccugugaaaggac

SEQ ID NO: 851970 - RNA, 22 nt, Human
ugagguccugcauguugagguc

SEQ ID NO: 851971 - RNA, 22 nt, Human
cagcuacuccucccaugacuuc

SEQ ID NO: 851972 - RNA, 22 nt, Human
cugccuggcuaaacucaagucg

SEQ ID NO: 851973 - RNA, 19 nt, Human
ugaguucugugguucucaa

SEQ ID NO: 851974 - RNA, 21 nt, Human
gccucuccaaauccugccuuc

SEQ ID NO: 851975 - RNA, 22 nt, Human
uugaacuguaagcaugucugcc

SEQ ID NO: 851976 - RNA, 22 nt, Human
uccacaugaccauugugcuccu

SEQ ID NO: 851977 - RNA, 22 nt, Human
uuuauuugaaucaggggagaau

SEQ ID NO: 851978 - RNA, 22 nt, Human
aggcagcuagagagugaaacug

SEQ ID NO: 851979 - RNA, 22 nt, Human
uggaggaaaaaaccaggcagag

SEQ ID NO: 851980 - RNA, 23 nt, Human
cuccccaguguccucaugcaucu

SEQ ID NO: 851981 - RNA, 22 nt, Human
agggggugcccagaugaaggau

SEQ ID NO: 851982 - RNA, 22 nt, Human
ucaggagauggucuuuauaggc

SEQ ID NO: 851983 - RNA, 22 nt, Human
uuccucagcuggccugauuggg

SEQ ID NO: 851984 - RNA, 22 nt, Human
ucccaggaaggauucggcauuu

SEQ ID NO: 851985 - RNA, 15 nt, Human
cuccaugauuuugca

SEQ ID NO: 851986 - RNA, 20 nt, Human
ugagacccgcugacaaguuc

SEQ ID NO: 851987 - RNA, 22 nt, Human
uugcauuucccauugaguaaug

SEQ ID NO: 851988 - RNA, 22 nt, Human
uuaggaaacaguagccuuugcu

SEQ ID NO: 851989 - RNA, 22 nt, Human
auucuucacaaauauauagaag

SEQ ID NO: 851990 - RNA, 22 nt, Human
uuuuaguuguaguuggugagga

SEQ ID NO: 851991 - RNA, 22 nt, Human
gugagguccaguaacuugucca

SEQ ID NO: 851992 - RNA, 22 nt, Human
acagcagcuugcgugucugguc

SEQ ID NO: 851993 - RNA, 22 nt, Human
gcaguucuacuuauccauagac

SEQ ID NO: 851994 - RNA, 22 nt, Human
gcaaagcauucuguggagucua

SEQ ID NO: 851995 - RNA, 22 nt, Human
auguaacugaaggaaaugcaug

SEQ ID NO: 851996 - RNA, 22 nt, Human
cacucuccagcacaccccauuu

SEQ ID NO: 851997 - RNA, 22 nt, Human
uacuaaauaguuuaauuccuca

SEQ ID NO: 851998 - RNA, 18 nt, Human
ucugagguggacgaggag

SEQ ID NO: 851999 - RNA, 21 nt, Human
ggcugcuggggguuggcacag

SEQ ID NO: 852000 - RNA, 23 nt, Human
ucuccuggcugcacuguggccac

SEQ ID NO: 852001 - RNA, 22 nt, Human
gggugggacugaagucugaggg

SEQ ID NO: 852002 - RNA, 22 nt, Human
cucaggaaaggccaugcaaggg

SEQ ID NO: 852003 - RNA, 22 nt, Human
ggcugagaguuuccucuggggc

SEQ ID NO: 852004 - RNA, 22 nt, Human
aucaggaucacagaaacuuuua

SEQ ID NO: 852005 - RNA, 23 nt, Human
uuuuccagaaucgacucuguaga

SEQ ID NO: 852006 - RNA, 22 nt, Human
aagaaguuaaauaaauggacca

SEQ ID NO: 852007 - RNA, 22 nt, Human
gaggagcuugaggcuaggagcc

SEQ ID NO: 852008 - RNA, 20 nt, Human
gcccaagguccagaaggggg

SEQ ID NO: 852009 - RNA, 22 nt, Human
gcugaggaaaggcuggaaggga

SEQ ID NO: 852010 - RNA, 22 nt, Human
cggcagcucgagggccacccgu

SEQ ID NO: 852011 - RNA, 22 nt, Human
ucucccaggcugcccuguggac

SEQ ID NO: 852012 - RNA, 22 nt, Human
cccuggaggcaaagguugcagu

SEQ ID NO: 852013 - RNA, 22 nt, Human
agcaccauugcaaauauggcag

SEQ ID NO: 852014 - RNA, 22 nt, Human
uaacuggugaguugguugagug

SEQ ID NO: 852015 - RNA, 22 nt, Human
uuccuggcgccacggagccggu

SEQ ID NO: 852016 - RNA, 22 nt, Human
cugaggcuuguccucucagcuu

SEQ ID NO: 852017 - RNA, 22 nt, Human
auuaaggaauguaggcaagaag

SEQ ID NO: 852018 - RNA, 22 nt, Human
uuuccagguauuaauacuguau

SEQ ID NO: 852019 - RNA, 22 nt, Human
uaggcagcgcuuggcugugcuu

SEQ ID NO: 852020 - RNA, 22 nt, Human
uuauuaggaacucaggauuuuu

SEQ ID NO: 852021 - RNA, 22 nt, Human
uaguuuuacuugcgaugauaau

SEQ ID NO: 852022 - RNA, 22 nt, Human
auugaaagauauacuguucuca

SEQ ID NO: 852023 - RNA, 22 nt, Human
gacuccugggccucugagaggc

SEQ ID NO: 852024 - RNA, 22 nt, Human
ggacccugggcucugggccuau

SEQ ID NO: 852025 - RNA, 22 nt, Human
augaggccagggugccaugaaa

SEQ ID NO: 852026 - RNA, 22 nt, Human
uauuuguauguguguacauaua

SEQ ID NO: 852027 - RNA, 22 nt, Human
cuguuuaucccuuuggucagca

SEQ ID NO: 852028 - RNA, 22 nt, Human
cccaggagguggagguugcagu

SEQ ID NO: 852029 - RNA, 22 nt, Human
cuggggucagggaucagagagc

SEQ ID NO: 852030 - RNA, 22 nt, Human
gaggaggcuuccgggaggcacg

SEQ ID NO: 852031 - RNA, 22 nt, Human
auucaaguggcugcuauguuaa

SEQ ID NO: 852032 - RNA, 22 nt, Human
gagcagcugagcuggaaugaga

SEQ ID NO: 852033 - RNA, 22 nt, Human
aggaugagaagauuggaaucuu

SEQ ID NO: 852034 - RNA, 22 nt, Human
cugaggcuaaccucgagagaca

SEQ ID NO: 852035 - RNA, 23 nt, Human
ccacagagcugccaauuccugug

SEQ ID NO: 852036 - RNA, 22 nt, Human
gagguggucgaggagggguacc

SEQ ID NO: 852037 - RNA, 22 nt, Human
uccaggaggacugagggggcug

SEQ ID NO: 852038 - RNA, 22 nt, Human
acuuuugguucuguaacuguga

SEQ ID NO: 852039 - RNA, 22 nt, Human
gcccaggagguggaggugcagu

SEQ ID NO: 852040 - RNA, 22 nt, Human
auuaggacagagaugucaagag

SEQ ID NO: 852041 - RNA, 22 nt, Human
ccaggagagcucucguucagug

SEQ ID NO: 852042 - RNA, 23 nt, Human
agaugagccaacaccuccaugcc

SEQ ID NO: 852043 - RNA, 22 nt, Human
uagugucaugaaaaguacacua

SEQ ID NO: 852044 - RNA, 22 nt, Human
cagucccuaguggagcucacag

SEQ ID NO: 852045 - RNA, 18 nt, Human
cugaggcuuagagagguu

SEQ ID NO: 852046 - RNA, 22 nt, Human
gcagaggccaggccaccagcaa

SEQ ID NO: 852047 - RNA, 22 nt, Human
auuguuaugaaaauaagauguu

SEQ ID NO: 852048 - RNA, 22 nt, Human
guuugcauuuauuagucuucug

SEQ ID NO: 852049 - RNA, 22 nt, Human
gaucuucucuuuaguagaaaca

SEQ ID NO: 852050 - RNA, 20 nt, Human
ugacuucuucaugcuguacu

SEQ ID NO: 852051 - RNA, 22 nt, Human
uggcugagcucccuguguguug

SEQ ID NO: 852052 - RNA, 22 nt, Human
augauguuauuuucagaaacau

SEQ ID NO: 852053 - RNA, 22 nt, Human
cagcuccugaggacugcuggga

SEQ ID NO: 852054 - RNA, 22 nt, Human
ugcuugugagaguuuuuucaga

SEQ ID NO: 852055 - RNA, 22 nt, Human
agcuaagaacuugagcucugga

SEQ ID NO: 852056 - RNA, 23 nt, Human
ggagaggggugugggcaucuuua

SEQ ID NO: 852057 - RNA, 22 nt, Human
cagcuuuuuagaaucuagggca

SEQ ID NO: 852058 - RNA, 22 nt, Human
acccaggaggugacacagggcu

SEQ ID NO: 852059 - RNA, 22 nt, Human
caaggccauauugccuguaugu

SEQ ID NO: 852060 - RNA, 22 nt, Human
aucaggaugacaacugcugggu

SEQ ID NO: 852061 - RNA, 22 nt, Human
ccaggcuggaaucaauauucug

SEQ ID NO: 852062 - RNA, 22 nt, Human
cuggcacacaaguauuuccuuu

SEQ ID NO: 852063 - RNA, 23 nt, Human
uugaggucggcucucugagccug

SEQ ID NO: 852064 - RNA, 22 nt, Human
cccuggccccucacuccgaggc

SEQ ID NO: 852065 - RNA, 21 nt, Human
gcucagaguauugcacuguuu

SEQ ID NO: 852066 - RNA, 21 nt, Human
ggcugagauggcagaaucacc

SEQ ID NO: 852067 - RNA, 22 nt, Human
uuuaggaucucucuuguuacau

SEQ ID NO: 852068 - RNA, 22 nt, Human
caggcaggucagugaagaagga

SEQ ID NO: 852069 - RNA, 22 nt, Human
aaauuagucgguuuaggaauuu

SEQ ID NO: 852070 - RNA, 22 nt, Human
acagugagcccacuccaggaga

SEQ ID NO: 852071 - RNA, 22 nt, Human
aggcaggcucaaugcccagucu

SEQ ID NO: 852072 - RNA, 22 nt, Human
uaaggaaaauggacaucaaaca

SEQ ID NO: 852073 - RNA, 22 nt, Human
ucuccugguauguaugcaccug

SEQ ID NO: 852074 - RNA, 22 nt, Human
ggcagucacuuuugcuugugcc

SEQ ID NO: 852075 - RNA, 22 nt, Human
uauuuguugaguuguuaugucu

SEQ ID NO: 852076 - RNA, 22 nt, Human
gaacuguaguuaauacuacaca

SEQ ID NO: 852077 - RNA, 22 nt, Human
gcuccuggagagauugagaaag

SEQ ID NO: 852078 - RNA, 22 nt, Human
cagggcuggcuuccaaguuguu

SEQ ID NO: 852079 - RNA, 18 nt, Human
acugugugaauuagcucc

SEQ ID NO: 852080 - RNA, 22 nt, Human
caggcugauaggguccaaaguu

SEQ ID NO: 852081 - RNA, 22 nt, Human
cuuaaagaaauugaggagagga

SEQ ID NO: 852082 - RNA, 22 nt, Human
uuggcagcauccaagucucggg

SEQ ID NO: 852083 - RNA, 22 nt, Human
aaggccagccugagagcuaaca

SEQ ID NO: 852084 - RNA, 22 nt, Human
ccccaggagaaaucuuaaacua

SEQ ID NO: 852085 - RNA, 22 nt, Human
uggccaaaguagaaaauaauag

SEQ ID NO: 852086 - RNA, 18 nt, Human
ugaggcagucagugaugg

SEQ ID NO: 852087 - RNA, 22 nt, Human
agaggcggagguugcagugagc

SEQ ID NO: 852088 - RNA, 22 nt, Human
ucacuguugaccuggaaguggg

SEQ ID NO: 852089 - RNA, 22 nt, Human
guuuuaguggguggccacugau

SEQ ID NO: 852090 - RNA, 22 nt, Human
ugcuuuggaucuauuugcugag

SEQ ID NO: 852091 - RNA, 22 nt, Human
agguaaauucagcagugacauu

SEQ ID NO: 852092 - RNA, 22 nt, Human
ccacagugggcacagcaggacu

SEQ ID NO: 852093 - RNA, 19 nt, Human
ucaucucacagggccuggc

SEQ ID NO: 852094 - RNA, 21 nt, Human
auacacauacacauaaaugug

SEQ ID NO: 852095 - RNA, 22 nt, Human
auuuauuaugggauuuggcuca

SEQ ID NO: 852096 - RNA, 22 nt, Human
uccuggcccacuaugccagcau

SEQ ID NO: 852097 - RNA, 22 nt, Human
aggcagacugugcgggaagagu

SEQ ID NO: 852098 - RNA, 22 nt, Human
gcuggcugaguucugucgucug

SEQ ID NO: 852099 - RNA, 22 nt, Human
cugcugugggcaggguagcugg

SEQ ID NO: 852100 - RNA, 22 nt, Human
cuggccaagcacuggggucaaa

SEQ ID NO: 852101 - RNA, 22 nt, Human
gaggccagaagugccucgggcu

SEQ ID NO: 852102 - RNA, 22 nt, Human
uuuuaugugcuggacuggcagu

SEQ ID NO: 852103 - RNA, 22 nt, Human
gagccuggacaucucaggccca

SEQ ID NO: 852104 - RNA, 22 nt, Human
agcugaggaggaaugaugggua

SEQ ID NO: 852105 - RNA, 22 nt, Human
gcccaggaaagauagggccuca

SEQ ID NO: 852106 - RNA, 22 nt, Human
uggcagcuuccugcucauagga

SEQ ID NO: 852107 - RNA, 22 nt, Human
aggcaggcuggucugaagagug

SEQ ID NO: 852108 - RNA, 21 nt, Human
ucuugaaaauuguagcaguuu

SEQ ID NO: 852109 - RNA, 22 nt, Human
ugaggcuccuuguagagagugg

SEQ ID NO: 852110 - RNA, 22 nt, Human
aggccagcagcaugacggcauc

SEQ ID NO: 852111 - RNA, 22 nt, Human
cacaaaugguuguagacauuaa

SEQ ID NO: 852112 - RNA, 22 nt, Human
uaaugcuuaacagcuggcuuuu

SEQ ID NO: 852113 - RNA, 22 nt, Human
gccugccuuuguaugacccuga

SEQ ID NO: 852114 - RNA, 22 nt, Human
uuacuuugcuuucucauuacag

SEQ ID NO: 852115 - RNA, 22 nt, Human
aggcugagggcuccugagggca

SEQ ID NO: 852116 - RNA, 22 nt, Human
uuaaauuuuagaaacagacucu

SEQ ID NO: 852117 - RNA, 22 nt, Human
uggucuaaauauggcucuaaau

SEQ ID NO: 852118 - RNA, 22 nt, Human
uagcacugaaucacaugcugcu

SEQ ID NO: 852119 - RNA, 22 nt, Human
cuucugagcagaccuccugggg

SEQ ID NO: 852120 - RNA, 22 nt, Human
aggcugcugccuuggagagugu

SEQ ID NO: 852121 - RNA, 22 nt, Human
guuauuaguaagacucgcacau

SEQ ID NO: 852122 - RNA, 22 nt, Human
caggcagcugaggacuuugcua

SEQ ID NO: 852123 - RNA, 22 nt, Human
aaauuauuacaagcuaguuggc

SEQ ID NO: 852124 - RNA, 22 nt, Human
gcuccugggcucuaccuugcua

SEQ ID NO: 852125 - RNA, 22 nt, Human
ugccugggagugaccaagacuc

SEQ ID NO: 852126 - RNA, 21 nt, Human
ugaaugaggaggauggcauuu

SEQ ID NO: 852127 - RNA, 22 nt, Human
agagcagaggcauggccguggg

SEQ ID NO: 852128 - RNA, 22 nt, Human
uuagcaucugcuguaagcuuau

SEQ ID NO: 852129 - RNA, 22 nt, Human
aggaagcuuagugaaaggacca

SEQ ID NO: 852130 - RNA, 22 nt, Human
acugaaguccacacauguagga

SEQ ID NO: 852131 - RNA, 22 nt, Human
ccugagcugcggggcagugcuc

SEQ ID NO: 852132 - RNA, 22 nt, Human
cccaugagauucugaauuuggc

SEQ ID NO: 852133 - RNA, 22 nt, Human
uaacacauauuucaagaguagu

SEQ ID NO: 852134 - RNA, 22 nt, Human
cugcuucacccaacuuugggau

SEQ ID NO: 852135 - RNA, 22 nt, Human
caaggccaguucaccaagggca

SEQ ID NO: 852136 - RNA, 22 nt, Human
acaacauucuuaaauacacuga

SEQ ID NO: 852137 - RNA, 23 nt, Human
auuugagaaaguauuuuuaagac

SEQ ID NO: 852138 - RNA, 22 nt, Human
uaggaggguuagagggaaauau

SEQ ID NO: 852139 - RNA, 22 nt, Human
caauacacuaaacuucucugaa

SEQ ID NO: 852140 - RNA, 22 nt, Human
aagacugugucuauggcuacuc

SEQ ID NO: 852141 - RNA, 22 nt, Human
cccuggagugugacgaggcauu

SEQ ID NO: 852142 - RNA, 22 nt, Human
gaggucagucagaccaggguuu

SEQ ID NO: 852143 - RNA, 22 nt, Human
ucugaggucauuccaaggacau

SEQ ID NO: 852144 - RNA, 22 nt, Human
aaaacuaaauacgcuuugccuc

SEQ ID NO: 852145 - RNA, 22 nt, Human
accuuguuaaaaugaggauucu

SEQ ID NO: 852146 - RNA, 22 nt, Human
agcugcccagauaggaggaggc

SEQ ID NO: 852147 - RNA, 22 nt, Human
uuucaguuuuugcucgauguau

SEQ ID NO: 852148 - RNA, 23 nt, Human
cuggcucauccugguugcagugg

SEQ ID NO: 852149 - RNA, 22 nt, Human
cuccuggcacugucuugaccca

SEQ ID NO: 852150 - RNA, 22 nt, Human
acuuuacuacauccacagaugg

SEQ ID NO: 852151 - RNA, 22 nt, Human
gaucauuuacuuguucuggacu

SEQ ID NO: 852152 - RNA, 22 nt, Human
uuuauguaguuacggacuauca

SEQ ID NO: 852153 - RNA, 22 nt, Human
uaaauacugaguuggaguuggc

SEQ ID NO: 852154 - RNA, 22 nt, Human
ggaggaggggcgcuuugucuau

SEQ ID NO: 852155 - RNA, 22 nt, Human
agaaaauauucauugagaggcu

SEQ ID NO: 852156 - RNA, 18 nt, Human
gcuccuggagucugacuc

SEQ ID NO: 852157 - RNA, 22 nt, Human
uaguccagccuuggguguagcc

SEQ ID NO: 852158 - RNA, 22 nt, Human
cacauuuaauccuuuauaagua

SEQ ID NO: 852159 - RNA, 22 nt, Human
cccagggauguggcagauguua

SEQ ID NO: 852160 - RNA, 22 nt, Human
auugcuguacacuucuagaucu

SEQ ID NO: 852161 - RNA, 22 nt, Human
gaaauauuucucuugagccccu

SEQ ID NO: 852162 - RNA, 22 nt, Human
uaggagggcccugaaaauggca

SEQ ID NO: 852163 - RNA, 22 nt, Human
gggcagcugccacuccgcuugc

SEQ ID NO: 852164 - RNA, 20 nt, Human
aggaagcugagauguagagg

SEQ ID NO: 852165 - RNA, 22 nt, Human
ccacagugguuguggcaugugg

SEQ ID NO: 852166 - RNA, 22 nt, Human
ccauccuaucugaccuacuugu

SEQ ID NO: 852167 - RNA, 22 nt, Human
gcugagcugggacaguccuggg

SEQ ID NO: 852168 - RNA, 22 nt, Human
cucuucuugcuagacugagugc

SEQ ID NO: 852169 - RNA, 21 nt, Human
uccuuccuugagguccuuucc

SEQ ID NO: 852170 - RNA, 22 nt, Human
ccaugagcuuccuauauagggu

SEQ ID NO: 852171 - RNA, 22 nt, Human
ugcccuggcacacacacagcug

SEQ ID NO: 852172 - RNA, 22 nt, Human
caggauggagggagggcuguua

SEQ ID NO: 852173 - RNA, 22 nt, Human
uaugaacuuuugaugugacaug

SEQ ID NO: 852174 - RNA, 22 nt, Human
uuggccaaauaaucuugcagau

SEQ ID NO: 852175 - RNA, 22 nt, Human
ugcuguguggaugugaagaauc

SEQ ID NO: 852176 - RNA, 22 nt, Human
aaauguuuugcucccauguggu

SEQ ID NO: 852177 - RNA, 22 nt, Human
acccaggaggcaagguugcagu

SEQ ID NO: 852178 - RNA, 21 nt, Human
agacaguaacucuucuacucc

SEQ ID NO: 852179 - RNA, 22 nt, Human
agugcuggcccauagcugcugg

SEQ ID NO: 852180 - RNA, 22 nt, Human
cauaaagucucauaauucacuu

SEQ ID NO: 852181 - RNA, 22 nt, Human
gagggaauggugugcaagaggu

SEQ ID NO: 852182 - RNA, 22 nt, Human
uuuccaaauaaggucacacuca

SEQ ID NO: 852183 - RNA, 22 nt, Human
cagcugagaagugauagcugca

SEQ ID NO: 852184 - RNA, 22 nt, Human
ucauuuguugcuguuaccugag

SEQ ID NO: 852185 - RNA, 22 nt, Human
acauuuaaccuuugaggaacug

SEQ ID NO: 852186 - RNA, 23 nt, Human
aucauucuccaaucuggagcagg

SEQ ID NO: 852187 - RNA, 22 nt, Human
ggucugagagccacugaauccc

SEQ ID NO: 852188 - RNA, 22 nt, Human
aagggcugggucugguuaaccc

SEQ ID NO: 852189 - RNA, 22 nt, Human
ugccugucuuggaguccuggcc

SEQ ID NO: 852190 - RNA, 22 nt, Human
aguuaucaucccuuacacuuug

SEQ ID NO: 852191 - RNA, 22 nt, Human
ucacaguuauagucuguagaau

SEQ ID NO: 852192 - RNA, 22 nt, Human
acaguacauaauccugagucug

SEQ ID NO: 852193 - RNA, 22 nt, Human
uccugccuguuuaccuguacuu

SEQ ID NO: 852194 - RNA, 22 nt, Human
ugcccuggggucuggagcagca

SEQ ID NO: 852195 - RNA, 22 nt, Human
aggcugaguuucucauucucgc

SEQ ID NO: 852196 - RNA, 22 nt, Human
caagaugaaauugugauauuuu

SEQ ID NO: 852197 - RNA, 23 nt, Human
acacauuuuucccguucugaggu

SEQ ID NO: 852198 - RNA, 22 nt, Human
agaccaagugcaggugccacua

SEQ ID NO: 852199 - RNA, 22 nt, Human
cuucuucagcacaauauugaug

SEQ ID NO: 852200 - RNA, 22 nt, Human
uugcuuuguggugguucuucca

SEQ ID NO: 852201 - RNA, 22 nt, Human
aauauaauuuuauuccuagagu

SEQ ID NO: 852202 - RNA, 22 nt, Human
aggcugaaaacgagauggcaau

SEQ ID NO: 852203 - RNA, 23 nt, Human
auguauuuaaauuucagugauga

SEQ ID NO: 852204 - RNA, 22 nt, Human
ccaggacaaguguggccauggc

SEQ ID NO: 852205 - RNA, 22 nt, Human
uaacaaacuggaaauugacauu

SEQ ID NO: 852206 - RNA, 22 nt, Human
uagcagaggcugucugacuuaa

SEQ ID NO: 852207 - RNA, 22 nt, Human
cagggcugaaaucaagguguag

SEQ ID NO: 852208 - RNA, 22 nt, Human
gagcugagaagcagcgcuugau

SEQ ID NO: 852209 - RNA, 22 nt, Human
ugcauguguuugccacagugag

SEQ ID NO: 852210 - RNA, 18 nt, Human
gucacuguguuucugagc

SEQ ID NO: 852211 - RNA, 22 nt, Human
caacugguggucaaccuucugu

SEQ ID NO: 852212 - RNA, 22 nt, Human
gacacuuuggugcuuugugguu

SEQ ID NO: 852213 - RNA, 22 nt, Human
cuggccuaaaauugcuucugca

SEQ ID NO: 852214 - RNA, 22 nt, Human
ggcagccuugacuagugacuua

SEQ ID NO: 852215 - RNA, 22 nt, Human
uggcagcugugcuucauucuuu

SEQ ID NO: 852216 - RNA, 22 nt, Human
gagcagcucugggugacccagu

SEQ ID NO: 852217 - RNA, 22 nt, Human
aaggcugagacagcacaggucc

SEQ ID NO: 852218 - RNA, 22 nt, Human
cccacagggcugcugauggcag

SEQ ID NO: 852219 - RNA, 22 nt, Human
uuagguaaguaggaucaaaaaa

SEQ ID NO: 852220 - RNA, 18 nt, Human
aagaggaggaaacccagg

SEQ ID NO: 852221 - RNA, 22 nt, Human
uuuaaaauuuagaccucuccac

SEQ ID NO: 852222 - RNA, 22 nt, Human
acuggccaugaacuugggaucu

SEQ ID NO: 852223 - RNA, 22 nt, Human
uacaaaaaauugauacugacga

SEQ ID NO: 852224 - RNA, 22 nt, Human
uuucaaaguugggaauuguaau

SEQ ID NO: 852225 - RNA, 19 nt, Human
gacagugcaguuguaguac

SEQ ID NO: 852226 - RNA, 22 nt, Human
caaggcugugcaggguccauau

SEQ ID NO: 852227 - RNA, 22 nt, Human
uccugccuagcaggugaccuau

SEQ ID NO: 852228 - RNA, 22 nt, Human
guggccaauuuccaucuguaag

SEQ ID NO: 852229 - RNA, 18 nt, Human
uuaaggauaagcagacua

SEQ ID NO: 852230 - RNA, 22 nt, Human
agcgagggaggucugaggacag

SEQ ID NO: 852231 - RNA, 22 nt, Human
uagaaaugugauaauagcuuaa

SEQ ID NO: 852232 - RNA, 22 nt, Human
agagcagcugugacauggacag

SEQ ID NO: 852233 - RNA, 22 nt, Human
ucaggcugcaucuguaagggug

SEQ ID NO: 852234 - RNA, 22 nt, Human
auagaaaacagauguccuuaaa

SEQ ID NO: 852235 - RNA, 19 nt, Human
agucuggaguaaaaggaau

SEQ ID NO: 852236 - RNA, 22 nt, Human
ucugugcucauucagucauuca

SEQ ID NO: 852237 - RNA, 22 nt, Human
acaggcugcccgcuccccaccu

SEQ ID NO: 852238 - RNA, 19 nt, Human
gaggcgaggcgugcaggag

SEQ ID NO: 852239 - RNA, 22 nt, Human
gaauacauuggaaaucagaaua

SEQ ID NO: 852240 - RNA, 22 nt, Human
cugggccaagaaguuguguaug

SEQ ID NO: 852241 - RNA, 22 nt, Human
uuuuauagcugaauaguauucc

SEQ ID NO: 852242 - RNA, 22 nt, Human
gaggacagagccgccuggcaag

SEQ ID NO: 852243 - RNA, 22 nt, Human
ggaggcagaauagagugugggu

SEQ ID NO: 852244 - RNA, 22 nt, Human
caggagagcccggguccgggcu

SEQ ID NO: 852245 - RNA, 22 nt, Human
gaccauuuuuacagagcauuca

SEQ ID NO: 852246 - RNA, 22 nt, Human
ucucacugcaaauauuauguau

SEQ ID NO: 852247 - RNA, 22 nt, Human
gaggccuggagccgccuaggcg

SEQ ID NO: 852248 - RNA, 22 nt, Human
acuggccaggcacagcuguggg

SEQ ID NO: 852249 - RNA, 22 nt, Human
ggcaucuccaaaacaugaacuc

SEQ ID NO: 852250 - RNA, 22 nt, Human
uggccaggcagguagaacggcc

SEQ ID NO: 852251 - RNA, 22 nt, Human
gaggaaccacucugagaagcca

SEQ ID NO: 852252 - RNA, 22 nt, Human
guagccauuggcaaugaagccu

SEQ ID NO: 852253 - RNA, 22 nt, Human
uucuggaacauagcaagaaguu

SEQ ID NO: 852254 - RNA, 22 nt, Human
gcuggaaaucaaagaaguggau

SEQ ID NO: 852255 - RNA, 22 nt, Human
ucuccugguacccuuccuagca

SEQ ID NO: 852256 - RNA, 22 nt, Human
aggccaaagcucaccugcagcu

SEQ ID NO: 852257 - RNA, 22 nt, Human
gcacagaacagagaaauagcca

SEQ ID NO: 852258 - RNA, 22 nt, Human
uggcugaguuacgaacagagca

SEQ ID NO: 852259 - RNA, 22 nt, Human
ccuggcugguugucugauucua

SEQ ID NO: 852260 - RNA, 22 nt, Human
uggcugagaaguucugguggga

SEQ ID NO: 852261 - RNA, 22 nt, Human
agaaaugaagagagucaagguu

SEQ ID NO: 852262 - RNA, 22 nt, Human
ucuuuguaaaugccuagcauaa

SEQ ID NO: 852263 - RNA, 22 nt, Human
cugcuucuaagaaccugcagcu

SEQ ID NO: 852264 - RNA, 22 nt, Human
gcagcugcaauaggcaucaagc

SEQ ID NO: 852265 - RNA, 22 nt, Human
auucuucauaccuacugagguu

SEQ ID NO: 852266 - RNA, 22 nt, Human
guucuucagauuccauuucagu

SEQ ID NO: 852267 - RNA, 22 nt, Human
uauuaggguaaauuugacaugc

SEQ ID NO: 852268 - RNA, 22 nt, Human
ugaggcccggguggaggaaugc

SEQ ID NO: 852269 - RNA, 22 nt, Human
uagcuuuccuuguugccugugc

SEQ ID NO: 852270 - RNA, 22 nt, Human
uauuuccaccuauuauuuucug

SEQ ID NO: 852271 - RNA, 22 nt, Human
caggaaagggaugggcugccac

SEQ ID NO: 852272 - RNA, 17 nt, Human
uuuaaacuacuacaagg

SEQ ID NO: 852273 - RNA, 22 nt, Human
guauuaggaggaacacaggccu

SEQ ID NO: 852274 - RNA, 22 nt, Human
aaaaaagauugaugguggaugc

SEQ ID NO: 852275 - RNA, 22 nt, Human
uuuaugagcaccuuggcccaga

SEQ ID NO: 852276 - RNA, 22 nt, Human
uagggaugacgaaaggacagag

SEQ ID NO: 852277 - RNA, 22 nt, Human
agacagagauacuauguuguca

SEQ ID NO: 852278 - RNA, 22 nt, Human
auuaggauuuuguccaaguagc

SEQ ID NO: 852279 - RNA, 22 nt, Human
agugcuggauuacaggcgugag

SEQ ID NO: 852280 - RNA, 22 nt, Human
ccucuucuagguuucagccugc

SEQ ID NO: 852281 - RNA, 22 nt, Human
agaggacaaaaugagaagugcu

SEQ ID NO: 852282 - RNA, 22 nt, Human
aacacuuucuuccuugcucagg

SEQ ID NO: 852283 - RNA, 22 nt, Human
cucacuguccaacaggcuuuac

SEQ ID NO: 852284 - RNA, 22 nt, Human
ucugaggucuaugacuuugcuu

SEQ ID NO: 852285 - RNA, 22 nt, Human
acuuaaaaagaaucuuuucacg

SEQ ID NO: 852286 - RNA, 20 nt, Human
ugaggcaggagaauggcaug

SEQ ID NO: 852287 - RNA, 22 nt, Human
cuccaggagggggauggcugua

SEQ ID NO: 852288 - RNA, 22 nt, Human
caaauacugaguuuauuuucaa

SEQ ID NO: 852289 - RNA, 22 nt, Human
cuggagucuucagcuugcugcc

SEQ ID NO: 852290 - RNA, 22 nt, Human
gaggagagaacauuccuccaua

SEQ ID NO: 852291 - RNA, 22 nt, Human
caggagggcccgagacucuucc

SEQ ID NO: 852292 - RNA, 22 nt, Human
uggguccauggaacagaggugc

SEQ ID NO: 852293 - RNA, 22 nt, Human
uuucuauucuggaucuguggca

SEQ ID NO: 852294 - RNA, 22 nt, Human
aggcugagauagguggaucauu

SEQ ID NO: 852295 - RNA, 22 nt, Human
uuuccucacuucaugagaguuu

SEQ ID NO: 852296 - RNA, 22 nt, Human
cuuaacauccugcauuuuucuu

SEQ ID NO: 852297 - RNA, 17 nt, Human
cagacaggcugucaccc

SEQ ID NO: 852298 - RNA, 22 nt, Human
caaaugaauuucccugcaaaug

SEQ ID NO: 852299 - RNA, 22 nt, Human
ucaaugacugguccaagguggc

SEQ ID NO: 852300 - RNA, 22 nt, Human
uuuaucuuuaggacuuugcaga

SEQ ID NO: 852301 - RNA, 22 nt, Human
aagugcugagacuacaggcaug

SEQ ID NO: 852302 - RNA, 22 nt, Human
agauggcagggguaccuggaag

SEQ ID NO: 852303 - RNA, 22 nt, Human
gagcaagaguguuggacuuuga

SEQ ID NO: 852304 - RNA, 22 nt, Human
uuugacaugcaaagcacuuuag

SEQ ID NO: 852305 - RNA, 22 nt, Human
aggcugagucgggaggaucacu

SEQ ID NO: 852306 - RNA, 22 nt, Human
gaggcagugucgguggcaggau

SEQ ID NO: 852307 - RNA, 22 nt, Human
acuccugguuuguguccuggcu

SEQ ID NO: 852308 - RNA, 22 nt, Human
agagccaguuguuaagcacuua

SEQ ID NO: 852309 - RNA, 22 nt, Human
uuauuucauugauuucuaagac

SEQ ID NO: 852310 - RNA, 22 nt, Human
aaauauaauuucugccucaaua

SEQ ID NO: 852311 - RNA, 22 nt, Human
acaggcugacuuccugccaugu

SEQ ID NO: 852312 - RNA, 22 nt, Human
auuuggcaaauaauuugagggu

SEQ ID NO: 852313 - RNA, 22 nt, Human
gugaggucaccggccguugcca

SEQ ID NO: 852314 - RNA, 22 nt, Human
acagaaauugggcaaauggaag

SEQ ID NO: 852315 - RNA, 22 nt, Human
aagcuggagaguuaggugaaua

SEQ ID NO: 852316 - RNA, 22 nt, Human
aagcagaggaccgacggaggga

SEQ ID NO: 852317 - RNA, 22 nt, Human
gcagcugcagacccucagugcu

SEQ ID NO: 852318 - RNA, 22 nt, Human
aaaaugaauaaguuaacccagg

SEQ ID NO: 852319 - RNA, 22 nt, Human
aacucacuuuguggcuucugaa

SEQ ID NO: 852320 - RNA, 22 nt, Human
uaggcuggaacuuaggcagagg

SEQ ID NO: 852321 - RNA, 22 nt, Human
uuggccaauuccagaggaucau

SEQ ID NO: 852322 - RNA, 22 nt, Human
agucacuguucugucaugucaa

SEQ ID NO: 852323 - RNA, 22 nt, Human
cucaacagcucugccauacucc

SEQ ID NO: 852324 - RNA, 22 nt, Human
cccaggaaaugggcucuugccu

SEQ ID NO: 852325 - RNA, 22 nt, Human
cauuaaaauaucucaugguguu

SEQ ID NO: 852326 - RNA, 17 nt, Human
agacagugagugccuug

SEQ ID NO: 852327 - RNA, 22 nt, Human
aucaggauagucuguaaauugu

SEQ ID NO: 852328 - RNA, 18 nt, Human
ugaacuggcaucagaauc

SEQ ID NO: 852329 - RNA, 22 nt, Human
uaacauuagguagacauaagcc

SEQ ID NO: 852330 - RNA, 22 nt, Human
uucuguuagaauuuugaaaaua

SEQ ID NO: 852331 - RNA, 22 nt, Human
gauagauaaaacuauauuuuca

SEQ ID NO: 852332 - RNA, 22 nt, Human
gcuguguuuuauguuagguuaa

SEQ ID NO: 852333 - RNA, 22 nt, Human
cuuacagagaagaaaauguagu

SEQ ID NO: 852334 - RNA, 22 nt, Human
aggcagcauccagaggagaaug

SEQ ID NO: 852335 - RNA, 19 nt, Human
uggcugagcuggacugagg

SEQ ID NO: 852336 - RNA, 22 nt, Human
gaauuaacuggcaguuagugcu

SEQ ID NO: 852337 - RNA, 23 nt, Human
cuaggcaggauuguaggcgggua

SEQ ID NO: 852338 - RNA, 22 nt, Human
cuguauuuguccucuauuuauu

SEQ ID NO: 852339 - RNA, 20 nt, Human
agaggaggauuauuuuauuc

SEQ ID NO: 852340 - RNA, 22 nt, Human
ccauggcuuacagauggagcau

SEQ ID NO: 852341 - RNA, 22 nt, Human
cguggccagccauuuccuggaa

SEQ ID NO: 852342 - RNA, 22 nt, Human
guggccaacucaauguuuuuca

SEQ ID NO: 852343 - RNA, 22 nt, Human
aggagggacaccaauauauguu

SEQ ID NO: 852344 - RNA, 21 nt, Human
ccuggcugcacaguugcuggu

SEQ ID NO: 852345 - RNA, 22 nt, Human
gcaccugauugauuucacugcu

SEQ ID NO: 852346 - RNA, 22 nt, Human
uggagccagagcgcagccuggg

SEQ ID NO: 852347 - RNA, 22 nt, Human
ggcugcuguuucagagacuguu

SEQ ID NO: 852348 - RNA, 23 nt, Human
caguuggagguacagagacacug

SEQ ID NO: 852349 - RNA, 22 nt, Human
cauugcuguuaauugucucuag

SEQ ID NO: 852350 - RNA, 22 nt, Human
cagccuuugggucagaagauuc

SEQ ID NO: 852351 - RNA, 20 nt, Human
gcagcuacucugucucgcuc

SEQ ID NO: 852352 - RNA, 22 nt, Human
aaagcagaggugauaugacuua

SEQ ID NO: 852353 - RNA, 22 nt, Human
cuugcugggguaagucugugcu

SEQ ID NO: 852354 - RNA, 18 nt, Human
ccuggagcuccacagcaa

SEQ ID NO: 852355 - RNA, 22 nt, Human
gggcugagcuguucugaguuua

SEQ ID NO: 852356 - RNA, 22 nt, Human
gggcugaguuccugccucacuc

SEQ ID NO: 852357 - RNA, 22 nt, Human
uaacugguccugaacagcccag

SEQ ID NO: 852358 - RNA, 22 nt, Human
gggaagcaggugcagcucgccu

SEQ ID NO: 852359 - RNA, 22 nt, Human
uuugaaugcaggacauacagaa

SEQ ID NO: 852360 - RNA, 22 nt, Human
gcugccuguugaagggucugug

SEQ ID NO: 852361 - RNA, 22 nt, Human
acucagaaccauuuacucugag

SEQ ID NO: 852362 - RNA, 22 nt, Human
cugcuguccaggagugcccugu

SEQ ID NO: 852363 - RNA, 22 nt, Human
cugccugcguugccucgugccu

SEQ ID NO: 852364 - RNA, 22 nt, Human
ugaggggauacgguacacauug

SEQ ID NO: 852365 - RNA, 22 nt, Human
uuuauuuggcauccagggagaa

SEQ ID NO: 852366 - RNA, 22 nt, Human
gauggacagccuggaaggaaag

SEQ ID NO: 852367 - RNA, 20 nt, Human
ucuggcaggugaacgagcug

SEQ ID NO: 852368 - RNA, 22 nt, Human
uccaaauauacagaaucuccuc

SEQ ID NO: 852369 - RNA, 22 nt, Human
acagagcuguacuacuuacuga

SEQ ID NO: 852370 - RNA, 18 nt, Human
gaaaggagagacaguagg

SEQ ID NO: 852371 - RNA, 20 nt, Human
cuucuucauuaacccuacug

SEQ ID NO: 852372 - RNA, 22 nt, Human
aaugaauugcaguacugacuug

SEQ ID NO: 852373 - RNA, 19 nt, Human
uggagacugagagugagca

SEQ ID NO: 852374 - RNA, 22 nt, Human
agaggcugcacuugcucaugau

SEQ ID NO: 852375 - RNA, 22 nt, Human
uuuuaaaucuccaguugacccc

SEQ ID NO: 852376 - RNA, 22 nt, Human
ggaagagggaaccacgacugua

SEQ ID NO: 852377 - RNA, 22 nt, Human
cgaggcaggcaggcggaggaua

SEQ ID NO: 852378 - RNA, 22 nt, Human
aaguagugugcuccagcgguga

SEQ ID NO: 852379 - RNA, 22 nt, Human
aggcagcugaccacaguaugau

SEQ ID NO: 852380 - RNA, 22 nt, Human
uggcagcagggccccuggagga

SEQ ID NO: 852381 - RNA, 22 nt, Human
cccuggaggcuggaggcaguag

SEQ ID NO: 852382 - RNA, 17 nt, Human
uuugguaauauauuaag

SEQ ID NO: 852383 - RNA, 22 nt, Human
uccaggagauucauuaggucau

SEQ ID NO: 852384 - RNA, 22 nt, Human
aacuguaauuuuuacauaguaa

SEQ ID NO: 852385 - RNA, 22 nt, Human
ugcauguggaccccuggugccu

SEQ ID NO: 852386 - RNA, 22 nt, Human
uucuuauagaagcaaccauugu

SEQ ID NO: 852387 - RNA, 22 nt, Human
ucacaaauagcuauauuaagga

SEQ ID NO: 852388 - RNA, 22 nt, Human
ggcaggcugggugucauggagu

SEQ ID NO: 852389 - RNA, 22 nt, Human
ucuauaaagggccagauaguag

SEQ ID NO: 852390 - RNA, 22 nt, Human
cuucuucaaccugaaaguuuca

SEQ ID NO: 852391 - RNA, 21 nt, Human
aaaggccauaaucacggagca

SEQ ID NO: 852392 - RNA, 22 nt, Human
gccaggaggcugcuguguaggc

SEQ ID NO: 852393 - RNA, 20 nt, Human
uauuaggaaggaggaaggaa

SEQ ID NO: 852394 - RNA, 22 nt, Human
ggcagaagauaggacagggaau

SEQ ID NO: 852395 - RNA, 22 nt, Human
auguuagugauaguaaauagug

SEQ ID NO: 852396 - RNA, 22 nt, Human
cuguguuugaugagaagccacc

SEQ ID NO: 852397 - RNA, 22 nt, Human
uucacagauguauuggaacucc

SEQ ID NO: 852398 - RNA, 22 nt, Human
caggcagcucgaugccuuguug

SEQ ID NO: 852399 - RNA, 22 nt, Human
ugcugccuccuuccugccagga

SEQ ID NO: 852400 - RNA, 22 nt, Human
uugaggucauauauauuuggca

SEQ ID NO: 852401 - RNA, 22 nt, Human
gcccaggaguuugcauuuuaac

SEQ ID NO: 852402 - RNA, 22 nt, Human
gggcagcucuuugguauccuuc

SEQ ID NO: 852403 - RNA, 22 nt, Human
gggcagcuagcccucuagccca

SEQ ID NO: 852404 - RNA, 22 nt, Human
uaucuguuaggaucagagcugg

SEQ ID NO: 852405 - RNA, 22 nt, Human
ugcuucagcacuuugagagccu

SEQ ID NO: 852406 - RNA, 22 nt, Human
agaaaaguuuucugagacugac

SEQ ID NO: 852407 - RNA, 22 nt, Human
aggcuccauuuuccugcagcug

SEQ ID NO: 852408 - RNA, 22 nt, Human
guguguuuagcauuagcagggg

SEQ ID NO: 852409 - RNA, 22 nt, Human
cucacugugaccucagcagaca

SEQ ID NO: 852410 - RNA, 22 nt, Human
ccugaggucagcgguucccaca

SEQ ID NO: 852411 - RNA, 22 nt, Human
ucauuucaaugauacuacuaag

SEQ ID NO: 852412 - RNA, 22 nt, Human
aacuuucuuggaugucucaaca

SEQ ID NO: 852413 - RNA, 18 nt, Human
caugucugcgccacaagg

SEQ ID NO: 852414 - RNA, 22 nt, Human
ggcugagaguggaucccaggga

SEQ ID NO: 852415 - RNA, 22 nt, Human
ugaggcaggagguugagaacug

SEQ ID NO: 852416 - RNA, 22 nt, Human
cuuuccaaugcauuuccaaugu

SEQ ID NO: 852417 - RNA, 22 nt, Human
ugaaaugauaucugauaacaaa

SEQ ID NO: 852418 - RNA, 22 nt, Human
guggcagcaaaugccuggacua

SEQ ID NO: 852419 - RNA, 22 nt, Human
uuucaggguacauggagcaaau

SEQ ID NO: 852420 - RNA, 22 nt, Human
cuaccuuucugacucuugggau

SEQ ID NO: 852421 - RNA, 22 nt, Human
augauugguggucagcaguaug

SEQ ID NO: 852422 - RNA, 21 nt, Human
uuucacaaaaguaugugacaa

SEQ ID NO: 852423 - RNA, 22 nt, Human
cagaaggcuuuguggaguagac

SEQ ID NO: 852424 - RNA, 22 nt, Human
gugggagcuuuggcaucaggcu

SEQ ID NO: 852425 - RNA, 22 nt, Human
uuaaaguauagaggacaaaaac

SEQ ID NO: 852426 - RNA, 22 nt, Human
uuaauuuuaaccuguuuguguc

SEQ ID NO: 852427 - RNA, 19 nt, Human
caggaaggggcgaaucugg

SEQ ID NO: 852428 - RNA, 22 nt, Human
auggcuucugucuuggaaacuu

SEQ ID NO: 852429 - RNA, 22 nt, Human
uggcucaagugauccuccugcc

SEQ ID NO: 852430 - RNA, 22 nt, Human
guguacagugauuugaguucac

SEQ ID NO: 852431 - RNA, 22 nt, Human
uuauuccaguaaucucuguaau

SEQ ID NO: 852432 - RNA, 22 nt, Human
cacuuucuguguugugcaaaaa

SEQ ID NO: 852433 - RNA, 22 nt, Human
gccaggagacuccauucauuug

SEQ ID NO: 852434 - RNA, 22 nt, Human
uuccaucuuucagcuuuguugg

SEQ ID NO: 852435 - RNA, 23 nt, Human
uucuuucaagaaguucacagugc

SEQ ID NO: 852436 - RNA, 22 nt, Human
auacuaaaguauagaacuuagu

SEQ ID NO: 852437 - RNA, 22 nt, Human
aaggccagcuuguagggcuggu

SEQ ID NO: 852438 - RNA, 22 nt, Human
acucauuuaaacauuuacugaa

SEQ ID NO: 852439 - RNA, 22 nt, Human
cccugccuuguuggagccuaug

SEQ ID NO: 852440 - RNA, 22 nt, Human
cuuugcaaacugucacacuuuc

SEQ ID NO: 852441 - RNA, 22 nt, Human
cugcugugcagacagacucucu

SEQ ID NO: 852442 - RNA, 22 nt, Human
gccugccuguuggcugaggugc

SEQ ID NO: 852443 - RNA, 22 nt, Human
gaggcacuggaggaaaggagaa

SEQ ID NO: 852444 - RNA, 22 nt, Human
aggagagaauguuccaggcuug

SEQ ID NO: 852445 - RNA, 22 nt, Human
cacagcaaagacacucucaacu

SEQ ID NO: 852446 - RNA, 22 nt, Human
ggaggugggauuaggaccuaaa

SEQ ID NO: 852447 - RNA, 22 nt, Human
ccucugcucugguccaugugcu

SEQ ID NO: 852448 - RNA, 20 nt, Human
auggccaaccugcuuaugac

SEQ ID NO: 852449 - RNA, 22 nt, Human
cccugccuacaggguuuucuuu

SEQ ID NO: 852450 - RNA, 22 nt, Human
gcucaggacccaggugugaccu

SEQ ID NO: 852451 - RNA, 22 nt, Human
aaggcugaauucaaggguaggc

SEQ ID NO: 852452 - RNA, 22 nt, Human
agguaggcccugagugcuguug

SEQ ID NO: 852453 - RNA, 22 nt, Human
cagucuucuaaccuagcagccu

SEQ ID NO: 852454 - RNA, 22 nt, Human
ccugaggucaugcauuuccaac

SEQ ID NO: 852455 - RNA, 22 nt, Human
ccaggagagcaaaggucacucu

SEQ ID NO: 852456 - RNA, 22 nt, Human
aacuuucuauagguugggauuu

SEQ ID NO: 852457 - RNA, 22 nt, Human
agucucagaaaagaagcaugga

SEQ ID NO: 852458 - RNA, 22 nt, Human
uucuccucuguuggccuucccu

SEQ ID NO: 852459 - RNA, 22 nt, Human
ccugagguuuuuggauaguugu

SEQ ID NO: 852460 - RNA, 22 nt, Human
ucuuggcugcugccaauuuacu

SEQ ID NO: 852461 - RNA, 22 nt, Human
gaaggccaagaggcuccaagau

SEQ ID NO: 852462 - RNA, 22 nt, Human
uuggcuucuugugaaaucugag

SEQ ID NO: 852463 - RNA, 22 nt, Human
agggagcugagcugugagcagc

SEQ ID NO: 852464 - RNA, 22 nt, Human
caguuuuugccauuaagaguaa

SEQ ID NO: 852465 - RNA, 21 nt, Human
gaacauuuggguuguuucuac

SEQ ID NO: 852466 - RNA, 22 nt, Human
aggagggagcuuaagccaggca

SEQ ID NO: 852467 - RNA, 22 nt, Human
aagaagagaacuggcauccuaa

SEQ ID NO: 852468 - RNA, 23 nt, Human
ugcugaaguguuggcccugccca

SEQ ID NO: 852469 - RNA, 22 nt, Human
caacaauaugccagacucaauu

SEQ ID NO: 852470 - RNA, 22 nt, Human
ccaggagaauaauggcagauua

SEQ ID NO: 852471 - RNA, 22 nt, Human
uagaaagacagagguuuugucu

SEQ ID NO: 852472 - RNA, 22 nt, Human
gcagcucccagcuugaaagguc

SEQ ID NO: 852473 - RNA, 22 nt, Human
uuugaaaggaaguuaauacuuu

SEQ ID NO: 852474 - RNA, 22 nt, Human
ucuucccuaaucaccaucuuca

SEQ ID NO: 852475 - RNA, 22 nt, Human
ugccuugcacauaauauacauu

SEQ ID NO: 852476 - RNA, 22 nt, Human
gaaaggugccccauaggcagga

SEQ ID NO: 852477 - RNA, 22 nt, Human
uuuaaauucugucugccgcuua

SEQ ID NO: 852478 - RNA, 22 nt, Human
ugcugaggaaagaggauaaaag

SEQ ID NO: 852479 - RNA, 19 nt, Human
cugcucuccuugacuugga

SEQ ID NO: 852480 - RNA, 22 nt, Human
ccccaggaagccucagauuugc

SEQ ID NO: 852481 - RNA, 22 nt, Human
gcuggccauauauuuugcuguu

SEQ ID NO: 852482 - RNA, 22 nt, Human
aaggcagcagaggaaaggugcu

SEQ ID NO: 852483 - RNA, 22 nt, Human
ugaaaugagauaauuuaagugc

SEQ ID NO: 852484 - RNA, 22 nt, Human
aaggcaguuugggccaccaucu

SEQ ID NO: 852485 - RNA, 22 nt, Human
gaggcugcccaacuggagugga

SEQ ID NO: 852486 - RNA, 22 nt, Human
ugacccugagagcugaauggcu

SEQ ID NO: 852487 - RNA, 22 nt, Human
caaaugaauauuuccauggguu

SEQ ID NO: 852488 - RNA, 22 nt, Human
gcugugcuugggaagaaucucu

SEQ ID NO: 852489 - RNA, 22 nt, Human
acugguguugauuuggaagggg

SEQ ID NO: 852490 - RNA, 23 nt, Human
gaggcagcuccugcagugcccug

SEQ ID NO: 852491 - RNA, 21 nt, Human
agucugagguggggccuagga

SEQ ID NO: 852492 - RNA, 22 nt, Human
agaaaguuguuuuagccaaacc

SEQ ID NO: 852493 - RNA, 22 nt, Human
auacaacuuuaucuguaaugag

SEQ ID NO: 852494 - RNA, 22 nt, Human
ggagaggacauggcucccacag

SEQ ID NO: 852495 - RNA, 22 nt, Human
caaaugaauagggagugugaug

SEQ ID NO: 852496 - RNA, 21 nt, Human
uuugaaagugggugauucuuu

SEQ ID NO: 852497 - RNA, 22 nt, Human
aggccagcccugggcugagaga

SEQ ID NO: 852498 - RNA, 22 nt, Human
augaguucccaggugauuugug

SEQ ID NO: 852499 - RNA, 22 nt, Human
uuucaguuguccuguuaauagc

SEQ ID NO: 852500 - RNA, 22 nt, Human
gcugggagugggcaagaugaga

SEQ ID NO: 852501 - RNA, 19 nt, Human
cuggcugcaaugccagggu

SEQ ID NO: 852502 - RNA, 22 nt, Human
cuacccaggcuuagagggcugg

SEQ ID NO: 852503 - RNA, 22 nt, Human
augcugugccuucucugugcca

SEQ ID NO: 852504 - RNA, 18 nt, Human
aggcaggugcuggaaguc

SEQ ID NO: 852505 - RNA, 22 nt, Human
guaaguuauauuaaaauuucag

SEQ ID NO: 852506 - RNA, 22 nt, Human
accaggagacaugaccaaugag

SEQ ID NO: 852507 - RNA, 22 nt, Human
uuagccaugugggaaaaacagc

SEQ ID NO: 852508 - RNA, 22 nt, Human
aaauuuucagagcacuagagaa

SEQ ID NO: 852509 - RNA, 23 nt, Human
uuagagaugauuaaaaaaucuug

SEQ ID NO: 852510 - RNA, 22 nt, Human
aaguauaagcuauucuucauga

SEQ ID NO: 852511 - RNA, 22 nt, Human
aggguggccaugagggagagau

SEQ ID NO: 852512 - RNA, 17 nt, Human
ucugaggugaggaugca

SEQ ID NO: 852513 - RNA, 17 nt, Human
agcugaccagauggacu

SEQ ID NO: 852514 - RNA, 22 nt, Human
auauuaggcaaggagauuauuu

SEQ ID NO: 852515 - RNA, 22 nt, Human
uggcagcuagauaguguguuua

SEQ ID NO: 852516 - RNA, 22 nt, Human
gcuucccagcagaggaaagacu

SEQ ID NO: 852517 - RNA, 22 nt, Human
aggcacagagaaugcccuccau

SEQ ID NO: 852518 - RNA, 22 nt, Human
ucugggaaugaauaagaccugu

SEQ ID NO: 852519 - RNA, 22 nt, Human
uuuaacagguaaaguaaaugug

SEQ ID NO: 852520 - RNA, 22 nt, Human
guccaucuagaauuuauuucua

SEQ ID NO: 852521 - RNA, 22 nt, Human
gagggugggccagauaugaggg

SEQ ID NO: 852522 - RNA, 22 nt, Human
ucuuugcaaaauacaacaaugg

SEQ ID NO: 852523 - RNA, 22 nt, Human
cagccuuuuaggacuauuugug

SEQ ID NO: 852524 - RNA, 22 nt, Human
caccguuugguuuggauuuaca

SEQ ID NO: 852525 - RNA, 22 nt, Human
gauuucuuuagguguaauagug

SEQ ID NO: 852526 - RNA, 17 nt, Human
agcugagcuggccaggg

SEQ ID NO: 852527 - RNA, 22 nt, Human
aagauggaguaguguaaugguu

SEQ ID NO: 852528 - RNA, 22 nt, Human
aucacaaaggcugcuucaugau

SEQ ID NO: 852529 - RNA, 22 nt, Human
aggagaggucucccuuccccag

SEQ ID NO: 852530 - RNA, 19 nt, Human
cccaggaggcggagguugc

SEQ ID NO: 852531 - RNA, 17 nt, Human
aaucuguuuacagucag

SEQ ID NO: 852532 - RNA, 22 nt, Human
aaggcaguaggaucuuccacag

SEQ ID NO: 852533 - RNA, 22 nt, Human
gccuuuauuguuuauucagugc

SEQ ID NO: 852534 - RNA, 22 nt, Human
uuucaguuuccagcuuugucau

SEQ ID NO: 852535 - RNA, 22 nt, Human
aaacugccaaaagaccuuggau

SEQ ID NO: 852536 - RNA, 22 nt, Human
uauuagugaaagaauuaguuug

SEQ ID NO: 852537 - RNA, 22 nt, Human
gauuucuuugcaagcuguguuc

SEQ ID NO: 852538 - RNA, 22 nt, Human
ucaggauggcuucugcaucaaa

SEQ ID NO: 852539 - RNA, 22 nt, Human
uaacaauaguguuugcuaguca

SEQ ID NO: 852540 - RNA, 22 nt, Human
auuucccagcuuugaucaguuu

SEQ ID NO: 852541 - RNA, 19 nt, Human
cccaggagcaguauugaug

SEQ ID NO: 852542 - RNA, 22 nt, Human
ccaagaugaucuuuacaguguu

SEQ ID NO: 852543 - RNA, 22 nt, Human
ucuucacauggaacaugaagcu

SEQ ID NO: 852544 - RNA, 22 nt, Human
uuccuuaguugacugucuuagu

SEQ ID NO: 852545 - RNA, 22 nt, Human
cuguauuucccacauucucuau

SEQ ID NO: 852546 - RNA, 22 nt, Human
uagggcaggugaagaaaagcua

SEQ ID NO: 852547 - RNA, 22 nt, Human
uugcccagaguccacagcguac

SEQ ID NO: 852548 - RNA, 22 nt, Human
uuugaaagccuggcuuuucucu

SEQ ID NO: 852549 - RNA, 22 nt, Human
caaauagugucacauugugagg

SEQ ID NO: 852550 - RNA, 22 nt, Human
gaggacaggagacucacuguuu

SEQ ID NO: 852551 - RNA, 22 nt, Human
uggcaccaggcgggguggcugu

SEQ ID NO: 852552 - RNA, 22 nt, Human
ugaaucauggauaaauagcuua

SEQ ID NO: 852553 - RNA, 22 nt, Human
uaaaacuuaacuauccagauua

SEQ ID NO: 852554 - RNA, 22 nt, Human
guggcaggagagacacagccau

SEQ ID NO: 852555 - RNA, 22 nt, Human
caggcugaucagggcugggaug

SEQ ID NO: 852556 - RNA, 22 nt, Human
aggcaggcacuccggaaguguc

SEQ ID NO: 852557 - RNA, 22 nt, Human
aaucuguucuacucuauucaga

SEQ ID NO: 852558 - RNA, 22 nt, Human
ucaugcuuaaaagacacuugag

SEQ ID NO: 852559 - RNA, 22 nt, Human
ugcauggaggaagaugaaugca

SEQ ID NO: 852560 - RNA, 22 nt, Human
gugaggucauauagcgaacucc

SEQ ID NO: 852561 - RNA, 19 nt, Human
uccaggaggcugccauuga

SEQ ID NO: 852562 - RNA, 22 nt, Human
ugcugaggagguggcugugcuu

SEQ ID NO: 852563 - RNA, 22 nt, Human
gcugcugugugggagacaggcg

SEQ ID NO: 852564 - RNA, 22 nt, Human
aaccauuugccauuaucuuaag

SEQ ID NO: 852565 - RNA, 22 nt, Human
ggcuggagaagggugguugaca

SEQ ID NO: 852566 - RNA, 22 nt, Human
guggaauguccuugaucauaag

SEQ ID NO: 852567 - RNA, 22 nt, Human
ggccaaaucuguaaggcaagau

SEQ ID NO: 852568 - RNA, 22 nt, Human
gcaggagaaaugaagauugggu

SEQ ID NO: 852569 - RNA, 22 nt, Human
ucaggcugcuggccagcaggcu

SEQ ID NO: 852570 - RNA, 22 nt, Human
gaggcaacacauuuggaaagca

SEQ ID NO: 852571 - RNA, 18 nt, Human
uggcagcaggaagccauu

SEQ ID NO: 852572 - RNA, 22 nt, Human
ggaaaagacagguuaacuguga

SEQ ID NO: 852573 - RNA, 22 nt, Human
uuauuugguugcugacuuggaa

SEQ ID NO: 852574 - RNA, 22 nt, Human
gcaaguuauuuccauuuaaagc

SEQ ID NO: 852575 - RNA, 22 nt, Human
ucucucuuuuuaaucauguaau

SEQ ID NO: 852576 - RNA, 21 nt, Human
gcaggcuggucaaaccucagu

SEQ ID NO: 852577 - RNA, 23 nt, Human
gggcagcuuaagcuuguuuuucu

SEQ ID NO: 852578 - RNA, 22 nt, Human
auuggcaggaaccgaggagggg

SEQ ID NO: 852579 - RNA, 23 nt, Human
uuuauccaacucuguaaucucuc

SEQ ID NO: 852580 - RNA, 22 nt, Human
gggcagcuguaucugagcuuau

SEQ ID NO: 852581 - RNA, 22 nt, Human
ucuuagaaugucaacugauguu

SEQ ID NO: 852582 - RNA, 22 nt, Human
ccuccuggaggcucuagggaaa

SEQ ID NO: 852583 - RNA, 22 nt, Human
acauguaaaaauuaagguaaga

SEQ ID NO: 852584 - RNA, 20 nt, Human
ggggcugcaugcagagaaga

SEQ ID NO: 852585 - RNA, 22 nt, Human
uaauuauuugaagacauuagag

SEQ ID NO: 852586 - RNA, 22 nt, Human
cucaggaugaaagucaugguga

SEQ ID NO: 852587 - RNA, 22 nt, Human
uacuuucuuucugauccuuaug

SEQ ID NO: 852588 - RNA, 22 nt, Human
guugacagcuggugagcugcua

SEQ ID NO: 852589 - RNA, 22 nt, Human
uggcaugaguauaggcuucuca

SEQ ID NO: 852590 - RNA, 22 nt, Human
gauacacuggagcuuccugaca

SEQ ID NO: 852591 - RNA, 22 nt, Human
ugcugagguuucgucugcuugc

SEQ ID NO: 852592 - RNA, 22 nt, Human
aggagcagaacugauucugacu

SEQ ID NO: 852593 - RNA, 22 nt, Human
uccaggaguuugagacugcagu

SEQ ID NO: 852594 - RNA, 22 nt, Human
auccaugaucaauuuauuacua

SEQ ID NO: 852595 - RNA, 22 nt, Human
ugaugaaauguugaggcaguga

SEQ ID NO: 852596 - RNA, 19 nt, Human
agcagcuguagauagacac

SEQ ID NO: 852597 - RNA, 22 nt, Human
uauuucuaagagauaucuguac

SEQ ID NO: 852598 - RNA, 20 nt, Human
cccagguaggugccaugagu

SEQ ID NO: 852599 - RNA, 21 nt, Human
ucauuugugaucugauuucca

SEQ ID NO: 852600 - RNA, 22 nt, Human
gccaggaguucagaugcauguu

SEQ ID NO: 852601 - RNA, 22 nt, Human
gagcaggcauucuaguggcuga

SEQ ID NO: 852602 - RNA, 20 nt, Human
augugagggguugaaguggg

SEQ ID NO: 852603 - RNA, 22 nt, Human
caggcagcugacugucagauau

SEQ ID NO: 852604 - RNA, 21 nt, Human
cuccugggcuaagauauagug

SEQ ID NO: 852605 - RNA, 22 nt, Human
agggucugcauuccaacuuggg

SEQ ID NO: 852606 - RNA, 22 nt, Human
cagaccucaguccucaguagga

SEQ ID NO: 852607 - RNA, 22 nt, Human
ucuggccaacccucaaguugua

SEQ ID NO: 852608 - RNA, 22 nt, Human
acaugaaaugcagccuguaacc

SEQ ID NO: 852609 - RNA, 19 nt, Human
agcauuuggaauucuacac

SEQ ID NO: 852610 - RNA, 22 nt, Human
ucagugugaguaccaugcucag

SEQ ID NO: 852611 - RNA, 22 nt, Human
ggaagaggcugaggccaugcug

SEQ ID NO: 852612 - RNA, 22 nt, Human
uggcacaugguaagacucagua

SEQ ID NO: 852613 - RNA, 22 nt, Human
uuuauuagugcuuguaucacug

SEQ ID NO: 852614 - RNA, 22 nt, Human
ccuugcguuuuacagcuucuag

SEQ ID NO: 852615 - RNA, 22 nt, Human
gaauacaugauacaugaacugc

SEQ ID NO: 852616 - RNA, 21 nt, Human
cagcagaguaaugcauucgua

SEQ ID NO: 852617 - RNA, 22 nt, Human
caggucuggguugauggccugg

SEQ ID NO: 852618 - RNA, 22 nt, Human
auagcacugguuuuucuugguu

SEQ ID NO: 852619 - RNA, 22 nt, Human
uuggccaagucacugguuaaug

SEQ ID NO: 852620 - RNA, 19 nt, Human
acugccugaggcucacagg

SEQ ID NO: 852621 - RNA, 22 nt, Human
agccuauuccaggaugagcuca

SEQ ID NO: 852622 - RNA, 22 nt, Human
cacucaggcugugucaggagga

SEQ ID NO: 852623 - RNA, 22 nt, Human
guugaaugaaucauucuaugua

SEQ ID NO: 852624 - RNA, 22 nt, Human
caauuauauuuagaaugauaca

SEQ ID NO: 852625 - RNA, 22 nt, Human
gcaaaaaaugcuuguugcuuag

SEQ ID NO: 852626 - RNA, 22 nt, Human
ccagggcaacgcugucucagag

SEQ ID NO: 852627 - RNA, 15 nt, Human
uggcagcuuguuaag

SEQ ID NO: 852628 - RNA, 22 nt, Human
ccagcagagucuaggaaggagg

SEQ ID NO: 852629 - RNA, 22 nt, Human
caggcagcauuuacucugauga

SEQ ID NO: 852630 - RNA, 22 nt, Human
uuugcacuagcauuuguccaug

SEQ ID NO: 852631 - RNA, 22 nt, Human
ugcugaaagucccaaaucucau

SEQ ID NO: 852632 - RNA, 20 nt, Human
cuucuucagccuaugcuuca

SEQ ID NO: 852633 - RNA, 23 nt, Human
ggcuugagcuggaacagcuuggu

SEQ ID NO: 852634 - RNA, 19 nt, Human
cagagcugcuggccucguc

SEQ ID NO: 852635 - RNA, 22 nt, Human
gcagcauauuguacuggccugc

SEQ ID NO: 852636 - RNA, 22 nt, Human
gaucuguuauaaucucuuuuau

SEQ ID NO: 852637 - RNA, 22 nt, Human
gacuuucugaaggucucgcagu

SEQ ID NO: 852638 - RNA, 22 nt, Human
auggcuuccucuggauuggauu

SEQ ID NO: 852639 - RNA, 22 nt, Human
cugaguccuugggcuuagagug

SEQ ID NO: 852640 - RNA, 22 nt, Human
gugauuuugagaccuauauagu

SEQ ID NO: 852641 - RNA, 22 nt, Human
ucccaggaugugcgugccgccg

SEQ ID NO: 852642 - RNA, 22 nt, Human
acuaacauuuguguaugucuug

SEQ ID NO: 852643 - RNA, 22 nt, Human
acagauguacacucauauauaa

SEQ ID NO: 852644 - RNA, 22 nt, Human
ccuuaaauucuccauuugaaag

SEQ ID NO: 852645 - RNA, 22 nt, Human
auucuucacauggauaggaucu

SEQ ID NO: 852646 - RNA, 22 nt, Human
uagcucuucauuucaucugauu

SEQ ID NO: 852647 - RNA, 22 nt, Human
cucuccucugaaguggugaccc

SEQ ID NO: 852648 - RNA, 22 nt, Human
uucuuuugggaauuacguaugc

SEQ ID NO: 852649 - RNA, 22 nt, Human
uucuuuuacauuaagauuucag

SEQ ID NO: 852650 - RNA, 20 nt, Human
ugcguguguauuuauuuucu

SEQ ID NO: 852651 - RNA, 22 nt, Human
ggaggccagggacccagucagc

SEQ ID NO: 852652 - RNA, 22 nt, Human
ucuccuggguaaaaggguugau

SEQ ID NO: 852653 - RNA, 22 nt, Human
cugcuucuccaaaguaggacuu

SEQ ID NO: 852654 - RNA, 22 nt, Human
ucugucccugagagcucaggag

SEQ ID NO: 852655 - RNA, 22 nt, Human
aauuuccagaucagaugacuca

SEQ ID NO: 852656 - RNA, 22 nt, Human
uuggaaaauguauuucuagaag

SEQ ID NO: 852657 - RNA, 22 nt, Human
uccccucccuuccaacagagcu

SEQ ID NO: 852658 - RNA, 22 nt, Human
uguuugaacugaauaacauagu

SEQ ID NO: 852659 - RNA, 22 nt, Human
uucaggaucacuaaacccucca

SEQ ID NO: 852660 - RNA, 22 nt, Human
uagggcugcagaacaauggccu

SEQ ID NO: 852661 - RNA, 22 nt, Human
uaagaugacuacuuaccacuga

SEQ ID NO: 852662 - RNA, 22 nt, Human
ggcugcuguacugaugucaguu

SEQ ID NO: 852663 - RNA, 20 nt, Human
uuucugugcccaggucuguu

SEQ ID NO: 852664 - RNA, 21 nt, Human
ucuuccuccacagcgugccac

SEQ ID NO: 852665 - RNA, 22 nt, Human
ucuuaaagagcgcaauuugagg

SEQ ID NO: 852666 - RNA, 22 nt, Human
uuugcaaagugacuauuauaug

SEQ ID NO: 852667 - RNA, 22 nt, Human
aagauaaacucuugauuucuga

SEQ ID NO: 852668 - RNA, 20 nt, Human
uaguccaguaggggggcuuu

SEQ ID NO: 852669 - RNA, 22 nt, Human
gcaucuaaacuugcaucauugu

SEQ ID NO: 852670 - RNA, 22 nt, Human
ucaggcugaggucaucugcauc

SEQ ID NO: 852671 - RNA, 22 nt, Human
agagcacuuucgagagccggag

SEQ ID NO: 852672 - RNA, 22 nt, Human
uguuuauuuucaggauggauug

SEQ ID NO: 852673 - RNA, 22 nt, Human
cagggagggaggaaaauuugcu

SEQ ID NO: 852674 - RNA, 22 nt, Human
caggcagccugcggucugcaca

SEQ ID NO: 852675 - RNA, 22 nt, Human
uaccuuuugcuuauuaugacac

SEQ ID NO: 852676 - RNA, 19 nt, Human
aggcaggugcagagguccc

SEQ ID NO: 852677 - RNA, 20 nt, Human
aacugccugcccagaggugg

SEQ ID NO: 852678 - RNA, 22 nt, Human
cuggccaggcuugggacagaca

SEQ ID NO: 852679 - RNA, 22 nt, Human
agacucaagcagauaggaauua

SEQ ID NO: 852680 - RNA, 22 nt, Human
agugcuggagggaggcagguuc

SEQ ID NO: 852681 - RNA, 22 nt, Human
aggcagauauuggggugaugug

SEQ ID NO: 852682 - RNA, 22 nt, Human
ugucagguugguuuucagagaa

SEQ ID NO: 852683 - RNA, 22 nt, Human
gccaggaggggagaguguguca

SEQ ID NO: 852684 - RNA, 22 nt, Human
aucacugucgucaucugagauu

SEQ ID NO: 852685 - RNA, 22 nt, Human
ugcugugagguugagaaggaag

SEQ ID NO: 852686 - RNA, 22 nt, Human
cagcugcuuacuagcuguguga

SEQ ID NO: 852687 - RNA, 20 nt, Human
ugagugcuccauucugccca

SEQ ID NO: 852688 - RNA, 22 nt, Human
uucaguuucguuaucuaugaga

SEQ ID NO: 852689 - RNA, 22 nt, Human
aggcaccuugagagcaggagcu

SEQ ID NO: 852690 - RNA, 22 nt, Human
guuuuauaggcuguugcuauau

SEQ ID NO: 852691 - RNA, 22 nt, Human
ugcccaggaucuggcgaugcuc

SEQ ID NO: 852692 - RNA, 20 nt, Human
uauauaggaaauauuguguu

SEQ ID NO: 852693 - RNA, 22 nt, Human
auaguuacaaagacuuuuuaaa

SEQ ID NO: 852694 - RNA, 22 nt, Human
agggagcuucuggccucagccu

SEQ ID NO: 852695 - RNA, 22 nt, Human
ccagaggagaugccuccucugu

SEQ ID NO: 852696 - RNA, 22 nt, Human
ggcugagaaggagugggugagg

SEQ ID NO: 852697 - RNA, 22 nt, Human
uuuggaauguaguuuaaucauc

SEQ ID NO: 852698 - RNA, 22 nt, Human
ugaaacauuugaugaucuuugg

SEQ ID NO: 852699 - RNA, 22 nt, Human
ugaaucugauuucccuggaggc

SEQ ID NO: 852700 - RNA, 22 nt, Human
gagagggagccagccaggaacc

SEQ ID NO: 852701 - RNA, 17 nt, Human
uuugaaaggaugucagu

SEQ ID NO: 852702 - RNA, 22 nt, Human
auuacacagcgguuacuacuag

SEQ ID NO: 852703 - RNA, 22 nt, Human
cccaggaguuugaguucagcau

SEQ ID NO: 852704 - RNA, 22 nt, Human
auuuaaauuuucugauggagag

SEQ ID NO: 852705 - RNA, 22 nt, Human
uucauacauuuuuacuaacagc

SEQ ID NO: 852706 - RNA, 22 nt, Human
uagggcuggcgugcucagggaa

SEQ ID NO: 852707 - RNA, 19 nt, Human
uggagaggaaaugcugcuc

SEQ ID NO: 852708 - RNA, 22 nt, Human
aaacugcuuuccacaguggcua

SEQ ID NO: 852709 - RNA, 22 nt, Human
cugcaucacagcaggaggcaca

SEQ ID NO: 852710 - RNA, 22 nt, Human
cagcuucugcuaucgaacaucu

SEQ ID NO: 852711 - RNA, 21 nt, Human
gauugaaaccauggcagugag

SEQ ID NO: 852712 - RNA, 21 nt, Human
ucuccuggguccaacccaugc

SEQ ID NO: 852713 - RNA, 22 nt, Human
ggcucaggcuggagugcagugg

SEQ ID NO: 852714 - RNA, 22 nt, Human
aggcugagugcuccccuagaug

SEQ ID NO: 852715 - RNA, 21 nt, Human
ucaggagagcccaucuacaaa

SEQ ID NO: 852716 - RNA, 18 nt, Human
cugcccagagcacuugug

SEQ ID NO: 852717 - RNA, 22 nt, Human
cccucccucugcuggguguaga

SEQ ID NO: 852718 - RNA, 22 nt, Human
uugacuucccagacuuguguuu

SEQ ID NO: 852719 - RNA, 22 nt, Human
uccugucuaaagaccugcaggc

SEQ ID NO: 852720 - RNA, 22 nt, Human
ugaggggagcccgcccuggacg

SEQ ID NO: 852721 - RNA, 22 nt, Human
uugcauuugaucuuggguucuc

SEQ ID NO: 852722 - RNA, 22 nt, Human
cagcugccuucugcgggaaguc

SEQ ID NO: 852723 - RNA, 22 nt, Human
aucauuucccuuuagaucacaa

SEQ ID NO: 852724 - RNA, 22 nt, Human
gucagcugggcaucugcagaug

SEQ ID NO: 852725 - RNA, 19 nt, Human
uguguguuuauauauguau

SEQ ID NO: 852726 - RNA, 22 nt, Human
ggagcaggagucucuugaauuu

SEQ ID NO: 852727 - RNA, 22 nt, Human
agcugaggccugauuucgccgu

SEQ ID NO: 852728 - RNA, 22 nt, Human
ugucaccaugccagcuucugcc

SEQ ID NO: 852729 - RNA, 22 nt, Human
ugcugagguaaccauauccugc

SEQ ID NO: 852730 - RNA, 22 nt, Human
ucagucucaucaacucuauucc

SEQ ID NO: 852731 - RNA, 22 nt, Human
aaaggccaccaacaugaagcau

SEQ ID NO: 852732 - RNA, 22 nt, Human
guuaggauauggugaaauggag

SEQ ID NO: 852733 - RNA, 22 nt, Human
cccugguggggccagacuugcu

SEQ ID NO: 852734 - RNA, 19 nt, Human
gcuggccacgccccaguug

SEQ ID NO: 852735 - RNA, 19 nt, Human
ccugaggugggguggaagg

SEQ ID NO: 852736 - RNA, 22 nt, Human
gcaggcuggaggcuguucuggg

SEQ ID NO: 852737 - RNA, 22 nt, Human
aauuuuaagcauaugacugguu

SEQ ID NO: 852738 - RNA, 17 nt, Human
cuccuggcagccucagg

SEQ ID NO: 852739 - RNA, 22 nt, Human
cugccucaugcugccugcagcc

SEQ ID NO: 852740 - RNA, 22 nt, Human
gcucucuuuuuccagugguggu

SEQ ID NO: 852741 - RNA, 22 nt, Human
ggcaggcagaggcugagacagg

SEQ ID NO: 852742 - RNA, 21 nt, Human
acagcauguuuguguguuugc

SEQ ID NO: 852743 - RNA, 22 nt, Human
agucuccuuggccucaaugccu

SEQ ID NO: 852744 - RNA, 22 nt, Human
cagcugaguggacccuagaggc

SEQ ID NO: 852745 - RNA, 22 nt, Human
uguucuuuggcuucacagcucu

SEQ ID NO: 852746 - RNA, 22 nt, Human
uuggccaaacagaguucaacag

SEQ ID NO: 852747 - RNA, 22 nt, Human
uggccacauccuuuccuuguca

SEQ ID NO: 852748 - RNA, 22 nt, Human
agugcuuugguauagaacuauu

SEQ ID NO: 852749 - RNA, 18 nt, Human
aagggcuggccuuuggag

SEQ ID NO: 852750 - RNA, 22 nt, Human
acagaacugcaggaggaaaagc

SEQ ID NO: 852751 - RNA, 22 nt, Human
ucucuuucuauaugugagucuu

SEQ ID NO: 852752 - RNA, 22 nt, Human
cucaggcugcccugacagcccc

SEQ ID NO: 852753 - RNA, 22 nt, Human
cugagggucaacuugauuguau

SEQ ID NO: 852754 - RNA, 22 nt, Human
auacacauguguaugugcaugc

SEQ ID NO: 852755 - RNA, 22 nt, Human
uggaggggcaauggagcgcgga

SEQ ID NO: 852756 - RNA, 22 nt, Human
cagguuggucggcaaguacaca

SEQ ID NO: 852757 - RNA, 22 nt, Human
cuggcucaggaaaguugcugcu

SEQ ID NO: 852758 - RNA, 19 nt, Human
cuuugucagaacaugcuuc

SEQ ID NO: 852759 - RNA, 22 nt, Human
gcagcugccuucagcuggaugg

SEQ ID NO: 852760 - RNA, 22 nt, Human
uagggcagaguccaggaugggc

SEQ ID NO: 852761 - RNA, 22 nt, Human
ggccagaaguuggaaaagagcc

SEQ ID NO: 852762 - RNA, 17 nt, Human
ucuccuggcucuaucag

SEQ ID NO: 852763 - RNA, 22 nt, Human
uuguaaaugaccuuuucuaauu

SEQ ID NO: 852764 - RNA, 22 nt, Human
uuauccuggauuauauauguga

SEQ ID NO: 852765 - RNA, 22 nt, Human
uuacacuuguaaauggcaugua

SEQ ID NO: 852766 - RNA, 22 nt, Human
guuguuuuuguucucuauagcu

SEQ ID NO: 852767 - RNA, 22 nt, Human
uucuacagacuauaacugugau

SEQ ID NO: 852768 - RNA, 22 nt, Human
aggcugaggcagguggaucacu

SEQ ID NO: 852769 - RNA, 22 nt, Human
aaguaguuaggaacauucucuc

SEQ ID NO: 852770 - RNA, 22 nt, Human
aguaaaucagaccucauuaugu

SEQ ID NO: 852771 - RNA, 22 nt, Human
aggaguggugcaggaccugcca

SEQ ID NO: 852772 - RNA, 22 nt, Human
ggcaggcaucauguggucauua

SEQ ID NO: 852773 - RNA, 22 nt, Human
caggauggccccggggcugugc

SEQ ID NO: 852774 - RNA, 22 nt, Human
aggccagccucaggcagggacc

SEQ ID NO: 852775 - RNA, 22 nt, Human
ggucagagggugggcugccugu

SEQ ID NO: 852776 - RNA, 22 nt, Human
gaggucaggggagaggcugaug

SEQ ID NO: 852777 - RNA, 22 nt, Human
ggcuguaguuaccugaugaaau

SEQ ID NO: 852778 - RNA, 22 nt, Human
cggagaggugggggcagcaucu

SEQ ID NO: 852779 - RNA, 22 nt, Human
gguuauauaauucagugcuuuc

SEQ ID NO: 852780 - RNA, 22 nt, Human
gugcugaggauacagcugugaa

SEQ ID NO: 852781 - RNA, 23 nt, Human
aggucagcaggcaaggaaauggc

SEQ ID NO: 852782 - RNA, 20 nt, Human
gggagucuggaugaaagaug

SEQ ID NO: 852783 - RNA, 22 nt, Human
agaggagugggaagcagugcaa

SEQ ID NO: 852784 - RNA, 22 nt, Human
gcaggcugugaggcucagaugg

SEQ ID NO: 852785 - RNA, 22 nt, Human
aaguguagauuauggagugucu

SEQ ID NO: 852786 - RNA, 22 nt, Human
acauguuuggcucuaugcuaua

SEQ ID NO: 852787 - RNA, 22 nt, Human
cccaggaggcagagguugcagu

SEQ ID NO: 852788 - RNA, 22 nt, Human
agagaagagucuugucaaauua

SEQ ID NO: 852789 - RNA, 22 nt, Human
gcucuggguucugauuuaugag

SEQ ID NO: 852790 - RNA, 22 nt, Human
cagaagaggacuggguagcuca

SEQ ID NO: 852791 - RNA, 22 nt, Human
gcaggcugaugacuggaguugg

SEQ ID NO: 852792 - RNA, 22 nt, Human
aaggcagcccuggcucagccug

SEQ ID NO: 852793 - RNA, 21 nt, Human
agcugagguaaggcaagagag

SEQ ID NO: 852794 - RNA, 19 nt, Human
caacugcccccucaaacau

SEQ ID NO: 852795 - RNA, 22 nt, Human
ugcccaggauugugaggucagg

SEQ ID NO: 852796 - RNA, 22 nt, Human
aucuagguuuggaagauagagu

SEQ ID NO: 852797 - RNA, 22 nt, Human
cuuuguaucuaaauaucuugaa

SEQ ID NO: 852798 - RNA, 22 nt, Human
caccuugugauccucuugccuu

SEQ ID NO: 852799 - RNA, 23 nt, Human
gggcaguuauguuguccuuggcu

SEQ ID NO: 852800 - RNA, 19 nt, Human
cauggcugcugcuugggag

SEQ ID NO: 852801 - RNA, 21 nt, Human
uagaacugacgauuucagagu

SEQ ID NO: 852802 - RNA, 22 nt, Human
agaucaaugugucagaagagau

SEQ ID NO: 852803 - RNA, 22 nt, Human
gagguagcgaguggacagugca

SEQ ID NO: 852804 - RNA, 22 nt, Human
agaaaugacaagacugaucagg

SEQ ID NO: 852805 - RNA, 22 nt, Human
ucuuuccauggccacacagucu

SEQ ID NO: 852806 - RNA, 23 nt, Human
uagagcaguagaucaccauggga

SEQ ID NO: 852807 - RNA, 22 nt, Human
uuaauaggcuucuaacauagcu

SEQ ID NO: 852808 - RNA, 23 nt, Human
uauuagggccaggacuggcaaau

SEQ ID NO: 852809 - RNA, 22 nt, Human
ucaggagacuggcagugcccac

SEQ ID NO: 852810 - RNA, 22 nt, Human
agcaccuugcucuuggccuucc

SEQ ID NO: 852811 - RNA, 22 nt, Human
uucagcaagaccaccauguacc

SEQ ID NO: 852812 - RNA, 22 nt, Human
gccaggaggucagccccucaac

SEQ ID NO: 852813 - RNA, 22 nt, Human
cccaggaggucgaagcugcagu

SEQ ID NO: 852814 - RNA, 22 nt, Human
cccagaaggucgaggcugcagu

SEQ ID NO: 852815 - RNA, 22 nt, Human
uaaccuuucaggcauguagguu

SEQ ID NO: 852816 - RNA, 22 nt, Human
cagcuggcuggucagugcacaa

SEQ ID NO: 852817 - RNA, 22 nt, Human
ggcagcuucucccaggcuguuu

SEQ ID NO: 852818 - RNA, 22 nt, Human
cacacuuuuggcauguuugguu

SEQ ID NO: 852819 - RNA, 22 nt, Human
uccugccuucauacugcuguau

SEQ ID NO: 852820 - RNA, 20 nt, Human
cuguggaauuuuaccaugcg

SEQ ID NO: 852821 - RNA, 22 nt, Human
cuguaaauaugaagaauauaug

SEQ ID NO: 852822 - RNA, 22 nt, Human
cugaggcuuugugugcaugccu

SEQ ID NO: 852823 - RNA, 22 nt, Human
guuuuauaggugaaauauuacu

SEQ ID NO: 852824 - RNA, 22 nt, Human
uucagaauauuuguuuuacaug

SEQ ID NO: 852825 - RNA, 17 nt, Human
acuccuggucugaaggg

SEQ ID NO: 852826 - RNA, 22 nt, Human
cugccuggaugaauggcgccuu

SEQ ID NO: 852827 - RNA, 22 nt, Human
gcuaacauugauucagugccug

SEQ ID NO: 852828 - RNA, 22 nt, Human
uugaagagugccuuccagacau

SEQ ID NO: 852829 - RNA, 22 nt, Human
uaaauuaugucacaugacucug

SEQ ID NO: 852830 - RNA, 22 nt, Human
caagauuaucuucuucuuguua

SEQ ID NO: 852831 - RNA, 22 nt, Human
acucuuuacuuaaacucuaagu

SEQ ID NO: 852832 - RNA, 22 nt, Human
cagugucuccagaugcuccaau

SEQ ID NO: 852833 - RNA, 22 nt, Human
aggcagacaaggucccuggucu

SEQ ID NO: 852834 - RNA, 22 nt, Human
auacuguuucucuucuacauga

SEQ ID NO: 852835 - RNA, 22 nt, Human
uaaauacuuuacaggaugucuc

SEQ ID NO: 852836 - RNA, 21 nt, Human
cucuugugucagagccagagg

SEQ ID NO: 852837 - RNA, 21 nt, Human
cagcaagacauguuuaucaag

SEQ ID NO: 852838 - RNA, 22 nt, Human
augcuguggggagugaggguag

SEQ ID NO: 852839 - RNA, 22 nt, Human
guccaugacugugacucacaug

SEQ ID NO: 852840 - RNA, 22 nt, Human
aggcggcugguguccugcaggu

SEQ ID NO: 852841 - RNA, 22 nt, Human
cacaaugugguuugucaucuuu

SEQ ID NO: 852842 - RNA, 22 nt, Human
uauuuuaucugccagaguggag

SEQ ID NO: 852843 - RNA, 22 nt, Human
agggcugugucccuaggggagc

SEQ ID NO: 852844 - RNA, 22 nt, Human
aucccugcccucauggagcuua

SEQ ID NO: 852845 - RNA, 22 nt, Human
uuuuccagagcugucucuugca

SEQ ID NO: 852846 - RNA, 19 nt, Human
uagugucaaggaggagggu

SEQ ID NO: 852847 - RNA, 22 nt, Human
uacuaucucuucuaacuucaga

SEQ ID NO: 852848 - RNA, 22 nt, Human
ucugcaggcucuagaugagguu

SEQ ID NO: 852849 - RNA, 22 nt, Human
gaggucccccauggcugugacu

SEQ ID NO: 852850 - RNA, 22 nt, Human
gcuggcugguccagcaggggcu

SEQ ID NO: 852851 - RNA, 22 nt, Human
ucugaggucucaugacuugcau

SEQ ID NO: 852852 - RNA, 22 nt, Human
ugguaacacaggcauuaaaguu

SEQ ID NO: 852853 - RNA, 22 nt, Human
cugagauggaguuuugcucuug

SEQ ID NO: 852854 - RNA, 22 nt, Human
uauuugaaaguguacaaaaacu

SEQ ID NO: 852855 - RNA, 20 nt, Human
gugcugagggcugggcaaug

SEQ ID NO: 852856 - RNA, 22 nt, Human
acuguaacacaaugguaucugu

SEQ ID NO: 852857 - RNA, 22 nt, Human
uacacuaauagccacacuaaug

SEQ ID NO: 852858 - RNA, 22 nt, Human
caguucuuaauaccaugugguu

SEQ ID NO: 852859 - RNA, 22 nt, Human
gcagcugcuggagggaggcagg

SEQ ID NO: 852860 - RNA, 22 nt, Human
uaaggccaccguuauagaacca

SEQ ID NO: 852861 - RNA, 22 nt, Human
aguuaucagguguuuucaugga

SEQ ID NO: 852862 - RNA, 22 nt, Human
cauuuguuaaccaguguggauu

SEQ ID NO: 852863 - RNA, 22 nt, Human
ugccacaguuguuugugcucua

SEQ ID NO: 852864 - RNA, 22 nt, Human
ucugucaccccuguuucuggcu

SEQ ID NO: 852865 - RNA, 22 nt, Human
gagcugaguaucccacugaagu

SEQ ID NO: 852866 - RNA, 22 nt, Human
auacauacauguaugcacauac

SEQ ID NO: 852867 - RNA, 22 nt, Human
uuuugaauaauucagaaacagc

SEQ ID NO: 852868 - RNA, 22 nt, Human
gugcuuuuaaaggcaauuagua

SEQ ID NO: 852869 - RNA, 22 nt, Human
ccuccuuuccuguuuuccugag

SEQ ID NO: 852870 - RNA, 22 nt, Human
uccugugccuccaccugcuccg

SEQ ID NO: 852871 - RNA, 22 nt, Human
caggaggaagaacucugcaaca

SEQ ID NO: 852872 - RNA, 19 nt, Human
uucauucuuucuacuuacc

SEQ ID NO: 852873 - RNA, 22 nt, Human
uaaaugaaaggguuuaauuuau

SEQ ID NO: 852874 - RNA, 22 nt, Human
auuucccaugugaaucaauugg

SEQ ID NO: 852875 - RNA, 22 nt, Human
uaggcugggagccugaggcuag

SEQ ID NO: 852876 - RNA, 22 nt, Human
ugcacuucaaaaaugucacuga

SEQ ID NO: 852877 - RNA, 22 nt, Human
uugcugaaaucuaugacauccu

SEQ ID NO: 852878 - RNA, 22 nt, Human
uugaacugguaguuggaaaucu

SEQ ID NO: 852879 - RNA, 20 nt, Human
gaaauacuuacccaacuguu

SEQ ID NO: 852880 - RNA, 22 nt, Human
ucccaggaaugucugaaaguga

SEQ ID NO: 852881 - RNA, 20 nt, Human
agggugagacaugagccucc

SEQ ID NO: 852882 - RNA, 22 nt, Human
aggagagcuggugucuggaauc

SEQ ID NO: 852883 - RNA, 22 nt, Human
aguuauaugugaaaacacguau

SEQ ID NO: 852884 - RNA, 22 nt, Human
uaggacaugcuacauaaauagg

SEQ ID NO: 852885 - RNA, 22 nt, Human
uccaugaggaccaaauucguag

SEQ ID NO: 852886 - RNA, 23 nt, Human
aggcagcagguuguccaggguga

SEQ ID NO: 852887 - RNA, 22 nt, Human
uaacaguguggacuugagaucu

SEQ ID NO: 852888 - RNA, 22 nt, Human
ucuggccagcaugagaccuggu

SEQ ID NO: 852889 - RNA, 22 nt, Human
cagggaggaugggcuguuuugc

SEQ ID NO: 852890 - RNA, 18 nt, Human
gcaggagauggguggggu

SEQ ID NO: 852891 - RNA, 22 nt, Human
uucucacuauguauguagauug

SEQ ID NO: 852892 - RNA, 22 nt, Human
uucuucuuuccuauaauuaauu

SEQ ID NO: 852893 - RNA, 22 nt, Human
aggcagccaucugcaggaagga

SEQ ID NO: 852894 - RNA, 22 nt, Human
uauguagguaaacacagacaua

SEQ ID NO: 852895 - RNA, 22 nt, Human
ggucugaguggugcugacucag

SEQ ID NO: 852896 - RNA, 23 nt, Human
cccaggaguuucacugcaaaggu

SEQ ID NO: 852897 - RNA, 22 nt, Human
aagcagcagcaggauuaaagag

SEQ ID NO: 852898 - RNA, 22 nt, Human
caucaucaaaacaaauggaguc

SEQ ID NO: 852899 - RNA, 22 nt, Human
gacccaggaagcuacuucuggu

SEQ ID NO: 852900 - RNA, 22 nt, Human
cuugcaggccuuucuagcucua

SEQ ID NO: 852901 - RNA, 20 nt, Human
gcugccuguuucuguaagua

SEQ ID NO: 852902 - RNA, 22 nt, Human
guuaaauaaccucauguccguu

SEQ ID NO: 852903 - RNA, 22 nt, Human
uuaugauuugccacagauuggu

SEQ ID NO: 852904 - RNA, 22 nt, Human
cucucuggcacuucauugcugu

SEQ ID NO: 852905 - RNA, 22 nt, Human
ccccuccuggccacacugucag

SEQ ID NO: 852906 - RNA, 23 nt, Human
gagcugaguguagggagacuagg

SEQ ID NO: 852907 - RNA, 22 nt, Human
gaaccucagugaaacuggaggu

SEQ ID NO: 852908 - RNA, 22 nt, Human
acauuuuuuagagucccacauu

SEQ ID NO: 852909 - RNA, 22 nt, Human
ccuggccaggcucucagcacug

SEQ ID NO: 852910 - RNA, 22 nt, Human
uugaaauaucaaguuauuagug

SEQ ID NO: 852911 - RNA, 22 nt, Human
uaacauuauacagagaggacag

SEQ ID NO: 852912 - RNA, 22 nt, Human
cuuuuccacugagccucacaaa

SEQ ID NO: 852913 - RNA, 22 nt, Human
augcugagcagagcugacaugc

SEQ ID NO: 852914 - RNA, 22 nt, Human
gauggcagguaguggucucauc

SEQ ID NO: 852915 - RNA, 22 nt, Human
aggcagcuggacauaacuaacc

SEQ ID NO: 852916 - RNA, 22 nt, Human
uggcagcuggaucccaaggcag

SEQ ID NO: 852917 - RNA, 22 nt, Human
uugcugaauugaauccuuuggu

SEQ ID NO: 852918 - RNA, 22 nt, Human
gcccaguaguucaagguugcag

SEQ ID NO: 852919 - RNA, 22 nt, Human
agagugucugguagcugcucug

SEQ ID NO: 852920 - RNA, 22 nt, Human
cugagcuguuuaaucccagaua

SEQ ID NO: 852921 - RNA, 22 nt, Human
uccccagauucaugucugcugu

SEQ ID NO: 852922 - RNA, 22 nt, Human
aacuguaagagaauaaaugugu

SEQ ID NO: 852923 - RNA, 20 nt, Human
cagagccaagagcagcaucu

SEQ ID NO: 852924 - RNA, 22 nt, Human
auggccaagaauauuucucaac

SEQ ID NO: 852925 - RNA, 22 nt, Human
gcuggccauagaagccaaagag

SEQ ID NO: 852926 - RNA, 22 nt, Human
aaaaugaacagaacaaugggga

SEQ ID NO: 852927 - RNA, 20 nt, Human
ugaaggccagcagcauaggg

SEQ ID NO: 852928 - RNA, 22 nt, Human
uuugcauaggauggacauuuua

SEQ ID NO: 852929 - RNA, 22 nt, Human
ucuccuggccgggcuguccccu

SEQ ID NO: 852930 - RNA, 20 nt, Human
aggaggggauagaaucaaag

SEQ ID NO: 852931 - RNA, 22 nt, Human
aaagccauugaacuguacuuua

SEQ ID NO: 852932 - RNA, 22 nt, Human
agcaggcuuucaagagucuucu

SEQ ID NO: 852933 - RNA, 22 nt, Human
auucuuaauugccaugcuguau

SEQ ID NO: 852934 - RNA, 22 nt, Human
gcuuugaagucugugucuuuug

SEQ ID NO: 852935 - RNA, 22 nt, Human
uucucagagcucacuguaguaa

SEQ ID NO: 852936 - RNA, 22 nt, Human
acccaggagacggaggugcagu

SEQ ID NO: 852937 - RNA, 22 nt, Human
auucugagacaauugccgucag

SEQ ID NO: 852938 - RNA, 22 nt, Human
ggagaagggacagacucagcuu

SEQ ID NO: 852939 - RNA, 22 nt, Human
ccuucauugcaucuuuaagaga

SEQ ID NO: 852940 - RNA, 22 nt, Human
cagcaagacaguuuccuaagug

SEQ ID NO: 852941 - RNA, 22 nt, Human
ugcugaggucaccuugcugcua

SEQ ID NO: 852942 - RNA, 22 nt, Human
gaggcagccucaguggaccucg

SEQ ID NO: 852943 - RNA, 22 nt, Human
ccccugccagcuaucccugaac

SEQ ID NO: 852944 - RNA, 22 nt, Human
gagaggugaauguggaugccac

SEQ ID NO: 852945 - RNA, 22 nt, Human
aggaggcacucacucucagggu

SEQ ID NO: 852946 - RNA, 22 nt, Human
uugauuaaacaggcauauucaa

SEQ ID NO: 852947 - RNA, 22 nt, Human
uucuucaaacaaaaguggcaug

SEQ ID NO: 852948 - RNA, 22 nt, Human
cuacccaggcuggagugcagua

SEQ ID NO: 852949 - RNA, 22 nt, Human
auccaugaagguacuucucagg

SEQ ID NO: 852950 - RNA, 22 nt, Human
gaggagagggcugcgggcccac

SEQ ID NO: 852951 - RNA, 22 nt, Human
aaggcugagggcuguaccuggc

SEQ ID NO: 852952 - RNA, 22 nt, Human
agcggcugcucuuuucagaucc

SEQ ID NO: 852953 - RNA, 22 nt, Human
cagcugccccuccagggcuggg

SEQ ID NO: 852954 - RNA, 22 nt, Human
gcugagucagauugcagucuug

SEQ ID NO: 852955 - RNA, 22 nt, Human
gucugagcgcuggagcuugugu

SEQ ID NO: 852956 - RNA, 22 nt, Human
agauauauuuccugcccaaggc

SEQ ID NO: 852957 - RNA, 22 nt, Human
aagcuggcaugucaccugagaa

SEQ ID NO: 852958 - RNA, 22 nt, Human
aggcagaucacuugaggccagg

SEQ ID NO: 852959 - RNA, 22 nt, Human
ucugggaacugagcuccccuag

SEQ ID NO: 852960 - RNA, 22 nt, Human
caggcagcucugcuuuuccuaa

SEQ ID NO: 852961 - RNA, 22 nt, Human
guaacucuggguagaacucaug

SEQ ID NO: 852962 - RNA, 18 nt, Human
aauuuccauaugaauugc

SEQ ID NO: 852963 - RNA, 23 nt, Human
cagcccuuccugcauguuuuugu

SEQ ID NO: 852964 - RNA, 22 nt, Human
gcuccucuauuccccacauuuu

SEQ ID NO: 852965 - RNA, 22 nt, Human
uaagcugugggagauuggcaua

SEQ ID NO: 852966 - RNA, 22 nt, Human
gagggagucugugcaaagaauu

SEQ ID NO: 852967 - RNA, 22 nt, Human
ggagcuguuggcagcuaucuug

SEQ ID NO: 852968 - RNA, 17 nt, Human
cuccuggccaccccucu

SEQ ID NO: 852969 - RNA, 22 nt, Human
uucacauuggugauauguuucu

SEQ ID NO: 852970 - RNA, 23 nt, Human
cagagcuggcucagagcugccug

SEQ ID NO: 852971 - RNA, 22 nt, Human
gaaauccaguucccuacucuua

SEQ ID NO: 852972 - RNA, 22 nt, Human
uguuggcaucucugagagaguu

SEQ ID NO: 852973 - RNA, 22 nt, Human
uucuuuggugggagauugaggu

SEQ ID NO: 852974 - RNA, 22 nt, Human
uuucagcugguaaaggaguagc

SEQ ID NO: 852975 - RNA, 22 nt, Human
ggcagcaucucuggcagcagcu

SEQ ID NO: 852976 - RNA, 22 nt, Human
ucaggauguccaaaauccagcc

SEQ ID NO: 852977 - RNA, 22 nt, Human
aagggcugaucucacuuucuuu

SEQ ID NO: 852978 - RNA, 22 nt, Human
gcagacagggcuacagagguac

SEQ ID NO: 852979 - RNA, 22 nt, Human
gauuuggccuuucgcaugguau

SEQ ID NO: 852980 - RNA, 22 nt, Human
ugccuggcaccccagucugcac

SEQ ID NO: 852981 - RNA, 22 nt, Human
ccacaguacaggaaaucuuguu

SEQ ID NO: 852982 - RNA, 22 nt, Human
gucaggaucucccaguacauau

SEQ ID NO: 852983 - RNA, 22 nt, Human
guugaaagaugucuugguuccc

SEQ ID NO: 852984 - RNA, 22 nt, Human
gcugagcacaccuaggguagag

SEQ ID NO: 852985 - RNA, 20 nt, Human
ugaggcccagcagagucggg

SEQ ID NO: 852986 - RNA, 22 nt, Human
uuucaugaggggcaaaaucuca

SEQ ID NO: 852987 - RNA, 22 nt, Human
cccaggagagaggggauaaagc

SEQ ID NO: 852988 - RNA, 22 nt, Human
ccuggccaguuuccaggcccug

SEQ ID NO: 852989 - RNA, 22 nt, Human
cagcaacugugccugacacaca

SEQ ID NO: 852990 - RNA, 22 nt, Human
gggcugaggcuaccacuggucu

SEQ ID NO: 852991 - RNA, 22 nt, Human
gagggcuguggggcaugaccag

SEQ ID NO: 852992 - RNA, 22 nt, Human
aagaagagaaaugugcugcugg

SEQ ID NO: 852993 - RNA, 21 nt, Human
aaauacugggcagugacuuga

SEQ ID NO: 852994 - RNA, 22 nt, Human
ucacagaaggaccuuguuucau

SEQ ID NO: 852995 - RNA, 22 nt, Human
ugggucagaaucagagaguugc

SEQ ID NO: 852996 - RNA, 23 nt, Human
aucuaauuucuccaaaucucuac

SEQ ID NO: 852997 - RNA, 22 nt, Human
ggccugagucccaccuggcugu

SEQ ID NO: 852998 - RNA, 22 nt, Human
ucacagaacaauguuuaguucu

SEQ ID NO: 852999 - RNA, 22 nt, Human
uggaguucucaggugagggcuu

SEQ ID NO: 853000 - RNA, 22 nt, Human
ucugggaagcugguccuguucu

SEQ ID NO: 853001 - RNA, 21 nt, Human
agccuguugguuuacugcuca

SEQ ID NO: 853002 - RNA, 22 nt, Human
ggaggaggggugacugaaugcu

SEQ ID NO: 853003 - RNA, 22 nt, Human
cugggccaucuccuuugugugg

SEQ ID NO: 853004 - RNA, 22 nt, Human
uuacacuuaggguuugucagag

SEQ ID NO: 853005 - RNA, 20 nt, Human
agggcagcuugaggagccgg

SEQ ID NO: 853006 - RNA, 22 nt, Human
auaagguauaaggccuauuuuu

SEQ ID NO: 853007 - RNA, 22 nt, Human
cccuggugguacggcacuggca

SEQ ID NO: 853008 - RNA, 22 nt, Human
aucugccugcaguggagguggg

SEQ ID NO: 853009 - RNA, 22 nt, Human
aaaaugaugcuguaauuuggca

SEQ ID NO: 853010 - RNA, 22 nt, Human
cuggagagagaaaaagccuuaa

SEQ ID NO: 853011 - RNA, 22 nt, Human
ucccaggagcaccuuuugagcc

SEQ ID NO: 853012 - RNA, 19 nt, Human
ccuggcugugaagccugca

SEQ ID NO: 853013 - RNA, 22 nt, Human
cagagagggagcaguagucucu

SEQ ID NO: 853014 - RNA, 22 nt, Human
caggcagcagccacucugguau

SEQ ID NO: 853015 - RNA, 22 nt, Human
agugcuuucccugaaaccuucc

SEQ ID NO: 853016 - RNA, 22 nt, Human
gcagacaucaagcacaggccca

SEQ ID NO: 853017 - RNA, 21 nt, Human
aaauacagaaacuuguuuuca

SEQ ID NO: 853018 - RNA, 22 nt, Human
agggagcuaggauccugaaggu

SEQ ID NO: 853019 - RNA, 22 nt, Human
ugucuucagcaaaugccuuucu

SEQ ID NO: 853020 - RNA, 22 nt, Human
uuuuagauaguuuaacugcacu

SEQ ID NO: 853021 - RNA, 22 nt, Human
cugaggcugggcauggggucca

SEQ ID NO: 853022 - RNA, 22 nt, Human
cugaaaauguuacacaggaaga

SEQ ID NO: 853023 - RNA, 22 nt, Human
ccaggagaugggaaaguagcag

SEQ ID NO: 853024 - RNA, 20 nt, Human
ugacuucugggauuuguggu

SEQ ID NO: 853025 - RNA, 22 nt, Human
gcugagguggugaugguucauc

SEQ ID NO: 853026 - RNA, 22 nt, Human
uggagacugugcuaagggaguu

SEQ ID NO: 853027 - RNA, 22 nt, Human
gggucccuggaauuacuugaca

SEQ ID NO: 853028 - RNA, 22 nt, Human
ccacaguccgggcuggcaggac

SEQ ID NO: 853029 - RNA, 22 nt, Human
cagagcuguugcggggcuuggc

SEQ ID NO: 853030 - RNA, 22 nt, Human
cuuaagaugaggucaugcuaua

SEQ ID NO: 853031 - RNA, 22 nt, Human
uaauauaccaaacuguaauuuu

SEQ ID NO: 853032 - RNA, 22 nt, Human
ggcuuuagggcaggcaguguua

SEQ ID NO: 853033 - RNA, 22 nt, Human
uaggcugggcugagcuggacgg

SEQ ID NO: 853034 - RNA, 22 nt, Human
caggaugaagggcaaaggcaag

SEQ ID NO: 853035 - RNA, 22 nt, Human
accaggaggcuacacuguccca

SEQ ID NO: 853036 - RNA, 22 nt, Human
gagggcuccucacauucucuau

SEQ ID NO: 853037 - RNA, 22 nt, Human
accuuauuaaaaugaugaugua

SEQ ID NO: 853038 - RNA, 22 nt, Human
agcagacauaucucaugucaca

SEQ ID NO: 853039 - RNA, 22 nt, Human
caggcugagcucuggccugggc

SEQ ID NO: 853040 - RNA, 22 nt, Human
ggagaaaggcauagcagaaccu

SEQ ID NO: 853041 - RNA, 22 nt, Human
uuggcagauuugucaguaagcu

SEQ ID NO: 853042 - RNA, 22 nt, Human
ugcugagguuucugacuaugga

SEQ ID NO: 853043 - RNA, 22 nt, Human
ugaugaaacugagguuccaaga

SEQ ID NO: 853044 - RNA, 22 nt, Human
uugaaaguuaucuagauucuga

SEQ ID NO: 853045 - RNA, 22 nt, Human
cugaggcucagcgugaggaaag

SEQ ID NO: 853046 - RNA, 22 nt, Human
cacagauaaggauguuaauuuu

SEQ ID NO: 853047 - RNA, 19 nt, Human
cuugcugggugguuucugc

SEQ ID NO: 853048 - RNA, 22 nt, Human
acuccugggugcauuucugauu

SEQ ID NO: 853049 - RNA, 17 nt, Human
ggcagccucaggcguuu

SEQ ID NO: 853050 - RNA, 22 nt, Human
aaaggccaagcaugagguggac

SEQ ID NO: 853051 - RNA, 22 nt, Human
cucccuggugacucccaaagcu

SEQ ID NO: 853052 - RNA, 22 nt, Human
uaaggccaaggggccauagucu

SEQ ID NO: 853053 - RNA, 22 nt, Human
uuagaaagcuuuccauagucaa

SEQ ID NO: 853054 - RNA, 22 nt, Human
guaaaauagaauaacguggcua

SEQ ID NO: 853055 - RNA, 22 nt, Human
caaauacuuacugaaccugugc

SEQ ID NO: 853056 - RNA, 21 nt, Human
ugcuggaaaaagugguucuag

SEQ ID NO: 853057 - RNA, 22 nt, Human
gcaacuguuuugagcacccagu

SEQ ID NO: 853058 - RNA, 22 nt, Human
gccugcagaacugugaggcaau

SEQ ID NO: 853059 - RNA, 22 nt, Human
aucaggauguuuggcugucaua

SEQ ID NO: 853060 - RNA, 22 nt, Human
cuucuaauucuuauguaagcuu

SEQ ID NO: 853061 - RNA, 22 nt, Human
gaggcagagaccuucaggaccu

SEQ ID NO: 853062 - RNA, 22 nt, Human
uaguacaguggagagcaaagaa

SEQ ID NO: 853063 - RNA, 22 nt, Human
ccugggauuuccugagcacucu

SEQ ID NO: 853064 - RNA, 17 nt, Human
aaggccauuuccaccca

SEQ ID NO: 853065 - RNA, 22 nt, Human
agcugaggguucgguguccaca

SEQ ID NO: 853066 - RNA, 22 nt, Human
auuagggaaggauuuggccuga

SEQ ID NO: 853067 - RNA, 22 nt, Human
ucuuccucuagaucugaggccc

SEQ ID NO: 853068 - RNA, 22 nt, Human
ccuccuggggugaaggauggga

SEQ ID NO: 853069 - RNA, 22 nt, Human
ccugggccugaaaacauuucuc

SEQ ID NO: 853070 - RNA, 22 nt, Human
auggaguucuuuaaauucacag

SEQ ID NO: 853071 - RNA, 22 nt, Human
uuauuagagauauuugguuagg

SEQ ID NO: 853072 - RNA, 23 nt, Human
ccuggcagcaaacgaggagguua

SEQ ID NO: 853073 - RNA, 19 nt, Human
uggcaucuguaaaauggug

SEQ ID NO: 853074 - RNA, 22 nt, Human
cugcauuagucaugcuuugcag

SEQ ID NO: 853075 - RNA, 22 nt, Human
aguuguaagagacagauauaaa

SEQ ID NO: 853076 - RNA, 22 nt, Human
aggucacccguuugacuaucca

SEQ ID NO: 853077 - RNA, 22 nt, Human
auguuucaccaguuuuauaaga

SEQ ID NO: 853078 - RNA, 22 nt, Human
uuaguuuucccaucuuuauggu

SEQ ID NO: 853079 - RNA, 22 nt, Human
caaauacuuuuagccuauugag

SEQ ID NO: 853080 - RNA, 22 nt, Human
uggggcuccuccuggcaggagg

SEQ ID NO: 853081 - RNA, 22 nt, Human
uuuaggauauuaauguucagag

SEQ ID NO: 853082 - RNA, 22 nt, Human
ucauuuguucaucugcucuucu

SEQ ID NO: 853083 - RNA, 22 nt, Human
aaaggaagaugccaggacucug

SEQ ID NO: 853084 - RNA, 22 nt, Human
ucugcagggaugugagggguga

SEQ ID NO: 853085 - RNA, 18 nt, Human
ucaggcugcccugugucu

SEQ ID NO: 853086 - RNA, 22 nt, Human
uucagggagagcgggacgggug

SEQ ID NO: 853087 - RNA, 22 nt, Human
gauuaggacauggauguauguu

SEQ ID NO: 853088 - RNA, 22 nt, Human
agaaaugaaaccaaagccuaga

SEQ ID NO: 853089 - RNA, 22 nt, Human
ucugaagccuuuguacaggccu

SEQ ID NO: 853090 - RNA, 23 nt, Human
gauacacucccugcugggcacug

SEQ ID NO: 853091 - RNA, 22 nt, Human
agugcugagugauugcaaagga

SEQ ID NO: 853092 - RNA, 19 nt, Human
acccagagcccuuugcagg

SEQ ID NO: 853093 - RNA, 22 nt, Human
uccaggagaccagauguaggcc

SEQ ID NO: 853094 - RNA, 22 nt, Human
uuaaagggccgauuuccaggcc

SEQ ID NO: 853095 - RNA, 22 nt, Human
uccauuuuucaugacuccucaa

SEQ ID NO: 853096 - RNA, 22 nt, Human
ucagagagugcaaaauauagcu

SEQ ID NO: 853097 - RNA, 22 nt, Human
accuuauuuugaaauagauugu

SEQ ID NO: 853098 - RNA, 22 nt, Human
cuauuagguaugugguugcuau

SEQ ID NO: 853099 - RNA, 22 nt, Human
aggcagcugugaggacuggauu

SEQ ID NO: 853100 - RNA, 22 nt, Human
aaaggaagauugagcuuuucca

SEQ ID NO: 853101 - RNA, 22 nt, Human
gauacacuggccaaguggagga

SEQ ID NO: 853102 - RNA, 22 nt, Human
uggcagcugaauggcuggaugg

SEQ ID NO: 853103 - RNA, 22 nt, Human
gguggcaccuugaucuuggacu

SEQ ID NO: 853104 - RNA, 22 nt, Human
uggaggccuagguugaugugug

SEQ ID NO: 853105 - RNA, 22 nt, Human
ugaggcagucacccccuccugc

SEQ ID NO: 853106 - RNA, 22 nt, Human
uuccuggcauagagagggcaca

SEQ ID NO: 853107 - RNA, 22 nt, Human
aaaauugaagugaucaggaacu

SEQ ID NO: 853108 - RNA, 22 nt, Human
uucaucaauguguuuaauaaug

SEQ ID NO: 853109 - RNA, 22 nt, Human
caugugcuguagcagagaggaa

SEQ ID NO: 853110 - RNA, 22 nt, Human
acaucugacaugaucuucagua

SEQ ID NO: 853111 - RNA, 22 nt, Human
ccaggcuggauuuugcaguuca

SEQ ID NO: 853112 - RNA, 20 nt, Human
cccagugaagcauggaagag

SEQ ID NO: 853113 - RNA, 22 nt, Human
aaggcagcaggauuuggugacu

SEQ ID NO: 853114 - RNA, 22 nt, Human
uggcugagaccuucccaaauuc

SEQ ID NO: 853115 - RNA, 22 nt, Human
agcaagauuuuccuugaauguu

SEQ ID NO: 853116 - RNA, 22 nt, Human
uucuucuucuggcugcaccugg

SEQ ID NO: 853117 - RNA, 22 nt, Human
uugacuucagccuguacuugua

SEQ ID NO: 853118 - RNA, 21 nt, Human
cgcagagcgaacuugcggcgc

SEQ ID NO: 853119 - RNA, 22 nt, Human
agaugcugccaggccccucagu

SEQ ID NO: 853120 - RNA, 19 nt, Human
ucucugcuucucuuggcau

SEQ ID NO: 853121 - RNA, 21 nt, Human
gauguuggaggcuggggucug

SEQ ID NO: 853122 - RNA, 22 nt, Human
agcccaggaaucugcaucuuga

SEQ ID NO: 853123 - RNA, 22 nt, Human
guggccaagggacucuaaggca

SEQ ID NO: 853124 - RNA, 22 nt, Human
cuccugggcucauaucauucag

SEQ ID NO: 853125 - RNA, 22 nt, Human
uauuaugagguauuuggacuuu

SEQ ID NO: 853126 - RNA, 17 nt, Human
ucauuuguugugacuag

SEQ ID NO: 853127 - RNA, 22 nt, Human
agacagcuaauaaaugagugug

SEQ ID NO: 853128 - RNA, 22 nt, Human
agcccaggaaguugaggcuugc

SEQ ID NO: 853129 - RNA, 22 nt, Human
ugaaggcuugacugaggcagga

SEQ ID NO: 853130 - RNA, 22 nt, Human
uuuagagcaggguguggcacau

SEQ ID NO: 853131 - RNA, 22 nt, Human
ggcugaggcggcgaugcccuug

SEQ ID NO: 853132 - RNA, 22 nt, Human
uuuagagcugugcugccacaug

SEQ ID NO: 853133 - RNA, 22 nt, Human
gugcauuugugcaugcacaugu

SEQ ID NO: 853134 - RNA, 22 nt, Human
aguggacucuucccagugcuug

SEQ ID NO: 853135 - RNA, 22 nt, Human
uacauguauguguuaauaucug

SEQ ID NO: 853136 - RNA, 22 nt, Human
gaaggccauuagagccugugcc

SEQ ID NO: 853137 - RNA, 22 nt, Human
ugaaggccagcucuuuaucagc

SEQ ID NO: 853138 - RNA, 22 nt, Human
auuucucuuagcaagacauuac

SEQ ID NO: 853139 - RNA, 22 nt, Human
cuaaauuaucaugagaauuaug

SEQ ID NO: 853140 - RNA, 22 nt, Human
ggauggagguucucagaugcuc

SEQ ID NO: 853141 - RNA, 22 nt, Human
uguccccagagccuguuccugc

SEQ ID NO: 853142 - RNA, 22 nt, Human
cccaggauggggcugcaguuau

SEQ ID NO: 853143 - RNA, 22 nt, Human
cagggcugucuccaaaggcccc

SEQ ID NO: 853144 - RNA, 22 nt, Human
cacugagcugauagaauuccag

SEQ ID NO: 853145 - RNA, 22 nt, Human
aucacauugccagugauuaccc

SEQ ID NO: 853146 - RNA, 22 nt, Human
ucuacagacagagcagguggga

SEQ ID NO: 853147 - RNA, 22 nt, Human
agaggacagguuuuccaugggc

SEQ ID NO: 853148 - RNA, 21 nt, Human
auugaaagucaacaaucaguu

SEQ ID NO: 853149 - RNA, 22 nt, Human
ggcagcuuguccuggaggaugg

SEQ ID NO: 853150 - RNA, 21 nt, Human
gacaaagugaagcaggcagga

SEQ ID NO: 853151 - RNA, 22 nt, Human
uggaaggaagccaaggaagguu

SEQ ID NO: 853152 - RNA, 21 nt, Human
ucugagagcaacugcccuuua

SEQ ID NO: 853153 - RNA, 22 nt, Human
uugaaaguagcagcugcauaug

SEQ ID NO: 853154 - RNA, 22 nt, Human
uccaggaggcucugguugacgu

SEQ ID NO: 853155 - RNA, 22 nt, Human
augcuguggaaguuccugaagc

SEQ ID NO: 853156 - RNA, 22 nt, Human
uggcugagaccaucagggugua

SEQ ID NO: 853157 - RNA, 19 nt, Human
cauuuuaagcauccccagu

SEQ ID NO: 853158 - RNA, 22 nt, Human
aaaacuccugaaauuguuuccc

SEQ ID NO: 853159 - RNA, 22 nt, Human
cuucucagcaugguuacuguga

SEQ ID NO: 853160 - RNA, 22 nt, Human
gaggagaggccaucguuguuau

SEQ ID NO: 853161 - RNA, 22 nt, Human
uggcaugaagucagcagcuggg

SEQ ID NO: 853162 - RNA, 21 nt, Human
ccugagugagaccuggcccgu

SEQ ID NO: 853163 - RNA, 22 nt, Human
cagguugggcugcgaggaggag

SEQ ID NO: 853164 - RNA, 22 nt, Human
ggcugagaggacgucgggcuca

SEQ ID NO: 853165 - RNA, 22 nt, Human
aggcugagucaaguuaggguga

SEQ ID NO: 853166 - RNA, 22 nt, Human
agccuuguuggucugaguuugg

SEQ ID NO: 853167 - RNA, 22 nt, Human
gcccaggaaguugaggcugccg

SEQ ID NO: 853168 - RNA, 22 nt, Human
guaagauuuaaaauagcaauug

SEQ ID NO: 853169 - RNA, 18 nt, Human
gcuccuggaccaggucac

SEQ ID NO: 853170 - RNA, 22 nt, Human
augaggcaguacacacaaagcc

SEQ ID NO: 853171 - RNA, 22 nt, Human
gaugccuccaaaugagggcaga

SEQ ID NO: 853172 - RNA, 22 nt, Human
aggcagcccacaggacacagga

SEQ ID NO: 853173 - RNA, 22 nt, Human
uaggcugaaaggagaggugaag

SEQ ID NO: 853174 - RNA, 22 nt, Human
ucagagaguuagugucuuagcu

SEQ ID NO: 853175 - RNA, 22 nt, Human
uuucauggcuaggacuagagug

SEQ ID NO: 853176 - RNA, 22 nt, Human
cacugucuuuugugaagacaau

SEQ ID NO: 853177 - RNA, 22 nt, Human
cccaggaaacccgaaggcgacc

SEQ ID NO: 853178 - RNA, 22 nt, Human
ccuucuucuguguggcccaaga

SEQ ID NO: 853179 - RNA, 22 nt, Human
agagugcaaccgaaacaagcag

SEQ ID NO: 853180 - RNA, 22 nt, Human
uguuagcagagcagcugacaga

SEQ ID NO: 853181 - RNA, 22 nt, Human
uaggcugacuuguuucauaaag

SEQ ID NO: 853182 - RNA, 22 nt, Human
cuucucaaaguugugaaucagg

SEQ ID NO: 853183 - RNA, 22 nt, Human
gaccuuuuuacuguguacgcug

SEQ ID NO: 853184 - RNA, 21 nt, Human
caucuuagguuguacauauau

SEQ ID NO: 853185 - RNA, 22 nt, Human
ucugggaguuagaauacauggg

SEQ ID NO: 853186 - RNA, 22 nt, Human
uuuugcuugagugcacaaaaug

SEQ ID NO: 853187 - RNA, 22 nt, Human
uaacugguuucauaucauuucc

SEQ ID NO: 853188 - RNA, 22 nt, Human
gagaggggcgcgcagcucgcga

SEQ ID NO: 853189 - RNA, 22 nt, Human
agcuggaagcugaugagcacag

SEQ ID NO: 853190 - RNA, 22 nt, Human
caaaugauacuguuuuuagucu

SEQ ID NO: 853191 - RNA, 22 nt, Human
uuauuagagugcuuugagaaag

SEQ ID NO: 853192 - RNA, 22 nt, Human
uucuacaugguugcucagaggg

SEQ ID NO: 853193 - RNA, 22 nt, Human
uagaaagagcuuugcuuccuuu

SEQ ID NO: 853194 - RNA, 22 nt, Human
uuauggaaaauacaauuauaag

SEQ ID NO: 853195 - RNA, 22 nt, Human
aagggcugaaagaccuugggca

SEQ ID NO: 853196 - RNA, 22 nt, Human
ggacagaggguugacagaguau

SEQ ID NO: 853197 - RNA, 22 nt, Human
gagugcagaugaacagaagauu

SEQ ID NO: 853198 - RNA, 22 nt, Human
aggagaggguggcauuaaguuu

SEQ ID NO: 853199 - RNA, 22 nt, Human
uggcagcugucagaaugcaaau

SEQ ID NO: 853200 - RNA, 22 nt, Human
acauucuuaacaguuaaaaacu

SEQ ID NO: 853201 - RNA, 22 nt, Human
ucugagcccucuuuugcagccc

SEQ ID NO: 853202 - RNA, 22 nt, Human
uaaggccagcaugaaugcagca

SEQ ID NO: 853203 - RNA, 22 nt, Human
uggaggaaguugcuggaaguca

SEQ ID NO: 853204 - RNA, 22 nt, Human
uaacugccagcagcgaugaaca

SEQ ID NO: 853205 - RNA, 22 nt, Human
uggcugaggucuggggcuucug

SEQ ID NO: 853206 - RNA, 22 nt, Human
cugugcacuucucuuuauuugu

SEQ ID NO: 853207 - RNA, 22 nt, Human
uuauacaguuuauacuuagaau

SEQ ID NO: 853208 - RNA, 22 nt, Human
aagccgaggccacacagcagga

SEQ ID NO: 853209 - RNA, 22 nt, Human
aggacagcaguuggugagguuc

SEQ ID NO: 853210 - RNA, 17 nt, Human
uagcuguguuucagcua

SEQ ID NO: 853211 - RNA, 22 nt, Human
ucccugccaguccuggucugaa

SEQ ID NO: 853212 - RNA, 22 nt, Human
gaggggagacagggaaaucagu

SEQ ID NO: 853213 - RNA, 22 nt, Human
ggcuuggaccagucacaguggu

SEQ ID NO: 853214 - RNA, 22 nt, Human
uuuaggaucaaugagaaagucu

SEQ ID NO: 853215 - RNA, 22 nt, Human
uucuagaugcuuauaggcauau

SEQ ID NO: 853216 - RNA, 22 nt, Human
uuggccaaagcucaccagugcu

SEQ ID NO: 853217 - RNA, 22 nt, Human
gaaauacagaaagggcugaaug

SEQ ID NO: 853218 - RNA, 22 nt, Human
gcugguuuccuuaucuauaaag

SEQ ID NO: 853219 - RNA, 22 nt, Human
uggcuucucuguuuuaguauuu

SEQ ID NO: 853220 - RNA, 22 nt, Human
gcccaggaaauaaaagugggcu

SEQ ID NO: 853221 - RNA, 22 nt, Human
ccugcuguaaugugucuuuauu

SEQ ID NO: 853222 - RNA, 22 nt, Human
acaggcugcugagccauuugcu

SEQ ID NO: 853223 - RNA, 22 nt, Human
aacaugaaaaccuccacagcaa

SEQ ID NO: 853224 - RNA, 22 nt, Human
uaggcagaaaggaaggcaaguu

SEQ ID NO: 853225 - RNA, 22 nt, Human
gaggcagcuuggggcugugggu

SEQ ID NO: 853226 - RNA, 22 nt, Human
uuauucuuuucuccagaauccc

SEQ ID NO: 853227 - RNA, 22 nt, Human
uucagaaguagcuaagcaguca

SEQ ID NO: 853228 - RNA, 22 nt, Human
aggagggagaugcccauccugg

SEQ ID NO: 853229 - RNA, 22 nt, Human
gcuuggcauugaccauuaucau

SEQ ID NO: 853230 - RNA, 22 nt, Human
gccucugcccuccugggacugc

SEQ ID NO: 853231 - RNA, 22 nt, Human
uucaauucaauucuaaauauau

SEQ ID NO: 853232 - RNA, 22 nt, Human
cugccaggcgauggauuggcug

SEQ ID NO: 853233 - RNA, 22 nt, Human
aucaggaugaagcuguagcgaa

SEQ ID NO: 853234 - RNA, 22 nt, Human
ggcaggcucagcagccaaggag

SEQ ID NO: 853235 - RNA, 22 nt, Human
gcuggaggauggacuggaagaa

SEQ ID NO: 853236 - RNA, 22 nt, Human
ucccaggaggugcuuccuagga

SEQ ID NO: 853237 - RNA, 22 nt, Human
aggcaacuuuuggggaugaugg

SEQ ID NO: 853238 - RNA, 22 nt, Human
uagcacauacauaauagauaga

SEQ ID NO: 853239 - RNA, 22 nt, Human
uuaaauuagucaagcuucucug

SEQ ID NO: 853240 - RNA, 22 nt, Human
cugagacuuucaugugcuuuua

SEQ ID NO: 853241 - RNA, 23 nt, Human
ucucuuucaagagcuuaaugugc

SEQ ID NO: 853242 - RNA, 19 nt, Human
augucuggguaacagcugc

SEQ ID NO: 853243 - RNA, 22 nt, Human
aaaguauucuugacuguuuuuc

SEQ ID NO: 853244 - RNA, 22 nt, Human
uggcucagcgcggccuggucuu

SEQ ID NO: 853245 - RNA, 22 nt, Human
uccaugagaacccuuggagaua

SEQ ID NO: 853246 - RNA, 22 nt, Human
gugguaaucggauucuuaccgg

SEQ ID NO: 853247 - RNA, 22 nt, Human
ggccaaaccgcaauuauuuuug

SEQ ID NO: 853248 - RNA, 22 nt, Human
uccaggagucuagccucaggcc

SEQ ID NO: 853249 - RNA, 22 nt, Human
cagcugaguuuccaagucugcc

SEQ ID NO: 853250 - RNA, 22 nt, Human
ugaggggagaagcagcagccug

SEQ ID NO: 853251 - RNA, 22 nt, Human
ccucacugaagaggugacauuu

SEQ ID NO: 853252 - RNA, 20 nt, Human
cugccgaccacagccaugga

SEQ ID NO: 853253 - RNA, 22 nt, Human
ggcagccaggaggguguaguuu

SEQ ID NO: 853254 - RNA, 22 nt, Human
ggcugcugaguuggccaggaga

SEQ ID NO: 853255 - RNA, 22 nt, Human
uuaacauacaucaugaacaaug

SEQ ID NO: 853256 - RNA, 22 nt, Human
guuacacagcuaagcuucuccu

SEQ ID NO: 853257 - RNA, 23 nt, Human
uccaggagaaccccugucugucc

SEQ ID NO: 853258 - RNA, 22 nt, Human
uuucuucauucaccuucacccc

SEQ ID NO: 853259 - RNA, 18 nt, Human
ggagcccagaggugaguu

SEQ ID NO: 853260 - RNA, 22 nt, Human
ucucaguuuccucauauguaaa

SEQ ID NO: 853261 - RNA, 22 nt, Human
aaggcugaggagggccugcagg

SEQ ID NO: 853262 - RNA, 22 nt, Human
ucuucuuccucauuuauacaua

SEQ ID NO: 853263 - RNA, 22 nt, Human
gggucugaggaguaccauuguc

SEQ ID NO: 853264 - RNA, 22 nt, Human
ugaaagggguugaguuacagcu

SEQ ID NO: 853265 - RNA, 22 nt, Human
cagcugacccgugggaggcggg

SEQ ID NO: 853266 - RNA, 22 nt, Human
cacuggugaguccagaagucau

SEQ ID NO: 853267 - RNA, 22 nt, Human
cuuuggcaaggguuuuaauugu

SEQ ID NO: 853268 - RNA, 22 nt, Human
uaugccugauaacugugucucu

SEQ ID NO: 853269 - RNA, 22 nt, Human
gcuggccauggggagugaggag

SEQ ID NO: 853270 - RNA, 22 nt, Human
auacacauauguguguauaugu

SEQ ID NO: 853271 - RNA, 22 nt, Human
ccugcugugaccggggagcagg

SEQ ID NO: 853272 - RNA, 20 nt, Human
agaaaaaguguggaaauuuc

SEQ ID NO: 853273 - RNA, 22 nt, Human
aggcaguggcugagaccagggg

SEQ ID NO: 853274 - RNA, 22 nt, Human
caagauggagaagcagcaaggg

SEQ ID NO: 853275 - RNA, 22 nt, Human
uucucagauauuuacugagcau

SEQ ID NO: 853276 - RNA, 22 nt, Human
aggcagcagugauaagauagga

SEQ ID NO: 853277 - RNA, 22 nt, Human
gaguagcagccacagaggaccc

SEQ ID NO: 853278 - RNA, 22 nt, Human
aaaggccaauaaagacaagcug

SEQ ID NO: 853279 - RNA, 23 nt, Human
cauggcugauuucaagcuaccac

SEQ ID NO: 853280 - RNA, 22 nt, Human
gagugcagaugccagccccagu

SEQ ID NO: 853281 - RNA, 23 nt, Human
cagggcugggcuugguguuaggc

SEQ ID NO: 853282 - RNA, 22 nt, Human
ugugcucuggaguugccuucac

SEQ ID NO: 853283 - RNA, 22 nt, Human
gcauguguugguuuaugcaugu

SEQ ID NO: 853284 - RNA, 22 nt, Human
cugcugugagcacuccagccug

SEQ ID NO: 853285 - RNA, 22 nt, Human
agcugcaggcccaugcucaguc

SEQ ID NO: 853286 - RNA, 19 nt, Human
agccuggcuuugcucugcu

SEQ ID NO: 853287 - RNA, 19 nt, Human
agggccugagcagauguug

SEQ ID NO: 853288 - RNA, 22 nt, Human
ucaggcugaaggaggccuaucu

SEQ ID NO: 853289 - RNA, 22 nt, Human
uggcugaguuucaugcaucaug

SEQ ID NO: 853290 - RNA, 22 nt, Human
uccaggaguccugggagugauu

SEQ ID NO: 853291 - RNA, 22 nt, Human
guauaagguauguaaacuauuu

SEQ ID NO: 853292 - RNA, 22 nt, Human
acagugaggacagggacugugu

SEQ ID NO: 853293 - RNA, 22 nt, Human
ggagagaauuccauggacaugu

SEQ ID NO: 853294 - RNA, 22 nt, Human
uuuaggauaacuccaguuuucc

SEQ ID NO: 853295 - RNA, 22 nt, Human
acugccucuuggugcugagaga

SEQ ID NO: 853296 - RNA, 22 nt, Human
ucauuuguggaagugauugugg

SEQ ID NO: 853297 - RNA, 22 nt, Human
uaugauuuguagacauuugauu

SEQ ID NO: 853298 - RNA, 22 nt, Human
auacacuuguacauuuuuuaau

SEQ ID NO: 853299 - RNA, 22 nt, Human
auuucauugaaguuaauucuuc

SEQ ID NO: 853300 - RNA, 22 nt, Human
uccugccuugccugggacauca

SEQ ID NO: 853301 - RNA, 22 nt, Human
auuaggaaacugaaugucagaa

SEQ ID NO: 853302 - RNA, 22 nt, Human
ucugaagccaccucugcuuguc

SEQ ID NO: 853303 - RNA, 22 nt, Human
uguguuauugccacugaagacc

SEQ ID NO: 853304 - RNA, 22 nt, Human
acuucaugcagaagagagcugu

SEQ ID NO: 853305 - RNA, 22 nt, Human
gaacugguuacagagggauguu

SEQ ID NO: 853306 - RNA, 22 nt, Human
uccaggaguccuggguggcccc

SEQ ID NO: 853307 - RNA, 22 nt, Human
uagugcagaggaggagccucug

SEQ ID NO: 853308 - RNA, 22 nt, Human
gcugccuuaugucuauuaguau

SEQ ID NO: 853309 - RNA, 19 nt, Human
ugcauaaauuauauacuuu

SEQ ID NO: 853310 - RNA, 22 nt, Human
gacuccuggcuuucccucuuag

SEQ ID NO: 853311 - RNA, 22 nt, Human
cucaggauuuacuaauuucaag

SEQ ID NO: 853312 - RNA, 22 nt, Human
gcccugagccuaugagccucuc

SEQ ID NO: 853313 - RNA, 22 nt, Human
aacaaaugaccugauuucuucc

SEQ ID NO: 853314 - RNA, 22 nt, Human
accuguuuuccuaucuagauug

SEQ ID NO: 853315 - RNA, 22 nt, Human
auuuggaagcuugaagauuauu

SEQ ID NO: 853316 - RNA, 22 nt, Human
agggcagccauugagggauucu

SEQ ID NO: 853317 - RNA, 22 nt, Human
gcagacauuuugaaucuaggcu

SEQ ID NO: 853318 - RNA, 21 nt, Human
agggagcuggccacacagccu

SEQ ID NO: 853319 - RNA, 22 nt, Human
agcaccuguugcacuucauaau

SEQ ID NO: 853320 - RNA, 22 nt, Human
agcaccaugaccuugccauuga

SEQ ID NO: 853321 - RNA, 20 nt, Human
ucagaugggagugagccauc

SEQ ID NO: 853322 - RNA, 21 nt, Human
uccugccuuaguccagagcag

SEQ ID NO: 853323 - RNA, 22 nt, Human
aucugccuggcuccaggugagc

SEQ ID NO: 853324 - RNA, 22 nt, Human
ccagagcugagggagccugagc

SEQ ID NO: 853325 - RNA, 22 nt, Human
uccaugucuucaugugucuaac

SEQ ID NO: 853326 - RNA, 17 nt, Human
ggaaaaggaugauacag

SEQ ID NO: 853327 - RNA, 22 nt, Human
uucaggaucaaguugccaguag

SEQ ID NO: 853328 - RNA, 22 nt, Human
acuccugguucccaguugagau

SEQ ID NO: 853329 - RNA, 22 nt, Human
gcugccagcuuuccuuggcuga

SEQ ID NO: 853330 - RNA, 22 nt, Human
ggucuaaaaugagucuuccuag

SEQ ID NO: 853331 - RNA, 22 nt, Human
augguaaccagaagacuaugac

SEQ ID NO: 853332 - RNA, 17 nt, Human
gucauucucagaaaaug

SEQ ID NO: 853333 - RNA, 22 nt, Human
cccaggaggcggagguuguggu

SEQ ID NO: 853334 - RNA, 20 nt, Human
gccaggagggugugaugagc

SEQ ID NO: 853335 - RNA, 22 nt, Human
augcugagugagugaaacccag

SEQ ID NO: 853336 - RNA, 22 nt, Human
uacugccuggagcauuggugcu

SEQ ID NO: 853337 - RNA, 22 nt, Human
agaggccaggcugcagagggau

SEQ ID NO: 853338 - RNA, 22 nt, Human
gcugcugugaauuuuuuaaaug

SEQ ID NO: 853339 - RNA, 22 nt, Human
agcagcauuaugauauaucuua

SEQ ID NO: 853340 - RNA, 22 nt, Human
gcugcagacugggaggcaggug

SEQ ID NO: 853341 - RNA, 22 nt, Human
ccuuuucuaaucuuaagaaugu

SEQ ID NO: 853342 - RNA, 22 nt, Human
ccuucuuaaacaucauuuuggc

SEQ ID NO: 853343 - RNA, 22 nt, Human
uuagccauuaauguccugugca

SEQ ID NO: 853344 - RNA, 22 nt, Human
cugccucucaggucccugagau

SEQ ID NO: 853345 - RNA, 22 nt, Human
caggcugccaaggcuggggagg

SEQ ID NO: 853346 - RNA, 22 nt, Human
caguucuuuguggggaguucuc

SEQ ID NO: 853347 - RNA, 22 nt, Human
uucuaauugaccuuaggcugug

SEQ ID NO: 853348 - RNA, 22 nt, Human
ccaugagccaggcugaggaagc

SEQ ID NO: 853349 - RNA, 22 nt, Human
gcuccuggugcuguagagauuu

SEQ ID NO: 853350 - RNA, 22 nt, Human
ugacaggugcugggggcagugu

SEQ ID NO: 853351 - RNA, 22 nt, Human
uucugggagagaaagggccuug

SEQ ID NO: 853352 - RNA, 20 nt, Human
uugaggucaaggacuaggcc

SEQ ID NO: 853353 - RNA, 22 nt, Human
ggacagguucagcaguuuauaa

SEQ ID NO: 853354 - RNA, 22 nt, Human
cacuggcccauuccugucuggc

SEQ ID NO: 853355 - RNA, 22 nt, Human
ggguacagagagaugagguaac

SEQ ID NO: 853356 - RNA, 22 nt, Human
agcaaaagauagauuaacaaga

SEQ ID NO: 853357 - RNA, 22 nt, Human
uauuauuauaguuauugggaag

SEQ ID NO: 853358 - RNA, 22 nt, Human
uuagauaaagugauguaggcua

SEQ ID NO: 853359 - RNA, 22 nt, Human
aaagcagaacugagagagcugg

SEQ ID NO: 853360 - RNA, 21 nt, Human
aggaggggucuuucccacuga

SEQ ID NO: 853361 - RNA, 22 nt, Human
caaauacucuggauguguuugu

SEQ ID NO: 853362 - RNA, 22 nt, Human
aagggcugcuguagaagcagag

SEQ ID NO: 853363 - RNA, 22 nt, Human
aggucugaguauggccugagaa

SEQ ID NO: 853364 - RNA, 22 nt, Human
uccuuagagacaagaccaguuu

SEQ ID NO: 853365 - RNA, 22 nt, Human
cuuccuucugaagcauagaagc

SEQ ID NO: 853366 - RNA, 20 nt, Human
gcugcucgcugcagucacuc

SEQ ID NO: 853367 - RNA, 22 nt, Human
uuagccauuaaauuacaaggug

SEQ ID NO: 853368 - RNA, 22 nt, Human
uauuuauucauucagcaagcau

SEQ ID NO: 853369 - RNA, 22 nt, Human
aaggcagcacagcaacugcuca

SEQ ID NO: 853370 - RNA, 22 nt, Human
ucuccuggauggaccuucucuu

SEQ ID NO: 853371 - RNA, 22 nt, Human
ccagaccacccuggccaugcac

SEQ ID NO: 853372 - RNA, 22 nt, Human
uacaugaagaaaauuaagcagu

SEQ ID NO: 853373 - RNA, 22 nt, Human
gugagguccauguuaauggguu

SEQ ID NO: 853374 - RNA, 22 nt, Human
cucuucuuauggccguggcuga

SEQ ID NO: 853375 - RNA, 21 nt, Human
gggucugaauaucuggugcug

SEQ ID NO: 853376 - RNA, 22 nt, Human
cuugcacacauguacaugugua

SEQ ID NO: 853377 - RNA, 22 nt, Human
cagcuguguaugagagcaugcu

SEQ ID NO: 853378 - RNA, 22 nt, Human
ccucaggauccgcaggugcagu

SEQ ID NO: 853379 - RNA, 22 nt, Human
aggagaggaaucauuauuacaa

SEQ ID NO: 853380 - RNA, 22 nt, Human
ugcccugguuacacuggagucc

SEQ ID NO: 853381 - RNA, 20 nt, Human
gcucagggccugggucugga

SEQ ID NO: 853382 - RNA, 22 nt, Human
uaggauuuggcuuuagucaggu

SEQ ID NO: 853383 - RNA, 22 nt, Human
agccacaggccaugagauacca

SEQ ID NO: 853384 - RNA, 22 nt, Human
agaccauggccauccuaggaaa

SEQ ID NO: 853385 - RNA, 22 nt, Human
cacugguaguuucagcaaccag

SEQ ID NO: 853386 - RNA, 22 nt, Human
ugcugaaacaauaacauacugg

SEQ ID NO: 853387 - RNA, 22 nt, Human
uacagcuaggcaaaaaugacau

SEQ ID NO: 853388 - RNA, 22 nt, Human
uuaguaggagagcuuguucauu

SEQ ID NO: 853389 - RNA, 22 nt, Human
guugaaaguggagaaccugguu

SEQ ID NO: 853390 - RNA, 22 nt, Human
uccaccaggcuccauguucagu

SEQ ID NO: 853391 - RNA, 15 nt, Human
ccaggcugggugagc

SEQ ID NO: 853392 - RNA, 22 nt, Human
ucuggccauggcaagccgagug

SEQ ID NO: 853393 - RNA, 18 nt, Human
uugcuuuguaagcuugca

SEQ ID NO: 853394 - RNA, 22 nt, Human
uuucccagagguaugaauaagu

SEQ ID NO: 853395 - RNA, 22 nt, Human
cccagcaguaaccaguggaaau

SEQ ID NO: 853396 - RNA, 22 nt, Human
uuucucuguucucuaacuguaa

SEQ ID NO: 853397 - RNA, 22 nt, Human
aggccagcuuccagaggggcag

SEQ ID NO: 853398 - RNA, 22 nt, Human
gcugaggcggaaggauugcuag

SEQ ID NO: 853399 - RNA, 22 nt, Human
cccaggaaaugaacuucugauu

SEQ ID NO: 853400 - RNA, 22 nt, Human
gcucacugcaaccucugcuucc

SEQ ID NO: 853401 - RNA, 22 nt, Human
ugaggcagaaaauagcaguuca

SEQ ID NO: 853402 - RNA, 22 nt, Human
aggcagcuaagauggauaauga

SEQ ID NO: 853403 - RNA, 21 nt, Human
uagggcaggcauuggaagaga

SEQ ID NO: 853404 - RNA, 22 nt, Human
uagugucaggagggaaaugcaa

SEQ ID NO: 853405 - RNA, 22 nt, Human
aaucauucuuauuucacagcaa

SEQ ID NO: 853406 - RNA, 22 nt, Human
aagcugagccaguggcaagugc

SEQ ID NO: 853407 - RNA, 22 nt, Human
uagcuguguaagcuugguaaga

SEQ ID NO: 853408 - RNA, 22 nt, Human
guauuagguuggugcaaaauug

SEQ ID NO: 853409 - RNA, 22 nt, Human
caggcagcagaggaguguggga

SEQ ID NO: 853410 - RNA, 22 nt, Human
ucagcuggaagauggugcagaa

SEQ ID NO: 853411 - RNA, 22 nt, Human
uuggaauucaaguuguagcuua

SEQ ID NO: 853412 - RNA, 22 nt, Human
uccaggagggauugggcugugg

SEQ ID NO: 853413 - RNA, 22 nt, Human
ucucaggaagugauauugagac

SEQ ID NO: 853414 - RNA, 22 nt, Human
ucauuauuuuggacuggagugu

SEQ ID NO: 853415 - RNA, 21 nt, Human
ugaggccugccagucucagaa

SEQ ID NO: 853416 - RNA, 22 nt, Human
accaggaguagaauaucuguga

SEQ ID NO: 853417 - RNA, 22 nt, Human
uuggccaagggcucuuuaggcu

SEQ ID NO: 853418 - RNA, 22 nt, Human
aaggcugauuagacugauagcu

SEQ ID NO: 853419 - RNA, 22 nt, Human
uuucuucacaggguauugggug

SEQ ID NO: 853420 - RNA, 22 nt, Human
ccuccuggaggcucuaagggag

SEQ ID NO: 853421 - RNA, 22 nt, Human
cuccaggaaagccugaggcccg

SEQ ID NO: 853422 - RNA, 22 nt, Human
gcuggagccuucugcucuguug

SEQ ID NO: 853423 - RNA, 22 nt, Human
ucacccuugauaauguucuucu

SEQ ID NO: 853424 - RNA, 22 nt, Human
uccaggagggguaggcaguaug

SEQ ID NO: 853425 - RNA, 22 nt, Human
uuugaaagcaggugugggaggg

SEQ ID NO: 853426 - RNA, 22 nt, Human
uuucuggcagcgggacaggggu

SEQ ID NO: 853427 - RNA, 22 nt, Human
cagaggcagccgggggagaacg

SEQ ID NO: 853428 - RNA, 22 nt, Human
cuccuggcuuucccagaccagg

SEQ ID NO: 853429 - RNA, 20 nt, Human
cucuccucacccgugucagg

SEQ ID NO: 853430 - RNA, 22 nt, Human
gcagagcuccccaagacaccaa

SEQ ID NO: 853431 - RNA, 22 nt, Human
ucugggaauuuauuggcacuuu

SEQ ID NO: 853432 - RNA, 22 nt, Human
gcugcugucacggugcuaaggg

SEQ ID NO: 853433 - RNA, 22 nt, Human
cuucugccccuguagccugagu

SEQ ID NO: 853434 - RNA, 22 nt, Human
aauuaggagaaaacuguugucu

SEQ ID NO: 853435 - RNA, 22 nt, Human
ugcauauuguccuugauauuau

SEQ ID NO: 853436 - RNA, 17 nt, Human
uuucaucugggaccacc

SEQ ID NO: 853437 - RNA, 22 nt, Human
cuggccagcugacagcagggcu

SEQ ID NO: 853438 - RNA, 22 nt, Human
ccaggagaaugggauuacccua

SEQ ID NO: 853439 - RNA, 22 nt, Human
gcuggcuguaucaccuggccag

SEQ ID NO: 853440 - RNA, 22 nt, Human
ucugcucagguuaccuagcuag

SEQ ID NO: 853441 - RNA, 22 nt, Human
uucucagauccaucagaagucc

SEQ ID NO: 853442 - RNA, 22 nt, Human
gaaauauuguacuggagauguu

SEQ ID NO: 853443 - RNA, 18 nt, Human
gccugccuagagcuugcc

SEQ ID NO: 853444 - RNA, 22 nt, Human
acacauauauacauauuugugc

SEQ ID NO: 853445 - RNA, 22 nt, Human
cugcugugccucuuuucacgug

SEQ ID NO: 853446 - RNA, 22 nt, Human
uuucauuuugguuaugccauaa

SEQ ID NO: 853447 - RNA, 22 nt, Human
ccacaggcugcugcaggucccg

SEQ ID NO: 853448 - RNA, 22 nt, Human
ucaggagacauucuuaaaguag

SEQ ID NO: 853449 - RNA, 22 nt, Human
aaguuacagucagagguuaaca

SEQ ID NO: 853450 - RNA, 22 nt, Human
cugaggccagcugcagagcucu

SEQ ID NO: 853451 - RNA, 22 nt, Human
uagaaaguaaaucaguuuuauu

SEQ ID NO: 853452 - RNA, 22 nt, Human
agugcagccgagaucaggugcu

SEQ ID NO: 853453 - RNA, 22 nt, Human
gugugcaggugucagugcagcu

SEQ ID NO: 853454 - RNA, 22 nt, Human
cagcuucugucugauuagcaag

SEQ ID NO: 853455 - RNA, 22 nt, Human
accaggagccacaggaggagcc

SEQ ID NO: 853456 - RNA, 22 nt, Human
ugcccacauggugccauggcca

SEQ ID NO: 853457 - RNA, 22 nt, Human
gcugcagguuugucuagucugg

SEQ ID NO: 853458 - RNA, 22 nt, Human
acaucugauuacaugagaauau

SEQ ID NO: 853459 - RNA, 22 nt, Human
ucugagcuucugcauuuccaac

SEQ ID NO: 853460 - RNA, 22 nt, Human
ccuggcugcccauggacccucu

SEQ ID NO: 853461 - RNA, 22 nt, Human
uugaggucccaaacccacugag

SEQ ID NO: 853462 - RNA, 23 nt, Human
auuucuaggggauuuucuggugc

SEQ ID NO: 853463 - RNA, 22 nt, Human
cagggcuguggcuuugugcugu

SEQ ID NO: 853464 - RNA, 22 nt, Human
ugcugaaaacucaaccauugug

SEQ ID NO: 853465 - RNA, 22 nt, Human
uuuuuggguccaggcuguaucu

SEQ ID NO: 853466 - RNA, 22 nt, Human
acaugcauacacguacauaccu

SEQ ID NO: 853467 - RNA, 22 nt, Human
ccucaggauacaggagccacag

SEQ ID NO: 853468 - RNA, 22 nt, Human
cugacuuuagaacccaaaaagu

SEQ ID NO: 853469 - RNA, 22 nt, Human
aacugcuggggaggccaaacuc

SEQ ID NO: 853470 - RNA, 22 nt, Human
auuugcuugugcuaugaaaguu

SEQ ID NO: 853471 - RNA, 22 nt, Human
uguuuuaaucucccauugcucu

SEQ ID NO: 853472 - RNA, 22 nt, Human
agaagcagcuuucaaggugauu

SEQ ID NO: 853473 - RNA, 22 nt, Human
cagacaggaauucuggcguggu

SEQ ID NO: 853474 - RNA, 22 nt, Human
ccugcugugaagccaggccugu

SEQ ID NO: 853475 - RNA, 22 nt, Human
ccucagaugucuuaaggcacug

SEQ ID NO: 853476 - RNA, 22 nt, Human
cuguuaaucugcuugcaugaug

SEQ ID NO: 853477 - RNA, 23 nt, Human
gcugagguccugcugaguggugg

SEQ ID NO: 853478 - RNA, 22 nt, Human
gcugcugccuguagccagggug

SEQ ID NO: 853479 - RNA, 22 nt, Human
ucagugugaggucuuccacccg

SEQ ID NO: 853480 - RNA, 22 nt, Human
aggcaggcaaccaccugggaag

SEQ ID NO: 853481 - RNA, 17 nt, Human
ugaaggccaugaccacg

SEQ ID NO: 853482 - RNA, 22 nt, Human
ucuggagaagcccagggagcug

SEQ ID NO: 853483 - RNA, 22 nt, Human
ucaggagacaaagggugcggag

SEQ ID NO: 853484 - RNA, 22 nt, Human
uccuggcccggccgggccugcu

SEQ ID NO: 853485 - RNA, 22 nt, Human
gucuccugagccuugacugcaa

SEQ ID NO: 853486 - RNA, 22 nt, Human
uauucaaaguaccuucauugcc

SEQ ID NO: 853487 - RNA, 22 nt, Human
auggccaagcuuacucuguugu

SEQ ID NO: 853488 - RNA, 22 nt, Human
cuggcccagagcucuggccuuu

SEQ ID NO: 853489 - RNA, 22 nt, Human
cagugaaaucacaacuuuaguu

SEQ ID NO: 853490 - RNA, 22 nt, Human
ggagugggaacaaugacauggu

SEQ ID NO: 853491 - RNA, 22 nt, Human
auuaaauuagcaaacugugaaa

SEQ ID NO: 853492 - RNA, 22 nt, Human
acugugugacuguuauuacugu

SEQ ID NO: 853493 - RNA, 22 nt, Human
ugcugcuggguuugacagucac

SEQ ID NO: 853494 - RNA, 22 nt, Human
cagucucagaggugggaguggg

SEQ ID NO: 853495 - RNA, 22 nt, Human
gcuggagccauuggcuuggccu

SEQ ID NO: 853496 - RNA, 22 nt, Human
ucuucacaugaccuucaugucu

SEQ ID NO: 853497 - RNA, 22 nt, Human
aaagcagauucugaugcaguag

SEQ ID NO: 853498 - RNA, 22 nt, Human
acaggcuguacuucuaaucauc

SEQ ID NO: 853499 - RNA, 22 nt, Human
acacaaaaucaaaguccuaggc

SEQ ID NO: 853500 - RNA, 22 nt, Human
gcagcuucaguaggugaagaca

SEQ ID NO: 853501 - RNA, 22 nt, Human
ucuccuggaagaauaccacacu

SEQ ID NO: 853502 - RNA, 22 nt, Human
aaacuccugcauacucagaagc

SEQ ID NO: 853503 - RNA, 22 nt, Human
caugcaggcccgccugaauggg

SEQ ID NO: 853504 - RNA, 22 nt, Human
agccacagagcaggagaccuuu

SEQ ID NO: 853505 - RNA, 22 nt, Human
acuccuggggcugccaucacag

SEQ ID NO: 853506 - RNA, 22 nt, Human
gugcauuugacgaauacucacu

SEQ ID NO: 853507 - RNA, 17 nt, Human
agauggcaggaggcaga

SEQ ID NO: 853508 - RNA, 22 nt, Human
uccauuuuagagaugaagaaac

SEQ ID NO: 853509 - RNA, 22 nt, Human
cuguuuauagcagagcaagccu

SEQ ID NO: 853510 - RNA, 22 nt, Human
caacuccuccccagcaugccaa

SEQ ID NO: 853511 - RNA, 22 nt, Human
cauacauuaccuaacuuaaugc

SEQ ID NO: 853512 - RNA, 20 nt, Human
agcaagaguaaggacagcga

SEQ ID NO: 853513 - RNA, 22 nt, Human
gcugcuggccccacaugcucca

SEQ ID NO: 853514 - RNA, 22 nt, Human
gcuggagguagggagguccugu

SEQ ID NO: 853515 - RNA, 22 nt, Human
cuugaucuacauagugaaaccc

SEQ ID NO: 853516 - RNA, 21 nt, Human
uggcugcacuguggcuuucau

SEQ ID NO: 853517 - RNA, 22 nt, Human
aucaggaucacugggagucuug

SEQ ID NO: 853518 - RNA, 22 nt, Human
uuuuagcacuaagugauaugcu

SEQ ID NO: 853519 - RNA, 22 nt, Human
acucuucuugcugcucauuaau

SEQ ID NO: 853520 - RNA, 22 nt, Human
cagcagaaaauaccuguaacuc

SEQ ID NO: 853521 - RNA, 22 nt, Human
auuauuagauucuuaauuguaa

SEQ ID NO: 853522 - RNA, 22 nt, Human
uugaauaggacucagcagugau

SEQ ID NO: 853523 - RNA, 22 nt, Human
uuauguagugacugacuguuag

SEQ ID NO: 853524 - RNA, 22 nt, Human
aggguagggcccggagacagac

SEQ ID NO: 853525 - RNA, 22 nt, Human
ggaugggagcagaggacgacca

SEQ ID NO: 853526 - RNA, 22 nt, Human
gacccuggagccgucugaggca

SEQ ID NO: 853527 - RNA, 22 nt, Human
acuaagugauucuaagcaucuu

SEQ ID NO: 853528 - RNA, 22 nt, Human
ugaggcaggaguucaggcugcg

SEQ ID NO: 853529 - RNA, 22 nt, Human
aggauaguugugaagauaggcu

SEQ ID NO: 853530 - RNA, 22 nt, Human
ccucaggggucacugugaggag

SEQ ID NO: 853531 - RNA, 22 nt, Human
auuuucaucauggguuuaacau

SEQ ID NO: 853532 - RNA, 22 nt, Human
auaagcauguuagaauauuuga

SEQ ID NO: 853533 - RNA, 20 nt, Human
uugagcuuuuaguacagaca

SEQ ID NO: 853534 - RNA, 22 nt, Human
ucuuugcagaauuuaacuuugc

SEQ ID NO: 853535 - RNA, 22 nt, Human
uuggcacagagcugcagccugg

SEQ ID NO: 853536 - RNA, 22 nt, Human
ggcagcuuucucacccaugacc

SEQ ID NO: 853537 - RNA, 22 nt, Human
cggcagcuccgcgccguaggac

SEQ ID NO: 853538 - RNA, 20 nt, Human
caguccaaucagaggccacc

SEQ ID NO: 853539 - RNA, 22 nt, Human
cugucauugagccugucagggc

SEQ ID NO: 853540 - RNA, 22 nt, Human
auauuucaugggguuccauacu

SEQ ID NO: 853541 - RNA, 22 nt, Human
uagauaaaagggcaaagggcau

SEQ ID NO: 853542 - RNA, 22 nt, Human
ucugccucuuucaggccuggca

SEQ ID NO: 853543 - RNA, 22 nt, Human
cagcaagacaaggaacaaacug

SEQ ID NO: 853544 - RNA, 22 nt, Human
gacuuucuguccagugauuucu

SEQ ID NO: 853545 - RNA, 22 nt, Human
uaguccaggaagguggggcaga

SEQ ID NO: 853546 - RNA, 22 nt, Human
aggcagcuggaggcagagacua

SEQ ID NO: 853547 - RNA, 22 nt, Human
cacaggcuugucagcaugaggc

SEQ ID NO: 853548 - RNA, 20 nt, Human
acugagcugcauggagagga

SEQ ID NO: 853549 - RNA, 22 nt, Human
gggcagcugcagggauggugac

SEQ ID NO: 853550 - RNA, 18 nt, Human
cugcugugucgucugggc

SEQ ID NO: 853551 - RNA, 18 nt, Human
guccacagauucuucacu

SEQ ID NO: 853552 - RNA, 22 nt, Human
caugcaggcacccagagcccac

SEQ ID NO: 853553 - RNA, 22 nt, Human
caaaauuagggagugagcugga

SEQ ID NO: 853554 - RNA, 22 nt, Human
aaggcugacucaacagggggcc

SEQ ID NO: 853555 - RNA, 22 nt, Human
auuuggaacuuauaauaaguuu

SEQ ID NO: 853556 - RNA, 22 nt, Human
cagaagaguagcugaacaaguu

SEQ ID NO: 853557 - RNA, 22 nt, Human
agugcuuugagcguuugaaaag

SEQ ID NO: 853558 - RNA, 22 nt, Human
ugucccucugaggcuucccugg

SEQ ID NO: 853559 - RNA, 22 nt, Human
uuugcagugauucuugcaguga

SEQ ID NO: 853560 - RNA, 22 nt, Human
aagagaggacauggugaaccug

SEQ ID NO: 853561 - RNA, 22 nt, Human
acuauacaguauguacgugcac

SEQ ID NO: 853562 - RNA, 22 nt, Human
ugaggcagugcugggaagccug

SEQ ID NO: 853563 - RNA, 22 nt, Human
agcccagggaaccaggaagugg

SEQ ID NO: 853564 - RNA, 21 nt, Human
agcugcagucaagccagaggu

SEQ ID NO: 853565 - RNA, 22 nt, Human
ucuccuggcauuugguugagua

SEQ ID NO: 853566 - RNA, 22 nt, Human
uugcaggauuuuagagaugaca

SEQ ID NO: 853567 - RNA, 22 nt, Human
aagcaagaguuggagugauguu

SEQ ID NO: 853568 - RNA, 22 nt, Human
aaggcaguagguguuucaaacu

SEQ ID NO: 853569 - RNA, 22 nt, Human
ccuugagccagggagcuggcag

SEQ ID NO: 853570 - RNA, 22 nt, Human
auucugaguccaugggggcagg

SEQ ID NO: 853571 - RNA, 22 nt, Human
aucugccucuucuucauugcga

SEQ ID NO: 853572 - RNA, 22 nt, Human
uuugacaucuaagaauucuuac

SEQ ID NO: 853573 - RNA, 22 nt, Human
cauaaaguaaagaugucuucca

SEQ ID NO: 853574 - RNA, 21 nt, Human
uggcagacuagaguauagaug

SEQ ID NO: 853575 - RNA, 22 nt, Human
uauugaugcuuggauugggcca

SEQ ID NO: 853576 - RNA, 22 nt, Human
augcugcagcugcaggaucaga

SEQ ID NO: 853577 - RNA, 22 nt, Human
ugcauggacucaucagacaaga

SEQ ID NO: 853578 - RNA, 22 nt, Human
gcugagagugggugcagugcuu

SEQ ID NO: 853579 - RNA, 18 nt, Human
ccugaggugggaggaagg

SEQ ID NO: 853580 - RNA, 22 nt, Human
gauuuuauuagcccaaacuuug

SEQ ID NO: 853581 - RNA, 22 nt, Human
cugaauuaauacacagaauggc

SEQ ID NO: 853582 - RNA, 23 nt, Human
ucugagguccaccaguuugcaga

SEQ ID NO: 853583 - RNA, 22 nt, Human
uggaaagcgaggaguuggcauu

SEQ ID NO: 853584 - RNA, 22 nt, Human
gccuggcuaguuagugucaggu

SEQ ID NO: 853585 - RNA, 22 nt, Human
ucugaggucagugcugcaguua

SEQ ID NO: 853586 - RNA, 22 nt, Human
uuuggaaaguugucacuuuaga

SEQ ID NO: 853587 - RNA, 22 nt, Human
gcacaauuauuuaugcaguaug

SEQ ID NO: 853588 - RNA, 22 nt, Human
ucauuuguacuugugugcuugu

SEQ ID NO: 853589 - RNA, 22 nt, Human
ccugggcaucucaugcaccugc

SEQ ID NO: 853590 - RNA, 22 nt, Human
aggugcugugcuaugcacuugu

SEQ ID NO: 853591 - RNA, 22 nt, Human
cucaggauugugccuagggaga

SEQ ID NO: 853592 - RNA, 20 nt, Human
cugcccagccacugagggau

SEQ ID NO: 853593 - RNA, 22 nt, Human
guggccaauaggagcagcuauc

SEQ ID NO: 853594 - RNA, 22 nt, Human
ucaggagauguaaccuuagcug

SEQ ID NO: 853595 - RNA, 22 nt, Human
uuuaaauaggacuccugggggu

SEQ ID NO: 853596 - RNA, 22 nt, Human
cagccuuugugaacaucaggug

SEQ ID NO: 853597 - RNA, 18 nt, Human
cugaggccaacuacacug

SEQ ID NO: 853598 - RNA, 22 nt, Human
caggaaaggugugucaugaugg

SEQ ID NO: 853599 - RNA, 22 nt, Human
ucacaucucccuggaggacaca

SEQ ID NO: 853600 - RNA, 22 nt, Human
ucucaguguguuuucucucaga

SEQ ID NO: 853601 - RNA, 22 nt, Human
uggcgcaacucauucauggugu

SEQ ID NO: 853602 - RNA, 22 nt, Human
gcuggagagauaggcauggggu

SEQ ID NO: 853603 - RNA, 19 nt, Human
guugaaaguaggugagggu

SEQ ID NO: 853604 - RNA, 22 nt, Human
aaauagcagccuuuaguuaaca

SEQ ID NO: 853605 - RNA, 22 nt, Human
gacugaggugcccagaggugac

SEQ ID NO: 853606 - RNA, 22 nt, Human
uaggauaugcauuuuuauacau

SEQ ID NO: 853607 - RNA, 22 nt, Human
gggcugagcacauacugacagc

SEQ ID NO: 853608 - RNA, 22 nt, Human
gucugucuguuguugagaagca

SEQ ID NO: 853609 - RNA, 22 nt, Human
auaagugacugcagggaauuca

SEQ ID NO: 853610 - RNA, 22 nt, Human
ugcccaggguuucuaagagcag

SEQ ID NO: 853611 - RNA, 22 nt, Human
ucagggaccaccacucacccag

SEQ ID NO: 853612 - RNA, 22 nt, Human
cagcaagaacagccugaugugc

SEQ ID NO: 853613 - RNA, 22 nt, Human
uccaaaguaauuucacuucugu

SEQ ID NO: 853614 - RNA, 22 nt, Human
aagggcuggaauaucucuuaga

SEQ ID NO: 853615 - RNA, 22 nt, Human
gaagcagcugccagagaugucu

SEQ ID NO: 853616 - RNA, 22 nt, Human
aaacugguaaucggcaagugag

SEQ ID NO: 853617 - RNA, 22 nt, Human
ucauuguuauguuuugcugucu

SEQ ID NO: 853618 - RNA, 22 nt, Human
aacauagagacaggaagugcuu

SEQ ID NO: 853619 - RNA, 22 nt, Human
gaaacugugaucguguucuggg

SEQ ID NO: 853620 - RNA, 22 nt, Human
aaucuuucccuauuaaaugugg

SEQ ID NO: 853621 - RNA, 22 nt, Human
caggcugauuaggccucgucca

SEQ ID NO: 853622 - RNA, 22 nt, Human
aggcuaagggaugacuggagug

SEQ ID NO: 853623 - RNA, 22 nt, Human
acucugggcuuugauuuguuac

SEQ ID NO: 853624 - RNA, 22 nt, Human
ggaggagggguuuacauuggaa

SEQ ID NO: 853625 - RNA, 22 nt, Human
caggaugggauguagugggccc

SEQ ID NO: 853626 - RNA, 22 nt, Human
acgagagguccuuagaaucugu

SEQ ID NO: 853627 - RNA, 22 nt, Human
gcaagcugaugugauagugaaa

SEQ ID NO: 853628 - RNA, 22 nt, Human
gcugcagggagcuggaaggcuc

SEQ ID NO: 853629 - RNA, 22 nt, Human
agcacagguacggagaugcuac

SEQ ID NO: 853630 - RNA, 22 nt, Human
ugcugcuggaucuuacucaucu

SEQ ID NO: 853631 - RNA, 22 nt, Human
uaggaaaugcuccauugcauaa

SEQ ID NO: 853632 - RNA, 23 nt, Human
uggcaaggaaugggauggagacu

SEQ ID NO: 853633 - RNA, 22 nt, Human
cccaugagguggagguugcagu

SEQ ID NO: 853634 - RNA, 22 nt, Human
gugaauuaaauauagccagguc

SEQ ID NO: 853635 - RNA, 22 nt, Human
auguuuccagguucuuccuaug

SEQ ID NO: 853636 - RNA, 20 nt, Human
guauuagguguuccucuuuc

SEQ ID NO: 853637 - RNA, 22 nt, Human
aagggcuguaagccaaguaaag

SEQ ID NO: 853638 - RNA, 22 nt, Human
acaggcugagcguccaucuuca

SEQ ID NO: 853639 - RNA, 22 nt, Human
aggcuggaguacaguggcuauu

SEQ ID NO: 853640 - RNA, 22 nt, Human
gucuucuguaagaugagguccc

SEQ ID NO: 853641 - RNA, 22 nt, Human
uaacuguaguuauaaagcuauc

SEQ ID NO: 853642 - RNA, 22 nt, Human
uuggccaaggucacugggugag

SEQ ID NO: 853643 - RNA, 22 nt, Human
ucucuucuauuugagacuauuu

SEQ ID NO: 853644 - RNA, 22 nt, Human
accaggagucuagccuagucaa

SEQ ID NO: 853645 - RNA, 17 nt, Human
uucucugagcuguauug

SEQ ID NO: 853646 - RNA, 21 nt, Human
auuuggcaaaggcgaugcaca

SEQ ID NO: 853647 - RNA, 22 nt, Human
aggaaacuccccuacaucucaa

SEQ ID NO: 853648 - RNA, 22 nt, Human
gaggcuccgugcugcugcccug

SEQ ID NO: 853649 - RNA, 22 nt, Human
uggcagcuccuggggccagcac

SEQ ID NO: 853650 - RNA, 22 nt, Human
uaggcugagcuuguagaucgua

SEQ ID NO: 853651 - RNA, 22 nt, Human
gcucaggacuggaggagcgggg

SEQ ID NO: 853652 - RNA, 22 nt, Human
auggccaaagccacagcagagg

SEQ ID NO: 853653 - RNA, 22 nt, Human
uucugugaaucuuuuuucccac

SEQ ID NO: 853654 - RNA, 22 nt, Human
aaacauuugcaacucgguuugg

SEQ ID NO: 853655 - RNA, 22 nt, Human
aguucuuuugugaacauaugcu

SEQ ID NO: 853656 - RNA, 19 nt, Human
uggcagggagaguuugaag

SEQ ID NO: 853657 - RNA, 22 nt, Human
uauuuccauguuagaacuaagu

SEQ ID NO: 853658 - RNA, 21 nt, Human
acagcaagccuucacaugagu

SEQ ID NO: 853659 - RNA, 22 nt, Human
uggcaaggcugugggggcagag

SEQ ID NO: 853660 - RNA, 22 nt, Human
uccuggccagaggacaaagcug

SEQ ID NO: 853661 - RNA, 22 nt, Human
ccaggagagcagaagcccaggc

SEQ ID NO: 853662 - RNA, 22 nt, Human
gucaggaugacaagugcuuuca

SEQ ID NO: 853663 - RNA, 22 nt, Human
gcagaagucagaccaucugaau

SEQ ID NO: 853664 - RNA, 22 nt, Human
auggaaagugcauggaagucau

SEQ ID NO: 853665 - RNA, 22 nt, Human
ucugagguugaacuuugcaaag

SEQ ID NO: 853666 - RNA, 20 nt, Human
agcugccccugggcacugcc

SEQ ID NO: 853667 - RNA, 22 nt, Human
ucaggcugggagacaaucacug

SEQ ID NO: 853668 - RNA, 19 nt, Human
uuacacuucugcuuuguga

SEQ ID NO: 853669 - RNA, 22 nt, Human
aggguccugggugcaguugcuu

SEQ ID NO: 853670 - RNA, 22 nt, Human
uucuucuccuaaggagaguccu

SEQ ID NO: 853671 - RNA, 22 nt, Human
uuugacaucaauacccuagaau

SEQ ID NO: 853672 - RNA, 22 nt, Human
cagggcugaagaaauucaaaag

SEQ ID NO: 853673 - RNA, 21 nt, Human
uggccaaaaccauauuauuaa

SEQ ID NO: 853674 - RNA, 22 nt, Human
uaggaaauauuugaacauagga

SEQ ID NO: 853675 - RNA, 22 nt, Human
uaggauaggauggagacagaau

SEQ ID NO: 853676 - RNA, 22 nt, Human
caggguggggaaauagcgcccu

SEQ ID NO: 853677 - RNA, 22 nt, Human
ugaggcagccugcauuaaagag

SEQ ID NO: 853678 - RNA, 22 nt, Human
cuuugcaaacgauuaccacaug

SEQ ID NO: 853679 - RNA, 22 nt, Human
ggagcccugcccuaggcagcuc

SEQ ID NO: 853680 - RNA, 22 nt, Human
uaggcugagguugaugccaggg

SEQ ID NO: 853681 - RNA, 22 nt, Human
ccaggcugugguuuagauagag

SEQ ID NO: 853682 - RNA, 22 nt, Human
acuggccaggcagcaguagcuu

SEQ ID NO: 853683 - RNA, 22 nt, Human
uacuaggaagcagcugcauugg

SEQ ID NO: 853684 - RNA, 22 nt, Human
ugaaggaaugaguauacuguuu

SEQ ID NO: 853685 - RNA, 22 nt, Human
cuggaguuagaguagacacuga

SEQ ID NO: 853686 - RNA, 21 nt, Human
auguaggguuugccuucucua

SEQ ID NO: 853687 - RNA, 22 nt, Human
aaaaaugucauuauggaacuga

SEQ ID NO: 853688 - RNA, 22 nt, Human
ucuggccacuugcuucacacug

SEQ ID NO: 853689 - RNA, 22 nt, Human
agcccuggcagagccagguagu

SEQ ID NO: 853690 - RNA, 19 nt, Human
cagcaagaaugaaggcaua

SEQ ID NO: 853691 - RNA, 22 nt, Human
guucuucaucauuuuagauagg

SEQ ID NO: 853692 - RNA, 22 nt, Human
ucugcaggcuguacaggaagca

SEQ ID NO: 853693 - RNA, 22 nt, Human
acugagguugaaauagugaugu

SEQ ID NO: 853694 - RNA, 22 nt, Human
cagaaccaggaacugauggaga

SEQ ID NO: 853695 - RNA, 22 nt, Human
aaggcagccauagcaccaucca

SEQ ID NO: 853696 - RNA, 22 nt, Human
caaauguauaaauguacuuucu

SEQ ID NO: 853697 - RNA, 22 nt, Human
gcccaggaguugaaugcagcag

SEQ ID NO: 853698 - RNA, 22 nt, Human
ugucuuuggaauauuuagcuga

SEQ ID NO: 853699 - RNA, 19 nt, Human
aaaaacuuaguccagaaag

SEQ ID NO: 853700 - RNA, 21 nt, Human
ugauacaggaaugguucuaug

SEQ ID NO: 853701 - RNA, 22 nt, Human
ucagauggcacacagagccugc

SEQ ID NO: 853702 - RNA, 22 nt, Human
aguuagaauggauguugagagc

SEQ ID NO: 853703 - RNA, 22 nt, Human
cacugguagagagaagacaagg

SEQ ID NO: 853704 - RNA, 22 nt, Human
aacagccucagugagauuagga

SEQ ID NO: 853705 - RNA, 22 nt, Human
gcuccuggcauccugcuuuuaa

SEQ ID NO: 853706 - RNA, 20 nt, Human
ccuuuauuauuuguaugaug

SEQ ID NO: 853707 - RNA, 22 nt, Human
aaguguauauaugacuuauaaa

SEQ ID NO: 853708 - RNA, 22 nt, Human
gagggcugaugcuuacuuauuu

SEQ ID NO: 853709 - RNA, 22 nt, Human
gucacaaaggugagggacauga

SEQ ID NO: 853710 - RNA, 22 nt, Human
guuauuagaagugaaggauugu

SEQ ID NO: 853711 - RNA, 22 nt, Human
uuauuuaaaagugguaagauuc

SEQ ID NO: 853712 - RNA, 22 nt, Human
gccaccagggggugcaaggucc

SEQ ID NO: 853713 - RNA, 22 nt, Human
uggcugagugauauuugcaaag

SEQ ID NO: 853714 - RNA, 19 nt, Human
ugugaaagcuaguguucuu

SEQ ID NO: 853715 - RNA, 22 nt, Human
gcugaagggagugcugagucug

SEQ ID NO: 853716 - RNA, 22 nt, Human
uccuggccaggaugaccuaaca

SEQ ID NO: 853717 - RNA, 22 nt, Human
uccacauccauugcuugacuuu

SEQ ID NO: 853718 - RNA, 20 nt, Human
ggcaggcuuuauauggaggg

SEQ ID NO: 853719 - RNA, 22 nt, Human
cagacagggaccucgcuccaga

SEQ ID NO: 853720 - RNA, 22 nt, Human
cccaggaacuccagagcuccuc

SEQ ID NO: 853721 - RNA, 22 nt, Human
aaggcugaaagaccuugaaccu

SEQ ID NO: 853722 - RNA, 22 nt, Human
gaggcaccucgcgggaggaggc

SEQ ID NO: 853723 - RNA, 22 nt, Human
gagggcugauaacaggaauaca

SEQ ID NO: 853724 - RNA, 22 nt, Human
gucacuguuuccuauuauauuu

SEQ ID NO: 853725 - RNA, 22 nt, Human
aggcugagagcaacgugucaga

SEQ ID NO: 853726 - RNA, 22 nt, Human
auuuggaacaaauauuaguaaa

SEQ ID NO: 853727 - RNA, 22 nt, Human
cccuccccacaaagcuucacac

SEQ ID NO: 853728 - RNA, 22 nt, Human
uugagaagaggcuuuguaggaa

SEQ ID NO: 853729 - RNA, 19 nt, Human
agcagcuggagguggagug

SEQ ID NO: 853730 - RNA, 23 nt, Human
uaugaacugcauugcuggugugu

SEQ ID NO: 853731 - RNA, 22 nt, Human
gcugcugugccuggcguccugu

SEQ ID NO: 853732 - RNA, 22 nt, Human
aucauucugauggucaaugcua

SEQ ID NO: 853733 - RNA, 17 nt, Human
caguuggagacaagucc

SEQ ID NO: 853734 - RNA, 22 nt, Human
uugauacaggcucuauuucauc

SEQ ID NO: 853735 - RNA, 22 nt, Human
cuggccaaugccuggggaauag

SEQ ID NO: 853736 - RNA, 22 nt, Human
ucaggcuguggcuuugaccgca

SEQ ID NO: 853737 - RNA, 22 nt, Human
ucuccuggaagugauuccccug

SEQ ID NO: 853738 - RNA, 22 nt, Human
agucugucugucacuucugcag

SEQ ID NO: 853739 - RNA, 22 nt, Human
caggguggcacaucacagcauu

SEQ ID NO: 853740 - RNA, 19 nt, Human
gugcuuuuuaagagcucag

SEQ ID NO: 853741 - RNA, 22 nt, Human
aggccaaauguguauaaaacau

SEQ ID NO: 853742 - RNA, 22 nt, Human
acacuaguauuucuauaaguga

SEQ ID NO: 853743 - RNA, 22 nt, Human
gacuuuauuuccuuauuuguga

SEQ ID NO: 853744 - RNA, 22 nt, Human
aauuuuaaucaguggugcugag

SEQ ID NO: 853745 - RNA, 22 nt, Human
acccaggauaaucuguguaucu

SEQ ID NO: 853746 - RNA, 22 nt, Human
caggccugagacaucugagaua

SEQ ID NO: 853747 - RNA, 22 nt, Human
cauugcuuccuaugucccuucu

SEQ ID NO: 853748 - RNA, 18 nt, Human
uguuaggaagggcacaca

SEQ ID NO: 853749 - RNA, 22 nt, Human
aagcagcuggaagaguaagaug

SEQ ID NO: 853750 - RNA, 22 nt, Human
cucuucuugucucugguuagaa

SEQ ID NO: 853751 - RNA, 22 nt, Human
cugagcugggacucaguagcaa

SEQ ID NO: 853752 - RNA, 22 nt, Human
cccaggagagagacuugaaucu

SEQ ID NO: 853753 - RNA, 20 nt, Human
gucaggauuaguaaacucug

SEQ ID NO: 853754 - RNA, 22 nt, Human
caaggccaugagcagcgagugu

SEQ ID NO: 853755 - RNA, 22 nt, Human
uaacuguaccuagauaacgaac

SEQ ID NO: 853756 - RNA, 22 nt, Human
uucauuaguucugaagaugucu

SEQ ID NO: 853757 - RNA, 22 nt, Human
ugagacaguuuuucuauuucca

SEQ ID NO: 853758 - RNA, 22 nt, Human
ucccugcccucagugcacccgg

SEQ ID NO: 853759 - RNA, 22 nt, Human
ugcuucagugcucugagccugu

SEQ ID NO: 853760 - RNA, 22 nt, Human
agcacauucugccuugcuuugc

SEQ ID NO: 853761 - RNA, 22 nt, Human
acacaguauugugacuauaacu

SEQ ID NO: 853762 - RNA, 22 nt, Human
uuuccagagcaugucugcucag

SEQ ID NO: 853763 - RNA, 22 nt, Human
agucucuuauucccuauugcug

SEQ ID NO: 853764 - RNA, 22 nt, Human
guugaaagcuuuucauuuaguu

SEQ ID NO: 853765 - RNA, 22 nt, Human
uguaaucauuacaguacaugga

SEQ ID NO: 853766 - RNA, 22 nt, Human
cagagggaaaaggggaguaaua

SEQ ID NO: 853767 - RNA, 22 nt, Human
aggaagcuaaccagggagugag

SEQ ID NO: 853768 - RNA, 22 nt, Human
auguuucaccagcaaauuaccu

SEQ ID NO: 853769 - RNA, 23 nt, Human
agggccuggcguggagugugugc

SEQ ID NO: 853770 - RNA, 22 nt, Human
ggcugcagaggcccccaguggg

SEQ ID NO: 853771 - RNA, 22 nt, Human
ucaggcuguggcuucaguucuu

SEQ ID NO: 853772 - RNA, 22 nt, Human
aaugucugccagaacugaucau

SEQ ID NO: 853773 - RNA, 22 nt, Human
auuucacucauucauguuacuu

SEQ ID NO: 853774 - RNA, 22 nt, Human
uugcagcuucgagucuaucugu

SEQ ID NO: 853775 - RNA, 22 nt, Human
gaggcugaacagguucucauga

SEQ ID NO: 853776 - RNA, 22 nt, Human
cauauauucugguuuucacugg

SEQ ID NO: 853777 - RNA, 22 nt, Human
acugagguggggucugcuugga

SEQ ID NO: 853778 - RNA, 22 nt, Human
uagaacugacguuagggaagaa

SEQ ID NO: 853779 - RNA, 22 nt, Human
acauugcugcauucuccuuccc

SEQ ID NO: 853780 - RNA, 22 nt, Human
ucuacugcacuggugucucauc

SEQ ID NO: 853781 - RNA, 22 nt, Human
cugcugugucagaguccagggg

SEQ ID NO: 853782 - RNA, 22 nt, Human
uagugcuuggcccuaccagaua

SEQ ID NO: 853783 - RNA, 22 nt, Human
gcuuuggaugugugccugaggu

SEQ ID NO: 853784 - RNA, 22 nt, Human
ugcuugaaagggguuucccagu

SEQ ID NO: 853785 - RNA, 18 nt, Human
cugcuugggagacgucag

SEQ ID NO: 853786 - RNA, 22 nt, Human
gaccuggaggauccucuucuug

SEQ ID NO: 853787 - RNA, 22 nt, Human
agagcagcuggggcagagacca

SEQ ID NO: 853788 - RNA, 22 nt, Human
aggcagcugaggucuggcgccc

SEQ ID NO: 853789 - RNA, 22 nt, Human
cugugauuguuaguuccuauac

SEQ ID NO: 853790 - RNA, 22 nt, Human
acugaggucagggguaugugau

SEQ ID NO: 853791 - RNA, 22 nt, Human
agcaccugucacaagcagaagg

SEQ ID NO: 853792 - RNA, 19 nt, Human
ccuggccagacuucugccc

SEQ ID NO: 853793 - RNA, 22 nt, Human
uagcacauuguugaccagaagg

SEQ ID NO: 853794 - RNA, 22 nt, Human
auguuauuaaaguacagauucu

SEQ ID NO: 853795 - RNA, 22 nt, Human
auuguucaaagugcuuugcaug

SEQ ID NO: 853796 - RNA, 22 nt, Human
caacugguaaucuccacgguca

SEQ ID NO: 853797 - RNA, 22 nt, Human
uuuaaauggcauuuucccagau

SEQ ID NO: 853798 - RNA, 22 nt, Human
gacuuucucuccucccaggugu

SEQ ID NO: 853799 - RNA, 22 nt, Human
uucacagacauugcagacugaa

SEQ ID NO: 853800 - RNA, 22 nt, Human
ccuguuuaucuaucuagagaug

SEQ ID NO: 853801 - RNA, 22 nt, Human
ugccccagaccuacugaauggg

SEQ ID NO: 853802 - RNA, 22 nt, Human
uccaggaguggggcagaggucu

SEQ ID NO: 853803 - RNA, 22 nt, Human
gaacuggugaagugaagggcag

SEQ ID NO: 853804 - RNA, 22 nt, Human
gugacaguggucacuuguaguu

SEQ ID NO: 853805 - RNA, 22 nt, Human
ugccugggccuucccaccucug

SEQ ID NO: 853806 - RNA, 22 nt, Human
ugaggcaggaguuaaugugcuc

SEQ ID NO: 853807 - RNA, 22 nt, Human
acccaggagccgugagagguua

SEQ ID NO: 853808 - RNA, 22 nt, Human
cggcugagacggccauagacac

SEQ ID NO: 853809 - RNA, 20 nt, Human
ugccccaggccugcaccugc

SEQ ID NO: 853810 - RNA, 23 nt, Human
aguaaagcaauuguuggcgagag

SEQ ID NO: 853811 - RNA, 22 nt, Human
agcugguaaguggcagagauuc

SEQ ID NO: 853812 - RNA, 22 nt, Human
uugaaauacugcauuguucagu

SEQ ID NO: 853813 - RNA, 22 nt, Human
uaaauacuuaguuuugugucua

SEQ ID NO: 853814 - RNA, 22 nt, Human
cacaauguauauguauaucaaa

SEQ ID NO: 853815 - RNA, 22 nt, Human
uuagaaaacauaagugguaaag

SEQ ID NO: 853816 - RNA, 22 nt, Human
cugcuguguuagcagguuuagu

SEQ ID NO: 853817 - RNA, 23 nt, Human
gcugagguacauuuacaggaaga

SEQ ID NO: 853818 - RNA, 22 nt, Human
uaaggccaggcuguggucggca

SEQ ID NO: 853819 - RNA, 22 nt, Human
acuguugucaggcugcuuugga

SEQ ID NO: 853820 - RNA, 22 nt, Human
cuuaagauuugcgauaccuaau

SEQ ID NO: 853821 - RNA, 22 nt, Human
gaaauacugcacacccuguaag

SEQ ID NO: 853822 - RNA, 22 nt, Human
ucugggagccaugccuuggagu

SEQ ID NO: 853823 - RNA, 22 nt, Human
uaugacuuuggaaaaauuacuu

SEQ ID NO: 853824 - RNA, 22 nt, Human
ucugugccucaucugguucagg

SEQ ID NO: 853825 - RNA, 22 nt, Human
ccuugcugaccaucaccuuuga

SEQ ID NO: 853826 - RNA, 17 nt, Human
ugaggcucggugaggag

SEQ ID NO: 853827 - RNA, 22 nt, Human
agcaagauuuaaacccagguca

SEQ ID NO: 853828 - RNA, 22 nt, Human
uuagcagcuaaacugacagacc

SEQ ID NO: 853829 - RNA, 23 nt, Human
uacaugcuauaauuucacccuca

SEQ ID NO: 853830 - RNA, 22 nt, Human
auaaaaguaggaccaacuuaca

SEQ ID NO: 853831 - RNA, 19 nt, Human
uagaacugaggacuugcau

SEQ ID NO: 853832 - RNA, 22 nt, Human
auuaaauuuucacuaggcuccc

SEQ ID NO: 853833 - RNA, 22 nt, Human
ggaggggagguccagcugaucu

SEQ ID NO: 853834 - RNA, 22 nt, Human
augugucuuugagacucugcua

SEQ ID NO: 853835 - RNA, 22 nt, Human
gacugagggacagggcagugga

SEQ ID NO: 853836 - RNA, 22 nt, Human
agcagaggaggauuuaguuagg

SEQ ID NO: 853837 - RNA, 22 nt, Human
ucucaggaauagaguggcagca

SEQ ID NO: 853838 - RNA, 22 nt, Human
uccaugagcuagggauucauca

SEQ ID NO: 853839 - RNA, 20 nt, Human
cugcugugugugccucagcc

SEQ ID NO: 853840 - RNA, 22 nt, Human
gacugagggauagaggugcuuc

SEQ ID NO: 853841 - RNA, 22 nt, Human
uugcauuugacaaauuauuuaa

SEQ ID NO: 853842 - RNA, 22 nt, Human
ucugaacuccagcccugcucuc

SEQ ID NO: 853843 - RNA, 22 nt, Human
ucccagggcucuagagugcugg

SEQ ID NO: 853844 - RNA, 22 nt, Human
cagaggauucccuagugaccug

SEQ ID NO: 853845 - RNA, 22 nt, Human
cugcugugugaccauggacagg

SEQ ID NO: 853846 - RNA, 22 nt, Human
ucaguagcagaaagcaaugagu

SEQ ID NO: 853847 - RNA, 22 nt, Human
gagagaggccuccauguacuga

SEQ ID NO: 853848 - RNA, 22 nt, Human
aagggcuggaucucucugagca

SEQ ID NO: 853849 - RNA, 22 nt, Human
uacaucuauacugaucuacauu

SEQ ID NO: 853850 - RNA, 20 nt, Human
gaggcccagagaggugaagc

SEQ ID NO: 853851 - RNA, 22 nt, Human
acagugacguuuauuugagacg

SEQ ID NO: 853852 - RNA, 20 nt, Human
auaaaauaacugccacaaga

SEQ ID NO: 853853 - RNA, 21 nt, Human
uguuacaguccaaauguuugu

SEQ ID NO: 853854 - RNA, 19 nt, Human
aaggcagcaguagcaucca

SEQ ID NO: 853855 - RNA, 22 nt, Human
cccugguguggaugugauuggc

SEQ ID NO: 853856 - RNA, 22 nt, Human
aucuuucuccauauacaucuuu

SEQ ID NO: 853857 - RNA, 22 nt, Human
aggcugagcugaccugguuugg

SEQ ID NO: 853858 - RNA, 22 nt, Human
agaggcaguauacaauccgagc

SEQ ID NO: 853859 - RNA, 22 nt, Human
cugagagccuccuguuggcuag

SEQ ID NO: 853860 - RNA, 22 nt, Human
ggcagacuguaauaggagaauu

SEQ ID NO: 853861 - RNA, 22 nt, Human
ugcaggugucuccagggcaggu

SEQ ID NO: 853862 - RNA, 22 nt, Human
auucuucacauaagugcuguac

SEQ ID NO: 853863 - RNA, 22 nt, Human
cuauuagguaugcagccuauuu

SEQ ID NO: 853864 - RNA, 22 nt, Human
ggcacagagcccagcuuccuag

SEQ ID NO: 853865 - RNA, 22 nt, Human
aggucagcaggccaggggcgaa

SEQ ID NO: 853866 - RNA, 22 nt, Human
uugaaaggaauacagaggccua

SEQ ID NO: 853867 - RNA, 22 nt, Human
ucugagccagccaccuccuuca

SEQ ID NO: 853868 - RNA, 22 nt, Human
uuugaaguguuauuucuaucac

SEQ ID NO: 853869 - RNA, 22 nt, Human
ggcagccaugcuccaggugcag

SEQ ID NO: 853870 - RNA, 22 nt, Human
ggauuugggcuugcagcagagc

SEQ ID NO: 853871 - RNA, 22 nt, Human
cagggcugaacugagcuuguga

SEQ ID NO: 853872 - RNA, 22 nt, Human
agcuucuuggcucagcacuugg

SEQ ID NO: 853873 - RNA, 22 nt, Human
gcuaugcaggagccuaaugaca

SEQ ID NO: 853874 - RNA, 20 nt, Human
auuuggcaugaaguauugau

SEQ ID NO: 853875 - RNA, 22 nt, Human
gcuguagauggacuggcaucca

SEQ ID NO: 853876 - RNA, 22 nt, Human
ccugguggagaggggcggagcg

SEQ ID NO: 853877 - RNA, 22 nt, Human
agugcuuuagagaaauggugcu

SEQ ID NO: 853878 - RNA, 22 nt, Human
uaggaaauuagaacuuggaaac

SEQ ID NO: 853879 - RNA, 22 nt, Human
aaaauaacuucuacuauuugca

SEQ ID NO: 853880 - RNA, 22 nt, Human
gcuguggucugugagcuccaaa

SEQ ID NO: 853881 - RNA, 22 nt, Human
ucaggagagaaagaauacaauu

SEQ ID NO: 853882 - RNA, 22 nt, Human
ugaggcagggaguuuaauuguc

SEQ ID NO: 853883 - RNA, 22 nt, Human
uucaggauggaguaccuuuuau

SEQ ID NO: 853884 - RNA, 22 nt, Human
ggagugucagaaacaguguccu

SEQ ID NO: 853885 - RNA, 22 nt, Human
cuccugggcucaagugauccuc

SEQ ID NO: 853886 - RNA, 22 nt, Human
acccaggagacagguugcagug

SEQ ID NO: 853887 - RNA, 22 nt, Human
agcuagaauguuccuuuucauu

SEQ ID NO: 853888 - RNA, 22 nt, Human
ucuuuguaacugucuauugaga

SEQ ID NO: 853889 - RNA, 22 nt, Human
cccaggaggcagaaguugcagu

SEQ ID NO: 853890 - RNA, 22 nt, Human
uauguguuugacacccugcaag

SEQ ID NO: 853891 - RNA, 22 nt, Human
guuuucugauuagcaaaucuga

SEQ ID NO: 853892 - RNA, 22 nt, Human
agggccugucagcgguguccug

SEQ ID NO: 853893 - RNA, 22 nt, Human
uugagaagaaauaguuugcaau

SEQ ID NO: 853894 - RNA, 20 nt, Human
uucacagaggacucagguca

SEQ ID NO: 853895 - RNA, 22 nt, Human
agugcugucaguuuuauagaua

SEQ ID NO: 853896 - RNA, 22 nt, Human
aaaagucugcucucauuucaga

SEQ ID NO: 853897 - RNA, 22 nt, Human
cccagggaagccauuucugacu

SEQ ID NO: 853898 - RNA, 22 nt, Human
uguguucuggaaagcucacuga

SEQ ID NO: 853899 - RNA, 22 nt, Human
uucccucuccuacucaggaaag

SEQ ID NO: 853900 - RNA, 21 nt, Human
gcuggcuggcugaccggccuu

SEQ ID NO: 853901 - RNA, 23 nt, Human
caguggagacucaugcuuccuua

SEQ ID NO: 853902 - RNA, 22 nt, Human
ccuccugggagagcacggaggg

SEQ ID NO: 853903 - RNA, 22 nt, Human
uuugcaguagacaucuuauuuu

SEQ ID NO: 853904 - RNA, 22 nt, Human
ucaggaugguccuuuaugagaa

SEQ ID NO: 853905 - RNA, 22 nt, Human
cuucucagaucucagcuuugag

SEQ ID NO: 853906 - RNA, 22 nt, Human
cuguaacuuagcaugguuacua

SEQ ID NO: 853907 - RNA, 22 nt, Human
uuauagaaggagcauucacuua

SEQ ID NO: 853908 - RNA, 22 nt, Human
cauuuuauccucugggaagcua

SEQ ID NO: 853909 - RNA, 22 nt, Human
accuuuuuguucuguucucagc

SEQ ID NO: 853910 - RNA, 22 nt, Human
uucuagaugauaaaccagcagc

SEQ ID NO: 853911 - RNA, 22 nt, Human
gcagcugagcgugaggaagagu

SEQ ID NO: 853912 - RNA, 22 nt, Human
uggcaacaccuggaagacaugg

SEQ ID NO: 853913 - RNA, 22 nt, Human
ugagcagauggaggcuucugca

SEQ ID NO: 853914 - RNA, 22 nt, Human
uugguuuagagagugugguuac

SEQ ID NO: 853915 - RNA, 22 nt, Human
acccagagcugggcuuggcaaa

SEQ ID NO: 853916 - RNA, 22 nt, Human
uguuuuaaagccauugccuuuc

SEQ ID NO: 853917 - RNA, 22 nt, Human
uaaggccaaguucauauacaac

SEQ ID NO: 853918 - RNA, 23 nt, Human
uggcugagcccacuaucuuggcc

SEQ ID NO: 853919 - RNA, 18 nt, Human
aagaaguuggccaaagag

SEQ ID NO: 853920 - RNA, 22 nt, Human
gagcacugauuuauuuuugucu

SEQ ID NO: 853921 - RNA, 21 nt, Human
ucacuagugccuucugucauu

SEQ ID NO: 853922 - RNA, 22 nt, Human
ucuccugggaggacaaggaagg

SEQ ID NO: 853923 - RNA, 22 nt, Human
uccaacuuucuccuccggcuug

SEQ ID NO: 853924 - RNA, 22 nt, Human
agugagaguauuaaugugaacu

SEQ ID NO: 853925 - RNA, 22 nt, Human
cucaugucuucacccauucuaa

SEQ ID NO: 853926 - RNA, 22 nt, Human
aggaagcuagagccaccggacu

SEQ ID NO: 853927 - RNA, 22 nt, Human
uccugggcaaaaguaucuguga

SEQ ID NO: 853928 - RNA, 22 nt, Human
cuggcugaauccuagucucaua

SEQ ID NO: 853929 - RNA, 22 nt, Human
aaguuacaguuggaacugugaa

SEQ ID NO: 853930 - RNA, 22 nt, Human
gaagcagcgaaguggaagggac

SEQ ID NO: 853931 - RNA, 20 nt, Human
cugggccauccuuuuacaau

SEQ ID NO: 853932 - RNA, 22 nt, Human
ucccucucccuauugccuggag

SEQ ID NO: 853933 - RNA, 22 nt, Human
uaaguaaaacauucaagaaguc

SEQ ID NO: 853934 - RNA, 22 nt, Human
cacauauuugaugaagcuuugu

SEQ ID NO: 853935 - RNA, 22 nt, Human
ccuggcaggcaagaggaaggga

SEQ ID NO: 853936 - RNA, 22 nt, Human
gcagcauacagggagaguacuc

SEQ ID NO: 853937 - RNA, 22 nt, Human
uuugaauagaggccccucagaa

SEQ ID NO: 853938 - RNA, 22 nt, Human
uaaccuuuggugaaauauuaac

SEQ ID NO: 853939 - RNA, 22 nt, Human
uggcugagagcaauugacucug

SEQ ID NO: 853940 - RNA, 22 nt, Human
uuuaggaugcucuauucugacu

SEQ ID NO: 853941 - RNA, 22 nt, Human
aggcagcuggcagcacccaggg

SEQ ID NO: 853942 - RNA, 22 nt, Human
gcaggcaguuauuuaguagaau

SEQ ID NO: 853943 - RNA, 22 nt, Human
cagcugcugcccuuggcugcag

SEQ ID NO: 853944 - RNA, 22 nt, Human
gagaaaugcaugcaugucauca

SEQ ID NO: 853945 - RNA, 22 nt, Human
caacugugaauuuuaugauacc

SEQ ID NO: 853946 - RNA, 20 nt, Human
ugcugcugugagcgucccug

SEQ ID NO: 853947 - RNA, 22 nt, Human
uucugccuucaguccucugacu

SEQ ID NO: 853948 - RNA, 22 nt, Human
ugccaggauauaagagugcgau

SEQ ID NO: 853949 - RNA, 19 nt, Human
uuugaaagaguuuuauugg

SEQ ID NO: 853950 - RNA, 21 nt, Human
acucaggagacuaacuauguc

SEQ ID NO: 853951 - RNA, 22 nt, Human
gaggguggguuucuugcacguc

SEQ ID NO: 853952 - RNA, 22 nt, Human
ucuggcuuucauuuguuuaaag

SEQ ID NO: 853953 - RNA, 22 nt, Human
ccugggauuugcgccagaccuu

SEQ ID NO: 853954 - RNA, 22 nt, Human
guauuaggugguggaauuguag

SEQ ID NO: 853955 - RNA, 22 nt, Human
acauccugaagucagucauuug

SEQ ID NO: 853956 - RNA, 23 nt, Human
agaggggagcaucugcuggcuga

SEQ ID NO: 853957 - RNA, 22 nt, Human
gaggcuccucauucaguaugcu

SEQ ID NO: 853958 - RNA, 22 nt, Human
ggcuuggaaauugcaggacaca

SEQ ID NO: 853959 - RNA, 22 nt, Human
cccaggaguucgaggcuguagu

SEQ ID NO: 853960 - RNA, 22 nt, Human
auuguauaacagcauguauuuu

SEQ ID NO: 853961 - RNA, 22 nt, Human
gagcaagacucacugcaucuug

SEQ ID NO: 853962 - RNA, 22 nt, Human
caauuacauuuauugagcauuc

SEQ ID NO: 853963 - RNA, 22 nt, Human
augcugagauccucaggccaga

SEQ ID NO: 853964 - RNA, 22 nt, Human
ggagcacuauaauagagauuuu

SEQ ID NO: 853965 - RNA, 22 nt, Human
cugccagucuaugcugcucggc

SEQ ID NO: 853966 - RNA, 19 nt, Human
uugaaauuguuugauaugg

SEQ ID NO: 853967 - RNA, 22 nt, Human
gcuucccacagcuggacugggg

SEQ ID NO: 853968 - RNA, 22 nt, Human
uggcuguguuaccacuucaugu

SEQ ID NO: 853969 - RNA, 22 nt, Human
agcaccugcuaugugucaggga

SEQ ID NO: 853970 - RNA, 22 nt, Human
uggcuucuugaucuuggacuug

SEQ ID NO: 853971 - RNA, 22 nt, Human
ggacagcugcuuucaggccaca

SEQ ID NO: 853972 - RNA, 22 nt, Human
aaauaguuuagcucucauuuca

SEQ ID NO: 853973 - RNA, 22 nt, Human
ggacuucuggggacuguagauu

SEQ ID NO: 853974 - RNA, 22 nt, Human
augaaggcaguuaaacgucauc

SEQ ID NO: 853975 - RNA, 22 nt, Human
cucacuguuuaauagcuggauc

SEQ ID NO: 853976 - RNA, 22 nt, Human
aacuggugagauaaauuauuua

SEQ ID NO: 853977 - RNA, 22 nt, Human
ucacaugaguauuauuuuccaa

SEQ ID NO: 853978 - RNA, 21 nt, Human
aggcagcucaggcccagagag

SEQ ID NO: 853979 - RNA, 22 nt, Human
uucuaauuaaaucuacgcuagg

SEQ ID NO: 853980 - RNA, 22 nt, Human
cccagggacagaugggcagcua

SEQ ID NO: 853981 - RNA, 22 nt, Human
uuucaaagaccauuaacuauca

SEQ ID NO: 853982 - RNA, 19 nt, Human
uugaaagauuagcuuucua

SEQ ID NO: 853983 - RNA, 22 nt, Human
gacuuucugauguaaacauuua

SEQ ID NO: 853984 - RNA, 22 nt, Human
aaucauaauuguauacauucau

SEQ ID NO: 853985 - RNA, 22 nt, Human
uagaaagacuguccagauuuca

SEQ ID NO: 853986 - RNA, 22 nt, Human
cccaggagguggagguugcggu

SEQ ID NO: 853987 - RNA, 22 nt, Human
acagucuugagcaucagccaga

SEQ ID NO: 853988 - RNA, 22 nt, Human
aaguaaucuggaauuugguuuu

SEQ ID NO: 853989 - RNA, 22 nt, Human
cagggcuggguuaaaagcaggg

SEQ ID NO: 853990 - RNA, 22 nt, Human
acuggccaggagcuggaaauac

SEQ ID NO: 853991 - RNA, 22 nt, Human
aaggccaacuaggaugagcuag

SEQ ID NO: 853992 - RNA, 22 nt, Human
aaguugagaugucauaggagac

SEQ ID NO: 853993 - RNA, 22 nt, Human
aggguggcugaguagauggaag

SEQ ID NO: 853994 - RNA, 22 nt, Human
gaaauaagaguccaugccaggu

SEQ ID NO: 853995 - RNA, 22 nt, Human
gcugagugagguccagagcuug

SEQ ID NO: 853996 - RNA, 22 nt, Human
aagagggcagcacagguggguc

SEQ ID NO: 853997 - RNA, 20 nt, Human
aggcaccugucacaggugag

SEQ ID NO: 853998 - RNA, 22 nt, Human
ugaaagguuauuuaggucugcu

SEQ ID NO: 853999 - RNA, 22 nt, Human
acuggcagagacccugauggcc

SEQ ID NO: 854000 - RNA, 21 nt, Human
caaauacuuagaaacuuaaga

SEQ ID NO: 854001 - RNA, 22 nt, Human
gugaggucaaagccuuggguau

SEQ ID NO: 854002 - RNA, 23 nt, Human
ucagucuucccugucaguaauag

SEQ ID NO: 854003 - RNA, 18 nt, Human
ucaggcuggaaguuugcc

SEQ ID NO: 854004 - RNA, 22 nt, Human
agaaggggagaagcuaccagga

SEQ ID NO: 854005 - RNA, 22 nt, Human
caggcagccaggggaccugucc

SEQ ID NO: 854006 - RNA, 22 nt, Human
ucauuucuauugcuacugucug

SEQ ID NO: 854007 - RNA, 22 nt, Human
gugcugugucuaucaggaauaa

SEQ ID NO: 854008 - RNA, 22 nt, Human
auuugaauggcuuaacacaacg

SEQ ID NO: 854009 - RNA, 22 nt, Human
gacagagaggcugagcaguaca

SEQ ID NO: 854010 - RNA, 22 nt, Human
cugaggcugggcuugccuucuu

SEQ ID NO: 854011 - RNA, 22 nt, Human
acagaaauugcuaauagcucau

SEQ ID NO: 854012 - RNA, 21 nt, Human
caugcaggauuuaaccuagaa

SEQ ID NO: 854013 - RNA, 22 nt, Human
cgucuuccucuuacgaugcgcu

SEQ ID NO: 854014 - RNA, 22 nt, Human
uugagaagaauguguugaguuu

SEQ ID NO: 854015 - RNA, 22 nt, Human
cccaggaguuagagguuguggu

SEQ ID NO: 854016 - RNA, 22 nt, Human
ugaaaaaacaaguuggcccauu

SEQ ID NO: 854017 - RNA, 22 nt, Human
uggaaauguauuugggcaugcc

SEQ ID NO: 854018 - RNA, 22 nt, Human
uuaguaaauaaagucuacuuuc

SEQ ID NO: 854019 - RNA, 22 nt, Human
caaaacugucuagagagagaag

SEQ ID NO: 854020 - RNA, 19 nt, Human
gcuuuggagggagguucua

SEQ ID NO: 854021 - RNA, 22 nt, Human
gaggaggccaguggaaggaagc

SEQ ID NO: 854022 - RNA, 22 nt, Human
ccuggccacucagguguggggc

SEQ ID NO: 854023 - RNA, 22 nt, Human
accaggagggacccugguggcc

SEQ ID NO: 854024 - RNA, 22 nt, Human
uugcaucuagggcaacccagag

SEQ ID NO: 854025 - RNA, 20 nt, Human
gaggcugaaguguuuuugcu

SEQ ID NO: 854026 - RNA, 19 nt, Human
auacagauguauccaugau

SEQ ID NO: 854027 - RNA, 22 nt, Human
gaggcagcuuaggguacugacu

SEQ ID NO: 854028 - RNA, 22 nt, Human
ucaggagaaagccaauuagagu

SEQ ID NO: 854029 - RNA, 22 nt, Human
uccugggcgguuaugugaucug

SEQ ID NO: 854030 - RNA, 22 nt, Human
cugcgcagcaaucagagaggag

SEQ ID NO: 854031 - RNA, 22 nt, Human
cugagagugcucuuugauguca

SEQ ID NO: 854032 - RNA, 22 nt, Human
gcaggagacuggcugugguagu

SEQ ID NO: 854033 - RNA, 22 nt, Human
uuacacuuaccuguccauugaa

SEQ ID NO: 854034 - RNA, 22 nt, Human
uaucuguuguccaugcagaaag

SEQ ID NO: 854035 - RNA, 22 nt, Human
cugagggcccugaagcuuggca

SEQ ID NO: 854036 - RNA, 22 nt, Human
gacugguaaggaaauucacuaa

SEQ ID NO: 854037 - RNA, 22 nt, Human
ccagcagagcauggggaggaag

SEQ ID NO: 854038 - RNA, 22 nt, Human
acugagguuucauuuuaucgcu

SEQ ID NO: 854039 - RNA, 22 nt, Human
ugaaaugaaugugauucgauag

SEQ ID NO: 854040 - RNA, 22 nt, Human
cagaacuguuauaacagcuguu

SEQ ID NO: 854041 - RNA, 23 nt, Human
agcugaggugcagauccaaagaa

SEQ ID NO: 854042 - RNA, 22 nt, Human
gcccaggaagccaccgggaagu

SEQ ID NO: 854043 - RNA, 22 nt, Human
uccuucuuugacaaguggcaga

SEQ ID NO: 854044 - RNA, 21 nt, Human
auuuggauauugcuggcaaau

SEQ ID NO: 854045 - RNA, 22 nt, Human
cagcagagggagccauugaaau

SEQ ID NO: 854046 - RNA, 22 nt, Human
ugacuuuaagcuaucugauucu

SEQ ID NO: 854047 - RNA, 20 nt, Human
uuucaagucagcaauucuca

SEQ ID NO: 854048 - RNA, 22 nt, Human
gaucauuugcaggaaacauuaa

SEQ ID NO: 854049 - RNA, 22 nt, Human
ugcugaggaauuugguuuaugu

SEQ ID NO: 854050 - RNA, 22 nt, Human
agacgagggcccccaggacagc

SEQ ID NO: 854051 - RNA, 22 nt, Human
gccagagccggcuucacaggau

SEQ ID NO: 854052 - RNA, 22 nt, Human
gcugagguggcugccuuaguaa

SEQ ID NO: 854053 - RNA, 22 nt, Human
gaggcagugcauugucuagggg

SEQ ID NO: 854054 - RNA, 22 nt, Human
ucaggagaaaauaucaggaagu

SEQ ID NO: 854055 - RNA, 21 nt, Human
gcugcaucaaucuacccaggg

SEQ ID NO: 854056 - RNA, 22 nt, Human
acaugauuuuaguaucauaaua

SEQ ID NO: 854057 - RNA, 22 nt, Human
acugagguuauugcaauaaaau

SEQ ID NO: 854058 - RNA, 22 nt, Human
uucuucaaccaucuacauaaac

SEQ ID NO: 854059 - RNA, 22 nt, Human
uccaggagaaggccauccagcg

SEQ ID NO: 854060 - RNA, 22 nt, Human
agucagugaaugguguaugcua

SEQ ID NO: 854061 - RNA, 22 nt, Human
cauuuaguuuugcaguagcagg

SEQ ID NO: 854062 - RNA, 22 nt, Human
aggcaguguguagcuggaagag

SEQ ID NO: 854063 - RNA, 22 nt, Human
cugcugugugcuuacuuggguu

SEQ ID NO: 854064 - RNA, 22 nt, Human
gucugcuggugccuggccugcg

SEQ ID NO: 854065 - RNA, 22 nt, Human
agaggauguucuaggcacucau

SEQ ID NO: 854066 - RNA, 22 nt, Human
caguggagagacuuuuacucuu

SEQ ID NO: 854067 - RNA, 22 nt, Human
cuauuaggcuuccauuucaugc

SEQ ID NO: 854068 - RNA, 22 nt, Human
auuaaauuggaucugcauaguu

SEQ ID NO: 854069 - RNA, 22 nt, Human
uugaggucaaagaagugagugg

SEQ ID NO: 854070 - RNA, 22 nt, Human
uuggcaguaaaagaaaaugcuu

SEQ ID NO: 854071 - RNA, 22 nt, Human
cagggcuguuagcugcugcucu

SEQ ID NO: 854072 - RNA, 22 nt, Human
gcugauguuuaguugauguuac

SEQ ID NO: 854073 - RNA, 22 nt, Human
aggcuagauagagggucaucuu

SEQ ID NO: 854074 - RNA, 22 nt, Human
uaaaugagggcugacaugauug

SEQ ID NO: 854075 - RNA, 22 nt, Human
uggugguuaugcgcuuuguggg

SEQ ID NO: 854076 - RNA, 22 nt, Human
aacuggaucaguugagggaggc

SEQ ID NO: 854077 - RNA, 22 nt, Human
agucucuuuguggacucugccu

SEQ ID NO: 854078 - RNA, 22 nt, Human
augaaacaguguguauagcaaa

SEQ ID NO: 854079 - RNA, 22 nt, Human
gcagcugcagagaccggguggg

SEQ ID NO: 854080 - RNA, 22 nt, Human
uugguuuaggaacuggcuugga

SEQ ID NO: 854081 - RNA, 22 nt, Human
cauuuguaauacugacuugcag

SEQ ID NO: 854082 - RNA, 22 nt, Human
gcuccuggauguucaagucggc

SEQ ID NO: 854083 - RNA, 22 nt, Human
aaggcagccgugugacugcaug

SEQ ID NO: 854084 - RNA, 22 nt, Human
gcugccuccugaaagcgcucug

SEQ ID NO: 854085 - RNA, 22 nt, Human
acagaaauuagcagugaguuua

SEQ ID NO: 854086 - RNA, 22 nt, Human
uccaggagaggccugaccaggu

SEQ ID NO: 854087 - RNA, 22 nt, Human
aaguccaugaucaagauguggc

SEQ ID NO: 854088 - RNA, 22 nt, Human
uuucuaggucuuccauacugcc

SEQ ID NO: 854089 - RNA, 22 nt, Human
uucccaugccuggccccuaucc

SEQ ID NO: 854090 - RNA, 22 nt, Human
gcagacaggcccaguggaggga

SEQ ID NO: 854091 - RNA, 22 nt, Human
aggcagcuucugauuagcagcg

SEQ ID NO: 854092 - RNA, 22 nt, Human
acaacauuauacauagaaagcu

SEQ ID NO: 854093 - RNA, 22 nt, Human
cauaauauacuacauugaugaa

SEQ ID NO: 854094 - RNA, 22 nt, Human
gcuccuggcucuggccaaggga

SEQ ID NO: 854095 - RNA, 22 nt, Human
ccaggacagugaacauguaaga

SEQ ID NO: 854096 - RNA, 22 nt, Human
ccccagagagcaccaugaagcc

SEQ ID NO: 854097 - RNA, 22 nt, Human
caaaugauaccuauuacuaggc

SEQ ID NO: 854098 - RNA, 22 nt, Human
uuggccaaaaaagucauuagaa

SEQ ID NO: 854099 - RNA, 22 nt, Human
uauuggucuuggaagguuuugu

SEQ ID NO: 854100 - RNA, 22 nt, Human
uuuuuauaacucuuuugugaca

SEQ ID NO: 854101 - RNA, 22 nt, Human
gugguccaucaugcagagcucc

SEQ ID NO: 854102 - RNA, 22 nt, Human
gcuggcugugauuuugccaaca

SEQ ID NO: 854103 - RNA, 22 nt, Human
gcaggcugauagaggauuccau

SEQ ID NO: 854104 - RNA, 21 nt, Human
cccaggaguccuauuuaaaug

SEQ ID NO: 854105 - RNA, 22 nt, Human
uggcagcacuagguacugagcu

SEQ ID NO: 854106 - RNA, 22 nt, Human
ggugagaggcagaggacagcuu

SEQ ID NO: 854107 - RNA, 19 nt, Human
gcagcugcuugaaaagaaa

SEQ ID NO: 854108 - RNA, 22 nt, Human
acauuuaaccaaacuguuuaau

SEQ ID NO: 854109 - RNA, 22 nt, Human
uaauuauagcauuggaguggcc

SEQ ID NO: 854110 - RNA, 20 nt, Human
cugagagucugugcuuaguc

SEQ ID NO: 854111 - RNA, 21 nt, Human
agagaaagucauggcuguggc

SEQ ID NO: 854112 - RNA, 22 nt, Human
ucugagguccuacuauaagugg

SEQ ID NO: 854113 - RNA, 22 nt, Human
ucauuucaaguucugacagcua

SEQ ID NO: 854114 - RNA, 23 nt, Human
aggcuccacucccugggaugugg

SEQ ID NO: 854115 - RNA, 22 nt, Human
ggauggcagucugcaugagaaa

SEQ ID NO: 854116 - RNA, 22 nt, Human
auuaggauuugguauggucaua

SEQ ID NO: 854117 - RNA, 22 nt, Human
aacaacugaaaagcuuuuucug

SEQ ID NO: 854118 - RNA, 22 nt, Human
aaggcagccucugccagccggg

SEQ ID NO: 854119 - RNA, 22 nt, Human
agugcuguaacaacuuauuugg

SEQ ID NO: 854120 - RNA, 22 nt, Human
aaguuauaucaucucauugacg

SEQ ID NO: 854121 - RNA, 22 nt, Human
uuuagagcccaugugaguguga

SEQ ID NO: 854122 - RNA, 22 nt, Human
uuucuaggcacagugucuuccc

SEQ ID NO: 854123 - RNA, 22 nt, Human
auuuguugcuagcagcacugau

SEQ ID NO: 854124 - RNA, 22 nt, Human
gagggaugguaguugacacuga

SEQ ID NO: 854125 - RNA, 22 nt, Human
cagaggucugacacugaauggu

SEQ ID NO: 854126 - RNA, 22 nt, Human
cacaauuuccuugcuucacuuu

SEQ ID NO: 854127 - RNA, 22 nt, Human
caggaggggguggaguuucgcc

SEQ ID NO: 854128 - RNA, 22 nt, Human
ggauggcaggacaaggacccag

SEQ ID NO: 854129 - RNA, 22 nt, Human
guggccaaggugcagagcagcu

SEQ ID NO: 854130 - RNA, 22 nt, Human
uuuaguucucccagucuugauu

SEQ ID NO: 854131 - RNA, 22 nt, Human
gggcugagcuaagcuggguuga

SEQ ID NO: 854132 - RNA, 22 nt, Human
gauauuuugagaaauccuauga

SEQ ID NO: 854133 - RNA, 18 nt, Human
agcuucccucugagaggg

SEQ ID NO: 854134 - RNA, 22 nt, Human
ugcuuucaaaggcuuucuagau

SEQ ID NO: 854135 - RNA, 22 nt, Human
uccaggagguuuggaggaagca

SEQ ID NO: 854136 - RNA, 22 nt, Human
gaaauuaaccaccuuuggcuuu

SEQ ID NO: 854137 - RNA, 22 nt, Human
uaggaugacacagcaaguauag

SEQ ID NO: 854138 - RNA, 22 nt, Human
auucauuuagguauucacuuac

SEQ ID NO: 854139 - RNA, 22 nt, Human
aacuauacauauuuacauagac

SEQ ID NO: 854140 - RNA, 22 nt, Human
aagcaauagcaacaacuuuaca

SEQ ID NO: 854141 - RNA, 22 nt, Human
ugaggcagugugagauaauaaa

SEQ ID NO: 854142 - RNA, 22 nt, Human
uaucuuguaauagguccacuug

SEQ ID NO: 854143 - RNA, 22 nt, Human
uuagagccccagaaaacagugg

SEQ ID NO: 854144 - RNA, 22 nt, Human
caacugccauacagcuccaugg

SEQ ID NO: 854145 - RNA, 22 nt, Human
caaggccaagguuuugugaacu

SEQ ID NO: 854146 - RNA, 22 nt, Human
ccagugcuucuuugcuagcugg

SEQ ID NO: 854147 - RNA, 22 nt, Human
aaacccugcccuucccaagaug

SEQ ID NO: 854148 - RNA, 22 nt, Human
cagaugagcaugggcacaagca

SEQ ID NO: 854149 - RNA, 21 nt, Human
cacugguagauggcccgcagg

SEQ ID NO: 854150 - RNA, 18 nt, Human
gcagcuagccaggggggc

SEQ ID NO: 854151 - RNA, 22 nt, Human
gcaccuuuuucuaggagaaugu

SEQ ID NO: 854152 - RNA, 22 nt, Human
accaggaggccuugguucugag

SEQ ID NO: 854153 - RNA, 22 nt, Human
uuugacaaaggaaaaaugcaca

SEQ ID NO: 854154 - RNA, 22 nt, Human
ugaacucgggaggaggcugcag

SEQ ID NO: 854155 - RNA, 22 nt, Human
ugucucaguacacuccgauguu

SEQ ID NO: 854156 - RNA, 22 nt, Human
cuucuagagcuggagcaaaugu

SEQ ID NO: 854157 - RNA, 22 nt, Human
uugggcucaggaguuugagacc

SEQ ID NO: 854158 - RNA, 22 nt, Human
acacuuuuguguauauccaguu

SEQ ID NO: 854159 - RNA, 22 nt, Human
ucucagucagccuugauguccc

SEQ ID NO: 854160 - RNA, 19 nt, Human
accaggaguaucagagcug

SEQ ID NO: 854161 - RNA, 22 nt, Human
uccuggcccaaucugcccauga

SEQ ID NO: 854162 - RNA, 22 nt, Human
aaaauacuguggaguguugaaa

SEQ ID NO: 854163 - RNA, 22 nt, Human
gcugccuccacuggcucccagu

SEQ ID NO: 854164 - RNA, 22 nt, Human
cauucucaauaguagaugagua

SEQ ID NO: 854165 - RNA, 22 nt, Human
ucucuguaguugggcagcugcu

SEQ ID NO: 854166 - RNA, 22 nt, Human
aucaggaucugggagccugaaa

SEQ ID NO: 854167 - RNA, 22 nt, Human
guuaauaaagguauagaaucag

SEQ ID NO: 854168 - RNA, 22 nt, Human
cccaggagccaucugucuuggc

SEQ ID NO: 854169 - RNA, 22 nt, Human
ggccagcucuuguccacggagg

SEQ ID NO: 854170 - RNA, 22 nt, Human
ugaacaaacugcauucuucacu

SEQ ID NO: 854171 - RNA, 17 nt, Human
agagagagcaugccacc

SEQ ID NO: 854172 - RNA, 22 nt, Human
uggcagcagaacaugaaaccca

SEQ ID NO: 854173 - RNA, 22 nt, Human
ucugugccuccguaacacacca

SEQ ID NO: 854174 - RNA, 22 nt, Human
uaggauaugugaaaucauauua

SEQ ID NO: 854175 - RNA, 22 nt, Human
uggguccacuucugcacugugg

SEQ ID NO: 854176 - RNA, 22 nt, Human
gaaggucaccuccccucucugg

SEQ ID NO: 854177 - RNA, 22 nt, Human
agcugaggcaugaugcuaucag

SEQ ID NO: 854178 - RNA, 22 nt, Human
uuuauuaauguagcauccaugg

SEQ ID NO: 854179 - RNA, 22 nt, Human
ucuggagaggggccuagaauuu

SEQ ID NO: 854180 - RNA, 22 nt, Human
ugcugcuguugacggcugucca

SEQ ID NO: 854181 - RNA, 18 nt, Human
aggauauuaagaguacag

SEQ ID NO: 854182 - RNA, 22 nt, Human
ugaaggccucugguacaugcca

SEQ ID NO: 854183 - RNA, 22 nt, Human
cagagccauuauggagacuugc

SEQ ID NO: 854184 - RNA, 22 nt, Human
cuggcacaaugucacuuuugcu

SEQ ID NO: 854185 - RNA, 22 nt, Human
uaacuguagcuaaccgaugaga

SEQ ID NO: 854186 - RNA, 22 nt, Human
ggcagcaucacuugucuccagc

SEQ ID NO: 854187 - RNA, 22 nt, Human
cccaggaaugggaaggaggaau

SEQ ID NO: 854188 - RNA, 22 nt, Human
caccagaguuguccaaaugauu

SEQ ID NO: 854189 - RNA, 22 nt, Human
acacuuucuggagcugcacaua

SEQ ID NO: 854190 - RNA, 22 nt, Human
uuucuagucucgaucucuuaau

SEQ ID NO: 854191 - RNA, 22 nt, Human
gcugagaggcagccagacccuc

SEQ ID NO: 854192 - RNA, 22 nt, Human
aucugcuugaaugagcaacagg

SEQ ID NO: 854193 - RNA, 22 nt, Human
ccugaggucaugguccaguguu

SEQ ID NO: 854194 - RNA, 22 nt, Human
auuuauuaccucggaguuucug

SEQ ID NO: 854195 - RNA, 22 nt, Human
uuuacaaccucauauucugaug

SEQ ID NO: 854196 - RNA, 23 nt, Human
agggugagcaagcuauggagacc

SEQ ID NO: 854197 - RNA, 22 nt, Human
gaacuggucuuuuagguuuucu

SEQ ID NO: 854198 - RNA, 22 nt, Human
uagcaagaggugaagguuucau

SEQ ID NO: 854199 - RNA, 22 nt, Human
cugaggccccucuugugagcau

SEQ ID NO: 854200 - RNA, 22 nt, Human
ugguccaagugagguggccucu

SEQ ID NO: 854201 - RNA, 22 nt, Human
ucugaaaugcaaauuugacuga

SEQ ID NO: 854202 - RNA, 22 nt, Human
ucugggaaccagugcggcuggg

SEQ ID NO: 854203 - RNA, 22 nt, Human
ucaggcugauaggaggaacuga

SEQ ID NO: 854204 - RNA, 20 nt, Human
ugaaggccauuuguuccaga

SEQ ID NO: 854205 - RNA, 21 nt, Human
gauuuuaaagagacugccaca

SEQ ID NO: 854206 - RNA, 22 nt, Human
ucaggcugaaucauccuagcuu

SEQ ID NO: 854207 - RNA, 22 nt, Human
aagcacugagcacaguggcuga

SEQ ID NO: 854208 - RNA, 22 nt, Human
agcucccagagcucgagaguaa

SEQ ID NO: 854209 - RNA, 22 nt, Human
gaggggaaaguucugcacaagg

SEQ ID NO: 854210 - RNA, 22 nt, Human
gccacagcucacguuccccauu

SEQ ID NO: 854211 - RNA, 22 nt, Human
cacaggcucuccagggccugga

SEQ ID NO: 854212 - RNA, 22 nt, Human
cuugaacucaaugugaggaaga

SEQ ID NO: 854213 - RNA, 22 nt, Human
gggcugagaauucagcuuuccu

SEQ ID NO: 854214 - RNA, 22 nt, Human
gaggcaucugggcacagaagug

SEQ ID NO: 854215 - RNA, 22 nt, Human
ucauuuaauaauuuuugaguag

SEQ ID NO: 854216 - RNA, 22 nt, Human
ggcugcagauagccagccacca

SEQ ID NO: 854217 - RNA, 19 nt, Human
acuuccugcccgcuccuuu

SEQ ID NO: 854218 - RNA, 22 nt, Human
agaggccagguccagaguuugu

SEQ ID NO: 854219 - RNA, 22 nt, Human
uugaaagaggcaaaguuugauc

SEQ ID NO: 854220 - RNA, 22 nt, Human
ucuucaauuagauuuaccaauu

SEQ ID NO: 854221 - RNA, 22 nt, Human
uucaggauggcggauguugggg

SEQ ID NO: 854222 - RNA, 22 nt, Human
ugguuuugcuaaaauagaaaga

SEQ ID NO: 854223 - RNA, 22 nt, Human
uucuucuugucugcccucacau

SEQ ID NO: 854224 - RNA, 23 nt, Human
uugauuucaaaugcagagaacac

SEQ ID NO: 854225 - RNA, 22 nt, Human
gacacuuucucagguaaagcau

SEQ ID NO: 854226 - RNA, 22 nt, Human
gaaguacaguuuuaucuagcca

SEQ ID NO: 854227 - RNA, 22 nt, Human
gcccaggagguugggcugugca

SEQ ID NO: 854228 - RNA, 22 nt, Human
cuccugggaauuuaguugugag

SEQ ID NO: 854229 - RNA, 22 nt, Human
acuuugcagggcuugauaucca

SEQ ID NO: 854230 - RNA, 22 nt, Human
cuggagucacucauguagcugc

SEQ ID NO: 854231 - RNA, 22 nt, Human
aauaguuaagcaacuuuuucca

SEQ ID NO: 854232 - RNA, 22 nt, Human
cccagggauuauaaaggugaaa

SEQ ID NO: 854233 - RNA, 22 nt, Human
uaaggccagccagcaaaucugu

SEQ ID NO: 854234 - RNA, 22 nt, Human
aggcuccaccagucaggugcau

SEQ ID NO: 854235 - RNA, 22 nt, Human
gggcagcugccccucucugggc

SEQ ID NO: 854236 - RNA, 22 nt, Human
cagagcagucuggagauccagc

SEQ ID NO: 854237 - RNA, 22 nt, Human
ugagaugcuaaagggcugcuca

SEQ ID NO: 854238 - RNA, 22 nt, Human
ccuggacucaggcugugggcac

SEQ ID NO: 854239 - RNA, 22 nt, Human
agcuggcagucauccuagugag

SEQ ID NO: 854240 - RNA, 22 nt, Human
auguauuucuauguagugaaga

SEQ ID NO: 854241 - RNA, 21 nt, Human
uggaggaauaaagcacagaag

SEQ ID NO: 854242 - RNA, 22 nt, Human
aggccaaagcaagacccuguaa

SEQ ID NO: 854243 - RNA, 22 nt, Human
aagauacugaugauguaggcua

SEQ ID NO: 854244 - RNA, 22 nt, Human
gcugaaauucagauuccuaggc

SEQ ID NO: 854245 - RNA, 21 nt, Human
cucuuuauauaguaaagauau

SEQ ID NO: 854246 - RNA, 23 nt, Human
ugcuggcugaaacagccaaagga

SEQ ID NO: 854247 - RNA, 22 nt, Human
aagggcaggaaaagauggaugu

SEQ ID NO: 854248 - RNA, 22 nt, Human
ccaggagagcauugcacagagg

SEQ ID NO: 854249 - RNA, 22 nt, Human
guaggcagggcuguggggagaa

SEQ ID NO: 854250 - RNA, 17 nt, Human
agugucagggcccuucc

SEQ ID NO: 854251 - RNA, 22 nt, Human
cccagggacucgggauucuagg

SEQ ID NO: 854252 - RNA, 22 nt, Human
uaaaugaagcucaugggccaca

SEQ ID NO: 854253 - RNA, 22 nt, Human
acuggccagaacuaagucacau

SEQ ID NO: 854254 - RNA, 22 nt, Human
uauuucagcacaugggauaggu

SEQ ID NO: 854255 - RNA, 22 nt, Human
accaugucauuuauuggccaaa

SEQ ID NO: 854256 - RNA, 22 nt, Human
gcugccucccagagcccugcag

SEQ ID NO: 854257 - RNA, 22 nt, Human
ucagaaaagagaaaaucuuaua

SEQ ID NO: 854258 - RNA, 22 nt, Human
ugacaguuaagguauacauuca

SEQ ID NO: 854259 - RNA, 22 nt, Human
uaggcuggaggaagcagugccu

SEQ ID NO: 854260 - RNA, 22 nt, Human
ugcaccuucauuuuaggcagcu

SEQ ID NO: 854261 - RNA, 22 nt, Human
gugugcagggaugagugcaggu

SEQ ID NO: 854262 - RNA, 22 nt, Human
auuaagaucauuguagaagauu

SEQ ID NO: 854263 - RNA, 22 nt, Human
gcauguguuauuuuauguauga

SEQ ID NO: 854264 - RNA, 22 nt, Human
cagaaguuugacauguuuagcu

SEQ ID NO: 854265 - RNA, 22 nt, Human
agauauauuuaagguaauaagu

SEQ ID NO: 854266 - RNA, 22 nt, Human
cacagagcugaaccugggucau

SEQ ID NO: 854267 - RNA, 22 nt, Human
cucaggauauugggcuggagca

SEQ ID NO: 854268 - RNA, 22 nt, Human
uugcaaaggggaauaaagcaau

SEQ ID NO: 854269 - RNA, 22 nt, Human
cugcugucauagccaucccucc

SEQ ID NO: 854270 - RNA, 22 nt, Human
uccaggagguugagugaguucc

SEQ ID NO: 854271 - RNA, 22 nt, Human
uggcagcagacaucugaggucu

SEQ ID NO: 854272 - RNA, 22 nt, Human
cggagccugcuuguugcagcug

SEQ ID NO: 854273 - RNA, 22 nt, Human
gucccauaaguagugcaacuug

SEQ ID NO: 854274 - RNA, 20 nt, Human
cccaggagugagcagcuuua

SEQ ID NO: 854275 - RNA, 22 nt, Human
augauauuugcaaugugcuugc

SEQ ID NO: 854276 - RNA, 22 nt, Human
acuuucugcaguguuggaaaug

SEQ ID NO: 854277 - RNA, 22 nt, Human
aagacacugauacucugugauu

SEQ ID NO: 854278 - RNA, 22 nt, Human
cugccuggcauggagaagagaa

SEQ ID NO: 854279 - RNA, 21 nt, Human
cccaggaggagcuccggcucc

SEQ ID NO: 854280 - RNA, 22 nt, Human
cccaguuucaacuuuccagugg

SEQ ID NO: 854281 - RNA, 22 nt, Human
ccagagcuucggggcggcugua

SEQ ID NO: 854282 - RNA, 22 nt, Human
agacagguaaauagagaugcug

SEQ ID NO: 854283 - RNA, 22 nt, Human
ugaggcaggacugagcgggaug

SEQ ID NO: 854284 - RNA, 22 nt, Human
auuucagauucagaaauguagg

SEQ ID NO: 854285 - RNA, 18 nt, Human
gcuuuauuucuuggggaa

SEQ ID NO: 854286 - RNA, 22 nt, Human
aggcugagccugggcguggugg

SEQ ID NO: 854287 - RNA, 22 nt, Human
guccaugauucugugacacccu

SEQ ID NO: 854288 - RNA, 17 nt, Human
cagggcugucugccuag

SEQ ID NO: 854289 - RNA, 22 nt, Human
uuucugugguggguaguucaga

SEQ ID NO: 854290 - RNA, 22 nt, Human
aagggcuggucuagaaagggag

SEQ ID NO: 854291 - RNA, 17 nt, Human
ccuguguuugcuccuuc

SEQ ID NO: 854292 - RNA, 22 nt, Human
aaagcagagguugcagugagcu

SEQ ID NO: 854293 - RNA, 17 nt, Human
uggcaugaggguguggg

SEQ ID NO: 854294 - RNA, 20 nt, Human
uacuuaggcuuguuuuggcc

SEQ ID NO: 854295 - RNA, 22 nt, Human
aguuacaguguucuauuacucu

SEQ ID NO: 854296 - RNA, 22 nt, Human
aagacugucuuuucugagugac

SEQ ID NO: 854297 - RNA, 22 nt, Human
aggcuggagagugcaguggcgu

SEQ ID NO: 854298 - RNA, 22 nt, Human
cagugcugagagccuggccagg

SEQ ID NO: 854299 - RNA, 22 nt, Human
ugccugugucacagugauguuu

SEQ ID NO: 854300 - RNA, 22 nt, Human
uucucagguagugcugaugcug

SEQ ID NO: 854301 - RNA, 22 nt, Human
uggcagacuuuagggucuacau

SEQ ID NO: 854302 - RNA, 22 nt, Human
cuuuguauucaguugggcugug

SEQ ID NO: 854303 - RNA, 21 nt, Human
ugcccuggggcucuucccuca

SEQ ID NO: 854304 - RNA, 22 nt, Human
auacaguaaccacauucuauag

SEQ ID NO: 854305 - RNA, 23 nt, Human
uuugaaguugacugccuuccaga

SEQ ID NO: 854306 - RNA, 22 nt, Human
ucacagacauggugagguaaca

SEQ ID NO: 854307 - RNA, 22 nt, Human
gcuccuggcucucugagggcug

SEQ ID NO: 854308 - RNA, 22 nt, Human
aggguggcuggaggaaucagaa

SEQ ID NO: 854309 - RNA, 22 nt, Human
gaaaaaugcuccaaaucugugg

SEQ ID NO: 854310 - RNA, 22 nt, Human
uuaaaugagauguucagauauu

SEQ ID NO: 854311 - RNA, 22 nt, Human
ucuuuucaucauuuaauaggua

SEQ ID NO: 854312 - RNA, 22 nt, Human
ugccgcagugcggggagggccc

SEQ ID NO: 854313 - RNA, 22 nt, Human
gaaacuguauguaguuuuuggg

SEQ ID NO: 854314 - RNA, 22 nt, Human
acaguaaccucuccucugaagg

SEQ ID NO: 854315 - RNA, 22 nt, Human
ucaucucaaaacccaaggggca

SEQ ID NO: 854316 - RNA, 22 nt, Human
ugaggcccuagggcaugggaga

SEQ ID NO: 854317 - RNA, 22 nt, Human
ugcacagugaccccuggugacu

SEQ ID NO: 854318 - RNA, 22 nt, Human
gagugucugaauuagagcacaa

SEQ ID NO: 854319 - RNA, 22 nt, Human
caacugagcaguagcgucugga

SEQ ID NO: 854320 - RNA, 22 nt, Human
ccaggaagcugucugauaugaa

SEQ ID NO: 854321 - RNA, 22 nt, Human
ucuuugaauucaaacuguucaa

SEQ ID NO: 854322 - RNA, 22 nt, Human
agaggcagccguauuucaaagg

SEQ ID NO: 854323 - RNA, 22 nt, Human
cagugauguuucugcaucagag

SEQ ID NO: 854324 - RNA, 20 nt, Human
cccaggagcugugccccauc

SEQ ID NO: 854325 - RNA, 19 nt, Human
uucauucucuuauuguugu

SEQ ID NO: 854326 - RNA, 22 nt, Human
gggcugagggguaucucauggg

SEQ ID NO: 854327 - RNA, 22 nt, Human
uuuucauuguuacuaugagcua

SEQ ID NO: 854328 - RNA, 22 nt, Human
cugagcgcgggaccugaggcug

SEQ ID NO: 854329 - RNA, 22 nt, Human
ucccaggaugaagacaguguug

SEQ ID NO: 854330 - RNA, 22 nt, Human
ggcagcuuguccuucaggagag

SEQ ID NO: 854331 - RNA, 22 nt, Human
agcauccaacaggagggaaggg

SEQ ID NO: 854332 - RNA, 22 nt, Human
aggacugacuuuugccaugaaa

SEQ ID NO: 854333 - RNA, 22 nt, Human
cuggagaguuggaagauggacu

SEQ ID NO: 854334 - RNA, 22 nt, Human
acaggccacaguggagucucug

SEQ ID NO: 854335 - RNA, 22 nt, Human
aagagagggguugcauggaaau

SEQ ID NO: 854336 - RNA, 22 nt, Human
uuggccaauccuauuggguggg

SEQ ID NO: 854337 - RNA, 22 nt, Human
uccuccccucagggcaacggau

SEQ ID NO: 854338 - RNA, 22 nt, Human
uuauuaguguugauauuaggau

SEQ ID NO: 854339 - RNA, 22 nt, Human
agcagcugauggggaaggaguu

SEQ ID NO: 854340 - RNA, 22 nt, Human
gagggaggggagcuccacccuc

SEQ ID NO: 854341 - RNA, 20 nt, Human
ccuccuggucaggugugcag

SEQ ID NO: 854342 - RNA, 22 nt, Human
uuugacauuggcuuauucuguu

SEQ ID NO: 854343 - RNA, 22 nt, Human
acccaggacucucuuccaguag

SEQ ID NO: 854344 - RNA, 22 nt, Human
ugaggggaacugaugcccauug

SEQ ID NO: 854345 - RNA, 22 nt, Human
aucuugcauuugcuaaaaugca

SEQ ID NO: 854346 - RNA, 22 nt, Human
ugugcaggugcaggaagggggc

SEQ ID NO: 854347 - RNA, 19 nt, Human
acagagcucucugcuucug

SEQ ID NO: 854348 - RNA, 22 nt, Human
uuucaucuucccagagaccuug

SEQ ID NO: 854349 - RNA, 22 nt, Human
gaagcagcuuucuggugaggag

SEQ ID NO: 854350 - RNA, 22 nt, Human
agugugagcccuggaguggugc

SEQ ID NO: 854351 - RNA, 22 nt, Human
gaacuggucaguuuagcccacu

SEQ ID NO: 854352 - RNA, 22 nt, Human
uuagaaagguuuugcucugaaa

SEQ ID NO: 854353 - RNA, 22 nt, Human
uuugagauggagucuugcucug

SEQ ID NO: 854354 - RNA, 22 nt, Human
uagcagaguaauacuuuggagc

SEQ ID NO: 854355 - RNA, 22 nt, Human
cagcugcaguucaaugcuugcu

SEQ ID NO: 854356 - RNA, 22 nt, Human
ucaggcugugggcacuggccau

SEQ ID NO: 854357 - RNA, 22 nt, Human
gacugaggugaccuaggacuac

SEQ ID NO: 854358 - RNA, 22 nt, Human
ccagagagauugcuucuaaaga

SEQ ID NO: 854359 - RNA, 19 nt, Human
caagugaagccugggaugg

SEQ ID NO: 854360 - RNA, 22 nt, Human
ugcuuggccuacuuguccuuug

SEQ ID NO: 854361 - RNA, 19 nt, Human
augauacaggugaaaauug

SEQ ID NO: 854362 - RNA, 22 nt, Human
cccaggaagaggggucaggugu

SEQ ID NO: 854363 - RNA, 22 nt, Human
cuggggcccgagccuugggcca

SEQ ID NO: 854364 - RNA, 22 nt, Human
agcugaggacgugaagggcggc

SEQ ID NO: 854365 - RNA, 22 nt, Human
accaggaguuuugaccaggggc

SEQ ID NO: 854366 - RNA, 19 nt, Human
uaacugguuaaaaagcuug

SEQ ID NO: 854367 - RNA, 22 nt, Human
uugcagcugcaguaaauguuca

SEQ ID NO: 854368 - RNA, 22 nt, Human
uguuggcauuagaggguuauug

SEQ ID NO: 854369 - RNA, 22 nt, Human
aauauuuguuaguguuuuaaug

SEQ ID NO: 854370 - RNA, 22 nt, Human
cuggagccccaggcugugcaga

SEQ ID NO: 854371 - RNA, 17 nt, Human
ucaggcugggugcagug

SEQ ID NO: 854372 - RNA, 22 nt, Human
gaugagcauuguuucauguguu

SEQ ID NO: 854373 - RNA, 22 nt, Human
cagcugagcugccagacuacug

SEQ ID NO: 854374 - RNA, 22 nt, Human
cuccuggaggauagugacuggg

SEQ ID NO: 854375 - RNA, 22 nt, Human
caggcagcccugcaccaagugu

SEQ ID NO: 854376 - RNA, 22 nt, Human
ugaaaggugacauuucuuggau

SEQ ID NO: 854377 - RNA, 22 nt, Human
gcugaggacaucauggaaggaa

SEQ ID NO: 854378 - RNA, 22 nt, Human
agaaucugaaggcaccucuggu

SEQ ID NO: 854379 - RNA, 22 nt, Human
aacaguaaagacagaauuuauc

SEQ ID NO: 854380 - RNA, 22 nt, Human
cuggcugggagcgagcugcuca

SEQ ID NO: 854381 - RNA, 22 nt, Human
ucaggcugcccguucagggcuc

SEQ ID NO: 854382 - RNA, 22 nt, Human
guuauacauauguguuaacaaa

SEQ ID NO: 854383 - RNA, 22 nt, Human
ucaggagaacuuccuucuaccc

SEQ ID NO: 854384 - RNA, 22 nt, Human
uucuucaauuuuccauauacug

SEQ ID NO: 854385 - RNA, 18 nt, Human
uuccaugauuccuuucac

SEQ ID NO: 854386 - RNA, 22 nt, Human
cuucugaagagguuaucauaga

SEQ ID NO: 854387 - RNA, 22 nt, Human
auacacauguuauuguggaagc

SEQ ID NO: 854388 - RNA, 22 nt, Human
gaagccuugaacugcaaacccc

SEQ ID NO: 854389 - RNA, 22 nt, Human
guucuucaucauuaacacucug

SEQ ID NO: 854390 - RNA, 22 nt, Human
gccaugcuugguaugcugugag

SEQ ID NO: 854391 - RNA, 22 nt, Human
cucaggaugcaauuccaucaag

SEQ ID NO: 854392 - RNA, 22 nt, Human
caggagaucuuaggaauucuua

SEQ ID NO: 854393 - RNA, 22 nt, Human
uauuuuaaagacugccagccua

SEQ ID NO: 854394 - RNA, 22 nt, Human
aacauaaauuugaaguggcaaa

SEQ ID NO: 854395 - RNA, 22 nt, Human
cagagaaaaaauccugcucuca

SEQ ID NO: 854396 - RNA, 22 nt, Human
agugcuuuaccuagauaauguu

SEQ ID NO: 854397 - RNA, 22 nt, Human
caaggccacugcucagguuucc

SEQ ID NO: 854398 - RNA, 22 nt, Human
uaggcagcugcaaacuucgguc

SEQ ID NO: 854399 - RNA, 22 nt, Human
caaaugauagagccgauuauca

SEQ ID NO: 854400 - RNA, 22 nt, Human
cagggucugaaacugaucacag

SEQ ID NO: 854401 - RNA, 20 nt, Human
acaggagaucugaggaaagg

SEQ ID NO: 854402 - RNA, 19 nt, Human
ggcaggcuggauagagagg

SEQ ID NO: 854403 - RNA, 22 nt, Human
ccuccuggugacaaggcaaagc

SEQ ID NO: 854404 - RNA, 22 nt, Human
ucugugcuggacugauuucaua

SEQ ID NO: 854405 - RNA, 22 nt, Human
auuagagcaguaauuguggcag

SEQ ID NO: 854406 - RNA, 22 nt, Human
auaaaugaacauucacagagcu

SEQ ID NO: 854407 - RNA, 22 nt, Human
gaccauuucuaggaaucagacu

SEQ ID NO: 854408 - RNA, 22 nt, Human
aguggcaguagaugagcugguu

SEQ ID NO: 854409 - RNA, 22 nt, Human
ugccugagugauguggcagcca

SEQ ID NO: 854410 - RNA, 17 nt, Human
cccaugagcccacuccc

SEQ ID NO: 854411 - RNA, 22 nt, Human
agaggcggagcuugcagugagc

SEQ ID NO: 854412 - RNA, 22 nt, Human
gagcagcucgagaaggaagcag

SEQ ID NO: 854413 - RNA, 22 nt, Human
gcggagggcgagcccgcggagc

SEQ ID NO: 854414 - RNA, 22 nt, Human
auccauuauugggccaauaaag

SEQ ID NO: 854415 - RNA, 22 nt, Human
cugcucuguucccccaucaucu

SEQ ID NO: 854416 - RNA, 22 nt, Human
cugaggccucguuggcuggaac

SEQ ID NO: 854417 - RNA, 22 nt, Human
ggaggaugccaagcugugcaca

SEQ ID NO: 854418 - RNA, 21 nt, Human
cccagggaagccgcagucacc

SEQ ID NO: 854419 - RNA, 22 nt, Human
auuccaaagguuaaugcccauu

SEQ ID NO: 854420 - RNA, 22 nt, Human
gauguuucaugcuagcaugugu

SEQ ID NO: 854421 - RNA, 22 nt, Human
acccaggagagagcuauaaaau

SEQ ID NO: 854422 - RNA, 22 nt, Human
cugucccuucauuauucacuac

SEQ ID NO: 854423 - RNA, 22 nt, Human
uuaggaguccagaugucuuggg

SEQ ID NO: 854424 - RNA, 20 nt, Human
accaauguuagcuuaguacu

SEQ ID NO: 854425 - RNA, 22 nt, Human
aguuggcauuuuauuuaaguau

SEQ ID NO: 854426 - RNA, 22 nt, Human
agucuuuccugcuugacuguuc

SEQ ID NO: 854427 - RNA, 22 nt, Human
ugaggcucaagaaagauuuguu

SEQ ID NO: 854428 - RNA, 20 nt, Human
gggugggagagucugagggu

SEQ ID NO: 854429 - RNA, 22 nt, Human
guggucagcagcagugggagug

SEQ ID NO: 854430 - RNA, 22 nt, Human
caaggccaguuucuccuaguca

SEQ ID NO: 854431 - RNA, 22 nt, Human
uagcuaucuguguccagaucca

SEQ ID NO: 854432 - RNA, 22 nt, Human
ugcugaggcauuuggacagagu

SEQ ID NO: 854433 - RNA, 19 nt, Human
ggcugcugguuacagaggc

SEQ ID NO: 854434 - RNA, 22 nt, Human
cccaggaggugugcccaacucg

SEQ ID NO: 854435 - RNA, 21 nt, Human
gggcagcucuguuuuauuuuc

SEQ ID NO: 854436 - RNA, 22 nt, Human
gucuucuuguguugccugucuu

SEQ ID NO: 854437 - RNA, 22 nt, Human
cuuauuucuccauccagaguca

SEQ ID NO: 854438 - RNA, 20 nt, Human
gcugaggucauuaugccuca

SEQ ID NO: 854439 - RNA, 22 nt, Human
aagcaauauacugauaugauua

SEQ ID NO: 854440 - RNA, 22 nt, Human
uagaacuguccaagucugagcu

SEQ ID NO: 854441 - RNA, 22 nt, Human
auucaaguucuucugucuuugc

SEQ ID NO: 854442 - RNA, 22 nt, Human
aaacugccacaagagggacauc

SEQ ID NO: 854443 - RNA, 22 nt, Human
cugaggccgucugggucugcag

SEQ ID NO: 854444 - RNA, 22 nt, Human
cugcuguguuucugcuagaaaa

SEQ ID NO: 854445 - RNA, 22 nt, Human
uuauuacacugaaagaauugcg

SEQ ID NO: 854446 - RNA, 22 nt, Human
gcuggccacauugugccguccu

SEQ ID NO: 854447 - RNA, 22 nt, Human
cucuucuugaaagaggaauuca

SEQ ID NO: 854448 - RNA, 22 nt, Human
aggcagcaugggccccagcucc

SEQ ID NO: 854449 - RNA, 18 nt, Human
agcagcugugccacacug

SEQ ID NO: 854450 - RNA, 22 nt, Human
cagcagcugcaaauggaaacag

SEQ ID NO: 854451 - RNA, 22 nt, Human
uuccuggcaccaccacuucuag

SEQ ID NO: 854452 - RNA, 22 nt, Human
uggccacaugcgucugugaggc

SEQ ID NO: 854453 - RNA, 22 nt, Human
aucacauucuuucaaagcaguc

SEQ ID NO: 854454 - RNA, 22 nt, Human
uaagaacuucggacauguuauc

SEQ ID NO: 854455 - RNA, 22 nt, Human
ucugagccacagauguccuguu

SEQ ID NO: 854456 - RNA, 21 nt, Human
ggcagcucagcagauggggac

SEQ ID NO: 854457 - RNA, 22 nt, Human
ugcccagggauaagccuagaga

SEQ ID NO: 854458 - RNA, 22 nt, Human
aaguaaaauguuuccuuuauua

SEQ ID NO: 854459 - RNA, 21 nt, Human
agccagcuaucacacagcauu

SEQ ID NO: 854460 - RNA, 21 nt, Human
gggugggaggacacagcaggc

SEQ ID NO: 854461 - RNA, 22 nt, Human
gucaggauuaaugggaguaugc

SEQ ID NO: 854462 - RNA, 22 nt, Human
cagaggcaggaagaugggcagu

SEQ ID NO: 854463 - RNA, 20 nt, Human
gccugccucagcuagcugag

SEQ ID NO: 854464 - RNA, 22 nt, Human
ucuuugaauuucugacugucuu

SEQ ID NO: 854465 - RNA, 22 nt, Human
ucucaggaucuaauacauggua

SEQ ID NO: 854466 - RNA, 22 nt, Human
aucaggauuauuaaaucuggau

SEQ ID NO: 854467 - RNA, 23 nt, Human
ggcugagacuacaggcgcuugcc

SEQ ID NO: 854468 - RNA, 19 nt, Human
ucccucccuguaaucucac

SEQ ID NO: 854469 - RNA, 22 nt, Human
auuugguagugauugaaauuau

SEQ ID NO: 854470 - RNA, 22 nt, Human
augaggucauccuggaguaagg

SEQ ID NO: 854471 - RNA, 22 nt, Human
uucacagucacccuucuccaug

SEQ ID NO: 854472 - RNA, 22 nt, Human
ugccuggaaggcccaugggaag

SEQ ID NO: 854473 - RNA, 22 nt, Human
uggcagcucuguucaacaugag

SEQ ID NO: 854474 - RNA, 21 nt, Human
auucugaguugucagucuuca

SEQ ID NO: 854475 - RNA, 20 nt, Human
cagaggcauuuucagacucu

SEQ ID NO: 854476 - RNA, 22 nt, Human
aggcacaggaaugucauccagu

SEQ ID NO: 854477 - RNA, 22 nt, Human
gagguagccacagauagagacu

SEQ ID NO: 854478 - RNA, 22 nt, Human
uugcaucuaccauaucaaagau

SEQ ID NO: 854479 - RNA, 22 nt, Human
aagcaaaggcaggagcuuguga

SEQ ID NO: 854480 - RNA, 22 nt, Human
uccauuuuagaagaaaauccac

SEQ ID NO: 854481 - RNA, 22 nt, Human
uucuugcaggucacucacugag

SEQ ID NO: 854482 - RNA, 22 nt, Human
caaaugaagaaccuucucaccu

SEQ ID NO: 854483 - RNA, 23 nt, Human
uacuacagggucuugcuaugaau

SEQ ID NO: 854484 - RNA, 22 nt, Human
aguugcagacgcagagauguug

SEQ ID NO: 854485 - RNA, 22 nt, Human
cugccuggcccagggaugggcc

SEQ ID NO: 854486 - RNA, 22 nt, Human
aggcugcucaguagauggagcu

SEQ ID NO: 854487 - RNA, 22 nt, Human
aaacugguauucaaauguuugg

SEQ ID NO: 854488 - RNA, 22 nt, Human
aggagcugcagauucugccuug

SEQ ID NO: 854489 - RNA, 22 nt, Human
cagaaguuugcaauuguuuauu

SEQ ID NO: 854490 - RNA, 17 nt, Human
uucugagccacuuccuu

SEQ ID NO: 854491 - RNA, 22 nt, Human
auagcuguuagauuggggucga

SEQ ID NO: 854492 - RNA, 21 nt, Human
ugaaacagauggaaguauuug

SEQ ID NO: 854493 - RNA, 22 nt, Human
acuuccaaauaccaucacauug

SEQ ID NO: 854494 - RNA, 22 nt, Human
uuucagaaagcugaacauauga

SEQ ID NO: 854495 - RNA, 22 nt, Human
ugaggcagguaagcaaguuuug

SEQ ID NO: 854496 - RNA, 22 nt, Human
cauuugcagagggugacacucu

SEQ ID NO: 854497 - RNA, 22 nt, Human
acuguguggaccacucugaggc

SEQ ID NO: 854498 - RNA, 22 nt, Human
gcugcaggcucugcaggaauug

SEQ ID NO: 854499 - RNA, 22 nt, Human
aaguaagucuuacauucacauu

SEQ ID NO: 854500 - RNA, 22 nt, Human
uggcagcuguguccagguagaa

SEQ ID NO: 854501 - RNA, 22 nt, Human
augauguuaccaguacuuagag

SEQ ID NO: 854502 - RNA, 22 nt, Human
ugaggcaguauucuccauucca

SEQ ID NO: 854503 - RNA, 22 nt, Human
caggcagagugagaagcccuug

SEQ ID NO: 854504 - RNA, 22 nt, Human
ggucagccuuggauuugguagc

SEQ ID NO: 854505 - RNA, 22 nt, Human
gccaggaguguguggcuauguu

SEQ ID NO: 854506 - RNA, 22 nt, Human
gagguccagagcagguucagug

SEQ ID NO: 854507 - RNA, 23 nt, Human
ucucaggacacacaugucuauca

SEQ ID NO: 854508 - RNA, 22 nt, Human
aggagaggcucuaacucugugu

SEQ ID NO: 854509 - RNA, 22 nt, Human
agucaguuucccuggaaagcag

SEQ ID NO: 854510 - RNA, 20 nt, Human
agaggccaguuaggagucua

SEQ ID NO: 854511 - RNA, 22 nt, Human
caggcagcucaaccuugggagc

SEQ ID NO: 854512 - RNA, 22 nt, Human
gcugagcagguuugaugcuuuu

SEQ ID NO: 854513 - RNA, 22 nt, Human
uaucuguucaauggaagaugac

SEQ ID NO: 854514 - RNA, 22 nt, Human
uuucacaacugcuuauuugaga

SEQ ID NO: 854515 - RNA, 21 nt, Human
ggacagcugcgcgcagggcuc

SEQ ID NO: 854516 - RNA, 22 nt, Human
auauucuucuuguucagacuau

SEQ ID NO: 854517 - RNA, 22 nt, Human
ccuccugggacaggcuggcaca

SEQ ID NO: 854518 - RNA, 22 nt, Human
uccuggucuacacugcauuggg

SEQ ID NO: 854519 - RNA, 22 nt, Human
acaagcaugggcuuugacauca

SEQ ID NO: 854520 - RNA, 22 nt, Human
cuuaggaugaguuuuugcguuu

SEQ ID NO: 854521 - RNA, 22 nt, Human
gcaggcugaguugggaaaccaa

SEQ ID NO: 854522 - RNA, 22 nt, Human
agcuagccuaggcagagugcau

SEQ ID NO: 854523 - RNA, 22 nt, Human
guugaaaguagaugcuauuugg

SEQ ID NO: 854524 - RNA, 22 nt, Human
cugugccaguguauuccuguga

SEQ ID NO: 854525 - RNA, 22 nt, Human
ucccaggaaaacacucgaggac

SEQ ID NO: 854526 - RNA, 22 nt, Human
ggcugcagaggcgaucugaggu

SEQ ID NO: 854527 - RNA, 22 nt, Human
cauuucacaaauggccacauca

SEQ ID NO: 854528 - RNA, 22 nt, Human
gccaggcuaagaaaggugugau

SEQ ID NO: 854529 - RNA, 22 nt, Human
uggagagguuuaaacaaaaguu

SEQ ID NO: 854530 - RNA, 21 nt, Human
acagaacuguauagugauaaa

SEQ ID NO: 854531 - RNA, 22 nt, Human
agggggugucucugauuggguu

SEQ ID NO: 854532 - RNA, 22 nt, Human
ggcugcagcccucgccuagcca

SEQ ID NO: 854533 - RNA, 22 nt, Human
uuggccaaggaccuuuuuggag

SEQ ID NO: 854534 - RNA, 22 nt, Human
gagccaaggguugccauggaga

SEQ ID NO: 854535 - RNA, 18 nt, Human
gacaaaaguacagacaga

SEQ ID NO: 854536 - RNA, 22 nt, Human
ugagauguaagguaugcuuacu

SEQ ID NO: 854537 - RNA, 22 nt, Human
aggcagcuuucagugucucuca

SEQ ID NO: 854538 - RNA, 21 nt, Human
ugcacuucaguggcuaaauuc

SEQ ID NO: 854539 - RNA, 22 nt, Human
gaggccaggacaugaaagcuga

SEQ ID NO: 854540 - RNA, 22 nt, Human
ugcuguguucuccugacucacc

SEQ ID NO: 854541 - RNA, 23 nt, Human
auaaauuacuaucucccuagagc

SEQ ID NO: 854542 - RNA, 22 nt, Human
uucucugagauagacuaagugg

SEQ ID NO: 854543 - RNA, 22 nt, Human
auagucuuagaucagauaaagu

SEQ ID NO: 854544 - RNA, 22 nt, Human
uuuuuaguagagguggguuuca

SEQ ID NO: 854545 - RNA, 22 nt, Human
aucuuucuuauuugaagaaaga

SEQ ID NO: 854546 - RNA, 17 nt, Human
cagcugugagagccuua

SEQ ID NO: 854547 - RNA, 22 nt, Human
gcugaggucaggagcugugggg

SEQ ID NO: 854548 - RNA, 22 nt, Human
uggcagucuggguuggcaguua

SEQ ID NO: 854549 - RNA, 22 nt, Human
aggcuagcaaugggagaugagu

SEQ ID NO: 854550 - RNA, 22 nt, Human
cagcugugaauugucuuaucua

SEQ ID NO: 854551 - RNA, 22 nt, Human
cuccugggagucuuccuggaug

SEQ ID NO: 854552 - RNA, 22 nt, Human
uaccauuucauucuuuccucau

SEQ ID NO: 854553 - RNA, 22 nt, Human
uccauuuucuaaguaucacuua

SEQ ID NO: 854554 - RNA, 22 nt, Human
gcacagcucgagcucaggaggg

SEQ ID NO: 854555 - RNA, 22 nt, Human
agggucuguggaugcaucuggg

SEQ ID NO: 854556 - RNA, 22 nt, Human
gggcugagugggccucuuacuu

SEQ ID NO: 854557 - RNA, 22 nt, Human
ugaaagguagcuggccucauag

SEQ ID NO: 854558 - RNA, 22 nt, Human
acuccuggaaaagaacgcaggg

SEQ ID NO: 854559 - RNA, 22 nt, Human
uagggauguccugagacuuggc

SEQ ID NO: 854560 - RNA, 22 nt, Human
gacccuccuacuacccuggaaa

SEQ ID NO: 854561 - RNA, 22 nt, Human
cauuuucagcacccaucugaaa

SEQ ID NO: 854562 - RNA, 22 nt, Human
uuagagaagcuguaauuauuca

SEQ ID NO: 854563 - RNA, 22 nt, Human
cagaaguuggagcuuuccauca

SEQ ID NO: 854564 - RNA, 22 nt, Human
ugccugggcucaccgccucuuu

SEQ ID NO: 854565 - RNA, 22 nt, Human
gugcugugcgcuuuuucuguau

SEQ ID NO: 854566 - RNA, 22 nt, Human
ccuggagauuucuucaagcuuu

SEQ ID NO: 854567 - RNA, 22 nt, Human
aguuacagcacucaaaguuuuc

SEQ ID NO: 854568 - RNA, 22 nt, Human
cccaagagcuucuaggacgcug

SEQ ID NO: 854569 - RNA, 22 nt, Human
cccccagucugaacagcagcug

SEQ ID NO: 854570 - RNA, 22 nt, Human
uagggcagagcuuguacacgau

SEQ ID NO: 854571 - RNA, 22 nt, Human
uugaaagucacaauggcauuaa

SEQ ID NO: 854572 - RNA, 22 nt, Human
cuggcccaggaagacguguccc

SEQ ID NO: 854573 - RNA, 20 nt, Human
guauuaggagguaaauguaa

SEQ ID NO: 854574 - RNA, 22 nt, Human
uacccaggaggaaacugaggcu

SEQ ID NO: 854575 - RNA, 22 nt, Human
uaaacauuuguuauucuuguuu

SEQ ID NO: 854576 - RNA, 22 nt, Human
gacaggaggcagagcucaggug

SEQ ID NO: 854577 - RNA, 21 nt, Human
uaugguaaccagacaagaaug

SEQ ID NO: 854578 - RNA, 18 nt, Human
ugagaggcagguagagga

SEQ ID NO: 854579 - RNA, 22 nt, Human
uucuccaacacaagcaugaugu

SEQ ID NO: 854580 - RNA, 22 nt, Human
cagagagggcggcccuggcuuc

SEQ ID NO: 854581 - RNA, 22 nt, Human
uugaaagugccaaguccuagug

SEQ ID NO: 854582 - RNA, 22 nt, Human
ucagagagccucaggcacugcc

SEQ ID NO: 854583 - RNA, 22 nt, Human
agcggcugcuccgcaggcuggc

SEQ ID NO: 854584 - RNA, 22 nt, Human
gugcuuucugcugcauuccucu

SEQ ID NO: 854585 - RNA, 22 nt, Human
cuauuacauuucuggacauuca

SEQ ID NO: 854586 - RNA, 22 nt, Human
uccuggccucacaguccugggu

SEQ ID NO: 854587 - RNA, 22 nt, Human
guaacugguuuucuucccucuc

SEQ ID NO: 854588 - RNA, 22 nt, Human
aguucuucauaaccuuacugug

SEQ ID NO: 854589 - RNA, 22 nt, Human
auuauauaggacuugcccuucc

SEQ ID NO: 854590 - RNA, 22 nt, Human
ggcugcugacaaacaugaucau

SEQ ID NO: 854591 - RNA, 22 nt, Human
uucagaaaucgaguuucauguc

SEQ ID NO: 854592 - RNA, 22 nt, Human
uggcugagggggcucugcucag

SEQ ID NO: 854593 - RNA, 22 nt, Human
gcugauguaagacuuuugguuu

SEQ ID NO: 854594 - RNA, 22 nt, Human
gcuggcaggagccuuucccuuu

SEQ ID NO: 854595 - RNA, 16 nt, Human
auuuccagauuaugca

SEQ ID NO: 854596 - RNA, 22 nt, Human
gagaggcaggcgcugcaauggu

SEQ ID NO: 854597 - RNA, 22 nt, Human
ccuggagcaucaggaggaaggg

SEQ ID NO: 854598 - RNA, 22 nt, Human
ugaggggaaggcaugauaaaua

SEQ ID NO: 854599 - RNA, 22 nt, Human
cccaggaacagcacagaacagc

SEQ ID NO: 854600 - RNA, 23 nt, Human
uggaaagcggaccuggggcagag

SEQ ID NO: 854601 - RNA, 22 nt, Human
aggccaaauagcagguuugcua

SEQ ID NO: 854602 - RNA, 20 nt, Human
gaugggaaucggagcuggua

SEQ ID NO: 854603 - RNA, 22 nt, Human
aacugccuggccaggcugcaac

SEQ ID NO: 854604 - RNA, 22 nt, Human
aguuaacacaaguaagauucca

SEQ ID NO: 854605 - RNA, 20 nt, Human
ucaggcuggugggcuuuccc

SEQ ID NO: 854606 - RNA, 22 nt, Human
cuugauguauaaguugauaugu

SEQ ID NO: 854607 - RNA, 22 nt, Human
acaggcugccacuugcauccaa

SEQ ID NO: 854608 - RNA, 22 nt, Human
acuccuggugcugaugaagaga

SEQ ID NO: 854609 - RNA, 22 nt, Human
uccugccuuagagcaaggaaaa

SEQ ID NO: 854610 - RNA, 22 nt, Human
acaauacaggcuucuggacuua

SEQ ID NO: 854611 - RNA, 22 nt, Human
agcuccaggauaagacaggugc

SEQ ID NO: 854612 - RNA, 22 nt, Human
aggcugagccacggggcuggcu

SEQ ID NO: 854613 - RNA, 22 nt, Human
guucuucaguaaaauuaaaugu

SEQ ID NO: 854614 - RNA, 22 nt, Human
gggcagcugccaagugcaucgc

SEQ ID NO: 854615 - RNA, 19 nt, Human
ggcagcuugggaagguagc

SEQ ID NO: 854616 - RNA, 20 nt, Human
uuaagaaaagcacauccugc

SEQ ID NO: 854617 - RNA, 18 nt, Human
cugaauuaucucaucauu

SEQ ID NO: 854618 - RNA, 22 nt, Human
uaagauuacagugagaaauaaa

SEQ ID NO: 854619 - RNA, 22 nt, Human
gaggagagccugcacuuugacc

SEQ ID NO: 854620 - RNA, 22 nt, Human
uggccacacccaccuagaggag

SEQ ID NO: 854621 - RNA, 22 nt, Human
auaauauuugcauuacugugau

SEQ ID NO: 854622 - RNA, 22 nt, Human
caguaaagcauguaugucuuca

SEQ ID NO: 854623 - RNA, 22 nt, Human
cuagccaugggcauuaaaggua

SEQ ID NO: 854624 - RNA, 22 nt, Human
ucucacuggguauaaaugagua

SEQ ID NO: 854625 - RNA, 22 nt, Human
uggcagacacugucgaagccua

SEQ ID NO: 854626 - RNA, 22 nt, Human
uagaagcagcaggaguaaaggc

SEQ ID NO: 854627 - RNA, 17 nt, Human
caaggccagcaucuuca

SEQ ID NO: 854628 - RNA, 22 nt, Human
auaaucuuguauuuccuaaagu

SEQ ID NO: 854629 - RNA, 22 nt, Human
cccaggcagugugugcaugcgu

SEQ ID NO: 854630 - RNA, 22 nt, Human
agugucagccugggcaaggaac

SEQ ID NO: 854631 - RNA, 22 nt, Human
ccagagcugcauccagcagguu

SEQ ID NO: 854632 - RNA, 20 nt, Human
acuccugguaacuuuuguga

SEQ ID NO: 854633 - RNA, 22 nt, Human
cuaggccacuugcucucaugga

SEQ ID NO: 854634 - RNA, 22 nt, Human
acacauuaucucauuaaauacu

SEQ ID NO: 854635 - RNA, 22 nt, Human
gagcaagacuacaggcagauga

SEQ ID NO: 854636 - RNA, 22 nt, Human
gcugaggauuacuugaagucag

SEQ ID NO: 854637 - RNA, 21 nt, Human
gguguccagaggaguccccag

SEQ ID NO: 854638 - RNA, 22 nt, Human
gacaaaaguguuuugaacaagg

SEQ ID NO: 854639 - RNA, 22 nt, Human
ccaggcugugcuuuucauaaau

SEQ ID NO: 854640 - RNA, 22 nt, Human
gaggcagcaucuauggugggaa

SEQ ID NO: 854641 - RNA, 22 nt, Human
ggcagucuuaucagcauuggac

SEQ ID NO: 854642 - RNA, 21 nt, Human
ugcuggcugaaaggcacagag

SEQ ID NO: 854643 - RNA, 22 nt, Human
aggaagcucaaagccaugaugu

SEQ ID NO: 854644 - RNA, 22 nt, Human
ucuggcugaagcuuuugcagcu

SEQ ID NO: 854645 - RNA, 23 nt, Human
ucccaggaaucugcauuuuuaac

SEQ ID NO: 854646 - RNA, 22 nt, Human
ucuggccacccgaggccccugc

SEQ ID NO: 854647 - RNA, 22 nt, Human
uauuuccaggccccacucuaga

SEQ ID NO: 854648 - RNA, 21 nt, Human
acagacagggccagugucccc

SEQ ID NO: 854649 - RNA, 22 nt, Human
uuugcagucuggccugcuuugg

SEQ ID NO: 854650 - RNA, 22 nt, Human
cugguccauucucucccugaag

SEQ ID NO: 854651 - RNA, 20 nt, Human
gcccaggaauuugcauuucu

SEQ ID NO: 854652 - RNA, 22 nt, Human
gauggcagucaaccaggugagg

SEQ ID NO: 854653 - RNA, 22 nt, Human
ggcagccagagggcagcuggau

SEQ ID NO: 854654 - RNA, 22 nt, Human
ccuugcugcgugcuagcacaga

SEQ ID NO: 854655 - RNA, 22 nt, Human
uuuauguaauuucauaggugug

SEQ ID NO: 854656 - RNA, 22 nt, Human
cuucuucauaggcaguccuguu

SEQ ID NO: 854657 - RNA, 23 nt, Human
uuugaaaguaucaacucgccuga

SEQ ID NO: 854658 - RNA, 22 nt, Human
ggggcagcucccgagggcagga

SEQ ID NO: 854659 - RNA, 21 nt, Human
augucaaaugcuuuauuuuau

SEQ ID NO: 854660 - RNA, 22 nt, Human
auucuucaccauggauaauuug

SEQ ID NO: 854661 - RNA, 22 nt, Human
gcaggagaacaaagcaagcugc

SEQ ID NO: 854662 - RNA, 22 nt, Human
uuccuggcaugaaaaauaucac

SEQ ID NO: 854663 - RNA, 22 nt, Human
ccagggaguuuccaaucugaga

SEQ ID NO: 854664 - RNA, 22 nt, Human
ucugaaggugcuagagaaagcu

SEQ ID NO: 854665 - RNA, 19 nt, Human
cugcuucaggcgccuugcc

SEQ ID NO: 854666 - RNA, 22 nt, Human
uugaggucugagacugugcagg

SEQ ID NO: 854667 - RNA, 22 nt, Human
uagaaauaaaucugcagcuggg

SEQ ID NO: 854668 - RNA, 22 nt, Human
cugagggcaccgacagagugga

SEQ ID NO: 854669 - RNA, 22 nt, Human
ccacagugaguucuguacucug

SEQ ID NO: 854670 - RNA, 22 nt, Human
gucuagagugcuuccuagucau

SEQ ID NO: 854671 - RNA, 22 nt, Human
augguacaauguguuuguuagg

SEQ ID NO: 854672 - RNA, 22 nt, Human
gcagcugaauguccauugcugc

SEQ ID NO: 854673 - RNA, 22 nt, Human
uuuuuuauaucaacugaagucu

SEQ ID NO: 854674 - RNA, 22 nt, Human
uggaagggagugacagucagag

SEQ ID NO: 854675 - RNA, 22 nt, Human
gaauuauaaacuagugacuuca

SEQ ID NO: 854676 - RNA, 20 nt, Human
ggcaugagaugugagggagg

SEQ ID NO: 854677 - RNA, 22 nt, Human
ugcugcuguuuccuacaucuca

SEQ ID NO: 854678 - RNA, 22 nt, Human
auacuuucugaccaauuaauug

SEQ ID NO: 854679 - RNA, 22 nt, Human
ugccuugcgggcguuucuguug

SEQ ID NO: 854680 - RNA, 22 nt, Human
aggcaguuuaggcagcgauuua

SEQ ID NO: 854681 - RNA, 22 nt, Human
aggcaagcauugggaacagggc

SEQ ID NO: 854682 - RNA, 22 nt, Human
cacugguacguagguuggggca

SEQ ID NO: 854683 - RNA, 22 nt, Human
aaggaaccuggaguagagggag

SEQ ID NO: 854684 - RNA, 22 nt, Human
gcugaggccucagaaggcugag

SEQ ID NO: 854685 - RNA, 20 nt, Human
uuuacauuuugaaacaguga

SEQ ID NO: 854686 - RNA, 22 nt, Human
ccucaggaaaugaauaaauggc

SEQ ID NO: 854687 - RNA, 22 nt, Human
auuaggaagaggaugucagcau

SEQ ID NO: 854688 - RNA, 22 nt, Human
gucugaggguugugcuggagga

SEQ ID NO: 854689 - RNA, 22 nt, Human
ccuccuggcccugggccuggaa

SEQ ID NO: 854690 - RNA, 22 nt, Human
uuucuuguaagauguuuauuaa

SEQ ID NO: 854691 - RNA, 20 nt, Human
aagggcagagggaacagacu

SEQ ID NO: 854692 - RNA, 22 nt, Human
agguaacuguggcuagguaacu

SEQ ID NO: 854693 - RNA, 22 nt, Human
aggauguucgggucacauagcc

SEQ ID NO: 854694 - RNA, 22 nt, Human
cauuuuaaaugauuuaagccaa

SEQ ID NO: 854695 - RNA, 22 nt, Human
guauuagggccaaaggcaggaa

SEQ ID NO: 854696 - RNA, 17 nt, Human
ucaggauguagcaguag

SEQ ID NO: 854697 - RNA, 22 nt, Human
ggcugagggccagggcuagucu

SEQ ID NO: 854698 - RNA, 22 nt, Human
auauuagggucucuaaauucua

SEQ ID NO: 854699 - RNA, 22 nt, Human
ucucaggaagauuagggcuaag

SEQ ID NO: 854700 - RNA, 22 nt, Human
uaggccagcccuuaguccuguc

SEQ ID NO: 854701 - RNA, 22 nt, Human
guuguuuugcaggauccuuaca

SEQ ID NO: 854702 - RNA, 22 nt, Human
aggcuggagggcaauggcaaga

SEQ ID NO: 854703 - RNA, 22 nt, Human
acagugcuggcuacaacccugg

SEQ ID NO: 854704 - RNA, 22 nt, Human
ggccugagcagacagcaugaug

SEQ ID NO: 854705 - RNA, 22 nt, Human
agagggagugaaauggaauaga

SEQ ID NO: 854706 - RNA, 22 nt, Human
cugccccauggucccugguggg

SEQ ID NO: 854707 - RNA, 22 nt, Human
aaauuauaggugccaccuugga

SEQ ID NO: 854708 - RNA, 22 nt, Human
aagugcugggauuacagguguc

SEQ ID NO: 854709 - RNA, 19 nt, Human
gccaggagggcucuggcug

SEQ ID NO: 854710 - RNA, 22 nt, Human
aggcugaggcagguggaucauu

SEQ ID NO: 854711 - RNA, 22 nt, Human
auugaaagaguuuucugcugca

SEQ ID NO: 854712 - RNA, 22 nt, Human
uggccaaauuugguguaacuug

SEQ ID NO: 854713 - RNA, 22 nt, Human
aaacaggcaucacucagcaaag

SEQ ID NO: 854714 - RNA, 22 nt, Human
augaggcaaucaugguccaguu

SEQ ID NO: 854715 - RNA, 22 nt, Human
acagaacuuccagggaacauac

SEQ ID NO: 854716 - RNA, 22 nt, Human
acaggcugaggaugauugcauc

SEQ ID NO: 854717 - RNA, 23 nt, Human
cuucuggcucuauaucagaauuc

SEQ ID NO: 854718 - RNA, 21 nt, Human
ggccugaguauaggacaggcc

SEQ ID NO: 854719 - RNA, 22 nt, Human
gcugaguugaaagcagaggaua

SEQ ID NO: 854720 - RNA, 21 nt, Human
uucuucuuggacuguuuuggc

SEQ ID NO: 854721 - RNA, 22 nt, Human
uacuuacagagcuuauaaguua

SEQ ID NO: 854722 - RNA, 22 nt, Human
uugcugugaaaccaugggaagu

SEQ ID NO: 854723 - RNA, 22 nt, Human
ucugagguucuguuuucaacug

SEQ ID NO: 854724 - RNA, 22 nt, Human
ugccucagucuaaagucucuca

SEQ ID NO: 854725 - RNA, 22 nt, Human
cugcuuugggcagcuuuguggc

SEQ ID NO: 854726 - RNA, 23 nt, Human
agcagcugugguuuaccuuagua

SEQ ID NO: 854727 - RNA, 22 nt, Human
cuagcaucagaugagaagcugu

SEQ ID NO: 854728 - RNA, 17 nt, Human
agcaaaaguaucaaagc

SEQ ID NO: 854729 - RNA, 16 nt, Human
gcccaggacgggaggc

SEQ ID NO: 854730 - RNA, 22 nt, Human
caggcugaggguuaggccuuag

SEQ ID NO: 854731 - RNA, 22 nt, Human
aauggccagcaacaggagugaa

SEQ ID NO: 854732 - RNA, 22 nt, Human
ugcuuuggccacuagaauucag

SEQ ID NO: 854733 - RNA, 22 nt, Human
gcugagagaaaagugagguucu

SEQ ID NO: 854734 - RNA, 22 nt, Human
ugcuggguuaccuaagccuaaa

SEQ ID NO: 854735 - RNA, 23 nt, Human
ugccucaguggaaugugagggug

SEQ ID NO: 854736 - RNA, 17 nt, Human
gcuguaguuugauaaga

SEQ ID NO: 854737 - RNA, 22 nt, Human
gaggcugauucggggaacagca

SEQ ID NO: 854738 - RNA, 22 nt, Human
uacaugaauguuucaauauugu

SEQ ID NO: 854739 - RNA, 22 nt, Human
uucaggauccccaccgcguuua

SEQ ID NO: 854740 - RNA, 22 nt, Human
gggagcugaauggcaauggaga

SEQ ID NO: 854741 - RNA, 22 nt, Human
ucaggcuguauaucuugcacuc

SEQ ID NO: 854742 - RNA, 22 nt, Human
aacuucugggcuguccaaaacu

SEQ ID NO: 854743 - RNA, 22 nt, Human
aagggcagccugacucacgguc

SEQ ID NO: 854744 - RNA, 22 nt, Human
aggcagugcugugcccugaacc

SEQ ID NO: 854745 - RNA, 22 nt, Human
cccaggagaugcacuccauugg

SEQ ID NO: 854746 - RNA, 22 nt, Human
agagggcagucucagauuggga

SEQ ID NO: 854747 - RNA, 22 nt, Human
cugccuucaucucugagcuggg

SEQ ID NO: 854748 - RNA, 22 nt, Human
uccaccagcuucuucaccagcu

SEQ ID NO: 854749 - RNA, 22 nt, Human
gcaggagacaacuguaaggaga

SEQ ID NO: 854750 - RNA, 22 nt, Human
aagggcugccagggggugccag

SEQ ID NO: 854751 - RNA, 22 nt, Human
cuguggaaaauuuguauguaau

SEQ ID NO: 854752 - RNA, 22 nt, Human
cugacuuuuccaaauaauacuu

SEQ ID NO: 854753 - RNA, 22 nt, Human
uagaaaguagccacuuacagag

SEQ ID NO: 854754 - RNA, 21 nt, Human
uucuucaguuuaauauaaaau

SEQ ID NO: 854755 - RNA, 22 nt, Human
ggagcugugcagugacuacaga

SEQ ID NO: 854756 - RNA, 22 nt, Human
uacacuuucguuuguggauuag

SEQ ID NO: 854757 - RNA, 22 nt, Human
ucauuuaauagcuuuugucuuu

SEQ ID NO: 854758 - RNA, 22 nt, Human
ggcugcaguugugugaaggccg

SEQ ID NO: 854759 - RNA, 22 nt, Human
gugagguccucccugcugggag

SEQ ID NO: 854760 - RNA, 22 nt, Human
gggcugagaaguugaucccaag

SEQ ID NO: 854761 - RNA, 22 nt, Human
ggacaagccugugaguggguuu

SEQ ID NO: 854762 - RNA, 22 nt, Human
agugcuuugugcucucacugca

SEQ ID NO: 854763 - RNA, 22 nt, Human
uagggaugagccaguggguagu

SEQ ID NO: 854764 - RNA, 22 nt, Human
agagagcauugaggaaaucuuc

SEQ ID NO: 854765 - RNA, 22 nt, Human
uagacagagugaagacaagugg

SEQ ID NO: 854766 - RNA, 18 nt, Human
guauuaguuuucagagag

SEQ ID NO: 854767 - RNA, 22 nt, Human
agggagcuuccgaacuacagcu

SEQ ID NO: 854768 - RNA, 22 nt, Human
ugcugaggacaccuagccuucu

SEQ ID NO: 854769 - RNA, 22 nt, Human
cccugagccacacagagcaggu

SEQ ID NO: 854770 - RNA, 22 nt, Human
gcuccuggccagcacagggccc

SEQ ID NO: 854771 - RNA, 22 nt, Human
gagcgauguggguauguagaag

SEQ ID NO: 854772 - RNA, 22 nt, Human
aauaucaguauauuguaucagu

SEQ ID NO: 854773 - RNA, 22 nt, Human
uauuuuaaagugaagggucuug

SEQ ID NO: 854774 - RNA, 22 nt, Human
acagcugcacacugaacuuggu

SEQ ID NO: 854775 - RNA, 22 nt, Human
ggaggcgauccugggaaacacc

SEQ ID NO: 854776 - RNA, 22 nt, Human
cacagcauaaugaaauauacuu

SEQ ID NO: 854777 - RNA, 22 nt, Human
ucaggagaaucagggcuguccu

SEQ ID NO: 854778 - RNA, 22 nt, Human
ccaggcuggagugcaguagugu

SEQ ID NO: 854779 - RNA, 22 nt, Human
ccacagagacaggguccuugcu

SEQ ID NO: 854780 - RNA, 22 nt, Human
cuuuauuagauguagacuuucu

SEQ ID NO: 854781 - RNA, 22 nt, Human
ucugucuccucugaggugccag

SEQ ID NO: 854782 - RNA, 22 nt, Human
aguagugaacagccacaggauu

SEQ ID NO: 854783 - RNA, 22 nt, Human
aaggccagacaggaccacaucu

SEQ ID NO: 854784 - RNA, 22 nt, Human
auucugagaaaugcauugucag

SEQ ID NO: 854785 - RNA, 22 nt, Human
cauggcugaaauucuucgcuug

SEQ ID NO: 854786 - RNA, 22 nt, Human
caggaugagaagggcucuuacg

SEQ ID NO: 854787 - RNA, 22 nt, Human
uccaggagugauaaggccacug

SEQ ID NO: 854788 - RNA, 22 nt, Human
gggacgggcaguccaagggguc

SEQ ID NO: 854789 - RNA, 22 nt, Human
uggagagguugaauaacuuguc

SEQ ID NO: 854790 - RNA, 22 nt, Human
caggcaugcuucugucugggca

SEQ ID NO: 854791 - RNA, 22 nt, Human
ugaacuccaaauacugcugauu

SEQ ID NO: 854792 - RNA, 22 nt, Human
agcuccugcgcacggugcacac

SEQ ID NO: 854793 - RNA, 22 nt, Human
agaaaacugggaggagagcuuc

SEQ ID NO: 854794 - RNA, 22 nt, Human
aguaccaugcuuccugacuggu

SEQ ID NO: 854795 - RNA, 22 nt, Human
cuggcacaugcucccugagugg

SEQ ID NO: 854796 - RNA, 22 nt, Human
cccuggaguccuggcaguugau

SEQ ID NO: 854797 - RNA, 22 nt, Human
ucuuucaaugagcauucuuucc

SEQ ID NO: 854798 - RNA, 22 nt, Human
agcaccugccugcauuggcuau

SEQ ID NO: 854799 - RNA, 22 nt, Human
cuugcugucuugcauuuagagc

SEQ ID NO: 854800 - RNA, 22 nt, Human
gggcagcucucacagcagccaa

SEQ ID NO: 854801 - RNA, 22 nt, Human
agggcagccucucagccuaggu

SEQ ID NO: 854802 - RNA, 22 nt, Human
uuggcagagaguaugcugaaga

SEQ ID NO: 854803 - RNA, 23 nt, Human
cccaggagccugaguccucucug

SEQ ID NO: 854804 - RNA, 22 nt, Human
cagcucccgccaucgggaggca

SEQ ID NO: 854805 - RNA, 22 nt, Human
gaggcagcgggucaggaccgug

SEQ ID NO: 854806 - RNA, 22 nt, Human
uuugaaauuaagauauugucca

SEQ ID NO: 854807 - RNA, 22 nt, Human
aaaauuauggaguaucccaaag

SEQ ID NO: 854808 - RNA, 22 nt, Human
aggagcagaauuuaaugugcag

SEQ ID NO: 854809 - RNA, 22 nt, Human
gaaauuaagcaggggucugugg

SEQ ID NO: 854810 - RNA, 22 nt, Human
ugcugagggagcaucaaagaaa

SEQ ID NO: 854811 - RNA, 22 nt, Human
gcccucccuacagccuauuucu

SEQ ID NO: 854812 - RNA, 22 nt, Human
agaaaugaauauguagugguua

SEQ ID NO: 854813 - RNA, 22 nt, Human
cuauuagguuggugcaaaagua

SEQ ID NO: 854814 - RNA, 22 nt, Human
caggcagcugcuggguucagcc

SEQ ID NO: 854815 - RNA, 22 nt, Human
aaauacagaguugcuuaaaagc

SEQ ID NO: 854816 - RNA, 22 nt, Human
uucugaauggcaagcauuaggc

SEQ ID NO: 854817 - RNA, 22 nt, Human
ggcagucacaggggagacuggg

SEQ ID NO: 854818 - RNA, 22 nt, Human
uggcugagccuuuggggcuuuc

SEQ ID NO: 854819 - RNA, 20 nt, Human
uccugagccuccaccauguc

SEQ ID NO: 854820 - RNA, 22 nt, Human
guucuucacauuucauugagga

SEQ ID NO: 854821 - RNA, 22 nt, Human
uugcuuugccaccagaagucua

SEQ ID NO: 854822 - RNA, 22 nt, Human
uucucugaaggccaugcucacu

SEQ ID NO: 854823 - RNA, 22 nt, Human
auugaaaggcaaaguaggaagc

SEQ ID NO: 854824 - RNA, 22 nt, Human
gagaggucaucucccaucagca

SEQ ID NO: 854825 - RNA, 22 nt, Human
cagaggcaaaagagguggaggu

SEQ ID NO: 854826 - RNA, 22 nt, Human
gaguguaguucauuccguccua

SEQ ID NO: 854827 - RNA, 21 nt, Human
ggcagccugacccccagagag

SEQ ID NO: 854828 - RNA, 22 nt, Human
uguccauggauagagcugcucg

SEQ ID NO: 854829 - RNA, 22 nt, Human
gagcaagauuaaaaggcugggu

SEQ ID NO: 854830 - RNA, 22 nt, Human
caaguaaacaauaugugauuca

SEQ ID NO: 854831 - RNA, 22 nt, Human
auguuuccgugagcauccuuga

SEQ ID NO: 854832 - RNA, 19 nt, Human
uauucaggaugauggcaca

SEQ ID NO: 854833 - RNA, 22 nt, Human
aggcagcaugggcccagagucc

SEQ ID NO: 854834 - RNA, 22 nt, Human
aaagacuuggcuuaugauuugc

SEQ ID NO: 854835 - RNA, 22 nt, Human
uuugaaguggaaaaggauuuaa

SEQ ID NO: 854836 - RNA, 22 nt, Human
aguuauaaucugcuacugauau

SEQ ID NO: 854837 - RNA, 17 nt, Human
aagagaggcugagcugg

SEQ ID NO: 854838 - RNA, 22 nt, Human
aggcacaguggcucacaccugu

SEQ ID NO: 854839 - RNA, 22 nt, Human
accaggaggaaguguuaaugau

SEQ ID NO: 854840 - RNA, 18 nt, Human
ccagguggugacagagau

SEQ ID NO: 854841 - RNA, 22 nt, Human
ggagagugggagcaacuguugc

SEQ ID NO: 854842 - RNA, 20 nt, Human
ugcugucguguuuucugcuu

SEQ ID NO: 854843 - RNA, 22 nt, Human
cugugccaggcccagcugacuu

SEQ ID NO: 854844 - RNA, 22 nt, Human
uguuggcagauugucuaggguu

SEQ ID NO: 854845 - RNA, 22 nt, Human
ccagacaggaacacacaucucc

SEQ ID NO: 854846 - RNA, 23 nt, Human
agugcuggagaagcuucuggcuu

SEQ ID NO: 854847 - RNA, 22 nt, Human
uggcuucucaguuucauaauga

SEQ ID NO: 854848 - RNA, 21 nt, Human
uggcuucugccaauguuaaga

SEQ ID NO: 854849 - RNA, 22 nt, Human
ugacagacagcuucucauuuua

SEQ ID NO: 854850 - RNA, 22 nt, Human
aagaugacuauuuaucuguaag

SEQ ID NO: 854851 - RNA, 22 nt, Human
aaagccauuacaaaauuucaua

SEQ ID NO: 854852 - RNA, 22 nt, Human
uugcauuuccuguacuguuuga

SEQ ID NO: 854853 - RNA, 22 nt, Human
uauagaggccaccaacaugaaa

SEQ ID NO: 854854 - RNA, 22 nt, Human
acaccuuugugaagugaugaug

SEQ ID NO: 854855 - RNA, 22 nt, Human
acuugcugguggcauuuacagu

SEQ ID NO: 854856 - RNA, 22 nt, Human
gcaccuggcugcccagguggag

SEQ ID NO: 854857 - RNA, 22 nt, Human
aggguagguguaagauagcccu

SEQ ID NO: 854858 - RNA, 22 nt, Human
uagaaaugauugguugagcucu

SEQ ID NO: 854859 - RNA, 22 nt, Human
uaauuauagccgcuauuuugcu

SEQ ID NO: 854860 - RNA, 22 nt, Human
uuauuacaaugcagaaaauaga

SEQ ID NO: 854861 - RNA, 17 nt, Human
gaggagcuccaguaggu

SEQ ID NO: 854862 - RNA, 22 nt, Human
ccagagcugaugggcccagggu

SEQ ID NO: 854863 - RNA, 22 nt, Human
cugagguccucagagggaaagg

SEQ ID NO: 854864 - RNA, 22 nt, Human
cagccuuuaagcuuggauaggu

SEQ ID NO: 854865 - RNA, 20 nt, Human
cauuuguuagcuuucuacug

SEQ ID NO: 854866 - RNA, 22 nt, Human
cugccuccugccgugcagcuuc

SEQ ID NO: 854867 - RNA, 22 nt, Human
aggcuaaggagugugaugcuca

SEQ ID NO: 854868 - RNA, 22 nt, Human
gcagaggagcaaguugcuacag

SEQ ID NO: 854869 - RNA, 22 nt, Human
uuugaaagaauuuauguacuuu

SEQ ID NO: 854870 - RNA, 22 nt, Human
uuugaaagggaaauaaacuccu

SEQ ID NO: 854871 - RNA, 22 nt, Human
augcugugucaccuuaggauuu

SEQ ID NO: 854872 - RNA, 22 nt, Human
uguauuagguugaugcgaaagu

SEQ ID NO: 854873 - RNA, 22 nt, Human
cucuuaguaaugccaugaagca

SEQ ID NO: 854874 - RNA, 22 nt, Human
ggaggugguggcagugacaauu

SEQ ID NO: 854875 - RNA, 22 nt, Human
aggcugaggcagguggaucacc

SEQ ID NO: 854876 - RNA, 18 nt, Human
ucuccuggguaggggccu

SEQ ID NO: 854877 - RNA, 22 nt, Human
aaacaugaauagauauuaaaca

SEQ ID NO: 854878 - RNA, 22 nt, Human
aaagcagacugauuugcaucac

SEQ ID NO: 854879 - RNA, 20 nt, Human
gagauggacagaugaagggg

SEQ ID NO: 854880 - RNA, 22 nt, Human
caguuucuacgaaggucaaccc

SEQ ID NO: 854881 - RNA, 22 nt, Human
gaggccaggggccuggagauga

SEQ ID NO: 854882 - RNA, 22 nt, Human
cuucagugaauguugaguaagg

SEQ ID NO: 854883 - RNA, 22 nt, Human
uguaggucucagugucugagcu

SEQ ID NO: 854884 - RNA, 22 nt, Human
gcagugcagugggacagggcgc

SEQ ID NO: 854885 - RNA, 22 nt, Human
ugaggcagcauucuucaagaca

SEQ ID NO: 854886 - RNA, 16 nt, Human
uucuagaaaagaaggu

SEQ ID NO: 854887 - RNA, 21 nt, Human
gacuuucuuaccagauuuuug

SEQ ID NO: 854888 - RNA, 22 nt, Human
acucaggagggaucagcuauca

SEQ ID NO: 854889 - RNA, 22 nt, Human
cauccugguuaccccauaguca

SEQ ID NO: 854890 - RNA, 22 nt, Human
aggaaaaauaaggcagcagggc

SEQ ID NO: 854891 - RNA, 21 nt, Human
ucucugugucuuuaagcugga

SEQ ID NO: 854892 - RNA, 22 nt, Human
gagagcuguuuaucuucuucaa

SEQ ID NO: 854893 - RNA, 22 nt, Human
cugugccaucugcacucucguc

SEQ ID NO: 854894 - RNA, 22 nt, Human
aggccaaauugaucaucuuuag

SEQ ID NO: 854895 - RNA, 22 nt, Human
gcugagugauucauacgcugcu

SEQ ID NO: 854896 - RNA, 22 nt, Human
uucuuauucuugaaauguggga

SEQ ID NO: 854897 - RNA, 22 nt, Human
uuuaaauuuguguuuagagggu

SEQ ID NO: 854898 - RNA, 22 nt, Human
cugcccagaagccagaugggca

SEQ ID NO: 854899 - RNA, 22 nt, Human
cucaagacugaucgcaguggaa

SEQ ID NO: 854900 - RNA, 22 nt, Human
cuuagcaugugguguccuugua

SEQ ID NO: 854901 - RNA, 21 nt, Human
ggcugcugucaccgcugucac

SEQ ID NO: 854902 - RNA, 22 nt, Human
cugaggucagaguuuagucugg

SEQ ID NO: 854903 - RNA, 22 nt, Human
aagugaccucaugguuucuccu

SEQ ID NO: 854904 - RNA, 22 nt, Human
cugaggugagaggaggccaugu

SEQ ID NO: 854905 - RNA, 22 nt, Human
gucccaggugggcuccaccucu

SEQ ID NO: 854906 - RNA, 22 nt, Human
auuaggacacauacauguacag

SEQ ID NO: 854907 - RNA, 17 nt, Human
uccaggagaggcaaugg

SEQ ID NO: 854908 - RNA, 22 nt, Human
guggcagagagcaagugucuga

SEQ ID NO: 854909 - RNA, 22 nt, Human
cugccugcuuuucugggagccg

SEQ ID NO: 854910 - RNA, 22 nt, Human
agagacagaggcaauauagcuu

SEQ ID NO: 854911 - RNA, 21 nt, Human
gacaggacuagaccagagcuc

SEQ ID NO: 854912 - RNA, 22 nt, Human
cgcagggauuucaaggggccuu

SEQ ID NO: 854913 - RNA, 22 nt, Human
aggcagcauuugaauccagguc

SEQ ID NO: 854914 - RNA, 22 nt, Human
ccuggccagcgccggcugcucg

SEQ ID NO: 854915 - RNA, 22 nt, Human
gagagcaggcucucgggggcca

SEQ ID NO: 854916 - RNA, 22 nt, Human
ugacaguauugauggcaggauu

SEQ ID NO: 854917 - RNA, 22 nt, Human
cuccugaguaguagcauuguca

SEQ ID NO: 854918 - RNA, 22 nt, Human
ugcuagugcaggguuuucaguu

SEQ ID NO: 854919 - RNA, 22 nt, Human
aagcagagcaagcguauuuauu

SEQ ID NO: 854920 - RNA, 22 nt, Human
uuucccaguucccugcucuaua

SEQ ID NO: 854921 - RNA, 22 nt, Human
agugauggugagugagaagcuc

SEQ ID NO: 854922 - RNA, 22 nt, Human
caggauggucucgaucuccuga

SEQ ID NO: 854923 - RNA, 20 nt, Human
uuucaguugguuaauggcau

SEQ ID NO: 854924 - RNA, 22 nt, Human
uuuuaauugcaauuaugguccc

SEQ ID NO: 854925 - RNA, 22 nt, Human
uugaaauggaagugaaaauucu

SEQ ID NO: 854926 - RNA, 22 nt, Human
ugcugaggacuaaaggagauga

SEQ ID NO: 854927 - RNA, 22 nt, Human
ugaaaugacaaagguuuuucuu

SEQ ID NO: 854928 - RNA, 22 nt, Human
gggcugagugucccaggccgaa

SEQ ID NO: 854929 - RNA, 22 nt, Human
gaggcagaaguugcagugagca

SEQ ID NO: 854930 - RNA, 22 nt, Human
uauuggaugauucacuuggcag

SEQ ID NO: 854931 - RNA, 22 nt, Human
uuggcagcagggaguuggccgc

SEQ ID NO: 854932 - RNA, 22 nt, Human
uagcacaucuggcgcuuauagg

SEQ ID NO: 854933 - RNA, 22 nt, Human
agcugcccuuuaugaugcugaa

SEQ ID NO: 854934 - RNA, 22 nt, Human
cugaggccuaagacaugaauga

SEQ ID NO: 854935 - RNA, 22 nt, Human
caacauuucaaggucuuuagga

SEQ ID NO: 854936 - RNA, 22 nt, Human
ugcaggcuccaugaggacaggc

SEQ ID NO: 854937 - RNA, 22 nt, Human
uagcaaaagccacgauuacuuu

SEQ ID NO: 854938 - RNA, 22 nt, Human
uuuaacauguucaagaaacaua

SEQ ID NO: 854939 - RNA, 22 nt, Human
ccugagguggcugcagcacugc

SEQ ID NO: 854940 - RNA, 22 nt, Human
cugcuguguuggcauuggauag

SEQ ID NO: 854941 - RNA, 22 nt, Human
acucugggauuguuucugguau

SEQ ID NO: 854942 - RNA, 22 nt, Human
caaauauuccagguacaucccu

SEQ ID NO: 854943 - RNA, 22 nt, Human
uaucuguuguaguacagaugau

SEQ ID NO: 854944 - RNA, 22 nt, Human
acuauuagcauaucaugaaugg

SEQ ID NO: 854945 - RNA, 22 nt, Human
cagguaaaaauaaauuugugag

SEQ ID NO: 854946 - RNA, 22 nt, Human
ucaaggaaggucuguugcucca

SEQ ID NO: 854947 - RNA, 22 nt, Human
gagugcuguaggacugagcccu

SEQ ID NO: 854948 - RNA, 22 nt, Human
gagugucagugcuuggggcuac

SEQ ID NO: 854949 - RNA, 22 nt, Human
acugagguuuuuaguguuaaau

SEQ ID NO: 854950 - RNA, 22 nt, Human
ucagaaaagguagcugugacaa

SEQ ID NO: 854951 - RNA, 22 nt, Human
ugaguuuuuucaacauaugaag

SEQ ID NO: 854952 - RNA, 22 nt, Human
gcaggcuggucugaccaucccu

SEQ ID NO: 854953 - RNA, 23 nt, Human
uugcauagacauccucauagauu

SEQ ID NO: 854954 - RNA, 22 nt, Human
uccauuuuguagguaugcuaca

SEQ ID NO: 854955 - RNA, 22 nt, Human
uggcagcuccggguaggggcug

SEQ ID NO: 854956 - RNA, 22 nt, Human
aggcagguuggugagaagacug

SEQ ID NO: 854957 - RNA, 22 nt, Human
cagugcuguuguaagcucauug

SEQ ID NO: 854958 - RNA, 23 nt, Human
uccaggagaauuccagggcccgg

SEQ ID NO: 854959 - RNA, 22 nt, Human
gcugccucugcacagcucacuc

SEQ ID NO: 854960 - RNA, 18 nt, Human
ccagagcuggcuccucgc

SEQ ID NO: 854961 - RNA, 22 nt, Human
agcacugugguggaagcaucaa

SEQ ID NO: 854962 - RNA, 22 nt, Human
uuuccucauuuaucugcuggga

SEQ ID NO: 854963 - RNA, 22 nt, Human
uuggccaaccagaacggagguc

SEQ ID NO: 854964 - RNA, 22 nt, Human
uccaggugagugcaggugcaga

SEQ ID NO: 854965 - RNA, 22 nt, Human
aggaaaggccuuugcauuuggu

SEQ ID NO: 854966 - RNA, 18 nt, Human
ucuuccaacacugacacc

SEQ ID NO: 854967 - RNA, 22 nt, Human
aggagagggguaggauuaauuu

SEQ ID NO: 854968 - RNA, 22 nt, Human
cugaggcugagacaggugaaau

SEQ ID NO: 854969 - RNA, 20 nt, Human
uuggccaaaucuuagucaug

SEQ ID NO: 854970 - RNA, 22 nt, Human
caggcugaggcaguaggguuug

SEQ ID NO: 854971 - RNA, 22 nt, Human
ucuccugguuuguuaaauaauu

SEQ ID NO: 854972 - RNA, 21 nt, Human
uggcugccuacaugcugcagg

SEQ ID NO: 854973 - RNA, 22 nt, Human
uugaagaggacuuugcagcugu

SEQ ID NO: 854974 - RNA, 19 nt, Human
aggucuaaucauaagacaa

SEQ ID NO: 854975 - RNA, 22 nt, Human
ucuccucucuuaccugguacaa

SEQ ID NO: 854976 - RNA, 22 nt, Human
acccagaggugucuagcaagcu

SEQ ID NO: 854977 - RNA, 22 nt, Human
cccagcugauuuuugcagagau

SEQ ID NO: 854978 - RNA, 22 nt, Human
ucugccucgcuaacagcagcca

SEQ ID NO: 854979 - RNA, 22 nt, Human
ugcugaggucacggcggccaga

SEQ ID NO: 854980 - RNA, 22 nt, Human
agucucugcugguugugccuau

SEQ ID NO: 854981 - RNA, 22 nt, Human
uuucuuaguccuagagugauuu

SEQ ID NO: 854982 - RNA, 22 nt, Human
cagagcucuauguucauggagg

SEQ ID NO: 854983 - RNA, 22 nt, Human
aggacuuagaacauuauguacu

SEQ ID NO: 854984 - RNA, 22 nt, Human
uuaggaaauuccaccuguauuc

SEQ ID NO: 854985 - RNA, 20 nt, Human
uaagaugagcuauaagaagu

SEQ ID NO: 854986 - RNA, 22 nt, Human
ucaugcuuauugcauauuugga

SEQ ID NO: 854987 - RNA, 22 nt, Human
uuauuuggguuugaguguggca

SEQ ID NO: 854988 - RNA, 22 nt, Human
uccaggaggaggaaggcugcca

SEQ ID NO: 854989 - RNA, 22 nt, Human
cagccugagccuucuguagcaa

SEQ ID NO: 854990 - RNA, 22 nt, Human
ucuucauuccguagauauuuau

SEQ ID NO: 854991 - RNA, 22 nt, Human
ccugguggaaggugagugaggc

SEQ ID NO: 854992 - RNA, 23 nt, Human
agacaguggccgagagguacuag

SEQ ID NO: 854993 - RNA, 22 nt, Human
ggcaugcucuuuguccacagua

SEQ ID NO: 854994 - RNA, 22 nt, Human
aggcaagcgcagaagcggagga

SEQ ID NO: 854995 - RNA, 22 nt, Human
aacugcuuaucuuugguagaug

SEQ ID NO: 854996 - RNA, 22 nt, Human
caauaagauguauugagcagag

SEQ ID NO: 854997 - RNA, 22 nt, Human
caggauggagaguuguugguug

SEQ ID NO: 854998 - RNA, 22 nt, Human
ggcuuggaaaugguaaugagcu

SEQ ID NO: 854999 - RNA, 22 nt, Human
aaugccaacuuggauauacauu

SEQ ID NO: 855000 - RNA, 22 nt, Human
aguaaucaauuuuucgguggau

SEQ ID NO: 855001 - RNA, 22 nt, Human
agaggggacagccaccugcccg

SEQ ID NO: 855002 - RNA, 22 nt, Human
uuugaaagcuacuuucggguca

SEQ ID NO: 855003 - RNA, 22 nt, Human
ggugaaggcacaagagggcaag

SEQ ID NO: 855004 - RNA, 22 nt, Human
gagugcaggccugagcaccauc

SEQ ID NO: 855005 - RNA, 22 nt, Human
caggauggucuucauuuggcuc

SEQ ID NO: 855006 - RNA, 22 nt, Human
gagguggaaggcaggaacaaau

SEQ ID NO: 855007 - RNA, 22 nt, Human
auacuguuuugugacuuaucuu

SEQ ID NO: 855008 - RNA, 20 nt, Human
uauuuguauuugggaaaguu

SEQ ID NO: 855009 - RNA, 22 nt, Human
agugcuuucuugcuccaucagu

SEQ ID NO: 855010 - RNA, 22 nt, Human
ggagguggcagggaacauaauu

SEQ ID NO: 855011 - RNA, 22 nt, Human
aauauaaugcuguuuuaugcca

SEQ ID NO: 855012 - RNA, 22 nt, Human
uucucugaucuugcuagacuga

SEQ ID NO: 855013 - RNA, 22 nt, Human
ucugaaagaagggcagucuuuu

SEQ ID NO: 855014 - RNA, 22 nt, Human
gaaaugaacugauuaucauugc

SEQ ID NO: 855015 - RNA, 22 nt, Human
uacuuuuuagcacagugugugc

SEQ ID NO: 855016 - RNA, 22 nt, Human
uuguuugaggucacugauauuu

SEQ ID NO: 855017 - RNA, 22 nt, Human
ggagaggagcuauugggggcuc

SEQ ID NO: 855018 - RNA, 18 nt, Human
cagggcuguggggucacu

SEQ ID NO: 855019 - RNA, 22 nt, Human
aggauuuguuuauaggucuuaa

SEQ ID NO: 855020 - RNA, 22 nt, Human
cuucccagaccuuagagugcag

SEQ ID NO: 855021 - RNA, 22 nt, Human
gagaggagguggcuaugacagc

SEQ ID NO: 855022 - RNA, 22 nt, Human
gcugaggccccagggugauggg

SEQ ID NO: 855023 - RNA, 22 nt, Human
acaggcuguugggguccagggu

SEQ ID NO: 855024 - RNA, 22 nt, Human
uuucaaaccuacuuguauguuu

SEQ ID NO: 855025 - RNA, 22 nt, Human
aauuccuaguuguacuuaguga

SEQ ID NO: 855026 - RNA, 22 nt, Human
cagucugaacacugggcuacuc

SEQ ID NO: 855027 - RNA, 22 nt, Human
gaggggcagagguagagaacaa

SEQ ID NO: 855028 - RNA, 22 nt, Human
auaaggaaaugaaacucuaaua

SEQ ID NO: 855029 - RNA, 22 nt, Human
cagacaggguccuguccgucac

SEQ ID NO: 855030 - RNA, 20 nt, Human
accuacauguauagugaggg

SEQ ID NO: 855031 - RNA, 22 nt, Human
gagcaagauccuguuuuucuau

SEQ ID NO: 855032 - RNA, 21 nt, Human
cccaggagaagaaaagaugca

SEQ ID NO: 855033 - RNA, 22 nt, Human
aggaugagagauacauggagca

SEQ ID NO: 855034 - RNA, 22 nt, Human
ggguggagcuuggacaccagua

SEQ ID NO: 855035 - RNA, 19 nt, Human
ucugagguggaacuggggg

SEQ ID NO: 855036 - RNA, 22 nt, Human
acugaggauuagcccaggcuag

SEQ ID NO: 855037 - RNA, 22 nt, Human
cccaggaggguggccucugccc

SEQ ID NO: 855038 - RNA, 22 nt, Human
aacauuuaugauugagguaaau

SEQ ID NO: 855039 - RNA, 22 nt, Human
gcacugugcuagaagccagggg

SEQ ID NO: 855040 - RNA, 22 nt, Human
uuggccaagugguuaaucucca

SEQ ID NO: 855041 - RNA, 22 nt, Human
acauuuaaauaccuauguuucu

SEQ ID NO: 855042 - RNA, 22 nt, Human
agaaguuaccacauacuucucu

SEQ ID NO: 855043 - RNA, 22 nt, Human
gcugagacuggcagcaggaagu

SEQ ID NO: 855044 - RNA, 22 nt, Human
cccaggagguguagcugcgugg

SEQ ID NO: 855045 - RNA, 20 nt, Human
ggaggguggaagaaagcaag

SEQ ID NO: 855046 - RNA, 22 nt, Human
gcuggagaaacugcagcugagg

SEQ ID NO: 855047 - RNA, 22 nt, Human
agcuaagacuuagugacuuagu

SEQ ID NO: 855048 - RNA, 22 nt, Human
uucauugugaacacauucugcc

SEQ ID NO: 855049 - RNA, 22 nt, Human
cagcugcuuucagcaggaggga

SEQ ID NO: 855050 - RNA, 22 nt, Human
ccaggagagcucuaaauggcug

SEQ ID NO: 855051 - RNA, 22 nt, Human
gagcccugacacugagggaguu

SEQ ID NO: 855052 - RNA, 17 nt, Human
auuagguuuugucauga

SEQ ID NO: 855053 - RNA, 22 nt, Human
uccaugagggacacuggaugcu

SEQ ID NO: 855054 - RNA, 20 nt, Human
aggauuugagaaggcgucuu

SEQ ID NO: 855055 - RNA, 22 nt, Human
aguaaucugauuuuauagcuau

SEQ ID NO: 855056 - RNA, 22 nt, Human
ucaggcugaaaggacuccaguu

SEQ ID NO: 855057 - RNA, 22 nt, Human
aaugaaacuaguagaaucuuug

SEQ ID NO: 855058 - RNA, 22 nt, Human
uuauuagguuuacauaaagguu

SEQ ID NO: 855059 - RNA, 22 nt, Human
ggcagcauauauucagugggca

SEQ ID NO: 855060 - RNA, 22 nt, Human
gacuuucuuguagugucugaug

SEQ ID NO: 855061 - RNA, 22 nt, Human
ucauuuguugaacuuuagugcg

SEQ ID NO: 855062 - RNA, 22 nt, Human
uuucacagguacaaacacuccu

SEQ ID NO: 855063 - RNA, 22 nt, Human
cucuucuuggcccccaugaggg

SEQ ID NO: 855064 - RNA, 22 nt, Human
ucuacuguagugaugcugcagu

SEQ ID NO: 855065 - RNA, 22 nt, Human
cccuccucucccuaagagucac

SEQ ID NO: 855066 - RNA, 21 nt, Human
aggucagcccagcucuggaag

SEQ ID NO: 855067 - RNA, 18 nt, Human
ggcagcuugacuagcaac

SEQ ID NO: 855068 - RNA, 22 nt, Human
gcugcagagggaggggcucgca

SEQ ID NO: 855069 - RNA, 22 nt, Human
auguuuuugagauacaaacaga

SEQ ID NO: 855070 - RNA, 22 nt, Human
uauuggcagcaugagcuccugg

SEQ ID NO: 855071 - RNA, 20 nt, Human
uuugucuguuaaguguuucu

SEQ ID NO: 855072 - RNA, 22 nt, Human
ggcugagggucccagacccuaa

SEQ ID NO: 855073 - RNA, 22 nt, Human
acucaccacacccuugcacuug

SEQ ID NO: 855074 - RNA, 22 nt, Human
acacauuucuaaauuuuuaccg

SEQ ID NO: 855075 - RNA, 21 nt, Human
uggccaaacuggagcauuuga

SEQ ID NO: 855076 - RNA, 22 nt, Human
aguggcagagccaaguagagcc

SEQ ID NO: 855077 - RNA, 22 nt, Human
uagcaagaagcugucacaggug

SEQ ID NO: 855078 - RNA, 22 nt, Human
gugaggucuuugggaggugauu

SEQ ID NO: 855079 - RNA, 19 nt, Human
uggagggguuugaaugugg

SEQ ID NO: 855080 - RNA, 20 nt, Human
cgugcugugaccuugagcau

SEQ ID NO: 855081 - RNA, 22 nt, Human
uacccaggggcugagcagaggu

SEQ ID NO: 855082 - RNA, 22 nt, Human
aggcagagcuggguuuugaaau

SEQ ID NO: 855083 - RNA, 22 nt, Human
aucaggaugcugucaguuacca

SEQ ID NO: 855084 - RNA, 22 nt, Human
uucugagcugcaacacuaacau

SEQ ID NO: 855085 - RNA, 22 nt, Human
gcugcuugauuagguugacacu

SEQ ID NO: 855086 - RNA, 22 nt, Human
gcuccuggguguggcugccccu

SEQ ID NO: 855087 - RNA, 22 nt, Human
gcccaggaagugacucagaugu

SEQ ID NO: 855088 - RNA, 22 nt, Human
uuauucuucuucucuugccagg

SEQ ID NO: 855089 - RNA, 22 nt, Human
ggcugcagagcugggugggccu

SEQ ID NO: 855090 - RNA, 22 nt, Human
ugccaggagucaggccaggcag

SEQ ID NO: 855091 - RNA, 22 nt, Human
caaggccaguccauuuuggaag

SEQ ID NO: 855092 - RNA, 22 nt, Human
gacccaggguggucaccugaaa

SEQ ID NO: 855093 - RNA, 22 nt, Human
cccaggagacugagcuguaacc

SEQ ID NO: 855094 - RNA, 22 nt, Human
cacagaacauccuuagcucaug

SEQ ID NO: 855095 - RNA, 22 nt, Human
cuggcuuucucugugguguuca

SEQ ID NO: 855096 - RNA, 22 nt, Human
uuagagccaguuacaaggucaa

SEQ ID NO: 855097 - RNA, 22 nt, Human
ucagaaaauaacuguuaguuug

SEQ ID NO: 855098 - RNA, 22 nt, Human
ugcugcugauggcaccuaggca

SEQ ID NO: 855099 - RNA, 22 nt, Human
ucugucucaaguucuugcacuc

SEQ ID NO: 855100 - RNA, 23 nt, Human
uagugucaagagggaguguaauu

SEQ ID NO: 855101 - RNA, 22 nt, Human
acuuuauuuccuauugcaucca

SEQ ID NO: 855102 - RNA, 22 nt, Human
uuauuaggaaaaggucagaugu

SEQ ID NO: 855103 - RNA, 22 nt, Human
uagggcuguggucaguccucua

SEQ ID NO: 855104 - RNA, 22 nt, Human
auggcugggucaccaucagggu

SEQ ID NO: 855105 - RNA, 22 nt, Human
uuuuccagauuggacuuagucc

SEQ ID NO: 855106 - RNA, 22 nt, Human
gcaucuaauccaguccagcauc

SEQ ID NO: 855107 - RNA, 22 nt, Human
aagggcaggagaagacggauau

SEQ ID NO: 855108 - RNA, 22 nt, Human
gccaucacauccaggcuaccuc

SEQ ID NO: 855109 - RNA, 20 nt, Human
guaaaauauggucuuugggu

SEQ ID NO: 855110 - RNA, 22 nt, Human
ucugccugagggagcugaggaa

SEQ ID NO: 855111 - RNA, 20 nt, Human
uccaggagaacugggagccg

SEQ ID NO: 855112 - RNA, 22 nt, Human
ccacagagcauuagauuucaga

SEQ ID NO: 855113 - RNA, 22 nt, Human
ucuucagagugaaagucuguga

SEQ ID NO: 855114 - RNA, 22 nt, Human
ugaacucucucaagugacagaa

SEQ ID NO: 855115 - RNA, 22 nt, Human
aucauucuaguccuuauggucu

SEQ ID NO: 855116 - RNA, 22 nt, Human
ggacugaggacaugugaggcau

SEQ ID NO: 855117 - RNA, 22 nt, Human
uucacagaauggcaaguuaugg

SEQ ID NO: 855118 - RNA, 22 nt, Human
aauccuggaauacaagagugaa

SEQ ID NO: 855119 - RNA, 19 nt, Human
ggcugcagagccccggcgc

SEQ ID NO: 855120 - RNA, 22 nt, Human
caggcagcucuaauggaaagug

SEQ ID NO: 855121 - RNA, 22 nt, Human
agaacuauugcaauaacaagaa

SEQ ID NO: 855122 - RNA, 22 nt, Human
aaaaugagauacaguuugaaag

SEQ ID NO: 855123 - RNA, 22 nt, Human
acccaggagcaggcugggcagu

SEQ ID NO: 855124 - RNA, 22 nt, Human
ugcugaggaauaauuguuccug

SEQ ID NO: 855125 - RNA, 22 nt, Human
uuuucauuguuccucgagcauu

SEQ ID NO: 855126 - RNA, 22 nt, Human
ucuuucuugguauaaagcaggg

SEQ ID NO: 855127 - RNA, 22 nt, Human
auguucuuccaaaucuguaaca

SEQ ID NO: 855128 - RNA, 22 nt, Human
cagaggucaagaucugaaguga

SEQ ID NO: 855129 - RNA, 22 nt, Human
gagggcugcugccagauaugcc

SEQ ID NO: 855130 - RNA, 22 nt, Human
ucuggccaauguugugaucaca

SEQ ID NO: 855131 - RNA, 22 nt, Human
guaggcagucucucaggugauc

SEQ ID NO: 855132 - RNA, 22 nt, Human
gcugaggugucaccuugcuggg

SEQ ID NO: 855133 - RNA, 22 nt, Human
auucacaaaaugauauagauac

SEQ ID NO: 855134 - RNA, 22 nt, Human
ggcagcuuccuaggagagggca

SEQ ID NO: 855135 - RNA, 22 nt, Human
agauaagauaguccagcacaau

SEQ ID NO: 855136 - RNA, 22 nt, Human
auauucuugugauuauaaagua

SEQ ID NO: 855137 - RNA, 22 nt, Human
uagaaagugaagguuaauuaau

SEQ ID NO: 855138 - RNA, 22 nt, Human
auucuuauuuaaauagagucug

SEQ ID NO: 855139 - RNA, 22 nt, Human
cuggcugugcagucuuccagaa

SEQ ID NO: 855140 - RNA, 22 nt, Human
cagggagggacaauugucaccu

SEQ ID NO: 855141 - RNA, 22 nt, Human
aggcacagcacaccuggccccc

SEQ ID NO: 855142 - RNA, 22 nt, Human
cuucucaguugcaagugucaga

SEQ ID NO: 855143 - RNA, 22 nt, Human
agaaaguuagcagacucuuggc

SEQ ID NO: 855144 - RNA, 22 nt, Human
caagaugugccuaaucagaccu

SEQ ID NO: 855145 - RNA, 22 nt, Human
uuagccauuuuauacaagugua

SEQ ID NO: 855146 - RNA, 22 nt, Human
gcagcugaaagggaucucuaca

SEQ ID NO: 855147 - RNA, 22 nt, Human
cauuguuauagcauuacacacc

SEQ ID NO: 855148 - RNA, 22 nt, Human
aggauuuuagauaagacagcaa

SEQ ID NO: 855149 - RNA, 22 nt, Human
uucacagaugccugaugugugg

SEQ ID NO: 855150 - RNA, 17 nt, Human
cauuuguugaucaguug

SEQ ID NO: 855151 - RNA, 22 nt, Human
agaggggaaguaaugaaugaua

SEQ ID NO: 855152 - RNA, 19 nt, Human
agacagagcucaguggguu

SEQ ID NO: 855153 - RNA, 22 nt, Human
gcuccuggcaggcagugugugu

SEQ ID NO: 855154 - RNA, 22 nt, Human
uucauugugauucuuggcuagc

SEQ ID NO: 855155 - RNA, 22 nt, Human
cucuucuugccugaugaggcag

SEQ ID NO: 855156 - RNA, 22 nt, Human
aucaggauucaguaucuccagc

SEQ ID NO: 855157 - RNA, 22 nt, Human
uuuuaauacugcuauuguagga

SEQ ID NO: 855158 - RNA, 22 nt, Human
ugcuuggcuuucugagcuucug

SEQ ID NO: 855159 - RNA, 22 nt, Human
uucuacaaauauuuacuguucc

SEQ ID NO: 855160 - RNA, 22 nt, Human
uuuggaauauuaaaaugucuca

SEQ ID NO: 855161 - RNA, 22 nt, Human
aauugcuaaagauuauguuuuc

SEQ ID NO: 855162 - RNA, 22 nt, Human
ccuggagcucacugggagccgg

SEQ ID NO: 855163 - RNA, 22 nt, Human
cuucuucacacuggucugaagc

SEQ ID NO: 855164 - RNA, 22 nt, Human
auuaggcaauucugggcaucuc

SEQ ID NO: 855165 - RNA, 22 nt, Human
cugaagucagauggcacaaggu

SEQ ID NO: 855166 - RNA, 22 nt, Human
augcuuuuaugucacaugguca

SEQ ID NO: 855167 - RNA, 22 nt, Human
gcugccuggagcucagccugcc

SEQ ID NO: 855168 - RNA, 22 nt, Human
cagucucuaaaucaaucugaau

SEQ ID NO: 855169 - RNA, 22 nt, Human
ucuggcugacauccuguaugag

SEQ ID NO: 855170 - RNA, 22 nt, Human
ggagaggguguggaaaguuauc

SEQ ID NO: 855171 - RNA, 22 nt, Human
cagcugacagugaggugggggc

SEQ ID NO: 855172 - RNA, 21 nt, Human
gccaggaguagauuacauuua

SEQ ID NO: 855173 - RNA, 22 nt, Human
gagcugaggcucaggcuggcgu

SEQ ID NO: 855174 - RNA, 22 nt, Human
cugagggcagugaugaagguga

SEQ ID NO: 855175 - RNA, 22 nt, Human
caugaggugauaaagcugggau

SEQ ID NO: 855176 - RNA, 22 nt, Human
cauuuguuaauuacuauuaucu

SEQ ID NO: 855177 - RNA, 22 nt, Human
accaggagccauagagucaggc

SEQ ID NO: 855178 - RNA, 22 nt, Human
uugaggucaucugaaguacuag

SEQ ID NO: 855179 - RNA, 22 nt, Human
uggcaccagcaccuagaugggg

SEQ ID NO: 855180 - RNA, 22 nt, Human
gagcccugaacaacagcaggaa

SEQ ID NO: 855181 - RNA, 22 nt, Human
aggccagcaagaaagagagucu

SEQ ID NO: 855182 - RNA, 22 nt, Human
auuuguagugaagugaaaauaa

SEQ ID NO: 855183 - RNA, 22 nt, Human
guaucacuuuugagagugagaa

SEQ ID NO: 855184 - RNA, 22 nt, Human
uugaggucaaguaaccacugga

SEQ ID NO: 855185 - RNA, 23 nt, Human
cagggaggagauacuguguaucu

SEQ ID NO: 855186 - RNA, 22 nt, Human
aggcagugccuggaccccagcu

SEQ ID NO: 855187 - RNA, 22 nt, Human
aggcugaggugugcugugaucg

SEQ ID NO: 855188 - RNA, 22 nt, Human
ccccucccugaccugguugggc

SEQ ID NO: 855189 - RNA, 22 nt, Human
gaaggaggcguuagcccuagga

SEQ ID NO: 855190 - RNA, 18 nt, Human
cgaggcaggcggaucacg

SEQ ID NO: 855191 - RNA, 22 nt, Human
uggcugagcugcagcguggcuu

SEQ ID NO: 855192 - RNA, 22 nt, Human
ccuggccaggcuccaaguacug

SEQ ID NO: 855193 - RNA, 22 nt, Human
uauugaggauugaggaaagcac

SEQ ID NO: 855194 - RNA, 22 nt, Human
cagaccagcucuaugaacccaa

SEQ ID NO: 855195 - RNA, 22 nt, Human
uuggccaacauggugaaacccc

SEQ ID NO: 855196 - RNA, 22 nt, Human
uuacacuucuaaaaaaagcagg

SEQ ID NO: 855197 - RNA, 22 nt, Human
auuuuacuacuccaauuaauga

SEQ ID NO: 855198 - RNA, 22 nt, Human
caaauacuacgauucuugcagu

SEQ ID NO: 855199 - RNA, 22 nt, Human
uucuucuucaagugcugcauuc

SEQ ID NO: 855200 - RNA, 22 nt, Human
uuugaauguuuuagguacuuaa

SEQ ID NO: 855201 - RNA, 22 nt, Human
aggcaggcccucuggaaaggua

SEQ ID NO: 855202 - RNA, 22 nt, Human
ggaagaggaggagccaggcuuu

SEQ ID NO: 855203 - RNA, 22 nt, Human
cucaggauggaagccuacagga

SEQ ID NO: 855204 - RNA, 22 nt, Human
cagcaggagcagucagacuccu

SEQ ID NO: 855205 - RNA, 22 nt, Human
gcuacugauugaccuuggagag

SEQ ID NO: 855206 - RNA, 22 nt, Human
uagggcugcugcagaugacagg

SEQ ID NO: 855207 - RNA, 21 nt, Human
uggcugaguggaugcaugaau

SEQ ID NO: 855208 - RNA, 22 nt, Human
gagaggauccacaaaccaggaa

SEQ ID NO: 855209 - RNA, 20 nt, Human
ucuccuggucugguccgugc

SEQ ID NO: 855210 - RNA, 20 nt, Human
auacaguaggugcucaauau

SEQ ID NO: 855211 - RNA, 22 nt, Human
ccucuucugcuucaggagcacu

SEQ ID NO: 855212 - RNA, 22 nt, Human
cucucuggaccucaacuauuuu

SEQ ID NO: 855213 - RNA, 22 nt, Human
uaggacauguguuuuauauaug

SEQ ID NO: 855214 - RNA, 22 nt, Human
gugacagagcugggauuugaag

SEQ ID NO: 855215 - RNA, 23 nt, Human
auucuucauuaucuucuagaaaa

SEQ ID NO: 855216 - RNA, 22 nt, Human
auacacuuuagaaaaacgcugc

SEQ ID NO: 855217 - RNA, 22 nt, Human
aggcagugcaugcaaaggucgg

SEQ ID NO: 855218 - RNA, 22 nt, Human
guagggagcccagagcccagug

SEQ ID NO: 855219 - RNA, 22 nt, Human
auguagagcaguguuguccaau

SEQ ID NO: 855220 - RNA, 22 nt, Human
gggcugaggaacauauuuuguu

SEQ ID NO: 855221 - RNA, 22 nt, Human
uggcagcaauuagcuagagcug

SEQ ID NO: 855222 - RNA, 22 nt, Human
cauuuuaagaugaccugguuuc

SEQ ID NO: 855223 - RNA, 22 nt, Human
ccaggcugcagucaaggggcau

SEQ ID NO: 855224 - RNA, 22 nt, Human
agucuucucauuucacaugcuu

SEQ ID NO: 855225 - RNA, 18 nt, Human
aacaugcauuagaacugc

SEQ ID NO: 855226 - RNA, 20 nt, Human
ccucaguguccuggacuggg

SEQ ID NO: 855227 - RNA, 22 nt, Human
cccaggaggcagagguuggagc

SEQ ID NO: 855228 - RNA, 22 nt, Human
gagcccuguagcaagucauguc

SEQ ID NO: 855229 - RNA, 22 nt, Human
uuugcaguuucauugcugaaau

SEQ ID NO: 855230 - RNA, 22 nt, Human
aauuuccagaccccauccacag

SEQ ID NO: 855231 - RNA, 22 nt, Human
cucacugucuguacuagcugau

SEQ ID NO: 855232 - RNA, 22 nt, Human
auuauggacguuaauuuuggaa

SEQ ID NO: 855233 - RNA, 22 nt, Human
ccagcagaggggcggagugcag

SEQ ID NO: 855234 - RNA, 22 nt, Human
gcccaggaucugcucagaucau

SEQ ID NO: 855235 - RNA, 22 nt, Human
cugagccccaucugaggugccc

SEQ ID NO: 855236 - RNA, 22 nt, Human
cugcuuugcauagcugccagag

SEQ ID NO: 855237 - RNA, 18 nt, Human
gagaggagccagaauuuu

SEQ ID NO: 855238 - RNA, 23 nt, Human
ucucaguuccagaggcuacaagu

SEQ ID NO: 855239 - RNA, 22 nt, Human
uggcuucugggacuugugagca

SEQ ID NO: 855240 - RNA, 22 nt, Human
cuugaaguugcaaaacauuaau

SEQ ID NO: 855241 - RNA, 22 nt, Human
uuucacauuagauaugucauuu

SEQ ID NO: 855242 - RNA, 22 nt, Human
cuggagucucuucuguagcuac

SEQ ID NO: 855243 - RNA, 17 nt, Human
cccagggaccacugcuu

SEQ ID NO: 855244 - RNA, 22 nt, Human
acugcuuuaucugagaaguccu

SEQ ID NO: 855245 - RNA, 17 nt, Human
augaggucauuaagaua

SEQ ID NO: 855246 - RNA, 21 nt, Human
ucacaucuauguuaagcaaac

SEQ ID NO: 855247 - RNA, 22 nt, Human
cugcuguggguuaagacacugu

SEQ ID NO: 855248 - RNA, 22 nt, Human
agaggucagauuucuccuggug

SEQ ID NO: 855249 - RNA, 22 nt, Human
aagggcagagggaaucccacau

SEQ ID NO: 855250 - RNA, 22 nt, Human
ccuggccagcagccccuuccuc

SEQ ID NO: 855251 - RNA, 22 nt, Human
ucucugguuauuaacuaacucc

SEQ ID NO: 855252 - RNA, 19 nt, Human
ggucagcugggcuagaggc

SEQ ID NO: 855253 - RNA, 22 nt, Human
guucuucaggccauccucccag

SEQ ID NO: 855254 - RNA, 22 nt, Human
gcugagggaggcugaacugagu

SEQ ID NO: 855255 - RNA, 22 nt, Human
auggccaagaaauugccgacug

SEQ ID NO: 855256 - RNA, 22 nt, Human
ccugccucaucaacuugucgug

SEQ ID NO: 855257 - RNA, 22 nt, Human
ucucugaguauccugaacugcc

SEQ ID NO: 855258 - RNA, 22 nt, Human
aagaacuguaucaagauguagu

SEQ ID NO: 855259 - RNA, 22 nt, Human
ggaggaugagcuacgaggagcu

SEQ ID NO: 855260 - RNA, 22 nt, Human
uugauagguuuuauguauaguu

SEQ ID NO: 855261 - RNA, 22 nt, Human
agagugcagauaagagaauguu

SEQ ID NO: 855262 - RNA, 22 nt, Human
uacaaaguaauguauaauaucg

SEQ ID NO: 855263 - RNA, 22 nt, Human
aaggcagccaugugcuuugggu

SEQ ID NO: 855264 - RNA, 22 nt, Human
aacauucugguucuaaaaaccu

SEQ ID NO: 855265 - RNA, 22 nt, Human
augagguccagggaaguuaaau

SEQ ID NO: 855266 - RNA, 16 nt, Human
aaggcugauuuucccu

SEQ ID NO: 855267 - RNA, 22 nt, Human
gaaucucaguggaagcaggaag

SEQ ID NO: 855268 - RNA, 22 nt, Human
ucuggccaguagauguggguug

SEQ ID NO: 855269 - RNA, 22 nt, Human
gaggcagcaaaauauaucauaa

SEQ ID NO: 855270 - RNA, 21 nt, Human
ugcugaugucagagaagcaag

SEQ ID NO: 855271 - RNA, 22 nt, Human
uuugaaaguguuuacuugggaa

SEQ ID NO: 855272 - RNA, 22 nt, Human
uggcagcugauuagauggugcc

SEQ ID NO: 855273 - RNA, 22 nt, Human
auugaaagauaggcuacugugg

SEQ ID NO: 855274 - RNA, 22 nt, Human
gcugccucuguagcuuuggacc

SEQ ID NO: 855275 - RNA, 22 nt, Human
ucauuuguucucauucucuacu

SEQ ID NO: 855276 - RNA, 22 nt, Human
acuccaggcaucugcuucugcu

SEQ ID NO: 855277 - RNA, 22 nt, Human
acucauugaaacuuaagaucua

SEQ ID NO: 855278 - RNA, 22 nt, Human
gagggcugaagauuguggcccc

SEQ ID NO: 855279 - RNA, 22 nt, Human
acuacacugcccuggggaucaa

SEQ ID NO: 855280 - RNA, 22 nt, Human
gcacuuucagcaggcagacaga

SEQ ID NO: 855281 - RNA, 22 nt, Human
ggcugaugggcaugagcuguca

SEQ ID NO: 855282 - RNA, 22 nt, Human
agcuaccuggcuuaucacuguc

SEQ ID NO: 855283 - RNA, 22 nt, Human
ucuuuauugcuacugguuuguc

SEQ ID NO: 855284 - RNA, 22 nt, Human
cucuggccugcagauccaugcu

SEQ ID NO: 855285 - RNA, 22 nt, Human
guggccaagagauaaaauugug

SEQ ID NO: 855286 - RNA, 22 nt, Human
agcccaggagguggagguugca

SEQ ID NO: 855287 - RNA, 22 nt, Human
cuugggaaugcuaacagaugac

SEQ ID NO: 855288 - RNA, 22 nt, Human
uuugcaauuugugcugcaaaug

SEQ ID NO: 855289 - RNA, 22 nt, Human
aaacugccuccugggcaacuaa

SEQ ID NO: 855290 - RNA, 19 nt, Human
cccaggagucuggcugguu

SEQ ID NO: 855291 - RNA, 22 nt, Human
ugcucccagggacucuggcugg

SEQ ID NO: 855292 - RNA, 22 nt, Human
uaacugguuuggcucagggucu

SEQ ID NO: 855293 - RNA, 22 nt, Human
aauacacuauuuugugcucagu

SEQ ID NO: 855294 - RNA, 22 nt, Human
ucuuuuauccuacauuuagcuc

SEQ ID NO: 855295 - RNA, 22 nt, Human
augcuguggccagaguucaacu

SEQ ID NO: 855296 - RNA, 22 nt, Human
uuuauauuucccaggauuggcc

SEQ ID NO: 855297 - RNA, 22 nt, Human
ugcucaguccuccugcagugcc

SEQ ID NO: 855298 - RNA, 22 nt, Human
auggcuucugucuuggaaauuu

SEQ ID NO: 855299 - RNA, 22 nt, Human
aaauguuucuacuugugagcau

SEQ ID NO: 855300 - RNA, 22 nt, Human
cuucuucaauagcaagcgcaua

SEQ ID NO: 855301 - RNA, 22 nt, Human
gaggcccacagggaguaccaag

SEQ ID NO: 855302 - RNA, 22 nt, Human
uuuuucaagacaaccugcaugu

SEQ ID NO: 855303 - RNA, 22 nt, Human
acagacuggagcccuuuugccc

SEQ ID NO: 855304 - RNA, 22 nt, Human
ucugagaggcaucugcacuucu

SEQ ID NO: 855305 - RNA, 22 nt, Human
cugaggucucuuuccauaguga

SEQ ID NO: 855306 - RNA, 22 nt, Human
gugguuuugccauuacaaguaa

SEQ ID NO: 855307 - RNA, 22 nt, Human
ucacaauuuggauacagcuaug

SEQ ID NO: 855308 - RNA, 22 nt, Human
cucacugacgaggaagcugaga

SEQ ID NO: 855309 - RNA, 22 nt, Human
gcucacugccauucucuagaug

SEQ ID NO: 855310 - RNA, 22 nt, Human
aggggcucaaagugugcaggga

SEQ ID NO: 855311 - RNA, 22 nt, Human
uagggcaggggaggaaucugaa

SEQ ID NO: 855312 - RNA, 22 nt, Human
ucuccugggugcuuuaucagaa

SEQ ID NO: 855313 - RNA, 22 nt, Human
aaagccagagcaagcugucaca

SEQ ID NO: 855314 - RNA, 22 nt, Human
cggaggggauacauuuucugaa

SEQ ID NO: 855315 - RNA, 21 nt, Human
acauuuucuguuuuaggaagu

SEQ ID NO: 855316 - RNA, 22 nt, Human
ugaggcagcccacuuuccuuag

SEQ ID NO: 855317 - RNA, 22 nt, Human
ucucagaguuuagagcugagcc

SEQ ID NO: 855318 - RNA, 22 nt, Human
ucuuugaauccuuuacaucuga

SEQ ID NO: 855319 - RNA, 22 nt, Human
aaugaacauggacaaguuaaua

SEQ ID NO: 855320 - RNA, 22 nt, Human
acagaagugacaauuucuuggg

SEQ ID NO: 855321 - RNA, 22 nt, Human
cccuuagcucaauuucuugccc

SEQ ID NO: 855322 - RNA, 22 nt, Human
uaggaugaaaauccagcuuaua

SEQ ID NO: 855323 - RNA, 23 nt, Human
cagugcugguucugccugugggg

SEQ ID NO: 855324 - RNA, 22 nt, Human
uggguccacggaagacuuaggg

SEQ ID NO: 855325 - RNA, 22 nt, Human
ggaggacaggggcugcagcaca

SEQ ID NO: 855326 - RNA, 23 nt, Human
cugagguaaaauauucugaagga

SEQ ID NO: 855327 - RNA, 22 nt, Human
gcagagaacccagcagauuggc

SEQ ID NO: 855328 - RNA, 22 nt, Human
uucaggauucuuucagacuggg

SEQ ID NO: 855329 - RNA, 22 nt, Human
uuuauuguuuagaagggggcug

SEQ ID NO: 855330 - RNA, 22 nt, Human
aguuagagacacaugcacaugc

SEQ ID NO: 855331 - RNA, 22 nt, Human
agaggaggcagcuuaacucagu

SEQ ID NO: 855332 - RNA, 23 nt, Human
uagggcagcugggagggacaugc

SEQ ID NO: 855333 - RNA, 22 nt, Human
uuuaaaaucagaugggaguugg

SEQ ID NO: 855334 - RNA, 18 nt, Human
ccucagggagagagacgc

SEQ ID NO: 855335 - RNA, 22 nt, Human
aggcagcccugugcuggaugcu

SEQ ID NO: 855336 - RNA, 22 nt, Human
ugacagaaagaauaugucaauc

SEQ ID NO: 855337 - RNA, 22 nt, Human
acaguaacaccuacucuguccc

SEQ ID NO: 855338 - RNA, 22 nt, Human
aacaugcugccuuucuacgagu

SEQ ID NO: 855339 - RNA, 22 nt, Human
auggccaagcauauacagauug

SEQ ID NO: 855340 - RNA, 22 nt, Human
agcccaggugagggguucgaaa

SEQ ID NO: 855341 - RNA, 22 nt, Human
ugcacauuaguguuugagaugc

SEQ ID NO: 855342 - RNA, 22 nt, Human
acaguacaccacuguguacagu

SEQ ID NO: 855343 - RNA, 22 nt, Human
agccacagcacauuguaagaaa

SEQ ID NO: 855344 - RNA, 22 nt, Human
uacaguaauaaaaugagcuaca

SEQ ID NO: 855345 - RNA, 22 nt, Human
cuuaacagagagaaguguugcu

SEQ ID NO: 855346 - RNA, 22 nt, Human
cuggcaaguacugggccagcuc

SEQ ID NO: 855347 - RNA, 17 nt, Human
aggccagaugaggcaag

SEQ ID NO: 855348 - RNA, 22 nt, Human
cugccugccuuggccuccagga

SEQ ID NO: 855349 - RNA, 22 nt, Human
auggccaagaucacagacuuca

SEQ ID NO: 855350 - RNA, 21 nt, Human
aucauucuggaaaauucaagc

SEQ ID NO: 855351 - RNA, 22 nt, Human
auacacauuacuuucugucuga

SEQ ID NO: 855352 - RNA, 22 nt, Human
aggaggggcauagaaauguaau

SEQ ID NO: 855353 - RNA, 22 nt, Human
aacuuucuuugcaucuaaguuu

SEQ ID NO: 855354 - RNA, 22 nt, Human
aauauccacacugugucccugc

SEQ ID NO: 855355 - RNA, 17 nt, Human
agcugaaauugcugaag

SEQ ID NO: 855356 - RNA, 22 nt, Human
cacccugggcugggccuguuaa

SEQ ID NO: 855357 - RNA, 22 nt, Human
ccugucacgaugacugcacucu

SEQ ID NO: 855358 - RNA, 22 nt, Human
gaguagcauucuagaguaugcu

SEQ ID NO: 855359 - RNA, 22 nt, Human
ggagaggagauuguggcauuuu

SEQ ID NO: 855360 - RNA, 22 nt, Human
ugguaauuuacgcauuucugua

SEQ ID NO: 855361 - RNA, 18 nt, Human
gagcugagaagaggaugc

SEQ ID NO: 855362 - RNA, 22 nt, Human
cuuuugauaguugcugagcagg

SEQ ID NO: 855363 - RNA, 22 nt, Human
uaguuaaaauaauggagauguu

SEQ ID NO: 855364 - RNA, 23 nt, Human
cugaggucugcaauucuaguagu

SEQ ID NO: 855365 - RNA, 22 nt, Human
agggagugguuaagaaggugca

SEQ ID NO: 855366 - RNA, 22 nt, Human
aggcaguuuauccccagagccu

SEQ ID NO: 855367 - RNA, 22 nt, Human
cugggccaguuaugucucaucu

SEQ ID NO: 855368 - RNA, 22 nt, Human
ugcaugcugcacacaugcguag

SEQ ID NO: 855369 - RNA, 22 nt, Human
cauuuguauagugcuuagacca

SEQ ID NO: 855370 - RNA, 22 nt, Human
cuggcugacaccuugauagcag

SEQ ID NO: 855371 - RNA, 22 nt, Human
agcugguaaaggggaaagcaga

SEQ ID NO: 855372 - RNA, 22 nt, Human
auaucaaacgaaguuauuuuaa

SEQ ID NO: 855373 - RNA, 22 nt, Human
cauggcugcgagaagagugggu

SEQ ID NO: 855374 - RNA, 22 nt, Human
augcugugauuguagaaauauu

SEQ ID NO: 855375 - RNA, 22 nt, Human
gaggcugagacucugaauuuuu

SEQ ID NO: 855376 - RNA, 22 nt, Human
acccaggauagagugcugcagu

SEQ ID NO: 855377 - RNA, 22 nt, Human
ccuccuggccugugcagagccc

SEQ ID NO: 855378 - RNA, 22 nt, Human
uccaugagagguaacuuuacaa

SEQ ID NO: 855379 - RNA, 22 nt, Human
uucaugugaucacagauuguaa

SEQ ID NO: 855380 - RNA, 22 nt, Human
uucugugauugacauguggcuu

SEQ ID NO: 855381 - RNA, 22 nt, Human
cuggccaacuugcuuguuggca

SEQ ID NO: 855382 - RNA, 22 nt, Human
aaggcugaggcuggagaauuac

SEQ ID NO: 855383 - RNA, 19 nt, Human
gugaggucuuuccuuuugu

SEQ ID NO: 855384 - RNA, 22 nt, Human
uuuuaacuuaaaauacauagau

SEQ ID NO: 855385 - RNA, 22 nt, Human
agauaacucauuuuguauaucc

SEQ ID NO: 855386 - RNA, 22 nt, Human
accagagcagacuacuggaggu

SEQ ID NO: 855387 - RNA, 22 nt, Human
cuuguaauuauaauguacuguu

SEQ ID NO: 855388 - RNA, 22 nt, Human
ugcccuggcuggagugcagugg

SEQ ID NO: 855389 - RNA, 22 nt, Human
ucuuggcuucuguauuuccugu

SEQ ID NO: 855390 - RNA, 22 nt, Human
uugcugaagugaagguauguuu

SEQ ID NO: 855391 - RNA, 22 nt, Human
ugcugcugcuucuguacagccu

SEQ ID NO: 855392 - RNA, 22 nt, Human
ucugagguuauugucugccauu

SEQ ID NO: 855393 - RNA, 22 nt, Human
guaaauaacugguaauuggggu

SEQ ID NO: 855394 - RNA, 22 nt, Human
ugcccuggaaaugagaggugug

SEQ ID NO: 855395 - RNA, 21 nt, Human
uggcagacaggaggagcucac

SEQ ID NO: 855396 - RNA, 22 nt, Human
cugagccuguguuucucuggca

SEQ ID NO: 855397 - RNA, 22 nt, Human
agggacuuguguccuauguaug

SEQ ID NO: 855398 - RNA, 22 nt, Human
ggcaacauucuccagauccuuu

SEQ ID NO: 855399 - RNA, 22 nt, Human
uugagguccagucuccacccac

SEQ ID NO: 855400 - RNA, 22 nt, Human
cccagggaaggcagauggagga

SEQ ID NO: 855401 - RNA, 22 nt, Human
ucuguccaggcuuacuauauau

SEQ ID NO: 855402 - RNA, 22 nt, Human
cugccaccaaauagcugcauga

SEQ ID NO: 855403 - RNA, 22 nt, Human
ucaggcuguuagccaccuccuc

SEQ ID NO: 855404 - RNA, 22 nt, Human
cugacuguaauucuguucuuaa

SEQ ID NO: 855405 - RNA, 22 nt, Human
auuuggcacacuggguucucgu

SEQ ID NO: 855406 - RNA, 22 nt, Human
cuguccugcccacccugcaggg

SEQ ID NO: 855407 - RNA, 22 nt, Human
gcugccuccaaucugugccccg

SEQ ID NO: 855408 - RNA, 22 nt, Human
gaucuucuauguaaugaagugu

SEQ ID NO: 855409 - RNA, 22 nt, Human
ggcaugagagguccuggggauu

SEQ ID NO: 855410 - RNA, 22 nt, Human
uggcagcuuuuuguuucaggcu

SEQ ID NO: 855411 - RNA, 22 nt, Human
gagaaaggcauuccuaugcaaa

SEQ ID NO: 855412 - RNA, 22 nt, Human
gagugucaaggcucucuuuggc

SEQ ID NO: 855413 - RNA, 22 nt, Human
ucaggcugcuuucaugcuuaga

SEQ ID NO: 855414 - RNA, 22 nt, Human
uugguaaaaucauagugguaac

SEQ ID NO: 855415 - RNA, 22 nt, Human
cccaggaggaggaaaaagcucg

SEQ ID NO: 855416 - RNA, 22 nt, Human
ggccaaauuuggccaugagcau

SEQ ID NO: 855417 - RNA, 21 nt, Human
uucucagaucgaguagugaga

SEQ ID NO: 855418 - RNA, 22 nt, Human
uagcaagauccuucccuggcgu

SEQ ID NO: 855419 - RNA, 22 nt, Human
uguugagacugagggagucagc

SEQ ID NO: 855420 - RNA, 22 nt, Human
aggcagcuuaagcccuggccca

SEQ ID NO: 855421 - RNA, 22 nt, Human
ggcagcauuuagagcacagugu

SEQ ID NO: 855422 - RNA, 22 nt, Human
acauaccauacauggugagaug

SEQ ID NO: 855423 - RNA, 22 nt, Human
caggugagcucuaucuagggag

SEQ ID NO: 855424 - RNA, 22 nt, Human
ggugagggaguggaacgaggug

SEQ ID NO: 855425 - RNA, 22 nt, Human
gaggcugcuuugaugacaggag

SEQ ID NO: 855426 - RNA, 22 nt, Human
ucccaggacaggccacauggaa

SEQ ID NO: 855427 - RNA, 21 nt, Human
cugcucugacagugaggccag

SEQ ID NO: 855428 - RNA, 22 nt, Human
ggagggacccacucuagaggug

SEQ ID NO: 855429 - RNA, 22 nt, Human
ggcagcugucucugaguuagca

SEQ ID NO: 855430 - RNA, 22 nt, Human
auuuccaggagaaaggauuuua

SEQ ID NO: 855431 - RNA, 22 nt, Human
uauagccauuuccaguggcauc

SEQ ID NO: 855432 - RNA, 22 nt, Human
cagcaggauuugaaaggaagag

SEQ ID NO: 855433 - RNA, 22 nt, Human
cuuaaauuuucaucuacaagaa

SEQ ID NO: 855434 - RNA, 22 nt, Human
uuauucuuuaaacauauauguu

SEQ ID NO: 855435 - RNA, 22 nt, Human
guucuucagaggggaaagaacc

SEQ ID NO: 855436 - RNA, 22 nt, Human
uguaggauguaaggcaggcauc

SEQ ID NO: 855437 - RNA, 22 nt, Human
auugcuguaaauuaucuuauua

SEQ ID NO: 855438 - RNA, 22 nt, Human
accaggagcauuuuuuauuagu

SEQ ID NO: 855439 - RNA, 20 nt, Human
gaguuccccauuucuccugg

SEQ ID NO: 855440 - RNA, 22 nt, Human
cuacagacccaccuuggaagaa

SEQ ID NO: 855441 - RNA, 22 nt, Human
uuugaauagcauaggauuacau

SEQ ID NO: 855442 - RNA, 22 nt, Human
acacuucucuuugaagaacaau

SEQ ID NO: 855443 - RNA, 22 nt, Human
ucaggagggugacaggcccugg

SEQ ID NO: 855444 - RNA, 22 nt, Human
augaaacacacacgcgcauacu

SEQ ID NO: 855445 - RNA, 22 nt, Human
agaaguuaauuccugaaauucu

SEQ ID NO: 855446 - RNA, 22 nt, Human
uucaucuguaguuuuuccaagg

SEQ ID NO: 855447 - RNA, 19 nt, Human
uggcaggcccaggauggac

SEQ ID NO: 855448 - RNA, 22 nt, Human
cucaggauucucgacacucaca

SEQ ID NO: 855449 - RNA, 22 nt, Human
ugguggcaucaauugacuucuc

SEQ ID NO: 855450 - RNA, 22 nt, Human
gaaauauuacaguggaggggau

SEQ ID NO: 855451 - RNA, 22 nt, Human
caggcagcugggucaccguccc

SEQ ID NO: 855452 - RNA, 22 nt, Human
ccugaggucuagagucagggug

SEQ ID NO: 855453 - RNA, 22 nt, Human
agcccagggacagggcggaugu

SEQ ID NO: 855454 - RNA, 22 nt, Human
uugaauaguguuuucaguauac

SEQ ID NO: 855455 - RNA, 21 nt, Human
aaaaaugaaguuguucaggaa

SEQ ID NO: 855456 - RNA, 22 nt, Human
uggcagcucauuuggaaaugga

SEQ ID NO: 855457 - RNA, 22 nt, Human
ugaaaugauguacaagaaggca

SEQ ID NO: 855458 - RNA, 22 nt, Human
uucaacuagauuuauacaauuc

SEQ ID NO: 855459 - RNA, 22 nt, Human
aaaggccacuugaaggauuuuu

SEQ ID NO: 855460 - RNA, 22 nt, Human
aucuuucagggccauuuguauu

SEQ ID NO: 855461 - RNA, 22 nt, Human
uaagaugagguagguaagacuu

SEQ ID NO: 855462 - RNA, 22 nt, Human
uuauacagcauugcuagugaug

SEQ ID NO: 855463 - RNA, 22 nt, Human
aaggcagccuuuugaguugauu

SEQ ID NO: 855464 - RNA, 22 nt, Human
cagggcugagucauauagccuu

SEQ ID NO: 855465 - RNA, 22 nt, Human
uuaaaugaggcugauguagauu

SEQ ID NO: 855466 - RNA, 22 nt, Human
caggcugcggucggcucugguc

SEQ ID NO: 855467 - RNA, 22 nt, Human
gaggagcuugugagaagauguc

SEQ ID NO: 855468 - RNA, 22 nt, Human
augcugugaaaaagaaggcuga

SEQ ID NO: 855469 - RNA, 22 nt, Human
uugaaagacuucuccugugaaa

SEQ ID NO: 855470 - RNA, 22 nt, Human
guaguuauugcuguuuacuucu

SEQ ID NO: 855471 - RNA, 22 nt, Human
augcuguguggucaaguuaauu

SEQ ID NO: 855472 - RNA, 17 nt, Human
ggcagcugugugcaugc

SEQ ID NO: 855473 - RNA, 22 nt, Human
cugcuuuguaaaauagacauaa

SEQ ID NO: 855474 - RNA, 22 nt, Human
uuagcgcacaucacagggggaa

SEQ ID NO: 855475 - RNA, 22 nt, Human
uccagaaacuuuuccagucuca

SEQ ID NO: 855476 - RNA, 18 nt, Human
agucuucugauccauuuu

SEQ ID NO: 855477 - RNA, 22 nt, Human
auuaaaauuccaagguaugcca

SEQ ID NO: 855478 - RNA, 22 nt, Human
aaaauuauagaucuagugccug

SEQ ID NO: 855479 - RNA, 22 nt, Human
uugcauuugagaaaguucuccu

SEQ ID NO: 855480 - RNA, 22 nt, Human
uagggcuggguacacucuugcc

SEQ ID NO: 855481 - RNA, 22 nt, Human
uaacuguaauauaaauaugagu

SEQ ID NO: 855482 - RNA, 22 nt, Human
uuuguuaaauauuuauugagug

SEQ ID NO: 855483 - RNA, 22 nt, Human
cauucuuauauuuacucauuca

SEQ ID NO: 855484 - RNA, 22 nt, Human
uaggcagcauggauucugaaua

SEQ ID NO: 855485 - RNA, 22 nt, Human
ggaggacacuggcucugccuuc

SEQ ID NO: 855486 - RNA, 22 nt, Human
uagggcugaggcaacaagggag

SEQ ID NO: 855487 - RNA, 22 nt, Human
uuauuuggaaauauggcuucug

SEQ ID NO: 855488 - RNA, 22 nt, Human
ucugucuucaucagcaugugau

SEQ ID NO: 855489 - RNA, 22 nt, Human
uccuggccuugcgucuugggag

SEQ ID NO: 855490 - RNA, 22 nt, Human
uuauccaagcagaagcugcaca

SEQ ID NO: 855491 - RNA, 22 nt, Human
auuagguugugcuuuguggaca

SEQ ID NO: 855492 - RNA, 22 nt, Human
aaggcagcucagcucauggcag

SEQ ID NO: 855493 - RNA, 22 nt, Human
agcugcuacugcucugccagag

SEQ ID NO: 855494 - RNA, 22 nt, Human
uuagugauaggaagccagauug

SEQ ID NO: 855495 - RNA, 20 nt, Human
uccuggccuucucgggcagu

SEQ ID NO: 855496 - RNA, 22 nt, Human
agacagcugggaaauggagugu

SEQ ID NO: 855497 - RNA, 22 nt, Human
aacuagucagugauucucagaa

SEQ ID NO: 855498 - RNA, 22 nt, Human
uucaggaugcagagguuguagu

SEQ ID NO: 855499 - RNA, 22 nt, Human
aucccaugagaccacguuggcu

SEQ ID NO: 855500 - RNA, 22 nt, Human
acauacauauguuuaaaugcau

SEQ ID NO: 855501 - RNA, 22 nt, Human
cugagaucccaggcaggguggc

SEQ ID NO: 855502 - RNA, 22 nt, Human
aguucucaagacaauuaccugu

SEQ ID NO: 855503 - RNA, 22 nt, Human
guuuauuagaguuuucugucug

SEQ ID NO: 855504 - RNA, 23 nt, Human
accaggaguugucucaggaaaca

SEQ ID NO: 855505 - RNA, 22 nt, Human
cuugcuucauuagugucuuagu

SEQ ID NO: 855506 - RNA, 23 nt, Human
acagaaaucauuuguaagguacc

SEQ ID NO: 855507 - RNA, 22 nt, Human
uuucauuauucaugcuaguuau

SEQ ID NO: 855508 - RNA, 22 nt, Human
aacauuucagcaaauaagaaca

SEQ ID NO: 855509 - RNA, 22 nt, Human
cuccugcgguacuacugugcuu

SEQ ID NO: 855510 - RNA, 22 nt, Human
aagcaccugcaguugacaaaaa

SEQ ID NO: 855511 - RNA, 22 nt, Human
cagaaguuagacuucaacuaau

SEQ ID NO: 855512 - RNA, 22 nt, Human
acuuucuuaggcuguauaaaug

SEQ ID NO: 855513 - RNA, 22 nt, Human
cugcugugcauauuuaucuagg

SEQ ID NO: 855514 - RNA, 22 nt, Human
uggcugagaaugggaugaugcc

SEQ ID NO: 855515 - RNA, 22 nt, Human
cagagacauuaagugccaugau

SEQ ID NO: 855516 - RNA, 22 nt, Human
agcugguauuucugaaggaaag

SEQ ID NO: 855517 - RNA, 18 nt, Human
cugagggcaacagaggcu

SEQ ID NO: 855518 - RNA, 22 nt, Human
cagggcugugcccaucuucccc

SEQ ID NO: 855519 - RNA, 22 nt, Human
ucaucuugcugccauugcuuua

SEQ ID NO: 855520 - RNA, 22 nt, Human
cuucuucaguugcauguauugg

SEQ ID NO: 855521 - RNA, 22 nt, Human
gagagaaaugugcaguuugggc

SEQ ID NO: 855522 - RNA, 22 nt, Human
acugaggucucagguggggaag

SEQ ID NO: 855523 - RNA, 22 nt, Human
cucaguuucugacauuaaaauc

SEQ ID NO: 855524 - RNA, 22 nt, Human
cugacccauauaagaguggagg

SEQ ID NO: 855525 - RNA, 22 nt, Human
cagagcuggagggaacccuggc

SEQ ID NO: 855526 - RNA, 22 nt, Human
ugcaggaacugggagggauagu

SEQ ID NO: 855527 - RNA, 22 nt, Human
augcugagauaaggcuuuaguc

SEQ ID NO: 855528 - RNA, 22 nt, Human
aacaugcucuguuucuuggaug

SEQ ID NO: 855529 - RNA, 22 nt, Human
uggcagcuaucuuuaaugagau

SEQ ID NO: 855530 - RNA, 22 nt, Human
gcccaggagaggccagggcuga

SEQ ID NO: 855531 - RNA, 22 nt, Human
ucuccuccuuuuuucaacauag

SEQ ID NO: 855532 - RNA, 22 nt, Human
ugccacagagcaauucugcuga

SEQ ID NO: 855533 - RNA, 18 nt, Human
ucccucccugcuguggcc

SEQ ID NO: 855534 - RNA, 22 nt, Human
gguggaaggccuggaaggaggc

SEQ ID NO: 855535 - RNA, 22 nt, Human
cagaaggcuggcagauugagau

SEQ ID NO: 855536 - RNA, 22 nt, Human
cuguaguugaugauuucugaua

SEQ ID NO: 855537 - RNA, 19 nt, Human
uuucccagcccuugcugug

SEQ ID NO: 855538 - RNA, 22 nt, Human
aagcuggaacaucuugaggaag

SEQ ID NO: 855539 - RNA, 22 nt, Human
ccaggagacuguacugauauuu

SEQ ID NO: 855540 - RNA, 22 nt, Human
uggccaagaaugauaugugaag

SEQ ID NO: 855541 - RNA, 22 nt, Human
gagguagcaugcuggaagggac

SEQ ID NO: 855542 - RNA, 22 nt, Human
gauuucuucauuuguggugaau

SEQ ID NO: 855543 - RNA, 22 nt, Human
gagacagcacaggccacuggga

SEQ ID NO: 855544 - RNA, 22 nt, Human
cuucaugcugauauccucgaug

SEQ ID NO: 855545 - RNA, 22 nt, Human
uuugacauuauccuguuacugg

SEQ ID NO: 855546 - RNA, 22 nt, Human
auucuucaucacuaccuuguga

SEQ ID NO: 855547 - RNA, 22 nt, Human
gacccaggagugcagagagugg

SEQ ID NO: 855548 - RNA, 22 nt, Human
augcuuuuccaggagaaauaua

SEQ ID NO: 855549 - RNA, 22 nt, Human
ucccaggauguuuauggcuggu

SEQ ID NO: 855550 - RNA, 22 nt, Human
cugcccaggcugaaggaacauc

SEQ ID NO: 855551 - RNA, 22 nt, Human
gacauuuauuagaaaacuauca

SEQ ID NO: 855552 - RNA, 22 nt, Human
uggaggccgcguagucugagca

SEQ ID NO: 855553 - RNA, 22 nt, Human
aggcuuagaaauucagcugagu

SEQ ID NO: 855554 - RNA, 22 nt, Human
cagcaagaggguaagguugaag

SEQ ID NO: 855555 - RNA, 22 nt, Human
cccaggagauggagguugcagu

SEQ ID NO: 855556 - RNA, 22 nt, Human
gacccaggcucgugggacggcu

SEQ ID NO: 855557 - RNA, 22 nt, Human
aaguuacacauuuucauuguaa

SEQ ID NO: 855558 - RNA, 22 nt, Human
gagaggaguuacuauuuccgag

SEQ ID NO: 855559 - RNA, 22 nt, Human
ggcuguguuccaagugucagga

SEQ ID NO: 855560 - RNA, 22 nt, Human
aggagggaccuaggaauauugc

SEQ ID NO: 855561 - RNA, 22 nt, Human
aggcacaggccucagcacccag

SEQ ID NO: 855562 - RNA, 22 nt, Human
acacagaguauuuagaaggggu

SEQ ID NO: 855563 - RNA, 22 nt, Human
aaaacaguuuaggcaucacagu

SEQ ID NO: 855564 - RNA, 22 nt, Human
cugcugagaaaagacugaggga

SEQ ID NO: 855565 - RNA, 23 nt, Human
agggcugaugccauugcagcucu

SEQ ID NO: 855566 - RNA, 22 nt, Human
agcccaggucucaaaguacagg

SEQ ID NO: 855567 - RNA, 22 nt, Human
agucucuuccuucaaggcuggu

SEQ ID NO: 855568 - RNA, 22 nt, Human
guccacagcuggccagggccuc

SEQ ID NO: 855569 - RNA, 22 nt, Human
auggcagccugagcagaggaau

SEQ ID NO: 855570 - RNA, 22 nt, Human
accuuuuccagcuucuagaggc

SEQ ID NO: 855571 - RNA, 22 nt, Human
cugcaucaguggauaugauggu

SEQ ID NO: 855572 - RNA, 19 nt, Human
ggcagucucaagcagcaca

SEQ ID NO: 855573 - RNA, 22 nt, Human
gaggcagcaugguaccuuggag

SEQ ID NO: 855574 - RNA, 22 nt, Human
uucauugucucuguuugccuuc

SEQ ID NO: 855575 - RNA, 22 nt, Human
auugaaagcacaaagaacaagu

SEQ ID NO: 855576 - RNA, 22 nt, Human
aauauuguuucaagaucacaga

SEQ ID NO: 855577 - RNA, 22 nt, Human
guuuauuauucaacuucauguu

SEQ ID NO: 855578 - RNA, 22 nt, Human
uggucaaaagaaagcucagaac

SEQ ID NO: 855579 - RNA, 22 nt, Human
uuaaaaugaauauugauuagca

SEQ ID NO: 855580 - RNA, 21 nt, Human
aucacauuggcuguuauuauu

SEQ ID NO: 855581 - RNA, 22 nt, Human
ucauguuaucuuggcucuggga

SEQ ID NO: 855582 - RNA, 22 nt, Human
aaacugcugguugcuggccagc

SEQ ID NO: 855583 - RNA, 22 nt, Human
agaaaugacacacaugagacau

SEQ ID NO: 855584 - RNA, 19 nt, Human
gcccugaguaagcuaggag

SEQ ID NO: 855585 - RNA, 22 nt, Human
cccuuccuccucgccugucaga

SEQ ID NO: 855586 - RNA, 22 nt, Human
ugucugugaccucuuaggcaag

SEQ ID NO: 855587 - RNA, 22 nt, Human
uuuaucagagauauguguggac

SEQ ID NO: 855588 - RNA, 22 nt, Human
uaaucguauguguaucaaauca

SEQ ID NO: 855589 - RNA, 22 nt, Human
uuuaacagaugugaaauuuuca

SEQ ID NO: 855590 - RNA, 23 nt, Human
ugcuggcuguguuauugccaaca

SEQ ID NO: 855591 - RNA, 22 nt, Human
cagaacugggcagggagcagag

SEQ ID NO: 855592 - RNA, 22 nt, Human
acuccagguuuuuucacugaag

SEQ ID NO: 855593 - RNA, 22 nt, Human
ugguaauuaauuugauagguuc

SEQ ID NO: 855594 - RNA, 22 nt, Human
uuggccaauggugauucccggc

SEQ ID NO: 855595 - RNA, 22 nt, Human
cagcaagacaggauucccgugg

SEQ ID NO: 855596 - RNA, 22 nt, Human
ucccaggaucugagggcagaga

SEQ ID NO: 855597 - RNA, 22 nt, Human
uucuucuuuaucucaguauccu

SEQ ID NO: 855598 - RNA, 21 nt, Human
aauuacagauggaauuacaga

SEQ ID NO: 855599 - RNA, 22 nt, Human
ucucaggaaauaggauuugagu

SEQ ID NO: 855600 - RNA, 22 nt, Human
ggugaagggccuuaggagacag

SEQ ID NO: 855601 - RNA, 22 nt, Human
aggcuagacuuuggcgaagcac

SEQ ID NO: 855602 - RNA, 23 nt, Human
uuucaaauuacucugcagaugac

SEQ ID NO: 855603 - RNA, 22 nt, Human
uucugucacagugcugguauca

SEQ ID NO: 855604 - RNA, 18 nt, Human
ucuuggcagcaucuggca

SEQ ID NO: 855605 - RNA, 22 nt, Human
uuuuauuaguggcuagaugggg

SEQ ID NO: 855606 - RNA, 22 nt, Human
ccaaauuaaaucauacagacag

SEQ ID NO: 855607 - RNA, 22 nt, Human
uaguuacagaagauaaggguau

SEQ ID NO: 855608 - RNA, 22 nt, Human
gggcagcucggaagugggaaag

SEQ ID NO: 855609 - RNA, 17 nt, Human
ucaggcugugccuggua

SEQ ID NO: 855610 - RNA, 22 nt, Human
acccaggagcucugggguccuc

SEQ ID NO: 855611 - RNA, 22 nt, Human
cucaugauguagcgaaugagaa

SEQ ID NO: 855612 - RNA, 22 nt, Human
cauucauuuaugaaauaucuau

SEQ ID NO: 855613 - RNA, 22 nt, Human
uaaauuauguuccauguccuuu

SEQ ID NO: 855614 - RNA, 22 nt, Human
acaaauguggacauggauaaug

SEQ ID NO: 855615 - RNA, 22 nt, Human
uuccuuaguguuagauucugug

SEQ ID NO: 855616 - RNA, 22 nt, Human
augacaguucuacacuuaaucu

SEQ ID NO: 855617 - RNA, 22 nt, Human
acaucuagaagaucugggagau

SEQ ID NO: 855618 - RNA, 15 nt, Human
cccaggaguucgaga

SEQ ID NO: 855619 - RNA, 22 nt, Human
cuggagagaauguggaaugauu

SEQ ID NO: 855620 - RNA, 22 nt, Human
uucuguuacaagugaaaaaaug

SEQ ID NO: 855621 - RNA, 22 nt, Human
uggcagcuauggucuaagggcc

SEQ ID NO: 855622 - RNA, 22 nt, Human
uuccaugaaauguguuaugcuu

SEQ ID NO: 855623 - RNA, 22 nt, Human
ccaggcugcuuagccuuaucuu

SEQ ID NO: 855624 - RNA, 22 nt, Human
uuuguuuacucauucauugaug

SEQ ID NO: 855625 - RNA, 22 nt, Human
aggcagcugcccucuccuuccu

SEQ ID NO: 855626 - RNA, 22 nt, Human
cucagaagccuucagucuuggc

SEQ ID NO: 855627 - RNA, 22 nt, Human
caaauuaaugugucucaaaaua

SEQ ID NO: 855628 - RNA, 22 nt, Human
gggagacacgcugcaggcauaa

SEQ ID NO: 855629 - RNA, 22 nt, Human
uggcugaggcacagcugccgcc

SEQ ID NO: 855630 - RNA, 22 nt, Human
cccaggaggcagagauagcagu

SEQ ID NO: 855631 - RNA, 22 nt, Human
cccaggaguuggaggcuacggu

SEQ ID NO: 855632 - RNA, 19 nt, Human
ucugccucuggucaggcuc

SEQ ID NO: 855633 - RNA, 22 nt, Human
ucugagguccugugauuucucu

SEQ ID NO: 855634 - RNA, 22 nt, Human
cuuuggcaaugucauuuucaau

SEQ ID NO: 855635 - RNA, 18 nt, Human
acucaggaaaugaugaca

SEQ ID NO: 855636 - RNA, 22 nt, Human
aacuaguuuuagcucuagcaac

SEQ ID NO: 855637 - RNA, 23 nt, Human
uggcuaaaggcucuaguccugcu

SEQ ID NO: 855638 - RNA, 17 nt, Human
ugaggccugcaucagug

SEQ ID NO: 855639 - RNA, 22 nt, Human
agagccagcauuugggcccugc

SEQ ID NO: 855640 - RNA, 22 nt, Human
uggcagcacaagguggcccaug

SEQ ID NO: 855641 - RNA, 22 nt, Human
auuaauaaaauaccacuuuguu

SEQ ID NO: 855642 - RNA, 22 nt, Human
uugcacuaggaaaaggcagcca

SEQ ID NO: 855643 - RNA, 22 nt, Human
gcccaggauucuuucuuccuua

SEQ ID NO: 855644 - RNA, 22 nt, Human
augaaauugaucuugaacuuuu

SEQ ID NO: 855645 - RNA, 22 nt, Human
gcucucuugguggcuguccugg

SEQ ID NO: 855646 - RNA, 22 nt, Human
ugucagcucccagucagagaga

SEQ ID NO: 855647 - RNA, 17 nt, Human
aggcagcucagaacauc

SEQ ID NO: 855648 - RNA, 22 nt, Human
ccuguuuacaucaucaaggacu

SEQ ID NO: 855649 - RNA, 22 nt, Human
ucucacuuuccagacuuuucaa

SEQ ID NO: 855650 - RNA, 22 nt, Human
agugcaggagccuggccagagc

SEQ ID NO: 855651 - RNA, 22 nt, Human
gcugagguggaggaaggagacc

SEQ ID NO: 855652 - RNA, 22 nt, Human
ucugccugccagucugguccuc

SEQ ID NO: 855653 - RNA, 22 nt, Human
agccacagagagggagcugcaa

SEQ ID NO: 855654 - RNA, 22 nt, Human
cucugccauuuaucagaacugu

SEQ ID NO: 855655 - RNA, 19 nt, Human
gcuccugggccucacucau

SEQ ID NO: 855656 - RNA, 22 nt, Human
ccuggcugugugaccuuggcaa

SEQ ID NO: 855657 - RNA, 22 nt, Human
ugaggggagguuggggcacauc

SEQ ID NO: 855658 - RNA, 22 nt, Human
aagcaguuuagauaggcaaagg

SEQ ID NO: 855659 - RNA, 22 nt, Human
augaguucaauuguuucaguca

SEQ ID NO: 855660 - RNA, 22 nt, Human
uuucaacaccagagaccaugcg

SEQ ID NO: 855661 - RNA, 22 nt, Human
ugauugaacugagcuucaagau

SEQ ID NO: 855662 - RNA, 22 nt, Human
cauucuuacacaauauuuuaau

SEQ ID NO: 855663 - RNA, 19 nt, Human
acaaugaauguguucucuu

SEQ ID NO: 855664 - RNA, 22 nt, Human
auuuggcauaggcagaggccca

SEQ ID NO: 855665 - RNA, 17 nt, Human
aggcaggcagagcggga

SEQ ID NO: 855666 - RNA, 21 nt, Human
ugaggcaggggugcuuuuguc

SEQ ID NO: 855667 - RNA, 22 nt, Human
ucuagaaugacaugcaagagua

SEQ ID NO: 855668 - RNA, 22 nt, Human
ccuggcuggacuggaccguggc

SEQ ID NO: 855669 - RNA, 22 nt, Human
acugaggucuaucaugagccag

SEQ ID NO: 855670 - RNA, 22 nt, Human
uuucacagcuggguggcagagu

SEQ ID NO: 855671 - RNA, 22 nt, Human
ucaggcugcagcugucagcagc

SEQ ID NO: 855672 - RNA, 22 nt, Human
gaagcagcuggugagauggagc

SEQ ID NO: 855673 - RNA, 22 nt, Human
auauuaggaguuaaauguauua

SEQ ID NO: 855674 - RNA, 22 nt, Human
ggucugaaaauggugaccacca

SEQ ID NO: 855675 - RNA, 21 nt, Human
uacugagaccucacagugugc

SEQ ID NO: 855676 - RNA, 22 nt, Human
gcgcaggagccgcggagggccg

SEQ ID NO: 855677 - RNA, 22 nt, Human
gucugcugcagucguggcucua

SEQ ID NO: 855678 - RNA, 17 nt, Human
uucaaagcuuaucaagg

SEQ ID NO: 855679 - RNA, 22 nt, Human
ggccagaggugguacauagcuu

SEQ ID NO: 855680 - RNA, 22 nt, Human
cuggccaagcuucucuaagcag

SEQ ID NO: 855681 - RNA, 23 nt, Human
cagaaaacccagagcucaguccc

SEQ ID NO: 855682 - RNA, 22 nt, Human
uugcuucaguagcucuuuaaag

SEQ ID NO: 855683 - RNA, 22 nt, Human
cauuguuaccaucuuuuaccua

SEQ ID NO: 855684 - RNA, 22 nt, Human
ugaguaauaaacugucuugcuc

SEQ ID NO: 855685 - RNA, 22 nt, Human
cuccuggcccugagcucccagg

SEQ ID NO: 855686 - RNA, 22 nt, Human
cagugguuauacuuacuguuuc

SEQ ID NO: 855687 - RNA, 22 nt, Human
uccaugagcuagcuuuccaaag

SEQ ID NO: 855688 - RNA, 20 nt, Human
accaggagauggaggcaggg

SEQ ID NO: 855689 - RNA, 22 nt, Human
gcucaggagcucuugguggcgc

SEQ ID NO: 855690 - RNA, 22 nt, Human
agacaggccacucuggucuggu

SEQ ID NO: 855691 - RNA, 22 nt, Human
ucaggaugaccacgagccucua

SEQ ID NO: 855692 - RNA, 22 nt, Human
auuucaaggcuauuaauauaaa

SEQ ID NO: 855693 - RNA, 22 nt, Human
ccaggcugccgaggaaagaaag

SEQ ID NO: 855694 - RNA, 22 nt, Human
cagaggaugaucuggccucucu

SEQ ID NO: 855695 - RNA, 21 nt, Human
auuucagagcacacaaguaaa

SEQ ID NO: 855696 - RNA, 22 nt, Human
agggagcucuaaguagagggac

SEQ ID NO: 855697 - RNA, 22 nt, Human
gaucuuggggggaucaccaugg

SEQ ID NO: 855698 - RNA, 22 nt, Human
accauuuuggguauuuucagag

SEQ ID NO: 855699 - RNA, 22 nt, Human
ugcacauucacuuagguauugu

SEQ ID NO: 855700 - RNA, 22 nt, Human
ggguggaguagaaagaugaauu

SEQ ID NO: 855701 - RNA, 19 nt, Human
auggaaaauuguacucaau

SEQ ID NO: 855702 - RNA, 22 nt, Human
uauguuauuuucauacaacaga

SEQ ID NO: 855703 - RNA, 18 nt, Human
ucaggagacacagacgca

SEQ ID NO: 855704 - RNA, 22 nt, Human
auuacaaaagaagggagaaggu

SEQ ID NO: 855705 - RNA, 23 nt, Human
ggcagcucucaucugaugacuga

SEQ ID NO: 855706 - RNA, 22 nt, Human
uaucuguuugcucacagguguu

SEQ ID NO: 855707 - RNA, 22 nt, Human
ggaggugggcuaaggacucucu

SEQ ID NO: 855708 - RNA, 22 nt, Human
cagaccagaaggaagccgacaa

SEQ ID NO: 855709 - RNA, 22 nt, Human
acuggccaggcgaaccacacug

SEQ ID NO: 855710 - RNA, 22 nt, Human
agcugcuucaaaaugggcuccu

SEQ ID NO: 855711 - RNA, 19 nt, Human
ugcugaggaugcaagaucc

SEQ ID NO: 855712 - RNA, 22 nt, Human
aaaaacugcaauuacuuuuguc

SEQ ID NO: 855713 - RNA, 22 nt, Human
aggguagggccguagggccaug

SEQ ID NO: 855714 - RNA, 22 nt, Human
gcugaagcugacacauagugcu

SEQ ID NO: 855715 - RNA, 22 nt, Human
uaauaggagccaggucacauag

SEQ ID NO: 855716 - RNA, 22 nt, Human
uuugaaagagcugauacaugaa

SEQ ID NO: 855717 - RNA, 22 nt, Human
agaacuguccuuggaggagagu

SEQ ID NO: 855718 - RNA, 22 nt, Human
cccaagagguggagguugcagu

SEQ ID NO: 855719 - RNA, 22 nt, Human
ucugagccaccugccagugcug

SEQ ID NO: 855720 - RNA, 22 nt, Human
acacauuuacauguuuacguau

SEQ ID NO: 855721 - RNA, 22 nt, Human
guuuauuaacugucaagugauu

SEQ ID NO: 855722 - RNA, 22 nt, Human
gcucaggaucagccaccucuuu

SEQ ID NO: 855723 - RNA, 22 nt, Human
uuuaucagaaguuagagaaaga

SEQ ID NO: 855724 - RNA, 22 nt, Human
augaggucuuauugcaguaguu

SEQ ID NO: 855725 - RNA, 22 nt, Human
agacgagggccuggcacacagu

SEQ ID NO: 855726 - RNA, 22 nt, Human
ggaggggauuuaguagaugcua

SEQ ID NO: 855727 - RNA, 22 nt, Human
cagaggcaggauaagaacugcg

SEQ ID NO: 855728 - RNA, 22 nt, Human
ugacagaaauaguucuuaauuu

SEQ ID NO: 855729 - RNA, 18 nt, Human
aggcaggcuggagugacu

SEQ ID NO: 855730 - RNA, 22 nt, Human
ugcaggaaauuccaggguggcc

SEQ ID NO: 855731 - RNA, 22 nt, Human
accagagcuuacaugcuagaaa

SEQ ID NO: 855732 - RNA, 22 nt, Human
aacucuggagcacgcccuggcc

SEQ ID NO: 855733 - RNA, 22 nt, Human
uguggaaaagaauaagggagau

SEQ ID NO: 855734 - RNA, 22 nt, Human
guucuucaggcugugcucuaga

SEQ ID NO: 855735 - RNA, 22 nt, Human
auuuaaaugcuuaagaggguuu

SEQ ID NO: 855736 - RNA, 22 nt, Human
gccuggcuggucacugccuggc

SEQ ID NO: 855737 - RNA, 22 nt, Human
ugcugaggcuagaccuggaagu

SEQ ID NO: 855738 - RNA, 22 nt, Human
agaggcagaaguguucaaaccc

SEQ ID NO: 855739 - RNA, 22 nt, Human
acucaggaauggggcugggacu

SEQ ID NO: 855740 - RNA, 22 nt, Human
aguguaggguggucagagcaga

SEQ ID NO: 855741 - RNA, 22 nt, Human
aucuuguuauaagagauaaugg

SEQ ID NO: 855742 - RNA, 22 nt, Human
uaacaugaaacuccaaauggua

SEQ ID NO: 855743 - RNA, 22 nt, Human
uugaaaggugaacaugaugcac

SEQ ID NO: 855744 - RNA, 22 nt, Human
uugaacauuggcaauuucauau

SEQ ID NO: 855745 - RNA, 22 nt, Human
ggaggagguggguuaaguugua

SEQ ID NO: 855746 - RNA, 22 nt, Human
gacuuucuaaugcucuguagau

SEQ ID NO: 855747 - RNA, 22 nt, Human
gggagggguugcauguuugagu

SEQ ID NO: 855748 - RNA, 22 nt, Human
gagggaggcaucaugaauccag

SEQ ID NO: 855749 - RNA, 22 nt, Human
ggcuaggcaggcucagagccua

SEQ ID NO: 855750 - RNA, 22 nt, Human
aagauauucaaagauuuauuag

SEQ ID NO: 855751 - RNA, 22 nt, Human
aggcagcuuucuggugcaccau

SEQ ID NO: 855752 - RNA, 22 nt, Human
gagccaggggucagcuccgagg

SEQ ID NO: 855753 - RNA, 22 nt, Human
acaguaacaaauggccugagga

SEQ ID NO: 855754 - RNA, 22 nt, Human
uccaggagucagacagauggug

SEQ ID NO: 855755 - RNA, 22 nt, Human
augcugugcuggcuaaccaugg

SEQ ID NO: 855756 - RNA, 22 nt, Human
ugcaggcuggggaggcagacuu

SEQ ID NO: 855757 - RNA, 22 nt, Human
uguucucacuggaugcuucaca

SEQ ID NO: 855758 - RNA, 23 nt, Human
cugagggcuggucugaagucugc

SEQ ID NO: 855759 - RNA, 22 nt, Human
uaguaaucagagguaaacuuua

SEQ ID NO: 855760 - RNA, 22 nt, Human
cccucuacagggaagcgcuuuc

SEQ ID NO: 855761 - RNA, 22 nt, Human
uguaggccuauguccagcaauu

SEQ ID NO: 855762 - RNA, 22 nt, Human
uuucucaguuacuagcuguggu

SEQ ID NO: 855763 - RNA, 23 nt, Human
cccuggaguaaauucuuggaagg

SEQ ID NO: 855764 - RNA, 22 nt, Human
augcccugcucucgggaaggga

SEQ ID NO: 855765 - RNA, 22 nt, Human
uuucacauuuaggcgugaauug

SEQ ID NO: 855766 - RNA, 22 nt, Human
uaggcagcuuagguuagaagug

SEQ ID NO: 855767 - RNA, 22 nt, Human
aggcugaggcgggaggaucacu

SEQ ID NO: 855768 - RNA, 22 nt, Human
auuggaaaugcuacaaguuaga

SEQ ID NO: 855769 - RNA, 21 nt, Human
aagaaguuuggauuuuguccu

SEQ ID NO: 855770 - RNA, 22 nt, Human
gggcagcucagccaccaugcag

SEQ ID NO: 855771 - RNA, 22 nt, Human
ucuuagaaguucauguuccagc

SEQ ID NO: 855772 - RNA, 22 nt, Human
ucugccuggcucauggcaguga

SEQ ID NO: 855773 - RNA, 22 nt, Human
aaguuaacccaguauuucuuuu

SEQ ID NO: 855774 - RNA, 22 nt, Human
ccacugaggcaggcaguaucua

SEQ ID NO: 855775 - RNA, 22 nt, Human
cagagcugucauuugccaguga

SEQ ID NO: 855776 - RNA, 22 nt, Human
cuaggcagauggagaaguggcu

SEQ ID NO: 855777 - RNA, 22 nt, Human
ggagggcugccagguggagcgg

SEQ ID NO: 855778 - RNA, 22 nt, Human
agccagcuguucuggggcagca

SEQ ID NO: 855779 - RNA, 22 nt, Human
auggccaagcaugccuguggcc

SEQ ID NO: 855780 - RNA, 22 nt, Human
auacaguauaacuaauaaaccc

SEQ ID NO: 855781 - RNA, 22 nt, Human
uugaaguuguaguucagugaag

SEQ ID NO: 855782 - RNA, 22 nt, Human
cagcucugaggaacacuccuuu

SEQ ID NO: 855783 - RNA, 22 nt, Human
auucuucauacagacaaguccu

SEQ ID NO: 855784 - RNA, 22 nt, Human
aaagauuaaaucaaauugguca

SEQ ID NO: 855785 - RNA, 20 nt, Human
aggcugagggugauuguguc

SEQ ID NO: 855786 - RNA, 22 nt, Human
acaucucaugaaugauaaauca

SEQ ID NO: 855787 - RNA, 22 nt, Human
ugaaggccacuuccugugagcu

SEQ ID NO: 855788 - RNA, 18 nt, Human
ugaggcccgcagaggugg

SEQ ID NO: 855789 - RNA, 22 nt, Human
cucaggauuuaaaggggcacuc

SEQ ID NO: 855790 - RNA, 22 nt, Human
uugcagcuucuaccacuguuuc

SEQ ID NO: 855791 - RNA, 22 nt, Human
aggcagguccccuggaaggcac

SEQ ID NO: 855792 - RNA, 22 nt, Human
uguuaagaagaggcaguacuua

SEQ ID NO: 855793 - RNA, 21 nt, Human
uggagacucugguucuuugug

SEQ ID NO: 855794 - RNA, 22 nt, Human
uugaggucuuugagcaaacgca

SEQ ID NO: 855795 - RNA, 22 nt, Human
uucuucuuucccccugugguac

SEQ ID NO: 855796 - RNA, 21 nt, Human
acuggccaccacuggcagggg

SEQ ID NO: 855797 - RNA, 22 nt, Human
ccugguccuuacgucauugcuu

SEQ ID NO: 855798 - RNA, 22 nt, Human
cugccugccacguucagcugua

SEQ ID NO: 855799 - RNA, 21 nt, Human
uucuucaaagaagaaggcaca

SEQ ID NO: 855800 - RNA, 22 nt, Human
ucaggauaaaauguaauggcaa

SEQ ID NO: 855801 - RNA, 21 nt, Human
uuccagagauuguuucaccug

SEQ ID NO: 855802 - RNA, 19 nt, Human
agaaguuagacauugcaau

SEQ ID NO: 855803 - RNA, 22 nt, Human
agauggcuuugcuuuuagaagc

SEQ ID NO: 855804 - RNA, 22 nt, Human
cugccugcaucccacagugggg

SEQ ID NO: 855805 - RNA, 20 nt, Human
ggcagcuugggcagcaguua

SEQ ID NO: 855806 - RNA, 22 nt, Human
cacugguauuugaaaauagaug

SEQ ID NO: 855807 - RNA, 22 nt, Human
uugagguccccaguacccacug

SEQ ID NO: 855808 - RNA, 22 nt, Human
caggcugacaacugagcauuuu

SEQ ID NO: 855809 - RNA, 21 nt, Human
uaggcagaggagcagguaucu

SEQ ID NO: 855810 - RNA, 22 nt, Human
uucaggauaguggugaguggca

SEQ ID NO: 855811 - RNA, 22 nt, Human
gugcugagcacagcugcccagg

SEQ ID NO: 855812 - RNA, 22 nt, Human
gagagucuaggaaccucauaua

SEQ ID NO: 855813 - RNA, 23 nt, Human
guaaaauacgcagugcaguguga

SEQ ID NO: 855814 - RNA, 22 nt, Human
ucacacagauugguagagcuga

SEQ ID NO: 855815 - RNA, 22 nt, Human
ucaaauaaugccauucaucauc

SEQ ID NO: 855816 - RNA, 22 nt, Human
agcugcagcacuccaguagccg

SEQ ID NO: 855817 - RNA, 22 nt, Human
caggauggucagaugcauuguc

SEQ ID NO: 855818 - RNA, 21 nt, Human
uuagaaagcucacuacaguua

SEQ ID NO: 855819 - RNA, 22 nt, Human
acucucugguauuggcaaguuu

SEQ ID NO: 855820 - RNA, 22 nt, Human
cagggaggcugucuuaugccug

SEQ ID NO: 855821 - RNA, 19 nt, Human
uccaccuuucuucauuugg

SEQ ID NO: 855822 - RNA, 22 nt, Human
gaggagcugggucagggagaca

SEQ ID NO: 855823 - RNA, 22 nt, Human
ggggcagccuccaggaaagcug

SEQ ID NO: 855824 - RNA, 22 nt, Human
agcugagggcaggaugggguga

SEQ ID NO: 855825 - RNA, 22 nt, Human
ucaauucugguccucaggaacu

SEQ ID NO: 855826 - RNA, 22 nt, Human
ucuacccagagcuaugaccuga

SEQ ID NO: 855827 - RNA, 22 nt, Human
ucccagggcuuuucucaugcuu

SEQ ID NO: 855828 - RNA, 22 nt, Human
ggcagcuauuccaagcagcacu

SEQ ID NO: 855829 - RNA, 18 nt, Human
ucaggcugggccuccuuc

SEQ ID NO: 855830 - RNA, 22 nt, Human
caugugguucaaguacuccaca

SEQ ID NO: 855831 - RNA, 22 nt, Human
auauuaggugcucaauacaugc

SEQ ID NO: 855832 - RNA, 22 nt, Human
uucuucucagggucccacaugg

SEQ ID NO: 855833 - RNA, 22 nt, Human
ucccaggauguuggcggcaggu

SEQ ID NO: 855834 - RNA, 18 nt, Human
ugaauagggguuugcaga

SEQ ID NO: 855835 - RNA, 22 nt, Human
cauuuccagcuccugcaucaug

SEQ ID NO: 855836 - RNA, 22 nt, Human
auggagggugucagagagcgaa

SEQ ID NO: 855837 - RNA, 22 nt, Human
agaccaagacuauaaugagagg

SEQ ID NO: 855838 - RNA, 22 nt, Human
cagagacauccauguuaguugg

SEQ ID NO: 855839 - RNA, 22 nt, Human
ccuggaccaaacacuggccugg

SEQ ID NO: 855840 - RNA, 22 nt, Human
ucaggagagagaaauuggggcu

SEQ ID NO: 855841 - RNA, 22 nt, Human
uaggaaauugccaauauaugac

SEQ ID NO: 855842 - RNA, 20 nt, Human
uacagaaugcaauaaaaugg

SEQ ID NO: 855843 - RNA, 22 nt, Human
gcugcccauuccacuggauggu

SEQ ID NO: 855844 - RNA, 22 nt, Human
ggcugagcuuauauaugugcug

SEQ ID NO: 855845 - RNA, 22 nt, Human
gaggcuccagcgacaccuaggc

SEQ ID NO: 855846 - RNA, 22 nt, Human
ccuccugguccagcaucucuuu

SEQ ID NO: 855847 - RNA, 17 nt, Human
aacugcuuuuuuuagcc

SEQ ID NO: 855848 - RNA, 22 nt, Human
uggcuggaauggagcugagccu

SEQ ID NO: 855849 - RNA, 22 nt, Human
aucaggaucagggcuagcagag

SEQ ID NO: 855850 - RNA, 22 nt, Human
acccuccccaagaggucgugcc

SEQ ID NO: 855851 - RNA, 22 nt, Human
cucccagggucuaggcugcugg

SEQ ID NO: 855852 - RNA, 19 nt, Human
ugaaauggcaguugcuaaa

SEQ ID NO: 855853 - RNA, 19 nt, Human
caggagagcaugcacuuug

SEQ ID NO: 855854 - RNA, 22 nt, Human
agacagugauguaagcaggagu

SEQ ID NO: 855855 - RNA, 22 nt, Human
cuuuaaauaauacaagguccag

SEQ ID NO: 855856 - RNA, 23 nt, Human
accaggagccaagaucucccugg

SEQ ID NO: 855857 - RNA, 22 nt, Human
agagcugagcaccaagcauggu

SEQ ID NO: 855858 - RNA, 23 nt, Human
uuuggacuugugacucuucuccu

SEQ ID NO: 855859 - RNA, 22 nt, Human
gugauuuucuccuccuagaagu

SEQ ID NO: 855860 - RNA, 22 nt, Human
gcccaggauaaugcugucccug

SEQ ID NO: 855861 - RNA, 22 nt, Human
cugcugugauugggagaaaccg

SEQ ID NO: 855862 - RNA, 22 nt, Human
gaggagaagcuaagaaacacag

SEQ ID NO: 855863 - RNA, 22 nt, Human
aguaacucauguaaaccucaca

SEQ ID NO: 855864 - RNA, 23 nt, Human
acagacaacacugaugagagaaa

SEQ ID NO: 855865 - RNA, 22 nt, Human
ugugccagccucuggcuguguc

SEQ ID NO: 855866 - RNA, 22 nt, Human
guucuugccagcauccucaggu

SEQ ID NO: 855867 - RNA, 22 nt, Human
acagugagauccaagggcaggc

SEQ ID NO: 855868 - RNA, 22 nt, Human
accuacauguuccacauaguug

SEQ ID NO: 855869 - RNA, 17 nt, Human
cagcucugcaucuuccu

SEQ ID NO: 855870 - RNA, 22 nt, Human
agggcagcagcggcccaggccu

SEQ ID NO: 855871 - RNA, 22 nt, Human
cuucugugcuucacaguugcca

SEQ ID NO: 855872 - RNA, 22 nt, Human
gugguaauuuaauccuacacug

SEQ ID NO: 855873 - RNA, 22 nt, Human
gaaggccacggaauggagcugg

SEQ ID NO: 855874 - RNA, 22 nt, Human
gagcuccagggaacagcagcua

SEQ ID NO: 855875 - RNA, 22 nt, Human
aggcuccagcagccagaggaag

SEQ ID NO: 855876 - RNA, 22 nt, Human
caugcugugcaucuugaugacc

SEQ ID NO: 855877 - RNA, 23 nt, Human
aaggccagaauuucaauggugcc

SEQ ID NO: 855878 - RNA, 22 nt, Human
cugagcuguuacucuguccucg

SEQ ID NO: 855879 - RNA, 21 nt, Human
uguaaguuucaucugaauugg

SEQ ID NO: 855880 - RNA, 22 nt, Human
ucaggcugggcuccucucccca

SEQ ID NO: 855881 - RNA, 20 nt, Human
ggcugcugugggcagagagg

SEQ ID NO: 855882 - RNA, 20 nt, Human
uucagaaauaaggaaugagg

SEQ ID NO: 855883 - RNA, 22 nt, Human
gcuuuggagccuguguucugcc

SEQ ID NO: 855884 - RNA, 22 nt, Human
cccaggaagaaauucugauuug

SEQ ID NO: 855885 - RNA, 22 nt, Human
uuggccaaauacacaccuuuug

SEQ ID NO: 855886 - RNA, 22 nt, Human
uauuggauagcuugugcagaau

SEQ ID NO: 855887 - RNA, 22 nt, Human
ucugggaacagccuggcugugu

SEQ ID NO: 855888 - RNA, 22 nt, Human
ucuuggcugucuuugaaguuag

SEQ ID NO: 855889 - RNA, 19 nt, Human
ugaggccaaggucacagau

SEQ ID NO: 855890 - RNA, 21 nt, Human
gaaauacugccuuaggagcug

SEQ ID NO: 855891 - RNA, 22 nt, Human
aagaguaaagcaaagcacuugu

SEQ ID NO: 855892 - RNA, 22 nt, Human
caggcagcgcucguggccuggc

SEQ ID NO: 855893 - RNA, 22 nt, Human
uguuuauuacaguucuuggaau

SEQ ID NO: 855894 - RNA, 19 nt, Human
ccauggagagagaugcauu

SEQ ID NO: 855895 - RNA, 22 nt, Human
ugcaggucuccauuggcagacu

SEQ ID NO: 855896 - RNA, 22 nt, Human
ugaggcagggagaguggauaug

SEQ ID NO: 855897 - RNA, 22 nt, Human
aagggcuguaguuuguugauca

SEQ ID NO: 855898 - RNA, 22 nt, Human
gaggggaagacuucuggacagu

SEQ ID NO: 855899 - RNA, 22 nt, Human
uugagggucuggaucugcugcu

SEQ ID NO: 855900 - RNA, 22 nt, Human
agggacuauuuacccaucucac

SEQ ID NO: 855901 - RNA, 22 nt, Human
gagcagcucugugccuggagac

SEQ ID NO: 855902 - RNA, 22 nt, Human
ugaggcagugauguuuaagcac

SEQ ID NO: 855903 - RNA, 22 nt, Human
aagugggaauagaaaugaaggu

SEQ ID NO: 855904 - RNA, 22 nt, Human
acacuaaugagaaaggaauuaa

SEQ ID NO: 855905 - RNA, 22 nt, Human
aggcaggcacacuuccuccagg

SEQ ID NO: 855906 - RNA, 22 nt, Human
gaggcugaggguuagagaguca

SEQ ID NO: 855907 - RNA, 22 nt, Human
uuagagaugucccaaaaugaag

SEQ ID NO: 855908 - RNA, 15 nt, Human
uucaggauaugacuc

SEQ ID NO: 855909 - RNA, 22 nt, Human
uuaggaaaauggaguccuuuua

SEQ ID NO: 855910 - RNA, 22 nt, Human
ucaaauaccagcaauuucaugu

SEQ ID NO: 855911 - RNA, 22 nt, Human
auugugcaaauauuaucuguag

SEQ ID NO: 855912 - RNA, 22 nt, Human
gacuuucugagucaaagaaagg

SEQ ID NO: 855913 - RNA, 22 nt, Human
cuggccuagcucucugcuugaa

SEQ ID NO: 855914 - RNA, 23 nt, Human
ugcaugugaauucauacuuguuu

SEQ ID NO: 855915 - RNA, 22 nt, Human
aggcagucuaucucuggagccu

SEQ ID NO: 855916 - RNA, 22 nt, Human
cucaggauagauuguccucuca

SEQ ID NO: 855917 - RNA, 22 nt, Human
cugagccaguagucagggacaa

SEQ ID NO: 855918 - RNA, 22 nt, Human
ggcuggaggagaauggguguga

SEQ ID NO: 855919 - RNA, 19 nt, Human
uuggcagcugagauccugc

SEQ ID NO: 855920 - RNA, 22 nt, Human
ucccagggauccuccgggucgc

SEQ ID NO: 855921 - RNA, 22 nt, Human
aauaucagcacuuuugugguau

SEQ ID NO: 855922 - RNA, 22 nt, Human
uuuauuaaaacuguuggcucug

SEQ ID NO: 855923 - RNA, 22 nt, Human
ugcugcugaucauuuauagucu

SEQ ID NO: 855924 - RNA, 22 nt, Human
gcugccucccccauggcuggaa

SEQ ID NO: 855925 - RNA, 22 nt, Human
uagugucaucguugcagcugag

SEQ ID NO: 855926 - RNA, 22 nt, Human
uuagauaaauuaagacuuuaca

SEQ ID NO: 855927 - RNA, 20 nt, Human
gcugagguggaggaaggaga

SEQ ID NO: 855928 - RNA, 22 nt, Human
uuggccaacagcgacagggcca

SEQ ID NO: 855929 - RNA, 22 nt, Human
gaggcagcuggguccggucggg

SEQ ID NO: 855930 - RNA, 22 nt, Human
ugcccaaaccucuccuagcucu

SEQ ID NO: 855931 - RNA, 22 nt, Human
gggcugagucugcugccuguca

SEQ ID NO: 855932 - RNA, 22 nt, Human
agcugagguugaagagugaacg

SEQ ID NO: 855933 - RNA, 22 nt, Human
cugcuuccauaaauaaugugcu

SEQ ID NO: 855934 - RNA, 22 nt, Human
acaaugaagauaauguugcagu

SEQ ID NO: 855935 - RNA, 22 nt, Human
uuuauuuggcaucucugccaag

SEQ ID NO: 855936 - RNA, 22 nt, Human
uccaggagugcugguuagagua

SEQ ID NO: 855937 - RNA, 22 nt, Human
gaaggccacuuuguguugagaa

SEQ ID NO: 855938 - RNA, 22 nt, Human
caggggaguuuuaugcaacaga

SEQ ID NO: 855939 - RNA, 22 nt, Human
aggcuccagcccaaggcugcag

SEQ ID NO: 855940 - RNA, 22 nt, Human
ggccagagaauaugccuuacgu

SEQ ID NO: 855941 - RNA, 20 nt, Human
agcugaggcaccugagguua

SEQ ID NO: 855942 - RNA, 22 nt, Human
ucuucagaggaagucagucuuu

SEQ ID NO: 855943 - RNA, 22 nt, Human
ggcucagacucccaggcccucu

SEQ ID NO: 855944 - RNA, 22 nt, Human
uuucaaacauaucuucauuacu

SEQ ID NO: 855945 - RNA, 22 nt, Human
aagggagguaaagcuauuuaaa

SEQ ID NO: 855946 - RNA, 23 nt, Human
gacaccuuugccagaucaagaug

SEQ ID NO: 855947 - RNA, 22 nt, Human
gagggcuggggcuuaggcuuag

SEQ ID NO: 855948 - RNA, 22 nt, Human
cugcagagcaaguaacauccuc

SEQ ID NO: 855949 - RNA, 22 nt, Human
aaccuuuugcaagugccuugac

SEQ ID NO: 855950 - RNA, 22 nt, Human
aacuuucuguuacguccccaga

SEQ ID NO: 855951 - RNA, 22 nt, Human
caaaugaaguccaaagggcuua

SEQ ID NO: 855952 - RNA, 22 nt, Human
aguuucuuuagauagaaaguuc

SEQ ID NO: 855953 - RNA, 22 nt, Human
uucauucuugggaucagagagu

SEQ ID NO: 855954 - RNA, 22 nt, Human
uccaggagguagugcuuaauuu

SEQ ID NO: 855955 - RNA, 22 nt, Human
gagcugagauuugaagcaaguu

SEQ ID NO: 855956 - RNA, 22 nt, Human
ucccagagcccaaguuggagag

SEQ ID NO: 855957 - RNA, 17 nt, Human
ccaggagagaugcuugu

SEQ ID NO: 855958 - RNA, 22 nt, Human
uccaggagggggagccgugccg

SEQ ID NO: 855959 - RNA, 22 nt, Human
ugcugcuguauccuuaguguca

SEQ ID NO: 855960 - RNA, 22 nt, Human
gucuucaauagagccucaauuu

SEQ ID NO: 855961 - RNA, 22 nt, Human
uacacuauuuuacugauacaaa

SEQ ID NO: 855962 - RNA, 22 nt, Human
ccugugccagcugggcccugcc

SEQ ID NO: 855963 - RNA, 22 nt, Human
gcugauggcuugcuggcugaca

SEQ ID NO: 855964 - RNA, 22 nt, Human
ggcugcagguugguuggcagcu

SEQ ID NO: 855965 - RNA, 22 nt, Human
acagugcuaaacacuucuugaa

SEQ ID NO: 855966 - RNA, 22 nt, Human
ucuacugugguccuuguaacca

SEQ ID NO: 855967 - RNA, 21 nt, Human
ucugccugagacuuugcuggu

SEQ ID NO: 855968 - RNA, 22 nt, Human
acaauucugaugguuucccagu

SEQ ID NO: 855969 - RNA, 22 nt, Human
cagugguugguagauacuugag

SEQ ID NO: 855970 - RNA, 22 nt, Human
cugagcucuaaugucagccuug

SEQ ID NO: 855971 - RNA, 17 nt, Human
cucacggaggaugaauc

SEQ ID NO: 855972 - RNA, 22 nt, Human
uucagaaugugaccuuauuugg

SEQ ID NO: 855973 - RNA, 22 nt, Human
cugcccaggaaggagaggaugg

SEQ ID NO: 855974 - RNA, 22 nt, Human
agucucugcaugccugcugugc

SEQ ID NO: 855975 - RNA, 22 nt, Human
uggcugaguuccuggcacacgg

SEQ ID NO: 855976 - RNA, 22 nt, Human
uuuaguagugacagauucuggg

SEQ ID NO: 855977 - RNA, 22 nt, Human
ucugcaggcuuggaguggcagc

SEQ ID NO: 855978 - RNA, 22 nt, Human
ucaggcuguuccuguccaaaau

SEQ ID NO: 855979 - RNA, 22 nt, Human
ucaucugucauccacaaagcug

SEQ ID NO: 855980 - RNA, 22 nt, Human
uugcauuuaaguagauguuaca

SEQ ID NO: 855981 - RNA, 22 nt, Human
aggcugagcugguagugaguac

SEQ ID NO: 855982 - RNA, 22 nt, Human
aggccaaaccggauggaaaagg

SEQ ID NO: 855983 - RNA, 22 nt, Human
gccauuuucugucuuguuuauu

SEQ ID NO: 855984 - RNA, 22 nt, Human
ccauuaguaccucuggaaaauu

SEQ ID NO: 855985 - RNA, 22 nt, Human
gcccugggcucccugcuccaca

SEQ ID NO: 855986 - RNA, 17 nt, Human
agaggcagauacuugga

SEQ ID NO: 855987 - RNA, 22 nt, Human
gccacaggcacuuaagggcugg

SEQ ID NO: 855988 - RNA, 22 nt, Human
gcuguguuugacaguagcagac

SEQ ID NO: 855989 - RNA, 22 nt, Human
ugccuguguugauuacuuuguc

SEQ ID NO: 855990 - RNA, 22 nt, Human
uacucagagucauugcccuucu

SEQ ID NO: 855991 - RNA, 22 nt, Human
acaugcauaggagaagucuuua

SEQ ID NO: 855992 - RNA, 19 nt, Human
cugggccagagcuguccuc

SEQ ID NO: 855993 - RNA, 22 nt, Human
gaggagagaagcuaacggugcu

SEQ ID NO: 855994 - RNA, 22 nt, Human
ucuggccaacaaaaacuaaguc

SEQ ID NO: 855995 - RNA, 22 nt, Human
caggugacccucucaccugcuu

SEQ ID NO: 855996 - RNA, 22 nt, Human
guucuucaaagugacaacuaaa

SEQ ID NO: 855997 - RNA, 22 nt, Human
caagaugggcaccccagcaccu

SEQ ID NO: 855998 - RNA, 22 nt, Human
ugcaugugcccacucuggcuua

SEQ ID NO: 855999 - RNA, 22 nt, Human
cugccucuugacagaucguggc

SEQ ID NO: 856000 - RNA, 22 nt, Human
cuuucauucuuagauauuagug

SEQ ID NO: 856001 - RNA, 22 nt, Human
agcugcccugggcuggagaugg

SEQ ID NO: 856002 - RNA, 22 nt, Human
cagagcugcagauugaaggcau

SEQ ID NO: 856003 - RNA, 22 nt, Human
uucuucaaauagcagggaguca

SEQ ID NO: 856004 - RNA, 22 nt, Human
cuggagagggagcccuggcagu

SEQ ID NO: 856005 - RNA, 22 nt, Human
uaggaugagggguggccaagua

SEQ ID NO: 856006 - RNA, 22 nt, Human
ggcugcuggcauugagguaggu

SEQ ID NO: 856007 - RNA, 22 nt, Human
uacuuucuguccuucuguuaaa

SEQ ID NO: 856008 - RNA, 22 nt, Human
ugccuguguccccuucuuggca

SEQ ID NO: 856009 - RNA, 22 nt, Human
uagcaagaugaugaauuauuca

SEQ ID NO: 856010 - RNA, 22 nt, Human
uuuuaucugugacaucuggcag

SEQ ID NO: 856011 - RNA, 22 nt, Human
caaggccacuccagagacuggu

SEQ ID NO: 856012 - RNA, 22 nt, Human
gacagcugugcaggagaagggg

SEQ ID NO: 856013 - RNA, 20 nt, Human
auacacuugcccagcuugug

SEQ ID NO: 856014 - RNA, 22 nt, Human
ucuuuuggguucuuaugauuua

SEQ ID NO: 856015 - RNA, 22 nt, Human
agagccagcauuugacacuggc

SEQ ID NO: 856016 - RNA, 22 nt, Human
agugcuuuccuucuugugacau

SEQ ID NO: 856017 - RNA, 23 nt, Human
agcugaggcugugggugucagag

SEQ ID NO: 856018 - RNA, 22 nt, Human
ugcugagggagggguuuuccag

SEQ ID NO: 856019 - RNA, 19 nt, Human
agccacagaacuugcagga

SEQ ID NO: 856020 - RNA, 22 nt, Human
agauggaguuaguaccagaguc

SEQ ID NO: 856021 - RNA, 22 nt, Human
ucccaggacuuccaguuggagg

SEQ ID NO: 856022 - RNA, 19 nt, Human
ugccuggacaaaugugggg

SEQ ID NO: 856023 - RNA, 22 nt, Human
uucuuaggacuaguauagcaug

SEQ ID NO: 856024 - RNA, 22 nt, Human
aggacagcccuugagagcacau

SEQ ID NO: 856025 - RNA, 20 nt, Human
aucuucuuggccagcuugcu

SEQ ID NO: 856026 - RNA, 22 nt, Human
aaaaauacuucacuucugggug

SEQ ID NO: 856027 - RNA, 22 nt, Human
gcuggagagugaggggagcaag

SEQ ID NO: 856028 - RNA, 22 nt, Human
gucaggauuugaacucaggucu

SEQ ID NO: 856029 - RNA, 22 nt, Human
auuuugaugcuaucuaaugaau

SEQ ID NO: 856030 - RNA, 22 nt, Human
ucuuggcaauuugaucucaguu

SEQ ID NO: 856031 - RNA, 22 nt, Human
gggcagcuggauaguuuuaaau

SEQ ID NO: 856032 - RNA, 22 nt, Human
acaggcugauagaccauaaaua

SEQ ID NO: 856033 - RNA, 22 nt, Human
gcuccuggugcaaaguuucuuc

SEQ ID NO: 856034 - RNA, 22 nt, Human
ccuccuggcuuuucccauugaa

SEQ ID NO: 856035 - RNA, 22 nt, Human
uagcccagcaugagcagagcug

SEQ ID NO: 856036 - RNA, 22 nt, Human
ucugcuguucauucuuuuagcu

SEQ ID NO: 856037 - RNA, 22 nt, Human
uagugcagguuaauaggacuuc

SEQ ID NO: 856038 - RNA, 22 nt, Human
aaaggagacuucagaucuccuu

SEQ ID NO: 856039 - RNA, 22 nt, Human
caccuuguggcccagucagguu

SEQ ID NO: 856040 - RNA, 22 nt, Human
uaacaguagccuuauguggucu

SEQ ID NO: 856041 - RNA, 22 nt, Human
uuuccauguuggugaaaugagg

SEQ ID NO: 856042 - RNA, 21 nt, Human
ucuuggccuaaguucacugaa

SEQ ID NO: 856043 - RNA, 22 nt, Human
uggcugaggagagggcggaagu

SEQ ID NO: 856044 - RNA, 22 nt, Human
acaggcugguuuguaaaagaug

SEQ ID NO: 856045 - RNA, 21 nt, Human
ggagggcagcccagacuggcu

SEQ ID NO: 856046 - RNA, 18 nt, Human
agcugaggggacugaaga

SEQ ID NO: 856047 - RNA, 21 nt, Human
aggcagcuggaaggccuggcu

SEQ ID NO: 856048 - RNA, 22 nt, Human
auguuguuuuuucauaaaguau

SEQ ID NO: 856049 - RNA, 22 nt, Human
gaagcacauggcuauagcuauu

SEQ ID NO: 856050 - RNA, 19 nt, Human
uggucuaaaugugugcccc

SEQ ID NO: 856051 - RNA, 22 nt, Human
ccaggaaauggcuugcuucuuu

SEQ ID NO: 856052 - RNA, 22 nt, Human
aggauguugcuauuggcagucu

SEQ ID NO: 856053 - RNA, 22 nt, Human
caggaugguggcaugaucagaa

SEQ ID NO: 856054 - RNA, 22 nt, Human
uucaguaaaacacugcaauguc

SEQ ID NO: 856055 - RNA, 22 nt, Human
gcuaggcucggaagcagcaggg

SEQ ID NO: 856056 - RNA, 22 nt, Human
uggcagcugcguuguguuucug

SEQ ID NO: 856057 - RNA, 22 nt, Human
agacagugcaagaagagcaggc

SEQ ID NO: 856058 - RNA, 22 nt, Human
gucaggaugcuauuguuauuaa

SEQ ID NO: 856059 - RNA, 22 nt, Human
gagggagggaaaguuuaacacu

SEQ ID NO: 856060 - RNA, 20 nt, Human
ccagagcugauggcugcccg

SEQ ID NO: 856061 - RNA, 22 nt, Human
ccuggagcaggagcugcagagg

SEQ ID NO: 856062 - RNA, 22 nt, Human
auaaacagccugcccaaauugg

SEQ ID NO: 856063 - RNA, 22 nt, Human
uuaggaaucaccugcagaucuu

SEQ ID NO: 856064 - RNA, 22 nt, Human
ucccaggaauugaagccagugu

SEQ ID NO: 856065 - RNA, 22 nt, Human
caccccagcuucucaggauaga

SEQ ID NO: 856066 - RNA, 20 nt, Human
augcuuucuugugugcugcu

SEQ ID NO: 856067 - RNA, 19 nt, Human
ucuaagccucaauguuuuc

SEQ ID NO: 856068 - RNA, 22 nt, Human
aaggagagagcuuugcuggaac

SEQ ID NO: 856069 - RNA, 22 nt, Human
uuugaaaucuaaucaaggaaca

SEQ ID NO: 856070 - RNA, 22 nt, Human
auucuucagcaggggacacuau

SEQ ID NO: 856071 - RNA, 22 nt, Human
agcugcaggagucgccuaggau

SEQ ID NO: 856072 - RNA, 22 nt, Human
aaauguauugcauaggauauuu

SEQ ID NO: 856073 - RNA, 22 nt, Human
aguuugaauugaaaugcagaug

SEQ ID NO: 856074 - RNA, 22 nt, Human
gccagguggagguugcagugag

SEQ ID NO: 856075 - RNA, 22 nt, Human
gaaggaaaacagaucugccuga

SEQ ID NO: 856076 - RNA, 21 nt, Human
cccaggaggcugagaagagca

SEQ ID NO: 856077 - RNA, 22 nt, Human
ucauacaucuguccuggagcuc

SEQ ID NO: 856078 - RNA, 22 nt, Human
aggcaccuugcgguccagugaa

SEQ ID NO: 856079 - RNA, 22 nt, Human
ucuguggauuuuaguguucaug

SEQ ID NO: 856080 - RNA, 22 nt, Human
aggccagcucuacccuuggacu

SEQ ID NO: 856081 - RNA, 22 nt, Human
gccugccuagaauugcagcuuu

SEQ ID NO: 856082 - RNA, 22 nt, Human
cucccaggguagggagagacua

SEQ ID NO: 856083 - RNA, 22 nt, Human
uuauacuaaaacgcauugaauu

SEQ ID NO: 856084 - RNA, 23 nt, Human
gaggcacucaggaaaugugagug

SEQ ID NO: 856085 - RNA, 22 nt, Human
uacaccuuaaucauaugugucu

SEQ ID NO: 856086 - RNA, 20 nt, Human
ccucaggaugagggugagca

SEQ ID NO: 856087 - RNA, 21 nt, Human
agcagaggcagaauguaugca

SEQ ID NO: 856088 - RNA, 22 nt, Human
uggaaagucucuuuugacugua

SEQ ID NO: 856089 - RNA, 22 nt, Human
ucacagacacagggagaagcau

SEQ ID NO: 856090 - RNA, 22 nt, Human
acccaggaaaacauggugcaga

SEQ ID NO: 856091 - RNA, 23 nt, Human
aggcgagcucuucuccagcacgu

SEQ ID NO: 856092 - RNA, 22 nt, Human
aagauuauggcagauaacaauu

SEQ ID NO: 856093 - RNA, 22 nt, Human
aacacuuucuauuauuaugguu

SEQ ID NO: 856094 - RNA, 22 nt, Human
ggcagcacugcagcuuguuggg

SEQ ID NO: 856095 - RNA, 22 nt, Human
gaaucucaaggcuugugaggau

SEQ ID NO: 856096 - RNA, 23 nt, Human
cacuccuguuucuaagccagcau

SEQ ID NO: 856097 - RNA, 23 nt, Human
uggaggaaacacaucagaagacc

SEQ ID NO: 856098 - RNA, 22 nt, Human
caggcagcaucagucugcugua

SEQ ID NO: 856099 - RNA, 22 nt, Human
ugaggcaggagaaucacaugaa

SEQ ID NO: 856100 - RNA, 22 nt, Human
ggcagccuugagggaggccugg

SEQ ID NO: 856101 - RNA, 22 nt, Human
cuccugugggucaccaauaggc

SEQ ID NO: 856102 - RNA, 22 nt, Human
cagugcugcaggcgccugcggu

SEQ ID NO: 856103 - RNA, 23 nt, Human
uuauugaggguguagauuggugu

SEQ ID NO: 856104 - RNA, 22 nt, Human
aucaggauuacacggggaugcu

SEQ ID NO: 856105 - RNA, 22 nt, Human
ucuggccacuaauaggucucac

SEQ ID NO: 856106 - RNA, 22 nt, Human
uggcuucugucccugcuacauu

SEQ ID NO: 856107 - RNA, 22 nt, Human
cccaggaguaagugacauuguu

SEQ ID NO: 856108 - RNA, 22 nt, Human
auucggaucauguguauguguu

SEQ ID NO: 856109 - RNA, 22 nt, Human
ggggugggcgugcagggacacc

SEQ ID NO: 856110 - RNA, 23 nt, Human
ccuccugggcacaggccugaugg

SEQ ID NO: 856111 - RNA, 22 nt, Human
aggcuagcuuuggcucaguaaa

SEQ ID NO: 856112 - RNA, 22 nt, Human
auguaguuagaagauucaaaca

SEQ ID NO: 856113 - RNA, 22 nt, Human
gggcaguuuauucuagaugguu

SEQ ID NO: 856114 - RNA, 22 nt, Human
uuggccaagauacgagcacaua

SEQ ID NO: 856115 - RNA, 22 nt, Human
uuuagucuaauaaaaguggagu

SEQ ID NO: 856116 - RNA, 22 nt, Human
auucaaguccagcuucucuaca

SEQ ID NO: 856117 - RNA, 22 nt, Human
cagcaagaaucagacaaccuca

SEQ ID NO: 856118 - RNA, 22 nt, Human
uucagugucaauuuuuaaauau

SEQ ID NO: 856119 - RNA, 22 nt, Human
gcuccuggucuggagcuucaag

SEQ ID NO: 856120 - RNA, 19 nt, Human
aucugccuuagugcugcug

SEQ ID NO: 856121 - RNA, 22 nt, Human
gaggcaugcagagcuggagcag

SEQ ID NO: 856122 - RNA, 23 nt, Human
cugcugugaaacaugguuuuggu

SEQ ID NO: 856123 - RNA, 22 nt, Human
ucaagaaggagacuccacugug

SEQ ID NO: 856124 - RNA, 22 nt, Human
cuucucagcauuuugucagucu

SEQ ID NO: 856125 - RNA, 22 nt, Human
gcugccugcucggcuccuggga

SEQ ID NO: 856126 - RNA, 22 nt, Human
aacuacauuuuacagaagauga

SEQ ID NO: 856127 - RNA, 22 nt, Human
ggcaagcucaggccucaggugu

SEQ ID NO: 856128 - RNA, 22 nt, Human
uucaggaucauuuguuuuaucu

SEQ ID NO: 856129 - RNA, 22 nt, Human
aggcagcuuuaacugguaguag

SEQ ID NO: 856130 - RNA, 22 nt, Human
ugcaggcugcuggcaguagcuu

SEQ ID NO: 856131 - RNA, 22 nt, Human
gucuggccuuuuuagcuugugg

SEQ ID NO: 856132 - RNA, 22 nt, Human
uugcugugucauuuguuuaauc

SEQ ID NO: 856133 - RNA, 22 nt, Human
ccaccagcuucagcagccgcgg

SEQ ID NO: 856134 - RNA, 22 nt, Human
auuauuaggacuacugggguug

SEQ ID NO: 856135 - RNA, 22 nt, Human
caggcagggagcuggaaaggau

SEQ ID NO: 856136 - RNA, 18 nt, Human
ggagaagaacagaugugg

SEQ ID NO: 856137 - RNA, 22 nt, Human
ugcuucugggcaaaugugugug

SEQ ID NO: 856138 - RNA, 22 nt, Human
agggcagcucucaccucuggcc

SEQ ID NO: 856139 - RNA, 16 nt, Human
aggccaaaaaggggca

SEQ ID NO: 856140 - RNA, 21 nt, Human
ucaggcugucugcugguucca

SEQ ID NO: 856141 - RNA, 22 nt, Human
cagcucagacgcaggucgagca

SEQ ID NO: 856142 - RNA, 22 nt, Human
accauguguuuuacacauggua

SEQ ID NO: 856143 - RNA, 22 nt, Human
gaaaggccauuucugaggguuu

SEQ ID NO: 856144 - RNA, 22 nt, Human
aagggcuguagacaagauugcu

SEQ ID NO: 856145 - RNA, 22 nt, Human
ucugaggugucacaaggccagg

SEQ ID NO: 856146 - RNA, 22 nt, Human
uacaguaaccuuauuugucauu

SEQ ID NO: 856147 - RNA, 22 nt, Human
aagggcugagaaguggggcugg

SEQ ID NO: 856148 - RNA, 22 nt, Human
ucugcaggcuuauaggaugggu

SEQ ID NO: 856149 - RNA, 17 nt, Human
uugaacugcugagucag

SEQ ID NO: 856150 - RNA, 22 nt, Human
uagcaagaucgugucucuaaaa

SEQ ID NO: 856151 - RNA, 22 nt, Human
gaacuauaugucuuaaagcuuu

SEQ ID NO: 856152 - RNA, 22 nt, Human
gaaaacugugauuagaaugccu

SEQ ID NO: 856153 - RNA, 22 nt, Human
ggcugcugagucacgacaguga

SEQ ID NO: 856154 - RNA, 22 nt, Human
uuggcaggaauauugcagaggu

SEQ ID NO: 856155 - RNA, 22 nt, Human
cuacccagauccaggauggcua

SEQ ID NO: 856156 - RNA, 20 nt, Human
ucccucccuccagcucuggg

SEQ ID NO: 856157 - RNA, 22 nt, Human
ucuuagucacagaggugagaaa

SEQ ID NO: 856158 - RNA, 22 nt, Human
agauaaauuccuaagauuucag

SEQ ID NO: 856159 - RNA, 22 nt, Human
agagcagcacguuguccccaca

SEQ ID NO: 856160 - RNA, 22 nt, Human
uacugcaugguggaguggagcu

SEQ ID NO: 856161 - RNA, 22 nt, Human
uaggaucucaccauagaaggaa

SEQ ID NO: 856162 - RNA, 22 nt, Human
ccugguggcuucuggguggacg

SEQ ID NO: 856163 - RNA, 22 nt, Human
aaagauaauguuuccuuauucu

SEQ ID NO: 856164 - RNA, 22 nt, Human
ucugcugugauuugcuaccugu

SEQ ID NO: 856165 - RNA, 22 nt, Human
uggcuucuugacuucuuggcug

SEQ ID NO: 856166 - RNA, 22 nt, Human
agacaggagagggaacugccgg

SEQ ID NO: 856167 - RNA, 22 nt, Human
ucccagaggacuguuggugcua

SEQ ID NO: 856168 - RNA, 22 nt, Human
auuaggaaguaaguaucacaag

SEQ ID NO: 856169 - RNA, 16 nt, Human
gcuccugggcccucga

SEQ ID NO: 856170 - RNA, 22 nt, Human
cuggccaauauagggaaaucuu

SEQ ID NO: 856171 - RNA, 22 nt, Human
cuucagaggggacucaaaguca

SEQ ID NO: 856172 - RNA, 22 nt, Human
uccaggagcauccaggugaagc

SEQ ID NO: 856173 - RNA, 23 nt, Human
augaggucagccauaagacggaa

SEQ ID NO: 856174 - RNA, 16 nt, Human
aggaggggaauuagga

SEQ ID NO: 856175 - RNA, 22 nt, Human
guccucugaaguugugcaaugc

SEQ ID NO: 856176 - RNA, 22 nt, Human
agcuccugcucuuugucccuaa

SEQ ID NO: 856177 - RNA, 22 nt, Human
gagcacugagcuggaauuggag

SEQ ID NO: 856178 - RNA, 22 nt, Human
cuuagaaaucgaacucagguua

SEQ ID NO: 856179 - RNA, 21 nt, Human
ccaggcugggagggcaguucc

SEQ ID NO: 856180 - RNA, 22 nt, Human
agcugccccaugagaggcaggu

SEQ ID NO: 856181 - RNA, 21 nt, Human
cucaaagaccaaaaguguaga

SEQ ID NO: 856182 - RNA, 22 nt, Human
uguuguuuucucauggagaaua

SEQ ID NO: 856183 - RNA, 22 nt, Human
gcucaguuauccgugugugacu

SEQ ID NO: 856184 - RNA, 22 nt, Human
cuguuucaagugaagucagaca

SEQ ID NO: 856185 - RNA, 20 nt, Human
acugagguuagauaacaggu

SEQ ID NO: 856186 - RNA, 22 nt, Human
uaaucuaucaagcaacaaagug

SEQ ID NO: 856187 - RNA, 22 nt, Human
ggcagcuaguuuaagaaagagg

SEQ ID NO: 856188 - RNA, 18 nt, Human
uggcuucuauuuuacuca

SEQ ID NO: 856189 - RNA, 22 nt, Human
cccuggugcccugggucagccu

SEQ ID NO: 856190 - RNA, 22 nt, Human
cccuggaggaaaaucugaggcu

SEQ ID NO: 856191 - RNA, 22 nt, Human
aauagcucacugauuucucuuu

SEQ ID NO: 856192 - RNA, 22 nt, Human
ucuucagauggccaguuguccc

SEQ ID NO: 856193 - RNA, 22 nt, Human
aguaacucuccuuugacauauu

SEQ ID NO: 856194 - RNA, 22 nt, Human
gcugccagccaacuugcugugc

SEQ ID NO: 856195 - RNA, 20 nt, Human
agcauuugaaauaugacuau

SEQ ID NO: 856196 - RNA, 22 nt, Human
ucuuggccagguguggugccuc

SEQ ID NO: 856197 - RNA, 20 nt, Human
aggaggcauagucuggaaag

SEQ ID NO: 856198 - RNA, 21 nt, Human
ggcagcguguggacaggaagg

SEQ ID NO: 856199 - RNA, 22 nt, Human
acagucucuccacacugcaggg

SEQ ID NO: 856200 - RNA, 22 nt, Human
ucuuugaaagcuguucuagagu

SEQ ID NO: 856201 - RNA, 22 nt, Human
uggcuggagucuggugcuagcc

SEQ ID NO: 856202 - RNA, 22 nt, Human
auuucagaugaccaaauggaaa

SEQ ID NO: 856203 - RNA, 22 nt, Human
cuucugugauuugguuaggaua

SEQ ID NO: 856204 - RNA, 22 nt, Human
aaggcugagccagggccccuau

SEQ ID NO: 856205 - RNA, 22 nt, Human
gcuguguuggugaagcuguagc

SEQ ID NO: 856206 - RNA, 19 nt, Human
ucauuguugguuugucggg

SEQ ID NO: 856207 - RNA, 22 nt, Human
uucauguguauggaacauuuuu

SEQ ID NO: 856208 - RNA, 22 nt, Human
ccuggugggcaggagugagacc

SEQ ID NO: 856209 - RNA, 22 nt, Human
aggcugcugaggccaccacgcu

SEQ ID NO: 856210 - RNA, 22 nt, Human
gaauacacgaauagagcauggu

SEQ ID NO: 856211 - RNA, 22 nt, Human
cagcugacuucauaggaagaca

SEQ ID NO: 856212 - RNA, 22 nt, Human
ucucucuucaacccuuaacuag

SEQ ID NO: 856213 - RNA, 22 nt, Human
ggcugaggggcccagaggaaca

SEQ ID NO: 856214 - RNA, 22 nt, Human
aacuggauuuaggaacagagaa

SEQ ID NO: 856215 - RNA, 17 nt, Human
gcccaggaaggacggcc

SEQ ID NO: 856216 - RNA, 22 nt, Human
ccauuguaaauucuguggaagu

SEQ ID NO: 856217 - RNA, 22 nt, Human
acugagguuguaguaggaauuc

SEQ ID NO: 856218 - RNA, 22 nt, Human
auuaguaaaacauuguauaugu

SEQ ID NO: 856219 - RNA, 16 nt, Human
uggcugagagaggguu

SEQ ID NO: 856220 - RNA, 22 nt, Human
ucuuccaagguugcacacuauc

SEQ ID NO: 856221 - RNA, 22 nt, Human
caguuucuuggaugccaauuuc

SEQ ID NO: 856222 - RNA, 22 nt, Human
gagacagugguugcagaagcuc

SEQ ID NO: 856223 - RNA, 22 nt, Human
cucccagagaccaagcugagaa

SEQ ID NO: 856224 - RNA, 22 nt, Human
aggcagacucaauggcuagaua

SEQ ID NO: 856225 - RNA, 22 nt, Human
uguacauacauagauauacaca

SEQ ID NO: 856226 - RNA, 22 nt, Human
gauggcaggugauagccgaguc

SEQ ID NO: 856227 - RNA, 22 nt, Human
uuggccaaaggaaagacuacug

SEQ ID NO: 856228 - RNA, 22 nt, Human
ggcugcuggaagacugaacaag

SEQ ID NO: 856229 - RNA, 22 nt, Human
aggagaggcaucaagaaaaucg

SEQ ID NO: 856230 - RNA, 21 nt, Human
ccaggaaggacugagcucccu

SEQ ID NO: 856231 - RNA, 22 nt, Human
uuacagcagugggaaggaguca

SEQ ID NO: 856232 - RNA, 22 nt, Human
gcaggcugcccucuuguguuga

SEQ ID NO: 856233 - RNA, 22 nt, Human
gagagaaaggcuugcaggcugu

SEQ ID NO: 856234 - RNA, 22 nt, Human
ccaggcagcaaauuuucugaau

SEQ ID NO: 856235 - RNA, 19 nt, Human
ugaggggaggagaggccug

SEQ ID NO: 856236 - RNA, 22 nt, Human
auuauacauuuuguguagagau

SEQ ID NO: 856237 - RNA, 18 nt, Human
gcucaggcccuagucagu

SEQ ID NO: 856238 - RNA, 22 nt, Human
cuuaaaaucuggcaguuagcua

SEQ ID NO: 856239 - RNA, 22 nt, Human
aggagaaggaagugcaucacua

SEQ ID NO: 856240 - RNA, 21 nt, Human
uccaggaguucuaauaggugu

SEQ ID NO: 856241 - RNA, 19 nt, Human
ccaggagagcuuggagaag

SEQ ID NO: 856242 - RNA, 22 nt, Human
uuauacauguguuuugagauga

SEQ ID NO: 856243 - RNA, 22 nt, Human
uuauuaugguauuucuuugcag

SEQ ID NO: 856244 - RNA, 22 nt, Human
ccuccugggacucauuagcacc

SEQ ID NO: 856245 - RNA, 22 nt, Human
agcagagguuuguuggaaaccu

SEQ ID NO: 856246 - RNA, 18 nt, Human
gcuccugguuggaaagaa

SEQ ID NO: 856247 - RNA, 22 nt, Human
uaauuauacaaaaaggcaugca

SEQ ID NO: 856248 - RNA, 22 nt, Human
gaauuccuuaggcucuugacug

SEQ ID NO: 856249 - RNA, 22 nt, Human
augaggcaucugcagucacuag

SEQ ID NO: 856250 - RNA, 22 nt, Human
uuuuuguagucauuagaagagg

SEQ ID NO: 856251 - RNA, 22 nt, Human
cuggcugaggcagagccugggg

SEQ ID NO: 856252 - RNA, 22 nt, Human
gcaagaugguuauaaaaaaugu

SEQ ID NO: 856253 - RNA, 22 nt, Human
gacccaggcccaaggcugccag

SEQ ID NO: 856254 - RNA, 22 nt, Human
cagauccacccuuguagugaca

SEQ ID NO: 856255 - RNA, 22 nt, Human
uuggccaauuuagaacguguug

SEQ ID NO: 856256 - RNA, 22 nt, Human
acccaggagguggaggcugcag

SEQ ID NO: 856257 - RNA, 22 nt, Human
uuaaauuccagccucauaauag

SEQ ID NO: 856258 - RNA, 22 nt, Human
gaggcugcuguuagcccugggc

SEQ ID NO: 856259 - RNA, 22 nt, Human
ugaaaugagcauuuauucuuua

SEQ ID NO: 856260 - RNA, 22 nt, Human
agagagagggaaacugcuaaac

SEQ ID NO: 856261 - RNA, 22 nt, Human
ccuugcauauauuauaucuuug

SEQ ID NO: 856262 - RNA, 22 nt, Human
ugucucugaggugagggucagc

SEQ ID NO: 856263 - RNA, 22 nt, Human
ccugcucagagcgucuugugug

SEQ ID NO: 856264 - RNA, 21 nt, Human
gagugcagcaagguagagucu

SEQ ID NO: 856265 - RNA, 22 nt, Human
uccaugagacagauacuguaag

SEQ ID NO: 856266 - RNA, 22 nt, Human
auuuucagagacaucuggacuu

SEQ ID NO: 856267 - RNA, 22 nt, Human
ucuucagacuccaaauguuuua

SEQ ID NO: 856268 - RNA, 22 nt, Human
cccaggaggcagagcuugcagu

SEQ ID NO: 856269 - RNA, 22 nt, Human
ugucugugaccucuuuggagcc

SEQ ID NO: 856270 - RNA, 22 nt, Human
gcucccagcaauugaggcagcc

SEQ ID NO: 856271 - RNA, 22 nt, Human
aggccagcacgacagccgcagg

SEQ ID NO: 856272 - RNA, 22 nt, Human
cccuguacagucucuguggcac

SEQ ID NO: 856273 - RNA, 21 nt, Human
agcagaggggacauguuugau

SEQ ID NO: 856274 - RNA, 22 nt, Human
uacuccugcugauccugccagc

SEQ ID NO: 856275 - RNA, 17 nt, Human
ugauaguucauuuuaag

SEQ ID NO: 856276 - RNA, 22 nt, Human
ccuggccauagggcccaggaaa

SEQ ID NO: 856277 - RNA, 22 nt, Human
aucuuucaaucaggaaaaaucu

SEQ ID NO: 856278 - RNA, 22 nt, Human
ccaucccugggccauguccccu

SEQ ID NO: 856279 - RNA, 22 nt, Human
guaggcagauaggagugcagcc

SEQ ID NO: 856280 - RNA, 22 nt, Human
uugcauauccuccaacacaugg

SEQ ID NO: 856281 - RNA, 22 nt, Human
uuucuucucacccaggacagag

SEQ ID NO: 856282 - RNA, 22 nt, Human
cucucugggcccaguuggcacc

SEQ ID NO: 856283 - RNA, 22 nt, Human
uuuguaguuguggaugcugaag

SEQ ID NO: 856284 - RNA, 22 nt, Human
aaaugcacugaauauuccaaau

SEQ ID NO: 856285 - RNA, 19 nt, Human
agggaguuuauauuugcac

SEQ ID NO: 856286 - RNA, 22 nt, Human
uucuacauugugaaguucuuua

SEQ ID NO: 856287 - RNA, 23 nt, Human
ugucuccaucucauuacuugggg

SEQ ID NO: 856288 - RNA, 22 nt, Human
agcuggugauguggucccucac

SEQ ID NO: 856289 - RNA, 22 nt, Human
uugagcugccuggcuguggcuc

SEQ ID NO: 856290 - RNA, 22 nt, Human
ugauuccugugcuuauuccagu

SEQ ID NO: 856291 - RNA, 22 nt, Human
ucaguguagcagacuuguagcc

SEQ ID NO: 856292 - RNA, 22 nt, Human
augcuugcccauguuucugaag

SEQ ID NO: 856293 - RNA, 22 nt, Human
auuuuagagaaacaaacguagg

SEQ ID NO: 856294 - RNA, 22 nt, Human
uuguuuguaaggcucuuagaau

SEQ ID NO: 856295 - RNA, 20 nt, Human
auuugcuuaccuuguuucua

SEQ ID NO: 856296 - RNA, 23 nt, Human
uagauccuuccaacuacucuuac

SEQ ID NO: 856297 - RNA, 23 nt, Human
aacauuuguaaggugauuuuguu

SEQ ID NO: 856298 - RNA, 20 nt, Human
cuuguuaaauaugcagguag

SEQ ID NO: 856299 - RNA, 22 nt, Human
gaguaauuuucuuaaaacauca

SEQ ID NO: 856300 - RNA, 22 nt, Human
aucauugaguaaaaugaauaca

SEQ ID NO: 856301 - RNA, 22 nt, Human
ucuccauggauuuggaaaugau

SEQ ID NO: 856302 - RNA, 22 nt, Human
ugugagauuuuauuugauaugc

SEQ ID NO: 856303 - RNA, 18 nt, Human
auuugcaggcaugcaggc

SEQ ID NO: 856304 - RNA, 22 nt, Human
guguguggaaugcucauuuauu

SEQ ID NO: 856305 - RNA, 22 nt, Human
uggaucuugaugcuccaagagu

SEQ ID NO: 856306 - RNA, 22 nt, Human
gagguauaguucuauuagauga

SEQ ID NO: 856307 - RNA, 22 nt, Human
auccauuuuuucagaaugcucu

SEQ ID NO: 856308 - RNA, 22 nt, Human
uccuuucugucuuuacucugga

SEQ ID NO: 856309 - RNA, 22 nt, Human
uucuucauucccuuacuuccga

SEQ ID NO: 856310 - RNA, 22 nt, Human
uagcugucagcaaucaaguggu

SEQ ID NO: 856311 - RNA, 22 nt, Human
uaugcuguauucuguauguuag

SEQ ID NO: 856312 - RNA, 22 nt, Human
gucaucaucaggcagaugcugc

SEQ ID NO: 856313 - RNA, 22 nt, Human
guucaguuauuucugaagauau

SEQ ID NO: 856314 - RNA, 22 nt, Human
uaacuucucugagccucauucc

SEQ ID NO: 856315 - RNA, 22 nt, Human
uaauucuagauugacauuuuga

SEQ ID NO: 856316 - RNA, 21 nt, Human
ugcauauauaagugcauacac

SEQ ID NO: 856317 - RNA, 23 nt, Human
cguuuuuuccucagauguucugg

SEQ ID NO: 856318 - RNA, 22 nt, Human
auuguauacaagcuuaauuguu

SEQ ID NO: 856319 - RNA, 22 nt, Human
cauuuugugcuagacacuaugg

SEQ ID NO: 856320 - RNA, 22 nt, Human
cucuggagcgcugcuucccgcg

SEQ ID NO: 856321 - RNA, 22 nt, Human
cucucuccuuagcugcagacca

SEQ ID NO: 856322 - RNA, 22 nt, Human
ucuccucuauuucuguauguau

SEQ ID NO: 856323 - RNA, 22 nt, Human
uaauuuugucacagugacaugc

SEQ ID NO: 856324 - RNA, 18 nt, Human
cuuuagcugucaucuuug

SEQ ID NO: 856325 - RNA, 22 nt, Human
uguaucauauggggaagcuuca

SEQ ID NO: 856326 - RNA, 22 nt, Human
ugaguguuguaaccauaugauu

SEQ ID NO: 856327 - RNA, 22 nt, Human
ugaaauguggagaugguaagua

SEQ ID NO: 856328 - RNA, 22 nt, Human
uuuggauugcuuggaugcuucg

SEQ ID NO: 856329 - RNA, 22 nt, Human
aaagaugucauacacauuaaga

SEQ ID NO: 856330 - RNA, 21 nt, Human
guucaauagcucuuugaaugc

SEQ ID NO: 856331 - RNA, 22 nt, Human
auguuguugaacucuuugcaug

SEQ ID NO: 856332 - RNA, 22 nt, Human
aauuauguuugcuuuagaugga

SEQ ID NO: 856333 - RNA, 22 nt, Human
ugguuuguauauguuugugaga

SEQ ID NO: 856334 - RNA, 22 nt, Human
guuguuuuugaacggugguggc

SEQ ID NO: 856335 - RNA, 22 nt, Human
ugguuggauggcucuuguggcu

SEQ ID NO: 856336 - RNA, 22 nt, Human
ucauuguuucugcuuuucauga

SEQ ID NO: 856337 - RNA, 22 nt, Human
auuauguagcuaaaaauugugu

SEQ ID NO: 856338 - RNA, 21 nt, Human
cuuuucuagucccagccccgc

SEQ ID NO: 856339 - RNA, 22 nt, Human
uaucuguuuuuacagugucuuu

SEQ ID NO: 856340 - RNA, 22 nt, Human
acauuguugagccucuuguuca

SEQ ID NO: 856341 - RNA, 22 nt, Human
ugccuggauggcucugagcagg

SEQ ID NO: 856342 - RNA, 22 nt, Human
uuguauuaaaauguguuucugu

SEQ ID NO: 856343 - RNA, 22 nt, Human
acuucagugugguauaaaacgu

SEQ ID NO: 856344 - RNA, 22 nt, Human
uuucuagguguucacagagcau

SEQ ID NO: 856345 - RNA, 20 nt, Human
uauuucugggcaaccauuua

SEQ ID NO: 856346 - RNA, 22 nt, Human
uuuuuugucuugaagaaauggu

SEQ ID NO: 856347 - RNA, 22 nt, Human
auccuucaaaaggaauagcagg

SEQ ID NO: 856348 - RNA, 22 nt, Human
aguguauuugccuauaaaaaug

SEQ ID NO: 856349 - RNA, 22 nt, Human
auuuuguaucuuacggggacua

SEQ ID NO: 856350 - RNA, 22 nt, Human
cugguuuuccaauguuuugacu

SEQ ID NO: 856351 - RNA, 22 nt, Human
augcauugaggaugacaugagu

SEQ ID NO: 856352 - RNA, 22 nt, Human
uagcaucuguacugacauaauc

SEQ ID NO: 856353 - RNA, 22 nt, Human
caauuuuuaaacuaugaaguug

SEQ ID NO: 856354 - RNA, 22 nt, Human
uaaaguauaagcauuggaguau

SEQ ID NO: 856355 - RNA, 22 nt, Human
ggcuuccuccuuccugcuguca

SEQ ID NO: 856356 - RNA, 22 nt, Human
cugauggagagugugauuuggg

SEQ ID NO: 856357 - RNA, 22 nt, Human
ucugccaucaagaugcucuggc

SEQ ID NO: 856358 - RNA, 22 nt, Human
gcugcugcuugaaggcucggag

SEQ ID NO: 856359 - RNA, 22 nt, Human
gcaguugcaggauuuguguugu

SEQ ID NO: 856360 - RNA, 19 nt, Human
uuugauagggcauaauaua

SEQ ID NO: 856361 - RNA, 22 nt, Human
gauguaucugagcugcuuaggu

SEQ ID NO: 856362 - RNA, 22 nt, Human
cuguuccuccaccucaacaaac

SEQ ID NO: 856363 - RNA, 22 nt, Human
uguuugcucugacuaucuugcg

SEQ ID NO: 856364 - RNA, 22 nt, Human
aaguguguauuuuucuucagug

SEQ ID NO: 856365 - RNA, 22 nt, Human
ccauuuguaccauuucuuugua

SEQ ID NO: 856366 - RNA, 22 nt, Human
uugauuugauuguaauggcucu

SEQ ID NO: 856367 - RNA, 22 nt, Human
uuguuuaaagaacuucugacuu

SEQ ID NO: 856368 - RNA, 21 nt, Human
uaagcuaaacauucaguuaac

SEQ ID NO: 856369 - RNA, 22 nt, Human
uucuggaguuugaagaucaggu

SEQ ID NO: 856370 - RNA, 22 nt, Human
uuuuggcucugcagguuugcac

SEQ ID NO: 856371 - RNA, 22 nt, Human
uuuccucacacagaagaucuug

SEQ ID NO: 856372 - RNA, 22 nt, Human
uuuguguuggaagaaaugcuac

SEQ ID NO: 856373 - RNA, 21 nt, Human
agcauucaaaagaugccauaa

SEQ ID NO: 856374 - RNA, 22 nt, Human
ugugugaacucucugauguaca

SEQ ID NO: 856375 - RNA, 22 nt, Human
uuacaauuacuugaucucagcu

SEQ ID NO: 856376 - RNA, 22 nt, Human
ucuuugcagaauuuaacuuugc

SEQ ID NO: 856377 - RNA, 22 nt, Human
uucuguuuauaauuugcaguug

SEQ ID NO: 856378 - RNA, 20 nt, Human
uuugacaccuugggagagac

SEQ ID NO: 856379 - RNA, 22 nt, Human
uuauugagcacauaguaugugg

SEQ ID NO: 856380 - RNA, 20 nt, Human
cuugaguucagagcugucau

SEQ ID NO: 856381 - RNA, 22 nt, Human
auuaguguuguggcuucauggc

SEQ ID NO: 856382 - RNA, 22 nt, Human
uaacuugagcucucagugcuau

SEQ ID NO: 856383 - RNA, 22 nt, Human
ugcacauggccugagugccuga

SEQ ID NO: 856384 - RNA, 22 nt, Human
uaaaugcaguacaaauuguucu

SEQ ID NO: 856385 - RNA, 23 nt, Human
cauuugauccucacaauaaaugg

SEQ ID NO: 856386 - RNA, 22 nt, Human
uauuuguuucuaguggcagcaa

SEQ ID NO: 856387 - RNA, 20 nt, Human
uuugauugccccucugacuu

SEQ ID NO: 856388 - RNA, 22 nt, Human
uuuuguguugccauguuaagca

SEQ ID NO: 856389 - RNA, 22 nt, Human
auauaguuggguuucauucuac

SEQ ID NO: 856390 - RNA, 22 nt, Human
cugcuucacccugccugagaac

SEQ ID NO: 856391 - RNA, 19 nt, Human
auucuucucuuccugcugu

SEQ ID NO: 856392 - RNA, 22 nt, Human
aaugauguuuuuaaagaacaua

SEQ ID NO: 856393 - RNA, 22 nt, Human
uugcaucagcaggcauaauugg

SEQ ID NO: 856394 - RNA, 22 nt, Human
accuggaccugccaccuaugag

SEQ ID NO: 856395 - RNA, 22 nt, Human
acaugcauaaacuacuucuuau

SEQ ID NO: 856396 - RNA, 22 nt, Human
auccauuugccgugcuaugugc

SEQ ID NO: 856397 - RNA, 22 nt, Human
auguuugaaauuguaaguauau

SEQ ID NO: 856398 - RNA, 22 nt, Human
ucaguguccuucguucuuguug

SEQ ID NO: 856399 - RNA, 22 nt, Human
uuuguucaccuagcaaacuuuu

SEQ ID NO: 856400 - RNA, 19 nt, Human
ucucccaugccugugucua

SEQ ID NO: 856401 - RNA, 22 nt, Human
aaaugcacaauaaaguaaaggc

SEQ ID NO: 856402 - RNA, 22 nt, Human
ugaaguuguuaagguugccauu

SEQ ID NO: 856403 - RNA, 22 nt, Human
uagaucuuucacuacuguguag

SEQ ID NO: 856404 - RNA, 22 nt, Human
uuaggcauccugucccuggauu

SEQ ID NO: 856405 - RNA, 22 nt, Human
uuugcuugauuaggauauggaa

SEQ ID NO: 856406 - RNA, 22 nt, Human
gguuuguugggguccaggccca

SEQ ID NO: 856407 - RNA, 21 nt, Human
gucuuuuuaauugcgauuucc

SEQ ID NO: 856408 - RNA, 22 nt, Human
cauucauaggaggagaugauua

SEQ ID NO: 856409 - RNA, 22 nt, Human
guaauucugugugaaucuauua

SEQ ID NO: 856410 - RNA, 22 nt, Human
uucucuucacagggaucauccu

SEQ ID NO: 856411 - RNA, 22 nt, Human
uuauuugcccauguuuagcaga

SEQ ID NO: 856412 - RNA, 22 nt, Human
ugacucauauuucauggauacg

SEQ ID NO: 856413 - RNA, 22 nt, Human
ugaguuagcucuauucuuuugg

SEQ ID NO: 856414 - RNA, 22 nt, Human
uugaggcacagauuuuaguggc

SEQ ID NO: 856415 - RNA, 22 nt, Human
cuuuacuucagcaagcuuuccu

SEQ ID NO: 856416 - RNA, 22 nt, Human
ugugacagugccagcuucauag

SEQ ID NO: 856417 - RNA, 21 nt, Human
uugauuuagcagaucuagcug

SEQ ID NO: 856418 - RNA, 22 nt, Human
uuaaguauauccauuugacugg

SEQ ID NO: 856419 - RNA, 22 nt, Human
uuuugaauaauucagaaacagc

SEQ ID NO: 856420 - RNA, 20 nt, Human
ucauaugugguuguauacaa

SEQ ID NO: 856421 - RNA, 18 nt, Human
uuugggauccucuuuucu

SEQ ID NO: 856422 - RNA, 20 nt, Human
ugugguuuuugccaguugaa

SEQ ID NO: 856423 - RNA, 22 nt, Human
uugaugcugucuuucagaauca

SEQ ID NO: 856424 - RNA, 22 nt, Human
guuuuguucaugaacauugggu

SEQ ID NO: 856425 - RNA, 22 nt, Human
uaccuugugagcuuucuaacau

SEQ ID NO: 856426 - RNA, 22 nt, Human
ugccugugggugaugauuugau

SEQ ID NO: 856427 - RNA, 22 nt, Human
uugcacauguugguucuugaaa

SEQ ID NO: 856428 - RNA, 22 nt, Human
gagaauguuaauguugaaguau

SEQ ID NO: 856429 - RNA, 22 nt, Human
uacuacauacagaauuuagaga

SEQ ID NO: 856430 - RNA, 22 nt, Human
ugugcuauuuuugcauaugugu

SEQ ID NO: 856431 - RNA, 22 nt, Human
uaucuuugguagcuuuccuaag

SEQ ID NO: 856432 - RNA, 22 nt, Human
augacagcucuagcacacagua

SEQ ID NO: 856433 - RNA, 22 nt, Human
caauaauugcuuuccagaguua

SEQ ID NO: 856434 - RNA, 22 nt, Human
cuucucaaaguugugaaucagg

SEQ ID NO: 856435 - RNA, 22 nt, Human
cagcuccaucuugcuuauacca

SEQ ID NO: 856436 - RNA, 20 nt, Human
caauaauuuacuucccuauu

SEQ ID NO: 856437 - RNA, 22 nt, Human
gucuuuuuuacaccuuacauca

SEQ ID NO: 856438 - RNA, 22 nt, Human
uucauugauuuccuuggaauaa

SEQ ID NO: 856439 - RNA, 22 nt, Human
ucuccucuccuuucauguuguu

SEQ ID NO: 856440 - RNA, 22 nt, Human
uuuaauuuucugggcccagcag

SEQ ID NO: 856441 - RNA, 22 nt, Human
ccugugauauuguucauaauau

SEQ ID NO: 856442 - RNA, 22 nt, Human
guugaguguugugcaugcacca

SEQ ID NO: 856443 - RNA, 22 nt, Human
ugucauauagaauguucuauga

SEQ ID NO: 856444 - RNA, 22 nt, Human
agugauguagguggauucuggc

SEQ ID NO: 856445 - RNA, 22 nt, Human
cuuauuugcccauguuucuuua

SEQ ID NO: 856446 - RNA, 22 nt, Human
ucacaacugggugucuucauca

SEQ ID NO: 856447 - RNA, 22 nt, Human
auauuuguuuggcagaguucag

SEQ ID NO: 856448 - RNA, 22 nt, Human
acuuuggugcgaagucacuuua

SEQ ID NO: 856449 - RNA, 22 nt, Human
ugcaucauuaagguacaguugg

SEQ ID NO: 856450 - RNA, 22 nt, Human
augcuuucucuuaguucauuga

SEQ ID NO: 856451 - RNA, 22 nt, Human
gcugcuggcuuccugcuguuuu

SEQ ID NO: 856452 - RNA, 22 nt, Human
uugaguuuccugacagcgaagg

SEQ ID NO: 856453 - RNA, 17 nt, Human
aguuuuuggaccugugu

SEQ ID NO: 856454 - RNA, 22 nt, Human
gcugauggcuugcuggcugaca

SEQ ID NO: 856455 - RNA, 22 nt, Human
guuuauuggguauuguggagcc

SEQ ID NO: 856456 - RNA, 22 nt, Human
ugugguuuugguucagaaacaa

SEQ ID NO: 856457 - RNA, 19 nt, Human
cucugccauuugcugccug

SEQ ID NO: 856458 - RNA, 23 nt, Human
agugaugucacccacagacaagg

SEQ ID NO: 856459 - RNA, 22 nt, Human
gugauuucaaauauagagugag

SEQ ID NO: 856460 - RNA, 22 nt, Human
ucuauuaaugauucaauagugu

SEQ ID NO: 856461 - RNA, 22 nt, Human
aaguuacacauuuucauuguaa

SEQ ID NO: 856462 - RNA, 22 nt, Human
ucugcuguuuacugugugauau

SEQ ID NO: 856463 - RNA, 22 nt, Human
acauuuuuggguugaugucuga

SEQ ID NO: 856464 - RNA, 22 nt, Human
uuucuaguggguauucccuguu

SEQ ID NO: 856465 - RNA, 21 nt, Human
uccugcugagaaacagauggu

SEQ ID NO: 856466 - RNA, 22 nt, Human
cugaugcucuggauguagucaa

SEQ ID NO: 856467 - RNA, 22 nt, Human
cauuguguauuucuguaguacu

SEQ ID NO: 856468 - RNA, 22 nt, Human
gugauuuucuccuccuagaagu

SEQ ID NO: 856469 - RNA, 22 nt, Human
agcuaugaagccacuuuuaaca

SEQ ID NO: 856470 - RNA, 22 nt, Human
cuuguuuucuucugcagucuau

SEQ ID NO: 856471 - RNA, 22 nt, Human
uaguauuuccuguaagcuauag

SEQ ID NO: 856472 - RNA, 22 nt, Human
uuuacuuuugguaaggucauuu

SEQ ID NO: 856473 - RNA, 22 nt, Human
uggcauuggaauuuguguugca

SEQ ID NO: 856474 - RNA, 19 nt, Human
aggugaugugacucuagaa

SEQ ID NO: 856475 - RNA, 22 nt, Human
cuucauuuggcaggcuggccuc

SEQ ID NO: 856476 - RNA, 22 nt, Human
ugacuuuggacuagugauuuaa

SEQ ID NO: 856477 - RNA, 22 nt, Human
uccucuucaaaauagcucugaa

SEQ ID NO: 856478 - RNA, 22 nt, Human
aguguauucugcaugggagacu

SEQ ID NO: 856479 - RNA, 22 nt, Human
ugcuuuggcccaacauugaugc

SEQ ID NO: 856480 - RNA, 22 nt, Human
uguguuuuggaaggaacaugca

SEQ ID NO: 856481 - RNA, 22 nt, Human
guucuccaggggcuguucaucu

SEQ ID NO: 856482 - RNA, 20 nt, Human
agugauuuguuaguacauug

SEQ ID NO: 856483 - RNA, 22 nt, Human
acuagaaacuaauggauuauua

SEQ ID NO: 856484 - RNA, 22 nt, Human
uucuuugcccauguuuccuaag

SEQ ID NO: 856485 - RNA, 22 nt, Human
uuauguauggauggcugaaagu

SEQ ID NO: 856486 - RNA, 23 nt, Human
ugucuggauucgacugugguugg

SEQ ID NO: 856487 - RNA, 22 nt, Human
uuaccugagcggauuuguugca

SEQ ID NO: 856488 - RNA, 22 nt, Human
cugcuuuaaaacugauacauga

SEQ ID NO: 856489 - RNA, 22 nt, Human
uagauuaucccugauuugucca

SEQ ID NO: 856490 - RNA, 22 nt, Human
uagugucucuuccuguuugaaa

SEQ ID NO: 856491 - RNA, 22 nt, Human
ugcuugcugaaaggcauuuaga

SEQ ID NO: 856492 - RNA, 22 nt, Human
cugcauaucaaauuacuccugg

SEQ ID NO: 856493 - RNA, 22 nt, Human
uaucauuuuacugugacauuuu

SEQ ID NO: 856494 - RNA, 22 nt, Human
cugguuuuuagugcuuaggagu

SEQ ID NO: 856495 - RNA, 19 nt, Human
ucuuucauuucuagcucug

SEQ ID NO: 856496 - RNA, 18 nt, Human
gguguguaacguguuuuc

SEQ ID NO: 856497 - RNA, 22 nt, Human
aucugccuggcuccaggugagc

SEQ ID NO: 856498 - RNA, 22 nt, Human
ucuuugcauggacauguguuuu

SEQ ID NO: 856499 - RNA, 22 nt, Human
ucuuuuaucuguuguguaacaa

SEQ ID NO: 856500 - RNA, 22 nt, Human
aucuuuggguacaaacuugccu

SEQ ID NO: 856501 - RNA, 22 nt, Human
aauuauugagcaucuacugugu

SEQ ID NO: 856502 - RNA, 22 nt, Human
caucuuuguuuuggauauaauc

SEQ ID NO: 856503 - RNA, 22 nt, Human
cuuuauguuggggugucuuagu

SEQ ID NO: 856504 - RNA, 22 nt, Human
uucuuuuaauagagauccugug

SEQ ID NO: 856505 - RNA, 22 nt, Human
uuuguugguugcacuggugggu

SEQ ID NO: 856506 - RNA, 22 nt, Human
gugguuguuuccagguuugaaa

SEQ ID NO: 856507 - RNA, 22 nt, Human
auguuuguguuucccauucagg

SEQ ID NO: 856508 - RNA, 22 nt, Human
auugacuuucccuucuccucau

SEQ ID NO: 856509 - RNA, 22 nt, Human
gucauuuuugacuuugaaguga

SEQ ID NO: 856510 - RNA, 22 nt, Human
uuugacaugugcuuauaacuuu

SEQ ID NO: 856511 - RNA, 22 nt, Human
ccucuucuaggacguccuugug

SEQ ID NO: 856512 - RNA, 22 nt, Human
aacuugccaagagcuuugcuag

SEQ ID NO: 856513 - RNA, 22 nt, Human
uuauuuaaaauguagguuggga

SEQ ID NO: 856514 - RNA, 22 nt, Human
agugauaggacauauggauuuu

SEQ ID NO: 856515 - RNA, 22 nt, Human
agcuggugugccaguuccaguu

SEQ ID NO: 856516 - RNA, 22 nt, Human
uauuuggugaaucuauggucag

SEQ ID NO: 856517 - RNA, 22 nt, Human
ccaucuucucuugaaccuccuu

SEQ ID NO: 856518 - RNA, 22 nt, Human
uuuucuuggaguggcuguccuu

SEQ ID NO: 856519 - RNA, 22 nt, Human
cuuucuuucgaagacgugauua

SEQ ID NO: 856520 - RNA, 22 nt, Human
ugaauaugugacuuugauuuca

SEQ ID NO: 856521 - RNA, 22 nt, Human
uauagugucucuagaucaaaga

SEQ ID NO: 856522 - RNA, 22 nt, Human
gucuccugaggcauccauugaa

SEQ ID NO: 856523 - RNA, 22 nt, Human
ucugaauucuuagaauuaaagg

SEQ ID NO: 856524 - RNA, 22 nt, Human
uguuaguauuggcaaauuuguu

SEQ ID NO: 856525 - RNA, 22 nt, Human
auuguugacuugauuacucaac

SEQ ID NO: 856526 - RNA, 22 nt, Human
uugagcuugaggaguuauuuga

SEQ ID NO: 856527 - RNA, 22 nt, Human
gagugugucggucagcguggcg

SEQ ID NO: 856528 - RNA, 22 nt, Human
uucuuuuaauuucugucugcag

SEQ ID NO: 856529 - RNA, 22 nt, Human
ucuucaugucaugguauauuga

SEQ ID NO: 856530 - RNA, 22 nt, Human
agcauucuguggucuucuaugg

SEQ ID NO: 856531 - RNA, 22 nt, Human
ggauguuuauccuaucuuaguu

SEQ ID NO: 856532 - RNA, 22 nt, Human
auuacugaggcaaaguaguuuu

SEQ ID NO: 856533 - RNA, 23 nt, Human
aaugaguugggcagcauacaggc

SEQ ID NO: 856534 - RNA, 22 nt, Human
aauggcuguucucugugauugg

SEQ ID NO: 856535 - RNA, 22 nt, Human
agugaauuagccuauuuguaaa

SEQ ID NO: 856536 - RNA, 22 nt, Human
augcauaucuccuaucuccuca

SEQ ID NO: 856537 - RNA, 22 nt, Human
uguauuucugcuuucucuagua

SEQ ID NO: 856538 - RNA, 22 nt, Human
auacaacagaaaaugauuauuc

SEQ ID NO: 856539 - RNA, 18 nt, Human
cgauguguaugugauuug

SEQ ID NO: 856540 - RNA, 22 nt, Human
uugaauaguuuuggauagcaua

SEQ ID NO: 856541 - RNA, 22 nt, Human
augguuuuguccucuuugguuc

SEQ ID NO: 856542 - RNA, 22 nt, Human
ugcucccaggcauucucuguug

SEQ ID NO: 856543 - RNA, 22 nt, Human
cacaucauguuaauucauuaca

SEQ ID NO: 856544 - RNA, 22 nt, Human
ugcugcuuguuuuguaaauaaa

SEQ ID NO: 856545 - RNA, 22 nt, Human
cuacagcuguguguuuaugugc

SEQ ID NO: 856546 - RNA, 22 nt, Human
uuauuuaaaagugguaagauuc

SEQ ID NO: 856547 - RNA, 22 nt, Human
uaguguguggucucucccuugu

SEQ ID NO: 856548 - RNA, 22 nt, Human
gaauaauugugaugcuugaagu

SEQ ID NO: 856549 - RNA, 22 nt, Human
acauauuuugaaagcuuucuaa

SEQ ID NO: 856550 - RNA, 20 nt, Human
uccaguuuuggagacauucu

SEQ ID NO: 856551 - RNA, 22 nt, Human
uauggcuucugggccaaauuua

SEQ ID NO: 856552 - RNA, 22 nt, Human
agauauguuaggcuuguucccu

SEQ ID NO: 856553 - RNA, 22 nt, Human
gaugaguucuuucuauucuauu

SEQ ID NO: 856554 - RNA, 22 nt, Human
auggugguagaagcacuaugug

SEQ ID NO: 856555 - RNA, 22 nt, Human
augauugaaaaugacauugcca

SEQ ID NO: 856556 - RNA, 22 nt, Human
uuuguguuguacuucugugcau

SEQ ID NO: 856557 - RNA, 22 nt, Human
uuuugguaauuaaguagauauu

SEQ ID NO: 856558 - RNA, 22 nt, Human
ccugguguuaucauaggucaug

SEQ ID NO: 856559 - RNA, 22 nt, Human
auaguguguaaagugcagugau

SEQ ID NO: 856560 - RNA, 23 nt, Human
uuguucuuggaucuuccugaagc

SEQ ID NO: 856561 - RNA, 22 nt, Human
auacuucuuuagcauauugaac

SEQ ID NO: 856562 - RNA, 22 nt, Human
uagcauuucacugaucuucacu

SEQ ID NO: 856563 - RNA, 22 nt, Human
cauugcuuugugcauauuuaaa

SEQ ID NO: 856564 - RNA, 22 nt, Human
gguuuguggagcuggaaacacu

SEQ ID NO: 856565 - RNA, 17 nt, Human
uaaguccuaguuauuuu

SEQ ID NO: 856566 - RNA, 20 nt, Human
agcauuuagccuuuauccac

SEQ ID NO: 856567 - RNA, 22 nt, Human
auauggcuguugcacaucuaag

SEQ ID NO: 856568 - RNA, 22 nt, Human
ugcauguuucuguauguuaaug

SEQ ID NO: 856569 - RNA, 22 nt, Human
uauuacaguucgaguuucuagg

SEQ ID NO: 856570 - RNA, 22 nt, Human
uauaugcagauuuucaucaucg

SEQ ID NO: 856571 - RNA, 22 nt, Human
aucauuugaacagaauuuguuu

SEQ ID NO: 856572 - RNA, 22 nt, Human
uagcauuuagaacaccuugaga

SEQ ID NO: 856573 - RNA, 22 nt, Human
uucuccacccacucuuuuguug

SEQ ID NO: 856574 - RNA, 22 nt, Human
uuucacauacaguguauaguag

SEQ ID NO: 856575 - RNA, 22 nt, Human
cauccauagauugagagauggu

SEQ ID NO: 856576 - RNA, 22 nt, Human
cuuugcuaauguugcauuuuca

SEQ ID NO: 856577 - RNA, 22 nt, Human
uucaguaugcugaaugauuuuu

SEQ ID NO: 856578 - RNA, 22 nt, Human respiratory syncytial virus
augacacuauagcuccaagaga

SEQ ID NO: 856579 - RNA, 22 nt, Human respiratory syncytial virus
cucaucuuauagauguuuuugu

SEQ ID NO: 856580 - RNA, 22 nt, Human respiratory syncytial virus
auuuuuguuggaugcagugcau

SEQ ID NO: 856581 - RNA, 22 nt, Human respiratory syncytial virus
cuugguaaugucaaacuguuca

SEQ ID NO: 856582 - RNA, 22 nt, Human respiratory syncytial virus
ucacugagcaugauaaagguua

SEQ ID NO: 856583 - RNA, 22 nt, Human respiratory syncytial virus
uucuuaggaucuuuggaugaug

SEQ ID NO: 856584 - RNA, 22 nt, Human respiratory syncytial virus
acugaucaaaaaucaucaagug

SEQ ID NO: 856585 - RNA, 22 nt, Human respiratory syncytial virus
acugaucaaaaaucaucaagug

SEQ ID NO: 856586 - RNA, 22 nt, Human respiratory syncytial virus
cucaucuuauagauguuuuugu

SEQ ID NO: 856587 - RNA, 22 nt, Human respiratory syncytial virus
cuugguaaugucaaacuguuca

SEQ ID NO: 856588 - RNA, 22 nt, Human respiratory syncytial virus
auuuuuguuggaugcagugcau

SEQ ID NO: 856589 - RNA, 22 nt, Human respiratory syncytial virus
uggacuguacuuuacaaguguc

SEQ ID NO: 856590 - RNA, 22 nt, Human respiratory syncytial virus
aauuguuugaauacauuaaaua

SEQ ID NO: 856591 - RNA, 22 nt, Human respiratory syncytial virus
uucuuaggaucuuuggaugaug

SEQ ID NO: 856592 - RNA, 22 nt, Human respiratory syncytial virus
cccuuuauugauucuaggaauu

SEQ ID NO: 856593 - RNA, 22 nt, Human respiratory syncytial virus
augacacuauagcuccaagaga

SEQ ID NO: 856594 - RNA, 22 nt, Human
aacaugucuggguauucacaag

SEQ ID NO: 856595 - RNA, 21 nt, Human
caaagccaggcaacucucucc

SEQ ID NO: 856596 - RNA, 22 nt, Human
gcaacuuucaagcaccaugggg

SEQ ID NO: 856597 - RNA, 22 nt, Human
aaugcuuuuugcgaaaugugca

SEQ ID NO: 856598 - RNA, 22 nt, Human
uuugacaucaauacccuagaau

SEQ ID NO: 856599 - RNA, 22 nt, Human
ugaaagguuauuuaggucugcu

SEQ ID NO: 856600 - RNA, 22 nt, Human
cuucuucaucuguaaaacuugg

SEQ ID NO: 856601 - RNA, 22 nt, Human
agaccaagugcaggugccacua

SEQ ID NO: 856602 - RNA, 22 nt, Human
agucucugccagcuuguccucu

SEQ ID NO: 856603 - RNA, 22 nt, Human
uuaacacuugaacucuacaugu

SEQ ID NO: 856604 - RNA, 22 nt, Human
uuuccaagacuccaguucuccc

SEQ ID NO: 856605 - RNA, 22 nt, Human
uuuaauauucugcauucuccuu

SEQ ID NO: 856606 - RNA, 18 nt, Human
aguaaagcuuauuacaug

SEQ ID NO: 856607 - RNA, 22 nt, Human
aucaggauucaccccagagcug

SEQ ID NO: 856608 - RNA, 22 nt, Human
uucuucagucccacuagccaca

SEQ ID NO: 856609 - RNA, 22 nt, Human
cuucuucagcacaauauugaug

SEQ ID NO: 856610 - RNA, 22 nt, Human
cuuaaauucuuaaugcccucau

SEQ ID NO: 856611 - RNA, 22 nt, Human
cccaggagauaacguucccaag

SEQ ID NO: 856612 - RNA, 22 nt, Human
ccagucacucugugagagcuac

SEQ ID NO: 856613 - RNA, 22 nt, Human
ugaggcagggagaguggauaug

SEQ ID NO: 856614 - RNA, 22 nt, Human
ugcuuaauacguauuugcugga

SEQ ID NO: 856615 - RNA, 22 nt, Human
gcagaggacagggauuuagauu

SEQ ID NO: 856616 - RNA, 22 nt, Human
uccaaaguguugggauuauagg

SEQ ID NO: 856617 - RNA, 22 nt, Human
gcuuuggagccuguguucugcc

SEQ ID NO: 856618 - RNA, 20 nt, Human
uguaacaaucuggauguugc

SEQ ID NO: 856619 - RNA, 21 nt, Human
agucuguuaggaugacucuga

SEQ ID NO: 856620 - RNA, 22 nt, Human
ccauggcuuuugagucucaaga

SEQ ID NO: 856621 - RNA, 22 nt, Human
agaaggggagaagcuaccagga

SEQ ID NO: 856622 - RNA, 20 nt, Human
aggacagcagcugccacuug

SEQ ID NO: 856623 - RNA, 22 nt, Human
ucaggagaaagccaauuagagu

SEQ ID NO: 856624 - RNA, 22 nt, Human
ucucuguaguugggcagcugcu

SEQ ID NO: 856625 - RNA, 21 nt, Human
ucuugaaaauuguagcaguuu

SEQ ID NO: 856626 - RNA, 22 nt, Human
aauuccaggaugcaggaggugc

SEQ ID NO: 856627 - RNA, 22 nt, Human
ucagccaguugccccaguuagu

SEQ ID NO: 856628 - RNA, 22 nt, Human
uucaggauaugugauaucugaa

SEQ ID NO: 856629 - RNA, 22 nt, Human
cagaccagaaggaagccgacaa

SEQ ID NO: 856630 - RNA, 22 nt, Human
ggcaucuccaaaacaugaacuc

SEQ ID NO: 856631 - RNA, 22 nt, Human
ucaggagaaaauaucaggaagu

SEQ ID NO: 856632 - RNA, 22 nt, Human
ugcuggcuacauuauugcuguc

SEQ ID NO: 856633 - RNA, 22 nt, Human
cagcugacagugaggugggggc

SEQ ID NO: 856634 - RNA, 22 nt, Human
caggcagcucugcuuuuccuaa

SEQ ID NO: 856635 - RNA, 22 nt, Human
acuagaaauuacucagaauaaa

SEQ ID NO: 856636 - RNA, 22 nt, Human
uuuaggcagcuacauacuaacu

SEQ ID NO: 856637 - RNA, 22 nt, Human
cauucuuacacaauauuuuaau

SEQ ID NO: 856638 - RNA, 22 nt, Human
uaucagaaaucaacacacagug

SEQ ID NO: 856639 - RNA, 22 nt, Human
aaauacugggcucaaaaggguu

SEQ ID NO: 856640 - RNA, 22 nt, Human
uuugaaagacagaauauuuuug

SEQ ID NO: 856641 - RNA, 21 nt, Human
cccaggaguccuauuuaaaug

SEQ ID NO: 856642 - RNA, 22 nt, Human
uaauuauucuagucacauagca

SEQ ID NO: 856643 - RNA, 22 nt, Human
uauacagauggaaagauacaca

SEQ ID NO: 856644 - RNA, 22 nt, Human
uaauaaacugcuacgcuuaguu

SEQ ID NO: 856645 - RNA, 22 nt, Human
uaaguucauaagcuuauucuua

SEQ ID NO: 856646 - RNA, 18 nt, Human
gugcugugggcaguggcc

SEQ ID NO: 856647 - RNA, 22 nt, Human
gcaucuaauccaguccagcauc

SEQ ID NO: 856648 - RNA, 22 nt, Human
cccaggaggaggaaaaagcucg

SEQ ID NO: 856649 - RNA, 22 nt, Human
aaucuuucccuauuaaaugugg

SEQ ID NO: 856650 - RNA, 22 nt, Human
cacucuccagcacaccccauuu

SEQ ID NO: 856651 - RNA, 22 nt, Human
caaggccauauugccuguaugu

SEQ ID NO: 856652 - RNA, 22 nt, Human
cagauuucuauuucaaauacau

SEQ ID NO: 856653 - RNA, 22 nt, Human
cagcuggccccacaguagaggc

SEQ ID NO: 856654 - RNA, 22 nt, Human
gaucuucuauguaaugaagugu

SEQ ID NO: 856655 - RNA, 22 nt, Human
uggcagcuaucuuuaaugagau

SEQ ID NO: 856656 - RNA, 22 nt, Human
ucagaauuuugguuugguuggu

SEQ ID NO: 856657 - RNA, 22 nt, Human
aaagauaauguuuccuuauucu

SEQ ID NO: 856658 - RNA, 22 nt, Human
caucagaauagcucuguggaua

SEQ ID NO: 856659 - RNA, 22 nt, Human
ccaggagacuguacugauauuu

SEQ ID NO: 856660 - RNA, 22 nt, Human
auuuaguguauucuaauaugug

SEQ ID NO: 856661 - RNA, 22 nt, Human
caguaaauuugagggaucuaau

SEQ ID NO: 856662 - RNA, 22 nt, Human
gagacagcacaggccacuggga

SEQ ID NO: 856663 - RNA, 23 nt, Human
aguacaauaaguauaauucuuuc

SEQ ID NO: 856664 - RNA, 22 nt, Human
ugugaauacagcaugugcuucu

SEQ ID NO: 856665 - RNA, 22 nt, Human
uugauacauuuuuaggauaaac

SEQ ID NO: 856666 - RNA, 22 nt, Human
aucugccugcaguggagguggg

SEQ ID NO: 856667 - RNA, 22 nt, Human
uaaggccaggcuguggucggca

SEQ ID NO: 856668 - RNA, 23 nt, Human
uggaauaauaagguacauuaaca

SEQ ID NO: 856669 - RNA, 22 nt, Human
uuugaaagcuacuuucggguca

SEQ ID NO: 856670 - RNA, 22 nt, Human
uuugaaagggacaaagucacug

SEQ ID NO: 856671 - RNA, 22 nt, Human
uucauugucucuguuugccuuc

SEQ ID NO: 856672 - RNA, 19 nt, Human
ucugccucuggucaggcuc

SEQ ID NO: 856673 - RNA, 19 nt, Human
aaagcagaggagcaucuga

SEQ ID NO: 856674 - RNA, 22 nt, Human
ggcagccuugagggaggccugg

SEQ ID NO: 856675 - RNA, 22 nt, Human
uuugaaauaugaggcauuauga

SEQ ID NO: 856676 - RNA, 22 nt, Human
ggaagaggcugagccagguccc

SEQ ID NO: 856677 - RNA, 22 nt, Human
cucaggauccaucuccugcccu

SEQ ID NO: 856678 - RNA, 22 nt, Human
ucucuguacaguacaugccgug

SEQ ID NO: 856679 - RNA, 22 nt, Human
uucauuaguucugaagaugucu

SEQ ID NO: 856680 - RNA, 22 nt, Human
aaucagaaauugagggucuggu

SEQ ID NO: 856681 - RNA, 22 nt, Human
auucuucauuguugauucaugu

SEQ ID NO: 856682 - RNA, 22 nt, Human
gcuagaucucucauaaauucca

SEQ ID NO: 856683 - RNA, 22 nt, Human
ggcaugcucuuuguccacagua

SEQ ID NO: 856684 - RNA, 22 nt, Human
agaggagugggaagcagugcaa

SEQ ID NO: 856685 - RNA, 22 nt, Human
agguacaaaagaguauaugaga

SEQ ID NO: 856686 - RNA, 22 nt, Human
uccaugucuucaugugucuaac

SEQ ID NO: 856687 - RNA, 22 nt, Human
ugaaguaacuguccaggaucca

SEQ ID NO: 856688 - RNA, 22 nt, Human
gaggcagcucuucugaaugggg

SEQ ID NO: 856689 - RNA, 22 nt, Human
agugugagcccuggaguggugc

SEQ ID NO: 856690 - RNA, 22 nt, Human
caucagaagaaagacaaaugau

SEQ ID NO: 856691 - RNA, 17 nt, Human
ccuguguuugcuccuuc

SEQ ID NO: 856692 - RNA, 22 nt, Human
uuuacuuuugguaaggucauuu

SEQ ID NO: 856693 - RNA, 22 nt, Human
accagcugcugauugcuaaaug

SEQ ID NO: 856694 - RNA, 22 nt, Human
uaagaaucggucgcaacagagg

SEQ ID NO: 856695 - RNA, 17 nt, Human
ugcuuaauuuugacugg

SEQ ID NO: 856696 - RNA, 22 nt, Human
gaggcacuggaggaaaggagaa

SEQ ID NO: 856697 - RNA, 22 nt, Human
ucauuuguugaacuuuagugcg

SEQ ID NO: 856698 - RNA, 22 nt, Human
aucuuguuauaagagauaaugg

SEQ ID NO: 856699 - RNA, 22 nt, Human
uucaggauccccaccgcguuua

SEQ ID NO: 856700 - RNA, 22 nt, Human
ccaggcugcagucaaggggcau

SEQ ID NO: 856701 - RNA, 22 nt, Human
aaauuauucucauguguuucuu

SEQ ID NO: 856702 - RNA, 22 nt, Human
caagauuugccaguggccaacu

SEQ ID NO: 856703 - RNA, 22 nt, Human
aagauauucaaagauuuauuag

SEQ ID NO: 856704 - RNA, 21 nt, Human
gaguccuuccaauguccucag

SEQ ID NO: 856705 - RNA, 22 nt, Human
uaacauguuaagaaauuagaua

SEQ ID NO: 856706 - RNA, 22 nt, Human
gauuucaagcccccagagauuc

SEQ ID NO: 856707 - RNA, 19 nt, Human
cccaggaggcggagguugc

SEQ ID NO: 856708 - RNA, 22 nt, Human
uuacuacugcuuuacuacuggg

SEQ ID NO: 856709 - RNA, 22 nt, Human
aaauagcagccuuuaguuaaca

SEQ ID NO: 856710 - RNA, 21 nt, Human
uuugaaagcuacaucuauagc

SEQ ID NO: 856711 - RNA, 22 nt, Human
gugcugugucuaucaggaauaa

SEQ ID NO: 856712 - RNA, 22 nt, Human
ccuugcguuuuacagcuucuag

SEQ ID NO: 856713 - RNA, 22 nt, Human
acagucuugcuguauggucagg

SEQ ID NO: 856714 - RNA, 22 nt, Human
uagaaacaucagcuaaccaaaa

SEQ ID NO: 856715 - RNA, 22 nt, Human
caggcagccugcggucugcaca

SEQ ID NO: 856716 - RNA, 15 nt, Human
cuccaugauuuugca

SEQ ID NO: 856717 - RNA, 22 nt, Human
uugaauaaaugagcagugaauu

SEQ ID NO: 856718 - RNA, 22 nt, Human
uucuucaguuugguaaauguaa

SEQ ID NO: 856719 - RNA, 22 nt, Human
uggcagcucccagagcuuccaa

SEQ ID NO: 856720 - RNA, 22 nt, Human
ucugggaaguccucugucaugc

SEQ ID NO: 856721 - RNA, 22 nt, Human
gcaggagaaaugaagauugggu

SEQ ID NO: 856722 - RNA, 21 nt, Human
cuguggaagggaacuagaggg

SEQ ID NO: 856723 - RNA, 22 nt, Human
agcugcccuuuaugaugcugaa

SEQ ID NO: 856724 - RNA, 22 nt, Human
caaggccauaagagauacaaaa

SEQ ID NO: 856725 - RNA, 22 nt, Human
ucuucagauaaagggagaguau

SEQ ID NO: 856726 - RNA, 22 nt, Human
aagccgaggccacacagcagga

SEQ ID NO: 856727 - RNA, 22 nt, Human
uaguaucuauuaguaacaagag

SEQ ID NO: 856728 - RNA, 22 nt, Human
uaaagcacauaucuuacaauaa

SEQ ID NO: 856729 - RNA, 22 nt, Human
uacaugaaccuuuaugugugau

SEQ ID NO: 856730 - RNA, 22 nt, Human
ucccaggauuuuaggcucucag

SEQ ID NO: 856731 - RNA, 22 nt, Human
caagaugugccuaaucagaccu

SEQ ID NO: 856732 - RNA, 22 nt, Human
uagauuuaagacccugaauuug

SEQ ID NO: 856733 - RNA, 22 nt, Human
uaaagccacuucauucuagucu

SEQ ID NO: 856734 - RNA, 20 nt, Human
gggcaguucaaugccacucu

SEQ ID NO: 856735 - RNA, 17 nt, Human
uucaaagcuuaucaagg

SEQ ID NO: 856736 - RNA, 22 nt, Human
gaggcaguuccugagugacaag

SEQ ID NO: 856737 - RNA, 22 nt, Human
gaugccuccaaaugagggcaga

SEQ ID NO: 856738 - RNA, 22 nt, Human
auuaaauuaaguggcuaauuua

SEQ ID NO: 856739 - RNA, 22 nt, Human
ccccaggagauuugggagcaca

SEQ ID NO: 856740 - RNA, 22 nt, Human
aagucacaagcauauaugcauu

SEQ ID NO: 856741 - RNA, 22 nt, Human
caguucacacugugcuaucugc

SEQ ID NO: 856742 - RNA, 22 nt, Human
aaucagaaauucuacaucacaa

SEQ ID NO: 856743 - RNA, 21 nt, Human
uccuuccuugagguccuuucc

SEQ ID NO: 856744 - RNA, 22 nt, Human
cucaggauuuaaaggggcacuc

SEQ ID NO: 856745 - RNA, 22 nt, Human
guucuaauaggagaaaagacag

SEQ ID NO: 856746 - RNA, 22 nt, Human
aaugggauaauuguucauggga

SEQ ID NO: 856747 - RNA, 20 nt, Human
aguacaauguaugauucaga

SEQ ID NO: 856748 - RNA, 20 nt, Human
ccucaguguccuggacuggg

SEQ ID NO: 856749 - RNA, 22 nt, Human
gaaauauuacaguggaggggau

SEQ ID NO: 856750 - RNA, 22 nt, Human
uguuccaagcugcuggauaagc

SEQ ID NO: 856751 - RNA, 22 nt, Human
gagauuuagagagacuuaaaca

SEQ ID NO: 856752 - RNA, 22 nt, Human
ccaggagacccagggaaggagc

SEQ ID NO: 856753 - RNA, 22 nt, Human
uugaagaaagucauauauaaug

SEQ ID NO: 856754 - RNA, 22 nt, Human
ucaggagggugacaggcccugg

SEQ ID NO: 856755 - RNA, 22 nt, Human
ugaacucucucaagugacagaa

SEQ ID NO: 856756 - RNA, 22 nt, Human
auuucagguaccugugggaucc

SEQ ID NO: 856757 - RNA, 23 nt, Human
gagugcagaauagacaugcagug

SEQ ID NO: 856758 - RNA, 22 nt, Human
uguccuuacaaggucccuuucg

SEQ ID NO: 856759 - RNA, 22 nt, Human
caauuucaaugaggccacaggg

SEQ ID NO: 856760 - RNA, 22 nt, Human
gagauuuagcugcuuaacuccu

SEQ ID NO: 856761 - RNA, 22 nt, Human
ggcagcucugcuccacaugagu

SEQ ID NO: 856762 - RNA, 19 nt, Human
aggguggcaaaggagggug

SEQ ID NO: 856763 - RNA, 22 nt, Human
cacacuuugugcuaaucuauuu

SEQ ID NO: 856764 - RNA, 22 nt, Human
uuucaucuaacacuacauaggg

SEQ ID NO: 856765 - RNA, 22 nt, Human
cugcgcagggguggcgccagaa

SEQ ID NO: 856766 - RNA, 22 nt, Human
augcacaagcaagagauaaugg

SEQ ID NO: 856767 - RNA, 17 nt, Human
caaggccagcaucuuca

SEQ ID NO: 856768 - RNA, 22 nt, Human
gagguagcgaguggacagugca

SEQ ID NO: 856769 - RNA, 22 nt, Human
agcccaggcagagggaugcuug

SEQ ID NO: 856770 - RNA, 22 nt, Human
uaguccuugguaaaauucuaug

SEQ ID NO: 856771 - RNA, 22 nt, Human
uucucagauauuuacugagcau

SEQ ID NO: 856772 - RNA, 23 nt, Human
uaauacugcuucagaggcuuaga

SEQ ID NO: 856773 - RNA, 22 nt, Human
uugggcucaggaguuugagacc

SEQ ID NO: 856774 - RNA, 22 nt, Human
cccaggagagagacuugaaucu

SEQ ID NO: 856775 - RNA, 22 nt, Human
ucuaaccuuugaaacugcuuuc

SEQ ID NO: 856776 - RNA, 22 nt, Human
ucuuuguaaaugccuagcauaa

SEQ ID NO: 856777 - RNA, 22 nt, Human
cuucucagucaccugugagucu

SEQ ID NO: 856778 - RNA, 22 nt, Human
aggcagcuuucuguaggggugu

SEQ ID NO: 856779 - RNA, 22 nt, Human
uuuguaugugauaagacuauuc

SEQ ID NO: 856780 - RNA, 22 nt, Human
cuggcuuucccuggacaacagc

SEQ ID NO: 856781 - RNA, 22 nt, Human
cccaggagguagagguugcagu

SEQ ID NO: 856782 - RNA, 22 nt, Human
ugaggggaacugaugcccauug

SEQ ID NO: 856783 - RNA, 22 nt, Human
cagaauguagaucaucaucaag

SEQ ID NO: 856784 - RNA, 22 nt, Human
cagagccaggucuaggagucuc

SEQ ID NO: 856785 - RNA, 22 nt, Human
aguggacucuucccagugcuug

SEQ ID NO: 856786 - RNA, 19 nt, Human
uucauucuuucuacuuacc

SEQ ID NO: 856787 - RNA, 22 nt, Human
gaauuucaggacaacuggaagg

SEQ ID NO: 856788 - RNA, 22 nt, Human
uuccauaauaaccugagagaaa

SEQ ID NO: 856789 - RNA, 22 nt, Human
guuugcauuuauuagucuucug

SEQ ID NO: 856790 - RNA, 22 nt, Human
cugccaucugagccaaaagugc

SEQ ID NO: 856791 - RNA, 22 nt, Human
gaauuucaagcagugcaauguu

SEQ ID NO: 856792 - RNA, 22 nt, Human
guugaaagagcauggacuugaa

SEQ ID NO: 856793 - RNA, 21 nt, Human
agagagggagaugaaacaucc

SEQ ID NO: 856794 - RNA, 23 nt, Human
acuuuauugaccccaggucaguu

SEQ ID NO: 856795 - RNA, 22 nt, Human
gcuuuaaugaagucacgcaaag

SEQ ID NO: 856796 - RNA, 22 nt, Human
gcuuuuauugucuuuacgacga

SEQ ID NO: 856797 - RNA, 22 nt, Human
uagcucuucaaucacugucucc

SEQ ID NO: 856798 - RNA, 22 nt, Human
uuucaaacauaucuucauuacu

SEQ ID NO: 856799 - RNA, 22 nt, Human
augguuuauugcuuuaaugaaa

SEQ ID NO: 856800 - RNA, 22 nt, Human
gauagaaagagugguucuuuuu

SEQ ID NO: 856801 - RNA, 22 nt, Human
ggaaaugacuuggugcuucguu

SEQ ID NO: 856802 - RNA, 22 nt, Human
cauuuucaugaguuucuguuca

SEQ ID NO: 856803 - RNA, 22 nt, Human
uacaugaaguugucuaaacugg

SEQ ID NO: 856804 - RNA, 22 nt, Human
ggaggggagguccagcugaucu

SEQ ID NO: 856805 - RNA, 22 nt, Human
uggcauuugcucccuuguguuc

SEQ ID NO: 856806 - RNA, 22 nt, Human
uccaggagaccagauguaggcc

SEQ ID NO: 856807 - RNA, 22 nt, Human
ucgagcucuggagccaaggaug

SEQ ID NO: 856808 - RNA, 22 nt, Human
ccugcugugaagccaggccugu

SEQ ID NO: 856809 - RNA, 17 nt, Human
uuucuccuuccaucuca

SEQ ID NO: 856810 - RNA, 22 nt, Human
gcuccucugucaaaugagagug

SEQ ID NO: 856811 - RNA, 22 nt, Human
aaauguuuugcucccauguggu

SEQ ID NO: 856812 - RNA, 22 nt, Human
caguucuuaauaccaugugguu

SEQ ID NO: 856813 - RNA, 23 nt, Human
ggagaggggugugggcaucuuua

SEQ ID NO: 856814 - RNA, 22 nt, Human
cagcagaggcacgucugugaau

SEQ ID NO: 856815 - RNA, 22 nt, Human
ccacuguuuuucaguuaacuuu

SEQ ID NO: 856816 - RNA, 22 nt, Human
aguuugaauugaaaugcagaug

SEQ ID NO: 856817 - RNA, 22 nt, Human
cuguggaaaauuuguauguaau

SEQ ID NO: 856818 - RNA, 22 nt, Human
gaccaaggaagaggggagccag

SEQ ID NO: 856819 - RNA, 22 nt, Human
uuucuagggcucuugucuucug

SEQ ID NO: 856820 - RNA, 22 nt, Human
uucugggacaucuggacaguuu

SEQ ID NO: 856821 - RNA, 22 nt, Human
ugaaaagacugcaagagagcau

SEQ ID NO: 856822 - RNA, 22 nt, Human
augcuguggaugccuugcccca

SEQ ID NO: 856823 - RNA, 22 nt, Human
aauacugagaucccacaaagca

SEQ ID NO: 856824 - RNA, 22 nt, Human
aggcagcuggacauaacuaacc

SEQ ID NO: 856825 - RNA, 20 nt, Human
uacagaaugcaauaaaaugg

SEQ ID NO: 856826 - RNA, 22 nt, Human
aggcagcuggcagcacccaggg

SEQ ID NO: 856827 - RNA, 22 nt, Human
cggcagcugauugcagagcacc

SEQ ID NO: 856828 - RNA, 22 nt, Human
ucuucaaguuccaaagugcagg

SEQ ID NO: 856829 - RNA, 22 nt, Human
cauucuuauauuuacucauuca

SEQ ID NO: 856830 - RNA, 22 nt, Human
cuuugcaauagaggcacacaug

SEQ ID NO: 856831 - RNA, 22 nt, Human
cugaacuuauugagugcuugcu

SEQ ID NO: 856832 - RNA, 22 nt, Human
acccaggauagagugcugcagu

SEQ ID NO: 856833 - RNA, 22 nt, Human
gaguccuuuugugccacaggga

SEQ ID NO: 856834 - RNA, 22 nt, Human
uguaacaaaauaccuuggauug

SEQ ID NO: 856835 - RNA, 22 nt, Human
aaggcaguacuuuauguccaua

SEQ ID NO: 856836 - RNA, 22 nt, Human
ucauuuguugcuguuaccugag

SEQ ID NO: 856837 - RNA, 22 nt, Human
aagauauagauaaaacuaugca

SEQ ID NO: 856838 - RNA, 22 nt, Human
gagggagggacuagcauucucu

SEQ ID NO: 856839 - RNA, 22 nt, Human
agggggugcccagaugaaggau

SEQ ID NO: 856840 - RNA, 22 nt, Human
aauauuucugcagaaugguuuu

SEQ ID NO: 856841 - RNA, 22 nt, Human
cauaauauacuacauugaugaa

SEQ ID NO: 856842 - RNA, 22 nt, Human
gauuucaaagguucugcaugcc

SEQ ID NO: 856843 - RNA, 20 nt, Human
ucuuauacagaaaacauuuu

SEQ ID NO: 856844 - RNA, 22 nt, Human
gcagaggagaugaagauacuuu

SEQ ID NO: 856845 - RNA, 22 nt, Human
auguggaggaaaugaguguaca

SEQ ID NO: 856846 - RNA, 22 nt, Human
uaauuucacaguucaacgcaca

SEQ ID NO: 856847 - RNA, 22 nt, Human
ccagcagaggggcggagugcag

SEQ ID NO: 856848 - RNA, 22 nt, Human
aggccagacagcuagaaacagg

SEQ ID NO: 856849 - RNA, 22 nt, Human
uucucagauccaucagaagucc

SEQ ID NO: 856850 - RNA, 22 nt, Human
ccacagagacaggguccuugcu

SEQ ID NO: 856851 - RNA, 22 nt, Human
gagcagcucugggugacccagu

SEQ ID NO: 856852 - RNA, 22 nt, Human
auggauuuggaugagauuacuu

SEQ ID NO: 856853 - RNA, 22 nt, Human
aagcaccucuaugauugcuuuu

SEQ ID NO: 856854 - RNA, 22 nt, Human
caggcagccuucucgucucaca

SEQ ID NO: 856855 - RNA, 22 nt, Human
ccucaggauacaggagccacag

SEQ ID NO: 856856 - RNA, 22 nt, Human
auuccaaagcacaucagaacua

SEQ ID NO: 856857 - RNA, 22 nt, Human
ucaagugcuugugagguauuug

SEQ ID NO: 856858 - RNA, 22 nt, Human
uuucaguuuaugucuugaauua

SEQ ID NO: 856859 - RNA, 22 nt, Human
uccaggaggugaggggaccaaa

SEQ ID NO: 856860 - RNA, 22 nt, Human
uugaauaguuuuggauagcaua

SEQ ID NO: 856861 - RNA, 22 nt, Human
uccauguguuuuccuguccaca

SEQ ID NO: 856862 - RNA, 23 nt, Human
aaauuauugcucuucaauugccu

SEQ ID NO: 856863 - RNA, 18 nt, Human
gaaagccaugcagcagug

SEQ ID NO: 856864 - RNA, 22 nt, Human
uuuaaugaauaauucaaaucug

SEQ ID NO: 856865 - RNA, 22 nt, Human
cugaauaauuuuauaguugcug

SEQ ID NO: 856866 - RNA, 22 nt, Human
uacagcuaggcaaaaaugacau

SEQ ID NO: 856867 - RNA, 22 nt, Human
auacaaauuuauagaugcauuu

SEQ ID NO: 856868 - RNA, 22 nt, Human
ucauuuaauaauuuuugaguag

SEQ ID NO: 856869 - RNA, 22 nt, Human
ucaggaugagcucauaacuaug

SEQ ID NO: 856870 - RNA, 22 nt, Human
uagugcuuuaggccugaguguc

SEQ ID NO: 856871 - RNA, 22 nt, Human
uuuccaaaggcuaaacucaguu

SEQ ID NO: 856872 - RNA, 22 nt, Human
aggagggagcuuaagccaggca

SEQ ID NO: 856873 - RNA, 22 nt, Human
cacaaauggccguguucaaaga

SEQ ID NO: 856874 - RNA, 22 nt, Human
acucaggaaaaauguagugaua

SEQ ID NO: 856875 - RNA, 22 nt, Human
ugaaaugauaucugauaacaaa

SEQ ID NO: 856876 - RNA, 22 nt, Human
gcaggagacaacuguaaggaga

SEQ ID NO: 856877 - RNA, 22 nt, Human
uuacagaacugucuugaaauuu

SEQ ID NO: 856878 - RNA, 22 nt, Human
auuguauaacagcauguauuuu

SEQ ID NO: 856879 - RNA, 22 nt, Human
uuuuccaaaguaccaugucccu

SEQ ID NO: 856880 - RNA, 22 nt, Human
uggaguuccuuugaaaggcucu

SEQ ID NO: 856881 - RNA, 22 nt, Human
uuuaagauucaguaaggcaaac

SEQ ID NO: 856882 - RNA, 22 nt, Human
guuccaaagcaaaggaggugag

SEQ ID NO: 856883 - RNA, 22 nt, Human
gucuauauauugcuugaauaau

SEQ ID NO: 856884 - RNA, 22 nt, Human
augcagcugugggcaagaaaug

SEQ ID NO: 856885 - RNA, 22 nt, Human
acaacuuucuggguuaucugau

SEQ ID NO: 856886 - RNA, 20 nt, Human
ccacaggaguccagucgacc

SEQ ID NO: 856887 - RNA, 21 nt, Human
uuuaaagaauaggaagggagg

SEQ ID NO: 856888 - RNA, 22 nt, Human
aaaagccaagguccucuucaga

SEQ ID NO: 856889 - RNA, 22 nt, Human
ugugaacuggcagguggacggg

SEQ ID NO: 856890 - RNA, 22 nt, Human
ugcugcuguuuccuacaucuca

SEQ ID NO: 856891 - RNA, 22 nt, Human
cagauuucagcucauauauuau

SEQ ID NO: 856892 - RNA, 22 nt, Human
gcaaaauuuacacuccuucuuc

SEQ ID NO: 856893 - RNA, 22 nt, Human
cagaauuuaaguggauuauucu

SEQ ID NO: 856894 - RNA, 22 nt, Human
aggcaggcugcuauggaguaga

SEQ ID NO: 856895 - RNA, 22 nt, Human
agaugaaaagauaagcagcaau

SEQ ID NO: 856896 - RNA, 22 nt, Human
gaguccuugucauaauucagug

SEQ ID NO: 856897 - RNA, 22 nt, Human
aagaagagaacuggcauccuaa

SEQ ID NO: 856898 - RNA, 22 nt, Human
agagagggcauagaaaaaggga

SEQ ID NO: 856899 - RNA, 22 nt, Human
agaucauaugaaaaauuucaag

SEQ ID NO: 856900 - RNA, 22 nt, Human
auauccaagaaacaauuaauuc

SEQ ID NO: 856901 - RNA, 22 nt, Human
uaggcagcgcuuggcugugcuu

SEQ ID NO: 856902 - RNA, 22 nt, Human
uaguccuuuaauaguuaaugug

SEQ ID NO: 856903 - RNA, 22 nt, Human
ucucucagaggaagaggcagug

SEQ ID NO: 856904 - RNA, 22 nt, Human
uuagccauuaauguccugugca

SEQ ID NO: 856905 - RNA, 22 nt, Human
gcacaauaauuuuuuuaagagg

SEQ ID NO: 856906 - RNA, 22 nt, Human
uagugcuuaacacaaagugauu

SEQ ID NO: 856907 - RNA, 22 nt, Human
ucagaauuugauuccugggaua

SEQ ID NO: 856908 - RNA, 22 nt, Human
ucagccagugccuugaucuugc

SEQ ID NO: 856909 - RNA, 22 nt, Human
agauggcagggguaccuggaag

SEQ ID NO: 856910 - RNA, 22 nt, Human
cagaaauaaacuucucacaucg

SEQ ID NO: 856911 - RNA, 22 nt, Human
gcagaggccaggccaccagcaa

SEQ ID NO: 856912 - RNA, 22 nt, Human
ucacugcugcugccaugaugga

SEQ ID NO: 856913 - RNA, 22 nt, Human
cuugaaagucacaugcagcccu

SEQ ID NO: 856914 - RNA, 22 nt, Human
uguaaauaaugcauguaaauca

SEQ ID NO: 856915 - RNA, 21 nt, Human
acaggagaccgccuggcaguc

SEQ ID NO: 856916 - RNA, 22 nt, Human
caguccuucuccauuaaggcuc

SEQ ID NO: 856917 - RNA, 22 nt, Human
agaccauagggaccucagguug

SEQ ID NO: 856918 - RNA, 22 nt, Human
cagcagaggugguucacauugu

SEQ ID NO: 856919 - RNA, 22 nt, Human
uuugaaaguguuuacuugggaa

SEQ ID NO: 856920 - RNA, 22 nt, Human
ccagaucuaguguuguaaagcu

SEQ ID NO: 856921 - RNA, 22 nt, Human
aaucagaaaauucaguggaauu

SEQ ID NO: 856922 - RNA, 22 nt, Human
aggcagcaugggcccagagucc

SEQ ID NO: 856923 - RNA, 18 nt, Human
agggagagaccgcggguc

SEQ ID NO: 856924 - RNA, 22 nt, Human
uauccaaacauauagucucucu

SEQ ID NO: 856925 - RNA, 22 nt, Human
gcagagcuccccaagacaccaa

SEQ ID NO: 856926 - RNA, 22 nt, Human
acaugcuuuucccacaauuaua

SEQ ID NO: 856927 - RNA, 22 nt, Human
aaggacagggaugguugauugu

SEQ ID NO: 856928 - RNA, 22 nt, Human
cagcaggaccauugaggcauca

SEQ ID NO: 856929 - RNA, 22 nt, Human
aucugccucuucuucauugcga

SEQ ID NO: 856930 - RNA, 22 nt, Human
caguccuuggcuucauccgagu

SEQ ID NO: 856931 - RNA, 22 nt, Human
uguugaagauaaaguucucauu

SEQ ID NO: 856932 - RNA, 22 nt, Human
uaggcagccagcaucaguuggg

SEQ ID NO: 856933 - RNA, 22 nt, Human
gaaaggugccccauaggcagga

SEQ ID NO: 856934 - RNA, 22 nt, Human
gcuggaucaaguccuucaccca

SEQ ID NO: 856935 - RNA, 22 nt, Human
cagcugacgccagaguggaauu

SEQ ID NO: 856936 - RNA, 22 nt, Human
acaugcuuguuuuucacaaccu

SEQ ID NO: 856937 - RNA, 22 nt, Human
cccaggaaaugggcucuugccu

SEQ ID NO: 856938 - RNA, 22 nt, Human
aaguccuuucucauggaggaau

SEQ ID NO: 856939 - RNA, 22 nt, Human
aaggcaguaggaucuuccacag

SEQ ID NO: 856940 - RNA, 22 nt, Human
aaagcagauucugaugcaguag

SEQ ID NO: 856941 - RNA, 21 nt, Human
ucaguaaaccuaaagauugua

SEQ ID NO: 856942 - RNA, 22 nt, Human
augaauaaaacauuuuaaucag

SEQ ID NO: 856943 - RNA, 22 nt, Human
cucuacucuuaacacagcuagg

SEQ ID NO: 856944 - RNA, 22 nt, Human
ucuuucaaugagcauucuuucc

SEQ ID NO: 856945 - RNA, 22 nt, Human
ugcuuuaagacacuaaguuuga

SEQ ID NO: 856946 - RNA, 22 nt, Human
gaaggccacaagagaaguuaag

SEQ ID NO: 856947 - RNA, 20 nt, Human
aucuucuuggccagcuugcu

SEQ ID NO: 856948 - RNA, 22 nt, Human
ucacccuugauaauguucuucu

SEQ ID NO: 856949 - RNA, 22 nt, Human
ccccaggagaaaucuuaaacua

SEQ ID NO: 856950 - RNA, 22 nt, Human
aggaggggcauagaaauguaau

SEQ ID NO: 856951 - RNA, 22 nt, Human
aaucuucuacuugacaguucuc

SEQ ID NO: 856952 - RNA, 22 nt, Human
augcuuuaaacuauaaauccac

SEQ ID NO: 856953 - RNA, 22 nt, Human
gccaggagaaaaggcgaaugau

SEQ ID NO: 856954 - RNA, 22 nt, Human
ggcagcuuguccuucaggagag

SEQ ID NO: 856955 - RNA, 22 nt, Human
agggagcucaguuggaagcggu

SEQ ID NO: 856956 - RNA, 22 nt, Human
caguuuuugccauuaagaguaa

SEQ ID NO: 856957 - RNA, 20 nt, Human
aguuauaguaucuagccaug

SEQ ID NO: 856958 - RNA, 22 nt, Human
aggauuuauuggugggaaguua

SEQ ID NO: 856959 - RNA, 22 nt, Human
agaggccaggcugcagagggau

SEQ ID NO: 856960 - RNA, 22 nt, Human
aucugccugagucuagguuuuc

SEQ ID NO: 856961 - RNA, 22 nt, Human
uguaaauaguuagcuugccucu

SEQ ID NO: 856962 - RNA, 22 nt, Human
gcagggaagacccggagcagcg

SEQ ID NO: 856963 - RNA, 22 nt, Human
uaggcagaauuguugaaugaag

SEQ ID NO: 856964 - RNA, 22 nt, Human
aggacagcaguuggugagguuc

SEQ ID NO: 856965 - RNA, 22 nt, Human
aucuugcauuugcuaaaaugca

SEQ ID NO: 856966 - RNA, 22 nt, Human
aggcagauuacuugaggccagg

SEQ ID NO: 856967 - RNA, 22 nt, Human
uaggcagcugcaaacuucgguc

SEQ ID NO: 856968 - RNA, 22 nt, Human
uuccuuaguuauuugguccccu

SEQ ID NO: 856969 - RNA, 22 nt, Human
uauucaaaguaccuucauugcc

SEQ ID NO: 856970 - RNA, 22 nt, Human
cucugcauuuuaacagaugauu

SEQ ID NO: 856971 - RNA, 21 nt, Human
cagcagaguaaugcauucgua

SEQ ID NO: 856972 - RNA, 22 nt, Human
guuugcauauuugcacaggaau

SEQ ID NO: 856973 - RNA, 22 nt, Human
ucaguaaaugaaugaauauaug

SEQ ID NO: 856974 - RNA, 22 nt, Human
uuugaaaggaaguuaauacuuu

SEQ ID NO: 856975 - RNA, 22 nt, Human
cuagaaauguagauucuuagug

SEQ ID NO: 856976 - RNA, 22 nt, Human
ugucuuuggaauauuuagcuga

SEQ ID NO: 856977 - RNA, 22 nt, Human
caguucuuauuuggccaguguc

SEQ ID NO: 856978 - RNA, 22 nt, Human
ccaggagagcaaaggucacucu

SEQ ID NO: 856979 - RNA, 22 nt, Human
uuagaaaucaccucugaagauc

SEQ ID NO: 856980 - RNA, 22 nt, Human
cugcugugcuuguggccacccg

SEQ ID NO: 856981 - RNA, 19 nt, Human
auacagauguauccaugau

SEQ ID NO: 856982 - RNA, 22 nt, Human
uuucaacaccagagaccaugcg

SEQ ID NO: 856983 - RNA, 22 nt, Human
cuuguccccagcagguugguuu

SEQ ID NO: 856984 - RNA, 22 nt, Human
aaacaaacaauuaguugugugg

SEQ ID NO: 856985 - RNA, 23 nt, Human
cagaaauaaacugguuuguagau

SEQ ID NO: 856986 - RNA, 22 nt, Human
uggcuuuacaucaaauugagua

SEQ ID NO: 856987 - RNA, 22 nt, Human
uucuccagaccuugugacuaug

SEQ ID NO: 856988 - RNA, 20 nt, Human
aggaggggauagaaucaaag

SEQ ID NO: 856989 - RNA, 22 nt, Human
auacagaacucucaguuguaua

SEQ ID NO: 856990 - RNA, 22 nt, Human
cccaggaagaaauucugauuug

SEQ ID NO: 856991 - RNA, 22 nt, Human
auugcuguacacuucuagaucu

SEQ ID NO: 856992 - RNA, 22 nt, Human
gcuguggucugugagcuccaaa

SEQ ID NO: 856993 - RNA, 21 nt, Human
agaauaaugguaucauuugcu

SEQ ID NO: 856994 - RNA, 22 nt, Human
caaggccaagucucugugaaga

SEQ ID NO: 856995 - RNA, 22 nt, Human
ccagagagaaauggauuugagu

SEQ ID NO: 856996 - RNA, 22 nt, Human
cuguuaauugugaauuuuacau

SEQ ID NO: 856997 - RNA, 22 nt, Human
cagucaccugaagacuugacca

SEQ ID NO: 856998 - RNA, 22 nt, Human
auggauuugcuuauacacaugu

SEQ ID NO: 856999 - RNA, 22 nt, Human
aauuucaaacucuugcccucag

SEQ ID NO: 857000 - RNA, 22 nt, Human
uuucacauuagauaugucauuu

SEQ ID NO: 857001 - RNA, 22 nt, Human
gaaucucaaggcuugugaggau

SEQ ID NO: 857002 - RNA, 22 nt, Human
caucauaaaauugagauaacug

SEQ ID NO: 857003 - RNA, 22 nt, Human
agaaagcaucuccauuguaggu

SEQ ID NO: 857004 - RNA, 22 nt, Human
ggaggggaacuaaucccgugac

SEQ ID NO: 857005 - RNA, 22 nt, Human
gaggcagugcauugucuagggg

SEQ ID NO: 857006 - RNA, 22 nt, Human
cugagagugcucuuugauguca

SEQ ID NO: 857007 - RNA, 20 nt, Human
agagcagcaguuggugaggu

SEQ ID NO: 857008 - RNA, 19 nt, Human
cuuugucagaacaugcuuc

SEQ ID NO: 857009 - RNA, 23 nt, Human
cccaggaguuucacugcaaaggu

SEQ ID NO: 857010 - RNA, 17 nt, Human
uccauacaauucucucu

SEQ ID NO: 857011 - RNA, 22 nt, Human
caggcagcccugcaccaagugu

SEQ ID NO: 857012 - RNA, 22 nt, Human
agauuuacugagaacugauuac

SEQ ID NO: 857013 - RNA, 22 nt, Human
accaggaggaaguguuaaugau

SEQ ID NO: 857014 - RNA, 22 nt, Human
gaauagcuuccuuuuuuccaaa

SEQ ID NO: 857015 - RNA, 22 nt, Human
uggcaucucaaacaggcagauu

SEQ ID NO: 857016 - RNA, 22 nt, Human
cccaggaaagagacugcugggu

SEQ ID NO: 857017 - RNA, 22 nt, Human
gccuuaauuuaugucuaacaua

SEQ ID NO: 857018 - RNA, 22 nt, Human
ccuggagaccagaggauacuuc

SEQ ID NO: 857019 - RNA, 22 nt, Human
uuccugagggacuuuugagauu

SEQ ID NO: 857020 - RNA, 22 nt, Human
ucauuuguggaagugauugugg

SEQ ID NO: 857021 - RNA, 22 nt, Human
uuuuaucuaccuaugcucauuu

SEQ ID NO: 857022 - RNA, 22 nt, Human
ggagcugugcagugacuacaga

SEQ ID NO: 857023 - RNA, 22 nt, Human
gagaggucaucucccaucagca

SEQ ID NO: 857024 - RNA, 22 nt, Human
aacauauaaacucuuaaguuca

SEQ ID NO: 857025 - RNA, 22 nt, Human
uucaggaugcagagguuguagu

SEQ ID NO: 857026 - RNA, 22 nt, Human
uuaucacuuaugagcuuuuugc

SEQ ID NO: 857027 - RNA, 22 nt, Human
caaagauuuuagaauuugcaau

SEQ ID NO: 857028 - RNA, 22 nt, Human
uggcagagugcagaagaggcau

SEQ ID NO: 857029 - RNA, 22 nt, Human
uagauuuuacuucugucauuac

SEQ ID NO: 857030 - RNA, 22 nt, Human
auucauuugcuauuguguaugg

SEQ ID NO: 857031 - RNA, 22 nt, Human
uauacagucuuuugcuauauuc

SEQ ID NO: 857032 - RNA, 22 nt, Human
agccagcucccuccccugcagg

SEQ ID NO: 857033 - RNA, 22 nt, Human
aucaggaugcugucaguuacca

SEQ ID NO: 857034 - RNA, 22 nt, Human
auuucccaugugaaucaauugg

SEQ ID NO: 857035 - RNA, 22 nt, Human
ucuauacaugugcacacacauc

SEQ ID NO: 857036 - RNA, 21 nt, Human
agcagaggggacauguuugau

SEQ ID NO: 857037 - RNA, 22 nt, Human
acagaguucccacuccagaagc

SEQ ID NO: 857038 - RNA, 22 nt, Human
cccaggagauggugcguggucu

SEQ ID NO: 857039 - RNA, 22 nt, Human
cugcugugugcuuacuuggguu

SEQ ID NO: 857040 - RNA, 22 nt, Human
cucccagagaccaagcugagaa

SEQ ID NO: 857041 - RNA, 22 nt, Human
acaacuuuucuaucauguggaa

SEQ ID NO: 857042 - RNA, 22 nt, Human
ucacacagauugguagagcuga

SEQ ID NO: 857043 - RNA, 23 nt, Human
cuuugccacccagagccugacag

SEQ ID NO: 857044 - RNA, 22 nt, Human
cagaggaugaucuggccucucu

SEQ ID NO: 857045 - RNA, 22 nt, Human
augugcuuguaauguuaaaugu

SEQ ID NO: 857046 - RNA, 20 nt, Human
cugagagucugugcuuaguc

SEQ ID NO: 857047 - RNA, 22 nt, Human
cuucucagaggccagaagcuau

SEQ ID NO: 857048 - RNA, 22 nt, Human
gcuccucuauuccccacauuuu

SEQ ID NO: 857049 - RNA, 22 nt, Human
ccagauuugagcgucuuaaacc

SEQ ID NO: 857050 - RNA, 21 nt, Human
uuuuauugaugaauggccacu

SEQ ID NO: 857051 - RNA, 22 nt, Human
ugccugugguuccaguuuuuuc

SEQ ID NO: 857052 - RNA, 22 nt, Human
ugcugcugauggcaccuaggca

SEQ ID NO: 857053 - RNA, 22 nt, Human
acaugaaaaauguuugcaguuu

SEQ ID NO: 857054 - RNA, 22 nt, Human
uaggcagcuuagguuagaagug

SEQ ID NO: 857055 - RNA, 22 nt, Human
ccaggcagcaaauuuucugaau

SEQ ID NO: 857056 - RNA, 22 nt, Human
gggcagcugucuugguucucaa

SEQ ID NO: 857057 - RNA, 22 nt, Human
caaauauuccagguacaucccu

SEQ ID NO: 857058 - RNA, 22 nt, Human
uaaauuauggcuggcagagcag

SEQ ID NO: 857059 - RNA, 22 nt, Human
caaagccauagaguagauaaga

SEQ ID NO: 857060 - RNA, 22 nt, Human
ucauuuauaaggaugcaauuaa

SEQ ID NO: 857061 - RNA, 22 nt, Human
uuaaaauagccagugccccucu

SEQ ID NO: 857062 - RNA, 22 nt, Human
gucuucuuuaaccuacuaaagc

SEQ ID NO: 857063 - RNA, 22 nt, Human
uucuuuucuuuaggcauugugu

SEQ ID NO: 857064 - RNA, 22 nt, Human
uugcauuuuuagaugcuucugu

SEQ ID NO: 857065 - RNA, 22 nt, Human
uuucugugguggguaguucaga

SEQ ID NO: 857066 - RNA, 22 nt, Human
uaucuguuccaggcacucagcu

SEQ ID NO: 857067 - RNA, 22 nt, Human
auuugcuuuaagguauaaaagg

SEQ ID NO: 857068 - RNA, 22 nt, Human
aucaggauguuuggcugucaua

SEQ ID NO: 857069 - RNA, 22 nt, Human
cccaggaagagugaguggcauu

SEQ ID NO: 857070 - RNA, 21 nt, Human
uugaaaguaaauucagcagcu

SEQ ID NO: 857071 - RNA, 22 nt, Human
aguacaaugucugacacaguag

SEQ ID NO: 857072 - RNA, 22 nt, Human
ugcacauuaguguuugagaugc

SEQ ID NO: 857073 - RNA, 19 nt, Human
aaucagaaauaucgaggcc

SEQ ID NO: 857074 - RNA, 22 nt, Human
gaggcagccagagguucucauu

SEQ ID NO: 857075 - RNA, 22 nt, Human
acacacucaauugcauaagcac

SEQ ID NO: 857076 - RNA, 22 nt, Human
aacaguaaagacagaauuuauc

SEQ ID NO: 857077 - RNA, 17 nt, Human
uccaggagaggcaaugg

SEQ ID NO: 857078 - RNA, 18 nt, Human
gagagggaucccucagga

SEQ ID NO: 857079 - RNA, 23 nt, Human
uaucagugugaugaggcugcugc

SEQ ID NO: 857080 - RNA, 22 nt, Human
agggcagccauugagggauucu

SEQ ID NO: 857081 - RNA, 23 nt, Human
uggcaaggaaugggauggagacu

SEQ ID NO: 857082 - RNA, 19 nt, Human
guugaaaguaggugagggu

SEQ ID NO: 857083 - RNA, 22 nt, Human
cccagcaggaggagguugcagu

SEQ ID NO: 857084 - RNA, 22 nt, Human
agacaacaucacuaaagcugag

SEQ ID NO: 857085 - RNA, 22 nt, Human
gaguccuuaauacacuggugga

SEQ ID NO: 857086 - RNA, 22 nt, Human
ggguggaguagaaagaugaauu

SEQ ID NO: 857087 - RNA, 22 nt, Human
ugccaggauggccagggggcca

SEQ ID NO: 857088 - RNA, 22 nt, Human
ggcagcuuucucacccaugacc

SEQ ID NO: 857089 - RNA, 22 nt, Human
uucauacuaaaguguaagaugu

SEQ ID NO: 857090 - RNA, 22 nt, Human
cccaggaaaagcagugccagca

SEQ ID NO: 857091 - RNA, 22 nt, Human
aagacugugucuauggcuacuc

SEQ ID NO: 857092 - RNA, 22 nt, Human
aucaggaucacagaaacuuuua

SEQ ID NO: 857093 - RNA, 22 nt, Human
uugcuagcugguguaugcauug

SEQ ID NO: 857094 - RNA, 22 nt, Human
uaaggccagccagcaaaucugu

SEQ ID NO: 857095 - RNA, 22 nt, Human
caggacagagcccagacugugu

SEQ ID NO: 857096 - RNA, 22 nt, Human
aguauugugacucaaguauucu

SEQ ID NO: 857097 - RNA, 22 nt, Human
uaucuuguaauagguccacuug

SEQ ID NO: 857098 - RNA, 22 nt, Human
uccaggaggguuuucugccuuc

SEQ ID NO: 857099 - RNA, 22 nt, Human
uggagaggaaagugcaguuuug

SEQ ID NO: 857100 - RNA, 22 nt, Human
augcagcugucagggagaacau

SEQ ID NO: 857101 - RNA, 22 nt, Human
agacagcuaauaaaugagugug

SEQ ID NO: 857102 - RNA, 22 nt, Human
aaugaaaauuggacccuagaac

SEQ ID NO: 857103 - RNA, 22 nt, Human
gaagaaucugaggacagucauu

SEQ ID NO: 857104 - RNA, 22 nt, Human
acaggccacaguggagucucug

SEQ ID NO: 857105 - RNA, 22 nt, Human
cuggaucaugcauugcuugucc

SEQ ID NO: 857106 - RNA, 22 nt, Human
ccauuucacucuuccugaagga

SEQ ID NO: 857107 - RNA, 22 nt, Human
caguccuuagauuuuacugcca

SEQ ID NO: 857108 - RNA, 22 nt, Human
gauauuuugagaaauccuauga

SEQ ID NO: 857109 - RNA, 22 nt, Human
aggcagcuaagauggauaauga

SEQ ID NO: 857110 - RNA, 22 nt, Human
uugcugugucugauggcugaga

SEQ ID NO: 857111 - RNA, 22 nt, Human
uggaauaaagugcuuugaucag

SEQ ID NO: 857112 - RNA, 22 nt, Human
agggagcuuccgaacuacagcu

SEQ ID NO: 857113 - RNA, 22 nt, Human
gaagcagccacggggagacaga

SEQ ID NO: 857114 - RNA, 21 nt, Human
ucucugguuggaguugugcca

SEQ ID NO: 857115 - RNA, 22 nt, Human
caguugcuggaugugcagcucu

SEQ ID NO: 857116 - RNA, 22 nt, Human
cugugauuguuaguuccuauac

SEQ ID NO: 857117 - RNA, 22 nt, Human
agcuucuuggcucagcacuugg

SEQ ID NO: 857118 - RNA, 22 nt, Human
ccaguacugucuccaauauucc

SEQ ID NO: 857119 - RNA, 19 nt, Human
uuugaaaggauuguuauuu

SEQ ID NO: 857120 - RNA, 22 nt, Human
ccuggaucuaaggaagcuggga

SEQ ID NO: 857121 - RNA, 22 nt, Human
uuaaauauuuucagcaggguca

SEQ ID NO: 857122 - RNA, 22 nt, Human
accaggagccacaggaggagcc

SEQ ID NO: 857123 - RNA, 22 nt, Human
uuucucuguucucuaacuguaa

SEQ ID NO: 857124 - RNA, 22 nt, Human
agggcaguucaacuucauagug

SEQ ID NO: 857125 - RNA, 22 nt, Human
agaggcaggaagagcugauuuu

SEQ ID NO: 857126 - RNA, 22 nt, Human
cccuuagcuccaagggguuugg

SEQ ID NO: 857127 - RNA, 22 nt, Human
auagucuuagaucagauaaagu

SEQ ID NO: 857128 - RNA, 22 nt, Human
uuugacauuggcuuauucuguu

SEQ ID NO: 857129 - RNA, 22 nt, Human
caggaugaagggcaaaggcaag

SEQ ID NO: 857130 - RNA, 20 nt, Human
agaaucugacccagagagac

SEQ ID NO: 857131 - RNA, 22 nt, Human
ucuuuaauaucugccccagagc

SEQ ID NO: 857132 - RNA, 22 nt, Human
gaggcaguguuuacugcccugu

SEQ ID NO: 857133 - RNA, 22 nt, Human
aaauuucaagcaaaguagcuau

SEQ ID NO: 857134 - RNA, 22 nt, Human
ucauuauuuuggacuggagugu

SEQ ID NO: 857135 - RNA, 22 nt, Human
uggaggaaguugcuggaaguca

SEQ ID NO: 857136 - RNA, 22 nt, Human
ugaguucucacccauucuucuu

SEQ ID NO: 857137 - RNA, 19 nt, Human
uugaaagauuagcuuucua

SEQ ID NO: 857138 - RNA, 22 nt, Human
aaguguauauaugacuuauaaa

SEQ ID NO: 857139 - RNA, 19 nt, Human
ugccuggacaaaugugggg

SEQ ID NO: 857140 - RNA, 22 nt, Human
aauaucagcacuuuugugguau

SEQ ID NO: 857141 - RNA, 22 nt, Human
gagguagcaugcuggaagggac

SEQ ID NO: 857142 - RNA, 22 nt, Human
acagaauuugcuugggcaaugg

SEQ ID NO: 857143 - RNA, 22 nt, Human
cuggauuuaggacuaguccaag

SEQ ID NO: 857144 - RNA, 22 nt, Human
auauuauucuaguaacagugau

SEQ ID NO: 857145 - RNA, 19 nt, Human
ccauggagagagaugcauu

SEQ ID NO: 857146 - RNA, 22 nt, Human
uccaggagaaggccauccagcg

SEQ ID NO: 857147 - RNA, 22 nt, Human
guccucugaaguugugcaaugc

SEQ ID NO: 857148 - RNA, 22 nt, Human
aggccagcacgacagccgcagg

SEQ ID NO: 857149 - RNA, 22 nt, Human
guugaaaguagaugcuauuugg

SEQ ID NO: 857150 - RNA, 22 nt, Human
cagcagagcugggcuuugaauu

SEQ ID NO: 857151 - RNA, 22 nt, Human
aggcagcaugggccccagcucc

SEQ ID NO: 857152 - RNA, 22 nt, Human
acaagccaauuacugugccagg

SEQ ID NO: 857153 - RNA, 22 nt, Human
uccaggagagguagaggguucc

SEQ ID NO: 857154 - RNA, 22 nt, Human
cagauccacccuuguagugaca

SEQ ID NO: 857155 - RNA, 22 nt, Human
agugcagccgagaucaggugcu

SEQ ID NO: 857156 - RNA, 22 nt, Human
aaggcagcuuuaaaaaagaugc

SEQ ID NO: 857157 - RNA, 22 nt, Human
uuccuuaggcuguuugcagugc

SEQ ID NO: 857158 - RNA, 22 nt, Human
uuuccaaauaaggucacauucu

SEQ ID NO: 857159 - RNA, 22 nt, Human
aauaacuggcacauaucacaua

SEQ ID NO: 857160 - RNA, 22 nt, Human
gauugaaacauaggcagucgag

SEQ ID NO: 857161 - RNA, 22 nt, Human
caaggccacguucugcaugcgg

SEQ ID NO: 857162 - RNA, 22 nt, Human
uuucccagagguaugaauaagu

SEQ ID NO: 857163 - RNA, 21 nt, Human
auacagaagguggcaaaguac

SEQ ID NO: 857164 - RNA, 19 nt, Human
agaaguuagacauugcaau

SEQ ID NO: 857165 - RNA, 22 nt, Human
aauacauguuuucuacuauucu

SEQ ID NO: 857166 - RNA, 22 nt, Human
uccaugaggaccaaauucguag

SEQ ID NO: 857167 - RNA, 22 nt, Human
cagugguugguagauacuugag

SEQ ID NO: 857168 - RNA, 22 nt, Human
auucuucacauaagugcuguac

SEQ ID NO: 857169 - RNA, 22 nt, Human
cccaggaguuagagguuguggu

SEQ ID NO: 857170 - RNA, 22 nt, Human
aguacaauuuaaugaagauagc

SEQ ID NO: 857171 - RNA, 22 nt, Human
ucgcugugguuucuguacaugg

SEQ ID NO: 857172 - RNA, 21 nt, Human
aggucagcccagcucuggaag

SEQ ID NO: 857173 - RNA, 22 nt, Human
uucuucuucuggcugcaccugg

SEQ ID NO: 857174 - RNA, 22 nt, Human
ugaaaugaucaguuugguuacu

SEQ ID NO: 857175 - RNA, 20 nt, Human
cugcugugugugccucagcc

SEQ ID NO: 857176 - RNA, 22 nt, Human
ccucaggauccgcaggugcagu

SEQ ID NO: 857177 - RNA, 22 nt, Human
aggcagcugaggucuggcgccc

SEQ ID NO: 857178 - RNA, 22 nt, Human
cagaagucacccucagaauaac

SEQ ID NO: 857179 - RNA, 22 nt, Human
auauacaguuuuacaggguuuc

SEQ ID NO: 857180 - RNA, 22 nt, Human
uauuuuaucugccagaguggag

SEQ ID NO: 857181 - RNA, 22 nt, Human
aucaggaucugcaucauaagaa

SEQ ID NO: 857182 - RNA, 22 nt, Human
aaccauuugcaguuacugagac

SEQ ID NO: 857183 - RNA, 22 nt, Human
uaaggccaauuacauauguuca

SEQ ID NO: 857184 - RNA, 22 nt, Human
uuagaaaugucacagaucugau

SEQ ID NO: 857185 - RNA, 21 nt, Human
aaucauacaaaacaugucagg

SEQ ID NO: 857186 - RNA, 22 nt, Human
aaaguccugacugcaggggaug

SEQ ID NO: 857187 - RNA, 22 nt, Human
uauaucauggagauuaacauuc

SEQ ID NO: 857188 - RNA, 22 nt, Human
aucccaugagaccacguuggcu

SEQ ID NO: 857189 - RNA, 21 nt, Human
ccaggaaggacugagcucccu

SEQ ID NO: 857190 - RNA, 22 nt, Human
uugaagaaauuauuuuauauag

SEQ ID NO: 857191 - RNA, 22 nt, Human
gaggagcugggcugagaggguc

SEQ ID NO: 857192 - RNA, 22 nt, Human
uugguuuacuaggauucaaauu

SEQ ID NO: 857193 - RNA, 22 nt, Human
cugacagucucauugauuugcu

SEQ ID NO: 857194 - RNA, 22 nt, Human
uucaacuauuaugaauaaaauu

SEQ ID NO: 857195 - RNA, 22 nt, Human
uacacauguuuggcaaguaugu

SEQ ID NO: 857196 - RNA, 22 nt, Human
acuauacauugaauguuaaggu

SEQ ID NO: 857197 - RNA, 22 nt, Human
aaguccuuaggaagcagucguu

SEQ ID NO: 857198 - RNA, 22 nt, Human
aaaauugaggcucauguuaaau

SEQ ID NO: 857199 - RNA, 22 nt, Human
ucccaggagcaccuuuugagcc

SEQ ID NO: 857200 - RNA, 22 nt, Human
cagcagagaccaagugauuuga

SEQ ID NO: 857201 - RNA, 22 nt, Human
aucuaacacuguaaacugucuu

SEQ ID NO: 857202 - RNA, 22 nt, Human
ugcuugaaagggguuucccagu

SEQ ID NO: 857203 - RNA, 22 nt, Human
cagcugccccuccagggcuggg

SEQ ID NO: 857204 - RNA, 22 nt, Human
ggcacagagcccagcuuccuag

SEQ ID NO: 857205 - RNA, 22 nt, Human
gacccaggagagaggguugcau

SEQ ID NO: 857206 - RNA, 22 nt, Human
acauucuuaacaguuaaaaacu

SEQ ID NO: 857207 - RNA, 22 nt, Human
uuaaugauaccuauguuaauuu

SEQ ID NO: 857208 - RNA, 22 nt, Human
auccagucaaaauuaguaaggu

SEQ ID NO: 857209 - RNA, 22 nt, Human
caggcagaguuagagcaacugg

SEQ ID NO: 857210 - RNA, 22 nt, Human
cagagggcucuuggcugccugc

SEQ ID NO: 857211 - RNA, 22 nt, Human
caucagaacaaaucgguuaaga

SEQ ID NO: 857212 - RNA, 19 nt, Human
aacuggauaauggccacau

SEQ ID NO: 857213 - RNA, 22 nt, Human
ugcuuaauagugcacugguuuc

SEQ ID NO: 857214 - RNA, 22 nt, Human
ugaaugaacuaaaucauaguuc

SEQ ID NO: 857215 - RNA, 22 nt, Human
acaaaauuaugaagaggccuug

SEQ ID NO: 857216 - RNA, 22 nt, Human
agaccaugggcucugaagagca

SEQ ID NO: 857217 - RNA, 19 nt, Human
caguccuuuccgcuuucuc

SEQ ID NO: 857218 - RNA, 18 nt, Human
cucaccauucugcccaau

SEQ ID NO: 857219 - RNA, 23 nt, Human
cugcccugaucuugaucuauugu

SEQ ID NO: 857220 - RNA, 22 nt, Human
cagggaggcugucuuaugccug

SEQ ID NO: 857221 - RNA, 22 nt, Human
acaauguguuuuuauacauuug

SEQ ID NO: 857222 - RNA, 22 nt, Human
uagaaauguugguauuaacauu

SEQ ID NO: 857223 - RNA, 22 nt, Human
auaauucaugggccuuucaccu

SEQ ID NO: 857224 - RNA, 22 nt, Human
gcucucuugguggcuguccugg

SEQ ID NO: 857225 - RNA, 22 nt, Human
agucucugucguagaucagcgu

SEQ ID NO: 857226 - RNA, 19 nt, Human
cuauacagccucugaggaa

SEQ ID NO: 857227 - RNA, 22 nt, Human
aggcagcagucaugaggaaaga

SEQ ID NO: 857228 - RNA, 20 nt, Human
uacagacaugacaauaaugg

SEQ ID NO: 857229 - RNA, 22 nt, Human
cggaggggauacauuuucugaa

SEQ ID NO: 857230 - RNA, 20 nt, Human
gaguccuuaugggcugaggu

SEQ ID NO: 857231 - RNA, 22 nt, Human
uggagucugugaugcucugggu

SEQ ID NO: 857232 - RNA, 22 nt, Human
uucuucaaacaaaaguggcaug

SEQ ID NO: 857233 - RNA, 22 nt, Human
auuuuacuacuccaauuaauga

SEQ ID NO: 857234 - RNA, 22 nt, Human
cugcugugcauauuuaucuagg

SEQ ID NO: 857235 - RNA, 23 nt, Human
gccaggaguggguagacuaaugc

SEQ ID NO: 857236 - RNA, 22 nt, Human
cauaauaucuccgauuacuugc

SEQ ID NO: 857237 - RNA, 22 nt, Human
gaagcagcugccagagaugucu

SEQ ID NO: 857238 - RNA, 22 nt, Human
cuugaacucaaugugaggaaga

SEQ ID NO: 857239 - RNA, 22 nt, Human
uaacagaaauuuuaguuagggg

SEQ ID NO: 857240 - RNA, 22 nt, Human
gcaucuaaacuugcaucauugu

SEQ ID NO: 857241 - RNA, 22 nt, Human
ugaauagauuuuuaacauauaa

SEQ ID NO: 857242 - RNA, 22 nt, Human
augaaacacacacgcgcauacu

SEQ ID NO: 857243 - RNA, 22 nt, Human
aaaguccuugcaguuuccucuu

SEQ ID NO: 857244 - RNA, 22 nt, Human
uccauuuuagagaugaagaaac

SEQ ID NO: 857245 - RNA, 22 nt, Human
agcagaggaggauuuaguuagg

SEQ ID NO: 857246 - RNA, 22 nt, Human
aaagaaggaugggagaaauccu

SEQ ID NO: 857247 - RNA, 22 nt, Human
ugaugaaaauaugauucugagg

SEQ ID NO: 857248 - RNA, 22 nt, Human
uucagaaaaaacuucaauaagu

SEQ ID NO: 857249 - RNA, 22 nt, Human
gagaggaguagacacuuugguu

SEQ ID NO: 857250 - RNA, 22 nt, Human
cucccaggguagggagagacua

SEQ ID NO: 857251 - RNA, 22 nt, Human
agcauaaaggcacuagaaagag

SEQ ID NO: 857252 - RNA, 22 nt, Human
uggcauuuucuccuuugaguuu

SEQ ID NO: 857253 - RNA, 22 nt, Human
acuguguggaccacucugaggc

SEQ ID NO: 857254 - RNA, 22 nt, Human
auauaauuguucugaaguguuu

SEQ ID NO: 857255 - RNA, 22 nt, Human
ucacugcucuccaauguggagu

SEQ ID NO: 857256 - RNA, 22 nt, Human
uuccucagcuggccugauuggg

SEQ ID NO: 857257 - RNA, 22 nt, Human
ccaggagagcagaagcccaggc

SEQ ID NO: 857258 - RNA, 22 nt, Human
gcuguguuugacaguagcagac

SEQ ID NO: 857259 - RNA, 22 nt, Human
aggcaagcccccagugaggcuc

SEQ ID NO: 857260 - RNA, 22 nt, Human
agcaccuguugcacuucauaau

SEQ ID NO: 857261 - RNA, 21 nt, Human
uccagaaaagaggucauuagc

SEQ ID NO: 857262 - RNA, 22 nt, Human
ugaggcagcuuuuucugugugu

SEQ ID NO: 857263 - RNA, 22 nt, Human
guugaaaguggagaaccugguu

SEQ ID NO: 857264 - RNA, 22 nt, Human
ugugaauagugccgcaauaaac

SEQ ID NO: 857265 - RNA, 22 nt, Human
cucaggauagcugcgcagccug

SEQ ID NO: 857266 - RNA, 22 nt, Human
uaccauuucauucuuuccucau

SEQ ID NO: 857267 - RNA, 22 nt, Human
cagauacuguaaaauuucagua

SEQ ID NO: 857268 - RNA, 22 nt, Human
aaaaucugcuuccuuuuacaga

SEQ ID NO: 857269 - RNA, 21 nt, Human
cccaggagaagaaaagaugca

SEQ ID NO: 857270 - RNA, 22 nt, Human
cuggcuuucucugugguguuca

SEQ ID NO: 857271 - RNA, 22 nt, Human
caggaggaagaacucugcaaca

SEQ ID NO: 857272 - RNA, 22 nt, Human
uuaguuuucccaucuuuauggu

SEQ ID NO: 857273 - RNA, 22 nt, Human
ugucaccaaguugaugaaugca

SEQ ID NO: 857274 - RNA, 22 nt, Human
ucuuagaaauuccccaguggcu

SEQ ID NO: 857275 - RNA, 22 nt, Human
aggauuuagauuuggaggaacu

SEQ ID NO: 857276 - RNA, 22 nt, Human
gcagaauuggauaguugugaua

SEQ ID NO: 857277 - RNA, 22 nt, Human
ugaaacaaauuuggaaaaucua

SEQ ID NO: 857278 - RNA, 22 nt, Human
gauuucuugauaauucaaaucc

SEQ ID NO: 857279 - RNA, 22 nt, Human
uauuuccaccuauuauuuucug

SEQ ID NO: 857280 - RNA, 22 nt, Human
gggcagcugccaagugcaucgc

SEQ ID NO: 857281 - RNA, 22 nt, Human
auucuucagaauaucuggcacu

SEQ ID NO: 857282 - RNA, 22 nt, Human
cuacagacccaccuuggaagaa

SEQ ID NO: 857283 - RNA, 22 nt, Human
ggggcagcuaccggaaguaggg

SEQ ID NO: 857284 - RNA, 22 nt, Human
uccaggaggccucauuuccugu

SEQ ID NO: 857285 - RNA, 22 nt, Human
gugaauaaccuacuccaggccu

SEQ ID NO: 857286 - RNA, 22 nt, Human
cucaggauuaaggaaucuaaau

SEQ ID NO: 857287 - RNA, 22 nt, Human
agcuucccaagguuggaagguu

SEQ ID NO: 857288 - RNA, 22 nt, Human
cauaaaauggcuuguucuuuaa

SEQ ID NO: 857289 - RNA, 22 nt, Human
auauacugaggagacuuuauau

SEQ ID NO: 857290 - RNA, 22 nt, Human
caucagaaucugagucucugcc

SEQ ID NO: 857291 - RNA, 22 nt, Human
aggcagguccccuggaaggcac

SEQ ID NO: 857292 - RNA, 21 nt, Human
agccagcuaucacacagcauu

SEQ ID NO: 857293 - RNA, 22 nt, Human
acagucauuagauacaaugucu

SEQ ID NO: 857294 - RNA, 22 nt, Human
gauguagagggaagauuuuaaa

SEQ ID NO: 857295 - RNA, 21 nt, Human
uguccuuaaugcaauguccuu

SEQ ID NO: 857296 - RNA, 22 nt, Human
gauagaaagguguugaaaucca

SEQ ID NO: 857297 - RNA, 22 nt, Human
cuacccaggcuuagagggcugg

SEQ ID NO: 857298 - RNA, 22 nt, Human
cgucuuccucuuacgaugcgcu

SEQ ID NO: 857299 - RNA, 21 nt, Human
cccacggaaugaugaggcacu

SEQ ID NO: 857300 - RNA, 22 nt, Human
aggguaggaacugaguggaagg

SEQ ID NO: 857301 - RNA, 22 nt, Human
aagggagguaaagcuauuuaaa

SEQ ID NO: 857302 - RNA, 23 nt, Human
aggauuuaaaggcaaugcauuuu

SEQ ID NO: 857303 - RNA, 17 nt, Human
caggcagacauguaagc

SEQ ID NO: 857304 - RNA, 23 nt, Human
ccacuagcaccuguucaacuucu

SEQ ID NO: 857305 - RNA, 22 nt, Human
aaugcauauguaggcaagcagu

SEQ ID NO: 857306 - RNA, 22 nt, Human
acaugauuuuaguaucauaaua

SEQ ID NO: 857307 - RNA, 22 nt, Human
guccuuaguuacuuuucauguc

SEQ ID NO: 857308 - RNA, 22 nt, Human
auuuccagacuuuuuccaggaa

SEQ ID NO: 857309 - RNA, 22 nt, Human
gagugcaguuggggugagggga

SEQ ID NO: 857310 - RNA, 22 nt, Human
cuggcuguauuaguuugauccu

SEQ ID NO: 857311 - RNA, 22 nt, Human
auccaaaccuggacaugagugg

SEQ ID NO: 857312 - RNA, 22 nt, Human
uuguaaauaguaguaagaugcc

SEQ ID NO: 857313 - RNA, 22 nt, Human
uucucagaugauucagauaaac

SEQ ID NO: 857314 - RNA, 22 nt, Human
ccccaggagcuuguuuuagaga

SEQ ID NO: 857315 - RNA, 22 nt, Human
cucaggaucgcuugcccuaggg

SEQ ID NO: 857316 - RNA, 22 nt, Human
gggacuucauagcuaggcacuu

SEQ ID NO: 857317 - RNA, 22 nt, Human
uugcauuugacaaauuauuuaa

SEQ ID NO: 857318 - RNA, 22 nt, Human
auuaggcaauucugggcaucuc

SEQ ID NO: 857319 - RNA, 22 nt, Human
gacaguccuugcccaguaucua

SEQ ID NO: 857320 - RNA, 22 nt, Human
gaggagaggccaucguuguuau

SEQ ID NO: 857321 - RNA, 20 nt, Human
uucuauacauaucacugaaa

SEQ ID NO: 857322 - RNA, 22 nt, Human
gcccaggaggcagagguugugg

SEQ ID NO: 857323 - RNA, 22 nt, Human
auuaaauuggacgcugggggaa

SEQ ID NO: 857324 - RNA, 22 nt, Human
cagaccagcucuaugaacccaa

SEQ ID NO: 857325 - RNA, 22 nt, Human
aggaugagccgcgcaagcugac

SEQ ID NO: 857326 - RNA, 22 nt, Human
uuugcagugucagcuucugugu

SEQ ID NO: 857327 - RNA, 22 nt, Human
aguucuucauaaccuuacugug

SEQ ID NO: 857328 - RNA, 22 nt, Human
uucuccagagggcucugcagga

SEQ ID NO: 857329 - RNA, 22 nt, Human
ccaggcugagcaugauuggagc

SEQ ID NO: 857330 - RNA, 21 nt, Human
ggauggauagggaagagauuu

SEQ ID NO: 857331 - RNA, 22 nt, Human
cauguuuacuaccaggagaaug

SEQ ID NO: 857332 - RNA, 22 nt, Human
aucaggauuacacggggaugcu

SEQ ID NO: 857333 - RNA, 22 nt, Human
aucagaaauugcuaccagugga

SEQ ID NO: 857334 - RNA, 22 nt, Human
acucaggaaauugagauaaugg

SEQ ID NO: 857335 - RNA, 22 nt, Human
gagauuuaauuggauuaacuua

SEQ ID NO: 857336 - RNA, 20 nt, Human
auuuggcaugaaguauugau

SEQ ID NO: 857337 - RNA, 22 nt, Human
gaucuucuagcagaaguaauuu

SEQ ID NO: 857338 - RNA, 22 nt, Human
cgaggcagaggcugaaacggcu

SEQ ID NO: 857339 - RNA, 17 nt, Human
agagggaaaaugcgguu

SEQ ID NO: 857340 - RNA, 22 nt, Human
cacaggagagcugggaggugcc

SEQ ID NO: 857341 - RNA, 22 nt, Human
uaaaauagcaugugcagugaaa

SEQ ID NO: 857342 - RNA, 22 nt, Human
cugccuccugccgugcagcuuc

SEQ ID NO: 857343 - RNA, 22 nt, Human
gagagucuagugcaccuaguuu

SEQ ID NO: 857344 - RNA, 22 nt, Human
ggcgcacaaugugcagguuugu

SEQ ID NO: 857345 - RNA, 22 nt, Human
aaggcagccgugugacugcaug

SEQ ID NO: 857346 - RNA, 22 nt, Human
uccaggagacacccuugugugu

SEQ ID NO: 857347 - RNA, 22 nt, Human
aggcaguuguugcugagcagcu

SEQ ID NO: 857348 - RNA, 22 nt, Human
ucuguggauuuuaguguucaug

SEQ ID NO: 857349 - RNA, 22 nt, Human
uggaaagucucuuuugacugua

SEQ ID NO: 857350 - RNA, 22 nt, Human
guucuucagauuccauuucagu

SEQ ID NO: 857351 - RNA, 22 nt, Human
uguacaauguguuuguuggcuu

SEQ ID NO: 857352 - RNA, 22 nt, Human
ucuaaagaagaggguucugcgg

SEQ ID NO: 857353 - RNA, 22 nt, Human
agagggagugaaauggaauaga

SEQ ID NO: 857354 - RNA, 22 nt, Human
ggaggagguggguuaaguugua

SEQ ID NO: 857355 - RNA, 22 nt, Human
ucuuuguaacugucuauugaga

SEQ ID NO: 857356 - RNA, 22 nt, Human
gggauuuaguaggauaguauac

SEQ ID NO: 857357 - RNA, 22 nt, Human
gcagaggcuguagggaagguug

SEQ ID NO: 857358 - RNA, 23 nt, Human
uuugaaguugacugccuuccaga

SEQ ID NO: 857359 - RNA, 22 nt, Human
augcagcuucaggauuaugaug

SEQ ID NO: 857360 - RNA, 22 nt, Human
gucacuguauccagguuccagc

SEQ ID NO: 857361 - RNA, 22 nt, Human
cccaaggacacgggcagggaca

SEQ ID NO: 857362 - RNA, 22 nt, Human
auaaaugauucagcaggaaaua

SEQ ID NO: 857363 - RNA, 22 nt, Human
ucaauaaaucccucugacccug

SEQ ID NO: 857364 - RNA, 22 nt, Human
uucaacccaaguucuccauuuu

SEQ ID NO: 857365 - RNA, 22 nt, Human
caugauaauuguuaacaaagua

SEQ ID NO: 857366 - RNA, 22 nt, Human
aaagcagacugauuugcaucac

SEQ ID NO: 857367 - RNA, 22 nt, Human
uccagaauacucugaaaucauu

SEQ ID NO: 857368 - RNA, 22 nt, Human
acaugcauaggagaagucuuua

SEQ ID NO: 857369 - RNA, 22 nt, Human
cugaaaauguuacacaggaaga

SEQ ID NO: 857370 - RNA, 22 nt, Human
ucaaucacguguuccauguucu

SEQ ID NO: 857371 - RNA, 22 nt, Human
gaggcagagaccuucaggaccu

SEQ ID NO: 857372 - RNA, 22 nt, Human
ucaucugucccaggcuuuuuuc

SEQ ID NO: 857373 - RNA, 22 nt, Human
aaagccaugggucuuuggcaua

SEQ ID NO: 857374 - RNA, 22 nt, Human
caaauaguaugagcaaugauuc

SEQ ID NO: 857375 - RNA, 22 nt, Human
uucuucuucauuucugacgaug

SEQ ID NO: 857376 - RNA, 22 nt, Human
caacagcugaucuuugaugaag

SEQ ID NO: 857377 - RNA, 22 nt, Human
accauuuuggguauuuucagag

SEQ ID NO: 857378 - RNA, 22 nt, Human
aaauuauuacaagcuaguuggc

SEQ ID NO: 857379 - RNA, 22 nt, Human
uccaggaggaggaaggcugcca

SEQ ID NO: 857380 - RNA, 23 nt, Human
aggcgagcucuucuccagcacgu

SEQ ID NO: 857381 - RNA, 22 nt, Human
cugcuuugcauagcugccagag

SEQ ID NO: 857382 - RNA, 22 nt, Human
ucauuucaaguucugacagcua

SEQ ID NO: 857383 - RNA, 22 nt, Human
ugaaaugacagucuuaagcucu

SEQ ID NO: 857384 - RNA, 22 nt, Human
cagucucuaaaucaaucugaau

SEQ ID NO: 857385 - RNA, 22 nt, Human
gauuucaaggauguuagaggug

SEQ ID NO: 857386 - RNA, 22 nt, Human
augcugugaaaaagaaggcuga

SEQ ID NO: 857387 - RNA, 22 nt, Human
aggauuuauuauaugcccucau

SEQ ID NO: 857388 - RNA, 22 nt, Human
cuucuucaauagcaagcgcaua

SEQ ID NO: 857389 - RNA, 22 nt, Human
aaagccaugaauguuauagagg

SEQ ID NO: 857390 - RNA, 22 nt, Human
cagcuggcugcaugaugccaaa

SEQ ID NO: 857391 - RNA, 22 nt, Human
caaggccaugagcagcgagugu

SEQ ID NO: 857392 - RNA, 22 nt, Human
aggcagugccuggaccccagcu

SEQ ID NO: 857393 - RNA, 22 nt, Human
guuaggcagcccaagaugucag

SEQ ID NO: 857394 - RNA, 22 nt, Human
auggagggugguaagacagaga

SEQ ID NO: 857395 - RNA, 22 nt, Human
uuccuuagcugucccuggaaau

SEQ ID NO: 857396 - RNA, 19 nt, Human
uuacuuggcaaagucaguc

SEQ ID NO: 857397 - RNA, 22 nt, Human
ggaugggagcagaggacgacca

SEQ ID NO: 857398 - RNA, 22 nt, Human
aaucuguuuaguucugcguaug

SEQ ID NO: 857399 - RNA, 22 nt, Human
ucacaugaguauuauuuuccaa

SEQ ID NO: 857400 - RNA, 22 nt, Human
agcagcauuaugauauaucuua

SEQ ID NO: 857401 - RNA, 22 nt, Human
gcuuuaaugcuucguggggcca

SEQ ID NO: 857402 - RNA, 22 nt, Human
uccccagggcugcagagggugu

SEQ ID NO: 857403 - RNA, 22 nt, Human
ccuucuucuguguggcccaaga

SEQ ID NO: 857404 - RNA, 22 nt, Human
ggugaaggcacaagagggcaag

SEQ ID NO: 857405 - RNA, 21 nt, Human
gauaaaaugggccuugguccu

SEQ ID NO: 857406 - RNA, 22 nt, Human
uaauuucacugauaugaaguca

SEQ ID NO: 857407 - RNA, 22 nt, Human
ucauuuaauagcuuuugucuuu

SEQ ID NO: 857408 - RNA, 23 nt, Human
aagucaccaagaggaaggcggag

SEQ ID NO: 857409 - RNA, 22 nt, Human
uauuugaaaguguacaaaaacu

SEQ ID NO: 857410 - RNA, 22 nt, Human
auauacugauagcugcacuucu

SEQ ID NO: 857411 - RNA, 22 nt, Human
aucaguuaguuacugcuaagau

SEQ ID NO: 857412 - RNA, 22 nt, Human
uaggcagcauggauucugaaua

SEQ ID NO: 857413 - RNA, 22 nt, Human
acugugugacuguuauuacugu

SEQ ID NO: 857414 - RNA, 22 nt, Human
ccucaggaaaugaauaaauggc

SEQ ID NO: 857415 - RNA, 22 nt, Human
ggaggccagggacccagucagc

SEQ ID NO: 857416 - RNA, 22 nt, Human
ccaggaagcugucugauaugaa

SEQ ID NO: 857417 - RNA, 22 nt, Human
agagggauggccccguaacuca

SEQ ID NO: 857418 - RNA, 22 nt, Human
agcagagguuuguuggaaaccu

SEQ ID NO: 857419 - RNA, 22 nt, Human
uaaguccuggcugguuugaagc

SEQ ID NO: 857420 - RNA, 22 nt, Human
caggauggucagaugcauuguc

SEQ ID NO: 857421 - RNA, 22 nt, Human
uaaucauggccucaaauuuuau

SEQ ID NO: 857422 - RNA, 22 nt, Human
cauggucuacaauuucauuuua

SEQ ID NO: 857423 - RNA, 22 nt, Human
ugaaauaggaaacagauguuuc

SEQ ID NO: 857424 - RNA, 22 nt, Human
gaaguccuccuaucuugcucuu

SEQ ID NO: 857425 - RNA, 22 nt, Human
ggagaggggcaaguuuaucuag

SEQ ID NO: 857426 - RNA, 22 nt, Human
cuggguaaguuccuaaggcuca

SEQ ID NO: 857427 - RNA, 22 nt, Human
cauuuacagcagacugaugaaa

SEQ ID NO: 857428 - RNA, 22 nt, Human
gugacaguggucacuuguaguu

SEQ ID NO: 857429 - RNA, 22 nt, Human
caggcagccaggggaccugucc

SEQ ID NO: 857430 - RNA, 20 nt, Human
gggagucuggaugaaagaug

SEQ ID NO: 857431 - RNA, 22 nt, Human
aauuaauggaaaguaaggaagg

SEQ ID NO: 857432 - RNA, 21 nt, Human
uucuucaugaugauuaauggc

SEQ ID NO: 857433 - RNA, 22 nt, Human
gcaugucaugucauguaggaau

SEQ ID NO: 857434 - RNA, 22 nt, Human
caucagaaccaguggggacauu

SEQ ID NO: 857435 - RNA, 22 nt, Human
gaggagaggggcucccaagagc

SEQ ID NO: 857436 - RNA, 22 nt, Human
gaaagccauagcccagcuuuac

SEQ ID NO: 857437 - RNA, 22 nt, Human
ucuuugaauucaaacuguucaa

SEQ ID NO: 857438 - RNA, 22 nt, Human
aggguggcuggaggaaucagaa

SEQ ID NO: 857439 - RNA, 22 nt, Human
uuugguccugagcaaaacuaug

SEQ ID NO: 857440 - RNA, 22 nt, Human
cucuucuuggcccccaugaggg

SEQ ID NO: 857441 - RNA, 22 nt, Human
aguacauauaguaauuuagcca

SEQ ID NO: 857442 - RNA, 22 nt, Human
gaaaaaggauaaauacaguguu

SEQ ID NO: 857443 - RNA, 20 nt, Human
gcagcuacucugucucgcuc

SEQ ID NO: 857444 - RNA, 22 nt, Human
gcuguguuuuauguuagguuaa

SEQ ID NO: 857445 - RNA, 18 nt, Human
gucacuguguuucugagc

SEQ ID NO: 857446 - RNA, 22 nt, Human
aucaggaucugggagccugaaa

SEQ ID NO: 857447 - RNA, 22 nt, Human
aaguccuucuuuauaugagagu

SEQ ID NO: 857448 - RNA, 22 nt, Human
acagugacguuuauuugagacg

SEQ ID NO: 857449 - RNA, 22 nt, Human
ucuuuaauauaaaggaaugaau

SEQ ID NO: 857450 - RNA, 20 nt, Human
ucauuguguugccaauuccc

SEQ ID NO: 857451 - RNA, 23 nt, Human
uugcuuucaucaugagaugcucc

SEQ ID NO: 857452 - RNA, 22 nt, Human
ugaggcagcaauugauuauuca

SEQ ID NO: 857453 - RNA, 22 nt, Human
uuacagaaaguuucccaugccg

SEQ ID NO: 857454 - RNA, 22 nt, Human
gcccaggaagccaccgggaagu

SEQ ID NO: 857455 - RNA, 22 nt, Human
aucacauugccagugauuaccc

SEQ ID NO: 857456 - RNA, 22 nt, Human
uagcaucuggagaaacaagucc

SEQ ID NO: 857457 - RNA, 22 nt, Human
ucacaguaaaagcauggaagag

SEQ ID NO: 857458 - RNA, 22 nt, Human
ggcagcuuccuaggagagggca

SEQ ID NO: 857459 - RNA, 22 nt, Human
uggggcucaccuaggcuggaag

SEQ ID NO: 857460 - RNA, 22 nt, Human
uugcagcugcaguaaauguuca

SEQ ID NO: 857461 - RNA, 23 nt, Human
ucguugaauagcaauagcacaac

SEQ ID NO: 857462 - RNA, 22 nt, Human
gaguccuuuguuccuugccaca

SEQ ID NO: 857463 - RNA, 22 nt, Human
gaggcagcaauaaaaagaauuu

SEQ ID NO: 857464 - RNA, 22 nt, Human
guaaugaaugaaagaaacuggg

SEQ ID NO: 857465 - RNA, 22 nt, Human
gcagcugagcgugaggaagagu

SEQ ID NO: 857466 - RNA, 22 nt, Human
gcucccaggcauggagguaauu

SEQ ID NO: 857467 - RNA, 22 nt, Human
agggcagcacaaggcauggacu

SEQ ID NO: 857468 - RNA, 22 nt, Human
ucucccaggcugcccuguggac

SEQ ID NO: 857469 - RNA, 22 nt, Human
uugcugaagugaagguauguuu

SEQ ID NO: 857470 - RNA, 22 nt, Human
ucauacacaagagcauguaaca

SEQ ID NO: 857471 - RNA, 22 nt, Human
ggauuuacaaguuuaacucuca

SEQ ID NO: 857472 - RNA, 22 nt, Human
aauaaaauggucaguuuucuca

SEQ ID NO: 857473 - RNA, 22 nt, Human
gccucugcccuccugggacugc

SEQ ID NO: 857474 - RNA, 22 nt, Human
auuccaguuggguucuaauaca

SEQ ID NO: 857475 - RNA, 23 nt, Human
caauuucauaugauucuaccuaa

SEQ ID NO: 857476 - RNA, 22 nt, Human
uaauuucagugggcucugggcu

SEQ ID NO: 857477 - RNA, 22 nt, Human
caggagggcccgagacucuucc

SEQ ID NO: 857478 - RNA, 22 nt, Human
uggcagcuauuacaaggaaguc

SEQ ID NO: 857479 - RNA, 19 nt, Human
gaggcgaggcgugcaggag

SEQ ID NO: 857480 - RNA, 22 nt, Human
uuacauaacgguaugaaaaaug

SEQ ID NO: 857481 - RNA, 22 nt, Human
auagcuuuacagaagaguuuag

SEQ ID NO: 857482 - RNA, 22 nt, Human
uugaaagugccaaguccuagug

SEQ ID NO: 857483 - RNA, 22 nt, Human
cccaggaggcagagcuugcagu

SEQ ID NO: 857484 - RNA, 22 nt, Human
aaucagaaagaggucauguugc

SEQ ID NO: 857485 - RNA, 22 nt, Human
gcugcccagacauugaaucagg

SEQ ID NO: 857486 - RNA, 22 nt, Human
auuauuauauagggaaaguccc

SEQ ID NO: 857487 - RNA, 22 nt, Human
caaugucaugauuuuccauuag

SEQ ID NO: 857488 - RNA, 22 nt, Human
aggggagguggcagaaaugugc

SEQ ID NO: 857489 - RNA, 19 nt, Human
acaaaugauguugcacuga

SEQ ID NO: 857490 - RNA, 22 nt, Human
augcuguguuuuaaauggaaau

SEQ ID NO: 857491 - RNA, 22 nt, Human
aggcagcugugaggacuggauu

SEQ ID NO: 857492 - RNA, 22 nt, Human
agaggaggcagcuuaacucagu

SEQ ID NO: 857493 - RNA, 22 nt, Human
gaaagccagagagaaagggcuc

SEQ ID NO: 857494 - RNA, 22 nt, Human
augcuuaacuuccuagucuaua

SEQ ID NO: 857495 - RNA, 22 nt, Human
gugaacuauuggguaucauaaa

SEQ ID NO: 857496 - RNA, 22 nt, Human
cauggcuuuguucauauaauuu

SEQ ID NO: 857497 - RNA, 22 nt, Human
acagugcuaaacacuucuugaa

SEQ ID NO: 857498 - RNA, 22 nt, Human
uugcuuuguggugguucuucca

SEQ ID NO: 857499 - RNA, 22 nt, Human
uugauuaaacaggcauauucaa

SEQ ID NO: 857500 - RNA, 22 nt, Human
ccucacugcuauguguuugcuc

SEQ ID NO: 857501 - RNA, 22 nt, Human
cugaauaauauuccauuaugag

SEQ ID NO: 857502 - RNA, 22 nt, Human
ugugaauaaugccgcaauaaac

SEQ ID NO: 857503 - RNA, 22 nt, Human
uuauacauguguuuugagauga

SEQ ID NO: 857504 - RNA, 21 nt, Human
auacagaaggcagacucucuc

SEQ ID NO: 857505 - RNA, 22 nt, Human
gucauucuuaacaacucaguag

SEQ ID NO: 857506 - RNA, 22 nt, Human
uggcauuucaguauuuucauaa

SEQ ID NO: 857507 - RNA, 22 nt, Human
uuuguuaaauauuuauugagug

SEQ ID NO: 857508 - RNA, 22 nt, Human
ugcccacauggugccauggcca

SEQ ID NO: 857509 - RNA, 22 nt, Human
guauagaaacccagaaagauag

SEQ ID NO: 857510 - RNA, 20 nt, Human
cugcugugguccuuuauuuu

SEQ ID NO: 857511 - RNA, 22 nt, Human
uagaaacagaaaacuguaauag

SEQ ID NO: 857512 - RNA, 22 nt, Human
aaaugucagaggaacauauuga

SEQ ID NO: 857513 - RNA, 22 nt, Human
guuuucugauuagcaaaucuga

SEQ ID NO: 857514 - RNA, 22 nt, Human
cccaggagccaucugucuuggc

SEQ ID NO: 857515 - RNA, 22 nt, Human
uucuaacaaguggcuuguuagu

SEQ ID NO: 857516 - RNA, 22 nt, Human
gcggagggcgagcccgcggagc

SEQ ID NO: 857517 - RNA, 22 nt, Human
aggccagaugucgggcuagaag

SEQ ID NO: 857518 - RNA, 22 nt, Human
aguguuugagacacauuucacu

SEQ ID NO: 857519 - RNA, 22 nt, Human
uuccaugacaccgagggaaguc

SEQ ID NO: 857520 - RNA, 22 nt, Human
gggcagcugcagggauggugac

SEQ ID NO: 857521 - RNA, 22 nt, Human
aggagaggcaucaagaaaaucg

SEQ ID NO: 857522 - RNA, 22 nt, Human
caaaugauagagccgauuauca

SEQ ID NO: 857523 - RNA, 22 nt, Human
accaggagacaugaccaaugag

SEQ ID NO: 857524 - RNA, 22 nt, Human
cccaggaaugggaaggaggaau

SEQ ID NO: 857525 - RNA, 22 nt, Human
uuucuucauucaccuucacccc

SEQ ID NO: 857526 - RNA, 19 nt, Human
uacauacuuauucuaaaag

SEQ ID NO: 857527 - RNA, 22 nt, Human
ugucaccacuggcugaaacacc

SEQ ID NO: 857528 - RNA, 22 nt, Human
gcccaggaguuggaggcugcag

SEQ ID NO: 857529 - RNA, 22 nt, Human
caggaugguggcaugaucagaa

SEQ ID NO: 857530 - RNA, 22 nt, Human
guaaauuauuucaagaucaucu

SEQ ID NO: 857531 - RNA, 22 nt, Human
aucagaaaguucaucauguuug

SEQ ID NO: 857532 - RNA, 21 nt, Human
aaauggauagggcaauggaag

SEQ ID NO: 857533 - RNA, 22 nt, Human
uacauauacugagugauuugcu

SEQ ID NO: 857534 - RNA, 22 nt, Human
ucugaaaugcaaauuugacuga

SEQ ID NO: 857535 - RNA, 22 nt, Human
aggcagcuagagagugaaacug

SEQ ID NO: 857536 - RNA, 22 nt, Human
agucaaaugaguaaauauauaa

SEQ ID NO: 857537 - RNA, 22 nt, Human
acaaaguccugguguauggcca

SEQ ID NO: 857538 - RNA, 20 nt, Human
ugaggcaggagaauggcaug

SEQ ID NO: 857539 - RNA, 22 nt, Human
ugcauaaagugccauaguauua

SEQ ID NO: 857540 - RNA, 22 nt, Human
cucagagaggcaguggaaguca

SEQ ID NO: 857541 - RNA, 22 nt, Human
agugcuuuaccuagauaauguu

SEQ ID NO: 857542 - RNA, 22 nt, Human
uugcccagaguccacagcguac

SEQ ID NO: 857543 - RNA, 22 nt, Human
aggggcucaaagugugcaggga

SEQ ID NO: 857544 - RNA, 22 nt, Human
ucaucuugcugccauugcuuua

SEQ ID NO: 857545 - RNA, 23 nt, Human
aaugauuucaugaugauagcagc

SEQ ID NO: 857546 - RNA, 20 nt, Human
ucucagcauaagaacccuuc

SEQ ID NO: 857547 - RNA, 22 nt, Human
cauuuauucauuugcuagggcu

SEQ ID NO: 857548 - RNA, 22 nt, Human
auuuccaggagaaaggauuuua

SEQ ID NO: 857549 - RNA, 22 nt, Human
cugcugugauugggagaaaccg

SEQ ID NO: 857550 - RNA, 22 nt, Human
uuuaggcagcacgggcagcccu

SEQ ID NO: 857551 - RNA, 19 nt, Human
ugcaagcuuuuucuuguua

SEQ ID NO: 857552 - RNA, 22 nt, Human
ucagggugaaccaggcaggaau

SEQ ID NO: 857553 - RNA, 22 nt, Human
aaagcagguugcaauuacagug

SEQ ID NO: 857554 - RNA, 22 nt, Human
uaagaaucaguagauauagauu

SEQ ID NO: 857555 - RNA, 22 nt, Human
gcccaggauggagaauaguggu

SEQ ID NO: 857556 - RNA, 22 nt, Human
cuggcuuucuguuauaaagaca

SEQ ID NO: 857557 - RNA, 22 nt, Human
agauggagaaugacaauuaagg

SEQ ID NO: 857558 - RNA, 22 nt, Human
gaacccaggcuuuugaggcugu

SEQ ID NO: 857559 - RNA, 22 nt, Human
accaggagguguuugcucaagu

SEQ ID NO: 857560 - RNA, 22 nt, Human
uuucauaaggguuucuagacuu

SEQ ID NO: 857561 - RNA, 22 nt, Human
gugguaaucggauucuuaccgg

SEQ ID NO: 857562 - RNA, 22 nt, Human
uuccugggacuggagcagccca

SEQ ID NO: 857563 - RNA, 22 nt, Human
cauucauuagaauagauaugua

SEQ ID NO: 857564 - RNA, 22 nt, Human
uauaaaauggcaucagcuccaa

SEQ ID NO: 857565 - RNA, 22 nt, Human
uucaggauggcggauguugggg

SEQ ID NO: 857566 - RNA, 22 nt, Human
uacugaaaguggucaacagugg

SEQ ID NO: 857567 - RNA, 22 nt, Human
cauuucaauacuaucugagaau

SEQ ID NO: 857568 - RNA, 22 nt, Human
cuuuggcagccucugcuauuga

SEQ ID NO: 857569 - RNA, 21 nt, Human
auacacauacacauaaaugug

SEQ ID NO: 857570 - RNA, 22 nt, Human
uucaggaucaaguugccaguag

SEQ ID NO: 857571 - RNA, 22 nt, Human
aauuucaauuacuuuugcacca

SEQ ID NO: 857572 - RNA, 22 nt, Human
gaggagagggcugcgggcccac

SEQ ID NO: 857573 - RNA, 22 nt, Human
aggcuagcaaugggagaugagu

SEQ ID NO: 857574 - RNA, 22 nt, Human
ugaaggcccagccacagaaugg

SEQ ID NO: 857575 - RNA, 22 nt, Human
agcccaggaaucugcaucuuga

SEQ ID NO: 857576 - RNA, 19 nt, Human
aucugccuguuaucacaua

SEQ ID NO: 857577 - RNA, 22 nt, Human
guucuucagaggggaaagaacc

SEQ ID NO: 857578 - RNA, 22 nt, Human
uuuaggcagucauugaacaagu

SEQ ID NO: 857579 - RNA, 22 nt, Human
ggcagucuuaucagcauuggac

SEQ ID NO: 857580 - RNA, 22 nt, Human
cugagccagcuggcaugugcua

SEQ ID NO: 857581 - RNA, 22 nt, Human
uuugaaguucccccauaucaga

SEQ ID NO: 857582 - RNA, 22 nt, Human
caaguccuuagaugguucuuug

SEQ ID NO: 857583 - RNA, 22 nt, Human
aacacuuugggcauggccuucc

SEQ ID NO: 857584 - RNA, 22 nt, Human
uaaauuaugucacaugacucug

SEQ ID NO: 857585 - RNA, 23 nt, Human
uuacagaaaguaugcuuuuguuu

SEQ ID NO: 857586 - RNA, 22 nt, Human
ucucaggacuuugggaagcuca

SEQ ID NO: 857587 - RNA, 22 nt, Human
ucuuccucuagaucugaggccc

SEQ ID NO: 857588 - RNA, 22 nt, Human
aaaggccacacugcucuuucuc

SEQ ID NO: 857589 - RNA, 22 nt, Human
aaauuauuaugccccucuauaa

SEQ ID NO: 857590 - RNA, 22 nt, Human
auacauaauuacuuccgauguu

SEQ ID NO: 857591 - RNA, 22 nt, Human
agcaccuugcucuuggccuucc

SEQ ID NO: 857592 - RNA, 22 nt, Human
gauuucuuuagguguaauagug

SEQ ID NO: 857593 - RNA, 16 nt, Human
aaggagggaagagaau

SEQ ID NO: 857594 - RNA, 22 nt, Human
gccaggaggcugcuguguaggc

SEQ ID NO: 857595 - RNA, 22 nt, Human
uuacagaacugcccuaguuggc

SEQ ID NO: 857596 - RNA, 20 nt, Human
ugaaggccauuuguuccaga

SEQ ID NO: 857597 - RNA, 22 nt, Human
cagcugcuguuacugcuuauua

SEQ ID NO: 857598 - RNA, 20 nt, Human
gagauggacagaugaagggg

SEQ ID NO: 857599 - RNA, 22 nt, Human
cucacuguccaacaggcuuuac

SEQ ID NO: 857600 - RNA, 22 nt, Human
gugaauaacuuucuauguuaau

SEQ ID NO: 857601 - RNA, 22 nt, Human
aaagaaucacauccuucagcaa

SEQ ID NO: 857602 - RNA, 22 nt, Human
uagucaccugugagcugcguag

SEQ ID NO: 857603 - RNA, 21 nt, Human
cauuucaaagagcuggaaauc

SEQ ID NO: 857604 - RNA, 22 nt, Human
ugaauaaucauguccauagugu

SEQ ID NO: 857605 - RNA, 22 nt, Human
aauuccaaauguuuucaaucca

SEQ ID NO: 857606 - RNA, 22 nt, Human
uaucuguuggcuccuaguugua

SEQ ID NO: 857607 - RNA, 19 nt, Human
agauuuaccucauauaguu

SEQ ID NO: 857608 - RNA, 22 nt, Human
augguuuacaauguuuucaguu

SEQ ID NO: 857609 - RNA, 22 nt, Human
acaggagaauuaucuggaacaa

SEQ ID NO: 857610 - RNA, 22 nt, Human
uuacuuugcuuucucauuacag

SEQ ID NO: 857611 - RNA, 22 nt, Human
ccaaaauuauuacauuuguagg

SEQ ID NO: 857612 - RNA, 22 nt, Human
cccaggagaauauuuuuggguc

SEQ ID NO: 857613 - RNA, 22 nt, Human
uagugcuuggcccuaccagaua

SEQ ID NO: 857614 - RNA, 19 nt, Human
ccaggagagcuuggagaag

SEQ ID NO: 857615 - RNA, 22 nt, Human
ggaggaggggcgcuuugucuau

SEQ ID NO: 857616 - RNA, 22 nt, Human
uuuuuauaugaaggauagugcg

SEQ ID NO: 857617 - RNA, 22 nt, Human
uguucuuuggcuucacagcucu

SEQ ID NO: 857618 - RNA, 22 nt, Human
uauauacuuucuuccuggguag

SEQ ID NO: 857619 - RNA, 22 nt, Human
ggaggggaugguuugacccugg

SEQ ID NO: 857620 - RNA, 20 nt, Human
guugaaaguaauaugaugcu

SEQ ID NO: 857621 - RNA, 22 nt, Human
ucauaaaaauagacucuaaagu

SEQ ID NO: 857622 - RNA, 22 nt, Human
aggaagcugccugggaugggaa

SEQ ID NO: 857623 - RNA, 22 nt, Human
ugaggcagguaagcaaguuuug

SEQ ID NO: 857624 - RNA, 22 nt, Human
uucagaaacagagugagugagu

SEQ ID NO: 857625 - RNA, 22 nt, Human
ucagucuucccuccagugcaac

SEQ ID NO: 857626 - RNA, 19 nt, Human
uauuucaaagugccgucua

SEQ ID NO: 857627 - RNA, 22 nt, Human
ccuggaucccgauggcugugag

SEQ ID NO: 857628 - RNA, 22 nt, Human
agcacaauagagcaguuaaaaa

SEQ ID NO: 857629 - RNA, 22 nt, Human
caauuuuuaaacuaugaaguug

SEQ ID NO: 857630 - RNA, 22 nt, Human
gucuuuaugguaugaaaacuga

SEQ ID NO: 857631 - RNA, 22 nt, Human
guucuaauauuuuaaaagccaa

SEQ ID NO: 857632 - RNA, 22 nt, Human
uggagacugugcuaagggaguu

SEQ ID NO: 857633 - RNA, 22 nt, Human
aaucagaaagaucuugaugaga

SEQ ID NO: 857634 - RNA, 22 nt, Human
ggcagaggagcuggaaacaugg

SEQ ID NO: 857635 - RNA, 22 nt, Human
guggaauguccuugaucauaag

SEQ ID NO: 857636 - RNA, 22 nt, Human
ugcauggaggaagaugaaugca

SEQ ID NO: 857637 - RNA, 22 nt, Human
ggccagaggugguacauagcuu

SEQ ID NO: 857638 - RNA, 22 nt, Human
gugcagcugcaggagucagguc

SEQ ID NO: 857639 - RNA, 22 nt, Human
cuuccuucugaagcauagaagc

SEQ ID NO: 857640 - RNA, 22 nt, Human
uacagauauagagauuuauaga

SEQ ID NO: 857641 - RNA, 22 nt, Human
uugaaagaagaagcugcgaugu

SEQ ID NO: 857642 - RNA, 22 nt, Human
ugaaaugacaaagguuuuucuu

SEQ ID NO: 857643 - RNA, 21 nt, Human
ccugcugugaucuuagugagu

SEQ ID NO: 857644 - RNA, 22 nt, Human
gaggcacugcaguacagugacu

SEQ ID NO: 857645 - RNA, 22 nt, Human
aucauucugauggucaaugcua

SEQ ID NO: 857646 - RNA, 22 nt, Human
cauagaaacugagacaaggauu

SEQ ID NO: 857647 - RNA, 22 nt, Human
cuugcugggguaagucugugcu

SEQ ID NO: 857648 - RNA, 22 nt, Human
acuuggcaaguaucuauaaagu

SEQ ID NO: 857649 - RNA, 22 nt, Human
agaccaagaaaggaugaggauc

SEQ ID NO: 857650 - RNA, 21 nt, Human
ucaggagagcccaucuacaaa

SEQ ID NO: 857651 - RNA, 22 nt, Human
ucaauucaacacaugcacauug

SEQ ID NO: 857652 - RNA, 22 nt, Human
uuugaaagaauuuauguacuuu

SEQ ID NO: 857653 - RNA, 22 nt, Human
gaucuucucuuuaguagaaaca

SEQ ID NO: 857654 - RNA, 22 nt, Human
cugcugugcaacauugcaccua

SEQ ID NO: 857655 - RNA, 22 nt, Human
gauuucaaccuaacaguaugac

SEQ ID NO: 857656 - RNA, 22 nt, Human
ccaggaaauagugcugugaucu

SEQ ID NO: 857657 - RNA, 22 nt, Human
uggagacucugcaucugugaca

SEQ ID NO: 857658 - RNA, 22 nt, Human
caacuuuaugauugguuuguca

SEQ ID NO: 857659 - RNA, 22 nt, Human
caaggccacugcucagguuucc

SEQ ID NO: 857660 - RNA, 21 nt, Human
ugaaaugagaaugcugagcac

SEQ ID NO: 857661 - RNA, 22 nt, Human
uuauauuaguuagacuugcugu

SEQ ID NO: 857662 - RNA, 22 nt, Human
uugaacuguaagcaugucugcc

SEQ ID NO: 857663 - RNA, 22 nt, Human
ucagccaggccaggcauucaca

SEQ ID NO: 857664 - RNA, 18 nt, Human
aagucaccccugcucccu

SEQ ID NO: 857665 - RNA, 22 nt, Human
gagguagccacagauagagacu

SEQ ID NO: 857666 - RNA, 22 nt, Human
cauuuguuaauuacuauuaucu

SEQ ID NO: 857667 - RNA, 22 nt, Human
caggagagauaugaguccccac

SEQ ID NO: 857668 - RNA, 22 nt, Human
cauuugcagagggugacacucu

SEQ ID NO: 857669 - RNA, 22 nt, Human
uccaggaggcagggcugugccc

SEQ ID NO: 857670 - RNA, 22 nt, Human
uuagaaagaacuuuagauauca

SEQ ID NO: 857671 - RNA, 22 nt, Human
ggagcaggagucucuugaauuu

SEQ ID NO: 857672 - RNA, 21 nt, Human
ucuuccuccacagcgugccac

SEQ ID NO: 857673 - RNA, 22 nt, Human
accaggaguaacagugaguggu

SEQ ID NO: 857674 - RNA, 22 nt, Human
ucaauaaauagcuuggcucagc

SEQ ID NO: 857675 - RNA, 22 nt, Human
aaaggccaagcaugagguggac

SEQ ID NO: 857676 - RNA, 22 nt, Human
augaggcaaucaugguccaguu

SEQ ID NO: 857677 - RNA, 22 nt, Human
auagacauuuugcauucaagca

SEQ ID NO: 857678 - RNA, 22 nt, Human
caguaaaugcagauauagauac

SEQ ID NO: 857679 - RNA, 22 nt, Human
cuaugacacaggccauuauaua

SEQ ID NO: 857680 - RNA, 22 nt, Human
ugacuucaagguucagcaccuu

SEQ ID NO: 857681 - RNA, 22 nt, Human
caaguccuuuucuuggcucagg

SEQ ID NO: 857682 - RNA, 22 nt, Human
uucuuuugggaauuacguaugc

SEQ ID NO: 857683 - RNA, 22 nt, Human
aaaggccaccaacaugaagcau

SEQ ID NO: 857684 - RNA, 22 nt, Human
caaguccuccaugugacuaggu

SEQ ID NO: 857685 - RNA, 22 nt, Human
gggaggugauuaggaccaugua

SEQ ID NO: 857686 - RNA, 22 nt, Human
uugcaggauuuuagagaugaca

SEQ ID NO: 857687 - RNA, 22 nt, Human
ugagacaguuuuucuauuucca

SEQ ID NO: 857688 - RNA, 22 nt, Human
augaaacaugcuuuguggauga

SEQ ID NO: 857689 - RNA, 21 nt, Human
ugaaacaaucagacagagucu

SEQ ID NO: 857690 - RNA, 22 nt, Human
cccaggagagggaaccaaaugu

SEQ ID NO: 857691 - RNA, 22 nt, Human
uuauuucauguaaaauuuaugu

SEQ ID NO: 857692 - RNA, 22 nt, Human
cugcugugagugguucuugccu

SEQ ID NO: 857693 - RNA, 22 nt, Human
gggcagcuagcccucuagccca

SEQ ID NO: 857694 - RNA, 22 nt, Human
cagauggaacacagaaaggaga

SEQ ID NO: 857695 - RNA, 22 nt, Human
cugccaggcagcagagggagaa

SEQ ID NO: 857696 - RNA, 22 nt, Human
aaguguagauuauggagugucu

SEQ ID NO: 857697 - RNA, 22 nt, Human
ucagugcacagagauuuuuguu

SEQ ID NO: 857698 - RNA, 22 nt, Human
cccuggaggcuggaggcaguag

SEQ ID NO: 857699 - RNA, 22 nt, Human
ccaggagaugauguuggggauu

SEQ ID NO: 857700 - RNA, 22 nt, Human
uacacacaugcauuugccuuau

SEQ ID NO: 857701 - RNA, 20 nt, Human
ucucuucuggggagauaaaa

SEQ ID NO: 857702 - RNA, 22 nt, Human
aaggaaccauuugugugcaugg

SEQ ID NO: 857703 - RNA, 22 nt, Human
caaguccucgcuucuagcugug

SEQ ID NO: 857704 - RNA, 22 nt, Human
aucuccaggcauuucaagagac

SEQ ID NO: 857705 - RNA, 22 nt, Human
caaggccaguuucuccuaguca

SEQ ID NO: 857706 - RNA, 20 nt, Human
agaggaggauuauuuuauuc

SEQ ID NO: 857707 - RNA, 22 nt, Human
auguucuuccaaaucuguaaca

SEQ ID NO: 857708 - RNA, 23 nt, Human
ucagucuucccugucaguaauag

SEQ ID NO: 857709 - RNA, 22 nt, Human
agaagugagugugacucagcag

SEQ ID NO: 857710 - RNA, 19 nt, Human
ugcugcuguccuugcaggg

SEQ ID NO: 857711 - RNA, 22 nt, Human
uuccuuagggucagccagaucu

SEQ ID NO: 857712 - RNA, 22 nt, Human
agccaacuaggagauuaaggua

SEQ ID NO: 857713 - RNA, 22 nt, Human
uccaggaggcucugguugacgu

SEQ ID NO: 857714 - RNA, 22 nt, Human
ugcaggaaucagaggggaagcg

SEQ ID NO: 857715 - RNA, 22 nt, Human
ugucucugaggugagggucagc

SEQ ID NO: 857716 - RNA, 23 nt, Human
augguuuaugucacacuuuugau

SEQ ID NO: 857717 - RNA, 22 nt, Human
ugcauaauacguuuccuauaac

SEQ ID NO: 857718 - RNA, 22 nt, Human
uccaggagucuagccucaggcc

SEQ ID NO: 857719 - RNA, 22 nt, Human
aauaaaaugaacugguagaguu

SEQ ID NO: 857720 - RNA, 22 nt, Human
gcaggaagcauagaagaaugcc

SEQ ID NO: 857721 - RNA, 19 nt, Human
agacagagcucaguggguu

SEQ ID NO: 857722 - RNA, 22 nt, Human
gaggcugcuuugaugacaggag

SEQ ID NO: 857723 - RNA, 22 nt, Human
ucaguaaaugagcaaaaauuuc

SEQ ID NO: 857724 - RNA, 18 nt, Human
agggaguuuuagggaagg

SEQ ID NO: 857725 - RNA, 22 nt, Human
gggcagcugccacuccgcuugc

SEQ ID NO: 857726 - RNA, 22 nt, Human
ucacaguaucacacaaggauua

SEQ ID NO: 857727 - RNA, 22 nt, Human
uggaguucucaggugagggcuu

SEQ ID NO: 857728 - RNA, 22 nt, Human
cuuuccaagaaugcagauaccu

SEQ ID NO: 857729 - RNA, 22 nt, Human
aguccuuugggaaaaaugacua

SEQ ID NO: 857730 - RNA, 22 nt, Human
ucugcaggcuuauaggaugggu

SEQ ID NO: 857731 - RNA, 22 nt, Human
aggauuuaggagcuggcuaacg

SEQ ID NO: 857732 - RNA, 22 nt, Human
gucaggauuauaauccccaugg

SEQ ID NO: 857733 - RNA, 22 nt, Human
uuucuagucucgaucucuuaau

SEQ ID NO: 857734 - RNA, 22 nt, Human
gauggcagcauauugacagcau

SEQ ID NO: 857735 - RNA, 22 nt, Human
uaggcaacaugucgaauacugu

SEQ ID NO: 857736 - RNA, 22 nt, Human
cuauuucaaggcccagauauga

SEQ ID NO: 857737 - RNA, 22 nt, Human
agggugguucuuuuaguggaag

SEQ ID NO: 857738 - RNA, 22 nt, Human
guugaaugaaucauucuaugua

SEQ ID NO: 857739 - RNA, 22 nt, Human
aagggcagagggaaucccacau

SEQ ID NO: 857740 - RNA, 22 nt, Human
aauccugugugacucuggggag

SEQ ID NO: 857741 - RNA, 21 nt, Human
uucuucuuggacuguuuuggc

SEQ ID NO: 857742 - RNA, 22 nt, Human
uugcagcuucuaccacuguuuc

SEQ ID NO: 857743 - RNA, 22 nt, Human
aagagagggguugcauggaaau

SEQ ID NO: 857744 - RNA, 22 nt, Human
ggaccuggcaauuugcaucucu

SEQ ID NO: 857745 - RNA, 22 nt, Human
gaggacaggagacucacuguuu

SEQ ID NO: 857746 - RNA, 22 nt, Human
cagaauuuagcacaauguaugg

SEQ ID NO: 857747 - RNA, 22 nt, Human
aaguccuuuauccuaaaagguc

SEQ ID NO: 857748 - RNA, 22 nt, Human
auucuuauuuaaauagagucug

SEQ ID NO: 857749 - RNA, 22 nt, Human
ugagccugguugcagugucugg

SEQ ID NO: 857750 - RNA, 22 nt, Human
uauuccaaaauaguuaagcacu

SEQ ID NO: 857751 - RNA, 22 nt, Human
aauuucaaguggcaucuuugau

SEQ ID NO: 857752 - RNA, 22 nt, Human
ggccagcucuuguccacggagg

SEQ ID NO: 857753 - RNA, 22 nt, Human
aaucagucucauuuagcaggga

SEQ ID NO: 857754 - RNA, 22 nt, Human
uuugcaauuugugcugcaaaug

SEQ ID NO: 857755 - RNA, 22 nt, Human
ggcagggaagcuggcaucacgg

SEQ ID NO: 857756 - RNA, 22 nt, Human
ucuauacaaguuucacuuugac

SEQ ID NO: 857757 - RNA, 22 nt, Human
uggcuucuugggaugggucauu

SEQ ID NO: 857758 - RNA, 19 nt, Human
aucugccuuagugcugcug

SEQ ID NO: 857759 - RNA, 22 nt, Human
aaauacugucucugagagagcc

SEQ ID NO: 857760 - RNA, 22 nt, Human
uuucuuauacuauauugucauc

SEQ ID NO: 857761 - RNA, 22 nt, Human
uuucaaaauuuugcagugguaa

SEQ ID NO: 857762 - RNA, 22 nt, Human
ugaauaauuaugggaguccuaa

SEQ ID NO: 857763 - RNA, 22 nt, Human
aggagagaauguuccaggcuug

SEQ ID NO: 857764 - RNA, 22 nt, Human
ucacaaaugaggaaaucgagca

SEQ ID NO: 857765 - RNA, 22 nt, Human
uuuauuguuuagaagggggcug

SEQ ID NO: 857766 - RNA, 22 nt, Human
agcaccaugaccuugccauuga

SEQ ID NO: 857767 - RNA, 22 nt, Human
aauuuccagaccccauccacag

SEQ ID NO: 857768 - RNA, 22 nt, Human
agaaaauauucauugagaggcu

SEQ ID NO: 857769 - RNA, 22 nt, Human
aggcuucugugagcucauacaa

SEQ ID NO: 857770 - RNA, 22 nt, Human
agcugcccagauaggaggaggc

SEQ ID NO: 857771 - RNA, 22 nt, Human
uuuauuaugauggacaccuucg

SEQ ID NO: 857772 - RNA, 22 nt, Human
caggcagggagcuggaaaggau

SEQ ID NO: 857773 - RNA, 22 nt, Human
aggagaaggaagugcaucacua

SEQ ID NO: 857774 - RNA, 22 nt, Human
uuuauccagaaucaggauuuuu

SEQ ID NO: 857775 - RNA, 21 nt, Human
uucuccccagcgaauccucgg

SEQ ID NO: 857776 - RNA, 22 nt, Human
ggaggaggggugacugaaugcu

SEQ ID NO: 857777 - RNA, 22 nt, Human
ugaucugaaggacaugggaccc

SEQ ID NO: 857778 - RNA, 22 nt, Human
uucagaaguagcuaagcaguca

SEQ ID NO: 857779 - RNA, 22 nt, Human
uugauuucuauucagauguaga

SEQ ID NO: 857780 - RNA, 22 nt, Human
aucacaaaggguuuucucugag

SEQ ID NO: 857781 - RNA, 22 nt, Human
cuucucagcauuuugucagucu

SEQ ID NO: 857782 - RNA, 22 nt, Human
ucucucuugucaccccaucugc

SEQ ID NO: 857783 - RNA, 22 nt, Human
auugaaagauauacuguucuca

SEQ ID NO: 857784 - RNA, 22 nt, Human
aaaagucugcucucauuucaga

SEQ ID NO: 857785 - RNA, 22 nt, Human
ccagugcuuccaggaauacggu

SEQ ID NO: 857786 - RNA, 22 nt, Human
cuuaagaugaggucaugcuaua

SEQ ID NO: 857787 - RNA, 17 nt, Human
gucauucucagaaaaug

SEQ ID NO: 857788 - RNA, 21 nt, Human
uucaaagacuugaugcugacc

SEQ ID NO: 857789 - RNA, 22 nt, Human
caggcagcagaggaguguggga

SEQ ID NO: 857790 - RNA, 18 nt, Human
cugcccagagcauuucau

SEQ ID NO: 857791 - RNA, 22 nt, Human
aaaugaaaugagugccuggagg

SEQ ID NO: 857792 - RNA, 22 nt, Human
caugcuuauucauucugcuaac

SEQ ID NO: 857793 - RNA, 22 nt, Human
gccugcagaacugugaggcaau

SEQ ID NO: 857794 - RNA, 22 nt, Human
gaagcagcgaaguggaagggac

SEQ ID NO: 857795 - RNA, 22 nt, Human
gaggggaaaguucugcacaagg

SEQ ID NO: 857796 - RNA, 22 nt, Human
cccaaggaagacgcuugugaua

SEQ ID NO: 857797 - RNA, 22 nt, Human
ucacagaagagauauugacaga

SEQ ID NO: 857798 - RNA, 22 nt, Human
gauuuucauuugcacucuagaa

SEQ ID NO: 857799 - RNA, 22 nt, Human
gguacaaugguucauuuuaugu

SEQ ID NO: 857800 - RNA, 22 nt, Human
agacucaagacugcagaagacg

SEQ ID NO: 857801 - RNA, 22 nt, Human
aggcagagcuggguuuugaaau

SEQ ID NO: 857802 - RNA, 22 nt, Human
cauggcuuuguucuguuagaug

SEQ ID NO: 857803 - RNA, 22 nt, Human
aagaaaucagaaaagcauucgu

SEQ ID NO: 857804 - RNA, 21 nt, Human
gauuuuaaagagacugccaca

SEQ ID NO: 857805 - RNA, 22 nt, Human
aaggcagcaagaauuccagguu

SEQ ID NO: 857806 - RNA, 19 nt, Human
caggaaugagguaauggcu

SEQ ID NO: 857807 - RNA, 22 nt, Human
uucucagagcucacuguaguaa

SEQ ID NO: 857808 - RNA, 22 nt, Human
aaucagugguucccagcccagg

SEQ ID NO: 857809 - RNA, 22 nt, Human
caucacccggaacugugucugc

SEQ ID NO: 857810 - RNA, 20 nt, Human
augugucuguaaacaacucu

SEQ ID NO: 857811 - RNA, 22 nt, Human
uuugaaaggagcuuuauccaga

SEQ ID NO: 857812 - RNA, 22 nt, Human
aaucagaauuuauugaaucuuu

SEQ ID NO: 857813 - RNA, 22 nt, Human
uguuguuuucucauggagaaua

SEQ ID NO: 857814 - RNA, 22 nt, Human
ucaacugcaaguuugcuuaguu

SEQ ID NO: 857815 - RNA, 22 nt, Human
gcaaauauucaagacuuuucca

SEQ ID NO: 857816 - RNA, 22 nt, Human
guuaaagaagaauaguuccuuu

SEQ ID NO: 857817 - RNA, 22 nt, Human
gaucugaagagcaaugaaauau

SEQ ID NO: 857818 - RNA, 22 nt, Human
ucagagaguuggaaagaauuaa

SEQ ID NO: 857819 - RNA, 22 nt, Human
cagagccauuauggagacuugc

SEQ ID NO: 857820 - RNA, 22 nt, Human
uguacaaucugaugauguaugg

SEQ ID NO: 857821 - RNA, 22 nt, Human
augcaaaauaaggcagaaacau

SEQ ID NO: 857822 - RNA, 22 nt, Human
cccaggaauuggaggcugcagu

SEQ ID NO: 857823 - RNA, 22 nt, Human
uuucagaaagcugaacauauga

SEQ ID NO: 857824 - RNA, 22 nt, Human
uuuccaaacccagcgagcuaca

SEQ ID NO: 857825 - RNA, 22 nt, Human
uggcaguccccugugccuggaa

SEQ ID NO: 857826 - RNA, 17 nt, Human
ugaaaucagcacccagg

SEQ ID NO: 857827 - RNA, 20 nt, Human
uacaauacacaugcauauga

SEQ ID NO: 857828 - RNA, 22 nt, Human
uuuaggcauugaauuagaauag

SEQ ID NO: 857829 - RNA, 22 nt, Human
ucauuucuccgaccugcugucc

SEQ ID NO: 857830 - RNA, 19 nt, Human
ucccaggaaccuuuuauuu

SEQ ID NO: 857831 - RNA, 22 nt, Human
uugcacuaggaaaaggcagcca

SEQ ID NO: 857832 - RNA, 22 nt, Human
ccaauacacuuuauagaagaaa

SEQ ID NO: 857833 - RNA, 20 nt, Human
agaaaucagaccacacacua

SEQ ID NO: 857834 - RNA, 22 nt, Human
gaggagcuggcugucgggaggc

SEQ ID NO: 857835 - RNA, 22 nt, Human
cccuugcacauuugucuuuaau

SEQ ID NO: 857836 - RNA, 22 nt, Human
ucuggaucucccucauccuggg

SEQ ID NO: 857837 - RNA, 22 nt, Human
ucaaguuuaauugagauguuua

SEQ ID NO: 857838 - RNA, 22 nt, Human
cacaaaugguuguagacauuaa

SEQ ID NO: 857839 - RNA, 22 nt, Human
aggcuggagggcaauggcaaga

SEQ ID NO: 857840 - RNA, 22 nt, Human
cagaggcagccgggggagaacg

SEQ ID NO: 857841 - RNA, 22 nt, Human
gcccaggaaauaaaagugggcu

SEQ ID NO: 857842 - RNA, 22 nt, Human
ugaagaaucagauuggccugcg

SEQ ID NO: 857843 - RNA, 22 nt, Human
acuggaucagaaucugauuuuu

SEQ ID NO: 857844 - RNA, 22 nt, Human
aacauuuaugauugagguaaau

SEQ ID NO: 857845 - RNA, 19 nt, Human
uucuccagccugaccugag

SEQ ID NO: 857846 - RNA, 22 nt, Human
uucuucucggcugucagauagu

SEQ ID NO: 857847 - RNA, 22 nt, Human
cgccucagccguggucaucuuc

SEQ ID NO: 857848 - RNA, 22 nt, Human
guccucuggaagaugaguucuu

SEQ ID NO: 857849 - RNA, 22 nt, Human
ugcuagugcaggguuuucaguu

SEQ ID NO: 857850 - RNA, 22 nt, Human
augcugugucuagcaggaacac

SEQ ID NO: 857851 - RNA, 22 nt, Human
auuaucuauguagaaugauuuu

SEQ ID NO: 857852 - RNA, 22 nt, Human
gccagagguucaacaacugucu

SEQ ID NO: 857853 - RNA, 21 nt, Human
ugaaagaaggugcagucugaa

SEQ ID NO: 857854 - RNA, 22 nt, Human
uggcauuugggcuggcuuuucu

SEQ ID NO: 857855 - RNA, 22 nt, Human
caagagagaugcagcucacuca

SEQ ID NO: 857856 - RNA, 20 nt, Human
uugauucaagggcugaugga

SEQ ID NO: 857857 - RNA, 22 nt, Human
aguauuuagcauagugguuagu

SEQ ID NO: 857858 - RNA, 22 nt, Human
cauuucacaaauggccacauca

SEQ ID NO: 857859 - RNA, 22 nt, Human
acauaccauacauggugagaug

SEQ ID NO: 857860 - RNA, 19 nt, Human
ggcagucucaagcagcaca

SEQ ID NO: 857861 - RNA, 22 nt, Human
aggagagggguaggauuaauuu

SEQ ID NO: 857862 - RNA, 22 nt, Human
uaauuguagcuuuguaaucagc

SEQ ID NO: 857863 - RNA, 22 nt, Human
ccuggagauuucuucaagcuuu

SEQ ID NO: 857864 - RNA, 22 nt, Human
ugaaugaguuuggcugcuguuc

SEQ ID NO: 857865 - RNA, 22 nt, Human
cucuaacaccacagugugguuu

SEQ ID NO: 857866 - RNA, 22 nt, Human
ugaggcagauauuuauuggguu

SEQ ID NO: 857867 - RNA, 20 nt, Human
ucaggaugugcugagugaag

SEQ ID NO: 857868 - RNA, 23 nt, Human
acacauuuuucccguucugaggu

SEQ ID NO: 857869 - RNA, 18 nt, Human
aauuuccauaugaauugc

SEQ ID NO: 857870 - RNA, 18 nt, Human
ucaggagacacagacgca

SEQ ID NO: 857871 - RNA, 22 nt, Human
acuuaaaaagaaucuuuucacg

SEQ ID NO: 857872 - RNA, 22 nt, Human
uuaggaguccagaugucuuggg

SEQ ID NO: 857873 - RNA, 22 nt, Human
auuccaaaaggauguuagaaug

SEQ ID NO: 857874 - RNA, 22 nt, Human
gaauuucagagguaacaucauc

SEQ ID NO: 857875 - RNA, 22 nt, Human
agcugcccuuaauaggcauuca

SEQ ID NO: 857876 - RNA, 22 nt, Human
ucucaggagccacagcgggagu

SEQ ID NO: 857877 - RNA, 22 nt, Human
aguaaaucagaccucauuaugu

SEQ ID NO: 857878 - RNA, 23 nt, Human
uggagcugacagucagagggagg

SEQ ID NO: 857879 - RNA, 21 nt, Human
uccaggaguggcugggcaggg

SEQ ID NO: 857880 - RNA, 22 nt, Human
ugcugaugaguccuucuaucgc

SEQ ID NO: 857881 - RNA, 22 nt, Human
ugacauaauaauccaaacauac

SEQ ID NO: 857882 - RNA, 22 nt, Human
aggagcagaacugauucugacu

SEQ ID NO: 857883 - RNA, 19 nt, Human
caagugaagccugggaugg

SEQ ID NO: 857884 - RNA, 22 nt, Human
ugaggcaggacuugcauaaagu

SEQ ID NO: 857885 - RNA, 22 nt, Human
ggagauggaauagauucugacu

SEQ ID NO: 857886 - RNA, 18 nt, Human
ggucuuuaggucaguguc

SEQ ID NO: 857887 - RNA, 22 nt, Human
uacuuucuguccuucuguuaaa

SEQ ID NO: 857888 - RNA, 22 nt, Human
gaggcagcugggcuggugguuu

SEQ ID NO: 857889 - RNA, 22 nt, Human
cuuuacauaaggauaaaccugg

SEQ ID NO: 857890 - RNA, 22 nt, Human
cccaggagcuucucucugccuc

SEQ ID NO: 857891 - RNA, 22 nt, Human
uucuucuugucugcccucacau

SEQ ID NO: 857892 - RNA, 22 nt, Human
aguggcagagccaaguagagcc

SEQ ID NO: 857893 - RNA, 22 nt, Human
aggcagcguagcaaggcuagua

SEQ ID NO: 857894 - RNA, 22 nt, Human
uucugagacaauugagagucua

SEQ ID NO: 857895 - RNA, 22 nt, Human
agaucugaaucucauccgagga

SEQ ID NO: 857896 - RNA, 22 nt, Human
ggagaggacauggcucccacag

SEQ ID NO: 857897 - RNA, 22 nt, Human
uuucaacuagccccuaaguccu

SEQ ID NO: 857898 - RNA, 22 nt, Human
aucaggaucagggcuagcagag

SEQ ID NO: 857899 - RNA, 22 nt, Human
ugccuguguccccuucuuggca

SEQ ID NO: 857900 - RNA, 22 nt, Human
uuuaggcauacuuuugggagaa

SEQ ID NO: 857901 - RNA, 22 nt, Human
acagauguacacucauauauaa

SEQ ID NO: 857902 - RNA, 21 nt, Human
aggauuuacuauuaacugugu

SEQ ID NO: 857903 - RNA, 22 nt, Human
caguccuuauuccuauauuccu

SEQ ID NO: 857904 - RNA, 22 nt, Human
cauugcuuccuaugucccuucu

SEQ ID NO: 857905 - RNA, 18 nt, Human
ugcuggguaacuguaugg

SEQ ID NO: 857906 - RNA, 22 nt, Human
cagcugccuucugcgggaaguc

SEQ ID NO: 857907 - RNA, 22 nt, Human
uuagccaugugggaaaaacagc

SEQ ID NO: 857908 - RNA, 22 nt, Human
uucuuuuacauuaagauuucag

SEQ ID NO: 857909 - RNA, 22 nt, Human
caauauauaaugaguacuuucc

SEQ ID NO: 857910 - RNA, 19 nt, Human
uucccaggaaaggggugca

SEQ ID NO: 857911 - RNA, 22 nt, Human
uuuccaaaggaggaaccaguuu

SEQ ID NO: 857912 - RNA, 22 nt, Human
ggccaggaagggaagaucagca

SEQ ID NO: 857913 - RNA, 21 nt, Human
uuugaaagcccuauguuuuca

SEQ ID NO: 857914 - RNA, 22 nt, Human
gauuucuugauaaguaguguga

SEQ ID NO: 857915 - RNA, 22 nt, Human
aauuuccaaauuucugucacac

SEQ ID NO: 857916 - RNA, 22 nt, Human
aaaagccaugcauaccuaagag

SEQ ID NO: 857917 - RNA, 22 nt, Human
auucugauaucuuauucuagcu

SEQ ID NO: 857918 - RNA, 22 nt, Human
uucucagagugaccaagucuuu

SEQ ID NO: 857919 - RNA, 22 nt, Human
uggaaauguauuugggcaugcc

SEQ ID NO: 857920 - RNA, 22 nt, Human
agauggaguuaguaccagaguc

SEQ ID NO: 857921 - RNA, 22 nt, Human
uccaggaguccugggagugauu

SEQ ID NO: 857922 - RNA, 22 nt, Human
accaggagucuagccuagucaa

SEQ ID NO: 857923 - RNA, 22 nt, Human
agaauuucuggaagauugcaag

SEQ ID NO: 857924 - RNA, 22 nt, Human
augcuguguggccaccuccaug

SEQ ID NO: 857925 - RNA, 22 nt, Human
cuguaguugaugauuucugaua

SEQ ID NO: 857926 - RNA, 22 nt, Human
gggagacacgcugcaggcauaa

SEQ ID NO: 857927 - RNA, 22 nt, Human
augcuuuuaugucacaugguca

SEQ ID NO: 857928 - RNA, 22 nt, Human
gagaggcagaggccugaaaccg

SEQ ID NO: 857929 - RNA, 22 nt, Human
uuuccaaaguugccauaagcuu

SEQ ID NO: 857930 - RNA, 21 nt, Human
uccaaaaaggagcguccuucu

SEQ ID NO: 857931 - RNA, 19 nt, Human
aggauuuauuaugugcuca

SEQ ID NO: 857932 - RNA, 22 nt, Human
auucuucaaagagugucaaagu

SEQ ID NO: 857933 - RNA, 22 nt, Human
uaacaguguggacuugagaucu

SEQ ID NO: 857934 - RNA, 22 nt, Human
gcagcugaaagggaucucuaca

SEQ ID NO: 857935 - RNA, 22 nt, Human
acugcccucccaucuauugcaa

SEQ ID NO: 857936 - RNA, 18 nt, Human
aguccuuacgaggcuaua

SEQ ID NO: 857937 - RNA, 22 nt, Human
aaauacuagaauucagaguuga

SEQ ID NO: 857938 - RNA, 22 nt, Human
cuuuaacaaaugacucuugucu

SEQ ID NO: 857939 - RNA, 22 nt, Human
gaggagagaacauuccuccaua

SEQ ID NO: 857940 - RNA, 22 nt, Human
cugcuguguuccuccugcaucu

SEQ ID NO: 857941 - RNA, 22 nt, Human
auggaguucuuuaaauucacag

SEQ ID NO: 857942 - RNA, 22 nt, Human
uaguacaguuuaaauauuaaua

SEQ ID NO: 857943 - RNA, 22 nt, Human
augaacaagagagggaagauuc

SEQ ID NO: 857944 - RNA, 22 nt, Human
auacuguuuugugacuuaucuu

SEQ ID NO: 857945 - RNA, 22 nt, Human
cccaggagguguagcugcgugg

SEQ ID NO: 857946 - RNA, 19 nt, Human
uggagaggaaaugcugcuc

SEQ ID NO: 857947 - RNA, 22 nt, Human
ucucugguuauuaacuaacucc

SEQ ID NO: 857948 - RNA, 22 nt, Human
agcuggcagcucucagggguac

SEQ ID NO: 857949 - RNA, 22 nt, Human
uagggaugagccaguggguagu

SEQ ID NO: 857950 - RNA, 22 nt, Human
gucaggaucucccaguacauau

SEQ ID NO: 857951 - RNA, 22 nt, Human
uugcauuuaaguagauguuaca

SEQ ID NO: 857952 - RNA, 22 nt, Human
uacccaggggcugagcagaggu

SEQ ID NO: 857953 - RNA, 22 nt, Human
caauuucauggauaaaagaugu

SEQ ID NO: 857954 - RNA, 22 nt, Human
accaggagagauuuuauugaga

SEQ ID NO: 857955 - RNA, 22 nt, Human
acaguacauaauccugagucug

SEQ ID NO: 857956 - RNA, 22 nt, Human
uuuaaauucugucugccgcuua

SEQ ID NO: 857957 - RNA, 17 nt, Human
acagagcacaucaagau

SEQ ID NO: 857958 - RNA, 22 nt, Human
cuacagaagccguggucaggaa

SEQ ID NO: 857959 - RNA, 16 nt, Human
uuuccaaagggcagcu

SEQ ID NO: 857960 - RNA, 22 nt, Human
caaagaagagauuuacagagcu

SEQ ID NO: 857961 - RNA, 22 nt, Human
uugcauuuccuguacuguuuga

SEQ ID NO: 857962 - RNA, 22 nt, Human
gaaugaauucagcacauggaau

SEQ ID NO: 857963 - RNA, 22 nt, Human
gcucuaauugaaaaauacugca

SEQ ID NO: 857964 - RNA, 22 nt, Human
ugcuggguagaaguauuagucu

SEQ ID NO: 857965 - RNA, 23 nt, Human
ccaaagucgaagucuaguccaga

SEQ ID NO: 857966 - RNA, 22 nt, Human
ugaggggagacagaguggacuc

SEQ ID NO: 857967 - RNA, 22 nt, Human
auggcauuauagcaaugguuug

SEQ ID NO: 857968 - RNA, 22 nt, Human
gagagguccauuccccugucag

SEQ ID NO: 857969 - RNA, 22 nt, Human
acagucuacuugagcuuguaua

SEQ ID NO: 857970 - RNA, 22 nt, Human
guuauacauauguguuaacaaa

SEQ ID NO: 857971 - RNA, 22 nt, Human
ugcuauacauguacauauuagu

SEQ ID NO: 857972 - RNA, 22 nt, Human
uuuaggcacaacuacucagcua

SEQ ID NO: 857973 - RNA, 22 nt, Human
aggccagcaagaaagagagucu

SEQ ID NO: 857974 - RNA, 23 nt, Human
aggcagcuggguagcaucuuucu

SEQ ID NO: 857975 - RNA, 22 nt, Human
uuugaacaugcugcaugauaau

SEQ ID NO: 857976 - RNA, 22 nt, Human
agagauucauguuuacuguagg

SEQ ID NO: 857977 - RNA, 22 nt, Human
caguccuugauccaauaguggg

SEQ ID NO: 857978 - RNA, 22 nt, Human
ccagaagaccccguccaccucc

SEQ ID NO: 857979 - RNA, 22 nt, Human
auaaaugccucagaaucauccc

SEQ ID NO: 857980 - RNA, 22 nt, Human
uuggaugaagucuagcuuuagu

SEQ ID NO: 857981 - RNA, 22 nt, Human
accaggaggcuacacuguccca

SEQ ID NO: 857982 - RNA, 22 nt, Human
uuucacacaacgugaauauacu

SEQ ID NO: 857983 - RNA, 22 nt, Human
agagaugaacauaaaacaagga

SEQ ID NO: 857984 - RNA, 21 nt, Human
uuagaaagcucacuacaguua

SEQ ID NO: 857985 - RNA, 22 nt, Human
gugaauaaagggaguuuucaaa

SEQ ID NO: 857986 - RNA, 22 nt, Human
uuauagaaggagcauucacuua

SEQ ID NO: 857987 - RNA, 22 nt, Human
cccaggagguggagcuugcagu

SEQ ID NO: 857988 - RNA, 22 nt, Human
caucaucaaaagugacagagaa

SEQ ID NO: 857989 - RNA, 22 nt, Human
uguuuucagucauauagcaggu

SEQ ID NO: 857990 - RNA, 22 nt, Human
cagaucuguaguaaaagaucuc

SEQ ID NO: 857991 - RNA, 22 nt, Human
agaucugaggguccaagggagg

SEQ ID NO: 857992 - RNA, 22 nt, Human
aggguccugggugcaguugcuu

SEQ ID NO: 857993 - RNA, 22 nt, Human
uguacaaugccagggaacacca

SEQ ID NO: 857994 - RNA, 22 nt, Human
aggcuucuucuuccuauuuagu

SEQ ID NO: 857995 - RNA, 22 nt, Human
ugaaagguagcuggccucauag

SEQ ID NO: 857996 - RNA, 22 nt, Human
cagaaggcuuuguggaguagac

SEQ ID NO: 857997 - RNA, 22 nt, Human
agacaaauggaguaugagcaac

SEQ ID NO: 857998 - RNA, 22 nt, Human
agcugcccugggcuggagaugg

SEQ ID NO: 857999 - RNA, 22 nt, Human
ucugaagauuaccagcuaaaug

SEQ ID NO: 858000 - RNA, 22 nt, Human
uuuccaaagguggcaggaacaa

SEQ ID NO: 858001 - RNA, 22 nt, Human
cagugauguuucugcaucagag

SEQ ID NO: 858002 - RNA, 22 nt, Human
cauuuacagugagaguuuuuac

SEQ ID NO: 858003 - RNA, 22 nt, Human
gcuacugauugaccuuggagag

SEQ ID NO: 858004 - RNA, 22 nt, Human
uuucuucaauugcuaacaagga

SEQ ID NO: 858005 - RNA, 22 nt, Human
ugaggcagucacccccuccugc

SEQ ID NO: 858006 - RNA, 22 nt, Human
ggagcacuauaauagagauuuu

SEQ ID NO: 858007 - RNA, 22 nt, Human
uaucauaaguuaauuaaacagu

SEQ ID NO: 858008 - RNA, 22 nt, Human
guguguuucagaagccaggugu

SEQ ID NO: 858009 - RNA, 21 nt, Human
uucucagaucgaguagugaga

SEQ ID NO: 858010 - RNA, 22 nt, Human
aaauguuucuacuugugagcau

SEQ ID NO: 858011 - RNA, 17 nt, Human
cuguuaauucauuuccc

SEQ ID NO: 858012 - RNA, 22 nt, Human
ucuaaacacuaagucuugaugc

SEQ ID NO: 858013 - RNA, 22 nt, Human
gagguggugguggaggcauagc

SEQ ID NO: 858014 - RNA, 22 nt, Human
agaggggaaggaugugauguga

SEQ ID NO: 858015 - RNA, 22 nt, Human
cccaggaacuccagagcuccuc

SEQ ID NO: 858016 - RNA, 22 nt, Human
uguauacauuuaacuagauaga

SEQ ID NO: 858017 - RNA, 22 nt, Human
guuuuauaauugcuucauaaga

SEQ ID NO: 858018 - RNA, 22 nt, Human
ccaugcacaccagcaggcagac

SEQ ID NO: 858019 - RNA, 22 nt, Human
ucugcagguguuggaaggguca

SEQ ID NO: 858020 - RNA, 22 nt, Human
cuugcugugugguguucucaga

SEQ ID NO: 858021 - RNA, 23 nt, Human
cagggaggagauacuguguaucu

SEQ ID NO: 858022 - RNA, 22 nt, Human
aaauugcaaaaguacuuuuagg

SEQ ID NO: 858023 - RNA, 23 nt, Human
ugguucuaggccuauaauuauau

SEQ ID NO: 858024 - RNA, 22 nt, Human
aaaucaguuaagaugaggccau

SEQ ID NO: 858025 - RNA, 22 nt, Human
uuaauuacuaagcacaaugcaa

SEQ ID NO: 858026 - RNA, 22 nt, Human
ucagaaaagguagcugugacaa

SEQ ID NO: 858027 - RNA, 20 nt, Human
aaguuacauuguauuguacc

SEQ ID NO: 858028 - RNA, 22 nt, Human
ugaggcaggacugagcgggaug

SEQ ID NO: 858029 - RNA, 22 nt, Human
uucuucuugaaacuuuagguug

SEQ ID NO: 858030 - RNA, 22 nt, Human
cuuccaaaauuuauauguugaa

SEQ ID NO: 858031 - RNA, 22 nt, Human
augauauuugcaaugugcuugc

SEQ ID NO: 858032 - RNA, 22 nt, Human
uguuuuaaucucccauugcucu

SEQ ID NO: 858033 - RNA, 22 nt, Human
accaggagcauuuuuuauuagu

SEQ ID NO: 858034 - RNA, 22 nt, Human
cacagcauaaugaaauauacuu

SEQ ID NO: 858035 - RNA, 20 nt, Human
aggauuuacuacuaccugcu

SEQ ID NO: 858036 - RNA, 22 nt, Human
ccaggcugccgaggaaagaaag

SEQ ID NO: 858037 - RNA, 22 nt, Human
gagggaauggugugcaagaggu

SEQ ID NO: 858038 - RNA, 22 nt, Human
aggacuuagaacauuauguacu

SEQ ID NO: 858039 - RNA, 22 nt, Human
uuagcaucugcuguaagcuuau

SEQ ID NO: 858040 - RNA, 22 nt, Human
ugcauauuguccuugauauuau

SEQ ID NO: 858041 - RNA, 22 nt, Human
uuauuuacaacucuucucuucc

SEQ ID NO: 858042 - RNA, 22 nt, Human
gagguggaaggcaggaacaaau

SEQ ID NO: 858043 - RNA, 22 nt, Human
caguccuuccuugccccuuggg

SEQ ID NO: 858044 - RNA, 22 nt, Human
cuuccaaacccaggguaugggc

SEQ ID NO: 858045 - RNA, 22 nt, Human
auugaaagguuuugagcagaua

SEQ ID NO: 858046 - RNA, 22 nt, Human
ucaauucaauugaacaguuacu

SEQ ID NO: 858047 - RNA, 22 nt, Human
cccaggaggcagaaguugcagu

SEQ ID NO: 858048 - RNA, 22 nt, Human
uugaauaauaugcuucguucuc

SEQ ID NO: 858049 - RNA, 22 nt, Human
agaauuccucuaggaucugccc

SEQ ID NO: 858050 - RNA, 22 nt, Human
ugaugaauaaacuugagaguca

SEQ ID NO: 858051 - RNA, 22 nt, Human
auuugcuuucagguauaaaagg

SEQ ID NO: 858052 - RNA, 22 nt, Human
aggcacagagaaugcccuccau

SEQ ID NO: 858053 - RNA, 22 nt, Human
uuuuaugugcuggacuggcagu

SEQ ID NO: 858054 - RNA, 22 nt, Human
uuuauccaguguuggaauuuuu

SEQ ID NO: 858055 - RNA, 22 nt, Human
uuugaagucaaagauugauucc

SEQ ID NO: 858056 - RNA, 21 nt, Human
agggagcuuuagguagaaguu

SEQ ID NO: 858057 - RNA, 22 nt, Human
agugcuuugagcguuugaaaag

SEQ ID NO: 858058 - RNA, 22 nt, Human
gaggcagcuuaggguacugacu

SEQ ID NO: 858059 - RNA, 22 nt, Human
ugcccagggauaagccuagaga

SEQ ID NO: 858060 - RNA, 22 nt, Human
ggugaagggugucauggcauuu

SEQ ID NO: 858061 - RNA, 20 nt, Human
auacuuguuuucaggcuuuu

SEQ ID NO: 858062 - RNA, 22 nt, Human
uguacaauggcuauaauacccu

SEQ ID NO: 858063 - RNA, 22 nt, Human
gauuuacaaagcucucuagugu

SEQ ID NO: 858064 - RNA, 22 nt, Human
gcuggcuugauaguuucugcuu

SEQ ID NO: 858065 - RNA, 22 nt, Human
gccaggagacuccauucauuug

SEQ ID NO: 858066 - RNA, 22 nt, Human
aggaagcuccuggagagccagu

SEQ ID NO: 858067 - RNA, 22 nt, Human
ugucccucugaggcuucccugg

SEQ ID NO: 858068 - RNA, 22 nt, Human
guuaggcaguuuucuucauucu

SEQ ID NO: 858069 - RNA, 22 nt, Human
uggcagcugagugcacccccuc

SEQ ID NO: 858070 - RNA, 22 nt, Human
gaggcagcaugguaccuuggag

SEQ ID NO: 858071 - RNA, 22 nt, Human
uuugaacaggaguaucuauagu

SEQ ID NO: 858072 - RNA, 22 nt, Human
aaaucucaguguucuaagcauu

SEQ ID NO: 858073 - RNA, 22 nt, Human
uucaacucuucaagaucacauc

SEQ ID NO: 858074 - RNA, 22 nt, Human
guucuugccagcauccucaggu

SEQ ID NO: 858075 - RNA, 22 nt, Human
gcagaagucagaccaucugaau

SEQ ID NO: 858076 - RNA, 22 nt, Human
acaugcauacacguacauaccu

SEQ ID NO: 858077 - RNA, 22 nt, Human
cugaggaagacagcagcugugu

SEQ ID NO: 858078 - RNA, 22 nt, Human
auaucaguaucuauguauuugu

SEQ ID NO: 858079 - RNA, 22 nt, Human
uuaaauuagucaagcuucucug

SEQ ID NO: 858080 - RNA, 22 nt, Human
auaacaugaccugugcuucaca

SEQ ID NO: 858081 - RNA, 22 nt, Human
aggagcagcuucugaaccaugu

SEQ ID NO: 858082 - RNA, 22 nt, Human
gaauuucaaagagguuaagagg

SEQ ID NO: 858083 - RNA, 22 nt, Human
aaaucaguucacguucugaggu

SEQ ID NO: 858084 - RNA, 22 nt, Human
uccaggagguuuggaggaagca

SEQ ID NO: 858085 - RNA, 22 nt, Human
gucacagaguuauuaauugugu

SEQ ID NO: 858086 - RNA, 22 nt, Human
ggaggugguggcagugacaauu

SEQ ID NO: 858087 - RNA, 22 nt, Human
aggagaggcucuaacucugugu

SEQ ID NO: 858088 - RNA, 19 nt, Human
ucauuguugguuugucggg

SEQ ID NO: 858089 - RNA, 22 nt, Human
aucuacccacugaacacaauau

SEQ ID NO: 858090 - RNA, 22 nt, Human
acaaaaagggagaugagguaga

SEQ ID NO: 858091 - RNA, 22 nt, Human
gauuucuucauuuguggugaau

SEQ ID NO: 858092 - RNA, 22 nt, Human
uagucaccucuuuaaauguccu

SEQ ID NO: 858093 - RNA, 22 nt, Human
gaaaggccauuucugaggguuu

SEQ ID NO: 858094 - RNA, 22 nt, Human
ugucugugaccucuuuggagcc

SEQ ID NO: 858095 - RNA, 22 nt, Human
aguucuuuugugaacauaugcu

SEQ ID NO: 858096 - RNA, 22 nt, Human
ucuacugugguccuuguaacca

SEQ ID NO: 858097 - RNA, 22 nt, Human
gcucaggaccgaggggugggaa

SEQ ID NO: 858098 - RNA, 22 nt, Human
augugaggaagaaagagguaag

SEQ ID NO: 858099 - RNA, 22 nt, Human
gcaggagaacaaagcaagcugc

SEQ ID NO: 858100 - RNA, 22 nt, Human
agugugucugaucacuugugag

SEQ ID NO: 858101 - RNA, 22 nt, Human
auucuuaauugccaugcuguau

SEQ ID NO: 858102 - RNA, 22 nt, Human
ucacugcucagucuguacuaca

SEQ ID NO: 858103 - RNA, 22 nt, Human
cuacccagauccaggauggcua

SEQ ID NO: 858104 - RNA, 22 nt, Human
agucauaugacccuucacaaac

SEQ ID NO: 858105 - RNA, 22 nt, Human
aauaauuuuagcucagaguugu

SEQ ID NO: 858106 - RNA, 22 nt, Human
uucagcaagaccaccauguacc

SEQ ID NO: 858107 - RNA, 22 nt, Human
uuacaaaguguuaugauaaaca

SEQ ID NO: 858108 - RNA, 22 nt, Human
auacaacuuuaucuguaaugag

SEQ ID NO: 858109 - RNA, 22 nt, Human
ccaggauggggagcagauagaa

SEQ ID NO: 858110 - RNA, 22 nt, Human
gaggcaguguugaaaaggagag

SEQ ID NO: 858111 - RNA, 22 nt, Human
aaggccagaguacuagaggcug

SEQ ID NO: 858112 - RNA, 22 nt, Human
gacccaggguggucaccugaaa

SEQ ID NO: 858113 - RNA, 22 nt, Human
aacauuucagcaaauaagaaca

SEQ ID NO: 858114 - RNA, 22 nt, Human
ucuggaucccaccgccacacac

SEQ ID NO: 858115 - RNA, 22 nt, Human
uucaacuuuggagauuuaauaa

SEQ ID NO: 858116 - RNA, 22 nt, Human
caauuucauuaauagauauaga

SEQ ID NO: 858117 - RNA, 22 nt, Human
aacuuugaggucacugaauucc

SEQ ID NO: 858118 - RNA, 22 nt, Human
ucugauaacucuggccccaggc

SEQ ID NO: 858119 - RNA, 22 nt, Human
aucuagaacuuaaagucaguca

SEQ ID NO: 858120 - RNA, 22 nt, Human
uggcuuuacugucauucuuaug

SEQ ID NO: 858121 - RNA, 22 nt, Human
uauuucagucacuucuucucug

SEQ ID NO: 858122 - RNA, 22 nt, Human
cccgggaggaggaaguugcagu

SEQ ID NO: 858123 - RNA, 22 nt, Human
ucuacugcacuggugucucauc

SEQ ID NO: 858124 - RNA, 22 nt, Human
cugccagucuaugcugcucggc

SEQ ID NO: 858125 - RNA, 22 nt, Human
gccaggagugucccacucauuu

SEQ ID NO: 858126 - RNA, 22 nt, Human
uugcuuuguuacugcaguuucc

SEQ ID NO: 858127 - RNA, 23 nt, Human
ucuauacauacugcagccucugg

SEQ ID NO: 858128 - RNA, 18 nt, Human
acugugugaauuagcucc

SEQ ID NO: 858129 - RNA, 22 nt, Human
cccaggagagaggggauaaagc

SEQ ID NO: 858130 - RNA, 22 nt, Human
aauguuaauguguuugcuuaug

SEQ ID NO: 858131 - RNA, 20 nt, Human
ugcugucguguuuucugcuu

SEQ ID NO: 858132 - RNA, 22 nt, Human
gcgucugaguugcgggggcuca

SEQ ID NO: 858133 - RNA, 22 nt, Human
ugagauuuguuuuauaaaauag

SEQ ID NO: 858134 - RNA, 22 nt, Human
augguuuuguccucuuugguuc

SEQ ID NO: 858135 - RNA, 22 nt, Human
uaauauguguuacugacuuuuu

SEQ ID NO: 858136 - RNA, 22 nt, Human
gacccaggaagcuacuucuggu

SEQ ID NO: 858137 - RNA, 22 nt, Human
cucaagacugaucgcaguggaa

SEQ ID NO: 858138 - RNA, 22 nt, Human
gauaaaauaacuauggaauacu

SEQ ID NO: 858139 - RNA, 22 nt, Human
gugcugugcgcuuuuucuguau

SEQ ID NO: 858140 - RNA, 22 nt, Human
agagcagcacguuguccccaca

SEQ ID NO: 858141 - RNA, 22 nt, Human
aucugacuucacgcccaugcca

SEQ ID NO: 858142 - RNA, 22 nt, Human
uagcacauacauaauagauaga

SEQ ID NO: 858143 - RNA, 22 nt, Human
uuucacauaugguuguugauug

SEQ ID NO: 858144 - RNA, 22 nt, Human
ccccaggacguggcccucauag

SEQ ID NO: 858145 - RNA, 22 nt, Human
aaaaggcauggagguugauagu

SEQ ID NO: 858146 - RNA, 22 nt, Human
uucuccaacacaagcaugaugu

SEQ ID NO: 858147 - RNA, 22 nt, Human
cuuuggcaaggguuuuaauugu

SEQ ID NO: 858148 - RNA, 22 nt, Human
gcaggagacuggcugugguagu

SEQ ID NO: 858149 - RNA, 22 nt, Human
agaaaucauugaauuauuugcu

SEQ ID NO: 858150 - RNA, 19 nt, Human
uuagccauccacagugaaa

SEQ ID NO: 858151 - RNA, 22 nt, Human
ggcauuuagauugaauuucugu

SEQ ID NO: 858152 - RNA, 22 nt, Human
ggauggcauguugggcucuguu

SEQ ID NO: 858153 - RNA, 22 nt, Human
ugcuuggcuuucugagcuucug

SEQ ID NO: 858154 - RNA, 22 nt, Human
caugguuuauuagagcuuauuu

SEQ ID NO: 858155 - RNA, 22 nt, Human
cauggcugcgagaagagugggu

SEQ ID NO: 858156 - RNA, 23 nt, Human
uagggcagcugggagggacaugc

SEQ ID NO: 858157 - RNA, 22 nt, Human
ucaguagcagaaagcaaugagu

SEQ ID NO: 858158 - RNA, 22 nt, Human
uucacagucacccuucuccaug

SEQ ID NO: 858159 - RNA, 22 nt, Human
auauucuucuuguucagacuau

SEQ ID NO: 858160 - RNA, 22 nt, Human
aauggccagcugggagaguuga

SEQ ID NO: 858161 - RNA, 22 nt, Human
uaguuaaaauaauggagauguu

SEQ ID NO: 858162 - RNA, 22 nt, Human
agcagagguguuuauuauggga

SEQ ID NO: 858163 - RNA, 22 nt, Human
ucccaggaugaagacaguguug

SEQ ID NO: 858164 - RNA, 22 nt, Human
uguucucacuggaugcuucaca

SEQ ID NO: 858165 - RNA, 22 nt, Human
uuugaaagcaggugugggaggg

SEQ ID NO: 858166 - RNA, 22 nt, Human
auuaaauuuucacuaggcuccc

SEQ ID NO: 858167 - RNA, 23 nt, Human
ucuguacacaucagcaucuccca

SEQ ID NO: 858168 - RNA, 22 nt, Human
guacauaaaggaggcucuuugc

SEQ ID NO: 858169 - RNA, 22 nt, Human
uuugaaagccuggcuuuucucu

SEQ ID NO: 858170 - RNA, 22 nt, Human
caacauuucaaggucuuuagga

SEQ ID NO: 858171 - RNA, 23 nt, Human
cuuuuaacuugaucugagaccag

SEQ ID NO: 858172 - RNA, 22 nt, Human
gcuaugcaggagccuaaugaca

SEQ ID NO: 858173 - RNA, 22 nt, Human
augaacaauaaaauagaucaca

SEQ ID NO: 858174 - RNA, 22 nt, Human
uuucaguuguccuguuaauagc

SEQ ID NO: 858175 - RNA, 22 nt, Human
uacagaauuagauuauuagaga

SEQ ID NO: 858176 - RNA, 22 nt, Human
aagaaacaaccacugcucuccu

SEQ ID NO: 858177 - RNA, 22 nt, Human
cggagggguuugaacagaggag

SEQ ID NO: 858178 - RNA, 22 nt, Human
uuugaauaucacaaacuuucaa

SEQ ID NO: 858179 - RNA, 22 nt, Human
auuaugcugguuuacacauuuu

SEQ ID NO: 858180 - RNA, 22 nt, Human
uuagaaauacaagugagguuga

SEQ ID NO: 858181 - RNA, 22 nt, Human
gauggcuucagucuccuugggu

SEQ ID NO: 858182 - RNA, 22 nt, Human
uucagugucaauuuuuaaauau

SEQ ID NO: 858183 - RNA, 22 nt, Human
uucauugugaacacauucugcc

SEQ ID NO: 858184 - RNA, 22 nt, Human
aggcaggcccucuggaaaggua

SEQ ID NO: 858185 - RNA, 22 nt, Human
aucuuucaaucaggaaaaaucu

SEQ ID NO: 858186 - RNA, 22 nt, Human
aggccagcagcaugacggcauc

SEQ ID NO: 858187 - RNA, 22 nt, Human
uuugaauguuuuagguacuuaa

SEQ ID NO: 858188 - RNA, 22 nt, Human
uauuuccauguuagaacuaagu

SEQ ID NO: 858189 - RNA, 22 nt, Human
cccaggaguuggaggcuacggu

SEQ ID NO: 858190 - RNA, 22 nt, Human
augguuuaagggagaauauuga

SEQ ID NO: 858191 - RNA, 22 nt, Human
agauaucaccaguuuuacauac

SEQ ID NO: 858192 - RNA, 22 nt, Human
gcugcugucacggugcuaaggg

SEQ ID NO: 858193 - RNA, 22 nt, Human
ucaggauaaaauguaauggcaa

SEQ ID NO: 858194 - RNA, 21 nt, Human
auugaaagucaacaaucaguu

SEQ ID NO: 858195 - RNA, 22 nt, Human
uuaguacugauagggucaauca

SEQ ID NO: 858196 - RNA, 22 nt, Human
uucuucucucauagauuaaggu

SEQ ID NO: 858197 - RNA, 22 nt, Human
agagggcagucucagauuggga

SEQ ID NO: 858198 - RNA, 22 nt, Human
caggcagccugagggaucuggg

SEQ ID NO: 858199 - RNA, 22 nt, Human
gguacaaugucuuacagaccca

SEQ ID NO: 858200 - RNA, 22 nt, Human
cuguguuggcuuuucucuugua

SEQ ID NO: 858201 - RNA, 21 nt, Human
gcucagaguauugcacuguuu

SEQ ID NO: 858202 - RNA, 18 nt, Human
gaugggagcaagagaaga

SEQ ID NO: 858203 - RNA, 22 nt, Human
gcugcuguugauuuaguccaau

SEQ ID NO: 858204 - RNA, 22 nt, Human
uaaugcuuaacagcuggcuuuu

SEQ ID NO: 858205 - RNA, 19 nt, Human
cccaggagucuggcugguu

SEQ ID NO: 858206 - RNA, 22 nt, Human
uucaggauucuuucagacuggg

SEQ ID NO: 858207 - RNA, 21 nt, Human
auuuccaaauaaggucacauu

SEQ ID NO: 858208 - RNA, 22 nt, Human
ucugggaauuuauuggcacuuu

SEQ ID NO: 858209 - RNA, 22 nt, Human
aggcagaugggagcuggaaguu

SEQ ID NO: 858210 - RNA, 22 nt, Human
acccaggagacggaggugcagu

SEQ ID NO: 858211 - RNA, 22 nt, Human
cccaggaagaggggucaggugu

SEQ ID NO: 858212 - RNA, 22 nt, Human
aauuccagcuaggaaaagcuuc

SEQ ID NO: 858213 - RNA, 22 nt, Human
ucucgacagccuggcacagugg

SEQ ID NO: 858214 - RNA, 23 nt, Human
cuccccaguguccucaugcaucu

SEQ ID NO: 858215 - RNA, 22 nt, Human
uaucuguugucuuuuacaugua

SEQ ID NO: 858216 - RNA, 22 nt, Human
ggauggcaggacaaggacccag

SEQ ID NO: 858217 - RNA, 22 nt, Human
cauucucaauaguagaugagua

SEQ ID NO: 858218 - RNA, 22 nt, Human
augcuuaaccuugguguacaau

SEQ ID NO: 858219 - RNA, 22 nt, Human
acuauacaguauguacgugcac

SEQ ID NO: 858220 - RNA, 22 nt, Human
cauuuacacuucuaaccacaag

SEQ ID NO: 858221 - RNA, 22 nt, Human
uaaagccacgcuggaaaucagg

SEQ ID NO: 858222 - RNA, 22 nt, Human
aaaguauuugugauuuuuacca

SEQ ID NO: 858223 - RNA, 19 nt, Human
acagaaauuaguuauuuuc

SEQ ID NO: 858224 - RNA, 22 nt, Human
uccauuuuagaagaaaauccac

SEQ ID NO: 858225 - RNA, 22 nt, Human
agaauaauacugaaaugcugaa

SEQ ID NO: 858226 - RNA, 22 nt, Human
gcuuugaagacuuuuccagggu

SEQ ID NO: 858227 - RNA, 22 nt, Human
ugcuggguuaccuaagccuaaa

SEQ ID NO: 858228 - RNA, 22 nt, Human
acuucuucuucagcugggggau

SEQ ID NO: 858229 - RNA, 22 nt, Human
auucuucacuguuucagaauga

SEQ ID NO: 858230 - RNA, 20 nt, Human
uuuaggcauuacucuuuugu

SEQ ID NO: 858231 - RNA, 22 nt, Human
uagaauaugauuaauuuucuua

SEQ ID NO: 858232 - RNA, 23 nt, Human
uauggcuuacagugcuuuaggua

SEQ ID NO: 858233 - RNA, 22 nt, Human
caggauggugugagugugagga

SEQ ID NO: 858234 - RNA, 20 nt, Human
agcauuugaaauaugacuau

SEQ ID NO: 858235 - RNA, 22 nt, Human
agucucuuauucccuauugcug

SEQ ID NO: 858236 - RNA, 22 nt, Human
caggguggcacucagcgcaucu

SEQ ID NO: 858237 - RNA, 22 nt, Human
uacacaugaucauuuaguagca

SEQ ID NO: 858238 - RNA, 22 nt, Human
aaaaaucuaugacugcuucucc

SEQ ID NO: 858239 - RNA, 22 nt, Human
uuaacaauagaguuucuucagg

SEQ ID NO: 858240 - RNA, 22 nt, Human
uucagaaugugaccuuauuugg

SEQ ID NO: 858241 - RNA, 22 nt, Human
aucauaaagugcuaucugauug

SEQ ID NO: 858242 - RNA, 22 nt, Human
agggauggaagacuugaagacc

SEQ ID NO: 858243 - RNA, 23 nt, Human
gcagaggagcaagcuggacacca

SEQ ID NO: 858244 - RNA, 22 nt, Human
auuuccuuugcaaagacugugc

SEQ ID NO: 858245 - RNA, 22 nt, Human
ucucaguguguuuucucucaga

SEQ ID NO: 858246 - RNA, 22 nt, Human
ccguagcacaugcuccuggggc

SEQ ID NO: 858247 - RNA, 19 nt, Human
cuugcugggugguuucugc

SEQ ID NO: 858248 - RNA, 22 nt, Human
auaggcuuauauaaaaacaucu

SEQ ID NO: 858249 - RNA, 22 nt, Human
aaggccagccugagagcuaaca

SEQ ID NO: 858250 - RNA, 23 nt, Human
uucuuucaagaaguucacagugc

SEQ ID NO: 858251 - RNA, 22 nt, Human
uaggagagcugaacuauugucu

SEQ ID NO: 858252 - RNA, 22 nt, Human
ggccaggagcugcacagggcuc

SEQ ID NO: 858253 - RNA, 22 nt, Human
gaaauauucuugucuuguuuuc

SEQ ID NO: 858254 - RNA, 20 nt, Human
uugagcuuuuaguacagaca

SEQ ID NO: 858255 - RNA, 22 nt, Human
aggcagguuggugagaagacug

SEQ ID NO: 858256 - RNA, 23 nt, Human
cccauuuucauguuaacuccugg

SEQ ID NO: 858257 - RNA, 22 nt, Human
caaggccagggaauuuuucugg

SEQ ID NO: 858258 - RNA, 22 nt, Human
uaacaagucauuuuaaauuaug

SEQ ID NO: 858259 - RNA, 22 nt, Human
aagauauagauggugguauaaa

SEQ ID NO: 858260 - RNA, 22 nt, Human
gaaggaggcguuagcccuagga

SEQ ID NO: 858261 - RNA, 22 nt, Human
aaacggauauaacagcaaacgc

SEQ ID NO: 858262 - RNA, 22 nt, Human
cccaggcagccugcagggaagg

SEQ ID NO: 858263 - RNA, 22 nt, Human
augcugugagugugccgcagag

SEQ ID NO: 858264 - RNA, 22 nt, Human
aguggaccagaagacugaagcu

SEQ ID NO: 858265 - RNA, 22 nt, Human
uccauuuuguagguaugcuaca

SEQ ID NO: 858266 - RNA, 22 nt, Human
ggcauuuauuugucucauucuu

SEQ ID NO: 858267 - RNA, 22 nt, Human
ucuuuaauguacuuucuuucac

SEQ ID NO: 858268 - RNA, 19 nt, Human
agauggcaaaaugcaaaga

SEQ ID NO: 858269 - RNA, 22 nt, Human
uucuucuccgaggagggcuggu

SEQ ID NO: 858270 - RNA, 22 nt, Human
uucagaaacaucaguggaugga

SEQ ID NO: 858271 - RNA, 22 nt, Human
ucauuauccuaguaucuugaau

SEQ ID NO: 858272 - RNA, 22 nt, Human
uuacagaauguucuuccaacag

SEQ ID NO: 858273 - RNA, 22 nt, Human
aaggcagucugguuucaaagca

SEQ ID NO: 858274 - RNA, 19 nt, Human
aaaaacuuaguccagaaag

SEQ ID NO: 858275 - RNA, 22 nt, Human
ggguggagcuuggacaccagua

SEQ ID NO: 858276 - RNA, 22 nt, Human
cucacuguuuaauagcuggauc

SEQ ID NO: 858277 - RNA, 22 nt, Human
gucccauaaguagugcaacuug

SEQ ID NO: 858278 - RNA, 22 nt, Human
augaaggcaguuaaacgucauc

SEQ ID NO: 858279 - RNA, 22 nt, Human
ccauggcucuagagauugaaaa

SEQ ID NO: 858280 - RNA, 22 nt, Human
ucagugaucuaaggguauggcc

SEQ ID NO: 858281 - RNA, 22 nt, Human
cuccaggagggggauggcugua

SEQ ID NO: 858282 - RNA, 22 nt, Human
cuacccagagugaaucucuuaa

SEQ ID NO: 858283 - RNA, 18 nt, Human
gaggcagcuagcaauuuu

SEQ ID NO: 858284 - RNA, 22 nt, Human
aucaggaucacugggagucuug

SEQ ID NO: 858285 - RNA, 22 nt, Human
gucaggaucaaauugaaguuau

SEQ ID NO: 858286 - RNA, 22 nt, Human
aggauuuauuacaagccauggu

SEQ ID NO: 858287 - RNA, 22 nt, Human
uuugaauagaggccccucagaa

SEQ ID NO: 858288 - RNA, 22 nt, Human
gccauuuucugucuuguuuauu

SEQ ID NO: 858289 - RNA, 22 nt, Human
gucuccugagacugcagucacc

SEQ ID NO: 858290 - RNA, 22 nt, Human
auguuauaguuauaaaaugagg

SEQ ID NO: 858291 - RNA, 22 nt, Human
aaucagaacuucucaggguggg

SEQ ID NO: 858292 - RNA, 22 nt, Human
gcagcugcagagaccggguggg

SEQ ID NO: 858293 - RNA, 22 nt, Human
uuuaggcaaacucauugucaga

SEQ ID NO: 858294 - RNA, 22 nt, Human
uagaacauaagucauucauuug

SEQ ID NO: 858295 - RNA, 22 nt, Human
aggccagaaauuuggaguaugu

SEQ ID NO: 858296 - RNA, 22 nt, Human
gaaggccaguuuugagauaggu

SEQ ID NO: 858297 - RNA, 22 nt, Human
agaaaugacacacaugagacau

SEQ ID NO: 858298 - RNA, 22 nt, Human
uguugauuaguguuuagacuua

SEQ ID NO: 858299 - RNA, 22 nt, Human
augaaaacggaccagagcuauu

SEQ ID NO: 858300 - RNA, 22 nt, Human
ugugugucagagucuccauggu

SEQ ID NO: 858301 - RNA, 22 nt, Human
uguacaauagcuauuaucucca

SEQ ID NO: 858302 - RNA, 22 nt, Human
auuccaaaggcuggccuggagg

SEQ ID NO: 858303 - RNA, 22 nt, Human
agaauuuccuaugagagauucc

SEQ ID NO: 858304 - RNA, 18 nt, Human
ugagaggcagguagagga

SEQ ID NO: 858305 - RNA, 22 nt, Human
ggggcagccuccaggaaagcug

SEQ ID NO: 858306 - RNA, 23 nt, Human
uggacgccgacuuuggaggcgcu

SEQ ID NO: 858307 - RNA, 22 nt, Human
agucuugcauuuucugaagaug

SEQ ID NO: 858308 - RNA, 22 nt, Human
ccaaaauuaagccucuuauguu

SEQ ID NO: 858309 - RNA, 22 nt, Human
gcagaggggaagcugaggaauu

SEQ ID NO: 858310 - RNA, 22 nt, Human
uuacagaaguauugagagaucc

SEQ ID NO: 858311 - RNA, 22 nt, Human
cccaugagaccugguuuaaggc

SEQ ID NO: 858312 - RNA, 22 nt, Human
uauuuccagcaguaagaagaca

SEQ ID NO: 858313 - RNA, 22 nt, Human
aaguauuucguucugaaaaagu

SEQ ID NO: 858314 - RNA, 22 nt, Human
uauuucagcacaugggauaggu

SEQ ID NO: 858315 - RNA, 22 nt, Human
augcuguggaaguuccugaagc

SEQ ID NO: 858316 - RNA, 22 nt, Human
gucaggaugcuauuguuauuaa

SEQ ID NO: 858317 - RNA, 22 nt, Human
aauguuuuaaaagagauugaga

SEQ ID NO: 858318 - RNA, 18 nt, Human
gagaggagccagaauuuu

SEQ ID NO: 858319 - RNA, 22 nt, Human
augcugaauugaugcgagggag

SEQ ID NO: 858320 - RNA, 22 nt, Human
ucuuagaaugucaacugauguu

SEQ ID NO: 858321 - RNA, 22 nt, Human
gggauggggagcuggaaagggg

SEQ ID NO: 858322 - RNA, 22 nt, Human
cuuuuauuuugaauuaagggcu

SEQ ID NO: 858323 - RNA, 22 nt, Human
uggagcugggguuugaaucugg

SEQ ID NO: 858324 - RNA, 22 nt, Human
aaauugaaugauuaagugguga

SEQ ID NO: 858325 - RNA, 22 nt, Human
gggcagcugccccucucugggc

SEQ ID NO: 858326 - RNA, 22 nt, Human
ucuuugcacugugcaagcagaa

SEQ ID NO: 858327 - RNA, 22 nt, Human
uccaggagagguguggggacug

SEQ ID NO: 858328 - RNA, 22 nt, Human
uuauucuuuucuccagaauccc

SEQ ID NO: 858329 - RNA, 22 nt, Human
cccaggagguggagguugcagu

SEQ ID NO: 858330 - RNA, 22 nt, Human
uguggaaaauuggaacguuccu

SEQ ID NO: 858331 - RNA, 22 nt, Human
uauguuaagugggauaaucaaa

SEQ ID NO: 858332 - RNA, 22 nt, Human
guguuuuaagaaagaagcucag

SEQ ID NO: 858333 - RNA, 22 nt, Human
ucugcuguaaagaauuucugcc

SEQ ID NO: 858334 - RNA, 22 nt, Human
gcccaggauggcuggaggugcu

SEQ ID NO: 858335 - RNA, 22 nt, Human
uucaugugaucacagauuguaa

SEQ ID NO: 858336 - RNA, 22 nt, Human
cuacagaauucaacaaaugguu

SEQ ID NO: 858337 - RNA, 19 nt, Human
uccuucagucagaucuggg

SEQ ID NO: 858338 - RNA, 22 nt, Human
cagcgucucguugugggccucg

SEQ ID NO: 858339 - RNA, 22 nt, Human
ugugccagccucuggcuguguc

SEQ ID NO: 858340 - RNA, 22 nt, Human
aaaaacugcaauuacuuuuguc

SEQ ID NO: 858341 - RNA, 22 nt, Human
agaaguuguagguuugcauauu

SEQ ID NO: 858342 - RNA, 22 nt, Human
guuuuauaggugaaauauuacu

SEQ ID NO: 858343 - RNA, 22 nt, Human
ggcagcuaggggcagggaauuc

SEQ ID NO: 858344 - RNA, 22 nt, Human
uaauuauaacaguuacaucuua

SEQ ID NO: 858345 - RNA, 22 nt, Human
ucaggaauccagacagggcaca

SEQ ID NO: 858346 - RNA, 22 nt, Human
auuaaagaaacccagcauguga

SEQ ID NO: 858347 - RNA, 22 nt, Human
uacaguauguucuugaauuugg

SEQ ID NO: 858348 - RNA, 22 nt, Human
aggcagcccacaggacacagga

SEQ ID NO: 858349 - RNA, 22 nt, Human
gaaggucaccuccccucucugg

SEQ ID NO: 858350 - RNA, 22 nt, Human
agggagcucuaaguagagggac

SEQ ID NO: 858351 - RNA, 22 nt, Human
uuaacaugucuugacuucaucu

SEQ ID NO: 858352 - RNA, 22 nt, Human
auugcuguggaaauauaagaug

SEQ ID NO: 858353 - RNA, 22 nt, Human
aggcagacucaauggcuagaua

SEQ ID NO: 858354 - RNA, 23 nt, Human
acaacuuuacagauacauuuugu

SEQ ID NO: 858355 - RNA, 22 nt, Human
aaaguucaugguguuauagaaa

SEQ ID NO: 858356 - RNA, 22 nt, Human
uuauacaguuuauacuuagaau

SEQ ID NO: 858357 - RNA, 22 nt, Human
uggcagcuuccugcucauagga

SEQ ID NO: 858358 - RNA, 22 nt, Human
ucuucuccagugcuucugcaca

SEQ ID NO: 858359 - RNA, 19 nt, Human
uccauaaugaagauagagg

SEQ ID NO: 858360 - RNA, 20 nt, Human
ucacuaguaaccaucugcuu

SEQ ID NO: 858361 - RNA, 22 nt, Human
gucuaacaagcauuaggaaccc

SEQ ID NO: 858362 - RNA, 22 nt, Human
caagaaucaacauuauuuagug

SEQ ID NO: 858363 - RNA, 22 nt, Human
cagucaccuugaggacucagac

SEQ ID NO: 858364 - RNA, 19 nt, Human
uuucuuaggccuuuggccu

SEQ ID NO: 858365 - RNA, 22 nt, Human
cugcuucuccaaaguaggacuu

SEQ ID NO: 858366 - RNA, 22 nt, Human
gggugggacugaagucugaggg

SEQ ID NO: 858367 - RNA, 22 nt, Human
aucaggauagugguuaccuggg

SEQ ID NO: 858368 - RNA, 22 nt, Human
cgaggcagacaaaaguuggaag

SEQ ID NO: 858369 - RNA, 21 nt, Human
aggcagcaggauccagggaca

SEQ ID NO: 858370 - RNA, 22 nt, Human
auggcuuaugguaaauauuucu

SEQ ID NO: 858371 - RNA, 22 nt, Human
gagggaggggagcuccacccuc

SEQ ID NO: 858372 - RNA, 22 nt, Human
ggcauuuaucuaauauaguuua

SEQ ID NO: 858373 - RNA, 20 nt, Human
uauuuguauuugggaaaguu

SEQ ID NO: 858374 - RNA, 22 nt, Human
uuucauuuugguuaugccauaa

SEQ ID NO: 858375 - RNA, 22 nt, Human
uugaaagaggcaaaguuugauc

SEQ ID NO: 858376 - RNA, 22 nt, Human
accaggagccauagagucaggc

SEQ ID NO: 858377 - RNA, 22 nt, Human
uggcagcucauuuggaaaugga

SEQ ID NO: 858378 - RNA, 22 nt, Human
gaggggagacagggaaaucagu

SEQ ID NO: 858379 - RNA, 18 nt, Human
ggcagggaaaagauaggg

SEQ ID NO: 858380 - RNA, 22 nt, Human
aaguuucaaauauaaaauuaca

SEQ ID NO: 858381 - RNA, 23 nt, Human
uuucaaauuacucugcagaugac

SEQ ID NO: 858382 - RNA, 22 nt, Human
uggcagcuauggucuaagggcc

SEQ ID NO: 858383 - RNA, 22 nt, Human
uuugaacuucuaccugucauau

SEQ ID NO: 858384 - RNA, 22 nt, Human
gauggcaggugauagccgaguc

SEQ ID NO: 858385 - RNA, 17 nt, Human
aaucagauuucugagga

SEQ ID NO: 858386 - RNA, 22 nt, Human
gcagcugccuucagcuggaugg

SEQ ID NO: 858387 - RNA, 22 nt, Human
cagaaaaggaagagcuauguaa

SEQ ID NO: 858388 - RNA, 22 nt, Human
cuuaaacugaaagcuacaagau

SEQ ID NO: 858389 - RNA, 22 nt, Human
gaggccaaucaauagggcaaua

SEQ ID NO: 858390 - RNA, 22 nt, Human
cacccugggcugggccuguuaa

SEQ ID NO: 858391 - RNA, 22 nt, Human
auuaggcauauaugcuuuuaau

SEQ ID NO: 858392 - RNA, 22 nt, Human
uccaggagguagugcuuaauuu

SEQ ID NO: 858393 - RNA, 22 nt, Human
cccucuacagggaagcgcuuuc

SEQ ID NO: 858394 - RNA, 22 nt, Human
uauuaaagggaaguuaugcaug

SEQ ID NO: 858395 - RNA, 22 nt, Human
uauuuguauguguguacauaua

SEQ ID NO: 858396 - RNA, 22 nt, Human
caaugaaaauuuaaguugcagc

SEQ ID NO: 858397 - RNA, 22 nt, Human
cuuuacagaauaagaauacugg

SEQ ID NO: 858398 - RNA, 22 nt, Human
cuggaaauuggagaugauguuu

SEQ ID NO: 858399 - RNA, 22 nt, Human
auaugaaaagaagucaccauug

SEQ ID NO: 858400 - RNA, 22 nt, Human
ucugaacuccagcccugcucuc

SEQ ID NO: 858401 - RNA, 22 nt, Human
ggcaggcaaugaggaugggaag

SEQ ID NO: 858402 - RNA, 21 nt, Human
gaacauuuggguuguuucuac

SEQ ID NO: 858403 - RNA, 21 nt, Human
agcaccuuacagcuauaaugg

SEQ ID NO: 858404 - RNA, 22 nt, Human
agaggggagagcuaagcaauuc

SEQ ID NO: 858405 - RNA, 22 nt, Human
uucucugagauagacuaagugg

SEQ ID NO: 858406 - RNA, 18 nt, Human
ugcuuggagcauuuacca

SEQ ID NO: 858407 - RNA, 22 nt, Human
aagaggagacuucagcaacuug

SEQ ID NO: 858408 - RNA, 22 nt, Human
uauggcuuuuuauucaucuuac

SEQ ID NO: 858409 - RNA, 22 nt, Human
gaggcagcggcucacagagaaa

SEQ ID NO: 858410 - RNA, 22 nt, Human
caaggccacuccagagacuggu

SEQ ID NO: 858411 - RNA, 22 nt, Human
aaauacuguagauaauagaguu

SEQ ID NO: 858412 - RNA, 22 nt, Human
gugauuuucuccuccuagaagu

SEQ ID NO: 858413 - RNA, 22 nt, Human
ugaggcaggaauggggaaaagu

SEQ ID NO: 858414 - RNA, 19 nt, Human
uggcaggcccaggauggac

SEQ ID NO: 858415 - RNA, 22 nt, Human
aucacugucgucaucugagauu

SEQ ID NO: 858416 - RNA, 22 nt, Human
aggcacaguggcucacaccugu

SEQ ID NO: 858417 - RNA, 22 nt, Human
ggugagaggcagaggacagcuu

SEQ ID NO: 858418 - RNA, 22 nt, Human
cagucccuaguggagcucacag

SEQ ID NO: 858419 - RNA, 22 nt, Human
cagcuggcgggcagagccgcca

SEQ ID NO: 858420 - RNA, 22 nt, Human
ucacuguugaccuggaaguggg

SEQ ID NO: 858421 - RNA, 22 nt, Human
ucaggagauguaaccuuagcug

SEQ ID NO: 858422 - RNA, 22 nt, Human
cuuaaauuuucaucuacaagaa

SEQ ID NO: 858423 - RNA, 22 nt, Human
caugcugugugguuagaacugu

SEQ ID NO: 858424 - RNA, 22 nt, Human
agggacuuguguccuauguaug

SEQ ID NO: 858425 - RNA, 22 nt, Human
uuuuucagccaugaauuacacu

SEQ ID NO: 858426 - RNA, 22 nt, Human
ucuggaucgccggcgccugggc

SEQ ID NO: 858427 - RNA, 22 nt, Human
gugaauaauauuguuuauaaaa

SEQ ID NO: 858428 - RNA, 22 nt, Human
uuuguuuagaugguaaaucagu

SEQ ID NO: 858429 - RNA, 22 nt, Human
ucuccuccuuuuuucaacauag

SEQ ID NO: 858430 - RNA, 22 nt, Human
cuucuucaguugcauguauugg

SEQ ID NO: 858431 - RNA, 22 nt, Human
ucucacugcaaauauuauguau

SEQ ID NO: 858432 - RNA, 22 nt, Human
uuagccauggacugaauugacu

SEQ ID NO: 858433 - RNA, 22 nt, Human
uuacaagauaaccugaugcugu

SEQ ID NO: 858434 - RNA, 20 nt, Human
acuggaucuggcuggagcug

SEQ ID NO: 858435 - RNA, 22 nt, Human
cagaagaguagcugaacaaguu

SEQ ID NO: 858436 - RNA, 18 nt, Human
gcaggagauggguggggu

SEQ ID NO: 858437 - RNA, 17 nt, Human
aggcaggcagagcggga

SEQ ID NO: 858438 - RNA, 22 nt, Human
aggccagcccugggcugagaga

SEQ ID NO: 858439 - RNA, 22 nt, Human
cccaggagacauauagaaggac

SEQ ID NO: 858440 - RNA, 22 nt, Human
uaauuucagugcaagcucacgg

SEQ ID NO: 858441 - RNA, 22 nt, Human
ucuggauccuaugcacuggacu

SEQ ID NO: 858442 - RNA, 16 nt, Human
aggaggggaauuagga

SEQ ID NO: 858443 - RNA, 22 nt, Human
cccaggaaaugaacuucugauu

SEQ ID NO: 858444 - RNA, 22 nt, Human
uguccuuaaggagcuuaauguc

SEQ ID NO: 858445 - RNA, 23 nt, Human
acagaaaucauuuguaagguacc

SEQ ID NO: 858446 - RNA, 22 nt, Human
uucuucaacaaggacacuguua

SEQ ID NO: 858447 - RNA, 22 nt, Human
cccaggaggcggagguuguggu

SEQ ID NO: 858448 - RNA, 22 nt, Human
cuuucaacuacauacaggcgau

SEQ ID NO: 858449 - RNA, 22 nt, Human
ccauccugcauugcuauucaga

SEQ ID NO: 858450 - RNA, 22 nt, Human
acagaugauuuuuaugaaaaca

SEQ ID NO: 858451 - RNA, 22 nt, Human
uugguuuaggaacuggcuugga

SEQ ID NO: 858452 - RNA, 22 nt, Human
gaauuucagaucagagaccauu

SEQ ID NO: 858453 - RNA, 22 nt, Human
gcagcucccagcuugaaagguc

SEQ ID NO: 858454 - RNA, 22 nt, Human
ucucuuucuauaugugagucuu

SEQ ID NO: 858455 - RNA, 22 nt, Human
ugcuucugggcaaaugugugug

SEQ ID NO: 858456 - RNA, 22 nt, Human
guacagaaaugugaugacgcaa

SEQ ID NO: 858457 - RNA, 22 nt, Human
auuuagcaaaaaaugaugaagc

SEQ ID NO: 858458 - RNA, 23 nt, Human
cugcugugaaacaugguuuuggu

SEQ ID NO: 858459 - RNA, 22 nt, Human
cccaggaaaguggaggcggcug

SEQ ID NO: 858460 - RNA, 22 nt, Human
gauggacagccuggaaggaaag

SEQ ID NO: 858461 - RNA, 22 nt, Human
augguuuuagaaucaggaaaaa

SEQ ID NO: 858462 - RNA, 22 nt, Human
gaauaaucaugaaauucaguga

SEQ ID NO: 858463 - RNA, 22 nt, Human
uugguacaaugugcuagguagg

SEQ ID NO: 858464 - RNA, 22 nt, Human
uccaauauggauaaaaggggcc

SEQ ID NO: 858465 - RNA, 17 nt, Human
ccaggagagaugcuugu

SEQ ID NO: 858466 - RNA, 22 nt, Human
gagucaccuugggucagcgaua

SEQ ID NO: 858467 - RNA, 22 nt, Human
caagaaucagaccugucagggu

SEQ ID NO: 858468 - RNA, 22 nt, Human
augcuuaauacacuguuaaagg

SEQ ID NO: 858469 - RNA, 22 nt, Human
ucugggaaaugcuguuccuugu

SEQ ID NO: 858470 - RNA, 22 nt, Human
uuuaggaaugugguuuuugagc

SEQ ID NO: 858471 - RNA, 22 nt, Human
uacaagaaauuucugcauauau

SEQ ID NO: 858472 - RNA, 22 nt, Human
agaaaucaauaucuauauguug

SEQ ID NO: 858473 - RNA, 22 nt, Human
cuugggaaugcuaacagaugac

SEQ ID NO: 858474 - RNA, 22 nt, Human
cccaggaaugagcaggcagggg

SEQ ID NO: 858475 - RNA, 22 nt, Human
aagcagcuggaagaguaagaug

SEQ ID NO: 858476 - RNA, 23 nt, Human
cuucucagaagucugugccagga

SEQ ID NO: 858477 - RNA, 23 nt, Human
uacuuaggguuuagaucugacug

SEQ ID NO: 858478 - RNA, 22 nt, Human
ggcucagaccucccagcuccag

SEQ ID NO: 858479 - RNA, 22 nt, Human
gauaaugaugacaaugacaacc

SEQ ID NO: 858480 - RNA, 21 nt, Human
cucaggaucuuauauauuagu

SEQ ID NO: 858481 - RNA, 22 nt, Human
gaggcaccucgcgggaggaggc

SEQ ID NO: 858482 - RNA, 22 nt, Human
uuaauuuuaaccuguuuguguc

SEQ ID NO: 858483 - RNA, 22 nt, Human
uuuaggcacagaguugagggac

SEQ ID NO: 858484 - RNA, 22 nt, Human
ggagcagggcagugaauucugg

SEQ ID NO: 858485 - RNA, 22 nt, Human
uuuuuauaacucuuuugugaca

SEQ ID NO: 858486 - RNA, 22 nt, Human
ugcccaggauugugaggucagg

SEQ ID NO: 858487 - RNA, 22 nt, Human
aaguccauucuuccagccagcu

SEQ ID NO: 858488 - RNA, 22 nt, Human
uuugaaauuaagauauugucca

SEQ ID NO: 858489 - RNA, 22 nt, Human
uacuaaacccucgauggaucuu

SEQ ID NO: 858490 - RNA, 22 nt, Human
uuuaggcauugggugcucaagu

SEQ ID NO: 858491 - RNA, 22 nt, Human
agcuggcaguaugacuggugac

SEQ ID NO: 858492 - RNA, 22 nt, Human
aagauuauggcagauaacaauu

SEQ ID NO: 858493 - RNA, 22 nt, Human
uugcugugucauuuguuuaauc

SEQ ID NO: 858494 - RNA, 22 nt, Human
ugcuuagacgucaaguacagcc

SEQ ID NO: 858495 - RNA, 22 nt, Human
gaggccagaagugccucgggcu

SEQ ID NO: 858496 - RNA, 22 nt, Human
aggcagugcugugcccugaacc

SEQ ID NO: 858497 - RNA, 22 nt, Human
uaggauuuaggcuuuaacaucu

SEQ ID NO: 858498 - RNA, 22 nt, Human
auggcuuaagaaugcuuuugug

SEQ ID NO: 858499 - RNA, 22 nt, Human
aagccagauuucacucuuaauu

SEQ ID NO: 858500 - RNA, 22 nt, Human
uuuagaaugugacuguauuuga

SEQ ID NO: 858501 - RNA, 18 nt, Human
cugcugugucgucugggc

SEQ ID NO: 858502 - RNA, 22 nt, Human
acccaggaggugacacagggcu

SEQ ID NO: 858503 - RNA, 22 nt, Human
gagagaaaugugcaguuugggc

SEQ ID NO: 858504 - RNA, 22 nt, Human
uucaggaugcucagaguagucu

SEQ ID NO: 858505 - RNA, 22 nt, Human
cuugaaagcacuuaguaaauua

SEQ ID NO: 858506 - RNA, 22 nt, Human
aguaaaauuucugcugaggaga

SEQ ID NO: 858507 - RNA, 22 nt, Human
ggaagaggaggagccaggcuuu

SEQ ID NO: 858508 - RNA, 22 nt, Human
aaaucagugcucauuugaaagg

SEQ ID NO: 858509 - RNA, 22 nt, Human
acauucacgcucucaaagcuga

SEQ ID NO: 858510 - RNA, 22 nt, Human
gaauuucagggucugguaggaa

SEQ ID NO: 858511 - RNA, 22 nt, Human
uguuuuaagagcgcacuuuaua

SEQ ID NO: 858512 - RNA, 22 nt, Human
ugcuuauuuauagucaauagag

SEQ ID NO: 858513 - RNA, 20 nt, Human
uggccuuuaaauaguauucc

SEQ ID NO: 858514 - RNA, 21 nt, Human
uuucuucacuuugccccaugu

SEQ ID NO: 858515 - RNA, 22 nt, Human
guaggcagguggaggagugaag

SEQ ID NO: 858516 - RNA, 22 nt, Human
guagaaauagugguugacagga

SEQ ID NO: 858517 - RNA, 22 nt, Human
ucacagacauggugagguaaca

SEQ ID NO: 858518 - RNA, 21 nt, Human
gagauuuagaaggaucaauuu

SEQ ID NO: 858519 - RNA, 22 nt, Human
cagaauuuuucgaauguacugu

SEQ ID NO: 858520 - RNA, 22 nt, Human
ggacagaggguugacagaguau

SEQ ID NO: 858521 - RNA, 22 nt, Human
uuucagcugguaaaggaguagc

SEQ ID NO: 858522 - RNA, 22 nt, Human
ugcacagugaccccuggugacu

SEQ ID NO: 858523 - RNA, 22 nt, Human
cacaugaguccugccagguaug

SEQ ID NO: 858524 - RNA, 22 nt, Human
caaucaguaaccggaucauggu

SEQ ID NO: 858525 - RNA, 22 nt, Human
gugagggguggcugagcaguuu

SEQ ID NO: 858526 - RNA, 22 nt, Human
auguuacacauaggcauaaaug

SEQ ID NO: 858527 - RNA, 22 nt, Human
aauaauauuugaagcuucaaag

SEQ ID NO: 858528 - RNA, 22 nt, Human
cccaggagacagaaacagaggu

SEQ ID NO: 858529 - RNA, 22 nt, Human
uucucagagcacugcugacaaa

SEQ ID NO: 858530 - RNA, 22 nt, Human
auggaucagaaucccgggaggg

SEQ ID NO: 858531 - RNA, 22 nt, Human
aaucagaaccuugggucauaac

SEQ ID NO: 858532 - RNA, 19 nt, Human
agaggcagucuccaacagg

SEQ ID NO: 858533 - RNA, 22 nt, Human
ugaggggagcccgcccuggacg

SEQ ID NO: 858534 - RNA, 22 nt, Human
gugaauaauuuuuuaguauaag

SEQ ID NO: 858535 - RNA, 22 nt, Human
gcacaauuauuuaugcaguaug

SEQ ID NO: 858536 - RNA, 22 nt, Human
ugaggcaggagaaucacaugaa

SEQ ID NO: 858537 - RNA, 22 nt, Human
ugucauaaucaguuuugcaugu

SEQ ID NO: 858538 - RNA, 22 nt, Human
ucccaggacuuccaguuggagg

SEQ ID NO: 858539 - RNA, 22 nt, Human
gcugcugugaauuuuuuaaaug

SEQ ID NO: 858540 - RNA, 22 nt, Human
uucaguaaaacacugcaauguc

SEQ ID NO: 858541 - RNA, 22 nt, Human
uuuggaauguaguuuaaucauc

SEQ ID NO: 858542 - RNA, 22 nt, Human
ucccugggcuucuccagacuug

SEQ ID NO: 858543 - RNA, 22 nt, Human
gaucagaauucuuguguguuuc

SEQ ID NO: 858544 - RNA, 22 nt, Human
ugcuuaauaggaguugaacauu

SEQ ID NO: 858545 - RNA, 22 nt, Human
aaaucaguuagugguaggauug

SEQ ID NO: 858546 - RNA, 22 nt, Human
uccaugaggcagggaggcuggc

SEQ ID NO: 858547 - RNA, 22 nt, Human
cugucauugagccugucagggc

SEQ ID NO: 858548 - RNA, 22 nt, Human
agaggacagacggaaagugcca

SEQ ID NO: 858549 - RNA, 22 nt, Human
auuucccagcuuugaucaguuu

SEQ ID NO: 858550 - RNA, 19 nt, Human
ugaggggcucacagucuca

SEQ ID NO: 858551 - RNA, 21 nt, Human
ucauuugugaucugauuucca

SEQ ID NO: 858552 - RNA, 22 nt, Human
cccaggagauggagguugcagu

SEQ ID NO: 858553 - RNA, 22 nt, Human
uucauucuuauuugugaucugg

SEQ ID NO: 858554 - RNA, 22 nt, Human
cagcaggauaugguggagagag

SEQ ID NO: 858555 - RNA, 21 nt, Human
aaauacagaaacuuguuuuca

SEQ ID NO: 858556 - RNA, 22 nt, Human
ugaggcaggaguucaggcugcg

SEQ ID NO: 858557 - RNA, 22 nt, Human
caaggccaguccauuuuggaag

SEQ ID NO: 858558 - RNA, 22 nt, Human
cagucucagaggugggaguggg

SEQ ID NO: 858559 - RNA, 22 nt, Human
acauaaguuauggauaaaaugu

SEQ ID NO: 858560 - RNA, 22 nt, Human
acaacaaaaucacuagucuucc

SEQ ID NO: 858561 - RNA, 22 nt, Human
gauguguuuccaggauuuguuu

SEQ ID NO: 858562 - RNA, 23 nt, Human
ucuccuccuagauacagucaugg

SEQ ID NO: 858563 - RNA, 22 nt, Human
uccaugagaacccuuggagaua

SEQ ID NO: 858564 - RNA, 22 nt, Human
uugcauuugaucuuggguucuc

SEQ ID NO: 858565 - RNA, 22 nt, Human
ucauuuguacuugugugcuugu

SEQ ID NO: 858566 - RNA, 22 nt, Human
uaauuauagccgcuauuuugcu

SEQ ID NO: 858567 - RNA, 22 nt, Human
uguucuucuagauugccuuuua

SEQ ID NO: 858568 - RNA, 19 nt, Human
ucuuucauuucuagcucug

SEQ ID NO: 858569 - RNA, 22 nt, Human
aggcucagaggugagcaucugc

SEQ ID NO: 858570 - RNA, 22 nt, Human
aggcagcauuugaauccagguc

SEQ ID NO: 858571 - RNA, 22 nt, Human
ucugggaacucugucauuuccc

SEQ ID NO: 858572 - RNA, 22 nt, Human
aggcaggcucaaugcccagucu

SEQ ID NO: 858573 - RNA, 22 nt, Human
aggcaggcuggucugaagagug

SEQ ID NO: 858574 - RNA, 22 nt, Human
uugaauaguguuuucaguauac

SEQ ID NO: 858575 - RNA, 22 nt, Human
uuuuuggguccaggcuguaucu

SEQ ID NO: 858576 - RNA, 22 nt, Human
cugcccagaagccagaugggca

SEQ ID NO: 858577 - RNA, 22 nt, Human
auacacauauguguguauaugu

SEQ ID NO: 858578 - RNA, 22 nt, Human
uuuccucacuucaugagaguuu

SEQ ID NO: 858579 - RNA, 22 nt, Human
uuauacuaaaacgcauugaauu

SEQ ID NO: 858580 - RNA, 22 nt, Human
aaugguuugauggacaaaauga

SEQ ID NO: 858581 - RNA, 22 nt, Human
ccaggagcagauauggacauaa

SEQ ID NO: 858582 - RNA, 22 nt, Human
uaaggccaccguuauagaacca

SEQ ID NO: 858583 - RNA, 21 nt, Human
aggaggggucuuucccacuga

SEQ ID NO: 858584 - RNA, 22 nt, Human
gcaggcagagguggaggagaca

SEQ ID NO: 858585 - RNA, 22 nt, Human
cugagacuuucaugugcuuuua

SEQ ID NO: 858586 - RNA, 22 nt, Human
ccagaauuuggaucaugauuuu

SEQ ID NO: 858587 - RNA, 22 nt, Human
caauuucacuaaugaugugggg

SEQ ID NO: 858588 - RNA, 22 nt, Human
guaaacaucagccacucuauuu

SEQ ID NO: 858589 - RNA, 22 nt, Human
caacuuugugugaccuagauag

SEQ ID NO: 858590 - RNA, 22 nt, Human
agaguucugcucuucucaguga

SEQ ID NO: 858591 - RNA, 22 nt, Human
aucagaaauugcccagcuguuu

SEQ ID NO: 858592 - RNA, 22 nt, Human
gaggaaccaaaucagcuugcac

SEQ ID NO: 858593 - RNA, 22 nt, Human
aagaaaucauaucauuucuugg

SEQ ID NO: 858594 - RNA, 22 nt, Human
ggguggagaggcuaaguccagu

SEQ ID NO: 858595 - RNA, 22 nt, Human
uguuuaauaauucuaugauagu

SEQ ID NO: 858596 - RNA, 22 nt, Human
aaacaugaauagauauuaaaca

SEQ ID NO: 858597 - RNA, 22 nt, Human
caugugguucaaguacuccaca

SEQ ID NO: 858598 - RNA, 22 nt, Human
aauuucaaacuaauaggaacca

SEQ ID NO: 858599 - RNA, 22 nt, Human
aguuauaaucugcuacugauau

SEQ ID NO: 858600 - RNA, 22 nt, Human
uacagacaguuuuucagauauu

SEQ ID NO: 858601 - RNA, 22 nt, Human
uugaaauacugcauuguucagu

SEQ ID NO: 858602 - RNA, 22 nt, Human
ugaggcagaaauuccuguuuuc

SEQ ID NO: 858603 - RNA, 22 nt, Human
aggacagcagugcuggcacuug

SEQ ID NO: 858604 - RNA, 22 nt, Human
cuguggaauugaugcuuagugu

SEQ ID NO: 858605 - RNA, 22 nt, Human
aacaaaugaccugauuucuucc

SEQ ID NO: 858606 - RNA, 22 nt, Human
uacuaaacaucuggcauuaaau

SEQ ID NO: 858607 - RNA, 22 nt, Human
aaucauucuuauuucacagcaa

SEQ ID NO: 858608 - RNA, 22 nt, Human
cuuuggcacagucucauuugau

SEQ ID NO: 858609 - RNA, 22 nt, Human
gagcagcugagcuggaaugaga

SEQ ID NO: 858610 - RNA, 22 nt, Human
gcauggcugguguccugaggga

SEQ ID NO: 858611 - RNA, 22 nt, Human
uuugaaaggaauuaggaugaca

SEQ ID NO: 858612 - RNA, 19 nt, Human
aaggcagcaguagcaucca

SEQ ID NO: 858613 - RNA, 20 nt, Human
ugcguguguauuuauuuucu

SEQ ID NO: 858614 - RNA, 20 nt, Human
uauuuacaacuuagagccuc

SEQ ID NO: 858615 - RNA, 22 nt, Human
agcugccgaugcccagcugcau

SEQ ID NO: 858616 - RNA, 22 nt, Human
augauguugauaaauuacuuua

SEQ ID NO: 858617 - RNA, 22 nt, Human
ugaggcaguauuuuagugacuu

SEQ ID NO: 858618 - RNA, 22 nt, Human
uggagagguuuaaacaaaaguu

SEQ ID NO: 858619 - RNA, 23 nt, Human
uccaggagcaugcuggcuggcga

SEQ ID NO: 858620 - RNA, 22 nt, Human
uuugacauuauccuguuacugg

SEQ ID NO: 858621 - RNA, 22 nt, Human
uucaggaugacaccauguccag

SEQ ID NO: 858622 - RNA, 22 nt, Human
uaguccuugcugggcacagagu

SEQ ID NO: 858623 - RNA, 22 nt, Human
ucauuguuucugcuuuucauga

SEQ ID NO: 858624 - RNA, 22 nt, Human
gcccaggaugguguguaguggu

SEQ ID NO: 858625 - RNA, 22 nt, Human
gccucugcaauuacauugugcc

SEQ ID NO: 858626 - RNA, 22 nt, Human
acagaaguuggaauuagauacu

SEQ ID NO: 858627 - RNA, 22 nt, Human
ugagagggcccagagcacacca

SEQ ID NO: 858628 - RNA, 22 nt, Human
ccagggaguuuccaaucugaga

SEQ ID NO: 858629 - RNA, 18 nt, Human
cugcccagagcacuugug

SEQ ID NO: 858630 - RNA, 21 nt, Human
cccagggaagccgcagucacc

SEQ ID NO: 858631 - RNA, 22 nt, Human
uacaaaguaauguauaauaucg

SEQ ID NO: 858632 - RNA, 21 nt, Human
ucacuagugccuucugucauu

SEQ ID NO: 858633 - RNA, 20 nt, Human
uuucuugucggcuguugcug

SEQ ID NO: 858634 - RNA, 22 nt, Human
aguguguccagaaaucuguauu

SEQ ID NO: 858635 - RNA, 22 nt, Human
uagcagaaacuguuacagaagg

SEQ ID NO: 858636 - RNA, 22 nt, Human
uuauccaagcagaagcugcaca

SEQ ID NO: 858637 - RNA, 22 nt, Human
uuugaaagagcugauacaugaa

SEQ ID NO: 858638 - RNA, 22 nt, Human
auucaaguccagcuucucuaca

SEQ ID NO: 858639 - RNA, 21 nt, Human
aaugcauuaacauaaagcuga

SEQ ID NO: 858640 - RNA, 22 nt, Human
uuccuuaguugacugucuuagu

SEQ ID NO: 858641 - RNA, 22 nt, Human
agugcuuucccugaaaccuucc

SEQ ID NO: 858642 - RNA, 22 nt, Human
gcagaauuuggggguaaccuuu

SEQ ID NO: 858643 - RNA, 22 nt, Human
cuacagaaggagaaauggguaa

SEQ ID NO: 858644 - RNA, 22 nt, Human
aagucaccccacacucuuggga

SEQ ID NO: 858645 - RNA, 22 nt, Human
auaguuugugaaacacagcagu

SEQ ID NO: 858646 - RNA, 22 nt, Human
uuguuauaaagacuaaauaugu

SEQ ID NO: 858647 - RNA, 22 nt, Human
uaguuuuacuugcgaugauaau

SEQ ID NO: 858648 - RNA, 22 nt, Human
caagauggaguccgggaaugug

SEQ ID NO: 858649 - RNA, 22 nt, Human
ugcuucagaggaaaggcaaaag

SEQ ID NO: 858650 - RNA, 21 nt, Human
ugcugaugucagagaagcaag

SEQ ID NO: 858651 - RNA, 22 nt, Human
augcuguguauuuuacucuuuc

SEQ ID NO: 858652 - RNA, 22 nt, Human
cuaaucaucuuucucuuaaagc

SEQ ID NO: 858653 - RNA, 22 nt, Human
uacuuccuguuuccaugucugu

SEQ ID NO: 858654 - RNA, 22 nt, Human
aaagccuuugucucaggcucug

SEQ ID NO: 858655 - RNA, 22 nt, Human
ugccuugcgggcguuucuguug

SEQ ID NO: 858656 - RNA, 21 nt, Human
gagacagcccagugccagggc

SEQ ID NO: 858657 - RNA, 22 nt, Human
uucuucaauuuuccauauacug

SEQ ID NO: 858658 - RNA, 22 nt, Human
agccaacuaauuaaacaacuuu

SEQ ID NO: 858659 - RNA, 20 nt, Human
agcuucuucugucuaauuuu

SEQ ID NO: 858660 - RNA, 22 nt, Human
cugaauaaagcccucgcgcgcu

SEQ ID NO: 858661 - RNA, 22 nt, Human
auuucaacagaguuugaaggca

SEQ ID NO: 858662 - RNA, 22 nt, Human
gaagcagcuuucuggugaggag

SEQ ID NO: 858663 - RNA, 22 nt, Human
uguccuuaucuccaaacaauca

SEQ ID NO: 858664 - RNA, 22 nt, Human
cacugagcugauagaauuccag

SEQ ID NO: 858665 - RNA, 22 nt, Human
gucaggauuggggucaugaguc

SEQ ID NO: 858666 - RNA, 22 nt, Human
aacuuucuuggaugucucaaca

SEQ ID NO: 858667 - RNA, 22 nt, Human
gucauaaagcuuguugcauuua

SEQ ID NO: 858668 - RNA, 22 nt, Human
aaaugauugucaaaguucuguu

SEQ ID NO: 858669 - RNA, 22 nt, Human
aaauuccagaaacucaguauau

SEQ ID NO: 858670 - RNA, 22 nt, Human
uauacagaacugcacgugcacg

SEQ ID NO: 858671 - RNA, 22 nt, Human
uagcuguguaagcuugguaaga

SEQ ID NO: 858672 - RNA, 22 nt, Human
caagauggagaagcagcaaggg

SEQ ID NO: 858673 - RNA, 22 nt, Human
uucaugugauaaaugugugacu

SEQ ID NO: 858674 - RNA, 22 nt, Human
acuggaucuaauugguuauagu

SEQ ID NO: 858675 - RNA, 22 nt, Human
cacaauguauauguauaucaaa

SEQ ID NO: 858676 - RNA, 22 nt, Human
auuugcuugugcuaugaaaguu

SEQ ID NO: 858677 - RNA, 22 nt, Human
auggcuuuucacagaggguucu

SEQ ID NO: 858678 - RNA, 22 nt, Human
augcuguggggagugaggguag

SEQ ID NO: 858679 - RNA, 22 nt, Human
cccuggaggucagaggccuggg

SEQ ID NO: 858680 - RNA, 22 nt, Human
aguuauccgaaggcacugagau

SEQ ID NO: 858681 - RNA, 22 nt, Human
uugcagcuucgagucuaucugu

SEQ ID NO: 858682 - RNA, 22 nt, Human
gggcagcucuggcugugggaag

SEQ ID NO: 858683 - RNA, 18 nt, Human
cugcuugggagacgucag

SEQ ID NO: 858684 - RNA, 22 nt, Human
cauucauuuaugaaauaucuau

SEQ ID NO: 858685 - RNA, 22 nt, Human
aaguccuuauguggaggggcua

SEQ ID NO: 858686 - RNA, 22 nt, Human
aucuaacagcaacaccagaaua

SEQ ID NO: 858687 - RNA, 22 nt, Human
aagaagagaaaugugcugcugg

SEQ ID NO: 858688 - RNA, 22 nt, Human
ccagaccacccuggccaugcac

SEQ ID NO: 858689 - RNA, 22 nt, Human
cagcaggagcagucagacuccu

SEQ ID NO: 858690 - RNA, 22 nt, Human
caggcagcugcgacaagagagc

SEQ ID NO: 858691 - RNA, 22 nt, Human
cugcuguguuucugcuagaaaa

SEQ ID NO: 858692 - RNA, 22 nt, Human
ucuuugaaagcuguucuagagu

SEQ ID NO: 858693 - RNA, 22 nt, Human
uguaagaaucagucuuuaaugu

SEQ ID NO: 858694 - RNA, 22 nt, Human
gcugauguuuaguugauguuac

SEQ ID NO: 858695 - RNA, 22 nt, Human
caggauggagaguuguugguug

SEQ ID NO: 858696 - RNA, 22 nt, Human
uggcagcuugaaugcagucuuu

SEQ ID NO: 858697 - RNA, 22 nt, Human
ucagaaaauaacuguuaguuug

SEQ ID NO: 858698 - RNA, 22 nt, Human
ccuuaaauucuccauuugaaag

SEQ ID NO: 858699 - RNA, 22 nt, Human
aucugccuggcuccaggugagc

SEQ ID NO: 858700 - RNA, 22 nt, Human
uucuucuucaagugcugcauuc

SEQ ID NO: 858701 - RNA, 22 nt, Human
uagauauaagguccuuagaaca

SEQ ID NO: 858702 - RNA, 22 nt, Human
caaacauucaaguacaagucuu

SEQ ID NO: 858703 - RNA, 22 nt, Human
cuuugcaaacgauuaccacaug

SEQ ID NO: 858704 - RNA, 22 nt, Human
uucauagaucucaauuuugagg

SEQ ID NO: 858705 - RNA, 22 nt, Human
ccauggcucuuaccuuguuaua

SEQ ID NO: 858706 - RNA, 22 nt, Human
uggauuagugcugaaaugaugg

SEQ ID NO: 858707 - RNA, 21 nt, Human
agccagucuguuuucuagugc

SEQ ID NO: 858708 - RNA, 22 nt, Human
ccugcuguucuguuuagugaac

SEQ ID NO: 858709 - RNA, 22 nt, Human
ugagggagagggcgaaaaugaa

SEQ ID NO: 858710 - RNA, 22 nt, Human
agagguagagguugcagugagc

SEQ ID NO: 858711 - RNA, 22 nt, Human
acaaaauuguguuaaacuuuau

SEQ ID NO: 858712 - RNA, 22 nt, Human
uucacagauguauuggaacucc

SEQ ID NO: 858713 - RNA, 19 nt, Human
caggaugaucccaugacac

SEQ ID NO: 858714 - RNA, 22 nt, Human
ugaggcaggaaguuauauaaug

SEQ ID NO: 858715 - RNA, 22 nt, Human
uagggcaggugaagaaaagcua

SEQ ID NO: 858716 - RNA, 22 nt, Human
cuacccagcaccuaggcugccu

SEQ ID NO: 858717 - RNA, 22 nt, Human
ccauccuaucugaccuacuugu

SEQ ID NO: 858718 - RNA, 21 nt, Human
augucaaaugcuuuauuuuau

SEQ ID NO: 858719 - RNA, 22 nt, Human
acagguuugucugauguaauga

SEQ ID NO: 858720 - RNA, 22 nt, Human
caggcagcugcuggguucagcc

SEQ ID NO: 858721 - RNA, 22 nt, Human
uaauuucaccguugcuagaaau

SEQ ID NO: 858722 - RNA, 20 nt, Human
ucuaauuaaaauugucuagu

SEQ ID NO: 858723 - RNA, 22 nt, Human
agaauaucguagcauauuaucu

SEQ ID NO: 858724 - RNA, 22 nt, Human
caagauggacauaaggagagaa

SEQ ID NO: 858725 - RNA, 22 nt, Human
ccaaaugugccuguuucaacaa

SEQ ID NO: 858726 - RNA, 22 nt, Human
ugucaaauuuuuauugcaguau

SEQ ID NO: 858727 - RNA, 22 nt, Human
auuaguaaaacauuguauaugu

SEQ ID NO: 858728 - RNA, 22 nt, Human
cucccaggcacagggaggagcc

SEQ ID NO: 858729 - RNA, 22 nt, Human
ucccaggaagaucccagggacc

SEQ ID NO: 858730 - RNA, 22 nt, Human
ugccuggaaggcccaugggaag

SEQ ID NO: 858731 - RNA, 22 nt, Human
uugcuucaguagcucuuuaaag

SEQ ID NO: 858732 - RNA, 22 nt, Human
guaggcagugguuggaagagaa

SEQ ID NO: 858733 - RNA, 22 nt, Human
uuccaaagugcuggaauuacau

SEQ ID NO: 858734 - RNA, 22 nt, Human
uaucagaacacauguuuugcag

SEQ ID NO: 858735 - RNA, 22 nt, Human
aagaaugauuacaaagcaacga

SEQ ID NO: 858736 - RNA, 22 nt, Human
agcaucuggcagaaagucagaa

SEQ ID NO: 858737 - RNA, 22 nt, Human
auuuaaauuuucugauggagag

SEQ ID NO: 858738 - RNA, 19 nt, Human
cuucuucuuggcagccaag

SEQ ID NO: 858739 - RNA, 22 nt, Human
uagucaccagcuacaggacagc

SEQ ID NO: 858740 - RNA, 22 nt, Human
ccaggagaaugggauuacccua

SEQ ID NO: 858741 - RNA, 22 nt, Human
cagcaggauuugaaaggaagag

SEQ ID NO: 858742 - RNA, 20 nt, Human
cgugcugugaccuugagcau

SEQ ID NO: 858743 - RNA, 22 nt, Human
uuucuaguaaucaauauaaagu

SEQ ID NO: 858744 - RNA, 22 nt, Human
uuuccaaaggaguaccacgcau

SEQ ID NO: 858745 - RNA, 22 nt, Human
guacagaaugcuugguaaggca

SEQ ID NO: 858746 - RNA, 22 nt, Human
aaaauauuuuagggccaggaga

SEQ ID NO: 858747 - RNA, 22 nt, Human
gagucaccacugugauagucga

SEQ ID NO: 858748 - RNA, 22 nt, Human
cauuuguaucugggcugcugug

SEQ ID NO: 858749 - RNA, 22 nt, Human
gagggaggugauacugaacgua

SEQ ID NO: 858750 - RNA, 22 nt, Human
ugguuuugcuaaaauagaaaga

SEQ ID NO: 858751 - RNA, 22 nt, Human
ucugcugugauuugcuaccugu

SEQ ID NO: 858752 - RNA, 22 nt, Human
ucauuucuauugcuacugucug

SEQ ID NO: 858753 - RNA, 22 nt, Human
uugugaguagugccgcaauaaa

SEQ ID NO: 858754 - RNA, 22 nt, Human
aaaacuuucagggauacagaaa

SEQ ID NO: 858755 - RNA, 22 nt, Human
aauguauuccucaugcaagagu

SEQ ID NO: 858756 - RNA, 22 nt, Human
augggaggaugcucgggugcuc

SEQ ID NO: 858757 - RNA, 22 nt, Human
acuagaaacuaauggauuauua

SEQ ID NO: 858758 - RNA, 22 nt, Human
caggauagaaaggccauggagu

SEQ ID NO: 858759 - RNA, 22 nt, Human
gcugggaagugcaagaucaagg

SEQ ID NO: 858760 - RNA, 22 nt, Human
gagggaugguaguugacacuga

SEQ ID NO: 858761 - RNA, 18 nt, Human
ccagguggugacagagau

SEQ ID NO: 858762 - RNA, 22 nt, Human
cuguauuuguccucuauuuauu

SEQ ID NO: 858763 - RNA, 22 nt, Human
acacaaugcauauuuuuccaga

SEQ ID NO: 858764 - RNA, 22 nt, Human
gggagggguugcauguuugagu

SEQ ID NO: 858765 - RNA, 22 nt, Human
agugcuuuauguuguugugcaa

SEQ ID NO: 858766 - RNA, 22 nt, Human
uuuacagauguggaaagugagc

SEQ ID NO: 858767 - RNA, 22 nt, Human
cuggauuugccuauggugcuuu

SEQ ID NO: 858768 - RNA, 22 nt, Human
cauuuguauguuccuccuuagg

SEQ ID NO: 858769 - RNA, 22 nt, Human
uuaacauacaucaugaacaaug

SEQ ID NO: 858770 - RNA, 22 nt, Human
cagagaaaaaauccugcucuca

SEQ ID NO: 858771 - RNA, 22 nt, Human
ucagcauaucuugagcuucaug

SEQ ID NO: 858772 - RNA, 22 nt, Human
aggccagccucaggcagggacc

SEQ ID NO: 858773 - RNA, 22 nt, Human
gaaauaagaguccaugccaggu

SEQ ID NO: 858774 - RNA, 22 nt, Human
aggauuuauuccagaaaugcaa

SEQ ID NO: 858775 - RNA, 22 nt, Human
aucauucuagcuguuguguuga

SEQ ID NO: 858776 - RNA, 21 nt, Human
ucucugugucuuuaagcugga

SEQ ID NO: 858777 - RNA, 21 nt, Human
uggaggaauaaagcacagaag

SEQ ID NO: 858778 - RNA, 22 nt, Human
gccacaggcacuuaagggcugg

SEQ ID NO: 858779 - RNA, 22 nt, Human
uuuacagagaauguacauaaag

SEQ ID NO: 858780 - RNA, 22 nt, Human
gucaggauuuacaaacuucagu

SEQ ID NO: 858781 - RNA, 22 nt, Human
ggagaggaaaugccagcacuuc

SEQ ID NO: 858782 - RNA, 22 nt, Human
auguucaaacaaguuaaugcca

SEQ ID NO: 858783 - RNA, 22 nt, Human
auaacaugagccagauugaaag

SEQ ID NO: 858784 - RNA, 22 nt, Human
gaggagcuugugagaagauguc

SEQ ID NO: 858785 - RNA, 21 nt, Human
gcuauacagaauggccagagg

SEQ ID NO: 858786 - RNA, 22 nt, Human
aggaguggugcaggaccugcca

SEQ ID NO: 858787 - RNA, 22 nt, Human
ugaggggaaggcaugauaaaua

SEQ ID NO: 858788 - RNA, 22 nt, Human
gaagcagcuggugagauggagc

SEQ ID NO: 858789 - RNA, 22 nt, Human
uguacaaugcugagguuugggg

SEQ ID NO: 858790 - RNA, 22 nt, Human
gaaggccacggaauggagcugg

SEQ ID NO: 858791 - RNA, 22 nt, Human
uuccuuagugacuucuagcuac

SEQ ID NO: 858792 - RNA, 22 nt, Human
uauuauuaaauggcagaauuuu

SEQ ID NO: 858793 - RNA, 22 nt, Human
aaaggcaggcuuucacaucuca

SEQ ID NO: 858794 - RNA, 22 nt, Human
uacacacagaggccaugggauu

SEQ ID NO: 858795 - RNA, 22 nt, Human
ucugcaucauuuuucagagccg

SEQ ID NO: 858796 - RNA, 22 nt, Human
aagagggcagcacagguggguc

SEQ ID NO: 858797 - RNA, 22 nt, Human
gauaaaauauguggccuuuagu

SEQ ID NO: 858798 - RNA, 22 nt, Human
uuugaagacagaucaauauaag

SEQ ID NO: 858799 - RNA, 20 nt, Human
gaugggaaucggagcuggua

SEQ ID NO: 858800 - RNA, 22 nt, Human
agauuucagaugcucggcaguu

SEQ ID NO: 858801 - RNA, 22 nt, Human
uuacagaaguuucagcguuuua

SEQ ID NO: 858802 - RNA, 22 nt, Human
auaaagucauuaugaagaucua

SEQ ID NO: 858803 - RNA, 18 nt, Human
ucauuuguuuugcaugaa

SEQ ID NO: 858804 - RNA, 22 nt, Human
gucuucuuguguugccugucuu

SEQ ID NO: 858805 - RNA, 22 nt, Human
uauuuaucgagugucuacuaug

SEQ ID NO: 858806 - RNA, 22 nt, Human
gcuggaucccugugggaguggu

SEQ ID NO: 858807 - RNA, 22 nt, Human
uucuucuccuaaggagaguccu

SEQ ID NO: 858808 - RNA, 22 nt, Human
ucuucagacccuuagcugugau

SEQ ID NO: 858809 - RNA, 22 nt, Human
uuccaugaaggagacugagaag

SEQ ID NO: 858810 - RNA, 22 nt, Human
cagcugacuucauaggaagaca

SEQ ID NO: 858811 - RNA, 22 nt, Human
guaguucugcagugucaccuga

SEQ ID NO: 858812 - RNA, 22 nt, Human
gcccaggaaaugccccguggug

SEQ ID NO: 858813 - RNA, 22 nt, Human
aauuccagaggaggacaguccu

SEQ ID NO: 858814 - RNA, 22 nt, Human
augaauaaacaggugccucuuc

SEQ ID NO: 858815 - RNA, 22 nt, Human
ggaggggagauguuugggcuca

SEQ ID NO: 858816 - RNA, 22 nt, Human
ucucaggaauagaguggcagca

SEQ ID NO: 858817 - RNA, 22 nt, Human
auaauaaaccaggaugggucug

SEQ ID NO: 858818 - RNA, 22 nt, Human
uucaacuagauuuauacaauuc

SEQ ID NO: 858819 - RNA, 22 nt, Human
guuuuucuaggaccaugugauu

SEQ ID NO: 858820 - RNA, 22 nt, Human
acaugcuuugcacuuacaucau

SEQ ID NO: 858821 - RNA, 22 nt, Human
gcuggauccacaaauaacuuug

SEQ ID NO: 858822 - RNA, 22 nt, Human
caggagauguaagacuucuguu

SEQ ID NO: 858823 - RNA, 22 nt, Human
uuacaagcagcuacauaucaca

SEQ ID NO: 858824 - RNA, 17 nt, Human
aggcagcucagaacauc

SEQ ID NO: 858825 - RNA, 22 nt, Human
uuaauauguugaaauuuauuag

SEQ ID NO: 858826 - RNA, 22 nt, Human
uaaacauggcuguuucaguuau

SEQ ID NO: 858827 - RNA, 22 nt, Human
auggcuuuuuagacuuugguac

SEQ ID NO: 858828 - RNA, 22 nt, Human
uaaggccaaggggccauagucu

SEQ ID NO: 858829 - RNA, 22 nt, Human
aucaggaugaagcuguagcgaa

SEQ ID NO: 858830 - RNA, 22 nt, Human
ugaggcaggagaaucaccggaa

SEQ ID NO: 858831 - RNA, 22 nt, Human
uucagaaagguuaaucuggauu

SEQ ID NO: 858832 - RNA, 22 nt, Human
auggcuuaugaauaacaguagg

SEQ ID NO: 858833 - RNA, 22 nt, Human
aaaauuauagaucuagugccug

SEQ ID NO: 858834 - RNA, 22 nt, Human
ucuacagacagagcagguggga

SEQ ID NO: 858835 - RNA, 22 nt, Human
cagugguuauacuuacuguuuc

SEQ ID NO: 858836 - RNA, 21 nt, Human
auuauuauaaagaccacaggg

SEQ ID NO: 858837 - RNA, 21 nt, Human
auagaacaccaggcauauaua

SEQ ID NO: 858838 - RNA, 22 nt, Human
cuacagaaguuucccuugcuua

SEQ ID NO: 858839 - RNA, 22 nt, Human
gcagaggccuagguggaaggcc

SEQ ID NO: 858840 - RNA, 22 nt, Human
cucuucuuauggccguggcuga

SEQ ID NO: 858841 - RNA, 22 nt, Human
gaaacugugaggaucuuaacuu

SEQ ID NO: 858842 - RNA, 22 nt, Human
ucacagaaauaagauaguuauu

SEQ ID NO: 858843 - RNA, 22 nt, Human
aauagaaaggaggggcucuugu

SEQ ID NO: 858844 - RNA, 22 nt, Human
uuugacaugcaaagcacuuuag

SEQ ID NO: 858845 - RNA, 22 nt, Human
aggagaggucucccuuccccag

SEQ ID NO: 858846 - RNA, 22 nt, Human
aaggcagccauagcaccaucca

SEQ ID NO: 858847 - RNA, 22 nt, Human
gaggagaggcuggacgcgguga

SEQ ID NO: 858848 - RNA, 22 nt, Human
ugaaggccagggauuugcagcc

SEQ ID NO: 858849 - RNA, 22 nt, Human
uagcugcugcagcacagggagg

SEQ ID NO: 858850 - RNA, 22 nt, Human
cccaggaggcagagguuggagc

SEQ ID NO: 858851 - RNA, 22 nt, Human
ggccaggagaggagggcacuga

SEQ ID NO: 858852 - RNA, 22 nt, Human
uuuauccagcagcuauucaaaa

SEQ ID NO: 858853 - RNA, 22 nt, Human
caggguggcacaucacagcauu

SEQ ID NO: 858854 - RNA, 22 nt, Human
auguucuguuuuguaauucaua

SEQ ID NO: 858855 - RNA, 22 nt, Human
gaggcagcagggcugguuccuu

SEQ ID NO: 858856 - RNA, 18 nt, Human
cuggcuuucuuauccauc

SEQ ID NO: 858857 - RNA, 22 nt, Human
ucccaggauguuggcggcaggu

SEQ ID NO: 858858 - RNA, 22 nt, Human
uaguccuuuaucaaacauuuau

SEQ ID NO: 858859 - RNA, 22 nt, Human
gagggagugccagagggccagc

SEQ ID NO: 858860 - RNA, 22 nt, Human
cccauucauccucgcuuccuuc

SEQ ID NO: 858861 - RNA, 22 nt, Human
ugcuuuaagagauuguuaguac

SEQ ID NO: 858862 - RNA, 22 nt, Human
cccaggaggucgaagcugcagu

SEQ ID NO: 858863 - RNA, 22 nt, Human
cccagaaggucgaggcugcagu

SEQ ID NO: 858864 - RNA, 22 nt, Human
acccaggagcucugggguccuc

SEQ ID NO: 858865 - RNA, 22 nt, Human
auaucagaaauaguaagcagag

SEQ ID NO: 858866 - RNA, 22 nt, Human
uuucagggagccuagaagagcu

SEQ ID NO: 858867 - RNA, 22 nt, Human
gaggcagcuuggggcugugggu

SEQ ID NO: 858868 - RNA, 22 nt, Human
uuugacaaaggaaaaaugcaca

SEQ ID NO: 858869 - RNA, 22 nt, Human
acuuuaauuaaugaacuguggc

SEQ ID NO: 858870 - RNA, 22 nt, Human
cagaggcauacucccagucuug

SEQ ID NO: 858871 - RNA, 22 nt, Human
uauggcuuuuaacugucguaug

SEQ ID NO: 858872 - RNA, 22 nt, Human
gaggcaguuugccaugccagga

SEQ ID NO: 858873 - RNA, 22 nt, Human
ggccagcuuugagcugcaggaa

SEQ ID NO: 858874 - RNA, 22 nt, Human
ugcuuauugcuuucaagacugu

SEQ ID NO: 858875 - RNA, 22 nt, Human
gucuucaauagagccucaauuu

SEQ ID NO: 858876 - RNA, 22 nt, Human
gaggguggguuucuugcacguc

SEQ ID NO: 858877 - RNA, 22 nt, Human
guuaaagaguuuggcuuucuuc

SEQ ID NO: 858878 - RNA, 22 nt, Human
agaggcagccguauuucaaagg

SEQ ID NO: 858879 - RNA, 22 nt, Human
cugagcugggaguagagacucu

SEQ ID NO: 858880 - RNA, 22 nt, Human
agccauucauugugcucucaga

SEQ ID NO: 858881 - RNA, 21 nt, Human
gacaaagugaagcaggcagga

SEQ ID NO: 858882 - RNA, 22 nt, Human
gggcagcuggauaguuuuaaau

SEQ ID NO: 858883 - RNA, 22 nt, Human
cucuaacacuguaaugcuuucu

SEQ ID NO: 858884 - RNA, 22 nt, Human
agaggcagcagucauacuacag

SEQ ID NO: 858885 - RNA, 22 nt, Human
uuugaagaccuuaucucuaaau

SEQ ID NO: 858886 - RNA, 22 nt, Human
uucuucuuaauguccugggaac

SEQ ID NO: 858887 - RNA, 22 nt, Human
uuugaagauaaauauggagaaa

SEQ ID NO: 858888 - RNA, 22 nt, Human
ccaggaguggcuggugaccuuc

SEQ ID NO: 858889 - RNA, 22 nt, Human
aggcagcauccagaggagaaug

SEQ ID NO: 858890 - RNA, 22 nt, Human
uguauguugggucaaaguacau

SEQ ID NO: 858891 - RNA, 22 nt, Human
ucuucagacuccaaauguuuua

SEQ ID NO: 858892 - RNA, 22 nt, Human
caauuucagugcuguggagagg

SEQ ID NO: 858893 - RNA, 23 nt, Human
gagauuuagcagacaaagcucuu

SEQ ID NO: 858894 - RNA, 22 nt, Human
aaauacagaguugcuuaaaagc

SEQ ID NO: 858895 - RNA, 22 nt, Human
uucaggaugaaagugugcaaca

SEQ ID NO: 858896 - RNA, 19 nt, Human
uaucuguuuccugcuuguc

SEQ ID NO: 858897 - RNA, 21 nt, Human
uuugaaagugggugauucuuu

SEQ ID NO: 858898 - RNA, 22 nt, Human
agaggacaaaaugagaagugcu

SEQ ID NO: 858899 - RNA, 22 nt, Human
uccaggagguugagugaguucc

SEQ ID NO: 858900 - RNA, 22 nt, Human
uaucuguuguccaugcagaaag

SEQ ID NO: 858901 - RNA, 21 nt, Human
cugcuguggcccccgacaugc

SEQ ID NO: 858902 - RNA, 23 nt, Human
ggagugcaauggcgccaucucgg

SEQ ID NO: 858903 - RNA, 22 nt, Human
ggaggugggcuaaggacucucu

SEQ ID NO: 858904 - RNA, 22 nt, Human
aguacaacauuagaguaucuua

SEQ ID NO: 858905 - RNA, 22 nt, Human
gaagcacauggcuauagcuauu

SEQ ID NO: 858906 - RNA, 22 nt, Human
uccagaauauuugggaaagaug

SEQ ID NO: 858907 - RNA, 22 nt, Human
aaaucaguucucccuuucuuca

SEQ ID NO: 858908 - RNA, 22 nt, Human
ugaaagguuaaaaguaguauug

SEQ ID NO: 858909 - RNA, 22 nt, Human
cucaggauugugccuagggaga

SEQ ID NO: 858910 - RNA, 22 nt, Human
acaguccuuguguggaacauua

SEQ ID NO: 858911 - RNA, 22 nt, Human
agguaggggguuugggaacugc

SEQ ID NO: 858912 - RNA, 22 nt, Human
cucuccucugaaguggugaccc

SEQ ID NO: 858913 - RNA, 22 nt, Human
ucuuagcauuucauaacaacug

SEQ ID NO: 858914 - RNA, 15 nt, Human
caggagaggaagguu

SEQ ID NO: 858915 - RNA, 22 nt, Human
gcaacuuuagaaaaaucuauaa

SEQ ID NO: 858916 - RNA, 22 nt, Human
accaggaguagaauaucuguga

SEQ ID NO: 858917 - RNA, 22 nt, Human
auuuccaauuucauccaugucc

SEQ ID NO: 858918 - RNA, 22 nt, Human
aggcugcugaggccaccacgcu

SEQ ID NO: 858919 - RNA, 22 nt, Human
aaaggccauuacuugcuuuuag

SEQ ID NO: 858920 - RNA, 22 nt, Human
caaucaguuucuguuguauaau

SEQ ID NO: 858921 - RNA, 19 nt, Human
aacuguaauuaauacccua

SEQ ID NO: 858922 - RNA, 22 nt, Human
acagcauucaauaaauaauaac

SEQ ID NO: 858923 - RNA, 22 nt, Human
uuuuaacuuaaaauacauagau

SEQ ID NO: 858924 - RNA, 22 nt, Human
ccuggaucgaugccgagggaaa

SEQ ID NO: 858925 - RNA, 22 nt, Human
cacaauuuggugcuaaagaaag

SEQ ID NO: 858926 - RNA, 22 nt, Human
aagggaggggauguaagccugg

SEQ ID NO: 858927 - RNA, 22 nt, Human
uucauucuugggaucagagagu

SEQ ID NO: 858928 - RNA, 22 nt, Human
uacccagggcuuuucugaugca

SEQ ID NO: 858929 - RNA, 22 nt, Human
augaacaaguauuugcaugagc

SEQ ID NO: 858930 - RNA, 22 nt, Human
aggagagcuggugucuggaauc

SEQ ID NO: 858931 - RNA, 22 nt, Human
uuucaaagaccauuaacuauca

SEQ ID NO: 858932 - RNA, 22 nt, Human
aaagccagguugugugcaggaa

SEQ ID NO: 858933 - RNA, 22 nt, Human
uaaguggaagguuauaugcuaa

SEQ ID NO: 858934 - RNA, 22 nt, Human
agcccaggagguggagguugca

SEQ ID NO: 858935 - RNA, 22 nt, Human
agggcagcucucaccucuggcc

SEQ ID NO: 858936 - RNA, 22 nt, Human
gugaaggacuagcauggagggc

SEQ ID NO: 858937 - RNA, 22 nt, Human
aauuuacacuucauuuggaggg

SEQ ID NO: 858938 - RNA, 22 nt, Human
uugaaaggguuaaagugguaaa

SEQ ID NO: 858939 - RNA, 16 nt, Human
auuuccagauuaugca

SEQ ID NO: 858940 - RNA, 22 nt, Human
gcuguucucuguaacaugcauu

SEQ ID NO: 858941 - RNA, 22 nt, Human
uagggauguggugagaacugag

SEQ ID NO: 858942 - RNA, 22 nt, Human
auugcuguaaauuaucuuauua

SEQ ID NO: 858943 - RNA, 22 nt, Human
aggcaccuugagagcaggagcu

SEQ ID NO: 858944 - RNA, 19 nt, Human
uggauuuauauucuuuauc

SEQ ID NO: 858945 - RNA, 22 nt, Human
uucaggauucucucccauuuac

SEQ ID NO: 858946 - RNA, 22 nt, Human
ugaaaugagauaauuuaagugc

SEQ ID NO: 858947 - RNA, 23 nt, Human
aggucagcaggcaaggaaauggc

SEQ ID NO: 858948 - RNA, 22 nt, Human
aggcacagcacaccuggccccc

SEQ ID NO: 858949 - RNA, 22 nt, Human
uuuucauuuuuguagaugcaag

SEQ ID NO: 858950 - RNA, 22 nt, Human
uauggcuugucuuuauaccagg

SEQ ID NO: 858951 - RNA, 22 nt, Human
guugaaagaucauguggcugcc

SEQ ID NO: 858952 - RNA, 22 nt, Human
gagagucuaggaaccucauaua

SEQ ID NO: 858953 - RNA, 19 nt, Human
uguguguuuauauauguau

SEQ ID NO: 858954 - RNA, 22 nt, Human
uauuccaacugucauagucaua

SEQ ID NO: 858955 - RNA, 23 nt, Human
agaggcaggaguggcuugcccgg

SEQ ID NO: 858956 - RNA, 22 nt, Human
cuccaugaauuugagcuuugug

SEQ ID NO: 858957 - RNA, 22 nt, Human
ucuaaacaguuucacucuuaau

SEQ ID NO: 858958 - RNA, 22 nt, Human
uuuaaauuuguguuuagagggu

SEQ ID NO: 858959 - RNA, 22 nt, Human
cuuaauuacuguccaauaugca

SEQ ID NO: 858960 - RNA, 22 nt, Human
ucaaaauuucagcacuagcccu

SEQ ID NO: 858961 - RNA, 22 nt, Human
gaaauauacaugaagucggcug

SEQ ID NO: 858962 - RNA, 22 nt, Human
cagcuagcuaagaaggccagag

SEQ ID NO: 858963 - RNA, 22 nt, Human
cagcuuccgaccgggggcugca

SEQ ID NO: 858964 - RNA, 22 nt, Human
uuugcagucuggccugcuuugg

SEQ ID NO: 858965 - RNA, 22 nt, Human
gcugcugucagugguggcaguu

SEQ ID NO: 858966 - RNA, 22 nt, Human
uaugcccagcuuaaaguacaca

SEQ ID NO: 858967 - RNA, 22 nt, Human
ucagccagcaucagcuaagugc

SEQ ID NO: 858968 - RNA, 22 nt, Human
agaggaugguugaggaagaccu

SEQ ID NO: 858969 - RNA, 22 nt, Human
aaggagagagcuuugcuggaac

SEQ ID NO: 858970 - RNA, 22 nt, Human
cauacuuucuuuuucacgcaua

SEQ ID NO: 858971 - RNA, 22 nt, Human
ggcagaggaaggaugaauucac

SEQ ID NO: 858972 - RNA, 22 nt, Human
accuugaugccuuuccaagaug

SEQ ID NO: 858973 - RNA, 21 nt, Human
uucuucaguuuaauauaaaau

SEQ ID NO: 858974 - RNA, 22 nt, Human
aaaggaagaugccaggacucug

SEQ ID NO: 858975 - RNA, 22 nt, Human
aagacaauuugauacuaguugc

SEQ ID NO: 858976 - RNA, 22 nt, Human
aucugccuccaaguccaugugu

SEQ ID NO: 858977 - RNA, 22 nt, Human
ucauuuguucaucugcucuucu

SEQ ID NO: 858978 - RNA, 22 nt, Human
caauuucagguggauagguuuu

SEQ ID NO: 858979 - RNA, 22 nt, Human
uuaacacuaucugucauaauua

SEQ ID NO: 858980 - RNA, 22 nt, Human
gaguccuugacacauaguaggu

SEQ ID NO: 858981 - RNA, 22 nt, Human
uuucaguuacugcuauaucauu

SEQ ID NO: 858982 - RNA, 22 nt, Human
acaaagucacaauaauuaaccu

SEQ ID NO: 858983 - RNA, 20 nt, Human
accaggagauggaggcaggg

SEQ ID NO: 858984 - RNA, 23 nt, Human
acauacauggagauaaagugaug

SEQ ID NO: 858985 - RNA, 22 nt, Human
aagcaauagcaacaacuuuaca

SEQ ID NO: 858986 - RNA, 19 nt, Human
gacagugcaguuguaguac

SEQ ID NO: 858987 - RNA, 22 nt, Human
aggcaggcaaccaccugggaag

SEQ ID NO: 858988 - RNA, 22 nt, Human
ggcagcuuccugagccagcagc

SEQ ID NO: 858989 - RNA, 22 nt, Human
uuuuaucugcuucauuaguuga

SEQ ID NO: 858990 - RNA, 17 nt, Human
ugaaggccaugaccacg

SEQ ID NO: 858991 - RNA, 22 nt, Human
caggaugagguagaggcagaua

SEQ ID NO: 858992 - RNA, 22 nt, Human
uccugaggcucacuuugaaugu

SEQ ID NO: 858993 - RNA, 22 nt, Human
uuugcauaagucauguccagug

SEQ ID NO: 858994 - RNA, 22 nt, Human
uccuuagagauacugucuugaa

SEQ ID NO: 858995 - RNA, 22 nt, Human
gucaacuugcaagaugcugggc

SEQ ID NO: 858996 - RNA, 22 nt, Human
gagggagggaaaguuuaacacu

SEQ ID NO: 858997 - RNA, 22 nt, Human
ugaggcagcaauuguauuguau

SEQ ID NO: 858998 - RNA, 20 nt, Human
ucagugauuuugaagaggaa

SEQ ID NO: 858999 - RNA, 22 nt, Human
guuuuauaggcuguugcuauau

SEQ ID NO: 859000 - RNA, 22 nt, Human
caucagaacgugagcuccuugu

SEQ ID NO: 859001 - RNA, 22 nt, Human
auacagaagaacuauagccacu

SEQ ID NO: 859002 - RNA, 22 nt, Human
agucugucuacuuaaagucugu

SEQ ID NO: 859003 - RNA, 22 nt, Human
uguuuuuaaauaaugauagaaa

SEQ ID NO: 859004 - RNA, 22 nt, Human
ucuuuuggguucuuaugauuua

SEQ ID NO: 859005 - RNA, 22 nt, Human
aguccuuacaccuggaaccuau

SEQ ID NO: 859006 - RNA, 22 nt, Human
ucuucccuaaucaccaucuuca

SEQ ID NO: 859007 - RNA, 22 nt, Human
aaucuucuuucuuaacaguaca

SEQ ID NO: 859008 - RNA, 22 nt, Human
aacauguugcuuuaauaauauu

SEQ ID NO: 859009 - RNA, 22 nt, Human
ggaagagggaaccacgacugua

SEQ ID NO: 859010 - RNA, 22 nt, Human
auacaugugggucuaaacauau

SEQ ID NO: 859011 - RNA, 22 nt, Human
aaauguauugcauaggauauuu

SEQ ID NO: 859012 - RNA, 22 nt, Human
acagguuuuuguggauauaugu

SEQ ID NO: 859013 - RNA, 22 nt, Human
acaacauuauacauagaaagcu

SEQ ID NO: 859014 - RNA, 22 nt, Human
ucaaaauucuagggagaauggu

SEQ ID NO: 859015 - RNA, 22 nt, Human
uaucagaaagauauuacugggg

SEQ ID NO: 859016 - RNA, 17 nt, Human
caauuucauagguuuug

SEQ ID NO: 859017 - RNA, 22 nt, Human
cuugaaagucagcagaguggau

SEQ ID NO: 859018 - RNA, 22 nt, Human
aacaaacaaacauuuugucauc

SEQ ID NO: 859019 - RNA, 22 nt, Human
ucauuguuauguuuugcugucu

SEQ ID NO: 859020 - RNA, 22 nt, Human
cauuucaaggaccacccuggga

SEQ ID NO: 859021 - RNA, 22 nt, Human
aauaugcauuaacuguguacau

SEQ ID NO: 859022 - RNA, 22 nt, Human
uucagcaaacacgaugcuuguu

SEQ ID NO: 859023 - RNA, 22 nt, Human
cucuccucagaacaggcccucu

SEQ ID NO: 859024 - RNA, 22 nt, Human
uugguuuagagagugugguuac

SEQ ID NO: 859025 - RNA, 22 nt, Human
uuuaucuguuguacauuuaugc

SEQ ID NO: 859026 - RNA, 19 nt, Human
caggagagcaugcacuuug

SEQ ID NO: 859027 - RNA, 22 nt, Human
ugauaauauuuugaaucauaag

SEQ ID NO: 859028 - RNA, 22 nt, Human
aguccaaggagagacagcauuu

SEQ ID NO: 859029 - RNA, 22 nt, Human
aaacuuuggauugugauugugc

SEQ ID NO: 859030 - RNA, 21 nt, Human
cucaggauggcggccuggugg

SEQ ID NO: 859031 - RNA, 22 nt, Human
agcauuuagucuuuauugcagc

SEQ ID NO: 859032 - RNA, 22 nt, Human
uuuuauagcugaauaguauucc

SEQ ID NO: 859033 - RNA, 22 nt, Human
aaagucaucagaaccuuccaga

SEQ ID NO: 859034 - RNA, 17 nt, Human
gaggacagggaaguagg

SEQ ID NO: 859035 - RNA, 22 nt, Human
aauuuacaggugcacucgccau

SEQ ID NO: 859036 - RNA, 22 nt, Human
auugaaagauaggcuacugugg

SEQ ID NO: 859037 - RNA, 18 nt, Human
ucauagaagugaaucaga

SEQ ID NO: 859038 - RNA, 22 nt, Human
ugcuuggccuacuuguccuuug

SEQ ID NO: 859039 - RNA, 22 nt, Human
cauuuguaauacugacuugcag

SEQ ID NO: 859040 - RNA, 22 nt, Human
ugccuggauucgguuguuguca

SEQ ID NO: 859041 - RNA, 22 nt, Human
uuucaaaguugggaauuguaau

SEQ ID NO: 859042 - RNA, 22 nt, Human
aagccaaugagagaggccucag

SEQ ID NO: 859043 - RNA, 22 nt, Human
caacagucugguuuauauaaua

SEQ ID NO: 859044 - RNA, 22 nt, Human
uuugaagucagacacugcuuug

SEQ ID NO: 859045 - RNA, 22 nt, Human
uaaaugagggcugacaugauug

SEQ ID NO: 859046 - RNA, 22 nt, Human
cucccagggucuaggcugcugg

SEQ ID NO: 859047 - RNA, 22 nt, Human
cccaggagguggagguugcggu

SEQ ID NO: 859048 - RNA, 22 nt, Human
aucugcuugaaugagcaacagg

SEQ ID NO: 859049 - RNA, 22 nt, Human
cugcuuuguaaaauagacauaa

SEQ ID NO: 859050 - RNA, 23 nt, Human
auguauuuaaauuucagugauga

SEQ ID NO: 859051 - RNA, 22 nt, Human
uaaguccuucaccuaauccuca

SEQ ID NO: 859052 - RNA, 22 nt, Human
gaaguucaaaagacagauuuga

SEQ ID NO: 859053 - RNA, 23 nt, Human
cuugcaggaagcagauggcacac

SEQ ID NO: 859054 - RNA, 21 nt, Human
ugaaugaggaggauggcauuu

SEQ ID NO: 859055 - RNA, 22 nt, Human
uugcaucuaccauaucaaagau

SEQ ID NO: 859056 - RNA, 22 nt, Human
gaucagaaugggacauauccug

SEQ ID NO: 859057 - RNA, 22 nt, Human
acauuuuuauucaucaaagcag

SEQ ID NO: 859058 - RNA, 22 nt, Human
ucaggagauggucuuuauaggc

SEQ ID NO: 859059 - RNA, 22 nt, Human
aguaaacauuuucauauuuucu

SEQ ID NO: 859060 - RNA, 22 nt, Human
cuuacagagaagaaaauguagu

SEQ ID NO: 859061 - RNA, 22 nt, Human
uuuauccauaucauuaaaaucu

SEQ ID NO: 859062 - RNA, 22 nt, Human
aacaugauggggaagaacaaga

SEQ ID NO: 859063 - RNA, 22 nt, Human
accaggaggccuugguucugag

SEQ ID NO: 859064 - RNA, 22 nt, Human
uaaugucagcauaguuuauuuu

SEQ ID NO: 859065 - RNA, 22 nt, Human
caauuucaauacaaaauacauu

SEQ ID NO: 859066 - RNA, 21 nt, Human
acagucuccccagaucucucc

SEQ ID NO: 859067 - RNA, 19 nt, Human
agucuuucccacucgucuu

SEQ ID NO: 859068 - RNA, 22 nt, Human
gaauauuuuuaaagggacuaau

SEQ ID NO: 859069 - RNA, 22 nt, Human
aaagcagucacuccagugugau

SEQ ID NO: 859070 - RNA, 20 nt, Human
uccaggagguuaguguggcu

SEQ ID NO: 859071 - RNA, 19 nt, Human
ugaaauggcaguugcuaaa

SEQ ID NO: 859072 - RNA, 22 nt, Human
uuugaaagcaccauuugaguag

SEQ ID NO: 859073 - RNA, 22 nt, Human
caggauggucuucauuuggcuc

SEQ ID NO: 859074 - RNA, 22 nt, Human
uacaggaaguaaguaaugaaau

SEQ ID NO: 859075 - RNA, 22 nt, Human
uugacacaguuuucucauuaag

SEQ ID NO: 859076 - RNA, 22 nt, Human
cccaggaacagcacagaacagc

SEQ ID NO: 859077 - RNA, 22 nt, Human
ugaugaaauguugaggcaguga

SEQ ID NO: 859078 - RNA, 21 nt, Human
acaugucuggucauuuuuagc

SEQ ID NO: 859079 - RNA, 22 nt, Human
cuuagcaugugguguccuugua

SEQ ID NO: 859080 - RNA, 22 nt, Human
cuacagaaucuaccucaagcca

SEQ ID NO: 859081 - RNA, 22 nt, Human
gucaggaugggcagccaaacua

SEQ ID NO: 859082 - RNA, 22 nt, Human
auggagggugucagagagcgaa

SEQ ID NO: 859083 - RNA, 22 nt, Human
aauaauuacccaucuuuuugua

SEQ ID NO: 859084 - RNA, 22 nt, Human
uguaaauaauuccuaggcuuuu

SEQ ID NO: 859085 - RNA, 23 nt, Human
agggagcuaaaaggcuggagcag

SEQ ID NO: 859086 - RNA, 22 nt, Human
ugaaacaagauccacagacuug

SEQ ID NO: 859087 - RNA, 22 nt, Human
guagaaauauuuaucucugaga

SEQ ID NO: 859088 - RNA, 22 nt, Human
aggaaaacacaguauugaugga

SEQ ID NO: 859089 - RNA, 22 nt, Human
uuucaucuuccuuggcauaggu

SEQ ID NO: 859090 - RNA, 22 nt, Human
cagaaauguacugacaugcagu

SEQ ID NO: 859091 - RNA, 22 nt, Human
uuuuucaagacaaccugcaugu

SEQ ID NO: 859092 - RNA, 22 nt, Human
gugaauaaucacccuucuggau

SEQ ID NO: 859093 - RNA, 22 nt, Human
ucuuugcaaaauacaacaaugg

SEQ ID NO: 859094 - RNA, 22 nt, Human
acucaggagggaucagcuauca

SEQ ID NO: 859095 - RNA, 22 nt, Human
cccaggauggggcugcaguuau

SEQ ID NO: 859096 - RNA, 22 nt, Human
aauggcuucugaagcacacuuu

SEQ ID NO: 859097 - RNA, 22 nt, Human
cagcugccugucuggaggcaau

SEQ ID NO: 859098 - RNA, 22 nt, Human
uaugcugugcuagauacaauau

SEQ ID NO: 859099 - RNA, 22 nt, Human
auagaaauggcagcuggugcua

SEQ ID NO: 859100 - RNA, 22 nt, Human
ucuucacaugaccuucaugucu

SEQ ID NO: 859101 - RNA, 17 nt, Human
uccaugagacaugaaga

SEQ ID NO: 859102 - RNA, 22 nt, Human
uggaaugacagagagucugaau

SEQ ID NO: 859103 - RNA, 22 nt, Human
ccagugcuaagguagccucugc

SEQ ID NO: 859104 - RNA, 21 nt, Human
agaggcaggcauuaaguacac

SEQ ID NO: 859105 - RNA, 22 nt, Human
caaguccaggucaauuuaaagc

SEQ ID NO: 859106 - RNA, 22 nt, Human
aggcaacuguuugauaauguug

SEQ ID NO: 859107 - RNA, 21 nt, Human
cucuugugucagagccagagg

SEQ ID NO: 859108 - RNA, 22 nt, Human
auggcuuucagauggugaaaga

SEQ ID NO: 859109 - RNA, 22 nt, Human
ccuugcauauauuauaucuuug

SEQ ID NO: 859110 - RNA, 22 nt, Human
gagcagcucgagaaggaagcag

SEQ ID NO: 859111 - RNA, 22 nt, Human
auacaacuuuacaugcaauucc

SEQ ID NO: 859112 - RNA, 22 nt, Human
aggauuuaccgucauuuagucu

SEQ ID NO: 859113 - RNA, 22 nt, Human
uuuauccaccuuacccuguucc

SEQ ID NO: 859114 - RNA, 22 nt, Human
uaucagaagacuuacaguaucg

SEQ ID NO: 859115 - RNA, 22 nt, Human
ugaaacuaggccaaucaaauua

SEQ ID NO: 859116 - RNA, 22 nt, Human
uauguguuugacacccugcaag

SEQ ID NO: 859117 - RNA, 18 nt, Human
ugugaacacauuuuucug

SEQ ID NO: 859118 - RNA, 22 nt, Human
guucuaauuuggggcuccuuag

SEQ ID NO: 859119 - RNA, 22 nt, Human
aggcagaccaugaaucaugacc

SEQ ID NO: 859120 - RNA, 22 nt, Human
gggcagcugccagaggccaugg

SEQ ID NO: 859121 - RNA, 22 nt, Human
auguucaaacuuuuuacacacc

SEQ ID NO: 859122 - RNA, 22 nt, Human
uuugaaguggaaaaggauuuaa

SEQ ID NO: 859123 - RNA, 22 nt, Human
ucuggaucaccacuucugccuc

SEQ ID NO: 859124 - RNA, 22 nt, Human
ucccaggauguuuauggcuggu

SEQ ID NO: 859125 - RNA, 22 nt, Human
gccaugcuugguaugcugugag

SEQ ID NO: 859126 - RNA, 22 nt, Human
uaucuguucaauggaagaugac

SEQ ID NO: 859127 - RNA, 22 nt, Human
cucagugugaaugcucaguaaa

SEQ ID NO: 859128 - RNA, 22 nt, Human
aaguugagaugucauaggagac

SEQ ID NO: 859129 - RNA, 22 nt, Human
ggcagcuaguuuaagaaagagg

SEQ ID NO: 859130 - RNA, 22 nt, Human
uuugaaagggaaauaaacuccu

SEQ ID NO: 859131 - RNA, 22 nt, Human
augguuuuccucugcugcuuaa

SEQ ID NO: 859132 - RNA, 22 nt, Human
gcagaggagcaaguugcuacag

SEQ ID NO: 859133 - RNA, 22 nt, Human
aaacuuuguagagaaugcuggc

SEQ ID NO: 859134 - RNA, 22 nt, Human
acagucuugagcaucagccaga

SEQ ID NO: 859135 - RNA, 21 nt, Human
cacucaggguaugugccaggc

SEQ ID NO: 859136 - RNA, 22 nt, Human
aggaggggcaaugauagucugg

SEQ ID NO: 859137 - RNA, 22 nt, Human
uaucagaaugcagccaugugca

SEQ ID NO: 859138 - RNA, 22 nt, Human
ugaagaauaagauagauggagc

SEQ ID NO: 859139 - RNA, 22 nt, Human
ucuucuuccucauuuauacaua

SEQ ID NO: 859140 - RNA, 22 nt, Human
guaggcagggcuguggggagaa

SEQ ID NO: 859141 - RNA, 22 nt, Human
cccaggagguuggggcuacagu

SEQ ID NO: 859142 - RNA, 22 nt, Human
gggcagcuggcuuauagguuug

SEQ ID NO: 859143 - RNA, 22 nt, Human
gcaaagcauucuguggagucua

SEQ ID NO: 859144 - RNA, 22 nt, Human
gaauacauuggaaaucagaaua

SEQ ID NO: 859145 - RNA, 22 nt, Human
agaggcggagguugcagugagc

SEQ ID NO: 859146 - RNA, 23 nt, Human
ggccauuucauuugguucaaacu

SEQ ID NO: 859147 - RNA, 22 nt, Human
aaucagaauuuguccccugagu

SEQ ID NO: 859148 - RNA, 22 nt, Human
guacagaauuaugccaugaggg

SEQ ID NO: 859149 - RNA, 22 nt, Human
aaaucucaauuugaauuguagc

SEQ ID NO: 859150 - RNA, 22 nt, Human
ugaaggccucugguacaugcca

SEQ ID NO: 859151 - RNA, 22 nt, Human
ucauuuguaccauuuuuuaaga

SEQ ID NO: 859152 - RNA, 20 nt, Human
gcccaggaauuugcauuucu

SEQ ID NO: 859153 - RNA, 22 nt, Human
auuuguugcuagcagcacugau

SEQ ID NO: 859154 - RNA, 22 nt, Human
aaaggccaauaaagacaagcug

SEQ ID NO: 859155 - RNA, 22 nt, Human
aaagcagaggugauaugacuua

SEQ ID NO: 859156 - RNA, 22 nt, Human
cccaggaguaagugacauuguu

SEQ ID NO: 859157 - RNA, 22 nt, Human
uaucaagugacuaucacagaac

SEQ ID NO: 859158 - RNA, 20 nt, Human
aggcaccugucacaggugag

SEQ ID NO: 859159 - RNA, 20 nt, Human
auucuacaagaauaagcaug

SEQ ID NO: 859160 - RNA, 22 nt, Human
uugaauaauuaauuacacucag

SEQ ID NO: 859161 - RNA, 22 nt, Human
uucuuugaguuaguacagucca

SEQ ID NO: 859162 - RNA, 22 nt, Human
ucuagacacuacuaguaaccgg

SEQ ID NO: 859163 - RNA, 22 nt, Human
guagggagcccagagcccagug

SEQ ID NO: 859164 - RNA, 22 nt, Human
aaaggccacacagagcagggag

SEQ ID NO: 859165 - RNA, 20 nt, Human
cccaggagugagcagcuuua

SEQ ID NO: 859166 - RNA, 20 nt, Human
aagggcagagggaacagacu

SEQ ID NO: 859167 - RNA, 22 nt, Human
uccauuuuucaugacuccucaa

SEQ ID NO: 859168 - RNA, 22 nt, Human
ucagugugaguaccaugcucag

SEQ ID NO: 859169 - RNA, 22 nt, Human
uuggcagugaugcagcuuguuc

SEQ ID NO: 859170 - RNA, 22 nt, Human
guucuucaucuuaaccaucugu

SEQ ID NO: 859171 - RNA, 22 nt, Human
ggaggaugagcuacgaggagcu

SEQ ID NO: 859172 - RNA, 22 nt, Human
augguauugcaacaacugucau

SEQ ID NO: 859173 - RNA, 22 nt, Human
gucccaggugggcuccaccucu

SEQ ID NO: 859174 - RNA, 22 nt, Human
ccucagggaaugggaggcuggg

SEQ ID NO: 859175 - RNA, 22 nt, Human
uagggaugacgaaaggacagag

SEQ ID NO: 859176 - RNA, 22 nt, Human
aguauaauuagauaucaaaagu

SEQ ID NO: 859177 - RNA, 22 nt, Human
ugaggcagaguaagauacauga

SEQ ID NO: 859178 - RNA, 23 nt, Human
aucauucuccaaucuggagcagg

SEQ ID NO: 859179 - RNA, 20 nt, Human
cugcuguguuauuguagaac

SEQ ID NO: 859180 - RNA, 22 nt, Human
aaguuacacauuuucauuguaa

SEQ ID NO: 859181 - RNA, 22 nt, Human
cuuguaauuauaauguacuguu

SEQ ID NO: 859182 - RNA, 22 nt, Human
gcagcugcagacccucagugcu

SEQ ID NO: 859183 - RNA, 20 nt, Human
accaauguuagcuuaguacu

SEQ ID NO: 859184 - RNA, 22 nt, Human
cuuaaaaucuggcaguuagcua

SEQ ID NO: 859185 - RNA, 20 nt, Human
uauuccaaggguagagaaaa

SEQ ID NO: 859186 - RNA, 22 nt, Human
cugcuuuggacaacuauucuug

SEQ ID NO: 859187 - RNA, 22 nt, Human
uuggaucaaauuucaugcuguc

SEQ ID NO: 859188 - RNA, 22 nt, Human
augaaggcuguguagauggaug

SEQ ID NO: 859189 - RNA, 22 nt, Human
aaggcaguuugggccaccaucu

SEQ ID NO: 859190 - RNA, 22 nt, Human
uauaucaccaaaaacaguucug

SEQ ID NO: 859191 - RNA, 20 nt, Human
cucuccucacccgugucagg

SEQ ID NO: 859192 - RNA, 22 nt, Human
uuucuucagccuucacaaccug

SEQ ID NO: 859193 - RNA, 22 nt, Human
uuuuguuguaauauaccuaucc

SEQ ID NO: 859194 - RNA, 23 nt, Human
auuucuaggggauuuucuggugc

SEQ ID NO: 859195 - RNA, 22 nt, Human
ugaacucgggaggaggcugcag

SEQ ID NO: 859196 - RNA, 22 nt, Human
ucagucucaucaacucuauucc

SEQ ID NO: 859197 - RNA, 22 nt, Human
cuuaaagaguauuuaauauaau

SEQ ID NO: 859198 - RNA, 22 nt, Human
gaggucaggggagaggcugaug

SEQ ID NO: 859199 - RNA, 22 nt, Human
cuucuucaagagaaugggagac

SEQ ID NO: 859200 - RNA, 18 nt, Human
uggcagcaggaagccauu

SEQ ID NO: 859201 - RNA, 22 nt, Human
ggcaccagccaccuauuucuag

SEQ ID NO: 859202 - RNA, 22 nt, Human
agagugcagauaagagaauguu

SEQ ID NO: 859203 - RNA, 22 nt, Human
augcugugauuguagaaauauu

SEQ ID NO: 859204 - RNA, 21 nt, Human
cucaaagaccaaaaguguaga

SEQ ID NO: 859205 - RNA, 22 nt, Human
ggaggggagucucccaaagccg

SEQ ID NO: 859206 - RNA, 22 nt, Human
caggaaagggaugggcugccac

SEQ ID NO: 859207 - RNA, 22 nt, Human
agugcagcaugcuggggaggcu

SEQ ID NO: 859208 - RNA, 22 nt, Human
cauuaauauuguucuucuuuag

SEQ ID NO: 859209 - RNA, 22 nt, Human
aauuccaggcagaaaugugagu

SEQ ID NO: 859210 - RNA, 22 nt, Human
aucuuucuauuucuaaaaacua

SEQ ID NO: 859211 - RNA, 22 nt, Human
uccuucuuugacaaguggcaga

SEQ ID NO: 859212 - RNA, 22 nt, Human
ccaggagauaagcugaguuuau

SEQ ID NO: 859213 - RNA, 22 nt, Human
auuaaauuagcaaacugugaaa

SEQ ID NO: 859214 - RNA, 22 nt, Human
ggcagcugucucugaguuagca

SEQ ID NO: 859215 - RNA, 20 nt, Human
caggagggacauuucagcau

SEQ ID NO: 859216 - RNA, 22 nt, Human
caugcugugcaucuugaugacc

SEQ ID NO: 859217 - RNA, 22 nt, Human
uugcuuugccaccagaagucua

SEQ ID NO: 859218 - RNA, 22 nt, Human
aaguccuuguauacagaaucaa

SEQ ID NO: 859219 - RNA, 22 nt, Human
gcagaauugauggagaacuuaa

SEQ ID NO: 859220 - RNA, 22 nt, Human
uaauuuuuccacguacacuggg

SEQ ID NO: 859221 - RNA, 22 nt, Human
ggcuuaaugguucuuuuucuca

SEQ ID NO: 859222 - RNA, 22 nt, Human
ggauguugauugaauggccauu

SEQ ID NO: 859223 - RNA, 22 nt, Human
aggaugaggcuggcaggucuug

SEQ ID NO: 859224 - RNA, 22 nt, Human
ccaggagaauaauggcagauua

SEQ ID NO: 859225 - RNA, 23 nt, Human
uuccacaaugaaaauaaagcagg

SEQ ID NO: 859226 - RNA, 22 nt, Human
aucagaaaauacccaguguuua

SEQ ID NO: 859227 - RNA, 22 nt, Human
acaggauuagcaaguaaucagg

SEQ ID NO: 859228 - RNA, 22 nt, Human
gaggagagaugguagauugggu

SEQ ID NO: 859229 - RNA, 22 nt, Human
uccaggaguuugagacugcagu

SEQ ID NO: 859230 - RNA, 22 nt, Human
auggaucacagugccgugggug

SEQ ID NO: 859231 - RNA, 22 nt, Human
ucccaggaggugcuuccuagga

SEQ ID NO: 859232 - RNA, 22 nt, Human
guguugaugacauuuuagaaac

SEQ ID NO: 859233 - RNA, 22 nt, Human
ccacagagcauuagauuucaga

SEQ ID NO: 859234 - RNA, 22 nt, Human
cauagaaacuugcagcaagcac

SEQ ID NO: 859235 - RNA, 20 nt, Human
uuucugugcccaggucuguu

SEQ ID NO: 859236 - RNA, 17 nt, Human
agcugaccagauggacu

SEQ ID NO: 859237 - RNA, 20 nt, Human
gauuucaaagcagaguggcc

SEQ ID NO: 859238 - RNA, 21 nt, Human
uuucagaccuaucuuugaagg

SEQ ID NO: 859239 - RNA, 22 nt, Human
ugaggcaggagguugagaacug

SEQ ID NO: 859240 - RNA, 22 nt, Human
uaauuuuaugacaguguauuuu

SEQ ID NO: 859241 - RNA, 22 nt, Human
augguuuuucaaguauucagaa

SEQ ID NO: 859242 - RNA, 22 nt, Human
uggcagcugucuguggggucuc

SEQ ID NO: 859243 - RNA, 22 nt, Human
uacagagauacucuagaucaaa

SEQ ID NO: 859244 - RNA, 22 nt, Human
cagcugacccgugggaggcggg

SEQ ID NO: 859245 - RNA, 22 nt, Human
cuugcuggugguguuuucuaug

SEQ ID NO: 859246 - RNA, 22 nt, Human
uggcagagcaaaaagauagaau

SEQ ID NO: 859247 - RNA, 22 nt, Human
ucuucucuccugcuuggcagaa

SEQ ID NO: 859248 - RNA, 22 nt, Human
aaguaaauaucuguuuauagca

SEQ ID NO: 859249 - RNA, 22 nt, Human
uucucuuuugugaugugagaug

SEQ ID NO: 859250 - RNA, 22 nt, Human
uuccaaaguuaguuauuagaaa

SEQ ID NO: 859251 - RNA, 22 nt, Human
aaugguauuugucaagcauagu

SEQ ID NO: 859252 - RNA, 22 nt, Human
cccaggaggccaagguugcagu

SEQ ID NO: 859253 - RNA, 22 nt, Human
cauuuacauaacaguaacgcug

SEQ ID NO: 859254 - RNA, 22 nt, Human
augaggcaucugcagucacuag

SEQ ID NO: 859255 - RNA, 20 nt, Human
aggcaguuagaaggagauga

SEQ ID NO: 859256 - RNA, 22 nt, Human
ucauagaagcaccagaagauau

SEQ ID NO: 859257 - RNA, 22 nt, Human
ucucaggaagauuagggcuaag

SEQ ID NO: 859258 - RNA, 22 nt, Human
aauacugucuuucacagauauu

SEQ ID NO: 859259 - RNA, 22 nt, Human
uaaucuacuguuuauaugaaau

SEQ ID NO: 859260 - RNA, 23 nt, Human
uaugaacugcauugcuggugugu

SEQ ID NO: 859261 - RNA, 19 nt, Human
ucucugcuucucuuggcau

SEQ ID NO: 859262 - RNA, 16 nt, Human
ucccaggaggcggaac

SEQ ID NO: 859263 - RNA, 22 nt, Human
uggcauuuagaaaacaacaugu

SEQ ID NO: 859264 - RNA, 22 nt, Human
uacuuuuagccuauuugauucu

SEQ ID NO: 859265 - RNA, 22 nt, Human
uccaggagcauccaggugaagc

SEQ ID NO: 859266 - RNA, 22 nt, Human
aggguagggccguagggccaug

SEQ ID NO: 859267 - RNA, 22 nt, Human
cuccccagguucaggagguggg

SEQ ID NO: 859268 - RNA, 22 nt, Human
ucaggauggcuucugcaucaaa

SEQ ID NO: 859269 - RNA, 22 nt, Human
uucccucuccuacucaggaaag

SEQ ID NO: 859270 - RNA, 23 nt, Human
agaugaggcuucuccauguuggu

SEQ ID NO: 859271 - RNA, 22 nt, Human
uaagauaaguggguugagaugg

SEQ ID NO: 859272 - RNA, 22 nt, Human
cuuucauucuuagauauuagug

SEQ ID NO: 859273 - RNA, 22 nt, Human
uugaaguuguaguucagugaag

SEQ ID NO: 859274 - RNA, 23 nt, Human
aaacugcuuccaauuccugccau

SEQ ID NO: 859275 - RNA, 22 nt, Human
ucaugcuuaaaagacacuugag

SEQ ID NO: 859276 - RNA, 22 nt, Human
uaacaucuuuagcagcucgaac

SEQ ID NO: 859277 - RNA, 22 nt, Human
gagagcuggguucaaguagcug

SEQ ID NO: 859278 - RNA, 22 nt, Human
auucauaacggcaaaugucacc

SEQ ID NO: 859279 - RNA, 22 nt, Human
uuuaggcagcagugaggaugaa

SEQ ID NO: 859280 - RNA, 22 nt, Human
auccuuagguggugcaucaggg

SEQ ID NO: 859281 - RNA, 22 nt, Human
caguccuuaaggaaacauuugu

SEQ ID NO: 859282 - RNA, 22 nt, Human
ggagaggagcuauugggggcuc

SEQ ID NO: 859283 - RNA, 22 nt, Human
aucuuucagggccauuuguauu

SEQ ID NO: 859284 - RNA, 22 nt, Human
guaggcagauaggagugcagcc

SEQ ID NO: 859285 - RNA, 22 nt, Human
gaggcugcccaacuggagugga

SEQ ID NO: 859286 - RNA, 22 nt, Human
ucagaauucugaccuuggguca

SEQ ID NO: 859287 - RNA, 18 nt, Human
agaugaaagcaaaugaca

SEQ ID NO: 859288 - RNA, 22 nt, Human
uugaaagacuucuccugugaaa

SEQ ID NO: 859289 - RNA, 23 nt, Human
uuuggacuugugacucuucuccu

SEQ ID NO: 859290 - RNA, 22 nt, Human
uuuugugagcccauaaaugcca

SEQ ID NO: 859291 - RNA, 22 nt, Human
uugcugaauugaauccuuuggu

SEQ ID NO: 859292 - RNA, 22 nt, Human
ggagggaaugucuagcauucuu

SEQ ID NO: 859293 - RNA, 20 nt, Human
gaaguccuuucacucuuccc

SEQ ID NO: 859294 - RNA, 22 nt, Human
ggauucuaacugaacagaauau

SEQ ID NO: 859295 - RNA, 22 nt, Human
cucagaauuuagggcucugagg

SEQ ID NO: 859296 - RNA, 18 nt, Human
ucuuccaacacugacacc

SEQ ID NO: 859297 - RNA, 22 nt, Human
agcucccagagcucgagaguaa

SEQ ID NO: 859298 - RNA, 22 nt, Human
uuuaaugauagcuguuucacau

SEQ ID NO: 859299 - RNA, 22 nt, Human
ugcaggaacugggagggauagu

SEQ ID NO: 859300 - RNA, 22 nt, Human
caaguaaagaaucacauuucuu

SEQ ID NO: 859301 - RNA, 20 nt, Human
uuucacagucccuguuuccu

SEQ ID NO: 859302 - RNA, 22 nt, Human
auuggcagaaacagcagggcca

SEQ ID NO: 859303 - RNA, 22 nt, Human
guauacagauacuuagacgugc

SEQ ID NO: 859304 - RNA, 19 nt, Human
uggagggguuugaaugugg

SEQ ID NO: 859305 - RNA, 22 nt, Human
aaucagaacgcucgaucuucgg

SEQ ID NO: 859306 - RNA, 22 nt, Human
gcccaguaguucaagguugcag

SEQ ID NO: 859307 - RNA, 22 nt, Human
ggagguggcagggaacauaauu

SEQ ID NO: 859308 - RNA, 22 nt, Human
acaacauucuuaaauacacuga

SEQ ID NO: 859309 - RNA, 22 nt, Human
caaugaaagcaacugccuauaa

SEQ ID NO: 859310 - RNA, 22 nt, Human
guucuucaggcugugcucuaga

SEQ ID NO: 859311 - RNA, 22 nt, Human
ugaaaugaaugugauucgauag

SEQ ID NO: 859312 - RNA, 22 nt, Human
uuucuucagccacuccaaacug

SEQ ID NO: 859313 - RNA, 22 nt, Human
aagauggaguaguguaaugguu

SEQ ID NO: 859314 - RNA, 22 nt, Human
gcauguguuauuuuauguauga

SEQ ID NO: 859315 - RNA, 22 nt, Human
ucagccagaggcuucuugguuu

SEQ ID NO: 859316 - RNA, 22 nt, Human
agaggggaggcgaaccagaguc

SEQ ID NO: 859317 - RNA, 22 nt, Human
cagguaaaaauaaauuugugag

SEQ ID NO: 859318 - RNA, 22 nt, Human
ucugggaagcugguccuguucu

SEQ ID NO: 859319 - RNA, 22 nt, Human
gcaggggcuaaggacacagaga

SEQ ID NO: 859320 - RNA, 22 nt, Human
aguaaacaguaucuuuaguguc

SEQ ID NO: 859321 - RNA, 22 nt, Human
uagaaauaaaucugcagcuggg

SEQ ID NO: 859322 - RNA, 23 nt, Human
cauaaaauauuaguaugguagca

SEQ ID NO: 859323 - RNA, 22 nt, Human
uaaaugaagaaauggagauugu

SEQ ID NO: 859324 - RNA, 22 nt, Human
ugaaauagucuaaaaaaccaga

SEQ ID NO: 859325 - RNA, 22 nt, Human
acuauacauaaaacauuugggu

SEQ ID NO: 859326 - RNA, 20 nt, Human
gucaggauuaguaaacucug

SEQ ID NO: 859327 - RNA, 22 nt, Human
agggcagcagcggcccaggccu

SEQ ID NO: 859328 - RNA, 22 nt, Human
guugaaagaugucuugguuccc

SEQ ID NO: 859329 - RNA, 21 nt, Human
auacauucuauuaagcauuua

SEQ ID NO: 859330 - RNA, 23 nt, Human
gaggcacucaggaaaugugagug

SEQ ID NO: 859331 - RNA, 22 nt, Human
aggacagcccuugagagcacau

SEQ ID NO: 859332 - RNA, 22 nt, Human
gggacgggcaguccaagggguc

SEQ ID NO: 859333 - RNA, 22 nt, Human
uuauuauagauuaugcaagauu

SEQ ID NO: 859334 - RNA, 22 nt, Human
uuaagcaacacacauuaauuau

SEQ ID NO: 859335 - RNA, 22 nt, Human
aggcaggcacuccggaaguguc

SEQ ID NO: 859336 - RNA, 22 nt, Human
ugaguuuuuucaacauaugaag

SEQ ID NO: 859337 - RNA, 22 nt, Human
gccaggagccagcuucuuagca

SEQ ID NO: 859338 - RNA, 22 nt, Human
aggcagauauuggggugaugug

SEQ ID NO: 859339 - RNA, 22 nt, Human
ucaggagacuuaugucacagug

SEQ ID NO: 859340 - RNA, 22 nt, Human
uuuuaagaugcuaguauuucag

SEQ ID NO: 859341 - RNA, 22 nt, Human
uuagccauauagaaaaagagcu

SEQ ID NO: 859342 - RNA, 22 nt, Human
uaaguccuaauggcagaagucu

SEQ ID NO: 859343 - RNA, 20 nt, Human
cccagugaagcauggaagag

SEQ ID NO: 859344 - RNA, 22 nt, Human
gcuauacagcaggagaauggaa

SEQ ID NO: 859345 - RNA, 17 nt, Human
aaggccauuuccaccca

SEQ ID NO: 859346 - RNA, 22 nt, Human
uggcuuaauauuucauauuuaa

SEQ ID NO: 859347 - RNA, 22 nt, Human
cccaggaccgcgcggcugagcg

SEQ ID NO: 859348 - RNA, 22 nt, Human
uaugucaaaguuaagaaauagg

SEQ ID NO: 859349 - RNA, 22 nt, Human
gagcagcuccagccgcaugacu

SEQ ID NO: 859350 - RNA, 22 nt, Human
cagcuucugcuaucgaacaucu

SEQ ID NO: 859351 - RNA, 22 nt, Human
uguccucuuccagugcuccuuc

SEQ ID NO: 859352 - RNA, 23 nt, Human
aggcccaacucugugagggcugc

SEQ ID NO: 859353 - RNA, 22 nt, Human
agaaaagaggcuuucuaagcau

SEQ ID NO: 859354 - RNA, 22 nt, Human
gcucccagacugaccagaggug

SEQ ID NO: 859355 - RNA, 22 nt, Human
ugcaacuuguuuggagagaaag

SEQ ID NO: 859356 - RNA, 20 nt, Human
cuguaucagguuacaaagua

SEQ ID NO: 859357 - RNA, 20 nt, Human
uuuuccagaaaguaucauug

SEQ ID NO: 859358 - RNA, 22 nt, Human
uuucuucucgacaccuuauccc

SEQ ID NO: 859359 - RNA, 22 nt, Human
gacggcagaaacucaugagguc

SEQ ID NO: 859360 - RNA, 22 nt, Human
uugaaauggaagugaaaauucu

SEQ ID NO: 859361 - RNA, 22 nt, Human
uaaaauguuugcaagagaccag

SEQ ID NO: 859362 - RNA, 22 nt, Human
aaugugaucgcuuuagaagcuu

SEQ ID NO: 859363 - RNA, 21 nt, Human
cauuuacaugacagauugguu

SEQ ID NO: 859364 - RNA, 22 nt, Human
ggagcggagggagggccacugu

SEQ ID NO: 859365 - RNA, 22 nt, Human
gcacaauaacagccaagguuau

SEQ ID NO: 859366 - RNA, 22 nt, Human
ugcauaguucuccuuccuccuc

SEQ ID NO: 859367 - RNA, 23 nt, Human
cuuuuaacuagaguaucagcugc

SEQ ID NO: 859368 - RNA, 22 nt, Human
ucagaaaagagaaaaucuuaua

SEQ ID NO: 859369 - RNA, 22 nt, Human
caggggaguuuuaugcaacaga

SEQ ID NO: 859370 - RNA, 21 nt, Human
uuccagagauuguuucaccug

SEQ ID NO: 859371 - RNA, 22 nt, Human
acccaggagacagguugcagug

SEQ ID NO: 859372 - RNA, 22 nt, Human
cuucagaauccagaaucagaau

SEQ ID NO: 859373 - RNA, 22 nt, Human
uucucugaguacguuucagugu

SEQ ID NO: 859374 - RNA, 21 nt, Human
uggcaggcagcuggaagcuug

SEQ ID NO: 859375 - RNA, 22 nt, Human
uggcuuuaggagcuauauaccu

SEQ ID NO: 859376 - RNA, 22 nt, Human
agaagucauuuauguuagauga

SEQ ID NO: 859377 - RNA, 22 nt, Human
uuuaggcaagggcaagauuauc

SEQ ID NO: 859378 - RNA, 22 nt, Human
auuguucaaagugcuuugcaug

SEQ ID NO: 859379 - RNA, 22 nt, Human
cuuaaagaugucaaggcuguuu

SEQ ID NO: 859380 - RNA, 22 nt, Human
gacccaggcccaaggcugccag

SEQ ID NO: 859381 - RNA, 22 nt, Human
caaauuccucagaaucagaaaa

SEQ ID NO: 859382 - RNA, 22 nt, Human
uaauuacagguccaaaacaauc

SEQ ID NO: 859383 - RNA, 22 nt, Human
uuugcagucaaauuugcuaaau

SEQ ID NO: 859384 - RNA, 22 nt, Human
cuuugaauuccaguacaauaac

SEQ ID NO: 859385 - RNA, 23 nt, Human
uugaaagguagcuggcagcuaga

SEQ ID NO: 859386 - RNA, 22 nt, Human
cccaggagguggaguucacagu

SEQ ID NO: 859387 - RNA, 22 nt, Human
ucucagucagccuugauguccc

SEQ ID NO: 859388 - RNA, 22 nt, Human
gacagugcauuuccuggcaugg

SEQ ID NO: 859389 - RNA, 22 nt, Human
aaauagauugcugaggcauuac

SEQ ID NO: 859390 - RNA, 22 nt, Human
ggcagcuuguccuggaggaugg

SEQ ID NO: 859391 - RNA, 22 nt, Human
gaaacaacuacuauugauuucu

SEQ ID NO: 859392 - RNA, 22 nt, Human
ugguuuaaccugucucuuauua

SEQ ID NO: 859393 - RNA, 22 nt, Human
auaaagauuuuuaggcauuucu

SEQ ID NO: 859394 - RNA, 22 nt, Human
uuuuaguguagucaccgugggu

SEQ ID NO: 859395 - RNA, 22 nt, Human
auuaggcacuagaaugucaauu

SEQ ID NO: 859396 - RNA, 22 nt, Human
cucuucucugcagccuuugaag

SEQ ID NO: 859397 - RNA, 22 nt, Human
uaggagggcccugaaaauggca

SEQ ID NO: 859398 - RNA, 22 nt, Human
ucccaggaucugagggcagaga

SEQ ID NO: 859399 - RNA, 22 nt, Human
aagcaauauacugauaugauua

SEQ ID NO: 859400 - RNA, 20 nt, Human
aaucagaaagugugagcucu

SEQ ID NO: 859401 - RNA, 22 nt, Human
ucuucagauggccaguuguccc

SEQ ID NO: 859402 - RNA, 22 nt, Human
aaggcaguagguguuucaaacu

SEQ ID NO: 859403 - RNA, 22 nt, Human
aggcggcuccgggagugugggc

SEQ ID NO: 859404 - RNA, 22 nt, Human
gccaucacauccaggcuaccuc

SEQ ID NO: 859405 - RNA, 22 nt, Human
aaagccauuacaaaauuucaua

SEQ ID NO: 859406 - RNA, 23 nt, Human
uucuucucaauuaguugauucag

SEQ ID NO: 859407 - RNA, 22 nt, Human
uaggagaggugaauggcacacu

SEQ ID NO: 859408 - RNA, 22 nt, Human
uuugaaagaaaccagugaguga

SEQ ID NO: 859409 - RNA, 22 nt, Human
ucagagaguuacacaaauuguu

SEQ ID NO: 859410 - RNA, 19 nt, Human
gaggagcuaucggagacag

SEQ ID NO: 859411 - RNA, 22 nt, Human
cguccuuacagagggucacagc

SEQ ID NO: 859412 - RNA, 22 nt, Human
agacgagggcccccaggacagc

SEQ ID NO: 859413 - RNA, 22 nt, Human
uccaggagaggccugaccaggu

SEQ ID NO: 859414 - RNA, 22 nt, Human
ccagauaaggcuuuuuaaaagc

SEQ ID NO: 859415 - RNA, 22 nt, Human
uuuccaaaaguuuguucugugc

SEQ ID NO: 859416 - RNA, 22 nt, Human
cuccuuagugccucugcacgag

SEQ ID NO: 859417 - RNA, 22 nt, Human
uuacaguuuaguccaagccaga

SEQ ID NO: 859418 - RNA, 22 nt, Human
uucuagaugauaaaccagcagc

SEQ ID NO: 859419 - RNA, 22 nt, Human
aaauuaguacauugcaaagucc

SEQ ID NO: 859420 - RNA, 22 nt, Human
aagacugucuuuucugagugac

SEQ ID NO: 859421 - RNA, 22 nt, Human
auuggcaggaaccgaggagggg

SEQ ID NO: 859422 - RNA, 22 nt, Human
ccaugagcuucaacugacacag

SEQ ID NO: 859423 - RNA, 22 nt, Human
gaggaggccaguggaaggaagc

SEQ ID NO: 859424 - RNA, 22 nt, Human
aguccuuagaacagugccuggg

SEQ ID NO: 859425 - RNA, 22 nt, Human
uguccuuagaagaagugaaaga

SEQ ID NO: 859426 - RNA, 22 nt, Human
acaacuuuaauggguuucagcu

SEQ ID NO: 859427 - RNA, 22 nt, Human
aaagcagagcagggcacuuaug

SEQ ID NO: 859428 - RNA, 22 nt, Human
gaagaauccaugcuaauuuacc

SEQ ID NO: 859429 - RNA, 22 nt, Human
uaagacuucauuaguaauaugg

SEQ ID NO: 859430 - RNA, 22 nt, Human
gcuucacacuaaaaauguuaaa

SEQ ID NO: 859431 - RNA, 22 nt, Human
uaucuguuaugggcugaauugc

SEQ ID NO: 859432 - RNA, 22 nt, Human
aguggcaggcggagauguagga

SEQ ID NO: 859433 - RNA, 19 nt, Human
acuggcaguuucugcaugg

SEQ ID NO: 859434 - RNA, 22 nt, Human
uagcccagaagagggaagcaac

SEQ ID NO: 859435 - RNA, 22 nt, Human
gcugccagccaacuugcugugc

SEQ ID NO: 859436 - RNA, 22 nt, Human
agaggggaguccuaaucugauu

SEQ ID NO: 859437 - RNA, 22 nt, Human
uuaaagggccgauuuccaggcc

SEQ ID NO: 859438 - RNA, 22 nt, Human
acccaggagguggaggcugcag

SEQ ID NO: 859439 - RNA, 21 nt, Human
gagugcagcaagguagagucu

SEQ ID NO: 859440 - RNA, 22 nt, Human
agcugcuacugcucugccagag

SEQ ID NO: 859441 - RNA, 23 nt, Human
cugcuguguuggucucgauggga

SEQ ID NO: 859442 - RNA, 22 nt, Human
ucugguaaccuuuaucccuccu

SEQ ID NO: 859443 - RNA, 22 nt, Human
acaaauaugguacucggagaaa

SEQ ID NO: 859444 - RNA, 22 nt, Human
guaggcagucucucaggugauc

SEQ ID NO: 859445 - RNA, 22 nt, Human
aggauuuacaaugauucuaggu

SEQ ID NO: 859446 - RNA, 20 nt, Human
gaaguccuguuauauccuuu

SEQ ID NO: 859447 - RNA, 22 nt, Human
cuuuacauccuguuucccguuu

SEQ ID NO: 859448 - RNA, 22 nt, Human
gugauuuaguguuaaguauguu

SEQ ID NO: 859449 - RNA, 22 nt, Human
cuguggaaauaaacaaugcuaa

SEQ ID NO: 859450 - RNA, 22 nt, Human
uagaaacagauguuuuugaaga

SEQ ID NO: 859451 - RNA, 22 nt, Human
acacuaaugagaaaggaauuaa

SEQ ID NO: 859452 - RNA, 22 nt, Human
agcuagccuaggcagagugcau

SEQ ID NO: 859453 - RNA, 22 nt, Human
agucucugcugguugugccuau

SEQ ID NO: 859454 - RNA, 22 nt, Human
ugaaugaauccuaacaaagaca

SEQ ID NO: 859455 - RNA, 23 nt, Human
uauuacaauuggucuuauuaaga

SEQ ID NO: 859456 - RNA, 22 nt, Human
uugcaaaggggaauaaagcaau

SEQ ID NO: 859457 - RNA, 22 nt, Human
uuccaaaccucaaauaauuaau

SEQ ID NO: 859458 - RNA, 22 nt, Human
ccaggcugugguuuagauagag

SEQ ID NO: 859459 - RNA, 22 nt, Human
uagaauucaagauucaacaggc

SEQ ID NO: 859460 - RNA, 22 nt, Human
gcuuuggaugugugccugaggu

SEQ ID NO: 859461 - RNA, 22 nt, Human
ugaggcagaaaauagcaguuca

SEQ ID NO: 859462 - RNA, 22 nt, Human
uaucagaacacagccacagcca

SEQ ID NO: 859463 - RNA, 22 nt, Human
cuacuucuaaguacauggugau

SEQ ID NO: 859464 - RNA, 22 nt, Human
caagaugggcaccccagcaccu

SEQ ID NO: 859465 - RNA, 22 nt, Human
gcccaggaguugguggcugcag

SEQ ID NO: 859466 - RNA, 22 nt, Human
uuuguaaaggccugaauuucag

SEQ ID NO: 859467 - RNA, 22 nt, Human
aagagggcugcaaucuuauugc

SEQ ID NO: 859468 - RNA, 22 nt, Human
auugugcaaauauuaucuguag

SEQ ID NO: 859469 - RNA, 22 nt, Human
uccaggagacacaagguacaua

SEQ ID NO: 859470 - RNA, 22 nt, Human
ccuccucugggaagauucagag

SEQ ID NO: 859471 - RNA, 22 nt, Human
ugaaugaaugaauuaauagagu

SEQ ID NO: 859472 - RNA, 22 nt, Human
uugauccaguugaaagugauga

SEQ ID NO: 859473 - RNA, 22 nt, Human
cgaggcagggaagcugcaaaag

SEQ ID NO: 859474 - RNA, 22 nt, Human
ccugucacgaugacugcacucu

SEQ ID NO: 859475 - RNA, 22 nt, Human
cagucaccaccagguggcagua

SEQ ID NO: 859476 - RNA, 22 nt, Human
gcuucccacagcuggacugggg

SEQ ID NO: 859477 - RNA, 22 nt, Human
uuuguuuagaaagagauuggug

SEQ ID NO: 859478 - RNA, 22 nt, Human
uccauacauugaaauaccauuc

SEQ ID NO: 859479 - RNA, 22 nt, Human
auccauuugaaagaacagucca

SEQ ID NO: 859480 - RNA, 19 nt, Human
augucuggguaacagcugc

SEQ ID NO: 859481 - RNA, 22 nt, Human
agacgagggccuggcacacagu

SEQ ID NO: 859482 - RNA, 23 nt, Human
cccuggaguaaauucuuggaagg

SEQ ID NO: 859483 - RNA, 22 nt, Human
guggcagcggugugcaaggagg

SEQ ID NO: 859484 - RNA, 22 nt, Human
cuuccaaagcacuuuauggacc

SEQ ID NO: 859485 - RNA, 22 nt, Human
uuagaaauauggugcugccgcc

SEQ ID NO: 859486 - RNA, 19 nt, Human
accaggagacagugagcuu

SEQ ID NO: 859487 - RNA, 22 nt, Human
uguacauacauagauauacaca

SEQ ID NO: 859488 - RNA, 22 nt, Human
aaacuuugguauguagcaaaac

SEQ ID NO: 859489 - RNA, 22 nt, Human
uucagggagagcgggacgggug

SEQ ID NO: 859490 - RNA, 22 nt, Human
uuaagauagaacccaguagucu

SEQ ID NO: 859491 - RNA, 22 nt, Human
cagaggcacaagaaagcaaggc

SEQ ID NO: 859492 - RNA, 22 nt, Human
uucaucaauguguuuaauaaug

SEQ ID NO: 859493 - RNA, 22 nt, Human
aggcagccaaucagaggcugac

SEQ ID NO: 859494 - RNA, 22 nt, Human
aaaaacuguaauuacuuuugca

SEQ ID NO: 859495 - RNA, 22 nt, Human
acauguaaaaggaacaugcaug

SEQ ID NO: 859496 - RNA, 22 nt, Human
acuauacagaagaggauaggaa

SEQ ID NO: 859497 - RNA, 22 nt, Human
ugaagaauaaaugguugagacu

SEQ ID NO: 859498 - RNA, 22 nt, Human
gagagaggccuccauguacuga

SEQ ID NO: 859499 - RNA, 22 nt, Human
caucaucaaaacaaauggaguc

SEQ ID NO: 859500 - RNA, 22 nt, Human
gcagcugcuggagggaggcagg

SEQ ID NO: 859501 - RNA, 20 nt, Human
aauaaacuacugagagaugu

SEQ ID NO: 859502 - RNA, 18 nt, Human
uaggagagaauuuauuua

SEQ ID NO: 859503 - RNA, 22 nt, Human
uccugagagcagcugcuuugga

SEQ ID NO: 859504 - RNA, 22 nt, Human
cugcugugcaggugccuaugau

SEQ ID NO: 859505 - RNA, 22 nt, Human
gaauuuuucuggaagcaauuau

SEQ ID NO: 859506 - RNA, 22 nt, Human
aaacugcuuuccacaguggcua

SEQ ID NO: 859507 - RNA, 22 nt, Human
cagaaaucauugugaugacagg

SEQ ID NO: 859508 - RNA, 18 nt, Human
aaguccuuccuuugcuuu

SEQ ID NO: 859509 - RNA, 22 nt, Human
uuacuuuggguccugcuuauaa

SEQ ID NO: 859510 - RNA, 22 nt, Human
ucauucuuuaccaaguugucac

SEQ ID NO: 859511 - RNA, 22 nt, Human
acuggauuccauugugcaaaga

SEQ ID NO: 859512 - RNA, 22 nt, Human
caagaaucuugcagcuuagacu

SEQ ID NO: 859513 - RNA, 22 nt, Human
aaauauagcaauuaugccuacu

SEQ ID NO: 859514 - RNA, 22 nt, Human
aggagggacaccaauauauguu

SEQ ID NO: 859515 - RNA, 22 nt, Human
uauuuuaaagacugccagccua

SEQ ID NO: 859516 - RNA, 17 nt, Human
gccaggagguuugagcu

SEQ ID NO: 859517 - RNA, 22 nt, Human
uuuaacuuaaucugcuugauga

SEQ ID NO: 859518 - RNA, 22 nt, Human
gaguccuuccagcaggcauuua

SEQ ID NO: 859519 - RNA, 22 nt, Human
agugauggugagugagaagcuc

SEQ ID NO: 859520 - RNA, 22 nt, Human
auucuuauuauaguaaaacagu

SEQ ID NO: 859521 - RNA, 17 nt, Human
ggcagccucaggcguuu

SEQ ID NO: 859522 - RNA, 22 nt, Human
cuucugcaauaaguuuuggucc

SEQ ID NO: 859523 - RNA, 22 nt, Human
acuuugaaagccuuggccccgg

SEQ ID NO: 859524 - RNA, 22 nt, Human
cuauuacauuucuggacauuca

SEQ ID NO: 859525 - RNA, 22 nt, Human
uggcagcuguguccagguagaa

SEQ ID NO: 859526 - RNA, 22 nt, Human
auuucaaggcuauuaauauaaa

SEQ ID NO: 859527 - RNA, 22 nt, Human
ugugaaagcaagucuaguucuc

SEQ ID NO: 859528 - RNA, 22 nt, Human
ugccgcagugcggggagggccc

SEQ ID NO: 859529 - RNA, 22 nt, Human
uguccuuauaagaaaaggaaau

SEQ ID NO: 859530 - RNA, 22 nt, Human
ggagaagggacagacucagcuu

SEQ ID NO: 859531 - RNA, 22 nt, Human
cccaggaguucgaggcuguagu

SEQ ID NO: 859532 - RNA, 22 nt, Human
uuuggaauauuaaaaugucuca

SEQ ID NO: 859533 - RNA, 22 nt, Human
uagggaggaggguuuucaaauc

SEQ ID NO: 859534 - RNA, 22 nt, Human
uaaggccagcaugaaugcagca

SEQ ID NO: 859535 - RNA, 22 nt, Human
gaggccagaguuccccgaguca

SEQ ID NO: 859536 - RNA, 22 nt, Human
ggcagcuauuccaagcagcacu

SEQ ID NO: 859537 - RNA, 22 nt, Human
agggagcucacaguccaguaga

SEQ ID NO: 859538 - RNA, 22 nt, Human
acuuugaaacuaaaauucauua

SEQ ID NO: 859539 - RNA, 22 nt, Human
caauuucacugacacccuggaa

SEQ ID NO: 859540 - RNA, 22 nt, Human
cucacugugaccucagcagaca

SEQ ID NO: 859541 - RNA, 23 nt, Human
aggcagcagguuguccaggguga

SEQ ID NO: 859542 - RNA, 22 nt, Human
gcaggagagccagcaggcuucc

SEQ ID NO: 859543 - RNA, 22 nt, Human
agucacuguucugucaugucaa

SEQ ID NO: 859544 - RNA, 22 nt, Human
cucaugauguagcgaaugagaa

SEQ ID NO: 859545 - RNA, 22 nt, Human
uauguuauuuucauacaacaga

SEQ ID NO: 859546 - RNA, 22 nt, Human
uacaucauaauaauacuuagaa

SEQ ID NO: 859547 - RNA, 22 nt, Human
ggcagcaucucuggcagcagcu

SEQ ID NO: 859548 - RNA, 22 nt, Human
aggagaggaaucauuauuacaa

SEQ ID NO: 859549 - RNA, 22 nt, Human
gauuuagagcaggaaugcaugg

SEQ ID NO: 859550 - RNA, 22 nt, Human
ugaaaugaagggcuuguucugg

SEQ ID NO: 859551 - RNA, 22 nt, Human
gcccaggaguugaaugcagcag

SEQ ID NO: 859552 - RNA, 22 nt, Human
acagaauuaucaggaaauguua

SEQ ID NO: 859553 - RNA, 22 nt, Human
cugcagagcaaguaacauccuc

SEQ ID NO: 859554 - RNA, 22 nt, Human
augaaaauacugugguugauag

SEQ ID NO: 859555 - RNA, 22 nt, Human
ucuuuccauggccacacagucu

SEQ ID NO: 859556 - RNA, 22 nt, Human
uuugaaaguucuucugacacua

SEQ ID NO: 859557 - RNA, 22 nt, Human
ugcuucuggaaacaguggcugu

SEQ ID NO: 859558 - RNA, 22 nt, Human
uaucaucuuguugucaugcagc

SEQ ID NO: 859559 - RNA, 22 nt, Human
caggguggggaaauagcgcccu

SEQ ID NO: 859560 - RNA, 22 nt, Human
ggaggagggguuuacauuggaa

SEQ ID NO: 859561 - RNA, 22 nt, Human
aaggagaaaugguagaugugca

SEQ ID NO: 859562 - RNA, 22 nt, Human
uuuuauguuccucuuuaugcga

SEQ ID NO: 859563 - RNA, 22 nt, Human
ugauuuuuagcuauucugaaga

SEQ ID NO: 859564 - RNA, 22 nt, Human
auggcauuugaaucugucuuuu

SEQ ID NO: 859565 - RNA, 22 nt, Human
uguacaauguggccaguguuaa

SEQ ID NO: 859566 - RNA, 22 nt, Human
caggcagcauuuacucugauga

SEQ ID NO: 859567 - RNA, 22 nt, Human
gucaggauguuuauucuccagu

SEQ ID NO: 859568 - RNA, 22 nt, Human
acaugcuucauauuauaaccaa

SEQ ID NO: 859569 - RNA, 22 nt, Human
cuuaggcaaccaggucaaugcu

SEQ ID NO: 859570 - RNA, 22 nt, Human
gugcuuuuaaaggcaauuagua

SEQ ID NO: 859571 - RNA, 22 nt, Human
cgaggcaggcaggcggaggaua

SEQ ID NO: 859572 - RNA, 22 nt, Human
ggcagcuggguuggccagaaac

SEQ ID NO: 859573 - RNA, 22 nt, Human
uuauuaaugaguacaaguuauu

SEQ ID NO: 859574 - RNA, 22 nt, Human
agguccagcuguugcagccucc

SEQ ID NO: 859575 - RNA, 22 nt, Human
uguggaaaagaauaagggagau

SEQ ID NO: 859576 - RNA, 22 nt, Human
cugggaaauggcuucgagcuca

SEQ ID NO: 859577 - RNA, 22 nt, Human
acuaaacugaagcaugaaaagg

SEQ ID NO: 859578 - RNA, 22 nt, Human
aaucauaauuguauacauucau

SEQ ID NO: 859579 - RNA, 22 nt, Human
gaaaggccagcucacagaugag

SEQ ID NO: 859580 - RNA, 22 nt, Human
ugaaaauggccugaagaagcaa

SEQ ID NO: 859581 - RNA, 20 nt, Human
aggagggaccuggauuggcg

SEQ ID NO: 859582 - RNA, 22 nt, Human
caggagaggaggcuacuucuua

SEQ ID NO: 859583 - RNA, 22 nt, Human
ggcagcugcaaaucugcucugu

SEQ ID NO: 859584 - RNA, 22 nt, Human
cauuucaagcauugacuucuau

SEQ ID NO: 859585 - RNA, 22 nt, Human
uucacagauuucccugcacaug

SEQ ID NO: 859586 - RNA, 22 nt, Human
ccucuucugcuucaggagcacu

SEQ ID NO: 859587 - RNA, 22 nt, Human
aauaauuuccagccaacuggaa

SEQ ID NO: 859588 - RNA, 22 nt, Human
cuuugcaaacugucacacuuuc

SEQ ID NO: 859589 - RNA, 22 nt, Human
caggcagcagccacucugguau

SEQ ID NO: 859590 - RNA, 21 nt, Human
uccaggagcacgggacuagga

SEQ ID NO: 859591 - RNA, 22 nt, Human
ucucucuuuuuaaucauguaau

SEQ ID NO: 859592 - RNA, 22 nt, Human
ggcaagaaggcuucagguagcu

SEQ ID NO: 859593 - RNA, 22 nt, Human
uuagccauuaaauuacaaggug

SEQ ID NO: 859594 - RNA, 21 nt, Human
auggauuuaaacaggccacaa

SEQ ID NO: 859595 - RNA, 22 nt, Human
agcccaggaaguugaggcuugc

SEQ ID NO: 859596 - RNA, 22 nt, Human
uagucaccuguugugugaugcc

SEQ ID NO: 859597 - RNA, 22 nt, Human
gggcacagaagucuaagacauc

SEQ ID NO: 859598 - RNA, 22 nt, Human
caggauggccccggggcugugc

SEQ ID NO: 859599 - RNA, 22 nt, Human
auacagaauacuaauuccugag

SEQ ID NO: 859600 - RNA, 20 nt, Human
auaaaauaacugccacaaga

SEQ ID NO: 859601 - RNA, 22 nt, Human
uaugcuguggaaaauacaaaga

SEQ ID NO: 859602 - RNA, 22 nt, Human
ggagcuguucaggacugcuuca

SEQ ID NO: 859603 - RNA, 22 nt, Human
acaugucuuuuaaagucuaaua

SEQ ID NO: 859604 - RNA, 23 nt, Human
accaggagaaaagcuuugcggga

SEQ ID NO: 859605 - RNA, 22 nt, Human
aggcacaguuucauccccgggc

SEQ ID NO: 859606 - RNA, 22 nt, Human
gggcaguuuauucuagaugguu

SEQ ID NO: 859607 - RNA, 20 nt, Human
cuucuucauuaacccuacug

SEQ ID NO: 859608 - RNA, 22 nt, Human
uuacagaaugugccauuugguc

SEQ ID NO: 859609 - RNA, 22 nt, Human
uaaggccaauuaacaaccaggg

SEQ ID NO: 859610 - RNA, 22 nt, Human
aaagacuuggcuuaugauuugc

SEQ ID NO: 859611 - RNA, 22 nt, Human
aggauuuagcaugaaaugugaa

SEQ ID NO: 859612 - RNA, 22 nt, Human
aggaucugugagugcugcagac

SEQ ID NO: 859613 - RNA, 22 nt, Human
aacaugcuuugauaaauaaaag

SEQ ID NO: 859614 - RNA, 22 nt, Human
aggcugcugccuuggagagugu

SEQ ID NO: 859615 - RNA, 22 nt, Human
uucuucaaugugcccuguuuuc

SEQ ID NO: 859616 - RNA, 22 nt, Human
gagggcaguagccucguacccu

SEQ ID NO: 859617 - RNA, 22 nt, Human
cagcugccccgcuggcugacca

SEQ ID NO: 859618 - RNA, 22 nt, Human
cucuucuuuaguccagaccauc

SEQ ID NO: 859619 - RNA, 22 nt, Human
cccaggagaugcacuccauugg

SEQ ID NO: 859620 - RNA, 22 nt, Human
ugcuguguucuccugacucacc

SEQ ID NO: 859621 - RNA, 22 nt, Human
ugcccaggaucuggcgaugcuc

SEQ ID NO: 859622 - RNA, 22 nt, Human
agaucaguuagauagcuugaug

SEQ ID NO: 859623 - RNA, 22 nt, Human
auggcagccugagcagaggaau

SEQ ID NO: 859624 - RNA, 22 nt, Human
agcugcccugguaagauugaug

SEQ ID NO: 859625 - RNA, 22 nt, Human
agagugcaaccgaaacaagcag

SEQ ID NO: 859626 - RNA, 22 nt, Human
caaauaguuuuucauguauuau

SEQ ID NO: 859627 - RNA, 22 nt, Human
uucucuuagcuguaaagucaau

SEQ ID NO: 859628 - RNA, 22 nt, Human
cucacugucuguacuagcugau

SEQ ID NO: 859629 - RNA, 22 nt, Human
gacauaauccuccucaccuacu

SEQ ID NO: 859630 - RNA, 22 nt, Human
cagaguggcacucugcuggaug

SEQ ID NO: 859631 - RNA, 22 nt, Human
gaggcugccccuuccucagcug

SEQ ID NO: 859632 - RNA, 22 nt, Human
ucugaagaacugaguaaacaug

SEQ ID NO: 859633 - RNA, 22 nt, Human
aauugcuaaagauuauguuuuc

SEQ ID NO: 859634 - RNA, 22 nt, Human
guaucacuuuugagagugagaa

SEQ ID NO: 859635 - RNA, 22 nt, Human
gucaacuuuaagaugaucuuuu

SEQ ID NO: 859636 - RNA, 22 nt, Human
aaucagaaaggcuaaggaagca

SEQ ID NO: 859637 - RNA, 22 nt, Human
uguacauagaucuugaaaauua

SEQ ID NO: 859638 - RNA, 22 nt, Human
agggagcugagcugugagcagc

SEQ ID NO: 859639 - RNA, 22 nt, Human
acauaauaggugccugaauauu

SEQ ID NO: 859640 - RNA, 22 nt, Human
aaucaaaaccuacagagguaau

SEQ ID NO: 859641 - RNA, 20 nt, Human
uucaggauucuagaccacac

SEQ ID NO: 859642 - RNA, 22 nt, Human
uggagaggagcaccauggccau

SEQ ID NO: 859643 - RNA, 22 nt, Human
ucagccaggccaccuucagcuu

SEQ ID NO: 859644 - RNA, 22 nt, Human
aaauugcagaugcuaaaugacu

SEQ ID NO: 859645 - RNA, 22 nt, Human
uacuaucucuucuaacuucaga

SEQ ID NO: 859646 - RNA, 22 nt, Human
gucaggauuaaugggaguaugc

SEQ ID NO: 859647 - RNA, 22 nt, Human
cccuggagguggagguugcagg

SEQ ID NO: 859648 - RNA, 22 nt, Human
cagcuggcuggucagugcacaa

SEQ ID NO: 859649 - RNA, 22 nt, Human
gcccaggaguugaagggcugac

SEQ ID NO: 859650 - RNA, 22 nt, Human
agucucugggcaugguugugac

SEQ ID NO: 859651 - RNA, 22 nt, Human
uaaaauugcggugaauauuucc

SEQ ID NO: 859652 - RNA, 22 nt, Human
gaggcagccucaguggaccucg

SEQ ID NO: 859653 - RNA, 22 nt, Human
uguaggccuauguccagcaauu

SEQ ID NO: 859654 - RNA, 22 nt, Human
uccauuuucaucucauguauaa

SEQ ID NO: 859655 - RNA, 22 nt, Human
uuaaggauguugugauuuauua

SEQ ID NO: 859656 - RNA, 22 nt, Human
aggagggaccuaggaauauugc

SEQ ID NO: 859657 - RNA, 22 nt, Human
agugcuuucuugcuccaucagu

SEQ ID NO: 859658 - RNA, 22 nt, Human
gguuugaacagcuuuggagaag

SEQ ID NO: 859659 - RNA, 22 nt, Human
ucagauggcacacagagccugc

SEQ ID NO: 859660 - RNA, 22 nt, Human
uuuccauauuuaaucaaaauaa

SEQ ID NO: 859661 - RNA, 22 nt, Human
uggcagcugccauguccacgug

SEQ ID NO: 859662 - RNA, 22 nt, Human
ugagacaaaauugacagacaaa

SEQ ID NO: 859663 - RNA, 19 nt, Human
ugcccaggccagguugggc

SEQ ID NO: 859664 - RNA, 22 nt, Human
aauaagauccugaagauauguu

SEQ ID NO: 859665 - RNA, 22 nt, Human
aauauaauuuuauuccuagagu

SEQ ID NO: 859666 - RNA, 22 nt, Human
auaaauaucacuguugucccuc

SEQ ID NO: 859667 - RNA, 20 nt, Human
guggcaggcagugaaggagc

SEQ ID NO: 859668 - RNA, 22 nt, Human
acauugcugcauucuccuuccc

SEQ ID NO: 859669 - RNA, 22 nt, Human
cuuuccaaugcauuuccaaugu

SEQ ID NO: 859670 - RNA, 22 nt, Human
cuucuucauguauugauagucu

SEQ ID NO: 859671 - RNA, 22 nt, Human
acacauuuacauguuuacguau

SEQ ID NO: 859672 - RNA, 22 nt, Human
auuuggcaacauuaauugaauc

SEQ ID NO: 859673 - RNA, 22 nt, Human
uaguccuuacuuacuagaauaa

SEQ ID NO: 859674 - RNA, 22 nt, Human
uucugggagagaaagggccuug

SEQ ID NO: 859675 - RNA, 22 nt, Human
cagaagaggacuggguagcuca

SEQ ID NO: 859676 - RNA, 22 nt, Human
aggcugcuucaauggauaagau

SEQ ID NO: 859677 - RNA, 22 nt, Human
agucucuuuaaucacagugucu

SEQ ID NO: 859678 - RNA, 22 nt, Human
agaggggaaguaaugaaugaua

SEQ ID NO: 859679 - RNA, 22 nt, Human
gcuccuucaggugguagcuguu

SEQ ID NO: 859680 - RNA, 22 nt, Human
aggcagcugcccucuccuuccu

SEQ ID NO: 859681 - RNA, 19 nt, Human
uucuccaggcugcagaggg

SEQ ID NO: 859682 - RNA, 22 nt, Human
ccagaucuucuuuucagugucu

SEQ ID NO: 859683 - RNA, 22 nt, Human
aagcuggaacaucuugaggaag

SEQ ID NO: 859684 - RNA, 22 nt, Human
acucuucuugcugcucauuaau

SEQ ID NO: 859685 - RNA, 22 nt, Human
cuuaacauccugcauuuuucuu

SEQ ID NO: 859686 - RNA, 22 nt, Human
agggaggucuuugaggggcuua

SEQ ID NO: 859687 - RNA, 22 nt, Human
gaaccucagugaaacuggaggu

SEQ ID NO: 859688 - RNA, 22 nt, Human
uuuccaaaaugaaucuaaugca

SEQ ID NO: 859689 - RNA, 22 nt, Human
cacauauuguaguucaccagga

SEQ ID NO: 859690 - RNA, 22 nt, Human
aaggagaguacaggaguuggua

SEQ ID NO: 859691 - RNA, 22 nt, Human
gcccaggagguugggcugugca

SEQ ID NO: 859692 - RNA, 22 nt, Human
guuaggcagugugguauagcag

SEQ ID NO: 859693 - RNA, 22 nt, Human
aguaccaugcuuccugacuggu

SEQ ID NO: 859694 - RNA, 22 nt, Human
caucagaaccagcugggugagg

SEQ ID NO: 859695 - RNA, 17 nt, Human
uuugaaaggaugucagu

SEQ ID NO: 859696 - RNA, 22 nt, Human
ucuuugaacuuggcugaucucu

SEQ ID NO: 859697 - RNA, 22 nt, Human
ccucaggggucacugugaggag

SEQ ID NO: 859698 - RNA, 22 nt, Human
augcuuuaaaugucuuuugcuu

SEQ ID NO: 859699 - RNA, 22 nt, Human
agggagugguuaagaaggugca

SEQ ID NO: 859700 - RNA, 22 nt, Human
cacaaugugguuugucaucuuu

SEQ ID NO: 859701 - RNA, 20 nt, Human
aaacauucauguacaaguga

SEQ ID NO: 859702 - RNA, 22 nt, Human
acagcagcuugcgugucugguc

SEQ ID NO: 859703 - RNA, 22 nt, Human
ugccuguguugauuacuuuguc

SEQ ID NO: 859704 - RNA, 22 nt, Human
cagggagggacaauugucaccu

SEQ ID NO: 859705 - RNA, 22 nt, Human
aucauucuaguccuuauggucu

SEQ ID NO: 859706 - RNA, 22 nt, Human
agaccuggauuccaauccuacc

SEQ ID NO: 859707 - RNA, 22 nt, Human
uagugcuuaauaaauuucagaa

SEQ ID NO: 859708 - RNA, 22 nt, Human
uuuccaaauaaggucacacuca

SEQ ID NO: 859709 - RNA, 22 nt, Human
uucaacuuuaugcauauguauu

SEQ ID NO: 859710 - RNA, 22 nt, Human
agucucugcaugccugcugugc

SEQ ID NO: 859711 - RNA, 22 nt, Human
aggccagcucuacccuuggacu

SEQ ID NO: 859712 - RNA, 22 nt, Human
agugcuuuagagaaauggugcu

SEQ ID NO: 859713 - RNA, 19 nt, Human
uuccuuagaggaggcggug

SEQ ID NO: 859714 - RNA, 22 nt, Human
caggcagcugaggacuuugcua

SEQ ID NO: 859715 - RNA, 22 nt, Human
cugcuguggugucaagcaucuc

SEQ ID NO: 859716 - RNA, 19 nt, Human
uaaggccaaaaguaagugu

SEQ ID NO: 859717 - RNA, 22 nt, Human
cucaggauauugggcuggagca

SEQ ID NO: 859718 - RNA, 23 nt, Human
ucuaauacaugaaaccuagaugu

SEQ ID NO: 859719 - RNA, 22 nt, Human
uugauacuauuaagcacugggc

SEQ ID NO: 859720 - RNA, 22 nt, Human
gaauauauuggugaaaauaguu

SEQ ID NO: 859721 - RNA, 22 nt, Human
ugcagucuccaccuccugggug

SEQ ID NO: 859722 - RNA, 22 nt, Human
ggucagagggugggcugccugu

SEQ ID NO: 859723 - RNA, 23 nt, Human
uuaagacuggcugaacuuaguag

SEQ ID NO: 859724 - RNA, 21 nt, Human
uaaauaauaaguugcugagau

SEQ ID NO: 859725 - RNA, 22 nt, Human
uucagaauauuuguuuuacaug

SEQ ID NO: 859726 - RNA, 22 nt, Human
uacaaaaaauugauacugacga

SEQ ID NO: 859727 - RNA, 22 nt, Human
uuucagaaccgcuaaaauaaau

SEQ ID NO: 859728 - RNA, 22 nt, Human
aggauuuaaauccuuaaccacu

SEQ ID NO: 859729 - RNA, 22 nt, Human
uaauaucuacuucauagaguuu

SEQ ID NO: 859730 - RNA, 22 nt, Human
uuaauucugccuuucauguaac

SEQ ID NO: 859731 - RNA, 18 nt, Human
gcagcugacacuggaguu

SEQ ID NO: 859732 - RNA, 22 nt, Human
ucagaaauacaaaacacuuacu

SEQ ID NO: 859733 - RNA, 22 nt, Human
uccaggaggacugagggggcug

SEQ ID NO: 859734 - RNA, 21 nt, Human
agaauucuuaaguauucuaau

SEQ ID NO: 859735 - RNA, 22 nt, Human
agaggggacagccaccugcccg

SEQ ID NO: 859736 - RNA, 19 nt, Human
ugugaaagcuaguguucuu

SEQ ID NO: 859737 - RNA, 22 nt, Human
uuagagucaagcugcauguucu

SEQ ID NO: 859738 - RNA, 22 nt, Human
ugaggcagcccacuuuccuuag

SEQ ID NO: 859739 - RNA, 22 nt, Human
uuucaaauagaaucuuuccaaa

SEQ ID NO: 859740 - RNA, 22 nt, Human
aaaucagucccucuuggaauuu

SEQ ID NO: 859741 - RNA, 22 nt, Human
cuguucucuggcgguggcuguu

SEQ ID NO: 859742 - RNA, 22 nt, Human
auacagaaaaugaugcagaguu

SEQ ID NO: 859743 - RNA, 22 nt, Human
ggcaagcucaggccucaggugu

SEQ ID NO: 859744 - RNA, 19 nt, Human
cccaggagcaguauugaug

SEQ ID NO: 859745 - RNA, 22 nt, Human
uaucuaaaggauuuaauuuagu

SEQ ID NO: 859746 - RNA, 22 nt, Human
cagaauaaagguacaauugagu

SEQ ID NO: 859747 - RNA, 22 nt, Human
uaggcagcagugcuaugauucu

SEQ ID NO: 859748 - RNA, 22 nt, Human
cugcccaggaaggagaggaugg

SEQ ID NO: 859749 - RNA, 22 nt, Human
cccuugcaucccauguguggcc

SEQ ID NO: 859750 - RNA, 22 nt, Human
uauuucagguauggugugaaau

SEQ ID NO: 859751 - RNA, 22 nt, Human
uucuucaaccaucuacauaaac

SEQ ID NO: 859752 - RNA, 22 nt, Human
ggauuugaauuguugaaaugau

SEQ ID NO: 859753 - RNA, 22 nt, Human
uagggauguccugagacuuggc

SEQ ID NO: 859754 - RNA, 18 nt, Human
auauguuaauuagguagg

SEQ ID NO: 859755 - RNA, 22 nt, Human
auguuauuaaaguacagauucu

SEQ ID NO: 859756 - RNA, 22 nt, Human
cucaacagcucugccauacucc

SEQ ID NO: 859757 - RNA, 22 nt, Human
guucuucaucauuuuagauagg

SEQ ID NO: 859758 - RNA, 22 nt, Human
ugcacauucacuuagguauugu

SEQ ID NO: 859759 - RNA, 22 nt, Human
auagaauagcauagaaaauuga

SEQ ID NO: 859760 - RNA, 22 nt, Human
acuauacaccaaaauauuaagg

SEQ ID NO: 859761 - RNA, 22 nt, Human
ucaacuuuaguguagcuauuua

SEQ ID NO: 859762 - RNA, 20 nt, Human
acaggggcagcacaauaaug

SEQ ID NO: 859763 - RNA, 22 nt, Human
cccaggaacagggcucagaccc

SEQ ID NO: 859764 - RNA, 22 nt, Human
uuuaggcaauagauggcagugu

SEQ ID NO: 859765 - RNA, 22 nt, Human
uuaaaauuauggcccauuugga

SEQ ID NO: 859766 - RNA, 22 nt, Human
aagggaggaggauuuauuguac

SEQ ID NO: 859767 - RNA, 22 nt, Human
gcucagagcuugaaguuccacu

SEQ ID NO: 859768 - RNA, 22 nt, Human
aguaaacacugucuuuauauau

SEQ ID NO: 859769 - RNA, 22 nt, Human
uaugauuuguagacauuugauu

SEQ ID NO: 859770 - RNA, 22 nt, Human
caggacagcucaacaccuccuc

SEQ ID NO: 859771 - RNA, 22 nt, Human
agucugucugucacuucugcag

SEQ ID NO: 859772 - RNA, 22 nt, Human
agcaccauugcaaauauggcag

SEQ ID NO: 859773 - RNA, 22 nt, Human
acaauauuguacccagaaguuu

SEQ ID NO: 859774 - RNA, 22 nt, Human
uaugaacuuuugaugugacaug

SEQ ID NO: 859775 - RNA, 22 nt, Human
aaugaacagauacacauaggca

SEQ ID NO: 859776 - RNA, 22 nt, Human
gugcauuugugcaugcacaugu

SEQ ID NO: 859777 - RNA, 22 nt, Human
acagccaggaggaacucaguga

SEQ ID NO: 859778 - RNA, 22 nt, Human
cagaguggcgacccccucagcu

SEQ ID NO: 859779 - RNA, 22 nt, Human
aaggccaacuaggaugagcuag

SEQ ID NO: 859780 - RNA, 22 nt, Human
guagaaauguaaccaggagaua

SEQ ID NO: 859781 - RNA, 22 nt, Human
uaagaaguacaaaaauuuucug

SEQ ID NO: 859782 - RNA, 22 nt, Human
cuggccagcugacagcagggcu

SEQ ID NO: 859783 - RNA, 22 nt, Human
agaucugaccuaaccccaccac

SEQ ID NO: 859784 - RNA, 22 nt, Human
uaucuguuguaguacagaugau

SEQ ID NO: 859785 - RNA, 22 nt, Human
agugcuuugguauagaacuauu

SEQ ID NO: 859786 - RNA, 22 nt, Human
uuaaauuccagccucauaauag

SEQ ID NO: 859787 - RNA, 22 nt, Human
aaagcagagguugcagugagcu

SEQ ID NO: 859788 - RNA, 20 nt, Human
uacuggauuagggcucaccc

SEQ ID NO: 859789 - RNA, 22 nt, Human
caggcaggucagugaagaagga

SEQ ID NO: 859790 - RNA, 22 nt, Human
acccaggacuuggcaaccucau

SEQ ID NO: 859791 - RNA, 17 nt, Human
gagacagcaggagcccc

SEQ ID NO: 859792 - RNA, 19 nt, Human
uuugcagugguuccuuugu

SEQ ID NO: 859793 - RNA, 22 nt, Human
gcaaacaaggacauacauccug

SEQ ID NO: 859794 - RNA, 22 nt, Human
agagacaaugccaaugcacacg

SEQ ID NO: 859795 - RNA, 22 nt, Human
cuucucaaaguugugaaucagg

SEQ ID NO: 859796 - RNA, 22 nt, Human
aucaggauucaguaucuccagc

SEQ ID NO: 859797 - RNA, 22 nt, Human
acaguggagaaggcaugaggcu

SEQ ID NO: 859798 - RNA, 18 nt, Human
gcagcuagccaggggggc

SEQ ID NO: 859799 - RNA, 22 nt, Human
auugaggcagcauaguucaggg

SEQ ID NO: 859800 - RNA, 22 nt, Human
cuugaaagaagggucuuuuaau

SEQ ID NO: 859801 - RNA, 22 nt, Human
aagugagugguaaggagcaugg

SEQ ID NO: 859802 - RNA, 22 nt, Human
ugcuuaauguacgugaguguac

SEQ ID NO: 859803 - RNA, 22 nt, Human
aagcagcuuuugaagagugagg

SEQ ID NO: 859804 - RNA, 22 nt, Human
acaugucuguaauuauuuuagg

SEQ ID NO: 859805 - RNA, 23 nt, Human
agcacacuuguacaaugcccuag

SEQ ID NO: 859806 - RNA, 22 nt, Human
uuaauuacaaaacacauagguu

SEQ ID NO: 859807 - RNA, 21 nt, Human
caaucaguuggcauuugagca

SEQ ID NO: 859808 - RNA, 22 nt, Human
acagucucuccacacugcaggg

SEQ ID NO: 859809 - RNA, 22 nt, Human
aggaagcucaaagccaugaugu

SEQ ID NO: 859810 - RNA, 22 nt, Human
uccaggagauucauuaggucau

SEQ ID NO: 859811 - RNA, 22 nt, Human
auuccaaagguuaaugcccauu

SEQ ID NO: 859812 - RNA, 22 nt, Human
acaucugaccauuacaagacau

SEQ ID NO: 859813 - RNA, 22 nt, Human
gccaggaggggagaguguguca

SEQ ID NO: 859814 - RNA, 22 nt, Human
gauuuccauuuucaacuccugc

SEQ ID NO: 859815 - RNA, 22 nt, Human
uagggaggcuacuucuuguagg

SEQ ID NO: 859816 - RNA, 20 nt, Human
gcucccagccugcagucccc

SEQ ID NO: 859817 - RNA, 22 nt, Human
uucacauaaugauacaaagcuu

SEQ ID NO: 859818 - RNA, 22 nt, Human
uauaaaauucucaguuuggggu

SEQ ID NO: 859819 - RNA, 22 nt, Human
aaucaugugggauagucugcuc

SEQ ID NO: 859820 - RNA, 22 nt, Human
uagugcuugagucucuccguac

SEQ ID NO: 859821 - RNA, 22 nt, Human
caauuucagaccuuuccuugga

SEQ ID NO: 859822 - RNA, 22 nt, Human
uucaccacagucucaucuacgc

SEQ ID NO: 859823 - RNA, 22 nt, Human
cuggaucaugggaaagggauca

SEQ ID NO: 859824 - RNA, 19 nt, Human
uccaggagcaaagccaguu

SEQ ID NO: 859825 - RNA, 22 nt, Human
agaauuucaaauggaaguuuua

SEQ ID NO: 859826 - RNA, 22 nt, Human
uaauuccaaguugagacaugca

SEQ ID NO: 859827 - RNA, 22 nt, Human
ugaguucuaguggcugcagauu

SEQ ID NO: 859828 - RNA, 22 nt, Human
augcuuuuccaggagaaauaua

SEQ ID NO: 859829 - RNA, 22 nt, Human
ggaggcgauccugggaaacacc

SEQ ID NO: 859830 - RNA, 22 nt, Human
auaaacucaugccaagaaauga

SEQ ID NO: 859831 - RNA, 22 nt, Human
uucauguguauggaacauuuuu

SEQ ID NO: 859832 - RNA, 22 nt, Human
uuguuaaaaauagauuuccagg

SEQ ID NO: 859833 - RNA, 22 nt, Human
uugauuaaucccaugugaguag

SEQ ID NO: 859834 - RNA, 22 nt, Human
cccaggaggcagagauagcagu

SEQ ID NO: 859835 - RNA, 22 nt, Human
acaagcaugggcuuugacauca

SEQ ID NO: 859836 - RNA, 21 nt, Human
ggagggcagcccagacuggcu

SEQ ID NO: 859837 - RNA, 22 nt, Human
aucaggaucaugcuggguggga

SEQ ID NO: 859838 - RNA, 22 nt, Human
ugaggggauacgguacacauug

SEQ ID NO: 859839 - RNA, 22 nt, Human
ucagaauuagagcucuucuuga

SEQ ID NO: 859840 - RNA, 22 nt, Human
gcaacuuuagggccagcaagua

SEQ ID NO: 859841 - RNA, 22 nt, Human
cuaacuuuagcuuagauuauca

SEQ ID NO: 859842 - RNA, 22 nt, Human
uauuacaauuuacauugcacuu

SEQ ID NO: 859843 - RNA, 22 nt, Human
caaauguauaaauguacuuucu

SEQ ID NO: 859844 - RNA, 22 nt, Human
ggcaggcugcuugggucauguc

SEQ ID NO: 859845 - RNA, 22 nt, Human
uaaggccaaguucauauacaac

SEQ ID NO: 859846 - RNA, 22 nt, Human
gaggcagcugggauacaaggga

SEQ ID NO: 859847 - RNA, 22 nt, Human
ucucuucucuagugagcaacug

SEQ ID NO: 859848 - RNA, 22 nt, Human
uuugaaguguuauuucuaucac

SEQ ID NO: 859849 - RNA, 23 nt, Human
gggcaguuauguuguccuuggcu

SEQ ID NO: 859850 - RNA, 22 nt, Human
cuugauguauaaguugauaugu

SEQ ID NO: 859851 - RNA, 17 nt, Human
cauuuguugaucaguug

SEQ ID NO: 859852 - RNA, 22 nt, Human
agauuuccuaugguaauuauag

SEQ ID NO: 859853 - RNA, 22 nt, Human
gucauauacacugcauguaauc

SEQ ID NO: 859854 - RNA, 22 nt, Human
cuuugaagagauuacugugcuc

SEQ ID NO: 859855 - RNA, 22 nt, Human
caguucuuuguggggaguucuc

SEQ ID NO: 859856 - RNA, 22 nt, Human
ucuucacaggagccugccugcc

SEQ ID NO: 859857 - RNA, 22 nt, Human
auaagcauguuagaauauuuga

SEQ ID NO: 859858 - RNA, 22 nt, Human
aaauucaauuaacuuucaugcu

SEQ ID NO: 859859 - RNA, 22 nt, Human
uaaguccuagaugauucacaga

SEQ ID NO: 859860 - RNA, 22 nt, Human
uuuucagaggccuaagagguuu

SEQ ID NO: 859861 - RNA, 22 nt, Human
guuauauauaguauuucucuga

SEQ ID NO: 859862 - RNA, 22 nt, Human
ucaucugucauccacaaagcug

SEQ ID NO: 859863 - RNA, 22 nt, Human
ugucaccaccggaagaaacugc

SEQ ID NO: 859864 - RNA, 22 nt, Human
aaguuucaugauguaauuauug

SEQ ID NO: 859865 - RNA, 22 nt, Human
gcuuugaagucugugucuuuug

SEQ ID NO: 859866 - RNA, 22 nt, Human
gacaauacagaaagggacaugc

SEQ ID NO: 859867 - RNA, 19 nt, Human
cauguuaugcuguaguauc

SEQ ID NO: 859868 - RNA, 23 nt, Human
uuaaacuucagugcagaacacuc

SEQ ID NO: 859869 - RNA, 22 nt, Human
cuucagagugcagaagauuggg

SEQ ID NO: 859870 - RNA, 20 nt, Human
agaggccaguuaggagucua

SEQ ID NO: 859871 - RNA, 22 nt, Human
gagucuuugguaaagucugcug

SEQ ID NO: 859872 - RNA, 22 nt, Human
ccauggcaauggucagucuauu

SEQ ID NO: 859873 - RNA, 22 nt, Human
aagggcagccugacucacgguc

SEQ ID NO: 859874 - RNA, 22 nt, Human
acaugcuuccaaauuauguugg

SEQ ID NO: 859875 - RNA, 22 nt, Human
uucuuaaaacuuauggacaggu

SEQ ID NO: 859876 - RNA, 22 nt, Human
aaagauuauggcauugaaauac

SEQ ID NO: 859877 - RNA, 22 nt, Human
guucuucagucacaucacagaa

SEQ ID NO: 859878 - RNA, 23 nt, Human
agaucugauguuaccaagaauug

SEQ ID NO: 859879 - RNA, 22 nt, Human
cuucuucauaggcaguccuguu

SEQ ID NO: 859880 - RNA, 22 nt, Human
acagauuuuugguaaauaauuu

SEQ ID NO: 859881 - RNA, 22 nt, Human
ugcuggaauaauuucauguuaa

SEQ ID NO: 859882 - RNA, 22 nt, Human
auuaggcagggcaugguggcuc

SEQ ID NO: 859883 - RNA, 22 nt, Human
gacccaggguauccagagcugc

SEQ ID NO: 859884 - RNA, 22 nt, Human
uguguuauugccacugaagacc

SEQ ID NO: 859885 - RNA, 22 nt, Human
auucacuggcagacagaacuca

SEQ ID NO: 859886 - RNA, 22 nt, Human
agucucuuuguggacucugccu

SEQ ID NO: 859887 - RNA, 22 nt, Human
ucaggaggccaccaggaccugu

SEQ ID NO: 859888 - RNA, 22 nt, Human
cugcugugccuuaaaaugcaag

SEQ ID NO: 859889 - RNA, 22 nt, Human
uguacaaucuuggucccuuuau

SEQ ID NO: 859890 - RNA, 22 nt, Human
uucagaaaucgaguuucauguc

SEQ ID NO: 859891 - RNA, 22 nt, Human
uuugaaagucaaccuuccaguu

SEQ ID NO: 859892 - RNA, 22 nt, Human
cauuguuauagcauuacacacc

SEQ ID NO: 859893 - RNA, 22 nt, Human
augcugugguagacagcauucc

SEQ ID NO: 859894 - RNA, 22 nt, Human
uuugaauagcauaggauuacau

SEQ ID NO: 859895 - RNA, 22 nt, Human
gaauuucauuuguuuccuacca

SEQ ID NO: 859896 - RNA, 22 nt, Human
ucagaauucuacaauagaucag

SEQ ID NO: 859897 - RNA, 18 nt, Human
ggcaucugcacagcagcc

SEQ ID NO: 859898 - RNA, 22 nt, Human
uccaugagggacacuggaugcu

SEQ ID NO: 859899 - RNA, 22 nt, Human
acgagagguccuuagaaucugu

SEQ ID NO: 859900 - RNA, 22 nt, Human
gcacaauaauucuuguuuugcu

SEQ ID NO: 859901 - RNA, 22 nt, Human
uuaaaaugaauauugauuagca

SEQ ID NO: 859902 - RNA, 22 nt, Human
agcugcccuguggggaggguug

SEQ ID NO: 859903 - RNA, 22 nt, Human
uuugaagucaggcuuucuaccc

SEQ ID NO: 859904 - RNA, 22 nt, Human
cuguguuugaugagaagccacc

SEQ ID NO: 859905 - RNA, 22 nt, Human
auggcuuugaaguaauguaauu

SEQ ID NO: 859906 - RNA, 18 nt, Human
ugaggcagucagugaugg

SEQ ID NO: 859907 - RNA, 20 nt, Human
agggcagcuugaggagccgg

SEQ ID NO: 859908 - RNA, 22 nt, Human
gccaggagcccugggcaaguuc

SEQ ID NO: 859909 - RNA, 22 nt, Human
uuuacagaugaggauacugagg

SEQ ID NO: 859910 - RNA, 22 nt, Human
cugccaggcacgugcagcauca

SEQ ID NO: 859911 - RNA, 18 nt, Human
gcacuucacccagcuagu

SEQ ID NO: 859912 - RNA, 22 nt, Human
gcugcccaggagagguggggcu

SEQ ID NO: 859913 - RNA, 22 nt, Human
uaagagaacuggauagauagga

SEQ ID NO: 859914 - RNA, 22 nt, Human
cacaaaugugcagaaaugugag

SEQ ID NO: 859915 - RNA, 22 nt, Human
ccagaggaaaaauaucucccua

SEQ ID NO: 859916 - RNA, 22 nt, Human
acauucacuauguccaaacucu

SEQ ID NO: 859917 - RNA, 21 nt, Human
acagcaagccuucacaugagu

SEQ ID NO: 859918 - RNA, 22 nt, Human
ugguuuuagaugccuuuacugc

SEQ ID NO: 859919 - RNA, 22 nt, Human
caggaugagaggcccagggaag

SEQ ID NO: 859920 - RNA, 22 nt, Human
uuccuuagcagaccugguaucc

SEQ ID NO: 859921 - RNA, 22 nt, Human
uagaacuacaagcauuaaaagu

SEQ ID NO: 859922 - RNA, 22 nt, Human
uagaaacagcauauauuagccc

SEQ ID NO: 859923 - RNA, 22 nt, Human
cugcugugugaccauggacagg

SEQ ID NO: 859924 - RNA, 19 nt, Human
acauuuaaauucagaucuc

SEQ ID NO: 859925 - RNA, 22 nt, Human
ggaggcagaauagagugugggu

SEQ ID NO: 859926 - RNA, 22 nt, Human
aacuggauuaacuggcucaaau

SEQ ID NO: 859927 - RNA, 22 nt, Human
gagaggcaggcgcugcaauggu

SEQ ID NO: 859928 - RNA, 18 nt, Human
cgaggcaggcggaucacg

SEQ ID NO: 859929 - RNA, 22 nt, Human
aucugcaggaaugugugcagag

SEQ ID NO: 859930 - RNA, 19 nt, Human
aauacaguguuauagaauu

SEQ ID NO: 859931 - RNA, 22 nt, Human
cugaaugaggaaaagagugagg

SEQ ID NO: 859932 - RNA, 22 nt, Human
aaaugcauggcuguuuuaaagc

SEQ ID NO: 859933 - RNA, 22 nt, Human
cucaggauggaagccuacagga

SEQ ID NO: 859934 - RNA, 22 nt, Human
gaaagaggaaggagauguauua

SEQ ID NO: 859935 - RNA, 22 nt, Human
uucacagagagaacucaaacca

SEQ ID NO: 859936 - RNA, 22 nt, Human
uuuguagaggguaauugacaga

SEQ ID NO: 859937 - RNA, 22 nt, Human
ugaggggagcuagcaugccuug

SEQ ID NO: 859938 - RNA, 22 nt, Human
cuuaagauuugagauaccuaau

SEQ ID NO: 859939 - RNA, 22 nt, Human
acaugaaacuguugcauuagaa

SEQ ID NO: 859940 - RNA, 22 nt, Human
agaaacauccugcuuuccauuu

SEQ ID NO: 859941 - RNA, 22 nt, Human
ugaacaguuucaagaaaacuuu

SEQ ID NO: 859942 - RNA, 22 nt, Human
ccucuucuagguuucagccugc

SEQ ID NO: 859943 - RNA, 22 nt, Human
ucucuucuaacacuagaaauuc

SEQ ID NO: 859944 - RNA, 22 nt, Human
ccucagaugucuuaaggcacug

SEQ ID NO: 859945 - RNA, 22 nt, Human
caguccuucauuccuccuuuga

SEQ ID NO: 859946 - RNA, 22 nt, Human
auguuucagauacagaucaaau

SEQ ID NO: 859947 - RNA, 22 nt, Human
auaaaacuuggguaugaucccu

SEQ ID NO: 859948 - RNA, 22 nt, Human
gcugauguaagacuuuugguuu

SEQ ID NO: 859949 - RNA, 22 nt, Human
auuacacuuguucaucaucacc

SEQ ID NO: 859950 - RNA, 22 nt, Human
cuuauacacccucuucccaggc

SEQ ID NO: 859951 - RNA, 22 nt, Human
aggcagcuucugauuagcagcg

SEQ ID NO: 859952 - RNA, 22 nt, Human
caucagaaugaauguucuggag

SEQ ID NO: 859953 - RNA, 22 nt, Human
ggcucagacucccaggcccucu

SEQ ID NO: 859954 - RNA, 22 nt, Human
ugugaauaccuugaauucauca

SEQ ID NO: 859955 - RNA, 22 nt, Human
agucucuuccuucaaggcuggu

SEQ ID NO: 859956 - RNA, 22 nt, Human
ugaaagcacaaguucuaacagg

SEQ ID NO: 859957 - RNA, 22 nt, Human
acuguugucaggcugcuuugga

SEQ ID NO: 859958 - RNA, 22 nt, Human
uaaacauuuguuauucuuguuu

SEQ ID NO: 859959 - RNA, 22 nt, Human
ucuuuaauucagcaugaugcgg

SEQ ID NO: 859960 - RNA, 22 nt, Human
uucagcaaauggacuguucagg

SEQ ID NO: 859961 - RNA, 22 nt, Human
aggaggcacucacucucagggu

SEQ ID NO: 859962 - RNA, 22 nt, Human
gcuuuaaugcaauuucaccuca

SEQ ID NO: 859963 - RNA, 22 nt, Human
uggaaauggaucugaugagucu

SEQ ID NO: 859964 - RNA, 22 nt, Human
uucuuacagaguuuacagagcc

SEQ ID NO: 859965 - RNA, 22 nt, Human
ggagcuguuggcagcuaucuug

SEQ ID NO: 859966 - RNA, 21 nt, Human
acucaggagacuaacuauguc

SEQ ID NO: 859967 - RNA, 19 nt, Human
ucaucucacagggccuggc

SEQ ID NO: 859968 - RNA, 22 nt, Human
gagggcauaguuaaauaggagg

SEQ ID NO: 859969 - RNA, 22 nt, Human
gcagcugccccgacugugaguc

SEQ ID NO: 859970 - RNA, 22 nt, Human
gcccaggauucuuucuuccuua

SEQ ID NO: 859971 - RNA, 22 nt, Human
uucacagacauugcagacugaa

SEQ ID NO: 859972 - RNA, 21 nt, Human
auggcuuuuuuaaagcuugug

SEQ ID NO: 859973 - RNA, 22 nt, Human
gaggccagcuaguccaggaagu

SEQ ID NO: 859974 - RNA, 22 nt, Human
uaagcugugggagauuggcaua

SEQ ID NO: 859975 - RNA, 22 nt, Human
guccaugauucugugacacccu

SEQ ID NO: 859976 - RNA, 22 nt, Human
ugaaaugagcauuuauucuuua

SEQ ID NO: 859977 - RNA, 22 nt, Human
ugaaggccacuuccugugagcu

SEQ ID NO: 859978 - RNA, 22 nt, Human
ucaggaugguguggaggaaaua

SEQ ID NO: 859979 - RNA, 22 nt, Human
cauuguuaauugguaucuuaca

SEQ ID NO: 859980 - RNA, 22 nt, Human
uugaagagugccuuccagacau

SEQ ID NO: 859981 - RNA, 22 nt, Human
uuugaagauuaugccagaguga

SEQ ID NO: 859982 - RNA, 22 nt, Human
uuuacaaccucauauucugaug

SEQ ID NO: 859983 - RNA, 22 nt, Human
aagcagagcaagcguauuuauu

SEQ ID NO: 859984 - RNA, 22 nt, Human
aguuacagugaccauuuauuua

SEQ ID NO: 859985 - RNA, 22 nt, Human
aaauuucaguuggaaugagcuc

SEQ ID NO: 859986 - RNA, 22 nt, Human
uaauuuacuugcaaauaacaau

SEQ ID NO: 859987 - RNA, 22 nt, Human
cuucagaagccugcagccuuug

SEQ ID NO: 859988 - RNA, 22 nt, Human
aacauuggauauuuauuaaaag

SEQ ID NO: 859989 - RNA, 22 nt, Human
uucucagaggagucgggagcug

SEQ ID NO: 859990 - RNA, 22 nt, Human
aggcaagcgcagaagcggagga

SEQ ID NO: 859991 - RNA, 22 nt, Human
uacacauguauuuauguguaca

SEQ ID NO: 859992 - RNA, 22 nt, Human
auauucuuccaaaacaucauuu

SEQ ID NO: 859993 - RNA, 22 nt, Human
uggcagcugaauggcuggaugg

SEQ ID NO: 859994 - RNA, 22 nt, Human
cugaauaauuuucuguuguaug

SEQ ID NO: 859995 - RNA, 22 nt, Human
auuaaaauuccaagguaugcca

SEQ ID NO: 859996 - RNA, 22 nt, Human
gaggauggaggugugagcuaug

SEQ ID NO: 859997 - RNA, 22 nt, Human
uaaaaugaucucucauguucuu

SEQ ID NO: 859998 - RNA, 22 nt, Human
uuucacauuuaggcgugaauug

SEQ ID NO: 859999 - RNA, 22 nt, Human
uuucuucauagaccuugucuug

SEQ ID NO: 860000 - RNA, 22 nt, Human
ucagagaguuagugucuuagcu

SEQ ID NO: 860001 - RNA, 22 nt, Human
aauucacaaaaguuagauccau

SEQ ID NO: 860002 - RNA, 18 nt, Human
caauuucauccuuaagcc

SEQ ID NO: 860003 - RNA, 22 nt, Human
uugcugaaaucuaugacauccu

SEQ ID NO: 860004 - RNA, 22 nt, Human
augaaaauugacagcggaagua

SEQ ID NO: 860005 - RNA, 22 nt, Human
uagcacaucuggcgcuuauagg

SEQ ID NO: 860006 - RNA, 21 nt, Human
agccuguugguuuacugcuca

SEQ ID NO: 860007 - RNA, 22 nt, Human
uuuuuugucuugaagaaauggu

SEQ ID NO: 860008 - RNA, 22 nt, Human
uggcuguguuaccacuucaugu

SEQ ID NO: 860009 - RNA, 22 nt, Human
uucaauucaauucuaaauauau

SEQ ID NO: 860010 - RNA, 22 nt, Human
cacauauuugaugaagcuuugu

SEQ ID NO: 860011 - RNA, 22 nt, Human
aaaucaguuguuauauuaaaga

SEQ ID NO: 860012 - RNA, 22 nt, Human
uuuauuguuaucaugggugagu

SEQ ID NO: 860013 - RNA, 22 nt, Human
acaaauguggacauggauaaug

SEQ ID NO: 860014 - RNA, 22 nt, Human
uccaggagguugagacugcagu

SEQ ID NO: 860015 - RNA, 22 nt, Human
uucucuuuucaccaguugcuaa

SEQ ID NO: 860016 - RNA, 22 nt, Human
cuggcugugcugcaggcuuugg

SEQ ID NO: 860017 - RNA, 19 nt, Human
aucugagauuauaaacaga

SEQ ID NO: 860018 - RNA, 22 nt, Human
ucacaucucccuggaggacaca

SEQ ID NO: 860019 - RNA, 22 nt, Human
cuuaggcaagcagagcccaucc

SEQ ID NO: 860020 - RNA, 22 nt, Human
ucuggcaggcaaucggcucugg

SEQ ID NO: 860021 - RNA, 22 nt, Human
uuucaguucaguuuauuauauc

SEQ ID NO: 860022 - RNA, 22 nt, Human
ucuuuggaucccaacuggcugg

SEQ ID NO: 860023 - RNA, 22 nt, Human
uauuuucuguggaggaccagau

SEQ ID NO: 860024 - RNA, 22 nt, Human
guuaggcaugaguguguauuaa

SEQ ID NO: 860025 - RNA, 22 nt, Human
uaaguccuaacagacugggggc

SEQ ID NO: 860026 - RNA, 22 nt, Human
aagggaggccagagguuuugca

SEQ ID NO: 860027 - RNA, 22 nt, Human
uuccuuagcuccucauggccug

SEQ ID NO: 860028 - RNA, 22 nt, Human
cugaauaauacagacuagcuuc

SEQ ID NO: 860029 - RNA, 22 nt, Human
auggaaagggaagcaaggaaca

SEQ ID NO: 860030 - RNA, 22 nt, Human
uuguuugaggucacugauauuu

SEQ ID NO: 860031 - RNA, 22 nt, Human
aggaagcuagagccaccggacu

SEQ ID NO: 860032 - RNA, 20 nt, Human
aggaggcauagucuggaaag

SEQ ID NO: 860033 - RNA, 22 nt, Human
aucagaaaaacauaauguuauu

SEQ ID NO: 860034 - RNA, 22 nt, Human
ugaaggccagcucuuuaucagc

SEQ ID NO: 860035 - RNA, 22 nt, Human
uauuuguugaguuguuaugucu

SEQ ID NO: 860036 - RNA, 22 nt, Human
guuucacagaugguguucauau

SEQ ID NO: 860037 - RNA, 22 nt, Human
augaaaauguacauguguauaa

SEQ ID NO: 860038 - RNA, 22 nt, Human
uucauucuuugaaucugaggua

SEQ ID NO: 860039 - RNA, 22 nt, Human
acagcauugagagcuaaauuua

SEQ ID NO: 860040 - RNA, 22 nt, Human
gauuuacagguuagguccugua

SEQ ID NO: 860041 - RNA, 22 nt, Human
ggcagcuucucccaggcuguuu

SEQ ID NO: 860042 - RNA, 22 nt, Human
gcaaguuauuuccauuuaaagc

SEQ ID NO: 860043 - RNA, 22 nt, Human
uuauccaacaugacuuaugucc

SEQ ID NO: 860044 - RNA, 22 nt, Human
aaaguccuguuaacuguuaaca

SEQ ID NO: 860045 - RNA, 22 nt, Human
acucaggaagaaagcagcuggu

SEQ ID NO: 860046 - RNA, 22 nt, Human
uuugcagugauucuugcaguga

SEQ ID NO: 860047 - RNA, 22 nt, Human
cugacuguaauucuguucuuaa

SEQ ID NO: 860048 - RNA, 22 nt, Human
auaaaauuugcuacuguuaaau

SEQ ID NO: 860049 - RNA, 22 nt, Human
ccuauacaggcuucuuuacaug

SEQ ID NO: 860050 - RNA, 22 nt, Human
aauggccagcaacaggagugaa

SEQ ID NO: 860051 - RNA, 22 nt, Human
aaaacauguccauacagaaacu

SEQ ID NO: 860052 - RNA, 22 nt, Human
cugcuguggguuaagacacugu

SEQ ID NO: 860053 - RNA, 22 nt, Human
cccaggugcugcgugaagccuc

SEQ ID NO: 860054 - RNA, 22 nt, Human
uagggauguaaacauaguaauu

SEQ ID NO: 860055 - RNA, 22 nt, Human
uaugaacucuggagucugagug

SEQ ID NO: 860056 - RNA, 22 nt, Human
aauguuaauuuacugucuucau

SEQ ID NO: 860057 - RNA, 22 nt, Human
caucagucuagauucuaguacc

SEQ ID NO: 860058 - RNA, 22 nt, Human
ucacagacacagggagaagcau

SEQ ID NO: 860059 - RNA, 17 nt, Human
cucacggaggaugaauc

SEQ ID NO: 860060 - RNA, 22 nt, Human
ucacaaauauuuuaacaguagg

SEQ ID NO: 860061 - RNA, 22 nt, Human
ugcagggcccucauuccugucc

SEQ ID NO: 860062 - RNA, 22 nt, Human
agggaguuagaaauccaggaua

SEQ ID NO: 860063 - RNA, 21 nt, Human
acuuuaauauacaugaggagg

SEQ ID NO: 860064 - RNA, 22 nt, Human
auagaauuauggaaagcaucuu

SEQ ID NO: 860065 - RNA, 22 nt, Human
gaggucaggcuugcagcagggu

SEQ ID NO: 860066 - RNA, 22 nt, Human
ggcagccuugacuagugacuua

SEQ ID NO: 860067 - RNA, 22 nt, Human
aucaggauagucuguaaauugu

SEQ ID NO: 860068 - RNA, 22 nt, Human
gcucaggaaaacagucuaguaa

SEQ ID NO: 860069 - RNA, 22 nt, Human
gcucaggaucccaggggugugc

SEQ ID NO: 860070 - RNA, 22 nt, Human
aaucagaacuccuaccacagag

SEQ ID NO: 860071 - RNA, 22 nt, Human
gaggcagcgggucaggaccgug

SEQ ID NO: 860072 - RNA, 22 nt, Human
ucucaggaagugauauugagac

SEQ ID NO: 860073 - RNA, 22 nt, Human
acuuucugcaguguuggaaaug

SEQ ID NO: 860074 - RNA, 22 nt, Human
auguucuuucagccagugcauc

SEQ ID NO: 860075 - RNA, 22 nt, Human
gugaauaagaccuaaggaugaa

SEQ ID NO: 860076 - RNA, 20 nt, Human
ucacaucuggcagcugauga

SEQ ID NO: 860077 - RNA, 22 nt, Human
aucagaaaucuaggauucagaa

SEQ ID NO: 860078 - RNA, 17 nt, Human
agaggcagauacuugga

SEQ ID NO: 860079 - RNA, 20 nt, Human
gaguuccccauuucuccugg

SEQ ID NO: 860080 - RNA, 22 nt, Human
uugcaggaaacugagugugagc

SEQ ID NO: 860081 - RNA, 22 nt, Human
agcugccccaugagaggcaggu

SEQ ID NO: 860082 - RNA, 22 nt, Human
aguccuuagaacacuguaucug

SEQ ID NO: 860083 - RNA, 22 nt, Human
cuucaggauuuaggaagaugaa

SEQ ID NO: 860084 - RNA, 22 nt, Human
uuuaauauuucuuuccugaagc

SEQ ID NO: 860085 - RNA, 17 nt, Human
aagacagaagccaugag

SEQ ID NO: 860086 - RNA, 22 nt, Human
agaggaggaagagcuuuaaaau

SEQ ID NO: 860087 - RNA, 18 nt, Human
agaggggagguaagucug

SEQ ID NO: 860088 - RNA, 18 nt, Human
gcaggcuuuuccuggguc

SEQ ID NO: 860089 - RNA, 22 nt, Human
cauggcuuguaauaaauuuaua

SEQ ID NO: 860090 - RNA, 22 nt, Human
ggggcagcucccgagggcagga

SEQ ID NO: 860091 - RNA, 22 nt, Human
aaucaguguggugacuugucug

SEQ ID NO: 860092 - RNA, 22 nt, Human
uggcauuucuggccauuugugu

SEQ ID NO: 860093 - RNA, 22 nt, Human
aggcagcucuguggccucccag

SEQ ID NO: 860094 - RNA, 22 nt, Human
uuugcauaaaggagcauuucuc

SEQ ID NO: 860095 - RNA, 22 nt, Human
aagacauugucauuuuauaauu

SEQ ID NO: 860096 - RNA, 22 nt, Human
uugguacagaugagguauucuc

SEQ ID NO: 860097 - RNA, 22 nt, Human
gcaccugauugauuucacugcu

SEQ ID NO: 860098 - RNA, 22 nt, Human
uccaggagcucauccacgucaa

SEQ ID NO: 860099 - RNA, 22 nt, Human
auuccaaacuuaccccagagga

SEQ ID NO: 860100 - RNA, 22 nt, Human
gaagugaagguuacucuagauu

SEQ ID NO: 860101 - RNA, 22 nt, Human
auuacaguaacagcuacaaugc

SEQ ID NO: 860102 - RNA, 20 nt, Human
agaaaaaguguggaaauuuc

SEQ ID NO: 860103 - RNA, 22 nt, Human
caugucuguguacacaugcaca

SEQ ID NO: 860104 - RNA, 22 nt, Human
guugaaagcuuuucauuuaguu

SEQ ID NO: 860105 - RNA, 22 nt, Human
ucagccucucugaguccagacc

SEQ ID NO: 860106 - RNA, 22 nt, Human
gccaggagggaaaggacaauuu

SEQ ID NO: 860107 - RNA, 22 nt, Human
acaaaauuuuuagacaaggcuu

SEQ ID NO: 860108 - RNA, 23 nt, Human
auugaugacuugauuacacuuuu

SEQ ID NO: 860109 - RNA, 22 nt, Human
uuuccaagagcuuauuucugaa

SEQ ID NO: 860110 - RNA, 22 nt, Human
gaggaacccagcugggguugcc

SEQ ID NO: 860111 - RNA, 22 nt, Human
uggcagcucuguucaacaugag

SEQ ID NO: 860112 - RNA, 22 nt, Human
gaggaaccacucugagaagcca

SEQ ID NO: 860113 - RNA, 22 nt, Human
gcagcuccuccugggcuggaga

SEQ ID NO: 860114 - RNA, 22 nt, Human
gcucucuuuuuccagugguggu

SEQ ID NO: 860115 - RNA, 23 nt, Human
ucagagagcuguugagagcugcc

SEQ ID NO: 860116 - RNA, 22 nt, Human
gaggcagcagaacauggaagag

SEQ ID NO: 860117 - RNA, 22 nt, Human
ucauuucaaugauacuacuaag

SEQ ID NO: 860118 - RNA, 23 nt, Human
uggaggaaacacaucagaagacc

SEQ ID NO: 860119 - RNA, 22 nt, Human
uuauagugggcccaacauggcg

SEQ ID NO: 860120 - RNA, 22 nt, Human
cauagaaaguauuauggaauuu

SEQ ID NO: 860121 - RNA, 22 nt, Human
cuccaggaaagccugaggcccg

SEQ ID NO: 860122 - RNA, 22 nt, Human
uuaaaugaggcugauguagauu

SEQ ID NO: 860123 - RNA, 16 nt, Human
ccccaggacuuggcac

SEQ ID NO: 860124 - RNA, 22 nt, Human
ugaaguuauauauguugaaaau

SEQ ID NO: 860125 - RNA, 22 nt, Human
acuaagugauucuaagcaucuu

SEQ ID NO: 860126 - RNA, 22 nt, Human
cccaggaggcagagguugcagu

SEQ ID NO: 860127 - RNA, 22 nt, Human
auuugcaaagucguaucuguga

SEQ ID NO: 860128 - RNA, 22 nt, Human
ucaugcuuauugcauauuugga

SEQ ID NO: 860129 - RNA, 22 nt, Human
uccagccuaggggaacagcugc

SEQ ID NO: 860130 - RNA, 23 nt, Human
uguaacaauucccagccuuugcc

SEQ ID NO: 860131 - RNA, 22 nt, Human
ucagagaggcaauacuguuuaa

SEQ ID NO: 860132 - RNA, 22 nt, Human
gcuucacaggcaaguuaagccu

SEQ ID NO: 860133 - RNA, 21 nt, Human
uacagaaugcgcuucagucug

SEQ ID NO: 860134 - RNA, 22 nt, Human
acuucaugcagaagagagcugu

SEQ ID NO: 860135 - RNA, 22 nt, Human
aggcagcuuuaacugguaguag

SEQ ID NO: 860136 - RNA, 22 nt, Human
cuuaggcaguuuaggaaagaga

SEQ ID NO: 860137 - RNA, 22 nt, Human
acccaggacaaaauaaccaggu

SEQ ID NO: 860138 - RNA, 22 nt, Human
ucauggauggccgggaggugau

SEQ ID NO: 860139 - RNA, 22 nt, Human
gaggagcuugaggcuaggagcc

SEQ ID NO: 860140 - RNA, 22 nt, Human
uugauguacagaauuguucaca

SEQ ID NO: 860141 - RNA, 22 nt, Human
guuguuuugcaggauccuuaca

SEQ ID NO: 860142 - RNA, 22 nt, Human
guacauuucucuuguucuuauu

SEQ ID NO: 860143 - RNA, 22 nt, Human
auggguuucccucugaaauuau

SEQ ID NO: 860144 - RNA, 22 nt, Human
cagaaccaggaacugauggaga

SEQ ID NO: 860145 - RNA, 22 nt, Human
aucagaaauagucauguuacuu

SEQ ID NO: 860146 - RNA, 21 nt, Human
caagccagaccaauagcagcc

SEQ ID NO: 860147 - RNA, 22 nt, Human
ggaggcaggaaagacagguuca

SEQ ID NO: 860148 - RNA, 22 nt, Human
gccaggaggucagccccucaac

SEQ ID NO: 860149 - RNA, 22 nt, Human
ccauaauauuaaaugcuuuugu

SEQ ID NO: 860150 - RNA, 22 nt, Human
auauaauacaaccugcuaagug

SEQ ID NO: 860151 - RNA, 22 nt, Human
caggcagcucaaccuugggagc

SEQ ID NO: 860152 - RNA, 22 nt, Human
ucccuucacagaugcgauguuu

SEQ ID NO: 860153 - RNA, 22 nt, Human
cacagacccagaagggaugaag

SEQ ID NO: 860154 - RNA, 22 nt, Human
guuuacauguacucauuauacu

SEQ ID NO: 860155 - RNA, 22 nt, Human
aggcacaggccucagcacccag

SEQ ID NO: 860156 - RNA, 17 nt, Human
gaggagcuccaguaggu

SEQ ID NO: 860157 - RNA, 22 nt, Human
aggaugaauaacugaaauggug

SEQ ID NO: 860158 - RNA, 22 nt, Human
cauauaauguuugaagaugugg

SEQ ID NO: 860159 - RNA, 22 nt, Human
uuugacauggaauaacucauuu

SEQ ID NO: 860160 - RNA, 21 nt, Human
aggcagcuggaaggccuggcu

SEQ ID NO: 860161 - RNA, 23 nt, Human
ugaaggccuggaggacgcguugu

SEQ ID NO: 860162 - RNA, 22 nt, Human
uucaccgugaaccgauuccuca

SEQ ID NO: 860163 - RNA, 22 nt, Human
ggcugaaggaugaaagcugcag

SEQ ID NO: 860164 - RNA, 17 nt, Human
uucucugagcuguauug

SEQ ID NO: 860165 - RNA, 22 nt, Human
uggugguuaugcgcuuuguggg

SEQ ID NO: 860166 - RNA, 22 nt, Human
acauuuaaccaaacuguuuaau

SEQ ID NO: 860167 - RNA, 22 nt, Human
gguuuaauggagauauuucaga

SEQ ID NO: 860168 - RNA, 22 nt, Human
ucugucuccucugaggugccag

SEQ ID NO: 860169 - RNA, 22 nt, Human
uuacagaaagguugugggauag

SEQ ID NO: 860170 - RNA, 22 nt, Human
cccaguuucaacuuuccagugg

SEQ ID NO: 860171 - RNA, 22 nt, Human
gaugggauuuuuuauguguuca

SEQ ID NO: 860172 - RNA, 22 nt, Human
ugucaccaguuccaggaaauaa

SEQ ID NO: 860173 - RNA, 22 nt, Human
ucucucuucaacccuuaacuag

SEQ ID NO: 860174 - RNA, 22 nt, Human
aggcagcagugauaagauagga

SEQ ID NO: 860175 - RNA, 22 nt, Human
uguagggaggaaggguuggaaa

SEQ ID NO: 860176 - RNA, 22 nt, Human
aaauuucaguuaccuuuacguu

SEQ ID NO: 860177 - RNA, 20 nt, Human
uccaugaguuagagacuaua

SEQ ID NO: 860178 - RNA, 22 nt, Human
uggcuuuaaaucuguauucaua

SEQ ID NO: 860179 - RNA, 22 nt, Human
gagguggucgaggagggguacc

SEQ ID NO: 860180 - RNA, 22 nt, Human
gauuucuuuaugaaguacagaa

SEQ ID NO: 860181 - RNA, 22 nt, Human
auugaaagaguuuucugcugca

SEQ ID NO: 860182 - RNA, 22 nt, Human
uuugaaaggguuaugagacuga

SEQ ID NO: 860183 - RNA, 22 nt, Human
agugcugucaguuuuauagaua

SEQ ID NO: 860184 - RNA, 22 nt, Human
acuuugcagggcuugauaucca

SEQ ID NO: 860185 - RNA, 19 nt, Human
ugaguucugugguucucaa

SEQ ID NO: 860186 - RNA, 22 nt, Human
aauuucaaugcacucaugguug

SEQ ID NO: 860187 - RNA, 22 nt, Human
uuugacauugccaauuugcuca

SEQ ID NO: 860188 - RNA, 22 nt, Human
augcugugucaggaauuugaua

SEQ ID NO: 860189 - RNA, 22 nt, Human
uucucacuauguauguagauug

SEQ ID NO: 860190 - RNA, 22 nt, Human
caagaauccuguucuugaagau

SEQ ID NO: 860191 - RNA, 22 nt, Human
cagucucuugcuucauuaguug

SEQ ID NO: 860192 - RNA, 22 nt, Human
caagauggguguugugaugguu

SEQ ID NO: 860193 - RNA, 22 nt, Human
caggagagcccggguccgggcu

SEQ ID NO: 860194 - RNA, 22 nt, Human
uggcuauugagugaucucuaga

SEQ ID NO: 860195 - RNA, 22 nt, Human
aaguccuuggagaauagaaagg

SEQ ID NO: 860196 - RNA, 22 nt, Human
gagggucccugcucagggccag

SEQ ID NO: 860197 - RNA, 22 nt, Human
uaaagccauacugaaagccacu

SEQ ID NO: 860198 - RNA, 22 nt, Human
uaauuccaccuuuuuccaacuu

SEQ ID NO: 860199 - RNA, 22 nt, Human
aaucagcuaaauaaacuaguca

SEQ ID NO: 860200 - RNA, 20 nt, Human
cucaggauugucuagccccu

SEQ ID NO: 860201 - RNA, 22 nt, Human
uggcaaggccacaggugcaguu

SEQ ID NO: 860202 - RNA, 22 nt, Human
gagggagucugugcaaagaauu

SEQ ID NO: 860203 - RNA, 22 nt, Human
agaaucugguagaaccaaggau

SEQ ID NO: 860204 - RNA, 22 nt, Human
auauauaaccuggauaaggcuu

SEQ ID NO: 860205 - RNA, 22 nt, Human
auacagaagccuguauuucugg

SEQ ID NO: 860206 - RNA, 22 nt, Human
ugguaauuaauuugauagguuc

SEQ ID NO: 860207 - RNA, 22 nt, Human
accaggaguuuugaccaggggc

SEQ ID NO: 860208 - RNA, 22 nt, Human
ucuuugcagaauuuaacuuugc

SEQ ID NO: 860209 - RNA, 22 nt, Human
ggcauuaagaauaucauuaaaa

SEQ ID NO: 860210 - RNA, 22 nt, Human
caacauuugaguaaagaaaugg

SEQ ID NO: 860211 - RNA, 22 nt, Human
aaguccuugaagaaacaguucu

SEQ ID NO: 860212 - RNA, 19 nt, Human
agcuuccauauucucuagu

SEQ ID NO: 860213 - RNA, 19 nt, Human
cuggccaggccaggggccc

SEQ ID NO: 860214 - RNA, 22 nt, Human
gacuaugugaagugugaauagg

SEQ ID NO: 860215 - RNA, 20 nt, Human
caucagaaauccugacccac

SEQ ID NO: 860216 - RNA, 22 nt, Human
gauggcaggcaggugaguagag

SEQ ID NO: 860217 - RNA, 22 nt, Human
ucuggcaggucaaucauucuuu

SEQ ID NO: 860218 - RNA, 22 nt, Human
cauuuguauagugcuuagacca

SEQ ID NO: 860219 - RNA, 22 nt, Human
ucucugaguaagugacaguuca

SEQ ID NO: 860220 - RNA, 22 nt, Human
uuuacagaauguugaauuuggg

SEQ ID NO: 860221 - RNA, 22 nt, Human
uggcagcuggaucccaaggcag

SEQ ID NO: 860222 - RNA, 22 nt, Human
cacucaggguacaauggagggc

SEQ ID NO: 860223 - RNA, 22 nt, Human
uuagccauuuuauacaagugua

SEQ ID NO: 860224 - RNA, 22 nt, Human
gagagggagccagccaggaacc

SEQ ID NO: 860225 - RNA, 22 nt, Human
uuuucaguaaugucuacauaau

SEQ ID NO: 860226 - RNA, 22 nt, Human
gccaggagcaugucauuguuga

SEQ ID NO: 860227 - RNA, 22 nt, Human
ugcuguguggaugugaagaauc

SEQ ID NO: 860228 - RNA, 22 nt, Human
aguaaacauuucagauuuauuu

SEQ ID NO: 860229 - RNA, 22 nt, Human
ucacaguuauagucuguagaau

SEQ ID NO: 860230 - RNA, 22 nt, Human
cagagggcacaugguuuccuca

SEQ ID NO: 860231 - RNA, 22 nt, Human
auauaugcauguguacuuaugu

SEQ ID NO: 860232 - RNA, 22 nt, Human
ccacaucucgguccccucuuug

SEQ ID NO: 860233 - RNA, 22 nt, Human
auucaacggguagaagggucuu

SEQ ID NO: 860234 - RNA, 22 nt, Human
ggaggaggcggcagaaguuccu

SEQ ID NO: 860235 - RNA, 22 nt, Human
acuggcagagacccugauggcc

SEQ ID NO: 860236 - RNA, 22 nt, Human
cagugcugggcagaggagagcg

SEQ ID NO: 860237 - RNA, 22 nt, Human
auucuucaguauguguggauug

SEQ ID NO: 860238 - RNA, 22 nt, Human
ucacagaacaauguuuaguucu

SEQ ID NO: 860239 - RNA, 22 nt, Human
cuugcugucccuugguaugaac

SEQ ID NO: 860240 - RNA, 22 nt, Human
uaucugagaaagaagcaccaga

SEQ ID NO: 860241 - RNA, 22 nt, Human
aaaucaguuggaacacaagcag

SEQ ID NO: 860242 - RNA, 22 nt, Human
agauuuacuggagucuuuggug

SEQ ID NO: 860243 - RNA, 20 nt, Human
augugagggguugaaguggg

SEQ ID NO: 860244 - RNA, 22 nt, Human
aucuaucccaguuuaacucauu

SEQ ID NO: 860245 - RNA, 22 nt, Human
ucaacuuugaaaccauagugaa

SEQ ID NO: 860246 - RNA, 22 nt, Human
gagaggaguuacuauuuccgag

SEQ ID NO: 860247 - RNA, 22 nt, Human
gcccaggaguucaaggcugcag

SEQ ID NO: 860248 - RNA, 22 nt, Human
acacaaacugcuagaaaauugg

SEQ ID NO: 860249 - RNA, 22 nt, Human
uccacauccauugcuugacuuu

SEQ ID NO: 860250 - RNA, 22 nt, Human
augcuguggccagaguucaacu

SEQ ID NO: 860251 - RNA, 22 nt, Human
aggaagcuaaccagggagugag

SEQ ID NO: 860252 - RNA, 22 nt, Human
aagauauacuauuaaguaccau

SEQ ID NO: 860253 - RNA, 22 nt, Human
aagguucuaagggaagccaugc

SEQ ID NO: 860254 - RNA, 22 nt, Human
augugcuuuauuaaguaaaaau

SEQ ID NO: 860255 - RNA, 22 nt, Human
ucagucucuggggcuucuguuu

SEQ ID NO: 860256 - RNA, 22 nt, Human
cagaaucagcccuugcuauuaa

SEQ ID NO: 860257 - RNA, 23 nt, Human
uacagaaggaguagucacuaaga

SEQ ID NO: 860258 - RNA, 22 nt, Human
agaaaugaagcaggaguuauua

SEQ ID NO: 860259 - RNA, 22 nt, Human
acacaaauuguaggauaauugc

SEQ ID NO: 860260 - RNA, 22 nt, Human
caguggagagacuuuuacucuu

SEQ ID NO: 860261 - RNA, 22 nt, Human
ucuuuaaugugauuguaauuau

SEQ ID NO: 860262 - RNA, 23 nt, Human
guaaaauacgcagugcaguguga

SEQ ID NO: 860263 - RNA, 19 nt, Human
augcuuuauguuauuucuu

SEQ ID NO: 860264 - RNA, 22 nt, Human
uguuuuaaagccauugccuuuc

SEQ ID NO: 860265 - RNA, 22 nt, Human
aggauuuaccuccagcuaggcu

SEQ ID NO: 860266 - RNA, 22 nt, Human
ccaugagacagcaacugaaagu

SEQ ID NO: 860267 - RNA, 22 nt, Human
acagaauuuacacaucucuaaa

SEQ ID NO: 860268 - RNA, 22 nt, Human
aaacauuugcaacucgguuugg

SEQ ID NO: 860269 - RNA, 22 nt, Human
ucuucauuuuauagcaucugug

SEQ ID NO: 860270 - RNA, 22 nt, Human
caacuuuucugugaauuuaagu

SEQ ID NO: 860271 - RNA, 23 nt, Human
acuauaaaguuguucugauuuac

SEQ ID NO: 860272 - RNA, 22 nt, Human
agauucuacucuagauccaugg

SEQ ID NO: 860273 - RNA, 22 nt, Human
guguguuuagcauuagcagggg

SEQ ID NO: 860274 - RNA, 19 nt, Human
guuccaaaggccagaccuu

SEQ ID NO: 860275 - RNA, 22 nt, Human
ggcagcacugcagcuuguuggg

SEQ ID NO: 860276 - RNA, 22 nt, Human
gagugcaggccugagcaccauc

SEQ ID NO: 860277 - RNA, 22 nt, Human
uggaggggcaauggagcgcgga

SEQ ID NO: 860278 - RNA, 22 nt, Human
uaugaaacauucauacaaauaa

SEQ ID NO: 860279 - RNA, 22 nt, Human
auguauccuuauacacauuuau

SEQ ID NO: 860280 - RNA, 22 nt, Human
auuucacaaaccauccugauuu

SEQ ID NO: 860281 - RNA, 21 nt, Human
gcugcccaacccugcaucucc

SEQ ID NO: 860282 - RNA, 22 nt, Human
ccucaggaaccacauugcugcu

SEQ ID NO: 860283 - RNA, 22 nt, Human
guuuuaguggguggccacugau

SEQ ID NO: 860284 - RNA, 22 nt, Human
gugguaauagagcuccaaacua

SEQ ID NO: 860285 - RNA, 22 nt, Human
ccaaagcaagucacaugaucaa

SEQ ID NO: 860286 - RNA, 22 nt, Human
gucuucaacaauaacuaccacu

SEQ ID NO: 860287 - RNA, 20 nt, Human
caucaucacaugagccaauu

SEQ ID NO: 860288 - RNA, 22 nt, Human
aggguagggcccggagacagac

SEQ ID NO: 860289 - RNA, 22 nt, Human
ccaggaaaauaccaagcuuuaa

SEQ ID NO: 860290 - RNA, 22 nt, Human
uaauuauuugaagacauuagag

SEQ ID NO: 860291 - RNA, 22 nt, Human
uuuaaagagaaugugaaggagu

SEQ ID NO: 860292 - RNA, 20 nt, Human
ggcaggcuuuauauggaggg

SEQ ID NO: 860293 - RNA, 20 nt, Human
gccaggagggugugaugagc

SEQ ID NO: 860294 - RNA, 22 nt, Human
acaacuuuguagcaauuccacg

SEQ ID NO: 860295 - RNA, 22 nt, Human
cuagaaaugcucaagagaaagu

SEQ ID NO: 860296 - RNA, 22 nt, Human
acagaauugauggaaaucucag

SEQ ID NO: 860297 - RNA, 21 nt, Human
cccaggaggagcuccggcucc

SEQ ID NO: 860298 - RNA, 20 nt, Human
acuugcugggcuuuguuacc

SEQ ID NO: 860299 - RNA, 22 nt, Human
uagaagcaguaauagaaauagg

SEQ ID NO: 860300 - RNA, 22 nt, Human
aaauaauguuaggccuuugcuc

SEQ ID NO: 860301 - RNA, 22 nt, Human
acacauauauacauauuugugc

SEQ ID NO: 860302 - RNA, 22 nt, Human
aauaaugucuuuggcuugacca

SEQ ID NO: 860303 - RNA, 22 nt, Human
gaggcgagaagcuggagauggu

SEQ ID NO: 860304 - RNA, 22 nt, Human
aaaucauguuggcacaauaaaa

SEQ ID NO: 860305 - RNA, 22 nt, Human
ggcagcuggggcagugcccugu

SEQ ID NO: 860306 - RNA, 22 nt, Human
cggagccugcuuguugcagcug

SEQ ID NO: 860307 - RNA, 22 nt, Human
guucucucugcuuccaagaugg

SEQ ID NO: 860308 - RNA, 22 nt, Human
guaaacauuacugugcuguaua

SEQ ID NO: 860309 - RNA, 22 nt, Human
uaucuguuaggaucagagcugg

SEQ ID NO: 860310 - RNA, 22 nt, Human
cugcgcagcaaucagagaggag

SEQ ID NO: 860311 - RNA, 22 nt, Human
acagagagaaacaaucagcagc

SEQ ID NO: 860312 - RNA, 22 nt, Human
uuauuucauugauuucuaagac

SEQ ID NO: 860313 - RNA, 20 nt, Human
cccaggaguuugcucuuacu

SEQ ID NO: 860314 - RNA, 22 nt, Human
gcaaaauuaaacuuagcaucau

SEQ ID NO: 860315 - RNA, 22 nt, Human
guuauaaaaugcacaguuguuu

SEQ ID NO: 860316 - RNA, 22 nt, Human
uucuacagacuauaacugugau

SEQ ID NO: 860317 - RNA, 22 nt, Human
uucuugcaggucacucacugag

SEQ ID NO: 860318 - RNA, 22 nt, Human
aggcaguggaugucaggaaugg

SEQ ID NO: 860319 - RNA, 22 nt, Human
ucagucuuugcuuaugacaaua

SEQ ID NO: 860320 - RNA, 22 nt, Human
uugauacaggcucuauuucauc

SEQ ID NO: 860321 - RNA, 22 nt, Human
auagaauucuuugaaauuuaug

SEQ ID NO: 860322 - RNA, 19 nt, Human
ucccaggaagcaaauguca

SEQ ID NO: 860323 - RNA, 22 nt, Human
cauggcuuuuuagcauauucaa

SEQ ID NO: 860324 - RNA, 22 nt, Human
aaugcaaagcaagcagagauuu

SEQ ID NO: 860325 - RNA, 22 nt, Human
ucccaggaauugaagccagugu

SEQ ID NO: 860326 - RNA, 22 nt, Human
uacccaggaggaaacugaggcu

SEQ ID NO: 860327 - RNA, 21 nt, Human
uucaaaaugguguguuugucu

SEQ ID NO: 860328 - RNA, 22 nt, Human
gcauaauauacaugcuugaucc

SEQ ID NO: 860329 - RNA, 22 nt, Human
gaggccaaguuggagaccaggu

SEQ ID NO: 860330 - RNA, 22 nt, Human
guagaaaugguguguuucuucu

SEQ ID NO: 860331 - RNA, 22 nt, Human
gaaaauagcagauagaccaaug

SEQ ID NO: 860332 - RNA, 22 nt, Human
ggauuuccucuugacucuaaag

SEQ ID NO: 860333 - RNA, 20 nt, Human
aggcagcuggccaggcaggu

SEQ ID NO: 860334 - RNA, 22 nt, Human
uuuacagaaugucaauuucuau

SEQ ID NO: 860335 - RNA, 22 nt, Human
gaucauuugcaggaaacauuaa

SEQ ID NO: 860336 - RNA, 23 nt, Human
accaggaguugucucaggaaaca

SEQ ID NO: 860337 - RNA, 22 nt, Human
auuuucagagacaucuggacuu

SEQ ID NO: 860338 - RNA, 22 nt, Human
gucaggaugagggaugaggagu

SEQ ID NO: 860339 - RNA, 22 nt, Human
acagaauugaaaguauaaucug

SEQ ID NO: 860340 - RNA, 22 nt, Human
cauuaaaauaucucaugguguu

SEQ ID NO: 860341 - RNA, 22 nt, Human
auagaauuugcacuaaaucugc

SEQ ID NO: 860342 - RNA, 22 nt, Human
uacuuguagcagguggcauuua

SEQ ID NO: 860343 - RNA, 22 nt, Human
ccugcugugaccggggagcagg

SEQ ID NO: 860344 - RNA, 22 nt, Human
caggaggggguggaguuucgcc

SEQ ID NO: 860345 - RNA, 22 nt, Human
aaauugcauuuuaaagguagau

SEQ ID NO: 860346 - RNA, 22 nt, Human
aguuauuacucuuuaacauauu

SEQ ID NO: 860347 - RNA, 22 nt, Human
aaccauuugccauuaucuuaag

SEQ ID NO: 860348 - RNA, 19 nt, Human
aggcaggugcagagguccc

SEQ ID NO: 860349 - RNA, 22 nt, Human
augaauaaguaaacuccuuugg

SEQ ID NO: 860350 - RNA, 22 nt, Human
ucaggagagagaaauuggggcu

SEQ ID NO: 860351 - RNA, 22 nt, Human
acauuucuaguuguucaucucc

SEQ ID NO: 860352 - RNA, 22 nt, Human
cagaggcagugggguugcuccu

SEQ ID NO: 860353 - RNA, 22 nt, Human
ucuuugcaaauguuauuaucuu

SEQ ID NO: 860354 - RNA, 22 nt, Human
uguguucuggaaagcucacuga

SEQ ID NO: 860355 - RNA, 22 nt, Human
acccaggagagagcuauaaaau

SEQ ID NO: 860356 - RNA, 22 nt, Human
ucaguaaaguucuuucuugcug

SEQ ID NO: 860357 - RNA, 22 nt, Human
aaagaaucagaagucucaaaca

SEQ ID NO: 860358 - RNA, 22 nt, Human
gcaggcaguuauuuaguagaau

SEQ ID NO: 860359 - RNA, 22 nt, Human
uuccucuagcuucucacuaaca

SEQ ID NO: 860360 - RNA, 22 nt, Human
ucaaauaaugccauucaucauc

SEQ ID NO: 860361 - RNA, 22 nt, Human
caggauggucucgaucuccuga

SEQ ID NO: 860362 - RNA, 22 nt, Human
acaaagucaaauugcagccgcc

SEQ ID NO: 860363 - RNA, 22 nt, Human
uaaguccuagcuuugguaggaa

SEQ ID NO: 860364 - RNA, 20 nt, Human
uuucaagucagcaauucuca

SEQ ID NO: 860365 - RNA, 22 nt, Human
aauuauauuguggugugaaugu

SEQ ID NO: 860366 - RNA, 22 nt, Human
uauccaaaguuucucagaaacu

SEQ ID NO: 860367 - RNA, 22 nt, Human
auuaggcagugccauuguacgg

SEQ ID NO: 860368 - RNA, 22 nt, Human
auucauaaguaaaugauuaccu

SEQ ID NO: 860369 - RNA, 22 nt, Human
auucuucauuuacuguuacuug

SEQ ID NO: 860370 - RNA, 20 nt, Human
guaaaauauggucuuugggu

SEQ ID NO: 860371 - RNA, 20 nt, Human
acaggagaucugaggaaagg

SEQ ID NO: 860372 - RNA, 22 nt, Human
aggcagacugugcgggaagagu

SEQ ID NO: 860373 - RNA, 22 nt, Human
aguucucaagacaauuaccugu

SEQ ID NO: 860374 - RNA, 22 nt, Human
gaggccaggggccuggagauga

SEQ ID NO: 860375 - RNA, 22 nt, Human
cuaauuauguuguuauaaucaa

SEQ ID NO: 860376 - RNA, 22 nt, Human
uuccacaauguaugaauaagau

SEQ ID NO: 860377 - RNA, 22 nt, Human
aggcagaucacuugaggccagg

SEQ ID NO: 860378 - RNA, 22 nt, Human
caggagaaauguggcugcuacc

SEQ ID NO: 860379 - RNA, 22 nt, Human
gaagaggaugacaggagccggu

SEQ ID NO: 860380 - RNA, 22 nt, Human
ugaaagggguugaguuacagcu

SEQ ID NO: 860381 - RNA, 22 nt, Human
aguuauaugugaaaacacguau

SEQ ID NO: 860382 - RNA, 22 nt, Human
aauauaaugcuguuuuaugcca

SEQ ID NO: 860383 - RNA, 22 nt, Human
acagaaauaacuuuuuauguuu

SEQ ID NO: 860384 - RNA, 22 nt, Human
auggcauuccaagucuucuuuu

SEQ ID NO: 860385 - RNA, 22 nt, Human
ugaagaaucccagggaauuugg

SEQ ID NO: 860386 - RNA, 22 nt, Human
uggcagcugaggggaggcuuug

SEQ ID NO: 860387 - RNA, 22 nt, Human
gaguccuuggcaucaucaguac

SEQ ID NO: 860388 - RNA, 22 nt, Human
aagagaggacauggugaaccug

SEQ ID NO: 860389 - RNA, 22 nt, Human
caauuucaagauucuguucuuu

SEQ ID NO: 860390 - RNA, 22 nt, Human
aagcagaguccccuucccaugg

SEQ ID NO: 860391 - RNA, 22 nt, Human
uugauagguuuuauguauaguu

SEQ ID NO: 860392 - RNA, 22 nt, Human
cugacccauauaagaguggagg

SEQ ID NO: 860393 - RNA, 22 nt, Human
aucuaaacagguguucuuuaga

SEQ ID NO: 860394 - RNA, 22 nt, Human
aaagaaggggucuacauccaau

SEQ ID NO: 860395 - RNA, 16 nt, Human
cuuccucuucacuggc

SEQ ID NO: 860396 - RNA, 22 nt, Human
ggccagagaauaugccuuacgu

SEQ ID NO: 860397 - RNA, 22 nt, Human
caaguccuaaauguauuuguug

SEQ ID NO: 860398 - RNA, 22 nt, Human
ccagaucuaaguccaaaguacu

SEQ ID NO: 860399 - RNA, 22 nt, Human
aucacaaaggucucagagcaca

SEQ ID NO: 860400 - RNA, 22 nt, Human
uggcauuuuguucaguauaugg

SEQ ID NO: 860401 - RNA, 22 nt, Human
aagcaccuggguuauaucuuag

SEQ ID NO: 860402 - RNA, 22 nt, Human
uucuaugccauguucagcuacu

SEQ ID NO: 860403 - RNA, 22 nt, Human
ccaggagaugggaaaguagcag

SEQ ID NO: 860404 - RNA, 23 nt, Human
caguggagacucaugcuuccuua

SEQ ID NO: 860405 - RNA, 22 nt, Human
gaggcagcaucuauggugggaa

SEQ ID NO: 860406 - RNA, 22 nt, Human
gaaaggcaguacagcugagccu

SEQ ID NO: 860407 - RNA, 22 nt, Human
guuuaauaauguugaauuacua

SEQ ID NO: 860408 - RNA, 22 nt, Human
ucucaagaucucaagauggccc

SEQ ID NO: 860409 - RNA, 22 nt, Human
gaaggccacuuuguguugagaa

SEQ ID NO: 860410 - RNA, 22 nt, Human
agccagcugugggcucaggcgg

SEQ ID NO: 860411 - RNA, 22 nt, Human
gguggagcuggaccaggagagg

SEQ ID NO: 860412 - RNA, 22 nt, Human
cucuucuugccugaugaggcag

SEQ ID NO: 860413 - RNA, 22 nt, Human
gaaguccucaaugcauugucuu

SEQ ID NO: 860414 - RNA, 22 nt, Human
aaugucugccagaacugaucau

SEQ ID NO: 860415 - RNA, 22 nt, Human
ugaggcagguggauuacaaggu

SEQ ID NO: 860416 - RNA, 22 nt, Human
caaagcaccacaaaccagguga

SEQ ID NO: 860417 - RNA, 22 nt, Human
gaugaaaaaagacgagcauaua

SEQ ID NO: 860418 - RNA, 22 nt, Human
agcuggcagucauccuagugag

SEQ ID NO: 860419 - RNA, 22 nt, Human
acaugcuuuaacuuauuuugau

SEQ ID NO: 860420 - RNA, 22 nt, Human
aauauuaucaaaagcuuuuuca

SEQ ID NO: 860421 - RNA, 22 nt, Human
auauacaaagggcaaccucgcu

SEQ ID NO: 860422 - RNA, 22 nt, Human
gcucccagcaauugaggcagcc

SEQ ID NO: 860423 - RNA, 22 nt, Human
auucuacaacccaauaauaauu

SEQ ID NO: 860424 - RNA, 22 nt, Human
auuauucuuaugucaucauggc

SEQ ID NO: 860425 - RNA, 22 nt, Human
aggcaggcucaggcccaugcuu

SEQ ID NO: 860426 - RNA, 22 nt, Human
uuauucuuuaaacauauauguu

SEQ ID NO: 860427 - RNA, 19 nt, Human
cuucuggcccugagccacc

SEQ ID NO: 860428 - RNA, 22 nt, Human
uuguuuuaucuuucuacagacu

SEQ ID NO: 860429 - RNA, 22 nt, Human
augugaggcagcacggagauua

SEQ ID NO: 860430 - RNA, 22 nt, Human
caaacuggcuaugggaaucuug

SEQ ID NO: 860431 - RNA, 23 nt, Human
ggauuuaguggaugagcugagug

SEQ ID NO: 860432 - RNA, 22 nt, Human
caggaaugaggucguaaguguc

SEQ ID NO: 860433 - RNA, 22 nt, Human
ugcuuuggaucuauuugcugag

SEQ ID NO: 860434 - RNA, 22 nt, Human
caaagucagcugccagucccaa

SEQ ID NO: 860435 - RNA, 19 nt, Human
agccuggcuuugcucugcu

SEQ ID NO: 860436 - RNA, 22 nt, Human
agaaaugaaaccaaagccuaga

SEQ ID NO: 860437 - RNA, 22 nt, Human
ggagggacccacucuagaggug

SEQ ID NO: 860438 - RNA, 22 nt, Human
agagggagcccagucauagcug

SEQ ID NO: 860439 - RNA, 22 nt, Human
uucagaaaugaauauugguauu

SEQ ID NO: 860440 - RNA, 22 nt, Human
gcgcaggagccgcggagggccg

SEQ ID NO: 860441 - RNA, 22 nt, Human
aguagaauagauggauacuauu

SEQ ID NO: 860442 - RNA, 22 nt, Human
uuguccaaaguaacacaucuag

SEQ ID NO: 860443 - RNA, 22 nt, Human
uuucaaaccuacuuguauguuu

SEQ ID NO: 860444 - RNA, 22 nt, Human
cuauacagagcauccuuaacuu

SEQ ID NO: 860445 - RNA, 22 nt, Human
aauaauuagugggacagagaac

SEQ ID NO: 860446 - RNA, 22 nt, Human
ucuggcuuucauuuguuuaaag

SEQ ID NO: 860447 - RNA, 22 nt, Human
uauacuuuccugcaacuuugau

SEQ ID NO: 860448 - RNA, 22 nt, Human
uaucagaaaugccuuaaauugg

SEQ ID NO: 860449 - RNA, 22 nt, Human
ccaggagagcgcccucccggcc

SEQ ID NO: 860450 - RNA, 22 nt, Human
aaggcagccuuuugaguugauu

SEQ ID NO: 860451 - RNA, 22 nt, Human
uuuaggcaugcaguucuauuua

SEQ ID NO: 860452 - RNA, 22 nt, Human
gaaggccaagaggcuccaagau

SEQ ID NO: 860453 - RNA, 22 nt, Human
agugagggaugaagaacugcgg

SEQ ID NO: 860454 - RNA, 22 nt, Human
gaucagaauuuacuuauaauug

SEQ ID NO: 860455 - RNA, 22 nt, Human
uaaacauggauucugaucacag

SEQ ID NO: 860456 - RNA, 22 nt, Human
caggcagcugacugucagauau

SEQ ID NO: 860457 - RNA, 23 nt, Human
aguaaagcaauuguuggcgagag

SEQ ID NO: 860458 - RNA, 22 nt, Human
caguuucuuggaugccaauuuc

SEQ ID NO: 860459 - RNA, 22 nt, Human
ucugggaaugaauaagaccugu

SEQ ID NO: 860460 - RNA, 22 nt, Human
ccagaauucagaaagggcauaa

SEQ ID NO: 860461 - RNA, 22 nt, Human
ucuuccaagguugcacacuauc

SEQ ID NO: 860462 - RNA, 22 nt, Human
uucaauucuaaacuaauauucu

SEQ ID NO: 860463 - RNA, 22 nt, Human
uuuuaucuucauuccuaucuac

SEQ ID NO: 860464 - RNA, 22 nt, Human
gggcagcuccuguggaauccac

SEQ ID NO: 860465 - RNA, 22 nt, Human
cugcugugccucuuuucacgug

SEQ ID NO: 860466 - RNA, 22 nt, Human
cauuuccacuucugaaaacugg

SEQ ID NO: 860467 - RNA, 22 nt, Human
uccuucuuucccccuagucauu

SEQ ID NO: 860468 - RNA, 22 nt, Human
uuucaggguacauggagcaaau

SEQ ID NO: 860469 - RNA, 22 nt, Human
ugaaggcccuaucuccauauac

SEQ ID NO: 860470 - RNA, 22 nt, Human
cauuuuaaaugauuuaagccaa

SEQ ID NO: 860471 - RNA, 22 nt, Human
uuaacacuccuaacuacagucu

SEQ ID NO: 860472 - RNA, 22 nt, Human
aaggcagcccuggcucagccug

SEQ ID NO: 860473 - RNA, 22 nt, Human
gagacaggauuuaaccaaagcu

SEQ ID NO: 860474 - RNA, 22 nt, Human
uugcugaaguuaaugcuugcaa

SEQ ID NO: 860475 - RNA, 22 nt, Human
uuuguuuacucauucauugaug

SEQ ID NO: 860476 - RNA, 22 nt, Human
gugguuuugccauuacaaguaa

SEQ ID NO: 860477 - RNA, 22 nt, Human
uccaggagggauugggcugugg

SEQ ID NO: 860478 - RNA, 21 nt, Human
ggcagcucagcagauggggac

SEQ ID NO: 860479 - RNA, 22 nt, Human
gagggccagcagccucagcaug

SEQ ID NO: 860480 - RNA, 22 nt, Human
agaggccagguccagaguuugu

SEQ ID NO: 860481 - RNA, 22 nt, Human
uuucuucacaggguauugggug

SEQ ID NO: 860482 - RNA, 22 nt, Human
aaugaaauguagcuuauccaua

SEQ ID NO: 860483 - RNA, 22 nt, Human
gaggcaucugggcacagaagug

SEQ ID NO: 860484 - RNA, 22 nt, Human
augcugugucaccuuaggauuu

SEQ ID NO: 860485 - RNA, 22 nt, Human
uuccaagaguaaauucaaauug

SEQ ID NO: 860486 - RNA, 22 nt, Human
uuaugauuugccacagauuggu

SEQ ID NO: 860487 - RNA, 22 nt, Human
cuucugugcuucacaguugcca

SEQ ID NO: 860488 - RNA, 22 nt, Human
cagcuucugucugauuagcaag

SEQ ID NO: 860489 - RNA, 22 nt, Human
uaaugucaaggugauagauuug

SEQ ID NO: 860490 - RNA, 22 nt, Human
auccaaacauguaccacacuaa

SEQ ID NO: 860491 - RNA, 22 nt, Human
auuuccagugcacugaauagaa

SEQ ID NO: 860492 - RNA, 22 nt, Human
ugcccaggguuucuaagagcag

SEQ ID NO: 860493 - RNA, 22 nt, Human
cacucaggcugugucaggagga

SEQ ID NO: 860494 - RNA, 22 nt, Human
aggcagccaucugcaggaagga

SEQ ID NO: 860495 - RNA, 22 nt, Human
ccccggaggcggagguugcagu

SEQ ID NO: 860496 - RNA, 22 nt, Human
cccaggaggcgcagguugcggu

SEQ ID NO: 860497 - RNA, 22 nt, Human
auacauauaugguacuuccugg

SEQ ID NO: 860498 - RNA, 22 nt, Human
cuauaauuaugcucaaaaugua

SEQ ID NO: 860499 - RNA, 21 nt, Human
uaauaauuccacuacagagua

SEQ ID NO: 860500 - RNA, 22 nt, Human
aucauuacuccuguaaaauugu

SEQ ID NO: 860501 - RNA, 22 nt, Human
ucaauaauggcaggauaaauuu

SEQ ID NO: 860502 - RNA, 22 nt, Human
uuccaugaaagugaaauggagc

SEQ ID NO: 860503 - RNA, 22 nt, Human
uacauaguauucacauuguuuu

SEQ ID NO: 860504 - RNA, 22 nt, Human
ucuggaucuccagcacuuauca

SEQ ID NO: 860505 - RNA, 22 nt, Human
ugaggcagcauucuucaagaca

SEQ ID NO: 860506 - RNA, 22 nt, Human
auacuguuucucuucuacauga

SEQ ID NO: 860507 - RNA, 22 nt, Human
ugaaggccuaacuuccagugcu

SEQ ID NO: 860508 - RNA, 22 nt, Human
agucaccaggguuugcuggguu

SEQ ID NO: 860509 - RNA, 22 nt, Human
uauggcuuuucauuccuaugug

SEQ ID NO: 860510 - RNA, 22 nt, Human
ucuuugaauccuuuacaucuga

SEQ ID NO: 860511 - RNA, 22 nt, Human
guuuaaucagaggaauuauaga

SEQ ID NO: 860512 - RNA, 22 nt, Human
augacaaaagaagacaugaggu

SEQ ID NO: 860513 - RNA, 22 nt, Human
auggaaagugcauggaagucau

SEQ ID NO: 860514 - RNA, 22 nt, Human
auuaggcagacaacguagccgg

SEQ ID NO: 860515 - RNA, 22 nt, Human
uuaauuaugcaaaaggccccau

SEQ ID NO: 860516 - RNA, 22 nt, Human
gacagcuguggagaggcaugug

SEQ ID NO: 860517 - RNA, 22 nt, Human
aggcaagcugcagagaguccuu

SEQ ID NO: 860518 - RNA, 22 nt, Human
ugucucaguacacuccgauguu

SEQ ID NO: 860519 - RNA, 22 nt, Human
cccaggagagaggccaguuggc

SEQ ID NO: 860520 - RNA, 22 nt, Human
uugaaaggugaacaugaugcac

SEQ ID NO: 860521 - RNA, 22 nt, Human
agaaaugcucaggucaacuuaa

SEQ ID NO: 860522 - RNA, 22 nt, Human
aauucuaaauguaauuuagaau

SEQ ID NO: 860523 - RNA, 22 nt, Human
uucauuaauucauucagugacu

SEQ ID NO: 860524 - RNA, 18 nt, Human
augggaggggccaagaga

SEQ ID NO: 860525 - RNA, 22 nt, Human
ccauuguaaauucuguggaagu

SEQ ID NO: 860526 - RNA, 22 nt, Human
cuucugugauuugguuaggaua

SEQ ID NO: 860527 - RNA, 22 nt, Human
gagcagcucugugccuggagac

SEQ ID NO: 860528 - RNA, 22 nt, Human
uuagaaaugcacccaagaccua

SEQ ID NO: 860529 - RNA, 22 nt, Human
gcauguuauguaucugcccagc

SEQ ID NO: 860530 - RNA, 22 nt, Human
ucaguucugcuagaaaaacagu

SEQ ID NO: 860531 - RNA, 17 nt, Human
agagagagcaugccacc

SEQ ID NO: 860532 - RNA, 22 nt, Human
gaucuguuucauucacagucug

SEQ ID NO: 860533 - RNA, 22 nt, Human
aggcaguuuaggcagcgauuua

SEQ ID NO: 860534 - RNA, 22 nt, Human
ugagacaaccuaauuaaacacc

SEQ ID NO: 860535 - RNA, 22 nt, Human
cugcugugcagacagacucucu

SEQ ID NO: 860536 - RNA, 22 nt, Human
ucacaaauagcuauauuaagga

SEQ ID NO: 860537 - RNA, 22 nt, Human
aaaccgcaauuacuuuugcguc

SEQ ID NO: 860538 - RNA, 22 nt, Human
ucauacaucuguccuggagcuc

SEQ ID NO: 860539 - RNA, 22 nt, Human
gagugucugaauuagagcacaa

SEQ ID NO: 860540 - RNA, 22 nt, Human
auuaggcauuauggggauaagg

SEQ ID NO: 860541 - RNA, 22 nt, Human
gucuucuuguuuugaaggaaau

SEQ ID NO: 860542 - RNA, 22 nt, Human
aggcaguuuauccccagagccu

SEQ ID NO: 860543 - RNA, 22 nt, Human
aagaaugagcucaaagaucuua

SEQ ID NO: 860544 - RNA, 22 nt, Human
uugagaagaauguguugaguuu

SEQ ID NO: 860545 - RNA, 22 nt, Human
cugguacaaaaugcugauauca

SEQ ID NO: 860546 - RNA, 22 nt, Human
aaaauugaagugaucaggaacu

SEQ ID NO: 860547 - RNA, 22 nt, Human
ugaaaggugacauuucuuggau

SEQ ID NO: 860548 - RNA, 22 nt, Human
uggaaggaagccaaggaagguu

SEQ ID NO: 860549 - RNA, 22 nt, Human
aaucagaaucaguugacacagc

SEQ ID NO: 860550 - RNA, 22 nt, Human
cuggaguuagaguagacacuga

SEQ ID NO: 860551 - RNA, 23 nt, Human
cuugcagggcuggaggcuuagaa

SEQ ID NO: 860552 - RNA, 22 nt, Human
uaaaaguauacuuucaaaggag

SEQ ID NO: 860553 - RNA, 22 nt, Human
auccaugaucaauuuauuacua

SEQ ID NO: 860554 - RNA, 22 nt, Human
gaggcagcuggguccggucggg

SEQ ID NO: 860555 - RNA, 22 nt, Human
gagagggauacugaguuuuggu

SEQ ID NO: 860556 - RNA, 22 nt, Human
acauaauagguaccugaauaau

SEQ ID NO: 860557 - RNA, 22 nt, Human
aggaaagguagcgugccagcag

SEQ ID NO: 860558 - RNA, 20 nt, Human
uauggcuuggcaaagcuuca

SEQ ID NO: 860559 - RNA, 22 nt, Human
uuucaacauauaccauaaugcc

SEQ ID NO: 860560 - RNA, 22 nt, Human
gaggccagggaugcaaugagag

SEQ ID NO: 860561 - RNA, 22 nt, Human
uccaggagugauaaggccacug

SEQ ID NO: 860562 - RNA, 22 nt, Human
caugcuuuuuucuaguauaaau

SEQ ID NO: 860563 - RNA, 22 nt, Human
guuaggcaauaccucuuacacc

SEQ ID NO: 860564 - RNA, 22 nt, Human
uuauuacacugaaagaauugcg

SEQ ID NO: 860565 - RNA, 22 nt, Human
uauugaugcuuggauugggcca

SEQ ID NO: 860566 - RNA, 22 nt, Human
cuuuggcaaugucauuuucaau

SEQ ID NO: 860567 - RNA, 22 nt, Human
guuguuuuuguucucuauagcu

SEQ ID NO: 860568 - RNA, 22 nt, Human
cccaggaugucgaggcugcagu

SEQ ID NO: 860569 - RNA, 22 nt, Human
agagagcauugaggaaaucuuc

SEQ ID NO: 860570 - RNA, 22 nt, Human
uuaauucuaguuuaacacuuag

SEQ ID NO: 860571 - RNA, 22 nt, Human
agggagcuucuggccucagccu

SEQ ID NO: 860572 - RNA, 22 nt, Human
cuuagaaaucgaacucagguua

SEQ ID NO: 860573 - RNA, 22 nt, Human
uuuaaauuuagaagaaacacug

SEQ ID NO: 860574 - RNA, 22 nt, Human
aggcaguggagcuggaauaggc

SEQ ID NO: 860575 - RNA, 22 nt, Human
caguccuugcucaaagucuaca

SEQ ID NO: 860576 - RNA, 22 nt, Human
uuucaagaacaacauucauuca

SEQ ID NO: 860577 - RNA, 22 nt, Human
uaagaaucugcauuuuaacaag

SEQ ID NO: 860578 - RNA, 20 nt, Human
aggaagcugagauguagagg

SEQ ID NO: 860579 - RNA, 22 nt, Human
ccccaggacacauggaccaagu

SEQ ID NO: 860580 - RNA, 22 nt, Human
uaauuucaauagcuugcauaau

SEQ ID NO: 860581 - RNA, 22 nt, Human
uggaaggagacugggaagugug

SEQ ID NO: 860582 - RNA, 22 nt, Human
aauacaguaauuuugaugaguu

SEQ ID NO: 860583 - RNA, 22 nt, Human
uaugaaaauuuagcugaagcau

SEQ ID NO: 860584 - RNA, 22 nt, Human
aggcagugcaugcaaaggucgg

SEQ ID NO: 860585 - RNA, 22 nt, Human
ucugggaacugagcuccccuag

SEQ ID NO: 860586 - RNA, 20 nt, Human
guaaugaauguaaacaguaa

SEQ ID NO: 860587 - RNA, 22 nt, Human
auggcauuugaccgcuuugugg

SEQ ID NO: 860588 - RNA, 22 nt, Human
gcagaggauagcauaugaaccu

SEQ ID NO: 860589 - RNA, 22 nt, Human
ucagaauugucuggggaauguu

SEQ ID NO: 860590 - RNA, 22 nt, Human
agagugucugguagcugcucug

SEQ ID NO: 860591 - RNA, 22 nt, Human
guacagaaaguacccauagaag

SEQ ID NO: 860592 - RNA, 22 nt, Human
auuuguagugaagugaaaauaa

SEQ ID NO: 860593 - RNA, 22 nt, Human
cugcuguguggauucaauggcu

SEQ ID NO: 860594 - RNA, 22 nt, Human
uaaaguuuguagcaauugauau

SEQ ID NO: 860595 - RNA, 22 nt, Human
uauccaaaggaacaaucacagc

SEQ ID NO: 860596 - RNA, 17 nt, Human
acucaggaucugggagu

SEQ ID NO: 860597 - RNA, 22 nt, Human
gcccaggagguggaggugcagu

SEQ ID NO: 860598 - RNA, 22 nt, Human
gcuauacaaguguagaauagag

SEQ ID NO: 860599 - RNA, 22 nt, Human
ucuauacacacaaagaaugcuu

SEQ ID NO: 860600 - RNA, 22 nt, Human
aauauaugugguauugaccagc

SEQ ID NO: 860601 - RNA, 22 nt, Human
ggcuuugccuggaauuuccuug

SEQ ID NO: 860602 - RNA, 22 nt, Human
gguggaaggccuggaaggaggc

SEQ ID NO: 860603 - RNA, 20 nt, Human
cugcugugauucccuccucc

SEQ ID NO: 860604 - RNA, 22 nt, Human
ucaggagaguguucaguggagg

SEQ ID NO: 860605 - RNA, 22 nt, Human
uguaacaauuucuuacuauugu

SEQ ID NO: 860606 - RNA, 22 nt, Human
guugacagcuggugagcugcua

SEQ ID NO: 860607 - RNA, 22 nt, Human
agacucaagcagauaggaauua

SEQ ID NO: 860608 - RNA, 20 nt, Human
ggcagcuugggcagcaguua

SEQ ID NO: 860609 - RNA, 22 nt, Human
cugugcagcuggcuuccuggaa

SEQ ID NO: 860610 - RNA, 22 nt, Human
uaauacuuuugccuuguauuca

SEQ ID NO: 860611 - RNA, 22 nt, Human
guaaacauuuucaucugugccc

SEQ ID NO: 860612 - RNA, 19 nt, Human
gaaguccucuaguaaauuu

SEQ ID NO: 860613 - RNA, 22 nt, Human
uagaaaucagcaggcauaugua

SEQ ID NO: 860614 - RNA, 22 nt, Human
auguuucaccaguuuuauaaga

SEQ ID NO: 860615 - RNA, 22 nt, Human
acugcuuuaucugagaaguccu

SEQ ID NO: 860616 - RNA, 22 nt, Human
uuucaguuuccagcuuugucau

SEQ ID NO: 860617 - RNA, 22 nt, Human
aagcuggagaguuaggugaaua

SEQ ID NO: 860618 - RNA, 23 nt, Human
uugcacauuggagcuggucuucu

SEQ ID NO: 860619 - RNA, 22 nt, Human
uucuuauagaagcaaccauugu

SEQ ID NO: 860620 - RNA, 22 nt, Human
caacugcugacaccaucacucc

SEQ ID NO: 860621 - RNA, 22 nt, Human
auuuucaaaacaucugcugugu

SEQ ID NO: 860622 - RNA, 22 nt, Human
aguucacauaucuguuuuauuu

SEQ ID NO: 860623 - RNA, 22 nt, Human
ccagguaggagagagggauccu

SEQ ID NO: 860624 - RNA, 22 nt, Human
aagucacccacaggcagcagaa

SEQ ID NO: 860625 - RNA, 22 nt, Human
auugauggcggccucuccauau

SEQ ID NO: 860626 - RNA, 22 nt, Human
uauacagaaagaauucaagucu

SEQ ID NO: 860627 - RNA, 22 nt, Human
ugcugcuguauccuuaguguca

SEQ ID NO: 860628 - RNA, 16 nt, Human
ccuggauccccugugg

SEQ ID NO: 860629 - RNA, 22 nt, Human
uaagaaucgauguuuauuuaga

SEQ ID NO: 860630 - RNA, 22 nt, Human
ugucauaacuuagugacaaauc

SEQ ID NO: 860631 - RNA, 22 nt, Human
aguccagugaacuguaaauagg

SEQ ID NO: 860632 - RNA, 22 nt, Human
uugauggcugugauuuacucag

SEQ ID NO: 860633 - RNA, 22 nt, Human
aguaaagcagaguugcaguaca

SEQ ID NO: 860634 - RNA, 22 nt, Human
auaucaaacgaaguuauuuuaa

SEQ ID NO: 860635 - RNA, 22 nt, Human
ugaauaauuccuuuuugucaag

SEQ ID NO: 860636 - RNA, 22 nt, Human
ugucaccaugccagcuucugcc

SEQ ID NO: 860637 - RNA, 22 nt, Human
uuucuaggucuuccauacugcc

SEQ ID NO: 860638 - RNA, 22 nt, Human
auuucucuuagcaagacauuac

SEQ ID NO: 860639 - RNA, 22 nt, Human
acugccauuggucaaaugagug

SEQ ID NO: 860640 - RNA, 22 nt, Human
cauuguuaccaucuuuuaccua

SEQ ID NO: 860641 - RNA, 22 nt, Human
aauugcaauuuucuuaaggucu

SEQ ID NO: 860642 - RNA, 22 nt, Human
aggcagcuuucagugucucuca

SEQ ID NO: 860643 - RNA, 22 nt, Human
ucugcaggaggcuggcugcagg

SEQ ID NO: 860644 - RNA, 22 nt, Human
ucagagagccucaggcacugcc

SEQ ID NO: 860645 - RNA, 22 nt, Human
cugcccaggaaccagaggggca

SEQ ID NO: 860646 - RNA, 22 nt, Human
aggugagggugccagugcaugg

SEQ ID NO: 860647 - RNA, 22 nt, Human
agggaagcuuguuacugagaag

SEQ ID NO: 860648 - RNA, 18 nt, Human
aggcaggcuggagugacu

SEQ ID NO: 860649 - RNA, 22 nt, Human
uugcauuugagaaaguucuccu

SEQ ID NO: 860650 - RNA, 22 nt, Human
ggaggcagaacuucccgucagu

SEQ ID NO: 860651 - RNA, 22 nt, Human
aauaucaacaguguccuucuaa

SEQ ID NO: 860652 - RNA, 22 nt, Human
ggcaugcugcguacagaugaac

SEQ ID NO: 860653 - RNA, 22 nt, Human
ugaggcaggaggauugcaggau

SEQ ID NO: 860654 - RNA, 22 nt, Human
auggcuuuccugggacaugggc

SEQ ID NO: 860655 - RNA, 17 nt, Human
gcugacccuggagaagu

SEQ ID NO: 860656 - RNA, 22 nt, Human
ggugagggaguggaacgaggug

SEQ ID NO: 860657 - RNA, 22 nt, Human
uguccauggauagagcugcucg

SEQ ID NO: 860658 - RNA, 22 nt, Human
uggggcuccuccuggcaggagg

SEQ ID NO: 860659 - RNA, 23 nt, Human
gugagucuugccuuugcugugga

SEQ ID NO: 860660 - RNA, 22 nt, Human
ucuucagaggaagucagucuuu

SEQ ID NO: 860661 - RNA, 22 nt, Human
cauuuguaggaugcuucuuguu

SEQ ID NO: 860662 - RNA, 22 nt, Human
uugcugaaaacaguggguauug

SEQ ID NO: 860663 - RNA, 22 nt, Human
agccagcuguucuggggcagca

SEQ ID NO: 860664 - RNA, 19 nt, Human
cagaaauagcgaaguguaa

SEQ ID NO: 860665 - RNA, 22 nt, Human
auacagaauucacuacaguuuc

SEQ ID NO: 860666 - RNA, 22 nt, Human
cucuuaguaaugccaugaagca

SEQ ID NO: 860667 - RNA, 22 nt, Human
caucagaauuacuuggggagcu

SEQ ID NO: 860668 - RNA, 21 nt, Human
ggacagcugcgcgcagggcuc

SEQ ID NO: 860669 - RNA, 22 nt, Human
gagucaccuuggccgcuguccc

SEQ ID NO: 860670 - RNA, 22 nt, Human
ccaggaaauggcuugcuucuuu

SEQ ID NO: 860671 - RNA, 22 nt, Human
cuggcuuuaacccuacaaaccu

SEQ ID NO: 860672 - RNA, 22 nt, Human
aagaaaucugauauuuguuuca

SEQ ID NO: 860673 - RNA, 22 nt, Human
ggaucugauuaauaagguggac

SEQ ID NO: 860674 - RNA, 22 nt, Human
aaacaaacauagguuugaaagu

SEQ ID NO: 860675 - RNA, 22 nt, Human
ggugguggagccagcugggagu

SEQ ID NO: 860676 - RNA, 22 nt, Human
ugaaucaguauaaauucucaaa

SEQ ID NO: 860677 - RNA, 22 nt, Human
auaaaaguucaagagaguacag

SEQ ID NO: 860678 - RNA, 22 nt, Human
ugcuuugggucucucuaguuuc

SEQ ID NO: 860679 - RNA, 22 nt, Human
caggaugagaagggcucuuacg

SEQ ID NO: 860680 - RNA, 22 nt, Human
acacauuucucuuuuuguaagu

SEQ ID NO: 860681 - RNA, 22 nt, Human
acccaggaugauaauguucaca

SEQ ID NO: 860682 - RNA, 17 nt, Human
ugauaguucauuuuaag

SEQ ID NO: 860683 - RNA, 22 nt, Human
aaggcagcaccgccuccugaaa

SEQ ID NO: 860684 - RNA, 22 nt, Human
guagccauuggcaaugaagccu

SEQ ID NO: 860685 - RNA, 22 nt, Human
gucaggauuauuuuauuaaaag

SEQ ID NO: 860686 - RNA, 22 nt, Human
ugaaauagacacagugcuauac

SEQ ID NO: 860687 - RNA, 17 nt, Human
uaaagccagucaaguca

SEQ ID NO: 860688 - RNA, 22 nt, Human
uggcagcugugcuucauucuuu

SEQ ID NO: 860689 - RNA, 22 nt, Human
ccaagaugaucuuuacaguguu

SEQ ID NO: 860690 - RNA, 22 nt, Human
ggugaagguggaacgcagagca

SEQ ID NO: 860691 - RNA, 22 nt, Human
aaaggugacacucugccagcug

SEQ ID NO: 860692 - RNA, 22 nt, Human
caugguuuugagccuauuaugc

SEQ ID NO: 860693 - RNA, 22 nt, Human
uacugcaugguggaguggagcu

SEQ ID NO: 860694 - RNA, 22 nt, Human
uauuucaagaacuucuauccau

SEQ ID NO: 860695 - RNA, 22 nt, Human
uccuuagagacaagaccaguuu

SEQ ID NO: 860696 - RNA, 22 nt, Human
uuucagacagauucuucucagu

SEQ ID NO: 860697 - RNA, 22 nt, Human
ucaggaugaccacgagccucua

SEQ ID NO: 860698 - RNA, 22 nt, Human
aauucucagguaaaaguuaagu

SEQ ID NO: 860699 - RNA, 19 nt, Human
uucaggauugacccuacug

SEQ ID NO: 860700 - RNA, 22 nt, Human
uguuugaauuuugcuaacgugu

SEQ ID NO: 860701 - RNA, 22 nt, Human
cccaggaggcagauguugcagu

SEQ ID NO: 860702 - RNA, 22 nt, Human
aggacagggauucaaacuccca

SEQ ID NO: 860703 - RNA, 22 nt, Human
augaaauaucuugaagaaauuc

SEQ ID NO: 860704 - RNA, 22 nt, Human
gaaggccauugcguccugggau

SEQ ID NO: 860705 - RNA, 22 nt, Human
aacaucuacuaagugccaggca

SEQ ID NO: 860706 - RNA, 22 nt, Human
caaauguaaauucuuuugaagc

SEQ ID NO: 860707 - RNA, 17 nt, Human
uagcuguguuucagcua

SEQ ID NO: 860708 - RNA, 22 nt, Human
uguguacacagauaguaauggc

SEQ ID NO: 860709 - RNA, 22 nt, Human
ccaggcugggcuacaaguugag

SEQ ID NO: 860710 - RNA, 22 nt, Human
cccaggaggacauuccauaccc

SEQ ID NO: 860711 - RNA, 21 nt, Human
aucauucuggaaaauucaagc

SEQ ID NO: 860712 - RNA, 22 nt, Human
gaggcagaaguugcagugagca

SEQ ID NO: 860713 - RNA, 22 nt, Human
gcuggauccugauucgucuuug

SEQ ID NO: 860714 - RNA, 22 nt, Human
auauuaaauggauuuugggagc

SEQ ID NO: 860715 - RNA, 22 nt, Human
gucagagagggcacgugcacac

SEQ ID NO: 860716 - RNA, 22 nt, Human
uggauuagguacuaugaauaua

SEQ ID NO: 860717 - RNA, 22 nt, Human
cuugcuucauuagugucuuagu

SEQ ID NO: 860718 - RNA, 22 nt, Human
agccauuuuccugaaauauaac

SEQ ID NO: 860719 - RNA, 22 nt, Human
uuggcaggaauauugcagaggu

SEQ ID NO: 860720 - RNA, 22 nt, Human
gucaggauuugaacucaggucu

SEQ ID NO: 860721 - RNA, 22 nt, Human
ggcagaggaggggugaauuugc

SEQ ID NO: 860722 - RNA, 22 nt, Human
uucagaaacccauugggucucu

SEQ ID NO: 860723 - RNA, 22 nt, Human
ucugcaggcuguacaggaagca

SEQ ID NO: 860724 - RNA, 22 nt, Human
ucccaggaugugcgugccgccg

SEQ ID NO: 860725 - RNA, 19 nt, Human
uuccaaaaucaggauuuga

SEQ ID NO: 860726 - RNA, 22 nt, Human
uaaagucaucuuuacaucuuug

SEQ ID NO: 860727 - RNA, 22 nt, Human
ugacccauggucugaucauagg

SEQ ID NO: 860728 - RNA, 22 nt, Human
uucagaaaaagaccauugcaau

SEQ ID NO: 860729 - RNA, 22 nt, Human
uuaauaaacaggugcagcugaa

SEQ ID NO: 860730 - RNA, 22 nt, Human
agagagagggaaacugcuaaac

SEQ ID NO: 860731 - RNA, 20 nt, Human
ccagaagagaugaucaucca

SEQ ID NO: 860732 - RNA, 22 nt, Human
aagauaaacucuugauuucuga

SEQ ID NO: 860733 - RNA, 22 nt, Human
uuuaaauggcauuuucccagau

SEQ ID NO: 860734 - RNA, 22 nt, Human
ugaggcaguugagcuuccugag

SEQ ID NO: 860735 - RNA, 22 nt, Human
gugcugugugauccaugcuggc

SEQ ID NO: 860736 - RNA, 22 nt, Human
uuuaaauuauaguuaaugucug

SEQ ID NO: 860737 - RNA, 22 nt, Human
aaaaagguugauccagauuagg

SEQ ID NO: 860738 - RNA, 22 nt, Human
ggagaggagauuguggcauuuu

SEQ ID NO: 860739 - RNA, 22 nt, Human
uagcuuuccuuguugccugugc

SEQ ID NO: 860740 - RNA, 22 nt, Human
cagaguucaaagccugcuggga

SEQ ID NO: 860741 - RNA, 19 nt, Human
ugagaggcuuaaggcagcu

SEQ ID NO: 860742 - RNA, 22 nt, Human
auucuucacaaauauauagaag

SEQ ID NO: 860743 - RNA, 22 nt, Human
aucacaaaggcugcuucaugau

SEQ ID NO: 860744 - RNA, 22 nt, Human
uuauucuucuucucuugccagg

SEQ ID NO: 860745 - RNA, 22 nt, Human
cagucuucuaaccuagcagccu

SEQ ID NO: 860746 - RNA, 22 nt, Human
auacacauguguaugugcaugc

SEQ ID NO: 860747 - RNA, 22 nt, Human
agccuuguuggucugaguuugg

SEQ ID NO: 860748 - RNA, 22 nt, Human
uaaggccauuauggugggcccg

SEQ ID NO: 860749 - RNA, 23 nt, Human
agggugagcaagcuauggagacc

SEQ ID NO: 860750 - RNA, 22 nt, Human
ucucagucuuugcaaggaugcu

SEQ ID NO: 860751 - RNA, 22 nt, Human
ugcuguggcaguuuauguauag

SEQ ID NO: 860752 - RNA, 22 nt, Human
caaauguauucucacuucaggg

SEQ ID NO: 860753 - RNA, 22 nt, Human
uuucacuagaacguucuuguuu

SEQ ID NO: 860754 - RNA, 22 nt, Human
acaacaaagacacuugaaauga

SEQ ID NO: 860755 - RNA, 22 nt, Human
uaauacagaaguguauuaaaau

SEQ ID NO: 860756 - RNA, 22 nt, Human
ugucaccacauuugucaauauc

SEQ ID NO: 860757 - RNA, 22 nt, Human
uuugagauggagucuugcucug

SEQ ID NO: 860758 - RNA, 22 nt, Human
cuugcaggauuuugcugcugua

SEQ ID NO: 860759 - RNA, 22 nt, Human
uccaaauacauuuacuguauuu

SEQ ID NO: 860760 - RNA, 22 nt, Human
cucaggauguacuacagaaggc

SEQ ID NO: 860761 - RNA, 22 nt, Human
ucucugaguauccugaacugcc

SEQ ID NO: 860762 - RNA, 22 nt, Human
gcuggcaggagccuuucccuuu

SEQ ID NO: 860763 - RNA, 21 nt, Human
uucugggaaaugagcuggggc

SEQ ID NO: 860764 - RNA, 22 nt, Human
acaaagaucuugcuuuccuacu

SEQ ID NO: 860765 - RNA, 22 nt, Human
ucacaauuuggauacagcuaug

SEQ ID NO: 860766 - RNA, 22 nt, Human
gucuucuuuucagucugcuugu

SEQ ID NO: 860767 - RNA, 22 nt, Human
ggcaggcucagcagccaaggag

SEQ ID NO: 860768 - RNA, 22 nt, Human
uuucuucagagagagcuuuccc

SEQ ID NO: 860769 - RNA, 22 nt, Human
ugaggcagugauguuuaagcac

SEQ ID NO: 860770 - RNA, 22 nt, Human
gauggcuuugugcaccaugauu

SEQ ID NO: 860771 - RNA, 23 nt, Human
ucucuuucaagagcuuaaugugc

SEQ ID NO: 860772 - RNA, 22 nt, Human
gauuuuauauggcauacugugg

SEQ ID NO: 860773 - RNA, 22 nt, Human
ucccaggacccaggcauucaca

SEQ ID NO: 860774 - RNA, 20 nt, Human
uuugucuguuaaguguuucu

SEQ ID NO: 860775 - RNA, 22 nt, Human
auggcuuugcucaaguuuagcc

SEQ ID NO: 860776 - RNA, 22 nt, Human
ugguaauuuacgcauuucugua

SEQ ID NO: 860777 - RNA, 22 nt, Human
caaguaaacaauaugugauuca

SEQ ID NO: 860778 - RNA, 22 nt, Human
gugucccaggccucuggaauua

SEQ ID NO: 860779 - RNA, 23 nt, Human
agaugagccaacaccuccaugcc

SEQ ID NO: 860780 - RNA, 22 nt, Human
auuucauacuaaggcucaaaaa

SEQ ID NO: 860781 - RNA, 22 nt, Human
ggaggggauuuaguagaugcua

SEQ ID NO: 860782 - RNA, 22 nt, Human
acacauauucauauguacuuac

SEQ ID NO: 860783 - RNA, 22 nt, Human
guuuuucuuugugugaagacaa

SEQ ID NO: 860784 - RNA, 22 nt, Human
aucagcuuuucucaucagaaau

SEQ ID NO: 860785 - RNA, 22 nt, Human
aagaacuuccuaauauauuuuc

SEQ ID NO: 860786 - RNA, 22 nt, Human
uggguuuaaacucaacucuaaa

SEQ ID NO: 860787 - RNA, 22 nt, Human
gcucacugccauucucuagaug

SEQ ID NO: 860788 - RNA, 22 nt, Human
ugcuggaggauuaaacaaguca

SEQ ID NO: 860789 - RNA, 22 nt, Human
cugcuguguuucacaccucugg

SEQ ID NO: 860790 - RNA, 22 nt, Human
ucuggaucggguuccucagguc

SEQ ID NO: 860791 - RNA, 22 nt, Human
agcuacccgaggacaggcuaag

SEQ ID NO: 860792 - RNA, 22 nt, Human
ccucacugaagaggugacauuu

SEQ ID NO: 860793 - RNA, 22 nt, Human
auuucaacacuuuuggaauuag

SEQ ID NO: 860794 - RNA, 22 nt, Human
uggcagcugauuagauggugcc

SEQ ID NO: 860795 - RNA, 22 nt, Human
ugaguuuugucuugcuagaagu

SEQ ID NO: 860796 - RNA, 22 nt, Human
gaggaggcuuccgggaggcacg

SEQ ID NO: 860797 - RNA, 22 nt, Human
uucucugaaggccaugcucacu

SEQ ID NO: 860798 - RNA, 22 nt, Human
uagaugcuguagaaauacuuau

SEQ ID NO: 860799 - RNA, 18 nt, Human
ucuuuggacaacuacugg

SEQ ID NO: 860800 - RNA, 22 nt, Human
aaucauaauucaaauaagcuua

SEQ ID NO: 860801 - RNA, 22 nt, Human
agagugaaguuuuugaaaguga

SEQ ID NO: 860802 - RNA, 22 nt, Human
aguacaauuauauuuagauggu

SEQ ID NO: 860803 - RNA, 17 nt, Human
uggcagcugaaagcucu

SEQ ID NO: 860804 - RNA, 22 nt, Human
cccaggaggugugcccaacucg

SEQ ID NO: 860805 - RNA, 22 nt, Human
ggaggggucucuagcgaggaga

SEQ ID NO: 860806 - RNA, 22 nt, Human
uuuaggcagaagcccugcugau

SEQ ID NO: 860807 - RNA, 18 nt, Human
caauuucaauggucugaa

SEQ ID NO: 860808 - RNA, 22 nt, Human
cccuggaggcaaagguugcagu

SEQ ID NO: 860809 - RNA, 22 nt, Human
uaaagccaacacuuuacugcuc

SEQ ID NO: 860810 - RNA, 22 nt, Human
uuugaauaaucacugggcauua

SEQ ID NO: 860811 - RNA, 22 nt, Human
augcugugcuggcuaaccaugg

SEQ ID NO: 860812 - RNA, 22 nt, Human
uuucaugaggggcaaaaucuca

SEQ ID NO: 860813 - RNA, 22 nt, Human
uagggcagagcuuguacacgau

SEQ ID NO: 860814 - RNA, 22 nt, Human
uccaggagugugugcuaauggg

SEQ ID NO: 860815 - RNA, 22 nt, Human
uauaagaaacaaggcaaauuuu

SEQ ID NO: 860816 - RNA, 22 nt, Human
cucacugacgaggaagcugaga

SEQ ID NO: 860817 - RNA, 22 nt, Human
uucugaaccauugagcacugcc

SEQ ID NO: 860818 - RNA, 22 nt, Human
aacuggauuuaggaacagagaa

SEQ ID NO: 860819 - RNA, 22 nt, Human
gaggcauggccugaggcuagga

SEQ ID NO: 860820 - RNA, 22 nt, Human
ggccagcugggccaccaggugc

SEQ ID NO: 860821 - RNA, 16 nt, Human
gcaacuuugggguuga

SEQ ID NO: 860822 - RNA, 22 nt, Human
aguaaaauuaauggaucagaag

SEQ ID NO: 860823 - RNA, 22 nt, Human
gaggagagccugcacuuugacc

SEQ ID NO: 860824 - RNA, 22 nt, Human
cccaggaaugaggggcggaggc

SEQ ID NO: 860825 - RNA, 22 nt, Human
auuauccagcaccaaugucaga

SEQ ID NO: 860826 - RNA, 22 nt, Human
gaaagccaucuggcugcuggga

SEQ ID NO: 860827 - RNA, 22 nt, Human
uuagaaaugauuucaccucuuu

SEQ ID NO: 860828 - RNA, 18 nt, Human
caagaaucucuaaagaag

SEQ ID NO: 860829 - RNA, 22 nt, Human
ugguuuaauuuccauuuccuug

SEQ ID NO: 860830 - RNA, 22 nt, Human
agaggccaugcuagaggccugg

SEQ ID NO: 860831 - RNA, 22 nt, Human
uucauucugggcucuaaggaac

SEQ ID NO: 860832 - RNA, 21 nt, Human
aacugguucaauucaacuaga

SEQ ID NO: 860833 - RNA, 22 nt, Human
uuauacuuuauacuacaucauu

SEQ ID NO: 860834 - RNA, 22 nt, Human
aaucuagucuccuuaagucuuu

SEQ ID NO: 860835 - RNA, 21 nt, Human
aaugaaguggcuauuuugagg

SEQ ID NO: 860836 - RNA, 22 nt, Human
aacuagucagugauucucagaa

SEQ ID NO: 860837 - RNA, 22 nt, Human
ucuuaaagagcgcaauuugagg

SEQ ID NO: 860838 - RNA, 19 nt, Human
cucucacucgccacauccu

SEQ ID NO: 860839 - RNA, 21 nt, Human
cuugaaagguagagucuacag

SEQ ID NO: 860840 - RNA, 20 nt, Human
cagaggcaaggagacuugga

SEQ ID NO: 860841 - RNA, 22 nt, Human
uuuaacagaugugaaauuuuca

SEQ ID NO: 860842 - RNA, 22 nt, Human
uuccuuagccugccuuccaggg

SEQ ID NO: 860843 - RNA, 22 nt, Human
cauggauugaauauaaauuaga

SEQ ID NO: 860844 - RNA, 22 nt, Human
acccaggagccgugagagguua

SEQ ID NO: 860845 - RNA, 18 nt, Human
caugucugcgccacaagg

SEQ ID NO: 860846 - RNA, 22 nt, Human
ggaguaggaguagaacucauca

SEQ ID NO: 860847 - RNA, 22 nt, Human
auuuccaguccuaaugaucugg

SEQ ID NO: 860848 - RNA, 22 nt, Human
aauaucaguauauuguaucagu

SEQ ID NO: 860849 - RNA, 22 nt, Human
acuuugaaucucagauaaccaa

SEQ ID NO: 860850 - RNA, 22 nt, Human
uuucuuguaagauguuuauuaa

SEQ ID NO: 860851 - RNA, 22 nt, Human
cuacccaggcuggagugcagua

SEQ ID NO: 860852 - RNA, 22 nt, Human
agggggugucucugauuggguu

SEQ ID NO: 860853 - RNA, 22 nt, Human
aagcagggcuuuaagcgguuuu

SEQ ID NO: 860854 - RNA, 22 nt, Human
acccaggaaaacauggugcaga

SEQ ID NO: 860855 - RNA, 22 nt, Human
agaggcggagcuugcagugagc

SEQ ID NO: 860856 - RNA, 22 nt, Human
uacagaaguaaauaccaaaagc

SEQ ID NO: 860857 - RNA, 22 nt, Human
ugaaucauggauaaauagcuua

SEQ ID NO: 860858 - RNA, 22 nt, Human
gaccauuucuaggaaucagacu

SEQ ID NO: 860859 - RNA, 22 nt, Human
uagcccagcaugagcagagcug

SEQ ID NO: 860860 - RNA, 22 nt, Human
gaggcaugcagagcuggagcag

SEQ ID NO: 860861 - RNA, 22 nt, Human
uucaggauuauacucucuuccc

SEQ ID NO: 860862 - RNA, 22 nt, Human
gaggucagucagaccaggguuu

SEQ ID NO: 860863 - RNA, 22 nt, Human
uuguaaaugaccuuuucuaauu

SEQ ID NO: 860864 - RNA, 22 nt, Human
aaauuauaggugccaccuugga

SEQ ID NO: 860865 - RNA, 22 nt, Human
aaguccuuuccaguccugugau

SEQ ID NO: 860866 - RNA, 22 nt, Human
uacaaaguagaaauucaguaaa

SEQ ID NO: 860867 - RNA, 22 nt, Human
ucccaggaaaacacucgaggac

SEQ ID NO: 860868 - RNA, 22 nt, Human
agggagcuaggauccugaaggu

SEQ ID NO: 860869 - RNA, 22 nt, Human
uccauuuucuaaguaucacuua

SEQ ID NO: 860870 - RNA, 22 nt, Human
gauaauaagcacagcaggaugu

SEQ ID NO: 860871 - RNA, 22 nt, Human
acauuccaaaaacuagcagaua

SEQ ID NO: 860872 - RNA, 22 nt, Human
cucccaggacucagaggagaag

SEQ ID NO: 860873 - RNA, 22 nt, Human
aaaucucacuguagucaaagug

SEQ ID NO: 860874 - RNA, 22 nt, Human
aggggaugauccucccgcagcg

SEQ ID NO: 860875 - RNA, 22 nt, Human
aggcaguggaaggagaaagcaa

SEQ ID NO: 860876 - RNA, 22 nt, Human
aaaaugaugcuguaauuuggca

SEQ ID NO: 860877 - RNA, 22 nt, Human
ucugcaggcuuggaguggcagc

SEQ ID NO: 860878 - RNA, 22 nt, Human
cuggauuuuagaaggcuuccua

SEQ ID NO: 860879 - RNA, 22 nt, Human
cuucucagcaugguuacuguga

SEQ ID NO: 860880 - RNA, 22 nt, Human
cuaauacacccuauugcuuguu

SEQ ID NO: 860881 - RNA, 22 nt, Human
gggaagcaggugcagcucgccu

SEQ ID NO: 860882 - RNA, 22 nt, Human
uuuucuuaggugcuccaaguag

SEQ ID NO: 860883 - RNA, 22 nt, Human
auguuuccgugagcauccuuga

SEQ ID NO: 860884 - RNA, 22 nt, Human
cagaccucaguccucaguagga

SEQ ID NO: 860885 - RNA, 17 nt, Human
gcgcagcuccuggcgcg

SEQ ID NO: 860886 - RNA, 22 nt, Human
cucucuguuaugcuuucaugaa

SEQ ID NO: 860887 - RNA, 22 nt, Human
uguauacaggcauaagagauac

SEQ ID NO: 860888 - RNA, 22 nt, Human
ucaccgucgggggucgcugucu

SEQ ID NO: 860889 - RNA, 22 nt, Human
ucugcugucacucauuugcuuc

SEQ ID NO: 860890 - RNA, 23 nt, Human
uguugaaguaacuguuacauaga

SEQ ID NO: 860891 - RNA, 22 nt, Human
ggagaggauguuuuaguaacuu

SEQ ID NO: 860892 - RNA, 19 nt, Human
agcauuuggaauucuacac

SEQ ID NO: 860893 - RNA, 22 nt, Human
aggcagacaaggacacaguggg

SEQ ID NO: 860894 - RNA, 22 nt, Human
gaaggaggugucaguuggacug

SEQ ID NO: 860895 - RNA, 22 nt, Human
aaugagacacgugaagcagaug

SEQ ID NO: 860896 - RNA, 22 nt, Human
ugaggcaggaguuaaugugcuc

SEQ ID NO: 860897 - RNA, 22 nt, Human
gaaauauuucucuugagccccu

SEQ ID NO: 860898 - RNA, 22 nt, Human
uggcuuaagcgcaacucugucu

SEQ ID NO: 860899 - RNA, 22 nt, Human
gaagaaucaagcaguaauuugu

SEQ ID NO: 860900 - RNA, 23 nt, Human
gggcagcuuaagcuuguuuuucu

SEQ ID NO: 860901 - RNA, 21 nt, Human
gauugaaaccauggcagugag

SEQ ID NO: 860902 - RNA, 22 nt, Human
uggaagggagugacagucagag

SEQ ID NO: 860903 - RNA, 22 nt, Human
gaucagaaucuucauuuucagu

SEQ ID NO: 860904 - RNA, 18 nt, Human
gagucuuuguuacugcug

SEQ ID NO: 860905 - RNA, 19 nt, Human
ggcagcuugggaagguagc

SEQ ID NO: 860906 - RNA, 22 nt, Human
cauuuguuuagaagucuuuaua

SEQ ID NO: 860907 - RNA, 22 nt, Human
gaucauuuacuuguucuggacu

SEQ ID NO: 860908 - RNA, 15 nt, Human
aaucagaaguguggc

SEQ ID NO: 860909 - RNA, 22 nt, Human
aucagaaaggugggcaagcaga

SEQ ID NO: 860910 - RNA, 22 nt, Human
uuugcauaggauggacauuuua

SEQ ID NO: 860911 - RNA, 22 nt, Human
ugaggcagugcugggaagccug

SEQ ID NO: 860912 - RNA, 22 nt, Human
gauuuuaauuauaggagguccu

SEQ ID NO: 860913 - RNA, 22 nt, Human
cauuuccugucuggaggucaaa

SEQ ID NO: 860914 - RNA, 22 nt, Human
auacagaaguuuuccacuuauu

SEQ ID NO: 860915 - RNA, 22 nt, Human
aguggcagagguugacugcagu

SEQ ID NO: 860916 - RNA, 22 nt, Human
ccucuucuaggacguccuugug

SEQ ID NO: 860917 - RNA, 22 nt, Human
uuucaaagaguuguaaauuacu

SEQ ID NO: 860918 - RNA, 22 nt, Human
uuccuuaggggacagggggaua

SEQ ID NO: 860919 - RNA, 17 nt, Human
agaacuguaguagcucc

SEQ ID NO: 860920 - RNA, 22 nt, Human
cuucagaggggacucaaaguca

SEQ ID NO: 860921 - RNA, 22 nt, Human
cuggcuuucauuucaagcacgu

SEQ ID NO: 860922 - RNA, 22 nt, Human
caaugugguggcagaugucagu

SEQ ID NO: 860923 - RNA, 22 nt, Human
uuugaaaucuaaucaaggaaca

SEQ ID NO: 860924 - RNA, 22 nt, Human
uucuuaacucaaauauauaucc

SEQ ID NO: 860925 - RNA, 22 nt, Human
ugauugaagaggugaggaaguu

SEQ ID NO: 860926 - RNA, 22 nt, Human
gggcagcucggaagugggaaag

SEQ ID NO: 860927 - RNA, 22 nt, Human
ggcucagagaccugcgaucuga

SEQ ID NO: 860928 - RNA, 22 nt, Human
ucccaggaauccguccucuaga

SEQ ID NO: 860929 - RNA, 22 nt, Human
ggagagugggagcaacuguugc

SEQ ID NO: 860930 - RNA, 22 nt, Human
ugugaaggagaugaagggagug

SEQ ID NO: 860931 - RNA, 22 nt, Human
cauuucaaacaguuacagcugc

SEQ ID NO: 860932 - RNA, 22 nt, Human
ggugaagggccuuaggagacag

SEQ ID NO: 860933 - RNA, 22 nt, Human
auucauuuagguauucacuuac

SEQ ID NO: 860934 - RNA, 22 nt, Human
acagugcuggcuacaacccugg

SEQ ID NO: 860935 - RNA, 22 nt, Human
cuguauuucccacauucucuau

SEQ ID NO: 860936 - RNA, 22 nt, Human
gcccaggaguucaagucuagug

SEQ ID NO: 860937 - RNA, 16 nt, Human
gcccaggacgggaggc

SEQ ID NO: 860938 - RNA, 22 nt, Human
aggcaccuugcgguccagugaa

SEQ ID NO: 860939 - RNA, 22 nt, Human
uaaauuguuuucuagaaguugu

SEQ ID NO: 860940 - RNA, 22 nt, Human
ugcauguguuugccacagugag

SEQ ID NO: 860941 - RNA, 22 nt, Human
ucuuuaaucauaaccaagaugg

SEQ ID NO: 860942 - RNA, 22 nt, Human
aaggaguuuggguagucauaca

SEQ ID NO: 860943 - RNA, 22 nt, Human
cuauagaaaauuguaucacacg

SEQ ID NO: 860944 - RNA, 22 nt, Human
cucccagagagcaggugggccg

SEQ ID NO: 860945 - RNA, 22 nt, Human
uucauaaucaccaaaaacugga

SEQ ID NO: 860946 - RNA, 22 nt, Human
aauauuguuucaagaucacaga

SEQ ID NO: 860947 - RNA, 22 nt, Human
gcaagcugaugugauagugaaa

SEQ ID NO: 860948 - RNA, 22 nt, Human
uggcaauuuuaggugguuuagu

SEQ ID NO: 860949 - RNA, 22 nt, Human
uugcaucuagggcaacccagag

SEQ ID NO: 860950 - RNA, 22 nt, Human
uuuauuuggcauccagggagaa

SEQ ID NO: 860951 - RNA, 22 nt, Human
agcacauaccagaaccacaggu

SEQ ID NO: 860952 - RNA, 22 nt, Human
uguuugaacugaauaacauagu

SEQ ID NO: 860953 - RNA, 22 nt, Human
ucuuugcaggccaaauuguuaa

SEQ ID NO: 860954 - RNA, 22 nt, Human
auuacagaaugcaguuccuuau

SEQ ID NO: 860955 - RNA, 22 nt, Human
uucccucucacuuaaagcuugg

SEQ ID NO: 860956 - RNA, 22 nt, Human
cucccaggggaacuaucaagua

SEQ ID NO: 860957 - RNA, 23 nt, Human
uagaauucaaucuguuccacauc

SEQ ID NO: 860958 - RNA, 22 nt, Human
caggcagcaucagucugcugua

SEQ ID NO: 860959 - RNA, 22 nt, Human
gcaagcugcucuuauguggagg

SEQ ID NO: 860960 - RNA, 22 nt, Human
uggagaauuuugucaccagaca

SEQ ID NO: 860961 - RNA, 22 nt, Human
uuaacauuguccuuagcagauu

SEQ ID NO: 860962 - RNA, 22 nt, Human
guuaggcauuugccuuaauuuu

SEQ ID NO: 860963 - RNA, 22 nt, Human
ggaggacaggggcugcagcaca

SEQ ID NO: 860964 - RNA, 22 nt, Human
aauuuuaaucaguggugcugag

SEQ ID NO: 860965 - RNA, 22 nt, Human
ucugggaaccagugcggcuggg

SEQ ID NO: 860966 - RNA, 22 nt, Human
gguacaauggaccauaaaagcu

SEQ ID NO: 860967 - RNA, 22 nt, Human
accaggaggccuggagcacaaa

SEQ ID NO: 860968 - RNA, 22 nt, Human
auggcuuucucuaaugugguau

SEQ ID NO: 860969 - RNA, 22 nt, Human
gggaggugauggcaagcagcgg

SEQ ID NO: 860970 - RNA, 22 nt, Human
ugaaggaaugaguauacuguuu

SEQ ID NO: 860971 - RNA, 22 nt, Human
ggcaauuucaugugguuuaaac

SEQ ID NO: 860972 - RNA, 22 nt, Human
aaggcagccagauccuuugggu

SEQ ID NO: 860973 - RNA, 22 nt, Human
cauuuccagcuccugcaucaug

SEQ ID NO: 860974 - RNA, 21 nt, Human
gugcuuuuccuuaauguucuu

SEQ ID NO: 860975 - RNA, 22 nt, Human
uuuaggcaaauuucagaugugc

SEQ ID NO: 860976 - RNA, 19 nt, Human
gcagcugcuugaaaagaaa

SEQ ID NO: 860977 - RNA, 22 nt, Human
agucaccagguuuuagagaccu

SEQ ID NO: 860978 - RNA, 22 nt, Human
cauggagauaaacugaaauauu

SEQ ID NO: 860979 - RNA, 22 nt, Human
uuggcaguaaaagaaaaugcuu

SEQ ID NO: 860980 - RNA, 19 nt, Human
agggaguuuauauuugcac

SEQ ID NO: 860981 - RNA, 22 nt, Human
uugguccacugugaaauuggga

SEQ ID NO: 860982 - RNA, 22 nt, Human
cauagagugauguaagguaugu

SEQ ID NO: 860983 - RNA, 22 nt, Human
gcauguguggaggagaugugcu

SEQ ID NO: 860984 - RNA, 22 nt, Human
cagcagagaaauuaaacuucug

SEQ ID NO: 860985 - RNA, 22 nt, Human
cauuuguacagaacagcuuuau

SEQ ID NO: 860986 - RNA, 22 nt, Human
ugaaucugauuucccuggaggc

SEQ ID NO: 860987 - RNA, 22 nt, Human
aucuuucuccauauacaucuuu

SEQ ID NO: 860988 - RNA, 22 nt, Human
uuuaggcaagaacucacugaga

SEQ ID NO: 860989 - RNA, 22 nt, Human
uuggaaagcaagcuggacauac

SEQ ID NO: 860990 - RNA, 22 nt, Human
uacaauacuuaaccuauuuugc

SEQ ID NO: 860991 - RNA, 22 nt, Human
aggaugagaagauuggaaucuu

SEQ ID NO: 860992 - RNA, 22 nt, Human
caaguccuaggucugauugaac

SEQ ID NO: 860993 - RNA, 17 nt, Human
gagagcugcugcuuccg

SEQ ID NO: 860994 - RNA, 22 nt, Human
uaaaacuuaacuauccagauua

SEQ ID NO: 860995 - RNA, 22 nt, Human
cuggccagaguuggagggugug

SEQ ID NO: 860996 - RNA, 22 nt, Human
auaguuugaaggcuguucuacu

SEQ ID NO: 860997 - RNA, 22 nt, Human
uuucaacuuguuugcuuccaua

SEQ ID NO: 860998 - RNA, 22 nt, Human
uacugcauaacuggcauguggg

SEQ ID NO: 860999 - RNA, 22 nt, Human
cauuucaaugccuucaacauag

SEQ ID NO: 861000 - RNA, 22 nt, Human
aguuggagugaacaugagauug

SEQ ID NO: 861001 - RNA, 22 nt, Human
uuuccagagcaugucugcucag

SEQ ID NO: 861002 - RNA, 22 nt, Human
cuagaaaucucuguuuacauca

SEQ ID NO: 861003 - RNA, 22 nt, Human
auacuuucugaccaauuaauug

SEQ ID NO: 861004 - RNA, 22 nt, Human
ugaauaguccuuggaauaacug

SEQ ID NO: 861005 - RNA, 22 nt, Human
caugcuuuucaaucuaucuuaa

SEQ ID NO: 861006 - RNA, 22 nt, Human
auauacaggugguauguguaaa

SEQ ID NO: 861007 - RNA, 22 nt, Human
ucuucucucauguaggagggaa

SEQ ID NO: 861008 - RNA, 22 nt, Human
gcugcccauuccacuggauggu

SEQ ID NO: 861009 - RNA, 22 nt, Human
gggcagcucugcccaucagagg

SEQ ID NO: 861010 - RNA, 22 nt, Human
gaugaaaaucuugagaugucga

SEQ ID NO: 861011 - RNA, 22 nt, Human
uagggcagaguccaggaugggc

SEQ ID NO: 861012 - RNA, 22 nt, Human
aguggcagagugcacucaggca

SEQ ID NO: 861013 - RNA, 22 nt, Human
ggaggggaggauuaaugacaaa

SEQ ID NO: 861014 - RNA, 22 nt, Human
uucuucaaauagcagggaguca

SEQ ID NO: 861015 - RNA, 22 nt, Human
uuuaggcacagggaguugguuu

SEQ ID NO: 861016 - RNA, 22 nt, Human
agaggcagaaguguucaaaccc

SEQ ID NO: 861017 - RNA, 22 nt, Human
ucuucuucccaucccucaaaug

SEQ ID NO: 861018 - RNA, 22 nt, Human
gaaauauugggacucagagcuu

SEQ ID NO: 861019 - RNA, 22 nt, Human
aucuauacucagaguuaauauc

SEQ ID NO: 861020 - RNA, 22 nt, Human
caucagaagauggcucuggaaa

SEQ ID NO: 861021 - RNA, 22 nt, Human
uaagagaauguuguggcuaggu

SEQ ID NO: 861022 - RNA, 22 nt, Human
aaugucugcucuacucaggagg

SEQ ID NO: 861023 - RNA, 22 nt, Human
uucaacuaauguuuauuuuaug

SEQ ID NO: 861024 - RNA, 22 nt, Human
cuacagaaaccuuuuucauaca

SEQ ID NO: 861025 - RNA, 22 nt, Human
uuuagaaguucacacauuuaaa

SEQ ID NO: 861026 - RNA, 22 nt, Human
aaauuagucgguuuaggaauuu

SEQ ID NO: 861027 - RNA, 22 nt, Human
aaugguuuucuagaacaugaaa

SEQ ID NO: 861028 - RNA, 22 nt, Human
ugaggcaggaugcuugcacagg

SEQ ID NO: 861029 - RNA, 20 nt, Human
uucuucucuaguuaucuuca

SEQ ID NO: 861030 - RNA, 22 nt, Human
aggcaacuuuuggggaugaugg

SEQ ID NO: 861031 - RNA, 22 nt, Human
aaaguccuagcgauccacagaa

SEQ ID NO: 861032 - RNA, 22 nt, Human
ucaucucaaaacccaaggggca

SEQ ID NO: 861033 - RNA, 22 nt, Human
aauuauccuuaaugcaguaagc

SEQ ID NO: 861034 - RNA, 22 nt, Human
uucaaacaguguagaauauaug

SEQ ID NO: 861035 - RNA, 22 nt, Human
ugaguaauaaacugucuugcuc

SEQ ID NO: 861036 - RNA, 22 nt, Human
agauaaaaugguucaaaggcua

SEQ ID NO: 861037 - RNA, 22 nt, Human
agacaguguguguauauauggu

SEQ ID NO: 861038 - RNA, 22 nt, Human
auacaacagaaaaugauuauuc

SEQ ID NO: 861039 - RNA, 22 nt, Human
cuagccugggauuugaacuuau

SEQ ID NO: 861040 - RNA, 22 nt, Human
ucacauucucagcaucuauaca

SEQ ID NO: 861041 - RNA, 22 nt, Human
ucuuagcacagcuauauaaguu

SEQ ID NO: 861042 - RNA, 22 nt, Human
aaucuguucuacucuauucaga

SEQ ID NO: 861043 - RNA, 22 nt, Human
cagcagagggagccauugaaau

SEQ ID NO: 861044 - RNA, 22 nt, Human
acaucucaugaaugauaaauca

SEQ ID NO: 861045 - RNA, 22 nt, Human
uucacagaugccugaugugugg

SEQ ID NO: 861046 - RNA, 22 nt, Human
gcguuaauaacauuaauaaugc

SEQ ID NO: 861047 - RNA, 22 nt, Human
gaauuucaaaagccagaacggg

SEQ ID NO: 861048 - RNA, 22 nt, Human
gaaauauacauugcaggaagag

SEQ ID NO: 861049 - RNA, 22 nt, Human
cugcuguguugccagugucacc

SEQ ID NO: 861050 - RNA, 22 nt, Human
ugcccaggcuggaaugcagugg

SEQ ID NO: 861051 - RNA, 22 nt, Human
gaguucuaaaggcagaacauaa

SEQ ID NO: 861052 - RNA, 22 nt, Human
cugcccaggcugaaggaacauc

SEQ ID NO: 861053 - RNA, 22 nt, Human
ugcuuuaacauaagauaucuuu

SEQ ID NO: 861054 - RNA, 22 nt, Human
auccuuaguuaagaacaggagu

SEQ ID NO: 861055 - RNA, 22 nt, Human
auuauccucagaaaacauguga

SEQ ID NO: 861056 - RNA, 23 nt, Human
cagcccuuccugcauguuuuugu

SEQ ID NO: 861057 - RNA, 22 nt, Human
agucaccauuuucaccugccuc

SEQ ID NO: 861058 - RNA, 19 nt, Human
ggcagcuggacgcuguuca

SEQ ID NO: 861059 - RNA, 22 nt, Human
gaggccaggaagcccaagauca

SEQ ID NO: 861060 - RNA, 18 nt, Human
cauuguacaaugcuuuau

SEQ ID NO: 861061 - RNA, 22 nt, Human
ugaggcagccugcauuaaagag

SEQ ID NO: 861062 - RNA, 22 nt, Human
gaguccuucuggcuggcaggau

SEQ ID NO: 861063 - RNA, 22 nt, Human
gucacuguuuccuauuauauuu

SEQ ID NO: 861064 - RNA, 17 nt, Human
cccacggaggugugaaa

SEQ ID NO: 861065 - RNA, 22 nt, Human
ugaggcaguauucuccauucca

SEQ ID NO: 861066 - RNA, 22 nt, Human
uccaggaguuugaccugugggc

SEQ ID NO: 861067 - RNA, 22 nt, Human
caauuucaugccauguauugcu

SEQ ID NO: 861068 - RNA, 22 nt, Human
aaaggccacuugaaggauuuuu

SEQ ID NO: 861069 - RNA, 22 nt, Human
uuuggaauuggaaagugcugug

SEQ ID NO: 861070 - RNA, 22 nt, Human
ggcauuuagagggcuuuucuga

SEQ ID NO: 861071 - RNA, 22 nt, Human
uacuauaccauguaagauauga

SEQ ID NO: 861072 - RNA, 22 nt, Human
auccuuagaagggagugaggac

SEQ ID NO: 861073 - RNA, 22 nt, Human
uacuagaaccucacaacaaucc

SEQ ID NO: 861074 - RNA, 22 nt, Human
gaauuucaacaguccucaaaug

SEQ ID NO: 861075 - RNA, 20 nt, Human
agauuauuccuaagauuucu

SEQ ID NO: 861076 - RNA, 21 nt, Human
acagcauguuuguguguuugc

SEQ ID NO: 861077 - RNA, 22 nt, Human
uaagaacuucggacauguuauc

SEQ ID NO: 861078 - RNA, 19 nt, Human
gcuuuggagggagguucua

SEQ ID NO: 861079 - RNA, 22 nt, Human
caguaaauacauaucagagaag

SEQ ID NO: 861080 - RNA, 22 nt, Human
aaucaagucaaccaucaugugc

SEQ ID NO: 861081 - RNA, 22 nt, Human
gcccaggaagugacucagaugu

SEQ ID NO: 861082 - RNA, 22 nt, Human
ucacagaagaugcuggauguug

SEQ ID NO: 861083 - RNA, 22 nt, Human
cugcuguguaucauuuuagaug

SEQ ID NO: 861084 - RNA, 22 nt, Human
uggaaggaaagguagcagagaa

SEQ ID NO: 861085 - RNA, 22 nt, Human
uccaggaguccuggguggcccc

SEQ ID NO: 861086 - RNA, 22 nt, Human
auacuaaaguauagaacuuagu

SEQ ID NO: 861087 - RNA, 22 nt, Human
uagugcuuuaaguuuacagaga

SEQ ID NO: 861088 - RNA, 22 nt, Human
aaagaaucuauauaucaccacc

SEQ ID NO: 861089 - RNA, 21 nt, Human
caaguccuuugccaaagugcu

SEQ ID NO: 861090 - RNA, 22 nt, Human
auagcuuucuuaaauauauaaa

SEQ ID NO: 861091 - RNA, 22 nt, Human
agggcagccucucagccuaggu

SEQ ID NO: 861092 - RNA, 22 nt, Human
agaucuauuagcaaacugccau

SEQ ID NO: 861093 - RNA, 22 nt, Human
cagauaaaggcuuacuaguagu

SEQ ID NO: 861094 - RNA, 22 nt, Human
ccuucauugcaucuuuaagaga

SEQ ID NO: 861095 - RNA, 22 nt, Human
gcagcugagagaagaacagggc

SEQ ID NO: 861096 - RNA, 22 nt, Human
cccaugagguggagguugcagu

SEQ ID NO: 861097 - RNA, 22 nt, Human
uuagagucaaaauggcauguua

SEQ ID NO: 861098 - RNA, 22 nt, Human
gggagcugaauggcaauggaga

SEQ ID NO: 861099 - RNA, 22 nt, Human
gcucaggagcucuugguggcgc

SEQ ID NO: 861100 - RNA, 22 nt, Human
auuugcuuaucuccacaguugu

SEQ ID NO: 861101 - RNA, 22 nt, Human
acccaggacaugggcacccgug

SEQ ID NO: 861102 - RNA, 22 nt, Human
aguuuucacacucaccaaaagg

SEQ ID NO: 861103 - RNA, 22 nt, Human
uuaaagauucugaggcugauua

SEQ ID NO: 861104 - RNA, 22 nt, Human
cccaggcagugugugcaugcgu

SEQ ID NO: 861105 - RNA, 22 nt, Human
caucagaauguuauggggggcu

SEQ ID NO: 861106 - RNA, 22 nt, Human
ucucuucuauuugagacuauuu

SEQ ID NO: 861107 - RNA, 22 nt, Human
caauuucacuaauaauauuuac

SEQ ID NO: 861108 - RNA, 22 nt, Human
gcugcccaggguggagccggcu

SEQ ID NO: 861109 - RNA, 23 nt, Human
uccuuccuuugagaggcuccauc

SEQ ID NO: 861110 - RNA, 22 nt, Human
uuccaagagcuuuaauuguuga

SEQ ID NO: 861111 - RNA, 22 nt, Human
agcccagggaaccaggaagugg

SEQ ID NO: 861112 - RNA, 21 nt, Human
uuucacaaaaguaugugacaa

SEQ ID NO: 861113 - RNA, 22 nt, Human
uagaugcuacaauuuuguacuc

SEQ ID NO: 861114 - RNA, 22 nt, Human
agaccauggccauccuaggaaa

SEQ ID NO: 861115 - RNA, 22 nt, Human
ccagaggaggggggucuuucug

SEQ ID NO: 861116 - RNA, 22 nt, Human
uacccaggagaaacagcagggc

SEQ ID NO: 861117 - RNA, 22 nt, Human
cccaggagaccugugaaaggac

SEQ ID NO: 861118 - RNA, 22 nt, Human
gcagaauuuucuguuuucuaga

SEQ ID NO: 861119 - RNA, 21 nt, Human
uguaaguuucaucugaauugg

SEQ ID NO: 861120 - RNA, 22 nt, Human
ucagaaauagucuuuaaaauga

SEQ ID NO: 861121 - RNA, 22 nt, Human
cagaggauucccuagugaccug

SEQ ID NO: 861122 - RNA, 22 nt, Human
acucaggaauggggcugggacu

SEQ ID NO: 861123 - RNA, 21 nt, Human
ggcagccugacccccagagag

SEQ ID NO: 861124 - RNA, 22 nt, Human
ucugcuguauuagguugaacug

SEQ ID NO: 861125 - RNA, 22 nt, Human
aaauauagugacacuuauaguc

SEQ ID NO: 861126 - RNA, 22 nt, Human
ucacacagguuugcaaugauuu

SEQ ID NO: 861127 - RNA, 23 nt, Human
uuuauccaacucuguaaucucuc

SEQ ID NO: 861128 - RNA, 22 nt, Human
ggacuucuaagugccagacacu

SEQ ID NO: 861129 - RNA, 22 nt, Human
ccauggcuuucuuucauuguaa

SEQ ID NO: 861130 - RNA, 22 nt, Human
uauggcuuuaaacaacuuaggu

SEQ ID NO: 861131 - RNA, 22 nt, Human
agcccaggucucaaaguacagg

SEQ ID NO: 861132 - RNA, 22 nt, Human
uagcucuucauuucaucugauu

SEQ ID NO: 861133 - RNA, 22 nt, Human
uucuuucucaacaugaauguuu

SEQ ID NO: 861134 - RNA, 22 nt, Human
uuuggaauuggcauucuauucu

SEQ ID NO: 861135 - RNA, 22 nt, Human
ugaaacaaugugaaguugcuga

SEQ ID NO: 861136 - RNA, 22 nt, Human
cuucuucaaccugaaaguuuca

SEQ ID NO: 861137 - RNA, 23 nt, Human
uuccagaguccacaucugccacc

SEQ ID NO: 861138 - RNA, 22 nt, Human
uuggaucacucugaagccuuac

SEQ ID NO: 861139 - RNA, 23 nt, Human
acagacaacacugaugagagaaa

SEQ ID NO: 861140 - RNA, 22 nt, Human
aguuugaaauguuggcaauauu

SEQ ID NO: 861141 - RNA, 22 nt, Human
uggauuuaguucuucacaggcc

SEQ ID NO: 861142 - RNA, 22 nt, Human
ucccaggaaggauucggcauuu

SEQ ID NO: 861143 - RNA, 22 nt, Human
aauacauauggaauuccauguu

SEQ ID NO: 861144 - RNA, 22 nt, Human
accauccugaaaccuucaugcu

SEQ ID NO: 861145 - RNA, 22 nt, Human
auacagaacaagccucaccucc

SEQ ID NO: 861146 - RNA, 22 nt, Human
augaguucaauuguuucaguca

SEQ ID NO: 861147 - RNA, 22 nt, Human
ucaaaauuuuauuucucaagga

SEQ ID NO: 861148 - RNA, 22 nt, Human
uggcagcugcguuguguuucug

SEQ ID NO: 861149 - RNA, 23 nt, Human
uacaugcuauaauuucacccuca

SEQ ID NO: 861150 - RNA, 22 nt, Human
gaggagagaagcuaacggugcu

SEQ ID NO: 861151 - RNA, 18 nt, Human
uggcagcuagguaaagaa

SEQ ID NO: 861152 - RNA, 22 nt, Human
aguaaaauuguauuggaaaaca

SEQ ID NO: 861153 - RNA, 22 nt, Human
uugaagaggacuuugcagcugu

SEQ ID NO: 861154 - RNA, 22 nt, Human
uuucaucuucccagagaccuug

SEQ ID NO: 861155 - RNA, 22 nt, Human
ggacaagccugugaguggguuu

SEQ ID NO: 861156 - RNA, 22 nt, Human
agagggcaaguguaguccagua

SEQ ID NO: 861157 - RNA, 22 nt, Human
uuuauacauggagaauuuuugc

SEQ ID NO: 861158 - RNA, 17 nt, Human
cccaugagcccacuccc

SEQ ID NO: 861159 - RNA, 22 nt, Human
gccccagcguggcuguguuagg

SEQ ID NO: 861160 - RNA, 22 nt, Human
cggagaggaccugcaacucgcu

SEQ ID NO: 861161 - RNA, 22 nt, Human
ucugggaagcugcgugccuguu

SEQ ID NO: 861162 - RNA, 20 nt, Human
cauuuguuagcuuucuacug

SEQ ID NO: 861163 - RNA, 22 nt, Human
ggaucugagagcaagcaggacc

SEQ ID NO: 861164 - RNA, 22 nt, Human
uuuggacuuagccugcagaauu

SEQ ID NO: 861165 - RNA, 22 nt, Human
guccaugauucuguguaguaga

SEQ ID NO: 861166 - RNA, 21 nt, Human
aaaggccauaaucacggagca

SEQ ID NO: 861167 - RNA, 22 nt, Human
cuuaaagaaauugaggagagga

SEQ ID NO: 861168 - RNA, 22 nt, Human
ccagcuauugcuguguaacagu

SEQ ID NO: 861169 - RNA, 22 nt, Human
uauaauuaguaaauggcagauu

SEQ ID NO: 861170 - RNA, 22 nt, Human
uuucacaacugcuuauuugaga

SEQ ID NO: 861171 - RNA, 22 nt, Human
guggaaugaauagauuugcauu

SEQ ID NO: 861172 - RNA, 22 nt, Human
uugaaaguccuucuugaguuac

SEQ ID NO: 861173 - RNA, 22 nt, Human
gaggggcagagguagagaacaa

SEQ ID NO: 861174 - RNA, 22 nt, Human
ggaagaggcugaggccaugcug

SEQ ID NO: 861175 - RNA, 22 nt, Human
aucacuguguauguauaugcag

SEQ ID NO: 861176 - RNA, 22 nt, Human
cuggcugugcagucuuccagaa

SEQ ID NO: 861177 - RNA, 22 nt, Human
caucagaaaccuugaggaaacu

SEQ ID NO: 861178 - RNA, 22 nt, Human
cucacugugccuuuucccaaac

SEQ ID NO: 861179 - RNA, 21 nt, Human
ggcagccucuguggaagggga

SEQ ID NO: 861180 - RNA, 22 nt, Human
ucaggagacuggcagugcccac

SEQ ID NO: 861181 - RNA, 22 nt, Human
agggcagcagcuccuccuagcu

SEQ ID NO: 861182 - RNA, 22 nt, Human
auuuugaugcuaucuaaugaau

SEQ ID NO: 861183 - RNA, 22 nt, Human
guacagaaggagcuuuggauuc

SEQ ID NO: 861184 - RNA, 22 nt, Human
gaggcugauucggggaacagca

SEQ ID NO: 861185 - RNA, 22 nt, Human
aaauggauggaaagcaauuuuu

SEQ ID NO: 861186 - RNA, 22 nt, Human
ucacacauucuagguauguuga

SEQ ID NO: 861187 - RNA, 22 nt, Human
acccaggauaaucuguguaucu

SEQ ID NO: 861188 - RNA, 22 nt, Human
gugguuuucuccaacccagaac

SEQ ID NO: 861189 - RNA, 22 nt, Human
cucuggcuucuaccuugcaguu

SEQ ID NO: 861190 - RNA, 22 nt, Human
aaggcagcucagcucauggcag

SEQ ID NO: 861191 - RNA, 22 nt, Human
guucuucaucauuaacacucug

SEQ ID NO: 861192 - RNA, 22 nt, Human
gaccauuuguugaaaagauuau

SEQ ID NO: 861193 - RNA, 19 nt, Human
ugcauaaauuauauacuuu

SEQ ID NO: 861194 - RNA, 22 nt, Human
auauauuugagaauauucauga

SEQ ID NO: 861195 - RNA, 18 nt, Human
uugcuuuguaagcuugca

SEQ ID NO: 861196 - RNA, 22 nt, Human
ggcuuggaaauugcaggacaca

SEQ ID NO: 861197 - RNA, 23 nt, Human
uugcauagacauccucauagauu

SEQ ID NO: 861198 - RNA, 22 nt, Human
uuucaaguguccugauuaaugg

SEQ ID NO: 861199 - RNA, 19 nt, Human
gagcgcagagggcagggga

SEQ ID NO: 861200 - RNA, 22 nt, Human
ggcuuggaaaugguaaugagcu

SEQ ID NO: 861201 - RNA, 22 nt, Human
gcagcuucaguaggugaagaca

SEQ ID NO: 861202 - RNA, 22 nt, Human
caucagaaggaaggacgauuau

SEQ ID NO: 861203 - RNA, 22 nt, Human
ccccaggaagccucagauuugc

SEQ ID NO: 861204 - RNA, 21 nt, Human
uuacagaauccaugggaaguc

SEQ ID NO: 861205 - RNA, 22 nt, Human
aauuucaagucuugaagaagua

SEQ ID NO: 861206 - RNA, 22 nt, Human
caaagucauggggaugcagguc

SEQ ID NO: 861207 - RNA, 22 nt, Human
aggcagcuggaggcagagacua

SEQ ID NO: 861208 - RNA, 22 nt, Human
aaggcagcacagcaacugcuca

SEQ ID NO: 861209 - RNA, 22 nt, Human
guuaauauuuaccugucaagaa

SEQ ID NO: 861210 - RNA, 22 nt, Human
gcccaggagaggccagggcuga

SEQ ID NO: 861211 - RNA, 22 nt, Human
uuuacagaugaggaaacugaga

SEQ ID NO: 861212 - RNA, 22 nt, Human
auugaaagcauggauuuggauu

SEQ ID NO: 861213 - RNA, 22 nt, Human
uaauuucaaauuucuuagcgug

SEQ ID NO: 861214 - RNA, 22 nt, Human
ccaggagagcucucguucagug

SEQ ID NO: 861215 - RNA, 22 nt, Human
aaggcagcagaggaaaggugcu

SEQ ID NO: 861216 - RNA, 22 nt, Human
cauuuuaagaugaccugguuuc

SEQ ID NO: 861217 - RNA, 22 nt, Human
cccaggagguggagguugcagc

SEQ ID NO: 861218 - RNA, 22 nt, Human
ucaggagagaguuggguaggcu

SEQ ID NO: 861219 - RNA, 22 nt, Human
cagcuuucaucagugacacuca

SEQ ID NO: 861220 - RNA, 22 nt, Human
gaaauuauugcuagagacugca

SEQ ID NO: 861221 - RNA, 22 nt, Human
uacugccuggagcauuggugcu

SEQ ID NO: 861222 - RNA, 22 nt, Human
caguaucugucaguaaucaggu

SEQ ID NO: 861223 - RNA, 22 nt, Human
augaggcaguacacacaaagcc

SEQ ID NO: 861224 - RNA, 22 nt, Human
auuuccauagagcgucucacag

SEQ ID NO: 861225 - RNA, 22 nt, Human
cucaggauucucgacacucaca

SEQ ID NO: 861226 - RNA, 20 nt, Human
cagaggcauuuucagacucu

SEQ ID NO: 861227 - RNA, 22 nt, Human
augcaucuauucccaagggcag

SEQ ID NO: 861228 - RNA, 22 nt, Human
aauguaaacagcaagagaaggg

SEQ ID NO: 861229 - RNA, 22 nt, Human
agggaagcccuggcugagaccc

SEQ ID NO: 861230 - RNA, 18 nt, Human
aaacuggcuuggccugug

SEQ ID NO: 861231 - RNA, 22 nt, Human
uuuugaauaauucagaaacagc

SEQ ID NO: 861232 - RNA, 22 nt, Human
aaauauaauuucugccucaaua

SEQ ID NO: 861233 - RNA, 22 nt, Human
cccaggaaccuaccagcucgag

SEQ ID NO: 861234 - RNA, 22 nt, Human
acacauuucuaaauuuuuaccg

SEQ ID NO: 861235 - RNA, 22 nt, Human
gaugauaacagcauuucaacug

SEQ ID NO: 861236 - RNA, 19 nt, Human
aggcagcaggccagggaug

SEQ ID NO: 861237 - RNA, 22 nt, Human
uuacagaaucuacucgugguga

SEQ ID NO: 861238 - RNA, 22 nt, Human
cuucucaguugcaagugucaga

SEQ ID NO: 861239 - RNA, 19 nt, Human
ugcugaaguugucagucug

SEQ ID NO: 861240 - RNA, 22 nt, Human
cugcauuagucaugcuuugcag

SEQ ID NO: 861241 - RNA, 22 nt, Human
caauacuuccuuguuagaggca

SEQ ID NO: 861242 - RNA, 23 nt, Human
ugaguucucaucuuggcuucuau

SEQ ID NO: 861243 - RNA, 22 nt, Human
caguuucuacgaaggucaaccc

SEQ ID NO: 861244 - RNA, 22 nt, Human
uugaaaguagcagcugcauaug

SEQ ID NO: 861245 - RNA, 19 nt, Human
uauggcaggccgaggcacu

SEQ ID NO: 861246 - RNA, 22 nt, Human
gggcagcucucacagcagccaa

SEQ ID NO: 861247 - RNA, 22 nt, Human
uauuuucuggacagucuugcuu

SEQ ID NO: 861248 - RNA, 22 nt, Human
cauuuguuaaccaguguggauu

SEQ ID NO: 861249 - RNA, 22 nt, Human
gaggaggcacuugagcagaugu

SEQ ID NO: 861250 - RNA, 22 nt, Human
acauaauaccuaggacaguuug

SEQ ID NO: 861251 - RNA, 22 nt, Human
ggcagaagauaggacagggaau

SEQ ID NO: 861252 - RNA, 17 nt, Human
caagagagaugacugga

SEQ ID NO: 861253 - RNA, 22 nt, Human
gucaggauuuuaaaaucccagu

SEQ ID NO: 861254 - RNA, 22 nt, Human
agcacauucugccuugcuuugc

SEQ ID NO: 861255 - RNA, 22 nt, Human
augaaauauuucagagcagagu

SEQ ID NO: 861256 - RNA, 22 nt, Human
auccaugauuaguaggauaaag

SEQ ID NO: 861257 - RNA, 22 nt, Human
aaaggaagauugagcuuuucca

SEQ ID NO: 861258 - RNA, 22 nt, Human
uggcagucuggguuggcaguua

SEQ ID NO: 861259 - RNA, 22 nt, Human
uuggaauucaaguuguagcuua

SEQ ID NO: 861260 - RNA, 22 nt, Human
aggcaagcauuuaaccacucau

SEQ ID NO: 861261 - RNA, 22 nt, Human
acuuugaaggggaacauuuuaa

SEQ ID NO: 861262 - RNA, 22 nt, Human
ugaaaugaaacagaacauauca

SEQ ID NO: 861263 - RNA, 22 nt, Human
auccaugaagguacuucucagg

SEQ ID NO: 861264 - RNA, 23 nt, Human
uggaaagcggaccuggggcagag

SEQ ID NO: 861265 - RNA, 22 nt, Human
gcccaggaucugcucagaucau

SEQ ID NO: 861266 - RNA, 20 nt, Human
gcccaggaucucugaggcau

SEQ ID NO: 861267 - RNA, 22 nt, Human
uagcacaucuucuuggccugca

SEQ ID NO: 861268 - RNA, 22 nt, Human
uuuccaaagcugaguugagcaa

SEQ ID NO: 861269 - RNA, 19 nt, Human
uggcagggagaguuugaag

SEQ ID NO: 861270 - RNA, 22 nt, Human
ucaguaaaugguugcuguuauu

SEQ ID NO: 861271 - RNA, 22 nt, Human
cugcuuugacuguuaagaacca

SEQ ID NO: 861272 - RNA, 22 nt, Human
aguggcaguagaugagcugguu

SEQ ID NO: 861273 - RNA, 22 nt, Human
ccaggagagcauugcacagagg

SEQ ID NO: 861274 - RNA, 22 nt, Human
aguccuuaugugguggagagag

SEQ ID NO: 861275 - RNA, 22 nt, Human
uucugugaaucuuuuuucccac

SEQ ID NO: 861276 - RNA, 22 nt, Human
uauuucuaagagauaucuguac

SEQ ID NO: 861277 - RNA, 22 nt, Human
gcugcccacaaugauuacaugg

SEQ ID NO: 861278 - RNA, 22 nt, Human
uuucccaguucccugcucuaua

SEQ ID NO: 861279 - RNA, 22 nt, Human
uggcagcugucagaaugcaaau

SEQ ID NO: 861280 - RNA, 22 nt, Human
ucaggagacaaagggugcggag

SEQ ID NO: 861281 - RNA, 23 nt, Human
augaaugaauaaggcaggaaagc

SEQ ID NO: 861282 - RNA, 22 nt, Human
cugcuuugauuagaagaguaca

SEQ ID NO: 861283 - RNA, 22 nt, Human
aaguaaaauguuuccuuuauua

SEQ ID NO: 861284 - RNA, 22 nt, Human
auucuucaccugagucagucua

SEQ ID NO: 861285 - RNA, 22 nt, Human
agagcagcugugacauggacag

SEQ ID NO: 861286 - RNA, 22 nt, Human
aaagcagaacugagagagcugg

SEQ ID NO: 861287 - RNA, 22 nt, Human
auguuucaccagcaaauuaccu

SEQ ID NO: 861288 - RNA, 20 nt, Human
cuguggaauuuuaccaugcg

SEQ ID NO: 861289 - RNA, 22 nt, Human
uagaauaaguugaugauauaug

SEQ ID NO: 861290 - RNA, 17 nt, Human
guccuacccauggucua

SEQ ID NO: 861291 - RNA, 22 nt, Human
aaggcaguaaaaucuaccuugc

SEQ ID NO: 861292 - RNA, 19 nt, Human
guuaggcaggguggggagu

SEQ ID NO: 861293 - RNA, 22 nt, Human
uauuuccaaaagccuauuauga

SEQ ID NO: 861294 - RNA, 22 nt, Human
uucacagaauggcaaguuaugg

SEQ ID NO: 861295 - RNA, 22 nt, Human
cagaucuguuugccagaucagc

SEQ ID NO: 861296 - RNA, 22 nt, Human
aaggcaguuaauuuggcuagaa

SEQ ID NO: 861297 - RNA, 22 nt, Human
uacuaaauaguuuaauuccuca

SEQ ID NO: 861298 - RNA, 22 nt, Human
caucucaugggcaugccaagcu

SEQ ID NO: 861299 - RNA, 22 nt, Human
caaauucaaauuucaucagugu

SEQ ID NO: 861300 - RNA, 23 nt, Human
acugucugauauguuuuccauca

SEQ ID NO: 861301 - RNA, 22 nt, Human
cuguggaaggccuguccugaaa

SEQ ID NO: 861302 - RNA, 22 nt, Human
uguauacaauucacacuuccca

SEQ ID NO: 861303 - RNA, 22 nt, Human
cuugcugucuugcauuuagagc

SEQ ID NO: 861304 - RNA, 22 nt, Human
ucccaggaaugucugaaaguga

SEQ ID NO: 861305 - RNA, 22 nt, Human
agauggagaccuuggaugaacu

SEQ ID NO: 861306 - RNA, 22 nt, Human
uucauucugcaguucucagcuc

SEQ ID NO: 861307 - RNA, 22 nt, Human
cuguuaaucugcuugcaugaug

SEQ ID NO: 861308 - RNA, 22 nt, Human
augcugugccuucucugugcca

SEQ ID NO: 861309 - RNA, 22 nt, Human
ucuaaacagccucuuaccaacu

SEQ ID NO: 861310 - RNA, 22 nt, Human
uuucacaaaugucuuuaacuug

SEQ ID NO: 861311 - RNA, 22 nt, Human
acuggcaggcugcuggccggcg

SEQ ID NO: 861312 - RNA, 22 nt, Human
guccaaauuuuucacauguaga

SEQ ID NO: 861313 - RNA, 23 nt, Human
agaggggagcaucugcuggcuga

SEQ ID NO: 861314 - RNA, 22 nt, Human
uugcucagcacuggagccagcu

SEQ ID NO: 861315 - RNA, 23 nt, Human
uuucaacuccugccauuauuucu

SEQ ID NO: 861316 - RNA, 22 nt, Human
agucccuguacuuuccacugcc

SEQ ID NO: 861317 - RNA, 20 nt, Human
ugaaggccagcagcauaggg

SEQ ID NO: 861318 - RNA, 22 nt, Human
aggcugcucaguagauggagcu

SEQ ID NO: 861319 - RNA, 22 nt, Human
aaaauuauucauggcuuuugga

SEQ ID NO: 861320 - RNA, 22 nt, Human
cucaggauuuacuaauuucaag

SEQ ID NO: 861321 - RNA, 22 nt, Human
aaggcagccucugccagccggg

SEQ ID NO: 861322 - RNA, 19 nt, Human
ugaggggaggagaggccug

SEQ ID NO: 861323 - RNA, 22 nt, Human
cguauacaugaagacauugcug

SEQ ID NO: 861324 - RNA, 22 nt, Human
gcaggcuccaaggccugggaga

SEQ ID NO: 861325 - RNA, 17 nt, Human
uuucaucugggaccacc

SEQ ID NO: 861326 - RNA, 22 nt, Human
ugcuuuaaccaucuuguuugga

SEQ ID NO: 861327 - RNA, 22 nt, Human
uuuccuaggagauugaucacau

SEQ ID NO: 861328 - RNA, 22 nt, Human
uuauuauuccccaagucauuau

SEQ ID NO: 861329 - RNA, 19 nt, Human
uggcauuuggaggcaaccu

SEQ ID NO: 861330 - RNA, 22 nt, Human
caauuuuuguacuuauaguacu

SEQ ID NO: 861331 - RNA, 22 nt, Human
acagaacugggggcacagauag

SEQ ID NO: 861332 - RNA, 22 nt, Human
cuggacucugcagagaaaagua

SEQ ID NO: 861333 - RNA, 22 nt, Human
uuccauaauaggcuuaagugaa

SEQ ID NO: 861334 - RNA, 22 nt, Human
uuccuuaguguuagauucugug

SEQ ID NO: 861335 - RNA, 17 nt, Human
aggccagaugaggcaag

SEQ ID NO: 861336 - RNA, 22 nt, Human
ugauuuccuaggucuggagaag

SEQ ID NO: 861337 - RNA, 22 nt, Human
ucagauggguuuugaaggaugu

SEQ ID NO: 861338 - RNA, 22 nt, Human
gacccaggagugcagagagugg

SEQ ID NO: 861339 - RNA, 22 nt, Human
caguccuuucugaaauccuaua

SEQ ID NO: 861340 - RNA, 22 nt, Human
gccuaauaacuagcuguguaac

SEQ ID NO: 861341 - RNA, 22 nt, Human
auuuagccucauuuuugacaua

SEQ ID NO: 861342 - RNA, 22 nt, Human
aggcagaggagaaugaucuucc

SEQ ID NO: 861343 - RNA, 22 nt, Human
cucuaauccuuugucccugggu

SEQ ID NO: 861344 - RNA, 22 nt, Human
cucaggaugucggugacuauug

SEQ ID NO: 861345 - RNA, 22 nt, Human
auugaaagagaauguagcucuu

SEQ ID NO: 861346 - RNA, 22 nt, Human
ggcuuggaccagucacaguggu

SEQ ID NO: 861347 - RNA, 23 nt, Human
ucuugaaaagccuacagcaguuc

SEQ ID NO: 861348 - RNA, 22 nt, Human
uuuaaaaucagaugggaguugg

SEQ ID NO: 861349 - RNA, 22 nt, Human
uuuugcuugagugcacaaaaug

SEQ ID NO: 861350 - RNA, 22 nt, Human
agcaccugucacaagcagaagg

SEQ ID NO: 861351 - RNA, 22 nt, Human
uacaguaagaugaaauagcaau

SEQ ID NO: 861352 - RNA, 22 nt, Human
uggcagcuggagggcaauggcc

SEQ ID NO: 861353 - RNA, 22 nt, Human
uggcagcagccauggaaggccc

SEQ ID NO: 861354 - RNA, 22 nt, Human
aaauaguucagcuuguaaaccc

SEQ ID NO: 861355 - RNA, 23 nt, Human
ucucaagaggaagcagggcucau

SEQ ID NO: 861356 - RNA, 22 nt, Human
uuucacaucagagguagauuag

SEQ ID NO: 861357 - RNA, 22 nt, Human
acuuuagaccaucuuccacagu

SEQ ID NO: 861358 - RNA, 21 nt, Human
gauuugcagaaacuagacagg

SEQ ID NO: 861359 - RNA, 22 nt, Human
gaggccuggagccgccuaggcg

SEQ ID NO: 861360 - RNA, 22 nt, Human
auugaaagauuuugggcucaug

SEQ ID NO: 861361 - RNA, 22 nt, Human
aguucucagcuuaguaugcugu

SEQ ID NO: 861362 - RNA, 22 nt, Human
guagaaauuccauuuacuuuga

SEQ ID NO: 861363 - RNA, 22 nt, Human
gccaggagaaugcuagcagagg

SEQ ID NO: 861364 - RNA, 22 nt, Human
acuauacaagauuagggauuug

SEQ ID NO: 861365 - RNA, 22 nt, Human
ccacugaggcaggcaguaucua

SEQ ID NO: 861366 - RNA, 21 nt, Human
ucuauucauuacaguuauuug

SEQ ID NO: 861367 - RNA, 22 nt, Human
uugguacaaaaguaacuguggu

SEQ ID NO: 861368 - RNA, 20 nt, Human
uuucugugagaaacacuguu

SEQ ID NO: 861369 - RNA, 22 nt, Human
ucacuucacacccacuaucaug

SEQ ID NO: 861370 - RNA, 22 nt, Human
accgaaggaaacuggaaccguu

SEQ ID NO: 861371 - RNA, 22 nt, Human
aacugcuguggccuaguacuua

SEQ ID NO: 861372 - RNA, 22 nt, Human
gaucauuuugaugcccuuuuag

SEQ ID NO: 861373 - RNA, 22 nt, Human
ggaggaugccaagcugugcaca

SEQ ID NO: 861374 - RNA, 22 nt, Human
aggguggcaccuggaagggaug

SEQ ID NO: 861375 - RNA, 20 nt, Human
uucacagaggacucagguca

SEQ ID NO: 861376 - RNA, 22 nt, Human
gguuauauaauucagugcuuuc

SEQ ID NO: 861377 - RNA, 22 nt, Human
cuccaggaaaauagggaaugag

SEQ ID NO: 861378 - RNA, 22 nt, Human
caguccagcccccugcuaaaag

SEQ ID NO: 861379 - RNA, 22 nt, Human
ugccauuuugagauguuaauga

SEQ ID NO: 861380 - RNA, 22 nt, Human
cagcugacccagugaggaggca

SEQ ID NO: 861381 - RNA, 22 nt, Human
cugccaggcagggagauggcug

SEQ ID NO: 861382 - RNA, 22 nt, Human
cccaggagacugagcuguaacc

SEQ ID NO: 861383 - RNA, 22 nt, Human
auuguuaugaaaauaagauguu

SEQ ID NO: 861384 - RNA, 22 nt, Human
gucuucuguaagaugagguccc

SEQ ID NO: 861385 - RNA, 22 nt, Human
cucaggaaaggccaugcaaggg

SEQ ID NO: 861386 - RNA, 22 nt, Human
acacaauacagggcucaaaaua

SEQ ID NO: 861387 - RNA, 22 nt, Human
cucugcaugccuugcucagaca

SEQ ID NO: 861388 - RNA, 22 nt, Human
caaggccaaagggccacuguca

SEQ ID NO: 861389 - RNA, 22 nt, Human
cagagauuauuauaacuaauua

SEQ ID NO: 861390 - RNA, 21 nt, Human
ggcagcguguggacaggaagg

SEQ ID NO: 861391 - RNA, 22 nt, Human
uuugaaaggugucgagaugugu

SEQ ID NO: 861392 - RNA, 22 nt, Human
cagcaggaggugaguagcaggu

SEQ ID NO: 861393 - RNA, 22 nt, Human
aacacuuucuauuauuaugguu

SEQ ID NO: 861394 - RNA, 22 nt, Human
auuuaucucuggaaacuaagca

SEQ ID NO: 861395 - RNA, 21 nt, Human
aaagaaucauggguaauuuca

SEQ ID NO: 861396 - RNA, 22 nt, Human
auaaagucuaccguauuaaaga

SEQ ID NO: 861397 - RNA, 22 nt, Human
ggaggcugagaaguccaagauc

SEQ ID NO: 861398 - RNA, 22 nt, Human
gcaaacaagcugccugaagauu

SEQ ID NO: 861399 - RNA, 22 nt, Human
aggaaacuccccuacaucucaa

SEQ ID NO: 861400 - RNA, 22 nt, Human
aagauuauuuaagacaggaacc

SEQ ID NO: 861401 - RNA, 22 nt, Human
cagucucucagcuuucagcugu

SEQ ID NO: 861402 - RNA, 22 nt, Human
cagaaagcuuaggcaaguugga

SEQ ID NO: 861403 - RNA, 22 nt, Human
uggcagcuagauaguguguuua

SEQ ID NO: 861404 - RNA, 22 nt, Human
aaggcagccaugugcuuugggu

SEQ ID NO: 861405 - RNA, 22 nt, Human
cucaggaugaaagucaugguga

SEQ ID NO: 861406 - RNA, 22 nt, Human
ucucaggaaauaggauuugagu

SEQ ID NO: 861407 - RNA, 19 nt, Human
aaaauugcguauuuugagg

SEQ ID NO: 861408 - RNA, 22 nt, Human
uggcuuuagguugcauguuucu

SEQ ID NO: 861409 - RNA, 22 nt, Human
ggggggugcugaucaguggagc

SEQ ID NO: 861410 - RNA, 22 nt, Human
ugaaggccagcagagugaaggc

SEQ ID NO: 861411 - RNA, 22 nt, Human
agaaaugacaagacugaucagg

SEQ ID NO: 861412 - RNA, 23 nt, Human
auguuauuauuagcagucuugcc

SEQ ID NO: 861413 - RNA, 22 nt, Human
cuucuucacacuggucugaagc

SEQ ID NO: 861414 - RNA, 22 nt, Human
aucaggaugacuauaaggcugc

SEQ ID NO: 861415 - RNA, 22 nt, Human
aucacauuguuagcauagacug

SEQ ID NO: 861416 - RNA, 22 nt, Human
ucugcaggcucuagaugagguu

SEQ ID NO: 861417 - RNA, 22 nt, Human
ugaggcaggagaauggcgggaa

SEQ ID NO: 861418 - RNA, 22 nt, Human
cuaaagaagcuagcaaucuaua

SEQ ID NO: 861419 - RNA, 22 nt, Human
auucuucaccauggauaauuug

SEQ ID NO: 861420 - RNA, 22 nt, Human
gagaggugaaggcugcccuggg

SEQ ID NO: 861421 - RNA, 22 nt, Human
ggcagcuucuuaauauggagac

SEQ ID NO: 861422 - RNA, 22 nt, Human
gucaggaugacaagugcuuuca

SEQ ID NO: 861423 - RNA, 22 nt, Human
cuuugaagauggcaaauuuaga

SEQ ID NO: 861424 - RNA, 22 nt, Human
gauuucuugaccccugucucag

SEQ ID NO: 861425 - RNA, 22 nt, Human
cauuucaauuauuugcucuucu

SEQ ID NO: 861426 - RNA, 17 nt, Human
aagagaggcugagcugg

SEQ ID NO: 861427 - RNA, 22 nt, Human
acagaaugggauuugaauauuu

SEQ ID NO: 861428 - RNA, 22 nt, Human
ugauugaacugagcuucaagau

SEQ ID NO: 861429 - RNA, 22 nt, Human
uuuauccaaggguuuuaacugu

SEQ ID NO: 861430 - RNA, 22 nt, Human
uuccaugaaauguguuaugcuu

SEQ ID NO: 861431 - RNA, 21 nt, Human
uucuucaaagaagaaggcaca

SEQ ID NO: 861432 - RNA, 22 nt, Human
uuuuugcugauaagcagaauuc

SEQ ID NO: 861433 - RNA, 22 nt, Human
acuuauuagcugugugaccuug

SEQ ID NO: 861434 - RNA, 22 nt, Human
gcagaauucuacagaugauaaa

SEQ ID NO: 861435 - RNA, 22 nt, Human
aaaaauugcugagaacggaauu

SEQ ID NO: 861436 - RNA, 22 nt, Human
cagugauggauauggagaaguc

SEQ ID NO: 861437 - RNA, 22 nt, Human
agccuauuccaggaugagcuca

SEQ ID NO: 861438 - RNA, 22 nt, Human
cugcugugacagcugccguguu

SEQ ID NO: 861439 - RNA, 22 nt, Human
uggcagcugcaggccuccugag

SEQ ID NO: 861440 - RNA, 22 nt, Human
gaggcagcauucgcauagacag

SEQ ID NO: 861441 - RNA, 22 nt, Human
aaguuugcauagauuaagcauu

SEQ ID NO: 861442 - RNA, 22 nt, Human
uuuucaguuccaucucugcucu

SEQ ID NO: 861443 - RNA, 21 nt, Human
uggagacucugguucuuugug

SEQ ID NO: 861444 - RNA, 22 nt, Human
ugucaccagcugcuccucagga

SEQ ID NO: 861445 - RNA, 22 nt, Human
gaggaaccaaucugugauauuc

SEQ ID NO: 861446 - RNA, 22 nt, Human
caauuuuuuccaugcucuuaca

SEQ ID NO: 861447 - RNA, 22 nt, Human
ucaggagaaucagggcuguccu

SEQ ID NO: 861448 - RNA, 19 nt, Human
caggaaggggcgaaucugg

SEQ ID NO: 861449 - RNA, 22 nt, Human
auuuuacuuugugaauauugac

SEQ ID NO: 861450 - RNA, 22 nt, Human
gaacuguaguuaauacuacaca

SEQ ID NO: 861451 - RNA, 22 nt, Human
gauuuuauuagcccaaacuuug

SEQ ID NO: 861452 - RNA, 22 nt, Human
aggcaguuucugggacagcaua

SEQ ID NO: 861453 - RNA, 23 nt, Human
uuuuccagaaucgacucuguaga

SEQ ID NO: 861454 - RNA, 22 nt, Human
cagauauuaggagcucaauaau

SEQ ID NO: 861455 - RNA, 22 nt, Human
ccaugagcuuccuauauagggu

SEQ ID NO: 861456 - RNA, 22 nt, Human
cacaauuuguuuuaucaguauu

SEQ ID NO: 861457 - RNA, 22 nt, Human
aaauggaucuguggaauacauu

SEQ ID NO: 861458 - RNA, 21 nt, Human
uccaggaguucuaauaggugu

SEQ ID NO: 861459 - RNA, 22 nt, Human
cauuuguaucauauguaucuua

SEQ ID NO: 861460 - RNA, 22 nt, Human
uacaacauuguguugcuucaua

SEQ ID NO: 861461 - RNA, 22 nt, Human
gagccagcuauguagcaagagg

SEQ ID NO: 861462 - RNA, 22 nt, Human
aagucacccuagggccuggacu

SEQ ID NO: 861463 - RNA, 23 nt, Human
agaauuccaguuucuuaugucac

SEQ ID NO: 861464 - RNA, 22 nt, Human
agaccaagacuauaaugagagg

SEQ ID NO: 861465 - RNA, 22 nt, Human
ugucaccaugcgaggcuaauuu

SEQ ID NO: 861466 - RNA, 22 nt, Human
gguacaauucugggguaugcuc

SEQ ID NO: 861467 - RNA, 22 nt, Human
aggcagauuuaggagaaaagaa

SEQ ID NO: 861468 - RNA, 22 nt, Human
uuuaacagguaaaguaaaugug

SEQ ID NO: 861469 - RNA, 22 nt, Human
cauugcuguuaauugucucuag

SEQ ID NO: 861470 - RNA, 22 nt, Human
aauaauaagauacuaagggagu

SEQ ID NO: 861471 - RNA, 22 nt, Human
agugcuuugaacgaaaggcuga

SEQ ID NO: 861472 - RNA, 22 nt, Human
auuucagaugaccaaauggaaa

SEQ ID NO: 861473 - RNA, 22 nt, Human
caccagacagguguaugcauau

SEQ ID NO: 861474 - RNA, 22 nt, Human
ccucaugguacuuacuguagcu

SEQ ID NO: 861475 - RNA, 22 nt, Human
cauuuucagcacccaucugaaa

SEQ ID NO: 861476 - RNA, 21 nt, Human
gggcagcucuguuuuauuuuc

SEQ ID NO: 861477 - RNA, 22 nt, Human
gauggcuucacuuacauggcug

SEQ ID NO: 861478 - RNA, 22 nt, Human
uuuuagcacuaagugauaugcu

SEQ ID NO: 861479 - RNA, 22 nt, Human
cauuuguaguaucuguuuauau

SEQ ID NO: 861480 - RNA, 22 nt, Human
ggauggagguucucagaugcuc

SEQ ID NO: 861481 - RNA, 22 nt, Human
uaguccuuuccggcugcuauaa

SEQ ID NO: 861482 - RNA, 22 nt, Human
ucauucuugaucacuaguuagu

SEQ ID NO: 861483 - RNA, 22 nt, Human
ucaauucugguccucaggaacu

SEQ ID NO: 861484 - RNA, 22 nt, Human
cagggagggaggaaaauuugcu

SEQ ID NO: 861485 - RNA, 19 nt, Human
uggggcuguguuuugaccc

SEQ ID NO: 861486 - RNA, 22 nt, Human
uuauuugcccauguuuagcaga

SEQ ID NO: 861487 - RNA, 22 nt, Human
ccuggagagagaggccaacugc

SEQ ID NO: 861488 - RNA, 22 nt, Human
gacagcugugcaggagaagggg

SEQ ID NO: 861489 - RNA, 22 nt, Human
uucugugauugacauguggcuu

SEQ ID NO: 861490 - RNA, 22 nt, Human
cggagaggugggggcagcaucu

SEQ ID NO: 861491 - RNA, 22 nt, Human
gacagaggcuggagcaccuccu

SEQ ID NO: 861492 - RNA, 22 nt, Human
acaauuccacauggcaugcagg

SEQ ID NO: 861493 - RNA, 22 nt, Human
uucuauacaaagauuucucaca

SEQ ID NO: 861494 - RNA, 23 nt, Human
uuucuucagaagccuugcgaggc

SEQ ID NO: 861495 - RNA, 22 nt, Human
caggcagcguccugcuuccugu

SEQ ID NO: 861496 - RNA, 22 nt, Human
ccuauacagccucagcugagau

SEQ ID NO: 861497 - RNA, 22 nt, Human
acccaggacacagagaugaccc

SEQ ID NO: 861498 - RNA, 22 nt, Human
uugaauaauguguauguuguua

SEQ ID NO: 861499 - RNA, 22 nt, Human
aaugaaacuguauauagacugu

SEQ ID NO: 861500 - RNA, 22 nt, Human
uuuuuuaguuaggucagaaugu

SEQ ID NO: 861501 - RNA, 20 nt, Human
gaagcagcuucauguagaca

SEQ ID NO: 861502 - RNA, 22 nt, Human
auugaaaauaaggccagaaaca

SEQ ID NO: 861503 - RNA, 22 nt, Human
aauacaguagguaauaguucau

SEQ ID NO: 861504 - RNA, 22 nt, Human
auauucuugugauuauaaagua

SEQ ID NO: 861505 - RNA, 21 nt, Human
ccauaccuaccucaccugguu

SEQ ID NO: 861506 - RNA, 22 nt, Human
auucuucaucagagaugcacua

SEQ ID NO: 861507 - RNA, 17 nt, Human
uaaguccuaguuauuuu

SEQ ID NO: 861508 - RNA, 22 nt, Human
uggcuuaagauuuaugcuuuua

SEQ ID NO: 861509 - RNA, 22 nt, Human
agacccagaaagcagcugcauu

SEQ ID NO: 861510 - RNA, 22 nt, Human
aguccaugguucugacucaucu

SEQ ID NO: 861511 - RNA, 22 nt, Human
aaauauaguaaaugcauaguuc

SEQ ID NO: 861512 - RNA, 22 nt, Human
caggcagcucgaugccuuguug

SEQ ID NO: 861513 - RNA, 20 nt, Human
ucuggcaggugaacgagcug

SEQ ID NO: 861514 - RNA, 22 nt, Human
augcuuaacucuguacauaguu

SEQ ID NO: 861515 - RNA, 22 nt, Human
agcagccuuugaucaucuggga

SEQ ID NO: 861516 - RNA, 22 nt, Human
caaggccaagguuuugugaacu

SEQ ID NO: 861517 - RNA, 22 nt, Human
accaggagggacccugguggcc

SEQ ID NO: 861518 - RNA, 22 nt, Human
acucaggaaaugaagacugguu

SEQ ID NO: 861519 - RNA, 19 nt, Human
ugcuuaauuccuaguaggu

SEQ ID NO: 861520 - RNA, 22 nt, Human
uucaggauaguggugaguggca

SEQ ID NO: 861521 - RNA, 22 nt, Human
uuagccauugucagcacauggc

SEQ ID NO: 861522 - RNA, 22 nt, Human
ugagaacugaggauuugaauuc

SEQ ID NO: 861523 - RNA, 22 nt, Human
cugcugugcacccaggaaggcu

SEQ ID NO: 861524 - RNA, 20 nt, Human
uuccaacucacaucucuaca

SEQ ID NO: 861525 - RNA, 22 nt, Human
auguuucaaugcacuuuagccu

SEQ ID NO: 861526 - RNA, 22 nt, Human
ccuggauccaugaaaaggcuac

SEQ ID NO: 861527 - RNA, 22 nt, Human
uaagaaucuauuaggaauaugu

SEQ ID NO: 861528 - RNA, 22 nt, Human
uuuggacaaguuacugguuucc

SEQ ID NO: 861529 - RNA, 22 nt, Human
aaaacaguuuaggcaucacagu

SEQ ID NO: 861530 - RNA, 22 nt, Human
uucaggauccccuugaugggcu

SEQ ID NO: 861531 - RNA, 22 nt, Human
caaagccaggcuuucuaaugua

SEQ ID NO: 861532 - RNA, 22 nt, Human
auugcuaggaacagguugcacc

SEQ ID NO: 861533 - RNA, 22 nt, Human
cagugaaaucacaacuuuaguu

SEQ ID NO: 861534 - RNA, 22 nt, Human
cugcuucugggaugauggagua

SEQ ID NO: 861535 - RNA, 22 nt, Human
acaaauauuuacugaauccacu

SEQ ID NO: 861536 - RNA, 22 nt, Human
uccaggaguggggcagaggucu

SEQ ID NO: 861537 - RNA, 22 nt, Human
gcauguguugguuuaugcaugu

SEQ ID NO: 861538 - RNA, 22 nt, Human
ugccaggauauaagagugcgau

SEQ ID NO: 861539 - RNA, 22 nt, Human
uuauuuaaugugaucugaagag

SEQ ID NO: 861540 - RNA, 23 nt, Human
cauuucaacgaauuuuccuucug

SEQ ID NO: 861541 - RNA, 23 nt, Human
auauggcuguuguguguuaacau

SEQ ID NO: 861542 - RNA, 22 nt, Human
ccaggacagugaacauguaaga

SEQ ID NO: 861543 - RNA, 22 nt, Human
uucagaaagguaaauggauuuc

SEQ ID NO: 861544 - RNA, 22 nt, Human
cauagcuuagggguuaaacuca

SEQ ID NO: 861545 - RNA, 22 nt, Human
cagaauaaaagucccaaggcau

SEQ ID NO: 861546 - RNA, 22 nt, Human
uuugcacuagcauuuguccaug

SEQ ID NO: 861547 - RNA, 22 nt, Human
gcagagaacccagcagauuggc

SEQ ID NO: 861548 - RNA, 22 nt, Human
gaggccaggacaugaaagcuga

SEQ ID NO: 861549 - RNA, 22 nt, Human
aucuauacuacaaauggcuggu

SEQ ID NO: 861550 - RNA, 23 nt, Human
gaaucaguggcuaacaaggaaac

SEQ ID NO: 861551 - RNA, 22 nt, Human
guucuucaaagugacaacuaaa

SEQ ID NO: 861552 - RNA, 22 nt, Human
uggauuuaccacagggccacag

SEQ ID NO: 861553 - RNA, 22 nt, Human
acagaauuuaaagcucuagacu

SEQ ID NO: 861554 - RNA, 19 nt, Human
uagaggagaagggaagugg

SEQ ID NO: 861555 - RNA, 22 nt, Human
ggcauuuacauaaucuuauuua

SEQ ID NO: 861556 - RNA, 22 nt, Human
ucaaaauuagugaccaaaggca

SEQ ID NO: 861557 - RNA, 22 nt, Human
auagaaauguauuuuggacuag

SEQ ID NO: 861558 - RNA, 22 nt, Human
cagagggaaaaggggaguaaua

SEQ ID NO: 861559 - RNA, 23 nt, Human
uuuaacuuuccaauaauucauug

SEQ ID NO: 861560 - RNA, 22 nt, Human
ugucucugggugauucaguccu

SEQ ID NO: 861561 - RNA, 22 nt, Human
gggcagcuggccagguauucug

SEQ ID NO: 861562 - RNA, 22 nt, Human
cuggcuugcagcucaucauaaa

SEQ ID NO: 861563 - RNA, 22 nt, Human
guggcaggagagacacagccau

SEQ ID NO: 861564 - RNA, 22 nt, Human
gagaggauccacaaaccaggaa

SEQ ID NO: 861565 - RNA, 22 nt, Human
ucugaaagaagggcagucuuuu

SEQ ID NO: 861566 - RNA, 22 nt, Human
uggauuuauuagguuggugaaa

SEQ ID NO: 861567 - RNA, 20 nt, Human
aagcacauuucuacaauaau

SEQ ID NO: 861568 - RNA, 19 nt, Human
gaggucagcaagaaguauu

SEQ ID NO: 861569 - RNA, 22 nt, Human
agaaaacuugucacagcucuca

SEQ ID NO: 861570 - RNA, 22 nt, Human
ccaggagagcucuaaauggcug

SEQ ID NO: 861571 - RNA, 15 nt, Human
uggcagcuuguuaag

SEQ ID NO: 861572 - RNA, 22 nt, Human
uuuaucuuuaggacuuugcaga

SEQ ID NO: 861573 - RNA, 19 nt, Human
gccaggagggcucuggcug

SEQ ID NO: 861574 - RNA, 22 nt, Human
guuccaaacaagucauaaagua

SEQ ID NO: 861575 - RNA, 22 nt, Human
ucaccgccuugcccggccgggc

SEQ ID NO: 861576 - RNA, 22 nt, Human
auauuguugacuauaagaguaa

SEQ ID NO: 861577 - RNA, 22 nt, Human
cagcucccgccaucgggaggca

SEQ ID NO: 861578 - RNA, 22 nt, Human
uugaauaauauguucaggagga

SEQ ID NO: 861579 - RNA, 22 nt, Human
uuuaacagaugcuaugucuacc

SEQ ID NO: 861580 - RNA, 22 nt, Human
agaggcaggagguugacuugag

SEQ ID NO: 861581 - RNA, 22 nt, Human
aggucagcaugaguagaaggua

SEQ ID NO: 861582 - RNA, 22 nt, Human
gaggcaacacauuuggaaagca

SEQ ID NO: 861583 - RNA, 22 nt, Human
auucaaauuaaguuaauucagc

SEQ ID NO: 861584 - RNA, 22 nt, Human
ucuucagagugaaagucuguga

SEQ ID NO: 861585 - RNA, 21 nt, Human
auaagcaugcugauuacauuu

SEQ ID NO: 861586 - RNA, 22 nt, Human
uucuucaaaacaacacuggccu

SEQ ID NO: 861587 - RNA, 22 nt, Human
aaagccagagcaagcugucaca

SEQ ID NO: 861588 - RNA, 22 nt, Human
agauaaugaaugccaugacauu

SEQ ID NO: 861589 - RNA, 22 nt, Human
auggagacgcaagggaccuagg

SEQ ID NO: 861590 - RNA, 22 nt, Human
cucaucugauaaaucacucuua

SEQ ID NO: 861591 - RNA, 22 nt, Human
acagaauucuaguauguggcuu

SEQ ID NO: 861592 - RNA, 22 nt, Human
cccaugagauucugaauuuggc

SEQ ID NO: 861593 - RNA, 20 nt, Human
auccaugagagucuggauuc

SEQ ID NO: 861594 - RNA, 18 nt, Human
aggcagacacuagagguc

SEQ ID NO: 861595 - RNA, 22 nt, Human
agaauaaucacugaaguucaaa

SEQ ID NO: 861596 - RNA, 23 nt, Human
gaggcagcuccugcagugcccug

SEQ ID NO: 861597 - RNA, 22 nt, Human
ggcaggcagaggcugagacagg
